United States Patent Application Publication US 2023/0272435 A1 - sequence listing, part 6

SEQ ID NO: 20265 - protein, 501 aa, synthetic construct
MIIREDAIYGRQSVDRKDSISIESQIEFCKYELRGGNFRKYTDKGYSGKNTDRPKFQEMMADIRRGLIKRVVVYKLDRISRSILDFATMMETFQEYNVEFVSSTEKFDTSTPMGRAMLNICIVFAQLERETIQKRVTDAYYSRCQHGFHMSGAAPYGFQLEPTTIEGIRTKMMKPDPETADIAKLMFEMYSQPATSFGDIARYFADEGILIYGKEMKRGFISQLLRNPIYAQADLDMYEFFKSQGTVVVNEATDFAGTNGCYLYQGRDVQERKNKHLKDQILVLAPSEGLVSSDTWLRCRKKLMANKTFQGGRKAKNTWLAGKVKCGRCGYALMSVGNPTGVQYLRCSKRADSKSCDGCGTLRTREFERFLYGEMVKKLSEFQTLTAKRETVNPKLTALNMELARVEDEIEKLLNTLTGANAVLLSYANSKIEELDTRRQALTKEIAALSAETMSPEQIERLSVYLNQWEEIDFEDRRQVADGLISQIRATDEHVSIEWKI

SEQ ID NO: 20266 - protein, 540 aa, synthetic construct
MKQPYNTTIYNTALYLRLSRDDELQGESGSIQTQRMMLRQYAAEHGLTVVDEYIDDGWSGTNFERPSFQRMIDDIEDGKINCVVTKDLSRLGRNYILTGQYTEIYFPSKGVRYIAINDNVDTINGESELAPFLNILNEMHARQTSKKVKAAMHTRFANGAHYGAYAPLGYVKDPDKKGHLLIDPETRWIVEKIFDLAVHGRGAASITRILVEEKVPTPGWLNYERYGTFANIYAGAPAEKAYAWTIAQVKSILKEETYIGHSVHNKQSNISFKNKKKVRKPQEEWYRVENTHEAIISEEVFQKVQELIASRRRKRRNGTTQIFAGLIKCADCGWSLAYGENKQNKNPYGYYHCSKNGQGLRQCSMHYIRYDVLYAYVLARLQYWSMMVQKDEDKLLKRLLNASDRERNSAKKKQAAELKKAEKRKAEVDGLFAKMYEDWSAGRITEYNFNMLSEKYQNEQKELETKIRQLHEMMEAAVQTAADAEKWIALMKQYVNPVELTAELLNTLIEKITVHEAVKGEDGSREQEVEIYYRFIGKID

SEQ ID NO: 20267 - protein, 558 aa, synthetic construct
MNRYGKRCVLYPRVSTEMQVDGYSLEGQKNMLTRFADREEMIVVDTYEDAGKSGKSIEGRPAFQKMLRDIEDGLDIDYILVYKLSRFGRNAADILNSLELVQSYGVNLICIEEGIDSSQTSGKLLISVLSAVAEIERENIIEQTMNGRREKARQGGWNGGFAPYGYTLEDNKLMIEETEAVAIRKIFELYTSSEIGLGGIANQLNLQGIRKIPRQNGTLEDWTGHFIKLILDNPVYCGKIAYGRRTKEKVKGTKNDYQMKRNDDYILTEGQHKGIVSEEVWEKAHAKRLRTGVKQPSKIGRDRVHLLSGLLKCPVCGSPMYTNKHAWTNKDGTYKEIYYYVCSRNRMVRGKHCEYKAMLKKTDIEPMVIEAIREIVRNEEYAQAIKKRIGVQIDTKAVDKELEGYQAKLKEVDLNKTRLEREIDSLPADAKYRERKLHDMTLRLDSLYDVIVELEEKIEDARLRRDAIKQQAITLENIYKIMVNFDCVYNIINDEEKRNVVTALIKEIEIYRNDESEYPLKRIGLNFPVFKDGGEVTELLWDKGNTVETVTLLTRKAR

SEQ ID NO: 20268 - protein, 509 aa, synthetic construct
MKAAIYARYSSDNQREESIEAQVRAIKEYADKNGIIITKVYTDEAKSATTDNRPKFLEMIKDSEFRLFDAVIVHKLDRFSRDRYDSAYYKRVLKKNGVRLISVLEHLDDSPESIILESVLQGMAEYYSKNLAREVMKGMKETALQCKHTGGIPPLGYNVDPETKRYVVNADEAKAVKIIFEMYAEGYGYNQIIDKLNHLGYKTKLGRNFGKNSLSEILRNEKYIGTFVFNKVPKMMDGKRNSHRTKKPEDIIKIPNGVPAIIDRETFDKVAKRMLGNKRNATNKAKEPYILSGKIFCGSCGSAMVGHTSYAGRNKSKYSTYNCGTRYRTKQCKMKNISKDFIEDITLTEIKNKILNPTSIKSLTKKLIAYYEKMMDSNTDELKDLEKRLKEIQFEIDNIVEAISKGMFHISFKEKMDNLEAEKNKISNYINEIKATMNSSELNEKLIEQYLIKDIKAINKKSANDLKTIINTYVESVFVYDDKVEINLILFFVHINGGGERSRTAVRKK

SEQ ID NO: 20269 - protein, 506 aa, synthetic construct
MRSVITYLRFSSAIQGAEGADSTRRQNDLFKQWLKKNSDAQVVASFSDEGLSGYKGKHLTGQFGDMLARIESGEFPEGTILLVESIDRIGRLEHLETEALMNRILGNGLEIHTLQDGLIYTKDALADDLGISIIQRVKAYIAHQESKQKSFRVSEKWKQRAKLALAGEQRLTKMVPGWIDPDTLKLNEHAETVRLIFKLLLSGESLHNIARHLQSNGIKSFSRRKDANGFSVHSVRTILRSETTIGTLPASQRNDRPAIPNYYEAAIDAATFNKAQEILDKNRKGRTPASDNPLTINIFKGLFRCQCGASVHPTGTKNKYAGVYRCNNHLDGRCDVPPLKRKPFDKWMLENFLGMIDVGNDGEAEGKIASLQYEVEIVTTRIKKATALLLEMDDIDELKIQLKELNQRRTELQTTIDNMRRKASLTDKELPQLKDIDLMTKAGRVECQLILSKHLKGLTLGKDSVTVTLQNDTEITIPTNPLPLNDGSPIFEIADKELLDIDAYQL

SEQ ID NO: 20270 - protein, 559 aa, synthetic construct
MKTKLYSYIRFSSMKQADGSSYERQKRTAAEIAAKYDLELVTSYQDFGVSAFKGANSRTGALSRFLDEIGRSVPVGSWLVVENLDRISRQSIIEAQELFLSIIRRGITIVTGMDGKVYSKESVNANPIDLLLSVMLFARANEESQTKRNRTNSSALIKIKAHQENPQNPAVAIEEIGKNMWWTDTTSGYVLPHPVFFPIVQEVVELRRNGRSTAEILDHLNATYTPPPAASHKRHSNWSRAMIERLFHTRALIGIKEISVDGVKYELKDYYPRVLDDAEFYHLKKSIGVRACNYGDKEEVKPIPLLSGVGLLKCEHCGSAMVKVKGTNKRPNQYRYSCDAMRSSRIACVHTNWSFRGDQLEKAVLQLLADKIWIAEDKANPVPALKVQIDEISRKIDNLITLSAMTGATKELADQITTLNSERETLYNQIKMAEEEMYSVDSQGWEKLAEFDLEDVYNEERIKVRFKIKQALKRIGCSRIDKYKNLFVLEYIDGKTQRVVIENSRGPRKGRIFVDLKTINDRQILESNGLVLHPCLDMLTDKNWKPEEEIPGPLQEFGI

SEQ ID NO: 20271 - protein, 506 aa, synthetic construct
MRSVITYLRYSSAIQGAEGADSTRRQNELFKQWLKKNSDAQIVASFSDEGLSGYKGKHLTGQFGDMLARIESGEFPQGAILLVESIDRIGRLEHLETEALMNRIIAHGIEIHTLQDGLIYTRDALSDDLGISIIQRVKSYLAHQESKQKSFRVSEKWKQRAKLALAGEQRLTKMVPGWIDPETFKLNEHAETVRLIFKLLLDGESLHNIARHLQSNDIKSFSRRKDANGFSVHSVRTVLRSESVIGTLPASQRNDRPAIPNYYEAAIDAATFNKAQEILDKNRKGRTPASDNPLTINIFKGLFRCQCGASVHPTGTKNKYAGVYRCNNHLDGRCDVPPLKRKPFDKWMIDNFLGMIDVGNDGEAEGKITSLQHEVEIVTARIKKATALLLEMDDIDELKIQLKELNQKRTELQTTIDNMRRKASLTDKELPQLKDIDLTTKAGRVECQLILSKHLKGLTLGKDSVIVTLQNDTEITIPTDPLPLNDGTSIFEIAEKNLLNIDTFQL

SEQ ID NO: 20272 - protein, 338 aa, synthetic construct
MRSVITYLRFSSAIQGAEGADSTRRQNDLFKQWLKKNSDAQVVASFSDEGLSGYKGKHLTGQFGDMLARIESGEFPEGTLLLVEAIDRIGRLEHLETEALMNRIIAHGIEIHTLQDGLIYTRDALSDDLGISIIQRVKSYVAHQESKQKSFRVSQKWKQRAKLALAGEQRLTKMVPGWIDPDTFKCNEHAETVRLIFKLLLDGESLHNIARHLQANNISSFSRRKDANGFSVHSVRTILRSETTIGTLPASQRNDRPAIPNYYEAAIDVSTFNKAQEILDKNRKGRTPASDNPLTINIFKGLFRCQCGASVHPTGTKNKYAGFTGAITILTVAVMFHR

SEQ ID NO: 20273 - protein, 503 aa, synthetic construct
MNNRIDAIYARQSVDKKDSISIESQIEFCKYELKGGNCKEYKDKGYSGKNTERPQFQQLMRDIESGLVRKVVVYKLDRISRSILDFAKMMDFFQKYEVEFVSSTEKFDTSTPMGRAMLNICIVFAQLERETIQKRVTDAYYSRSQRGFKMGGKAPYGFHTEPIKMDGINTKKLVVNPDEAANIRLMFEMYAQPTTSYGDITRYFAEQGILFNGKELIRPTLAQMLRNPVYVQTDLDVYEFFKSQGTVIANDAADFTGMNGCYLYQGRGVKPSKKNDLKDQMLVLAPHEGIVPSDIWLTCRKKLMNNMKIQSARKATHTWLAGKIKCGNCGYALMSINNPVGKQYLRCTKRLDNKSCAGCGKIITSELEAVVYQQMVKKLASYKTLTGRKKAAKTNPKIAALQVELLHVDSEIEKLVDSLTGANNVLLSYVNVKIAELDGRKQELVKQIAELTVEAISPEQVNQISGYLDTWDNVSFDDKRRVVDLMITTIAATSDSLNITWKI

SEQ ID NO: 20274 - protein, 481 aa, synthetic construct
MITTNKVAIYVRVSTTNQVEEGYSIDEQKDKLSSYCDIKDWNVYKVYTDGGFSGSNTDRPALESLIKDAKKRKFDTVLVYKLDRLSRSQKDTLHLIEDVFIKNGIEFLSLQENFDTSTPFGKAMIGLLSVFAQLEREQIKERMQLGKIGRAKAGKSMMWAKTSYGYDYHREIGTITINPAQALAIKFIFESYLRGRSITKLRDDLNEKYPKHVPWSYRAVRTILDNPVYCGFNQYKGEIYPGNHESIISKEEYDKTQSELKIRQRTAAENVNPRPFQAKYILSGIAQCGYCGAPLKIMLGVKRKDGSRLKKYECHQRHPRTLRGVTTYNDNKKCDSGFYYKDKLEAYVLTEISKLQDNAGYLDKIFSGDNAETIDRESYKKQIEELSKKLSRLNDLYIDDRITLEELQSKSAEFISMRGTLETELENDPALRKNKRKADMRKLLNAEKIFSMDYEGQKVLVRGLINKVQVTAEDIVINWKI

SEQ ID NO: 20275 - protein, 563 aa, synthetic construct
MKKSAIYIRVSTHHQIDKDSLPLQKNDLINYSKFILSINDYEIFEDAGYSGKNTDRPAFQEMMNRIRNGEFTHLLVWKIDRISRNLLDFCDMYEEIKKNNCIFVSKNEQFDTSSAMGEAMLKIILVFAELERKLTGERVTSVMLDRATKGLWNGAPVPLGYKWCEETKFPIIDENERLTVEFIYNKYLETESTSAVRNALNAESIKTKRGGAWTTKTISDIIRNPFYKGTYRYNYRESARGKKKNEKEWIIVDDNHSSIINKELWSKCNTIMDENAERNSARFRSNSKTHVFARLLECGECNRNLYAKQDKPSLDGFIPSLYICSGRYNGLGCSQKTISDKIIGTFILNYVSNIIRLHKTLKLSQLKVDELEKLLLKGKPFENVVGIKNKSLNELYFALTQYTKGDKRIFMPKENKILEIEDDSSVEKLLRERNKFERALSRLEDLFLFDENEMSEKDYILKKNKIKEKLNEINKKMNELNSIKNIGSVYELDFLISSSKNAILFEELTQSKSIDYNNLIKETDRKVIKSFINAIITKIVVKDKNILSVKFKNGLVTEFIYNN

SEQ ID NO: 20276 - protein, 501 aa, synthetic construct
MKAAAYCRFSSDNQREESIDAQLRAIKEYAEKNNIEIVKIYADEAKSATTDDRPQFLQMIKDSEIGIFKAVIVHKLDRFARNRYDSAFYKRQLKKNGVIIISVLEQLDDSPESIILESVLEGMAEYYSKNLAREVMKGLKENAFNAKFNGGIPPLGYKIVNGEYHINNEEAEAIKLIFDLYAKGYGYRHIIDELNLKGYKTKNGNSFSKNSLYGILRNEKYTGKYIFNKGTKTNHRITKEDVIIIDNAIPAIIDKDLFEKVQKKINERKIERGANTAKRTYLLSGLVYCGICGSKMVGCLSRGKYVTYRCNRKDRTKQCTNKDINKDRLEVFIVEELNKKIFDPEVAPILAKLLNEENQKLNKEKFEKIAALKKNYNKIESQIRNIVDAIAEGMYQPIMKEKMRELEDKKNEILYSLSEIEKKKETSFITPEIIMEIFDADREVINSSNNPQKIKEVLKKYIKKVIVHPNEIKCEFYFWIGDDFRSLEVAASGVEPPTLRV

SEQ ID NO: 20277 - protein, 522 aa, synthetic construct
MRKVTRIDGNNALQAFKPKVRVAAYCRVSTDSDEQMASLEAQKDHYESYIRANPDWEFAGIYYDEGISGTKKENRTGLLRLLADCENKKIDFIITKSVSRFARNTTDCIEMVRKLTDLGVFIYFEKENINTQRMEGELVLTILSSLAENESLSIAENSKWSIRRRFQNGTYKIAYPPYGYDYVDGKLLINKEQAEIIKRIFSEALAGKGTQKIADGLNLDKIPTKRGSHWTATTIRGILSNEKYTGDVLLQKTYTDENFKRHYNRGEKDQYMIKDHHEAIISHEEFETAQEILKQRAKEKGVIKGSSKYQKRYPFSGKIKCAECGSNFKRRIHGSGDRKYIAWCCTKHIKDASSCSMKFVREDAIHQAFVVMINKLIFGHKFILRPLLQSLKKTNYSDNITKIQEMETKIKENTERVQVIMGLMAKGYLEPALFNTQKNELLKEAALLKEQKEAIKRTIDGSQTILVEVEKLLKFATKAEKQIDAFDSEIFEDFTREIIVFSQEEIGFKMKCGLNLRERMVR

SEQ ID NO: 20278 - protein, 522 aa, synthetic construct
MTTRNVTVIPARKRIGNSANAEELPKLRVAAYCRVSTDSEEQATSYEAQIEHYTNYIKSNPEWELAGIFADEGITGTNTKKREEFNRMIEECMQGKIDMIITKSISRFARNTLDCLKYIRQLKEKNIPVYFEKENINTLDSKGEILLTIMASLAQQESQSLSQNVKLGIQYRYQQGKIHINHNRFLGYTKDKDGNLVIVPEEAEIVKRIYREYLEGSSMLQIARGLEADGILTGAGNPRWHTSTINKILRNEKYIGDALLQKTYTVDFLSKKRVPNNGIVPQYYVENSHEPIIPREIFMQVQEQLVKRRCVHISKNGKKRNYSNKHPLSQMVFCGNCHEIFRRVHWNNRGKKSIVWRCISRLENTGLFCTASTILEDTLKEKIVEAINVAVSGKNSFLAILKKNIETVLSEDLDESTADIDKRLEELQTELIQLANSKEAYDNIVNEIYRLRDLRQETLSRNALRQDKRDRIAEMTDFFNTQTGDITEFDDKLVRKLVEKATVYNDRLVVEFKSGLEIEINL

SEQ ID NO: 20279 - protein, 546 aa, synthetic construct
MRAVIYARVSTQDQALGFSLATQKELCEKKARALGALEVEVVEDAYTGTELNRPSLDYVRQLVAAGKVDLVVVYDPDRLSRNLTDLLILCREFDKAGAKLEFVNFEWQKTPQGMLFLQMRGAFAEFEHALIKERTQRGKAKKAASGKIRCYAKPFGYDWDAERDTLVVNPQEAEIVKQMFEWLTDPLEPLTPWQITQKLGQVYPQGPRGKGWVHSSVVRMLKNPVYTGRLRRKDEHPDWKPVLVPAIIDQETFMRAHEMLTRSKRFNPKTTRRRFLLQRLLVCGECGRRLTVVTHNNPQKAKYSYYTCPGRYPTKFDDQGRVGRCGLPPWRTEEIDKTVWDTIASIIKNPELFYQYITSEKLETASIPRRRLEEARKRLEQVQRVIERIDRAYFILEALPEEDYKRYRAEQEGELIRIEEDIKRLEAVINAQEQVQKGVEFLRQYAENLARSVDELNFFQKQNITRELVQRVKIYADGSLEIEGYFNLPFTGPGKNLPNHCEELTILTPQKNLKEPLSSSVLTCTHRKKGHPKVAEGIIHLTILAV

SEQ ID NO: 20280 - protein, 526 aa, synthetic construct
MAKRVTTIPATISRVTAQPIGNARKRRVAGYARVSTELEEQQTSYEAQMDYYSNYIQSRDDWVFVGMYSDEGISATSTARREGFKQMVEDALEGKIDLIITKSVSRFARNTVDSLTTVRKLKEKGVEIYFEKENIWTLDAKGELLITIMSSLAQEESRSISENTTWGQRKRFADGKASVAYKRFLGYDRGHNGGFVVNEEQAKIVRYIYKCFLEGMSYYKISLRLMEIGAQTPGGQKKWHAKTVESILTNEKYKGDALLQKYYTVDFLSKRMKKNEGEVPQYYVENNHEAIIEPATFDLVQAEIMKRAKGKNRYSGVGLFASKIKCGECGSWYGAKVWHSNDKYRKVIYRCNQKFNNEKKCKTPHITEEEAKESFISAVNQLITEKEEVIANVKLLCQTFYNTESLEQQLTTFEEELKVLVEMMQNCINENANTVQDQEIYQRRYNQLVDQYDARKREYDKITEMISNKKAKVEILKSFIKKLQKQERMINEFDKSLWSSLVDFITVYNKEDIRVTFKNGVEIKKY

SEQ ID NO: 20281 - protein, 523 aa, synthetic construct
MRKISKIGADIPKLKPKKKVAAYARVSKDTEVLLHSFSAQVSYYSSLIQKNPEWTYVGVYADEGITGTNTEKRDDFKRLVADCDAGKIDIVLTKSISRFARNTVDLLETVRHLKDIGVEVRFERENISSMSGDGELLLTILASFAQEESRSMSENIKWAIKKGFEKGEPHSASRAFGYEWDGDQYIIVPDEAEAVRFIFEQYLAGTSTLQLPKLLNKKGVVGINGNPLTRASIKDILQNEIYIGNLVLQKSYSPKIRKKTLNYGELPKYRVEEAHEPIISKELYEEVERARVERGKTAPNKNKQITCFTGKVQCGKCRYKCSRRNITHSKTTERSSYKRWTCNARETKGIKFCDLHPVDEDLLRTASAHILGNKELDEERFQKEIDRILVFDGRIEFYFKNGKIKKWERDYSSMPRGRTCFTGKIRCGKCGSKCIRNPIAHSKTTIREYYERWTCDGQRKHKMAYCDLKSLNEDELRMATVALLGDKANYEVRFIQEVEEVILFDDKAKFNFKDGRKLEWQRE

SEQ ID NO: 20282 - protein, 525 aa, synthetic construct
MLDPNGIYFAYLRKSREDREAELHGYGETLKRHQRMLEDLAEYHNIKIAKFYSEVVSGETIASRPQMLAMLDDIESLSPDGVLVVEIERLARGDTRDQGLVLETFKYSGTRIITPMKIYDPMDERDEEYAEFGLFMSRREYKTINRRLRNGKIASFNEGKWTGNKAPFGYERVKLSGEKGFTLKIIPENADVVRLIFQLFIYGSNASNNIPVGTSKICRILDNLHISPPIGETWQPCTIRQILSNPTYIGKVHMGRRSTQKKTLNGVVKISRPINKNAKIADGLHPAIIDDALFLKAQEKRKANYQKPFFEGIKNPLAGLIYCSVCGKSMYRRPAGKRCKEDMIQCTTHGCPTSASYYHYIEEKLLVSLNKWLEDYRIQVKDISPENYAQQLNLLQSQLNAAQNESETSKKQLSKAMDLLEKDIYSVEMFQQRASELNEKIALSSRSISDLSVKIDSIRTKAVQKEEVIARWERILSLYPQVDDPAVKNALMKELLTRIEYSKPHKGNRQNGGMDQFTLKLFPRL

SEQ ID NO: 20283 - protein, 558 aa, synthetic construct
MTKLYSYIRFSSMRQSDGSSYERQIRMAKEIADRYNLELVNDYQDLGVSAFKGANSKTGALSRFLDEIGRSIPVGSWLFIENLDRLSRQDIISAQELFLSIIRRGITIVTGMDNKIYSIETVTANPMDLMFSILLFIRGNEESQTKRNRTNSSALLKIKAHQQNPQSPAVAIEEIGKNMWWTDTTSGRVLPHPVYFPVLQKIVQLRQEGHSAGVILDYLNEHHEPPAPTSNKKHGKWSRAMVSRLFNTKALIGVKTVNVDGVEYELRDYYPRVLSDSEFYFLRKNIIKKAWDYSHVKEKVIPLLSGIGVLRCVHCGATMVKQTAANGKREQYRYCCDGRKSGRTDCPYPNWGFRAVTLEGAVLQLLADKIWIAEDKTNPIPEIQVKIDEISRKIDNLINLSAMTGATKELANQITDLNSQREALHEEIRLFEREMYSVDSQGWDKLAQFDLSDVQNEERLKVRLKIKGALHEIECSRIDSKKNLFVLVYLDGLRQRLVIENNRGLKKGQIFVDLKTINDRQILESAGMVLHPCIEMIIDADWKAPEEIPGLLSEEFGI

SEQ ID NO: 20284 - protein, 520 aa, synthetic construct
MKKAVYCYARVSSRGQAKDGYGMSRQQTMLRDYVAAYDDSQHSRGYELGDITWLYAEGVSAYSGKNIEDGSVLKTFINDVLQKKITNSVLVIENLDRFSRAAPNRAAGLFLSLINAGCDIHEVEAEMIHHQYSDLNIISGGLQRAHNESKRKARLSIKNWDERIKNTIDGTSVLTHRVPSWIEVKNNKYVIKKGESEKYNLIFNMYADGFGPAAIRDELKNRRMQINEREPTIHHLMKIIKDQRLIGRFNSTGRKVLDGMPIYPVVVEPELFELVNDLRKQRNPLGKINVKANNLFAGLCICMNCGRYVQINSVDKKGNTYFRCGGSLVKIDKCKERGFKYKIVENALLEHLRNFDFSMLRREDNEIQVKINYLSMELVANENYSNEILADLEKEDIPDPHDRRILKNIQRRISEIRTEITTLKQSHIGYETFNDLKDSYTDDLLDPKNTKLRLDFNVKVKRVIKNIKMKRYDDTIMLVVSYVGVNEKQAMVINSKTGEVVFMAVQNDDLKSIEYLINND

SEQ ID NO: 20285 - protein, 524 aa, synthetic construct
MRKVMKIEANGDRFVSSLKLRVAAYCRVSTDNDDQLLSLEAQKQHYEKIIRDNPEWEFAGLYCDEGISGTKKENREGLLRLLRDCEKHKIDFIITKSISRFARNTADCLEIVRRLSELGIFIYFEKENINTHSMDSELLLSVLSSLAENESVSISQNNKWGVKRRFQNGTFKLSSPPYGYIYCNGTIVPHPEEAAVVKRIFAEILTGRGTHAVAEGLNADGINPARGKKWTASAVRGILENEKYVGDSLFQKTYTDDNFIRHYNHGEEEMYYIKDHHEAIISREDFEAAKRILAQRSREKGIEKGTGKYLNRYAFSGRIICGECGSVFKRRIHMANKPGQYVAWCCSKHIASKTKDCSMVYIRDDRIKEAFVLMMNKLYSNHNIILKPLVEAMKEQDASGSYAKIREIDAKIEENAERAQILVSFLTKGYLDPVLFNKQNNELKAETARLREQRAALAASSAGGLSALSEAEALLKYLSKEGGIIEEFDEFLFERFVEGITVFSPAEIGFRMKCGLVLKERIER

SEQ ID NO: 20286 - protein, 520 aa, synthetic construct
MKKVTKIAQNTADFTERPKLRVAAYCRVSTDSDEQLVSLETQIRHYESYINANPDWEFAGLYYDEGITGTKKEKRHELLRMISDCENKKIDFIVTKSISRFARNTTDCLELVRKLIDLGIFIYFEKENINTGSMESELMLSILSGLAESESVSISENNKWSVKRRFQSGTFKISYPPYGYDAVDGKMVVNESQAEIVRFIFAEILSGKGTHKIADDLNRRKVPTKKGGRWTATTIRGMVSNEKYTGDAIFQKTYTDEHFNRHNNYGEKDQYLIKNHHEPIISHEDFEAAQMIIEQRGKEKGVVKYNEKYQSRYPFSGKIICGQCGSKFKRRIHGSGRKYIAWCCSTHIADIKKCPMKYIPESDFEYAFVTMMNKLIFGHETVLKPLLASLRGMNSDDSLTSIRELDKKLEENTEQRKVLVGLLTKGYLEPAVYNKGNNELLQEAERLHRQKESLVRFLNSDTQHLSEVSELLHYTTKTPMLTCFDRDIFKRFVERIIVYSRTEIGFELKCGITLKERLVK

SEQ ID NO: 20287 - protein, 573 aa, synthetic construct
MTNARVALYARFSSDLQSAASIEDQLRVWREHAERQGWRVMDSYSDRAISGASLLRPGIQDLMADAGRGQFDIVLAEAMDRLSRDQEDIAALFKRLRFANVSIVTLAEGEIGEMHIGLKGTMNALFLKDLADKTRRGLRGRVEAGRSGGGNSYGYDVVRQFGADGAAKTGERTINGAQAEVVRRIFREFAHGKSPRAIAVQLNKEKIPGPRGEGWSQSTINGNPERGTGILNNELYIGRLVWNRLHYIKDPATGKRVSRLNDPGKWVITEIPALRIIDDELWAAVKERQGNMRKATRPDMTREPSARRNSSGAEFWRHQRPKHLLTGLMRCGVCGGAYSKISATLFGCATARNKGTCDNRLNIRGDRLEAIVLDGLRHRLMDPALFREFTEAFVAEQNAASAQRRAHFSGMRDELKRIEHRKARIIDAIAEGMPASSLRDEMIRIEARKAELTDLLARETVPEPSLHPAMAELYREAVANLHEALQDPTTKDEAFSIIRTLIEAVILVPEGAELKVELRGALAGILRLASGGGNDKSPGAAATGLGSISVLEAQIKMVAGTHSHLYRTQVFRF

SEQ ID NO: 20288 - protein, 566 aa, synthetic construct
MAVRVALYARYSTDLQSDASVEDQLRICRARAEREGWTVVESYSDRAISGASMLRPGIQALMEDAGRRRFDVVLAEALDRLSRDQEDIAALYKRLRFAGVSIVTISEGEINEMHIGLKGTMNALALKDLAQKTHRGLLGRVEAGLSAGGRAYGYDVVRRTDHKGEPIRGERAINEAEAAVVRRIFTMAAEGASPIAIAKTLNGAKIPGPNGRAWQDTTIRGHANRGTGILRNELYIGVQVWNRMHYIKDPATGKRVSRMNPTTEWVREEVPHLRIVDQDLWDCVQQRLAAVRIASGAYKIDRAVFHERRRAKHVLTGKVFCGGCGGSFGAVGQDYLSCTAARKQGTCDNRRGIRRSELESLILDALRHQLMQPEHVAEFVAEYTAEYNRLNSERSAALASHKRELESVTRKLDGLIDAIAEGMRAPGLQQKLDTLEARKAELTRQIETAGISLPLLHPNLAETYRERVTDLHAALTREDGGTAALEAVRALIERVDVSPPDGDDTRSLPKIVLTGALAAMVGLALEPGSRASKAARVGAGVSGLFASSVMVVAGTGNHRELIPVCC

SEQ ID NO: 20289 - protein, 564 aa, synthetic construct
MAVRVALYARYSTDLQSDASVEDQLRICRARAEREGWTVVESYSDRAISGASMLRPGIQALMEDAGRRRFDVVLAEALDRLSRDQEDIAALYKRLRFAGVSIVTISEGEINEMHIGLKGTMNALALKDLAQKTHRGLLGRVEAGLSAGGRAYGYDVVRRTDHKGEPIRGERAINEAEAAVVRRIFTMAAEGASPIAIAKTLNGAKIPGPNGRAWQDTTIRGHANRGTGILRNELYIGVQVWNRMHYIKDPATGKRVSRMNPTTEWVREEVPHLRIVDQDLWDCVQQRLAAVRIASGAYKIDRAVFHERRRAKHVLTGKVFCGGCGGSFGAVGQDYLSCTAARKQGTCDNRRGIRRSELESLILDALRHQLMQPEHVAEFVAEYTAEYNRLNSERSAALASHKRELESVTRKLDGLIDAIAEGMRAPGLQQKLDTLEARKAELTRQIETAGISLPLLHPNLAETYRERVTDLHAALTREDGGTAALEAVRALIERVDVSPPDGDDTRSLPKIVLTGALAAMVGLALEPGSRASKAARVGAGVSGLFASSVMVVAGTGFEPVTFRL

SEQ ID NO: 20290 - protein, 545 aa, synthetic construct
MNQKKKYQRLEDVIKTGSKAAFYARYSTDQQDESMQVHSAKNVLEEYGCEWQEDNKYIDQKTSAVKNTAEQREEFQRLIRDARKKKFDFIISYKSDRIARNTKEHYEFRREMNKLGIPVILSSTKEIYTEGEIVPQTVKDALTQIEPAITAERTRDTFESKVERGEWIGGEAPYGFAYDKSTGDFITIEKEKKVVMEIFRLFKLGYGLQQITDKLSSGQWDVTQKWYKDKIKYIITNPFYSGYLTMNRYSKGKLNVNMSDWTWSEKQKSIQMFMSREEWEFCFRLYLQRRESHTGRKINTPFWLRDILFCEECQSPFRTKNQRTTNKRKSGEKIKYGKMIYECKKCKLKLEMETIHEKFKIHMVPIIKNTLEKHREDFIQKTKRNIEEECESISQTQQELENTQMKLLKNIYKLDVKISQLYEDVMTGKMEIDKSIEDQKDVDTQDEQVENPNNKLIEILLTGRSKKYSELEDGKRQQEMLEDKLKKLKNSIYVLETEVQDEIFHFSLEEEQIQSVRNFLLQFVQGVYVKKDLSLRYEVYENLIH

SEQ ID NO: 20291 - protein, 484 aa, synthetic construct
MNTYTSQYIAIYCRVSTDDQVKEGVSLEEQQERLQAYCKAMNWSEDVVLYIEDGFSGKNIDRPHLKKLIEDVKAKEIKKILVTKLDRMSRKLLDLLTLIDLFQEHDVSFVSISESFDTNTPSGRLTLQVLGAVSEFERERIRERVFENMHHAASKGKWLTQHPYGYRLENKELVIHEDEAKVVRDIFSWYTQEGHGFYAIAKKLNMLGIPSRQNKQWSIRSIKLLLSNPVYKGTLVWNRKDRSKKKEQIKQKEEWIIKENVVPNIVTEDVWHAAEKRMQQTSLSPRSQTSPHLLGGLLKCGKCGSGMSIGWSGSKNNRYRVYRCSANKNKGTCTSKQYRSEKLEELFKDGLSNLCESFRFSTHPSLSIQDQKNSVTNQVKIATAKKRYQRKVEAYASGLIELEDLQEEKRRLDTLNLALQPPSESNSNVNLSQLEEWIKNKLKNVHDALNFVPVEELKPLIQTIIEKVILNGEEELEIILHPII

SEQ ID NO: 20292 - protein, 615 aa, synthetic construct
MKPYDITATMFGTPTEDATVNVKDAVSLLRVSSKRQMDTAVDIDPDGLSIATQRRVVELKASSVGTHVVKEFLEPGYSAKTIDERPIFKELLHYLNTHPNIGFVIVYMRSRAFRNQYDAAMVQMHLQKRGIRLISAKEDFGEGPYAEAMEGMVDIMNGLTNKLQGLDIQTKMYEKARHGGTNGQARLGYLNVREEYDGKPFNTVRLDPKRAPLVKKAWELYATGEYTLERVADTMTDLGLTARANRRCPERPVSYKWYHRMFKDIYYLGFITYKGKGEQTQIFPGRHEPLIEQELFDRVQDVLNQRSLKGQRDRIHQHYLKGHLFCARCERQGRTSRLIYTEAKSRNGSYYGYFMCRARQDKLGCDLPLLPAELVEDTITDHYHTLALPADFIDSVRELLSQTLADEQGSVRTMHAQLAKRIKDLDQKEERLIDLAADDSLPQDKIRIRLRRIQSDRASAQAGLLSTTAELNTGGDILKSALGALSNPASYYQRADDTTRRFMNQTFYTKFLLDDEGVVDHCLNPPFDDFHQAKAAWNTAKPATLTDYLNAHPPQTQKRLPSRETPSHNLEPTLAGIVSVPGLSTASMVELRGIEPLTFSMRTRRATNCAIAPRR

SEQ ID NO: 20293 - protein, 515 aa, synthetic construct
MKTAIYLRKSRADLEAEARGEGETLAKHRTTLLKIAKEKNLNVLTVREEIVSGESLVKRPEMLALLEEIEDNKYDVVLCMDMDRLGRGGMKEQGIILETFKRSNTKIMTPRKTYDLNDEWDEEYSEFEAFMARKELKIITRRMQRGRIASVEAGNYLGTHAPYGYDIHRLNKRERTLTINSEEASVVRMIFEWYANEDMGANAIMRKLNELGYKSKLGNDWNPYSILDMLKNSVYIGKVTWQKRKEVKRPDDTKRSCARQDKSEWIIADGKHEPIISESLFEKIQEKLSTRYHVPYNTNGLKNPLAGIIKCGKCGYSMVQRYPKNRKHTMDCKHRGCENKSSYTELIEKRLFEALKEWYINYKADFEKNKQDESTKETQIIQMNEAALRKLEKELVDVQKQKNNLHDLLERGVYTVDMFLERSNVVSDRINEITETMENLRKEIKTEITKEKVKKDTIPQVEHVLDLYFKTDDPKKKNSLLKSVLEKAVYKKEKWQRLDDFELVLYPKLPQDGDI

SEQ ID NO: 20294 - protein, 517 aa, synthetic construct
MKTAIYLRKSRADMEAEARGEGETLAKHRTALLKVAKEKNLNIIAVHEEIVSGESLVHRPEMLKLLQEVEDKKYNAVLCMDMDRLGRGGMKEQGIILETFKRSNTKIVTPRKTYDLNDEWDEEYSEFEAFMARKELKIITRRMQRGRIASVEAGNYIGTNAPYGYIIKDLKDGRTLEPHPVQSEVIKLVFEWYTHDDPDIRIGSAMIANKINALGHKTATGKDWANWTVLSIIKNPVYCGKVTWKKQETIKSTVPGKTKETKIRDKSEWIVAEGKHEAIVSEEVFEKAQAILSGRYHVPYHLTNGVKNALAGIVKCEKCGASMVYRPYTTQKPALKCYNQTRCKNKSSNYELVEKRILEGLAEWLEMYKANFESNQPQEETKEIKQINVYRQMLSNLEKELAETGKQKLKLFDLLERGIYTDELFLERSQSLAAKTEKLQEDIDTVKKGIDTELQREEAQDNIIPQVERVLDLYNKTDDPKKKNSLLKSVLEKAVYNKEKHQYKDDFSLTLYPKLPK

SEQ ID NO: 20295 - protein, 444 aa, synthetic construct
MIRVALYIRVSTEEQALHGFSLEAQREALTKYAKEHDMEITGVYIDEGITARKKYNRRKEFMRLIEGVKEKSFDLILFTKLDRWFRNISDYYKIQETLETYEVNWKTIFESYDTSTASGRLHINIMLSVAQDEADRTSERIRSVFENKIKNKEIVTGKQPYAYVINNKTIEVDEDKAELIRDIFKYYNDVRSVNATMKHMNQKYNLHKSYDFYRETLRTRKYTGDFRGVPDYYPQIISTDLFDSVQDSKSSYIRENQTMRLYIFSGLIQCKECGLKMNGMQTVTSANKFMTYRCRNAATYHRCSNRLSIREDKIELYLLNNIQLLYDTHVEKLRIQKKNKKKKHIDKSKIKLKLKKLKELYVNDLIDIDDYKKDYNEYMKILSEADLEDTAVTIQEDTEKIGIMIADNQLDTYNKLDRKNQRRFWRGIIKEIIIDNEHNIDVVF

SEQ ID NO: 20296 - protein, 561 aa, synthetic construct
MAEVEVIKASDGTVSRRRDTIGKGLRLERQRVAAYVRVSTDGEEQLQSFQSQMEYYTDKISKNKDWAFVGIYSDEAITGTKTSKRDGFLNMINDCMNGLVDVVLTKSISRFSRNLVDTLQYVRMLKEKNVAIIFEKENINTLSMESEMALALLSTLAQNEVESLSANTKMGLKMKMKRGELLGFNGCLGYDYHQEDKSLSMNEEEADIVRWIFNRYNQGYGAYTIAKDLIRLGKKNKKGIVKWTDSGIRGIISNEKYKGDLLLGKTFTVDPLTKRRLDNMGEEDQFYIKNHHEAIVSEEEWNMAQEIRKSRYGKNTSIIEGTREKQSRKFAFSSMCECAYCGTKFSRRSHHQDTQHKKPVWVCRTAANKGKASCPDSKAIDESILENAFVESFQLLADNFDDILESVLESIEIELSSTDNSDRLKRVDKSLATVEAKRKKLTDMLLDDKISKEAYDERFDEFTRKISQTKQEQQILIENEAAKKDVGKRMKEIRARISEVKVMDRFDRAVFESIVKKVIIGEVGEDGKSDPYKITFVLKGLADFSISDARKRYKNLHKQIS

SEQ ID NO: 20297 - protein, 522 aa, synthetic construct
MATSLVRAVVGARVSIFTDGKESQITQRTKGTSYAESQGWTVVGAFEDLDVSAIKQSPWDRPDLKQWLTDRADDWDALVFAKTDRVFRSAADCVKLSEWCRDHKKILVLVDDGIKLDYFHPDSQQDAFAGAMSKVFLILASVFAEIEGQRFVQRALDRVTQYRHQPRWAYGVPPYGFQVVDRPEGGKTLGHDLEAQQVLQGIATRLLSGDSLTRITADLNETGVLSPADRLRQRTGKELRGSSWTVITVQTILTNPATQGIKTAKGKPVLDAGGEPVRVGPPSFDSETWGRIHSELAQRSQSGQQRRHSDNPLLGVAKCGVCGKNMRHFQRTKGGRHYRYYICGSTPKACPGVLINADNAELAVETSFLDVHTNRRIKERVWRAGSDHSAELEQTTNTITALWEDRALGLFTTPEDQDMFRSQMAALVAKRDALAQTPVIKAGWIDVETEQTYGAVWPDATPVERRKMLTDAGMKLTVYRANKYETYVDLDKAIGEGAVGEELHSELEARAAEERRRWGMPD

SEQ ID NO: 20298 - protein, 590 aa, synthetic construct
MTSTIYAAGYGRQSQKRANASEASPATQRSANKAEADRRAALPGVDLAWTRHYEDIGISAFTGKERPEFDRLLADCRAGRVNMIIVYYISRFSRMEPLDAIPIVTDLLNRGVTIVSVTEGEFRQGNIMDLIHLIMRLDAAHGESKNKSVAVTGAKKKARELGGYVGGRPPYGRECVPETRYDSEGKPIVVQLLSTLVKEAEVIQAWWIDIKRYKDDPTICRAERKGLEVPGSLGWVVRKSNENRVPTRGANTGKLCKNSQWHLITVKRILRDPQIAGYASEPVYKVREDGTKTSSVDHYRIVRDENGNPLQPWEPILDPADWWELQAWLDDSRQQKKWSNVAQSVLTGQQILYCECDAPMKSAPARRTVASYMCGRPAGVRRPGMHEGGVSISQGSLNDLVARRIFAFITAAEYDEQAALILRGVQQRFGEAVEAPETAQERAALRGELADATRALEQLYDDAELYRGDAVGRKRWRKDVETQQQRQKQAEERMEELSAAESPELPILAWLDRDDGFEGDPIGPGTWWGRATLTQRRELVSLFVARIVVRKAREDERTRPGTTASTWVEDRAAITWVQPQAEEEDEEMAA

SEQ ID NO: 20299 - protein, 593 aa, synthetic construct
MVASSQVKRSRQALIPTEGMEQSYAPVGTTTGTVFAETLRGVRCIRLSVRTDETTSPERQREADDIAAAALGIDFGEGEALREAVDLDVSASKTGPFDRPQLGGWLARPQDFDVLVWWRFDRAIRSMADMHELAKWAREHRKMLVFAEGIGGGRLEFDFRNPMNPMSELMMMMLAFAAQVEGQSIKDRVTGAQAAMRKMALRWRGGGQPAYGYLPAPMPAKYGGAGWTLVPDPKAVEVIERIIAELVAGLTTHAIAQKLNADGVLSPSAHWKGYQARKKNKLDTETAEPKKRPAQWRAQTITRMLTNPALLGWKMHAGNPVRDDQGSPVMATETPILTREEFDQVSALLAPKPTAEKAPRRPDSSALLLRVIHCDGCGSRMYLNKSSGNYGCSSYKYGTHCPAPATVRAAWVDDYVTAEFLRAAGPVQITRVTEIPGYDPQPEIDATTAEYEEHQTQKGRQKSKAAQAAWQRHGDALDARLAELETREKREPRREAVPTGRTYADDWNAADTEGKRTMLVDTGARLEVKRGTKGGWRTLDLRRVEFTITGDLDPCIEEVDTNAGAVAKEDVPEHAPAQGASVRLHQDALAPAA

SEQ ID NO: 20300 - protein, 416 aa, synthetic construct
MTELGKITPSHRARLAVVYIRQSTSAQVESNRESTARQYQLQAFAAELGWPAAQIRVIDQDLGLSGSGLNTRSGFAELAAEVALGHVGIVLALEVSRLARNNADWYRLLDLCGTTDTLIGDADGLYHPGLFNDRLVLGLKGTMSEAELHVLRARLNGGIRNKAARGELRRGLPIGLVWGEADGEVRFHPDAAVTGAIRAVFERFAEMGSARRVWLWFRSEALPFPTQASGCRDIQWGTPSYTKIHQVLTNPVYAGAYVYGKTRQERYIDEHGEVRKRLKRLPRADWSVVLHDHHQGFIDWATFEDNQVRLAANTRPIRHDGGGALREGAALLQGLALCGHCGRKLVVAYSGRNAAPTYDCPGDNLANGRGEACLRVGGQRLHQAVAAAVLAAVQPAALVCPTWACTCYLKGGNREE

SEQ ID NO: 20301 - protein, 611 aa, synthetic construct
MARKAAIYARVSTEHEAQISALENQVQYYDELLQRHPDWELVDRYIDEGITGTSIHKRESFMRMLQDAKEKKFDLIITREVSRFARNTVDTLQQTRILKSYGVEVWFTEDNIWTMNDEDGELRLSIMATLAQNESKKISQRVKAGQMISFKNGVLYGNGNILGYDRVGDKLVVNKEQAETVKRIFELYLSGNGVRKIQDIMEQEGRKTATGLTRWQSGNINRVLRNPFYCGRIVYRKQYVPDYLVQKKINNFGAVEKVYVEGTHEKLVSPEDFDRAQELRAKHRIGKRDKNGRSIGQSPCKHIWGNKLVCTCGHAMNRRIAHKAKDGNLSYIYQCYGQLRTGTPESRRKKGLEVDGICDNSSFMEWKLEVQADFIFKKLLNNKEAIYREAMSMLSDVAEVKAPERNDKEKLERNMKQLDKLHKQMANLVDMCADGDISREVFRSKKKKLEDQISNIEKINSECRQQILELEDNEAKDRRIESLSEFIKMTAYDARAKIPETVIDNFVDRVVYDHGEFIWYLNPAFGNEAYKQATSDWKKKQLSTASSDIKDTSCAYTSTGSYQRETLIENALFLGTFEIPKSYIQEAAKLYYGEHRRFRFPEKLEFKLFLV

SEQ ID NO: 20302 - protein, 524 aa, synthetic construct
MKLSHILQPKMKAAFYGRHSTDKQDMDMQLNSVMEVIRKYECIHTHSHSFLDKAVSARKNKITSRKELENMFEAAKRKEFDFVIVYKSDRLARDPLEHQTIRIVMKTLDIPMIISSTESVYNTDNDLIVQLMEDGFTKYEVDTIIARTQSGLENKAKQGKWLGGKPPFGYTYDKNSGQFIEHPEELCYVKEIFNLYLNGHGFQHIANTFPNGSRRGKDWGKENVKAIVLNPFYCGLLSWRRQTDGKLNARDIWIEAPNHYVKPIISRNIWEACWRIYSEKRSGSIVPKHYKTSFLLQGLLSCEKCQELMKTKNQQTVSSTNKQYGRKIYFCTNCKLRIDTDLLHDKVVNQTLTDVKISGFHNVYQAIEQKIQYEIQELNNNIQKHQHLFENYTIKFHNITEELKQRMNNNDDKRFLKSLAIYRLDVQRKLDGVTQQINDFKQQIILKEKVEKSKETWLNTLNKVFEDDAKIQEISDMDKRRFLLPLIQSVSIKENKKRKEYDISLQLRTDFSKRDVKNQISLIL

SEQ ID NO: 20303 - protein, 515 aa, synthetic construct
MYRPQELDVFIYLRKSRKDLEEEKKAMEHGQHYDTLERHRTQLLELAHKEHHNIIDILEEVVSGEYISERPMMQKLLREVESGIANAVLVMDLDRLGRGDMVDQGTIYRVFRYSETFIITPTEIIDPNDENQELTFSIKSLIAREELKTIVKRMQRGRRVSAKEGKSISRVPAYGYLRDNNLKLYPDPEKSWVIPKIFELMANGMGRQAIAQELDRLGISPPEGEYWNPSTISSITKNEVYLGHIIWGKISYTKQNGKYIRKKVQKERWQRHDHAHTPLVSEELFQKANIAHSNRWRPPTIKTKKLSNPLAGILLCKLCGHSMLYQPRKDRPNPQVRCVQPSCKGVQKGASLALVEQRILDGLKQIIESFEIQENMVQKKKPKNNIQLHQKALEKKEQQINDLQKQKNKLHDLLEKGVYDIETFLERQSSIVIRLKSTQEEIEQLEHEISCLLERERHIHEFVPKIKNILEVYYATEDVEKKNRLLKSVLEKVTYLRKKSWQRKDEFTIELYTRI

SEQ ID NO: 20304 - protein, 536 aa, synthetic construct
MIKAVIYARVSTAEQAEEGYSIDAQLDVVKKRCEQEGRIVVDNYVDRGISGKAMENRAELQRLLRDAGENKFQEIWVWKTNRLARNHLDLLKIVDELNKNNVGFKSCSEAFDTATPTGKLLMNVLASIGEFERESIVENVKMGMKQRAREGKWNGGTVLGYNTVKIDNIENKTKLEIEEKEAFIVKEIFRLYAEGRGLKAITNLVNKLGYKTKRGNFFTPIAIRTILLNPIYIGKIRYNVRENWSEKRRKGINKNPIYAAGSHDPIISLDLWNRVQELYKKKSQKPKRLFDGTFPLTGLIKCPMCGASMVAGRVKRKLKNGDINIIRYYQCGAWRNKGTAACRSNGVRADKVEKQVFKRINQIVLNDKILKDTVNKLNDNTHNKIKPLEEELYITNKRIQNLEKKKNRVFDLYEEGMIAKEILTSRLEHISNEIEMNFAQKVRIEKELQQNTSNPVSVYTIKKLLIRFYDLIEKVEPIKQKLILQLIITKISINNKRELDSIVIHINEQIEKYILNIEEDGSLQKDSSSFGFTIVI

SEQ ID NO: 20305 - protein, 515 aa, synthetic construct
MKTAIYLRKSRADLEAEARGEGETLAKHRTTLLKIAKEMNLNVLSVREEIVSGESLVKRPEMLALLEEIEDNKYDVVLCMDMDRLGRGGMKEQGIILETFKRSNTKIMTPRKTYDLNDEWDEEYSEFEAFMARKELKIITRRMQRGRIASVEAGNYLGTHAPFGYDIHRLNKRERTLIINSDEASVVRMIFDWYTNEDMGANAIRSKLNDLGYKSKLGNEWNPYSILDILKNNIYIGKVTWQKRKEIKRPDAVKRSCARQDKSDWIIADGKHEPIIPESLFEQVQEKLNSRYHVPYNTNGIKNPLAGIIKCSKCGYSMVQRYPKNRKETMDCKHRGCENKSSYTELIEKRLLEALKEWYINYKADFEKHKQDDKLKETQVIQMNEAALRKLEKELVDVQKQKSNLHDLLERGVYTVDMFLERSNVVSNRITEINSTMENLKKEIKTEIKKEKVKKDTIPQVEHVLDLYFKTDDPKKKNSLLKSVLEKAVYKKEKWQRLDDFELVLYPKLPQDGDI

SEQ ID NO: 20306 - protein, 515 aa, synthetic construct
MKTAIYLRKSRADLEAEARGEGETLAKHRSTLLKIAKEMNLNVLAVREEIVSGESLVKRPEMLALLEEIEDNKYDVVLCMDMDRLGRGGMKEQGIILETFKRSNTKIMTPRKTYDLNDEWDEEYSEFEAFMARKELKIITRRMQRGRIASVEAGNYLGTHAPFGYNIHRLNKRERTLTINSEEASVIRMIFDWYANEDMGASAIRNKLNELGYKSKLGNEWNPYSILDILKNNVYIGKVTWQKRKEVKQPDAVKRSCARQDKSDWIIADGKHEPIISESLFEQVQEKLNSRYHVPYNTNGIKNPLAGIIKCSKCGYSMVQRYPKNRKETMDCKHRGCENKSSYTELIEKRLLEALKEWYINYKADFEKHKQDDKLKETQVIQMNEAALRKLEKELMDVQKQKNNLHDLLERGVYTVDMFLERSNVVSDRITEITSTMENLKKEIKTEIKKEKVKKDTIPQVEHVLDLYFKTDDPKKKNSLLKSVLEKAVYKKEKWQRLDDFELVLYPKLPQDGDI

SEQ ID NO: 20307 - protein, 515 aa, synthetic construct
MKTAIYLRKSRADLEAEARGEGETLAKHRTTLLKIAKEMNLNILAVREEIVSGESLVKRPEMLALLEEIEDNKYDIVLCMDMDRLGRGGMKEQGIILETFKRSNTKIMTPRKTYDLNDEWDEEYSEFEAFMARKELKIITRRMQRGRVASVEAGNYLGTHAPFGYDIHRLNKRERTLTINLEEASVVRMIFDWYANEDMGANAIRSKLNDLGYKSKLGNDWNPYSILDILKNNVYIGKVTWQKRKEVKRPDAVKRSCARQDKSDWIIADGKHEPIIPESLFEQVQEKLNSRYHVPYNTNGIKNPLAGIIKCAKCGYSMVQRYPKNRKETMDCKHRGCENKSSYTELIEKRLLEALKEWYMNYKADFEKHKQDDKLKETQVIQMNEAALRKLEKELVDVQKQKNNLHDLLERGVYTVDMFLERSNVVSDRITEITSTMENLKKEINTEIKKEKVKKDTIPQVEHVLDLYFKTDDPKKKNSLLKSVLEKAVYKKEKWQRLDDFELVLYPKLPQDGDI

SEQ ID NO: 20308 - protein, 522 aa, synthetic construct
MNHSKRKVAIYIRVSTEEQANEGFSLGAQEDYLKQYANTKGYEVYDIYIDDGYSGKDYNRPEIQRLFKDLYQEKFTGILVKSVDRISRRVSDVTKLIDDVLAPRKCYVLVSDNNLDSSTTGGTAFIQLLATFAEYERSMIVQRVKAGMSKRAELGYWNGGHVLGYDVKNKELKVNKEEAEIVRKIFYLRTEGKGYKSIALILNQQGFKTKRGRLFSIGTIKTILENSLYIGYCRWGRHKNWNVERRKGKTDEYKFVKGKHEPIVSEDLWKRVQGVNYAHKKSISKNRNFNGEFVLSGILRCPSCGAGMVMCKTKKRDKSGYHLYYMCQAFHSKGKLACKSNLIRKEDIEEKVLQCINKIILIPSIVDKTFERIQEKKERGIERIKNDLLYINEELKRKKQFIKKLNKDYFDEKIRVETYTELSEPLREEIDELESEKSKLDRKIESTEIPITKEMVIKALENFTNLYENATYEQKKSLLRAIIKKIEVQPNRKEIKGITYWFDCDNGQDNALLVSKEGRTVS

SEQ ID NO: 20309 - protein, 495 aa, synthetic construct
MKSAYLYVRVSTDEQKRKGYSLPEQEDRLLKYCDHNNIKVKGIYREDFSAKNFNRPEWKKLIVMVKKKSSHEENNILFIKWDRFSRNIQYAYEMIGILRKHNTAVMAIDQPIDLTIPESSVMLAVYLSVPEAENTRRALNTANGIRRAKQMGRYPNKAPLGFINLTGLDGKKFIAPTQPEAGIIRWVFQQLAKNIYKIAEVRNMTYAKGFRCSSSNFSKLIRNPVYCGLISMKLDSLERQMIKGIHDPLISEALFYEVQDIINTKRKINSKTDELKATFFLKEFLVCPVCARKLTGSFSQGSTKKYPYYHCPRKCKTRINAFKLNDSYKHQLQQLSLSNKVTELFNCILEDSNASTQKAEYLQVRKIIIRQLEEQEATLSKARKLFVSDILKYDDYSDLKKECKANLDCLKKELDGIVIKLKSIDKQRQSGNNPFVNIFQGYSNFDIADKKSLAILIPPGNLNLQTGDVSLDLNNALSKILSQTDKPFHKNEFYR

SEQ ID NO: 20310 - protein, 517 aa, synthetic construct
MKVADLYIRVSTDEQADKGYSQRSQEEVLTRYCAIKGFKVRKVIFEDCSAKSFVRPEWQKLLVELKKKRGQSDLILFTKWDRFSRNAGDAYQMINILASLGVEPQAIEQPLDITIPENKLMLAIYLAQPEVENDRRALNTFFGMRRARKEGRWMGPAVTGYINKINEKGQKYICPNEPDASIMRWVFEQLATGDWYIDQIWREAQKKGLTCGRKNFWQIIRNPVYCGRIFVPKYKDEEAHTVLGQHEPIVSEELFNQVLDVLDGRKHLPKKKISSQRNLPLRGFLICPKCGYMLTGSASKGCKRHYHYYHCFAKCGVRYNADLVNKKFVEEIEKNSINPDMIDLYKKVLVDVFDQTVGGRDSELSDSRKQLKIYSDKIDKARELLLQGDLDASDYRKIKHDGERQISILEGKLMELTANTFHIGPLLQKALYNVAYLPNLYQEADIEEKRRIISSMYPENLTFDGEQHRTNRLNEAIRVFNSVKPVFEAKKKDKSVEKTDLSSMVAGSRIELPTLGL

SEQ ID NO: 20311 - protein, 579 aa, synthetic construct
MKVIAIYARKSLFTGKGDSIGAQIDTCKRFIDYKFAHEEYELKIFQDEGWSGKTTDRPEFTKLLKAVKNKEINYVITYKLDRLGRTARDLHNFLYDIDKLNIVYLSATEPYDTTTSAGRFMISILAAMAQMERERLAERVKSGMVQLAKKGRWLGGQCPLGFDSKKEMYIDDLGKERQLIKLTANKEEIKIIKLLYKKYLELGSLTQLRKYCVDNSLKGKNGGDFSSTTLNQILTSPIYVKSTPKIMEYLEQQDINAYGEANGNGIITFNKTKEMRIERTKSEWIAAVSSHKGIIDDDIWLQVQDIINKQSEKQKESSGRQGTSNRALLSGLIKCSKCGSNMLIKTGHKSKKNPGHVYSYYVCNSKADSYGLKNIKCSNTNLRVDETDKAIIEQIKAYNKDMLIKELESISREANKVDIESENRVDSIQNKISEKEKAINNLVKKLSLLEDESISKILLDQISNLNKEIGNLKKQLDDVTLSQVETSKFELDLKSYIRNLENFNKNIDIIDDLNMQKDLLGSIIEKIEWDGETGELKVIPLVKKNKQLDRNSFQKLVFSTVMVVLAIWPKLGIVFFVIT

SEQ ID NO: 20312 - protein, 536 aa, synthetic construct
MYARVSTQRQENEETIETQIMAINDFVTKNGHTIVKEYRDDGWSGTLLARPSLDELRLDARKKIWEAVVIYDPDRLARKYSYQELVTDELNELGIQVLYVTTPPIKDDGDRLLYGVKGLFAEYERAKIAERFRLGKLRKARDGNVVTSQAPYGYDYILKQGDKQGFYKINTQEAEVVKMIFRWVANERITIRTIVKRLKKMGIKPRKSEREVWNTSTLSTLLRRKDYIGTTYYNRSYAIVPEHPLKDIKYKRIKKTSRRFKPKEDWISISAPAILDVSLYQKVQKQLKENYELTARNVKNKYLLSGKIYCSCGRRRTGEGPQKGKHLYYRCTDRVYMHPLPRKCHEKGINARMADKLVWDGISNYMTSPNVLKAQVKRWMSDQNKEVIQTDKSVEELKKELGRIKKEEQRYIKAYGAEMIDSEQLKESTEDLKKQKKSIEQQIFSMQRDTATGDISYPNDNEIDEFCRIAYKVIADIGFEAKQSIIRKVVDTAVGTQHDIKVYGHLPINSSIIANIWKGDTQDVKFETSSRNRGFA

SEQ ID NO: 20313 - protein, 607 aa, synthetic construct
MNKTVEVIEPTIRDDKTICKKKVAAYARVSTDNGGQKDSFENQKKYYEQMFQNKPDITFVGVFADEAISGTTDNRPGFQRMISLAECGMIDVIYTKSISRFSRNVADLLSYCKRLKDNGINVIFEENSINLLSEQGTLMLTILGAVAQMEVENTSAHVNWTLQRKMQNGEYVGCANPIGYKMVDGQLVIDEEEAKTVRYIFRRYLEGVGCKTIAKELHSMGVKTRRGNDIWYESSVSIILKNEKYKGDLIQGKSVTVNPIGRVRKKNHGEGKMYRIKDDHDAIISEEDWNRAQEIMNQRCVSYVDGRKRGTTRNSKQNAFTSKIMCGYCGRNYVRRMTHSGTPHKKVIWNCSGYCKLGKEACPNCKAIDEEYIKKSIVGLIKNMIDDQDCMFYLSNDRIEQALTQFQTQTDKYREQIKLYQNNLEQKNRKRQKLIDLYLEDEIDKAEYMEKLEVTDHEIKMIQQTIDQVNNRIGEEKVKSNSIQQIQKLINEGSAEGFNETLFDLFVEKIIVGGKRFDGKDDPRMLHYELKAYNLCTDMECELIEGVPHYIEKKRDDVARDDDNNAYSLYNDYTCRDHRIDRTDQKCVGFCADRYRCGRILQNQRRG

SEQ ID NO: 20314 - protein, 508 aa, synthetic construct
MINVVGYARYSSDNQREESIVAQERAIREFCQKNNYNLIKMYKDEAISGTSIKDRTEFLELIEDSKKREFQCVVVHKFDRFARNRYDHAIYEKKLNDNGVKLLSVLEQLNDSPESVILKSVLTGMNEYYSLNLSREVKKGLNENALNCIHNGGIPPLGYNLDEDRKYVINEIEAETVRIIYKLYIEGIGYASIAEQLNQMGRLNKLGKPFRKTSIRDILLNEKYTGVFVYGKKDGHGKLTGNEVKIEGGIPQIISKEDFEKIQIKMKNRKTGSRATAHETYYLTGVCTCGECGGRYSGGYRSRQRDGSITYGYTCINRKTKVNDCRNKPIRKEILEEFVFKTIKKEIFTEKRIKSIASKVEKSVNEKILKKAQEVKKIESEIQKIKDKIDRLLEIFLDNKISKEVFEKKNNELERELFLLTQEKNKISASKKINRENIEAFIRNFKANFNKENIKKAIIETFVKEIKVYETYVEIVLRLFPMYIDRNGGDDESRTRVRNHNDHKLLQV

SEQ ID NO: 20315 - protein, 531 aa, synthetic construct
MSIAYSYIRFSSAQQAQGDSLRRQTQLAQRYCEENNLTLSDTNFQDLGVSAFHSDNVKEDSGLGQFLEALEQGAIPEGSYLLVESLDRLSRAKVQTALIQMLRITQLGVKIVTLMDNRLYDKDLDTTDLIISLTIMERAHNESKTKSERIKAAWTNKRQNPNTTNRHSSAPFWLTLNSDKRTYTINEEYAELVRKIYQLSIDGWGVIKIVRYLNQNGITAPKGASWATTTVNRILNSKAALGHYEPTQNRKSLNTLIEDYYPPIIDEKTYYLSQQRKFERSKPEAAGRKTEYPNPLNQIAKCKKCGSSMYYENKSQNLKYLTCREFKKKNCTNKPIRMELIYRFIYEVFNSPMYHQQHAKLVDKSKQKDVNKLTELEGRYEVERKAYEELLEAFSSFSDPIALKELQRRSALITGLYKQIEEAKAKKTVEQARTAHINFTEALKLTTKALYSPLVEERGEELSPDELFTTRVRLNRILKQAFNHLSIFHCNESKRITIETEITEDYPIDLRYETNQKAIKEPMKNRIWSVY

SEQ ID NO: 20316 - protein, 620 aa, synthetic construct
MRTTPKIYNYARVSTTKQLQGVGLETQQQRSILESLSQEHNLPIHDENFVDQGLSAYHGKHREGVLGLVLSHIESGEISSGSILVVFSLDRLSRETVNVAMEQLLSIINRGVRVYTHIDGKMFDANSPNLSADLIVSVITMERANEESRTKSQRVKGAAKEGLKKWKATGEPQSSLGRVPFWIDQPTNTFNKNADGVLKAIELYLKGVGCLKIKQHLDEHYPYEAVRKKGRKTSQTDKWDFTAINQVFTKPSLIGEKHITVGGVKYKLEDYYPPLIDVATFQKLQQIKSLKAGRAPAKPTTHLLKGLVKCGVCGGRMVFIDKGRGNQAINYVCSNAAKGNHQRENYSVQMLELAIIRLSNDELLRSKIDENSYEAERAQLLKQKDDLEQELIELKSRYIQKKRKTILELIEDTEDRLESVISELEIIKPINIIQAFHELSDIKFDAEMMNDFNHPLRHELKLNLNKVIDHIQINRTQELSNITKSGYVSCISITVVFKNKQRRVLTSTPFQYFDNVQGKNIFVGYKYEYDVPFEELTRNKKLIVNLLSELHCYDLLHKLYPSKGRYEWTDMPIDFGTVHQKGTNLLGALKHMIEAGSWEYGIKKQFSEGIQYTIIEENSI

SEQ ID NO: 20317 - protein, 446 aa, synthetic construct
MREAYSYIRLSHTNQLSGHGRQRQLESTVRAAKEKGWQLMDETFEDLGVSGFKGINVETGAFSKFLTAVQQGAIREGSVLIVENVDRLSRAGVNRAVTLMLQLLEYGITIHTLSDNKTYEPSSENPLMDLMQWALTAQRGYEESLIKSKRIQAVKDAVREKARKEGTYYTTKSPSWIIISPDKKEATFHPTNAAIVKVVIDLYLNGYGTTRIANRMIELGHPTLSVKSKCWNASLVRSLLTQPALSGDIMFKRNGKRDPDILEDYYPALIDKDTHRKIKERLAKGGACKGRRSTTMRNPLAGLLRCKCGSGLGLSHNNARKYSNPRTALRCKKYYGECNGSGISAPRAITGILYGLRRLPMATLLTEEKKVDRVSVEVEIRSLTDSLEGIKQIMDNVITTIAAVGGNKALQEKLIELTAEQDAIEKKRDALRKQLEAITPYRSQRT

SEQ ID NO: 20318 - protein, 535 aa, synthetic construct
MLRQTTQKITALYPRLSHEDELQGESNSISNQKRILETYAKQNGFSNLRWYTDDGYSGANFQRPGFQSMLADIEAGKVATVIVKDMSRLGRNYLQVGMYTEMIFPQKGVRFIAINDGVDSAQGDNDFAPLRNIFNEWLVRDTSKKIKAVKRSKGMSGKPVTSKPVYGYLMDEDENFIIDEEAAPVVKQIYRLCLAGNGPTKIARMLTEQEIPTPGTLEYRRTGSTRRYHPGYECKWATNTVVHILENREYMGCLVNFKTEKPSYKTKHSIENPIEKQAIFENHHEPIIDTQTWERVQELRKQRKRPNRYDEVGLFSGMLFCADCGSVMYQQRYQTDKRKQDCYICGNYKKRTHDCTAHFIRTDLLTAGVLSNLRKVTSYAAKHEARFMKLLIEQNEDGGKRRNAAKKKELEAAEKRIGELSAIFKRLYEDSVSGRISDERFTELSADYEAEQQELKERVARIQAELSKAQEATVNAEKFMNIVRKHMNFEELTHTLLREFVEKIVVHECSYDENGTRRQDIEIYYSFVGKVDLPE

SEQ ID NO: 20319 - protein, 447 aa, synthetic construct
MKKVAIYCRESTEKQDIDSLVSLCEKQAIKLGFREYKIYRDIKTGYSSERTEYINLIDDIKANKINVVITYESARLGRDELEHHILYKIFKDYGVKVYNMSHGWVDPNNEDDLFLEGLLNLLDAREGRKTARRVRDRMKEICQSGRWTGGPAPFGYCLKNKELFIDEEKAIIVKEIFRLYLEGVPSSKIAEIYNFESRQIRRMLSNPVYAGKLKYHQVRIENKKKIESKEYEVFDGIHEKIISEETFHIANTMIKNTSTTRFTYPAIFRNLLYCNCGNKLYPAIGYGRRTYRCVHNCLRVIYEDEVLVDVIESIEDILNQIDLDTIDSQKKELEERIVFYKKNLTSLKTQIENLTRKYISEQISEELYDKLNSELSEKVKFATSEIEKLNAKSFHVDSSVSNKKIILKYLAKIKKEEDKDKMNQFFSLIIDKIVFINGYRFIIYMKI

SEQ ID NO: 20320 - protein, 621 aa, synthetic construct
MRTSPKIYNYARVSTTKQLQGVGLETQQQRSVLETLSQEHNLPIHDENFVDQGLSAYHGKHREGALGLVLSHIESGEIPSGSILVVFSLDRLSRETVNVAMEQLLSIINRGVRVYTHIDGKMFDAKSQNLTADLIVSLITMQRANEESETKSKRIIAAQKEALKKWKIDGKPRGALGRVPFWIDQPTNSLNENAEGAKVAVDLFLEGWSTIKIKQYLDENYPYKQTRKRSIQKASTWDSGVIDQLWRKVSLIGDKRYTIDGEEHVLHNYYPSLISLEKFNKLTRLKKPKLGRSTSTGSLHLLKGLARCGVCGSAMVFVDKAQHSKNYVCSLATKGEQSHNREVFSAELLELLTLEVCRDQYLINSFNAQLNVEETARVEYELAEEKKQLEDLKSRYKQKSRASLLDLIEDTEDKIEVLEQQLASFETFDLSDNLHLLNSDIFTEDVRTNFRHSSRAEIIDNLKSVLSDVTLSRVVEASEITKTGTVNCVCITWRFKNDQTRSISVRPFRYIGTGSNKKLFVPVRYEYTVPVLNEENRRGEKFVPDMIKKLHEKKLLNKLYPSKGRYQWNNLELVLGEFQTGLHNFLPNFVADPDPDAFWGDMVDKARAKGTRYTVLSKNVL

SEQ ID NO: 20321 - protein, 525 aa, synthetic construct
MAYYGLLKGSNMKAYIYSRISSAIQKKGHGLDRQQDIALTYATQLGFDISEEVLQDVASGYHGKQMEGRLGVFLEGIKRGKIESPAALIVESLDRLGREHTMDALPRFIDIVNHGVEIHEVSTGIVYNREETHKIHIAIAIMERAHNESLMKSKRARAAANKRLQRAQQGENVVINVNLPCWIRSQDGKLELVPEYAVVIRRIFELYLEGKGSNKVAQILREENHPYFTSNIHSKKIRSRVWTDQRVMDIIKKDSTCGVFRSTVNPDTVIDGYYPAAIDKATFERAQALRMSRVRTAKKSKKGLNILSGLLRCGHCGSSLQYTRSYSNKKKTRMYENLRCRDRAARMNCDSRSVPLRPLEKLILGWVGTIPLFDIKAASNDELEQKKAELTQLEQQAENLVELLATGLTRVKDKYLQLEQQIDSVKKEISSLSVTNSSSVDKIDYFKAIDLENEEYREQVQQELALIIDRVSVKCDGEDAEIDIFLNSRIHNHQRFIGKKKQLDKARQTMRTLRPCAAHVDSFVD

SEQ ID NO: 20322 - protein, 498 aa, synthetic construct
MRLFSYIRFSTEKQIDGDSVDRQTNSAKKYASLHGYDFQNKSFSDLGISGFKNVDRDGLTSMLEAIQSGGISRGDLIFIENVDRLTRQGFQHANDLIVKIVNSGVLLHFERESVTFKSPSDLNDMMSLMKVCMSASLAFEESQKKSERIASAKQKQRNLMKQGIAVKHKTPHWIEFDETGKCFHLGNTKIIKRVIELRRDGFSVSKIISTMNKEGFKAPYGGTLRSSTVKQWLQSPALYGAVMVEDELIKDYYPALMSYDEATKLYNKLTNNKAPENQNNHLRGLIYCSKCDSAMGLRFTTSSGKSKKKIPTFYCIKQREGGCDAPSVSNIMPLIEKMVSHMKTIEHKVDVAAITARIDEISSNLERISKSVTTDNFKMMMDMMDKFEKEKRELQASLTISDDVDTDTLLSHIDNPVEFNNIARRYIDKIKVTFKGGTRRKRTFHFKLIQRNGHIVNLTRFGSGQITIGKTEILSTFGQPESEFGEEMTYLEELELVG

SEQ ID NO: 20323 - protein, 545 aa, synthetic construct
METRPTKRVALYIRVSTQEQALEGHSIQAQEQNGRQFAERMGYEVVEVYADEGISGKSTKNRFAYQRMMNDARNHRFDLLVIWKLTRLGRNMLDVLQTVEELLRYDVGLHSISEQFDVTTSTGKLMLQLLGSFGEFERNQIAENVQMSMQSLVKDKKRYAGGRRLGYVSGIDTNGQKQLVIEPEEAKIVRLIYAKYLGGAGYRAIANFLNRQGYHTVKKNAFSTTAVKDILCNKIYAGYLEYARYINWETKRRKGKNPKPILVKGTHEPIISEEDYQKVQERLALEGKQPKWNHTGENVLTGLLRCPECGAPMAASNVTNTLKDGTKKRIRYYSCSVFRNKGASVCHANSIRAEQAETFVADRLKEIVQLPEVLPRLVAALNEEIVRQSQPLEQELVVLLERKEELKTKIEKWKVALEDSPELFPMLKDRLDELTEKRRQLHIRENEILGIFQQQGEPIQVKDVQRILTSLDRFLAQSEKKQVKALYRTFIEKITFDPKQKEILEITMKFTPAVVQQLNEQYQIAVSKTKDTAIFVLKTPFTLTI

SEQ ID NO: 20324 - protein, 515 aa, synthetic construct
MYRPQELDVFIYLRKSRKDLEEEKKAMEHGQHYDTLERHRTQLLELAHKEHHNIIDIFEEVVSGEYISERPMMQKLLREVESGIADAVLVMDLDRLGRGDMVDQGTIYRVFRYSETFIITPTEIIDPNDENQELTFSIKSLIAREELKTIVKRMQRGRRASAKEGKSISRVPAYGYLRDNNLKLYPDPEKSWVIPKIFELMANGMGRQAIAQELDRLGISPPEGEYWNPSTISSITKNEVYLGHIIWGKVRYTKQNGKYIRKKLPKERWQRHNHAHPPLISEELFQEANMAHSKRWRPPTIKTKKLSNPLAGILLCELCDHSMLYQPRKDRPNPQVRCVQASCKGIQKGASLALVEQRILDGLKQIIESFEIQENMVQKKKTTNNINMQKKALEKKEQQINDLQKQKNTLHDLLEKGVYDIETFLERQKSIVIRLKTIQEEIKQVEHEIKHVLEKEKHIHEFVPKIKNVLEAYYATEDIEKKNRLLKSVLEKVTYLRKKRWQRKDEFVVELHTKI

SEQ ID NO: 20325 - protein, 510 aa, synthetic construct
MEDMGSTAGRPLWGILARKSKVYGAGDRRRELSTEAQIEQGHREAAEAGALVPAEYVWSELGSAFKEREREDFDEALHALATGKIHVLWCYRLDRFSRKGAEDLLKVIGKVRVIFWYDRLDSMEPGDRRRIIDYAEQAREYSVRLSDSVVQTKRTQRDRGEWLAKAPFGFKVNGDRKLEHGDRWDTVERIFFTLAEGKVSGRQLCHGMNADGVTSPKGGAWTISVVHRLVNSPVYEGWQTIRNPAGNAPPTIPYKNSRGQRVSVLAEGTEPIPLHIVKAARENLSRRQPQALAEVEKHHKPAATKRGVAIHLMTDALRCGGCKGAMTMCGSDSYGCYRHHYLGLDCPAPASVNKKAIEDYMAVRWINRVGGSDAGDPLLLAVAERWALLTKPEETKAHREAVQAVEAAQKRLRRLMEDRNKGRYDLMEDLFEEHEQEAREVLSEANRDLAQHGPTTSLDAVGFLTEPEQVRELWNTATLSMQRDLLRLAIDYVIVKKSPREGEGLTAANE

SEQ ID NO: 20326 - protein, 521 aa, synthetic construct
MHEVEWSAAELKELEELSLREAQLPPEAPRALLSVRLSVLTDETTSPVRQELDLRRFALLRGCRVVGVARDLNVSATKVPPWKRPELGDWINNRAPEFDQILFWKLDRFVRRISDLHLMIEWCKEFRKILAADKDPIDLDSAYGEMMVTMIAGMARIEAANMEVRLESLWKYARTTERWVIGKPVYGYKSIETQDGRKLVHAPEKVRILRWVFSMLKRKKSMHKITQILNRAQIPAASGGQWHSANLWKILTNPALKGVRTVRPPGAKSKDISRIVYGTDGQPMRVAKHIFTDAEFNEIQNILKSRAKNGAGKNSKTSLFIGVVKCGTCGDNMYKHVTKKKRKSGKVAMYSAIRCASRTKTPCGGPSFPRADDIYGALSDTVLDQIGDYAVVHREYSRGAETLARTTELKESIKHYMSGLAPGGIYHDSGYVTKQAEETLQKLNAELGTIDPDSTVDRWTYNSKGVTYRQHWSSLGVQQMEEDLVRAGITFVLHEGHADLLIPEDVKKRLVVKKDYFKKKI

SEQ ID NO: 20327 - protein, 515 aa, synthetic construct
MKTAIYLRKSRADLEAEARGEGETLAKHRTTLLKIAKEMNLNVLAVREEIVSGESLVKRPEMLALLEEIEDNKYDVVLCMDMDRLGRGGMKEQGIILETFKRSNTKIMTPRKTYDLNDEWDEEYSEFEAFMARKELKIITRRMQRGRVASVEAGNYLGTHAPFGYDIHRLNKRERTLTINPEEASVVRMIFDWYANEDMGANAIRSKLNDLGYKSKLGNEWNPYSILDILKNNVYIGKVTWQKRKEVKQPDAVKRSCARQDKSDWIIADGKHEPIIPESLFEQVQEKLNSRYHVPYNTNGIKNPLAGIIKCSKCGYSMVQRYPKNRKETMDCKHRGCENKSSYTELIEKRLLEALKEWYINYKADFEKHKQDDKLKETQVIQMNEAALRKLEKELVDVQKQKNNLHDLLERGIYTVDMFLERSNVISDRITEITSTMENLKKEIKTEIKKEKVKKDTIPQVEHVLDLYFKTDDPKKKNSLLKSVLEKAVYKKEKWQRLDDFELVLYPKLPQDGDI

SEQ ID NO: 20328 - protein, 515 aa, synthetic construct
MKTAIYLRKSRADLEAEARGEGETLAKHRSTLLKIAKEMNLNVLAVREEIVSGESLVKRPEMLALLEEIEDNKYDVVLCMDMDRLGRGGMKEQGIILETFKRSNTKIMTPRKTYDLNDEWDEEYSEFEAFMARKELKIITRRMQRGRVASVEAGNYLGTHAPFGYDIHRLNKRERTLTINPEEASVVRMIFDWYANEDMGANAIRSKLNDLGYKSKLGNEWNPYSILDILKNNVYIGKVTWQKRKEVKQPDAIKRSCARQDKSDWIIADGKHEPIIPESLFEQVQEKLNSRYHVPYNTNGIKNPLAGIIKCSKCGYSMVQRYPKNRKETMDCKHRGCENKSSYTELIEKRLLEALKEWYINYKADFEKHKKDDKLKETQVIQMNEAALRKLEKELVDVQKQKNNLHDLLERGVYTVDMFLERSNVVSDRITEITSTMENLKKEIKTEIKKKKVKKDTIPQVEHVLDLYFKTDDPKKKNSLLKSVLEKAVYKKEKWQRLDDFELVLYPKLPQDGDI

SEQ ID NO: 20329 - protein, 506 aa, synthetic construct
MRTVITYLRFSSATQGAEGADSTRRQNELFKQWLRKNSDAQVVASFSDEGLSGYKGKHLTGQFGDMLARIESGEFPESTILLVESIDRIGRLEHLETEALMNRILGNGLEIHTLQDGLIYTKDALADDLGISIIQRVKAYIAHQESKQKSFRVSEKWKQRAKLALAGEQRLTKMVPGWIDPDTLKLNEHAETVRLIFKLLLSGESLHNIARHLQSNGIKSFSRRKDANGFSVHSVRTILRSETTIGTLPASQRNDRPAIPNYYEAAIDAATFNKAQEILDKNRKGRTPASDNPLTINIFKGLFRCQCGASVHPTGTKNKYAGVYRCNNHLDGRCDVPPLKRKPFDKWMLENFLGMIDVGNDGEAEGKIASLQHEVEIVTTRIKKATALLLEMDDIDELKIQLKELNQRRTELQTTIDNMRRKASLTDKELPQLKDIDLTTKAGRVECQLILSKHLKGLTLGKDSVTVTLQNDTEITIPTNPLPLNDGSPIFEIADKELLDIDAYQL

SEQ ID NO: 20330 - protein, 506 aa, synthetic construct
MRTVITYLRFSSATQGAEGADSTRRQNELFKQWLRKNSDAQVVASFSDEGLSGYKGKHLTGQFGDMLARIESGEFPESTILLVESIDRIGRLEHLETEALMNRILGNGLEIHTLQDGLIYTKDALADDLGISIIQRVKAYIAHQESKQKSFRVSEKWKQRAKLALAGEQRLTKMVPGWIDPDTLKLNEHAETVRLIFKLLLSGESLHNIARHLQSNGIKSFSRRKDANGFSVHSVRTILRSETTIGTLPASQRNDRPAIPNYYEAAIDAATFNKAQEILDKNRKGRTPASDNPLTINIFKGLFRCQCGASVHPTGTKNKYAGVYRCNNHLDGRCDVPPLKRKPFDKWMLENFLGMIDVGNDGEAEGKIASLQHEVEIVTTRIKKATALLLEMDDIDELKIQIKELNQRRTELQTTIDNMRRKASLTDKELPQLKDIDLTTKAGRVECQLILSKHLKGLTLGKDSVIVTLQNDTEITIPTNPLPLNDGSPIFEIADKELLDIDAYQL

SEQ ID NO: 20331 - protein, 494 aa, synthetic construct
MTAVIYARYSSDNQREESIEGQIRECTVYAEKNGITVVKHYIDRALSAKTDNRPDFQQMIKDSEKRLFDIVLVWKLDRFARNRYDSAHYEYQLERNHVKLVSATEPISDSPAGIMVKSMLTGMAEYYSAELSEKVVRGMTENVLKGKYNGGTIPIGFKMDEEKFFQVDPLKAPFVVEAFQRYNDGATMKELMNWLNDSGVTTNRNQKFTYNSVQTLLTNKRYIGENHFKDIVMPDSIPAIVDKDLFEEVQQKIKKNSRAPARHKAEDDYLLTTKLFCGMCGAMMFGECGTGRNKVVHHYYKCATAKRFKTCKKKTVRKEWLEDLVIAETMKLIQDDAVIDAIVAEVMELQDQENTTLPLLEKQLREVENGIENMLNAIQAGVLTNSTKSRLEKLEAQQKELEVRIAEEKIARPRLSENQVRFWLTRFRKLDPNVKSHRETLINTFVNAVYLFDEKVLITFNYKDGTKTISFDEIAAKDAPEGNGSDLGCFAPPR

SEQ ID NO: 20332 - protein, 521 aa, synthetic construct
MNKSITVIPARRRVGNTVNKEVKPKLRVAAYCRVSTDSDEQATSYDTQVEHYSNFIQKNEEWEFAGIFADDGISGTNTKKREEFNRMISECMEGHIDMIITKSISRFARNTLDCLRYIRQLKEKNIPVFFEKENINTMDSKGEVLLTIMASLAQQESESLSKNVKMGMQFRFQKGEVQVNHNRFMGYTKDEDGHLIIEPAEAEIVKRIYREYLQGASLKQIGDGLMEDGILTGARKPKWRPESVKKILRNEKYIGDALLQKTYTVDVLTKKRVKNNGIVPQYYVENSHEPIIPRDLYMQVQEEMLRRSNLHSGANRKKRVYSSKYALSSIVYCSKCGEIYRRVAWNNHGKRSTVWRCVNRVEHGPDCCDAPTVKEEELQSVVVKAINMALGGKEDMLADLEENIAMVLALEDETSIESLDAKLEDLQQELLKRANARQDYEYLADEIDHLRERKQKVMADNAERDGTKQRIAEMQQFLAGQTEQIEEYDENLVRRMVEKITVYEEKFMVEFKSGTSVNVER

SEQ ID NO: 20333 - protein, 463 aa, synthetic construct
MNNVAIYCRESTEKQNIDTLVSLCEKEAKKLGYSNYKIYKDIKSGYSKDREEYAKLKEDIKDEKINVVILYESSRITRDEIEHHMFYALLKLYDVKVYTLNHGWIDLTNEDDCFLAGLLNLLDAREGRKTAKRVKDRMEEMAKNGFWTGGPAPFGYKLVDKKLIIEPEEAEKVKEIFKLFLEGKTRFSLSALFGFECKRVMRMLVNPVYNGKLKFRQIEFKNKKRIEHKQFDILPGIHKPIIDDYTFKLVQEKVKNIKRETNKESYIFKDLLICTCGEKMYLHKKKYFYKKEIPEITNAYLCKSSDKKIRNCSLSCIHEEELFKNVIESLEELILSFNVNNINTSKNDFEKQLKYYKKELSSLSTKEEVLVRQLMNGKLSEKLYEKFITELSENKEFIENKINSLTKVINSQEAKKNNKIILKKYFNKIKKEKDPEKLNAFFKLIIDSIEFVNDYRFYIHLKF

SEQ ID NO: 20334 - protein, 510 aa, synthetic construct
MSSTTTAKAVIYARFSSDKQREESIDGQIRECTKFAEDQGLEVIGTYIDRAMSARSDNRPDFLRMIADSARGQFQYVIVYQLDRFSRSRYDSAVYKNKLKKNGVRVLSAKECIGDDPSSIILESMLEGYAEYYSAELSQKVKRGMTENVLEHKWTGGYVPLGYCLAPDKTLQIDPVGAEAVKIIYDKWLAGCRIMEIIRYLNDHNYVTSRKAKFRYSSLNRILTNPIYTGLYQWGSIEVADYAPAIITQKQFALAQEKIHHIKAHPRAKRRSANYALTGMIYCGVCGSPMTGQSGHSKSGALYHYYRCSTKNNYHDRGKKLNIKCTNRNISREKLEDLVLQTTINILMNPEAVHMIAKQAVAVQQKDPASMELDRIKEDKKIIQKKLNNSIKAVEAGIISTTLAANISQYEKEIADLDIKMEKIKLLSTPVKIDEIAVEFFLKSLLLNKKEHDKYRLDMFQTFIRRVIVYPDKVEIQYNYTATPHILENPVTKMMTGNPGCSRCERLVTR

SEQ ID NO: 20335 - protein, 507 aa, synthetic construct
MKRVISYIRFSSERQAKGDSLRRQSKMVNDWLKAHPEYYLDQDLSFRDLGVSGFTGKHLKGGLGDFLTAIEKGLVKAGDTLLIESLDRLSRQDVDQASELLRNILRSGVDVVTLSDGEHYTKESLRDPLSLIKSILIMQRSHEESLRKSERIQAAWDAKKEAAKAGIKVSKRCPAWLKLNDDRKSFSVIPEKVETVKRCFQLRLEGKSIWEIVRTMNAEGHQTLHQHKAGSFGQSSVQDLLKNRSVIGYFTPKGCEEIAGYYPAIIDETTFYKVQQLSYARYGRKPASDKPLSVNLFKGVIRCSECGHALIITGFSDTRSGIYRCPLRNENRCNAKGLSRKQTDSTLLALLSRLDRFDSDMTNTIDTLKLHREHISSNIEKLVQLSLEIEDLSAITIKLKQLKGELSQVDADIEKETQRLKSIDVGCLSDCDLTTKAGRIEAQLIIKSAVKEVVLNTAKRRCKVTFHNGKVIDLSITENPSEDVTEAIQSLSEVTEMGLIDVDEVII

SEQ ID NO: 20336 - protein, 520 aa, synthetic construct
MYLDKSSFEGKRAVCYLRKSTDDAYRQKYSIQAQREQMEMWSSNFGVITEKYFIDDHSAKDFKRPGWVDLMDYLKKHHTSISLVLIIDYSRFSRNDVLAYVSINQLDQWGIELQAIDQLLNYEVPESLIMRGNYITMPAVDNLWRSKKVKRGMIQSLRAGNWCAGKYPRGFWKDKNTGEVQITDEGKLIAAAYDKIAHHGYNIREAQTFLNLRGVNVTFKALSKMLRNVFYKGYISHRLLGSEIVKGNQPPLVDPTTWQLVQDILSGNKKSGKNEDLFPLKKFLQCPDCGKSHTAYQRKTKQKPDGSYREKKSKPIYYKCACGDISGKKLHETFSDMLSSFSLNHNDVDILREELEIVFNSMQEEARESQALLKKRITEQSQFLEKLEKKYINDGLDTETYKKHKESTLNEIHKLESALRSQVQLSNPTQFINNSLKLVTKPSKIWRDSNISAQRELQKLIFPEGLMYSKKKEEYRTPRIHSIFAVIHSPTKEKTRLTNGVNLVYSTTAVPRGIEPLFPG

SEQ ID NO: 20337 - protein, 539 aa, synthetic construct
MHGRRAAIYARYSTELQDGRSIDDQVALCREHAARSGLTVVATYDDRAKTSASIFGRDGLARMMEQARARQFDVVIVEALDRLSRDQEDLAHIHKRLSFARIDILTVHEGVADSVSVGLRGLMGTMFLEALKAKTRRGLAGVIRDGRHAGGQTYGYRGVPGEPGKREIVAHEAEIIREIFAAYVEGKSPRTIAGELNARGIAAPRGPKWNASTLNGNPQRGYGILRNPMYDGRLVWNRVTMVRDPDTGRRVNRENPLDARQEVEAEHLRIVPRPLFEAAVRRHAQQAEAVRTGKITKAPPRPFSGLIRCACCGGGMSIHDRCGEAIRIRCSTANESGSCENKARYRLEKIEEAIFHRLRAQLDRPDYLKEFVRVYAEERRRLTETARRDRARLERAAADSRARYVRLVDMMARGLIEGEEADAQVLQAKQAAEIARSELEIASSEDNVVELHPQATAAYTRAIADLSAALQRGDGTFDATSVEALRRIITEITVHPKDETGDVLVEVRGNMERLLGIDQQIVGGPMVARGGLEPPTPRL

SEQ ID NO: 20338 - protein, 605 aa, synthetic construct
MKKCFIYHRVSSEFQLARTGIQRQEDSLQAYVERTNLLADMEDPEPTIISDRGISAFKTNENNFSIGELGRWMDQVRDGMWDGSALVLESIDRFSRQNPFTVVAYLSELVSHNITIHDVSLSMLINRTNSAMLPIVTMSAQRAYEESKLKSDRIRDGWRRRRENAFNNGTIVTNKRPRWIDVKNDKYVLNDKVAIVREIFRLYKKGIGTSTIAKILNTRGEKWLFESGRLWRSESVHKILKNKRVTGVIFISETIRDYNSTDKSIDRNTYEMDLYPIAISKEEYTLVQQLLKMRRTNNGRITNIKDTGELKKSNIFNRVFRCAKCGEAMYHNVVLANRDSKKRGKFKEEYRYIRCIGERDGLCDNKALRYEVVEQFVIEHIKGMDFTKILKPNEINPEIELVRVLIEEEKAHIQEYELGIERLKKQDKKIPFDVLTELQDSRDKLRTLEERQFSFADIKVDTDYIKSVDSSVIFDQTNIAIRSMVEHELIKIIDTIKLYRMGKHYVITLKYRSVGILKHVLIVEAKKIPTLISNIVIERTGKTVEYSTPSFSLVIADGDSPRLKTSDGVPISMIDYSLLLNYVDDVDRDDIVGVWMREKFNTLTS

SEQ ID NO: 20339 - protein, 452 aa, synthetic construct
MKAAIYIRVSTQEQIENYSIQAQTEKLTALCRSKDWDVYDIFIDGGYSGSNMNRPALNEMLSKLHEIDAVVVYRLDRLSRSQRDTITLIEEYFLKNNVEFVSLSETLDTSSPFGRAMIGILSVFAQLERETIRDRMVMGKIKRIEAGLPLTTAKGRTFGYDVIDTKLYINEEEAKQLRLIYDIFEEEQSITFLQKRLKKLGFKVRTYNRYNNWLTNDLYCGYVSYKDKVHVKGIHEPIISEEQFYRVQEIFARMGKNPNMNRDSASLLNNLVVCGKCGLGFVHRRKDTVSRGKKYHYRYYSCKTYKHTHELEKCGNKIWRADKLEELIIDRVNNYSFASRNVDKEDELDYLNEKLKIEHAKKKRLFDLYINGSYEVSELDAMMADIDAQINYYEAQIEANEELKKNKKIQENLADLATVDFDSLEFREKQLYLKSLINKIYIDGEQVTIEWL

SEQ ID NO: 20340 - protein, 452 aa, synthetic construct
MKAAIYIRVSTQEQIENYSIQAQTEKLTALCRSKDWDVYDIFIDGGYSGSNMNRPALNEMLSKLHEIDAVVVYRLDRLSRSQRDTITLIEEYFLKNNVEFVSLSETLDTSSPFGRAMIGILSVFAQLERETIRDRMVMGKIKRIEAGLPLTTAKGRTFGYDVIDTKLHINEEEAKQLQMIYDIFEEEKSITSLQKRLKKLGFKVKSYSSYNNWLTNDLYCGYVSYADKVHTKGVHEPIISEEQFYRVQEIFSRMGKNPNMNRDSASLLNNLVVCGKCGFGFVHRRKDTVSRGKKYHYRYYSCKTYKHTHELEKCGNKIWRADKLEELIIDRVNNYSFASRNVDKEDELDSLNEKLKIEHTKKKRLFDLYISGSYEVSELDAMMADIDAQINYYEAQIEANEELKKNKKIQENLADLATVDFDSLEFREKQLYLKSLINKIYIDGEQVTIEWL

SEQ ID NO: 20341 - protein, 559 aa, synthetic construct
MLEATAQREREEGQTAWHGPLWGLPRRDPQRLRAAIMTRLSRDVEDSTSIWTQEADGRLLCQLRGWDVVLVTYDVGVSGSIRPEDRPGFGVILGNLPNVDVVVARSVDRFTRQTSHFAGLVETLDAGATTLVDVQGQVDLTSPYGRFVTTIMVAFAQMEREMIQGRILRSRTQLRQAGRWLGGAAPYGFRIVPAGPSGKMLALDEYAAGQLRHVIRRLIGTDGRGVTLTSEVDRLNRDGILSPGDYRRALQGKTPPPAPGYTPWSYSPLYQHLRSEVLRGFRVVGKRDTRRVVRGADGAPVIVGPELVTADVWRALQAALDAAAVDPRRPRRKATLLLHTAWCPGCEEFMHYNGRVISPRAGEDDTPAPEGTEKRADLYNCPAARIGKRRPADGCPGVSIRAVNLEEMVEEWFLTRFGHFEYTERVNTGGSDHAADMADLEADIEELASGLAGLRGAAKEAVLQQLNARQDALEALQVLPTVPAGVRWVPTGRTVREEWEARDIAGRRLMLMAYRVRATVAPAYGSKVWNPNRVTIDIEREDPAADHLADIEEEETADY

SEQ ID NO: 20342 - protein, 567 aa, synthetic construct
MQKAIIYIRFSTLEQREGVSLDRQKERCLEMCEANGWDVETILVDEGKSAFAGKHRDAGAAFGDFEAAARHGIHAGKVLVVERLSRLSRLDYNETYDLMRVLNKNGVTVGCWDGGRIYKANEPIEFVSVIELLVKAKTANEESQTKSDFGKDKWARRRADAASGKVATSNGPAWLQLDANRKWVVIEDRAQVVRQIFEWADQGDGSLRISRRLNEAKVQPWARYANRTPRCWERKQVSRIMANLAVIGDYQMMMEDSDGKPVPAGEPIRGYFPRIIEPDVFERVNLGADDRKIMKGGGRSVAVANLASALTRCGVCGGAMEYVRSRLKGATVIRDGKETAPLKQDQGYLYCRVANRRGDCVNRTSIAYVGFERALLDSALHLALDDASFSRVDEVGRLTVMIADKRRDYAAAFSRAETLFNAFAESASDMGMKMALEAERTAKAVQAEIDELQVQKDRASGQASAAEHLSRLNEIREQLYDDDLDVRRVARLKVAAGLNSVIEKIECQEDRRVFVRYKRGARVSIIYPGRGRRPAYSFDVNLAKPGDDHSDDPKVQALIGRMKLEAE

SEQ ID NO: 20343 - protein, 551 aa, synthetic construct
MLKRDYLIELGIESILNYLRKSRQDEEMEKRTGEDTLTAQKDLMDRVLAPLEIPYDQRFEIGSGDKIDSRPVFQGVVRDLREKKYQAIAVKEISRMGRGSYTDMGIIYDLIQDHRIFIITPYKIYDPRNPSDLKQIRFELFMSREEFETTKERLNGGKVSKAMSGYWVAGRAPFGYTYNKKTRKLEINEEEAAVVRIVFDYFVNGVPTKDGKRREVSFRALSTHLQKHTMLKTPNAKGDWHPNVVRQLLTYERFIGILRYQTTKRVNGKQVARPKEEHVIVHDAIPPIIDKYIWDKAQDKITESSHKPRTKMEFSACELAGLCVCIKCGRRMVRQYSVQNYKTTSGEISQYHKEFLWCTATGCTFVKYRAIEEDLLYSLRFLQGLDEDLLKDQLNASVIAEEKSSETGFSSSEMRDQIEHKRKVLKDRENFICEKYESGLYTDELFESRMKELRTERERLDLMEKDISDDPTEQREKIDIEVVRANLHSILELYERAEDKTDRNTVLRSVIDHVDVEVLEKGRGRIPAKHRIRIYYKYNLLMPSSFGLMSV

SEQ ID NO: 20344 - protein, 496 aa, synthetic construct
MKAGIYIRVSTDEQAAEGFSIDAQKRRLLAYADSQDWEVTEVYIDDGWSAKDLKRPEMQRMIKDVEIHAFDVVLVYKLDRMTRSASDCDNLIKMFEAHNVKFQSCTESFETRTATGRLFIRLVADIAQWERENTAERVRMGMEQMIHAGKRPGGPVNYGYDKYEKIVQEEYTQIRLLRKFYMEGLGLRGVANKLNDMGLLRRGYRWTSFSVWYILDNPYYAGKRRYGTKKANGKYASRKKEEHVELLIVDGPQDLIFTWEEYEEHKEEMKRRSFTGYSKVREYWFSGVLKCSKCGGKMSGRYHQNKRQDGSYNKILSYICVSRQTGKGCTMPMFRQELVESLLLEWIGERLSTDYSAMRELAATVEEDPVVDLRKDLARELDKVRDRRKKWQRMYADDLISQDELREHNADEKQNEELLIAELAKMPDVHIEDYTEQNEILFGLPEVWDQMDDVDKHDMILDIFKEIVLHTPLDTSKKNGKKGQFIPASIQSVIFN

SEQ ID NO: 20345 - protein, 539 aa, synthetic construct
MVKNGARVYSYLRFSDPRQATGSSADRQLQYAHRWAADKGLVLDDSLSLRDEGLSAYHQRHVTQGALGVFLRAIEDGRIASGSVLVVEGLDRLSRAEPIQAQAQLAQIINAGITVVTASDGREYNRAGLKAQPMDLVYSLLVMIRAHEESDTKSKRVKAAIRRQCEGWMAGTFRGLIRNGRDPQWVQWTGDAWELMPERVLAVRRALELYRQGLGAGRAANLMHQEGYKLTEWGISGLQIYRMIKLPALRGVKRLSVDGEDYELEDYYPRILSDVEWGELQHLAGQRLRRRGAGEIPGIITGVGLTYCGYCGTALVAQNIMNRRRPDGSLSDGHRRLQCTSYSKQGGCSAGGSCSVVPIERALLNFCSDQFNLQRLLEVGDDGQGIQHQLAAANAEADKISTQLGRVTEALLADDSGAAPLAFIRKARELEQLQAIAQKKVRDLEYEASAFAGVAQPAQAGRWEELAAQVEAGDYTAREQVRQLVMDTFERIVIFMRGMEAQDRSGRVIDVQLISRTGQHRVIQINRRTGAWVASEDWM

SEQ ID NO: 20346 - protein, 534 aa, synthetic construct
MTKKCFPYVRFSSTRQEDGSTRTRQNELIDAFVTKHGLDVDRHLEDAGTSAHRGKNAGAEGVLGQFLRQVRMGEIDKGSYLLIENFDRLSRDKIVRSNKIFTDLLYAGIKIVILDKNKIYDAENLDFGDWISALVEFERANAESERKSDFSSKAWKFNREKMRNGEIVTKKVPSWLKVENNAFVIDYLKVERINTLFKLSLSKGLQEATREYNDLYSEKLAIHQTQYLLSNRKLIGEHSPQKIHYDESGQLKRKGEGESIPNYYPAVVDEKLFYQVQEVIKSRRPFAGRYSGQRYNVFRDLIFCKACGGTIRYMNKGERDYFLCTNSMTGKCVLNSHFGQQSIRGKKLFGMFFAFTENLNISALLEENTVAEVIKTELLKLDARRNQIKDRLDEFKISVKDMIMNGKVIPNTYNELISDFESNRIHIDQEIETKTKELEQIHTSAKSFAGLKESDISSIIYDRSDEAVEKRVRYNNELKKIIKTINIDYLNTFLQIEFFNGVTRRIDEDGKAFDYNLEELNASMYAAAKNYAPK

SEQ ID NO: 20347 - protein, 507 aa, synthetic construct
MKRAISYIRFSSEKQSRGDSLRRQSKMVTDWLKAHPEYYLDQDLSFRDLGVSGFTGKHLKGGLGDFLTAIEKGLVKAGDTLLIESLDRLSRQAVDRASELLRNILRSGVDVVTLSDGEHYTKESLRDPLSLIKSILIMQRAHEESLRKAERIQAAWDAKKEAAKAGIKISRRCPAWLKLNDDRKSFSVIPEKVETVKRCFQLRLEGKSIWEIVRTLNAEGHRSMNQYKPGKFGQTSVQDLLKNRSVIGYFTPKGCEEIAGYYPSVIDETTFYKVQQLSHSRYGRKPASDKPLSVNLFKGVIRCSECGHALIITGFSDTRSGIYRCPLRNENRCSAKGLSRKQTDGTLLTLLSRLDRFDSDTTNTIDTLKLHREHISNNIEKLVQLSLEIEDLSAITSKLKQLKGELSQVDADIEKETQRLKSIDVGCLSDCDLTTKAGRIEAQLIIKSAVKEVVLNTAKRRCKVTFHNGRAITLPITEDPSEDVTEAIQSLSEVTERGLIDVDVVEI

SEQ ID NO: 20348 - protein, 470 aa, synthetic construct
MRNIRIGKNTSNNKKTGLYIRVSTNFQFEEGYSVGAQTEKLEKYCNYQEIDNYDLYIDGGYSGSNLNRPEMKRLIKEIQEGKVESVVVVKLDRLSRSQKDTIYLLEDVFEANDVGFISLNENFDTTTPYGKAMVGILSVFAQYERENIRERTQMGITERIKTGKWRGTKPPFGYDYNNGDDVLVPNKDAETVRKIFELYKEGYSTYALAKMFDLKGDKQVSDMLSRVTYIGKLKYNKEIVDGLHEPIVDKKLFDEVQELRKTRTRATSHKSQYLLTGLIYCGLCGAKMRYQKWSGGRVMIYCYSLDHSKPHLVKNPNCQNGKLDAAEVEDVVVSDMLKLSKEYEVIEEKSEQQNQKGFEAMNQRKSVLEGKLKSLYNLYASDTNNSVLLETIGEINKELENLNTQIEQYTLKNTRAKDMTARAKAFKSVADSWEFMSFNERQKTVREYIKKIKISNDYVEIEYNDLLTLQ

SEQ ID NO: 20349 - protein, 527 aa, synthetic construct
MAYCLYLRKSRADIEAEAHGEGETLARHEKLLLEVAKRGHYNITQIYREIVSGETIAARPVVQKLLQEVEDGKWEGVLVVEVERLARGDTIDQGVMAQAFKYSGTKIITPLKVYDPANEFDEEYFEFGLFMSRREYKTIKRRLVRGRNASAKEGKWVSGLAPYGYERVRIKGDKGWTLRPVEEQADIVRFIFKLYTSGEEDDNGEVRRLGTYTISKRLDSLGVAPPSSAQYWNDRTVQCILQNPAYIGKVRWGVNKSKKRIVNNSIEVERYKAPAEEVIYVDGLHSAIVDEAIFQKAQDLLQRSGPPPVPKRNSVVNPLAGILVCGKCGRSIVLRRGRIDILICHNRICDNVGSKYEYVEERLLQALSSWLDGYRLEWSDKLPADEQAILDLKQKALRKTVAELETLHKQLDRTHDLLEQGVYDTDTFLVRSRSLTERIAAAEEDISTLTAEVQADKERAASRLNVIPKVEKLLEVYPVLPSAQAKNEMLKEVLEKVEYTKNERSGRNGPFDNFELVLYPKLPPKIE

SEQ ID NO: 20350 - protein, 648 aa, synthetic construct
MLGIYARISREKEEGKDRSINDQVLSGKELAAKLGLKYEVYIDEGLSGTLDIEERPGLMQLIEDILSKKITHTFAYDQSRLERNKDVWSKLYTIFQDKKVKLSFKDVLEFDFESDENYLFSHITSLMNNFYTKVASRKIKSVLSRNIQEGKAHAIPPYGYKKNNEGYLIIDEIEKDVVKEIYESSLKGNGVDSIAYALNDKSVPTRYNKINTGTYTVRNKYTGEEKKLEKSKTKWRGGTIRNIIINPIYKGSRIWKGQSYNVPAIITPEYWDKVNSNLSENANNTGKKVLHRYLLKGVLSCGKCGRNMVGRSRTNKKDHYYQCSSKRYKGESCGNRSINIDKIEGIIWSRFFKGNDLLNLLQNDLIKDDNKIEVLNKDLQALQKKIEQQKKEKANLINAVAKGLFSDEEITTSKKQIDNKIKETEILINDIESQIDNTKNSDKLINNYITEFEHYTDNMSFLQKKEIINKYIKSISVLSHSNNTNIYTLIIRFKINLKDEHYMYGKSDNFLLSLTSMEVINSKFFSPNTSDVISATDVNVLKRVYIHPDTYEIKTPPYKYVDGNILFSLNSVVPYYTFPSNNAHWTKESICDFYEKHPDYLCKESGVSIISKDESQKYYEDMKYDYQKFKDKPLIEWLEFIENRSKSS

SEQ ID NO: 20351 - protein, 693 aa, synthetic construct
MMHEKIAPHHLERKAILYVRQSSAHQVLHNRESSALQYAMRDRLAALGWSHIETVDDDLGRSAAGGVTRAGFDRMVAEVCLGKVGAVAAREVSRFARNSRDWQQLIEMCRVVDTVLVDQEAVYAPRQGNDRLLLGLKGSLNEYELDLLRQRSLSARYEKARRGELVVTVPAGFVKAGDRIEKDPNRRIQEAIALVFDKVTELGSARQALLWFLEQGLDLPVRCANGDVIWRRPNYATIHRMIANPIYGGAYAYGKSRSVPGYDGRSGIRRKARDEWLALIPDAHEGYISWERAEEIRKMVSDNVPASRHHGAPKHGDALLAGLFRCKRCGQKLTVRYTGANHNIPRYSCWRGLLDNGEPRCIAFGGLRVDDAIEEALLGVVEPGAIAAAVEAERNMANQRDQVQDALMRDLEAARYVADRAFRQYDAADPENRLVTSELEARWNKALTGVGEIEAKIAKHRTVTPHPFPMSASQVTALAGNLRAVWTAPTTDARLKKRIVRTLINEVVADLDDGTSEIVLVIHWVGGVHTELRLPKRHRGQRNATPDDIVDAVKQLVLIANDDVIAGVLNRNGLTTGNGNRWTRERVTALRSYRKIPVFRPQIDGVEPWLNLGGAAKLLGISPKTLRLAAEAGDIKGAHPLPDGPWIFSRSKLATPQARQILDRVRKNPSPPRGIASRSGKSIPFNDIERRVL

SEQ ID NO: 20352 - protein, 520 aa, synthetic construct
MIIADLYIRVSTDEQAEKGYSQRDQDERLRRYCANNNILINKVIYEDHSAKSFERPEWKKYLIEIRKRNHKSSLVLFTKWDRFSRNTGDAYQMISLLHKNHIIPQAIEQPLDMSVPENKLMLAIYLSTPEVENDRRALNTFHGMRRAKKEGRLMGIAPYGYVNRTHEDGKKYIAIREPEASNIRWAFNELAKGHIPADHVRLQMNKRDGLSMGRSAFAKAMRNPVYCGKIYIEDYKQEEAYYTDGKHEALITERLFNQVQKVMDKRRKVEGPGGRVFGNERFPLRGLLVCPRCGKNLTASGAKGKSKTYYYYHCHYKCGFRFDSDKLNELFELEISKLEYNPIIKELMKEILLDNYKQFTCDIEAKRKSISKDINLLNEKVASARDKYLADKLDEDDYKEIKMLTRSQIEQLEQELQHIVSESKELDIRTKIENALDSMENLVNLYQQGDLLTKRTIGCLIFPQKVEFDGKSFQTPKMNIVAQCIYQYNNGLGNKKNRHKRVKTSNVGLVTSTGFKPVTF

SEQ ID NO: 20353 - protein, 496 aa, synthetic construct
MKSAYLYVRVSTDEQKRKGYSLPEQEDRLLKYCKYNNIEVKGIYREDYSAKNFNRPEWKELFYEVKKKSAGEDKNILFIKWDRFSRNVEYAYEMIGKLRKYNTTAMAIDQPIDFSVPESTVMLAVYLAVPEAENTRRAQNTANGIRRAKLMGRYPNKAPIGFVNVTLMDGKKAIVPKEPEAEIIKWAFNQVIQNDYRISEIRKIANDKGLICSRSHFFRVMRNPIYCGLISIKINNNEEQIVQGLHEPLISKSLFDQVQSVVNTKRKTTAKRGDLQSVFFLRGFLTCPICDRKLTGSISQGRSKKYPYYHCHNGCRTRIDANLLNECYQNKLQELILSNNTVELFKNILEGQNLKTQKASYLYSQKLIERKIKEESLTLSRGRKLFIAGILKIDDYNELKKENQINTKNLRKEERDIVLKLSAIDRKNKIEDEALVEVFQKFTEFDTSDKKHLVNLIPPIDIDYKTGDLSLDLNPAFSKILSEKNHRKNNKKNEFH

SEQ ID NO: 20354 - protein, 525 aa, synthetic construct
MPSAFSYVRFSSGKQAKGSSEQRQRSMLGQWLEQHPSFTLSDLRFEDLGRSGFSGEHLDHGLGQLLAAIDSGAIQSGDVILVEAVDRIGRLEPLEMLPLFSRIVRAGVSVITLEDGHIYSKDSVNETSLFLLVAKVQQAHDYSNRLSRRINASYTARRENARAGLGVKRETPVWLTTDGQLVPHVAPHIAQAFQDYADGLGERRICRKLRESGLEEFSKTNATTVRRWLKNRTAIGYWNDIPDVYPHVVDPALFYRVQQRLDAPKVDRAKPSAHYLTGLVKCAVCGRNYNFKQRKHTDPAMLCTSRARLAGEGCTNSKTYPVIVLDQVRKLTSLPFLQHAMENASSQADPSSQRLAVIDGEIGELSRKISEATKALLVLGFTPEIQESLEQLKTAREALEEERATLLLPQAEKLTAAQLEAFSNGLLDDEPMKLNHVLQTAGYSMVVHPDGSIDVDGKRFVYEGASRKEKVYKLRLLGEDKQWSLPILTPARAESLAKSVAGGYLPPNTPEDVARYFEKVRHLVR

SEQ ID NO: 20355 - protein, 690 aa, synthetic construct
MSSTDLIPAALLARKAVVYVRQSTQSQVMTNLESQRRQYDLVDIARQRGFGDIEVIDDDLGRSASGTVARPGFDRLVALLCAGKVGAVLCFDASRLARNGRDWHHLLELCGLVEARVIDHDGVYNPCRPNDRLLLGMKGSISEFELGVLRARMLDAVRSKARRGELRLSVPFGYIWHREAGLGLDPDLRLQEVIRSIFTRFHELGSARQVLLSMTKDQVHFPRPSDEGRMTSFVWTPVRYRNVIGILKNPFYAGVYVYGKSEKRTAIVDGRARRTYGHGKPAGTWEVMIRDHHEGYITWDEYERNQQQLALNNYGRSGGTKSGRGGKALLSGLLTCGRCGRRLSVAYTGNPQSRPVYRCDKPNLMMGLPRCMTFGGPRVDAAVARELLRAVEPLAIEATFEAERMHRERQEDQRHIHDLELRQARYEASLAERRYAACDPDNRLIAAQLEKNWETALRRVRDLEVRKPADSPSTIEVDPDTFTNLADNLQAAWDSPDVTMRARQQLLRTLIADIVVDVDDAVREVVLTIHWKGGQHSELKVRKPQSGEHGCATTEDALAVMRSMAGRWSDEHIAASLNRMGMPTGQGKTWTAHRVASVRRVRAIHAYKSANKDGEWMTMTEAAAALGVTNHRIRHLIKTKVLSAEQVVPGAPYQIRASDLASATVQAAIARKARPCRIADAETLPMFTDT

SEQ ID NO: 20356 - protein, 547 aa, synthetic construct
MPRLISYVRMSTSEQLKGFSLERQRNLIADFARKNGLSLEDSHILEDIGRSSFSDDTEQKELTKFFEDLEKDKFQPGDVFALENIDRLTRRGPIDALMKVNQIISKGLKLAIISDKEQRILEEIDVFSIITLSIDASRANKESQVKSDKGLQNWAFKRELAATHKIAMTAQAPAWIDTETYYIMDETKNKQVKRRRYVLNEDKAKTVRLIFELFQNGNGSLKIKNILNEQNIPTFKGIEYWEPSTISKIIRNPATYGMYQPKKQNTGKRDLVAIGEPIENYFPAVISKEIFDQCQQITATNTTRKGRRGKLFTNLFTGLLKCADCDGPIHLLNPGIDKRAKNPKPVNYLICKKGKFTKECITKRLRYEDFENVMLKAIQEINLADVLHENNPLENLIKQQRNLQADIEKKKKLLENFERNFVENDGDLPSFMIAQAKQAEIDIKSLDSEIKSIRLEISQLNVYNSNIDNAIDELKVNGTYEARSKINLILHEIIKHIVIDFELDDYGVMFKNGAKRFINNGIIQNVFRTENTKQRDDEINEILNHKN

SEQ ID NO: 20357 - protein, 508 aa, synthetic construct
MKKAIAYMRFSSPGQMSGDSLNRQRRLIAEWLKVNSDYYLDTITYEDLGLSAFKGKHAQSGAFSEFLDAIEHGYILPGTTLLVESLDRLSREKVGEAIERLKLILNHGIDVITLCDNTVYNIDSLNEPYSLIKAILIAQRANEESEIKSSRVKLSWKKKRQDALESGTIMTASCPRWLSLDDKRTAFVPDPDRVKTIELIFKLRMERRSLNAIAKYLNDHAVKNFSGKESAWGPSVIEKLLANKALIGICVPSYRARGKGISEIAGYYPRVISDDLFYAVQEIRLAPFGISNSSKNPMLINLLRTVMKCEVCGNTMIVHAVSGSLHGYYVCPMRRLHRCDRPSIKRDLVDYNIINELLFNCSKIQPVENKKDANETLELKIIELQMKINNLIVALSVAPEVTAIAEKIRLLDKELRRALVSLKTLKSKAVSSLGDFHAIDLTSKNGRELCRTLAYKTFEKIIINTDNKTCDIYFMNGIVFKHYPLMKTISAQQAISTLKYMVDGEVYF

SEQ ID NO: 20358 - protein, 397 aa, synthetic construct
MRRAISYIRFSSERQLKGDSVRRQSKLVTDWLDKNPEFYLDSSLSFKDLGKSAFSGKHLKGGLGDFLTAIEKGLVKAGDTLLIESLDRLSRQDIDIASELLRRILRAGVDIVTLSDGEHYTRESLKDPLSLIKSILIMQRAHEESLRKSERVQAAWNRKKELISEGIKVSRRCPAWLRLNDDRRTFTIIPDKVEVVKRAFDLRLQGLSFWAITRTLNDEGHLSLNQYTPKQKGWSDTAVKKLLRNRAVIGCFTPAGREEVQGYYPAIISESLFYRVQQLNTGQYGRASVSSHPLSVNLFRGIIKCSECGATIVLGGYALKRFGMYRCPNRSANRCSAKAISRKQTDTTILYMLALCDRFETENTDTIDSLKLQREDLQRKISKMAELAIELDDMTII

SEQ ID NO: 20359 - protein, 576 aa, synthetic construct
MKPKAYSYIRMSTDIQLKGDSLRRQTEESKRYCDENGLELVEDFKLQDIGVSAYRGRNVAQGELGRFLSLAEGGLIPKGSFLIVESLDRISREKPQTAVALFLQILESGVDIITLTDRRIYRSGSADVSDILMSVLIMARAYEESRTKGLRVGAAWENKRKNIHEKKLTQVAPAWLRLSEDRRAYNVIPERVAVLQAIYNDADKGKGSFQIARKLNLDGVPTFAPSKGWHESYVSKLLTNRSVLGEFQPHRYIEGKRTPAGDPIADYFPAVVSQDQFERIQAGRAVRKIRGSGRKGRDNVNLFSGVATCGYCNGKMMIVDKGTGPKGGVYIRCDNARRGNDCWAAMWPLKHLETAFLFFVKELDLQSLIVESSAKDARLLAEGQLATISNELTKKKKMRDSAFELLSDDSVGTDFVREKLADLASEIQRLEKEQAEINSQAKQELARQADRDLDVRTLIEAISAGPKENLDSRIAVADWIRRNVQQMKIYPDGRDGPQREIDRMSASLDPDVAKLLEASIAFTKRNNALVDGSHRHFSVGFGGHRFRAVDVDRNDPTKHIVMTFMDDDSWETDRAT

SEQ ID NO: 20360 - protein, 558 aa, synthetic construct
MAHGVQLQSSSLLRAVGYCRVSTDKQLERDLSVPDQQRQINQHCEKNGWRLVNHYIEGGLTATDDNRPEFQRMIERATDDDHPFDVIVVHSFSRFFRDLIGLELYIRRLAKSKVQVVSITQPLGSGPEHDMLRQMIGLFDEYTSKEISKHVRRGLKENARQGFWNGSRPPLGYRLEEAERRGERIKKRLAVDEIEAETVRLIFRLYRVGDGKSGPIGIKSIAKYLNAAGHRTRQGGYFGSSLIQVMLRNTTYKGEFLYNKRNYKTEEENPVEETVLVAVPVIIDPTEFGVVQALLSARNRLVTPPRIVTGPILLTGLTFCSKCGGAMTMSSGTSHTKKVYNFYSCLAFRKKGKLACDGCNVSMPALDKLVVGRLTERLFTKERIAEIIREIAQRRATKSTQADKRAAELRRRALDGEVRLNRLYRSIEEGIVELDDLLREKVAALQSDRRKAQDALDRLTEATIPAPEVSEGMIDEFVKVMRESISEGSVPFRKAYIRSVVERIEVSDDTITIVGAKLKIDQAVKAKELPLSSVRGFEPKWYALGESNPSSQNENLVS

SEQ ID NO: 20361 - protein, 547 aa, synthetic construct
MKLLVTYIRWSTKEQDSGDSLRRQTNLIDAFYSKHKDDYYLLPAHRYVDKGKSGFHQQHKAQGSDFRRMFENVMSGAIPEGSLIVVENFDRFSRADIDTAIDDVRQILRKGVSILTLGDGELYDKSALTDPVKLIKHIIIAERAHQESLVKQKRIAQVWNHKTQLARELKKPMGKQAPGWLELSEDGSHYIVDEDKASLVNIIYDKRLSGMSMFAICKWLNEQGYPTINQRKVRISKTKKPDGNWSALSVKHILTSRSVLGYLPAKISTEDRKTVLREEIEGFYPQIVTDSKFYAVQQLLEETGKGKTSSGEHWLYVNILKGLIRCKCGLVMTPTGIRKPVYQGTYRCNGNKESRCNYGTVSRKLLDTQLCSRLFSKLSQLHDEATDTAKLDELQRRLNTVDSELEKLTETLIQLPNITQIQEALRVKQEEKDELIVQLSREKARVKSVSSLDLSGLDMESVEGRTEAQIIIKRLVKEIVVSGNEKLVDIYLHNGNMIRGFPLDGKDDHTLTLEEATDEMQPLDDMLIFGEPVTRIYPAGDMEEVDA

SEQ ID NO: 20362 - protein, 507 aa, synthetic construct
MKRVISYIRFSSERQAKGDSLRRQSKMVNDWLKAHPEYYLDQDLSFRDLGVSGFTGKHLKGGLGDFLTAIEKGLVKAGDTLLIESLDRLSRQAVDRASELLRNILRSGVDVVTLSDGEHYTKESLRDPLSLIKSILIMQRAHEESLRKSERIQAAWNRKKELISEGIKISKRCPAWLRLNDDRKSFSVIPDKVETVKRCFQLRLEGKSIWEIVRTLNDEGHQTLNQYKAGKFGQTSVQDLLKNRSVIGYFTPKGCEEISGYYPSIIHETDFYKVQQLSYARHGRKPASAKPLSVNLFKGVIRCSECGHALIITGFSDTRNGIYRCPLRNENRCSAKGLSRKQTDGTLLTLLSRLDRFDSDTTNTIDMLRLHREHISSNIEKLVQLSLEIEDLSAITIKLKQLKGELSQVDADIEKETQRLKSIDVGCLSDCDLTTKAGRIEAQLIIKSAVKEVVLNTAKRRCKVTFHNGKSITLPITENPSEDVTEAIQSLSEVTERGLIDVDEVII

SEQ ID NO: 20363 - protein, 522 aa, synthetic construct
MTAFSYIRFSTKDQAQGDSYQRQIASSRDWCKQRGIELSGKGYADLGISAFTEKTRASLADMLEAIQLGTIKAGDWIILENLDRLSRQGIDKTQEIIKSILRHGVKIVSLQDGLELDSGSLNDLVAVIRIALSADLAHKESLKKSERVSAAKASQRELAKQGKAIGKRLPYWLERDGYSYQFNDGVDAVRLMIQLRTDGLGFHKIAMALNASEFKPRWADHWSDTTIRNILSSPALYGRYQFRDGDGVDDYYPALVSYAVFKAFQSTFTASAGGQEHHNHLFGLVRCGACGGAMSKKVSKRKVAGEWKHYKGWICTKTLSGACAQKSPMMDLDTLVIRAVKRLKVSDSKKVSREANQLDQEIDTKKARLDEITQALVSGNGSVSVLSAAASTLERELKDLLVQRKDSVTTSQSEIQTLYDLRDDPKLFNVALRRVVDRITVSHKGSSTWHVAIHQRNGHLISVAAFRKSQRSPWQYLFGNTAEIGSKSGLEEWGTDEVSANPEYWETGITNPEYEHKEVCDD

SEQ ID NO: 20364 - protein, 509 aa, synthetic construct
MEERKNAISYQRFSSDRQRNNSSLDRQSDAILNWLKQNPDVDLIDQYIDEAMSGWSGKHIEQGSLGKLLQAIEDGIVKPDTMILVEHFSRLSRQNIEKTEDLLRKIWGYGITIVTIRDNGVYPPSAINDMPLRIRLIIEIEQAFKESEWRSAKVKGSYAKREKEAKNGITPKMRRPFWLNEDGTLNENNTVIKDIFNWYMEGLGQQRIIVRLREKYPTVPSVQKMNPSTVMRWLSSEVVLGKWRGNKVYEAAVDETLFYNVRNVHQSRLYENVKPDRNWPLSGLLQCGVCGRGMSIQKSKGSLPVIRCSSKQRDKSCKRKTTFPYALAHHYMFNTVRKRANRVYTQRTVTKESTLRLGQIENDLVNLGSQTHEMKKLIKDLISQRKTPRSLIEMVSELDEEVAKLEAEREQLQNSIKAQNNLFISEEAHNLVLSPRNFNLEMHKLGFKIVVGEYTLNTTGFDNEAPEWVYRGYCRKKRAYKFNMLGKELYIPTSGFTEEILMLEDKEEV

SEQ ID NO: 20365 - protein, 547 aa, synthetic construct
MKLLATYIRWSTREQDSGDSLRRQTNLIDAFYSKHKNDYYLLPAHRYVDKGKSGFHQQHKAQGSDFRRMFENVMSGAIPEGSLIVVENFDRFSRADIDTAIDDVRQILRKGVSILTLGDGELYDKSALTDPVKLIKHIIIAERAHQESLVKQKRIAQVWNHKTQLARELKKPMGKQAPGWLELSEDGSHYIVDEDKASLVNIIYDKRLSGMSMFAICKWLNEQGYPTINQRKVRISKTKKPDGNWSALSVKHILTSRSVLGYLPAKISSEDRKTVLREEIESFYPRIVTDSKFYAVQQLLEETGKGKTSSGEHWLYVNILKGLIRCKCGLVMTPTGIRKPVYQGTYRCNGNKESRCSYGTVSRKLLDTQLCSRLFSKLSQLHDEATDTAKLDELQRRLNTVDGELEKLTETLIQLPNITQIQEALRVKQEEKDELIVQLSREKARVKSVSSLDLSGLDMESVEGRTEAQIIIKRLVKEIVVSGNEKLVDIYLHNGNMIRGFPLDGKDDHTLTLEEATDEMQSLDDMLIFGEPVTRIYPAGDMEEVDA

SEQ ID NO: 20366 - protein, 559 aa, synthetic construct
MSKEKIKVYLYIRVSTSIQIEGYSLEAQKSRMKAFAIYNDYEIVGEYEDAGKSGKSIEGRIQFNRMMEDIKSGKDGVSFVLVFKLSRFARNAADVLSTLQIMQDYGVNLICVEDGIDSSKDAGKLMISVLSAVAEIERENIRIQTMEGCIQKAREGKWNGGFAPYGYKLEDGKLFINEEEAVAIRTIFDQYVNTTIGANGISKYLENHGIRKIPRQNGKNPLFDAGLIRKILKNPVYNGKIAFGRRTLEKVHGTRNEYKQVEQDEYLISEGIHEAIVSDEVWQAAQVKLKSQAKKYERVNKGKDTRTHLLSGIVKCPICGVGMFGNKCIKKKKDGTKYKDFYYYGCKHRQMIRGHECTFSKQIREELLDDAVAEVIVKIVSNPKFASMMQEKINMKVDTSEIEKEIDNYQKELRKSHSTKFKLIEEIDNLDVEDKHYKRRKQDLDDRLCRMYDKIDELESSLIDAKAKKQTIEAEKLTGDNIYKVLIYFDKLYKVMNDVEHRQLISALISEIQVYEEKQSNGQWLKSITFKLPIIEENLNIGLDNDEQVECVSLLEKRS

SEQ ID NO: 20367 - protein, 479 aa, synthetic construct
MNKVAIYVRVSTKGQAEEGYSIDEQIALLTSYCSIHKWKIHDTYVDAGISGATIERPELSRLSRDAQKKKFNTMIVYDLKRLGRSQRNNISFIEDVLEKNGIGFISLTENFDTSTPLGKAMVGILSAFGQLDRDTIRERMMMGKIGRAKSGKPMMTSTIAFGYTYDKITSSLNINPAEAIVVKTIYNEYLSGRSLTKLRDYLNENDLLRNGKPWNYQGVSRILRNPVYMGMVRFRGEVYQGNHDPIIDSETFEAVQKELKKRQLETYEFNKNTRPFRAKYMLSGIIKCGYCGSPMGVTLGTKRKDGTRNIRYQCVNRFPRTTKGITVYNNGQKCNSGFYEKDDIEIYVLGQVRLLQLNKAKLNKMFETPEIINVEEIENQINSLNNKMKRLNDLYLNDMISLDELKTQTYTFLKQKDLLENELNNNPAIHQEENRKQFQKLLGTKDITQLSYEEQSFAIKNLIDKVFVKPGIIDINWRI

SEQ ID NO: 20368 - protein, 481 aa, synthetic construct
MITTNKVAIYVRVSTTNQVEEGYSIDEQKDKLSSYCDIKDWNVYKVYTDGGFSGSNTDRPALESLIKDAKKRKFDTVLVYKLDRLSRSQKDTLHLIEDVFIKNGIEFLSLQENFDTSTPFGKAMIGLLSVFAQLEREQIKERMQLGKIGRAKAGKSMMWAKTSYGYDYHRETGTITINPAQALAIKFIFESYLRGRSITKLRDDLNEKYPKHVPWSYRAVRTILDNPVYCGFNQYKGEIYPGNHESIISKEEYDKTQSELKIRQRTAAENVNPRPFQAKYILSGIAQCGYCGAPLKIMLGVKRKDGSRLKKYECHQRHPRTLRGVTTYNDNKKCDSGFYYKDKLEAYVLTEISKLQDNAGYLDKIFSGDNAETIDRESYKKQIEELSKKLSRLNDLYIDDRITLEELQSKSAEFISMRGTLETELENDPALRKNKRKADMRKLLNAEKIFSMDYENQKVLVRRLINKVKVTAEDIVINWKI

SEQ ID NO: 20369 - protein, 479 aa, synthetic construct
MNKVAIYVRVSTKGQAEEGYSIDEQIALLTSYCSIHKWKIFDTYVDAGISGATIERPELSRLSRDAQKKKFNTMIVYDLKRLGRSQRNNISFIEDVLEKNGIGFISLTENFDTSTPLGKAMVGILSAFGQLDRDTIRERMMMGKIGRAKSGKPMMTSTIAFGYTYDKVTSSLNINPAEAIVVKTIYNEYLSGRSLTKLRDYLNENDLLRNGKPWNYQGVSRVLRNPVYMGMVRFRGEVYQGNHDPIIDSETFEAVQKELKKRQLETYEFNKNTRPFRAKYMLSGIIKCGYCGSPMGVTLGTKRKDGTRNIRYQCVNRFPRTTKGITVYNNGQKCNSGFYEKDDIEIYVLGQVRLLQLNKAKLNKMFETPEIINVEEIENQINSLNNKMKRLNDLYLNDMISLDELKTQTYTFLKQKDLLENELNNNPAIHQEENRKQFQKLLGTKDITQLSYEEQSFAIKNLIDKVFVKPGIIDINWRI

SEQ ID NO: 20370 - protein, 464 aa, synthetic construct
MKRAALYIRVSTMEQAKEGYSIPAQTDKLKAFAKAKDMAVTKIYTDPGFSGAKMERPALQEMISDIQNKKIDVVLVYKLDRLSRSQKNTLYLIEDVFLKNNVDFISMQESFDTSTPFGRATIGMLSVFAQLERDTITERMHMGRTERAKQGYYHGSGIVPLGYDYVDGELIINDYEAQIIQEIYDLYVNQGKGQQYITKRMVAKYPDKVKTLTIVKYALTNPLYIGKISWDGKVYDGHHTPIIDKSMYDKAQEIIARMAQKGGEQHGNQLGLLLGITYCGKCGAKVFRYVSGGKKYRYNYYMCRSVKKMLPSLVKDWNCKQPSLRQEVVEKKVIDSLKSLDFKKIERELKQVENKTKSKITTINNQISKKHNEKQKILDLYQYGTFDVTMLNERMKKIDNEINALTANIANLEGTKSESLINKLETLKTFNWETETTENKILIIKEFVERIELFDDEVIIKYKF

SEQ ID NO: 20371 - protein, 528 aa, synthetic construct
MAKVRIIPAQVKQGNRNRQIEESEAKLKVAAYCRVSTLYEDQASSYETQVAHYKEFITKNPTWELAGIYADDGISGTDTKKRNQFNQMIDDAKQGKIDLIVTKSISRFARNTIDCLQYIRELKELHVAVFFEKENINTMDAKGEVLITIMASLAQQESESISRNIKIGLQYRYQRGQVIVNTARFLGYDKDDDGNLVINPEQAKVVKRIFYECLTGKSAIEIARELTKEGIKNGIGRTQWHSSGIIKILRNEKYIGDALLQKTYTVDFLTKKRVKNDGQVPQYYVENNHPAIISRAVFYQVQKLLDMRREGFTTEGGHHHGYTNAYCFSSIVYCGRCKDIYTRCVWYRPRIGEVEKVNVWRCYSRLHWNHKGKRCMGRTITEADLEEASLKAMNELIQQHQLADKQIAANILKVTKGTTGPSLDELDQQLEDQQLLLLNMSTHNKNVEQLTEQVQALRKQREQLIQQKIDHDIKRSNLKNIQSFFQTYQGGLTKFDEKMVRLLIEKITIYKSKIEFTFKDGEVITVKG

SEQ ID NO: 20372 - protein, 517 aa, synthetic construct
MASVTKLTKPQSKVQATLQVAAYCRVSTNSDEQEDSLANQQDHFKSYIQQQPNWQLHQIYYDNGVSGTKAQNRPGLQALLKDCQNGQVDLVLTKSISRFSRNTTDCLRIIRQLKQLDIPVIFEKENINTGSMDSELILSVLGSLAQDESQSIAHNVRLGYQQRASNGVFHYSIPPYGYQKDANRDLIIDPIERKVVLRIFNWTIEGKSPGQIAKLLNEQAIRTKRNGKWHDSTIRGILQNTVYLGTTEFQKTFTDDEYHRHPNQGEQGKIIIEEHHPAIIDQATFTQVQKIIKFKQKFNPQAKAKPQRHTFSRKIYCGNCQKLFKRQSRSGKVCWGCQTHIKHAKDCPVKSIREDALQLAFCTMVNKLIFSQKFLLKPLVKQLQARQSQEQVAKLSQVETELNETQSKQDNLQQLRKQELIEKDFFTKQDAELEQKIANLQSEIERLKQLLGGQNSKLPLAHELLKLCQRSDYLTMFNAELFEQIIESITVDQDHNLTFHLKCGLNLTEGSKHHVKA

SEQ ID NO: 20373 - protein, 452 aa, synthetic construct
MKAAIYIRVSTQEQIENYSIQAQTEKLTALCRSKDWDVYDIFIDGGYSGSNMNRPALNEMLSKLHEIDAVVVYRLDRLSRSQRDTITLIEEYFLKNNVEFVSLSETLDTSSPFGRAMIGILSVFAQLERETIRDRMVMGKIKRIEAGLPLTTAKGRTFGYDVIDTKLYINEEEAKQLRLIYDIFEEEQSITFLQKRLKKLGFKVRTYNRYNNWLTNDLYCGYVSYKDKVHVKGIHEPIISEEQFYRVQEIFSRMGKNPNMNKESASLLNNLVVCSKCGLGFVHRRKDTVSRGKKYHYRYYSCKTYKHTHELEKCGNKIWRADKLEELIIDRVNNYSFASRNIDKEDELDSLNEKLKIEHAKKKRLFDLYINGSYEVSELDSMMNDIDAQINYYEAQIEANEELKKNKKIQENLADLATVDFNSLEFREKQLYLKSLINKIYIDDEQVTIEWL

SEQ ID NO: 20374 - protein, 452 aa, synthetic construct
MKAAIYIRVSTQEQVENYSIQAQTEKLTALCRSKDWDVYDTFIDGGYSGSNMNRPALNEMLSKLHEIDAVVVYRLDRLSRSQRDTITLIEEYFLKNNVEFVSLSETLDTSSPFGRAMIGILSVFAQLERETIRDRMVMGKIKRVESGLPLTTAKGRTFGYDVVDTKLYVNKEEAQHLQLIYDIFEEEKSITFLQKRLKKLGFKVKSYSSYNKWLMNDLYIGYVSYGDKVHVKGVHEPIISEEQFYRVQEVFSRMGKNPNMNKESSSLLNNLIVCEKCGLGFVHRVKDTVSRGKKYHYRYYSCKTYKHTHELEKCGNKIWRADKLEEMITDRVKNYSFATRNLDKEDELDSLNAKLQVEHSKKKRLFDLYINGSYEVAELDKMMADIDAQINYYNSQIEANEELKRDKKVQESLAELATVDFDALEFREKQIYLKSIINKIYIDGEQVTIEWI

SEQ ID NO: 20375 - protein, 452 aa, synthetic construct
MKAAIYIRVSTQEQVENYSIQAQTEKLTALCRSKDWDVYDTFIDGGYSGSNMNRPALNEMLSKLHEIDAVVVYRLDRLSRSQKDTITLIEEYFLKNNVEFVSLSETLDTSSPFGRAMIGILSVFAQLERETIRDRMVMGQIKRVESGLPLTTAKGRTFGYNVVDAKLYINEEEAKHLQLIYDIFEEEKSITFLQKKLKELGFKVKSYSSYNKWLMNDLYIGYVSYSDKVHVKGIHEPIISEDQFYRVQEIFSRIGKNPNMNKESSSLLNNLIVCEKCGLGYVHRAKDTVSRGKKYHYRYYSCKTYKHTHELEKCGNKIWRADKLEEIIISRVKNYSFATRNLDKEDELDSITEKLKTEHSKKKRLFDLYMNGSYEVAELDKLMADIDAQINYYNSQIEANEELKRNKKVQESLAELATVDFDSLEFREKQIYLKSIINKIYINDEQVTIEWI

SEQ ID NO: 20376 - protein, 452 aa, synthetic construct
MKAAIYIRVSTQEQIENYSIQAQTEKLTALCSSKDWDVYDIFIDGGYSGSNMNRPALNEMLSKLHEIDAVVVYRLDRLSRSQRDTITLIEEYFLKNNVEFVSLSETLDTSSPFGRAMIGILSVFAQLERETIRDRMVMGKIKRIEAGLPLTTAKGRTFGYDVIDTKLYINEEEAKQLQMIYDIFEEEKSITSLQKRLKKLGFKVKSYSSYNNWLTNDLYCGYVSYADKVHTKGVHEPIISEEQFYRVQEIFSRMGKNPNMNRDSASLLNNLVVCSKCGLGFVHRRKDTVSRGKKYHYRYYSCKTYKHTHELEKCGNKIWRADKLEELIIDRVNNYSFASRNVDKEDELDNLNEKLKTEHTKKKRLFDLYISGSYEVSELDAMMADIDAQINYYEAQIEANEELKKNKKIQENLADLATVDFDSLEFREKQLYLKSLINKIYIDGEQVTIEWL

SEQ ID NO: 20377 - protein, 452 aa, synthetic construct
MKAAIYIRVSTQEQIENYSIQAQTEKLTALCRSKDWDVYDIFIDGGYSGSNMNRPALNEMLSKLHEIDAVVVYRLDRLSRSQRDTITLIEEYFLKNNVEFVSLSETLDTSSPFGRAMIGILSVFAQLERETIRDRMVMGKIKRIEAGLPLTTAKGRTFGYDVIDTKLYINEEEAKQLRLIYDIFEEEQSITFLQKRLKKLGFKVRTYNRYNNWLTNDLYCGYVSYKDKVHVKGIHEPIISEEQFYRVQEIFSRMGKNPNMNKESASLLNNLVVCSKCGLGFVHRRKDTVSRGKKYHYRYYSCKTYKHTHELEKCGNKIWRADKLEELIIDRVNNYSFASRNVDKEDELDNLNEKLKTEHTKKKRLFDLYISGSYEVSELDAMMADIDAQINYYEAQIEANEELKKNKKIQENLADLATVDFDSLEFREKQLYLKSLINKIYIDGEQVTIEWL

SEQ ID NO: 20378 - protein, 491 aa, synthetic construct
MGARVSVLSGPQKVSHEAQIDTATKWAKAHDYPVVGAFEDVGVSASVPPDERPELGPWIRERSHEWEVIIWSKLDRGFRSMRHCSDFIKWAEMNHKIVVFADDGLTLNYLNPASLVESTLSELFVSMAAAFAQIELNRFKSRAEDMHRAIRPTTRWAAGLPPLGYRVVDHPSGRGKGLAIDPDAANLVREMADKLVDGWSFVRITEWLNESGKLTSQGRSRKARGLEPKGRWTTTNVIEILTGYRTLGIKTHKDQPVLDNNGEPIRLAPPLFTPERWDEVQRAAQLRKGKARTPSDTSNPMLEVGFCAVCGSSLAQQFSKTKPRKSDGHVTRYRYYRCSRTPINCKTVFVVADILDELLSEQFLLERGDRRVTERVFIAGEDNSYELDFIKQRIELLREDRASGLFPSGEDELVYRNQMKQLLARRDELASAPVRQPGYENVELEKTYREVWPSATPEEKRKMLIDAEISIRLGKSPGKSLRAELVIGAPY

SEQ ID NO: 20379 - protein, 487 aa, synthetic construct
MKQQARRALVVIRLSRVTDATTSPARQLEACLELCKQRGYEVIGTAEDLDISAGKTSPFDRPELGDWLTNRRGEFDVLVTFRMDRIVRRLLDLADLIRWCQENSVSLVSATETFLDLDSAFGDIVALLVAKVAEMELTAISERNRSAAQHNMREGKYRGGPPPWGYRAEKIDGDWRFVQDDQQVSVINEVVRRVLDGEPLRQVAADLTDREVLTPRDRAYQLKGKEIRGYSWHSAKLREMLTSKSLLGHAVTANGSIRNDDGSPIIRATPILEREVFERLQVELTGRENRTEPTKRSSSLLLRVIYCGVCGKPAYKLKGGKGRQDRYRCASAQYKSTCGNKTVMIADAEEILTDAVMSVLGGKYRRNKVWDPGSDHAAELAELEETLSDLTDQLGVGSFRKGTRQRERLDARIAELARRQAELAAQASKPAGWTWVPTDELFGDWWTSQTVEQLNLWLRSMDIRMCWNHQGIQTDMLHLEKMSEQWS

SEQ ID NO: 20380 - protein, 556 aa, synthetic construct
MTKAYAYIRYSRAIQATGDSEHRQLTALELFETSTGTNVVEVVYDKGKSAFRGDNARSGNFKEMLDRMQSGAIRRGDYLVVESIDRITRQRVLDGVELLQGILKKGINIYTTVDKKTYSYNDPSRDFENLLMISLIAKRANEESETKSGRLLSAWKARKAKAENGEVIIKKGKSIPYGLRVEEGKFVIHKEEQEEIKQLFDLLLQFGINTAITKINETSLKKWNNGTLNKIIKHKTVIGCMATHRVEYTADGKAKKILTGFIENYYPNLIEPELFYKAIDVMANRKQKNWSGRRTEQDFNIFKHCIFCAECGGKLYYDHRGSRYKGKIYPFFKCDNARVQKHVCTADNIRFEYVLGSLLDSIKMINRVATEFKRDFKGISTQARFINPKINSLLKADGENSNLVLEEKQKQLISKRTKLDNMNTQMVEADYNVPTKFIQEISKTEKEIEALNQEILLIHSAFADEGTIDVQDTKTVIDLFMTDEGRAKLNYFFKTNDIIFLVSHKKATRETRFSMRRKNELIDERICNNFIKFPLKDILGNYGLGDLQTMFDLTVS

SEQ ID NO: 20381 - protein, 567 aa, synthetic construct
MTVQIYSYKRISSRTQKEGTGIDRQEALIQEYLANHRRELAREFIDLGISGFRGKNARTGALREFLDLIASGIIKANDVLLVENFDRLTRMNGIDATKLVVDILSAKIIIVTLADNQIYDYRQEDHSSILFKINFVLSRANEESRIKKNRSLGAWARKHSEAKSSNKVMTKRLPYWINYNDETETLNLNSHRADEVRKIFDLLEIYGCARTANEINKTPTDKKWTLIAIRHLSRAKSVYGCLEIYKTKSQSGESVDYEELENYYPAVISKERFFNLQTKLNIRTETHDKIGRESKGFRNIFKGVIFCEHCNTALHQNFTKRKGKEYMYLICAKSLVGACPAGRKIFIPYGYIVEPFLLYYKNYELEKIIRKSGDVQSLVESRNAYNAEIEDKQSTVEKIAQSIELNGGDIPKILLSRIRKIETEISELTKKRDLADIEIAKMNIYVEAEQAISRTDIDELLEKEEGRIRFNMLLKESQVQIRVLKRFEDSEPFLGQDFQDEHKMSVVVINNKAKGFGLSYYFDRKHARLAGGTYYFYTKKFVGGWNTDFTLPLGSRAEFSVYDDKPQ

SEQ ID NO: 20382 - protein, 507 aa, synthetic construct
MNSKIRTTHLERRAVVYLRQSTPNQIELHRESTERQYALADRALNLGWDKSQISILDSDLGKSGQTTTGREDFHRLMAAVGLGEVGAVLALEASRFSRSQADWHKLLDICALTDTLVIDHDGIYDPNDFNDRVILGFKGTWSHTELHGMRLRLQGAKLNKAKKGELRCSPPTGYVYDPEGKLVLDPDEGVVAAIKLVFQQFHALGTAFKVMRYFCVNQIPFPRRRWRPGHMGTLYWGPANLSRITGILRNPTYTGTYVYGRRRSLNVIENGQITKVKTQLLPQEEWKVVIHDAHEPYVSWSEYLANCEQLRRNNTGYISDGCQRTPREGFALLQGLVICGKCGRRMSPRYHGDGGKRVAYECTQARKQDGSVGVCWSVAGTAIDTAVEAHVLEALTLEQLNISLAVLSELEHQAHEADKTWQLRLERAHYEADRAFRQYDATEPENRLVARTLEKRWNEKLQQLTELEEAYNRAHQVERADFGSLNCAATIVRLRFVRNRYCCLIVK

SEQ ID NO: 20383 - protein, 520 aa, synthetic construct
MTEKNIMVIPARKRVGSTAAKEKIKKLRVAAYCRVSTETEEQNSSYEVQVAHYTEFIKKNNEWEFAGIFADDGISGTNTKKRDEFNRMIAECMDGNIDMVITKSISRFARNTLDCLQYIRQLKDKNISVYFEKENINTMDAKGEVLLTIMASLAQQESQSLSQNVKLGLQYRYQQGKVQVNHKRFMGYTKDEDGNLIIVPEEAEIIKRIYREYLEGQSLVGIGRGLEKDSIFTAAGKPRWRPETVKKILQNEKYIGDALLQKTVTVDFLTKKRVKNEGHVPQYYVENSHEAIIPKELYLQVQEEIHRRSNIYTGEGKNKRIYSSKYALSAITFCGDCGDIYRRTYWNIHGRKEFVWRCVTRIEQGPEVCKNRTVKEDELYGAVMTAINKLLAGGNNMIKTLEENIHAVIGETTEYQISEINNLLEEKQKELIKLANKGKDYEHLADEIDELRDKRQTLLVEDASLSGENERINELIEFIRKNIFRTLKYDDKLVRKIIQSVTVYEDHFVIAFKSGFEMEV

SEQ ID NO: 20384 - protein, 527 aa, synthetic construct
MNENVMLIPARKRPGNSISNQKEKPKLKVVAYCRVSTDSEEQAGSYEMQVKHYTDYISRNSDWEFVGIYADDGISGTNTKKREGFNEMINDCMAGKVDMVITKSISRFARNTIDCLKYVRQLKDSNIPIIFEKENINTMEASGELLLTIMASLAQQESASLSQNVKMGIQFRYQEGKVQINTNWFLGYTKDADGNLIIDEEEAKVVKRIYREYLTGSSLREIATGLQRDKIKNGAGHLKWHVSNIKGILENEKYIGDALLQKTITTDFINKVRIKNDGTEPQYYVKDNHEAIIPRDIFIQVQEEMLRRANMFSGEGKKKKRVYSSKYALSSLCICSKCGDIYRRVAWNNRGERLVVWRCCTRVEHGPKSCDAATIPEEELQKAVVKAMNEVLKTSDDTEKILIKNIEKVVAGSNDEEIEAINRVIAVKQKELLAQVRAKKDYTDIANEVDTLKGEKHKMLVQKALDEDAKRRIKDMEKFLKIQSREITEYDEELVRKYIKQIKIYDDKFEITFKSGIEINIERIRID

SEQ ID NO: 20385 - protein, 681 aa, synthetic construct
MTTSELVTRHHLTRKAIIYIRQSTPHQLLSNQESLRLQYALRQRAIELGWSDDNIEVIDSDLGITAATAQQRPGFKELLAQVTLGLVGIILSYDVTRLSRNCSDWYPLLDLCGYKSCLIADRDGVYDPGSANGRLLLGLKGQISEVELHTIRSRLNAGILSKAQRGELALTLPVGLVRDELGVVHKDPNREVIDRINLVFEIFGQRKSASKVLQMFNSEGLLLPRRNRFGDIVWRKPSVAAILSILKNPAYAGAFVYGRTRTLKRGLVSNQPQQKHLPMAEWKIRVNDIYPAYISWQTYERNQAQLMDNYAEYDRNKTRGIPRPGAALLHGLVYCGECGHKMVVQYKGVTRYICNYLRQQYRVPVCQYIPADVIDEYVVNAFLEALSAVELDAYHKAVKTQQQSLETVERAHSQQIERLQYQVALAERQFNRVDPDNRLVAAELEQRWENALRELKLAQENYAQRQQPQTVTQLPKELKTAFINIGQRLPELWHTGTLTQVQKKSLLRCLIDKVVIHRLVRDTVRTRIIWKGGDTTTVDLPIPVGSLAELTNADELETQVVAQSLQGIDDQVIAQQLTAQGHRSPLRTTLLPSTVKTIRLKHRIFQNRSQSHPRQISGYLTVPQVAKSLELSPHWIYDRIHKGTIAISKDESTGLYLFPDVPDTLEQFQKLKAGLVYNLRF

SEQ ID NO: 20386 - protein, 483 aa, synthetic construct
MEKRVGIYVRVSTEWQADEGYSIGEQTDKLKKFCEIKEWNVYKVYTDGGFSGSNLKRPGVEMLIHDIKAHEIDTVLVYKLDRLSRSQKDTLYLIEDVFNANSVAFISLNENFDTSTPFGKAMIGILSVFAQLEREQITERMQMGRIGRAKAGYYNGGGSPIFGYDYVDGMLKINPLQSQVVKEMFEDYKAGVSLNGLTRKLNLEGHIGKETAWSYRTVRYVLDNSTYTGKVSYKGVDYDGLQTPIISQELFDTVQKELKRRQTVAAAKFNNPRPFRSKYMLSGLLRCGKCGNVFETRKSMVKDNSRLSSRVRYACRSRHPSHSTPDAQHVVKPCTSSTYSAIELEDKVLARIGQLAKHPERVRKLFEGNSHKINPQPLKDRQKQIDGQIERFMNLYGIGGISMDALNSRIQKLNDEKEKLAQKLRSVNRDVSAPVTAMQKALDKAPAVIASADYQEQTKLVRTLIKKIVLNDNRMLIEWNLKW

SEQ ID NO: 20387 - protein, 515 aa, synthetic construct
MSECIYLRKSRADAEAEARGEGETLARHEAQLMKLAKKLHLNVTKIYKEIVSGESIEARPVMQHLLKEVEMGIWDGVLVVEVERLARGNTLDQGIVSQAFTYSNTLIYTPMKTYDPTNEFDQEYFEFGLFMSRREYKTINRRLMTGKIASINEGKYVGNKPPYGYEIVKIQKEKGNTLRIIPEEAEAVKLIYELYVNYDKGPRLICNELDNRGYKPKYAESWSPYTVQDMLANPVYIGFIRWNGRATIKHVESGKIIKSRPRNENPILVKGLHEPILDKNIWEQAQLIRKSHSRPRLNAKYGEIKNPLAGIIVCGVCGKNMSRRPYNQSGQLPSLVCTNRKCNNISSRLDFVEEELINQLPLWLAHFKLQLEKNCSPATTSNDIEKSLTRANSELQQCINQIDSLHDFLEQGIYTTEIFLERSKKLSEKRKIINNKIDKLKEELSLKEKEGNEKDIIPRIERVIELYDKLDDPADKNTLLKSAIEKVVYTKKEGGKYSGKERSFSLEIFPYLPNK

SEQ ID NO: 20388 - protein, 583 aa, synthetic construct
MKRAVIYARYSTDLQNDQSVEDQIRLCKAHAERLGLNVVGELFDRAKSGASMFGRPGLARLMQKAEADEFDVLVAEHPDRISRDIADLAHIHKTLRFRRIEINCVNGGAMDTVQIGMYGVVGQMQREEGAKKVKRGMVGVVRSGRNAGGKAYGYRPVPGRKGELEIVEEQAEVVRRILSLYASGIAPRAIAATLNDESVPAPRGKRWNASTLNGNGQRGNGLLLNPIYAGKLIWNRVHMVKDPSTGRRISRINPEIEHEEIEAPHLRIVDDALFEAVQNRKASRGGARSRSTPKYKRLLSGLLCCGGCGGGMAINGSDRSGPRVICSTHKESGSCGNGARYYVQKIEQQVIETLRAQFADTRIIDIYVKEYEAERRREAAEKRRNRATLDRELEEAKMAITRIVERLAKGLIEDDDAAAILPGLRADRDRLQRELETIEPPSNVIELQPRSVRAFRENIERLAEVISKRGETPPVELAQSFREMIAGVIVEPRKAGEPYRIECCLTEIFGRRREHPGLTGSWRETQENKTLKGRLRAGRASVFDTDVGPETAASPPPTTICANLQGVLKIDLRPLRRLQSLEK

SEQ ID NO: 20389 - protein, 566 aa, synthetic construct
MTTKPRAALYLRLSKTTEASTSIERQEADLRARAEREGWAIAKEHVLVDDGLSGRKERAKATEALDLLRSGAVQVLMVWKLDRFGRRGAKDLAEIQGALDDAPGSRFVALRDGLDSDQRAGWHVVSGVLGGLAAAEAENISTRSKSSRAHLVTVGRWPGGRAPYGYRTTRNPDGPGRVLVQVDGEVAEVRRMVDAILVGDASANGLARDLTARGVPAPRSAYRAAALRRIEDPSAPDPKGLDRGAWQASTVRALLRGNAIAGYQTRDPERVGKGKRPDPAELDMVRDSDRMPLVVWDAIVTADELAALRRRFPPKKDRVSEHRGRPPRALLSGKKGLGRCGLCGGPLYMGTSGGVTSYRCARPGGGAVCMGVSIRSTATDAEVGEALLSVAGEWPVVEPVTLSEAAALDAERARVEAALDEITRQKRASSRAERKVLSEQEEALLERLDALAEQEPETRVEIRETGETFREAWERAGVPERRVILAGALDAVEITPKRVDGPRFDASRIVLHWRERGEDGAVEILSGDALREAIATDSTRRKVTPERRAEIVAERERREARETASA

SEQ ID NO: 20390 - protein, 526 aa, synthetic construct
MSDRKTAVGYIRVSTDEQVREGYSLDNQIKEIEKKCEREEWELLKIFDDKGVSGALLEQRTGLKSMLKFIKERKVNYLVIYKMSRLSRKIFDIVNIAEFLEKNSTYLISVEDKIDTSNPMGKYFLVFSSIIADMERENIIVQVKGGMSQKARQGEWNGGEPPLGYDLVDKKLVINVEEAEIVKLIYSEYLKGSAYLAIAEMLNQRTIKTKKGKNFSGTSVKGILQNPTYTGKIRWGHRKDWGKRHEDNKRKRQYDDNPIISKGIHEAIIDEESFNKVQEMINSNPRRNMKRFDGKHLLSGLLRCPACGYGMSYQPATSKGKEYGYYICNQYMNLKTCKPNGVRKDLIEEEFLTIFEQIVNEPDFKAKMMSSLNNSDEQIKELERSVKRKESEISILKGKQDKLFDELTEGNEAYRSEVRIKIQENLDKIAAFQEEISATREEIRNLRGSRLDLDEIVELFENVGKVIRLLDKEAQQTLVRKLISSIKIENKHIAEVHFSFQQSFRIGGGTGNRITNSGKTKSRNCA

SEQ ID NO: 20391 - protein, 477 aa, synthetic construct
MRAAIYIRVSTQEQALEGFSVPAQRHRAAAFCDSQGWSVMGIYADDGKSAKDTNRPELQRMLTDADDGLFDVIVVYKLDRLTRSVLDLYEILARIDKRGIKFKSVTEMYDTTTATGRLFITLVAALAQWERENLAERVYFGMEEMVRQGSRPGGTTCYGYDTISGEMRINEAQARIVRHIFDAYEATQGMRTIQQMLEAERVPPPNKHWSTTTINYMLRNPVYIGKLRWNLRKRGKGKTGAPIIVDGRHAPIISKEQFDRVQRLLDRRRTLPPVAATSDFAYSGILRCGHCGYAMSGPSRKYKSVRTKYYACVNRQKNFKCSMPYIREDVLEDAFMQYVRRQLEEHSEGVEIDPDDEIDIDAAVTDLNRRLQLVADRKRKFQTMYVDELISRDDFLLRRAELDAEEKSLRNALDEIAATSEDDKIEVTAADLLEMLAGCNEADKKAIMHEMVKEVKIKNADRMDNGHMTLDIEVTYN

SEQ ID NO: 20392 - protein, 572 aa, synthetic construct
MVVKANQGNVKRVATLYRVSTKKQLDRSSTDNGGDIPSQQKACKEFIERQPGWTLVEEYYEKGVSGFKKRAADRDVIQQAKEDALKERFDVLLVFMFDRLGRIDDETPFILQWFVEHGIEMWSVVEGQQKLNEHVDKLINYIRFWQASGESIKTSIRVNEKHSQMVEEGVYRGGSVPYGYKTEKSGTFNKKGKELLKVVIDEEQASVVSLIYDLVDLEGYGQYRIAKQLNEKLIPSPTGKRWTSATVGSILRNPMYKGYMVYGRNTDKEVMSEKPIPELVIIDEAKWTRVRLVCNGRSPEKVKKEKPNFTIKSTKSSLLFVGLARCGHCGSPLTTTYNRKTYKKKDGTVKEFKSAKYRCAGKAQLRVECDGQTLYSPRRIEGVVLDEIFGYLDQLKSIDLTVQIESFRKQNMVDEMKEVRRLQRKTEEADSDLSALTKEVPKSILGKSNFKPELLNALIEEKEKELSELKEQLLKAEESLTAKKIELDEMVEIQKHIPVWREVFEKASIERKKMMLSSIVEGIVIHRDKVEVKLKLHIREFLGTTRNYTTVLNNSNSLIGKLLTYHTSAANA

SEQ ID NO: 20393 - protein, 538 aa, synthetic construct
MTMTFEDQWPADLLDEMGWSPAERRELGDLWERMQALPPTASRVLLSIRLSILTEETTSPIRQELDLVRMAVERESRVVGIARDLGVSATKVPPWKRPQLGEWITNRAPEFDEILFWKLDRFVRRISDLHLMIEWCKEYAKTLAAKNDPIDLSTEFGQFMVTIIAGMARIEAANTGVRIESLWKFARTAEKRWVIGKPVYGYRSVDQGDGTKALVIDPERARVLRWVYSMVVRGTSLYRACRLLTRAGILPPNKGKWGSGNLKVILINPALMGYRVYRPKGLKQGQPSLIAYNTEGEPIRLAEGIFTKEEFDRLQEILAARANKEVRQQNNRTPFLGTMKCGVCGSNWYDTQKVWERKSGEVMRATRLRCSSYVNGGSCGMKAFDDPQEVYDLLKNTVLEEIGDFQVIHRKYTRGDDSLAQKIKLEEQISHYMSELEPGGSYRDGGFIEAKAKETLTSLGRQLAAIDPESVEDRWTYESQGVTYREHWEKHGLKKMEEDLVRSGITFVIFEDHADLNVPEDVQQRLVVRKDFFGQKKV

SEQ ID NO: 20394 - protein, 554 aa, synthetic construct
MNAPQPAVKLRAALYLRVSTARQAEHDVSIPDQRRQGEAYCAARGYQLVETYIEPGASATNDRRPEFQRMMEAGTAKPAAFDVVVVHSFSRFFRDHFELEFYVRKLAKNGVRLVSMTQELGDDPMHVMMRQIMALFDEYQSKENAKHTLRALKENARQGFWNGSLPPVGYRVVDAEKRGAKIKKVLEIDPLHADTVRLMFKLALEGDGTSGRMGVKAIAAYLNARKLYTRTGGRWGVGTVHRILTRRTYIGEHHWGRRYKDGTPKSQAETVTVPVPPLIDRETFDAVQELLKSRSPMVVPGRTVSGPTLLTGICFCADCGGAMTLRTSGKAKHYRYYTCSTAARQGKTGCKGRTVQMDRLDHLVAEHLEKRLLQPERLRDLLAIHLDRREERDERRRAHAAELVNRAAAAEARLKRLYDAIESGVVDLDDPSLRTRIEELKATRDQARIDAERARASIESAGQAVTPDQIARFAAVARRRMRGKDGRFRRDHLRALAQRVEVAEREVRIMGSRNELLKVLASANGVGTAANGVRTYVPEWRCWQTNSNQSPQGQ

SEQ ID NO: 20395 - protein, 524 aa, synthetic construct
MDKSQKALIYCRVSGKKQTKDGSGLDSQEYRCRQYAEAKGYTVEAVFPDDVSGGGDFIKRPGMVALLAYMDARSSEHFVVIFDDLKRYARDVEFHLKLRRIMSERGAVRECLNFNFEDTPEGKFNEIISAAAGELEREQMGRQNKQKAMARLEQGYAIRSVPPVGLKYVSAKGGGKVLVHDEPVASIVREALEGFASGRFASQSEIIRYLESEPHFPKDLPDGRIRQMTVKRMLTQILYGGYVAMPSWGISMREAKHEGIVSKESFWRIQDRLKGRPVMPARKNMSEDFPLRGGAISCACCGYALTGGWSTGKYKKYPYYFCHHLGCSERGKTIPVAKLHGRFEELLKSLQPTRQFLGMAKVMFTKAWEAQAAGLSEAAKTYSNKAHELEVEIGKVVDRMMEVSNSRALKAFEDRIEILEREKLIVLGKAAKKPEPTRPFGEMFELSMRFLANPYDCWKIGESAARHLVVRLAFDQRLSYTRETGCLNSKKSNVFRALEGISMSGKSMVPPGRIELPLSKRNRF

SEQ ID NO: 20396 - protein, 492 aa, synthetic construct
MTRSVGIYVRVSTENQVDDGYSVGEQTDKLKKYCEIKDWSVYNVYTDGGWSGSNIKRPGMEMLVKDVKAHQIDTVLVYKLDRLSRSQKDTLYLIEDVFNANDVAFISLNENFDTSTAFGKAMIGILSVFAQLEREQITERMRMGRIGRAKAGYFKGGPHSPFGYDYVDGELRINLVQAEIVKQIFTEYDNGLSLNKLTRKLNAEGHIGKDINWSYRTVRQVLDNDDYIGKVHYLGVSYEGNHQAIISTELYEHVQKELKRRQTAAYSKFNNPRPFVAKYMLSGLLRCGRCGSSMSGQANSTQKQIAAAKVKHQASYYIRYYCVSSRPSKLHGAISTRRKDTCDLPTYSAIELETKVLAKIEDMSKHPEKVARLFQRKSVQINTEPLKKRLVDIENQIERFMDLYGSGTISIDKINARIVKLNDEKEALQNKLDQAADKGPEVAAAKMNEALASASEIIASDDYTEQTRLVRSLIDKVILNGNRMTIKWNLDW

SEQ ID NO: 20397 - protein, 530 aa, synthetic construct
MAKKKESPAAGERLAAYYRYSGGGGQTEQSIEGQRRDCEAWAKAHGMTICREYIDRHISGKTDNRAQFQRMMEDSDKHAFDILICWKTDRLARNRYDSAIYKSRLRKNGIKIVYAAESSVDGPEGIILEGLMESLAEYYSAELSQKLRRGIRESALKCHSLGGYHALGLTSNKNHEFVIDETQAPTVRYIFQQYAAGQSSAAIVADLNAKGKRTATGGVFNKNSIMRIVTNEQYIGTYISKAHNVRVENAIPAIIDRELWDKVQAMVQYNRAGRAPHTKRANYMLSGKLFCKLCDSSMKGISGTGKHGEKHYYYACSKHTIHQCEKHNIEKSYLENLIASATADYILAPGKLEQIADRVIAVQLADQHRENPEKEMLEAELSENVRKQDNIMRAIEDGTGSARLSARLRDLEEQESILRAQLAAIDEPAAAPVYDRDQLIFMLSQFQRGPDEQDEEYKQRLIDTFVHAVYLTDEIAFVQFNITDPEKAESTTLESVMLDLLHGKPIAENPSNSGLSAGFDRVSLGGGGGS

SEQ ID NO: 20398 - protein, 533 aa, synthetic construct
MEKKQLTDGSMALQEKQCRVITIEATEKQQDIKLRVAAYARVSSASDDQLNSFAAQNRHYADLISGKENWSMVDIYADEGITGTSAEKREDFQRLLADCHRGLIDRILVKSISRFARNTTECLETIRELKALGISIYFEKENIDTSTMSGEMMTAIFAAFAQAESESISGNMRWSYQKRMQSGKFITCKAPFGYRLCDGRLEIVESEAQIVRLIFDRFLAGYSTTEIASEITSLGIPTRDKIPYWQHTTVCYVLQNEKYVGDSLLQKRYSTDTLPVKKKINHGNKDQYYIADSHPPIVDRLIFERAQALYQAKSSKITHSPREQYPFTMTILCGNCGTYFKRKMSKDITYWVCRKHDRQKDACVMEQIPESQIEEAVLRLYYNLKHHGEPILSQMITSLLTIRNRRMLWSLDVIELNKQISELSSQNQMLTTLKQQGLIDPDIFISQSNELTEQLRTAKLKKERLLASDGDNTIAQTQELMDILEAGPDFLDAFDAELFGELIDKIIVDSKEQLRFRLKNGLELTETIERTVR

SEQ ID NO: 20399 - protein, 541 aa, synthetic construct
MRDNPPRVITIPAKVESTAQQAVQRQLRVAAYCRVSTDDEEQLTSYEAQQTYYTDKIMGNKDWTMAGIFADEGITGTSARKRPEFLKMIRQCKRKKIDIILTKSISRFARNTVDCLNYIRALRELGIAVIFEKENINTMESDSEILITMLGAFAQAESESISANVRWGKRQAMREGKAIIQYKRLYAYEKGEDGMPQIIPEQADVVRSIYDRYLTGASLRMLKDWLESEQIPNVAGGAEWTISSIRSILTNEKYCGDVLLQKTYISDCISRKVIRNTGQLPMYLVENHHDGIVDRKTFDAVQAEMARRNAGKSPSKKNAPTGMTSYASKYALSERLVCGECGTLYRRCTWSKRGKKRVVWRCVSRLDYGTKYCHNSPSVDEDQLQRSILAAINSAMSRKSTLIRKITGAMEQVLAPIPGESMSLSDIESRLDELNDLTRTLVAKAAHAENPSIYTVQLKEIMDEAAVLKEKRQAIEEQRKSNVRAIRRIEEAAAVMEGASAEIQEWDEILIRQLVDTVKVVSAEHITVILRGGIQVEQDMI

SEQ ID NO: 20400 - protein, 528 aa, synthetic construct
MKHNSIHKAVIYCRVSSTAQTKRGDGLGSQETRCREYARGRNYEVVRIFTDDLSGSATDRPGVKAMLAFLKQNRGEPCAVLVDDISRLARSVSAHIELRAAIALAGGLLESPTLEFGDDADSELQEYILATVAQHQRRKNAEQTRNRMQARVMNGYWVFQAPVGYRYDKAGGHGKVLVRDEPLASIIQEALEGYASGRFQLQVEVKRFLEQHPEFPRDRNGEVRNQRVTDLLNQIVYAGYVEAPCWDVGLREGRHEGLISFETFSRIQDRLNGKVRAPVRKDINADFPLRGSVVCGHCSTPLTACWSSGRTARYPYYLCPKRGCESYGKSIRREVIEGEFETLLRSLTPTEGLFKIASSMFRTLWNHRFQAQKERSRSLESEIRKIERNVDQLLDRIVDADSPVVIRAYEARIREMEGRKIEMREKIAQCGRPVRDFDDTLRTALGFLGNPHRLWASDRLEDKRTVIRLAFCDRLAYVRNEGFRTAELALPFKALADFSGSKKGMARPARFERATPGLGIRGSPRGTA

SEQ ID NO: 20401 - protein, 484 aa, synthetic construct
MTSKKARAAIYARISHDPAKANGDQPDDEPKPPGRGGDGLGVARQEQDCRELAARLGLTVADDHVYVDNDTSAYSGKRRPGFEAMLDAMKNHRFDVLLCWHTDRLYRSMKDLERLIDIAELARVPIRTAQGGELDLSTSAGRMVARILGSVARQESEHMSERRIRANRQKAEAGKWQSANRTFGYTMKGEPLEPEASAVRKAALEVLGGKSIQGVAREWKAAGLVGTRGRPFNAPGVRRLLINPRCAALKTHQGKVIGPGNWTPLIDANTHKGLVALLSDPERVICTSFERKYIGSGLYRCGICNDGTTMKAAQPGGKRAGGRRYVCREHAHLVRAGEPLDKFVERQIIDILSSPNAHLLLDNQDIDLDDLNVRREALVCRKDAVRRAHNAGSLDESEYLSDLADLAAQIAACDAELAAATRTSPAARLVAAGEQVWERWKAMSPSEQAQAVDEVATVTILPATRKGPGFNPDDVDIAPKRAIQ

SEQ ID NO: 20402 - protein, 548 aa, synthetic construct
MPERAVTYVRVSTEEEKQLNALAKQREEAKQAVKDNGWIFVKEYIDEGKTGTSTKKRDAYNQLFHDLATDAFDIVVIKSQDRLMRNPKDWYIFLSEMLEHDKRLYMYMDEVFYKSDDSLITGIKAILAAEYSRDLSKKLNLSNKRRQEQGSSIITCGKMLGYIQKDGELYIHEEEAKVVRRIAELYEQNIGARAVKKALDKEGWVNRFGKPVSLTTIKRFPNNYAYEGTIIQNKAHKDFDTKQVRPNDQSEWFIHENRCPVIIPHERMERIRGMMQKRVSKTFCTPRGANRGSYPLSSKIVCSECGKNYRRITRKDNGELVPFWICGTYQELGRKHPKGKAPKEEGCDGRSLRESTIYDVLRQISDERAMDMAQYANTIIMALRKIHSQSDPQKQINAVQQKLAVVNDTQNLLLDKFLEGIITEDVFKRKNQEIETKKQTLQDEIETLCNSQRDTATLEERYAKLFDVITSPKVESESKFRFILDCVENIKVFPDHMDIVLKVYDKEETLHVPNTRQERTHTELDAFKIKLNLSERFNMPYEARVYLK

SEQ ID NO: 20403 - protein, 563 aa, synthetic construct
MPAYRAAIYARFSSDQQRDASIEDQFRVCRQLAESKGWTIVRTFSDRAISGATQHRPQFQELLAEAKAGQFDIVISESLDRLSRDLEHIAGFAKTMTFLGIPIFTVAEGEISELHIGLKGTMSALYLKDLAQKTHRGLEGRIHQGKSAGGISYGYRVIRELLPDGSVTTGDRSIHPDEAAVIRRIFTDYAKGTSAQAIAKALNSEGIASPISGKGSGEWNPSTIAGNAKRGTGILNNEAYIGKLVWNRQRYLKNPETGKRQARLNPPDQWQYTDVPELRIINDDLWDAVKARQKAIRVKINPAGCLTAGLRPERARRPVYLFSGLVKCGCCGSSYTLINKTRYGCAAARNKGEAICTNRATILREDLEDRVITGLRDRLWPPKMVSAFADQYRKSYNSYAANVSAEREKAERKLAKTQSAIDQITKAVEEGMYHPSMIAKLTDHEATKKALEQELSSEPPAPTLRLHPSMSTRFKEHIHALSVALREDHLRAEAIEILRGLISEVRMVPDADARGGHQMELVGDLAGILQLSEGDRGKRQSIIAGGSVTLVAGVGFEPTTFRL

SEQ ID NO: 20404 - protein, 583 aa, synthetic construct
MLGIYTRISGNKAVGKDTSIEIQTAEGVKIALKLGMQYKVYTDIGISGTKEEIEDRPSFAYLMKDIDKGKITAVYVIDQARLERNPKIWQIFLYQVNKKDVKFYPKGIETDLTDPAIKFATSIQSLTNQLFAEQTREKVNLTFDKRASEGFTHGGLPYGYEKGKDGKYQIIPTEADIVLRIFNLSLAGDGTYTIANILNADEIPTKFQNVSKRDSFIRYDAYTGEKKVFNKATIKWRGNVIYDMLKNTTYKGIRVWNRLQKDKKQRIEANVPAIVTEDLFDRVNRNLVNNKQKVGKRSEFKYLLNGLIICGCCGKEYRGKKRIVNKDSAYKCIQQGKCPKSRGLSIVRFENFLIQHLFINKNLKELLINLPINTDNGVVLKSKLFKYEEELKKKIKLKEKYLKWLNDEDLEDDDSIREQYKKNVKDIGSLKNNIEILKSEILESDSNFAKLKVENATNEYKLTTNFDDTKRLIHSLVERITVIHKKLDKGGIFNVVIKYKGFEEYSTFTTNWFSLKWIWLYYSRGEAISEQQRLQDIENEKALFDYKGIPYTDEDFIDFVAGDSVSMMMDEIVLDNNNLVEFN

SEQ ID NO: 20405 - protein, 597 aa, synthetic construct
MAGSVNKAPRQAQPTKAVIYCRVSSKAQESDGHGLESQETRCRQYAATKGYDIAAVFPDTISGGGDFMNRPGMVALLSFLDAQPDESFVVIFDDLKRFARDREFHFRLRDSFRKRDAQVECLNFNFEDTPEGEFIETILAAQGQLERKQNGRQVSQKMKARLESGYWVFYPPTGYKYDRVAGHGKVLVRDEPVASVIQEALEGFASGRFGSQSEVKHFLERQPAFPKDTPNGVVRYEKIIRLMSRIVYTGHVAYANWDVTTRKGHHQPIITFETYEAIQQRLKDGARATFRKDISADFPLRGFVACDDCGTSLTSCWSTSKSGAKHPYYLCHSKGCVSYRKSIRRDVLESDFAGLIQDLKPTDGLFAITTRMFKDAWDQKEKQSDANLAITRRERNGIDKQIEGVLDRILASESPTVVAAYEKRIVALEKDKLILDEKIENHGPQQGTFDQLFEHALTFLSNPYKIWESGNLALRRTVLKLAFAERIVYSRSEGLRTPKTTLPFKVLGQSYIQKCKMAEAQGFEPWEDFHPRRFSRPVHSTTLPSLRWAVSNGKEMIRKATFCVGGFRRQFCDDSSLNGSGALSFAKAGAASRVCHF

SEQ ID NO: 20406 - protein, 523 aa, synthetic construct
MTTCVIYARVSTVKQAEKELPVQSQIDKCKKHAVSLGADIKKVFTDEGISGTSDNRPAFQQAITYCENFDVDYFICWSTSRFARNALEAKLNKRRLANSNTKIAYVSQNIDEGDSGFIYEGILELFDEYYSRQVSQDTKRSMIANAQKGYFNGGFVTFGYQQEPVAGQKKKTRLIPNPLETGTVNRIFELKLASYGGKQIAELMNAEGRLNRGKKWNKTTILELLRNERVVGKVAFGKKGRNGSLPRSEWIVVDSHEPIVSTETFDAVQTMMDKQTNTAVREEGSAKSTRFFTGILKCGKCGQSMKIERAKGATKVYYYYNCGTKKAGLGCENRRINSAIFDPWMVDVICSEVLTERNLKDLLLQLNDLCGSWAKKKRERCTDLIQQIREMERRNSRLYEMLEDASGVYNLQDLAPRLRSNNEAIRKLNTELAIAETEKPPTLEITERDLSELSELLVDIIKTSSNPGKVREFFKTFLHSVEVQDDEIKVKYRPEALLSAHSGIVPSREEWLPLPDSNGGPAD

SEQ ID NO: 20407 - protein, 526 aa, synthetic construct
MRTLLYARYSSQLQNARSIEDQISLLRARSEREGWPIVDVFTDYAISGAAGVGAEQRPGLHAMLARAEAGGIDQIFTESTDRIARHQGDAFGIRERLRFVGCRLFTLLDGEVDELTGTIKSLMDSRMREDLAARVRRGHRGVATSGRSPSSVAFGYQRTPKLDDRGELVRGLREIDADEAAIVRRIFVEFAAGRSAMAISQGLNMEGVLPPRRGFWRAGTLLGNAALGTGILRNRLYVGELVYGRTIGVQSPTTRKQTIRPAVDPVSVGAVPALRIIDDVLWSAVQLRLEQNTGDRPEKHRRPKHVLSGLGFCGVCGGNWIITGNNGKAGARRWGCARAHEKACTNTRLILGHVYEARVLADLKGQMLAPDVVAAFVREYHLEHARESKKLGRDRDRAERQLAEAGRKLDRLVAALSEGGSSFPQIRAAMTAARDDHDRIKRALASMDALPVLTLHPGLADSYRREMDDLERLLMEPDAHLEAIPQIRSMIDRVELLPKADKLRGVDLVVHRRIDQVLAIATRQRA

SEQ ID NO: 20408 - protein, 546 aa, synthetic construct
MTETAPNIIVIPARPETAKDRETQRQLRVAAYCRVSTKDEEQLTSYEAQQTYYTDRIMQNPNWTMAGVFADEGITGTSAAKRPEFLKMIRKCKQKKIDLILVKSISRFARNTVDCLHYIRALKDLGIAVMFEKENINTMDSESEMLLTLMGAFAQAESESMSANIKWGRRQAMREGKVTFQYKRLYAYERGEDDKPRIIPEQAEVVRQIFDSFLMGHSIRMIKAELEQNKIPAASGGKTWSESAIRNILKNEKYCGDVLMQKTYVSDCISKKTIRNTGQLPMYLLKNHHEGIVGRDKFNAVQAEFARRNAGRTPNKRYTTTGRSCFSGKYALTERLICGDCGTLYRRCVWNKRGRKWAVWRCASRVDYGTKYCRQSPTLYEKPLQRAILAVLNSVMGPKKALVGQIADAMRMELLPLPGGTMSMADMDRRLKELEREFQAVFQKSREKPDGFMEYAQAFQKINEEAAMLKEQRSRLLDQQQSDSAAHGRIAHAINVLNNGEAEITEWDESIVRQLVDTVTVLSEDRIRVRLYGGMEFEQELDKERS

SEQ ID NO: 20409 - protein, 529 aa, synthetic construct
MNRQRTEGSSALQERKVIVIEAAQRPEVQKLRVAAYCRVSSESSDQFNSFIAQTNYYTGLITQNPNWTMADIYADEGISGTSAEKRPEFQRLIADCRRGRIDRVLVKSISRFARNTKECMETIRALKAIGVGVCFEEQNIDTSQMSGELLTAMFAAIAQKESESISENQRWSYQHRMQSGNFITCKAPFGYRLSKNTLEVYEPEAKIVREIFSRYLQGDSKDDIAQWASTLGVKTRDGKDRWQHTTISYILRNERYVGDALLQKRYTTDSFPHQKKRNLGERDQYYRIASHPAIIDREIFNAAKKLLELRAKKVVTEKTANDPMAKKIVCGACGTMFRKKACGGITYWECRNHNRDKDSCPITQIPEREIHAAFLRLYHKLIHGEPILKELLLNLQAIRERRLLWSEGIIRLNKRICDLTDQDHTLSRMNQCGLVDPDIFISQSNELARQLIAAKQEKEQLLAAAGDDSIPKTRELLETLESAPEYLPRFDGEIFGDLTEKIVAENNTSLRFILKNGLELTEKIERTVR

SEQ ID NO: 20410 - protein, 554 aa, synthetic construct
MNVTSPITSRAALYLRVSTTRQADVDLSIPDQRLQTAAYCERQGWPVVAEYVEPGASAMDDSRHEFQRMIERACDDDRPFDVIVVHSFSRFFRDAFGLEMYIRRLAKHGVRLISITQELGDDPAQVMMRQVIALFDEYQSRENAKHVLRAMKENARQGFYNGSRLPLGFTLEEVEKRGHRVKKRIVVDPVEAELVRLMFGLYLQGDGASGPMGIKEITKHLNAKGYRTRLGARYGVGTIHGILTNPVYVGEWSFNKRSSKTGQVKPQREVIPIAVPAILERRTFDRVQKALRAKSPHNSPPRVISGPILLTGLAYCARCGSAMTLRTGTSKSGRVYRYYSCSTSGRVGKSACKGQAVPMEKLDHLVTRHVAERVLIPERLEALLQSVVDRRVKADAEVQARLDELSRERTTAEDKLRRLYQLVADGIAEPDDMLKEQIAKLKADRERAHSALERIENQGAAASRLDADKLARFGQLMRLNITNGEVPFRKAYLRSLIDAVEVDPHVVRIHGSRTVLERAVLADRATQPGVRGFVRKWRALGESNPSLHRERVAS

SEQ ID NO: 20411 - protein, 507 aa, synthetic construct
MKRAISYIRFSSEKQSRGDSLRRQSKMVNDWLKAHPEYYLDQDLSFRDLGVSGFTGKHLKGGLGDFLTAIEKGLVKAGDTLLIESLDRLSRQNVDRASELLRNILRSGVDVVTLSDGEHYTRESLKDPLALIKSILIMQRAHEESLRKAERIQAAWNRKKELISEGIKVSRRCPAWLRLNDDRKTFSVIPEKVETVKRCFQLRLEGKSIWEIVRTMNAEGHQTLNQYKAGKFGQTSVQDLLKNRSVIGYFTPKGCEEISGYYPAIIDETTFYKVQQLSHYRYGRKPVSDKPLSVNLFKGVIRCSECGHALIITGFSDTRNGIYRCPLRNENRCSAKGLSRKQTDGTLLTLLSRLDRFDSDMTNTLDTLKLHREHISSNIEKLVQLSLEIEDLSAITIKLKQLKGELSQVDADIEKETQRLKSIDVGCLSDCDLTTKAGRIEAQLIIKSAVKEVVLNTAKRRCKVTFHNGRAITLPITENPSEDVTEAIQSLSEVTERGLIDVDVVAI

SEQ ID NO: 20412 - protein, 613 aa, synthetic construct
MKNVLFYARYSTDRQHEVSIETQIELCEAFARQKGWNVVATYSDSAVSGMSFLSRPGIQRLLAHVKREHIDVVLCVTVDRLSRDVEHSAKILKDLNYQNTEIWTVHASQAITKLELHFRATLSDELVDQIRFRTREGMKTAVRRGKASTCLAYGYKLSQQRDANGDRIKGLRDIDPVKAEIVRRIYTMYADGISPRDIADILNKEGIIGPRGRAWRDTAIRGSKTVGTGILNNPSYIGRIVWNKRQYRKNPDTERRTARMNDADQWVWTEVPTMRIVSDELWERVRARDAVIGDLYQNATTNRLNATHRPEYLLSGMLECEECGGPYAISGKDRYSCTNRKKRLPIDELGGACCGNSKTITRHELEERVLNCLPVAFYSLDIFDRISQKMVAHETNKLKSTPSRREELAAELATVKSKQTSLMQQIQNRHTEGRPRLVILDDQLDELEITREKLVKELTSIAEAPAEDFEEKIAKLKAQFNAENTEIAIRKLIFLARNNADEQAKRRLMPIVRDLIQAVVIGKTPGHQPAALQVHGDIANIMASMDVIDIMQQQFVASAQNDMMARIASGEIDTEAKKEKLLEAYAEELLRRSPEWENLQVSVVAGAGFEPAA

SEQ ID NO: 20413 - protein, 416 aa, synthetic construct
MKKAIAYMRFSSPGQMSGDSLNRQRRLIAEWLKVNSDYYLDTITYEDLGLSAFKGKHAQSGAFSEFLDAIEHGYILPGTTLLVESLDRLSREKVGEAIERLKLILNHGIDVITLCDNTVYNIDSLNEPYSLIKAILIAQRANEESEIKSSRVKLSWKKKRQDALESGTIMTASCPRWLSLDDKRTAFVPDPDRVKTIELIFKLRMERRSLNAIAKYLNDHAVKNFSGKESAWGPSVIEKLLANKALIGICVPSYRARGKGISEIAGYYPRVISDDLFYAVQEIRLAPFGISNSSKNPMLINLLRTVMKCEACGNTMIVHAVSGSLHGYYVCPMRRLHRCDRPSIKRDLVDYNIINELLFNCSKIQPVENKKDANETLELKIIELQMKINNLIAALSVAPEVTAIAEKIRVLDKELR

SEQ ID NO: 20414 - protein, 533 aa, synthetic construct
MKRAAIYARYSTDLQNDQSVEDQFRLCKAHAERLGLNVVGEFSDRAKSGASMFGRPGLANLIQAADRAEFDVLVSEAPDRISRDIADLAHIHKTLKFRGIEMNCVNGGAMDTVQIGMYGVIGQMQREEGAKKVRRGMVGVVRSGRNPGGKAYGYRPIFGRKGELEIVEDEAATVRRIYELYAGGMAPRSIAAILNEENVPAPRGERWNASTINGSGQRGNGILRNPIYAGRIVWNRIQMVKDPSTGRRISRVNPESEREEVAAPHLQIVDSGLFDIVQHRKEATGGADRARGPRSKRILSGLLRCGACGGGMALVGPDRSGNRIQCSTFRESGTCKNSRRYYVERIETEVVDGLRRQFADTSIIEAYVEAYQAEQKRLRGDAQRARANAQRALQDAKDGITKIVEKISKGLIEDDEAAALLAPLRAERDRQKAILETTEDPPNVIEIQPKAVKRFRENIESLAQIVREKGGEASPEIAAPFRQLVAAVVINPTEKGQPYEINIKGYLSSLIDSDLSVIKMVAEEGFEPPTQGL

SEQ ID NO: 20415 - protein, 506 aa, synthetic construct
MRSVITYLRFSSAIQGAEGADSTRRQNDLFKQWLKKNSDAQVVASFSDEGLSGYKGKHLTGQFGDMLARIESGEFSEGTVLLVEAIDRIGRLEHLETEALMNRIIAHGIEIHTLQDGLIYTRDALSDDLGISIIQRVKSYVAHQESKQKSFRVSQKWKQRAKLALAGEQRLTKMVPGWIDPDTFKCNKHAETVRLIFKLLLDGESLHNIARHLQANNISSFSRRKDANGFSVHSVRTILRSETTRGTLPASQRNDRPAIPNYYEAAIDAATFNKAQEILDKNRKGRTPASDNPLTINIFKGLFRCQCGASVHPTGTKNKYQGVYRCNNHLDGRCDVPPLKRKPFDKWMIDNFLGMIDVGNDGEAEGKIASLQHEVEIVTTRIKKATALLLEMDDITELKAQVKELNQKRTELQTTIDSMRRKTSLSDKGLPQLKDIDLMTKAGRVECQLILSKHLKGLTLGKDSVTVTLQNDTEITIPTNPLPLNDGTSIFEIAEKELLEIDAYQL

SEQ ID NO: 20416 - protein, 508 aa, synthetic construct
MKKAIAYMRFSSPGQMSGDSLNRQRRLIAEWLKVNSDYYLDTITYEDLGLSAFKGKHAQSGAFSEFLDAIEHGYILPGTTLLVESLDRLSREKVGEAIERLKLILNHGIDVITLCDNTVYNIDSLNEPYSLIKAILIAQRANEESEIKSSRVKLSWKKKRQDALESGTIMTASCPRWLSLDDKRTGFVPDPDRVKTIELIFKLRMERRSLNAIAKYLNDHAVKNFSGKESAWGPSVIEKLLANKALIGICVPSYRARGKGISEIAGYYPRVISDDLFYAVQEIWLAPFGISNSSKNPMLINLLRTVMKCEACGNTMIVHAVSGSLHGYYVCPMRRLHRCDRPSIKRDLVDYNIINELLFNCSKIQPVENKKDANETLELKIIELQMKINNLIVALSVAPEVTAIAEKIRLLDKELRRASVSLKTLKSKGVNSFSDFYAIDLTSKNGRELCRTLAYKTFEKIIINTDNKTCDIYFMNGIVFKHYPLMKVISAQQAISALKYMVDGEVYF

SEQ ID NO: 20417 - protein, 604 aa, synthetic construct
MKSKLFSYIRWSSAVQGKNGGTTEERQLEGARRYALKHGYELVTMIDAGVSAFRGRNAARASNSTSKVGELGKFIDAVEEGLIPKDSVLYVESQDRISRSDIITANKLFLQLLDLGITIVTGIDERSYSKESVNTNPFDLMYSIMLFSRANEESNTKKNRVEDNALERIKRFKSGLPTTIKSVGSHPFWIDASTTYDKQVRKHPQYWQVAQYAMELFLEGASAFKVCKELNTRFPEGWKGKMWSVPNVRKLRTNPAVYGLRILSVKGIEYKLEGYYPALITEAEFARLQDIQQNNKYITTGEKNQINLMAGLRLFRCGHCGSTMMAMRHKDKIRYLCEKGRAAGNLKSKDDKLKKLKGCRTWSLSGELVEHTLMYAMTYAFIYKNKDNKEKIDYETQINDTKEKIFSVTARITNLTELISAGLGNVAEVVESIKKLNEERQVLNLHLDKLQQNNLLQESSHFEELMINYFENIQWPIIKTVDHPERVKIREIVRSTIDKAVVWKADKKITIYYVTKDGTDFTFEAGDEKDTWRFYFGVPDLVKRSDGFEQAKQALEMNNELFDKILALKNQEAEAAGNALKTVVKALQVVGYPAIDGKLFWPRK

SEQ ID NO: 20418 - protein, 599 aa, synthetic construct
MKKAYSYIRYSSPQQASGDSYRRQLAATQAYCDANGYELDTELSIYKELGVSGFKGDQEHLKQFINDCETGKVKKGSLLVVENLDRLSRQAINVAMRQFLSLLEYVDIYTLQDKKHYSNNDGRDSENQLLDIMTSLIIMSRAHEESLTKQKRLKESWANQRKNAHKIKMSGCYPHWLVRSDDKTEFYVKEDRAQIIVDMFDMCINGLGATQIVRSLNNNIEKYPPPSTKKEFWVRSTVKRLLSDRRLLGEHQLYKGHHAKREPVGEPIKDYFPQVIDEKTFVNAQISLKSRKIGAGKVKADSFSNIFRGFLRCGHCDSPVEYVNKAAKQASTLYLTCSNAKRGGDCNHSKHYRYLPLEHMLIHLSTANGFLPKPEKPSDLEQQLEIIKEKKEQANEKLSVLLEKNFTAPIILEKIEELTNDVEQYSYQIAEIEDKLLSIKPDYTYEDLYHDAVLESDLLKKFSNRSMFNSYLRKKIDSAYLYSIGLFPCIAFKMNNKSVHVLVLDERYNFGGCSLPNEKDKLIRLNGEEIEAIDEMIWKMFGNAIDFINGIDEENEELNKIIRKISLLMSKFIMDNKNKELISEFNSFLNTSIEKSYQN

SEQ ID NO: 20419 - protein, 541 aa, synthetic construct
MPKAISYIRFSTKIQSVGDSTKRQGKYINDWLKRNPDYYLDESLRFQDLGISGFSGANAKSGAFGEFLAAVESGYIEAGSVLLVESLDRVSRQDIDTAGEQLRKILRSGVEVVTLVDNEWYTKESLKDSLSMIKAMLVMERAHEESAMKSTRLRSVWAAKRERAVNGEIMSKRCAAWLRVSEDRSHFEFIPENVKAVQRVFQLRLEGKSHAKIAKQMNEEGFYTLNQFNPVKGGWSQSSITELLSNQAVIGVKVPSKSMVVKGVSEIPDYYPAIISEQQFHAVQQLKQGAGRKPSSDLPLLTNLFKGVLRCSECGFIIIVSGVTAKRSGNYRCSMRYEGRCNAKGFSRLQTDRALVQGLLYNTNRLSLNRDNGSAIGALQSELEQLQKQRERLIKLAMLADDTESMAKDLKVLNGQIKDAEKSVSEVHQREQSSQLETISHLDLTVKKDRIEAQIIIKRIIKEIRLNTAGKKCDVFLHNGLKLLNFPLDRVVDGAQWLEILPLIDGDEFDFEGFTTKPRHLAFEEAPEWVKEMEEQPNQPL

SEQ ID NO: 20420 - protein, 575 aa, synthetic construct
MENFDLKGFAKGKKQQKEQIGGNAIIYTRVSSSEQVDGQSLEVQIDKCREYAKVRSYTVVGEFGGTYESAKSDKERKEFNRMLAFIKQSNKKGSSQPVKTVIVFSTSRFSRTGSTTIIEEVEARGAYVVSATSNYDPRTPVGKYMQLMELANARFQNDEKRATTIENSVKALLKGRWIGKAPRGYDQKTTKKEQIITINEEGKLIRKAFLWKANNKLSNEEIRHRLAAEGFHICKQKLSELFKNPFYCGYMAHKFLQGDIILGNHPPLIPKEIFLKVNGELSKNHSGYEQKIDKEYAPLLGSIKCPCCGKNLSASISTKMRKRFGRTDIGYYVCSRKGCKYNSSTKKVHEAFEEEVNRYALSNKVSELLKMQLTITFEYMNQENRERAKSIKANIKAKEKELEQVETNYALCTDAKKQSICEKVMTKLEKEVRDLKTEFSKVNTEILNLDKFIDFAFKMRSNLFGLWELQGLEGRRRLQKLVFPDGFIYDKNNEHIEPKRVNQFFLLKYSYPTGNGDKKKETNRGKHDSSLRVLEAGLEPAQPQWPKDFKSFVSTIPPFEHPFKESGKRDSNSRP

SEQ ID NO: 20421 - protein, 558 aa, synthetic construct
MKRVIGYIRVSTDNQDLERQRVLIRKYCENKGYSLLRIEEDYAISGTVSNRNGLNSILNITNSVADMVVVSELSRLSRQDDIFETLTQIHTIIRNVDLVILDEPDKVYEAGKTIILSDFLMLAIKAYGAADERKKIVSRMTTGKDSKVQAFPLMLTDSNIPTGFKAVPNPNYIKGATPKMLLVEDEERMQLVRDIFNYVANGLSLGKTAEKLNMLGYRTARNKPFYEQSIRTIINDSIYNGVRYWKGMKLELPVKFISDEIWNLAHKKVQENKNYSGEAQKHYNPLKGIIKCPCGQTSMYGRTSSCITYRCLDRIKMGIKSPCTNVGIKAETLIYAVWKDVRLRTLDETYQAKSNEKIAEIEAENIKLTQNIKEKDSEIAKLQSDLKTVIDNVMASTNITIVKALNGKADSIDSQIKSIETEKKAIDEEIASNNRRIADEIKSQSRKELDSLSLEGKGEMFRELLSKVVYYSVSLNSGFIVITYKNDLETIIAYHNRNKPFLWALPITFRFNKVKRTVIVPTLPEQPKMTSFVLERIKEKEYTFKQLQESFNLEEYKI

SEQ ID NO: 20422 - protein, 623 aa, synthetic construct
MKAAFLIRCSTKNQDLDRQTRDLTRLAKSLGYEYDIENLVFGEKITGKDDVTIKNRESIDKLLRAAKEQKFDVVLVAEVSRMSRDPASGRVYVRQLINMSIPVYFRDIDTWTINPDNGKRVRDAEQVIGAAFDAAWKYLRSLKTQVASGRRNELDNNQISVGQPFFGYTRYGGKDKSKKNCWIVDEVAAEVVVFVFNEYIKDGSTLKSTALATTAKYGELLGKKFSVGSIEHILTYESYHTGIKKISLTDPDTEEIEVFDVKVPILVDTELFEKATAKRKNNRVKSEPYPKQTTYILSKLLKCPYCGYTMTPRTKGNDSKGKTTNERYRIINGRKALSWLCMSGINNATSCSNRISVANEKAEPIIWELVKKELIVFANLNNEERELKVEELTEKISHLASNIDNYNTHKSSLQKQLSKAYTVATMADESVLEMAMTEFNKTARTIRKEMSDCDSAIEQIKGEIENLANLKIFYSQPNLPSDIIEKAETDEAEKRKLVKELINKIVPYKITTFKKRHRDKGLVTLNFGVVLLEVYTVNGIYYVFYNANDRGDIRQACYISGVFAKFQNSINKFDAYKEGEYFVISNADMVMETKEIDELITVNQMVEIAINNGWVLSYSYKQK

SEQ ID NO: 20423 - protein, 595 aa, synthetic construct
MSNNVEIIKANPLVTRRNDNSGSLSRRVAAYCRVSSDSDDQKNSYDSQVRHYREYISQHQDWNLVDIYADEGISGTQVGKRQDFQRLISDCLDGKIDYIITKAIARFARNTLDTLKYVRLLKDKQIGVFFEEENIDTLTMDGELLLTILSSVAQQEVENTSAHVKKGLKMKMQRGELIGFQGCLGYDYNQDTKSISINEKEAKIVRYIFERYIDGIGGKAIARELDELGYKTPRGLDHWQDTTVLGIIKNEKYKGDILMGKTFTVDPISKRRLINFGEEDKYYIKNNHDAIISPEIFTQAQEIRLRRSGNKKTIANTKGKRERYSRMYPFSSRLECGFCGTVLSRRSWHSSSEYKKIIWHCTTSIKKGKKHCIHSKGIEEKAIENAFLQSYQQLFYENNNLTEDFLEIIKEELTDDTLKVELNKIVSKLNSLYKKEEKLVSMNLDGKVSDSVYEDKFNQIQIEKEKLLEEKVNLEVTLKSEVDIKSRLENFKEILTSQKTLTEFDKDIFESIVEKIIVGGINSDGEIDPAMLTIIFKTGDSSTKDAKSYKSKRKNAKIENDKLCFHAVTDDEKKCTNKENNARRDGSTFVQTRCR

SEQ ID NO: 20424 - protein, 481 aa, synthetic construct
MITTNKVAIYVRVSTTNQVEEGYSIDEQKDKLSSYCDIKDWNVYKVYTDGGFSGSNTDRPALESLIKDAKKRKFDTVLVYKLDRLSRSQKDTLHLIEDVFIKNGIEFLSLQENFDTSTPFGKAMIGLLSVFAQLEREQIKERMQLGKLGRAKAGKSMMWAKTSYGYDYHKETGTVTINPAQALTIKFIFESYLRGRSITKLRDDLNEKYPKHVPWSYRAVRTILDNPVYCGFNQYKGEIYPGNHEPIISKEEYDKTQSELKIRQRTAAENVNPRPFQAKYILSGIAQCGYCGAPLKIMLGVKRKDGSRLKKYECHQRHPRTLRGVTTYNDNKKCDSGFYYKDKLEAYVLKEISKLQDDADYLDKIFSGDNAETIDRESYKKQIEELSKKLSRLNDLYIDDRITLEELQSKSAEFISMRATLETELENDPALRKNKRKADMRKLLNAEKVFSMDYEGQKVLVRRLINKVKVTAEDIVINWKI

SEQ ID NO: 20425 - protein, 481 aa, synthetic construct
MITTNKVAIYVRVSTTNQVEEGYSIDEQKDKLSSYCDIKDWNVYKVYTDGGFSGSNTDRPALESLIKDAKKRKFDTVLVYKLDRLSRSQKDTLHLIEDVFIKNRIEFLSLQENFDTSTPFGKAMIGLLSVFAQLEREQIKERMQLGKLGRAKSGKSMMWAKTSYGYDYHKETGTVTINPAQALTIKFIFESYLRGRSITKLRDDLNEKYPKHVPWSYRAVRTILDNPVYCGFNQYKGEIYPGNHEPIISKEEYDKTQSELKIRQRTAAENVNPRPFQAKYILSGIAQCGYCGAPLKIMLGVKRKDGSRLKKYECHQRHPRTLRGVTTYNDNKKCDSGFYYKDKLEASVLKEISKLQDDADYLDKIFSGDNAETIDRESYKKQIEELSKKLSRLNDLYIDDRITLEELQSKSAEFISMRGTLETELENDPALRKNKRKADMRKLLNAEKVFSMDYENQKVLVRRLINKVKVTAEDIVINWKI

SEQ ID NO: 20426 - protein, 533 aa, synthetic construct
MLKQQANNKEKVALYSRLSRDDGLDKESNSIANQREMLKRYAKENKFYVYDEYIDDGFSGTTFNRPALNRMFEDIEAGKVNVVLVKDMSRLGRNNALFMYYVEEVFPDLDVRFIAINDMVDTAQDDNEIMPFKSVLNEYYARDISKKIRSSIRTTALTGGFTGAFAPYGYLVDPENKKKLIVDPETAPIVKRIFELSQQGTSTHQIARILCKDGILVPRAYRAKKKGILEQSKGFTFPTDWVGKNVKMILENQVYLGHMVSHKSQTKSFKNKKIVPVPKEDWIVVENTHEAIIDKETFEIVQKFISVKKQPNKTGKPNIFVGLVKCPDCGRNLAYSNPNGNEPRFRCRTYARNTELCSTHAISYKALYEIVQNDIKNHVNSMEELGDHFIKEMRELSETSGSQKIHQFNQELVSLEKRIDEIDSIFTKLIEQNALGKITDERFSKMSMNYETEQAEVVQSYRELKSKIKSEEEKVQGTDRFLETISKYKDVTELNRSMLCELIDSIYVYQAEGIGKERTQKVEINYRFLAVSH

SEQ ID NO: 20427 - protein, 599 aa, synthetic construct
MKKDVKVIKGDTTLKRTASGCVERSIKRVAAYCRVSTDTEDQINSYNSQVEHYTEFIQKNNEWTLAGIYADEAITGTQVDRRIDFQRLINDCMNGDIDMIITKSISRFARNTLDTLKYVRKLKEFNVAVFFEEENINTLTMDGELLLTILSSVAQQEVENISANVKKGLRMKMERGEMVGFQGCLGYDYDPETKSISINEKEAEIVRYIFRRYIEGVGGMVISRELEEQGYLSPRGNKRWTETTVLGIIKNEKYKGDLMMGKTYTVDPISKRRLDNYGEQDKFYIENHHEPIISEEDFEKAQGIRLRRSKNRNTVANNGGKREKYSRKYAFSSMLECGFCGHNLSRRNWHSSSEYTKVIWQCVNATKNGKKYCPHSKGIEEEAIEKAFMESYRQVCHNNVEITNEFLKTVEEELKDNSLAKDLKKITNQLDKILKKEKDLVELRLNESISMDIYQDKYNEITVSKEKLLAEKRTLEVTLTDEKALKKRLEGFKKLLESNKYLEEFDRAVFESIVDKIIIGGTNDEGEIDPAMITIIYKTGKKDSQDGRLFKSRRKNAKEVNEGNDNKLYPQSSDEVNNLSSYPMDNTRRVRSVANQGVR

SEQ ID NO: 20428 - protein, 520 aa, synthetic construct
MKKITKIDELPQGQLPNTKLRVAAYARVSTDSDEQLESLKAQREHYERYIKSNPEWVFAGLYYDEGISGTKMEKRTELLRMIRDCKQGRIDFIITKSISRFARNTVDCLELVRKLIDIGVYIYFEKENLNTGDMESELMLSILSGFAAEESASISQNSKWSIQKRFQNGSYIGTPPYGYTNIDGEMVIVPEEAEIIKRIFSECLSGKGGGTIARGLNKDKIPARRGNHWSAGTVIDMLRNEKYMGDVLLQKTYTDSNYNRHPNTGEKDQYYYKDNHEPIISREDFAKAQDLIDERAKMKCKGVKKNVYLNRYALSGKIVCGECGRNFRRKTNYSAGRSYIAWSCIGHIEDKESCSMLFLRDGEIKATLTTMMNKLAFSHKLILEPLFKSISQIDEESDRERMDAIDKRMEQLMEERNTLITLMAKGFLEPALFNQERNVLDSEIKNLTTEKTNLVTNSTSGVLRANDIKDLIDYVSADNFNGEYTEELFEEFVENIIVNSRDELTFNLKCGLSLKEKVVR

SEQ ID NO: 20429 - protein, 521 aa, synthetic construct
MTEKNIMVIPARKRVGSTAAKEKIKKLRVAAYCRVSTETEEQNSSYEVQVAHYTEFIKKNTEWEFAGIFADDGISGTNTKKREEFNRMIAECMDGNIDMVITKSISRFARNTLDCLQYIRQLKDKNISVYFEKENINTMDAKGEVLLTIMASLAQQESQSLSQNVKLGLQYRYQQGKVQVNHKRFMGYSKDEDGNLIIVPEEAEIIKRIYREYLEGQSLVGIGQGLEKDGILTAAGKPRWRPESVKKILQNEKYIGDALLQKTVTVDFLTKKRVKNEGHVPQYYVENSHEAIIPKDLFLQVQEEIHRRRNIYTGADKNKRIYSSKYALSAITFCGDCGDIYRRTYWNIHGRKEFVWRCVTRIEQGPEVCKNRTVKEDELYGAVMTATNRLLAGGDNMIRTLEENIHAVIGDTTEYQISELNSLLEENQKELISLANKGKDYESLADEIDELREKRQTLLIEDASLSGENERINELIEFVRDNKYCTLRYDDTLVRKIIQNVTVYEDHFVIGFKSGIEIEVE

SEQ ID NO: 20430 - protein, 452 aa, synthetic construct
MKAAIYIRVSTQEQVENYSIQAQTEKLTALCRSKDWDVYDTFIDGGYSGSNMNRPALNEMLSKLHEIDAVVVYRLDRLSRSQRDTITLIEEYFLKNNVEFVSLSETLDTSSPFGRAMIGILSVFAQLERETIRDRMVMGKIKRVESGLPLTTAKGRTFGYDVVDTKLYVNKEEAQHLQLIYDIFEEEKSITFLQKRLKKLGFKVKSYSSYNKWLMNDLYIGYVSYGDKVHVKGVHEPIISEEQFYRVQEVFSRMGKNPNMNKESSSLLNNLIVCEKCGLGFVHRVKDTVSRGKKYHYRYYSCKTYKHTHELEKCGNKIWRADKLEEMITDRVKNYSFATRNLDKEDELDSLNEKLKIEHTKKKRLFDLYISGSYEVSELDAMMSDIDAQINYYEAQIEANEELKKNKKIQENLADLATVDFDSLEFREKQLYLKSLINKIYIDGEQVTIEWL

SEQ ID NO: 20431 - protein, 516 aa, synthetic construct
MYRPESLDVCIYLRKSRKDVEEERRAIEEGSSYNALERHRKRLFAIAKAENHNIIDIFEEVASGESIQERPQMQQLLRKLEGNEIDGVLVIDLDRLGRGDMLDAGMIDRAFRYSSTKIITPTDVYDPDDESWELVFGIKSLISRQELKSITKRLQNGRIDSVKEGKHIGKKPPYGYLKDENLRLYPDPEKAWIVKKIFELMCDGKGRQMIAAELDRLGIDPPVTKRGAWDSSTITSIIKNEVYTGVIVWGKFKHKKRNGKYTRHKNPQEKWIMYENAHEPIISKELFDAANEAHSSRHKPAVITSKKLTNPLAGILKCKLCGYTMLIQTRKDRPHNYLRCNNPACKGKQKQSVFNLVEEKLLYSLQQIVDEYQAQKVEEVEIDDSKLISFKEKAIISKEKELKELQAQKGNLHDLLEQGIYTVEIFLERQKNLVERITSIENDIEVLQKEIETEQIKEHNKTEFIPALKTVIESYHKTTNIELKNQLLKTILSTVTYYRHPDWKTNEFEIQVYFKI

SEQ ID NO: 20432 - protein, 452 aa, synthetic construct
MKAAIYIRVSTQEQIENYSIQAQTEKLTALCRSKDWDVYDIFIDGGYSGSNMNRPALNEMLSKLHEIDAVVVYRLDRLSRSQRDTITLIEEYFLKNNVEFVSLSETLDTSSPFGRAMIGILSVFAQLERETIRDRMVMGKIKRIEAGLPLTTAKGRTFGYDVIDTKLYINEEEAKQLRLIYDIFEEEQSITFLQKRLKKLGFKVRTYNRYNNWLTNDLYCGYVSYKDKVHVKGIHEPIISEEQFYRVQEIFARMGKNPNMNRDSASLLNNLVVCGKCGLGFVHRRKDTVSRGKKYHYRYYSCKTYKHTHELEKCGNKIWRADKLEELIIDRVNNYSFASRNVDKEDELDYLNEKLKIEHAKKKRLFDLYINGSYEVSELDAMMADIDAQINYYEAQIEANEELKKNKKIQENLADLATVDFDSLEFREKQLYLKSLINKIYIDDEQVTIEWL

SEQ ID NO: 20433 - protein, 452 aa, synthetic construct
MKAAIYIRVSTQEQIENYSIQAQTEKLTALCRSKDWDVYDIFIDGGYSGSNMKRPALNEMLSKLHEIDAVVVYRLDRLSRSQRDTITLIEEYFLKNNVEFVSLSETLDTSSPFGRAMIGILSVFAQLERETIRDRMVMGKIKRIEAGLPLTTAKGRTFGYDVIDTKLYINEEEAKQLQMIYDIFEEEKSITTLQKRLKKLGFKVKSYSSYNNWLTNDLYCGYVSYADKVHTKGVHEPIISEEQFYRVQEIFSRMGKNPNMNRDSASLLNNLVVCGKCGLGYVHRRKDTVSRGKKYHYRYYSCKTYKHTHELEKCGNKIWRADKLEELIIDRVNNYSFASRNVDKEDELDSLNEKLKTEHTKKKRLFDLYISGSYEVSELDAMMSDIDAQINYYEAQIEANEELKKNKKIQENLADLATVDFDSLEFREKQLYLKSLINKIYIDGEQVTIEWL

SEQ ID NO: 20434 - protein, 459 aa, synthetic construct
MSTTHFYSHYPTIEYKTCALYVRCSKEEQAKFGDTIEAQIEDLKAFAKLHHLKIYAIYVDEGHTARKKYNKRKEFMRMLQDVELHKFEYIIFTKLDRWFRNIADFYKIQEILDNNGVTWLTALERYEMETTNGKLNVNIRLSVAQDEADRDSDRIKDVFRLKVKKGEAITGSLPIGLMVGENGKVDIDPDTVQIAYDMFDYFETHNSKRGTLLYLIDKYNRYFCYETIARALRNPLYKGEYRGNPDYCPKIIDPARFDRIQVLGKRNVKVRKNNRYYVFSGLAQCKECGHALVANTTVQKKYNREYTQYRCNYYSNSHLCTHSHGMNEKVIEKYLLDNIKPELEKYVTAYDVKQNAPTKKADPNKIKTKMQRLKELYINELIDLDDYRIEYEQYKQELDKLTSTAAPEVKDLSAIRSFLALDLQSIYDSLTPQERRTLWSSIIDKIIISDGGDIEIVFL

SEQ ID NO: 20435 - protein, 551 aa, synthetic construct
MATKARVYSYLRFSDPKQAAGSSADRQLEYAKRWAAEHGMALDAALSMQDEGLSAYHQRHVTKGALGVFLAAIDEGRIPAGSVLIVEGLDRLSRAEPIQAQAQLAQIINAGITVVTASDGREYNRAGLKAQPMDLVYSLLVMIRAHEESDTKSKRVRAAIHRQCKGWQDGTWRGVIRNGKDPSWTRLDPETKAFHLVPERAEAVKLAIRMFRDGHGAVRIMRTLVEEGLQLTNGGNPAGQLYRILRNRALIGEKVLEIDGEEYRLAGYYPPLLSAEQFADLQQATEQRAKQKGTGEIPGLITGLRISYCGYCGSAMVAQNLMNRGRREDGGPQHGHRRLICVGNSQGMGCAVAGSCSVVPIEHAIMSYCADQMNLARLFEGGDRSEALAGKLAIARARVADTTAKVERITDAMLADDAGDAPAAFMRRARELETSLVEQQAEVDALEHELAAVASSPTPAVAKAWADLQEGVKALDYDARTKARQLVADTFERISIYHRGTEPEQTRSWKGTIDLVLVAKRGSARILHVDRQTGEWRGGEEVRDLPDDPIQ

SEQ ID NO: 20436 - protein, 556 aa, synthetic construct
MLRVPNRGKTRPMTTTRPRAAIYARFSTDLQNARSAEDQARVCREYASRHGFDVAEVHSDLAISGTTNQRPGLNALLARAEAGAFELVIAEALDRVARDQADIATIFKRLQFAGVELRTVSEGEIGELHVGVLGTMNALFVKELGNKIRRGAKGAVSRGRVPGGICYGYEPSPVLLQDGTIERGHRRIVEGEAAVIRRIFADYLAGISPKAIAHQLNREGVPAPRSAEWRANTITGARGRQNGILYNPAYDGRIVYGRVRMKKNPNTRKRVSRVTEAAERVEEAAPHLRIVDPATWAAVQAKQDANAAVPYNRQQRARHIFSGLVRCGVCGGAYTIVTKDRWGCIRRRESGTCINGRRIGTAELESRVLGGLQQKLLAPEVVSSVVKRYHDRRAQQRSKMAAGLRAAEARVDELKVEIGRLVDALAAGAALEEIKTAIDSRKESLAIAEAQLREHQALPAIVLHPQIVEAYRRKVKMLGAAIVKGEQARKFAPTVRSLIETIAITDDPTAPAKARVEVTGSLDAVLAIAGGDAPAARPRTMQVVAEEGLEPPTPGL

SEQ ID NO: 20437 - protein, 506 aa, synthetic construct
MDKWLALYCRASQDKRGFRESVGDQETWGRAYGAKHFPDLPIKVYIDNDLSAADPTVFRPDFERLREDVRMGHVAQIWSVEQYRLVRQEVEWFSFAAELVEADIIRLHTDRDGVILVDDDVAGIKAVLGGGEVRRQKKRLKSRQDAQAAKGWPAGSRPFGYVHARVKGERTYKVVPEQAEALRWAAGAVVDGWSLTNIAAELTARGFEGAHRKHVKDEHGDDVLDEDGNPVTLPTVINAASVKRMVSNPSVAGWRVHRGQISGRGNWEPILTESLWQQVRTKLSAPRTVRTKAGKQYPVKTTRPGGTARRYELSGGTITCGKCEAPLVGSLKQLRNKKGVRSVPYYFCHPMNGGRSCMGIMAKLTEKYVAARLIKELNKPAVKAALAKDNHAEKRDELTAELVRIDGQRPKLAKAWAADALSDAEWLAAREELDEREAAARAELVALPAPTRRVDPALIADGWDEMTLDERREIISMFVENVTILPARPGLQRFDSDRVKIKWREL

SEQ ID NO: 20438 - protein, 560 aa, synthetic construct
MNIQSPHVALRAALYLRVSTTRQAEHDVSIPDQRKQGEAYCAARGYELVETFVEAGASATNDKRPEFQRMIEDGTSKPAPFDVVVVHSFSRFFRDHFELEFYVRKLAKNGVKLVSITQEMGDDPMHVMMRQIMALFDEYQSKENAKHVLRAMNENARQGFWNGARPPIGYRIIAAEQRGSKTKKKLEIDPLHAETVRMIYRLFLEGDGNTGPLGVKAITCYLNERRLFTRDGGRWGLAQIHAILTRTTYIGQHRFNTRTHKNREKKPESEVAIMEVPPLIEREVFHLVQARLKSRHPSLVPARVTSGPTLLTGICFCSKCGGAMTLRTGRGSTGAEYRYYTCSTKARQGKTGCVGRTIQMGKLDDLVANHLDERLLVPARLEKILSSLLDRRSDRAERRREQLAEINRRVTETEARLNRLYDAIEAGLADLNDENLKERMTSLKAIRDQAKAEAERLQATLDSSGNQTITVDMLDSLSSAARAGLRLEEGGYRREHLRALAQRVEVADDEVRIMGSKAELLRTLVAASSGKSAAFGVSGSVLKWRARQDSNHLMAASLLE

SEQ ID NO: 20439 - protein, 522 aa, synthetic construct
MARPRKPKVQSPARGRPVGGEKAVLYARVSTAEQEKEGFSIDAQVALIREYAERMGFVIAGQYVDVETAKKTGRMQFEAMLKYLRGHPGVRHLLVEKTDRLYRNIKDWVTLDGFDIELHLVKEGTVLSRDSRSSEKFMHGIKVLMAKNYVDNLSEEARKGMLEKAKQGIWPSQAPLGYLNVVGPHGKKIIVPDPELGPIVQRVFEWFETGDYALKEVTQKARDAGLRYRRSQRPVGNSTIHYMLRNRLYAGAFEWAGRLYQGTHDPLVTRETWENVQEVLDGRSASNVRAEALRFAFTGLITCGHCGCAVVAQMQRGRYIYYHCSGFKQKCPEKYVREEALALAFSEQLARLRMDDEIFSLIERAIRESHSDKSRERVETIARLRLEADRLQERLDKLYIDHLDGRITADMHDRMSATWREERAGCQRRIDVLHNAEDAYVEDGIALLNLGRKAHATFSLQSPSSKNSALNLLVLNSTWANGQLHVTFREPFDMLEEIGSGNPPTEPPTGSGGSGVSSWLPE

SEQ ID NO: 20440 - protein, 590 aa, synthetic construct
MDAIIYIRWSSLEQTKGDSYTRQINRCSAFCEANGYNVLETVVDEGRSAYTGENIHTGNLGKLVERFERREVPQGTLVVVEQLDRLTRLPALEVVGWLTRVFPTGIRFVTADRGTMVSRAAMEADQLSFMSLIFDSFRSHGESKRKSDLLLDSWQSRRNGVAEGRKRNITGVCPAWLRWDREANEFIAISDPDPRLDRKLIVQRIFNERDTGVGHAIIARKLNEDGIPSWGVGKRKADGWHPSYVYKILHNPAVIGEFQPRSRRKGEVTGTKIGQPIPDYYPQIISPAQFERVSAAKQVMNVGGGTKGRVNLLAGLVYCGVCNQRMIYLKKANAGRTRTNPKTGTITIDKSNGIYLKCSGAHRGHRCDHKASFNYNWIADAVLDNLLNSALRDNHFEQRSAMVQLADRLASARRELERFEAQAQTALDMTLDPAFKHDQRIKQRYVDLGRQADQQRELVDKLDAELAASKGQVSPAEHLSRVASVRNSLDSEDERIRDAARTKVMDALQRLVDRITFKSDRTVEVSALDGSLGWQFDDKGNLLNRFDLTVGLHEERLRNAILRRDNVDRQDIAQEIEEMKKRRLDALRGS

SEQ ID NO: 20441 - protein, 548 aa, synthetic construct
MQSRERPIEELVQGAEPWLLLVARVSDPQQIDALPAQKKRLLEYAALKRLPYTYVPFDESAYKGKREKFKERVIDPISKAQSLVTVVFDKIDRFSRDSSSIEKTLFKKLLRQSKIELHFPSDNLYIHRDSPAPDLFRLDIGVALSAYYGSTIRDNVNRRFEQLVEEEKTWIGRAPFGYSNIDTGIPIEGKKGKTKKDIQPDPATRQFVVMAFELRATGMSYEAVAQRLRKAGMLSSVKGQPILTPQVERLLKHPFYYGYMRYKREVYPHRYEPLISASLWRKVQEVNERRAVARTKYATKDHLYRDFLSCDICGYTVTTDGPKKGKYYYLKCTEYGGSHGAKWSPEQMISAQVAERVFRCLKIPQKEVPSILTALEQDEEETYSFLKGKIRQLRVEHGQLDEEVKDMFRDRRTFQVRPELFAEIVSEKTARQALIEDEIASCQQEGNGDFLLTSKQIVELARRAGELFLNPDVRISYKRRLLRMPLSNLAWDGENIKFELKEPYATIAACQKNDSWCALALKFRTECRSEVMALRHDLEFRDLVAESL

SEQ ID NO: 20442 - protein, 491 aa, synthetic construct
MSPTSTFFLPARDADTAIYARLSRDRSGLSENVNIQIAEARDYADEQTWPVVGVFKDNDISASKYSTKPRDDYDRLLGAIRRGQINIILITEMPRLYRRLEELLELIKLAETTKLRRIQTTDGISYDLSTAEGIHAAINAVNNAMLEAGRISKRVKRKQKARALAGKTHGGGRPYGYEKDGVTVRESEAAVIRECAERFIAGESIRDIVMDLNTRGVRTATGCEWRIENLQRTIMKKRYVGVREYEGQEYPAEWPAILTREQWDRMEARRLSRQWRWPKGQTGTRKYLLTGFLYCGRCGGVMVGSGRTRQSGQPAQMRYRCRRTDNHGRVIGCGKSFRVAEPVELLVKEAVCHVFDDPKVAVMLAPKVDEDKVRLLVQEYERRKAKLDQLVTDYATDVLSRDQFIQAKGIAEASVKEAREALAHYQDKSAAARVPADQTIREAWDTSGLEWRRSVVQLVVEKVVVRPGHPGSKRWRGYRFNPEFIEIEWKS

SEQ ID NO: 20443 - protein, 515 aa, synthetic construct
MSHHEHLADLYLRLSLDREGKTAIERQEADCRAWATRAGLEVRTVHIDRGRSGYKAVDRAGFDAAVSALTTGTVGTLVVWKVDRLSRRGMGQVGQVLDDVEKVGGRIVFVQDGLDTSHSQARLVLALLSEVARSESANIGLRVASAKAHLRGLGRWIGGQPPYGLAVAENGRLDHDPRTAPTAREIADRALSGEPLVRIARDLNAREIPAPRGGSWAVGTLSTLLKSPAFAGLLPETIKRDGKYTAKVVPWRDPETGEAVEVGRGIVTPAEQLQAVRLLEQRTAADKSGRSRGVRAQVAHLLTGYLRCGGCAGRMSAAGQSYVCQARRLGRPCPAHTTAMIPAVDRAVVDAFINRLAATEPGDPLLDAVAERWVARHDPAVIRERATITAALDDANAALVDLEDARYLRGEFVGPEAIQRWTRLHERLTARVAGLRRNLAEFPLPEADISPLLDPVLAREAWDAATLPDRRDLLGLALNAVTITPAGGRRGYRFDPAARLRFTWADEPEPVPADA

SEQ ID NO: 20444 - protein, 458 aa, synthetic construct
MRTAFYLRISLDKTGEELAVSRQREDCQAIAEKRGWDVVGEYVDNSISASDTRKNRPGYDALVTAYESGEFDALICWDLDRLTRQPRQLEDWIDAAEGRGLAIVTANGEADLTTDGGRLFARMKTAVARSEVDRKGARQRRAGRQRAESGKRWGPRRAFGFEADDSLNETEAAAIKAAYSEVLRGASLGSIATSWNAAGLPTTLGNRWRSAQVRQLLLNARNAGLRSYHGKVVAEADHPAIVDPDTWREVVAVLSDPARRCGPTRGRKYLLTGIVRCGACGGPMGSGRTTSRPAGALIYLCKNPGCMKVSRNLERVDAAVQAAVVARLSRPDAAAVIAHDDDDDATRAALRDEAALLRSKLDTLAAMFTDDELTESQMRTGTKRLKDKLAVIEPRLVEPERARVFAGVIGADDVAAAFDGLGLDRQRAVIDTLATVTINPAGRGRGFDPNLIVLDWKR

SEQ ID NO: 20445 - protein, 444 aa, synthetic construct
MTPKLENLQALIYARKSTKSDGKETGDQVRECRVWCDTNRIPIDRVIIDEGISASRYGRKTRDGWVQLKEIMRPGHIVVSWEASRATRDVAEWARVRDLCADRKVLFAYNGRVLDLTSGDDRFVGGLDILLAERESELLRERFMRGQRGAALKGTAPAALGWGYRPVPRKPGEEPKWELDPVEAPRIREAVQRIINGESLLAVGRWLEATGFAPANHTSLRRGLTRPTIAGKRVYRGEVIGDAVWPAIISEEDQAKVVEALKYDRTNPGPEPVHLCSGIAVCAACGGVMRHKHHKAQADVYRCTKGCGGRKADMLDAAVEKAVLRRLRNINPNDYASDNPEIAAAEKRIRELEADLAAWREKAINEEVSAEMFASIEKDRTRKIAELRPRTVAPQRQLLTASTWDQGTIREKRETVRALLVIRVLQVKHLGRRATEDDVDITLR

SEQ ID NO: 20446 - protein, 542 aa, synthetic construct
MTAPPLAPPKRRGRRAHQPTTAERPAGPCRVCVYIRRSTDDEHQPFSLDAQRAALEKYVASQPGWTIVAEYEDDASGATTHRPGLRKALHAAKAGLYDVLLVYRLDRFSRSVADLLDLINILEASSVRFSSATEPVDTGGPFGRMMLQLLAVFAEFERNIIIDRVKSGMTAKASKGKWAGGTRPYGYLVNPDHRLVPHPDEAPILRDIFRLYTRDRVGTRAIATILNERGVPNRTGKKWSGHTINRILDNPAYVGDIAYRDVYVPDAHDPLIDRDTFQRAQDIAAARGDVQTQRAMSDSDYYLTGLLTCPRCGQRYIGTSANGRTRRYRYYTCFTRTRYGKHATCDAPRLPADDLDNAILTALHDFYTTAEPVLTAMIERAHAQRASTTDDRSAEATAVAHQITTTETAIDRYHTAFENGTMDDATAGPRIRELRQRLAQLHARHAELAAGLAAQPAPPAPATIALIRDYLTTVMASGSDTERKAAIETLIAEVQLTDQGVVPVFKIPTDTTMPPPETDGGTSGVPPVRTMVRSVGRQGLEP

SEQ ID NO: 20447 - protein, 530 aa, synthetic construct
MKAAIYARKSTKKLGQKETIENQIKICKRYAQDNGLEIVDIKTDSATGTDDLNRPEVKELIEDAINGKYECVIMKGISRLYRDTEKGLGLIKKLDRSGIRVITVEEMFDSQEHRTSTNKLDLSRITMYLMFSEMESKKLADRIKYTQIEKAHAGEWNQASSVPFGYSYNSTTKKLEIDHANATIVKMIFDLYKNGMGMKSIAHYLNGDNTEGKKYLSPRSKRWSEYTIGFILKNEVYIGNIVYNKRSKKERPYKQPALIGKTSDDVYVGNDYNDRDAWIITENAHPAIIEREAFGRVQEMMETKAKRKGIRNNVSLFAGIAVCGKCGSGMTFKRGRKNHLGHVVTKDNYYCMNYIRYGKQYCTSHHVGADELETIILDDLTELAKNKAKLNALFHQHKSKLPKVSDGYEKERNEVDKEIIKVTNLMEKLLEKNMTGDIDDRQYKVMNAKYSERLNSLSETLEEIELKMLETNDSDDKIEKFKNNIKGIISYPSKTIEEKRYDLLNLINKIIVHENAEIDIYYRFEDLESQ

SEQ ID NO: 20448 - protein, 623 aa, synthetic construct
MKAAFLIRCSTKNQDLDRQTRDLTRLAKSLGYEYDIENLVFGEKITVKDDVTIKNRESIDKLLRAAKEQKFDVVLVAEVSRMSRDPASGRVYVRQLINMSIPVYFRDIDTWTINPDNGKRVRDAEQVIGAAFDAAWKYLRSLKTQVASGRRNELDNNQISVGQPFFGYTRYGGKDKSKKNCWIVDEVAAEVVVFVFNEYIKDGSTLKSTALATTAKYGELLGKKFSVGSIEHILTYESYHTGIKKISLTDPDTEEIEVFDVKVPILVDTELFEKATAKRKNNRVKSEPYPKQTTYILSKLLKCPYCGYTMTPRTKGNDSKGKTTNERYRIINGRKALSWLCMSGINNATSCSNRISVANEKAEPIIWELVKKELIVFANLNNEERELKVEELTEKISHLASNIDNYNTHKSSLQKQLSKAYTVATMADESVLEMAMTEFNKTARTIRKEMSDCDSAIEQIKGEIENLANLKIFYSQPNLPSDIIEKAETDEAEKRKLVKELINKIVPYKITTFKKRHRDKGLVTLNFGVVLLEVYTVNGIYYVFYNANDRGDIRQAYYISGVFAKFQNSINKFDAYKEGEYFVISNADMVMETKEIDELITVNQMVEIAINNGWVLSYSYKQK

SEQ ID NO: 20449 - protein, 567 aa, synthetic construct
MLILKGDQKLNTEQIMSLIGKVNALIYARVSTTDQAKKGFSIESQLDRCKERAMSKFGYKDSELIALVEPGGMGDDPNRPALNHALYLLQKGLGKKFLVLHPDRLTRDNTLQGVISRRIWGMGVDIEFIEFEVNPNDPESMLMYNIQGSIAQYNKAKIHANSKRGRLAKAKKGEFPSFKRLYGYKFNTVTDLPEYNEEEKEILLEMKDMLLNKKLSSNEIAKELSRRGVAAPNGKTWFQSTVSRMLQNEDYTGDFYYGKSKVVQVNGKKKQIATPKDEWILIKIPPMWDHETRDQIIKQLKANFKGRSRSTRDYLLKGKAVCGRCGGSCGSGITSKTKSGIYKYYSCCNKSTKAYQNGKELFKCKGKNWRVDIVDEVFWKWFKKLIKNPKKFLDQFLEEASNEKSIEDIKIKINRLQKQHEEIDSEIANYVILFGKGKIKESMFDELTRPLELNKEHVENELEILQSQLNANKKVEDRNEQTIKYMSSFAEMVDKDLSMSEKRNFLDFFIEKVTLYDDDHMEVVWKNKTLNEDRSQTVDFTEGEPEEASDNQHKRLNRIQTYGRQTA

SEQ ID NO: 20450 - protein, 567 aa, synthetic construct
MLILKGDQKLNTEQIMSLIGKVNALIYARVSTTDQAKKGFSIESQLDRCKERAMSKFGYKDSELIALVEPGGMGDDPNRPALNHALYLLQKGLGKKFLVLHPDRLTRDNTLQGVISRRIWGMGVDIEFIEFEVNPNDPESMLMYNIQGSIAQYNKAKIHANSKRGRLAKAKKGEFPSFKRLYGYKFNTVTDLPEYNEEEKEILLEMKDMLLNKKLSSNEIAKELSRRGVAAPNGKTWFQSTVSRMLQNEDYTGDFYYGKSKVVQVNGKKKQIATPEEEWILIKIPPMWDHETRDQIMKQLKANFKGRSRSTRDYLLKGKAVCGRCGGSCGSGITSKTKSGTYKYYSCRNKNAKAYQNGKELFKCKGKNWRVDIVDDVFWKWFKKLIKNPKKFLDQFLEEASNEKSIEEIKIKISRLQKQLEEIDSEIANYVILFGKGKIKESMFDELTKPLELNKEHVENELEILQSQLNANKKVEDRNEKTIKYMNSFAEMVDKDLSMSEKRNFLDFFIEKVTLYDDDHMEVVWKNKTLNGERSQKVDFTEDEPEEDSDNQHKRLNRIQAYGRQTA

SEQ ID NO: 20451 - protein, 502 aa, synthetic construct
MEMQNRIQRVAIYLRKSRNKEGEETEETLMKHRKRLIDISNKNKWDYELFQEVGNSMNENRPEYQKLLSKLSEGIFDAVLSVNLARVTRDDAETPKFMSLLRQEDILFITDSERIYDLEVQEDWQALKFTGFVNNWEYENIKAQLRKGKKDSAKMGRWSNGVPNYGLVYNRFDRSLEIDQQKADAVKLAFQLVIDGLGVDKVAKELNRLGYKTNRGRYFSGNAITRMIRAEIYKSVIISNRVKGRNLYEGKLRPKDQWIIAENAAPLIIDEETWNMANEALDQRKLLSPRGKQKKHPLSNLIKCGLCGRTQTVSRRRDRNDALAIQPCNKTDPLGKSKCNNRGIKHDTMISLVIEAINEKYQEISSELIKFEEDTEANDIKSIKINKLQEQINKSKKALNILQIQLEEELINISSFKERRKIRQVELNNLEKELTELLEETKEDALKSKKSFANKLDFFLENWHTIDGADLNHELMSFINKIIWYAPRDSELPPQLKFEWRV

SEQ ID NO: 20452 - protein, 569 aa, synthetic construct
MTDIKDVFKYHKSRVDKIDTIEEKTKKDTYGVLIRVSDVKQVTKDSIPMQRERAYKFIKERDGILYKEYIEEAVSASKNSIKQRPVLQELLKDIEDGKINKVIAYKRDRLSRIQKDWLTILDTIFKNNCDIEFTSAEEQPISSNPMVRGIMEPVLGFLANMESNNTSMRVKETRASIAAKGRWTGGTLPYGYDLNKNKEIVVIKEVIPSLIEIEDLYLNGIGVGSITRYMNGHEVKHLGKRKKGADIKRVVYKGRKTYWTESAVEGVLFNPFYAGIIEYSKEGNKHLQYDQDKFVREKGFHEAIRTLDKQEKIYEMKSKKSISAPRKFSTTFLLTGLVYCSECGSPIQSRTVLKKERNNEKYCYYVCASKQNKDKTSRNEICPSKNFKQNILEDFVVSKLLEMFDGFNKDNLKEEILKGIDQGKSTIETDIASAQADLKELQSELVSIMNLMKRVSPESPLYEEIITDYEKSYTETLLKKKEIEEKLESLQQSIKENNDKEIEQNIVLDALKNFSIVFKEASQVQRKTLLDSIIKRIDISQDGKLNILCNFEIPKDEKSYVHSINRRPV

SEQ ID NO: 20453 - protein, 521 aa, synthetic construct
MKKITKIEGNLANSFIKPKTRVVAYCRVSTDSNEQLVSLQAQKAHYETYIKANPEWEYAGLYYDEGISGTKKENRSGLLRMLSDCETGRIDLIITKSISRFARNTTDCLEMVRKLIGLGVHIYFEKENINTSSMESELMLSILSGLAESESISISENTKWAIQRRFQNGTFKISYPPYGYQNNDGQMIVNPKQAEVVKYIFAEVLSGKGTQKVANDLNQKGIPSKRGGRWTATTIRGILTNEKYTGDVILQKTYTDSHYNRHTNYGEKDMYLVENHHEAIINHEDFEAVDAVLKQRAKEKSIEKRNSKYLNRYAFSSKIICSECGSTFKRRVHSSGPRKYIAWCCSKHISNITECSMQFIRDEDIKTAFVTMMNKLIYGQKFILRPLLNGLRNQNNVAGFRRIEELETKIENNMEQSQMLTGLMAKGYLEPALFNKEKNSLEAERERLLVEKDQLTRSVNGNFTKVEEVDRLLKFATKSQMLTAYEDELFENYVEKIMVFSREEVGFELKCGIALKERLVN

SEQ ID NO: 20454 - protein, 523 aa, synthetic construct
MAVSRNVTVIPAIKRVGNNKNSESKPKIRVAAYCRVSTDSEEQASSYEIQIEHYTKYIKKNKEWELAGIFADDGITGTNTKKREEFNRMIEECMAGKIDMIITKSISRFARNTLDCLKYIRQLKDKNIAVFFEKENINTMDSKGEVLLTIMASLAQQESQSLSQNVKLGIQYRYQQGEVQVNHKRFLGYTKDENKQLVIDPEGAEVVKRIYREYLEGASLLQIARGLEADGILTAAGKAKWRPETLKKILQNEKYIGDALLQKTYTVDFLSKKRVKNNGIVPQYYVENSHEPIISRELFMQVQEEMVRRANLRGRKGGKKRVYSSKYALSSIVYCGHCGDIYRRVHWNNRGYKSIVWRCVSRLEEKGSECTAPTINEETLQTAVVKAINELLANKEPFLSTLQKNIATVFNEENDNATDDIDGKLEELQQQLLIQAKSKNDYEDVADEIYRLRELKQNALAENAEREGKRQRIAEMTDFLNEQSCELEEYDEQLVRRLIEKVTVFDDKLTVEFKSGVEIDIEI

SEQ ID NO: 20455 - protein, 498 aa, synthetic construct
MITKYTRAYAYVRISTNKQLDNTSIEQQIEAIEKYCKENNIILVKTYVEEPASGESFSNRPEFKEMFYNVFQEENNIDSVIVFKQDRISRNSLDSQYIFNRLKKANKNLISIADNIDTNDPNSKLIYQILGIIAEVEKDLIAFRTSLGMEKTFENGDFNGGRVFGYNLVNKKLVINEDEARVVKYIFDCYSNKMWGYRKIASSLNMQGIKTKKDNYWSITAVRTILNNKIYNGYVKWKGKYKKGNHYPIISEELWEKTQKLLSLRSYTQEKKHNGSFPLSGLLKCPTCGGAMVQGNANKKYKYYVCSRFKNSGSKACKSNLVKKEYAEQEVLSQVMNYLNDLNLSVPLQTVVMDNLKSELEPIEEELKLLEKNLRELKREKQDLIQLYTKKIIDIDTLSDEMKRVQNQESEHKEFKILLTNQIELKNNNDLLPVINRIANDFNSFFNLLDDFDKKELLRLLIKEIQVNTGEKPKDRTIKKIVYEFDQKLFKEINNELV

SEQ ID NO: 20456 - protein, 557 aa, synthetic construct
MTITQTPATFQGSRGNREPWVGYIRVSTYYEDKISPDIQRAAIKAWADRTNRYIEEWVEDLDVSGRTFKRKVMTGIKIVEEKRARGIAVWRYSRFGRSRHGNAVNLARLEQVGGRLESATESADTTTAFGRLQMGMAFKFAEFESDRIGEQWAETREHRRAHGLPATGGRRWGFIWHRRRLDEEGIIHPETYEPAEDLGLVVGDLYERAADGQSMNSLTQWLGRNNYVGTKGKPWHQTGLSKYMDSGFPAGWLRYHPDDCDCPPADPDGNAHRSALCAKKIFMPGAQTLIVKEDVWEEYQRKRKLAQDRPARNRAAVYPSSGLAICGRCGGATTAGNSSTKGAGGVVISKPGYLFRCSARKDNGTCDGVYIRRSIVEAAILERLGELEVEIEAETAKLADEAAKQPKKKGEEPATAAGRVERARKQHGARLAEIQKELDTQTSLVSRGIIPEDSYVRERNRLTGEQESITAELAELDKNAGKQEADRGEYLPVIRGLIARWDITPVATRRALLRTLLRGVWAYPQGTGPKADADEAYAVAVAIWEEAPAPVGRRAAA

SEQ ID NO: 20457 - protein, 541 aa, synthetic construct
MTQPAIPATFRGSTDDEDGEPWLAYIRVSTWKEEKISPELQRDAITQWARRTGRRIVGWIEDLDVSGRHFKRKIMRCIERVEEGEARGVAVWRYSRFGRDRTGNAVNLARLQQAGGELESATEPIDASTAIGRFQRGMILEFSAFESDRAGEQWRETHNHRRYKLQLPAQGRKRFGYIWHRRYDPITGTLQEEKYEPDETVGPVVAELYRAYVNGDGFSKLCGHLNREGHRTTQGRMWQADTLKRYMDSGFAAGLLTVHDPECRCRKTDGTCKRHIYIQGAQEELIDFDLWSAYLQRRKHVKATTPRSRVGIYQLTSLVKCCGCKLGTSMNTGRRDGENVPGFSFRCSIRAKSGATACEGILIERKIVEREVKDWLTREASPGIDTAPQTHTHAPRRDPGREAAKNVAARARAQAEVDKQRQALARLRADRAANPEDFGPGEYEETADLIRKKRAEAQALLDSTPEMEPLPEREKLITIARGLLEEWGTFEDGDINMVYRQVIRRVAIKRNGPGPENHEIEVHPLWEPDPWPAPDKRATAR

SEQ ID NO: 20458 - protein, 518 aa, synthetic construct
MMRIAIYARFSTDRQRETSLEDQARVCQTYAQSRGWPAAHAMYSDEGTSGTTPVIQRQGGARLITDALAGRFEVLIVEGLDRLSRDQVEQERTVRRLEHRGIHIIGVADGYDSESAGRKIHRTMRGLINEIYLDDLRHKTHRGLAGQLSRGGHAGGLSYGYRSVPAGEIHKLEIVEAEAEHVRWIYAQYADGWSCQRIAADLNVRGIKTGRGSTWAVSALYGSPAKGSGMLCNEIYRGRLIWNRSQWVKDPDSGKRIRTERPQDEWYVEERPELRIVSDELWSAVRSRMGRPTGQGGSSGHGCQPRTLFGGLLRCGFCGGAVVATSARHYGCVARKDRGESVCRGVTAFRKDVDAALLNAIREELMTPASLEILKASVGEILEDRQRSIRSHATSSSGRRKELDAEIQRLVDAIAAVGISPALRDRLQQAESELAQLIAIQSVGVPQQTISAEAVLTRYPKAFEDLASMLQSDVQKAREHLRRLIGRPVLRAEAGDVLLETWAGRYVLPGKKQPNDQH

SEQ ID NO: 20459 - protein, 444 aa, synthetic construct
MIHIEEIPAKPKEPKKIRVAAYARVSSDKDAAFHSLEAQAEYYRDYVAARPDWELVSIYSDNGISGTTIHRPEFQRMLQDCRDGKIDLVVTKSVTRFARNTVILLETIRDLKKLGVDCYFEKEDMHSISPDGELLLTLLAMYAEEEARSASENQRWRIQKLYDQGKPAGGHVFGYRLTGERFEIVPEEAEVVKEIFNLYLSGMGYAKIARTLIERGISSCFGGTWSSASVRDILLNEKYTGDLLLQKYFREDFRTKKDRKNTGELRKVYVKNSHDGIIERQTFQAVQQEIERRSARQMEIMAHRTVGHENSGKLFTGLISCGCCGGTYVRKYTNAKSGDQPIWICNQYFKYGKAACQSQRISEDILIEKTKEILGVSELNREKILGAISRIIVPEHHCLIYELTDGSTADAHWEHPSRKLSWTDEMREAARQKALKQHKEGGQS

SEQ ID NO: 20460 - protein, 423 aa, synthetic construct
MPEIEFIAPTKTLQQQPFTSVTRKKKVAAYARVSTEQDEQQSSYEAQVDFYTRYIQSNPDWEFVEVFADRGITGTNTKNRDSFNRMIQLALDGGIDIILTKSISRFARNTVDTLQTVRKLKAIGVEVIFEKENLHTFDPRCEMMLTIMSSLAQEESRSISENVRWGKQKSMRDGKVNLAYSHFLGYKKGPDGRPEIVEEEAVIIREIYDLFLSGRTLNEIATILTEMGVSTPAGKSKWCVSTVRSILSNEKYKGEALLQKTYTVDYLTKEVRKNTGEVPSVRVRNSHEAIIEPEVFDLVQEMLAENIKRRSKVRTKHPFAGKIVCGDCGGFYGHKVWRLRSTGERYDVWYCNHKYDGDEICDSPRLRETEIRDAFEKVLQECGDPNPVYTDERWNELVQSVAVYRGNHLIFTLANGETVKITL

SEQ ID NO: 20461 - protein, 583 aa, synthetic construct
MTQTQIHATISPCTPVLSADPTVKEDVMLDQQKITILYCRLSNEDALDGESNSIQNQKEFLTRYAAEHGYTNLKILVDDGYTGTNFDRPGVQAGFALVKQGLVGCWLVKDLSRFGRDYLTVGQYTDIIFPSYDVRFIAVNDGVDSERGDSDGFAAIRNLFNEWYPRDTSKKVRVVFRQKGTSGKHLGKPPYGYRTDPADKDHWIIDEDAAPVVKRIFDLAIDGKGPEQIARILEQDKVLTTKALYAKQSENHPDPKKRKKMPERPYHWIGQSVAGILERMEYTGCTCNFKTYSKSYKLKKRIPNAIEDMCIFPDTQEAIVSQAQWDRVQELRKNKRRPTKAQRQGLFSGLLFCPDCGNKLHFATCKSFDGKQDHYVCSSYKSGRGTCSAHYIREDVLRELVLERIQAVNAYIRQGVESFQEEWLQCRRSDQERNIREDRKRVEQAKKRLADLDVLLSRLYEDFVLGDLSKERYKKMTADYEAEQERLKLEIEVTEEWLETQETMSADVDAFVALTQKYVDVPELTPTIVNEYIKKIEVFAPDKSSGKRVQKVKIYFNFVDDVEIPVISEPVVAKSTLGRRKTA

SEQ ID NO: 20462 - protein, 545 aa, synthetic construct
MSKRVYCLYRVSTKGQVEKDDIPMQRQRCHEFAAEKGWNIVREYSEKGVSGFKVSAKDRDAIQEIQRDAAQGKFDVLLVFMFDRLGRKEDETPFVVEWFVNNGIEVWSAEEGQQRFDNHVDKLMNYIRYWQASGESLKTSIRTKTRLGQIVQEGRFRGGTPAYGYQLVKKGRTGKKNRELYDIEINPDEAPAVKRMFDLTDRYGYGGRKISTILKNEGIVNLRTGEPFHYSTIQHILANIMNAGILRSGETQSEVFPELQIITLEQFQRVAKAREQRSVNYAIKCGWEPETITLADGSEATVVRSPGTYPRKIVGKALLSGNVYCGHCGGRIFATTARKNHHPTQTPERIAVYKCYNRTQHKEQCDGPSTYRAEKVDRVVESVLRGIFERATRIDESVFLKTQIQSSTKQYQQKIKAAKGEYAKAVKELSKWEDLMLASIEGTCVFTPEQVKKRMDGIQETVDKLTREIETLQTDMENSKTLSSEIMTQHQQLLSWAELFDSASIDEKKVIASQLIKAVTLSRNYGIQIEFNISEAQFLNGMEMG

SEQ ID NO: 20463 - protein, 543 aa, synthetic construct
MSRCAIYARFSSDRQSQTSADDQVADCRARAEREGWEVVQVYADLAISGANNRRPGMTAMLADAAAGSFDIVLAEALDRIARNQADIATIYQRLVFADVRIETLSEGHVNELHIGLKGTMGALFLKDLGEKIRRGQRGSVSRGRIPGGLCYGYDVVRELNDKGELEAGRRRINPDQAEVVVRILAEYVAGRSPKLIAHGLNLDGIVAARGGEWRANAIVGNKARMIGILHNPIYVGRFAYNRVRMLTDPESRNRVSRPNAASDLQFAELPELRIVTDELWEAAQEAREQRGNGKLVHRRRPKHLLSGLVRCGLCDGSYTVISDNRMGCARHREAGTCSNARRIERTELQRRVISGLEDQLLSPEAVSLLVREYHVAREKQVREGAKTRLALERRLRTAEAAIARLVAAIADGAADFSDIKAALAEKTAERDAARAGLGEEDAVPVIALHPRIAEAYRARIRGLSESIGRGEAAGDPVVAQIRELIQVVYVKPLDDGNEVEVIPSLQSAVAFATGSKSNTTRRRFPVADMMVAKEGLEPPTPGL

SEQ ID NO: 20464 - protein, 588 aa, synthetic construct
MSGKPNLSVAQVWIPSSPACYVRISQDPLGKGKGVKRQRDAIKEAADDRGWPVPTLYKDNDISARSGKKRPDFDRLIEDLTAGRIDAVIATHLDRLLRRLSDLERFLDAIKAGNEKVGHNIPIVILEAADIDITTSGGQIIAGMLALIAKNEGDVKSTRLRDQRKQAASEGKAHGPLGYGYDYDQNIILSEAEIIREMARRLLDGDTLYSLAKELNARGVPTPGDGRWDARRVERLFDREAPEALKAAAAAGMQEQVVSEAEFARLLREAGAGRSVTAKWVREQDWAWALADEEHSLDATLAAKAFADAGVPAPRSYWRPANLRAMIRRGSLCGYREYSPGDKRGGSGTLIAPGAWTPILDRETTEAIRRLTDDPDRPVRSKEAKYLLAGGFLRCGNCGSSMHGTPGNGSHRYSCSKQANRVGKDGEPCGGMTIAGPAVEAIVSRAVIDTLADAKVRDGSRRPRAANDADIAAAQDTIVEITQLREKYTAEFANGDLRSDEFDLMRAIWKKRQAAAEKVVGSWSPDVTEVLARVPRGRKNVELWWGSAEVRERREILKLLIEHIEVAPSSKKVNYFDDSRVGLPVWKI

SEQ ID NO: 20465 - protein, 581 aa, synthetic construct
MSSKQKLYSYVRWSSEKQSSGTSFERQTSRAKSFALEHDLEYVEIKDAGISAFKGQNTTQGKLGVFITQVEKGVIPKDSWLYVENLDRLTREDATTANELFLRLLRMGLTIVTGMDNKVFTREGVNRNPTDLMISILMFMRAHEESKTKSDRVNSHVLALLAREKQGLPVNIKAVGRHPFWIDDSGPSNEKVKKHPDYWQPAQEAVKLFLEGYGAFYVTDYLNKKYAPPPAFKNKTRKAGGWSQQALNKMRSNEALVGVKLFNLAGKNYRLENYYPPLCTPGEFAQLQDIKANNNRYSGKVSTAISLLGGMQIIRCGHCNGTMTAFLQRGQLRYICEYGRAGGNCNAWSVKAAIVERCLMPVLITGFLMGAYKTHSDLTSLDEESDELKEKLNKIQSQQDHVIDAITEFGRTTKFDAKYKELEKEEQVISGKLQQLAQLKALYATTKDFSENIAGFVAEQCHWLIISDVHNSRREQLRENVRRVIKSVIVTKKNRCIRIEFQLITGEPFVFTGSKSLDYEVFLPCRIHDIPPDATEDEKSEWKRSDHEYNKNFLKLWYEVVNKGFLSHYPEIDGKDFWPKR

SEQ ID NO: 20466 - protein, 481 aa, synthetic construct
MITTNKVAIYVRVSTTNQVEEGYSIDEQKDKLSSYCDIKDWNVYKVYTDGGFSGSNTDRPALESLIKDAKKRKFDTVLVYKLDRLSRSQKDTLHLIEDVFIKNGIEFLSVQENFDTSTPFGKAMIGLLSVFAQLEREQIKERMQLGKLGRAKSGKSMMWAKTSYGYDYHKETGTVTINPAQALTIKFIFESYLRGRSITKLRDDLNEKYPKHVPWSYRAVRTILDNPVYCGFNQYKGEIYPGNHEPIISKEEYDKTQSELKIRQRTAAENVNPRPFQAKYILSGIAQCGYCGAPLKIMLGVKRKDGSRLKKYECHQRHPRTLRGVTTYNDNKKCDSGFYYKDKLEAYVLKEISKLQDDADYLDKIFSGDNAETIDRESYKKQIEELSKKLSRLNDLYIDDRITLEELQSKSAEFISMRATLETELENDPALRKNKRKADMRKLLNAEKVFSMDYEGQKVLVRRLINKVKVTAEDIVINWKI

SEQ ID NO: 20467 - protein, 481 aa, synthetic construct
MITTNKVAIYVRVSTTSQVEEGYSIDEQKAKLSSYCDIKDWNVYKVYTDGGFSGSNTDRPALESLIKDAKKRKFDTVLVYKLDRLSRSQKDTLHLIEDVFIKNGIEFLSLQENFDTSTPFGKAMIGLLSVFAQLEREQIKERMQLGKLGRAKSGKSMMWAKTSYGYDYHKETGTVTINPAQALTIKFIFESYLRGRSITKLRDDLNEKYPKHVPWSYRAVRTILDNPVYCGFNQYKGEIYPGNHEPIISKEEYDKTQSELKIRQRTAAENVNPRPFQAKYILSGIAQCGYCGAPLKIMLGVKRKDGSRLKKYECHQRHPRTLRGVTTYNDNKKCDSGFYYKDKLEAYVLKEISKLQDDADYLDKIFSGDNAETIDRESYKKQIEELSKKLSRLNDLYIDDRITLEELQSKSAEFISMRGTLETELENDPALRKNKRKADMRKLLNAEKVFSMDYESQKVLVRRLINKVKVTAEDIVINWKI

SEQ ID NO: 20468 - protein, 443 aa, synthetic construct
MAAYCRVSTDQLEQLSSYEAQVNYYTTYIENHPDYECAGIYADEGISGTNTKKREQFNKMIEDCKAGKIDMIITKSISRFARNTLDTLNYVRMLKEHGVGVLFEKENINTLDSKGEVLLTILSSLAQDESRSISENSTWGIRRKFEQGKVFVNHKKFLGYDKDEEGNLIINEKQAKIVRRIYKDYLDGKGSNRIARELEDEGVPNWNGKAKWYESSIRKMLSNEKYKGDALLQKTYTVDFLTKKRVENNGEVPQYYVEESHPAIIDRDMWEAVQLEIERRKAFAEKYGISKLDYASPNNPFAGKIICGCCSSPFGRKVWNSNDERFRKIIWRCNNKYRVKGEKGCKNKHIDDRVLHQTFINVFNAMIENRDYFMEKWKEHLKSKNALVRYKSKELIGILKIAEPIEEFDMDLFISIIEKMTVFEGEKIIVTLLDGTEIECEIE

SEQ ID NO: 20469 - protein, 429 aa, synthetic construct
MRVRIIEPIKKVQKAKKKVCAYARVSTDTEKQGESLENQIQYYENMISSNPEYEFIGVFADRGVTGTTENRPEFQRMLQLARGGMVDLIITKSISRFARNTAIMLQRVRELRDLRVEVRFEKENINTLSGDGELMLTVLSSFAQEENKNVSDNLKWRVRKKFEKGELIINTTRFLGYDKDEYGDLVINRKEAEVVRRIFTEYLSGKGSFTIAKGLNKDGIPTIGSGKWHDTTILGILKNEKYKGDAILQKYYTPDHLKKHSVRNDGVIDSYYIEDNHSAIVPREMWEQVQEEIEKRAKAKGNIAGETDKYTKRYPLTGMLYCSKCGATLRRRTWNSKHSCRKIVWQCSNYIKNGKDACPGTKIDDEVISRLNIKEETIVKEGIKDGKKHYSYTSKSKQAEHSRETRATEKENGSILQSVNRPTRTVIKL

SEQ ID NO: 20470 - protein, 476 aa, synthetic construct
MVTAIYVRVSTEEQAKEGYSVGEQTERMKAYCDAKGWKNIKVYTDAGLSGSNMNRPALQKMLTDIDRKEVNRVVVYKLDRLSRSQKNTLFLIEDVFMKNNIDFVDITENLDSSTPIGRMMIGVMSAFSQLEREWIKERMAMGHEARAKAGLYHGGGPAPIGYDYEDGLLVIDPYEAMQIRYLYEEYAKGTSLRELKRLMNEKYKTKHGAWTSDSSIRRSLSQKLYVGKIDFKEDTYDGLHEPIVSKELFDEVQSKLLERSWGKRHAGKSRPFTAKSLLTGLLYCGHCGARYFGRSQLYVYKDKREPRHYYTCYSRCGHPAHMVKDPTCKNRNYPVKKLDAKILNEIKVLSLNLDSLDNMVTHQNKTSQKSILASQLSKLDKQISKLLDLLQNDKMPFEAVSKRLETLNSDRKTILDEIDNLEEEPKLAISEAKRLITSVDESFDNLELVQKRKIIHNLINKITITGDDITIQWSFV

SEQ ID NO: 20471 - protein, 559 aa, synthetic construct
MSKEKIKVYLYTRVSTSIKIEGYSLEAQKSRMKAFAIYNDYEIVGEYEDAGKSGKSIEGRIQFNRMMEDIKSGKDGVFFVLVFKLSRFARNAADVLSTLQIMQDYGVNLICVEDGIDSSKDAGKLMISVLSAVAEIERENISIQTMEGRIQKAREGKWNGGFAPYGYKLEDGKLFINEEEAVAIRTIFDQYVNTTIGANGISKYLENHGIRKIPRQNGKNPLFDAGLIRKILKNPVYNGKIAFGRRTLEKVHGTRNEYKQVEQDEYLISEGIHEAIVSDEVWQAAQVKLKSQAKKYEHVNKGKDTRTHLLSGIVKCPICGVGMFGNKCIKKKKDGTKYKDFYYYGCNHRQMIRGHKCTFSKQIREELLDDAVAEVIVKIVSNPKFASMMQEKINMKVDTSEIEKEIDNYQKELRKSHSTKFKLIEEIDNLDVEDKHYKRRKQDLDDRLYRMYDKIDELESSLIDAKAKKQTIEAEKLTGDNIYKVLIYFDKLYKVMNDVERRQLISALISEIQVYEEKQSNGQWLKSITFKLPIIEENLNIDLDNDEQVECVSLLEKRS

SEQ ID NO: 20472 - protein, 521 aa, synthetic construct
MTGKKAVVYARFSSDNQRDESIDAQLRAINEYADKNNIKIVNQFIDRAKSATSDKRPEFQNMIKFCEADTTGISMVIVHKLDRFSRDKYDSAMYKQKLKVKGIRVVSVLENLDNSPESLILESVIEGMAQYYSANLAREVAKGQKENALKALHNGGDAPLGYDVAHDKTYTVNEEEAQAVKIIFDRYIKGYSYSKIIDELNILGYKTKRGNKFGKNSLHGILNNEKYTGVYVFNKTQRKGVDGKRNGHKQKSEEEIIKIEGGMPQIIDKGVFKQAQDMIQKRKKTPGAHKATTTYLLTGLIKCGECGHAFQGNKRKDSYGNEYVSYRCGCRKQKRECNNREIKRDYLEEFILQELEKNILNDEAIPILSKALNEKLNDKNESNAELLKNLEQKLDKVNKEISNILNAIMNGIVNSMLKDKLDELEQVKFNLDLKMNELKIENKVVDGVGVTEDQIRGMFSRFKEFVLERNIPECKKFIGDYIKEVIVYKDHIEVIFNVVFCFVDNDITHDLHIITERGKIT

SEQ ID NO: 20473 - protein, 547 aa, synthetic construct
MQTARKKNISVIPSQPEYDRSIKVQFKMLRVAAYCRVSTTLEQQETSYEAQVSYYTEKIQSNPNWKLAGIYADDGKSATNTKKRDDFNTMIEDCMAGKIDLVITKSVSRFARNTVDSLQNIRKLKERNIGVIFEKEGVNTLDGTGELLITILSSQAQEESRNLSENTRWGLVRRFENGVVSVNHNKFLGYTKDENGELVIVPEEAELVRRIFRLYLEGNSSIKIAKILKADGIKTVTGIDTWQPSVIDQMLRNEKYMGDALLQKTYTVDFLSKKRVKNQGIVPQYYIEDNHEAIIPRELFYRAQEEKARRAAIYKPSVEMKSKTEKSKYSSKYSLSDIMICGECGQPYRRQTWSKYGQKSAVWRCDNRLKNGTKNCKHSPTLKEQPLYEAIMAAVNSVVENQGEFVGAFRENVIRVIGSYSTRHISSEYDEQIEKLQGEMLTLIEENAKQGSVNENFDEQYHNIAERIRDLKLKKLKLTQENRLAETFSKRIDDVDHCLKDSTCTVGEYDDELVRRLLQSVKVIREDKIEIQFKSGIVMQQRVAYGE

SEQ ID NO: 20474 - protein, 534 aa, synthetic construct
MAKKITKIEPVSVQVALQLQPKKRVCAYCRVSTDSREQQNSFSAQVKYYTELIGNKDEWQYVGIYADEARSGTKLQKRDEFLRMIKDCEAGKVDMIITKSVTRFARNTVDSIQAIRKLKALSIAVYFEKEHINTLSEKSEQMLTILSSLAQGESEGISTNTKWAVKKRFQDGSFILGCPAYGYTKDEAGELIIKVEEAVVVRRIFKEYLNGKGSYVIAKGLSEDGISTIRSAEKWQDSVVKEILQNPIYTGDLLLQKTFTTEVVPFKRKPNKGQLPQYFISENHEPIITREQFEAVKEIYEYRRKQMGNDDSGKYQNRYIFSSKIICGECGSTFRRQKIYIGKPYEKIQWCCSQHIEDNLKCSLKGIREDVIKRAFTVMWNKLTSNYTEILIPLLESLKSLRIDEQQEQEIGDCNNRIMELTEQSHILSSIVAKGYIDSAVFIERQNTLTLELTAVKKKRSQLLDSNGFDREIARTELLIVLIQCNPNILEDYDENLFLQAVEKIIIHENYTITFRLKNSLELTEYCGKEVDEE

SEQ ID NO: 20475 - protein, 539 aa, synthetic construct
MLRQATQNLITALYPRLSHEDELQGESNSISNQKRILEAFAKQNGFTNLRWYTDDGFSGANFQRPGFQAMLADIEAGKVGTVIVKDMSRLGRNYLQVGFYTEMLFPQKGVRFIAVNDNVDSANGGMDNDFTPLRNLFNEWLVRDTSKKIKAVKRAKGMSGKPVTSKPVYGYLMDEDENYLVDEETAPVVQQIYQLCLAGNGPTKIARMLTEQQIPTPGTLEYRRTGSTRRYHPGYECKWATNTVVHILENREYTGCLVNFKTEKPSYKVKHSVENPVEKQAIFENHHEPIIDRETWERVQELRKQRKRPNRYDEVGLFSGMLFCADCGHVMYQQRYQNKNRKQDCYICGSYKKRTRDCTAHFIRTDLLTAGVLSNLRQVTEYAAKHESRFVKLLIQQNEIGGKRKTAAATKQLEQAQERIAEVSRIIKRLYEDNVNGKISDERFMELSADYEQEQRELKDRAAALQAELDKSQAATVNAEKFMGIVRKHLAFEELTPTLLREMIEKIVVHECSYDENGTRRQDIEIYYSFVGKIDLPEA

SEQ ID NO: 20476 - protein, 560 aa, synthetic construct
MSKEKIKVYLYTRVSTSIQIDGYSLEAQKSRMKAFALYNDYEIVGEYEDAGKSGKSIEGRVQFTRMMEDIKSGKDGVSFVLVFKLSRFARNAADVLSTLQIMQDFGVNLICVEDGIDSSKDAGKLMISVLSAVAEIERENIRVQTMEGRIQKAKEGKWNGGFAPYGYQLIDGKLIINEEEAIAIRTIFDQYVNTSIGANGLSKYLENHGIRKIPRQNGKNPLFDAGLIRKILKNPVYNGKIAFGRRTLEKVHGTRNEYRQVEQDDYLVAEGIHQAIIPDELWQAAQVKLKAQAKKYEHVNKGKNMRTHLLSGIVKCPICGAGMFGNKSIKYKKDGTKYKDFYYYGCKHRLMNRGHKCTYNKQIREELLDDAVAEVIIKLVSNPKFASMIQEKINMKVDTSAIENEIDNYQNELRKSHSTKYKLIEEIDNLDVEDKHYKRRKNDLDDRLYRMYDKIEELESQLIEAKAKKETIEVEKLTGDNIYKVLIYFDKLYKVMNDVERRQLIEALISEIQIYEEKQPNGQWLKSITFKLPIIDEDLNISLENDEQVETCVLLSHKNS

SEQ ID NO: 20477 - protein, 509 aa, synthetic construct
MKRAISYIRFSSERQLKGDSLRRQARLVNDWLSKNPEYYLDQDLSFRDLGKSAFSGKHLKGGLGDFLTAIEKGLVRAGDTLLIESLDRLSRQAVDQASELLRNILRSGVDVVTLSDGEHYTKESLKDPLALIKSILIMQRAHEESLRKSERVSAAWNRKKELISEGIKVSKRCPAWLELNDDRRTFTIIPEKVEVVKRAFDLRLQGLSFWAITRALNDEGHLSLNQYNPKPQGWSDTAVKNLLRNRAVIGCFKPAGREEVRDYYPSIISESLFYRVQQLNTGQYGRASVSSNPLSVNLFRGIIKCSKCGATVVIGGYDSKRFGMYRCPNRSANRCSAKAISRKQTDATILYMLALCDRFEAENTDTIDSLKLQREDLQRKISKMAELAVELDDMTVITDKLREMKNALSKLDHDIEEETKRLKSITTGNLKDIDRTTKEGMVETQLLIKGVLKEIVLDTSKRRCRVTFHNGKVIDLSIVENPAQDITEAEKSLTEIAEKGLLDVDAFQL

SEQ ID NO: 20478 - protein, 539 aa, synthetic construct
MAKNGARVYSYLRFSDPRQSTGSSADRQLQYAQKWAAEKGLILDESLSMRDEGLSAYHQRHITQGALGVFLVAIEEGRIASGSVLVVEGLDRLSRAEPIQAQAQLAQIINAGITVVTASDGREYNRAGLKAQPMDLVYSLLVMIRAHEESDTKSKRVKASIRRLCEAWQAGTYRGQIRNGKDPQWLKWTGTNWEFIPKRVATVRRALQLYLEGMGAARAIRVLHDEGLSYSDVGITALQIYRLIKLKALRGAKSLTINGEEFVLEGYYPRLLSETEWAELQHMSGQRLRRRMKGEIPGIITGIGLTYCGYCGTAVIGQNYMSRVRADGTLADGHRRLQCVSYSKNDGCGSGGSCSVVPIEKALLNFCSDRLNLQRLMQVGDEGQGLRHQLVGAQATVQKISEQLERVTAALMADDDGPAPISFLRKARELEAQKLDAEKNVINIEYELAAASRSGKPEQQEQWGELAALVNAGDYSAREKVRQLVMDTFQRIVVYMRGMGDEDRKSKFIDVQLISRTGQHRLLQINRRSGEWVASEDWD

SEQ ID NO: 20479 - protein, 523 aa, synthetic construct
MAVSRNVTVIPAIKRVGNNKNSESKPKIRVAAYCRVSTDSEEQASSYDIQIEHYTNYIKKNKEWELAGIFADDGITGTNTKKRDEFNRMIEECMAGNIDMIITKSISRFARNTLDCLKYIRQLKDKNIAVFFEKENINTMDSKGEVLLTIMASLAQQESQSLSQNVKLGIQYRYQQGEVQVNHKRFLGYTKDENKQLVIDPEGAEVVKRIYREYLEGASLLQIARGLEADGILTAAGKAKWRPETLKKILQNEKYIGDALLQKTYTVDFLSKKRVKNNGIVPQYYVENSHEPIIPRDLFMQVQEEMVRRANLRGGKGGKKRVYSSKYALSSIVYCGQCGDIYRRVHWNNRGYKSIVWRCVSRLEEKGSECTAPTINEETLQTAVVKAINELLANKEPFLSTLQKNIATVLNEKNDNATDDIDRKLEELQQQLLIQAKSKNDYEDVADEIYRLRELKQNALVENAEREGKRQRIAEMTDFFNEQSCELEEYDEQLVRRLIEKVTIHDGRVEVEFKSGISIDIEN

SEQ ID NO: 20480 - protein, 521 aa, synthetic construct
MKKITKIEGNLANSFLKPKTRVVAYCRVSTDSNEQLVSLQAQKAHYESYIKANPEWEYAGLYYDEGISGTKKENRFGLLKMLSDCETGKIDLIITKSISRFARNTTDCLEMVRKLIDLGVHIYFEKENINTGSMESELMLSILSGLAESESISISENTKWAIQRRFQNGTFKISYPPYGYDNIDGQMVINPKQAEVVKYIFAEVLSGKGTQKIADDLNQKGIPSKRGGRWTATTIRGILTNEKYTGDVILQKTYTDRHFNRHTNYGEKNMYLVENHHEAIISHEDFEAVDAILTQRAKEKGIEKRNNKYQNRYSFSSKIICSECGSTFKRRIHSSGTRKYIAWCCSKHISQITECSMQFIRDDDIKTAFVTMMNKLIFGQKFILKPLLDGLRNQNSAASFLRIEELETKIENNMEQSQMLTGLLAKGYLEPALFNKEKISLEAERERLLAEKDQLTRSINGNFAKVDEVDRLLKFTTKSKMLKTYEDELFENYAEKIIVYSREIVGFELKCGITLKERLVN

SEQ ID NO: 20481 - protein, 544 aa, synthetic construct
MELKNIVNSYNITNILGYLRRSRQDLEREKRTGEDTLTEQKELMNKILTAIEIPYELKMEIGSGESIEGRPVFKECLKDLEEGKYQAIAVKEITRLSRGSYSDAGQIVNLLQSKRLIIITPYKVYDPRNPVDMRQIRFELFMAREEFEMTRERMTGAKYTYAAQGKWISGLAPYGYQLNKKTSKLDPIEDEAKVVELIFDLFLNGLNGKDYSYNAIATHLTNLQIPSPAGKKKWNRFTVKAILENEVYIGTVKYKVREKEKDGKRTIRPENEQIIVPDAHTPIIDKDQFEEANKKIENKIPLLPNRSDYKLNELAGVCICADCGGPLSKYEAKRKRQNKNGTESLYHVKVLRCLNNKCMNVRYNDVEEAILDYLKYLQALNDSDLTKHLGSVIQSHENKNNIRSKKQMNEQFEQREKELKNKLNFIFDKYESGIYSDEIFLQRKSVLDKELQELKKAKDEINGLVDFKGALDINQLKENIKNAIELYESSENREEKNKLLRIILQKVIVKMTAKRKGPIPAQFEITPILRYNFLIGETVSSKDL

SEQ ID NO: 20482 - protein, 496 aa, synthetic construct
MRIAIYLRVSTEMQVEDGYSLRAQRATLIEYCKANEYSVSDIYMDEGISAKDTNRPQLQRLLDDATKGLFDAVLVHKFDRFTRSVKDLYELLGYLKLHGVSFISKQEKFDTSNAMGMAMLGMLGVFAQFERELIGERVRFGMEQKVKEGKKPNGQFPYGYDKEGNIIPEEAEIIRLVRHMYMKEQMGFKTIAMRLIDKGITRRGSTWRASTVSFTLSNTFYAGIIQFGNRMENGKYAGHRKELRKGVIHEKGIYEAIFTEEEFFEHLRYMRSRSVSGYSRKREYFFTGLLRCGRCGASMFGKLTHSVPNKDGVVKKRMYYVCSTRRDNNTCKMPTIQQNHIEHLLMKYISDIAIEKSLTAAEKKKSDNQNEAREKLIQKLKRDLDSVRNRVKKWQFMFIEELVTADDLRSRLAVEYETEADILKSLEEAQIRVKESEEIKFKLSTFSQSWNEADDFDKKELLNEMFEEIRVICHIDNPRGYRNGNFFPAELELTYR

SEQ ID NO: 20483 - protein, 571 aa, synthetic construct
MAYTKLKQTNPRVAIYVRVSTLHQIDKDSLPMQKQDLLAYAKLMLDTEDCIIFEDAGYSGKNTDRPKFQEMMSQIRTGGFTHLLVWKIDRISRNLLDFATMYNELKDLGVIFVSKNEQFDTSTAMGEAMLKIILVFAELERNMTSERVTATMISRANNGLWNGGRIPYGYDYDYDTHEFTPSETEAPIVRLIHDLYEKERSLVRESRILNSKGYRTRTGNEWNPVSLHIILHNIFYCGDYRYNVLKEGDRQKVKDESEWITIEKHHPPIITREQKERITSILDMRSKQYRSGRRRNSGRHTHIFGGLVICGNCGSFMVNSIGNKKDWSYTRYLCPSKRKSSTICTGKSTSDPIIGEFVLNYILNMLNAQKNFENIFSPDDLQAALLIGNTFSYIDGIEPDGVLDLYDILASGKVQGAVFGKGANIKPKDAEDSKITSLRAEKQKMERALDRLRNLYLYSEDAMSEKEYIIQRTILTEKLDEINDEIGMMQSDEWQQSMGDEMFIAKASEFIISQKLTDRNYINYKRLAQSVDAEVLRNFLTSIIDSIIITDGMVQRITFKNGLAHSFVFKQ

SEQ ID NO: 20484 - protein, 664 aa, synthetic construct
MPDALAPDPFTAMAAQLTPKRAVSYIRVSTREQAQRGGSEEGFSLPAQREANKRKAQSMGALVVKEFADRGESARSANRPELQKMLAYLKEDGGIDYVIVHKLDRLARNRADDVEINRAFEEAGVRLVSTSENIDQTPGGMLLHGIMSSIAEFYSRNLANEVMKGMGEKARNGGTLGKAPLGYINVRARDENGREVRTIALDEERAPLIRLAFTEYATGQWTTKRLAAHLHDRGLTTVPTARKPAKAVTGAQLHRMLRHPYYKGVISFQGVEYPGAHEPLVDEETWSQVQAVLDSHRFGERERQHNHHLKTTVYCGLCGARLLVQNTRNSKGDLYPYFICARRQRTHDCSFRAVLIDVVEERMSALYRTIQLSSQDRQLVEQYVREELHHLERDKDRTIRSLTTRRTNIEDKRRRLMHAHYEGAIPLDLLKEEQTQLTAELNQIERQLAAYQADAAEIHQRLTQALDLLEDCHRLYQAAPPHLKKLLNQVFFERVLVNPAVDEDGRVILPEDGTNDDRHRTMTDPAAGDCPIGESDDGPLQHTAAPRLLADASNNASLAADLRQPFTWLTSRRMHNVARQHRATLLQDNPQENWDNQVDCPITNTVCNDEALTSGGERFASSSTNPDRVTHDLGLGKAIVVPPLGFEPRTLCLSGTIRGISSLL

SEQ ID NO: 20485 - protein, 539 aa, synthetic construct
MAKIGARVYSYLRFSDPRQGSGSSADRQLQYAQRWAADKGLALDESLSLRDEGLSAYHQRHVTQGALGVFLRAIEDGRIASGSILVVEGLDRLSRAEPIQAQAQLAQIINAGITVVTASDGREYNRAGLKAQPMDLVYSLLVMIRAHEESDTKSKRVKASILRLCQAWQSGTYRGLIRNGKDPQWLKWTGSAWEMLPDRVLTVRRALALYQEGLGAARAVRVLHEEGLDYSDAGITKQQIYRLIKLQALRGAKCLSVDGEDFVLEDYYPRLISESEWADLQHLAGQRLRRRGHGEIPGIITGIGLTYCGYCGTALVGQNMMTRQKADGTIADGHRRLHCVSYGVNGGCKAGGSCSVVPIERALLNFCSDQLNLQRLLKVGDDRQGLRHQLVIARSAVEKFSVQLGKITDALLSDDSGAAPTAFIRRARELESQQADAQKKVLQLEYELTSVAGSTRPAQAERWVELADLVRAGDYPAREKVRQLVMDTFERIVVFMRGMGAEDRSNKFIDVQLLSRTGQHRLLQINRKTGAWVASEDWD

SEQ ID NO: 20486 - protein, 511 aa, synthetic construct
MPKAISYIRFSTGKQAKGSSHERQTAMLDSWLTANPDFTLSSESFKDLGISGFSGKHLKSGFGLLLEAVENGSIQSGDVILIEAMDRVGRLEPMDMIPLLSRIVSRGVDIVTLDDGIRYNRESANSNHLFLLVAKVQQAHQYSDTLSRRMKASYSSRRKAAAEGVTPKRNTPVWLTSEGELIPEIAPLVKQAFEDYASGLGERRIFERIFEGNTNPLLARMAPSTVKRWMTNRTAIGEWNGIPGVYPPVIEPELFYRVQKRMEEKFSPRGAPTRHRFTGLVVCAECGKNFNTKHYQATGLTSMECSSRARRGATGCTNNRSIPEPIIELAFQFTKGKHIKKALEGQQLTASQKRGMELDGEIGEVDKKIKRIIGFMQTVEEGDGADLASQYSSLQAERRVLRAEKEGLAVDGPVSIMDQVTNIKDFTKDPIKANALLQSVGYQLVCHIDGRVTFEQETFMYEGWGRAEDVHKVVLPDGRKIKLPIQRKGKTSKLKAVDFSQIGPLDLTKSE

SEQ ID NO: 20487 - protein, 509 aa, synthetic construct
MRRAISYIRFSSERQLKGDSVRRQSKLVTDWLDKNPEFYLDSSLSFKDLGKSAFSGKHLKGGLGDFLTAIEKGLVKAGDTLLIESLDRLSRQDIDIASELLRRILRAGVDVVTLSDGEHYTKESLKDPLSLIKSILIMQRAHEESLRKSERVQAAWNRKKELISEGIKVSRRCPAWLRLNDDRRTFTIIPDKVEVVKRAFDLRLQGLSFWAITRTLNDEGHLSLNQYTPKQKGWSDTAVKKLLRNRAVIGCFTPAGREEVQGYYPAIISESLFYRVQQLNTGQYGRASVSSNPLSVNLFRGIIKCSECGATIVLGGYALKRFGMYRCPNRSANRCSAKAISRKQTDATILYMLALCDRFETENTDTIDGLKIQREDLQRKISKMAELAIELDDMTIITEKLRDMKNALSKLNHDIEEETKRIKAITTGSLKDIDRTTKEGMIETQLLIKGVLKEIVIDAAKRRCKVTFHNGRAITLPITETPSEDVTEAIQSLSEVTERGLIDVDEVII

SEQ ID NO: 20488 - protein, 506 aa, synthetic construct
MRTVITYLRFSSAIQGAEGADSTRRQNDLFKQWLKKNSDAQVVASFSDEGLSGYKGKHLTGQFGDMLARIESGEFPEGTILLVEAIDRIGRLEHLETEALMNRIIAHGIEIHTLQDGLIYTRDALSDDLGISIIQRVKSYVAHQESKQKSFRVSQKWKQRAKLALAGEQRLTKMVPGWIDPDTFKCNEHAETVRLIFKLLLDGESLHNIARHLQSNDIKSFSRRKDANGFSVHSVRTVLRSESVIGTLPASQRNDRPAIPNYYEAAIDAATFNKAQEILDKNRKGRTPASDNPLTINIFKGLFRCQCGASVHPTGTKNKYQGVYRCNNHLDGRCDVPPLKRKPFDKWMIDNFLGMIDVGNDGEAEGKIASLQHEVEIVTTRIKKATALLLEMDDITELKAQVKELNQKRTELQTTIDSMRRKTSLSDKGLPQLKDIDLMTKAGRVECQLILSKHLKGLTLGKDSVTVTLQNDTEITIPTNPLPLNDGTSIFEIAEKELLEIDAYQL

SEQ ID NO: 20489 - protein, 575 aa, synthetic construct
MTKIAYSYTRLSTEKQIKGHGFTRQREAIEKVCCQHGWQLSDQTFNDLGVSAWKGANVTTGALSHFIELTKKGAIKPDSVLIVESVDRLSRQQVDKSLRLMLELLDVGISIFTLSDSKLYTTNSDNVMLDLMMWLMTAQRAHEESEMKSLRIRAAKRKNKELIRQGVIVSRKCPEWLSVSDDKSCFIVNEERAEIVRKVFIWYSQGFSTKPIALKLNELGVPYWGKSSTWSYRHIRSLLKHRAVIGDIQPLIRVNGKDVPDGDAVSDYYPAIVDKGLWATCQQIKSSKTTARGRTVEIGMANLFRGLLKCECGSGLAINSSTVKGRTYRFLRCSQLKTTGCQAKNWHYEKTERILLIALRHSLSSFSEEDHAVALRESQHYLARINEELKEKERQAENAINYLLDKPSRLLEARLQTLEDDIARLKAIQEQAEHRVEAVHYEKSTALDKVEELQRVLEDIANDDDSRHKANGLLRRLIDTVTLGSISNPRSKEFMELSGNDYHGLIVIKRRDGLEVRVEVLKNYELSISWEGDEFTVIECSPTQQPNSQHEHQKFINVGEQTVDLWDDEGWVASS

SEQ ID NO: 20490 - protein, 528 aa, synthetic construct
MYTPQSLSEHYSQITTPQSEQPLAILYSRFSSRNQVGNDSINRQLEGAQKFCEYHNLKLSEANYSDLGISAYKDNVREGLELLLNAVRDGTIPANSWILCHTTCRLSRKGFQHVLKLVSELVATGCKFCTINDNQVYDSTNINKLSSALPLIISADLAFSESEKKSLMIKHAKEQTRKNRKIVGKQPYWITLQDGKPMLNDFSTIVKTIIDLRLKGYSAQRIAKQLNADGHLSPTGKSWGAAAIRKTIDNHVLYGAKEYSEMKDGKLVPVEIVEDLYPALCDKSIWLQIKYEKGTKEVGKRSKSSPFSKLLRCACCGSAMTTRSTYQKGVKYDYRVCIRSTEGSCDQKSRFRDLDNIILGELKHLKYEVRTHATVEVDSIKVFQDKLTLLNQTKELLQSNPTALAAIYADIAKTEQELHEAKRTKELLESQPNEVNFQAIVDVEDQSQRNVLLRRIIESIEVKRIDKEKLVSQVRVVVRFKNSHTQTFVVCYRYRGYDIKWLTDTEKYKEQLNAFVNDAVKQLEEWEK

SEQ ID NO: 20491 - protein, 509 aa, synthetic construct
MAQRKQAISYQRFSSDRQRNNSSLDRQSDSIKSWLKQNPDVDLIDQYVDEAMSGWSGKHIEQGSLGKLLQAIEEGIVRPETLILVEHFSRLSRQNIDKTEELLRKIWQHGITIVTIRDNGLYPPSTINDMPLRIRLIVEIEQAFKESEWRSAKVKGSYVKREKDAKNGLTPRMRRPFWLNKDGTLNDHHEVIKDIFNWYMEGLGQQRIIVKLKEKYQSVPSVQKMNPSTVMRWLTSDVVRGLWRGYKVYDAAVDDTLYFNVQTVHNSRLYHNVKPDRNWPLSGLLQCGVCGRGMSIQKSKGSLPVVRCSSKQRDKSCQRKTTFPYALVHLYMFNTVRKRASRLYTQKTVTKENALRLGQIDNDLVKLRTQLKEEKQLYDEASSEGKNGRLILKIMLETDERIQDLERERDSIQSSIEASNNLFISDDANNLVLTPRNFNLEMHKLGFKIVVGEYSLNTEGLSDKAPEWKYLGYSRKKRAYEWEVLGKKYFMPTGSFNDEVLMLEDKEKI

SEQ ID NO: 20492 - protein, 531 aa, synthetic construct
MTIAYSYIRFSSSQQSQGDSLRRQIQLAEKYCIENNLTLSDTTFRDLGVSAFHSTNSQEDSGLGQFLSALNQGRISEGSYLLVESLDRLSRAKVQTALRQMLNIIELGVKIVTLMDNRIYDQESDTTDLIISLTIMERAHNESKTKSERIKAAWVHKRQNPTTTNRHSSTPFWLSLNADKKTYKLKEKYVEIVRKIYQLSIDGWGVIKIVRHLNESNIKAPKGGSWATTTVSRVLTSKAVLGHYEPMQNRKSLNLTIEDYYPSIIDEATYYLSRQRQNERSKPEAAGRKTNYPNPLSQIAKCKLCGSSMYYENKSKSLKYLTCREFKKGNCTNKPIRIELIYRFVYEVFNSPMYHQYQAKLVEKSNKKDTSKLEELEVKKTEQEKALRGLLSMSNDFSNTIIQEEIKVRSERIESFKKHIENVKAEQAVEHTRSTHINFTEALQLAVNAFRFPLEKVQVEELSREELFNTRVKLNRILKHAFNSLSIYHCGESKRITIETEVMEGFSEGLKYETTRQSIKKPLSSRVWSVR

SEQ ID NO: 20493 - protein, 575 aa, synthetic construct
MTKIAYSYTRLSTEKQIKGHGFTRQREAIEKVCCQHGWQLSDQTFNDLGVSAWKGANATTGALSQFIDLAKKGAIRPNSVLIVESVDRLSRQQVDKSLRLMLELLEVGVSIFTLSDSRLYTTNSDSVMLDLMMWLMTAQRAHEESEIKSLRVRAAKKKNKELIRKGIIVTRKCPEWLTVSDDKSCFLVNNERAEIVRKIFTWYSQGFSTKPIALKLNELGIPYWGKSSTWSYRHIRSLLKHRGVIGEIQLLKRIDGRDVADGDPVEDYYPAIIDRGLWATCQQIKSSKTTAKGRVVERGMANLFRGLLKCECGSGLAINSSTVKGRTYRFLRCSQLKTTGCQAKNWHYEKTERILLIALRHSLSSFSEEDHAVSLRECQHYLARISEELKEKERQAENAINYLLDKPSKLLEARLQTLEDDIARLKAIQEQAEHRLEAVHYEKSTALDKVEELQRVLEDIANDDDSRHKANGLLRRLIDTITLGSISTPRSKEFMEVSGNDYHGLIIIKRRDGLELRIEVLKDYGLSISWEGDDFTVIECSPTQQLNSQHVSQRLINLGGQTVDLWDDEGWVASS

SEQ ID NO: 20494 - protein, 530 aa, synthetic construct
MGIFMYTSEIYKSKQQLITPSSTRPLAFSYIRFSSKKQELGNSLQRQMEAAERWCAYNNVELSPITFDDLGVSAFKEGTRPALADMLEYIKTGIIPKGSFILLENSDRLSRRGFKHAVDIVHEIVNNDVYLVVLGNNPVVYDKHNIVDLSSMLSLLLDSDRGRQESARKSVLIKAAKKHLRSTREAKGKLPWWLSAVDGKAELNEFSAVIREMVDMKLQGVSAQKIATHFNNKGVLNAQGTAWKAVSINASFKNKLLYGTKVYYEVVGTNGRDCAPVEEVPNWAPAICSKREFDAIQPKKRVKGELTRTSAFTGLLRCPNCHGAMQQRKQYHKGKEYTYRRCLNYGEGRCTVKDNFKDVDVVAKAALQHLKVINTSSSNDELNQAIEQLNAAKNKLETQEASLAYIKIPEILGRTYDDIYKTQQEIAHLEASVQLLQTTSHEVNTISLFDLPNKEVNVELKKVIKAIYFFKLAPLTDKLIIQYVNDVKSTFVITHKRNGRSEATWKMQLVADSTKWDVADTREAWERDDS

SEQ ID NO: 20495 - protein, 528 aa, synthetic construct
MYTPQSLSEHYSQITTPQTEQPLAILYSRFSSRNQVGNDSINRQLEGAQKFCEYHNLKLSEANYSDLGISAYKDNVREGLELLLNAVRDGTIPANSWILCHTTCRLSRKGFQHVLKLVSELVATGCKFCTINDNQVYDSTNINKLSSALPLIISADLAFSESEKKSLMIKHAKEQTRKNRKIVGKQPYWITLQDGKPVLNDFSTIVKTIIDLRLKGYSAQRIAKQLNADGHLSPTGKSWGAAAIRKTIDNHVLYGAKEYSEMKDGKLVPVEIVEDLYPALCSKSIWLQIKYEKGTKEVGKRSKSSPFSKLLRCACCGSAMTTRSTYQKGVKYDYRVCIRSTEGSCDQKSRFRDLDNIILGELKHLKYEVKTHATVEVDSIKVFQDKLTLLNQTKELLQSNPTALAAIYADIAKTEQELHEAKRTKELLESQPNEVNFQAIVDVEDQSQRNVLLRRIIESIEVKRIDKEKLVSQVRVVVRFKNSHTQTFVVCYRYRGYDIKWLTDTEKYKEQLNAFVNDAVKQLEEWEK

SEQ ID NO: 20496 - protein, 412 aa, synthetic construct
MRIVRRIQPMMTPQKPKLRVAAYARVSDSRLHHSLSTQVSYYSRLIQSHPDWELVGVYYDEGISGKEQSNRQGLQDLLKACDDGKIDRILTKSIARFGRNTVDLLSTVRVLRQKNIGITFEKEGIDSLSSEGELMLTLLASVAQEESHNISENLRWQIKKKFEQGQPHTPQDIYGYRWNGENYVIEPDEAKVVRQVFQWFLDGDNAPMITKKLNEQGVLTRLGNPFTVSSVREFFKQEAYFGRLVLQKTYREPFSRNPKRNNWQKNKYIVEDAHEAIVSKSYFDVVLQEKERRYKVMYQESHMHKGTFRELIECSHCGKIMITRVDSKKVHRTIRYCCRTRDRFGTSSCPSKTLSEKRILATFEDKIGFKPDKNWVTENIKKVIYDSSVGLITVFPIKGRKYELKVRKEHFL

SEQ ID NO: 20497 - protein, 452 aa, synthetic construct
MLRVALYIRVSTEEQVLNGDSIRTQIEALEQYSKENDFNIVGKYIDEGCSATNLKRPNLQRLLRDVEKDKVDLVLMTKIDRLSRGVKNYYKIMETFEKHKCDWKTILENYDSSTAAGRLHINIMLSVAENEAAQTSERIKFVFQDKLRRKEVISGTIPIGYKIENKHLVIDKEKKYIVKAIFDEYEKSGSVRTLIETINNLHGELYSYNKIKNILRNELYIGIYNKRGFYVEDYCEPIISKKQFKQIQRILEKNKKTTPNKNIHYHIFSGLLKCKECGYTLKGNSSNVREKIYLSYRCSTFYLNKNCIHNVTHNEKHIENYLLTNLKPQLHKHMVKLEAQNEKIRQNKKSNKKDEKKKIMKKLDKIKDLYLEDLIDKETYRKDYEKLQSQLDNITEEQESQIIDTSYIKKFLDIDINEMYNNLSRVERRRFWLSIIDYIEIDNDKNITINFI

SEQ ID NO: 20498 - protein, 534 aa, synthetic construct
MKTAAIYARRSKVVETGDSIENQIQLCTNYLKNIGINNTLIYSDEGFSGKNTERPGFVRLMNDAKQKKFDTLVCYKVDRLSRNIGDFSNLINELEKNEISFISVIEQFDTRAAMGKAMMYICSVFSQLERETISQRVCDNMYSLATNGYWLGGEFPFGFSSSRKNFTDSSGKNRSYSELIPIEKEINLVKLIFNKYIELGSLSQVEKYLLQNNIKTRRGKDWSKASIKNIISNPVYVKANDKTIEYFKSQGIKTYGEPDDIHGILIYKKRKGKSGKIRNPDEWIYAVSTHEGIIDSDSWLEVQKIAEINKYKAPALGSSHKALLSGIIRCAQCGSSMRVSYGVPNKLTKKRKHYYMCTLKHNSGKVRCASKNVDGPEVDKLVINKLKELSLDKSYLVQRLKDYKESFATSSENILSKNIQNEISKNKEQIDNLVNNITLTEDSQLVQILLDKLTKLKSKSVELTNSLNKLNDELAKQDILINNCDNIIQKLKNLSALIDDLDVPQKRTLLSSVIDKVFVNGDTGAVKIKFKSFN

SEQ ID NO: 20499 - protein, 403 aa, synthetic construct
MNRSGKKCVLYPRVSTEMQVDGFSLDGQKNSLKRFADREEMEIVNIYEDAGKSGKSIEGRPAFMQMLSDIENGLGIDYVLVYKFSRFGRNAADILNSLEHIQSFGVNLICIEEGIDSSQTSGKLLISVLSAVAEIERENIIEQTMNGRKEKARQGGWNGGFAPYGYFLKDKQLFIQEDEAEAVRIIFDKYVNENMGFYKIANYLNLQGIQKVKRDNGTLTQWSTHFVRMIIDNPVYMGKIAFGRRTREKVKDTKNEYRQVHQDDYILADGQHDGIISEELWTQAHEKREITGVKAPSKIGRDRAHLLSGILKCPKCGGPMYTNKHAWTNKDGTYKEIYYYVCSKARTTRGKNCDYKAMLKKTDIEPLVVEAIRDLIKNEDFSAEIKSKIGKQIDTSTLDRERT

SEQ ID NO: 20500 - protein, 482 aa, synthetic construct
MGTIKDVAIYLRKSRKEEGLTDAEALSNHREILTGLADRNNWKYTIYTEVASSMDAENRPELQTLLKNLYTFNALLVMDIDRLSRNRYDSAKIMQSLKLNDIKIVTSDGKIIDLNDEQEEVMTGMQEVFANYEYNQIKKRLHRGKVSSAKQGNWVSGRVPLGYYYDRTSKKLVRQEEEARTVELIFSYYTQEMLSLREIAIKLNQTGLRGKRGQPFNAKSVQRILVNDVYQGTTSQHGFTTENTHEPLISKKMFSKAQELNSQRSIKGSRAKEQKHSLSGIVKCGFCGYSLAIQVRQTAKGEARRVKGCGRRDLVSGETCRNKTTSYDLVLNATIDSLSPHRQEILKKMEELIQFNDKFALDKNNEKEHLEDALNKADKKLMKIARMVLEDEGNEQIFNQMKKEILGEKEHIIKRLEDLSHLTVTDQLEDYERIVDIIDKLLHQEKKLTEKDLNSLLLRVIMRVDLFNKEGHEKNIKIIFKD

SEQ ID NO: 20501 - protein, 484 aa, synthetic construct
MKILKYAVYVRVSTDRDEQVSSVQNQVDICRYWLENNGYEWDSNAVYFDDGISGTAWLERHAMQLILEKARRNELDTVVFKSIHRLARDLRDALEIKEILIGHGIRLVTIEENYDSLYEGGNDIKFEMFAMFAAQLPKTLSVSVSAAMQAKARRGEYIGKPGLGYDVIDKKLVINEKEAEVVREIFNLSHKGYGFKKISNILNDKGTYTKLGQLWSHTTVGKILKNQTYKGNLVLNSYKTVKVDGKKKRVYTPKERLTIIEDHYPAIISKELWNAVNSDRTSKKKTKQDTRNEFRGMMSCKHCGEPITAKYSGRYAKGSKKEWVYMKCSNYIRFNRCVNFDPVKYDDIREVILYRLKQQEKELEIHFNPKMHQNRKDKSTEIKKQIKLLKVKKEKLIDLYVEGLIDKEMFSKRDFNFQNEIKEQELALLKLTDQNKRNKEEQQIKKAFSMLDEEKDMHEVFKTLIKKITLSKDKYIEIEYTFSF

SEQ ID NO: 20502 - protein, 540 aa, synthetic construct
MKQPYNTTIYNTALYMRLSRDDENYGDSVSIETQRTILQQYAKEQGLHVVGEYVDDGWSGTNFERPDFQRMMDDMEAGKVNCIVTKDLSRFGREHVMMDYYLEFLFPEKRVRYIAVAENEDTEKGLSDFVPFKNLFNEWFAKDTSRKVKAAFKAKFATGQRIGAYAPIGYRKHPEIKNKLIIDEETRWIVEKIFDLAIHGRGAASITRILIAEKVPTPGFINFQRDGTFANIYAGAPEEKSYAWTIAQVKSIMKDETYIGHTIHYRETNISFKNKRRVRKPQSEWVRVENTQEPIISEQVFRQVQEQIANRRRKCKDGTTQIFSGLVKCADCGWSLSYGENRQNSKPYGHYHCSKYGQGTRQCSMHYIRYDVLYAYVLSRLQYWSGLVQHDEERLLKQLLNATDKGQAAARKKQAAELKKAEKRKAEVDTLFARMYEDWAAGRITEYNFSMLSGKYQSEQAELDEKIEQLQSAIATESQNAVDAEKWIALMKECVNPTELTAELLNMLIEKIVVHEAVKGEDGSREQEVEIFYRFIGKID

SEQ ID NO: 20503 - protein, 545 aa, synthetic construct
MHVAIYIRVSTTSQVLKGTSLDSQLALCKKKAQELGYSNSQIIIYREAGFSGEDIDIRPEMTRLREDIKKGDISKIIIQHPDRLSRELIDKLTVCREFEKYGVEIIFVDTEFQNTPEGWLFFNVMSAIATYELGLIKKRTVRGRLKAVEKEKKVMPMRVPPFGYELVNNQLIINEKEANVVKQIYHWYVYDQLTLRQIGERLYQIGVVPKRKEKKEWSASSIRRILTSQIYIGKYTYNKRKTQKVKGEKTVTGNPKKTYTIRAEEDWIIIDVPKIVDEALFHSAQKQRSKNTKNSGNNKNQYLLKGLIKCQCGRTWEGTFYSGRKDKQTGEQQKYFIYRCPNRNPKNYGPTIKKCKTPSIKIEEIEGYIWNLVIEVFSHPDSYYVYMEEGHTEFINQYEKEVNIRLNKIKEVEKKREKLKMLFLEELISEQEMKSDFKKTNEQINKLKEELKTFEEKRNLEHKKENTKKRMDQIIKSIQNILKDKIDNKLTFEEKRNIITQLVDEIHLEFQGEEQVHVKINGTLDTLVNDIVSSSQSLNDMSYKP

SEQ ID NO: 20504 - protein, 370 aa, synthetic construct
MKAGIYIRVSTDKESQETSLEYQELACRDFVKANGFEVYDVYQDVFTGTKSGRYNKRNGYNKMIEDALAKNIDVIIVKDLSRLSRNSLELEFLRNHVMSKDFHIVTLNGDINSIKGNISLFSTYILIYSEESKVTSIRTKQSKKTMAKNGVFTGSIPPYGYYPIDGKLSIRDDDSPKIVKRIFNSYISGESAESIAKNLTKENIPTPSQLANKKNASSKWHATTIRKMLVNQHYIGDLVQGKTEAVNTIYKSRVNNSKDNYIVVKNTHEPIISKEQFNLVNDTIESRKPNEKVSRKTHLLSNLIYCETCGRTISLRNNNYICSGRLKHGKKVCCTKKINKIDLVNLLTKNIVEKIDNCESDFYLNMSKEN

SEQ ID NO: 20505 - protein, 501 aa, synthetic construct
MKCAIYIRVSTNKEEQKTSLQNQKNLFFKYISDKGWDIWKIYIDIESGTNDKREQFQQMISDAKNRNFDIILAKELSRIARNGKLSYEIKTLAENNNIHIITLDNAINTIEGNPHMFGMYAWMHEQESQRISDRVKYALKSRAEKGIFKGSVAPYGYYCKDGTLFIKNDFTPDIVRRIFDEYISGIGFDAIARNLYNDDVPTPRQVAGIKNASPKWHGSSVRYILENPHFIGDLVQGRTTTKNVTSAKRNIVPIEELVIVENTHEAIISKEDFNAVQQLIASRKRKRTAPSPHLFSNILICADCGHGMHFKKNRKGYICGNFNKHGYKACTSHIIRENSLKNLIMSDIKFILDTIKKKSLFNSINSSLNKKCKSSKKSLETIEAKISKLILRKNNALSKFIDDYISKDDYDNIIKIINSEISELKTKKLLLENQMSTKLAHDLSSGMYYFKSIASSINDLTPDVVNRLIDKIEVSEDGTPRIYYRFSESSICLSDFINQTS

SEQ ID NO: 20506 - protein, 556 aa, synthetic construct
MNREGKKCVLYPRVSTEMQVDGYSLEGQKNGLKRFADREEMDIVGIYEDAGKSGKSIEGRPAFKKMLSDIKNGLEIDYILVYKLSRFGRNAADILNSLEFVQSYGINLICIEEGIDSSQTSGKLLISVLSAVAEIERENIIEQTMNGRREKARQGGWNGGFAPYGYYLKDNQLLIEETEAEAIRVIFDKFANSDIGLGGVAKYLNLQGIKKIPRQNGTLETWSSHFIRLILDNPVYCGKIAYGRRTREKVKGTKNEYKQVHTDDYILEDGQHEGIVSEELWQKAHTKRMATGIKQPSKIGKDRSHLLTGILKCPICGSSMYTNKHAWTNKDGTYKEVYYYICGRNKQERGHHCDYKASLRKTDIEPLVIEAVKELVSDKYFAKEIEKRIGVQTDTTAIDKELANYESKLKEVDLNKARLEREIDNLPIDARFRERKIHDMTLRLDALYDTIVELEERIEDAKLRKSSIEMETITLDNIYKLMLNFGKLYDIISDEEKKSLITYLIKEIQIYPNGESEQPLKSIEFNFPIYRDGQEVRRLLWEKGNTVETVAKIIKQ

SEQ ID NO: 20507 - protein, 672 aa, synthetic construct
MSKEKIKVYLYTRVSTSIQIDGYSLEAQKSRMKAFALYNDYEIVGEYEDAGKSGKSIEGRVQFTRMMEDIKSGKDGVSFVLVFKLSRFARNAADVLSTLQIMQDFGVNLICVEDGIDSSKDAGKLMISVLSAVAEIERENIRVQTMEGRIQKAKEGKWNGGFAPYGYQLIDGKLIINEEEAIAIRTIFDQYVNTSIGANGLSKYLENHGIRKIPRQNGKNPLFDAGLIRKILKNPVYNGKIAFGRRTLEKVHGTRNEYRQVEQDDYLVAEGIHEAIIPDELWQAAQVKLKAQAKKYEHVNKGKNMRTHLLSGIVKCPICGAGMFGNKSIKYKKDGTKYKDFYYYGCKHRLMNRGHKCTYNKQIREELLDDAVAEVIIKLVSNPKFASMIQEKINMKVDTSAIENEIDNYQNELRKSHSTKYKLIEEIDNLDVEDKHYKRRKNDLDDRLYRMYDKIEELESQLIEAKAKKETIEVEKLTGDNIYKVLIYFDKLYKVMNDVERRQLIEALISEIQIYEEKQPNGQWLKSITFKLPIIDEDLNISLENDEQVDTSKLIIGSLTNIEYFCMTTDKSADDAEKEIRSILSNNKDSEEFVVLTDVFGGSVANICTNLLLQGFKFELLTGVNLPMLLSILLLVEEDTKLIVKSGLEEAKNGIVYVNELLENQNKIKNVM

SEQ ID NO: 20508 - protein, 487 aa, synthetic construct
MKYAVYVRVSTDKDEQVSSIQNQIEICRYWIEKNGFEWDENSIYKDEAVSGTAWLERRAMQLILGKARKKELDTVVFKSIHRLGRDLRDALEIKEILLGHGVRLVTIEEGYDSYYEGKNDLKFEMYAMFASQLPKTLSVSISAALAAKVRRGEYTGGTVPYGYKIVDKKYVINQEEAEIVREMYELYDNGLGYLRISNALNDVGKYKRSGKLWTYSAVKLIITNPMYKGDYVMGRSTEVKVDGRKKRIQEPREKWVVFENHHPAIIERPLWDKINNPKINKKIKRRVAVTNELRGIARCIHCGSPFVLHTYKYKNKEGEELNYGYLTCGTYKLTGGRGCVKHSGLRYERLRSLVLRKLKEKERDLEKVFKLNDKDKHQEKQKKLRKEKKELEIKRERLLDLYLDGGSIDKETFTKRDANFAKNIQEKELEILKLDDVKALIVEQQKVKDAFKLLEDSENLYPVFKKLIARIDISQNGAVDIRYRFEE

SEQ ID NO: 20509 - protein, 429 aa, synthetic construct
MRVRIIEPTLKTEKVKKKVCAYARVSTDSQKQDESLENQIQYYENLILNNLDYEFIGVFADRGITGTTEDRPEFQSMMNFCRQGKIDLIITKSISRFARNTAIVLETVRELKLLNIEVRFEKENINTLSGDGELMLTVLSSFAQEESKNVSDNIKWRMRKKFQQGEMIINTKRFLGYDKDEYGDLVINPKEAEVVKRIFNEYLSGKGCFTIAKEFREEGVPTAIGGRWQDSTILRILKNEKYKGDALLQKYYTSDHLRKKKVKNNGEVQRYYIEDDHVPIVSRETWEAVQEEIKKRAMDKGIILGDTKKYTRRYPLTGMLYCSKCGSTLRRRTWNSKLSCRKIVWQCSNYIKNGKNACKGTAIDDDIVSKLNIKEETIVKEEVRNGKKYYSYTSKRTQNQHSANNRVAQKENGSVLQGINRPSRTVIKL

SEQ ID NO: 20510 - protein, 443 aa, synthetic construct
MAAYCRVSTDQAEQLSSYEAQVNYYTNFITDSSEYEMVKVYADEGISGTNTKKREQFNEMIRDCKAGKIDVIITKSISRFARNTLDCLNYVRTLKELGIGVIFEKENINTLDAKGEVLISILASLAQDESRSISENSTWGIRRRFEQGKLHINHKKFLGYTKDEEGNLIIDEKQAKIVRRIYKDYLDGKGTNRIAKEFEEEGIKGWNGKAKWYESTIRGILTNEKYKGDALLQKTYTVDFLTKKRAENNGEVPQYYVEESHPAIIDKEMWEAVQLEMDRRRTFAKEHGIVKVDYATVTNPFAGKIICGHCGSVFGRKVWNSTNELRRRIVWRCNRRYIKKGKKGCNNKHIDDKVLYQAFIDTFNAMIENKDYFMEKWKEHLKSENVLVRYKAKQFVGILKNVKPIKKFDVDLFFRIIEKMTVFDGDKIIVSLLDGTEIEVIIE

SEQ ID NO: 20511 - protein, 452 aa, synthetic construct
MKAAIYIRVSTQEQIENYSIQAQTEKLTALCRSKDWDVYDIFIDGGYSGSNMNRPALNEMLSKLHEIDAVVVYRLDRLSRSQRDTITLIEEYFLKNNVEFVSLSETLDTSSPFGRAMIGILSVFAQLERETIRDRMVMGKIKRIEAGLPLTTAKGRTFGYDVIDTKLYINEEEAKQLQIIYDIFEEEKSITSLQKRLKKLGFKVKSYSSYNNWLTNDLYCGYVSYADKVHTKGVHEPIISEEQFYRVQEIFSRMGKNPNMNRDSASLLNNLVVCGKCGLGFVHRRKDTVSRGKKYHYRYYSCKTYKHTHELEKCGNKIWRADKLEELIIDRVNNYSFASRNVDKEDELDNLNEKLKTEHTKKKRLFDLYISGSYEVSELDAMMADIDAQINYYEAQIEANEELKKNKKIQENLADLATVDFDSLEFREKQLYLKSLINKIYIDGEQVTIEWL

SEQ ID NO: 20512 - protein, 537 aa, synthetic construct
MKAAIYSRKSKFTGKGESVENQIELCKSYAKNNGYDDVYIYEDEGFSGGNINRPEFKSMMTDAAAKKFDAIICYRLDRISRNVSDFSTLIDELKVLGIDFISIREQFDTSSPMGTAMMFISSVFAQLERETIAERIKDNMYELAKTGRWLGGTSPFGFSSEPIYYLDNNSKQKKMMKLSPINEEISLVKLFFEQYLTLGSLGKLQKYLIQNDIKTKRNSAWDIKALQLLLRNPVYVKSSELVISYLSIKGATVFGDPNGNGILSYNKKDSKDKYKDISEWILSVSKHEGVIDDNLWIKVQRQLDKNKDLAPRLVNGSEYGVFNSVLHCAKCGGKMIQKQGHVSRKTGEILRYYICINKINPSDNTCDSKNIRLDKLEKSVMKELFKATDNRGSLIKAIEEYKKSLESEAVDKSSIKSYEKQISQKELQVKNLIDKLSLNPNIYDLLSSRIEELNKEIKELKFKKFELENTNSNLKAAIKEINASTSMLLNFKKLWENADYSMKKLLINSFVDYISYNSDTQEVVIKPFCTNKKKGAL

SEQ ID NO: 20513 - protein, 584 aa, synthetic construct
MSKVAIYSRKSKFTEEGESIENQINMCINYIKNILNIDDYEIYEDEGFSGGNTNRPKFQKLMKDVKNNKFTHLICYRLDRISRNVADFTNTLEILNKYNISFISIKEQFDTSTAMGRAMMNVSATFAQLERETIAERIKDNLRELSKTGRWLGGPPPLGYQSIEVENNDSRGKSRKKHTLKINENEINIPKMVFELFIKYKSFQKVSRLLEGQGIYSRKGLVFSRELVKQTINNPVYCIADKKLIEYFRNNGAETYGSENINGINGIMPYNRRKDNGSFNSIDNWIISIGEHQGIISGDVWIKCQEISKEIKKQASNRQCTSQEALLSGLIVCSNCNSGMAPRQNKSGNYTYRYYSCNLKNKSANRCDNDALNAYDAEDYVIKKLNELTPEDIIQHYEEMKKKQYIKIDNQNQINENLKEIEKNKQAISNLVMKMAYLENDLAILEPFKLEIKRLSDKNIELENTIKMLDSKNGEIVDTSESLDEILESFNTYKKFFNFTEDFEERKRLIRSLVKFITWDSKTRKLDLILVGSDRERPTPGSLPLSDSNRRNGPCRNNCYNGISTYGKRNYRRDKKSRTCWALC

SEQ ID NO: 20514 - protein, 434 aa, synthetic construct
MPRNIRKIDTLVQKVPTRKKVAAYARVSSGKDAMLHSLSAQVSYYSDLIQRHSGWEYAGVYTDEAITGTKEVRPEFQRLLNDCRNGKVDMIITKSISRLARNTVTMLETVRELKDINVDVYFEKENIHSCSGDGELMLTILASFAQEESHSVSENCKWRIRKGFSEGELINLRFIYGYRIIKGKIEIEESEAEIVRMIFKDYIEGMGYRKISEKLREMGVEKLRGGKWNSERVADILKNEKYTGNALLQKKYVKDHLTKALVFNKGNLPKYYAEGTHPPIVDLEIFQRAQEIMKKNRARYSGGTSIRKYPFTGKIICGICGKHYGHKNKQGRISWNCFTYLKYGKDNCPSKQIPEEILISLSTQVLEIKKFDEATFEEKIKEIQVPESNVLIFVFKDGNVVKKEWNYKSRRESWSEEARQKAREISLNNMKGRS

SEQ ID NO: 20515 - protein, 528 aa, synthetic construct
MATARAITVIPPTTGRLAPITTVVTKKRVAAYARVSTDNDEQLSSFDAQMDYYTRHIKSNSAWDFVEVYTDEGISATSTKKREGFNRMISDALSGKIDFIITKSVSRFARNTVDTLTTVRKLKEKGIEVYFEKENIYTLDSKGELLITIMSSLAQEESRSISENVTWGQRKRFADGKVSLPYKQFLGYKKGEDGLPKIIEKEAAVIRLIYKLFLEGKTPTGIAKHLTTNKIPTPAGKDIWQESTVRSILKNEKYKGDAMLQKSFTVDFLTKKKKINEGEIPQYYVENSHPAIITPEVFDLVQNEIKKRKNAKGYKTGGGCFSGKIVCGKCGSFYGRKVWHSTSKYRRVIWQCNSKFKNNEKCNTPHIYEDKLKQAFIEAFNSILRDKEEILQGYESIIQALTDTSKLDKESAKLQSEMDIVIEMLRKCVEENAHSILNQMEYEERYNAIAERYESLKKGLEGINEKRLDRGVKQENIKAFIKELEERAGLITEFDEEIWNGIIEVVKVYSEVRVTFIFKDGMELECNI

SEQ ID NO: 20516 - protein, 508 aa, synthetic construct
MKRIAIYSRKSKETDKGESIMTQIKMCKDYFLRYDEESTFEVFEDEGFSGKNTDRPAFKRMMMLASHKKFDIVACYKVDRIARNIIDFMNTFDILRKNDVSLVSITEGFDPNTPVGMMMMTLIAGFAEMERMNIAQRIKDNMKSLAELGRWSGGTPPTGYKSIQLESGNKIITYLELLPEWKEKIKLSFETLANGHTIRQSANILNMPVKTVANIINNPTYCKSDELSANYLKTLGYEVYGELNGNGYIPYNRRPRTKNGKKEFNAKGMFVAVSKHEAIVDSDLWIAANEQIKQRGAEARPRISQNSFLAHLVKCSCGSGMYLEPGKTRKDGTRTYYFRCSRQRYDKTLCNTGWVNATYLEEDILESLNVWALDKSELESYVNKRPSGDITKNIKKIKKAIDKNNSDLHKLTEKLILLEGSAIDAVTNKMNEISRDNEKLNESLLLLERKNLTNDVDALNIEILQNKIKEIVSTWSELTIDDKQLLVKAVIKNIVWDGGKVFTIQPNL

SEQ ID NO: 20517 - protein, 537 aa, synthetic construct
MKAAIYSRKSKFTGKGESVENQIELCKSYAKNNGYDDIYIYEDEGFSGGNINRPEFKSMMKDAAAKKFDAIICYRLDRISRNVSDFSTLIDELKVLGIDFISIREQFDTSSPMGTAMMFISSVFAQLERETIAERIKDNMYELAKTGRWLGGTSPFGFSSEPIYYLDNNSKQKKMMKLSPINEEISLVKLLFEKYLTLGSLGKLQKYLIQNDIKTKRNSAWDIKALQLLLRNPVYVKSSELVISYLSIKGATVFGDPNGNGILSYNKKDSKDKYKDISEWILSVSKHEGVIDDNLWIKVQRQLDKNKDLAPRLVNGSEYGVFNSVLHCAKCGGKMIQKQGHVSRKTGEILRYYICINKINPSDNTCDSKNIRLDKLEKSIMKELFKATDNKGSLIKAIEEYKKSLESEAVDKNSIKSYEKQISQKELQVKNLIDKLSLNPNIYDLLSSRIEELNKEIKELKFKKFELENTNSNLKAAIKEINASTSMLLNFKKLWENADYSMRKLLINSFVDYISYNSDTQEVVIKPFCTNKKKGAL

SEQ ID NO: 20518 - protein, 550 aa, synthetic construct
MTGTKRVAIYCRVSTTEQAEEGYSIDEQNVKITEYCNKEGHEIYKLYEDRGISGKNITNRPGIKQLLHDATENKFDLVIVWKLNRISRKLLDILNIIELLNKHNIAFRSLTESFETETPAGKLQLNIMGAIGEFERESLADNIKLGMIARSKQGEWNGGIILGYDSIELPNKGKKRKSTMLKVNENEANTVRKIFELYSEGNGYKAIVNKINKEGYKTKKGNQFAVSTVKGILTNPIYIGKIRFNVRQDWSKKRRKNKNDNPILVDGRHEAIIDVETWDKVQVILKERSKKHNKVYDSEQPLTGILKCPVCGAGMTISRSTTKRADGSKRVIETYSCGNWKNKGTAVCNSNSIRVEKANAYVMEKVSELVNDESILRKVVDNINKNKSTKLKPTLEQIEQLNKEIEKLNTKKDKNLELFEDGILAKSELSTRIKAINDDIEKLKLREQELKQEVDLAEGEPVSYQLVRDVMTRFKEVFLSMGTSQQRKQLIHLLISKITMNKEREIDSIEIQINNDVITYLKKDGLPNKQGNPSFLHFLEMNCGNVKLII

SEQ ID NO: 20519 - protein, 670 aa, synthetic construct
MNREGKKCVLYPRVSTEMQVDGYSLEGQKNSLKRFADREEMEIVGIYEDAGKSGKSIEGRPAFKKMLSDIKYGLEIDYILVYKLSRFGRNAADILNSLEFVQSYGINLICIEEGIDSSQTSGKLLISVLSAVAEIERENIIEQTMNGRREKARQGGWNGGFAPYGYYLKDNKLLIQETEAEAIRIIYDKFGNSDIGLGGIAKYLNLQGIKKIPRQNGKLETWSSHFIRLILDNPVYCGKIAYGRRTREKVKGTKNEYKQVHTDDYILEDGQHEAIISEELWQKVHAKRLATGVKQPSKIGKDRAHLLTGLLKCPICGSSMYTNKHAWTNKDGTYKEVYYYICGRNKQERGHHCDYKASLRKTEIEPLVIEAVKELVSDKYFAQEIEKRIGAQTDTSMIDKELANYERKLKEVDLNKARLEREIDNLPIDARYRERKLHDMILRLDGLYDTIVELEERIEDAKLRRNSIEMEAITLDNIYKIMLNFGKLYDIISDEEKKSIITYLIKEVQIYPHGESEMPLKSIEFNFPIYRDGKEVRKILWESGNTVETFAVNYEKFTAGNWSDKNAIYLNFFCLISSVLANFIGAFLGESISIDSSISGFILTSMFIALIVSQIKNKIYIVVFISSIIISVILYALFKSNLVIIVASILASLIGFFIEESYCKKEESYE

SEQ ID NO: 20520 - protein, 475 aa, synthetic construct
MEINKLKAALYVRVSTTEQANEGYSIQAQTERLKNYAKAKDYFIIKTYTDPGFSGAKLDRPALQEMIKDIENNQIDIVLVYKLDRLSRSQKNTLFLIEDVFLKNNVDFVSMQESFDTTSAFGRAMIGILSVFAQLERDTITERMGMGRTERAKEGYFHGGGSARIPVGYDYIDGLLQVNEYEAEIVRSIFELYNSGKGVNSISNEIRDKFPSKRKFGVSLIRSILTNNLYVGLIKFNDGVYEGKHEPIISKDIFDKAQNEFKRRTTGKLKLFTSKYLLTGITYCGHCGARVKGTGSSKLKDGTRLSYYSCYSRAGSPSHMVKDLNCPSKINRTEILDEYVISQMKEITKTDISIEIDSEFTDDSDTDNTVIQNEIKSIEDRINKLLELYQFGNVPLDVLNSKINSLNSEKSKLNEIINESATEIIDDTIDKVEIFNNLKKVDWNTITHEETKTIISKSIEKITIFNEKIEIEWKF

SEQ ID NO: 20521 - protein, 546 aa, synthetic construct
MEEPIERKRVAGYIRVSTEEQAEEGYSLDAQRENILRFCDQHHYELVDVYADEGISGKTIEKRPGIKCLMADASKNKFDLVVVWKLTRLGRSIKDVLGIAELLFANNVEFRSISENFDISTSTGRLMFQMLGVFGEFERNQISENVSMAMTSLVKHKKRFAGGRMLGYVSAVDESGVKILQVEPNEAEIVRLIFGQYLQGKGYRAIANFLNKQGYQTVKGNSFTTIAVKGILMNPTYAGYLRYGKYINWEEKRRKGLNPHPIQVEGSHEPIIEKEVYHHIQEKLKVNHAQPKWTHNGENVLTGLLKCPECGAPMAASNTTNTLKDGTKKRMRYYSCSVFRSKGSSICHANSIRAEVAETFVEERLKEVVLLPAHLKEIIKGLNKELKEQRAPLELEQKVVQQQEHDIQAKITKWKSLINDTPELAKELEARMKELEIELAVTRQRRQTIATFLEKEGVQLNPAEVEKMLHYVNALLEGRNKKDIKAIYRTFIESITFNKETKGDIQIRMLFDAPIINQLNQVYQAGGTSQVGVSPVSLSSPIQITV

SEQ ID NO: 20522 - protein, 537 aa, synthetic construct
MKQQIYNTALYLRLSRDDELQGESSSITTQKSMLRLYAKEHHLNVIDEYIDDGWSGINFERPSFQRMIEDIEAGKINCVVTKDLSRFGRNYIMTGQYTELYFPSHNVRYIAIDDGVDSEKGESEIAPFKNIINEWVARDTSRKVKSAFRTKFAEGAHYGAYAPLGYKKHPDIKGKLLIDDETKWIVEKIFSLAYQGYGSAKITKILREEKVPTASWLNFTRYGTFAHIFEGKPESKRYEWTIAHVKAILKSEVYIGNSVHNMQSTVSFKSKKKVRKPESEWFRVENTHEPIIDKEVFYRVQEQIKSRRRQTKEKATPIFAGLVKCADCGWSMRFGTNTANKTPYSYYACSFYGQFGKGYCSMHYIRYDVLYQAILERLQYWAKAVQQDEEKVLHKIQKAGNAERIREKKKKASALKKAENRQNEIDRLFAKMYEDRACEKITERNFVMLSGKYQKEQIELEQQITSLREELSKMEQDMIGAEKWVELIKEYSVPKELTAPLLNAMIEKILIHEATTNEDNERIQEIEIYYRFIGKVD

SEQ ID NO: 20523 - protein, 481 aa, synthetic construct
MITTNKVAIYVRVSTTSQAEEGYSIEEQKAKLSSYCDIKDWSVYKIYTDGGFSGSNTDRPALEGLIKDAKKRKFDTVLVYKLDRLSRSQKDTLYLIEDIFIKNNIAFLSLQENFDTSTPFGKAMIGLLSVFAQLEREQIKERMQLGKIGRAKTGKSMMWAKTSYGYDYHRETGTITINPAQALAVKFIFESYIRGRSITKLRDDLNEKYPKHVPWSYRAVRAILDNPVYCGFNQYKGEIYPGNHEPIISKEEYDKTQSELKIRQRTAAENVNPRPFQAKYILSGIAQCGYCGAPLKIMLGVKRKDGSRLKKYECHQRHPRTLRGVTTYNDNKKCDSGFYYKDKLEAYVLEEISKLQDNADYLDKIFSGDNAETIDRESYKKQIEELSKKLSRLNDLYIDDRITLEELQSKSAEFISMRGTLEAELENDPALRKDKRKADMRELLNAEKVFSMDYKNQKVLVRGLINKVQVTAEDIVINWKI

SEQ ID NO: 20524 - protein, 558 aa, synthetic construct
MTKLYSYIRFSSMRQSDGSSYERQIRMAKEIADRYNLELVNDYQDLGVSAFKGANSKTGALSRFLDEIGRSIPVGSWLFIENLDRLSRQDIISAQELFLSIIRRGITIVTGMDNKIYSIETVTANPMDLMFSILLFIRGNEESQTKRNRTNSSALLKIKAHQQNPQNPAVAIEEIGKNMWWTDTTSGRVLPHPVYFPVLQKIVQLRQEGHSAGAILDYLNEHHEPPAPTSNKKHGKWSRAMVSRLFTTKALIGVKTVNVDGVEYELSDYYPRVLSDSEFYFLRKNIVKKAWDYSHVKEKVIPLLSGIGVLRCVHCGATMVKQTAANGKREQYRYCCDGRKSGRTDCPYPNWGFRAVTLEGAVLQLLADKIWIAEDKTNPIPEIQVKIDDISRKIDNLINLSAMMGATKELANQITDLNSQREALHEEIRLFEREMYSVDSQGWDKLAQFDLSDVQNEERLKVRMKIKGALHEIECSRIDSKKNLFVLVYLDGLRQRLVIENNRGLKKGQIFVDLKTINDRQILESAGMVLHPCIEMIIDADWKAPEEIPGLLSEEFGI

SEQ ID NO: 20525 - protein, 558 aa, synthetic construct
MTKLYSYIRFSSTRQADSSSFERQKRTAKEIAEKYGLELVTSYQDLGVSAFKGANSKTGALSRFMEEIGRSVPVGSWLVVENLDRLSRQSIIEAQELFLSIIRRGITIVTGMDGKVYSKESVNANPLDLLLSVMMFARANEESQTKRNRTNSSALLKIKAHQQNPQNPAVAIEEIGKNMWWTDTTSGRVLPHPVYFPVLQKIVQLRQEGHSAGAILDYLNEHHEPPAPTSNKKHGKWSRAMVSRLFHTKALIGVKTVNVDGVEYELRDYYPRVLSDSEFYFLRKNIIKKAWDYSHVKEKVIPLLSGIGVLRCVHCGATMVKQTAANGKREQYRYCCDGRKSGRTDCPYPNWGFRAVTLEGAVLQLLADKIWIAEDKTNPIPEIQVKIDEISRKIDNLINLSAMMGATKELANQITDLNSQREALHEETRLFEREMYSVDSQGWDKLAQFDLSDVQNEERLKVRMKIKGALHEIECSRIDSKKNLFVLVYLDGLRQRLVIENNRGLKKGQIFVDLKTINDRQILESAGMVLHPCIEMIIDADWKAPEEIPGLLSEEFGI

SEQ ID NO: 20526 - protein, 560 aa, synthetic construct
MTKLYSYIRFSSMRQGEGSSYERQIRMAKEIADRYDLELVNDYQDLGVSAFKGANSKTGALSRFLDEIGRSIPVGSWLFIENLDRLSRQDIISAQELFLSIIRRGITIVTGMDNKIYSIETVTANPMDLMFSILLFIRGNEESQTKRNRTNSSALLKIKAHQQNPQSPAVAIEEIGKNMWWTDTTSGYVLPHPVYFPILQKIVKMKQEGHSTGSVLDYLNEHHEPPAPTSNKQHRKWSIAMVSRLFKTKALIGVKEVTVDGVQYELKDYYPRVLSDSEYYFLKNNLIKKAWSFGHAQEKTIPLLSGIGLLKCVHCGSPMVKRKAANGKVEQYRYTCDGEGSGRTDCLYPNWGFRASSLEGAVLQLLADKVWIAEDKANPIPEIQVQIDEISRKIDNLINLSAMTGATKELANQITDLNTQREALHEEIRLFEREMYSVDSQGWEKLAQFDLSDVQNEERLQIRLKIKGALRSIECARIDRNKNLFVLVYLDGLRQRIVIENNRGIRKGQIFVDLKTINDRQILESAGMVLHDHIDILIDEKAFYDGLPKEEDGPLSKFGI

SEQ ID NO: 20527 - protein, 507 aa, synthetic construct
MKRVISYIRFSSEKQARGDSLRRQSKMVTDWLKAHPEYYLDESLTFRDLGVSGFTGKHLQGGLGDFLTAIEKGLVKAGDTLLIESLDRLSRQDVDQASELLRNILRSGVDVVTLSDGEHYTKESLKDPLALIKSILIMQRAHEESLRKSERIQAAWDAKKEEAKAGIKISKRCPAWLKLNDDRKSFSVIPEKVETVKRCFQLRLEGKSIWDIVRTLNAEGHQTLNQYKAGSFGQTSVQDLLKNRSVIGYFTPKGCEEISGYYPSIIPETDFYRVQQLSYSRYGRKPVSENPMAVNLFKGVIRCSECGHTLIINGFTEKRHGIYRCPCKQENRCNAKGLSRKQTDGTLLALLSRIDRFEPEQINVIDTLKLQREGILKNIEKLVELSLIIDDMTAITSKLKQLKSDLSLIESDIEKENQRIKSIDTGSLSDCDLRTKAGRIEAQLIIRGVVKEAVLDTTNKRSKVVFHNGKVIDLPITENPLEAVTEAIQSLSEIASKGLLDIDEFSL

SEQ ID NO: 20528 - protein, 520 aa, synthetic construct
MKKAVYCYARVSSRGQAKDGYGMSRQQAMLRDYVAAYDDSQHNRGYDLGDISWLYAEGVSAYSGKNIEDGSVLKTFIDDVLQKKITNSVLVIENLDRFSRAAPNRAAGLFLSLINAGCDIHEVETEMIHHQYSDLNIISGGLQRAHNESKRKARLSIKNWDERIKNTIDGTSILTHRVPSWIEVKNNKYVIKKGESEKYNLIFKMYADGFGPAAIRDELKMRGMQINEREPTINHLMKIIKDQRLIGKFNSTGRKILDGMLIYPVIVEPELFESVNDLRKQRNPLGKINVKANNLFAGLCICMNCGRYVQVNSVDKKGDTYFRCGGSLVKIDKCKERGFKYKIVENALLEHLRNFDFSMLRCEDNEIQVKINYLSMELVANEKYSNEILADLEKEDIPDPNDRRILKNIQRRISEIRTEITTLKQSNIGYETFNDLKDSYTDDLLDPKNTKLRLDFNVKVKRVVKNIKMKRYDNTIMLVVSYVGVNEKQAMVINSKTGEVVFMAVQNDDLKSVEYLINND

SEQ ID NO: 20529 - protein, 444 aa, synthetic construct
MAAYCRVSTDQEEQLLSYENQVNYYTNYISENPLYEYAGTYADEGISGTNTKKRDEFNRMIADCRAGKIDMIITKSISRFARNTLDCLNYVRELKDLGIGIIFEKENINTLDAKGEVLLTILSSLAQDESRSISENCTWGIRRRFETGKHKMSTKRFLGYDTDETGKLVINRTQEPIVIRLYQEFLDGKTTDYIKRIFEREGVKNWDGGTKWQSTTLMSMLENEKYKGDALLQKSYTVDFLTKKRTQNKGEIQMFYVEDDHDAIISKRIWECVQLEIKRRKKYLEEHGTNSYSHRPESNPFASKIICGDCNKVFARKGWRSSTGVDRKVWQCSERYKVKGVMGCVNRHVEEETLIKAYLMAWNALVENREDFMEQWTEQLQSENLLEGYRAEKFIEYTDGAEPLTEMDTDFMLKTLDHIKVFEDGTLLVVFLDGMEIECKNEEE

SEQ ID NO: 20530 - protein, 563 aa, synthetic construct
MKRAALLLRCSTNIQDYNRQKLELEKVANRFKLKVAKVFGEHVTGKDDIRKGNRKSVDELINACENNEIDVVLISEVSRLTRNFLYGVTLVDKFNRDYSIPIYFRDKRKWTIDVETGEVNLEFEKELRKAFEQAEEELASIRFRMASGKRDSAGLGQWFAGFPPFGYTRQKNGYLVKNEYAPIVKEMFDKYLEEGQALITTTRYIYGKYPDIKKLKSIGNTKFILNNKAYTGRAEANIYDEIDKVTDTFYFDIPAIIDEETYNKVQKKLANNRTTTPYPKAAKYLLQKLIKCSICGAFYTRLHSNKRDTVHFKCTSDKNSLTGCKSQVYLNERIVNPIIWNFVKEQLFYVGKMNAEQRLEAIAGENDNKSKAIEEQEALKISYKEQENKLTRLEDLYLDNDIDKNRYKERKSKIEKELSSIKAQMDRLTDRIRLSDFNIKRFNSTDFTEQYFKEVEADLEKQMKVLREYVKGIYPLYIDKVYCFLKVDTIEGMFNIFYEPRKAQQKCAYFIKDTLAQYHPDIRNFYTPNNTLLTDSDEVDAYYTLEEMKEICSRNGFEVRYRE

SEQ ID NO: 20531 - protein, 472 aa, synthetic construct
MPRSAVLYLRVSTSQQAGDERFGFDVQRQAAERYATQQGLRLTRTYQDVITGTKATRTQLNALLEDAGNYEAVLISSVDRLARRTGIAYAVLEELLDTGMEVHSADMGVIDPKDEMSALNFGVRSVFAQADHMRIVKRLREGMRAKVRRGKPVVPPSGYGWQAGEIFEEEAGWIRQMYAWAREGKTAHEIVTELNRLGIPRRGGARWSHSTVKYTLRNPLYKGVYQFGRARKGRGDGRDLVTCEVPAIVSPADWDATQRAIDARTRGGRPASRMDASEFGLAKRVKCGACGSTMSSATNQPREGHSRRNPYHFYYCYRIYRRDGYWGEPCPHRRYYGARKLHAQVREQLEQLQLDDLALAESTTYQPPEPVDLTPALAQIERKLTRAREAYLGDVLSLDEFAQEKRRLEEQRQALLEAQQEEASPRQLPLKEARAKIREALRKDSIAETAQDLGLSLTLYPDGRADLRIDPL

SEQ ID NO: 20532 - protein, 585 aa, synthetic construct
MLAIYTRLSVESESKSIDYQKREGIQFAKEMSLQYELYDEGAGVSGTNDITERPVLSKLISDISDTSKNISAVWMRSQDRLDRNSMVYFIFLDAVKKSNVLVYFGSKEQLDFNDPQTLLNTSILSAFNAYYAGASRKKIKRVLHDNAEKGKVWGIVPYGYRTDENQKLEIYEEESKVVELIFKLALKGWGGKRIATKLNLDKIPTRYHNYEGTLKTKNKYTKEVSRKSKKDIVWAAKTVTDMLQNKWYVGTRTYGEKTFACPIIINDIDFYKVQNLFKKRKNFRSFEGKHKYLLKGKLRCKCGRNLYGRYKKHGRENYYMCSSKREATMNCGSASINIPRLDSFIIQHLFESKNLINHLEEVLNNSDKLKTLNYELSEIISKISILSRKKNKYAKYLADELEGDETILDLYKKTKRELEIGIDTQMKIQAKIDDLSSKKGLNNYKEIKKKIKSNDLMNDFESLQEAIHQILDEIVIDSTIREDKSVFLKLSISYKNIDLEDKEKVLWVAERMNGKSIEKFEFIGKVNQVDDINDSIFNYLKQMSSMNENLVSHLKKEGLSNRYINKQKKFQTIYVDKKSLFHFNK

SEQ ID NO: 20533 - protein, 566 aa, synthetic construct
MTATPALRAAIYARYSTDKQKDTSVEDQIRLCRRMCEQNGWQVTEVFTDHALSGKNTLRPGYQSLIQAAECGQIDIIVAESQNRLSRDMADSATLLKRMSYFGVRLHTAAENELDDMKVGVSGLVSTMFLRDLAQKTRHGLEGRIARGKSAGGIAYGYRVKREILADGSVTTGDREIEPDEAAVITRIFRNYADGLSARSIAAALNAEAVPAPQSGKGTGVWNPSTISGNIKRGTGILNNELYIGWLVWNRLTYDTNPDTGKRLSRLNPPEDWKIEEVPQLRIVDDQLWHAVKTRQGEVRQAMNPAGVLTERPRLERARRPTYLLSGLLRCACCGASYTLINKTRYGCAGARNKGAAVCTNRATIGRAEVEERVLSGLKQRLLAPDLLAQFAEEYRKAFNDAAAGACQDRQKAERSLKKVESRIANILTAIEDGMYTASMKDKMSELEREKARLEAVIADNPEPPALRLHPSLSARYRELIEDLASALNATEVRREATASLRALISEVRMVPDADAPGGHQLELVGELAGLMALGSPESKKPPLFAGAWSETMVAGAGFEPATFRL

SEQ ID NO: 20534 - protein, 520 aa, synthetic construct
MKKITKIEANQKEESTLRVAAYARVSTDEDAQLVSLKTQKAHYEKIISENKSYTFAGLYFDEGITGTKKECRDGLLKMLKDCEDGKIDFILTKSISRLARNTTDCLEIVRRLLDLNIGIYFEKENIDTRTMESELMLSILSSLAESESRSISENNKWSIKKRFQNGTFIISSPPYGYENIDGKMVVNDEEGKIIKEIFEEYLSGKGTHKIAEDLNKRKIKGQRGASWHGSTINGILKNEKYTGDVIYQKTYTDDSYKRHKNDGEEDQYKIIDNHEAIVSREEFEKVQELIRLRAIAKGNGEDTKRYQNRYSLSGKIKCGECGSTFKRRHHYNGKDKYIAWTCSEHLKDINKCSMKFIKDKDIRLAFVTLVNKLIFGKDSILTPLLESLKRVDSTEEVEKINKIEESLEQLKERKEVLNKLITSGVLDASIYAKESSEISGEENYLLKEKERSKKAILGNDEEIRELEKLIGILGKSEMIDHFEDDLLEEIIDHIQVVNRETLDFHLKCGLVLREEVKEDV

SEQ ID NO: 20535 - protein, 520 aa, synthetic construct
MMNSKVIVIPAKKKKGNSIKESEKKKLRVAAYARVSTDSDEQATSYDTQVDHYTNYIKKKPDWEFVGVFSDEGISGTYTKKRAGFNKMIEEAMKGNIDYIITKSISRFARNTLDCLKYIRKLKENNIPVYFEKENINTMDAKGEVLLTIMASLAQQESQSLSQNVKLGFQYRFQQGQVQVNHNRFLGYTKDEDGKLVIVPEEAKIVKRIYREYLEGASLRDIKVGLEKDKIINGAGNKKWHVSNLNQILTNEKYMGDALLQKTYTVDFLNKKRVKNDGIAPQYYVENSHEAIIPKEIFMRVGEEMYRRANMVSGKGKRRIYSSKYALSSIVYCSKCGDIYRRIAWNNRGKKYIVWRCCTRVTHGPDACHARTVKEEDLQESVVEAINQLISESSELKEIIKENIEKAITGDGSSRIETIDKEMLEVQEKLLKVANAKKDYTDLADRVEELRNEKEKLLLNMAEEKNEQSRLKELEEFLENQKLEIESYDEELVRRLIEKIVVYDEKLKVVFKSGLEVEIN

SEQ ID NO: 20536 - protein, 515 aa, synthetic construct
MPPQQRTIASGELIPAIGYIRVSMLMEEQISPEIQRAAITDWARRNGRRIVRWIEDLDATGRNFRRKIMKAIEGIESGDAREIIVWKFNRFGRNRTGNAVNLGRVNLAGGELQSATEDVDARTAVGRLTRGMLMEIASFESDRIGEQWAETHAYRVASGLPANGRPRFGYVLRGRQPDPLHAHRTLRAPDDGPERYEPDPITGPVLADLYRRYIAGTGGQKLAAYLNQTGLRTTRGNHWSDVAIRGMLDRGFGAGLLRIHDPNCECNQPANCSNMTLIKGAHQPVISEEEWQAYRRRRLRVAATPPRARASIYPLAASLRCGHCGSRMTPCAEGPEPAVRYLCSGYLRKRTCLARSARRSAIEAIVVRELAQWADDIAAEAPVANEPSQATIQPERAKLEAEVAAADAAMDALTLKMAKGIIPEDSYIRARDVLLTERAVAAAALEEDDRPAPLQRHEYVPVIRTVVEEWLTLRPEARREMVADLLPEILIFRESRRSAWVTLRAAWGEERTFPI

SEQ ID NO: 20537 - protein, 521 aa, synthetic construct
MSRKNNLLNQKITALYCRISLDDGSQNESMSISNQKLMLKDYAEKNGMPRYGYYVDDGYTGRNFNRPSFKRLIADIEAGKVGCVITKDLSRLGRNYIEAGSYIEIFFPKHNVRYIAVTDGVDSLTRQEMDITPFKNILNDMYSRDISKKVLAGRMTRSRQGKFCGGQPPLGLMRDPEEKGHLILDPDTAPTIRKIYDLALNGWGCMRIAKQLMEDKIPITRVKSNTECDVNYYSWGGARISHILRNPFYKGAHLVCRTHQKGIRSNTYDIIPREEWEVLEGCHEAIVSPEDWEKVQELIDCRPPIMEGNACPFYNLFHGIIYCTTCGKSMQVRYEKVVRTGKNRFTGEEREPIDKAYYICQTYNRLGKDACTSHKVEARDLYNLVLKDIQELAAMALKDVESFYQRISSRMERRYLADASEMEKERERLEARNREIDDMFLNLYTDKAKGILSEQRFVKLTAAMEREQEENQKQLKELDEGILNRLISRILVGEVKKVDGEKFQEIKIIYNFVGEIPAVTE

SEQ ID NO: 20538 - protein, 543 aa, synthetic construct
MSRTTYRDTPKAGLYTRLSVDDGYVDRESNSITSQKQMLTQFAEYHGIEIVETYVDDGWSGTNFERPDFKRMIADIESGKINTVITKDLSRLGRDYLQTGYYTDMYFPSKRVRYIAISDGIDTSTGYNEMAPFKNLFNDFYARDISKKIRSTLTTKARAGIYHSTVPPFGYRKSPADSHMLLRDEETAPIVIKMYELSASGRGPAAIANYLRAEKIPIPAYWHHVRGERAWQGYKGEGNAANYRWFDTTVRSILQHEVYIGNLVAQRQTHIFKVGKSFVRPREEWVVVEDVFEPIVERELWERVQESFANPTRSRKRTGKASIFSGMVFCDTCNRRISFVPERAEKIYVGSCMEYRKIGRQGCTPHRIYEQDLHDAVLKDIREWAKLALKDEKAVLDKVMEHENKNKTDAGTVIEKKFSLEKRLGEVEKVIAKLYEDYALGKAGADEIDLLLPKYRKEQGELKAQLALFEEENSERRETAQNAEKWVALIRQYNDLQELTAGIIRELITKIYVGDVRKVDGEKVQSIEIHYRFIGSLSDGAGK

SEQ ID NO: 20539 - protein, 567 aa, synthetic construct
MQKKQIVRMLLRVSSNQQLEADGDLSVQRRLVMEYISKHSDWVLDEKEYFEGSKSGYKTAVSDRDTLQEAMKDAKKQEYDILVAYKDDRIGRRMWEIGAYVMTLKNYGVDIYTVKDGCISPEGDDIMGQMMLALRFGNAQKSSSDTGMRVKDTAQKLVQQGRFMGGCAPYGYELVLSGEISKHGRALHQLKVIPEQAEVVRHIYSLSLNKEFGSAKIAKVLNEDEYYKTMAPKDVWKSGTITSILTNPIYAGHVAYKRRERINGKYHRLDSDDWIKSVEPDGSLQIIDGDTWDRTQVKRRSRADKYIKTLENQGVKVMRRNGGMLSLIDVIYCGYCGRKLTNGTKYSYWTMKDTGERRASRTPVYRCQSAQLGIPHDKVTQFRADRVEKIVYDSIMEYIRNLQEKEDIFEVIEQSQSRERKILESEIRRLEKELKKIADGIETMEACIPQAISGTYALSIEELAAVIRKQKEKAEEQKQLVSQKRGAIREVALTMEEWMQLKAKIPTWQQVFQNADAETQRVLVNKLVGRIDVTDEQIVIRFKLNLNDFLPRISGGCGTIPYTHGSA

SEQ ID NO: 20540 - protein, 442 aa, synthetic construct
MRIRKVAIYARVSTEHEAQLSALENQVQYYDDLIDRHPDWVLYRRYIDEGITGTSISKRKNFVRMMEDAKDGHFDLIVTREVSRFARNTVDTLQQTRLLKRMGIEVYFTEDGIWTMNDEDGELRLTIMATLAQNESKKTSMRVKAGQMVSFQNGVVYGTGNVLGYDKVGPEYVINEEQAETVRRIFDLYLAGNGYHKIMKQLEKEGRRTAMGKTMWHYATVGHILKNRLYCGELEYRKEYVPDYLEQKRAKNKGELERVIVEGKHQPIVTKEEFERVQKMMAEKDAQMGQRRKNKGVHSDDLWRRKMRCQCGHAFAKTKWHTKTDFITYTYKCYDQTRTGTIAARLKNGLSIENVCRSPLVQDWKMYTMAQKVLHAVFDDPEGTLLNAAAVLGCGIAGVEQSEVLRDKEIIEEQLKKERGRYETLLDMRMNNEIPKEVFSRK

SEQ ID NO: 20541 - protein, 590 aa, synthetic construct
MAKIRKIEQTMPAIAPRKKVAAYARVSVESERMSHSLSAQVSYYSALIQRNPDWEYAGVYADYGISGTGTARREEFRKMVEDADAGKIDIILTKSIQRFARNTVDLLETVRHLKSIGVEVRFEKEGISSMSGDGELMLTILASFAQEESRSISDNVKWGTRKRMAEGIPNGRFRVYGYRWEGDALAIVPEEAAVVRRIFQNFLDGKSRLETEREFAAEGITTRDGCRWVDSNLKVVLTNITYTGSLLLQKEFIADPITKHRKKNRGELPQYYVEGTHPAIIDKDTFDYVQAEMERRRELGALANKSLNTCCFTGKIKCPHCGVSYMHNRRTDRGLMEFWNCGSKKKKKVGAGCPVGGTINHQNLMKACADVLGTEGFDEDVFLDRVDHIEVPEKYTLELFFKDGNRIIRDCPNTGHQDCWTAEYRAATSEKRRKYGTNPRGATCFTGRIKCAECGNNYRQQTRKRKNGEKYHMFSCATTNTCGNNSIHEDDLQRLSAAAMGLDAFDASAFSERIDHVVISKGGRIAFHFKDGGIHEAFYSTKRRAQPWTEERRKKQAKAIRDSFTGEPRQKMSESTKRLRKERGDGWRRE

SEQ ID NO: 20542 - protein, 524 aa, synthetic construct
MAKRVTTIPATVKKYTAEPLAGTKKRRVAGYARVSTDHEDQVTSYEAQVDYYTSYIQGRDDWEFAGIYTDEGISATSTKKREGFKTMIADAKAGKIDLIITKSVSRFARNTVDSLTTVRELKDRGIEIYFEKENIWTMDSKGELLITIMSSLAQEESRSISENVTWGQRKRFADGKVSFAYSRVLGLDKGPDGRIVVNPKEAETVRLIFSLLLEGLSPHSIAAELTRRGIKTPGGKDVWNQQTVRRMLSNEKYKGDALLQKEFTVDFLNKKTKKNEGEVPQYYVEGNHKAIINPTVFDMVQAELEKRKRGNSRYSGVSIFSNKIKCADCGGWFGSKVWHSTDKYRRVIYRCNSKYKDKKCGTPHVTEEEVKAAFLSAYDKLVSERAEIVANAETIRETLCRTDALEEEKRRLENDMAVLAGMVQSAIDENARIAQDQGEYQERYNGLVERYDTFKARYDEVARAITEKEAQNERLAGFIKILKAQDGVIAEFDERLWSSMVDFVTVGRNKEMTVTFRDGTEITA

SEQ ID NO: 20543 - protein, 565 aa, synthetic construct
MDFKNLAHNIIMEKRKKRIAIYCRVSTVEQAEEGYSIVEQERLLTEWCSKMDYIVTKCYSDRGISGKAINNRPALKELLKDAEEKKFDMVLVWKINRISRKLTHVLEIAETLEMNNIAFKSYSEEFDNSTPAGKMQFQMMALVGEFERGTIAQNVKMGMIAKSKAGEWCGGQVLGYDLVPLEKQQGAKRTKTVLTINEREAESVRFIFNEYASGKGYKAITNQLNKLGYKTKKGNNFSVGSIRDILTNPVYIGKIRYNVRQNWSEKRRRNINANPIITDGIHKAIIDEKLWDKVQAILESKKGKPSRIYDGEYPLTGILRCPKCGAGMVIMRTTNTLKDGSKRRIAYYACGNWKNKGIAICSSNSIRVDKANEYVFSKLSELLSNDKMVKTIVDNVNKERIRKVNPAKKDLSKIDNELEKLDKKRAKLFEAYEDEIITKEEFKLRKEELMKRFKTLEEEKAPLLVTLSDDVNEEVPYELVKSILENFSKVLTESSTREQQKKLLHMIISEITINELREIDSIKIKLDDNLINYLSNEEGVSIKGTPSSFMLRNVGIKTLNLDIAI

SEQ ID NO: 20544 - protein, 530 aa, synthetic construct
MYEDLSYTYGSGTYAIYLRKSRKDLDAEAMGEGETLSRHLDILKALAKRMELNVVKVYAEVVSGESIDARPQMQELLGDVETGIYDGVLVVEVERLARGDTSDQGRVAKTFKFSNTLIITPSKTYDPNNEFDEEYFEFGLFMSRREYKTIRRRLVAGSDASRREGKYTGNIPPYGYARKKLKKEKGWTLEIIPDQAQVVRMIFDWYRNGMQGIPVGYTAISDELNRLSIPSPSGTRWTPNGIQGILRNPVYAGYIKSGYRKEVKKIVDGKLTRSRPLNNDYTLYPGRHESIISQETWDAVHNRMLKRVLPSSSSRVKPQQNPLAGLVCCSQCGRIMQRRPYQSGRTATLICPTKGCSTVASDLSMVEQRLLDALDQWLVSGTLPDPDQLPDNNDRLDLLRQAVSSCSEDLSEADRQLQKQYDLLEKGIYDEVTFFERSAIMKKRKSELTTRLKDLQTELQTETERNEAVKNLLPTLQTIHDTYPKLTSAELKNRLLKEVIDHVEYSKSENGRWGHPDNFSLKIYPRVTPA

SEQ ID NO: 20545 - protein, 542 aa, synthetic construct
MAERVYCLYRVSTNKQVDHDENNQADIPMQRKACHDFAAKMGWVIVGEEQETGVSGYKVSADDRDKLQLIKKYAEQGKFDILLVFMFDRLGRKSDETPFVVEWFTKKGVRVWSVQEGEQRFESHTDRLTNYIRFWQADGESQKTSMRTKTALGQMVEEGRFRGGNAPYGYRLEKSGILNKRKHEVYMLVIDEDEARVVRMMFDLCISSGYGRWRLANFLNDHGIKNRKGQNWHDASVGGILHNPLYKGILRSGETYAGPFEALQIIAPDQFDLAQKLMLERTNERKERRTVPLNTTGQSLLSGNIFCGHCGGRLVLTTNGTTTRLADGTPVHKKRIRYVCYNKTRRRQECTGQTGYTMHILDGIVTEVLHQVFDKMQGASNDMIVGSAVQKQMAMIRSELQRARAENTKANKEYESLKAEVLKAIQGKSALPQDVLTEMLEGTRQKVLSTSERITTLTAELNDGNSKIEEMKAEFNRIVSWSKIFDESPMEVKKMICGYIIKKVSVFRDYRIKIEFNINVEQFLNGIDSIDECDTYELPMAQ

SEQ ID NO: 20546 - protein, 523 aa, synthetic construct
MRFFSYGRKSVFSDKSDSIDNQFRMNREYCESKFSGQVDSWQQFSDEDFTGANTSRPDLQRMLSFIKGGFCDVLVVYQLDRLSRNVQDFANIYALLEERGVMFISIKENIDTTTPIGRAMMYVTVVFAQMERETIAARVTDNMLGLAKKGYWTGGNPPVGYVRKHIVVNGKKHCSIEVDPDGARYVTQIFDTFLAYNCSLQGMETRFKNQGIRTQGGKFFSTTQLHKMLTMPYCVEATPEVYDFYAAKGCIMDPGSPREMWDGSAGVIIYGRSTEKNKKHQLQPPEKWTVCLGKHKPFMSAEKWLAVQSRFTQNKCIKDAKWPVPLLKGVLRCKCGNLMQVSRRKKVDGTCSSWYYCRKRMRQGVDACDMGQIKCDLLDEEVLELFRGIAADPALIQKFVKAEAPADVPDLKAAQARVAACERKIGRLAASLALAEDSAASKYIIAEMERLDVELGALKREASLAEMESHRAAASAKDAKATAAEIAKLIHGLDGFDDKEKNAIARAVIQECTWNGERLLITL

SEQ ID NO: 20547 - protein, 668 aa, synthetic construct
MAYAKAKKHLKIWTKKKAALYVRVSTRYQVDKDSLPFQRKKLKEYCKFLGLEDHVIFEDDGYSAKNTERPHFQEMMSRVRSGEFSHLIVWKVDRVSRNLLDFAAMYQELKDHKVTFISMNEQFDTSTAIGEAMLKIILIFAELERNMTSERVTGIMLDRAEQGLWNGARMPVGYRWNSETKFPEPDPEEVKIVQLIFDKYEEWKSSIKIARYLNNNNFKSKRGGQWTSKLIHDIIRNPFYIGTYRYNLRESGRGPLKPESEWIVRENNHPAIIDKAQFERCNKIMDQNGSSRDTSDLRARKYVHTFSGHLVCGKCGANMIASKDRARANGWQPSMYRCAQRSRMLDCDNSRTINESYIGPFIFNYIANLARVQKNFKNIATPEKLERELLKGETFDGVAGILPEGLNLTFQALSFRQVGNGTYIPDIDFLGDSDGASDRDQIELLKSEIEKSKNAVTRLTDVYLFDPDSMTKEEFATKKKGLAKKIEGMERQLADLLDDSGNDDLADMSFIKKASAFLVAQRIVSKSFVDYVGMAQELDNEILKDFIDQIVDQIVVLDGRVQSITFINGLKHEFRYTAPAELPVCKKCGGRIGSTCGCRTRTFDFSGKRYQRIKVGDPRDALHGKKNPVCPECFAQEGRWHHWNCKIEACPICGERLAECEHGPNGKN

SEQ ID NO: 20548 - protein, 518 aa, synthetic construct
MVAIYVRQSLDKKDSLSIESQINDCITLCKRNGWDDYQVYKDKGWSAKNLDRPEFQKMNNDVEAGKIKAVVCYKIDRISRSIRDLVNLIEDYHELGVHFVSFADNINTAAPGGLMMATLFGSLAQMEREAIIARVTDNYYYRCELGYWGGGPAPYGFNLKKIVENGQKHTVLEINEREAAVVKQFFKWYLEPDGTIYEILKKADKAGITTRKGGAWTSRVISELLSKPMYAPNSMDIYNFYAAQGVRVRVTPEQCDGKLSLNVFGRRDRGSKHPKRSRPVNEMTLAICKNPPIIDSDTFLKTQFKKKAKLQVSPRTGTAKTTMLSGLVKCAVCGRAMSPSGSSRGVRYFTCSGKRNYAAGTCTSKSIKVSALEKIVIDDILRYATNPKVIDMFHAMQGSKLTAEQSHEVNLLQQEAAKLDIEIDNLLDACSAGNTTAIEYLNKRIEKIDTRKHEILTRINEIKRDTENVINLFSGIEIENVPYILAHGSIDEKKNVCQFLLSSVLFTNADDVKVYYKM

SEQ ID NO: 20549 - protein, 545 aa, synthetic construct
MPRKSRRAKATLPLAATHLRIAIYTRRSTDEENQPFTIEAQDTKLDAYTTSQDGWSIIAKFSDDASGASLDRPGLQRALAAARAGKFDVLLVYRVDRFSRRISDLVMLLDELDQAGVVFRSATEPFDTSTAAGRMLVQMLGVFAEFEREMIIDRVINGMERKAAKGEWTVGVAPIGYAVNPATKHLQIIGDEAPTIETLFDLYTVRRKGSRGVAAELNQRGLLRRGGRRWSYKTVIDALTNPAYIGSVAFRDILAEDAHPPITDRATFALAQEILTERGEHPAKSAGAATDYHLTGKIRCPRCGQAYLGTSATGKLKKRYRYYTCFTRNRYGTAHCNAPRIQADVLDQTVLQTLGSFYRDRTDLIMQAVTAAHDRHRAGNAALEAELRTVKAQLTQKETVIDRYFTDYEDGKIDRSLLETRIAKLSDDLTQLRRRHDRLQIRLDNLPEPVTTDQLDTLGTDITRIITHGTDPERKQLCELLIEEIKINTEAVTATPVFRVNPGATEALNATSAPPRNLDGAQKPSSRGVRERRPLVGRLGLEPRT

SEQ ID NO: 20550 - protein, 465 aa, synthetic construct
MPEKILRCAIYIRVSTFEQSVHGKSLQAQKEYLEHYAKEHNMSVVGVYADEGKTARKELKKRKAIHALIEDVTQEKIDVILFWRLDRWFRSLADFYKVQDVLDEYGVRWISASEPGINMETRDGRLQLNVVLSFGQNEVDTTSERIKFVNEASIKNGRLIFGEANMPFGYKSGVVDGKKCMIKDPETERMVIDFFRHYKKHQGKQDALKYMQRTYGIYFSYGMLKTMLSSEFYKGTYRGYPYCPAYLTEKEWNEIQEISVRNVKRAPSGRVYLFTSLMRCPSCGQKLVGTGCSSISNRKTGKKRTYCYYRCNKALADHLCPNRHRVSQNLIEQYLLENLSSEYEKYKIRSNKINEEKKKVRKAKNPAQLSKEMERLNLLFQKGRISFDYYDEEYQRLEEELAFAASDPSLEEPKRNYSELEKLLRTDFKEMYDSLSLENRRAFWRSIIKQIHLNDDCTIKEVDFL

SEQ ID NO: 20551 - protein, 549 aa, synthetic construct
MKVALYARYSSDNQRDASIADQFRMCRLYAEKQGWQIVEEYSDHAISGASLLRPGIQALISDAAHGRFNVILAEAMDRLSRDQEDIAGIFKRMSYADVKLVTLSEGEVTHLHVGLKGTMNALFLKDLADKTRRGLRGRVESGKSGGGLCYGYNVVRTADPDERGHREINTAEASTIQRIFKDYLEGKSSRTIAMTLNREGVPGPQGKEWGPSTIHGNPKRGTGILNNELYIGKLVWNRLRYMKDPDTGKRVSRPNPESEWVIQEVPELAFIDRSLWDAVKARQASLAFDKSEKSSNPMNNRRRPKHLFGGLIKCGCCGGGYSMISKDLMGCSTARNKGTCDNRVNIRRDALEASILNGLRKHLMEPELFKEFCAEFTKEVNRLRMERGADLEVWKSELERTDRELDKMVDAILQGFPPAKLKDKAEKLEARKAELTELLANADEPPPLLHPNMAQIYQDRIRQLYENLQREEERAQAAEVFRSLVDQVTLIPEDGELAIVLRGDLGAILRFAAGKKNPDFLSEAEALDNLLSQGSLVAGAGFEPATFRL

SEQ ID NO: 20552 - protein, 541 aa, synthetic construct
MTRVALYARYSSDNQREASIEDQLRLCREVAAREKWTVVGTYADAAISGASIIRRPDIQRLLTDAQSGQFEIVLAEALDRLSRDQEDVAGLFKRLRFAGVRIVTLSEGAVDELHVGLKGTMNALFLRDLAAKIRRGQSGRILNGYNAGGLSYGYRVVKKLDERGEPIRGLREIDEDQAAVVRRVFREFAAGQSARTIAASLNKEGIPSPFGGAWGASTINGNLKRRSGFLYNEAYIGLLVFNRLQMRKDPETGKRISRPNPPETWQVVEVPHLRIIDDELWDAVQVRKKLYGGMKLHHRRRPKHMFSGLVRCGCCGASYTVKNRDQLACAAHREKGTCANNRTIRVGELEKRVLEGIQRRLLAPDAIARFLAEYHAEHKRLNAMNRERQREVERRHAGIDRQIGNIVDAIADGVATTSMKSKLLDLEREKENLARELQAMAAAESIVEFHPAAVTVYRRQVSELQDALQSDERERHEAARIIRSLVTGIDIIPTEGRGRVELKVRGALAELLNLPNRKPGTAPSAAVMVAGEGLEPPTPGL

SEQ ID NO: 20553 - protein, 520 aa, synthetic construct
MTEKNIMVIPARKRVGSTAAKEKIKKLRVAAYCRVSTETEEQNSSYEVQVAHYIEFIKKNNEWEFAGIFADDGISGTNTKKRDEFNRMIAECMDGNIDMVITKSISRFARNTLDCLQYIRQLKDKNISVYFEKENINTMDAKGEVLLTIMASLAQQESQSLSQNVKLGLQYRYQQGKVQVNHKRFMGYTKDEDGNLIIVPEEAEIIKRIYREYLEGQSLVGIGRALEKDGILTAAGKPKWRPESVKKILQNEKYIGDALLQKTVTVDFLTKKRVKNEGHVPQYYVENSHEAIIPKELYLQVQEEIHRRSNIYTGAGKNKRIYSSKYALSAITFCGDCGDIYRRTYWNIHGRKEFVWRCVTRIEQGPEVCKNRTVKEDELYGAVMTAINKLLAGGNNMIKTLEENIHAVIGETTEYQISEINNLLEEKQKELIKLANKGQDYEHLADEIDELRDKRQTLLVEDASLSGENERINELITFIRKNKLRSLEYDDRLVRKIIENVTVYEDHFIISFKSGIEMEI

SEQ ID NO: 20554 - protein, 520 aa, synthetic construct
MKKITKIDELPQGQLPNTKLRVAAYARVSTDSDEQLESLKAQREHYERYIKSNPEWEFAGLYYDEGISGTKMEKRTELLRMIRDCKQGRIDFIITKSISRFARNTVDCLELVRKLIDIDVYIYFEKENLNTGDMESELMLSILSGFAAEESASISQNSTWSIQKRFQNGSYVGTPPYGYTNTDGEMVIVPEEAEIIKRIFAECLSGKGGGTIARGLNKDKIPARRGNHWSAGTVIDMLRNEKYMGDVLLQKTYTDSNYNRHSNTGEKDQYYYKDNHEPIISREDFAKAQDLIDERAKMKCKGVKKNVYLNRYALSGKIVCGECGRNFRRKTNYSAGRSYIAWSCIGHIEDKESCSMLFLRDGEIKATLTTMMNKLAFSHKLILEPLFKSISQIDEESDRERMDAIDKRMEQLMEERNTLITLMAKGFLEPALFNQERNVIDSEIKNLTTEKTNLVTNSTSGVLRANDIKDLIDYVSADNFNGDYTEELFEEFVENIIVNSRDELTFNLKCGLSLKEKVVR

SEQ ID NO: 20555 - protein, 550 aa, synthetic construct
MSRKKQVNQKITALYCRISLDDGSDNESMSISNQKLMLRDFAEKNGMFQYEYYVDDGYTGRNFNRPSFQRMIADIEAGKIGCVITKDLSRLGRNYIEAGSYIEIFFPKHNVRYIAITDGVDSLTRQEMDITPFKNILNDMYSRDISKKVLAGRMTRSRQGKFCGGQPPLGLMRDPDDRGHLILDPETAPVIRKIYDMALDGWGCMRIAKQLMDDKVPITRVKSNTECDVNYYAWGGARISHILRNPFYKGAHLVCRTHQKGIRSNTYDIIPREDWEIIEDCHEAIVSPEEWEQVQSIIDRRPTIMKGNSCPFYNLFHGIIYCATCGKSMQVRYEKVGRTGKNRFTGEMREPIDKAYYICQTYNRLGKNACTSHKIEARDLYDLVLKDIQELAAQALKDADAFYQRLSSRMERRYLIDASQTQKERQRLEARNQEIDGMFLSLYTDKAKGILTEQRFMKLTAALEQEQEANQKRLQDLMLMMRHSDEQESEVRTFIREIRRYAAIEELDEAVLNRLISKILVGEVKKIDGQKVQEVRIIYNFVGEIPEITE

SEQ ID NO: 20556 - protein, 510 aa, synthetic construct
MPQDSNGIAYSYVRFSSKKQASGDSLRRQTEMAEEYASRHMLRLSSKNFQDLGISAFREGKRPSLADMLTAIDEGQITAGSTIIIEALDRLSRRGIDVTLETVKEILRKDVQIVSLSDGLVLTKSSLNELQSVIRIALAADLAYKESERKAQRLRETKGQQRQDALNGIPINKILPFWLKRTETGYTFSDKVETARQIVTLKQEGKGSNMIAKFLNKRGIAGIRTAQWNHASITKMLKNPALYGAYQTGETNKEREMIQLEIVEGYYPALISKDEWLLLQSDQSKSTRGRRSTDNPYSGLLRCGCGGALIKRKSTIRGKLYVYHGCLNAKDGRCSQNLSIKGLDDALATMLGRLEFKKAVTSDRSAYLERQQLENRIANLNKTLQEVDHVPASVIQTIITMEARIKEITQQIETGEREQRGIDAVNNAKLSSITDSLELNLMLKRVLKSITVTRCGLGWAVRVFHLSGHSQSFLLVNGQLKLVSDSIALKRLLAEYMEDDKTSSYEPIYD

SEQ ID NO: 20557 - protein, 548 aa, synthetic construct
MIQTNSNHFSFKAAIYCRLSKDDEQKGESASIQNQKELLENYVKSKGWSIYDVYIDDGYTGLNTNRPSFQRLIRDVENKEVDIVITKDLSRLGRNYLQTGYYTENFFPKNNVRYIALNDGVDTFQENNEIVPFKNVLNEFYSRDVSKKMKSAYMTRARQGKFIGCLAPIGYRKDDEDPHKLVIDDETSWIVEKIFELAFSGYGVQAIRRRLFEEKIPTPTWWNRKKGLRNKKTKLEMTVDGGEYWWDCTTLKEIIENPVYIGHIASQKVNYKFKVGWLSDKPKEEWIIVENTHEPIISEDIYNIANEKLKSRRRPFKNGEESIFAGIVKCPDCGKSLNLGRNKSKKREKLLTCNTYRRYGKSLCSQHRIYYDTLYEIVLKDIRKNAEIALKDEKEIIKALEKSREIDNEEEQKFIMDKIYEDQIRVEDLTKKIERLYDDWLDNKISESNFQKILEKSQKEQDYLNQRIEDNQKLIVKEDLEDINVKKWIELIKKHRDIKKLDKETLNELISKIYVHEKEVVNGEITQTIDIYYNFIGNTDTLQVFYNL

SEQ ID NO: 20558 - protein, 506 aa, synthetic construct
MRHVITYLRYSSAIQGAEGADSTRRQNDLFKQWLKKNSDAQVVASFSDEGLSGYKGKHLTGQFGDMLARIEAGEFPASTILLVESIDRIGRLEHLETEALMNRILGNGIEIHTLQDGLIYTKDALADDLGISIIQRVKAYIAHQESKQKSFRVSQKWEQRAKLALAGEQRLTKMVPGWIDPDTFKCNEHAETVRLIFKLLLDGESLHNIARHLQANNISSFSRRKDANGFSVHSVRTILRSETTIGTLPASQRNDRPAIPNYYEAAIDVSTFNKAQEILDKNRKGRTPASDNPLTINIFKGLFRCQCGASVHPTGTKNKYQGVYRCNNHLDGRCDVQPLKRKPFDRWMIDNFLGMIDVGNDGESERKIAALQHEVEIVTARIKKATALLLEMDDIDELKIQLKELNQKRTELQTTIDNMRRKASLTDKELPQLKDIDLTTKAGRVECQLILSKHLKGLTLGKDTVTVTLQNDTEITIPTDPLPLNDGTSIFEIAEKNLLNIDTFQL

SEQ ID NO: 20559 - protein, 507 aa, synthetic construct
MKRVISYIRFSSEKQAKGDSLRRQSKMVTDWLKAHPEYYLDQDLSFRDLGVSGFTGKHLKGGLGDFLTAIEKGLVKAGDTLLIESLDRLSRQDIDIASELLRRILRAGVDIVTLSDGEHYTRESLKDPLSLIKSILIMQRAHEESLRKAERIQAAWDAKKEAAKAGIKVSKRCPAWLRLNDDRKSFSVIPEKVETVKRCFQLRLEGKSIWEIVRTLNAEGHRSMNQYKPGKFGQTSVQDLLKNRSVIGYFTPKGCEEISGYYPAIIDETTFYKVQQLSHSRYGKRSVSDKPLSVNLFKGVIRCSECGHALIITGFSDTRNGIYRCPLRNENRCNAKGLSRKQTDGTLLALLSRLDRFDSDMTNVIDALKLHREHISNNIEKLVQLSLEIEDLSAITIKLKQLKGELSQVDADIEKETQRLKSIDVGCLSDCDLTTKAGRIEAQLIIKSAVKEVVLNAAKRRCKVTFHNGKSIDLPITENPSEDVTEAIQSLSEVTERGLIDVDVVAI

SEQ ID NO: 20560 - protein, 638 aa, synthetic construct
MKPKLYSYVRFSSVKQREGNSLERQQDTALKIAARYNLELDTTAFHDLGMSAFKGKNAHEGKLSEFIKQIGAKVPVGSWLVVENLDRISRDDAWSALDIFKNILSKGIVVVTGMDEKVYKYADVKNNPTDLIISLLMFTRAHDESLTKKNRVEAQARSLIRHNLTREPGTPAKAIESVGQNVWWVDTKSGYVTPHPIYFTAAQKIIELKQNGETLIGIQRYLNEHYPAPKKRVYKDQTGQVLTPKTELWGKHLIRTFLNPTIHGQKTFTLDKRDESGAIIYDFESDEPLKETFIIPDYYPALMSEVDYLTLSKLDRHRAITRSSSKYPAGNPEPEIPLLSGLGILFCGKCGSFMFKSGSSENKYRYICGSKIVQGKPCGKKGFTSYQLEHTVLQLIADHVWNNHQEDKTAWYESEIKQTSEVIDKLLKLATLTDSLEELAEQINSNKHKKVALEREFQQYKINRSEIQTTGWEQFRHFDVHDTKNPNRKRIRLKVKQAIKRIDCHDIDERHGYFEVTFADGKKQRIVIKFNRNRSPGVSYVEAQTVNDHDLLKMQGLVLHSFIDALISPEKFTQHIKDKHEVSILNPTFITELEDGTNQDKGNGMAIRVNNSTSKSYATVNGIKYEINSLEDLEKLSR

SEQ ID NO: 20561 - protein, 507 aa, synthetic construct
MKRVISYIRFSSERQAKGDSLRRQSKMVNDWLKAHPEYYLDQDLSFRDLGVSGFTGKHLKGGLGDFLTAIEKGLVKAGDTLLIESLDRLSRQDVGQASELLRNILRSGVDVVTLSDGEHYTRESLKDPLALIKSILIMQRSHEESLRKSERIQAAWDAKKEAAKAGIKVSKRCPAWLKLNDDRKSFSVIPEKVETVKRCFQLRLEGKSIWEIVRTLNDEGHQTLNQYKAGKFGQTSVQDLLKNRSVIGYFTPKGCEEIAGYFPPIIPETDFYKVQQLSYSRYGRKPASDKPLSVNLFKGVIRCSECGHALIITGFSDTRSGIYRCPLRNENRCSAKGLSRKQTDGTLLALLSRLDRFDSDTTNTIDTLKLHREHISSNIEKLVQLSLEIEDLNAITNKLKQLKNELSQVDADIEKETQRLKSIDVGCLSDCDLSTKAGRIEAQLIIRSAVKEVVLNTAKRRCKVTFHNGKVIDLPITENPSEDVTEAIQSLSEVTERGLIDVDEVII

SEQ ID NO: 20562 - protein, 547 aa, synthetic construct
MKLLVTYIRWSTREQDSGDSLRRQTNLIDAFYAKHKDDYYLLPAHRYVDKGKSGFHQQHKAQGSDFRRMFENVMSGVIPEGSLIVVENFDRFSRADIDTAIDDVRQILRKGVSILTLGDGELYDKSALTDPVKLIKHIIIAERAHQESLVKQKRIAQVWNHKTQLARELNKPMGKQAPGWLELSEDGSHYIVDEDKASLVNIIYDKRLSGMSMFAICKWLNEQGYPTINQRKVRISKTKKPDGNWSALSVKHILTSRSVLGYLPAKISTEDRKTVLREEIESFYPQIVTDSKFYAVQQLLEETGKGKTSSGEHWLYVNILKGLIRCKCGLVMTPTGIRKPVYQGTYRCNGNKESRCSYGTVSRKLLDTQLCSRLFSKLSQLHDEATDTAKLDELQRRLNTVDSELEKLTETLIQLPNITQIQEALRVKQEEKDELIVQLSREKARVKSVSSLDLSGLDMESVEGRTEAQIIIKRLVKEIVVSGNEKLVDIYLHNGNMIRGFPLDGKDDHTLTLEEATDEMQSLDDMLIFGEPVTRIYPAGDMEEVDA

SEQ ID NO: 20563 - protein, 507 aa, synthetic construct
MKRVISYIRFSSEKQSRGDSLRRQSKMVTDWLKAHPEYYLDQDLSFRDLGVSGFTGKHLKGGLGDFLTAIEKGLVKAGDTLLIESLDRLSRQAVDQASELLRNILRSGVDVVTLSDGEHYTRESLKDPLALIKSILIMQRAHEESLRKAERIQAAWDAKKEAAKAGIKISKRCPAWLKLNDDRKSFSVIPEKVETVKRCFQLRLEGKSIWEIVRTLNAEGHQTLNQYKAGKFGQTSVQDLLKNRSVIGYFTPKGCEEISGYYPAIIDETTFYKVQQLSHYRYGRKPVSDKPMAVNLFKGVIRCSECGHALIITGFSDTRSGIYRCPLRNENRCSAKGLSRKQTDGTLLTLLSRLDRFDSDTTNIIDTLKLHREHISSNIEKLVQLSLEIEDLSAITSKLKQLKNELSQVDADIEKETQRLKSIDVGCLSDCDLTTKAGRIEAQLIIKSAVKEVVLNTAKRRCKVTFHNGKAITLPITETPSEDVTEAIQSLSEVTERGLIDVDEVII

SEQ ID NO: 20564 - protein, 560 aa, synthetic construct
MKTKLYSYIRFSSMKQADGSSFERQKRTAKEIAAKYDLELVTSYQDFGVSAFKGANSKTGALSRFLDEIGRSVPVGSWLVVENLDRISRQSIIEAQELFLSIIRRGITIVTGMDGRVYSRESVNANPIDLLLSVMLFARANEESQTKRNRTNSSALIKIKSHQENPQNPAVAIEEVGKNMWWTDTTSGYVCPDPVYFPIVKEIVELRKNGRSTSEILNYLNDTYTPPPAVSNKKHSKWPRAMIGRLFHTRALIGIKEVSVDGVKYELKDYYPRVIDDDATFYHLKKNIGARAWNFGDKEEVKPIPLLSGIGLLKCEHCSSAMIKVKGTNKRADQYRYSCEGIRSHRFDCEHPNWSFRGDQLEKAVLQLLADKIWIAEDKANPVPALKVQIDEISRKIDNLIALSAMTGATKELADQITTLNSERETLYNQIKMAEEEMYSVDSQGWEKLAEFDLEDVYNEERIKVRFKIKQALRRIGCRRIDRNKNLFVLEYVDGKTQRVVIENSRGTRKGRIFIDLKTINDRQILESNGLVLHPCLDMLTDKNWKPEEEIPGPLQEFGI

SEQ ID NO: 20565 - protein, 507 aa, synthetic construct
MKRVISYIRFSSEKQAKGDSLRRQSKMVTDWLKAHPEYYLDQDLSFRDLGVSGFTGKHLKGGLGDFLTAIEKGLVKAGDTLLIESLDRLSLQAVDRASELLRNILRSGVDVVTLSDGEHYTKESLRDPLSLIKSILIMQRAHEESLRKAERIQAAWDAKKEAAKAGIKVSKRCPAWLKLNDDRKSFSVIPEKVETVKRCFQLRLEGKSIWEIVRTLNAEGHRSMNQYKPGKFGQTSVQDLLKNRSVIGYFTPKGCEEIAGYYPSVIDETTFYKVQQLSHSRYGRKPASDKPLSVNLFKGVIRCSECGHALIITGFSNTRNGIYRCPLRNENRCSAKGLSRKQTDGTLLTLLSRLDRFDSDTTNTIDTLKLHREHISNNIEKLVQLSLEIEDLSAITSKLKQLKGELSQVDADIEKETQRLKSIDTGSLSDCDLTTKAGRIEAQLIIKSAVKEVVLNTAKRRCKVTFHNGRAITLPITENPSEDVTEAIQSLSEVTERGLIDVDEVII

SEQ ID NO: 20566 - protein, 506 aa, synthetic construct
MRTVITYLRFSSAIQGAEGADSTRRQNDLFKQWLKKNSDAQVVASFSDEGLSGYKGKHLTGQFGDMLARIESGEFPEGTILLVEAIDRIGRLEHLETEALMNRIIAHGIEIHTLQDGLIYTRDALSDDLGISIIQRVKSYLAHQESKQKSFRVSEKWKQRAKLALAGKQRLTKMVPGWIDPDTLKLNEHAETVRLIFKLLLSGESLHNIARHLQANNISSFSRRKDANGFSVHSVRTVLRSESVIGTLPASQRNDRPAIPNYYEAAIDAATFNKAQEILDKNRKGRTPASDNPLTINIFKGLFRCQCGASVHPTGTKNKYAGVYRCNNHLDGRCDVPPLKRKPFDKWMIDNFLGMIDVGNDGEAEGKIASLQHEVEIVTTRIKKATALLLEMDDITELKTQVKELNQKRTELQTTIDSMRRKTSLSDKGLPQLKDIDLMTKEGRVECQLILSKHLKGLTLGKDSVTVTLQNDTEITIPTNPLPLNDGTSIFEIADKELLDIDAFRL

SEQ ID NO: 20567 - protein, 496 aa, synthetic construct
MITYAYSYVRFSSKQQSTGASLKRQIEASEAFCRENNLTLAPLSFHDLGISAYKSKARASLTELLEAVNTGRISAGSYVLIEAIDRLSRKGFDDTHSMLRSILLKGVNVAFVGTDAKSLAGTILTRDSLNDTMAIIQVAISADLAHKESQRKSKLVRDAKKRAKEKVSNGEIAKRRLPFWLTLDGDKYVLNGRVDVVREIINMRQSGYGKHKIAQTLNAKGSKTALNKQWSSQTIKYLLAHPALYGAHQLTERIEDSVINAELVENVYPAVMSKKDFFLIQFDEKRVTSGRTSSNFPFKGVVRCICGSTIVYGPRKMNNKIYHYYFCAASKDGKCTQTKLIPNLSSVLKKVIDKITIQSVVRNQSDVIKQEIQQKKDKMAGIHAKLLEMNDPPLSLFELIRNMEKEIESLSAQLKDESFRSAGATNADVTKLKDISDPVEYNMQVKRIVDVITVYRPNDKQGWLRVKIKKIDGNFQSFIIVDENIRLFSDTEAIKS

SEQ ID NO: 20568 - protein, 503 aa, synthetic construct
MIEAFSYVRFSTKSQATGTSLERQLNASRLFCTQHGLRLSNQSYHDLGISGFKNVRRPELEQMFEAIQTGVIPAGSFILIEAIDRLSRKGISHTQDILKKILQHDIKVAFVGEDAKTLQGQVLKKDSLNDLSSVIMVALAADLAHKESLRKSKLVRESKAIAREKAQNGVILPGKSMFWLDYDKEQRHYVLNDRATIAKEIIELRLLGHGPRKIAKILNERQIPGPTGKEWYQPTIKRIITSPVLYGAYQSHQVIEGKYIPVALVENYYPALIDYNLFSQIQFDNKHASKGRPSRVNPFGGVFYCECGNAICFKKSYSKTAKEDKNEYHYHYCIAAREGRCKNTKAIPNFTPILINLLDKLEIKSTSTKNIRTESIISKRNKIEQLNEMLLKLDSPPVSVLKTISNLEKELQTLLEQPEITAPKQEDIVVLSTIKDPLKYNMHLKRLVKRITVYQINGPKSLRIKVDKTDGHYQNFLIQNGKTIFKSDTERLKKLLAGFKDGF

SEQ ID NO: 20569 - protein, 582 aa, synthetic construct
MTQPQRVALYARFSTDKQRDASIEDQLDSCREHALRMGWQIAGEYSDKAVSGASMFRTGIKALLRDAKAGEFDIVLSEALDRLSRKLADIAGFHDDLEFGKIELHTLTEGKIDKMLIGMKGTMNEIQLRDIALKTRRGQKGRIKAGKNAGGKSYGYKVLAPVEANGKEERGDLEIAPLEAAVVVRIFEDYAVKGLSPKKIAEALNLEGIPAPRGRHWSASTLHGNRERGTGILNNPLYAGVRVWNRLNYAKDPDTGKRVSRQNPEEIVERIDVPHLRIVDEALWEAARTRQGALKSTGTDVPIWDRRRPKYLFSGLMVCGCCGSGFAKVGKDGFGCSGARNKGRAVCTNMTVIKKDDIEGRVLHALEHHLMDDEAVRVFCEEYAAERNRLEKAADTFRATREAELRQVKRDHDKLVDALLEGIPAARVKSKMEALAARQAELEALLTASPAPSVVRFHPSMAGTYRKRIRELIAALTEPAHASEAKDALRGLIEKIVLHPVPSTTAKGGFELVADLHGSLAGLLRLATGQPVHVVTRVATGTGAAEMQLVSNGTASRSQAIDIMEELVLVAGAGFEPAAFRL

SEQ ID NO: 20570 - protein, 666 aa, synthetic construct
MAVLKKRAIKDGYEVTDELIFQEQISGLDAKKPIRKSLQDLMDAVEEHKVDVCYTFELTRISRDPYNLVERVKWFTDRKIPMYIYDAEMWTLDRETKEELEETTSYVFGAATYGKVEIRKMKERTMRGRNEVAKEGMYVGHLSDGYCVVKTERGKEIRVDEDREEVIHKIFDLYTQGNTIDRIAEYLNTNNIPSANSYRLNSPKFKGYQETYRRKGSVVPIKRVGIKWQGSTISNYLHNKWYMGERTYNKQTYYIEPIISTEQWRVVSAMLERNAISFRSKKESTKHPYLLSGLLFCGNCGRRMYGHFTGLNNHYYCSSVEEGVKCGLRGVSKENIEAAVALVVKQKGGLDVVEGKEGVVSNFFKVSPKEEKRLKEEIKTNNKLIAEYEKKSDELDKNYAEAVKQTVKHADDKNRVAVYESMIAEIEDEKINLNNKKYRLTQQNILNTKKLNVGSNADKILTKLMDERNLSTLRELFVTVIEKVHVFNLTPSINVIIINFVDGTKECFLYSYRLMKQKIKIFTRSLFYYDMRDNVLRYKDSSVIVDAKELIKTDPLLIPFERLEELTDKAKEQDAKYKEWRKKYNTGLPTTVPYVVKDETYKEISLKKKHLYNRKYKIKKHKKLTSEEKKQMLAEIDKELAFLSAKVKYLNREEAVKEYRKQKGNR

SEQ ID NO: 20571 - protein, 539 aa, synthetic construct
MHGRRAAIYARYSTELQDGRSIDDQVALCREHAARSGLTVVATYDDRAKTSASIFGRDGLARMMEQARARQFDVVIVEALDRLSRDQEDLAHIHKRLSFARIDILTVHEGVADSVSVGLRGLMGTMFLEALKAKTRRGLAGVIRDGRHAGGQTYGYRGVPGEPGKREIVAHEAEIVREIFAAYVEGKSPRTIAGELNARGIAAPRGPKWNASTLNGNPQRGYGILRNPMYDGRLVWNRVTMVRDPDTGRRVNRENPLDARQEVEAEHLRIVPRPLFEAAVRRHAQQAEAVRTGKITKAPPRPFSGLIRCACCGGGMSIHDRCGEAIRIRCSTANESGSCENKARYRLEKIEEAIFHRLRAQLDRPDYLKEFVRVYAEERRRLTETARRDRARLERAAADSRVRYMRLVDMMARGLIEGEEADAQVLQAKQAAEIARSELEIASSEDNVVELHPQATAAYTRAIADLSAALQRGDGTFDATSVEALRRIITEITVHPKDETGDVLVEVRGNMERLLGIDQQIVGGPMVARGGLEPPTPRL

SEQ ID NO: 20572 - protein, 510 aa, synthetic construct
MKRAVAYCRFSSSNQREESIDAQVRAIKEYCDKNKLKLLKIYKDEAISGTSTKDREMFLEMILDCKKNLFDCVIVHKYDRFARNRYDHALYEKILNDNNVKLISVLEQLVDDSPESVILKSVLAGMNEYYSKNLSREVKKGKKENALKAIHNGGIPPLGYDLDANKKYIVNKKEAEAVKLIFELALDGVGYVSIADILNKRGYKNKRGKEFKKISIRDTLLNIKYIGTYYYGLKDGHGRLQKEPIIIENSHEAIIDKDIFYKVQSKMKKNLKGPRNRNGQLYFLTGYCVCGECGGPFSGGYRSVNRNGSVSYGYYCQKKKRKETKCNNKAIRKELLETFIFDIIKKEIFNDEKIEKIIKDIISFSENKKLIREEEIKEYTKEIEKLQKLTLKLLEKNLEGNILDEIFNIKNNELKEKIQVLREKIYSVKNITKINEEELRKYLRKFKESANEQAKRKVVEAFVQEIRVYRDKIKIVLRKFPKDLDMVSIGGDDESRTRVRNYNDYKPLQV

SEQ ID NO: 20573 - protein, 492 aa, synthetic construct
MKKAVGYCRYSSNNQREESIEAQMRAIEQYCKTKEIELIRFYKDEAISGTSIKDRESFLEMISDSRNGEFELVIVHKYDRFARNQYDHAIFEKKLNGNNVLLISVLEELNDSPESIILKSVLTGMNEYYSLNLSREVKKGKKENALKGIHNGGLPPLGYDLDENKRYVVNQEEAKIIRFIFSLASQGLTYSDIADILNKKGYKNKSGSNFKKTSIRDTLLNMKYIGTYFLGLKNRKGTYLKDPLIIENSHEAIVDKTIFYKVQGRFKISKNQPRKRKDNYYLLTGHCNCGLCGEAYVGGYRTKNRYGTVYYGYQCKNRKNNTKSCKNRYLRKEKLEKAVISTIKNEILNNKNIEIISKDLFEVLRKEFDKSEEIEKCKKEIEKLNNKSLRLLEKNLEGVILEEIFYKKNQEINQELNFLKSKLYSLQESNGKSFTEEGIKLYLYNLKNRFDEKLDRSIIEFFVKDIKIFPDNVIVTLRKLPKLHKNGDPDVA

SEQ ID NO: 20574 - protein, 514 aa, synthetic construct
MPKKNPSGGKRLVAYYRYSGGSHQTEQSIEGQRRDCETYARIHGMVILHEYIDRHISGKTDDRPEFQQMIADSGKGMFDYVICWKTDRIARSRYDSIIYKKKLRDNGVELLYAAEANVEGSGGIIVEGLMEALAEYYSAELAEKVRRGMRESALKGKAIGSSRPLGLTVDKDKKYIIDPAGAAAVRYIFEQYAAGAASSAIVAHLNEQGLCTSRGNPFNKSSVVRIIQNEVYRGVYVSPKFDVRIEGAVPAIIDDDLWERAQKMFIRNRQSRSPRNDRADYILSGKLFCGECGTAMKGVSGHSSNGEVYFYYNCPCKDCHRRNIPKDELEGLVIRTVCNDVLQPDVMDRIADSVIEAQTAELNQPNPEKEALQHELADVQRKAKNLLSALENGTAGAMLTNRLAELEQQANTLSYQLSSLESEPKFPVFSKEEVLYLLEQFLIAPSEKTKAYRRRLIDTFVSKIEVSNTELTIYFNIAEEDCGKMKKAPQSNQPEGCSTEKQMVRVARIELTAS

SEQ ID NO: 20575 - protein, 542 aa, synthetic construct
MQQLKTKRVGIYVRVSTEMQSTEGYSIDGQINQIKEYCDFHHFEVKDIYADRGISGKSMNRPELQRILKDAKDGYIDCVMVYKTNRLARNTSDLLKIVEDLHKQNVEFFSLSERMEVNTSSGKLMLQILASFSEFERNNIVENVFMGQTRRAQEGYYQGNLPLGYDKIPNSKHELMINQHEANIVKYIFESYAKGHGYRKIANALNHKGYVTKKGKPFSISSITYILANPFYIGKIQFAKYKDWSEKRRKGLNDKPVIAEGKHSPIINQDLWDKVQMRKKQVSQKPQVHGKGTNLLTGIIHCPQCGAPMAASNTTNTLKDGTKKRIRYYSCSNFRNKGSKVCSANSVRANVIEDYVMKQILEIVKSDKIIERVVARVNQENQVDCASLHHDIAYKQQQYDEVQIKLNNLIKTIEDNPDLTSVIRPSIQKYEKQLNDIMYQINQLKNQQNEDKTLFDAKEISKLLQHIFHDIKHIEKSRLKALYLSVIDRIDIKKDGNHKKQFYVTLKLNNEIIKQLFNNKQLDEVHLSTSSLFLPQTLYLTI

SEQ ID NO: 20576 - protein, 501 aa, synthetic construct
MIIREDAIYGRQSVDRKDSISIESQIEFCKYELRGGNFRKYTDKGYSGKNTDRPKFQEMMADIRRGLIKRVVVYKLDRISRSILDFATMMETFQEYNVEFVSSTEKFDTSTPMGRAMLNICIVFAQLERETIQKRVTDAYYSRCQHGFHMSGAAPYGFQLEPTTIEGIRTKMMKPDPETADIAKLMFEMYSQPGISFGDIARYFADEGILIYGKEMKRGFISQLLRNPIYAQADLDMYEFFKSQGTVVVNEATDFAGTNGCYLYQGRDVQERKNKHLKDQILVLAPSEGLVSSDTWLRCRKKLMANKTFQGGRKAKNTWLAGKVKCGRCGYALMSVGNPTGVQYLRCSKRADSKSCDGCGTLRTREFERFLYGEMVKKLSEFQTLTAKRETVNPKLTALNMELARVEDEIEKLLNTLTGANAVLLSYANSKIEELDTRRQALTKEIAALSAETMSPEQIERLSVYLNQWEEIDFEDRRQVADGLISQIRATDEHVSIEWKI

SEQ ID NO: 20577 - protein, 547 aa, synthetic construct
MDTTSPTITVAPYVRTSSIKQIDNNSIPAQLAEIEKYCKLNDYEMLPPYIDNGISGAEMGNRPGLQQMLNDLKNNKLDKIVVWKLTRLGRSMKDILQIIEECEKNNVSFYSVSEHLGIDTDMNKLMLNIMGSLGEYERTILKDNIRIGASNKASEGKSVGGQPPYGYDRIDGLLIVNQHESRIVKEIYQMYSQGMNFTAIAKVLNDRHEVTKLGKPHSKDSVSYILKNKVYRGLVVYNQYVDWKKKGRKGYNDNPIITEGEHEAIISQELWNKVQTLLKARKRHKRGNNKTDNLLTGLLKCKCCNSNYVISNTINTLKDGSKRHFRYYVCRTRKQRSKDCKESPNIRADFIENYIFQNIKNLIQKPELIKKVVEAVNHKRTPNTDEINHEIANKQFQIDDLKSRYNNLIQVITTDTSLTESIKPTLLKYSEQINELNTSIKQLESNKNVNHPKIEADTVINIFHILFKNLENTKNSSLKAVYHLVIEHIYIKADSNNKKQFYITFKFNQDIVETLLNNINPDEQLLNCSSSLLANIPSEIIFLSFEL

SEQ ID NO: 20578 - protein, 499 aa, synthetic construct
MKRAVGYARYSSDNQREESIDAQIRAIQSFCNENDYKLIEVYVDEALSASSAKERENFLRMIQDSKNKTFEIAIVHKFDRFARNRYDHAIYEKKLNDNGVKLLSVLEPLNDSPESVILKSVLTGMNEYYILNLSREVKKGLKENALKCIHTGGIPPLGYDVGEDRKYVINELEADSVRIIYKMYLEGAGYRKITEYLNKIGRVNKRKKPFKMTSIRDILLNEKYIGTFVFGKKDAHGHLTGNEIKIENGLPAIVDKEIFWRVQKKIKTRATGSRSKAITPYYLTGYCTCAECGSAYTGGYRSRSRNGELVYGYVCTGRKSKGTDCVNRNIRKELLENLVFKAIQTKILTDEAIKQLAEEIKVQAKEIKTKKKKVVEKHEKEIEKLKIKVDKILNLLLDGSLPEDVYKEKSKELNDRILFLKLEIEKAKKEEEVDYKKIVNFLQKIRKDFHKEEIKKSVIETFVHSVKIGYTEIEITLKKINSKTDLIGGSGGNRTRVRN

SEQ ID NO: 20579 - protein, 537 aa, synthetic construct
MNRRAVGYCRFSSDSQREESIDAQLRAIRDFCKQNNYDLIKVYKDEGISGTSTKDRESFLQLIEDSKKNMFDYVIVHKFDRFARNRYDHAIYEKILNDNKVKLLSVLERLNDSPESVILKSVLTGMNEYYSLNLSREIKKGLNENALKAMHTCGIPPLGYDLDENRRYIINEKEAEAVRLIFSLAADGVGFASIARTLNERSYKNKRGREFKKTSIRDTLLNQKYIGTYFHSLKNRDGTFRRDPILIENAHPAIIEKSLFYKVQTRFKNHLKGPRNRKNTTYYLTGFCRCGECGGSYSGGYRSAHIDGSIHYGYECRKRRAKENNCKNKPVLKEVLEPVILELIKSEIFTEENMEILVKDISEVIKKYKMSQEQEEEYYVKEIEKLNKMLLKLLDKNLEGFLSDEIFRKKNKELNERILIMKEKLYSFETLDQVKEDNLRKYLLKLKNDSTHSLNRKIVESFLYEVIIYKNHIEVTLRRFPKQILDMSKDGGSRGNRTHKTLPPTAFQAAALPLGDTSELICSLLYYILLGKSISIL

SEQ ID NO: 20580 - protein, 432 aa, synthetic construct
MRNYEKITALYKRLSRDDELQGESNSIVNQKKILEEYASKNNLSNIIHFTDDGISGTQFDRPGFMAMMNGVNQGNIGCIIVKDMSRLGRDYLKVGQCMEILRQKGVRLIAINDNVDSFYREDDFTPFRNIMNEWYARDTSRKIQSTFRSKGESGKHTASTPRYGYIKDERDKNKWIVDEKAAEVVRRIFNMTMQGNGLYRIAKILESEKVDIPAYHQQKLGYGLYQSKNFEPPYRWCSSTIVSILKKQEYLGHTVNFKTSKHLKDKKSKYVSEDNWLIFENTHEPIIDQETFDNVQRIRGNVKRYPDGWGEYHPLTGLMYCADCGSKMYVHRTSNYKNILYYTCSAYTKTPCDTLCPSAHRIKAEAVLNLIRETLKDIKKYLDKDNEDFIRSIQNEMKEKEKIEIEKKKIRLTESQIDFRNLNDLCAEFMKI

SEQ ID NO: 20581 - protein, 499 aa, synthetic construct
MKRAVGYARYSSDNQREESIDAQIRAIQSFCNENDYKLIEVYVDEALSASSAKERENFLRMIQDSKNKTFEIAIVHKFDRFARNRYDHAIYEKKLNDNGVKLLSVLEPLNDSPESVILKSVLTGMNEYYILNLSREVKKGLKENALKCIHTGGTPPLGYDVGEDRKYVINELEADSVRIIYKMYLEGAGYRKITEYLNKIGRVNKRKKPFKMTSIRDILLNEKYIGTFVFGKKDAHGHLTGNEIKIENGLPAIVDKEIFWRVQKKIKTRATGSRSKAITPYYLTGYCTCAECGSAYTGGYRSRSRNGELVYGYVCTGRKSKGTDCVNRNIRKELLENLVFKAIQTKILTDEAIKQLAEEIKVQAKEIKTKKKKVVEKHEKEIEKLKIKVDKILNLLLDGALPEDVYKEKSKELNDRILFLKLEIEKAKKEEEVDYKKIVNFLQKIQKDFHKEEIKKSVIETFVHSVKIGYTEIEITLKKINSKTDLIGGSGGNRTRVRN

SEQ ID NO: 20582 - protein, 541 aa, synthetic construct
MDKMKKKLVGGYIRVSTERQVEGYSIEGQITQIEQYCQFNGYELVDIYADRGISGKSMNRPELQRMLNDAKNGKLDCVMVYKTNRLARNTSDLLTIVEELHRQNVEFFSLSERMEVKNSTGKLMLQILASFSEFERNTILENIYTGQRQRALEGYYQGNLPLGYNNIPDNKKELMINQHEANIVKYIFESYAKGHGYRKIANALNHKGYVTKKGNPFSISAVTYILSNPFYIGKIQFAKYKDWNDKRRKGLNDKPVIAEGKHTPIISQSLWDKVQARKKQVSEKPQVHGKGTNILTGLISCPQCSAPMAASNTTNTLKDGTKKRIRYYSCSNFRNKGSKVCSANSVRADVIEKYVMDQILEIVKSDKVLKQVVERVNQENQVDVAALNHDIAYKQQQFDEISTKLKNLIQTIENNPDLTSALKPTIHQYETQLNDITNQINQLKHQQNQEKPFYDTKQIAALLQRIFQNIESMDKSQLKALYLTVIDRIDIRKDENHKKQFFVTLKLNNEIIKQLFNNNNLDEVLLSTSSLFLPQTLYLTI

SEQ ID NO: 20583 - protein, 449 aa, synthetic construct
MKQAIGYLRQSTTKQQSLATQKQTIEALAKKHNIQYITFYSDKQSGRTDKRNGYQQITELIQQGQCDVLCCYRLNRLHRNLKNALKLMKLCQKYHVHILSVHDGYFDMDKAFDRLKLNIFISLAELESDNIGEQVKNGIKEKAKQGKMITTHAPFGYHYHNGTFTIDTVKAPTVKAVFNYYLQGYGYKKIAQYLEADDKFINRKPYQVRNIILNPNYCGRVINQYGQYENMFPAIVSTTIYEEAQVTRTQKPVKRKPSENQLKQKIKCPYCDSTLTNMTIRKKHHTLRYYVCPQNMNASRFVCEFKGINAQELETSVLATCQDFFQNQQLYSKINHTIQQRLKRQRDIETKTTLNHEQLIEKLAQDKIDAETFREQTQSLRQQSKPISSISTYQIRKAFQNIIQQRFTLNMLYPYIDEINISKNKSLAGIYFKNEPLNIVKQTMELSIV

SEQ ID NO: 20584 - protein, 413 aa, synthetic construct
MSVKKIRVNRQKHRKRVCAYIRVSTTNGSQLDSLENQKQYFEKLYSNRDDIDFVGVYHDKGISGSKDNRPNFQAMIENCRKGMIDVIHTKSIARFARNTVTVLEISRELKAIGVDIFFEEQNIHTLSSEGEVMLSVLASIAEDELRSMSGNQRWAFQKKFQRGELVINTKRFLGYDLDENGELIINPEEALIVRQIFALYLEGYGTHRIAKLLNEKGVATVTGAKWHDTTVRQMLSNEKYNGSVLLQKYFHDGVNGPKKLNQGELEQYLIEDNHEAIISKEDWQSVQDKLNSRRWQQGRNKTYKFSGLLKCQHCGSTLKRQVSYKKKIVWCCSKYIKEGKVACRGMRVPEVDISNWEITSPITVLERDRNGEKYYSYSGQESADQRTSSGQEENQSSRILSSVHRPRRTAIKL

SEQ ID NO: 20585 - protein, 430 aa, synthetic construct
MSTDQEEQLSSYENQVNYYREYISKHEDYELVDIYADEGISATNTKKRDAFNRLIQDCRAGKVDRILVKSISRFARNTLDCIKYVRELKELGVGVTFEKENIDSLDSKGEVLLTILSSLAQDESRSISENATWGIRKKFEHGEVRVNTTKFMGYDKDENGRLIINPQQAETVKFIYEKFLDGYSPESIAKYLNDNEISGWTGKANWYPSAIQKMLQNEKYKGDALLQKTFTVDFLTKKRVQNDGQVDQYYVENSHEAIIDKDIWELVQLELARRKAYREEHQLKSYIMQNDDNPFTTKVFCKECGSAFGRKNWTTSRGKRKVWQCNNRYRVKGQIGCQNNHIDEETLEKAVVMAVELLSENVDLLHGKWNKIIEENRPLEKHYSTKLADIINKPSWEFDSYEMCQALDSITIVEDGQITVRFLEGTEVDL

SEQ ID NO: 20586 - protein, 413 aa, synthetic construct
MSVKKIRVNRQKHRKRVCAYIRVSTTNGSQLDSLENQKQYFENLYSNRDDIDFMGVYHDRGISGSKDNRPNFQAMIEDCRRGKIDVIHTKSIARFARNTVIVLEISRELKAIGVDIFFEEQNIHTLSSEGEVMLSVLASIAEDELRSMSGNQRWAFQKKFQRGELVINTKRFLGYDVDENGELIINPEEALIVREIFALYLAENGTHRIAKQLNEKGVATVTGAKWHDTTIRQMLSNEKYKGSVLLQKYFHDGVNGPKKLNQGELEQYLIEDNHEAIISKEDWQAVQDKLNSRGWQQGRNQTYKFTGLLKCQYCGSTLKRQVSYKKKIVWCCSKYIKEGKVACQGMRVPEVDISNWVITSPITVIERDRNGEKYYSYSGQESADQRSASGQEENQGSRILSSVHRPRRTAIKL

SEQ ID NO: 20587 - protein, 627 aa, synthetic construct
MAGIKEEKKIYLVGIYCRLSKDDGTDNESASIATQKSILADYVKKQGWHLAKTYVDDGYSGTNFQRPSFQNMIKDIESGLINCVITKDLSRLGRNYLDCGLYLEVFFPEHNVRYIAVNDGVDTLNKSAMDITPFRNILNEMYSADVSVKIKSAYRARFQQGKFMGTTAPYGYVKDPADHNHLLIDDKVAHVVREIFDLALAGNGIAKIRKHINKQHILRPAAYAVTQGAIGYERHFEDNEENRYIWSENSIRGILRSPIYAGNLAGYKRIAANMKSKKRPSKLPEEWEVIPDTHEGIVTQEEFDTVQQLMTSRRREQNAGGFENIFSGVIKCADCGYAMRAASANRRKRPDIIDCVQYTCNNYGRYGNVMCTAHSIEARDLFNAVLADINRFADMAVNDEKAVRAIEKRLTETDQSRARALEKEQRKLNKRLAELDRLFSSLYEDKVMERITERNFEMMSGKYQKEQLEIEARLREVTETLNDSYEKSQGVRDFLSLIRNYQGLKELDATIINALIDKILVSEREKLTDGTVRQEIKIYYKFIGFVGELHITPTKRWTALKPKNCTVCGVEYVPRSAISKYCPECRKRIRKVQGTETKRRSRERNRQACIELSAKNDRLILYSEMDD

SEQ ID NO: 20588 - protein, 643 aa, synthetic construct
MKKNNVEIIKADSLVRRRGDNFERESKRVAAYCRVSSDSEDQKNSYESQVRHYKDYISQRSDWELAGIYADEGISGTQVGKRQDFQRLINDCVNGEIDYIVTKAIARFARNTLDTLKYVRMLKDMQIGVYFEEENIDTLTMDGELLLTILSSVAQQEVENTSAHVKKGLKMKMQRGELIGFQGCLGYDYDVETKQLSINKKEAKIVRYIFERYLEGIGGKVIARELDELGYKSPRGLDHWNDTTVLGIIKNEKYKGDILMGKTFTVDPISKRRLSNFGEEDKYYIKDNHEPIISKEDFEKAQEIRLRRAGNKKTAANVNGKRERYSKMYAFSSMLECGFCGSILSRRSWHCRSDYRKVVWHCVTSIKKGKKFCKHSKGLEELAIEGAFMEAYRKLYHSNENLMTDLLETIESELNDNSLNKELKRITNKLRTLLKKEENLVNLRLEGKISDTIYNEKYNEISSEKEFLAEEKVNIETTLKSEIDVKKRLTEFKHLLSSQKMLTEFDRAVFESIVEKIIVGGVNSDGEIDPAMLTIIFKTGETQNKDGKQFKSKRKNAKLETDKLCPQNSDEDKKLYSQGTDYTHRSCGIIRKTQLDCPVCSPVFWQAASKDPRTFELSNTHHVDSCHTYTKIKCQQALSRVIA

SEQ ID NO: 20589 - protein, 481 aa, synthetic construct
MIATNKVAIYVRVSTTNQVEEGYSIDEQKDKLSSYCDIKDWNVYKVYTDGGFSGSNTDRPALESLIKDAKKRKFDTVLVYKLDRLSRSQKDTLHLIEDVFIKNGIEFLSLQENFDTSTPFGKAMIGLLSVFAQLEREQIKERMQLGKLGRAKSGKSMMWAKTSYGYDYHKETGTVTINPAQALTIKFIFESYLRGRSITKLRDDLNEKYPKHVPWSYRAVRTILDNPVYCGFNQYKGEIYPGNHEPIISKEEYDKTQSELKIRQRTAAENVNPRPFQAKYILSGIAQCGYCGAPLKIMLGVKRKDGSRLKKYECHQRHPRTLRGVTTYNDNKKCDSGFYYKDKLEASVLKEISKLQDDADYLDKIFSGDNAETIDRESYKKQIEELSKKLSRLNDLYIDDRITLEELQSKSAEFISMRGTLETELENDPALRKNKRKADMRKLLNAEKVFSMDYEGQKVLVRRLINKVKVTAEDIVINWKI

SEQ ID NO: 20590 - protein, 481 aa, synthetic construct
MITTNKVAIYVRISTTNQVEEGYSIDEQKDKLSSYCDIKDWNVYKVYTDGGFSGSNTDRPALESLIKDAKKRKFDTVLVYKLDRLSRSQKDTLHLIEDVFIKNGIEFLSLQENFDTSTPFGKAMIGLLSVFAQLEREQIKERMQLGKIGRAKAGKSMMWAKTSYGYDYHKETGTVTINPAQALTIKFIFESYLRGRSITKLRDDLNEKYPKHVPWSYRAVRTILDNPVYCGFNQYKGEIYPGNHEPIISKEEYDKTQSELKIRQRTAAENVNPRPFQAKYILSGIAQCGYCGAPLKIMLGVKRKDGSRLKKYECHQRHPRTLRGVTTYNDNKKCDSGFYYKDKLEAYVLKEISKLQDDADYLDKIFSGDNAETIDRESYKKQIEELSKKLSRLNDLYIDDRITLEELQSKSAEFISMRGTLETELENDPALRKNKRKADMRKLLNAEKVFSMDYENQKVLVRRLINKVKVTAEDIVINWKI

SEQ ID NO: 20591 - protein, 481 aa, synthetic construct
MITTNKVAIYVRVSTTNQVEEGYSIDEQKDKLSSYCDIKDWNVYKVYTDGGFSGSNTDRPALESLIKDAKKRKFDTVLVYKLDRLSRSQKDTLHLIEDVFIKNGIEFLSLQENFDTSTPFGKAMIGLLSVFAQLEREQIKERMQLGKIGRAKAGKSMMWAKTSYGYDYHRETGTITINPAQALAIKFIFESYLRGRSITKLRDDLNEKYPKHVPWSYRAVRTILDNPVYCGFNQYKGEIYPGNHESIISKEEYDKTQSELKIRQRTAAENVNPRPFQAKYILSGIAQCGYCGAPLKIMLGVKRKDGSRLKKYECHQRHPRTLRGVTTYNDNKKCDSGFYYKDKLEAYVLTEISKLQDNAGYLDKIFSGDNAETIDRESYKKQIEELSKKLSRLNDLYIDDRITLEELQSKSAEFISMRGTLETELENDPALRKNKRKADMRKLINAEKIFSMDYEGQKVLVRGLINKVQVTAEDIVINWKI

SEQ ID NO: 20592 - protein, 615 aa, synthetic construct
MRNYEKITALYERLSRDDELQGESNSIVNQKKILEEYASKNNLFNSIHFTDDGISGTQFDRPGFMAMMNGVNQGNIGCIIVKDMSRLGRDYLKVGQCMEILRQKGVRLIAINDNVDSFYKDDDFTPFRNIMNEWYARDTSRKIKSTFKAKGESGKHTGSSPPYGYIKDKDDKNQWIIDEKAAEVVRRIFHLTMDGKGPYAIARILEADKIDIPAYHQQKLGYGLHQSKVFEYPYRWCSSTIASILKKQEYLGHTVNFKTRKHFKDKKSKYVSEDNWLIFENTHEPIIDQETFDNVQRIRGNVKRYPDGWGEYHPLTGLMYCADCGSKMYVHRTSNYKNIPYYTCSAYTKIPCGTLCPSAHRIKAEVVLKLIQSTLQDIKKSLDEDNEAFLHSIQNEMEESEKIEMEKKRTRLTDSTNRLQELERLMCRIYEDMILEKIPNTRYEILNNQYETEQRELSKEIDGLEKAIKRYEKETNRAKKFIRLIERYDNFDELTPTIINEFVEKILVHERDRKGSQTANQKVEIYFNFIGNYEPPKEELSEEEMQKLREEEEKERARKDRLHQNYLKRKANGKQKEYEDRYKARREEKKQEKLKSLKRTGIPVSEYRKIFKKQK

SEQ ID NO: 20593 - protein, 597 aa, synthetic construct
MKRDVKVIKGDTTLKRTASGCVERSIKRVAAYCRVSTDTEDQINSYNSQVEHYTDFIKQNNEWTLAGIYADEAITGTQVDRRIDFQRLINDCMNGDIDMVITKSISRFARNTLDTLKYVRKLKEYNVAVFFEEENINTLTMDGELLLTILSSVAQQEVENISANVKKGLRMKMERGEMVGFQGCLGYDYDPETKSISVNEKEAEIVRYIFRRYLEGVGGMVISRELEEQGYLSPRGHKRWTETTVLGIIKNEKYKGDLLMGKTFTVDPISKRRLDNFGEQDKFYIENHHEPIISEEDFEKAQGIRLRRAKNRNTVANNGGKREKYSRKYAFSSMLECGFCGHMLSRRNWHSSSEYTKVIWQCVNATKNGKKYCPHSKGIEEEAIEKAFMESYRQVCHNNVEITNEFLKTVEEELKDNSLAKDLKKISNQLDKILKKEKDLVELRLNEAISMEIYQEKYNEIAISKEKLLEEKRTLEVTLTDEKALKKRLEGFKKLLESNKYLEEFDRTVFESIVDKIVIGGTNDDGDIDPAMITIIYKTGKKDSQNGRLFKSRRKNAKVVEENDGDKLYSQSSNEVNKLCSYSTDNTCGDGSTIVQT

SEQ ID NO: 20594 - protein, 361 aa, synthetic construct
MKRVALYMRVSTEQQAKHGDSLREQKETLYEYIEQHKDLKVVNEYVDGGISGQKINRDEFQKLLQDVKENKIDLILFTKLDRWFRNLRHYLNTQEILEKHNVSWNAVSQQYYDTTTAYGRTFIAQVMSFAELEAQIDSERIKAVMANKIAQGEVVSGKTPLGYSIENKKLVINDDAPIVIDIFNYFLSSGSLRKTVYYLGSQYGIVRDYQSVKNMLTNKKYIGELRNNKNYCPPIIDKKLFYAVQKALPKNLKTNAKRDYIFKGLLKCSDCQGSVAGQTIKARYKKKDGTESIYERTCYRCVKRRNNKLRCTNKRAFYEKNLERYIFEATKQKFEQIQINYSKNNQRLLKRKIVRKILRIN

SEQ ID NO: 20595 - protein, 516 aa, synthetic construct
MAGKKVTVIPMKPRQWAAENTEEKPKLKVAAYCRVSTEMEEQASSYEAQVQHYTDYIQRNPDWELAGIFADEGISGTGTKKRDGFNRMIEACQKGDVEYIITKSISRFARNTVDCLQYIRQLKDLHIAVFFEKENINTMDAKGEVLLTIMASLAQQESQSLSQNTKMGVQYRFQQGQLRINHNHFLGYTKDEDGNLVIEPKEAEVIKRIFREYLEGSSLQEIANGLMSDGILTGGKRKLWRGEGVRLILRNEKYMGDALLQKTYTTDFLTKKRVKNDGSYAQQYYVENSHPAIIPRDIFMQVQQELDRRKSMKNKHSQCFSGKYALSGITVCGDCGNAYRRVHWKNRGTVWRCKSRVDKREHNCSGRTIYEKDLHEAIIKAINETVVDREDFLQQLSENINSALTDGLTGRLEELDSKLKELESEIISMAIGGQGYDELASQIFSLRDERDAVAKQIAANTNLQQRVDEMVVFVKEHDVINEYSEVLVRRLIEKVTIFEKNIVVDFKSGVRVTVEI

SEQ ID NO: 20596 - protein, 452 aa, synthetic construct
MKAAIYIRVSTQEQIENYSIQAQTEKLTALCRSKDWDVYDIFIDGGYSGSNMNRPALNEMLSKLHEIDAVVVYRLDRLSRSQRDTITLIEEYFLKNNVEFVSLSETLDTSSPFGRAMIGILSVFAQLERETIRDRMVMGQIKRVESGLPLTTAKGRTFGYNVVDAKLYINEEEAKHLQLIYDIFEEEKSITFLQKKLKELGFKVKSYSSYNKWLMNDLYIGYVSYADKVRVKGIHEPIISEDQFYRVQEIFSRMGKNPNMNKESSSLLNNLIVCEKCGLGYVHRAKDTVSRGKKYHYRYYSCKTYKHTHELEKCGNKIWRADKLEEIIIDRVKNYSFATRNVDKEDELDSINAKLKVEHLKKKRLFDLYINGSYEVAELDKMMADIDAQINYYNSQIEANKELKRNKKVQESLAELATVDFDSLEFREKQIYLKSIINKIYIDGEQVTIEWI

SEQ ID NO: 20597 - protein, 525 aa, synthetic construct
MSMNTTTTNTNTTTTNRLLELPLLTPELRTAVERLREMAEDDWTASILYGRASQDRHKLMRSIDDQLTDMVGWCLPIEWYPEAIVRDADRSASQWRRREREGFDEAMALIESGRYGGFASWEPSRAGRDMEVYVQLRKACQRAGVLYLTHGRVYDFSRSDDTFMMGFEFLRAEADANTMRERQLRTVKLNADKGRPHGRLPYGYRRVYDQHTGVLLRQEPDPHTGQIVRDAARDVLAGKSMYSIAMRLQDAGEPTPKKPWAESPRGWDTYTVRQVLQNPTIAGKRVYRGEVIGQAQWEALIEWEDFQKIQRLFADPGRLVKGGGGMAAKTLMVHIARCHYCGRPLKRATMRKKERTPAVKYQCQFRGCYKTMISQPGLDAYVEQVVLEWFQNPTNLAWLTGDDDGDWLKVAEAAEQKRAALQARLDEVIAQYAAGSLNLDTLTKLEAALRPQIAEAEQALIPPVTDERVRALVTAEDVPAAWAGLPLLERRKIIKATFNVRIQQTQNRGQNAFEPERVLIEPRAL

SEQ ID NO: 20598 - protein, 529 aa, synthetic construct
MARTVTAIPATRALHTGAPLGQTTLRRVAGYARVSTDHDDQVTSYEAQVDYYTRYISDHAGWQFVKVYTDEGITGTSTKHRAGFQQMVTDALDGKIDLIITKSVSRFARNTVDSLTTVRALKDKGVEVYFEKEGIWTFDAKGELLITIMSSLAQEEARSISENVTWGHRKRFADGKVTVPYSRFLGYDKGKDGSLVINPEQAKTVRRIYNMYLSGMSIGTIARTLTDEPETFTAAGNKTWHYQSIRAILTNEKYKGDALLQKSYIADYLTKRQVINQGEVPQYYVTASHEAIISPAVWDFVQAEIAKGARDQRTQHRTRPFSSTFECSQCGHFFGSKTWHAGSKYEKVIWRCGHKYAGQEKCATGHISDQRLKDMFLKAIRLRFGSPTDTGVNQAVLDALDTSDLEVEAAGLLAQINEVAKKLQSMIAHNARVAQDQQAYEKAFSASHEQHQALLAEHAAVVAEIQNKNNRLAAYHYYRQETANLELEQLVFSPYLCVALLDKGTVDADGNVTFQFRDGSTQVVAIKAA

SEQ ID NO: 20599 - protein, 481 aa, synthetic construct
MKRMEQITPPPISTSPRVKVAAYARISMETERTPLSLSTQVSYYQQLIHDTPGWTFAGVFADSGISGTTTHRPQFQEMLALAREGAIDLIFTKSISRFARNTVDLLETVRELKDLGVEVRFEKENISSTSADGELMLTLLASFAQAESEQISQNVKWRIWKGFEEGKANGFHLYGYTDSADGTDVQIIDEEAAVVRWIFAQYLKKTSCEKMAAQLIADGRVLHLADNKLPGEWVRHILKNPTYTGDLLLGRWSTPEGRPGRAVRNTGQLPQYLVEDAIPAIIDRDTFTAVQTEIARRRELGARANWSIETVALTSKIKCVSCNCSFVRNVRNRKTQNSISTEHWICTERKKGRKTGCGTCEISDTALKGFIARVLGIDAFDEDVFTERIDHIDVQGKDHYTFHYTDGTSSSHTWRPNLKKSSWTPARKAAWGKLVRARWAEAKRLGLDNPRQAPTPPEALAKYRAVAKAEAERLRAERGER

SEQ ID NO: 20600 - protein, 452 aa, synthetic construct
MKAAIYIRVSTQEQIENYSIQAQTEKLTALCRSKDWDVYDIFIDGGYSGSNMNRPALNEMLSKLHEIDAVVVYRLDRLSRSQRDTITLIEEYFLKNNVEFVSLSETLDTSSPFGRAMIGILSVSAQLERETIRDRMVMGKIKRIEAGLPLTTAKGRTFGYDVIDTKLYINEEEAKQLQMIYDIFEEEKSITTLQKRLKKLGFKVKSYSSYNNWLTNDLYCGYVSYADKVHTKGVHEPIISEEQFYRVQEIFSRMGKNPNMNRDSASLLNNLVVCGKCGLGFVHRRKDTVSRGKKYHYRYYSCKTYKHTHELEKCGNKIWRADKLEELIIDRVNNYSFASRNVDKEDELDSLNEKLKTEHVKKKRLFDLYISGSYEVSELDAMMADIDAQINYYEAQIEANEELKKNKKIQENLADLATVDFDSLEFREKQLYLKSLINKIYIDGEQVTIEWL

SEQ ID NO: 20601 - protein, 452 aa, synthetic construct
MKAAIYIRVSTQEQIENYSIQAQTEKLTALCRSKDWDVYDIFIDGGYSGSNMNRPALNEMLSKLHEIDAVVVYRLDRLSRSQKDTITLIEEYFLKNNVEFVSLSETLDTSSPFGRAMIGILSVFAQLERETIRDRMVMGQIKRVESGLPLTTAKGRTFGYDVIDTKLYTNEEEAKQLQMIYDIFEQEKSITFLQKRLKELGFKVKSYSSYNKWLMNDLYIGYVSYSDKVHVKGIHEPIISEDQFYRVQEIFSRMGKNPNMNKESSSLLNNLIVCEKCGLGYVHRAKDTVSRGKKYHYRYYSCKTYKHTHELEKCGNKIWRADKLEEIIISRVKNYSFATRNLDKEDELDSITEKLKTEHSKKKRLFDLYMNGSYEVAELDKLMADIDAQINYYNSQIEANEELKRNKKVQESLAELATVDFDSLEFREKQIYLKSIINKIYINDEQVTIEWI

SEQ ID NO: 20602 - protein, 717 aa, synthetic construct
MKPGTMQAGAMGGSMGVGAMGTGTDPFAAMAAQLTPKRAVSYIRVSTREQAQRGGSEEGFSLPAQREANKRKAQSMGALVVKEFADRGESARSANRPELQKMLAYLKEDGGIDYVIVHKLDRLARNRADDVEINRAFEQAGVRLVSTSENIDQTPGGMLLHGIMSSIAEFYSRNLANEVMKGMGEKARNGGTLGKAPLGYVNVRGRDEHGREVRTVELDEERAPLVRLAFTEYATGNWTARQLAEHLNNRGLTIPPTTRKPTNPVSVRLLQTLLRNPYYKGVISFQGVEYAGAHEPLVDAATWQTVQDILTAHTNGERQRMHNHHLKSTIVCGLCGARLLVQHSTSRASGTYHYFVCARRHRVHDCTFKAVLIDEVEARVAELYQQIRLSSDDRRDIERYLRAEFAHIQANRQQDIQRLTTRQQQLEDQRHKLLEAHYAGAIPLDLLKKEQEQLTSSILAIQRELDGYTADAALVEQHLTQALDLLEDCHRLYLAVPDRLKKLLNQVFFERILVNPAVDEDGRPIIPPPALQTSLRAGRRRGTSGQTAATQSGEKTVESATSSRGEGAESGGSAFQGGHGEAQLGLVHTVHRSTISIIDPASHTAVTAELASPFDQLCSQQLRRAAQQAVVGVASQQNATSDQATERREVDNPHGAAPSQTADCEVPTTRTPIHDVDGRRRCNSGNDSAPTPVTQAKGSYTELVVDPAGLEPTTDAV

SEQ ID NO: 20603 - protein, 704 aa, synthetic construct
MTAGTTQPGVVQGGAATAGVDPFTAMAAQLTPKRAVSYIRVSTREQAQRGGSEEGFSLPAQREANKRKAQSMGALVVKEFADRGESARSANRPELQKMLAYFKEDGGIDYVIVHKLDRLARNRADDVEINRAFEEAGVRLVSTSENIDQTPGGMLLHGIMSSIAEFYSRNLANEVIKGMGEKARNGGTLGKAPLGYVNVRGRDEHGREVRTVELDEERAPLVRLAFTEYATGNWTVRQLADHLNNRGLSIPPTARKPTNPVSVRLLQTLLRNPYYKGVISFQGVEYAGAHEPLVDAATWQTVQDILTAHTNGERQRTHNHHLKSTIVCGLCGARLLVQHATSRASGTYHYFVCARRHRVHDCTFKAVLIDEVEARVAELYQQIRLSSDDRREIERYLRAEFEHIQANRQQDIQRLTTRQQQLEDQRHKLLEAHYAGAIPLDLLKKEQDQLTSGILTIQRELDGYTADAALVDQHLTQALDLLEDCHRLYLAAPDRLKKLLNQVFFERILVNPAVDEDGCPIIPPPALQTSLKAGRRGGTSGQTAATQSGKKTAESATSSRDESAGGQSAGSASQSGHGEAQPSSMHAVRCSTISIIDPASHSAVTAELASPFDQLGSQQLKRAAQQAAAVGSARSLTTTPHSAAPGQTADCEVPTTRTPVHDVDGRRRCNSGNGSAPTPVTQDKGSYTELVVDPAGLEPTTDAV

SEQ ID NO: 20604 - protein, 596 aa, synthetic construct
MDAAQSPKTAVLYLRVSTASQVNTDYDPEGLSIPTQRKICLAKAKQLGITIVDEYVELGRSGTKTVNRPEFQAMLERLHTRGDVDCVMVYKLSRLNRSRFDDAVTMMELRKANVTLISATENIDETPEGQLVHGMLAAVNEYRSAADGADIRIKLLRKIEQGGTIGPAPLGYLNIIETIEGRRINTIGLDPERAPLIRKAFELYATGDYSCEHLQQKLTDLGLTTRPSAKRPTPKPLAVSTIHRLLADPYYTGIVTFKGKQYPGRHKPLVSQELFDRVQEIRTLRSNNTRDRVHFHYLKGGILHCERCHKAGKRSRFVYTEAKGKGGTYAYYLCRGRQDGHCDMPYLPVSLVEDYVERHICTLSLGGDFTQRTEAEMTQALDDQQALIRQSNHAIARKLKDIAAKEGRLIDLVADGSLDTAAARRRLAELSQERQRLEHTKQTLDQRLAIGRDVLTTSLHLLQDIGTLYRQSPDPVRGMLCQALFHTIYLDDTTVTTSTLKEPYSSLQAAATHDNRHSHTAPSSVGGGRAGRAKGSGISKAPKQRKFQKQQRRTPVATVIPLPSDEHEQTLGSRIATEGSSKHEMAERGGFEPPVR

SEQ ID NO: 20605 - protein, 558 aa, synthetic construct
MTKLYSYIRFSSMRQSDGSSYERQIRMAKEIADRYNLELVNDYQDLGVSAFKGANSKTGALSRFLDEIGRSIPVGSWLFIENLDRLSRQDIISAQELFLSIIRRGITIVTGMDNKIYSIETVTANPMDLMFSILLFIRGNEESQTKRNRTNSSALLKIKAHQQNPQSPAVAIEEIGKNMWWTDTTSGRVLPHPVYFPVLQKIVQLRQEGHSAGVILDYLNEHHEPPAPTSNKKHGKWSRAMVSRLFTTKALIGVKTVNVDGVEYELRDYYPRVLSDSEFYFLRKNIIKKAWDYSHDKEKVIPLLSGIGVLRCVHCGATMVKQTAANGKREQYRYCCDGRKSGRTDCPYPNWGFRAVTLEGAVLQLLADKIWIAEDKTNPIPEIQVKIDEISRKIDNLINLSAMTGATKELANQITDLNSQREALHEEIRLFEREMYSVDSQGWDKLAQFDLSDVQNEERLKVRMKIKGALHEIECSRIDSKKNLFVLVYLDGLRQRLVIENNRGLKKGQIFVDLKTINDRQILESAGMVLHPCIEMIIDADWKAPEEIPGLLSEEFGI

SEQ ID NO: 20606 - protein, 520 aa, synthetic construct
MAEKNITVIPARKRVGSTAAKEKVKKLRVAAYCRVSTETEEQNSSYEVQVAHYTEFIKKNAEWEFAGIFADDGISGTNTKKREEFNRMIDGCMEGNIDLVITKSISRFARNTLDCLKYIRQLKDKNISVFFEKENINTMDAKGEVLLTIMASLAQQESQSLSQNVKLGLQYRYQQGKVQVNHNRFMGYTKDDEGNLIIVPEEAEIIKRIYREYLEGKSLAGIGRDLEKDDILTAAGKPRWRPETIKKILMNEKYIGDALLQKTFTVDFLTKKRVKNEGHVPQYYVENSHEAIIPKELFLQAQEELHRRNNIYTGADKNKRLYSSKYALSTITFCGDCGDIYRRVYWNIRGRKEFVWRCVTRIEQGPETCKNRTVKEGDLYDAVMTAINKLLAGGDNMMRTLEENIHAIIGDTTEYRISEINTLLEEKQKEIISLANNGKDFEFLSEEVDKLREERQRLLVEDASLSGENERINELIGFICRNKYRTLLYDDTLVRKLIQNVTVYEDHFVISFKSGIEIEV

SEQ ID NO: 20607 - protein, 543 aa, synthetic construct
MAKKITKIDPVKQQVVRQLQPKKRVCAYCRVSTDSREQQNSFTAQLEYYTTLIENKEDWQFSGIYADEARSGTKLAKRDDFLRMLKDCEDGKIDMIITKSLTRFARNTVDSIEAIRRLKALGVAVYFEKEHIDSLSEKSELMLTILSSLAQGESESISTNSKWAVIKRFKDGTFILGTPAYGYTKDENGELIIQEEEAAVVRRIFREYLNGKGTYAIAKDLSEQGLPTIRSAEKWNDGVIKEILLNPIYTGNLLHQKTMTTEVLPFKRQINKGQLPQYLVEDNHAPIISHEQAEAVREIFEYRRKQMGVDDTNKYQSRYAFSSRILCGECGGMFRRQKIYIGKPYEKTQWCCRQHILDNAKCSQKAIREDDIQWAFTVMWNKLVSNYTEILTPLLDTLKKLRMNEQQEQEIGECSNKIMELTEQGHILSRLVSKGYIDPAVFIERQNALTIELATVKKKRSQLLDNNGFDIEIAGTEQLLELIRNNPHVIEEYREDLFLQAIDKVIVQKNGQITFRLINRLELSEPCRKEALEDDAKAYAHRI

SEQ ID NO: 20608 - protein, 551 aa, synthetic construct
MQTATAKKKSISIIPSKPEYDRNIKPQFKALRVAAYCRVSTTLEQQETSYEAQVSYYTEKIKSNPNWKLAGIYADDGKSATNTKKRDDFNAMIEDCMAGKIDMVITKSVSRFARNTVDSLQNIRKLKEKNVAVFFEKEGVNTLEGTGELLITILSSQAQEESRNLSENTRWGLVRRFENGIVSVNHNKFLGYTKDKNGELVIVPEEADLVRRIFRLYLEGSSIIQITKILESEGITTVTGKSQWCPGVIDKMLSNEKYMGDVLQQKTYTIDFLTKKRVKNKGIVPQYYIEDDHEAIIPKELYYQVQEEKARRASLSKTAAARRAKQEKEKSKYSSKFALSDIMVCKECGQPYRRQVWSKYGQKSAVWRCENRLKNGTKNCKHSPTFKEEILHEAIMTAINSVVENRGEFVGAFRENVIRVIGSYSTKNMTTEFDGQIEKLQGEMLALIEENAKQGSIKEDFDERYKRIAEQINDLKQKKLELVREQKMAVNFQQRLDDMDACLKKTTCEVREFDNDLVRRLLQNIKAVKDDLIEIQFKSGIVMNQRVSYFD

SEQ ID NO: 20609 - protein, 536 aa, synthetic construct
MKPSINLTDGALAKKLATEAPQVIVIDPIQQIRSNKLRVAAYARVSSDSDDQENSFAAQVKAYTSFIREHEDWDMVDMYADEGITGLRMDKREDFLRLLHDCRRGKIDRILTKSVSRFSRNTRDCLTTIRELKALSVSVYFEKENIDTATMTDELIFTFFAGNAQNESMSISGNMRWSYEHRMKSGKFITCKAPFGYRLVEGRLEIQEQEAEIVRYIFDSYLNGKSKDEIAQEITAMGYPTRDGKKKWQYTTIDYMLKNERYMGDALLQKRYTTNALPFRKKRNNGEQDKYYFKYSHPPILSPEVFEQAQQLNQSRVLPTMSKRSEYPLSQRIRCGECGSSFKRKICRGKIYWICWNHNSGKSNCSITQIPEAEIYGAFLRLYNKLKIHYSIILNPILEQMQTLKRNRNLSNTQVVQINQNIAELTEQNHVLNGLKSRGIIDSALFLSQTGEVNRQIRVLKAEKNKLMEQDEDDSTITETRCLISMLEDSPELLTEFDETIFDSMVELVVAESSERLKFKLINGLKLAETIERTVR

SEQ ID NO: 20610 - protein, 543 aa, synthetic construct
MQTAECLAQPQIIVIPAIPTTQLRTVQRQLQVAAYCRVSTNQEEQLTSYEAQMAYYTDKIMTNPEWTMAGIFADEGITGTSAKKRPEFLRMIRLCKRGKIDVILTKSISRFARNTVDCLNYIRELKELGIPVIFEKENINTMKADSEIIITMLGGFAQAESESISQNVRWGKRQSFKSGKVSFQYSRIYGYERGEDDRPHVIPEQAEVVKRIFENYLAGMSVANIKKMLEADGISAAGGKPLWSEGALQYLLRNEKYCGDALLQKTYIENCISKKIKKNNGELPKYLVKDHHEAIIGRPLFELVQAEIARRAGKRKVSDKTSKTQQSKYSSRYAMTELLVCGDCGSAFRRVTWAKRGKKKVVWRCISRLDYGTKYCQNSPTIEEEALHAALLDAINKAMENREQLIGILKSNLEITLSEKNCEEVNPLLLESRIRELQKTMMELVAVSVKAGNARSYEDKFKEISEEIQSLQKALESHKAQQNGPDALTLQIEDLCRTLQDAPFECTEYKDSVVRQLIDTIKVMSEDKLLIIFKGGFKMEQYI

SEQ ID NO: 20611 - protein, 605 aa, synthetic construct
MSPFLPSLTVPVAYSYIRFSTPDQNKGDSRRRQLDASARYAADHGLTLDESLTVQDLGVSAFTGSNFERGALGQFVTAINEGRVAPDSYLLVESLDRLSRLPVTEALAVFQTIINLGVTIVTLVDSAVYSKDRLRNDWTPLLVALVSMSRAHEESAVKSRRVKAAWDAKKERVKAKKEVMSGRCPWWLKPSDDNSHYEIVEENAATVRLIFDLAKDGLGGEAIAKQLNARNIRPAQHAKRWQNSTVQFNLRNIAVIGVLQLDQDNNGRTTTNTFVEDYYPPVIDKALFYEVQALRAERNRNKNTMSAGRKGQCYNIFQGTAKCGYCGSPMHIRRKPGVNSGFLYCSKSLQGGGCVGVSYNIRQLEAEFIEFTRELDLSHILGDTSTDNALTEKKAGLSVCNAMLEEAQTKLANLLNAIEAGGDMPILVQRLRDVEAQVNDLKKQRLALQSEVEILSNTSRDEQVSLEMLSRLMEQLGSKESDLEEKLRLRFRMLGEVQKVVRRLDLFPGGPMLAQEQIDELRSQLQSGGFDNGRIDDYLTQLPIKPDRSARYFIAHLRNGISRTVRQGQVMETDSARSQKVRSAIHGAVTEEANRDDETLLPSGR

SEQ ID NO: 20612 - protein, 494 aa, synthetic construct
MRCAVYIRVSTDKLEQKQSLENQKELFIQYLSDKGWDLEAIYVDIESGTTEKREQLQKLIADAKQNKFDVMLAKELSRFARNGGLSYEIKDIAERSRVHIITLDNAVNTLEGNNHMFGLYAWMYEQESQRTSDRVKTALINRAKKGVYKGSVPPYGYTLNEGKLTIRNDSTPSIVKRIYRDYISGKGFDRIAKDLYNEEIPSPSQVANKRNATNRWNGSSVRSILSNPNYTGDLVQGRTTTKSVTSKIREQKNHDDYIVVPNVHPSIISKEDFDVVQGLMKARRRKRPSHEKHLFTNTAYCADCGKSMHYKKNRNGYVCGEYNKLGAKACLSHYVKEDQLKAAILQDIKKLAGNNDGSSLSKKINDKFKHANQKKKAHINRLEKKLTGLKERKAKLIVSHVDGIISEDDYQLTYEITSNEISEVMTELEFLNETHTHENDEAKFKAILTHIQEIMNLNVLSPELLHRLIERIEIKADGSPRIFYKFSGPRLLKL

SEQ ID NO: 20613 - protein, 542 aa, synthetic construct
MKLQKVLNLFNVAIYIRLSREDGDKEESDSVGNQRKLLTEYVAKKDDFILYDVYVDDGYSGTNFNRPSFQRMIADIEDGKVNCVVVKDLSRFGRDYIDTGRYLERYFPELGVRFISVTDSIDSMKQAYDMLLPIKNIFNEQYARDISKKIQATVKSKQKAGEFIGAFTSYGYKKSPVDKNKLVIDDYAADVVRRIFSLYIQGYGKQRIAKLLNAEGILCPAEYKKVNGENYKNCNRLESTTYWSYSTINSILHREMYVGNMVQGTKHQRMRSKQKKMPKEEWIIVENTHEPIIDKATWEKAQSLLQKRTRELDLETNKNIFAGFVKCGDCGRAMTKNMWRRADGSKTYSLYCGTYKRNGKQYCTPHTLPMAVLEDIVLGDLKAIVDSVDNLKELVQSQSFTASKVKRIADTELSKIKAELERVKRLKKSIYEDYREELISKEEFLSYREDYLKKEELYSKQIEALEEKKKDNVTEDVFETPWLKRLLELKDIETLDRDIVVEMISEIKVYENRKIKITYNFGNELEHLFSSVYSVESEGKAI

SEQ ID NO: 20614 - protein, 604 aa, synthetic construct
MKKVFVYHRVSSDQQLDGSGIARQAELLEGYLERTGICAEMDDPAPVVLSDQGVSAFKGLNISEGELGAWMEQVRNGMWDSSILVVESIDRFSRQNPFDVMGYINALMAHNVAIHDVMANIVISRSNSKDLPFVMMNAQRAYDESKYKSDRIRKGWAKKREQAFNKGTIVTNKRPQWIEVENDKYVVNEKAAVVKEIFALYQTGMGCPTIAKQLQRKEGEQYKFNRPWTGELVHKILTNRRVTGKIFISEIIRNHDDIENPVTQKKYDMDVYPVVINEEEFELVQELLKSRRPNAGRVTVKKDGQEEVLIKSNLFSGIARCTECGGPMYHNVVRAKRTPKKGDPKIEEYRYIRCLNERDGLCENKAMTYETVERFVVEHLLGMDLSTVMKEQEFNPEIEVLRIQIDQVKDQITNYENGIERRKSAGKPISFDMREELDDAKSELERLLARQASLATVQVDVPVLQDVNVTELYDVNNVDIRTRYESELNKIVSNIRLKRNGTSYTIDINYKQNELKRHVLFVENKKKEQTLISEVIIEDVDGAKFYYTPSFMIMLKDSDIRFQQTNEDLSIIDYSLLLNYIDAVDRNDAVGVWMRDQFKFLTSN

SEQ ID NO: 20615 - protein, 517 aa, synthetic construct
MAAKKAVVYARFSSDNQRDESIDAQLRAINEYADKNNIKIVNQFIDRAKSATSDKRPEFQNMIKFCEADTTGISMVIVHKLDRFSRDKYDSAMYKQKLKVKGIRVVSVLENLDNSPESLILESVIEGMAQYYSANLAREVAKGQKENALKALHNGGDAPLGYDVAHDKTYIVNEEEAQAVKIIFDRYVQGYSYSKIIDELNNLGYKTKRGNKFGKNSLHGILNNEKYTGVYVFNKTQRKGVDGKRNGHKQKSDDEIIKVEGGMPAIINKEIFAQAQEMIQKRKKTPGAHKATTTYLLTGLIRCGECGHAMQGNKRKDSYGNDYISYRCGCRKQKRECSNREIKRDYLEEFILQELENNILNDEAIPVLSKALNEKMNDKNESNAELLKNLEQKLEKVNKEINNILNAIMNGIVNNMLKDKLDELEQVKLNLDLKMNELKTENKSVDSVAITEEQIRGMFSRFKDFVLERNIPECKKFIGDYIKEVIVYKDHVEVVFNVVFSFVEDKVNYNIQCILHR

SEQ ID NO: 20616 - protein, 523 aa, synthetic construct
MAVSRNVTVIPAIKRVGNNKTSESKPKIRVAAYCRVSTDSEEQASSYEIQIEHYTNYIKKNKEWELAGIFADDGITGTNTKKREEFNRMIEECMAGKIDMIITKSISRFARNTLDCLKYIRQLKDKNIAVFFEKENINTMDSKGEIMLTIMASLAQQESQSLSQNVKLGIQYRYQQGEVQVNHKRFLGYTKDENKQLVIDPEGAEVVKRIYREYLEGASLLQISRGLEADGILTAAGKAKWRPETLKKILQNEKYIGDALLQKTYTVDFLSKKRVKNNGIVPQYYVENSHEPIIPRELFMQVQEEMVRRANLRGRKGGKKRVYSSKYALSSIVYCGHCGDIYRRVHWNNRGYKSIVWRCVSRLEEKGSECTAPTINEETLQTAVVKAINELLANKEPFLSTLQKNIATVFNEENDNATDDIDGKLEELQQQLLIQAKSKNDYEDVADEIYRLRELKQNALVENAEREGKRQRIAEITDFLNEQSYELEEYNEQLVRRLIEKVTIYEDKLTVEFKSGIEIDIEI

SEQ ID NO: 20617 - protein, 520 aa, synthetic construct
MKKITKIEGNLANSFIKAKMRVVAYCRVSTDSNEQLVSLQAQKAHYETYIKANPEWEYAGLYYDEGISGTKKENRSDLLRMLSDCETGRIDLIITKSISRFARNTTDCLEMVRKLIDLGVHIYFEKENINTGLMESELMLSILSGLAESESISISENTKWAIQRRFQNGTFKISYPPYGYQNIDGQMIVNLKQAEVVKYIFAEVLSGKGTQKVANDLNQKGIPSKRGGRWTATTIRGILTNEKYTGDVILQKTYTDSHFNRHTNYGEKNMYLVENHHEAIISHEDFEAVDAVLNQRAKEKGIEKRNSKYLNRYAFSSKIICSECGSTFKRRVHSSRRKYIAWCCSKHISNITECSMQFIRDEDIKTAFATMMNKLIFGHKFILRPLLDELRSKNNAKSFRRIEELETKIVNNMEQSQVLTGLMAKGYLEPALFNKEKNALEAERERFLAEKDQLTRSVNGNIAKVDEVDRLLKFATKSKMLTAYEDELFENYVEKIIVFSREKVGFELKCGITLKERLVN

SEQ ID NO: 20618 - protein, 520 aa, synthetic construct
MKRITKIEENKALSVKKKTRVAAYCRVSTASDEQLISLDTQKAHYEDYIKSNVDWDYAGIFYDEGITGTKKECRDGLNSLIDSCEKGLVDLVITKSISRFSRNTTDCLELVRKLIGLKVTVIFEKENINTESMESELMLSILSSLAESESVSISENSKWSIQKRFQNGTYIISYPPYGYENVGGEMIVVPEQAEIVKKIFEYTLAGKSTHAIAKELNDCGVTSKKGGKWTPGAINAIIRNEKFTGDVIFQKTYTDSQFSRHTNDGELNQYLCENHHEPIVSHEIFDKANEVLNQRGREKGNGERTERYQNRYGFSGRIKCGECGGVFKRRIHYKPSGSYIAWCCTQHIEDRNSCSMKYITDDGIKAAFLTMMNKLIFAHQRVLKPLLHSLQGFDDKDRLLQIQEYETKLEKNMEQRQVLTSLMASGLLEPALFSKENNALILEEKHLQEEKKQMINSVSGDRTKIEALETLIKFASGSEMLTEYSDEIFLSYVEGITVLSRKEIVFELKCGLKLKERLVG

SEQ ID NO: 20619 - protein, 521 aa, synthetic construct
MNKSITVIPARKRVGNTVNKEVKPKLRVAAYCRVSTDSDEQATSYDAQVEHYTNFIQKNEEWEFAGIFADDGISGTNTKKREEFNRMISECMEGHIDMIITKSISRFARNTLDCLRYIRQLKEKNIPVFFEKENINTMDSKGEVLLTIMASLAQQESESLSKNVKMGMQFRFQNGEVQVNHNRFMGYTKDEDGHLIIEPAEAEIVKRIYREYLQGASLKQIGDGLMEDGILTGAGKPKWRPESVKKILKNEKYIGDALLQKTYTVDVLTKKRVKNNGIVPQYYVENSHEAIIPRDIYMQVQEEMLRRANLHSGANRKKRVYSSKYALSSIVYCSKCGDIYRRIAWNNRGKHSTVWRCVNRVEHGPDCCDAPTVQESELQNAVVKAINMALGGKDDMLAVLEENIAMVLALEDENSMESIDAKLEEQQQELLRRANSKLDYEDLADNIDNLREQKLNVMADSAEREALKQRISEMQQFLAEQTGQIEAYDETLVRRMIEKITVHQDKFTVEFKSGMSVDAER

SEQ ID NO: 20620 - protein, 519 aa, synthetic construct
MKKITKIDGNKGTSIIKPKLRVAAYCRVSTDSDEQLVSLEAQKSHYETYIKANPEWEYVGLYYDQGISGTKKENRTELLRMLSDCENKKIDLIITKSISRFARNTTDCLEMVRKLLDLGIYIYFEKENINTQSMESELMLSILSGLAESESISISENNKWAIQRRFQNGTFKISYPPYGYDNIDGQMVVNPEQAEIVKYIFAEVLSGKGTQKIADDLNQKGIPSKRGGRWTATTIRGILKNEKYTGDVILQKTYTDSRFNKRTNYGEKNRYLIENHHEAIISHEVFEAVEAALNQRAKEKGIEKRNDKYQNRYSFSGKIICSECGSTFKRRIHSSGTRKYVAWCCSKHLKQITECSMQFIRDEDIKTAFVTMINKLIFGRKLILQPLLDALRGMSNSDNLSRIQELEKQIEKNAEQRELLVKLMAKGYLEPALFNRENNELQMEADNYMGQKEALIHALNGELSKVQEVSNLIKFTNKAEMIDTFSEQIFNDYIEKIIVYSRVEIGFVLKCGITLRERM

SEQ ID NO: 20621 - protein, 521 aa, synthetic construct
MAANKNVMIIPAIKRVGNNRKEDETPKLRVAAYCRVSTDSDEQASSYEVQIEHYTEFIKKNSEWEFAGIFADDGISGTNTKNRDEFNRMIDECMAGKIDMVITKSISRFARNTLDCLQYIRKLKDKNVAVYFEKENINTLDAKGEIMLTIMASLAQQESQSLSQNVKLGYQYRYQQGEVMVNCSRFLGYTKDENKRLVIVPEEAEIVKRIYREYLEGSSMDKIKKGLEADGILTGAGKKRWHTSTIRKILSNEKYIGDALLQKTYTVDFLTKKRVVNNGIVPQYYVENNHEAIIPREIFMQVQEELVRRSRGHISTSGKKRNFSSNHVFSQIIFCGECGEIYRRVHWNNRGKKSIVWRCVSRLENTGLTCHSRTVLEDMIGIATVEAINKLIGQKDGFLTILKENIETVISETGNNVVSEIDKKLEELQKDLLRLANSKEDYNDIADEIYRLREERHKALAEEAGKKGSKQRLEDMEKFLNEQSTLLEEYDEQLVRRLIEKITVYDDKLTIEFKSGVEVDV

SEQ ID NO: 20622 - protein, 561 aa, synthetic construct
MKNKKIKCDIYTRVSTTMQVDGYSLDAQKEKLKRYAEFQNMEIVNEYSDEGKSGKSVEGRPEFQRMLDNIENGTDEVQFVLVFKLSRFGRNAADVLNSLQRMQDFGVNLICVEDGIDSSKDSGKLMISVLSAVAEIERENILVQTMEGRKQKAREGKWNGGFAPYGYELVNGELQIAEDEAEIIRLIYDKFIHTNMGISAIAAWLNQHGYKKKKRQNNTLDAFASSFIKGVLDNPVYCGKLAYGRRKNEKVSGTRNEYRIVKQENYMLHDGIHEGIISETDWELAHQKREKTGVKYEKTHSLDHEHILSGILRCPLCGSGMYGNVNRKKKKDGTLYKDYFYYACKHRRLVDGHKCGYRKQWSEEKINNAVEEVIRKLVKNPKFEEAILNKIGSRIDTEEIEKEIEGLEKQHKQLTGAKARLGQQMDNLDIMDKFYEKKYQDMETRLYRLYDEIEGVENSIEEVKNRLLNIQQQKISEENVYQFLLYFDKLYDKFTDLEKKEFLNSFVEQVDIYEQEQPDGRFLKHIKFRFPVYFGDRETQELCWDNESTVESVVLLQRENM

SEQ ID NO: 20623 - protein, 572 aa, synthetic construct
MLRQTNQQPITALYPRLSHEDELQGESNSISNQKRILETYAKQNGFSNLRWYTDDGYSGANFQRPGFQAMLADIEAGKVGTVIVKDMSRLGRNYLQVGMYTEMIFPQKGVRFIAINDGVDSAQGDNDFAPLRNIFNEWLVRDTSKKIKAVKRSKGMNGKPITSKPVYGYLMDEDENFIIDEEAAPVVKQIYNLCLAGNGPTKIARMLTEQQIPTPGTLEYRRTGSTRRYHPGYECKWATNTVVHILENREYTGCLVNFKTEKLSYKVKHSVENPPEKQVIFENHHEPIIDTQTWERVQELRKQRKRPNRYDEVGLFSGILFCADCGSVMYQQRYQTDKRKQDCYICGNYKKRTHDCTAHFIRTDLLTAGVLSNLRKVTSYAAKHEARFMKLLIEQNEDGGKRRNAAKKKELEASEKRIAELSAIFKRLYEDSVTGRISDERFTELSADYEAEQRELKERAAAIQAELSKAQEATVNAEKFMNVVRRHTSFEELTPTLLREFVEKIVVHECSYDENKTRRQDIEIYYFFCWQGGLARITARPIRHNAQVPDRNGKIFYTSITSLSHISKITGN

SEQ ID NO: 20624 - protein, 508 aa, synthetic construct
MKRVVFYVRVSRSTDESVSLARQAAELHDLADSEGWTVVGTFSDDGISGRVARAQADAALDAIATGKADVLAVWELSRFSRMGLGAVAKLVTVLRERPGSLFVAKKEGLRSDQPAFGIMASVIAEVAAMEAEATRDRIRSMRSHVLSQTDPDDQRWLGGHPPIGYRTVARSDGPGKMLVVDAYEAAQLREVARRLIAGHALTEVTHYLVEQGVPTAQSPARKARQTGQPTEGLAAGNWRITTLSKVMRSPTLLGRTTREVEVGKRSDGSAIIETRVVSDSAGMPIQRWEPVLDAGTFAALQAVLKVRGPNRVRKAASWLSGQLICGLCGHVMYATSRSDRPSGSFRCVNRNMVGQACPGVSIQRSLTEGYMESVILRMIGDLDEYRVEQEGAGPDSQALDTVAQAITDVQEALVADGADYSKLLPQLDRLKAERQRLLSDPGDVVTIRVPTGRKLRDAWAGGSIREKQFMIADMLDGIRVMPATSNGRTSRVEDRLVPVWMEHPVQLD

SEQ ID NO: 20625 - protein, 562 aa, synthetic construct
MSKRPARAVIVTRLSREVENSTSIERQEQYCREKCEAEGWEVVGVARDVNVSAGGRNPWQRAGLSEWIGKHKGDPGRSREFDVLVFWRMDRLVRSVTQLWELLIWAGENGVTLVSATEQMFDTTKAEGKLMISMVGAFAELELEAIRERTRADQRHRINSGHYRGSLPPWGYRPVQNEQGNWVLEPDPEQTKTIDRVVHALLHENKSVTAVCKELNADGVPTVRDLNHKRNGRPMRGLFWSTSALIRMLEKPTLLGLVTAQDEILDAHNRPARDAKGSRTYENEHLVLGPDNRPLQRAEPVMSREDFDAIQKLLSTRSGGNGTTGAGDSLLLGVLFCGVCGRKAYHYKREKQGRQNVYRCQTVASTVPVCSDKQVTVNAGWIEGVVTDTFLGLFGDSVRTVRVWQEGNDVSTEIEELHDSMDAVAGVLARQRPGSAAFNSLTTQIEEIQARLDELEQVETVPSGWRWIPTDQTVAQWWENASNKERNKYLIDSGVHVEFEHAGAKQRGIKPAVRVTFEDYAGILEQLTPGIPAARVADVLAEVPEGTTVHIDSAGAHLEERE

SEQ ID NO: 20626 - protein, 547 aa, synthetic construct
MKLLATYIRWSTKEQDSGDSLRRQTNLIDAFYAKHKNDYYLLPAHRYVDKGKSGFHQQHKAQGSDFRRMFENVMSGVIPEGSLIVVENFDRFSRADIDTAIDDVRQILRKGVSILTLGDGELYDKSALTDPVKLIKHIIIAERAHQESLVKQKRIAQVWNHKTQLARELKKPMGKQAPGWLELSEDGSHYIVDEDKASLVNIIYDKRLSGMSMFAICKWLNEQGYPTINQRKVRISKTKKPDGNWSALSVKHILTSRSVLGYLPAKISTEDRKTVLREEIESFYPQIVTDSKFYAVQQLLEETGKGKTSSGEHWLYVNILKGLIRCKCGLVMTPTGIRKPVYQGTYRCNGNKESRCNYGTVSRKLLDTQLCSRLFSKLSQLHDEATDTAKLDELQRRLNTVDSELEKLTETLIQLPNITQIQEALRVKQGEKDELIVQLSREKARVKSVSSLDLSGLDMESVEGRTEAQIIIKRLVKEIVVSGNEKLVDIYLHNGNMIRGFPLDGKDDHTLTLEEATDEMQSLDDMLIFGEPVTRIYPAGDMEEVDA

SEQ ID NO: 20627 - protein, 547 aa, synthetic construct
MKLLVTYIRWSTKEQDSGDSLRRQTNLIDAFYSKHKNDYYLLPAHRYVDKGKSGFHQQHKNQGSDFRRMFENVMSGAIPEGSLIVVENFDRFSRADIDTAIDDVRQILRKGVSILTLGDGELYDKSALTDPVKLIKHIIIAERAHQESLVKQKRIAQVWNHKTQLARELKKPMGKQAPGWLELSEDGSHYIVDEDKASLVNIIYDKRLSGMSMFAICKWLNEQGYPTINQRKVRISKTKKPDGNWSALSVKHILTSRSVLGYLPAKISTEDRKTVLREEIEGFYPQIVTDSKFYAVQQLLEETGKGKTSSGDHWLYVNILKGLIRCKCGLVMTPTGIRKPVYQGTYRCNGNKESRCSYGTVSRKLLDTQLCSRLFSKLSQLHDEATDTAKLDELQRRLNTVDSELEKLTETLIQLPNITQIQEALRVKQEEKDELIVQLSREKARVKSVSSLDLSGLDMESVEGRTEAQIIIKRLVKEIVVSGNEKLVDIYLHNGNMIRGFPLDGKDDHTLTLEEATDEMQSLDDMLIFGEPVTRIYPAGDMEEVDA

SEQ ID NO: 20628 - protein, 507 aa, synthetic construct
MKRVISYIRFSSEKQAKGDSLRRQSKMVTDWLKAHPEYYLDQDLSFRDLGVSGFTGKHLKGGLGDFLTAIEKGLVKAGDTLLIESLDRLSRQDVDQASELLRNILRSGVDVVTLSDGEHYTSESLKDPLALIKSILIMQRAHEESLRKSERIQAAWDAKKEAAKAGIKISKRCPAWLKLNDDRKSFSVIPEKVETVKRCFQLRLEGKSIWEIVRTLNAEGHQTLNQYKAGKFGQTSVQDLLKNRSVIGYFTPKGCEEISGYYPAIIDETTFYKVQQLSHYRYGRKPVSDKPLSVNLFKGVIRCSECGHALIITGFSDTRNGIYRCPLRNENRCNAKGLSRKQTDGTLLALLSRIDRFDSDMTNTIDTLKLHREHISSNIEKLVQLSLEIEDLSAITSKLKQLKGELSQVDADIEKETQRLKSIDVGCLSDCDLTTKAGRIEAQLIIKSAVKEVVLNTAKRRCKVTFHNGKVIDLPITENPSEDVTEAIQSLSEVTERGLIDVDVVEI

SEQ ID NO: 20629 - protein, 506 aa, synthetic construct
MRSVITYLRFSSAIQGAEGADSTRRQNDLFKQWLKKNSDAQVVASFSDEGLSGYKGKHLTGQFGDMLARTESGEFPEGTILLVESIDRIGRLEHLETEALMNRILGNGLEIHTLQDGLIYTKDALADDLGISIIQRVKAYIAHQESKQKSFRVSQKWGQRAKLALAGEQRLTRNVPGWIDPDTLKLNEHAETVRLIFKLLLDGESLHNIARHLQSNDIKSFSRRKDANGFSVHSVRTVLRSESVIGTLPASQRNDRPAIPNYYEAAIDASTFNKAQEILDKNRKGRTPASDNPLTINIFKGLFRCQCGASVHPTGTKRTYQGVYRCNNHLDGRCHVPPLKRKPFDKWMLENFLGMIDVGNDGESERKIAALQHEVEIVTSRIKKATALLLEMDDITELKAQVKELNQKRTELQTTIDTLKRKTSLTDKELPQLKDIDLTTKAGRVECQLILSKHLKGLTLGKDSVIVTLQNDTEITIPTNPLPLNDGTSIFEIAEKELLEIDAYQL

SEQ ID NO: 20630 - protein, 644 aa, synthetic construct
MLRPICYERVSSIQQIEGGGGLDDQRSALEGYLDRNSDKFSNDRIFIQDRGVSAFKNSNISSESQLGIFLQDVQNRKYGEGDALIVMSLDRISRRSSWAEDTIRFIVNSGIEVHDISASTVLRKDDPHSKLIMELIQMRSHNESLMKSVRAKAAWDRKIIEAVQNGTVISNKMPMWLKNVDNRYQVIQEKADLIIRCFEWYRDGFSTGEIVKRIADPKWQMVTVSRLVRDRRLLGEHKRYNDEIIHNVYPKVIDDDLFLTANRMMDRVMLEKNKPAEDLLLESDVVQEIFQLYESGLGSGAIVKRLPKGWSTVNVLRVLRDKNVVTQKIIDNLTFERVNQKLSMNGVANRIRKDITIAQDDYITNLFPKILKCGYCGGNIAIHYNHVRTKYVICRNREERKICDAKSIQYIRIEKNILKCVKNVDFQKLMIESTGSETSVLDGLREELSSLRREESSYNDKINERKLAGKRVGIHLNDGLTEVQDRIEEIEKEIISAQTVREIPKFDFDMDEVLDPMNIELRAKVRKQLRLVLKAVKYWMFDKRIFIQLEYFNDVLSHMLVIDNKRGGGEVMYEMSIEEKKGERIYTVHENGYVVFIASVTIGTELWSLALSRTRTIDSVGNYLSLLAREGFEIFVNEDQIDWF

SEQ ID NO: 20631 - protein, 507 aa, synthetic construct
MKRVISYIRFSSEKQAKGDSLRRQSKMVTDWLKAHPEYYLDESLTFRDLGVSGFTGKHLKGGLGDFLTAIEKGLVKAGDTLLIESLDRLSRQDIDIASELLRNILRSGVDVVTLSDGEHYTKESLRDPLSLIKSILIMQRAHEESLRKAERIQAAWDAKKEAAKAGIKISRRCPAWLKLNDDRKSFSVIPEKVETVKRCFQLRLEGKSIWEIVRTMNAEGHQTLNQYKAGSFGQSSVQDLLKNRSVIGYFTPKGCEEIAGYYPAIIDETTFYKVQQLSYARHGRKPASAKPLSVNLFKGVIRCSECGHALIITGFSDTRNGIYRCPLRNENRCSAKGLSRKQTDGTLLTLLSRLDRFDSDTTNTIDMLRLHREHISSNIEKLVQLSLEIEDLNAITNKLKQLKNELSQVDADIEKETQRLKSIDVGCLSDCDLTTKAGRIEAQLIIKSAVKEVVLNTAKRRCKVTFHNGRAITLPITETPSEDVTEAIQSLSEVTERGLIDVDEVII

SEQ ID NO: 20632 - protein, 506 aa, synthetic construct
MRTVITYLRFSSATQGAEGADSTRRQNELFKQWLRKNSDAQVVASFSDEGLSGYKGKHLTGQFGDMLARIEAGEFPAGAILLVESIDRIGRLEHLETEALMNRIIAHGIEIHTLQDGLIYTRDALSDDLGISIIQRVKSYLAHQESKQKSFRVSEKWKQRAKLALAGEQHLTRNVPGWIDPDTFKCNEHAETVRLIFKLLLDGESLHNIARHLQSNDIKSFSRRKDANGFSVHSVRTVLRSESVIGTLPASQRNDRPAIPNYYEAAIDASTFNKAQEILDKNRKGRTPASDNPLTINIFKGLFRCQCGASVHPTGTKNKYQGVYRCNSHLDGRCDVPPLKRKPFDRWMIDNFLGMIDVGNDGEAEGEIASLQHEVEIVTTRIKKATALLLEMDDIDELKIQLKELNQKRTELQTTIDNMRRKASLTDKELPQLKDIDLTTKAGRVECQLILSKHLKGLTLGKDTVTVTLQNDTEITIPTDPLPLNDGTSIFEIAEKNLLNIDTFQL

SEQ ID NO: 20633 - protein, 605 aa, synthetic construct
MPESPPRALIVIRLSKVTDATTSPERQLAECRAICEKRGYEVVGVAEDLDVSGAVDPFDRKKRPHLARWLHGEHLDDNGEPVPFEVIVVYRVDRLTRSVRHLQKLVAWADDHKKLVVSATEAHFDTSLPFSAVLIALIGTVAEMELAGISERNASAARHNIQAGRYRGSTPPWGYVPSNDTGEWRLVRDKEQADVINEVARRVIEGEPLQKIAHDLTRRGILTPKDNFAKQRGREIKGREWSVTQLKRSLLSEAMLGHAVSGGAAVRNDDGSPVVRSEPILSREIYDRVAAELSSRAKRGEPNKRTSSLLLGVISCGNPCLHKQQGHECPEGCSGTCDEPVYKFNGGSHSQFPRYRCRTMTRAYKCGNRTIRADQADAQVERTILALLGSSERLERVWDAGEDHSAELADINDELVDLTSQLGVGAFRAGTPQRAKLDARIASLAERQAQLSSEAVVPAGWKLLPTGELFGDWWSRQDLTARNVWLRSMGVRARFKRDDKTLYIDLGNLNDLISGLKPGGTAQRVRGGLQAMERNGIQGMVFSDADSEVMPAPAAGYMWIQPVEGVWVYTSEALLAAAAERQALRREKIEDEFAYGPGDFDEDWD

SEQ ID NO: 20634 - protein, 506 aa, synthetic construct
MRHVITYLRYSSAIQGAEGADSTRRQNELFKQWLRKNSDAQVVASFSDEGLSGYKGKHLTGQFGDMLARIEAGEFPASTILLVESIDRIGRLEHLETEALMNRILGNGIEIHTLQDGLIYTKDALADDLGISIIQRVKAYIAHQESKQKSFRVSQKWEQRAKLALAGEQRLTKMVPGWIDPDTFKCNEHAETVRLIFKLLLDGESLHNIARHLQANNISSFSRRKDANGFSVHSVRTVLRSVSTIGTLPASQRNDRPAIPNYYEAAIDAATFNKAQEILDKNRKGRTPASDNPLTINIFKGLFRCQCGASVHPTGTKNKYQGVYRCNNHLDGRCDVQPLKRKPFDRWMIDNFLGMIDVGNDGESERKIAALQHEVEIVTARIKKATALLLEMDDIDELKIQLKELNQKRTELQTTIDNMRRKASLTDKELPQLKDIDLTTKAGRVECQLILSKHLKGLTLGKDTVTVTLQNDTEITIPTDPLPLNDGTSIFEIAEKELLEIDAYQL

SEQ ID NO: 20635 - protein, 549 aa, synthetic construct
MYTARSQEGASSTTEDETGPSDLDLRGRPAGLATPDELARLHPDAVFLIAYSRISLDWRKHSRKKAATSSWSAGKGVANQHRRNDKNAARHGAIIVHRYTDNDLSASKRDVVRPDFQAMLRDLRRGHTPEGYPVHGAICVDQDRVQRTDRDWEDFVDALTLDPTRRFYTPSGPMDLTEESEIIKTGVMAVVNKAESLKKKRRIRDWHQDRILDGLPHSGPRPFGWEEDRENLRPAEATYLAWAMDERIKGKAMKTLCLEAKRRGLTGTRGGEIVPQTLTQMMTAPRVCGYRANRGDLVLDDHGEPIVGIWKTICSPEKWIAVCATFGDGSTYLARGSGTPRITGIPKTIKYMGSTLLRCQYRFGEDTEDTSLIGRVCNEPMGGSKASSKKSPYVYTCARCSRNAISGPMVDMQIQGLLLAKLDQAQATFIPPDLAWPKEDELRQRADKLAELEKEWEADTISSEMFYRLAPKIEKEVKVLRRERAQFELVSQAEREAPGDVARKWLAGEYDLAQKRKVLFEAFAAIQVRPGRKGNKTPDPKRLTPVWHQ

SEQ ID NO: 20636 - protein, 525 aa, synthetic construct
MKTVRDVLEKGKKGAFYARVSSDRQTIDAQRHHVYEFIKNYECEIVKEYVDHGESAFKKKLIKRPKMMELLRDVEQEKYDFVITYADDRLARSEFEHAQIRLIMKGADTDVILTSTAEIYTERDIITQLIREGGNRYEVERISARTKDAYKQRTDYGEWMGGPVPFGYEQDEKTKKFSVLKDEKEIVLKIYQLYQSGEGFAGIAKKLNEQKEKTNTMIWRKERVKQILTNPIYAGYVTFGRLKSGSGNSIEDLSKWKMAQCKDIPPIMTQEEWFATFHLFEKKRNKELPPKQFKTGYVLRDLIYCRNCDHPLLPKNQETTGNNGKKYGMKKYMCSNKTCKIWFPTDELHTLVFDSVMKEVTDKVISKSQTELMYEIERGLEKDIKRIQKEIQRLKRQVNDSLVWIKDTEREIDVLYNRKKRLVEADPEIDPLLDVMLDYRVHLLHEIKGSEELIAKKEAEVKRIEEVDSNRRILEKNVLQAFQIEFANIQTDVKKVRQFLVYLIDKIIIDQNGKTEYILKINLEQ

SEQ ID NO: 20637 - protein, 488 aa, synthetic construct
MESYAVYVRVSTDRDEQVSSVENQIDICRNWLERNGFNWDEKRVFKDEGISGTLFVDRPSIQLLLQKAKAKEINMVVFKSISRLARDLKDSLEIREVFLAHHVRIISVEEGYDSVKAGKNDMAFELWSLFSAQYSRTLSSSITAALAVKVRRGEHIGKVPYGYNRENQKLVINEEEAQVVQMMYKWYLEGWGYKKITNELNRLGIKSKTKKNWQMTSVQRILQSSIYKGTFILNQYTSVKVGGKKKQIRNPKEKWFVFPNHHPKIVEEEIWNQANRKKNKTNKTKITAWNEFRNLAKCAVCGSNMVIIQSHLKKKSGERTEWKYLKCSQYRRAGKHGCVNHVPIQYGDFRQFIIKLLVEKGESVTLRLQSNVERGQEKKIKKLQQLMSTNQQKKKTLLDLYLEELINKEEFEKKRNDLEAEIIKADHELLVIQNGNHVQMDIQTIKQAFEQLQKQEQDLIHVFQTLIQKINIHQNGTVDIIYTFESPL

SEQ ID NO: 20638 - protein, 522 aa, synthetic construct
MNYNNDKVAIYTRVSTDEQANEGFSLQAQEDHLRQYAKAKGYEVYDIYSDEGYSGKDYNRPEIQRLFKDLSQDKFKGILVKSVDRISRRLSDVTKLIDDVLVPRNSYIVISDANLDSSTTGGIAIIHLLATFAQLERSMIVQRVKAGMGKRAELGYWNGGRVLGYDVKNKELKVNKEEAEIVRKIFHLRTEGKGYKSIAIMLNQQGFKTKRGGLFSIGTIKTILENPLYIGYCRWGRHKNWNVERRKGKTDEYKFVKGKHEPIVSEDLWKRVQGVNYAHKKSISKNRNFNGEFVLSGILRCPSCGAGMVMCKTKKRDKSGYHLYYMCQAFHSKGKLACKSNLIRKEDIEEKVLQCINKIILIPSIVDKTFERIQEKKERGIERIKNDLLYINEELKRKKKFIKKLNKDYFDEKIRVEAYTELSEPLREEIDELESEKGKLDREIESVEIPITKEEVIKALENFANLYENATYEQKKSLLRAIIKKIEVQPNRKEIKGITYWFDCDNGQDDALLVSKEGRTIS

SEQ ID NO: 20639 - protein, 522 aa, synthetic construct
MNYNNDKVAIYIRVSTDEQAKEGFSLQAQEDHLRQYAKAKGYEVYDVYSDEGYSGKDYNRPEIQRLFKDLSQEKFKGILVKSVDRVSRRVSDVTKLIDDVLVPRNSYIVISDANLDSSTTGGIAIIHFLATFAQLERSMIVQRVKAGMSKRAELGYWNGGHVLGYDIKNKELKVNAEEAEIVRKVFNLRAEGKGYKKIAVILNQQGFKTKRGQLFSICTIKTIVENPLYIGYCRWGRKKNRIEETSKEKIDEYNLVKGKHEPIISEGLWKKVQGVNYAHKESISKNRNFNGEFLLSGILRCPSCGAGMVMHKTKKRDGSGYHLYYMCQTFHSKGKLACKSNLIRKEEIEDKVIQCVNKIISMPSIVDKTLERIQEKREWGMERIKSDLLYINEELKRRRNRIVKLNKDYFDEKIRVETYTELSDPLRKEIDELEAEKHKLEKKIESAEVPITKEMVIRALGNFTDLYKHANYELKKSLLRAIIKKIEVQSNRTDIKQITYWFDYGNNPEDALLVSKEGRTIS

SEQ ID NO: 20640 - protein, 473 aa, synthetic construct
MRVAIYVRVSTEEQAKEGYSIEGQKQHLKHYCIDNGWEVVGIYADEGLSAKDMNRPQLQALLKQIEQGDIDHVLVYKLDRITRSVPDLYKIKETMDKHNCSIKSATESIDTSTPMGRLVITMSAGMAQWERETIGERISFGLKEKVRQGYWSLNTPPYGYDYDKETKSLIANEQEVNTLRMIHKLYRKWGMAKIARYLNSNNIPTKTMAKWHATSIRQILTGVSQIGKIYWRGEIYEGKHKAIISKEEFEHTQRLIKRRSNEQPRSVSSQYIFSTKLICPHCGRYLNGYYTTTSGKTYYNYRCKGKQEGICTKGKSVSQINAEKAFIEYLGDYSNRDKITDVANKAENELSRNELKNDVESLTKQLKKLENKKKKWQYAWAEDIMPYEDFKKRMEEANKEEKEIKEQLKEYKDNEEETEKLSMHELSEVLFDIKENWYSLNNEEKKMLVSDVIDKIHYDYNGSRIVIKSVIFM

SEQ ID NO: 20641 - protein, 534 aa, synthetic construct
MTADLYIRVSTDEQADKGYSQRDQEERLRKYCESNQIKIRQVIFEDHSAKTFNRPKWNGLLLDLKKKKNVVDFVLFSKWDRFSRNAGDAYQMINILRKLGVEPQAIEQPLDLSVPENKLMLAFYLAAPEVENDRRALNVLLGMRKAKKEGRWMGVAPVGYANKITEDGKKYIAPVEPEASIMKWVFETLAEGQLNVEQIMKQAFARGIKCCKANFWNLLRNPVYCGRIYLSGYKEEESRHVQGLHQPIISEALFYEVQDYLNGKKRAYRAKVGSMDELQLRGYLICPKCGKLLTGSASRGRNGRYYYYHCVSSCGARFKAENANKLFSGELKKLVPKPGMTEVYKVVLQEEFKAQTKAQRDDLKQVKEALEKANTELANARKLLLSNEIEPSEYRSIKSEYEKKITGLESRLIELSQEGKSIEPLLNKALTNLTCLDKLYEKADNKAKREIIGSIFPEKLVFDGFQYRTTRMNEAVSLIYSLDKGFSQNENGQTESIFDLSTLVPRTGFEPAHPCERCDLNTVRLPISPPGLPL

SEQ ID NO: 20642 - protein, 506 aa, synthetic construct
MAVRKSAKKVKTGRVAIYIRSSREREGGEDETLFTQRKILTDIAKNKGYSYDIYEEIESSVKEDRDELGKMKNKLVSCEYDRILVTKLDRLARDTGIFTDIKKICIKNGILIETTTEEIDLTKKTDKMMYNFKSLIAESEYDEIKDRLLTGKFNTVAKRNRWMGSVAPLGYRWDRNVKQLIVVPEEKEIIRKMVELALQGYSSRQIASKLNAMGYRGKKGSPFKTDRVLRILSNKAYLGMCEYYSSYLNETAIAKDCHEPIMTVQEYNDIQALIKSRVSKENLSSLGVKSPVNKILKCGVCGKGLTIQLNNKVRKSGKNYSFYQIRPCLHYLDDLNTVRCNNAGVRVSVIEEAVIEYLKQHKPEIEASIQKLESKDTSELENQLMDTIETVKSNISKYQRRLDKAYEAYLDDLITKEKYSKDSETFGQIINELEDELVLLRNKLSNLDTDAQKEKYMDAVEIIEKYELMSMEEQNASLRLLIKEIVYTRTNETNNVPHVTIIWREL

SEQ ID NO: 20643 - protein, 507 aa, synthetic construct
MDLSKILTPGLKGVFYGRHSTHKQVMDTQLRSAYELVEKYDCTIIEKILDKGVSSRKKNREGFKSLISAAYSKEFDFVIIYSHSRIARIPEEHDTFRATMHILDIPIIESETESLYDFGDTIFRAIKDGVAKYELDKIRVNTKNAIQTLAEKGRWTGGRAPFGYKYTPKKMSGTEKVEIIDLEIELVKKVFDLYKNNNGFTSIANQMPPNSHRGKAWNKDRVKNIITNPFYAGYISIRRKYENKHNAIKDRLEWVMEKSSLIPAILSIEEWEYCWSMYINKKDRKVPPKHFKTAFLLTSLLKCQNCDNLLTGKDQRTTSNQGKIYGKRLYLCKKCNYKIDADDAHDTTLKVFKSYQGVETVKVITAVQENVEGEINNIRGNIEVLEASWKREKEKLQLCIIEIEKCFKEKDQKEAHIKILGITKERLLDKVHQFERIIEEKRTRIKFLVEVQKNQSLIEEQLRNFQTASLSQSQELRALFLYVFEEIIVNDAGHLHCKFRFNLDEAK

SEQ ID NO: 20644 - protein, 487 aa, synthetic construct
MKHESNELKERSIALYCRVSTDEQAREGVSLDEQQERLTAYCRAMGWSEAPLLFIDDGYSAKDLDRPQLKRLLEAMKNGEISKILVTKLDRLSRRLLHLLELIESFHHVNVSFISISEAFDTNTPAGRLTLQVLGAVAEFERERIRERVFENMYHAASHGKWLTQSPYGYRLKDKELVIYEPEAKIVQQVYDWYLEEGNGYYTIAKKLNDENIPSRQKKEWSIRSIKLMLTNPVYKGTLVWNRLDSSKKKRSEKDEKDWIVLDDALPFIIEKEAWDKVQNKANKKQMAPRAQTSPHLLGGLLKCGKCGSGMSIGWSGSAKKRYRVYRCSANKNKGTCTSKQYKAEDVETWFKKGLLQLSNTIQTTMIPHLIQKSIAENTNTKDQKIRSAKNRYKRKVEAYTAGLIEIEDLAEEKRRLEQLIEEENDQDQTTQIDINHLQQLIMKKMKNIIDAIDVLPVPEAKSLISTLVEKVILFNEEELEIELNVL

SEQ ID NO: 20645 - protein, 630 aa, synthetic construct
MKKCFIYHRVSSEQQRSGTGIERQEQNLNAYVERTNLLSEMDDPEAIIISDQGVSAFKGLNMSEGELGRWMEQVRGGMWDDSHLVLESIDRFSRQNPFTVVAYLSELVNHNITIHDVSLNMLINRSNSAMLPLVTMSAQRAYEESKLKSDRIRDGWKRRRDQAFKQGTIVTNKRPQWIDVVDDRYVLNEKVAVVREIFRLYQTGIGTPTIAKMLNERGSEWLFESSRLWRGESIHKLLRNKRVTGSIFISEIIRDYNSTFNPVDQKLSEMDVYPIAISKEEFDLVQELLKSRRSGVKVTGGKFLKKFYDPDTNKPYLDRDGNVIELEVDTGKEITQSNIFNGIFRCARCGEAMYHNVVVTKRDSKKRGKFTEEYRYIRCIAERDALCENKALQYEVVEKFVIEHIKNLDFTKILRPNENNPEIELVRLKIEEEEAHIEEYKQNIERYRNSGKKIPFAVWGELEESEDRLKELKVRQSTFTEVQVDTDYLRTVDPSVLFDVKNIEVRSRMAAELSKILDGIQLYRTGKHYVITINYKKVEVLKHVLFVEAKKVPELVSCVAIERFGDTVAYSTPSFCIAVEGGTSPHLINVEGEPLSIIDWSLLLNYVDAVDPNDDVGIWMRDNMNFVFTN

SEQ ID NO: 20646 - protein, 518 aa, synthetic construct
MEKVSIYLRKSRADIEAESRGEGETLAKHRSTLLKVAKEKKLSIVKIYEEIVSGESLMHRPEMLELLKNVESKKYDAVLVMDVDRLGRGNMQEQGLILETFKKSCTKIITPRKIYNLDDEFDEEYSEFEAFMARKELKMINRRLQNGRVRSIEDGNYISPNPPYGYEIDEGKDYRTLKPHPEQAEVVKMIFEWYVSGLGSGKIANKLNDLGYKSYTGIPWRSSSVLNMLKNLVYTGKVVWGRKDIKKSTEVGKVKDTVTRPKEEWIIADGKHPALVSEELFEKAQEILNKRYHVPYQLENGITNPLAGLIRCENCGASMVLRPYPDKDHQVMCYNNCGNKSSKLKYVEKEVLAGLAEWCLQYRAQWDIDNKSKRKKSKLTSSIPVLEKAVENLQKELVELENQKNSLHDFLERGIYDVDTYLERSQNLATRIDATKVSLSKAKLVLGQEMQREKAQIDIIPRIEKVLDVYPKINDPAHKNELLKSVLDYAAYSKDKSKRNDDFSLRLFPKLPKQTLDS

SEQ ID NO: 20647 - protein, 522 aa, synthetic construct
MAVRNITVIPAKARVGNTASEVQIPKLRVAAYCRVSTESDEQATSYEAQIEHYTELINKNPEWKLAGIYADDGISGTNTKKREEFNRMIDECMAGNIDMIVTKSISRFARNTLDCLRYIRQLKDKNIPVFFEKESINTMDAKGEVLLTIMASLAQQESQSLSQNVKLGLQYRYQQGIVQVNHNRFLGYTKDEEGHLIIEPKGAEVVKRIYREYLEGASLIEIARGLMADNILTSAGKEKWRSETIKKILQNEKYIGDALLQKTYTVDFLTKKRVKNDGIVPQYYVENNHEPIIPRDLYLQVQEEMERRKNIHSGKSGKKRVYSSKYALSTIVICGRCGDIFRRVHWNNHGCKSIVWRCASRLDKTAADCLARTIREEDLKSAVVQAVNKVFESKTQFMDILNRNISVVMNQIDSSEIELINQKLEQLQKELLKQANNNQDYSILANEIYRLRDEKETAMVKNAGFASQKQRMTEMTKFLKNQKSIGKEYDEHIVRKLIEKITVYDEKLTVEFKSGMELDVEM

SEQ ID NO: 20648 - protein, 521 aa, synthetic construct
MKKVTKIEPASVSSLVQRKLRVAAYCRVSTTSEEQLESLNAQKEHYEKYIKAHPDWEFVGLYYDEGITGTKKEKRKGLKAMLTACELKQIDFIITKSISRFARNTLDCLEMVRKLIGLGIFLYFEKENLNTQSMESELILSILSSMAQDESTSISQNSKWSVQSRFKKGTFKISYPPYGYANIDGKMEVIPEKAEIVRGIFREALAGKGCYTIARELNESNTPTKKGGKWTGTSVRGILSNEKYTGDALFQKTYTDSQFNRHINSGQQEQYLVTNHHEAIINHKDFDRVQAVIRQRGSEKSVKKGSSKYLNRYVLSGKIICGNCGSHFKRRTHYTAKGSYIAWTCQTHIEHKDKCTMKYIRDDEIHKAFVLMMNKLIYGYKVVLKPLQAALKTMNGEERITALANLDERIVKNTDRKRVITELVGKGFLDATFFTKELSDIAAEAEMLAQEKKRLENSATGNQKQRLELDTLIHYIVKKPEIREFEDTLFERFVENIVVYSRNEIGFCMKCGITLRERMVN

SEQ ID NO: 20649 - protein, 529 aa, synthetic construct
MDKSKTAIIYARVSTARQADEGVSIDSQIEQGQRRAQELNATVAKVFRDDGVSGRTANRPAFQDAMKYCEAFEVDYFIVWNTSRFARNKIDAASYKRLLDEVGTRVVYVSVNIDNETDEGWFSESIFEIMDEHYSRQVSRDTRRSMLKNARDGFWNGGFAPYGYEAVTDGKRKRLAILDDEAVVVREMFRMFMAGVGCKSIAMNLNDRGLLYRKGNSWTKGHVTRVLKNPAYAGLIVFNRRDKNGVLERPESEWIMTKAHPAIITDEMAARVREEFRERAPELGKGSPNSGFVFTGILRCGECGAAMQTESATGRNKVYHYYNCSMHQKSGGCRSRRISAGEFDAWMMDMIVEHVLTRERMKEVVTEIQELTSTWESDRDRRMTAVVRKIKEAGRRRQNLFDILELHGKAAPNLGDLTIRLREINDTIKRLERELAAIEDEEIPAMEATASQIEAARRALISIVKKSPDAKKLRLLMGYFIDKIVVNEGDIEMEYRPERIVSAKSRHEPTVHSSEIWLPEQGSNLRPAD

SEQ ID NO: 20650 - protein, 526 aa, synthetic construct
MKGNRAVLYLRLSKEDADKISKGDDSASIKNQRLLLTDYALTHNFKIVKVYSDDDESGLYDDRPDFEKMMIDAKLNEFDIIIAKTQSRFSRNMEHIERYLHHDLPNLGIRFIGVVDGVDTDNEENKKSRQINGLVNEWYCEDLSKNIRSSFKAKMKNGQFLGSSCPYGYKKDPQNHNHLVIDEYAAKIVRRIYKLYLSGYGKAKIGSILSSEGVLIPTLYKREVLGENYHNSRALETTKNWSYQTIHTILNNETYIGNLIQNKVNTLSYKDKKKKMLPKEKWIIVENTHEPIIDSEVFEMVKKLQKTRTRSVGSMEENGIFSGLIYCADCKHAMSRKYARRGSKGFIGYICKTYKTQGKVFCDSHTVNIEDLEEAVLFSIKNEAKKILKEEDIDELKKMEVYNDSRECYEMQLESIQKRLDKIEKFKRKTYDNFMEDLISKEEYLTYIAEYDDEIKELQKQKDVLVGKSDLQQELNTQYDEWVEAFKNYINIRKLTRDVVLELIDRIEVNRDGSIIIYYKFQNPYD

SEQ ID NO: 20651 - protein, 532 aa, synthetic construct
MRALIVIRLSRVTDATTSPERQLAKCRELIAQRGYVEVGIAEDLDVSAGKTTPFDRPQLGKWLSDPTQYDVIVFFRVDRIVRRLFDLADLIRWSREHGVTLVSATEAHFDLSTDFGDIIALLVAKVAEMELEAISERNASAFRHNFSKGKYRGGVPPWGYIPERDENGEWRLIQDPEQVTVILEVVERVLAGEPLRAIAHDLTGRRVLTPRDRFAESRDRKPHGYAWHSAALKRALTSHTLLGRVVTREQALDAQGRPQRNAKGRKVFGDDVLVTADDGTPVVRAEPIISRDVFDRLGVELAGRENRKEPTKRTSGLLLRIIFCGECGRPAYRLKGGAGRKPRYRCSSAQTADGACGNKTIALEYADSEVERQILQNMGPLERKRRVWFAGHDTTDELAEVNELLADLTDQIGVGMFKRGTPQRAKLDQRIAALTTRQAELSSVPAQPAGWRYEPTGELFSDWWNEQNDEAKNIWLRQSGFRYEWSSHSDERGRVVVDSLKQVGDLEMDLDGDQVFGPILDIAAALSDPGPA

SEQ ID NO: 20652 - protein, 497 aa, synthetic construct
MNGVIYARYSSDNQREESIEGQIRECMEFAEKQDINILGTYIDRALSAKTDNRPDFQRMIKDSTKGLFDVAIVWRLDRFARNRYDSAHYKMILRKNGVKVVSARESIAEDSTGILLESVLEGYAEFFSAELSEKVRRGMKENALKCKSNGCSIPMGYVVDSERHFQIDPVAAPIVQEVFNQYAEGATMKEIADGLNAKGIRSSRGGPISLNIISHMLKNRRYLGEYRYGDIVTPGGMPVIISEELFERAQERMKQNKKAPARHKAEDDYLLTTKLYCGKCGAFMVGESGTSHTAKIYRYYKCTNTKQRKTCDKKAVQKDWIENFVVSRIMQELMHDDELERLIDALLNLQSKESRELPLLERQLAETENGIRNLLDAIQQGLLTESTKERLRELEETKSKLQTSILQEKIRHPLLTREQISFFIYRFRDSDITKREQRQRLIDSFVNAIYLYDDKVVITLNYTEGAKTISLRDIEGSDLLKEATPKNVSIRSVEAFF

SEQ ID NO: 20653 - protein, 503 aa, synthetic construct
MSERVIGVIRLSDKTDVTTSPERQRASIENAAAARGAKIVGWAEDIDVSASQRSPWERPELSKWLDHPEQWDALMFWRLDRFVRKVADFAEMIRWCQSRGKNLISATETIDIRSPIGRVIAYIVSAFAEMEAEAIRERVTGSHDYLRRNGRWGGGLAPYGYQAEPLPGGKGVRFVEDLAAAEIVREIARRVIARESYLSIAANLNERGVPSPTNQRNINAGRPVDPRGSWTSKSVTAIITSERIRGRVEYKGEVVRDDEANAVLRGPELIDAEIWHALQREFARRSRPDRRRTSSAHPLLGVVFCGSCQERMYQGWATEKGRPMRRTYVCRSRMRGRDCASPASVSAEAVDKYAEEQFLLKVGAWPIKVEVVEAGEDHRQEVEEIEQALDRLETDRYERGLFAGQEGSLRYERRHRALSDKLGRLKELPYRPPTSTWVDTGRTYGEDWAAGDVIERRRMLVDAGCHIEVKPAGRGKRDIRARLSFALGRHTDSASVPPLEEGP

SEQ ID NO: 20654 - protein, 524 aa, synthetic construct
MKVADLYIRVSTDEQADKGYSQRDQEERLRKHCSSLNITIDKIIYEDHSAKTFERPEWKKYLFNIRKGRGSRQNKFLFFTKWDRFSRNTSEAYQMISNLNKLCITPQAIEQPLDLRVPENKLLLAIYLSTPEVENDRRALNVTYGMRRAIKEGRMMGIAPYGYINRCTEDGRKYVAVKEPEATNMIWAFKQVAKGHLPTAVILKEMNRREGRKLTKNSFMDGLRNIAYCGKLFLKAYNDEEEKIVEGKHEALISEELFMKVQRVLHRKSNKDDFLPAGRIINEERYPLRGLLLCPKCDKTLTASSAKGRSKHYYYYHCTTSCGFRHNSEIVNDLFVEELSKFRFSIGAEKILKTILEQNFSIVSNGLNDERKVLQNKLNAIEGRIDKARDMYLEDKLDEEDFKRIKMKYKVEIEEINFKLNSLKNSGHTDDIEKKMSQALNAIVNISERYNNASTIDKRAIVGLIYPEKLTFDGEYFQTTKINSLAGNIALINKELGNKKNRQRSEKTSNVGLVTSTGFKPVTF

SEQ ID NO: 20655 - protein, 545 aa, synthetic construct
MQDEFPGNQHSSGPVRAYSYVRMSTRKQLRGDSLRRQLERSKAFADEHSLLLDDSLQDLGVSAWRGRNFKTGALGRFLSMVENGEIPKGSYLLIESLDRLSREAVPDALTLFMAIINAGIIIATLGEDRQIYSRDRLNGDWTKLIIGLAVMSRGHEESQTKSERISALAKRKREQAREGEGHITSITPAWIDAKRIDANRYEFTLNHHAETVKAIYEMATRGLGATVIARKLNADGVPAFKSKDGWYQSIIKALLSRHDVIGTFQPHRMQGGKRVPDGDPIEGYFPAAIEKDLFLRVQAMRSIPGRPGRKGDRFANLFTGLCHCAHCGGPMTMKLSRVKGNENGRYLVCANYVRGHRCADGNRHFRYEPLEAVILDHVREINLAETLQAARFDDARRKLDETIAELTLQLEELRRKEQRLAQAIEDDNEPPNAILNLLRARQSERQAVEAELRHQQTERQRQSIRHDNSANMADRIAKLRVAWENAEEATRYELRSEAHTAIRELMTEISFDSPSYTAVVIIENGVSAYRIKDRMISALFRAFAA

SEQ ID NO: 20656 - protein, 541 aa, synthetic construct
MQASQGVVYSYLRFSDPRQAAGNSADRQAEYAKSWAAARGLTLDESLSLRDEGLSAFHQRHIKQGALGVFLQAVDEGRIPAGSVLVVEGLDRLSRAEPIQAQAQLAQIINAGITVVTASDGREYNRERLKAQPMDLVYSLLVMIRAHEESDTKSKRVKASIKRLCEGWIAGHYRGLIRNGSDPRWVRLVDGDWELIPERTEVVRFAIEKYREGYGADRAFSMMQERGFDTSYLGISPQQIYRLIKLVALKGAKHICVDGEDYLLEDYYPRLLSDVEFEELQLLRGQRSRRRGKGAIPGIVTGIGITYCGYCGTAMTAQNVMHKVRPDGTLTDGHRRIMCMSYMNKGGCDVGGSCSVAPVERAVMSFCSDQMNLLRLQQPAGPSGDLQQGVMSSRKQVADLEAQLGRLTEALALGEGDGVLPITFLRKARDLEEQLTKARTKLLQAERELAGIASRQRPADARLWSDLTAGVEAQEVEARDKVRQLMIDTFERIVVYMRGVLPEGRRAWYIDVLLISKAGQRRWLRVERKSGKWAAGIDRPG

SEQ ID NO: 20657 - protein, 361 aa, synthetic construct
MSKVFSYIRFSSAKQSAGDSYARQVKAAKAFCDEHGLELADSREYLFFDKGRSAFKGRHLDDTGELARFLGYVEDGTIPAGSYLVVESLDRLSRERVRDALPRFLDLLAKGINVYTSVDKRLYTKDYNELDLIISIISMSRAHEESATKGGRVSSAWRAKQKEARTTGKPLGKNRPLWLDVTPDGYVLNPGKAAIVHRIFDLSTKGHGSRIIAATLNQEGIPAFSAGRKNFSGLWGFSTVRHILDSRTVLGEYQPHIFIDGKRTPDGEPIKDYFPSVVTENEFYLAQAARTSRKTHSVTNATTNFNVLAGILNCYKCGSAMHLQGQRGRKYYKCSKTTRGLCDAGIISAPRTEEVFKDLNS

SEQ ID NO: 20658 - protein, 547 aa, synthetic construct
MKLLVTYIRWSTKEQDSGDSLRRQTNLIDAFYAKHKEEYYLLPAHRYVDKGKSGFHQQHKAQGSDFRRMFENVMSGVIPEGSLIVVENFDRFSRADIDTAIDDVRQILRKGVSILTLGDGELYDKSALTDPVKLIKHIIIAERAHQESLVKQKRIAQVWNHKTQLARELKKPMGKQAPGWLELSEDGSHYIVDEDKASLVNIIYDKRLSGMSMFAICKWLNEQGYPTINQRKVRISKTKKPDGNWSALSVKHILTSRSVLGYLPAKISSEDRKTVLREEIEGFYPQIVTDSKFYAVQQLLEETGKGKTSSGEHWLYVNILKGLIRCKCGLVMTPTGIRKPVYQGTYRCNGNKESRCNYGTVSRKLLDTQLCSRLFSKLSQLHDEATDTAKLDELQRRLNTVDGELEKLTETLIQLPNITQIQEALRVKQEEKDELIVQLSREKARVKSVSSLDLSGLDMESVEGRTEAQIIIKRLVKEIVVSGNEKLVDIYLHNGNMIRGFPLDGKDDHTLTLEEATDEMQSLDDMLIFGEPVTRIYPAGDMEEVDA

SEQ ID NO: 20659 - protein, 507 aa, synthetic construct
MKRVISYIRFSSERQAKGDSLRRQSKMVNDWLKAHPEYYLDQDLSFRDLGVSGFTGKHLKGGLGDFLTAIEKGLVKAGDTLLIESLDRLSRQAVDRASELLRNILRSGVDVVTLSDGEHYTKESLRDPLSLIKSILIMQRSHEESLRKSERIQAAWDAKKEAAKAGIKVSKRCPAWLKLNDDRKSFSVIPDKVETVKRCFQLRLEGKSIWEIVRTLNAEGHQTLNQYKAGKFGQTSVQDLLKNRSVIGYFTPKGCEEISGYYPAIIDETTFYKVQQLSYARYGRKPASDKPMAVNLFKGVIRCSECGHALIITGFSDTRNGIYRCPLRNENRCSAKGLSRKQTDGTLLALLSRLDRFDSDMTNTIDTLKLHREHISSNIEKLVQLSLEIEDLSAITSKLRQLKNELSQVDADIEKETQRLKSIDVGCLSDCDLTTKAGRIEAQLIIKSAVKEVVLNTAKRRCKVTFHNGKAITLPITENPSDNVTEAIQSLSEVTERGLIDVDEVII

SEQ ID NO: 20660 - protein, 529 aa, synthetic construct
MTNRPKAYSYVRFSTPEQAKGDGRRRQYKAAIEYADKHDLELVKDGNYAFLDAGVSAYRGNNINRVSSSLGRFYEYVKEGKIEPGSYLLVESLDRLSREQVTEALVRFLDLLNSGIIVVTFGDGTVYKKSAEPMQLVMSISHMSRAHSESSVKGQRVSDAWQQKQALARSEGVPLGAACPQWLSFDGEAYKVIPERVCVVKRVFELTVQGYGQRAIVKIFNNEGVPVFGSEKRNKSGLWGSSSIAKILGNRSVLGEYQPTVWAEGRRRISGEPIKDFYPAVVDEELYYAALEGRSSRNVSRATKTSSNFNVWAKVAQCAYCKSPMHLVNKGKPPKGRKYLRCSRSTKGACINRSIRLDQSEIVFKEILAKLNLASLIKDNAQVLRKRIVELDGRLESAKVKLLEVSNLLECHPSRTLAQTAVNVEGEITQLESERDECKATLASEHITDKNELFRRLDLDSYEGRFLANQQIQRLKVRVLLKHDEIRVQYSVFVGDLPKFFYMCEHGEECLFVPISSELLRASIRQDDM

SEQ ID NO: 20661 - protein, 644 aa, synthetic construct
MNVHLKVQPHHLERGAYLYIRQSSMRQVVENVESARRQYALRGRAVALGWRDEQIIVIDNDQGESGASAAWREGFQRLVSDVGMGHAGIVMGLEVSRLARNNADWQRLLEICALADTLILDEDGVYDPASFNDRLLLGLKGTMSEAELHVIKARLRGGILNKVRRGEFRCLLPTGLVYDHFGHVTLDPDMQVRETIIHFFEMFSRLESASQTVKVFRNEGLLFPSRLHNGDTLFRPLTASTAMRVLNNPRYAGAYTYGRRQFRRTIDGKKTLRARDIDDWPACMPDAHPGYISWERHQENLKILKANGRGFEAARASIPREGPALLQGRAVCGQCGNHLRVRYAARRGRQEAWYICNRDHIYRGEPMCQSIAGPPVDEAIGMLIAEQMTPAAVELALDVRKEIQARHEEADRLRCRAIERAQTEADLAQRRFMLVDPNNRLVADTLEGEWNEKLRILANAREERERGREHDQFILDKAVHERLVAMTADFNELWKDPDTPSRERKRLLAHIIEDVTLLKLPAEGTTKLHVRFKGGKIQTLTTMNPQSSAQQIKTKPNIVELIDKLLDDYIYPEIAEILNEQGHRPGGTARRGCHDARFTPLKVAYLIHEYKLQSRYDRLRQRGMLTRQEAAVLRVSLISGQRFR

SEQ ID NO: 20662 - protein, 689 aa, synthetic construct
MTSTDLIPTVLLERKAVVYVRQSTQSQVMTNLESQRRQYDLVDVARQRGFLDVEVIDDDLGRSASGTVARPGFDRLVALLCAGKVGAVLCFDASRLARNGRDWHHLLELCGLVEARVIDHDGVYNPCRPNDRLLLGMKGSISEFELGVLRARMLDAARSKARRGELRLSVPFGYIWHREAGLGLDPDLRLQDVIRSVFARFHELGSARQVLLSMTKDQIHFPRPSDERRMTNFVWTPVRYRNVIGILKNPFYAGVYVYGKSEKRTAIVDGRARRSYGHGKPVGTWEVMIRDHHEGYISWDEYERNQQQLALNNYGRSGGTKSGRGGKALLSGLLTCGRCGRRLSVAYTGNPHSPVYRCDKQNLMMGLPRCMTFGGPKVDAAVARELLRAVEPLAIEATFEAERMHRERQEDQRHIHDLELQQARYEASLAERRYAACDPDNRLIAAQLEKNWETALRRVRDLEERKPADRPSTIAVDPGTFANLADNLLAAWESPDVTMRVRQQLLRTLIADIVVDVDDAVRDVVLTIHWKGGQHSELKVRKPQTGEHGCATTEDALAVMRSMAGRWSDEHIAASLNRMGMPTGQGKTWTAHRVASVRRVRAIHAYKSADKDGEWLTMTEAAVALGVTNHRIRHLIKMKVLSAEQVVRGAPYQIRVSDLASATVQAAIARKGRPCRIADTETLPMFTDT

SEQ ID NO: 20663 - protein, 695 aa, synthetic construct
MKSELVKPTHLARRAVVYVRQSTPHQVISNQESLRLQYALRERARELGWHEADIDVIDADLGISGASTTGRNGFKELVGRVGLSEIGLILSIDVTRLARNCSDWYPLLDICGLRGCLIADRDGVYDPGSANGRLLLGLKGTISELELHTIRSRLTAGLLAKAERGELALMLPVGLVRDASGVVVKDPDLGVQERLELVFRTFLKFRTVAKVMRVLNDRDLPLPRRDRFGELRWARATVSAVARILKNPAYAGAFVYGRTRFRAAGRDGGSEAKTPKDIKDWRIIVKDRYPHYIDWSTYEKIRDIVRDNRAEYMRAKTRGAPRDGELLLHGIAWCGRCGYKMYVRYKGGGEYACNHLHSHSGLPDCQRVRAAQIDAAVADAFLAALAPGELDALARARQAQQQVNKALRAGAERELERKRYAAALAERQFNRVDPDNRLVASELERRWEAALSELRAAEDAVAQRASTEPAKRSGFSKDLNNKVVALFDSLPQIWANDATTDAHRKALLRCLVEKVVLDRGERDVALARIVWRGGAVTDLHVKMKVNSVAKLTRGEELRARLLELALTGVPDDQIAEILTREGHHSPNCEDKVLPITVQRLRLAAGIKAKAQRNRWTHEPTLLSAVQLAARLDIPVNWIYVQIRRKRLLIDQQSTGAYLFQNSPAIVNAVRDLRNRTINHLDLRIIQPHQEGHQNA

SEQ ID NO: 20664 - protein, 582 aa, synthetic construct
MKSELVKPTHLARRAVVYVRQSTPHQVISNQESLRLQYALRERARELGWHEADIDVIDADLGISGASTTGRNGFKELVGRVGLSEIGLILSIDVTRLARNCSDWYPLLDICGLRGCLIADRDGVYDPGSANGRLLLGLKGTISELELHTIRSRLTAGLLAKAERGELALMLPVGLVRDASGVVVKDPDLGVQERLELVFRTFLKFRTVAKVMRVLNDRDLPLPRRDRFGELRWARATVSAVARILKNPAYAGAFVYGRTRFRAAGRDGGSEAKTPKDIKDWRIIVKDRYPHYIDWSTYEKIRDIVRDNRAEYMRAKTRGAPRDGELLLHGIAWCGRCGYKMYVRYKGGGEYACNHLHSHSGLPDCQRVRAAQIDAAVADAFLAALAPGELDALARARQAQQQVNKALRAGAERELERKRYAAALAERQFNRVDPDNRLVASELERRWEAALSELRAAEDAVAQRASTEPAKRTGFSKDLNNKVVALFDSLPQIWANDATTDAHRKALLRCLVEKVVLDRGERDVALARIVWRGGADRRRSDGTARSNSGLLSGDRHDPPEILLSQGPHGRGTGQSAGAFAGR

SEQ ID NO: 20665 - protein, 445 aa, synthetic construct
MHEKIGPHHLERKAILYVRQSSVHQVLHNRESSALQYAMRDRLTALGWSRIETVDDDLGRSAAGGVTRAGFDRMVAEVCLGKVGAVAAREVSRFARNSRDWQQLIEMCRVVDTVLIDQEAVYAPRQGNDRLLLGLKGSLNEYELDLLRQRSLSARYEKARRGELVVATPVGFVKAGDRIEKDPDRRVQEAITLVFNKVAQLGSARQALLWFLEHGLELPVRRANGDVLWRRPNYATIHRMIANPIYGGAYAYGKSRSVSSYGGRSGVRRKSRDEWLALIPDAHDGYVSWERAEEIRKMVSDNVPASRHHGAAKHGDALLAGLFRCKRCGRKLTVRYTGNNHNIPRYSCWRGLLDNGEPRCIAFGGLRVDDAIEEALLGVVEPGAIAAAAEAERNMSSQRDQVRDALQRDLQAARYAADRAFRQYDAADPENRLVPRHRDYDSLTG

SEQ ID NO: 20666 - protein, 615 aa, synthetic construct
MGLEVSRLARNNADWQRLLEICALADTLILDEDGVYDPASFNDRLLLGLKGTMSEAELHVIKARLRGGILNKVRRGEFRCLLPTGLVYDHFGHVTLDPDMQVRETIIHFFEMFSRLESASQTVKVFRNEGLLFPSRLHNGDTLFRPLTASTAMRVLNNPRYAGAYTYGRRQFRRTIDGKKTLRARDIDDWPACMPDAHPGYISWERHQENLKILKANGRGFEAARASIPREGPALLQGRAVCGQCGNHLRVRYAARRGRQEAWYICNRDHIYRGEPMCQSIAGPPVDEAIGMLIAEQMTPAAVELALDVRKEIQARHEEADRLRCRAIERAQTEADLAQRRFMLVDPNNRLVADTLEGEWNEKLRILANAREERERGREHDQFILDKAVHERLVAMTADFNELWKDPDTPSRERKRLLAHIIEDVTLLKLPAEGTTKLHVRFKGGKIQTLTTMNPQSSAQQIKTKPNIVELIDKLLDDYIYPEIAEILNEQGHRPGGTARRGCHDARFTPLKVAYLIHEYKLQSRYDRLRQRGMLTRQEAAVHLNISEQTVARWAKYGLIARHAYNGHYSLYEIPDGDLPQKQCSRWNQLQDRTAARQQTQTEPRTSTGEERGVV

SEQ ID NO: 20667 - protein, 545 aa, synthetic construct
MSTSEQLRGFSLERQRKLIADFAAKNGLSVEEENTLEDIGRSSFSDDAQQKELTRFFENLNAGKYEPGDVFALENIDRLTRRGPVDAILKVNQIISKGLKLAIISGNEQRIIEDVNDVFTIINLSIDASRANKESKNKSDKGLSNWQEKRNLAASQKIAMTAQAPAWLDTEIFYIFDEEKKKNIKRRKYVLNEEKAEAVRLIFDLYLSGNGALKIKNILNERSIPTFKGAEYWEPSIITKILKNPATFGLYQPKKQGTGKRDLIAAGEPINDYFPAVITREIFEQCERIREGNGTRKGRKGKLFTNLFTGLLKCVDCGGPVHLLNPGIDKRNKVQKSIYYLVCKRAKFTKECTTKRVRYDDFETALLKAIQEINLADILNENNPLETLIKKQRSKETEISKKKKLIENFQRQFLENDGDLPAFMISQAKEAEISIKELEEEQREISSEIAQLNVYNSNVDNAIEELKNDGTYETRAKINLVLHEIIKNINIDFELVDFAIIFKNGVKRFVNDGIVQNVYTTKSGSDQYYSEIEEILNHSITPPEK

SEQ ID NO: 20668 - protein, 551 aa, synthetic construct
MPTAYAYIRYSSKAQGEAGRDSVDRQMASIQAITKQQGIELRTENIFSDTGISGFDGSNKNKGKLKDLIDLIISQKIQEGDFVFVESIDRLSRQKMRLSKDLVYTILDRGVTLVTTIDGQMYSRNKDGMEQDIMLSVIAQRAHEESKTKSVRRKSAWNRAKKLADEEKAIFNGHNPPYGISFNKEENRFEIVEEEAQEIRDIFESLKYVGVSLTIKKVNEYSNRKWTNRNIKHLLDTKYVLGSYMAQKRDENKKKVFERYIENYYPQIIPFELFNEAVASMKNRAQRKHYGNQTVGSLNIFRHSIKCSNCNASMLFEKQTNPKGVVYPYFQCFTRKELKNGCDQPRFRFDLAFGVFLELVKFATTSSESINPNEWDNENASVGSFHKTLFKLLTSTEKDKKLEKKISHVKNLLLEQKNYQDNINKSFEAFTDGIIPAAFIKKARETEIKIEALERELAELNIESSTRNVSLMVHSYNDIIDLYQTENGRQKINNFFTSNDIAFSFSFDQKTRMLRCKVYYKDIHVDVINKKFPLHNPLKEFGIDNLNQYFN

SEQ ID NO: 20669 - protein, 559 aa, synthetic construct
MKTKLYSYIRFSSMRQNDGSSYERQIRMAREVAAKYDLELVNDYQDLGVSAFKGANSKTGALSRFLDAIGRSVPVGSWLFIENLDRLSRADIVSAQELFLSIIRRGITIVTGMDNKIYSLDTVTANPMDLMFSILLFIRGNEESQTKRNRTNSSALIKIKSHQENPQNPAVAIEEVGKNMWWTDTTSGYVLPHPVYFPVVQEIVELRKNGRSTAEILDHLNETYTPPPAVSNKKHSKWSRAMVERLFHTRALIGIKEVSVDGVNYELKDYYPRVIDDATFYHLKKNIGARAWNFGDKEEVKPIPLLSGIGLLKCDHCGCAMVKVKGTNKRSDQYRYTCDATRSRRLDCEHPNWSFRGDQLEKAVLQLLADKIWIAEDKANPVPALKVQVDEISRKIDNLIALSAMTGATKELADQITTLNSERETLYNQIKMAEEEMYSVDSQGWEKLAEFDLEDVYNEERLKVRFKIKQALKRIGCSRIDRNKNLFVLEYIDGKTQRVVIENSRGTRKGRIFIDLKTINDRQILESNGLVLHPCLDMLTDKNWKPEEEIPGPLQEFGI

SEQ ID NO: 20670 - protein, 539 aa, synthetic construct
MTNYEARVYSYLRFSDPRQGGGGSADRQLLYAQRWAADKGLELDESLSMRDEGLSAYHQRHVTQGALGVFLRAIEDGRIASGSVLVVEGLDRLSRAEPIQAQAQLAQIINAGITVVTASDGKEYNRAGLKAQPMDLVYSLLVMIRAHEESDTKSKRVKASILRLCQAWQAGTYRGLIRNGKDPQWLRWTGSAWEMIPERVLAVRRALALYQEGMGAARATKILHAEGLDYSASGISKQQIYRLIKLQALRGAKCLSVDGEDFILEDYYPRLLSESEWADLQHLAGQRLRRRGHGEIPGIITGIGLTYCGYCGTALVGQNMMTRQRADGTIADGHRRLHCVSYGVNGGCTAGGSCSVVPVERALLTFCSDQLNLQRLLKVGDDGQGIRQQLAVARSTAEKLSVQLGRITDALIADDSGTAPTAFIRRARELEAEQADAHKKVQQLEYELATVSGSGKPAQAERWVELADLVRSGDYSAREKVRQLVMDTFERIVVFMRGMSAEDRSGKFIDVQLLSRTGQQRLLQINRRTGEWVASEDWD

SEQ ID NO: 20671 - protein, 514 aa, synthetic construct
MSQAISYIRFSSAKQGTGSSVERQEAMLGAWLKRHPEYVLSSIKYADYGKSGFKGEHLENGFGKLQAAIDFGVIPKGSVVLVEAIDRAGRLAPLKMIEVLSRILTAGVHIVTLDDEVMYTEESVNGPHLFLLAAKIQQANTYSENLSRRVTASYKSREVKAKAGKTIKRSVPMWLNSDGTLNPDVAPYMKQAFEDAAVGIGERRILRRLCEASSVFSGMTSTTLKRWMRNKTAIGYWPAMVDKDGNLVRDSEGNAVRDDIPNVYPPVVDADLFYRVQSVFNARKKFAAPTSNFLTGLVRCSECGSNYNKQISSRNPGIMDTMKCGQQNRENGKKCENVASIPIVVLEWIVKSTCLHAVRTALKSQHLSENGKRLIAIDVELQEVEKGLGNLASAIASVGAVPEIVAKLEMFRSQREELQNEKALLSGEAVELDITPESVEEALASGDILRLNAMLQSVSYVLTGADRNVSVGLQTFRYSGVDRKTGSFKIHHKGQVVLLERKLEGKAVQEDTSH

SEQ ID NO: 20672 - protein, 558 aa, synthetic construct
MLKEKIKVYLYTRVSTSIQIEGYSLEAQKSRMKAFAIYNDYEIVGEYEDAGKSGKSIEGRKQFNRMMEDIKSGKDGVSFVLVFKLSRFARNAADVLSTLQIMQDYGVNLICVEDGIDSSKDAGKLMISVLSAVAEIERENIRIQTMEGRIQKAREGKWNGGFAPYGYKLEDGKLFINEEEAVAIRTIFDQYVNTTIGANGISKYLENHGIRKIPRQNGKNPLFDAGLIRKILKNPVYNGKIAFGRRTLEKVHGTRNEYKQVEQDEYLISEGIHEAIVSDEVWQAAQVKLKSQAKKYEHVNKGKDTRTHLLSGIVKCPICGVGMFGNKCTKKKKDGTKYKDFYYYGCKHRQMIRGHKCTFSKQIREELLDDAVAEVIVKIVSNPKFASMMQEKINMKVDTSEIEKEIDNYQKELRKSHSTKFKLIEEIDNLDVEDKHYKRRKQDLDDRLYRMYDKIDELESSLIDAKAKKQTIEAEKLTGDNIYKVLIYFDKLYKVMNDVERRQLITALISEIQVYEEKQPNGQWLKSITFKLPIIDDDLNISLDNDEQVECVALLVKA

SEQ ID NO: 20673 - protein, 596 aa, synthetic construct
MKNNNVEIIKADSLVRRRGDNFERDSKRVAAYCRVSSDSEDQKNSYESQVRHYKDYISQRSDWELAGIYADEGISGTQVGKRQDFQRLINDCVNGEIDYIVTKAIARFARNTLDTLKYVRMLKDMQIGVYFEEENIDTLTMDGELLLTILSSVAQQEVENTSAHVKKGLKMKMQRGELVGFQGCLGYDYDVETKQLSINKKEAKIVRYIFERYLEGIGGKVIARELDELGYKSPRGLEHWNDTTVLGIIKNEKYKGDILMGKTFTVDPISKRRLSNFGEEDKYYIKDNHEPIISKEDFEKAQEIRLRRAGNKKTAANINGKRERYSKMYAFSSMLECGFCGSILSRRSWHCRSDYRKVVWHCVTFIKKGKKFCKHSKGLEELAIEGAFMEAYRQLYHSNENLMTDLLETIESELNDNSLNKELKRITNKLRTLLKKEENLVNLRLEGKISDTIYNEKYNEISSEKVFLAEEKVNIETTLKSEIDVKKRLTEFKHLLSSQKMLTEFDRTVFESIVEKIIVGGVNSDGEIDPAMLTIIFKTGETQNKDGKKFKSKRKNAKLETDKLCPQNSDEDKKMYSQGPDNTCVECIALIQRVKS

SEQ ID NO: 20674 - protein, 521 aa, synthetic construct
MKKVITIEPAKQVTHKVELPRFTKRRVAGYARVSTDHEDQTTSYEAQMTYYTDYINSRSDWEFVKMYSDEGISGTNTKKRLGFQEMVEDALDGKIDLILTKSVSRFARNTVDSLSTVRKLKEAGVEIYFEKENIWTFDSKGELLITIMSSLAQEESRSISENVTWGRRRQLAEGQVTFSYSQVLGFKKSDTGGFEIDHEEAKIVRYFFHQVLLGNNPNKIARELTAQGIPTPQGKRQWSYGTVKRMLRNEKYKGDALLQKSFTTDFLTKSTKLNEGELPQYYVENNHEAIIKREVFDLVQVELDKLERKRQTSNIFTGRLFCGDCGSAFGSKVWHSTSKYKRTIYQCNAKYKGEHKCQTPHVTEEEIKGWFLSAINQLLSNRDEIIANTELLIDMAKDTSSLEARLDDLEHHLETIRQDIEDLVDRNARKAQNQDLYQEQYNTLVTAYQEKQKELQETRSVLEEQKSKQLSLDGFIQNFKEQDDLITDFNQELWQTSVERLDIKEDKKIFLTFKNGLRIDL

SEQ ID NO: 20675 - protein, 627 aa, synthetic construct
MAGIRTENKIYEVGIYCRLSKDDGTDNESASIATQKSILTDYVKRQGWHLAKTYVDDGYSGTNFQRPSFQNMIKDIENGLINCVITKDLSRLGRNYLDCGLYLEVFFPEHNVRYIAVNDGVDTLNKSAMDITPFRNILNEMYSADVSVKIKSAYRARFQQGKFMGTTAPYGYVKDPADHNHLLIDDKVAHVVREIFDLALAGNGIAKIRKHINKQHILRPAAYAVEQGATGYERYFEDNEENRYIWSENSVRGILRSPIYAGNLAGYKRIAANMKSKKRPSKLPEEWEVIPDTHEGIVTQEEFDTVQQLMTSRRREQNAGGFENIFSGVIKCADCGYAMRAASANRRKRPDIIDCVQYTCNNYGRYGNVMCTAHSIEARDLFNAVLADINRFADMAVNDEKAVRAIERRLTETDQSRAKSLEKEKKKLNKRLAELDRLFSSLYEDKVMERITERNFEMMSGKYQKEQLEIEARLKEVTETLNDSYEKSQGVRDFLSLIRNYQGLKELDATIINALIDKILVSEREKLADGTVRQEIKIYYKFIGFVGELHITPTKRWTALKPKNCTVCGVEYVPSSGISKYCPACAKRIQREKSNESKRRSRERNRRACIELSAKNDRLTLSSEMDD

SEQ ID NO: 20676 - protein, 597 aa, synthetic construct
MKTNNVEIIKADSLVRRRGVNVERHLKRVAAYCRVSSDSEDQKNSYESQVRHYKDYISQRSDWELAGIYADEGISGTQVGKRQDFQRLINDCVNGEIDYIVTKAIARFARNTLDTLKYVRMLKDMQIGVYFEEENIDTLTMDGELLLTILSSVAQQEVENTSAHVKKGLKMKMQRGELIGFQGCLGYDYDVETKQLSINKKEAKIVRYIFERYLEGIGGKVIARELDELGYKSPRGLDHWNDTTVLGIIKNEKYKGDILMGKTFTVDPISKRRLSNFGEEDKYYIKDNHEPIISKEDFEKAQEIRLRRAGNKKTVANVNGKRERYSKMYAFSSMLECGFCGSILSRRSWHCRSDYRKVVWHCVTSIKKGKKFCKHSKGLEELAIEGAFMEAYRQLYHSNENLMTDLLETIESELNDNSLNKELKRITNKLRTLLKKEENLVNLRLEGKISDTIYNEKYNEISSEKEFLAEEKVNIETTLKSEIDVKKRLTEFKHLLSSQKMLTEFDRAVFESIVEKIIVGGVSTDGEIDPAMLTIIFKTGETQNKDGKQFKSKRKNAKLETDKLCPQNSDEDKKMYSQGPDNTHRVCRSAHSCGTVI

SEQ ID NO: 20677 - protein, 643 aa, synthetic construct
MKTNNVEIIKADSLVRRRGVKVERHLKRVAAYCRVSSDSEDQKNSYESQVRHYKDYISQRSDWELAGIYADEGISGTQVGKRQDFQRLINDCVNGEIDYIVTKAIARFARNTLDTLKYVRMLKDMQIGVYFEEENIDTLTMDGELLLTILSSVAQQEVENTSAHVKKGLKMKMQRGELIGFQGCLGYDYDVETKQLSINKKEAKIVRYIFERYLEGIGGKVIARELDELGYKSPRGLDHWNDTTVLGIIKNEKYKGDILMGKTFTVDPISKRRLSNFGEEDKYYIKDNHEPIISKEDFEKAQEIRLRRAGNKKTVANVNGKRERYSKMYAFSSMLECGFCGSILSRRSWHCRSDYRKVVWHCVTSIKKGKKFCKHSKGLEELAIEGAFMEAYRQLYHSNENLMTDLLETIESELNDNSLNKELKRITNKLRTLLKKEENLVNLRLEGKISDTIYNEKYNEISSEKEFLAEEKVNIETTLKSEIDVKKRLTEFKHLLSSQKMLTEFDRAVFESIVEKIIVGGVNSDGEIDPAMLTIIFKTGETQNKDGKQFKSKRKNAKLETDKLCPQNSDEDKKLYSQGTDYTHRSCGIIRKTQLDCPVCSPVFWQAASKDPRTFELSNTHHVDSCHTYTKIKCQQALSRVIA

SEQ ID NO: 20678 - protein, 449 aa, synthetic construct
MKQAIGYLRQSTTKQQSLAAQKQTIEALAKKHNIQYITFYSDKQSGRTDKRNGYQQITELIQQGQCDVLCCYRLNRLHRNLKNALKLMKLCQKYHVHILSVHDGYFDMDKAFDRLKLNIFISLAELESDNIGEQVKNGIKEKAKQGKMITTHAPFGYHYHNGTFTIDTVKAPTIKAVFNYYLQGYGYKKIAQYLEADDNFINRKPYQVRNIILNPNYCGRVINQYGQYENMFPAIVSTTIYEEAQVTRTQKQVKRKPSENQLKQKIKCPYCHSTLTNMTVRKPDHSLRYYVCPQNMNNARFVCEFKGINAQELETSVLATCQDFFQNQQLYSKINHAIQQRLKRQRDIETKTTLNHEQLIEKLAQGKIDAETFREQTQSLHQQSKPISSISTYQIRKAFQNIIQQRFTLNMLYPYIDEINISKNKSLAGIYFKNEPLNIVKQTMELSIV

SEQ ID NO: 20679 - protein, 520 aa, synthetic construct
MTEKNIMVIPARKRVGSTAAKEKIKKLRVAAYCRVSTETEEQNSSYEVQVSHYTEFIKKNNEWEFAGIFADDGISGTNTKKRDEFNRMIAECMDGNIDMVITKSISRFARNTLDCLQYIRQLKDKNISVYFEKENINTTDAKGEVLLTIMASLAQQESQSLSQNVKLGLQYRYQQGKVQVNHKRFMGYTKDEDGNLTIVPEEAEIIKRIYREYLEGQSLVGIGRALEKDGILTAAGKPRWRPESVKKILQNEKYIGDALLQKTVTVDFLTKKRVKNEGHVPQYYVENSHEAIIPKELFLQAQEEIHRRSNIYTGEGKNKRIYSSKYALSAITFCGDCGDIYRRTYWNIHGRKEFVWRCVTRIEQGPEVCKNRTVKEDELYGAVMTAINKLLAGGNNMIKTLEENIHAVIGETTEYQISEINTLLDEKQKELIKLANKGQDYEYLVDEIDEMRDKRQTLLVEDASLSGENERINELIEFIRKNKFRTLEYDDKLVRKIIQNVKVYEDHFVIAFKPGIEMEI

SEQ ID NO: 20680 - protein, 466 aa, synthetic construct
MRSAAVYARISADVEGKSLGVQRQLEDCRKLASDRGWVVGREYVDNDISAYSGKVRPGYEAMCSDLAAGVRDAVIVYNLDRLHRRPAELEEFVALCEAAGVNQVATVTADIDLGNDDGLFMARIFAAFAAKESGRKSARMKRKYEQKAAQGLPHGPNRPFGYEPDKITIRESEAEVIRELVVRVIAGESLNALTVWLNETGVAPVRGARWASTAVRGIVSSPRIAGLRAYKGEVVGDAAWPAIISTAQRDQVLAALSVRSWNRKRSPRKYLLSGLCRCGRCQARMFSAARLESGAHKRRYVCSSSPDHGGCGRMTVVAEPLEKLITDAVLTRLDSKTLADALAGKARANPDTAVLSAQVETAQARLDELTGLYSTGAISAREWIMARDPITDTITRLRREIAETLDTGPLAELAGQGSKLRSEWDDLGLDRCHAIIRTVIDHVVIKPGQPGARGLDMNRIDPIWRT

SEQ ID NO: 20681 - protein, 452 aa, synthetic construct
MKAAIYIRVSTQEQIENYSIQAQTEKLTALCRSKDWDVYDIFIDGGYSGSNMNRPALNEMLSKLHEIDAVVVYRLDRLSRSQRDTITLIEEYFLKNNVEFVSLSETLDTSSPFGRAMIGILSVFAQLERETIRDRMVMGKIKRIEAGLPLTTAKGRTFGYDVIDTKLYINEEEAKQLQMIYDIFEEEKSITNLQKRLKKLGFKVKSYSSYNNWLTNDLYCGYVSYADKVHTKGVHEPIISEEQFYRVQEIFSRMGKNPNMNRDSASLLNNLVVCGKCGLGYVHRRKDTVSRGKKYHYRYYSCKTYKHTHELEKCGNKIWRADKLEELIIDRVNNYSFASRNVDKEDELDSLNEKLKTEHAKKKRLFDLYISGSYEVSELDGMMADIDAQINYYEAQIEANEELKKNKKIQENLADLATVDFDSLEFREKQLYLKSLINKIYIDGEQVTIEWL

SEQ ID NO: 20682 - protein, 452 aa, synthetic construct
MKAAIYIRVSTQEQIENYSIQAQTEKLTALCRSKDWDVYDIFIDGGYSGSNMNRPALNEMLSKLHEIDAVVVYRLDRLSRSQRDTITLIEEYFLKNNVEFVSLSETLDTSSPFGRAMIGILSVFAQLERETIRDRMVMGKIKRIEAGLPLTTAKGRTFGYDVIDTKLYINEEEAKQLQMIYDIFEEEKSITTLQKRLKKLGFKVKSYSSYNNWLTNDLYCGYVSYADKVHTKGVHEPIISEEQFYRVQEIFSRMGKNPNMNRDSASLLNNLVVCGKCGLGYVHRRKDTVSRGKKYHYRYYSCKTYKHTHELEKCGNKIWRADKLEELIIDRVNNYSFASRNVDKEDELDNLNEKLKTEHTKKKRLFDLYISGSYEVSELDAMMADIDAQINYYEAQIEANEELKKNKKIQENLADLATVDFDSLEFREKQLYLKSLINKIYIDGEQVTIEWL

SEQ ID NO: 20683 - protein, 560 aa, synthetic construct
MTKLYSYIRFSSMRQGEGSSYERQIKMAKEIADRYGLELVNDYQDLGVSAFKGANSKTGALSRFLDEIGRSIPVGSWLFIENLDRLSRQDIISAQELFLSIIRRGITIVTGMDNKIYSIETVTANPMDLMFSILLFIRGNEESQTKRNRTNSSALLKIKAHQQNPQSPAVAIEEIGKNMWWTDTTSGYVLPHPVYFPILQKIVKMKQEGHSTGSVLDYLNEHHEPPAPTSNKQHRKWSIAMVSRLFKTKALIGVKEVTVDGVQYELKDYYPRVLSDSEYYFLKNNLIKKAWSFGHAQEKTIPLLSGIGLLKCVHCGSPMVKRKAANGKVEQYRYTCDGEGSGRTDCLYPNWGFRASSLEGAVLQLLADKVWIAEDKANPIPEIQVQIDEISRKIDNLINLSAMTGATKELANQITDLNMQREALHEEIRLFEREMYSVDSQGWEKLAQFDLSDVQNEERLQIRLKIKGALRSIECARIDRNKNLFTLVYLDGLRQRLVIENNRGIRKGQIFVDLKTINDRQILESAGMVLHDHIDILIDEKAFYDGLPKEEDGPLSKFGI

SEQ ID NO: 20684 - protein, 558 aa, synthetic construct
MTKLYSYIRFSSMRQSDGSSYERQIRMAKEIADRYNLELVNDYQDLGVSAFKGANSKTGALSRFLDEIGRSIPVGSWLFIENLDRLSRQDIISAQELFLSIIRRGITIVTGMDNKIYSIETVTANPMDLMFSILLFIRGNEESQTKRNRTNSSALLKIKAHQQNPQSPAVAIEEIGKNMWWTDTTSGRVLPHPVYFPVLQKIVQLRQEGHSAGAILDYLNEHHEPPAPTSNKKHGKWSRAMVSRLFHTKALIGVKTVNVDGVEYELRDYYPRVLSDSEFYFLRKNIIKKAWDYNHDKEKVIPLLSGIGVLRCVHCGATMVKQTAANGKREQYRYCCDGRKSGRTDCPYPNWGFRAVTLEGAVLQLLADKIWIAEDKTNPIPEIQVKIDEISRKIDNLINLSAMMGATKELANQITDLNSQREALHEEIRLFEREMYSVDSQGWDKLAQFDLSDVQNEERLKVRMKIKGALHEIECSRIDSKKNLFVLVYLDGLRQRLVIENNRGLKKGQIFVDLKTINDRQILESAGMVLHPCIEMIIDADWKAPEEIPGLLSEEFGI

SEQ ID NO: 20685 - protein, 506 aa, synthetic construct
MRTVITYLRFSSAIQGAEGADSTRRQNDLFKQWLKKNSDAQVVASFSDEGLSGYKGKHLTGQFGDMLARIESGEFPEGSILLVEAIDRIGRLEHLETEALMNRIIAHGIEIHTLQDGLIYTRDAISDDLGISIIQRVKSYIAHQESKQKSFRVSEKWKQRAKLALAGKQRLTKMVPGWIDPDTLKLNEHAETVRLIFKLLLSGESLHNIARHLQSNDIKSFSRRKDANGFSVHSVRTILRSETTIGTLPASQRNDRPAIPNYYEAAIDAATFNKAQEILDKNRKGRTPASDNPLTINIFKGLFRCQCGASVHPTGTKNKYAGVYRCNNNPDGRCDVPPLKRKPFDKWMIDNFLGMIDVGNDGESEGKIAALQHEVEIVTTRIKKATALLLEMDDITELKTQVKELNQKRTELQTTIDNMRRKASLTDKELPQLKDIDLTTKAGRVECQLILSKHLKGLTLGKDSVTVTLQNDTEITIPTNPLPLNDGTSIFEIADKELLDIDAFRL

SEQ ID NO: 20686 - protein, 558 aa, synthetic construct
MTKLYSYIRFSSMRQSDGSSYERQIRMAKEIADRYNLELVNDYQDLGVSAFKGANSKTGALSRFLDEIGRSIPVGSWLFIENLDRLSRQDIISAQELFLSIIRRGITIVTGMDNKIYSIETVTANPMDLMFSILLFIRGNEESQTKRNRTNSSALLKIKAHQQNPQSPAVAIEEIGKNMWWTDTTSGRVLPHPVYFPVLQKIVQLRQEGHSAGVILDYLNEHHEPPAPTSNKKHGKWSRAMVSRLFNTKALIGVKTVNVDGVEYELRDYYPRVLSDSEFYFLRKNIIKKAWDYSHDKEKVIPLLSGIGVLRCVHCGATMVKQTAANGKREQYRYCCDGRKSGRTDCPYPNWGFRAVTLEGAVLQLLADKIWIAEDKTNPIPEIQVKIDEISRKIDNLINLSAMMGATKELANQITDLNSQREALHEEIRLFEREMYSVDSQGWDKLAQFDLSDVQNEERLKVRMKIKGALHEIECSRIDSKKNLFVLVYLDGLRQRLVIENNRGLKKGQIFVDLKTINDRQILESAGMVLHPCIEMIIDADWKAPEEIPGLLSEEFGI

SEQ ID NO: 20687 - protein, 502 aa, synthetic construct
MTVEVIKGKKKKGKIKAAAYCRVSSISDEQETSIENQIDYYTKMIKENPTYEFVDVYYDQGISGYVERRPGFQRMMKDARQGKIDLIITKSVTRFARNTDTVLKASRELKELGIGIFFELQNMNTLTEEGELLLTIYAAFAQGESDTYKDLANLNYKRRFDDCKPFYNIQNVLGFDMDKEMNVVVNRDEAKNVKQIFTWVKQNYSTVEVVRKCKEAGITNKQGQPVTRVFITKTIRNVQYKGDYIMQSTYTDEKKMSRKNYGNLPSYYIKNDHPAIVSRKLWDEANKCIDARRDNRHARVQLKPMTTENYPYKDMIFCAECGGLMRPQKKKSGIEYTFLCSNRRKYGSKFCSNKPVPQKVIESWGKIDGHVYVSFDKSRPIHQQYKYVKESTWKKDHSNKKIPAKEYTNDKCFYYRRIFCAECGSLLRKIVDVGGHIRFTCGGHLDFGNEYCKGVCVPKEKLDNLPEEAGYYLIKEERKGEEKCYSYTCKEIRPIRKERTSR

SEQ ID NO: 20688 - protein, 550 aa, synthetic construct
MKVAIYARYSSDNQRDASIADQFRMCRLHAVKQGWQIVEEYSDHAISGSSLLRPGIQALISDATRGRFDLILAEAMDRLSRDQEDIAGLFKRMSYSDVKMFTLSEGEVSHLHVGLKGTMNALFLKDLADKTRRGQRGRVEAGKSGGGNSYGYDVVKKLDANGEPIRGDRTINEAQAEVVRRIFRDYAAGKSAKTIAFALNRDGIAAPSGGDWGFSTINGNPKRGNGILNNEMYVGKIVWNRQRFVKDPDTGKRQARPNPESEWVIQEAPELRILDDDLWNAVKARQGENRTERNESGVADVRTMNYRRRPKYLFSGLTKCACCGGGYSAISATLIGCSTARNKGTCSNRVNIRRDELETRVLNALRTKLVDPVMFARFCEVFTQEMNRLRMEGRAGIASAEAEIEKTDRELAKLLTAIKAGGPIEAIVEDMKQLEARKAELKAFLAEAEEPPPLLHPSMAVQYRKRVQQLYEALQHEEEEKRVEAADILRSLVDLIVLTPVDGKVEIDVQGDLAGILMISAQTKNPALGAGSSQVKMVAGAGFEPAAFRL

SEQ ID NO: 20689 - protein, 466 aa, synthetic construct
MSKENMLVFGYARVSTDNQLENYSIEEQTERLKAYCAAKGWTLLQTYVDGGYSGGNTDRPALQEMLSAIRENKIDAVVVYKLDRLSRSQKDTLTLIEDDLLSHGADFVSINENFDTSTPFGRAMIGILSVFAQLEKDQITERFTMGRIGRGKAGYFHGGGNPPTGYDYIDGKLVVNEYEAMQVREVFSAFLGGRSINAIQKDLTARYTTRWTAAKVRNVLKNSLYTGKVHFLGQEYQGIHEPIIEESAFRAAVQALSSFEREAQKTTAQRTPFRAGYLLSGLVYCNRCGARYSANHGYYKCYSRAKSSPKFIVDPNCKNDNWAIEDLDALVCRQVDALVLHQDALDSLLAQTDQPKAVKIDKTRLRKRASEIDIQIERLIELYQFSAIPMSTLTEKVNTLSAEKKALQEQLDAPDEVPARELFQMAVSDYRTGFSDGDIAQKRALLSRLVERVTIDGQSVEVHWRL

SEQ ID NO: 20690 - protein, 517 aa, synthetic construct
MAQVKIIAPQTREAEHLRVAAYCRVSSDSKDQLHSYAAQIRSYTEEIAQHDGWELVDVYADEGLTGTRMDQRDDFNRMMRDCRKGKIDRILVKSVSRFARNTRDCLSALRELSAMGVSVRFEKENIDTKTLTTELMVSVSGSLAQQESISISANQKMSYQRRMERGEFITCTAPYGYRIVNKKDLEIVPEEAATVRWIFDAYLKGRSSGWIAEQLTAKGIPSQSGAECWRETGVRYLLTNEKYIGDALSQKSYSCGFPFVQKRNHGERLQYYTENSHPAIIDRDTFERVQALLQKKAQKEKKRREKSPLALKIVCGNCGTVFQRRSSQSGYVTWVCRTHDRHAADCPVGRIPEAEIHAAFLRMYHRLKSNADIILAPALRQLNTLDTILRQNHPQLLTINRAIAEATEESHKISTLRANGLLDADICAARMNAISARLAQLRGERRRLTENEAIDETMDALRKVEQTFLNGPERLDGFDEELFEHLVEKIIAESQNRIRFRLYGGLELTEQWEVAAR

SEQ ID NO: 20691 - protein, 546 aa, synthetic construct
MEATAATLERRVRVIPATRKPEELHRDHDGKMRVAAYCRVSTDSEEQLNSYEAQKTYYTQKIQDSPDWEMAGIYADEGISGTSLKKRTQFNKMITACKRGHIDLIITKSLSRFARNTVDCLDTVRLLKANGIGVYFEKENINTLTESSEFLITLFSGFAQAESESLSKNVAWGKQKSAEAGKVTFQYKKMLGYRKGADGQPEIVPEEAEIIRRIYHRYLDGCTLGQIKRELDEDGVPTAQGVERWSPSMIHNILTNEKYIGDALLQKTYVTDCITKKVKKNRGERTMYYVENSHPAIVSKDLFNQVQQEMTRRSSKRKVLQKSGKTELGKYSGKYALTELLVCGECGSPYKRVTWARNGKKRIVWRCVSRLEFGTKYCQHSPTLDEGRLHSAILAAMNEYAAIRQEVCPDVLAMAEEAKQALSQAGAQLLQLKKRMDEVSREQSDVLDRLLVNMADTELNARMKALTDEKESLKAQIADAQQAEVDLEEQATRRRQMWDSIMECAAGYTEFDNELVRQVIQKITVEDAETIRIHFRDSDEVLEQEL

SEQ ID NO: 20692 - protein, 491 aa, synthetic construct
MGLAAIYLRLSRNEEQLNIDEILLNHRNALTKLAKQQKLTYDIYQEISSGVNTERPQLNLLLSRLDDYDVLLVMDIDRISRDNAHAEEIKKMLIIHDIKILTPQGAIDLSQESNEMLFSFQAMMANFEYKQIRKRLGRGRLAAAEQGKWTMSNRVPLGYKKNEEKRLEVVEDEAKIIRYIFQKTLERVSANEIAKQLDILGWRSRQGKVLTSAHISNMRRNVVYYGVVKAGRKVNGRVVDEVFVEDAHEPIVSKQMFLEVQKILEENTTGNFFNKLKATRKLQNLIYCNCCKRKRYIQCDGNGIDYIKSCIYKVDNNKCRDRGYKYEPIEQFVLQKVKEKKPAFEQELQMLKSLDTTELEKKLLIQRDSLEKQINRFNKRQRNLKEMRMDGEISKAEFYEMRDENEEQIKQVKQQMELIDIKLENLSNTDEEQARLQDAIKTLDKLEELKAESCNTFLKKFIKKIWFSSNTEANYDTTRPKEDATIKIEWL

SEQ ID NO: 20693 - protein, 501 aa, synthetic construct
MKPNIKEVAIYLRKSRDESDGKEDVLAKHESLLLEYAKNHNLKYKIYKEIGSSEYVDSRPEMVRLLSDVSQKLYDAVLVVDLDRLSRGDLEEMGRISRVFRDSTTLVLTPSKTYDFNNEDQALINNFEMVFANHEYRMIKKRMLRGKLQGTKAGKWTNGRPPFPYVYNRLTKELDVDPDKVKVYEQMKKMFLEDMKATYEIAWRLNELGFKTNRNSYWYENTVRRILKNEVHLGKVVYGKTSGSGSKKKLNANGVQIKDRSEWIIAEGSHQPLKTEEEHQRILAILESRRYTPKGTRTNVQVLSKLIYCGKCNRIMSFTGKASGKRYVKTCLTTDRFGYRCHNRSLNVEVIYAQLFLDLEHYEQQLLNHEPKEKQGDSSTLQLAIHNKLEELERLEKGIDRIKDLFIDEVIDKLEMKKRIEKQQQLMQTKKEEIRSIEQSLAVIENVRTDDDRLHAIREFKKAWNTEGIGKRELNTLAKQLIDRIEYVREGNNINMKIQFL

SEQ ID NO: 20694 - protein, 557 aa, synthetic construct
MSKKIALYSRVSTSEQSEHGYSIHEQEQVLIKEVVNNYPGYDYETYIDSGISGKNIEGRPAMKRLLQDVKDNKIEMVLSWKLNRISRSMRDVFNIIHEFKERGVGYKSISENIDTSNASGEVLVTMFGLIGSIERSTLISNVKMSMNAKARSGEAITGRVLGYKLKLNPLTQKNDLVIDENEANIVREIFDLYLNHNKGLKAITTLLNQKGYRTINQKPFSVYGVKYILNNPVYKGYVRFNNHQNWAVQRRSGKSDKNDVILVKGKHEAIISEDAFDQVHEKLVSKSFKPGRPIGGDFYLRSLIKCPECGNNMVCRRTYYKTKKLKERTVKRYYICSLFNRSGSSACHSNAINAEVVERVINVHLNRILSQPDVIKKIASNVIVELKQKHSKQTEIKYDTDSLEKQKAKVKTQQERLLELFLDDEMDSEMLKAKQSQMNQQLEVLDQQIKEAKQANQSQAEIPNFELKGRLILMITRFSVYLRKATPEAKNQLMKMLIDSIEITKDKQVKLVRYKIDESLIPQSLKKDWGSFFMPKFQFEIDCRNDYFIDQITTFTT

SEQ ID NO: 20695 - protein, 491 aa, synthetic construct
MGLAAIYLRLSRNEEQLNIDEILLNHRNALTKLAKQQKLTYDIYQEISSGVNTERPELNLLLSRLDDYDALLVMDIDRISRDNAHAEEIKKMLIIHDIKILTPQGAIDLSQESNEMLFSFQAMMANFEYKQIRKRLGRGRLAAAEQGKWTMSNRVPLGYKKNEEKRLEVVEEEAKIIRFIFQKTLERVSANEIAKQLDILGWRSRQGKVLTSTHISNMRRNVVYYGVVKAGRKVNGRVVDEVFVEDAHEPIVSKQMFLEVQKILEENTTGNFFNKLKATRKLQNLIYCNCCKRKRYIQCDGNGIDYIKSCIYKVDNNKCRDRGYKYEPIEQFVLQKIKEKKPAFEQELQMLKSLDTTEVEKKLFIQRESLEKQINRFNKRQRNLKEMRMDGEISKAEFYEMRDENEEQIKQVKQQMELIDIKLENLSNTDEEQARLQDAIKKLDKLEELKAESCNTFLKKFIKKIWFSSNTEANHDTTKPREDATIEIEWL

SEQ ID NO: 20696 - protein, 515 aa, synthetic construct
MKTAIYLRKSRADLEAEARGEGETLAKHRSTLLKIAKEMNLNILSVREEIVSGESLVKRPEMLALLEEIEDNKYDVVLCMDMDRLGRGGMKEQGIILETFKRSNTKIMTPRKTYDLNDEWDEEYSEFEAFMARKELKIITRRMQRGRVASVEAGNYLGTHAPFGYDIHRLNKRERTLTINSEEASVVRMIFDWYANEDMGANAIRSKLNDLGYKSKLGNEWNPYSILDILKNNVYIGKVTWQKRKEVKRPDAVKRSCARQDKSDWIIADGKHEPIIPESLFEQVQEKLNSRYHVPYNTNGIKNPLAGIIKCSKCGYSMVQRYPKNRKETMDCKHRGCENKSSYTELIEKRLLEALKEWYINYKADFEKHKQGDKLKETQVIQMNEAALRKLEKELVDVQKQKNNLHDLLERGVYTVDMFLERSNVVSDRITEITSTMENLKKEIKNEIKKEKVKKDTIPQVEHVLDLYFKTDDPKKKNSLLKSVLEKAVYKKEKWQRLDDFELVLYPKLPQDGDI

SEQ ID NO: 20697 - protein, 542 aa, synthetic construct
MTRVALYARYSSDRQNERSISDQLNLLIQHAAAKGWAVVATYTDAAISGSAMANRPGLLSALAAAERGEFDLLLAEDEDRLARNLEHLAHVANRLADIGAGIATLSTDRLQDMHVAFKGLIAQDFIRNLSLKTKRGMASNAEKGLATGSRLYGYRSQPGGAVEIVPEQAEVIRRIFAMYVHDRMSSREIAERLNQDRIPSPAGREWNASSIQGSRQRANGILHSEIYAGVKVYNRVEMRKDRQTGRKITICKPPSEHKRIDVPHLAIIDRDLWNAARQRLDSRQTADPSQRASLRRRPGLLSGLTKCGCCGASYTSLSQGRLVCAAYREKGASACDNNRHVSRAEIEQRVLDGLRTRLLAPEAVAAYVRAYHAAWAEQAAQVEDRRRPLTRRLAEVERAIERGAEALLSGATAAAVIGKKLETLEIEQAELKAALQQLDADGAPPVQLHPRAAENYARKVEQLQSRLAQAADSTEVADRELIGSVRDLIQRIDIEPVNKSRGAPVRVTLHGDLARFIRPQQPPIGGCALVVGGGIEPPTCGL

SEQ ID NO: 20698 - protein, 584 aa, synthetic construct
MINFVEDQCKDVVVYPRVSSDDQQERETIQTQIEFAIKYCDLHNLNIADWYKDDGVSGTIPLDQRPEGLRLLEDAKAGKFKTVLIYNMKRLGRKARVTLDAIYQLEEYGVTIKSMTEPFDTSTPMGRFVITLLAGQAEFDRDTLLETLWHGANRVARLGQWLGGIVPYGYQVIDKFLQINEEPLPGKEELSEAGVIRLMYHLVGNEKWSTIKVADYFNSLNIPPSYVKDGRKIKKGKRKENTAGIWTPGRIRNMVTNPTYKGLHIYGKRSKKDRELINRKVPAIVTEQLWNSSQETLRDNQLEAFRNQKRNYLLRGLIKCGSCGLTYHGTAFTGVGRKPTAYYTCGGKTAYRGPLQGKCKSKNIPAEWIENMVWEECVRFIRNPGEALQEINTGIEIRKSQTSLFLSEKEMIQKSIRDKEPERQSILSLYRQKMITALDVEKQLQEMMSESLSLEQRVRELDDLIEGEKNIEQLFDSAEDLLLSLRSKIENDPSFETQREIVKTLVQEIIVESTTPPGKIRPQASVIVRYSFKRTPHLNIAQAISHTVVLVAILVAITLNIVVRVVKHVLLNIVLKYLALSLIG

SEQ ID NO: 20699 - protein, 494 aa, synthetic construct
MRAAIYIRVSTDMQVEDGFSIEGQRTRLNSFAASQDWEIYDTYIDDGYSAKDLNRPEMKRMLQDMEDKKFDVILVYKLDRLTRSVADLHALLKTFDLYSVKFKSATEIFETTTAMGRFFITLVGAMAEWERGTISERVRFGVEQMVVEGRRPGGVLPYGYTKEEILIPEEAVLIREVRNLYLSGLGYKAVAIKMNREGKLRRGNDWTAATVAYTIENPYYAGILRLGSKTPSGNYVNSKRDDKVNCIYGDGSHEPVFTRLEYEVTKEYMARKSHGGYSQIKTYWFSGVLRCGRCGAAMFGRLTNKRSLKSGETVRTQYYICSNKHSNNSCDLPTFRQVHVEHLVMEYISRVQADMDKLKMESLEMVAEESKKTSEIDKAKRELSKITERREKWQYMFVEGLITKDGIRHKMLEEDASEQETRQRIANNQKSLSGIPKLVELAGLAEAWTYLDDQEKKDYVFTLFNRIEINTNVTKPKGVKNQFFPAYIQEVLFN

SEQ ID NO: 20700 - protein, 564 aa, synthetic construct
MKRADLYIRVSTDEQADKGYSQRDQEERLKRYCATNKIAVGQVIYEDHSAKTFNRPEWTRLLNSLKKRSSKTDLILFTKWDRFSRNAGDAYQMISTLNKLGIEPQAVEQPLDLSIPENKMMLAIYLSAPEVENDRRALNTFYGMRRARKEGRLMGRAPFGYINRSKEDGRKYIAPKEPEATAMLWAFNEIAKGVFACDQVRQKMNKLHKTTISRSAFHVAVRNPLYYGKIFIAKFKDEEAHLVQGQHEPLISKDLFDRVQLILDGNKRVERPNTKILSDENLPLRGFLVCPECGRNLTGSASKGRTSRYYYYHCVSSCGFRQKAELANDIFEKSMRQFALNGTSQIVKRLLLDNYKKFAKNPFDEKKQIAQEIDKLNARLSVARNKLLSEIIDDEEYLEIKDECRKRIESLEEQLSKDGSDTKKINVEKSLDRALKYIESIPKMYSEGEIRTRRDIIGSIFPEKLEFDGKTYRTARMNVIANYIFQITNGLLQKKNRTNESKFHLSCLVAGTGLISLDFKISYLSQYQYFTAFQRAYKIFSRDKIVTINDFRSLFSLFKTNTSN

SEQ ID NO: 20701 - protein, 488 aa, synthetic construct
MVEQPQTLDIYARVSRLGDDRQRSTEGQVDDCTIVVEDRGAQVGEVHVDSGRSAWNPRVKRPGWDRMMQRLEEGATGGVIVWDLARFSRRPIEGERLIAAAERGLTVLDSEGEYDLTSPSGKKAFRDQLSTAAYESDRLSTRVKRGKRKKAAAGEPNVSTRPFGFESDGVTIRESEAAVIRDLTARVLAGESQDALIVELNERGILTSYGKPWTRAGLRQVLTRPRNAGRVVHLGTVVAQLPGEPILSEDVFDRLVALYAARRRGRPTSDAYLCSGTVGCGLCEHILTGRPRANMKPYPDGSVRRQYWCQPRANGGGCGRISVDQRELDRHVGALAVAILSDPRHAAAVEAAARTVGERRRKLDAEIAEAEELAEQLATRLGKGEITLRRYDAAARPLDRRIAELRRERTELEASPVAEVTPEMVAASREQWQQRWDGATVPERRALLRQALRGRRLLVMPADPAAPRRFDPTRIKVVEPSADSAPQP

SEQ ID NO: 20702 - protein, 678 aa, synthetic construct
MPEDILPREGSPLQLLIRNRIDRRTDLPGPTQQTPSVIAYYLRRSSADPLYFSIAAQLAHCNAHSHSLGGEFDQQRLLFVDRHRSGATTIGREGIAAMLEAARQGRFRILVVRSICRLTRNATDAARLHEQLTGLGVSIHVAGRGQVQQYEIMLLALSAQRERLRMMASLMDGKRRAAVSGEFFGSWPTYGYDRIDGPDWRKNVNQAAILERCFREVDAGLNLQDLAKLLNGECIPARNGGIWRPRHFFARGRGLLDRPILKGVFVWSLWGEKPITISRPDLAVISADLFDRVNERYGVPTRTQEPRTRAPFLLGLVRCACGDRMHLAEDGNAMHLHCRTAQIGGGCDRTKGFSTSIVARQVLHLFRHEILDPDSGPELEEGRRIEWQGLNATVQAERDRVSARIEQIAHELDALSQDEEEIDPYAAAACCELELEHHKLSERLTQLVVPPFGALDWERVDVDRARILRVMERLPSMSRSGEDLRVIELVRSIVSEIELDIREDGYQLRVWFGAPGAPKGFDAVDRLAGRWWMRWFPMPPKGPLRYPEVVLGHQRRAEAGMFRLDDGDWAAVEPVIRNAPRLGPRDRTMAEAILFIGMTGLPAKYFPERYEPCAPLLKHARPGAVWRGMYEVLHQRCSPVVAEAGPAARILHEDLNSRAHAHPVPPLEDPSPWCNPKA

SEQ ID NO: 20703 - protein, 557 aa, synthetic construct
MGNDTFAGKRVFVYARVSTTRQEKNDLSLPDQIATAERWVEDSGAQTVRVFSEAGSATDDNRRAFREMIALAESDERPVDIILAHSLSRLFRNALDFMQYRERLRRKKIRIISVTQNFGDDTTSDLAVSMLAIFDEYHSAENAKHVRRTMVANAVNGFWNGQTPPIGFRTYNVPQTRGKDRKKLEHDPETVDMIRYTFKSYLQGTADGPIGVTGLAHHLNERGYRIRGKRFSVGTLHNILTNTAYIGYVIFNRRDSRTGETRPEIEWVPIPVPPIIDEDTFYAVRQQMADRDPRMGEAAAKTNMNLLTSRAICGCGEDGCGAGMMTSTGKSGQYRYYACSARIKRGPDACPGRRVPMEHLDDLVVGAVTRHLVQPGRLTALLQTWLDRSETAVAERAAELKRLRARLTQLEGESARVIKLVRNETLSPDDPQVATELGNIRAQKASTQADIEVLERQLDAGDRRITPAIIAEFGNLLRHKLHEPDGRTRKEYIHLLIDCVEVGDRQIRITGRNAALERAVVASQKPDARVPKAERKWCTRLDSNQWPLPSEGSALSS

SEQ ID NO: 20704 - protein, 528 aa, synthetic construct
MRTLLYARYSSQIQNARSIDDQIALLRGRADREGWTIADVYTDYAISGAAGVGADQRPGLHAMLARVEAGGIDQVFTESTDRIARHQGDAFSVRERLRFAGCRLFTLLDGEVDELTGTIKSLMDSRMREDLAARVRRGHRGVATSGRSPSSVAFGYRRAPKLDDRGELVRGLRGIDDDEAEIVRRIFREFAAGRSAMAISQALNVDGVSPPRAGFWRASTLLGQGALGTGILRNRIYIGEMVYGRTTGVQSPTTRRQVVRPAIDPVSVGQVPELRIVDDETWIAVQAKLEEKSGGRPERHRRPKHVLSGLGVCGVCGGNWIITGNNGKAGSRVWGCAKAFEKACSNKRQITGHVYEARVLADLKSQMLAPDVVAAYLREYHIEHARESKKLTRDRDRAERQLAEAGRKRDRLLAALADGGSSFPEVRAAMTAARDDHERLRRELASMDALPVLTLHPGLADSYRREIEDLERLLADPEAHLEAIPQIRSMIDRVVLVPKVDKLRGVELTVVRRIDEVLAFATRARAAS

SEQ ID NO: 20705 - protein, 608 aa, synthetic construct
MKKEVKVIKGDTTLKRTASSCVERSIKRVAAYCRVSTDTEDQINSYNSQVEHYTEFIQKNNEWTLAGIYADEAITGTQVDRRIDFQRLINDCMNGDIDMIITKSISRFARNTLDTLKYVRKLKEFNVAVFFEEENINTLTMDGELLLTILSSVAQQEVENISANVKKGLRMKMERGEMVGFQGCLGYDYDPETKSISINEKEAEIVRYIFRRYIEGVGGMVISRELEEQGYLSPRGNKRWTETTVLGIIKNEKYKGDLMMGKTYTVDPISKRRLDNFGEQDKFYIENHHEPIISEEDFEKAQGIRLRRSKNRNTVANNGGKREKYSRKYAFSSMLECGFCGHNLSRRNWHSSSEYTKVIWQCVNATKNGKKYCPHSKGIEEEAIEKAFMESYRQVCHNNVEITNEFLKTVEEELKDNSLAKDLKKITNQLDKILKKEKDLVELRLNESISMDIYQDKYNEIAISKEKLLAEKRTLEVTLTDEKALKKRLEGFKKLLESNKYLEEFDRAVFESIVDKIIIGGTNDEGEIDPAMITIIYKTGKKDSQDGRLFKSRRKNAKEVNEKADSKLYPQSSDEVNNLCSYPMDNTRWGVVVQFGDDFLVCILIDDV

SEQ ID NO: 20706 - protein, 506 aa, synthetic construct
MRSVITYLRYSSAIQGAEGADSTRRQNDLFKQWLKKNSDAQVVASFSDEGLSGYKGKHLTGQFGDMLARIESGEFPEGTILLVESIDRIGRLEHLETEALMNRILGNGLEIHTLQDGLIYTKDALADDLGISIIQRVKAYIAHQESKQKSFRVSQKWGQRAKLALAGKQRLTKMVPGWIDPETFEVNEHAETVRLIFKLLLDGESLHNIARHLQANNISSFSRRKDANGFSVHSVRTILRSVTTIGTLPASQRNDRPAIPNYYEAAIDAATFNKAQEILDKNRKGRTPASDNPLTINIFKGLFRCQCGASVHPTGTKNKYAGVYRCNNHLDGRCDVPPLKRKPFDRWMIDNFLGMIDVGNDGESERKIAALQHEVEIVTSRIKKATALLLEMDDITELKTQVKELNQKRTALQTTIDNMRRKTSLTDKELPQLKDIDLTTKAGRVECQLILSKHLKGLTLGKDSVIVTLQNDTEITIPTNPLPLNDGTLIFEIAEKELLEIDAYQL

SEQ ID NO: 20707 - protein, 481 aa, synthetic construct
MITTNKVAIYVRVSTTNQVEEGYSIDEQKDKLSSYCDIKDWNVYKVYTDGGFSGSNTNRPAIEQLIKDAQKKKFDTVLVYKLDRLSRSQKDTLHLIEDVFIKNGIEFLSLQENFDTSTPFGKAMIGLLSVFAQLEREQIKERMQLGKLGRAKAGKSMMWAKTSYGYDYHRETGTITINPAQALTIKFIFESYLRGRSITKLRDDLNEKYPKHVPWSYRAVRTILDNPVYCGFNQYKGEIYPGNHEPIISKEEYDKTQSELKIRQRTAAENVNPRPFQAKYILSGIAQCGYCGAPLKIMLGVKRKDGSRLKKYECHQRHPRTLRGVTTYNDNKKCDSGFYYKDKLEASVLKEISKLQDDADYLDKIFSGDNAETIDRESYKKQIEELSKKLSRLNDLYIDDRITLEELQSKSAEFISMRGTLETELENDPALRKNKRKADMRKLLNAEKVFSMDYENQKVLVRRLINKVKVTAEDIVINWKI

SEQ ID NO: 20708 - protein, 452 aa, synthetic construct
MKAAIYIRVSTQEQIENYSIQAQTEKLTALCRSKDWDVYDIFIDGGYSGSNMNRPALNEMLSKLHEIDAVVVYRLDRLSRSQRDTITLIEEYFLKNNVEFVSLSETLDTSSPFGRAMIGILSVFAQLERETIRDRMVMGKIKRIEAGLPLTTAKGRTFGYDVIDTKLYINEEEAKQLQMIYDIFEEEKSITTLQKRLKKIGFKVKSYSSYNNWLTNDLYCGYVSYADKVHTKGVHEPIISEEQFYRVQEIFSRMGKYPNMNRDSASLLNNLVVCGKCGLGFVHRRKDTVSRGKKYHYRYYSCKTYKHTHELEKCGNKIWRADKLEELIIDRVNNYSFASRNVDKEDELDSLNEKLKIEHTKKKRLFDLYISGSYEVSELDAMMSDIDAQINYYEAQIEANEELKKNKKIQENLADLATVDFNSLEFREKQLYLKSLINKIYIDDEQVTIEWL

SEQ ID NO: 20709 - protein, 382 aa, synthetic construct
MPKAISYIRFSTKIQSVGDSTKRQSKYINDWLKRNPDYYLDESLRFQDLGISGFSGANAKSGAFGEFLAAVESGYIESGSVLLVESLDRVSRQDIDTAGEQLRKILRAGVEVVTLVDNEWYTKESLKDSLSMIKAMLVMERAHEESAMKSTRLRSVWAAKRERAANGEIMSKRCAAWLKVSEDRSHFEFIPENVKAVQRVFQLRLEGLSHVKIAKQMNDEGFSTLNQFKSVTGGWSQSSVTELLSNRSVIGFKVPSKSMAVKGVSEIPNYYPSIISDEQFYAVQQLKQGSGRKPSSDLPLLTNLFKGVLRCSECGFIVVVAGVSAKRSGIYKCSMKSEGRCNSVGFSRLQTDRALVQGFCITLTVFPSIVVMALLLVLFKVS

SEQ ID NO: 20710 - protein, 481 aa, synthetic construct
MITTNKVAIYVRVSTTNQVEEGYSIDEQKDKLSSYCDIKDWNVYKVYTDGGFSGSNTDRPALESLIKDAKKRKFDTVLVYKLDRLSRSQKDTLHLIEDVFIKNGIEFLSLQENFDTSTPFGKAMIGLLSVFAQLEREQIKERMQLGKIGRAKAGKSMMWAKTSYGYDYHRETGTITINPAQALAIKFIFESYLRGRSITKLRDDLNEKYPKHVPWSYRAVRTILDNPVYCGFNQYKGEIYPGNHESIISKEEYDKTQSELKIRQRTAAENVNPRPFQAKYILSGIAQCGYCGAPLKIMLGVKRKDGSRLKKYECHQRHPRTLRGVTTYNDNKKCDSGFYHKDKLEAYVLTEISKLQDNAGYLDKIFSGDNAETIDRESYKKQIEELSKKLSRLNDLYIDDRITLEELQSKSAEFISMRGTLETELENDPALRKNKRKADMRKLLNAEKIFSMDYEGQKVLVRGLINKVQVTAEDIVINWKI

SEQ ID NO: 20711 - protein, 515 aa, synthetic construct
MKTAIYLRKSRADLEAEARGEGETLAKHRSTLLKIAKEMNLNVLSVREEIVSGESLVKRPEMLALLEEIEDNKYDVVLCMDMDRLGRGGMKEQGIILETFKRSNTKIMTPRKTYDLNDEWDEEYSEFEAFMARKELKIITRRMQRGRVASVEAGNYLGTHAPFGYDIHRLNKRERTLTINSEEASVVRMIFDWYANEDMGANAIRSKLNDLGYKSKLGNEWNPYSILDILKNNVYIGKVTWQKRKEVKQPDAVKRSCTRQDKSDWIIADGKHEPIIPESLFEQVQEKLNSRYHVPYNTNGIKNPLAGIIKCSKCGYSMVQRYPKNRKETMDCKHRGCENKSSYTELIEKRLLEALKEWYINYKADFEKHKQDDKLKETQVIQMNEAALRKLEKELVDVQKQKNNLHDLLERGVYTVDMFLERSNVVSDRITEITSTMENLKKEIKTEIKKEKVKKDTIPQVENVLDLYFKTDDPKKKNSLLKSVLEKAVYKKEKWQRLDDFELVLYPKLPQDGDI

SEQ ID NO: 20712 - protein, 481 aa, synthetic construct
MITTNKVAIYVRVSTTNQVEEGYSIDEQKDKLSSYCDIKDWNVYKVYTDGGFSGSNTDRPALESLIKDAKKRKFDTVLVYKLDRLSRSQKDTLHLIEDVFIKNGIEFLSLQENFDTSTPFGKAMIGLLSVFAQLEREQIKERMQLGKLGRAKSGKSMMWAKTSYGYDYHKETGTVTINPAQALTIKFIFESYLRGRSITKLRDDLNEKYPKHVPWSYRAVRTILDNPVYCGFNQYKGEIYPGNHEPIISKEEYDKTQSELKIRQRTAAENVNPRPFQAKYILSGIAQCGYCGAPLKIMLGVKRKDGSRLKKYECHQRHPRTLRGVTTYNDNKKCDSGFYYKDKLEAYVLKEISKLQDDADYLDKIFSGDNAETIDRERYKKQIEELSKKLSRLNDLYIDDRITLEELQSKSAEFISMRGTLETELENDPALRKNKRKADMRKLLNAEKVFSMDYENQKVLVRRLINKVKVTAEDIVINWKI

SEQ ID NO: 20713 - protein, 487 aa, synthetic construct
MKYAVYVRVSTDKDEQVSSIQNQIEICRYWIEKNGFEWDENSIYKDEAVSGTAWLERRAMQLILGKARKKELDTVVFKSIHRLGRDLRDALEIKEILLGHGVRLVTIEEGYDSYYEGKNDLKFEMYAMFASQLPKTLSVSISAALAAKVRRGEYTGGTVPYGYKIVDKKYVINQEEAEIVREMYELYDNGLGYLRISNALNDVGKYKRSGKLWTYSAVKLIITNPMYKGDYVMGRSTEVKVDGRKKRIQEPREKWVVFENHHPAIIERPLWDKINNPKINKKIKRRVAVTNELRGIARCIHCGSPFVLHTYKYKNKEGEELNYGYLTCGTYKLTGGRGCVKHSGLRYERLRSLVLRKLKEKERDLEKVFKLNDKDKHQEKQKKLRKEKKELEIKRERLLDLYLDGGSIDKETFTKRDANFAKNIKEKELEILKLDDVKALIVEQQKVKDAFKLLEDSENLYPVFKKLIARIDISQNGAVDIRYRFEE

SEQ ID NO: 20714 - protein, 515 aa, synthetic construct
MKTAIYLRKSRADLEAEARGEGETLAKHRTTLLKIAKEMNLNVLSVREEIVSGESLVKRPEMLALLEEIEDNKYDVVLCMDMDRLGRGGMKEQGIILETFKRSNTKIMTPRKTYDLNDEWDEEYSEFEAFMARKELKIITRRMQRGRIASVEAGNYLGTHAPYGYDIHRLNKRERTLTINPEEASVVRMIFDWYAHEDMGANAIRSKLNDLGYKSKLGNEWNPYSILDILKNNVYIGKVTWQKRKEVKRPDAVKRSCARQDKSDWIIADGKHEPIIPESLFEQVQEKLNSRYHIPYNTNGIKNPLAGIIKCAKCGYSMVQRYPKNRKETMDCKHRGCENKSSYTELIEKRLLEALKEWYINYKADFEKHKQDDKLKETQVIQMNEAALRKLEKELVDVQKQKNNLHDLLERGVYTVDMFLERSNVVSNRITEITSIMENLKKEIKTEIKKEKVKKDTIPQVENVLDLYFKTDNPKKKNSLLKSVLEKAVYKKEKWQRLDDFELVLYPKLPQDGDI

SEQ ID NO: 20715 - protein, 411 aa, synthetic construct
MRTVRRIQPIKSPCKPKLKVAAYARVSDSRLHHSLSTQISYYNRLIQAHPDWELVGIYYDEGISGKEQSNRQGFQNLIKDCDDGKIDRIITKSIARFGRNTVELLTTVRQLRLKNIGVTFEKENIDSLSSEGELMLTLLASVAQEESQNMSENIRWRIQKKFEKGIPHTPQDMYGYRWDGEQYQIEPNEAKVIRNVFKWYLDGDSVQQIVDKLNQEHVLTRLGNPFTVASIREFFKQEAYFGRLVLQKTYREAFSRNPKRNKGQRNKYIIENAHEPIVTKEYFDLVLHEKERRYQLMSQESHLNKGIFRDKISCSECGCLMIVKVDSKQVNKTVRYYCRTRNRFGASSCSCRTLGEKRLLASFKSKLDIIPDKEWVENNIKHIDYDFGQRIIWVIPVKGRKYPIEIREGRY

SEQ ID NO: 20716 - protein, 520 aa, synthetic construct
MKKVITIEATPSIIRSSSDEFSLKKRRVAGYARVSTDHEVQATSYESQMRYYSEYINGRDDWEFVKMYSDEGISGTNTKLRTGFKSMVEDALDGKIDLIITKSVSRFARNTVDSLTTVRQLKEVGVEIYFEKENIWTLDSKGELLITIMSSLAQEESRSISENVTWGLRKQFAEGKVHFPYTNVLGFKAGEDGAIVVDQDEAKTVRYIFQQALIGKSPYHIAKDLTEQVIPSPSGKSHWNATTIKRMLRNEKYKGDALLQKTYTTDFLTKKKNINRGELPQYYVENNHEAIVDRETFDAVQQVLENKGRKSSTTIFSSKLVCGDCGHFFGSKVWHSTSKYRRVIYQCNEKYNGDKRCTTPHVTEEEVKDWFISAINKVIVNRDEIISNLEILLDFGKKTDLKQRLSELETEVEVVTQMVSTLVEGNALIPLNQDTYQKKYYNLVRRHDTLVYEIENIEKQLLDEARRYKNLQEFLESLKLQNAVVTDFDELLWETMVDKVIIDKLGLVEFVLKNGISFNV

SEQ ID NO: 20717 - protein, 481 aa, synthetic construct
MKTMNKVAIYVRVSTTSQVEEGYSIDEQKAKLSSYCDIKDWNVYKIYTDGGFSGSNTDRPALESLIKDAKKRKFDTVLVYKLDRLSRSQKDTLHLIEDIFIKNGIEFLSLQENFDTSTPFGKAMIGLLSVFAQLEREQIKERMQLGKIGRAKAGKSMMWAKTSYGYNYHKETGTVTINPAQALAVKFIFESYLRGRSITKLRDDLNEKYPKHVPWSYRAVRTILDNPVYCGFNQYKGEIYPGNHEPIISKEEYDKTQSELKIRQRTAAENVNPRPFQAKYILSGIAQCGYCGAPLKIMLGVKRKDGSRLKKYECHQRHPRTLRGVTTYNDNKKCDSGFYYKDKLEASVLKEISKLQDDADYLDKIFSGDNAETIDRESYKKQIEELSKKLSRLNDLYIDDRITLEELQSKSAEFISMRATLETELENDSALRKNKRKADMRKLLNAEKVFSMDYEKQKVLVRGLINKVQVTAEDIVIKWKI

SEQ ID NO: 20718 - protein, 451 aa, synthetic construct
MIRAAIYIRVSTQEQVENYSIEVQRERIRAFCTAKNWDIYDEYIDGGYSGSNLERPGIKKLLNDLKNIDVVVVYKLDRLSRSQRDTLELIEEHFLKNKVDFVSITETLDTSTPFGKAMIGILSVFAQLERETIAERMRMGHLKRAEKGLRGNGGDYDPAGYTRQDGHLIIKKDEADHIKRAFDLYEQYYSITRVQETLKEEGYPIWRFRRYRDILSNRLYIGRVTFSGNEYEGQHEPIISLEQFKRVQTLLKRHKGHNAHKAKQSLLSGLITCSCCGEKYVSYSTGKSKDDESKRYYYYICRAKRFPSEYEERCMNKTWSRQKLEDAVIGQMKDLTVFKYHNQKKEKQINYTKLIKEIDKKMERLLDLFTTNTNISRQLLEQQMEKLNSDKEKLILKQQSSEQEISLSNEMITKTMKSFDTLEFKDRQILINKFIQEIQIKHENVEILWRF

SEQ ID NO: 20719 - protein, 522 aa, synthetic construct
MNYNNDKVAIYTRVSTDEQANEGFSLQAQEDHLRQYAKAKGYEVYDIYSDEGYSGKDYNRPEIQRLFKDLSQDKFKGILVKSVDRISRRLSDVTKLIDDVLVPRNSYIVISDANLDSSTTGGIAIIHLLATFAQLERSMIVQRVKAGMGKRAELGYWNGGRVLGYDVKNKELKVNKEEAEIVRKIFHLRTEGKGYKSIAIMLNQQGFKTKRGGLFSIGTIKTILENPLYIGYCRWGRHKNWNVERRKGKTDEYKFVKGKHEPIVSEDLWKRVQGVNYAHKKSISKNRNFNGEFVLSGILRCPSCGAGMVMCKTKKRDKSGYHLYYMCQAFHSKGKLACKSNLIRKEDIEEKVLQCINKIILIPSIVDKTFERIQEKKERGIERIKNDLLYINEELKRKKKFIKKLNKDYFDEKIRVEAYTELSEPLREEIDELESEKGKLDREIESVEIPITKEEVIKALENFANLYENATYEQKKSLLRAIIKKIEVQPNRKEIKGITYWFDCDNGQDDALLVSKEGRTVS

SEQ ID NO: 20720 - protein, 481 aa, synthetic construct
MKTMNKVAIYVRVSTTNQVEEGYSIDEQKDKLSSYCDIKDWNVYKVYTDGGFSGSNTDRPALESLIKDAKKRKFDTVLVYKLDRLSRSQKDTLHLIEDVFIKNGIEFLSLQENFDTSTPFGKAMIGLLSVFAQLEREQIKERMQLGKLGRAKSGKSMMWAKTSYGYDYHRDTGTITINPAQALAIKFIFESYLRGRSITKLRDDLNEKYPKHVPWSYRAVRTILDNPVYCGFNQYKGEIYPGNHEPIISKEEYDKTQSELKIRQRTAAENVNPRPFQAKYILSGIAQCGYCGAPLKIMLGVKRKDGSRLKKYECHQRHPRTLRGVTTYNDNKKCDSGFYYKDKLEASVLKEISKLQDNANYLDKIFSGDNDETIDRESYKKQIEELSKKLSRLNDLYIDDRITLEELQSKSAEFISMRATLETELENDPALRKNKRKADMRKLLNAEKVFSMDYEGQKVLVRGLINKVQVTAEDIVIKWKI

SEQ ID NO: 20721 - protein, 470 aa, synthetic construct
MKGESELDKKAAIYIRVSTQEQATEGYSIQAQTDRLIKYVEAKDFILYKKYIDAGYSASKLERPAMQELIQDVQSKKVDVVIVYKLDRLSRSQKDTMYLIEDIFRPNDVELISMQESFDTSTAFGSATVGMLSVFAQLERKSISERMITGRVERAKKGFYHTGGQDRPPAGYQFNSDNQLIINEYEAAAIKDLFRLYNDGLGKSSISEYLKKNYPGKNKWLPSSIDRMLKNSLYIGKVKFSGAEYDGIHEPIIDEVTFYKTQKEIARRKQTNTKRYNYVALLGGLCECGICGAKMANRRAVGRKGKVYRYYRCYSKKGSPKHMMKTDGCSSKAQQQFIIDEAVINNLKNIDVEAELKRRSAPQTNTSLISSQIESIDKQINKLIDLFQVDSMPLDVISEKIDKLNKEKQSMEKLLERKNKLDKTELQHRFDVLKSFDWDNSSIESKRVVIEMLVQKVIIHDNSIEIILVE

SEQ ID NO: 20722 - protein, 455 aa, synthetic construct
MANEIKQVALYIRVSTDQQAKHGDSLDEQEHTLNEYVKQQRNMKVFKTYIDDGISGQKLYRDEFQKLLDDVKKGRIDTILFTKLDRWFRNLRHYLNIQEILDKNNVTWLAVTQPFFNTETAMGRSFVNQSMGFAELEAQMTSERIRAVFDNKIRKGEVVSGKVPLGYDIKDKHLVPNEKAEIVKEIFQYYLETGSMRATVRHLENHFSMTRDYQSVRQMLTNRKYIGELRDNKNFCEPIIDRDVFERVQLQLSKNIRMNKKRDYMFTGLLVCSECGCNYSATAVISRYVRKDGTTNPKERHLYRCTKNRNNTKKCSNKKGIYETTLENFLLENIEKQAEELSVKMQQEPEVKKTKNTNDKIKKKLDRLKKAYLNEVITLDEYKKDREELEALLIPERDNKIAKIDLNSLHNYSTAEFRDGYKQLTISEKSSLWRQVIKNIVVYPDGNLKINFLGY

SEQ ID NO: 20723 - protein, 515 aa, synthetic construct
MKTAIYLRKSRADLEAEARGEGETLAKHRTTLLKIAKEMNLNVLAVREEIVSGESLVKRPEMLALLEEIEDNKYDVVLCMDMDRLGRGGMKEQGIILETFKRSNTKIMTPRKTYDLNDEWDEEYSEFEAFMARKELKIITRRMQRGRVASVEAGNYLGTHAPFGYDIHRLNKRERTLTINPEEASVVRMIFDWYANEDMGANAIRSKLNDLGYKSKLGNEWNPYSILDILKNNVYIGKVTWQKRKEVKQPDAVKRSCARQDKSDWIIADGKHEPIIPESLFEQVQEKLNSRYHVPYNTNGIKNPLAGIIKCSKCGYSMVQRYPKNRKETMDCKHRGCENKSSYTELIEKRLLEALKEWYINYKADFEKHKQDDKLKETQVIQMNEAALRKLEKELVDVQKQKNNLHDLLERGVYTVDMFLERSNVVSDRITEITSTMENLKKEIKTEIKKEKVKKDTIPQVEHVLDLYFKTDDPKKKNSLLKSVLEKAVYKKEKWQRLDDFELVLYPKLPQDGDV

SEQ ID NO: 20724 - protein, 449 aa, synthetic construct
MSKRVAIYCRVSTVEQAEEGYSVDEQRRRCIEYCEKEGHEVFKVYEDRGISGKNISGRPGLKDLLKDANDKKFDLVVVWKLNRISRRLIDILNIVDTLDKNSIAFRSLTESFETETPAGKLQLNIMGAISEFERGTIAENVKMGMIARAREGKWNGGKVLGYDVVEIPSEGKKRKETKLVINEKEAMTVRRIFELYSEGHGYKATVNRVNKEGHKSKRGNAFSTASIKEILKNPVYIGKIRYNVKQDWNEKRRKNINPNPILVDGEHKAIIDDETWEKVQIILKDRSKTHNRVYDSEFPLSGLLKCPACGASMTISRSYHKRKDGTKKVAEYYACSNWKNKGTAVCNSNSIRAEVADEVVINKLIEMVNNKLLLKKVINNINKNKSSKLKPKLDEMNVVNKEIDRLSSKKNSSIELFEDGILTKSELAERIKKLNEEIDTLKFRLDELK

SEQ ID NO: 20725 - protein, 515 aa, synthetic construct
MKTAIYLRKSRADLEAEARGEGETLAKHRTTLLKIAKEMNLNVLAVREEIVSGESLVKRPEMLALLEEIEDNKYDVVLCMDMDRLGRGGMKEQGIILETFKRSNTKIMTPRKTYDLNDEWDEEYSEFEAFMARKELKIITRRMQRGRIASVEAGNYLGTHAPYGYDIHRLNKRERTLTINSEEASVVRMIFDWYANEDMGANAIRSKLNDLGYKSKLGNEWNPYSILDILKNNVYIGKVTWQKRKEVKRPDAVKRSCARQDKSDWIIADGKHEPIIPESLFEQVQEKLNSRYHVPYNTNGIKNPLAGIIKCSKCGYSMVQRYPKNRKETMDCKHRGCENKSSYTELIEKRLLEALKEWYINYKADFEKHKQDDKLKETQVIQMNEAALRKLEKELVDVQKQKNNLHDLLERGVYTVDMFLERSNVVSDRITEITSTMENLKKEIKTEIKKEKVKKDTIPQVEHVLDLYFKTDDPKKKNSLLKSVLEKAVYKKEKWQRLDDFELVLYPKLPQDGDI

SEQ ID NO: 20726 - protein, 464 aa, synthetic construct
MISVDTGSKKNGYEWDENSIYKDEAVSGTAWLERHAMQLILEKVRRKELDTVVFKSIHRLGRDLRDALEIKEILLGHGVRLVTIEEGYDSYYEGKNDLKFEMYAMFASQLPKTVSVSVSAALAAKVRRGEYTGGIVPYGYKIVDQKYTINEEEAELVRKMYELYDNGLGYMKIADAINDMGVPSRTGKLWAYPSIRAIITNAAYKGDYIMQKYAEVKVDGRKKMIINPKEKWVVFENHHPAIITRDLWDRVNNSKTDKKTKRRVAIKNELRGLACCAHCRTPLALQQRMYKNKEGETRYYCYLICGRYKRMGARGCVKHSGLQYSDLRLFVLQKLKEKENDLEKVFNLNDTDKHQEKQKKLRKEKKELEIKRERLLDLYLDGGPIDKETFTKRDKNFEKIIKEKELEILKLDDVKTLVVEQQKVKEAFELLEKSEDLYSTFKKLITRIEVSQDGVINIVYRFEE

SEQ ID NO: 20727 - protein, 517 aa, synthetic construct
MKAIHKLARPQLPEPPKLKVAAYARASTSSNEQLASLQTQITHYENHIQNNDQWEYVGVYYDEGTSGTKVEKRDGLHRLIKDAELGKIDLILTKSISRFSRNTVDCLNLVRKLTDIGVTIFFEKENINTGDMESELLLSILSSLAESESYSHSENMKWANRKRMAKGIFKTVPPYGYQRKGADFYLIPDEAKVIEQIFKWALEGVSAYQVAKRLNEKNIFTRKGSKWQDSGINNILHNIVYTGTMIHQRYFNDDQFRKKKNNGELPMYRIDNNHPPIISWEDYERVQELITLRANAKGTSKGSQKYSQRYVFTKRIICDKCGCNYKRVHIAGKGNTKVVKWSCTGHLKNKDGCDALPITDESLKTAYLTMLNKLILGHTIVLEPLINTPVEGKASKQELEKLSIEITKIDEKLEVLASLNASGVVSTKTALEEQGRLQMELNKLQEKQHKIMESVNGTSTQRIQLEQLHQFTKRSEMLTEWDEDLFLRFAELIVVYSRQEVSFELKCGLLLKERLEA

SEQ ID NO: 20728 - protein, 452 aa, synthetic construct
MKAAIYIRVSTQEQVENYSIQAQTEKLTALCRSKDWDVYDIFIDGGYSGSNMNRPALNEMLSKLHEIDAVVVYRLDRLSRSQRDTITLIEEYFLKNNVEFVSLSETLDTSSPFGRAMIGILSVFAQLERETIRDRMVMGKIKRIEAGLPLTTAKGRTFGYDVIDTKLYINEEEAKQLQLIYDIFEEEKSITTLQKRLKKLGFKVKSYSSYNNWLTNDLYCGYVSYADKVHTKGVHEPIISEEQFYRVQEIFSRMGKNPNMNRDSASLLNNLVVCGKCGLGFVHRRKDTVSRGKKYHYRYYSCKTYKHTHELEKCGNKIWRADKLEELIIDRVNNYSFASRNVDKEDELDSLNEKLKTEHVKKKRLFDLYISGSYEVSELDAMMADIDAQINYYEAQIEANEELKKNKKIQENLADLATVDFDSLEFREKQLYLKSLINKIYIDGEQVTIEWL

SEQ ID NO: 20729 - protein, 515 aa, synthetic construct
MKTAIYLRKSRADLEAEARGEGETLAKHRTTLLKIAKEMNLNVLAVREEIVSGESLVKRPEMLALLEEIEDNKYDVVLCMDMDRLGRGGMKEQGIILETFKRSNTKIMTPRKTYDLNDEWDEEYSEFEAFMARKELKIITRRMQRGRVASVEAGNYLGTHAPFGYDIHRLNKRERTLTINPEEASVVRMIFDWYANEDMGASAIRNKLNDLGYKSKLGNDWNPYSILDILKNNIYIGKVTWQKRKEVKRPDAVKRSCARQDKSDWIIADGKHEPIIPESLFEQAQEKLNSRYHVPYNTNGIKNPLAGIIKCSKCGYSMVQRYPKNRKETMDCKHRGCENKSSYTELIEKRLLEALKEWYINYKADFEKHKQGDKLRETQVIQMNEAALRKLEKELVDVQKQKNNLHDLLERGVYTVEIFLERSKAVSDRINEITSTMENLKKEIKTEVKKEKVKKDTIPQVEHVLDLYFKTDDPKKKNSLLKSVLEKAVYKKEKWQRLDDFELVLYPKLPQDGDI

SEQ ID NO: 20730 - protein, 503 aa, synthetic construct
MNNRIDAIYARQSVDKKDSISIESQIEFCKYELKGGNCKEYTDKGYSGKNTDRPKFQELVRDIKRGLIAKVVVYKLDRISRSILDFANMMELFQQYNVEFVSSTEKFDTSTPMGRAMLNICIVFAQLERETIQKRVTDAYYSRSQRGFKMGGKAPYGFHTEPIKMDGINTKKLVVNPDEAANIRLMFEMYAQPTTSYGDITRYFAEQGILFHGKELIRPTLAQMLRNPVYVQADLDVYEFFKSQGTVIVNDAADFTGMNGCYLYQGRDVKPSKKNDLKDQMLVLAPHEGIVPSDIWLTCRKKLMNNMKIQSARKATHTWLAGKIKCGNCGYALMSIFNPSGKQYLRCTKRLDNKSCPGCGKIITSELEAVVYQQMIKKLASYKTLTGRKKAAKANPKIAALQVDLAHVDSEIEKLVDSLTGANNVLLSYVNVKIAELDGRKQELLARIAELTVEAISPEQVSQISGYLDTWDNVSFDDKRRVVDLMITTIAATSDSLNITWKI

SEQ ID NO: 20731 - protein, 558 aa, synthetic construct
MSKEKIKVYLYTRVSTSIQIDGYSLEAQKSRMKAFALYNDYEIVGEYEDAGKSGKSIEGRVQFTRMMEDIKSGKDGVSFVLVFKLSRFARNAADVLSTLQIMQDFGVNLICVEDGIDSSKDAGKLMISVLSAVAEIERENIRVQTMEGRIQKAKEGKWNGGFAPYGYQLIDGKLIINEEEAIAIRTIFDQYVNTSIGANGLSKYLENHGIRKIPRQNGKNPLFDAGLIRKILKNPVYNGKIAFGRRTLEKVHGTRNEYRQVEQDDYLVAEGIHEAIIPDELWQAAQVKLKAQAKKYEHVNKGKNMRTHLLSGIVKCPICGAGMFGNKSIKYKKDGTKYKDFYYYGCKHRLMNRGHKCTYNKQIREELLDDAVAEVIIKLVSNPKFASMIQEKINMKVDTSAIENEIDNYQNELRKSHSTKYKLIEEIDNLDVEDKHYKRRKNDLDDRLYRMYDKIEELESQLIEAKAKKETIEVEKLTGDNIYKVLIYFDKLYKVMNDVERRQLIEALISEIQIYEEKQPNGQWLKSITFKLPIIDEDLNISLENDEQVETVAKIIKQ

SEQ ID NO: 20732 - protein, 554 aa, synthetic construct
MMNGFEYTGVDAILAGSFRAAIYCRLSKDDDLDGESASIANQRAMLETYCEKQGWEVVAVYQDDGYTGLNMERPDLKRMLKAIERRQINLVVTKDLSRLGRNYLQTGFLIEDFFPRNGVRYIAMNDGIDTMRDNNDIAPFKNILNEMYSKDISKKVHSSYLLKAQKGQFTGCLAPFGYRKDPEDKNHLLIDEETAPIVRRLFAWALEGHGPNYIRRRLEEEKIPCPTYWNRVRGFRNVSTKWEKKDPVNGRYMWDFSVIKDILMNPVYTGAIASQKKEYRFKIGTIGEKKPEEWIVVENQHEPLVDRKTFDIVQRKLKSRQRPRQTGEISLFAGLIKCGECGKSLTIRYTNDKHPKQIYSCKTYNAYGKQHCTQHRVEYDTLYSLVLNKIRECARAALMDGEAVAGKLTDTCEAEQKGQREALERSLTKDEERIDVLEKMVLRLYEDMVAGRISEANFNLLMEKTQAEQAELKAKVTEGRKKLADEIRLACDARQWVEAIQEYADITELDAATLNRLIKEIVVHESIDSDKTRHISIEIHFNLKPIPEVEQVTA

SEQ ID NO: 20733 - protein, 574 aa, synthetic construct
MIATHYTCLFGCRKGGLMLQSNKITALYCRLSQEDMQAGESGSIQHQKMILQRYADEHHFLNTKFFVDDGFSGVSFEREGLQAMLQEVEAGRVATVITKDLSRLGRNYLKTGELIEIVFPENGVRYIAINDGVDTAREDNEFTPLRNWFNEFYARDTSKKIRAVKQAQAQKGERVNGEYPYGYIPDPNNRHHLIPDPETAPIVKQVFAMFVSGVRMCEIQKWLAENKVLTIGALRYQRTGQARYQRAMIAPYTWPDKTLYDILARQEYLGHTITAKTHKVSYKSKKTRKNEEEQRYFFPNTHEPLVDEETFELAQKRIATRHRPTKAAEIDIFSGLLFCAGCRHKMYYQQGVNIEPRKFSYSCGAWRNRARTGSECTSHYIRKNVLLDLVLEDMRRVLRYVKEHEQDFICKATEYGDMEARKALAQQQKELFKAQARMTELDTLFRKLYEDNALGRLTDERFVFLTSGYVDEKKSLAARIDELQQQIATVTERKRDISRFIQIVGKYSDIQELTYENVHEFIDRILIHELDRETNTRKIEIHYSFVGQVDTEQEPTQVVNHDRRNMVDVKSIAI

SEQ ID NO: 20734 - protein, 550 aa, synthetic construct
MSRKKQVYEKITALYCRISLDDGGDNESMSISNQKLMLRDFAEKHGMFQYEYYVDDGYTGRNFNRPSFQRMIADIEAGKIGCVITKDLSRLGRNYIEAGSYIEIFFPKHNVRYIAVTDGVDSLTRQEMDITPFKNILNDMYSRDISKKVLAGRMTRSRQGKFCGGQPPLGLMRDPEDKGHLILDPETAPVIRKIYDMALDGWGCMRIAKQLMDDKIPITRVKSNTECDVNYYSWGSARISHILRNPFYKGAHLVCRTHQKGIRSNTYDIIPREDWEVIEGCHEAIVTPEEWEQVQDIIDRRPTIMKGNACPFYNLFHGLVYCATCGKSMQVRYEKVGRTGKNRFTGEMREPIDRAYYICQTYNRLGKNACTSHKIEARDLYNLVLKDIQELAAQAMKDADAFYQRLSSRMERRYLVDASQTEKERKRLEDRNQEIDGMFLSLYTDKAKGVLTEQRFMKLTAALEQEQEANQKRLHDLAVMQSRADAQESEVRTFIKEIRRYAAIAELDESVLNRLISKILIGEVKKVDGQKVQEVRIVYNFVGEIPEIAA

SEQ ID NO: 20735 - protein, 501 aa, synthetic construct
MKPNIKEVAIYLRKSRDESDGKEDVLAKHESLLLEYAKNHNLKYEIYKEIGSSEYIDSRPKMVRLLSDVSQKLYDAVLVVDLDRLSRGDLEEMGRISRVFSDSKTIVITPTKTYDFNNEDQALINNFEMVFANHEFRMIRKRMIRGKQQGTKAGKWTNGRPPFPYVYNRLTKELDVDPDKVKVYELMKKMFLEDMKATYEIAWKLNELGFKTNRNSYWYENTVRRILKNEVHLGKVVYGKTSGSGSKKKLNANGVQIKDRSEWIIAEGSHQPLKTEEEHQRILAIFESRRYTPKGTRTNVQVLSKLIYCGKCNRVMSFTGKASGKKYVKTCLTTDHFGNRCHNRCLNVEVIYAQLFLDLEDYEQQLLNHEPKEKQGDSSTLQLALHNKLVELERLEKGIERIKDLFIDEMIDKSEMQMRIEKQKQSMQTKKEEIRSIEQSLAVIENVITDDDRLHAIKEFKKAWNTEGISKRELNTLAKQLIDRIEYVREGNNVKINIKFL

SEQ ID NO: 20736 - protein, 490 aa, synthetic construct
MKVLESYAVYVRVSTDRDEQVSSVENQIDICRNWLERNGFQWDEKRVFKDEGISGTLFVDRPSIQLLLQKAKAKEINMVVFKSISRLARDLKDSLEIREVFLAHQVRIISVEEGYDSVKAGKNDMAFELWSLFSAQYSRTLSSSITAALAVKVRRGEHIGKIPYGYNREEQKLVINEEEAQVVKMMYKWYCEGWGYKKITNELNRLGIKSKTKKNWQMTSVQRILQSAIYKGTFILNQYTSVKVGGKKKQIRNPKEKWFVFPNHHPKIVEEEIWNQANRKKNKKNKTKITAWNEFRNLAKCAVCGSNMVIVQSHLKKKSGERTEWKYLKCSQYRRAGKHGCVNHVPIQYGDFRQFIIDLLVKKGESITLKLQSNVEEGREKKVKKLHQFVNTNQQKKKSLLDLYLEELIDKEEFEKKRNDLEIEIKKANHELFVLQQSDSATLDIKTIKEAFRQLQQQGQDLFHVFQTLIAEIVVHQDGTVDITYTFEGI

SEQ ID NO: 20737 - protein, 525 aa, synthetic construct
MKTIRDVLEKGKKGAFYARVSSDRQTIDAQRHHVYEFIKNYECEIVKEYVDHGESAFKKKLIKRPKMMALLRDVEQGKYDFVVTYADDRLARSEIEHVQIRLMMKEAKTDVILTSTGELYTERDIITQLIREGGTRYEVERISARTKDAYGQRTDYGQWMGGPVPFGYVQDESTKNFSVIEDEKEIVLRIYQLYQNGEGFADIAKILNEQKAKTNTIHWKKERIKHILTNPIYAGYVTFGRLKPGSGNSIEELSKWKIAKCEEIPPIMTKEEWLATFQMFEKKRNKELPPKQLKTEYVLRDLIYCKSCDALLLPKNQETRGKNGKKYGMKKYMCSNKLCNVWFSTDELHALVFDSVIKEITDKVISKSQTELMYEMERILEKDIKQIKKEIQRLKKQVDDCLVWIKDAEREIDELYNQKKKLVEVDSKIDPLLDVMLDYRVHLLHEIKGTEELIAKKEAEMKHIEDIDSNQSMLQKNVLQVFRIDFANLQKDMKRVRQFLVYLIDKIIIDQRGKTEYILKINLER

SEQ ID NO: 20738 - protein, 452 aa, synthetic construct
MKAAIYIRVSTQEQIENYSIQAQTEKLTALCRSKDWDVYDIFIDGGYSGSNMNRPALNEMLSKLHEIDAVVVYRLDRLSRSQRDTITLIEEYFLKNNVEFVSLSETLDTSSPFGRAMIGILSVFAQLERETIRDRMVMGKIKRIEAGLPLTTAKGRTFGYDVIDTKLYINEEEAKQLRLIYDIFEEEQSITFLQKRLKKLDFKVRTYNRYNNWLTNDLYCGYVSYKDKVHVKGIHEPIISEEQFYRVQEIFSRMGKNPNMNRDSASLLNNLVVCGKCGLGFVHRRKDTVSRGKKYHYRYYSCKTYKHTHELEKCGNKIWRADKLEELIIDRVNNYSFASRNVDKEDELDSLNEKLKIEHTKKKRLFDLYISGSYEVSELDSMMSDIDAQINYYEAQIEANEELKKNKKIQENLADLATVDFNSLEFREKQLYLKSLINKIYIDDEQVTIEWL

SEQ ID NO: 20739 - protein, 565 aa, synthetic construct
MLILNGDQKLSTEKIMSLIGKINALIYARVSTTDQANKGFSIDSQIERCKERAIKKFGYKESEIIVLVEPGGMGDDPNRPALNHALYLLERGLGKKFIVLHPDRLTRDNTLQGVVSRRIWGMGVDIEFIEFEVNPHDPESMLMYNIQGSIAQYNKAKIHANSKRGRLAKAKKGELPSFKRLYGYKFNTKTDLPEYHEDEKEILLEMKDMLINKKMSSNDIAKELSRRGVAAPNGKTWYQSTVSRMLQNEDYTGNYYYGKSKVVQLNGKKKQVPTPKEEWILIKIPAMWDHQTREQIIKQMKLNFKGRSRSSRDYLLKGKAKCGRCGGACGSGITSKTKSGVYKYYSCRNKNVKGYQNGKKICTCKGKNWRVDIVDDAFWKWFKKLLSNPKEFLEQFLVETSNEKKIEELENKKEKLDKQLEDIDSEISNYVILFGKGKINEDMFDKITQPLELNKEHIKNEIEILNSHLSANKQDNDKNQKLIEYINSFSEMITKDISMHEKRQFLDFFIEKVTLFDDDHMEIVWKGAGLNDSDQVDFLNSEQGGEFSNSHKRLNHIQAYGRQTA

SEQ ID NO: 20740 - protein, 515 aa, synthetic construct
MKTAIYLRKSRADLEAEARGEGETLAKHRTTLLKIAKEMNLNVLAVREEIVSGESLVKRPEMLALLEEIEDNKYDVVLCMDMDRLGRGGMKEQGIILETFKRSNTKIMTPRKTYDLNDEWDEEYSEFEAFMARKELKIITRRMQRGRVASVEAGNYLGTHAPFGYDIHRLNKRERTLTLNPEEASVVRMIFDWYANEDMGANAIRSKLNDLGYKSKLGNEWNPYSILDILKNNVYIGKVTWQKRKEVKRPDAVKRSCARQDKSDWIIADGKHEPIIPESLFEQVQEKLNSRYHVPYNTNGIKNPLAGIIKCSKCGYSMVQRYPKNRKETMDCKHRGCENKSSYTELIEKRLLEALKEWYINYKADFEKHKQDDKLKETQVIQMNEAALRKLEKELVDVQKQKNNLHDLLERGVYTVDMFLERSNVVSDRITEITSTMENLKKEIKTEIKKEKVKKDTIPQVEHVLDLYFKTGDPKKKNSLLKSVLEKAVYKKEKWQRLDDFELVLYPKLPQDGDI

SEQ ID NO: 20741 - protein, 460 aa, synthetic construct
MKCAIYRRVSTDEQAEKGFSLENQLLRLQAFAESQGWEVVHDYMDDGYSGKNMNRPQIKRMLHDLKSNKFDIVLVYRLDRFTRSVKDLNDLLEVFKEHEVDFKSATESIDTATATGRMILNMMVSTAQWERETISERVKDVVRKKKDLGLISTGYPPYGYAMNDGVISQVPHEVEIVKFVFEKAKVYGFQKISKLLNEQGLVTRNGTKWLISTASRIAHNPFYSGEMRYKRDGETSTVPINVEGYEPVITKEEHKEVLKAIKKRNRNQTRAKSNEVYPFSGIVLCPECGHPMKGTRVSSRGYYYKYYRCDRASDHFCNGKLIRYEKLDKAFAEYIHDAFQIDRIEIKEETNTKDIQREIKRCKSKIERLKDLYVDGDISKKKYKNDVGELNEKIYDLEQKLLSAENKISHDHIRENLKRLSEFWGLIDDNTKMESIRGVFDTITVEIQGNDVVITDHTLL

SEQ ID NO: 20742 - protein, 452 aa, synthetic construct
MKAAIYIRVSTQEQVENYSIQAQTEKLTALCRSKDWDVYDIFIDGGYSGSNMNRPALNEMLSKLHEIDAVVVYRLDRLSRSQRDTITLIEEYFLKNNVEFVSLSETLDTSSPFGRAMIGILSVFAQLERETIRDRMVMGKIKRIEAGLPLTTAKGRTFGYDVIDTKLYINEEEAKQLRLIYDIFEEEQSITFLQKRLKKLGFKVRTYNRYNNWLTNDLYCGYVSYKDKVHVKGIHEPIISEEQFYRVQEIFTRMGKNPNMNRDSASLLNNLVVCSKCGLGFVHRRKDTMSRGKKYHYRYYSCKTYKHTHELEKCGNKIWRADKLEELIINRVNNYSFASRNVDKEDELDSLNEKLKIEHAKKKRLFDLYINGSYEVSELDSMMNDIDAQINYYESQIEANEELKKNKKIQENLADLATVDFDSLEFREKQLYLKSLINKIYIDGEQVTIEWL

SEQ ID NO: 20743 - protein, 452 aa, synthetic construct
MKAAIYIRVSTQEQIENYSIQAQTEKLTALCRSKDWDVYDIFIDGGYSGSNMNRPALNEMLSKLHEIDAVVVYRLDRLSRSQRDTITLIEEYFLKNNVEFVSLSETLDTSSPFGRAMIGILSVFAQLERETIRDRMVMGKIKRIEAGLPLTTAKGRTFGYDVIDTKLYINEEEAKQLRLIYDIFEEEQSITFLQKRLKKLGFKVRTYNRYNNWLTNDLYCGYVSYKDKVHVKGIHEPIISEEQFYRVQEIFSRMGKNPNMNRDSASLLNNLVVCGKCGLGFVHRRKDTVSRGKKYHYRYYSCKTYKHTHELEKCGNKIWRADKLEELIIDRVNNYSFASRNVDKEDELDSLNEKLKIEHTKKKRLFDLYISGSYEVSELDSMMSDIDAQINYYEAQIEANEELKKNKKIQENLADLATVDFNSLEFREKQLYLKSLINKIYIDDEQVTIEWL

SEQ ID NO: 20744 - protein, 532 aa, synthetic construct
MILADFLNTEGLKAVFYGRHSTDEQNVETQRHISYEFAKKNGLTIIDEYIDENISAFKKTLDKRPHLDELRKEAKKGQFDCVLVYKADRLARKIDQHMQLWGEFRELGIPIILTESGKLYTTDSPTEIMVDIGLSSMEAENTRIRTRDYYNAHTVQGKWLGGNLPYGYEYDVDEEKNSIMKPIPNQIEKVKEIFRLYVRGYGFKRIAKIMNDQHPKDTGSGMGKWVSESVKSVITNPFYAGFTTSQRIVHGAGNSVNDRSEWKKGKCDKIPAIISEEEWNTCMELYEKKKNGTIYQNKYITPYLFINILCCKSCNEKLIAKNYSSGKKRKDGTSYGGRVYICPTCKQKWNVKKVHEELIEDVLSGWHFHYFSNNKEELQKDIMKEIQIDMKDIEDCIKSYKKELSSYTEKLKEVENKQRKLMEKNPEPDELQFALVQFRISVQKKIELFEKEIERKLKEKQQLYLSYGDVENFKSITKSITNFEYDFSEPEFRKLILFLLDKVTITGKDKYDYEITAKVDLNQRGRINLGFI

SEQ ID NO: 20745 - protein, 447 aa, synthetic construct
MLRCAIYIRVSTEEQAMHGLSMDAQKADLTDYAKKHNYEIIDYYIDSGKTARKRLSKRKDLQRMIEDVKLNKIDIIIFTKLDRWFRNVRDYYKVQEVLEDHNVDWKTIFENYDTSTANGRLHINIMLSVAQDEADRTSERIKRVFENKLKNNEPTSGSLPIGYKIKEKSIIIDEEKAPIAKDVFDFYYYHQSQTKVFKEILNKYNLSLCEKTIRRMLENKLYIGIYREHENFCPPLIDKNKFNEVQLILKRKNIKYIPTKRIFLFTSLLICKECRHKMIGNAQIRNTKAGKIEYILYRCNQSYARHTCSHRKVIYENKIETYLLNNIESELKKFIYDYELEDIPKVKNKVNKTNIKRKLEKLKELYINDLIDIDMYKEDYEKYTEILNTKEEKIEQRNLQPLKDFLNSDFKSLYSSISREEKRLLWRGIISEIQIDCNNDITIIPHP

SEQ ID NO: 20746 - protein, 519 aa, synthetic construct
MKKITKIDTVAQVKPAKLKVAAYARVSTSSEEQLLSLENQKLHYEQRILANSNWEFVEMYFDEGISGTKIDKRNGLKRLLQDCETGKVDFILTKSISRFSRNALDCLEIVRRLIDLNIFIEFEKENINTQTMDGELMLSILSSLAESESRSLSQNTKWSIEKRFQNGTYKIGYPPFGYDWLDGAMVINKEQAVVVKDIFADVLKGTSTGDIAEKLNQQGVTTKRRKTWHGTTIRGIIKNEKYIGDVLFGKTFTDDSFKRKVNRGDKNQYFMEGHHSAIIDKETFEQAQQMLVQNAKSKNIVQEDDKYQNRYSFSGILKCGECGGTFKRRIQTKNKNEKYVAWACTTHLKDKHSCSMKFIKDEQIKLSFITMMNKLVFSHQILLKPLLADVRSTTYTVDNTQIVVLDDELEKLKQQQDNLVQFVANGYIDRPTFVKEQNQLTKQMDDLENKRKMLTVAISKGFDNLESLEELVKFTKQDQMLTSFEDTHFVIFVDEVVILSRTELVFKLKCGLKLKERLV

SEQ ID NO: 20747 - protein, 520 aa, synthetic construct
MKNKSVTMIPATKRVGTLKVDAEEKPKLRVAAYCRVSTDSDEQASSYEVQVEHYANFINSNSEWELAGIYADDGISGTSTKNREEFNRLIQDCMENKVDRIITKSISRFARNTLDCLKYIRQLKEKNIPVFFEKENIDTMDSKGEIMLTIMASLAQQESQSLSQNVKLGLQYRYQQGEITINHNRFLGYTKDEDGHLIIEPTEAEVVKRIFKEYLEGSSLIQIARNLEADRILTGAGNKNWAGTTVKGILVNEKYMGDALLAKTHTVDFLTKKRVKNNGIVPQYYVENSHEPIIPKTLFLQVQEEITRRANLKNKKGSITYSSKYALSGITYCGKCGEIYRRLHWNNRGKKSIVWRCYSRLDKTKDCDARTILEEDLKQVVVDGINRVFGDEGRIKDILNSNIQKMLKVDNTLEVETIDSQLQVLQQQLLEQSSKNQDVVSIGNQIIQLKEKKQSILLSKAESNSSKQRMAEMMEFIEQVGKDRLEYDEVFVRRLVEQVMVYDENITIKFKSGIEIEVQN

SEQ ID NO: 20748 - protein, 452 aa, synthetic construct
MKAAIYIRVSTQEQIENYSIQAQTEKLTALCRSKDWDVYDTFIDGGYSGSNMNRPALNEMLSKLHEIDAVVVYRLDRLSRSQKDTITLIEEYFLKNNVEFVSLSETLDTSSPFGRAMIGILSVFAQLERETIRDRMVMGKIKRIEAGLPLTTAKGRTFGYDVIDTKLYINEEEAKQLRLIYDIFEEEQSITFLQKRLKKLGFKVRTYNRYNNWLTNDLYCGYVSYKDKVHVKGIHEPIISEEQFYRVQEIFSRMGKNPNMNKESASLLNNLVVCSKCGLGFVHRRKDTVSRGKKYHYRYYSCKTYKHTHELEKCGNKIWRADKLEELIIDRVNNYSFASRNVDKEDELDYLNEKLKIEHAKKKRLFDLYINGSYEVSELDSMMNDIDAQINYYESQIEANEELKKNKKIQENLADLATVDFDSLEFREKQLYLKSLINKIYIDGEQVTIEWL

SEQ ID NO: 20749 - protein, 558 aa, synthetic construct
MTKLYSYIRFSSMRQSDGSSYERQIRMAKEIADRYNLELVNDYQDLGVSAFKGANSKTGALSRFLDEIGRSIPVGSWLFIENLDRLSRQDIISAQELFLSIIRRGITIVTGMDNKIYSIETVTANPMDLMFSILLFIRGNEESQTKRNRTNSSALLKIKAHQQNPQSPAVAIEEIGKNMWWTDTTSGRVLPHPVYFPVLQKIVQLRQEGHSAGVILDYLNEHHEPPAPTSNKKHGKWSRAMVSRLFNTKALIGVKTVNVDGVEYELRDYYPRVLSDSEFYFLRKNIIKKAWDYSHVKEKVIPLLSGIGVLRCVHCGATMVKQTAANGKREQYRYCCDGRKSGRTDCPYPNWGFRAVTLEGAVLQLLADKIWIAEDKTNPIPEIQVKIDEISRKIDNLINLSAMMGATKELANQITDLNSQREALHEEIRLFEREMYSVDSQGWDKLAQFDLSDVQNEERLKVRMKIKGALHEIECSRIDSKKNLFVLVYLDGLRQRLVIENNRGLKKGQIFVDLKTINDRQILESAGMVLHPCIEMIIDADWKAPEEIPGLLSEEFGI

SEQ ID NO: 20750 - protein, 539 aa, synthetic construct
MLRQATQNLITALYPRLSHEDELQGESNSISNQKRILEAFAKQNGFTNLRWYTDDGYSGANFQRPGFQAMLADIEAGKVGTVIVKDMSRLGRNYLQVGFYTEMLFPQKGVRFIAVNDNVDSANGGMDNDFTPLRNLFNEWLVRDTSKKIKAVKRAKGMSGKPVTSKPVYGYLMDEDENYIVDEETAPVVQQIYQLCLAGNGPTKIARMLTEQQIPTPGTLEYRRTGSTRRYHPGYECKWATNTVVHILENREYTGCLVNFKTEKPSYKVKHSVENPVEKQAIFPDHHEPIIDTETWERVQELRKQRKRPNRYDEVGLFSGMLFCADCGHVMYQQRYQNKTRKQDCYICGSYKKRTRDCTAHFIRTDLLTAGVLSNLRQVTEYAAKHESRFVKLLIQQNEIGGKRKTAAATKQLEQAQERIAEVSRIIKRLYEDNVNGKISDERFMELSADYEQEQRELKDRAAALQAELDKSQAATVNAEKFMGIVRKHLAFEELTPTLLREMIEKIVVHECSYDENGTRRQDIEIYYSFVGKIDLPEA

SEQ ID NO: 20751 - protein, 560 aa, synthetic construct
MTKLYSYIRFSSMRQGEGSSYERQIKMAKEIADRYDLELVNDYQDLGVSAFKGANSKTGALSRFLDEIGRSIPVGSWLFIENLDRLSRQDIISAQELFLSIIRRGITIVTGMDNKIYSIETVTANPMDLMFSILLFIRGNEESQTKRNRTNSSALLKIKAHQQNPQSPAVAIEEIGKNMWWTDTTSGYVLPHPVYFPILQKIVKMKQEGHSTGSVLDYLNEHHEPPAPTSNKQHRKWSIAMVSRLFKTKALIGVKEVNVDGVQYELKDYYPRVLSDSEYYFLKNNLIKKAWSFGHAQEKTIPLLSGIGLLKCAHCGSPMVKRKAANGKVEQYRYTCDGEGSRRTDCLYPNWGFRASSLEGAVLQLLADKVWIAEDKANPIPEIQVQIDEISRKIDNLINLSAMTGATKELANQITDLNTQREALHEEIRLFEREMYSVDSQGWEKLAQFDLSDVLNEERLQIRLKIKGALRSIECARIDRNKNLFTLVYLDGLRQRIVIENNRGIRKGQIFVDLKTINDRQILESAGMILHDHIDILIDEKAFYDGLPKEEDGPLSKFGI

SEQ ID NO: 20752 - protein, 523 aa, synthetic construct
MRQVITYLRFSSKPQERGDSIRRQKGLFERWLKDNPDAKVVDEFSDEGASAYHGHHLKGDFGRMLQNIQDGKYLSGQTVLLVESETRLNRQKARNTENLVDLITGKGVDVICLESGKIYTSTNIDDLDTSIQLKIAAHIAHQQSKEKSIKVSAAWEHRAQLALEGKQQLTKNVPGWIDPDTRKLNEHSSTVVTIFDLLLSGESLHNIARYLQANNIKSFSRREKANGFSVHSVRTILRSESTVGTLAASKRNDRPAIPNYYEPAIDVATFNKAQEILSKNRVGRAPASDNPITINLFKGIIRCQCGASVHPTGVKATYQGVYRCNNVPDGRCNVPTIKRKPFDKWMLDNIVGFLERSDGNNTDKRKAEIEYQISLVTSKLKKATPLLLELDDVTELKEQVKELNIQRSNMQSELDELNQRETLSDKPLHHLSEIDLTTKAGRVEAQLILSKFVQSIELQREMIIITLRNGTVIGKSRDLSPVLSQDLMKQVVSSSSPRDIDMFSVITSDEEFRKSGKPVTKRS

SEQ ID NO: 20753 - protein, 441 aa, synthetic construct
MIKTFIYSRVSSQEQLSGGGLDRQETDVREYVTRNGLDQYEIVAMVDRGISGYDGSNMRDGELGKWYKDAITGMYWGSHLVLEAIDRFSRRDPMLAMEDFTVLVNKGGIKVHIVKFNTFINGDNLPMLSMMMNLAHSESKQKSDRISKGWQRRRRMALDNGTAITARTPYWIDVRDNEYRLNNSSIAVVEAFAMYKQGLSCGLIAKKLNELKHYFPYMWTKTAVQHIVDGLNTSGIIDAPRAIKTIKAFYKSGFSVEDIAKKMNAEFQFMKEWNAPAVHKLLQNKSVTGLVEIQKRKLIQEFDSDGKPLELRTKSEGEKYFESIYPQIISIDDFELIQKLLESNRKVDTKTGKGQTTGGTVTQNEDGELVKQFILSSLCRCYKCGGAMFNNIVRSKRKNGKVDTYSYLRCLNERDAHCDVKALNYPVIERAIIEHVKGLNF

SEQ ID NO: 20754 - protein, 564 aa, synthetic construct
MSSFDGLRAIVYARYSTDMQNPKSVEDQHAEIEGFAARNGIKVIRRYEDREKSSSTMFDRPGLDEMLNDVVEKRVKADVLLLEHPNRLSRDTVDSLRIRGLLEFMKMRIVTVHQGEMDEMKMTFHGLMGREFLKALKAQVRRGMKGRAREGKVVAGVAYGYKTVPGKPCEREIIPERAEVVRRIFNEYIAGESPRSIAMRLRAEGVPAPGRTGWNHQNISGGRTKVGRKSGILNNRIYIGEYRFGDTYQVQNPMTGKQVRRWNQDDAVVTPTPHLRIIDDETWEAAQRVMDQRVKVAGQPRKPWKRNDSLLAGMCKCPCGARMVVGNRSRSGAGRVVCSEAYYRYNCNHTSSYDLPRLEAAVLECLNVQLTDSATLEAQLEAFLDEYRTTFMTRQREARQTLDDTEERLRKVRATTQRMIALLEDDDADEDTVKMVKERLSQLGQEKAALEERKRIAESEVNVVALHPTAVVKYREAVKVLQEDLTGKELTVASRMAFRNLVAGITVFPVGKRQPYRFKINGRLGALLGIDLYPQALSAREIVEQNGGPVEKVCYDNVASGKAG

SEQ ID NO: 20755 - protein, 603 aa, synthetic construct
MSETIALYARVSTESQTRDNSIASQIAALQERIAADGLQLEPDHAYVDEGYSGASLLRPALERLRDAAAAGLLDRIYVLAPDRLSRRYAHQVLLIDEFRRAGADVVFLNRPIGGTPEDDLLLQVQGVIAEYERARILERSRRGRRHAARSGLVSAFTGAPFGYRYVPRDHGGGCARFEVVEDEARVVRQIFAWIAYERLSLREVCRRLDQAGCPRRHGAARWYASTVRGMLANPAYTGHAVYGRSRYLPPKPRLRPLRGHSQPSARATSRMPAPPEDWIEVPVPRLVDDELFEAAQAQLAENRKYKRERYCGQRWLLQGLTVCRCCGYAYYGKALLRCSRDRSKGQLRYYRCVGSDGYRFGGTAVCSNHAVRADRLEALVWEQVRQVLSDPHCVAAEYRRRLTQAHDGTTPDEVMRLDHQIASLRRGIGRLIDSYADGVISRAEFEPRISGLKARVARLEEQRQTVFEVAQAEHDLSLLIGRLEDFAAKVQEGLDHLDWLGQRDILRTIVRRVEIGHDSTEVVFRVPPPDPPHPAGLKRGRTPTCQHCTDGGGTILRLDQPKSAAVEGPGGYTRVRRSLSVCRLCHAPHPPTGTRSMNSRMQS

SEQ ID NO: 20756 - protein, 601 aa, synthetic construct
MNTQQRKAYSYLRFSTPDQLKGDSYRRQTDLSQKYARENGLELDDSLTFEDLGVSAYRGRNAREGSLGLFIGAVEEGQVLPGSYLLVESLDRLSRDTVMEAFKLFSQIIDLGITIVTLSDGRSYSKDSLNESFTDIIISLTMMARAHDESKTKSERLRAAWSHKRKTAGTKKLTALAPSWLQLNEARDGFDVLEDRAETVKMIFRMAGDGYGANSIVKYLNTHDVPTFGRSKEWHKSTINKILSSESVIGRYQPHSYTVDEATRKRTRTPTGDPIDNYYPAIIDEDEFLRVKAEISARTPKTGRKGRRFSNLFQGLARCGNCGASMGYVNKGPKPKGGTYLVCSRAQRGATDCEYAAVPYQRVEHAVLHTIHELDLDELLPSIESETASQKKALRMNLETHQARLEEVEGQIDNLLELAATTKSPSLATKLEGLEAEKGGLHQKILASLEDLEALSRAAREFEDQQREVQKAYQQWLEINEAGSDADAYALRLKVNRALKKLLETIHVSVIKQPDITKEEALAGISSGGPRPESLENSDLDTLATALSSPRTVLVLSFNHLDSPKVRTVSLLHSGRALVTTGEWKEAGGELGQFRMSEIDA

SEQ ID NO: 20757 - protein, 611 aa, synthetic construct
MSKRASDKKETYDSLYLDNQTQPKDAALSFQKINTSKSLGDDVFHAVQKNVMEFQVKHTSKNTDKEGITALYVRLSQEDTLNGESNSISNQKKILDHYCREQNYTLTYHYVDDGYSGTTFDRPAFQEMLAHIKAGKINRVIVKDMSRFGRDYLQVGMFTDILFPNFDVHFIAINDGVDSTKGDNEFTAIRNIFNEMHARDTSKKIRATWQSKGRSGEKLSTNAPYGYLKDPTNKKNWIVDEDAAAVVQKMFSLCMDGLGPTQIARWLRERNILCPSAYFRSKGIKYPATPPANPYQWSTETVSTMLERVEYLGHTVNFKTRKTSYKTKRFIYTDPSEWKIFENTHPAIIEESVFLIVQNIRRSRRRPNRYGDMGLFSGLLFCADCGGKMYLCRASGFKKEQEYSICSTYRKDRSLCGKTHSIRTVVLEELVLNNLREALHYVSAYENDFIQEVSDIRMSEKEKELSKMEDTLLQMEKRIVELDVIFKRLYEDHISGKLSDQRFIHLSGEYEKEQETLKASCHTLQKELKEHEKKKTNVRKFVKIARKYTKLEKLDTAILREFIDKILVSSKDHQTKTQEITIVYNFIGAFDFNRAIHQTKGKDKHTKVDVI

SEQ ID NO: 20758 - protein, 450 aa, synthetic construct
MPKMLRAALYIRVSREEQVLHGYSIEAQKQALTEYAQKNNLHIVDYYMDEGYTARKRYTKRKEFMRMLEDVQAGNIDIILFIKLDRWFRSVRDYYKIQDILEKHNVNWKTIHENYDTSTASGRLHINIMLSVAQDEADRTSERIKFVFASKVQKGEVLSGKTAFGYKIEKKKLVIVPEKAEIVREIFSFTLKHQNISATITYIKDTFGIHFMHNTIVRMLKKRIYIGEHRGVENFCEPIVDRAVFDTIQVILKKNIRSNKSRTTYVYTGLLICPECGQKLISSKTVHSNGSISYVYRCNRHYINKICTFNKIIGEKKLDTFLLSNIEQQLSDFIAYHEIKENNTPKTTMANEREKIRNRMEKLKDLYLDDLIDKHTYKYEYEDLSMRLKRLDTKQVQKKIDINALKSFLGKDVSIIYTELSRFEKQTLWRSIIKQIHFDPVTLKPQIIFS

SEQ ID NO: 20759 - protein, 543 aa, synthetic construct
MKKVLTIFPKTNAAMSEAPLGAKLKVCAYCRVSSASSEQMDSYENQVAYYTGYIQQKSEWDFAGIYADGGITGTKKEGRTEFNRMVRDAQAGQINLIITKSISRFVRNTADCLEIVRYLKELGVAVFFERENINTLSAESELLMTVLASIAQEESRSTSENIKWAYRKKFEKGKVVVISSRFLGYDLDENGQLQVNPAEARIVKLIFREYIAGKGTEAIADLLTAMNIRTVTGSAKWQASVVRGILTNEKYCGDLVQQKTFTEDHLTHRKRKNRGELPMYRVQNNHEAIITREEFDLVQQLMAERAAQYGNLPGDRVKYLNRYAFSGKLVCDHCGATFTRRSWNCNGPTKQIVWQCRTYFKEGKAACSMKAVDDITLKAVFVRAFNKLYKHKDTLLKRFLDNVEKGLRIESIGGHDRKLELAIERVGEQMKALIRRQIKDSSETLEFQTEYDGLKQQLEKLRNQKNELSGDDSRLAEVKARTQEIASVLEGQVYIMEEFDEEICSALVERVKVLTPTHLVFELKNGLAIEQQFIKERGIHGLQ

SEQ ID NO: 20760 - protein, 539 aa, synthetic construct
MKVALYARVSSEAQDVELSIAAQLRALKDYAGKNNYQVTCEFVDEAESGRTAARPEFKRMIAMSKSSVPPFEAILVWKLNRFARNRADSITYKLLLQKNGIKVISINEPLDDSPTGKLMEGIIESLDEFYSANLGQDIKRGMKENALRGFYNGSQPPLGYELVKVKDGPKQRNKLAPEADSSPGVKTVKYIFALADRGKGCKEIANILNREGYITKAGKPWGRTTVHKILCNEAYTGTLIWGARSSQGLAKNEEIVRLENAWTAIIDKETFQRIQQKMVSRQPKNTHPRTVPSQYLLSGMAFCSCGAALTGHSAKSGQYAYYQCNRKFKQGNGVCNCQAIPKTKLESAVIKQIKSRVLTEENLEALVTQVNEALKSTSSYHKEKLAVLDAELDDTRQRLNRLYEAIESGKLNYDDLAPRIRELRERQTKLEKSRVLAEAEMVADGNDSFNLEVVKAYANDLKQLLNESKITDCKAFLKTFVKKIETDSRKVSLKYTLPLPGTNRRREVLPIDTFGGARETISRTDTVSCLILLGGNGKV

SEQ ID NO: 20761 - protein, 608 aa, synthetic construct
MTITQPPATTALDRVGETTTLAVSYLRVSTKEQASKGGRDEGFSIPAQREANLRKARDLNAIITEEFVDAGESARKADRPELMRMIEYVKTHQVAYCIVHKVDRLARNRADDVTIHLALKEAGVMLVSATENIDETPSGMLLHGIMSTIAEFYSRNLAGEVSKGMNQKALNGGTNGKAPMGYLNVTTRDELGREVRTVAVDPDRAPLIKWAFEAYATGNHSTISLREELIDRGLTTPPTPKRPSKPPVLSTIHKMLTNPYYKGSVRFRGASYDGLHEPIVAPEVWYRVQAVLTAHQTSGEKTQSHDHYLKGSLYCGRCGSRLTLTNAKSRRGVIYPYFMCSGRHAKRTNCERKSMFVPDIEAAVEDYYRNVQIPEHVVTALRELVTSEFDRLHAVAKQESQAYKIERDGLNDERKKLMQAHYAGAVPLDLLASEQDRIARRLAFLDAQINAGDIEYDQAKAHLDDCLALAGDMHTIYVSIDDSLRRIANQAFFDKLIVTDDDTIHGEPGVPFNVFLNREVQTLAVRQQGRTAESGTQTGHVAGLNNDLLVEVRGFEPLTFSMPWRRATNCAIPPLARSILLRCTHDDKSGDSDADHIDSSEHRQARGL

SEQ ID NO: 20762 - protein, 573 aa, synthetic construct
MTATTTAQQPPAATALDRIGETTTLAVSYLRVSTKEQASKGGRDEGFSIPAQREANLRKARELNAIITEEFVDAGESARKADRPELMRMIEYVKTHQVAYCIVHKVDRLARNRADDVTIHLALKEAGVMLVSATENIDETPSGMLLHGIMSTIAEFYSRNLAGEVSKGMNQKAQGGGTNGKAPMGYLNVTKRDELGREVRTVEVDPDRAPLITWAFEAYATGNYSTISLREELIDRGLTTVPTPKRPSKPPVLSTIHKMLTNPYYKGSVRFRGASYDGLHEPLVAPEVWYRVQAVLTAHQTSGEKTQSHDHYLKGSLYCGQCGSRLTLTNAKSRRGVIYPYFMCTGRHARRTNCERKSMFVPDIEAAVEDYYRHVQIPEHVVTALRELVTSEFDRLHQVAKHEAQGYKAERDALRDERTKLMQAHYAGAVPLDLLGTEQDRIARRLAFLDAQINAGDIEYDQAKAHLDDCLALAGDMHAIYMSIDDSLRRIANQAFFDKLIVTDDDAIHGEPGVPFNVFLDRDVQTLAVRQQGRTAESGTQTGDVVGLNNDLLVELRGIEPLTFSLRTKRSTN

SEQ ID NO: 20763 - protein, 522 aa, synthetic construct
MKLSHILQPNMKAAFYGRHSTDKQDMDMQLNSVMEVIRKYNCVHTHSFLDKAVSARKNKITSRKELENMFEAAKRKEFDFVIVYKSDRLARDPLEHQTIRIVMKTLGIPIIISSTESVYNTDNDLIVQLMEDGFTKYEVDTIIARTQSGLENKAKQGKWLGGKPPFGYTYDKNSGQFIEHPEELCYVKEIFNLYLNGHGFQHIANTLPNGSRRGKDWGKENVKAIVLNPFYCGLLSWRRQTDRKRNARDIWIEAPNHYVKPIISRTTWEACWRIYSEKRNGNMVPKHYKTSFLLQGLLSCEKCQELMKTKNQQTVSSTNKKYGGKIYFCSNCKLRIDAGLLHDKVVNQTLTDVKISGFHNVYHAIEQKIQHEIQELNNNIQKHQRLYENYTIKLHNITEELKQRMKNNDDKRFLKSLAIYRSDVQRKLDGIIKQMNGFKQQIILKEKIEKSKETWLHTLNEVFQDDVKLQEISDMDKRRFLLPLIQSVSIKENTKRNEYDISLQLRTDFSKRDVKNQISLIL

SEQ ID NO: 20764 - protein, 629 aa, synthetic construct
MPQLYSYIRWSSDRQDKGTTKSRQVAAAKAYAEEAGLEMVEIIEPGVSAFRGKNRAGKLGDFIDAVKNNAIPADSWLYCENLDRLSRDQVDEALRLFLELIGLGLTIVTGMDRKVYNRESIRQNPTDLMISILMFIRGNEESETKSNRTIGNVVALVERHKAGLPVNIKSVGRHPFWLDDSGSQYEAVKEHPVYWSIAREAIDMFLAGNGIYTVKRYLDDKYPNGLKGKEWDYQVLKKMRDNRALIGERTITAGGATYKLDNYYPWLCRDEAEFLTLAERKQQNNYKAKKDKAEEIKLLSGLQVLRCSKCGGTMHSFMNHGSVRYICTNGVHLQKKCSGWSISAPLVEHCTMISLLIGYMDKSRKDGINNTAIEEEISRKATLLSDLKSRISNMAKAIAIAPEVSELAVQLNLFDLERKQAVLELDKLKERLHSLKGKGSLEVDITDFLMLIQWSVFTNMEDTDRNKIRKIISSIIESIVVDKTDGCITIKIKCHHKDEWLVFGGVNRKPFWAFTIEYSTNDAIDIEGEDSSYFVSNPLFQKAIEQLDSIKQSYLNLFETANTMLGVVGYSDIRGASFWPNTGQYERANVEYEGITYSIAMNGRVPKAITAALEATGLSRKDFIEYYRV

SEQ ID NO: 20765 - protein, 546 aa, synthetic construct
MKKNYSSKIADLYIRVSTDEQADKGYSQRDQAERLKGYCAKYGIAVQNVIFEDHSAKNFERPQWSAYLKNLKKRTKKDREPRLILFTKWDRFSRNAGDAYHMISVLESLQVEPQAIEQPLDLKIPENKIVLAIYLSTPEVENDRRALNVFYGMRRARKEGRIMGTPPYGYINRCTEDGRKYIGVLHPEADNIIWAFEEIAKGELPSEHIRVLMNKREGKNLTRNAFMVAIRNPVYAGKVFIAEFENEPAHYVKGKHVPLISEELFEKVQRVLEGKSRKSRTEVGESKVLSNESFPLRGILICPRCGNTLTASTSKGNTKFYSYYHCNSKCGFRHNSDDLNKKFVDDLRKYEILPEHKDLLKVALLRNYKKYCGNVDDERRSVMAEIEKVNQKLTKARDLFLTDRLDEDDYNEVKKECKQKLEELEENLKGLVKAGKDQDIPGKLSLALDGISNLAQRYVEGTLDDRRMIASSLYYQKLEFDGKTFRTPKSNAFLNLIKLSKSGLEGQKKSHQNLENPDDHRVSAKGFEPLTVCLEGRCSIQLSYAP

SEQ ID NO: 20766 - protein, 652 aa, synthetic construct
MKDKALALGWPETAIRTLDRDLGQSGAQMAGREDFKTLVADVSMGQVGAVFALEVSRLARSNLDWHRLLELCALTHTLVIDADGCYDPGDFNDGLLLGLKGTMAQAELHFLRGRLQGGKLNKAQKGELRFPLPVGLCYDDQGRIVLDPDDEVRGAVQLVFRLFRETGSAYAVVKRFAEGGLRFPKRAYGGAWAGKLIWGRLRHERVLGLIRNPSYAGVYVFGRYQYRKHITPQGDVHKRTTAVPKADWRVHLPEHHEGYITPEEFEQNQARLARNRTNGEETILSGSAREGLALLQGLLVCARCGRAITVRYQSHGGIRPIYLCSWQRREGLGTTDCVNVRGDLLDDAIGEAVLKALRPAELELALTAMKELEQRDQAIMRQWQMRIERAGYETALAERRYQECDPANRLVAATLERRWNDALLRLESIRTEAAQFQSEKAHVVTAEQRTQVLALARDLPRLWRAPTTAAKERKRMLRLLIKDITVEKLVGQRQLVLHIRWQGGACTDITVSLPKPRPEAIRYPAETVEQVRRASQHMSDPQIVAHFNQAGLRSPYGKPFTLAMIKWIRYRYGIAPTCLMRPDELTVQQLAERLRVSMHVVYYWIDRRVVEARKLDGRGAWWITLDASKEHKLQDWVRTSGHLKPQHSNTQL

SEQ ID NO: 20767 - protein, 521 aa, synthetic construct
MKKVITIEPAKQVTHKVELPRFTKRRVAGYARVSTDHEDQTTSYEAQMTYYTDYINSRSDWEFVKMYSDEGISGTNTKKRLGFQEMVEDALDGKIDLILTKSVSRFARNTVDSLSTVRKLKEAGVEIYFEKENIWTFDSKGELLITIMSSLAQEESRSISENVTWGRRRQLAEGQVTFSYSQVLGFKKSDTGGFEIDHEEAKIVRYIFHQVLLGNNPNKIARELTVQGIPTPQGKRQWSYGTVKRMLRNEKYKGDALLQKSFTTDFLTKSTKLNEGELPQYYVENNHEAIIKREVFDLVQVELDKLERKRQTSNIFTGRLFCGDCGSAFGSKVWHSTSKYKRTIYQCNAKYKGEHKCQTPHVTEEEIKGWFLSAINQLLSNRDEIIANTELLIDMAKDTSSLEARLDDLEHHLETIRQDIEDLVDRNARKAQNQDLYQEQYNTLVTAYQEKQKELQETRSVLEEQKSKQLSLDGFIQNFKEQDDLITDFNQELWQTSVERLDIKEDKKIFLTFKNGLRIDL

SEQ ID NO: 20768 - protein, 563 aa, synthetic construct
MAEQMIQNISGVIGGEARVHVRRVVCLYRVSSVGQVEKDDIPMQKQSCREFVQRQTGWEIVKEFAEKGVSGFKKSAKDRDAIQEIQKLALQGGFDILLVFMFDRLGRRDDETPFVVEWFVKQNIEVWSAMEGQQRFDNHVDKLLNYIRYWQASGESIKTSMRVKTRIEQLTQEGHFTGGRAPFGYRAEKTGRMNKKNQDVRDLVIDPEDAEIVKLIFQKYVYEGYGALRLCRYFREQGIRRKDGGEVTVGMINRAVKNSIYIGVIHRGDSKSEVLPDLKIIDEELFFRALEIAGERKVQKREVPLTTRGRSLLVGNVYCGCCGARLMLATSGHKYQKKDGTVSTSTCSSYKCYNRTFAPGKCDGQTSFSVEKLDNLVEQIIRIQLSQIQKAPPQTLLAKQRSREVDLAKMKAKRLHDDYEQKQRAYQDLRAETLKVIQGNSRFSADLLNSLMDETAAQLKELESQMQAAELEVRETVSSAEQVQKEYTQLMNWAELYDNCSLEAKKMIVAQFVKAVRVKRGYELDIEFNVSFEEFQALYLEPEEKGRKRKRAGEILALAECAG

SEQ ID NO: 20769 - protein, 479 aa, synthetic construct
MTLADEGITGTSAQKRPEFQRMIRRCRQKKIDLVLVKSISRFARNTVDCLNYIRALRTLGIAVIFEKENINTLETDSEMLITMMGAFAQAESESMSANIVWGKRQAMREGKANVQYQHLYAYELDESGNPRIIPEQAAVVRQIYDRFIAGHSVRMIKKLLEQQGVPTAKGGDVWSESVIRSILKNEKYCGDVLMQKTYTQDCISKKQIRNVGQLPMYLMRDHHESIISRDRFNQAQAEFARRNAGRAPTRKLAPTGRSCYSAKYALTERLVCGECGTLYRRCVWVKRGQKFAVWRCASRIDYGTKYCHDSPTLREASLQAAILAAINSVMSQREALVGQIEESMRMELIPFPGGTVSVSDIDRQLEELDGEFQALFADSKDGGFMQHAEEFKRISDDMAALKEQKASLLEQQNSDSAANGRIKSALDILNTGSGAFTEWSETLVRQLVDTVKVLSADRIRVCLRGGIEIEQTLGGEELQ

SEQ ID NO: 20770 - protein, 544 aa, synthetic construct
MTQTIQRRVRIIPATKPLASNGPRHSGKQRVAAYCRVSTDSEEQLNSYEAQKTYYTQKIEENPDWELAGIFADEGLSGTSLKKRAEFNRMIAACKRGRIDMILTKSASRFSRNTVDCLKIIRVLKARGIGVIFEKENINTLTETSEFLITLFSGFSQAESESLRTNVIWGMQQSMKEGKLVFHYDKTLGYRKGADGEPEIDPEEAEIVRMIYARYLEGRSLGDIQKELTAKEIPTAVGVQGWSRQVIQNILTNEKYIGDGLRQKTYTTDCISKKVKKNEGELPQYYVENNHPAIIPREIFLRVKEEMARRASKRKVMQKTGRTEQGKYSAKYALSELLVCGECGTPYKRCTWARNGKKRIVWRCISRLEFARQYCHDSPTIDEDRLHKAIVAALNQYGAVRDEVRADALELARLAQSRGVDGGDSLLELRQRLDALSAEQALLLDEILEDMDNAQLNVQLKAMAEEKQDLLERIEALEQDEAQQALQASRQREMEEWLETQPLCFTEYEDTATRKLIEKITVEDAETILVKIRDVDVVIEQKMC

SEQ ID NO: 20771 - protein, 519 aa, synthetic construct
MAANVKIIPPREMKPDTLRVAAYCRVSSDSSDQLHSYAAQIRAYTEKIGNHEGWELVDIYADEGLTGTRMDKREDFHRMLDHCRKGRIDKILVKSISRFARNTKDCLASLRELTVLGVSVDFEENHISTETLTTELMVSVFGALAQQESVSISQNQRMSYQRRMERGEFITTKAPFGYRLKDGKNLEIAEDEAWLIRKIFGLYLCGIGTEEIAKAVTQTGVRTRDGHAEWNHVGINYILRNEKYIGDALCQKTLATDSFPFAKKRNEGEKDQYYVDGTHPAIISKDTFQRVQRLLNTRSQHLDGPYKVYPLSKKILCGVCGSTFVRKASPSGYVSWVCRKHNESAVGCPIGRIAESEIYAAFVRMYNKLRLHEGVILKPALAQLRDLNDALQRSSPAMLAVNKAIAEATEQSYKVATLQSRGLLDAAACTAKLRTIECRLTELRRERRRLLKNEDLDETMETLRQTVNIIRGGPERLEDFDEILFADLVERITAESQTQVRFRLYGGIELTEQLREARR

SEQ ID NO: 20772 - protein, 571 aa, synthetic construct
MRIRKVAIYARVSTEHEAQLSALENQVQYYDDLIDRHPDWVLYRRYIDEGITGTSIAKRKNFVRMMEDAKDGHFDLIVTREVSRFARNTVDTLQQTRLLKRMGIEVYFTEDGIWTMNDEDGELRLTIMATLAQNESKKTSMRVKAGQMVSFQNGVIYGTGNVLGYDKVGPEYVINEAQAKTVRKIYDMYLAGNGYQKIKKRLEKDGDLTAMGKSLWHYATIGHILKNRLYCGELEYRKEYVPDYLEQKRAKNNGELDRVIVEGKHQPIVTKEEFEKVQNLLAERNAESRNYRKNKGTHSDDLWRRKLRCQCGHAFAKTRWHSKSRDFTTYTYKCYDQTRTGTISARLKNGLSIEGVCRAPLVQDWKIHTMAQKVLHAVFDDPEGTVRSAADMLGCGTAGVEQAEVLRDKSIIEEKLKKEQGRYETLLDMRMNNEIPREVFSRKQQEVEKKIAELEQQMMQYGDVKPATEADVSGKLENLQRLMGQPPVPEDGEFSESDIDKYVFGVRVYEDRFEWLLNLSPDAGGELDDAGSPVCFKKITVTPDDERAWFRMHPQWSKSNKYAELEAWIFI

SEQ ID NO: 20773 - protein, 570 aa, synthetic construct
MRIRKVAIYARVSTEHEAQLSALENQVQYYDDLIDRHPDWVLYRRYIDEGITGTSISKRKNFVRMMEDAKDGHFDLIVTREVSRFARNTVDTLQQTRLLKRMGIEVYFTEDGIWTMNDEDGELRLTIMATLAQNESKKTSMRVKAGQMVSFQNGVVYGTGNVLGYDKVGPEYVINEEQAETVRRIFDLYLAGNGYHKIMKQLEKEGRRTAMGKTMWHYATVGHILKNRLYCGELEYRKEYVPDYLEQKRAKNKGELERVIVEGKHQPIVTKEEFERVQKMMAEKDAQMGQRRKNKGVHSDDLWRRKMRCQCGHAFAKTKWHTKTDFITYTYKCYDQTRTGTIAARLKNGLSIENVCRSPLVQDWKMYTMAQKVLHAVFDDPEGTLLDAAAVLGCGIAGVEQSEVLRDKEVIEEQLKKEWGRYETLLDMRMNNEIPKEVFSRKQQEVGEKIAELEQRMAQYGDVEPATEADVSGKLENLQKLMGQFSMPEDGEFSEEEMDKYVSGVRVYEDRFEWLLNLSPDAGGGLDDAGSPVYFKKITVTPDDERAWFRKHPQWSKSNRYAELEAWIFI

SEQ ID NO: 20774 - protein, 521 aa, synthetic construct
MTSAYLYVRVSTDEQKRKGYSLPEQEDRLLRHCEFNNIEVKGIFREDYSAKNFKRPEWNKLLTVVKNRKKKDRENILFIKWDRFSRNIEFAYQMIGILRAINVQAMAIDQPIDFSIPESTVMLAVYLSIPEAENGRRALNTSGGMRRARKEGRWMGAAPKGYQNLVYPDGRKYIAPKHPEAALMKWVFEELSKGILVAEQVRKIACQRGLKCERNNFWKLIRNPMYAGIIVVPPFENEEMQFVKSQHEALISQTLFYEVQNILNGNKRPIATKVVSKDMLPLRGFLECPDCNRMLTGSASKGRHERYYYYHCTGTTCKCRFKAETVNQYFEDELIKFNLAPGVGELFKMVVMDECRSTSRDDLDEKKVISNRIEEQELILSKARKRLLKEEIDADDFKAIKAECNEELRLLESKLADLPAKSNELKSIEMLLDVVIARYSNILQHYKNQPVEEKRKIIGSMYPKNLCFDGTQHRTAYLSEPLSLILLINSNLQGKKRGEKLSFYNLSPQVARRGIEPLFLE

SEQ ID NO: 20775 - protein, 553 aa, synthetic construct
MTRAAIYARFSTTLQSDRSIDDQVTLCKAFAIQNGYEIVEVYSDAAKSGASMHNRDGVRSLMADAMMGHFEVVIVEALDRLSRDMEDLAGISKRLKFAGIDLVGVHDGVASTVTVGLRGLVGQLFREDNVLKVRRGMSGRVKQGLSGGGQAYGYRPDPANKGRQLIVEDEANVVRRIFEEYAAGSSPRSIAHGLNRDGITPPRGNNWNASTLNGSAQRGNGILHNSLYVGERIWNRTTMVKDPDTGRRVSRSNPESEWERAQVPELRIVSDELWEIAQKQRRSPPGTPANYHKRPKRLLSGLLKCGSCGSGLAAMGKDKSGRVRIRCSASRESDTCPNPRTFYLDRIERSVVSVVQQFLRKPERLALFIKTYQEEQARLVNERRSQRGVYERELDRVVAKIDKIVMQIADDIIDPEDARAAMQKLRPRRKELQELLADTPELPPVITVHPVAAQLFEEKVTDLQKEMEAGEIDPLSLGAQLLRELLVKVVVYKDDKTGRVEVTIHGHLNMLLHQESQKPGKGGVPAQKVAGVGSGGSGGGIRTPDTRIMIPLL

SEQ ID NO: 20776 - protein, 547 aa, synthetic construct
MITNRTKVAIYARVSTEEQAEQGYSIEAQLDTLRDYCKKNGLEVYEEYVDAGFSGKSIEGRLALQRLLRDANKNSFGMILVWKINRLARKTVDFLNMIEDFKKRDIYFRSFSENFETETPVGEFVLQMLSGIGELERKNIIENVKMGMKQRAKTGRHNGKLPLGYQAITDPDDSLAHSKLVVVVEEEALIVRKIFELYAAGRGLKSIANELNHSNYKTKAGNTFSTTAIKEILNNPFYNGKVRYNRYENWSNKRRRGKSTEPTIADGRHEAIIQDALWERVQFLHQKKSFTPSRIFNGEFLLSGLIRCPKCGAAMVASRTRSKTKTGESVNRLYYSCGAFRNKGSSVCSANSIQKRMAEDEVMKRLAQVLSEEPILTAIVDKVNHKLITRTVPLQSELMHIRSQLELAVNKKQRYLDLFEHGNVDKSLFTGRMQEIQAEITKLQMESSRLELALTEGNTSPVAFEQVRELIYGFNQVLTSAPFEHRKTLLHLFIKRITMNANKQIEAIELSFDENVESFFSHPPVAAAAYSLQCKQIQKREKIDIVI

SEQ ID NO: 20777 - protein, 638 aa, synthetic construct
MKPKLYSYVRFSSMKQREGNSLERQQDTALKIAARYNLELDTTAFHDLGMSAFKGKNAHEGKLSEFIKQIGAKVPVGSWLVVENLDRISRDDAWSALDIFKNILSRGIVVVTGMDEKVYKYADVKNNPTDLIISLLMFTRAHDESLTKKNRVEAQARSLIRHNLTRESGTPAKAIESVGQNVWWVDTKSGYVTPHPLYFTAAQKIIELKQNGETLLGIQRYLNEHYPAPKKRVYKDQTGQALTPKTEQWGKHLIRTFLNPTVHGQKIFTLDKRDESGVIIYDSESDEPLKETFIIPDYYPALMSEVDYLTLSKLDRHRAITRNSSKYPEGNPEPEIPLLSGIGILFCGKCGSFMFKSGSSENKYRYICGSKIVQGKPCGKKGFTSYQLEHTVLQLIADHVWNNHQEDKTAWYESEIEKASEAVKKLLKLATLIDDLEELADQINANKQKKITLEREYQQYKISRSEIQTTGWDQFRNFDVHDTKNPDRKQIRLKIKQAIKRIDCYDIDGRYGHFEVTFADETKQRIVIKFNRNRSPGVSYVEAQTVNDHDLLKMQGLVLHSFIDELISPEKFAQHIKDKHEVSILNPTFITKLEDGVNQNEANGLAIKVASTTSKSYVTVNGIKYEINSLEDLEKLLQ

SEQ ID NO: 20778 - protein, 485 aa, synthetic construct
MATYVRVSTVFEEQDTSLINQEEGLNDFIRRNAWILFDTYSERQSSFKKRVEFQRLVRDAMARKFQVILVKSLSRFGRSIGELNTVVPQLAERGVRFIALSEDIDTEKNGWQSKLAMYSMVYQMTSQTTSDWIRMAEKARAKRGEFTGSIPPYGYKKADKRLVPADDETPAVVQRIFDWYVGGEMGMQSIANLLSDWGIPTPGQVSGQKNASSYWHLSSVRTILTNPAYVGDLVAQREHVATLGSTRRRETSPEERVVLRDSHSPLISRDLFEAAQRLLNRRSIQHMPGKPNLFTHLLVCADCGKGMSCVRRDYGNTHYVCTTHLKRGAHLCGRHAIRETYLERVILNSLKRLTGEQVDTEGLIADIRRASEQQKKREKKRVESVKDRIAKLEKRKSTAEDKWLDGEWDKDRYHAALERFEAELLELRRELNGLEQASQTEQAVPRNIAQYARLERLDRQLALMLIKRIEVQEDGQVEINYNFTL

SEQ ID NO: 20779 - protein, 470 aa, synthetic construct
MEARPLSAAIYLRVSTEGQAATDKYGLELQEDACRSYAKRAGFEVKQVYQDVITGTTSKRAAFSRLLADLPAYHAVIIFSVDRLARTVPIAYGLAQEIADTGAELHSSTEGKLSFNDDGQATAFGLHALLADSERRRIVRRLTEGKKQKVRNGQPLAPLRCYGYQNGEVFEEQAQWVRWMYQQALVTGTHEIMNELQRLGVPSSAGHPKWNRDQVLKILRNSVYRGEYLYGRDRRTRRAHPDAISCPCPRIVDDETWYAVQRAIDYRRSGAGRRGSRTDLFSLTGRIRCAECGAAMVGRRPGGPDTRNAGYVYYACGDPALMRHRKGCTHRKFYPAVDVHGAVQAELERLARQPAQLASMVVTPTSRPIDTDKAVHDIDAQLTKARNAYLRGIDTEDEYAETKATLLAQRARLLALAEGGQPEPVADAGHLQRALAEALELGDLHQAAGRLGLLVRVAPGGEITLALDPS

SEQ ID NO: 20780 - protein, 475 aa, synthetic construct
MTTSPTRTAALYLRVSTAAQAGDERFGLAVQTRAAQQYAQLHGLQIVRTFQDVITGTRATRQELDTLLNVAHQYDAVLVSAVDRLARRTAIAYAVLEELLETGAEVHSADMGLIDPKDEMSSMNFGVRSVFAQSEHMRIAKRLRGGMLAKVREAGRPVIPPSGYGWHKGEIQEEEAQWIRQIYTWAREGQSAHAITTELNRLGAPRRGARWSESSVKYILANPLHKGQYVFGRARKGRGDGRDLVTCTVPAIIPPADWDATQRVIQGRRRGGRPGTRTDAHEFPLAKRLHCGQCGGTLSAVTNEPGPSRPKQRTTQRFYHCYRIYRRDGSRGELCTHRRYYNARTIHPFILEQLRALLTDDAALMAALDVPTPQPLDVTPAIAAIDKRLKNLKLLALDGGLSPTEYKETRQELEAQRDALMAPANVPLQPNNLTQARDRLSQVLEGEDLAEMARTLDLHVTLHPDGRADLKLAAL

SEQ ID NO: 20781 - protein, 529 aa, synthetic construct
MTYQEGGERMKKITKIEGNLANSFIKPKTRVVAYCRVSTDSNEQLVSLQAQKAHYETYIKANPEWEYAGLYYDEGISGTKKENRSDLLRMLSDCETGRIDLIITKSISRFARNTTDCLEMVRKLIGLGVHIYFEKENINTGSMESELMLSILSGLAESESISISENTKWAIQRRFQNGTFKISYPPYGYQNNDGQMIVNPKQAEVVKYIFAEVLSGKGTQKVANDLNQKGIPSKRGGRWTATTIRGILTNEKYTGDVILQKTYTDSHFNRHTNYGEKDMYLVENHHEAIISHEDFEAVDAVLNQRAKEKSIEKRNSKYLNRYSFSSKIICSECGSTFKRRIHSSGRKYIAWCCSKHISNITECSMQFIRDEDIKTAFVTMMNKLIFGQKFILRPLLNGLRNQNNAASFRRIEELETKIENNMEQSQMLTGLMAKGYLEPALFNKEKNSLEAERERLLAEKDQLTRSVNGNFAKVDEVDHLLKFATKSKMLTSYGDELFEEYVEKIIVLSREEVGFELKCGITLKERLVN

SEQ ID NO: 20782 - protein, 453 aa, synthetic construct
MRIIPAHQQKGNSVHHQRNSQPFEKLRVAAYCRVSTDYDEQASSYETQVAHYKELIQKEPTWEFAGIYADDGISGTNTKKREQFNKMIAACKAGKIDLIVTKSISRFARNTIDCLKYIRDLKAINVAIFFEKENINTMDAKGEVLITIMASLAQQESESLSQNVKMGIQYRYQQGKVFVNHNHFLGYTKDAQGNLVIEPEEAKVIKRIFYSYLNGMTMKQIADSLKADGILTGGKTKNWRSSSVAKILKNEKYMGDALLQKTYTVDFLNKKRVKNEGIMPQYYVENDHPAIIPKSVFMQVQQIIKQRRNGITTKNGKHRRLNGKYCFSQKLFCGKCGDILQRNMWYRPEKVAVWRCASRIRRSKIGRRCMIRNVKEPLLKEATIEAFNQLIEGHELANKQIKANIMKVIVNSKGPTLDQIDQQLEEVQMKLIQAANQHQDCDALTQQIMDLRK

SEQ ID NO: 20783 - protein, 577 aa, synthetic construct
MSTENRKARRAAAAPSQRGSNSGRAKVVLYARYSSDKQNDQSCEHQLALGRETANKLGFEIVGEFSDHALSGRSLLRSRPGVSSMKERVAEGDVSAVIVEGIERIGRRAADISVIADWFEGRGVDLYASNGGKFDWKLVPFLGAIAEHQSRETADKVRRGQKGQTRDGRVAAGLAYGYRVVGSKKELNREIVPERADIVRRIFDDYADGISPRKIAAQLNEDGIPSPSGGKWNDSTIRGNAKKRDGMLRNEAYVGIIVYGRNRFMRDAETGNRISRPAAVDDIVYGEAPDLAILDDDVWNKVQDRLERTHALYAGKTAPLNGSHRARYLLNGLLKCGCCGGGFTLVAKERYGCYIRKTQGTQECGNSRTITRERVEDRVLARLRHGLITPAFAGQFAAEVKMLLARDPKEDDARRIALEGRLKRIEAAIERLLDRLESEEAGESLLARLASREAERDELRAEISKSAASTESTKLPTAAELEKVYRHQVERIEDLLTGCDHMVEANTLLKALLGEVRLSPDKDAQHGMAIEIRGEASRIWLNDRPKTTKGLQKEALSILSQISVVAGVGFEPTTFRL

SEQ ID NO: 20784 - protein, 521 aa, synthetic construct
MAVSKNVTVIPAIRRVGYINNSESKPKTRVAAYCRVSTDSDEQASSYEVQIAHYTDFIKKNSEWEFAGIFADDGITGTNTKKREEFNRMIEECMAGNIDMIITKSISRFARNTLDCLKYIRQLKDKNIAVFFEKENINTMDSKGEIMLTIMASLAQQESQSLSQNVKLGIQYRYQQGEIQVNHNRFLGYTKDENKHLVIDPEGAEIVKRIYREYLEGASLLQIARGLEADGILTAAGKAKWRPETLKKILQNEKYIGDALLQKTYTVDFLSKKRVKNNGIVPQYYVENSHELIIPRDLFMQVQEEMVRRTNIRSGKSSKKRVYSSKYALSSIVYCGQCGDIYRRVHWNNRGYKSIVWRCVSRLEEKGSDCTSPTVNEETLQTAVVKAINELLANKEPFLQVLLKNIATVLNEENDNATDDIDSKLEELQKELLKQAKSKNDYDDVADEIYRLRELKQNALVENAEREGKRQRITEMTDFLNEQSYELEEYDEQLVRRLIEKITVFDDKLTVEFKSGVEIDI

SEQ ID NO: 20785 - protein, 519 aa, synthetic construct
MFTALPRAVLYLRLSAVVDDSTSLVRQEKDLRAEATRRGWDVVAVLADEGISGRKSRAKATEAVRMIADDEADVLAVWKLDRFTRQGWDGLGELTKALDDRAHKARKRSCTPALFVALQDGLTSDQSAFRMIAGVLSEVARSEADNAAKRITNSIAYRKTQTHKYAGGSAIPYGYRSIPAPDGIGRVLVHDDAEVEIVREVAQRLIDGVEPLLALARDLNAREIPTSKSPARRAIQKGESPVDSEGQPLATGEWRAATFRNLWTADTFLGRVVHHGDFIRDADGLPAEVWPPILTRSVVDAIRRRLNWTPRPGSAAAKHWHAPVPVAKPQRKRAARLLSGVAFCAECDGKMYVTTSSGKPIYACSASRNGRECRSPKINAEGLEKHVSAEFLRFAGTWPEYEVVTETTASATEAQLAEVEAALREATGAMLDDDADVEALTARLATLKARRTELRAAPSTTSTSTRPTGRTLADAWEADPRPEWRRSVLLNALDHLTVAPTISRRSPIDPARVAFYWNS

SEQ ID NO: 20786 - protein, 443 aa, synthetic construct
MAAYCRVSTDQAEQLSSYEAQVNYYTNFINNSSEYEMVKVYADEGISGTNTKKREQFNEMIRDCKAGKIDVIITKSISRFARNTLDCLNYVRTLKELGIGVIFEKENINTLDAKGEVLISILASLAQDESRSISENSTWGIRRRFEQGKLHINHKKFLGYTKDEEGNLIIDEKQAKIVRRIYKDYLDGKGTNRIAKEFEEKGIKGWNGKTKWYESTIRGILTNEKYKGDALLQKTYTVDFLTKKRAENNGEVPQYYVEESHPAIIDKEMWEAVQLEMERRRIFAKEHDIVKVDYATITNPFAGKIICGHCGNVFGRKVWNSTNELRRRIVWRCNRRYIKKGKKGCNNKHIDDKVLYQAFIDTFNAMIENKDYFMEKWKEHLKSDNVLVRYKAKQFMGILKNAKPIKEFDEDLFFRIVEKMTVFDGKKIIVSLLDGTEIEVVIE

SEQ ID NO: 20787 - protein, 480 aa, synthetic construct
MIATNKVAIYIRVSTTNQAEEGYSIEEQQEKLKAYCAIKDWSIYDVYIDGGFTGSNTDRPELKRLVKEAKNKKFDTVLVYKLDRLSRSQKDTLYLIEEVFTKNNIAFLSLLENFDTSSAFGKAMIGILSVFAQLEREQIKERMQLGKVGRAKSGKSMMWAKPSYGYIYHKETGEMTVDEYESIAIKFIFSSYLAGRSITKLRDDLNKKYPKEIAWNYKMVRHILDNPVYCGNIRFKDEIYSGNHEAIISKKDFEKVQEELAIRQRTAAENSNPRPFQAKYMLSGIAQCGYCKAPLKIIMGAIRKDGTRFIRYECYQRHPRKIKGVTVYNDNKKCNSGYYDKKELEQYVLKEVSKLQEDKEYLESLFNVPDKSIERDKIQGQVNILEKKISRLNDLYVDDRISLDELKIKSDNFLKMKAVLETELENDPTIKQQKKKENMKKILKTKDILSMNYKQQKAVIRALITKVQVTAESIIIKWKI

SEQ ID NO: 20788 - protein, 533 aa, synthetic construct
MKGKIALYSRVSTSEQSEHGYSEKEQEQLLIKEVMKNFPGYDYETYTDSGISGKNIEGRPAMKRLLQDVKDNKIEMVLSWKLNRISRSMRDVFNIIHEFKEHDVGYKSISENIDTSNASGEVLVTMFGLIGSIERQTLISNVKLSMNAKARSGEAITGRVLGYKLSLNPLTQKNDLVIDENEAHIVREIFDLYLNHNKGFKAITTILNQKGYRTINQKPFSVFGVKYILNNPVYKGYVRFNNHQNWAVQRRSGKSDKNDVILVKGKHEAIISEDVFDQVHEKLASKSFKPGRPIGGDFYLRGLIKCPECGNNMVCRRTYYKTKKSKERTIKRYYICSLFNRSGSSACHSNAINAEVVERVINVHLNRILSQPNVIKQIASSVIEELKQKHSKQTEIKYDINSLEKQKAKVKTQQERLLELFLDDEMDSEMLKAKQSEMNQQLEVLDQQIKEAKQANQSQDDIPNFDKLKARLILMITRFSVYLRKATPEAKNQLMKMLIDSIEITKDKQVKLVRYKIDESLMRLGHKSLKKQQ

SEQ ID NO: 20789 - protein, 548 aa, synthetic construct
MIQTNSNHLSFKAAIYCRLSKDDEQKGESASIQNQKELLENYVKSRGWSIYDVYIDDGYTGLNTNRPSFQRLIRDIENKKVDIVITKDLSRLGRNYLQTGYYTENFFPKNNVRYIALNDGVDTFQENNEIVPFKNVLNEFYSRDVSKKMKSAYMTRARQGKFIGCLAPIGYRKDNDDPHKLVIDDETSWIVEKIFDLAFSGYGVQAIRRRLFEEKIPTPTWWNRKKGLRNKKTKLEMTVDGGEYWWDCTTLKEIIENPVYIGHIASQKVNYKFKVGWLSDKPKEEWIIVENTHEPIISEDIYNVANEKLKSRRRPFKNGEESIFAGIVKCPDCGKSLNLGRNKSKKREKLLTCNTYRRYGKSLCSQHRIYYDTLYEIVLKDIRKNAEIALKDENEIIKALEKSREIDNEEEQKFIIDKIYEDQIRVEDLTKKIERLYDDWLDNKISESNFQKILEKSQKEQDYLNQRIEDNQKLIVKEDLEDINVKKWIELIKKHKDIKKLDKETLNELISKIYVHEKEVVNGEITQTIDIYYNFIGNTDTLQVFYNL

SEQ ID NO: 20790 - protein, 643 aa, synthetic construct
MKKNNVEIIKADSLVRRRGDNFERESKRVAAYCRVSSDSEDQKNSYESQVRHYKDYISQRSDWELAGIYADEGISGTQVGKRQDFQRLINDCVNGEIDYIVTKAIARFARNTLDTLKYVRMLKDMQIGVYFEEENIDTLTMDGELLLTILSSVAQQEVENTSAHVKKGLKMKMQRGELIGFQGCLGYDYDVETKQLSINKKEAKIVRYIFERYLEGIGGKVIARELDELGYKSSRGLDHWNDTTVLGIIKNEKYKGDILMGKTFTVDPISKRRLSNFGEEDKYYIKDNHEPIISKEDFEKAQEIRLRRAGNKKTAANVNGKRERYSKMYAFSSMLECGFCGSILSRRSWHCRSDYRKVVWHCVTSIKKGKKFCKHSKGLEELAIEGAFMEAYRKLYHSNENLMTDLLETIESELNDNSLNKELKRITNKLRTLLKKEENLVNLRLEGKISDTIYNEKYNEISSEKEFLAEEKVNIETTLKSEIDVKKRLTEFKHLLSSQKMLTEFDRAVFESIVEKIIVGGVNSDGEIDPAMLTIIFKTGETQNKDGKQFKSKRKNAKLETDKLCPQNSDEDKKLYSQGTDYTHRSCGIIRKTQLDCPVCSPVFWQAASKDPRTFELSNTHHVDSCHTYTKIKCQQALSRVIA

SEQ ID NO: 20791 - protein, 453 aa, synthetic construct
MEEAIAYVRQSTLKQQSLATQKSLIMDTAKQYGWSNVAFYDDKKTGRHTKRSGYQKMVEIITSGKCKVLCCYRLNRLHRNLKNAIQFFEICKKHHITIISVNDGYFDLSKEFDCFRLNILMSLAEMESNNISEQTKNGIREKAKQGKLITTHAPFGYRYRKGCFVVQEEEAYTVKSVYRWYLQGLGYKKISQHLDSNPNLIPRKPYQVRNILLNPNYCGRVINKYGTFNDIVPPIIDIDTFEEAQERRIHKQLNRSNSRNKLKRRIKCPYCQSTLTNLTIKKENYSLRYYVCPKNMNDAYRTCPFKSINAPELESEVLDTCKKYFEEQSFHKRLNNTILKVLKKQQMKHKETHLTQEQLIEKLAQNRIDVKTFKRLSASCKSEENYSTYSTYQIDDKLKYVIKNKITLQDIAPFIDCIKITQTKQLQGIYFKNSPLNIVEQSHLITPERNEVI

SEQ ID NO: 20792 - protein, 611 aa, synthetic construct
MRNYEKITALYERLSRDDELQGESNSIVNQKKILEEYASKNNLSNIIHFTDDGISGTQFDRPRFMAMMNGVNQGNIGCIIVKDMSRLGRDYLKVGQCMEILRQKGVRLIAINDNVDSFYREDDFTPFRNIMNEWYARDTSRKIQSTFRSKGESGKHTASSPPYGYIKDEKDKDKWIVDEKAAEIVRRIFNLTMQGNGPYRIAKILEAEKIDIPAYHQQKLGYVLHQSKNFEYPYRWCSSTIASILKKQEYLGHTVNFKTRKHFKDKKSKYVSEDNWLIFENTHEAIIDQEIFDNVQRIRGNVKRYPDGWGEYHSLTGLMYCADCGSKMYVHRTSNYKNIPYYTCSAYTKVPCGTLCPSAHRIKAEAVLNLIQETLKDLKKYLDEDNEAFIRSIQNEMEEKEKVEIERQRVRLIDSKSRIQELERLMCRIYEDMILEKIPSSRYEILNSQYETEQRALSKEIKDLELTISRYEKETDRARKFISLINRYENFDELTTTMINEFVEKIIIHERDRKGSQNSKQKIEIYFNFIGNYELPTEELTEEERLKLEEEERKINERKDRLHQNYLKRKANGKQQEYEERYKARREQKKQEKLKVLKRGGIPLSEYKKRD

SEQ ID NO: 20793 - protein, 598 aa, synthetic construct
MKEVEVIKANSSTSKSKRGKQIERIRVSAYCRVSTDSEDQLSSYISQKTYYTDLIQKNSDWIFAGIYADEAITGTQVTKREDFQRMINDCMNGEIDMVITKSISRFARNTLDTLKYVRMLKEKDIAVYFEDEKINTLTMDGELLLVVLSSVAQQEVENISANVKKGLKMKMKRGELVGFQGCLGYDYHPEDKSITINEEEAEIVRYIFKRYVEGAGGSVIGQELENLGYKTKYGNSTWVPTTVLGIIKNEKYKGDLLLGKTFTVDPISKRRLENMGEEDQFYIRNHHEPIISEEIFEKAHEILNRRNKNRGKIGDGNTKREKFSRKYAFSCLLECGFCKGTLTRRKWHSGSQYDKVIWQCVTSTKKGKKHCPESKGIPEQAIEDAFVESYRILCDSNKDVLDEFLRTMNETLSSSSVNKQLSKVEKEIEALEKKKSKLVDMRLEDVIDSETYEYKFSSLTSKQDELLNEREKLQTTAMNEKDIKRRLQEFKRTLEQNEVLHEFDRYVFESIVEKVIVGGYDEDGNIDPAQLVFVYKTGFKNSLDGNRFKPMRKNARGNRKTNELCSQTNNEVQSLSSHSSSDTCRVSNITTKTLNRLT

SEQ ID NO: 20794 - protein, 452 aa, synthetic construct
MKAAIYIRVSTQEQVENYSIQAQTEKLTALCRSKDWDVYDTFIDGGYSGSNMNRPALNEMLSKLHEIDAVVVYRLDRLSRSQKDTITLIEEYFLKNNVEFVSLSETLDTSSPFGRAMIGILSVFAQLERETIRDRMVMGQIKRVESGLPLTTAKGRTFGYDVIDTKLYINEEEAKQLQMIYDIFEEEKSITTLQKRLKKIGFKVKSYSSYNNWLTNDLYCGYVSYADKVHTKGVHEPIISEEQFYRVQEIFSRMGKNPNMNRDSASLLNNLVVCGKCGLGFVHRRKDTVSRGKKYHYRYYSCKTYKHTHELEKCGNKIWRADKLEELIIDRVNNYSFASRNVDKEDELDSLNEKLKIEHTKKKRLFDLYISGSYEVSELDAMMSDIDAQINYYEAQIEANEELKKNKKIQENLADLATVDFNSLEFREKQLYLKSLINKIYIDDEQVTIEWL

SEQ ID NO: 20795 - protein, 538 aa, synthetic construct
MTIQSTNNLKITALYVRLSNDDEREGESNSIMNQKKMLSKYASDHNLRKTTFYIDDGVSGTTFNRKGFQAMITDIEAGIVGTVVVKDMSRFGRDYLQVGMYTDIMFPEHDIHFIAINDGVDSEQGDNEFTPFRNIINEWYAKDTSKKIRAVFKAKGMTGAPLTTNPPYGYIKAPDNPTQWLIDDYSASIVRRMFQLTMEGYGPTQIAKKFQTEKILVPTHYAVSQGRKTNTVPSQSPYYWSDRTIAKLLEKPEYLGHTVNFRTTRKSYKDKRKIERDKKDWVIFENTHEAIIEQSVFDTVQELRKHKRRLTKQKELPLFSGLLFCADCGGKLYFCRGKSIARNQENYICSSYRRRTTECTSHYIRSVVLEEVITNNLRKTMAYIQANGKSFFVDVLKGDQQTRKKEAQNQQKQLHDAQKRITELDAIFPQLYEDMVSGRINSERFDKLSSNYEEEQVLLKQQVMDISKEIQTELDVNVYIRELRKFVHKHVNFDSLTPELLHEMIDKIIVHEDKKIEVHYKFGLGELGNLVDEHIIKK

SEQ ID NO: 20796 - protein, 581 aa, synthetic construct
MTTLVDDRLKVDSLVSPSIPTGGATAVIYLRVSTKEQAEKGGGDEGYSIPAQRDANMSKAEQLGATVVEEFVDAGESARKADRPALMRMIKYVAEHRVNYCIVHKVDRLARNRADDVTIHLALRDAGVMLVSASENIDETPSGMLLHGIMSSIAEFYSRNLATETIKGLTQKASQGGTIGAAPVGYENVGIRNEHGREERTVRIDAERGELVSWAFQVFASGLWTVAELQRELERRGLTTRPTPRRPARPLGKSSLRRMLRNTYYKGDITYKEVTYRGSHEPLVPREVWYQVQAVLDSHVSAADKTQVHDHYLKGTVYCGQCGSRLIICHARNRQGKVYPYFVCSGRHSGSTGCTRQAMLIEDVEHLIEDYYQSIQVSAQVREDVAGMLHAEFDRLMASETKELEQLTKQRDKLEAERFKLLQAHYADAVPLDMLKREQSRIGAAMETIDNHIAAHDNEYLEARENLEDSLGLLANISAIYQRCDDLNRRLCNQAFFTRVYIDEEGERRVHVDFQRPFDALCDPEVQGNALNWAAEAKKKGDVQTGPRMVPLVEGLNIAQVGWMTRLELATTWTTTRGSTS

SEQ ID NO: 20797 - protein, 458 aa, synthetic construct
MKKAGIYIRVSTPEQEKNGYSLNAQEEKLKSFALAKDYEVKKVYRDGGFSGAKLERPAMLEMIDDIENNRLDLVLVYKLDRLSRSQKNTMYLIEDVFLKNNVDFISMQESFDTTTSFGRAMIGILSVFAQLERDNIRERMTLGRMERIKRGFYMGGGKVSFGYRYNQESNVLEIDEGEATAVRRMFELFLGGNSIYSLINTLKKEFPHYEKTFYDASVRRRLANEHYIGNSQYDGKIYVNTHEPIIDDLTFNQAQLMLSTRSHGNAFKHKYLFSGMITCKKCGKSYNGFESVCGKYSNKYYRCSSTTYKFKKKNGWECSGKRFRCEDVDKYILDKIKSIATDQVVSKKSKSTSLPIKKEIDKLKAQQAKLLDLYLDDRIDTNVLDEKSKHIKDLLEKLNKQLKEKPAIEKKVFDESVDKLANNFESLSFEQQRILIGNVIEKIEVVGGDMNVYFFDTK

SEQ ID NO: 20798 - protein, 529 aa, synthetic construct
MARTVTAIPATRRLHTGTPLGQATIRKVAGYARVSTDHEDQVTSYQAQVDYYTRYITDHAGWQLAGIYTDEGITGTSTKHRAGFQTMVADALAGKIDLIITKSVSRFARNTVDSLTTVRQLKDAGVEVFFEKENIWTFDSKGELLITIMSSLAQEEARSISENVTWGHRKRFADGKVTIPYGRFLGYDKGPDGNLVINQAQAVTVRYIYSLYLDGQSLTGIARTLQKEGYQTATGNKHWSASQVRNILTNEKYKGDALLQKSYITDFLTKKQVKNEGEVPQYYVTGNHEPIITPAVWDFVQAELVAPATGRRSSSRQRTFSGKIRCGQCGAWYGSKTWHAGSKYEKRIWRCNHKYSGGTPCATPHVSDEQITAAFLDAVHHLLANRDQVDELLDKAVRAELDTTDIHIEADQIFACVGAVAEAIDQLIARNARVAQDQTEYQRRFDKLTSEHATLVEEYHRLLDQISDLDNRQAAYRHYREELGKLDIDHIEFTPYLWHTLVDHAEVAVDDTITFTFRDGAKLTQPIGK

SEQ ID NO: 20799 - protein, 479 aa, synthetic construct
MATMERVTPPPQSARAKKVAAYARISMENDRTPKSLSAQISRYSDLIQSTPGWEYAGVYADSGISGTTTNRPQFQAMLAQARAGGIDLILTKSISRFARNTVDLLETIRELKTLGVEVRFEKENISTFSADGELVLTLLASFAQAESEQISQNVKWRVRKGFEQGKANGFHLYGYTDSPDATDVEIVEAEAEVVRWMFAHYMLPTSCEAMAAQLITDGRVPHLADNQLPGEWVRHILKNPSYTGDLLLGQWATPDGKPGRALRNTGEHPMYLVEGAIPAIIDRDTFTAVQAEIARRRDLGARANWSIETVAMTSKIKCATCGCSFVRNRRNPKTQNQITTEHWICTERKKGRTTSCRTIEISDTALKTFIADVLGIDEFDDDVFTARIDHIDVTGKDHYTFHYTDDTTSSHTWRPNLKKSSWTPAKKAAWAELVKARWDNARKLGIDGRSAPAPPEALAKYRAVAKAEAERLRAKRGER

SEQ ID NO: 20800 - protein, 522 aa, synthetic construct
MEQNRIMIIPAKRQIGNNIKEAEKPKLRVAAYCRVSTDSEEQASSYEAQIQHYTEYIAKNPDWQLAGIFADDGISGTNTKHRVEFNRLIEECMSGNIDMVITKSISRFARNTLDCLKYIRKLKDKNIPVYFEKESINTMDAKGEVLLTIMASLAQQESQSLSQNVKLGLQYRYQQGQIQINHNKFLGYTKNDDGKLIIEPKQAEVVKRIYREYLLGFSMNRIASGLEADGILTGAGKKKWWTSTIRKILSNEKYIGDALLQKTYTTDFLTKTRVKNTGLMPQYYVEGNHEAIIPKETFMLAQEELAKRQVTAVSPNGRKRSYSSNSCFSNIIFCGHCREVFCRVHWYRHKTSTVVWRCASRLEDRSPVCYARSIKEETLHQIVIEALNRMLLQKSNYLDILQKNITTVIKRSDTTDIALIDEKLLTLQQELLRRANNREAYNNIADEIFHLRELRAKAESNTVLRDDTLKRITELCDFLKEQPQELTAFDELLTRRILDSITVYDDHVTVKLKSGISLDIDE

SEQ ID NO: 20801 - protein, 519 aa, synthetic construct
MKKITEIKSVRPRIRRKKLRVAAYCRVSTASDAQLESLETQKAYYENYISSRPDWKLADIYFDEGISGTKMYQRPALQRLLADCESRQIDMVVTKSLSRLSRNTMDCLEIVRKLQSLDIPIYFEKEALNTATMESELMLSVMSSVAEGESASTAQNINWSIQHRFKNGNYKLCSPPYGYSWNGDNLQIVPDKAAIVKEIFTKYLAGTKVISIIDDLNKRGVATPRHGPRWQRSTIAGILSNEKYTGDVIFQKTYTAVGYKRRCNHGERNQYLYKAHHEAIISHEEFKQAQSLKANHCQGKGIIKSSDKGQSRYAFSGKIICNECGSSFKRRIHKYATTSYVAWICGTHLKDKAACPMLFIRNDDLELAFITMLNKLIYSRKIILAPLSEKLKLISSDNTVKQIRDLETELMQITEKRQTLLRLKAEGYLDQIVFTQESNLLETRRKELTIELNSLENNGTKGATELNELKRLLYFTKHSKMLNAFNEALFTEYVHRIHVYSRQEIGFELKCGLILRERI

SEQ ID NO: 20802 - protein, 618 aa, synthetic construct
MAGIKEEKKIYLVGIYCRLSKDDGTDNESASIATQKSILTDYVKKQGWHIAKTYVDDGYSGTNFQRPSFQNMIKDIESGLINCVITKDLSRLGRNYLDCGLYLEVFFPEHNVRYIAVNDGVDTLNKSAMDITPFRNILNEMYAADISVKIKSAYRARFQQGKFMGTTAPYGYIKDPADHNHLLIDDKVAHVVKEIFDLALKGNGVAKICRHLNKQHILRPAAYAAERGETGFERHFEGNEDKRYIWSGNNVRSILRSPIYAGNLVGYKRIAANMKSKKRPSKLPEEWEVIPNTHEGIVTQEEFDIVQQLITSRRLPQNKGGFVNIFAGVIKCVDCGCALRAMNVHRRKRPEIIDCVQYSCNNYARNGRSECSAHNIEARDLFNAVLADINCFADMAVNDEKAVRAIEKRLTETDQSRAKALEKERKKLNKRLAELDRLFSSLYEDKVMERITERNFEMMSGKYQKEQLEIEARLKEVTETLNESYEKSRGIRDFLALIRNYQGLKELDATVINALIDKILVSEREKMADGTVKQEIKIYYKFIGFVDELHIIPTKRWAAMPAKNCTVCGVEYVPGSGASRYCPACAKKIRREKSNESKRRSREQKRIACMNCPQKMTD

SEQ ID NO: 20803 - protein, 523 aa, synthetic construct
MPTSKNTARKYAAGGGSDNSCGVEPLRAVIYARYSSSGQREESIEGQLRDCYEFAKKHGIIVIGEYIDKAMTGRVDRRPDFQRMMKDSEKGRFNCVLLWKMDRFARNRYDSAMYKYKLKKNGIRIFYAKETIPDGPEGIILESVMEGYAEYYSENLAQNVKRGNYDSALELKTLGKTCLGLKTGPDGRYMIDQAEATIVRRIFEEYAEGERAKDIYERLNSEGYRTSRGGKFNKNSLRRILSNKKYIGVYEYEDIYVENGIPAIITDRDLFERVQKMLKINHDAPARGKAQNFLLTTKLFCGLCGSPMIGDGGTSHTGKAYAYYSCTKRKRGRSCKKESVPKDWIEDLVVGELVKIVHNDELIEQIADRVMEYQKREKDQSGLHALEIRQKENEKAISNMLAAIEAGIITPSTKTRLMELEADRADIEKGIAHELLAEPEFERDQIIYFLERFRSGDINDEAYRIMLVDTFLNSVYLYDDDHLVLVMNYSGENCKVDLKLVEGAVSGDGCKGSAFAPSSAVDL

SEQ ID NO: 20804 - protein, 540 aa, synthetic construct
MPRQTTQKLITALYPRLSHEDTLQGESNSISNQKRILEAYAKQNGFSNLKWYTDDGFSGANFQRPGFQSMLADIEAGLVGTVIVKDMSRLGRNYLQVGMYTEMIFPQNGVRFIAINDGVDSAQGDNDFAPLRNIFNEWLVRDTSKKIRAVKRSKGMSGKPVTSKPVYGYLMDEDENFIIDEEAAPIVRQIYSLCLAGNGPTKIARMLAEQQIPTPGTLEYRRTGSTRRYHPGYECRWATNTVAHILENREYTGCLVNFKTEKVSYKVKQSKENPVEKQAIFENHHEAIIDRETWERVQELRKQRKRPNRYDEVGLFSGILFCADCGSVMYQQRYQTDKRRQDCYICGSYKKRTADCTAHFIRTDLLTAGVTENLRKVTSYAAKHEARFMKLLTEQTEDGSKRRNAARKKELEAAEKRIAELSAIFKRLYEDSVTGRISDERFTELSADYEAEQKELKEKAAALQSELTKTLEATANAEKFMKVVRKYTSFEELTPTLLREFVEKIVIHESEALDGKRRGKLRRQEIEIYYSFVGKVELPD

SEQ ID NO: 20805 - protein, 545 aa, synthetic construct
METTPTKRVALYIRVSTQEQALEGHSIQAQEQNGRQFAERMGYEVVEVYADEGISGKSIKNRFAYQRMMKDARNHRFDLLVIWKLTRLGRNMLDVLQTVEELLRYDVGLHSISEQFDVTTSTGKLMLQLLGSFGEFERNQIAENVQMSMQSLVKDKKRYAGGRRLGYVSGIDTNGQKQLVIEPEEAKIVRLIYAKYLGGAGYRAIANFLNRQGYQTVKKNAFSTTAVKDILRNKIYAGYLEYARYINWETKRRKGKNPKPILVKGTHEPIISEEDYQKVQERLVLEGKQPKWNHTGENVLTGLLRCPECGAPMAASNVTNTLKDGTKKRIRYYSCSVFRNKGASVCHANSIRAEQAETFVADRLKEIIQLPEVLPRLVAALNEEIVRQSQPLEQELVVLLERKEELKTKIEKWEAALEDSPELFPMLKDRLDELTEKRRQLHIRENEILGIFQQQGEPIQVKDVQRILTSLDRFLAQSEKKQIKALYRTFIEKITFDPNHKEMLEITMKFTPAVVQQLNEQYQIAVSKTKDTAIFVLKTPFTLTI

SEQ ID NO: 20806 - protein, 621 aa, synthetic construct
MKIHKTLAPQVYSYSRFSDMEQKKGSSLARQEDYAKKAAEQHGLELNDELVFTDLGKSAFHAIHKKAGAYGAFLKAIEKGLVAKGSYLIVESFDRLSREEAYKAQSDITRLIEADINIITAADGQLYNKQTLAQNPGLLFLMTGTMIRAHEESLTKQKRSVAAIEKKLGKFFDGELVDVGGPTPFWIQRSKDDRESLFSFSEDHNRVEGARIITQSFINGKSYGQIQDLLLEKEILSPKGDVKWGTTTISKVLENEALYGRKTVRLPALKDGTKDAQEHTLDGYFPALISKDDFDLIQQIKRVKKKGRTGYRFNSAKEEGVTSVVYLLSGYGKDKNGDARSVCSKCGGALGSRLQEQFTRKKEYVRTVMRLDCLSRTRKKSCDAKGIAQRELEKSFLQAVSEHVDYNLLNKDDSDARAVEIIDSRLEDLEGVIQRAAELFLLTDDTTAHEIARQKLNDAKAEKVELLKQKDDGKEFVISAEAIKEFEGYIQRAYEDENDFEARSYVKDILLQCVEKLVIDTEPRSVESLGYKNLYKGAKVWTVTVDFRSGKRITIYHDVDTNMSLFNQVEGGGNSFHTFTPEALEIWDQQGDEAFVKHLSETGYGLNSSYVQDFISSLDDK

SEQ ID NO: 20807 - protein, 402 aa, synthetic construct
MRKVSRIEPAVPALPKRKKAAAYARVSRDTKRLMNSVSAQISYYSSLIRGNPEWEYAGVYADCGISGTDISKRDEFIRMLADCEMGKIDIILCKSISRFARNTVDLLKTVRHLKELGIEVRFEKEQIHSLSEEGELMLSLLASFAQEESRSISENCKWGIRKRFRSGEIGVANKHLLGYRYDEEQEKYIIIAEEAEAVRRMFQMYIDGVSFRCIAESMNKAGIRSVLGNEFQAGTVRQLIFNEVYAGDIRRQKCYMADPITKTKVKNNGELPQYYIADCHEAIIDREIYAKVRAEMKRREAMRNPTYPFTRRIRCGACGMFFTRRICGNDAKWFCRSKKEVGMTCKSHNYLESELYKIFSEILGTDTFDNKAFEASVKEIISLPDGTLKVRMYGGDTKVWQI

SEQ ID NO: 20808 - protein, 541 aa, synthetic construct
MNLRKGNKTVAKNVVTIPATKNRFTADSLGSLKKRRVAAYARVSTDHEEQQSSYEAQVDYYTNYINGRDDWEFVSVYADEGITGCNTKKRDGFNKMVEDALAGRIDLIITKSVSRFARNTVDSLTTIRRLKENGVECYFEKENIRTFDGKGELLITIMSSLAQEESRSISENCTWGQRKRFADGKVTVPFKRFLGYDRGEDGNLVVNEEQAKIVRRIYGLFLQGRSPYAIAKILMADGIPSPGGKKTWASGTVKSILTNEKYKGDALLQKVYTVDFLSKKKKVNEGEVPQYYVEGNHPAIISPQEFDAVQKQMALRCSGKNRQSCVSTFSSKIKCGDCGSWYGSKVWHSTSKYRKTIWQCNHKFDGDEKCTTPHLDEDTIRKLFVKAVNILLTEKDEIIENFHAIKDMFFDLRPLETEWSQLQEELNVVTELKQQCIKENARIALDRKEYRKRYDGLAMRLDRVQGRLDEVSRTITEKQVHREKIELFLDGLQKQKELVTEFDEDLWYSLIEYVTVFDKEDIRFTFKDGTEISLHIKFVYT

SEQ ID NO: 20809 - protein, 497 aa, synthetic construct
MRAVLYLRLSVAQDDVISDSIRRQESDLRDLASREGWEVVQVLADDGLSGRKARANATEALRMLRDGEADVLAVWKLDRWTRQGLSAIGDLVTTLDTRPGALFVAFQDSLRSDQAGWRLLAAVLSEVARSEAESTAMRVSSAVWANRSAGRFVGGTVPFGYRSAPRAEGGRTLVTHPPELAVIQEVAARILAGESQASIIDDLTARKIPTTRSPYRFAEMKGLDPVGLDRGSWSYAGLAAVWTGESLLGRISRSRKVVDEGGRQRKVWELVRDADGLPLVAYPPLLDRSTVERLRLALRDPKRPASPRARRPRRARLLSGLIYCALCNARLWVSSHGGRIVYTCGRKSGRCPGPNMTVENADRAITEEYLSVVGHYPEVREVEETTSPESASALREIETALRETLAELASDSADEPAILRRVAILKGRRTDLRAAPVERSIRLIETGLTHSEAWELASMTERQGMLARAISHVTLTVTDTKGHTGYHPERLRIHWER

SEQ ID NO: 20810 - protein, 413 aa, synthetic construct
MNIRKIEAKNNKRKKRICAYVRVSTTNGSQLDSLENQKVSFEKLYAERDDVEFLGVFCDKGISGSKYDRPNFQTMLDACRKGQIDVIHTKSISRFARDLINVLEISRELKTLGIDIFFEEQNIHTLSNEGEVVLTVLASLAEEELQSMSGNQRWSFRRKFQKGELLINAKRFLGYDLNEKGELVINKAEAQIVRTIFYSYLEGMGTHRIAKKLNEVKVPTVTGKKWYDSTIRNILKNEKYKGSLLLQKYFHDGVNGPKKLNQGQVEQYYIEDNHEGIVSKEIWEKVQVKMKSRSRIQGTNKTYKFSRMLKCQYCGSTLKRQVSYKKKIVWCCSKYIKEGKNSCKGMRVPEMDIEDWKLSLPVIVLERIEDGEKHYGYTGQKTSANGHISNSEKNQSSRLLSSVYRPRRTAIKL

SEQ ID NO: 20811 - protein, 428 aa, synthetic construct
MSTDQDEQLSSYENQVNYYREYILKHEDYELVDIYADEGISATNTKKRDAFNRLIQDCRGGKVDRILVKSISRFARNTLDCIKYVRELKELGIGVTFEKENIDSLDSKGEVLLTILSSLAQDESRSISENSTWGIRKKFERGVVQVNTTNFMGYDKDEKGNLIINHEQANVVRYIFDRFLEGYSPEFISKELREQEIPGCTGKAKWCPSAIWKMLQNEKYKGDALLQKTYTVDFLTKKRIDNDGQVNQYYIENNHEPILDREKWEIVQLEIARRKKFREQHNLQFYIMQKENNPFTTKVFCAECGSAFGRKNWTTSRGKRKVWQCNNRYKVKGHIGCQNNHIDEEMLEKAFMKAVGLLQKHRSDVVDKWQKLEQGANLLHKHYAKQMYQILDLDKFDGAIMNQVLDHINISEDGKIVVTFLEGTGVDL

SEQ ID NO: 20812 - protein, 502 aa, synthetic construct
MQLRAAVYLRISNDDRATGLAVERQRQDCLRIVADRGWTLAGEPYTDNGISASKKDVKRPAYERLENDYAAGRFDALVCWDLDRLTRQPRQLEDWIDAAESRGLIVVTANGEADLSTDGGRMYARIKASVARAEIERKGARQRRANVQRVAMGLPVPGRRRYGYESDGTTARPNEAAVILEIFHAVADGRTIYSIAAALTARGTAFTTGRGGEGKWTPGRVRDVILNRSYQGMALALPNDAALTPSERRELRKRAESWQRSEHVAAIVDDDTAETARAILADPARRTTPGPARRYLLSGIAVCGVCGAGIKRLRESYRCSANHRHPQILARYLEPQVRDAVVWAIATGGPDLIPTAEPGTTLATLLARLDRAERAAAQTSADRDEGLISAAVARVRLEQLRDEREVVTAELDRARAERSGASALLAVALDLLGHLPPAAAAVRGGASIRETVGERFDALDLDRQREVVRALVAVQVDPGRGPERVRIQHLLATHLNEWEHTE

SEQ ID NO: 20813 - protein, 456 aa, synthetic construct
MRNKEIAPALVRVALYIRVSGEEQKIKGLSLEAQQERLEAYARERGWVIVGIYIDAAKTARKNIHKRTEFQRMMDSVKRDEVDILLFARLDRWFRSVADYYKVMEVLQAHNCDWKTTDEEYDTTTANGRLYINVKLSIAQNEADIDGERIDVVFDSKIAHGTVVSGSAPFGFRVNEEKRLEVVPEDAAIVQDAFNYFENTVSQRATVRYVRETYGVNWCDATFRRMLKEKLYTGVYDRGGRYNDQFCPAIIDRQQFDRVQALLTRNVRSAPSGKVYIFTSILTCAECGHKLVGYKSSDYFYYRCNQHFQRGRCSHNHSAREDVVEAWLFDHLGEELERCQLEWDVEAAKKKASVARTDKAALKRKLTKLKELYVNDLIDIEDYKKDYQIYVSALNQIPEPAQEAPPDFAAVRRLLDNSFRTIYDTLTREEKRTLWRSVIKEIRIDNDQNITGVVFW

SEQ ID NO: 20814 - protein, 518 aa, synthetic construct
MGNVMVIPARRQVGNNVKRSEKPKLRVAAYCRVSTDSDEQATSYDAQIEHYTEYISKNPDWTLAGIFADDGITGTNTKKREEFNRMIDECMAGNIDMIITKSISRFARNTLDCLKYIRQLKEKNIPVFFEKESINTMDSKGEVLLTIMASLAQQESQSLSQNVKLGLQYRYQQGHVQVNHNRFLGYTKDADGHLVIDPDQAEIVRRIYREYLEGSSMDKIAAGLEADGILTGAGKTKWHTSTINKILRNEKYIGDALLQKTYTTDFLTKKRIKNNGIVPQYYVEGDHEAIIPKDIFLLVQEELVRRRRVHTSKSGKRHCYSCKHCFAQIVFCGECGEFYRRVHWNNRGCKSIVWRCCSRLDNTGHSCRSRTVNESLLEQTAIDAINQVLCKKDDFLKTLQANITTVIKQGDNLSPEVIDTRLRELQKELLKKANQKDDYDAIADEILRLRDMRKQSEVDSVIKDEQMKQINDLQDFIRSQPTTITEFDEVLIRRLIAKITVFADHFAVKFRSGITIRV

SEQ ID NO: 20815 - protein, 518 aa, synthetic construct
MKKITKISSDKPKQNAKKLRVAAYCRVSTDNDAQLESLEAQKKHYEDYISNREDWTFAGLYFDKGITGTKKEKRPELLRMIADCKAGKIDFVVTKSISRFARNTTDCLELVRKLLELDIPIYFEKENLNTSAMESELFLSILSSMAEGESSSISENNKWSIQKRFKNGTFKISYPPYGYDWNGEQMVVNPEQAKIVEWIFSQILSGKGTLAVANELNKKGVPTKKGGRWTASTVRGMLANEKYTGDVIFQKTYTDSQFNRHTNYGERDRYALAGHHEAIISREDFDAAAILIQQRGREKGIVKGKNKYQNRYCFSGKIFCGECGDTFKRRIHTCSNYKYAAWCCNTHIEDKNHCSMKFIRDDNLKAAFVTMINKLIFGRRLILKPYLEALKDSNKDNSLRRIQEIQSLLLENSEQRETLAKLMAQGYIDQILYNEENNLLLAQADQYKTEISALNKSISGDATLVKSTLDLLRFAEKGVMLDAFDEALFENVVTRIRVLSRQKIVFELKCGLTLTERM

SEQ ID NO: 20816 - protein, 501 aa, synthetic construct
MIIREDAIYGRQSVDRKDSISIESQIEFCKYELRGGNFRKYTDKGYSGKNTDRPKFQEMMADIRRGLIKRVVVYKLDRISRSILDFATMMETFQEYNVEFVSSTEKFDTSTPMGRAMLNICIVFAQLERETIQKRVTDAYYSRCQHGFHMSGAAPYGFQLEPTTIEGIRTKMMKPDPETADIAKLMFEMYSQPGTSFGDIARYFADEGILIYGKEMKRGFISQLLRNPIYAQADLDMYEFFKSQGTVVVNEATDFAGTNGCYLYQGRDVQERKNKHLKDQILVLAPSEGLVSSDTWLRCRKKLMANKTFQGGRKAKNTWLAGKVKCGRCGYALMSVGNPTGVQYLRCSKRADSKSCDGCGTLRTREFERFLYGEMVKKLSEFQTLTAKQETVNPKLTALNMELARVEDEIEKLLNTLTGANAVLLSYANSKIEELDTRRQALTKEIAALSAETMSPEQIERLSVYLNQWEEIDFEDRRQVADGLISQIRATDEHVSIEWKI

SEQ ID NO: 20817 - protein, 556 aa, synthetic construct
MKMASQQQQSAKGSRAVLYLRVSTARQAEHDVSIPDQRRQGEAYCASRGYELVETFVEAGASATSDKRPEFQRMIEEGTSKPSPFDVVVVHSFSRFFRDHFELEFHVRRLAKNGVRLVSITQEMGDDPMHVMMRQIMALFDEYQSKENAKHVLRAMNENARQGFWNGALPPIGYRIVAAEQRGSKTKKKLEVDPLHAESVRLIYRLFLQGNGISGPMGVKSIACHLNENRLFTRDGGLWGLAQIHAVLTRTTYIGEHRFNTRSFKGRAKKPDDEVVVMAVPAIIERKTFDAVQARLKSRHPMVTPPRVTTSPVLLTGICFCAKCGGAMTLRTGKGCTGTMYRYYTCSTRARQGKAGCQGKSIPMAFLDDLVANHLEKRLLKPERLTAILEAVLGRRQERTERRREHLGELKRKITETDQRLNRLYDAIEAGVTDVNDPALKDRMAGLKAIKEQATTDAKRIEASFDSTGNQPITSEMVTTFARGARERMHDPRGGYRRDHLRALAQRIEVAEKEVRIIGSKSELLQTLVAASGEETAVSGVRSSVLKWRARRDSNS

SEQ ID NO: 20818 - protein, 529 aa, synthetic construct
MNQRLIKVARPAGLTKALLYARVSSKEQDKEGFSIPAQCKLLRDYAEQQRFDIAQEFVDVETAKTTGRTNFTEMVKYLRKHPGIRIVLVEKTDRLYRNLKDWVTLDELDVEIHLAKEGVILSRDSRSSEKFMHGIKVLMAKNYIDNLSEEARKGQMEKAEQGIWPTKAPLGYINTTGKDGRKVIEPHPDLAPVVTQLFERYATGRYSLKALAKAAHGEGLIYPKSGNPVPVSTVHMILRNRLYTGLFQWNGKLHHGKHEPLVSIELWERVQGVLTGRNAVPTHPIGKEFAFTGLMTCTECACAIVAEIKKSKYVYYHCTGHTNKGRGGYGDCRRKYVREEVLDQTFANLLDRLHFDEEILEWVKAGLLASHADERREHEQAIHRCQVEYKRLEDRLHAMYLDKLDGRIDNAFYDRMSAQWRTEQMRLLREIERHGSAEESYMEDGIRLLELAHNASRLFAKQPAHEKNRLLNLVLSNCKWDKGEVHAVFRQPFDLLAETVVAGAAMGAQQAPLSTESPVWLGNLDSNQD

SEQ ID NO: 20819 - protein, 496 aa, synthetic construct
MKQKELSPAPAAFNLENVADLYIRVSTTEQAEEGYSVGEQEARLRSYCSAMGFTVNAVHIDPGYSGATLDRPGINQVIKDVQGGYVKKVIVWKLDRLSRSQKDVLILLEDVFLENGCNFISLMESFDTATPFGRCIVGILAAFAQMERENIKSRMMMGKQAGLKEGNYYSGITPIGYKSELQENGKRSLVVDPFSSRVVKDMYKLYSSGRSLGEIGDYVQKKYGVYADRDRRSAADQCGRVLRNPVYAGRVFMNDLEYSGKHEALVSPEVWQKVNDRLSQNKKAYKRAYSGSDGLLSGLLFCGDCGARMSIRQWGWKTSKVNKYICYSVSRCSKRMIKSDSCSNRKEHFTVSDLDALVLEEIKKLALDPAALDALVEENAGEAPPDLGAFRERLGNVEKQITRLLNLYQTGIVGLEEIQDRLSALKEERKAAQKCLEEAEAEDSGKMSKGEAAAALASLSGIIEAGDGDGLYALVHSLIEKVVVLNGDITIYWAFC

SEQ ID NO: 20820 - protein, 518 aa, synthetic construct
MFTVGIYPRKSVYRDNSDSVNVQIQLCRDYAGVIFKDKDITFRIYDQDEGFSGKNTNRPGFQELMSDVKKDMLDVVMVYKLDRISRNVQEFSAMYEIFQQHNVSFVSVKESFDTTTPMGRTVMYILAAFAQLERENTSERVADNMHALGTSGKWTGGRSPSGMKSIRQKCGDKEHSFLVIDSEKIWLPKLLYKLLLDGYTITAAERYCRDHGIRTQSGKFLNTSQIYNIITNPVYCQNSMEAYYYFHDQGCSLPDPDLFDGKKGLIGYGKTKNGKAAQKKQDKSDWTIAVGIHEPVMPADQWIAAQNRLGINKMIRSAKYDCGILKGVLRCRCGARMDVRTYQKSGHIFSYYCCTDMMRQGKGKCNTGYIRTEQVEEAFLRQLRRIRFNPDGFKLRPDAGGSLHSVSSIKEELKQTGAAIDNLTAALMSATDSPAAAYIVSKIEELDKQKKALETELRKAELRNASIRTIQETERFIYQNICYLLDNFDSIEYTGKNELIRKIIKKCVLEGENLHIIF

SEQ ID NO: 20821 - protein, 507 aa, synthetic construct
MFKQSDVEITKYNDYKYLIYTRVSSDKDSQKESVPNQIDICRYWLEQNHYEFNENAVLVDEDKSGTLFLERTAMQLILQKARNREIKMVLFKSIHRLARDLKDALEIKEVLLGHGVRVVTIEEGYDSYVEGKNDMKFEMFSMFAAQYPKSLSVSISSALAAKVRRGEHIGKIPYGYDRIDQKLVIKEDEANVIRQIYKWYNEEGFGFKKITHLLNKGVQQGEILPPRSGKAWQITSIQRIIKNPTFCGTFILNQYTTIKVDGRKKQIRNPEEKWIVFEDHHPAIVSKEDWKLANNKKKVNIKTKITPWNEFRGLLKCGKCGSNIVIIQSWNQKLDGTKTHWRYLKCSAYRRSGKSGCDNHVPIRYEEFRRFIVERLLETGQKVSLDFNNTLNNHSKQQVKQLENSIAKYQEKNEGLVDLYLDKLIDKVEFQVRRKEFEQQIKEAQDKLFLYKNEEVQEVSVKNIQQAFKTIEKKDQDLYHALKVIIDYITVNIDGSVDIKYNFDLNK

SEQ ID NO: 20822 - protein, 604 aa, synthetic construct
MKKVFVYHRVSSDQQLDGSGIARQAELLEGYLERTGICAEMDDPAPVVLSDQGVSAFKGLNISEGELGAWMEQVRNGMWDSSILVVESIDRFSRQNPFDVMGYINALMAHNVAIHDVMANIVISRSNSKDLPFVMMNAQRAYDESKYKSDRIRKGWAKKREQAFNKGTIVTNKRPQWIEVENDKYVLNYKAAVVKEIFALYQTGMGCPTIAKQLQTKEGEQYKFNRPWTGELVHKILTNRRVTGKIFISEIIRNHDDIENPVTQKKYDMDVYPVVINEEEFELVQELLKSRRPNAGRVTVKKDGQEEVLIKSNLFSGIARCTECGGPMYHNVVRAKRTPKKGDPKIEEYRYIRCLNERDGLCENKAMTYETVERFVVEHLLGIDLSTVMKEQEFNPEIEVLRIQIDQVKDQITNYENGIERRKSTGKPISFEMREELDDAKSELERLLARQASLATVQVDVPVLQDVNVTELYDVNNVDIRTRYENELNKIVSNIRLKRNGTSYTIDINYKQNELKRHVLFVENKKKEQTLISEVIIEDVDGGKFYYTPSFMIRLKDGEIRFQQTNEDLSIVDYSLLLNYVDAIDRNDAVGVWMRNNMSFLFTK

SEQ ID NO: 20823 - protein, 497 aa, synthetic construct
MCFLCTPILTQIGVEIYMRTALYVRVSTQEQANEGYSVGEQEERLKAYCTAKGWTVYKVYTDGGFSGANTERPALKQMLIDIKNKKVNAVVVYKLDRLSRSQKDTLLLIEDEFLKNNVEFVSMSENFDTSTPFGRAMIGILSVFAQLEREQIRERMQMGLDARAREGFWHGGGYDPIGYDYIDGYLQINEYEAMQVKKVHELFQKGLPIARIQKMMREKYTTKHGSWVNHSTVRNALTQPIYTGKIEWKGELYEGKHEAIIDEDTFNKSVKRYNEISWNKGDGKNKKRPFQAKHVLTGLVYCNHCGARYFAKGNYSGRGENRKYRPYYTCYSRAKSAKNMIIDPNCKNKSYATVDLDRIIFDEINKLAFDPTLIKEIESDKPEKENSNAAIETRIKEIDKQVERLLDLYQMGTSSVDDVLTRMDKLNSEKQALTDELEVTESDDTPNLSQDEAEKLLVEASEILESDDLIKKRELVHSLIDSIEIDGEDIIINWAFV

SEQ ID NO: 20824 - protein, 508 aa, synthetic construct
MKKAIAYMRFSSPGQMSGDSLNRQRRLITEWLKVNSDYYLDTVTYEDLGLSAFNGKHAQSGAFSEFLDAIEHGYILPGTTLLVESLDRLSREKVGEAIERLKLILNHGIDVITLCDNTVYNIDSLNEPYSLIKAILIAQRANEESEIKSSRVKLSWKKKRQDALESGTIMTASCPRWLSLDDKRTAFVPDPDRVKTIELIFKLRMERRSLNAIAKYLNDHAVKNFSGKESAWGPSVIEKLLANKALIGICVPSYRARGKGISEIAGYYPRVISDDLFYAVQEIRLAPFGISNSSKNPMLINLLRTVMKCEACGNTMIVHAVSGSLHGYYVCPMRRLHRCDRPSIKRDFVDYNIINELLFNCSKIQPVENKKDANETLELKIIELQMKINNLIAALSVAPEVTAIAEKIRVLDKELRRASVSLKTLKSKAVSSLGDFHAIDLTSKNGRELCRTLAYKTFEKIIINTDNKTCDIYFMNGIVFKHYPLMKTISAQQAISTLKYMVDGEVYF

SEQ ID NO: 20825 - protein, 582 aa, synthetic construct
MDRENTKPLAYSYVRMSTDMQLKGNSLERQKEKSKEYAIRHDLHLVENFEDIGVSAFKGKNIKEGMLGDFISLIENKTVPAGSYLLIESLDRLSRENIFESIPLFIKILKSGIKIVTLIDEQVYGAENADFKDLLYPMVVLSRAHEESVAKSFRVGKAWANKRKNIHHRKLTKVCPAWLKLNTDANSFEVIPGRDDIVKRIFDLADSGYGSYSIGRILNNEAVPPFSEESKGWHASYISRILNNRSVLGEFQPHKLVNGTAEPDGNIVPDYFPQLIAEEQFLRIKHARRKRQVEGAGRKGPVYRNLFSRIAKCAYCASPMRFVDKGPPPKGGQFLRCTNADRHFGCSASHWRYDHFENVFLYFVHELDLIETLKRADEQSERYTLEQKLVSINENIRGKRELLNTTFDMLQTSNASKDFIQSKIEEISSEILELENQKGAVEAKLEKDAALAPVDDQQIKSLIKELQDADDGDLERKRRVVANRLQMMIKSLTLAPDGLRKDAEKLVLSQFGSSEALFDFFETGAQSGEVSTGMSFSVVLLDGIMRRVTVSRREPLKVIQLIAVDKHGLIIETEQTHESLKI

SEQ ID NO: 20826 - protein, 507 aa, synthetic construct
MKRVISYIRFSSEKQAKGDSLRRQSKLVTDWLKAHPEYYLDESLTFRDLGVSGFTGKHLKGGLGDFLTAIEKGLVKAGDTLLIESLDRLSRQDIDIASELLRRILRAGVDVVTLSDGEHYTKESLRDPLSLIKSILIMQRAHEESLRKAERIQAAWDAKKEAAKAGIKVSKRCPAWLKLNDDRKSFSIIPEKVETVKRCFQLRLEGKSIWEIVRTLNDEGHQTLNQYKAGSFGQSSVQDLLKNRSVIGYFTPKGCEEIAGYYPAIIDETTFYKVQQLSYARYGRKPASDKPLSVNLFKGVIRCSECGHALIITGFSDTRSGIYRCPLRNENRCSAKGLSRKQTDGTLLALLSRLDRFDSDMTNTVDTLKLHREHISSNIEKLVQLSLEIEDLSAITSKLKQLKGELSQVDADIEKETQRLKSIDVGCLSDCDLTTKAGRIEAQLIIKSAVKEVVLNTAKRRCKVTFHNGKVIDLSITENPSEDVTEAIQSLSEVTERGLIDVDEVII

SEQ ID NO: 20827 - protein, 605 aa, synthetic construct
MKKCFIYHRVSSEFQLARTGIQRQEDSLQAYVERTNLLADMEDPEPTIISDRGISAFKTNENNFSIGELGRWMDQVRDGMWDGSALVLESIDRFSRQNPFTVVAYLSELVSHNITIHDVSLSMLINRTNSAMLPIVTMSAQRAYEESKLKSDRIRDGWRRRRENAFNNGTIVTNKRPRWIDVKNDKYVLNDKVAIVREIFRLYKKGIGTSTIAKILNTRGEKWLFESGRLWRSESVHKILKNKRVTGVIFISETIRDYNSTDKSIERNTYEMDLYPIAISKEEYALVQQLLKMRRTNNGRITNIKDTGELKKSNIFNRVFRCAKCGEAMYHNVVLANRDSKKRGKFKEEYRYIRCIGERDGLCDNKALRYEVVEQFVIEHIKGMDFTKILKPNEINPEIELVRVLIEEEKAHIQEYELGIERLKKQDKKIPFDVLTELQDSRDKLRTLEERQFSFADIKVDTDYIKSVDSSVIFDQTNIAIRSMVEHELIKIIDTIKLYRMGKHYVITLKYRSVGILKHVLIVEAKKIPTLISNIVIERTGKTVEYSTPSFSLVIADGDSPRLKTSDGVPISMIDYSLLLNYVDDVDRDDIVGVWMREKFNTLTS

SEQ ID NO: 20828 - protein, 517 aa, synthetic construct
MRQVITYLRFSSKPQERGDSIRRQKGLFERWLKDNPDAKVVDEFSDEGASAYHGHHLKGDFGRMLQNIQDGKYLSGQTVLLVESETRLNRQKARNTENLVDLITGKGVDVICLESGKIYTSTNIDDLDTSIQLKIAAHIAHQQSKEKSIKVSAAWEHRAQLALEGKQQLTKNVPGWIDPDTRKLNEHSSTVVTIFDLLLSGESLHNIARYLQANNIKSFSRREKANGFSVHSVRTILRSESTVGTLAASKRNDRPAIPNYYEPAIDVATFNKAQEILSKNRVGRAPASDNPITINLFKGIIRCQCGASVHPTGVKATYQGVYRCNNVPDGRCNVPTIKRKPFDKWMLDNIVGFLERDDGNNTDKRKAEIEYQISLVTSKLKKATTLLLELDDVTELKEQVKELNIQRSNLQSELDELNQRETLSDKPLHHLSEIDLTTKAGRVEAQLILSKFVQSIELQREMIIITLRNGTVIGKSRDLSPVLSRDLMKQVVSSPSPTDIDMFSVITSDEEFRKPGK

SEQ ID NO: 20829 - protein, 520 aa, synthetic construct
MRTAYAYIRFSSEKQSAGDSVRRQQSLIDSWVKNNPDYILSQKTYKDEGLSAFTGKHAAGDLGRLMNDISNGSITAGDVILIESLDRLSRENISTATDRLKAILIHGVNVVTLTDQKQYTPESLNSPMDLIMSILTAQRAHEESQSKSKRMREVWAKKRTEAEESGKIITKSCPRWLTVNSDRTGFEPIPEHVESIRLMFEMRLSGKGFAGIAQALNESGRLTLTGRSKGWNQSSVQQLLSNKALIGYKIPSRKAVVNYIEIPDYFPSVIPLEQFQQVQLIGADKQGQRAANDRPMNVNLFRGVMKCAECGATVIVSGVDDKRAGYYSCSFRRLGRCNTSKPMNRGMVDEALIKGLLYSLDRLTTQGQGENPLMKLEAKRADLTERSQKLLAALEIADDVSAIATRLKAVTDEIRAIETQIKTCKDLEQVHTVQSVQGMDLTVKSQREEVQLLVKKTFREINLDGIRKTVNVYLHNGLTLLNVPVNQIVDAGEWIELLPVIGGDTVDFKDISFKAPRYLD

SEQ ID NO: 20830 - protein, 558 aa, synthetic construct
MSKEKIKVYLYTRVSTSIQIDGYSLEAQKSRMKAFALYNDYEIVGEYEDAGKSGKSIEGRIQFTRMMEDIKSGKDGVSFVLVFKLSRFARNAADVLSTLQTMQDFGVNLICVEDGIDSSKDAGKLMISVLSAVAEIERENIRVQTMEGRIQKAREGKWNGGFAPYGYQLVDGKLFINEEEAVAIRTIFDQYVNTNIGANGLSKYLENHGIRKIPRQNGKNPLFDAGLIRKILKNPVYNGKIAFGRRTLEKVHGTRNEYKQVEQDEYLIAEGIHEAIISDELWQAAQVKLKSQAKKYEHVNKGKDVRTHLLSGIVKCPICGVGMFGNKCIKKKKDGTKYKDFYYYGCKHRQMIRGHKCTFSKQIREELLDDAVAEIIIKIVSNPKFASIMQEKINMKVDTSEIEKEIDNYQKELRKSHSTKFKLIEEIDNLDVDDKYYKRRKQDLDDRLYRMYDKIEELESFLIDAKAKKQTIEAEKLTGDNIYKVLIYFDKLYNVMNDVERRQLITSLISEIQIYKEKQPNGQWLKSITFKLPIIDEDLNISLDNDEHVECVVLLIKE

SEQ ID NO: 20831 - protein, 599 aa, synthetic construct
MKKIIPYGYLRVSSLEQVRSGGGLEAQDEEVRRYITQKSDVFDIDKMVMMSDEGLSAYSGRNIKEGELGRFLANVDAGLIPAGSALVCYSVDRLSRQNPWVGTQLISTLIGAGIEIHSVAENQILRSDDPVGAIMSTIYLMRANNESVIKSERAKHGYTKRLNESIANNKVLTRQMPRWLYDNDGKYAIDPNMQKVIDFTFDSYIAGQSTGYIAKKLNDMGLKYGDTSWRGSYVAKLIRDERLIGKHIRYSKQIKGVKREIIETIPDFYPVTIDTDKFHIANNMLTSVAKNIRGRTRMTYGDISILRNLFNGVIKCGVCSGETSVVQNTRRKITNGVVTYVPYKTFLRCRNRYELKTCTQGDIRYEVIERAILNHLMGLDITTLLAAPVDNKIERYRTELELCKAEEEELQAIIKERENEGKRPRPQTLKSYEDVADRIDELTQLIESHVEDNFIPHFNVDLDSITDVSNVSERSLIKKGIATIADSICYKRISDFILVEIKYRNLNDKHVLVIDNKNSEMVVNFSIEYNEENKVYICNSFVMEYDNLSCEFTVSKTTMEDYAHMMNFVDYVSDDESYNAKEFLVKNFTHVKFIDKSNE

SEQ ID NO: 20832 - protein, 455 aa, synthetic construct
MVNEIKQVALYIRVSTDQQAKHGDSLDEQQHTLNEYVRQQGNMRVFKTYIDDGISGQKLYRDEFQKLLDDVKKGRIDTILFTKLDRWFRNLRHYLNIQEILDKNNVTWLAVTQPFFNTETAMGRSFVNQSMGFAELEAQMTSERIRAVFDNKIRKGEVVSGKVPLGYEIKDKHLVPNEKAEIVKEIFQYYLETGSMRATVRHLENHFSMTRDYQSVRQMLTNRKYIGELRDNKNFCKPIIDRDVFERVQLQLSKNIRMNKKRDYMFTGLLVCSECGCNYSATAVISRYVRKDGTTNPNERHLYRCTKNRNNAKKCSNKKGIYETTLENFLLENIEKQAAELSVKMQQEPEVKKTKNTNDKIKKKIDRLKKAYLNEVITLEEYKKDREELEALLIPERDNKIAKIDLNSLHNYSTAEFRDGYKQLTISEKSSLWRQVIKNIVVYPDGNLKINFLGY

SEQ ID NO: 20833 - protein, 590 aa, synthetic construct
MNTKVKLIKASNTGARNRNALHLDLKRVAAYCRVSTDSKDQLESYKSQVDYYTNLIKNNKNWTLAGIYADEATTGTTATKRADFMRLISDCQNGDIDMIITKSISRFARNTLDTLKYVRLLKENNVGVVFEEENIDTLTMDGELLLTILSSVAQQEVENTSAHVKKGLKMKMEKGELIGFQGCLGYDYDPITKSISINEEESKIVRYIFKRYLEGNGGSVIGRELEEQGYLTPRGKTKWSDTTVLGIIKNEKYIGDILMGKTFTVDPITKRRLANFGESDKYHIENHHEPIISREDFEKAQEIRLRRAQNRNTIANKDRKREKLSRQYAFSSMLECGFCGEILSRRTWHTSSIYKKINWQCVRSTKKGKKYCPHSKGIQEAAIEKAFVESYRQLCHADSTVIDDFLKIVEEEINDNTLVKDLKKIENQLNRIISQERKLVDLHLEDNIDEEVYAKKYKKLTKQKEELLDEKKTLELTIKDEDSIKERLKQFKKVLENKEIIEEFNGTVFESIVDKVVVGRIDKDGTVHPYDLTFYFKTGVKDSQDSNNFKDKRKNAKDNDINKLCSYKNDEDKKLCSQSKDNARGVCKFT

SEQ ID NO: 20834 - protein, 455 aa, synthetic construct
MANEIKQVALYIRVSTDQQAKHGDSLDEQQHTLNEYVRQQGNMRVFKTYIDDGISGQKLYRDEFQKLLDDVKKGRIDTILFTKLDRWFRNLRHYLNIQEILDKNNVTWLAVTQPFFNTETAMGRSFVNQSMGFAELEAQMTSERIRAVFDNKIRKGEVVSGKVPLGYEIKDKHLVPNEKAEIVKEIFQYYLETGSMRATVRHLENHFSMTRDYQSVRQMLTNRKYIGELRDNKNFCEPIIDRDVFERVQLQLSKNIRMNKKRDYMFTGLLVCSECGCNYSATAVISRYVRKDGTTNPNERHLYRCTKNRNNVKKCSNKKGIYETTLENFLLENIEKQAEELSVKMQQEPEVKKTKNTNDKIKKKIDRLKKAYLNEVITLEEYKKDREELEALLIPERDNKIAKIDLNSLHNYSTAEFRDGYKQLTISEKSSLWRQVIKNIVVYPDGNLKINFLGY

SEQ ID NO: 20835 - protein, 466 aa, synthetic construct
MKKAGLYIRVSTPQQEKEGYSIEAQTEKLNAYALAKDYTVFKTYTDAAFSGAKLERPALNEMIEDIESDKIDVVIVYKLDRLSRSQKNTMYLIEDVFLKNNVDFISMQESFDTTTSFGRAMIGILSVFAQLERDNITERMSMGKLERVKRGYYMGGGNVPFGYEYNQITGELEIQETQALAVKRMFELFLSGQAINKIVSILKKEFPVFEDSFMDSTVRRRLQSHYYCGKQKYQNKIYDAKHEPIVSTKDFNKAQRLISNRPHSNAFNHSYLFSGLIICHKCGKPYNGYESVRTANGKKYKHKYYRCSCRTYKHKQKYGWTCSGKSYRCDFLDAAIMSEIKKRAESSKFALKENSNEIDNKPIIREIARLNAQQSKLLDLYLSDKISTNILDNKTDELKEKIEKLESQLNQTVSKKDKEEFEKSLEELVDRFEEMDFSTRRSLIENIIEKIEVVDDEITIYFYVTI

SEQ ID NO: 20836 - protein, 618 aa, synthetic construct
MVGIKEEKKIYLVGIYCRLSKDDGTDNESASIATQKSILTDYVKKQGWHIAKTYVDDGYSGTNFQRPSFQNMIKDIESGLINCVITKDLSRLGRNYLDCGLYLEVFFPEHNVRYIAVNDGVDTLNKSAMDITPFRNILNEMYAADISVKIKSAYRARFQQGKFMGTTAPYGYIKDPADHNHLLIDDKVAHVVKEIFDLALKGNGVAKICRHLNKQHILRPAAYAAERGETGFERHFEGNEDKRYIWSGNSVRSILRSPIYAGNLVGYKRIAANMKSKKRSSKLPEEWEVIPNTHEGIVTQEEFDIVQQLITSRRLPQNKGGFVNIFAGVIKCVDCGCALRAMNVHRRKRPEIIDCVQYSCNNYARNGRSECSAHNIEARDLFNAVLADINCFADMAVNDEKAVRAIEKRLTETDQSRAKALEKERKKLNKRLAELDRLFSSLYEDKVMERITERNFEMMSGKYQKEQLEIEARLKEVTETLNESYEKSRGIRDFLALIRNYQGLKELDATVINALIDKILVSEREKMADGTVKQEIKIYYKFIGFVDELHIIPTKRWAAMSAKNCTVCGVEYVPGSGASRYCSACAKKIRREKSNESKRRSREQKRIACMNCPQKMTD

SEQ ID NO: 20837 - protein, 606 aa, synthetic construct
MKKDVKVIKGDTTLKRTASGCVERSIKRVAAYCRVSTDTEDQINSYNSQVEHYTEFIKKNKEWTLAGIYADEAITGTQVDRRIDFQRLINDCMNGDIDMIITKSISRFARNTLDTLKYVRKLKEFNVAVFFEEENINTLTMDGELLLTILSSVAQQEVENISANVKKGLRMKMERGEMVGFQGCLGYDYDPETKSISINEKEAEIVRYIFRRYIEGVGGMVISRELEEQGYLSPRGNKRWTETTVLGIIKNEKYKGDLMMGKTYTVDPISKRRLDNFGEQDKFYIKNHHEPIISEEDFEKAQGIRLRRSKNRNTVANNGGKREKYSRKYAFSSMLECGFCGHNLSRRNWHSSSEYTKVIWQCVNATKNGKKYCPHSKGIEEEAIEKAFMESYRQVCHNNVEITNEFLKTVEEELKDNSLAKDLKKITNQLDKILKKEKDLVELRLNESISMDIYQDKYNEIAISKEKLLAEKRTLEVTLTDEKALKKRLEGFKKLLESNKYLEEFDRAVFESIVDKIIIGGTNDEGEIDPAMITIIYKTGKKDSQDGRLFKSRRKNAKEVNEETDNKLYPHSSDEVNNLCSYPMDNTCRVCSSARERLETFERKAL

SEQ ID NO: 20838 - protein, 612 aa, synthetic construct
MMEYATKITALYSRLSVGDEDRDGGESNSIVNQKAFLERYARQHKLMNIRHYIDDDESGRFFDRSAYTQMISDVENGKIGIVIMKDMTRWGRDYLQVGNAMEIFRRNNVRFIAINNGIDSKDQNTLEFAPFINIMSEWYARDISKKVTTGIKTKGASGKPVATEAPYGYIKDSNNKDYWIVDKEAAKVVKLIFTLFMEGKNRNQIAVYLKEKEILTPTFYMKQQDRGTAKNKKLNEENRYNWNKATLTRILKRQEYCGDVVNFKTEKHYKDKRNHYVDKDKWQIIPDVHEPIIDRITFENVQRILKNAPVKRPNGDGEIHALSGLMYCKDCGTKMHIRTIHKSGKVQHVTYCSEYAKGKAKHPKCNSPHRIDVDDVMENLTEVLRKIAQYSLANKEEFEVLVKSSLAKEQTEEIKKQQNRIPQITDRMEQIERVMNKLYEDNALGNIEVKRYELLSRKYAEEYYTLKAEQEEIEERLSEFENANQRAKNFINLAESYSDFEELTPTAINEFISKIVVHERDVKRAKYAVQRIEVYFNYIGKFENELTKEIEPTEQEMIQMREEIEEAKKEKSRAYHRAYSKEYRAKNLEKFREYERIKAREYRARKKLQATT

SEQ ID NO: 20839 - protein, 413 aa, synthetic construct
MSVKKIRVNRQKHRKRVCAYIRVSTTNGSQLDSLENQKQYFENLYSNRDDIDFMGVYQDRGISGSKDKRPDFQAMIEECRKGKIDVIHTKSIARFARNTVTVLEISRELKAIGVDIFFEEQNIHTLSSEGEVMLSVLASIAEDELRSMSGNQRWAFQKKFQRGELVINTKRFLGYDIDENGELIINPEEAFIVRQIFALYLEGYGTHRIAKLLNEKGVATVTGAKWHDTTIRQMLSNEKYNGSVLLQKYFHDGVNGPKKLNQGELEQYLIEDNHEAIISKEDWQTVQDKLNSRRWQQGRNKTYKFTGLLKCQHCGSTLKRQVSYKKKIIWCCSKYIKEGKVACQGMRVPEVDISNWVITSPVTVIERDGNEEKYYSYSGQESEDQRSSSGQEENQGSRILSSVHRPRRTAIKL

SEQ ID NO: 20840 - protein, 430 aa, synthetic construct
MSTDQEEQLSSYENQVNYYRDYISKHEDYELVDIYADEGISATNTKKRDAFNRLIQDCRAGKVDRILVKSISRFARNTLDCIKYVRELKELGVGVTFEKENIDSLDSKGEVLLTILSSLAQDESRSISENATWGIRKKFERGEVRVNTTKFMGYDKDENGRLIINPGQAETVKFIYEKFLEGYSPESIAKYLNDNEIPGWTGKANWYPSAIQKMLQNEKYKGDALLQKTFTVDFLTKKRVQNDGQVNQYYVENSHEAIIDKDTWELVQLELARRKDFREEHQLKAYIIQNDDNPFTTKVFCKACGSAFGRKNWTTSRGKRKVWQCNNRYRVKGQIGCQNNHIDEETLEKAVVMAVELLSENVDLLHGKWNKILEENRPLEKHYCTKLAEMINKPLWEFDSYEMCQVLDSITISEDGKISAKFLEGTEVDL

SEQ ID NO: 20841 - protein, 470 aa, synthetic construct
MKGESELDKKAAIYIRVSTQEQATEGYSIQAQTDRLTKYVEAKDFILYKKYIDAGYSASKLERPAMQELIQDVQSKKVDVIIVYKLDRLSRSQKDTMYLIEDIFRPNDVELISMQESFDTSTAFGSATVGMLSVFAQLERKSISERMITGRVERAKKGFYHTGGQDRPPAGYQFNSDNQLIINEYEAAAIKDLFRLYNDGLGKSSISEYLKKNYPGKNKWLPSSIDRMLKNSLYIGKVKFSGAEYDGIHEPIIDEVTFYKTQKEIARRKQSNTKRYNYVALLGGLCECGICGAKMANRRAVGRKGKVYRYYRCYSKKGSPKHMMKTDGCSSKAQQQFIIDEAVINNLKNIDVEAELKKRSAPQTNTSLISSQIESIDKQINKLIDLFQVDSMPLDVISEKIDKLNKEKQSMEKLLERKNKLDKTELQHRFDVLKSFDWDNSSIESKRVVIEMLVQKVIIHDNSIEIILVE

SEQ ID NO: 20842 - protein, 595 aa, synthetic construct
MNTKVKLIKASNTGARNRNALDLELKRVAAYCRVSTDSKDQLESYKSQVDYYTNLIKNNKNWTLAGIYADEATTGTTATKRADFMRLISDCQNGDIDMIITKSISRFARNTLDTLKYVRLLKENNVGVVFEEENIDTFTMDGELLLTILSSVAQQEVENTSAHVKKGLKMKMEKGELIGFQGCLGYDYDPTTKTISINEEEAKIVRYIFKRYLEGNGGSVIGRELEEQGYLTPRGKTKWSDTTVLGIIKNEKYIGDILMGKTFTVDPITKRRLANFGESDKYHIENHHEPIISKEDFEKAQEIRLRRAQNRNTIANKDRKREKLSRQYAFSSMLECGFCGEILSRRTWHTSSIYKKINWQCVKSTKKGKKYCPHSKGIQEAAIEKAFVESYRQLCHADSTVIDDFLKIVEEEINDNTLVKDLKKLENQLSRIISQERKLVDLHLEDSIDEEVYAKKYKKLTKQKEELLDEKKTLELTIKDENSIKERLKQFKKILENREIIDEFSRTVFESIVDKVVVGRIDKDGTVHPYDLTFYFKTGVKGSQNSNNFKDKRKNAKDNDINKLCSYKNDEDKKLCSQSKDNARRVRSVANQGVR

SEQ ID NO: 20843 - protein, 510 aa, synthetic construct
MALHENSRIAVYSRKSREDRDSEDTLAKHRNELEYLIKRENFKNVQWFEEVVSGETIDERPMFSLLLPRIENGEFDAVCAVAMDRLSRGSQIDSGRILEAFKQSGTLFITPKKTYDLSIEGDEMLSEFESIIARSEYRAIKRRTINGKKNATREGRLHSGSVPYGYKWDKNLKAAVVVEEKKKIYRMMIKWFLEEEYSCTVIAEMLNELKVPSPSGRSIWYGEVVSEILSNDFHRGYVWFGKYKKSKSNNSIVQNKNLDEVLIAKGHHETMKTDEEHALILNRIEKLRTYKVAGRRLNMNTHRLSGIVRCPYCHKAQAIEQPKGRRKHVRKCLRKSAERTKECEETKGIHEEVLFQSIMKEIKKYNEALFSPTEQDVNDDSYTTQLIGLREKAVKKAKGRIERIKEMYLDGDISKTEYKEKLKISQETLQKAENDLAELIASTEFQNALSAETKKEKWSHHKVQEMIESTEGMSNSEINLILKMLISHVTYTVEDLGDGTKNLNIKVYYN

SEQ ID NO: 20844 - protein, 510 aa, synthetic construct
MLLHENSRIAVYSRKSREDRDSEDTLAKHRNELEYLIKRENFKNVQWFEEVVSGETIDERPMFSMLLPRIENGEFDAVCAVAMDRLSRGSQIDSGRILEAFKQSGTLFITPKKTYDLSIEGDEMLSEFESIIARSEYRAIKRRTINGKKNATREGRLHSGSVPYGYKWDKNLKAAVVVEEKKKIYRMMIKWFLEEEHSCTVIAEMLNELKVPSPSGRSIWYGEVVSEILSNDFHRGYVWFGKYKKSKSNNSIVQNKNLDEVLIAKGHHETMKTDEEHALILNRIEKLRTYKVAGRRLNMNTHRLSGIVRCPYCHKAQAIEQPKSRKKHVRKCLRKSAERTKECEQTKGIHEEVLFQSIMREIKKYNEALFSPTEQDVNDDTYTTQLIGLREKAVKKAKGRIERIKEMYLDGDISKTEYKEKLKISQETLQKAENDLAELIASTEFQNTLSAETKKEKWSHHKVQEMIESTDGMSNSEINLILKMLISHVTYTVEDLGDGTKNVNIKVYYN

SEQ ID NO: 20845 - protein, 452 aa, synthetic construct
MKAAIYIRVSTQEQIENYSIQAQTEKLTALCRSKDWEIYDIFIDGGYSGSNMNRPALNEMLSKLHEIDAVVVYRLDRLSRSQRDTITLIEEYFLKNNVEFVSLSETLDTSSPFGRAMIGILSVFAQLERETIRDRMVMGKIKRIEAGLPLTTAKGRTFGYDVIDTKLYINEEEAKQLQMIYDIFEEEKSITTLQKRLKKLGFKVKSYSSYNNWLTNDLYCGYVSYADKVHTKGVHEPIISEEQFYRVQEIFSRMGKNPNMNRDSASLLNNLVVCGKCGLGYVHRRKDTVSRGKKYHYRYYSCKTYKHTHELEKCGNKIWRADKLEELIIDRVNNYSFASRNVDKEDELDSLNEKLKTEHTKKKRLFDLYISGSYEVSELDAMMADIDAQINYYEAQIEANEELKKNKKIQENLADLATVDFDSLEFREKQLYLKSLINKIYIDGEQVTIEWL

SEQ ID NO: 20846 - protein, 560 aa, synthetic construct
MNKKIKCDIYTRVSTTMQVDGYSLDAQKEKLKRYAEFQNMEIVNEYSDEGKSGKSVEGRPEFQRMLDNIENGTDEVQFVLVFKLSRFGRNAADVLNSLQRMQDFGVNLICVEDGIDSSKDSGKLMISVLSAVAEIERENILVQTMEGRKQKARKGKWNGGFAPYGYELVNGELQIAEDEAEIIRLIYDKFIHTNMGISAIAAWLNQHGYKKKKRQNNTLDAFASSFIKGVLDNPVYCGKLAYGRRKNEKVSGTRNEYRIVKQENYMLHDGIHEGIISETDWELAHQKREKTGVKYEKTHSLDHEHILSGILRCPLCGSGMYGNVNRKKKKDGTLYKDYFYYACKHRRLVDGHKCGYRKQWSEEKINNAVEEVIRKLVKNPEFEEAILNKIGSRIDTEEIEKEIERLEKQHRQLTGAKARLGQQMDSLDIMDKFYEKKYQDMETRLYRLYDEIEGVENSIEEVKNRLLNIRQQKISEENVYQFLLYFDKLYDKFTDLEKKEFLNSFVEQVDIYEQEQPDGRFLKHIKFRFPVYFGDRETQELCWDNESTVETIVLIQKKNS

SEQ ID NO: 20847 - protein, 537 aa, synthetic construct
MKQQIYNTALYLRLSRDDELQGESSSITTQRSMLRLYAKERHLNVIDEYIDDGWSGTNFERPSFQRMIEDIEAGKINCVVTKDLSRLGRNYIMTGQYTELYFPSHNVRYIAIDDGVDSEKGESEIAPFKNIINEWVARDTSRKVKSAFKTKFAEGAYYGAYAPLGYKKHPDIKGKLLVDEETKWIVEKIFSLAYQGYGSAKITKVLREEKVPTASWLNFTRYGTFAHIFEGKPDSKRYEWTIAHVKAILKSEVYIGNSVHNRQSTVSFKSKKKVRKPESEWFRVENTHEPIIDKEVFYRVQEQIKSRRRQTKEKATPIFAGLVKCADCGWSMRFATNKANKTPYSYYACSYYGQFGKGTCSMHYIRYDVLYQAVLERLQYWAKAVQQDEEKVLNKIQKAGNAERIREKKKKASALKKAENRQNEIDRLFAKMYEDRACEKITERNFIMLSGKYQKEQIELEQQITNLREELSKMEQDMIGAEKWIELIKEYSVPKELTAPLLNAMIEKILIHEATTNEDNERIQEIEIYYRFIGKVD

SEQ ID NO: 20848 - protein, 452 aa, synthetic construct
MLRVALYIRVSTEEQALNGDSIRTQIEALEQYSKENDFNIVGKYIDEGCSATNLKRPNLQRLLRDVEKDKVDLVLMTKIDRLSRGVKNYYKIMETLEKHKCDWKTILENYDSSTAAGRLHINIMLSVAENEAAQTSERIKFVFQDKLRRKEVISGTIPIGYKIENKHLVIDKEKKYIVKAIFDEYEKSGSVRTLIETINNLHGELYSYNKIKNILRNELYIGIYNKRGFYVEDYCEPIISKKQFKQIQRILEKNKKTTPNKNIHYHIFSGLLKCKECGYTLKGNSSNVGEKLYLSYRCSTFYLNKNCVHNVTHNEKHIENYLLTNLKPQLHKHMVKLEAQNEKIRRNKKSNKKDEKKKIMKKLDKIKDLYLEDLIDKETYRKDYEKLQSQLDNITEEQESQIIDTSHIKKFLDIDINEMYSDLSRVERRRFWLSIIDYIEIDNNKNITINFI

SEQ ID NO: 20849 - protein, 447 aa, synthetic construct
MKVAIYLRVSTQEQVDNYSIEAQRERLEAFCKAKGWTIYDVYIDAGFTGSNIDRPGLQRLLMELDKVDVVVVYKLDRLSRSQRDTLTLIEDYFLKNKVDFVSLTEALDTSTPFGKAMIGILAVFAQLERETIAERMRLGHIKRAEEGLRGMGGDYDPAGYKRQDGHLVLVPEEAQHIQEAFNLYEQYLSITKVQKRPKELNYSVWRFRRYRDILSNKLYCGYVQFANNHYKGQHEPIISEEQFDRVQVLLSRHKGRNAFKAKESLLSGLVVCGECGEPYTSYHCRSKGKHYRYYNCRARRFPSEYPSKCFNKTWRSEVIEKYIQDALYSMADEKKTTENEIVTIDYGAQLRKLDQKLERLVDLYSDGSIDKSVLDKQVAKLNNEKRDISEQHSAQTERTARSIAWEQLQDYAIVLESAAFADRQAIIQKLIRRLTIYKDRLEIEWNF

SEQ ID NO: 20850 - protein, 560 aa, synthetic construct
MTKLYSYIRFSSMRQGEGSSYERQIKMAKEIADRYGLELVNDYQDLGVSAFKGANSKTGALSRFLDEIGRSIPVGSWLFIENLDRLSRQDIISAQELFLSIIRRGITIVTGMDNKIYSIETVTANPMDLMFSILLFIRGNEESQTKRNRTNSSALLKIKAHQQNPQSPAVAIEEIGKNMWWTDTTSGYVLPHPVYFPILQKIVKMKQEGHSTGSVLDYLNEHHEPPAPTSNKQHRKWSIAMVSRLFKTKALIGVKEVNVDGVQYELKDYYPRVLSDSEYYFLKNNLIKKAWSFGHAQEKTIPLLSGIGLLKCVHCGSPMVKRKAANGKVEQYRYTCDGEGSGRTDCLYPNWGFRASSLEGAVLQLLADKVWIAEDKANPIPEIQVQIDEISRKIDNLINLSAMTGATKELANQITDLNMQREALHEEIRLFEREMYSVDSQGWEKLAQFDLSDVQNEERLQIRLKIKGALRSIECARIDRNKNLFTLVYLDGLRQRLVIENNRGIRKGQIFVDLKTINDRQILESAGMVLHDHIDILIDEKAFYDGLPKEEDGPLSKFGI

SEQ ID NO: 20851 - protein, 587 aa, synthetic construct
MEVEIIKAKGAGEDTSTGRKIDRLRVAAYCRVSTDDEDQIKSYNSMVRYYTDLIKSNKQWVFAGVFADKAITGTKTDKREEFQLLIQECLSGNIDLVIAKSIPRFARNTLDTLKYVRMLRERNIAVYFEVEKINTLKDGEFLLTILSSVAQQEVENTSAYVKKGLKMKMKRGELVGFQGCLGYDYDVVTKSLSINEEGAETVRYIFDRYVAGAGSTMIARELNEQGISTIKGNLWTSSSVMGIINNEKYKGDILLGKTFTVDPISKRRLENLGEEDRFYIKNHHEPIISEEKFARAQEIRERRNGGRKKGVAPGKREKFSRQYAFSCMLECGFCGASLSRRRWHSSSKYKKTIWQCVKSTKHGKRFCPDSKGIPEQVIEDAFIESYRMLCTDHKDVLEEFIKRVEKTLSEDSIEDKIEKLNKNAYNIQYKRKKLLESYLEGVVAKDIYEETDMGYEKKLSEVNAQLGMLEQQYDNEGSLQRRLVDFRKALSKNQILEGFDRGIFESIIEKVIVGGYDENGEKDPYKIIFIYKTGFKNEIGNAKERFGKKSKAVEKAKEMCSHIADEVKDVCSYVSDNTCGDGMLTLA

SEQ ID NO: 20852 - protein, 640 aa, synthetic construct
MRRKKDKSNGITALYERLSRDDDNAGESNSIVHQKQMLEDYAMKHGFTNLVHFTDDGWSGATFDRPSWNRLVEGVKNGEITACICKDMSRIGRDHLQVGFFTDILFREKEIRFIAINNGIDSDRQETSEFAPFLNIMNEWFVRDTSKKIKAVLKSRGSSGNAHTSNIPPYGYLKDPENPDHWIIDEEAAEVVRRIYRMTIEGKGPYQIARELSEEKIERPSYYLGKKGLGNHASNYDKENPYMWRGNQVTTLIARPEYIGKTVNFRTFKNSYKDKKTKRADKEDWVVFDDTQEPIVDEETWLLAQKLRQNVRKADPMGEPNVLTGKIYCADCGAPMYNHRQRKGRERIYYTAKGEKRTSYSNPADCYECSTYNLAYQKYDRHCTCHHISTKALKSIILKTIQETCHYVSLNEQEFVYSLQEESAMKDIAVSETVKKRIERNQKRVHELDMLIRKIYEDNVIGRLPDRLFQSMLTDYENEQNELNKIIETDTADMQRIIGGQNNVERFLKLVKKYENITELTPAMINEFIDKILVHEPQGKGADRTTEVQIYLNYVGQFQVPVEQHEPTEEERIAAEKEAERLRRKRESNRKYMKKIREKSKEFAEHERIAEEKSSDSNVCVEQNVTSKSNRQKVKGEKIA

SEQ ID NO: 20853 - protein, 556 aa, synthetic construct
MAMMNEMEYRTIGSALAGGYRAAVYCRLSKDDDLQGESASIANQRDMLEKYCEKQGWEVVAVYQDDGFTGLNMERPDLQRMLRAIERRQINLVITKDLSRLGRNYLQTGHLIEDFFPRNGVRYIAMNDGIDTLRDNNDIAPFKNILNEMYSKDISKKVHSSYLLKAQKGQFTGCLAPFGYRKDPEDKNHLLIDEETAPIVRLIFGYALNGHGPNYIRRRLEEEKIPCPTWWNRERGLRNTRTKWEKKDPENGRYMWDFSVIKDLLMNPVYTGAIASQKKDYRFKIGTIGEKKPEDWIVVEGQHEPLIDRMSFDIVQNKLKSRQRPGQTNEISLFAGLIKCGECGKSLTIRYTNAKHPQQIYSCKTYNAFGKNHCTQHRIDYDTLYSHVLRKIRECARAALMDGEAVADRLTNTCEAEKREQREAMERSLTRDEERIEVLNKMVMRLYEDMIAGRISEQNFNTMLEKTQTEQTELKTKVSDGRKRLSDEVQLANDAKQWVEAIQEYANITELDAATLNRLIKEIVVHERIDEDKTRHISIEIHFNLKPIPEVEQVTA

SEQ ID NO: 20854 - protein, 547 aa, synthetic construct
MTSDQNIQGATIAAIYCRVSGTRQVKKGDGLGSQEARCREYATYKGHEVAAVFREEGVSGGIADRPAMKEMLAWLRKHRHQNPVAIIDDISRIARGVEAHWKLRGAIGSVGATLESPSIEFGDDSDSQLIENMLASVSQHHRQKNAEQVVHRMTARLKSGYYAFWAPTGYTYVAAKGQGKVLERDEPLASLIQEALEGFATGRFATQAEVKRFLEPHPIFSRDANGHIHPQRIKNMLTNRIYAGYYAYKPWGVPLTKGRHPAIISLATYERIQTRLGAVAPRPNQTETTDEFPLRGFVTCAACDKPLTGYWAKGRNKRYAYYECFNKSCTEFRKTTPRDTLEGAFEALVKNLRPSADIMATVAEMFRDIWNDRTAKLGKSKVEQKKALKALDAKIGKLTDRLIETDSPATIRAYEGKLEKLEAQKALISENLTKAPTSVSDFDTEFRTAMNFLANPWNLWVSKHPKDRKTLLKLVFASPLPYARKKGFRTAKTTIPFKVLGDLSDPEKEMAERQGFEPWVGLHPQRFSRPPRSTTPAPLRGGLVRRV

SEQ ID NO: 20855 - protein, 695 aa, synthetic construct
MMGNNDLTPIAILPPALLQRRAIVYVRQSTQSQVMTNLESQRRQYDLVSSARQYGFQAVDVIDDDLGISASGSAVRPGFERLVAALCSGEVGAVFCLEVSRLARNGRDWHHVLEICGMVEARVVDHDGVYDPRLPNDRLLLGMKGSISEFELGILRTRMLDAARAKARRGELRYTPPIGYLWDRDAGIMFDPDVRIQEVIRGIFTRFEELGSARQVLLSMADQGIHFPRPSDGIRLTSFEWQPIRYRNVISILKNTFYAGVYAYGKTGKKTEIRDGRAHVSYKNHKSPEDWEVVLHDHHAAYIELGAYERNQAQLARNAFGKAGGTKSARGGRALLAGLMSCAKCGRRLHVVYAGRTHRPVYRCDNPNLLLGQKRCFTFGGARAETLIVSAVLQAVAPLAIEAALQAQIYMSNAEEDRRQLLELELKQAEYDATLAERRYAACDPENRLIAATLEKRWEEALSRVQAFKERMASSPDAHETFDPSALNGLAQDLKAAWEAPTVSMRARQQLLRTLIEDIVADVDDTSREIVLVVHWKGGRHTELRVKKPKTGEHGAKTSEEALAIIREMAGRWSDGSIAASLNRMGIRTGQDKTWNAKRVSSIRRVNNIRGYLSADKDSPWRTMSEAAKELGVTNHVIRRLIKDAILPAKQVVDGAPYQIRTEDLQSGQVIQALRRKKRPCRRQSDQQLSMFTST

SEQ ID NO: 20856 - protein, 422 aa, synthetic construct
MKKIMIIPAKNSLESKGKLNVAAYCRVSTERESQQGSIDLQIRQYTKLIQNNPEWDFAGVFYDYESGLRKDERNGLDAMLKKAYKGEIDYIITKSISRLSRNVLDILTIIRGLKARGINIYFEKEDLNSLEEEKEIDIAFNGALAQEESRNLSENIRWGYQRKFERGDNFAGKSPMGYRCKNDKLIIVPEESDIIRKIYQLYLEGSTLQQIKEYLEQKQIKTATGKEIWATAVIQKILKNEKYKGDTMLQKTYTEDFMTGRKSKNDGQKNRYYVTDSHPAIISDEVYDRVQEEMNRRARLVYKEDGTVESSIRKYNGKYLLGNLLICGYCGASYRRRTERDKVVWRCATRIEKGKERCADSPTLNEEWVKEILGDTVCGNGSYDEEIVRNRGEKILIFNEYLEICSKNKDKVRIPFTEFCFR

SEQ ID NO: 20857 - protein, 550 aa, synthetic construct
MVMPKKKVSFIPAQPIYDRNIRAELKVLRVAAYCRVSTTLEQQEGSYEAQVTYYTEKIKNNPNWKNAGIYADDGKSATNTKKRDDFNAMIEDCMAGKIDMVITKSVSRFARNTVDSLQTIRKLKEKNIAVYFEKENINTLDGTGELLITILSSQAQEESRNLSENTKWGITRRFENGIISINHKKFMGYTKDEDGELAIVPEEAEIVKRIYRMYLEGSSILEITRALEADEIKTATGKDTWHPGVIEKMLVNEKYMGDALLQKTYTVDFLTKKRVKNNGIVPQYYIEDNHEAIIPKELFYKVQEEKARRASLNKSAVTRKANKAKKEKSKFSSKYALTEILVCAECGHPYRRQVWSKYGQKTTVWRCENRLKNGTKANCKHSPTLKEEPLHNAIMTAINSVVENNGEFIGAFRENVIRVIGGYSTRNIPTEYDEKIEQQQKEMLSLIEENAKQGAVAEDFDDEYKRISQQINELKKAKIRIVQEKKKTESYEQRLAEMDSTLKTVRPQVREFDEELVRRLIKTIKVKKGERLEIQFESGIVMEQTADYYE

SEQ ID NO: 20858 - protein, 536 aa, synthetic construct
MINKVKKIRKIEPIHQKVILELQPKKRVCAYARVSTDSIEQKESFYYQVEYYKNYIGKRDDWEYAGIYADEARSGTQIKKRDEFSQMIKDCVNGKIDMIITKSVTRFARNTVDSIKAIRKLKALGIGVYFEKENINTLSEKSEILLTILSSLAQGESETISTNNKWGIRKKFEDGTFKLSIPAYGYNKDENGELIVNKEEAKIVRRIFTEYLNGKGSYVIARGLNEDNIPTKRTAEEWQESVVKVILQNPIYEGDLLLQKTYTTEVLPFERKVNKGEMPQYFIENNHEPIITREEGQMVREIYEYRRKQMGIDDSGKYQNRYEFSSIIICGECGSTFRRQKIYIGKPYEKIQWCCIQHIRDINKCSMKAVREDIIKEAFLTMWNKLVSNYKNILIPLLESLKSLRINEEQEEEIKDLNNKIMELTEQSHILSRVVSKGYIDSAIFIERQNALTVEIEATKKRRNQLLDSNGFEKEIEGTLRLLDFMKYNPEIMEEYDENLFINTVEKIIIGKDYEITFRLINELELTEYIRKQVSG

SEQ ID NO: 20859 - protein, 534 aa, synthetic construct
MESAVIYARYSSDNQREESITAQIRAIKEWAKREKYNIIDIYKDEAQSATTDDRKDFLRMIDDSKEGLFNAVIVHKLDRFARNRYDSAFYKRQLKLNGVKVISILENLDDSPESIILESVLEGMAEYYSANLAREVKKGMRETALQAKHTGGNPPLGYDVGQDKTLIINEHEAIAVKIIYTMYSNGYSYGDIINELNSNGFKTKANKPFGKNSLYEILRQEKYTGTYVYNRRVKGLNGKYNNHKKKPNNEIIRIENGCPQIIKKEEWLKVQERMNGNKKIGGQNTAKVDYLLSGKIFCGKCGAAMTGHGTSDSSTKTRYYYYVCNNKKRTKQCDLKGIRKDDIEAMVLDHLWKYVFCDEMIEKSIDKIYAYANKKKEGVPNLLKSYQDKLSEINNSIDKVIELLMSGYKNASLKERLDGLEQEKKELENLIIKTELKLNKVDYTREEISTFMYAFKNFRSMPAAQQKKVINMFVYRVVIYEDKYDMEIFNNPIDSNKNKKFRQQRGTVHPDHRQKELNESLIPFLFFVFILIPQ

SEQ ID NO: 20860 - protein, 560 aa, synthetic construct
MILASMRYTNQLRMTKAKAYSYLRFSTPEQFKGDSFRRQTDMAEVYAKQHDLELQELTFRDLGVSGFKGKNLKTGALGRFKQEVENGAIQSDSWLLIEAWDRFSRMPTEYALPEMLSLIEMGITIVTLKGGGKVHRKGSLDMTTLLTCVIEMSQANEFSQNLVRRISAANANKREAIRKTGSGRMNKNCPLWMKPKGDDGFELIEDRAEVVRKIFELTIDGHGRQAVRNYLVQNRIKPFNPKSRTWHTSYIERILKNHQAYGAVQLYKNREPDGEPLRGYYPAAVSEDMYLAALHATRQRKIADAKGVTRRNRVNVFSGLLWCECGDMIRLKNNGKGQFYYKCINVLEHRGCKARTLKQKPTDEMLIQALYLFGDKLVVGQGGKKDDKTSETIHKVKGELERTEAKRDVAMNRLLEFDSDALSAAFRTLDNKVESLQSQLSDLEQEAALARNRVNTKELGVLLSELENTLSGSCIESKVKIASALAELIERIEFGKGLVRIKLRTNLPDYFGDMTERDMLFISIDTSGKLWSTEGLCAETDESIYSQRKVEGSRIPELAW

SEQ ID NO: 20861 - protein, 479 aa, synthetic construct
MAKPRTPGQRVGVRSAAIYARISADVEGTGLGVARQLEDCRKLAADRGWQVGDEYVDNDVSAYSGKPRREYARMLDDLKSGARDAVIVYNLDRLHRRPVELEDFVTLCEVAGVRDVATVTADIDLGNDDGLFMARIFAAFAAKESGRKSARIRRKMLQNAEQGLPHGPARPFGYEPDKITLRPDEAKVVREMVDRYLAGASIRSLTIWLNDTGIAPPASTSWQTTTVRHILASGRIAGLREHHGEVIGPAAWPAIITPAERDRILARMTARSVTKTRAPRTYLLSGMLRCGRCGNRLFSQARHNNPTNRVRRYVCLKGPDHGGCGRLTVVAQPVEELLTDAVLTRLDSPQLADALNGKARVDADVAALAAQLEADQARLDELAALYAEGAVTAREWIAARDPITNRITQTRRDIAKATDTSSIVDLVGTGNALRGQWDGLDIDRQQAIIKSVLDHAVIAPGTPGSRGLDINRVQPVWRV

SEQ ID NO: 20862 - protein, 554 aa, synthetic construct
MTMPLKPEAFDATIAPVLRAVAYLRVSTGRQAENDLSIPDQRKQIAAFCISKGWRLVDEHVEPGATATDDNRPAFQRLMERATDGDRPYDVVLVHSYSRFFRDSFGLEMYIRRLAKADVRLISITQELGDDPAQVMMRQVIALFDEYQSKENAKHVIRAMKENARQGFHNGAPVPLGYRAVEVERRGNKAKKQLAIDPVEAETVRMIFRLYHTGDGKSGPLGTKEIVKRLNAMGERTKRGARFGVGTLHGILTNRTYLGEMVFNRRDSRTLKAKPASEHVIVAVPAIIDRDEFETVQSMLKVRNPRVTPPRVVTGPILLTGLATCATCGGGMTLRTGTSKNGTVHRYYTCSNAARAGKSVCAGRSIRMDTLDELVVEHLSDRLLTSTRLTEILAAISVGRAAKAAEVDGRIIRLQGELTETETRLKRIYTTIEEGIAEMDDILRERIASLKIDRERIQASLDRARTHAVPASDIPPAVVEEFVRMMRKNITTGDTPFRKAYIQAVVDQVQVGEREVKIIGNKAAIHQAMSGSKKFWPGVRSFERKWRTRRDSNS

SEQ ID NO: 20863 - protein, 492 aa, synthetic construct
MVVKKKEKEKTLAIGYIRQSDERADKEDISEQTQLSKIKQFCDYHDLELVAIFKDIDYSGFRISYTKRPGLMDGLAYLKTNKKVKKLICYNLSRLTRRKKDFSLIHESLEGLGVDICSALEQLDFGSANGRLFASMLADFNEYTSDSLSEITNSNKQTNAEKGRWNGGPFPFGIVKHGKGSIEDENGNYIKTMFEMAKEGNGTFKIAKWAVENNIPSETGVPWTPRRVRYVLTNPTYARMQRWKGKLYPLLPIYAMLVTWEDFLYIQSTLFGEEKAWKGKERQMLTSVMRCPVCGKKMFSRTTRYSDNRRYVCCGKNEPGSCKSPNFDLATLDAAVIELIAKISKERYSKSEIWASMNDDDNISSIQTIRLELERLDKAKQKVFDDYYVNQRLSEDDFEAAMSRFEKRQSELAKQLEKIPMPNNKFGDFDDILSELGATILDMEKDDKRKIVELIITEIVPGESTRVQFRWGEIFEIKAAEKKKHFCDVYFY

SEQ ID NO: 20864 - protein, 479 aa, synthetic construct
MDVSAGKTTPFDRPQLGKWLKRPGEFDVIVVFRVDRIVRALFDLADLIKWCQEHRVALVSATEAFIDLTAPFGDIVALLVAKVAEMELAAISERNRSAAQHNLRAGKYRGGPAPWGYMPVHTDEGWKLVQDAEQVVVIHEVVERVLSGEPLRSVAHDLTERGVLTPRDRFAQLRGREVKGYTWHPGGLKRALTSPTLLGRIAVTDTSIGAQDRPEASLVVSDDGTPFVRAEPIIDRDKFDRVGVELAGRENRKEPTKRTTSLLLGIIHCGVCGKPAYKLKGGAGRKPRYRCASSQYKNPCSNRSIPLEYAEDEVESKIMHAFGFHPRMVRVWSPGSDSSSDLAEVNAALADLTDQLGTPAFRRGTPQRARLDAKIDALATRQAELSSKPTQPAGWTYEATDELVIEWWATATNEERNVWLRQLDIRVEWRSRSEGTRTVVDEFKMSGGVDALERFVEDGEWTLDVGTTVDIESLTAGRG

SEQ ID NO: 20865 - protein, 547 aa, synthetic construct
MKTTTMQPGANARPGRATRAVVYPAFTQTGPDTPVEGTRPIYLYLRLSKYHKDKADAIERQRLDLTRKLTAEGGWTVMGEYIDNDSASASAPKNRKGWRQLNQDIQAGTVPAVAFWKLDRTNRIAAKCIEWIGQCQRSGVYLLSHQDSADELNTATAGAKLVTGIKALLAEVETDSMSERQLASKRHLAEAGFHHGGTPPLGWMAGPRVVDEFGRSGVRLVPHPVEHPALKDAVDMVLAGKSLAQIARYWSDQYGITTAAGGPVFEATVYRSLVSPRMIGYRMRQVPEHQRGVKLDLLDYIARDASGEPVIAQEPVCDRVTWLRVRRLLEEAKTSRTRRPWGSHEWLLTGLLHCQCGERLYGHQKYRKRASGERVPAFAYRCQANKIRGPGNCSGGCTIDAAKGEAFVLGWFFAQITDDALAAARARRRAARADVGINEVLSQLDEARAERDALLSKQGTGEYRGAMVTVLLSLIADAQQRLDGLQRRLDAMELDEFPIDDGPALIASWKERAITEKRAYLRRMIHRIDALPGTAPTEERLSITPVE

SEQ ID NO: 20866 - protein, 522 aa, synthetic construct
MATSLVRAVVGARVSIFTDGKESQITQRTKGTAYAESQGWTVVGAFEDLDVSAIKQSPWDRPDLKQWLTDRADDWDALVFAKTDRVFRSAADCVKLSEWCRDHKKILVLVDDGIKLDYFHPDSQQDAFAGAMSKVFLILASVFAEIEGQRFVQRALDRVTQYRHQPRWAYGVPPYGFQVVDRPEGGKTLGHDLEAQQVLQGIATRLLSGDSLTRITADLNETGVLSPADRLRQRTGKELRGSRWTVITVQTILTNPATQGIKTAKGKPVLDAGGEPVRVGPPSFDSETWGRIHSELAQRSQSGQQRRHSDNPLLGVAKCGVCGKNMRHFQRTKGGRHYRYYICGSTPKACPGVLINADNAELAVETSFLDVHTNRRIKERVWRAGSDHSAELEQTTNTITALWEDRALGLFTTPEDQDMFRSQMAALVAKRDALAQTPVIKAGWVDVETEQTYGAVWPDATPVERRKMLTDAGMKLTVYRANKYETYVDLDKAIGEGSVGEELHSELEARAAEERRRWGMPD

SEQ ID NO: 20867 - protein, 560 aa, synthetic construct
MATAVIYLRVSTKDQATRGNEAEGFSIPAQRDACERKAQALGATVVHEFVDAGESARSADRPELQRMLTYLAANPTTYVIVHKLDRLARSRTDDVQITLAIQASGSTLVSVTENIDSTPSGALLHGIMSSIAEFYSRNLANEIMKGTKQKALSGGTPTIAPIGYLNVRETVNGREIRTIRTDPDRAHHIQWAFEQYATGDWTLRTLSNALNSRGLSQRPTPNRPARPLPTNKLHKVLRNRYYLGYVTWQGIEYPGSHEPLIDPATFDQVQHTLTAHQRSGERSSRRKHHLAGSLYCGRCNSKLIYAVSTGRHGGKYGYWFCIGRHTLRNGCDLPYLPEERVTAAVVGLWHATQLPTTTTETIRTSLTDDLAVYSAHTDQELTLLGRRIKEVERERLKWADLAMDGTVPRDIARDKQAALAIQLGQLEHQMTSLTSTNIDHAQVINTALDLLGRCSEAYENAPEATRRNLNQAYFERILLDSADGAPTIKSAEQTEIIELIATAERESEMTTQGKADLALTTYSTVKGSKIASLVELRGIEPLTFSMRTRRATNCAIAPRR

SEQ ID NO: 20868 - protein, 577 aa, synthetic construct
MSNNTFATTESTTAVKIAVSYLRVSTKEQAERDGEPDGYSIPAQRDANQRKATSINAVVQMEFVDRGASARSADRPQLQEMLRYLENNHVDYVIVHKVDRLARSRADDVEISLAIKKAGAELVSATENIDETPSGMLLHDIMSSIGAFYSRNLAVEVLKGMDQKAKTGGTPGMAPIGYLNIPKLNANGSQVRTVEVDPVRGPLIAWAFQAYATGNWTVTALTEELNTRGLTTRPNSRTPGRPVSRSSVHQFLINPYYKGIVTYRKATYDGRHEPLTDAVTWARVQEILRDHAVGEKQREHPHYLKSSVYCGSCGSRLVVTIAKNRHGTVYPYFMCVGRHQKRNTCQQKAKLIPVVEQEVEDEYDRQLVQLKAEERDEIEAMISDGIQDFRRSSETSRKTLTVQKDRLVSERMRLLQAHYGGAIPLDLLKQEQDRIASQLASIEERLASSATEFERFEQLIKRALDLATYAARAYRHAATVKGSDQIRRLFNQAFFTRIRVSDDRATGELAEPFKTLLSPEMAAAAKHHRQTKSASQNATHTLTGAITAENDKPAPRGAGLKEAFLVPPMGFEPTLPP

SEQ ID NO: 20869 - protein, 615 aa, synthetic construct
MKPYDITATMFGTPTEDATVEVKDAVSLLRVSSKRQMDTAVDIDPDGLSIATQRRVVELKANSVGTHVVKEFLEPGYSAKTIDERPIFKELLHYLNTHPNIGFVIVYMRSRAFRNQYDAAMVQMHLQKRGIRLISAKEDFGEGPYAEAMEGMVDIMNGLTNKLQGLDIQTKMYEKARHGGTNGQTRLGYLNVRDVYDGKPFNTVRLDPKRAPLVKKAWELYATGDYTLERVADTMTDLGLTARANRRWPERPVSYKWYHRMFKDIYYLGFITYKGKSEQTQIFPGRHEPLIEQELFDRVQDVLNQRSRKGQRDRIHQHYLKGHLFCARCERHGRTSRLIYTEAKSRNGSYYGYFMCRARQDKLGCDLPLLPVELVEDTITDHYHTLALPADFIDSVRELLSQTLADEQGSVRTMHAQLAKRIKDLDQKEERLIDLAADDSLPQDKIRIRLRRIQSDRASAQAGLLSTTAELNTGADILKSALAALSNPASYYQRADDTTRRFMNQTFYTKFLLDDEGVVDHCLNPPFDDFHQAKAAWSTTKPATLTDYLNAHPPQTQKRLPSRETPSHNLEPTLTGIVSVPGLSTASMVELRGIEPLTFSMRTRRATNCAIAPRR

SEQ ID NO: 20870 - protein, 490 aa, synthetic construct
MKGQAKRALVVIRLSRVTDATTSPGRQREACLELCKRRGYEVVGTAEDLDVSAGKTTPFDRPQLGDWLTNRHHEFDVLVVFRMDRIVRRLLDLADLIRWGQNHSVALVSATEAFLDLTAPFGDVIALLVAKVAEMELAAISERNKSAAQHNMRAGKYRGGPPPWGYMPEKIDGEWRFVQDDEQVKVINEVVRRVLYGEPLRQVAADLTDRAVPTPRDRVNQLKGRETKGYSWHSAKLREMLTSKSLLGHAVTGSGSIRKDDGSPVIRATPILERDVFEQVQVELAGRENRKEPTKRSSSLLLRVIFCGVCGRPAYKLKGGKGRQDRYRCASAQYKSTCGNRTIPIADAGEALTDAMMYELGDKYRMDRVWEAGSDHAAELAELEETLSDLTDQLGVGAFRKGTPQRQRLDARIEGLSHRQAELAAQATKPAGWIWVPTDEPFVDWWKSQTVEQLNAWLRSMEVRMTWDHQGTHVEMLHLEKMAEQWDNLS

SEQ ID NO: 20871 - protein, 615 aa, synthetic construct
MKPYDITATMFGTPTEDATVEVKDAVSLLRVSSKRQMDTAIDIDPDGLSIATQRRVVELKANSVGTHVVKEFLEPGYSAKTIDERPIFKELLHYLNTHPNIGFVIVYMRSRAFRNQYDAVVVQTHLQKRGIRLISAKEDFGEGPYAEAMEGMVDIMNGLTNKLQGLDIQTKMYEKARHGGTNGQARLGYLNVREEYDGKPFNTVRLDPKRAPLVKKAWELYATGDYTLERVADTMTDLGLTARANRRCPERPVSYKWYHRMFKDIYYLGFITYKGKGEQTQIFPGRHEPLIEQELFDRVQDVLNQRSRKGQRDRIHQHYLKGHLFCARCERHGRTSRLIYTEAKSRNGSYYGYFMCRARQDKLGCDLPLLPVELVEDTITDHYHTLALPADFIDSVRELLSQTLADEQGSVRTMHAQLAKRIKDLDQKEERLIDLAADDTLPQDKIRIRLRRIQNDRASAQAGLLSTTAELNTGADILKSALAALSNPASYYQRADDATRRFMNQTFYTKFLLDDEGIVDHHLNPPFDDFHQAKATWNTTKPATLTDYLNAHPPQTQKRLPSRETPSHNLEPTLAGIVSVPGLSTASMVELRGIEPLTFSMRTRRATNCAIAPRR

SEQ ID NO: 20872 - protein, 594 aa, synthetic construct
MNTKVKVIKASNTGARNRNALHLDLKCVAAYCRVSTDSKDQLESYKSQVDYYTNLIKNNKNWTLAGIYADEATTGTTATKRADFMRLISDCQNGDIDMIITKSISRFARNTLDTLKYVRLLKENNVGVVFEEENIDTLTMDGELLLTILSSVAQQEVENTSAHVKKGLKMKMEKGELIGFQGCLGYDYDPTTKSISINEEEAKIVRYIFKRYLEGNGGSVIGRELEEQGYLTPRGKTKWSDTTVLGIIKNEKYIGDILMGKAFTVDPITKRRLANFGESDKYHIENHHEPIISREDFEKAQEIRLRRAQNRNTIANKDRKREKLSRQYAFSSLLECGFCGEILSRRTWHTSSIYKKINWQCVRSTKKGKKYCPHSKGIQETAIEKAFVESYRQLCHADSTVIDDFLKIVEEEINDNTLVKDLKKLDNQLNRIISQERKLVDLHLEDSIDEEVYAKKYKKLTKQKEELLDEKKTLELTIKDENSIKERLKQFKKLLENKEIIEGFNRTVFEIIVDKVVVGRIDKDGTVHPYDLTFYFKTGAKDSQDSNNFKDKRKNAKDNYINKLCSYKNDEDKKLCSQAKDNACGDGSTACTSC

SEQ ID NO: 20873 - protein, 521 aa, synthetic construct
MMNSKVIVIPAKKKKGNSIKESEKKKLRVAAYARVSTDSDEQATSYDTQVDHYTNYIKKNPDWEFVGVFSDEGISGTYTKKRAGFNKMIEEAMKGNIDYIITKSISRFARNTLDCLKYIRKLKENNIPVYFEKENINTMDAKGEVLLTIMASLAQQESQSLSQNVKLGFQYRFQQGQVQVNHNRFLGYTKDEAGKLVIVPEEAKIIKRIYREYLEGASLRDIKEGLEKDKILNGAGNKKWHVSNLNQILTNEKYMGDALLQKTYTVDFLNKKRVKNDGIAPQYYVENSHEAIIPKEIFMRVQEEIDRRANMVSGKGKRRIYSSKYALSSIVYCSKCGDIYRRIAWNNRGKKYTVWRCCTRVTHGPDACHARTIKEEDLQEAVVEAINQLISESSELKEIIKENIEKAITGDGSSGIEEIDKEMLKVQEELLKVANAKKDYTDLAGRVEELRNEKEKILLDLAEEKNEQSRLKELEEFLDNQELEIESYDEDLVRKLVDKVVLYDEELKIVLKSGVEVNVCV

SEQ ID NO: 20874 - protein, 518 aa, synthetic construct
MSSKVIVIPAKKKKGNSIKESEKKKLRVAAYARVSTDSDEQATSYDTQIDHYTNYIKKNPDWEFAGVFSDEGISGTYTKKRAGFNKMIEEAMEGNIDYIITKSISRFARNTLDCLKYIRKLKENNIPVYFEKENINTMDAKGEVLLTIMASLAQQESQSLSQNVKLGFQYRFQQGQVQVNHNRFLGYTKDEEGKLVIVPEEAKIVKRIYREYLEGASLRDIKVGLEKDKIVNGAGNKKWHVSNLNQILTNEKYMGDALLQKTYTVDFLNKKRVKNDGIAPQYYVENSHEAIIPKEIFMRVQEEIDRRANMVSGKGKRRIYSSKYALSSIVYCSKCGDIYRRIAWNNRGKKYTVWRCCTRVTHGPDACHARTIKEEDLQEAVVEAINQLISESSELKETIKENIEKAITGNGSSGIEEIDKEMLAVQEELLKVANAKKDYTDFADRVEELRNEKDKILLDMAEEKNEQSRLMELEEFLDNQELEIESYDEELVRKLVDKIVVYEEKLKVIFKSGLEVEI

SEQ ID NO: 20875 - protein, 520 aa, synthetic construct
MKKITKIGANQKEESILRVAAYARVSTDEEAQLVSLKTQKAHYEKMISENASYTFAGLYFDEGITGTKKECRDGLLKMLKDCENGKIDFILTKSISRLARNTTDCLEIVRRLLDLNIGIYFEKENIDTRTMESELMLSILSSLAESESRSISENNKWSIKKRFQNGTFIISSPPYGYENIDGKMVVNEEEGKIIKEIFEQYLSGKGTHKIAEDLNKRKIKGQKGAKWHGSTINGILKNEKYIGDVIYQKTYTDENYKRHKNKGEEDQYKIIDNHEAIVSREDFQKVQGLIKIRAIAKENGKNTKRYQNRYSLSGKIKCGECGSSFKRRHHYNGKEKYIAWTCSEHLIDINKCSMKFIKDKDIKVAFITLVNKLVFGKDRILMPLLESLKRVDSKKEVAKINKTEESLEKLRERKEVLNKLITSGVLDASIYAKESSEISSEESHLLREKERIKKAILGNDEEIRELEKLIEILGKSEMIDHFEDDLFEVIIAHIQVVNRETLDFHLKCGLVLREEVKEDV

SEQ ID NO: 20876 - protein, 549 aa, synthetic construct
MEMVREFTAIKRVATLYRVSTKGQMDGDDIPMQERACRNLIDLKPEWKLVKEYTEKGVSGFKVSAANRDIIQQAKEDAENGLYDVLLVFMFDRLGRKDDETPFVLEWFVSKGIEMWSVNEGQQKIEQHTDRLVNYLRFWQSSGESRKTSERVTEKHKQMVEDGIFRGGGIPYGYIGVDSGVTNKKGKPLLKMALHEEESKIVKKIYELALYEGYGQLRIAKYLNELDVPARKAKSWGSPTVNVILKNPIYKGVMRYRTEKGETLSQENPEIVIVSEQEWNQVQLIRESKNPKNYGEEENNTPMSTKGKLLFIGMARCGCCHSRFTSTYFTNKYRGKNAEKAKIYSKTMSYRCSGKLQGKTGCDGQSTFAQTKVEGVVMKKIYGYLDQLNTVDLTTQIQNFKKKNSNDDDKHLKKLQSSIEEFYEELSALNAEVPRAIMGKSSFKPELLNNLIESKNNEIAGLRIEIELLEKKISSKKFEENEMEELKKITPIWKDVFEKASIEKKKMMLATIIDTIYVSKEGIEINLRLHINDFINQIYCDTTTRCSPS

SEQ ID NO: 20877 - protein, 527 aa, synthetic construct
MEKAVLYLRLSKEDIDKISEGDDSASIKNQRLLLTDYALKHDYQIVDVYSDDNESGLYDDRPDFERMIQDAKLGKFSIIIAKTQARFSRNMEHIERYLHHDFPILGIRFIGVTDGVDTADSSNKKARQINGLVNEWYCEDLSKNIRSAFKAKMKDGQYLGSSCPYGYIKDPTNHNHLIVDDYAADIVREIYKLYLQGIGKGRIGRILSDRGVLIPSLYKRNVQGINYHNANAKAETHLWSYQTIHQILNNQMYLGNMVQYRTTTLSYKDKTKKLRLPSEWIIVEGTHEPIISYAIFQRVQELQKIRTKEVNTEQKYTNIFSGLLYCADCNHTMNRNYTRKGVFCGFICSTYKRHGNKAGCRSHRVDYDALCDAVLESIKLEARKILSDKDVDELKKSRLISSREEKIENEIRILENECEKLKQYKQKTYEAYLDDLITMNEYKVYIKKYDTELSDTCKKIDKLYAEKQVTDSLDQKYKEWVNMFSDYINITELTRTVVIELIKRIDVYEDGNIKIHYRFKNPYESSK

SEQ ID NO: 20878 - protein, 505 aa, synthetic construct
MAETEIRAVAYARYSSDNQREESIEAQLRAIKEYCEKNNIQLVKIYTDEAKSATTDDRPAFLQMIKDSSLGLFNAVIVHKLDRFARNRYDSAFYRRQLKKNGVKLISVLEQLDDSPESIILESVLEGMAEYYSKNLAREVMKGLKENAFQAKFNGGIPPLGYDIIDGKYVINEKEAEAVRLIFELYAQGYGYRQIIDELNLRGYRTKKGNTFSKNSIHEILRNEKYTGKYIFNKGTKKNHRIVKEDVIIIEDAVPAIIDENLFREVQKRIEKNKKQQASYTAQRIYLLSGLIECGVCGSSMVGTLSKGQYTYYRCNNKSRKKACDNKDVNKEMIENYVIDELLQKVFSEDALPKLVERLNEENKKLVSERDEEKKRLSRRYEEIKKSISSIVDVIAKGYFHPSLHEKLTELEQQKAEIEVRIKEMNSLPDTSFITEERIRHYLLKDKEVLEAGDPHKIKQILPTYINKIIVYRDRIEVHFKLSVDDTVCAWMVAASGFEPPTLRV

SEQ ID NO: 20879 - protein, 563 aa, synthetic construct
MSITTLTTRPPETGAEKPVLLAVSYLRVSTREQAERGGTDEGFSIPAQREANARKADELGARVVREFVDAGESARSADRDGLQEMLAFIKASRVQFCIVHKLDRLARNRADDVQIHEALISAGVTLVSATESIDQTPSGMLVHGIMSSIAEFYSRNLATEVTKGMQQKLAQGGTPMRAPIGYLNVRKTDEHGREVRTVEVDHERAPLIRFAFERYATGETSVAALLRELTARGLLTVPSPKRPSKPLGKATFYSLLTNPYYAGVIRYKGALHPGAHEPLIEPALFDQVQSLLKARTAKMTRHVTHAHHLKGLLHCGSCGSRMLLDFATNPKGTTYAYFVCSGRAAKRTNCTRRAVPVQVAERLVEASYTSITISEADYRHLAAEVDSAFDKRSSGRDQELTDLTANRARLEAESDKLLAAHFADAIDLPTLKRHQDRIRTGLADIEQRLSEHDESHTGRRAFLHDSLQLLTNAHHTYARSDDADRRLANQAFYTRLEITEEEQIKPHLAEPFATIICEASGGKKTKREHSTSHDVACSRKDIWVDPGRIELPTSCLQSRRSTN

SEQ ID NO: 20880 - protein, 570 aa, synthetic construct
MREAALLLRCSTNLQDYNRQKNDLLALADKLGFSVRDEYIFGEYVTGKDDIRKGNRQSVQSLIDACLERMVDAVLIWEVSRLSRNFIYGVTTIDKFNRDYKIPIYFRDKRRWTIDIETGKIDIDFEKDLRKYFEQAEAELITLRSRLASGKRDAAGLNQVIGSVAPFGYDRINKHNVINPVTSLVVKEMYEKYLEEGATLLSVSSYLSAKYPQYIIKLRSAGSIRNILVNKANTGILVYTIYDEIDDIGYRYEVMQPSIISVEVYNAVLAKLKKNRTITAYPHSKKHLLQKMLFCYECGTCYTPSESLKRGTCYYRCGQKTAHIKPCNNSMSLNESIIDSVIWKFLKEQLFSESELNKEQREIAIEKEEENRKNIVTDIEIVEGAIANTYKDLDSLEDMLITRRITSERFDNKKAKIDTKLGELKHQRDKLNERINAIDFNIKRLNNLDYTKSFFDEVENDLEKKIALLKEYVQFIYPYMIGKNIVLLKTHTIDGIYYIFYRIYKGNFSKDKIQRTAYYIHEALAEFKPNENNNFYAPNPSILGIDNEYLYYFVDEMKEVCENNGFEFEY

SEQ ID NO: 20881 - protein, 491 aa, synthetic construct
MKQQAKRALVVIRLSRVTDATTSPERQREACLDLCKQRGYEVVGTAEDLDVSAGKTTPFTRPQLGDWLTNRHNEFDVLVVFRMDRIVRRLLDLADLIRWCQTHSVALVSATEAFLDLTMEFGDVVALLVAKVAEMELTAISERNRSAAQHNMRQGKYRGGPPPWGYRAEKIDGDWRFVQDDQQVTVINEVVRRVLDGEPLRQVAADLTDRAVLTPRDRAYQLKGKEIRGYSWHSAKLREMLTSKSLLGHAVTANGSIRNDDGSPIIRATPILERDVFEQVQVELAGRENRKEPTKRSNSLLLRVIYCGVCGKPAYKLKGGKGRQDRYRCASAQYKATCGNGTVAVADADEVLTSSVLDLLGDSEKLERVWDVGSDHSTEIADVDSTLTDLTGLLGTSSYKPGTAQRATLDARIAALAARQSDLAALTFRPAGWKWEPTGESFPDWWDQQDTERRNAWLRTMGVRVTFVSATGVPTWSLEFGHLERFEEQFR

SEQ ID NO: 20882 - protein, 600 aa, synthetic construct
MAQKLYSYQRWSSAVQADGTTKARQTKSAEEYAQKNGLEIEEIVDAGVSGFKSANTNENGALGQFLRAVDEGLIACNSVLYVEALDRITRSEIDTALELFLGILRRGITVVTGMDNKVYTREAIKGNPVDLLTSILMFSRAHEESKTKQNRTNGNALALIDRFLKQGLPVNIKSVGSHPWWIDDSGSMYEAVKPHPVLWACAQLAMDKFMEGISVFKVTQMLNERFPHYYKGKAWAMANVRKLRLNKAVYGVREISVGGKTYVLPDYYPALISEGQFLRLQQIRTTTKYIGKVGEGRVVTDSEGNSKVIAERNNINLLSGMKLFRCGHCGGTMMAMRHGDTIRYLCEKGRGYHHDCKTWSLPGILVEHTLMLVTTIAYIELQQKGQGAKADYTQQINAMESTINGYSTQINKATKLAIALDDVDVDELAETIKELKAKRDNAIIELEVLQRKQLLANDSTFETIMMDFFTYAQYGVLQNPVHEYRSKLRDVVYSAISDVRAWKHDRRLFISFQIKGNDEYYNFSAGNTPYEWGCYVGALPFSQQELEVADGDVPEEVLERVRERYAELHAANMMMLHQAKELLSHVGYPELDSKMFWPRK

SEQ ID NO: 20883 - protein, 413 aa, synthetic construct
MTVKKISVNKKVCKKRVCAYIRVSTTNGSQLDSLENQKQYFENLYSNREDIEFIGVYYDRGISGSKDKRPRFQAMLEDCRAGKIDVIHTKSIARFARNTVTVLEISRELKAIGIDIFFEEQHIHTLSSEGEVMLSVLASIAEDELRSMSGNQRWAFQKKFQRGELVINTKRFLGYDVDENGSLIVNPEEALIVREIFSLYLEGNGTHRIAKQLNEQGVATVTGAKWHDTTIRHMLSNEKYKGSVLLQKYFHDGVNGPKKLNKGQLEQYLIEDNHEAIISKADWQAVQDKLSSRKWQQGRNKTYRFTGLLKCQHCGSTLKRQVSYKKKIVWCCSKYIKEGKVACQGMRVPEVDISNWTIASPVTVIERNKDGKKYYSYSGQESTDQCSSSGQEENQGSCLLSGIHRPRRTAIKL

SEQ ID NO: 20884 - protein, 555 aa, synthetic construct
MTGATSADNTLHIYTRVSTTAQAEQGTSLESQRDLGVKKAKELGFDFKVWNEGGRSSHHENIADRPELNALYVAMKAGQVKHLWVYDQSRLSRNDQVASVFRYECNKQGVTLYTKDGQFDLSSPQDKFLKQLLDAVAEFDNVTRAERTRLGKMNRVRSGSWHGGPPPFGYKLENRKLVVVDEEAKWVKRIFQEIVKGGAATYIKQVLDSNGVSPRRKKGLWTIGSINALLKNTHYSGHYIYTDSKSGQTIEVQCPSIIDQITWNAAQHKRTSEVLRQSQKNATSKHFYLLRDLMFCGHCGRPISGRIIKSRAESSYYCPNKEREWVEKGGSESPWKRGMGCGFARAMNIPQTDKLVWELVTSLHAKSSTLKEEVKNRVLKENGIKIRTDAEIKALQAKIRKLQKDHSKMNETLGNLEANKLLGAVSDLSFAVTLVRIREALGNIEAELANSRLELAGTDESRKWVNWVKEFGDEVETLDVLTDEQKKEYIGGLVKRIDVRYESDNREHELTLTMHLPIVNDGIKVVRDGQQAREYEVTPGTDTVSLVCKKKDGRG

SEQ ID NO: 20885 - protein, 633 aa, synthetic construct
MKRADLYIRVSTDEQADKGYSQRDQEERLRRYCSSHNISVGQIIYEDHSAKTFNRPEWAKLLISLKKKSSKTNLILFTKWDRFSRNAGDAYQMINILTKLGIEPQAVEQPLDLSIPENKMMLAIYLAAPEVENDRRALNTFYGMRRAKKEGRVLGNAPFGYINRSREDGSKYIAIKEPEASTMRMAFEEILKGIFAPDQIRQKIERSGKKILSRASFHTAIRNPVYCGKVFVAKYGDEEAVTVKGQHEAIISEELFYNVQDILHGNKRATVHSTKILSDVNLPLRGYLVCPDCGRNLTGSASKGRNTRYYYYHCIASCGYRQKAEKANEIFEQGLAQFELNEANKDILKKMVLLNYNQVIKENPRMDKRKIVLEIDKLNEKLSVAREKLLSNVMDDDEYVELKKEYKEKIDKLEEQLARDDKPDSNEMSIQRKLNKALDIVQNISKLYIQGGIETKRTLIGSIFPEKLEFNGTQYRTARINSVVATIFQINSELGSKKDRRKSELSLFSGLVPSAGIEPARLAALEFESSASTNSANWATRNCECKYRHIFVSEKSFLKKLKNNFLPVKSQLDVRWKFLIHFIVKTNMMAQVGEVCLLRLELLDKFQNLGQNKMCRMGAILSQAVNDKIIQIS

SEQ ID NO: 20886 - protein, 632 aa, synthetic construct
MIADLYIRVSTDDQADKGYSQRDQNERLRKYCEMYNLTIGQVIYEDHSAKNFERPEWKKYLSYLKKRSTKTNIVLFTKWDRFSRNAGDAYQMIGLLTKLGVEPQAIEQPLDLSVPENKMMLAIYLATPEVENDRRALNTYNGMRRAKKEGRLMGRAPYGYINRSREDGRKYIALKEPEASNMKWAFNEISKGIMATNQVREKMNKMGGKKIEKSAFYMALKNPMYCGKVFIDKNKEEDAFCVQGQHEALVSEALFDKVQFILDGKKIERLPKTKFLSDENLPLRGFLVCPDCGGVITGSASRGRSQRYYYYHCKSPCGVRHRADLANDIFLNGLKELEMKEPIKEYVKKIFLENYSSSIVNPLTEKKRIGKEIDKLNNKISIARDKLLSEIIEDDEYIQIKKECKEKIEKLENQLSKDQDRTEIKNINIEKLLEKALEALTNVAFLYSSGDIETKREVIGSIFPEKLEFDGKNYRTARMNAVMHLIFQINNGLEDKKNRRKSELSPFSGFVPSAGIEPARLAALEFESSASTNSANWATRNCECKYRHIFVSEKSFFKKLKNNFLPVKSQLDVRWKFLIHFIVKTNMMAQVGEVCLLRLKLLDKFQNLGQNKMCRMGAILSQAVNDKIIQIS

SEQ ID NO: 20887 - protein, 533 aa, synthetic construct
MSKKKKKKAAYVRVSTLKETQQDSPEHQESMIRSHASRMEMEIDHVYEDRDSATSMMSRDDVMRMIADAKRGEIDTLFFASLSRFSRDALDAISLKRTLVNALKVRVISIEDGYDSALKDDELLFGIKSVVNQDQSGAISVSSRRGINESAEAGNFTGSIAPYGYKKVLVPGEGINGKPRKSLEIVPEKAEIVRMIFELASEGMGAKSITKYLNGENPAGVQYPSYFGGPFGLTSVQNILKNENYTGYTVFGKFTNEVAYNDLSNLMDRRKKLVKKPESEWKRTKFQTHEAIISKELFDKVKGARLQQGGNTRGGRRNFVNVFAKLIFCESCGSAMVSMAGKKPKSENYEYRYLACSRRRRMGARGCNNDKWIPYQPFRDDIIAELIKLMREKMKLIEKEGIQSIMLGANDGGNDREKEKKKLTKNLESFRKLLFEIRRQHMLEEIDAAQYEFEKDQYEKDIATIESRLAAIEYAEKRVVDLEKNAREIKIALGKLTNLKTYDNVEKTRPLLMEIIRRIDINHEGQARLQTYL

SEQ ID NO: 20888 - protein, 559 aa, synthetic construct
MKTKLYSYIRFSSMRQNDGSSYERQIRMAREIAVKYDLELVNDYQDLGVSAFKGANSKTGALSRFLDAIGRSVPVGSWLFIENLDRLSRADIVSAQELFLSIIRRGITIVTGMDNKIYSLDTVTANPMDLMFSILLFIRGNEESQTKRNRTNSSALIKIKAHQENPQNPAVAIEEIGKNMWWTDTTSGYVLPHPVFFPIVQEVVELRRNGRSTAEILDHLNATYTPPPAASHKRHSNWSRAMIERLFHTRALIGIKEISVDGVKYELKDYYPRVLDDAEFYHLKKSIGVRACNFGDKEEAKPIPLLSGVGLLKCEHCGSAMVKVKGTNRRPNQYRYSCDAMRSSRIECVHTNWSFRGDQLEKAVLQLLADKIWIAEDKANPVPALKVQIDEISRKIDNLITLSAMTGATKELADQITTLNSERETLYNQIKMAEEEMYSVDSQGWEKLAEFDLEDVYNEDRIKVRFKIKQALKRIGCSRIDKYKNLFVLEYIDGKTQRVVIENSRGPRKGRIFVDLKTINDRQILESNGLVLHPCLDMLTDKNWKPEEEIPGPLQEFGI

SEQ ID NO: 20889 - protein, 506 aa, synthetic construct
MRTVITYLRFSSATQGAEGADSTRRQNELFKQWLRKNSDAQVVASFNDEGLSGYKGKHLSGQFGDMLSRIESGEFPEGTILLVEAIDRIGRLEHLETEALMNRIIAHGIEIHTLQDGLIYTRDALSDDLGISIIQRVKSYLAHQESKQKSFRVSQKWEQRAKLALAGEQRLTKMVPGWIDPETFKLNEHAETVRLIFKLLLDGESLHNIARHLQANNISSFSRRKDANGFSVHSVRTILRSETTIGTLPASQRNDRPAIPNYYEAAIDAATFNKAQEILDKNRKGRTPASDNPLTINIFKGLFRCQCGASVHPTGTKNKYAGVYRCNNHLDGRCDVPPLKRKPFDKWMIDNFLGMIDVGNDGEAEGKIASLQHEVEIVTARIKKATALLLEMDDIDELKIQIKELNQRRTELQTTIDSMRRKASLTDKELPQLKDIDLTTKAGRVECQLILSKHLKGLTLGKGSVTITLQNDTEITIPTNPLPLNDGSPIFEIADKELLDIDAYQL

SEQ ID NO: 20890 - protein, 455 aa, synthetic construct
MGYYLDDGISGTNTKKRDEFNRMIAECMDGNIDMVITKSISRFARNTLDCLQYIRQLKDKNISVYFEKENINTMDAKGEVLLTIMASLAQQESQSLSQNVKLGLQYRYQQGKVQVNHKRFMGYTKDEDGNLIIVSEEAEIIKRIYREYLEGQSLVGIGRGLEKDGILTAAGKPRWRPESVKKILQNEKYIGDALLQKTVTVDFLTKKRVKNEGHLPQYYVENSHEAIIPKELFLQVQEEIHRRSNIYTGEGKNKRIYSSKYALSAITFCGDCGDIYRRTYWNIHGRKEFVWRCVTRIEQGPEVCKNRTVKEDKLYGAVMTAINKLLAGGNNMIKTLEENIHAVIGETTEYQISEINNLLEEKQKELIKLANKGQDYEHLADEIDELRDKRQILLVEDASLSGENERINELIEFIRKNKFRTLEYDDKLVRKIIQSVTVYEDHFVIAFKSGIEMEI

SEQ ID NO: 20891 - protein, 454 aa, synthetic construct
MNTDTAARVALYIRVSGEEQKIKGLSLESQQERLEAYAREHGWVIVGVFVDAAKTARKNMHKRAEFLRMMELVKQNKVDLLLFCRLDRWFRSVADYYKVMEVLDAHNCGWKTIDDGEGYDTTTASGRLYINLRLSIAQNEADLDGERIAVVFDSKIAHGTVLSGACPFWLRVNDEKRYEVIPEKAAILQDAYNYYESSVSQRDTIRYIRETYGVNWCNATFKRMLVDKLAIGVYDKNGRYNDNFCDPVISTDQFDRVQRLLKNNAKGSRVSGRAYIFSSILVCEECRHKLVGTLGNGIYYYRCNQHFQRGLCSHRKQIREDAVEKLLFVNLGTEIEKYRLAWEVKEEKRRKAAAGVDRAAVRRKLTRLKELYVNELIDLAEYKKDYDRLNSLLVEKSEPSTDRPDFESLEKLLDQDFRQIYDDLSREEKRTLWRSVISEIRVDMSLQITGISFL

SEQ ID NO: 20892 - protein, 521 aa, synthetic construct
MPYCMYLRKSRKDFEAESAGQGETLARHKAALLETAQRLHLAVSEIYQEIVSGDSIAARPEMQRLLADVETGKWDGVLVMEVERLARGDTMDQGQVQRTFVYTGTKIITPTRTYDPSDPADAEYFEFGLFMSRREYQTINRRLLAGRERAVREGKWPQGHAPYGYRAVKVPKGKGYMLEVVPEEAEIVKSIFNWYVNGAEYNGAFLRVGARRISTMLNSMGLTTQAGNLWSAPAVRVILKNHAYIGKVTWYKQTLRKSMSNGAVVKKLERTPERTLICDGLHEAIISEELFKAAQARLSADSTGPATKGPLQSPLAGLLYCGLCGCVMARQHEKGKPAYYVCRNPLCRCRGSKLEVVEQRVVATLARWLAGYEITAKAQAQTVDIGALQSALDGAQRELLAYQQQQTRLYDLLERGIYTEQVFLQRQAAITGEVQRLQAAVADTEAAIAKAVRINASAREIVPAVHAVLDAYPTYTTAQEKNDALRMVLSRVEYTRTVGGFGSDPQDFEVKIFPRLPEPVE

SEQ ID NO: 20893 - protein, 548 aa, synthetic construct
MIQANSNHFSYRTAIYCRLSKDDEQKGESASIQNQRDMLEHYAKAKGWNIVDVYVDDGYTGLNTNRPSFQRLIKDVENKKIDIVITKDLSRLGRNYLQTGYYTENFFPKNGVRYIAVNDGVDTLQDNNEIVPFKNVLNEFYSRDVSKKMKSAYLTRARQGKFTGCLAPFGYMKNPDDTHTLMVDEETSWIVEKIYDLAISGYGVQAIRRILFDEKIPTPTWWNRKKGLRNKTTKLEQTVKGGEYWWDCTTIKEIIENPVYLGHTASQKANYQFKIGWLSDKPKNDWIVVENTHEAIISEDTYNMANEKLQSRKRPFKTGEESIFAGLVKCSDCGKALNLGRNNSKNKEKILTCNTYRRYGKNLCSQHRIYFDTLYEIVLADIRKNADFALNDEKAVVKALEKSRDSEVEEEQIYIAKKIEEDSKRVVELSNKIEKLYDDWMDKRISETNFQRILEKAQAEQDLLTKRIEEMEKKVVTSKVDEVNIYKWIKLIKKHKNIKKLDKETLNELISKIYVHEKEVVDGEITQIIEIHYNFIGNTDNLQVSYNL

SEQ ID NO: 20894 - protein, 491 aa, synthetic construct
MGLAAIYLRLSRNEEQLNIDEILLNHRNALTKLANQQKLTYDIYQEISSGVNTERPELNLLLSRLDDYDALLVMDIDRISRDNAHAEEIKKMLIIHDIKILTPQGAIDLSQESNEMLFSFQAMMANFEYKQIRKRLGRGRLAAAEQGKWTMSNRVPLGYKKNEEKRLEVVEDEAKIIRFIFQKTLERVSANEIAKQLDILGWRSRQGKVLTSTHISNMRRNVVYYGVVKAGRKVNGRVVDEVFVEDAHEPIVSKQMFLEVQKILEENTTGNFFNKLKATRKLQNLIYCNCCKRKRYIQCDGNGIDYIKSCIYKVDNNKCRDRGYKYEPIEQFVLQKIKEKKPAFEQELQMLKSLDTTEVEKKLLIQRDSLDKQINRFNKRQRNLKEMRMDGEITKAEFYEMRDENEEQIKQVKQQMELIDIKLENLSNTDEEQARLRDAIKKLDKLEELKAESCNTFLKKFIKKIWFSSNTEANHNTTRPREDATIKIEWL

SEQ ID NO: 20895 - protein, 537 aa, synthetic construct
MKQQIYNTALYLRLNRDDELQGESSSITTQKSMLRLYAKEHHLNVIDEYIDDGWSGTNFERPSFQRMIEDIEAGKINCVVTKDLSRFGRNYIMTGQYTELYFPSHNVRYIAIDDGVDSEKGESEIAPFKNIINEWVARDTSRKVKSAFRTKFAEGAHYGAYAPLGYKKHPDIKGKLLIDDETKWIVEKIFSLAYQGYGSAKITKILREEKVPTASWLNFTRYGTFAHIFEGKPESKRYEWTIAHVKAILKSEVYIGNSVHNMQSTVSFKSKKKVRKPESEWFRVENTHEPIIDKEVFYRVQEQIKSRRRQTKEKATPIFAGLVKCADCGWSMRFGTNTANKTPYSYYACSFYGQFGKGYCSMHYIRYDVLYQAILERLQYWAKAVQQDEEKVLHKIQKAGNAERIREKKKKASALKKAENRQNEIDRLFAKMYEDRACEKITERNFVMLSGKYQKEQIELEQQITSLREELSKMEQDMIGAEKWVELIKEYSVPKELTAPLLNAMIEKILIHEATTNEDNERIQEIEIYYRFIGKVD

SEQ ID NO: 20896 - protein, 541 aa, synthetic construct
MKQIKRVATLYRVSTKGQLDGNDIPMQQRACRTMIEKQEGWKLIKEYSERGVSGFKVSASNRDVIRQAKDDAENGLFDVLLVFMFDRLGRKDDETPFVLEWFVNRGIEMWSVIEGQQKIEVNTDRVINYLRFWQSSGESRRTSNRVNEKHMQMVEDGIFRGGGIPYGYRSVDSGKFNKKGKVLLKLVIHEEESLVVQRMFRLVLDEGYGQLRIAKLLNEENIPTRKAKQWGAATVNVILKNPIYKGIMRYRKGSGDAVFSEPIPELMIISEEEWNSAQDIREKKNPKSKQNNDSSVPMSTKGSLLLTGIARCGCCNSRLTSTTFVNKYKAANGEILRYNQNKSYRCTGKLQGKTDCSGQATFSSKMVERQVMKQVNSHLNQLETIDFSSEMDLIKNKISNEEEKKIKKLQCILEEHYNELSILNAEVPKSIMGKSAFKPKMLNDLIEKKELEITQTTNEMNETERILSSKKIELSELETLMEYIPVWQDVFDEASTEKKKMMLSTMIDVVYVSKEKILVEIKGRIKEFLGHSSSESKYSGS

SEQ ID NO: 20897 - protein, 532 aa, synthetic construct
MILADFLNTEGLKAVFYGRHSTDEQNVETQRHISYEFAKKNGLTIINEYIDENISAFKKTLDKRPHLDELRKEATKGQFDCVLVYKADRLARRIDQHMQLWGEFRELGIPIILTESGKLYTTDSPTEIMVDIGLSSMEAENTRIRTRDYYNAHTVQGKWLGGNLPYGYEYDVDDEKKSIMKPIPNQIEKVKEIFRLYVRGYGFKRIAKIMNDQHPKDLGSGTGKWVSESVKSVITNPFYAGFTTSQRIVHGAGNSVNDRSEWKKGKCDKIPAIISEEEWNTCMELYEKKKNGTVYQNKYITPYLFIDILCCKSCNEKLIAKNYSSGKKRKDGTSYGGRVYICPTCKQKWNVIKVHEELIEDVLSGWHFHYFSNNKEKLQKDIMKEIQIDMKDIEDCIKSYKKELSSYTEKLKEVENKQRKLMEKKPDPDELQFALVQFRISVQKKIELFEKEIERKLKEKQQLYLSYGDVENFKSITKSITNFEYDFSEPEFRKLILFLLDKVTINGKDKYDYEITAKVDLNQRGMINLGFI

SEQ ID NO: 20898 - protein, 506 aa, synthetic construct
MRTAITYLRFSSAIQGAEGADSTRRQNDLFKQWLKKNSDAQVVASFSDEGVSGYKGKHLTGQFGDMLARIEAGEFPEGTILLVESIDRIGRLEHLETEALMNRILGNGLEIHTLQDGLIYTKDALADDLGISIIQRVKAYIAHQESKQKSFRVSQKWEQRAKLALAGEQRLTKMVPGWIDPDTFKLNEHAETVRLIFKLLLSGESLHNIARHLQSNGIKSFSRRKDANGFSVHSVRTILRSETTIGTLPASQRNDRPAIPNYYEAAIDASTFNKAQEILGKNRIGRTPASDNPLTINIFKGLFRCQCGASVHPTGTKNKYQGVYRCNNHLDGRCDVPPLKRKPFDKWMIDNFLGMIDVGNDGEAEGKIASLQHEVEIVTTRIKKATALLLEMDDIDELKIQLKELNQKRTELQTTIDNMRRKASLTDKELPQLKDIDLTTKAGRVECQLILSKHLKGLTLGKDSVTVTLQNDTEITIPTNPLPLNDGSPIFEIADKELLDIDAYQL

SEQ ID NO: 20899 - protein, 457 aa, synthetic construct
MRVACYDRTSVYEEAKISNDAQYDAVKEYVLEKYEQIPQRFSDKGESGGKADRPAFRQLRAWVCASEEEGVIYVWRYDRLARQAKIALEFIELCQQHQVQVYSISEPLPASFSHASTNKLFVQLLFTFAEQQRNVIIENVRAGLAYKKQQRQYLSSAVPYGYRLVNGKIQQEAHEAKVVRHIFQLYVTQKYGYKKLCQRLTQQKLFFRERPFQPYHIYSILKNPLYYGEIKGGSLGKYLGTFEPILSKTIFLQAQEIRQSRCTAKKDTYPYLLRQKIRCPFCGRHLSSKYQWNTKKTKTLHYYHCTDRSCQGIFLRAERVESEVLEKIQAFFQYEGVYQALIAQLTQQLAEKRKDEKHKVIQQKKQEAQWLKAFEEGNCSLEELKQQLQALQKPRSTSSFLSLQQCEAKVKEWLQLKDLSSRQLLCDHVCQIEVTKEKTVCGIYFRQLTQNILEGNK

SEQ ID NO: 20900 - protein, 545 aa, synthetic construct
METTPTKRVALYIRVSTQEQALEGHSIQAQEQNGRQFAERMGYEVVEVYADEGISGKSTKNRFAYQRMMNDARNHRFDLLVIWKLTRLGRNMLDVLQTVEELLRYDVGLHSISEQFDVTTSTGKLMLQLLGSFGEFERNQIAENVQMSMQSLVKDKKRYAGGRRLGYVSGIDASGQKQLVIEPEEAKIVRLIYAKYLGGAGYRAIANFLNRQGYQTVKKNAFSTTAVKDILCNKIYAGYLEYARYINWETKRRKGKNPKPILVKGTHEPIISEEDYQKVQERLALEGKQPKWNHTGENVLTGLLRCPECGAPMAASNVTNTLKDGTKKRIRYYSCSVFRNKGASVCHANSIRAEQAETFVADRLKEIVQLPEVLPRLVAALNEEIVRQSQPLEQELVVLLERKEELKTKIEKWEAALEDSPELFPMLKDRLDELTEKRRQLHIRENEILGIFQQQGEPIQVKDVQRILTSLDRFLAQSEKKQVKALYRTFIEKITFDPNYKEILEITMKFTPAVVQQLNEQYQIAVSKTKDTAIFVLKTPFTLTI

SEQ ID NO: 20901 - protein, 557 aa, synthetic construct
MSKEKIKVYLYTRVSTSIQIEGYSLEAQKSRMKAFAIYNDYEIVGEYEDAGKSGKSIEGRIQFNRMMEDIKSGKDGVSFVLVFKLSRFARNAADVLSTLQIMQDYGVNLICVEDGIDSSKDAGKLMISVLSAVAEIERENIRIQTMEGRIQKAREGKWNGGFAPYGYKLEDGKLFINEEEAIAIRTIFDQYVNTTIGANGISKYLENHEIRKIPRQNGKNPLFDAGLIRKILKNPVYNGKIAFGRRTLEKVHGTRNEYKQVEQDEYLISEGIHEAIVSDEVWQAAQVKLKSQAKKYEHVNKGKDTRTHLLSGIVKCPICGVGMFGNKCIKKKKDGTKYKDFYYYGCKHRQMIRGHKCTFRKQIREELLDDAVAEVIVKIVSNPKFASMMQEKINMKVDTSEIETEIDNYQKELRKCHSTKFKLIEEIDNLDVEDKHYKRRKQDLDDRLYRMYDKIDELESSLIDAKAKKQTIEAEKLTGDNIYKVLIYFDKLYKVMNDVERRQLITALIFEIQVYEEKQPNGQWLKSITFKLPIIEENLNIGLDNDEHVEMLSLLKK

SEQ ID NO: 20902 - protein, 482 aa, synthetic construct
MNMTPSRAVILVRISDDKAGDAQGVGRQEEDCRSLAQRLGWTVAQVVTENDTSAYKRKRIKLPDGTSVLRTVRPRFRYVLDGLASGEFDGLIAYDLDRVARDMRDLEDLVDVVQSGYPHLPVESVSGSLRLANSSDIAMARVMTVMANKSSSDTGRRVARKHEELAAAGKPGGGGFRGYGYDVRNLEIVPEEAEIVREIAGRILDDESLNAIAADLQAREVPTVTGAPWNSRSVKSIVTKPRVAGLRAHRGDVVGDAVWPPILDRGQWEDVCARLAGRVRNVDLTLQRWLTGVLVCSKCGRTMPGAQGNNGVRYWCATPRGGCGKIAIKAEPVEAEIERRVLEGLSGPQVLEQLRHAATTEATDDARRSLAEDEQQLKELAGMWARKQVSLAEYREARSLIEARVKDSRAFVTSRAPRVLRRLLAGDIHEGWHALTPADKREVVIALGGMWRVMPHDRSKGNKFNPARLVPIEAGEQPPASA

SEQ ID NO: 20903 - protein, 441 aa, synthetic construct
MLSRIESGEFSEGTILLVEAIDRIGRLEHLETEALMNRILGNGLEIHTLQDGLIYTKDALADDLGISIIQRVKAYIAHQESKQKSFRVSQKWGQRAKLALAGKQRLTKMVPGWIDPDTFKLNEHAETVRLIFKLLLDGESLHNIARHLQSNGIKSFSRRKDANGFSVHSVRTILRSVTTIGTLPASQRNDRPAIPNYYEAAIDASTFNKAQEILDKNRKGRTPASDNPLTINIFKGLFRCQCGASVHPTGTKNKYAGVYRCNNHLDGRCDVQPLKRKPFDRWMIDNFLGMIDVGNDGESERKIAALQHEVEIVTARIKKATALLLEMDDIDELKIQLKELNQKRTELQTTIDSMRRKASLTDKELPQLKDIDLTTKAGRVECQLILSKHLKGLTLGKDSVTVTLQNDTEITIPTNPLPLNDGSPIFEIADKELLDIDAYQL

SEQ ID NO: 20904 - protein, 507 aa, synthetic construct
MKRVISYIRFSSEKQAKGDSLRRQSKMVNDWLKAHPEYYLDQDLSFRDLGVSGFTGKHLKGGLGDFLTAIEKGLVKAGDTLLIESLDRLSRQAVDRASELLRNILRSGVDVVTLSDGEHYTKESLRDPLSLIKSILIMQRAHEESLRKAERIQAAWDAKKEAAKAGIKISRRCPAWLKLNDDRKSFSVIPEKVETVKRCFQLRLEGKSIWEIVRTLNDEGHQSMSQYKPGSFGQSSVQDLLKNRSVIGYFTPKGCEEISGYYPAIIDETTFYKVQQLSHYRYGRKPASAKPLSVNLFKGVIRCSECGHALIITGFSDTRNGIYRCPLRNENRCSAKGLSRKQTDGTLLALLSRLDRFDSDTTNTIDTLKLHREHISSNIEKLVQLSLEIEDLSAITSKLRQLKGELSQVDADIEKETQRLKSIDVGCLSDCDLTTKAGRIEAQLIIKSAVKEVVLNTAKRRCKVTFHNGRAITLPITENPSEDVTEAIQSLSEVTERGLIGVDEVII

SEQ ID NO: 20905 - protein, 549 aa, synthetic construct
MKNKLKSSLNIESPKIAIYMRVSTSKQADNQSLDTQEKTINSYIASRHDWINPICYKYVESHSASLKPKASNNLKESSFDSLKRPKLRELFLDATIGKFDYVLCASHDRLTRNTNEGIILKHLFSRLNITLIYCRPGETISSENEALNKFFENLLVNIAALESNITGGRVALANKHKIQNNFWAGGPPPFGYNLVSQPNNKRNSFLEINFEEARIVKKIFELYNLGCSYNEILTRLNRDFTLPPKRLWTHNTLKEILRNPVYTGFLVWNKRGGARKPNRHSPNDFVKSNLVEKNIIIPENEFLETQKLRNILSKDSKFLSTDFLLRDFLYCNKCNKKLLAKNYGNNKRFYYCHSNNNMEINKKCRSIKASKIESTILSNINDLINSSLQSEVQIEKFYDNYIENFNAELLDNKKSLEITINQLKSSTDLLELCVNEINISKDNLTVDYENFNSNSTEFSFINALSEFQVITQTEIKSLKARKEYLTYKINSSPKSFDDFKSNLNKSFKLFKYDEEKQKLVSSPRSFRLFLFKVVKKIILSDHEITIIFK

SEQ ID NO: 20906 - protein, 522 aa, synthetic construct
MNHSKRKVAIYIRVSTEEQANEGFSLGAQEDYLKQYANTKGYEVYDIYIDDGYSGKDYNRPEIQRLFKDLYQEKFTGILVKSVDRISRRVSDVTKLIDDVLAPRKCYVLVSDNNLDSSTTGGTAFIQLLATFAEYERSMIVQRVKAGMSKRAELGYWNGGHVLGYDVKNKELKVNKEEAEVVRKIFHLRTEGKGYKSIALILNQQGFKTKRGRLFSIGTIKTILENPLYIGYCRWGRHKNWNVERRKGKTDEYKFVKGKHEPIVSEDLWKRVQGVNYAHKKSISKNRNFNGEFVLSGILRCPSCGAGMVMCKTKKRDKSGYHLYYMCQAFHSKGKLACKSNLIRKEDIEEKVLQCINQIILIPLIVDKTFERIQEKKERGIERIKNDLLYINEELKRKKQFIKKLNKDYFDEKIRVETYTELSEPLREEIDELESEKGKLDRKIESVEIPITKEMVIKTLENFTNLYENATYEQKKSLLRAIIKKIEVQPNRKEIKGITYWFDCDNGQDDALLVSKEGRTVS

SEQ ID NO: 20907 - protein, 540 aa, synthetic construct
MKQPYNTTIYNTALYMRLSRDDELQGESGSIQTQRMMLRQYAAEHGLNVIDEYIDDGWSGTNFDRPDFQRMIDDIEDGKINCVVTKDLSRLGRNYILTGQYTEIYFPSKGVRYIAVNDNVDTINGENELAPFLNILNEMHARQTSKKVKAAMRTRFANGAHYGAYAPLGYVKDPDKKGHLLIDPETRWIIEKIFDLAVHGRGAASITRILVEEKVPTPGWLNFQRYGTFANIYAGAPEEKAYAWTIAQVKSILKEETYIGHSVHNKQTNISFKNKKKVRKPKEEWYRVENTHEAIISEDVFRQVQEQICNRRRRQKNGTTQIFSGLVKCADCGWSLAYGVNSQNKNPYAHYHCSKYGQGLHQCSMHYIRYDVLYAYVLSRLQYWSVLAQQDGDKLLKRLLNASDKERNTARKRQTTELKKTEKRKAEVDTLFAKMYEDWSAGRITEYNFNMLSEKYQGEQRELDAKIERLHEAMEAAAQTAVDAEKWIGLMKRYVNPTELTAELLNTLIEKILVHEAVKSEDGSREQEVEIFYRFIGKIE

SEQ ID NO: 20908 - protein, 629 aa, synthetic construct
MPQLYSYIRWSSDRQDKGTTRNRQVAAAKAYAEEAGLEMVEILEPGVSAFRGKNRAGKLGDFIDAVKNNAIPSDSWLYCENLDRLSRDQVDEALRLFLELIGLGLTIVTGMDRKVYNSKSIKQNPIDLMISILMFIRGNEESETKSNRTVGNVVALVERHKEGLPVNIKSVGRHPFWIDDSGSQYEAVKKHPVYWSIAREAIEMFLAGDGIYTVKRHLDDKYPNGLKGKEWDYQVLKKMRDNRALIGERTINVAGATYKLDNYYPWLCKDEAEFLTLAERKQQNNYKAKKDKTEEIKLLSGLQVLRCSKCGGTMHSFMNHGSARYICTNGVHLQKNCSGWSISAQLVEHCTMISLLIGYMDKSRKDGIDTTAIEEEISRKATLITDLESRISNMAKAIAIAPEVSELAVQLNAFDLERKKAVLEVDKLKERLHSLKGKGSLEVDITDFLMLIQWSVFTNMEDADRNKIRKIISSIIESIIIDKTDGCITIKIKCHNKDEWLVFGGVNRKPFWAFTIEYSTNDSKDIEGEDSSNFVSNPLFQKAVEQLDSIKQSYLNLFETANTMLGVVGYSDIRGASFWPNTGQYERANVEYEGITYSIAMNGRVSKAITTALEATGLSRKAFIERYKV

SEQ ID NO: 20909 - protein, 472 aa, synthetic construct
MKTANKVAIYVRVSTTSQAEEGYSIDEQRDKLSSYCKIKDWSIYDVYTDGGFSGSNTERPALEQLIKDAKKQKFDTVLVYKLDRLSRSQKDTLYLIEDIFLENKIDFVSLLENFDTSTPFGKAMVGILSVFAQLEREQIKERMQLGKLGRAKAGYSMMWMNPPFGYRIAKGDKVVSINPTQAVIVSRIYSEYISGKPISKILSNLNAEGHVGRDKPWSLTTIKDILKNPTYCGKIRFRGELYDGMHDSIISEEDFELAQIELQRRQVETYSRTNNPRPFQSKYMLSGLLKCAYCQSTLRIYVAHKRKDGTYPPLKYQCANRFNKDLSKRCDSKQYDKNELEMAVLSKLCDLKFESSVDSLKIEPVDKNELKRELQSVLSKIDRLTELYIDGFVEREEFANRKHSLEKQKGLIEDELTIDHEEIAKKRKQAILDELENINLLNSSYEDQTNIVRKVVKAINVKPGTVDIQLDL

SEQ ID NO: 20910 - protein, 618 aa, synthetic construct
MAGIRTENKIYEVGIYCRLSKDDGTDNESASIATQKSILTDYVKRQGWHLAKTYVDDGYSGTNFQRPSFQNMIKDIENGLINCVITKDLSRLGRNYLDCGLYLEVFFPEHNVRYIAVNDGVDTLNKSAMDITPFRNILNEMYSADVSVKIKSAYRARFQQGKFMGTTAPYGYVKDPADHNHLLIDDKVAHVVREIFDLALAGNGIAKIRKHINKQHILRPAAYAVEQGATGYERYFEDNEENRYIWSENSVRGILRSPIYAGNLAGYKRIAANMKSKKRPSKLPEEWEVIPNTHEGIVTQEEFDIVQQLITSRRLPQNKGGFVNIFAGVIKCVDCGCALRAMNVHRRKRPEIIDCVQYSCNNYARNGRSECSAHNIEARDLFNAVLADINCFADMAVNDEKAVRAIEKRLTETDQSRAKALEKERKKLNKRLAELDRLFSSLYEDKVMERITERNFEMMSGKYQKEQLEIEARLKEVTETLNESYEKSRGIRDFLALIRNYQGLKELDATVINALIDKILVSEREKMADGTVKQEIKIYYKFIGFVDELHIIPTKRWAAMPAKNCTVCGVEYVPGSGASRYCPACAKKIRREKSNESKRRSREQKRIACMNCPQKMTD

SEQ ID NO: 20911 - protein, 637 aa, synthetic construct
MKKAALYVRVSTLHQIDKDSLPFQRQELENYAKYALNIEEVVIFEDAGYSAKNTDRPKYQEMMKRIRSGEFTHLLVWKIDRISRNLKDFSEMYEELKDCKVTFVSKNEQFDTSTAMGEAMLKIILVFAELERKLTAERVFSIMLSRAEKGLWNGATVPFGYVWSEEEKFPVIDPDESKIIQYIYNSYESLRSTLKVAYSLHEKRIATKRNGQWTAKTVRDILRNPFYIGTYRYNMRESGGSRRLKNKEEWVVVDNNHPGIIEKEQFDRVNKLLSDNYRGLTDVQRADIHKHIFSKMLYCGKCNSLLTAGLDAARKDGYRPSRYTCVTSGGAKRCSNYVSDIIIGPFIFNYVSNLIRLQERITPKHSLRDMESALLRGNSFIDVVGVDNESLKETYFALTGNMSGQDYSLNTKDEIQIPNIEIERLQKEKAKFVRALKRLEDLYYFGEEEDAISQKDYIFKKRDLQERLEEIDDEINILKQKNDDKTSDVFIDYAQHFLITKEMQQARQVDYRELSEIVGREALSDFMQTIIDNIVVIDKRVQSITFKNGITHTFAYRSLLQSKSSAQTKKQYKNYEGPVLEYLKENGPASRSDLQKATNITRDGIFTLLSELIERGIVIKTGQSTATRYHYNEKQNN

SEQ ID NO: 20912 - protein, 451 aa, synthetic construct
MIRAAIYIRVSTQEQVENYSIEVQRERIRAFCTAKNWDIYDEYIDGGYSGSNLERPGIKKLLNDLKNIDVVVVYKLDRLSRSQRDTLELIEEHFLKNKVDFVSITETLDTSTPFGKAMIGILSVFAQLERETIAERMRMGHLKRAEKGLRGNGGDYDPAGYTRQDGHLIIKKDEADHIKRAFDLYEQYYSITRVQETLKEEGYPIWRFRRYRDILSNRLYIGRVTFSGNEYEGQHEPIISLEQFKRVQTLLKRHKGHNAHKAKQSLLSGLITCSCCGEKYVSYSTGKSKDDESKRYYYYICRAKRFPSEYKERCMNKTWSRQKLEDAVIGQMKDLTVFKYHNQKKEKQINYTKLIKEIDKKMERLLDLFTTNTNISRQLLEQQMEKLNSDKEKLILKQQSSEQEISLSNEMITKTMKSFDTLEFKDRQILINKFIQEIQIKHENVEILWRF

SEQ ID NO: 20913 - protein, 543 aa, synthetic construct
MPRKCYPYIRFSHKKQEFGTSVARQGDIHQFIEKHSLIVDTTLEDLGVSAFRGKNAKKGQLGGFIDLVEQGLIEPNSILLIENFDRLSRQKVIKSTQIFINLLNHGVDIAILDTGKIYSRDALHTSDFFLAIIEFERANAESARKSDFVSSAWTQYRAEMRATKAPKTRKTPSWIGVEGTIRTRPGEAATARFVVIEKEARKIRKIFELALSRGISETARAVNEWLEPDEPKYSLHQIQYLLKNRKVIGEHQPQKMGEDKNGDLKLAPEGGTILNYYPAIIDRTVFDEVQEQIKNRKPFAGRFSATRLNIFSGFIVCGHCNGTIRYMDKSNSEDPGKKQYLICTNSMTGKCVMPHRLTYEFNTIVWNVFRTVDKLNLSEVFQNDEAILKLNVSIKDEENSLADIEKQLTRFKNQLLEMLTSGKEISDTFNQMLIEIEKKKLLHVDNLKTLIEQKNLQVEQSEASKNFSRENILTLMNDRSDEGTRQRIKLNYHLSKLIRSIRLTWTKKPSGKRGIGDPSIGIFFTSGTYRGIQVGAAQSHLKS

SEQ ID NO: 20914 - protein, 539 aa, synthetic construct
MKASDKKVYSYLRFSDPRQAVGSSADRQLAYAASWAAMHGMVLDSSLSLKDEGLSAYHERHVTQGALGVFLRAITEGRIPNGSVLVVEGLDRLSRAEPLLAQAQLAQIINGGVTVVTASDGREYNRASLKAQPMDLVYSLLVMIRAHEESDTKSKRVKAAIRRQCEGWIAGTYRGLIRNGKDPQWLRLSPGGWELIPERVAAVKRALELYSQGLGAGRAANVMHDEGFKLTEWGISGLQIYRMIKQPALRGVKRLTLDGEDFELEEYYPRVLSDTEWSELQHLASQRFRRRGAGEIPGIITGVGLAFCGYCGTAVVAQNIMNRRRADGTIADGHRRLHCTSYSKNGGCSYGGSCSVVPVERAVLSFCSDQINLTRLMQAGDAGQTLQKQLVVARAAVTKITTQLSKVTDALLADESGAAPLAFVRKARELEAQLTAAEQKVAQLEHEAVATSGAVRPAQAERWVELAADVEAGDYGAREKVRQLVMDTFNRIVIYMRGMQTDGRNGPFIDVQLFSRSGQHRLLRINRKNGAWVASEDWE

SEQ ID NO: 20915 - protein, 523 aa, synthetic construct
MGRVLGVIRLSRERKESTSVARQRGYITTWAEQNGHTIVGWAEDEGVSGSVPPGERPQLGEWLPTSLGGRADVPAFDILCAWRLDRISRRVLHLAALMDWCKSNGRAIVSTSEGFDINSTMGAVFVNILSALAEGELEAIRERARSSFAHLMKQGRWRGGFVPYGYQAVKADAGQGWRLEVDPETSKTAREIVRRIINGDSANSVVRWLNEEAVPSPLDAQRKRAGKATTGTEWRVANLLKMLRSHTLLGYAEMTETRTKADGTKETFTRLVRGEDGLPLRRADPIVSSADWERLQEALRKNANPNAGNRVGGSPLLRVAYCECGEPLYRNRGRAGMYYRCGLRARAGRNCPKGMTSIPAHVLEHVAEQFFMAIAGDLEVMRRVFVPGSDHAADLAEVEESLAELREHQAAGIFRGERGKAEFRQMYRSLEDRREVLEALPSEPDRWELEPTGQTYRERWESLSTVAERNREMREAGLKVIAYGLPTDEELAAMEDPDSYSRVRVIIPEDLMARLEAHAATAA

SEQ ID NO: 20916 - protein, 578 aa, synthetic construct
MKPKAYSYLRMSTDLQLKGDSRRRQLKASQEYAEKHGLDLAEDAQLEDIGISAFKGANVRDGALGQFLKAVEAGAVEPGSFLIVESLDRLSRDKILTAQSLFLNIIQSGINLVTLMDGRLYRANEVDLGDLIMSLVIMSRAHEESLIKSQRISAAWQNKRVKAASGQPMTRQCPAWLKLSADRKAYEVIPERAEIIRQIFEDSAAGVGMYSMVGRLNRAAIPAFVGKNGWHQSYIAKVLANRSVFGEFQPSRKVDGKRIPDGEPISAYYPTVVSEDLFYRANLSKSQRLKDGKGRKGSGYTNLFTNIAECAYCKARIVFENKGNGPKGGSYLICSDAKRNLGCKATRWRYADFEASFLAFVEELDIESIFTADESAVRRKEVADQLAALRGELASVGELMEKTFELLTDGGAVEFVKGKLNELQKRQSHLRADIEEKASEQAELNSLGTRIDQSRSEIRELVKRLQGPTTNELYKTRAQIASRLKTLVQTLIIAPLGDRPKTLKVVEKLEAENDPTLRDIIDHLKTTANHEDRSLRFYSVGFHGGEVRAVYPDKDALKYERQILGSLAGVSVFSDDDD

SEQ ID NO: 20917 - protein, 507 aa, synthetic construct
MKRVISYIRFSSEKQSRGDSLRRQSKMVTDWLKAHPEYHLDQDLSFRDLGVSGFTGKHLKGGLGDFLTAIKKGLVKAGDTLLIESLDRLSRQDIDIASELLRNILRSGVDVVTLSDGEHYTRESLKDPLALIKSILIMQRAHEESLRKAERIQAAWDAKKEAAKAGIKISRRCPAWLKLNDDRKSFSVIPEKVETVKRCFQLRLEGKSIWEIVRTLNAEGHQTLNQYKAGKFGQTSVQDLLKNRSVIGYFTPKGCEEISGYYPAIIDETTFYKVQQLSYARYGRKPASDKPLSVNLFKGVIRCSECGHALIITGFSDTRSGIYRCPLRNENRCSAKGLSRKQTDGTLLTLLSRLDRFDSDTANIIDMLRLHREHISSNIEKLVQLSLEIEDLNAITSKLKQLKGELSQVDADIEKETQRLKSIDVGCLSDCDLTTKAGRIEAQLIIKSAVKEVVLNTAKRRCKVTFHNGRAITLPITENPSEDVTEAIQSLSEVTERGLIDVDEVII

SEQ ID NO: 20918 - protein, 508 aa, synthetic construct
MKKAIAYMRFSSPGQMSGDSLNRQRRLIAEWLKVNSDYYLDTITYEDLGLSAFKGKHAQSGAFSEFLDAIEHGYILPGTTLLVESLDRLSREKVGEAIERLKLILNHGIDVITLCDNTVYNIDSLNEPYSLIKAILIAQRANEESEIKSSRVKLSWKKKRQDALESGTIMTASCPRWLSLDDKRTAFVPDPDRVKTIELIFKLRMERRSLNAIAKYLNDHAVKNFSGKESAWGPSVIEKLLANKALIGICVPSYRARGKGISEIAGYYPRVISDDLFYAVQEIRLAPFGISNSSKNPMLINLLRTVMKCEACGNTMIVHAVSGSLHGYYVCPMRRLHRCDRPSIKRDLVDYNIINELLFNCSKIQPVENKKDANETLELKIIELQMKINNLIVALSVAPEVTAIAEKIRLLDKELRRASVSLKTLKSKGVNSFSDFYAIDLTSKNGRELCRTLAYKTYEKIIINTDNKTCDIYFMNGIVFKHYPLMKVISAQQAISALKYMVDGEVYF

SEQ ID NO: 20919 - protein, 603 aa, synthetic construct
MARKNPKNPDATRPLSCVLYIRVSTKLQVEKGESIDAQRFELTRYAEAHGMRVLGEYVDAGFSGKNVRGRPQFRQMLDDIIKEQPGRRPTYVLVFKLSRFGRNAADTWNSLQMLQDYGVELCCVKDGIDSATTMGKAMLSIAAVFAEMERDNIRTQTMSGREEKARKGYWNGGQAPYGYRLVDRGGKFKELVVDEDEAKVVRKIFQMYAYENKGAMAIAAWLNNHGVRKDARGNATMETFGNTTIARMIVNPVYVGKIAYGRRRTEVIEGTRGETHVVKSDGYEVYDGRHEAIIDEATWAAAQAIVGTRKPNAKRHDDGHVNLLNGLLVCPECGRKMSSHPNRGKVKKDGTRGKTTYAYYCPHTSKARGATCTFSSQYPQEYVDAEVIEMVKLASRSDAFVEALRRRINDETDVEQLREDAERIGREQAANDKRMRMLMNQIDALDPADRSYERKFSDLQRRLDDLYDRDAGFQEALEETRAKIAAADKRRVGERRLLDELDRIPELLEEADEQTRFDIVHEAVSEVRILAGRNPRKERVVQSVTFKCPVRFFWEEVPGEADGYTAVTPDSFDSDGNFRDDETHVETIALVERVEGFFERSDR

SEQ ID NO: 20920 - protein, 547 aa, synthetic construct
MPRLISYVRMSTSEQLKGFSLERQRNLIADFARKNGLSLEDSHILEDIGRSSFSDDTEQKELTKFFEDLGNDKFQKGDVFALENIDRLTRRGPIDALMKVNQIISKGLKLAIISDKEQRILEEIDVFSIITLSIDASRANKESQVKSDKGLQNWAFKRELAATHKIAMTAQAPAWIDTETYYIMDETKNKQVKRRRYVLNEDRAKTVKLIFELFQNGNGSLKIKNILNEQNIPTFKGIEYWEPSTISKIIRNPATYGMYQPKKQNTGKRDLVAIGEPIENYFPAVIGKEVFDQCQQITATNTTRKGRRGKLFTNLFTGLLKCADCDGPIHLLNPGIDKRAKNPKPVNYLICKKGKFTKECITKRLRYEDFENAMLKAIQEINLADVLHENNPLENLIKKQRNLQADIDKKKKLLENFERNFVENDGDLPSFMIAQAKQAEIDIKALDIEIKSTQFEISQLNVYNSNIDNAIDELKTNGTYEARSKINLILHEIIKYIVIDFELDDFGVMFKNGAKRFINNGIVQNVFRTESNKQRDDEINEILNHKI

SEQ ID NO: 20921 - protein, 524 aa, synthetic construct
MKIADLYIRVSTDEQADKGYSQRDQEERLRKHCSSLNIAIGNVIYEDHSAKTFERPEWKKYMYGFRRLRNIKEGRLLLFTKWDRFSRNTSEAYQMISNLNKLNITPQAIEQPLDLRVPENKLLLAIYLSTPEVENDRRAMNVTYGMRRAIREGRMMGIAPYGYINRSKEDGRKYVAVKEPEASNIIWAFKQVAKGHLPTAVVLKEMNKREGRKLTKNSFMEALRNIVYTGKLLLKAYNDEEERIIEGKHDALISEDLFLKVQSILFRKSNQDDFLPAGRIINEERYPLRGLLLCPKCNKNLTASSAKGRSKHYYYYHCTVDCGFRHNSEIVNDLFVEELSKFTFNNGAAKILKAIFVQNFAVASNSVGDERKVLQNKLTGIEQRIEKARDMFIEDKLDEEDFRSIKNKYKIEIENLKVKLNALKSSAENNNFEQRINKALDSIINISERYKNANTMDKRAIVGLIYPEKLIFDGENFQTTKINSFANSIFLIKKELGNKKNRQRSELSSNVGLVTSTGFKPVTF

SEQ ID NO: 20922 - protein, 525 aa, synthetic construct
MQAVYLYIRVSTDEQAVKGYSQRSQLDRLVLYCKDHNLIVTKTIFEDYSAKTFNRPEWNKLFAELKLIKNQSSLILFTYWDRFSRNIMDAYKMLERLQNMKVSIQAIEQQLDFSIPESKIMLAMYWATSEVENDKRSRNVRLGMQKARLEGRWINKAPLGYRNKITSDGKKYIAIYEPEAYVIRQAFTAIVRQNKYCLNDIYKEAVSNGLNCSRSAFYRLVRNPIYCGKIKIPAFEDKPEKIVEGTHERLIPVVLFDHVQRIIKDADLNHPKKLTSKRIVDENLIFRGVLQCPNCGNTLTGSGSQGHTKKYYYYHCMGRCSYRVRADAINLSFLLFLKNNRVEEPFLELANSISKEIYGEEHHDYIQKKEEIKKEMEKLIDRGFNAQKLFSNGNIDYDDYILIRSRCQESLKDNTDKLRQQALKIVAEKHTEKGTDYIINHLGEFYENSDTITKQRIIRLFFPDKVKVIEGNIEKMLSESVKTIFGLTVSASKIKEIHGQQTKQEIVEFFKELYFLGYEQNLKNI

SEQ ID NO: 20923 - protein, 595 aa, synthetic construct
MSNNVEIIKANPLVTRRNDNSGSLSRRVAAYCRVSSDSDDQKNSYDSQVRHYREYISQHQDWILVDIYADEGISGTQVGKRQDFQRLISDCLDGKIDYIITKAIARFARNTLDTLKYVRLLKDKQIGVFFEEENIDTLTMDGELLLTILSSVAQQEVENTSAHVKKGLKMKMQRGELIGFQGCLGYDYNQDTKSISINEKEAKIVRYIFERYIDGIGGRAIARELDELGYKTPRGLDHWQDTTVLGIIKNEKYKGDILMGKTFTVDPISKRRLINFGEEDKYYIKNNHDAIISPEIFTQAQEIRLRRSGNKKTIANTKGKRERYSRMYPFSSRLECGFCGTVLSRRSWHSSSEYKKIIWHCTTSIKRGKKYCTHSKGIEEKAIENAFLQSYQQLFYENNNLTEDFLEIIKEELTDDTLKVELNKIVSKLNSLYKKEEKLVSMNLDGKISDSVYEDKFNQIQIEKEKLLEEKVNLEVTLKSEVDIKSRLENFKEILTSQKTLTEFDKDIFESIVEKIIVGGINSDGEIDPAMLTIIFKTGDSSTKDAKSYKSKRKNAKIENDKLCFNAVTDDEKKCTNKENIARRDGSTFVQTRCR

SEQ ID NO: 20924 - protein, 481 aa, synthetic construct
MKTMNKVAIYVRVSTTNQVEEGYSIDEQKDKLSSYCDIKDWNVYKVYTDGGFSGSNTDRPALESLIKDAKKRKFDTVLVYKLDRLSRSQKDTLHLIEDVFIKNGIEFLSLQENFDTSTPFGKAMIGLLSVFAQLEREQIKERMQLGKLGRAKSGKSMMWAKTSYGYDYHKETGTVTINPAQALTIKFIFESYLRGRSITKLRDDLNEKYPKHVPWSYRAVRTILDNPVYCGFNQYKGEIYPGNHEPIISKEEYDKTQSELKIRQRTAAENVNPRPFQAKYILSGIAQCGYCGAPLKIMLGVKRKDGSRLKKYECHQRHPRTLRGVTTYNDNKKCDSGFYYKDKLEAYVLTEISKLQDNAGYLDKIFSGDNAETIDRESYKKQIEELSKKLSRLNDLYIDDRITLEELQSKSAEFISMRGTLETELENDPALRKNKRKADMRKLLNAEKIFSMDYEGQKVLVRGLINKVQVTAEDIVINWKI

SEQ ID NO: 20925 - protein, 559 aa, synthetic construct
MKTKLYSYIRFSSMRQNDGSSYERQIRMAREVAAKYDLELVNDYQDLGVSAFKGANSKTGALSRFLDAIGRSVPVGSWLFIENLDRLSRADIVSAQELFLSIIRRGITIVTGMDNKIYSLDTVTANPMDLMFSILLFIRGNEESQTKRNRTNSSALIKIKAHQENPQNPAVAIEEVGKNMWWTDTTSGYVLPHPTYFPVVQEIVELRKNGRSTAEILDHLNETYTPPPAVSNKKHSKWSRAMVERLFHTRALIGIKEVSVDGVNYELKDYYPRVIDDATFYHLKKNIGARAWNFGDKEEVKPIPLLSGIGLLKCDHCGCAMVKVKGTNKRSDQYRYTCDATRSRRLDCEHPNWSFRGDQLEKAVLQLLADKIWIAEDKANPVPALKVQVDEISRKIDNLIALSAMTGATKELADQITTLNSERETLYNQIKMAEEEMYSVDSQGWEKLAEFDLEDVYNEERLKVRFKIKQALKRIGCSRIDRNKNLFVLEYIDGKTQRVVIENSRGTRKGQIFVDLKTINDRQILESNGLVLHPCLDMLTDKDWKPEEEIPGPLQEFGI

SEQ ID NO: 20926 - protein, 481 aa, synthetic construct
MKTMNKVAIYVRVSTTNQVEEGYSIDEQKDKLSSYCDIKDWNVYKVYTDGGFSGSNTDRPALESLIKDAKKRKFDTVLVYKLDRLSRSQKDTLHLIEDVFIKNGIEFLSLQENFDTSTPFGKAMIGLLSVFAQLEREQIKERMQLGKLGRAKSGKSMMWAKTSYGYDYHKETGTVTINPAQALTIKFIFESYLRGRSITKLRDDLNEKYPKHVPWSYRAVRTILDNPVYCGFNQYKGEIYPGNHEPIISKEEYDKTQSELKIRQRTAAENVNPRPFQAKYILSGIAQCGYCGAPLKIMLGVKRKDGSRLKKYECHQRHPRTLRGVTTYNDNKKCDSGFYYKDKLEASVLKEISKLQDDADYLDKIFSGDNAETIDRESYKKQIEELSKKLSRLNDLYIDDRITLEELQSKSAEFISMRATLETELENDPALRKNKRKADMRKLLNAEKVFSMDYESQKVLVRRLINKVKVTAEDIVINWKI

SEQ ID NO: 20927 - protein, 481 aa, synthetic construct
MITTNKVAIYVRVSTTNQVEEGYSIDEQKDKLSSYCDIKDWNVYKVYTDGGFSGSNTDRPALESLIKDAKKRKFDTVLVYKLDRLSRSQKDTLHLIEDVFIKNGIEFLSLQENFDTSTPFGKAMIGLLSVFAQLEREQIKERMQLGKLGRAKSGKSMMWAKTSYGYDYHKETGTVTINPAQALTIKFIFESYLRGRSITKLRDDLNEKYPKHVPWSYRAVRTILDNPVYCGFNQYKGEIYPGNHKPIISKEEYDKTQSELKIRQRTAAENVNPRPFQAKYILSGIAQCGYCGAPLKIMLGVKRKDGSRLKKYECHQRHPRTLRGVTTYNDNKKCDSGFYYKDKLEASVLKEISKLQDDADYLDKIFSGDNAETIDRESYKKQIEELSKKLSRLNDLYIDDRITLEELQSKSAEFISMRGTLETELENDPALRKNKRKADMRKLLNAEKVFSMDYENQKVLVRRLINKVKVTAEDIVINWKI

SEQ ID NO: 20928 - protein, 584 aa, synthetic construct
MKKVEVIKASSSISKSKRGKMIECLRVAAYCRVSTDSEDQLNSYKSQKTYYTDLIQKNNEWIFVGIYADEAITGTQVTNRQDFQRMINDCMNGEIDMIVTKSISRFARNTLDTLKYVRMLKEKNIAVFFEDENINTLTMDGELLLVVLSSVAQQEVENISSNVKKGLKMKMKRGELVGFQGCLGYDYHPEDKSITVNKEEAEIVRYIFNRYIEGAGGSVIGKELENLGYLTKYGNATWAPTTVLGIIKNEKYKGDILLGKTFTVDPISKRRLENMGEEDQFYIRNHHEPIISEEVFDKAHEILNRRNKNRGKIGNGNTKREKYSRKYAFSCLLECGFCKGTLTRRKWHSGSEYSKVIWQCVTATKKGKKHCPESKGIPEQAIEDAFIESYRILSDDNKDVLDEFLKIMDETLSSSSINKQLTKVDKEIEAIEKKKSKLVDMRLEDIIDSDTYESKFSNMTNKQENLLKERIKLQETATTEKDVKRRLREFKKTLENNEVLHEFDRHVFESIVEKVIVGGYDEDGNIDPAQLVFVYKTGFKNSLDGNQFKPARKNARGNRKSNKLCSQTNDDVKDLCSYTSTNTY

SEQ ID NO: 20929 - protein, 531 aa, synthetic construct
MKVVCYVRVSSDRQAEKELSIPAQLKAIQQYCREKGWTIVHEFVEKGQSAKTDDRPEFQKMIAMAKRANRNFDAIVVHKFDRFSRKRDDHVFYKALLGQIGVKVISMTEQTEDNTPQNVLLEGMLEIVSEFFNANLAVEVRKGMTQNAKKGYSNGGTPPYGYRTEHIALGNQKTKAVWVPGPREEIDIVRFIFNQYALEDKGYHKIASALNELKVPTQKGRMWSTSTIRAIIHNESYIGRRVWNKQEYQTKGVKWRDRSEWVVTENAHPAIITVDLFEECQEKSKKRHNGGGVVHTAVGTASVSPYWLRGIMVCDKCGSKMIGNVTSAKTGGHRYYVCGGFQRKGKEFCSYVSWRKERVEEIVTNKLRTTLLRLSMDNQLEEEILHYHNEKNKHVVVRLSNVDAEIAFLTRRIQSVEQDVQAGKGKPYHQEMLAEMNQELADKHIEREVLASQVEHVNLPENYVTSVKYDIQTLIGLLDADVQNPALLHPIVGKYVSTVYIQRETGKLFLTIQFKVSDIVLYEKILVTEFR

SEQ ID NO: 20930 - protein, 592 aa, synthetic construct
MKKNNVEIIKADSLVRRRGDNFERESKRVAAYCRVSSDSEDQKNSYESQVRHYKDYISQRSDWELAGIYADEGISGTQVGKRQDFQRLINDCVNGEIDYIVTKAIARFARNTLDTLKYVRMLKDMQIGVYFEEENIDTLTMDGELLLTILSSVAQQEVENTSAHVKKGLKMKMQRGELIGFQGCLGYDYDVETKQLSINKKEAKIVRYIFERYLEGIGGKVIARELDELGYKSPRGLDHWNDTTVLGIIKNEKYKGDILMGKTFTVDPISKRRLSNFGEEDKYYIKDNHEPIISKEDFEKAQEIRLRRAGNKKTAANVNGKRERYSKMYAFSSMLECGFCGSILSRRSWHCRSDYRKVVWHCVTSIKKGKKFCKHSKGLEELAIEGAFMEAYRKLYHSNENLMTDLLETIESELNDNSLNKELKRITNKLRTLLKKEENLVNLRLEGKISDTIYNEKYNEISSEKEFLAEEKVNIETTLKSEIDVKKRLTEFKHLLSSQKMLTEFDRAVFESIVEKIIVGGVNSDGEIDPAMLTIIFKTGETQNKDGKQFKSKRKNAKLETDKLCPQNSDEDKKLYSQGTDYTCGISGAIST

SEQ ID NO: 20931 - protein, 470 aa, synthetic construct
MKCVIYRRVSTDEQAEKGFSLENQKLRLESFATSQGWEVVGDYVDDGYSGKNMERPALKRMFNDVDKFDVILVYKLDRFTRSVRDLNDMMETIKEHDIAFKSATEFIDTTTATGRMILNMMGSTAQWERETISERVTDTMYKRAESGLWNGGRIPFGYKQVGRNLIINEEESTIVKEMFDLSLSYGFLGVSLKLNERGYKTKTGCKWNRTGVRHILMNPIYCGYVRYGNQNNDTKDVVMAKIKQDGFKEIVSKERFDECQRIFESRKKNAPKPRHGEFNYFSGIFVCPNCGRKLYGVTYQQKDNIYKYYKCSKQSQKFCEGFHISLEVLDAAFLKELNLILDDVKISPLKKIDPVSIKKEIDEISKKKERIKNLYIDEIISRDEMKEKIEELNIKEKDLYNTLSEEEQQISESIIRETFENLSQNWKQIPDEIKMYMIRSVFESIEFKVIKKARGRWHKAVIEITDYKMR

SEQ ID NO: 20932 - protein, 506 aa, synthetic construct
MGKVYSYIRFSKKEQGAGSSTARQLKYAEEYAKKHGLVLDSTLVDDGLSAYHAKHLSKGALGLFLAAVESGDVEPDSTLIIERLDRLSRQKPRQAQALLSQIIDYGITVVTASDGAVYNEKTIDNDPMKLVYSLLIAIRANEESETKAQRSKAAIQHNINQFQKHKIRSLGGAVPAWFDRFNAAQGWEYKLNQNTDTVRRIVELSLNGTGAKTIARMINSEGHTTFGKSENWGMTSVVSVLKNPALFGRRVVNSNGSVMLDDYYPAVVTRKDFDAVQYRLNKRKNTKGSEKFVNLITGLGKGFCTCGYCGSAIATQNQIFKTKSGERIVRRMHCTATKESGQCHSSKRIEKVEEAVLMFMMEHNLDTLKTGDTQSYEIEIDTIDKKIRKMVSLQLALETSELPDDFLDSLAQLRARKAELSDKAAKGGIDIELNEQFKALGEKAIKLENSEARTTVRQIIRDSVASIRIWTCGIELVNEPDIAIEFKNGTRGLISIRGNEIIAQQL

SEQ ID NO: 20933 - protein, 595 aa, synthetic construct
MKKEVKVIKGDTTLKRTASGCVERSIKRVAAYCRVSTDTEDQINSYNSQVEHYTEFIQKNNEWTLAGIYADEAITGTQVDRRIDFQRLINDCMNGDIDMIITKSISRFARNTLDTLKYVRKLKEFNVAVFFEEENINTLTMDGELLLTILSSVAQQEVENISANVKKGLRMKMERGEMVGFQGCLGYDYDPETKSISINEKEAEIVRYIFRRYIEGVGGMVISRELEEQGYLSPRGNKRWTETTVLGIIKNEKYKGDLMMGKTYTVDPISKRRLDNFGEQDKFYIENHHEPIISEEDFEKAQGIRLRRSKNRNTVANNGGKREKYSRKYAFSSMLECGFCGYNLSRRNWHSSSEYTKVIWQCVNATKNGKKYCPHSKGIEEEAIEKAFMESYRQVCHNNVEITNEFLKTVEEELKDNSLAKDLKKITNQLDKILKKEKDLVELRLNESISMDIYQDKYNEIAISKEKLLAEKRTLEVTLTDEKALKKRLEGFKKLLESNKYLEEFDRAVFESIVDKIIIGGTNDEGEIDPAMITIIYKTGKKDSQDGRLFKSRRKNAKEVDEGTDNKLYPQSSDEVNNLCSYPMDNTCRVCCSAC

SEQ ID NO: 20934 - protein, 489 aa, synthetic construct
MKQIAIYIRKSVKGDENSISLEAQTEIIKHYFKGENNFIIYKDDGFSGGNTNRPAFQKLMADAVENKFDTIACYKLDRIARNTLDFLTTFNLLKEYNIDLICVEDKYDPSTPAGRLMMTLLASLAEMERENIKQRVSDSMLNLAKQGRWTGGTPPFGYKVITLDGGKYLEIEDKNNIKYIFNEFINGKSIIKLGNEFNCNKKKISRILHNITYLQSSKDASIYLKQILGYEVIGESNGYGYLPYGNYKVVNGKKIKNTDGLKIACISRHEAIIDLNTFIKVQEKLKTFEGKKAPRISTKSFLAQMVQCTCGSNMLIVLGHKKKDGSRKLYFSCPNKCGNNFATVKEIEDDTLTVLKNVDFFNKIRQNNTNLNKDNSKIKSTILKELEEKKKLLDGLVNKLALVDSSLANVLIEKMESLNIDIKNLQNKIDLLEKEEIASSYNKEDFNLKEESRKHFIEQFENMDTKERQNAIRGVINKIIWTGKNIIIS

SEQ ID NO: 20935 - protein, 534 aa, synthetic construct
MKTAAIYARRSKVVETGDSIENQIQLCTNYLKNIGINNTLIYSDEGFSGKNTERPGFVRLMNDAKQKKFDTLVCYKVDRLSRNIGDFSNLINELEKNEISFISVIEQFDTRAAMGKAMMYICSVFSQLERETISQRVCDNMYSLATNGYWLGGEFPFGFSSSRKNFTDSSGKNRSYSELIPIEKEINLVKLIFNKYIELGSLSQVEKYLLQNNIKTRRGKDWSKASIKNIISNPVYVKANDKTIEYFKSQGIKTYGEPDDIHGILIYKKRKGKSGKIRNPDEWIYAVSTHEGIIDSDSWLEVQKIAEINKYKAPALGSSHKALLSGIIRCAQCGSSMRVSYGVPNKLTKKRKHYYMCTLKHNSGKVRCASKNVDGPEVDKLVINKLKELSLDKSYLVQRLKDYKESFATSSENILSKNIQNEISKNKEQIDNLVNNITLTEDPQLVQILLDKLTKLKSKSVELTNSLNKLNDELAKQDILINNCDNIIQKLKNLSALIDDLDVPQKRTLLSSVIDKVFVNGDTGAVKIKFKSFN

SEQ ID NO: 20936 - protein, 576 aa, synthetic construct
MKKVEIIKANRSLSDRNKNNMRSILRVAAYCRVSTDSDDQLNSYNSQVSYYTDLIRKNNEWDFVDIYADEGITGTQISKRTNFQRLINDCMNGEIDMVITKSISRFARNTLDTLKYVRMLKEKNIAVYFEDEKINTLTMDGELLLVVLSSVAQQEVENISANVKKGLKMKMSRGELVGFQGCLGYDYNVDDKSILINREEAEIVRYIFNRYIEGAGGRLIGNELEQLGYKTKRGSSTWHESTILGIIKNEKYKGDVLLGKTFTLDPISKRRLENYGEEDQFYLREHHEPIVSEEIFDKAQAIRLKRSIPRGSHEVEGFKRQKYSRKYAFSCMLECAFCGGTLTRRSWHSGTNHSKVVWQCVVSTKRGKKYCEHSKGIPEKVIEDAFVESYKKLCGNNKEVLEEFLMRLSNTLNESNVEKEFLEIEKQIDVLDKKRKKLIDMRLEEIIDKESYEEKYDDLTVEIKKLSKKKQTLKASLINENTIKARLKEFRKTLERNEVLEKFDRYVFESIVDKVIVGTTNEDGTVDPYKITFVYKTGFDDKQDGNKFRNNKTLKACSKDKNDNKKECSHAKDDTC

SEQ ID NO: 20937 - protein, 537 aa, synthetic construct
MKAGLVYSYLRFSDPRQAIGSSADRQLAYAAAWSTKHNMELDASLTLKDEGLSAYHQRHVKQGALGVFLRAVDEGRIPTGSVLIVEGLDRLSRAEPLLAQAQLAQIINGGITVVTASDGREYNRASLKAQPMDLVYSLLVMIRAHEESDTKSKRVKAAIRRQCEGWQNGTYRGLIRNGKDPQWLRLSPEGWELIPERVAAVKRALELYSQGLGAGRAANVMHDEGFKLTDWGISGLQIYRMIKQPALRGVKRLTSDGEDYELEEYYPRILSDTEWAELQHLASQRFRRRGAGEIPGIITGVGLAYCGYCGTAVVAQNIMNRRRADGTIADGHRRLHCTSYSKNGGCTYGGSCSVVPVERAVLSFCSDQINLTRLMQAGDAGQTLQKQLVVARAAVTKITTQLSKVTDALLADESGAAPLAFVRKARELEAQQTAAEQKVAQLEHEAIATSGVVRPAQAERWVELAAEVEAGDYSAREKVRQLVMDTFNRIVIYMRGMQTDGRNGPFIDVQLFSRSGQHRLLRINRKNGAWVASEDWE

SEQ ID NO: 20938 - protein, 515 aa, synthetic construct
MRYDDAAIYVRVSTTKESQKFSPEHQRMDCEEKARQLSLKIREEYIYVDRDTGTSIVGRPSIQTLIEDATKGYFKTILFSSLSRFSRDTYDSLGLKRTLVDKLGLRVISLDENYDSQVDHDEFKFQIFSAVNQKLSEQISISSRRGIRQSGMKGNYLGTIAPLGYDKIKIDDRKTIVPNERASLVQLIFDMYVNQKMGEKAITKYLNKEEIPSYRGGKWGITSVERILTNEIYTGRNVFNKFTVVKVYNDINNMSDRSRKLVKRDKELWEESDKQTHEGIISEELFRKAQEVRLKRGGGKRGGVRNKVNVFAGIIKCKHCESSLNIVTSNGKKNTYRYLVCSKRRRQGETGCGNHNRIPYDDFKDALIQSLSGKLRAKIKSGKAITITKKAREDTGKLIVKLEKQIQNARKLLFEIRKQKLNDEIDDEQYEFEKEQYEQEIKQKQEQLSKMKSELERALNDTEQFKEINISLDELSDLGQFTEVDQVNLILKKLVSNITVDKANNVEIHSVLGTL

SEQ ID NO: 20939 - protein, 660 aa, synthetic construct
MRVLKDHEKLDRSEIEALIGKIRAIVYTRVSSEIQIDNYSLESQIDICVKDAKSKFDINEDEIIVLREEAESGDNPNRPMLNYILFLLEKGLGNRVIFLHPDRLSRHLHLQQQITHRIWELGCDLHFVEFDLQKGNAESMLNYNIQGSIAQYNKAKILANTKRGRKTMVANNKIPGMNRIYGYTYDKELNTLIENAEEKERYLMMVKIILEGGTCTEVAEYLAKKRYSAPKGDTWYQATISRILRNESYMGTYYHGKTEVVRIDGKKKQVPKPREEWEKIDIPQYIDEVTFERLQKTLDGNIKNSGRPSEDYLLRSIVRCGRCGAAVSSGVVTKTQNGILKYYTCTRKTKKSYSIETGLSNSTCKGSNWRVDMIDYLIWNEVLKIIGNPEPMIPELSERLSDRSRLDEIILNINIIIKDIAEKEMSRNRYIDLCGDLIITKEELLKKLQPIEKELTELKKELSVLNKNLDLNSGQNTSMPLRLTLLEKYQNIINYELQMIDMRKIVGVLVDKVVLHDDKRIEILYKFTAESKLVRNDLYVSDSVNLNKLKWVVESPPAKWSEIEHLYPQMLKMYNENLLSFEQIANATETDWWTIKQMFKAKGATLLSTKERGIKRRACDFEKIYNLHYVDGLAFTRIYKEHGLSPTYCKQVLKEKYTQV

SEQ ID NO: 20940 - protein, 452 aa, synthetic construct
MKAAIYIRVSTQEQVENYSIQAQTEKLTALCRSKDWDVYDIFIDGGYSGSNMNRPALNEMPSKLHEIDAVVVYRLDRLSRSQRDTITLIEEYFLKNNVEFVSLSETLDTSSPFGRAMIGILSVFAQLERETIRDRMVMGKIKRIEAGLPLTTAKGRTFGYDVIDTKLYINEEEAKQLRLIYDIFEEEQSITFLQKRLKKLGFKVRTYNRYNNWLTNDLYCGYVSYKDKVHVKGIHEPIISEEQFYRVQEIFARMGKNPNMNRDSASLLNNLVVCSKCGLGFVHRRKDTMSRGKKYHYRYYSCKTYKHTHELEKCGNKIWRADKLEELIIDRVNNYSFASRNVDKEDELDSLNEKLKTEHTKKKRLFDLYISGSYEVSELDAMMSDIDAQINYYEAQIEANEELKKNKKIQENLADLATVDFDSLEFREKQLYLKSLINKIYIDGEQVTIEWL

SEQ ID NO: 20941 - protein, 597 aa, synthetic construct
MNKALVALYARVSSGQQVKNGTIGSQLAAIKDRIREDGHVLPDAMLFIDDGVSGATLIRPQLERLRDYAAAGDIECLYILSPDRLARKYAYQALLMEEFSACGVEVIFICHTPGDTPEDMMLLQMQGMFAEYERAKIMERNRRGKLHGARCGNVGVLSGAPYGYRYIRRQPDGTPAQYIVNLHEASVVRKIFSWAGIERLSLGGVVRRLAEKGIESATGKPGWDRSTVWGMLKNPAYKGLAVFGKTKNCAPRPRVRAARNSADILKNGYSVIRSKPDDGIGIPVPAIINSALFLTVNEQLEENRRHARQGRRGAAYLLQGLTVCGHCRYAYYGKKVSKSAAKGGAQYSYYHCTGTDAYRFGGIRVCDNKQVRTSMLDETVWAQVIALLSEPERLKKEYEQRLTQASEHSGQTADAERLKKQENQLNVGRSRLIDSFAEGLIGKTDFEPRIRVMTLRLAELARQRVKVKQATENQHELLLLVNRVEDFAAAVTERLSTDDFLMKREILRALVKRIEIYRDEIVVVFRVNPGNDTSLEAGSDKTYGRSLPDCLRSNHSPLRRTGRLLPDFHLFHRSSFKPHLDQLYNRAINDSGSNGQQ

SEQ ID NO: 20942 - protein, 562 aa, synthetic construct
MNKALVALYARVSSGQQVKNGTIGSQLAAIKDRIREDGHVLPDAMLFIDDGVSGATLIRPQLERLRDYAAAGDIECLYILSPDRLDRKYAYQALLMEEFSACGVEVIFICHTPGDTPEDMMLLQMQGMFAEYERAKIMERNRRGKLHGARCGNVGVLSGAPYGYRYIRRQPDGTPAQYIVNLHEASVVRKIFSWAGIERLSLGGVVRRLAEKGIESATGKPGWDRSTVWGMLKNPAYKGLAVFGKTKNCAPRPRVRAARNSADILKNGYSVIRSKPDDGIGIPVPAIINSALFLTVNEQLEENRRHARQGRRGAAYLLQGLTVCGHCRYAYYGKKVSKSAAKGGAQYSYYHCTGTDAYRFGGIRVCDNKQVRTSMLDETVWAQVIALLSEPERLKKEYEQRLTQASEHSGQTADAERLKKQENQLNVGRSRLIDSFAEGLIGKTDFEPRIRVMTLRLAELARQRVKVKQATENQHELLLLVNRVEDFAAAVTERLSTDDFLMKREILRALVKRIEIYRDEIVVVFRVNPGNDTSLEAGSDKTYGRSLPDCLRSTNSSLWCSC

SEQ ID NO: 20943 - protein, 559 aa, synthetic construct
MNKALVALYARVSSGQQVKNGTIGSQLAAIKDRIREDGHVLPDAMLFIDDGVSGATLIRPQLERLRDYAAAGDIECLYILSPDRLDRKYAYQALLMEEFSACGVEVIFICHTPGDTPEDMMLLQMQGMFAEYERAKIMERNRRGKLHGARCGNVGVLSGAPYGYRYIRRQPDGTPAQYIVNLHEASVVRKIFSWAGIERLSLGGVVRRLAEKGIESATGKPGWDRSTVWGMLKNPAYKGLAVFGKTKNCAPRPRVRAARNSADILKNGYSVIRSKPDDGIGIPVPAIINSALFLTVNEQLEENRRHARQGRRGAAYLLQGLTVCGHCRYAYYGKKVSKSAAKGGAQYSYYHCTGTDAYRFGGIRVCDNKQVRTSMLDETVWAQVIALLSEPERLKKEYEQRLTQASEHSGQTADAERLKKQENQLNVGRSRLIDSFAEGLIGKTDFEPRIRVMTLRLAELARQRVKVKQATENQHELLLLVNRVEDFAAAVTERLSTDDFLMKREILRALVKRIEIYRDEIVVVFRVNPGNDTSLEAGSDKTYGRSLPDCLRSNFSLAR

SEQ ID NO: 20944 - protein, 481 aa, synthetic construct
MKTMNKVAIYVRVSTTNQVEEGYSIDEQKDKLSSYCDIKDWNVYKVYTDGGFSGSNTDRPALESLIKDAKKRKFDTVLVYKLDRLSRSQKDTLYLIEDIFIKNNIAFLSLQENFDTSTPFGKAMIGLLSVFAQLEREQIKERMQLGKLGRAKSGKSMMWAKTSYGYDYHKETGTVTINPAQALTIKFIFESYLRGRSITKLRDDLNEKYPKHVPWSYRAVRTILDNPVYCGFNQYKGEIYPGNHEPIISKEEYDKTQSELKIRQRTAAENVNPRPFQAKYILSGIAQCGYCGAPLKIMLGVKRKDGSRLKKYECHQRHPRTLRGVTTYNDNKKCDSGFYYKDKLEASVLKEISKLQDDADYLDKIFSGDNAETIDRESYKKQIEELSKKLSRLNDLYIDDRITLEELQSKSAEFISMRGTLETELENDPALRKNKRKADMRKLLNAEKVFSMDYESQKVLVRRLINKVKVTAEDIVINWKI

SEQ ID NO: 20945 - protein, 506 aa, synthetic construct
MRHVITYLRYSSAIQGAEGADSTRRQNDLFKQWLKKNSDAQVVASFNDEGLSGYKGKHLSGQFGDMLSRIESGEFSAGTILLVESIDRIGRLEHLETEALMNRILGNGIEIHTLQDGLIYTKDALADDLGISIIQRVKAYIAHQESKQKSFRVSQKWEQRAKLALAGEQRLTKMVPGWIDPDTFKLNEHAETVRLIFKLLLDGESLHNIARHLQSNGIKSFSRRKDANGFSVHSVRTILRSVTTRGTLPASQRNDRPAIPNYYEAAIDAATFNKAQEILDKNRKGRTPASDNPLTINIFKGLFRCQCGASVHPTGTKNKYAGVYRCNNHLDGRCDVQPLKRKPFDRWMIDNFLGMIDVGNDGESERKIAALQHEVEIVTARIKKATALLLEMDDIDELKIQLKELNQKRTELQTTIDNMRRKASLTDKELPQLKDIDLTTKAGRVECQLILSKHLKGLTLGKDTVIVTLQNDTEITIPTDPLPLNDGTSIFEIAEKNLLNIDTFQL

SEQ ID NO: 20946 - protein, 557 aa, synthetic construct
MSKEKIKVYLYTRVSTSIQIEGYSLEAQKSRMKAFAIYNDYEIVGEYEDAGKSGKSIEGRIQFNRMMEDIKSGKDGVSFVLVFKLSRFARNAADVLSTLQIMQDYGVNLICVEDGIDSSKDAGKLMISVLSAVAEIERENIRIQTMEGRIQKAREGKWNGGFAPYGYKLEDGKLFINEEEAIAIRTIFDQYVNTTIGANGISKYLENHGIRKIPRQNGKNPLFDAGLIRKILKNPVYNGKIAFGRRTLEKVHGTRNEYKQVEQDEYLISEGIHEAIVSDEVWQAAQVKLKSQAKKYEHVNKGKDTRTHLLSGIVKCPICGVGMFGNKCIKKKKDGTKYKDFYYYGCKHRQMIRGHKCTFRKQIREELLDDAVAEVIVKIVSNPKFASMMQEKINMKVDTSEIETEIDNYQKELRKCHSTKFKLIEEIDNLDVEDKHYKRRKQDLDDRLYRMYDKIDELESSLIDAKAKKQTIEAEKLTGDNIYKVLIYFDKLYKVMNDVERRQLITALISEIQVYEEKQPNGQWLKSITFKLPIIEENLNIGLDNDEHVESISMFIK

SEQ ID NO: 20947 - protein, 449 aa, synthetic construct
MKQAMGYLRQSTTKQQSLAAQKQTIKALAEKHNIQHITFYSDKQSGRTDKRNGYQQITELIQQGQCDVLCCYRLNRLHRNLKNTLKLMKLCQKYHVHILSVHDGYFDMDKAFDRLKLNIFISLAELESDNIGEQVKNGLKEKAKQGKLITTHAPFGYHYHNGTFTIDTVKAPTVKAVFNYYLQGYGYKKIAQYLEADDKFINRKPYQVRNIILNPNYCGRIINQYGQYENMFPAIVSTTIYEEAQVTRTQKQVKHKPSENQLKQKIKCPYCHSTLTNMTVRKTDHSLRYYVCPQNMNNARFVCEFKGINAQELETSVLAICQDFFQNQQLYSKINHTIQQRLKRQRDVETKTTLNHEQLIEKLAQGKIDAETFREQTQSLHQQSKPISSISAYQIRKAFQNIIQQRFTLNMLYPYIDEINISKNKTLAGIYFKNEPLNIVNQTTQSSIA

SEQ ID NO: 20948 - protein, 542 aa, synthetic construct
MQQLKQKRVSIYVRVSTEIQNTEGYSINGQINQIRDYCQFHHFEVTDIYADRGISGKSMNRPELQRMLKDANEGHIDCVMVYKTNRLARNTSDLLKIVEDLHKQNVEFFSLSERMEVNTSSGKLMLQILASFSEFERNNIVENVFMGQTRRAQEGYYQGNLPLGYDKIPDSKHELMINQHEANIVKYIFESYAKGHGYRKIANALNHKGYVTKKGNPFSISAITYILSNPFYIGKIQFAKYKDWNEKRRKGLNDNPVIAEGKHAPIISQELWDKVQSRKKQVSQKPQVHGKGTNLLTSLIFCEKCGATYAASTTTNTFKDGTKKRIRYYSCSNFRNKGSKVCSENSVRADVIEKYVMDQILEIVKSDKVLKQVVERVNQENQVDVAALNHDIAYKQQQFDEINTKLKNLIQTIEDNPDLTSALKPTIHQYETQLNNITNQMNQLKQQQNQEKLSYDTKQIAALLQRIFQNIESMDKSQLKALYLTVIDRIDIRKDENHKKQFYVTLKLNNEIIKQLFNNTNLDEVLLNTSSLFLPQTLYFQI

SEQ ID NO: 20949 - protein, 541 aa, synthetic construct
MKQLKKKRIGLYARVSTEMQTDGYSIHGQLNQLTEYCQFQGYEVVDEYTDRGISGKTTQRPELQRMLKDAKGGKLDGIMVYNTTRLARNTSDLLNIVEELYEINVEFFSLTEKIEIASSTGKLMLQILASFAEFERNVIVENVFNGQRQRAIEGYYQGNLPLGYDKVPESKKELMINQHEANIVKYIFESYAKGHGYRKIANALNHKGYVTKKRKPFSISSITYIISNPFYIGKIQFAKYRHWSDKRRKGLNEEPIIADGKHAPIIDKALWDKVQFKRQESRKKPQVHGKGTNLLTGIVKCPKCGAAMAASNTTNTLKDGTKKRIRYYSCSNFRNKGSKVCSANSVRADVLEKYVMDQILEIIKSEKVLKQLVEKVNENSQIDVSSLNHDIAYKQSQGEEIKAKMHTLTKTIKDSPDLDSVLKPTILSYQDELNQINNQIHQLEQDKQAEAPHYDADMIANILQTIFKDIDKLEKSQLKSLYLTVIDRIDIRRDEQHKKQFYVTLKLNNDIIKQLFNNHPLDEVLLSTSSLFLSQTLYLTI

SEQ ID NO: 20950 - protein, 520 aa, synthetic construct
MKKVITIQATPSIIRSSSDDFSLKKRRVAGYARVSTDHEDQATSYESQMRYYSEYISGRDDWKFVKMYSDEGISGTNTKLRTGFKAMVEDALNGKIDLIITKSVSRFARNTVDSLTTVRQLKEVGVEIYFEKENIWTLDSKGELLITIMSSLAQEESRSISENVTWGLRKQFAEGKVHFPYTNVLGFKAGEDGAIVVDQDEAKTVRYIFQQALIGKSPYHIAKDLTEQGIPSPSGKSHWNATTIKRMLRNEKYKGDALLQKTYTIDFLTKKKNINRGELPQYYVENNHEAIVDRETFDAVQQVLDNKGRKLSTTIFSSKLVCGDCGHFFGSKVWHSTSKYRRVIYRCNEKYNGSSKCSTPHVTEEEVKQWFVLAVNQVIDNRFEVIDNLSVLLSIGSLEVIDEQIKVLETEAEVVSQLVANLVSENAIIRQDQDKYLKKYNQLTSKYEGIVQDIESLELQRMKKSKRNKELQDFIGTLEKLGKVLTDFDEFLWESLVESVMINEDKGAKFKFKNGAVVAI

SEQ ID NO: 20951 - protein, 411 aa, synthetic construct
MRTVRRIQPIKSPCKPRFKVAAYARVSDSRLHHSLSTQISYYNRLIQAHPDWELVGIYYDEGISGKEQSNRQGFQNLIKDCDDGKIDRIVTKSIARFGRNTVELLTTVRQLRLKNIGVTFEKENIDSLSSEGELMLTLLASVAQEESQNMSENIKWRVQKKFEKGIPHTPQDMYGYRWDGEKYQIEPNEAKVIRKVFKWYLEGDSVQQIVDKLNQEQVLTRLGNPFTVASIREFFKQEAYFGRLVLQKTYRESFSRNPKRNKGQRNKYIIENAHEPIVTKEYFDLVLHEKERRYQLMSQERHLNKGIFRDKISCSECGCLMIVKVDSKQVNKTVRYYCRTRNRFGASSCSCRTLGEKRLLASFKSKLGIVPDKEWVENNIKHIDYDFGQRIIWVIPVKGRKYPIEIREGRY

SEQ ID NO: 20952 - protein, 550 aa, synthetic construct
MRIKPETEKIVGYVRVSTDDQADHRTSLDSQEAQIRADAEAKGQMVVRIFVEAGESGQDARRPEFNRLLDFVEDPANNIHEVKIFSLSRLARSMETQVQTFARLKRAKVRLHSLTQNFSDDAMGGMLRNLIASFDEYFALETAKHTRRTMRRNAEEGFFNGGPVPFGYESQTVEMRGTKAKKKLFIHEGNARTVRLIVDLATVGVGNGPMGARAIAEWLNERGYTLANGNKFNNSNVAGILGRCHYRGYYFDMTRDEQGGQAPEDQWVRVECPQIIPEETMDAVAALRAVRRPTVTPPRTVNGPTLLTKVARCGICGEGMTIRTGKSGSYSYYSCNGKVSAGAARCACPHVREERLDAVVLGALERQIFAPERLRMLLSEMLEASAEADERRARDLTQARLHKTQAETRLRNLYEALADGHASLKEATFTGLLAETNGRIASATATIDTLERQIGKATKRVTPEMVDAFGELVRERLRGEDPALRKAYVAFFVSEVAVDQEEIRISGSSRLLERAVGRAEPAIMGMVPIFDRKWCPEEDSNLHDLAIAST

SEQ ID NO: 20953 - protein, 558 aa, synthetic construct
MTKLYSYIRFSSMRQSDGSSYERQIRMAKEIADRYNLELVNDYQDLGVSAFKGANSKTGALSRFLDEIGRSIPVGSWLFIENLDRLSRQDIISAQELFLSIIRRGITIVTGMDNKIYSIETVTANPMDLMFSILLFIRGNEESQTKRNRTNSSALLKIKAHQQNPQNPAVAIEEIGKNMWWTDTTSGRVLPHPVYFPVLQKIVQLRQEGHSAGVILDYLNEHHEPPAPTSNKKHGKWSRAMVSRLFNTKALIGVKTVNVDGVEYELRDYYPRVLSDSEFYFLRKNIIKKAWDYSHVKEKVIPLLSGIGVLRCVHCGATMVKQTAANGKREQYRYCCDGRKSGRTDCPYPNWGFRAVTLEGAVLQLLADKIWIAEDKTNPIPEIQIKIDEISRKIDNLINLSAMTGATKELANQITDLNSQREALHEEIRLFEREMYSVDSQGWDKLAQFDLSDVQNEERLKVRMKIKGALHEIECSRIDSKKNLFVLVYLDGLRQRLVIENNRGLKKGQIFVDLKTINDRQILESAGMVLHPCIEMIIDADWKAPEEIPGLLSEEFGI

SEQ ID NO: 20954 - protein, 559 aa, synthetic construct
MKTKLYSYIRFSSMRQNDGSSYERQIRMAREVAAKYDLELVNDYQDLGVSAFKGANSKTGALSRFLDAIGRSVPVGSWLFIENLDRLSRADIVSAQELFLSIIRRGITIVTGMDNKIYSLDTVTANPMDLMFSILLFIRGNEESQTKRNRTNSSALIKIKSHQENPQNPAVAIEEVGKNMWWTDTTSGYVLPHPTYFPVVQEIVELRKNGRSTAEILDHLNETYAPPPAVSNKKHSKWSRAMVERLFHTRALIGIKEVSVDGVNYELKDYYPRVIDDATFYHLKKNIGARAWNFGDKEEVKPIPLLSGIGLLKCDHCGCAMVKVKGTNKRSDQYRYTCDATRSRRLDCEHPNWSFRGDQLEKAVLQLLADKIWIAEDKANPVPALKVQVDEISRKIDNLIALSAMTGATKELAEQITTLNSERETLYNQIKMAEEEMYSVDSQGWEKLAEFDLEDVYNEERLKVRFKIKQALKRIGCSRIDRNKNLFVLEYIDGKTQRVVIENSRGTRKGRIFIDLKTINDRQILESNGLVLHPCLDMLTDKNWKPEEEIPGPLQEFGI

SEQ ID NO: 20955 - protein, 412 aa, synthetic construct
MKKAIAYMRFSSPGQMSGDSLNRQRRLIAEWLKVNSDYYLDTITYEDLGLSAFKGKYAQSGAFSEFLDAIEHGYILPGTTLLVESLDRLSREKVGEAIERLKLILNHGIDVITLCDNTVYNIDSLNDPYSLIKAILIAQRANEESEIKSSRVKLSWKKKRQDALESGTIMTASCPRWLSLDDKRTAFIPDPDRVKTIELIFKLRMERRSLNAIAKYLNDHAVKNFSGKESAWGPSVIEKLLANKALIGICVPSYRARGKGISEIAGYYPRVISDDLFYAVQEIRLAPFGISNSSKNPMLINLLRTVMKCEACGNTMIVHVVSGSLHGYYVCPMRRLHRCGRPSIKRDLVDYNIINELLFNCSKIQPVENKKDANETLELKIIELHMKINNLIAALSVAPEVTAIAEKNQSIR

SEQ ID NO: 20956 - protein, 553 aa, synthetic construct
MTTIAYSYTRLSTEKQLKGHGEERQRKAIEQACLEHGWTLSEQTFSDLGVSAWKGLNRQSGALSEFLTLARNGSIEAGSVLIVENGDRLSREGVQKALRLLLELLDLGVHVYTLSDNKLYTDDGQNAMLDLMQWMMVAQRAYEESAMKSVRILAVKDKAKELMRQGVIVTRKCPAWLHVSADKSHFELIDERVKVVQMVFKLYSEGYSTKPIALKLNEQGIPYWGSSKTWTYITVRNLLKNRAVIGELQPLKRLNGKDVPDGEVIKDYYPSIISKELYARCLTLRTSKATSSGRLSNNAMANLFRGLLKCQCGSGMALNSSIVKGKRYSSLRCSQLRSADCKSKNWHYGNVESIVMIALHNIDWELNSTQDSAQSIRDLEQRIELTKAELVDVQKMAESAEEALLLAPSSARLAKRLAECETREAELERLVESLNQELTTEKAKSLVRENELETIQQVLEDVANDDGARFKANALLNRKLKSITFSQADSYYTQQLTEFSNTPMHGVITIELNNGKLIEIEVCEGYRSSFVREDDGSFTEIELDINRYQRRVS

SEQ ID NO: 20957 - protein, 974 aa, synthetic construct
MSDKIRKYVLPNLPYLFVFWFFSKIGTAYRIAPGTDFGTKLMGMLDTFPKAFETYWPGLGGIDLLVGLAGAAGVYLLIQSKIRQAKKFRRDAEYGTARFGTKEDIKPFVDPKFQNNVILTGTEFLTMNTRPKIPANARNLNACVIGSSGSGKTRFWLTPQLLQAHSSYVVVDPKGGTLDQCGRFLQREKYRVRVFNSIDFSKSMHYNPLAYIKTESDVLKFVTALIANTKDDGKEGDEFWTKAETLLYCALVAYIVFEGPEEERNMNTLVEMINSMEVREDDETFKNAVDYMFDGLERRSPQHFAVRQYKKYKLASGVVCSKRLLNQAVGKSLRTHNLKPKKGAQVMRKNEKITALYERLSRDDFGKDDDQQRESNSISNQKAMLEEFAARQGFTNIVHFTDDGISGTCFDRPGFLAMMKEVEAGNVEYLCIKDMSRMGRDYLKVGQIMEILRQRGVRLIAINDGVDSAKGDDDFTPFRNIMNEYYARDTSRKIRSTFQSKGKSGKHLTGTVIYGYLWNEARDQWLVDPEAADVVKRIFAMTIDGYGPYQIASKLKSEKVLIPSAYLAQHGEGVNKNKTFKDVYGWGSSTICNILEKREYLGHTINFKTRKHFKDKKSHYVPEDEWTIFENTHEPIIDQQTFDLVQKIRGNVRRYPDGWGEAAPLTGLLYCADCGGKMYVHRTNNGKRISQYTCSQYSKVPVGKLCKTQHRINEDVVLSLVSEMLKAIAEYAKHDRAEFVRVVQEAQSSQQTAEVKKQRIRLATAKQRVSELEVLLCKIYEDNILGKLSDSRYATLDAQYEKEQTELTAEISALEKAVKSYEKHEKDADRFIALIDKYENFDKLTIAMLNEFIEKILVHERDRKGSIQTTQEVEIYFNFVGRFVPPAFGEVELTPEELEEIRKREERKDRLHQNYLKRKASGAQKRYEDKIKGRKKAEIEAKKAAIRAEDIAKGVFVPVSSLPQREPMKGVQTA

SEQ ID NO: 20958 - protein, 537 aa, synthetic construct
MKQQIYNTALYLRLSRDDELQGESSSITTQRSMLRLYAKEHHLNVIDEYIDDGWSGTNFERPSFQRMIEDIEAGKINCVVTKDLSRLGRNYIMTGQYTELYFPSHNVRYIAIDDGVDSEKGESEIAPFKNIINEWVARDTSRKVKSAFKTKFAEGAYYGAYAPLGYKKHPDIKGKLLVDEETKWIVEKIFSLAYQGYGSAKITKILREEKVPTASWLNFTRYGTFAHIFEGKPESKRYEWTIAHVKAILKSEVYIGNSVHNRQSTVSFKSKKKVRKPESEWFRVENTHEPIIDKEVFYRVQEQIKLRRRQTKEKATPIFAGLVKCADCGWSMRFATNKANKTPYSYYACSYYGQFGKGTCSMHYIRYDVLYQAVLERLQYWAKAVQQDEEKVLNKIQKAGNAERIREKKKKASALKKAENRQNEIDRLFTKMYEDRACEKITERNFIMLSGKYQKEQIELEQQITNLREELSKMEQDMIGAEKWIELIKEYSVPKELTAPLLNAMIEKILIHEATTNEENERIQEIEIYYRFIGKVD

SEQ ID NO: 20959 - protein, 525 aa, synthetic construct
MGKVRIIPAHQQKGNSVQPQQSRQPFEQLRVAAYCRVSTDYDEQASSYETQVAHYKELIQKEPTWEFAGIYADDGISGTNTKKREQFNQMIAACKAGKIDLIVTKSISRFARNTIDCLKYIRNLKAINVAIFFEKENINTMDAKGEVLITIMASLAQQESESLSQNVKMGIQYRYQQGKVFVNHNHFLGYTKDAQGNLVIEPAEAQVIKRIFYSYLDGMTMKQIADSLKADGVLTGGKTINWQSSGVARILKNEKYMGDALLQKTYTVDFLNKKRVKNQGIMPQYYVENDHPAIIPKSVFMQVQQIIKRRRNGITTKNGKHRRINGKYCFSQKVFCGKCGDILQRNMWYRPEKVAVWRCASRIRRSKTGRRCMIRNVKEPLLKEATVDAFNQLIESHDLASKQIKANIMKVIKSSKGPTLDQLDKQLEEVQMKLIQAANQHQDCDALTQQIMDLRKQKEIVQSRETINEVKLHIIDEINEFADLHKYGLLEFDEGLVQHLVEKITIFQRYMEFTFKDGEVIKINK

SEQ ID NO: 20960 - protein, 553 aa, synthetic construct
MSTITKIQGYQHDVKQLRVAAYCRVSTDNFEQLESLENQRAHYQKYINNHPNWELAKIYYDEGISGTKMTKRNALKELLTDCHNHRIDLVVTKSISRLSRNTTDCLQIVRELQQLNIPIIFEKEHINTGAMASELFLSILSSIAQDESHSTAGNLRWAIRKRFASGKFHVSSAPYGYSIEDGNLVINYTEAKTVRQIFQRFLSGTSASQIAKELNQKQVSTKRGGQWRSNTVINILRNSNYTGDMLCQKTYRDDQYHRHFNQGELAQYLIEDHHPSLINHENFNRVQVLLKEAVKKRHIETGSHKYQQHYLFSGKIICGQCGTIFKRQTRPHKIYWACQQHLRSAQQCPTKAVSEASLKAAFCNMINKLVYSKKFLLQPLLEGLKEEANVNSDGQLISLTKQIKANDHKAETLTELMHAGLLDKAIYVNQTARLEQDTYQCQEKIKQLNGQNTDSANDFENVRTLLRWCHQGKQLTEFDEGVFQEFVQQIVVNSSNKATFILKCGLKLPEKLNKNAAIDGHFYRDIIKQRYNDPIKQTEYLYSIIESEGDLIG

SEQ ID NO: 20961 - protein, 523 aa, synthetic construct
MRQVITYLRFSSKPQERGDSIRRQKGLFERWLKDNPDAKVVDEFSDEGASAYHGHHLKGDFGRMLQNIQDGKYLSGQTVLLVESETRLNRQKARNTENLVDLITGKGVDVICLESGKIYTSTNIDDLDTSIQLKIAAHIAHQQSKEKSIKVSAAWEHRAQLALEGKQQLTKNVPGWIDPDTRKLNEHSSTVVTIFDLLLSGESLHNIARYLQANNIKSFSRREKANGFSVHSVRTILRSESTVGTLAASKRNDRPAIPNYYEPAIDVATFNKAQEILSKNRVGRAPASDNPITINLFKGIIRCQCGASVHPTGVKATYQGVYRCNNVPDGRCNVPTIKRKPFDKWMLDNIIGFLERDDGNNTDKRKAEIEYQISLVTSKLKKATTLLLELDDVTELKEQVKELNIQRSNLQSELDELNQRETLSDKPLHHLSEIDLTTKAGRVEAQLILSKFVQSIELQREMIIITLRNGAVIGKSRDLSPALSQDLMKQVVSSSSPRDIDMFSVITSDEEFRKSGKPVTKRS

SEQ ID NO: 20962 - protein, 506 aa, synthetic construct
MRTVITYLRFSSATQGAEGADSTRRQNELFKQWLRKNSDAQVVASFSDEGLSGYKGKHLTGQFGDMLARIEAGEFPAGTILLVESIDRIGRLEHLETEALMNRILGNGIEIHTLQDGLIYTKDALADDLGISIIQRVKAYIAHQESKQKSFRVSQKWGQRAKLALAGEQRLTKMVPGWIDPDTFKLNEHAETVRLIFKLLLSGESLHNIARHLQANNISSFSRRKDANGFSVHSVRTILRSVTTRGTLPASQRNDRPAIPNYYEAAIDAATFNKAQEILDKNRKGRTPASDNPLTINIFKGLFRCQCGASVHPTGTKNKYAGVYRCNNHLDGRCDVPPLKRKPFDKWMIDNFLGMIDVGNDGEAEGKIASLQHEVEIVTARIKKATALLLEMDDIDELKIQLKELNQKRTELQTTIDSMRRKASLTDKELPQLKDIDLTTKAGRVECQLILSKHLKGLTLGKDSVTVTLQNDTEITIPTNPLPLNDGTSIFEIADKELLDIDAYQL

SEQ ID NO: 20963 - protein, 547 aa, synthetic construct
MKLLVTYIRWSTKEQDSGDSLRRQTNLIDAFYSKHKNDYYLLPAHRYVDKGKSGFHQQHKNQGSDFRRMFENVMSGVIPEGSLIVVENFDRFSRADIDTAIDDVRQILRKGVSILTLGDGELYDKSALTDPVKLIKHIIIAERAHQESLVKQKRIAQVWNHKTQLARELKKPMGKQAPGWLELSEDGSHYIVDEDKASLVNIIYDKRLSGMSMFAICKWLNEQGYPTINQRKVRISKTKKPDGNWSALSVKHILTSRSVLGYLPAKISTEDRKTVLREEIEGFYPRIVTDSKFYAVQQLLEETGKGKTSSGEHWLYVNILKGLIRCKCGLVMTPTGIRKPVYQGTYRCNGNKESRCSYGTVSRKLLDTQLCSRLFSKLSQLHDEATDTAKLDELQRRLNTVDSELEKLTETLIQLPNITQIQEALRVKQEEKDELIVQLSREKARVKSVSSLDLSGLDMESVEGRTEAQIIIKRLVKEIVVSGNEKLVDIYLHNGNMIRGFPLDGKDDHTLTLEEATDEMQSLDDMLIFGEPVTRIYPAGDMEEVDA

SEQ ID NO: 20964 - protein, 507 aa, synthetic construct
MKRVISYIRFSSEKQAKGDSLRRQSKMVNDWLKAHPEYYLDQDLSFRDLGVSGFTGKHLKGGLGDFLTAIEKGLVKAGDTLLIESLDRLSRQDIDIASELLRRILRAGVDVVTLSDGEHYTRESLRDPLALIKSILIMQRAHEESLRKAERIQAAWDAKKEAAKAGIKVSKRCPAWLRLNDDRKSFSVIPDKVETVKRCFQLRLEGKSIWEIVRTLNAEGHQSMSQYKPGKFGQTSVQDLLKNRSVIGYFTPKGCEEISGYYPAIIDETTFYKVQQLSHYRYGRKPVSDKPLSVNLFKGVIRCSECGHALIITGFSDTRNGIYRCPLRNENRCSAKGLSRKQTDGTLLALLSRLDRFDSDTTNTIDTLKLHREHISSNIEKLVQLSLEIEDLNAITSKLKQLKGELSQVDADIEKETQRLKSIDVGCLSDCDLTTKSGRIEAQLIIKSAVKEVVLNTAKRRCKVTFHNGKVIDLPITENPSEDVTEAIQSLSEVTERGLIDVDEVII

SEQ ID NO: 20965 - protein, 538 aa, synthetic construct
MTNQSTNNLKITALYVRLSNDDEREGESNSIVNQKKMLSKYASDHNLRKTTFYIDDGVSGTTFNRKGFQAMITDIEAGIVGTVVVKDMSRFGRDYLQVGMYTDIMFPEHDIHFIAINDGVDSEQGDNEFTPFRNIINEWYAKDTSKKIRAVFKAKGLSGVPLTANPPYGYIKDPNNQTQWLVDDYSAMVVRRMFQLTMEGYGPTQIAKKFQAEKILVPTHYAISQGRKTNTVPSQSPYYWSDRTIAKLLEKPEYLGHTVNFRTTRKSYKDKRKIERDKKDWVIFENTHEAIIEQSVFDTVQELRKHKRRLTKQKELPLFSGLLFCADCGGKLYFCRGKGVTRNQENYICSSYRRRTTECTSHYIRSVVLEEVITNNLRKTMTYIQANGKSFFCDVLKGDQQAKKKEAQNQQKQLHDAQKRILELDAIFPQLYEDMVSGRINSERFDKLSSNYEEEQVLLKQQVVDISKEIQTELDVNVYIRELRKFVHKHVNFDSLTPELLHEMIDKIIVHTGKKIEVHYKFGLGELGNLVDEHIIKK

SEQ ID NO: 20966 - protein, 452 aa, synthetic construct
MKAAIYIRVSTQEQIENYSIQAQTEKLTALCRSKDWDVYDIFIDGGYSGSNMNRPALNEMLSKLHEIDAVVVYRLDRLSRSQRDTITLIEEYFLKNNVEFVSLSETLDTSSPFGRAMIGILSVFAQLERETIRDRMVMGKIKRIEAGLPLTTAKGRTFGYDVIDTKLYINEEEAKQLQMIYDIFEEEKSITTLQKRLKKLGFKVKSYSSYNNWLTNDLYCGYVSYADKVHTKGVHEPIVSEEQFYRVQEIFSRMGKNPNMNRDSASLLNNLVVCGKCGLGYVHRRKDTVSRGKKYHYRYYSCKTYKHTHELEKCGNKIWRADKLEELIIDRVNNYSFASRNVDKEDELDNLNEKLKTEHAKKKRLFDLYISGSYEVSELDVMMADIDAQINYYEAQIEANEELKKNKKIQKNLADLATVDFDSLEFREKQLYLKSLINKIYIDGEQVTIEWL

SEQ ID NO: 20967 - protein, 527 aa, synthetic construct
MARTVTAIPATKRRYTGQALDQPTIRKVAGYARVSTDHEDQVTSYQAQVDYYTRYIASHAGWQLVDVYTDEGITGTNTKQREGFKTMIAHALDGKIDLIITKSVSRFARNTVDSLTTVRKLKDAGVEVYFEKENIWTFDAKGELLITIMSSLAQEEARSISENVTWGHRKRFADGKVTVPFSSLLGYDKGEDGNLVINPDQAVTVRLIYRLFLEGKSMAGIKRHLEKHGHTTAQGRTTWTITGIRNILTNEKYKGDALLQKTYIADFLTKKQVKNQGEIPQYYVTGNHEPIIAPQVWDFVQTELADVRKGRRSSSRTREFSGKIKCGHCGAWYGSKTWHAGTKYEKRIWRCNHKYSQAEKCPTPHLTDQQIKDTFSQALHQLAAQTQATVDVDALVLARLDTRELETQESLLAAQIETAAAELDKLIATNSRQPLDQDEYNKRFQTLADHHTNLLNQHQDVAGQITDRQSRRAAYEHYKTQLADLKTGHDATYTPFRWHTLLGHAEVDENGTITYAFRDGKRLGLLA

SEQ ID NO: 20968 - protein, 498 aa, synthetic construct
MKKIERITPPQAGQQLKKVAAYARISAETERTPTSLSAQVSHYSALIQSTPGWQYAGVYADSGISGTTTNRPRFQDMLSAARDGQIDLILTKSISRFARNTVDLLETVRELKELNVEVYFEKENISSLSADGELMLTLLASFAQAESEQISNNVKWRVWKGFEEGKANGFHLYGYTDSADATDVEIIEDEAAVVRWIFDQYMKQVSCEKMAAQLINDNRVPHLADNKAPGEWVRHILKNPAYTGDLLLGRWATPEGKPGRAVPNTGQHPKYLVKNAIPAIIDHDTFQKVQEEIAQRRELGARANWSIPTTCFTSVIKCGRCGMSYSRSGKRSTNGNINYVWLCRTKRNGPKRSKGRTCDNKMIPEPTLQEVCCEVLNIDQFDPDTFSQRVKHIEIPGPNLITFHLADGTIIEREWQSNQRAKSWTTERRKEWGEYQKQRWTDDMRAKRGEQTRRRATPQRRAEHSQKMRQWYANPENKAKHQAIMADIRKRKKSERDA

SEQ ID NO: 20969 - protein, 507 aa, synthetic construct
MKRVISYIRFSSERQAKGDSLRRQSKMVTDWLKAHPEYYLDQDLSFRDLGVSGFTGKHLKGGLGDFLTAIEKGLVKAGDTLLIESLDRLSRQDIDIASELLRRILRAGVDVVTLSDGEHYTKESLKDPLALIKSILIMQRAHEESLRKAERIQAAWDAKKEAAKAGIKVSKRCPAWLKLNDDRKSFSVIPEKVETVKRCFQLRLEGKSIWEIVRTLNAEGHRSMNQYKPGKFGQTSVQDLLKNRSVIGYFTPKGCEEISGYYPAIIDETTFYKVQQLSHSRYGRKPVSDKPLSVNLFKGVIRCSECGHALIITGFSDTRNGIYRCPLRNENRCSAKGLSRKQTDGTLLTLLSRLDRFDSDTTNTVDTLKLHREHISSNIEKLVQLSLEIEDLNAITNKLKQLKNELSQVDADIEKETQRLKSIDVGCLSDCDLTTKAGRIEAQLIIKSAVKEVVLNTAKRRCKVTFHNGKVIDLPITENPSEDVTEAIQSLSEVTERGLIDVDEVII

SEQ ID NO: 20970 - protein, 559 aa, synthetic construct
MKTKLYSYIRFSSMRQNDGSSYERQIRMAREIAVKYDLELVNDYQDLGVSAFKGANSKTGALSRFLDAIGRSVPVGSWLFIENLDRLSRADIVSAQELFLSIIRRGITIVTGMDNKIYALDTVTANPMDLMFSILLFIRGNEESQTKRNRTNSSALIKIKAHQENPQNPAVAIEEIGKNMWWTDTTSGYVLPHPVFFPIVQEVVELRRNGRSTAEILDHLNATYTPPPAASHKRHSNWSRAMIERLFHTRALIGIKEISVDGVKYELKDYYPRVLDDAEFYHLKKSIGVRACNFGDKEEAKPIPLLSGVGLLKCEHCGSAMVKVKGTNRRPNQYRYSCDAMRSSRIECVHTNWSFRGDQLEKAVLQLLADKIWIAEDKANPVPALKVQIDEISRKIDNLITLSAMTGATKELADQITTLNSERETLYNQLKMAEEEMYSVDSQGWEKLAEFDLEDVYNEDRIKVRFKIKQALKRIGCSRIDKYKNLFVLEYIDGKTQRVVIENSRGPRKGRIFVDLKTINDRQILESNGLVLHPCLDMLTDKNWKPEEEIPGPLQEFGI

SEQ ID NO: 20971 - protein, 452 aa, synthetic construct
MKAAIYIRVSTQEQIENYSIQAQTEKLTALCRSKDWDVYDIFIDGGYSGSNMNRPALNEMLSKLHEIDAVVVYRLDRLSRSQRDTITLIEEYFLKNNVEFVSLSETLDTSSPFGRAMIGILSVFAQLERETIRDRMVMGKIKRIEAGLPLTTAKGRTFGYDVIDTKLYINEEEAKQLQMIYDIFEEEKSITSLQKRLKKLGFKVKSYSSYNNWLTNDLYCGYVSYADKVHTKGVHEPIISEEQFYRVQEIFSRMGKNPNMNRDSASLLNNLVVCGKCGFGFVHRRKDTVSRGKKYHYRYYSCKTYKHTHELEKCGNKIWRADKLEELIIDRVNNYSFASRNVDKEDELDNLNEKLKTEHTKKKRLFDLYISGSYEVSELDAMMADIDAQINYYEAQIEANEELKKNKKIQENLADLATVDFDSLEFREKQLYLKSLINKIYIDGEQVTIEWL

SEQ ID NO: 20972 - protein, 520 aa, synthetic construct
MRQQLRAIVGSRVSHLSDQVETTSKVSHLAQRAEGERWAKSRGYEVVGAFEDLGVSAGRTTPFERPDLGKWLAPERLHEWDVLVFSKIDRAFRSTSDCVDFARWAEGNRKIIAFSGDGLVLDYLNPKSDSLDQMMSELFIYIGSFFAQLELNRFKTRATDRISHLRMTDRVSHGVPPLGFRTVPHPSGQGKALERDPEGYALLHEMKDKLLYENYSITALVKWLHDPRCLANKEIDPSTKRSRPTHVTNCSCRQTNAASARGGDKWWSATTVRRVLTSERTQGIRMSGGNPVLDSQGMPVRLAKPTFTDDEWIQIQQVLNRRSESGKARQMTPNPLAGIGYCVCGYALCLHRRKSSAGTLHTYVRCGQGCRGAWKLADVDELLDGAFLASYGDEEMTRSVFVPGEDRSEELAGIERSITRLRWESDNDLVDDEQLYQTRMGSLLTRKRDIGQIVVPARWERRGTGKTYRELWADPETDRRQVMRDARIRLVLHFVPKGSDAPFVRRAEFQDLWHSEQGSS

SEQ ID NO: 20973 - protein, 453 aa, synthetic construct
MEGKSLGVQRQLEDCRKLAAERGWVVGHEYVDNDISAYSGKARPGYEAMCSDLAAGVRDAVIVYNLDRLHRRPVELEEFVALCEAAGVNQVATVTADIDLGNDDGLFMARIFAAFAAKESGRKSARMKRKYEQKAAQGLPHGPNRPFGYDDDKITIRDAEAEVVRQLVVRVIAGESVNSLTAWLNETDVKPVRGGRWASTAVRNIVSSPRIAGLRAYKGEVVGEAAWEPIIPVAQRDQVLAALSVRSWNRKRSPRKYLLSGLCRCGRCQSRMFSAARLEAGAHKRRYVCSSSPDHGGCGRMTVVADPLEKLIADAVLTRLDSKVLADALAGKVRANPDTAALSAEVEQAQARLDELTGLYSSGAITAREWIMARDPITDTISRLRREIADTADTGPLAELAGKGSVLRAQWDDLGLDRCHAIIRAVVDHVVIKPGKPGARGLDMGRIDPIWRM

SEQ ID NO: 20974 - protein, 545 aa, synthetic construct
METTPTKRVALYIRVSTQEQALEGHSIQAQEQNGRQFAERMGYEVVEVYADEGISGKSTKNRFAYQRMMSDARNHRFDLLVIWKLTRLGRNMLDVLQTVEELLRYDVGLHSISEQFDVTTSTGKLMLQLLGSFGEFERNQIAENVQMSMQSLVKDKKRYAGGRRLGYVSGIDTNGQKQLVIEPEEAKIVRLIYAKYLGGAGYRAIANFLNRQGYQTVKKNAFSTTAVKNILRNKIYAGYLEYARYINWETKRRKGKNPKPILVKGTHEPIISEEDYQKVQERLALEGKQPKWNHTGENVLTGLLRCPECGAPMAASNVTNTLKDGTKKRIRYYSCSVFRNKGASVCHANSIRAEQAETFVADRLKEIVKLPEVLPRLVAALNEEIVRQSQPLEQELVVLLERKEELKNKIEKWEVALEDSPELFPMLKDRLDELTEKRRQLHIRENEILGIFQQQGEPIQVKDVQRILTSLDRFLAQSEKKQVKALYRTFIEKITFDPNHKEMLEITMKFTPAVVQQLNEQYQIAVSKTKDTAIFVLKTPFTLTI

SEQ ID NO: 20975 - protein, 515 aa, synthetic construct
MKTAIYLRKSRADLEAEARGEGETLAKHRSTLLKIAKEMNLNVLAVREEIVSGESLVKRPEMLALLEEIEDNKYDVVLCMDMDRLGRGGMKEQGIILETFKRSNTKIMTPRKTYDLNDEWDEEYSEFEAFMARKELKIITRRMQRGRVASVEAGNYLGTHAPFGYDIHRLNKRERTLTINSEEASVVRMIFDWYANEDMGANAIRSKLNDLGYKSKLGNEWNPYSILDILKNNVYIGKVTWQKRKEVKRPDAVKRSCARQDKSDWIIADGKHEPIIPESLFEQVQEKLNSRYHIPYNTNGIKNPLAGIIKCAKCGYSMVQRYPKNRKETMDCKHRGCENKSSYTELIEKRLLEALKEWYINYKADFEKHKQDDKLKETQVIQMNEAALRKLEKELVDVQKQKNNLHDLLERGVYTVDMFLERSNVVSDRITEITSTMENLKKEIKTEIKKEKVKKDTIPQVEHVLDLYFKTDDPKKKNSLLKSVLEKAVYKKEKWQRLDDFELVLYPKLPQDGDI

SEQ ID NO: 20976 - protein, 515 aa, synthetic construct
MKTAIYLRKSRADLEAEARGEGETLAKHRTTLLKIAKEMNLNVLAVREEIVSGESLVKRPEMLSLLEEIEDNKYDVVLCMDMDRLGRGGMKEQGIILETFKRSNTKIMTPRKTYDLNDEWDEEYSEFEAFMARKELKIITRRMQRGRIASVEAGNYLGTHAPFGYDIHRLNKRERTLTINAEEASVVRMIFDWYANEDMGASAIRSKLNDLGYKSKLGNEWNPYSILDILKNNVYIGKVTWQKRKEVKRPDAVKRSCARQDKADWIVADGKHESIIPESLFEQVQEKLNSRYHVPYNTNGIKNPLAGIIKCSKCGYSMVQRYPKNRKETMDCKHRGCENKSSYTELIEKRLLEALKEWYINYKADFEKHKQGDKLKETQVIQMNEAALRKLEKELVDVQKQKNNLHDLLERGVYTVDMFLERSKVISDRINEITSTMENLKKEIKTEIKKEKVKKDTIPQVEHVLDLYFKTDDPKKKNSLLKSVLEKAVYKKEKWQRLDDFELVLYPKLPQDGDI

SEQ ID NO: 20977 - protein, 542 aa, synthetic construct
MQQLKQKRVGIYVRVSTEMQSAEGYSIDGQINQIKEYCNFHHFEVKDIYADRGISGKSMNRPALQRMLHDADKGHIDCVMVYKTNRLARNTSDLLKIVEDLHKQNVEFFSLSERMEVNTSSGKLMLQILASFSEFERNTILENIYTGQHQRALEGYYQGNIPLGYSNIPDNKKDLMINQHEANIVKYIFESYAKGHGYRKIANALNHKGYVTKKGNPFSISAVTYILSNPFYIGKIQFAKYKDWNDKRRKGLNDKPVIAEGKHAPIIGKDLWDKVQARKKQVSEKPQVHGKGTNILTGLISCPQCSASMSASTTVNTLKDGTKKRIRYYSCSNFRNKGSKVCSANSVRADVIEKYVMDQILEIVKSDKVINQVVERVNKGKQVDIAALNHDIAYKQQQFDEVHAKLDNLIKTIEDNPDLTSALKPTIHQYETQLNDITNQMNQLKHQQNQEKPSYDTKQIAALLQQIFQNIESMDKAQLKALYLTVIDRIDIRKDGNHKKQFYVTLKLNNEIIKQLFNNTPLDEVLLSTSSLFLPQTLFLQI

SEQ ID NO: 20978 - protein, 577 aa, synthetic construct
MPKLYSYIRWSSDRQDKGTTKDRQLSAARTYAEEKGLEMVEIIEPGVSAFRGKNRSGKLGDFIDAVKSNAIPSDSWLYCENLDRLSRDQVDEALSLFLEMIRLGLTIVTGMDKKVYNKASIRQNPTDLMLSILLFIRGNEESETKSKRTIGNVVALVERHNQGLPVNIKSVGRHPFWIDDSGSQYEAVKKHPIYWNIAREAIDMFLDGHGVYSVKRALDEKYPNGLKGKEWDYQVLQKMRNNRALIGERTMKVGGQIYKLKNYYPLLCKDETEYLVLAEKKEQNNFKSKKESKDKIKLLSGLSLLRCSKCGGTMHSFINKKTPRYICTNGTHKQKSCSGWSIIASLVEHCTMIALLMGYLNNSWKNGSDTTLIDEEINAKQSIIADLDSKISNLAAAISVAPNVVELATKIQVLNTEREQLLINVVNLKERSVSLKSKGSFEIEMTEFLILIQYAVFTDLEDEDRNKIRKIISSIIEYVIVDKTDSCITIRIKCYGIDEVLVFGGVNRKPHWEFDIELVNDDQDSNAVVVTDEIREKTNQYLVDLRKSYHNLYDSSVSMLSQVGYPEINGSLFWPNR

SEQ ID NO: 20979 - protein, 559 aa, synthetic construct
MKTKLYSYIRFSSMKQADGSSYERQKRTAAEIAAKYDLELVTSYQDFGVSAFKGANSRTGALSRFLDEIGRSVPVGSWLVVENLDRISRQSIIEAQELFLSIIRRGITIVTGMDGKVYSKESVNANPIDLLLSVMLFARANEESQTKRNRTNSSALIKIKAHQENPQNPAVAIEEIGKNMWWTDTTSGYVLPHPVFFPIVQEVVELRRNGRSTAEILDHLNATYTPPPAASHKRHSNWSRAMIERLFHTRALIGIKEISVDGVKYELKDYYPRVLDDAEFYHLKKSIGVRACNYGDKEEVKPIPLLSGVGLLKCEHCGSAMVKVKGTNKRPNQYRYSCDAMRSSRIECVHTNWSFRGDQLEKAVLQLLADKIWIAEDKANPVPALKVQIDEISRKIDNLITLSAMTGATKELADQITTLNSERETLYNQIKMAEEEMYSVDSQGWEKLAEFDLEDVYNEDRIKVRFKIKQALKRIGCSRIDKYKNLFVLEYIDGKTQRVVIENSRGPRKGRIFVDLKTINDRQILESNGLVLHPCLDMLTDKNWKPEEEIPGPLQEFGI

SEQ ID NO: 20980 - protein, 508 aa, synthetic construct
MKKAIAYMRFSSPGQMSGDSLNRQRRLITEWLKVNSDYYLDTVTYEDLGLSAFNGKHAQSGAFSEFLDAIEHGYILPGTTLLVESLDRLSREKVGEAIERLKLILNHGIDVITLCDNTVYNIDSLNEPYSLIKAILIAQRANEESEIKSSRVKLSWKKKRQDALESGTIMTASCPRWLSLDDKRTAFVPDPDRVKTIELIFKLRMERRSLNAIAKYLNDHAVKNFSGKESAWGPSVIEKLLANKALIGICVPSYRARGKGISEIAGYYPRVISDDLFYAVQEIRLAPFGISNSSKNPMLINLLRTVMKCEACGNTMIVHAVSGSLHGYYVCPMRRLHRCDRPSIKRDLVDYNIINELLFNCSKIQPVENKKDANETLELKIIELQMKINNLIVALSVAPEVTAIAEKIRLLDKELRRASVSLKTLKSKGVSSLGDFHAIDLTSKNGRELCRTLAYKIFEKIIINTDNKTCDIYFMNGIVFKHYPLMKVISAQQAISTLKYMVDGEIYF

SEQ ID NO: 20981 - protein, 504 aa, synthetic construct
MKKAVGYCRFSTDMQREESIMAQMRAIDEFAKRESIEIVKYYKDQGQSGTSDNRDDFQLMMKEVKNIDYVIVHKFDRFARNSFDHVINERKLNNKGIKLVSVLEPVGENPESILTKNLLIGMNEYFSLNLSREVKKGHKENALQCKFNGGTPPLGYKIEDGFYKIDEEEAKIVEKIFALRLQNYSYQKIADTLNGLGYKNKYGKEFNRNSFYEMLQNKRYKGTYIYGVNDGSGEVRNYRKKNSEWVEIEDAIPAIITKEVWEEVNKKYRKRSGAFKKDARDYILSGLVFCDECGAPMLGCSRQSSTGKKYYYYRCNDRCGAKSIRADLLEEVVTNLISEHLIHEKNIDVLVDYVIANYEMENPYRELEKQKNKLIRQRDNIVNLMAETGSKALIDKLEQLDRQIDNIYIPPFKQVVLDRDVIKKRYLQFLHEPLTGSMIRLLIKKIKVNDHKTIINLVNYPNELLNGYSHGAGNPAPVPTSIIVLFSSKSNKFNTYKESTKCFT

SEQ ID NO: 20982 - protein, 507 aa, synthetic construct
MNNMIVVPAAAKVQRGLTRVAAYCRVSTSQENQEHSYEAQVRYFTNLYRSSSTETFVGIYADEGISGTSLDKRTEFQRMINDCRAGKIDRIVTKSVSRFARNTKDCLETLRELKALGVTVAFEKENIDTSRLSDEMMITVMGGLAQEESHSISRNVRWSIQRKMANGTFRHARVPYGYAKDDETGNLIVDPEQAEIIRRIFNMYVNGTGAHKIALTLNDEKIPSPTGIAWNKKTILKILDNEKYTGDTMWQKTYSEFMGEKFKPNHGQAAKYYIEGSHEAIISKELFEMAAKVKKKAAPKSFEKNNTPFRKKLICRKCGHTYTFISSKRRNYWQCNCRSAIDKPCDNRVLYNDELESAFTALCDKLHVHGTVILGKCAEQLAELQRLEQFGTAEGVKRMKELSDLKDQKQRFRGLYDKHFISEEKYQQQIGEIDLKIERLSREMSRLSGANDGISGEINTLLEMFEDYEGSDDDKKEIIESALEKITFVDETLTFRLQCGLEFTEVV

SEQ ID NO: 20983 - protein, 545 aa, synthetic construct
MSRPIEAASNVKIIPAMSSEELKQAKYRQTRVAAYCRVSTDHEEQANSYKVQIDYYTNLINSNSEWTMAGIYADEGISGTQTKNRKEFNKMIRKCRQKKIDLVLCKSISRFARNTVDCLEYIRELRLLGIGVIFEKENINTLAMNSEFIISLYGSFAQAESESISKNVSWGIEKSFKEGKVKYVMDKTLGYRMGEDGKPYIVEEEAEIVRRIYRMFLDGLSMQRIADIMQAEGAARRSGCTTWNRSNVNYILKNEKYAGDAILQKSYTIDCITHKRVKNNGEKNKYILHDCHPAIIDRDTYNRTQQELTRRCTIKQRSDKAVTAQGRYASKYALTDIMICGECGTPYRRVVWNSHGKKLPVWRCINRLDHGNRYCKHSPSLNEEHLQQAIIDAINTAYTHNTAFLQSMENNISIVLNDEDKNNTERVRIESRLAEIDKARDDLIHLVTSGSVGEDSLDKEFEALNDEESYLKTQLEAMKSQTEKRDEVRYSIMSAVEGIGEMENTMVDYDEVAVRKMIECIKVLSKTEILIIFKGGYECNAVVEK

SEQ ID NO: 20984 - protein, 677 aa, synthetic construct
MAEITIIQPREQPRRKLRCGAYCRVSTGREEQQHSYEAQRLWFMTLLGGSQTEELVDIYADIGISGTTTDRPEFMRMLNDCRHGCIDRILTKSISRFARNTRDCLAILRELRELGVTVFFEKENIDTARTADEMMIAIMGGLAQEESQSISRNIRWSLHRKMAAGTLGVARVPYGYDKVNGRLVINDEQAAVVRRIFSLYLGGMGARRIAALFNSEGLPAPESTAWNNITVYKMLAQEMYLGDIRWQKTVSVFMGTSHPNTGQANSFYVSGSHEPIIDRETFESAQALRLKSVRPAEKTNNSPFRQKVVCGICGRSYYLIGAARPYWQCTRRFDLVKPCTNDILHDETLSDLWRVIWTKFTNHADDVLLPLIGQLERIAEKVSENAESGRLDEIMQQKMTLRKMCAEGLISYGEVITSETELNAEYSSLIENCRKQKEHNSLLINEVKTLYKAVSAAHSDCCADILKSIRFAHDTADFELVSGIHIIMSIPKHKKRIITSHNPINAIRSLALCGGCGGRLSRRKVEGVYLWKCSNRRCSYWRSKHTDEDMIGNTTDVFSKVYADPRLVSLKCSMTEYRPTESVLTMLESLEKLIALGENAEMLIKAAVHLAEEKIGCIEYNVKTEQTAHIEDAIKNCVELPEFLIQAVRHIYVTPDRVRVKFINGKTVKSERSTNHE

SEQ ID NO: 20985 - protein, 532 aa, synthetic construct
MSNIKTAANVTLIPAKEQANSVFTGKKLKVAAYCRVSTDETEQMNSFGVQIAYYTDYIGSRPDWQMIGIFADEGISGTQTENRTQFNRMIELCRKGRIDLILCKSISRFARNTVDCLDFVRELKRLNVAVQFEKENINTLSVSSEFAITLYASFAQAESESISRNITWGIEKSFKEGNVRYQMRYTLGYRLVDGVPQIIEDEAVIVREIFSLFAGGMSLRKIAERLTSEGAARRNGSTVWNRDHVNSILKNEKYVGDAILQKYYTVDCLTHTCAKNNGQKPKYLVQNCHAPIIDRETWDRVQLELSRRSAMTKGNARGGRYRTEYALSELLVCGSCGCNYKRVLWKSGTGKRAVWRCKSTLDGGKARCDSPSLHEEALHSAIVRAINEQILDSSGFDRQSALSADTLESENADLERRIASVSARLGEIEVERNRLLADISAIPADVLGSKLKLLHTEEQELKSKLDELNSKRDSGRHDLYRIKAARNLTHGIEALGEFDNDLVRQVVEEITVKSADKVVVKFCGGEKVTVKV

SEQ ID NO: 20986 - protein, 545 aa, synthetic construct
MPKNNDMASNVTMIPALSPAELKQSKYRQIRVAAYCRVSTDSEEQANSYQVQIEYYTNLINSNPEWTLAGIFADEGISGTQTKNRKQFNKMIRKCQQKKIDLVLCKSISRFARNTVDCLEYIRELRLLGIGVIFEKENINTMMMNSEFIISLYGSFAQAESESISKNVSWGIEKSFREGKVKYVLDKTLGYRMGEDGVPYIVEEEAEIVRRIYVMFLDGMSMQGIADQLQSEGIKRRSGSSTWNRANVNFILKNEKYAGDAILQKSYTIDCITHKRVKNNGEKNKYIVHDCHPAIIDRDTYNRVQQELAKRGAIKKRSAKARTELGQYSSKYALTDILICGECGTAYRRVTWTSHGHKRIVWRCISRLDHGSKYCKHSPSISEESLQNAIVKALNAVYSRNGDMLARMEQNILAVIGDNGDMQKQTAKIQKRLEEIEDERDSLVRQITSGAVDEDALDKNFESLNDEEAYLKTQLDDMQTKAKLSDEKKYALMAVGEELRRHDCHLAEYDDVTVRKVIEVIRVLSKNEVQIIFKDGHEMNVAVEK

SEQ ID NO: 20987 - protein, 512 aa, synthetic construct
MKKMTVIPAVSQIRQGRIRVAAYCRVSSNKDDQEHSYETQVRYFTSLYRGSETSELVGVYADEGISGTSMDKRVEFQRLMEDCRAGKIDRIVTKSISRFARNTKDCLKSIRELKELGITIAFEKENIDTARLSDEMMITVMGGLAQEESQSISNNVRWGIQKKMASGTFGHCRVPYGYTKEKKTGKLIIEPDKAEVVRRIFDMYISGMGARKIALTLTDEGIPSPTGKAWNQKTVLNILEQEKYIGDTLWQKTYSKFMGEKFIPNSGQVPQYYIEGSHPAIISKEKFALVRDMRKASTPQKSTKVESPFRKKLICGKCGHTYALIRSKKRDYWQCGYRYDVGNPCNNTVLYADELQTAFTALCDKLHTHNAEIIGKCYAQLTELQRLMEYGTAEGANQLKTIADLKEQKLRLATLYRKRFITTEKYDREVTEIDMQISSLSRSMDRASENKDKTIDDMETLAELFKGYDGTPEARKEILETAVESITISGDTLTFRLPSGLEFTERLDRNGN

SEQ ID NO: 20988 - protein, 481 aa, synthetic construct
MKTMNKVAIYVRVSTTNQVEEGYSIDEQKDKLSSYCDIKDWNVYKVYTDGGFSGSNTDRPALESLIKDAKKRKFDTVLVYKLDRLSRSQKDTLHLIEDVFIKNGIEFLSLQENFDTSTPFGKAMIGLLSVFAQLEREQIKERMQLGKLGRAKSGKSMMWAKTSYGYDYHKETGTVTINPAQALTIKFIFESYLRGRSITKLRDDLNEKYPKHVPWSYRAVRTILDNPVYCGFNQYKGEIYPGNHEPIISKEEYDKTQSELKIRQRTAAENVNPRPFQAKYILSGIAQCGYCGAPLKIMLGVKRKDGSRLKKYECHQRHPRTLRGVTTYNDNKKCDSGFYYKDKLEASVLKEISKLQDDADYLDKIFSGDNAETIDRESYKKQIEELSKKLSRLNDLYIDDRITLEELQSKSAEFISMRGTLETELENDPALRKNKRKADMRKLLNAEKVFSMDYEGQKVLVRGLINKVQVTAEDIVINWKI

SEQ ID NO: 20989 - protein, 481 aa, synthetic construct
MITTNKVAIYVRVSTTNQVEEGYSIDEQKDKLSSYCDIKDWNVYKVYTDGGFSGSNTDRPALESLIKDAKKRKFDTVLVYKLDRLSRSQKDTLHLIEDVFIKNGIEFLSLQENFDTSTPFGKAMIGLLSVFAQLEREQIKERMQLGKLGRAKSGKSMMWAKTSYGYDYHKETGTVTINPAQALTIKFIFESYLRGRSITKLRDDLNEKYPKHVPWSYRAVRTILDNPVYCGFNQYKGEIYPGNHEPIISKEEYDKTQSELKIRQRTAAENVNPRPFQAKYILSGIAQCGYCGAPLKIMLGVKRKDGSRLKKYECHQRHPRTLRGVTTYNDNKKCDSGFYYKDKLEASVLKEISKLQDDADYLDKIFSGDNTETIDRESYKKQIEELSKKLSRLNDLYIDDRITLEELQSKSAEFISMRGTLETELENDPALRKNKRKADMRKLLNAEKVFSMDYENQKVLVRRLINKVKVTAEDIVINWKI

SEQ ID NO: 20990 - protein, 452 aa, synthetic construct
MKAAIYIRVSTQEQIENYSIQAQTEKLTALCRSKDWDVYDIFIDGGYSGSNMNRPALNEMLSKLHEIDAVVVYRLDRLSRSQRDTITLIEEYFLKNNVEFVSLSETLDTSSPFGRAMIGILSVFAQLERETIRDRMVMGKIKRVESGLPLTTAKGRTYGYDVVDTKLYINEEEAQHLQLIYDIFEEEKSITFLQKRLKKLGFKVKSYSSYNKWLMNDLYIGYVSYSDKVHAKGIHEPIISEDQFYRVQEIFSRMGKNPNMNKESSSLLNNLIVCEKCGLGYVHRAKDTVSRGKKYHYRYYSCKTYKHTHELEKCGNKIWRADKLEEIIISRVKNYSFATRNLDKEDELDSITEKLKTEHSKKKRLFDLYINGSYEVAELDKMMADIDAQINYYDSQIEANKELKRNKKVQESLAELATVDFDSLEFREKQIYLKSIINKIYIDGEQVTIEWI

SEQ ID NO: 20991 - protein, 441 aa, synthetic construct
MIKAFSYIRWSSKKQAIGDSLERQLDYARKVASEHHLELVEIVDKGVSAFKGKNASDGELGRFIDAVEAKQIPNNCWLVVENLDRISRSDVLQANELFTKLLRLGVTIVTGMDSKVYSYDSVIANPMDLMYSIMLFMRANEESKTKSSRTVKNALGMIRKHQEGVRSDDGYPFAIEVVGSHPFFVDTSEGVVKPHPLYFDAARLILTKRADGWGTNRIKKHLDASIPPPLNRRNKTLKTWSHDTIRRLPHTEQILGIRKVTLEGIEYELKDYYPKLVSDDEYQKLQYVLSKRKVNSTSRNHVGLFTGIKVGKCHHCGGTLCVYRASRSDRAVTETLRYACTNKQKGEPCEQRTFAHTQIEDALIRVGMMKLWKPTNNESFDTTELDVKRNHLEELKKQSKNLADRFVMFDDDVPTALVDKLKELQADTARVETEISELELL

SEQ ID NO: 20992 - protein, 522 aa, synthetic construct
MKSAILYIRVSTDEQADKGYSQRDQDERLRRYCSTQNIQVDTAIFEDHSAKSFKRPEWERLLAGLKKSKIRPDYILFTKWDRFSRNAGDAYQMINTLNGLGVEPQAVEQPLDLTIPENKMMLAIYLAAPEVENDRRALNTFYGMRRARKEGRVLGLAPYGYINRTKENGKKYIALKEPEASNLQWAFKEIAKGVLAADQVRLAINKRGGRKISKSAFHVSLRNAVYCGKVFIRKFKDEDAHFVPGLHEPLITEALFYKVQNIIDANVRHSRPQTKISSDDNLPLRGFLVCPDCGRNLTGSASKGSKGGYYYYYHCIPKCGFRKSAVKANAIFESDLEKYEFPTVIQEILHDAMMLNYKNFGSVFEKRRSEIAIEIDRFTVKLTKARELLLAEKLDAEDYREIKEECKKNIEGLEDELSAYMTEEKTHDIKKSLNDALTCLSKLSNVYKEGDSEIKRKIISSIYPEKLIFDGYTYRTPRTNVIAESMLLINKGLENKKNRTSKSFSYLSGVVAPPRIELGSKV

SEQ ID NO: 20993 - protein, 597 aa, synthetic construct
MKQKLYSYQRWSSAVQQDGTTKARQTFAAEEYAKRNDLEVVEIVDAGISGFKSVNSKSGALAKFLAAVDEGIIPNNAYLFVESLDRITRDEIDVALELFMGILRRGITIVTGMDNKVYTHAGIKGNPIDLLTSILLFTRAHEESKTKQNRTNGNALAMIRRFQSGEPTTIKAVGSHPWWIDCTTDKFEAVRRHPTLWQPAQDAINMFMEGVSVFKVVEYLDKTYPHMYKGKAWKTANIRKLRFNKAVYGLREITVDGKEYALPNYFPALITEGQFLRLEKIRETTKYIGKVGEGKTVTDEEGNSKVIGERNNINLLAGMKLFRCGHCNGTMMAMRHGDTIRYLCEKGRGHQNDCKTWSLPGLLVEHTLMLVTTIAYINIQRKGGVEKEDYTAQIASTEQLIEDISKKISNSTRLVLAGLDDVDEVIEQIQELKDSRSNLVLELEVLQRKQLLAQDNTFEGLMMDFFNYAQYGVLQDPVHEYRSKLRDIVYTSIGEVKAWKVDRRLMISFQIKGDDEYYTFSAGDEPYNYIFYYGSPVTLGEDLSPQGNYELPEEVKRRIREHSDVYDASMKLLGTANALLSVVNYPDLDGRMFWPRK

SEQ ID NO: 20994 - protein, 568 aa, synthetic construct
MARLISYVRMSTSEQLKGISLERQRNLIADFASKNDFQEVIIYEDVGRSSFAEDENQKELNKFFEELEKDNFDKGDVFALENIDRLTRRGAIDALLKVNKIIQKGLKIAIISDKEQRILEEIDIYSIITLSIDASRANKESEVKSQKGLINWEHKRRLAATEKVAMTKRAPAWIDTEIFTIYDEEKKKEIKRRRYILNEEKAQTVRLIFDLFLNGNGSLKINKILNERKIKPLNDNVEFWEPSRINKILKNPAVYGLYQPQKQRSGKRDLVDAGEPIEDYFPAVISKEIYEQCRLIAEKNLSERKGRKGENFTNVFTGLLKCEKCGSPVHLLNCGVDKRNKSQHALIYLICKKAKFTKQCSTKRMRYDAFEASIFRAVNEINLIEVLNENNPLNDLVKKQREIETAINKKNKLLENYEKSFLENDGNVPAFMISAAKKTEIEIKELEEQKREIQNEISSLNYYNANVENSIKDIKNNSSYEKRAKINLLFHEIIKSISIDLVEKYSVITFKNDITRIIDKNGFVINVDRVNKLEIVEEYTTTISAEIANNPKLLLEYFEKMRRDLSED

SEQ ID NO: 20995 - protein, 501 aa, synthetic construct
MAKHGLEVDRHLEDAGTSAFHGKHAGSDGVLGQFLKEVRKGEIEKGSYLLIENFDRLSRDKIVRSNKIFTDLLFSGIKIVILDKNKIYDADNLDFGDWITALVEFERANAESQRKSDFSSKAWKLNRDKMHNGEIVTKKVPTWLKVENNTFIIDEVKIDRIRTLFRLSLFKGLQEATKEYNSLYGEKLAIHQAQYLLSNRKLIGEHQPQKIHYNENGRLIRKDEGNPIPNYYPQVIDEDLFLKVQSVITSRKPFSGRYSAQRYNVFRDLIFCRFCGGTIRYMNKGERDYFICTNSMTGKCGLKGQQSIRGNKVFGRFFKFTNGINIGTLLEENTNADEIKNELMKLENQKTKISNRLDDFKSQIKKMIMEGETIPETYNEIIVDLENSIIKYDDEIEIKNKELDKIISSFRSFYDLQGIDIEKIIYDKSQEAIEKRVQYNNELKNIIKKIQIDYLNDILHVEFSNGVNRHILNDELANEYNKDEIENSWASVVKSIAQRTN

SEQ ID NO: 20996 - protein, 491 aa, synthetic construct
MRDEGLSAYHQRHVTQGALGVFLRAIEDGRIASGSVLVVEGLDRLSRAEPIQAQAQLAQIINAGITVVTASDGKEYNRAGLKAQPMDLVYSLLVMIRAHEESDTKSKRVKASILRLCQAWQSGTYRGLIRNGKDPQWLRWTGSAWEMIPERVLAVRRALALYQEGMGAARATKILHAEGLDYSASGISKQQIYRLIKLQALRGAKCLSVDGEDFILEDYYPRLLSESEWADLQHLAGQRLRRRGHGEIPGIITGIGLTYCGYCGTALVGQNMMTRQRADGTIADGHRRLHCVSYGVNGGCTAGGSCSVVPVERALLTFCSDQLNLQRLLKVGDDGQGIRQQLAVARSTAEKLSVQLGRITDALLADDSGAAPTAFIRRARELEAEQADAHKKVQQLEYELATVSGSGKPAQAEKWVELADLVRRGDYSAREKVRQLVMDTFERIVVFMRGMSAEDRSGKFIDVQLLSRTGQQRLLQINRKTGAWVASEDWD

SEQ ID NO: 20997 - protein, 508 aa, synthetic construct
MKKAIAYMRFSSPGQMSGDSLNRQRRLIAEWLKVNSDYYLDTITYEDLGLSAFKGKHAQSGAFSEFLDAIEHGYILPGTTLLVESLDRLSREKVGEAIERLKLILNHGIDVITLCDNTVYNIDSLNEPYSLIKAILIAQRANEESEIKSSRVKLSWKKKRQDAMESGTIMTASCPRWLSLDDKRTAFVPDPDRVKTIELIFKLRMERRSLNAIAKYLNDHAVKNFSGKESAWGPSVIEKLLANKALIGICVPSYRARGKGISEIAGYYPRVISDDLFYAVQEIRLAPFGISNSSKNPMLINLLRTVMKCEACGNTMIVHAVSGSLHGYYVCPMRRLHRCDRPSIKRDLVDYNIINELLFNCSKIQPVENKKDANETLELKIIELQMKINNLIVALSVAPEVTAIAEKIRLLDKELRRASVSLKTLKSKGVNSFSDFYAIDLTSKNGRELCRTLAYKTFEKIIINTDNKTCDIYFMNGIVFKHYPLMKVISAQQAISALKYMVDGEIYF

SEQ ID NO: 20998 - protein, 449 aa, synthetic construct
MKQVIGYLRQSTMKQQSLAAQKQAIEAIAEKHHIQHINFYSDKQSGRKDNRSGYRQITQLIQQGQCNILCCYRLNRLHRNLKNALKLIKLCQTYHVHILSVHDGYFDMDQAFDRLKLNIFISLAELESDNIGEQVRNGLQEKAKQGRLITTHAPFGYEYHNGTFIINQNESPTVKAVFNYYIKGHGYKKIAQLLEEDNTYINRQPYQVRNIIINPNYCGRVNNQYGQFDNMFPSIVSTSIYEQAQRLRLQKQTKQTPSDNQLKQKIKCPCCNATLTNMTIRKKNHTLRYYVCPKNMNASRFVCDFKGINAQTLEDKVLEVCRDFYQNQRIYTKIKSAIDKRIKRQRNIEKHHTLTQEQLIEKLAQGIIDAETFREQTQSLRQQPQRTTSINGHQIQHIIQNIIQKRFTLNILYPYIETIHITKDKNLIGIYFKNEPLNIVNQTMQSSIA

SEQ ID NO: 20999 - protein, 481 aa, synthetic construct
MITTNKVAIYVRVSTTSQVEEGYSIDEQKAKLSSYCDIKDWNVYKIYTDGGFSGANTDRPALESLIKDAKKRKFDTVLVYKLDRLSRSQKDTLYLIEDIFIKNNIAFLSLQENFDTSTPFGKAMIGLLSVFAQLEREQIKERMQLGKIGRAKAGKSMMWAKTSYGYDYHRDTGDVTVNPAQAVAVKFIFESYLRGRSITKLRDDLNENYPKHVPWSYRAVRAILDNPVYCGFNQFKGEIYPGNHEPIITEEVYNKTKEELKIRQRTAAENVNPRPFQAKYILSGIGQCGYCGAPLKIILGVKRKDGSRFKKYECHQRHPRTLRGITTYNDNKKCDSGFYYKDDLEAYVLTEISKLQDDAGYLDKIFSEDSAETIDRESYKKQIEELSKKLSRLNDLYIDDRITLEELQSKSAEFISMRGTLETELENDPALRKDKRKAEMRKLLNAEKVFLMDYESQKVLVRGLINKVRVTAEDIVIKWKI

SEQ ID NO: 21000 - protein, 515 aa, synthetic construct
MKTAIYLRKSRADLEAEARGEGETLAKHRTTLLKIAKEMNLNVLAVREEIVSGESLVKRPEMLALLEEIEDNKYDVVLCMDMDRLGRGGMKEQGIILETFKRSNTKIMTPRKTYDLNDEWDEEYSEFEAFMARKELKIITRRMQRGRVASVEAGNYLGTHAPFGYDIHRLNKRERTLTINPEEASVVRMIFDWYANEDMGANAIRSKLNDLGYKSKLGNEWNPYSILDILKNNVYIGKVTWQKRKEVKCPDAVKRSCARQEKSDWIIADGKHEPIIPESLFEQVQEKLNSRYHVPYNTNGIKNPLAGIIKCSKCGYSMVQRYPKNRKETMDCKHRGCENKSSYTELIEKRLLEALKEWYINYKADFEKHKQDDKLKETQVIQMNEAALRKLEKELVDVQKQKNNLHDLLERGVYTVDMFLERSNVVSDRITEITSTMENLKKEIKTEIKKEKVKKDTIPQVEHVLDLYFKTDDPKKKNSLLKSVLEKAVYKKEKWQRLDDFELVLYPKLPQDGDI

SEQ ID NO: 21001 - protein, 452 aa, synthetic construct
MKAAIYIRVSTQEQIENYSIQAQTEKLTALCRSKDWDVYDIFIDGGYSGSNMNRPALNEMLSKLHEIDAVVVYRLDRLSRSQRDTITLIEEYFLKNNVEFVSLSETLDTSSPFGRAMIGILSVFAQLERETIRDRMVMGKIKRIEAGLPLTTAKGRTFGYDVIDTKLYINEEEAKQLQMIYDIFEEEKSITTLQKRLKKLGFKVKSYSSYNNWLTNDLYCGYVSYADKVHTKGVHEPIISEEQFYRVQEIFSRMGKNPNMNRDSASLLNNLIVCGKCGLGFVHRRKDTVSRGKKYHYRYYSCKTYKHTHELEKCGNKIWRADKLEELIIDRVNNYSFASRNVDKEDELDSLNEKLKTEHTKKKRLFDLYISGSYEVSELDGMMADIDARINYYEAQIEANEELKKNKKIQENLADLATVDFDSLEFREKQLYLKSLINKIYIDGEQVTIEWL

SEQ ID NO: 21002 - protein, 452 aa, synthetic construct
MKAAIYIRVSTQEQIENYSIQAQTEKLTALCRSKDWDVYDIFIDGGYSGSNMNRPALNEMLSKLHEIDAVVVYRLDRLSRSQRDTITLIEEYFLKNNVEFVSLSETLDTSSPFGRAMIGILSVFAQLERETIRDRMVMGKIKRIEAGLPLTTAKGRTFGYDVIDTKLYINEEEAKQLQMIYDIFEQEKSITSLQKRLKNLGFKVKSYSSYNNWLTNDLYCGYVSYADKVHTKGVHDPIISEEQFYRVQEIFSRMGKNPNMNRDSASLLNNLVVCSKCGLGFVHRRKDTVARGKKYHYRYYSCKTYKHTHELEKCGNKIWRADKLEELIIDRVNNYSFASRNVDKEDELDSLNEKLKIEHTKKKRLFDLYISGSYEVSELDTMMTDIDAQINYYEAQIEANEELKKNKKIQENLADLATVDFDSLEFREKQLYLKSLINKIYIDGEQVTIEWL

SEQ ID NO: 21003 - protein, 516 aa, synthetic construct
MGTALKDPLGRIRAIIYVRLSSHRGDLDPSTSPARQEEVCRAYCAAKGWDVHPHVVRDLDVSGSDKGLRLDRPGLGEIRDRWGDVDVVIFAKIDRLARNVVDFRAFANEAEQHGAALVSVAESLDMTTPSGRFVATILAAFAEMEAATIAERVTAGIAATRKLGRWAGGAAPYGYKVVPAPDGPGYVLAPEPQAAAAVREAAERLLAGESLYRIAHDFNARGVPTRSAMLIAQGRTRRTKPAPWSTQVISQMLVNPATVGRSVYRGEVMRGDDGLPRQLWEPILPLDTWHQLRAALAANGDGVAGRGRRVRAARLLSGIATCAGCGRKLYASSRKHASGTTVPTYACAARRNGQGCKGVAITAEMTEQYVEREFLRMVGHWPVVEVVTVAVDDGRRADIEAAIADTARQMTERGADVPALAARLGELHAAREALPATAVTEMREVETGETFAEAWQARDVDGRRTLLVSARARVVVHRAAVHGRKIFDESRIDLQLGVFDDPEAQRLAEIAAEEAM

SEQ ID NO: 21004 - protein, 471 aa, synthetic construct
MSTEEQAKEGFSIRAQRERLDMFARSQDWDVVDFYIDEGRSAKDTERPELQRMLDDIANNRIEVVLVYKLDRLTRSVMDLYQLLEQFEKHGCMFKSATEVFDTTTPTGRLFITLVAAVAQWERENLADRVKFGMEQMVEEGRWPGGPAPFGFILGENSKLKADPDEAELYRYMYDLYENFKGDNAISVILNHELKKKTRLGNQFSAKTVRDILKNPISYGALKWGGKVYEGFCEGIITKERYDRHLALRAARSTVSPKAVTSTYIFTGTIKCARCGAPMKGRMSKSVNNSTYAYLACTNKREKKCDMPMVSEQNVEKHFLNELQLLLASQFDAANEIAASSHNEDRLINQRVQQIQKQIQTIKDRKKKWQMAYADDVISLEELREHTNQDRKRQEELETELADLSSQTESHSPEKVVAILSNFLDNWDQLEPMEKKQAVMLLLERFDVNAEDGKRVLHSKRNLVLSNFKFR

SEQ ID NO: 21005 - protein, 522 aa, synthetic construct
MGHIRNVLLHERISSDTETSTSIERQDEKLHQRAAEDGVNVVGVAVDRSVSGEVDLYRRPELAPWLSEEYRGDWNELWVTNQDRLSRSDIHVMAFVFRCLEWGKEIVILDDPEFTQQMKTPEGRVILHAKSLGPAKELERIKARCADAHEWRRKTTRWPGGIPTFGYVPYKVMEDGKSATYIKLDEDMLTVLHDMKHRMAVIGDTFSGVTMWLNKNQVLTARDRARIRAGKPPGRLNKGTGEYVLERWSETTVAELLTNEALLGYKKHKGEVIIGSDGKPLKIAEAAFDSDEWDELQAACQARRITFQRRTNRANPKYGVVFCGGCRKGGTHSQVKWKDRHYRYYRCNGSHALRCEGHTVDAAEADKVMEETFLRELGHERVVKRVFQPGEDHTKELEQVRKHIKRLQAEKDRAKDWDEEDEAEYEERLDALRARRNELKKLPQRKAGWVAQRLKTTYREAWEQGDDNARRKLLISAGFRFEILDNRTEVPWMIQIPMDLLAEISGEARDSTRVILPCTLVA

SEQ ID NO: 21006 - protein, 618 aa, synthetic construct
MKIEKSLVPQVYSYNRFSDMEQKKGSSLARQENYALKAAKEYGLELNEELIMTDLGKSAFHANHKKTGSYGVFLNAVNKGLVAKGSYLIVESFDRLSRQQARLAQIDIGQLIEADINIITASDNQLYNKKTLDQNPHLLFTMAAIMIRAHEESLMKQKRSISSIEEKLGKFRSGESVDVGGPVPFWIERNRLGSDKLFEFSEKTPAARIITNSFLEGKSYGQIQDLLTKTGIRTPKGDDKWGTTTISNILQSESLYGRKTVRLPALKDGSKDAQEHLLDGYYPALISKSDFDLIQQIKKVKKKGRTGYRFNSVKDDEVKSVVYLLSGYGRDKDRKSRSVCSKCGGGLGSRLVDQYTRKKKYVRTVMRLDCLNRTRKKSCDAKGIAQRELEKSFLLAISEHVDYSLLNKEDSDVRAVEVIDSKIDELDGIIERASDLYLLGKSSSVRDKAKSQLDLAEAEREELLKDKVDGKELIISAESIKEFEGYIHRAHENDDDFEARSYVKDILLQCVEKLIVDTEPRPVESLGYKNLYKNARVWTVTVDFRSGKRITVYHDCDTNMSLFNQIEGGTSTFHSYTPEALSILDNQGPEAFAQHLRDSGFGTNTSYVQDFISSLENK

SEQ ID NO: 21007 - protein, 542 aa, synthetic construct
MAAKARVYSYLRFSDPKQAAGGSIDRQLEYAARWAADHELELDSSLSLRDEGLSAYHQRHVRQGALGVFLRAVEDGQVPVGSVLIVEGLDRLSRAEPLQAQAQLAQIVNAGITVVTASDGREYNRERLKAQPMDLVYSLLVMIRAHEESDTKSKRVKAAIRRQCQGWIAGTWRAPIRVGKDPHWVRETEAGGFELADDRASAVRLVIEMFKQGHGAVRIVRELADRGLKITDSGRSASSHIYRLLANRMLIGEKSVEVDGETFRLEGYYPALLTAAEFADLRYSAEQRGRRKGKGEIPGVVTGLGITYCGYCGAAVVAQNLMGRRRMPDGRPSPGHRRLHCVTYSQGAGCKVSGSCSVVPVERALMLYCSDQINLTRLLDGDSGTAAVSAQLASARQRVAELEAQVRRVTDALLLDDGDAPAAVLRRVRELESQLASERRDVDSFEHHLTASASNVAPAAADAWRELVHGVEHLDYDARMLARQLVADTFSRIVIYQSGFTPDVADGTIGVVLVAKRGTTRLLNVDRKTGDWRMAEDFANIV

SEQ ID NO: 21008 - protein, 519 aa, synthetic construct
MKTVTKIGGQLVFPTPKHKLRVAAYCRVSTDSEEQLVSLATQRKHYESYITANPDWEFAGIYYDEGITGTKKEKRPALLRLIDDCEHKKIDLIMTKSISRFARNTTDCLELVRKLLGLTVYIYFEKENLNTGSMESELMLSILSGLAENESVSIAENSTWSIQRRFQNGTFKLAYAPYGYDVIEGKLVLQPEQATIVKAMFDQTLAGIGTDAIAKKLNAKEIPAKRGTHWTATTIRGILKNENYTGDAIFQKTYTDSHFNRHHNHGEKDKYRVEHHHEAIITKDIFEATQQVIRQRGKEKGALPQDKKYQNRYPFSGVIRCHQCGATFKRRIQGGRNSYVAWCCATHLTDATKCSLKYIKETALKYAFVTMMNKLIFGHAFVLKPLLASLRTLHSNDSITVIQDLDTKLAENAEHQKTLAYLLTKKYLEPAMYQKGNNELLQEAEQWQHQKDSLVDFLNDDNKTVRETRKLLQYTCKSKMLMGFDGAVFQQFVEQILVYSRTYIGFKLKCGITLRERMV

SEQ ID NO: 21009 - protein, 492 aa, synthetic construct
MAAYCRVSTDSDEQATSYETQIEHYTTYIHNHPDWKLAGIYADDGISGTNTKKRDEFNRMIEDCMAGTIDMIITKSISRFARNTLDCLKYIRQLKDKHIPVFFEKENINTMDSKGEVLLTIMASLAQQESQSLSQNVKLGLQYRYQRGEVQINCNHFLGYAKDENKRMVVVPEEAEIVKRIYREYLEGASMLKIARNLTADGLKNGAGHTKWRDSNIRQILQNEKYMGDALLQKTYTVDFLTKKRVKNTGIMPQYYVKDNHEAIIPRDIFLQVQEEMVRRSSIHLKNGRKLTYSSNHCFSQRIRCGKCGEIFRRIHWNNRGKKSIVWRCVNRVDHTGKCDARTISESALEQVCLTAINQVLCGKKDFFTMLQHNIETVLSHNNDETLATIDTRLEELQTQLVKLASSKAGYDDVAEEIYHLREQKQQTLAKSANQDEIRSRIEDMAAFLKTQSTAITQFDEHLVRQLIETITVFEDSCTVEFKSGVTVDVEK

SEQ ID NO: 21010 - protein, 481 aa, synthetic construct
MITTNKVAIYVRVSTTNQVEEGYSIDEQKDKLSSYCDIKDWNVYKVYTDGGFSGSNTDRPALESLIKDAKKRKFDTVLVYKLDRLSRSQKDTLHLIEDVFIKNGIEFLSLQENFDTSTPFGKAMIGLLSVFAQLEREQIKERMQLGKLGRAKSGKSMMWAKTSYGYDYHKETGTVTINPAQALTIKFIFESYLRGRSITKLRDDLNEKYPKHVPWSYRAVRTILDNPVYCGFNQYKGEIYPGNHEPIISKEEYDKTQSELKIRQRTAAENVNPRPFQAKYILSGIAQCGYCGAPLKIMLGVKRKDGSRLKKYECHQRHPRTLRGVTTYNDNKKCDSGFYYKDKLEAYVLKEISKLQDDADYLDKIFSGDNAETIDRESYKKQIEELSKKLSRLNDLYIDDRITLEELQSKSAEFISMRGTLETELENDPALRKNKRKADMRKLLNAEKVFSMDYESQKVLVRRLINKVKVTAEDIVINWKI

SEQ ID NO: 21011 - protein, 452 aa, synthetic construct
MKAAIYIRVSTQEQIENYSIQAQTEKLTALCRSKDWDVYDIFIDGGYSGSNMNRPALNEMLSKLHEIDAVVVYRLDRLSRSQRDTITLIEEYFLKNNVEFVSLSETLDTSSPFGRAMIGILSVFAQLERETIRDRMVMGKIKRIEAGLPLTTAKGRTFGYNVIDTKLYINEEEAKQLQLIYDIFEEEKSITTLQKRLKKLGFKVKSYSSYNNWLTNDLYCGYVSYADKVHTKGVHEPIISEEQFYRVQEIFSRMGKNPNMNRDSASLLNNLVVCGKCGLGYVHRRKDTVSRGKKYHYRYYSCKTYKHTHELEKCGNKIWRADKLEELIIDRVNNYSFASRNVDKEDELDSLNEKLKTEHAKKKRLFDLYISGSYEVSELDGMMADIDAQINYYEAQIEANEELKKNKKIQENLADLATVDFDSLEFREKQLYLKSLINKIYIDGEQVTIEWL

SEQ ID NO: 21012 - protein, 475 aa, synthetic construct
MKTTNKVAIYVRVSTTSQVEEGYSIDEQKDKLEAYCKIKDWKIYDVYVDGGFSGANTQRPELERLISDVKRKKVDIVLVYKLDRLSRSQKDTLFLIEDVFAKNDVAFISLQENFDTSTPFGKASIGMLSVFAQLEREQIKERMMLGKEGRAKNGKSMSWTTIPFGYDYSKETGVLSVNPTQALIVNRIFTEYLNGKPVVKIIRDLNAEGHVGRKRPWGETITKYLLKNETYLGKVKYKDKVYEGQHEPIITQELFDLVQLEVERRQISAYEKYNNPRPFRAKYMLSGLMKCGYCGASLGLRYTRKDKNGISHHKYQCRNRHSKDLEKRCESGWYSKEELERIVIKELERIKFDPKYKNETLAKKEETIKVEEIKKQLERINNQVSKLTELYLDEIITRKELDEKNDKIKTERQFLEEQLENQKSNVLSIRKRKLTRLLKDFDVEKLSYEDASKIVKNIIKEIIVTKDGMSITLDF

SEQ ID NO: 21013 - protein, 481 aa, synthetic construct
MKTMNKVAIYVRVSTTNQVEEGYSIDEQKDKLSSYCDIKDWNVYKVYTDGGFSGSNTDRPALESLIKDAKKRKFDTVLVYKLDRLSRSQKDTLHLIEDVFIKNGIEFLSLQENFDTSTPFGKAMIGLLSVFAQLEREQIKERMQLGKIGRAKAGKSMMWAKTSYGYDYHRETGTITINPAQALTIKFIFESYLRGRSITKLRDDLNEKYPKHVPWSYRAVRTILDNPVYCGFNQYKGEIYPGNHESIISKEEYDKTQSELKIRQRTAAENVNPRPFQAKYILSGIAQCGYCGAPLKIMLGVKRKDGSRLKKYECHQRHPRTLRGVTTYNDNKKCDSGFYYKDKLEAYVLTEISKLQDNAGYLDKIFSGDNAETIDRESYKKQIEELSKKLSRLNDLYIDDRITLEELQSKSAEFISMRGTLETELENDPALRKNKRKADMRKLLNAEKIFSMDYEGQKVLVRGLINKVQVTAEDIVINWKI

SEQ ID NO: 21014 - protein, 452 aa, synthetic construct
MKAAIYIRVSTQEQIENYSIQAQTEKLTALCRSKDWDVYDIFIDGGYSGSNMKRPALNEMLSKLHEIDAVVVYRLDRLSRSQRDTITLIEEYFLKNNVEFVSLSETLDTSSPFGRAMIGILSVFAQLERETIRDRMVMGKIKRIESGLPLTTAKGRTFGYDVVDTKLYINEEEAKQLQMIYDIFEEEKSITFLQKRLKKLGFKVKSYSSYNNWLTNDLYCGYVSYKDKVHTKGIHEPIISEEQFYRVQEIFSRMGKNPNMNKESASLLNNLVVCSKCGLSFVHRRKDTVSRGKKYHYRYYSCKTYKHTHELEKCGNKIWRADKLEELIIDRVNNYSFASRNVDKEDELDNLNEKLKTEHTKKKRLFDLYISGSYEVSELDAMMADIDAQINYYEAQIEANEELKKNKKIQENLADLATVDFDSLEFREKQLYLKSLINKIYIDGEQVTIEWL

SEQ ID NO: 21015 - protein, 547 aa, synthetic construct
MKLLVTYIRWSTKEQDSGDSLRRQTNLIDAFYSKHKNDYYLLPAHRYVDKGKSGFHQQHKNQGSDFRRMFENVMSGVIPEGSLIVVENFDRFSRADIDTAIDDVRQILRKGVSILTLGDGELYDKSALTDPVKLIKHIIIAERAHQESLVKQKRIAQVWNHKTQLARELKKPMGKQAPGWLELSEDGSHYIVDEDKASLVNIIYDKRLSGMSMFAICKWLNEQGYPTINQRKVRISKTKKPDGNWSALSVKHILTSRSVLGYLPAKISTEDRKTVLREEIEGFYPQIVTDSKFYAVQQLLEETGKGKTSSGEHWLYVNILKGLIRCKCGLVMTPTGIRKPVYQGTYRCNGNKESRCSYGTVSRKLLDTQLCSRLFSKLSQLHDEATDTAKLDELQRRLNTVDSELEKLTETLIQLPNITQIQEALRVKQEEKDELIVQLSREKARVKSVSSLDLSGLDMESVEGRTEAQIIIKRLVKEIVVSGNEKLVDIYLHNGNMIRGFPLDGKDDHTLTLEEATDEMQSLDDMLIFGEPVTRIYPAGDMEEVDA

SEQ ID NO: 21016 - protein, 508 aa, synthetic construct
MSYNVTVNNGLGVPSIGGITVKVATYVRVSTVFEEQDSSVINQEEGLLDYIRKKDSWVLYESYSERQSSFKKREKFKHMIDDAMARKFDIILVKSLSRFGRSAGELNTIVPKLVEKGIRFIALSESIDTDHNDWQSKIAMYSMVYHMSSQTTSDWIRLAERARAKRGEFTGSFTPYGYQKMDKKLVFADDNTPDIVQRIFDWYQEGVMGMQAIANRLNEKGIPTPAQTQIRKNGSQYWCQRSIKYLLTNPVYVGDLVAQKEQAATLGSTKRKKKNLEEQVIMENNHPPIISREQFRVVQDLIHRRGKTKSCGMPNLFTQVLYCADCGGGMQCVKRSYGKTHYMCGNYKLRGKNFCSRHSVYELGLVDLILGDIKKLMGDHVSNDVLIREMRKEAEGEKRVAVKEIASLKKEIKKLEGRKQAAEDKWLDGDITKEEYHQMLGRISGQLSDSNQKLADLRKGQEDNKPALPDIAKLTSFEKLDRELLLMLVKRIEVRKDGNIKIQYNFKV

SEQ ID NO: 21017 - protein, 521 aa, synthetic construct
MSTNRAVIYARYSSNKQTEQSIEGQLRDCYSYAEKHDITIIGEYIDRALSAKTDNRPEFQRMIKDSANGAFNIIIVWKLDRFSRNRYDSAAYKVKLKKNGVKIISAMENISDNPEGILVESLLEGIAEYYSADLSEKVNRGMRETALKCHSTGAPVPLGYKIEDKKYIVNEIESPVVKKIFTMYADGFSAKDICDYLNEHGFKTRRGGQFNKNSLRTMLTNRKYIGIYKYKDIEIPGGIPQIIDNELFEKVGKMMIKNKRNAAASKPKEKYLLSGKVICGLCGDKMNGESGKNKSGRVYRYYKCGKQKRNKNDCPKHTIDKYYLEDTVINAVRSIVCNDKIIDRIAKKAVEAQMYDDTPQIINSLEQKLSETEKQIENILKAIESGIFTISVKDRLLELEKTKDILKSEIIKEKNDNPFLDYDTIKFILSQYSNGDFKDEKFRQKLVDVLIYKVIVFDDKIYILYNFSKDDNTKDRYEDIIKLIEKSTAAQNGSPNVKRMRQALCYYGVCLIFVYSLKCFL

SEQ ID NO: 21018 - protein, 616 aa, synthetic construct
MSQELQIIDLVEGDGKAAVKGALITTQYTGWLADGSEFDSSWSRGKPFQCVIGTGRVIKGWEQRFAMLASTHRHRRKAFAAMKAPATRRPKAISYVRFSSMRQTNGTSVERQQMMIDQWRLAHPEYDYDSELTYEDLASSGFKGEHIEEGGGFAMLLDAVRRGVIQAGDVVLVEAIDRTGRMEAMDMFSILSPIISAGVSIITLDDGVVYNRASMNSGALFILAAKIQQAYQYSAALSRRIEASYEFRKKAAKNGVMPKRWTPIWLTTSGEVKADIAAQVKIAFELYVSGLGKNAIAKRIRESGVPELAKTSGPTVDGWLQNPTAIGRWAPKPIRGEPQEVIEGVYPEIVSLSLYQKAQLHRERVATSAPVQHSKHFLVGLVKCSECGKNYVYQNVNGKPHNMKCRVHTNDKQCSNSACMPKPVMDAILAWTGDRAKLDGIATLHTGVNEVEIAALRAEIDGVSFKITGLTETIKAIGAVKEVLDDLKALSADRQSMQDRLTLLERTEKPAEGKYWQHQAEMWWMEENDPERLSALMQQVGYTITVHPDKTIRVSGVDMVYRYDGYSVGKKHYRIYQGERLVTVWKGSYGETGVIRREDDPLLEIIEGPEQHTPDF

SEQ ID NO: 21019 - protein, 533 aa, synthetic construct
MFDYDKSIFDGICIPYARFSTTEQDKVGRKSLERQLEEAKRYASQNNLYISDDLIFTDKGVSGFAKQGQLSKTFEKGQMALLLDVLEDVPFKERENIYLCFHAFDRFSRQHPEVAYEQFSRILKRGFNIVTTIDDCLYSSKEADLESMLISIIKMSSAHYESEVKSVYVSDAHRRRRETLEYLYNHPTQKGKHKHIGLKQSTTPRWIIESEIIYDFVDDNGVARKDSFSKFSLDEAKAEIINQIFDWKIQGLGHTKICQLLNQKQIPTFEDGNCRKAEKWHTFAISNLFKNKSTIGAFTLKTVEDEEYFCESERIFKTRSNKVDATSEMENYFPAVVTVEKYEAALKVIAMNNKGEKRSEPEDKTHVFSKVLRCTCGGRLVFKGTRKTGKSEKADWFEYLRCEKAILKDGCDAENIIYKDFEMAFLRFATASNYTVFSTTQSKLKTKLKRLSIKQSYLNSEKEQLLLEAKGLNKTFESIVTQNLDATLLLDSISKNKSSLNTVQNELVKIDNQVKGVEREYKKIRKTNRQTNN

SEQ ID NO: 21020 - protein, 452 aa, synthetic construct
MKAAIYIRVSTQEQIENYSIQAQTEKLTALCRSKDWDVYDIFIDGGYSGSNMNRPALNEMLSKLHEIDAVVVYRLDRLSRSQRDTITLIEEYFLKNNVEFVSLSETLDTSSPFGRAMIGILSVFAQLERETIRDRMVMGKIKRIEAGLPLTTAKGRTFGYDVIDTKLYINEEEAKQLQMIYDIFEEEKSITSLQKRLKKLGFKVKSYSSYNNWLTNDLYCGYVSYADKVHTKGVHEPIISEEQFYRVQEIFSRMGKNPNMNRDSASLLNNLVVCSKCGLGFVHRRKDTVSRGKKYHYRYYSCKTYKHTHELEKCGNKIWRADKLEELIIDRVNNYSFASRNVDKEDELDNLNEKLKTEHTKKKRLFDLYISGSYEVSELDAMMADIDAQINYYEAQIEANEELKKNKKIQENLADLATVDFNSLEFREKQLYLKSLINKIYIDDEQVTIEWL

SEQ ID NO: 21021 - protein, 467 aa, synthetic construct
MKCVIYRRVSTDMQVEEGISLDMQRLRLEQYAKSQGWVVVNDYCDEGYSAKNTERPAFQQMIKDMKKKQFDIILVYRLDRFTRSVSDLHSILKTMDEYNVKFKSSTEIFDTTTATGRMFITLVATLAQWERETTAERVRDSMQKKAELGLRNGAKAPMGYDLNKGNLYINHTEAEIVKYIFEMFKTKGIISIVKSLNSRGVKTKQGKLFNYDAVRYIINNPIYIGKIRWGEDILTDIAQKDFESFIDKDTWYTVQQIQDSRKIGKVRLHNFFVFSNVLRCARCGKHFLGNKQVRSHNRIVMSYRCSSRHHKGTCDMPQVPEDVIEKEFLNLLEDAIVDLDDTEEKPIELSNLQEQYNRIQDKKARLKYLFIEGDIPKNEYKKDMLTLTQEENIIQKQLANITDTASSFEIKELLNQLKDEWFNLNNESKKAAVNAIVSSITVDVTKPARVGKNPIAPVIKVTDFKIK

SEQ ID NO: 21022 - protein, 535 aa, synthetic construct
MAKTVRMIPATPRVFRSEVTAEPRRRRTAGYARVSTDHEEQASSYEMQMAHYKNYIESRADWDFVGMYSDEGISGTNTKKRDGFNQMIEDALSGKIDLIITKSVSRFARNTVDSLQNVRKLKENGVEIYFEKENIWTFDTRGELLITIMSSLAQEESRSISENTTWGKRKQFAEGKTSVGYSAFLGYDKDFKINEEQAQVVKLIYKLFLGGRSFYAITKELEKRGIKSPSGKDKWYISTVRSILTNEKYRGDALIQKEYTADFLDKTRRKNTGEIPQYYVEEHHEAIISPDLFDFVQTEIKARENGSKHSGVSIFANKIKCGCCGGWYGAKVWHSTDKYRRVVYRCNKKYAKKGKPCSTRHLTEEEIKQIFVKALNSLVEVRENVIAELRSLIDSVCQTGELLEEHDRVEQELGVLAERLETLIRENARVAQDQTAYLKQENEIRARYVEKQGHLARLDEQIAERDGKRNILEGMIQVVCDINGEQVAFDEELWSGLLDHIVVKEDGAVVVVFKGGIESGVDGCRGLFYLRKQSG

SEQ ID NO: 21023 - protein, 499 aa, synthetic construct
MKIRRVQPNPTLQKKLRVAAYARVSVDTLHHSLAAQVSYYSSLIQKNPAWEYAGVYADEGITGTSTTHRTEFKRLIADCNAGKIDLVLVKSISRFARDTVDCLHTVRQLKEKGIVVRFERENIDSMSEDGELLLTLLASFAQEESRSIGDNIRWGVRRRFAEGIPNGHKAPYGYTWDGEVFRIIQAEGGIVKEIYRRYLAGESAYAIAKTLAGCGITGRQGRPIEQTTVKDILSNISYTGTMVLQKNYISEGHIRKRNKGELSMYLVEGIFEPLISRDDFDKAQEIRKLRTEQAVNRNPVLLPFSGMVKCGCCGGGFSRRTAGKYRRWGCNTRERKGRESCDSRPIKEEELVAAVRIVMEKDDFDTVELKRKVSKIVIHGDCVEFHLTNGRIKKTARIYNGQRGSNPFTNKVYCASCGSKCERDTWTRGTKVWACSQLRTKCGLKQLSESELKEAAESFFGDGYEGKIVQNVKRIVISDDEVIFQLKEGGAYRWQRQCG

SEQ ID NO: 21024 - protein, 473 aa, synthetic construct
MAKKVSEVQSAAVYARISADVEGKSLGVQRQLEDCRKLAAERGWTVGREYVDNDVSAYSGKVRPGYEAMCTDLAAGVRDAVIVYNLDRLHRRPAELEDFVALCEGAGVNQVATVTADIDLGNDDGLFMARIFAAFAAKESGRKSARMRRKYEQKAAQGLPHGPNRPFGYEPDKITIRETEAEVVRELVTRVIAGESVNALTVWLNETGVKPVRGERWASTAVRGIVSSPRIAGLRAYKGEVVGDAAWEPIITAAQRDQVLAALSVRSWNRKRSPRKYLLSGLCRCGRCQARMFSAARLEAGAHKRRYVCSSSPDHGGCGRMTIVAEPLEKLITDAVLTRLDSKVLADALAGKVRSNPDTAALSAQVEAAQARLDELTGLYSSGAITAREWIMARDPITDTIGRLRREIAETLDTGPLAELAGQGSKLRSEWDDLGLDRCHAIIRTVIDHVVIKPGQPGARGLDMNRIEPIWRK

SEQ ID NO: 21025 - protein, 560 aa, synthetic construct
MENNKKLRVAAYVRVSEETKETQHSLQAQEEFYRRQIHEKVEWELAEIYKDNGISGTDIKRREGFVRLISDCKAGKIDLILVKSVSRFARNTLDLLRIVRYLKQLGVSVRFEEQNIDSLTEEGELMLTLIASVAQAESESISENIKWAIHKAFQNGIGNTRRRTLGYHWVDGKLTVIPEEAEVVKRIFTNFLAGGSHTKTAEELTGEGITSINGKPISVSAIGNILRNITYTGNTLLQKTFIQDPISKKKVMNTGELPQYFVQDTHEAIIDMDTFEQVQEKLARNKEMGRFPYNHTGKKYPFTMKVICGCCGRHYTRQLWNTSEKGKKRPTWVCTGKKAEKYRRCDSKNIPEAKLMEASAKVLGISEFDEDIFFDKVESITVQGTHELLFCLKDGAEVTQHWEHTAQKASWTPERKARHAANRTASPAKTKGASCMTGRIRCELCGMNYNKQTRKVARAGMVTFWKCRGIGNGGSCASEQITHDHLNSILAEALGVAQMTDEIFTGQIDHIGMCEPGKLIIYKKNDGTIPGSYELLPMEKRQKPYRPRNRKGNVRSQGDT

SEQ ID NO: 21026 - protein, 623 aa, synthetic construct
MKAKKTDNGKITALYERLSRDDDLTGDSNSIINQKKLLEDYAKEHGFTNCVHFTDDGWSGANFDRPNWKRMIAAIEAGEVSHVLVKDLSRVGRDYLQVGFYTEVMFKERGVRFIAIANGVDSDKSESSEFAPFLNIMNEWYVRDSSRKITSVLHARGMSGKHTNSHCIYGYKKDPNDKDHWIIDEEAAEVVRRIYRMALESKGPYEIARILALEKVERPSYYLAQRGVGKHQSNFNPAERYTWRGGTVADILSKPEYMGHTVNFRTYKESYKDKRSRMTPKEDLVIFENTQEAIIDKETWERVQSLRKTIRRTDTIGAANPLTGLMFCADCGAKMYNHRGGAGLARDWAGRPNGRKRPERDEYNCSRYDLGNQHYNRYCTTHLIRTAVVNELLLEAIKEVCDYALNNEAAFMEQVCSASSERQVKAAKAIRQRKQRSEKRADELSRLIRKLYEDNVNGRLSDKLFEQMLHDFEAELESLTESVTQDEQELDRISRETVNAEKFLTLVKKYTDFSELTPAMINEFVEKILVHQAEGKGASRTQEVEIFFNFVGKVEIPHEEIVLTEEEKAALAEQERRRAKKAEYNRRYMEKKRREWREQREREQEQKPHKLPPVADEKGEKSA

SEQ ID NO: 21027 - protein, 559 aa, synthetic construct
MKTKLYSYIRFSSMKQADGSSYERQKRTAAEIAAKYDLELVTSYQDFGVSAFKGANSRTGALSRFLDEIGRSIPVGSWLVVENLDRISRQSIIEAQELFLSIIRRGITIVTGMDGKVYSKESVNANPIDLLLSVMLFARANEESQTKRNRTNSSALIKIKAHQENPQNPAVAIEEIGKNMWWTDTTSGYVLPHPVFFPIVQEVVELRRNGRSTAEILDHLNATYTPPPAASHKRHSNWSRAMIERLFHTRALIGIKEISVDGVKYELKDYYPRVLDDAEFYHLKKSIGVRACNYGDKEEVKPIPLLSGVNLLKCDHCGSAMVKVKGTNRRPNQYRYSCDAMRSSRIECVHTNWSFRGDQLEKAVLQLLADKIWIAEDKANPVPALKVQVDEISRKIDNLIALSAMTGATKELADQITTLNSERETLYNQIKMAEEEMYSVDSQGWEKLAEFDLEDVYNEDRIKVRFKIKQALKRIGCSRIDRNKNLFVLEYIDGKTQRVVIENSRGPRKGRIFVDLKTINDRQILESNGLVLHPCLDMLTDKNWKPEEEIPGPLQEFGI

SEQ ID NO: 21028 - protein, 703 aa, synthetic construct
MIDASEVREDDETYMNPIDRLFEALEKKEPTHFAVKQYKKYKLAAGVVCSKRLLNQAVGKSLRTHNLKPKKGAQVMRKNEKITALYERLSRDDFGKDDDQQRESNSISNQKAMLEEFAARQGFTNIVHFTDDGISGTCFDRPGFLAMMKEVEAGNVEYLCIKDMSRMGRDYLKVGQIMEILRQRGVRLIAINDGVDSARGDDDFTPFRNIMNEYYARDTSRKIRSTFQSKGKSGKHLTGTVIYGYLWNEARDQWLVDPEAAEVVKRIFAMTIEGYGPYQIASKLKEEKILIPSAYLAQHGEGVNKNKTFKDVYGWGSSTICNLLEKREYLGHTINFKTRKHFKDKKSHYVPENEWTIFENTHEAIIDQQTFDLVQKIRGNVRRYPDGWGEAAPLTGLLYCADCGGKMYVHRTNNGKRISQYTCSQYSKVPVGKLCTTQHRINEDVVLSLVSEMLKAIAEYAKHDRAEFVRVVQEAQSSQQTAEVRKQRTRLATAKQRVSELEVLLCKIYEDNILGKLSDSRYATLDAQYEKEQSELTAEISVLEKAVKSYEKHEKDADRFIALIGKYENFDKLTIAMLNEFIEKILVHERDRKGSIQTTQEVEIYFNFVGRFVPPAFGEVELTPEELEEIRKREERKDRLHQNYLKRKASGAQKRYEDKIKERKKAEIEAKKAAIRAEDIAKGVFVPVSSLPQREPMKGVQSA

SEQ ID NO: 21029 - protein, 502 aa, synthetic construct
MNKICIYLRKSRADEELEKTLGEGETLSKHRKALLKFAKEKKLNIVEIKEEIVSGESLFFRPKMLELLKEVENKQYTGVLVMDMQRLGRGNMQDQGIILETFKKSNTKIITPMKTYDLSNDFDEEYTEFEAFMSRKELKMINRRMQGGRVRSVEDGNYIATNPPLGYDIHWIKKSRTLKINAHECEIIKLIFKLYTEGNGAGSIAEHLNNLGYKTKFNNNFSRSSVLFILKNPIYIGKVTWKKKEIKKSKNPNKTKDTRTRDKSEWIVVDGKHEPIISIKMWNKAQEILNNKYHIPYQLVNGPANPLAGVVICSKCKFKMVMRKLKGIDRLLCRNNKCDNISNRYDSTEKAIVQALERYLKEYRINISNQNKTSDIKPYERQVNILEKELAALNEQKLKLFDFLERGIYDENTFLERSKNIEERITKTSSGIEKINDIINKEKKVIKEEDVIKFQKLLDGYKNTDDIKLKNELMKKLVNKVEYTKDKRGETFGIDIFPKLKP

SEQ ID NO: 21030 - protein, 552 aa, synthetic construct
MSTITKIQSYQRDVKQLRVAAYCRVSTDNIEQLESLENQRIHYQEYISNHSDWQLAKVYYDEGISGTKLTKRNALKELLADCHNHRIDLVITKSISRLSRNTTDCLQIVRELQQLNIPIIFEKEHINTGAMASELFLSILSSIAQDESHSTAGNLRWAIRQRFASGKFRVSSAPYGYSIEGGNLVINRAEARIVREIFQQFSKGMSASQIAKGLSHKHIPTKRGGQWRSNTVINILRNSNYTGDMLCQKTYRDDQYHRHFNQGELTQYLIEDHHPSLVNHETFNRIQALLKEAAQKRHIETDSHKYQHHYLFSGKIICGNCGTTFKRQTRPNKICWACQRHLKSAKQCPIKAVPEASLEVAFCNMMNKLVYSRKFLLQPLLENLQVQANSDTHGRLNSLTERIKANDHKAETLTELMQSGLIDKSIYVNQTAQLEQDTYQCREKVKQLHSRNTDSANSFEDVRSLLHWCQQDQELSGFDKTPFQDFVQQIVVHSSIVVFKLKCGLKLTEKLTKAVTINDHFYRNIIRQRFNEPIKQAEYLYSIIESEGDLIG

SEQ ID NO: 21031 - protein, 525 aa, synthetic construct
MGKVRIIPAHQPKGNSVHRQRSPQPFEKLRVAAYCRVSTDYDEQASSYETQVAHYKELIQKEPTWEFAGIYADDGISGTNTKKREQFNKMIAACKAGKIDLIVTKSISRFARNTIDCLKYIRDLKAINVAIFFEKENINTMDAKGEVLITIMASLAQQESESLSQNVKMGIQYRYQQGKVFVNHNHFLGYTKDAQGNLVIEPEEAKVIKRIFYSYLNGMTMKQIADSLKADGILTGGKTKNWRSSSVAKILKNEKYMGDALLQKTYTVDFLNKKRVKNEGIMPQYYVENDHPAIIPKSVFMQVQQIIKQRRNGITTKNGKHRRLNGKYCFSQKLFCGKCGDILQRNMWYRPEKVAVWRCASRIRRSKIGRRCMIRNVKEPLLKEATVEAFNQLIEGHELASKQIKANIMKVIKSSKGPTLDQLDKQLEEVQMKLIQAANQHQDCDALTQQIMDLRKQKEKVQSRETDQQAKLHNLDEINKLVELHKYGLVDFDEQLVRRLVEKITIFQRYMEFTFKDGEVIRVNM

SEQ ID NO: 21032 - protein, 452 aa, synthetic construct
MKAAIYIRVSTQEQVENYSIQAQTEKLTALCRSKDWDVYDIFVDGGYSGSNMNRPALNEMLSKLHEIDAVVVYRLDRLSRSQKDTITLIEEYFLKNNVEFVSLSETLDTSSPFGRAMIGILSVFAQLERETIRDRMVMGKIKRVESGLPLTTAKGRTFGYDVVDTKLYVNKEEAQHLQLIYDIFEEEKSITFLQKRLKELGFKVKSYSSYNKWLMNDLYIGYVSYSDKVHVKGVHEAIISEEQFYRVQEIFSRMGKNPNMNRDSSSLLNNLIACEKCGLSFVHRVKDTASRGKKYRYRYYSCKTYKHTHELEKCGNKIWRADKLEEIIIDRVKNYSFATRNLDKEDELDSINAKLQVEHSKKKRLFDLYMNGSYEVAELDKMMADIDAQINYYNSQIEANEELKRNKKVQESLAELATVDFDSLEFREKQIYLKSIINKIYIDGEQVTIEWI

SEQ ID NO: 21033 - protein, 577 aa, synthetic construct
MTTRRPHVYTRISKTTQTEGSGLDEQTTRIEQYLESKKHLFEGEVTYWQDIGLSAYKNKNIQDGQLAEFIKQVDEGKIGEGDALIIYSLDRLSRRSSWDETTIQHLVKKGVEIHDVSTPVVLNREDSMSKIIMELIVTRGNNESKIKSERSTAGWEKRLNDTLNDGRVFTRKLPRWLGSNDDEYVVIKEEAEIIQRIFREYTNGMTSPMIARRLNEEGIKSTGESLWRPTTVTKLIKDERLRGNLVREKITLIPNVFPKIIDDELFVLANRILSTNAVGKKGRPRENNKTREVNNIITGLVRCGKCGSKVTTSKNGRGMRYIVCLARLNYLICGQKSIRLEEVEKIVINHVKQVDMNKVLSISNVDTTSEALLQAELIELEIEEQKCNDKIEERKRLKQRTSLPLATALTDIQDRIEEVKSNLLNLQVQEPLPDISNVDLLALMDVSNVELRMSLRKYLIQTVETITFRYLDEHCLIELNYKNDVYRHVVVTTKKLEVLHDIGIERTGDVVIYSTGSFSIIEDESAGVCTFSGLNNVETKAYFLLANYMGVLEGKQWIVDWMYEKENMECVIGSTPH

SEQ ID NO: 21034 - protein, 515 aa, synthetic construct
MKTAIYLRKSRADLEAEARGEGETLAKHRTTLLKIAKEKNLNVLTVREEIVSGESLVKRPEMLALLEEIEDNKYDVVLCMDMDRLGRGGMKEQGIILETFKRSNTKIMTPRKTYDLNDEWDEEYSEFEAFMARKELKIITRRMQRGRIASVEAGNYLGTHAPYGYDIHRLNKRERTLTINLEEASVVRMIFEWYANEDMGANAIMRKLNELGYKSKLGNDWNPYSILDMLKNNVYIGKVTWQKRKEVKRPDATKRSCTRQDKSEWIIADGKHDPIIPESLFEKAQEKLNTRYHVPYNTNGLKNPLAGIIRCGKCGYSMVQRYPKNRKHTMDCKHRGCENKSSYTELIEKRLLEALKEWYINYKADFEKNKQDESTKETQIIQMNEAALRKLEKELVDVQKQKNNLHDLLERGVYTVDMFLERSNVVSNRINEITETIENLRKEIKTEITKEKVKKDTIPQVEHVLDLYFKTDDPQKKNSLLKSVLEKAVYTKEKWQRLDDFKLVLYPKLPQDDDK

SEQ ID NO: 21035 - protein, 490 aa, synthetic construct
MIIDLDATGRNFKRKIMGGIQRVEKGEARGIAVWKFSRFGRNDLGIAVNLARLEHAGGQLASATEDIDVRTAVGRFNRRILFDLAVFESDRAGEQWKETHQWRRAHGLPATGGKRLGYIWYPRRIPHPTKLGEWVTQDERYEVDESSRVDIETLWSRKLGIGQPAPDGYGSLAAWLNSLGYRTSDGNPWRDDSVRRYMQAGFPAGLLRVHHPDCHCDYTANGGNCTRWIHIDGAHEAIIDPETWERYEAHSAERRSIAPRARNPLYPLTGLARCGGCRQGAANTSARRAAGRILGYALACGQSRSGLCDNPVWVQRSIVEDEVRTWLAREAAADIDAEPPTPIPQPRNERAAAGRQRERLQAEQTRLTNALTNLAVDRATNPEAYPEGVFEAARERILKDKKTVTEALEEAAQVEAMPQRAELIPLAVGLLEEWDTFEAAETNRIFRSLIRRVVVTRGSAGRKGVEGSGQTTIEIHPLWEPDPWAETPAV

SEQ ID NO: 21036 - protein, 515 aa, synthetic construct
MKTAIYLRKSRADLEAEERGEGETLAKHRTTLLKIAKEKNLNVLAVREEIVSGESLVKRPEMLALLEEIEDNKYDVVLCMDMDRLGRGGMKEQGIILETFKRSNTKIMTPRKTYDLNDEWDEEYSEFEAFMARKELKIITRRMQRGRIASVEAGNYLGTHAPYGYDIHRLNKRERTLTINSEEASVVRMIFEWYANEDMGANAIMRKLNELGYKSKLGNDWNPYSILDMLKNNVYIGKVTWQKRKEVKRPDDTKRSCARQDKSEWIIADGKHEPIISESLFEKIQEKLSTRYHVPYNTNGLKNPLAGIIKCGKCGYSMVQRYPKNRKHTMDCKHRGCENKSSYTELIEKRLLEALKEWYINYKADFEKNKQDESTKETQIIQMNEAALRKLEKELVDVQKQKNNLHDLLERGVYTVDMFLERSNVVSNRINEITETMENLRKEIKTEITKEKVKKDTIPQVEHVLDLYFKTDDPQKKNSLLKSVLEKAVYTKEKWQRLDDFKLVLYPKLPQDDDK

SEQ ID NO: 21037 - protein, 514 aa, synthetic construct
MRAALYIRVSTQEQAEKGYSIQAQKHTLIEYCKSQGFNDYQVYIDEGISGTSTNKRIALQRLLEDAEQQHFQGVFVWKINRLVRNLVDLLSIVEYLEKYNVPLKSVSEQFETTTPQGRFILTMMGAVGQLERETIVDNTKLGRRQRNKEGWYCGAKILGYDVIAKKVCIQEELETNLKVNKREAAVVKEIFELFASGKGYKVIVNQLNKKGIRTKTGKLFTTGVVCKILKNQVYIGNIVCKIDEKVCVINGRHPVIISNELWEKVQQKRGDKKKGGIGPRRSYPLNSFLKCPMCQKSMKGTRVVAKRKSGDKKVYDYYQCLGYLNGGIESCHPNLIPALEIELEVYKVLQNFLNQPTIIKDVFSRINEPSSKQKENMVLLNTVKLQLERLIKKKKKLLFHFEEGLVSNEDFLQEIERISEDITVVQDRIRSVEHELKRCKDATLSKVQVRNMLRNFVSLLNESNKEDMDKLFSSFVHQVEVSKEHKLKLVSLKINEYVIQIVEKKEGKQRWEIS

SEQ ID NO: 21038 - protein, 548 aa, synthetic construct
MGNIIRVAIYARVSTEEQAEHGYSIDAQLDTLRNYCKMYEKIVVKEYVDRGVSGKSINGRYELQKLLRDAKNGEFDEVVVWKISRLARKTIDLLQIVDELNKHKVAFRSFSENFETETPMGKFALQMMGAVGELERNTIVDNVKMGMKQRARTGRWNGGIVLGYKSISRNSGGKGRESTRLVIVEEEAVIVRKIFNMYSQGKGLKAIANKVNHEGYKTKKGNDFSTATIKEIILNPIYIGKIRFNRYENWSESRRKGKSENIILVDGKHEPIITNELWKKVQSLRQMKAKKSIKNYEGNFLLTGLMKCPKCGSAMVSSRTTNTLKDGTKKVLRYYSCGAFRSKGSAVCSANSIRADYAEQYVLQRIQEVVKHPKVLKELLHNINKQKKEGIKPLKDELQVINKSIQSIENRKQKYFSLYEDSLLDQTMFTDRIQELKEEMERLSVRKSEIEFELGDGDEKILSYEYVKQLLVQLNVLLEAIPCDEKKVLYHLLIENIVVNDEKKIENIQLNINEEIQQELLKKPLSKEEMDRGFCISKNGRYPLRIFI

SEQ ID NO: 21039 - protein, 452 aa, synthetic construct
MKAAIYIRVSTQEQIENYSIQAQTEKLTALCRSKDWDVYDTFIDGGYSGSNMNRPALNEMLSKLHEIDAVVVYRLDRLSRSQKDTITLIEEYFLKNNVEFVSLSETLDTSSPFGRAMIGILSVFAQLERETIRDRMVMGKIKRIEAGLPLTTAKGRTFGYDVIDTKLYINEEEAKQLRLIYDIFEEEQSITFLQKRLKKLGFKVRTYNRYNNWLTNDLYCGYVSYSDKVHAKGIHEPIISEDQFYRVQEIFSRMGKNPNMNKESSSLLNNLIVCEKCGLGYVHRAKDTVSRGKKYHYRYYSCKTYKHTHELEKCGNKIWRADKLEEIIISRVKNYSFATRNLDKEDELDSITEKLKTEHSKKKRLFDLYINGSYEVAELDKMMADIDAQINYYDSQIEANKELKRNKKVQESLAELATVDFDSLEFREKQIYLKSIINKIYIDGEQVTIEWI

SEQ ID NO: 21040 - protein, 554 aa, synthetic construct
MTEEKQRFAVTYQRFSSVRQVGNSSLDRQTDTQKAWLRQNPNVTVIDNFVDKAMSGWSGKHLKEGSLGQLMKAIEDGIIQPGTLILVEHFSRLTRQNIDNAEELVKRIWKAGITLVTVRDNTEYPPEAVNNMSLRIRLIVEMEQAFKESEWRSAKVKASYIRREKLAKEEGKAPRIRKPFWLNSDGTLNHLHQAVKDMFNWYLEGLGQQRIVVRLREKYTDTAIQKINPSTVMRWIQSEIVRGYWRGNRVYEPAVDDQLFFDVQAIHKSRLYKNVKPDRQWPLSGLMQCGVCGRGMSIQKSGKSNPVVRCSSKQRDHSCNRKTTFPYFIVHMYMMTHVLQHAIRLHSDKSSNKGLQIELGKVERKLATTRKKLNDEKEFYNKASNEGQNTTMILQLMNETYQKIEELEEQEKSLKASLKQSNRAVSAESRDLLFTPETFNLEMHKLGFKIVVGEEVLSTIGFDKPVSKMVYLGYCRKERAYKYADASSDFVKVWPSSLVTDELLNMQMLKNYINSSSGLKYIWDHIYDDDLEEKLKKRSNEKKEKEKKLKEKGE

SEQ ID NO: 21041 - protein, 526 aa, synthetic construct
MPNKKMKIIPARRRVGSNPELIGEETPKLRVAAYCRVSTEYEEQNSSYQTQVSHYTNYILSHDGWDLVKVYADDGISGTNTKKREQFNQMIDDCMVGKIDLIITKSISRFARNTLDCLQYIRKLKDKNIGVYFEKENIKTTDAKGEVLLTIMASLAQQESQSLSQNVKLGLQYRYQQGKVMVNHNWFLGYTKDEEGHLIVDPEQAKIVKRIYYEYLEGYSCKQIARRLTADGIPNGAGNTIWGDSNIASILKNEKYIGDALLQKSYTIDFLTKKRIRNQGIMPQYYIKDDHEAIIPKDLFRRVQEERKRRRAGIKVPCGKTRHYNNRTCFSLKVFCGRCGDIYHRVAYNYSDEHGQVVKWLCMTGHDHDLVTCHGRAISERQLKEVCLKAFNKIIEPNKAFRAKLQNNIRHAISQLNEEQATKLDRELDRLQILLINQTPHSKDYDKIAGEFNKVQQQRDELQTILDQQNEEIEKNVNLQKFIDANSKQLNEFDEHLVRQLIKKITIQETYCDVEFQNGDSLKINL

SEQ ID NO: 21042 - protein, 505 aa, synthetic construct
MENTKIMQDFIPSQKFKRVAAYCRVSTNSDEQLKSLAAQREHYQQYISNHPGWELAGIYYDEGITGTKKNKRPELLHLLKDCEAHQVDLVITKSISRLARNAADCLDIVRQLKSLGIPVIFERENLNTANMDDEFILTVLSSMAESESNSISANNRWSIQSRMANGYFKVSTPPYGYDRDFEIIPDEAKVVKQIFTAFLNGKSSLSIAKSLTVPSPSGRKWSDSTIRSLLRNEAYTGNLRLQKTYTDHSFNRHVNHDEDTMTWYQDHHDPIITLDEFDRTQSLLTKRAKYRHTETRSLKYRQSYLYSGKLICQCGAKFKRQKKAKRVTWSCQKHIKDSQACPIKPIDERQIEVAFTTMINKLIFSKNKLLNPYLQGLRNEPENRKYRRMKELEESILLATEKRDTLMTMLSQDLIEPNEMMAKTKELIVRSNQYRQELSKLRSTFGENDNLILATRGLLNYVNNHSIQATFDGQLFKQTVDNITVQDNSHLTFNLFCGLSLPERI

SEQ ID NO: 21043 - protein, 543 aa, synthetic construct
MSKTIISYSRVSSAKQVAGTGLSQQKDKEMLDTLSIELGIPIDSREFSDAGKSGYHSKNLEGDFGKLLNLIDDGSIVKGSVIAITSLDRISRAKTNKAMELMLSVINRGIRIYTAMDGKLYSDDSPNLTADLIVSVIIMSQAHEESHKKSVRIKGANTKMIEAFLDGERGKDGYPKAISGGRLPWWVASIDSQIREDKIYFPIVKDAIKKMFDGYGTNRLTEYLNDTYAAPQGRGKWSRSTVAKIHTYTALTGVLNITSDGKEYSLQDYYPRVLSDGEYQRLLKMKNGKQYSRTASEIVPLLTGNKVAKCGVCGSSLASATSATGYRSYRCMSKQNRGKSYCSSSAVPAALIDRVVFGLIEDVSFTEKESKEIEGNPIQTLKDELEALENRLGELLEAYEEGTLPKTLFPKMNRVELDIETKKQELKQAQIALPQDIDELELVRRWSNATAECIDNPKATDDRLALKELITDSVNSVTVRRSNRSKVYNVVVELVTGEQRYAIIEGDTVIEQSFTLPELHHVRKRALGNMLDRYITENSDKDL

SEQ ID NO: 21044 - protein, 537 aa, synthetic construct
MIRQTTQLAPVTALYARLSKDDELQGESNSISNQKRILETYARDNGFLNYRFFVDDGWSGANFQRPGFMEMMDCVENGEVKCVITKDLSRMGRNYLQVGMFTEITFPKKGVRFIAINDGVDSAQGDNDLTPLKNLFNEWMVRDTSRKIKAVFRSKGLSGKPITSQPVYGYLKGEDGRFIIDEEAAPVVKQIFSLCLAGNGPTKIARMLTEQEIPTPGTLEYRRTGSTRRYYPDYPYRWATNTVVHILERKEYLGHTVNFKTEKISYKVKSSVENPEEKQAVFKNTHEPIIDLATWERVQELRKQRKRPNRYDEVGLFSGLLFCADCGSVLYQQRYENKTRRQDCYICGSYKKRVKDCTAHFIRTDLLTAGVTANLRKVTDYAARHEKQFMKLLIEQNEDGGKRRNAAKRKELDAAEKRIAELSAIFKRLYEDSVTGRISDERFAELSADYEAEQRQLKERAAELQGELAKAQEATVNAEKFMNIVRKYTSFEELTPTLLREFIEKIIVHECSYDENKNRRQEIEIYYSFVGKVDLPE

SEQ ID NO: 21045 - protein, 509 aa, synthetic construct
MKALIVVRLSRVTDATTSPERQLQICQDLCVQRGYEVVGVAEDLDVSGAVDPFDRKKRPNLARWLSDEERPFDVLVAYRVDRLTRSIRNLQELVHWADDHGKLVVSATEPHFDTTSPFAAVVIALMGTVAQMELDAIRERTASAARYNLRAGKYRGSLPPWGYLPEKVDGDWRLVQNPEQVRIIHEVYHRIVEGHESLQSIAHDLTRRGVLTPKDSFAELRGRPVAGREWSVTPLKRALLSETMLGYAVSKEKAIRDADGSPIVRSDPIFTREQFEALKAELASRAVRGEPTRVSSSLLLRVLHCGVCGLPAYKFNGGSHAQFPRYRCKSMTKAAKCGNGTVAVPEFDAFATEQVLEFLGDSERLERVWEAGSDNAAELAEINAELVDLTGLIGSPAYRVGSPQRVALDARIEALAARQEALQDEETRPSGWTWKPTGEKLADWWDAQDVEARNTWLRTMNVRLMYDTRGGTMRRSIDFGDLRDYEKFLRLGPTARAALRRTTGAVNPS

SEQ ID NO: 21046 - protein, 502 aa, synthetic construct
MPQQNNGIAYSYVRFSSKRQEQGDSVRRQTEMAEKYALEKGLTLSSKNFQDLGISAFKEGKRPSLVDMLDTIENGQITAGSTIIIEALDRLSRRGIDATLETVKDILRKDVQVVSLSDGLLLTKNSLNDLQSIIRIAVAADLAHKESERKSSRLRETKGQQRQAALAGKAINKILPFWLQRASERYEFSDKAHIAREIIRLKQEGKGSNMIAKTLNKQGVAGIRSSQWNHASITKMLKHPALYGAYQTGETTKERELIKLDLIENYYPALISKEDWLLIQSDQSKSTRGRRTTDNPYSGLLRCGCGGALVKRQTTVKNKLYVYHGCLNAKDGRCEQNISIKGLDQTLKTILGRLEFKKRPTPDQSIHQERKQLEDRISNLNNKLLTLDDIPVSVIKTIGTLEERLKTVTDLILQNEREQRGIDAVQSETLSSITDGLELNLLLKRVLKSITVSASGNGWAVKVLHLSGHKQNFLMVDGKIKFLSDTITLQKLLASFKESAEE

SEQ ID NO: 21047 - protein, 479 aa, synthetic construct
MKKVAIYCRVSTLSQAEDGYSIGEQQDKLNKYCEIMGWEVSEVYTDAGFSGSTIERPAMKKLLRDAENHTFNTILVYKLDRLSRSTSDNLYLIKEVFKKNDIEFVSLNEKIDTSDAMGEFFFTLLAAVAEMERKTITERMALGRLGRAKSGKTMAFSTPPYGYKRTPGQDILEIVPQEAKIVQKIFTDYMGGKSVATIRQELNEKGYCSRKGKWPFSTIRNMLENTVYIAKGKFKGKTYEQEHKKIISEELFWAVQDELKKRQIKQVELTNVARPFRAKYMLSGLLKCGYCGGHITSLTGPKRLDGTSAVRYECVRRKDYRKRLSDNQKKCDSGYYHRLDLEEHVIEYLANLPTKETELKKFLSHDKSEAFNFEAVKKELQSVNKKIDKENYLFRNDYIDEVELQKNVKNLLGVKKQLENQLNENKEGKINHDKNNRVLELLKSGDIRTMDYEQQKKIVKTCISKILLTSDEITIILNF

SEQ ID NO: 21048 - protein, 510 aa, synthetic construct
MALHENSKIAVYSRKSREDRDSEDTLAKHRNELEYLIKRENFKNVQWFEEVVSGETIDERPMFSMLLPRIEHGEFDAVCAVAMDRLSRGSQIDSGRILEAFKQSGTLFITPKKTYDLSIEGDEMLSEFESIIARSEYRAIKRRTINGKKNATREGRLHSGSVPYGYKWDKNIKAAVVVEEKKKIYRMMIKWFLEEEHSCTVIAEMLNELKVPSPSGRSIWYGEVVSEILSNDFHRGYVWFGKYKKSKNNNSIVQNKNLDEVLIAKGHHETMKTDEEHALILNRIEKLRTYKVAGRRLNMNTHRLSGIVRCPYCHKAQAIEQPKGRKKHVRKCLRKSAERTKECEQTKGIHEEVLFQSIMKEIKKYNEALFSPTEQDVNDDSYTTQLIGLREKAVKKARGRIERIKEMYLDGDISKTEYKEKLKISQETLQKAENDLAELIASTEFQNALSAETKKEKWSHHKVQEMIESTDGMSNSEINLILKMLISHVTYTVEDLGDGTKNLNIKVYYN

SEQ ID NO: 21049 - protein, 403 aa, synthetic construct
MNRSGKKCVLYPRVSTEMQVDGFSLDGQKNSLKRFADREEMEIVNIYEDAGKSGKSIEGRPAFMQMLSDIENGLGIDYVLVYKLSRFGRNATDILNSLEHIQSFGVNLICIEEGIDSSQTSGKLLISVLSAVAEIERENIIEQTMNGRKEKARQGGWNGGFAPYGYFLKDNQLFIQEDEAEAVRIIFDKYVNGNMGFYKIANYLNLQGIQKVKRDNGTLTQWSTHFVRMIIDNPMYMGKIAFGRRTREKVKGTKNEYRQVHQDDYILADGQHDGIISEELWTQAHERREITGVKASSKIGRDRAHLLSGILKCPKCGGPMYTNKHAWTNKDGTYKEIYYYVCRKARTTRKKSCDYKAMLKKTDIEPLVVEAIRDLIKNEDFAAEIKSKIGKQIDTSTLDRERT

SEQ ID NO: 21050 - protein, 592 aa, synthetic construct
MTSAYADFIDELQQDVTIPIQPPMDDLAPGTRAVIYLRVSSTGQVRTDYNPEGISIPAQREACLRKARELGVTVIDEYVEPGRSGTEMTKREAFQQMLARVRSQGDVDVIIIYQLSRMARNRYDDAIVMADLRKRGVTLVSATEAIDDTPVGQLMHGILATFNEYQSRQSGADIAYKMGQKARNGGTLGRAKIGYLNHIDHSDGRVIRTIIVDPERAPFVQLGFELFATGDYTQEELADELYDRGLRTRATRRHPAKKISENKISQMLRDRYYLGYVEYDGEEIQGRHEPLIDEDLFDTVQEILESRMTAQERRRVHHHYLKGSLFCGRCQRDGIKRRMIIQRTINSKGAEYLYFFCRGRQKGLCQAPHVNVTLVEDAVERHYSAIRFSQPFIADMRDQIDAVLGEQEKSARLLRKQITAQLKELDTKEENLIDLAADSTLPRTKVKEKLRDIARERRRLEERLDTANADLTDSAQLVNAGLALLKQPDQLYRRCNDQQRRLLNQAIFHALYIEDDKITDGELREPFGELHAIQDQRAGATGAEGASKRTTRDAGGPCTPSGVAVLLRGLHSGTCSSKTSKVELRGFEPLTP

SEQ ID NO: 21051 - protein, 522 aa, synthetic construct
MKLSHILQPNMKAAFYGRHSTDKQDMDMQLNSVMEVIRKYDCIHTHSFLDKAVSARKNKITSRKELENMFEAAKRKEFDFVIVYKSDRLARDPLEHQTIRIVMKTLDIPIIISSTESVYNTDTDLIVQLMEDGFTKYEVDTIIARTRSGLENKAKQGKWLGGKPPFGYTYDKNSEQFIEHTEELCYVKEIFNLYVNGHGFQYIANTLPNGSRRGKDWGKENIKAIVLNPFYCGLLSWRRQTDGKQNARDIWIEAPNHYVKPIISRTTWESCWRIYSEKRNGNMVPKHYKTSFLLQGLLSCERCQELMKTKNQQTVSSTNKQYGGKIYFCTNCKLRIDADLLHDKVVNQTLTDVKISGFHNVYHAIEQKIQYEIQELNNNIQKHQRLFENYTIKLHNITEELKQRMKNNDDKRFLKSLAIYRLDIQRKLDGVTQQINDFKQKITLKEKIEKSKETWLHTLNEVFQDDVKLQEISNMDKRRFLLPLIQSVSIKENKKRNEYDISLQLRTDFSKRDVKNQISLIL

SEQ ID NO: 21052 - protein, 548 aa, synthetic construct
MSKRVGIYCRVSTIEQAEEGYSIDEQKIKIQEYCEKNGHQVYQIYEDRGISGKNITNRPGMKQLLEDATKNKFDLVVVWKLNRISRKLLDLLNIVELLDKHRIAFRSLTESFETETSTGRLNLSIMGAVGEFERATIAENVKMGLLARAREGRWNGGVVLGYDIVEIPNEGKKRKNTRLEINEKEANTVRRIFELYSQGYGYKAIVNRINKENYKTKRNLSFSVSSVREILQNPVYIGKIRYNVRQDWSQKRRNNINANPILSDGIHEPIIDMKTWNKVQVILKERSKKHNKIYESEFPLTGILKCPACGAGMTISRSTSKRKDGTRRINEYYSCGNWKNKGTAVCNSNSIRVDVADKYVLDKIMELINDEYILRRVIDNINKNKSTKLKPTLEQLGQINKEIEKLTDKKNKNIELFEDGILDKSELSTRVKIINGDIEKLKYREQELKQDLQLADGEPIPFEIVKEVMQRFKEVFLGMSTSQQRKQIIHLLVSKITINKEREIDSIEIQINDDVITYLMKDGLPKEQGNPSFLHLLGMNCVNLKIVI

SEQ ID NO: 21053 - protein, 529 aa, synthetic construct
MSSSSNPPLRAVLYARYSSDRQRETSIDDQVRAGRALIARERWSLVGEWGDEEISGSVPVALRPGGKALLAAALAGRFDVLVLEGLDRLARELGEQESIVKRLEHRGIRIVGTADGYDSGARGRKVMRIARGLINELYLDDLREKTHRGLAGQFDRGYHVGGVTYGYRSEATDGGAGRRLVVVEEEAKVVREIFEAYAGGESARAICHRLNEEGQPSPRGGTWAVSALVGDRARGAGLLNNELYAGKLIWNRRQWLKDPDSGKRRYVDRPREEWQVREVPELRIVPAELWDAVRARDRRHGAQGKGAKPRTLFAGILRCSSCGGPMTAIDARRYGCNAHHDRGPAVCANRTAFRRRDVDQALLGVVRQDLLAPEMLAHLQASVRAAIRAATAQDSRAARAAAARQAELRGEISRLVDAVARVGISDALRARLEAAEAELAALQAPPRPVADVERAASLALAAYRRRLLDLQASLERASDRERTRELLADIVGQVLLRRDDAGDWAEMEEPAQRLALTGSASGTGCGGRI

SEQ ID NO: 21054 - protein, 534 aa, synthetic construct
MTNRAVIYARYSTDLQNDQSVEDQIRLCEGHAERLGLLVVGKYFDRAKSGASLFGRPGLTNLMAASEAGDFDFLISEAPDRISRDIADLAHIHKNLRFRGVEMNCVNGGAMDTLQIGMHGVMGQMQREEGAKKVKRGMVGVIRSGRNAGGKAYGYRPVLGKPGELEIVEAEAAVVRRIFDMYAGGVAPRSIASALNAEGVPAPRGIHWNSSTINGNGQRGNGILRNPLYAGRLIWNRVRMVKDPSTGKRISRINPESEHEEIAAPHLRILSDELFEAVQRRKEATGGKHSHTTPKNKRLLSGLLKCGQCGGGLSIVGSDRSGPRVVCSNHKESGSCSNRGRYYVEKIERRVVDTLRMQFADTAIIDAYVQEYQAERRRVEIERRRGRAALEKAHADAIEAITRIVEKLSKGLIEDDDAAAILPGLRLERDRCKRELSAEPPLNNVLEIKPKAVALFRQDIESLAETLSKKDAEPSLELAMAFRRVIASVVVAPRLAGEGYKIEINGFLASLVSPELSAVLMVAGEGLEPPTRGL

SEQ ID NO: 21055 - protein, 650 aa, synthetic construct
MSEAKVKAAAYARYSSDNQREESIEAQLRAIKEFAEKEGYVLVKIYIDEAKSATTDDRPNFLRMIEDSSKGMFDAVIVHKLDRFSRNRYDSAFYKRILKKNGVKLISVLEPLDDSPESIILESVLEGMAEYYSRNLAREVMKGMKETALQAKHTGGLPPLGYDVDEEGYYVINEQEAVIVKKIFSLYLDGYSYQAIADILNRQGYRTKLGNPFGKNSIYDILINEKYKGTYVFNKRSSKDSLGKRNNRRFKDNENIIRIPNGMPAIIDEQTFDKVQEKIQARKRGPRMSEKRFYLLTGKIFCGECGSHYAGNSYRGGRNGKKYAIYTCTRRVRTKTCKNKSIRQDVIEKYVMDQLLNKIFEENMIHEITRKVLEYVRQFEAEKSGEIKYLESKIKDLEAKIERLIDAIAEGYGDKEMIDKRMKAYKAEKIQCESRLSELKLKEYSWINEEKVADYLRICREALLSGDPKAQRKIIETFVDKIIIYPDRIDLSLKVDMKFETERDKAGGGEGNRTPVRRRIDKSLYRLIPRFDLAGLTPEGRIESRPALSVFSPAAKANSRRRARSYDTLFRQPGMPERACCVLIKQQELILRWHLFVLPDLRVGKLGLQLLSPPPPSRPNAPVFTFRQYYYITKRRIYQERSKKRTTYGS

SEQ ID NO: 21056 - protein, 643 aa, synthetic construct
MAGIRMENKIYEVGMYCRLSKDDGTDNESASIATQKSILTDYVKKQGWHLAKTYVDDGYSGTNFQRPSFQNMIKDIESGLINCVITKDLSRLGRNYLDCGLYLEVFFPEHNVRYIAVNDGVDTLNKSAMDITPFRNILNEMYSADVSVKIKSAYRARFQQGKFMGTTAPYGYVKDPADHNHLLIDDKVAHVVREIFDLALAGNGIAKIRKHINKQHILRPAAYAAEQGATGYERYFEENEENRYIWSENSVRGILRSPIYAGNLAGYKRIAANMKSKKRPSKLPEEWEVIPDTHEGIVTQEEFDTVQQLITSRRLPENKGGFENIFAGVIKCADCGYAMRAMSANRRKRPDIIDCVQYSCNNYGRYGNIMCTAHSIEARDLFNAVLTDINRFADMAVNDEKAVRAIEKRLTETDQSKAKALEKEQRKLNKRLAELDRLFSSLYEDKVMERITERNFEMMSGKYQKEQLEIEARLKEVTETLSDSYEKTQGVRDFLSLIRNYQGIKELDATIINALIDKILVSEREKLTDGMVRQEIKIYYKFIGFVGELHITPTKRWTALKPKNCTVCGVEYVPRSGISKYCPACAKKIQREKSNESKRRSRERNRQACIELSAKNDRLTLPSARAVSSARVTRIPLFMCTAM

SEQ ID NO: 21057 - protein, 616 aa, synthetic construct
MTDYSKITALYSRLSVGDEDRDGGESNSIQNQKIFLENYARGQHLTNIRHYIDDDESGRFFDRSAYSRMMDDVENGKIGVCIMKDLTRWGRDYLQVGNAMEIFRRNNVRFIAVNNGIDSEKPDTLEFAPFINIMSEWYAKDISKKVKTGIKTKGMSGKPIVTEAPYGYVKDPDNKDFWIIDEEAAEVVRLIFRLFIGGKNRNQIAVHLKNEQIPTPTFYMKDRGRGTCKNKTLNEDNRCKWNKATLTNILTRQEYCGDVVNFKTTKHFRDKHNHYVDRSQWHITENVHEPIISRSDFETVQRILENAPVRRPNGDGEIHPLSGLLFCKDCGAKMHIRIDYRNGGKRHVAYCSEYHKGKAKNPKCHSPHIMDADLLMQTIAEVLKKIEDYSISNRAEFEALVKKNLAMQQTDQTKKQQKRIPQIMTRLEQIDKVLNKLYEDNALGTIPQDRYEQMSQKYSEEYYALKAELATLQEQLSAYENAGGRAQKFLKLTERHAAFTDLTPTILNEFISRIEVHERDQKRARYAIQHISIYFNYIGKFENEVTQLAEPTEQEIRQMREEIEEAKKEKSRAYHRQYSREYRARNLEKQREYDRMKAREYRARRKAQAAAAQPTQ

SEQ ID NO: 21058 - protein, 498 aa, synthetic construct
MEIQIREANSGQKQKLKVCAYCRVSTDADEQENSLENQIRHYKEVIASNPDYEYAGVYSDFAISGFKEKRPGLQKMLADARKGKIDLILTKSVSRFARNTSIVLEATRKLKELNVGVFFELQNINTLSGEGELMLTILAAFAQAESESGSVGAKMVYQRKYEAGIPVQYLERSFGYTKDERGVYIADESEAAWVRKIYEMAADGYTPAAIKRYLNENGVKTVGGTEWIDSTVFRLIENEIYKGDYIMHKHFVNEERKLVRNRGEVDAWYIEDDHEAIVSPELWQKAQDAIEAKRDYLAEGSVIEEFTEDNYPYMNRIFCVKCGHPLYKRIYSNGNRLNWGCSGTKRYGKSFCEGINIPDGVLRKAWHFDGNMYIDEKPSVKGTKEFSYLKESSWKRRHKKKVPEAIPENTEDAYPYRKKIFCGLCGSRLVRHVNPKSHKVIWICNGAKRKGVAFCRGTRIPDSVIRGWGEIKKDIYIQRKDDKNGKKRYSYTSKKPTA

SEQ ID NO: 21059 - protein, 528 aa, synthetic construct
MTAVIYARYSTDSQREESIEGQIRECTAYAEKNGFTVVKHYIDRAVSAKTDNRPQFQQMIKDSERGIFDVIIVWKLDRFARNRYDSARYKTQLKRNGVKLVSATEVISAGPEGIILESVLEGYAEYYSADLSEKVVRGMTENALKGIYNGGTIPFGYMIDETRHYQPDPLLAPYVEQTFQKYADGATMTDLRDWLKAHNIKNSMGGEMSYNTIQRMLSNRRYIGELRLRDVVQPNAIPALVSEELFNKVQKKLAKNKKAPARHKAEEIYLLTTKLYCGKCGALMFGESGVSHTGKMYTYYKCAAAKKKKTCDKKAVRKQWLEDLVVNETMKLVEDDASMNAIIVKVMELQNQESTDLPIYEKQLKETEVGITNMLNAIQMGILTSSTKERLEALEDQRKELQARIAEERLAKPKMKEEFVRFWLLRFRKLDMTQPEQRQALVDTFINAIYLYDDKVLITFNYKEGTETVAFGEAVKAEKSSDMSARGVPDFERQTVRFDVLFCYVTPKNRGLHGRCTVGVFIGILCMG

SEQ ID NO: 21060 - protein, 506 aa, synthetic construct
MRHVITYLRYSSAIQGAEGADSTRRQNDLFKQWLKKNSDAQVVASFNDEGLSGYKGKHLSGQFGDMLSRIESGEFSEGTVLLVEAIDRIGRLEHLETEALMNRIIAHGIEIHTLQDGLIYTRDALSDDLGISIIQRVKSYIAHQESKQKSFRVSQKWEQRAKLALAGEQRLTRNVPGWIDPDTFKCNEHAETVRLIFKLLLSGESLHNIARHLQSNGIKSFSRRKDANGFSVHSVRTILRSETTIGTLPASQRNDRPAIPNYYEAAIDASTFNKAQEILGKNRIGRTPASDNPLTINIFKGLFRCQCGASVHPTGTKNKYQGVYRCNNHLDGRCDVPPLKRKPFDKWMIDNFLGMIDVGNDGEAEGKIASLQHEVEIVTTRIKKATALLLEMDDIDELKIQLKELNQKRTELQTTIDNMRRKASLTDKELPQLKDIDLTTKAGRVECQLILSKHLKGLTLGKDTVTVTLQNDTEITIPTDPLPLNDGTSIFEIAEKNLLNIDTFQL

SEQ ID NO: 21061 - protein, 616 aa, synthetic construct
MTDYSKITALYSRLSVGDEDRDGGESNSIQNQKIFLENYARGRHLTNIRHYIDDDESGRFFDRSAYSRMMDDVENGKIGVCIMKDLTRWGRDYLQVGNAMEIVRRNNVRFIAVNNGIDSEKPDTLEFAPFINIMSEWYAKDISKKVKTGIKTKGMSGKPIVTEAPYGYVKDPDNKDFWIIDEEAAEVVRLIFRLFIGGKNRNQIAVYLTQEQIPTPTFYMKDRGRGTCKNKTLNEDNRCKWNKVTLTNILTRQEYCGDVVNFKTTKHFRDKHNHYVDRSQWHITENVHEPIISRSDFETVQRILENAPVRRPNGDGEIHPLSGLLFCKDCGAKMHIRIDYRNGGKRHVAYCSEYHKGKAKNPKCHSPHIMDADLLMQTIAEVLKKIEDYSISNRAEFEALVKKNLAMQQTDQTKKQQKRIPQITTRLEQIDKVLNKLYEDNALGTISQDRYEQMSQKYSEEYYALKAELATLQEQLSAYENAGGRAQKFLKLTERHASFTDLTPTILNEFISRIEVHERDQKRARYAIQHISIYFNYIGKFENEVTQLAEPTEQEIRQMREEIEEAKKEKSRAYHRQYSREYRARNLEKQREYDRMKAREYRARRKAQAAAAQPTQ

SEQ ID NO: 21062 - protein, 557 aa, synthetic construct
MKRKKAYIYTRVSTTMQVEGFSLDAQEAKIQQYANAFDIEIVKTYQDAGKSGKTMLGRTEFMNMISDIESEKDKVDYVLVFKLSRFGRNAADTLKSLAIMESHGVNLICVDDGLDSSKDSGKLVITILSAVAEMERENIISQAMEGRRQKARAGQWNGGFAPVGYSLVNGQLQVNHEEAESVKMIFDLFANSDMGTIAIAKHLANLDIKKPIRHNSTLPYFSSSGIARILDNPVYNGKIAFGRRESTRDKISGETKVTQSENYILTDGIHEAIIDDETWKKVRKKREANAHKYKRENPNKGDSIYILSGLIKCPLCNAGLYGNKSIKRNKNKKDEYYKNYYYYACKHRKHVDGHKCTFNKQLKTGNLDHEVLSIISKLVSRPDFARKLQEKINIQVDTSRIDSEIEQYKSLFRQLSATKMNLIQQIDSLNFEDPHFQQKSIDLDMRLNTIYDKLADVEMLIETSESKREVILKDKMTADNIYKILVNFASFMDVMEDIDKKRLCQMLIEKVEIYDDKNKAGRWVKAIHFKLPIIEEDLEISLDNSTPVEAVVKLNKK

SEQ ID NO: 21063 - protein, 522 aa, synthetic construct
MRKVTRIDGNNALQAFKPKVRVAAYCRVSTDSDEQMASLEAQKDHYESYIKANPDWEFAGIYYDEGISGTKKENRTGLLRLLADCENKKIDFIITKSVSRFARNTTDCIEMVRKLTDLGVFIYFEKENINTQRMEGELVLTILSSLAENESLSIAENSKWSIRRRFQNGTYKISYPPYGYDYVDGKLFINKEQAEIVKRIFSEALAGKGTQKIADGLNSDKIPTKRGSHWTATTIRGILSNEKYTGDVLLQKTYTDENFKRHYNRGEKDQYMIKDHHEAIISHEEFEAVQEILKQRGKEKGVIKGSNKYQKRYPFSGKIKCAECGSNFKRRIHGSGNHKYIAWCCTKHIKDASACSMKFVREDAIHQAFVVMINKLIFGHKFILRPLLQSLKKTNYSDNITKIQELETKIKENTERVQVIMGLMAKGYLEPALFNTQKNELLKEAALLKEQKEAINRAINGGMTALVEVEKLHKFAMKAEKQIDAFDSEIFEDFTREIIVFSQEEIGFKMKCGLNLRERMVR

SEQ ID NO: 21064 - protein, 522 aa, synthetic construct
MTTRNVTVIPARKRIGNSANAEELPKLRVAAYCRVSTDSEEQATSYEAQIEHYTNYIKSNPEWELAGIFADEGITGTNTKKREEFNRMIEECMQGKIDMIITKSISRFARNTLDCLKYIRQLKEKNIPVYFEKENINTLDSKGEILLTIMASLAQQESQSLSQNVKLGIQYRYQQGKIHINHNRFLGYTKDKDGNLVIVPEEAEIVKRIYREYLEGSSMLQIARGLEADGILTGAGNPRWHTSTINKILRNEKYIGDALLQKTYTVDFLSKKRVVNNGIVPQYYVENSHEAIIPREIFMQVQEELVRRSRGHIATSGKRRVFSASHAFSQIVFCGDCGEIYRRVHWNNRGKKSIVWRCVSKLENTGLSCHSRTVPEEMLCQATVDGINRLLGQKDGLLTTLKENIKTVIIETNNSAIEEIDKQLEELQKDLLRLANSKEDYNDIADEIYRLREERHRILAEEAGRKGSKQRLEEMEQFLNEQSCELKEYDEQLVRKLIEKVTVYDDRIDIEFRSGISINVEM

SEQ ID NO: 21065 - protein, 469 aa, synthetic construct
MVNVYSYARTSVDDGRKVSVDAQLTTIETYVSKQEDSMPFVYVDKGFSGGTENRPDFQRLKETIVQNNSVGILYVWRYDRIARNTKNLLEFLEFCENHHVQVHSVTEPLPNGVGTSIATQKMFVQVLGVLGEMQRNVTIENINATLAYKKAKKQYLGSSVPIGYLLENGNVSKNPETAPMIKRIFELYATEKYGYKSLVKQLSKEGYLYKGKPLAIHRIPVILGNSLYYGWIKGGNLGGYYGSFQPIISESLFHKVQEIREQRHCKKKNGRVYPLRQKISCPYCGWFLSPKKISNKQTSKERHYYHCANRQCEGVTVSASKIESQVMKQIKVFLSKKELLEGLTTAIQEELMSVQHNNQQHKRKIDQQRTNLFEAFEKDQLSTNEFKKQLKQLNKNNAQDPHPKLSEVICQQRLAVLLQLTQQPIKDVLWVQLKEIRLTKKKNITEIYLKNINQNILQWEGRNQNGKTN

SEQ ID NO: 21066 - protein, 546 aa, synthetic construct
MSTESPKAYSYLRFSTPRQVKGDSFRRQVDLARNYAAKHGLILQDLSFHDLGVSAFRGTNREHGSLGKFIELVRSGVIDKGSYLLIESFDRLSRQDVELALPVFLEVINLGIVVVTLVDSNVFKAGEMDLAKLVTSIVYMSRANEESEIKSRRAKASWATSRIAAAEKGLRIKNSALPAWLDWNGDEIVPKEHESAVIAEMLSLSAQGWGYERIAAYFNAKKITTFRDGKPWRSAGIGAILLNPAIIGQYQPHEIVNGKRQPVGEPITDYYPAIVSKHLFMEVKQKISNRTIHSGSYRRGRYQNLFSGLLRCQCGEMLALRDKGKDGTSRLYLECPGKRTKNCSMRNIRYERFEPQVLVALSHMAPVMSARNQRTEHERAHLEAKADQELLIQRLNQNAERLTDIMLEVNNPERFRIRLLRIESEIASAKELLAKHNEALESLRVAASSVVLLTAASLDSPEERSAFNSQLHASLGPIQVLENGDSPIVRYQSKLGEWMFEQSFRDKLAGSTVLDMDGMTLCMTKSEAPFIDTAWHEDLMDESSIR

SEQ ID NO: 21067 - protein, 613 aa, synthetic construct
MRRVFVYHRVSSDQQAERGGGMERQAKLLEDYLARTKLCDDMDDPEPIVLGDPGMSAFKGHNLQHGELGTWVDQVKAGMWDGSILVLESIDRFSRLNPFEVLDYLNSIIERNVSIHDVYDNNIINRKDISAFTRALNQADRAFKESKFKSDRISAGWRRKREQAFNNGTIVTKKRPVWIDVVDNKYVLNEKAAVVKEIFRLYQTGIGCPTIAKILQKKEGSEWKFDRAWSSEHVHKILRNKRVTGKILISEIIRDYETDDKEKQFTQNFYDMDVYPVVIDEKEFELVQELLKSRRPNAGRATTKKDGDQEIVVKHNMFSGIFRCGDCGQGMFHNVVKTKRNPKKSEARIEEYRYIRCIVERDDLCHNKAMDYTIIEKFLIGRIKNLDFSEIIKVNEVNPEVELVRLQIEQEKAHIQDYELGIERLLNAGKRVSFGMRQELDEAKERLELLESRQAAFETVSVDTDVFTNFDMEELLDITNVGLRSRYERELAKVVDRIELRRRDNLYFVSINYKSTDLIKHWLVIENGKKKGAHLRGDFRIVKDGDTVYYGTDSFVLSSVNDGMPRIHFIENEPLNMIDYAMLLNFIDYIDQNHTVAVWMRHNMNFLFMDTSD

SEQ ID NO: 21068 - protein, 541 aa, synthetic construct
MPKAISYIRFSTKIQSVGDSTKRQSKYINDWLKRNPDYYLDESLRFQDLGISGFSGANAKSGAFGEFLAAVESGYIEAGSVLLVESLDRVSRQDIDTAGEQLRKILRSGVEVVTLVDNEWYTKESLKDSLSMIKAMLVMERAHEESAMKSTRLRSVWAAKRERAAKGEIMSKRCAAWLKVSEDRSHFEFIPENVKAVQRVFQLRLEGLSHVKIAKQMNDEGFSTLNQFKSVTGGWSQSSVTELLSNRSVIGFKVPSKSMAVKGVSEIPNYYPSIITDEQFYAVQQLKQGSGRKPSSDLPLLTNLFKGVLRCSECGFIVVVAGVSAKRSGIYKCSMKSEGRCNSVGFSRLQTDRALVQGLLYNTNRLALNRDNGSAIGSLQSELEQLQKQRERLIKLAMLADDTESMAKDLKALNSQIKDAEKAVSEVHQREQSSQLETISHLDLTVKKDRIEAQIIIKRIVKEIRLNTARKKCDVFLHNGLKLLNFPLDRVVDGAQWLEVLPLIDGDEFDFEGFTTKPQHIALEEAPEWVKEMEEQPNQPL

SEQ ID NO: 21069 - protein, 590 aa, synthetic construct
MKPKAYSYIRFSSPEQSRGDSQRRQREAAAKYAEEHNLELVLDKDYQFFDAGISAYKGRNSTHEGKLRRFYDYVKDGRIKNGSYLLVESLDRLSREDVLIALTRFIDLLNEGVNVVTLADGIVYSKGADVPQLIMSIVHMSRAHHESKLKGERVSKAWRNKQKVARQDHIPLGRVCPYWIDLVDGQYILNDAKAAVVKKIFEMTIGGHGQVSVAKYLNSSKIPVFGSGNRNKSGLWGTSTIAKILSNRSVLGEYQPMILENGKRIKNGMPIEGYYPPVVSESDFYSAAYMRSVRRTSNDTRQSIDFNVWSKIIFCSKCGSPMHLINKGRPPKGYRYLRCFSAAKGMCAAKSIRLEAANIAFKEILAMFNSLPLVKVSEKDSRRRITELKGKVEEIHKLLGQYQCLMESAPSITLSKAAAAKEVELIACENELAQVSEELAASVIFDKDKFFASLDLESYEGRSSANLYLRNLNVQIRAGYNGFESFFVAMTRDEGLKAHFAIWVGDDFSPKFTPLSVEMTETIINQGEVGRARMVAPLKRYLPDLIDRTEGNGRLPLVVPLNEVPEFEWHQNPEHHKNRLLRALGLLPEE

SEQ ID NO: 21070 - protein, 510 aa, synthetic construct
MDTDIFAIYLRKSRKDLENKDYDVLKRHRKILLDFAKSKNIVIHEEDIYEEVVSGETIQDRPVIQNLLKKIEVGYYKAVLVMEIERLARGNTIDQGIIAQAFQLTNTLIITPQKTYDTRNEFDNEFLEFGLFMSRREYKAISRRIQTGRIQSCKEGNYIGSVTPYGYDKEKLKGEKGYKLTPNDEAENVKLIFDLFLDGLGTSTLAFKLNDLNIKSRTGKPWTPAMVRNILTNKIYIGILTWGKRANVKKLDNNLISKTRPVNHNCIESKGKHDPIIDELTFYKAQTLLKSNSSKKVPKDKALKNPLAGIIVCKKCGTNMIRRPLKNIPDTILCKNHYCDNISSYLYLIEKRLLDSLHTTLLEYYYYLDNYEKEDLKSKKNYDIQIRKIDKDINTLKKQHVRTCELLELGVYSLELFKERSTSINEQVDALIKQKDELIRLNKDNKTEKIIQAIPKIENCLKTYHTLSIEDKNKLLKSIIKKAYYLKTATGGRWNKEAQDNFSIELELNL

SEQ ID NO: 21071 - protein, 596 aa, synthetic construct
MRVALYARYSGDNQREASIVDQLRICRLHAEKLGWDIVEEYTDPKISGASMFLRPGIQALISDAGRRRFDCVLAEAMDRLSRDQEDMAGIYKRMTFSDIKIVTLSEGEISPLHVGLKGTMNALFLKDLADKVRRGLRGRVELGKSGGGNSYGYDVVRKMNAVGELERGDRTINDGQARIILRIFRDYIDGKSPKTIAFELNRAGVESPSGGHWGASTINGNCQRGTGILNNEMYVGKIVWNRQRFIKDPDTGKRQARLNPQSEWVVQETPELRIVPDDVWTAAKKKQSLLMLPRGEQRAKNSFRDRRRPKHLLTGLVRCGCCGGVYTAVSGTLLGCSAAKGKGTCDNKHSIRRDVLDQLVLDALKHELMQPDLFAEFCDEFTREVNRIRASAGSSITIVKAEIKKIDHDLDMLLNLILRGGVADKINAKMIALEARKKDLEVELAQSEAPPPMLHPNMAIHYHRQLKGLHEAISDMDEASRLQARDILHSMLQSIAISPDGESHTKVDIRGDLAGIIAICRQQKGRPKAAVNGAIAYADEGTAGLNYMIAGKCSLSWLRESDDIPAWQRDETPSFKLILCGLTRKGRKPPNFNSEL

SEQ ID NO: 21072 - protein, 449 aa, synthetic construct
MKQVIGYLRQSTMKQQSLAAQKQAIEAIAEKHHIQHINFYSDKQSGRKDNRSGYRQMTQLIQQGQCDILCCYRLNRLHRNLKNALKLIKLCQTYRVHILSVHDGYFDMDQAFDRFKLNIFISLAELESDNIGEQVRNGLQEKAKQGRLITTHAPFGYDYHHGTFIINQNESPTVKAVFNYYIKGHGYKKIAQLLEEDNTYINRQPYQVRNIIINPNYCGRVNNQYGQFDNMFPSIVSTSIYEQAQRLRSQKQTKQTPSDNQLKQKIKCPCCNATLTNMTIRKKNHTLRYYVCPKNMNASRFVCDFKGINAQTLEDKVLEVCRDFYQNQRIYTKIKSAIDKRIKRQRNIEKHHTLTQEQLIEKLAQGIIDAETFREQTQSLRQQPQRTTSINGHQIQHIIQNIIQKRFTLNILYPYIETIHITKDKNLIGIYFKNEPLNIVNQTMQSSIA

SEQ ID NO: 21073 - protein, 518 aa, synthetic construct
MPKAISYIRFSTKIQSVGDSTKRQSKYINDWLKRNPDYYLDESLRFQDLGISGFSGANAKSGAFGEFLAAVESGYIEAGSVLLVESLDRVSRQDIDTAGEQLRKILRSGVEVVTLVDNEWYTKESLKDSLSMIKAMLVMERAHEESAMKSTRLRSVWAAKRERAAKGEIMSKRCAAWLKVSEDRSHFEFIPENVKAVQRVFQLRLEGLSHIKIAKQMNDEGFSTLNQFKSVTGGWSQSSVTELLSNRSVIGFKVPSKSMAVKGVSEIPNYYPSIITDEQFYAVQQLKQGSGRKPSSDLPLLTNLFKGVLRCSECGFIMVVAGVSAKRSGIYKCSMKSEGRCNSVGFSRLQTDRALVQGLLYNTNRLSLNRDNGSAIGSLQSDLEKLHKQRERLIKLAMLADDTESMAKDLKALNSQIKDAEKAVSEVHQREQSSQLETISHLDLTVKKDRIEAQIIIKRIVKEIRLNTARKKCDVFLHNGLRLLNFPLDRVVDGEIFLEVLPVLEADEFDFDTYRMIE

SEQ ID NO: 21074 - protein, 558 aa, synthetic construct
MSKEKIKVYLYTRVSTSIQIDGYSLEAQKSRMKVFALYNDYEIVGEYEDAGKSGKSIEGRVQFTRMMEDIKSGKDGVSFVLVFKLSRFARNAADVLSTLQIMQDFGVNLICVEDGIDSSKDAGKLMISVLSAVAEIERENIRVQTMEGRIQKAKEGKWNGGFAPYGYQLIDGKLIINEEEAIAIRTIFDQYVNTSIGANGLSKYLENHGIRKIPRQNGKNPLFDAGLIRKILKNPVYNGKIAFGRRTLEKVHGTRNEYRQVEQDDYLVAEGIHQAIIPDELWQAAQVKLKAQAKKYEHVNKGKNMRTHLLSGIVKCPICGAGMFGNKSIKYKKDGTKYKDFYYYGCKHRLMNRGHKCTYNKQIREELLDDAVAEVIIKLVSNPKFASMIQEKINMKVDTSAIENEIDNYQNELRKSHSTKYKLIEEIDNLDVEDKHYKRRKNDLDDRLYRMYDKIEELESQLIEAKAKKETIEVEKLTGDNIYKVLIYFDKLYKVMNDVERRQLIEALISEIQIYEEKQPNGQWLKSITFKLPIIDEDLNISLENDEQVETVAKIIKQ

SEQ ID NO: 21075 - protein, 481 aa, synthetic construct
MITTNKVAIYVRVSTTSQVEEGYSIDEQKAKLSSYCDIKDWSVYKIYTDGGFSGSNTDRPALEGLIKDAKKRKFDTVLVYKLDRLSRSQKDTLYLIEDIFIKNNIAFLSLQENFDTSTPFGKAMIGLLSVFAQLEREQIKERMQLGKIGRAKAGKSMMWAKTSYGYDYHRETGTITINPAQALAVKFIFESYLRGRSITKLRDDLNEKYPKHVPWSYRAVRTILDNPVYCGFNQYKGEIYPGNHESIISKEEYDKTQSELKIRQRTAAENVNPRPFQAKYILSGIAQCGYCGAPLKIMLGVKRKDGSRLKKYECHQRHPRTLRGVTTYNDNKKCDSGFYYKDKLEAYVLTEISKLQDNAGYLDKIFSGDNAETIDRESYKKQIEELSKKLSRLNDLYIDDRIALEELQSKSAEFISMRGTLETELENDPALRKNKRKADMRKLLNAEKIFSMDYEGQKVLVRGLINKVQVTAEDIVINWKI

SEQ ID NO: 21076 - protein, 530 aa, synthetic construct
MNKYDQARLEDVVQPGKRIVFYARYSTEKQEYDMQKHSVETFLQRYGCEIYKEYVDRATSAIKVPFEKREDLQNLIRDAEKGKFDVVITYKNDRIARRIEEHQLFREKMRALNIHVVVSSSSELYTVGEVVSQAVKDGLTRIEAALIQDRTKDTFRSKTKRGTWLGGKAPYGYTYRVIEENDGGRKTRKEYFKDEENQQEAVMEIFRLFEIGYGFQQIANEIHSRKLDENMKWTKEKIRYIITNPFYCGFISMNRYENGVLNDKSQWVEGTPKNMTPLFKREYWEYIMKLFEERKKRKVHSRDYSTPFLLRGILNCDQCKELMLAKNQQSGGEKYKGKKKKEQRRIYECKKCDFKLQANMIHERFRKDYLPYVLEQVTQRKKEQVEFAIEERLKKEMQSLKGSKKKLDEEIAKLNQQIEALNVEMKSYYDKETIDKKVLEFMSIIMSHRTNKIHELHTVKDKKVGIQEQIDRIAKTMQQKKYLPPQHLIHEFAKENVDTQKLRAFLLQFFKCIHVARDGNLVLSINEYLM

SEQ ID NO: 21077 - protein, 491 aa, synthetic construct
MGENLLAYGVYVRVSTDRDEQVSSVENQIDICRNWLERNGFIWDERCVYKDEGISGTLFTERPAIQILLQKAKAKEIDMVVFKSISRLARDLKDSLEIREVFLAHNVRIISVEEGYDSTKAGKNDMAFELWSLFSAQYSRTLSSSISAALAAKVRRGEHIGKVPYGYNRENQRLMINEEEAKVVRDIFDWYNIGWGFKRITNELNRLGVKSKSKDIWQMTSVQRIVRSPIYKGTFILNQYATVKSGGKRKQIRNPQEKWLVFPNHHPEIVDEATWEQANQKNVTVNKTKITAWNEFRNLAKCGVCGSNMTIVQSHLLKKSGERTEWKYLKCSKYRRAGKHGCVNHVPIQYRDFRQFIIDLLIKKGESVTLKLQSNVEQGQEKKIKKLKQLMNVNEQKKKTLLDLYLEELINKEEFEKKRNELEIEITKANHELFILQNNDVMQMDVKTIKEAFRQLQQQNQDLLHVFQTLIQEIIIHQDGTVDITYTFESP

SEQ ID NO: 21078 - protein, 563 aa, synthetic construct
MENRVKRVIIYARVSSDRQDVDLSISAQLKALRDYAARNGYVVVKEFVDEAESGRSTARPSFREMIGLARTKQAPFEMILVWKLSRFARNREDSIIYKSLLRKQGIQVVSINEPIEDTPTGRLMEGIIEVIDEFYSSNLGQDIKRGMRENASRGFFNGSRPPFGYVRKKIKDGDKERNSLEPNPKLLPIVQRIFNEITNEKGLKEIAKGLNRDGVPAPAGGKWGKQRLHKILTNEAYTGRLIWGKVHKGKTSLPPVIKDNAWPAIVDKSVFENVQVTLSERAPKVTHPRVASSNYLLSGLVRCRNCGASYIGYGAKSGQFHYYVCGTAYSKGKEACPSQHLPQEKLERFVTDKIKGYILTDGHLLDLIKQSNEAFDVADNKRKERVGVIDKEIEQWQGRLERLYDFVETKKIEPDRMAQRIADVQDKLNLMRQAKLDLENGQGANRAAYIDPQKVLSYVAELRHFLDERGLFERKAFLRSFIEQIRVGDNKVTLDYTLPFPPTNIKQETVSVLDIVSSAPPNIDRSIDTMLRSIPLLFVLRKPAIQGICPIGVFTVLCITGFL

SEQ ID NO: 21079 - protein, 509 aa, synthetic construct
MNVVIYARYSSHNQQETSIEGQLKVCHEFCERNNYTVIHEYIDRAISGRTDNRPDFLQMIQDSANRNFEFVIVYQLDRFSRNRYDSAHYKNKLKKNGVRVLSARENINEDASGILMESVLEGMAEYYSAELSQKVKRGMEINASKCLCTGGNRTLGFYIDKDKKFQIDPNTSPIIKLIFEMYADGKSIVEITDYLNAQGYKTIQNKPFGKNSIRNILGNKRYIGTYTYKDTEIAGGIPRIISDELFNKVQEVLKKNKKAPARARAKEEYLLTTKLFCGYCKEMMTGFSGTGKLGKVYRYYECKGTKKHTCKKKRVKKEYIEDIVIEVCRGLLTKENINRISKEISKLFENNQDTFNLKRLKKQLSENERKHRNLINAVSECDIESLRKTFYSEILELESQKEKIEEEIREEEKLHIVLTEPEIKFFLTSLKNGSADNIKYRKVLITTFINAIYLYDDKITLIFNSGDKPVTINNILLSEIEANESNNTDIEGLFIDNVALPRYDVSKMA

SEQ ID NO: 21080 - protein, 440 aa, synthetic construct
MKMIADLYVRVSTDEQADRGYSQRNQEEVLRKYCEINSIEIRDVIYEDHSAKTFNRPQWNKLLQNLKKHKNKVDLVLFTKWDRFSRNAGDAYQMINILRKLGVEPQGIEQPLDLTIPENKMMLAFYLAAPEVENDRRALNTFHGMRRARKEGRYMGYAPAGYVNKVKEDGTKYITFDQPEASILKWAFEELSKGIFNTEQVLCMAKEKGLKASKNNFWRAIRNPLYCGKIVIPKYKDEDLTYVTGQHEPLISQTLFYKVQDVLDGRSKTYLPKAITTKPFPLRGFFTCPECAKILTASISKGRNKYYPYYHCSAGCKYRINSDTANEVFIKNLKQYVPIPEIKNLYITVLSECYREQTKDIFEEKQKIITQLKDYEKRLSHARDLLATQQIDASDYRDMKSDYGAIINRLELKLSGINVDEHDIDEILKVGIENLLKLNE

SEQ ID NO: 21081 - protein, 469 aa, synthetic construct
MTSTARPRAILYLRQSISREDSISLELQEEAGRQYCAQRDYQVVSVEADPGISGRTWNRPAVQRTMASIENGEADVIVLWKWSRLSRARKDWALAIDKVESAGGRIESATEQVDVTTSTGRFARGMLAEFAAFESERIGDTWKEAQHRRIAQGKPANGRKRFGYTYTRETGFTPHPDEAPALRELYRMYLVGHTTRELVEYLNSTGIKPTHKYSSVVAETWSGDTIMRILDNPFATGRFRHGGQTHQGIHEPIISEETWDEYQARRRDRVKRSRAESSQYLLTGMLYCAICGSKAYGGRHVPTGRVAYSCKQASYYKLHRGGYVNEDKILEHLLPWLEKLADEINALADAEPAHVQVADPAPAIRRAIIKLDSRRDVLTDKMLDGLVPDDVYRRKLAELDQEKTQQQQRLQDIEAAQKVGELHLTADLIRDWPSMQLSARRELLSRLVSRIEYTAQRPNLDVEVIAKWS

SEQ ID NO: 21082 - protein, 479 aa, synthetic construct
MNLMEDARNGKFEVVIVEALDRISRDQEDLAGVFKRLSFAGVEIVAVHEGVADAMQVGIRGLLGSMFLSDLKHKVRRGMAGVVSDGRVAGGNAFGYELVPGKPGERTINEEQAQVIRRIFREYVGGASPRDIAGRLNAEGVPPPRGTKWNASTINGSKNRSYGILVNAIYNGQIVWNRVRMVRDPDTGRRVSRFNPETEWKTSDAPHLAIVDRETYEAAQARKADRTRLIETGASTKKAKRLLSGLMRCAVCGSGLVSVGHNGGRLRVQCSQNRESGTCDNNRKYNAERIEHAVVSGILTKLEDEDAAERYIREYVAERRANIDSATRSASQIEGKLTKVAQEQERLITLFQTGVLDLERVKPRLTELEEQRKELEAEAETARDAVPVIELHPAAVEKFIRLLSRAKAEYENYEMLKDPLKIEGMRELISHVVVSDSEVNGYELDVFTYLSALTGDYAPGGLGGALVAEDGFEPPTQGL

SEQ ID NO: 21083 - protein, 576 aa, synthetic construct
MTPTAAGAALPPLPPAAFAAAEPQRRKRAVIYLRVSTAKQVHRDDDPDGYSLPAQREACDRKAESLDAEVVAVFVDRGESAKTADRREFQKMLAFVKQQGDIDYVILDKVDRFARNRRDDANIMFELKTVGTSLISVKENIDETPGGQLLHAIMAGIAEFYSRNLATEALKGMTQKAKVGGTPGRAPVGYLNTRQRIEGREVAIVIVDPERAPLIRWAFEVYATGEWTIRQLVEALAEKGLKALPHGKKIPGPLVAAHISRILRNRYYIGRVTFKGIEYEGRHEPLISEDLFHRVQEMLDLHNVAGEKRRVNNHYLKSTVYCGTCGERLSLTNAKGQYLYFYCLGRQTRRTACTQPFLAADAVEEAVVRYWQTVHLSDEMQEAIRNGVRAEIQHRRDQAGPEAARAKRRVQELADERRRLARGVVTGSIPEDLAREEQERIVTELRHAETTLRATETMYEDIEEILRLTLELVGRAGDVYRAGGPQVRRLANRFFFEQLRVSVVVNVTTVTEATLHEPMATLLDPVFQSQMIQNDANPGQDLHGVGLGGPDDTVDLDRGLRMVYLVRSEGLEPPTF

SEQ ID NO: 21084 - protein, 557 aa, synthetic construct
MSDDKLSGNVYLYQRFSSQAQEGNSSLYRQGEAQREWLRSHPNCVVVELEGKPLIDAGVSAFSGKHLSSGSLGRLVAAIESKVVPKGSIILVEHFSRLSRMTITETEKLLDKIWDHDVSIVTARDQSVYSPSKRNDLATRMRLIVEIDKAHSDSKWRSEKVKSSWSRREYNAKENKIPPKMRMPFWLDQKGKLNEYADVVRDIFKLHAEGLGQVLIERALRKKYGKIKPLKNINPTKIIRIIQNPKCIGLVYNEKLYESVVSDKDFYNSQRICKERLFTSVRPDRKWPLHGLVKCGHCGSGMSIQQSAESLPLLRCSRKQRSGGESCDAPTTFPYVVAYHFFFAYVEPLILAKISGAKRSSTSHEKKAKLTYELKGLQTKLADLKDYYKNSEKKSGTIFGLMEELDDEINDIVSQLAEIQAEIETKLNVASISKKIVDLSQTDPLNYNLELNRIGNKIILKNKELSFSLEEDDVVARFKFSQYDRKRKAYQCVFYGSKEYYRESEYVTEVRTSDWDIDRLMYPHKSRGSTVENAARLMYYLKIHSESGYLDILLKDD

SEQ ID NO: 21085 - protein, 489 aa, synthetic construct
MRAVIYGRISQDRDGLAVNLGEQIRSCEKLARERGIDVVAVRSDNDVSAFKTVDSRTEWPLVLEMVHRGEVDMILAWALDRCYRQVAQFQTLLDSLGGRPLRIVTVSGQELDLSTPMGRTLAQVLVAFAQMEMQIKSERLAAKYSANAERGQRHGGKRPIGYEADGVTVDPVEAAALIEAAEMIIAGMGLNAATRKFNDATGRGARAVSLKNALKSYRVIGMREYRSEKATREWAERRRAGEVTGEERPPGRISPAVWPAILTTEQWEAVRAVFRQTTRGATPMRAPRSLLSGILRCAKCGSKMGFSPDKIDAQNPSRLKTRATYKCQSAGRGGGCGSVAVSASAIEEFILGVVETVIRDGPPIIVEKRSSDSLQVALEEEIQRLREKAKKHILLAESGAFRVEEIVDRQRAVNSEIAAVEAQLDAITLGRRRVERAVPTSEAWAASTQAERSLTIRALFAEIRVKPSARGRLSGPRFDPDRVELAWAR

SEQ ID NO: 21086 - protein, 580 aa, synthetic construct
MSQPLVISYVRFSTARQATGDSLRRQTAAAREWCLKRGWTLDEKLSCRDLGLSGFNQDNASRGALSVFLDKVRSGDIPGGSYLIVENLDRLTRAELPVAVSLLLSIVSADIICVTLQDGQEWTKERLANPADFMLSVMLLYRGHDESKVKSIRIRAVHDKAREERDRSVFGRAPGWLRRTSDGKAWEPVPELVEVVKKVFDLSASGYGGVAIARRANEEKWPVPSLSAKESGTTWHVTFPAKLVRNRAVLGELEFHVSRDGQPTPTGQVVKDWYPQIVDEDLFFRANAAINSRRSKPNRRDATYRNIFQGIIFCGHCGATMARKAKAGGKKNSPGYAQFVCSDRHRGASGCPSINAKELEVGLIPSIFQMLREHLGNEANLDPIRKELAAVHGELEEFQKRRGRLADAIEQADVPIPVLVQRLTECEQAIPGLEARESVLKAQLQEFTFSPDDDTASDAILRALYSDDEASERLRAETHLKMLLTIDAIWVWPQELAVIQWKSTNLLAPLALYKPEKRRTGRAARNPIEIPKSFNVSNRYLEAIQGKIDFPEKRQPQLSENATIHTQKRRRNPINPPSAD

SEQ ID NO: 21087 - protein, 452 aa, synthetic construct
MKAAIYIRVSTQEQIENYSIQAQTEKLTALCRSKDWDVYDIFIDGGYSGSNMNRPALNEMLSKLHEIDAVVVYRLDRLSRSQRDTITLIEEYFLKNNVEFVSLSETLDTSSPFGRAMIGILSVFAQLERETIRDRMVMGKIKRIEAGLPLTTAKGRTFGYDVIDTKLYINEEEAKQLQMIYDIFEEEKSITSLQKRLKKLGFKVKSYSSYNNWLTNDLYCGYVSYADKVHTKGVHEPIISEEQFYRVQEIFSRMGKNPNMNRDSASLLNNLVVCSKCGLGFVHRRKDTVSRGKKYHYRYYSCKTYKHTHELEKCGNKIWRADKLEELIIDRVNNYSFASRNVDKEDELDNLNEKLKTEHTKKKRLFDLYISGSYEVSELDAMMADIDAQINYYEAQIEANEELKKNKKIQENLADLATVDFDSLEFREKQLYLKSLINKIYIDGEQVTIEWL

SEQ ID NO: 21088 - protein, 560 aa, synthetic construct
MSKEKIKVYLYTRVSTSIQIDGYSLEAQKSRMKAFALYNDYEIVGEYEDAGKSGKSIEGRVQFTRMMEDIKSGKDGVSFVLVFKLSRFARNAADVLSTLQIMQDFGVNLICVEDGIDSSKDAGKLMISVLSAVAEIERENIRVQTMEGRIQKAKEGKWNGGFAPYGYQLIDGKLIINEEEAIAIRTIFDQYVNTSIGANGLSKYLENHGIRKIPRQNGKNPLFDAGLIRKILKNPVYNGKIAFGRRTLEKVHGTRNEYRQVEQDDYLVAEGIHQAIIPDELWQAAQVKLKAQAKKYEHVNKGKNMRTHLLSGIVKCPICGAGMFGNKSIKYKKDGTKYKDFYYYGCKHRLMNRGHKCTYNKQIREELLDDAVAEVIIKLVSNPKFASMIQEKINMKVDTSAIENEIDNYQNELRKSHSTKYKLIEEIDNLDVEDKHYKRRKNDLDDRLYRMYDKIEELESQLIEAKAKKETIEVEKLTGDNIYKVLIYFDKLYKVMNDVERRQLIEALISEIQIYEEKQPNGQWLKSITFKLPIIDEDLNISLENDEQVETIVLIQKRNS

SEQ ID NO: 21089 - protein, 547 aa, synthetic construct
MKLLVTYIRWSTREQDSGDSLRRQTNLIDAFYAKHKDDYYLLPAHRYVDKGKSGFHQQHKAQGSDFRRMFENVMSGAIPEGSLIVVENFDRFSRADIDTAIDDVRQILRKGVSILTLGDGELYDKSALTDPVKLIKHIIIAERAHQESLVKQKRIAQVWNHKTQLARELKKPMGKQAPGWLELSEDGSHYIVDEDKASLVNIIYDKRLSGMSMFAICKWLNEQGYPTINQRKVRISKTKKPDGNWSALSVKHILTSRSVLGYLPAKISTEDRKTVLREEIESFYPQIVTDSKFYAVQQLLEETGKGKTSSGEHWLYVNILKGLIRCKCGLVMTPTGIRKPVYQGTYRCNGNKESRCSYGTVSRKLLDTQLCSRLFSKLSQLHDEATDTAKLDELQRRLNTVDSELEKLTETLIQLPNITQIQEALRVKQEEKDELIVQLSREKARVKSVSSLDLSGLDMESVEGRTEAQIIIKRLVKEIVVSGNEKLVDIYLHNGNMIRGFPLDGKDDHTLTLEEATDEMQSLDDMLIFGEPVTRIYPAGDMEEVDA

SEQ ID NO: 21090 - protein, 557 aa, synthetic construct
MKRKNCYIYTRVSTSMQVDGFSLDAQKEKLRRYAEFQDFMIAGEYSDEGKSGKNIEGRPEFQTMLNDISEGKDNVQYVLVFKLSRFGRNAADVLNSLQLMQDYGVNLICVEDGIDSSKDSGKLMISVLSAVAEIERENILVQTMEGRKQKAREGKWNGGFAPYGYELIDGELKIAEDEAEIIRIIYDKFIHTTMGAGTVAKYLNRQGYIKKKRQNGTLDAFTAHFVKLVLDNPIYCGKIAFGRRKTEKIQGSRNEYHVVKQEEYPIYDGIHDAIISEEDWLLAQDKRKKTGIKNEKIYSTEHQHLLTGIIKCPICGAGLYGSVNRKRKKDGSFYRDYWYYACKHRLEYDGHKCTFKKQIHQEKINEAVVEVIRNIVKNSKFDSAIKEKLDASVDLSKYEKEEAYLMTQIRQLNAAKERLGFQIDRLDCSDRHYEQKYTDMQNRINSLYDEIAEANENLETVQTQIKAIKEQKISQKRIFEFLELFDIIYNEFTEFEKKEFLHSFIKKIEIYPEPLENGQILKSIQFRFPVYYQGNEADMFIPNFENTVETVVLMSRK

SEQ ID NO: 21091 - protein, 449 aa, synthetic construct
MKQAIGYLRQSTLKQQSLSAQKQTIKALAEKHNIQHITFYSDKQSGRTDKRNGYQQVITLIQQGHCDVLCCYRLNRLHRNLKNALKLIRLCQKHQVHILSVCDGYFNLDSSFDRLKLNIFISLAELESDNISEQVKNGLREKARQGKLITTHAPFGYHYHDGTFTVNKDEAPTVKAIFDDYVEGYGYKKISQRLEKSNHLINRKPFQVRCIILNPNYCGRVLNQYGQYDNMFPPIVSVSLYEYAQKVRNQRQVNRRASDNQLKQKIKCPCCGSTLTNLTIRKKKHALRYYVCPRNMNASRFVCDFKGINAQMLETRVLTTCKDFFQNQQLYSKINQTIQQQLKNQRTLETKHILTQEQLIEKLAQGTITADTFREKSLLLQQQSKTNSSISSTQIQRAFQNVIQQCFTLNMLYPYIDEIHITENKTLTGIYFKNEPLNIVNQDMQSSIA

SEQ ID NO: 21092 - protein, 524 aa, synthetic construct
MAGAKNITVIPAKKRVGNTATAESKPKLKVAAYCRVSTDSDEQATSYDAQVTHYTEFIRKNPEWEFAGIYADDGISGTNTKKREEFNRMIEDTMAGKIDMIITKSISRFARNTLDCLKYIRQLKEKNVPVFFEKENINTMDSKGEVLLTIMASLAQQESESLSKNVKMGIQFRYQNGEVQVNHNWFLGYTKDENGHLIIDEDQAVVVRRIFREYLQGASLRTIADGLMADGIPTATGNKKWRGDGIRKILTNEKYMGDALLQKTYTVDVLTKKRVSNNGIVPQYYVENNHEAIIPRQLFMQVQEELFRRAHLKTEGGKTKRVYSSKYALSSIVYCGKCGDLFRRVAWKARGASYNKWRCASRIEKGPKKGCDADAISETEIQNAVVRAINKTLGGREQFLVQLQHNIEDVLNGDSTATLEYIDQRMAELQEKLVMCVNKNAEYDVIANEIDALREKKAAVVTKDAEQEMLKKRIEEMRQFLQTQSSRVTEYDEQMVRRLIEKITVFDNKLIFEFKSGMTLELKR

SEQ ID NO: 21093 - protein, 520 aa, synthetic construct
MKNVTKINQVDFSVFKKTRVAAYCRVSTDSDEQELSLDTQKNHYESYIKANSEWEYAGIYYDDGVSGTKTAKRDGLLRLMEDCEKGLIDLVITKSISRFSRNTTDCLALVRKLLNYEVYVIFEKENINTGSMESELMLAVLAGMAESESRSISENEKWSIKKRFQNGTYVISYPPYGYANVDGEMVIVPEQAEVVKEIFAGCLAGKSTHIIAKELNEKDVPTKKGAKWTGGTINGILTNEKYIGDALFQKTITDANFKRKRNYGEEEQYYCEDHHEPIIDRETFEKAREAIRQRGLEKGNCTEDTSKYQNRYAMSGKIKCGECGRSFKRRYHYTSHGKSYNAWCCGTHLEDSKSCSMKFIRDDDLKRTFLTMMNKLVFGNDLVLKPLLISITTNNSKKNANSVEDIEKEMESNEEQRKQLNTLLTNGYLERPVFAEAHNKLIMEYEHLVAKRDLLFRMDDAGYTMEQALKELVDFLNDAKPFTEWEESLFERFIEKVKVLSREKIEFEFKCGLKLKERID

SEQ ID NO: 21094 - protein, 515 aa, synthetic construct
MKTAIYLRKSRADLEAEARGEGETLAKHRTTLLKIAKEMNLNVLSVREEIVSGESLVKRPEMLALLEEIEDNKYDVVLCMDMDRLGRGGMKEQGIILETFKRSNTKIMTPRKTYDLNDEWDEEYSEFEAFMARKELKIITRRMQRGRVSSVEAGNYLGTHAPFGYDIHRLNKRERTLTINSEEASVVRMIFDWYANEDMGANAIRSKLNDLGYKSKLGNEWNPYSILDILKNNVYIGKVTWQKRKEVKRPDAVKRSCARQDKSDWIIANGKHEPIIPESLFEQVQEKLNSRYHVPYNTNGIKNPLAGIIKCSKCGYSMVQRYPKNRKETMDCKHRGCENKSSYTELIEKRLLEALKEWYINYKADFEKHKQGDKLKETQVIQMNEAALRKLEKELVDVQKQKNNLHDLLERGVYTVDMFLERSNVVSDRITEITSTMENLKKEIKNEIKKEKVKKDTIPQVEHVLDLYFKTDDPKKKNSLLKSVLEKAVYKKEKWQRLDDFELVLYPKLPQDGDI

SEQ ID NO: 21095 - protein, 567 aa, synthetic construct
MMTRPIKKRAVLYARYSSDMQKATSIDGQLLLCRKIAARNDLDVIGAFVDAAKSGLTENARDGYQQLLNGVRNHDFDVVIVEHFDRLSRDPATIQRLKQVFEFNGVELMDQKGVYATATDISIASLYNTIYKPQLADKVRRGHDNAVASGRIPGSYAYGYRPRPGAPGERVIDENEAKIVVRIFTEYVSGRSTRDIAADLTRQGLPSPGATRHKNKAGRTTWNHQCITGGRHGRGIIGNELYIGEIHWNVRSTILNPETQKKQKRRNPDDRHIIVKKPELRIVPQVLWDRAQKVRSGRAIHMFGPTGKPRRRPVIPRNNEHPLAGVLRCGVCNGNMRIAQSSRNGAPRAACANAHQRGTCEHTRSFDMDVLLEDVSSKMELKLLSPKAIEEAMRAWKEERKNDRKKNSEHANLERRLRTLTTEIERLSYAIANSRRKPDELLKRIDECDVERETVKERLRLLGSGSENVIPFDHPKFGDRYHSEAKRLVTALRINPKAIETRVAFRNLIDSIVVHPVRKRMPYEYTPYLNSASLSSMNLFPENRRKTREISAFVYYDNVKSEKSVSS

SEQ ID NO: 21096 - protein, 476 aa, synthetic construct
MGKLARLPIGAAGLVYGYARVSTAEQADSQHALTQQCERLKRAGTDELLIDVQSGRKDDRRNFQKLLRLAEGGHVREIVATRLDRLGRNVRAILELVDKLDDLGVALRLLDEKVDTSTASGRMYLTIRAAVDEQESRLLSERVSHGMKHRRLRGAAHPKPPFGYRMGADDRYVLNVTALCRIADHSEWTIEGIARWLIAEFLRTGRVRGTLKGCVEMFGFTPFTHIGFSGWLTSPALRGHIVYGDGTTYPDAHPAYLDADTARAAKLALERGKQLGGWGSAEGPRNRPLTGLVRCPLCSGGTYYRDQRTQRKMADGSTKTYRRESYHCSAAGREGSCSNTKSVTVECIEAAIEAALRAKAVELASMVSAGLGQPVEEPETVKALRAQLSALEAIPNPVGALQDAMGHLRRQIDNLLGAAAGERKEADLKAEQLHQAFADPDFWATITQEERRTVYRDLVRKILIAGGKVVAVELMI

SEQ ID NO: 21097 - protein, 643 aa, synthetic construct
MKGAMSLKKAALYVRVSTLHQIDKDSLPFQRQELENYAKYALNIEEVVIFEDAGYSAKNTDRPKYQEMMKRIRSGEFTHLLVWKIDRISRNLKDFSEMYEELKDCKVTFVSKNEQFDTSTAMGEAMLKIILVFAELERKLTAERVFSIMLSRAEKGLWNGATVPFGYVWSEEEKFPVIDPDESKIIQYIYNSYESLRSTLKVAYRLHEEKIATKRNGQWTAKTVRDILRNPFYIGTYRYNMRESGGSRRLKNKEEWVVVENNHPGIIEKEQFERVNKLLSDNYRGLTDVQRADIHKHIFSKMLYCGKCNSLLTAGLDAARKDGYRPSRYTCVTSGGAKRCSNYVSDIIIGPFIFNYVSNLIRLQERITPKHSLRDMERALLRGNSFIDVVGVDNESLKETHFALTGNMSGQEYSLNTKDEIEIPNIEIERLQREKTKFVRALKRLEDLYYFGEEEDAISQKEYIFKKRDLQERLEELDDEINILKQKNDDKTSDVFIDYAQHFLITKEMQQARQVDYRELSKIVGREALSDFMQTIIDNIVVIDKRVQSITFKNGITHTFAYKSLLQSKSSAPTKKQYKNYEGPVIEYLKENGPASRSDLQKATNITRDGIFTLLSELIEREIIVKTGQSTATRYHYNDKQNN

SEQ ID NO: 21098 - protein, 549 aa, synthetic construct
MTRAALYARYSDDKQNEASIEDQFRLCREHAGRERWQIVGSYEDAAISGASTILRPGIQRLMRDAQHGEFSILLAEALDRISRDQADVATLFKQLKFAGVTIVTLAEGEITELHVGLKGTMNALFLKDLAMKTHRGLRGRVEKGKSGGGLCYGYKVVKKLDGNGEPIRGDREIIPEEADTVRRIFREFASGKSPKAIAVDLNRDGVPGPLGRAWGDTSIRGHRNRGTGIVNNELYAGVLVWNRLRFVKDPSTGKRVSRPNPESAWIRTEVPHLRIVDDALWNAVRERQKQIAEIFGPNLANTREDRMKRLHLANRPVSLLSGLMTCGCCGGKIGIILSDRLGCLNHHRRGTCTNNRTILRDKLEARVLTGLQERLVSAEAVKEAVRAYVEETNRLNQQRRTQQETDRRALAKIERAIAGIIAAIEDGMYQPSMKARMDELERQKAEIVARMAEAPADMPDVHPNVAANYSRNVARFAEALRDPDGGREAAEALRSLIGGIIVTPGEKRGEVHAELRGELMGILGIAAVQPEQGRTSVMSPVAAGPRNQR

SEQ ID NO: 21099 - protein, 597 aa, synthetic construct
MRVAIYARYSSDQQREASIADQFRMCRLRAEKEGWTVVEEYSDHAISGSSMIQRPGIQALILDSSRGRFDMVLAEALDRISRDQEDIAGIYKRMCYADIKMFTLSEGEITQLHVGLKGTMNALFLKDLADKTRRGLRGRVEDGKSGGGNSYGYDVVKRFDGNGEPIRGDRTINEAQAAVIRRIFADYDSGLSSRTIAMTLNREGVPGPMGREWGPSTIHGNRERGTGILNNELYVGRLVWNRLRYVKDPDTGRRVSRLNPESEWVTQDVPDLRIVDQALWDAVKARQGELAFSTRSRPEGNPLNDRRRPKHLFAGLVKCGCCGGGYSMISKDLLGCSTARNKGTCDNRVNIRRDALEASVLNGLKKHLMEPELFREFCTEFTREVNRLRMERGADLEVARRDLDRTTRELDKAIDAILQGVPPLTLKDKITQLEARKAELTEKLANADEPPPLLHPNMAALYAQRIAKLSENLQQEDSRAQAAEILRSLVEQVTLVPEDGELAIVLRGDLGAILRFAAGRKNPDFLSEAEALDNLLAQSGGSRKPWRGQQKTSSAVALEVSQLSLVAGACGHWRHNRCSPLFRLDGGDTENAHQLAA

SEQ ID NO: 21100 - protein, 689 aa, synthetic construct
MISTDLIPTVLLERKAVVYVRQSTQSQVMTNLESQRRQYDLVDVARQRGFLDVEVIDDDLGRSASGTVARPGFDRLVALLCAGKVGAVLCFDASRLARNGRDWHHLLELCGLVEARVIDHDGVYNPCRPNDRLLLGMKGSISEFELGVLRARMLDAARSKARRGELRLSVPFGYIWHREAGLGLDPDLRLQDVIRSIFARFHELGSARQVLLSMTKDQIHFPRPSDERRMTNFVWTPVRYRNVIGILKNPFYAGVYVYGKSEKRTAIVDGRARRSYGHGKPVGTWEVMIRDHHEGYISWDEYERNQQQLALNNYGRSGGTKSGRGGKALLSGLLTCGRCGRRLSVAYTGNPHNPVYRCDKQNLMMGLPRCMTFGGPKVDAAVARELLRAVEPLAIEATFEAERMHRERQEDQRHIHDLELQQARYEASLAERRYAACDPDNRLIAAQLEKNWETALRRVRDLEERKPADSPSTIAVDPGTFANLADNLLAAWESPDVTMRVRQQLLRTLIADIVVDVDDAVRDVVLTIHWKGGQHSELKVRKPQTGEHGCATTEDALAVMRSMAGRWSDEHIAASLNRMGMPTGQGKTWTAHRVASVRRVRAIHAYKSADKDGEWLTMTEAAAALGVTNHRIRHLIKMKVLSAEQVVRGAPYQIRVSDLASATVQAAIALKGRPCRIADTETLPMFTDT

SEQ ID NO: 21101 - protein, 533 aa, synthetic construct
MKRAVIYARYSTDLQNDKSVEDQFSLCRDFAARLGADVVKQFSDRAKSGASMFGRPGLADMMTAAERGDFEILITESTDRVSRDIADLAHVHKVLKFRNIEMQCVNGGLMDTVQIGMYGIVGQMQREEGARKVKRGMTGVVRSGRNPGGKAYGYRPIDGRKGELEIVEEEACIIRRIFDMYAAGYSARLIAAALNKEGVPAPRGQQWNASTINGNGIRGNGILRNPLYVGQLVWNRVHMVKDPSTGRRVSRPNERSAVETVDAGHLRIITDDLFQEVKVRKDERTGTQAHTHPKSKRLLSGLLRCSACGGSLSTIGADRSGPRVQCSTNKESASCPNGARYYVEKIERDVVDRLRGMFATTTYIDAYVEEYKAESKRLATERRNSRGTKEAALVNVQEQIARVLEQVAKGTIDDDDVSSIMAKLKAERSLLKAELAAQEPPTNVIEIKPKALTKFPEDVESLADILKERGAEPTMEMAKAFREVISRIIVHPRKPGGAYNYEIKGWLSAITGPDLSSVLMVAEEGFEPPTQGL

SEQ ID NO: 21102 - protein, 567 aa, synthetic construct
MSSAIQIKGDSFRRQAEASAKYAAEHDLDLIDDYKLADLGVSAFKSDNLTTGALGRFVAECEAGEIEAGSFLLIESLDRLSRDKILDAFSLFARILKTGVKIVTLSDGQVYDGSSDQVGSIYYAISVMIRSNDESKIKSTRGLANWSQKRKLAAEHGVKMSSQCPAWLKLSVDRKSYLIDKERAKIVQRIFEASASGKGANLITKELNRDKVPTFGRGALWAEAFVSKTLRNRAVLGEFQPGQYVSGKRQPAGDPIPGYFPPVIEEELFDIVQASLRGRLLAGGRRGEGQSNIFTHVAFCGYCGSKMRHRSKGSRVKGNPPHRYLTCFNRFNGPGCDCKPLPYAAFERSFLTFVRDVDLRGLLEGAKRKSEAKTIADRITVNEEKVRKADERIRDYLIKIEGAPDLAEIFMERIRELKAEKDDLVRSIEESNDALSKIKSDNVTDEELASLISTFQNPCGENRIRLADRIKSIIERIDVYPNGEIRKDDPAIDLVRASGDPDAEKIIAAMNAGSRLKDDPYFIVTFRNGAVQTVVPNPSNPDDIRVSVYAGEKTRRVEGSAYEYESD

SEQ ID NO: 21103 - protein, 514 aa, synthetic construct
MIIPAIKRVGNNRKEDETPKLRVAAYCRVSTDSDEQASSYEVQIEHYTEFIKKNSEWEFAGIFADDGISGTNTKNRDEFNRMIDECMAGKIDMVITKSISRFARNTLDCLQYIRKLKDKNVAVYFEKENINTLDAKGEIMLTIMASLAQQESQSLSQNVKLGYQYRYQQGEVMVNCSRFLGYTKDENKRLVIVPEEAEIVKRIYREYLEGSSMDKIKKGLEADGILTGAGKKRWHTSTIRKILSNEKYIGDALLQKTYTVDFLTKKRVVNNGIVPQYYVENNHEAIIPREFFMQVQEELVRRSRGHISTSGKKRNFSSNHVFSQIIFCGECGEIYRRVHWNNRGKKSIVWRCVSRLENTGLTCHSRTVLEDMIGLATVETINKLIGQKDGFLLTLKENIETVISETDNNVVSEIDKKLEELQKDLLRLANSKEDYNDIADEIYRLREERHKALAEEAGKKGSKQRLEEMEKFLNEQSTLLEEYDEQLVRRLIEKITVYDDKLTIEFKSGVEVDV

SEQ ID NO: 21104 - protein, 481 aa, synthetic construct
MKTMNKVAIYVRVSTTNQVEEGYSIDEQKDKLSSYCDIKDWNVYKVYTDGGFSGSNTDRPALESLIKDAKKRKFDTVLVYKLDRLSRSQKDTLHLIEDVFIKNGIEFLSLQENFDTSTPFGKAMIGLLSVFAQLEREQIKERMQLGKLGRAKSGKSMMWAKTSYGYDYHKETGTVTINPAQALTIKFIFESYLRGRSITKLRDDLNEKYPKHVPWSYRAVRTILDNPVYCGFNQYKGEIYPGNHEPIISKEEYDKTQSELKIRQRTAAENVNPRPFQAKYILSGIAQCGYCGAPLKIMLGVKRKDGSRLKKYECHQRHPRTLRGVTTYNDNKKCDSGFYYKDKLEASVLKEISKLQDDADYLDKIFSGDNAETIDRESYKKQIEELSKKLSRLNDLYIDDRITLEELQSKSAEFISMRGTLETELENDPALRKNKRKADMRKLLNAEKVFSMDYENQKVLVRRLINKVKVTAEDIVINWKI

SEQ ID NO: 21105 - protein, 481 aa, synthetic construct
MIATNKVAIYVRVSTTNQVEEGYSIDEQKDKLSSYCDIKDWNVYKVYTDGGFSGSNTDRPALESLIKDAKKRKFDTVLVYKLDRLSRSQKDTLHLIEDVFIKNGIEFLSLQENFDTSTPFGKAMIGLLSVFAQLEREQIKERMQLGKLGRVKSGKSMMWAKTSYGYDYHKETGTVTINPAQALTIKFIFESYLRGRSITKLRDDLNEKYPKHVPWSYRAVRTILDNPVYCGFNQYKGEIYPGNHEPIISKEEYDKTQSELKIRQRTAAENVNPRPFQAKYILSGIAQCGYCGAPLKIMLGVKRKDGSRLKKYECHQRHPRTLRGVTTYNDNKKCDSGFYYKDKLEAYVLKEISKLQDDADYLDKIFSGDNAETIDRESYKKQIEELSKKLSRLNDLYIDDRITLEELQSKSAEFISMRGTLETELENDPALRKNKRKADMRKLLNAEKVFSMDYENQKVLVRRLINKVKVTAEDIVINWKI

SEQ ID NO: 21106 - protein, 467 aa, synthetic construct
MKCVIYRRVSTDMQVEEGISLDMQRLRLEQYAKSQGWVVVNDYCDEGYSAKNTERPAFQQMIKDMKKKQFDIILVYRLDRFTRSVSDLHSILKMMDEYNVKFKSSTEIFDTTTATGRMFITLVATLAQWERETTAERVRDSMHKKAELGLRNGAKAPMGYDVKKGNLYINHTEAEIVKYIFEMYKTKGVISIVKSLNSRGVKTKRGKTFNYDAVRYIINNPIYIGKIRWGDDILTDIAQKDFETFIDKDTWYTVQQVQDSRKIGKVRLQNFFVFSNVLRCSRCGKHFLGSKQVRAHNRIVMGYRCSSRHHKGTCDMPQVPEDVLEKEFLNLLEDAIIDLEDTEEKPIELSNLQEQYNRIQDKKARLKYLFIEGDIPKNEYKKDMLTLTQEENIIQKQLANITDTASPFEIKELLNQLKDEWYNLNNESKKAAVNAIVSSITVDVIKPARAGKNPIPPVIKVIDFKIK

SEQ ID NO: 21107 - protein, 541 aa, synthetic construct
MRTAIYARFSSQLQKDSSIEDQVRICSQRAEREGWTVTQVFSDYAISGAVRNRPGLNALIEHIAAGKAEMVLAEAIDRLSRDQEDLANIHKRIQFAGARIVTLSEGAIDELQIGFKGTMASLFRKDLADKIRRGQSGRVASGRVPGNIVYGYRKVHKLDARGEPERGLREIDEDQAEIIRRIYREYLDGESPLAIARRLNAEGVPGPTGKGWNVSTINGDAVRGNGILCNAIYVGELVYNRTRMVRDPETRRRVPRVNPREDWQITPVPDLAIVTRAQWEAVRERKAEWKDWDFKRQHRPRKLLSGLIACGQCGGNMAIVADGKWGCTNARRQGTCTNRRTMDNPALERRVLAGMERELLSPDRIARVVKTYHEERAALQSEERATLARQTRKAAELDRQINRLMQAIEAGADDIPEVVARLKALKEDRASVAETMQDASAAKVVTLHPNIANAYRKAVADLTALLDDASPDNARQARNALRALIDRIILTPKEDARGMHIDVEGRLALLTALGQGQAPKLRKGTVSVVAEEGLEPPTRGL

SEQ ID NO: 21108 - protein, 507 aa, synthetic construct
MKRVISYIRFSSEKQAKGDSLRRQSKMVTDWLKAHPEYYLDQDLSFRDLGVSGFTGKHLKGGLGDFLTAIEKGLVKAGDTLLIESLDRLSRQAVDRASELLRNILRSGVDVVTLSDGEHYTKESLRDPLSLIKSILIMQRAHEESLRKAERIQAAWDAKKEAAKAGIKVSKRCPAWLKLNDDRKSFSVIPEKVETVKRCFQLRLEGKSIWEIVRTLNAEGHRSMNQYKPGKFGQTSVQDLLKNRSVIGYFTPKGCEEIAGYYPSVIDETTFYKVQQLSHSRYGRKPASDKPLSVNLFKGVIRCSECGHALIITGFSNTRNGIYRCPLRNENRCSAKGLSRKQTDGTLLTLLSRLDRFDSDTTNTIDTLKLHREHISNNIEKLVQLSLEIEDLSAITSKLKQLKGELSQVDADIEKETQRLKSIDTGSLSDCDLTTKAGRIEAQLIIKSAVKEVVLNTAKRRCKVTFHNGRAITLPITENPSEDVTEAIQSLSEVTERGLIDVDEVII

SEQ ID NO: 21109 - protein, 481 aa, synthetic construct
MITTNKVAIYVRVSTTNQAEEGYSIEEQKDKLKSYCNIKDWNVFNVYTDGGFSGSNTERPALEQLIKDAKKKKFDTVLVYKLDRLSRSQKDTLYLIEDIFLENNIDFVSLLENFDTSTPFGKAMVGILSVFAQLEREQIKERMQLGKLGRAKAGKSMMWAKVAYGYTYHKGSGEMTINELEAIVVREIFNSYLEGMSITKLRDKINDTYPKTPAWSYRIIRQILDNPVYCGYNQYKGEVYKGNHEPIISEEDFNKTQDELKIRQRTAAEKFNPRPFQAKYMLSGIAQCGYCKAPLKIIMGAVRKDGTRFIKYECYQRHPRTTRGVTTYNNNQKCHSSSYYKQDVEDYVLREISKLQNDKKAIDELFENTNMDTIDRESIKKQIEAISSKIKRLNDLYIDDRITIDELRKKSTEFTLSKTFLEEKLENDPILKQQESKDNIKKILSCDDILTMDYDQQKIIVKGLINKVQVTADKVIIKWKI

SEQ ID NO: 21110 - protein, 557 aa, synthetic construct
MKNKKAYVYTRVSTSMQIDGYSLDAQEERIKQYAKAYGIEIIETYKDAGKSGTSISGRNEFIAMLNDIEAEKDKVDYVMVFKLSRFGRNAADVLQSLQVMENHNVNLICVDDSLDSSKDSGKLVITILSAVAEMERENILSQTMEGRKQKAREGKWNGGFAPIGYSLDNGELVVNEDEAKAVRMIFDLYANSDMGANGVSKYLVSLGINKPIRQNGKNPYFSASLIRQILDNPVYNGKIAYGRRKTIKDKTTGKIKLEKSDHYIIAQGNHEALIDDELWNTVQEKRKSQAKKYEKINRGKDERVHILSNLIKCPYCGAGLYGNKSRKRNKNKEGEHYKDYYYYGCKHRQMMNGHKCTFNKQIRAELIEKEVETIITQVVSNPTFAKKIEEKINIQIDTKEIDEVINKHLAKIRQLTGTKASLINQIDSLNFEDKHYDRKYTDLNLRLDAIYDQLEYAEMQLNDSRKRKEAILEEKITSDNIYKILVNFNSLYTVLSDIDKKRLLNEMIEEIQIYDEKTEKDTWIKSVVFKLPLIDNEIDFGLDNKDNVECVALLVKA

SEQ ID NO: 21111 - protein, 434 aa, synthetic construct
MAAYCRVSTDQDEQLSSYENQVSYYRDYILKHEDYELVDIYADEGISATNTKKREAFNRLIQDCRAGKVDRILVKSISRFARNTLDCIKYVRELKELGIGVTFEKENIDSLDSKGEVLLTILSSLAQDESRSISENATWGIRKKFERGEVRVNTTKFMGYDKDENGKLVINPEQAEVVKHIYQQFLKGYSPESIAKELNTNGIKGWSGKANWYPSSILKMLQNEKYKGDALLQKTYTVDFLTKKRTENDGQVNQYYVTNNHEAIIDTEMWDTVQEELARRKDFREKHKLKTYIMQSDDNPFTTKVFCAECGSAFGRKNWTTSRGKRKVWQCNNRYKVKGQIGCQNNHIDEEMLEKAFMKAVELLQEHRADVVVKWQKLEKGTNLLHKHYAKQMYQLLDLEKFDGTIMNKVLDHISISEVGQIIVIFLEGTEVEL

SEQ ID NO: 21112 - protein, 481 aa, synthetic construct
MKTTNKVAIYVRVSTTSQVEEGYSIEEQKDKLESYCKIKDWSVYKVYTDGGFSGSNTDRPALESLIKDAKKRKFDTVLVYKLDRLSRSQKDTLHLIEDVFIKNGIEFLSLQENFDTSTPFGKAMIGLLSVFAQLEREQIKERMQLGKIGRAKAGKSMMWAKTSYGYDYHRETGTITINPAQALAIKFIFESYLRGRSITKLRDDLNEKYPKHVPWSYRAVRTILDNPVYCGFNQYKGEIYPGNHEPIISKEEYDKTQSELKIRQRTAAENVNPRPFQAKYILSGIAQCGYCGAPLKIMLGVKRKDGSRLKKYECHQRHPRTLRGVTTYNDNKKCDSGFYYKDKLEAYVLTEISKLQDNAGYLDKIFSGDNAETIDRESYKKQIEELSKKLSRLNDLYIDDRITLEELQSKSAEFISMRGTLETELENDPALRKNKRKADMRKLLNAEKIFSMDYEGQKVLVRGLINKVQVTAEDIVINWKI

SEQ ID NO: 21113 - protein, 481 aa, synthetic construct
MITTNKVAIYVRVSTTNQVEEGYSIDEQKDKLSSYCDIKDWNVYKVYTDGGFSGSNTDRPALESLIKDAKKRKFDTVLVYKLDRLSRSQKDTLHLIEDVFIKNGIEFLSLQENFDTSTPFGKAMIGLLSVFAQLEREQIKERMQLGKLGRAKSGKSMMWAKTSYGYDYHKETGTVTINPAQALTIKFIFESYLRGRSITKLRDDLNEKYPKHVPWSYRAVRTILDNPVYCGFNQYKGEIYPGNHESIISKEEYDKTQSELKIRQRTAAENVNPRPFQAKYILSGIAQCGYCGAPLKIMLGVKRKDGSRLKKYECHQRHPRTLRGVTTYNDNKKCDSGFYYKDKLEAYVLTEISKLQDNAGYLDKIFSGDNAETIDRESYKKQIEELSKKLSRLNDLYIDDRITLEELQSKSAEFISMRGTLETELENDPALRKNKRKAEMRKLLNAEKIFSMDYEGQKVLVRGLINKVQVTAEDIVINWKI

SEQ ID NO: 21114 - protein, 481 aa, synthetic construct
MITTNKVAIYVRVSTTNQVEEGYSIDEQKDKLSSYCDIKDWNVYKVYTDGGFSGSNTDRPALESLIKDAKKRKFDTVLVYKLDRLSRSQKDTLHLIEDVFIKNGIEFLSLQENFDTSTPFGKAMIGLLSVFAQLEREQIKERMQLGKLGRAKSGKSMMWAKTSYGYDYHKETGTVTINPAQALTIKFIFESYLRGRSITKLRDDLNEKYPKHVPWSYRAVRTILDNPVYCGFNQYKGEIYPGNHEPIISKEEYDKTQSELKIRQRTAAENVNPRPFQAKYILSGIAQCGYCGAPLKIMLGVKRKDGSRLKKYECHQRHPRTLRGVTTYNDNKKCDSGFYYKDKLEAYVLKEISKLQDDADYLDKIFSGDNAETIDRESYKKQIEELSKKLSRLNDLYIDDRITLEELQSKSAEFISMRGTLETELENDPALRKNKRKADMRKLLNAEKVFSMDYENQKVLVRRLINKVKVTAEDIVINWKI

SEQ ID NO: 21115 - protein, 508 aa, synthetic construct
MKKAIAYMRFSSPGQMSGDSLNRQRRLIAEWLKVNSDYYLDTITYEDLGLSAFKGKHAQSGAFSEFLDAIEHGYILPGTTLLVESLDRLSREKVGEAIERLKLILNHGIDVITLCDNTVYNIDSLNDPYSLIKAILIAQRANEESEIKSSRVKLSWKKKRQDALESGTIMTASCPRWLSLDDKRTAFVPDPDRVKTIELIFKLRMERRSLNAIAKYLNDHAVKNFSGKESAWGPSVIEKLLANKALIGICVPSYRARGKGISEIAGYYPRIISDDLFYAVQEIRLAPFGISNSSKNPMLINLLRTVMKCEACGNTMIVHAVSGSLHGYYVCPMRRLHRCDRPSIKRDLVDYNIINELLFNCSKIQPVENKKDANETLELKIIELQMKINNLIAALSVAPEVTAIAEKIRVLDKELRRASVSLKTLKSKAVSSLGDFHAIDLTSKNGRELCRTLAYKTFEKIIINTDNKTCDIYFMNGIVFKHYPLMKTISAQQAISTLKYMVDGEVYF

SEQ ID NO: 21116 - protein, 580 aa, synthetic construct
MINLAIYLRVSTLDQSFERQRSDIETFINRSYGVGNVNIDVYNEKISGYKNSNKRPELDKLTSLIEKDPQHYKCIYVTEMSRLGRNPLETRMLVNDLLFNKKVDICLTSNNGGTYFLNPDGSVNEIQLTVFSLLMDFADIEAKTLKTRSMSGKRQNASKGGASGGAFAPYGYDRINKMLVINEVEAEIVKQIFDDYTHGLGLQAIANKLNQQEIPTKSHSMYGDKLIGGKPANQMTWLASQLKDMIQQPLYYGLRVFQKNKEELKASFEVPELAIISKELFDHCQDIRENKRSNGRNLMTKNVVLLQYLIKCGSCGRNFTHVINKVTKYYACASCVVPPYTNKCGNNSIKINLLDSAIYDAFEDTPQILQYLSDTEAIKEEVTRKIELINSNLPVLEKELTKYENRIDRLINDYYDEKVPPAIYEKKLAQFNTEKNNIVTQLSTQRKQLLSSTETLANLNKPTTNTELLTEAKTDRNKLQAIFKQIIKSITVYKVDLRNTRCDVRLQIAGEELPDVLTFIVNRQGATKSPPVFKYKTFLIKPFDPHTEVEDDYNTEFYNNEKYKDIKDWQFVTKNQIILN

SEQ ID NO: 21117 - protein, 590 aa, synthetic construct
MFLFNSNICSFSKTLYDYIINLNQKKHFPCIISHKKTIISFLEGHIKETTIYYETSLTIIIILYNIIHDMKGVIFMKTAIYLRKSRADLEAEARGEGETLAKHRTTLLKIAKEMNLNVLSVREEIVSGESLVKRPEMLALLEEIEDNKYDVVLCMDMDRLGRGGMKEQGIILETFKRSNTKIMTPRKTYDLNDEWDEEYSEFEAFMARKELKIITRRMQRGRVASVEAGNYLGTHAPFGYDIHRLNKRERTLTINSEEASVVRMIFDWYANEDMGANAIRSKLNDLGYKSKLGNEWNPYSILDILKNNVYIGKVTWQKRKEVKQPDAVKRSCARQDKSDWIIADGKHEPIIPESLFEQVQEKLNSRYHVPYNTNGIKNPLAGIIKCSKCGYSMVQRYPKNRKETMDCKHRGCENKSSYTELIEKRLLEALKEWYINYKADFEKHKQDDKLKETQVIQMNEAALRKLEKELVDVQKQKNNLHDLLERGVYTVDMFLERSNVVSDRITEITSTMENLKKEIKTEIKKEKVKKDTIPQVEHVLDLYFKTDDPKKKNSLLKSVLEKAVYKKEKWQRLDDFELVLYPKLPQDGDI

SEQ ID NO: 21118 - protein, 549 aa, synthetic construct
MQTATAKKKSISFIPPQPEYDRSIKPQFKALRVAAYCRVSTTLEQQETSYEAQVSYYTEKIKSNPNWKLAGIFADDGKSATNTKKRDDFNAMIEDCMAGKIDMVITKSVSRFARNTVDSLQNIRKLKEKNVAVFFEKEGVNTLDGTGELLITILSSQAQEESRNLSENTRWGLVRRFENGIVSVNHNKFLGYTKDKNNELVIVPEEAELVRRIFRLYLEGSSIVQITKILESEGITTVTGLDKWCPGTINKMLSNEKYMGDVLQQKTYTIDFLTKKRVLNKGIVPQYYIEDDHEAIIPKELYYQVQEEKARRASLHKPSVARKEKKEKSKYSSKFALTDIMVCKECGQPYRRQIWSKYGQKTAVWRCDNRLKNGTKNCKHSPTFKEDVLHEAIMTAINSVVENRGEFVGAFRENVIRVIGNYSTKNVPTEYDGQIEKLQAEMLALIEENAKQGSITEDFDEQYHRIAERINDLKQKKLELVREQKMAANFQQRVEDMDACLKKTTCEVGEFDNDLVRRLLQSIKAVKDDLIEIQFKSGIVMNQRVSYFD

SEQ ID NO: 21119 - protein, 459 aa, synthetic construct
MINNELNQKLIRVALYIRVSGEEQKIKGLSLESQRERLEAYAREQGWVIVGIYIDAAKTARKKLHKRSEFQRMLDAVRHDEVDMLLFTRLDRWFRSVPDYYKVMEVLEAHNCEWKTIDDGEGYDTTTASGRLYINIKLSIAQNEADLDGERIDVVFDSKVQHGTVLSGKCPFWLRVNEEKRLELVPEKTAILQDAFDYYEQSTSQRATIKYIRETYGVNWCDATFRRMLHDKLAIGVYDRNGRYNPTFCPAAISPEQFERVQELTKRNSRSNPTGKVYIFTGILVCDECRHNMVGYKSCGIYYYRCNQHFQRGRCEHNHSAREDRVESWLFEHLSDEIEKYEVSWDVQAAGRKKTAAGVERATLKRKLTKLKELYVNDLIDMEEYKKDYETYSAALLKLDEAQVEEKKVDLSGVRQIVSKGFQEIYDTLTREEKRTLWKSVLKEIRIDNDQNITGISFF

SEQ ID NO: 21120 - protein, 526 aa, synthetic construct
MQYCLYLRKSRADSEAEARGEGETLARHEKALLDLAKKLNLNITAIYREIVSGETIAARPVMQQLLQEVEQGIWDGVLVMEVERLARGDTIDQGIVAQTFKFSDTKIITPIKTYNPNNEFDEEYFEFGLFMSRREYKTINRRLQRGRMASVKDGKYVANKAPYGYNRIRIENDKGWTLEINKEEADVVRLIFELYTVGEKQSDNTFNRLGTGFIAKRLNAMKVPPKRGKVWVVASIRDILINPVYIGMIRWNWRPQQKKMIDGQLHISRPRATDYVLCNGLHPPIISKETFDMAQELMRHNPARPIGEKNTVKNSLSGIVVCGDCGRHMVRRPHTKYPDMLICSEPTCNNVGAQLRVVEERILQSLKEWLGEYKISWDITSPPVERISQVSIKKKALQKEQHELDTLNKQISKTHDLLEQGIYTTDVFLERSRALSLRMDEVKEHIAILDKELKTEITREDSAVNIIPKVEKLLEVYHDLPSPKAKNDMLKDVLEKVVYTKKERSKKGNLDNFNITIYPKIPKYIT

SEQ ID NO: 21121 - protein, 599 aa, synthetic construct
MRKVSKIEPISPSLPTRKKVAAYARVSMKTERLNHSLSAQVSYYSELIQANPEWEYVGVYADDGITGTKASKREEFQRMLDDCEAGKIDIILTKSISRFARNTVDLLETVRHLKELGIEVRFEKENINSLSGDGEVMMTLLASFAQEEITNLSNNVKWGVRKRMEQGIPNGHFRIYGYRWEGDQLVIEPEEAAIVRRIFQNFLDGKSRLETEREFEAKGITTANSCRWVDSNIKVVLTNITYTGNLLLQKEFIEDPITKRRKKNRGELPQYYVEDTHEAIIDMETFQYVQEEMARRKELGAFANKSLNITCFTSKLKCSKCGSSYVRNQRSNRTKYTSTYGDTIVVWVCGTTKKKGGRCSRKDIPERVLREACAEALGLTEFDEDVFLEKVDYIMVNPNCQLEFHFYDGTTKVQTWKSTAKKDCWTDEQKDRQREWMRRNMATSSRFSPFTTRVVCGCCGSSCRRQTQPSKLSETGKIAYWRCSGGAKTNCGIKGIREPELMEITAQVMGTPEFDGEAFRERVDHITMVESGKLEYTFLDGHTQEAEYSTEKPSHPWSEEQRAKFKESVKGSYTPERRKAMSEHMKKVRSEKHWASKRK

SEQ ID NO: 21122 - protein, 527 aa, synthetic construct
MGVQKKVKTIPATLTRFTASPITEQKKRKVAGYARVSTDHDDQFSSYEAQIDYYTNYIKGRDDWEFVEVYTDEGITGTSTKHREGFKQMIADALDGKIDLIVTKSVSRFARNTVDSLTTIRQLKEAGVEVYFEKENIWTFDGKGELLLTIMSSLAQEESRSISENCTWGQRKRFADGKVSVPFQRFLGYDRGPDGNLVVNPEQAVTVKRIYSMFLQGVTYHGIADRLTADGIPTPGGKKKWSQSTVKSILSNEKYKGDALLQKSYTVDFLTKKTKVNEGEIPQYYVEDNHEAIIEPDVFEMVQREIQKRGKGKKYHSGAHTFSTKIKCGCCGSWYGSKVWHSNSKYRKTIWQCNHKFDGDCRCQTPHLTDEEIQLHFLSAANKLLATKAAVIANGREMQALLFDTTELEAEQAQLLEETQVVSDMVQQAIQENARTALNQTEYQKRYDSLVQRFDRAKTRLEEVTAEIQEKQTASANMGTFLNAFEQMPDALAEFSLESWHSMVDYSTVYSADDIRFTFKNGQEIKA

SEQ ID NO: 21123 - protein, 652 aa, synthetic construct
MSWKCGIIKLHRKIQKKEAGAVKKDVKVIKGDTTLKRTASGCVERSIKRVAAYCRVSTDTEDQINSYNSQVEHYTDFIKQNNEWTLAGIYADEAITGTQVDRRIDFQRLINDCMNGDIDMVITKSISRFARNTLDTLKYVRKLKEYNVAVFFEEENINTLTMDGELLLTILSSVAQQEVENISANVKKGLRMKMERGEMVGFQGCLGYDYDPETKSISVNEKEAEIVRYIFRRYLEGVGGMVISRELEEQGYLSPRGYKRWTETTVLGIIKNEKYKGDLLMGKTFTVDPISKRRLDNFGEQDKFYIENHHEPIISEEDFEKAQGIRLRRAKNRNTVANNGGKREKYSRKYAFSSMLECGFCGHNLSRRNWHSSSEYTKVIWQCVNATKNGKKYCPHSKGIEEEAIEKAFMESYRQVCHNNVEITNEFLKTVEEELKDNSLAKDLKKITNQLDKILKKEKDLVELRLNESISMDIYQDKYNEIAISKEKLLAEKRTLEVTLTDEKALKKRLEGFKKLLESNKYLEEFDRAVFESIVDKIIIGGTNDEGEIDPAMITIIYKTGKKDSQNGRLFKSRRKNAKVVEENDGDKLYSQSSNEVNKLCSYSTDNTCGVRSVATTKQRVKILYFKHFFKHFVFIEKSDFNIKKVLKNILT

SEQ ID NO: 21124 - protein, 525 aa, synthetic construct
MRLSRDDENYGDSVSIETQRTILQQYAKEQGLHVVGEYVDDGWSGTNFERPDFQRMMDDMEAGKVNCIVTKDLSRFGREHVMMDYYLEFLFPEKRVRYIAVAENEDTEKGLSDFVPFKNLFNEWFAKDTSRKVKAAFKAKFATGQRIGAYAPIGYRKHPEIKNKLIIDEETRWIVEKIFDLAIHGRGAASITRILIAEKVPTPGFINFQRDGTFANIYAGAPEEKSYAWTIAQVKSIMKDETYIGHTIHYRETNISFKNKRRVRKPQSEWVRVENTQEPIISEQVFRQVQEQIANRRRKCKDGTTQIFSGLVKCADCGWSLSYGENRQNSKPYGHYHCSKYGQGTRQCSMHYIRYDVLYAYVLSRLQYWSGLVQHDEERLLKQLLNATDKGQAAARKKQAAELKKAEKRKAEVDTLFARTYEDWAAGRITEYNFSMLSGKYQSEQAELDEKIEQLQSAIATESQNAVDAEKWIALMKECVNPTELTAELLNMLIEKIVVHEAVKGEDGSREQEVEIFYRFIGKID

SEQ ID NO: 21125 - protein, 542 aa, synthetic construct
MKEMSNIKKIRTIEKAPVFNEPFKKLRVCAYVRVSTNQAEQQESFFAQVQHYTSYINSNPEWTFSSIYSDHGISGKNAARRPEFMRMVQDAENKKFDLIITKSISRFARNTADCLETVRKLKLLGIAVQFEKEQINTLTTESELMLSILSSVAEEELASISQNMHWSNQRRFKKGKFSVNTKRFLGYDKDREGDLIINEDQAAIVRRIFKNYLSGLGASRIAKGLEADEINNISGRVKWAESSIRDILKNEKYAGDARLQKTITTALYNRKRNSGEAPMYYVKDSHPAIISREDFEKVQELMKARAKSKGNIEGNREKYTNRYALTGTIICSNCGNTFKRHIDNCGTVAESVCWICSTYIIGRKNSCGVGRIKEDTIKGLFVKIFNQLYNQRAKLLGDYKAKMEREKLTELDNERIAKLDEKIEKLIKQERALFLIEEKGYADHNLVKSEHEELVKTLTQLQTERSDWMAEINKRDNRVARTLELETILEVQGRNITEFSDDLYGKLVEKIVVKERTKLILQLKNGLAFEETYTLKRGHDIF

SEQ ID NO: 21126 - protein, 633 aa, synthetic construct
MNTRVKLIKASNTGARNRNALDLELKRVAVYCRVSTDSKDQLESYKSQVDYYTNLIKNNMNWTLAGIYADEATTGTTATKRADFMRLISDCQNGDIDMIITKSISRFARNTLDTLKYVRLLKENNVGVVFEEENIDTLTMDGELLLTILSSVAQQEVENTSAHVKKGLKMKMEKGELIGFQGCLGYDYDPITKSISINEEEATIVRYIFKRYLEGNGGSVIGRELEEQGYLTPRGKAKWSDTTVLGIIKNEKYIGDILMGKTFTVDPITKRRLANFGESDKYHIENHHEPIISREDFEKAQEIRLRRAQNRNTIANKDRKREKLSRQYAFSSMLECGFCGEILSRRTWHTSSIYKKINWQCVRSTKKGKKYCPHSKGIQEAAIEKAFVESYRQLCHADSTVIDDFLKIVEEEINDNTLVKDLKKLENQLNRIISQERKLVDLHLEDSIDEEVYAKKYKKLTKQKEELLDEKKTLELTIKDENSIKERLKQFKKVLENREIIEEFNRTVFESIVDKVVVGRIDKDGTVHPYDLTLYFKTGIEDSQNSNNFKDKRKNAKDNDSDKLCSHKNDEDKKLCSQAKDNECGDCSIDVKKIRWQAIKVLKSMAFRILKEILKAIFLFVKYLVGTYHYQEL

SEQ ID NO: 21127 - protein, 509 aa, synthetic construct
MTPRRAAKYRRISDDREGRELGIGRQDEDLDELAERENLVYVASYVDNDISASTRSKKRRPDYERMLADAKAGNFEIIAAYTSSRITRRPRENEDLIDLAVDHGIKYKYIRSPEFDLNTADGREMARNAAARDAGETERTSERVERDVRRRAEAGEFHGGLLPFGVDADQVIVKVRGVSKVKYVNFRHHDTDAPRVKDAVRRVLAGESLYGIAKDFGMQRRTLKRALTKPAIAGLREFEGKLLPTPWEKIVEVDDWRRVVEILNDPERGTKEFNQRKYMLSGLVTCINKHPDGSTCGNRMTSSSAKRTEGPTFECSVTKNKTRGCGGTRIVMQPLEDYIAEQVFTRLDSPALRKAIAREREGVDDPTAALRKKILDDEQKLKDLEDEYDDGKLPRQRYQRRRARLTDRLEANTKARDAAIRTHQHTNLPTGSELRAIWDDRDDTWQRGILASVIDRIEIGPHPINPETGRLFSSAPFRLKGETKEAWRQRFDLHRAKVFSLRVSVTWLV

SEQ ID NO: 21128 - protein, 553 aa, synthetic construct
MKKRVWCLYRVSTKKQTDTKNDIPRQKRKCHSFIDGKPDWILTNELYEKGVSGYKKTSENRDVIQQIKKAAISCDFDVLLVYMFDRLGRRDYDTPQIVEWFIEHNIEVWSVEEGQQKIESHADRLITHIRFWQAEGESIKLSQRVSNAHEQMARDGLFRGGKASYGFKLVYSGVIDKKGRALKKRIIDKEEAPVLEYMYDLAADYGYGRNIIAHLLNEKGIPSRNGGKWIPSTVAYILQNPANMGYPAYGKTTQKKGTTKINKEADWILPEKKLEDLAIILEEKWYRAQEKRTARKEGIACHETLHMISPGPLLFVGMIYCGHCGASLTTFYNYKYNELKSIKYVYPKYRCTSHVGKTRPCDGQMVYSGKNIDETVLRQVYVYLSSFLKCEAFGKNNHGETKKEKLIRQVKEIQEKIQESEEEYNALLQEVAKSLIGKSGFTTNVLSDLVNEKKDKIEELKEEETAILSQIKRVRERVTDSRTIKEIIDTWETGFLKIETDRKKSILRHLINRIDVYRDKVKIDFNTTIEEFMTEIEIYMDETTELKMEKSAL

SEQ ID NO: 21129 - protein, 501 aa, synthetic construct
MELAFSYARFSTKSQSTGTSLERQLNASRLFCSERGLTLSPKGYHDLGVSGFKQVKRPELEQMLQAIQSGDIPSGSYILIEAIDRLSRKGISHTQDVLKQILQYKVKVAFVGEDAKTLAGQVLDENSLNDLSSVILVALAADLAHKESLRKSKLVKAAKSIIRKKATEGHKVRGHTMFWIDWSEQKQDFVLNDRVKDVHKIIELRQEGHGPRKIAKILNELNIPGPRGNPWNHMTVTVVLRSPVLYGAYQTHQIIDGQKVPDVLLENHYPAVITQEEFVTIQADSSKSNKGRPSKANPFSGVLRCECGQAMLFSKRTNLNKDGEPLEYEYHFCLGHAEGRCKNNKRIRDLVPLLVSLMDKLVINQAPKKNLNVELIKQKEQKIEQLNKMLIELDSPPLSVLKTIQTLEAELDILLNTHVEEPVQTDVQTLSTITDAQEYNQYLKRLVKKIVVYQKNGPKNLRIKVYKTDGHYQNFLVKDGTVLFKSDTKALKELIDGFNKA

SEQ ID NO: 21130 - protein, 481 aa, synthetic construct
MITTNKVAIYVRVSTTNQAEEGYSIEEQKDKLKSYCNIKDWNVFNVYTDGGFSGSNTERPALEQLIKDAKKKKFDTVLVYKLDRLSRSQKDTLYLIEDIFLENNIDFVSLLENFDTSTPFGKAMVGILSVFAQLEREQIKERMQLGKLGRAKAGKSMMWAKVAYGYTYHKGSGEMTINELEAIVVREIFNSYLEGMSITKLRDKINDTYPKTPAWSYRIIRQILDNPVYCGYNQYKGEVYKGNHEPIISEEDFNKTQDELKIRQRTAAEKFNPRPFQAKYMLSGIAQCGYCKAPLKIIMGAVRKDGTRFIKYECYQRHPRTTRGVTTYNNNQKCHSSSYYKQDVEDYVLREISKLQNDKKAIDELFENTNMDTIDRESIKKQIEAISSKIKRLNDLYIDDRITIDELRKKSTEFTLSKTFLKEKLENDPILKQQESKDNIKKILSCDDILTMDYDQQKIIVKGLINKVQVTADKVIIKWKI

SEQ ID NO: 21131 - protein, 413 aa, synthetic construct
MAVRLIKTKSNRKKQRVCAYTRVSTTNSSQLDSLENQKAYFETFYVNREDVDFLGVYYDKGISGSKEKRPSFQAMLEACRQGQIDLIHTKSISRFARNTMTVLEVSRELKALGVGIYFEEQNINTLSNEGEGMLSVLASLAEEELQSMSDNQRWAFQRKFQRGEMVINTKRFMGYDVDDKGELVINEAEAQIVRRIFQLYLDGMGMHRIAKLLNQENVPTATDAKWHDTTVRNILKNEKYKGTVLLQKYFHVGINGPKRLNQGQVEQYLIEDNHEPIVSKEVWQAVQDKLASKTWKQGVNKHYRFTSMLKCEYCGSTLKRQVTYKKQIVWCCSKYIKEGKASCRGMRVPEKAIEEWKLRTPVTVIERNEYGQKHYSYSSQESAADGHPSASNQNKSGSLLSGVHRPRRTAIKL

SEQ ID NO: 21132 - protein, 434 aa, synthetic construct
MAAYCRVSTDQDEQLSSYENQVSYYRDYILKHEDYELVDIYADEGISATNTKKREAFNRLIQDCRAGKVDRILVKSISRFARNTLDCIKYVRELKELGIGVTFEKENIDSLDSKGEVLLTILSSLAQDESRSISENATWGIRKKFERGEVRVNTTKFMGYDKDENGKLVINPEQAEVVKHIYHQFLKGYSPESIAKELNTNGIKGWSGKANWYPSSILKMLQNEKYKGDALLQKTYTVDFLTKKRTENDGQVNQYYVTNNHEAIIDTEMWDTVQEELARRKDFREKHKLKTYIMQSDDNPFTTKVFCAECGSAFGRKNWTTSRGKRKVWQCNNRYKVKGQIGCQNNHIDEEMLEKAFMKAVELLQEHRADVVVKWQKLEKGTNLLHKHYAKQMYQLLDLEKFDGTIMNKVLDHISISEVGQIIVIFLEGTEVEL

SEQ ID NO: 21133 - protein, 402 aa, synthetic construct
MKQIKTIQAQKVTTIKRLKVAAYTRVSHTSLLQSLSNQVSYYSQMIQANPEWDYVGVYSDSAISGRSQAHRRDFQQLLEDCRKGKVDLIFTKSISRFGRNTVELLETVRELKRLGISVRFEKEKIDTLTAEGELLLTLLASMAQEESQSISQNIRWRVKKRFEDGKPYIPQDIFGYRWNGEEYVIEPHEASIVRQVFEWYMEGLSAPKIAKRLDDRGERTRLGNRFTKRIIYNMFDQEAYCGRLILQKTFRDHFGSRSIPNDGQMAKYIVENAHEAIVTPEYFQQVNQEKKRRARRRVSKHDALAKLQGKVYCEHCGLDMILTLETKSNQEKRVRYYCRTRDAKGVEACLGRTVTEEQLFQAFGESINTEDIHHISFNSVTNEAKATYRNGEEKHVIIQKGR

SEQ ID NO: 21134 - protein, 521 aa, synthetic construct
MKKVITIEPAKQVTHKVDLPSFTKRRVAGYARVSTDHEDQTTSYEAQMTYYTDYINSRSDWEFVKMYSDEGISGTNTKKRLGFQEMVEDALDGKVDLILTKSVSRFARNTVDSLSTVRKLKEAGVEIYFEKENIWTFDSKGELLITIMSSLAQEESRSISENVTWGRRRQLAEGQVTFSYSQVLGFKKSDTGGFEIDQEEAKIVRYIFHQVLLGNNPNKIARELTAQGIPTPQGKRKWSYGTVKRMLRNEKYKGDALLQKSFTTDFLTKSTKPNEGELPQYYVENNHEAIIKREVFDLVQVELDKLEKKRQTNNIFTGRLFCGDCGSAFGSKVWHSTSKYKRTIYQCNAKYKGEHKCQTPHVTEEEIKGWFLSAMNQLLSNREEIVANTELLIDLAKDTSPLENKIDDLEQQLETIRQDIEDLVDRNARKAQNQDLYQEQYDTLVTAYQERQKELQEATSSLEEQKSKQLSLDGFIQQLKQQEDLITDFNQELWQTSVERLDIKEGKKISLTFKNGVRIDL

SEQ ID NO: 21135 - protein, 501 aa, synthetic construct
MKPNIKEVAIYLRKSRDESDGKEDVLAKHESLLLEYAKNYNLKYKIYKEIGSSEYIDSRPKMVRLLSDVSQKLYDAVLVVDLDRLSRGDLEEMGRISRVFRDSKTIVLTPTKTYDFNNEDQALINNFEMVFANHEFRMIRKRMIRGKQQGTKAGKWTNGRPPFPYVYNRLTKELDVDPDKVKVYELMKKMFLEDMKATYEIAWKLNELGFKTNRNSYWYENTVRRILKNEVHLGKVVYGKTSGSGSKKKPNANGVQIKDRSEWIIAEGSHQPLKTEEEHQRILAILESRRYTPKGTRTNVQVLSKLIYCGKCNRVMSFTGKASGKKYVKTCLTTDHFGNRCHNRCLNVEVIYAQLFLDLEDYEQQLINHEPKEKQGDSSTLQLALHNKLEELERLEKGIERIKDLFIDEVIDKLEMKKRIEKQQQLMQTKKEEIRSIEQSLAVIENVRTDDDRLHAIREFKKAWNTKGISKRELNTLAKQLIDRVEYTREGNNIEMKIYFL

SEQ ID NO: 21136 - protein, 507 aa, synthetic construct
MQEQQETSYEAQVNYYTEKINSNPEWVFAGIYADDGKSATMTRKRNDFQAMIDDCMAGKIDMVITKSISRFARNTVDSLTHIRKLKAKNIAVYFEKENINTLGDGGEMLITILSSQAQEESRNLSENVHWGYVRQFENGVVYVNHNKFLGYTKDEEGNLVIVPDEAKLVRRIFRLYLEGNSINKIAETLTKEGIRTVTGNTVWHATVISKMLMNEKYMGDALLQKTYTVDFLEKKRAVNKGIVPQYYIEGNHEAIIPRELFYQVQEERARRANVYRPAKKKGTTIRGKYSSKYVLADIMYCKECGQPYRRQVWVNGGTKKPVWRCYSRLKSGTKKCKHSPSLEEKALHEAIMEAINSVVKDEGEFIDAFRDNVIRILGSYSDNVEPTEYDEKIDALQKQMLALIEDSAKTESADEEFDRAYREITDQIRAFKKKRTELSREKQLAEAYDQRVEGMGQYIQKTNYLKRQFDDELVRRLIKAIMVISEDKIEIQFHSGIVMTQRINEYD

SEQ ID NO: 21137 - protein, 535 aa, synthetic construct
MEKKVVKKIIKIEPVSSGSAANAVEVKRVCAYCRVSTNSADQKNSFEAQVDYYTRLIGEKEGWVLAGIYADEARTGTKLYRRDDFQQMMEDCRQGKIDLILTKSVTRFARNTLDSIKAIRELKALGIGVYFEKERVNTLMEKSEQMITILSSIAQGESESISTNNKWSVVRRFRNGTFIISSPPYGYENNEYGELVIKKEEAEIVRWIFDEYLGGKGSYTIAAELETAGIPTIRGAKEWLDSVVKGILQNCAYEGDLLLQKTYTTDGVPFTRKNNRGELPQYLIADDHEPIITREEAAAIRQIYEYRREQQCVEDTSVYQKRYAFSSRILCGECGTKFRRQKIYIGKPYEKIQWCCYQHIKDSKKCSQKAVREDVIQAAFLRLWNRLASNYEEILIPMLAALKAIQGNPEQDREMQEIEQNIQELKRQGYRLGRVLTEGSISSAIFIERQNQIEAQLEADRRRLRQLQGQKAFEWEISQTEYLISVFRNRPAILEAYDEELFLLLVERITVLPGRRLVFRLKNGLELEENEQEVS

SEQ ID NO: 21138 - protein, 457 aa, synthetic construct
MDKNFLRGACYVRVSTDNQLENYSIEEQTDRLEAYCKAKDIQIVRIYTDGGYSGGNTNRPALQQMIQDIDKGLIDSVIVYKLDRLSRSQKDTLMLIEDCFLAKNVDFVSVNENFDTSTPFGRAMIGILSVFAQLEKDQITERFTMGRIGRAKNGYFHGGGNAPTGYNYIDGNLVINDYEAIQVKELYDRFLKGYTIHNCWQYMQQKYGGWNSEVLVRNVLKNELYIGKVKFKGVTYQGNHQPIISEDVFRQVQDLFNSSRRASNTFKRSPFKASTLLSSLVYCGNCGARFHGEHGNYSCYSRTKGDKKYIVDPNCKNKKWKTEELDKLVVDYITRLDFSKLQNSPPSQVPVADYSLRLSDIDKQIGKLIDLYQVGGIPLEVIQSKMDALSKEKETLLELSRPKDVSKTTLEEMISARDTLIALADSGSLDEKRACITMIIDRIIINETDVNIKLKQL

SEQ ID NO: 21139 - protein, 567 aa, synthetic construct
MKYHNSLKIYGGFNMKKSAIYVRVSTNHQIDKDSLPLQKQDMINYSKYVLGIDNYEIFQDAGYSGKNTDRPDFQEMFKRIKEGEFSHLLVWKIDRISRNLLDFCSMYDDLKKYGCTFISKNEQFDTSSAMGEAMLKIILVFAELERKLTGERVTSVMLDRASKGLWNGAPIPLGYKWDKEIKFPVIDDEEKNTIELIFSEYKENKSTSYIRNLLNSNNIKTKRKGSWTTKTISDIIRNPFYKGTYRYNYREPARGKKKKENEWIVLESNHPYIIPTDLWEECNKIMDENAKRNNAKFRDNSKVHIFSGLVKCGECNNNLYAKQDKANQDGFRPSLYVCKSRYNGLGCTQKTISENIVGTFVLTLISNMINLSNINKKKLSLDLLEHELLKGKCFDNVIGIKEIEDILASLLYAPKNLFTPQNKNEKSNNGAIGLNSLSSNLKKYERALEKLDDLYLFDEADMSKKDYFLKKQKIENNITEIRKKIDETAITDSSYHNYNFILNAATLEFSRKLISEKINMKSLIQDVGRDLIKEFVNILINKIIVKDRQIISLEFKNGLVTTFIYNS

SEQ ID NO: 21140 - protein, 559 aa, synthetic construct
MKTKLYSYIRFSSMRQNDGSSYERQIRMAREVATKYDLELVNDYQDLGVSAFKGANSKTGALSRFLDAIGRSVPVGSWLFIENLDRLSRADIVSAQELFLSIIRRGITIVTGMDNKIYSLDTVTANPMDLMFSILLFIRGNEESQTKRNRTNSSALIKIKAHQENPQNPAVAIEEVGKNMWWTDTTSGYVLPHPVYFPVVQEIVELRKNGRSTAEILDHLNETYTPPPAVSNKKHSKWSRAMVERLFHTRALIGIKEVSVDGVNYELKDYYPRVIDDATFYHLKKNIGARAWNFGEKEEVKPIPLLSGIGLLKCDHCGCAMVKVKGTNKRSDQYRYTCDATRSRRLDCEHPNWSFRGDQLEKAVLQLLADKIWIAEDKANPVPALKVQVDEISRKIDNLIALSAMTGATKELADQITTLNSERETLYNQIKMAEEEMYSVDSQGWEKLAEFDLEDVYNEERLKVRFKIKQALKRIGCSRIDRNKNLFVLEYIDGKTQRVVIENSRGTRKGRIFIDLKTINDRQILESNGLVLHPCLDMLTDKNWKPEEEIPGPLQEFGI

SEQ ID NO: 21141 - protein, 481 aa, synthetic construct
MITTNKVAIYVRVSTTNQVEEGYSIDEQKDKLSSYCDIKDWNVYKVYTDGGFSGSNTDRPALESLIKDAKKRKFDTVLVYKLDRLSRSQKDTLHLIEDVFIKNGIEFLSLQENFDTSTPFGKAMIGLLSVFAQLEREQIKERMQLGKLGRAKSGKSMMWAKTSYGYDYHKETGTVTINPAQALTIKFIFESYLRGRSITKLRDDLNEKYPKHVPWSYRAVRTILDNPVYCGFNQYKGEIYPGNHEPIISKEEYDKTQSELKIRQRTAAENVNPRPFQAKYILSGIAQCGYCGAPLKIMLGVKRKDGSRLKKYECHQRHPRMLRGVTTYNDNKKCDSGFYYKDKLEAYVLKEISKLQDDADYLDKIFSGDNAETIDRESYKKQIEELSKKLSRLNDLYIDDRITLEELQSKSAEFISMRGTLETELENDPALRKNKRKADMRKLLNAEKVFSMDYESQKVLVRRLINKVKVTAEDIVINWKI

SEQ ID NO: 21142 - protein, 478 aa, synthetic construct
MRAAIYARVSTAEQAKEGYSIDAQRSRLIDFVNSQGWEIADIYIDDGFSAKDLNRPKMQRMMHDMTKKHFDVVLVYKLDRLVRSVTDLHNLLQLFDKYEVKFKSATETFETTSAMGRFFITLVGAMAQWERENLAERVKMGMEQKVLKGERNGSYAPFGYQLINGKLIIDQKEAPIVRRMFELYKTKGLNHTARILNKEGLLGRRNKQWATFTVQYVIENPVYCGKIRWNKDSRSEEIITEGSHEKIISEKEFEEIQRVRESRSLLGKRMTSSYPFSSVLRCARCGSNFIGTHRQRKSGALYKYYRCSGRFHHRNCDMPIIAEWKVTEAFLERAKWKIDEQTKRELQVEKEEPVLYSDRDALEEELKVIAKRKKKWQEAFANDAIDVDQLRANMAEEKKKEQRIMELLTEQPQETVEWDEDELLQHLQELRSVWLDIDDYSKKQFVNEIFESISVDTKAQGRTGPRDIGVDIVSFTLR

SEQ ID NO: 21143 - protein, 499 aa, synthetic construct
MELDATLTLKDEGLSAYHQRHVTQGALGVFLRAIEDGRIASGSVLVVEGLDRLSRAEPIQAQAQLAQIVNAGITVVTASDGREYNRAGLKAQPMDLVYSLLVMIRAHEESDTKSKRVKAAIRRQCEGWVAGTFRGLIRNGKDPQWLNWGDQGWELVPERVSAVRRALELYQQGFGAGRAAKMMHQEGFELSSWGISGQQVYRLIKLPALRGAKRLAVDGEAYMLEEYYPRILSETEWAELQHLASQRNRRRGAGEIPGIITGVGLAYCGYCGTALVAQNMMNRRRADGSLADGHRRMQCTSYSKNGGCSASGSCSVVPIERALLNFCSDQLNLQRLLQVGDDGQGIRQQLVVARAAVEKITKQLGKITEALLDDDGGSAPIAFVRKARELEAQQVVAEHKVVQLEYALAAVSGTSQPAQAERWEELAELVGADDYGAREKVRQLVMDTFERIVIYMRGLEPDGRKGQFIDVQLLSRTGQQRLIQIDRRSGEWVSSEDWD

SEQ ID NO: 21144 - protein, 428 aa, synthetic construct
MPPLLDVPLKYCLYARKSTESDERQALSIDSQVKEMLQIAERENLEIVDIRRESKSAKDSGNRPIFKELIKDITEEKFNSIITWAPDRLSRNAGDLGSLVDLMDEKKLMSIRTFGQTFSNSPNEKFLLMILCSQAKLENDNRGINVKRGLRARCEMGLWPTCPPTGYFKEKRVDHKGQCLVDPDRGHVIRQMFEKVAYEKWSGRKIYNWLRFDLKFRTALGKKHLSLGNIYRLLENTFYYGPFEYPRGSGNWYQGKHEPIITKEVFDLVQDQMKNSQLVRRENIEFAFTKVMTCGLCGSGISATEKFKKLKNGGYNRHIYYGCTKAKDKNCKSGYISEEDLIKQLQKQVEKLDFKKLPVQDKIEGEIKRFKKFQMMATGKNQNIDVSDVDVKNYIKFLLKDGDDQEKRELLTCLNGEILLSNKTITIN

SEQ ID NO: 21145 - protein, 506 aa, synthetic construct
MRTVITYLRFSSAIQGAEGADSTRRQNDLFKQWLKKNSDAQVVASFSDEGLSGYKGKHLTGQFGDMLARIESGEFPEGTILLVEAIDRIGRLEHLETEALMNRILGNGIEIHTLQDGLVYTKDALADDLGISIIQRVKSYLAHQESKQKSFRVSEKWKQRAKLALAGKQRLTKMVPGWIDPDTFKLNEHAETVRLIFKLLLSGESLHNIARHLQANNISSFSRRKDANGFSVHSVRTILMSETTIGTLPASQRNDRPAIPNYYEAAIDAATFNKAQEILDKNRKGRTPASDNPLTINIFKGLFRCQCGASVHPTGTKRTYQGVYRCNNHLDGRCDVQPLKRKPFDRWMIDNFLGMIDVGNDGESERKIAALQHEVEIVTARIKKATALLLEMDDIDELKIQIKELNQRRTELQTTIDNMRRKASLTDKELPQLKDIDLTTKAGRVECQLILSKHLKGLTLGKDSVTVTLQNDTEITIPTNPLPLNDGTSIFEIAEKELLEIDAYQL

SEQ ID NO: 21146 - protein, 470 aa, synthetic construct
MYVASYVDNDISASTRSKKRRPDYERMLADAKAGNFEIIAAYTSSRITRRPRENEDLIDLAVDHGIKYKYIRSPEFDLNTADGREMARNAAARDAGETERTSERVERDVRRRAEAGEFHGGLLPFGVDADQVIVKVRGVSKVKYVNFRHHDTDAPRVKDAVRRVLAGESLYGIAKDFGMQRRTLKRALTKPAIAGLREFEGKLLPTPWEKIVEVDDWRRVVEILNDPERGTKEFNQRKYMLSGLVTCINKHPDGSTCGNRMTSSSAKRTEGPTFECSVTKNKTRGCGGTRIVMQPLEDYIAEQVFTRLDSPALRKAIAREREGVDDPTAALRKKILDDEQKLKDLEDEYDDGKLPRQRYQRRRARLTDRLEANTKARDAAIRTHQHTNLPTGSELRAIWDDRDDTWQRGILASVIDRIEIGPHPINPETGRLFSSAPFRLKGETKEAWRQRFDLHRAKVFSLRVSVTWLV

SEQ ID NO: 21147 - protein, 558 aa, synthetic construct
MKGKIALYSRVSTSEQSEHGYSIHEQEQVLIKEVVKNYPGYDYETYIDSGISGKNIEGRPAMKRLLQDVKDNKIEMVLSWKLNRISRSMRDVFNIIHEFKEHGVGYKSISENIDTSNASGEVLVTMFGLIGSIERQTLISNVKLSMNAKARSGEAITGRVLGYKLSLNPLTQKNDLVIDENEANIVREIFDLYLNHNKGLKAITTVLNQKGYRTINQKPFSVYGVKYILNNPVYKGYVRFNNHQNWAVQRRSGKSDENDVILVKGKHEAIISEDVFDQVHEKLASKSFKPGRPIGGDFYLRSLIKCPECGNNMVCRRTYYKTKKSKERTIKRYYICSLFNRSGSSACHSNAINAEVVERVINVHLNRILSQPDVIKQIASNVIEELKQKHSNQTEIKYDIDSLEKQKAKLKTQQERLLELFLDDQMDSEMLKAKQSQMNEQIKMLDKQIKETQQARESQAEVPDFDKLKSRLTMMISRFSIYLREATPEAKNQLMKMLIDSIEITTDKQVKLVRYKIDESLIPQSLKKDWGSFFMPKFQFEIDGRNNYFIDQITTFTT

SEQ ID NO: 21148 - protein, 481 aa, synthetic construct
MIATNKVAIYVRVSTTNQVEEGYSIDEQKDKLSSYCDIKDWNVYKVYTDGGFSGSNTDRPALESLIKDAKKRKFDTVLVYKLDRLSRSQKDTLHLIEDVFIKNGIEFLSLQENFDTSTPFGKAMIGLLSVFAQLEREQIKERMQLGKLGRAKSGKSMMWAKTSYGYDYHKETGTVTINPAQALTIKFIFESYLRGRSITKLRDDLNEKYPKHVPWSYRAVRTILDNPVYCGFNQYKGEIYPGNHEPIISKEEYDKTQSELKIRQRTAAENVNPRPFQAKYILSGIAQCGYCGAPLKIMLGVKRKDGSRLKKYECHQRHPRTLRGVTTYNDNKKCDSGFYYKDKLEAYVLKEISKLQDDADYLDKIFSGDNAETIDRESYKKQIEELSKKLSRLNDLYIDDRITLEELQSKSAEFISMRGTLETELENDPALRKNKRKADMRKLLNAEKVFSMDYENQKVLVRRLINKVKVTAEDIVINWKI

SEQ ID NO: 21149 - protein, 582 aa, synthetic construct
MAKTIYTDNLTASGKVKTYSYLRYSSAAQGEQFGGDSVRRQNDLIQNFLDTHNAEIVKSFEDLGISSFRGKNAKNLKTAEFAKFLQKVENGEIEKGSYLIVEGFDRISRQKGLNTVKIITDILHKHIKIFTLSDKRLYDIEAQNHLEQIIMITVINERAHNESLEKSNRQKAYFSGKRRGFESGKEERLATGVYPAMSKRAPWWLRVDEKGNYQPIPERVAEIKYIVDLMTTKGFGIKRACQLVNSQNSLRVWNRDYITKLIHEDCLFGHHRPFETSHSETTGGVSYKFNGEKFENVFPAVFTEEEILAVRGAFKERLGKRGGKKSQQQNNIFTGLAKCGFCGSPLRQHQLTSRGKKYFYLSCSASQIGTCITATTVTTRYDEFIRNFFKASDHFDFNSLLNNDNESFSNVHLESKKELIVKLEKEERVYSGLQETISNLLESGETLPALYTKKIVEVEAKIKSLKDEKDKLEFKIMSENRKAKDFIKVDTDFIEQLTNDIDLRLKTYSHLHDYIHAIYFRNKKVYFDEVDHFTVIFKNGYVLSFNEHFTKLKEAAPLINEPINLAEHDYTIESYVDSILDV

SEQ ID NO: 21150 - protein, 525 aa, synthetic construct
MMRKVMKIEANGDRFVSSLKLRVAAYCRVSTDNDDQLLSLEAQKQHYEKIIRDNPEWEFAGLYCDEGISGTKKENREGLLRLLRDCEKHKIDFIITKSISRFARNTADCLEIVRRLSELGIFIYFEKENINTHSMDSELLLSVLSSLAENESVSISQNNKWGVKRRFQNGTFKLSSPPYGYIYCNGTIVPHPEEAAVVKRIFAEILTGRGTHAVAEGLNADGINPARGKKWTASAVRGILENEKYVGDSLFQKTYTDDNFIRHYNHGEEEMYYIKDHHEAIISREDFEAAKRILAQRSREKGIEKGTGKYLNRYAFSGRIICGECGSVFKRRIHMANKPGQYVAWCCSKHIASKTKDCSMVYIRDDRIKEAFVLMMNKLYSNHNIILKPLVEAMKEQDASGSYAKIREIDAKIEENAERAQILVSFLTKGYLDPVLFNKQNNELKAETARLREQRAALAASSAGGLSALSEAEALLKYLSKEGGIIEEFDEFLFERFVEGITVFSPAEIGFRMKCGLVLKERIER

SEQ ID NO: 21151 - protein, 496 aa, synthetic construct
MYGYNLKPCLTRRNTLKRMEQITPPPISTSPRVKVAAYARISMETERTPLSLSTQVSYYQQLIHDTPGWTFAGVFADSGISGTTTHRPQFQEMLALAREGAIDLIFTKSISRFARNTVDLLETVRELKDLGVEVRFEKENISSTSADGELMLTLLASFAQAESEQISQNVKWRIWKGFEEGKANGFHLYGYTDSADGTDVQIIDEEAAVVRWIFAQYLKKTSCEKMAAQLIADGRVLHLADNKLPGEWVRHILKNPTYTGDLLLGRWSTPEGRPGRAVRNTGQLPQYLVEDAIPAIIDRDTFTAVQTEIARRRELGARANWSIETVALTSKIKCVSCNCSFVRNVRNRKTQNSISTEHWICTERKKGRKTGCGTCEISDTALKGFIARVLGIDAFDEDVFTERIDHIDVQGKDHYTFHYTDGTSSSHTWRPNLKKSSWTPARKAAWGKLVRARWAEAKRLGLDNPRQAPTPPEALAKYRAVAKAEAERLRAERGER

SEQ ID NO: 21152 - protein, 572 aa, synthetic construct
MTIPVASLYRVSTAKQLKNNEEDSIPLQANVIREFVAQHPEWELVKEYAEEGVSAFKYSKDDRDILQNVLADALMGKFKILLVFKADRLSRKSLEYPIVLWQFHRAGVEVIAVADVPGGKKLELKDQYDKLLRFIEGWQSETESVNTRIRVSHVMRQKAKQGCWTGGRPPYGFRLSESKKGLPLEVDQEEAAVIKEMCRLYLEEGLGSKRIAAALNEQGYRTREGRLWTDTRVRQVLQNPIICGLPAYDRTKPGNTPTSRVRIKGYTDLNNFIIPRDQDGNPKPIPEYSIIPLETWQRLIRKMQENCTSKTQKGGTPNPRAMSSSALLTGFLVCGYCGRGFISSGHNWRKRNGKAYPCQKRVYRCVTHARVGGGEKLCEGQGSYSQRKIDRIFLQELENFLSGLNCEDLLQYVEQKQVDYLAEATNRVKTLEKELSKNRKIYNAWVRRLDDYFADPDGSLYSEQLLAEKVNEYGRIVESLEKELEEVKSQARVEKHRRSQLMEFSMRAPQWFKLFMEAPVETKKQMLAQIISKVVLYRDKIEIHYNVDLAEFLGREEKLEQERFELKVLATF

SEQ ID NO: 21153 - protein, 505 aa, synthetic construct
MKLKKIKVAAYCRVSTDSDAQLESLEAQKTHYENYITSRDDWEFAGLYYDEGITGTKKDKRPELLRLIDDCKAGKVDFIITKSISRFSRNTTDCLELVRKLLALRIPIFFEKENINTGSMESELFLAILSSMAEGESVSISENSKWSIQKRFENGTFKCSYPPYGYDWNGEQMVVNPEQAAVVKEIFTALLSGKGTHAIADDLNQRGVPSKRGGRWTATTIRGMLSNEKYVGDCLFQKTYSDSQFVRHSNHGEQAQYMVRDHHEPIISREDFEAAQAFVKQRASEKGVVKGTEKYQNRYVFSGKIICGECDDTFKRRIHSCTGYKYAAWCCNTHIVDKNRCHMLFVKDEALKLAFITMMNKLIFSHRLILKPYLEAIKNVSTDDSLRRIQQIQTLLTQNTEKRETLTKLMTQGIIDPVLYSQETNELLSQADTFRDEIDALKNTVSGDVTKVTEATALMHFAEKSAMLHEFDVDLFERFVKRIIVHSRNDIRFELKCGLTLRERK

SEQ ID NO: 21154 - protein, 530 aa, synthetic construct
MTYQEGGERMKKITKIEGNMNNSFIKAKTRVVAYCRVSTDSNEQLVSLQAQKAHYETYIKANPEWEYAGLYYDEGISGTKKENRSDLLRMLSDCETGRIDLIITKSISRFARNTTDCLEMVRKLLGFGVHIYFEKENINTGSMESELMLSILSGLAESESISISENTKWAIQRRFQNGTFKISYPPYGYQNIDGQMIVIPKQAEIVKYIFAEVLSGKGTQKIADDLNQKGIPSKRGGRWTSTTIRGILTNEKYTGDVILQKTYTDSHFNRHTNYGEKNMYLVENHHEAIISHEDFEAVDAVLNQRAKEKGIEKRNSKYLNRYSFSSKIICSECGSTFKRRIHSSGSRKYIAWCCSKHISNITECSMQFIRDEDIKTAFVTMMNKLIFGQKFILRPLWQGLRNQNNAASFRRIEELETKIENNMEQSQVLTGLMAKGYLEPALFNKEKNSLETERERLLAEKDQLTRSINGNFAKVDEVDRLLKFATKSKMLTAYEDKLFEDYVEKIIVFSREEVGFELKCGITLRERLVN

SEQ ID NO: 21155 - protein, 530 aa, synthetic construct
MTYQEGGERMKKITKIESNKTNSFIKPKLRVAAYCRVSTDSDEQLVSLQAQKTHYETYIKANPEWEYVGLYYDEGISGTKKEKRSELLRMISDCENKKIDLIITKSISRFARNTTDCLEMVRKLVDIGVFIYFEKENINTQSMESELMLSILSGLAESESISISENNKWAIQRRFQNGTFKISYPPFGYENIDGQMIVNPKQAEIVKYIFEEALSGKGTQKIADDLNHKGIPSKKGGRWTATTIRGILANEKYTGDVILQKTYTDSRFNRRTNYGEKNMYLVENHHEAIITHEDFEAVDAVINQRAKEKGIVKRTSKYLNRYPFSGKIICSECGSTFKRRIHSSGARKYIAWCCSKHIRQITECSMQFIRDDDIKTAFVTMMNKLVFGQKFIIRPLLDGLRKQNSPESFRRIEELEAKIESNSEQSQMLTGLMTKGYLEPALFNKEKNSLAAEGARLLAEKEQLTHSTNDNLAKVEEVNRLLKFVAKSKMLTAYKDELFENYVEKIIVYSREEIGFELKCGITLRERLVN

SEQ ID NO: 21156 - protein, 516 aa, synthetic construct
MFLLENYCIYLRKSRADEEIEKTLGEGETLAKHRKTLLEFSKKMQFNIVKIHEELVSGESLLYRPAMLELLKEVEQGLYAGVIVMDQQRLGRGDMEEQGIILKTFKKANTKIITPDKTYDLNNEFDEEYSEFEAFMSRKEYKMINKRLQRGVIRSVHEGNYLPARPPYGYLIKEDKFSRTLVQHPEQSHIIKLIFDWYVNDKVGFNTIANNLNSMGLKTLRNQAWTTGAVSYIIKNPVYIGKISWKKVITSRSTTPGKLKKTRTRPESDWIVVDGKHEALIDADTFEKAQIINKSKYIPPVKPSNKLSNCLAGLVVCGVCGYKMKYRPYPNVDAHLICERKCGNKSSKYKYIEARIIKLLDEYADQISANLDMDSNKDREKSISALTYNLSVLEKEMKDLGVQRERLHDLLEQGVYDIDTFLERSKNIADRLLSTNEAIKQTQEKIKLEIEKSNIEVNMLDKIKNIVAAYYDIDDPVKKNTLLKEVLEKAVYTKVKGQREDNFSLEIYPNYNTSLI

SEQ ID NO: 21157 - protein, 510 aa, synthetic construct
MIKTCIYLRKSRSDEECEKQGEFETLSRHRSTLLKLAKEQNLDIIEIKEELVSGESISYRPKMIELLDEVKNGLYDSVLVMDIDRLGRGNMQDQGLILETFKKSNTKIITPRKTYDLNNEWDEEYSEFEAFMARKELKLINRRMQRGRVKSVEEGKFIASKPPYGYKFIFDESGKKSMIIDNDKAEVIKMIFDLYVNKHYGGVKISSHLNSLGLKTSTGRTWYPKVVRDILKNKTYAGYVVWNKVDRGKNNSRTRPVDEHIEAKGIHEPIIDESIFIEAQNLFKNSSIPSTKKNTSITNPLAGLIICSECGHKMIAQQSTYKNNELVKFLKCLNCGKNRGSKLSIVEKEIINELENWIASYQVSIKNLESPKNNNSNLESYYSIIKSLDCEYKTLLKQKENLHNLLEQDIYDVDTYLDRSKVLADKIDLNRDNLTQAKKDLKKEKESNFSISDILPQVENVLELYYQSNNMQERNDLLKEVIDYIEYSRESKKRLSKFNIKIYPRLRYNK

SEQ ID NO: 21158 - protein, 530 aa, synthetic construct
MIAAIYSRKSKFTGKGESIENQIQLCMDYAKNLGINEFLVYEDEGFSGKSMDRPKFKEMLKDAKDKKFDYLICYRLDRISRNISDFSTLIEDLNKLNISFVSIKEQFDTSTPMGRAMMYISSVFAQLERETIAERVRDNMYELARTGRWLGGMPPYGFISTQINYYDENMNQRKMYKLKVDEDTIEIVKLIFDKYLELRSLSKLYKYMYENGIKGTRGGNLDPSALSLILKNPAYVKADKSVVDYLRKSNIDVMGDIDNIHGILTYAKNTDSPIAAVAKHKGVIDSDKWIEAQRLLNANKAKAPRAGTGSKALLSGLLKCSKCGSNMRITYKNSKSGTIYYYICGTKKSLGVSACDCRNIRSDKAESKVIDELKNKSIKSIMSSYKDSKLENSKNIKNIKTEINSINSQIKEKETYIDNLVMQLAKVTESSASTFIINKLESLNNDLSNLKSQLESLNTISMENKQVDININMLIDNLNKFNKEIDNSDINKKRLLLSTVVDYMTWDSDTDTIKVNLIGINPSNTIASGK

SEQ ID NO: 21159 - protein, 539 aa, synthetic construct
MAKIGARVYSYLRFSDPRQGSGGSADRQLLYAQRWAADKGLELDESLSMRDEGLSAYHQRHITQGALGVFLRAIEDGRIASGSVLVVEGLDRLSRAEPIQAQAQLAQIINAGITVVTASDGKEYNRAGLKAQPMDLVYSLLVMIRAHEESDTKSKRVKASILRLCQAWQSGTYRGLIRNGKDPQWLRWTGSAWEMIPERVLAVRRALALYQEGMGAARATKILHAEGLDYSASGISKQQIYRLIKLQALRGAKCLSVDGEDFILEDYYPRLLAESEWADLQHLAGQRLRRRGHGEIPGIITGIGLTYCGYCGTALVGQNMMTRQRADGTIADGHRRLHCVSYGVNGGCTAGGSCSVVPVERALLTFCSDQLNLQRLLKVGDDGQGIREQLAVARSTVEKLSVQLGRITAALLADDSGAAPTAFIRRARELEAEQADAHKKVQQLEYELATVSGSGKPAQAERWVELADLVRSGDYSAREKVRQLVMDTFERIVVFMRGMSAEDRSGKFIDVQLLSRTGQQRLLQINRRTGAWVASEDWD

SEQ ID NO: 21160 - protein, 475 aa, synthetic construct
MKTTNKVAIYVRVSTTSQVEEGYSIDEQKDKLEAYCKIKDWKIYDVYVDGGFSGANTQRPELERLISDVKRKKVDIVLVYKLDRLSRSQKDTLFLIEDVFAKNDVAFISLQENFDTSTPFGKASIGMLSVFAQLEREQIKERMILGKEGRAKNGKSMSWTTIPFGYDYSKETGVLSVNPTQALIVNRIFTEYLNGKPVVKIIRDLNAEGHVGRKRPWGETITKYLLKNETYLGKVKYKDKVYEGQHEPIITQELFDLVQLEVERRQISAYEKYNNPRPFRAKYMLSGLMKCGYCGASLGLRYTRKDKNGISHHKYQCRNRHSKDLEKRCESGWYSKEELERGVIKELERIKFDPKYKNETLAKKEETIKVEEIKKQLERINNQVSKLTELYLDEIITRKELDEKNDKIKTERQFLEEQLENQKSNVLSIRKRKLTRLLKDFDVEKLSYEDASKIVKNIIKEIIVTKDGMSITLDF

SEQ ID NO: 21161 - protein, 624 aa, synthetic construct
MTEVDVYVRVSSEDQQERETIENQIEFATKYCDLHKLTIREWYKDDGITGTIPLQDRPDGKRLIENAQAGKVKLLLIFNMKRLGRKARVTLDAVYQLEQYGVMIRSMTEPFDTGTPVGRFIITVLAGQAELDRDTTLEIMWHGANRAARKGKWLGGIVPYGYRVNSEGYLEVSEELIPGREDMTEASVIRLIYFLISEQKYSTIKIADYLNALSIPPAYVKDGRKVKRGKRKEKTAGVWTPGRVRNIIISTTYKGLHIYGKRTKKKRELIERKVPAIVTEEIWNTSQQFLRDNQLEALKNAKRQYLLRGLIKCGACGLTYHGTAYKNKSYYVCGGKTAYKGPLQGKCTAKNIPAEWIENLAWSECLSFINNPGEALHELAKGVENKKSMKDAYQSEKQKVVKSLNDKDSEKQDILGLFRKRIISAVDVESQLQQIANEKSMLEIRLTELDQLIKSENNISRTFDTAETLLLDLREKIRNGEPSFEIKREIVRVLVKEIIVHTLLSEEGNRKTARVNARYTFNKSKVVNRTVVRAGIGGRRAISKAAYAVRLKYRIIARKFPGRSWTGSICTSKCRESSIRTYAGRSSLCRLPKCAPPWSGRMKSKSAVTLSQASCLIASLTAKS

SEQ ID NO: 21162 - protein, 531 aa, synthetic construct
MRIPVLYIRVSSSKQVQDGGGLDDQLSAGESYIKSIPDLDYGRIQILRDEGISSFKGGNLEEGMPLREFVEQRLTKKDGDNYALIVYSVDRISRMNPWASSQFIGQTIMSGVHIHDISSRQILRQDDHIGSIISTLNLMRANSESALKSKRRLDSIESSIAESLKTGEALKGKLPKWLYIEDKKYKVKEDLAKTISDAVDMYIGGHTSGEIVKKLNESGRLYGDKEWSGPFLIKLIKSPTIMGTYTRIKDGVPLSYHNFYPAIVSNEKFEKVNALIKSVGAHITKHRVDKGRVSNLFSGFFLCAECGGVININRHSTIVKYFTCSNNYRRKLCTAKKGNYLSVERAVLEHIKGLDLSSLLTNSVDTSEIDLEITQVRNNIHSLEESISRRKKDGKLIPVEIFEALADSREKLSNLKESLPQVPLVDNISIGYVDSILDDVHPSRGLIHRGISDIVKNIKVYRVGQFIILSISYERIPDVHVIIIDNSSGKVLSAVSQTDKIVELYGIEDYKSIVGDFIDKLPNNYLRFNRK

SEQ ID NO: 21163 - protein, 507 aa, synthetic construct
MKRVISYIRFSSEKQAKGDSLRRQSKMVTDWLKAHPEYYLDQDLSFRDLGVSGFTGKHLKGGLGDFLTAIEKGLVKAGDTLLIESLDRLSRQDVDQASELLRNILRSGVDVVTLSDGEHYTRESLKDPLALIKSILIMQRAHEESLRKAERIQAAWDAKKEAAKAGIKISRRCPAWLRLNDDRKTFSVIPEKVATVKRCFQLRLEGKSIWEIVRTLNAEGHQTLNQYKAGKFGQTSVQDLLKNRSVIGYFTPKGCEEISSYYPSVIDETTFYKVQQLSHYRYGRKPVSAKPLSVNLFKGVIRCSECGHALIITGFSDTRNGIYRCPLRNENRCSAKGLSRKQTDGTLLTLLSRLDRFDSDMTNTIDTLKLHREHISSNIEKLVQLSLEIEDLSAITIKLKQLKGELSQVDADIEKETQRLKSIDVGCLSDCDLTTKAGRIEAQLIIKSAVKEVVLNTAKRRCKVTFHNGKSITLPITETPSEDVTEAIQSLSEVTEMGLIDVDEVII

SEQ ID NO: 21164 - protein, 506 aa, synthetic construct
MRSVITYLRFSSATQGAEGADSTRRQNELFKQWLRKNSDAQVVASFNDEGLSGYKGKHLSGQFGDMLSRIESGEFPEGTILLVEAIDRIGRLEHLETEALMNRIIAHGIEIHTLQDGLIYTRDALSDDLGISIIQRVKSYIAHQESKQKSFRVSQKWEQRAKLALAGEQRLTRNVPGWIDPDTFKCNEHAETVRLIFKLLLSGESLHHIARHLQANNISSFSRRKDANGFSVHSVRTILRSETTIGTLPASQRNDRPAIPNYYEAAIDASTFNKAQEILGKNRIGRTPASDNPLTINIFKGLFRCQCGASVHPTGTKNKYQGVYRCNNHLDGRCDVPPLKRKPFDRWMIDNFLGMIDVVSDGETERRIAALQHEVETLTARIKKATALLLEMDDITELKAQAKELNQKRTELQTTIDSMRRKTSLSDKGLPQLKDIDLTTKAGRVECQLILSKHLKGLTLGKDSVTVTLQNDTEITIPTNPLPLNDGSPIFEIADKELLDIDAYQL

SEQ ID NO: 21165 - protein, 536 aa, synthetic construct
MTFDDQIITDAVIYCRVSSRAQEADGHGLESQETRCRQHADAKGYKVAAVFPDTITGGIDFMERPGMVALLSFLDAQPDKRFVVIFDDLKRFARDTRFHLDLRDAFRDRGAKIECLNFKLDESPEGEFIETIIAAQGALERKQNGRQVAQKMRARMENGYWIHNPPVGYEYTTVKGRGKLLVPKEPLATIVRDSFEGLASGRFQSQAEVKRFFESFPDFPRNKNNEITQQRVTDVLKQPLYTGYICSETYNLNWLKAQHEPLISLETFDKVQELREGASKLPARKNIGDEFALRGFVLCGDCGKPYRSSWAKGATKRYPYYLCQTKTCPSYGKSIPRNKLEGEFAAIIRTLQPSQQLFDLVTHMFRDIWNERSALLEDAIKSGQRRLRESDRQIETLLDRIMDATNPTVIKAYEDKIAVLERDKLKLREQLQTKAPEKGTFDKMLELSLKFLANPYNLWETGNITLKRTVLRLAFSERFTYHRFEGARTPQISLPFKTLAGIHGGEIKNGAADRTRTYDPIITNDVLYHLSYSGVS

SEQ ID NO: 21166 - protein, 481 aa, synthetic construct
MKTMNKVAIYVRVSTTSQVEEGYSIDEQKAKLSSYCDIKDWSVYKIYTDGGFSGSNTDRPALEGLIKDAKKRKFDTVLVYKLDRLSRSQKDTLYLIEDIFIKNNIAFLSLQENFDTSTPFGKAMIGLLSVFAQLEREQIKERMQLGKLGRAKSGKSMMWAKTSYGYDYHKETGTVTINPAQALTIKFIFESYLRGRSITKLRDDLNEKYPKHVPWSYRAVRTILDNPVYCGFNQYKGEIYPGNHEPIISKEEYDKTQSELKIRQRTAAENVNPRPFQAKYILSGIAQCGYCGAPLKIMLGVKRKDGSRLKKYECHQRHPRTLRGVTTYNDNKKCDSGFYYKDKLEAYVLKEISKLQDDADYLDKIFSGDNAETIDRESYKKQIEELSKKLSRLNDLYIDDRITLEELQSKSAEFISMRGTLETELENDPALRKNKRKADMRKLLNAEKVFSMDYEKQKVLVRGLINKVQVTAEDIVIKWKI

SEQ ID NO: 21167 - protein, 506 aa, synthetic construct
MGREERTKDKSVAYSYIRLSSKQQIKGDGARRQIEAAEQYCKQNNLVLSSKTFRDLGISAYKEVDRPSLSDLHQCIANGMIKAGDVVILEKLDRLSRQGIAKTQAMLQEILSQGVVVVSLMDGLTLDRDSLNDLTLVIRIAIASDIAHKESQAKSLRIQANKDAAKAKAKQGIAIPRKLPFWLSLIDGKYELNNRLSVLQTIIDHKRLGASLAKIAGALNNANIPTANQGGIWNPSTLRDVIANPALYGAHQVRTKVQGKYQPNEIITDYYPAVISFSEYTELNSKAVQRPAGASETNHISGLVYCDHCGKKMAAKSRKNKTGKVTYYYCRYALLKTCEHQAHVRDLHKHIISNADRLEIQQSIKEDKRANEILIELSQIDTRIQELSGSLANMSSVVATSAIISALSSLEGQKKALIAEQKQSVPIAADAVKTLLTLVDDPKQFNIQLKKIVNEIRVSQSGKGHIVKVKRHDGHKIVFHTNGIMGSSDTKQISAELQELLADVDV

SEQ ID NO: 21168 - protein, 508 aa, synthetic construct
MKKAIAYMRFSSPGQMSGDSLNRQRRLIAEWLKVNSDYYLDTITYEDLGLSAFKGKHAQSGAFSEFLDAIEHGYILPGTTLLVESLDRLSREKVGEAIERLKLILNHGIDVITLCDNTVYNIDSLNEPYSLIKAILIAQRANEESEIKSSRVKLSWKKKRQDALESGTIMTASCPRWLSLDDKRTAFVPDPDRVKTIELIFKLRMERRSLNAIAKYLNDHAVKNFSGKESAWGPSVIEKLLANKALIGICVPSYRARGKGISEIAGYYPRVISDDLFYAVQEIRLVPFGISNSSKNPMLINLLRTVMKCEACGNTMIVHAASGSLHGYYVCPMRRLHRCDRPSIKRDLVDYNIINELLFNCSKIQPVENKKDANETLELKIIELQMKINNLIVALSVAPEVTAIAEKIRLLDKELRRASVSLKTLKSKGVNSFSDFYAIDLTSKNGRELCRTLAYKTFEKIIINTDNKTCDIYFMNGIVFKHYPLMKVISAQQAISALKYMVDGEIYF

SEQ ID NO: 21169 - protein, 570 aa, synthetic construct
MSGISGTPGSAFVPSRPEPAPGLALAVSYLRVSTKEQAEKGGTDEGFSIPAQREANLRKADQLSATIVEEFVDAGESARKADRPELMRMIQYVKTHKITYCIVHKVDRLARNRADDVTIHMALQEAGVMLVSATENIDETPSGMLLHGIMSTIAEFYSRNLATEVVKGMSQKAANGGTVGKAPMGYLNILTRDELGREMRTVEIDPMRAPLVEWAFKAYASGSWTLSQLHEELENRGLVTVPSPRRPAKPPVLSAIHRMLTNPYYKGDVIYRGVQYKGAHEPLVPAEVWYQVQSVLIANRNSGEATQTHSHYLKGTIYCGECGSRLIVNNAKNRYNDVYPYFVCAGRHSKRTDCTRQAILIEDVERMIEDYYERVQITPAHRDTLAGMLHHELDLMMAGEAHELDQLTKNRDRIIAHQDKLLQAFYADAITLAQLKREQQSLSSELYQVEQRLNSHHGEYSEARENLDDSLDLLENCAEIYRRCDDANRRLCNQAFFTKIFIDEDNTLHVENERPYEVLLDPEVSANALNWAAGAGEARTVPFVEMGQSSNLATWVPQRGIESIPPEQQG

SEQ ID NO: 21170 - protein, 481 aa, synthetic construct
MKTTNKVAIYVRVSTTSQVEEGYSIDEQKAKLSSYCDIKDWNVYKVYTDGGFSGSNTDRPALEGLIKDAKKRKFDTVLVYKLDRLSRSQKDTLYLIEDIFIKNNIAFLSLQENFDTSTPFGKAMIGLLSVFAQLEREQIKERMQLGKIGRAKAGKSMMWARTSYGYDYHRETGTITINPAQALAVKFIFESYLRGRSITKLRDDLNEKYPKHVPWSYRSVRAILDNPVYCGFNQFKGEVYPGNHEPIITEEVYNKTKEELKIRQRTAAENVNPRPFQAKYILSGIAQCGYCGAPLKILMGVVRKDGTRFIRYECHQRHPRKTKGVTVYNNNEKCDSGFYEKDDIENYVLTEISKLQDDAGYLDKIFSDDNAETLDRESYKKQIEELSKKLSRLNDLYIDDRITLEELQNKSAEFISMRATLETELENDPALGKDKRKADMRELLNAEKVFSMDYESQKVLVRGLINKVRVTAEDIVIKWKI

SEQ ID NO: 21171 - protein, 481 aa, synthetic construct
MNKKVKAGIYIRVSTEEQKQGHSLEAQESMLKEFADRKGYEIYDVYNDGGYSGKNFNRPEIQRLLRDLKDDKIDVILVWKVDRLSRNNTDVMSLIDTELTPRKKNLIITSIDMDSSSPTGHMFISLLSTFARYERATIIDRVKAGMQKRAEKGYWNGGLILGYDSVDKKLIINENESEIVREIFQLRAEGKGYKFIVNILNDKGIKTKTGKNFSIPAIKVIVNNYIYNGKMVWKKHQDWNTRRRTGKSEPIIVEGIHDAIIDEGLWTRVQKVNELQKNSFSSNRNFNGNFLLTGILKCPKCGAGTVMSKTKKRNSDDYHLYYMCQAYHNKGSSVCSANLIRKDQVEQQVLNIISLLVNENDIINALIDELNSDNNKTNESHIAHIKNVKKNNLAKHMTNVKKLDNDYFEGNIEGSTYNRLMNELQLDINKLKRNVRESESEIIKNDSTINKEEVIYALGNFNKLFKIVNDEEKKVTYKVFN

SEQ ID NO: 21172 - protein, 481 aa, synthetic construct
MIATNKVAIYVRVSTTNQVEEGYSIDEQKDKLSSYCDIKDWNVYKVYTDGGFSGSNTDRPALESLIKDAKKRKFDTVLVYKLDRLSRSQKDTLHLIEDVFIKNEIEFLSLQENFDTSTPFGKAMIGLLSVFAQLEREQIKERIQLGKLGRAKSGKSMMWAKTSYGYDYHKETGTVTINPAQALTIKFIFESYLRGRSITKLRDDLNEKYPKHVPWSYRAVRTILDNPVYCGFNQYKGEIYPGNHEPIISKEEYDKTQSELKIRQRTAAENVNPRPFQAKYILSGIAQCGYCGAPLKIMLGVKRKDGSRLKKYECHQRHPRTLRGVTTYNDNKKCDSGFYYKDKLEASVLKEISKLQDDADYLDKIFSGDNAETIDRESYKKQIEELSKKLSRLNDLYIDDRITLEELQSKSAEFISMRGTLETELENDPALRKNKRKADMRKLLNAEKVFSMDYESQKVLVRRLINKVKVTAEDIVINWKI

SEQ ID NO: 21173 - protein, 492 aa, synthetic construct
MKQQAKRALVVVRLSRVTDETTSPLRQREACFELCEQRGYEVIGTAEDLDISAGKTSPFDRPQLGDWLTNRRGEFDVLVTFRMDRIVRRLLDLADLIRWCQSNSVSLVSATETFLDLDSAFGDIIALLVAKVAEMELAAISERNRSAAQHNMRQGKYRGGPPPWGYMPEKVDGDWRFVHDDEQVKVINEVVRRVLDGEPLRQVAADLTDRAVLTPRDRVNQLKGREIRGYSWHSAKIREMLTSKSLLGHAVTANGSIRNDDGSPIIRATPILERDVFEQVQVELAGRENRKEPTKRSSSLLLRVLYCGVCGKPAYKLKGGKGRQDRYRCASAQYKSTCGNGMVLVADANEVLTDAVMFELGDKYRRDRVWDAGSDYAAELAEIDDTLADLTDQLGTGAFRKGTRQRERLDARIADLAERQAQLAAQATRPAGWTWVPTTELFKDWWKSQTVEQLNLWLRSMDIQMWWNHQGIQTDMLHLERMAEQWSNPAIG

SEQ ID NO: 21174 - protein, 413 aa, synthetic construct
MAVRLIKTKSNRKKQRVCAYTRVSTTNSSQLDSLENQKAYFENLYTNRVDVDFLGVYYDKGISGSKAERPSFQAMLEACRQGQIDLIHTKSISRFARNTMTVLEVSRELKVLGVGIYFEEQNINTLSNEGEVMLSVLASLAEEELQSMSDNQRWAFQRKFQRGEMVINTKRFMGYDVDDKGELVINEAEAQIVRRIFQLYLDGMGMHRIAKLLNQENVPTVTDAKWHDTTVRNILKNEKYKGTVLLQKYFHVGINGPKRLNQGQVEQYLIEDNHEPIVSKEVWQAVQDKLASKTWKQGVNKHYRFTSMLKCEYCGSTLKRQVTYKKQIVWCCSKYIKEGKASCRGMRVPEKAIEEWKLKTPVTVIERNEYGQKHYSYSSQESAADGHPSASNQNKSGSLLSGVHRPRRTAIKL

SEQ ID NO: 21175 - protein, 603 aa, synthetic construct
MEVEIIKANNPFDESSKVRKVDRLRVAAYCRVSTDDEDQIKSYNSMVKHYTELIQNNEQWVFAGVYADKAITGTKVDKREDFQRLIQDCMDGKIDMVIAKSLPRFARNTLDTLKYVRMLKERKIAVYFEVEKINTLKDGEFLMTILSSVAQQEVENTSAYVKKGLKMKMKRGELVGFQGCLGYDYDVATKSISINEEGAEVVRYIFDRYVAGAGSSMIARELNEQGITTIRGNSWTSSSVMGIINNEKYKGDILLGKTFTVDPISKRRLENLGEEDRFYIKDHHEPIISAETFARAQEIRERRNGGRKSVTPGKREKYSRQYAFSCLLECGFCGANLSRRRWHSSSKYKKTIWQCVKSTKDGKRFCPDSKGIPEQVIEEAFIESYKMLCADNKDVLEEFISRVEKTLSEDSIRDKLIKLQKSADNLQAKRKRLLENYLEGIVAQDIYEETDVGYERKLSDIKANLKILEQQMDDEFSLKQRVADFKKALSKNGVLEEFDRGIFESIIEKVIVGGYDEDGNKDPYKITFIYKTGFKNEIGKAKERFDKSKSVSDKAKELCSHIVDEVKGVCSYVSDNTCGDGSLDVKEREIRARKRRISGLFAR

SEQ ID NO: 21176 - protein, 522 aa, synthetic construct
MGNVMLIPARRQVGSNARKKEEEKPKLRVAAYCRVSTDSDEQSTSYEAQVEHYTEYIQKNPDWEFTGIYADDGISGTNTKKREEFNRMIDDCKAGKIDMIITKSISRFARNTLDCLKYIRELKDMNIPVIFEKESINTMDAKGEILITIMASLAQQESQSLSQNVKMGIQFRYQQGKVQINHNRFLGYTKDADGNLVIDPEQAEIVKRIYREYLEDLSMDKIAAGLERDGILTGAGKAKWHTSTINKILRNEKYIGDALLQKTYTTDFLNKTRVKNTGLMPQYYVEGNHEAIIPKEIYLQVQEELVRRRVVKTSANGKKRSYSCNHCFSQIIICGECGEMFRRLHWNNRGVKSIVWRCISRLESTGLECHARTINELVLQDAVVKAINQMLGDKSSYQAQLQLNIASVIQASQATSVENIDEKLMALQQELIQKAQSKEAYDEIADEIFRLRELRQQTTVDTAARDEQIKRINDLQDYISQQTAHLTEFDESLVRRWVKQITIWNDRITVELKSGVSIDVDA

SEQ ID NO: 21177 - protein, 521 aa, synthetic construct
MKKVTKIEGVQNNSTTKKKLRVAAYCRVSTGSDAQLESLEAQKTHYERYINSREDWQFAGLYFDEGITGTKAEKRLELLRLISDCEAKKIDFVITKSISRFSRNTTDCLALVRKLQSLDIPLFFEKENINTGSMESELFLAILSSMAEGESTSISENSKWSIKRRFQNGTFKLSYTPYGYDWDGENMVVNPEQAEIVKRIFADVLSGKGTQAIADELNADDIASKKNSKWTATTIRAILANEKYTGDVIFQKTYTDENFNRHINYGEVDQYMAPDHHEAIISHKDFDAANALVAQRASEKGIEKGNGKYQQRYAFSGKIICGECGDTFKRRIHPCTTYKYVAWTCNTHLKDTTACSMKYIRDDDIKSAFVTMLNKLIYGHRLILAPYLKALENSSGDEAIQRIQHLELLLAQNSEQRETLTKLMAQGYIDQILYNQETNALLLQAETYRSDIEAITICMTGDSAKVTETNLLLHFVSHADMLTAYSEELFESYADHIEVVSRHEIRFVMKCGLTFTERIGD

SEQ ID NO: 21178 - protein, 446 aa, synthetic construct
MTKKVTTIPATITKFSQTPINRVTKRRVAAYARVSTEQEEQQTSYEAQIDYYTNYISGREDWEFAGMYSDEGISATNTKKRVGFQTMVTDALDGKIDLIVTKSVSRFARNTVDSLTTVRQLKEKGVEIYFEKENIWTLDSKGELLITIMSSLAQEESRSISENVVWGQRKRFADGKVTVPFKRFLGYDMGEDRNLVVNPEQAKLVKRIYGMFLQGKAPHTIAKILTEEPETLTPAGKQKWNPSTIKSILTNEKYKGDALLQKSYTVDFLTKEKKANEGEIPQYYVKGNHEAIIQPEIFDMVQKQMALRTKGNNRRRSTSIFSSKLICGDCGNFYGSKVWHSNTKYRRTVWRCNHKYGNDEKCQTPHLTEDEIKEIFIKATNQLVDMKDEVISNYDEMKEMLFGTVDLESEQGKLEDELNEVASLIEDCINENARVALDQSEYEQTV

SEQ ID NO: 21179 - protein, 520 aa, synthetic construct
MKRITKIAENASLGKKKIRVAAYCRVSTASEEQLVSLAAQKAHYENYIKSNDNWEFAGLYYDEGISGTKKEKRDGLLAMVAACERGMIDFVITKSISRFARNTTDCLELVRKLLDLNIYIYFEKENINTGSMESELMLSILSGLAESESVSISENEKWGIRRRFQNGTFIISYPPYGYANVDGEMMIVPEQAEIVKQIFADTLAGKSTHEIAKRLNEQGVVTKKGGRWTPGTINGIIGNEKYTGDVLFQKTYTDNSFNRHQNRGEVDQYLMQNHHEAIISREEFERANAVLKQRGREKGNGHDTGRYQNRYGFSGRIYCGECGGKYKRRLHYKPSGQYAAWTCVTHLEDKKSCSQKYITDAALQLAFVTMMNKLVFGQQTVLRPLLQSLRGLNDQSRLLKIEELETAIEKNRDQKQVLTNLMASGYLEPALFNKESNELAAEEDTLRQEKDGLMRSVNGDMVKIEELQRLLRFVSKGTMLTEFDDKTFLSFAERITILSRKEVVFELKCGLSLRERLVEP

SEQ ID NO: 21180 - protein, 559 aa, synthetic construct
MKTKLYSYIRFSSMRQNDGSSYERQIRMAREIAAKYDLELVNDYQDLGVSAFKGANSKTGALSRFLDAIGRSVPVGSWLFIENLDRLSRADIVSAQELFLSIIRRGITIVTGMDNKIYSLDTVTANPMDLMFSILLFIRGNEESQTKRNRTNSSALIKIKAHQENPQNPAVAIEEVGKNMWWTDTTSGYVLPHPVYFPVVQEIVELRKNGRSTAEILDHLNETYTPPPAVSNKKHSKWSRAMVERLFHTRALIGIKEVSVDGVNYELKDYYPRVIDDATFYHLKKNIGARAWNFGDKEEAKPIPLLSGIGLLKCDHCGCAMVKVKGTNKRSDQYRYTCDATRSRRLDCEHPNWSFRGDQLEKAVLQLLADKIWIAEDKANPVPALKVQVDEISRKIDNLIALSAMTGATKELADQITTLNSERETLYNQIKMAEEEMYSVDSQGWEKLAEFDLEDVYNEERLKVRFKIKQALKRIGCSRIDRNKNLFVLEYIDGKTQRVVIENSRGTRKGRIFIDLKTINDRQILESNGLVLHPCLDMLTDKNWKPEEEIPGPLQEFGI

SEQ ID NO: 21181 - protein, 537 aa, synthetic construct
MKAAIYARFSSDKQTDRSIEDQVALCRAICEREGLIVVAVYDDRAISGASTLNRLGWQRLMRDAKAGKFDVLVAEALDRISRDQEDLAGIHKRLRFAGIEIRTAQDGIAGDIHIGVKGLLGSLYLKDLAQKTRRGQAGVIRDGRHNGGRSYGYRPIPGKRGELEIDEAEAATVRQIFADYLDARSPRDIAAALNKKGVPGPRGGVWNASTIAGSRKRLNGILQNELYVGRIVWNRQTFIKDPETGKRISRENPREQWMSADAEHLRIIDADTWVRVRKRREDRGGPKGAYATRPKHLLSGLVKCGCCGSGYIVGGNDKRGSLLVCTRMKETGLCENRRTVPREKIEALVLKGIEENLAAPELIAEYVREYHRMSRELHSSTAHRHRDLEKRLGNVNGAISKAVDVLLAEAPSRALRDRLAALEAERDEIEAEIAALAPPAVEFHPNAANAYRDKVRHLKRALAESDEDSRAAAHEAIREIVEKVVIHPRGPYKPVEIEIYGQLAALLRISERAAADPLESRGVLVAGIGFEPMTFRL

SEQ ID NO: 21182 - protein, 689 aa, synthetic construct
MKITPDHLARGAFIYIRQSTVDQLANNHESRRRQYGLADRARALGWTDVTVIDDDLGRSGSGVSRPGFERLLAAICEGRVGAVFAIEASRLARNGRDWHTLIEFCGLVGTVIVDEDGTYEPRHPNDRLLLGMKGTMSELELSLLRARSMEALKQKARRGELFFSVAVGYVKVGRDKIEMDPDLRVREAIGLVFTRFAEMQSIRQVFLSLRGDQIALPYIDPKVSGQHHVLWKLPVYTTVSNLLTNPVYAGAYAFGRTGSRMTIENGRKRIVRGRRKDRSDWAVLLVDHHEGYLSWADFERNQRLIADNANGKGMMVRGPVRKGEALLTGLLRCGHCGRRLLVSYNGTKGDVGRYNCDATRSNPGAAPCISFGALRVDEAVGAEIVRLLQPLGVEAAIQAITQCEHQSGEKQRQVELALEQVRYEATRARRQYDTVDPDNRLVAGELERRWNAALAAVRALEEELEALLRQRPATLGAEERKRLLQMGADLEAAWHHPAATAVTRKRIIRVVLREVVACVEDDQIHLLLHWQGGDHTRLMVRKNRRGQTRWAVEPETVELIRACARLMPDKAIAGMLNRTGKRTGRLNGWTQSRVRGFRNTHGITVYRDSEWAERGEVTLPEAARMLNLSPLAVLRQIRAGGIPAKQYYAGAPWVIKRRDIKDPHVIERVRACCKSPSSSNPNQKTFVFQ

SEQ ID NO: 21183 - protein, 468 aa, synthetic construct
MNENVTLIPARIRAGNRITRQENKPKLRVAAYCRVSTDSDEQAGSYDVQVKHYTEYIGRNKEWELAGIYADDGISGTNIKKREGFIEMIDDCMEGKVDMIITKSISRFARNTIDCLKYVRKLKEKNIAIIFEKENINTLEASGELLLTIMASLAQQESASLSQNIKLGLQFRYQEGKVQPNHEHFLGYTKDEDGKLIVDENEAKIVRRIFREYLEGASFRDIANGLEKDKIRTGGKRYKWHLSTIRGILRNEKYMGDALLQKTITTDFIEKIRIKNDGTVPQYYVKDSQEPIIARDIFMLVQEEMIRRANLTSGVDGKKKRVYSSKYALSSICTCTKCGDIYRRIAWNNRGKKSTVWRCCTRVEHGPSACNALTIQESELQDATVKAINKILICSDRMLQILSDNIEMAIADDNSVEMEKLNGILKGKQKELVKLAHAKKDYTALADEIDILRDKKKSFRYKEQKRKV

SEQ ID NO: 21184 - protein, 521 aa, synthetic construct
MARITKIETTKSFVKERKIRVAAFTRVSTKSEEQLLSLEIQKEHYESYINANSSWEYAGLYYDEGISGTKIEKREGLLALLKDCEDGKIDRVITKSISRFSRNTTDCLEMVRKLTSLKVFLFFEKENIDTEHMSSELMLSILSSIAESESKSISQNSKWSIKNHFKAGTFIISYPPYGYENKDGKMNIVPKEADIVKEIFTMTINGMGTHLIARELNNRSIPSKKGDKWHGSTVRGILQNEKYTGDAIFQKTYTDDNYNRHINYGEENMYLYKNHHEPIISHEIFDKVAEVIKQRGREKSIEKGTGKYQSRYVFSGKIYCGECGATFKRRQHYKPSGDYVAWCCNRHITDKNACSMMYIRDEDIKTTFLRMIRKLQTVHDQVLKPFVMSLKGTNNKQRLKQVLALEEQIEKNAEQATVLTNLMSSGYIEPEVFHAENNQLTLEADRLARNKQLIVKSINGDLSHLDEAQKLLRFTSKKEVITEFNDALFLEYVDTIKVNNRNEITFALKCGLNLTERLVKI

SEQ ID NO: 21185 - protein, 510 aa, synthetic construct
MKKVITIEPAKQVTHMVDLPSFTKRRVAGYARVSTDHEDQTTSYEAQMTYYTDYINSRSDWEFVKMYSDEGISGTNTKKRLGFQEMVEDALDGKIDLILTKSVSRFARNTVDSLSTVRKLKEAGVEIYFEKENIWTFDSKGELLITIMSSLAQEESRSISENVTWGRRHQLAEGQVTFSYSQVLGFKKCDTGGFEIDQEEAKIVRYIFHQVLLGNNPNKIARELTAQGIPTPQGKRKWSYGTVKRMLRNEKYKGDALLQKSFTTDFLTKSTKPNEGELPQYYVENNHEAIIKREVFDLVQVELDKLEKKRQTSNIFTGRLFCGDCGSAFGSKVWHSTSKYKRTIYQCNAKYKGEHKCQTPHVTEEEIKGWFLSAMNQLLGNREEIIANTELLIDMAKDTTPLESEIADLERHLETIRQDIEDLVDRNARKAQNQDLYQEQYDTLVTAYQEKQKELQETRSALEEQKSKQLSLDGFIQKFKEQDASSQTSTKNSGRPALSDWISKKIRKSA

SEQ ID NO: 21186 - protein, 413 aa, synthetic construct
MKQIKTIQAQKVTTIKRLKVAAYTRVSHTSLLQSLSNQISHYSQMIQANPEWDYVGVYSDSAISGRSQAHRRDFQQLLEDCHKGKIDLILTKSISRFGRNTVELLETVRELKRLGISVRFEKEKIDTLTAEGELLLTLLASMAQEESQSISQNIRWRVKKRFEEGKPYIPQDIFGYRWNGEEYMIEPHEASIVRQVFEWYMEGLSAPKIAKRLDDRGERTRLGNRFTQRVIYNMFDQEAYCGRLILQKTFRDHFSSRSIPNDGQMAKYIVENAHEAIVTPEYFQLVNQEKKRRARRRVSKHDALARLQGKVYCEHCGLDMILTLETKSNQEKRVRYYCRTRDGKGVEACLGRTVTEEQLFQAFGESINIEDIHHISFNSVTNEAKVTYRNGKENTSSFRKDGRHEKSYHDRTS

SEQ ID NO: 21187 - protein, 575 aa, synthetic construct
MSFCFALLYPCERMLILKKAALYIRVSTHHQLDKDSLPFQRQELINYSKYVLGIDEHEIFEDAGYSAKNTIRPAYQNMMSRIRLGEFSHLVVWKIDRVSRNLLDFSDMYQELKNYNVSFISKNEQFDTSNAIGEAMLKIILVFAELERQMTSERVSKVMLDRATKGLWNGAPCPLGYKWDEDRKFPVIDKDEAIVINHIYNVYEETESTVKVMHFLNSNSYKTKRGGKWTTKVIADILRNPFYKGTYRYNYRQSARGKIKKQEDWILVDNNHESIISAEQWEKCNKIMDKNAQRNVAFYRGKPNIHVLAGLIKCGECASSYSSKLDRARENGYRPSTYICLNRNNGLGCKAKILNEMGLGSFIFNYIANIVNVTKSIKNQISINEFEKLLLKGNIFSDVVGLDPKSLEAIYYKYLFSYNSNTIKYSSKKHIVIKKDTSELEYEKNKLIRALERLEELYLFSDNSMSQKKYIVKTRELEDKIKAIDDKISESKVESLGGVNDIEFLKKSSYFIMMNEISNRSADIEYRELDMRINKETLREFILTIIEKIIVKNDRIDSILFKDGLEHKFIYKSYQ

SEQ ID NO: 21188 - protein, 559 aa, synthetic construct
MKTKLYSYIRFSSMRQNDGSSYERQIRMAREVAAKYDLELVNDYQDLGVSAFKGANSKTGALSRFLDAIGRSVPVGSWLFIENLDRLSRADIVSAQELFLSIIRRGITIVTGMDNKIYSLDTVTANPMDLMFSILLFIRGNEESQTKRNRTNSSALIKIKAHQENPQNPAVAIEEVGKNMWWTDTTSGYVCPDPVFFPIVQEVVELRRNGRSTAEILDHLNATYTPPPAASHKRHSNWSRAMIERLFHTRALIGIKEISVDGVKYELKDYYPRVLDDAEFYHLKKSIGVRACNYGDKEEAKPIPLLSGVNLLKCEHCGSAMVKVKGTNKRPNQYRYSCDAMRSSRIACVHTNWSFRGDQLEKAVLQLLADKIWIAEDKANPVPALKVQIDEISRKIDNLITLSAMTGATKELADQITTLNSERETLYNQIKMAEEEMYSVDSQGWEKLAEFDLEDVYNEDRIKVRFKIKQALKRIGCSRIDKYKNLFVLEYIDGKTQRVVIENSRGPRKGQIFVDLKTINDRQILESNGLVLHPCLDMLTDKDWKPEEEIPGPLQEFGI

SEQ ID NO: 21189 - protein, 509 aa, synthetic construct
MKKAIAYMRFSSANQDKGDSLRRQKKLIDDWLKNNPQYTLDPTTYEDLGLSAYKGKHAREGAFSEFIDALENGVIIPGTVLLVESLDRLSREKIGEATERLKYILKCGIDVITLSDNTQYSEASLDDPYALIKAILIAQRANEESEIKSSRVKLSWKKKRDEAELNGRIMTKACPRWLRVSPDYSHFEVIESKVKVIKKIFSLRKENKSLTAITKYLNDRLIENMTGTPGEWSPSVIEKILGNKALIGICRPTYRGRAKGVNEIIDYYPKVLTDDEFYAVQEVRLSPFGYNSHSGNPYLINLLRTVMKCKCCGNTMIITAVSKSGKGYYVCPMRRLHRCKSPSIKRELVDVNLIEEILFNFDKLQIESNQVSLQETLEKNSIDLQLQINSLVQALTIAPEVNVLAGKVRELDRKLKKIETTIKVLKNKAKKDKSRGSKELNLSLKEDREVCRRLAFKSFREVYIDTETKQCDIYFTNGLVFKNFPLSKRCRADSIISTLKYMDENTVYF

SEQ ID NO: 21190 - protein, 548 aa, synthetic construct
MQAARKKNISIIPSQPAYDRSIKVQLKALRVAAYCRVSTLLEQQESSYEAQISYYTEKIQQNPNWKLAGIYADDGKSATNTKKRDDFNAMIEDCLAGKVDLILTKSVSRFARNTVDSLQTIRKLKEKNIGIIFEKEGVNTLEATGELLITILSSQAQEESRNLSENTRWGIARKYENGVVLVNHKKFLGYTKDEDGELIIVPEQAKLVRRIYRLYLEGLSTQQIADTFMAEGIQTVTGKDKWHDTVIAKVLQNEKYMGDVLQQKTYTVDFLTKKRVKNDGIVPQYYIEDNHEAIIPKELFYQVQEERARRASLHKPSIARRAKKEKSKYISKYVLSDILVCGECSHPYRRQTWSRNGNLTPVWRCESRLLNGTKTCKHSATLKEKPLQEAIMTAVDSVVENQREVVGAFRENVIRVIGSYTTKNIKTGFDEEIAMLQKQLLTLIEENAKQGAVNEDFDEQYREIAEEMQALKMKKLKQAREQKLAGEYGQRVEGMDSCLGRVSCRVGEFDEDLIRRLILRIRVISESKIEIHFKSGIIVEQEVAFYED

SEQ ID NO: 21191 - protein, 555 aa, synthetic construct
MAGKQEKVKKITKINPVKPQVMMQLQPKKRVCAYCRVSTDSREQQNSFTAQTAYYEEMISSRSDWQYVGIYADEARSGTKLQRRDDFLRMMKDCEAGKIDMIITKSITRFARNTVDSIKAIRKLKLLGIAVFFEKENINTLSESSEMLLTILSSLAQGESESTSTNNKWAAVKRFQEGTFIVSTPAHGYTNVEGELVIDEQEAETVRFIFKEYLNGKGSYVIARKLTEKGIQTVRGAEKWSDGVVKEILQNPVYTGNLILQKTYSAEVVPFKRKKNKGELPQYFISENHEPIISMEEAEAVKEIYEYRRKQMKFDGTKSQNRYAYSSKIICGECGGVFRRQKIYIGKPYEKVQWCCIQHIEHKEKCSMTAIREDIIQDAFILMWNKLSSNYTEMLSPMLESLKRLRADEQQEKEIRECNEKIMELSKQSHILSGVVAKGYLDSAIFIEKQTALQIELDAMRKKRKALLDESGFESEIFYTEQLIGLLESHPGIQDTYREDLFLQSVEQIIIKEGKTVTFRLKNKLELSEHCGKEDCDDAKTYADGISDAKRKNIS

SEQ ID NO: 21192 - protein, 559 aa, synthetic construct
MKTKLYSYIRFSSMRQNDGSSYERQIRMAREIAVKYDLELVNDYQDLGVSAFKGANSKTGALSRFLDAIGRSVPVGSWLFIENLDRLSRADIVSAQELFLSIIRRGITIVTGMDNKIYSLDTVTANPMDLMFSILLFIRGNEESQTKRNRTNSSALIKIKAHQENPQNPAVAIEEIGKNMWWTDTTSGYVLPHPVFFPIVQEVVELRRNGRSTAEILDHLNATYTPPPAASHKRHSNWSRAMIERLFHTRALIGIKEISVDGVKYELKDYYPRVLDDAEFYHLKKSIGVRACNFGDKEEVKPIPLLSGVGLLKCEHCGSAMVKVKGTNRRPNQYRYSCDAMRSSRIECVHTNWSFRGDQLEKAVLQLLADKIWIAEDKANPVPALKVQIDEISRKIDNLITLSAMTGATKELADQITTLNSERETLYNQIKMAEEEMYSVDSQGWEKLAEFDLEDVYNEDRIKVRFKIKQALKRIGCSRIDKYKNLFVLEYIDGKTQRVVIENSRGPRKGRIFVDLKTINDRQILESNGLVLHPCLDMLTDKNWKPEEEIPGPLQEFGI

SEQ ID NO: 21193 - protein, 557 aa, synthetic construct
MKIADLYIRVSTEEQADKGYSQRDQEERLRKYCELNSLKVRKVVIEDHSAKTFNRPAWKKLLAELRSRRGHSDLILFTKWDRFSRNAGDSYQMISTLRNLGVEPQAVEQPLDLSIPENKMMLAFYLAAPEVENDRRALNVFNGMRRAKKEGRVMGRPPLGYVNRITETGKKHIAIKEDQALIMLWVFEELAKGQIHTEQIWKAAKKKGLNSTRSCFWVALRNPIYFGKVFVAKYKDEECHLVQGQHEPLITEALFYDVQDILDGRKKIKRTTITVDPALPLRGYLICPKCGKVLTGSASKGRHKYYHYYHCTMGCTFREKAPIVNDKIVEELRKYVRPLPFLELYKQTITSVYNSKTKYNRSDSDVLKKKLEETNQRLTRARNLLIAGDLDADDYKRIKIETADNINRLEAQLTSQNSSIPNVEPLLNKALSNISQLDKLYEEASTEGKRKIIGSIFPEKLTFENNEVRTTKINEALRLMLLFYKELYNKKRGQNQKNTDLSSYVNAEGFEPSTACLEGRCSIQLSYASICFKTLWQSFCRGGRIRTCGLLLPKQAR

SEQ ID NO: 21194 - protein, 483 aa, synthetic construct
MDKQIVGIYVRVSTPGQAEEGYSIDEQVDKLTKFCDVKDWQVAKVYKDAGFSGSNIKRPGMQLMMDDVKEHRINTVLVYKLDRLSRSQKDTLFLIEDVFNKNDCSFISLNENFDTSTAFGKAMVGILSVFAQLEREQITQRMQMGRVGRAKAGLFNGSQVPYGYDYVDSRLVPNPITAPIVREIFDDYNHGYSVDKLKMKYDSAGHVGRKLPWSYHVLRYLLTNRTYIGEVAYGKKWYPGIQKPIVDEVVFDETQRQLAVRQIKNAKLTNNPRPFRAKYMLSGLLRCGLCGSWFDVSISKAHKDRSVLNRYYTCHHRKPSALLKEGLNPDERCSSKTYVLSDLEHKVMKKILELAYDPKRVDKLLNANGHVIDDPTPLKRRIRDISNELGRIMELYTAGSVPLDVINTKANQLTQERINLQERVQKITDETNTESISTIRETLESAKTIMKTGSYEERTDVVRKLIKKIVLKGDRMAIEWRFN

SEQ ID NO: 21195 - protein, 573 aa, synthetic construct
MTVDTLNNTLPDAQTRVALYLRVSTGRQAEHDLSIPDQRRQAMAYCEARGWTVSAEYVEPGASGTDDRRPELQRMLDMATTEGAPFDIVLVHSFSRFARDHFALEYHVRRLRKHNVRLVSITQDLGDDPMSVMVRQVFALFDEYQSKENAKHTLRAMQENARQGFWNGAKAPYGYKVIAAEQRGSKTKKRLAIDPVEAETIRLIFRLFTKGDGTTGPMGVKAVANWLNDHGYRTRQGARWGIGPLHNLITSTVYKGEYRFNRKIWKTKEDKPVAEQIMVPVEPIIDGKTFDDLQAALRARNPKATPPRTVTGPILLTGLATCASCHGGMTLRTGKSGRYRYYACATCAQKGKSACKGRSVPMDKLDTIVTERIADQILTPQRVEKLLTGLIERQANRSADYTDRITNLRKNLSETEARLKRLYDVIENGIADPTDETLKDRITAIKTERDIAQVALDRALTELRPEARITQDKIAAFTTIMRDNIQNGPIPFRRAYLRAMIDNVEVDDTEIRIHGRRTILERLVMGGGASPAGVPSFVRKWRTRSIQLSYGCFQDRKRDTENSAPPKRLAKAS

SEQ ID NO: 21196 - protein, 589 aa, synthetic construct
MSVKHLAFSYVRMSTEKQIKGDSLRRQLEWGQQYAKTHNLLLDDGLRDIGVSAWKGINRKKGALGEFLRMVETGTITRGSFLLVESLDRLSRTQVMDALQLFTGILRRGITIVTMGPPEQIYTWESINGDFGQLIITLTVMARAHEESQRKSERIRAAFANKRKLSQLGVRTNSSPPRWITATQIAKGEFTYTLNERLPLIEWIFQRSADGVGFDRIAKELNARNEPTLKPSTRGWFFTSVANIVQSRAAIGEYQPHEGVDGKRIPRGDIIVDYYPKAVSEELFLRAQKITHRNRIGGRGGKYFTNLLDGMAQCTHCRSRMYILNNSPSDKQYRYLVCSANYRQIAVEDQTPVCSQGTMRFRYDQAEQFILDNVSEFGISDILQMRRVDADVQQREEKLASLSIKLEDTVRREARLLTVLESEDVDDLPGILALARQRTQEREKIEGLIRALRHERDVAMAKKRGLDPANAIQALRDAWLTAEDENDRYGLRVRCNTAMKDFIDSIQFDSREGSYTAILFGGYRAYKFFNITRVRNATQEPLVVDMQPLVNTGLWPSNLKHAEARQLIQHNLENTPAVTTQNYRSAKSK

SEQ ID NO: 21197 - protein, 588 aa, synthetic construct
MVAIYTRLSKEDADSNSINNQLRTGKLFFKDLGIDESKIKVYNEGEGISGGAEIEDRPQLQQLILDIQNGLISTAWFRDQKRLERSGMTLFLFTEVVKKSKVDVYFGNDLEDFKNPKGFIMRGLKSLLNESTRLEQSWETKKQLHLNMKEGKHRGGMHTYGYTSDENGYVIVDEEEAKIVRRIYQMSMDGIGTRAIARTLNKEGVATRSNTVKGGSGKRITVNKHTGKETITDIKDIKWAGNTVRGIIVNEKYKGIAYLGSEELGERKQYDYPIIIEPKEWKKVNDNLKSNRNNSGKNVKHKYLLEGMIECGRCGRNYYGRTRKDKSDHYYLCSSKRFPELNCGNKSINIDFIENFIWSTLTSSSLKNQINLQLATGDDKPKLDTLQLEVEQLHKELTKHKNAKKKAIQSSFYSDDDRDVEDIVKAIQSKIESTEEILDKKEKELDYLSDASNKLDKVKDELSNVKQETPFNLRQEIINKFIKRIFIESDNNQHMYEVKIEYNAPIWDNIFVTNQAYSIIKEMHPIKAIPQTIEWIKEPKNVTYKKQLYTKVEQYQPKFKHKHIFNTSFEQSPWEIAEMNYYYNKLSN

SEQ ID NO: 21198 - protein, 466 aa, synthetic construct
MSITIGYARQSVDKKKTENSVHSQISAIKKYTDNHKIQDVKFISDVKSGRSTTRTGYQSMLDIIRKGECQHIIVFRVNRLNRNFKDFMELQTLCEEHHVLITSLSDGRFDLSDKTQAFKIRCLAILGETESNIISENVRSANAIKAKNNELLGTNAPFGYIYVNKSFHIDESKVKTIRFIFNMYVNQGWGYKKISQALTNHSKLYNRTPKQVMRIITNEKYAGLIRNHFGEYEGNFEPIIEKSLFRKAETIRGSKKTLTHYHPIVLLRKKIRCICGATMTPIRMNRKHMTCPITYYICPLNDKLGYKKCSMGYFVASKIDKQVIKIIEDNIINQQMIQRLENTIHSKLSLKIKRSRPKYNQDQLITKLSKQQISIEEYKKQLNKIKEWHNKMNRYNQVNSANQLKCITQNILSNYTLYIDQLSEMITQITVNKDKEITGVFLKNTPLNLLKEKDDKHDERSTFIST

SEQ ID NO: 21199 - protein, 547 aa, synthetic construct
MDTTSPTIKIAPYVRTSSIKQIDNYSISAQLAEIEKYCKLNDYEMLPPYIDNGISGAKMENRPGLQQMLNDLKNNKLDKIVVWKLTRLGRSMKDILQIIEECEKNNVSFYSVSEHLGIDTDMNKLMLNIMGSLGEYERTILKDNIRIGASNKASEGKSVGGQPPYGYDRIDGLLIVNQHESRIVKEIYQMYSQGMNFTAIAKVLNDRHEVTKLGKPHSKDSVSYILKNKVYRGLVVYNQYVDWKKKGRKGYNDNPIITEGEHEAIISQELWNKVQTQLKARKRHKRGNNKTDNLLTGLLKCKCCNANYVISNTINTLKDGSKRHFRYYVCRTRKQRSKDCKAAPNIRADFIENYIFQNIKNLIQKPELIKKVVEAVNHKRTPNTDEINHEIANKQFQIDDLKSRYNNLIQVITTDTSLTESIKPTLLKYSEQINELNTSIKQLESNKNVNHPKIEADTVINIFHILFKNLENTKNSSLKAVYHLVIEHIYIKADSNNKKQFYITFKFNQDIVETLLNNINPDEQLLNCSSSLLANIPSEIIFLSFEL

SEQ ID NO: 21200 - protein, 559 aa, synthetic construct
MKGKIALYSRVSTSEQSEHGYSIHEQEQVLIKEVVKNFPGYDYETYTDSGISGKNIEGRPAMKRLLQDVKDNKIEMVLSWKLNRISRSMRDVFNIIHEFKEHDVGYKSISENIDTSNASGEVLVTMFGLIGSIERQTLISNVKLSMNAKARSGEAITGRVLGYKLSLNPLTQKNDLVIDENEAHIVREIFDLYLNHNKGLKAITTILNQKGYRTINQKPFSVFGVKYILNNPVYKGYVRFNNHQNWAVQRRSGKSDKNDVILVKGKHEAIISEDVFDQVHEKLASKSFKPGRPIGGDFYLRGLIKCPECGNNMVCRRTYYKTKKSKERTIKRYYICSLFNRSGSSACHSNAINAEVVERVINVHLNRILSQPNVIKQIASSVIEELKQKHSKQTEIKYDIDSLEKQKAKVKTQQERLLELFLDDEMDSEMLKAKQSEMNQQLEVLDQQIKEAKQANQSQDDIPNFDKLKARLILMITRFSVYLRKATPEAKNQLMKMLIDSIEITTDKQVKLVRYKIDESLIPQSLKKDWGSFFIPKFNFVINVTKKNRIENLSLLPLF

SEQ ID NO: 21201 - protein, 528 aa, synthetic construct
MNAAIYARYSSDNQREESIDAQIRAIKEYADKNGIIITKVYTDEARSATTDNRPKFLEMIKDSEYGLFDAVIVHKLDRFSRDRYDSAHYKRILKKNNVRLISVLEHLDDSPESIILESVLQGMAEYYSKNLAREVMKGMKETALQCKHTGGLPPLGYDVDPETKKYIINEQEAKAVKLIYEMYSEGHGYNTIVDRLNLLGYKTKIGRSFSKNSISEILRNEKYIGTFIFNKAPKSFNGKRNSHRTKSPEEIIKIENGLPAIISKDIFDKVQKRMLNNKRNATNKAKEVYLLSGKMLCGCCGASMVGHTSYSGRNKAKYSTYNCSARYRTKQCGMKNIQKNFVEELVLNEIKSKILNPSSIKRLTKKLIEHYNKMLDSNHDELKSLDKRLKEIDFEIGNIVNAISQGMFHNSFKEKMDNLEAEKTRISSYINEIKATMNSSELNEKLIEQYLIKDINAINEKSANDLKTIINTYVESVLVHEDKVDINLILFFVHINGGGEGTCYSIISNGTDYISCLKLISFKYLGVL

SEQ ID NO: 21202 - protein, 502 aa, synthetic construct
MNKICIYLRKSRADEELEKALGEGETLNKHRKALLKFAKEKKLNIIEIKEELVSADSIFFRPKMVELLKEVETKKYTGVLVMDIQRLGRGDTEDQGIITRIFKESHTKIITPQKTYDLDDDLDEDYFEFESFMGRKEYKMIKKRMQGGRVRSIEDGNYIATNAPYGYDISHVNRCRILKPNPQESEIVKLIYAMYCEGNGAGSIAKYLNNLGYKTKFGNDFSRSSIIFILKNPVYIGKITWKKKDIRKSKDPNKVKDTRTRDKSEWIIADGKHKSIIDKKTWNIVQEILNNKYHIPYQLVNGPTNPLAGVIICSKCKNKMVGRTSKSGYRLICKNNKCDTVSHKFDVVEKAILNSLENYLKEHKLNITKDKRPSNLKLYERQLNNLNKELIILNEQRLKLFDFLETGIYTEDIFLERSKNLDKRISETTSGIKKINEVIDKENNKSKKEDVVKYEKFLDGYKKTRDIKLKNESMKSLVFKIEYTKNKKGNDFKIELFPKFKP

SEQ ID NO: 21203 - protein, 505 aa, synthetic construct
MELAFSYARFSTKSQSTGTSLERQLNASRLFCSERGLTLSPKGYHDLGVSGFKQVKRPELEQMLQAIQSGDIPSGSYILIEAIDRLSRKGISHTQDVLKQILQYKVKVAFVGEDAKTLAGQVLDENSLNDLSSVILVALAADLAHKESLRKSKLVKAAKSIIRKKATEGHKVRGHTMFWIDWSEQKQDFVLNDRVKDVHKIIELRQEGHGPRKIAKILNELNIPGPRGNPWNHMTVTVVLRSPVLYGAYQTHQIIDGQKVPDVLLENHYPAVITQEEFVTIQADSSKSNKGRPSKANPFSGVLRCECGQAMLFSKRTNLNKDGEPLEYEYHFCLGHAEGRCKNNKRIRDLVPLLVSLMDKLVINQAPKKNLNVELIKQKEQKIEQLNKMLIELDSPPLSVLKTIQTLEAELDILLNTHVEEPVQTDVQTLSTITDAQEYNQYLKRLVKKIVVYQKNGPKNLRIKVYKTDGHYQNFLVKNGKVLFKSDTKALKELIDGFKKERREG

SEQ ID NO: 21204 - protein, 543 aa, synthetic construct
MGKNGARVYSYLRFSDPRQATGSSADRQLAYASAWASKHGMELDATLTLRDEGLSAYHETHVKQGALGAFLRAVDEGRIPAGSVLIVEGLDRLSRAEPLLAQAQLGQIVNAGITVVTASDGREYNREGLKAEPMNLVYSLLVMIRAHEESDTKSKRVKAAVRRQCEAWVAGSYRGRIVSGKDPQWLAWDGDSWQFIPERVEAVRFALDAYRSGIGAARLVRLMHEKGMVLSDWGIAAQQVYRLVRLPALRGAKRISIDGEDFMLEDYYPRLLSDEEFSELETLVGQRYRRRGKDEIVGIVTGIGITRCGYCGTALVAQNLMQRVKADGSLEDGHRRLHCVSYSKNGGCNGGSCSSVPIERAVLAYCSDQMNLQRLLEPTSAGEDLRPRLVEAQKGVAEIERQLERVTDALLADDSGAAPLAFVRKARELEEDLERRRSAVRALEQELVAKSASAPAAGASKWAELAERAKSMADVDAREQARQLVMDTFETLVVYMRGVIPNPKGRYIDVMMKSRAGQTRWIRVDRRTGVWKEGADRPTTRRP

SEQ ID NO: 21205 - protein, 542 aa, synthetic construct
MQQLKTKRVGIYVRVSTEMQSTEGYSIDGQINQIKEYCDFHHFEVKDIYADRGISGKSMNRPELQRILKDAKDGYIDCVMVYKTNRLARNTSDLLKIVEDLHKQNVEFFSLSERMEVNTSSGKLMLQILASFSEFERNNIVENVFMGQTRRAQEGYYQGNLPLGYDKIPNSKHELMINQHEANIVKYIFESYAKGHGYRKIANALNHKGYVTKKGKPFSISSITYILANPFYIGKIQFAKYKDWSEKRRKGLNDKPVIAEGKHSPIINQDLWDKVQMRKKQVSQKPQVHGKGTNLLTGIIHCPQCGAPMAASNTTNTLKDGTKKRIRYYSCSNFRNKGSKVCSANSVRADVIEDYVMKQILEIVKSDKVIQRVVTHVNQENQVDGAALHHDIAYKQQQYDEVQIKINNLIKTIEDNPDLTSVIRPSIQKYEKQLNDIMNQINQFKNQQNEDKTLFDAKEISKLLQHIFHDIKHIEKSRLKALYLTVIDRIDIKKDGNHKKQFYVTLKLNNEIIKQLFNNKQLDEVHLSTSSLFLPQTLYLTI

SEQ ID NO: 21206 - protein, 449 aa, synthetic construct
MKQVIGYLRQSTMKQQSLAAQKQAIEAIAEKHHIQHINFYSDKQSGRKDNRSGYRQITQLIQQGQCDILCCYRLNRLHRNLKNALKLIKLCQTYRVHILSVHDGYFDMDQAFDRFKLNIFISLAELESDNIGEQVRNGLQEKAKQGRLITTHAPFGYEYHNGTFIINQNESPTVKAVFNYYIKGHGYKKIAQLLEEDNTYINRQPYQVRNIIINPNYCGRVNNQYGQFDNMFPSIVSTSIYEQAQRLRLQKQTKQTPSDNQLKQKIKCPCCNATLTNMTIRKKNHTLRYYVCPKNMNASRFVCDFKGINAQTLEDKVLEVCRDFYQNQRIYTKIKSAIDKRIKRQRNIEKHHTLTQEQLIEKLAQGIIDAETFREQTQSLRQQPQRTTSINGHQIQNTIQNIIQKRFTLNMLYPYIDEILITKSKTLMGIYFKNEPLNIVNQTTQSSIA

SEQ ID NO: 21207 - protein, 541 aa, synthetic construct
MTQLKKKRIGLYARVSTEMQTDGYSIQGQLNQLKDYCQFQGYEVVNEYTDRGISGKTTQRPELQRMLKDANDGKLDCIMVYKTNRLARNTSDLLNIVEELYKINVEFFSLTEKIEIASSTGKLMLQILASFSEFERNTIVENVYNGQRQRAIEGYYQGNLPLGYDKVPDSKKELMINQHEANIVKYIFESYAKGHGYRKIANALNHKGYVTKKGKPFSISSITYIISNPFYIGKIQFAKYRHWSDKRRKGLNEEPIIADGKHAPIIDKALWDKVQFKRQESRKKPQVHGKGTNLLTGIVKCPKCGAAMAASNTTNTLKDGTKKRIRYYSCSNFRNKGSKVCSANSIRADVLEKYVMDQILEIIKSKKVLKQLVEKINENSQIDVSSLNHDIAYKQSQCEEIKAKMHTLTKTIEDSPDLNSVLKPTILSYQDELNQINNQIHQLERDKQAEAPHYDADMIANVLQAIFKDINKLEKSQLKSLYLTVIDRIDIRKHEHHKKQFYVTLKLNNDIIKQLFDNHPLDEVLLSTSSLFFPQTLYLTI

SEQ ID NO: 21208 - protein, 453 aa, synthetic construct
MVETIGYVRQSTLKQQSLATQKSLIIDTAKQYGWSNVTFYDDKKTGRHTKRSGYQKLVEMITSGKCKVLCCYRLNRLHRNLKNAIQFFEICKKHHVTIISVNDGYFDLSKDFDRFRLNILMSLAEMESNNISEQTQNGIREKAKQGKLITTHAPFGYRYRKGRFIVHKEEAYIVKIVYRWYLQGLGYKKISQKLDKDMNFISRKPYQVRNILLNPNYCGRVINKYGTFNDIVPPIINVDTFEEAQERRIHKQHNRSNSRNKLKRRIKCPYCQSTLTNLTIKKEHRSLRYYVCPKNMNEAYHTCPFKGINAQMIETEVLNTCKAYCNNQSFHDKLNETILKVLKYQQMKHRQSHLTQEQLIEKLAQNQIDIETFKHLSAGSESEERYSNYSHKQIAEAIRHVIKDKLTLENIAPLIDDIKITQTKQLKEIYFKNSRLNIVEQSHLITPERNEVI

SEQ ID NO: 21209 - protein, 541 aa, synthetic construct
MKDLKKKRIGLYARVSTEMQTDGYSIQGQLNQLKEYCQFQGYKVIDEYTDRGISGKTTQRPALQRMLKDAKENKLDCIMVYKTNRLARNTSDLLSIVEKLYKLNVEFFSLTEKIEIATSTGKLMLQILASFSEFERNTIVENVYNGQRQRAIEGYYQGNLPLGYDKIPDSKKELMINQHEANIVKYIFESYAKGHGYRKIANALNHKGYVTKKGKPFSISSITYIISNLFYIGKIQFAKYRYWSDKRRKGLNEEPIIADGKHAPIIDKQLWDKVQFKRQESRKKPQVHGKGTNLLTGIVKCPKCGAAMAASNTTNTLKDGTKKRIRYYSCSNFRNKGSKVCSANSVRADILEKYVINQILEVIKSKNALKQLIEKVNEQNQIDKPSLNHDIAYKQSHYEDVKSKMNTLTKTIQDNPELDSILKPTILSYQDELNQINNQIHQLEQDKQAEAPHYDADAIAKVLQVIFKDIDKLEKSQLKSLYLTIIDRIDIQKDEHPKKQFYVTLKLNNDIIKQLFDNHTLDEVPFSTSSLFLPQTLYLTI

SEQ ID NO: 21210 - protein, 455 aa, synthetic construct
MVEAIGYVRQSTLKQQSLATQKSLIMETAKQYGWHNIEFYDDKKTGRHTKRSGYQRMVEAITSRKCKVLCCYRLNRLHRNLKNAIQFFEICKKHHVTIISVNDGYFDLSKEFDCFRLNILMSLAEMESNNISEQVQNGIREKAKQGKLITTHAPFGYRYRKGRFIVHKEEAYTVKIVYRWYLQGLGYKKISQKLDKDMNFISRKPYQVRNILMNPNYCGRVINKYGTFNDIVSPIIDVDTFEEAQERRIHKQHNRSNSRNKLKRRIKCPYCQSTLTNLTIKKRNHSLRYYVCPKNMNDAYYTCSFKGMNAQTIEAEILDTCKSYFKEQAHHSHLNERIIETLERQKMKHKQTQITQEELIEKLAQNHIDVETFKQLSTSNESETHCSSPTYLSNQMTKTISHISKGKLTLEDIAPLIGDITITQTKQLQGIYLKHSPINIVEQSHLIPCERNENL

SEQ ID NO: 21211 - protein, 585 aa, synthetic construct
MLSRRKPKKNLVPVQRFAISYLRFSHARQAKGDSVRRQLKACDDYVREQGLTLLDTYSDKGVSGYRGKHAKSGALGALLELMKDSKLPRDFTLIIENLDRLSREQPYDALERFTHLISHGVTIVCLDFKDKPLNRETINKDGSLMTTVLMMLQRGHNESATKSSRVRASYDARFEKAREDGLAMKGFRGPAWLKVEGKRYVEDTPRCDVVREIFRLRIAGLGDYAIAAQLNEREIPIFDHCAKRTTPTKNAGWYPAYISAILESRAVLGEFDPREEGRPFVYFPQVVSPATFADAQAMRRTRPTSVKGARGTRHHNLFMGLLRCKHCGGTMTVTQNRPEHGPRPTIRYLLCSNRRRHSKACNGAGMLNLFRLEKTILDFLPRIPWGEIVRAENPGDPLGPLDLKISALRDDLARYREQTDNLTAAMAQSTRTLPALLKALEDATDKVDLAEAQLKVLKSERTAKAQLYRPNMVKDAVGFVEAMRDATGADRYEARARLSKALAKIITDIECDTVQKTAKVRISKSYVLLLAPNETDGAVAVIEGLPSNEDTARIVDELPPGVFVPKGIGKSPGIHIIGATAVDVP

SEQ ID NO: 21212 - protein, 529 aa, synthetic construct
MTYQEGGERMKKITKIEGNLANSFIKPKTRVVAYCRVSTDSNEQLVSLQAQKAHYETYIKANPEWEYAGLYYDEGISGTKKENRSGLLRMLSDCETGRIDLIITKSISRFARNTTDCLEMVRKLIDLGVHIYFEKENINTGSMESELMLSILSGLAESESISISENTKWAIQRRFQNGTFKISYPPYGYQNIDGQMKVIPKQAEIVKYIFAEVLSGKGTQKVANNLNQKGIPSKRGGRWTATTIRGILTNEKYTGDVILQKTYTDSHFNRHTNYGENNMYLIENHHEAIISHEDFEAVDAILNQRAKEKGIEKRNSKYLNRYSFSSKIICSECGSTFKRRIHSSGRKYIAWCCSKHISNITECSMQFIRDDDIKTAFVTMMNKLIFGQKFILRPLLNGLRNQNNVASFSRIEELETKIENNMEQSQMLTGLMAKAYLEPALFNKEKNSLEAERERLLAEKDQLTRSVNGNFAKVDEVARLLKFATKSKMLTAYEDELFENYVEKIIVFSREEVGFELKCGITLKERLVN

SEQ ID NO: 21213 - protein, 489 aa, synthetic construct
MAKAYSYIRFSSAKQAQGSSLERQQENLSRFLAENPQYELAETRFEDLGISGWSGEHLGHGLGKLQAAVNAGIIEAGDIIVIEAIDRISRLPLEDAVSLTSGILNKGVAIHTVEDRTTYDKTTYRQGHTALALILKTFASWEYSERLSERVKASYSKRVEAVRKGETIRRKNACWHTSDGKAVEEVAVHIRWMFEEYIAGAGVRKLAGEMMGRHPAFARVNPSHIRRWLRDKSLIGTWAKRDGEEVPGAFEPVLTPDVFYQAQALMNPQKDYTHPAKNFLTGLVKCQECGGNFAVKSQGTGNPFMGCYARTYHRCANGTSIPLLVLHRVVMEEALDYIEDGIRASRLGEHDKHRLVVQGKLEEVQRGINGLSEAIAAHGFMPELNAKLAELKVTRTGLEAELARIPQKGDKEPVTNRELMAVWNGDKLKLNAMLQRAGFAVWCTGRKMKIGADGPEYEYLRYARRAKDFIVKTPVGEWELDGSQGNYHD

SEQ ID NO: 21214 - protein, 611 aa, synthetic construct
MRTVKAYIYSRVSSLQQVDAFGLDRQISTVLDFLENAKLPAELGYQLDPSNHEVLDSDKGLSGYAGHNFTKGSLGRFKERVRSGEITEGCLLIESVDRFSRKQGYDAIDEFTFLIKRNIDIVEVETGQIYSYKLDHKLSTLSTSIERAYQESKRKARISKKSWQKRKKDSVDTGIALNNNTPDWLSLSQDKKSYELDVQKVQTITKIFELYRDGYGVTQIVNLLNKEGERYNGKGWNTVTVYNKLRDRRLNGYLVGKYTTIPKKDNESTNDAEKRIIENIKIKKEANDNAKRIYPVVIEDDLFSRVQSMMDRNVSSKKQKSTTTKQRNLFNGLTKCNECGSPMIVQSMSNGGQYLRCYRQRTKDEKCNSKMLRYFETEKVLLQHIKNLNLDEIYGDEKSNQSLDTLKRLLSDVNGKIALLNEKVQSANDESELFAIMEFKRKRILEKDELIAKINSLENRCEAVTLNYTYDIEQLTNQDNTVLRRKANEHIAKVISSIKCRRIDSSYIGAYYLYDITYHREVLKHILITDNSGKLISEIAISEKDNERTYQVREGGKTVFKVESNGNAWVLYASRTKTIDDLLYYITTMMVGREPDEFVYQLNEDQIEWID

SEQ ID NO: 21215 - protein, 543 aa, synthetic construct
MGKNGARVYSYLRFSDPRQATGSSADRQLAYASAWASKHGMELDATLTLRDEGLSAYHEAHVKQGALGAFLRAVDEGRIPAGSVLIVEGLDRLSRAEPLLAQAQLGQIVNAGITVVTASDGREYNREGLKAEPMNLVYSLLVMIRAHEESDTKSKRVKAAVRRQCEAWVAGSYRGRIVSGKDPQWLAWDGDSWQFIPERVEAVRFALDAYRSGIGAARLVRLMHEKGMVLSDWGIAAQQVYRLVRLPALRGAKRISIDGENFMLEDYYPRLLSDEEFSELETLVGQRYRRRGKDEIVGIVTGIGITRCGYCGTALVAQNLMQRVKADGSLEDGHRRLHCVSYSKNGGCNGGSCSSVPIERAVLAYCSDQMNLQRLLEPSSAGEDLRPRLVEAQKGVAEIERQLERVTDALLADDSGAAPLAFVRKARELEEDLERRRSAVQALEQELVAKSASAPAAGASKWAELAERAKSMADVDAREQARQLVMDTFETLVVYMRGVIPNPKGRYIDVMMKSRAGQTRWIRVDRRTGVWKKGADRPTTRRP

SEQ ID NO: 21216 - protein, 529 aa, synthetic construct
MPTPTRAITYARQSKAREDDSAASPEAQRRKTKALVEARGWTFVDHFEDVGASGYDPRAARPGLDAALDAIRRGEASVLVVYRLDRLTRRGVIEAVRLVGELAENGASLLSVNEPFLDTGSPMGRGIFALFAAMAEQESASISTRTKASKALLREAGSHAGGRPPFGMRAESVLDGRLVVRRLVPDLETAGEARKIIARVMEGESVRSVVRDLNAREVRTINGAEWGTSTLMRWLRSPQLAGYMPEARDGKESGPNVKRIALAEDGSLIRPWEGIVSPEAWHALQRVLDSRAPVRGRGTAPSLFGGFLMECACGSRMGIDRRLSAPGGGAYRCMKARRGQTGCDGVAVAVRHSEAYVTGEVLRRLSHLDPEDEADAALLSAASERFAAKTTASADIEARSAAQRARAEALAALDRLDDDRAAGLFDGANGAERYARQVRNLSARVEGAAATLESLAPSAPVVPFLDLLASADDPSGDPLLEGPWASWSVEEWREFLDLFLVRVVVNKGRHSGGNSAFRGAERLKFHWRA

SEQ ID NO: 21217 - protein, 638 aa, synthetic construct
MKPKLYSYVRFSSMKQREGNSLERQQDTALKIAARYNLELDTTAFHDLGMSAFKGKNAHEGKLSEFIKQIGAKVPVGSWLVVENLDRISRDDAWSALDIFKNILSRGIVVVTGMDEKVYKYADVKNNPTDLIISLLMFTRAHDESLTKKNRVEAQARSLIRHNLTRESGTPAKAIESVGQNVWWVDTKSGYVTPHPLYFTAAQKIIELKQNGETLLGIQRYLNEHYPAPKKRVYKDQTGQALTPKTEQWGKHLIRTFLNPTVHGQKTFTLDKRDESGVIIYDSESDEPLKETFIIPDYYPALMSEVDYLTLSKLDRHRAITRNSSKYPAGNPEPEIPLLSGIGILFCGKCGSFMFKSGSSENKYRYICGSKIVQGKPCGKKGFTSYQLEHTVLQLIADHVWNNHQEDKTAWYESEIEKASETVKKLLKLATLIDDLEELADQINANKQKKITLEREYQQYKISRSEIQTTGWDQFRNFDVHDTKNPDRKRIRLKIKQAIKRIDCYDIDGRYGHFEVTFADETKQRIVIKFNRNRSPGVSYVEAQTVNDHDLLKMQGLVLHSFIDELISPEKFAQHIKDKHEVSILNPTFITKLEDGVNQNEGNGLAIKVASTTSKSYVTVNGIKYEINSLEDLEKLLQ

SEQ ID NO: 21218 - protein, 478 aa, synthetic construct
MNMKVACYVRVSTIDQAEEGYSIGQQIDRLKKFCEAKDYSIYKVYKDPGFSGSNLERPAMQQLINDCQNNKFEAVLVYKLDRLSRSQKDTLHLIEDVFNANEIAFVSLNENFDTSTAFGKASIGILSVFAQLEREQIKERMQMGKIGRAKNGLPMSWRNAPFGYRYKNRKFEIDEFQANVVKRIYNDYLSGISITKLRNTLNQEGHLGKSVPWSYRTVRQILEHRVYTGFNEYKGKVYPGIHQAIISKDVFEKVQKELKVRQIEAYKKNNNPRPFQSKYMLSGLLKCGYCSANLGLHIYVPRKDGSQSKFYKCPSSIKKKTFTNRQYSFCSQPFLNKKDLEEHVIREIRKLQLNPQSIVHEQNNISGNIKLLKQQLKKIDVKSERLMNLYINSDSFDLKMLDKKRKQIQQERAQINEQIKDIKNKTPELSPDGATAILKECGNIEKLSYEKQKLVVRKLIKEIIVKGHDISVSWRFEL

SEQ ID NO: 21219 - protein, 547 aa, synthetic construct
MQTARKKNISVIPSQPEYDRSIKVQFKMLRVAAYCRVSTTLEQQESSYEAQVSYYTEKIQSNPNWKLAGIYADDGKSATNTKKRDDFNTMIDDCMAGKIDLVITKSVSRFARNTVDSLQNIRKLKEKNIGVIFEKEGVNTLDGTGELLITILSSQAQEESRNLSENTRWGLVRRFENGVISVNHTKFLGYTKDENGELVIVPEEAELVRRIFRLYLEGNSSIKIAKILKADGIKTVTGMDTWQPSVIDQMLRNEKYMGDALLQKTYTVDFLSKKRVKNQGIVPQYYIEDNHEAIIPRELFYRAQEEKARRAAIYKPSIEKKSKTEKSKYSSKYSLSDIMICGECGQPYRRQTWSKYGQKSAVWRCDNRLKNGTKNCKHSPTLKEQPLYEAIMTAINSVVENQGEFVGAFRENVIRVIGSYSTRHIPSEYDEQIEKLQGEMLTLIEENAKQGSVNENFDEQYHSIAEKIRELKLKKLKLTQENRLAETFSQRIDDVDHCLKDITSTVGGYDDELVRRLLQSVKVISEDKLEIQFKSGIVMEQRVAYSE

SEQ ID NO: 21220 - protein, 533 aa, synthetic construct
MTKKITKIEPVSVQVALQLQPKKRVCAYCRVSTDSREQQNSFSAQVKYYTELIGKKDDWEYAGIYADEARSGTKLQKRDEFLRMMKDCEAGKVDMIITKSVTRFARNTVDSIQAIRKLKALSIAVYFEKEHINTLSEKSEQMLTILSSLAQGESEGISTNTKWAVKKRFQDGSFILGCPAYGYTKDEAGELIIKDEEAVVVHRIFKEYLNGKGSYVIAKGLSEDGIPTIRNAEKWQDSVVKEILQNPIYTGDLLLQKTFTTEVVPFKRKTNKGQLPQYFISENHEPIITREQFEAVKEIYEYRREQMGIDDSGKYQNRYAFSSNIICGECGSTFRRQKIYIGKPYEKIQWCCSQHIEDKSKCSLKGIREDVIERAFIVMWNKLTSNYTEILIPMLESLKGLRIDEQQEQEISECNNRIMELTEQSHILSSVVAKGYIDSAVFIERQNTLTLELTAAKKKRSQLLDSNGFDREIARTELLIALIQSNPNILEEYDENLFLQAVDKIILHENHTITFRLKNSLELTEYCGKEVDE

SEQ ID NO: 21221 - protein, 538 aa, synthetic construct
MTLKACLYARYSTDKQSENSIDDQLRAARERVAREGWTITAIHADEGISGSTPVALRPGGKALLADALAKRFDVLVLEGLDRLSREISEAEGIVKRLEHRGLRIIGTADGYDTLARGRKVMRIARGLVNELYLDDLREKTHRGLAGQFDRGLSAGGRTYGYGSVEAPGGRRMAINEAEATTVRWIFERFADGYSTRTIAHELNARGTPSARGGTWAISALHGSSGKGLGMLNNELYIGRVVWNRRQWLKDPDTGRRRYIERPREEWQTRDAPELRIVTDELWQRVQTRARSGPARGTRTGKGAVPKTLFGGLLTCHACGGAIVAVNSQRYGCNNHRDRGNTVCSSSLTISRARLDKRLVDELRDELLDSAALAELQSSVQALLQQRSRDSSRENAGALARLNALEQEIGNLVNALATVGISPAIAARLKSAEAERAQLASVVQASALPDPKLVVDDVTARYRRMVSQLQEVLRDESDRTRTRQILTDMLGQVTIGRDLETGETFAELEDPAERLLVAAVGESLRLVAGAGFEPTTFGL

SEQ ID NO: 21222 - protein, 564 aa, synthetic construct
MPTKAYSYIRISTKEQRKGRGEERQLEAAQAYAAQHGLDLDDSLRDLGKSGYHGDHVKSGALGRFIDLVATGQIAVGSYLLVENLDRLSRQTPIDAQAQFIALLQAGIKIVTLTDGQVYDCGRDFTQMIISLTIMSRGHEESARKSYNSKKNADALRKDMIAGLPRFLPQCVGWIDQIRIQGSKDCKFTLNEHAKTVQKIFELADQGVGPLKIARLLNEANTAPLKASSSKWWETTVIRILKNETAIGTLQVHDTVDGKLVPMGEPIPKYYPAAVSEEIFWRVQRNRSQVARTGRKGLKYANLFQMITRCVHCHGGLGLVRSTRNDFQYYRCKTRYEDKTCPGPKKMFPYTNLENSILDHVTDFYLDSKLGVTKTSVQRDVLVEEAQGVDDDLLDLEKRRKNAMSMAELADDDQTRLEFIARIRHLRGQIEQLKAKSNELRAAIGSIDDQASKLHDVSETIAAERALWKTGTDEEIFVSRSKVAQSIKRFVSQIQVDFALQTATIYVAGYTRIYLFDRAGTRIITLNNIEQPWDEIREMLIIDGATESQITVAKEAHSRLRAAA

SEQ ID NO: 21223 - protein, 585 aa, synthetic construct
MGQPAWIYARFSTLEQTDGDSLNRQLDGARRFIESNGWEHSAERELIDEGKSAFNGSNRIEGSHLFQFEKKAVAGLFENGAVLVVENTDRLTRAGYEAAFDIIRGFTSRGVTVATWSPHHIYPAGARIDMGQAMRLIVEAEIAHEESAKKSKRLRSSWQARIDRAESGSKNAITGITPGWLAVEIDRIDGETIRTIVPNAHRVAVLNQVYDWYIEGKGLPWIVKQLNARNEPTWGLGKHADGKGWNVSTTHKYLTNRAVLGEFTSKVRAGKDVKVERGLTIPDYYPQVVTTEKFNRVQALRADRNGWGGRNQFNFPNLFTNIARCFHCGGTLKQNGIMKDGYVRSHPNKNGTFRTSTQRGPRSYLRCTNYLRSFNCHNKRSYRYEHLETGVIDVLIHWMLEQREFTPDSKVGRLTSALAEHDRGRDLRQKQLDQLVTNMMEVFSKALAQKASELEQQIEADNEVRERLRRELEIAQGAASPSESIAFLNAAKADLTHDDPETRYAARVRINQSLKNLIERMDGDETGFINILVRNGLYLRFDKDGQCVEVTPTAATKVVYVGPDGEIDWHPDRPDDKYEYVKEVL

SEQ ID NO: 21224 - protein, 545 aa, synthetic construct
MTQNAIIYARFSTAEQSKGYSLERQKATAIEFAANRDWLVEKTITDEGRSAFHGANRLEGSALHDFELEARNGLHRGKVLVVENIDRLSRQGAKAAAQLIWSLNEAGVDVATYHDSHIYQAANNSDMMDLFKVIILAQQAYDESDKKSKRTKASWDDRFNAIENGNQKPEKVPHMPNWVKRVDGAYVLDEHRTKVLNEIFDLYINGVGIHRIVTILNERGEPSWTSIYHKRNVNGWFYSYIYRLLTKRTVLGEYVTSDGRILATDFYPQAVTAEKFNLAQAALGMRKGNQKRTGTNRNRNLLSQLVVCSECGGGAHFNHTTDTVQKYTKVSGEVVNYRRKTYRKMRCDRARRKHNCDNQTILNYDVIEKTVLDELLPLLVDKPTNNRAANELSEKIAELARLKDANQSRLDNLIDAVADGGSKALVQRIEKLEADMERQAAEIDEWQKQLAIELAQPSNDDDIALVDSLRDELISDDDEIRTYTRGRVNIALRRLLHRIDILPNDTFRIWSNENAWWLFDDAGTLLEGEQTLAAQSAHQIFPLVL

SEQ ID NO: 21225 - protein, 554 aa, synthetic construct
MIDCLIRKDEKIMQQLKQKRVGIYVRVSTEIQSTEGYSIDGQINQIREYCDFNNFIVVDVYADRGISGKSMNRPELQRLLKDANEGQIDSVMVYKTNRLARNTSDLLKIVEDLHKQNVEFFSLSERMEVNTSSGKLMLQILASFSEFERNNIVENVFMGQTRRAQEGYYQGNLPLGYDKIPDSKHELMINQHEANIVKYIFESYAKGHGYRKMANALNHKGYVTKKGNPFSTSAIAYILSNPFYIGKIQFAKYKDWNEKRRKGLNNNLVVADGKHSPIISQELWDKVHSRMKQVSQKPQVHGKGTNLLTGIVHCPQCGAPMAASNTTNTLKDGTKKRIRYYSCSNFRNKGSKVCSANSVRADVIEKYVMDQILEIVKSDKVLKQVVERVNQDSQIDMAALNHDIAYKQQQFDEINTKLKNLIQTIEDNPDLTSALKPTIHQYETQLNDITNQINQLKQQQNQEKPSYDTKQISNILRHIFQNIESMDKAQLKAFYLTVIDRIDIRKDGSHKKQFFVTLKLNNEIINQLFNNTSLDEVLLSTSSLFLPQILYFQI

SEQ ID NO: 21226 - protein, 445 aa, synthetic construct
MKQAIGYLRQSTTKQQSLAAQKQTIKVLAEKHNIQHITFYSDKQSGRTDKRNGYQQITELIQQGQCDVLCCYRLNRLHRNLKNALKLMKLCQKYHVHILSVHDGYFDMDKAFDRLKLNIFISLAELESDNIGEQVKNGIKEKAKQGKMITTHAPFGYHYHNGTFTIDTVKAPTIKAVFNYYLQGYGYKKIAQYLEADDKFINRKPYQVRNIILNPNYCGRVINQYGQYENMFPAIVSTTIYEEAQVTRTQKQVKRKPSENQLKQKIKCPYCYSTLTNMTVRKPDHSLRYYVCPQNMNNARFVCEFKGINAQELETSVLTTCQDFFQNQQLYSKINQTIQQQLKRQRDIETKTTLNHEQLIEKLANGKIDSETFREQMQSLRQQSKPITSIHTHQIQKALQNVIQQRFTLNMLYPYIDEIHITKNKILTGIYFKNEPLNIVNQTAQ

SEQ ID NO: 21227 - protein, 558 aa, synthetic construct
MKGKIALYSRVSTSEQSEHGYSIHEQEQVLIKEVVKNFPGYDYETYTDSGISGKNIEGRPAMKRLLQDVKDNKIEMVLSWKLNRISRSMRDVFNIIHEFKEHDVGYKSISENIDTSNASGEVLVTMFGLIGSIERQTLISNVKLSMNAKARSGEAITGRVLGYKLSLNPLTQKNDLVIDENEANIVREIFDLYLNHNKGLKAITTVLNQKGYRTINQKPFSVYGVKYILNNPVYKGYVRFNNHQNWAVQRRSGKSDKNDVILVKGKHEAIISEEVFDKVHEKLASKSFKPGRPIGGDFYLRGLIKCPECGNNMVCRRTYYKTKKSKERTIKRYYICSLFNRSGSSACHSNSINAEVVERVINVHLNRILSQPDIIKQIASNVIEELKQKHSNQTEIKYDIDSLEKQKAKLKTQQERLLELFLDDQMDSEMLKAKQSQMNQQLEVLDQQIKEAQQANQSQDEIPNFDKLKGRLILMITRFSVYLRKATPEAKNQLMKMLIDSIEITTDKQVKLVRYKIDESLIPQSLKKDWGSFFMPKFQFEIYGQNDYFIDQITTFTT

SEQ ID NO: 21228 - protein, 556 aa, synthetic construct
MAMMNEMEYRTIGSALAGGYRAAVYCRLSKDDDLQGESASIANQRDMLEKYCEKQGWEVVAVYQDDGFTGLNMERPDLQRMLRAIERRQINLVITKDLSRLGRNYLQTGHLIEDFFPRNGVRYIAMNDGIDTLRDNNDIAPFKNILNEMYSKDISKKVHSSYLLKAQKGQFTGCLAPFGYRKDPEDKNHLLIDEETAPIVRLIFGYALNGHGPNYIRRRLEEEKIPCPTWWNRERGLRNTRTKWEKKDPENGRYMWDFSVIKDLLMNPVYTGAIASQKKDYRFKIGTIGEKKPEDWIVVEGQHEPLIDRMSFDIVQNKLKSRQRPGQTDEISLFAGLIKCGECGKSLTVRYTNAKHPQRIYSCKTYNAFGKNHCTQHRIDYDTLYSHVLRKIRECARAALMDGEAVADRLTNTCEAEQREQREAMERSLTRDEERIEVLDKMVMRLYEDMIAGRISEQNFNTMLEKTQTEQTELKTKVSEGRKRLSDEVQLANDAKQWVEAIQEYANITELDAATLNRLIKEIVVHERIDEDKTRHISIEIHFNLKPIPEVEQVSA

SEQ ID NO: 21229 - protein, 537 aa, synthetic construct
MLRQTTQNLITALYPRLSHEDELQGESNSISNQKRILETYAKQNGFTNLCWYTDDGYSGANFQRPGFQAMLADIEAGKVGTVIVKDMSRLGRNYLQVGMYTEMLFPQKGVRFIAINDGVDSAMGDNDFTPLRNLFNEWMVRDTSKKIKAVKKAKGMSGKPVTSKPVYGYLMDEDENFIIDEEAAPVVKQIYQLCLAGNGPTKIARMLTEQEIPTPGTLEYQRTGSIRRYHPGYECKWATNTVVHLLENREYTGCLVNFKTEKPSYKMKHSIDNPIEKQAIFENHHEPIIDLQTWERVQELRKQRKRPNRYDDVGLFSGLLFCADCGHVMYQQRYQTDKRKQDCYICGSYKKRTADCTAHFIRTDLLTAGVLDNLRKVTAYAQKHEARFVKLLIQQNEMGGKRKQAAATKQLEQVQSRIAELSRYIKRLYEDNVNGKINDERFMEMSADYEAEQRELKEKAAALQGELDKAQEATVNAEKFMNVVRKYLSIEELTHTLLREMVEKIVVYECEYDENEVRHQRIDIYYSFVGKIDLPEE

SEQ ID NO: 21230 - protein, 514 aa, synthetic construct
MPQVRVIQPISEQAKKLRVAAYARVSSDSADQLNSFATQVAYYTDFIQSKDEWEFAGLYADEAVSGTTADKRDDFQRLLADCRAGKIDRILVKSISRFARNTLDCLQTVRELKQLGVAVEFEKEGIDTGNMGSEMLLSILGSAAQEESLSISKNLKWSYRRRMKSGDFITSKDLLGYFFKNNTLVPNPKEVPIVEYIFNSYLSGKGTDEIADELNAANLKTDKKPSGRWHSTMIRYILSNEKYIGDSLVQKRYTPEDLPLRQKRNNGELSQYYIQNSHPAIISRETFEAVQQLLNRRRKRHPPSVEMQQTPLRSTMQCALCGSYFHKHKSNGENFWFCALHRKSKDLCPMPNIREQEILMAFLSMYNKLLDNIDILSTMMNQLLELQAKSVCSRPDIMDLNEKISELVTQNHSLSRLQAKGCIDSAIFIERSNRNNKLIEELRQELRQRQEPDDTSSAIEGTRLLLDLLEGAKPMLEFDPSVFQSMVKQITVYQEKLCFQLANGLVLEERRAQS

SEQ ID NO: 21231 - protein, 535 aa, synthetic construct
MVQKTVTEIPANPLMGDLRKRKRKLRVAAYCRVSTEEEEQQNSFEVQVAYYTDKITHHEGWQLAGIFADDGISGVSTKKRDQFNKMIELCRKKKIDLILTKSISRFARNTLDCIKHVRILKSWGIPVIFEKENIDTSNMNSEMILTCLSSFAQAESESISGNVTKGIRMGYRQGRFSFRYKNFLGYRKGPDGEPKIVPEEAKIIRLIAQNYLNGDSLRTIKETLESMGVPTATGNQNWSTEAIQRILQNEKYMGDVLLQKTYTADFIEGKVKKNNGELPQYYIKDNHPAIIPREMFYQIQEEIARRKSKKPANAKKAKTNRGRFTSKYALSERLVCGNCGCYFRRVTWSIHGRKQIVWRCINRLECGPKACKDSPSLKEDELYSAILKAIRSLVQGHQEEMAATLQEALIHCIGRENAAINPLVIENRLHELDKDLDRLLTMDGSEIVDLRIKQISDEMLQLRQMKKRAELDAQQDMGRENKAKEIMAFISAEYLDLTEYSDTLVYRVIERVTVLSKEEIRIRFVGGFEITQPLH

SEQ ID NO: 21232 - protein, 525 aa, synthetic construct
MSKSTLKAALYIRVSTEEQKKHGYSLSGQAEELKEYAKQKGYEVFDVYSDGGYSGKNFNRPEVQRMFRDMSNNKFDVIIVWKVDRISRSNKDVLSLIDDELKPRNMKLLVKTCDIDSSTTNGYMFISLLGTFAEYERAVIIERVTAGMEKVARDGEWNGGKVLGYDSEDKQLVINEEESKIVKEIYNMRAEGLGYKKIADNLNSKGKKTKKDNSFSIPAIKLILENEVYIGTKVWGKYRNWEEKRRGGKNNSPIKVENKHDAIIDIELWNRVQEIKRINNNTYSTNRNFNGNLFLTGLLKCPVCGAGTVMSKTKKRNGNGYHIYYMCQNYHSKGKTVCKPNLIKKEIVENKVLEAIKEVICDPDLINEVITKLELEKKSGVADLTSNLALLKREIKKYKEEQLNLDKQLLCGLKIEHYNRVSDQIQDRLNELNQSIENIERQIERNNLNNFITKEIIIDTLKNFDNLFEKANGEEKKLLIRSLIKNVEMEKDRKEIKHIAFWFAEGNGPKPPNGLPPSKVRRTVS

SEQ ID NO: 21233 - protein, 515 aa, synthetic construct
MKTAIYLRKSRADLEAEARGEGETLAKHRSTLLKIAKEMNLNVLAVREEIVSGESLVKRPEMLALLEEIEDNKYDAVLCMDMDRLGRGGMKEQGIILETFKRSNTKIMTPRKTYDLNDEWDEEYSEFEAFMARKELKIITRRMQRGRIASVEAGNYLGTHAPFGYDIHRLNKRERTLTLNSEEASVVRMIFDWYANEDMGANAIRSKLNDLGYKSKLGNEWNPYSILDILKNNVYIGKVTWQKRKEVKHPDTVKRSCARQDKSDWIIADGKHEPIIPESLFEQVQEKLNSRYHIPYNTNGIKNPLAGIIKCAKCGYSMVQRYPKNRKETMDCKHRGCENKSSYTELIEKRLLEALKEWYINYKADFEKHKQDDKLKETQVIQMNEAALRKLEKELVDVQKQKNNLHDLLERGVYTVDMFLERSNVVSVRITEITSTMENLKKEIKTEIKKEKVKKDTIPQVEHVLDLYFKTDDPKKKNSLLKSVLEKAVYKKEKWQRLDDFELVLYPKLPQDGDI

SEQ ID NO: 21234 - protein, 579 aa, synthetic construct
MLKVAIYSRKSKFTGKGDSVENQIEMCKQYIMNHLEGDVDFLIYEDEGFSGSTINRPQFKKLIQDIKLKKINYLVCYRLDRISRNVSDFSSTLELLQNYNVSFISIKEQFDTSTPMGKAMIYIASVFAQLERETIAERVKDNMLELAKNGRWTGGKIPLGFTSKRKKYRDKSGLEREFSILEINKEEMDFVKFLYEKYLEVGSLHKLEVYMTENQIKSKNNILFEKSTLKIILQNPIYVKANAAVIEYLESNGWNIYGEADNIHSLLTYNKTRQVIRNGKRTKSLNPESERFASVSNITGALEPDLWLKVQSQFDRNKDTFPRLGKTHNALLTGKLKCGRCKEYMLVQHGRVSKLTGEKLFYYVCSLKRKSHKKFCDNKNAKAAELESLVLLSLKKLGNEQKEFMDRLKENYNSKLKDDSKSEKMLLDKALTEKKNQIDNLLNMLSKSKDIEDVMIDKIKSIKNECIEIEKRLTVLDDESKKDKVEKINLDLIENILCDCAVIDELPRVKQKQIINTLIDVIYWYGDKNNNGKVFIKFIGSDKDDFEEIELPDIDFSNTMLQFCSPSTRKTYDLLLPLR

SEQ ID NO: 21235 - protein, 523 aa, synthetic construct
MVVSRNVTVIPAIKRVGNNKNSESKPKIRVAAYCRVSTDSEEQASSYDIQIEHYTNYIKKNKEWELAGIFADDGITGTNTKKREEFNRMIEECMAGKIDMIITKSISRFARNTLDCLKYIRQLKDKNIAVFFEKENINTMDSKGEIMLTIMASLAQQESQSLSQNVKLGIQYRYQQGEIQVNHKRFLGYTKDENKQLVIDPKGAEVVKRIYREYLEGASLLQIARGLEADGILTAAGKAKWRPETLKKILQNEKYIGDALLQKTYTVDFLSKKRVKNNGIVPQYYVENSHDPIIPRDLFMQVQEEMVRRANLRGGKGGKKRVYSSKYALSSIVYCGHCGDIYRRVHWNNRGYKSIVWRCVSRLEEKGSECTASTINEEILQTAVVKAINELLANKEPFLSTLQKNIATVLNEENDNATVDIDGKLEELQQQLLIQAKSKNDYEDVADEIYRLRELKQNALVENAEREGKRQRIAEMTDFLNEQSCELEEYDEQLVRRLIEKVTIYEDKLTVEFKSGIEIDEEI

SEQ ID NO: 21236 - protein, 520 aa, synthetic construct
MKKITKIEGNLANSFIKPKNRVVAYCRVSTDSNEQLVSLQAQKAHYETYIKANPEWEYAGLYYDEGISGTKKENRSDLLRMLSDCETGRIDLIITKSISRFARNTTDCLEMVRKLIGLGVHIYFEKENINTGSMESELMLSILSGLAESESISISENTKWAIQRRFQNGTFKISYPPYGYQNIDGQMIVNLKQAEVVKYIFAEVLSGKGTQKVANDLNQKGIPSKRGGRWTATTIRGILTNEKYTGDVILQKTYTDSHFNRHTNYGEKNMYLVENHHEAIISHEDFEAVDAILNQRAKEKAIEKRNSKYLNRYSFSSKIICSECGSTFKRRIHSSGRKYIAWCCSKHISNITECSMQFIRDEDIKTAFVTMMNKLIFGQKFILRPLLNGLRNQNNAASFRRIEELETKIENNMEQSQMLTGLMAKGYLEPALFNKEKYSLEAERERLLAEKDQLTRSVNGNFAKVEEVDRLLKFATKSKMLTAHEDELFENYVEKIIVFSREEVGFELKCGITLKERLVN

SEQ ID NO: 21237 - protein, 550 aa, synthetic construct
MNRQSTFSTIRKSTLAFEEAKITALYCRLSRDDELAGDSNSIVNQKAILKKYAEDNGFRNIEFYVDDGVSGTTFDRPDFNRMIADVESGRIGTIIIKDMSRFGRDYLKVGYYTEIMFPEADVRFIAINNGIDSANQADSDFTPFLNIINEWYAKDTSKKIRAVFKSKGQSGKPLCTNPPYGYIKDPEDKLHWIIDEKAAEVVRDIFRLCMAGFGPTQIAKQLEKRCIDTPTVHLRKMGINTPARPPENPYAWSARTVADILAKMEYLGHTVNFKTSKKSYKSKVKIMNNPEEWLVFKNTHEAIIDEGTWETVQKIRDGKRRPSRLGEMGMLSGMMFCADCGAKLYQVRGKGWTHDKEYFVCATYRKKKGMCSSHQIRNVVVEQLLLEDLRRVTSFAKDHEQEFIRIVMNNSEKELAKELRQSQKEYEQAQTRIADIDKIIRKLYEDNVMGKIPEERFYKMSAEYEAEQKALEEKITELKHTIDTANEQSLNTDRFLALVKKYTEITELDAEIIREFIDKIIVFKAEKVDGRRTQRIQIFYNCIGAIDLPN

SEQ ID NO: 21238 - protein, 546 aa, synthetic construct
MIAAIYSRKSKFSEKGESVENQIEMCKEYLRRNYSKVEDIRIYEDEGFSGGNINRPEFKKLLIDAKKNKFNVLICYRLDRISRNVADFSNTIEELQKHNIDFVSIKEQFDTSSPMGRAMMNIAAVFAQLERETIAERIKDNMLELAKTGRWLGGTPPLGYKSEAVEYSNQYGKDKKMFKLSIVPEEIETVKLIYKLYLEKRGFASVATHMCKNKYKGKNGGEFSRATVEQIIINPVYCISDENIFKWFKEQDTTTYGVPDGMHGLMVYNKRKESGKKPNSIDQWIVSIGRHEGIIPSDMWIKCQDILRENKAKTSPRSGTGNKFLLSGMVVCGECGSGMASWSHYNQKRNFMERYYRCNLKNRASNRCSNKMLNAYKAEEYIENYLLGLDIGSLISTYNEKDKPKADKDSIVKKLSKLKKQVDDNNKIIKGLVRKLALEENIELIQTLKEEIGDTKIENNELQKQITELTNSIEDYEVKEDFVKMIEEALVNFKKFYKLVDVDSKRILIKSLVKNIIWHGENETLEINPLISNKSTPQGIVRRRNY

SEQ ID NO: 21239 - protein, 534 aa, synthetic construct
MSRRKPKESAPAMPSKRAAIYTRKSTGKGLDRDFNSLDAQREACEQYIKSQAHQGWQLVETHYDDGGFTGANIDRPAFARLLRDVDAGRIDIIVVYKLDRLSRSLLDFANLISRFNKTDTAFVAVTQNFSTADAIGRLTLNILMSFAEFEREMISERTRDKVAGSRKRGKWTGGPLPVGYASRDKRLVVVEREARIVREIFARYLRGDSIFEIARYLNESGRRKPGRTSRTGHVLAKREWDKGSVLRALKNPVYAGFMRFGGELFEGEHKAIIDRESFEQAAARLAANCMSSAPKVPRDDYLLSGRLFCVLCGSAMTPKSTTKRRTGRLYRYYQCVVKDKSGHDACRARPLPAAGIEAYVVERIRVVTAGGALARDVAARVEAHAARRRAELVAERTARASEIAALSADGRALLDTLVGLDAPARRLVEERLGEIGRTVAEAERELAEAERALLALDEQQTEAQWTASTLEHFADVWKVMTPGNRIRLVQALIRRIEVNEPRQEIRVVLHDLEFEHGEDEHAEAGTAQATEAHS

SEQ ID NO: 21240 - protein, 452 aa, synthetic construct
MKAAIYIRVSTQEQVENYSIQAQTEKLTALCRSKDWDVYDIFIDGGYSGSNMNRPALNEMLSKLHEIDAVVVYRLDRLSRSQRDTITLIEEYFLKNNVEFVSLSETLDTSSPFGRAMIGILSVFAQLERETIRDRMVMGKIKRIEAGLPLTTAKGRTFGYDVIDTKLYINEEEAKQLQMIYDIFEEEKSITSLQKRLKKLGFKVKSYSSYNNWLTNDLYCGYVSYADKVHTKGVHEPIISEEQFYRVQEIFSRMGKNPNMNRDSASLLNNLVVCSKCGLGFVHRRKDTVSRGKKYHYRYYSCKTYKHTHELEKCGNKIWRADKLEELIIDRVNNYSFASRNVDKEDELDNLNEKLKTEHTKKKRLFDLYISGSYEVSELDAMMADIDAQINYYEAQIEANEELKKNKKIQENLADLATVDFDSLEFREKQLYLKSLINKIYIDGEQVTIEWL

SEQ ID NO: 21241 - protein, 560 aa, synthetic construct
MALMGAPTKRVACLYRVSTKGQLLGDDIPTQRRSCMEFIERQPGWVFVKEYIEGGVSGFKVSAKKRDEIQRAKAAAEKGEFDVLLVFMFDRLGRRDDETPFVLKWFVQQGIEMWSVSEGQQKFEDHTDDLINYLRFWQSSGESKKTSMRVTENHNQMGEDGLFSGGTAPYGYQLIPSGVYNKKRKELLKRAIEPETAAIVDELYSLAEYMGSNRIAKHMNEVRDVPSPTGGQWTSGVINYILRNPIYKGYPAIGKRRSKMGVFAMQDPNEWILAKEQVQELVIIQEDKWDRVQLMRSSKSPKKKSGEERGYHINISKSPLLLVGLINCGYCGAPLTTTYNRKKYKLADGNEVIQNYPKYRCSGKAMGKSCDGQTLYSQNRIESAVLDEIDIYLDQLKQVDFTAHINSFQKQNVAGDKKEQKKIASELEKKRKEVEVLTGEVTKSIMGQSSFKPELLNSLIEKADAELHELEIAYQKATAKIAEKQVEVQEMEILRKHIPVWKEVFKSSPIEKQKMMLAAIIEGVIVKRDDIEINVKLHLSHFISFGSETESRGRAHRWQR

SEQ ID NO: 21242 - protein, 502 aa, synthetic construct
MRIGCSVVACYSDKARSGASMFGRPGLADLIESAQEGGFDVLISEAPDRISRDMEDLAGIHKRLSFRGIEINCVNGGKQDSLQIGMHGIVGQMQREEGARKVKRGLMGVIDDGRNAGGKAYGYSPVLGKPGELNIVPAEAETVLRIFKAYAAGQSPRDIAGMLNRDGIPAPRGTRWSAPTINGNGKRGNGILRNPLYSGRIVWNRVRMVKDPATGKRVSRPNDSSEFRQADVPHLRIVDQALFDTVQARKETVGGEHASHAPRNKRVLSGLLKCGACGGGLVMIGHDRSGPRVQCSTHRESWSCSNSARYYIEKVEIHVIDALRLQFSDPTIIAEYVKAYRDERRRIESDARRNRSTTSQKLADTQSKLDRLIGKIAADLISDEEAKPLLATLRAEKERLTGDLATAGEATNVIELHPQAVERFRENIENLAAILSQGNVAPDSELIGSFRELVAEVIVMPRQKGEKYTIQIKGYLSSLLGADLSAVTMVAKEGFEPPTQGL

SEQ ID NO: 21243 - protein, 550 aa, synthetic construct
MATKARVYSYLRFSDPKQAAGSSADRQLEYARRWASEHGMTLDSALSMQDEGLSAYHQRHVKKGALGVFLAAIDEGRIPSGSVLIVEGLDRLSRAEPIQAQAQLAQIINAGITVVTASDGREYNRAGLKAQPMDLVYSLLVMIRAHEESDTKSKRVRAAIHRQCQGWIAGTWRGVIRNGRDPHWLELTKPGEFKLVPERAEAVRLAVRMFREGNGAVTIMRALEEQGLQITNGGNPAGQLYKIVRNRALVGEKVLEVEGQEYRLPGYYPPLLTAEEFADLQHVAGQRIRRKGTSEIPSLIAGMRVTYCGYCGSAMVAQNLMNRGRRADGQPQHGHRRMICVGNSQGSGCAVSGSCSVVPIEHALMTFCADQMNLTRLHEGGNREASISGQLAVARAAVADTTAKIEKVTDALLSAAAGQAPAAFMRRARELEETLAGQQAEVDALEHELSSAAATPPPALAQAWADLVEGVRALDYDARIKARQMVADTFERIAIYHRGIEPVQTRSWKGTIDLVLVAKRGSTRVLHVDRQTGEWRAGEELTTEALPAPL

SEQ ID NO: 21244 - protein, 593 aa, synthetic construct
MNDVQVIKANRNENRIRGRKVEILRVAAYCRVSTDSEDQLNSYKSQVMYYTDLIKKKPEWSLADIYADEAITGTQVTKREDFQRMINDCMNGDIDMVITKSISRFARNTLDTLKYVRMLKEKGIAVFFEDENINTLTMDGELLLVVLSSVAQQEVENISSNVKKGLKMKMQRGELVGFQGCLGYDYHKDTKSISVNEKEAEIVRYIFNRYIEGAGCTVIANELENLGYKTKYGSSRWVQSTVIGIIKNEKYKGDLLLGKTFTVDPISKRRLENFGEEDKFYIRDHHEAIISEEIFEEAQKILAKRNVNRGVHQEGQKRNKFSRKYAFSCMIKCGFCGGTLSRRNWHSSSAYTKTIWHCVTATKHGKKNCPHCKGIPEEVIENAFVKSYQLLCSDQHEVVSEFLQKVEDILKDDASLKRLPKIEKEMTDLQRRKEKLLDLRLDNNIDRDIYDKKNQELSEQLKKLQAEQLQLVELSKNQESTKTRIREFRKNLNSGELLESFDRVVFESVVERIIIGGYNDEGVEDPLKITFVYKTGIHSNLNAKDFKPKRKNAAAVHTDAELCSYASVEDNKLCLHSSSDTRRVCSVANQGVR

SEQ ID NO: 21245 - protein, 643 aa, synthetic construct
MAGIKEEKKIYLVGIYCRLSKDDGTDNESASIATQKSILADYVKKQGWHIAKTYVDDGYSGTNFQRPSFQNMIKDIENGLINCVITKDLSRLGRNYLDCGLYLEVFFPEHNVRYIAVNDGVDTLNKSAMDITPFRNILNEMYSADVSVKIKSAYRARFQQGKFMGTTAPYGYVKDPADHNHLLIDDKVAHVVREIFDLALAGNGIAKIRKHINKQHILRPAAYAVEQGATGYERHFEGNEENRYIWSENSVRGILRSPIYAGNLAGYKRIAANMKSKKRPSKLPEEWEVIPDTHEGIVTQEEFDTVQQLITSRRLPENKGGFENIFAGVIKCADCGYAMRAMSANRRKRPDIIDCVQYSCNNYGRYGNIMCTAHSIEARDLFNAVLADINRFADMAVNDEKAVRAIEKRLTDTDQSRAKALEKEQRKLNKRLAELDRLFSSLYEDKVMERITERNFEMMSGKYQKEQLEIEARLKEVTETLNDSYEKSQGVRDFLSLIRNYQGIKELDATIINALIDKILVSEREKLTDGTVRQEIKIYYKFIGFVGELHITPTKRWTALKPKNCTVCGVEYVPRSGISKYCPICAKKIQREKSNESKRRSRARDKQACIELSAKNDRLIWNSGRGVLNGRAICSQRWRFTVM

SEQ ID NO: 21246 - protein, 499 aa, synthetic construct
MKTAVIYARYSSDTQTEQSIEGQLRVCNEYAKNNDILILRTYIDRAMTGTNDNRPDFRQMIEDSKKHDFSIVLVYKFDRFSRNKYETTKHKKTLKDNGVKVVSATEYIPDSPEAIILESMIEGYAEYYSAELSQKVKRGMNETRQKGNFTGGTIIYGYKLENHKVVIDEEKAEVVRFIYDQYAQGVYVKDIIKTLTERGIFNRGKKFARNTVYNILKNEKYSGIYRHGNEVFTNMYPQIVPTEIYENVRRKTETNKYGTRSVEVVYLLRNKIKCGYCGSPISAECGTAKNGQKIRYYKCLGRKHQSGCKKSQVRKEILEKYVLDNVCEQMQRPEILDKMATYLLQVQENRIKQNSVLTNLIKEKRQTENTINNIMQAIELGGQSATVMKRMRELEEKLTDIEKRLTIEKSQTAFRLSKEQMIDYYKSALEKEPQQLINYFIKEIQLYDDKMIIIYNTPKTINLDESQGFSFYEKNVKMPYVIQNREYYGLKDFRLIMRI

SEQ ID NO: 21247 - protein, 525 aa, synthetic construct
MPSAFSYVRFSSGKQAKGSSEHRQRAMLGQWLEQHPSFTLSDLRFEDLGRSGFSGEHLDHGLGQLLAAIDSGAIKSGDVILVEAVDRIGRLEPLEMLPLFSRIVKAGVSVITLEDGHVYDRSSVNETSLFLLVAKIQQAHEYSNRLSRRINASYTARREKAKAGLGIKRETPVWLTTDGQLVPHVAPHIAQAFQDYADGLGERRICRKLRESGLEEFSKTNATTVRRWLKNKTAIGYWNDIPDVYPHVVDPALFYRVQQRLDAPKVDRAKPSAHYLTGLVKCAVCGRNYNYKQRKHTDPAMLCTSRARLAGEGCSNSKTYPVIVLDQVRKLTSLPFLQHAMESASSQADPSSQRLAVIDGEIGELSRKIGEATKALLALGFTPEIQESLEQLKTAREALEEERATLLLPQAEKLTAAQLEAFSNGLLDDEPMKLNHVLQTAGYSMVVHPDGSIDVDGKRFVYEGANRKKKVYKLRLLGEDRQWELPILSPEQAASLARSVDGGYLPPNSSEEIARYYEKVKHLVR

SEQ ID NO: 21248 - protein, 556 aa, synthetic construct
MKIAIYSRKSVFTGKGESVENQIDLCKDHCEVYFKNEELEYIIYEDEGFSGKNVNRPNFQRLLNDIKSNQISVLICYRLDRISRNVADFSSILELLQKYSVDFISIKERFDTSTPTGRAMIYIASVFAQLERETIAERVKDNMLQLAKLGKWSGGQLPLGYASEKVNYMNEEMKEKSFVKLIPIDEELEIIKFIYNNYLSKGSILNVVKDLNNNGYKSKTGVNFELTGVKRILRSSLYVKSSESTHEYLKSKNFNVYGKANGNGYLTYNKKTDKDNIIVAISGHSGIIPSIDWLRVQKKLDSNAEKSKQISNRSGTGSNNALFSGLLKCGKCGSNMVIKYNSKNKDGKSYIYYVCSNKEKQYLTNRCAAPNLRCDIVDPIIVETIQTYNKNIILKTYNDKLNDLLKNSDKQIVDNLKSQIIEKEKQVINLVNELSKTEMEDVKKIYRSQIAAMTTEVNKLKLILSSSEETHAHLKDSILEIKHLIQSFIDFNKTFNTTDDIDIKRTLLRNIIEKVTCDFTNKIFDVKFFCLDNMQLDSSSESMDCNLYTSQRRCNC

SEQ ID NO: 21249 - protein, 537 aa, synthetic construct
MKAAIYSRKSKFTGKGESVENQIELCKSYAKNNGYDDIYIYEDEGFSGGNINRPEFKSMMKDAAAKKFDAIICYRLDRISRNVSDFSTLIDELKVLGIDFISIREQFDTSSPMGTAMMFISSVFAQLERETIAERIKDNMYELAKTGRWLGGTPPFGFSSEPIYYLDSNSKQKKMMKLSPINEEISLVKLFFEQYLTLGSLGKLQKYLIQNDIKTKRNSPWDIKALQLLLRNPVYVKSSELVISYLSIKGATVFGDPNGNGILSYNKKDSKDKYKDISEWILSVSKHEGVIDDNLWIKVQRQLDKNKDLAPRLVNGSEYGVFNSVLHCAKCGGKMIQKQGHVSRKTGEILRYYICINKINPSDNTCDSKNIRLDKLEKSVMKELFKATDNKGSLIKAIEEYKKSLESEAVDKSSIKSYEKQIYQKELQVKNLIDKLSLNPNIYDLLSSRIEELNKEIKELKFKKFELENTNNNLKAAIKEINASTSMLLNFKKLWENADYSMKKLLINSFVDYISYNSDTQEVVIKPFCTNKKKGAL

SEQ ID NO: 21250 - protein, 542 aa, synthetic construct
MDLKGRKALGFIRWSSDKQTDRDSLPRQTKSIESAVKDTGAELVKTFIAQGESAFDGSHIKVIDELIAYARKNPTQRYVVFIEKVNRLSREQINDAENLWKRLLVDCDIYFTETKDYHDASTLNDIITRITMLIRAEEANKHSEQISKQVQQHHRRKIKNAIETGKACNLGSKPHWLDVVKDEYVENQYAQVVRLIYKLYLEGKGSTQISNYLNINEYKRWDGKPYHETTILDVLKNEAVNGWITSKKIDDDFNSLPKGNTKRIGLRRRSYPVIISDEDYERAAVLRAANNRNAKGKNSNFGRRTGSFVLSGKTKCGACGAAYCVSGKQVRCSNATGASSQCNARSVSKFLFEQVIVNALFSQISESELFRNKEGEDEKIEVLKGRMATLEAEYLMYQERYNQMKDKGRKPPVEFVFEMTDKNDELAEVKEQLSKEQATEKPIDFDEVKLQISEIFKPENVDLRLKVQMVVSVIVDSIKVKRSDKVIFLELVLKNGEKYLVTPTTRKKEGDRFVYYSNVNNLTHRMPLISKGDGKQSIISYE

SEQ ID NO: 21251 - protein, 578 aa, synthetic construct
MKPHAYLYARFSTKRQDKGSSLDRQYELTQEMCERNGWEVIETLTDKGQSAWKGDHLKTGELGRFKQRVEQGDIPSGSYLVVENLDRLSRQDVKKARRWIEEVTDAGVKVAVCSPAPGKIFDEASLSGENIVDLLQYLLEAQRSNKESERKSEFQHKAIAGFMDKARAGVVYSKRTPFWLKGEKNGQFEVDEARAAVVRQIYEWCAAGQGIHMIAKTLNATVKPWTVGHKAEKPSWKVGYVRDILTGWQAEGEYHVRTGPNRTPTGEVITNYYPRIVPPELVAAARSAMALRRGATGPNHSEAKNLFSGRIKCGHCQETMVRIVQRNTRGTQYEYLKCTRFNNGADCENTTMYRYDNFERAALDRILHLALDNSHFVKSDETGPLLGQVAQLSKEVELLEGERSNLMTFIRKYGEDEDTEKELLKLRPKLAEARKQLAEAQEALDRAKGNATPEEHLARVLEVKDAITSEDDETRQEARRTVRDAIRSIVSLVSCEREYVPGKKTPKRTITMFAAGNHLKYEFDNDGNQIGGWDMREFATSDEPIFKAFSEEISEPNEAQPLAKVALADVLRRSKSEP

SEQ ID NO: 21252 - protein, 510 aa, synthetic construct
MTPTDVPATSRPRKRASLYARLSVAADAENLSLDGMIRDMRALCDREGFEEVALHIDDGRSGGRRDRDEFQAWLNDARTGACDVLVNPVTDRLTREGLNVAATILDVVEGKDPATGRLAHPPVRLIDCNGLDSLHGDAFRFRFVIQAEVGRAERERIRSRSRKRARNLRRAGRWGGGTPPFGYRAIANPDGPGWVLDVEPKEAKAVQEAAEAVLKNPPDPLTRVVRRLNHQGVPPRRAKAWSRVTLKRVLTGDHILGRVSQNGRLLRDEEGEILAPFPAVLSLSQVSALRDRLKPKGGTSNGGGHPARVLSGLLSCHSCLSDLIVHHASVRTRDGKQKVEGKPPRVSYRCESRSQGRVCEQPVTVTAGPIEEFVVRLYLDTVGSFPMYKERTIVSGLEELASVEEEIKEALADLATAADAETFARLQKLQARQAELSTRDTGRRSEMVATGQTMAEFWEGALIDDRRELLESAFDELIVGPGRRGPKGFDPERLSYRWAERDDVAFQESI

SEQ ID NO: 21253 - protein, 477 aa, synthetic construct
MARKVGVYTRISRNDEGESLGVARQQQDCERLADLQSWQVVKTYEDNDVSAFKRNVVRGEFELMLRDLRAGLLDAIVSYDLDRLARQPRDLERLIEIFDERPSLEFATVTNDINLGSPDGRTMARIMVAFANKSSHDASRRIKRKHLELAQQGKDSGGPAPYGWRKDDRTKVDPVAAEAIREAQREILAGVRIGTIRTRWQQQGLGNPRAGTKRMAHHHVEQILTSPRLVGYRTYHGEILLGEDGEPVKGNWERINTLEEWEAVCAVVAERKQKHPGKSLARKYLLSGIARCGLCKTKIRGQNNSRWEPGSKATRYTYQCSVVNGGCGKVSRTGEPVDRLIAQLVLEEQRTRAAVTTIPGHQRWSREDELEQVTHDIAQLVEAERSKQITVATLLQLLPAKERLRDELKLERARFYKEQKQAEAKGEAANLTVEEFFALPIERQQEIVLHSLSAVIINPAGRGHRKFDPSLIEPVWR

SEQ ID NO: 21254 - protein, 596 aa, synthetic construct
MLGIYVRLSVEDEESNSIQNQIDEALKYAKLNNYEDSQIIIYNEGEGVKGSIPIKQRSELSRLVQDIKSEKIKIVYTRKQNRISRKLKILDEFLTIIEKYKTLIYFGDKGLLDLSLPASKMVLQVFGAMDEFAPNNQSFETKRSLQNRASTGKIWGRLPYGYISVDGKPVIDEYEASVIRRIYNESLKGSGTRKIAKGLNEDGIDTKSKRLILQNPNKKDYKESRIINNKNGTVVTYNRSKSLWNQKTIYSVLRNRWYIGERTYNGVVYKLPKAIITKKLFNDVQSNLKKNTNNSGKDVKHKYLLKGLLICDKCGRFYNGVRKHNNNKNSSAKYIGNYYGCSSKRSINYECDNFGLSIPMVESFIIKHLLKDKSLIEHLKLVDEQDDSISAIKDDLNSFKEQLKEQEHIRNNIEDLLFKKGIDNTERFQIKLNNTELNIRGLLTKIQNTENLLERKINVNRVTNFKENQETFKPNWNFTQYQTAIKKLVDEIRILGAKDINDKKFFTFKIKYKDFDEYSIFTTRNPYNKWLWLNKVTKTPTQEDLEERERFIELINDTEKGDIKTFDDSLNKSKPEFYISKGDDILINKEDIIEFD

SEQ ID NO: 21255 - protein, 528 aa, synthetic construct
MARTVTAIPATRALHTGAPLGQTTLRRVAGYARVSTDHDDQVTSYEAQVDYYTRYISDHAGWQFVKVYTDEGITGTSTKHRAGFQQMVTDALDGKIDLIITKSVSRFARNTVDSLTTVRRLKDKGVEVFFEKEGIWTFDAKGELLITIMSSLAQEEARSISENVTWGHRKRFADGKVTVPYSRFLGYDKGEDGSLVINPEQAKTVRRIYNMYLGGMSIGTIARTLTDEPETFTAAGNKTWYYQSIRAILTNEKYKGDALLQKSYIADYLTKRQVINQGEIPQYYVTASHEAIISPAVWDFVQAEIAKGARDQRTKHRTRPFSSTLECSQCGHFFGSKTWHAGSKYEKVIWRCGHKYAGQEKCATGHISDQRLKDMLLEAIRLRFGSPTDTGVNQAVLDTLDTSDLEVEAAGLLAQINEVAKKLQSMIAHNARVAQDQQTYEKAFNASHEQHQALLADHAAVVAEIQNKNNRLAAYHYYMQETANLDLERLVFSPYLCVALLDKGTVDVDGNVTFQFRDGSTQVVAIKQ

SEQ ID NO: 21256 - protein, 496 aa, synthetic construct
MYGYNLKPCLTRRNTLKRMEQITPPPISASPLVKVAAYARISMETERTPLSLSTQVSYYQQLIHDTPGWTFAGVFADSGISGTTTNRPQFQEMLALARKGAIDLILTKSISRFARNTVDLLEAVRELKDLGVEVRFEKENISSTSADGELMLTLLASFAQAESEQISQNVKWRIWKGFEEGKANGFHLYGYTDSAEGTDVQIIEEEAAVVRWIFAQYMKKTSCEKMAAQLIAEGRVPHLADNKLPGEWVRHILKNPHYTGDLLLGRWSTPEGRPGRAVRNTGQLPQYLVENAIPAIIDRDTFTAVQTEIARRRELGARANWSIETVALTSKIKCVSCNCSFVRNVRNPKTQNSISTEHWICTERKKGRKTGCGTCEISDTALKGFIAQVLGIDAFDEDVFNERIDHIDVQGKDHYTFQYTDGTSSSHTWRPNLKKSSWTPARKAAWGELVRARWAEAKRLGLDTPRQAPTPPEALAKYRAVAKAEAERLRAERGER

SEQ ID NO: 21257 - protein, 556 aa, synthetic construct
MALAFSYARISSKKQLGGDGLRRQVEAAEKYALEHGLEIDTSLSDVASGFHQDHVKFGALGGFLELVNNGKIPVGSVLIVESLDRLSRADVLTAQSQLLDIIRSGIDVVTLADKYRYSRNNDFSQLIFSLMSMARAHDESQVKSVRGKAYLAQLHSDVKAGIKARVHHLPSWLEQTQIGTSKEYEFTLRESVSTVQKIFELYEKGYGIAKIAIWLNENGILTLQESRRSNPDPNKIWRRKVVGEILNSVAVRGDLAIGDTVVEGYYPAAVDPVTWWRVNDRYNNKSKKATNGRTGLGYTNLFAGISKCFHCGGPARVIGGGSGHRYITCEKIKETGELCTGKGKYGKTSLRYDILEKAVLDNVATYCHLPEIPTVSSDDLKRQVIEIQTGIADIDRRISNIIAMAEITDHPDDKTDLMTRLKALRSDKSRQTAEIERVTSEIRTLETVRDDFTTIHKTIEDERSKWDTFSGDDLFQSRSLVNSKLREIVSVVSIDAVDQSAYVSVAGATRIWEINAKGEVTRSTDFSNLSEEALVKMANNVGLKTSHEAIQRVKRI

SEQ ID NO: 21258 - protein, 506 aa, synthetic construct
MGWHNMKPNIKDVAIYLRKSRDDSDGQEDVLAKHESLLLEYAKSHNFKYKIYKEIGSSEYIDWRPEMVRLLTDVEQELYDAVLVVDLDRLSRGDLEEMGRISRVFRNSKTLVLTPSKTYDFNNEDQALINNFEMVFANHEFRMINKRMIRGKKQGAKSGRWTNGTPPFPYVYNRLTRELDVDPDKVKVYDLMKKMFLEDMRATYEIAWKLNELGFKTNRNGYWYENTVRRILINEVHLGKVVYGKTSGSVSKKRPNANGVQIKDRSEWIIAEGSHRSLKTEEEHQRILAILESRRFTPKGTRKNVQVLSKLIYCGKCKRVMSFTGKASGKRYVKTCLTTDRFGNRCHNRSLNVEVIYAQLFLDLEQYEQQLLNHEPKEEQGDSSTLQLALHNKQEELERLGKGINRIKDLFIDEVIDKSEMKKRIEKQQQLMQTKKEEIRSIEQSLAVMDNVRTDDDRLYAIREFKKAWNTEGISKKELNILSKQLIDRVEYIREGNNVQINIKFY

SEQ ID NO: 21259 - protein, 463 aa, synthetic construct
MITIGYIRVSSVLQAQTEALSQQKARVESCEVDKILVDVDSGSNFERKSFKELEQAIKKGQCKKVVVTRLDRLGRSVIGIKTFIDLCTANDVEIMALDDKIDTNSVSGRFHINMLASFGEMELDRIKERISHGHKYHRQKNLPYKAVFGYKKECDTLVLNYDEYICLIEGKKVITVAEFAREYIDIFLEKKTFKGTIKAMINKYGVIGFMSHSSLSNWLSNPQIRGILVYGRGHNNRYSNKDKWDYRGELFPSLLSQEEWDEIEIIFKNIAENRTNYRSTNNYAKPFGSLLKCSYCNGSAQTISGGKARNITGYQCVGYRTGKCQNNKWINHKKLRGLITKLLIEKAKEIVNTLEVEESETLEEKKLQSEIFNLKKISQPSTVILNAIKDLEFQLETFKLNRLNNRNKQSELQDKLINTFTNGEFYSELENNLTSQELKEFYRLFIDKISFKDGEIVSVDFLI

SEQ ID NO: 21260 - protein, 516 aa, synthetic construct
MRTAAYARYSSDSQRDASLDDQLRNCRQYCERQGWPAPTEYTDAATSGARNDRTGYLRLLTDATRYDVILVDDLSRLSRDSINVAQAIKQLSFQGVRLLGVSDGVDTSRKGHKLDVGLRGLMSELYLTDLADKTHRGLTGRALAGASAGGLPYGYRVTEIGQRAIDESQAVIVRRIFAEYLAGHSPRTIADGLNRDGIPPARARTWAMSAIYGDVKRGIGILANPIYAGRQVWNRSQWIKHPDTGRRVRKNRPPSEWITTEHPELAIITPALWQAAQARVKQAQPQRADATKGAGPGRPPRHLLSGILRCGDCGGPMVIVDRYRYGCSTHKDRGQAACPSRVRVSRSIAETALLAGIRESLLSEAAFQRFQRGVTAELKRAMPDPEAARRRVVDAERVQGNILAALRAGIITASTKAELIDAERLVAAARAELAALQSFQPSQILPRAREAWRRMVSKLADHARNLPEARNALRELLGENVMVRNENGELFAEIAGSDCQLKLVAGAGFEPATFGL

SEQ ID NO: 21261 - protein, 481 aa, synthetic construct
MNAINKVAIYVRVSTNVQAEEGYSIDEQIDKLKSYCQIKDWTVYDVYKDGGFSGGNINRPALEKMIIDAKKKRFDTVLVYKLDRLSRSQKDTLFLIEDVFSKNDISFLSLQENFDTSTPFGKALVGLLSVFAQLEREQIKERMQLGMIGRAKSGKPMMFTNVSFGYTYSPKTQQLTINQAEAVIVKQIFNEFLGGMSPLRLMAYLNENNILRNGKEWNYQGIQRILRNPVYIGKIKYNNVIYPGLHEPIIDEESYYKAQKLLDARQDEMRIKGKNRQFKAKYMLSGTAKCGYCGAPLRIKIGNKRLDGTRLKVYQCCNRYPRKYAVVTYNDNKKCNSGNYQKEDLEQYVIAEIRKLQLKPEKIDKLFNKVSKIDTVQINKQIASIDNKINRLNDLYLNDMIDIDKLKADAEKFKEQKRVLEKELDKDLKIQEQEKNKEDFKKTIGFKDVTKLDYEEQSFIVKSLIDKILVKKGFIKILWKI

SEQ ID NO: 21262 - protein, 454 aa, synthetic construct
MIILIRAAIYIRVSTQEQVENYSIEVQRERIRAFCTAKNWDIYDEYIDGGYSGSNLERPGIKKLLNDLKNIDVVVVYKLDRLSRSQRDTLELIEEHFLKNKVDFVSITETLDTSTPFGKAMIGILSVFAQLERETIAERMRMGHLKRAEKGLRGNGGDYDPAGYTRQDGHLIIKKDEADHIKRAFDLYEQYYSITRVQETLKEEGYPIWRFRRYRDILSNRLYIGRVTFSGNEYEGQHEPIISLEQFKRVQTLLKRHKGHNAHKAKQSLLSGLITCSCCGEKYVSYSTGKSKDDESKRYYYYICRAKRFPSEYEERCMNKTWSRQKLEDAVIGQMKDLTVFKYHNQKKEKQINYTKLIKEIDKKMERLLDLFTTNTNISRQLLEQQMEKLNSDKEKLILKQQSSEQEISLSNEMITKTMKSFDTLEFKDRQILINKFIQEIQIKHENVEILWRF

SEQ ID NO: 21263 - protein, 537 aa, synthetic construct
MDRQMEYAARWAADNEMELDASLSLRDEGLSAYHQRHVKQGALGVFLRAVEDGQVPAGSVLIVEGLDRLSRAEPIQAQAQLAQIVNAGITVVTASDGRQYNRERLKAQPMDLVYSLLVMIRAHEESDTKSKRVKAAIRRLCQGWIAGTWRAPIRVGKDPQWVREVGGKFELIPERAAAIRLVVDMYKMGHGAVYTLRHLHGRGLAITDAGLPGASQLYKLLANPMLIGQKTVKLDGEYFRLGDYYPAVLTPAEFADLRNLAAQRGRRKGKGDIPGLVTGLGIAYCGYCGAAIVAQNIMGRRRMANGLPYPGHRRLHCVTYSSSAGCKVSGSCSVAPVEHALMLYCSDQMNLTRLLEGDNGVNALSAELAHTRAAVADLERQINRVTNVLITDEGQTPITLLKKLRDMEADLERKRDRSDALEHQAHALAIIEAPAAADAWSALVRGVKELDYDARMQARQLVADTFSRIVIYQSGFRPDSDDASIGIILVGKRGNTRMLNVDRQTGEWRTAEDFIQLDKTFAQIFHQAHRPHKCAQP

SEQ ID NO: 21264 - protein, 523 aa, synthetic construct
MHLEKIRCAIYARVSTDQQGDSIENQVSQCQEYISRLGQQYDYTNVIIYKDEAVSGYYTSVFDRVEMKKAIQDAKNNQFKLLVFKEVSRVGRDKQENPAIIGMFEQYGVRVVAINDNYDSLNKDNITFDILSVLSEQESKKISSRVSSARKQKARRGQWGGEPPIGYKVNRESKRLEIDPDFKDIPIKIFELYVEKGMGTFKVAEYLNNKGIKTKNGNRWSRETINKLLRNQAYIGSVVYGTRKNQLQREYDDHGKMSKKKVQIKINKTEWQIVEDAHEPLIKKDVFYAAQRILLSKSHNRAPRRAYHPLTGILKCGKCNEGMVCQKRTYNSKEYRYYICKTYHKYGRDVCSQTNVNADELERVILDSVRQRLDKLPNDPFVMVANKSKDIERIQKEIKVKQQNKDKWKKDQIDIFKQRDLFDEETYQQQMLDIKRHILLLDEEITVMEKQIESLMDQIAESSSLEHYLEEFRKLDIGGPGSMCTSVNRVDTKNRENYAADRYIRSHSLGVEYPIAEWIRFPL

SEQ ID NO: 21265 - protein, 545 aa, synthetic construct
MLRAALYARFSSENQRDSSIEDQLRQCRERAEREGRTVVETYSDRAISGSSMIRAGIQSLLADAQMGRFDIVLSEALDRISRDQEDVAAVFKRLRFAGIPIVTLSEGEINELHVGLKGTMNALFIKDLAIKTHRGQRGRVENGKAGSGRAAYGYRVIHQLDANGEPIRGERAIVEKQAEIVRRIFREYASGRSPKEIAFQLNREGVPGLRNRPWIDATIRGNPVAGTGILNNELYAGVLVWNRQRFIKNPETGTRVSRVNPESEWIRTEVPHLRIVDDELWQAVRERQRGISALYGPNHANTREGRARRLHLTNRPVTLLSGLLTCGCCGGRISMVMTDRYACRNHLRKGICDNGRTIRRDEIEARVLAGLKEKLVSSEAVAEAVRAYAKETNRLNRDRRAQSQTDQKALEKIERAIAGIMAAIEDGMYQPSMKARMAELERDKAEIIARMAQAPADVPDVHPNIASVYRRNVERFTEALNDPDGGREAAEALRSLIGEIVLTPGPKRGEVHAELRGELMGILAFATDHKSKQNIRFMPPVASCE

SEQ ID NO: 21266 - protein, 550 aa, synthetic construct
MTILDTPPTFRGLPPADDDAEKWLAYLRVSTWREDKISLDLQRTAIQAWERRGPRRVVEYVEDPDVTGRNFKRKIMGCIRRVEAGEIRGIVVWKFSRFGRNDMGIAVNLARVEKAGGDLVSATEDVDARTAVGRFNRRILFDLATFESDRAGEQWKETHQWRRAHGLPATGGRRLGYIWHPRRIPHPTDPGQWTIQREWYEVEERARDHIEDLYARKIGDGYPVPDGYGSLAAWLNGLGYRTGDGNPWRADSLRRYMLSGFAAGLLRVHHPDCRCDYTANGGRCTRWIHIDGAHEAIITPETWERYEAHVAERRRMTPRARNPTYPLTGLIRCGGCREGAAATSARRASGRVLGYAYMCGQSRNGLCENPVWVQRYIVEDEVRGWLAREVAADVDAAPATPEPVERDNRRAREERERARLEGEHTRLTNALTNLAVDRAMNPESYPEGVFEAARERIVKQKQAVAEALEALAAVEATPERAALMPLAVGLLEEWETFEAPETNGILRSLVRRVALTRGAKGKKGVEGSGETRIEVHPVWEPDPWADDAPQ

SEQ ID NO: 21267 - protein, 490 aa, synthetic construct
MYELKYAVYVRVSTDKDEQVSSIQNQIEICRYWIEKNGFEWDENSIYKDEAVSGTAWLERHAMQLILEKVRRKELDTVVFKSIHRLGRDLRDALEIKEILLGHGVRLVTIEEGYDSYYEGKNDLKFEMYAMFASQLPKTVSVSVSAALAAKVRRGEYTGGIVPYGYKIVDQKYTINEDEAELVKKMYELYDNGLGYMKIADAINDMGVPSRTGKLWAYPSIRAIITNAAYKGDYIMQKYAEVKVDGRKKMIINPKEKWVVFENHHPAIITRDLWDKVNNPKTDKKTKRRVAINNELRGLACCAHCGTPLALQQRMYKNKEGETRYYCYLICGRYKRMGARGCVKHSGLQYSDLRLFVLQKLKEKENDLEKVFNLNDTDKHQEKQKKLRKEKKELEIKRERLLDLYLDGGPIDKETFTKRDKNFEKIIKEKELEILKLDDVKALVVEQQKVKEAFELLEESKDLYSTFKKLITRIEVNQDGVINIVYRFEE

SEQ ID NO: 21268 - protein, 564 aa, synthetic construct
MSKLSKPKVYSYLRFSDPKQAAGSSADRQMEYAARWAAEHEMQLDASLTLRDEGLSAFHQRHIKQGALGVFLRAVEDGRILPGSVLVVEGLDRLSRAEPIQAQAQLAQIINAGITVVTASDGRRYNRERLKAQPMDLVYSLLVMIRAHEESDTKSKRVKAAIRRQCEGWVAGTWRGIVRNGKDPHWVRQVENGAFEFLPERELAIRTMIDLFLAGHGAIEIARILSERELYVSNAGNYSTHMYRIVRNRALIGEKSLTVDGEEFRLAGYYPALLTPDAFATLQEAMSERGRRKGKGEIPNILTGLSISSCGYCGLALVSQNTAIRPAKGRAFTRRLGCSGATFNTGCPVGGTCDARIVERALMHYCSDQFNLTRLLEGDDGAARRVAQLAVARQRAGEIEMQIQRVTDALLSDDGVAPVAFMRRARELEGELEQQHREIEVLEHQIAASNAHEIPAAAEAWAQLVDGVLALDYGARMKARQLVADTFRKIVLFQRGFTPFNNAPADRWKRSGTIGLLLVTKRGGMRLLNIDRKTGQWEAEDNLDLAPHHADEIPLPPTVQGMEC

SEQ ID NO: 21269 - protein, 553 aa, synthetic construct
MSTITKIQSYQRDVKQLRVAAYCRVSTNNIEQLESLENQREHYQKYISNQPNWQLAKIYYDEGISGTKLTKRDALKELLTDCHNHQIDLVITKSISRLSRNTTDCLRIVRELQQLNIPIIFEKEHINTGEMASELFLSIFSSLAQDESHSTAGNLRWAIRQRFASGKFHVSSAPYGYSIKDGNLVINHTEAKTVRQVFQRFLSGISASQIAKKLNQKQVPTKRGGQWRSNTVINILRNINYTGGMLCQKTYRDDQYHRHFNQGEITQYLIEDHHPSLINHRSYHRAQVLIKEAAQKHHIEVGSHKYQQHYLFSGKITCGYCGTVFKRQTRPHKICWACQQHLKSAQQCPVKAVSEKSLEAAFCNMINELVYSEKFLLRPLLEGLKEEANANSDGQLISLTKQIKTNDHKAETLTELMHASLLDKAIYVNQTAKLEQDTYQCREKIKQLNGQNTDSANNFEDVRALLRWCQQGQMLTEFDGTLFQEFVRQVVVNSSNEATFNLKCGLSLPEKLNKNATIDGHFYRDIIKQRYNDPIKQTEYLYSIIESEGDLIG

SEQ ID NO: 21270 - protein, 525 aa, synthetic construct
MGKVRIIPAHQQKGNSVQPQQSRQPFEQLRVAAYCRVSTDYDEQASSYETQVVHYKELIQKEPTWEFAGIYADDGISGTNTKKREQFNQMIAACKAGKIDLIVTKSISRFARNTIDCLKYIRDLKAINVAIFFEKENINTMDAKGEVLITIMASLAQQESESLSQNVKMGIQYRYQQGKIFVNHNHFLGYTKDAQGNLVIEPAEAKIIKRIFYSYLNGMSMKQIADSLKADGILTGGKTKNWQSSGVSRILKNEKYMGDALLQKTYTVDFLNKKRVKNNGIMPQYYVENDHPAIIPKPVFMQVQQLIKQRQNGITTKNGKHRRLNGKYCFSQRVFCGKCGDIFQRNMWYWPEKVAVWRCASRIKRSKSGRRCMIRNVKEPLLKEATVQAFNQLIEGHKLADKQIKANIMKVIKNSKGPTLDQLDKQLEEVQMKLIQAANQHQDCDALTQQIMDLRKQKEKVQSRETDQQAKLHNLDEINKLVELHKYGLVDFDEQLVRRLVEKITIFQRYMEFTFKDGEVIRVNM

SEQ ID NO: 21271 - protein, 544 aa, synthetic construct
MPAALAYCMASVNLVFAWADLRIYYTTISLVLERRTDYIMTKNAVIYARFSSDKQREESIDGQIRECRAFAEANEINIINTYIDRAMSARTDQRPSFLQMVKDSAKHLFDYVIVYQLDRFSRSRYDSAIYKHRLKKNGVKVLSAKENIKDDPSGILLESVIEGMAEYYSAELSQKVKRGMTENLLEGKWIGGIVPFGYELTSENKLAISPATGHLVSEIYNKCLSGVKTTDILSKLNSLGIKTQRGCNFTRNSLNRILKNQIYTGTFTWAGTSYPDYAPALITQEQYTAMQNLFESRKRKSNTARRVSPQYALTGKIYCGTCGLPMTGYCGKSHTGTTYYYYQCSSKNNKSEKAARSQIACDAKNISRDKLEKLVLDTTISILKNKDAVKCIADQCMTIQKAELEHKPAEQLRLESQIKEIEKRLKNSVKAVENGLISQTITNNIETYEKQLTELNAQLDGLKLETHIIPITEEAVIYYLNQLTERANKKDGYSLDTFDDFIRRVVVTGKRVDIYYNYTAVPNILENPAVKMLRGSSEDYLVTR

SEQ ID NO: 21272 - protein, 497 aa, synthetic construct
MVLRKKEEDQIEAVGYIRQSDEREDKEDISEQTQLRKIESFCDFHGFKLVKVFKDIDYSGFRIKYTKRPGLMEALEYVENRPTVKKFVFFNLSRLTRLRKDYQAIRETLEGLSIDICSASELLDFSTANGRFIAGVLVDMNEYYSDSLSDTMNETKRTNAEKGRWNGGPAPYGLKKNKDGFGFIEDFEVSYFIRKSFEMAKDGKGPYLISKWLNNQGFKTKTGREWAPRRVRYMLKNPTYAAMQKWKDKYYPLSECPELVSWDDFSYIQSTLFGESKVWKGRQRQMLSSILICPICGARMHSRYFNDRSNRKYVCSRKIETGDCKSPNLDQASLNAAVIKLLGGIAEEKFEPAHIIPELVGTEDKSLNSVRKLQDELSNIERAEQQVFDDYYLHQKINEEQYNNIIRRYEKRKIEIHQLLDKIPLPVSKSFGDYDDVLKDLAGAIDDLEDDDKRRSVELLVEKIVPGEPTLVHFKWGEVKEIVPTETKKYKSKLIIY

SEQ ID NO: 21273 - protein, 512 aa, synthetic construct
MAYAASWAAKRGMALDATLTLKDEGLSAYHQRHVKQGALGVFLRAIEDGRIASGSVLVVEGLDRLSRAEPIQAQAQLAQIINAGITVVTASDGREYNRAGLKAQPMDLVYSLLVMIRAHEESDTKSKRVKAAIRRQCEGWVSGSFRGLIRNGKDPQWVRLTADGWELIPERVAAVKRALELYRQGLGAGRAANVMHEEGFQLTEGGISGLQIYRTIKLPALRGVKRLNVEGEDYELEDYYPRILSDAEWSDLQHLAGQRLRRRGAGEIPGIITGVGLAYCGYCGTALVAQNIMKRRRTDGSIADGNRRLQCTSYSKNGGCTAGGSCSVVPIEQALIMFCSDQLNLQRLMQPSDDGQSVHRQLVAARVAVAKITGQLSKITDALLADESGAAPLAFIRKARELELQLKDAEQSVSTLEHEVVVMSAGAAQPVQAERWVELSEQVSVGDYSAREKVRQLVMDTFSRIVIFMRGVGASDRTGKFIDVQLFSRTGQHRLLRINRKNGEWVASEDWA

SEQ ID NO: 21274 - protein, 481 aa, synthetic construct
MNTINKVAIYVRVSTNMQAEEGYSIDEQIDKLKSYCQIKDWTVYDVYKDGGFSGGNINRPALEKMIIDAKKKRFDTVLVYKLDRLSRSQKDTLFLIEDVFSKNDISFLSLQENFDTSTPFGKAMVGLLSVFAQLEREQIKERMQLGMIGRAKSGKPMMFTNVSFGYTYSPKTQQLTINQAEAVIVKQIFNEFLGGMSPLRLMAYLNENNILRNGKEWNYQGIQRILRNPVYIGKIKYNNVIYPGLHEPIIDEESYYKAQKLLDARQDEMRIKGKNRQFKAKYMLSGTAKCGYCGAPLRIKIGNKRLDGTRLKVYQCCNRYPRKYAVVTYNDNKKCNSGNYQKEDLEQYVIAEIRKLQLKPEKIDKLFNKVSKIDTVQINKQIASIDNKINRLNDLYLNDMIDIDKLKADAEKFKEQKRVLEKELDKDLKIQEQEKNKEDFKKTIGFKDVTKLDYEEQSFIVKSLIDKILVKKGFIKILWKI

SEQ ID NO: 21275 - protein, 604 aa, synthetic construct
MAIAPYHKATCRAELTNRLWIRALRWVRYAPMAAVLSPEKPLRALLMSRISVDRGDSKSTSLQRQAEELTGWQESQGHALTHLVVDKAVSGSIDLAERPSLGPWLTEEGLRQWDVMAVTTQDRIGRNDIHFLSFVKEIIDREKQLVVLDDPSFDISTEDGRMIAYIKACQAAKELRKIRERCTNTARWLRNNGCFKGGNTPFAYLPVRIRGGVFGGRLTLVPDPEYAKILKWICEQMREGISPQSIAMQLNAQGVLTWRDRLRELRMRDAAERGEEYTGLEVQGHLWNPNVVANIVRHPSVAGFQAYKHKIHEDENGEPLMCTEFPHLSETEWRTTVVALDARSKPRPIEMPRILVGLGDISLYAGIGSCRNCASPMYLHEATKKLKYRTAVYRNYRCHAAARGVKCDHRAAVKKDEYEDFFEDVLLGSAGDLPEVVKIWTPGEDHTEELERAQRRLAQLETDYADGVYDDDPKAYHRIRTLINGKIVKLDLLPHRPSQYIYRETGRTWGEKWKTMNDLDRRAFLVQVGPRMVVWKEGHNPDHPGLMADLGDMKELVKVAGALEADLQHPALRQHALSNVSKRQFMSMVKDGILDQPRPALRVA

SEQ ID NO: 21276 - protein, 544 aa, synthetic construct
MRIAIYARYSSDLQDERSIDDQVALCRDVMAKRFGGTDAGVYADYAISGAHMANRPQINQLVSDAKGGKFDAVFAEDLDRLSRDQEHIAAIYKQLTYHQVKILTVADGEINEMHIGLKGTMSAMFLKNLALKIRRGTTARAKAGSNPGGRCYGYDTFHEIGADGKAIRGKRRINEDQAKVIRRIFRQYANNVSPRAIAQGLNDDGIPGPTGGQWTASTINGNKARHHGMLFNELYIGFQIYNRVQMIKHPDTGKRISRPNLPTDWVVTEIPELAIVDRDVWDKAQARKAAISELYTVSKKRRPKHPLSGLVRCGSCGGSFTIINRTALGCSARRERGTCDNAHRIKMEDLEKRVFDGLREKLLTPAAIEAAIEEYHKERARLRKLARANLQTYTKKRTTLRGQIENMVNAIANRPDSTALVNKLAELEDDLAEVERKLRDADDGPVIEIHPNALDDYKRAVTELAETIRTTDAPNRAEATNLIRSLIDHIEVHPTDQKRETRVEVFGILEALKNLAGLPSGEVSAQCTVKVVAEEGLEPPTRGL

SEQ ID NO: 21277 - protein, 670 aa, synthetic construct
MDSYARLSRNQKGKLEKCEVQHADNREVIERLGAVLGEEISDPKLSAWNPKVRRPGWERVMKRVAARACDGVVVWNTDRGWRQSPDLEALFKLVEEFDSFTVASSHGRYDLSDYNDRYQLRQEVAHNQRNSDEASQRITRRFDTLRRKGIPHLQGRSFGFPGLDRTVPKEEALDEDGNDTREQVPAELVERERAALRSGTEAILAKVTQETVAEEWNAGGLRTVTGGLFSPAQVRDVLLRPRNAGLIEHDGEIVGRMRGEPIVDPDDFTRLRTLFAGRTRGRQPGNTYVGSGIATCPKCGKKLSARPHVGEYPDGTRRRQYNCTKARGGCGKVAADMRAVDREIRALVIARLSDKNHAAAIKAARALVSDRLAAVESEIRECEERQEAIAAKWGAKKMTEKAYDKANEPLLKDLARLYAEREELTGGNPEGPTEAMSPEEVAAKWDAADVGERRAMLGDALGRDTLCVYPSACKGFRTFDPKRVRIKPYNPKRDRAGIASVPAADRATGDGRDNVSTSDEKGPSMVIFSPGSGPLPTADEDTAAANLDAFVADVCARWDYTLVASRRRPEDDRDDGRYVWDLEFRRPNGKHHMCQAAMFGVPRDYAEGGDSLMFPEPRLYVDGESWVWDFAVGIAAAYFDRNPDDLNHPEHPDHDEWLRERSRGGSAPDA

SEQ ID NO: 21278 - protein, 553 aa, synthetic construct
MKKSAIYVRVSTTHQIDKDSLPLQKNDMINYSKFILGIEEYEIFEDAGFSGKNTDRPAFQEMFKRIKQGEFSHLLVWKIDRISRNLLDFCSMYDELKRYNCTFISKNEQFDTSAAMGEAMLKIILVFAELERKLTGERVTSVMLDRASKGLWNGAPIPLGYKWDKNIKFPVIDDEEKNTVEIIYGTYLKSESSSAVTKLLNTSGIKTKKDGRWTTKTICDVIRNPFYKGTYRYNYRVPGHGKIKDENEWIIIPNNHDAIISEELWNNCNKIMDLNANKNSARFRRTSKVHIFAGLLECGECNNSFYAKSDKTSLDGYTPSLYTCSGRYNHLGCSQKTISDTIIGNFTLNFISNMIKISKSKKKMNSEELESKLLKGNCFKDIVGIEEIKDIYNSIFHSQSNTFKPAKKSDFNSPITNIDSNSLESELKKQQRALDRLEDLYLFEDNDMSKKDYFLKKNKITDKIKVLNKKINETQSIDASVYNFKFFLDVTTLELSTKLIEGNIKVKELIQNVGRELIKDFINNLIDKIVVKDRQVLSLQFKNGLNVTFIYNS

SEQ ID NO: 21279 - protein, 537 aa, synthetic construct
MKAAIYSRKSKFTGKGESVENQIELCKSYAKNNGYDDIYIYEDEGFSGGNINRPEFKSMMKDAAAKKFDAIICYRLDRISRNVSDFSTLIDELKILGIDFISIREQFDTSSPMGTAMMFISSVFAQLERETIAERIKDNMYELAKTGRWLGGTPPFGFSSEPIYYLDNNSKQKKMMKLSPINEEISLVKLLFEKYLTLGSLGKLQKYLIKNDIKTKRNSPWDIKALQLLLRNPVYVKSSELVISYLSIKGATVFGDPNGNGILSYNKKDSKDKYKDISEWILSVSKHEGVIDDNLWIKVQRQLDKNKDLAPRLVNGSEYGVFNSVLHCAKCGGKMIQKQGHVSRKTGEILRYYICINKINPSDNTCDSKNIRLDKLEKSVMKELFKATDNKGSLIKAIEEYKKSLESEAVDKSSIKSYEKQISQKELQVKNLIDKLSLNPNIYDLLSSRIEELNKEIKELKFKKFELENTNSNLKAAIKEITASTSMLLNFKKLWENADYSMRKLLINSFVDYISYNSDTQEVVIKPFCTNKKKGAL

SEQ ID NO: 21280 - protein, 465 aa, synthetic construct
MKGNAGDAIVKKIDLSPELVRVALYIRVSGEEQKIKGLSLEAQQERLEAYARERGWVIVGIYIDAAKTARKNIHKRTDFQRMMDSVKRDEVDILLFCRLDRWFRSVADYYKIMEVLEAHNCDWKTTDEEYDTTTANGRLYINVKLSIAQNEADIDGERIDVVFDSKIAHGTVVSGSAPFGFRVNEEKRLEVVPEDAAIVQDAFNYFETSISQRATVRYIRETYGVNWCDATFRRMLKEKLYTGVYDRGGRFNDHFCPAIISKQQFDRVQALLERNARSVPSGKVYIFTSILTCAECGHKLVGYKSSDYYYYRCNQHFQRGRCSHNHSAREDVVEKWLFEHLAEELERCQLEWEVAAAKKKASVARTDKAALKRKLTKLKELYVNDLIDIEDYKRDYQIYTAALKQIPEPSIEPPPDFAAVRRLLDNDFKTIYENLTREEKRTLWRSVIKEIRIDNDQNITGVVFG

SEQ ID NO: 21281 - protein, 550 aa, synthetic construct
MKVAIYARYSSDNQRDASIADQLRMCRLHAEKQGWHVIEEYTDHAISGASLIRPGIQALMTDAMAGRFDVILSEAMDRLSRDQEDIAGIFKRVSYADVKIFTLSEGEVSHLHVGLKGTMNALFLKDLADKTRRGQRGRVEAGKSGGGNSYGYDVVKKLDANGEPIRGDRTINEDQAAVVRRIFRDYAAGKSAKTIAFALNKDGIPAPSGGDWGFSTINGNPKRGNGILNNEMYVGKIVWNRQRFVKDPNTGKRQARPNPESEWVIQETPELRILDDDLWNAVKARQEKNKLTRDDNGCTDVRTVNHRRRPKYLFSGLTKCSCCGGGYSAISATLIGCSTARNKGTCNNRVNIRRDELESRVLNALRTRLVDPELFAHFCEVFTQEMNRLRMESRAGIASAEAEIAKIDRELETLLNLILKGGAADALNAKMVSLEKRKKELELFLAEADEPPALLHPSMALQYRKRIQQLYDSLQDEEEGKRVEAADTIRSLVDQIVLTPVEGKVEIDVQGDLAGILTISAQTKNPASGAGSSQVKMVAGVGFEPTTFRL

SEQ ID NO: 21282 - protein, 537 aa, synthetic construct
MAKAATAKKVVVVPVRTIETLDGIPEFHKKRVAAYCRVSTDSEEQKESYTNQVNHYTQHIQSNSEWDMVDIYADEGITGTNTKNRTHFNRMIQDARNGMIDLILVKSISRFARNTLDLLKYVRELKSLGIAVFFERENINTLDTTGEVLLTILSSLAQDESRNISENSRWGILRGFTEGKVFCNTTRFLGYDKDENGELVINEKEAEIVRRIYQEYLEGKSYEAIAKGLMRDKIKTVTGGEKWWDSSITIILTNEKYYGALLQQKTITVDFLTHKRIKNRGQEQQYLIEENHEPIISKEMFEAVQKEKERRAKLKGNILGDRKKYSSKYPLSSKVFCGCCGTHFKRRTWNSNNASKKVVWQCRTYVNEGKDACDAKAVDEFVLQDAFVRVFNRMHENKDGFIRTLKANIETILIKRTGHEPLLEIERQMEQLKFDLKGLVNLKIRDQIDEAVYNEENTRISDELNELRQKKSLLEKDNDQKAQIKERADEIIQVLSLRQELLEQFDDSLFHALVEKITILSPAHFVFTLKSGMEITS

SEQ ID NO: 21283 - protein, 688 aa, synthetic construct
MNEKIRPHHLERKAILYVRQSSAHQVLHNRESGALQYAMHGRLTALGWSRIETIDDDLGRSAAGGVTRAGFDRMVAEVCLGKVGAVAAREVSRFARNSRDWQQLIEMCRVVDTVLVDQETVYAPRQGNDRLLLGLRGSLNEYELDLLRQRSLSARYEKARHGELVVAAPVGFVKVGDRIEKDPDRRVQEAIIMVFDKVAELGSARQALMWFLEHGLDLPAKRNNGDVVRRRPNYATIHRMIENPIYGGAYAYGKSGVAPGFGPSPVRPGARRKPREEWLALIPGSHEGYVSWERAEAIRTMVSDNVPTSRHHGAPKHGELLAGLVRCRRCGRKLTVRYTGTKHNIPRYSCWRGLLDNGEPRCIAFGGLRADDAIEEALLRVVEPGAIAAAAEAEAQAASRRDQVQNALGRDLEAARYAADRAFRQYDAADPENRLVAAELEMRWNRALAYVTEIESKIAAHDAATPKSSPASATDLQALAADLRSVWSAPTTDAKLKKRIVRTVIQEVVADIDDEASEIVLLAHWIGGAHTELRLPKRRRGQRNSTSADIIVAIRQLVLIASDDQIAGILNRNSLVTGHGNRWTRERVTAHRSHHKIPVFRLAPDGNEPLLNLNKAARLLGVAPKTLRLAAEAGEIEGVHPLPDGPWIFSRSELGKPLAQQIAHRARQNPKYPAGSHPDQQNLFPSTT

SEQ ID NO: 21284 - protein, 519 aa, synthetic construct
MSNKHSAKPEARKTCRCAIYTRKSTEEGLEQEFNSLDAQREAGELYVKSQKHEGWECLETKYDDGGFTGANMDRPGLRRLLADIAAGKIDCVVVYKVDRLSRSLLDFAKIIEVFDRHQVTFVSVTQSFNTASSMGRLTLNVLLSFAQFERDMISERTRDKMRAARRKGRWIGGKPILGYNVVNTKLVVDPLESLQVQEIFKLYLEMKSTLQVARVLNQRGWRIKEWTTKKGRTIGGGEFNKNKVTAILTNATYIGMIEYEGQLHPGLQDAIIKRDLFDRVQEILKLNSRMKKDLMRCKHNALLQGLLRCAACNCGMSHSYTKKGSTLYRYYICHKAQKQGWASCPSPSLPAAEIENFVIDQIRSVGQDPGVVRDTLAQSRVQTQTTVERLKKEKNALERAILGHYERLNQAIADGANESAVADIQDQIREKEQRVSEVVDEMTSVSSLMIDESDVRESLGRFQEVWAALSPAEKAKAIRQIVDSIQYDGHSKELSISYHPIGIRTFSQEQQSKVGAGTC

SEQ ID NO: 21285 - protein, 513 aa, synthetic construct
MINDKKKIRCAIYTRKSHEEGLDQDFNSLDAQRSAAEAYVQSQVHEGWKLITSRYDDGGFSGGNMDRPALNALIEDIRARKIDCVVVYKVDRLSRSLLDFSRLISLFDEYQVSFVSVTQQFNTTTSMGRLTLNILLSFAQFEREIIGERIRDKKLLTARQGKYIGGQPKLGLDIVDRKYVINPDEAKLVKRIFKMATQLQSCQKVADTLNSEGIRSKVFETKSGKIMGGKPYSGRSVYNILTDAKYIGKIVHKGVAYHAEHQAIIREDQFEKVRKLLAANRTYTHKHQAKRFAMLRRLVYCGECGNLVMPAWTNNHGREYRYYTCSKKVKTGYKKCSLPSLPAGELEKIVVDQLRSLLRHPDVIAHTFREVCASSQSGPDAEIGSRLEELRGRRQQTEQAARSLLGLQDPESPFVKGELKRLNAEIKSLSDSIRSLESEVTSTRAVDLSEVTKALQQLDPVWEVLYPDEKSRVMELLIETVTVSKESVDIHFRANGIEQIVGELTPMSERADG

SEQ ID NO: 21286 - protein, 520 aa, synthetic construct
MNRKKPEEDRRIVRCAIYTRKSTEERLDLELNSLDAQREAAESFIASQKSEGWVCLPKRYDDGGFSGGNLDRPAYNELMKDVEAGGIDCVIVYKADRLSRSLFDFAQTMRAFDAYGVSFVSVTQQFNTTNSMGRLTLNILLSFAQFEREIISERISDKIALQRQRGLWCGGQPVLGYDVDRSSTSPKLVINAKEAEMVRTIFDLYLKLGSLLPVVQKLSELGWSNKTWLTRQGRMKGGRPFDKCSLHALLTNQIYIGMIRHKDQVYDGQHEPLIDTALFQRVQAQLKEHGKGLGNRLTNRHNALLKGLLYCPNCGYSMVHCPTKKKSKIYRYYVCQTSIKRGRELCQTGSISAPAIENAVIEEIKCLVTDEGLRREIFEQSERLRQSKIQRQEIQLRQSKMQRSRDQAELQRMSTEGEFGDLNEVRRQELVNRIAQTNARLSELESELERLMDSRFERTDVEEAITDFDRLWGLMKARERHELLGLLISKVEYDRTDGTLSIDYHPTAISALLENVEEVA

SEQ ID NO: 21287 - protein, 520 aa, synthetic construct
MNRKKPEEDRRIVRCAIYTRKSTEERLDLELNSLDAQREAAEAFIASQKSEGWVCLPKRYDDGGFSGGNLDRPAYNELMKDVEAGRIDCVIVYKADRLSRSLFDFAQTMRAFDAYGVSFVSVTQQFNTTNSMGRLTLNILLSFAQFEREIISERISDKIALQRQRGLWCGGQPVLGYDVDRSSTSPKLVINAKEAEMVRTIFDLYLKLGSLLPVVQKLSEVGWSNKTWLTRQGRMKGGRPFDKCSLHALLTNQIYIGMIRHKDQVYDGQHEPLIDKAQFQRVQAQLKEHGKGLGNRLTNRHNALLKGLLYCPNCGYSMVHCPTKKKSKIYRYYVCQTSIKRGRELCQTGSISAPAIENAVIEEIKCLVTDEGLRREIFEQSERLRQAKIQRQEIQLRQSKMQRSRDQAELQRMSTEVEFGDLNEVRRQELINRISQTNARLLELESELERLMDSRFERTDVEEAITDFDRLWGLMKARERHELLGLLISKVEYDRTDGTLSIDYHPTAISALLENVEEVA

SEQ ID NO: 21288 - protein, 501 aa, synthetic construct
MGREERTKDKSIAYSYIRLSSKQQIKGDGARRQIEAAELYCKQHGLTLSSKTFRDLGISAYKEVDRPSLSDLHQCIANGTIKAGDVVILEKLDRLSRQGIVKTQAMLQEILSQGVVVVSLMDGLVLDRDSLNDLTLVIRIAVASDIAYKESLAKSQRIQANKDAAREKAKQGVAIPRKLPFWLSLIDGKYQFNDRLPVLKTIIDMKGDGASLAKIAGYLNSSGIPTANHNGVWNPSTLRDVIANPCLYGTHQVRVKVQGKYQPSELINDYYPAVISFSEYQELNSRAVQRPAGRSETNHISGLVYCEHCGKKMAAKSRKNKTGKVTYYYCRYALLESCEHKAHVRDLHSHVIDNANRLEIKQTIKDDKRANEILIELSQIDNRVRELSESLASMTSTIATTAVISALSSLEEQKKALIAEQKQSMPIAADAVKTLLTLVDDPKQFNIQLKKIVREIRVSQSGKGHIVSVKRHDGHKIVFHTNGAFTTDTKQFLSEIRELNQ

SEQ ID NO: 21289 - protein, 507 aa, synthetic construct
MIDSRKPLRAVLYLRLSVTTDESTSIVRQENDLRELCKREGWTVVKVLTDDGLSGGKRRAKADLALDMLREGAADVIAVWKFDRWSRQGVRAVADLVETIDERQASGRPALFVAMGDGIRSDAQTWRMHVSLIAEVGRMERENVQTRVASARKHQRETRRHSGRPGFGYRPIPHPSGKGRALEIDPEEAKTVRRAVDLILSGKSAYMTAKILNDEGRAPRLAAEWNASTVADVLQRDSLMGYMTHRVKGDSSRTSRPLLGEDGLPEQVWPAIVTPAEMREIRALLRSRGDWGRVARAGRRRAARLLSGHLACSSCGRIMRAGQGDYKADGSNVHRYVCGAPAGACPRKVSIAAQHVEDHVAEQFLAVYGGYEVVEMRETSRDTGELAEVEAAIASTAADMASPDADFGSLVERLSMLRARREALAAVPVESTLEEVRTGETFAEAWEKRDVDGRRALMSYALDGPIVVRPALKRSKIIDWSRVEIPWRGNWGLAEIEEYLRDAARAD

SEQ ID NO: 21290 - protein, 489 aa, synthetic construct
MNPKIKPRAILYLRQSVAREDSISLELQEDAGRRYAAQQGYEVIGVEADPGISGRTWNRPAVQRVLAMIENRDADVIVLWKWSRLSRSRKDWAIAVDKVEVAGGRIESATEQVDVTTSTGRFARGMLAEFAAFESERIGDTWKEAQARRVARGLPANGLPRFGYEYDRATGYIPHPVNGPILRECYLRFIRGESFHQITLYLRGVAEVPHKHRSRTGIWQRTSVIYLMDSPFAAGFIRYHDELHQGIHQPLISLEEWETYQTLRNQRRRAGVRQSSKSTSAFSAHCICQVCGYTFHITGRTQSGGLNLKCSGVNGLGLHRGGSIIEAKVEAAFMEWLKEYIPKINALAAEHKHNAAAAPTTDAQATLRRALMKANDRLDSLGRKFMDDLIPEESYRRLRDEQLAVVDRLNAQLEDEKLRFRQAPVTVDPVLLELWSEMPTATRQQVVRDLVSRIEISGPEGRTAHGVQRKIRVVPKWAVDDSTSPESSG

SEQ ID NO: 21291 - protein, 515 aa, synthetic construct
MKTAIYLRKSRADLEAEARGEGETLAKHRSTLLKIAKEMNLNILTVREEIVSGESLVKRPEMLALLEEIEDNKYDVVLCMDMDRLGRGGMKEQGIILETFKRSNTKIMTPRKTYDLNDEWDEEYSEFEAFMARKELKIITRRMQRGRVASVEAGNYLGTHAPFGYDIHRLNKRERTLTINPEEASVVRMIFDWYANEDMGANAIRSKLNDLGYKSKLGNEWNPYSILDILKNNVYIGKVTWQKRKEVKRPDAVKRSCARQDKSDWIIADGKHEPIIPESLFEQVQEKLNSRYHIPYNTNGIKNPLAGIIKCSKCGYSMVQRYPKNRKETMDCKHRGCENKSSYTELIEKRLLEALKEWYINYKADFEKHKQDDKFKETQVIQMNEAALRKLEKELVDVQKQKNNLHDLLERGVYTVDMFLERSNVVSDRITEITSTMENLKKEIKTEIKKEKVKKDTIPQVEHVLDLYFKTDDPKKKNSLLKSVLEKAVYKKEKWQRLDDFELVLYPKLPQDGDI

SEQ ID NO: 21292 - protein, 604 aa, synthetic construct
MKKVFVYHRVSSDQQLDGSGIARQAELLEGYLERTGICAEMDDPAPVVLSDQGVSAFKGLNISEGELGAWMEQVRNGMWDSSILVVESIDRFSRQNPFDVMGYINALMAHNVAIHDVMANIVISRSNSKDLPFVMMNAQRAYDESKYKSDRIRKGWAKKREQAFNKGTIVTNKRPQWIEVENDKYVLNHKAAVVKEIFALYQTGMGCPTIAKQLQTKEGEQYKFNRPWTGELVHKILTNRRVTGKIFISEIIRNHDDIENPVTQKKYDMDVYPVVINEEEFELVQELLKSRRPNAGRVTVKKDGQEEVLIKSNLFSGIARCTECGGPMYHNVVRAKRTPKKGDPKIEEYRYIRCLNERDGLCENKAMTYETVERFVVEHLLGMDLNTVIKEQEFNPEIEVIRIQIDQVKDQITNYENGIERRKSAGKAVSFEMREELDDAKLELEQLLARQASLATVQVDLPVLQDVNVTELYNVNNVDIRTRYENELNKIVSNIRLKRNGNFYTIDIIYKQNELKRHVLFIENKKKEQKLISEVIIENVDGAKFYYTPSFVISVKDGEIRFQQTKEDLTIIDYSLLLNYVDAVDRCDAVGVWMRNNMSFLFTK

SEQ ID NO: 21293 - protein, 635 aa, synthetic construct
MPKITRIKPGIKALPAKKKVAAYARVSKDTERLLHSVSAQVSYYSDLIQKNPEWEYAGVYADSGITGTLVAGRSEFGRLLEDCEAGKIDIILCKSISRFARNTVDLLNTVRHLKDIGVEVRFEKEQINSMSGDGELMLSILASFAQEESRSISENVKWGIHKRFKNGEIGAANKHILGYRYDDELKKYVIIPEEAEAVRWMFQMYIDGVTLRDIADSMNNAGIRTTLGNDFQEASVRQLIFNEVYAGDIRRQKCYIEDPITKRKVPNRGELPQYYMADSHEAIIDRDTYAKVKAEMERRASLLNPTYCFTGKFKCAVCGANFTRKKGRVRGKEYVDWICRSKKEPGVTCKSHNYPEHKLMDICAELMETDGFDEEAFERNVKQITSLADGSIEMQLYGGEVRQWQMPPKPVKPKKIKPESKRPRNLFDGKIFCGKCGRRFGRAISDTTDGGHLYWYCRAKSNHGITCDSVNYPDSEIRDIFCRVMGKKTFDEDYFTKTVDRMVVQASGSIDFHLKDGTVKTYETLKLRSNRHETTSTDEFTGMIRCACCGNIYHRYCGYGKYVYWRCSGKHKVRTECNGQDLADFNIRKVSAYILGMDDFDGKAFTEQIDHITALEDGSLEYFFKDRRAKKWQRT

SEQ ID NO: 21294 - protein, 526 aa, synthetic construct
MAKNVITIPATISKFTASPLGSRKKRKVAAYARVSTDRDEQLTSYEAQVDYYTNYIKGREDWEFVAVYADEGITGCNTTHRDGFNSMVEDALAGRIDLIVTKSVSRFARNTVDSLTTIRKLKENGTECYFEKENIWTFDGKGELLLTIMSSLAQEESRSISENCTWGQRKRFQDGKVTVPFKRFLGYDRGEDGNLVVNEEQAVIVRRIYGLFLQGKTPYAIARQLTEEGIPTPGGKKNWGKKTVESILTNEKYKGDALLQKVYTTDFLTKKKKKNEGEVPQYYVEGNHEAIIPPAQFDRVQKEMQRRFGDTDRHGCVSIFSSKIRCGDCGGFYGSKVWHSNDKYRKVIWRCNHKYDDGKNCSTPHLDEDTIKALYLKALRILGEERDEIIATFEAIKDKMYDTTELETEQAALQQEVMVVTELVEQCISENAHVAQNQKDYQKKYDALSERYDRTKERLDKVSGRIMERQAKREMIEAFLHDLAEMDEDVQEFTDDLWFNLLDHVTVFSKKDVRFTFKNGTEISVK

SEQ ID NO: 21295 - protein, 433 aa, synthetic construct
MIAECMDGNIDMVITKSISRFARNTLDCLQYIRQLKDKNISVYFEKENINTMDAKGEVLLTIMASLAQQESQSLSQNVKLGLQYRYQQGKVQVNHKRFMGYTKDEDGNLIIVSEEAEIIKRIYREYLEGQSLVGIGRGLEKDGILTAAGKPRWRPESVKKILQNEKYIGDALLQKTVTVDFLTKKRVKNEGHLPQYYVENSHEAIIPKELFLQVQEEIHRRSNIYTGEGKNKRIYSSKYALSAITFCGDCGDIYRRTYWNIHGRKEFVWRCVTRIEQGPEVCKNRTVKEDKLYGAVMTAINKLLAGGNNMIKTLEENIHAVIGETTEYQISEINNLLEEKQKELIKLANKGQDYEHLADEIDELRDKRQILLVEDASLSGENERINELIEFIRKNKFRTLEYDDKLVRKIIQSVTVYEDHFVIAFKSGIEMEI

SEQ ID NO: 21296 - protein, 584 aa, synthetic construct
MNTKVKLIKASNTGARNRNALHLDLKRVAAYCRVSTDSKDQLESYKSQVDYYTNLIKNNKNWTLAGIYADEATTGTTATKRADFMRLISDCQNGDIDMIITKSISRFARNTLDTLKYVRLLKENNVGVVFEEENIDTLTMDGELLLTILSSVAQQEVENTSAHVKKGLKMKMEKGELIGFQGCLGYDYDPITKSISINEEEAKIVRYIFKRYLEGNGGSVIGRELEEQGYLTPRGKTKWSDTTVLGIIKNEKYIGDILMGKTFTVDPITKRRLANFGESDKYHIENHHEPIISKEDFEKAQEIRLRRAQNRNTIANKDRKREKLSRQYAFSSMLECGFCGEILSRRTWHTSSIYKKINWQCVRSTKKGKKYCPHSKGIQEAAIEKAFVESYRQLCHADSTVIDDFLKIVEEEINDNTLVKDLKKIESQLNRIISQERKLVDLHLEDSIDEVVYAKKYKKLTKQKEELLDEKKTLELTIKDENSIKERLKQFKKVLENREIIEEFNRTVFESIVDKVVVGRIDKDGTVHPYDLTFYFKTGVKDSQDSNNFKDKRKNAKDNDINKLCSHKNDEDKKLCSQSKDNAR

SEQ ID NO: 21297 - protein, 530 aa, synthetic construct
MTCQEGGERMKRITKIEGNMANSFIKQKTRVVAYCRVSTDSNEQLVSLQAQNAHYETYIKANPEWEYAGLYYDEGISGTKKENRSDLLRMLSDCETGRIDLIITKSISRFARNTTDCLEMVRKLIDLGVHIYFEKENINTGSMESELMLSILSGLAESESISISENTKWAIQRRFQNGTFKISYPPYGYQNIDGQMIVNLKQAEVVKYIFAEVLSGKGTQKVANDLNQKGIPSKRGGRWAATTIRGILTNEKYTGDVILQKTYTDSHFNRHTNYGEENMYLVENHHEAIISHEDFEAVDAILNQRAKEKGIEKRNSKYLNRYSFSGKIICSECGSTFKRRIHSSGPRKYIAWCCSKHISNITECSMQFIRDEDIKTAFVTMMNKLIFGQKFILRPLLQGLRNQNNAASFRRIEELETKIVNNMEQSQVLTGLMAKGYLEPALFNKEKNALEAERERFLAEKDQLTRSVNGNIAKVDEVDRLLKFATKSKMLTAYEDELFEDYVERIIVFSREEVGFELKCGITLRERLVN

SEQ ID NO: 21298 - protein, 523 aa, synthetic construct
MAVSRNVTVIPAIKRVGNNKNSESKPKIRVAAYCRVSTDSEEQASSYEIQIEHYTNYIKKNKEWELAGIFADDGITGTNTKKRDEFNRMIEECMAGNIEMIITKSISRFARNTLDCLKYIRQLKDKNIAVFFEKENINTMDSKGEVLLTIMASLAQQESQSLSQNVKLGIQYRYQQGEVQVNHKRFLGYTKDENKQLVIDPEGAEVVKRIYREYLEGASLLQIARGLEADGILTAAGKAKWRPETLKKILQNEKYIGDALLQKTYTVDFLSKKRVKNNGIVPQYYVENSHEPIIPRDLFMQVQEEMVRRANLRGGKGGKKRVYSSKYALSSIVYCGQCGDIYRRVHWNNRGYKSIVWRCVSRLEEKGSECTAPTINEEILQTAVVKAINELLANKEPFLSTLQKNIAAILNEGNDNATDDIDSKLEELQQQLLIQAKSKNDYEDVADKIYRLRELKQNALVESAEREGKRQRIAEMTDFLNEQSCELEEYDEQLVRWLIEKVTIHANRVEVEFKSGISIDVKN

SEQ ID NO: 21299 - protein, 696 aa, synthetic construct
MMHEKIGPHHLERKAILYVRQSSAHQVLHNRESSMLQYAMRDRLTALGWSRVETIDDDLGRSAAGGVARAGFDRMVAEVCLGKVGAVAAREVSRFARNSRDWQQLIEMCRVVDTVLVDQETVYAPRQGNDRLLLGLKGSLNEYELDLLRQRSLSARYEKARRGELVVAAPVGFAKVGDRLEKDPDRRVQESITLVFDKVAELGSARQALMWFLEHGLDLPAKRNNGDVVWRRPNYATIHRMIENPIYGGAYAYGKTRVAPGFGRSAVRAGIRRRTREEWLALIPDSHEGYVSWERAEAIRKMVSDNVPTSRHHGAPKHGDALLAGLVRCRRCGRKLTVRYTGTKHNIPRYSCWRGLLDNGEPRCIAFGGLRVDDAIEEALLRVVEPGAIAAAAEAEAQAADRRDQVRDALSRDLEAARYAADRAFRQYDAADPDNRLVAAELEARWNQALIRVGEIESKIAAHDAATPRPSPVLATGITALATDLQAVWSAPTTDARLKKRIVRTVIQEVVANIDDKASEIVLLIHWIGGAHTELRLPKRRRGQRNSTSTDIIAAIRQLVLIASDDLIAGILNRNGLVTGHGNRWTRGAGHRTQIASQDPGLPAGTGWERAMAQPEQGGAPTWRCTQDPQTRRRSQRDRESSSFAGWSVDLQPIRTWNAASPADCSSRATEPEIPRGIVPRSAKPIPFKGIDRWVL

SEQ ID NO: 21300 - protein, 482 aa, synthetic construct
MRTALYIRVSTEDQAREGYSIQAQKNKLEAYCVSQGWDIAGFYVDDGYSAKDLERPEMKRMIKHIKQGLIDCVLVYRLDRLTRSVLDLYKLLELFEKHNCKFKSATEVYDTTTAMGRMFITIVAALAQWERENLAERVRMGLQEKARQGKWVINKAPFGYDIDRESDTLVINEKEAAVVRKIFDLYISGKGMSKIAVELNKSQIHTKSGFGWSDSKIKYILKNPVYIGTMRYNYRVNQENYFEVKNAVPAIISEETFEKAQKIMNKRSKVHPKAATSEFIFSGIARCARCGGPLSGKHGYSKRKTKTHKLKTYYCYNRRYGLCDLPYMSERFIEQQFLKLIETIEIQDEILDDLQHNDEDSKERIKAIQNELKAIEKRRIKWQYAWANETISDEDFAQRMKEENEKEEELKKELEKIQPKQGEMMSIDKLKELAKDIRNNWEYMEPLEKKSLLQMIVKEMVIDKISLQPKPESVKIVDIKFY

SEQ ID NO: 21301 - protein, 539 aa, synthetic construct
MNSGLGKVFSYLRFSDPRQATGSSADRQLAYAATWAAKQGLELDASLTLKDEGLSAYHQRHVTQGALGVFLRAIEDGRIASGSVLVVEGLDRLSRAEPIQAQAQLAQIINAGITVVTASDGREYNRASLKAQPMDLVYSLLVMIRAHEESDTKSKRVKAAIRRQCEGWIAGSFRGLIRNGKDPQWLQWSDQGWELIPERVSAVRRALELYQQGLGAGRAAKLMHEEGYELSSWGVSGQQVYRLIKLPALRGAKRLAVDGEAYMLEEYYPRILSDMEWAELQHLAGQRHRRRGAGEIPGIITGIGLAYCGYCGTALVAQNIMHRRRADGSLSDGHRRLHCTSYSKRGGCSASGSCSVVPIERALLNFCSDQLNLQRLLQVGDDGQGIRQQLVIARAAAEKIAKQLGKITEALLDDDSGAAPLAFIRKARELEAQQVIAEQKVMQLEYGLAAVSGTSQPAQAERWEELSELVCTDDYTAREKVRQLVMDTFERIVIYMRGVDPDDRKGQFIDVQLLSRTGQHRLIQIDRRSGNWVSSEDWV

SEQ ID NO: 21302 - protein, 611 aa, synthetic construct
MKEEKGKPAQVSAEALAVTYLRVSTKEQAQKGGQAEGFSIPAQREALHRKAESLDAVIVAEFVDAGESAKSADRPDLKRMLSYLATHRVDYVLVHKVDRLARNRVDDIEITMAIKKAGATLVSATENIDETPSGMLLHGIMSSIAEFYSRNLATEVHKGMSQKAIAGGTPGRVPLGYRNVGRTTDEGREERTVEIDPERADLIAWAYAAYATGEWTLRSMADELELRGLTTRKTPKLAARPVKPNVLHAILTNPYYKGEVIYRGVSHPGRHQPLTDPVTWEKVQDVFASHLVGEKQREHPHYLKSSVFCGTCGSRLIITNAKNRHGTVYPYFVCLGRHQKTTACTRKAMLTSKVEKLVEEHWATVQLEPALRATLERTLREVLVEHHKQDEEERRLLTNEHARLTAQRQKLVEAIYSGAMPMDMIASEQQRIGRRLTAVQERLEAVTAVSDKLEANLTAALDLAGDCQAAYRRAEPAVRRMFNQAFFTRLLIDEDDGVHSHHTKPFDILLAPEVLDAGRAIQVDRETGLAIMADALSNADDSDITPTNQKTPRSLRATGGLSGEPLAPVYGGEGSKTTTLVRPAGFEPATPALGVFPGRGADLRRCGPRGV

SEQ ID NO: 21303 - protein, 429 aa, synthetic construct
MRVRIIEPTLKVQNQKKRVCAYARVSTDSEKQEESLENQIQYYENLISSNPEYEFVGVFADRGITGTTENRPEFQKMLQLAKGGELDLIITKSISRFARNTTIVLETVRELKDIGVEVRFEKENIDTLSGDGELMLTVLSSFSQEESKNVSDNIKWRMRKKFQQGEMIINTKRFLGYDKDEYGDLVINPKEAEVVKRIFNEYLNGKGCFTIAKGLREEGVPTVAGGTWRDSTILRILKNEKYKGDALLQKYYTSDHLRKKKVKNNGEVESYYIEDDHVPIVSREEWETVQEEIKKRAKKKGIILGDTKKYKRRYPLTGMLYCSKCGSTLRRRTWNTKHSCKKIVWQCSNYVKNGKNACMGTSIDDEVISKLNIKEETVVKEEIRNGKKYYSYTCKSQQNQYSTIGKVTEKENGCILQGINRPSRTVIKL

SEQ ID NO: 21304 - protein, 558 aa, synthetic construct
MATAGIYVRKSKATDKGESIENQTKRGISLCEMRGWDYIIYEDYDFSGKTLDRPDFERMMKDAKNRNIDYIICYKLDRISRSVNDFSSLVEELDSLGVGFICIKDNFDTTSPMGRAMMYITAVFAQLERETIAERVRDNMIDRAKMGKWNGGPVPFGFDVQRDTIVTNGRNKKTSALTINVEEAKLVKLFYEWYIQDEGSIRSNTFRANDPINGYKTKHGALWSDNQMSRLLQNPIYCIADQEAYEYFSTQTKVQIINRREDFDGSHGLMFYNRRKPHKKTSRERDEEEWILVIGDHQGIIPGEMYKKLQNKLHINKIKAPRHGQGLSSPLTGLVRCGRCGAAMSVFTSRKSKDKSQGFWAYFRCICREQKSKLLCDNTNVRADLLEQIVVGHISGLCNNKNFITELLEGSNDELENNRIPLIAKRNKLQLELDVNDKEMKNLVIALGKGILPEIVIQSRYKELEDQKKALKKQLQEVALELENNYSETYNIDMVMKYINTFNETYEYLTIEEKKKLLKQIVKEVKVDKDKVELTLYFLPTQEFNDLSLCSYKDKDSY

SEQ ID NO: 21305 - protein, 520 aa, synthetic construct
MKKITKIDELPQGQLPNTKLRVAAYARVSTDSDEQLESLKAQREHYERYIKSNPEWVFAGLYYDEGISGTKMEKRTELLRMIRDCKQGRIDFIITKSISRFARNTVDCLELVRKLIDIGVYIYFEKENLNTGDMESELMLSILSGFAAEESASISQNSKWSIQKRFQNGSYIGTPPYGYTNIDGEMVIVPEEAEIIKRIFSECLSGKGGGTIARGLNKDKIPARRGNHWSAGTVIDMLRNEKYMGDVLLQKTYTDSNYNRHPNTGEKDQYYYKDNHEPIISREDFAKAQDLIDERAKMKCKGVKKNVYLNRYALSGKIVCGECGRNFRRKTNYSAGRSYIAWSCIGHIEDKESCSMLFLRDGEIKATLTTMMNKLAFSHKLILEPLFKSISQIDEESDRERMDAIDKRMEQLMEERNTLITLMAKGFLEPALFNQERKVLDSEIKNLTTEKTNLVTNSTSGVLRANDIKDLIDYVSADNFNGEYTEELFEEFVENIIVNSRDELTFNLKCGLSLKEKVVR

SEQ ID NO: 21306 - protein, 521 aa, synthetic construct
MTEKNIMVIPARKRVGSTAAKEKIKKLRVAAYCRVSTETEEQNSSYEVQVAHYTEFIKKNTEWEFAGIFADDGISGTNTKKREEFNRMIAECMDGNIDMVITKSISRFARNTLDCLQYIRQLKDKNISVYFEKENINTMDAKGEVLLTIMASLAQQESQSLSQNVKLGLQYRYQQGKVQVNHKRFMGYSKDEDGNLIIVPEEAEIIKRIYRKYLEGQSLVGIGQGLEKDGILTAAGKPRWRPESVKKILQNEKYIGDALLQKTVTVDFLTKKRVKNEGHVPQYYVENSHEAIIPKDLFLQVQEEIHRRRNIYTGADKNKRIYSSKYALSAITFCGDCGDIYRRTYWNIHGRKEFVWRCVTRIEQGPEVCKNRTVKEDELYGAVMTATNRLLAGGDNMIRTLEENIHAVIGDTTEYQISELNSLLEENQKELISLANKGKDYESLADEIDELREKRQTLLIEDASLSGENERINELIEFVRDNKYCTLRYDDTLVRKIIQNVTVYEDHFVIGFKSGIEIEVE

SEQ ID NO: 21307 - protein, 570 aa, synthetic construct
MTTARLRAAIYARYSSDMQNAASIEDQIRLCRIHAEREGWEIVGSYEDRAISGASILRPGIQKLLRDAEEQGFDIVVSEALDRLSRNQADIAQLYQTLSFTGVGIETLSEGTVNEMHIGLKGTMNALFLKDLAAKTWRGLDGRVEKGKSAGGKSFGYDVVRSLREDGELNRGDLAINQDEAAVILRIFEAYRDGQSPGRIADLLNREGVIGPRTPNWNKSTIHGNPKRGTGILNNMLYVGERHWNRQAYKTDPRNGKRQSRPKEVSELRIVQVPDLRIVSQDLWEAVKARQKSQALKQSDSKAWQRRKPRFLFTGLIKCGCCGGGFSTIAKDRFGCSSSRNKGTSVCTNRTTVARKDMERQILDLLSGHLMEPDLVATFAKEYIAERNRLAASKTDTRATKQKELTKVIKDQDVLVNALLAGTPAARINDRMSQLEARQKQLEQDLASTPAPASNLRIHPQMAHTYHARIKTIVAELGEPNSESEARDEIRGLIDKITVTPLPTGGKRMQPQLELHGALANILALSLGVKGKPEQQITSCEQEVMQSIVFMVAGARLGHCLREISQTQIN

SEQ ID NO: 21308 - protein, 512 aa, synthetic construct
MKLCALYTRVSTEEQVERYSLEAQQEVLTRWAEALGYEVVKTYTDPGYSGAQEDRPALTRLLADAQEKRFMVVLVYRLDRLARKVRLAYDLIERLEACGVGLMSYSEPNINTTTPIGKAVLGIMAVFAEWERDTFAERSRLGLRKAAQSGKYLGGIVPYGYTVEGGRLSPHPEEAVVVQQMFAWVAERGWSTERVARELNRLGIPPKYRRDGRGVRGKRTAGVWRGGGVLRLLKNRTYIGEYTYGKRTRKTQPELVKVAVPPIVEPALFEAVQEQLSRNALFAARNARSVYMLKGLIRCGTCGRAYVGSTDYYACVGRVSRQASPIPSMRCTAPHVRRGDLEEAIWRDIRSFLLNPGEALQAFLKGESREENEAALLEKRLRSLLDARARLLDLYLEGGVDKESYYGRLEELDTRVKEVQAALDEARRQVIEEHRRQESLATLEELASHLRERIDMLTPEERQAVARELVEVVTVRPGRGEVQVEVRYRFGQIAPHTDRGSWPQSTKTARDR

SEQ ID NO: 21309 - protein, 486 aa, synthetic construct
MMLALAYIRVSTEEQAEKGNSLFEQQERAVAYCKAMGWDEPILFIDDGYSAKNINRPELTKLLERVKTESCGIVITTKLDRLSRKLFDILKLNEYFNKYNFNYVSATEGFDTSTPAGRLVLQMLGMVAEFERERISENVRNNMMSIANNTKKVISRPCFGYDVIEGELVINIEESLIIKKMAAWTLEGEGARSIVKRLNLVEKVTTKEGNQWHDKVLRELLQRETLKGDFIYNKTYKKDNKVIKRPEEEWIRIEDHHEPILDAETFEMIGQLFQGRKFIGRHVSDDRYLLSGLVICGHCKSKMNGKMNKNFSKRLGKENIHYQYLCDGYLKKSICYHHFAHRDTIENIIIEELKDLATMSSGSPRLISVVKNNSVDKEEIKNNLDKLDKKIQKQIEAYNEDLITKHDLKLAADTANTEREYLKNLLQASEEKIAEQREKELRVKANHYLNAILSGDRLKMKQTIRQMIHSIEVFDGSNIEVIYRGD

SEQ ID NO: 21310 - protein, 479 aa, synthetic construct
MRVAAYIRVSTDEQVEQGNSLAEQEERLKAYCVSMVWDEPVIFSDDGVSAKNTKRPLLRKMIKRIENREFDLVLTTKIDRLGRNLLDLLQMVNFFKEYDCDYASSTEKFDTSTSVGRMTLQLLGTFAEFERERTSERVKDNMISLAKNTNKALGIACYGYFIKDGLYAINEDEAKHVRYMFELAEQGHGHRMIAKLLNESGSTTRKGKMWDQVNVKRLISNEMLSGVMIYNKRENKNGKTVIRDKSKWITNEDNHPAIIPLEKFEKIQLIFKARSRSHKHADNESYLLTGLVKCKHCGGNMKGSTARYQRTSGNYAYFRYICSSYVLGYGCKHHAFHRDPFEKHIIEEIEKAYYTSEKNLNLKIAMTVTDEDEKEDIKRQLTRIDKRIQKQIEAYENDLISANDLKVASSRVDGERILLYEKLEELEKKKGNVQGVKSNIKKLLGDVTGTDRLKAKKALALLIEKIVVEDGKLVDITWR

SEQ ID NO: 21311 - protein, 546 aa, synthetic construct
MELLTAIYVRVSTESQATEGTSLDTQQETCLKKAREMNINEQDIAIYREEGVTGEDLDRPELDRLRTDIRNNKINTLIITHPDRLSRDLYVKVSVCRELENREVNLIFHDVEYKNTPEGQLFFNLMSSIAQYELSQIRSRTVGGRKKAVRDHGKIMPMRVAPYGYDMINQQLVINESEAEYVKLIYQWYVYEFKTLKEIGEQLYLLGAMPKRAESRNWSASSIGRILSNEAFIGKYYYNKRATKKVKREEGGKSNKTASGKTKKTYTIRDKGDWILVNIPPIIDLGLFEIAQQQKKKNLTRKGRNVKQFYLLKGMMKCAHCGRKWESTTYSSKTKKGTTTYQIYRCANKYPRKYGEGIERCNIPTVRTDVLDEFVWNMIVQAIKNPENLKNNLNEDKSTEDLDKVLMTYKKQRLEKEKEKEKIKHMYRKGIISEEELDNDMNEVMKDISKFDFEIEKIEDKVSIIQRQSMSEDLMLEYARQYKDLLENDMLHDEKKREILDRMIDEIIISYNEENKQFNVSFYGYLNGFYNDTENNLVLELTPQEI

SEQ ID NO: 21312 - protein, 484 aa, synthetic construct
MNKVAIYVRVSTTMQAEEGYSIDEQIDKLTSYCKIKDWTVYDIYKDGGFSGGNIERPAMERLISDANRNRFDTVLVYKLDRLSRSQKDTLYLIEEIFGKNDISFLSLNESFDTSTPFGKAMIGILSVFAQLEREQIKERMLLGKIGRAKSGKSMMVSKVSFGYTYDKLKGELIVNQAEALVVRKIFDEYLGGRSLIKLRDYLNSNGIYRGDKYWNYRGLLLILSNPVYIGMIRYRGEIYPGNHQPIIDTEVFNKTQEEIKKRQIEALEFSNNPRPFRAKYMLSGLAKCGYCGTPLKIILGYKRKDGSRSMRYQCINRFPRNTKGITIYNDNKKCDSGFYEKADIEEFVIAQIRGLQLNSYKLDNMFDKQPIIDVEGIEKQITSLDNKLKRLNDLYLNDMIELDDLKKQTQSLRKQKTMLEDELINNPAIMQDKNKNHFKEILGTKDITTLDYETQKSIVNNLVNKVFVKAGHIKIEWKIPFKKV

SEQ ID NO: 21313 - protein, 569 aa, synthetic construct
MILLEKAALYIRVSTHHQIDKDSLPFQKKELINYSKYVLGVDEYEIFEDAGYSGKNTDRPKFQEMMSRIRAGEFTHVLVWKIDRVSRNLRDFTEMYDEIKKYNVTFISKNEQFDTSTAMGEAMLKIILVFAELERKLTAERVYSIMLSRAEKGLWNGAPVPLGYDFDEELKFAVVNEEEAKIVKFIFDTYEEVKSTGEVKHRLEANGIRTKRNGHWTTKTISDVIRNPFYVGTYRYNYRYSPHGKIRPEEEWVVVEDNHPAIVSKEQYEKLNKIMDSNAHGRGTDRTKENHIHVFKGLISCSKCNKNYIASTDRPRSDGYRPSVYRCYNYVHNKKQYRTCSGGIGEVKLGPFVINYIANLIKSNEFISTYGSKGTEKEVEKILLKGSSFKGVAGIIAQDLKHTYEVLLKNTGDILFDSIEEPKDIEQDMELESLKSEKKKIERALQRLEDLYLFSEDSMSEKNYLVKKQELEKRINSINDKIKKRSQEYSRNLPGHDLSFIKKATQYLLAHNLYNDRAINYNKIVKMIDKKLLQDFMQCVVKKITVDEDKTISSIEFVNGLSHRFIYRK

SEQ ID NO: 21314 - protein, 522 aa, synthetic construct
MMKKITKIDELPKSQPSKSKLRVAAYARVSTDSDDQLVSLKAQRVHYENYIKSNPEWEFAGLYYDEGISGTKKEKRLELLRMIRDCESNRIDFIITKSISRFARNTTDCLELVRHLMDIGVYIYFEKENLNTGDMESELMLSILSGFAAEESASISQNTTWSISKKFQNGSYIIGTPPYGYANVNGEMVIVPEEAEIIKRIFAECLSGKGGSVIAKGLNRDKIPARRGNHWSSGTVIDMLRNEKYKGDVLFQKTYTDSNFNRHINNGEKNQFYCKDHHEPIISREVFSKAQKLITQRAKSMSKTANKKAYQNRYVLSGRILCGECGSKFKRRTNYSVGRSYIAWSCKGHIEDKDSCSMLFLRDGEIKATFSTMMNKLAFSKKLILEPLYDSINKIDEECDLARIDAIDKRMEQLTEERNTLIGLMTKGFLEPALFNKERNVLDKEIKNITAEKSNLVMSFTSGSSQADEVKALLDYVSADKFDGNYTDEAFEKFVENIIVNSRDELTFKMKCGLSLIEKVVR

SEQ ID NO: 21315 - protein, 539 aa, synthetic construct
MSSIKKIRTIDKAPVFNKPLNKLRVCAYVRVSTNQTEQQESFSAQVQHYTSYINSNPEWIFSGIYSDQGISGKNAAKRPEFMRMVQDAENRKFDMIVTKSISRFARNTADCLETVRKLKLLGIAVQFEKEQINTLTAESELMLSILSSVAEEELASISQNMHWSNQRRFKKGKFSVNTKRFLGYDKNHDGNLVINDEQAAIVRRIFKDYLSGLGVSRIAKGLEADRVKNISGKIKWAESSIRDILKNEKYCGDAHLQKTITTGLYNRKRNSGEAPMYYVKDSHPVIISREDFEKVQELMTERAKSKGNIQGNREKYTNRYTLTGTIVCGHCGNTFKRHIDNCGTVAESVCWICNTYIIGRKNSCGVGRIKEETIKGLFVRVFNRLCTDRAKLLGDYKAKLEREKLTELDNERIAKLDEEIEKLIKQERALFLIEAKGYADHNLVKSEHEELVKTLTQIQTERSDRIAEINKRDNRMARTLELEAVLEAQGGNLTEFSDDLYRNMVEKIVVKERTKLIFHLKNGLAFEETYALKRGHDIF

SEQ ID NO: 21316 - protein, 572 aa, synthetic construct
MTRVALYARHSSDSQRDASIEDQLRLCREQVAREGWSVAGTFEDAAISGASTVLRPGIQHLVRDAQRGRFEVVLAEALDRISRDQADVATLFKHLKFAGVTIFTLAEGEISELHVGLKGTMNALFLKDLALKTHRGLRGRVEKGKAGGGLCYGYRVVKKLDSEGEPVRGDREIVPEEATIVRRIFREFAAGKSPKAIAVDLNKEGIPGPLGRHWGDTSVRGHVVRGTGVINNELYTGVLVWNRLHFVKDPATGKRVSRANPPAKWIRTEVPHLRIVGDELWQAVKERQKSIASQFEAVAIATRKARARKLHTMKRPVSLLSGLLTCGCCGGRYGLFTRDRYACLNHQRRGICNNGRTITREKIEQRVLAGLKERLVSADAVAEAIRAYAQETNRLNQERRAQGEQDRKALDKIERAIAGMMAAIEDGLYQPSMKARMEDLERQKAEIAARLAMSPTDVPDLHPNIATLYKKRVEQLTQALADHEDGRPAAEALRSLIGEIVLTPGGRRGEVHAELRGELFGILELARPDPSQQSDDVMTKGASCPRNQIQKSPPSCGLFCFMPCCAAGLSSG

SEQ ID NO: 21317 - protein, 454 aa, synthetic construct
MIILTKAAIYIRVSTQDQVENYSIEVQRERIRAFCKAKNWTVYDEYIDGGYSGSNLERPSIKKLLTDLKNIDVVVVYKLDRLSRSQRDTLELIEEHFLKNKVDFVSITETLDTSTPFGKAMIGILSVFAQLERETIAERMRMGHIKRAENGLRGNGGDYDPAGYTRQDGHLIIKKDEANHIKRLFDLYEQQHSITKVQEVLKEEGYPIWRFRRYRDILSNTLYIGRVTFAGKEYEGQHEPIVSSEQFKRVQALLKRHKGHNAHKAKQSLLSGLITCSCCGENYVAYSTGKSKDVESKRYYYYICRAKRFPAEYEERCMNKTWSRKKLEDIIITGLKRLTVEDNVNNKQKKKINYEKLIKDIDKKMERLLDLFTTNTNISRQLLEQQMEKLNSEKENLIQKQKRQEEEKTIAQDTLIDSIKSIDLLEFKDKQVLINNLIKQINIDHKNVEIIWRF

SEQ ID NO: 21318 - protein, 577 aa, synthetic construct
MKRAALYARVSTETQQKERTIESQLFELKKQIVAAGHMLVKEYTDDGYSGKYLDRPALDELRTALKADTFDVVYFHAVDRIAREPIHQNIIVGELLKHKKRIIISGKDYEENPENRFTLDVLGAVAKFERAKILERTRRGALHRLRSGQLTSHGQKTYGYTYVRKTPTQPCALVINEDQAAVVRSIFEMFASGRYGLNAITRFLEKSGAPTYKGKGLWYAQNVRFMLQNPTYVGTRYFNRLASVNDVSGDGKRPKGNKRVLRDREDWIAVKVPAIVSQELFDKVQERLRIVRERYRQPAVPHLLGGLVRCVECGRMYSSSRFYVPREHPSGKVSVYHRAVYRCNRHLNDNTHDPARVKPCRNSVIATHILENTVVDIIRDVMFDAGKLGCCIEGTDRADDGSAARELARIAGETKRLDEERRQNIELYATEQRTATEYLNVNIALDEVLDRLKREKADAASTLREAAARDVLGASIRHFCATARVRFEECADFDAKRRFLRDHIDRIMFNHGKIALVGSVPLGSVATKETELHFRIEGEIDRATIRSKSLRRLWRDERSTSWVPGTHAEEPSDEPAA

SEQ ID NO: 21319 - protein, 622 aa, synthetic construct
MGHAGIVMGLEVSRLARNNADWQRLLEICALADTLILDEDGVYDPASFNDRLLLGLKGTMSEAELHVIKARLRGGILNKVRRGEFRCLLPTGLVYDHFGHVTLDPDMQVRETIIHFFEMFSRLESASQTVKVFRNEGLLFPSRLHNGDTLFRPLTASTAMRVLNNPRYAGAYTYGRRQFRRTIDGKKTLRARDIDDWPACMPDAHPGYISWERHQENLKILKANGRGFEAARASIPREGPALLQGRAVCGQCGNHLRVRYAARRGRQEAWYICNRDHIYRGEPMCQSIAGPPVDEAIGMLIAEQMTPAAVELALDVRKEIQARHEEADRLRCRAIERAQTEADLAQRRFMLVDPNNRLVADTLEGEWNEKLRILANAREERERGREHDQFILDKAVHERLVAMTADFNELWKDPDTPSRERKRLLAHIIEDVTLLKLPAEGTTKLHVRFKGGKIQTLTTMNPQSSAQQIKTKPNIVELIDKLLDDYIYPEIAEILNEQGHRPGGTARRGCHDARFTPLKVAYLIHEYKLQSRYDRLRQRGMLTRQEAAVHLNISEQTVARWAKYGLIARHAYNGHYSLYEIPDGDLPQKQCSRWNQLQDRTAARQQTQTEPRTSTGEERGVV

SEQ ID NO: 21320 - protein, 478 aa, synthetic construct
MQQPRFAIYTRISRDRVGAGLGVERQQEDCEALVAQLGGVVVAAYSDNDISAYSGKHRPGYESLLHSVKAGDIDAVAVWHQDRLLRRTIDLEKYIDLCQPLGVATHTVKAGTFDLATPSGRAVAKTLAAWAAYEVETSTDRVKASKLQAARAGKTSGGNRAYGWNQDGMSLREAEAAVVREIVDRFIAGDSWNRIAVDLNSRSIPTAKGKMWSAINVANVAKLKRHYGIRDHNGVEYEAAWEPLLSRDKYEDLQLAIKRGQVLYGKRSYARKHLLTGFVHCGLCGTRMRIINAQQRDGSYSPAFSCRKNDHRGQEVGCGKVKRKKDPVELLVIDCIMYRLDTPEVSGLLSADAATPELKRLMREHETQRQRLEEILSLYSTNELTHDEYKVAKASAQSRLDTLTREIERTSSKRITANVPSGKTLRETWDQADLVWKRQLLDTLIEGVYIHPKKPGDGKAKFRGFIFNPDRVEIRWKI

SEQ ID NO: 21321 - protein, 490 aa, synthetic construct
MKLLESYAVYVRVSTDRDEQVSSVENQIDICRNWLERNGFNWDEKRVFKDEGISGTLFVDRPSIQLLLQKAKAKEINMVVFKSISRLARDLKDSLEIREVFLAHNVRIISVEEGYDSTKAGKNDMAFELWSLFSAQYSRTLSSSITAALAVKVRRGEHIGKIPYGYNREEQKLVVNEEEAQVVQMMYKWYLEGWGYKKITNELNQLGIKSKTKKNWQMTSVQRILQSPIYKGTFILNQYTSVKVGGKKKQIRNPKEKWFVFPNHHPKVVEEEIWDQANRKKNKKNKTKITAWNEFRNLAKCAVCGSNMIIVQSHLKKKSGERTEWKYLKCSQYRRAGKHGCVNHVPIQYGDFRQFIINLLVEKGESVTLRLQSNIEKGQDKKIKKLQQLMSTNQQKKKSLLDLYLEELINKEEFEKKRNDLEAEITKASQELFILQQNDVVQTDIKTIKEAFQRLQQQEKDLFHVFQTLIGEIVVHQDGTVDITYTFESA

SEQ ID NO: 21322 - protein, 643 aa, synthetic construct
MWSMVLLDGVHNLKCKELYMDAQEDMHMNDYNKITALYSRLSVGDEDRDGGESNSIQNQKKFLESYARQLKLTNIRHYIDDDESGRFFDRSAYSRMIEDVENGKIGVCIMKDMTRWGRDYLQVGNAMEIFRRNNVRFIAVNNGIDSEKPDTLEFAPFINIMSEWYAKDISKKVKTGIKTKGMSGKPIATEALYGYVKSPDNKDFWIIDEEAAGVVRLIFRLFLDGKNRNQIAVYLTQAQIPTPTFYMKERGRGTCKNRALNEDNRYKWNKATLTHILTRQEYCGDVVNFKTTKHFRDKRNHYVDRSQWQITENVHEPIIDRADFETAQRILENAPVRRPNGDGEIHPLSGLLFCKDCGAKMHIRIDYRNGGKRHVAYCSEYHKGKAKNPKCHSPHIIDADLLMQTVAEVLKKIEDYSISNRAEFEALVKKNLAMQQTDQTKKQQKRIPQITTRLEQIDKVLNKLYEDNALGTIPQDRYEQMSQKYSEEYYALKTELSILQEQLSAYENAGGRAQKFLKLTERHAAFTDLTPAILNEFISRIEVHERDQKRARYAIQHISIYFNYIGRFENEVTQLAEPTEQEIRQMREEIEEAKKEKSRAYHRKYSREYRARNLEKQREYERIKAREYRARRKAQTAAAQPAQ

SEQ ID NO: 21323 - protein, 481 aa, synthetic construct
MKRMEQITPPPISAAPLVKVAAYARISMETERTPLSLSTQVSYYQQLIHDTPGWTFAGVFADSGISGTTTNRPQFQELLALARKGAIDLILTKSISRFARNTVDLLETVRELKDLGVEVRFEKENISSTSADGELMLTLLASFAQAESEQISQNVKWRIWKGFEEGKANGFHLYGYTDSADGTDVQIIEEEAAVVRWIFAQYMKKTSCEKMAAQLIAEGRVPHLADNKMPGEWVRHILKNPHYTGDLLLGRWSTPEGRPGRAVRNTGQLPQYLVENAIPAIIDRDTFTAVQTEIARRRELGARANWSIETVALTSKIKCVSCDCSFVRNVRNPKTQNSISTEHWICTERKKGRKTGCGTCEISDTALKGFIARVLGIDTFDQEVFNERIDHIEVQGKDHYTFHYTDGTSSSHTWRPNLKKSSWTPARKAAWGELLRARWAEAKRLGLNNPRQAPTPPEALAKYRAVAKAEAERLRAERGER

SEQ ID NO: 21324 - protein, 549 aa, synthetic construct
MKEGFILKKIISIAARNLSFPDSGQFLRKTRVCAYCRVSTGSLKQSESLETQISYYERHIKNKSGWEYAGVFADEGISGTGMLKRTEFNRMIRACELGKVDLIMTKSISRFARNSADCIDVVRHLKNIGVGVYFERENINTLGADSELVLSILSSIAQDESRNISENVKWGIQKRFREGKFYITTKRFLGYDLNNEKQLTVNSEEGKIVKRIYREYLNGRSLKEIKSGLEKDNIKTVTGNRVWNESAIKYILQNEKYCGDAVLQKTITVDYLTGKRKKNKGEAPKYEVKEHHEAIISKEDFLKVQNIRKIKALKYGNLPENRDKYQNRYAFSGKIICGNCGAFFSRRTWNSKAKSKQIVWQCRTYINEGKSSCCMKAVDDITLKAVFVRVFNRIYEAKEDFFKRFADNIEKVLKRNEKCEDILRVDREIENISGKIKELVRKQIKGELEESTFDKRYRNLKDTLQEFKNRRNSLSYNDEKYKKLLERNKRIKKFIEDRDGIITEFDDDIFENLIEKIVAITPTHLEFHFKNGMVVEEEFIKKKGIKGLQ

SEQ ID NO: 21325 - protein, 522 aa, synthetic construct
MRIIPAHQQKGNSVQPQKNRLPFEQLRVAAYCRVSTDYDEQASSYETQVIHYKELIQKEPTWKFAGIYADDGISGTNTKKREQFNQMIAACKAGKIDLIVTKSISRFARNTIDCLKYIRDLKAINVAIFFEKENINTMDAKGEVLITIMASLAQQESESLSQNVKMGIQYRYQQGKVFVNHNHFLGYTKDAQGNLVIEPAEAKVIKRIFYSYLNGMSMKQIADSLKADGILTGGKTKNWRSSSVAKILKNEKYMGDALLQKTYTVDFLNKKRVKNEGIMPQYYVENDHPAIIPKSVFMQVQQLIKQRRNGITTKNGKHRRLNGKYCFSQIVFCGKCGDIFQRNMWYRPEKVAVWRCASRVRRSKTGRRCMIRNVKEPLLKEATVEAFNQLIEGHELASKQIKANIMQVIKDSQGPTLDQLDKQLEEVQMKLIQAANQHQDCNALTQQIMDLRKQKEKVQSRETNQQVKLHSLEEINELVEFHKYGLVDFDEGLVRRLIEKITIYQRYMEFTFKDGEVIRINM

SEQ ID NO: 21326 - protein, 446 aa, synthetic construct
MQRQLEDCRKLAAERGWVVGHEYVDNDISAYSGKARPGYEAMCSDLAAGVRDAVIVYNLDRLHRRPVELEEFVALCEAAGVNQVATVTADIDLGNDDGLFMARIFAAFAAKESGRKSARMKRKYEQKAAQGLPHGPNRPFGYDDDKITIRDAEAEVVRQLVVRVIAGESVNSLTAWLNETDVKPVRGGRWASTAVRNIVSSPRIAGLRAYKGEVVGEAAWEPIIPVAQRDQVLAALSVRSWNRKRSPRKYLLSGLCRCGRCQSRMFSAARLEAGAHKRRYVCSSSPDHGGCGRMTVVADPLEKLIADAVLTRLDSKVLADALAGKVRANPDTAALSAEVEQAQARLDELTGLYSSGAITAREWIMARDPITDTISRLRREIADTADTGPLAELAGKGSVLRAQWDDLGLDRCHAIIRAVVDHVVIKPGKPGARGLDMGRIDPIWRM

SEQ ID NO: 21327 - protein, 643 aa, synthetic construct
MIVRIHNDRACPFSFREVTCLVRDYYHNSRLSRSKTLKNQSNTSPAVAYVRMSSKKQDKSPEQQRAEIKKHARNRNYHIIRWYEDSGKSGGKETEKRVQFLRLIEDAEKKGDFVAILSWSKARLDRLDSLEGAEYKLRLRDCGVILETVTDGVFDWATEEGQLLDTFHSMKGHRDLIQISREAIRGKTEAILERKRLHGGQPPYGMARLITDSKGKKHNIARGERFRTPKEWNVIYVEGDADELAVLRWLFTTFDSKDVSCHWLAKDLNERGVSSPNGSQWRDTTVRRLLTDEAYIGNFVLGKKRTKESFYRITNEGAKKNVGPRGRLAKTSTGDPSEEIRLDGLWDAVVDPSLFLRVNRKLNSNKKSGRKPRATDGGHALSGILHCGHCGSRLLAMKKVKKAGPVTRYHCGTYLNTPGNCIGAKIDEGEVIDKALLKLGEMLSGDRISEFGRAVREEEPSRSESIQREIEKVELQIERGSARVCMVDSEKVAQSIQRQLANLHSEKERLEGELACVLKPEEVPALVDRWATKHRSLLRLYNVPLLDTFKLSDQKTWYGTNVGVVETQPLEALALRGAFNEIGLRLDVFWKKREKRTREGIYELDRIEISVNIGELENHFSTGRRRSAPPESTGSAPASLRPW

SEQ ID NO: 21328 - protein, 491 aa, synthetic construct
MKRLGSYAIYVRVSTDRDEQVSSVENQIDICRNWLERNGFIWDEKRVFKDEGISGTLFVNRPAIQLLLQKAKAKEIDMVVFKSISRLARDLKDSLEIREVLLAHNVRIISVEEGYDSVKAGKNDMAFELWSLFSAQYSRTLSSSITAALAVKVRRGEHIGKVPFGYNRENQKLVIHDEEAEIVQKIYSWYTDGWGYKKITNELNRLGVKSKTKKNWQMTSVQRILRNPIYKGTFILNQYTSVKVSGKKKQIRNPKEKWFVFPNHHPAIIDEEVWNQVNPKDTNTNKTKITAWNEFRNLAKCAVCSSNMVIVQSYSKKKNGERTEWKYLKCSQYRRAGKHGCVNHVPIQYRDFRQFIIDLLVKKGESVTLKLQGNIEEGQEKKIKKLQQLMNVNEQKKKALLDLYLEGLINKEEFEKKRNDLEAEITKANHELFILQQNDIVQTDIKTIKEAFEQLRQREHDLYHVFQTLIQKIVIHQDGMVDITYTFESPL

SEQ ID NO: 21329 - protein, 481 aa, synthetic construct
MLCGGENTMRACIYTRVSTAGQAEEGFSMQAQYDKLIDFVKLQGWDLIRVYTDPGVSAKDLNRPGVKELIDDLKVGKFEAVIVHKLDRLTRNISDLYDLVELVNKYEVKLISLSENIDTSTPMGRMFVYLLGIFAQMFRENLSEEIKKGLSKRADLGFRNAGAPFGYKMDERGNLIIIPEEAELVRVIFSLHISKKWGFYTIAKYLNKLGFLGRRGGIFHGSSIEKILKNHTYVGKNHWKLKGRPESERMVRDANHEPIIDQDTFNKSQEIIRRRSQKEMSRSFYSYPFSSIIRCGQCGAPYHGIMQPYKGIKYYYYRCFNVIKGRCNQSSISELKFETMFFDYFIVQHQGVNFEEVAATKSDTSEVKRKIERELEKSEQRRKNWQYAFGDGTIPYKDYVALIDEEMRKVEELQLQLSDLPVDESPVKITIKEVIETVAQLKDNWAYLERETRKDLINSLFKSITITKFDYGWVITDVDWV

SEQ ID NO: 21330 - protein, 571 aa, synthetic construct
MKYHLKIVGKEDIMGRQSQTAVENGEKITALYCRLSRDDDMQGDSNSIRNQKAILEKYAVDNGFRNREFFVDDGYSGTNFDRPDWQRLIAKAERGQVGTVIVKDMSRLGRNYLRVGYYTEMFFPDAGIRFIAVNNGVDSANQQDSDFTPFINIINEWYAKDTSKKIKAVFKAKGESGRHMANRAPYGYMKDPQNKERWIPDEIAAPLVKAMFRKCMQGFGPGWIARELREQKVLNPILHAKVRDGKISRQEAEAMPNAFVWSSTYVADILRRPDYLGHTVNFKTYKKSYRTRGVYLNDPSEWVIFENTQEPIIDQETFDIVQRIREGRRKKTFLGIPDMLSGILYCADCKEKMGAVRQGNRRRELDHYVCDNYRRKKAQKLCDGRSHTIRINKIEGILLHAIRRVTDFARAHEDEFIALIVKKSRKAADKALRDAKREMEQAGKRMRKLDLLIQRLYEDNVDGKVSDERFTKLTATYENEQSVLTARMKELQAVVAKESKTAANVNGFLSIVRKYTDIPELTSEIVREFIEKVYIFHPEVVDGKRTQKIVIVWNCIGEFNARTLDAENEQA

SEQ ID NO: 21331 - protein, 429 aa, synthetic construct
MSTDQDEQLSSYENQVRYYQDYIRQNPLYQLVDIYADEGISGTNTKKRTGFNRLIADCRKGKVDRIIVKSISRFSRNTLDCLKYVRELKELGIGVTFEKENIDSLDAKGEVLLTILSSLAQDESRSISENATWGIRKKFERGEVRVNTTKFVGYDKGENGNLIINEEQAKIVRRIFRYFLQGETPESIARTLKEEGVPGWNGKVNWYPTTIQRMLQNEKYMGDALLQKTYTVDFLTKKRSENQGQVNQYYIKGNHEAIIDKEEWELVQLEIERRNQFRQDNHINFYIIQCEQNPFTCKVFCEECGGLFGRKNWTTSRGKRPVWQCNNRYKVKGIQGCTNRHIDEETLQQAFFRAVEVLRENKENLQEKWTNFSEEQKLEKYHAAQLKELLDSEQEAFDGRKMCQVLEKIMLGEDGSITVKFLEGTEVNL

SEQ ID NO: 21332 - protein, 514 aa, synthetic construct
MEVLRGLRAAAYARFSDTKKKKNEKGKGKDINVATIEVQYKKIADFCLGYGINIVAWFKDEGETGTNLDRGDFARLVEGAKMRQFDIVVIYDLTRGSRDVVDWFSFRKEMRTLGLPVLSATEKLGDITNPSDFLTELITVGIGQHHVLQTRLKTMNAIAALAEQGRFCGGIPPLGYDIDVEKKYVVNEREAEAVRDIFRLYAAGKSYSYIVDQMKKNGVVGKRGRPIGVNSLFEILRNERYIGVYSWNKKQMKFFRKWAGGKPNPNAIIIENKIPRIIDDETWGRVKKRMEENKKNRLNKSRINREYLLSGLLKCASCGGSFVGVTTINKKGYEYKFYTCANKRRTRTCSCKNISADEIETLVVMLLKDKLLNGELIEATADAILNFGASPGRENALESIKKEITSLTIKIGNLTRILADGFDSESVREAALDMEKRKKLLEQQLQNTYPVITKPVSRDFLIKELSTDARRVMDEPGCMKEILNKYILNIKIADDKIEINAISDLNTIGCGGQI

SEQ ID NO: 21333 - protein, 628 aa, synthetic construct
MRKNEKITALYERLSRDDFGKDDDQQRESNSISNQKAMLEEFAARQGFTNIVHFTDDGISGTCFDRPGFLAMMKEVEAGNVEYLCIKDMSRMGRDYLKVGQIMEILRQRGVRLIAINDGVDSARGDDDFTPFRNIMNEYYARDTSRKIRSTFQSKGKSGKHLTGTVIYGYLWNEARDQWLVDPEAAEVVKRIFAMTIEGYGPYQIASKLKSEKVLIPSAYLAQHGEGVNKNKTFKDVYGWGSSTICNILEKREYLGHTINFKTRKHFKDKKSHYVPEDEWTIFENTHEAIIDQQTFDLVQKIRGNVRRYPDGWGEAAPLTGLLYCADCGGKMYVHRTNNGKSISQYTCSQYTKVPCGTLCKTQHRINEDVVLSLVSEMLKSIAEYAKHDRAEFVRVVQEAQSSQQTTEVRKQRTRLATAKQRVSELEVLLCKIYEDNILGKLSDSRYATLDAQYEKEQTELTAEISALEKAVKSYEKHEKDADRFIDLIDKYENFDKLTIAMLNEFIEKILVHERDRKGSIQTTQEVEIYFNFVGRFVPPAFGEVELIPEELEEIRKREERKDRLHQNYLKRKASGAQKRYEDKIKEKKKAEIEAKKAAIRAEDIAKGVFVPVSQLPTREPQKGVQTA

SEQ ID NO: 21334 - protein, 487 aa, synthetic construct
MYLFYQKRGTNSMKTTNKVAIYVRVSTTSQVEEGYSIDEQKDKLEAYCKIKDWKIYDVYVDGGFSGANTQRPELERLISDVKRKKVDIVLVYKLDRLSRSQKDTLFLIEDVFAKNDVAFISLQENFDTSTPFGKASIGMLSVFAQLEREQIKERMMLGKEGRAKNGKSMSWTTIPFGYDYSKETGVLSVNPTQALIVNRIFTEYLNGKPVVKIIRDLNAEGHVGRKRPWGETITKYLLKNETYLGKVKYKDKVYEGQHEPIITQELFDLVQLEVERRQISAYEKYNNPRPFRAKYMLSGLMKCGYCGASLGLRYTRKDKNGISHHKYQCRNRHSKDLEKRCESGWYSKEELERVVIKELERIKFDPKYKNETLAKKEETIKVEEIKKQLERINNQVSKLTELYLDEIITRKELDEKNDKIKTERQFLEEQLENQKSNVLSIRKRKLTRLLKDFDVEKLSYEDASKIVKNIIKEIIVTKDGMSITLDF

SEQ ID NO: 21335 - protein, 508 aa, synthetic construct
MKKAIAYMRFSSPGQMSGDSLNRQRRLITEWLKVNSDYYLDTVTYEDLGLSAFNGKHAQSGAFSEFLDAIEHGYILPGTTLLVESLDRLSREKVGEAIERLKLILNHGIDVITLCDNTVYNIDSLNEPYSLIKAILIAQRANEESEIKSSRVKLSWKKKRQDALESGTIMTASCPRWLSLDDKRTAFIPDPDRVKTIELIFKLRMERRSLNAIAKYLNDHAVKNFSGKESAWGPSVIEKLLANKALIGICVPSYRARGKGISEIAGYYPRVISDDLFYAVQEIRLAPFGISNSSKNPMLINLLRTVMKCEACGNTMIVHAVSGRLHGYYVCPMRRLHRCDRPSIKRDLVDYNIINELFFNCSKIQPVENKKDANETLELKIIELQMKINNLIVALSVAPEVTAIAEKIRLLDKELRRASVSLKTLKSKGGSSLGDFHAIDLTSKNGRELCRTLAYKIFEKIIINTDNKTCDIYFMNGIVFKHYPLMKVISAQQAISTLKYMVGGEVYF

SEQ ID NO: 21336 - protein, 508 aa, synthetic construct
MKKAIAYMRFSSPGQMSGDSLNRQRRLIAEWLKVNSDYYLDTITYEDLGLSAFKGKHAQSGAFSEFLDAIEHGYILPGTTLLVESLDRLSREKVGEAIERLKLILNHGIDVITLCDNTVYNIDSLNDPYSLIKAILIAQRANEESEIKSSRVKLSWKKKRQDALESGTIMTASCPRWLSLDDKRTAFIPDPDRVKTIELIFKLRMERRSLNAIAKYLNDHAVKNFSGKESAWGPSVIEKLLANKALIGICVPSYRARGKGISEIAGYYPRVISDDLFYAVQEIRLAPFGISNSSKNPMLINLLRTVMKCEACGNTMIVHAVSGSLHGYYVCPMRRLHRCGRPSIKRDLVDYNIINELLFNCSKIQPVENKKDANETLELKIIELHMKINNLIAALSVAPEVTAIAEKIRVLDKELRRASVSLKTLKSKAVSSLGDFHAIDLTSKNGRELCRTLAYKTFEKIIINTDNKTCDIYFMNGIVFKHYPLMKTISAQQAISTLKYMVDGEVYF

SEQ ID NO: 21337 - protein, 434 aa, synthetic construct
MAAYCRVSTDQDEQLSSYENQVSYYRDYILKHEDYELVDIYADEGISATNTKKREAFNRLIQDCRAGKVDRILVKSISRFARNTLDCIKYVRELKELGIGVTFEKENIDSLDSKGEVLLTILSSLAQDESRSISENATWGIRKKFERGEVRVNTTKFMGYDKDENGKLVINPEQAEVVKHIYQQFLKGYSPESIAKELNTNGIKGWSGKANWYPSSILKMLQNEKYKGDALLQKTYTVDFLTKKRTENDGQVNQYYVTNNHEAIIDTEMWDTVQEELARRKDFREKHKLKTYIMQSDDNPFTTKVFCAECGSAFGRKNWTTSRDKRKVWQCNNRYKVKGQIGCQNNHIDEEMLEKAFMKAVELLQEHRADVVVKWQKLEKGTNLLHKHYAKQMYQLLDLEKFDGTIMNKVLDHISISEVGQIIVIFLEGTEVEL

SEQ ID NO: 21338 - protein, 639 aa, synthetic construct
MSVDKDWNGLADLIANLITKYAGVLDLDNLPDPMPVDNNIENKNIFDIAKTQIDKNKSDIIYLIYKSKLFWKYKDIEKYIEVNAMSKEKIKVYLYTRVSTSIQIDGYSLEAQKTRMKAFALYNDYEIVGEYEDAGKSGKSIEGRVQFTRMMEDIKSGKDGVSFVLVFKLSRFARNAADVLSTLQTMQDFGVNLICVEDGIDSSKDAGKLMISVLSAVAEIERENIRVQTMEGRIQKAREGKWNGGFAPYGYQLVDGKLFINEEEAVAIRTIFEQYVNTTIGANGLSKYLENHGIRKIPRQNGKNPLFDAGLIRKILKNPVYKGKIAFGRRTLEKVHGTRNEYKQVEQDEYLIAEGIHEAIISDELWQAAQVKLKSQAKKYEHVNKGKDVRTHLLSGIVKCPICGVGMFGNKCIKKKKDGTKYKDFYYYGCKHRQMIRGHKCTFSKQIREELLDDAVAELIIKIVSNPKFASIMQEKINMKVDTSEIEKEIDNYQKELRKSHSIKFKLIEEIDNLNVDDKHYKRRKQDLDDRLYRMYDKIEELESLLIDAKAKKQTIEAEKLTGDNIYKVLIYFDKLYNVMNDVERRQLITALISEIQIYEEKQPNGQWLKSITFKLPVIDEDLNISLDNDKQVECVVLM

SEQ ID NO: 21339 - protein, 524 aa, synthetic construct
MNGFRRPTTRTADGAPLKAIVYCRVSSVAQTKKGDGLASQEQRCREYAAFKGYNVVKVVYDRAVSGKLLDRPGIREVVQFLKREKQADQYVVVFDDISRLARDIRTHLDLRDAIYATGAQMDCPTIEFREDSDGLYFEGMQALNAEHYRRKNAEQTKNRMRGRAMNGYWCFHAPPGYKFARVAGHGNLLVRDEPMASVIQEALEGFASGRLQSQGEVKRFLEQRPEFMQGRRRSELRYEDVIRFLTRPHYAGYIEIPEWDVPLRKGHHEGLISLEQYEQIQERIRDGARAPARRDINADFALRGAVLCADCGKPLTACWSKSKTGRKHPYYLCFTKGCVSSRKSIPRARLEDDFEALLQKMTPSAETFALASVMFRQAWDAYLEQATQVIAALKADIVRLDRQIEQLLDRLVEASNASTVAAYERRIAKLEKDRLIAAERLNKKPGPKRSFDDMFELACGFLSSPWNLWKSQSLNARRMVLKLAFAERLAYGRNEGFRTPKTTLPFKMLADFETAKCRMAGRDR

SEQ ID NO: 21340 - protein, 454 aa, synthetic construct
MIILIRAAIYIRVSTQEQVENYSIEVQRERIRAFCTAKNWDIYDEYIDGGYSGSNLERPGIKKLLNDLKNIDVVVVYKLDRLSRSQRDTLELIEEHFLKNKVDFVSITETLDTSTPFGKAMIGILSVFAQLERETIAERMRMGHLKRAEKGLRGNGGDYDPAGYTRQDGHLIIKKDEADHIKRAFDLYEQYYSITRVQETLKEEGYPIWRFRRYRDILSNRLYIGRVTFSGNEYEGQHEPIISLEQFKRVQTLLKRHKGHNAHKAKQSLLSGLITCSCCGEKYVSYSTGKSKDDESKRYYYYICRAKRFPSEYKERCMNKTWSRQKLEDAVIGQMKDLTVFKYHNQKKEKQINYTKLIKEIDKKMERLLDLFTTNTNISRQLLEQQMEKLNSDKEKLILKQQSSEQEISLSNEMITKTMKSFDTLEFKDRQILINKFIQEIQIKHENVEILWRF

SEQ ID NO: 21341 - protein, 460 aa, synthetic construct
MVGNVMENLPTKPLRVAPYIRVSGQEQAIKGLSLEAQQEDLLEYCLERGWIVVDVYVDAAKTARKSLGKRTNFLRMLEDVKRDKVDLVLFTRLDRWFRSVADYYKVMEVLEAHNCGWKTTQEQYDTSTAGGRLYINLRLSIAQNEADLCGERIGVVFDSKIRHGTAVSGNCPFGYRVNEEKRLEIVPERAAIVQDAFQHYRATVSQRGTIKYIRETYGLNWTDTNFRRILHDRLYTGYYDRNGRTNESFCPAIIPQELFDAVQKLLSNNAKSNPTGRVYLFTSILVCAECGHKLAGHQTNGKYYYYRCSQHYRRDLCSHDKEIREEVVEAWLFENLGRVFQEWRTEWEVKEAQRKQSAAAVDRAAVRRKLSRLKELYLNEVIDLEEYKRDYEALSTQLEERPALPPAPRPNFEAVEAFLAQDFRQIYDTLEREEKRTLWRSIIKEIRIDNDQQVKGLSFL

SEQ ID NO: 21342 - protein, 449 aa, synthetic construct
MVQLRRISPPPEVKKAKRVVAYARISFETERTPRSLSLQVSYYSKLIQSTPGWRYAGVFSDSGVSGTTTNRAGFQEMLAKARAGGIDLIITKSISRFARNTVDLLEVCRELKGIGVEVFFEKENISTFSDDGELMLTLLASFAQAESEQISANAKWRVAKKFEQGLANGFHLYGYSPSADAADVQIVPEEADVIRWVFKSYMEQVSCEAMARELTKQGVRLPNQPTDNVAPESLRFILKNPTYTGDLLLGRWFVPEGKIGRTIKNTGEKPKYLVENAIPAIIPREQFDQVQQEIARRRALGARANWSIKTSCFTSLIKCGICGRSFSRSGKRNTQGVVNYVWICRTKRDGPKRTKGRRCTNKTIPEVILQETTTKILGIEQFSTQAVEARIERIDVPEANKLIYTLKNGTQITTEWLSDLKKRCWDDAARAKKSRDLKRYWASKQHKTK

SEQ ID NO: 21343 - protein, 592 aa, synthetic construct
MNKSDIIYLIYKSKLFWEYKDIEKYIEVNAMSKEKIKVYLYTRVSTSIQIDGYSLEAQKTRMKAFALYNDYEIVGEYEDAGKSGKSIEGRAQFTRMMEDIKSGKDGVSFVLVFKLSRFARNAADVLSTLQTMQDFGVNLICVEDGIDSSKDAGKLMISVLSAVAEIERENIRVQTMEGRIQKAREGKWNGGFAPYGYKLVDGKLLINEEEAVAIRTIFEQYVNTTIGANGLSKYLENHGIRKIPRQNGKNPLFDAGLIRKILKNPVYKGKIAFGRRTLEKVHGTRNEYKQVEQDEYLIAEGIHEAIISDELWQAAQVKLKSQAKKYEHVNKGKDVRTHLLSGIVKCPICGVGMFGNKCIKKKKDGTKYKDFYYYGCKHRQMIRGHKCTFSKQIREELLDDAVAELIIKIVSNPKFASIMQEKINMKVDTSEIEKEIDNYQKELRKSHSIKFKLIEEIDNLNVDDKHYKRRKQDLDDRLYRMYDKIEELESLLIDAKAKKQAIEAEKLTGDNIYKVLIYFDKLYNVMNDVERRQLITALISEIQIYEEKQPNGQWLKSITFKLPIIDEDLNISLDNDKQVDESYPNDLHGNII

SEQ ID NO: 21344 - protein, 470 aa, synthetic construct
MKQKKLRVGAYCRVSTEHEEQQTSIEAQVSYYTEYIKENDKWEFAGVYEEKGISGTNAKNRPEFNRMIKNCMDGKIDMIITKSISRFMRNTLECIKYIRLLKEKGVSVYFEKENLDTKDSKGEFIITLLGGIAQEESRTLSLNTKWGIIHRFQQGIIKVNHNRFLGYTKNRFGELVVIPEEAKIVERIFTEYLEGKGSKKIADGLTADNILTPAGCSKWYPSTIIKILGNEKYIGNALLQKTITLDFLTKKRIKNTGQERQYYVENNHEPIITKEVYIKVQQEKLNRRSTMGLKKKDQGVYKSEYALSGKIKCSQCGKTYHRCHWTIKKERIIVWRCGNRQHNGPKACQAPTIYEKDLFEAIDIVFKTLIRKKEQFIKEMEDTLTKEKELTDPIQKEKEVYNLKDLEWDNKKQRLKEMEEIFETSKQELTEYNDLYCRKLIEKILVISEKEIQIEFKSGIVLNGSINTKN

SEQ ID NO: 21345 - protein, 512 aa, synthetic construct
MAKKKKPAGGNAIIYARYSSHNQRDVSIEQQIEACRKHAAELGLTITDTYEDRAISGRTDNRPAFQRMMRDAEDGKFQYVLAWKSNRMGRNMMQAMVNESRLMDCGVKVFYAEEDFDDSAAGRFALRSMMNVNQFYSDNLAEDVRRGLMDNASKCMANGRQPLGYKRGEGGKVVVDEPAAAIVREIYTRIASGEMFMDIARDLNRRGIKTQSGSEWNKSSFNVLCRNERYRGIYIYGDTRIEGGIPPIVDDVLWYKVQEVLKVKKSKNRHHCPSDEDYLLTGKLRCGKCGGYMIGMSGRSKTGDVHHYYACQNRRVGHTCDKKNIRRDVVEPAVAQAIKQYCLTDDAIEWITDQTIAYWEDEDRKLQIDSIENDLSAVQSSISNVMKAIEMGVITETTRDRLIELERQQTDLKSKLALAKEEIVHVDRKDLISSLLAFRHGNVHDRAYQEKLFNAFLIAVYVYDDDHLKLVFNSFGKDDTVNIALDLGENDDNSGLSDVSKSSPILSNGQPD

SEQ ID NO: 21346 - protein, 448 aa, synthetic construct
MESGYIEAGSVLLVESLDRVSRQDIDTAGEQLRKILRSGVEVVTLVDNEWYTKESLKDSLSMIKAMLVMERAHEESAMKSTRLRSMWAAKRERAANGEIMSKRCAAWLKVSDDRSHFEFIPENVKAVQRVFQLRLEGLSHVKIAKQMNDEGFSTLNQFKSVTGGWSQSSVTELLSNRSVIGFKVPSKSMAVKGVSEIPNYYPSIITDEQFYAVQQLKQGSGRKPSSDLPLLTNLFKGVLRCSECGFIVVVAGVSAKRSGIYKCSMKSEGRCNSVGFSRLQTDRALVQGLLYNTNRLSLNRDNGSAIGTLQSELEQLQKQRERLIKLAMLADDTESMAKDLKALNSQIKDAEKAVSEVHQREQSSQLETISHLDLTLKKDRIEAQIIIKRIVKEIRLNTAQKKCDVFLHNGLKLLNFPLDRVVDGEIFLEVLPLLEADEFDFDTYRVIE

SEQ ID NO: 21347 - protein, 455 aa, synthetic construct
MKGGADMKQVIGYLRQSTMKQQSLAAQKQAIEAIAEKHHIQHINFYSDKQSGRKDNRSGYRQITQLIQQGQCDILCCYRLNRLHRNLKNALKLIKLCQTYHVHILSVHDGYFDMDQAFDRLKLNIFISLAELESDNIGEQVRNGLQEKAKQGRLITTHAPFGYDYHHGTFIINQNESPTVKAVFNYYIKGHGYKKIAQLLEEDNTYINRQPYQVRNIIINPNYCGRVNNQYGQFDNMFPSIVSTSIYEQAQRLRSQKQTKQTSSDNQLKQKIKCPCCNATLTNMTIRKKNHTLRYYVCPKNMNASRFVCDFKGINAQTLEDKVLEVCRDFYQNQRIYTKIKSAIDKRIKRQRNIEKHHTLTQEQLIEKLAQGIIDAETFREQTQSLRQQPQRTTSINGHQIQHIIQNIIQKRFTLNILYPYIETIHITKDKNLIGIYFKNEPLNIVNQTMQSSIA

SEQ ID NO: 21348 - protein, 475 aa, synthetic construct
MYVRVSTDKDEQVSSVENQVDICRYWIEKNGYEWDQNAVYFDDGISGTAWLERHAMQLILQKVRKNELDTVVFKSIHRLARDLKDALEIKEILLGHGVRLVTIEEGYDSYYEGNNDMKFEIYAMFAAQLPKTLSTSISAALSAKVRRGEHTGTIPFGYDRIDKKLIINDEEALLVKEMFDWYEDGRGYRMIANNLNKKGCRTRFGNLWSEASVKTIVTNSLYTGEHVMHKYKTVKVDGKKKTVKNPKEKWLVFENHHDAIISKEQWERINLVSGVKDKKTKSDYRNEFRGIVWCAHCGKRVRAIYAGVRSKYERVYMKCSTYKAYGTCVNHIPVRYEDFRNLILERLKQKQEYIETRLVAQIKDKLQGKIAKLKKTIKQLESKKEKLLELYMDSFIDKETFVNRNRKLEDEMTAQELQLLKLKDKDIQNRETKDIQDAFMLLQEEQDLHKAFQKLIKKIVFYQDGKLDIEYTFDI

SEQ ID NO: 21349 - protein, 454 aa, synthetic construct
MIILTKAAIYIRVSTQDQIENYSIEVQRERIRAFCKAKNWDIYDEYIDGGYSGSNLERPGIKKLITDLKNIDAVVVLKLDRLSRSQRDTLELIEEHFLKNKVDFVSITETLDTSTPFGKAMIGILSVFAQLERETIAERMRMGHVKRAENGLRGNGGDYDPAGYTRKDGQLIIKEDEATHIKRVFDLYEQYYSITKVQEVLKEEGYPIWRFRRYRDILSNTLYIGRVTFSGKEYEGQHEPIVTSEQFKRVQTLLKRHKGHNAHKAKQSLLSGLIACSCCGENYVAYSTGKSKDTESKRYYYYICRAKRFPAEYEERCMNKTWSRKKLEEVVISELKSLTEEKKQTNKKEKKVNYEKLIKDIDKKMERLLDLFMNTTNISKNLLEQQMEKLNLEKEKLLLKQQRSEEESISHEVTLTAIDDAFETLDFKEKQVIINNFIEKIYINQNNVKIIWRF

SEQ ID NO: 21350 - protein, 455 aa, synthetic construct
MKGGADMKQVIGYLRQSTMKQQSLAAQKQAIEAIAEKHHIQHINFYSDKQSGRKDNRSGYRQITQLIQQGQCDILCCYRLNRLHRNLKNALKLIKLCQTYHVHILSVHDGYFDMDQAFDRLKLNIFISLAELESDNIGEQVRNGLQEKAKQGRLITTHAPFGYEYHNGTFIINQNESPTVKAVFNYYIKGHGYKKIAQLLEEDNTYINRQPYQVRNIIINPNYCGRVNNQYGQFDNMFPSIVSTSIYEQAQRLRLQKQTKQTPSDNQLKQKIKCPCCNATLTNMTIRKKNHTLRYYVCPKNMNASRFVCDFKGINAQTLEDKVLEVCRDFYQNQRIYTKIKSAIDKRIKRQRNIEKHHTLTQEQLIEKLAQGIIDAETFREQTQSLRQQPQRTTSINGHQIQHIIQNIIQKRFTLNILYPYIETIHITKDKNLIGIYFKNEPLNIVNQTMQSSIA

SEQ ID NO: 21351 - protein, 506 aa, synthetic construct
MGWHNMKPNIKDVAIYLRKSRDDSDGQEDVLAKHESLLLEYAKSHNFKYKIYKEIGSSEYIDWRPEMVRLLTDVEQELYDAVLVVDLDRLSRGDLEEMGRISRVFRNSKTLVLTPSKTYDFNNEDQALINNFEMVFANHEFRMINKRMIRGKKQGTKSGRWTNGRPPFPYVYNRLTKELDVDPDKVKVYELMKKMFLEDMKATYEIAWKLNELGFKTNRNSYWYENTVRRILKNEVHLGKVVYGKTSGSGSKKKPTANGVQIKDRSEWIIAEGSHQPLKTEEEHQRILAILESRRYTPKGTRTNVQVLSKLIYCGKCNRIMSFTGKASGKRYVKTCLTMDRFGNRCHNRSLNVEVIYAQLFLDLEQYEQQLLNHEPKEKQGDSSTLQLALHNKLEELERLEKGIERIKDLFIDEIIDKLEMQKRIEKQKQLMQTKKEEIRSIEQSLAVIENVRTDNDRLHAIREFKTAWDTDGISKRELNILAKQLIDRIEYVREGNNVQINIKFF

SEQ ID NO: 21352 - protein, 573 aa, synthetic construct
MAYNAQNKTGARVAIYVRVSTLHQIDRDSLPMQKQDLLAYAKLMLNTDDCVIFEDAGYSGKNTDRPKFQEMMSQMRAGAFTHLLVWKIDRISRNLLDFATMYNELKALGVTFVSKNEQFDTSTAMGEAMLKIILVFAELERNMTSERVTATMISRANNGLWNGGRIPFGYDYDYETHEFSVNEKESKVVILMHDMYEQERSLVRVVRELNERGYRSRAGNLWSPVSLLIILRNVFYCGDYRYNMLKEGDRQKVKDESEWVTVENHHVAIIPKDQKERIMATLDSNSKLCKQRNIYKSSKHTHVFGGLIYCGSCGKPLGSTPGNLTRDGWHYSKYTCPTRRKSVTLCTGKSTSDPIIGEFVFNYILNMLNAQNGFDKISSPEELEKLLLIGDTFAYIDHIEPNGLNDLFNVLSSGAVKGAVFGKGASLPTKKATVEPEVARLRNEKQKTERALDRLRSLYLYADEAMSEAEYMIQKNKLEETLEDINDQIGMMNTDSWQQSVSDEEFIQRASEFIIAQKLSGRKYVNYKRLAMSVDSEVLKNFVVSIIDSITIQDGLVSNIVFKNGLCHTFIFR

SEQ ID NO: 21353 - protein, 514 aa, synthetic construct
MKQCVIYARYSSERQTEQSIEGQLRVCYEFAKNNDLIVVHEYIDRAMTGTNDLRKEFQQMLSDSEKTKEWDICLVYALDRFGRNSIEQAINKYRLQKTGKIVISATQRTSRNIDGSQNLDGIILENMYVGMAEYYSAELSQKVKRGMNESRQKGNFTGGYIPFGYCVTGDRKTGRKVQINEDQAVIVRKIFEDYAAGRLVTDIIDELHEKGIENRGQPFARNTVYYLLKNEKYAGIFRHGDEVFTNIYPPIISQTTYDIVRARIENNKYGKHKPNVEYLLKFKVTCGYCGSPINSDSGTSKSGVIMRYYKCSGRRKGKNCQSTPIRKEVLEKVVIDATYKALATPDLIEDIAERIMGAHQKRMDDQSILHILEERLAEKKSSIDNLIAAMEQGIISQTTKERLNALEAEKAELINKIAVEKLKSNLIIQKNDIVKYLQSAVKKRPLQMIQLLIKQVVLYNDKIEIHFNYTDGKRPDDELHQAFSFYSFNQRITIDQHKIGKEPIVTDYEIILFI

SEQ ID NO: 21354 - protein, 522 aa, synthetic construct
MGKVRIIPQTINPLTQVKIGTIKKKKVAAYARVSTDQEEQESSFDAQVQHFTEHIKSRDDWEFVKVYSDEGISGTSLKKRDGFNQMVADALDGKIDLILMKSISRFARNTLDLLTTVRKLTAKGVEVFFEEQNISTLDGGGELFLTIMSSIAQEESRTISENVKWGKKESYKKGNVSFAYSRFLGYKKEDGKIVIDKEQAVVVKQIYQWYLRDGLTLTAIAQRLNENSVKTPGGKNNWTVNNITSILTNEKYKGHAILQKTYCDNFLTHQMKKNTGQMPKYHVEDSHPAIIDEDTWNEVQLEIQRRREIGTCYSSTDVFSGKLICADCGSFYGAKVWHSTSKYARTVYQCNHKFKHKCQTPHLEVSFIKEKFIEAYNKVMIDKESLIEDTKEGITVLCDFAGIDGRLIELQNEMDIVSELSNKMIIENMHKLQSQEEYTKKYEELLKRYEKANVEYGRIQDEKLHKIGLSQKLESFIKDLENRPASIDYFDETTFRFMVESVKVSRDKKLTFKFRNGKEIEV

SEQ ID NO: 21355 - protein, 438 aa, synthetic construct
MIVNEIVPQELANKRLRVCAYARVSADNEDMMHSLSAQVSHYNDMIASNPKWIFAGIYADGGLSGTKTNRPEFQRMIQDCKNGKIDLIVTKSISRFSRNTIVMLETIRMLDEMGIDVYFEEQQMNIKSGKGELMLTIIGSFAQEEARQVSENMKWRIKKDFEKGILWGGNNPYGYIIDRKEKRLVVNPEQAKVVRLIFEEYLDGKGASLIAKKLNKMGFKTMMNSEWNNNVVMAILKNEVYTGDLLLQKTYRENYLTKKTLKNKGELQQYYVEDDHEPIITHEMFEETQRIRNERIDKFKNKISHSNKAYPFTGIIKCSCCGSTFNHKTTKYNKLWICKTFNMKGKEYCQESKQIDESKLYEAINKYFGWDCFKENDFKTKVEYLIAKPNNEIEMHFKDGNIAIIKWEDRSRSESWTPEMKEKARQKKTEQYKKEEVD

SEQ ID NO: 21356 - protein, 492 aa, synthetic construct
MAKRYGVVIKETYREKPISGERISERPEMIRILEDVEEEKWDGVFTVEVERLARGDTMDQGLVAQAFKYSQTLIVTPMRIFDPNDPNDEEYFEFNLFMSRREFKTINRRLQGGRISAVEEGRYIGSVAPYGYIKYKLPVGKGFSLRPHPEQAPIVQLIFSLYTDPDPEKRMGTTSIAEYLNDELKVPTARDARWIEATLNDILRNPTYLGNVRWGSRPLVKKKNTKSRPRRSRKDSNEHKGLHVPLIDVETFELAWKIRESNSNSKGPKAQISNPLAGLVRCGMCGGPILYRPYGGKNPDALICTKKGCPNVSSYLYLVEERLVQSLGIWLDGLKSQLNTRQETQSNRQEDTKINALLSVQRELKKQLEEVKKQQNNIYDLLEQQVYTIEMFKERAKVIAERYEEVKKAFDETEAELAGLRRRVEAQYETIPKLEKCIDGYRMAKTPAEKNALLEQVIESVIYTKKVGGRWSGAIDQFDLKIIPRISPQKTP

SEQ ID NO: 21357 - protein, 541 aa, synthetic construct
MPKAISYIRFSTKIQSVGDSTKRQSKYINDWLKRNPDYYLDESLRFQDLGISGFSGANAKSGAFGEFLAAVESGYIEAGSVLLVESLDRVSRQDIDTAGEQLRKILRSGVEVVTLVDNEWYTKESLKDSLSMIKAMLVMERAHEESAMKSTRLRSMWAAKRERAANGEIMSKRCAAWLKVSDDRSHFEFIPENVKAVQRVFQLRLEGLSHVKIAKQMNDEGFSTLNQFKSVTGGWSQSSVTELLSNRSVIGFKVPSKSMAVKGVSEIPNYYPSIITDEQFYAVQQLKQGSGRKPSSDLPLLTNLFKGVLRCSECGFIVVVAGVSAKRSGIYKCSMKSEGRCNSVGFSRLQTDRALVQGLLYNTNRLSLNRDNGSAIGTLQSELEQLQKQRERLIKLAMLADDTESMAKDLKALNSQIKDAEKAVSEVHQREQSSQLETISHLDLTVKKDRIEAQIIIKRIVKEIRLNTAQKKCDVFLHNGLKLLNFPLDRVVDGAQWLEVLPLIDGDEFDFAEFTAKPRHIALEEAPEWVKEMEEQPNQPL

SEQ ID NO: 21358 - protein, 529 aa, synthetic construct
MTYQEGGEAMKKITKIEGNQDYIFKPKTRVVAYCRVSTDSDEQLVSLQAQKAHYETYIKANPEWEYAGLYYDEGISGTKKENRSGLLRMLSDCETRSIDLIITKSISRFARNTTDCLEMVRKLMDLGVHIYFEKENINTGSMESELMLSILSGLAESESISISENTKWAIQRRFQNGTFKISYPPYGYQNIDGRMIVNPKQAEIVKYIFAEVLSGKGTQKIADDLNRKGIPSKRGGRWTATTIRGMLTNEKYTGDVILQKTYTDSRFNRHTNYGEKNMYLVENHHEAIISHEDFEAVEATLNQRAKEKGIEKRNSKYLNRYSFSGKIICSECGSTFKRRIHSSGRREYIAWCCSKHISQITECSMQFIRDEDIKTAFVTMMNKLIFGHKFILRPLLNGLRSQNNAESFRRIEELETKIENNMEQSQMLTGLMAKGYLEPALFNKEKNSLEAERESLFAEKEQLTHSVNGNFTKVEEVDRLLKFTTKSKMLTAYEDELFENYVEKIIVFSREVVGFVLKCGITLKERLVN

SEQ ID NO: 21359 - protein, 581 aa, synthetic construct
MPEKIINCAIYTRKSTEEGLEQDFNSLDNQYEFCTNYLKSINDPALQLLPARYDDGGYSGGSLNRPALQRLLADIQCGLVNRVIIYKIDRLTREIRDFFKLLDIFEKYNVEFVSVKENQYYNTTTAIGRLMVNMFLVFAQFERENAGDRIRDKIATSKAKGMWMGGCPPYGYDIGDRCLVINETEAQNVRFIYQTFCNTHSLADTTDALNSGGIRTKRYTTRQGRTFGGRKFSVKTVQRILQNPLYKGMVAHRGKQYPGQHAAIIDAVQFDMVQAVFAAHKEKRETRRPKMPSSGGERETAALTGLIFCGCCGSAMTPSYCCKGDIRYHYYRCYRRASKLEDKCPINQIRTSEIDRVVMEQVLAILKSRDFFVQYISHHHEFDVSTAFALFNSLDDVWNSLFETEKRRILRELLAKVTIYKDKIVLDVKKAGLAGVFAELSQNNRLAEVEYKENETFQISVAYRATRLANGAKIIVPATAKEESRFNGSLRLARQIAKGFAWRKMIESGLSLQELTASAKTNERDIRFAMRLSMIDPAIVESVLSGKSPEFLTYAFMKKHPIPLLWSDQRKLYGFEERKQQ

SEQ ID NO: 21360 - protein, 496 aa, synthetic construct
MVKEGFAELSSYAVYVRVSTDRDEQISSVENQIDICRNWLERNGFEWNEQCVYKDEGISGTLFTDRPAIQLLLQKAKTKKINMVVFKSISRLARDLKDSLEIREVFLAHNVRIISVEEGYDSTKAGKNDMAFELWSLFSAQYSRTLSSSISAALAAKVRRGEHIGKVPYGYNREDQKLIINKEEAEVVRNIYGWYNIGWGFKRITNELNRLGIKPKSKEFWQMTSVQRIVRSPIYKGTFILNQYTSVKVGGKKKQIRNPKEKWFIFPKHHPAIVDEETWSRVNEKNITDNKTKITAWNEFRNLAKCAVCGSNMVIVQSHLRKKSGERREWKYLKCSQYRRAGKHGCVNHVPIQYHDFRQFIIDLLVKKGESVNLKLQSNVEEGQEKKIKKLQQLLNVNEQKKKTLLDLYLEELINKEEFEKKRSDLEAEITKVSQELFILQQNDVVQTDIKTIKEAFEQLQKQEQDLFHVFQKLIQEIMIHQNGTVDITYTFEAPL

SEQ ID NO: 21361 - protein, 504 aa, synthetic construct
MDNTSYIIKYVALYLRKSRGEEDIDLEKHRFILREMCVKHGWKYVEYVEIANSETIEYRPKFKSLLSDVEEGIYDAVLVVDYQRLGRGELEDQGKIKRIFRDSETYIVTPEKIYNLVDDTDDLLVDVRGLLARQEYKTTTKNLQRGKKIGARLGKWTNGPAPFPYVYTAAIKGLEVVPERNVIYQEMKSRVLGGESLEAIGWDFNRRGIPGPGPKKGLWHSNTIGRILISEVHLGKIISNKTKGSGHKKKKTQPLVINPREEWVVVENCHAAVKTEEEHMKLLAMLEKNQVVPNRAKAGTYALSGLVFCGKCKKMMRYNVRSDGYTTNSIKACNKYDHFGNYCTNSGVKVNILTDFIDREIIDYEQRIIDSDNYINTDVIEKLERIIREKEAQLTKLNRALSKIKEMYEMEEYTREEYEERKAKRQQEISALESELAVHRYEINYDSREKNKERMKLINSFKDIWSSESATEHDKNMIAKMIISRIEYIHDKGTNNLNISIQFN

SEQ ID NO: 21362 - protein, 582 aa, synthetic construct
MYQKGSDYLRKVSKIEAKLPQLPERKKVAAYARVSEEKGRTLHSLSAQISFYSSYIQKHREWQYAGVYADEGISGTTDNRAEFRRLLEDCEQGKIDIILTKSISRFARNTVDLLETVRHLKELGIEVRFEKEGINSLSEDGELMLTLLASFAQEESRSTSENVKWAIRKKFQQGIPNSFNVYGYRWDGERFIVEPEEAKIVRLIFDNFLKGLSAEQTEVQLEEMGVKSYTGGHFSNTSIRAILRNEKYTGNMLLQKVFIPDHITHKSKNNDGELPQYWVEDSHEAIISLETYEKVQAEIARRRELGVFANKSINTTCFTSKVKCGNCGVSYRRSGKRQRKDSNTVYYVWICQTKDRKSSRECDSKTVPEKMLQKVSAQVLGLDEFDEDVFSEEIEKIVVNGKDELIFHFHDGEIITQHWKSTARTDWWIPEARAAKSAYSKMNPRSSGTITCYSGKIGCSKCGQNLRRNTSTRVSGEKAHHWRCPPHNNCGHSGLEENLLKSISADVLGIDEFDEAAFTDKVDRITVVSNEELIFHLKDGSKVTRQWQFKRRQPAWSEERKQRQSKKMTQVWRDKHEQSENS

SEQ ID NO: 21363 - protein, 587 aa, synthetic construct
MLQRGLKVMLKVAIYSRKSKFTGKGDSVENQIEMCKQYIMNHLEGDVDFLIYEDEGFSGSTINRPQFKKLIQDIKLKKINYLVCYRLDRISRNVSDFSSTLELLQNYNVSFISIKEQFDTSTPMGKAMIYIASVFAQLERETIAERVKDNMLELAKNGRWTGGKIPLGFTSKRKKYRDKSGLEREFSILEINKEEMDFVKFLYEKYLEVGSLHKLEVYMTENQIKSKNNILFEKSTLKIILQNPIYVKANAAVIEYLESNGWNIYGEADNIHSLLTYNKTRQVIRNGKRTKSLNPESERFASVSNITGALEPDLWLKVQSQFDRNKDTFPRLGKTHNALLTGKLKCGRCKEYMLVQHGRVSKLTGEKLFYYVCSLKRKSHKKFCDNKNAKAAELESLVLLSLKKLGNEQKEFMDRLKENYNSKLKDDSKSEKMLLDKALTEKKNQIDNLLNMLSKSKDIEDVMIDKIKSIKNECIEIEKRLTVLDDESKKDKVEKINLDLIENILCDCAVIDELPRVKQKQIINTLIDVIYWYGDKNNNGKVFIKFIGSDKDDFEEIELPDIDFSNTMLQFCSPSTRKTYDLLLPLR

SEQ ID NO: 21364 - protein, 529 aa, synthetic construct
MTYQEGGERMKKITKIEGNLANSFIKPKNRVVAYCRVSTDSNEQLVSLQAQKAHYETYIKANPEWEYAGLYYDEGISGTKKENRSDLLRMLSDCETGRIDLIITKSISRFARNTTDCLEMVRKLIGLGVHIYFEKENINTGSMESELMLSILSGLAESESISISENTKWAIQRRFQNGTFKISYPPYGYQNIDGQMIVNLKQAEVVKYIFAEVLSGKGTQKVANDLNQKGIPSKRGGRWTATTIRGILTNEKYTGDVILQKTYTDSHFNRHTNYGEKNMYLVENHHEAIISHEDFEAVDAILNQRAKEKAIEKRNSKYLNRYSFSSKIICSECGSTFKRRIHSSGRKYIAWCCSKHISNITECSMQFIRDEDIKTAFVTMMNKLIFGQKFILRPLLNGLRNQNNAASFRRIEELETKIENNMEQSQMLTGLMAKGYLEPALFNKEKYSLEAERERLLAEKDQLTRSVNGNFAKVEEVDRLLKFATKSKMLTAHEDELFENYVEKIIVFSREEVGFELKCGITLKERLVN

SEQ ID NO: 21365 - protein, 538 aa, synthetic construct
MQENYIVGIYARLSRDDERAGESVSIENQKEMLSRYVREQGWTLYDYYCDDGVSGTTFDRPGLNRLVQDATDHKINLVLCKDLSRLGRDYIEAGKYTDFVFPSLGCRFIALNDGVDTLRKNNEMLVILKNVMNDLYARDTSSKIKAVKLSTFKSGKYVGCYAPLGYKKSEADKHVLEIDPVTAPVVRHIFDLRLQGYGFRKIALQLNAEKVPAPRSFYYMAEGRENLRGETPFWNDVTVKTILRNEVYIGHMVQNKTGTVSYKNHKQVSKPESEWIKVENTHEPLISQETWDAVQRMDNHPARGRSGKSGTIALFGGLLRCMDCGSSMRYMRDYRKKVSEKEPEYKAYVCNRYASGGKNACSSHYINQKVLTQIVMTDIRCKAMWAQNSRETLRTQLLAREQNASVERTRTLQAELNAIGKRLPELDKLIQSAYEDKVLGRIPESVCVNLLNQYEAERREKQERRKELTEQLAASRETESSVDAWLDMMQDYAQLEELDRPTLVRLIQKIEISERYTVDDHEERDIHIYYNFVGYIEA

SEQ ID NO: 21366 - protein, 511 aa, synthetic construct
MKLKTCIYLRKSRSDEEAENQSEFETLSRHRSTLLKVAKEQNLNIVEIKEELVSGESIAYRPKMLELLDEVKNGFYDSVLVMDIDRLGRGNMQDQGLILETFKKSNTKIITPRKTYDLNNEWDEEYSEFEAFMARKELKLITRRMQRGRVKSVEEGKFIASNPPYGYKFVFDESGNKSMVIDEDKAEVVRMIFDLYVNKHYGGVKIATHLNSLGLKTTTGRTWYDKGVRDILKNKTYAGYVVWNKVERGKNSSKTRPIDERIEAKGIHEPIIDESVFLEAQSLFKSNFIPSTKQHTTITNPLAGLIVCSECGHKMIAQQSTYKNKEIVKFVKCLNCGKNRGVRLDILEKDIINELADWVDAYNVSIKDLDSNENKNPNLESYYSIIKSLESEYQTLMKQKENLHNLLEQGIYDVDTYLDRSKILTDKIDLNRSNLSQAKKDLENEKESVFSIADIIPQIKKVLELYYQSNDMQERNELLKEVIDYIDYSREPKKRTSRFNIKIYPRLIKNK

SEQ ID NO: 21367 - protein, 529 aa, synthetic construct
MAIYSRKSKFTVKGDSIENQVEMCKNHIINRIGKNVDFLVYNDDGFSGKNLHRPKFQKMLIDAKAKKFDTLICYRLDRVSRNIADFSNLINTLQNLNINFISIKEQFDTSTPMGRAMMYIASIFAQLERETIAERVSDNMLEMAKSGRWLGGQTPLGFKSKPILYLDYENHEKKMFVLSPIEEELTVVKLIYKSYLKFQSISKVTKYLIQNSIKTKKGKLIWSKRSVKDILNNPVYVRADENVMKFLSNKGINVIGIPDNKHAILTYNKKKGIKKFRQTNEWIASISKHKGIIDSKTWLKVQKIMIKNKSRAPRIGSTQNALLTGLLICKQCGNPMKIIHGPLNKEGKKLFYYKCSLKEKSGNSKCCNSNIRTDEIESVVIQKLHSISINKDILLNSLKNFRNLDENTEIQNIKKIVKHKQAKIDNLIKFLSLSPSISENVVHEIEILNKDIKELNFKLEKIIKTKADFVDNEEVSNLILESLRRVYINNFFSIEEKKLILQKIVDYITWDGDNGIVDIHLINEASFLH

SEQ ID NO: 21368 - protein, 567 aa, synthetic construct
MKYHNSLKIYGGFNMKKSAIYVRVSTNHQIDKDSLPLQKNDMINYSKYVLGIDDYEIFEDAGYSGKNTDRPDFQKMFKRIKNGEFTHLLVWKIDRISRNLLDFCSMYDALKKYGCTFISKNEQFDTSTAMGEAMLKIILVFAELERKLTAERVKATMLDRASRGLWNGAPIPLGYKWDDKIKFPVIDEDEKETVMLIYTSYSELQSTSAVRNLLNNLGVQTKRNGTWSTKTISDIIRNPFYKGTYRYNYRETARGKKKKENEWIVLDNNHEAIIYEEFWVQCNEIMDKNSNKNNAKFRGNSNVHIFSGLIECGECHSTMYAKQDKPNLDGYRPSLYACKSRYNGLGCTQKTISDKIVGTFVLSFISNMIRLSDLDRKNLDKEKVEKMLLVGKSFNNVYGIKEIDTILNSLIYAPKNLFTPIKKSTEKNKESYDIKKLDTELKKYEKGLSRLEDLYLFDECDMSQKDYILKKNKINDKISEIKEKIDQTITLNMSSCNYDFLLNATALEFSKEISNGNVDLKALIQRVNRDIIKEFVNTLINKIIVKNKKVQSIEFKNRLVVTFIYNL

SEQ ID NO: 21369 - protein, 526 aa, synthetic construct
MNNSYEEYALYLRKSRADIDAEARGEGETLKKHQTALLALAKKMNINVSKEYKEIVSGERVADRPEMQQLLQDVEDGKWAGILVMEIERLARGDTMDQGFVAQAFKYSGTKIITPVKVYDPDNEFDEEYFEFGLFMSRREYKTINRRQQAGRIQSVKDGNYIGNVPPYGYSKIRLEDKSYSLMPHPEQAPIVKMIYDMYTTQNMGMGNIAKKLNLLGVPTAKGSLWTVATISGILQNPVYVGDIVWNRRPVKKSRKDGKLLKTRSEVSEAQWIRVPGKHEAIINKETWELAHRILKGRYHAPAPTGVITSSLAGLVRCSLCGRLMVRRPYSREAEPSLICVTPLCKQVSSLFSLVEERILEGLRIWINQYKAKWDNNMPVETEDTEELLNAKSQIVKDSEKNLSELRKQSSALHDLLERGVYSIDVFMERSQNLSERIADAERGLSVANDDLNLEKNRKEAKDGIIPLAEYVLDTYYSIEDAAERNTLLKSVLQGAVYSKEKRGHWSKPETMRKFDLKLYPKLPEH

SEQ ID NO: 21370 - protein, 530 aa, synthetic construct
MGKKQKTNGGDAVIYARYSSHNQRDVSIEQQVEACRKHAAELGLTVTATYEDRAISGKTDKRPSFQRMMRDAEQHKFAYVLAWKSNRIGRNMMQALVNESRLVDCGVKVFYAEEDFDDNAAGRFALRSMMNVNQFYIENMAEDVKRGLYDNAKKGLVNGSLPLGYKRGADGKPEIDEPKAAIVREIYTRVAAGELFASIADDLNARGIKTARGREWNKGSFHVLCHNDRYRGIYMYGDIRIPGGMPRIISDELFYDAQEAYGMKKDNRYGRARHGAENYLLTGKLYCGHCGGYMVGISGTSKTGEMHYYYACQKHRLEHTCEKKAIRRDVIENAVARAIMMYCLDDETIDFIVDSTIAYFKQKDHELHIEAMENELAAVQQAISNLMKAIEAGIITPTTRTRLLDLEEQQSKLSAKINTAKAERVEINRDDLIAGLQLFRTGDIKNKKFLAKLFNTFLIAVYLYDDNRLKIVFSFTGNHNSVEIPLELDNDCPDSEIVSDETEVRMSHLEWTRRESNPRPFGCEPNAHPN

SEQ ID NO: 21371 - protein, 510 aa, synthetic construct
MQKRRTKYANSQGDNAVIYARYSSHNQKDTSIEQQIEVCTKYARDNGYRITNIYADRAISGKTDARPQFRLMMQDAREHKFDVVISWKSSRLGRNMLDAMTNDIILRNLGIKCFYTEENFDDTAAGRFALRNMMNVNQFYIENMAEDILRGMRDNAKKCRVNNGSPPLGYRRGADGKYEIVPDEAETVREIFTKVLAGMAFVDIANELNARGIKTKKGAPWGRSSFSRLLSNERYIGTYKWSDIVIENGMPAIIDREVFEMAQKKIKGERPLRRRHNENGDYLLTGKLFCGKCDSPMTGMSGTSKSGAKHHYYACYSARKDGSCDKKAVKRDWVEKTVALFIKEHVLRDEVIEWMVDQYMVYQKATFESQRIMEMRNQLKDVQSQLDNLVDAIARGIYTDSTKDKLLKLEADKKEIEQDIRLATYNLKEYDREHVRCYFLSFKEGSVESKDYLKRLFDQFVTKIYLYDDEIRIAFSGTKDDSPVSFKIIDEAEELAVSSVRLSSASSHQA

SEQ ID NO: 21372 - protein, 433 aa, synthetic construct
MSGRITTVSKPPKLERKKRVAAYARVSSGKDAMLHSLSAQVSHYSDLIQRNSDWLYAGVYADEAKTGTKDSRADFQRLIADCHAGKIDMVITKSISRFARNTVTLLQTVRDFKTWEVDIFFEEQNIHTMSADGELMLTILASYAQEESRSASENQKWRIKRNFEEGMPWNGAMLGYRLKDGRYEIVPKEAALVRRIYNEYLAGDGYQAVAKRLTEEGVPSRFGGKWNQSVVSKILSNYTYTGNLLLQKTFRENHITKKTVINHGELPKYHAEDAHDAIISIETFHAVQTEKARRAAQFNKKPAPRTTYPFTSLLVCDICGKNYRRKTTKTGIVWVCGTFNTLGKSVCASKQIPEATLQQVTAEVLGVKAFTREQLHSRVQSIRVCNGNILVFCFKDGSEVTRTWKDRSRAESWTDEMKEAARRKTLERSKHNA

SEQ ID NO: 21373 - protein, 526 aa, synthetic construct
MPKVTMIPATINPLTHLPKVAAQKRRVAGYARVSTDSDEQFTSYEAQVDYYTKFIQSKPEWDFVKVYTDEGISGCNTKKRDGFNSMVSDALAGKIDLIVTKSVSRFARNTVDSLVTIRKLKENGVECYFEKEGIFTFDGKGELLITIMSSLAQEESRSISENITWGQRKSFADGKVHLAYKRFLGYEKGEDGRPTIVESEAKVVQLIYRLFLDGKSQAAICRCLEDLGIPSPGGKDKWSKTTVTSILQNEKYKGDALLQKSFTVDFLEKRMKPNEGEVPQYYVEGSHPAIVDPDEWDHVQTEFARRKALGRAYSGKSVLSAKLVCEDCGGFFGSKVWHSTDRYRRTIWQCNSKFKVEERCHTPTVNTETVQRLFTQAYNRMMENREQIIKDCETMRRALTDFAELDAEIERQLEETQVVAELVKAAVKENASTAQSQEAYLRKYEALTERYEKAAAELERLQNLRTTQSQQDKAMALYIRTLKKQPVVLREWSDTIWTVMVEKAIVHRNGAITFVFKNGTEVKVGE

SEQ ID NO: 21374 - protein, 668 aa, synthetic construct
MAYAKAKKHLKIWTKKKAALYVRVSTRYQVDKDSLPFQRKKLKEYCKFLGLEDYVIFEDDGYSAKNTERPHFQEMMSRVRSGEFSHLIVWKVDRVSRNLLDFAAMYQELKDHKVTFISMNEQFDTSTAIGEAMLKIILIFAELERNMTSERVTGIMLDRAEQGLWNGARMPVGYRWSNKTKFPEPDPEEVKIVQLIFDKYEEWKSSIKITRYLNNNNFKSKRGGQWTSKLIHDIIRNPFYIGTYRYNLRESGRGPLKPESEWIVRENNHPAIIDKAQFDRCNKIMDQNGSSRDTSDLRARKYVHTFSGHLVCGKCGANMIASKDRARANGWRPSMYRCAQRSRMLDCDNSRTINESYIGPFIFNYIANLARVQKNFKNIATPEKLERELLKGETFDGVAGILPEGLNLTFQALSFRQVGNGTYIPDIDFLGDSDSASDRDQIELLKSEIEKSKNAVTRLTDVYLFDPDSMTKEEFATKKKELAKKIEGMERQLADLLDDSGNDDLADMSFIKKASAFLVAQRIVSKSFVDYVGMAQELDNEILKDFIDQIVDQIVVLDGRVQSITFINGLKHEFRYATPAELPVCQKCGGRIGSTCGCRTRTFDFSGKRYQRIKVGDPRDALHGKKNPVCPECFAQEGRWHHWNCKIEACPICGERLAECEHGPNGKN

SEQ ID NO: 21375 - protein, 543 aa, synthetic construct
MPDTPPLPPPRRRGRRAHTPTEAPTGPRRVCVYIRRSTDDEHQPFSLDAQRAALEKYVASQPDWTIVAEYEDDASGATTERPGLKKALRAAKAGLYDVLLVYRLDRFSRSVADLLDLITILEASNVRFSSATEPVDTGGPFGRMMLQLLAVFAEFERNIIIDRVKSGMTAKASKGKWAGGTRPYGYLVDPDHRLVPHPGEAPILRDIFRLYTRDRAGTRAIATALNERGIPNRTGKKWSGHTINRILDNPAYVGDIAYRDVYVPDAHEPLIDRATFQRAQDIANARGDTQTQRAMSDSDYYLTGLLTCPQCGQRYIGTSANGRTRRYRYYTCFTRSRYGKHATCTAPRLPADDLDQLVLQALHDFYATAEPVLAAMIERAHAQRDTTSDDRRAELGATAHQITTIEAAISRYHTAFENGTMDDATAGPRIRELRQRLAQLHTRHAELEADLATQPAPPPPATITRIREHLTTIMASGTPTERKAAIETLIAEVRLTDQGIVPVFKIPTDTTMPPPDPDGGTHDEPPVRTMVRSVGRLGLEPRT

SEQ ID NO: 21376 - protein, 496 aa, synthetic construct
MTVRNAAIYCRISHDREGRALGVAKQEEDCRALAERLGWEVGHVFVDNDLSASVHGKKPRPGFEDMIRRVEAGEFNAVLAWSTSRLTRRPMEHERLIPLFWERKIPISTVKAGDIDYTTARGRSRARDDARRDAEEAEETSERVERDVQRRAEAGEFHGGHLPFGIDADREIIRGKVKYVRFRHHTTDAPRVRDAARRLLAGETVYGIAKDFGMQPRTLKRAITNPAIAGLREYNGQFYPTPWEPIVDREDWERVCEILSDPSRRTSETNQRKYMLSGLVYCHCGNRMTSTSAKRTEGPTYECSPTKTGGGCGRARIVMRPLEEYIAEQVFTRLDSPDLREAMARESGGVDDKERELRKAVMDDEQRLVELANERDDNLIGEAEYRRRRARLTDRLEANRMTLERTTRKRARTNPPPGAELRAVWADKGSVWKRTILASIIERIDIGPHPVNPDTGRLFTSAPPRRKGEDHEAWRKRFDLHRARVFASRVYVTWLV

SEQ ID NO: 21377 - protein, 515 aa, synthetic construct
MKTAIYLRKSRADLEAEARGEGETLAKHRSTLLKIAKEMNLNVLAVREEIVSGESLVKRPEMLALLEEIEDNKYDVVLCMDMDRLGRGGMKEQGIILETFKRSNTKIMTPRKTYDLNDEWDEEYSEFEAFMARKELKIITRRMQRGRIASVEAGNYLGTHAPYGYDIHRLNKRERTLTINSEEASVVRMIFDWYANEDMGANAIRSKLNDIGYKSKLGNEWNPYSILDILKNNVYIGKVTWQKRKEVKQPDAIKRSCARQDKSDWIIADGKHEPIIPESLFEQVQEKLNSRYHVPYNTNGIKNPLAGIIKCSKCGYSMVQRYPKNRKETMDCKHRGCENKSSYTELIEKRLLEALKEWYINYKADFEKHKQDDKLKETQVIQMNEAALRKLEKELVDVQKQKNNLHDLLERGVYTVDMFLERSNVVSDRIIEITSTMENLKKEIKTEIKKEKVKKDTIPQVEHVLDLYFKTDDPKKKNSLLKSVLEKAVYKKEKWQRLDDFELVLYPKLPQDGDI

SEQ ID NO: 21378 - protein, 457 aa, synthetic construct
MDKIKRVALYIRVSTEEQVLHGDSIRTQTEALEQYSKDNNFIIVDKYIDEGYSATNLKRPNLKRMIEDVKNNKIDLVMITKIDRLSRGVKNYYKIMETLEKHKCDWKTILEDYDSSTAAGRLHINIMLSVAENEAAQTSERIKFVFQDKLKRGEVITGSVPFGYKIKDKHLVIKEDEASIVREAFDAYQDFSSLAKTIQHINTKFSTKYMFKWMPKMLKNKIYIGIYEKGDLVVENYCEPIISREQFNFVQTLLKKNIRFSENKFKMNYLFSGMIVCGSCGRKMGGVHSRGGANRHYLYYRCPLSFATKLCDNKPYLNEKKVEAFLLENVKKELQKTILEHESNNKKRQKKNNNKNLRNKLEKQIEKLQDLYFDDLINKDTYKFKYKKLNDDLSELNKAENEAESVEKDLKSMKIFLDTNFEDNYYDMNYSEKRTLWTSAIDRIEVQKNGELVIKFL

SEQ ID NO: 21379 - protein, 559 aa, synthetic construct
MKTKLYSYIRFSSMKQADGSSYERQKRTAAEIAAKYDLELVTSYQDFGVSAFKGANSRTGALSRFLDEIGRSVPVGSWLVVENLDRISRQSIIEAQELFLSIIRRGITIVTGMDGKVYSKESVNANPIDLLLSVMLFARANEESQTKRNRTNSSALIKIKAHQENPQNPAVAIEEIGKNMWWTDTTSGYVLPHPVFFPIVQEVVELRRNGRSTAEILDHLNATYTPPPAASHKRHSNWSRAMIERLFHTRALIGIKEISVDGVKYELKDYYPRVLDDAEFYHLKKSIGVRACNYGDKEEVKPIPLLSGVGLLKCEHCGSAMVKVKGTNKRPNQYRYSCDAMRSSRIACVHTNWSFRGDQLEKAVLQLLADKIWIAEDKANPVPALKVQVDEISRKIDNLIALSAMTGATKELADQITTLNSERETLYNQIKMAEEEMYSVDSQGWEKLAEFDLEDVYNEDRIKVRFKIKQALKRIGCSRIDKYKNLFVLEYIDGKTQRVVIENSRGPRKGRIFVDLKTINDRQILESNGLVLHPCLDMLTDKNWKPEEEISGPLQEFGI

SEQ ID NO: 21380 - protein, 592 aa, synthetic construct
MAKITKLERAMSQLPTRKKVVAYARISEESERLNHSLSAQISYYSNLIQKHPEWEYAGVYADSGISGTRTERRPEFTRMVADCETGRVDIILTKSISRFARNTVDLLNTVRHLKELGIEVRFEKEHINSLSGDGELMLSILASFAQEESRSISENVKWGTVQRFKKGIPNGRFGIYGYRWEGDKLVIQPEQAKIVRLIYDNFLAGLSAESTEKQLEDMGVKSYTGRHFGNTSIRQILVNITYTGNLLLQKEYIADPISGKTKKNRGELPQYFVENTHEAIIPMEVFQRVQDEIARRRELGALANWSIQTSCFTSKIKCGCCGKSYQHSSRKRQEDPNASYPIWICGTRRKTGNAECTNKDIPEPMLKRACAAVLGLDEFDEVRFSEQIERIVIPEPNEMIFHFKDGRTVPHHWESTMRKDCWTQERREATRKKRMGKNPSKKHQNPFTGYLRCPACGAFFRRQTKPYKDGTMRIYWHCPNSTRCGNTAKPPEPILKDMLTEAMGIETFDENAFHASVECIELTGTYEATIHMRNGEQIIKVWIPTPRKGYPHTEAYKAHMREVSKAMWTDERKAEMSRRMKQIRSEKKWPNP

SEQ ID NO: 21381 - protein, 524 aa, synthetic construct
MAKSVTTIPATLSRFTSTPIGIPKKRRVAAYARVSTDHEEQLTSYEAQVDYYTNYIQGRNDWIFAGVYTDEGITGTNTKRREGFKSMVADALAGKFDLIVTKSVSRFARNTVDSLTTIRQLKENSIEVYFEKENIWTFDGKGELLLTIMSSLAQEESRSISENCTWGQRKRFSDGKVTVPFARFLGYDRGADGNLVLNENEAVIVRRIYSMYLQGMTPHGIAARLTEDGVKSPGGKDKWNQGAVKSILTNEKYKGDALLQKSYTVDFLTKKKKVNEGEIPQYYVEGNHEAIVSPEVYDMVQREMESRCKNKRHSGVHMFSGKIRCGNCGSWYGSKVWHSTDKYRKVIWQCNHKFSREHRCTTPHLTDEDVQRYFVSAVNQLFSQKDTVLKSLDAGLKEAFDLTDLLMQEENQTEKVQMLADAVEKCIFENAHVVMNQDDYQQRYDDLVARYDAASDKLKEISSLIADKKARRDAVQQFMKTLKKQNDLISEFEPKLWCSLVEYMTVYAEDDVRITFKNGMEIKA

SEQ ID NO: 21382 - protein, 539 aa, synthetic construct
MAKIGARVYSYLRFSDPRQGSGGSADRQLLYAQRWAADKGLELDESLSMRDEGLSAYHQRHITQGALGVFLRAIEDGRIASGSVLVVEGLDRLSRAEPIQAQAQLAQIINAGITVVTASDGKEYNRAGLKAQPMDLVYSLLVMIRAHEESDTKSKRVKASILRLCQAWQSGTYRGLIRNGKDPQWLRWTGSAWEMIPERVLAVRRALALYQEGMGAARATKILHAEGLDYSASGISKQQIYRLIKLQALRGAKCLSVDGEDFILEDYYPRLLSESEWADLQHLAGQRLRRRGHGEIPGIITGIGLTYCGYCGTALVGQNMMTRQRADGTIADGHRRLHCVSYGVNGGCTAGGSCSVVPVERALLTFCSDQLNLQRLLKVGDDGQGIREQLAVARSTVEKLSVQLGRITAALLADDSGAAPTAFIRRARELEAEQADAHKKVQQLEYELATVSGSGKPAQAERWVELADLVRSGDYSAREKVRQLVMDTFERIVVFMRGMSAEDRSGKFIDVQLLSRTGQQRLLQINRRTGAWVASEDWD

SEQ ID NO: 21383 - protein, 630 aa, synthetic construct
MTTTQTLPAVDVQPAQSDAPKRLAYSYVRYSSEQQMTKKNGEVGDSVRRQMENQRKAVETYNLHVVDVFEDLGKSAFRGKHRLKGALSLFLASLDQGKIPSGAYLLIESFDRLSRERMTDGLTVVLTILRKGIKIITTDDLKLYDLSIKGKDLEQTIMITVLLERANNESTTKSDRQKAKWEGRRERIIKGEKKFLNKNVPWWIALDESTGAYSLIPERVAELKTIYELMMVKNLGLRAAAAYINENNPLKVGFGKNPDSYGWTARGIKRMIETPSLYGSLELCEYIYENGKATPDRKTIKVMDNFYPAAFTRHEVDVLKAKISSRMTSKERPTKRDLQYYNIYHGLIKCAFCGGNVRFSQKQKYSYLVCRNSEIKLCKHPKTLSMQYERFHEVFFKYAQHYNFELLIQSGGNDNEVVVKEITEIEETIAAEKYKAQKFTEKLFDMFDGDIPAEQEAALITRNKKIKLMEAKAKALRAKIVYVDTDAETISDAIQLVSKMVETKDGRLELSNYLTKVIDKMVVDFGKAHNRDGDYVKVMFKNKDFSHHMLIGKTTAYSYDSDGELFLDTLQGVVRDDGYYLEAQKAQDEWFDVPDFTDLEIYDDEQAKVNQAVDLGHRGDDENGVDSEYQ

SEQ ID NO: 21384 - protein, 487 aa, synthetic construct
MAYAVYVRVSSDKDEQVSSVENQIDICRYWLENNGFEWDENAVYFDDGISGTAWLERHAIQLVLEKARKKEIDTVVFKSIHRLARDLKDALEIKEILLGHGVRLITIEEGYDSHYEGKNDMKFEMYAMFASQLPKTLSVSITAALAAKVRRGGYTGGFVPYGYEIIDGKYAINEEEAALVREIFELYAQGFGYIKIANTINDKGARTRKGAPWTFSTLSKMIKNPAYKGTYIMQKYGTVKVNGRKKKVINPKEKWVIFEGHHPAIISHELWEKVNNKDPNKFKKKRRVSTTNELRGITVCAHCGTAMSKRNSINVSKNGRETEYSYMICNWSRITARRECVRHVPIHYKDLRALVLSKLKEKERELDKEFCSDENQLQVKLRKLKKDINDLKFKRERLLDLYLEDERIDKDTFTIRNAKIEKEIGLKEMEIRKASNIEIQMKEKQEVRDAFALLEESKDLHSVFQKLIKRIEVAQDGAIDIYYRFEE

SEQ ID NO: 21385 - protein, 520 aa, synthetic construct
MKKITKIEGNLANSFIKPKNRVVAYCRVSTDSNEQLVSLQAQKAHYETYIKANPEWEYAGLYYDEGISGTKKENRSDLLRMLSDCETGRIDLIITKSISRFARNTTDCLEMVRKLIDLGVHIYFEKENINTGSMESELMLSILSGLAESESISISENTKWAIQRRFQNGTFKISYPPYGYQNIDGQMIVNLKQAEVVKYIFAEVLSGKGTQKVANDLNQKGIPSKRGGRWTATTIRGILTNEKYTGDVILQKTYTDSHFNRHTNYGEKNMYLVENHHEAIISHEDFEAVDAILNQRAKEKGIEKRNSKYLNRYSFSSKIICSECGSTFKRRIHSSGRKYIAWCCSKHISNITECSMQFIRDEDIKTAFVTMMNKLIFGQKFILRPLLNGLRNQNNAASFRRIEELETKIENNMEQSQMLTGLMAKGYLEPALFNKEKYSLEAERERLLAEKDQLTRSVNGNFAKVEEVDRLLKFATKSKMLTAHEDELFENYVEKIIVFSREEVGFELKCGITLKERLVN

SEQ ID NO: 21386 - protein, 457 aa, synthetic construct
MRCAIYRRVSTDEQAEKGFSLENQKLRLESFATSQGWEVVEDYVDDGFSGKDTNRPALQRMFSNVDKFDVILVYKLDRFTRSVKDLNEMLETIKENEIAFKSATESIDTTTATGRMILNMMGTTAQWERETISERIKDVFGKLRENGIFSTGHPPYGYRCSGNKSIEIVEEQAEIVRYIYELSKTMGLFKISVELNRKGIKTRRNNKFGQSAVKRILHNPFYCGYMEVNNKWVPIKNEGYIPIISEEEFKTTQKILTKRNKAQTRSRSVSYYPFSGIVLCPECQRAMRGDRAKYGDYYYRYYRCVYGRENINCTNRKRIRAEQVDKAFAEYISGSFENTTIKLDSRNIKSDIEYELNHLDSKIERLSDIYIEGDITKSKYNEKMNSLLNEKEKLKKDLTSCKENVDAQFVRDQINKLESIWHLIDDKTKSESIRSIFDTIKIKQDKNKVTIMDHTLL

SEQ ID NO: 21387 - protein, 454 aa, synthetic construct
MIILIRAAIYIRVSTQEQIENYSIEVQRERIRAFCTAKNWNVYDEYIDGGYSGSNLERPGIKKLLNDLKNIDVVVVYKLDRLSRSQRDTLELIEEHFLQNKVDFVSITETLDTSTPFGKAMIGILSVFAQLERETIAERMRMGHLKRAEKGLRGNGGDYDPAGYTRQDGHLIIKKDEADHIKRAFDLYEQYYSITRVQETLKEEGYPIWRFRRYRDILSNTLYIGRVTFSGNEYEGQHEPIVSLEQFKRVQMLLKRHKGHNAHKAKQSLLSGLITCSCCGEKYVSYSTGKSKDDESKRYYYYICRAKRFPSEYEERCMNKTWSRQKLEDVVIGQMKDLNVFKYHNQKKEKQINYAKLIKEIDKKMERLLDLFTTNTNISRQLLEQQMEKLNSDKEKLILKQQSSEQEISLSNEMITETMKSFDTLEFKDRQILINKFIQEIQIKHENVEILWRF

SEQ ID NO: 21388 - protein, 477 aa, synthetic construct
MRCAIYARVSTEEQAEEGYSISAQKKKLTAYCEAQDWDVVGYYVDEGISAKNTNRPELIRLIDHIKKGLIDCVLVYRLDRLTRSVLDLYTLLDVFEKYDCKFKSATEVYDTTTAIGRLFITIIAALAQWERENIGERVRVGQQEKIRQGKYTSGRKPYGYNADHKEGVLTIIEEEAKVVRSIFNDYLKGHSAQRICKKLNNIGTSGRDYWNEKAVIYILENPLYVGTLRWRKETEHYFEIPNSVPAIIEKDLFNSVQKLRAARRESHPRSAYGSYIFSGIIKCPRCGRSLVGNYVTSKKKDGTVTKYKQYFCRGRKLNVCNMSSMSERKLEKTIIPYILSLHIHATDEDVSVGQNNTEDEIIQIKNELKIIEKRRKKWQYAWANEHLKDEEFTELMKEESDRERVLTEELYKLKPAENKKLKNDELIEILNDMKLNWNNLNDEEKKILMQIILKRIIVERSNEWQAYELKIVEMEFN

SEQ ID NO: 21389 - protein, 490 aa, synthetic construct
MYELKYAVYVRVSTDRDEQVSSIENQIDICRYWIEKNGYEWDENSIYKDEAVSGTAWLERHAMQLILEKVRRKELDTVVFKSIHRLGRDLRDALEIKEILLGHGVRLVTIEEGYDSYYEGKNDLKFEMYAMFASQLPKTVSVSVSAALAAKVRRGEYTGGIVPYGYKIVDQKYTINEEEAELVRKMYELYDNGLGYMKIADAINDMGVPSRTGKLWAYPSIRAIITNAAYKGDYIMQKYAEVKVDGRKKMIINPKEKWVVFENHHPAIITRDLWDRVNNSKTDKKTKRRVAIKNELRGLACCAHCRTPLALQQRMYKNKEGETRYYCYLICGRYKRMGARGCVKHSGLQYSDLRLFVLQKLKEKENDLEKVFNLNDTDKHQEKQKKLRKEKKELEIKRERLLDLYLDGGPIDKETFTKRDKNFEKIIKEKELEILKLDDVKTLVVEQQKVKEAFELLEKSEDLYSTFKKLITRIEVSQDGVINIVYRFEE

SEQ ID NO: 21390 - protein, 571 aa, synthetic construct
MKRIATYYARCSTDKEEQKQSIDNQISGLMKYAEDHDYILSESGVFSSRDGGNIPYKGYVDEGFSGAKSTKYRKAFLQMMKDAKAGFFDVILTKSVSRFGRNVKEMLIHIDELKKIGVGVWFEDIQSFSLNNADMLKIQLFATLAEAESTSKSDSIQWAKKEAAKKGIWSGREPYGYNIIKGKLVINEYEAEVVRNIYKLYINDLYGVNKIAKKLYVDDQIPTKRGGKWTGSHVAKILKNEIYLGKVRQHRTRKSDINSNLIEKIPIDKQIIYDDQLLRIIDDEIFFRAKAEMASRPHIESFTYNTKHDDGKKVRTGAETNGRGRYSTSHLFSNLLCCGNCGGMMRKKVQKTTRQTHHYYYCRNHEQYGNSVCEYRNLVREEEMLEWIKEEIKERVNAPEINDWYYTKLIENRYQTVDFAKTIKEHTERLTELAEEKETNFRLVVKKFISDEEYNTRNQSIDSEMQKLQNEIKRLNFIDDEIYSLKLKFEDFNKELNSLDLNDLSNVVLRKFLQRITITTYEDETFREINWRFLDSDEDDIINNNPTIKQEIYEEEMLYEEEIAFMEQYGE

SEQ ID NO: 21391 - protein, 551 aa, synthetic construct
MATKARVYSYLRFSDPKQAAGSSAARQLEYAKRWAAEHGMALDAALSMQDEGLSAYHQRHVTKGALGVFLAAIDEGRIPAGSVLIVEGLDRLSRAEPIQAQAQLAQIINAGITVVTASDGREYNRAGLKAQPMDLVYSLLVMIRAHEESDTKSKRVRAAIHRQCKGWKDGTWRGVIRNGKDPSWTRLDPETKAFQLVPERAEAVKLAIRMFRDGHGAVRIMRTLAEEGLQLTNGGNPAGQLYRILRNRALIGEKVLEIDGEEYRLAGYYPSLLSAEQFADLQQATEQRAKQKGTGEIPGLITGLRISYCGYCGSAMVAQNLMNRGRREDGGPQHGHRRLICVGNSQGMGCAVAGSCSVVPIEHAIMSYCADQMNLARLFEGGDRSEALAGKLAIARARVADTTAKVERITDAMLADDAGDAPAAFMRRARELEASLVEQQAEVDALEHELAAIASSPTPAVAKAWADVQEGVKALDYNARTKARQLVADTFERISIYHRGTEPEQTRSWKGTIDLVLVAKRGSARILHVDRQTGEWRGGEEVRDLPDDPIQ

SEQ ID NO: 21392 - protein, 545 aa, synthetic construct
MIAAIYSRKSKFTEKGESVENQIEMCKDYLKRNFTSIEDIKIYEDEGFSGKDTNRPKFKKMMGDAKNKKFSILICYRLDRISRNVADFSNTIEELQKYSIDFISLKEQFDTSSPMGRAMMNIAAVFAQLERETIAERIKDNMLELSKTGRWLGGTAPLGYKSEIIEYWNEDGKNKKMYKLATVENEIDIVKLIYKLYLKKRGFSSVATYLCKNKYKGKNGGEFSRETVRQIVINPVYCTADNKIFKWFKNKGATVCGTPDGIHGLMVYNKREGGKKEKPISEWVIAIGKHDGIISSDIWLKCQNIIEENKSKISPRSGTGEKFLLSGMIICGECGSGMSSWSHFNKKTNFMERYYRCNLRNRASNRCSNKMLNAYKAEEYISDYLKELDIDTLKEKYLKNKKSMATYDSSKQELAKLKNVLENNNKLIRGLIRKLALLDDDIEIVTILKNEIENIKKENNEINNNINKIKSSLEESDRENKFLKELEESLLNFKKFYDFVDTSEKRVLIKSLISTLVWYSKDEILELNPIGIKPNISQGVIKRRT

SEQ ID NO: 21393 - protein, 541 aa, synthetic construct
MAQAATAKKVVIVPIKTMDIVEGIQSIQKKKVAAYCRVSTDSEEQKESYTNQVNHYTQYIQNNLEWEMADIYADEGITGTSTKNRTHFNRMIQDARNGKLDLILVKSISRFARNTLDLLKYVRELKSLGVAVFFERENINTLDTTGEVLLTILSSLAQDESRNISENSRWGILRGFQNGKVFCNTTRFLGYDKDEHGELVINEPEAEIVRRIYEEYLDGKSYQAIARGLMRDQIKTVTGGDTWWDSSITLILTNEKYYGALLQQKTVTVDFLTHKRIRNKGQEQQYFIEDNHEPIVSKELFEAVQKEKERRAKLKGSVMGESKRYSSKYALSSKVYCGCCGAIFKRRTWNSNNPSKKVVWQCKTYVNEGRAACDAKSVDEQVLHSAFVRLFNRMYKNKKGFIKTLKANIESVLSRKVGQETLLNIEGQMQQLKSDLKELVNLKLRNQIDEIVYDEETNRLSSELNKLRQQMLILEEEEDQKAKIKERVDEIIQVLSSRQDILEQFDDNLFNALVEKITILSPAHFVFTLKSGMSIDEIIEN

SEQ ID NO: 21394 - protein, 477 aa, synthetic construct
MFTTRKVAIYVRVSTTNQAEEGYSIQGQIDSLTKYCEAMGWIIYEEYTDAGFSGGKIDRPAMSKLITDAKHKRFDTILVYKLDRLSRSVRDTLYLVKDVFNQNNIHFVSLQENIDTSSAMGNLFLTLLSAIAEFEREQITERMTMGKIGRAKSGKTMAWTYTPFGYDYNKEKGELILDPAKAPIVKMIYTDYIKGMSIQKIVDKLNKMDYNGKDCTWFPHGVKHLLDNPVYYGMTRYNNKLFPGNHQPIITKELFDKTQRERQRRRLGIEENHYTIPFQAKYMLSKFLRCRQCGSRMGLDLGRPRKKDGKRSKKYYCLNSRPKRTANCDTPLYDAETLEDYVLHEIAKIQKDPSIASRQKHIEDHELKYKRERIEANINKTVNQLSKLNNLYLNDLITLEDLKTQTNTLIAKKRLLENELDKTCDNDDELDRQETIADFLALPDVWTMDYEGQKYAVELLVQRVKVDRDNIDIHWTF

SEQ ID NO: 21395 - protein, 481 aa, synthetic construct
MITTNKVAIYVRVSTTNQVEEGYSIDEQKDKLSSYCDIKDWNVYKVYTDGGFSGSNTDRPALESLIKDAKKRKFDTVLVYKLDRLSRSQKDTLHLIEDVFIKNGIEFLSLQENFDTSTPFGKAMIGLLSVFAQLEREQIKERMQLGKLGRAKSGKSMMWAKTSYGYDYHKETGTVTINPAQALTIKFIFESYLRGRSITKLRDDLNEKYPKHVPWSYRAVRTILDNPVYCGFNQYKGEIYPGNHESIISKEEYDKTQSELKIRQRTAAENVNPRPFQAKYILSGIAQCGYCGAPLKIMLGVKRKDGSRLKKYECHQRHPRTLRGVTTYNDNKKCDSGFYYKDKLEAYVLTEISKLQDNAGYLDKIFSGDNAETIDRESYKKQIEELSKKLSRLNDLYIDDRITLEELQSKSAEFISMRGTLETELENDPALRKNKRKADMRKLLNAEKVFSMDYENQKVLVRRLINKVKVTAEDIVINWKI

SEQ ID NO: 21396 - protein, 537 aa, synthetic construct
MSTTTDIERPYDGCGKCLVGLRRLSRSSDASSSPAKQRDQVLQVVRAYGGHVIAWADDWEVSGATDPKTRPRLGPWLRGERGPYSGIAGASVDRLGRNVVDCLNTGYMMRDHGLTLLTYGHDGPWDLDDPHDENRFTMEAWGAQMELRSVQRRNRESAVKARRDGKIKYKPSYGYRYERDLPTGPVSRAILDDGATLPAPWNEEDAAEIIRNVARRILVDQTGEITENTEAARLTREGLLSPEDRKRVLYGRKPQVSPWPGASLARILMSKSALGYLIHKDEPVLDEATGKPIRIGPELWNYATHRALVKKLTPKGKRRIRSANNAYLLTKRIVCGNCHNRMYVARGRSKNAWACRSKFKGLTDCAPAPNIRMEEIDALVEGWFLEEFGSGMIMETVYVPGNGVADLVEEVEATRARLRSDREAGLYDSADDQEWFRSRYASLGRELEGLRQQPETTGGMVRRPTGKTIEDAWHEAADDAGRREILAGFGVVISVWPDSSPVRWYPGRMHGPERNSEQPTTTELLPALSSMENAVAA

SEQ ID NO: 21397 - protein, 579 aa, synthetic construct
MTPLTLPSSEHRDTIRVAVYARQSKARPDASEASPEAQVAAGEALASSRGWQVVHRFKDVGRSGWDPKAVRPGFESLMDAVRAGEVDVVVVNELSRLTRKGAHDALDIDREFKEHGVRFVSVLEPFLDTSNPIGVAIFALIAALAKQDSDIKAERLKGAKEEIKAVGGRHSSSAPYGMRAVREKIGNLVVSVLEPDEDNPEHVALVERMIEMSWGGISDNAIARTFASEEIPAPGNAERRATEKRMASIKARRVSSEDSPIRWRAQTVRWILNHPAIGGFASERVKRGKAHVNVIARDESGAPVTPHRGIIPGAKWLELQERRKKRTKTNRQPGGEGTTPTLLSGWRFCRCGIEICQGSMGQSKNNGGQDYYMCANPKGHGGLSIKRHDADNYVARRVWARLANADMDDEADREWVAAAAMRFAAQRNLAGVQEERRETAAHLEHVRQSIAELQADRKAGLYRGRHELATWRATMEQYRAYEDDCTARLAELDTKTAQAVQVPSEWSEGGEDPLGPDTPWGRWDVFKRREFLDLFLEGVSVGPGRDPETKKFIPVEERISLDWRPLPTDDTEEDAEVTA

SEQ ID NO: 21398 - protein, 564 aa, synthetic construct
MSKLSKPKVYSYLRFSDPKQAAGSSADRQMEYAARWAAEHEMQLDASLTLRDEGLSAFHQRHIKQGALGVFLRAVEDGRILPGSVLVVEGLDRLSRAEPIQAQAQLAQIVNAGITVVTASDGRKYNRERLKAQPMDLVYSLLVMIRAHEESDTKSKRVKAAIRRQCEGWVAGTWRGIVRNGKDPHWVRQAENGAFEFLPERELAIRTMIDLFLAGHGAIEIARILSERELYVSNAGNYSTHMYRIVRNRALVGEKSLTVDGEEFRLAGYYPALLTPDAFATLQEAMSERGRRKGKGEIPNILTGLSISSCGYCGLALVSQNTAIRPAKGRAFTRRLGCSGATFNTGCPVGGTCDSRIVERALMHYCSDQFNLARLLEGDDGAARRVAQLAVARQRAREIETQIQRVTDALLSDDGVAPVAFMRRARELESELEQQHREIEMLEHKIAASNAHEIPAAAEAWAQLVDGVLALDYGARMKARQLVADTFRKIVLFQRGFTPFGNAPADRWKRSGTIGLLLVTKRGGMRLLNIDRKTGQWEAEDNLDLAPHHADEIPLPPTVQRMEC

SEQ ID NO: 21399 - protein, 413 aa, synthetic construct
MNIRKIEAKNNNRKKRICAYVRVSTTNGSQLDSLENQKVYFEKLYAERDDVEFLGVFCDKGISGSKYDRPDFQTMLDACRKGQIDVIHTKSISRFARDLINVLEISRELKTLGIDIFFEEQNIHTLSNEGEVVLTVLASLAEEELQSMSGNQRWSFRRKFQKGELLINAKRFLGYDLNEKGELVINKAEAQIVRTIFYSYLEGMGTHRIAKKLNEGKVPTVTGKKWYDSTIRNILKNEKYKGSLLLQKYFHDGVNGPKKLNQGQIEQYYIEDNHEGIVSKEIWEKVQVKMKSRSRIQGTNKTYKFSRMLKCQYCGSTLKRQVSYKKKIVWCCSKYIKEGKNSCKGMRVPERDIEDWKLSLPVIVLERIEDGEKHYGYTGQKTSANSQISNSEKGQGSRLLSSVYRPRRTAIKL

SEQ ID NO: 21400 - protein, 413 aa, synthetic construct
MNYYREYILKHEDYELVDIYADEGISATNTKKRDAFNRLIQDCRDGKVDRILVKSISRFARNTLDCIKYVRELKDLGIGVTFEKENIDSLDSKGEVLLTILSSLAQDESRSISENSTWGIRKKFERGVVQVNTTNFMGYDKDEKGNLIINHEQANVVRYIFDRFLEGYSPEFISKELREQEIPSCTGKAKWCPSAIWKMLQNEKYKGDALLQKTYTVDFLTKKRIDNDGQVNQYYIENNHEAILDRDKWEIVQLEIERRKRFREQHKLQFYIMQKENNPFTTKVFCAECGSAFGRKNWTTSRGKRKVWQCNNRYRIKGQIGCLNNHIDEKMLEKAFMKAVGLLQEHKSDMVAKWQKLEQGTNLLHKHYARQMYQILDLDKFDGVIMNQLLDHISISEAGQIVVTFLEGTEVDL

SEQ ID NO: 21401 - protein, 418 aa, synthetic construct
MIAIYARQSLDKKDSISIETQIELCKKEIGDEPYKEYVDRGYSGKNTNRPQFKAMMQDVENGVIGKIIVYKLDRLSRSTLDFGELMDALSKHSVEFSSTREKFDTSTPIGKAMLNIIMVFAQLERETIQVRVQDNFRMRSARGAYDAKAPYGYAKTKVTVQGKAVSTLKPDKAYSLMVKKIFEQYAYTSTSLGYLARTLNQQGIKSANGAAWDSCKLSKLLCNPIYVKADAEVYKYYRAKGMEITNDIDDFRGQYGCVTYGQWDRAKNKFAQLSGLTLSIGLHEGIIDAKTFLACQYKLAENTQINNTGRGKHSWLTGLLKCGCCGKAMKVMTYKETATFRCSGAMNTGLCSDSPSVGVREIEEAVEREIFAHVARHQELVVQKRKEEDNKAHNYKIAIAKLDDQIANLITPLPTVRS

SEQ ID NO: 21402 - protein, 501 aa, synthetic construct
MTLAFSYARFSTKSQSTGTSLERQLNASRLFCSERGLTLSPKGYHDLGVSGFKQVKRPELEQMLQAIQSGDIPSGSYILIEAIDRLSRKGISHTQDVLKQILQYKVKVAFVGEDAKTLAGQVLDENSLNDLSSVILVALAADLAHKESVRKSKLVKAAKSIIRKKATEGHKVRGHTMFWIDWSDKKQDFVLNDRVKDVHKIIQLRQEGQGPRKIAKTLNELNIPGPRGNPWNHMTVTVVLRSPVLYGAYQTHQIIDGQKVPDVLLENHYPAVITQEEFVTIQADSSKSNKGRPSKANPFSGVLRCECGQAMLFSKRTNLNKDGEPLEYEYHFCLGYAEGRCKNNKRIRDLVPLLVQLMDKLVINQAPKKNLNVELIKQKEQKIEQLNKMLIELDSPPLSVLKTIQTLEAELDILLNTHVEEPVQADVQTLSSITDAQEYNQHLKRLVKKIVVYQKNGPKNLRIKVYKTDGHYQNFLVKDGTVLFKSDTKALKELIDGFNKA

SEQ ID NO: 21403 - protein, 481 aa, synthetic construct
MITTNKVAIYVRVSTTNQVEEGYSIDEQKDKLSSYCDIKDWNVYKVYTDGGFSGSNTDRPALESLIKDAKKRKFDTVLVYKLDRLSRSQKDTLHLIEDVFIKNGIEFLSLQENFDTSTPFGKAMIGLLSVFAQLEREQIKERMQLGKLGRAKSGKSMMWAKTSYGYDYHKETGTVTINPAQALTIKFIFESYLRGRSITKLRDDLNEKYPKHVPWSYRAVRTILDNPVYCGFNQYKGEIYPGNHEPIISKEEYDKTQSELKIRQRTAAENVNPRPFQAKYILSGIAQCGYCGAPLKIMLGVKRKDGSRLKKYECHQRHPRTLRGVTTYNDNKKCDSGFYYKDKLEASVLKEISKLQDDADYLDKIFSGDNAETIDRESYKKQIEELSKKLSRLNDLYIDDRITLEELQSKSAEFISMRGTLETELENDPALRKNKRKADMRKLLNAEKVFSMDYENQKVLVRRLINKVKVTAEDIVINWKI

SEQ ID NO: 21404 - protein, 597 aa, synthetic construct
MKKNNVEIIKADSLVRRRGDNVERHLKRVAAYCRVSSDSEDQKNSYDSQVRHYKEYISQRSDWELADIYADEGISGTQVGKRQDFQRLINDCANGEIDYIVTKAIARFARNTLDTLKYVRMLKDMQIGVYFEEENIDTLTMDGELLLTILSSVAQQEVENTSAHVKKGLKMKMQRGELVGFQGCLGYDYDVETKQISINKKEAKIVRYIFERYLEGIGGKVIARELDELGYKSPRGLEHWNDTTVLGIIKNEKYKGDILMGKTFTVDPISKRRLSNFGEEDKYYIKDNHEPIISKEDFEKAQEIRLRRAGNKKTAANVNGKRERYSKMYAFSSMLECGFCGSILSRRSWHCRSDYRKVVWHCVTSIKKGKKFCKHSKGLEEIAIEGAFLEAYRQVYHSNENLMTDLLETIESELNDNSLNKELKRITNKLRILLKKEENLVNLRLEGKVSDSIYNEKYNEISSEKEFLAEEKVNIETTLKSEIDVKKRLTEFKHLLSSQKMLTEFDRAVFESIVEKIIVGGVNSNGEIDPAMLTIIFKTGEIQNKDGKQFKSKRKNAKLETDKLCPQNSDEDKKLYSQGTDNTRGVCSVTGSILASQ

SEQ ID NO: 21405 - protein, 481 aa, synthetic construct
MKTMNKVAIYVRVSTTSQVEEGYSIDEQKAKLSSYCDIKDWNVYKIYTDGGFSGSNTDRPALESLIKDAKKRKFDTVLVYKLDRLSRSQKDTLHLIEDVFIKNGIEFLSLQENFDTSTPFGKAMIGLLSVFAQLEREQIKERMQLGKIGRAKAGKSMMWAKTSYGYNYHKETGTVTINPAQALTIKFIFESYLRGRSITKLRDDLNEKYPKHVPWSYRAVRTILDNPVYCGFNQYKGEIYPGNHEPIISKEEYDKAQSELKIRQRTAAENVNPRPFQAKYILSGIAQCGYCGAPLKIMLGVKRKDGSRLKKYECHQRHPRTLRGVTTYNDNKKCDSGFYYKDKLEAYVLKEISKLQDDADYLDKIFSGDNAETIDRESYKKQIEELSKKLSRLNDLYIDDRITLEELQSKSAEFISMRGTLETELENDPALRKNKRKADMRKLLNAEKVFSMDYENQKVLVRRLINKVKVTAEDIVINWKI

SEQ ID NO: 21406 - protein, 525 aa, synthetic construct
MKTIRDVLEKGKKGAFYARVSSDRQTIDAQRHHVYEFIKNYDCEIVKEYVDPGESAFKKKLIKRPQIMALLRDVEQGKYDFVITYADDRLARSEIEHVQIRVIMKEAKTDVILTSTGELYTERDIITQLIREGGTRYEVERISARTKDAYGQRTDYGQWMGGPVPFGYVQDENTKNFFILEDEKEIVLKIYQLYQNGEGFANIAKILNEQKAKTNTIHWKKERVKHILTNPIYAGYVTFGRLKPGSGNSIEDLSKWKMAKCEEIPPIMTKEEWLATFQMFEKKRNKELPPKQLKTEYVLRDLIYCKSCDAPLLPKNQETRGKNGKKYGIKKYMCSNKLCKVWFSTDELHALVFDSVIKEVTDKVISKSQTELMYEMEQILEKDIKQIKKEIQRLKKQVDNCLVWIKDAEREIDELYNQKKKLVEVDPKIDPLLDVMLDYRLHLLHEIRGTEELIAKKEAEMKHIEDVDSNQGMLQKNVLQAFRIEFTNLQKDMKRVRQLLVYLIDKIIIDQNGKTEYILKINLEQ

SEQ ID NO: 21407 - protein, 491 aa, synthetic construct
MKAVESYAVYVRVSTDRDEQVSSVENQIDICRNWLERNGFNWDEKRVFKDEGVSGTLFVDRPSIQLLLKKAKAKEINMVVFKSISRLARDLKDSLEIREVFLAHHVRIISVEEGYDSIKAGKNDMAFELWSLFSAQYSRTLSSSITAALAVKVRRGEHIGKIPYGYNREEQKLVINEEEAQVVKMMYKWYCEGLGYKKITNELNRLGIKSKTKKNWQMTSVQRILQSAIYKGTFILNQYTSVKVGGKKKQIRNPKEKWFVFPNHHPKIVEEEIWNQANRKKNKTNKTKITAWNEFRNLAKCAVCGSNMVIVQSHLKKKSGERTEWKYLKCSQYRRAGKHGCVNHVPIQYGHFRQFIINLLVGKGESVSLRLQSNVEKGQEKNIKKLQQLVSTNQQKKKALLDLYLEELINKGEFEQKRNDLEAEITKANHELLVIQNGNHVQIDIQTIKQAFEQLQKQEQDLIHVFQALIQKISIHQDGAIDITYTFESPL

SEQ ID NO: 21408 - protein, 521 aa, synthetic construct
MGNVMVIPAKRKIGNTNRKKDTKPKLRVAAYCRVSTDSDEQATSYEAQVEHYTEYIKRNPDWEFAGIYADDGISGTNTKNREEFNRLIKDCETGSIDMVITKSISRFARNTLDCLKYIRRLKEKNIPVFFEKESINTMDAKGEVLITIMASLAQQESQSLSQNVKLGLQFRYQNGQVQINHNRFLGYTKDENGNLVIDPEQAEVVKRIYREYLNGYSMDKIASGLEADGILTGAGKKKWWTSTINKILRNEKYMGDALLQKTYTTDFLNKTRVKNNGIVPQYYVEDDHEAIIPKEIFMMVQEELARRKVVKTSANGKKRSYSSNHCLSQKIICGECDEMYRRIHWYSHGRKTVVWRCISRLESTGIECHARTIHEKDLQEIVVIALNQLLGNKSKYQKLLQQNIATVIRASAEKTTKEIDKKLIELQKELVKKANDKDSYDEIAEQIFELRDKRQQFTMDTAQRDEQLNRITELQDFIKSQTTDLKEFDETLVVRWLKQITVYSDHCTVELKSGLKVDVEK

SEQ ID NO: 21409 - protein, 481 aa, synthetic construct
MIATNKVAIYVRVSTTNQVEEGYSIDEQKDKLSSYCDIKDWNVYKVYTDGGFSGSNTDRPALESLIKDAKKRKFDTVLVYKLDRLSRSQKDTLYLIEDIFIKNNIAFLSLQENFDTSTPFGKAMIGLLSVFAQLEREQIKERMQLGKIGRAKAGKSMMWAKTSYGYDYHRETGTITINPAQALAVKFIFESYLRGRSITKLRDDLNEKYPKHVPWSYRAVRTILDNPVYCGFNQYKGEIYPGNHESIISKEEYDKTQSELKIRQRTAAENVNPRPFQAKYILSGIAQCGYCGAPLKIMLGVKRKDGSRLKKYECHQRHPRTLRGVTTYNDNKKCDSGFYYKDKLEAYVLTEISKLQDNAGYLDKIFSGDNAETIDRESYKKQIEELSKKLSRLNDLYIDDRITLEELQSKSAEFISMRGTLETELENDPALRKNKRKADMRKLLNAEKIFSMDYEGQKVLVRGLINKVQVTAEDIVINWKI

SEQ ID NO: 21410 - protein, 481 aa, synthetic construct
MIATNKVAIYVRVSTTNQVEEGYSIDEQKDKLSSYCDIKDWNVYKVYTDGGFSGSNTDRPALESLIKDAKKRKFDTVLVYKLDRLSRSQKDTLHLIEDVFIKNEIEFLSLQENFDTSTPFGKAMIGLLSVFAQLEREQIKERMQLGKIGRAKAGKSMMWAKTSYGYDYHRETGTITINPAQALTIKFIFESYLRGRSITKLRDDLNEKYPKHVPWSYRAVRTILDNPVYCGFNQYKGETYPGNHEPIISKEEYDKTQSELKIRQRTAAENVNPRPFQAKYILSGIAQCGYCGAPLKIMLGVKRKDGSRLKKYECHQRHPRTLRGVTTYNDNKKCDSGFYYKDKLETYVLKEISKLQDDADYLDKIFSGDNAETIDRESYKKQIEELSKKLSRLNDLYIDDRITLEELQSKSAEFISMRATLETELENDPALRKNKRKADMRKLLNAEKVFSMDYEGQKVLVRRLINKVKVTAEDIVINWKI

SEQ ID NO: 21411 - protein, 547 aa, synthetic construct
MKLLVTYIRWSTKEQDSGDSLRRQTNLIDAFYSKHKNDYYLLPAHRYVDKGKSGFHQQHKNQGSDFRRMFENVMSGVIPEGSLIVVENFDRFSRADIDTAIDDVRQILRKGVSILTLGDGELYDKSALTDPVKLIKHIIIAERAHQESLVKQKRIAQVWNHKTQLARELKKPMGKQAPGWLELSEDGSHYIVDEDKASLVNIIYDKRLSGMSMFAICKWLNEQGYPTINQRKVRISKTKKPDGNWSALSVKHILTSRSVLGYLPAKISTEDRKTVLREEIEGFYPQIVTDSKFYAVQQLLEETGKGKTSSGDHWLYVNILKGLIRCKCGLVMTPTGIRKPVYQGTYRCNGNKESRCSYGTVSRKLLDTQLCSRLFSKLSQLHDEATDTAKLDELQRRLNTVDSELEKLTETLIQLPNITQIQEALRVKQEEKDELIVQLSREKARVKSVSSLDLSGLDMESVEGRTEAQIIIKRLVKEIVVSGNEKLVDIYLHNGNIIKGFPLDGKDDHTLTLEEATDEMQSLDDMLIFGEPVTRIYPAGDMEEVDA

SEQ ID NO: 21412 - protein, 507 aa, synthetic construct
MKRVISYIRFSSERQAKGDSLRRQSKMVNDWLKAHPEYYLDQDLSFRDLGVSGFTGKHLKGGLGDFLTAIEKGLVKAGDTLLIESLDRLSRQDVDQASELLRNILRSGVDVVTLSDGEHYTRESLKDPLALIKSILIMQRSHEESLRKSERIQAAWDAKKEAAKAGIKISRRCPAWLKLNDDRKSFSVIPEKVETVRRCFQLRLEGKSIWEIVRILNDEGHQTLNQYKAGKFGQTSVQDLLKNRSVIGYFTPKGCEEIVGYFPPIIPETDFYKVQQLSYSRYGRKPASDKPLSVNLFKGVIRCSECGHALIITGFSDTRSGIYRCPSRNENRCNAKGLSRKQTDGTLLALLSRIDRFDSDMTNTIDTLKLHREHISSNIEKLVQLSLEIEDLSAITSKLKQLKGELSQVDADIEKETQRLKSIDVGCLSDCDLTTKAGRIEAQLIIKSAVKEVVLNTAKRRCKVTFHNGKVIDLPITEDPSEDVTEAIQSLSEVTERGLIDVDEVII

SEQ ID NO: 21413 - protein, 579 aa, synthetic construct
MRNKSLAGRANNRAERPRKVAIYIRVSTTHQIDKDSLPMQRKDLIAYCELILGIEDYEIFEDAGYSGKNTDRPAFQEMMQKIRSGSFSHLLVWKIDRISRNLLDFAEMYEELQSLRVTFVSKNEQFDTSNAMGEAMLKIILVFAELERNMTSERVTATMISRANQGLWNGGRVPYGYAYDAETSVFSIIQDEADICQLMKTDYFEHKSIIHTAKLLNDKKVPTRSGALWSPTAVWKILSSPFYAGIYRYNHYKGTENRTINPEDEWVLVPNHHPAIFTLEEHEKICDIMDTNKRMSNLPGQKHRSKNVYVFSGILYCGKCGNKLVSTPGRLQADGFRTTTYSCPKKRKTHECDNPSINDLIVGEFVINYILNMLNAKSSFSSISSPAELEKRLLCGGSFKEVLHISEDGLNEFYNLLSRYGSDSSYVFAMKRPRKKKAAVNPEVEALRKDKEKQERALKRLQDLYLYSERAMTEKDFIIQKNEISSRIQDINTRLGMVTHDANSTLSDEDFVRQASHLLITKKLIGREYIYYKSLAQTVSPDVLKIYMETILDSVYVVDGRVSSIIFKNGLTHTFVYQN

SEQ ID NO: 21414 - protein, 484 aa, synthetic construct
MNKVAIYVRVSTTMQAEEGYSIDEQIDKLKSYCKIKDWTVYDIYKDGGFSGGNIERPAMERLISDAKRKKFDTVLVYKLDRLSRSQKDTLFLIEEVFDKNDISFLSLNESFDTSTAFGKAMIGILSVFAQLEREQIKERMLLGKIGRAKTGKSMMFSKVSFGYTYDKLKDELVVNQAESIIVRKIFDAYLGGLSLNKLRDYLNNNGIYRGDKPWNYQGLRRILSNPVYIGMIRYREEIYPGNHKAIIDIDDYNKTQEEIKKRQIKALEFSNNPRPFRSKYMLSGIAKCGYCGTPLQIILGSKRKDGTRNMRYQCINRFPRNTKGVTIYNDGKKCESGFYEKADIEEFVINEIRSLQINYNKLDAMFDRHPTVNSDDIKKQIITLDNKLKRLNDLYINNMIELDDLKKQTQSLRKQKTILEDELLNNPAITQEKNKKHFKEMLATKDITKLDYETQKNIVNNLINKVFVKSGYIKIEWKIPFKKA

SEQ ID NO: 21415 - protein, 428 aa, synthetic construct
MSTDQDEQLSSYENQVSYYRDYILKHEDYELVDIYADEGISATNTKKREAFNRLIQDCRAGKVDRILVKSISRFARNTLDCIKYVRELKELGIGVTFEKENIDSLDSKGEVLLTILSSLAQDESRSISENATWGIRKKFERGEVRVNTTKFMGYDKDENSRLVINPEQANVVKHIYNQFLDGFGPESIAKEFNAKGIKGWSGKANWYPSAILKMLQNEKYKGDALLQKTYTVDFLTKKRTENTGQVNQYYVANNHEAIISKELWETVQLEIARRKAFREEHKLVFYIMQSDDNPFTTKVFCAECGSAFGRKNWTTSRGKRKVWQCNNRYKVKGQIGCQNNHIDEEMLEKAFLKAVELLQEHRADVVVKWQKLEKGTNLLHKHYAKQMYQLLELDVFDGTIMNQVLDHIIISENGQISVKFLEGTEIDL

SEQ ID NO: 21416 - protein, 481 aa, synthetic construct
MITTNKVAIYVRVSTTSQVEEGYSIDEQKAKLSSYCDIKDWSVYKIYTDGGFSGSNTDRPALEGLIKDAKKRKFDTVLVYKLDRLSRSQKDTLYLIEDIFIKNNIAFLSLQENFDTSTPFGKAMIGLLSVFAQLEREQIKERMQLGKIGRAKAGKSMMWAKTSYGYDYHRETGTITINPAQALAVKFIFESYLRGRSITKLRDDLNEKYPKHVPWSYRAVRTILDNPVYCGFNQYKGEIYPGNHESIISKEEYDKTQSELKIRQRTAAENVNPRPFQAKYILSGIAQCGYCGAPLKIMLGVKRKDGSRLKKYECHQRHPRTLRGVTTYNDNKKCDSGFYYKDKLEAYVLTEISKLQDNAGYLDKIFSGDNAETIDRESYKKQIEELSKKLSRLNDLYIDDRITLEELQSKSAEFISMRGTLETELENDPALRKNKRKADMRKLLNAEKIFSMDYEGQKVLVRGLINKVQVTAEDIVINWKI

SEQ ID NO: 21417 - protein, 577 aa, synthetic construct
MQTDGYGLQRQQDAIRAYLEDFDVPKELGYEIDRDNYVLLEDAGKSAYHGYHFSKGQLGQFRQKVLDGEITSGLFIIENVDRFCRMEEYLAIQEFTNLINNGIDILEVDTGEIFSRKVRKSLNKLTVSIERAYAESERKSRISTRSWKNRKRKSLEEGIAINNNTPDWLSLSEDKQSYIVNKERVEILNQIFKMYAEGFGGTAIVNKLNKEKRYYNKTSWSTNKFYHLLRNRRLIGFLGDERHYPAVIDSILFEQVQSLLNGNVRKGKKAGTMMRSIFNGIAKCGFCGNGMICQTMTSSASYLRCIAERSKTTKCTHAKLIRYKESEQVILEHLCNINWDELKKGNSTHRDDIDVLKTQMSIITDKLQKLDLLIQETEDDDDKISLINIKNKNKKELAAIDEKISALTTNLEIPDMEVLSSLKEIQDLDNVELRQKVYSLLSKTVSSIECTRTDSPDPFYTFIINYIGASEKHLLIVELKNNCKVTRFVEKITDDIVTYYTPSFVVAYSNNWESGLPEIRGLQDCDGITIKAELMDCMHLFSILDRTNRGEAKVIRDWLVIPRVQEFFFHTSAYEGE

SEQ ID NO: 21418 - protein, 559 aa, synthetic construct
MKTKLYSYIRFSSMRQSDGSSYERQIRMAREIAAKYDLELVNDYQDLGVSAFKGANSKTGALSRFLDAIGRSVPVGSWLFIENLDRLSRADIVSAQELFLSIIRRGITIVTGMDNKIYSLDTVTANPMDLMFSILLFIRGNEESQTKRNRTNSSALIKIKAHQENPQNPAVAIEEVGKNMWWTDTTSGYVLPHPVYFPVVQDIVELRKNGRSTAEILDHLNETYTPPPAVSNKKHSKWSRAMVERLFHTRALIGIKEVSVDGVNYELKDYYPRVIDDPTFYHLKKNIGARAWNFGDKEEVKPIPLLSGIGLLKCDHCGCAMVKVKGTNKRSDQYRYTCDATRSRRLDCEHPNWSFRGDQLEKAVLQLLADKIWIAEDKANPVPALKVQVDEISRKIDNLIALSAMTGATKELADQITTLNSERETLYNQIKMAEEEMYSVDSQGWEKLAEFDLEDVYNEERLKVRFKIKQALKRIGCSRIDRNKNLFVLEYIDGKTQRVVIENSRGTRKGRIFIDLKTINDRQILESNGLVLHPCLDMLTDKDWKPEEEIPGPLQEFGI

SEQ ID NO: 21419 - protein, 506 aa, synthetic construct
MRSVITYLRYSSAIQGAEGADSTRRQNDQFKQWLKKNSDAQVVASFSDEGLSGYKGKHLTGQFGDMLARIESGEFPEGTILLVESIDRIGRLEHLETEALMNRILGNGLEIHTLQDGLIYTKDALADDLGISIIQRVKAYIAHQESKQKSFRVSQKWEQRAKLALAGEQRLTRNVPGWIDPDTFKCNEHAETVRLIFKLLLDGESLHNIARHLQSNDIKSFSRRKDANGFSVHSVRTVLRSESVIGTLPASQRNDRPAIPNYYEAAIDAATFNKAQEILDKNRKGRTPASDNPLTINIFKGLFRCQCGASVHPTGTKNKYAGVYRCNNHLDGRCDVPPLKRKPFDKWMIDNFLGMIDVGNDGEAEGKIASLQHEVEIVTTRIKKATALLLEMDDITELKTQVKELNQKRTELQTTIDSMRRKTSLSDKGLPQLKDIDLMTKEGRVECQLILSKHLKGLTLGKDSVTVTLQNDTEITIPTNPLPLNDGSPIFEIADKELLDIDAYQL

SEQ ID NO: 21420 - protein, 508 aa, synthetic construct
MKKAIAYMRFSSPGQMSGDSLNRQRRLITEWLKVNSDYYLDTVTYEDLGLSAFNGKHAQSGAFSEFLDAIEHGYILPGTTLLVESLDRLSREKVGEAIERLKLILNHGIDVITLCDNTVYNIDSLNEPYSLIKAILIAQRANEESEIKSSRVKLSWKKKRQDALESGTIMTASCPRWLSLDDKRTAFVPDPDRVKTIELIFKLRMERRSLNAIAKYLNDHAVKNFSGKESAWGPSVIEKLLANKALIGICVPSYRARGKGISEIAGYYPRVISDDLFYAVQEIRLAPFGISNSSKNPMLINLLRTVMKCEACGNTMIVHAVSGSLHGYYVCPMRRLHRCDRPSIKRDLVDYNIINELLFNCSKIQPVENKKDANETLELKIIELQMKINNLIAALSVAPEVTAIAEKIRVLDKELRRASVSLKTLKSKAVSSLGDFHAIDLTSKNGRELCRTLAYKTFEKIIINTDNKTCDIYFMNGIVFKHYPLMKTISAQQAISTLKYMVDGEVYF

SEQ ID NO: 21421 - protein, 503 aa, synthetic construct
MLRAALYARFSSENQREESILAQFRDSTEYCKKHNYAIVAKYADEAKSGTTTIGREQYKLMLKDAQKGKFDIVVFHKIDRNARNELDYYITKHKLEEAGVKYAYSRQDIDSTSPEGQMMESMLVGMAAYYSRNLSNEIKKGLRENAIQGKCTGGRPPYGFSIDPDKKLIINDKEAAAVRMIFDLYSTGVHYGVIRKRLFNAGYRNRAGKEFTLASIYEILRNRKYVGDLYLGKTLFRKGKRNTHQTSANVQYFENVIPAIISREIFEEVQVKLDQNKRRSGAGKAKAIYALSGLIYCGKCGSAMVAHSTKNSRGIKNYYYRCPKGRLVGDEKCPQKFINRDDIEETVYQLIRKLFTAPDAHDQIKRIIAKNNMGVKVPDYTDQVKRLKKQESDASKRLDKLYDLYMTDREDEFTSAKMAQIKEEILRLRTQIKEAEDRQAIAQSTTFDIDKIIDTFQKQLKQKQSPEFIKTLFELAVKNVTVYPDKIKVVLLVTQERFELPTP

SEQ ID NO: 21422 - protein, 485 aa, synthetic construct
MSKKVAIYTRVSTTNQAEEGYSIDEQIDKLKMYCEAMDWKVSEIYTDAGFSGSKLTRPAMEKMITDIGLKKFDTVIVYKLDRLSRSVRDTLYLVKDVFTKNEIDFISLSESIDTSSAMGSLFLTILSAINEFERENIKERMTMGKIGRAKSGKSMMWAKTAFGYSHNQETGILEINPLEASIVEQIFNEYLKGTSITKLRDKLNEDGHIAKELPWSYRTIRQTLDNPVYCGYIKYKNNTFEGLHKPIISHETYLKVQKELEVRQQQTYEKNNNPRPFQAKYLLSGIARCGYCGAPLRVVLGHRRKDGSRTMKYQCVNRFPRKTKGVTTYNDNKKCDSGAYDMQWIEDIVLKTLNGFQKSDKKLRKILNIKEESKVDTSGFQKQLKSINNKIQKNSDLYLNDFITMDDLKKRTEMLQGEKKLIQARINEVDKPSTSEIFDLVKSELGEIPISKISYEDKKKIVNNLISKVDVTADNIDIIFKFQLA

SEQ ID NO: 21423 - protein, 540 aa, synthetic construct
MRKAAIYARFSTELQSPRSIDDQIALCSKFAQANGFQVVGTYNDKAKSGSSMLERDGLLRLLNDAKNGQFDAVIVEALDRVSRDQEDMAAIYKRLKFLGIDIIAVHDGKADTIQIGIRGLIGAIYLEDLKHKVRRGMSGRVRDGLSAGGKAYGYKPVLGKPGELVIDEEEAVVVRRVFREYADGKNPREIALGLNRDGFKPPRGLVWNPSTLIGSKKRTNGILRNPLYGGVLIWNRVTMVRDPETGKRVSRNNPESEWQRKNVPELRIVDEETAAMVAARVEERTFETTIERSPKRPRMLSGLLKCGKCGGGMTLDGYNNGKPRIRCVRTRETGTCDHTRKYQVEAIEFSVVEAMREQLSDPDLLKAYIDSYIQERRRLATEINRNRATIERNLSKAQGELDRMLTLCIKGLMTDEEFGERRGALDEEIAHLKADLLVAPTVDNVELHPAAIENYKKDMDELSARLAEFQKEPHSALVSSLRKVVAEVTVHPSPSNMTPIIEVKGWLASLIGEDVENGYRPKWANKVVAEEGFEPPTQGL

SEQ ID NO: 21424 - protein, 535 aa, synthetic construct
MTGKVYSYLRFSDPRQSSGSSADRQLQYAQRWAAERGLVLDESLSLRDEGLSAYHERHIKQGALGAFMRAIEEGRIAPGSVLIVEGLDRLSRAEPLQAQAQLGQIIHAGITVVTASDGREYNRAGLKAQPMDLVYSLLVMIRAHEESDTKSKRVKASIRRQCEGWVAGTFRGLIRNGNDPQWLRWDGAAWHLIPERVEAVRYAIELYKSGVGATRAARKMAEKDMRLGDNPMAGQQLYRLIRLPALRGAKRISVDGEDYLLEGYYPPILTDAEFNDLHAARQVRHGRRGASDIVGIVTGVGMTYCGYCGTALVAQNAVSRAREDGSIADGHRRLNCVSFSNALGCKTPSSSVVPIEKALINYCSDQINLTRLTAPIDDGQGLRVRLQAARSKRSDVERQLAKVTDALLADDSGAAPLAFVRKARELEAELAGLQGDIEQMEREQAIESKGHTPAAAEQWSRLAEESQDIYSPARAEVRQLVLDTFSRIVVYSRGVVADPQSKTIAVLLTSRTGQKVLLEVNRKTAAWVQRLDHGG

SEQ ID NO: 21425 - protein, 481 aa, synthetic construct
MITTNKVAIYVRVSTTNQVEEGYSIDEQKDKLSSYCDIKDWNVYKVYTDGGFSGSNTDRPALESLIKDAKKRKFDTVLVYKLDRLSRSQKDTLHLIEDVFIKNGIEFLSLQENFDTSTPFGKAMIGLLSVFAQLEREQIKERMQLGKLGRAKSGKSMMWAKTSYGYDYHKETGTVTINPAQALTIKFIFESYLRGRSITKLRDDLNEKYPKHVPWSYRAVRTILDNPVYCGFNQYKGEIYPGNHEPIISKEEYDKTQSELKIRQRTAAENVNPRPFQAKYILSGIAQCGYCGAPLKIMLGVKRKDGSRLKKYECHQRHPRTLRGVTTYNDNKKCDSGFYYKDKLEASVLKEISKLQDDADYLDKIFSGDNAETIDRESYKKQIEELSKKLSRLNDLYIDDRITLEELQSKSAEFISMRATLETELENDPALRKNKRKADMRKLLNAEKVFSMDYESQKVLVRRLINKVKVTAEDIVINWKI

SEQ ID NO: 21426 - protein, 541 aa, synthetic construct
MDKKDMEKTNNIIDVVIYARFSSLRQNETSIEAQLKECYKYCEAMHFRVIDVYEDDAKSAKTDDRPDFQRLINDSKKKLFQGVVCYQLDRFARNRKDSVVYKAILKKNGVKVYSAKENIADDPSGILVESVLEGMAEYYSAELAQKVNRNMQLNAEKGFFNGGFTPLGYKVVTIDFGTYKKKKLEIEPVTAKIVKEIFELRADETKIDHIIDILNHKGYKNINGKEFTRNSLQTMLKNKRYIGTNMYGDEEFPNTVPAIIDKELFDRVQKVIEKNKKGPGGAKAKEEYLLTSKMVCDCCGEKMKGVSGKAKNGSIYRYYTCKTHKGKKKCQRKNLSKDYIENLVINKCKQILDNDENIEFIAKQIYEICQKENNKNLIIKEYEKRIKTSKKAIENLLLAIENGDNVDLINERIREKRKELEETEVLLLKEKNKLANINEEHIRFFLHQLKNGDINDVKYRKKLINIFVNEIHVTEKDIIIVFNVSKQKISLAVPNTAKENIDTNPFLKGSYFNDMVSQEGFEPPTLGLEGQCSIQLSYWPI

SEQ ID NO: 21427 - protein, 569 aa, synthetic construct
MKTKDTPKQYVIYSRKSKFTGKGESIENQIELCRQYIAMHFGEEAAENVLVYEDEGFSGGNLERPQFKKMMKDSQKIAFAAIVVYRLDRISRNIGDFAKLIEDLGDRHIDFISIREQFDTSSPMGRAMMYIASVFSQLERETIAERIRDNMHELSKTGRWLGGTTPTGYASESLSSVTVDGKVKKACKLKPIPEEIQLVKTIFEVFMETGSLSKTDQYLLEHRCVTKRGKQFTRFAIRGILTNPVYMIADETAYQYLKENNVDLFAERSEFDGEHGIMAYNRTLQRPGKANQIRPMEEWIVAVGKHPGIVAGSDWVRVQAMLDVNKSKSYRRPRSNVALLSGLLRCGECGDYMRPKLTNRKNAEGELIYTYMCSTKERSHGTVCAMKNCNGNTLDAKIIEEIRKLSADKETLARLLAQTKKVISGSKEGYDAELALLREKHAETEDRIKRLVESLSVASDTSAKYVMEQIDALHHESETQQLRLAELEALTEQSRMLHQEFAFHQEMIESFASAVASATLEEKRRLLRTIVKKVVWDGKNAYVYLFAEDGEADLPPIDQPMYPLGEDSE

SEQ ID NO: 21428 - protein, 460 aa, synthetic construct
MPKRAALYIRVSSEEQARHGLSLGEQRKNLMSYAQEHGYVVVGVYADEGVSARKAISRRKELQRMLTDVDEGRIDIIVIKCLDRWFRNVADFYKVKERLDARGVDWVCATEDFNTTTPNGLLMLNLKLSLAQHESDQTGERIRYVFEGKRARREVTNASLPIGLKVENKHAVPDERLPIARFLFDYIAAGGSTRSSVAAVQAKFGIFLSTIIVRNLLRNRAYIGELYGIPDYMPAVIPHDLFFRVQDILSRNARWAPTGSIYLFTGLICCPDCGTRLIATRGKRNARGEFHAYQYKCRIHRVGNPPPCGFSRSIFEPKLENYLLDNIQQLIREHIVTVEELREKQNRERPETRLAALTAKLSRLEDVFLDGMMDKEKYAATYKEISREISELSIQIGEAPAISPSLRAVVDDHDFRATYSALTRENKQRFWKSIISSITFDDTPETRYRGAYIPFKVVFL

SEQ ID NO: 21429 - protein, 646 aa, synthetic construct
MYRPICYERVSSFDQVLSGSGLDDQRSIIEQFLDDNPENFTKNRIYITDEGVSAFKNANISAESNLGKFLQDVRGRKYGKGDALIVTSLDRLSRRSSWSENTIQFIVTSDIVIYDISTGLVLKKDDNFSKILMEIILQRSHNESLMKSVRAKVAWQNKINKAVANGTVVTSRMPFWLRNVDGKYSVIKEQAELIVNCFNWYVEGFSTGEIIKKLNKPKWHMVTVSRLIRDRRLLGEHKRSNDEAVLNVYPIIVDSDLFVTANRMMDSVMIQKKKPAEKMEYVPEVVKKIFQLYDAGVGTGAIVKQIPGGWSTVNVLRVLRDKDVVEQRIIDNLTFERVNLKLSKNGVANRIRKDIKIAADDYITNLFPRILKCGCCNGNIAIHYNHVRAKYVICRNREEKKSCNAKSFQYIRIEENILKVVKNVDFQKLMNEGRADKSSILDSLRIELSSLREEEKLYQEKIAERKAAGKKASIAFMEGLTDVQDRIDELEDRLSNEQAENEIPAFDFNLSDVLEPTNVEIRAKVRKELRLVLSSVKYILDDKRIFISLKYFNEVISHLIVINNKRFGGEVLQEISITEKNGERIYDIKELGKTVFRVVVTIDAYDMWTLSLSRNKTVEAVGQYLNLLKRENLDLVVNEDQIEWID

SEQ ID NO: 21430 - protein, 529 aa, synthetic construct
MKIAIYSRKSKFTGKGESIDNQIEMCKEYANKHFNDIEEFIIYEDEGFSGGNTDRPEFQRLLRDAKKKKFDALICYRLDRVSRNVSDFSNTIEDLNKCNIAFISIREQFDTSTPMGRAMMFIASVFAQLERETIAERIRDNMMQLARTGRWLGGNAPIGYESESISYFDNDMKERKMFKLSPISQELDIVKLIYNKYLEFQSLSKLETYCLQNNIKTANNRDFSKFGLRFILTNPVYAKATKEVYKYFNSNNAQICNDKFEFNGKNGIMAYNKNLVKKGQSVKAKDMDEWIIAIGRHRGTIEGKDWVMVQNILNKNKHLSPRQGTSYAAMLSGLLYCKKCDSFMRVKYGQKKVDSDERHFYYVCSLKENSRGVRCDAKNLKGENTDEYIINELKNMIESGMLTSLDDTKRNIEDKSKINKNIQDKISDNEKAIENLLKQLSKNENETVAKYIFSEIEKLDKENQELKKTLDKYDIENEITNIELFKDAAVRFYETIDEVPYDQKRNLIQNLVNKIWWDGENLHIDIFDV

SEQ ID NO: 21431 - protein, 596 aa, synthetic construct
MSKVEVIRANSDLANQKRGKEIKQLRVAAYCRVSTDSEDQLSSYKSQVSYYSDLIQKNVEWVLADIYADEAITGTQITKREDFQRMINDCMNGDIDMVITKSISRFARNTLDTLKYVRMLKERDIAVYFEDEKINTLTMDGELLLVVLSSVAQQEVENISANVKKGLKMKMQRGELVGFQGCLGYDYHPEDKSISINEKEAEIVRYIFQRYVEGAGGNIISRELENLGYKTKRGTPTWAETTVLGIIKNEKYKGDILMGKTFTLDPITKRRLENFGEEDQYYLRNHHEAIVSAEIFDKAQEIRMRRNRGRNTVENNGGKREKYSRKYAFSCMIDCGYCESTLTRRRWHSSTKYSKTIWQCVTSTKKGKKFCPDSKGIPEEAIEKAFLESYRIMCNNNKDVLEEFLQRMEETLSSNTIHKEITKMEKEIQGLENKKNKLVDMRLENIIDKDTYEDKYNSLMQEINEKVQTKEKSLSNLEEEKDIKKRLLAFKKVLERNEVIETFDRYVFESVVDKVIVGGVDEDGNKDPAMITFVYKTGLSNSLDGEKFKPARRNAKKENIKTSNELCSHTVNEDNKLCSHSSEDTCGDGSIDVESG

SEQ ID NO: 21432 - protein, 578 aa, synthetic construct
MTTVADDPTASLIDPPRTAAVAVSYLRVSTREQAEKGGTDEGFSIPAQRDATRRKAEQLGAGIVEEFIDAGASAKSSDRRELMRMIQYVKANKVSYCIVHKVDRLARNRADDVSIHLALQQCGVMLVSATENIDETPSGMLLHGIMSTIAEFYSRNLATEVTKGMTQKAIGGGTNGRAPIGYLNVRKRDEMGRELRTIELDPERAPMIEWAFKAYASGNWSVSQLHDELTSRGLRSLPTPKRAAKALAVSTVHRLLTNPYYKGDVVYRGTRYKGNHPALVPAEVWYQVQSVLTAHQCAVEATQVHGHYLKGTIHCGQCGSRLIVSNAKNRHGNVYCYFVCSGRHSKRTECTRQAMLIEDVEKLVEDYYSRVQITPAQQDALAGMLHHEFDRLMAAETEELARLRANRDRLESEQDRLMQAHYADAIPLTVLKREQDRILAELDKVTRRIDAHFGDYADARAHLDDALRLLANCADIYARCDDTNRRLCNQAFFTKVYIDDDNELRVEHNRPFEMLLDPQVNANALTRAAETNKARTPAKVSIGKGSSLVPSVEVRGFEPLTFSMPWRRATNCAIPPLA

SEQ ID NO: 21433 - protein, 576 aa, synthetic construct
MTTIADDPAASLIDPPKTAAAAVSYLRVSTREQAAKGGTDEGFSIPAQREATRRKAEQLGAGIVEEFVDAGASAKSSDRPELMRMIQYVKANKVAYCIVHKVDRLARNRADDVSIHLALQQCGVMLVSASENIDETPSGMLLHGIMSTIAEFYSRNLATEVSKGMNQKAIGGGTNGRAPIGYLNVRKRDELGREVRTIELDPERAPMIEWAFKAYASGNWSVSQLHDELTSRGLRSLPTPKRPAKPLAVSTIHRLLTNPYYKGDVVYRGTRYKGNHPALVPAEVWYQVQSVLTAHQCAVEATQVHGHYLKGTIHCGQCGSRLIVSNAKNRHGNVYCYFVCSGRHSKRTDCTRQAMLIEDVEKLVEEYYTRVQITPAQQDALAGMLHHEFDRLMAAETEELERLSTNRDRLEGEQDRLMQAHYADAIPLSVLKREQDRIVAELDQVARRIDAHFGDYADARAHLDDALGLLANCADIYTRCDDTNRRLCNQAFFTKVFIDEDNELRVQHNRPFEMLLDPQVNANALTWVADANKARTSTNVSVGKGSSLVRAVDLRGFEPLTSSMRTRRATNCAIGP

SEQ ID NO: 21434 - protein, 433 aa, synthetic construct
MKKTIIDIAPAKQDSLRRKRVAAYCRVSCGKDTMLHSLQAQIDYYHKLITMNPEWKFAGVYADEAKTGTKESREQFQALLAECRAGNIEMVITKSISRFARNTVTLLNTVRELKDLGIDVYFEEQNIRTLDAEGEILLTLLASFAQEESLSVSENCKWRIRNGFAEGRAHSCTMLGYRLVDGEITLVEDEAETAKYIFDLYLAGNGLQKIANTLNEEGRWSINGNIWRSGTIRRVLTNEKYCGDLLLQKCYRENHITKKTLPNKGELTQFFIEDDHPAVVSRQSFKSVQEELKRRADENPKTAGSVTAFTGKIRCSCCGKNYRRKTTPYRIVWCCATFNNRGKKYCPTSKVIPEDTLKTAASEILGLTEFDEEVFAEKIDHIDACPDNLLRFVFFDGTEVEYIWKDRSRAESWTPEMRAETGRKTRERNAAHG

SEQ ID NO: 21435 - protein, 548 aa, synthetic construct
MAKKVVQKIEATKPTVSAQYSAFTRKRKVAAYARVSTAKEEQENSFDAQVSYYTQKIQSNPEWIFVEVYSDEGITGTNMKKREGFNRMIEDALAGRIDLILTKSVSRFARNTVDSLVTIRQLKEKGIEVYFEKENIYTLDAKGELLLTIMSSLAQEESRSISENTSWGRRKSFADGKVSLGYSNFLGYDKGPDGELIINEEQAKVVRRIYAEFLAGKTPGGIAKGLTADGIETPGHKTVWQDSTVLSILKNEKYYGAAILQKQITVSFLSHEKKPNEGELPMYYIEDDHEAIIPPETYQMVQEEMRRRKAAGSNMRCVSIFSSRVICGDCGGYYGRKIWHSNTKHASWHWHCNAKFQKRKYCETPTLKEESLEETFVEVFNGLIANRKEIEENYRLCIDTITDDSEYRRQLEDLNNGCGEVQTLIRSLLMTYSRQDTADDIHEKLKEYEDRLDTMARLKQELDLKIAACAAKRVQITGFLNELMKHDAPLAKFDPLVWQAVINYATVNCDCTITFTFRDGTEKTVPIKNGVRPYTKRNKPQEVDGNDG

SEQ ID NO: 21436 - protein, 553 aa, synthetic construct
MEKSKRVVGYARVSTEAQDITRQIELITAYCNDRNYHLIKIIQEKISGARRDRKSLNELLEVDDAVADLIIVSELSRLSREDDILSVLSTINELLKQGVDILFLDKQDRIYKAGTILSLYDIITLSVEAKASADERYKIAGRMQTGLRSKLAEFSNMFAGGTVPFGYKVIHNPDYKLNQTPKNLLVVDAKEAEAVKYLFQQLIDGNTIRQTVRVYNKLYPYKLSYSGICRIIRNPKYKGEIYRRGKLYGQIPELQIITPEDFDKANKQMRENSLFQSNAPKYYNPLKGLLFCPCGCGLYMKPNHNSYLIYRCSSAYNDKQKCENYGVKCAYILSSVWTCVKETLHTEEYKRFNTQRANELQGINKQIRETITRKVNSVDELKTQSASLIAKIKKLNNDDLINELETDYNVLCKQIKQTEQEISELNGQIAENDAEIKRNVEQKDFSKMEQSALYKEKLQKAVYHSQSAMRGILEIVFKNGMTRYVLIKKHRNGGTYLLPDTFKGDMERKQIIVPSLRTDKDNPYSAQPMNLRYTFDEFFKAMPVEEYEIPITE

SEQ ID NO: 21437 - protein, 427 aa, synthetic construct
MDRIIKRVDFPKIMQPQFLKVCAYTRVSSGKDSMLHSLSAQVSHYSEMIQSHTGWVYCGVYSDEALTGTKSDRDGFQQMLTDCRAGKIDMVITKSISRFARNTVTLLETVRELKSLGVDVFFEEQNIHTMSADGELMLTILASYAQEESRSVSENQKWRVKRNFEAGIPWNGRMLGYRMQDGKYYIIPEEAELVRRIYREFLDGMGRNRIAAKLNDEGIQPTRYGEEWHPQTIAKILRNYAYTGNLLLQRFYCESYITKKTVPNNGQKTMYHAERTHEAIIPLEEWKAVQTEIERRAEQHKSKPPAQPSFFYTGRIQCAKCGKNFRRKTTAARVVWICATLNTKGKKHCASKQIPEATLDELVRQVTDDPFSVKKIIADDGNTLHFHFSDGSVVTRTWTDRSRAESWTPEMKEKARQQSLARRRQKS

SEQ ID NO: 21438 - protein, 528 aa, synthetic construct
MNTAVRTVTVIPPSINPMTHLTDTPLYKLRVAAYARVSTDSDEQFTSYEAQIDYYTQYIQRNQEWTFVKVYTDEGISGTNTKHRAGFNEMIEDALAGKIDLIVTKSVSRFARNTVDSLVTIRKLKEKGVQVYFEKENIYTFDGKGELLLTIMSSLAQEESRSISENVTWGQRKRFADGKVNLPYKQFLGYRKGADGFPEVVPEEAVIVRRIYTRFMEGLTPGAIAKELTADGIPTPSGKQRWQTSTVESILQNEKYKGAALLQKCFTVDFLTKKRKVNEGEVPQYYVEHSHEPIITPEEFDKVQTELARRKQISRQYSGKSIFSSRIVCGDCGSYFGSKVWNSTSKYRRVIWQCNGKFKGEHKCETPHLDEETIKARFVTALNAIIENKDNILEDCRLMQATLTDCTGIDTEIESLLEEIDVVTELTKRCIAENSQMAQNQEEYAARYNGFVERYEKAKARLEQLRTTKAAREAQAEAIGAFMFEVQELDALTEFDEKLWLTVIDTVTVHADGRMTFKFQGGKTLTSY

SEQ ID NO: 21439 - protein, 474 aa, synthetic construct
MRAVIYARFSTDKQREESIEAQERACREYAAAHGYSISAVYADRAASGKTDRRPDFQRMMRDAKSQRFDVVLVHKYNRFARRMSDHVRYEDKLNSYGIQLIAVAEDFGTGKEAVIMKALMRSLSEYYIIDLSDEVKKGHRENAMKALHNGGLAPFGYDIVDQKYVVNEFEAAYVRRMYNCASDCIGFTALVDEMAAAGVRGKRGKPIKYQQIYDILRNEKYTGVYLYCPEQESSKMLQRSKPSAIRIEGAIPPIISKEQFEEVQKIMSSRKMTGRKNSYLCSRLVFCGECGAAMHAITTGKYQYYYCKNHCGNPNVRMETIDNAAKSYLRELLTPENQLTIAEALKRYQASAEYRMEDFYDSVHDQIAEREQKYEALLANLSSGALPADVVADVGATMQRLKDEIDVLRDAKPEKDYTVDNITTWLESLRQAPDEKAIRLLISKISVKNRTDVSIDSTLTSILGNIGCGTRIRT

SEQ ID NO: 21440 - protein, 520 aa, synthetic construct
MNTVIYARYSAGPRQTDQSIEGQLRVCTDFCKQRGLTVIDTYCDRHISGRTDERPEFQRLIADAKRKKFEAVVVYKTDRFARNKYDSAVYKRELKRNGIQIFYAAEAIPDGPEGIILESLMEGLAEYYSAELAQKIKRGMHESALKCQSTGSGRPLGYRVDEQKHFQIDPESAQTVQTIFEQYIKGESNAAICELLNSRGLRTAQGKPFNKNSINRIIKNRKYIGEYRYHDIVVEGGMPAIISKDTFNLAQAEMERRRTRKAPKSPKAEYLLAGRLFCGHCKGPMQGVSGTGKSGNKWYYYYCGNTRGENKTCDKKQVSRDRLERAVVDFTVRYILQEDVLEELARKVHAAQERQNDTASEIAFYEKKLADNKKSIANVLRAIESGAATQTLPARLQELENEQAVILGELSFLKGKHLAFTEDQILFALMKHLEPYPGESEQDYRRRIISDFVSEVYLYDDRLLIYFNISSEDGKLKSADLSNIEGSEFDEGLVSSTKRGSVELFFYKNEFALVYRLGDA

SEQ ID NO: 21441 - protein, 554 aa, synthetic construct
MLSKKIRVAIYSRVSTIEQAEEGYSIDEQQRLLTEWCNKMDYEVYNCYADRGISGKDIKNRPAIKELLSDAEEKKFDMVLSWKINRISRKLEDVLKIVSILENNNISFKSYSEPFETNTPAGKMQFQMMALIGEFERGTLAQNVKMGMCAKARAGEWCGGQVLGYDLVQMEKQPGAKGSKTKLVINEKEAESVRFIFNEYASGKGYKAITNQLNKLGYKTKKGNNFSVGSIRDILTNPVYIGKIRYNVRQNWSEKRRRNINANPIITDGIHKAIIDEKLWDKVQAILESKKGKPSRIYDGEYPLTGILRCPKCGAGMVIMRTTNTLKDGSKRRIAYYACGNWKNKGIAICSSNSIRVDKANEYVFSKLSELLSNDKAVKTIVDNVNKERIRKVNPAKKDLSKIDNELEKLDKKRAKLFEAYEDEIITKEEFKLRKEELMKRVKTLEEEKAPLLVTLSDDVNEEVPYELVKSILENFSKVLTESSTREQQKKLLHMIISEITINELREIDSIKIKLDDNLINYLSNEEGVFMKGTPSSFMLRNVGIKTLNLDIAI

SEQ ID NO: 21442 - protein, 468 aa, synthetic construct
MQNNINNNMNDVTKRVEEVALYVRVSTEEQALNGDSLRTQREELTKYALANHFHIMGIYEDDGFSATNLKRPALQRMLEDVKSGKITRILITKLDRLSRGVRNYYKILDVLDENDVYWTTVFEKYDSSTANGRLHINIMLSVAENESAQTSERIKSVFKNKVQQKEIISGKIPLGYKKEDKKLVIDEDMASIIQDTFDYFIKNGSVYKTQEYICLNYFYITYFRTRYLLSNKIYIGTKITKYGEIENFCEPIINNEIFERTQIILKKNERKRTAKSDGFIFSGLLKCPECGTKLSGKFCKNLPPTCTYYYMCNNNHLRRKCSNSKYLNEVKIEKKLLDIIVPQIEQYIDVCTSKKISVKTKDHSKEITSLNKQLEKLRDLYIKDLIQIEHYEKEYKELTDKLDVLTKTLIVPKDKEQNDNTKNLKSFLTKDFRKNYNELSREQKRRIWVSIIDYIDIDENYNMNIFFI

SEQ ID NO: 21443 - protein, 474 aa, synthetic construct
MKCVIYVRVSTDEQAKHGYSIAAQIEKLEAYCISQGWELVAKFVDDGYSAKDLERPQFQEMMEQIKAGGIDVLLVYRLDRLTRSVSDLYSILNELDQYNCKFKSATEVYDTTNAMGRLFITLVAAIAQWERENTAERVYFGMDKKARLGEWPGGTPPFGYKIEEEKLIIDPEEVKTVREIFKLSKTLGFYTIAKQLTTKGIPTRNGGDWHVDSVRAIANNPIYAGYIRWGDDGRQNKKPPREQKLYDGIHEPIIDRDEFWGLQDILDKRRTFGGKRETSKYYFSSILKCARCGHSMSGHKGGNGKKTYRCSGKKAGKNCTSHIILEDNIVKAVLTEFEGLVRDIYSDVKTSKEPIERLSVLNSELSSVQKLMKKKKTMYENDIIDIDELIATTSELREKEKELIREIKNIQKEDKTDTDELKYIIENIDTLWDHANDYERKQLMTSIFSQLIIDTNDEYRGSKYPRDVIIVAAK

SEQ ID NO: 21444 - protein, 478 aa, synthetic construct
MPKIKVGIYIRVSTQEQANEGYSIDAQTDRLTSYCKSRDWAIYNTYIDGGFSGSNTNRPALHQLMQDIQDKKLNCVLVYKLDRLSRSQKDTLYLIEDVFLKNKIDFVSLNENFDTSSPFGRAMIGILSVFAQLEREQIKERSLMGRIERAKNGLWHGGGFEPFGYNYINGQLIVNEYEANIVREAFELFLQKLPIHRINRIISEKYGKEFHETVLRSILSTRLYTGKISYLGGIYDGQHQAIITEDTFKAAETLLAYRKKKFSNSNPFKATRLLGGILYCAHCGARYLAKGNYSGHGNKKVYRPYYTCYSRAKCTKKYILDPNCKNPSYAVVVLDEIIINEIRKLFINKEYLYSAKNATAATNTVNKQKSILKQIDSIQSQMSRLLDLYQIEGISIDDIQDRIKKLQHEKDVLEETLSNLKTNQKKKLTTTEVLSMEASFNEIMENGTDMEKQAIVRTLIDKIIVHEELNSFEIIWNF

SEQ ID NO: 21445 - protein, 527 aa, synthetic construct
MPYLMYLRKSRADKEAEARGEGETLARHEQLLSELSIKMGLEVGATYKELVSGETISSRPKMQQLLLEVMQGMWEGVLVMEVERLARGDTKDQGTVSEAFKFSNTKIITPMKTYDPSDEFDEEYFEFNLFMSRREYKTINRRIQRGRIAAFRDGWYIAGTAPYGYEKVKHKGDKGYTLDIAPEQAKIVEYIYELYTTGELQEGGSYTPFGSYQIRDRLNELNVPSRSGRPWSASSIIDILSNPTYCGYQRWQWRKVHKQLVNGQIVETRPKDADCEKVKGRFPAIIPEEKYNLVQKIRAGKPLPLNTNTALQNPLSGLVYCSKCGTLMTRQPSNTRLRYAVLRCPNSKCSNISSPLTLIEEQVIEGLKEWIPDHNIDWPEKERKEGETTLAVLESSLRNLEEKYNQTVKQLNKTFDLLEQGIYSLDTFRERHKTLEAQKSDLTKELEHIKNELDRTAARELAKREFIPSIKHLIDVYWEVDDIMVRNTMLRNVIDHVDYLKTERNKKGAGNTANFTLQFYPRLPENP

SEQ ID NO: 21446 - protein, 519 aa, synthetic construct
MKKVTKIDKIQPSKVAKKKLRVAAYCRVSTDSDAQLESLETQKTHYENYINSRDDWEFAGLYFDEGITGTRADKRPKLMRLIEDCKAKKVDFVITKSISRFSRNTTDCLDIVRTLLNLNIPVYFEKENINTGSMESELFLSILSGVAEGESTSISENNKWGIKKRFENGTYKLGYVPYGYRWENGEIIVDPEQAVIVKRIFSELLAGKGTDAIAKNLNTENVPTKKGGRWTSSSIRGILANEKYTGDCIFQKTYTDSNFNRHKNDGLLDQYYVADHHEAIISHEDFDAAAALIEQRANEKGIKRGSNKYQQRYAFSGKIICSECGDTFRRRIHTSTYVKYPAWVCNTHLTDTSKCTMLYLKDDDIKLAFATMINKLIYCHKLVLKPYLESLQANTSDKALLRIQQLETLLEQNAEQRETLHKLMAQGYIDQILFTQENNALLTQANDFRSDIEALNRSVTGDTSKVYETERLIHFCERGEMLLEYSEDLFELFVDHIEVYSRQSIGFVLHCGLTFKERI

SEQ ID NO: 21447 - protein, 521 aa, synthetic construct
MGNVMVIPARRQVGNTARQQDAKPKLRVAAYCRVSTDSDEQATSYEAQVEHYTEFIQKNPEWEFAGIYADDGISGTNTKNRDEFNRMIEDCEAGTIDMIITKSISRFARNTLDCLKYIRQLKDKNIPVFFEKEAINTMDAKGEVLITIMASLAQQESQSLSQNVKLGLQFRYQNGQVQVNHNHFLGYTKDEEGNLIIDPEQAEVVKRIYREYLEGYSMDKIAKGLEADGILTGAGKTKWWTSTINKILRNEKYIGDALLQKTYTTDFLNKTRVKNNGIVPQYYVEGNHEAIIPKDIFLRVQEELVRRRVVKTSANGKKRSYSCNHCFAQIVICGECGEMFRRIHWNNRGCKSIVWRCLSRLEPTGEECHARTVNETVLENVVVQAINTLLGDKSIYQAQLQQNIAKVIREAQKNTADGIDEQLMELQRELIKKANNKEAYDEIADQIFKLREQREKCTVDTAARDAQIARINDLQDYIKKQRTNLESFDETLVKRWLGQITVRGNYFTVELKSGLKIDIEG

SEQ ID NO: 21448 - protein, 561 aa, synthetic construct
MKNKKIKCDIYTRVSTTMQVDGYSLDAQKEKLKRYAEFQNMEIVNEYSDEGKSGKSVEGRPEFQRMLDNIENGTDEVQFVLVFKLSRFGRNAADVLNSLQRMQDFGVNLICVEDGIDSSKDSGKLMISVLSAVAEIERENILVQTMEGRKQKAREGKWNGGFAPYGYELVNGELQIAEDEAEIIRLIYDKFIHTNMGISAIAAWLNQHGYKKKKRQNNTLDAFAASFIKGVLDNPVYCGKLAYGRRKNEKVSGTRNEYRIVKQENYMLHDGIHEGIISETDWELAHQKRKKTGVKYEKTHSLDHEHILSGILRCPLCGSGMYGNVNRKKKKDGTLYKDYFYYACKHRRLVDGHKCGYRKQWSEEKINNAVEEVIRKLVKNPKFEEAILNKIGSRIDTEEIEKEIEGLEKQHRQLTGAKARLGQQMDSLDIMDKFYEKKYQDMETRLYRLYDEIEGVENSIEEVKNRLLNIQQQKISEENVYQFLLYFDKLYDKFTDLEKKEFLNSFVEQVDIYEQEQPDGRFLKHIKFRFPVYFGDRETQELCWDNESTVETVCLLSRKAQ

SEQ ID NO: 21449 - protein, 517 aa, synthetic construct
MTTNKKVQIIRGSKSYAEDILRVAAYCRVSTDSEDQVNSFIAQMHYYYSFIKQAENMELVDVYADEGITGTSVAKRDDFNRMIKDCKTGKIDRIYVKSVSRFARNALECLEYLRILKECEVSVFFENDGIDTGALNSELILYIKAAFAEAESTSNSKRVQTANRMRAENGEYVFVSAPFGYRIENNELVPIPEEIKVVERIFKEYLAGLGAGKIAAQLNAEADMIGKPWGKERIRYILSNEKYIGDSLFQKTFTPNVLPLKNRPNRGEVEMYYISNTHAPAIDRELFGAVQEMLKRNMQKKAKCAESGKYSLSGKLYCGDCGWRYKRKVQNGTAYWICSGDGIAGRHCKTKPLSEEVFFKTFVNFYNRLRVHENLILRNSVTRLSEIKKMITCMDSEISDLDKQLGLLTERHNLYVTLMQGCQMDEISFAEQCAKAEREINKLRSRRNKLLSEDEDEKSIDDIRMLRNKLSSAPKAILKFDFELFDAVVEKVIVDDDSKVSFVLCCGLKLREAIAWN

SEQ ID NO: 21450 - protein, 416 aa, synthetic construct
MAHISVVTPVRSPAPKLVNVAAYARVSTNGTEQLASLSAQVSYYSRLIQSTPGWAYVGVFTDEGITGTSTKSRQGLADLMDAARSGGVDIVLCKSISRLARNTIDLLATVRELKDLGVAVRFERERIDTLSADGELLLTLLASFAQEESRSLSQNVKWAIRNRYKSGGTNSFVVYGYKWADGQFTIIEEEAKIVRLLFANFLDGISPEKTATMLNAEGKRSRGGGRFYGSVFRRMLENERYKGCQMLQKMYRPTIQAPTRSLNDGELPRYWVDNALPAIIDETTFDAVQKEIAHRREVGPAATPSKNTGVFTGRICCGACGKNYQRKTRTYKSGTSYKFWRCWSACTGNGNPCRGHNLRETLLEHACAEMLGTQGFDPVQVGEQVVMIEAFEHQLTFHLADGTMMPVGLTSEGWLA

SEQ ID NO: 21451 - protein, 525 aa, synthetic construct
MSRTVTAIPATKKLGNVTTPSGVPARRRVAAYARVSTEMEEQTSSYEAQIDYYTTYIRSRSDWRFAGMYSDEGISGTSMKRREGFQTMINDALAGKIDLILTKSVSRFARNTVDSLTTVRKLKDAGVEVYFEKENIYTFDAKGELLITIMSSLAQEESRSISENVTWGHRKRFQDGKIMVPYASLLGYKKGADGSLVIDETQAPTVRLIYQLFLDGMAISEIKTELAARKILTPRGKEVWSTSTVRSILSNEKYKGDALLQKTFTTDFLTKKMKVNEGEVPQYYVTGNHEPIIAPRIWDQVQYELATRHGNISSAKVGLFSTRLKCAQCGSWYGRKTWASNTKYKYTVWQCNHKYAGDKPCSSATVKDEDIKNAFVQALNQLIARQPRQSQLLQIFDSMFDTSRLEEQAAACQTKIVELTEQIEALIAKNQQRALDQDAYQNKYTELDTACRKTLACKASLEADIAANTAKHAAVTTALGDLAGEPVNDFRPAQWSALIDHAIVDEDGIRFVFRTGEQVRIALKG

SEQ ID NO: 21452 - protein, 525 aa, synthetic construct
MNTLARSVTAIPATKKPGHNLTACNPLFKRKVAAYARVSTDLEEQATSYQTQINYYTTHIQSRSDWEFAGIYTDEGISATSTKHRQGFQNMITDALNGKIDLILTKSVSRFARNTVDSLTTVRQLKDAGVEVYFEKENIWTLDSKGELLITIMSSLAQEESRSISENVTWGHRKRFQNGKVMVPYSSLLGYKKGADGNLVIDETQAPTVRLIYRLFLSGLSITEIRKELQHRGILTPRGKTKWSTSTVRSILSNEKYKGDALLQKTFTADFLTKRIEENQGQLPQYYVTSNHEPIIDPKVWDQVQYELATRHAANTAKIGLFASRLKCADCGSWYGRKTWASNTKYKHTIWRCNHKYDHPRPCQTATLRDQQIQTAFLSALDQLAKNYRGKDHLPQAITEMFNTDQLEAESSHLDDKIRALANQIEELIAENQRLAQDQEQYLAKYTQLDAKYQKTLAEKHAVNAQITAKNAKATAIKTAYSQLADKPIEHFTACQWNALIDHAIIGANQIRFIFRTGKEITVNL

SEQ ID NO: 21453 - protein, 416 aa, synthetic construct
MAKIKQITRLSVSRPKLVKVAAYARVSTSTRRQLSSISAQVSYYSRLIQSTPGWDYAGVFIDEGTTGTKMRGRQGLADLMALAHGGGVDIVLCKSISRLARNTVDLLQIVRDLKNLNVSIRFERENIDTSTNDGELLLTLLASFAQEESASLSANVKWAIRNRYKDGGTNSFFIYGYVWTQGKFVINHDEAQIVQRLFSNYLAGISPEKTANQLNNEGLRSRGGGVFHGSVLRRMLENERYKGCQLLQKTFNKTIRSTSRTPNDGVLTKYWVEKALPVIIEPALFDKVQQEIARRRQIGPAATPSLNTGVFTGRIRCGTCRRNYQRKTRRYASGNYYHYWRCWSACKGQGNPCGGHNLRETMLQSICATTLNLEEFDEHAVENHIVTIEAFPDHLMIHLRGARSIKIALDKQGRLT

SEQ ID NO: 21454 - protein, 599 aa, synthetic construct
MKKDVKVIKGDTTLKRTASGCVQRSIKRVAAYCRVSTDTEDQINSYNSQVEHYTEFIQKNKEWTLAGIYADEAITGTQVDRRIDFQRLINDCMNGDIDMIITKSISRFARNTLDTLKYVRKLKEFNVAVFFEEENINTLTMDGELLLTILSSVAQQEVENISANVKKGLRMKMERGEMVGFQGCLGYDYDPETKSISINEKEAEIVRYIFRRYIEGVGGMVISRELEEQGYLSPRGNKRWTETTVLGIIKNEKYKGDLMMGKTYTVDPISKRRLDNFGEQDKFYIENHHEPIISEEDFEKAQGIRLRRSKNRNTVANNGGKREKYSRKYAFSSMLECGFCGHNLSRRNWHSSSEYTKVIWQCVNATKNGKKYCPHSKGIEEEAIEKAFMESYRQVCHNNVEITNEFLKTVEEELKDNSLAKDLKKITNQLDKILKKEKDLVELRLNESISMDIYQDKYNEIAISKEKLLAEKRTLEVTLTDEKALKKRLEGFKKLLESNKYLEEFDRAVFESIVDKIIIGGTNDEGEIDPAMITIIYKTGKKDSQDGRLFKSRRKNAKEVNEETDNKLYPHSSDEVNNLYSYPIDNTCGDGGIIVKKIE

SEQ ID NO: 21455 - protein, 470 aa, synthetic construct
MPEALNAVIYARYSSDRQTEQSIEGQLRECYAFAKANDIAVIDTYIDRAISGKTDNRPAFQKMIEDSAKRQFQAVIVYRLDRFTRNRYDSAIYKARLKKNGVKVLSAMENLNGSPESIIMESLLEGMAEYYSVELSQKITRGMRENALKGKALGGQRVLGYKVNSDCYFEIDETTAPVVVDIFKLYSSGKTVKEICDILNARGVKTARGGAFNKNSLHTILTNKKYIGIYKTKYGEIVGGIPAIIDKELFEMVALRMEQNKKAPARAKAEINYLLSTKLFCGKCRSAMVGESGTSKTGKKYYYYACVKKKREKACDKSNVKKDWIEDLVIQRTVTDILKDDVIDKIADRLVELQKAEAAESGTMLYLENSLAEIQVSIKNIMTAIEKGIITESTKTRLTELEDEKRNVEIEIAKESIARRIISREQIIYWISSFKDGNITSEKYRQQLIDTFVHAVFVYDDKIVITYNYS

SEQ ID NO: 21456 - protein, 502 aa, synthetic construct
MSETTQIGVIYARYSSDKQRDESIDGQIRECMAYAEREGITITNTYIDRALSAKTDDRPEFRQMILDSNKQAFNYVLVYQLDRFSRNRYDSAIYKAKLRKNGIRVISVKENIKDDPSGIILESVLEGMSEYYSAELSQKVMRGMTDNVLQGKWVGTVVPYGYKLSNNRQLEINEHEANVVRKLFDMYLQRHTLSEMASYMNANGHLTHKGKPFNTNSIKAIISNEKYIGVYSWGSERIENAIPPIIDKNIFEKAQHKRNLRAKKKGNRSELYQLCGKLECGRCGGNYVGSTGTSKTGALHHYYVCSNRRRKNACKAQNIRRDALDDIVISQTLAILNKPNVVNKIAKYAASSGKNLQSETVAQIDIIDAHIRDLKKSLDNYMTAIANGFISDVLKHRIESTEQELKDQIEIKTNLENTIIPVELTEDHIRFFLLKMAKENPSTLRGRARIIEAFVHHVTIYEDHIEIVFNYKNELSEFHDKTLESSLLNDLVTQKGFEPLAF

SEQ ID NO: 21457 - protein, 638 aa, synthetic construct
MAARQTEEQKITALYERLSRDDDIAGDSNSILNQKRYLESYAQQRGYTNIVHYTDDGWSGGNFERPGWKKLVADIEAGKVAHLLCKDMSRIGRNYLQTGFYTEVMFRQYGVHFVAVANNIDSDIQETSEFAPFMNIMNEWYLRDQSKKVKAAYAIKGKSGKPITNRPLYGYQKDPANKDHWIVDAEAAAVVRRIFQLSIEGHGAYEIAKILRDGKAECPGYHHAKLRLLREGGTAENENPYPPYDWYGNTVTAILSKPEYMGHTVNFRTYAKSYRDKRVANDPEDWLIFENTHEPIIDSETWQLAQRTRQTVRRTDTTGVANPLTGLVFCADCGAKMYNRRGKHTVNGRTYAGDTYNCSTYELDRERVNQKCFSHSISTRALNTLLLDAIRLTAAYAIQNREDFIQKVRSVSQIQQQEAAKELKRKIAKAQKRIAELDILIKKLYETYAMGKLEEKRFDLLSGEYEKEQAELEQILTADQTNLDQFQDDTERADQFLALAKKYTDFSELTPAMLHEFVDKILVHAPDKSSGERVQEVDIYFRFIGQFEVPVPDPTPEEISKEELRKKKHRANQKRYLRQKTRILAGELNPPYTMTCQCCGKVFAAKRIDAKYCSSGCRQKFYSQNRKKTNVPSIPESA

SEQ ID NO: 21458 - protein, 562 aa, synthetic construct
MRNQSAINKIPFTEGDETALYTRLSRDDELTGESNSIKNQRELLLQYAKSKGYANVQVYVDDGYSGTNFNRPDFKRMMERVEAGLIKRVIVKDMSRFGRNYLEVGYYTEVIFPEYDVQFIAVNDNVDSEVQTDNDFTPFRNIMNEWYAKDISKKMKSAIKAKGNSGKHTNPLPPYGYIKDPNDKNKWLIDEEAATVVRRIFGLCMQGFGPTQISRILTDEGVDTPKIHAKKMGRKVTIRANEMPEAWADQTVGAILGYWEYLGWTVNFKTKKKSFKSKKVILLPSDEWQVFKDTQEPIIDEETFWAVQKIREGKRRLDSLGEPNALSGMLFCGDCGHRLYLRRQRDPHQKDYFVCSVYRKKRKYFCTAHFIRLADIEKILLRDLRQVTAFAREHESEFLDLAKKRSLRETEKLRAENKASLDKAVRRIAEIDGIIQKLYEDNVSGKISDERFAKMTATYETEQNGLQQTAQRLKDEISAVREEGESVDRFMKLVNKYSDITELNAEIIRTFVEKIIVYEAEKNDGVKTQKVKIVYNCVGTVSVPNTDNEPVKTDKTKIIEVA

SEQ ID NO: 21459 - protein, 508 aa, synthetic construct
MAERRMRTVAYARVSSKDQPTSLDSQIKHFNDIMDNTPTMVNCGCYVDNGISGRFMHRREGFLQMLEDCELHKIDFILCKSIKRFGRCTLDTIRAIERLRELNIPVFFEQEGIDTIKDRNNILLVTMAQIAQEEYEDKSEAVRWAFKRRFEQGKLIVNPNTPLGYKFNEEGELVIVPEEAKLIRAIYEEYAETGHSTEICQKLNRAGYRSAHGRPFKPSTILYIIKNEKYKGSAMMEKWVVVNGRKVKNVGQQMRYYVEDHHEPIVSKELWDKANAMVEKNRKEACFVPNGHDPMSKMIYCGKCGHCYIRSFRNAQKFRYVCNGHDDERFRKCGNPSVRRDTLERIFVQIFNELRGKKIYLEELPLSDELVQVNEGREKLLIQERTYLQLQARGLLEGAVELEYRQLLKKIVQMEDKRKLLLSTNAKNVQAENELRLYNKAIMRKQPLTEFDEELFRAVVKKIVVYGREDFEYVLTNGKVALVKIYYFANKDDEIDSITYEKYEEGRK

SEQ ID NO: 21460 - protein, 536 aa, synthetic construct
MNIANNVRIIPAIRTDVEMVGDNVITKKRTAAYARVSTGREEQQTSFKSQMEYYTRLIMSNPDWEFVGIYADEGISARSMKKRKRFREMIDDALNGKIDQILVKSVSRFARNVLDSLTIIDKLRQKGIPVIFEKEKLNSLYDDKRTNFMLTMYASIAQEESDSLSDSVNWGIQRRNEQGFVRKVKTYGYDVLNKQYVVNEQQAGVVKLIFELYLSGLSYFQISKELERREIKSPKGLDRWDTSTIEQMLKNEKYVGDALLQKTIAQPWRNRKRSATADNQMYLVEDDHEAIISDEMFERVKREMAYRKTLRANTKSGKGGYSSKYPFSSKIYCYGCGGIFRRHFYYADRDRTPERIVYTWTCSTHKNHGNVACGQQAIKEKDIEASFIRVVNMLVKDKADMITKLRDTIQETIGERLAGAEAEDIRAQIEAKQKALVRAVRAMTTDDDQIAASNERERIIGEIESLTAKLQSLENQATEMGHTTERLNMVCDLIAKQGELKEFDPMVFRKMVYRITVDGKELTYDFGNGIIITDMV

SEQ ID NO: 21461 - protein, 481 aa, synthetic construct
MKTAAVYTRVSTDEQAREGYSLEAQLKAIKKYAQNNDILIDSKYIFSDEGISGRKAEKRPAFMEMIKQAKSKPRKFDVILVHKFDRFSRNREDSVVYKSLLKKEYGIPVISISEPLDPDDKMSVIMEAFLEAMAEYYSLNLSGEVKKGQLEKHSKGELQTNPSFGYNVSDNKLIVNDSEANMVKMIFEQYAIDNLPMMQIARNVNALNVKTKRGRHFENRTIYYILNNPVYIGKLRYTPGRRNQYDFDDPNTILVDGKHEPIISMDLWNSVQMKLTKNSIWKKPKQHIDVNPKHWTKGLIRCKDCGCTMVTCGKTKLRCNGYNKGKCSNSSTLLIADVCDLIIDNIKQVMKNGRIEHIVQSKKEKKESNQYLILQHQLEQLSDKEQRIKEAYREGVDTIDEYKENKNIILREKNRLLKEIDKVEKPKTENKKKEIIENGKKVYEILTDDKISLKEKNEVAHILINKVEYDPTSNTLELYYN

SEQ ID NO: 21462 - protein, 466 aa, synthetic construct
MEKIIKKIIRVVLYIRVSSEEQARWGYSLEAQKERLIEYCKEKGYKIIAIYIDAGKTARTKIKNRKELMKLVDDSKKDMFDRVIIWKLDRWFRNVADYYKIQEVLESNNVDWECSDEDYNTTTAQGRYALNLKLADAQNESDKTSERIKFVNKSMVQNKRPIQGSQCFPMGLKVVGEKRNKKVVKDEEKEVVVNDMFDSIENTMCLRQTLIYINNKYDLTIRYANMKSYLRNTLYYGFYRGVEDYCPAYLTKERWDRIQEILDKNSKDNKNKFSYIFSGLVRCKKCGCSMSGCTHRNIRINKSGKRVINDYPYYRCNKANTSALCENKKRLSQNKLEKWLLEHFHEELAKEIDSIESITEEKKPTKKIDVEKVRAKIERLNDLYIIGRITKEKYDSDYKKYNEEIESANIIKEEVGDLSKYKEILANNSVLDIYNKLNDNAKRVFWSNYIDYIIQDDVNEFKIIFK

SEQ ID NO: 21463 - protein, 593 aa, synthetic construct
MAQVEIIAANLKEKNNNITIANKKKRVCAYGRVSTDDEEQITSYNSQIKYYTEKIKSNPDWEFVGIYADEGISGTQVKNRTEFQRMIDDALNGKIDIILAKSISRFARNTLDTLKYCRELRDKKVDVYFEKENIHTIDLDSEMFLTLYSAFAQAESESTSQNVKLGLKAMMKRGEYVGSPDCYGYDWNKETKQLDINEEQAEVVRMIFNWYIDGLGSRRIIRKLEELNIPTYKGNKRWAESSIMGIIHQEKYVGDLIQNKSYTVSPITHKTVINRGEKEKYYVKDHHTPIISREVWDKAQEIANKRKEAHTINKQGYSSRLTNKYAFSGKIKCAFCGTNFTRRKSSKSKTHPNYNVYWTCYRKRMFAEDCPDSVGISETKLEETFVMIYNNIIKNKHKTKEVLLKAIKDVVNDNDYQDKLNSLLTEKETIEKRLSKIIDMELDDDFDRKALFIQKEKELLEELNTVKNRISHYEMLLAENKGLSKQLKEIDKYFDNFKELKKFNREAFENMIECIIVGDYDENGNKLPRVARFVLKTGKEYKFELSNNSNDNNSDNTKNELVPFDTGRLSCFNCTSKSNLCSLACSFNFLLAN

SEQ ID NO: 21464 - protein, 520 aa, synthetic construct
MNKIAIYTRKSKFTGKGESIENQIEKCKKFIEFKFNIDSKSVNIFIDEGFSGKNEDRPEYQRMMNQIKSKQINSIVIYQLNRLGRNARDIHNTMQLCDDLGTIIYSATEGFDSSTIFGRAVIGILASLAQLEREQLAERVKDNMYTLAKMGRWLGGQSPLGFDGTREYYIDENGKERSVTELKPNKEELNIVKLIYQKYIEEKSLSQVAKWSLTNHLKGKNGGNITKSAINVILKNPVYVKSTDKVLEYLEKENYEVCGSANGNGLLRYGKDNEQIIAVSKHKGIINADDWMKVQNILKENTDKAPRRGKTNTALLTGILKCNCGSSMNIAHGKLKNGTKTFYYQCAMKVASGGTRCKSKNLNGPLLEEKLIDYLKNYSEIQIIADLENILNKSNELNLKLTAESIDNAIEQCDKSIKVLVNKLKVIEDLEVSKIIIDELTKEKDKKKDLEKQKENLLEDEASKSLSEAEILEVLNLVEHFKNNIDSLDFESKKKLLNEMIESIVIDTDEFIINFNIKKN

SEQ ID NO: 21465 - protein, 514 aa, synthetic construct
MNQELFAIYLRKSRKDLELKEYDVLERHRRILLDFANSRNIKINKEDIYEEVVSGETIQDRPVVQELLKKIEAGYYKAVLVMEIERLARGNTIDQGIIAQTFQLTNTLIITPNKTYDTNNEYDNEFLEFGLFMSRREYKAISRRIQAGRIQSVKEGNFIGSVTPYGYDKEKLKGTKGYKLIPNQEEAENVKLIFKLFIESSCGTSNLAYKLNDLGIRSRTNSVWTPAMVRNILKNRVYIGFVSWGKRANVKKLNNNEINKSRPINTDYIEARGKHEPIIDDITFYKVQELLKSTSIKKVPYEKVLKNPLSGLIKCGKCNLNMIRRPYPQNKHEDLLICRNKYCDNISSSLHLVEKKLLNSLEEQLNEFYFYINNYEQEYIKSTKNYNLQIKKIDKEILKLKSQLSKACEFLELGAYSLELFKERSNSINLKVENLEKEKLKLEELSKNNIIERITQYIPLLEKCLNTYWTLDIEGKNSILKEIISEVYYTKNVKGSRWNLDNTDKFSLDIKLRV

SEQ ID NO: 21466 - protein, 521 aa, synthetic construct
MNKNITMIPARKKQGNTKTETPSPTLRVAAYCRVSTDSDEQATSYEAQVAHYTEYIQAQKGWELAGIFADDGISGTNTKKREEFNRMIDACEAGEIDIIITKSISRFARNTLDCLKYIRKLKEINIPVFFEKENINTMDAKGEVLITIMASLAQQESQSLSQNVKLGIQYRYQQGKVQVNAKWFLGYDKDADGHLVINSEQAKTVKRIYREYLEGLSMNKIAAGLEADGIRNGAGHTKWTPSNIRQILTNEKYIGDALLQKTYTVDFLTKKRVRNEGHMPQYYVENDHEAIIPKEIFLLAQDELVRRRNLSKRADGKRKAYSSNHCLSGLVICGECGEYYRRIHWNNRGCKSIVWRCMSRLTPGNNSCHARTVEEEFLKGIVLSAINRCIKDKGCFFAELEDRITHVIDHESSVDMKSIEQRLEDLQQMLMDRISNREPYEDVANEIDAVKEEKMQAELAQAKTDNQILRIQAMRDFLQAQTGILTTLDDALVRRMVDTITIHDKKIDVRFTSGVSVSIKQ

SEQ ID NO: 21467 - protein, 523 aa, synthetic construct
MKALKKVTRIDGVATQRKQQKQMRIAVYCRVSTESDAQLESLEAQRKHYASYICTRDGWTLHDIYYERGVSAAKSKARPELRRMLRDCRLGKIDLVLTKSISRFSRNTADCLRMVRKLLELKIPVYFEKENINTSEMESELFLSILSSMAQDESASQSANVRWSIEQRFQSGTFIITCPPFGYRNDDGVMAIVENQAVIVREIFQLALAGYGGYSIARILNDQNIPSAHGGLWSSGSILAILKNEKYTGDCLFQKTYTDDAFKRHKNNGEKNAYLVRDHHKAIIDRKTYDAVNELIELKRENKGIIQESPKYLNRTVLSGKVRCKACGSVMKRITRYTQSGSYKMYACSTHLHSKKNCPFKAVYEDGILCAFASMMNKLTFAREAILEPLLSEMQGQKPKTYVKELKVANEAIREDSDKLDVLTRLSASGYLDRPHFLKEKNKLVTRIEERKKEREQLKIQEAGKDDTVINLEALCHYVKGRKVSERFCEEEFKRFVDAVEVVSRTEVCFILKCGLRLPERLA

SEQ ID NO: 21468 - protein, 588 aa, synthetic construct
MKRDVKVIKGDTTLKRTASGCVERSIKRVAAYCRVSTDTEDQINSYNSQVEHYTDFIKQNNEWTLAGIYADEAITGTQVDRRIDFQRLINDCMNGDIDMVITKSISRFARNTLDTLKYVRKLKEYNVAVFFEEENINTLTMDGELLLTILSSVAQQEVENISANVKKGLRMKMERGEMVGFQGCLGYDYDPETKSISVNEKEAEIVRYIFRRYLEGVGGMVISRELEEQGYLSPRGHKRWTETTVLGIIKNEKYKGDLLMGKTFTVDPISKRRLDNFGEQDKFYIENHHEPIISEEDFEKAQGIRLRRAKNRNTVANNGGKREKYSRKYAFSSMLECGFCGHMLSRRNWHSSSEYTKVIWQCVNATKNGKKYCPHSKGIEEEAIEKAFMESYRQVCHNNVEITNEFLKTVEEELKDNSLAKDLKKISNQLDKILKKEKDLVELRLNEAISMEIYQEKYNEIAISKEKLLEEKRTLEVTLTDEKALKKRLEGFKKLLESNKYLEEFDRTVFESIVDKIVIGGTNDDGDIDPAMITIIYKTGKKDSQDGRLFKSRRKNAKEVNEETDNKLYPHSSDEVNNLYSYPIDNTC

SEQ ID NO: 21469 - protein, 589 aa, synthetic construct
MTKTFSFQQIAVPKVLSEEVREAISNNVLQFYVRDQQQEAQDEGITALYERLSQEDKLDGESNSIANQKKILERYCREHGITAYRHYDEDDGYSGTNFNRPGFQRMLADIKAGKIKRVIVKDMSRFGRDYLQVGFYTDMLFPDFGVHFIAVNDGVDSTRGENEFTAIRNVFNEMYARDTSKKIRATWQSKGKSGEHLTTIPPYGYMKDPNNKKKWIIDEEAAAVVQQIFALCVSGMGPTQIAKWLEKSEILNPTFYWLSKGMKVGNKPKPGANPYKWTNETVSRMLEKIEYLGHTVNFKTRKQSYKSKKKLWNDPSEWVIFENTQPPIVEESVFLIVQNIRKSRRRPTKMGDMGIFSGLLYCAECGGKMYQCRATNFTEEQKYFICSTYRKGKDLCTTHSIKNVVLYEIVLKNLREAIDYVTEYEAEFVQEAADSRLRERDAEFSCKRETLSKAESRIAELDNLFMHLYEDNVTGKLSDERFIKMSHDYELEQSNLKAMAEVLREEIKQQEKQKTNVKAFISAVKKYTDMQQLDAAMLREFIDRIEVSHTDKKSKTREITIVYNFIGAFDFERAKEKAQNTTEKQQRTA

SEQ ID NO: 21470 - protein, 533 aa, synthetic construct
MYRELPTFCPEEILVYLRKSRADDPSLSVDEVLARHEELLRDWIERNLVHAIPEENYFREVVSGENIKDRPEFQRVLRKIESPKIAAILVVEVQRLSRGDLEDAGRLIKLLRYTHTMVITPQKVYDLEDEYDRDLFERELKRGNDYLEYTKRILNRGRILSVQNGNYIGNTPPYGFDKCWSIDGKKRVPTLKENEKADIVRTIFRMVDSENMSPYAVAKYLDSIGEPAPSGKHWTYNSVLGILRNQHYDKKVIWGHRSTQQVVIDGHIQSTRPRQKEYLVAEGRQPRVIDHEVFERVQKAISGQPRTRRDLNPVNPFAGIVYCANCGRSLSFRFYRRAGRGETCPPRMLCSDQIHCKSSSCYFYEFSEAVQKVLQKHIHDFSIQLDNLLQEPESYAQDNIRLLENRLNELKQKELRQWEKYADGEMPKEIFDQLNERIQKNKQAAQIALDAAREAAPDTADEIQDKITRLSDALRALQDDTIPVSLKNQYLKAVIERIDYSRPASIRALQGTTDRRHGGWSTPPFELQVHMRF

SEQ ID NO: 21471 - protein, 626 aa, synthetic construct
MRNEKITPLYERLSRDDELQGESNSISNQKQMLEDFARRNGLPNPTHFTDDGISGTRFDRPGFLAMMEEVEAGRVEAIVIKDMSRLGRDYLKVGQVMEVLRQRGVRLIAINDGVDSLKGDDDFTPFRNIMNEFYARDTSRKIRSVFKAKGMSGKHLTGTVIYGYLWDEKREHWLVDEEAAEVVRRIFSLTLEGYGPYQIACKLSADRIEIPVVHLARFNEGVNRSKPVKDPYGWGSSTIVNILKKREYLGHTINFKTRKHFKDKKSHYVSEDEWTIFENTHEAIIDQQTFDLVQKIRSNVRRYPNGWGEAAPLTGLLYCADCGGKMYVHRTNNGKRISQYTCSNYTKVPCGTLCLTQHRINESAVLTLVSDTLRAIAEYSRNDRTEFIHTVQETQVAQQSADISKKRRHLATAQKRAGELEKLICKIYEDNALGKLPDTRYKALDAQYAKEQDALEIEIAELEKAVTGYEQSQKSAEKFIALIDKYENFDTLTNTMLNEFVEKILVHERSRKGSQDTTQEIEIYFNFLGRYIPPSLQPVPLTPEEQEELRKREERKDRLHQNYLKRKASGAQKRYEDKIKAKKKAEMDAKKALIRAEDMKKGVFSTIGQLPKEEPRKGSIAASAAV

SEQ ID NO: 21472 - protein, 536 aa, synthetic construct
MGNKVRAAAYGRVSTEKDDQANSLKSQRKYFSDYISQHEDWELTGIYYDEGISGTQTAKRKGFNQMIQDAMAGRIDLILTKEVSRFARNTVDTLSFVRKLKAKGVRVIFTIDNIDTMDGDGELRLSIMATLAQDESRKTSERVKWGQKRRMEQGVVFGRDLLGYSVKQGRMFVNEEEAEIVRSIFHKYTNEQKGTHIIARELQEEGIQPKRGTMWSNTMILKVLKNEKYAGDLCQKKTITPDYLSHRKKKNEGEEEMVYLKNHHTPIIDRVLWERTQKELERRSLSYHKASQCSRYWCSGMVKCGECGTGFVVRTKKRRDGSIYRAWRCYHHANYGKRKEVGEGAEYGCDNTAVSDLALRTCVRYAVKQVDFDWDAVETEILWRIKNLKQADTYAEDTAVIEKKIEEIQTKKKKCVDLALEGILSADELTEQKEWYDGQKERLERKLLRARKEEETEKKRRSCFERYVGAVDKILHFNVEEESLYRELVDEIIVYPGQIVCVWLKYIPFGIQMRIHSCGRRDRYQTEILESVLVGK

SEQ ID NO: 21473 - protein, 522 aa, synthetic construct
MGNVTFIPARRQMGNNVKKPEKPKLRVAAYCRVSTDSDEQETSYETQVSHYTEYIQKNPDWQLAGIFADDGISGTNTKKRGEFNRMIDECMAGNIDMIITKSISRFARNTLDCLKYIRQLKDKNISVYFEKENINTIDAKGEVLITIMASLAQQESQSLSQNVKLGLQYRYQQGKVQVNHNHFLGYTKDENGNLIIDPEQAEVVKRIYREYLEGCSMKKICQHLEADGVLTGAGRTKWYDSTINKILRNEKYMGDALLQKTYTTDFLTKKRVKNTGIVPQYYVEDDHEAIIPKEIFMQVQAELVRRRNVHAAKSGKKRRFSGNNCFSQIVCCGECGELYRRIHWNNRGKKSIVWRCISRLEPSSAKENCTNRTVNEELLKEVTLKAINRLCKDSDSFIKQMQENVAKAVVNTGTLSPEGIDKRLEELQKELIEKANDKQDYDAIADEIFRLRNQKQQSQMDAEVQKENLRRVKELQDFIAAQNTAITEFDEALVRRLIDKITVFSDHFTVEFKSGVTVDIKA

SEQ ID NO: 21474 - protein, 519 aa, synthetic construct
MKKVTKIAETAKSKDKLHKIRVAAYCRVSTGSDAQLESLETQKSHYESYIRLHSDWIFAGLYYDEGITGTKKDKRPELMRMISDCEAGKIDYIVTKSISRFSRNTTDCLELVRKLLKLHIPIYFEKENINTATMESELFLSILSSMAESESVSIAENSKWSIQKRFENGTFKISYPPYGYDYDGTNMIVNKQQAAVVKEIFSAVLSGKSCTAIAKDLNKRAVPSKRSGKWNDTTIRNMIANEKYTGDCIFQKTYTDEEFNRHVNHGEKSLYAVHDHHEAIVSHEDAEAARAIVLQHAKEKGLRAETDKYQNRYAFTGKIICGECGSTFKRRIHYCTCSQYVAWTCRTHIEDKTICSMKYIRDDKLKLAFVTMMNKLVFAHRRILLPYVKALQDSPVDSPMRRIQELQTMLAENTEKRETLSRLMAQGIIDQVIYNSENNVLLSEAGKYKREMEALSNSLSSSVGTLTAANDLLHFIGKGVMLDAFDDELFTRHFNQIIVVSREEVSFELKCGLSLHERM

SEQ ID NO: 21475 - protein, 548 aa, synthetic construct
MNAVIYARYSSHSQTEQSIEGQLRDCHEYARRYDINVVGEYIDRATSGMTDERPDFQRMIADAAKKQFERVIVWKLDRFARNRYDSALYKHRLKQYGIRVISAMENVGEGDESILLEALLEASAEYYSLDLKKKIKRGQRENIAKGKYCGGPIPYGYKLIDGKLRVDDKTAPTVRFLFEQYASGVPMKEIIDELTRRGVRGSRGGALTYNTFSRVLTNTTYIGQYKYKGDVVPDLAEPMIDADLFERTQAVVKANAHAPAANKAEVDYLLQGKAFCGKCGSHMVGESGRGKNGDTYYYYACANRKKRHTCKKKNEKKDFIEWYVVEQTVQYVLTPQHIENVAKAIVAQYDNEFSGSKIDECEKQIRQLDRELNKLVDALIDAPKAAHKRIYEKMESLEAQKAAAESDLIKLRIASDIRLTESEVRAWLKKFCTGDLFDPEFRRNIIDAFINCIYLYDDRVIIFYNIKGGKQVSYIDLENTLNEDSPGADFSDMIANAPPKPLAICKRFFVAVHSHVRLKDKTPAGRYLPRRKKVSSRSETDEGERSSR

SEQ ID NO: 21476 - protein, 519 aa, synthetic construct
MKAVIYARYSPGPNQTDKSIEGQIRECTQFAQQNDIVIVGTYADHKKTGRNDNRAEFQRMLRDSARGLFDAVIVWKIDRFGRNREEIAINKVKLRKNGVRVMYAKEHIPDGPEGIILESTLEGLAEYYSANLSQNIMRGMREVAMKGQSTGGGGRSLGYYVDQNKRFQIDEHGAQIVRQIFEMYSGGKQASEIIKELNDKGLKTANRKPFNHNSIVRILSNRRYIGEYRWHDIFIPDGMPRIIDDETFEKVQKRLEKNKKAPARKIHAGSEEEFLLTTKLFCGHCGKTMVGDSGTGKSGQKYSYYTCSTRKHHKGGKSCDKKSVRKDELERYIVEQTVTRVLVDDVIEYIADKVVELQRKELADTSMLDYYKSQLRDVEKGLKNIMAAIEQGIITPTTKDRLLELEAEKADLEENIQKEEIVHPTFSREQIIYFLERFRGGDVDDQEYRRQIIDTFISRVWLYDDKTVITYNYSGDGNTVTLEAVEKAALEAAGMCSNQLPPSPPKNPQCKSTADFFNE

SEQ ID NO: 21477 - protein, 518 aa, synthetic construct
MVIGIYPRKSVYRDNSDSVQVQVQMCQEYAGIVFKGKNLEFRIYDKDEGFSGKNMNRPGFQEMMADVKADILDAIIVYKLDRISRNVREFSEMYEIFQAHNVAFVSVKESFDTSTPMGRTVMYILAAFAQLERENTSERVGDNMRSLGAAGKWTGGLLPAGMSSVRKKIGDKEHSYLIVNENEIGNVKLLFRLMLDGYSITGVERYCRDHGIHSRYGKFLGSSQLYSILTNPVYCQNSMEAYEYFSDRGCHLPDASLFDGKHGLISYGKTRTLKDSQKRQSTDSWTIAVGIHDYVLTSAEWIGVQKRLGVNKMFHTTAKYDVGILKGVLRCRCGSRMDIRTHIKNGIRFSYYYCAAMAQKGKGHCNSKYVRIEKVEEAFLQELKKIRLNPNSIHIRIESDAGGPDMRSLQAELDSVEKSISNLTNALTQAMDSPAAAYIIAQIEKLDQQRRTLYSNLRAAQRRQVEAEACQDTEKIIYDNICYLLDNFDRISYSGKNELIRKTVKKCILDENNLHIIF

SEQ ID NO: 21478 - protein, 492 aa, synthetic construct
MTNTAIGYRRVSSDEQRDKYSIPAQIEQQEKYAKEKEFNIIKAWDVSESAKEPGRKGFNEMLNFAKKHKIGHILFKKADRSARDETDAATIVRLARTTDISFHFIEEGMILNKNSKNHEFTIYMINCVIATLMPRDLAVNVSSAFVKKAKMGHYPMVAPYGYMNYRKNKGEASHIIIDPDKAPFVKRMYELYASGLYSYRSLARKMSEEGFRMSATVKCNKKNVEMILNNPIYMGDFNFKGVRYEGKHEPIVSRELYQEVQRVIKNQTSTRSNKRQFLFSGLFKCSHCGCALVGELHKGKYVYYHCTGNKGGECKRKYINENKLEEALLKILVDLKLSDNTAKIIISSIKKELKDNLDYGQSQAIEVRKQIETLQKRLSKLLDLYTDGDIDKKAYDTKSKKWQYELDELLVTQAKINKTPVNYIERARDLFELCKNASQWYLQADYEKKRELLKLLHSNFLYDGEKPHFELNSVFKLMLNLSKNEKNVEEGT

SEQ ID NO: 21479 - protein, 529 aa, synthetic construct
MAKVTVIPSTINPITKLPNNGLQKRKVAGYARVSTILDEQCSSYQAQVDYYTNLIKRNPEWEFVEVYADEGISGTNTKRRGGFNQMMQDALDGKIDLILTKSVSRFARNTVDSLTFIRKLKEKGVEVFFEKENIYTFDSKGELLITIMASLAQEESRSISENVTWGKRKAFSDGKVSMPYKHFLGYKKGDDGRPTIDEKESLVVKEIYSLFLKYGYSTTKIAKEFNGRGICTPSGKGKWTLTTVESILSNEKYKGDALLQKKYVVDFLTHKSKPNEGEIPQYYVENSHPAIIDKIEWDLVQAELERRKKLYKTYSSKNIFASKLVCEDCDSFFGRKIWHSNDEHRTIVYQCNGKFKNKEKRCNTPTLREEEIKSMFLEAYNHFVLDKTALVDDCKLMIETIANVSLIDEQISKQIEKMEELAQKVKEFVSTNASTLDSQTDYINNYDRLCTMHSIEETRYKFLLKEKNGRLAKAKSMELFIESIKDKPDVIDSWNSDLWILLVDKAIVHHDKSITFAFKNMKEITIAAK

SEQ ID NO: 21480 - protein, 436 aa, synthetic construct
MQITKILATKKLEKKKLVCAYARVSSDKDAMLHSLSAQVQYYKDYITSNNDWLFVKVYYDEGISGTKQDRPAFQQMLQDAKDGKIDLIITKSISRFARNTVTLLEAVRKLKSYDVDVYFEEQRIHSISSDGELMLTILASYAQEEARSVSENMKWRVKRNFEEGKPWGRAPYGYTIENSKFIIVPKEAEAVKLIFKLYLDGIGSYRIKDIMNKSEYPTRNNCLWTETTIRGMLRNYIYTGNAVFQTTYVKNYITKKKAKNNGEKPMYHVEECHDAIISIEDYNKVQKIIKERTEKIHKGITPKDNPFKGKLICAHCGCTFRMKKNYRKYVWRCGTYIRLGSKKCLSKQIPNDVLKNIAKEILGVDELTSEIIDERIEKVIVGDDRLLTFYLKDGNKIDAHWMQKSRSESWTEEMKENARRKAVERNGKSNSNPIND

SEQ ID NO: 21481 - protein, 412 aa, synthetic construct
MDIYYDEGISGTSLKKRDGFNKMIADALAGKIDMIVVKSISRFSRNTVDALQTIRNLRNHDIRIFFEKESIDSNDIKSEFMLTIMSSLAQEESQSLSENVKWGKRKIAQKGFVQIPYSNVLGFQQKGKYGIEIDREQAKTVVLIYDMYLHGKTTGEIIKKLIEDGTPTPTGLEASHWCNTAVLSILRNEKYCGDAILQKTYTKDFLNHKKCINYDAFPKYYVKNNHEEIIPRATWEYTQELLEKYSKRSVNVRYGDLIFCLACGSKYRRFHWYHKYYEETILSYRCLSKYDKSVNCSNIKLFEKQLDELYHETVLQLLSYYKKELVEYFKFTIPKVIKGKRKSNRIIKLLDNMISFIQSDYEYYSLHILIKKISVHPDRTLEFTILNGNIIKTSIPKYRLVDHYGRKKTSGN

SEQ ID NO: 21482 - protein, 568 aa, synthetic construct
MQSKKKQDKAGITALYCRLSRDDGVEGDSNSVANQKKLLKRFAKENGLTNTRYYVDDGYTGTNFERPGFQKMIEDIDLGYISTVIVKDLSRLGRRYDMVGYYMDTYFPDRDVRFIAVNDNIDSDEGESEIAPFKNVLNEFYARDISKKCRSSYSIRGSTGEPLAPPPYGYIKSPDNSKKWVIDPEAAQVVRDIFKMALEGKSNETIARILQERKVLIPMAYWQEKGIRKGGKVTQPNKYKWCKTTVTKILTQQDYCGDIINFKTYSKSYKNKKRYDNPKENWVIFKDVHEPIISRDDFELVQMLVVKTKRRAPKQENGEKNMFCDFLYCADCGSKLWYHTNTTNKEIHYFSCSNYKKDTRGNCETRHYIRADAIEQIVMLELKRLAKYLESHEEEFAKLLAEKTNADMLAEQKTLETELNRATARNEMLTSLFAKTYEDNVSGKLSDEMYMELSHKYEVERLELKTKIFEYKERLAKISEMEQNKDDFLKAVRKFMEMESLTAPMLRELIDHIDVYEKEGGKKNYTQRIVIYYRFVGYLELPSSDDENYKANTRKGVDVEYIPTVKSA

SEQ ID NO: 21483 - protein, 513 aa, synthetic construct
MHENRQDLKITALYCRLSADDELKGDSNSIIHQKELLQEYAYKHGLRQIEFYVDDGYTGTNFDRPDFQRLISDVENNLIGSVVVKDLSRLGRNYLKVGYYTEVLFPQNDIRFISVTDNIDSISEAGMNDFVPFKNIMNEWYAKDLSRKQRAVVKSKGNSGKRLTCRTIYGYKKDENGEWVIDEPSANVVKIIFNLYLKGYGQSMIANYLFQQKIETPNAKKSDKTKNPFRWSVQTITQILSHQEYTGDTVNFKISELGTKKVFTDTQPAIIEREVFEKAQLLRTKRKRVYRRFDEQALFANVLFCSDCDSKMYIQRKFNRNCTNSYVCSKSRLSSDCSSHYVNEKKLIAYVLKSINALITTDRKSLVSLIEMKKQLEAQKQKIENEKNLQNANNRISEIDKILINLYEDKVKGNITLETFQMCDKNFCIEKAELQKLIIDSSRQSVVINKQEVEISNFIKMLNKYHTPLSELTPEVIDDFIEKIVVFETEKINNVRNQQINIFYHGIGMISLE

SEQ ID NO: 21484 - protein, 498 aa, synthetic construct
MKAVIYARYSSDSQREESIEGQLRECAAFAEKNGITVLRHYIDRAYSAKTDNRPEFQNMIKDSGKRLFDMVIVWKLDRFARNRYDSARYKATLKKNGVKVVSATEVISDGAEGIILESVLEGYAEYYSADLSEKVVRGMTENALKSKYNGGTLPIGYQIDSNQCFQLDPLTAPFVREAFQRYDEGATMTAIRDWLNEQGVKNTRGQKMTYNSIQHLLNNRRYIGEYTYRDIVVPDGIPAIVPQDLFDRVQEKLAKNKKTPARHKAEDDYLLTTKLFCGYCGAYLCGESGTSRTGNVHHYYKCVSVKKKRQECHKKSVKKGWIEDLVVGETMKMVMDDTAIEAIVSMLMDLQDRENVNLPLYEQQLREADTAIQNLLNAIQQGILTKSTKGRLEELEATKEELETRIACEKLAKPKISAEFMTFWLHRFRKLDVRQKSHRKMLIDTFINAIFLYDDKMVLTFNYKEGTTTITFDDLKAALDGKNMGSDLDCLTAPEKVP

SEQ ID NO: 21485 - protein, 489 aa, synthetic construct
MKAVIYARYSSDNQREESIEGQLRECTAYCEKNDITILRTYIDRALSAKTDNRPDFQRMVKDSAKGLFDVVIVWKLDRFARNRYDSAHYKAQLRKYGVKVLSATENISEGPEGIILESMLEGMAEYYSAELSEKVIRGHTENALKCKYNGGTPTFGYVIDKDMQYQLDPRTAPVVLEIFTRYDQGATMKEIMEEMRQKGVTTVRGKKIDLNFMARLLKNRKYIGEYSYREIVTPGGIPAIVPQDLFDRVQKRLAANRKAPARHKAEDDYLLTTKLFCGTCGAMMVGESGTSASKGRKYHYYRCVNTKKQKSCNAKHKSIRKTPIENAVVNAVMAKVMDDNFVEYIADTVMDIQTRESSVLPALRHQLEETERGITNMLNAIQMGIINASTKQRLDELEDRKADIELQIIQEEMKHPMLTREDVTYWICRFRTLDVSKLEERRRLIDSFVNSVTVFDDYILITFNYKEGEERLDFTDIESSDLQSVGGPT

SEQ ID NO: 21486 - protein, 551 aa, synthetic construct
MNKKSAIYVRVSTSHQIDKDSLPLQRKDLINYSKLILGINDYVIFEDAGYSGKNTDRPAFKDMFNRIKEGEFSHLLVWKIDRISRNLLDFCSMYDELKKYNCTFISKNEQFDTSSAMGEAMLKIILVFAELERKLTGERVAATMLDRATKGLWNGAPIPLGYKWDKAIKFPVIDDEERLTVELIYDKYIETESTSAVMKYLNQENIKTKRNGSWTTKTVGDILRNPFYKGTYRYNFRESARGKKKKENEWIVLDNNHDPIIDLDLWTKCNNILDENAKKNSARFRAKSKTHIFAGLLECGECHKSFYSKSDKTSLDGYTPSIYTCSSRYNHLGCNQKTISDTIIGNFTLNFISNMIKLSKTYKKLSPEDIEKKLLLGSSFNDVKGIIEIDDIFNSFYNTSSKIFKPNKQETKPANVDLNKLDADLKKQHRALERLENLYLYAEDEMSEKDYILKKNIINTKIKEIDTKIKSSATISTSTYNINFFLNTATLELSKEIIEGNINMKSLIQRVGRDIIKEFVNSLITKITVRDRKVISIQFTNGLISTFIYEV

SEQ ID NO: 21487 - protein, 434 aa, synthetic construct
MERVIERVDFQIPMQPKALRVCAYARVSSGKDAMLHSLSAQVSYYNNLIQSHAGWLYCGVYSDEAITGTKSQRDGFQRMLASCRAGEIDLVITKSISRFARNTVTLLETVRELKSLGVDVFFEEQNIHTMSADGELMLTILASYAQEESLSASENQKWRIRKAFENGELVNLRFLFGYNITASGIQVNEKEADIVREIFTRFNGGESLSAISRDLNDRGCERTFGGTWCADRIRNLLSNEKYTGNALLQKQYRNSHIDKKLVPNKGELPMYYVTGSHEPIIDQVAFDKAQVRLNELARQAEKRKKPARSTFSGLIRCGLCGSTYKRVTCRGKHFWNCTTFQTKGKSECAAKRIPEETLEALTCKVLGTVSFDPDMVRSKITAIRAEKNNVVVFCMDDGSEIVKRWTDRSRTESWTPEMKEKARQRALQARREKE

SEQ ID NO: 21488 - protein, 528 aa, synthetic construct
MNRTAARSVTVIPPTINPLTHLSRVAIQKRRVAGYARVSTDSDEQFTSYEAQVDYYTQYIKRNPEWEFVKVYTDEGISGTNTKHRIGFNEMIADAMSGKINLIVTKSVSRFARNTVDSLVTIRKLKEKGVEVYFEKENIYTFDGKGELLLTIMSSLAQEESRSISENVTWGQRKRFADGKVNLPYKQFLGYRKGADGFPEVIPEEAVIVRRIYTRFMEGLTPGAIAKELTADGILTPSGKQRWQTSTVESILQNEKYKGAALLQKCFTVDFLTKKKKLNEGEVPQYYVEHSHEPIIAPEEFDKVQAEFVRRKQFGLQYSGKNIFASRIVCSDCGSFYGAKVWNSNNKYRRVIWQCNNKFKGDHRCETPHLDEKTIKARFVDTFNAVLDGKEGILADCRLMQTTLTDCTSIDTEIERLLTEIDVVTGLTHRCISENAQSAQNQQEYTARYNNLVERYEKAKAQLEQLRTRKAAREAQAEAIGAFMFEVRELDVLTEFDEKFWLAVIDKVTVHTDGRMTFRFRSGTEIDA

SEQ ID NO: 21489 - protein, 521 aa, synthetic construct
MAVNKNVMIIPAIKRVGNNRKEDETPKLRVAAYCRVSTDSDEQASSYEVQIEHYTEFIKKNSEWEFAGIFADDGISGTNTKNRDEFNRMIDECMAGKIDMVITKSISRFARNTLDCLQYIRKLKDKNVAVYFEKENINTLDAKGEIMLTIMASLAQQESQSLSQNVKLGYQYRYQQGEVMVNCSRFLGYTKDENKRLVIVPEEAEIVKRIYREYLEGSSMDKIKKGLEADGILTGAGKKRWHTSTIRKILSNEKYIGDALLQKTYTVDFLTKKRVVNNGIVPQYYVENNHEAIIPREIFMQVQEKLVRRSRGHISTSGKKRNFSSNHVFSQIIFCGECGEIYRRVHWNNRGKKSIVWRCVSRLENTGLTCHSRTVLEDMIGLATVDAINKLLGQKDDLLVTLKKNIETVISETDNNIVAEIDKKLEELQKDLLRLANSKEDYNDIADEIYRLREERHKALAEEAGKKGSKQRLEDMEKFINEQSTLLEEYDEQLVRRLIEKITVYDGKLTIEFKSGVEVDV

SEQ ID NO: 21490 - protein, 528 aa, synthetic construct
MTYQEGGEAMKKITKIEGNKVASIIKPKLRVAAYCRVSTGSDEQLVSLQAQKSHYETYIKSNPEWEYVGLYYDEGISGTKKENRTELLRMLSDCENKKIDLIITKSISRFARNTTDCLEMVRKLLDLGIYIYFEKENINTQSMESELMLSILSGLAESESISISENNKWAIQRRFQNGTFKISYPPYGYDNIDGQMVVNLEQAEIVKYIFAEVLSGKGTQKIADDLNQKGIPSKRGGRWTATTIRGILKNEKYTGDVILQKTYTDSRFNKRTNYGEKNRYLIENHHEAIISHEVFEAVEAALNQRAKEKGIEKRNDKYQNRYSFSGKIICSECGSTFKRRIHSSGTRKYVAWCCSKHLKQITECSMQFIRDEDIKTAFVTMINKLIFGRKLILQPLLDALRGMSNSDNLSRIQELEKQIEKNAEQRELLVKLMAKGYLEPALFNRENNELQMEADNYMGQKEALIHALNGELSKVQEVSNLIKFTNKAEMINTFNEQIFNDHIEKIIVYSRVEIGFVLKCGITLRERM

SEQ ID NO: 21491 - protein, 500 aa, synthetic construct
MKTAAIYARYSSDSQNEQSIEGQLRVCEEYAKRNDIIILNTYIDRAMTGRNDNRPDFQRMLKDSNRKEWNYIIVYKFDRFARNRYETAIHKKELKDNGVKVLSAMENIPDTPEAIIFESMLEGYAEYYSAELAQKVKRGMFETRRKGLYQGGGLLYGYKIDGRKIVIDENNASVVRFMYEQYANGVFVKDIIKTLTEKNIFYKGKPFVRNSVYNILRNEKYSGVYKHDDEVVDNMYPQIVPTDVFNQVRRKVAANKYGKKSVKTDFLLRQKLICGNCGQPMHGESGTPKNGSRIYYYKCNGRKKRINNCNKSIVRKEVIENLVIETIVKKLSEPNLIDVLVSKILQKQEKSIRDNSSLSLLIKQKKQVDTSIDNIVAAIERGIVTNATNKRLQSLEVQQQELERQILIEQSKQSVKLSETDIKRFYSSALNENSKVLINLLIEKIILFDDKVEIYFNNPIKNPNEPHSDFILCSDMAEIKVSQYANTAPDTQQILLEIII

SEQ ID NO: 21492 - protein, 520 aa, synthetic construct
MRVAAYCRVSTKQEEQLNSYEVQRKFYTEKINSEPKWKLAGIFADKGITGTSTKNRTEFNKMIRKCKAKKIDMIITKSISRFARNTVDCLKYIRILKELGIDVFFEEQGLHSIDPGAEFYITIYGSIAQSESENISANVRWGKEQSAREGKVVFHYKNFMGYKKGEDGTPVIVPEEAAIITRIFKMYLEGASEKHIADTLTKENILTPTKNNIWNHNTVRNILKNEKYKGDSIINKTYVTDCISKKTKVNNGERPKFYVENSHPAIIDKLTFDKVQEEMARRTSKRKVKQVGTKTEQGKYSSKYALTELLFCGECGTPYRRVTWTVKGKKKVVWRCISRLDYGKKYCKNSPNIEENALQSAIMRAISESATENIEVLDVLKQHIAMGLMVEEDNIDKSLEYQIRLNDLNKQYNELLGKIKFGDENTSNIEQMLEQVIKEKREIQNKLDQYKKKQESMKKAKTRLNEIYNVIDILKNHPMSYDDNVVRQVIYCIKVVDKNNIQITFKNGKQVMYDYLDLCL

SEQ ID NO: 21493 - protein, 489 aa, synthetic construct
MNGVIYARYSSDNQREESIDGQLRECKAFAEKNDIRIIDSYIDRALSAKTDNRPAFQQMINDSSKGLFDVIIVWKLDRFARNRYDSAHYKNILKKNNVRVISATEAISEGAEGIILESVLEGMAEYYSVELAEKINRGLTENALKCKYNGGSLALGYRIDSEQHYQIDPMTAPIVREIFESYKSGMTQQEIADLLNNKGFRTQRGSKFKVSNIARILTNRRYIGEYIYSGTVIPNGIPAIVSQDLFDDVQQILAKSKRAPARHKAEDDYLLTTKLYCGKCMSFMVGESGRAKGNRYSYYKCVNAKRTKSCDKKAVKKDWIENIVVQQVMDTIMDDDLIERIIDSILKTLEGENTTVPILQKELSETEKSIKNMINAIEQGIITKSTKQRLDELEKCKEELEIQIAEENIKQPKLTREQLEFWFHKFRKFDFNKLEYRRRLIDSFVNAVILYDDRIEFHFNYKDGAKELSLDELNNVSDLSSLTPPQKAL

SEQ ID NO: 21494 - protein, 506 aa, synthetic construct
MTAVIYARYSSDNQREESIEGQIRECTAYAEKNGITVIKHYIDRALSAKTDNRPDFQQMIKDSEKRLFDIVLVWKLDRFARNRYDSAHYEYLLERNHVKLVSATEPISDSPAGIMVKSMLTGMAEYYSAELSEKVVRGMTENVLKGKYNGGTIPIGFKVDEEKFFQIDPLKAPFVVEAFQRYNDGATMKELMNWLNDSGVTTNRNQKFTYNSVQTLLTNKRYIGENHFKDIVMPDSIPAIVDKDLFEEVQLKIKKNSRAPARHKAEDDYLLTTKLFCGMCGAMMFGECGTGRNKVVHHYYKCATAKRFKTCKKKTVRKEWLEDLVVAETMKLIQDDAVIDAIVAEVMELQDQENTTLPLLEKQMREVENGIENMLNAIQAGVLTNSTKSRLEKLEAQQKELEVRIAEEKVARPRLSENQVRFWLTRFRKLDPNVKSHRETLINTFVNAVYLYDEKVLITFNYKDGTKTITFDEIAAKDAPEGNGSDLGCFAPPIKSKTNTKSPFKW

SEQ ID NO: 21495 - protein, 527 aa, synthetic construct
MARKKNIAAGLDAVIYARYSSHNQREVSIEQQIAECTKHAAALGLRIVGTYEDRAISGKTDNRPRFQQMMRDAEKGKFQAVVAWKSNRIGRNMLQAMVNEAKLDDYGVKVFYAEEDFDDTAAGRFALRNMMNVNQFYSENMAEDITRGLYDNANKCMANGRQPLGYKRGADGKVMLDEPAAAVVREIFTRVAAGDLFVDIARDLNAKGIKTSKGAAWNKGSFQSICQNERYKGIYIYGNVRIVDGIPRIVSDELWYKVQEAMRVKKNPVGTRHRVGAEDYLLTGKLRCGHCGSYMTGVSGTSRNGELHYYYTCQKRRTEHACNKKNVRRDVIEPAIAQAIKMYCLTDDVIEWMADQTVQYWEKHDNDLQIEALEQQLAENKKATSNMLKAIEMGIITEATRSRMVELETENSKLTAQLSAAKRDVVKINREDLIDELHVLRSKDIHDREVQAELFKDFLVAAYIYDDNRLKLVFSFMGKDNSVEIPLETGEDPPDGEDSPDAKMFVLTPDCSTRKRSTTQKCVVLFC

SEQ ID NO: 21496 - protein, 476 aa, synthetic construct
MKKAVGYCRFSTDMQREESIMAQMRAIDEFAKRESIEIVKYYKDQGQSGTSDNRDDFQLMMKEVKNIDYVIVHKFDRFARNSFDHVINERKLNNKGIKLVSVLEPVGENPESILTKNLLIGMNEYFSLNLSREVKKGHKENALQCKFNGGTPPLGYKIEGGFYKIDEEEAKIVEKIFALRLQNYSYQKIADTLNGLGYKNKYGKEFNRNSFYEMLQNKRYKGTYIYGVNDGSGEVRNYRKRNSEWVEIEDAIPAIITKEVWEEVNKKYRKRSGAFKKDARDYILSGLVFCEQCGAHMLGCSRQSSTGKKYYYYRCNDRCGAKSIRADLLEEVVTNLIREHLIHEKNIDVIVDYVISNYQLENPYLELQKQKNKLIRQRDNIVNLMAETGSKALIDKLEQLDRQIDNIYIPPFKQVVLDRDVIKKRYLQFLHEPLTGSMIRLLIKKIKVNDHKTIINLVNYPNELLNGYSHGAGKRT

SEQ ID NO: 21497 - protein, 613 aa, synthetic construct
MRRVFVYHRVSSDQQAERGGGMERQAKLLEDYLARTKLCDDMDDPEPIVLGDPGMSAFKGHNLQHGELGTWVDQVKAGMWDGSILVLESIDRFSRLNPFEVLDYLNSIIERNVSIHDVYDNNIINRRDISAFTRALNQADRAFKESKFKSDRISAGWRRKREQAFNNGTIVTKKRPVWIDVVDNKYILNEKAAVVKEIFRLYQTGIGCPTIAKILQKKEGSEWKFDRAWSSEHVHKILRNKRVTGKILISEIIRDYETDDKEKQFTQNFYDMDVYPVVIDEKEFELVQELLKSRRPNAGRATTKKDGDQEIVVKHNMFSGIFRCGDCGQGMFHNVVKTKRNPKKSEARIEEYRYIRCIVERDDLCHNKAMDYTIIEKFLIGRIKNLDFSEIIKVNEVNPEVELVRLQIEQEKAHIQEYELGIERLLNAGKRVSFGMRQELDEAKERLELLESRQAAFETVSVDTDVFTNFDMEELLDITNVGLRSRYERELAKVVDRIELRRRDNLYFVSINYKSTDLIKHWLVIENGKKKGAHLRGDFRIVKDGDTVYYGTDSFVLSSVNDGMPRIHFIENEPLNMIDYAMLLNFIDYIDQNHTVAVWMRHNMNFLFMDTSD

SEQ ID NO: 21498 - protein, 522 aa, synthetic construct
MANVTIIPARRKADKSTEEKSTALRVAAYCRVSTDSDEQATSYETQIEHYTNYIQMHPGWRFAGIYADEGISGTNTKNRSEFNRLIEDCMAGNIDMVVTKSVSRFARNTLDCLKYIRRLKERQIAVFFEKENINTLDAKGEVLLTIMASLAQQESQSLSQNVKLGVQYRFQQGQVRVNTNRFLGYDKDEDGKLVINPEEAEVVKRIFREFLEGWSYQSIGDHLAADGIKTAAGSTYWRGSTVRKMLQNEKYMGDALLQKTVTTDFLNKKRAINNGLAPQYYVEDDHEAIIPKDIFMNVQEEMQRRSRRRGTTGHFISGGKYALSNIVYCSHCGETYRRLTWSPKGKDRIVVWRCVSRVERKKKNLSIPCYSRTVEEELLKKVVVKAINRILPDKKNFIRIMKNNIREAISQRTQKPVQALDAKIKKLQGELLERVKQKQPYTDLTEQMDSLRAKKDALALTDADNREKQRRINVMMDFLEHQSGKIAAYDELLVRRLIEKIVVFDDHFIVVFKSGLETQIDL

SEQ ID NO: 21499 - protein, 518 aa, synthetic construct
MKTVTKIMPDKPKKKKLRVAAYCRVSTSFDDQLTSLETQKSHYEEYIKSKRGWELAGIYFDEGITGTKKEVRPGLQQLITDCELGKIDYIITKSLSRFARNTTDCIEMVRKLMNLGIPIYFEKENIDTGSMQDEFLVTLMGSLAEQESRSISDNQKWSYQERFKSGNYKAGYAPYGYTVTDGKYIVNEEEAIWVRYIFEQCLAGKGAYTIADDLNKRQAPTKRGGKWAESTVRAVLRNEKYIGDCLVQKTYMDDEFKRHVNHGERDQYYLQDDHQPIISRKTFEAAARMLDFLGKEKNVDPQGGRSLNRYPFSGKIVCGHCGKHFQRRMQYTGSLVYPSWACRQHLADVSKCPQKSVKETALQQAFIVLMNKLSFGRKPILETLKRALNGNTFQQDPEKMEAINRRLTECRIQQEQLADFLHKGYLPSHAYNTEMAKLKIEMDTLEKQRSVQRSPEQMAQQKNLDELIQYLKEFPMQTAFDGEAFTRFVDHILVLSQTEFTFHLKCGLNLTERVKTDG

SEQ ID NO: 21500 - protein, 495 aa, synthetic construct
MKKITRVSRPMPAIVRRKKVAAYARVSVESERMNHSLLAQISYYNGLIQRNPEWEFAGVYADDGISGTTIDKRKGFKQMLADCEAGKIDIILTKSIQRFARNTVDLLTTVRHLKDLGIEVRFEKEHIRSLTGDGELMLSILASFAQEESRSISENVKWATRKRFAKGIPNGRFRIYGYRWNDDQLVVEPKEAAIVRLIYDNFLKGLSAESTEKQLEQMGIKSYNGKHFGNAAVRGILQNITYTGNMLFQKAYIADPITGKAKINHGELPQYFVEDTHEAIIPMETYKKVKEEIERRRELGALANWSINTCCFTSKIKCGICGKSYVHSIRRDQKKENVWTCISHKRKGRTCHSKGGIPQKVLIKECTEVLELSKFDEKVFLNQVDKIVVTEPHVMVFHMKNGEQITRQWVSTARKDAWTSERRKEWGERHKLKSTNPNRKIFNEFTGFIKCGKCGENYRSQQTTYSDGKKERYWRCAGICGNEAIKDSTMKKQLS

SEQ ID NO: 21501 - protein, 525 aa, synthetic construct
MKAAAYARFSTDKQTENSIAYQFNKIQEYCAKNSIQIVSFYSDEAESGTNMDRQGFIDMVAAAVRHEFDAVIIYDISRGSRDVGDWFAFRKQMLRLDIQVISATQKLGDITNPNDFLVELISVGLGEHQVLDTRQKSIAGTAERAKKGIFCGGLPPLGYDVIDGKYVINEQEAETVRIVFEEYTAGASYNAIVDKLNGRPGKYGSPLGKNSLCDILQNERYIGVYTWNKRTMRIMRKYAGGKLNPNVIRIEGVIPPIIDMETWGRVRSRMIQRNRRAENKATREYLLSGLIECVECGATFVGHTSINRRKDGSKRETRYYECGNKYRTHNCKAKNINANMIETFVVQQLKAYLLEIDFKETANRIADAVNSAAPDCAKEKAELTDILKKIANGVRAVISGMDIPELQNEIDRLRTRKSELEDIIKHKESNGKKVNPDKIIARLNRAMDHWDTESKRIVQEFVTKIYANPDGSFTVEIGVHIDGAGGRTRTGTVSLPVDFESTTSANSITPANLFSNLLEIQPSDN

SEQ ID NO: 21502 - protein, 554 aa, synthetic construct
MSSHQSSSRVRIIPAKARTGRTEANPGGQKKRIAVYARVSTDSEMQASSYDLQVAHYKDYVSKNPAWILADVYADEGISGTSTKNRTEFNRMIQDCEEGRIDYILTKSISRFARNTLDCISIIRKLKGLKSPVGVFFEKENIDTLDSKSELFLTILSSMAQEESRSVSENTKWGVQKRFQQGIVHMPTTFFLGYDTTEDGEIVIIEEQAKVVRRIFREFLEGKGCPSIARDLMRDGLKTGKGNKTWTGDSVYKILRQEKYQGHCLAQKTVTLDFLSHKRVRNTDIQPQYFVKNTHPAIISEETFEAAQQEMKRRSLMMRDPDKKYRQHYSGVSPFSNEFFCGECGRPVIRRRMTSSRKGEKYYISGWQCRVTAGRDPDYKDCKTSYVQETDLENAFMKIMREMKENLDEVKQETQRAIEKASLLPSEQQRLEELNTQIEAITDRISDLAAKESTTNDAIYDATLRHLIYEQEILQQERDSLEDNMQEQLYLEKQFQSLLNSLEETENLEDFDVKLFKNTVERGIIYKERVVEFQFKCGVKRTICARERKTPKKK

SEQ ID NO: 21503 - protein, 533 aa, synthetic construct
MAEALFGSFGQSAGGLSLMDPPAEQPKKLRVAAYVRVSSLLDEQEGSFDNQKTHYTQLIRSTPGWKMVDIYTDQGRSGTSMAKRPGFNRMIRHAYEKKIDIILCKSVSRFARNVLDAINTIRELTELGVRIIFDKENIDTGDMASEFILTMLSATAQEESRSISENINWALEKRYERGEPVFVRKLGYQKNEKKEWIIIEEEAHIVREAFEEAMNGKTPAQIAKQFIKKRYKKINGRTDWSSTTVRLMLLNRDYTGDVICQKYYTESYLSHKRVANNGERNQYFIENHHAPIVSRETFEAVQRELERRKKPNKNKKVNRYPLSSRIQCGKCGGNLHRFICKGIVRWRCENNVRSKELCTMGSIKEEVIREAMQDAFLERYRLARFMYDMERMKKDLTRAVAARDFSYNRLRLDLEQILLEENIALINANGSEADSTDEKLGELASKRASIEKELKIREDWWELLDQDFALREEAKTKLKELDAVRDPSKQLQKELRNISFLRAWVVRVKAITPMSFCMHWIDDKETIVDLRKE

SEQ ID NO: 21504 - protein, 523 aa, synthetic construct
MPYCIYLRKSRKDVEAELHGEGETLARHERMLLTTAKRLNLTITQIYKEIVSGETIAARPVMQQLLLEVEQGLWDGVLVAEIERLARGDTRDQGYVAEAFTYSDTKIITPMKTYDPRDPSDQEYFEFSLFMSRREYKTINRRLEAGRLASFREGKYIGNVAPYGWERFKLPAQKGFSIRPHPEESPVLHLIYEWAGYGCGGKLLGTSKIGSKLDSMGIKPRKGDFWTPASIRDIIANEHNIGMVRYQRRKTQRSIVGGIVQKSRPRMEEYMLAQGLHEAQISKELFDLANRNISNGDPRLPESYKLKNPLAGILICSECHHAMTRKANTGRYRFETLNCTHTGCKTVGSPLYLIEDLLIKTLEEWLEGYETETPETTTRLQASIELKQKLLSEKQEILDKTTAQREGLYDFLEQGIYTTEVFLKRSDLLESKLLGLEEEVCAIEDEILYEEQLIANQTTFAPKCQRLIDNYKHLSIDKKNEMLHDLLEKVEYKKLEKNKRGQAECPNFELHIYPKLPKISKKC

SEQ ID NO: 21505 - protein, 548 aa, synthetic construct
MTIAWAYCRFSSDHQREESIDAQIRAIRDYCGRNRITLEKIYRDEARSATTDDRPSFQQMFSDIKEYPCDLVIVHKLDRFSRDRYDSAFYKRKLKERGIRLVSVLENIDGSPESIILESVLEGMSEYYSRNLAREVQKGKKETAYKCLHNGGVPPIGYQVDESGKYHVDPIESKWIIKAYEMKASGRSYMEIAAYLNGIGARTRRRQGFTKNSFHDLFKNEKYKGVYVYNRAAPKTAGKRNNHLSKSDEDIIRIEGGIPRIVSDELWNEVNMQMKDRTMNARHKAKRTYLLSGIIYCGECGSPMSGNARRAGRNKTEYITYDCNRRHRERTCRAKGINKKYIENLVISHLKNEFFTQENVLQLSQRIFDLQAQRKMEVTPELAALKAELAAKQKEMNNIIDSIKKGGYKDWMGDLGDEIDARIKYLEGKIQYSESIQERQILSQEQIYDYIMKDANLMEKSLEDLKQIVQTYVEKVVVFAEKIEIHLIINNHNPGGKSHPDCGYDGGSDGNRTHVRKHFHRSFSERSFCFKVSPQTSPKSRLYHQLSR

SEQ ID NO: 21506 - protein, 540 aa, synthetic construct
MQNTCCYNDIDVVNELSITTKRVYCLYRVSTKGQVIKDDIPMQRIECEKFAKAQGWTIVKEFSEKGVSGFKVSEKQRDAVQDIKAAALRKEFDVLLVFMFDRVGRRDDETPFVVEWFVKQGIQVWSTQEGEQRFDTHVDKLMNYIRFWQASGESIKTSVRIKTRMEQLTQAGVYRGGTVPYGYKLEKRGRVNKKGLDLYDLAVEPLEAEYVKLMFDKTVKDGMGSYQIARFLNEKGLRTHNGSKFQSNTVNRILKNKIYCGYLSSGNITSGFIEELKIIDENVFDAVQNIVTQRLVKNNDKRTIALNNKGKTLLSGDIFCAHCGGRLVVTRYQDRYIRKDGSEYKIDELKYTCYHKTRKLSDCDGQTSYRAEKIDNAVLAVLEDLFKKIKEIPQSKALERRYKLQVSGCNERYKKANAEVEKLGNQLRTLKLEIGKALVGESTFTAEQLSEAIKVTQNKLSEATLEMEKVKSQLDNKKEAMGKLGYHYESFLSWANEFENSPLEQRKMIACQLIRQVLVSAGYNIKIEFDMNYQQFCEGL

SEQ ID NO: 21507 - protein, 528 aa, synthetic construct
MSTPQRVVREIPALYRGNMSKVTEKENVTYYARVSTDHDEQEESYERQRSHFEQLIKAHPEWNYVEGYADQGITGTKAELRPEFMRMINDCRAGKINKILVKSISRFARNTVDTLKYVRELKELGISVFFETQGIDTMTPNGEVLITILAAIAEQESRTISTNIKWSYKKRFQDGKVIISAGMIGYKKEGYSYVIVENEAKLVKRIFLEYISGKTIRQIADGLNADGFKTKRNTKWKPSGIQSILANEKYTGNAYLGKTFKQDVLSKTRVKNIGQGNMYYVENSHPAIISQETFDLVQKEREKRNEVRSSSKTGKGRYSSKYPLSGMLICGNCGSNFRRYGRNLANGEYVPTWICTKHQKNRKDCEMKPLKEANILETYKMVIEENVGTIKSVVESLKNSIDEELATINNDNLIQIEEMLNIERKKIMNLFKAKKEKKITVEEYNQEYSTLSQIVKKLEQEELYQKGKQLKTEIKNENIKEIKTLLDDDKVDITDAALMKKLLEYIKVINNHTIEFVFTCGITVTKTI

SEQ ID NO: 21508 - protein, 490 aa, synthetic construct
MEKAVAYIRVSTKSDSQLHSYEYQLEYWKNKIESEDNKILVSVYQDYGISGRSIHKRPQLLKLLEDAKKHEFSIVYTKSVSRFARNTTELLEMVRTLREENVKVIFEKENIDTFDPSAELYLTIAASVAENDLKIYSENQRWSYKERFKKGYIWANKMLGYRMNNETNTLEVVEDEAKIVKKIFELYISGYGITKICKILQSENLINTKGTMTWSKSAIRYIISNEKYKGCSLNQKSVYVNGIKQLNKGYEKQYYIEDSHKAIISKEVFDKVQKIIYERASKNQLGRGIIPPYPFTGKIYCGICGHKYHHRFNNTNKSWRVAIWSCKNKQDNGKIVCASTDIKETVLKEKFIEAYNEFITTNRFTSEEQVLQDKVKILIEEETELKKLKINRMIENIDYDEEIKEIHQEIEEINNALLKYSLKNITKKDLQTISIFDEDKVDKFINKVIITRYKVKFIFINGIEIEKEYSNGQSGNKKGWNLNKQRKEQN

SEQ ID NO: 21509 - protein, 557 aa, synthetic construct
MLQSNKITALYCRLSQEDMQAGESGSIQHQKMILQRYADEHHFLNTKFFVDDGFSGVSFEREGLQAMLQEVEAGRVATVITKDLSRLGRNYLKTGELIEIVFPENGVRYIAINDGVDTAREDNEFTPLRNWFNEFYARDTSKIIRAVKQAQAQKGERVNGEYPYGYIPDPNNRHHLIPDPETAPIVKQVFAMFVSGVRMCEIQKWLAENKVLTIGALRYQRTGQARYQRAMIAPYTWPDKTLYDILARQEYLGHTITAKTHKVSYKSKKTRKNEEEQRYFFPNTHEPLVDEETFELAQKRIATRHRPTKAAEIDIFSGLLFCAGCRHKMYYQQGVNIEPRKFSYSCGAWRNRARTGSECTSHYIRKNVLLDLVLEDMRRVLRYVKEHEQDFICKATEYGDMEARKALAQQQKELFKAQARMTELDTLFRKLYEDNALGRLTDERFVFLTSGYEDEKKSLAARIDELQQQIATVTERKRDISRFIQIVGKYSDIQELTYENVHEFIDRILIHELDRETNTRKIEIHYSFVGQVDTEQEPTQVVNHDRRNMVDVKSIAI

SEQ ID NO: 21510 - protein, 522 aa, synthetic construct
MGNVMLIPARRQVGSNARKQEEEKPKLRVAAYCRVSTDSDEQATSYEAQVEHYTEYIQKNPDWEFAGIYADDGISGTNTKKREEFNRMIDDCKAGNIDMIITKSISRFARNTLDCLKYIRQLKDMNIPVLFEKESINTMDAKGEVLITIMASLAQQESQSLSQNVKMGLQYRYQQGKVQINHNRFLGYTKDADGNLVIDPEQAETVKRIYREYLEGLSMDKIAAGLERDGILTGAGGKKWHTSTINKILRNEKYIGDALLQKTYTTDFLNKTRVKNNGLVPQYYVEGDHEAIIPKDIYLQVQEELVRRRLVKTSANGKKRSYSCNHCFSQIVICGECGEMFRRLHWNNRGVKSIVWRCISRLESTGLECHARTINELVLQDVVVKAINQLLGDKSNYQAQLQLNIAAVIRASQATAIDSIDEKLMALQQELIQKANSKEDYDEIADEIFKLRELRQKTTVDTAARDEQIKRINDLQDYISQQTTYLTEFDESLVRRWIKQITIWDDRITVELKSDVSIDVDA

SEQ ID NO: 21511 - protein, 549 aa, synthetic construct
MKITKFPIDLSMLTEEEIDQFRQDPSTLFEGDTDVCLYLRFSSERQREQSIEGQLRDCRTFCKLNSYRITAIYVDRATTARKDVEKRVHFQEMIRDSEKKPWEYVVVWKLDRFARNRTDSALFKFRLRKNGVKVISATENISEKPEGIILEAVLEGMAEFYSADLSQKITRGMRESALKCHSIGGHVPLGYKIEDHKLVINPATAHIVQEAFELYANGETVADICRIFNTKGYRTAKGVEFNRNSFKSMFRNKRYIGVYTYKDIEVEGGVPAIIDKELFETVGHRLSKNAEAPARGKAKVDYLLAGKLFCGHCGGSMNGESGTSKTGAIHNYYTCYTRKRKHACDKKPLKKDWIEYIVAQDAMELLTDDTIQELADMAISQTEQDLRENTRIPELTDRMKETESGITNITKAVEKGIASDALMNRLVELEKEKKNLLRLLAEEEKYVCKIERSQIVYWLTEFKGGRIEDERYRRIIIDLMINSVTVWDEPDGFRITTAYNLTSCKSKTFRIAPSGEKGFGFEGSESTNMHQGEPRKGFAFGVSCSAKIG

SEQ ID NO: 21512 - protein, 577 aa, synthetic construct
MAYRFSQQTAAPDTRTVALYVRVSTGYQVDKDSLPFQKQELRNYCRHVLHIEESRLEVFEDAGKSGKNTKRPAFERMMTKVKAGLVSHVIVYKIDRISRNLVDFSLMYDDFKYNRVTFISLNEQFDTSSAIGEAVLKIILIFAELERKLTSERVTDIMINRALSGQWNGARMPFGWDWDEEKKMPVHSDKEAPTVRLMYDMYEETRSSCRVRDYFNSHDIATKRGGEWTTKTIADLIRNPMNKGDYRYNYRESAKGRRKPDEEVVYVKNVFPPLVPPDQWDRCNQIMDHNAKLRCSSGFPHKGTHIHIFAGLLKCGKCGSYFQVEKRDRVRRNGFAPSLYRCGRRYRKQHCISKSCSEVVVGPFVLNYISAMIRASDMRSQIHSPEELEKILLSDSVFQNVAGIVSDGLNATYAMLSGTDSSVPYRPLPLASHNVQEDDNVQKWEQGIVRIDRAIERLKKVYLFDDAAMSEKEYLETKSELERERIELDNKIKEQESATFPVQTEDLAFIKSASSFLLAHRLKAGDHIQYNTFAPLVDDEVLKDFLNLVIKEIVVVDARITEITFQNGLTHKFLYRE

SEQ ID NO: 21513 - protein, 499 aa, synthetic construct
MIAIYARQSVEKEDSISIESQIEMCTYEARGEAFLVYKDKGFSGKNTNRPEFQRMMQDIKSGRKGITKVIVYKLDRISRSILDFSNMMDIFGKLGVEFSSATEKFDTSTPMGRAMLNICITFAQLERETTQQRVKDNYISRSQKGFYMGGPVPVGFKKVDLNIDGVKTSMYEQVPEEVKLVKKVFEMYADVNYSSEDIAKAVRAMPPECRRNRTVTRARVQDFIKNPVYVKADLDFYNFMKSKGVKIINPPEEFIGTNGCYLYTGEKKTRKQTDLSNAVLVIAPHEGFIDSDLWMRCRERALDQQQIKRNPKAKNTWLAGLIKCGNCGYALVRKNYVKKDCSYFLCSHKMNDNLCCGCGTIHADEFEAFILRKIKEKLTDYREFEIKGTNSNGSKIERLKARLAAIENEIDETVKNVAGASETVMAYINESVERLHSEKLQIRAEIQHLSENGYSANEKIICDFDKFDALPFERKRELANAVIKKIYATSDKIDIIWNI

SEQ ID NO: 21514 - protein, 526 aa, synthetic construct
MLYELSPSDISHIIIYLRKSRSDDPYMSVEEVLSKHETQLQEHAVSVFGQRIPEEHIFREVVSGETIADRPVMKQVMKLLETGSIKGVLVIEPQRLSRGDLEDCGRIINAFRYTNTLVLTPPKNYNLADEYDRKFFEMELTRGNDYLEYTKKILNRGRIASVKQGNFIGSVPPYGYRKVQIGTGKSAYHSLEVIPEQADAIKLMFKLYLAGNGFTNIAKKLDELGIKPLKSIVWSPAAISDMLENPVYIGKIRWNWRKTEKKIVNGQIVKTRPKTSDASEWVYVDGRHEPIIDLATFEAAQERRGKTPKVKKYSELKNPFAGLLFCGTCGKAMSLKIYTQKNGSKCEMMLCNKQSWCNTKSVKYDVFVDRIIETLENTIADFELKLENDDSSTTDLQASIISNLQNELKRLKEKDIRQKDAYEDGIYTKEEYASRNAKLQEEIAKASAALEQASTSIPATIDYREKIARFTDCLAALKNPKMSATDKNILLKSCIDKIMYHNHMESKPGIGRYVENVFTIDVFLRL

SEQ ID NO: 21515 - protein, 539 aa, synthetic construct
MAAVRRTVREIPRAVILQIDEAEIQKTVVAAYARVSTEKEEQEDSFERQVSHYTTLITSKPEWEFGGIYADPGITGTRAEKRPDFMRMIADCRAGKINKVLVKSISRFARNTVDALKYIQELKELGISVYFENENIDTLTPGGEVLITILAAMAEQESRTMSTNIKWTYQKKFKNGEVILNTGLMLGYSKAGRKDEEGKEIYIINKPEAEIVRRIYREYLAGITVTRIARGLEADGIPTKLGKKKWSPKVIMSILTNEKYTGDAILGKTFKPDVLSKYRQKNTGQAPMYYAEGTHPAIIDKEMFEMVKVEIQRRKDEQVTAVGSSRFTSKYPFSGLLICGECGHKLRRHVRTVGSGMKVPAWGCANRIVNGRRECDSHHVNEDTLQHTYAAAIGDMIEDAEEIMAAVKDSAGLVMEPENKATLERVEQEIIDLQNAVLELHKAKQQRSVTATDYAAQIKEYSQRMQELEAQQAELQTTENRYSEVKMWLDSFAEHIQSGGIMNADDGMIMKQLVEQIIVNDDGIEVHFKCGIVASHEYM

SEQ ID NO: 21516 - protein, 488 aa, synthetic construct
MDKRKRRAVAYVRVSSASKAQLHSYEYQEQYWRGKFIDDPDTELVGIYADKGISGSSIQRRPQFLLMMQDARDGKFDVVYTKSVSRLGRNTVQVLESVRELRDLGVEVIFEKEQISTMQPTSELFLTIAATVAENDIQVDSERQRWSIRRRCENGWISIGSGMYGYTMTEDNNLVIVEKEAVVIRRIYDMYISGMGATAIAKTLNEEGIRNFLGNEWKPNGILAIIDNEKYMGDAMMGKSVYIDGVKHDNTDGTLGKRYYMEDTHEGIVSKETWYKAQEIRQQRKNPKLVGAEQPRYPFTGIIECGVCGKHYQHKVNNSGKKWQTDVWCCATQLRKSIAECDCTRLKDSVLREKFVEAYNQFIKERPQGHNIATMQNVIAELRKEEQDLADLLIQRLIPESAFRTEQRRIKAQIAELTTKINEQRSKFVRESDFTIITEFDPEKVEKFITKVIVRKWTVTFVFYNGVQITKAYSNGQAGNKPGWNKRR

SEQ ID NO: 21517 - protein, 528 aa, synthetic construct
MIAAIYSRKSKFTGKGESIENQIQLCMDYGKNIGITEFLVYEDEGFSGGSTDRPKFQDMLADAKDKKFDCLICYRLDRISRNVSDFSTLIEELNKLGVSFISIKEQFDTSTPMGRAMMYISSVFAQLERETIAERVKDNMYELARTGRWLGGNTPTGFTSEKITYFDENMNQRSMWKLKVDKEEMKLVELIYSKYEELKSLSQVEKYFLSSNYKGKNNGNLDKSTLQSILRNPCYAKSSEEVIKYLSNNGMDVVGTPDGSHGFLTYAKQSTTPIVSIAKHKGIIDSDRWLHIQKILDSNKSKAPRVVSGSNVALLTGLLKCRCGSNMRVNYGSKRKDGTRGHYYICAKKNTKGLIACDNKNVNGEQLEEIVIEQIKNLNENNILGKFKDSKNMLLEKNKDVESEKKIINKKISDTNLAIGNLVKQLSLNTDSIASKYIISEIEKLNQEIEGLNSKLIELNALSNEIDSIDINLDIISDSFVKFRTQYDNADFNTKRFLLSSIIDEIIWNGDTGNINVCYLGTKKKELI

SEQ ID NO: 21518 - protein, 531 aa, synthetic construct
MAATARSVKIIPQTIDPATRMPDKGIAKRRVAGYARVSTDSDEQFTSYEAQVDYYTQFIKSKPDWTFVDVYTDEGISGTNTKHRAGFNKMIQDALAGKIDLIVTKSISRFARNTVDTLTNVRTLKEHNVEVYFEKENIYTFDSKGEVLITIMSSLAQEESRSISENVTWGHRKRFSDGKVSLGYSSFLGYEKGPDKDHPLVIVEEQAAIVRRIYTMFIDGKTPFTIAKPLTEEGVPTPGGKSKWGSAVVESILTNEKYKGSALLQKKFTVDFLQHKMKENNGEVPQYYIEHSHDAIIPPEDWELVQLEMTRRKALGRRYSGNSVFGARLICEDCGGFFGAKTWNSTNKYKRTVWQCNEKFKDKEHRCTTPHLNEDDIRARFIAAYNSLIPDRENIIDDCRRMMDVLTDTTEIDGKIADLLQEAEVVTGLTRKIIEENASNAMNQAEFSRKYKGYEDRYTAIRDKVEKLREQSEQRKAQADSISAFMFELHETDAPVTEFDSKLWLSVIDCVLVRHNGTLLFRFRNGMEIEG

SEQ ID NO: 21519 - protein, 433 aa, synthetic construct
MDRKVQKLDASFPAKPKLLNVVAYGRVSSGKDAMLHSLSAQVSYYSEMIQNHPGWNYCGVYADEAMTGTKDNRENFQRLISDCRAGKIDMVITKSISRFARNTLTLLNTVREFKKLGIDVFFEEQNIHTMSGDGELMLTILASYAQEESRSASENQKWRIRKSYEKGELVQWHIQYGYNITKDKIEINPEQAEVVRNIFDRAIAGETFGSICRDLNTRGISTYFGKKWTARRITEILSNEKYIGDAVLQKSYVNNHMEKKIVKNNGEIPMYYAEGTHEAIVDKETFEKAQSVVKAVREKYCGKNSPKRYPFTSTIKCGLCGENFKRVTANGRISWNCRSFQEQGRAFCKSKSIPETTLISVTAEVLGLDSFDEKIFYEKIDHIKVPGANSLIFYFKDGRSVERKWKDRSRSESWTPEMREAARQRAIKQRRDK

SEQ ID NO: 21520 - protein, 487 aa, synthetic construct
MRSYDKSILRLLNACKRSLCGIENKSLLFILSEDEGITGTNTKKREGFKSMVADALAGKINLIITKSVSRFARNTVDSLTTIRSLKEHNVECYFEKENIWTFDSKGELLLTIMSSLAQEESRSISENRTWGQRKRFADGKVTVPFKRFLGYDMGPDHNLVVNPEQAKLVKRIYGMFLQGQSPFQIARTLTEEGIPSPGGKDHWNPSNIKSILTNEKYKGDALLQKSFTIDFLTKKKKANEGEIPQYYVKDNHEAIIDPETFEMVQTLMTTRTKGRNRKSSVSIFSSKVKCGDCGSWYGPKVWHSNDAYRKVIWQCNHKFDGQKCATPTLTEDEIKELFLRAANQVIDQKEQFIAIYEQVLSRSLDTTALEGELSELEAEINIAVELIEECIKENAHVALDQAEYQKRYDALVARFDKAKARHTEVTDLIAERMARKHQIETYLKNLRSREPLTEFRETDWLAMVDYITVHSKDDIRVAFKDGTEIKA

SEQ ID NO: 21521 - protein, 519 aa, synthetic construct
MNAVIYARYSSHRQGEQSIEGQLAEAKKYAETHCLTIIHEYIDRAQTGRNDNREQFQLMLADAAKRAFDALIVWKTDRIGRNKEEIALNKYRLKKNGVKIHYIAEMIPDTPEGIILEAVIEGMAACYSEQLSQNIRRGQRASAAKAQSTGGNRPLGYKTGPDKRFIIDPETAPTVKLVYDLYARGQTMTQIIRTLNAKGLRTLRGRPFTNNSLRTLLKNEKYIGVYIYKDEIRIEDAIPSIVEPEAFYKVQEMLKYNQKAAAHKNSKADYLLTEKLLCGKCGQMMVGVSGTSKTGTRHHYYYCTEQRKKRCCKKPVRREWIEGLVLEYVVALVQNEDLLDFIAENTYQYYLAQNTDTSYTESLQKALEETEKATANLIWAMEAGIFNEATKNRMNELDEQKEELKAALSAARLREDLGLKKEHILYFLHRFAEMDCTDEACRKQLIKTFVNSVFVYDDKVVLTFNYSGDDRTITLHEIDAGLQQGVRLPRALCHHEKACNHNGYRLFSCPLTLYALVTL

SEQ ID NO: 21522 - protein, 521 aa, synthetic construct
MKLQNNCIYLRKSRADREAEERGEEETLSRHERILLDLAKRGGYHIGAIYKEVVSGETISARPVMQQLLQEVESGMWDGVLVVEIERLARGDSIDQGVVARAFQYSDTKIITPTKVYDPNNEFDEEYFEFGLFMSRREYKTIKRRLTAGRLSSVNEGKYVGNVPPYGYERVKIPHAKGFTLSPIPQQAEVVKLMFDWYVHGIDGERLGVAKITRKLNDMGIPPAKNNAWSTASVSGILQNPVYAGKIRWNARKTVRKIENGVVKRTRPRSSDYILSEGLHEAIIPSELFTAAEAIRKKNPPRPIGLNNTIKNPLSGIVRCQKCGRIMTRRPYASSKQDDTLLCPYTDCDNVSSKLYLVEREIISAMQKLVENYKLNESLTDNDSSDTLSAKKMLLEDKKNELEQLNLQKTKQFDFLEKGIYTTEIFLERSEAIAKDIENCSNAIEILENELQHDKLILEQKNNFVPKCEHLLSNYWDWDVATKNAVLKELIDHVDYLKTARNSFRKGDEVNFNLIIYPKIQ

SEQ ID NO: 21523 - protein, 515 aa, synthetic construct
MKIKKIEAQPQEVKKLRVAAYCRVSTDNDDQKESLEAQKAHYETWIKRHSNWDFAGIFYDFGITGTKADVRDGLQALMYECRIGRIDYVLTKSVSRFSRNTTDCLSLVRELLSYNIPVYFEKENLDTGSMESELILSIISGMAQDESESISKNVKWTVQKRIEAGKYKFGYPPYGYGRDENGMMVINPEEAKHVRQIFDWALSGIGTFKIAHMLEEQGVPTRKGSAWAASTVKGILTNEKYYGAAMFQKTYTDSSFKRHRNHGEADSYFVSGHHEAIVSEEEFHKVQEIIEMHIKEKCIVRGTGKYNNRYLFSGIITCGECVDTFKRQTISSGISWCCKTHLKNKAKCSMMFIHEEAFKAAFVTMLNKLVFGGKQVLYPYYEMLRITNSDENIQRIQGMKQELQRYAERKDTIRQLRAKGIIDSAVYNQEIGSIDKQCEELRSKITALQQSDASAVLNETEALLRFSDSAGMQTEFSEQLFASFVKRIIVYTRKSVGFKLKCGLTLKEELCTDTK

SEQ ID NO: 21524 - protein, 513 aa, synthetic construct
MNVIKIPAKPQKGNAAAKEEVKCLRVAAYCRVSTDNEEQASSYEAQIQHYEEYIKTNTEWEFVGVYADEGISATSTKNREQFNAMIEDCKRGLIDMILTKSISRFARNTVDCLNYIRMLKGMNIPVFFEKESINTMDAKGEVLLTIMASLAQQESESLSKNTKMGIQYRFQQGKVMVNARNFLGYDKDESGHLIINPAEAEIVKRIFREYLEGASCQKIARGLERDGIRTARGNPRWHDSTVRKILENEKYMGDALLQKTYTIDFLNKKRGKNNGTLPQYYIEDDHEAIIPKELFMRVQEEMARRSTENSRKRRFSSNHAFSQIVFCSECEEIYKRLHWNNRGSKYIVWRCSSHLHEKKTCNSRTVREDVLQDAFLEAVNQIVGNSREYLKILQQNLELAIKQVNPASVEYLDARMEDLQRELIDRTERHENYDDLAEEILRLRQLREQTVMDDVSKAEYQSRIKELQAFIQSQPKRLTFDDTLVKHLLARITIFPEHLLFEFKSGVNITIEK

SEQ ID NO: 21525 - protein, 520 aa, synthetic construct
MKRITKIEENTLLEKRKLRVAAYCRVSTARDEQLVSLAAQKAHYESYIKSNDEWEFAGLYYDEGISGTKKEKRDGLLAMVAACERGTIDFVITKSISRFARNTTDCLELVRKLLDLKIYIYFEKENLNTGSMESELMLSILSSLAESESVSISENEKWGIRRRFQNGTFIISYPPYGYDNVDGEMVIVPEQAEIVKQIFADTLAGKSTHEIANELNERGVATKKGGHWTPSTVNAIIGNEKYTGDVLFQKTYTDSSFNRHQNRGELDQYLMQDHHEAIISKEEFELANAVLKQRGREKGNGYDTGRYQNRYGFSGRICCGECGGKYKRRMHYKPSGQYVAWACANHLKDKESCSQKYITDDALKLAFVTMMNKLVFGHQMVLRPLLQSLQGLNAQSRLLKIEELETAIEKNREQKQVLTNLMASGYLEPALFNKESNELAAEAEALRQEKDGLMRSVNGDMVKIEELQRLLRFTSKGTMMTEFDDEIFLSFVERITVLSRKEVVFEWKCGLSLKERLVEP

SEQ ID NO: 21526 - protein, 456 aa, synthetic construct
MDNIKRVALYIRVSTEEQALHGDSIRTQTEALEQYAKDNNFIIVDKYIDEGYSATNLNRPGLQRLLTDIKENKIDLILLTKLDRFSRGVKNFYKILDTLEKHKCDWKTILENYDSSTAAGRLHINIMLSFAENEASQTSERIKFVFNNKIQKKEVISGKVPFGYKIENKHLVIKEDEAEIVRESFDTYIKFSALTKTIQHINSKFNMRHMYKWMQKLLKNKIYIGTYERENILIEDYCDPIISKEQFYFVQSLLKKNKRVSKNKFNIDYIFAGMIVCNCGRKMSGSYHLNNHGTLYLHYRCSLSYGTKLCSNTSRLGEKKIETFLLENVKTELYNNILKHESDNKKISKKNDTEKLKNKLKKQIEKLQDLYFEDLISKDNYRFKYKKLNDDLLELEKKENEEKVVINDLERMKNFLKINFEDDYVNMSSLEKRTLWTSLIDRIEVQKDGNLVIKFL

SEQ ID NO: 21527 - protein, 537 aa, synthetic construct
MSDTNKITALYCRLSHEDELAGESNSISNQKDILQKYADDNGFYNTEFYIDDGYTGVDFERPAFKRMIDDVDNGRIGTIITKDLSRLGRNHLHVGLFTEEYFPRNNVRYIAINNNIDSDNPDSSAIDMAAFYNIFNEFHVKDTSRKIKASCLIKSERGQRVASRPPYGYMKEPNDHSKIIPNPETVPIVRHIFQLCAEGLGPAQIAHRLEEEQIYTPAMYEYSKSGTVISNFDTSYPYRWNPTVVANVLEDVSYIGHTCNFRFGRASYKDYRKLKLPESEHRLIENTHEPIIDINTWEIVQRLRQSKRRFTRSGEKSIFAGIIFCADCKQKLYFHRHVREKPENWKFVCSSYRKNSREQCTMHGIKESHLKEIVLHEIRNVTAFARERTDEFAEYISLKSNSAVKKELSDANKKLKKSEKRLAEVGIIFRKLYEDHVLGTIDNDQFRMLSQGYTDEQNQLKAEISDLNKAIQELKSQTANTAKFTAMAKKYTDITELTQEILHTFVSRIEVHEKRKDDNGSVTQEIDIYFTHIGIVK

SEQ ID NO: 21528 - protein, 562 aa, synthetic construct
MPNSARQLHDQLDQFSRTGTQKRAAIYARVSTLEQAEEGYSIDEQVRVLREMCEREGYVVHKEYVDRGKSGKNIKGRPALQQLLHDANSKDFELVLVWKVNRFSRKTKDLLNIVEELEGKNIVFRSYTENYETATPAGKMQFRMLAVIAEFERDNIAQNVKMGMLARAKEGSWNGGQVLGYDVVSVPGENRKRKLSTLVINPTEAQTVRKVFDLYVEGNGYKSIANKLNNEGHRTKKNKDFSINGVKTILSNPLYAGFIRYNVRRDWNEKRRNNINPHPVIEKGQHEAIISEETWEKAKNIMASRSGKPNRIHDGEFPLTGIMKCPACGAGMVIGRTTNTLKDGTKKVLEYYVCGAWKNKGSAVCRSNGVRTDYADPYVLEKLSNIATSDVLIEQIVERINNKKERDSSPLQHEYETLKKAIESNQQKKEKVLGLYEDDLIQKADLVQRLSTLNEEKERLEERLSPIESQMGQGGTQLINFSMVKQVMQNFMIAYQESLTREQRKRLMHLLIRQITINEDRKIDTIQIQLNKEVAKHFTFKGGEDSSITDEFSPPFSILINL

SEQ ID NO: 21529 - protein, 441 aa, synthetic construct
MAAYCRVSTDQEEQLSSYENQVNYYKNYIQQNPIYEFAGIYADEGISGTNTKKRDEFNRMIADCRAHKIDRIITKSISRFARNTLDCLNYVRELKELGIGVTFEKENIDTLDAKGEVLLTILSSLAQDESRSISENSTWGIRRRYENGKFGMSTKRFIGYDKDGNGNLIVNAEQAKIVVRLYEEYLSGKTVDHIKRIFEADGIKSWNGKAKWQATTLQSMLLNEKYKGDAILQKSYTVDFLTKKRVKNEGQIQQYHIEDNHEAIIDPLIWEAVQHEHQRRSNYCEEHGLNAYSRTPESNPFAGKIICGTCNQAFTRRGWKTGDCYRKVWQCQERYRAKGVQGCTNRHVDETILEQAFMMAWNALIDNRDEIKARWETHAEFGNPLEQYRAVQFADITENAKHITEFGIDFMLKTLDHITIFESGKLVVTFMDGTEIECNGE

SEQ ID NO: 21530 - protein, 427 aa, synthetic construct
MRVKIIKPKEELLKPKRLKVCAYARVSTDSLKQEDSLVNQSETYEKLIKTNPDYEFVGVFADQGISGYSEKRPAFQSMIERAKQGEIDLIITKSVSRFARNTVTVLKVARELKGLGIGIFFEEQNINTLSGDGEMMLAVLSSFAQEESRSMSENNKWTIKKKFERGEVLINTTRFMGYGKDEYGDLIIDQEQAKIVRRIFDMYLGGFGVFKIAAQLNKENIPSLTGGKWHESTVRGMLVNEKYKGDCILQKTFTPENRRNSTVRNNGELQSYYIEENHPAIVSKEDWDRVQQILQKRKEQRRIGADGPDKYKNRYPLSGMLICPHCGKNLRRRQVHNKKIEWWCSTYMQEGKSTCKGVKISDEEAAKQNITEPTVIEEVKIDGKKYYGYTRKTDYDKGIRNQPNTPENKNGSLLPRVNRPRRTAIKL

SEQ ID NO: 21531 - protein, 529 aa, synthetic construct
MAGKVTCIPATKNRFTALPVTSVSKRRVAAYARVSTDSDEQFTSYAAQIDYYTNYIQQHPEWEFVKVYTDEGISGLNTRHRDGFNEMIADALAGKIDLIVTKSVSRFARNTVDSLTTIRTLKEHGVECYFEKESIYTFDGKGELLLTIMSSLAQEESRSISENVTWGMRKRFADGKVSMAYKQFLGYEKGPDGTPAVNEKEAEIVRLIYRLFLEGKTPFGIKEVLEAAAIPSPSGKSKWSVTTINSILRNEKYKGDALLQKSFTVDFLTKTMKPNRGELPSYYVKESHPPIISADEFDMVQAEIERRSRQGRGYSGNSIFSSKLFCGDCGGLYGAKVWHSNDMYRRVIWQCNRKFSKTQEQCKTPHLTEDTIKEMFLKAYNRLMRQRKQLIEDCELMKSLLTDCAEQEAGMEQLRQEIEEIADMTQNLVRQNTRQIQSQEAYNAKYNALAERYEKASAKHDRLEAEIARRNNKARQLASFIDHLEKAPASLEEWDSQVWSLLLEKGTVNRDGSVAFEFRNGKEIKVEAK

SEQ ID NO: 21532 - protein, 544 aa, synthetic construct
MPKKTAKHPAKPKRGKKLEIEEPGVLYGRYSSHNQKDISIEQQFEKCYELAAEYGIRIIDTYADRAVSGRTDKRVDFQRMMADAAKGKFCYVLAWKSNRIGRNMLEALVNEARFQELGVRVLYVEEDFDDTAAGRFAARSMMNVNQFYSENMAEDIKRGLYDNAANCMVTNGHLPYGYKADETLHYAIDEPKAEVIREIFTRVSCGEAFVDIMASLNDRGITTSYGRPWGRSSFQKILSNERYRGIYIYGDVRIEGGIPRIVSDELYFKVQEAITTKKNPQGRHRVNGDYLLTGKLFCGHCKSPMTGISGTGRAGKLHFYYVCQKRRTEKTCHKKNVRRDVIELKIAKAIRDYALKDDIIEWIADSCVEDHDRRVSESHLSVFEDQLAEVNRSIKNVMSAIEKGIITETTKGRLMELEAERTAIEGKICAAKAAIVPTNRERLVEWLRSLREGDVHDKKYQAGLFDTFLVAAYLYDDNRVKIVFSFAGDKNTIEIPLEDVIDSIDDEASCVRLSSTLSHQIKNPNLCPKGQRFGFFYFPKDSAF

SEQ ID NO: 21533 - protein, 495 aa, synthetic construct
MRLAAYCRVSTELGEQLESLENQKSFFEEFARRHHYDLVEIYADEGISGKQIHNREAFLRMLSDAGQHLFDMVVVKDISRFSRNTVDFLNAVRQLKALRIEVQFLSNNQTVLGNSEFILTIFSALAQEESANLSKRVKFGKRVNAKKGRVPNVVYGYDQKDTFTLRVNEPEAQIVREIFTLYAQDGWGVRKIAQHLNESGVPSKRGYGWTPKTIRRMLENPLYIGILENNKSETVDFLTGMQVKLPPEEHFFHDRPELAIVPRELYDRAQREIAARRKPEDCEGKLAARHSARRLFSTLIRCGVCGYAFTRVQYTYQNTYVKWRCSGKNQYGAKFCKNNLTIDEADLTGALDQYLASRIADRGAFAARVAAACRGNAPPDAEKARQKRLERIARQKQRYRTLYANELLTLEELKEKLAALGAREAELSDQQQSQPITSGHVLEELRLSHWTNAELRELVETIEARPDGRVVIRFRTLAPAGLPAAKPRAAVGRAP

SEQ ID NO: 21534 - protein, 499 aa, synthetic construct
MGTRIYLRKSRTEELNEPVEATLKRHREQLLEFARKNDLDIEEIYEEVVSGETLYARPEMLRLLNDIENQGCDAVLCMDIDRLGRGSMSDQGIILETLKRNNCKIITPRKIYDLNNDLDETYSEFETFMARQELKQIKRRLNRGLQKTIQDGGYIANAPYGYRKVTKNKMPSLEIVDEEAYFVRMIFDMYVNQGIGTHTIAETISDLGAKPHRSDRFARTSIRKILKNPTYIGKIVWNQKKQIRKGSHGNVKTIVVYNKPDQWTYSDGIHPPIIDEITFARAQEILSGRYHPPYYKGTVENSLAGLVKCGHCGGSMQRRICGQRIRRPYLICPRKGCIPSTQHAFVEEAVLSFLRQHLAEIAVELESQQPQDTSVLEKTLRVIRKEISTVERQKDSLHDLLEQGVYTVDVFVERSKLLQEKESLLKRQESAQIDAIERANGQKREVAFRKIKSVLEAYSAADAQSRNMMLKSVIQEIAYDKEPGSGLRDFSLTIQLKDF

SEQ ID NO: 21535 - protein, 557 aa, synthetic construct
MMANMTEMLSYHNVLSLDALTALYCRLSVDDANDGDSNSIQNQKEMLERYCKENGFTNYRFYVDDGYSGTTFDRPDFQRMVADVRAGLVKRVIIKDMSRFGRDYLQVGMYTEMIFPEYEVHFVAVNDGVDSQKGENDLTPFRNLFNEWYARDCSKKQRAVKRMKGMSGQRISSNPPYGYIKGEGGQLVPDPEAAWVVKLMFDLAAQGLGPVRIANILTKKKIPTPGTLAFRRTGKKRNYHPEAPYNWSDSTIANILEYKEYLGHTVNFKTYSKSYKFKKRLPTPEDQQMIFENTHPALVEQEVWEQVQRLREGRPRPTKQGEMALFSGLLFCADCGSPLRAHRGQNISKNQECYCCGKYRDRTNSCTMHYIRAVVLENLVLENLKQTVTFALENEQEFVRRLMNRSAKEQQKQIQSMKKELAAKERRIGELDNIIKRLYEDNISGKLSDERFKKLSADYEKEQRDTCSEIADIQKLVNEAESKVIKIDSFLKMARKYTSFEELSRGMLHDLIEKIVIHEGDKSSGHRQQKIDIYYTFIGEVGATQLVAQLELKGKAA

SEQ ID NO: 21536 - protein, 508 aa, synthetic construct
MSTKQDEQLNSYENQVNHYTERIHREPGWKLVGIYADKGITGTSMKKRDEFNKLIRQCKRGRVDMIIVKSISRFARNTLDCIKITRMLREIKVDVYFEEQNLHSIDPASEFYISIYGSIAQSESENISHNVAWGKAQSAKEGNVSFAYKSFLGYRQGADGKPEIDPAQAITVRRIYTEFLSGSSLQQIADGLTADSVPTPMGKAVWQPGVIQSILSNVKYKGDALLGKTYVEDCISKKVRINGGERPQYYVENNHPAIIDADTFAQVQEELARRASKRKVKQVGTTTEQGKYCGKYALTELLVCGECGTPYRRCTWTAGGQKRIVWRCINRLDYGKKYCHHSPTMEEAPLQEAIMNAILNTAKSNPDILQTLKMHIQMGLGAEAGEDESMDIQIRIAQIDREFNDILNTVTAENPESLLTDPRVETLMSEKRMLEKKLAEYEAAEQHRKNAKSRLEQIFTVLDGMKNHPLTFDNEIIRKILQCVIVESKEKIKVVFIGGLEMEAEVEL

SEQ ID NO: 21537 - protein, 516 aa, synthetic construct
MGKTITELTAGKQEQRILRLAPYTRVSSNSEDQLHSFAAQVKHYTEYVAEHPEYELVDIYADEGITGTRMDKRDDFNRLIRDCKKGKIDRIITKSVSRFARNTAEFLAATRALKEMGVSIYFEEQGIDTETVDLELMMTFPGIAAQRESETISENMRWSYQKRMESGDFNCCRAAYGYDLIDGELQINEAEAQVVRRIFHLYLQGCGKQAIANQLNADGVPKRYGQKTWHLFTIDYILNNERYMGDCLLQKSYTTESLPFTKKRNRGEKAQYYVENSNPAIVSRETYQAVQELQKSKSKGNHVPKNRYPFSGMLKCPVCGHNYRRQVVNGTAYWLCSYKAAGRTECAGDRIREDAVMSAFIRMSNKLAQNREELLGDLIRQLEKLQSRTSTSGEQVYQLNRQIADVNAQSLVVAQLYKNGVLNHAEYASRSGDLDRKVSELRSERRRILTEDEDDEIIESLKELNDTIAEYVPTDSFDTDLFGQIVESITVIGRNTLRFCLAGGLTLTEKIEERSA

SEQ ID NO: 21538 - protein, 552 aa, synthetic construct
MAISRNKSKPAKKVFYFSKYLRKSSEEEDSRSIHNQDSVLDAEIQKIIDADVYNDYVYVDTYCDEDYTGTDSERPDFKRLLRDISSGKVNMIVVTDLSRLSRNITESTNYVQVLFVALGVRFISIQLPALDSYLDPNKVYSLEVPMHGMFNENHAAETSFKVRRTFDNEREQGKFIGAFAGYGWKKDPEDRHKLLLDQEPYEVMQMMKEWVFDGASASMVKTKLNELGIPSPAGYKKKQGMKFNVSQERTTFLWSAEMVKRLMLRPENVGDLVQGRYRVISYKVHKKISVPENEWFICEDAIPAIYTREEQRLITDALKKRTRVSPTNKKQEVYLFSGFLKCGDCGKGMTRITSKNHVYYACNTYKKYGPKACASHMMEHEILESTVLLAIQNQIKIAVDMENVLKKVDKAPLLRRKSDGYDKSIREKSRELAKIQLYKTGLYEDWKNGDLTQSEYRQMKSKYIDEEEKLISIIANLEDEKKKLEKVKDKKNPFLTEFRKHQNLKKLSRDILIELVDRITIHKDNNITIHFKFADDYKRIVDCLNDCADLVE

SEQ ID NO: 21539 - protein, 495 aa, synthetic construct
MDAAQYLRKSRMEEGMDTEEVLAKHRKALAEFADRNNIHIIETYYEVVSGESLYARPEMLRLLKDVEDGCYDAVLCMDLDRLSRGRMRDQGVILDTFKDSGTLIITPEKTYDLSDELDDEMAEFKTFISRREYKIINKRLRRGLDQSIQDGCYVANAPYGYRKTTIDKKPTLEIYEPEANFVRMMYRMYADGYGCVSIARQVNLLGARPHRSAEFSRSSVATILRNPTYIGKVVWNQKSHIKKGSHGNAKHITIYNPREKWTITDGLHPAIVDKELYDQVQEIMAGRYRPSKQDGTVKSALAGLVRCSHCGRNMQKLNMKGGPYIICMKPGCCASTKYGLVEARILRHLQEILDELTSSKGAAIPRMSQEGYKQQLAAVRREQKAVEGQKSRLYDLLELGEYDLPTFRERMPVVKEKLARLEAKEAELLAAMERDLHRDPAAQAKKIAAVLDAYGDADIPQRNALLHSVIDYVTYTKEKKTKPTDFVLELTLKPY

SEQ ID NO: 21540 - protein, 580 aa, synthetic construct
MVRRKTALRGVSASTRITKVAIYIRVSTIHQVDKDSIPMQKKDLIAYCQLILGTDNYEIFEDAGYSGKNTDRPAFQDMMGRIRKGEFTHVLVWKIDRISRNLLDFAEMYEELQSLRVTFVSKNEQFDTSTAIGEAMLKIVLVFAELERNMTSERVTATMISRANNGQWNGGRIPFGYSYDSGTSTFSIREDEAVVCRRLKDLYLDNKSLVYTARALNADGYKTRAGADWTPTAVWIIASSPFYAGIYRYNRYKGTENRTLNPEEEWVMIPDHHPAIFTLEEHEAMKSSLKTNARYVDNPVGKPHATANIHIFQGIAYCGKCGNKMVSTPGKKHADGYRPSNYSCPLHRRSKKCDNATVNDMIVGEFAINYILNMLNAKKTFSNIDTPEELQRHLLTGSTFSDISSIEEDGLNDFFNLLSRYGSDNSYVFAIKTPRRKKASVNPELAALRKEKEKQERALQRLQDLYLYSDKSMSEKDFILRKSEISDRLKNINAQLGLITQNPDSLLSDEEFIKQASHLLIQKELKGRKYIYYKNLATSVDPEILRTYMETILDSMYIIDGRISSIVFKNGLTHKFIYKN

SEQ ID NO: 21541 - protein, 535 aa, synthetic construct
MFDNILDEYCIYLRKSRTDLEAEARGEGETLARHEKTLLELSRRLKISIKKIYREIVSGETIAERPVMQKVLSEVEDGIWKGVLVMEVERLARGDTSDQGTVAQSFKYSNTKIITPMKTYDPNDEYDEEYFEFGLFMSRREFKTINRRLQRGRMSSVNEGKYLGSIAPYGYARYKLVKEKGYSLEIIEEEAEVVKMIFDWYVNGKQMPDGTIEAMGTSLIAHELNILQIPSAKGGLWVTETINTIIRNPVYMGKIKWGSRPLKKKKVDGKIVKTRPRMSIDQMILIPGRHEAIVTEALWIKANEKLALNPSKPISPRKKISNPLASIMICGKCNRRLIRRPYPNRNDTLMCPVKECKNVSSELILVESRIMEGLKNWLASYKADWENRRVEKKEDTQVDLLGKAIKKIEKDIADLQTQLDNLHDLLEQKVYTVEKFLDRSQIISEKIKNKVLDKESLLNKLNDNESQITNKEIVIPKLEHVLDIYYKTDDPALKNELLQSVIEKVVYTKEKGARWHGSLDDFEIKIFPKLPRTHH

SEQ ID NO: 21542 - protein, 521 aa, synthetic construct
MSDRMFIIYLRKSRSDSPDMTVDEVLAKHEGILQDYARKALGYEIPEEQIFREVVSGETISARPVMRSVMQLLETGSVDGVLVVDPQRLSRGDLEDCGKIVNVFRYTDTAVVTPQRTYHLNDEYDRKFFEMELTRGNDYLEYTKKILYRGRTAAVQKGNFIGSIAPYGYRKVTIGSGKNVQHTLEIVPEEADALRLMCHLFLDEGMGFKNIAHRLDTLGIHPRKSAHWSPAAIKDMLENPVYIGKIRWNWRKTEKKMVDGQIVKVRPKSKDLNQQIYVDGLHEPIISPEIHSAILEKRGKNPRIKRSVELRNPFAGLLYCGTCGRAMSYKTFSDKRRNGKTVTSFLCDNQSNCHTKSVQYSSFCERVIETLEDTIADFEVHLKDDDGSSARTNLLIIRNLELEIKKLHDKDARQKDAFDDGIYTKEEYLTRNAKVQEQLCIAEEALEQARHAVAPVIDYREKISRFTDCVQALKNPELSAKEKNTFLKSCIKRITYYNEMESRAGIGRYVENVFTLEIELK

SEQ ID NO: 21543 - protein, 485 aa, synthetic construct
MVVLAYIRVSTDEQAEKGNSLTEQKERIEAYCKAMGWEEPIFFIEDGYSAKSTNRPELTIMLEKVKEYQNGRVITTKLDRLSRKLFDILSLNNYFVKHKFHYVSATEGFDTSTPAGMLVLQMLGMVAEFERERNSERVRENMLSIARNNTKKIITRPCFGYDIVDGKMAMNLDEALCIRRAAMKLLTGTPSRSVIGEWNAQGITTKEGNEWQDKTFRELFQRETLVGDFVYNKTTRQGDKVIKNDPSLWIREKNTHEAILDRDTFTKLQELFQGRKSVGKHMSNETYLLSGLVYCSHCGSKMNGKMNRSFSKRLNRENIHYQYLCDGYLKKGKCFHHYVQRDAIEELVISRIKEVAQAAPGTLKLVISKPQVKQVDKESIENKLAKLDKKMQKQIDAYNDDLITAEDLKAATLRVTKERDALKKILESSEEEQASRQQEELKRKARSATKAILSGDRITVKQSIRQLIERIEIKDGSQVSIVWLA

SEQ ID NO: 21544 - protein, 457 aa, synthetic construct
MPNLRRIEAAVPAIREKKKVAAYARVSMQSERMLHSLSAQVSYYSGLIQKNPDWEYAGVYADDFISGTNTVKRDEFKRMLADCETGKIDIILTKSISRFARNTVDLLETVRHLKDLGIEVRFEKENIRSMDGDGELMLTILASFAQEESRSISDNVKWGIRKRMQNGIPNGRFRIYGYRWEGDELVIVPEEAEIVKRIFQNFLDGKSRLETEREFAAEGITTRDGHRWTDSNLKVVLTNVTYTGNLLLQKEFVADPITKQKKKNRGELPQYYVEDTHPAIIDKATFDFVQEEMARRRELGALANKSLNTSCFTGKIKCPYCGQSYMHNKRTDRGYMEFWNCGSKKKKKKGAGCPVGGTINHKNMVKVCTEVLGLDEFDESVFLEQVDHIDVPERYTLEFHMADGRMITKVCPNTGHQDCWTPERRAAKAEFMKTEMARRKELRIHGAKKSHGDSGDH

SEQ ID NO: 21545 - protein, 523 aa, synthetic construct
MAQRKVTAIPATIKKYTAVPIGSKRKRRVAGYARVSTDHEDQVTSYEAQVDYYTNYIKGRDDWEFVAIYTDEGISATNTRRREGFKAMVADALAGKIDLIVTKSVSRFARNTVDSLTTVRMLKEKGVEIYFEKENIWTLDAKGELLITIMSSLAQEESRSISENTTWGQRKRFADGKASVAYKRFLGYDRGPNGGFVVNPEQAKTVKLIYKLFLDGLTCHAIAKELTERKLPTPGGKAVWSQTTVRSILTNEKYKGDALLQKEFTVDFLQKKTKKNEGEVPQYYVEGNHEAIIDPVTFDYVQAVMARRTKDKHRYSGVSMFSSKIKCGECGCWYGSKVWHSTDKYRRVIYQCNHKYKGGKPCSTPHVTEEQVKDAFVRAVNILLSEKAELGANVRAVIAMLCGSAELEKQQAELKEELEVVVGLVERCVAENARTALDQDEYSERYNGLVSRYEAVKAQFDEVTQAIADKNDRKKLLEQFLRMVETQEPVTEFDERLWSSLVDFVTVYREKDIRVTFKDGTEI

SEQ ID NO: 21546 - protein, 535 aa, synthetic construct
MEQAKRSVRVIPPTIDPKARFLTAAPTAKRRVAGYARVSTSSEEQLTSYEAQVDYYTRFIQARADWEFVKVYTDEGISAVNTRGRDGFNRMLQDALAGKIDLIITKSVSRFARNTVDSLTAVRKLKEKCVEVYFEKENIYTLDSKGELLITIMSSLAQEESRSISENVTWGQRKRFADGKVSMPYKRFLGYDKGADGLPMINEKEAEVVRRIYRLYLEGKTASGICGELEAAGIPTPAGKQKWSQTTVNSILRNEKYKGDALLQKRFTVDFLEKKMKPNEGEVPQYYVENSHPAIISAEEFDLVQREIERRKRFGRSYSGSSALASKLICVDCGGFYGQKVWHSTDRYRRVVYQCNAKFKNERRCSTPHLEETRVQAMFLKAYDTLMGDRESVIADCEAMRAMLCDCRELETEIRDLDAAAAGIAGQIQLCISKNAASAQDQEEYARGYNALAARYEETMKRRDSAMAKRAKLRERDEALRLFLEAVRQQPLILQRWDERVWNTLLESGTVCRDGSIRFLFRNGVLIEVPAPGAR

SEQ ID NO: 21547 - protein, 447 aa, synthetic construct
MERVVTRVAAPPKLPVKQRVAAYARVSSGKDAMLHSLSAQVSYYSNYIQRHAGWEYVGVYADEAKTGTKDKRENFQRMLSDCRAGKIDLVITKSISRFARNTVTLLETVWELKRLGVDVYFEEQNIHGISGDGELMLTILASYAQEESLSASENQKWRVRRNFEDGKPWNCTLLGYRNRDGELVVIPEEAAIVKRIFSEYLAGKGIETIARELNADRVATRTGESWYKSGVMGVLRNYAYTGNLLLQKTYTEDPITKRKRLNRGELPKFLASNTHDPIIPIAQYEAVQREIASRAKKYTRPFTGVNSYPFTRMLVCGKCGKPYRRKTTGAGAVWICSTYNTLGKAACASKRVPEAALEAAAAAAMGTPDFDAAEFRASVQSVVVEGNNRLTFHFKDSKPVAQTWRDRSRSESWTEEMREAAREYAKMRRRGAYGTGEAERPGHSADD

SEQ ID NO: 21548 - protein, 471 aa, synthetic construct
MESGYIEAGSVLLVESLDRVSRQDIDTAGEQLRKILRSGVEVVTLVDNEWYTKESLKDSLSMIKAMLVMERAHEESAMKSTRLRSMWAAKRERAANGEIMSKRCAAWLKVSDDRSHFEFIPENVKAVQRVFQLRLEGLSHVKIAKQMNDEGFSTLNQFKSVTGGWSQSSVTELLSNRSVIGFKVPSKSMAVKGVSEIPNYYPSIITDEQFYAVQQLKQGSGRKPSSDLPLLTNLFKGVLRCSECGFIVVVAGVSAKRSGIYKCSMKSEGRCNSVGFSRLQTDRALVQGLLYNTNRLSLNRDNGSAIGTLQSELEQLQKQRERLIKLAMLADDTESMAKDLKALNSQIKDAEKAVSEVHQREQSSQLETISHLDLTVKKDRIEAQIIIKRIVKEIRLNTAQKKCDVFLHNGLKLLNFPLDRVVDGAQWLEVLPLIDGDEFDFAEFTAKPRHIALEEAPEWVKEMEEQPNQPL

SEQ ID NO: 21549 - protein, 460 aa, synthetic construct
MQQALNAVIYARYSSDRQTEQSIEGQLRECYAFAKANDIAVIDTYIDRAISGKTDNRPAFQKMIEDSAKRQFQAVIVYRLDRFTRNRYDSAIYKARLKKNGVKVLSAMENLNGSPESIIMESLLEGMAEYYSVELSQKITRGMRENALKGKALGGQRILGYKVNSDCYFEVDETTAPVVVDIFKLYSSGKTVKEICDILNARGVKTARGGAFNKNSLHTILTNKKYIGIYKTKYGEIVGGIPAIIDKELFEMVALRMEQNKKAPARAKAEINYLLSTKLFCGKCRSAMVGESGTSKTGKKYYYYACVKRKREKACDKSNVKKDWIEDLVIQRTVADILKDDIIEQIADRLVELQKAEAAENGTMLYLQNSLAEIQVSIKNIMTAIEKGIITESTKSRLTELEDEKRNVEIEIAKESIARRIISREQIIYWISSFKDGDITSEKYRQQLIDTFVHAVFVYD

SEQ ID NO: 21550 - protein, 532 aa, synthetic construct
MAKKITKIEPVSQKYTQETAPVLRVCAYCRVSTGTAEQKDSFEAQVQYYSRMIQDKDGWVYAGIYADEARSGTKLTRRDEFHRMLQDCRLGKIDLILTKSVTRFARNTVDSIRAIRQLKELGIGVYFEKERVNTLSEKSEQLLTILSSIAQGESESISTNNRWAIVRRFQNGTYTISSPAYGYVNDENGELVIEQEEAAVVRRIFDSYLGGKGSYAIARELRQEGLPTIRYSKGWQDSVVKGILQNPVYEGDLLQQKTYTTEGVPFIKGRNCGQLPQYLIKDNHEAIITREEAEAVRQLYEYRRQRQCAEDRTIYQNRYVFSSRIICGECGSTFRRQKIYIGKPYEKIRWSCHQHIEDISKCRQKAVREDGIKQAFVQLWNRLASNYEAILLPLLSVLKAVPGDPAQERELEDLEKRIQELKKQSHMLRKVLADGNIGSAVFIEQRNQMDMELEKACHRQQLLKEQKVFEQEIAQTEYLLTVFRNRPVIIEEFDEELFLIIIQQVTVYPAQRLGFRLKNGLELEETCGKAVE

SEQ ID NO: 21551 - protein, 547 aa, synthetic construct
MATVVKKNISVIPAMPAYDRTVRPQMKALRVAAYCRVSTLMEQQESSYEAQVGYYTEKIKSNPNWKLAGIYADDGKSATSTRKRADFQAMIDDCMAGKIDIVITKSISRFARNTVDSLTHIRKLKEKNIAVYFEKEGINTLEGSGELLITILSSQAQEESRNISENCRWGIVRRFEDGKVIVNHSKFMGYTKDKDGNLIIVPEEAEVVRRIFRLFLEGNSSYRIKQILEADGIRTATGNTVWQATVIDKMLVNEKYMGDALLQKTYTVDFLTKKKVMNKGIVPQYYVEDDHEPIIPKELFHRVQEEKARRASIYRADTKKKNIEIKGKYSSKYVLSDIMVCAECGQPYRRQVWSKYGAKRAVWRCDNRLKHGSKRCKHSPTLKEEILHEAIMTAVNSVVEDQGEFVQAFRENVIRIIGSYSAAAEPTEYDSQIEELQKKMMKLIEDSAKAESADEVFDKEYRIIADEIKELKKKKTKVVRERQLAESYDQRMQDMESYMRKTNYLKKEFDDDLVRRLLRAVRVINESKIEIQFQSGIVMIQRIDFED

SEQ ID NO: 21552 - protein, 415 aa, synthetic construct
MKKIRLVLPPPKEQKKLRVAAYCRVSTKSKAQKESLRNQILYYTERILDNDNWEFAGVYYDFGKTGLRKKGRAGLERMLKQADKGKIDYILTKSVSRVSRDTLELLNIIRFLKERGISMYFENEKLDSLNPVAEAYITLSGAVAQEESRNISENMQWAVTRRFEQGTFTNYKAFMGYQCIEGELVIVPEQAEVVKMIFDFYLTGYTFAQIKAELEKRNIKTATGKSQWDTTTIQKMLKNEKYKGDSLFQKTFTEDYLNGIRKKNEGQRPKYYVKDSHPAIISPEIFDRVQEEMFLRARLVLDEKGEKSNIGNRYSSKYLFSNLLVCGNCGAGFRRRTERGKIVWRCGTRMEKGKMVCGCSPTLQDEKMKRILAVAVCGGVYDENIVKNKVKRVDVYEKQIIICFAEENEYKVCSL

SEQ ID NO: 21553 - protein, 464 aa, synthetic construct
MAKTVRKVKNQVHGTIPPAIKKLNRKVAAYARVSTDSEQQQTSIDAQKDYYVKMIEYRLDWSFAGLYVDDGISGTRIEHRDGFNQMMQDALDGKIDLIVTKSISRFARNTVDSLSAIRNLKEHNVEIFFEKENIWTFDSKCELILTILSSVAQEESRSISENITWGKRKRFADGEYAVPYGRFLGYDRGMVINEAEAVIVKKIYYLFLLGMSAYQISKILTEQCIPTPGGKKNWSTSVVNSILTNEKYKGDALIQKSFTVDFISKKQKKNEGELPKYYVTGGHVPIIPPPLHGYVQTELQRRVDFQHGRYTGVRPFLGRIMCENCGAAFRHSSWHSTTYSDWVWECSSRWRGKKCGAIHIYDEQFQTLLREALQSEIYNRTEAISAVITHLQSLPDMTAKRQQWCLDALAQFKSKPAADVQLAQADAILTIKTIHIGKQRKMKITLLDDTEIIIDVPPYTPRRG

SEQ ID NO: 21554 - protein, 534 aa, synthetic construct
MVVQKKVTTIPASLTRFTATPITELKKRRVAGYARVSTDHDDQFTSYAAQIDYYTNYIKSRDDWEFVEVYTDEGITGTSVKHREGFKRMVADALAGKIDLIVTKSVSRFARNTVDSLTTIRQLKEKGIEVYFEKENIWTFDGKGELLLTIMSSLAQEESRSISENCTWGQRKRFADGKVTVPFNRFLGYDRGPDGNLVVNPEQAVIVQQIYAMFLQGMSYHGIAKKLTADGIPTPGGKEKWSISTVRSILSNEKYKGDALLQKSYTVDFLTKKTKVNEGEIPQYYVEDNHEAIISPEIFAMVQREMTKRGRGKNYHSSVHAFSSKIKCGHCGSWYGSKVWHSNSQYRKTIWQCNHKFDGDERCDTPHLCDEDIQRLFLSAANKLLVDKAEVIANCHEMMDLLFNTTELEAEQATLLEETQLISDMVQQTIYENAHVALDQTEYQKRYDNLTQHFETAKQRLETVMAELDRMQTQRGDAEVFLECFEALSDTITEFKLDNWHSLVDYATVYSADDIRFTFKNGQEVQCGGCCDEE

SEQ ID NO: 21555 - protein, 592 aa, synthetic construct
MRKINKIEPLMPTLPSRKKVAAYARVSMETERLQHSLSAQVSYYSELIQSNPEWEYAGVYADDGITGTKSTRAEFQRLLQDCEDGKIDIVLTKSISRFARNTVDLLETVRHLKELGIEVRFEKERINSLSGDGEVMLTLLASFAQEEIVSLSNNVKWATQKRFQQGLHNGRFQIYGYRWEGDQLVIHEEEAAIVRLIYDNFLNGLSAESTEKQLAEMGVKAYKGGHFGNGSIRQILSNITYTGNLLFQKEYTVDPVSKKSKINRGELPQYFVENTHEAIIPMEVYQAVQDEKARRRELGVFANWSIQTTCFTSKIKCPHCGCSYVHNKRTKNGNVQEYWNCGSKKKKKVGDGCPVGGTISQKSLLKACTEVLGLTEFNEDVFLDQVDHIDVPEKYTLVFYLKDGTTVTKEAPNTGHQDCWTAEYRAKVSKRRMGKNHNKKHLNPFTGYFRCPDCGANFRRQTHKYKDGTMRIYWHCPDAPRCGNQAKPNEDTMKNLLAELLGLPEFDEATFKETVSHIDLTGNYEATVYYKAGGTDIITWEPVPKKSYPHTEEYKELMRERMNEYWTDERKAEMSTRVKKLRSEKHWSSKRK

SEQ ID NO: 21556 - protein, 498 aa, synthetic construct
MEIQIREGNREQKRKLRVCAYCRVSTDADEQENSLENQIRHYETVIKANPAYEYAGVYSDFAISGFKEKRPGLQKMLADAQKGKIDLILTKSVSRFARNTSIVLEATRKLKELNVGVFFELQNINTLSGEGELMLTILAAFAQAESESGSTGAKMVYQRKYEAGIPVQYLERSFGYTKDERGVYIADESEAVWVRKIYEMAADGYTPAAIKRYLNENGVKTVGGTKWIDSTVFRLIENEIYKGDYIMHKHFVNEERKLVRNRGEVDAWYIEDDHEAIVSPELWQKAQDAIEAKRDYLAEGSVIEEFTEDNYPYMNRIFCAKCGHPLYKRIYSNGNRLNWGCSGTKRYGKSFCEGINIPDGVLRKAWHFDGNMYIDEKPSVKGTKEFTYLKESSWKRRHKKKVPEAIPENTEEAYPYRKKIFCGLCGSRLVRHVNPKSHKVIWICNGAKRKGVAFCGGTRIPDSVIRGWGEIKKDIYIQRKDDKNGKKRYSYTSKKPTA

SEQ ID NO: 21557 - protein, 490 aa, synthetic construct
MKNVKRLETIPSLPQVRINTRPIEKVAIYARVSTDHEEQQTSLAAQKDYYSKLIEAHTEWELAGIYADDGVTGTSYMKREAFQKMMADCENGKIDRILTKSVSRFARNTVDALNAIRKLKSMGISVYFEKSIDTLDSKGEFLITLMTSLSQEESRSISENATWGFRKRFADGKYSCGYSRFLGYDKGYVINQEEAATVKLIYKLFMDGLTYHAIAKELTKRELKTASGITHWSQGSVKSILTNEKYKGDALLQKSYTVDFLTKKVKVNEGKVPQYYVEHNHPAIIEPELFDLVQTEIERRNNGKARYSGVTIFSSKIQCVECGGWYGSKVWHSNDKYRRTVYQCNNKFRHKTGCKTPHLTEYEIKEYFVKAVNHLITEKDEIIANIKMIRKMLCDKGDLLKQKETLEAEIAVTVELVQNLMEENTRKVQDQDDYNMKYDAMVDKYKKQKEKYEKVCSSIENKDARYEQLGRFIKVLKRQDNLITEFDETL

SEQ ID NO: 21558 - protein, 587 aa, synthetic construct
MRIVNKIEPRVPQMPTRKKVAAYARVSMESERLQHSLSAQVSYYSGLIQKNPAWEYVGVYADNGVTGTKAEAREEFNRMIADCEVGRIDIVLTKSISRFARNTVDLLNTVRHLKELGVSVQFEKERIDSLTEDGELMLTLLASFAQEEVRSLSENVKWGTRKRFEKGIPNGRFQIYGYRWEGDHLVVQPEEAKIVRLIYDNFLSGLSAETTEKQLAEMGVKSYKGQHFGNTSIRQILGNITYTGNLLFQKEYVVDLISGKSRINRGELPQYWCEDTHEAIIPLEVYQTVQAEKVRRRELGVFANWSINISCFTSRIQCGRCGKNYQRSNRKGRKDSNANYPIWICGTRRKTGNAQCQNKDIPEPMLKDACTAVLGLSEFDETVFSEQVERIVIPAPNEMVFYFKDGRVVPHHWESTMRKDCWTDERRAAKGRYIQEHQLGPNTSCFTSRIRCAACGENYRRQRSRHKDGSYDSVWRCASSAKCDSPSIKEETLKAIFADALGLSEFDEKVFREQIACIHITAPFRLALHFFDGRTVEAEWQNKRNMPKHTEERKQHMREVMIQKWRERHGESYNDTGNDNPVHSDTN

SEQ ID NO: 21559 - protein, 525 aa, synthetic construct
MAKVTTIPATITRFTATPINEKKKRRVAAYARVSTDSDEQLTSYEAQVDYYTNYIKGRDDWEFVSVYTDEGITGCNTKHREGFKRMVADALAGRIDLIVTKSVSRFARNTVDSLTTVRQLKEKGVEIYFEKENIWTLDSKGELLITIMSSLAQEESRSISENCTWGQRKRFADGKVTVPFKRFLGYDRGPDGNLVLNPAEAVTVRRIYSMFLQGMSPYGIAAKLTADGIKSPGGKDKWNAGAVRSILTNEKYKGDALLQKSYTVDFLTKKKKVNEGEIPQYYVEGNHEAIISPEVFEQVQQELEHRRNSQGRCSCVHLFSGKIRCGQCGEWYGSKVWHSNSKYRRVIWQCNHKFDGDEKCTTPHLTEDEIKAMFISAVNKLITQKDSIITALTVSLDTAFDTANLKSEQAGLESEIAVVSDLIEKCIYENAHVALDQTEYQKRYDELTARFDTAKARYEAIAETIHSKQSRRATIEAFLETLTKVELVDKFETTLWCGLVEFVTVYSKDDVRFTFKNGQEIHCNG

SEQ ID NO: 21560 - protein, 514 aa, synthetic construct
MAKKEVEGLVAVIYARYSSENQREESIEGQMRECYAFAKKNGISVVGEYIDRAFSAKTDRRPDFQRMIKDSAKHNFNLVIVWKLDRFARNRYDSAHYKALLKKNGVKVMSAVERISDGAEGILLESVLEGMAEYYSADLSEKVLRGHTENALKCKYNGGTMPIGYYADKEQHYVADSLTAPFVLEAFRHYDEGLTMSEIAAVLNQHGLKNKRGGDIDIDSVSRMLSNRKYIGEYRYRDIVIPNGIPALVPQDLFDRVQEKIAKNKKAPARHKAEDDYLLTTKLFCGECESLMVGECGTSRSGTVHHYYKCTNAKRHGGCRKKAIKKDWIENLVVLEIRKKLEDACFINDIVHAFMEFQTAENTVIPHLKQSLAELNKSIDNILAAIEHGIFTQSTKQRLEELESKKKDIEIEIAKESIHRPLLNEDQVRFWFERLRNLNINELSQRKRLIDTFLNSVFVYDDKLLINCNYPNTSTIVRFSDINATLNGSDILACGRPDRVVIRDFTYDHSIFLF

SEQ ID NO: 21561 - protein, 493 aa, synthetic construct
MKTCIYLRKSRADIEAEKEGEYETLHRHKTTLLKVAKERKLNIVDIKEELVSGEYVEHRPRMMELLEEVKNKKYDAVLVMDLDRLGRGNMQDQGLILDTFKTSKTKIITPRKIYNLDDEFDEEYSEFEAFMARKELKLINRRLQRGRAKSIEEGKYISPDAPYGYEFKYDDRGKKYLAINEEQAAAVKLVFSMYLENKGATKIANKLNALGYETNNHIEFKAKAVRDILSNITYCGYVKWKTIDRKNHSRLRPDGEQIIAKGHHEPIIDEFTFNKVQEIRKGKYISPSKNKVSNPLAGIVICKKCGHNIIQKISRGKTYLWCRHCDNKSSSLDYVEDAIINSLQGWLENYKIKIDLKDDTEEIDQIKFELKKLQRELKEAEKQKGKLYDFLERGIYDDKTFLERSNVLESRIDDLKNQISECNLSIISYKDNLQAKKQIIPSLEKVLYNYSRSNDAKEQNLLLKSVLDKVLYEKAKDASKDEFILEVHPKLPK

SEQ ID NO: 21562 - protein, 518 aa, synthetic construct
MSNLINSNMEQYAIYLRKSRKDEEAEAMGLGETLARHEQLTLDLAKKMNLIIGKIYKEIVSGDSISARPIMQELLQDVESGMWKGVIVVEVERLARGNTIDQGIVAETFKYSSTKIITPSKIYDPNNEFDEEYFEFGLFMSRREYKTIRRRLHSGTLASVKEGKIVSQPPFGYDKYKLKGKGYSLKPNKDAPIVKMIFEMYTSGRNLGEIITEIEKMGIKPPKNGKIWYKTTIQRMLVNITYTGKIKYIDKRYLKKRNNLGKIVYVKNPNPEVYLIDGLHEPIIPEEIFNKAQEIYKNNQLADTRTKEQFDLKNPLSTLLKCKICGRTLKRLYSCSSFTTCERIGCKNYDVASSHLDIVEKKVFEGLKELLKDYKLDLSKNHLNNEITTLIKNTNTQIDQLKIELEKTNAQKEKLYDFLEQGIYDKNTFLSRSNKLAEKILEINNKIDELKNLKSSYSTIKNKKEEFIPKVEGIIETYPLANTEQKNKLLKSCIEKIEYYKPKGSRKSDFEITIYPRI

SEQ ID NO: 21563 - protein, 446 aa, synthetic construct
MQREVIKIKSDFYALPLKNKVAAYVRVSSGKYAMLHSLSAQISYYSELIQKNPQWEYVGVYVDEAKTGTKDNRQEFQRLISDCKQGKVDMIITKSISRFARNTLTVLETVRELKSLGIDVYFEKENIHSMSEEGELMLTLLSSFAQEESLSVSENCKWRIRDKFKCGVPLNSKTLGYIYENGNFEVDSSEARIVKMIFEDYLNGMGMLMIAKKLEKMKVKPRHSTKWNKNSVRTILQNEKYMGDLILQKTFVKDHISKKHCINKGELPKYYVEKSHTPIIDKDTFLRVQDEIAKRAKKYSKGSNLNTYAFTSKIKCNLCGKSYNRKIAASGTKYEKPIWICSTFNTYGKKYCPSSQIPEEILETISAEVLGISHFNKNVFEEKIKQIIVPNKGELQFIFKDSSQVKRTWDYPSRSESWTPEMRQLARENKINSIERSKNFESSCKL

SEQ ID NO: 21564 - protein, 531 aa, synthetic construct
MNRAVNYNTDISRKITVIPATRNIFTDLHVAEKILRRVAAYARVSTDSEEQLSSYEAQIDYYTKYIKSRSDWEFVNVYTDEGITATNTKKRDGFKQMIQDALDGKIDLIVTKSVSRFARNTVDTLTTVRKLKEKGVEVYFEKENIYTLDSKGELLVTIMSSLAQEESRSISENVTWGQRKRFADGKVSLPYKHFLGYEKGEDGFPKIVGKEAKIVRLIYRLFLEGKTISAISTYLTNEKIPTPAGKEKWATSTVKSILTNEKYKGDALLQKCYTVDFLTKKKKKNNGEIPQYYVKNSHEAIISPEIYDLVQDEMKKRKLSECGHSSTSPFSSKIVCGECGGFYGSKVWHSNDKYRKVIWQCNAKFKNKEKCKTPHLSEEQIKEEFIKAFNNLIENKESIIKDCEEVILSIIDTKAIDDEIIKLEEECKVIVELMKSLIYDNSRKPMNQDEYNQKYDFYTDRYETAKDKLASAEEKKQDLIVRHDKIDAFINHLKLNDNLLSEFDEKLWYAMVDKAIVNTDGSVHFKFKNEN

SEQ ID NO: 21565 - protein, 653 aa, synthetic construct
MKKKNNRKKCYIYTRVSTAAQTEGFSLEAQQERLYEYAEYRELEIAGDYCDAGKSGKSIKGRPEFQRMMDDIISQKDNISYVLVFKLSRFGRNAADVLKSLQLLTDYGVDLVSVDDAIDSSTQGGRLTLTILSAVAEIERENITDQFMAGRLQKIRDGKWSGGSVPYGYRSVDRELTIDPYEASIVRKIFDLYMEEDMGATSVAVTLNDEDYLRKENGGVDQRPFTYDFIVNVLDNPIYCGKLIFGRRTNKKGPDGKLLKPDPKHAVIAQGVHETILTEEEWNAVQEKRERLSKNRYELDNPERISLLSGLVRCPMCGSGMIHTKNKRINRNHGGYYKTIHYYACNNSRKSNGMTCLFRHTYNQEKIDSSVFEIIQRLTTLPEYKNAVTANLQNQATVEQLEERLKQERKELRKEELNNRKLGEQLDALDIMADGYEVTYDQILAEIDEGYDKIEEIERKIRSIMRKLESLKQGFKASENIERMLNHFTKLYDHMSCQERREMYRLFIEHIEVLPETRKDGKMLKSISFRFSTEYGEDILTPEGDKDDDICFTLDCTKQALTKAEAKATYAELKKYILETNGVKVSSLYIAQIKRKYGIDMGANYNMAADPEKHVPTCPAAKEQIIIDALKHYRMLDPSVEMIPNSEVVTNES

SEQ ID NO: 21566 - protein, 577 aa, synthetic construct
MKAKKDRCYIYMRVSTSMQVEGYSLEAQKERLTKFADFQHMEIVREYCDAGKSGKSIIGRPEFTQMLQDVANDRDGVKYILVFKLSRFGRNAADVLNSLQYIQDFGVNLICVEDGIDSSKDSGKLTITVLSAVAEIERENILVQTMEGRKQKAREGKWNGGQAPFGYNLDKENDTITIDPEAAEVVRIIFQKYVHEDMGLDSICNYLNQHGYTKKKTRAQENNYFTRTFLARILDNPVYVGKIAYGKSTTEKVKGTRDQYHRVKVDNPLIAEGKHDAIISDELWEAAQAKRKEMGVKWNKTHSLDHEHILSGIIKCPICGTGLAGTVRRRKNKKSGEYKDDFYYRCLHRKKIDDDHFCDYKPSLNQDELNHQIEAVISDMVNDESFMGFIQDKLGQKVDVSQLETEREKLRGQLRQLSGAKKKLTDMLDALDVNDRHYDRKYQDMQDRLDNLYDKISEVEDAIQDITDKINAVYGEHLTAQELYKVLEHFDDIYFKMSDLEKKEFFQNFIESITIYPDKKTNERIVDEIDFKFPIYYDGKEGRAIRLLNETTVETVCLLTAGNREDVRRIAEPDAEQ

SEQ ID NO: 21567 - protein, 588 aa, synthetic construct
MRIVNKIEAKTPQMPRRKRVAAYARVSMESERLQHSLSAQVSFYSSLIQSNPAWEYVGVYADNGITGTKAEAREEFNRMIADCEAGKIDIILTKSISRFARNTVDLLNTVRRLKELGVSVQFEKERIDSLTEDGELMLTLLASFAQEEIRSLSDNVKWGTRKRFEKGIPNGRFQIYGYRWDGDHLVIHEEEAKIVRLIYDNYMNGLSAETTEKQLAEMGVKSYKGQHFGNTSIRQILGNITYTGNLLFQKEYVVDPISKKSRINRGELPQYFVENTHEAIIPMEVYQAVQAEKARRRELGALANWSINTSCFTSKIKCGRCGKSYQRSNRKGRKDPNANYTIWVCGTRRKTGNAHCQNKDIPEQMLKDACAEVMGLDTFDEIIFSEQIDHIEIPAPNEMIFYFKDGRIVPHHWESTMRKDCWTDERRAAKGRYVQEHQLGPNTSCFTSRIRCDSCGENYRRQRSRHKDGSFDSVWRCASGGKCQSPSIKEDALKNLCADAMGLEEFSETVFREQIVCIHITAPYQLSIRFFDGHTFETAWENKRKMPRHTEERKQHMREVMIQRWREKRGESNDNTGDDKPIHGNADQ

SEQ ID NO: 21568 - protein, 527 aa, synthetic construct
MAQRKVTAIPATISRYTATPINSTKKRRVAGYARVSTDHEDQTTSYEAQVDYYTNYIKSRDDWEFVAIYTDEGISATNTKKREGFKAMIADALAGKIDLIVTKSVSRFARNTVDSLTTVRKLKDEGIEIYFEKENIWTLDSKGELLITIMSSLAQEESRSISENVTWGQRKRMADGKVSFAYSRFLGLDKDKETGKIVVNPEQAETVRLIFHLFLEGMTPHSIAAELTSRGIKTPAGKDVWNQQTVRRMLSNEKYKGDALLQKEFTVDFLQKKMKKNEGEVPQYYVEGNHEAIISPAVFDLVQAEFAKRTKGGTRYSGVSIFSNKIKCADCGGWYGSKVWHSTDRYRRVIYRCNRKYSGEDKCQTPHVTEDEVKAAFVSAYNQLVTEKKEIIANAEIIRKTLCVTDALQEEKGKLEEEMAVLVEMTQNIVAENARVAQDQDEYQKRYDGLVQRYDTAKARYDEVVAAISAKEAQSERLADFIKVLKAQDGTISEFDGSLWGSMVEFITVGRDKEITVTFRDGSEILA

SEQ ID NO: 21569 - protein, 591 aa, synthetic construct
MAKITRVEQAVPTIKTKKKVAAYARISMESERMNHSLSAQISYYSSLIQKNPDWQYAGVFADDGISGTGIAKRDEFKRMIEAADNGEIDIILTKSIQRFARNTVDLLQTVRHLKDIGVEVRFEKEHINSMSGDGELMLTILASFAQEESRSLSENCKWGIRKRFEKGIPNGHFRVYGYRWEGDDLVIVPEEAEIVKRIFQNFLDGKSRLETEREFAAEGITTREGCRWVDSNIKVVLTNVTYTGNLLLQKEFISDPISKQRKKNKGQLPQYYVEDTHPAIIDKATFDYVQEEIARRKELGPRANKSLNLTCFSGMLKCPHCGQSYMHNKRTDRGFMEFWVCGSRKKKGGRCPVGGSINHENLKKACAAVLGLDEFDEDAFHDRVDFINVPERGMLEFHLKNGEVITKDCPNTGHKDCWTAEYRAKTSEKRRKRPNCKGSSVMTGKIKCVGCGCNFRRATQPSSTSESGKAYYWRCAERDGCETVGLREDVLKPFIAETLGIAEYDDGEFEKRIDHIDVLSATEMVFHFKDGRTVSRTWEQPKRVGRPWTDEQRAKFKESIKGRYTPEVRQQMSEHMKQLRKERGKAWRKEK

SEQ ID NO: 21570 - protein, 476 aa, synthetic construct
MWMEDKIITEIAPLPKPATFKESAKAILRVAAYARVSTDHEDQQSSLAAQTEYYEKKISEHPGWQFVRVYVDDGISGLRTERREGFNRMVEDCLTGDVDLVLTKSISRFARNTVDSVSTIRKLKEKGIAVYFEKENIYTMDSKGEFLLTIMSSLAQEESRSISENVTWGQRKRLADGKTSLAYSRFLGYDKGKEKYEMVVNEEQAVTVRRIFFMFLQGYTAHSISKVLTDEGVPAPCGGTVWYARTIQSILQNEKYKGDALLQKEFTVDFLTRKLKKNEGELPQYYVEEDHEPIISPWLFDYVQKRLKERGDVPGRYSGVTVLSSKLECGVCGSMYTPRPWHSTSYNNLVWQCRNRTKKGPKCPTLNVYDRLLHFVIHDAARDAAFKRGVPQSVADIVIAIVGEERADDVRQWVRTFQKKNAWRMLSDEDDLALVLRRITVMPDRKLKMRWLDGKQTTCLLPKYYPTKVIEDYDDK

SEQ ID NO: 21571 - protein, 579 aa, synthetic construct
MAKKQRCYIYTRVSTELQIDGYSIEAQKERLRSEAKHRKMQVCGEYSDEGKSGKNIAGRPEFKKMLSDIKSGKDDVDYVLVFKLSRFGRNAADTLNSLQFMEDYGVNLLCVEDGIDSAGAAGKLIISVLASVAEIERSNISEQTMAGRRQKARDGLWNGGFAPYGYKLVAVEGQKSKMLVINEDEAKLIKLIYEKYLSGMGVNAVAKWLNDNGYRKTVRQNGTVPLISDHFVKGVLDNPVYAGKIAYGRRRNEKVAGTRNEFHVVKQDKDSYKLYQGQHEAIIDEETWYKVQVKRMKNAFKREKTHSLLHEHVLSGVVKCPVCGAPMYGVVNRKKKKGSDEFYADMWYYICKNRKMVSGHPCDYKKHIRQDEINAEVIQMIKYVFGGENSMKDNVLNKVGTDDSLKELEAEKTRLVDERAKLNTKKTKQLRRINELDIDDDLYDDLMKSYRAYLGEINDQLASIENLLYQNELAIENAQGENLSTEVYKRLIDATIENIDDVSDADKKVLMNALLEKVEIFKEKQKDGRWVKSVQFKIPLNIDGKLVDTMFFDDDEDTENSLSNEKHVETVCLMSRKDK

SEQ ID NO: 21572 - protein, 524 aa, synthetic construct
MKKITKIDGVQNNKNNSTVNKELRVAAYCRVSIGSDAQLESLEAQKTHYERYINSRKDWKFAGLYFDEGITGTKAEKRPELLRLIADCEARKIDFVITKSISRFSRNTTDCLALVRKLQSLSIPIFFEKENINTGSMESELFLAILSSMAEGESASISENSKWSIKRRFQNGTFKLSYTPYGYDWDGENMIINPAQAAVVKRIFADILSGKSTNAIADELNAEKIPSKKNTNWTSSTIRGILANEKYTGDVIFQKTYTDENFNRHTNYGEVDQHMAPDHHEAIISHADFEAANALVSQRALEKGVKKGSDKYQKRYAFSGKIICGECGDTFKRRIHTCTTYKYVAWACNTHLKDKSTCRMKYVRDDDIKAAFVTMLNKLIYGHRLVLVPYLKALENSSGDEALQRIQHFELLLDQNSEQRETLTKLMAQGYIDQILYNQETNVLLLQAEAYRSDIETITICMTGDSAKVTETNLLLHFVSHVDMLTNYSEELFESYADHIEISDRNEIRFVMKCGLTFTERIGD

SEQ ID NO: 21573 - protein, 553 aa, synthetic construct
MNKPKIAIYARKSVSTEKGESISNQIETCKNYAETILGAETNQLVIYQDDGFSGKNLVRPQFQRMLSEIENGGYSHIVCYRLDRVSRSVADFSGLLKELQDLNVDFISVKEQFDTSSPTSKAMMYISAVFAEMERETIRERVIDNMTSLTSTGRFLGGKAPDGYTKQTVEEIDPTGKKKKHNILVINKERAEQVQDIFKKYLEWQSIKRIESYYAQHSIYNHTGYAYKCISLRRILTNPCYCTADEQAYNYFESLGCKIMMPKSAFDGRYGITVYMRHKMIINKNNKKQAVEKTPDEWLIYVGYHQPLVTSGDYIKAQEIINQRRSLSIRKPIGVHGILSGMLRCGNCGDYMRPSNVAQDENGAYNGKRFYYICENKSVSARHNCSIKNIRGDKFDMEIIDRVEKLLNDDNDIIKNIRNTTSKSSIIDIEKEKRIINSEISKKQLAISNLIMKIATADEILQKYISKQVAELDENIKGLQTKLKNINEQEDISSKERLEIERIEAVITKIRSGALRREIKLPEDMLVIRNTLKEIIDTIVWDGRTATINFKKL

SEQ ID NO: 21574 - protein, 527 aa, synthetic construct
MEKNRAVLYLRLSKEDVDKVNKGDDSSSIKSQRLLLTDFALERGFKIVGVYSDDDESGLYDDRPDFKRMMTDAKLDEFDIIIAKTQSRFSRNMEHIEKYLHHDLPNLGIRFIGAVDGVDTESAENKKSRQINGLANEWYCEDLSKNIRSAFKAKMKDGQFLGSSCPYGYKKDPQNHNHLVVDDYAAKVVQKIFNLYLEGYGKAKIGSILSSEGILIPTLYKTDILKQNYHNSKALDTTQNWSYQTIHTILNNEVYLGHLIQNKVNTMSYKDKNKRILPKEKWIIVRNTHEPIITEEMFQDVQKLQKNRTRSVENIEPNGLFSGLIFCADCKHAMSRKYARRGEKGFVGYVCKTYKTQGKNFCESHSIDYDELEEAVLFSIKNEARSILQQEEIDELRKVQAYDETKSYYEMQLENIKSRMEKIEKYKKKTYDNYMDDLISRDDYKKYVTEYDKEIGELKQQQELINSKTDLEKEISTQYDEWVEAFINYVDIDKLTREIVIELIEKIEVNKDGSINIYYKFRNPYIS

SEQ ID NO: 21575 - protein, 503 aa, synthetic construct
MNNRIDAIYARQSVDKKDSISIESQIEFCKYELKGGNCKEYKDKGYSGKNTERPEFQQLMRDIESGLVRKVVVYKLDRISRSILDFAKMMDYFQKYDVEFVSSTEKFDTSTPMGRAMLNICIVFAQLERETIQKRVQDAWHSRCQRGFKMGGKTPYGFRTEPYVMDGIRTKKLVIEPTEAAFVRQMYEMYADPQVSLHDITKKLTADGMRTYHGRPLSRATLSVILRNPIYVMADLDIYEFYKSQGTDIYNDAADFAGTNGCYYYQGKGNTEDKHKHLQGQTLVLAPHEGFIPSELWLKCRKKILASHTYQPARKARNTWMAGKIKCGKCGYALMSAHSNGILYMRCTVHADSGACPGCGCVKLHELEAVVYGAMVKKLKDFKTLTGRKKAAKISPKLAAKRLELAQVESEIEKLLDTLTGASPVLLSYANSRIEELDAKRQNISNEIAKLSADAVPAEKIESISGYLDDWENVSFEDKRQVVDALITVIRATNEKVEIEWKI

SEQ ID NO: 21576 - protein, 528 aa, synthetic construct
MKMMQNDNRTAITYYRYSSHRQGEQSIEGQRAEAERWAKTNGYTIVREYADRAMTGTNDDRDQFQLMLRELERLRPAVLILWKVDRMGRNKEEIAFNKYRCKKNGVKVIYTAESIPDTPEGVILESVLEGMAEYYSLQLSQNVRRGHRVSASKCQSTGGACPLGYRVGPDKRLEIDPEKAAIVRQVFERYANGETQPEIIQSLNEQGLRTLRGKPFSRNSLRTLLKNEKYIGVYTYNHGEVRVEGGVPAIIDVEMFQKAQKMLKFNKRSSSHKWTKANYLLTGKLFCGCCGEQMCGVSGYSSTKVKYHYYACSGHHNYKKARSTCRKKNVKKEWIEGLVLREAKLLLLNEDLLDFIAENTYQYYVEANTDTAYTDALQANLREIERSLENIMRAVEAGIFNDTTKARMEELEAQKQQIRHALDLTKLDRGLQLTKDHILYFLKRFRDLDFENAACQRQIIDTFINSVFVYDDHITLTFNYSGDDRTITLAETDAAAGGESFVFAPSCGTKKFRSRFGFGTFFVTCFVL

SEQ ID NO: 21577 - protein, 556 aa, synthetic construct
MKAALYVRVSTTYQIDKDSLPVQRQDLINYAKYAFNIDDYKIFEDAGFSGKNTNRPAFQNMMDRIRSREFSHLFVWKIDRVSRNLLDFCDMYEELKKYNCTFVSKNEQFDTSSAMGEAMLKIILVFAELERKLTSERVTSIMLARAEKGLWNGANVPLGYSYDEETKYPVINENEAKTIRFIFDMYEKRQSTAAISKYLNENNVHTKRGGSWTSKGIGDIIHNPFYYGTLRYNYRESARGKKKSEDEWIVKENNHEGIISKEQWLRCNKIIEENAKKNASRFRSMNQIQHIFGGLIYCKTCGAKYICSLDKPRKDGYKPSRYICGGKIKGVICDNKIVTDVTIGDFMLQYVLNFISCINKIPSNLEDLENRLLGNYDVCLDYDSLYDTFSMLAYIKQMRKNNYKYEDLDKIVDFEKVKSNKSEIDSLLENKSKLERAAERLTNLYLYDDVPMSEREFYKRKTEIEDKLSEVNEKLNALNNEKNKPKITDLGFMDEMDDLLLRLDFTGSSLRELTMNNDRKILKDFFETIIEKIIVCDKRVDSIVFRNGLVHKFYYK

SEQ ID NO: 21578 - protein, 427 aa, synthetic construct
MRVRIIEPTIVKDTKKRVCAYARVSTDHEKQGESLENQIGYYERLIGSNPEFEFAGVFADRGISGTTDNRPEFKRMLELAKEGAIDVIITKSISRFARNTTVVLKRVRELKELGVEVRFEKENINTLSGDGELMLTVLSSLAQEESKNISENIKWRIRKKFERGELIINTNRFLGYDKNENGDLVINEEEGEIVKRIFEHYLKGKGVFTIAKELNAEGIPTVAGGNWQESTILNMLKNEKYKGDIILQKYYTPDHLKKGTIRNNGKLDSYYIEGNHPAIISKEEWDAVQKEMKLRAEARGNVGDQSKYQKRYPLTGMLYCGKCGSSLKRRTWNSKLPCRKIVWQCSNYIKNGKNTCPGTKIDDEVAGRLDIKEETVVQEVIKNGKKHYHYSSKCKHEGKSRTVRTPEKENGSVLPGIDRPIRTVIKL

SEQ ID NO: 21579 - protein, 444 aa, synthetic construct
MAAYCRVSTDQLEQLSSYEAQVEYYTTYITTHPDYELAGIYADEGISGTNTKKREQFNKMIEDCKNGKIDMIITKSISRFARNTLDCLNFVRQLKDLGIGVIFEKENINTLDAKGEVLLSILSSLAQDESRSISENSTWGIRRRFEQGKVALNHTKFMGYDKGEDGNLIINESQAKIVRRIFKDYLDGKGPNRIARELEEDRVPNWNGKAKWYEGSIRKMLSNEKYKGDALLQKTYTVDYLTKKRVENTGQVPRYYVEDNHPAIIDKDMWEAVQLEMERKKVFAENHGFKRIDYGTSDNPFAGKVICGDCSSAFGRKVWNSNDDRFRRKVWRCNKKYAEKGKKGCNNTHIEDKVLYQIFINVFNAILENSEYFIQKWGEKEKGENQLEKYKAKQFIEIITKAKPLENFDMNLFFKLVEKMTVYKEEKVIVTLLDSTEVECQIDK

SEQ ID NO: 21580 - protein, 510 aa, synthetic construct
MRCAVYVRVSTDKEEQKASLGNQKDLFIRYISDRGWDIHNFYVDVESGTTEKRPQLQQLIADARAKKFDVILAKELSRLARNGRLSYEIRDIAEQSKIHIITLDNAINTLEGNGQMFGIYAWMYEQESQRTSERVKAALRSRAQKGLFKGSNPPYGYIVEGGRLKLSPDETPDIVRRIFRDYLSGKGFDRIARELYEEGFATPAQIAGKKNASDKWHGSTVRKILENPHYTGDLVQGRTTTRSVTNKNRNQVASDKFIIVPNTHEAIISKSDFEAVQQLMKSRKRTRPQAEMHLFTNTAYCADCGRGMHYKKNCKGYMCGNYNKHGIKACSDHLIREADLKLAILNDLKNLASILDNQEILQTLEAKLNQQKKNSEKQIRDFERELDRLKQKKKKSLNLFIDEKISKADYDDFINDINNQMNSINSKIEQLKSSLEANNDELAFNEVKQQLDAFIEFQELTPEILHRFIERIEIKADGSPRIFYRFSNPSALYLINSINAQHSTCVIINC

SEQ ID NO: 21581 - protein, 518 aa, synthetic construct
MGYRYCAYLRKSRADSENRLATDTEILARHERLLVETARRRGMAISAVYREVVSGDSISARPEMQRLLTDVMAGMWDGVFVVEVTRLARGDTIDQGVVAQAFKYSDTKIITPDRVYNPASDSDEEYFEFGLFMSRREYKMINQRQQRGRLASIKEGKWISNIAPYGYTRVKLDKQRGWTLQPDERAPVVQDIYRWFTSTDSPRLGVPKIVRRLNESGIPSATGGSWTNCVVRGILSNPTYAGFVRWGNRARKKTYRDGQLTVSRPRARPGEAMLFPGLHPAIVDKGTFDLAQAQLAKNKSHPGPKQVPMKNPLSGLVICADCGRAMVRRPYQSGRQPTLLCPYTECHNVASDLCDVEQTILDSMRLWLADFERSSDAMPDGRDELDSIHRTIAEHEKALGTLSAQLNRAYDLVEQGVYTPDVFLARSKAISEKQEFHNGKILELERELSERELAISSRYEIAPKMRHVLDAYPLATTPKEKNALLKSVLEKVVYKKAQRDRWGGNGMQLELFPLLPHF

SEQ ID NO: 21582 - protein, 453 aa, synthetic construct
MSAWKKPLRVAAYCRVSTDSDDQANSFESQQRYFRAYIAQQPHWELAGIFADEGLSGTSTKKRLAFQRMIACARAGTLDLIVTKEISRFARNTLDSIYYTRELKRLGVGVLFLSDNLCTLDGDAELRLAILSSIAQEESRRTSERVKWGQKRRMEQGVVFGRDLLGYDVRGGMLYVNEAGAQTVREIFRKCVDEGKGAHTIARELNEAGIPAARGGAWHSSVILRILRNEKYCGDLVQKKTYTPDYLTHEKKYNHGQEEYIIVREHHAPIIPRATFETAGRILDQRAAAPTGQRKYSRRYPLSGKLRCGICGTVCAARKKTRRDGTDTISWRCGNAVKYGRPHTGTDGRCRSCTGESLRNEDALQILEQVWVSLPLDRDIIAADVLAAVRAVTPHEQADAIASEIHAMLRGDAALSAQLLAQMTVYDRTHVTLTLRGFPCKWCFARTQKAASP

SEQ ID NO: 21583 - protein, 511 aa, synthetic construct
MNIAAYCRVSTDKSDQLNSLEAQKRFFTEYTEKNGHNLIKLYADEGISGTKIKNRKEFLQLMRDAGQGLFDMVVVKDISRFARNTVDLLQSVRTLKALGIETTFLTANMTVLGQSEFVLTIFGALAQEESANTSKRVKFGKKMNAEKGRVPNIVYGYDKTIGDYFNLEINKEEANIVRQIYEWYTEEGYGAAKIANMLNEKGLKTKRNCSFSQNAVCRILTNELYTGKVINGKQEVTDFLTGVRADKDDSEWMVTDRPDLRIIEPEIYDKAQKILSSRHGAFNMKRERQSNKYLFSTLIKCKECGWSFRRTVRTYKNTYVRWVCSGHNGKGADSCPNAVTVDEEDLIQALEEYFAEMLKAKKNIIKHVVKEFTKIYKAKDSNENYEKELRDKLAKLRKTRQKYMDMYTDDLISREELNERIGGMKTEVEKLENDLKLVQYNLNKGDQLEEVIKKTFKNIEDITSVREMTNEQLKQIIQKIEVDKEGNVDIYLRLFGDLGLDESVLISDNHT

SEQ ID NO: 21584 - protein, 454 aa, synthetic construct
MKPIRCALYDRVSTDLQVQTGISLETQLSDLSEYATCHGYEIVGCYSDEGITARKKMQNRKDFMRLLEDVKQDKIDLILVTKLDRWFRNVRDYHNTQAILEAHNCNWKTIYEDYDTSTADGQLKINIMLAVAQNECDRTSERIKAVFAYKVRNKEHLNGKPGYGYVAVDKKLQKDPEKSHIVDEIFRYYFTCYSKRKTVYHILNTFDDPALTEYRINYILGNELYAGIRYGIEGYCPSYITPDQHRLIKNVSSSRTYAGKNEPYLFGQLMKCPHCGANMVGFYKSHKLKGGGTNKYKRYRCSKKYPDRSHPVGACISESVIEEYMLERVYPELQDKIYRLNKAAAQKAAVKDETPQIRAELNRLNLLFQKGRISENYYEEQYSILESRLKLEAQKNMAVPVENYKALQKTFSGNWKKLYQELDCEHKSRFWKSTIREIYIDKDTHKICGFDFLI

SEQ ID NO: 21585 - protein, 497 aa, synthetic construct
MKYAIYARVSPKGSGFENETSLEMQINFCREYIKSQNGEIVDIQQDEFFSGKDMRRPGFQKLMEDLKSGVADWECLCVYKLSRLTRSSRDGAQIFEDLRIWNKGFISVTEPNFDFSTPMGRAMLSIFQAFNQFEREQTAENTRNKMISIAEQGGWPVGVVPTGYKRKGRHENILVIEPHGAEIIRGVYEMYATGSEVHRIARKYRKSPQWVYHALKNRIYIGQIPYAGKLYPGKHERIISHELYSAVSKKLETIAINDDSKRVVSRPKAYKYPYLLSGLLRCHCGRFMTPSSAKSGQYFYYRCTDNVFCKNRISAPEIEKKILDMMPLYEIDENFIQGYRDCIEKLISSETVRMDQEKKQVIAALSKNRLDQQKIIDLMISGKIADENLADFNERLSRIRDEIKEFESRIDFLSSQIKQFSDKNANILLKFIDEIYKIRDFFEISPKNSDLRRQFLTTCLENIILEKDGKITLKFRELSSSDNDKNGCPIRIRTSTN

SEQ ID NO: 21586 - protein, 479 aa, synthetic construct
MSDIIKPMNCAVYTRKSTSEGLEQDFNSLDAQREACMAFIKSQRGEGWQALETSYDDGGYTGANTDRPGLQRLIEDIKLGKVNCVVVYKVDRLSRSLLDFSQLLEFFDKREVSFVSVTQNFNTKTSMGRLTLNILLSFAQFEREIISERTRDKMAASRMKGKFLGGGIPFGYQLDEKAHKLVPHPETAEEVRFIFNSVLEEKSVVPVLAQLEKRGIVLRERKCKNGRVLPARPISRAQLYHIIHNPLYIGKVLYKKKIYDGEHDGIVSIETFEAVQELLNNGRKMYETVRKATPGILRGLLFCEVCGSPMVPIYGKKKNTKHFYYICRKCREEGYKSCPTRTVRQREFHLALIAELDKNGVLSRALFEQLSEYEQEETLKSIICRIGYEYQESKITVVLRSGTEFSFCANVKPHSGPWKRSELAARKEAKQPKVDKALYKQTLALQIREYMRLNGLSQAACARALGLTAARVSQLLKEN

SEQ ID NO: 21587 - protein, 540 aa, synthetic construct
MQVDGYSLDAQDERITKYAEAFDFEIVGEYVDAGKSGKSIEGRAEFKRMLEDIESNKDGVSYVLVFKLSRFGRNAADVLSTLQFMQDYDVNLICVEDGIDSSKDAGKLMISVLSAVAEIERENILVQTMEGRRQKAREGKWNGGFAPYGYRLNSGKLEIEESEAEAIRLIFDKYANTDMGANGIARYLGQQGIMKKERQNGKSPFFSAKLIREILDNPVYNGKIAFGRRRTEKISGTRQYHIVKQDDYMVCDGIHEAIIDDGMWEKVQEKRKSQAKRYEHVNKGKDEKIHLLSGLLCCPMCGAGMYGNKSIKKKNGKHYKDYFYYGCKHRSMMQGHRCTYNKQLQEEKLDSAVAEVIGKLVSNPKFADMMKKKINIKTDTSEVDKEIANYQKQLSQYIGTKRSLENQIDCLNYDDRHYDRKLSDLQDRLDKMYDNIDDVEHSLKDCKDRKRAIEAEKLTGDNIYKTLIYFDKLYGVMEDADKRALLTALIKEIHVYEEEQANGQWLKSIVFKLPIVEDNMDISLDNDTHVETAVLLVRKP

SEQ ID NO: 21588 - protein, 494 aa, synthetic construct
MVAIYARQSIDKKDSISIESQIAFAKREIFSEECKIYEDSGYSGKNTNRPAFTEMMHDIQTGQIEKVVVYRLDRISRSIVDFADFIDVLENNGISFVSATEKFDTSTPMGRAMLYIIVVFAQLERETIAERVRDNYYARVKKGTWGGGPAAYGYNLVRTTLDGKKATIYEPNSDLEIVSQIFDTYAQPYTSLADVQKVLIRSGALSAGGVNFDSVKLSGILKNPAYVQADIAIYNYYKSKGAIMANEPEDFDGTHGCILVGKRDASERKYKDVSNHLLAIGHHNGIVDSSTFLYCQEKLSKNRQIKNTGKGKHSWLTGLVKCGHCGYAFSVRFASTKDERIPYFVCSGKYLHKCCDAKQTHRVREIEAQVQARLIQEAEAYHLAREKRENNVIKQHQQKIADIDSKIENLISILENVSQISAEYINRRIETLHREKQLLIHQYSEALTEFNAVEIIPFTAEDWENMSFEDRQDIAKSMIDRVVLSEDGVDVRFK

SEQ ID NO: 21589 - protein, 456 aa, synthetic construct
MRNQNTSEVPIRAALYARVSGEEQKIKGLSIEAQKERLVAYAKERGWIIAGLFVDAAKTARKNMHKRSEFQKMLDLVRANGVDMLLFCRLDRWFRSVRDYYKVMEVLEAHNCQWKTTDEEYDTTTANGRLYINVKLSIAQNEADICGERIHVVFDSKIQHGTVLSGKCPFWLRINDERRYELIPENAAIIQDAFNHFESTTSQRATIRYIRETYDVNWCEATFRRMLKDKLTIGVYNKNGRYNEDFCPPVVSREQFDHVQELLKRNSRHNPAGRVYIFTGILVCEECRHHLVGRKQKDFFYYRCNQHFQRGRCTHNHSAREDVIETWLFEHLGEEIEKYEVAWNVQAAERKRTVASIDRSVLRRKLTKLKDLYMNDLIDIDEYKKDYETYTAALSALEEPEEEKHIDLSGVRRIISHDFREIYDSLTREEKRTLWKNTLKEIRVNNANEITGISFF

SEQ ID NO: 21590 - protein, 480 aa, synthetic construct
FAKQNGLQVLDTYIDRAMTGTNDNRPAFQQMLKDAEKPVMWDIVLVYAIDRFGRNSIEIAVNKQKLKKNKKMLISATQRMSENIDGTKNLDGIILENMYIGLAEYYSAELSQKIRRGLHESRQKGFCSGGRPPYGYYYKDKRVFINEEQAKVVRYIFKEYFSGKIVREIINDLTEQGILYRGKPFAENTIYNFLRLEKYVGIARYDDGVYDNIYPQIVDKEVFDGVQAILAANKIGSRSPESLFLLRNKITCGCCGTHYQGDSGTSKNGTVFYYYKCMGRKRKHICHASVLKKDEFENLILEIIIKVFGTESRINYLADCVMAVYNDKLKEHSVVDLLKRDLDEVQKALDNIMRAIEQGIINETTQCRMKELEERKQTLNDKIVIAQYGESQRLTKQEVVEYLTHSLRQEPRFLLHILVKSIIVYDDKIEIYFNFTERKNPDDSDDTDSRDNNYVNCSDILPMCPPNTKNTQKCVFFVCF

SEQ ID NO: 21591 - protein, 517 aa, synthetic construct
MPEALNAVIYARYSSDRQTEQSIEGQLRECYAFAKANDIAVIDTYIDRAISGKTDNRPAFQKMIEDSAKRQFQAVIVYRLDRFTRNRYDSAIYKARLKKNGVKVLSAMENLNGSPESIIMESLLEGMAEYYSVELSQKITRGMRENALKGKALGGQRVLGYKVNSDCYFEIDETTAPVVVDIFKLYSSGKTVKEICDILNARGVKTARGGAFNKNSLHTILTNKKYIGIYKTKYGEIVGGIPAIIDKELFEMVALRMEQNKKAPARAKAEINYLLSTKLFCGKCRSAMVGESGTSKTGKKYYYYACVKKKREKACDKSNVKKDWIEDLVIQRTVTDILKDDVIEKIADRLVELQKAEAAESGTMLYLQNSLAEIQVSIKNIMTAIEKGIITESTKTRLTELEDEKRNVEIEIAKESIARRIISREQIIYWISSFKDGDITSEKYRQQLIDTFVHAVFVYDDKIVITYNYSGENNTATISDLDLSSPPKDEVSNSDALVAGSHSNQYEGQPMRLSFSL

SEQ ID NO: 21592 - protein, 489 aa, synthetic construct
DKKDSISIESQIEFCKYELKGGNCKEYTDKGYSGKNTDRPKFQELVRDIKRGLIAKVVVYKLDRISRSILDFANMMELFQQYNVEFVSSTEKFDTSTPMGRAMLNICIVFAQLERETIQKRVTDAYYSRSQRGFKMGGKAPYGFHTEPIKMDGINTKKLVVNPDEAANIRLMFEMYAQPTTSYGDITRYFAEQGILFNGKELIRPTLAQMLRNPVYVQADLDVYEFFKSQGAVLVNDAADFTGMNGCYLYQGRDVKPSKKNDLKDQMLVLAPHEGIVPSDIWLTCRKKLMNNMKIQSARKATHTWLAGKIKCGNCGYALMSIYNPSGKQYLRCTKRLDNKSCPGCGKIITSELEAVVYQQMVKKLASYKTLTGKKKAAKANPKITALQVELAHVDSEIEKLVDSLTGANNVLFSYVNVKIAELDGRKQELLARIAELTVEAISPEQVSQISGYLDTWENVSFDDKRRVVDLMITTIAATSDSLNITWKI

SEQ ID NO: 21593 - protein, 647 aa, synthetic construct
MNTAVNEYNYRFKLTDYSLFDRNRARKVAIYGRVSTEHEAQLSALENQLQWYDDQVKYHPNWTVCERYIDEGITGTQAKKRPAFLKMIEDAKQGKFDLIVTREVCRFARNVVDTLVVTRELKGIGVEVFFIDDNIWTMDGDGELRLSLMATLAQEESRKTSERVKAGQKISRDNGVLYGNGNILGYDRVGDTYVINEEQAETVRMIYDLYLQGYGSMKIAKILTERKRKTASGLIKWSVSNIMRAIKNATYTGTKCYNKSRSNNFLEQKRINNLDMSTYEYVEGDFPSIISQEIWNKAQAIRESRVKPVCVSAGKNTHSKRDSRDIWVNKLRCSCGSSYRKNKWHTKLDGKTSYGYQCYNQLNNGIKRKRAEIGLDTEGYCDSRMITDWKLDFMAKALLEHLWTERKESVLIALDLIKYYYKEEKSNETQSDTVTIQAKLDKANSRLTNLIAMRADGEISKDEYQAMRSPVDEEIKKLQKALDEIPQEKSNPKGLDIEGIRSTLNSFIDFSGSTISHDVVNQFVYLITPTSDTTFDWYVNLNGTADVKATFTAEGRKKNCIIKLEEIEKISSVHREKNEDNAHFIKNPHIFTYLHRLQSLTSRKVDYNYMYFTEFLITRADVNDFMTHRPEYTKANRFKDFVYKIYL

SEQ ID NO: 21594 - protein, 569 aa, synthetic construct
MRTINKIEPLMPVLPTRKKVAAYARVSMETERLQHSLSAQVSYYSELIQSNPEWEYAGVYADDGITGTKSNRAEFQRLLADCEAGKIDIILTKSISRFARNTVDLLETVRHLKELGIEVRFEKEHINSLSGDGEVMLTLLASFAQEEIVSLSNNVKWATQKRFQQGLHNGRFQIYGYRWEGEQLIVQPEEAAIIRLIYDNFLKGLSAETTEKQLAEMGVKSYKGGHFGNGSIRQILGNITYTGNLLFQKEYTVDPVTKKSKINRGELPQYFVENTHEAIIPMEVYQAVQNEKARRRELGVFANWSIKTTCFTSKIKCPHCGCSYVHNKRTKNGNLQEYWNCGSKKKKKVGDACPVGGTISQKSLLRACTEVLGLTEFDEDVFLDQVDHIDVPEKYTLKFYLKDGTTVTKEAPNTGHQDCWTEEYRAKVSKQRMGKNHNKKHQNPFTGYFHCPDCGANFRRQTHKYKDGTMRIYWHCPNAPRCGNQAKPNENTMKELLAGLLGLPEFDESTFKEKVSHINLTENYEATVCYKAGGTDIITWEPVPKKSYPHTETSLDKGTQRKTTENELP

SEQ ID NO: 21595 - protein, 564 aa, synthetic construct
MEKKQKSALYVRVSTTHQIDKDSLPLQRSDLINYTKYVLGINDFEIFEDAGYSGGTTDRPAYQDMMNRIKMGEFTHLIVWKIDRISRNLRDFSDMYDELKKYNVTFISRNEQFDTSTAMGEAMLKIILVFAELERKLTGERVFSVMISRAQKGLWNGATVPLGYEWDPETKFPRPCDKEAKIVQYIFDQYEEIKSTTKVAKKLNIENIPTKRNGTWTPRTVGSILTNPFYIGTYRYNTKTKKTRRWKDKSEWVVLENNHQAIVNTEQFERVSQIIQNNYKGDKNYQRSSTNVHILSGLASCHKCGKKMHSGLDRARKDGFTPSRYTCYAFNVNYTCANYSSDLAILPGLINYIANYMTLQERITARHSLRDMESILLRGKYFEDIDHIEKQDLKNTYDLLINNKMVTYNSFEEKNKEAIISQNVIYEAEKEKYEKALKRLDDLYLYDVNSMSQKDFVIKRKEISDKIENINKKIQEVKFNDTPFINNKDFNLLSKASFYLLTKNLSSVKNIDVISLLNNLDRQTIKDFINTIITDVSVEKGKIYNITFKNGIVHHFIYKNEHKI

SEQ ID NO: 21596 - protein, 651 aa, synthetic construct
MNREGKKCVLYPRVSTEMQVDGYSLEGQKNSLKRFADREEMEIVGIYEDAGKSGKSIEGRPAFKKMLSDIKNGLEIDYILVYKLSRFGRNAADILNSLEFVQSYGINLICIEEGIDSSQTSGKLLISVLSAVAEIERENIIEQTMNGRKEKARQGGWNGGFAPYGYYLKDNQLLIEETEAEAIRIIFDKFANSDVGLGGVAKYLNLQGIKKIPRQNGTLETWSSHFIRLILDNPVYCGKIAYGRRTREKVKGTKNEYKQVHAEDYILEDGQHEGIISEELWQKVHAKRMATGIKQPSKIGKDRSHLLTGILKCPLCGSSMYTNKHAWTNKDGTYKEVYYYICGRNKQERGHHCDYKASLRKTDIEPLVIEAVKELVSDKYFAKEIEKRIGVQTDTTAIDKELANYESKLKEVDLNKARLEREIDNLPIDARFRERKIHDMTLRLDALYDTIVELEERIEDAKLRKSSIEMETITLDNIYKLMLNFGKLYDIISDEEKKSLITYLIKEIQIYPNGESGQPLKSIEFNFPIYRDGQEVRRLLWEKGNTVETVVLLGRKKSTEDMVYAYVDYEPEDDTYLQGMKGNATYREIKEWIKAEYGMSVSSLYVAQIKEKCGFEKRQNYNIGENKAHVPNCPPEKEKVILKAFKHFRMI

SEQ ID NO: 21597 - protein, 678 aa, synthetic construct
MAKKLRCYLYTRVSTGIQVDGYSLEAQKERLEKEAIHRGMKVVGTYSDEGKSGKNVTGRPEFQRMLADIQSGKDEVDYVLVFKLSRFGRNAADTLNSLQFMEDYGVNLYCVEDNIDSAGAAGKLMISVVAAVAEIERENIHEQTMAGRRQKARDGRWNGGFAPYGYTLVPRDGERGKVLEINEKEAELVRIIFDKFANTDMGCNSVAKWLNDHGYTKEVRQNGTLSTISSNFVKLVLDNPVYMGKIAYGRRKTEKIEGKRNEYHVVKQAEDAYELYQGIHEAIVSEELWQKAHAKRLVTGVKYDKVHDTGHCHILSGLLRCPECGAKMYGVVNRKKKAGSDDFYKDMWYYKCKNRIKVEGHFCTYKTHIRQDIVNAEVISIVKYALNDEEFKRRIAQRAGGKEDGSLDELMAEKVRLEDTKKKLEIRKKKMLDKIGNMDVDDELYDTLFEDYMGVVRELTEKLAKLDADLLRNNIAIENMQKQTFTAEQYYELLDAIVRYMEEIPENRIKQLMGLVLDKVELFPKRQANGRWVRNVRFKVPLDVDGTFYDSIGFHGDGEEKGEGDDSVYFLPNEMHDETVVLLSQQKPDDTIEIDLDLDELDATSAELKATYQEIKDYVLKEFGLKVSSLYISQVKRKCGIEVGENYNLPKSENARVPQCPKEKEEAIKAALKYFAMI

SEQ ID NO: 21598 - protein, 475 aa, synthetic construct
MNAVIYARYSSDKQTEDSIEAQVRACREYAARNHINISDIYADEAISGKTAGRAQYQKMLRDCEKGLFDTILIHKYDRIARNLGEHVNLEIKLKEKGITLIATAQDFGNTNESKIMRALMWSLSEYYLDNLSSEVKKGHRETALKGLHNGGFAPFGYDIVNQTYVINELEAAYVKRIFNAATNQEGFTNLIDEMQRAGIRGKRGKPIKYPQIYEILKNEKYTGVYVYSPSEERKRSERRNKPNAIRIENALPIIISKAQFEEVQRIMSERKQTGKKSNYLCSGLVFCECGAKMHAMTSKRKGHEYQYYICSQHCGAPATRVEDIDSAAFRYLHTLLSEKNQLRIAEALRQYQAGEGSRMEEFKAALSKRIEEKQKQYDSLLSNLSSGVLPAEVVADIASKMQQIKEEIAMLEVTEPPKDFTVEQIRTWLEALKNTPDDKAVRLLVSRIDIKQKTVINIESTLTSVLSEIGCGSRI

SEQ ID NO: 21599 - protein, 482 aa, synthetic construct
MKYGAIYVRVSTDEQAKEGYSIEAQIKAIKEYARKNNIYTDETYIFKDEGISGRKAEKRPAFMEMIKIAKTKPKKFDVILVHKFDRFSRNREDSIVYKSLLRKEYNINVISISEPLDPDDKMSVILEAFLEAMAEYYSLNLSEEVKKGQLEKHSQGGLQTRPSFGYDVSNNKLVINEKEAEIVKFIFESYTINNIPMLIIARKLHELGIRNKNGNFFENRSLCYILNNPTYIGKLRYTPGRRNTYDFDDPNTILTNGSHEPIIDMDTWNATQTKLSKNNVFKKPRQRVDYSLKFWLKGLIRCKECNCTMVTCNRSKLRCNGYNKGKCTNHNTILIKEAENIIINQIKKDFSTQIIKNIVDNTKKEKTTNEYEIITGKIKDLSDKEKRIKESYIDGIDTLEEYKANKELLIKEKKRLEEQLNLIENSKNNNSRKKEIIENGKKVYEILEDKNIEIHKKYAAINKLINHIEYDKISDCLEIYYN

SEQ ID NO: 21600 - protein, 435 aa, synthetic construct
MAAYCRVSTDQEDQLHSFDAQVDYYTRYISDHPNYEMAGIYADEGITGTNTKKREQFRRMISDCESGKIDMVITKSISRFARNTQDCLQYSRMLKNLGIGILFEKEHINTLDSSGELLFTILSSLAQDESRNISENCKWGIRSKFKKGEMHLNTHKFLGYDKVDGKLVINEREAKIVRRIYREFLWGHSPQEIAKGLEDEKIEGCMGAKKWYPSTVINILKNEKHMGDALLQKSYTADFLTKKQVKNHGEVTQVYVKGSHIGIIDKEIWNAVQLEFARREEFVKEHGLKGYGYGRECNPFTSRIFCGECGSSYTRHTWKSRGIMQWQCKNHMTNGKVTCINRFVSQSNLELGFMRAYNMLMSRKEELLPRWKKTIETGNALEKLRAKQFMELSEQPKLECYVPELAQLVIQMVIIKGAKKYEFTFMDGSQETVSV

SEQ ID NO: 21601 - protein, 504 aa, synthetic construct
MEIQVLEARSLKGYRKKVCAYCRVSTDALEQENSLENQIAYYENLIQSNPEYEYAGVYYDFAISGYKEKRPGLQKMLTDARNGKIDLIYTKSVSRFARNTAIVLKASRELKELNVGIFFELQNINTLSSQGELMLTILAAFAQAESESGSIGAKMVYQRKYEQGIPVQYLERCFGYTKNEKGEFVPDTEQAKWIVKIYEMAAEGYSLSTIADEMNAAGVKTDKGAGWVESTVKRILENEIYKGDYIMHKNYVNEERKLVRNRGEVDAWYIEDDHPPIVSRQLWDKAQEARKKKRDYLDMDCQIREVTEENYPYKGHLFCAKCGSPLMHRIYSNGNRMSWDCSGRTRHGKDFCDGIHVPDTAVRQWKFDGNIYISVKDSRKSIKEFSYTKESSWSRRHKKKEFVRDVPELTEENYPYYRSIFCAECGSRLVRHIKKHGDIVWECNGRKRKGAAYCEGVRIPDRVVKAFMPIRKAIYIKERKGRNGTKHYSYSCKKPERAAREEQD

SEQ ID NO: 21602 - protein, 559 aa, synthetic construct
MNNISAHERAALYVRVSTRYQVDKDSLPFQKKKLKEYCKLLNISDYEIFEDDGYSAKNTDRPKFQEMMHKVRSGHFTKLIVYKVDRVSRNLLDFASMYKELKDNHVAFISMNEQFDTSTAIGEAMLKIILIFAELERNMTSERVTSIMLNRAEEGLWNGARMPIGYKWDDNIKFPVPDENEAKLVQYIFDEYERTHSCSKVLRNIVSQGIKGKRGGKWTSKLINDVIRNPFYIGTYRYNMRESARGRLKPQSEWIIKENNHTPIISKEQFERCNRIMDSNGSHNTAKFRHTVHVHIFSNKLKCAYCGSGFNACKDRARANGYRPSVYRCNRRAALLDCPSKTISDTVLGEFVFNYIANLITAQKNFTGDIKVFEASLLSGNQFNGLHINRVDLEKTYNIMHSTGSHMIKNIMTDNIPADDNDNSFQLDIYIQQKNKYKKAIERLMDLYIYDPESMSKSQFTVKRKELQDNIKLIDNKIAELSNTSPVTSASDMSFVKKASAFLVSRQLIGGHIDFVNLAMNIDNNILKDFINQTIDYVLVKDGHVAAIRFINGLEHNFE

SEQ ID NO: 21603 - protein, 525 aa, synthetic construct
MNTLARSVTAIPATKKPGHNATACNPLFKRKVAAYARVSTDLEEQATSYQTQINYYTTHIQSRSDWEFAGIYTDEGISATSTKHRQGFQNMITDALNGKIDLILTKSVSRFARNTVDSLTTVRQLKDAGVEVYFEKENIWTLDSKGELLITIMSSLAQEESRSISENVTWGHRKRFQNGKVMVPYSSLLGYKKGADGNLVIDETQAPTVRLIYRLFLSGLSITEIRKELQHRGILTPRGKTKWSTSTVRSILSNEKYKGDALLQKTFTADFLTKRIEENQGQLPQYYVTGNHEPIIDPKVWDQVQYELATRHAANTAKIGLFASRLKCADCGSWYGRKTWASNTKYKHTIWRCNHKYDHPRPCQTATLRDQQIQTAFLSALDHLVENYRGKDHLPQAITEMFNTNQLEAESSHLDDKIRALANQIEELIAENQRRAQDQEQYLAKYTQLEAKYQKTLAEKQAIDAQITAKNAKATAIKTAYSQLAGKPIEHFQSCQWNALIDHAIIGANQIRFIFRTGKEITVNL

SEQ ID NO: 21604 - protein, 416 aa, synthetic construct
MAKIKQITRLSVSRPKLVKVAAYARVSTSTCRQLSSISAQVSYYSRLIQSTPGWDYAGVFIDEGTTGTKIRGRQGLADLMALAHGGGVDIVLCKSISRLARNTVDLLQIVRKLKNLNVSIRFERENIDTSTNDGELLLTLLASFAQEESASLSANVKWAIRNRYKDGGTNSFFIYGYVWTQGKFVINHDEAQIVQRLFSNYLEGISPEKTANQLNSEGLRSRGGGVFHGSVLRRMLENERYKGCQLLQKTFNKTIRSTSRTPNDGVLTKYWVEQALPVIIEPALFDKVQQEIARRRQIGPAATPSLNTGVFTGRIRCGTCRRNYQRKTRRYASGNYYHYWRCWSACKGQGNPCGGHNLRETMLQSICATTLNLEEFDEHAVENHIVTIEALPDHLMIHLRGARSIKIALDKQGRLT

SEQ ID NO: 21605 - protein, 543 aa, synthetic construct
MAGQPKYNTALYLRLSKDDGTMSESSSIQTQKEMLTRYCRENGFAISQIYIDDGWSGTNTNRPSFQRMLSDIEDGKINCVITKDLSRLGRNYLETGSFTEIYFPEHNVRYIAVTDGVDTAKGSTMDITPFKNLLNDMYAQDISKKIKSSLMTRQKQGKFIGTKAPYGYVKDPADKNHLLIDERFEPTVRYIFKMAKDGIGITQIARQLRSEKVPRPVVAAAEELECYDRYLTTEESIYKWSMGSVREILRNPVYKGAVRGQKRPKISLKSEKRKPVQSAGTFVVEGMHEPIIDPEEWELVQRLITSRKKTRKVEKKYDNIFSGLVKCADCGFAMTFTKAHRNWNSENIYANYDYQCNNYRMEGKSVCTHHRITALNLYNAVLADIKRLACEALGDDKQMISAIAARLGKSEKENVRQAERELKRANKRLSELDRLFAKLYEEHVNGKVNERNYNSLSATYEAEQNELESRIAELNAAIKTERENDENAVNFVDLIKQYADIDELTQALLNTLIDRIEVHEPEDLDGELIQKLDVYYKFVGRLD

SEQ ID NO: 21606 - protein, 521 aa, synthetic construct
MDNKLKVVLYLRYSSHKQNEQSIEGQQRICEDFAKQQGYNIVDIYIDRATSAKTDHRPSFQKMIADAAKNQWDAILVYKLDRFARNRYDSAIYKTKLRKYGVSVLSAMENISDSPEGVILESVLEGMAEYYSADLSQKVTRGMLEGAHKCQTNGVRIYGYTETPDKHYAIDEHAAQAVRTIFKMYTAGEYPKEIIAYLKSNGYKTYEGKDFSYSKIQRILNDERYTGVYKFSDIVISGGIPAIINTETFNKAKQRAKANQLKKSTQKAKVKYMLTFKLFCGTCGAAMVGESGRSKNGNTYNYYKCSAHKKGSDCKGRTIRKEYIEDIVINEIYDNILMRKDIIEKIAVRISKIYIDEAKQNDNSEHLKKELAETEKSISNLLKAMEQGIITNSTKERLEELEYLKLDLKGALQKAAIYSAPKISKQEIVDYFSNIADGDKTDMKYRQKLVDMFVKSIHLYDDKIIIAFNYGAPTDDTDDDKKFKNKISEIPIDISECSDIKSTGTPSGIRTLDTLIKSQVL

SEQ ID NO: 21607 - protein, 687 aa, synthetic construct
MQSAFFFIPFFGSWRKGLFMAYVRNKKKILKFWSKKKAALYVRVSTRYQVDKDSLPFQRKKLKEYCKFLGIEGFVIFEDDGYSAKNTDRPHFQEMMSRVRDGEFSHLIVWKVDRVSRNLLDFAAMYQELKDHKVTFISMNEQFDTSTAIGEAMLKIILIFAELERNMTSERVTGIMLDRAEQGLWNGARMPVGYRWNPEIKFPEPDPEETKIVQFIFDEYERVRSTTKIARYLNHNQIASKRGGQWTSKLIRDIIRNPFYIGTYRYNLRESGRGPLKPESEWIVRENNHPAIIAKEQFDRCNAIMDENGTSRDTSELRARKYVHTFSGRLVCGKCGANMIASKDRARANGWRPSMYRCAQRSRMMDCDNSKTVNESYIGPFIFNYAANLARIQKNFKNIKTLEQLEKELLKGPEFENMKVSKESLRRTFDTLAFQEVGKGAYLPDINLSDGDDDYTAAEQLSILKRELDKCKTAIDRLTDLYLYDPDSMTKEEFAKKKRDLVNKIAGYEKQIEASQATGDKDDLADLEFIRKASAFLVAQRIVSKKHVDYIQMALDLDNEILKDFVDQVIDRIEILEGRVRSIRFVNGLVHEFTYSTPADLPVCQKCGGRIGSTCGCRTRTFDFAGKPYRRIKVGDPGDKFHGVAGAVCPECSAQVGRWHHWKCGIERCPICGEQLIACEHGPNSKD

SEQ ID NO: 21608 - protein, 525 aa, synthetic construct
MARAVTVIPPTIQPITHLARNAVVRRRVAAYARVSTSSEEQLTSYEAQVDYYTRFIQSKPEWEFVRVYTDEGISAVNTKKREGFNQMVRDALDGKIDLIVTKSVSRFARNTVDSLVTVRKLKEKGVEVYFEKENIYTLDSKGELLITIMSSLAQEESRSISENVTWGQRKRFADGKVSLPYSHFLGYRKGDNGLPEIVPEEAETVRWIYSLFLSGKTTGSIASLLTREGIPTPAGKKKWAASTVESILKNEKYKGDALLQKAFTVDFLTKKQKKNEGEVPQYYVENSHPAIIDPAEWKLVQRELERRKAIGRSYSGNSIFSSRLVCGDCGGYFGSKVWHSTDKYRRTIWRCNSKFTGEEKCQTPHLTEEEIKARFLDAFNALVADKERLLDECRTMQAALTDTGSLDSEIAALLSEMEVVAELTKRCIEENSTTAQDQAAYLERYNGLAERYETAKAKLEKLQATKAQREAKSEDIGGFMFELAEYGDSITEFDDRLWLTVIDTVTVHRDGRLTFKFQTGHEITV

SEQ ID NO: 21609 - protein, 501 aa, synthetic construct
MQNAIYLRKSRADQGTVEDTLRKHKETLLDYAAKHNIFVSLNDIYEEVISGESLYARPQMLRLLSDVEAGKFSAVLCMDIDRLGRGGMSDQGIILDTFKSSNTKIITPAKTYDLNDELDENNMEFAAFIARFEYKQIRKRMRAGVKKSIQDGCYLANAPYGYVNITENKRATLAIQPEEAAYVRQIFDMYVNQGIGCQTIADNMNAMGAKPHRAAQFGRTSVMTILKNPVYIGKIVWDKKTHIRKNSKGNSKHIIISNPQDKWTVTQGLHPPIIDPETFSKAQEIIQNRYHPPAFTGVVINPLSGLIVCKNCGGVMQRAANCKGGPFCLCQKRGCMPMSKLAYVEQSLLGKLQLAADELAAAAQNPRPPAASKEDYQKIIKEIDHQIKTVRQQISRLQDLLEQNVYDIPTFLERQKKHSEKLAALENKKTSILRQANAHREIDIQKTRQRITEVLAAYATAAPQQKNILLKTIVEKAVYYKEKGWAPAQFELEVALRPSFL

SEQ ID NO: 21610 - protein, 441 aa, synthetic construct
MAAYCRVSTDQLEQLSSYEAQVNYYKNYINSHSEYVFAGIYADEGISGTNTKKREQFNKMIEDCKEGKIDIIITKSISRFARNTLDCLNYVRMLKELGIEIIFEKENIRTLDSKGEVLLTILSSLAQDESRSISENSTWGIRRRYEQGKVSVNFTKFLGYEKGKDGSLVINEQQAKIVRRIYREYLNGKSANRIARELERDGICGWNGEVKWYETTITKMLQNEKHKGEALLQKSYTVDFLTKKKVINKGEVPQYYVEGSHPAIIDKDTWEATQLERQRRKEYAAEHGLQKIDYGIRGNPLAGKIICGECGKYMGRRTRIYKGKKLVWICANRYKEKGVRGCNSKHVNDAELNEVFTIAFNKIIENKDYYISIWQEKAKSENALIAYKAKQFIEEIKEHNETIEYYGVDLFYKWVANIKVKNPKEFIVTLLEGTNIKVSID

SEQ ID NO: 21611 - protein, 427 aa, synthetic construct
MRVRIIEPILKVQQKEKRVCAYARVSTIHDKQGESLENQVQYYENIISNNQEYEYVGVFQDRGITGFTDNRPEFQRMLYLCREGKIDIIITKSISRFARNTAVVLETVRELKNLGVEVRFEKENISTLSGDGELMLAVLSSFAQEESRNVSENLKWRARKHFQQGELMINTTRFLGYDKNEYGELVINIKEAEVVNRIFNDYLSGKSSSKIAKELNEENIPTVGNKTWHNSTIRGVLKNEKYKGDAILQKYYTPEHLKKTSIRNNGVIDSYYIKENHSPIISREMWEKVQEEIKRRGKTKGNVAGDVDKYTKRYPLTCMLYCSKCGSTLRRRTWNSKNSSKKIVWQCSNYIKNGKDACNGTSIDDVVISRLNIKEATIVKEEVKDGKKCYSYTSEKGSGEFSSKPVTNKKENGCLLQSFNRPIGATV

SEQ ID NO: 21612 - protein, 544 aa, synthetic construct
MDNTSFPQTRAIYPNDGMKILQGEAKTEVLRVAAYCRVSSYSDSQEDSLENQTVHYTRYIRSNPNWRFIGIYSDQGKTGTKIDSRSGFQKLIRYALEGKIDLILCKSISRFARNVIDALDTIRILKENGVRVIFEKENIDTASMQSEFIITLLGAIAQEESRSISENIKWANAKRFQRGEAIFIRILGYQKNDKKEWIVVKEEAEIVKEAFRKYLEGLTISEIARSFISKGYKKVNGRTDWSYAIIRDMLKNEKYVGDVLCQKTYTKDHLSHEAKKNKGDKNQYLIKNHHEAIIDRATFEKARERLSNVATYKKRGERKTYPLSGRIICSECGGNLQHFDCRGLVTWKCGNRVKSKSICSFDGIKEKYLNKAIIKSLKKHYQINKLEKVAIQNMIKDIKNAEVSGDIEYNKLRIELERVLFQGNMLVLKGNSPEKDKEALRVKRETLENEINIRKIWWDMIESDSKYRAEALEKLELISRMEKPLEALEEYFKGEKCIEFLRAWVVRIKAVSPIKISIEWIDGKVSNATIPKGEGRIDTKRKWS

SEQ ID NO: 21613 - protein, 574 aa, synthetic construct
MIQNVNGLNMGLGSTPLTSNVQFIPARRRDNANLRSNEITKKRVCAYCRVSTEEESQATSYELQVSHYTEFIKKNSAWEFVGIFADEGISGTSVKKRLQFQKMIQECLDGKIDYIITKSISRFARNTLDCLTYVRELKNLERPVGIYFEKENIDTLDSKSELILTILSSVAQDESRSISENTKWGVQKRFQQGKAHCPTTYFMGYDTDENGKLVINEDEAKIIRRIYKEFIGGKGSEVIARGLMEDKVVTVRGNFTWTSDRIIKILKNEKYCGDILMQKSITVDFLTHRRIINKGHEQQYFIADHHPAIIPKEEWYAVQQELRRRYQMFHDPDNKYRQAYSGKCVFSNKFFCAECGRPVARRRLTSQRNGEKYLFSAWQCKVASGHDKDFKGCRARYIRESSLEAAFMKMLYELKKNRDEAVAEAKVAIDSSGLTDIENIRLAEVESQYKAISNRLNEMAKSSMVANADIYEATMRQLTYEQDLLQDEWQNLMEKKQKSIEMERQLQVIIKLLEELEEEPEDYDKYYEENKYRDDIFSQCVEKGFMHDDGKVDFELKCGITRTAQAFIRIIKRK

SEQ ID NO: 21614 - protein, 493 aa, synthetic construct
MRVAIYIRVSTDMQAEEGFSIEGQRSRLISFAESQDWVIHDFYVDDGYSAKDLKRPDMQRMLEDMEKKLFDVVLVYKLDRLTRSVGDLHSLLKTFDLYGVKFKSATEIFETTTAMGRFFITLVGAMAEWERGTISERVRFGVEQMVAEGRRPGGVVPYGYTQDEQLIPEEAALIREVRDLYMSGKGYKSVAMIMNRSGKLRRGREWTDATVAYTLENPYYAGIIRIGSKTPAGTYVNSKRDERVKCVYGKGSHEPIFTQEEYEELKKYMKRKSQGGFSKVGEYWFSGVLRCGRCGAAMFGRLTTKRTTTKGIVRTQYYICSNRHHSKTCDLPIFRQTHIEHLVFQYINQIQEDMEKLNEEAMKIFADEGKKKSAIDSAKRELTKVAERREKWQYMFVEGLIGKQEIRKRMAEEDKREKEIRQRIAQEQKAFSGIPRIEELVGLAEGWAYFDDQEKKEIIHTVFDKIVVNTDLRKIKGVKNKFFDAYIQEISFN

SEQ ID NO: 21615 - protein, 525 aa, synthetic construct
MNTARSVTVIPATLNLFTNTSKISSTMRKVAAYARVSTDTEEQLSSYEAQVDYYTRYIKSKNNWNFVEVYTDEGISATNTKKRDGFNRMIKDALDRKIDLIITKSVSRFARNTVDTLTTVRKLKEKGVEVYFEKENIYTLDSKGELLITIMSSLAQEESRSISENVTWGQRKRFADGKVSLPYKNFLGYEKGEDGSPKIIEKEAKIVRLIYRLFLEGKTISAISKHLTDENIPTPSGKKKWTTSTIRSILTNEKYKGDALLQKCYTVDFLTKKQKKNEGEVPQYYVKNSHEAIISPEIYDLVQDELKKREQSKVNHSCKSIFSSKIICGECGSFYGSKVWHSNDKYRKVIWQCNNKFKNKKKCKTPHLTEEQIKKEFVKAFNNLISNKDEIIKNCKDAILELTNTKNIDDEISKLQKENESVINLMKNLIYENSRKAIDQAVYNEKYDSYTGKYEKIKSELSKLEDKKQDLKVCTDRIKIFIENLKSSNKLIDEFDERLWYTMVDKALAYTNGNLYFQFKCNDHT

SEQ ID NO: 21616 - protein, 474 aa, synthetic construct
MCTTKILILILFSRKNRGINKMKREIVKVIPLIDKLPKKKKVAAYARVSSEKDAMMHSLSAQISYYSKLIQNNPNWQYVGVYADEARTGTKDSRPEFQRLLEDSKQGKIDMIITKGVSRFARNTLTVLETIREFKTLGIDVYFEKENIHSLSEDGELMLTLLSSFAQEESLSVSENCKWRIRDKFKQGISTSFKMLGYQINNGKIEVIDDEATIVKMIFDDYLSGMGINAIVRKLRDKNVPTKDDGTWRESTVRGILKNEKYTGDLLLQKTFIKDHITKKQLKNKGELPMYYVESNHKAIIDADTFQKVQDEIRKRAKHQKAKNSSKKYVFTGKIGCGLCGKNYRRKIAASGTKYAKPIWICATFNSYGKKYCPSSRVPEETIKKLSCEVLGITKFDEQIFKNKVSKIIVPSKGKLKFILNDGNKVLKTWNYPSRSESWTKEMRNLASDKEINRLERVKSIEHSKVSNCNPGNA

SEQ ID NO: 21617 - protein, 514 aa, synthetic construct
MAKRKFNKGGEVRLVAYYRYSGGSGQTEQSIEGQRRDCEAYARLHNMTIQKEYVDRHISGKTDDRAAFQQMIADSDKGAFDMVICWKTDRFARNRYDSAVYKKRLRDNGVEIVYAAESNISGAEGIIIEGVMEALAEYYSAELAEKMRRGMRESALKGQAISRCRALGLKTDEHKRFVIDEKTAPTVRFIFEHYAAGESAMSIVEQLNAKGLRTSQGNPFNKSSIPRIIQNEAYRGVYISKSYDVRIEGAIPAIIDDELWERAQTMLKLNRQLKAKNEPKADYILSGKLYCSCGSLMRGMSGHSATGEVYRYYTCPNKDCHLRNIPKDDLEGKVMQSIVDHLLQPESMEALAEAMVEVQKADVEKPNAERVAIEQSLSDVRRRSKNILDAIENGTANAQLCARLDDLTEQERTLNFQLSALEKEKPVVFTKEQYLFLLEQFLVEPSERTPEYGRRLVNTFVTSMVVSDRELVINFNVSDETVNKNKKTSQTNLQKESSSGMRLVRVARIELTAS

SEQ ID NO: 21618 - protein, 555 aa, synthetic construct
MKEVEIITANLKVYNKDFVEKVIKKVCAYARVSTDNEEQLTSYSSQINYYTEKIKANPEWEFVGIYADEGISGTQAKNRTEFLRMIDDAINGKIDIIIAKSISRFARNTLDTLKYVRLLREHNVDVFFEKENIHTLDMDSEMFLTFYSAFAQAESESISMNIKLGYKAKMKRGEACGNPECYGFIWNKETQELEINEEQAKNVKLIFDWYINGKGVYLIAKELNKRNIPTLKGRKWTHTTVRNVINNDKYVGDLRLQKYYVENPITHKTKVNKGEKDVYLVKNHHQSIISREVWDKACSITEKRKRPMKDGKPTDYSKYSLRYPFSSKIVCGHCGAIFTRKQGRARQDGSKTPYWACQRKSQQRYDCEDSKFVRENVLEEMFVELYNKLNEERTTNNINLLSAIKKMTEEQSFEKDVKKLEDEKTKLNNRLSNLVDMKLDKIIDNDTYVKKEQELLVKIDEVNEKLIKYKSEIINKDKQVKRLNKIEEIINNTPRLEEFNADCFNNMVDKIIIGEIDENGNKNNNVIKFILKTGKNYDFLIDNQKYCMSFRKRNK

SEQ ID NO: 21619 - protein, 532 aa, synthetic construct
MKVAIYSRKSVFTGKGESIENQIELCKEYCNRNYDEKIEFVVYEDEGFSGGNINRPQFKAMIKDIKAKEYDALICYRLDRISRNVADFSATLELLQANNCDFISIKEQFDTSTPMGRAMVYISSVFAQLERETIAERVRDNMVQLAKTGRWLGGITPLGFDSERIIYYDENFKERSMSKLTVNDSEMELVKEIYELYYELKSATQVSKRLADKRIKGKRGGFLNSSRILDIISNPAYVKSDKKTHEYLKSIGINVFGESNGNGYLSYNKARNGIETDIETWIAAVSRHEGIIDSDKWIAVQKNRHKMKGSQIKAVASKSETLLNGILKCSVCGSKMYAKKGKLSPVTGKHNYYYICSKKDSQFGVTCDNKNINSQKIDKLVLNELETYDKEYLKTHLLSTAKNFKRNLTENNFIELINEKESQIGNLVKNLSLAPNPEVSGYIMNEITKLQSEVQNLKEKQKNCDKDSYDISVDIDQIEILNDLLTNMLNTIDKVDYTEKRKLLHSVVEEVIWNGKGYTVEINLIGSKKKLI

SEQ ID NO: 21620 - protein, 536 aa, synthetic construct
MLRQTNQQPITALYPRLSHEDELQGESNSISNQKHILETYAKQNGFSNLRWYTDDGYSGANFQRPGFQAMLADIEAGKVGTVIVKDMSRLGRNYLQVGMYTEMIFPQKGVRFIAINDGVDSAQGDNDFAPLRNIFNEWLVRDTSKKIKAVKRSKGMSGKPITSKPVYGYLMDEDENFIIDEEAAPVVKQIYNLCLAGNGPTKIARMLTEQQIPTPGTLEYRRTGSTRRYHPGYECKWATNTVVHILENREYTGCLVNFKTEKPSYKVKHSVENPLEKQVIFENHHEPIIDTQTWERVQELRKQRKRPNRYDEVGLFSGILFCADCGSVMYQQRYQTDKRKQDCYICGNYKKRTHDCTAHFIRTDLLTAGVLSNLRKVTSYAAKHEARFMKLLIEQNEDGGKRRNAAKKKELEAAEKRIAELSAIFKRLYEDSVTGRISDERFTELSADYEAEQRELKEKAAAIQAELSKAQEATVNAEKFMNVVRRHTSFEELTPTLLREFVEKIVVHECSYDENKTRRQDIEIYYSFVGKVDLPE

SEQ ID NO: 21621 - protein, 520 aa, synthetic construct
MPRKKAPAAEAPRLVAYYRYSGGSRQTEQSIEGQRRDCEAYARAHGMTILREYVDRHISGKTDDRPAFQQLVADSAAHTFDAVICWKTDRLARNRYDSAVYKKKLRDNGVEILYAAESNISGAEGIIIEGLMEALAEYYSAELAEKARRGMRESALKGKALGSSRPLGLTVDADKHYIIEPTGAEAVRYIFEQYAAGLSSSSIVERLNVMGLRTSHGGPFNKSSINRIIQNEMYRGIYVSKKFDVRIEGAIPAIIDNDLWKRAQNMFERNRQSRTPHASRADYILSGKLYCGECGCLMKGVCGRSSGNGQMYHYYACPGRSIGRACTRKNIPQDELEAMVVNSVADLLLEPDLLEQIADAIVELQQAEAARPDPEKQALEKSLSDVRNKIQNILSAIENGASSAALSARLADLEQQESTLSYQLSSLTAKKPLTFTRDQILFLLQQFRVSPSERTKAYCRRLVDTFVDHIELTNTELILYFNISDETIDKNKKAPRSNHSEESSTEKRLVRVARIELTAS

SEQ ID NO: 21622 - protein, 526 aa, synthetic construct
MNLTELIARTPDADERLIRIAPYCRVSSDSADQLHSFAAQIRYYTEFAKSDPRYHLVDVYADEGVTGTSMEKRDEFNRLIRDCRKGKVERVITKSVSRFARNTEELLTVIRMLKECGVSIYFEEQGIDTDRISNEMIVTFPGMAAQQESETISKNLRWSIRKRMQTGEYIGSGAPFGYRLVNGQLVICEEEAQTVRRIFDLYLQGYGKLRIARLLNAEKIPRRDGENTLNWCQDGVSYILKNERYIGDALLQKQYTTDTLPFRQKKNRGEREQYYIENAHEPIISRELFETVQTLLRERDNNAGNRTSSKSRRTVLGGMMKCPDCGRNFRRILQNGTAYWVCSARIGGIYDCAKRRVKEDEIFYAFTILTAKLKHFLQPLLGTAIRQMEMLLSETREGQDAIAEIDRKTADLTAQNLVLAKLHCKGILPAADFAAQSTDIGNRISELRAKRRKLLTEDSGDEALEELRELYRAVDSAPYIGIFDVGLLEGITKRITVQDNEHITFHLLGDISLTEQIREKGRCRAQ

SEQ ID NO: 21623 - protein, 526 aa, synthetic construct
MQTTVTVTELKAPETAGAAKPKIRLAPYCRVSSPSEDQLHSFAAQIRHYTEYVGTHPEYELVDIYADEGLSGTSMQKRDELNRLLRDCAKGKVDRIITKSVSRLSRNAKEFLETVRLLKSLGVSIYFEEQGIDTDKLNAEMILTFPGLHAQQESENISRNTRWSIQKRMARGEYFGTHAPLGYRFQDGRLTVEEPEAETVRRIFDLYLQGYGCQSIAEILNESERTFEPVSRKRFLSWHPGTIRYIIGNERYIGDALLQKGFNTDTIPYRARKNRGEKKQYYVENAHAPIISRNAFEATQDLLKSRISPNREKWERHQLNGKLICPDCGGNFRRSHQQGKTEWICASKSREKTTCAGRCIQEETVYRIFRLLLLKLLDYGDALLGTLIDQLETLQAVTADNPERFQSPNREISNLAAQNLVLTRLYNKKLLPTEDYYAQSGDIDRQIRNLQNKRKRLLQEQDESETVDTLRHLRDVLRETDPNGNPERLMDEIVERMTVRSATEITFRLIGGVELTESLHGKGEEP

SEQ ID NO: 21624 - protein, 539 aa, synthetic construct
MTGNAQRVVREIPATKPDAVDRLRSSAEQLRVVAYCRVSTQQEEQLNSYETQMRHYTEAINAEPNWRFAGIYADKGISGTSVKKRDEFNRMIRACKRGTVDLILTKSISRFARNTVDCLKYVRLLRDLNVDVYFEEQGIHSNQPGAEFYITIYGCIAQSESENISANVRFGKNRSAKDGNVSFAYASFLGYRKGEDGKPEIVESEAEIVRRIYAQYLQGDSLKGIAKQLTDDGIRTPRGKPHWEPGTVRSILSNERYKGDAILGKTYIEDCISKKIRVNAGERPKYYVRNSHPAIIDAETFGQVQEELARRSSKMEGKKVGDKTLQRKYSGKYAMSDLLICGECGSAYRRCTWTAKGEKRIVWRCMNRLEHGKQNCRHSPTLDEDSLQAAVMDAITERVKNDPKLLQTLQAEIEKGLTANAPTQADIQDITNRITEIDRKFADLLRTVSIGNDSAHDAELEALMKEKNDLRQRLQSMEQGSAQHDTRKETLTAILPILRNRPLPYDDALVRQTVKGIIADSKTQIRVVFPDGETVSVCV

SEQ ID NO: 21625 - protein, 525 aa, synthetic construct
MSKVTVIPATVNPATKMPALTSKKRKVCGYARVSTDKDEQFSSYTAQVDYYTKYIANNSDWEFVKVYTDEGISGTNTKKRDGFNQMIKDALDGKIDLILTKSVSRFARNTVDSLVTIRQLKEKGIEVFFEKENIWTLDSKGELLLTIMSSLAQEESRSISENITWGKRKSAADGKISLGYSQFLGYDKGPNGTLTVNPEQALIVKRIYREFMQGKAAWAIADGLTADGIPTPSQKTKQWSLTTVRSILRNEKYKGAALLQKNFTVDFLTKKVKANEGELPQYYVENSHEAIIPPAEWERVQVEYARRHSLSTKYSGKSIFSTKIVCEQCDAFFGPKIWSSNTHLRRKVWQCNAKFDRKTYCNTPYLTEDAIKAAFVEVVTRLFCTREEVITNCETELRALTDCTAIEQEQSMLQEELEVVINLTQKYVDKNATSEEDQNTYLRQYNEYVERYQAIKERLLQLNTERSARIARSVAFEDFLNSLRSMENPPVEFDELMWRLLVEKVVVKKDGFLKFVFTNGMEVVI

SEQ ID NO: 21626 - protein, 426 aa, synthetic construct
MDRTVECIKVDAPAKANIKRVAAYCRVSSGKDAMLHSLSSQVSYYSGLIQNHADWSYCGVYSDEAITGTKSDRPGFQRMLKDCEAGKIDLILTKSISRFSRNTVTFLQTVRKLKSIGIDIFFEEQNIHSIDGSGELMTTILSSFAQEESHSVSQNMKWRIKKNFEEGIPWNNALLGYRLKGDRYELIPEEADTVRRIFREYLGGFGKTKIANGLTADGIPTRFGGPWHPNTVGKILRNETYTGNLLLQKTFIEDHITKKKRINNGERPKYLVESSHEAIIPPETFKAVQKELQKRSEMYCHASKKSASYPFTGLLICAGCGKTYTRKITPTGAVWICRTFNTRGKAYCPSKQIPEATLYEVTGQITTSIKEIRQITVCNGNSLQYDMADGRIISQVWKDRSRSESWTEEKRAAASQQLKTRRKADE

SEQ ID NO: 21627 - protein, 570 aa, synthetic construct
MDIHSARSQLRTRTVYDLPLRVTFYARVSSESDEQRNSLGNQISYYEELIRKNPNWTYVEGYIDEGLSAATTKNRENFHRMVEDGQAGAFDLIITKEITRFARNTLDSIQYTRRLLNAGVGVFFQNDNINTLDEDSELRLTIMSGIAQDELRKLSSRVKFGHQQAIKNRVVLGNSRIFGYRKDKGRLVVDPEEAPMVRELFQLYATGQYSLKQLENRFWTQGYRNHNGKKLSHTTMSGILSNPKYKGYYAGNKVKVIDLFTKKQKFLPPEEWVLFKDESGTIVPALVEEALWEQANQVLKRRSADVRHRQGICNHANLLTGKLYCAHCGSAYYRRDSVDRTGRKNSKWVCSGKIKNGAASCPSFPIYEEELKPLLFQVFRQADADAGALVEEYIELYRSLEQEGGLTRHMEALEQAIGTAEKKRQKLLTFNALGELSDQDFLSMNRQCAQEIEAARAELEELSAQRGSASDFKSHIESVRRTLQAARQEASSGLIGKEFVDQYIQRIVATPEADGSMRLQIQLFTGETTDRYLRNLRSSAARDVGWSQPQPVRSGHTFKKMIEAYENGMK

SEQ ID NO: 21628 - protein, 538 aa, synthetic construct
MENQMITGTRVDCLYRVSTDKQVDHNDKNQADIPMQRKACHAFCEKMGWTIVHEEQEDGVSGHKVRAENRDKLQIIKERARQGKFDILLVFMFDRIGRIADETPFVVEWFVKNGVRVWSTQEGEQRFDNHTDKLTNYIRFWQADGESEKTSIRTKTALGQLVEDGGFKGGVAPYGYDLVKSGRVNKRKHEVYELALNETEAAVVRIVFDKYVHEGYGAQRIATHLNNQGYRARSGKMWHHATIRGILCNLTYTGVLRSGESRSPVLPHLQIIEPELFEEAQRIRTNRANETERTVPRNIAGQSLLSGNVYCGHCGARLNLTTSGKAYPCKEDPHRVIKRVRYICYGKTRKQTDCDGQTGYTAHILDRIIDKLVRQIFERMKAIPKSEIVNARYREKMEERKNLLRSIRVDYTKAADELDMLKAEVIKALRGESTFSKDLLGSMVSEAEAKCTELQKQFEDAQAAYEEGQTVLHSLEEQYDNVISWADLYDTASLEAKKMIVNCLIRRVEVYRDYKLHIDFNIDFAQFSLGLDIVEIAA

SEQ ID NO: 21629 - protein, 554 aa, synthetic construct
MMNGYEYTGMDAILAGSFRAAIYCRLSKDDDLDGESASIANQRDMLESYCEKQGWEVVAVYQDDGYTGLNMERPDLKRMLKAIERRQINLVITKDLSRLGRNYLQTGTLIEDFFPRHGVRYIAMNDGIDTMRDNNDIAPFKNILNEMYSKDISKKVHSSYLLKAQQGQFTGCVAPFGYRKDPEDKNHLLVDEETAPIVRQIFLWALEGHGPNFIRRRLEEQKVPCPTWWNRERGFRNVRTKWEKKDPENGRYMWDFSVIKDILMNPVYTGAIASQKKDYRFKIGTIGEKKPQDWIVVEERHEPLIDSKSFAIVQDKLKSRQRPRQDGETSLFAGLIKCGECGKSLTIRTTHAKHPQQIYACKTYGAFGKNHCTQHRVEYDTLYHLVLNKIRDCAKAALTDGEAIAGKLTDTCEAEQKGQREALERSLTKDEERIEVLEKMVLRLYEDMVAGRISEANFNLMLDKTQKEQAELKERVAQGRKKLADEMRLAMDAKQWVDAIQEYADITELDAATLNRLIKEIVVHEHIDSDKTRHISIEIHFNLKPIPEVEQVKG

SEQ ID NO: 21630 - protein, 534 aa, synthetic construct
MENRVYCLYRVSSDKQVDYDERNQADIPMQRKECHRFADEKGWTIIHEEQEDGVSGHKVRAENRDKIQTIKEHAKQGKFDILLVFMFDRIGRIADETPFVVEWFVKNGIRVWSTQEGEQRFDNHTDKLTNYIRFWQADGESEKTSIRTKTALGQIVADGGFKGGNAPYGYDLVKSGRFNKRKHELFMLAVNEAEAPVVRIIFEKYVQEGFGAQRIATYLNDLGYRARTGKPWHHATIRGILCNLTYTGVLRCGESRSEVLPQLQIIEPELFEAAQTIRTSRANSVALENRVPMNTKGSTLLAGNIFCGHCGSRLSRTTNGKAYPCKDDPSRIVKRVRYICYGKTRKQTVCDGQTGYTASVLDGIIDKLIRQIFERMRAIPKSEIVGVRYQEKMKERKALLQAVRADYNKASADLAMLKAEVVKSLRGESSFSQELLSSLIADSETNCLKVKEQLDAAQAAYEEGQEIMAALNAQYDDIISWADMYDTASMEAKKMIVNCLIKRIEVYRDYKLHIDFNIDFEQFSLGIDLDAIAA

SEQ ID NO: 21631 - protein, 494 aa, synthetic construct
MENRVYCLYRVSTDKQVDHDDKNQADIPMQRKACHRFCEEKGWTIIHEEQEDGVSGHKVRAENRDKVQIIKEHAKQSKFDILLVFMFDRIGRIADETPFVVEWFVKNGIRVWSTQEGEQRFDNHTDKLTNYIRFWQADGESEKTSIRTRTRLGQMVEDGHYKGGNAPYGYDLVKSGRINKRKHEVFDLAVNEAEAAVVRIIFAKYVHEGYGAQRIASYLNNQGYRARTGKKWHHASIRGIICNLTYTGVLRSGDSRSPVQPHLQIIPPELFEAAQKIRTARANSAEQERTVPLNTRGSALLAGNVFCGHCGSRLSLTTSGKAYPCKEDPNRVVKRVRYVCYGKTRKQTDCDGQTGYTAHILDGIIDKLVRQIFERMKAIPKSDIVNIRYREKMEERKSLLHSVRAEYTKAAADLETLKGEVIKTIRGESTFSKELLSSLIAEAEAKCQELQENMETAQAAYDEGKTVLASLNAQYDDIISWAEMYDTASMEAKK

SEQ ID NO: 21632 - protein, 549 aa, synthetic construct
MNRNKKIVKKVTALYCRISLDDGNANESMSISNQKLLLKDYAEKNGLLPYEYYVDDGYTGRNFNRPSFKRMIADIEAGKVGCVITKDLSRLGRNYIEAGGYIEVFFPKHNVRYIAVTDGVDSLTRQEMDITPFKNILNDMYSRDISKKVLAGRMTRSRQGKFCGGQPPLGLMRDPADRGHLVLDPQTAPTIRKIYDLALNGWGCMRIAKQLMEEKIPITRVKSNTACDVNYYSWGSARISHILRNPFYKGAHLVCRTHQKGIRSGTVDTIPRKDWEVIEDCHEAIVSPEDWEKVQELIDRRPPIMQGNACPFYNLFHGMVYCATCGKSMQARYEKVGRTGKNRFTGKEREPIDKAYYICQTYNRLGKDACTSHKIEARDLYNLVLKDIQELAEMALKDADAFYRRLCSRMERRYLSDASEMEKERERLEKRNQEIDEMFLNLYTDKAKGILSEQRFLKLTAAMEKEQEENQSRIKDLSLLLHRSNEQENDVRSFIREIRRYAAIQELDETVLNRLISRILVGEINKVDGEKVQEVKIIYNFVGEIPAAQ

SEQ ID NO: 21633 - protein, 556 aa, synthetic construct
MAMMNEMEYRTIGSALAGGYRAAVYCRLSKDDDLQGESASIANQRDMLEKYCEKQGWEVVAVYQDDGFTGLNMERPDLQRMLRAIERRQINLVITKDLSRLGRNYLQTGHLIEDFFPRNGVRYIAMNDGIDTLRDNNDIAPFKNILNEMYSKDISKKVHSSYLLKAQKGQFTGCLAPFGYRKDPEDKNHLLIDEETAPIVRLIFGYALNGHGPNYIRRRLEKEKIPCPTWWNRERGLRNTRTKWEKKDPENGRYMWDFSVIKDLLMNPVYTGAIASQKKDYRFKIGTIGEKKPEDWIVVEGQHEPLIDSMSFDIVQNKLKSRQRPGQTNEISLFAGLLKCGECGKSLTVRYTNAKHPQRIYSCKTYNAFGKNHCTQHRIDYDTLYSHVLRKIRECARAALMDGEAVADRLTNTCEAEQREQREAMERSLTRDEERIEVLDKMVMRLYEDMIAGRISEQNFNTMLEKTQTEQTELKTKVSEGRKRLSDEVQLANDAKQWVEAIQEYANITELDAATLNRLIKEIVVHERIDEDKTRHISIEIHFNLKPIPEVEQVTA

SEQ ID NO: 21634 - protein, 571 aa, synthetic construct
MIQRGDGMKRIIKLEPATAPMPALVKVAAYARVSMECERLEHSLSAQVSYYSELIQKHKGWQYAGVYADNGISGTGTAKRDEFNRMLQDCESGKIDVILTKSISRFARNTVDLLRTVRHLKELGISVRFEKENIDSLSEDGELMLTLLGSFAQEESRSISDNVKWATVKRFQQGIPNGQFRIFGYEWVDDHLSIIPEEAAIIRSMFRDYLDGASRIEIGRVLNSKGILTRQGKKWVDSNVKAILRNITYTGNMLFQKEFTTDPITKHHKINRGELPQFFVKDTHEAIIPMDEFQAVQAEFKRRRDLGPLGNKSLHLTAFSTKITCGVCGKHYRRSGKRNTAEEVYYTWTCQTKDQKGAAACSSKNIPEKMLQRAAAQVMGLEEFDSAVFGEQIEEVLVVSDDTLCFRFYDGHEATTTWQSTARVDCWTPERRESWGAYRRHKATNPNRSMFNEFSGFITCGSCGHTYHCQSSTRSDGSRTRNWYCSGPRSACSNPALNDEVMRGLVCDVLGLKELDESIMNAQLKSASVLGYTVTFHFRDGHTTMRPWSKPKKYVTRRTDTHKNASDKERD

SEQ ID NO: 21635 - protein, 525 aa, synthetic construct
MAKTVTTIPASIGRFTAAPINTPHKRRAAGYARVSTDSEEQQTSYEAQVDYYTNYIKGRNDWEFVKVYTDEGISATNTKHREGFKRMVADALAGKIDLIITKSVSRFARNTVDSLTTVRKLKEKGIEVYFEKENIWTLDSKGELLITIMSSLAQEESRSISENCTWGQRKRFADGKVTVPFAHFLGYDRGKDGNLVVNPEQAVTVRRIYTMFIQGRTPFSIASQLTADGVLTPGGKQKWSASCVRNILSNEKYKGDALLQKKYTVDFLTKKQKVNKGEVQQYYVENNHPAIIAPELFDLVQRELERRNKSKERYSGVHMFSGRIKCGQCGSWYGSKVWHSTDKYRCVRWRCNHKYEGDEQCSTPCLTDAEVQQLYVAAVNKLFSGKEKIIAGFESIKATAFDMSSLIKERDELQSEALVVSELMQQCIDENAHVALDQAEYQKRYDGLSARFENAKGRLKRVTAEIHDKQTRQATIEAFLDKLKQQDGLVTEFTPELWYSLADYVTVYAKDDVRVTFKDGTEILA

SEQ ID NO: 21636 - protein, 534 aa, synthetic construct
MGKKQKYKLREVRRAIIYGRYSPGSRQTDRSIEDQIQACREYAEEHGILVVGVYADRRKTGTNDNRSDFRRMIDDSATGAFDAVLVWKNDRFGRNLEDQVINEVRLKRNGVSLISITEPRLEGALGAMQHAMLLGMAEFYSAANAENVSRGMESKAKECKVLGVVPLGYIKGPDGRHAIDPLQGPFVSEAFVRYDNGEGMASLLYDLNGRGFRAKTGKPVSISMLCAMFRNERYTGTYIWGDIRIEDGMPALVDRARFERVRKRVGNGKHSGQRSADTEAFLLSGKCYCGECKGRMVGTSGTGKSGSKYYYYACADQRTSRKKTACKMQAVAKDVLEDLVIDKTISYVLRDDTIERIADMVIDFSETHDNHVLLDDLKKRRAETVKAINNLLGLVEGGHASDTVTARLAEREDDLADIEYAISEQQALGAKYDRERIIYYLCQQREGDRKDAKYRQRLINMFVRSVTVYHDHIIICYNFDGDGGTEVTLEDLADAESAAEMASQGHFGQKKLSSHESSRELNLVNHRGLEPRTL

SEQ ID NO: 21637 - protein, 508 aa, synthetic construct
MKAVIYARYSSDNQREESIDGQLRECRDFAEYNDIEIVGTYIDRALSAKTDDRPAFQRMIQDSYRAIFDIIVVWKLDRFSRDRYDSAHYKALLKKNNVKVISATEQISNNPEGILLESLLEGYAEYYSAELSVKVKRGMTENALKGKWNGGSVPLGYVVGKDQKLEIEPVTAEVVKLIFQMAYDGKTVKEIHRYVEEHNITRPNGKPLRYNAVRYILSNRVYIGEYHHSDHIIENCVPAIIERHIFDSVQNELKKNAKAPARHTAEDDYLLTTKLFCGKCGAMMVAQAGTSHMGNVYRYYACVRQKKHLCDKKMLPKEKLENFVVFKTMELLQEDSVINELATLLYKIQDNESSLLPVLEQQLHEKEKEISNIVSAIRQGVASQTLMNCLNDIEKEKCDIENSIAKERIKTPSYSEDEYKMALTNYRKININTQEGKRKIIDTFINAIYVFDDHLKIIYNGKNKEECVSLEALEGSNLVSSGAPYEKLHFERSKCSFFIWCGCLHTVL

SEQ ID NO: 21638 - protein, 547 aa, synthetic construct
MGKKVCCLYRVSTLKQVEKDDIPMQKQRCHEFAAQMGWDIVREFSEKGVSGFKVSAKKRDAIQEIQREAAMGTFDILLVFMFDRLGRRDDETPFIVEWFVNNGIEVWSAEEGQQRFDNHVDKLLNYIRYWQASGESIKTSIRTKTRLGQIVMEGRFRGGYAPYGYQLVKKGRMGKKNRELFDIEVNPMEAAAVRRIFDLADQYGYGGRKTSTTLKEEGFLNLRTGEPFHYSTIQNILINIAYTGVLRSGESVSEIFPELQIITPEQFQRVQKGREQRSADYLAKCAAAYGTKTITLKDGSEAEVSRPFRSYPRKNTGSALLSGNVYCGHCGGRIFASTARKTHHPTEGSNGRVAIYKCYNRTQHKGNCDGPTTYRAEKVDAVVSKLIRDILQKAGAVSEYDIVRNQIGATASDLQQQIRQAKLELSKKHIEQGRWEGLMLDSLDGKCPFTPEQVKSRLDSLKESMQSLSANIESLEYRLADNDRLTQELKDQHQQLLSWAKMFDSASPAERKLIASHLIKAVTLTRGYGIQIDFNISEAQYLNGMEL

SEQ ID NO: 21639 - protein, 521 aa, synthetic construct
MGNVMIIPAKRQVGNTSRRQEDKPKLRVAAYCRVSTDSDEQASSYETQVEHYTEYIKKNPEWEFAGIYADDGISGTNTKKREEFNRMIEACKAGEIDMIITKSISRFARNTLDCLKYIRMLKDKNIPVFFEKESINTMDAKGEVLLTIMASLAQQESQSLSQNVKMGLQFRYQNGQVQVNHNHFLGYTKDREGNLVIDPEQAEVVKRIYREYLEGSSMDKIAKGLEKDGILTGAGKKKWWTSTINKILRNEKYIGDALLQKTYTTDFLNKTRVKNNGIVPQYYVENNHEAIIPKDIFLRVQEELVRRRVVKTSANGKKRSYSCNHCFAQLVICGECGEMFRRIHWNNRGCKSIVWRCLSRLEATGLECHARTVNEKVLESVVLEAINRLLGDKAAYQAQLQQNIAQVIRDANKNTSEKIDEQLMALQKELLQKANNKEAYDEIAEQIFKLREQRRQNTVDTTARDAQIERITALQDFINQQNTMLTEFDETLVKRWLKQITVYNDHFTVELKSELKVDVER

SEQ ID NO: 21640 - protein, 519 aa, synthetic construct
MKKVTKIDKIQPAKNAEDKLRVAAYCRVSTATDAQLESLEAQKSHYENYINSRDDWCFAGLYYDEGITGTKASKRPELMRLLADCKAKKIDFVITKSISRFSRNTMDCLEIVRTLLNLNIPVYFEKENINTGSMESELFLSVLSTMAEGESASISSNNRWSIKKRFGNGTYRLSSAPYGYKLESGGLQVVSEQADIVKRIFRELLSGKGMYSIAKELNAEQVPTQKGGRWTSTSVHNILTNEKYTGDCIFQKTYADSNFNRHTNNGELNRYLIQNHHEAIISHEDFNATAALIEQRAAEKGIESGSDKYQQRYAFSEKLICGECGNTFRRRIHKGKYNSYVAWVCNTHLSDTNRCSMLFVRDDALKLAFATMLNKLIFSYRLLLKPYLAAMQSNTADEALLRIQYLENQLDQNAEQRSTLHKLMAQGYIDQILYTQESNELLLQARDFRSEIEALNNTVAGDTTKVYETERLINYCKRGEMLTDFNESLFELFVDHILIYSRQKIGFVLRCGLTFEEMI

SEQ ID NO: 21641 - protein, 516 aa, synthetic construct
MKTAVIYARYSSDSQTEQSIEGQVRVCKQFAEKNDLLVVDQYIDRATTGTNDNRAAFQQMLRDSKKAQWGAVIVYKLDRFARNKYESVVNRKKLKDNGVELVSAMENIPDTPEGKLFLAVIEGFNEYFSEDLKQKVNRGLRESWLKGNATGGHPPYGYVIKDKKYVIDESEAEVVREIFMKYAQGYKAVAIAEDLKARNVRRKCGKHINHKYVYVILHDKRYIGEVTHQGTTYYNIFPPIIAKEVWNQVDAINRENKISPSRKKEIFDYILSGKLICGNCKHRMSGESGTSRNGEIHYYYVCLSKRRGKTNCDCKAVKKQELEDYVIDATVSMLQRNSIITKIAEAIVKVHEKMMRDNSGLQILIKKREEAKRAADNIVKAIEQGIIMDFTKDRLAALQDELNRLDIEINKEAQKTYAHVTVEDVEKYLLSKVFEDPDDIKTRKLLVNTFIRDILWYGDHIVITYNFQEYAATDRFCKSYVEQLEKQVGDASRSASSFSLCSYKFRHSAPNNRTCR

SEQ ID NO: 21642 - protein, 523 aa, synthetic construct
MAVSRNVTVIPAIKRVGNNKNSESKPKIRVAAYCRVSTDSEEQASSYDIQIEHYTNYIKKNKEWELAGIFADDGITGTNTKKRDEFNRMIEECMAGSIDMIITKSISRFARNTLDCLKYIRQLKDKNIAVFFEKENINTMDSKGEIMLTIMASLAQQESQSLSQNVKLGIQYRYQQGEVQVNHKRFLGYTKDENKQLVIDPEGAEVVKRIYREYLEGASLLQIARGLEADGILTAAGKAKWRPETLKKILQNEKYIGDALLQKTYTVDFLSKKRVKNNGIVPQYYVENSHEPIIPRELFMQVQEEMVRRANLRGGKDGKKRVYSSKYALSSIVYCGQCGDIYRRVHWNNRGYKSIVWRCVSRLEEKGSECTAPTINEETLQTAVVKAINELLANKEPFLSTLQKNIATIFNEENDHTTDDIDSKLEELQQQLLIQAKSKNDYEDVADEIYRLRELKQNALVENTEREGKRQRIAEMTDFLNKQSAELEEYDEQLVRRLIEKVTVFHDKFAVEFKSGVEIDVEG

SEQ ID NO: 21643 - protein, 430 aa, synthetic construct
MEKIVKDITPDLRANDTIKRVAVYARVSCEKDTMVHSLKAQIDYYRKFIMKNPGWKFAGIYADEGKTGTKEAREQFQALLTECRNGNIDMIITKSISRFARNTVTLLSITRELKELGINVYFEDQKMDSMSSDGQLMLTLMAGIAQAESKDCSDAVKWRIRHGYEQGRASSFKILGYRWDDGNVVMVPEEAQLVKRIFDLYLSGKGVNAISKTLNSEGVTAAGITKWAPTTIRNILMNEKYYGDLLLQKSFVEDHINKRKVINNGELPQYFIEDDHEAIIDRQAMSDVKNEIAIRRARFYHGQGKESCLTSKIKCPYCHANYHRKKINGISKWSCATSNRKGKSMCPESKDIREDVLLAILAHQLGYKDFDEKLFVEQVDYLECFNDHITTHFYDGSIKNSKWSNPSRKDSWTDDMKEKARQRGLNQYGK

SEQ ID NO: 21644 - protein, 597 aa, synthetic construct
MANKVIKVIPARPQGIIIDPAGTIKRKRVAAYARVSTEKDEQTNSYEAQVNYYTNYIQANPEWVFAGIYSDAGITGTSTKKREGFKRMIDDAMNGKIDLILTKSVSRFARNTVDSLVNVRKLREKGVEVYFEKENIYTLDTKGELLLTILSSLAESESVSISQNTTWGQRKRFADGKVSFAYSNFLGYDMGQDGKLHINEEQAKVVKRIYEEYLLGYTPSYIAKRLTADNIPTPQRKKVWHQGVIDSILTNEKYIGDSILQKTFSTDVLTKKRKKNEGELPQYYIENNHPAIITDEIFEMVKEEMDRRKSAGLMTNVSCFSGRILCGDCGGYFGRKVWHSNQPNRTMVWQCNKRFSNPDACGTTSIKEKAIEEAFIRAFNEMFSRKNEIIENYKLCIDMICDDSKFQEKKKELDKALEEKTIVIKNFLLKCSKTEENIEESNARYDVLIKEFEALNAERQKCLDMISSLAAKRVKVNSFLNILNSTEGVINSFDEVLFQKSVNHMVINHDLTIDVIWRDESKTTTYIERGVKEVKKSAPRIKPEKVLSDHTCLCCGKQLYITPGKVQRIFCNKKCGETYRRAKAKEARLANNTISQA

SEQ ID NO: 21645 - protein, 684 aa, synthetic construct
MSILQTIKTIIRVVLYLRLSDEDKNKLSKEELSQSIKNQEIMLRDYAEEQGWEVVGVYNDDDWSGSDATRPDFNRMIEECKNGNVDIVLCKTQARFARDMELVEKYVHNLFHEWNVRFITVVDRIDNARKETKKTSQILGLTDQWYLEDTSLNIRETLKSKRKDGQLTSSFATYGYMKDPENKNHLIIDPISAEVIKRIYDEYLSGTGLDKIARRLNEDKILSPYEYKLLNGSKLKIPVIKDYVNYGYIEKTGTYMLDVSFTNKEEYILKDLVSFNYITTDMKSFNNKCDIVLKKYTNNRTKIYYSENDNIDINNFNIDDCILLNENDVIPKTAKVIISYTKELDRTHTINYQFEITLKENREHEDYYINICGKATDEIKKSDFIHNIRKKFKWSSSTIRTLLTDEVYIGNMVQFKSTTVSYKNHTVVWNDDETRIRKDNTHEPIIAKDIWYTVQERLENTARSCKGGTVHPLCNKVYCSNCNQIFTKTGNRRSDGTGYLCCKDKKTNWSNCDNKTSIREDQLHQFILEKMNEMLKKFYEEDDLKEMQNEVIEQDLYKDKLNSLEKELQSINKELQGKSTYFQKLYEDRTNGILPEKEFLILMNKYKDDNEKLEERQKIVKKEISSTLAKKETVKTKKNIFKKYRHIEELSIEIVEDFIDKILIGSYDETTNSRDIKIIWNFTI

SEQ ID NO: 21646 - protein, 545 aa, synthetic construct
MAVTKIPKKTVTLIEPKRSFVVDKEKHKQKRVAAYCRVSTDSDEQLTSYENQMKVYTDYINSNKDWEFAGLYADEGISGTRADKRPEFKRMIEDCLKGKIDHIITKCVSRFARNTVECLEYVHMLRSKGISVYFEKQNIDTMKNDSELYLVIYAGFAQSESESISKNITWTYRKNFEEGKPIYMYKKWLGYKKGEDGIPEIIPYEAKVVERIFEMYLAGSPVDVIAKTLQKENLQFKEKKFTFSKQMIMSILRNEKYCGDCILQKTVTLDPIEKTRKANEGEAPMWLVENCHPAIITREMFNKVQEEISRRNAYTPQSNKTALTATGKYSKYALTDVLQCGECGTRFRRVTWSKRGKKKIVWRCVSRLDYGTKYCKDSLTVEETELQDAIVRALNKFNEEDSATYLMLMRSTIGEAIGLNGGSDEIDLLQRRIDALNKRMLTLVNESVQEGADIESHEDDFKEISEQIDQLNGRIKVIRESEHQDGELQTRLAEIQTTIDKRENNKNAYDDSIVRQMVECIKVFKDGKIIVTFGGGYEIEEHIKK

SEQ ID NO: 21647 - protein, 521 aa, synthetic construct
MKKVTKIEGIQNNSTQKKKLRVAAYCRVSTGSDAQLESLEAQKNHYERYINSREDWQFAGLYFDEGITGTKAEKRPELLRLISDCESKKIDFVITKSISRFSRNTTDCLALVRKLQSLDIPLFFEKENINTGSMESELFLAILSSMAEGESTSISENAKWSIKRRFQNGTFKLSYTPYGYDWDGENMVVNPAQAEIVKKIFADVLSGKGTQAIADELNADGIASKKNSKWTATTIRAILANEKYTGDVIFQKTYTDENFNRHINYGEVDQYMAPDHHEAIISHEDFDAANALVAQRASEKGIEKGNGKYQQRYAFSGKIICGECGDTFKRRIHTCTTYKYVAWACNTHLKDKATCGMKYARDDEIKAAFITMLNKLIYGHRLVLAPYLKALENSSGDEAVQRIQHLELLLAQNSEQRETLTKLMAQGYIDQILYNQETNALLLQAETYRSDIEAITICMTGDSVKVTETNLLLHFVSHTEMLTAYSEELFESYADHIEITGRNEIKFVMKCGLTFTERIGD

SEQ ID NO: 21648 - protein, 593 aa, synthetic construct
MNNNVQVIKASVAPRDRRKLNQLGELRVGAYCRVSTDTEDQLNSYNSQVKYYTDLINSKKEWTLVDIYADEGITGTQVGKRENFQRMINDCASGKVDLIITKSISRFARNTLDTLQYVRKLKERNIAVFFEDENINTLTMDGELLLTILSSVAQQEVENISANVKKGLKMKMQRGELIGFKGCLGYDYDPNTKELVVNEEEAEIVRFIFRRYTAGIGTFKLAKELKEKGFKTKVGSNNWAVSTIINILRNEKYKGDLMLGKTFTIDPIYKKKAVNNGEVDKFYIKNHHEPIIEASVFDYVQTLIDEKSGPRKEAAKNSGRETSKYPFSKILYCGCCGGKYHRRAAYESNKARNAGWQCNTAAYKGKANCPDSRFIEENLLETAFVYAINQIRDTNLIDEFLYTVKCALSNKTPERKADELLKDIKMLENKKKQLIDIRMEGILTKEDFEEQYKELNDKVEKKKALLSRASSEIDKKEFIASRLEDFKKIISIKNGTDEFDREIFEMLVDKVIVGGYDEQGNPDPYAIEFRFKIDYNFKINGQAIKKKYTVCQNESNDLGSLTTYCQVHSVQVLQNLQSHSVHTLKITYKLRNL

SEQ ID NO: 21649 - protein, 478 aa, synthetic construct
MKTAIYVRVSTNEQAEEGYSIDEQIDKLKKFCEVKDWQVANIYKDPGFTGSNIDRPGLKKLINDVENKKIETVLVYKLDRLSRSQKDTLFLIEDVFGINNTNFVSLNENFDTSTPFGKAMIGILAVFAQLEREQIKERMTMGKIGRAKAGKAMSWHWAPFGYTHKDDSYEVVDLEAQIVKQIFHDYLSGISITKLRDKMNDEGHIGKDIAWSYRTIRQTLDNPTYAGYTKYKDQIFPGNHEAIVSKEVYDEVQKQLEIRQKEAYKKNNNPRPFQAKYLVSGLVRCGHCGAALGLHQYAKKKDGTRTKIYKCHSRTGKKKNVTMVKADNCPSCDYPKEELENVVLSEIEKIRINPQLIQKSSHSAQEIDDTPLIKRLEELDRKLEKLVSLYLDETLSLEMLNDKKELIQKEKTAIEGKLNKTNKQKPELKISEAADILKNLKGSILKLDYEKQKIIVRKLIKQITLKDDEMVIQWRFAV

SEQ ID NO: 21650 - protein, 494 aa, synthetic construct
MKELIPAVIYARFSSSGQREESITGQLRDCKRYAENHGFEIINEYIDEAKTGTSDNRPSFQKMIKDSESKRFNAIIVWKLDRFARNRYDSAIYRARLKKNGVKIYSAMENISDSAEGIIMEGLMESMAEYYSANLSENVKRGNRESALQLKTLGRKIFGYGRSEDDHYIINETEAPVVRRIFNEYTSGKSIQDIIKGLNNDGIMNSRNNPWNKSSLKNIIGNDKYIGTYRFMDYVVPDGMPAIISKDMFSIAQEIKDRHKKSPARSREARYLLTGKLFCGHCGSPMTGEYGVSKTGKKYHYYRCIKANKHKCDKKRAKKDWIENVVVAELLNQLNDLTYIDQLADRFMEYQKKQQSDDSELKVLQDRLHGVNKSLGNMVKAIEMGIITPTTQARMEELEEQKQQLHTAIEQLKFSKPPMIERDEFLFWIDTLKQDTGNYDFKEKLIDIFLNAVYLYDDGYIDIGTNLIKGTKRVDSSTLEQLCLLNHPFQYELE

SEQ ID NO: 21651 - protein, 526 aa, synthetic construct
MAKQVTTIPASIKPFSKTPLTTSRKRRVAAYARVSTDSDEQFTSYEAQVDYYTNYIKARNDWQFAGVYTDEGITGTNTKKREGFKRMVKDALDGKIDLIVTKSVSRFARNTVDSLTTIRKLKEHGTECFFEKENIWTFDSKGELLITIMSSLAQEESRSISENCTWGQRKRFADGKVTVPFKRFLGYDRGKDGNLVVNLEQAKIVKRIYAMYLQGKTCHLIAKALSEDGIPSPAGKPRWNPSNIKSILTNEKYKGDALLQKSFTTNFLTKEHKINEGEIPQYYVTGNHEAIIEPEVWELVQREMERRKSEKGRHSGVRLFSGKIYCGECGTRLGSKVWHSTDKYKQVIWQCNKHCKKNSPCKNGMHLSDEELKAAVLSATNKLIENKDEILNSFQEIFGGVYDTHTLEGEKAKLESEMDVCAKMIEDLIRQNAAIPQDQSEYQAKYEDLEGFYNEKKVALAKVEGKLKKMQATKADIKFCLKQLQKQDRLLQTFDEQSFCALVDHITVFSKEDIRITFRNGSEICS

SEQ ID NO: 21652 - protein, 588 aa, synthetic construct
MAKIIKIEAKKSPLPNRKKVAAYARVSMETQRPHHSLAAQISFYSDLIQKNPEWDYAGVYADEGISGTSVEKRPEFMRMMKDCKAGKIDLILTKSISRFARNTVDLLKVVRQLKDLNIEVRFEKEKINSLSDDGELMLTLLASFAQEETISISNNVKWAIRKRMSEGNPNMRNNVYGYRWKDDTLIVVPEEARIVRRIFQNFLDGKSRLETEREFAEEGITTRKGNRWTDSNIKVVLTNVTYTGNLLCQKEFVEDPITKKRKKNRGELPQYFIANTHEAIIDRETFDYVQEEMARRRALGPRANKSLNIYCFTGKIKCELCGKSYMRNVRNNRAKHSNLGDKVFSWVCGSSKKKYSTCSAKAIPDRILKTCCAKVLGLEDFDDAVFNEQIDKITVPKQGVLIFHFKDGHTIRETWKNNARKESWDDAARKRASDYRRTHAMKRSDVTCFSTKIRCEHCGCNFRAQTQNCSTSPSGKRRYWRCAEHNGCDTRGFRDDLLRSLTAEVLGLDAFDDAFFLSKIDHISVLSREDLIFHFYDGKEIARKLIQPTHEGHKWTEEQHAKFKASIKECYASERHKPIRKEKLWPNK

SEQ ID NO: 21653 - protein, 479 aa, synthetic construct
MRYAVYVRVSTDKDEQVSSVENQVDICRYWIEKNGYEWDQNAVYFDDGISGTAWLERHAMQLILQKVRKNELDTVVFKSIHRLARDLKDALEIKEILLGHGVRLVTIEEGYDSYYEGNNDMKFEIYAMFAAQLPKTLSTSISAALSAKVRRGEHTGTIPFGYDRIDKKLIINEEEALLVKEMFDWYEDGRGYRMIANNLNKKGCRTRFGNLWSEASVKTIVTNSLYTGEHVMHKYKTVKVDGKKKTVKNPKEKWLVFENHHDAIISKEQWERINPVSGVKDKKTKSDYRNEFRGIVWCAHCGKRVRAIYAGVRSKYERVYMKCSTYKAYGTCINHIPVRYEDFRNLILERLKQKQEYIETRLVAQIKDKLQEKIAKSKKTIKQLGSKKEKLLELYMDSFIDKETFVNRNRKLEDEMTAQELQLLKLKDKDIQNRETKDIQDAFMLLQEEQDLHKAFQKLIKKIVFYQDGKLDIEYTFDY

SEQ ID NO: 21654 - protein, 466 aa, synthetic construct
MTKETSLQACDIITTSNPVLADCPPIKEEQDMNRQSDKITAIYCRLSRDDELAGESNSIVNQKAILKKYAQEQGFRNIQFFVDDGYSGANFNRPDWKRMIELVENDKVGVIIAKDMSRIGRNYLEVGLYTEMLFPEHDVRFIAVNSGVDSANQQDNDFTPFLNIINEFYVKDSSKKVKAVMKQKGESGEYLTTNPPYGYMKDPDNPKRHWIVDDEAAAIVRQIFAWCMEGYGPSQIAKKLKEAKVDCPTVHWMKMGRNAPAKTPDNPYDWAPRTITGILEKQEYLGHMVNFKTRKQSYRSKKKLENPPDQWKIFENTHEAIIDEETFARVQELRKNKRRPARTGKTNMFSGLVRCADCGEKLYYCTSASFETRQDHFVCSTSRKKGKEVCDTHFIRAVVLEEGTLQHMRLVIQCVADYEDAFRKALGAKRSEEAKKELSAKKRTLQKSENRLAELDRLFKRIYEDM

SEQ ID NO: 21655 - protein, 522 aa, synthetic construct
MAKVMLIPAKREYTKKHAEEETPKIRVAAYCRVSTDTDEQATSYEAQVTHYTEYINNNPNWKLAEVYADDGISGTGTKKREEFNKLITACEEGEIDMVITKSISRFARNTLDCLKYVRQLKAKNIPIYFEKENINTLDSKGEVLLTIMASLAQQESQSLSQNVKLGIQYRYQQGKVKINCNHFLGYTKGPDGNLVIVPEEAEIIKRIYREYLEGYSMDKIAAGLEADGLETGGHKTKWHTSSINKILRNEKYMGDALLQKTYTIDFLTKKRIKNNGIVPQYYVEDNHPAIIPKKYYLLVQKELVKRRVVHTSSNGKKRNFSSNHVFANIVYCGNCGEIFRRIHWNNRGCKSIVWRCLSRLEPTSAIEPCVARTVNELTLMDVVLKAINNTCTNPEPFIATLQKNIADAVKLSDSASTEEIDVKLEALQKELIKKATGKEDYNKIADEIFRLRELRNASTMAGVTRDEQIKRINDLQDFIKEQKVEVSEFDEALVRRLIEKIMVFDDYFEVEFKSGVKVNIKG

SEQ ID NO: 21656 - protein, 521 aa, synthetic construct
MAKVTKLEGNQTHKTTKKLRVAAYCRVSSNSEAQEESLKTQKEHYESYIISRKDWEFAGLYYDKGITGTKKEGRVQLLQLLEDCEAGKIDFIITKSISRFSRNTTDCLELVRRLLELNIPVYFEKENINTGAMESELFLSILSSLAQDESTSISENNLWAVKNRFKNGSYKIGYPPYGYDWTGEAIVINPAQAPVVQRIFTEALSGKGTHIIAKVLNAEHIPNKKKGLWRATSILAMLKNDFYTGTVTFQKTYKNALGKRQRNYGQKDKYAVDEHHEAIISKETFAAVTKILENNLKLKNIKINPELHTRRYAFSGKLYCASCGKKLKRVVHASTTHPYIAWSCPTHIEDATACSLLYLRDDVIKHAFVTLINKLIYGREVILKPLLEDLKNNPTLRVQKAIAAYQVKLLQNTEQRETLTKLMAEGFIGQQLFIKEQNELLLNADTYRKEIELLSNSKTTENTRLQGVKELLSFTEANSMQECFSEEIFTTLVEKVTILSRKEAIFHLKCGLNLKERLKAV

SEQ ID NO: 21657 - protein, 406 aa, synthetic construct
MKSVIYARYSSDSQREESIEGQLRECTEYAERNGITILRSYIDRALSARTADRPEFQNMIKDSEQKLFDVVLIWKLDRFSRDRYDSAHYKRILKKNGVKVVSVKENISDGPEGIILESMLEGYAEYYSAELSEKIQRGQKENALKCKNNGGNTPLGYVVGTDGVLAVDPLTAPLVTEIFTRYDSGESISEITASLNGRGLKTKKGKAFKIGGVSLILKNRKYIGEYQYGSVIIPKGIPAIIDDDLFDRVQRRMAFNKKAPAKAKATEEYLLTTKLFCGTCERLMAGESGTSSTKGVKHYYYKCGGAKRKLGCKRKSVRKHWIERAAVLVTVQRVLRDEEISRIAEAIVALQEKEDTSLPAMRQQLTECEKAIDNMLNAIQMGVLTASTKERLEKLEMQREDLKLSI

SEQ ID NO: 21658 - protein, 518 aa, synthetic construct
MARKTDKPLSNIAVIYARFSSHNQREESIEQQVAECKVFAAQQGLEVTEIYSDAAQSGRTENRSQFLRLQRDAKKGKFTNIVAYKSNRIARNMVNALTFENDMEKLGVKLYYAKEEFGNNAAGRFALRMMMNVNQFYSENMAEDIRRGMEDNAMKCKVNGPAPYGYKSGKSGTYEIDEPAAAVVREIFTRVACGDSFVDIYTDLNNRGLKTRKGNKWGRSSFQSILKCEKYTGVYIYDNIRVEGGMPEIISKEMFLKVQRILGTKGNPQGRHRINGDYLLTGKLFCGECGHHMMGLSGTGKNGLLHYYYGCSGKKEKPRCSKKNVRRDELEYEVARLVQTYILQDDVITWLADTLIKYQEEHSSDGDMTILNTQLSETEKSIKNLMAAIEQGIITPSTKERLMELESEKSKIENNITLLKADTITVSKEQIGGWLDSFRDGNIKDKRFQKRLFDSFLSAVYVYDDNRVRIVFNLCGLNKGDIDTKLMLGDTEAIEKVSDCSYKRCYGSPDLIKAEHLF

SEQ ID NO: 21659 - protein, 510 aa, synthetic construct
MLKIAIYSRKSVETDTGESIKNQIAICKQYFQRQNEECKFEIFEDEGFSGGNINRPDFKRMMQLVKIKQFDVVAVYKVDRIARNIVDFVNVFDELDKLNVKLVSVTEGFDPSTPIGKMMMMLLASFAEMERMNIAQRVKDNMRELAKLGRWSGGTAPSGYSVQKVKENGKEVSYLKKEKDADNIKLIFQKYASGYTAFEIHKYFKLKGFTYNPKTIYGLLTNPTYLEATEESIKYLENKGYTVYGEPNGCGFLPYNRRPRYKGIKAWKDKNMMVGVSRHEPAVDLNLWIAVQSQLEKKTVAPHPHESKFTFLTGGIMKCRCGAGMGVSPGRIRSDGTRLYYFTCSGKRYRQNGCSNLSLRVDWAESKVKAFLEKMRDKETLTEYYNSNKNKSNVDKDIKSINKKIVSNKKAVDSLVDKLILLSNDAAKPLAERIENLTQESNTLKEELLKLEREKLFNSNDKLNIDLIHKSIIQFLDTDSLEEKKKFAKDIFDKITWDSASKELLFFLQM

SEQ ID NO: 21660 - protein, 519 aa, synthetic construct
MKKITKIEENKVLSVKKKTRVAAYCRVSTASDEQLISLDAQKVHYENYIKANDEWEYSGLYFDEGVTGTKKEVRSGLLSLIADCEKGMIDLVITKSISRFCRNTTDCLEIVRKLLDLNVYINFEKENLNTGSMESELMLSILSSLAESESVSISENEKWSVKKRFQDGTYIISYPPYGYANINGEMVIVPEQAEVVKQIFTDTLAGKSTHTIVKELNELGVKSKKGSKWTAGTVNAIIRNEKYTGDVIFQKTYTDSSFYRHTNYGEQDQYLCTGHHEAIISHEVFNKANEVMSQRGKEKGNGENTQRYQNRYGFSGKIRCGECGSVFKRRIHNKPSGNYVAWCCTHHIENKYSCSMKYITDDSIKVAFLTMMNKLIFAHQVVLRPLLRSLKGLDDKDRLLQIQEYESKLEKNMEQRKVLTSLMASGILEPALFNSENNTLIQEKEILENEKNKLMHSVSGDRTKFDALEKLIKYVSGSEILKEYEDEVFLAHVDKITVVSREKIIFLLKCGLELRERMA

SEQ ID NO: 21661 - protein, 521 aa, synthetic construct
MNKSVTVIPARRRVGNTVKMEDKPKLRVAAYCRVSTDSDEQATSYEAQIEHYTNFIQKNEEWQLGGVFADDGISGTNTKKRDEFNRMIEECMAGNIDMIITKSISRFARNTLDCLKYIRQLKEKNIPVFFEKENINTMDSKGEVLLTIMASLAQQESESLSKNVKLGLQFRYQNGEVQVNHNRFMGYTKDDEGHLIIEPTEAKIVKRIYLEYLQGASLKQIGESLESDGILTAAGKARWRPETIKKILKNEKYIGDALLQKTYTVDVLTKKRVKNNGIVPQYYVENSHEAIIPRDLYMQVQEEMLRRVNLHSGADRKKRVYSSKYALSSIVYCPKCGDIYRRIAWNNRGKRSFVWRCVTRVEHGPERCDAPTVQETELQEAVIKAINMALGGKDDMLVALEQNIASVLALEDEGSMESINVKLEELQKELLKQANAKKDYNNLADEIDRLRELKQNAMAENAEREGLKQRIAEMQEFLAEQVEQIEEYDESLVRRMVEKVTVYEEKFSVEFKSGTSVDVER

SEQ ID NO: 21662 - protein, 543 aa, synthetic construct
MKKIISIAARNLSFPDNGQFLRKTRVCAYCRVSTGSLKQSESLETQVSYYESYIKNKAEWEYAGVFADEGISGTGMLKRTEFNKMIRTCESGKIDLIMTKSISRFARNSADCLNVVRHLKNIGVSVYFERENINTLGADSELVLSILSSIAQDESRNISENIKWGIQKRFREGKFYITTKRFLGYDLNNEKQLTVNSEEAKIVKRIYREYLNGRSLKGIKSGLEKDNIKTVTGNRVWNKSTIEYILQNEKYCGDAVLQKTITVDYLTGKRKKNKGEAPKYEVKAHHESIISKEDFLKVQNIRKRKALKYGNLPEDRDKYQNRYVFSGKIICGNCGAFFNRRTWNSKTKVKQIVWQCRTYINEGKNSCSMKAVDDITLKAVFIRVFNRIYEAKEDFFKRFDDNIEKVLKKNEKCEDVLKVDREIENISGKIKELVRKQIKGELEESTFDRKYRGLKDTLQEFKNRKNLLSYDDEKYKKLLERNKRIKKFIEGREGTITEFDDDIFENLIENIVVITPTHLEFHFKNGMVVEEEFIKKRGIKGLQ

SEQ ID NO: 21663 - protein, 533 aa, synthetic construct
MPKVSVIPAKQVQVINGIEDKKKKRVCAYCRVSTDTDEQLTSYEAQVTYYESYIRSKPEYEFAGIFADEGITGTNTKHRTEFKRMIDEALADKFDMIITKSISRFARNTLDCLKYVRLLRDKGIGVYFEKENIDTLDSKGEVLLTILSSLAQDESRNISENSRWGIVRRFQQGKVRVNHKRFLGYDKDENGELIINEEQAKIVRRIYKEYLEGKGIRAIGKGLEKDNILTGAGGRKWHDSTIQKILRNEKYSGDALLQKTITTDFLTHKRVKNKGEVQQYYVEDSHPAIIPKEIFQMVQEEIKRRASLVGYSEKTKSRYTNKYAFSGRIICGNCGSKFRRKMWGPGEKYKKYVWLCANHIDNGLKACSMKAVSEEKLKDAFVRSINKIIENKEAFIKTMMENINRVSESKEDRSKLKIINERLEELKDQMMNLVRLNVRNSLDNQIYDEEYERLEEEIKQLKEKKTGFDNIELIKKNGIHKVKEIEKILRGRQDIIKDFDRELFTQIIEKVKVISLVEVEFIYKSGVVVKEIL

SEQ ID NO: 21664 - protein, 520 aa, synthetic construct
MRAAIYGRVSTDRQSELSIEAQIEYCENYCRKNGWQIVNHYTDFGLSGTSIERRPGLMQMIADARDGQFDIVVAHKVDRAFRNTRDYENVKFELEKFGVILAFAETGMNDGGNGDFLNGLMALMAAQYSRNLSREVMKTVRKNVEAGNFMGGLPPLGYKIENKKFVIDDETAPLIDFIFSSYASGEYSMRSLAEHINSLGFLTSRGRPFTISTIHGILKNEKYRGVYVHNLHQFKKFGKKIGKKTRKDTDVIRMSGLIPRLVSDKVWEAVQKKMESNKSQKCNMSRAKRTYLLSGLLKCSECGSNYVGSVSKNQKGTEVRYYICNGRKRRLTSCDNMPINADWLEEQALKCIARLCDEMDLERLSKDANQAIRDLLKDQKEEIDRQKAKIAKMHREESNIIDAIAAMGLNDGLQKRLESVQKDIALAEERLEAITPRIIPIVDTATVSHMFQLTIKDIQEGTDEQKMRAIQSVVDSIKISKDKVLIKIKAGLSKAGFSRHDEVADSLVAEAGFEPATFGL

SEQ ID NO: 21665 - protein, 571 aa, synthetic construct
MLKIAIYSRKSKFTGKGDSIENQIEMCKDYTLSTISKDVEFTVYEDEGFSGGNLDRPNFKKLMSAIKNKKFNILVCYRLDRISRNVADFSSTLEILQSNNCSFISIKEQFDTSSPMGRAMIYIASVFAQLERETIAERVKDNMLEIAKNGKWTGGKIPLGFTSDKIEYIDEKGITRTSPQLIINEKEMKFVNFLYNKYLELGSLHKLEVYIHENNIRSRNDILYEKSSLKTILQNPIYVKANDDVVEYLNNSNWTVYGKPDNIHSLLTYNKTEQTKKDGKYTKVKKDLSERLAAVSSIKGYIEPELWLSVQKQFDKNKNTFPRLGKTHNALLVGKIRCGKCKEYMLISHGRISKTTGEKLFYYTCSLKKKSRKKLCDNGNAKAADLEKLVLLSLKQLSINKKDFLSKIRDKYKTDETYKNLDLDKLSLNKSLKEKKLQIDNLVTKLSLCNDIEDILLNKIKDLKDECTNIEKSLTELNSKTLTLKNNLLNLDLIESLLTKCSIIDKLDKSEQKLIIDNLIDTVYWYSDGPGKGKIKIKFVGTDDNQKEISFSIKEMQQLMLHFYSHSMSSI

SEQ ID NO: 21666 - protein, 538 aa, synthetic construct
MLRQATQNLITALYPRLSHEDELQGESNSISNQKRILETFAKQNGFTNLRWYTDDGFSGANFQRPGFQAMLADIEAGKVGTVIVKDMSRLGRNYLQVGFYTEMLFPQKGVRFIAVNDNVDSANGGMDNDFTPLRNLFNEWLVRDTSKKIKAVKRAKGMSGKPVTSKPVYGYLMDEDENYIVDEETAPVVQQIYQLCLAGNGPTKIARMLTEQQIPTPGTLEYRRTGSTRRYHPGYECKWATNTVVHILENREYTGCLVNFKTEKPSYKVKHSVENPVEKQAVFENHHEPIIDTETWERVQELRKQRKRPNRYDEVGLFSGMLFCADCGHVMYQQRYQNKNRKQDCYICGSYKKRTRNCTAHFIRTDLLTAGVLSNLRQVTEYAAKHESRFVKLLIQQNEIGGKRKTAVATKQLEQAQERIAEVSRIIKRLYEDNVNGKISDERFMELSADYEQEQRELKDRAAALQAELDKSQAATVNAEKFMGIVRKHLAFEELTPTLLREMIEKIVVHECSYDENGTRRQDIEIYYSFVGKIDLPE

SEQ ID NO: 21667 - protein, 533 aa, synthetic construct
MAKVRVIPSTINPLTQMPIGEIRKRKVAAYARVSTDSDEQYTSYESQCKKYTEYIKNNPQWNFVEVYADEGISGTSRKNRVNFNRMIEDAKSGKINLIVTKSISRFARNTVDTISLTRELKRLGVEIFFEKENIWSLEEKSEFILTILASAAQEESRSISENVKMGKRWAMQEGHTQWGYSSFLGFEKGQNGIQIVEEEAKIVRSIYRMFLIEGKTCACIATALNKAGIPTPSGKEGCTWKVVNIRSILTNEKYKGDSRMQKTFIEDFLDHKPKKNNGEIPQYYAENTHPYIIEKEDWEMVQHELARRKEIGATYSGRDIFSSKIICADCGSFYGSKVWHSNDKYRKVVYRCNNKYTKKNGKCQTPHLTEEEIKTMFVTAYNTALVDRDALIEDAEQIKNLLTNTEAENKDIAKYEAELAIITETANKMVKENSVKVQDQDEYQKRYDELTKRYESTKSKLDRVLLEKSRKRSQLLRLDCFISRLKDSPYIIEEWSEELWNVLLERATVQRNKSITFQFKNGTEINVMNLTKK

SEQ ID NO: 21668 - protein, 435 aa, synthetic construct
MENKVKTIDVKEKLAVKTKVAAYARVSSGKDAMLHSLSAQISYYNRMIQSHKDWLLVGVYADEALTGTKDTRAEFQRMIKDALEGKIDLIVTKSISRFARNTLTLLETTRTLTKKEIAVYFEEEHLYSNSKEGEMILTMLASVAQEQSRSTSENMLWRIKKDMEEGILYGGKSCLGYKIVDKKFIIVPKEAEIVKKIYQLYLEGNGDMKIARILNSSKIKTKNGGNWKMQTISCILKNYNYTGDLLLQKTFTESYLTKKRHLNRGEKTQYLVENDHEPIISKEIFDKVQQERRKRAEKIKVKSNKNIHPFVGMLYCGYCKKHYKYKKNKYRAYWICATYEEQGKDYCSSKQIRDDVLREATCKALAIDKFDVNILNSKIEKIELFSLDRKLVFFFKDKTTIEINYPERSRSLGWTEEKRELARQRKLAQNKKVVK

SEQ ID NO: 21669 - protein, 502 aa, synthetic construct
MEIQIREGNNIQKRKLKVCAYCRVSTDADEQENSLENQIRHYKEVITSNPDYEYAGVYSDFAISGFKEKRPGLQKMLADARKGKIDLILTKSVSRFARNTSIVLEATRKLKELNVGVFFELQNINTLSGEGELMLTILAAFAQAESESGSVGAKMVYQRKYEAGIPVQYLERSFGFKKDDRGVYIADEEEAVWVRKIYEMAADGYTPASIKRHLNENGVKTVGGAEWIDSTVFRLIENEIYKGDYIMHKHFVNEERKLVRNRGEVDAWYIEDDHEAIVSPELWQKAQDALEAKRDYLAESSVIEEFTEENYPYMNKIFCARCGHPLYKRIYSNGNRLNWGCSGTKRYGKSFCEGINIPDGVLRGAWHFDENMYIGEKPTDKGKKEFTYLKEASWKRRHKKKEPEPIPENTETEYPYREKIFCGLCGSRLVRHVNTKSHKVIWVCNGRKRKGKDFCDGTRVPDTIIKGWGEIKKDIYIQRKDDKNGKKRYSYTSKKPKGADRA

SEQ ID NO: 21670 - protein, 520 aa, synthetic construct
MKNVTKINQVDFSIFKKTRVAAYCRVSTDSDEQELSLDTQKNHYESYIKANSEWEYAGIYYDDGVSGTKTAKRDGLLRLMEDCEKGLIDLVITKSISRFSRNTTDCLALVRKLLNYEVYVIFEKENINTGSMESELMLAILASMAESESRSISENEKWSIKKKFQNGTYVISYPPYGYANVDGEMVIIPEQAEVVKEIFAGCLAGKSTSIIAKELNEKGVPTKKGAKWTGGTINGILTNEKYIGDALFQKTITDASFKRKRNYGEEEQYYCENHHEPIIDKDTFEKAKESIRQRGLEKGNCSEDTAKYQNRYAMSGKIKCGECGRSFKRRYHYTSHGKSYNAWCCGGHLEDSKSCSMKFIRDDDLKRAFLTMMNKLVFGNDLILKPLLISITANNSKKNANSVEDIEKEMKSNEEQRWQLNTLLTNGYLERPVFAEAHNKLTMEYDHLVAKRDLLFRMDNAGYTMEQALKELVDFLNDAKPFTEWEESLFERFIEKVKVLSRDKVEFEFKCGLKLKERID

SEQ ID NO: 21671 - protein, 407 aa, synthetic construct
MNKIKSCLYCRVSTQNEEQNTSYKHQQNISVKGYDIIKVYADRGTGTNIKRKNFQQMLYDCGVDIKEIEGNVLFIASDRKAMFESIIVTHTSRFLRNQLLMKLCIKALKKKNVEIYFSDMNKSSLDNDIEFVLNILFLLDEQESRNTSQKIKKGLERSRKDKKYIQVPNRLWGYDYIKKENKLIINKDGKIIKEIFDMYLNGLGYRKICLNLKEKYNIEKNSTDIKNLLNNSRYCGYNFYNKWTVSRLDGIKKKNKDYDIFPSDKIEPIVSYEDWCKVQNIIKSKSNGRQGLKHNMYPLSQKIKCESCGCSYVRKREKRGNYVRVFWSCKTKFFKQKGECINPNITERIIVKHLLDKDLGIKSYIRAIELELKKSLNDIKGIDIKEIDDLILKVENKRKKLLDIYTT

SEQ ID NO: 21672 - protein, 565 aa, synthetic construct
MGFKKLVNDTKIEKRRKIIAIYCRVSTDEQAEFGYSIDEQKRLLEEWCKANDYIIYKCYSDRGISGKNIKDRPALKELLSDAKEGKFDMVISWKINRVSRKLEDVLKIVNILEKNNITFKSYSEPFETDTPAGRMQFQMMALIGEFERGTIAQNVKMGMIAKAKSGNWCGGRVLGYDLVPNNSPEEEKKGKNKLEINEKEAEIVRFIFNEYSKGKGYKAITNKMNKLGYKTKKGNNFSVGSIRDILTNPVYIGEIRYNVRQNWSEKRRRNINPNPIRVKGKHEAIIDRELWDKVQLILESKKGKPSRIYDGEYPLTGILRCPKCGAGMVISRTTNTLADGTKKRIAYYCCGNWKNKGTSVCNSNTIRVDKANEYVFKKIEELVSNEAMIKAVVKNINKERKDKVKPAKRLLGDIDKELEKLDKRKRKIFEAYEDDILTKEEFQTRKNELNEKIRTLEEEKKPLLNTISDEVSEEIPYEFIKDILMNFSKILNSSISREQQKKLLHMIISEITMNESREIDSIKLNINDKLVDYLVKEGGVPIKGIPSSFMLRNIIVSVLNIYIEI

SEQ ID NO: 21673 - protein, 512 aa, synthetic construct
MKRITKIDAAAKETKKLRVAAYARVSTDSADQLVSLDAQKEHYEQVIKNCPNWEFAGLYYDEGVSGTKMAKRDGLLRMLADCERGLIDYILVKSISRFSRNTVESVETVRRLSVMGIYIFFEKENIDTGKMEGELMLSIMSSLAEDESRSLSENNKWSIQKRFQNGTYVIGTPAYGYKNAEGKMVIDEEKAEVVRRIFDSVLEGKSGGTIAKELNAKGIPTARGVQWRGSVITAMIRNETYTGVAVFQKTYKDDQFNSHVNHGERGMYRIEGHHDPIVSEEVFLAANTAVDNNAKEKGVVRNSGKYSVRYALSGKIFCGECGGKCKRKKIYGDIWYGCEMHARESKKCRQLPVRADMVEAAFVNMMNKLIYGRDAVLLPMSGRLLGGGDKEIIDRLAEINTELDAVAERRQAADKFFAKGLLDAAVYREELDELARKEKELHTVRAGIEGDPNLDSDRQRALNELLRYTAKAELLTAFSDEVFTKHVDRVIIFSRKEVGFAMKCGPVFQERI

SEQ ID NO: 21674 - protein, 515 aa, synthetic construct
MPEIRYIPAVGAPENAKLPVAAYCRVSSDSDDQLNSLSAQVREYTKQITADPDWELAGIYADEGITGTSTKKRNEFKRLMRDCEAGKVKRVLVKSVSRFARNTTDCLQYLRQLSALGVTVYFEKEGIDTAKMSSDVILTMTGAFAQEESNALSTNMRWSYQKRMQAGMFVGNIAPYGYDWKNGTLIINEAEARIVRWIFHSYLDGLNRAEIAAQLNAMQNEPSNRPIWYKTTVNYILANERYIGDALLQKKYTVQGTIGLEKRNHGEMPQYYVEDTHPAIISEDTFRRAQAMRIRQTTYLGPHIGSHIFQKRIRCAECGRTLRRKPRKSGLVSWVCLSHDENKALCPTPPIFESNIEKAAIMMYRILRFGIKDILHPMLYQLEQLQGRTVSDSTAINELNQSIASLSEQRHMLNRLLSKGFMEPDTCQAQVNAISQQLADLNRRRRSLIEAQAEDDAIENTQLLIDILEDAPENLVSLEDGGVFDMIVDKVIIDKDKNITFRLINGLELGGDFDG

SEQ ID NO: 21675 - protein, 544 aa, synthetic construct
MPETPAKTVTVIPATITGPQVKRRSGPLRVAAYCRVSTDDKEQLTSYRNQIDFYTQKISSNPEWTMAGIYADEGITGTIARKRKEFNKLMAACRRGRVDLILTKSVSRFARNTLDCLTYVRMLKELGIGVLFEKENINTLKDSNETILTLCSALAQSESESMSGNITWSKRKAFRDGKVTFQYNRTLGYRRGADGKPEIIPEDARVIRRIFCSYLAGGSLGRICKELMEAGIKNSTGGDEWKASTLLYLLQNEKYCGDALLQKTFVSDCISKKVKKNNGELPQVYVKDNHPAIVSRELFNWVQEEIARRRSKPKVSTKTSKTNLGKFSSQYALSELLCCGECGTPYRRVTWTSCDRKRIVWRCISRLESGKKICKSSPTIPEPILHGAILRGMRLLLDNKAELLASIRDALNTALTSSAEGDAPSIQRRIEEKNAAMMKLVQFAVESGATEDYFDAKFAELAAEIAALHAQAEKLEQSDVTRDTLQTRFDEMMKRLESEEPDLETYNDDLVRYYIESITVMSKTQINIRFKMGIEIAEELKYEE

SEQ ID NO: 21676 - protein, 527 aa, synthetic construct
MNTAVRTVTVIPPSINPMTHLTDTPLYKLRVAAYARVSTDSDEQFTSYEAQIDYYTQYIQRNPEWTFVKVYTDEGISGTNTKHRAGFNEMIEDALAGKIDLIVTKSVSRFARNTVDSLVTIRKLKEKGVQVYFEKENIYTFDGKGELLLTIMSSLAQEESRSISENVTWGQRKRFADGKVNLPYKQFLGYRKGADGFPEVVPEEAVIVRRIYTRFMEGLTPGAIAKELTADGIPTPSGKQRWQTSTVESILQNEKYKGAALLQKCFTVDFLTKKRKVNEGEVPQYYVEHSHEPIITPEEFDKVQTELARRKRISRQYSGKSIFSSRIVCGDCGSYFGSKVWNSTSKYRRVIWQCNGKFKGEHKCETPHLDEETIKARFVAAINAIIDSKDNILEDCRLMQTTLTDCTGIDAEIESLLEEIDVVAELTKRCIAENSQTAQNQNEYAARYNGFVERYEKAKSRLEQLRTTKAAREAQAEAIGAFMFEMQELDTINEFDEKLWLTIIDTITVHADGRMTFKFQGGTEIEA

SEQ ID NO: 21677 - protein, 518 aa, synthetic construct
MAKVPQVKVIQPTAEQAKKLRVAAYARVSSDSADQLDSFATQVGYYTSYIQSKEEWEFAGLYADEAVSGTTADERDDFQRLLTDCRAGKIDRILVKSISRFARNTLDCIQTVRELKQLGVTVKFEKEEIDTGNMGSEMLLSILGAAAQEESLSISQNLKWSYRRRMRSGDFITCSAPIGYALKNGELIPDPREVPIVEYIFSSYLAGKGIIEIASELTAMKIQKNGEEAKRWAPTSILYILKNEKYIGDSLVQKRFTTGELPLQRKQNNGQLTKYYIKDSHPAIISLEVFEAVQKLLRQRSFTHAPKTETQQFSLSKIIKCGLCGSTFYRRINNGFVKWMCYQHLKSKELCSIKSVSQEEIYQAFLKVYNKLLDNKRFILKTMLNQLLELQNKSMSMRLDILDLNQKISDLIKQNHSLTRLQTKGCIDSALFIERSNRNNQKIKELRRELRQLQEPDNINSAIENTKLMLDLLEEDTPMLEFEPSIFKSMVQKITVYPQKFCFHLTNGLVLDEGRRQL

SEQ ID NO: 21678 - protein, 536 aa, synthetic construct
MPEKIIMEIPANPLLGDLRKRKRKLRVAAYCRVSTEEEEQQNSFEVQVSYYTDKIIHHDGWQLAGIFADEGISGVRIKKRDQFNEMIELCRKKKIDLILTKSISRFARNTLDCIKYVRILKSWGIPVIFEKENIDTSNMNSEMILTCLSSFAQAESESISGNVTKGIRMGYKQGRFAFRYTGFGYRKGADGEPEIIPEDAKTILRIAREFLNGDSLKGIKEKLEKAGISSPAGELKWTTQTIHRILQNEKYAGDVLLQKTYTSDFLEGKVKKNNGELPQYYIKDNHPAIIPREMFFEIQEELARRRSKKPANTKRAKTNRGRFTSKYALSERLVCGDCGCYFRRVTWNIHGRKQIVWRCINRLEFGPKSCGKSPSLEETALHIAILEAIRSLVHGQQEEMAAALQDTLIHCIAGEKEEASPIVIENEIKELETEFDRLLVLAVDENDIIDRKLKQISESILKLKQQKKKIEYAAERSKAMESKAKEVMGLISAEDLDLTEYSDALVFRIIERITVLSKAEIRIRFIGGFEITQELQ

SEQ ID NO: 21679 - protein, 536 aa, synthetic construct
MPYCIYLRKSRADMEAEAHGEGETLARHEHALLDLAKRQKLNVTAIYREVVSGETIAARPVMQQTLNEVEQGVWEGVLVMEVERLARGDTVDQGIVAQTFKYSNTKIITPTKTYDPNNEYDEEYFEFGLFMSRREYKTINRRLQRGRIASVKEGKYCGNKPPYGYLRKKLEKQKGFTLEINPEQADIVRMVFELYTKGELQPDGSLKRLGVSLIVRKLNDMKVPPMNGDVWVTSTIQGMLRNPVYIGKIRWNSRPAVKKMVDGQMVKERPRAKEEDWVIVDGLHEAIIDNETWEQAQDLLKNNPPLPVPTRKKVSSPLAGLIVCGACGRKMVRRPYGGKYPDTIMCPVTSCNNISSQLTYVEERLIQALRLWLANYKMKWDTEDKPSENSVQLEVKRKAVRNLDDELKNLSKQLDSLHDLLEQGVYSTEKFLERSRTLSNRINSAKDRRNALLAELALDEAREESQRFIIPKVEKVLELYFQTDDPAIKNELLREVVGKATYLKLNPEAIPGEAVKGRWQCKPDDFSLDLEPKLYR

SEQ ID NO: 21680 - protein, 407 aa, synthetic construct
MPKVRRIEAREPSFVPKKRVAAYARVSKETDGLLHSLSAQVSHYSALIQKNPEWVFAGVYADTGITGTSTKKRDEFRRMIADCNEGKIDIVLVKSISRFARNTVDTLDTVRHLKDIGVEVRFERERINSFSGDGELMLSILASFAQEESRSLSENIKWTLRKGYAEGKHYIKKRMLGYRWEGDELVIIPEEAGTVRDIFEEYVKGTGIAEIRDMLKAQGRMGINGNPLRPESIRAVLKNENYTGALVMQKNYNTSPGRQRVNRGELPMYRIEEHHEAIIPRELFEESLKCREDRYRASLERVKRGETCFTGRIRCGKCGSGFSNHVHYKKDGSPYWTFSCNTRGCHGKAACDCPGFGLKKLEKATAEVLGTEEFEEEFREKVREIRMYDRHLEFVFKDGRVAKWQKG

SEQ ID NO: 21681 - protein, 533 aa, synthetic construct
MAKRITTIPATISRVAAVPTGSREKRKVAGYARVSTDMDAQQTSYEAQLDYYENYIRGHDGWEFAGMYSDEGISATSTQHRSGFNAMIGDALSGKIDLIITKSVSRFARNTVDSLSTIRKLKEHGTECYFEKENIWTFDSKGELLITIMSSLAQEESRSISENTTWGKRKSFADGKVSVAYGMFLGYDKGPDGGMVINEKQAETVREIYRLFLSGLSFTAIKRTLEGKGVKAPGGGDTWHTVTIKSILSNEKYRGDALLQKKYTADFLTKRQVRNKGEIPQYYVEGDHPAIIEPRTFDLAQAELQKRKRKKKYSGTSIFSSKIVCGECGGYFGSKVWHSTDKYRKTVWRCNHKYGKGKKCNTPHLSEDEIKTLFLKALNRLLADREEIIENMEVLKDGVSNTDGLQDEMDRALAEMEVLTRQTEDLIAENARKAQDQTEYAKKYDALAGRYDEQKARLARLQERKADAEATGGILDNFIQTLKEIGDAVTEFDDRLWSSLVESVTVYGKEDATFLFKGGTEIRIGKEREREGQ

SEQ ID NO: 21682 - protein, 616 aa, synthetic construct
MTLYDETPPIPHPDQLHFETIDVSTGQPVDDVPVGKRAVIYLRVSTPSQVNTDYDPEGISLPAQRKACYRKADQLGITIIDEYIEPGRSAREMTKRLAFQQMLERIRTERDVDYVIIYKLSRMARNRFDDAIVGAELKKRGVTLISATESIDETPVGQLMHGILAAFNEFRSAEEGADIAYKMGEKAKKGGTLGKAPIGYINTIDRIDGREIRAVAIDEERAPLVRLAFEMYAAGEATLEDIQNELTDRGLRTRPTQRRPAGPVSVSKIHQMLQDPYYVGIVTYKGEEYPGRHEPLIDRELFDQVQDLLASRGRAGERRRVVHHYLKGTLWCGACWRRDKSIRRMIVRRTISRSGEEYLYFFCRGTQDGFCDAKYSNVHRIERAVEEHYRTVQFSPDFLQAMRQTLDDALAEQEASQRALKEQLKGQLERLDAQESNLLELAVDDTIPKEKIRAKLREIGTERERLTAQLQATVDTLKDAVEFIETNLRLLEDPYELYMNASDEVRRRLNQAIFKHIFIDHDEIIDHDLEDPFGDLFTVQTIYHASTIGAPPGRLHDLAQASWAKHYQTTKKKGAARMGDSLTSLTLEAPPNPAHRVGVCSKPHLVGLTGFEPATP

SEQ ID NO: 21683 - protein, 525 aa, synthetic construct
MASNIRVIPATIQRTSAQSMNPSTKRRTAAYARVSTDSEEQLTSYEAQVDYYTKYIKERPDWEFAGIYTDEGISAVNTKKRDGFNKMVADALDGKLDLIVTKSVSRFARNTVDSLSTVRKLKEKGVEVFFEKENIYTFDGKGELLITIMSSLAQEESRSISENVTWGQRKRFADGKVSMPYKRFLGYEKGEDGTPKIVDSEAEIVRLIYRLFMEGKTSSAIAKHLATSGIPSPGGKKQWQVATVNSILTNEKYKGDALLQKRFTVDFLTKTIKENEGEIPQYYVQNSHPAIIEPDEFDAVQAELERRKRLGRPAACQSPLSTKLVCGDCGGFYGSKVWGSNTKYRRMIWRCNEKYKGEVKCSTPHVTEEEVKEKFVDAVNSILEYREELLTNCRLAQETLCDCSEIDSELNELHRELEVVAELFKKAIYENAHTAINQKEWHERNNGYLERNRKALERMTELEELKRERQSKSLVLEGFVQNLTKRNSILEEFDNRLWAAIIDNVTILTDGKLVFKFTDGTEVIR

SEQ ID NO: 21684 - protein, 431 aa, synthetic construct
MKRIIIKKEKTIATMPTLTKVAAYARVSSGKDEMLHSLAAQVSHYSDYIQRHPGWLYIGVYADEAVTGTKDNRPEFKRLLADCRDGKIDLVLTKSVSRFARNTVDLLETVRELKSMDVDVFFEEQNLHSMSGDGELMLTILASYAQEESRSASENCKWRIRKRFENGDLANLRFMFGYQIVKGKVEIEPEQAAIVRMVFEDYIGGMGGTKLAEKLKRMDISRAFSGEWRSERVIEIIKNEKYTGNALLQKKYVVDHLSKKLVHNKGHLPKYYAEGTHPAIIDQETFDKAQAILNSRRLKSKTKSSTCSRYPFSSILQCELCGKKYKRKDRKGKVAWYCSTYLQEGKAACPSKQVPESVLYSLSTEVLGLEELSADTLRKEIAEILVPEPGKLIFVFHDRHTVEKRWQHKSRSESWTEEMREVARERTKRRC

SEQ ID NO: 21685 - protein, 535 aa, synthetic construct
MKRNGTATAPKPAPRAAVKLVRCAIYTRKSTEEGLEQEFNSLDAQREAGEAFVRSQAGEGWVLMPERYDDGGYTGGNTDRPGLQKLMAHIDEGRVDCVVVYKVDRLSRSLLDFAQLMRTFEQQQVAFVSVTQQFNTATSMGRLVLNVLLSFAQFEREIISERTRDKIAATRRKGKWAGGHPVLGYDIDPAGYKLVVNPAEAERVRAIFALYLEHRSLLPVADELATRGWTTKQWTTRKGPERGGKRFDRTNLYNLLTNPLYIGKVRYKDEVHDGEHPAVVDPGVFHQVQEALRRNGRTGGAHVRNQFGAVLKGLLRCAPCGAAMTPTHSTKGAKRYRYYACVAGQKRGARTCPSRSVPAEPVETFVVDKIRAVGRDPELLRQVLDRARDAGAARAAELEAERAGLDKDLRGWHAEVRNLSVPLRPGEDNGPLVARLADLHERIGTVEGRVTKVRDQIKAVAAQLVPEEQAARALAAFDPVWDALTPLERARVIALLVQTVEYDGRDGRVTVSFHPTGIKALADELADRVEHKERA

SEQ ID NO: 21686 - protein, 526 aa, synthetic construct
MPKVTMIPATINPLTHLPSVAARKRRVAGYARVSTDSDEQFTSYEAQVDYYTKFIQSKPEWEFVKVYTDEGISGTNTKRREGFKEMITDALDGKIDLIVTKSVSRFARNTVDSLVTIRKLKENGVECYFEKEGIYTFDGKGELLITIMSSLAQEESRSISENITWGQRKSFSDGKVHLPYKRFLGYEKGEDGRPAVVESEARVVKLIYGLFLEGKTQAGICKYLEELGIPSPGGKQTWSKTTITSILQNEKYKGDALLQKKFTVDFLEKKMKPNEGEVPQYYVTGSHPAIIEPDEWEQVQAEFARRKTLGKAYSGKSVLSAKLVCEDCGAFFGPKVWHSTDQYRRTIWQCNGKFANEERCHTPVVDTETIQRLFIKAYNLMMQDRVQIIKQCEAWRARLMDFGTLDADIERQLEETQVVAELVKAAVKENASTTQSQEAYLKKYEALTERYEKAAAELERLQSLRTARSQQDKKMELYIRTLKKQPEVMHDWNDTIWTVMIEKAIVHKDGQITFVFQNGTEIKVGA

SEQ ID NO: 21687 - protein, 433 aa, synthetic construct
MPRAITIVPKPPKLEQKKRVAAYARVSSGKDAMLHSLSAQVSYYSDLIQNHDDWLYVGVYADEAKTGTKESRADFQRLIADCRAGKIDMVITKSISRFARNTVTLLQTVRDFKAWEVDIFFEEQNIHTMSGDGELMMTILASYAQEESRSASENQKWRIKRNFEEGMPWNGAMLGYRLKNGRYEIIPEEADLVRRIYDEYLSGDGYLTIAKRLNEDGIPSRFGKQWGQSVISKILSNYTYTGNLILQKTFRENHITKKTVINNGELPKYHAEDAHDAIIDMETFQAVQAEKARRAARFIKKPTPKKTYPFTSLLVCDGCEKNYRRKVTKTGPVWVCGTFNSMGKAACASKQIPEETLQAVTAEVLGQVDFPEELLRRLIKSILVCNENVLIFRSYDGSEVTRKWQDRSRSQSWTDEMKATARQKALERRNQNA

SEQ ID NO: 21688 - protein, 519 aa, synthetic construct
MLTATIYKRQSTLRQHTNGDSNSRQTNSSAEYCTRNNLQVTEVLSDAGISGFTGENFAKGELGYFIERVQAGEYQQGHTLVLEHLDRFSRADVDVAINRLTSITTAGVDIAITGLGKEERILKKGMPLTDMLVVLLEFAQANDESAKKSERLKSAWVTKKQQAKDGVIITKRYPNWLDTKDGKFIVKKVNADLVKEIFSFYIGGESFMSIARILTDKDTDGSLIKCYPRSTTFKSTCVGAILKNHSVYGRLDKMDVDDYYPVIVSKEDFDLVQSIRGKRTKNQHSSGYTIKSASKKGVIKHLFSGLYECITCGGSLQYNEGERAKLKSNPNWESLYRLRCISAQLKSYGRCADSYTLKAREVERMLWNRMDNLMLYDAADEINTQQTIKKLDNEIVSYDETFNTYDFMIASKYQVPVELENDYNKAFHRVTEINNTKKTLEQQLKNSNKSLLTYKELNSNDKRNQARRLVEHTIKSIKVNWNKKPNAEFLVTLNNHQRYIIVNVDGKYKTVAKGLLLEF

SEQ ID NO: 21689 - protein, 474 aa, synthetic construct
MKLHAVPETPPRAVLYLRQSVFRDDSISIEMQETAGRDYCDRMGYTVVKVEADQGLSGRKWDNRPAVKRVIDMIEASEADVIILWKWSRLSRSRRDWVLAADRVDVAGGRIESATEPIDTATASGRFARGVMTEYAAFQSEQIGEQWEEVRQRRLRLGLPTSGRLPWGWRRTDAGIEPEPEQSPYVVEMYRMYLSGSGAASISRWLNSKAIPSPNGGIWNRVRPFTVMDSPIHVGMVPYRGEVFEGHHDGIIDLATWEAYQSMRKVRRVSGAKPRQSTYLLSGIVRCACGFRMQGKGAVTGGIWYGGYICTSMDPGHGHNYVSAKKLEPLVQTWLEGLAGELDEAVDLAPRVENEANLERLLAEQNAQQRRIDKLTSLYVDDKVSDASYAATRVEVEGRQRELRDQISEVKTLLAGVPDVSRDLVRDMARDWDDFDAIGRREVLGSVLQTVLLDLDAHRADFNSRWGNSSPLHW

SEQ ID NO: 21690 - protein, 507 aa, synthetic construct
MTKNAVIYARYSSDRQREESIEGQIRECRAFASTNGYEIIGIYTDRALSARTDQRPDFLRMIADSDRHIFQFVIVYSLDRFSRSRYDSAIYKNRLKKNGVRVLSAKENIRDDPTGVILESLLEGYAEYYSLELAQKVKRGMIDNLLEGKWVGTAIPFGYRKGDDAKLHIDEAKRNAVIDIFQMYADHSRIVDIIRYLNNRHFTTSQDRPFSRNSLNHILGNPIYTGTFRWGGESYKDYAPRIISDELFECVQKIKAGRKHSRTRGKSPDYELTGKIFCGRCGLPMVGVSGTSKSGSSYYYYKCSGRTHGKKNCDSHSIRRDIIENAVYEATVSMLKQPQAVKIITEQAILAQERCRDDSEVLRLKKEKDALEAKIRNISKAVAAGLTADEIIAQANEYSRRSKELETLIQVEELKEKTFTLTPEAVTFFLEKLLEKAKSGQATLSTFWDFIRCIKINGSIAEIQFNYTAVPATLDNPIQIELNLDEECSNETVLVGPPGFEPGTNRL

SEQ ID NO: 21691 - protein, 550 aa, synthetic construct
MIVETGPKTKRAVGYIRVSTAEQKEEGYSLLGQRKNIEMFAEKQGYELIDVYADEGISGKNIIKRPGVQRLLEDAKTGKFDVLIIWKLTRLGRSMKDVMNIAEILYSNNVELHSISESFDITTSTGKMMLGLLANFAEFERSQISENVKMAMKSLVKNNKRFPGGRMLGYRSDRDENGMKILTIEPKEAQVVQMIFSKYLEGNGYRAIANTLNKMGYKTVKGNTFSTIAIKDILMNPTYTGMLRYNRYEDWENKRRKGYNPNYILVEGTHEPIIDKEIFGKVEERIKMESKQPQWTHAGENILTGLLRCPECGGAMAASNTTNKRKDGTKKRIRYYSCANSRNKGATVCHANSIRADVAESFVLGRLREVIAFPENLNKIIDELNHQIKSQRKPWELELQTLEKELVETQAKIDRWHTLLKDTPELSSELGTRIEHLEIEYYNHKQRIKELNCMLEVEGYNIKRADSKRVLELVNILIEDSDSKKTTKAILKTFVDRITFDKESKSDFKIYMTFDQLIIDRLNEFMSSEPTAETNAVGSFILPKTLKITV

SEQ ID NO: 21692 - protein, 424 aa, synthetic construct
MEVQVLEPKDLGKKKIKVGAYCRVSTDSKSQGNSFENQVQYYEKLIHKNPAYEFVKVYADQGMSGTSENRTQFQEMLEDARMGKLDLIYSKSISRFARNTITVLKYVRELKELGVGIFFEEQRINTLTGEGELMLTVLASFAQEESRSISENNKWAVQKKFKCGDAMINTSRFMGYDKDKDGNLVINAAEAKTVKRIFKLYLEGYGTFRIARILNAEGVQTVTGAQWHDSTIKGMIQNEKYKGDVWLQKYFTPDNKKNQTIKNTGQKDSYYIKANHKPIVSEQDWNRAQEIMEMHRKEKGMKTGEKDKYQNRYPLSGMLLCPHCMKTLRRCTVYNGKIAWRCSTYVTKGKGACIGISVDDSEVATKNITEPTVVEEDYNNGKKHYLYTSAKDYKKRTWKATIKEEAGGSVLPSVDRPRRTAIKL

SEQ ID NO: 21693 - protein, 521 aa, synthetic construct
MVIAIYSRKSVYSDKSDSTATQITLCKNYIESHFTDYTILEYEDEGYTGANTDRPGFTKLMQNIALGTIDVLICYKIDRISRNVVDFSSTFETLQKYNVEFVSIKEQLDTSTPLGRAMMYICSVFSQMERETIAERVKDNMIELAKGGKWAGGKPPIGYKIERVITNGKSHAILVPDEEEAKYVHDIFDLFFKLKTLNALERYYRNNGVTTKTGSYFSSSQFYNILHNPCYVAATKDVYLFFESLGCQMASTIDKFNGEFGVIVYGRTRGGKKKGHYTNDPSEWIVSVGLHKPIMSAEKWLSAQDQFGNNIFNKARKNKVGLLYGILKCKCGYSMKTKVKHCNKCDKDYAHYYCTNRYRRGINYCEQGYVSISSLDDAIMNLLNDIKSDKQLIHKHIPNSNPTNIARSEVSIKKDISLTEKKILNLTNTLQDNMSSTASKYIILQIETLDKTLQKHKMELREYQMLQQSKISEGERIDAIYNSICSYLEKFDNLNYDDKNMYLKDIIKSCTWDGTELLVTL

SEQ ID NO: 21694 - protein, 507 aa, synthetic construct
MEQKYIKYVALYLRKSRGDAENDLEKHRKMLTEMCLENQWKYVEYEEIGSGDSIELRSVFQKLLFDIEDSIFDAVCVVDIDRLGRGDMGDQDKIKKSFAKSNTYVVTPQQIYNLNNDDDEFVVDMKSFIARREYKQIVKRLSQGKRVGARMGMWTNGTPPYPYEYERWEDKYNPKGLVVNKEKLKTYRFIIDSVIIDKKTPAEIAYQLNKNGIPSPRNGVWYGVTISRLLQDQTHLGKIITNKTKGDGHAKKKSSAINLVNIPKEQWIVVENCHEPVKTQTEHEQIMIFSSRLTKIPKRKPIVVKPLTGLVKCGNCGHTMSITDRPNRKNTESLKPCWYKDEFGNKCRNKGMITKDIYNFVHKRILDYKIELKNKIKNADVNSTKINIDSKIHLLNQEVENKEKTLDRIIDAFENGVYNLSQFRDRKEKVDKVITSIKTEIELLEIEQKQFSIETIKEKYDLIEKFEREIQYDNITDIKKNELYKSILDSITWIRNDNDIVIEVNFK

SEQ ID NO: 21695 - protein, 524 aa, synthetic construct
MQSKSVRVIPARIRVGNNIQMEEKPKLRVAAYCRVSTDSDEQATSYEVQIEHYTNYIQGNQEWELAGIYADDGISGTNTKKRDEFNRMIEDCMAGKIDMIITKSISRFTRNTLDCLKYIRQLKDKNIPVYFEKENINSMDSKGEVMLTIMASLAQQESQSLSQNVKLGIQYRYQQGEIQINHNRFLGYTKDENKRLVIEPVEAEVVKRIYLEYLEGASLLQIARGLEADEILTAANKSKWRQETLRKILQNEKYIGDALLQKTYTVDFLSKRRVTNNGIVPQYYVENNHDPIIPHEIFMQVQEEIARRANLHSGKAGKKRIYSGKYALSGIVYCGCGEIYRRVHWNNRGCKSIVWRCVSRLEEKGSDCSSPTINEETLHKAVIKAINKVIGSREEFLSILQKNIATALNEEYDNNTAEIDKRLEELQQEILQLAISKSDYNTVADEIYRLRELKQNSLADNAERHGKRQSIAIMEEFLSEQEYKMEEYDEQLVRKLIEKITVYEDKVTIEFKSCVEIDVEIQEQ

SEQ ID NO: 21696 - protein, 520 aa, synthetic construct
MRIVRKISTDPIILKAKLRVAAYCRVSTDSDEQLVSLKAQRDHYETYIKANSDWEYAGIYYDEGITSTKKEKRAELTRLITDCENRKIDFIITKSISRFARNTMDCLELVRKLTDLGIFIYFEKENINTKSMDGELMLTILSSLAENESVSISSNNKWSIQKRFQNGTYKMSCPPYGYENKNGCMVVNEEQATIVKRMFYEMLEGKGTAKIAKDLNADGIPPRKGKQWNASTINGILTNEKYVGDALYQKKYTDDNFKRHNNHGEKEQYLVNNNHEAIISHEIFQTVQKMLNQRREEKNIEKGSNKYQKRYSLSGKIICSECGSSFKRRIHYSSSKSEYAAWCCSRHIEDICQCSMKFIREEDIHRAFVIMINKLIYGHKNILKPLLQSLKETDYLENVVQIQELEVKLEENLERNRILTTLMAKGYLEQTLFVSQSNELKKEAATLMEQKKALSHSISGEMTVLTEVEQLLKWTSKAAYINHFDEEIFKRFVDKIIVHSQEEIGFKMKCNITLKERLVR

SEQ ID NO: 21697 - protein, 548 aa, synthetic construct
MQAVKKKNVSIIPSQPAYDRNIKVQLKALRVAAYCRVSTLLEQQESSYDAQISYYTEKIQQNPNWKLAGIYADDGKSATNTKKRDDFNAMIDDCMAGKVDLILTKSVSRFARNTVDSLQTIRKLKEKNIGIIFEKEGVNTLEATGELLITILSSQAQEESRNLSENTRWGIARKYENGVVLVNHKKFLGYTKDEDGELVIVPEQAKLVRRIYRLYLEGSSTQQIANTFMEEGIKTVTGKDKWHDTVIAKILQNEKYMGDVLQQKTYTVDFLTKKRVKNDGIVPQYYIEDNHEAIIPKELFYQVQEERARRASLHKPSIARRAKKEKSKYSSKYVLSDILVCGECSHPYRRQTWSRNGVITPVWRCESRLLNGTKKCKHSATLKEKPLHEAIMTAVNSVVENQRDVVGAFRENVIRVIGNYTTKNIKTEFDDEISKLQEQLLTLIEENAKQGAVNEDFDEQYRKIAEEMQALKMKKLKLAREQKMAGEYEQRLEGMDSCLDRVSCKVGEFDEDLIRHLILKIRVIHESKIEIHFKYGIIMEQEIPFYED

SEQ ID NO: 21698 - protein, 554 aa, synthetic construct
MAGNQKKTKKITKINPVKSHVMMQLQPQKRVCAYCRVSTDSREQQNSFIAQTAYYEELIGKRSDWEYAGIYADEARSGTKLQKRDDFLRMIKDCEAGKIDMIITKSVTRFARNTVDSIKAIRKLKLLGVAVFFEKENINTLFESSEMLLTILSSLAQGEAESISTNNKWAAIKRFQDGSFKIGTPAHGYVKDENGELVIDEQEVETVRYIFKQYLNGKGSYVIARELTEKGIQTIRSAEKWSEGVVKEILLNPIYTGNLILQKTFTTEGVPFKRKRNKGELPQYFISENHEPIISMEEAEAVKEIYEYRRRQMKADGTKSQNRYAYSSKIICGECGRVFRRQKIYIGKPYEKVQWCCIQHIEDREKCSMVAIREDIIQNAFTSMWNKLSSNYTGILSPLLESLNKLRADEQQEKEIRECNDKIIELSKQSHILSGVAAKGYLDSAIFIEKQTALQIELDAMRKKRKALLDDSGFENEIYYTEQLIGLLESHPGIQDTYREDLFLQTVEQIVIKEGEIVSFRLKSSLELTENYGKEGNDNGNAKTYTDRISDAKR

SEQ ID NO: 21699 - protein, 565 aa, synthetic construct
MSKAAIYVRVSTHYQIDKDSLPHQKKELKNYCHYALNITEHEIFEDAGYSGKNTDRPAYQRMMEGIRSGKFTHLVVYKIDRISRNLLDFAGMYEELKKYNVTFVSKQEQFDTSTAMGEAMLKITLVFAELERNITSERVTDIMIGRAAKGLWNGARMPIGYKWSEEKKYPIIDEEEAKTVKLIYDEYERIQSTTLITRSLNNSKVKTKRGGSWTSKTVADVLRNPFYIGTYRYNYRESARGKKKPESEWIIVENNHPGLIKKEQWELVNKIMDSHNISKDTSGFRGKHIHIFSGVLKCGKCGNNFNANRVDKARLSGFKPTTYNCSRRITMKDCDNKMASDVVVGPFVFNYMANMLKAQRDITKIGGIQSLKKILLSGECFKNVSDIDNDGLQAFYNAMIYKYIPDMKYNPNIENNKNIVSVDNGGYQIVSLQKEKEKTERALERLKQLYLFDDEAMSEKDYIKSRNDLITSRDDLNRKIDELQKSNSSTPGSDISFILKASNFIVSQKLLSKKYIDYPELSLTCDNQIMKDFINSTIEWITVKNAKVIKIEFKNGLIHEFKYIK

SEQ ID NO: 21700 - protein, 520 aa, synthetic construct
MKKITKIVDTKVLSVKKKIRVAAYCRVSTASDEQLISLDAQKAHYENYIKANDEWEYSGLYFDEGVTGTKKEVRSGLLSLIADCEKGMIDLVITKSISRFCRNTADCLELVRKLLDLNVYINFEKENLNTGSMESELMLSILSSLAESESVSISENEKWSIKKRFQNGTYIISYPPYGYENINGEMVIVPEQAEVVKQIFTKTLEGKSTHTIAKELNELGVKSKKGSQWTAGTINAIIRNEKYTGDVIFQKTYTDSSFNRHTNYGEQDQYLCTDHHEAIIGHEVFNKANEVMSQRGKEKGNGENTQRYQNRYGFSGKIRCGECGSVFKRRIHNKPSGKYVAWCCTYHIEDKDACSMKYITDDSIKVAFLTMMNKLIFAHQVVLRPLFLSMKGLDDKDRLLQIQECETKLEKNMEQRQVLTSLMASGILEPALFNSENNTLIQEKEMLETEKNKLMHSVSGDRTKFDALEKLIKYVSGSEMLKEYEDEVFLAHVDKITVVSREEIIFLLKCGLELRERMAY

SEQ ID NO: 21701 - protein, 521 aa, synthetic construct
MNKSVTVIPARRRVGNTVKMEDKPKLRVAAYCRVSTDSDEQATSYEAQIEHYTNFIQKNEEWQLSGVFADDGISGTNTKKRDEFNRMIEECMAGNIDMIITKSISRFSRNTLDCLKYIRLLKEKNISVYFEKENINSLDSKGEILLTIMASLAQQESESLSKNVKLGLQFRYQNGEVQVNHNRFMGYTKDDEGHLIIEPTEAEIVKRIYLEYLQGASLKQIGESLESDGILTAAGKARWRPETIKKILKNEKYIGDALLQKTYTVDVLTKKRVKNNGIVPQYYVENSHEAIIPRDLYMQVQEEMLRRVNLHSGADRKKRVYSSKYALSSIVYCPKCGDIYRRIAWNNRGKRSFVWRCVTRVEHGPKRCDAPTVQETELQEAVIKAINMALGGKDDMLVALEQNIASVLALEDESSMESINVKLEELQKELLKRANEKKDYNDIADEIDRLRELKQNAMAENAEREDLKQRIAEMQEFLAEQVEQIEEYDESLVRRMVEKVTVYEEKFSVEFKSGTSVDVER

SEQ ID NO: 21702 - protein, 528 aa, synthetic construct
MSKSYAIYLRKSRVDLEAEARGEGDTLKRHRNRLLALSKQQGLTITKIYPEVVSGETITSRPLMQQLLHDVEDGLYAGVLVMEVERLARGDTIDQGIVARAFQYSGTKIITPAKTYDPLNEFDQEYFEFGLYMSRREYKTINRRQQAGRIASVSEGKWPANRAPYGYRRIKLDGQKGWTLEPDENATVVQDIFRWYTEGVPQPDGSVNRIGVSRIIRRLNESNILSPGGKDWTNSAIQSLLRNPTYAGWVRWGNRAQVKKIQDGAVQRSRPRAKTGDTSLRLCRGLHDPLISQNTFDAAQALLRSNPGRPGPKRCVTTNPLAGLIRCDHCGRMMVRRTYMKNGYPPTLMCPYTSCPTVSSDCSLIESMVLQGMRKFLADFEQTPMEQDTEAESTERAALSRSVSSLKKELEQIDTQEQKAYDLVEQGIYTPEVFTDRTTELSRRRQAAEKQLETVLEAVSGLDSRVQAKKEIAPAFRRVLDNFELAETAKEKNELLKSVLDHVEYHKTIGGRYRESDLSIKLAPKLPN

SEQ ID NO: 21703 - protein, 545 aa, synthetic construct
MAKNATAKVVQVLQPKAKFEVIEGVPVESKRKVCAYCRVSTDSDEQMASYDAQVSEYRKKINENPDWTMVDIYADAGISGTNVKHRTQFNRMISDCYDGKIDLIITKSISRFARNTVDCLEHVRKLKLIGVEIYFEKENIYSFDSKMELVLTMLSSIAQEESRNISENSKWGIKKRFKDGVAIVNCERFLGYDKDENGHLVINEEEAKIVRRIYREYLDGKGYTTIARGLTRDRIPTAAGKPKWWDSTVSGILLNEKYMGTLLLQKTVTVDYLTHKRVDNKNMEPQYKVENNHEPIISPEMWDMVQKERERRFAISAGKNTDRTKYTVKYGFSGKLICGQCGNTLKRRHWNSGTPSESIVWQCKSYMDHDGNRCLSKAVKDLELKEAFIRLYNDMVRDKGSFFRNFYNNIEKVIGKNSVTTDIDKLTTDINTFENDLSELIQLKIRHQIDDIFYNKEYQRIRSELDALSEKKESLREVNLNQNKMHEKLDYIKKTIGGNTEPLQEFDDELFKTLVEKVLVKDAKLVVFVFEDGLEFEAVLEKVKK

SEQ ID NO: 21704 - protein, 526 aa, synthetic construct
MEQYLIYLRKSRKDRDMELESGTFDTLQRHRDVLLALAAKRSYTISGIFEEVVSGDTIAERPEMQKLLSAVESGKYAGVLVVEVPRLARGNTRDQGTVAETFKYSNTKIITPDKIYDPSDEADEEYFEFGLFMSRREYMAINRRLQRGRMASLNEGKYIAGTPPYGYRKQKLEHQKGYTLEIDPEQARVVREIFRMYTDGDPRPDGTLVPVGSYAIANQLNAQAVASPGGTKWSASGVRDILKNPTYAGFVRWAYRPQTKQMVDGALQTSYPVSKQYKLQKGLHEAIISEHAWRRAMAAMGDRSHAPVPGRKQISNPLAGLIYCSVCGRSLVQLPGSHGATMLMCPTPKCKTMGSRRNAVEKALLESLANWLKSYQLKIARQESTGEDHAELERALASAEASLNKLNTQKGSLFDLLEQGVYTQEIFLDRSRLLAARISEAEKAVANLHQHLSSLNSAKQARRQLIPRIKSVIEVYDSLSAPADQNALLKSVLDHAVYSKTVGGQWRESNMQLFIYPKVTSLVDDL

SEQ ID NO: 21705 - protein, 571 aa, synthetic construct
MALRKKSIREVSAADRASSSGVAVIYARYSSHNQRDASIEQQIDECTEFAKRNNLFVLETYADKAVSGKTDRRKEFQRMMRDAEKGYFQVVIAYKSNRIGRNMLQALQNEEKLSKFSVRVLYAKEEFGDNAAGRFALRTMMNVNQFYSENMAEDIMRGLLDNAERCMVTGALPLGYVSDKNQRYAIDDGQAAVVQEIFDRFMSGWSFADMANDFNQRGILTKQGGQWNKGSFHRILSNERYTGVYIYRNIRTEGGIPQIIDRDTWLTVQQMLKTKKNPIGAQRHSGDYLLTGKLFCGLCGTPMVGISGTGKSGSKHYYYTCQKRRLEHNCKKENVSRDLIEDAVCQGVVNYVLQDRVIEWMADCVMDYQKRHKDDGTIGALSNRKKQVDASIKNLLSAIEQGIITASTKSRLEELEQEQVKLTRSIETEKALRPTHTRDRVVYWLEQFRGGDIQDPAYREKLVHIFVNAIYLYDDHLKIALNFAGNNNTVDLAFIENADAADALLCSYTVESGPPSKQTCFLQKQKTGLFLFHEKNSAKFRCEASFSSKYKHQKSRIFDFWCFLYFKLKHT

SEQ ID NO: 21706 - protein, 524 aa, synthetic construct
MHNKNIMYLRKSRADRDFIDEPVEKTLQRHKARLDAFCSSNNIYIDKILYEVVSADSIAERPEMIKLLHLIESDEYNGVVVTDLDRLCRGDSIDQGIVSNAFKYTNTKIITPLKTYDFTNEFDEEYAEYGLMMGRKEYRSIKRRLFNGRLDAVQEGKYVGGNPPYGYETYKLPKQKGFSLKIIPEQAYIVRLIFDMYVNGITVYNIFRYVGSFVIAQKLNEMGYVNQFGRPWNEGHITKILGDETYTGKVVFMRRRQKRIIVNGKVKIIEENNSADKMVCPGLHEAIISDEIFEKAQEKKRRNHVPHLRKSFELQNPFCGIITCNLCGKNLRLRSSDKGGKRALYCPNVNCNCKGSYIDLVEERFLDALKQWAIGYKIKSKPIEADYSHIKNTLSNTISHLEKELAKTTNQLENAYDFLEQGVYTLDVFKNRSDTLNLQISQLSEKLHTTTGELSKIEEYEKANITILPRIQTLLDKYDSMESGKEKNEMIIEVIERIEYVKTISGKTHADAFEIKVFPRIPKL

SEQ ID NO: 21707 - protein, 539 aa, synthetic construct
MLKAQQNYKVGIYVRLSKDDERAGESVSIENQKLMLTKYCEEQGWNDYSVYCDDGASGTNFDRPGVTRLIEDAKDGKIDLILVKDLSRFGRNYIQVGQFTDYLFPMIGVRFIALNDGVDTLHSDNDIMPFRNLLNEFQSKDTSKKIKAVKQTHAKLGNYLGCYVPYGYKAHPEDKHKFVIDEYAAEVVRKMFAYRRRGDGFRKIARQLNEEHILPPRDYYYLQKGVEDSGYRNHCWNDVTVKSMLRSEVYIGHMVQNKRGTLSYKNKKQIDKPKEDWIRVENTHEPIIDMDTWNACLEVEARNYKPRPTKESEISLFGGLLRCMDCGFKMRYMQETHDYPKRGKVKYISYMCGSYSRSGRSACSAHIIYLNPLSELVLGDIRHRARRVLEDEDKVRQELIDSKAKQGAQQMKADKTALKAAEKRLAELERLTQALYEDKVLGGVPEAVFKNLIGKYEAERVEKLALVQELKKRLADTAQDERDIEQYLQSIKKYVAIDQLDREMLLELINYIEIGERKEVDGQKCRDVVIHYNLVDKAG

SEQ ID NO: 21708 - protein, 487 aa, synthetic construct
MDAIYVRQSLDKKDSLSIEGQIELCKAEASSQFEVYTDRGFSGKNTNRPAFTQLMKDVEAGKIEKLICYRLDRISRSILDFGMIWDTLNQNNVEFVSINEKFDTSTPVGRAMLYIIMVFAQLERETIAERVKDNYYQRVKKGAWPGGPAPFGFRIAQKRVSGKKTLEPTPEIDTVRHIFDLYGETGASLGKIAKILTQEGIPCAQRAAWDNVSVGRILRNPAYVRATEAVYAYYQAKGAIIYNDVSEFTGESACIMVGKRTSNERKYTRMQEQLLAISSHEGVIDGEQFLTCQFRMDHNRQIKNTGKGTLTWLSGLLHCKECGYSLRVVEDKRYSRKYLSCSGRSNLHVCSMVHSERVEDVEATVESFLMKHFAGQQAFLPANGSGPKPQDKWVSELAQIENKIENLIQALADGSDVSAQYINAAIQKLDREKQVVLDKMSATVTQPSPRATAYNFDKMDFETKKKTAASIIKNVLCSPSGVDIELR

SEQ ID NO: 21709 - protein, 588 aa, synthetic construct
MLRLENLYIEYFFEKPEDIPQGDHIKTALLYGRVSTKHMEQETSLKAQIKELKEFAKRENMIVIAIFIEKESAKNDICREGYMSMLSAVKTFSPNYIIAKCSDRVNRSVELNSKLLSICRGNRNSNVTKIKYYMSGMITDPTNSQDVLTSNITASMDEMYSMRQHEKSLEAHKRKCREKRLSANNNTFGYRYNKVTKQMDVYEPEASLIVRIFEMRGYEDKGSTTIKRYLAERGVYLTEAAILKYLRDTAYIGEMYINKRGTDFSIGAGVKSHRFNRDKSEWVMVKVPPIVDKELFDIVQRLLDENAKRFQTNNNVMDASTRFKGSHIFSSKVFCGSCGSTFIFRYTDRKQKTAVYKCCERKKAVRKVKSVNGEKETSNVILHCKNTYQKIYETTLQKVVADTLEMYKEYSDEIYEKLFEYIKQAIIEQKEGKDNTPNIKATLKKLEAQKDKIAQAYIDAEIQELKMQMQQKYKEIAMRINECKEALEDEEEKKADISNKAERINKVKEALASMQEVKTIDRETVSRYINRIIVNENGELDVILQYDKQYKMAVPQEQPIVLNNVGDNSSRSMTVPCLQDMLTVRQIC

SEQ ID NO: 21710 - protein, 519 aa, synthetic construct
MKKITKIDELPKSQPSKSKLRVAAYARVSTDSDDQLVSLKAQREHYENYIKSNQEWEFAGLYYDEGISGTKKEKRPELLRMIRDCESGRIDFIITKSISRFARNTMDCLELVRQLLNIGVFIYFEKENLNTGDMEGELMLSILSGFAAEESASISQNMTWSISKKFQNGSFIIGSPPYGYANVNGEMVIVPEEAEVVKRIFSECLSGKGGSVIAKGLNRDKIPARRGNHWSTGTVIDMLRNEKYKGDALFQKTYTDNNFNRRPNKGEKDQFYCKNHHEPIVSKEVFSKAQKLITQRAKSKAVNKKAYQNRYVLSGRIICGECGSTFRRKTNYSAGRSYIAWSCKGHIEDKNSCSMLFLRDGEIKATFATMMNKLAYSRKIILGPFYDAISKNQEECDLERIDAIDKRMEQLTEERNTLIGLMTKGFLEPALFNKERNALDSEIKNLTTEKTNLVMSFTSGTSQADEVKAILEYVSKDKFDGNYTDEAFEKYVENIIVNSRDELTFKLKCGLSLKERVVR

SEQ ID NO: 21711 - protein, 545 aa, synthetic construct
MQVTKIPKKTVTVIEPKRSLIVDKEKYHQQRVAAYCRVSTDSEEQLTSYTTQKKVYSEMIAARKDWEFAGLYADEGISGTRADKRPQFKKMINDCLSGKIDYIITKSVSRFARNTVDCLDHVRILKAKGIGVFFEEQNIDTLKIDSELYLVIYAGFAQSESESMSKNITWTFRKKFEDGNSVFMYKKLLGYKKGEDGMPEIVPEEAALVKRVYNMYLAGETPRRISAAMKAEKIEIPGKSLSFSESMISGILTNEKYCGDSVLQKTVTIDCISKTRRKNTGEAPMYYVQNSHPAIISREVFHKTQEELMRRKTRTPQSSKSSITATGKYSRFALTDVLVCAECGSRYKRVTWTASGQKKIVWRCINRLDYGKKYCKTSPTVDELKLHSAIMRALNQFNEEDRSTYMALMKATISEALGLNGCSDEVDLLQRKIDALNKKMIELINDSVQSGDDMESREAEFKEISDTIALLKSRIATIEDSANTSGSTNERLEKIQKIIAQREQKRFEYDDSIVRQMIECIKVLPEGKLEIIFGGGYAVEESLDA

SEQ ID NO: 21712 - protein, 512 aa, synthetic construct
MPEVKLISPVTRRAIDKKRVAAYCRVSSNSADQQNSYANQIKVYTSLIQKRKEWELVEIFADEGLSGMKAENRTEFQRMIQMCELHQIDLIVTKSVSRFARNAKESLAYVRKLKLLGIGVQFEKEGIFTLALGDEMLLNTFSAIAQEESKAISQNQRLSIVKRMEDGEYVDSNAPYGFRLINKELSVYEPEAEIVRTIFRLYLNGFSTSELARELNARNIPTKTGKGVWRSAKVAYILGNEKYIGDSRYQKTYRDTTVPFKQFTNRGQEDQFYAQGTHAPLIDKETFEKVQFLLKKRQDAFSKSTTQNIYPLTSRIQCSECGSFFRRRIVSGNVKWGCCQHISDKNACRSNYYSEERIYDGFIAMVNKLRFGEDILGQVISRLESATIMYKKNNLAAREMSQNIAELNAKLLMLEQLRAKGYLAPEVHQAQSREISNQLASLKKERQTELDTQIIRMLEDVRHLKATLDELEDPLESFDEKLFMEIIKEITISRADEMEMTIIGGLKFTELI

SEQ ID NO: 21713 - protein, 499 aa, synthetic construct
MYALYARQSRDKKDSISIESQFEFCMKEVQEGEKVKKYKDKGFSGKNIDRPDFQRLLRDIEKGQIKKVIVYRLDRMSRSTLDFAELMVRFKKYNVDFISSTEKFDTSTPIGQAMLSIIMVFAELERKTIQQRITDNYYQRGKKAMYLGGTTPYGFDIKPSTIDGLKTSILIPNEHIEIVKRIFDLYANSDLALGRIAKDFNWEGLKTPNDSDWTNLAIRRTVKNGVYVKADVDIYNYYKNQGCIIHNDIDDFTGTNGLYVYGKGDKSQDLEGFNVVIAPHEGIVDSKTWLKCQYKLTKNKQIKNKGKSKYTWLSGLVKCGKCGYSASVVKANLSVKYGTYATYFRCSKRVNKMMCDAQSIRTDVLEDKVEKELFEHIQSFDNELKIDKTSNKANEIKTAITIKETEIENLLDGLAQSKGAAMKYINKRLDKLDSELSVLREELKKESIDDSLEGTTIVELKKIISLWNKLTLEDKKAIAQKIIDKIYYHNEVLKIEWKL

SEQ ID NO: 21714 - protein, 535 aa, synthetic construct
MYTDKDFLQGDYCAYLRKSRADRDAELRGEGDTLARHKKMLEELSEKMCIPIKRFYSEVVSGDTIADRPVMRELLLDVESGIWAGVLVVEVERLARGNTRDQGIVSDYFKYSGTKIVTPAKTYDPNNEFDEEYFEFGLFMARREYKTINRRLQRGRLASIKEGNYIGSTAPYGYNRIKIANGKGYTLEINEEEAKVVRMVFDWYCNGIPQEDGTFAKLGNDSIARRLDSLGISPRISKTWSKATINDMLQNPTYYGDVRFGYKQYVKQIRDDTIIKTRVVNENCEQSAGKHPAIIDYDLFIKTQEIKAGNRKNTLPSKLELQNPLAGLVYCKKCGALMTRLGPNSRNKYAALKCPNKYCNNVSSPLFLVEDQVLQFLGEWLSSYEVTTQDKNINAPVDKEIKVLGNSLKNNTAEISKLEAQLTKAYSFLEQEIYTIEIFRERQQLLNREMEEMKAANERYIKDIKKLEELKFSNEQFAPRIRFLLDTYSSSTKAVQNELLKEVIERIDYEKAKPNTKGQLHNANFSLNIYPKLPK

SEQ ID NO: 21715 - protein, 528 aa, synthetic construct
MSKSYAIYLRKSRVDLEAEARGEGDTLKRHRNRLLALSKQQGLTITKIYPEVVSGETITSRPLMQQLLHDVEDGLYAGVLVMEVERLARGDTIDQGIVARAFQYSGTKIITPAKTYDPLNEFDQEYFEFGLYMSRREYKTINRRQQAGRIASVSEGKWPANRAPYGYRRIKLDGQKGWTLEPDENATVVQDIFRWYTEGVPQPDGSVTRIGVSRIIRRLNESNILSPGGKDWTNSAIQSLLRNPTYAGWVRWGNRAQVKKIQDGAVQRSRPRAKTGDTSLRLCRGLHDPLISQDTFDAAQALLRSNPGRPGPKRCVTTNPLAGLIRCDHCGRMMVRRTYIKNGYPPTLMCPYTSCPTVSSDCSLIESMVLQGMRKFLADFEQTPLEQDTEAESTERAALSRSVSSLKKELEQIDTQEQKAYDLVEQGIYTPEIFTDRTTELSRRRQAAEKQLETLLEAVSGLDSRVQAKKEIAPAFRRVLDNFELAETAKEKNELLKSVLDHVEYHKTIGGRYRESDLSIKLAPKLPN

SEQ ID NO: 21716 - protein, 541 aa, synthetic construct
MPRVAIYARFSTDRQSATSAEDQVAICTARAEREGWQVVDVYTDHAMSGTSNRRPGMTAMLADAAAGSFDIVMAEALDRIARNQADIATIYQRLEFANVAIETLTEGRVNELHIGLKGTMGALFLKDLADKIRRGQRGAVARGRVPGGRTYGYDVVPRLTDRGEVERGLRAINEGEAAVVRRIYREYLSGRGPKAIAHALNAEGIPSPMGGEWRASTIFGHRARRLGVLHNPIYAGRYLYGRVAMRRDPDSRKRVSRVTSAEDQVMVDMPELRIVDEATWQEAQAQAEARSTGTMNSNHRPKHLLTGLIRCGRCGGSVTIVGGKRLGCIRHREAGTCDVKKTILREELEARVMGGLTSDLLSPEAVSLLVKTYHQEMEAHQAADREAAASIERKIKAADRAIARLVAAISDGAADFREIREALVARRAERDALVRQHAEASADRVIALNPGIVDAYRRRVKVLASTLSTSQGPEQAEVKQRLREIIAGVTITPSNTDWTIEVVSSLGAVVGLASSRQSRKGSAESVSMVAEEGLEPPTPGL

SEQ ID NO: 21717 - protein, 538 aa, synthetic construct
MAEALFGSFGQGVGGISLMELPPEKPKQLRVAAYVRVSSLSDEQEGSFDNQKTHYTQLIRSTPGWKMVDIYTDHGRTGTSMAKRPGFNRMIRHATEKKIDLILCKSVSRFARNVLDTINTIRKLRQLGVRIIFDKENIDTDDMASEFILTMLSATAQEESRSISENITWAKTKRFERGEPIFVKKLGYELNERKEWVVVEEEAKIVREAFNEILNGKTLSQICKQFIRKKYKKTNGRTDWSSPTLKLMLQNSDYTGDVICQKTYVEDHLSHKQQLNTGERNQYFIENHHEPIVSREVFEAVQKELERRNKPNPNKKAKRYPLSSRIQCGVCEGNMHRFVCRERVTWRCENSRKSKELCKMRGIQELVILKAMQEAFLERYRSIRKVIDIERMQKDLTRAVAARDFSYNQLRLDLERILLEENVALINANGTEAEKSKEVLEELSRKREAIEKELRVKEEWWELLDQDVAFRKAALIKLREMDAVRNPIKLLHEEMKQTAFLRAWVVRIKAISPMSFCMQWIDGKETIIDLREGDNDIE

SEQ ID NO: 21718 - protein, 558 aa, synthetic construct
MFIKGVIDLKIAIYSRKSVFSEKGDSIENQIELCKNYCKNHLDIKNSEFYIYEDEGFSGKNLNRPQFKKLIDDIKNNKIDILICYRLDRISRNVADFSSTLDLLQEYNVNFISIKEQFDTSSPMGRAMIYIASVFAQLERETIAERVKDNMLQLAKVGKWSGGQLPLGFISEKVTYTNEEMKNKSFSKLIPVKDELEIVKFIYTNYIQKGSIHNLVKELNNIGYKTKTGSNFELSGVKRILKNSLYVKSDESTHSYLKSKNYNVYGNPNGNGYLTYNKKTDKDNIIIAVASHKGIISSEDWLYVQKKFDENKEKVESISNRTGTGSNETLFSGLLKCGNCGSNMVIKYNTKNKDGKNYIYYTCSSKNKSFSKTKCDTPNLRAELVDSQLIRKIKTYNKDVILNVYNSKLNILLNSSNKNLLTSLNNQLSEKTNQIHNLIKEISLANEETLKELLRNEINNINSEINDIKSKINNTELIQNDIKNTIDNIKLLIKSFINFDKYFFDNDDINIKRNLLKNIIEEITFDYQNKNFNVKFFYIDNMYLDSTCESLDCYLYPS

SEQ ID NO: 21719 - protein, 538 aa, synthetic construct
MSQIAVIYARFSSAEQSKGYSLERQQTLGAAFADEHGWSVERTITDEGRSAFHGTNRLEGSALHGFELEAKNGLHRGKVLVVENIDRLSRQGAKAAAQLIWGLNEHGVDVATFHDQHVYRAANNADMMDLFKVIILAQQAHEESSKKSKRTAASWEKRFERMAEGTQKTPIPHTPHWVDKFDGKMVLNPKRTALLNEIYDMYIDGMGIHKIVTVLNARDEPRWTLEKSQRAKNGWFYSYIYRLLTKRTVLGEYVTMDGKIVSADFYPQAITAEKWNRAQAALSMRKANHKTTDKLWLNRNLLQGMVFCDQCGGGAHFRHQIDKGQTYTKKNGEVVTYKRNDNRRMRCDRARRKHNCDNGTILSYDVMEATVLNEMLPQLVDRQLEEKHLAPARERIAEAERLRDVNRAKLENLIDALADGSSKSVMQRITALEAEIEAQSTEVKAAQQALAMQQALPTRYDDATLILHVKDELDSEWDEVRSYARGRVNMALRRLIKRITITNVGTFRIEPDEFSSWHFDEDGKLLEGAWTEPLNEAA

SEQ ID NO: 21720 - protein, 507 aa, synthetic construct
MNVVIYLRKSRADLEAEKTGEFETLARHKSTLLELAKKENYNIVEIKEELVSGESIIHRPRMIELLQEVEDGKYDAALVMDIDRLGRGGMKDQGVILETFKNSNTKIITPQKVYNLDDELDEQYTELESFIARQELKMIKKRLERGRKKSVEEGKYIFSIPPIGYDIGLNKNKEKILVKNEKAEIIKLIYDLYVYEDMGVNKIANYLNKKGLEPMKIDKWTASTVNRIIQNKVYCGFIEYSKIVSTKKYNSNGNEIRVKNDKDKILSVKGKHESIVDIDTWNKAQSIRKDRIKNLHFGGVQELRNPFAGILKCKGCDHAMLRQTKDSRVYLKCRHHCGNRSIKIESFENNLLNFLESTLSSYEILLEKSDVKADKVDTRKALDSKLINNLENELKEFENQKIKLYNLLERGIYDEDTFLDRSQYLKEKISATSKTLNDLKSSYKDYEEDDYSKIVLKLRNVIEYYQISKTAKEKNRLLKSVIDNIYYYKDETHKSNECDLEIKLKIN

SEQ ID NO: 21721 - protein, 535 aa, synthetic construct
MKAAIYSRKSKFTGKGESIENQVQLCREYCVKHGIEIFDVYEDEGFTGANINRPEYQRMLKDAKKKRFDMLICYRLDRISRNIVDFSTLVTDLQEHDISFISIREQFDTSTPMGRAMMYILAIFAQLERETTQERIKDNMYQLARTGRWLGGKTPIGFKSEAISFYDDNMKVRKLYKLVPISEEINTVKQLFKKYIELGGVYKLQGYCYKNGLKSKQGNNFDIRSLENILANPVYCIADELAYEYCLSKNMDIAREKDEFNGVHGLMVYNKTLHKKNSVKKKDFSEWIVAIGKHKGIVKTEDWIKVQDMLDTPTVSYREGTSQVGILSSLLVCGECGSKMMISYKTYNNGKVKHHYYKCRLKDKSRGTLCKSQNLNGKDADKEVIEKLKEIALNKDTILHEYLNKQTELKSNINSSGNEKVLLMKQQEDLEKRIQNLTMQLSQNSKSAAAKYIIKQIEDLDNQIKDVKTKLINIEDNAEISLLRKMNAEILSKNLEYFYNNFDNLEILEKRNLIRNIIKYIRSDGTKLQIKLLDI

SEQ ID NO: 21722 - protein, 529 aa, synthetic construct
MGEYAAYLRKSRLDMELEQRGEFETLARHEAELLALSKKLKKPITKIYKEVVSGETIAARPIVQELLQDVESGKWAGIFVMEVERLARGETIDQGIMAQAFKYSNTLIVTPTKTYDPNDEFDEEYFEFGLFMSRREYKTINRRIQRGRKASAREGKFLGSVAPYGYTKVKLINDKGYTLKIQPEQANVVKLIYDWYVNGELQKDGTYIKLGSQLIAKKLDALNIKPLVNDTWSVSSIRDILKNPTYTGKIRWGYRKEIKKVVDGVVKKERPDNKSDDYILVDGLHPAIIDDDIYNKARHIMSNRVYAPVKTNATLQNPLSGLVYCKKCDKMMTRLAANSRNKYSTLKCPTRNCDNVSAPIFLVEEKILSTLRDYLTQFRLESSTTTNNKQDISIAVKEQSLRQIEQEIKVLNNQLSNIHDLLEQGVYSTDKFLERNKIISNKLKELELNYNTVKKEYEEATALEHKKMTIIPQIEFALEAYPLLKNIQDKNELLKSVVYKVEYLKTERNTRGKLYNDNFSVKLYPKIIK

SEQ ID NO: 21723 - protein, 529 aa, synthetic construct
MTKMVKTIEPVRQKVLQGLRSKKRVCAYCRVSTDSTKQHTSFVAQTKYYKEYIESREEWEFVGIFADESSGTKLKNRDEFGRMIKECNKGNIDLIITKSITRFARNTVDSIETIRMLKSLGIAVYFEKENINTMSEQSEQMLTILSSIAQGESENISTNVRWGIHKRFGDGSYIPSCVAYGYTKAEKGELIIKEEEAEIVRRIYNEYLSGKGSYAIARDLTRDNISTIRIAEKWNEGVIKQIHQNPIYSGELLLQKTYTTDVLPFAKKINHGELPMYSVKDSHEAIITKEQAERVQEIYEYRRAHMGIDDSSKYQNRYEFSSKIICKECSGTFRRQKIYIGKPYEKIQWCCVNHIKDSKNCTMKAVREDIVKDAFLTMWNKLVSNHGEILYPLLESLKKLRVNKEQEEEIFRVNNKISELMEQSHILHRVMIKGYMDSAIFMEKQNAINIEIEEYKKKRNVLLESNGYEKEIEGTNRILQIIKYNPVVMDDYQEELFIHTVDKVLIGKNDDITFRLINQLELTEYMEKR

SEQ ID NO: 21724 - protein, 507 aa, synthetic construct
MNVAIYLRKSRADLEAEKHGEFETLDRHKSTLLKVAREKSLNIVEIKEELVSGESVNNRPKMIDLLEEVSEGLYDAVLVMDIDRLGRGNMQDQGLILDTFKQSNTKIITPRKIYDLNNEFDEEYSEFEAFMARKELKLITRRMQRGRIKSIEEGKFIAQSAPYGYKIEYRNKDRYLIIDDEKSLVVKMIYKLYNEGNGARKIASYLNALGHKTSTGRSFYEKLVRDILKNKVYCGYVTWNSVSRKGTKSSKNEVSKKIIVKGIHDPIISEDLWNECNHKLKSRYISPTPNNKLVNPLAGIVKCKLCGYTLVGKRNTIKQDDGSNAYIRYMVCTNCSNRATKLDVMEKSILEILERWLIEYRIDLKNNDIADTQNTTVNDYKKMLSKFEKDLKDLDIQKDNLHDLLEKGIYDTDTYLVRSKKIGIRSDEINKSIDELKKKINNEFKKENSKINLLPKLEYLLQNYQESNIEEKNNLLKSVLDKVEYTKTHNRRDEDDFDIVLFPKLPY

SEQ ID NO: 21725 - protein, 488 aa, synthetic construct
MRVAIYIRVSTTEQFQEGFSIPAQHEKLVAFCKSQSWDIIHVFTEEGVSAKDTNRPELQKLLKAIENREIDIVLVYKLDRLTRSILDLYSLLQIFDKYDVKFRSATEVYDTSTAIGRLFITLVAALAQWERENLSERVTMGMEQLVLSGHRAGGKPPFGYMKDPTSLKNEILIPHPEEKEVVREIYEMYLSGKGVRTICKSLNNRGILTSTGAQWTGRPLTYVLTNPIYIGQLRWGKNRDNVITAIGKHQPIIDTELWEAVQNEYKRREEIAPRFATGTYPFSGLLICGHCGTPMTIQQGQKQYPHKLYVCRKKDCPQIQIRMDVLEELFLKHLTLMVESNWEVDARNVTEEEKQLEETKAKIKKIEKKRKRWFELYENELISIKELKEKTLSMAQEKMELEQLEQSLTETIQRSHYVPHADLLKGIVSINEIWAVYSDEERKQLLNMLFDRIELYLLPEFLNTERIGKSVKGLRKRIKHSLKIYPRI

SEQ ID NO: 21726 - protein, 688 aa, synthetic construct
MAKPKKRVVACYARVSTSSKEQASSYENQQSFFQDYIKRSGNLKLHKIYPDKGISGTLFKREKFEEMLYDAGLDVTINNQKIVKTKELNVLSDEAEGKPSVVHYINYIIDISPDREPKFNEILVRNTSRFARNIEVDTILRRLRQNGVYVRFLDIDKTTEREEDISIIQLFQTFDELFVRDLSRKVLAGNERSVANKILRSHPKLYGYKYIPRPNLQENNKLKPEPLEAEVVQKIFRLYNGCLTVEILTTEGFIDCDFDCKTCPIPRTKGLGIRRIINYLTAEGIKTRAKKNFGSTTMKNILSNEKYAGYINTGKYTSGTIFNKLTTPTVKDDYLLELDPTNIDPIISPELFYSCEAIRESRLTREDSKGKSPSRSAYGGGFLICGKCGSAYQHNVDRGRPFYVCGGKRRKGLTFCNSANVGEATVDARLTLYEQGELSLILFAYRQSVIIRHLNAINYRLSFIRRNRDDDKVQALQEQYKKLNKRLDNLYIRHADEEGDLTVLDNLIAQTKADLDSLNTELESYTKKPLQYLAEAEELQSRAEELLSVHSEHAHNLTNTTYTREDIFASIAYLTVRGETNPYGGGREAEVELVPALYSDPELEDFLSADAKEFKTYKPLKFKSDKSSFIGVSDPEETEENFNISPLKKREADALNTDSENTKLYAPKVLKSTFDDLSETLEALQELY

SEQ ID NO: 21727 - protein, 525 aa, synthetic construct
MNELKNILEEKGIDQLYAYSRKSRDIDEEGLQKHHDIMAELADKLGLPITFYEEVESSETLNRPQLNQLRKDIQNKKVRCLVVYRMDRLSRKVTDTERLVKEFAFNGLLLVEAHREKIVDYNEILGIKLEAMMSDLYQEQAKLVLASGRKKAVQLYGNHLGEPPLGYDYNKELKKLIPNSEAWVVKEIFELYLQGYSTHSIALKLNEMGLATRKGGIFKGKGIWQILQNDKYIGVQTYGKKEWYKDGDGKVYCKDRPQEEWVVYQDAHEPIVDEETFNKAQALLDKNRRVPAGERNHTHLLTGLVKCGKCGWNMAVIKRAYPKKIDYNIRSCDRRNYLDNSRCGNKGIKGEVVEDYLVKAIFSNVRPVILDMKKDIAKSGKSLKKAIEGQELEDLFKQEKKLNQQLDKLIDMQLEFSNDRITVRMKQVEAQLEIIQDKIARLSGEATENEFTWVDAYLKEAEDLIGFPFNYRGMDAEQKNIFIKKYIKNVTVLDGEITEITYADEVEKIFGFRNKCYRNENESAL

SEQ ID NO: 21728 - protein, 519 aa, synthetic construct
MAKVTKIGGETSNDNKKLKVAAYCRVSTDSDEQLESLEAQKKHYQTYIKSNPAWQYAGLYYDEGKSGTKIERRKQLLKMLDACERKEIDLVITKSISRFSRNTVDCLEMVRFLIEHGVFVYFEKENLNTMTMESELILSILSSMAEEESHSISKNNKWSIQKRFEQGTYVISYPPYGYINDSGEMRIVPEEAEVVKRIFNDTINGKGSSQIARELTEEGLKSKKGGKWHSTTIRGMLKNEKYTGDAIFQKTYTDDRFTRHTNKGEEQQYYCRNHHEPIISHEIFELAGQEVRRRADEKNISRSTQKYNRRYAFSGILKCGECGAIMKRRTHYTGRKEYIAWTCGTHLYDKTKCSMLYVRDDAIKAAFTAMMNKLTFGYKEVLTPLLEGLDEDLNYRNTEKQSDFEKQHNAIKEREKLLREHFHKNLLSQDIFSRSMADIEQELRTLAQMREDYLHNQNRGVTYLSATRDLFAHCSKSEMKAVYDEEIFKRFVNGVIIFSRDEVGFRLNCGITLRERMVV

SEQ ID NO: 21729 - protein, 523 aa, synthetic construct
MGEKSVTIFPPRLNRKVEEAKTEEKIKLRVAAYCRVSTDSDEQASSYEAQIEHYTLFIQNNPEWVLAGIFADDGISGTNTKKRDEFNRMIEECKIGNIDMIITKSISRFARNTIDCLKYIRQLKALNIAVFFEKENINTMDSKGEVLLTIMASLAQQESESLSQNVKLGIQFRYQQGIVQVNHNRFLGYTKDENKNLVIVPEEAEIVKRIYREYLDGANYKEISSGLESDGILTAAGNPKWHSSTLRKILTNEKYMGDALLQKTYTVDCLTKKRVANDGTVPQYYVNNDHEAIIPRELFARVQEEIKRRANIRSGMDGKKRVYSSKYALSSVVFCGHCNDMYRRTHWNNRGKKQIVWRCVTRLSAPGVECSARTLTEVQLQNLVLEAINKVLGGKQRAIKVLETNISEVLGNAHSEELKRIESQIEKQQTLLVKLTTASEDYSKVVDKIYALQREKEEAIANNVNYNAGKERIEEMIEYLKSQPKRVTAYDEQLVRKLIEKIIIFDDHLDFLFKSGIKIEIKG

SEQ ID NO: 21730 - protein, 597 aa, synthetic construct
MNKPKLFSYIRFSSGKQSDGQSVERQTETAQRIANQYGLELDTLSFKDLGVSAFKGRNATQGSLREFINQIGKRVPVGSWLVVENLDRLSRDGVLTALDLLKEILQKGITVVTGMDSKVYTYESLSSSMMDLILSVMLFSRAHEESVTKKNRVESQARSLIQKNLVRESVTPALVIESIGQNVWWSSQENGFVIPHPVYFAVAKKIIDMKWDGCSPGEIQRYLNEHYQPPTKDKIGNLNKWGMNLIRNFLNPTVHGRKEFILDKRDSSGLLQKQKCVDEEGNEYFEIEKETFVIEDYYPALMTESDYLTLASLDKARAATRNPAKGDSLQEIGLLSGIGILRCGKCGLPMTKNSAQKARFRYVCSSKNTEGKSCGNSGFTGQPLEHVVLQLIADHVWNNNQEDKTEWFTHEISKLDKMIKKLVRLGALTDESEIDDLAQEINTYRAQKRELEFKFNEYKIEKSSQVTTGWDEFRKFDTEDVTNPERKRIRLKIKQAIKSIDCTTFRGRYGLFMIRYMDNTEQRIVLKYNRRSSPGEAFVDIHTVNNRVLVELSGITLHTHIEALIDPSGYKELRKQWIEDNTQQSNHPPTIIDDLTE

SEQ ID NO: 21731 - protein, 543 aa, synthetic construct
MKKVLTILPKTNAAMSEAPLGAKLKVCAYCRVSSTSSEQMDSYENQVAYYTGYIQQKSEWDFAGIYADGGITGTKKEGRTEFNRMIRDAQAGRINLIITKSISRFVRNTADYLEIVRYLKELGVAVFFERENINTLSAESELLMTVLASIAQEESRSTSENIKWAYRKKFEKGRVVVISSRFLGYDLDENGQLQVNPAEARIVKRIFREYIAGKGTEAIADLLTAMKIRTVTGSAKWQASVVRGILTNEKYCGDLVQQKTFTEDHLTHRKRKNRGELPMYRVQNNHEAIITREEFDLVQQLMAERAAQYGNLPGDRVKYLNRYAFSGKLVCGHCGATFTRRSWNCNGPTKQIVWQCRTYFKEGKAACSMKAVDDITLKAVFVRAFNKLYKNKDTLLKRFLHNVEKGLRIESIGGYDRKLELAIERVGEQMKALIRRQIKDSGENLDFQAEYDRLKQQLEKLRNQKNELSGDDGKLAEVKARTQEIASVLEGQAYIMEEFDEEICSALVERVKVLTPMHLIFELKNGLAIEQQFIKERGIHGLQ

SEQ ID NO: 21732 - protein, 533 aa, synthetic construct
MSRVVSVIPAKPIQVIRGLDIAAKKRVCAYCRVSTDTEEQLSSYETQVTYYEEHIKKRPEWEFAGIYADEGITGTNTKKRTDFHRMIDDCLQGKIDMIITKSISRFARNTLDCLQYVRMLKDKGIGVYFEKENIDTLDAKGEVLLTILSSLAQDESRSISENSRWGITRRFQQGKVRVNHKKFMGFDKDENGELIIDEQEAAHLRRVVKEYLVEGKGLRKIKKGLEADGILTATGGTVWHESVIKKMLQNEKLAGDALLQKTITVDFLTHKRVKNEGQVPQYFVENSHPAIISKETFQAVQREMERRSKLAGGDKNRSRYTNKYPFSGKIICGACGQKFSRRHWGAQKYKKPVWICRTRMEDGKKGCSIPALDEEKLQEAFVRVVNQFLVDKDALISGMLENIEKAFREQTSTVDLALIDSELKELNGELAALVKLNLRTGIDDTIYSEEYSRIGGRMQELKNKRASVTTAEIARQETFDRMKDITEVLRSMDTIGEFDEELFGMLVERIKVINLVHVEFVLHSGVGIVEVVG

SEQ ID NO: 21733 - protein, 509 aa, synthetic construct
MKKAIAYMRFSSAVQEKGDSLRRQRKLIEDWLKENPDYELDTATYEDLGLSAYKGKHAQSGAFGKFLDALEKGLIMPGTALLVESLDRLSREKIGEATERLKDILKSGVDVITLSDKSHYSEASLDDPYALIKAILISQRANEESEIKSSRVKLSWQKKREDAELTGKIMTRACPRWLKVSSDYTRFEVIESKVKIIKKIFALRKSNKSLTAIAKHLNDRAIENLSGQRGKWCPSVIEKLLSNKALIGICRPTHRGLAKGVKEIAEYYPRVLSEDEFYSVQEVRLSPFGFTSHSGNPYLINLLRTVMKCSHCGNTMIITSVSETIKGYYVCPMRRLHRCSSPAIRRELVDDILINEILFNIDRLQIESNQQSLQKILEKTCIDLQFQINQLVKALAIAPDVKTLADKVRELDGKLRKNETAMKVLRNKSRLDNKCNVKNLDLSSKEDREACRRLAFKAFKEINIDTLTQRCDIYFLTGLIFKNFPLSKSNCAENIITSLKYLDDNTVYF

SEQ ID NO: 21734 - protein, 509 aa, synthetic construct
MLFETGSEREIISYGEYPYLVYGRVSSDKDEQISSLENQVDICRHWIENNGFEWNENAIVIDDGITGTVLLDRKAMQLILYKARRKEIKMVIFKSIHRLARDTKDSLEIREILIAHGVRLVTLEEDYDSLYEGKNDMKFEMYSLFASQYPKSLSVSISGALAAKVRRGEHLGQIPYGYKTENKKLIIDEEIAPTIRKMFSWYNNDGLGYKSIVHKLNDELAKGNVVPPKRTNKWQLTTVQTILKNSAYCGTFIHNKYTKVKLDGRKKQIVNPREKWKIYEDYHPGIVTKEEWQKANSKKHPNYRKKITPWNEFRKILVCSECGSNIIINQSYKKKKNGERNEWHYLKCSAYRRAGENGCVNHTPILYKDFRTLILKELENESKNISINFENTLYKQKEKEIVSLNVKKEKLLQKNKDLLDTYLEKIISKEEFITQRKEYESEIEIIKDKIFILSQEENRQIEINNIKEAFEQLHDHDRDLFHVFTTLLNKITLYPDGKIDIDYKFKKHL

SEQ ID NO: 21735 - protein, 519 aa, synthetic construct
MKKIFKVDNVAATSKRKLRVAAYARVSTDSDEQLVSLKAQKEHYESSIKLNPEWDFAGLYYDEGLSATKKDNRTGLMDMIKDAEQGKIDLILTKSISRFARNTTDCLEMVRRLIDVGVFIQFEKENINTGSMESELMLSILSGLAESESVSISQNIKWSVQKRFINGTFIISYPPYGYINADGKMEVVPEEAEIVRTIFKECINGKGAFLIAKELNERGIPSKRGTVWHPSTVQGVLKNEKYTGDVIFQKTYTDSNFNRHINYGEENQYLLEKHHEAIISHEDFEKAQLIMEQRGKEKGVSKKEGKYQKRYAFSGKITCGECGSRFKRRIHYSGKNEYIAWCCTKHIEHTVKCSMKFIKDEDIKVAFVTMLNKLVFSCDMLLKPFMQGLRNIDEKAYLKKITEIEDSIEKNENQRNVLMELMSKGLLNPGLFTKQNTELLSEFARLATEKKHIFFAVSGNASKIDESQRLIRFCSRNRMALKFNDNVFEDFIDEIVVNSREEIVFKLKCGLSLKERLVE

SEQ ID NO: 21736 - protein, 536 aa, synthetic construct
MANMNVSKNITVIPARKRVGNTVAKEEIPKLRVAAYCRVSTDTEEQATSYEAQMEHYTDFIRKNTEWEFAGIFADDGISGTNTKKRDEFNRMIDECMAGNIDMIITKSISRFARNTLDCLKYIRDLKAKNIPVYFEKENINTMDAKGEVLLTIMASLAQQESQSLSQNVKLGLQYRYQQGKVQVNHNRFLGYTKDEDGNLIIEPKGAEVVKRIFREYLEGESLAGICKGLMKDGIYTAAGNPKWRPETVQKILQNEKYMGDALLQKTYTVDFLTKKRVKNEGIVPQYYVENNHEAIIPRELYLQVQEEMKRRSLLFKGKDGKRRIYSSKYALSSITFCSDCGDIYRRTYWNNRGKKSTVWRCVTRLEEGPKGCTSRTISEEELHTAVAEAFNQVLCGGESMIAILRENIESVVCESNEQSIANIDKEMEEKQMELISYANSGKDYENLADEIQALSEKKQAILTEEAESQGEKDRITEMMEFIENHADQSLDYDEELVRLLVEKVTIFENNVVVRFKSGIEVEVKTRFGDRPSIRR

SEQ ID NO: 21737 - protein, 568 aa, synthetic construct
MERPRLYSYVRFSSERQSKGTSIERQKSNIDKMVKKIAQEHDLEIFEEYRDFGVSAFKGKNATEGALADFIHHVDTGKIPSGSYLLIESLDRFSRANPMVAVNMFTSLLLKGIVVITGIDNQIYRETKVNNDTLQQLMYSVMLFSRANDESETKSHRTIASALNKIKRHKARQLGDPVVAIKELGMDKWWTDSSSGFVKPHPVYYPIAQKMIELKQKGYSNRLILAYLKENHPAPAQGRSRGKWNIQHASRIIEPAIHGQKVINVNGESYTLDDYYPAIVTKDEYELLKFQIGNKSFAPLKEANPEIPLLSGIGILYCKHCGCHMFKMKSTVKNQPFAYRYVCSSRDSHRNCSKWGFRARTLELALLQLLADRVFVESSPVMSGVEHLITDVDEQIANYLVAIGSAKSPAMINKLTELIDGLENQKADYLKQKQIHDDQMVRMNTAGWDKFKQLDIDDTQNVDRLEIRASIKTVIKRIDCQQIDPAHNCFFVTYRDGRTQKLVIKKDTAWTKGRVYIDSTTVTNEQLLESEGLVMHSHIDIMIDRERFFREHQARSEHPPTIIDRLTE

SEQ ID NO: 21738 - protein, 501 aa, synthetic construct
MNILIVKTIKHVAIYLRKSRDDGEYEDVLAKHRDMLTSFVESKGWSHEILEEIASGESIIKRPQMQALLSNVEDGCYDGVVVVDFDRLSRGSYADLGMIEEAFKSTGTLIITPQRTYDLEDDSDEMTIGIKSFVSKEEYKLIKKRLRDGKINGARKGMWTSGQPSFPYYYDRLSKSVLVDETKRYYYREMVERFINGAGLTEIADWLTEHLPRQRKNTMGKQKKWSLVVVKRILSSEVHLGYVIFGKHKRKRGIRQVVPQEQWIKSKGKHEPLKTEEEHRKIMARLALSKEQNTKTRSEVPLSGMLYCNQCGARMIIKTLVYKNGKRSWCALCSNRKGDISCDQKSSVLNEDFFTGLYQRVVHVDDNIQWQLHEQTRALTKYKQLLAIKEKEMEKYKQAIDRLYEMREEDNIDKISFIERKKIRDEQIRALRQEIDDLRLIIQEQKDMPSLDKIRQQIKVFKERWRYLESVQERNRLLKRIVGKITYHREANNVYLGIQYN

SEQ ID NO: 21739 - protein, 540 aa, synthetic construct
MRCAIYIRVSTNREEQKTSLTNQRDLFEKYVQEKGWDIYDFYVDVESGTKAKRENLQRLIEDAKSKKFDVILAKELSRLARNGELSYQIKNIAENNKVHIITLDNAINTLDGNTNMFGMYAWLYEQESQRISIRMKSAFKTKAQNGCFKGSFAPYGYYIKDKKLYVSEDNTPSIVKRIFKDYLSGKGFDRIARELYEEDIPTPGQVAGKSDATGKWHGSSVRSILENPHYTGDLIQGRSETVSVTTNRRNQKDKEEYIIVRDTHEAIITRTDFKAVQQLIDSRKKIRPKQNIHLFTNILFCADCGHGMHFKKNRKGYVCGSFNKHGKKACTDHIIRETELANAILADIKFMLSNIKNEKVIAEIEKKVTSQKKKLEKELKNYTKEIESLTIKKNKALSKFINDEISKEDYDTFKSSIDFKIKELTKKEQEYKTLIAEKFDTNLLNELDGLKEKIIDLKELTPEILNRFVERIEVKADGTPKIFYRFSESSIYFSAFFINAQHSTCGVCGNISITFTFSTLYPLAVNTSRSTASVLGLQDT

SEQ ID NO: 21740 - protein, 527 aa, synthetic construct
MAQTRAVTVIAPTINPITHLSTVAVSKRRTAGYARVSTDSDEQFTSYEAQIDYYTQFIGRHSDWEFVKVYTDEGISGTNTKHRDGFNEMIEDALNGKLDLIVTKSVSRFARNTVDSLVTVRKLKEKGVEVFFEKENIYTLDSKGELLITIMSSLAQEESRSISENVTWGKRKRFSDGKVSLPYKHFLGYEKGADGLPHIVPEQAELVRRIYREYISGRTSCTIAKALTNDGIPTPGGKNRWQASTVESILTNEKYKGSAILQKTFTVDFLSKKMKVNEGEVPQYVVEHSHDAIIDPQEWDAVQTEFARRKCYGRQYSGNSVFATKIVCGDCGGFYGAKVWHSTSKYRRTIWQCNKKFKGENRCTTPHLDENTIKERFLAVFNSMISTKEILLEDCRMIQSVLTDCSEIDAKISALMQEIEVVMELTKKCISENSRSAQNQEEYTTRYNGYVERYETTKVKLEKLEQQREERMTKSEAIGGFIFELSERDEVITVFDDRLWLTIVDMVTVHHDGRLVFKFQNGTEIEG

SEQ ID NO: 21741 - protein, 425 aa, synthetic construct
MDRIIEKVEFPIPSQPKALKVAAYARVSSGKDAMLHSLSSQVSYYSNLIQSEPGWLYCGVYTDEAVTGTKETRADFQQLLTDCRAGTLDLVITKSISRFARNTVTLLETVRELKSYGIDVFFEEQNIHTMSADGELMMSILASYAQEESRSVSENQKWRIKKNFEEGKPWNVNMLGYRYENGNFVIVPEEAVVVKRIFDEYLSGLGAASIQKGLNRDGLRTLRGKEWLPNGIMKVLRNYAYTGNLLLQTTYRKDHISKQVLKNHGEKPKYHVADSHEPIISLETFDAVQTEIAKRASQFARCTEQKTYPFTGMMTCGICGKHYQRKVTYTGPVWICSTFNSAGKSVCASKQIPESTLTYLVESVKADNIGRQIKSLQMLPKNQVSIIFSDGTSITTEWKDRSRSDSWTDEMREAARQKRLQRRKS

SEQ ID NO: 21742 - protein, 604 aa, synthetic construct
MKKVFVYHRVSSDQQLDGSGIARQAELLEGYLERTGICAEMDDPAPVVLSDQGVSAFKGLNISEGELGAWMEQVRNGMWDGSILVVESIDRFSRQNPFDVMGYINALMAHNVAIHDVMANIVISRSNSKDLPFVMMNAQRAYDESKYKSDRIRKGWAKKREQAFNKGTIVTNKRPQWIEVENDKYVLNHKAAVVKEIFALYQTGMGCPTIAKQLQTKKGELYKFNRPWTGELVHKILTNRRVTGKIFISEIIRNHDDIDNPVTQKKYDMDVYPVVISEDEFDLVQELLKSRRPNAGRITVKKEGQEEVLIKSNLFSGIARCTECGGSMYHNVVRAKRTPKKGDPKIEEYRYIRCLNERDGLCENKAMTYETVERFVVEHLLGMDLNTVIKEQEFNPEVEVIRIQIDQVKDQITNYENGIERRKSAGKAVSFEMREELDDAKLELEQLLARQASLATVQVDVPVLQDVNVTELYDVNNVDIRTRYENELNKIVSNIRLKRNGTSYTIDINYKQNELKRHVLFVENKKKEQTLIGEVIIEDVDGAKFYYTPSFMIMLKDGEIRFQQTKEDLSIIDYSLLLNYIDAVDRSDAVGVWMRNQFNFLTFN

SEQ ID NO: 21743 - protein, 520 aa, synthetic construct
MKRITKIEENKGMLIKKKIRVAAYCRVSTASDEQLISLEAQKIHYENYIKSNDEWEYAGLYYDEGVTGTKKDVRNGLLSLIADCEKDMIDLIITKSISRFCRNTTDCLELVRKLLDLNVYIIFEKENINTGSMESELMLSILSSLAESESVSISENEKWSIKKRFQNGTYIISYPPYGYANMNGEMVIVEEQAEVVRQIFADTLAGKSTHVIAKDLNERGIPSKKGGKWTPGSINAIIRNEKFTGDVIFQKTYTDSSFNRHINYGEQDQYLCTGHHEAIVSHEVFSKANEIMSQRGKEKGNGKNTQRYQNRYGFSGKIRCGECGGVFKRRIHYKPSGTYVAWCCNNHINNKNSCSMKYITDDGIKTAFLTMINKLIFAHQVVLRPLLRSLKGLDDKDQLLQIQEYESKLEKNMEQRQVLTSLMASSFLEPALFNSENNTLIQEEEMLQAEKSRLMHSVSGDRTRFDALEKLIKYVSGSEMLKDYDDEVFLDHVDRITVVSREEIIFILKCGLELKERMVG

SEQ ID NO: 21744 - protein, 521 aa, synthetic construct
MNKSITVIPARRYVGNTVKMEGKPKLKVAAYCRVSTDSDEQATSYEAQVEHYTNFIQKNEEWEFAEIFADDGISGTNTKKREEFNRMIEECMAGNIDMIITKSISRFARNTLDCLKYIRQLKEKNIPVFFEKENINTMDSKGEVLLTIMASLAQQESESLSKNVKLGLQFRYQNGEVQVNHNRFMGYTKDDEGNLIIEPTEAEIIKRIYLEYLQGASLKQIGESLESDGILTAAGKAKWRPETIKKILKNEKYIGDALLQKTYTVDVLTKKRVKNNGIVPQYYVENSHEPIIPRNLYMQVQEEMLRRTNLHSGASRKKRVYSSKYALSSIIYCPKCGDIYRRIAWNNRGKHSFVWRCVTRVEHGPSKCDAPTIEETDLQNAVVKAINLALGGKNDIIIALEQNIVSVLALEDDGSIESINAKLEELQKELLKRANAKMDYNDLADAIDRLRELKQNVMAESAEREGLKQRIAEMQEFLAEQKEQIEEYDESLVRRMVEKVTVYDKKFSVDFKSGTSVDVER

SEQ ID NO: 21745 - protein, 519 aa, synthetic construct
MKRITKIGVNETLVQKKKLKVAAYCRVSTASDEQLISLEAQKAHYENYIRTNDEWEYVGLYYDEGITGTKKDVRAGLLSMIADCEDGKIEFIITKSISRFARNTTDCLEMVRKLIGLGVHIYFEKENINTGTMESELMLSILSGLAESESISISENTKWAIQRRFQNGTFKISYPPYGYQNMDGQMIVIPKQAEIVKYIFAEVLSGKGTQKVANDLNQKGIPSKRGGRWTATTIRGILTNEKYTGDVLLQKTYTDSHFNRHTNYGEKNMYLVENHHEAIISHEDFEAVDVVLNQRAKEKGIEKRNSKYQNRYSFSGKIICSECGSTFKRRIHSSGRKYVAWCCSKHISNITECSMQFIRDEDIKTAFVTMMNKLIFGQKFILRPLFHGLRNQNNAASFRRIEELETKIENNMEQSQVLTGLMAKGYLEPALFNKEKNALEAERERLLAEKDQLTRSVNGNFAKVDEVDRLLKFATKSKMLTAYEDELFEDYVERIIVFSREEVGFELKCGITLKERLVN

SEQ ID NO: 21746 - protein, 526 aa, synthetic construct
MIAIYARQSLDKKDSLSIESQIDKCIALCQYNEWEYSIYNDKGYSGKNLNRPQFKKMMTDIKNGKIEKIICYRLDRISRSMADFSNLIVELESYGCQFISATENFDTSTPLGRAMVNIIMTFAQLERETVVERVTDNYYFRTALGHWGGGPAPYGYKLKRVNGGGNNYTILELDEEEAEVIRKIYDWYLEPDGSTTTIIEKLNNHGYKSRGNNNGKRVWTQRVISDYLCRALYTQNDIKIYEYFKTNGANFVNDVSDFDGTKSINIYGKTSKGLSKHKRCRKIEEQYLCIMEHEPIIDSETWIKVQHKLGRIKQVPSRSGTSGKSQFSGLLKCGYCGYSISTSGSGNGTMYYVCSSKKNRGKDSCNSKTTRLDILDNIVITKLIEHINSKEFIEFVENTNLDNSVPLEYIHKKKEIEMKLIKIDTEIENLITSIATGNNTLIKYLEERITKLDTEKKALSNELNELEGNVMEGNEDLINIRNELRENNNIEYLLRNGEIETRKRLSKLFISQITIFSDEIVVDYRI

SEQ ID NO: 21747 - protein, 506 aa, synthetic construct
MRCAIYIRVSTNREEQKTSLTNQRDLFEKYVQEKGWDIYDFYVDVESGTKAKRENLQRLIEDAKSKKFDVILAKELSRLARNGELSYQIKNIAENNKVHIITLDNAINTLDGNTNMFGMYAWLYEQESQRISIRMKSAFKTKAQNGCFKGSFAPYGYYIKDKKLYVSEDNTPSIVKRIFKDYLSGKGFDRIARELYEEDIPTPGQVAGKSDATGKWHGSSVRSILENPHYTGDLIQGRSETVSVTTNRRNQKDKEEYIIVRDTHEAIITRTDFKAVQQLIDSRKKIRPKQNIHLFTNILFCADCGHGMHFKKNRKGYVCGSFNKHGKKACTDHIIRETELANAILADIKFMLSNIKNEKVIAEIEKKVTSQKKKLEKELKNYTKEIESLTIKKNKALSKFINDEISKEDYDTFKSSIDFKIKELTKKEQEYKTLIAEKFDTNLLNELDGLKEKIIDLKELTPEILNRFVERIEVKADGTPKIFYRFSESSIYFSAFFINAQHSTCV

SEQ ID NO: 21748 - protein, 440 aa, synthetic construct
MAAYCRVSTDQLEQLSSYEAQVNYYKNYINSHSEYVFAGIYADEGISGTNTKKREQFNKMIEDCKVGKIDIIITKSISRFARNTLDCLNYVRMLKELGIEIIFEKENIRTLDSKGEVLLTILSSLAQDESRSISENSTWGIRRRYEQGKVSVNFTKFLGYEKGRDGNLVINEQQAKIVRRIYREYLNGKSANRIARELERDGICGWNGKAKWYETTITKMLQNEKHKGEALLQKSYTVDFLTKKKAINKGEVPQYYVEGSHPAIIDKDTWEAAQIERQRRKEYAAKHGLQKIDYGIRGNPLAGKIICGECGKYMGRRTRIYKGKKLVWICANRYEEKGVRGCNSKHVNDEELNEVFTIAFNKIIENKDYYISIWQEKTKSENALIAYKAKQFIEEIKQYDEPIEDYDVDVFYMWVEKITVINSKEFVVKLMDLEEIEVRI

SEQ ID NO: 21749 - protein, 427 aa, synthetic construct
MRVRIIEPILKVQQKKKRVCAYARVSTIHDKQGESLENQVQYYENIISSNPEYEYVGVFQDRGITGFTGNRPEFQRMLHLCREGKIDIIITKSISRFARNTAVVLYTVRELKNLGIEVRFEKENINTLSGDGELMLAVLSSFAQEESRNVSENLKWKARKQFQQGELMINTKRFLGYDKNEYGDLVINIKEAEVVNRIYNDYLCGKSSSKIAKELNKEDIPTVGNKTWHNSTIIGILKNEKYKGDAILQKYYTPEHLKKTSIRNNGVIDSYYIRENHSPIITKEMWEQVQEEIKRRGITKGNVLGDSDKYTKRYALTGMLYCSKCGSTLRRRTWNSKNSSKKIVWQCSNYIKNGKDACNGTSIDDVVISRLNIKEATIVKEEIKDGKKCYSYTSEKGSGEFSSKAVTNKKENGCLLQSFNRPIGATV

SEQ ID NO: 21750 - protein, 542 aa, synthetic construct
MTRVALYARYSSDRQNERSISDQVNVLIQHAAAKGWAVVGTYTDAAISGSAMANRPGLLAALAAADRGEFDLLLAEDEDRLARNLEHLAHVANRLADIGAGIATLSTDRVQDMHVAFKGLIAQDFIRNLSMKTKRGMASNAEKGLATGSRLYGYRSQPGGAVEIVPDQAEVIRRIFSMYVNDRMSSREIAERLNRDRIPSPAGRQWNASSIQGSRQRANGVLHSEIYAGVKVYNRVEMRKDRQTGRKITICKPPSEHKRIDVPHLAIIDQDLWKAAQQRLDSRQTTDPSQRASLRRRPGLLSGLTKCGCCGASYTSLSQGRLVCAAYREKGASACDNNRHVNRAEIEQRVLDGLRTRLLAPDAVAAYVRAYHAAWAEQAAQVEDRRRPLTRRIAEVERAIERGADALLSGATAAAVIGKKLEALEIEHAQLRATLEQLDAEGAPPVQLHPRAAENYARKIEQLQARLAEAAGSTDDADRDLIGSVRGLIQKVDIEPINKSRGSPVRVTLHGDLARFVLPQHPPSSGCALVVGGGIEPPTCGL

SEQ ID NO: 21751 - protein, 527 aa, synthetic construct
MSYLMYLRKSRADKEAESRGEGETLARHEMLLTELSVKMGLEIGAIYKELVSGETISARPKMQQLLVEVMQGMWEGVLVMEVERLARGDTKDQGTVAEAFKFSNTRIITPMKTYDPSDEFDEEYFEFNLFMSRREYKTINRRIQRGRIAAFRDGWYIAGTAPYGYEKVKHKGDKGYTLQIVPEEAKIIKYIFELYTAGEPQEDGSYAQFGSYQIRDRLNELSVPSRSEKPWSASSIVDILNNPTYCGYQRWQWRKVQKQMVGGRIIESRPKDADCEKVRGRFDPIISEDTFNLAQKIKAGKPLPINTSTALQNPLSGLVYCAKCGNLMTRQPSNTRLRYAVLRCANSKCSNISSPLSLIEDQVIEGLKEWIPEYNVEWPEQSEHEGETTLAVLENSIINIEEKLNQTLKQLNKTFDLLEQGVYDLETFQERRGTLDSQKAELEEELDRIEKERDRITAMEQARKDFIPAIERLIEAYWEIDDVMTRNSMLRNVIDRIDYLKTKRNKKGAGNTANFTLNIFPRIPENR

SEQ ID NO: 21752 - protein, 487 aa, synthetic construct
MDGIYARQSLDKKDSLSIDGQVDLCRAEASEKFKVYADRGFSGKNTHRPAFMQLMKDVESGKIEKLVCYRLDRISRSILDFGMIWETLNRNNVEFVSVNEKFDTSTPVGRAMLYIIMVFAQLERETIAERVRDNYYQRVKKGAWPGGPAPFGFQIAKERVLGKKTLEPTPEIDVVKRIFDLYGEAGASLGKIAKELTEEGVPCAKRTAWDSISVGRILRNPAYVKATTAVYAYYQAKGAIIYNDASEFTGELACVMVGKRTSNERKYTRMQDQLLAISSHEGVIDGEQFLACQFRMDNNRQIKNTGKGRLTWLSGLLRCKECGYSLRVVEDKRYNRKYLSCSGRSNLHVCSMTHSERIEDVEAFVESFLLEHFTRQRSFLAANDHEPKPQDKWVSELNQIENKIKNLVQALADGNEISARYINVEIQKLDREKQVVLDKMSAAANHPAPGVVSYNFSKMSFDSKKNTAASIIKNVFCSPSGIDVELR

SEQ ID NO: 21753 - protein, 550 aa, synthetic construct
MKIAIYARKSKYSPTGESVENQVQLCKEYLQSKYKSETLEIDEYKDEGYSGGNTNRPDFKKLIAQIEDYDMLICYRLDRISRNVADFSSTLTLLQNNKCDFVSIKEQFDTTSPMGRAMIYISSVFAQLERETIAERIRDNMMELAKMGRWLGGTIPMGFDSEPITFIDENMKERSMTKLIPNVEELKVIELIYEKYLQLGSMGKVVTYLLQNNIKTKKGKDFTLGSTKVILTNPIYVKANQEVVNHLKAQGITVCGDVDGKKALLTYNKTTGISNDVGTKTMVKDKSEWIAAVANHKGIIPAHKWLQAQNIKDKNKDSFPALGRSNTTIASRVLRCDKCESTMGVSHGHVNPSTGNKHYYYNCTLKKRSKGVRCDNKPAKAAEVDEAILITLENMFKTKSSIIDNLKAKNKARRIEMISSNRVDVINKIIEDKTKQIDNLVNKLSLDDDLTDILFKKIKGLKAEIKELEDELLTLTSENIKLNEDEVVLDFTEKLLEKCSIIRTLDILEQQQIVDALIPLVTWNGDTEVLNIYPLGSPELELKEAESKKK

SEQ ID NO: 21754 - protein, 530 aa, synthetic construct
MLDPSGIYYMYLRKSREDREAEAHGEGETLARHEKRLNELAEQLKITISHIYREVVSGETIAARPEMMRMLSDIENEQPDGVLVVELERLARGDTRDQGLIMETFKYGNTKIITPMKTYDPNDEFDEEYAEFGLFMSRREYKIINRRLQNGRRASTKEGKWISNVAPYGYEREKLPHEKGFTLTPHPEEAKIVQFVFQLFTEGTPESDGLPLGPTQIAHLLDDMKVSPRKSDHWETGVIKGILKNYAYIGKLEVGKRKQLKVIENGTVKRSRPINNDSEIFDAIHPPIIDEHVFYAARKKLEANFRPTNFSTIKSTLAGLLYCSECQKAMYRRPAGARNPNDTVLCKTHGCPTVGSFYYLVEERLLQFLEKTLKEYKIRIQGENTGDWTEVLERKKAVLTEYKNETDILNKQLESVYDYFEQQVYSLDLFRKRSGDLNKKLEDNEKLTKSIEREMEEIKERIIRKEQFIPYFENVLKSYSKTDDPLRKNALLKQIVDHIYYTKTKKGTRLGQGVDSFTLDVYLKLPFRDL

SEQ ID NO: 21755 - protein, 561 aa, synthetic construct
MKKKACVYVRVSTDHIEQDQSYQAQMTYFKEHYSDYEIIETYAERESGTSIKNRTEFQRMLKDAGLELEVKRGNINIYSTNKEPKFNYIITKSISRFSRNSEIKEVIRKLKNQGVYIVFDDINKSTESEDDVLLVGILQQLAEEESRNKSKIIKWGKKRSAEQNIIPMNIIPYGYKGDIEQNRLEIDENESKVVKYIFELYLNGNGARKIREILTKEGYRNRKGKEFTENMILYIIQNPKYCGVNVRNRYMKNDIFNQTSQVELSEDQWLKMKNERIDIIISEEDFAKAQELINGRRKNGRGYRGYTKSQYANKIKCECGGNYIHNMYYNKDGTKRGIFVCNRRKKLGKAKSGCTSRNIFESELEEVIDEYCNGKYQKLLDLKIKWGLREIEEKTNKVNALDLKNVSVKLSELNNKLNENSNKIEKLIDMLLDSSSTKEDIINSKINKLEEENKKLESEKSELDVIINEKNLVLENLSKTSKMLNNIKEKNTKTTISKKDFIEDIAIIRLDKKDKIEIISEAMLIMNSVVLTTMKFKGENTFLENWINTVKPIVKKENDSY

SEQ ID NO: 21756 - protein, 538 aa, synthetic construct
MAIVKKKVVEIIPTRVDENINGEPVREKKRVCAYCRVSTDSEEQKESYENQVSYYTNYIQNKAEWEYIDVYADEGISGTGTKNRTEFLRMIKDAKEGKIDLILTKSISRFARNTMDLLKYVRELKERGIAVLFEKENINTLESSGEVFLTIFSSIAQDESRNISENSRWGIVKGFKDGKVFCNTTRFLGYDKDENGELIINEKEAEIVRRIYRDYLEGKSYIAIAKGLESDGIPTVTGNKKWWDSTITGILENEKYCGTLLQQKTVTVDYLSHKRVKNKGFNPQYRIEDNHEAIIPKDIFEKVQDEKERRALTVGNLVGDRNKYSSKYPFSGKVVCGDCGSAFRRRTWNSTNPSKKIVWQCKTYIQKGKEVCTAKSVDEKVLEKAFVDVFNRLKVDNEGFIETLSKNIEKVLSQRAENTDLTEIENKIEASKEELKGLIKLQVKGQMDEEVYNEEYVRLLAELENLRQEKSKIEKGNISIEQYKERVAEIIKVIKEQEGLLLKFDDKIFNALVGRIEILEPTHFAFVLKNGMKVEENI

SEQ ID NO: 21757 - protein, 519 aa, synthetic construct
MKKVTKIDKIEPSKAAKKKLRVAAYCRVSTDSDAQLESLETQKMHYESYINSRDDWEFAGLYFDEGITGTKADKRPKLMRLLDDCKAKKIDFVITKSISRFSRNTTDCLDIVRTLLNLNIPVYFEKENINTGSMESELFLSILSSMAEGESTSISENNKWGIKKRFENGTYKLGYVPYGYRWENGEIIVDPEQAVIVKRIFSELLAGKGTDAIAKSLNEENIPTKKGGHWTSTSIRGILANEKYTGDCIFQKTYTDSNFNRHRNVGQLDQYFVADHHEAIISHEDFNAAAALIEQRANEKGIQRGNNKYQQRYAFSGKIICGECGDTFRRRIHSSTYGKYPAWVCNTHLADTNKCSMLYLRDDDIKLAFATMLNKLIYCHKLVLKPYLEAMQANTSDAALLRIQQLETLLEQNAEQRETLHKLMAQGYIDQILFTQENNALLTQANDFRSDIEALNRSVTGDTSKVYETERLIHFCERGEMLLKYSEDVFELFVDHIEVYSRQSIGFVLHCGLTFKERI

SEQ ID NO: 21758 - protein, 521 aa, synthetic construct
MGNVMVIPARRQVGNTARQQDAKPKLRVAAYCRVSTDSDEQATSYEAQVEHYTEFIQKNPEWEFAGIYADDGISGTNTKNRDEFNRMIEDCEAGNIDMIITKSISRFARNTLDCLKYIRQLKDKNIPVFFEKEAINTMDAKGEVLITIMASLAQQESQSLSQNVKLGLQFRYQNGQVQVNHNHFLGYTKDEEGNLIIDPEQAEIVKRIYREYLEGYSTDKIAKGLEADGVLTGAGKTKWWTSTINKILRNEKYIGDALLQKTYTTDFLNKTRVKNNGIVPQYYVEGNHEAIIPKDIFLRVQEELVRRRVVKTSANGKKRSYSCNHCFAQIIVCGDCGEMFRRIHWNNRGCKSIVWRCLSRLEPTGQECHARTINETVLENVVVQAINTLLGNKSTYQAQLQQNIAKVIRDAQKTTADGIDEQLMELQKELLKKANNKEAYDEIADQIFKLREQREKSTVDTAARDAQIQRINDLQDFIKQQRTNLAEFDEALVKRWLKQIIVREDHFTVELKSGLKIDIEG

SEQ ID NO: 21759 - protein, 441 aa, synthetic construct
MAAYCRVSTDNEEQLLSYENQVRYYTEYINNSPLYTMAGIYADEGISATNTKKRENFNRMIKDCREGKIDMIITKSISRFARNTLDCLNFVRELKELGVGVIFEKEAINTLDAKGEVLLTILSSLAQDESRSISENSTWGIRRRFENGQFKMSTKRFLGYDTDEKGKLVINREQAKIVERIYDEYLSGKTVDHIKRILEREEVKNWNGTTKWHAKTIQSMLQNEKYKGDAILQKSYTVDFLTKKRAKNEGHIQQYHIEENHEAIIDPLIWEAVQLEYDRRSNYIVEHGTNSYSHNPEKNFFAGKVVCGTCNQAFTRKGWKSKNSYRKVWQCQERYKVKGVQGCTNRHIDEAILIDAFILSWNALLDNREDLKKKWETTAEFGNPLEQYRAVQFADITEDAKHIKEIDTDFILKTLDHIKVYETGKIIIRFMDGTEMECNGE

SEQ ID NO: 21760 - protein, 425 aa, synthetic construct
MRVRVIKPIESKQKKLKVCAYARVSTDSLKQEDSLENQTSTYKRIITSNPAYEYVGIYADQGISGYSENRPAFRSMIEKARVGEIDLIITKSVSRFARNTVTVLKVARELKELGVGIFFEEQNINTLSGDGEMMLTVLASFAQEESRSMSENNKWTMKKKFERGEIMVNTKRFMGYDKNEYGELIINPEEAEIVQRIFDMYLQGIGSFKIASKLNEEGIQTVTGKRWQDTTIRGMLRNEKYKGDCILQKYYTPENVRGRTVRNNGEVQAYYIEENHPAIVSTEDWEKVQELMERRKRKRKIGTGGVEKYKNRYPLSGMLICPHCGKTLRRKQVYNKRIEWWCSTYITKGKSTCKGIKIADEIASKKNITEQTVIEEVMIDGKKHYSYTSKTDYDRGIRNEPDAPATENGSVLPSVNRQRRTAIKL

SEQ ID NO: 21761 - protein, 541 aa, synthetic construct
MGETLFGHTGAAGFEEGFESTLATNSHHARLGSKEQQDLIKVAAYVRVSTLSDEQEDSLENQTTHYSRYIRTNPNWKMTGIYSDHGKSGTAASSRSGFNQMIRHALEGKIDLILCKSVSRFARNVLDTLDTVRMLKENGVRVIFEKEAIDTESMQSEFILTMMAAVAQEESRSISENIKWAYTKRMERGEPRFHRLLGYVQEGKRKWLVQPEEAEIVREAFELCLQEKSPAEIARIFVTKGYKTVKGNKEWSGTAIREILKNNHYIGEVLGQKMYTDNHLSHKSIRNRGEKKQYLIENHHEPIIDKETFQKAQLMLKKRAKPNKRRDRKQYPLSSRIVCGGCGGNLQRFECRGVVTWRCGKSVKSKDLCNMEGIREENIMTAIIAAFENKYESMEEGLPISKVIQKMLREIKNVDAKSDIEYNQLRGELESILHEENVAILTGADEVVEELKTRRVLIESVLKEKEKWWELLEADFSYRINASRKLENYSVKNTTLEELLDELKNIEYLRAWVVRVKALSPILFSITWVTGEEIEVELCEE

SEQ ID NO: 21762 - protein, 530 aa, synthetic construct
MARTATVRNVTTIPATLSRFTATPINEQRKRRVAGYARVSTDSDEQFTSYEAQVDYYTNYIKSRDDWEFVKVYTDEGISGTNTKKREGFKNMIKDALDGKIDLIITKSVSRFARNTVDSLTTVRQLKEKGIEIYFEKENIWTLDSKGELLITIMSSLAQEESRSISENVTWGQRKRFADGKVCVPFKHFLGYDRGQDGNLVLNEKEAVIVKQIFSMFLQGMTPYGIASQLTADGILSPAKKEKWNAGTVKRMLSNEKYKGDALLQKSYTVDFLTKKKKDNEGEIPQYYVENNHEAIIEPAVFDMVQRELERRQPGRNRHSGVHIFSGKIKCGECGSWYGSKVWHSNSKYRRMIWQCNHKFDNDEKCKTPHLDEETIKTFFISAVNKLLSEKEEILENFEIIKAMVFDTTDLEKEQAALHNEIEVVAGMIHQAIGENAHFALDQKEYQERYNGLVDRYDLAKARHTAVTEEITDKQTRLGTMNDFLNTLRRQEDLITEFDVELWYSLVDYGMVYDKDDIRFTFKNDKEIQA

SEQ ID NO: 21763 - protein, 454 aa, synthetic construct
MRKISKIEPKIPIMPTRKKVAAYARISEEKGRTLHSLSAQVSHYSSYIQKNIEWEYAGVYADEGISGTTEDRKEFQRLLADCEAGKIDIILTKSISRFARNTVDLLETVRHLRDLNIEVRFEKEGINSLSDDGELMLTLLASFAQEESRSTSENVKWSIRNKFQQGKPNSFNIYGYRWNGEQFIVDPEEAKIVKLIFKNFLKGLSAEQTEIQLEEMGVKSYTGGHFCNTSIRAILRNEKYTGNMLLQKVFIPDHITHKTIPNNGELPQYWVEDSHEAIIDIDTFKKVQDEIARRRELGVFANWSINTGCFTSKIKCGNCGASYRRSGKRQRKDSNEVYYVWTCRTKDLKGISECHAKDVPEKMLQKTCAEVLGLEEFDDDVFLDEVEKVVVKGKDELIFHFYNGQIVHQKWKSTARTDCWSEERRKEWSKYQKGNKHAIGSKGRCLEDGKNSNS

SEQ ID NO: 21764 - protein, 573 aa, synthetic construct
MCKKLVIFYRRVSSSRQIGDDKDGLDRQQRAFDAWWQHLPDRDDYDLEEFADEGVSAYSGANITGGNLGKINERVFSGEVPRGSILVVQDMSRFSRRDRRETIIDVWRYGLAGVQIYSLMESRFINSDDIGSDIMTLLQAGGNNDYSAKLSKFVGAAKKKAQERVRLERKGILKGSIPFWLEEKAEAATFNPDTTPQADYFNVIPERAAVVVRVFEARLKRMSMSGIATELNNEGIQLITQRDYKKKSQPQGFTPSAIKNLLRNVAVIGTLAESARKGAVYPAVPDYYPAVIDHALYEAVQLTLTKGKQVTIEDGDESNPYAIRIFKGLLVCSFCGHRLDVNGARGPRSDRGTPFAGSLICRNARLESCMHGPLDDAGKRTRTPTLPMRIVEQALTVGLFEQLNQTNLRNDVTRKIAKKRLELDTLSKQIEQNTDELMKVTVSVVRDAIMKKLTWAGEHFEELQKEVTELERKQKLQSVANLGSLDLLTRDGRIAAYHTIVKTIKRISINTVDLKVDITLLNGNVITGFSLLAHPVYPEEAETFAKNKMSQLADDEFGLLTGIKGQTSVNFDD

SEQ ID NO: 21765 - protein, 570 aa, synthetic construct
MKIAIYSRKSKFTGKGESIENQIQMCKEYAINNFGEDVSFSIYEDEGFSGGNLQRPKFQKLMEDIKKKNYDILICYRLDRISRNVADFSSTLELLQDNNCSFISIREQFDTSSPMGRAMIYIASVFAQLERETIAERVKDNMMEMAKNGHWTGGRIPVGFNSEKIKITNENGSTKEISQLIINDNECKFVEFLYKKYLELGSLHKLECYIAENNIKSKNEILYEKSTLKIILQNPIYVKSNNNIIEYLKSNSWNVYGEADGIHSLLTYNKTEQSKKNGKFIKQNKPIEERFAAVSSIKGFIEPTLWLDVQRQFDANKDKFPRLGKTHNALLIGKLRCGKCKEYMLVQHGRVSKTTGEKIFYYVCSLKRKSHRKLCTNHNAKAFDIEKLVLMSLKKLSANKKDFITSIENLNKKNLKSNEIEVEKLSLTKSLDSKKVQIENLVTKLSVASDIADILISKIRDLKEECSKIENQLKNIESTINKNKIELINVELIKSMLEQCSQIENLPRNHQKMIIDTLIDTIYWYGNDNGIGKFKIKFIGSDEDPEEVSYNSDELQTEMLQFSSHSMTSI

SEQ ID NO: 21766 - protein, 549 aa, synthetic construct
MNMNNDNSNPRVRVIPAKQKVNISTPKSESHKLRVSAYARVSTLVGHQNSSYELQKQYYQEFINSKPNWELYKVYSDEGISGTSTNKRVGFLQMIQDAKDGKFDYIITKSISRFARNTLTCISVVRELKSLPKPVGVFFEKENIDTLDSKSEFLLAILSSIYQEESKNISDNTKWAYQKAFSQGRIFCPTTYFLGYDTDEDGNIFIDEEQAKVVRRIFSDFLKGKGSSTIANELMRDGVLTARNKPVWTSDSVRKILKNEKYMGHCLAQKTVTIDFLTHKRVKNDEHQPQFFVKNCLPQIISEKDWYKTQQELKRRNDMAHDPDNKFRTKFSSKSPFSNKLVCGECGRPVTRRRLTSRIDYKKYNFTAWHCRAASQRDPEFKDCKAKYVWEEELEKAFVKSLLEMKEKKKLIVKEVENVVKSRSLTKTEENRLKELEEQLENISIRISDLASREPSSNDSIYDATMRNLIYEQEIIQMEHEKLDKINQENLYLKSKLKDLIKYLDEPIEAFRDDIFLDTVEKIILNNNQNLCFVFKCGYKEYANATKRR

SEQ ID NO: 21767 - protein, 533 aa, synthetic construct
MKKVVAYCRVSTDKLDQINSYENQKESFKKQLSKDNGYNLIEVFADKGLTGTNFSKREEFNRMLFMAGLDIDKVNNTYVYTANRYRRSKFNYIYVTNTSRFARNIEVISIIRELKKNGVYVIFNDINKSTENPEDEMILNIFFTMDEQESRDKSSKGINGHRRSAINNDKIATNGRLYGYRYIKAENRLEIIEEEAEVVRLIYKLCLDGLGQRKIINELNNRNIKTRNGVNFGVTQINNILRNIKYCGMSDRLKYVAPRLFTTSKIKRNNEENIIYKETDKIPSIISRETYDKAQEVKKERLVLTRDGKVPTYKGDNIYNGKIKCDCCGANYSRNIDRGRVFYNCSKKKAKGVNECNNKNLSDARLNEKIDERLKNFYLYICREFKSIEEIIEIKIKEYEELIKNQNLLSIIYSKNEDIKNLKSKKNRLLDLYLDGGLNKNDFVEKQEGIENEITEIEKQINDLDNGVSENANIKNELVNIKRELERQIKTTKEISKEDFIDIIDKIYVNQEEVIIVTNLENMIQDVKSFLNE

SEQ ID NO: 21768 - protein, 509 aa, synthetic construct
MKVAIYSRKSKETDTGESIKNQINMCKDYFTRQFDDCIFETFEDEGFSGGNINRPSFQRMMQLAKHKQFDVVTCYKIDRISRNTLDFLTVFEELKSYGVKLVSVTEGFDPSTPAGKMMMSMISSMAEMERMNIAQRVKDNMLELGKMGRWSGGTPPTGYRSVSVVNESGKKETYLELIPEYVDKLNLIFNMIGEGYTPGQVSKKIGLPNRTISNILTNPVHLAATEESKSYLESIGYKVYGELNGKGFMPYNRRPRVNGKALWNSKDMFVSTSKHEVAVEPTIWIKANQVFKARGAEARPRISPNSFLSHMVKCKCGSGMFVFPGNPNKQGEVKYYFRCSDKKYKKTNCDIKWLPVELVEEYFIDTLKKISFDKSLLITYLKSYESIDYDKLIKDIKKEISKKNRDIEALTEKLILIEGPAVSIITNKINTISCEITNLNEELFILERKKIFQDHDKINIDTLYKLIVKTISHFDTLSIEEQQLEIRSFLKEIIYHGGDDIEIVFLGGV

SEQ ID NO: 21769 - protein, 601 aa, synthetic construct
MNRSGKKCVLYPRVSTEMQVDGFSLDGQKNSLTRFADREEMEIIDIYEDAGKSGKSIEGRPAFKQMLNDIEYGLGIDYVLVYKLSRFGRNAADILNSLEHIQSFGVNLICIEEGIDSSQTSGNLLISVLSAVAEIERENIIEQTMNGRKEKARQGGWNGGFAPYGYYLKDKQLFIQEDEAEAVRIIFDKYVHGNMGFYKIANYLNLQGIQKVKWDNGTLTQWSTHFIRMIIDNPVYYGKIAFGRRTREKVKGTKNEYRQVHQDDYILADGQHDAIISEELWTQAHEKREITGVKSPSKIGRDRAHLLSGILKCPKCGGPIYTNKHAWTNKDGTYKEIYYYVCSKARTARGKSCDYKAMLKKTDIKPLVIEAIRELIKNEDFATEIKSKIGKQIDTSTLDRELKNYESKLREVDLNKTRLENEIDSLPEDTRFRERKLHDMTLRLDGLYDIIVELEEKIEDVKLRRKAVEQDAITLENIYTLLANFDKVYDKINDEEKKSLISSLIKEIEIFPCDESELPLKSILFNFPVYKDGGDVYEFLWDKSTHVSTWVECSLLMSASLGTYQPFFIVYKVLGNISTGILVLGNISTVFNNLFYTNYAH

SEQ ID NO: 21770 - protein, 519 aa, synthetic construct
MKRITKIEANEKLQLIPKKLRVAAYARVSTDNREQLASLEAQKSHYEVYIKNNPNWEYVGLYYDEGLSGTNMAKRDGLQKMLSDCEKGLIDFIIIKSISRFARNTTECLEAVRKLIKLNVFIYFEKENINTGDMESELLLTIFSSLAESESVSIAENETWAIQKKFQNGTYKIGCPPYGYKNVDGKMVIDDTEAEVVRYIFSECLSGKGCYMIAKTLSEKKVPTRKSGKWSSCGVKDILKNEKYKGDVLLQKTFTDSQFNRHYNRGEKPQYYVKDHHEAIISEEDYEAAQSIIEQRSKEKNIVTEDKKYLSRYPFSGKIICAECGATWKRRTHSSSNDKYYTYTCNTHLKDKGRCSQLFIREADIETAFINMMNKLIFSKKVLLQPYLNSLKSINQDSTLARINVIEKALEQNFDRRQVLTNLLSKQYITPALYTQQNNELLVETDELRNERDTLYRSVNGELENAEAASLLLKHLSNNTRFTEFESEEFEKHVDHIIVYSRSQIGFVLKCGLNLKERL

SEQ ID NO: 21771 - protein, 524 aa, synthetic construct
MISLAKNVTVIPAKKKIGTQKATDKVQKTRVAAYCRVSTDSDEQESSYDTQIEHYTTYIESHPEWVLAAIYADDGISGMNTKKRDEFQRMISDCNDGKIDMIITKSISRFARNTVDCLNYTRALKNMNIGVYFEKENINTLDAKGEVLMTIMASLAQQESESLSANVRLGLQFRYQQGKVQVNHNWFLGYTKDDDGHLIIDPEQAEVVKRIYREYLEGKSFLQIKRSLETDGIRNGAGNKKWHESNIKQILTNEKYIGDALLQKTYTVDILEKKREANKGQVPKYYVEDSHEAIIPKDIFLKVQEEIARRANLTKGTTKRKRIYSGRYVLSGIVFCSHCGDIFRRIKWNNRGCKSTVWRCVSRVEKDGPECTARTINEEWLHEIVIKAINEAFREKETILPLLRENIESSLEEDTSNQIAAINEQMKLLQQELLATVNSMNTGDEIGMEIRKLRDEQQALQNEQASRQDLKARIDEMMSFLNNLPCELTEYEEEYVRTLLEKITVYDDHIIVEFKSGIEIQIDE

SEQ ID NO: 21772 - protein, 519 aa, synthetic construct
MKRITKIGVNETLVQKKKLKVAAYCRVSTASDEQLISLEAQKAHYENYIRTNDEWEYVGLYYDEGITGTKKDVRAGLLSMIADCEDGKIEFIITKSISRFARNTTDCLEMVRKLIGLGVHIYFEKENINTGTMESELMLSILSGLAESESISISENTKWAIQRRFQNGTFKISYPPYGYQNMDGQMIVIPKQAEIVKYIFAEVLSGKGTQKVANDLNQKGIPSKRGGRWTATTIRGILTNEKYTGDVLLQKTYTDSHFNRHTNYGEKNMYLVENHHEAIISHEDFEAVDVVLNQRAKEKGIEKRNSKYQNRYSFSGKIICSECGSTFKRRIHSSGRKYVAWCCSKHIGNITECSMQFIRDEDIKTAFVTMMNKLIFGQKFILRPLFHGLRNQNNAASFRRIEELETKIENNMEQSQVLTGLMAKGYLEPALFNKEKNALEAERERLLAEKDQLTRSVNGNFAKVDEVDRLLKFATKSKMLTAYEDELFEDYVERIIVFSREEVGFELKCGITLKERLVN

SEQ ID NO: 21773 - protein, 527 aa, synthetic construct
MSYLMYLRKSRADKEAESRGEGETLARHEQLLTELSVKMGLEIGAVYKELVSGETISARPKMQQLLVEVMQGMWEGVLVMEVERLARGDTKDQGTVAEAFKFSNTRIITPMKTYDPSDEFDEEYFEFNLFMSRREYKTINRRIQRGRIAAFRDGWYIAGTAPYGYEKVKHKGDKGYTLQIVPEEAKIIKYIFELYTAGEPQEDGSYAQFGSYQIRDRLNELSVPSRSEKPWSASSIVDILNNPTYCGYQRWQWRKVHKQMVGGRIIESRPKDADCEKVRGRFEPIISEDTFNLAQKIKAGKPLPINTSTALQNPLSGLVYCAKCGNLMTRQPSNTRLRYAVLRCANSKCSNISSPLSLIEDQVIEGLKEWIPEYNVEWPEQSEHEGETTLAVLENSIISIEEKLNQTLKQLNKTFDLLEQGVYDLETFQDRRGTLDSQKAELEEELERIEKERDRITAMEQARKDFIPAIERLIEAYWEIDDVITRNSMLRNVIDRIDYLKTERNKKGAGNTANFTLNIFPRIPENR

SEQ ID NO: 21774 - protein, 548 aa, synthetic construct
MQALKKKNISIIPPQSAYDKSVKVQLKALRVAAYCRVSTLLEQQESSYEAQITYYTEKIQQNPNWKLAGIYADDGKSATNINKRDDFKGMIEDCMAGKIDLVLTKSVSRFARNTVDSLQAIRKLKEKNIGIIFEKEGINTLEATGELLITILSSQAQEESRNISENTRWGIARRYENGVVMVNHKKFLGYTKDEEGELVIVPEQAKLVRRIYRLYMEGLSTKQIADTFMAEGIKTVTGNDKWHDTVIAKILQNEKYMGDVLQQKTYTVDFLTKKRVKNNGIVPQYYIEDNHEAIIPKELFYQVQEERARRASLHKPSVTRRAKKEKSKYSSKYVFSDILVCGECSHPYRRQTWSRNGNLTPVWRCESRLLKGTKICKHSATLKEKPLQEAIMTAVNSVVENQREVVGAFRENFIRVIGNYSTKNIKTEFDEEIAKLQKKLLALIEENAKQGAINEDFDEQYREIAEEMQALKIKKLKMAREQKLAGEYEQRVDGMKSCLNGVSCRVGGFDEELIRNLVLRIKVISESKIEIHFKCGIILEQKVDFYED

SEQ ID NO: 21775 - protein, 555 aa, synthetic construct
MAGKQEKMKKVIKINPVKPQVMMQLQPRKRVCAYCRVSTDSREQHNSFTAQTAYYEELISKRSDWQYAGIYADEAQSGMKLEKRDDFLRMMRDCETGKIDMIITKSITRFARNTVDSVEAIRKLKLLGIAVFFEKENINTTSESSELLLTILSSLAQGEAESISTNNRWAAIKRFQKGTFIISTPALGYINAEGELEIDEQEAETVRFIYKEYLNGKGSYVIARELNEKGIPTVRGAEKWSDGVVLKVLQNPVYIGNLILQKTYSTEVVPFKRKRNKGELPQYLISENHDPIISREEAEAVKEICEYRRNQMKVDSIKSQNRYAYSSKIICGECGRIFRRQKIYIGKPYEKVRWCCIKHIEDKEKCSMTAIREDVIQRAFTTMWNKLSSNYTEILYPMLESLKRLRSDEQQEKEIRECNEKIMELSKQSHILSGVAAKGYLDPAIFIEKQTALQIELDAMRKKSRILLDESGFENEIFYTEQLIELLESNPGIQDNYREDLFLQSVEQVIIKEGRAVVFRLKNKLELTENYGKEERDGAKTYADRIPYARRKSIS

SEQ ID NO: 21776 - protein, 509 aa, synthetic construct
MKKAIAYMRFSSAVQEKGDSLRRQRKLIDDWLSQNQEFTLDTTTYEDLGLSAFKGKHAQSGAFGEFIDAIDNGLIMPGTVLLVESLDRLSREKIGEATERLKYILKSGIDVITLSDSTHYSEESLDDPYALIKAILISQRANEESEIKSSRVKLSWQKKREDAELTGKIMTRACPRWLKVSADYSQFEVIESRVKVIKKIFALRKANKSLTAIAKYLNDKSVENLSGRRGEWCPSVIEKLLGNKALIGICMPTHRGRAKGVKEIPGYYPKVLSDEEFYSVQEVRLSPFGFTSHSDNPYLINLLRTVMKCRHCGNTMVITSVSETIKGYYVCPMRRLHRCTTPAVRRELVDAIIIDEILVNLDRLQIETNQMSYLSTLEKSCIDLQLQINQLVQALAIAPDVKILADKIRILDCQLRKNETAIKVLRNKARLDKGCDIKNLDLTLKEDRELCRRLAFKAFREINIDTLTQQCDIYFSNGLIFRNFPTGKKNHIENVISALKYIDKNTVYF

SEQ ID NO: 21777 - protein, 520 aa, synthetic construct
MKKITKIDELPQGQLPNTNLRVAAYARVSTDSDEQLESLKAQREHYERYIKSNPEWVFAGLYYDEGISGTKMEKRTELLRMIRDCKQGRIDFIITKSISRFARNTVDCLELVRKLIDIGVYIYFEKENLNTGDMESELMLSILSGFAAEESASISQNSQWSIQKRFQNGSYVGTPPYGYSKVDGEMVIVPEEAEIIKRIFAECLSGKGGGTIARGLNKDKIPARRGNHWSAGTVIDMLRNEKYMGDVLLQKTYTDSNYNRHPNTGEKDQYYYKDNHEAIISREDFAKTQDLIDERAKMKCKGVKKNVYLNRYALSGKIVCGECGRNFRRKTNYSAGRSYIAWSCIGHIEDKESCSMLFLRDGEIKAAFTTMMNKLAFSHKLILEPLFKSISQIDEESDRKRMDAIDKRMEQLMEERNTLITLMAKGFLEPALFNQERNVLDSEMKNLSTEKTNLVSNSASGVLRANEIKDLINYVSAVNFNGDYTEELFEEFVVNIIVNSRDELTFNLKCGLSLKEKVVR

SEQ ID NO: 21778 - protein, 497 aa, synthetic construct
MRAAIYARYSTDRQNENSIETQVSKCRKYAQAHDMIVEPNYIYSDYALSGMKMQRGELQRLLSAAERREFDAVIIYDQSRLSREIVAWFTLRDTLPLYGIELHSVVRGEYGDIKEPDNFLLEGVEAVFNQLHVLTSRKKTIDGLRNIASKGLFAGGSACLGYDIVDRQYVTNDREAHVVRLIFEMYASGNGYGTIIDHLNTCGYKTKAGRSFGKNSLYSILTNERYIGTFTFGKKLVNPDGSRNSHKVSPTAIRIENAIPSIVETEVWDVVQRKIHQKKQNAANKATEDYILSGKIYCGECGGAMCGEKRNNGRYLYYICNTRKRLRTCTKKAVRKEVIERQVLDEIYKTLTPSTLENYAQKIYESMDTVSDNTSALKKVARGELHSIEAKINNINNAIAEGIYSTSTVTTLKGLEDQRVKLLDHLAELDKRRVETTKTLEDVRGALQYAVAHQGNEKFLINLMLERVTCYENKEIRIILNPLRLDDTDCLGPSGGT

SEQ ID NO: 21779 - protein, 530 aa, synthetic construct
MLDPSGIYYMYLRKSREDREAEAYGEGETLARHEKRLNELAEQLKITISHIYREVVSGETIAARPEMMRMLSDIENEQPDGVLVVELERLARGDTRDQGLIMETFKYGNTKIITPMKTYDPNDEFDEEYAEFGLFMSRREYKIINRRLQNGRRASTKEGKWISNVAPYGYEREKLPHEKGFTLTPHPEEAKIVQFVFQLFTEGTPESDGLPLGPTQIAHLLDDMKVSPRKSDHWETGVIKGILKNYVYIGKLEVGKRKQLKVIENGTVKRSRPINNDSEIFDAIHPPIIDEHVFYAARKKLEANFRPTNFSTIKSTLAGLLYCSECQKAMYRRPAGARNPNDTVLCKTHGCPTVGSFYYLVEERLLQFLEKTLKEYKIRIQGENTGDWTEVLERKKAILTEYKNETDILNKQLESVYDYFEQQVYSLDLFRKRSGDLNKKLEDNEKLIKSIERELEEIKERIIRKEQFIPYFENVLKSYTKTDDPLRKNALLKQIVDHIYYTKTKKGTRLGSGVDSFTLDVYLKLPFRDL

SEQ ID NO: 21780 - protein, 527 aa, synthetic construct
MSYLMYLRKSRADKEAESRGEGETLARHEQLLTELSVKMGLEIGAIYKELVSGETISARPKMQQLLVEVMQGMWEGVLVMEVERLARGDTKDQGTVAEAFKFSNTRIITPMKTYDPSDEFDEEYFEFNLFMSRREYKTINRRIQRGRIAAFRDGWYIAGTAPYGYEKVKHKGDKGYTLQIVPEEAKIIKYIFELYTAGEPQEDGSYAQFGSYQIRDRLNELSIPSRSEKPWSASSIVDILNNPTYCGYQRWQWRKVQKQMVGGKIIESRPKDADCEKVRGRFDPIISEDTFNLAQKIKAGKPLPINTSTALQNPLSGLVYCAKCGNLMTRQPSNTRLRYAVLRCANSKCNNISSPLSLIEEQVIEGLKEWIPEYNVEWPEQPEKEGETTLTVLENSIGNIEEKLNQTIKQLNKTFDLLEQGVYDLETFQDRRVTLDSQKAELEEELARIEKERARITAMEQARKDFIPAIERLIEAYWEIDDVMTRNSMLRNVIDRIDYLKTERNKKGAGNTANFTLNIFPRIPENR

SEQ ID NO: 21781 - protein, 583 aa, synthetic construct
MANANVQVRKATRKVMNRNKGTHMSTLRVAAYVRVSTDNEEQLESYQSQLKHYTDLINDNSEWQMAGIYSDEAITGTAVRKRDDFQRMINDCMNGDIDMIIVKSISRFARNTVDTLQYVRMLKEKHIAVFFEEENINTSTMDGELLLTILSSVAQQEVQNISEHVKLGLSMKMQRGEMIGFNGCLGYDYHKEDKTITVNSKEAEIVRYIFQRYVEGAGGKVIARELKNLGYKNKRGQSSWSDHGIVGIIKNEKYKGDLLMGKTFTVDPISKRRLDNLGEADQYYIENHHEPIISRELFEQAQQILQKRTASHSRANGNGKRDKYSRQFSFSCLLKCGFCGGNLTRRTWNSHTDYKKTIWQCVTATKHGKRECPYCKGIPETLIEEAFVRSYNALCNHNGDFVDSFLERVKMTLQEDDNGKEMKSVDKEIFQLKERKSILVDMRLDNKIDEETYKIKLEEVTDKLDKTYQRKQELNHLQSEQQDINKRLSEFQKVLSNHEVLKEFDRHVFECIIDRVVVGEKKDNGEIDPYKLKFIYKTGMENEVAISQPFSFDNPCSHTIDECGTICLQGDDDTCGDGCSFIP

SEQ ID NO: 21782 - protein, 531 aa, synthetic construct
MIAAIYSRKSKQTETGDSIENQIELCKNYANTYLLKNNEDVSFIIYEDEGFSGSNTNRPKFQQLLKDAKDKKFNCLICYRLDRISRNVADFSSTLELLQNNNIDFVSIKEQFDTSTPMGRAMVYISSVFAQLERETIAERIKDNMYQLAKTGRWLGGQTPLGFNSERVKYFDEEMNEKSMSKLTQIPEELELVKSIYDLYLDEMSLHKVQKHCLANHVKGKNGGQLMQRSIDDILRNPAYVISNDDVFEYFNKQNITTVGTPKGQGLLLYGKRNVKGKQYDKSEWIVATSNHKGVIPSKKWLRVQELLDTNKNKVSKRLGTSKVALLSGLLKCSECGSSMRITYNRPNKEGVRGYHYTCTLKCHSGKTRCANPNANGLKIEKEIIASIKSTTKEDILRAFNKKYKNKPKDDGTSNYKAIEKEIKNKTAMMDNLVDQLGNATESASTFIMKKINKLGEEIDVLNKELDKSLIVKDETEKENANLELILQSLEEFKKVFDMLDLSKKKSLLNRMIKDIIYDGYIKKIDINYLI

SEQ ID NO: 21783 - protein, 527 aa, synthetic construct
MSYLMYLRKSRADKEAESRGEGETLARHEMLLTELSVKMGLEIGAVYKELVSGETISARPKMQQLLVEVMQGMWDGVLVMEVERLARGDTKDQGTVAEAFKFSNTRIITPMKTYDPSDEFDEEYFEFNLFMSRREYKTINRRIQRGRIAAFRDGWYIAGTAPYGYEKVKHKGDKGYTLQIVPEEAKIIKYIFELYTTGEPQEDGSYAQFGSYQIRDRLNELSIPSRSEKPWSASSIVDILNNPTYCGYQRWQWRKVQKQMVGGRIIESRPKDADCEKVRGRFDPIISEDTFNLAQKIKAGKPLPINTSTALQNPLSGLVYCAKCGNLMTRQPSNTRLRYAVLRCANSKCSNISSPLSLIEDQVIEGLKEWIPEYNVEWPELSEHEGETTLAVLENSIINIEEKLNQTLKQLNKTFDLLEQGVYDLETFQERRGTLDSQKAELEEELERIEKERDRITAMEQARKDFIPAIERLIEAYWEIDDVITRNSMLRNVIDRIDYLKTERNKKGAGNTANFTLNIFPRIPENR

SEQ ID NO: 21784 - protein, 518 aa, synthetic construct
MNKSITVIPARKRVGNTVNMEDKPKLRVAAYCRVSTDSDEQATSYEAQIEHYTNFIQKNEEWEFAKIFADDGISGTNTKKREEFNRMIEECMAGNIDMIITKSISRFARNTLDCLKYIRQLKERNIPVFFEKENINTMDSKGEVLLTIMASLAQQESESLSKNVKLGLQFRYQNGEVQVNHNRFMGYTKDDDGHLIIEPTEAEVIKRIYLEYLQGASLKQIGESLESDAILTAAGKARWRPETIKKILKNEKYIGDALLQKTYTVDVLTKKRVKNNGIVPQYYVENSHEPIIPRDLYMQVQEEMLRRANIRSGKSGKKRVYSSKYALSSIVYCGQCGDIYRRVHWNNRGYKSIVWRCVSRLEEKGSECTAPTINEETLQTAVVKAINELLANKEPFLSTLQKNIATVFNEENDNATDDIDGKLEELQQQLLIQAKSKNDYEDVADEIYRLRELKQNALVENAEREGKRQRIAEMTDFLNEQSCELEEYDEQLVRRLIEKVTVFDEKMNIEFKSGVEIE

SEQ ID NO: 21785 - protein, 520 aa, synthetic construct
MRRITKIEENKALSVKKKIRVAAYCRVSTASDEQLISLDAQKAHYEKYIKANDEWEFAGLYYDEGITGTKKEVRDGLRSLITDCEKGLIDLVITKSISRFCRNTTDCLELVRKLLDLNVYINFEKENINTGSMESELMLSILSSLAESESVSISENEKWSIKKRFQDGTYIISYPPYGYANINGDMVIVPEQAEVVKQIFANTLEGKGTHAIAKELNEYGISSKKGSKWTPGTVNAIIRNEKYTGDVIFQKTYTDSNFNRHINYGEHDQYLCTNHHEAIIDHEVFNKANEVMNQRGKEKGNGENTQRYQNRYGFSGKIRCGECGSVFKRRIHNKPSGKYVAWCCTHHIEDKDACSMKYITDDSIKVAFLTMMNKLIFSHQVVLRPLLRSLQGLGDKDRLLQIQECETKLEKNIEQRQVLTSLMTSGILEPALFNSENNTLNQEKEMLEAQKNKLMYSISGDRTKFDALEKLIKYVSGSEMLKEYEDEVFLSHVDKITVISRDRIVFVLKCGLGLKERLVG

SEQ ID NO: 21786 - protein, 523 aa, synthetic construct
MAVSRNVTVIPAIKRVGNNKNSESKPKIRVAAYCRVSTDSEEQASSYEIQIEHYTNYIKKNKEWELAGIFADDGITGTNTKKRDEFNRMIEECMAGNIDMIITKSISRFARNTLDCLKYIRQLKDKNIAVFFEKENINTMDSKGEVLLTIMASLAQQESQSLSQNVKLGIQYRYQQGEVQVNHKRFLGYTKDENKQLVIDPEGAEVVKRIYREYLEGASLLQIARGLEADGILTAAGKAKWRPETLKKILQNEKYIGDALLQKTYTVDFLSKKRVKNNGIVPQYYVENSHEPIIPRDLFMQVQEEMVRRANLRGGKGGKKRVYSSKYALSSIVYCGQCGDIYRRVHWNNRGYKSIVWRCVSRLEEKGSECTAPTINEEILQTAVVKAINELLANKEPFLSTLQKNIAAILNEGNDNATDDIDSKLEELQQQLLIQAKSKNDYEDVADKIYRLRELKQNALVESAEREGKRQRIAEMTDFLNEQSCELEEYDEQLVRWLIEKVTIHANRVEVEFKSGISIDVKN

SEQ ID NO: 21787 - protein, 521 aa, synthetic construct
MKRITKIEGNMANSFIKQKTRVVAYCRVSTDSNEQLVSLQAQNAHYETYIKANPEWEYAGLYYDEGISGTKKENRSDLLRMLSDCETGRIDLIITKSISRFARNTTDCLEMVRKLIDLGVHIYFEKENINTGSMESELMLSILSGLAESESISISENTKWAIQRRFQNGTFKISYPPYGYQNIDGQMIVNLKQAEVVKYIFAEVLSGKGTQKVANDLNQKGIPSKRGGRWAATTIRGILTNEKYTGDVILQKTYTDSHFNRHTNYGEENMYLVENHHEAIISHEDFEAVDAILNQRAKEKGIEKRNSKYLNRYSFSGKIICSECGSTFKRRIHSSGPRKYIAWCCSKHISNITECSMQFIRDEDIKTAFVTMMNKLIFGQKFILRPLLQGLRNQNNAASFRRIEELETKIVNNMEQSQVLTGLMAKGYLEPALFNKEKNALEAERERFLAEKDQLTRSVNGNIAKVDEVDRLLKFATKSKMLTAYEDELFEDYVERIIVFSREEVGFELKCGITLRERLVN

SEQ ID NO: 21788 - protein, 597 aa, synthetic construct
MTTNPRIAAVYCRVSSARQGDESKVSLADQQRRCLEAARAEGFEVLPEMVFVDRVSGTKGEDERPGFGTMMDAARSGKFSKVFFWRVDRLGRDQVEIGVALRDLERAGVEFRSLDDPDLANRLLRGITAAIADHEAAMIRARTARGRKAAREHGVWTQGMAPFGHRRRDDGALEIDPVEAATVRRVVAWIRDGLGRVAVVSRLNRERVLPPLIELTMPGRARMVRMRSNDPCIHSDRQRLAAFMADTGAEFAKGREPCWGESTIDRMVHNSVLHGETGGIPVKIVPAPLLTVQEHRELLEIVAGRHRKGKAPRNSYLLTGRVICGTCGRGCTVHIGGANRNGPVTLYWICAGRRNGSGCTQPLARMDAVNPMVATKISSYLTKRLSRQSFRDFLAEHSRSSLAEIERRHTEIRVALADATKRRAHISGIMMRMADMDEAALADFKAELSKAGAKVAELETEERDLLARLARVQEAALTDDAAHQDVAFLAEHGLWLDGDMPTDPALPDPRDILAALNVRVTVQPDRQAVVTFDDTDAALADVVRVLAGWAQRAYQRTGPLKRFFDMRHISTEEAFLSDSYEDPLGVVGSVDTDKPLA

SEQ ID NO: 21789 - protein, 547 aa, synthetic construct
MKVAIYIRVSTHHQIDKDSLPLQRQDLINYCEYVLNVKEYEIFEDAGYSAKNTDRPRYQDMMNRIRKGEFSHMLVWKIDRISRNLIDFCDMYEEIKKYNCTFISKNEQFDTSSAMGEAMLKIILVFAELERKLTAERVTAIMLDRASKGLWNGAPVPLGYKWDSKIKFPVIDEEESKVVKLIFDKYQELQSTSAVRNILNSLGVKTKRDGSWTTKTLSDVIRNPFYKGTYRYNYRNSIDQKKKKENEWIMVEDNHPAIISKELWQKCNCIMDENALRNNARFRSNVKTHLFSGLLECGECHNSLYAKQDKPHLDGYIPSLYCCSGRYNHLACEQRTTSEKLIGEFVFNYIATLLKIEKKRSKVEFEEFNDILLNARQLKGVIAIDGVENLYNLTNSNKNIFTKVSKNDTNDLEIERLKKEKSKYGRALERLEDLYLFDDEGISEKDYIIKKNKIVEKLNEVNNELKKHVSSDSNNDNFILVASNFILGKALVLSEEDINIKTLINKVGRDLLKEFLNAIIDKIIVKNKRVICIRFKNGIENRFIYTS

SEQ ID NO: 21790 - protein, 563 aa, synthetic construct
MNKPKAAIYARVSTESLEQDGSFEAQQRYFTEKYKDKYEIVEVYAEKKSGTNIKNRDEFQRLLKDAGLELEHKKGNINLYNTKNEPKFNYILVKSVSRFSRNTEAVTIIRKLKSQGVYVVYDDINKTTESEDDEMLLSIMQTVAQQESVEKSRIVRWGIKRSAEANMIRMSSIPFGYDRVPNENRLLINEKEAEIVKYVYELYVNEDKGVRAIKQMLDEKGYKNREGKSFTERSLLYMVQNCKYCGINLRNRYTSNDLYNKNSRIELSEEEWIKFKNERIPVIISQEMFDEAQKKLESRRTNGRGYRGFTRSPFAKKFACECGGTYIHNKFKNGDKEAVGFYVCNRRKKMGKAKSGCTSRNILESELNDVIEEYINGKYKKVLLEEIDLANKHLSEKLDEINKIDITNIKIKATDIEAKLEENKRKIEKLIDMLLDSSNTKEDIINKKLQLLEEENKTLEEEMSELNVIIKNKDDILNNIDNFRRLLKELEYGTKNLIPLNKKDFIESILLIDLDENNEIEIYDKIIIKVSTLHVVAKKWNVNQNLNDNYNGLIRDFKENYYK

SEQ ID NO: 21791 - protein, 509 aa, synthetic construct
MKIAIYSRKSKETDTGESIKNQINMCKDYFSRQYDDCIFETFEDEGFSGGNINRPSFQRMMQLAKHKQFDVVTCYKIDRISRNTLDFLTVFEELKSYGVKLVSVTEGFDPSTPAGKMMMSMISSMAEMERMNIAQRVKDNMLELGKMGRWSGGTPPTGYRSVSVVNESGKKETYLELIPDYVDKLNLIFNMIGEGYTPGQVSKKIGLPNRTISNILTNPVHLAATEESKSYLESIGYKVYGELNGKGFMPYNRRPRVNGKALWNSKDMFVSTSKHEVAVEPTIWIKANQVFKSRGAEARPRISPNSFLSHMVKCKCGSSMFVFPGHPNKDGEVKYYFRCSDKKYKKTDCDIKWLPVELVEEYFIDTLKKISFDKSLLITYLKSYESIDYDKLIKDIKKEISKKNRDIEALTEKLILIEGPAVSIITNKINTISCEITNLNEELFVLERKKIFQDHDKINIDTLYKLIVKTISHFDTLSIEEQQLEIRSFLKEIIYHGGDDIEIVFIGGV

SEQ ID NO: 21792 - protein, 501 aa, synthetic construct
MYPIDALYARQSLDKKDSISIESQLDFCRYETHGNEYETFVDKGFSGKNTNRPDFERLIKAIKEGKIKRVIVYKLDRISRSILDFSNMMELFQKYNVEFVSSTEKFDTSTPMGRAMLNICIVFAQLERETIQKRVTDAYYSKSHRGYYMGGRIPYGFRLEETSIDGVLTSRFIPDPEEANRVKMIFDMYANQDATLGDIFRRLISDWSGDDKKWCTARISDIIRNPIYVRADIDIYNFFLSQGTNIISEAACFIGSNGAFLYKGKDKDRKKQSDLTDRDLVLAPHEGIIDSETWLKCRWKLLNNNQCARTRKGKRSWLTGKVKCKKCGYAYIVTKSNTTGLRYLQCSGMRYNARCKGSEQTIYAHVFENHIYNEMREELKKFQYLSNEIEKSGNVSYSKYKMEMLEMDKEIEALLNKVSEASSTLMQYINMRIDQLDAEKKKLQEKIISLSANKPINNLEKINNHIEIWEELSIEDKQKIADILIKVIYIDNDTISIEWNI

SEQ ID NO: 21793 - protein, 408 aa, synthetic construct
MRIKVIKAKPMVNKKQRVCAYARVSTDSLEQEGSLENQIEHYRTLIESNHEYEFVGVFTDQGISGYKEKRPGFQAMLEEARKGNIDLIITKSISRFARNTVTVLKYVRELKKLGVGIFFELQNINTLSNEGELMLTILAAFAQAESEGASENAKMTYKRKFKQGNPPINVNRILGYKLDEYGDLVINREQAETVRLIFDLALKGIWPSNIKNYLNRNGIKTITGKDWDDKGIFRILKNEFYKGDLRLQKTFTDSNRKTRKNTGQVDSWYIEENHPPIVSRDEWDLVQRILSERSRALKESTMELKPRSSSSHNTYPLSGMLYCSKCGAVLHHKQDKENRAYWACSTNLKKSKEACSGIFVSEDIANTWNITEKSIVEEGEDEYGKKYYIHTSKAEYDRRKHSSTDKED

SEQ ID NO: 21794 - protein, 444 aa, synthetic construct
MAAYCRVSTAQEEQLLSYENQVNYYTTFINENPIYEYAGTYADEGISATNTKKRDEFKRMIADCRAGKIDLIITKSISRFARNTLDCLNYVRELKELGISIIFEKENINTLDAKGEVLLTILSSLAQDESRSISENSTWGIRRRFEKGQHKMSTKRFLGYDTDEEGKLVINRKQAHIVTRLYSEFLSGKTVDYIKRIFEREGVVNWNGSTKWQVTTLQSMLENEKYKGDAVLQKSYTVDFLTKKRVLNQGEIQKFYIEDDHEAIIEPWIWECVQLEIERRKRYLEEHGTKSYSNNTEKNPFASKIVCGECNNVFTRKGWRSSNRETRKIWQCSERYKVKGVMGCANRHVEESTLEKAFIMAWNGILENREYFLRKWEEQMQSENLLEVYRAKDFWELTKEAGLAEKIDTDFMLRVLACIKVSGDGQLLVLFLDGTEIECIGTER

SEQ ID NO: 21795 - protein, 426 aa, synthetic construct
MKIRILEPVFQVSQKKKRVCAYARVSSDSRKQEDSLENQTDTYERLITSNPEYEFAGVYADQGISGYCESRPQFQKMLGKARAGEIDLIITKSISRFARNTVTVLKVARELKELGVGIFFEEQNINTLSGDGEMMLAVLASFAQEESRSMSENNKWTIKKKFEQGEIMINTERFLGYDKDEYGGLIINQKEAFVVDFLYDMTLFGLGNSRLKSLMNFLGVKTVTNGKWNESTVNGVLTNEKYKGDYHLQKYFTPENKRNQSRLNRGEVQSYYITDNHPAIVSEEKWNQVQAERERRKKNRNIAADGTEKYQNRYPLSGMLICPYCGKNLRRRMVYKGKIQWLCSTYIKEGKQACRGVRVDDTEVIKQNIKEPTVVEEVIVYGKKHYRYTRKADFISGREYEPECAEVTGGGILQGINRTRRTAIKL

SEQ ID NO: 21796 - protein, 496 aa, synthetic construct
MIGIYARQSADKRDSISIETQIEFGKREVFDGEEYKEYSDKGYSGGNIDRPDFKNLMSDIKSGLIKKVIVYRLDRISRSILHFTSMMEIFNQYKVEFVSCSEKLDTSTPAGRMVVNILIVFAQYERESAQQRISDNYYERGKRGVFLGGNTPFGYDYTHIKLANKKASILTPNPEQSLIVKEIYDMYANQGMSLGEIAAYYNQNNIVVGKKGKCNSNTISRILRNPAYVRANSDVYNFLELKGCIMTSEIEDFNGKNGLVLIGEGDTKFTDIAGYYVSVGLHEGLIASDLWLKAQYRIYNNKQIANNGTSKNTWLSGLSKCGYCGYAMTYKSQIKRGKKFEYLRCSGRNNKACTAEMPSWKLPEAEETVFQIFKNNIELSKLRIENNHNTEKADSAKLEIALIDKKINNLVNNLMESDNVSMQYINKAINELHTKKNQLTEKILENQEQFYTGHIDIGNYLAKWDELSFEEKKKFIRLYANKIRFFKDKLVEVDFK

SEQ ID NO: 21797 - protein, 521 aa, synthetic construct
MKKITKIDELTRSQLSKNKLRVAAYARVSTDSDEQLESLKAQREHYENYIKSNPEWEFSGLYYDEGISGTKKEKRPELLRMIRDCENGKIDFIVTKSISRFARNTMDCLELVRSLMDIGVYIYFEKENLNTGDMESELMLSILSGFAEEESASISQNTSWSINKKFQNGSYIIGSPPYGYANVNGEMVIVPEEAEVIKRIFAECLSGKGGSIIAKGLNRDKIPARRGNHWSAGTVIEMLRNEKYKGDVLFQKTYTDSNFNRHINNGEKDQFYCKNHHEPIISREVFSKAQKLIAERAKNRNKSIAKNTYQNRYVLSGRIICGECGSKFRRRTNYSVGRSYIAWSCIGHIEDKNSCSMLFLRDGEIKATFVTMMNKLAFSRKIILDPLYDSINKIDEECDLERIDAIDRRMEQLTEERNTLIGLMTKGFLEPALFNKERNVLDIEIKNLITEKTNLVMSFTNGTSQTDEVKTILEHVSKNKFDGNYTDEAFDQFVENIIVNSRDELTFELKCGLSLKERVVR

SEQ ID NO: 21798 - protein, 520 aa, synthetic construct
MAEKNITVIPARKRVGSTAAKEKVKKLRVAAYCRVSTETEEQNSSYEVQVAHYTEFIKKNAEWEFAGIFADDGISGTNTKKREEFNRMIDECMEGNIDLVITKSISRFARNTLDCLKYIRQLKDKNISVFFEKENINTMDAKGEVLLTIMASLAQQESQSLSQNVKLGLQYRYQQGKVQVNHNRFMGYTKDEEGNLIIVPEEADIIKRIYREYLEGKSLAGIGRDLEKDGILTAAGKPKWRPETIKKILMNEKYIGDALLQKTFTVDFLTKKRVKNEGHVPQYYVENSHEAIIPKELFLQAQEELHRRNNIYTGADKNKRLYSSKYALSTITFCGDCGDIYRRVYWNIRGRKEFVWRCVTRIEQGPETCKNRTVKEGDLYDAVMTAINRLLAGGDNMIRTLEENIHAVIGDTTEYKISEINSLLEEKQKEVISLANKGKDYEYLADEIDKLREKRQSLLMEDASLSGENERIGELIGFIRKNKYRTLLYDDTLVRKLIQNVTMYEDHFVVSFKSGIEMEV

SEQ ID NO: 21799 - protein, 501 aa, synthetic construct
MYPIDALYARQSLDKKDSISIESQLDFCRYETHGNEYETFVDKGFSGKNTNRPDFERLIKAIKEGKIKRVIVYKLDRISRSILDFSNMMELFQKYNVEFVSSTEKFDTSTPMGRAMLNICIVFAQLERETIQKRVTDAYYSKSHRGYYMGGRIPYGFRLEETSIDGVLTSRFIPDPEEANRVKMIFDMYANQDATLGDIFRRLISDGSGDDKKWCTARISDVIRNPIYVRADIDIYNFFLSQGTNIISEAACFIGSNGAFLYKGKEKDRKKQSDLTDRDLVLAPHEGIIDSETWLKCRWKLLNNNQCARTKKGKRSWLTGKVKCKKCGYAYIVTKSNTTGLRYLQCSGMRYNARCKGSEQTIYAHIFENHIYNEMKEELKKFQYLSNEIEKSGNVSYSKYKMEMLEMDKEIEALLNKVSEASSTLMQYINMRIDQLDAEKKKLQEKIISLSANKPINNLEKINNHIEIWEELSIEDKQKIADILIKVIYIDNDTISIEWNI

SEQ ID NO: 21800 - protein, 530 aa, synthetic construct
MLDPSGIYYMYLRKSREDREAEAHGEGETLARHEKRLNELADQLKITVSHIYREVVSGETIAARPEMMRMLSDIENEQPDGVLVVELERLARGDTRDQGLIMETFKYGNTKIITPMKTYDPNDEFDEEYAEFGLFMSRREYKIINRRLQNGRRASTKEGKWISNVAPYGYEREKLPREKGYTLSPLPEEAKIVQFIFQLFTEGTPESDGLPLGTTQIAHLLDDMKVSPRRSDHWETGVIKGILKNYAYIGKLEVGKRKQLKVIENGTVKRSRPINNNPEIFDAIHPPIIDEHVFYAARKKLEANFRPTNFSTIKSTLAGLLYCSECQKAMYRRPAGKRNPNDTVLCKTHGCPTVGSFYYLVEERLIQFLEKTLKEYKIRIQGENTGDWTEVLERKKSVLTEYKNEADILNKQLESVYDYFEQQVYSLDLFRKRSGDLNKKLEENEKLIKSIERELEEIKERIIRKEQFIPYFENVLKSYSKTEDPLRKNALLKQIVDHVYYTKTKKGTRLGQGVDSFTLDVYLKLPFRDL

SEQ ID NO: 21801 - protein, 529 aa, synthetic construct
MAKKVRKIEPVKQKVILELQPKKRVCAYCRVSTDSREQQNSFSAQVEYYKTFIEKRDNWEYTGIYADEAKSGTQVKKRDEFLRMIKDCEDGKIDMIITKSVTRFARNTVDSIEAIRKLKALGIGVYFEKEHINTLSEKSEQMITILSSLAQGEAESISTNNKWAVKKRFQDGTFKLSDPAYGYTKDEDGNLIIKEDEAKIVRRIFHEYLNGKGSYVIARYLNDDNVPTIRSAEEWQDSVVKEILQNSIYEGDLLLQKTYTTEVLPFERKSNKGELPQYFIENNHEPIITRKEGQMVREIYEYRRNQMGVDDSGKYQNRYEFSSKIICKECGSTFRRQKIYIGKPYEKIQWCCVQHIRDISKCSMKAVREDIIKETFLTMWNKLVSNHTDILYPLLESLKNLRTDHEQEEEIKKLNSRIMELTEQSHILSRVVSKGYIDSAIFIERQNALTVELEAIKKMRNQCLEDNGYEKEIIGTVRLLEIIRYNPEIIEEYDEYLFLNTVENIIIGENHEITFKLINNLELTEYYGK

SEQ ID NO: 21802 - protein, 552 aa, synthetic construct
MAVVVAKKNVAFIPAQTIYDRNVRVELKTLRVAAYCRVSTTLEQQESSYEAQISYYTEKIKGNPNWKLAGIFADDGKSATNTKKRDDFNAMIDDCMAGKIDMVLTKSVSRFARNTVDSLQTIRKLKEKNIAIFFEKEGVNTLESTGELLITILSSQAQEESRNLSGNTKWGLTRRYENGIVTINHKKFMGYTKDENGELVIVPEQAEIVKRIFRMYLEGSSIGEITKALEGDKVKTVTGKETWHPGVIEKMLVNEKYMGDALMQKTYTVDFLTKKRVKNNGIVPQYYIEDNHEAIIPKELFYKVQEEKARRASLNKAAVTRKANKLKKEKSKFSSKYALTEILVCAECGHPYRRQTWSKYGQKSAVWRCENRLKNGAKASCKHSPTLKEEPLHNAIMTAINNVVENNGDFIGAFRENVIRVIGGYSTKDIPTEYDEQIESLQKEMLALIEENAKQGAVAEDFDNEYKRISEKINELKQAKLKLVREKKQAENYKQKLTEMDTTLKTVRPQVREFDEDLVRRLINTIKVNKGERLEIQFESGIVMEQMVDYYD

SEQ ID NO: 21803 - protein, 538 aa, synthetic construct
MAKNGARVYSYLRFSDPRQATGSSADRQLQYAQRWAAEKGLALDESLSLRDEGLSAYHQRHVKQGALGVFLQAVEDGRIADGSVLVVEGLDRLSRAEPIQAQAQLAQIINAGITVVTASDGREYNRAGLKAQPMDLVYSLLVMIRAHEESDTKSKRVKAAIRRQCVGWIAGTYRGIIRNGKDPQWLHWDGQVFQLLPERVEGVRLVIELFRQGYGSVRIIRELTERGLSVTTKGITALQVHRLVRLPALMGVKVLELDGETYRLEGYYPSILTADEFADLSLLVESRVRRKGKGEIPGLVTGLGITYCGYCGTAVVGQNVMHRAKADGSLSDGHRRLICVGYSHNKGCSVGGSCSVVPIEKALMSYCTDRMNLSSLLEGNDQSQLIQARLVAAKSEAAHIEQQLERVSEALLAAEGGAAPLVFVRKARELEELLSARQKDIAQAERELVAVSNRDQPGLSEAWAELTSGVEMMDFDARMKVRHLVRDTFERIVVYHHGMQATARDGNVIDLLLVGKGGQPRLLRIDRKTGEWRAGMGA

SEQ ID NO: 21804 - protein, 506 aa, synthetic construct
MKRAIAYLRFSSLQQVQGDSVRRQKKLIEEWLKNNSDYYLDPVTFEDLGLSAYKGQHAISGAFSEFMEAVQRGLIDEGSVLLIESLDRLSREKIGDATERLRAILKAGIDVVTLSDSTHYTRDSLDDPYSIIKAILIAQRANEESEIKSKRQRAVWAEKRKQAAETGKIMTRHCPYWLKVNALGDGFDVIEEKAEIVRFIFQMRLDGRSFQKISQTLNEQRKENLRGKVAKWNSASIERLVKAKTVIGYLVPSYRITVPDVTEIPNYYPAIINVEDFNRVQRISYEPESRRNLNFNPHLINVFKGLMHCKQCGHAIILTGINTKGYGYYVCTMRRQHRCSSVAVRRDLTDRYLITGVINEASNMNMNLSKDTALISMTAKHIELSGKLQNIIKAIELAPDVSEFTRRATELSSEISQLKKTMADLQFERDMKSTAALDVLNISDRKEYQAIARSLFKDIQIDGKSKTCDIYLHNGMRIINYPLTKSTGWASILDAMAYLEQDEVIL

SEQ ID NO: 21805 - protein, 583 aa, synthetic construct
MTQSIVAHSKVVKPLVKVTIYCRVSSLMQIDGYGLQRQQDVIRSFIDNFQVPHELGYEIDRENYEVLEDQGKSAYHGYNFTKGQLGIFRDKVLRKEITSGLMIIENVDRFTRMEEYLAMQEFNNLILGGIDILEVETGEIFSKKINGSLTKLSVSIARAYSESKRKSNISKRSWMNRKRKSLEDGVAINNNTPDWLNLSEDKKYYIVDADKVALINYVFNSYVEGLGATNIIKRLNDQRKYLSDTPWSTNKIYHLLSNKRVTGYLGDERHYPQIVEPGLYDQVQELLKNKTRKRRKAGTLMRSLFNGIAKCTFCGNGMIGHNMSSAVYLRCIAERSKTTECKKAKLIRYNAAERLILEHIRNVDWAALKQEQNDNKNDLSKLRTDASILESEIADVVKELETADDDLVMPLAKLVKKRRGELQELNEKISTLEGSFATPDMSLVTDIDSIQDQENVTLRQSVYLLLSKTVSTINCARYDWDETYYIFELKYIGAEQKHVLICNKTLEKKYNVVIHKRGETTIYETYSFKIEATPEMIKIDVPQSIVINDYFLLLNYIDSVNGSERVAQWMRDKMVDVLRQAYS

SEQ ID NO: 21806 - protein, 568 aa, synthetic construct
MNKPRLYSYVRFSSERQAKGQSLERQKSSIDNLVKKIALEHNLKIFEEYQDFGVSAFKGKNATEGALSEFIQHVESGKIPRGSYLLIESLDRFSRANPMTAVNMFTSLLLKGIVVITGIDNQIYKVSEVNNDTLQQLMFSVMLFSRANEESETKSKRTIASALSKIKRHQQRQTGDPVVAIKELGQDKWWVDSSSGFVKPHPVYYPVAQKLIELKQKGYSNRLILAYLQENHPAPTEGRSRGKWNMQHASRIIEPAIHGQKVINVNGESFTLDDYYPAIVTKDEYERLKFQIGNKSFAPLKEKNPEIPLLTGIGILYCKHCGCHMFKMKSTVKNQPFAYRYVCSSRDSHRNCSKWGFRARTLELALLQLLADRVFVESSPVTSGVEHLIADIDEQISNYLVAIGSAKSPQMINKLTELIDGLENQKADYLKQKQIHDDQMVRMNTAGWDKFKQLDIDDTQNIERLEIRASIKTVIKRIDCQQIDPAHNFFFVTYRDERTQKLVIKKDTAWTKGRVYIDSTTVTNEQLLESEGLVMHSHIDIMIDRERFLKDHQERFEHPPTIIDHLTE

SEQ ID NO: 21807 - protein, 635 aa, synthetic construct
MDDTNPLPARKILYKYIRFSSIQQAKGSSFARQNARLEKYAEDNNFEIDDSLDLRDFAKSGFHGINKEIDQGLGRFIAAIEKGLIPTDGSAYLAVEQFDRISREDIDKAQDLFKSILRKNVNIITLMDGRIYTKKSLSNFMEVLYSLFLMEQAHQESLKKSDRIKGAYVNKLKKLKELAAEQKEILEEWEKNKSGKKPELEPLINQIQFSSQVPCWIDQKIEIIGGRKFRKFVVNEEKAKIVRYALSLLNDDNGYLNVSAQLNKENIPRLDFNTNRKRSTRKDIWTNRAVNEFVNSDSIFGELAVHNNFFVDKEFDYEGIKASKKVMTRTHLENIPNYYPAIVDKKLIMGLRARANAKKKGRVAGRTTTNNLFQNMLFCGKCGDSMHLRQSKRETKKGTYQRFYVTCYAAAHKACDAKMFPYTQLEEQLVKYLINPVNTAELNEEGKVIEEKRQQKLLVLKGEIQDIQSRIDEFTQEITKNRNIKPAIALSIISEFENDKALKQSKISELEMQTEKLHDALQVGDISNFDLVGDDGRNGFKVAIKQRYAGFIIYTNEQILFAIEKTGATTIFKLQNKSRWGTVLKAEKGDIFEKQVQAIKFLRDRAADYKEGKLYELIQTFKATNIDIFEGQYIE

SEQ ID NO: 21808 - protein, 604 aa, synthetic construct
MKKRLYSYIRWSSAVQGKNGGTTEERQLEGAKRYALKHGFELVTMIDAGVSAFRGRNAARASNGTSKVGELGKFIDAVEEGLIPKDSVLYVESQDRISRSDIITANKLFLQLLDLGITIVTGIDERSYSKESVNTNPFDLMYSIMLFSRANEESNTKKNRVEDNALERIKRFESGLPTTIKSVGSHPFWIDASTAYDEQVRKHPQYWQVAQYAMELFLEGASAFKVCKELNTRFPEGWKGKMWSVPNVRKLRTNPAVYGLRILNVKGIEYKLEGYYPPLITEAEFARLQDIQQNNKYITTGEKNQINLMAGLRLFRCGHCGSTMMAMRHKDTIRYLCEKGRAAGNLKSKDDKLNKLKGCRTWSLSGDLVEHTLMYAVTYAFIYKNKDNKEKVDYETQINETKEKILSVTARITNLTELISAGLGNVVEVVESIKTFNEERQVLNLHLDKLQQNNLLQESSHFEELMMNYFETIQWPIIATVDHPERVKIREIVRSTIDKAVVWKIDKKITIYYVTKDGTDFTFEAGDEKDEWRFYFGIPDLVKRSDGFEQAKQALEMNNELFDKILALKNQEAEAAGHALKTVVKALQVVGYPAIDGKLFWPRK

SEQ ID NO: 21809 - protein, 577 aa, synthetic construct
METLKIDRSKPLAIAYVRWSSTVQGGDDKDSYDRQTSPLEFFTSSTGVPVVETIIDPGQSAFTGENSKKGKLKGILDRIESGEIRKGDFLVVESIDRITRMRVLDGVALIQDGILKKGVKLYTTTDNKTYSYEDPEKDFENLLMISLIAKRANEESEIKSKRRRSAWNKAKTKATDGVPFNANNPPYGLRYDPEENRFEIVEDEAIEIKKIFEGLKYEGVSNTLKKVNLTSKRKWSRKTVHLMLTSRYPIGTLMSQKRDGKTKVFERYIENYYPAILTHKEFQDALQAMKQRGKVKDYGRNTEGYLNIFKHCVKCAVCGQSLMFEKSINQKGIKYGYFHCYTRKETLSHCDLPRFRFDFAFGTLLQLVRQLTGDEVEYDAHPWASEMPADYDSTLADDEIDIENFGNQFLSLFSKSTATEAVKTEFYKAENELAKAKSIYENLTASFSQFSDGRIPSFFIKQMSDAEQAYENAKADVDALSFQIDNAESSLEIYSYKDIIDLYSSDEGRLKLNYFFKSNGFKFIFNYEAKTRTVFMTVRDKADAEIYRVGKKFTLHNPLKEFGIDNLNEQMNSVLKI

SEQ ID NO: 21810 - protein, 480 aa, synthetic construct
MKVADLYVRVSTDEQADKGYSQRDQEDRLRKHCASLNILVENVIYEDHSAKTFERPEWKKYIFGIKRMRGSRDGRFLFFTKWDRFSRNTSEAYQMISNLNKLNITPQAIEQPLDLRVPENKLLLAIYLSTPEVENDRRALNVTYGMRRAIKEGRLMGIAPYGYINRSKEDGKKYVAVKEPEATNMIWAFKQVAKGHLPTAVVLKQMNMREGRKLTKNSFMEALRNVAYIGKIFLKAYNDEEERIVEGKHEALISEELFMKVQNILHRKSNKDIFLPAGRIINEDRYPLKGLLLCPICNKNLTASSAKGRSKHYYYYHCTLSCGFRHNSEIINDLFIEELAKFSFANGAEKILKTILLQNFSLASNGLKDERKILQNKLTAIEQRIDKARDMYVEDKLDEEDFRRIKLKYKNEIDDLTFKLNSLKSSNEDNSIEDKMNQALNAIASISDRYKKADSVDKKSLIGLIYPETLTFNGELFKPQ

SEQ ID NO: 21811 - protein, 621 aa, synthetic construct
MFAVQYARWSSQEQQTKDKGSTLTRQIEATSKHIAAMGWPLLREPLIDRGRSAYTGDNIENGQLGAFAKSILSGAIDASRTVLVVEELDRLSRQPADVMLSWLSPLVRKGLSIKVVNTGQLITRDMLDHDMGGLMMILITAFGSHTESRKKSKRVAAAWEKKREAARNGESVILTHRHPKWIEVVDDQWHVPKHKRAIVELIFANRLKGVGKALTAKRLNELATDNPDYLPWPIDGKTALPRMWTATYVGRVLRNRAVMGEWQPFVRPRKGEARPAGEPIADYYPQIITPADFERANEARALDALKHQGRGKSLSNLLGTRARCGVCGGQMAARGSAAYVTNSRGETRRHYSLYCDANKVGHTCDNSRGWSYDRVEGPILDRILTLAMDDQHFGGTLDTAPLEKAVYQARATITDLKAKIALLIDAIEAGGDAIKDRLAKRNAELEAAKGALAEAEEALATAKGKVSPAEHLRRVAEVRALMWSDDPDERFQARSRVKQALGELIDKITFHPATGMVSVLLVDRSRLFSIAGAECLPRGGNLKKHADIQPPRIVSDIDLMAMGGGPGYGKVTTYEDATLGIDGDGVAVLVSGRVVKVENDLTPEQHAASAAYARRKGAQAA

SEQ ID NO: 21812 - protein, 537 aa, synthetic construct
MSDIFFFDSFAKGKQSRNVSKSLECVIYTRVSSKEQADNLSLGTQLKACMLYAEKFGFNIAAQFGGTYESAENDERKQFTEMLSFVKKFKGKISSILVYSLERFSRNDNSIWLSGELRRLGIEIISVTQPIDTSSASGQMQQKLLFLFGEFDNQLRKQKCSAGIKEMLLRGDWPTSPPLGFEIDRSKNKRQIVVNAKGRLLRQAFEWKAYENVSNEVIRDRLAQRGLKLIHQRISEIFRNPFYCGLMVHNMLEGQVVVGNHEKLVSRELFLKVNGILDKVPHGFSLNEENVHIPLKRFMFCAECEKPLSGYLNRKKNIYYYKCKTKACCNNKNAESLNSRFANILEFFKIDIATDYIELLVEQVAATFNQLTENKKADLLELENSHRELKRKVERLEEKYIEEDLDQELYKKYHDRYSEEKREIERNLLILSNKSSNLVKCIKLAIEYATQLPLKWVSGDYHTKQQLQALLFPSGMSYDKKNDKVRTSDINLVFLYIAHFQQIILKKERGIPELNLNYASFADSVAGSRIELPTSGL

SEQ ID NO: 21813 - protein, 506 aa, synthetic construct
MKRAIAYLRFSSLQQVQGDSVRRQKKLIEEWLKNNKGYYLDPVTFEDLGLSAYRGKHAISGAFSEFMEAVQHDLIETGSVLLIESLDRLSREKIGDATERLRAILKAGIDVVTLIDGTHYTRDSLNDPYSIIKAILIAQRANEESEIKSKRQKAVWAEKRKLAAESGKIMTRHCPYWLKVNDSGNDFEVIEDKANIVRFIFEMRLDGRSFEKISQTLNEQGKENLRGKISKWNSSSIERLARKKAVIGYLVPSQQITVPDVDEIPNYYPAIISDEVFNRVQRISYEPESRRNTNFNPHLINVFKGLMHCKQCGYAMILTSISNKGYGYYVCSMRRQHRCSTEAIRRDLTDRYLIAGVINGASGMNIKLSNESALISMTSRQVELADRLQKIIKAIEISPNVDELAARASELSSEINQLKKSMAEIQIEREMKAAAALDVLNVDDRKECQAIARRLIQDIKVDGRSKTCDIYMLNGMKILNYPLTKSTGWSSILDAMAYLEKTEVIL

SEQ ID NO: 21814 - protein, 596 aa, synthetic construct
MKTQLYSYVRWSSDKQTGNSSLERQTRKSKEYAARNGLEWAELRDEAVSAYKGANWDEKKSALGGFIGAVKKGLVPSDSWLYVESLDRLSRQNVLDATEWFISVLKLGITIVTGMDEHVYNKESIAANATGLMMSIMLFARANEESETKSKRVVSHAKQLIERHKEGKPATIKSAGSHVWWIDSTGDEREGVKPHPEMWEPAKFIVEMFKEGDSIFRIVAALRERYPYGFKGRDWSGSTIKNMRVNPALYGCRTLKFGLEENKLENYYPALCTEAEFYRIQDVKSNNKFRATKSSSISLLAGMRLIRCGQCGGTMNTLTTTDGKLRYVCSSGLATKGGGCTRSWSLSGILIEHCLMIVLSHAYFDSSIRNQNSATDLDSQIEKFEIRIAELNTEIKNIAAGIAKHYSEALVELLAAAEKERKQLVQELDRTHQKKLLLTTNTVFEKDMLNFFELIQWGIISDPTHETRVKLREIVRRLMRSVVIHKYDGIVSLHFSYKEGEYFVFEGAGKRHEWTHYIRRDKDTSTVVSAEVIEQVKNHRLIKDIETSLYNLETAHDGMFNMVLDMLAIVNYPKLKGSQFWPKKSSTERTVFKKPA

SEQ ID NO: 21815 - protein, 597 aa, synthetic construct
MNKTKLFSYVRFSSGKQSDGQSVERQTATANRIANQYGLELDTLSFRDLGVSAFKGKNAAQGNLREFINQIGKRVPVGSWLVVENLDRLSREETLSALDILKEILRKGITVVTGMDSKVYTYETLSSSTMDLVMSVLLFSRAHEESVTKKTRVESQARSLIQKNLNRESGTPAFVIESIGQNVWWSAQDNGKVIPHPEYFSVAQKIISMKWDGCSPGEIQRYLNENHQPPTKDKKGNADIWGMNLLRSFLNPTVHGRKEFVLDKRDLNGALVRKRHIDESGDEYWLNEKETFVIEDYYPALMTETDYLTLASLDKSRSATRNSVNGNELREIGLLSGIGVLRCGKCGLPMTKNSAAKSRFRYVCTSKNTTGKTCGNAGFTGQPLEHVILQLIADHVWNNNQEDRTEWFNHEINKLDSQIKKLVRLATLTDDSGIDELAAEINSYKKQKRELEFKFSEYKLEKSAQVSTGWDEFRKFDTEDVTNPDRKRIRLKIKQAIKSIDCTTFNGRFGLFMVKYIDNSEQRIVLKYNRRSSPGEAFVDIHTVNDKVMVEMSGITLHTHIEKLIDPDGYEEARQAWIKANQIASDHTPTIIDHLTE

SEQ ID NO: 21816 - protein, 542 aa, synthetic construct
MTRVALYARYSSDRQNERSISDQLSLLIQHAGAKGWAVVGTYTDAAISGSAMANRPGLLAALAAAERGEFDLLLAEDEDRLARNLEHLAHVANRLADIGAGIATLSTDRVQDMHVAFKGLIAQDFIRNLSMKTKRGMASNAEKGLATGSRLYGYRSQPGGAVEIVPDQAEVVRRIFSMYVNDRMSSREIAERLNRDRIPSPAGREWNASSIQGSRQRANGILHSEIYAGVKVYNRVEMRKDRQTGRKITICKPPSEHKRIDVPHLAIIDQDLWNAARQRLDSRQTADPSQRASLRRRPGLLSGLTKCGCCGASYTSLSQGRLVCAAYREKGVSACDNNRHVKRAEIEQRVLDGLRTRLLAPEAVAAYVRAYHAAWAEQAAQVEDRRRPLTRRLAEVERAIERGAEALLSGATAAAVIGKKLEALEIEQAQLKATLEQLDAEGAPPVQLHPRAAENYARKIEQLQARLAEAASSTDDADRDLIGSVRGLIQKVDIEPINKSRGSPVRVTLHGDLARFVLPQHPPASGCALVVGGGIEPPTCGL

SEQ ID NO: 21817 - protein, 559 aa, synthetic construct
MTVKAYSYMRFSSAAQREGDSLRRQLKAAHDWAAERPDIELDTTARDLGVSAFKGEHRVKGALAAFLARVQEGKIERGSYFLVESFDRLSRENETVAINLLTSITLAGIKVVTLTDGHVYDDKSDGMEIIRAVLVMSRAHEENKARGKKLAAAWADKKKRARETGEVLTRRGPAWTEFNDTTRKFDLITERADIIRRIFQEATEGMGGTAIAARLNADLEAPFVDGSDGWHPGYILTILKSPTVCGYYQPTLTTKRPGERMERLGDGDPIPDYYPRIISDELFLRVQDIIHTRNKRGGGRGRRGKAFPNLILGLGRCEVCNGTLVLGNAPNSATARFYRCYQSSRNHRCENKTRYKSSVIEATLEYFLISARADNQEPTSAKVELTAHLDRQADLKRKIEVLLDQLESGSGAVAERLRQRELEMVAIETAIADLKRDERSVANINRADAMMAAVQWMRTMKDLEGDDLYRARAKANALLNDVFDWIIPTGKGLFLGQGEKFRYAEPDLMTFPMYLEPGQPITGAALADIMGDLPEEASITGGEVLTDAEAKAFKASLAA

SEQ ID NO: 21818 - protein, 546 aa, synthetic construct
MGNLEKGLVYSYLRFSDPKQSAGGSTDRQIAYAAKWAAEHGLMLDTRLSLRDEGLSAYHQQHVKSGALGVFLRAVEDGRVPNGSVLIVEGLDRLSRAEPLQAQAQLAQIVNAGITVVTASDGKTYSRQRLKDNPMDLVYSLLVMIRAHEESDTKSKRVKASIRRLCEKWQDGSYRGPVNQGHDPAWCKQTDTGWTFDEARAKAVRRAIELYKDGLSGKRIASVLDAEGLRLYVSSKQNIGTQVYRILEMSQLCGHKPVSVDGEKYLLRDYYPALISEPEWHELQRIKSEAGRRRIKGDLPHIITGIGICFCGYCGKPMAGQNLASKPRAPDGRIRDGYRRLLCASAAAYGTGCPVPGSTSVAPIERALMSYCSDIINLQALYSGDRTQGPRTRLRAAQTQAQELERQLEVLAEAMLAAASEGTPIVFARKARQLEAELATVQREIQHAERELANATRTNNEGADKAWRDLTAGVEAQDVTTRLKARQLIADTFERITVWHHGIRPNPDATERDYYIDVQLIAKGGISRLLRIDRAGTWVTSEDADL

SEQ ID NO: 21819 - protein, 509 aa, synthetic construct
MLFETGSEREIISYGEYPYLVYGRVSSDKDEQISSLENQVDICRHWIENNGFEWNENAIVIDDGITGTVLLDRKAMQLILYKARRKEIKMVIFKSIHRLARDTKDSLEIREILIAHGVRLVTLEEDYDSLYEGKNDMKFEMYSLFASQYPKSLSVSISGALAAKVRRGEHLGQIPYGYKTENKKLIIDEEIAPTIRKMFSWYNNDGLGYKSIVHKLNDELAKGNVVPPKRTNKWQLTTVQTILKNSAYCGTFIHNKYTKVKLDGRKKQIVNPREKWKIYEDYHPGIVTKEEWQKANSKKHPNYRKKITPWNEFRKILVCSECGSNIIINQSYKKKKNGERNEWHYLKCSAYRRAGENGCVNHTPILYKDFRTLILKELENESKNISINFENTLYKQKEKEIVSLNVKKEKLLQKNKDLLDTYLEKIISKEEFITQRKEYESEIEIIKDKIFMLSQEENRQIEINNIKEAFEQLHDHDRDLFHVFTTLLNKITLYPDGKIDIDYKFKKHL

SEQ ID NO: 21820 - protein, 503 aa, synthetic construct
MLRIAIYSRKSVYREQSISIESQIELCKKYFEGKECSFEIFEDEGFSGGNTSRPSFQRMMNKIKSKLFDVVAVYKIDRMSRNLLDFWDTYSLISRHGVQFISISENINTTTTIGQMIMLQYAGMAALERDNIKQRVKDSMESLGRMGRWSGGTPPTGYRVVEVEQHGKKAKYLELDEAIAPLIERMFKLYSTGSTIYEIQKALNVPNKTILNILRNPVYCESDYVSAKYLELQGYSVYGEINGNGYLPYNRRQKKDGKKETKSKDQLVSVSKHKAIIDSKLWVSVQEKLNEKASNPKPRISDKTFLAHLVKCKCGSGMFVYPGKTKKDGSTVIYFRCSGRKNGSECNSKFLRADFVEKKVLESLSNIELDKSLFNTSDMSKYDSQIKSLNKNLAKNKKMIDNLLNRLALASDDIAKSILDKVEDINSENKNLEFKLLELERLNLESMNTKNNKEAFYAQVKSILDTFDTLPVSEKQKMISTIIKNVVWDSDTKKIRLEIFEGI

SEQ ID NO: 21821 - protein, 429 aa, synthetic construct
MRVRIIEPTLKTEKVKKKVCAYARVSTDSQKQDESLENQIQYYENLILNNPDYEFIGVFADRGITGTTEDRPEFQSMMNCCRKGKIDLIITKSISRFARNTAIVLETVRELKLLNIEVRFEKENINTLSGDGELMLTVLSSFAQEESKNVSDNIKWRMRKKFQQGEMIINTKRFLGYDKDEYGDLVINPKEAELVKRIFNEYIAGKGCFTIARELREEGVATVAGGTWRDSTILRILKNEKYKGDALLQKYYTPDHLRKKTIKNNGEVESYYIEDNHVPIVSRETWEAVQEEIKNRAKDKGIVLGDTKKYKRRYPLTGMLYCSKCGSTLRRRTWNSKLSCRKIVWQCSNYIKNGKNACTGTAIDDDIVSKLNIKEETIVKEKVRNGKKYYSYTSKRTQNQHRTNNRAAQKENGSVLQGINRPSRTVIKL

SEQ ID NO: 21822 - protein, 443 aa, synthetic construct
MAAYCRVSTDQAEQLSSYEAQVNYYTNFINNSSEYEMVKVYADEGISGTNTKKREQFNEMINDCKLGKIDIIITKSISRFARNTLDCLNYVRMLKKLGIGVIFEKENINTLDGKGEVLISILASLAQDESRSISENSTWGIRRRFEQGKLHINHKKFLGYDKDEEGNLIINEKQAKIVRRIYKDYLDGKGTNRIAKEFEEEGVKGWNGKAKWYESTIRGILTNEKYKGDALLQKTYTVDFLTKKRAENNGEVPQYYVEESHPAIIDKEMHAAVQLEMERRRIFAKEHDIVKIDYATITNPFAGKVICGHCGSVFGRKVWNSTNELRRRIVWRCNRRYIKKGKKGCNNKHIDDKVLYQACIDTFNAIIENKDYFMEKWKVHLKSDNVLVRYKAKQFIGILKNAKPIKEFDEDLFFRIVEKMTVFDGEKIIVSLLDGTEIEIIIE

SEQ ID NO: 21823 - protein, 522 aa, synthetic construct
MNVGIYSRKSVYSDKSDSTKVQIKIGKEYIYNNFTDVEKIIIYEDEGYTGANTIRPDFERLMEDVENKRIDVLVCYKIDRISRNVLDFSKTFEKLQANSVQFVSVKEQIDTSTPLGRAMMYICSVFAQMERETTAERVRDNMIELAKSGKWAGGKAPIGYKRERVILNGKYHTVLVKNEEELPFLYMIYNTFLEGFSLNGLETYYHKKGVKTLNGNYLSTTQLYNILKNPHYVANTVDVYDYFENLGCIMVDDRKDYDGKHGLVVYGRTSGGKKKKHISNAPDKWIVSIGLHEPIFSSEKWLAVQNRFGQNTIDKTRKHEIGLLKGIVKCKCGYTMRVQHKVDKIYNRVYDNYFCQNRNRRGITFCDMKMVAVNLLDDKVIETLKQLSINKKLIEKYVKQNSEIIPVRDKETINKEVANLKKKINNLTIAIQDNYDSSATKYIISEIEKLDKQIIGLNFELRELKEQEKKSKKHNDDIDTLYEKICLYIKNFETLSYGDKVKYLQEIIKECTWDGEELIITL

SEQ ID NO: 21824 - protein, 510 aa, synthetic construct
MERVAMYLRKSRADVEAEMRGEGETLAKHKKSLLRIAKAQGLNIIKIREEIVSGESLFNRPEMTELLKEVERGDYTAVLCMDIDRLGRGNMQEQGLILNTFRETDTKIITPTKTYDLKDESDELMTEIQTLFARQELKIITRRMQRGRVQSVESGNYIGTRPPYGYEIRKEGKSRWLIPHPEQSKIVKMIFEWYTNDDPNERKGTGKIANQLNEMGFRSYTGIPWTAASILVIIKNEVYTGRLQWKKKEYKKTATGRVVKTRSKDDIVDAKGKHEPLVSQELFDKAQEILKGKYHVPYQLESGITNPLAGLIRCAKCGYSMVYRPYTTQPAHLMCYNKQCDCRSSKFEYVETAVVAALKEWLRSYKVELSKHKQEDHSGREVELKKMSLTSLEKEMVELENQRERLFDFLERGIYSEEVYLERSQSLTNRMKETSTLIDRAKVELHEAMNREKKQNNIIPMIQNVIKMYERSKDPAKKNALLKSILVKIEYRKDKHQRNDDFDLKLFPKV

SEQ ID NO: 21825 - protein, 426 aa, synthetic construct
MKIRILEPVFQGLQKKKRVCAYARVSSDSKRQEDSLENQTDTYERLITSNPEYEFAGVYADQGISGYCESRPQFQKMLGKARAGEIDLIITKSISRFARNTVTVLKVVRELKELGVGIFFEEQNINTLSGDGEMMLAVLASFAQEESRSMSENNKWTIKKKFEQGEIMINTERFLGYDKDEYGGLTINQKEALIVDFLYDMTLFGLGNSRLKSLMNSLGVKTVTDAEWNESTVNGVLTNEKYKGDYHLQKYFTPENKRNQSRLNRGEVQSYYITDNHPAIVSEEKWHQVQVERERRKKERNIAADGAEKYQNRYPLSGMLICPYCGKNLRRRMVYKGKIQWLCSTYIKEGKQACRGVRVDDTEVIKRNITEPTVVEEVNVHGKKHYRYTRKADFISGREYGPECAEVTGGGVLQGINRPRRTVIKL

SEQ ID NO: 21826 - protein, 444 aa, synthetic construct
MAAYCRVSTAQEEQLLSYENQVNYYTTFINENPLYEYAGTYADEGISATNTKKRDEFKRMIADCRAGKIDMIITKSISRFARNTLDCLNYVRELKELGIGIIFEKENINTLDAKGEVLLTILSSLAQDESRSISENSTWGIRRRFEKGQHKMSTKRFLGYDTDEDGKLVINRKQAQIVTRLYTEFLSGKTVDYIKRIFEREGVKNWDGETKWQATTLQSMLENEKYKGDAILQKSYTTDFLTKKRVQNNGEIQKFYIEDDHEAIIEPWIWECVQLEIERRKRYMEEHGTNSYSHNTENNPFASKIVCGVCGKVFARKGWRSSTGIDRKVWQCSERYKVKGVMGCANRHVEESTLEKAFVMAWNGILENKEYLWQKWEQQKQREDLLEVYRAKDFQELTKDKKPIDKMDTEFILRVLNHINVFEDGTLRVVFLDGTEIECKNEEE

SEQ ID NO: 21827 - protein, 527 aa, synthetic construct
MSYLMYLRKSRADKEAESRGEGETLARHELLLTELSVKMGLEIGAIYKELVSGETISARPKMQQLLVEVMQGMWEGVLVMEVERLARGDTKDQGTVAETFKFSNTRIITPMKTYDPSDEFDEEYFEFNLFMSRREYKTINRRIQRGRIAAFRDGWYIAGTAPYGYEKVKHKGDKGYTLQVVPEEAKIIKYIFELYTAGEPQEDGSYAQFGSYQIRDRLNELSVPSRSEKPWSASSVVDILNNPTYCGFQRWQWRKVQKQMVGGKIIESRPKDADCEKVRGRFDPIISEDTFNLAQKIKAGKPLPINTSTALQNPLSGLVYCAKCGNLMTRQPSNTRLRYAVLRCANSKCNNISSPLSLIEEQVIESLKEWIPEYNVEWPEQSEHEGETTLTVLENSISNIKEKLNQTKKQLNKTFDLLEQGVYNLDTFQDRRSTLDSQKAELEEELNRIDIERNRIILIEQARRDFIPAIEHLIEAYWEVEDIMTRNSMLRNVIDHIDYLKTERNKKGAGNTANFTLNIFPRIPENR

SEQ ID NO: 21828 - protein, 529 aa, synthetic construct
MKIAIYSRKSKFTGKGESIDNQIEMCKEYANKHFNNIEEFIIYEDEGFSGGDTDRPQFQKLIKDAKRKKFDALICYRLDRISRNVSDFSSTIEDLNKHSVAFISIREQFDTSTPMGRAMMYIASVFAQLERETIAERIRDNMMQLARTGRWLGGNTPIGYVSESISYFDNDMKERKMFMLSPIKEELDVVKLIFNKYLEFQSLSKLETFCLQNNIKTANGKDFAKFGLRFILTNPVYAKATKEIYEYFNSNDAQICNDKSEFNGKYGIMAYNKNLVKKGQSVKTKDMDEWIIAIGKHKGIIEGKDWVMVQNILNKNKHLSPRQGTSYAAMLSGILYCKKCGSFMRIKYGQKKVNSDERHFYYVCSLKENSRGSRCDIRNLRGESTDEYVVDELKDIVESGILKSLDAAKKNIEDKSKINKNIQSKISENEKAIENLLKQLSKNENETVSKYIFSEIEKLDKENQEFKKTLDKYDTENEITNIELFKDAAVRFYKTIDDVPYDQKRNLIQNLVNKIWWDGEDLTIDLFDI

SEQ ID NO: 21829 - protein, 533 aa, synthetic construct
MARVSVIPARQVAVINGVQREYKKRVCAYCRVSTDTEEQLTSYEAQVTYYESYIKGKPEYEFAGIFADEGISGTNTKHRVEFNKMIEAALAGKFDMIITKSISRFARNTLDCLKYVRLLKEKGVAVYFEKENIDTMDSKGEVLLTILSSLAQDESRNISENSRWGIVRRFQQGKIRVNHKRFLGYDKDENGELIINEKQAEIVRRIYKEYLEGKGIRAIARGLEEDNILTGAGGRKWHDSTIQKILRNEKYSGDALLQKTVTVDFLTHKRVKNKGEVQQYYVEDSHPPIISKETFQRVQEEIDRRANLVGYSEETKSRHTNKYAFSGKIVCGTCGSKFRRKRWGGIEKYKKYVWLCANHIDNGNEACNMQSVDEEKLKAAFVKSINKVIENKEAFISNIMENINRVLESKEDSSELKAINERLEELKEQMMNLVRLNVRSGLDNQIYDEEYQRLEEEMQQLKEKKSKFDNTDLIREKGLQKVKEIKKVLDGREDIIKKFDDELFSQMVEQVKVISLVEVEFVYKTGAIIKEVV

SEQ ID NO: 21830 - protein, 542 aa, synthetic construct
MKKITAIAAKNKVAIDETALRKTRVCAYCRVSTDSVKQAESLETQSKYYEDYIKGNREWEFSGIFADQGISGTATANRTEFNKMIRACQLGNIDLIITKSISRFARNTADCLETVRYLKSLNVGVYFQRENINTKGADSELILSVLSSIAQDESRNISENTKWAFQKKFKQGKIQVNVKRFLGYDKNEEGKLVINPKEAEIVKRIYREYLNGSSLNEIKRGLERDKIKTVTDKEVWQGSTIKGILSNEKYYGNAMLQKTITIDYLTHKRKKNQGESPKYEVKGSHEAIISKEEFLQVQALINKRALEFGNVPEGRNKYTQRYAFSGKIICGNCGEVFKRRTWNSKAKSKQIVWQCSTYINEGKSKCDMKAIDDATLKAVFVRMFNKLYESKEDFFKTFTDNIDKVLKQSAKCEDVFKIDREIENINEDIKSLVRQQIKGELQERVFDAKYKILNERLQELKNSKDTVAFDNGKYAETLKRSKEIRRVIEMRETTLTEFDDNIFENLIEKIVALTPTHLEFHLKNGMKVEEEFIKKRGVNGLQ

SEQ ID NO: 21831 - protein, 509 aa, synthetic construct
MKIAIYSRKSKETDTGESIKNQINMCKDYFNRQYDDCIFETFEDEGFSGGNINRPSFQRMMQLAKHKQFDVVTCYKIDRISRNTLDFLTVFEELKSYGVKLVSVTEGFDPSTPAGKMMMSMISSMAEMERMNIAQRVKDNMLELGKMGRWSGGTPPTGYRSVSIINEFGKKETYLELIPEYVDKLDMIFKMIASGHTPGQVSKKIGLPNRTISNILTNPVHLAATEESKSYLESIGYKVYGELNGKGFMPYNRRPRVNGKALWNSKDMFVSTSKHEVAVEPTIWIKANQVFKSRGAEARPRISPNSFLSHMVKCKCGSGMFVFPGNPNKYGEVKYYFRCSDKKYKKTNCDIKWLPVELVEEYFLKTLQGISLDKSILYSYLTSNEDINYDNLIKDVKKDINKRNKDIESLTEKLIFIEGPAIEIVTNKINNISNEISVLNEELLALERKKIFQDQDKINIDTLYELIVITISEFDTLSVEKQQVKIKSFLKEIIYHGGDDIEIVFLGGV

SEQ ID NO: 21832 - protein, 631 aa, synthetic construct
MEVHEIKASSSLQQRLRVNGTALERIRVAPYCRVSTDSEDQLNSYRSQVSYYTDLVNKTKEWHLVDVYADEAITGTKVTKREDFQRMINDCLNGEIDMIITKSISRFARNTLDTLKYVRMLKEKNIAVLFEDENINTLTMDGELLLVILSSVAQQEVENISSNVKKGIKMKMKRGELVGFNGCLGYDYNKEDKTISINEEEAKIVKLIFQRYIEGVGATVIIRELNSLGYKTKRGNGWSQSSLIGIIKNEKYKGDLLLGKTFTVDPIDKRRIDNLGEEDRFYVKNHHEPIISVETFDKAQAILNKRSFSMKRGVEPGKREKYSRLYPFSSKLECGFCGHGLSRRSWHSNTKNQKTVWQCITATKKGKKYCPDSKGIAESVIEDAFVESYKIITSDNKEILDEFLNRIEKNLSSDQFEKKLIKIDRQIQDIISKQKKLLNLRIDDEIDPEMYNEKLSELKVEEQKLLVQRSECQKQINGEKEIKDRLKTFKNVLENNEIMDKFDRYVFESIVEKVIVGETDNEGNKDPYKLTFVYKTGYHNKINPKLKKEKNKTNKVCCNSSNDIDRMCSNSINYTCGSRRVDMSNRFLEILDFRHFYKHMVFTPNKENILEKHLENEIHVSVGIELVVVDI

SEQ ID NO: 21833 - protein, 550 aa, synthetic construct
MRIAIYSRKSKYSPTGESVENQIQLCKEYLQAKYKSETLEIDEYKDEGYSGGNTNRPDFKKLIAQIEDYDMLICYRLDRISRNVADFSSTLTLLQNNKCDFVSIKEQFDTTSPMGRAMIYISSVFAQLERETIAERIRDNMMELAKMGRWLGGTIPMGFDSEPITFIDENMKERSMTKLIPNVEELKVIELIYEKYLQLGSMGKVVTYLLQNNIKTKKGKDFTLGSIKLILTNPIYVKANQEVVNHLKTQGITVCGDVDGKKALLTYNKTTGISNDVGTKTIVKDKSEWIAAVANHKGIIPADKWLQAQSIKDKNKDSFPALGRSNTTIASRVLRCDKCESTMGVSHGHVNPSTCNKHYYYNCTLKKRSKGVRCDNKPAKAAEVDEAILITLENMFKAKSSIIDNLKAKNKARRIEMLSSSRVDVINKIIEDKTKQIDNLVNKLSLDEDLTDILLKKIKGLKAEIKELEDELLTLTSENIKLNEDEVVLDFTEKLLEKCSIIRTLDILEQQQIVDALIPLVTWNGDTEVLNIYPLGSPELELKEAESKKK

SEQ ID NO: 21834 - protein, 520 aa, synthetic construct
MKRITKIEENKTLVGKRKLRVAAYCRVSTASDDQLISLEAQKVHYENYIKGNDEWDYAGLYYDEGISGTKKDKRHGLLSMIADCERGKIDLIITKSISRFCRNTSDCLELVRKLLDLNIYINFEKENLNTGSMESELMLSILSSIAESESVSISENEKWSIKKRFQSGTFIISYPPYGYKNMDGEMVIVPKQAEIVKEIFAATLSGKGTSAIAADLNARAIPTKKGGKWTAGTINAIIGNEKYTGDVLYQKTYTDNSFNRHRNYGEHDQYLVQGHHEAIISHETYENANAVLKQRGREKGNKKNTGIYQNRYGFSGRIKCGECGSSFKRRIHYKTRGSNIAWCCSKHIENVDVCSMKYIMDDAVKASFITMMNKLIFAQQIILKPLLNNLKGLNDKERLLKIEKLETRLEKNMEQRQVLTSLMVSGYLEPALFNKESNTLTSEAQALCKEKENLMNFIGGDITKAEELQNIIKFTTKRAMLTEYDDEVFLSYVERITVLSRTEIVFELKCGLKLKERLVE

SEQ ID NO: 21835 - protein, 523 aa, synthetic construct
MEVGRNVTVIPARKQMGNTIKAQEKPKLRVAAYCRVSTDSDEQATSYEAQVEHYTQFIKKNCEWELAGIFADDGISGTNTKKREEFNRMIEECMVGNIDMIITKSISRFARNTLDCLKFIRELKEKNIPVFFEKENINTMDSKGEVLLTIMASLAQQESQSLSQNVKLGLQYRYQNGEIQVNHNRFLGYTKDEDGKLVIDSVEAEVVKRIYCEYLEGASLAQIGKSLEADGILTAAGKAKWRPETLKKILQNEKYIGDALLQKTYTVDFLTKKRVKNNGIVPQYYVENSHEAIIPRNLYMQVQEEMVRRANLHSGANLKKRVYSSKYALSSIVYCPRCGDIYRRISWNNRGKHSFVWRCVSRVEHGPSKCDAPTIQESDLQNAVVKAINLALGNRDSMIKALQENIEAVICREDESSVEGIETRLEELQKELLKLANAKKDYNNIANEIYRLRELKQDALVERAEREGLKKRVSEMVNFLNSQLSEVMKYDEQFVRRLIEKIIVYNERFVVEFKSGTSVNIQR

SEQ ID NO: 21836 - protein, 444 aa, synthetic construct
MAAYCRVSTAQEEQLLSYENQVNYYTTFINENPLYEYAGTYADEGISATNTKKRDEFKRMIADCRAGKIDMIITKSISRFARNTLDCLNYVRELKELGIGIIFEKENINTLDAKGEVLLTILSSLAQDESRSISENSTWGIRRRFEKGQHKMSTKRFLGYDTDEEGKLVINRKQAIIVKRLYYEFLSGKTVDYIKRIFEREGVVNWDGSTKWQVTTLQSMLENEKYKGDTILQKSYTVDFLTKKRVLNQGEIQKFYIEDDHEAIIEPWIWECVQLEIERRKQYLEEHGTKSYSNNTEKNPFASKIVCGECNKVFARKGWRSSTGETRRIWQCSERYKVKGVMGCANRHVEESTLKKAFVMAWNGILENKEYFLRKWEEQKKSKNLLEVYRAKDFLELTKETVVEAKMETDLMLKVLDYIKIFENGRLMVVFLDGTEIQCINKDR

SEQ ID NO: 21837 - protein, 426 aa, synthetic construct
MKIRILEPVFQVSQKKKRVCAYARVSSDSRRQEDSLENQTDTYERLITSNPEYEFAGVYADQGISGYCESRPQFQKMLGKARAGEIDLIITKSISRFARNTVTVLKVARELKELGVGIFFEEQNINTLSGDGEMMLAVLASFAQEESRSMSENNKWSIKKKFEQGEIMINTERFLGYDKDEYGGLTINQKEALIVDFLYDMTLFGLGNSRLKSLMNFLAVKTVTSGEWNESTVNGVLTNEKYKGDYHLQKYFTPENKRNQSRLNRGEVQSYYITDNHPAIVSEEKWNQVQAERERRKKNRNIAADGTEKYQNRYPLSGMLICPYCGKSLRRRMVYKKKIQWLCSTYIEEGKQACRGVRVDNTEVIKRNITEPTVVEEVNVHGKKHYRYTRKADFISGREYGPECAEVMGGGVLQGINRPRRTVIKL

SEQ ID NO: 21838 - protein, 539 aa, synthetic construct
MPESAVRKVTVIPADPKHNQKDIRKQRLRVATYCRVSTSSEEQLDSYQAQIEYYTEKIAAQQEWTMVDMFADEGKTATSTKKRKDFLRMIKACEKGKVDLIITKSVSRFCRNTLDGLDYVRRLKRMGVGVFFEKENVNTLYMDNEMILTFMMSQAQAESESMSGNIRWGHRKNFKDGKVYFHYAGFLGYRRGENNLPEIDPEEAEIVRRIFSRYLIGHSVAKIIADLEADGIKTARGHKKWNDGVIRGMLRNEKYMGDALLQKTYIADLFTRQTKKNTGELPQYYVENSHPAIIDRLTFQRVQEEMARRSSLKKVSTAAKTELAKYSGKYVLTELLSCGNCGSPYRRVTWTRPEGKKIVWRCINRLENGKKFCKDAPTLEESRIHTAVVSAMNEMFSQKSLKAILQDSIRTALLPENGETSLAAIDSRLPQLREQQYRLLQLAAAVGADSTQYDEELKKVSMEFSALVAKRSELEKNRQDTEQADERAEQLAAELEAVDTGITTFDEVTVRQLISAITVLSEEKLLIRFKDGTELEQII

SEQ ID NO: 21839 - protein, 545 aa, synthetic construct
MKEKKDMSIKQEKVKKIIKINPVKSQVMMQLQPKKRVCSYSRVSTDSREQHNSFIAQKAYYEEMIGQREDWQYVGMYADEARSGTKIQSRDDFLRMMRDCEAGKIDMIITKSVTRFARNTVDSIEAIRKLKLLGIAVFFEQENINTLSENSEVLLTILSSLAQGEAESTSTNNKWAAIKRFKDGTFKISTPALGYTKDIDGELIIDEQEVEIVRYIFKQYLNGKGTYVIAKELNDMGIPTIRGAEKWVDRAVKDILQNPVYTGNLILQKTYRTEVIPFKQKRNKGELPQYFISENHEPVISIEEAEAVKEIFEYRRKQMSVDVIKVQNRYAFTSKIICGECGRVFRRQKIYIGKPYEKVQWCCIQHIQDKNKCKMTSIREDIIQQAFILMWNKLSSNYKEILYPLLESLKNLRADEQQEREIRECNEKIIELSKQSHILSGVAAKGYIDSAIFIEKQTALQVETDAMRKRRKALLDESGFETEIFNTERLIGLFERYPEIQDNYSEELFLQSVAQIIIIEGMTVTFRLINKLEFSECVSKEEIQQ

SEQ ID NO: 21840 - protein, 583 aa, synthetic construct
MEVHEIKASSSLQQRLRVNGTALERIRVAPYCRVSTDSEDQLNSYRSQVAYYTDLVNKTKEWYLVDVYADEAITGTKVTKREDFQRMINDCLNGEIDMIITKSISRFARNTLDTLKYVRMLKEKNIAVFFEDENINTLTMDGELLLVILSSVAQQEVENISSNVKKGIKMKMKRGELVGFNGCLGYDYNKEDKTISINEEEAKIVKLIFQRYIEGVGATVINRELNSLGYKTKRGNEWSQSSLIGIIKNEKYKGDLLLGKTFTVDPIEKRRMDNLGEEDRFYVKNHHEPIISVETFDKAQVILNKRSFSMKRGVEPGKREKYSRLYPFSSKLECGFCGHGMSRRNWHSNTKNQKTVWQCIISTKKGKKYCPDSKGIAESVIEDAFVESYKIITSDNKEILDEFLDSIEKNLSSDQFEKKLIKLDRQIQDIISKQKKLLNLRIDDEIDPEMYNEKVSELKEEEQKLFEQRDECQRQINSEKEIKDRLKTFKNVLENNEIMDKFDRFVFESIVEKVIVGEIDDEGNKDPYKLTFVYKTGYHNKVNPKLKKEKNKTNKVCCNSLNDIDRMYSNSINDTCGDVLSAI

SEQ ID NO: 21841 - protein, 433 aa, synthetic construct
MIAECMDGNIDMVITKSISRFARNTLDCLQYIRQLKDKNISVYFEKENINTMDAKGEVLLTIMASLAQQESQSLSQNVKLGLQYRYQQGKVQVNHKRFMGYTKDEDGNLIIVPEEAEIIKRIYREYLEGQSLVGIGRALEKDGILTAAGKPRWRPESVKKILQNEKYIGDALLQKTVTVDFLTKKRVKNEGHVPQYYVENSHESIIPKELYLQVQEEIHRRSNIYTGAGKNKRIYSSKYALSAITFCGDCGDIYRRTYWNIHGRKEFVWRCVTRIEQGPEVCKNRTVKEDELYGAVMTAINKLLAGGNNMIKTLEENIHAVIGETTEYQISEINNSLEEKQKELIKFANKGQDYEYLADEIDELRDKRQTLLVEDASLSGENERIDELIEFIRNNKFRTLEYDDKLVRKIIQSVTVYEEHFVISFKSGIEMEI

SEQ ID NO: 21842 - protein, 523 aa, synthetic construct
MAVSRNVTVIPAIKRIGNNKNSESKPKIRVAAYCRVSTDSEEQASSYEIQIEHYTNYIKRNKEWELAGIFADDGITGTNTKKRDEFNRMIEECMAGNIDMIITKSISRFARNTLDCLKYIRQLKDKNIAVFFEKENINTMDSKGEVLLTIMASLAQQESQSLSQNVRLGIQYRYQQGEVQVNHKRFLGYTKDENKQLVIDPEGAEVVKRIFREYLEGASLLQIARGLEADGILTAAGKSKWRPETLKKILQNEKYIGDALLQKTYTIDFLSKKRVKNNGIVPQYYVENSHEPIIPRELFMQVQEEMVRRANLRGGKGGKKRVYSSKYALSSIVYCGQCGDIYRRVHWNNRGCRSIVWRCVSRLEEKGSDCTSPTVNEEVLQAAVVKAINELLASKDTFLSTLQANIETVLNEEHDKITNDIDVKLEELQNELLRLANSKTDYEEVAEEIYRLREQKQNALVENADREGKRQRIAEMSDFLNEQSCELEEYDEQLVRRLIEKVTVFHDKFAVEFKSGVEIDVEG

SEQ ID NO: 21843 - protein, 519 aa, synthetic construct
MKKITKIGVNETLIQKKKLKVAAYCRVSTASDEQLISLEAQKAHYENYIRSNDEWEYAGLYYDEGISGTKKENRSDLLRMLSDCETGRIDLIITKSISRFARNTTDCLEMVRKLIGLGVHIYFEKENINTSSMESELMLSILSGLAESESISISENTKWAIQRRFQNGTFKISYPPYGYQNNDGQMIVNPKQAEVVKYIFAEVLSGKGTQKVANDLNQKGIPSKRGGRWTATTIRGILTNEKYTGDVILQKTYTDSHFNRHTNYGEKNMYLVENHHEAIISHEDFEAVDAILNQRAKEKGIEKRNSKYLNRYSFSSKIICSECGSTFKRRIHSSGRKYIAWCCSKHISNITECSMQFIRDEDIKTAFVTMMNKLIFGQKFILRPLLNGLRNQNNAASFRRIEELETKIENNMEQSQMLTGLMAKGYLEPALFNKEKYSLEAERERLLAEKDQLTRSVNGNFAKVEEVDRLLKFATKSKMLTAHEDELFENYVEKIIVFSREEVGFELKCGITLKERLVN

SEQ ID NO: 21844 - protein, 524 aa, synthetic construct
MFNFQPTDKFKMYLRKSRADIEAEARGEGDVLKRHERMLFDTAKRLNIIVREEDIYREIVSGETIADRVEMQKLLREVQTGAIRGVLVVEVERLSRGDNIDQGIVAQTFKYSNTLIITPTKIYDANDEYDEEFFEYGLFQSRREYKTTKRRLQNGRKSSIIEGKYVGNKPPYGYIRKKLEKQKGFTLDVHPEQAEAVKLIYEMYVHQSKGPTAIADELNRLGYKPEKLDNWSINTIRHLIRNPIYAGYVSWERRPQVKSMQNGSITKSRPRNYEYMKYKGLHPAIVDEQTWDRAQQIQASRSSPKFNPKSKTMKNPLSGLIICGICNKHLTRRPMPNQPDFLLCTTRNCSTIGAYLSFVEEDVLHAIETLIQKYKLDIKNPDRRESSELDQLKKSIARTNNEIATIDTQIDSLRDLLERNVYTIEVYMERLQKLNIKRDEVKKRLLDLNLNKESVQNRRTEALIPRMENIVEAYYSLDDPAERNTLLKGSIESIIYSKTKRGGKDPQSQRNYTLLINPYFFNND

SEQ ID NO: 21845 - protein, 500 aa, synthetic construct
MQKILKVAVYARYSSDNQREESIDAQLRAITDFAQRNHYTIVREYIDEALTGTTDNRPQFIQMISDAKKGLFDCVICHKLDRFARNRYDSAIYKKALKDCGVKFISVLENFDDSPESIILESVLEGMAEYYSANLSREVMKGLKENALQCLHTGGKPPFGYDVVDKHYVINEREAVAVKQIYSMICAGSTVGSIKDWLEANNYRTKYNTKFTSASINMLIRNEKYKGVYTYGQKKRIYTNNRAKDIKGDDIVRIENGIPNIINFDTWKKANDIYDTRQHKAGGQAKAKETYLLSGLIFCGQCGGSMCGNKVKSGRSKSLRITYKCNTRKSKKECTAKDIRKDMVEQLVLDEIDRLLSDEAIDDLIEYLQSRLREMSRELPGEIKELKSRLNDVEKKIETLVNAIMDGVYSPTIKERLSTAELEKQDIVNRLAFYEHCNRISNSPDKNFITDIVSKDRGIKNKSPEEQRRIIRTYIKKVVVYPDKVDVISEVDTNSGAEGS

SEQ ID NO: 21846 - protein, 515 aa, synthetic construct
MKTAIYLRKSRADLEAEARGEGETLAKHRTTLLKIAKEMNLNVLSVREEIVSGESLVKRPEMLALLEEIEENKYDVVLCMDMDRLGRGGMKEQGIILETFKRSNTKIMTPRKTYDLNDEWDEEYSEFEAFMARKELKIITRRMQRGRVASVEAGNYLGTHAPFGYDIHRLNKRERTLTINSEEASVVRMIFDWYANEDMGASAIRNKLNELGYKSKLGNEWNHYSVLDILKNNVYIGKVTWQKRKEVKRPDAVKRSCARQDKSDWIIADGKHEPIIPESLFEQVQEKLNSRYHIPYNTNGIKNPLAGIIKCSKCGYSMVQRYPKNRKETMDCKHRGCENKSSYTELIEKRLLEALKEWYINYKADFEKHKQDDKLKETQVIQMNEAALRKLEKELVDVQKQKNNLHDLLERGVYTVDMFLERSNVVSDRITEITSTMENLKKEIKTEIKKEKVKKDTIPQVEHVLDLYFKTDDPKKKNSLLKSVLEKAVYKKEKWQRLDDFELVLYPKLPQDGDI

SEQ ID NO: 21847 - protein, 463 aa, synthetic construct
MQVSNTKLLHVAVYIRVSSDEQAERGDSIRDQRERGINYINNHKNMILQDVYLDDGVSGQKIDRDDFTRLITNVKDGHIDLIIFTKLDRWFRSLRHYLNTQAILKKYNAAWTAIDQPYFDTSTPYGRAFVAQSMTWAELEAQNGGVRVSDVFRSKVAHGEVITGKVPRGYKIQDKKMVLSEEAPAIHDCIKHFLKHHSMNQTVLYMKDKYGIVMTLQNFRQTLLKNEKLIGRYRGNENYCPRLISDEEFQEIQRILGHNSNIKSNQKYPYIFSGLLVCDECGYKMGGGQINVLSKRKNGESIRYKYPAYECKQYRAYKECDNGGEIREVRIEEYLLKNVREQFNSYISDFETNSKSIIDNRAKKNQIRKKIDRLKDLYLNEAITIEEFKTDRMKFEAQLAELPDIIEPNQDFKALRNILDTDFEGMYLQLDNEQKRLFWRSIIKEIRVSKSKDRHREYTVVFI

SEQ ID NO: 21848 - protein, 532 aa, synthetic construct
MTAKYHAALYMRLSKDDDRVLESASISTQRKMLQTYASEQGFEVYGEYVDDGYSGTNFNRPAWERLIKDIEAKHVNLVITKDLSRLGRDYIMTGQFTELYFPSKKVRFVAINDGYDSDSPLNDIAPFKNMVNEMYARDTSKKIRSAFQTKIKEGAFIGNFAPYGYEKDPKDKNHLVIDPVTAPIVHEIFDRAEHGEAPFTIAKRLNERNVETPYQYRCMTHPYLIKDESKKVPKWTSGTICKMLSNEVYLGHVVQGKTVKLSFKSDITLSQPRKEWVVVKDKHEPIVTQEVFDRVRKRSVPRKKTKNIEFHNIFSGLAVCGDCKRNMSITGKTADQKNFHLVCSGYKQYGNKVCSSHKISYELLYQIVSEEIKNQLDQTEQWQKELLETSKKASSTGRKKEPVHALDALKKRDKEIFRIIGQLYEDKVNQRISEERFYDMLSSLEREQKGIDHKLKKAQQENLLHNNQSQVEKNNEELDQLIKEILGEIDMTPELVLTLIEKIEIGQKIEDELQTIKIYFQSKSPLKNEPEA

SEQ ID NO: 21849 - protein, 531 aa, synthetic construct
MKIFIYSRKSVYTGKGESVENQVEMCKSYISDKLIKNNKAEISIYEDEGFSAKNTNRPQFQQMLRDIKQMKPQYVVCYRLDRISRNVSDFSSLIEELNHHNISFVCIREEFDTSKPMGKAMMYIASVFAQLERETIAERVRDNMLLLARTGRWLGGTTPMGYTSEKIQEVVIDGKLKIACKLKDNPGELMVVDCIYEKFLELRSVSGVSKYLIKQGMKTRNENMFSLPGIKEILQNPVYCMADEDAWEYFTTHQSDVCFEKSDCSNKYALLVYNKRDYRKKSAPRQDMDKWIVAMGKHKGRLSGRRWVEIQDILKNNIPTGKKPALMHNSYSMLSGMIYCDTCNSRMFAKQRSGKSGSRPYDYICNSKLRGGLELCNCQNINGQQADEMIYESLIQYMNENSGIFPLLEKLKREFQRQVSKNPSAVIEDKIKKYTGEIDNLIHTLSHEDLGAAFIRRVNERIRELDVEITSLKEERDLIKDKNGDKEFSMELWNLKESSNILSMEDKRTLVKLMVKKIVWDGKRLHVYMDR

SEQ ID NO: 21850 - protein, 548 aa, synthetic construct
MKNKVAIYVRVSTNYQIDKDSLPLQRSELSNYSKYALNVNDYVIFEDAGYSGKNTDRPKYQEMMSRIRQGEFTHLLVWKIDRISRNLIDFCDMYEEIKRYHCVFVSKNEQFDTSSAMGEAMLKIILVFAELERKLTAERVKAVMLDRASKGMWNGAPVPLGYKWDENIKFPIPDQHESEIINFIFEQYKETESTSRVRNILNGNGIKTKRDGNWTTKTIADIIRNPFYIGIYRYNFREQARGKKKDESEWIVIEDNHKGIVSKEIWQHCNDIMDRNAKRSNAQFRDNTKTHVFAGLLECGECHKGLYSKQDKPHLDGYIPSFYCCTSRYNHLGCEQKTVSEKIIGEFTFNFISDVIRNSKNRAISSEYELENILLSNKALDGVLAIEGISELYDSIFNENDNFKVSKQENVINLENEGLKKEREKYKRALTRLDDLYLFDDESISEKDYLIKKNKLNDKLAEIENKLKHEKRSSDNDVNFIKLATNAMLNDIFMKTENIDMKVFINAVGRDTIKEFSNSIINKITVKNKQVTGMNFKNGLDLKFIYKT

SEQ ID NO: 21851 - protein, 526 aa, synthetic construct
MNLQNIQGTSALTPQREIIRIKSTAVESTARLRVAGYARVSSDSADQLNSFSAQVSYYQRLIEINSAWELAEIYADEAVSGVSTEKRDDFARMLSDCKKGKIDRIITKSTSRFARNTLDAIRVIRELKEMGITVYFEKENLDTASLTSENLLTLYSLFAQEESMSISKNCKKGNRMRMERGTYVSSNPPYGYRLVDRQLKICEPEAEVVRRIFAEYLAGCSTLRIAEGLMADNVPFKNGRTKWRYQSISIILKNERYCGDMLLQKNYSEDALPYRKRKNKGELPQYYVKNAHEPILERIQFKLANILLKERGEHIQGKSGEYPLSRKIRCRECGTAYCRKITNQIPYWVCRKHNEGKEDCGSRRITEEAVHQAFARLYNKLKKNYSTILLPMLNQLERLQELQTRNNPEISTINNQIAALSEQNHVMNGLLSKGILDSALFISQTDELNRKLRALKVAKARILEEQESDGLLEKTEDLVELLENSPDRISGMEEALFGEMVENIIAHDTQTVDFVLISGLVLTERL

SEQ ID NO: 21852 - protein, 551 aa, synthetic construct
MSNAQREIIVIPAAEALSFGGRRNRQMRVASYSRVSTDFEEQLTSFHAQKSYYTDLIMRTPQWTLAGTYADEGISGASAEKRPDFMRMIRHCKKGKIDLIITKSISRFARNTLDSIGYVRKLKAMGVGVIFEKENINTLEENSEVVLTILASLAQEELNSLSLNVKMGKRMAMQEGKVFFQYTKCYAYKKGTDGQPEIIPEEAEVIRRIYTAYLAGKSVPAIARALTEDGVKSHCKNGEWTHSTLQSILKNERYCGDVLLQKTYITDPISKKVKQNNGELPKVLIKNNHAPIVSRELYDRVQQERARRGSKRKVSKASVTEQSRYSSLHALSELLICGECGTPYRRAVWTKRSGEKQAVWRCISRLDYGTKYCKDSVTLDEDSLHAAIMQAINDTRGSRRAMMPFVAEHIKRTLRDDTQGGLDAEQMESRIAQLKAQTMELVTQSISSNTVGENEGRLRAMSDEIKALCDMLTEYRQSCNAQGGIESRMAEIAEALENEPEQSDTYDDTLVRQLIDTIKVVGESKLEILFRSGLTYEQEISSKVKKLVRVS

SEQ ID NO: 21853 - protein, 549 aa, synthetic construct
MNMQSPHVALRAALYLRVSTARQAEHDVSIPDQKRQGEAYCQERGYQLAETFIEPGASATNDKRPEFQRMIEAATAKPAPFDVVVVHSFSRFFRDEFEMEFYYRKLAKNGVKLVSITQELGDDPIHDMMRRIMSLFDEYQSKENAKHVLRALKENARQGFWNGSLPPIGYRVIDAEQRGAKMKKKLEIDPLHADTVRLIFRLALEGDGTSGPMGVKNIVSHLNRNRMFTRSGGRWGIGQLHRILTRRTYIGEHRFNRRSKKGEVKPEEEVVTVAVPPLIDLEIFEAVQRRLQVNNPKVTPPRVVSGPNLLTGICHCGNCGGAMTLRTGKNGRYRYYACSIRARQGDTGCKGRAIPMDKLDRMVVSHIEERLLDPERIEDVLASLLDRRQESVERRGQHIAELNHRAAEADMRLKRLYDAIEAGSLDPAESALGERIAGLTALRDQARADAARIEAMLKSSAHQGLTGAAVRELATEARTRLRLEKGGYRREHVRAFAQRVEVADDAIYIKGSKSTLLRTLVAAKGGKSAGIGVPGFIPKWRTERDSNPR

SEQ ID NO: 21854 - protein, 555 aa, synthetic construct
MITVIYARFSSALQNARSIEDQIVLCRERCEREGWPVADVFTDYAISGAAGIDETSRPGLSAMLARIEAGGIDQVVAEATDRIARHQGDAFTIRERITFVGARLFTLSDGEVTDITATFRGLMDAQFRRDLAAKIKRGQRGTISQKRSAAGLAYGYRKANRFDDRGELIRGLREIDEEQGKIVRRIFEEFAAGQSPRAIAERLNRDGVESPGGRLSGPRFWRASTIYGDRKRKNGILQNRLYIGQLVFNRTRKVLDPRTRSHLIRANPESEWLVEEVPDLRIVDDELWEGVQSVLGRVQSRAPQKSRRPKHILSGLVACGLCGGGWVIHSGNRWGCSRHKEGGKHACANNRIITTDRLETRVLNGLQHYMLDEDLIEIYVEEYRAEFAKRTRELSREGDRLKKRHGDAVAKIERLVEAIANGAENFVEIRDVLAKARSDRDQLAEQISQLQQLPAVMLHPAIVADYRRQVARLNIALGGNAEARLEAIPQLRALIDQVKVSPSEQVKGVTIEVIGRLTSIMALATGQPISGKEYFNVGAGEGIRTLDPNLGKVVL

SEQ ID NO: 21855 - protein, 559 aa, synthetic construct
MTIIDADRTAIDSLVAPTPFPGSFAVSYLRVSTKEQAEKGGQAEGFSIPAQREANQRKADQLGATIIEEFVDAGESARKADRPELMRMIQYVAKHKTNYCIVHKVDRLARNRADDVTIHLALKDAGVTLVSATENIDETPSGMLLHGIMSSIAEFYSRNLATEVVKGLSQKAAQGGTVTKAPIGYRNVGVRDEFGREVRTVEIDEERAPLVRWAFQVFASGDWTTSQLHHELVARGLTTAASPRRPSRPIGKSSVHRMLTNPYYKGSVRYQGVTYAGVHEAFVPNEVWDQVQTVLGTHRSAADATQVHEHYLKGTVFCGQCGSRLLVCNAKSSQGTIYPYFVCASRHGGRGNCTRQAVLIEQVERLIERFYAKVQIDPETTQAVSAMLHARFDEMMAEGAAELTDLATRRTQLEGEQHKLLQAHYAGAIPLDLLKKEQDRITASLETIEHRINAHHGHYADARANLDDSLKLLSNAADIYEHADDANRRLCNQALFRAIYIDEDNDVCVGYRNPYDGLSVPGLHADALSWAAEAKKMGQARTATKGGPLVASSHLTRLG

SEQ ID NO: 21856 - protein, 542 aa, synthetic construct
MPEALNAVIYARYSSDRQTEQSIEGQLRECYAFAKANDIAVIDTYIDRAISGKTDNRPAFQKMIEDSAKRQFQAVIVYRLDRFTRNRYDSAIYKARLKKNGVKVLSAMENLNGSPESIIMESLLEGMAEYYSVELSQKITRGMRENALKGKALGGQRVLGYKVNSDCYFEIDETTAPVVVDIFKLYSSGKTVKEICDILNARGVKTARGGAFNKNSLHTILTNKKYIGIYKTKYGEIVGGIPAIIDKELFEMVALRMEQNKKAPARAKAEINYLLSTKLFCGKCRSAMVGESGTSKTGKKYYYYACVKKKREKACDKSNVKKDWIEDLVIQRTVTDILKDDVIEKIADRLVELQKAEAAESGTMLYLQNSLAEIQVSIKNIMTAIEKGIITESTKTRLTELEDEKRNVEIEIAKESIARRIISREQIIYWISSFKDGDITSEKYRQQLIDTFVHAVFVYDDKIVITYNYSGENNTATISDLDLSSPPKEIRRNTVSAVFLYNRPTVFVPVPHRQRRHHEKETNRKRVRLCCQHAVWLVLRRR

SEQ ID NO: 21857 - protein, 480 aa, synthetic construct
MSTNARRLRVVPERRRGIAAIRVSKERDNMTSPEIQRHVISEFAARENIDIVEWIEGIDESGSRKRSAWWNRLAYGCERIEASAADVLVVWRIDRAARNKLKWAVAEDRIDTAGGAILSATEPNDLSPAGRFGRGVMVEHADFMARSIGATWKETLERRVRHGLTPNGQRHFGYAYSRDTGTYEIDPIEGPKLAAMYRAYAAGEAAWEIAQRYSVPDAAPGEDGAHARYARWNTASILRLLDSGFGAGLVLFRGELHDGAHQAVITPEEWTRYRHARDARRRRPRAERSPYTYSGFIYCHCGGRMGGRTDHGRPRYACTDSAQYTRHPDASLASHIVDDAVLEWLGDIRDELNEAARRAPRRPQLVQDPTKEIARRIAQVTQRLDAATMKVVDGTIPNDAYQRIRAQLEAEQAELSAELTRHAAQQTVQPIAFVGDLVAQWPDMPVARRREALRLLVDRIDVGRPGDANRIRITSALSRS

SEQ ID NO: 21858 - protein, 559 aa, synthetic construct
MTIIDADRTAIDSLVAPTPFPGSFAVSYLRVSTKEQAEKGGQAEGFSIPAQREANQRKADQLGATIIEEFVDAGESARKADRPELMRMIQYVAKHKTNYCIVHKVDRLARNRADDVTIHLALKDAGVTLVSATENIDETPSGMLLHGIMSSIAEFYSRNLATEVVKGLSQKAAQGGTVTKAPIGYRNVGVRDDFGREMRTVEIDEERARLVRWAFQVFASGDWTTSQLHQELVARGLTTAATPRRPSRPIGKSSVHRMLTNPYYKGSVRYQGVTYAGVHEAIVPNEVWDQVQTVLGTHRSAADATQVHEHYLKGTVFCGQCGSRLLVCNAKSSQGTIYPYFVCGSRHGGRGDCTRQAMLIEQVERLIERFYAKVQIDPETIEAVSAMIHARFDEMMAEGAAELADLASRRTQLEGEQQKLLQAHYAGAIPLDLLKREQDRITASLETIEHRITAHHGHYAAARENLDDSLKLLSNAADIYEHADDANRRLINQALFKTIYIDEDNDVRVGYRNPYDGLSLSGLHADALSWAAEAKKQGQARTSTKGGPLVASSHLTRLG

SEQ ID NO: 21859 - protein, 472 aa, synthetic construct
MSARPLPSDFDIEQAAVYLRVSLDRDGDEKAITRQREDAKAVARMRGWEIVETYVDNSVSASKAEIIRPEYERMLADYRRGRFSAIICYDLDRLTRQPRQLEDWIDEAERRGLVVVTLNGEADLSTDGGRMYARIKAAVARAEIERKSARHKRANRQRAEGGHWQFSRRPYGYERTDGRIEIVESEAEIVREGYRRYVAGASYYELANDWNEREVPTFSGPWSMERVRQMLRNPRYAGIVEHKGEVIDVTPQWTPLIDERTWSDYIATRDGRKRAGSWSTSTKHLLSGLLVCAVCGGRMVARPDRGHQVYACTSNWCVSIRADDVEPVIEGVVLGRLADQRIVAALRHVPDTEPLKAELATLRKRRDDIADLMGDGLLDRRKARQQAALLTEKIDRTAERLAALRRESPLTDLALARSIPSRWQRLGILDKRRVIQELGLTARISKALRGRRPAGPDGKPLANLNRITVAWE

SEQ ID NO: 21860 - protein, 549 aa, synthetic construct
MQSQGDSLRRQFQRCNEAIKKHNLYVKEQITDEAFSGFHGDNLISGKLKDFIDRAVAGDIEKDAFLIVENLDRITRLQPSKAVNVITQILSSGLEIYQTSPECLFTFKNKKDEAMTIIMITLFAQRAHEESDTKSYRIKESWISRIERILKGEQKILMDKPPYWLDVVEKDFDVNGVTKRLKCYEVNKERTDEVLLVLEYLKSMGIKESCKMMNAESSGKKWTVKAVQRLLESKTLYGELDLKLSVREDGKKDLQSRGLEMPQIYPPIISKPDFDEILELIKLRASGRGGGRKSTQFHNIFAKILYCAHCGGAYRYMHKREYSYLVCYNSEVHTCKYEKVLSLRFYDVQNAILAYGGYFDFNVLYRGVELKEYSVDLAEKQAELEAKRAAFSNMFNSIMQKNNGIISSMYQTSLDMTEKNIDELEKEIETLKQKDILNPIKRIKANGGALLLDPALLSTAVGRAKLNSHLKRMVERIDLSHHKVTKDSYNVLSVKFFGVEDLLKIRFMGTKRIYLDVGNDFSKVFDDDADRFIDEAEWNKQTSMMDDYF

SEQ ID NO: 21861 - protein, 427 aa, synthetic construct
MHVRIIEPILKVQQKKKRVCAYARVSTIHDKQGESLENQVQYYENIISSNPEYEYVGVFQDRGITGFTGNRPEFQRMLHLCREGEIDIVITKSISRFARNTAVVLYTVRELKNLGIEVRFEKENINTLSGDGELMLAVLSSFAQEESRNVSKNLKWRARKQFQQGELMINTKRFLGYDKNEYGDLVINPKEAEIVKRIFNDYLSGKSSSKIAKELNKENIPTVGNKTWHNSTIIGILKNEKYKGDAILQKYYTPEHLKKTSIRNNGVIESYYIRENHSPIISREMWEQVQEEIKRRGKTKGNVLGDSDKYTKRYPLTGMLYCSKCGSTLRRRTWNSKNSSKKIVWQCSNYVKNGKDACDGTSIDDVVISRINIKEATIVKEEIKDGKKCYSYTSEKGSGEFSSKAITNKKENGRLLQSFNRPIGATV

SEQ ID NO: 21862 - protein, 553 aa, synthetic construct
MTLTMPMTETGTAPLLTAVTYQRVSTKEQASKGGRDEGFSIPAQRQANARKAEDLGARIVAEFVDAGESARSADRPDLQRMLEYIATHQVTYCIVHKVDRLARNRLDDVEIHRRLVEAGVTLVSATENIDETPSGMLLHGIMSSIAEFYSKNLATEVTKGLTQKFETGGTPMRAPIGYLNVRKRDEQGREYRTVEIDAERAPLVRWVFEQYAAGERTVVDLLADVTARGLTSVPTPKRPSGPVGRSTFFDLLRNPYYIGIVRYKGAEQTGTHEPLVDVETWQQVQRLLDSRKKASERRRTHDHYLKGSLFCGSCGSRMQLDFPANRQGVRYAYYVCSGRASNRKSCTRRAVPVGIAEQLVADCYREIAITEEDYAALAAQVEAAFDERLASRSDELAELTANRQRLQNESDKLLAAHFADAIDLETLKRHQDRIRTGLADIDRRLATEHDQHEGSRKQLSTALSLLVDCATLYARTDDQGKRLANQALTNGIEISEDERATIRLAEPFAALVPEPTSTDVSGSSTSDWVDLRGFEPLTSSMRTRRATNCAIGP

SEQ ID NO: 21863 - protein, 542 aa, synthetic construct
MTRVALYARYSSDRQNERSISDQLNLLIQHAAAKGWAVVATYTDAAISGSAMANRPGLLSALAAAERGEFDLLLAEDEDRLARNLEHLAHVANRLADIGAGIATLSTDRVQDMHVAFKGLIAQDFIRNLSLKTKRGMASNAEKGLATGSRLYGYRSQPGGLVEIVPEQAEVIRRIFAMYVHDRMSSREIAERLNQDRIPSPAGREWNASSIQGSRQRANGILHSEIYAGVKVYNRVEMRKDRQTGRKITICKPPSEHKRIDVPHLAIIDRDLWNAARQRLDSRQTADPSQRASLRRRPGLLSGLTKCGCCGASYTSLSQGRLVCAAYREKGASACDNNRHVSRAEIEQRVLDGLRTRLLAPEAVAAYVRAYHAAWAEQAAQVEDRRRPLTRRLAEVERAIERGAEALLSGATAAAVIGKKLETLEIEQAELKAALQQLDADGAAPVQLHPRAAENYARKVDQLQSRLAQAADSTEVADRELIDSVRDLIQRIDIEPVNKSRGAPVRVTLHGDLARFIRPQQPPIGGCALVVGGGIEPPTCGL

SEQ ID NO: 21864 - protein, 601 aa, synthetic construct
MTTTTAPTLTLTGMADTAEDRPVLLAVSYLRVSTREQAERGGTDEGFSIPAQREANQRKADELGARIVHEFVDAGESARSADRDGLKDMLAFIAATRVTFCIVHKLDRLARNRADDVKIHEALISAGVTLVSATESIDQTPSGMLVHGIMSSIAEFYSRNLATEVTKGLSQKIAQGGTPMRAPIGYLNVRETDDAGREIRTVEVDPERAPLITWAFEHYAEGETSVTGLLRDLTARGLVTVPTPKRPSKALGKNTLYKLLTNPYYAGVIRYKGALYPGAHEPIVEPDLFDTVQSLLKARTAKQTRHVQHAHHLKGLLHCGTCGSRMLLDFATNPRGTTYAYFVCSGRAAKKTTCTRRAVPVAVAERLVADSYANITISDTTYRHLAAKVDAAFDKRMAGRDQEIADLMANRAKLESESDKLLAAHFADAIDLPTLKRHQDRIRAGLSDVNQRLAEHDEHHTGGRAFLHDSLRLLTGAHRAYARSGDADRRLANQAFYTRLDITDDEQLRPRLAEPFATIIRESKTPSDEGEEPLQEHDDSSHVACSRKTTWVELRGLEPLTPCLQSRCAASCAIAPSGPSVPEPRGTSSLVGCAGGVQGKR

SEQ ID NO: 21865 - protein, 479 aa, synthetic construct
MKKVAIYCRVSTLNQAEDGYSIGEQQDKLNKYCDIMGWEVIETYTDAGFSGSNIERPAMKQLLKDAANHRFNTILVYKLDRLSRSTSDNLYLIKEIFKKNNIEFVSLNEKIDTSDAMGEFFFTLLAAVAEMERKTITERMVLGRLGRAKAGKTMSYQLPPFGYIRNKELDILEVVPHEAKIIKYIYSKYISGDSITKICHDLNDKGHIGKNVRWSHSSVKNALTNTVYIAKGKFKGEMYEQEHEKIIDDDTFWIVQDEINKRQIRESQRTNNPRPFQAKYMLSGLMKCGYCGGHIRTVTGNKRIDGSKPVRYVCDRRSDYRKLMEPGEIKCKSGFYRRLDLERYVIDYLADLPNDESELKEALSIGQTSEFDPTMLLTEIETINKKIDKENYLFRNDYIDEVELQRNVKNLVDTKKLLENQLQENNGDKINEQKRKRILDMLNTGNIREMNYEQQKKIVKSCISKILLTSEEITIEFNF

SEQ ID NO: 21866 - protein, 575 aa, synthetic construct
MTTLAYRYHRFSTKSQDKGSSIERQDEVTLAMVKANGWTLAPGGPIEDRGRSAWKGDHLKSGGLGEFKARIDAGEIVPGSILVIENLDRLSRENVRKARRWIEELTEAGIRVAVANLNKVFDENSLSGENIVDLIQYLLEAQRSNAESQRKSDMRAKVNANQIEKAQRGEIYSPRGPAWLIDVNGKWAPNPERAAVVKQIYEWSASGLGYASICQRLNQMVPAWTKGWKSEKSEWKIGYVRDILTTHMVEGEYHRKAVGEDRDEIILGYYPRIVSADLVERARAAKIARRGTGGRSAAEARNLFAGRTVCAECNGAMEKVVNGNGRGRKYYYFLCRGARSGTCVNRLQYRYDIFEAAALEQMLHLSLDDTHFSKVEETAPLLARVADLRKEREQAQAKVNNLLDLIEAGSGSATLGGRLDAREAELAGLDQALAAAETELELARGKVSDEDHLKRVKEVRDAMDSADEDERQQARRLVRTAIQGLVERIEFARKKTAQGKYERRIIMTLVGRHMIFWFDGAGNVVRVRDHIADYRNDPNNPVSRMMLLASGKDAEAVGRSLDSQAERSAKTSPEL

SEQ ID NO: 21867 - protein, 473 aa, synthetic construct
MRSLRPVPDTPPRAVLYLRQSVSRDDSISIELQEIAGRDYCMQHGYEVVAVEVDAGLSGRNWSKRPAVQRVMDMVEAKNADVIVLWKWSRLSRNRRDWAIAADRVDVAGGRIESATEPIDTATASGRFARGVMTEYAAFQSEQIGEQWNEVHQRRLSLGLPPNGVIPWGWVSHKTWIEPHPERAPIVTELYARYLAGDGWGRLTEWMNSTEHLSPRGKAWTEITIRALLDSPIHAGFVTYRGEIHEGAHEGIIGLDQWEAYRAMRQSRTIPMKKRASDYLLSSLVVCHCGNKRSGKITRNRHRDGSTYEVLSYACYKNSHKQMSVVTRRVDDAVGTWLKSEANTPAKPPARKSREAETKRLSREIIELDKQLTKATRQMLAGVIPDAAYHATVAEIEDEKKALQKRLTGLSPSGKPSKVTCLAGQTSLIDTWEAISLDDRQSVVRATIESVTINPNQTITIVARWGDMSVMDI

SEQ ID NO: 21868 - protein, 549 aa, synthetic construct
MATKAKVYSYLRFSDPKQAAGSSADRQLEYARRWAAEHGMTLDSALSMQDEGLSAYHQRHVTRGALGVFLVAIDEGRIPAGSVLIVEGLDRLSRAEPIQAQAQLAQIINAGITVVTASDGREYNREGLKAQPMDLVYSLLVMIRAHEESDTKSKRVRAAIHRQCQGWVAGTWRGVVRNGRDPHWLGLIDGVFHIVEERAKALRLAITMFLEGHGAVRIVRTLDELGLQITDGGNPSQQLYRIVRNRALVGEKVIEVDGQEYRLQGYYPALLSPEEFASLQHVVGQRAKRKGTGEIPGLITGLRVSFCGYCGSAMVGQNLMNRARQEDGKPQRGHRRLICVGNSQGSGCAVAGSCSVVPIEHAVMTYCADQMNLTRLFEGGDRSNAIAGQLAAARSRASETAAQVEKITDALLADESGEAPASFRRRARDLEVKLAGQEAEVEALERELASLASSPSPAIAQAWQQLAAGVEALDYDARTKARQMVADTFERITIYHRGMTPTPSRSWKGTIDLVLVARRGSTRLLHVDRQTGEWRAGEELVGPLPPLPA

SEQ ID NO: 21869 - protein, 565 aa, synthetic construct
MPRTRRAVIYQRISRTKDTSVALRRQEATLRELASREGWEVVAVIEDDGISGTVNRPNADRALSLLRSGEADTLLVWAFDRWARSGLPAVAALIETLNARPGLLFIAHNSGLRSDQSAWRMVAGVLAEVAAMEAENTRDRIRAARAFHLRQTAPENQRFLGARAPFGYRPIKSPHGPGKVLVPDEYEAEIAREVADMLIAGVTLGDATKWLAENRVPTPQSEARRLRQNGVSIDAPGFDEPETVTTGKGRQQAFRGAWRATTVRNLWRSETLIGRTTRAEPVLGPEGDPVLDDRGKPKMTDGVVRDASGLPITRWEPLLDADTFTRLQARFKAPGREQPRRMVSWLTGVLHCQECGRRLYAHRRDRDDRDASYFRCAGVSDVLDPCPAPARISFARVEEYIEFVFLGVAGDWPELERREFLESADVAQRVDDIGRAIADITAALGRDDADEARLLPRLRELKKERSTLAALPSQLRVEMVPTGRALRNIWEDTADDLRARRDVLSDVIERIYVARADSPGKPTPLDPEHVRIQWDSERVPTHDLDLLDESSLATPEAPSRLRIKL

SEQ ID NO: 21870 - protein, 545 aa, synthetic construct
MNQPTRVAIYARVSTEEQAEHGFSIDAQLDTLQTYCKMHQKIVYKEYVDRGISGKSMEGRYELQRLLLDAKNKEFDEVIVWKINRISRRTIDLLKIVDDLNRYGITFRSFSENFETETPMGRFALQMLGAVGELERNTIVDNVKMGMKERARTGQWNGGIVLGYRSSKAYVDRKRNDSKLEVVPSEAAIVRKIFDHYASGKGLKSIANQLNHEGLLTKRGNSFSTSAIKEILLNPIYIGKIRFNRYENWNERRRKGKSDNPIIVDGEHEAIISQELWDKVQHLQRKKSKVHPRQFEGNYTLTGLMRCPQCGAAMVSSRTINRSKDGERIVRRYYSCGAFRSKGSSVCSANSVRADESEQYVYQRIKEVISHPKILKDIVSQINNHKKSNVQPLKRELQQINKKLEQHEAKRKKYFDLYEEDAIDKELLVERLDELKKDADLLGARKSEIEWQIQDDNSHTLDYSFVKSVLSQIDKLLQSASADKIKALLHLAIKQITVKERKIDKIVLAFDENNLNHFLGLAPSENNSEGAFALSEQKQRFTLVI

SEQ ID NO: 21871 - protein, 525 aa, synthetic construct
MKKINNVALYIRVSTTDQAEFGYSISAQTKLLKEYAEQNSWAIYDIYTDSGISGKTSSDRPALQKLLSEVEQGKFEMVLVWKINRLARNIIDLLEIADFLKRHQVSLQSITEHFDLGTPLGEFTLQMMAAVGELERKTIAENMRLGRQQRNKQGIYCGSKIFGYETVTTAFYSKRRRTTELKVIPSEASIVNHIFKMYADGFGYKAITNELNKNGFTSKYNKHFSINTVRTILNNVVYLGKIRYFDPKLQQEQIVDGQHEPIIDKQLWDKVQNRLCSKQRIVKIEQRSFPLTAILRCPDCQSSMIPFHTKGYRKNKDSVTYYYYICSRYQNKGIGACKPNSVSADRIEKLVIDQTQRLITYPKLLKDIVEKINMGATNEVSSLQMKVTQTDKKLKEFDRNRKKYFQLFEEEIIDKSTFIERIDFIKSQVKSFSSMKNQLENEISKALSKQIDFHKVESTIKHFEKLWDFASPDKQKQLLSALIDKITLQEAGNLKSVNIHFRKDVIPYTLEEVKDDNFLEGGQTI

SEQ ID NO: 21872 - protein, 597 aa, synthetic construct
MSANQKPRAYSYIRFSNATQAAGDSYRRQREAAEAYCTQHGLELVDAKEYSFFDQGRSAYKARHLDDTGELARFLAFVQDGTIPKGSTLLVESLDRLSRERVKDALPRFLDLLNQGINVVTLADGRLYTSAYNELDLIISIVQMSRAHEESATKGKRVSAAWRRKQDSARTESLPIGKLRPLWLDYTPDGYVPNPERVEVVQRIYKLAQDGYGHRAIAAQLNQSGVPSFSADRKNASGLWANSGIARMLSNRAVLGEYQPHQFIDGKRVPVGAPITGFYPPIITEDEFYAAQQAVSSRRQSQATKPGKRFNVWQGVSQCGICAGPMHISKRGNSRILRCFRNIQGLCPAKPILLPRSEEVFREILAKVDSLALVQSNQGKLQRQIAVCDGRIAEAQERIESLQSQILNLSGALPVSIISVMQRLEEDLARHQQERDSLKEDIAREQIINKDEFFSRLDLVSYEGRARANSLLKSLSVEVAIERIGELRGKKAPVHYRVSKEGLPIFSFLDTSGELEFLPLTTPSIAIAEVQGEVIRPEFHQYVLTRERQFAWEASERTRLEELCKTSSYKDVAAAEGISVRELKRILAGERPNRRAP

SEQ ID NO: 21873 - protein, 471 aa, synthetic construct
MAAAMRAALYLRQSIAREDSISLELQEAACRAHCERRGYDVVMVEADPGISGRTFNRPAVRRVMQAVEDRGVDVVVLWKWSRLSRSRRDWAVAADAVDVAGGRIESATEDIDVSTSHGRLARGMLVEFAAFESERIGDQWKEAHARRVRKGLPATGKPRFGYRRAGEGFEPDPETGPLLAELYRRYIAGESAYQLVKWLNDQGSRTVAGYGTSGGDWSRRSVQRMLDSGFGAGLIRYHGELLPGVHEPVITAEEWEDYQAARRRRAITRGSERSQYLLSGLVRCSCGATMNAGQFGWQRAPKYRCKAAQEKRTHTGGYVMAGVLETAVLDWMRGLVADLTAATNTTVEIEAKRERTQLNVGRLHAEVTAAEQSITRLTVQYAEGKIPEIAYTSALPELETKRDRLLARITAAEAEARTLPASVEQVSDLLAVWDILGVEQRREALRGLISHVKVFPGRPKSRVEVIPAWTG

SEQ ID NO: 21874 - protein, 536 aa, synthetic construct
MPKAISYIRFSTKSQTIGDSTKRQSKLIHKWLEDNPHYHLDENMRFQDLGISGYSGANAKSGAFGEFLAAVESGYIEPGSVLLVESLDRVSRQDIDKAGEQLRKILRAGVEVVTLVDGSWYKEESLRDSLSMIKAMLVMERAHEESLTKSKRLRSAWANKRKEAESGKIMSRRCVAWLKVSEDGKRFEQIPENVKAVQRVFQLRLDGLSHAKIAKTMNEEKFVTLNQFRSKTGEWSQSTVTELLSNRAVIGFKVPSKSMVVKGVQEIPGYYPAILTEEQFYAVQQLKTGAGRRPSSDRPLLTNLFKGVMRCAKCGFIMIVSGVTAKRSGNYRCSMKYEGRCDAMGISRLQTDKALVQGLLYNAHRLNLTSDNGKVIGSLQSELETLQKQRERLIKLAMLTEDTEAIAGELRGLNKQIKEAEKAIAEAHQRDQSSKLDTINHLDLTVKKDRIEAQIIIKRMIRSILVDTAKKVCKIEFYNGLVFHDYPLDRIIDGARDLELLPVMGYTEIRFGKGNHHTPNHVLMADAPQWVKDAEE

SEQ ID NO: 21875 - protein, 566 aa, synthetic construct
MSRTRNRAVIYARISMDRTGEGLGVERQVEDCRQLAVDRGFEVVETLTDNDISAYSGKKRPGYERLKDLLVSGEVDVVLAWHTDRLHRSLKDLEEYIALCSGESPIDTLTVRSGELDLSSATGRMTARVIGSVARHESEQKSERVRRARRQAAEAGKAHGPLGYGYDKEGNVIPEQAEIVREVASRLLDGETAYGIAKDLNDRGVPSPGAGRWVPSHAKAVAAGRKILAPEPVVALVRNLVDGVDVNAQEAAAMVRAARLRLEREGRIGLQELLTSGVPLPAPEVTNALNRIGVPSPLTAWRAANLGVMIQRGALCGWRDFQPGARGGGPMVARGDWTPILAKETTERLRQLMSAPERRPVPMRGKSPLIGVLECAVCGCRMYGVTDKRTDTLKYTCTQQPGLATRCGKNTVKAEPVDAMVLGALFAVLADVDFRENKRRLLAVNDDAAAEATKALTVLEAEESAWRRDLREGRVDRAMFMDAMDGIGARREKHLAVIGVPRPSVTRALKDVPKKRERLETWWAEAGLDRQRAVVRALIEKVVIRKSTHGGNRFDPARVEPPVWRA

SEQ ID NO: 21876 - protein, 477 aa, synthetic construct
MKKVAIYVRVSTQDQAEEGYSIEEQIDKLTKYCDIKDWYVYEVYKDPGFTGSTIDRPGMQKLVRDSKQHKFDTVLVYKLDRLSRSQKDTLYLIEDVFAKYNVDFVSLSENFDTSTAFGKAMIGILSVFAQLEREQITERMQMGKVGRARSGKPMGWTRPPFGYTYEDGNYIVDDFKELVVVNIYKEYLSGTSITKLRDKLNEEGHIGKDINWSYRAIRSILDNPVYAGFINFKGELYEGKHKAIIEKEIFDKTQLELDIRQKQAYAQNNNPRPFQGKYILSGLARCGYCGAPLESMLGNIRNDGSRLKKYQCANRIIKKRPTVYNDNKKCLSGFYHMSDLEDYVVNEVSKVQINPKTILEKPEEKKEDNTEIFEKRIIAIEKSINKLSDLYMNDLVSLTDMELKAKSLKNERNQLLDKIYLTENNQKIIKTEKAFSYLQSLENNIKDETYENKKKIINSLINKVDVKDDEINVIWKF

SEQ ID NO: 21877 - protein, 466 aa, synthetic construct
MVEKGRRERAVLYLRQSTFREESISLELQETAGREYAARHRYEVVDVQSDPGLSGRTFNRPGVAAVMDAVESSAADVVILWKWSRLSRNRLDWYLAADRAQQAGGRIESATEPIDTSTSIGRLARGMMIEIAAFESERAGDQWKETQARRVRNGLPHDGKPRFGYVYDPEQKMFFPDPVTGPVFAGLYRRFIAGETMYSLCVWLNAQGIPTATGSNVWTAGNLRQIMDRQFAVGRVYHQGVWHPGAHEPLITEAEYAAYKQARKTRAAAPRREASDYLLAGLVRCGVCGRALTGAAARGRWFYYRCFASRFTGGHSHAQVPTKIVEDAVYDKLVETAADIETTAIPETRPVAVDSAALKRTIQQHKTSLGRLAVQLAEDVISADAYAAAAPAIEQKLATARDALQAATAEHAVPPMHHAVVSLVKDWHILPTTHRRALLARAVESVSVDFNDERRVDVVMRDRPTP

SEQ ID NO: 21878 - protein, 479 aa, synthetic construct
MTHLLKRSHVLDSIHAAFSPLSAVSYIRVSTLRQAERGCERDGFSIPALHEVNLRQAHGLRSLNAAEFVDRGHSGRSCDRPELKRMLSYLQEHSIDYVIVRKLDRLARSRADDIAITQAIRDTGARLISSTEGIDTSPKRGAAARDHGVDCGVLLAQPCARSHEGHAAEGGSGRPPSRAPIGFLNVRSQTDDGREFRTVVIDSKRAPHVAWAYVTDDWNVAQLVAELERRGLQTRPTPSRPSTAPTVTSFHRVLTNPYYKGIVTMNGAQHDGSHEPLVSTGTWDAVQRLLSARRNGERSRVHTHYLKTTIYCSTCHRRLLVHKARSRSGGIYDYFICSGRQTGTPRCTQRALPMTSIEDAYSSIEISGVRRRQIEQSHRRRFFIREAGDRERRRAELGEHVEVLASRQEKLLDLYYSDGIPREMFVKKQKKLSRELAQVAGERERARGDVTTIVRRVSGLLNLLEGAQARYLAAAPDER

SEQ ID NO: 21879 - protein, 470 aa, synthetic construct
MAGQLRALTDVPPRAIIYLRQSAYRDESISLELQEIACRDYCDRMGYDVTAVEADPGITGRTWNRPAVQRVMAAIDARDADVIVLWKWSRLSRSRKDWALAIDRADIAGGKIESATEPIDTATASGRFARGVMTEYAAFQSEQIGEQWEEVRQRRLRLGLPASGRLPFGWEWTDGRVTAHPEQAPIVVEMYQRYLSGDGAAAIAAWLNERGIPAPNGGAWRRARPLTVMDSPIHVGLVPYRGETYPGQHDPIIDDSTWAAYQLERGRRTDAHAKPRAYQHLLSNLMICECGERMHGKGSVTGGKLYRGYLCGETLSGHDQRAYVSAKTVEPAIVDWLMQFDPDLDSEAADDAAARSRRDAILREVNALEVEIVSLTRQHTRGIIPEAAYVRSLADITSDVDRLRAEERKLTPARRADAAQIITLRTTWDVMATPAQNKGLRQVIDRIETLPGGRSFRIWTTWGRSSEVHA

SEQ ID NO: 21880 - protein, 553 aa, synthetic construct
MTLTMPMTETGTAPLLTAVTYQRVSTKEQASKGGRDEGFSIPAQRQANARKAEDLGARIVAEFVDAGESARSADRPDLQRMLEYIATHQVTYCIVHKVDRLARNRLDDVEIHRRLVEAGVTLVSATENIDETPSGMLLHGIMSSIAEFYSKNLATEVTKGLTQKFETGGTPMRAPIGYLNVRKRDEQGREYRTVEIDAERAPLVRWVFEQYAAGERTVVDLLADVTARGLTSVPTPKRPSGPVGRSTFFDLLRNPYYIGIVRYKGAEQTGTHEPLVDVETWQQVQRLLDSRKKASERRRTHDHYLKGSLFCGSCGSRMQLDFPANRQGVRYAYYVCSGRASKRKSCTRRAVPVGIAEQLVADCYREIAITEEDYAALAAQVEAAFDERLASRSDELAELTANRQRLQNESDKLLAAHFADAIDLETLKRHQDRIRTGLADIDRRLATEHDQHEGSRKQLSTALSLLVDCATLYARTDDQGKRLANQALTNGIEISEDERATIRLAEPFAALVPEPTSTDVSGSSTSDWVDLRGFEPLTSSMRTRRATNCAIGP

SEQ ID NO: 21881 - protein, 630 aa, synthetic construct
MSMPEVNTTSAFLAAPPPLRSAKVEMTEDEVVASVSSDNPLVPSNLPKGTRAVLYLRVSSKGQVDTDYDPEGISLPAQRISCTRKAEQLGLTVIGEYVEPGRSATEMTKRVAFQQMLERVSRQHDVDAIIVHDLSRFARNRIDDAIVMADLRKRGVTLISATESIDATPVGQLMHGLLAAFNEYRSAKDGAEVSYKMGQKAMNGGTLGRAPLGYLNVTDNIEGRKINTIAIDEERAPFVKLAFDLYARGQMTFQDIADELTDRGLLTRATARWPAGPVSDSKIHQMLRDRYYLGEVRYKGEYYEGRHEALIDVKLFDRVQELLDTRGYSSERRRKHDHYLKGSIWCGRCRLEADTNRRMILTHVNSKTKATYSYFFCRGVQDHTCDAPYSNMDRIEEAVERHYKTISLRPEFVQAVRTLMEAAVNDQVGAQKMLQEQAKAQLQRLATQEDNLIDLAADGGIDTSRVRSKLRDIARQRKELEAELASVTDDIAPGMAYIDAHLELLSQPYELYRYASDQTRRLLNQAIFRHVYVVNEEVIGDELNTPMRELLASQRGWSVFEEAGDGVLARQLATTEAQHHAGVGETEQATVSGGLLDDFISALLTDRAETVGICSKPSMVRPKGLEPLTF

SEQ ID NO: 21882 - protein, 529 aa, synthetic construct
MSGKPEFNDNDLVVGYYRYSSSSQNEASIEQQRELVHRWAEAQGLQVVREYTDAARTGTNTDRPQFKRMLRELTSIKPAYVAVWKNDRLGRDRMDLLKVKKHIRLVGARLHYIEGFSPTDDPDSILVEGMSDAYAEWYSRQLSANIRRGVQYNAENALSNGRKIFGFTIGADKRYELDPQTAPVVAQMFDDYARGKSMQRIADEVNALGVRTTYGKQFTPKTLNKLLKSRAYIGEYSYAGHVVPDGMPQIVDDATFEKVQKMFAVNKRRGAKTKAELAALGDEAPDYWLTGKLFCERCGASMEGVSGTSETGRKYRYYYCLNQRKKKCIAKSVRKDEIEERVAAVVESFLDDTEMLASLAVYMASHYRETHERGRDVLEGLEARRKDVEAKLGNFVKAIGMGIMNESTAEAMSSLEQQKKELDAAIQAEHVKATLFEDEASIGAFYQRFAHATMDTPQTRDLLFEYFVDKIFVGAATLTIASWFLDHGAEFTLDDLNEMKETGEVLNVEFNTSPPRWSRRELNPACPHA

SEQ ID NO: 21883 - protein, 473 aa, synthetic construct
MARKPRAVAYLRQSTYREESISLELQETACREHARREGYEVVAVEADPGISGRTFDRPAVQRVMGMVDDGAVDVIILWKWSRLSRSRKDWAVAADTVERAGGRIESATEAIDTSTSTGRLARGVMVEFAAFESERIGDVWREAHARRIAAGRPANGKARFGYTYDREQKLHVPDPVTGPILAQLYRRYLDGESFYALVRWLRDRGVAPAAGYSVQTGDWSDRTLRRVLDSGFAAGYIRSRGELLPGIHEPLINEREWARYLRRREERAVHRRTERSEYLLSGLVHCACGGTMQAGQHTRTGQRLRCRAAAEYGAHKGGYIQAHYVEAAIRETITDLTAEVSEHAGDAPPTPARAGAALPQLETEQEKILAALTRLAMRLADETITLEVHERARREYDDRLTRITRELDDERARLADPAPTRKVLHDLARDWDFLPVAQLRETLGQVLQSVIVTPGDRIIAVSPRAGERREFRP

SEQ ID NO: 21884 - protein, 509 aa, synthetic construct
MKRCVLYLRVSRTKDESVSLARQEEELRQLAEREHWAVVAVLRDDGLTGTKEREKAEAALAMVTDGRADVLISWELSRWSRMGLTAVAKLVAALDARPDALLVFHKEGLRSDMPAFGILAAVIAEVAKMEAEGTRDRILSMRSYVLSQTDPEQQRWLGGSPPFGYRATDRPGGPGKALVTDPYEVGYARRLFEGFARGEKLTELTAMLNDEGVPTTMSALRRARQKGEPTDGLDGGAWRITTVRKMLQSPTLLGRTTQRVEVGRRADGSPVIEYRAVTDAQGIPINRWEPVVDPGTWAQVQERFKKRGPNAPRKAASWLSGLLYCGKCGSVMYANSRKTRNVDTFRCANKAIPGRVCPGVSISRGGVEDHVEGVILRMIGSLKEYRVTEKVEGAADTGELDGVAQAIADVQAALGQDGADYGALLPRLDQLKEERRRLLSQPTRVVRVRHETGRLLADAWAEGGIAERRFIVDDMLDSINVKPATGAGRANRMEDRLEYVWIEHPVEDD

SEQ ID NO: 21885 - protein, 516 aa, synthetic construct
MKNLDVAIYLRKSRADVEREHQARENGETYDTLGKHRLELLEVAKKNEYNVIDVFEEVVSGEYISNRLAMLELIENIENNKYDAVLVVAIDRLVRGNKTEQGRIEDALRDSETLIITPSEILDLTTETGEFSAEIQTFFANMEYRTIKRRMQRGLQNAARSGRDVGSNPPYGYKKGPDMHLVIDEEKAAVVRDIYKWSLEGMGVLQIVRRLHELGIPSPTGLANWSKTPILRLLSNKKYAGYMTFGIRQKVKSKTGKDVRKVKRDPSKYIEVPDAHEPIIPKEMFDLVQSALKRRDPKLNEKKKLIYPLAGLLVCSRCNWTIRCQAPKDRTGFYLYCGNPACDQSGIRLAPIERAIINELSAILTRVKVNHADISESSIESEREELTRQIERIKNEIKKENAKKARIYESYEDGTYSKEMFVERLNVVHNRIREHETRIPDLERERDALKEKSQTKTELIPAISSVLDLYQMTDKAEHKNQLLKTIVDRIVYDRTRTDFRRSKDPEDFSLTIYLIE

SEQ ID NO: 21886 - protein, 623 aa, synthetic construct
MNDVIDINALLGIDSFGRSPGGVDQLELGTMLDETFDISEIPVGSRVVRYLRVSDPSQVKTDYDPLGQSIPSQRVACQQREDDMALICVGEYVEPGRSATEITKRIAFRQMIARIRQMRDVDYVIVYKFSRAARNQWEDAILGVLLMKMGVKLISATEPIDDSAAGKAMRGMISVFNEYQSNASGEDIKFKMQQKAMRGGSLGRAKLGYKNIRDNFEGREVRTIAIDEERAPYVKQAFELYATGEYTLNDIVDELTDRGLIMKAFGKRPAGPISVNKVHQMLQDPYYTGVVVYKGEQYEGRHEPLIDKDLFDKVQKIIRSRGRAGERRREHHHYLKGTVFCGICKSERGIDRRLLVQRSVGKTGNEYFYYFCPGTKDGTCTSPHHNLFRVEDAVERHYKTKRLSSEFLTAVRALMADTLSDQDEAQRLLKKQLDAQLQTLETQEENLLDLAADGTVSSGKIKMRLRKIDDERKRLTAQRDDVALDLTAGARYLDAQLKLLENPYDLYVDTTDEIRRRLNQALFGAIYIIDDDVAGSSLTPPNDELLAAEAAFQSALINLDQEAIRRHYLRAFAIGHGAFPAKHKETARESGLFADNSTVATTAWASLFHGSALDAVSSKPLMV

SEQ ID NO: 21887 - protein, 559 aa, synthetic construct
MTIIDADRTAIDSLVAPTPFPGSFAVSYLRVSTKEQAEKGGQAEGFSIPAQREANQRKADQLGATIIEEFVDAGESARKADRPELMRMIQYVAKHKTNYCIVHKVDRLARNRADDVTIHLALKDAGVTLVSATENIDETPSGMLLHGIMSSIAEFYSRNLATEVVKGLSQKAAQGGTVTKAPIGYLNVGVRDDFGREVRTVEIDEERARLVRWAFQVFASGDWTTSQLHQELVARGLTTAASPRRPSRPIGKSSVHRMLTNPYYKGSVRYQGVTYAGAHEAIVPNEVWDQVQTVLGTHRSAADATQVHEHYLKGTVFCGQCGSRLLVCNAKSSQGTIYPYFVCASRHGGRGDCTRQAMLIEQVERLIERFYAKVQIDPETIEAVSAMIHARFDEMMAEGAAELTDLATRRTQLEGEQQKLLQAHYAGAIPLDLLKKEQDRITASLETIEHRITAHHGHYASARENLDDSLKLLSNAADIYEHADDANRRLINQALFRAIYIDEDNDVCVGYRNPYDGLSLSGLHADALSWAAEAKKMGQVELATKGGPLVASSHLTRVG

SEQ ID NO: 21888 - protein, 419 aa, synthetic construct
MNHESPTALLYLRVSTQRQLRTDFGPEGLSIPAQRAACTQTAEREGITVAEEYIEPGRSGKSIAGRPILKQVLERAADPNVTHLIVYELSRLARNRADDVQIVTKLAAHGVTLISATENVDATPVGQLTHGLLAAVNEYRSARDGADVAYKMKQKVEQGGTIGRAPIGYLNTIERRDGSIRRGIALDPGRAPLVCEAFTAFATDRYSYEQLRWHLFDRGLTRRTRQGEPAQPLSVGGISRLLSNRYYLGVTVYGRTERPGLHKPLVTSELFDRVAETLARRHTSRQRRRRHDHYLKGLLCCIHCLNAGYPSSLLRYTETARRSGQRFRYFYCAVRSTKDCHTYLPALSAEQHLVAIWTPLRLTLNYRALLQKAVRKFGVRIVSDYPLHQYLGAENWIRRHMNGALFEQVYPPAQRSNHA

SEQ ID NO: 21889 - protein, 542 aa, synthetic construct
MTRVALYARYSSDRQNERSISDQLNLLIQHAAAKGWAVVATYTDAAISGSAMANRPGLLSALAAAERGEFDLLLAEDEDRLARNLEHLAHVANRLADIGAGIATLSTDRVQDMHVAFKGLIAQDFIRNLSLKTKRGMASNAEKGLATGSRLYGYRSQPGGAVEIVPEQAEVIRRIFAMYVHDRMSSREIAERLNQDRIPSPAGREWNASSIQGSRQRANGILHSEIYAGVKVYNRVEMRKDRQTGRKITICKPPSEHKRIDVPHLAIIDRDLWNAARQRLDSRQTADPSQRASLRRRPGLLSGLTKCGCCGASYTSLSQGRLVCAAYREKGASACDNNRHVSRAEIEQRVLDGLRTRLLAPEAVAAYVRAYHAAWAEQAAQIEDRRRPLTRRLAEVERAIERGAEALLSGATAAAVIGKKLETLEIEQAELKAALEQLDADGAPPVQLHPRAAENYARKVEQLQARLAEAADSTEVADRELIESVRDLIQRIDIEPINKSRGAPVRVTLHGDLARFIRPQQPPIGGCALVVGGGIEPPTCGL

SEQ ID NO: 21890 - protein, 525 aa, synthetic construct
MQDNRIRADIYLRISEDPKLTGLGVERQLEDCRELCEKRGWIVEVVHTDNDISAYSGKPRPGYKALLGRIKSGEVDRVIAWHTDRLHRRLRELVEYCDVVTSAGVTTHTVKAGDIDLSTPNGIMMAQIKGAVDEAYVSEARLKNLRARRQIAEAGKRHCARRPYGWEPGGIELRESEAAVVREICKRIIAGETPTGIAYSLNERGTPTVEGKRWTGIGVRKCAARASNAAIREHQGKLYYNGTWEPIITHDEYAQVQAALNVRATMKYKRGVGRKYLLTGFVYCGQCGNKLSATVGSGGRKPAYRCHRTRSNDNVEQGCGKVSRNIEALELLIQKAVLARLNSPAVLDAIATRKSSDTGVSELLLQRDNQSARVDQLVTDYATGVLSADQFRQAKHIAEQKLGELNQEISRLTAHTELAGIDLSVDLETAWAANSLSWRRNLVELLVERVEVLPYPEGYPRKYWEGFKFAPELVRVGWRVWRCSVEIVTSRSAPESARQSCQDPRLPVDTVRSSPRILIASEGHR

SEQ ID NO: 21891 - protein, 447 aa, synthetic construct
MNHPSSAAIYVRISLDREEEAGVTRQREDCQKLADTWGWTVGKVYEDNSVSAYQRKLRPEWLSMLDDLRSGIRDGVIFYDLDRMARQPRDLEDLIDVVEARKIPNKVVTGEVNLSTDNGVFMARLLVNVGNKASKDTGRRVARAALQRAQQGKPQKAVTRPFGYTHDYEIIESEAKLIRDAYERVIAGESLTSILKDWMEHPTVNGKRWYRQTVKKILQAPRNAAIRTYKGEEVATGNWEPIVSREVWQAAQDVFDGRSKPMPDTTSVYLLSRIAICGKCGYPMYGRAANKTRKASYTCMSALGGCGGINRQMLPVDKYIEGLIKRQLAKGKPVAPPVDDHAAEIAEIENRIIELRQAWNDRKIVLTDFTVMRDAEDKKLKALQREKAQVSATQISETFAENFEDANLSQRRALIKRYMTAVVIHPAVRGARKVDFDAIEPIWKQIT

SEQ ID NO: 21892 - protein, 645 aa, synthetic construct
MSNQTRYPSGVFSAAPPPLKPIVVELDENEVTTYGTPNILEGADAPPGSRAVTYLRVSSKGQVNTDYDPEGISIPAQRTSCQRKAEQLGLTIVAEYVEPGRSATEMTKRVAFQEMLERIRRERDVDYVIVYKLSRFARNRTDDAIVMADLQKRGVTLVSATESIDATPVGQLMHGILAAFNEYRSREDGADIAYKMAAKAKNGGTLGRAPLGYLNVTENIEGRKVNTVAVDEERAPYVKLAFEMFATGNYTYQDIADELTDRGLLTRATTRRPAGPVSDTKIQQMLRDRYYLGEVTYKGETFKGRHAPLIEPDLFDLVQGVLDTRGVSGERRRRYTHYLKGSLWCGHCRLERDVNRRLIQQRSVGRHGGEYWYFFCRGVQDGTCDAPFANVDNIEAAVEEHYKQVELSPDFIRAVREQLELTLRDESKAEHLRRSQLNDRLGALQAMEDNLLDLAADASLPRDRIRERLRNLGRERETLHEQLSVATADLNAGRAHIDTFLELLSDIRALYIASSDEVRRALNQAIFNNLYIANDDVIGDDIKQPLRELLAAQRGWMAFTAGMGRSEANTSAQAESTRRTGPKPKETAHTGGLLGSKLSGLTEAILTGIYDDGDSSKTLMVDLRGFEPLTSSMRTRRATNCAIGP

SEQ ID NO: 21893 - protein, 595 aa, synthetic construct
MRNRISQYQTSKSAQSEDLESFKKAVLYLRVSSKKQMYTAIDIDADGNSIATQRETTIEKAREKNATIVREFIEPGASAKTIEKRPVFKELLQYLVENKDIDYVIVYMRSRAFRNHFDAAIVGRQLEALGVRLLSVKEDFGEGPHAVAMEGFTDIMNGLQNTLSGLDIQTKLRHKAVNGGTIGRARLGYLNARVEHEGRMINTITTDPKRAPLIRKAWEMYATGDYSIDRLTATMADYGLTSRPSPRWPTEQPVSDTKLHQMLRDPYYAGWLVYKGEIYPGRHEGIVDQQLFDRVQDVLDARSRHGQRDRVHTHYLKGILYCARCADNGRTSRMIYTEAKGRNGTKYPYFLCRSKQEKICDLPHLNAKDVENAIVANYQHLQLPDGFASDIEDRLNETMRDEQRSVHDLHAALTRKLTDLRAKEERLIDLAADGEIPQARIRARLHNLERERQAAQLGMSQTTGQLNIGAQLVRSAIRLTQDPQSLYAQVPNSVRRQLNQTFYESIEIDDLGTVRPTLTPLFNDLHSGARARNDAISNPDPPISSTYEKRSHQVEAFPSSTSTGLLTIADLFSVGVSSRTVMVGRAGLEPATNGL

SEQ ID NO: 21894 - protein, 480 aa, synthetic construct
MSTNARRLRVVPERRRGIAAIRVSKERDNMTSPEIQRHVISEFAARENIDIVEWIEGIDESGSRKRSAWWKRLAYGCERIEANAADVLVVWRIDRAARNKLKWAVAEDRIDTAGGAILSATEPNDLSPAGRFGRGVMVEHADFMARSIGATWKETLERRVRHGLTPNGQRHYGYTYSRESGTYEIDPVEGPKLAAMYRAYAAGEAAWEIAQRYSAPDASPGDDGAHARYARWNTASILRLLDSGFGAGMILFRGELHTGAHPAVISVEEWTRYQHARDARRRRPRAERSPYAYSGLIYCHCGGRMGGRTDHGRPRYACTNSAQYTRHPDASLAAHIIDDAVLEWLAGIRDELNEAARRAPRRPQLVQDPTKEIARRIAQVTQRLDAATMKVVDGTIPNDAYQRIRVQLEAEQAELSAELTRHAAQQTVQPIAFVGDLVARWPDMPVARRREALRLLVDRIDVGRPSDEPRIQIQSALTRS

SEQ ID NO: 21895 - protein, 483 aa, synthetic construct
MGTTKNKGQPKLRAVLYLRQSTAREESISMELQETAGRDYAKRQGYNVVAVEQDPGISGRTWDRPGVQRAMSMIETKQADVIVLWKWSRLSRARLDWAVAIDKVESAGGRIESATEPVDVDTSTGRLARGMLAEFAAFESERIGDTWKEAHRRRVAQGLTPTGTDHFGYDYDSAEGYTPNPEEASVLQECYRLYLAGQSFRNIVKYLNTTGLQPKSRGGGSGRGWCATVVIRLMDSPFAAGYIRYRGENHPGRHEPLLTSEQWEAYTVRRAQRKGTREPANQEAIYRGLLFCGTCGHRMHLHARVGGKLNYSCAGSGVYRLHRGGYVLEHLVTEEVLKWLRGVHEAVNRAAAEHPVEPVVRVSNEPALRRGLMKAQARLDRLTGQYVDEVIPKESYERLRDKLTAEIGELEQQLAEQRVEAALPPPLPIPALLEQWEIFTPVEKLEILGRLIDRIVVTGKRPRSQVEIVPKWAGGAGPEVNGV

SEQ ID NO: 21896 - protein, 553 aa, synthetic construct
MAVVVAKKNVVFIPAQTIYDRNVRVELKTLRVAAYCRVSTTLEQQEGSYEAQISYYTDKIKSNPNWKSAGIYADDGKSATNTKKRDDFNAMIDDCMAGKIDMVITKSVSRFARNTVDSLQTIRKLKEKNIAIFFEKEGVNTLESTGELLITILSSQAQEESRNLSENTKWGIVRRYENGIITVNHKKFMGYTKDKETGELVIVPEQADIVRRIFRMYLEGSSIGEIIKALEADKIKTVTGKETWHPGVIEKMLVNEKYMGDALMQKTYTVDFLTKKRVKNNGIVPQYYIEDNHEAIIPKELFYKVQEEKARRASLNKAAVTRKANKLKKEKSKFSSKYALTEILVCAECGHPYRRQTWSKYGQKSAVWRCENKLKNGTKASCKHSPTLKEEPLHNAIMTAINNVVENNGDFIGAFRENVIRVIGGYSIKDIPTEYDEQIESLQKEMLALIEENAKQGAVAEDFDNEYKSISEKINELKQAKLKLAREKKQAENYKQKLTEMDSTLKTVRPQVRELDEDLVRRLINTIKVNKGERLEIQFESGIVMEQMVDYYD

SEQ ID NO: 21897 - protein, 529 aa, synthetic construct
MAKKVRKIEPVMQKVILELQPKKRVCAYCRVSTDSREQQNSFSAQVEYYKTFIGKRDDWEYTGIYADEAKSGTQVKRRDEFLRMMKDCEDGKIDMIITKSVTRFARNTVDSIEAIRKLKALGIGVYFEKEHINTLSEKSEQMITILSSLAQGEAESISTNNKWAVKKRFQDGTFKLSDPAYGYTKDEDGNLIIKEDEAKIVRRIFHEYLNGKGSYIIARYLNDDNVPTIRSAEEWQDSVVKEILQNPIYEGDLLLQKTYTTEVLPFERKTNKGELPQYFIENNHEPIITREEGQMVREIYEYRRNQMGVDDSGKYQNRYEFSSKIICKECGNIFRRQKIYIGKPYEKIQWCCVQHIKDISKCSMKAVREDIIKEAFLTMWSKLVSNHTDILYPLLESLKNLRIDNKQEEEIKKLNNRIMELSEQSHILSRVVSKGYIDSAIFIERQNALTVELDTIKKMRNQCLDDNGYEKEITGTVRLLGIIRYNLEIIEVYDENLFLNTVENIIIGENHEITFKLINNLELTEHYGK

SEQ ID NO: 21898 - protein, 486 aa, synthetic construct
MENTAIRAVIYARQSKTRDGSESIETQLEACRTAADRFGFNVVATLAEPPSTSGYKNRGKSRAKFKQLLAGFSDGSWEMVIAYKTDRLSRGGGPGWAPLLEAIEKANLDLDRAVATPGGFVSEFEIGIRATMDREESKKLSDRMSDMSERKAKQGKPQGGRRPFGYQADMVSIDEDEAAVLREMAASVMSGHSYKHIAWDLNERGITTSGGKLWFPLTVRNTLLKPRYAGLRVHQGIEYPAVWEPIFDAETVEKLRMTMLMRKEAHADVPKARRYLLTGIAHCGGCGMPMNGMTKRDNPTRPLRRTYQCRVQGDSRRKHGCGGVTRNADALEHWVRESVLAHLASASLLELLGTSAEDMTLIRELWSDKQAQQARLNQLVDDYATGRLTPTQFDRAKRTAESELERVDKLLARHASSHAVLSMLPTDKSAPEAWSSESDDWKRSLVSGLIERVVVNPGITKPFYNADGKMMRFDPSLVQIEWRSFT

SEQ ID NO: 21899 - protein, 500 aa, synthetic construct
MTTAPRALLYLRLSSITDDSTSIARQEADLRAYADRQGWNVVDLLVDNGVSGRKTREKATEAVRRLADDEADVLAVWKLDRFTRQGWAGLAELTDALEYRKRTGRPALFVTIQDNMNSDQPAFRLLAGMLSEMARSEAENTALRVKNSIKYRRTVTHKVASGSAPFGYRSVPAPDGVGRVLVLDPAEAPIVREVAGRLAEGVETVASILRDLHARGIPTGRSEARRARQRGDVWEDLKRGGWTATAIRRIWTSEANLGRQRHGGDVVRGADGLPLQVWPAILDVATLEAVRRRFGLGLVAPTPRERRTRAARLLSGLAYCGDCGGKMYVNSSKEGRRAGYRCTAGGNTTTKCRNPRMSAEDLERIVSEAVLSVAGSWPEVEEVHVSSAAANEAALAEVEVAIREASAALTQDDADGPALLHHIETLKSRRTALKALPRTNGVEYRATGRTLRETWDAEEDVARRRLVLLRAVDHVEVHPTAPEARYCTPNEDRVVIRWNS

SEQ ID NO: 21900 - protein, 468 aa, synthetic construct
MTKTRNAVAIYARISQDRTGEELGVKRQLQDCRAEAERRGWTVAQEYVDDDISAYSGKKRPEYERMLRDIAEGRRDGVMVWHMDRLHRRPVELEGFVEVCARAGVRDVVTLSGDVDLVNGDGLLMARLLAAVAANESDSKSRRGKSKAKQIAESGKPMMGGPRPFGFLDDRVSHHPTEAPVIRQLARRALAGETLTSLASWLQDEGITTTQGKEWRTNTLRTVLTNPRMWGLRVHQGQVIAKGTWEPIITEDEGERLRRKLLDPARRTNRSARRYPLSGMLECGKCGNRMHSHPRGQYRRYGCLKGPDSRGCGGIFIYAERLEEFIAEAVLYRLDSPELHRTLTEDTTTPEEVRDLEVAIEADAAKLDELAEMWADGEITRAQMKTMQSRVEARLEDNRRAFSRLTHPADAAKYIGQGQELRAKWHTLNLSQQVAIIAAVLHKVTILPATTPGRHGIDPNRVVPEWRL

SEQ ID NO: 21901 - protein, 449 aa, synthetic construct
MLKRAALYIRVSTDQQAKHGDSLDAQIATLKDYVSTQDNLTIIDTYIDDGISGQKLYRDEFQRLLEDIKKNRIDIILFTKLDRWFRNLRHYLNIQEILDNSGVTWLAVSQPFFNTDTAYGRSFVNQSMSFAELEAQMASERIKAVFENKIRKGEVVTGSVPFGYKICDKKLIPNENAPIAKDIFKHYSIHNSIRLTVEYLFNEYDITRSSRTIKHMLRNRKYIGEVSGNKNYCPPIVDKETFEKVQNLLDKNISSIAKRTYIFSGLVVCSCCGKKMTGRYRKRKYIKKDGTVMYYTKKVYRCNGNTYKRNKCPNKINIPEEILEEYLLNNIKADAENFKAKQKKIAVSAPEKNNNSKILKKIERLKKAYLNEVISLDEYKKDRKELEQMIVQVKPKETIVFKSNWFNKNIESTYRDFDEEEKRFVWRSVLKNLIVDPHGKITINFLTKN

SEQ ID NO: 21902 - protein, 596 aa, synthetic construct
MEETDIRPTAYSYVRMSTQQQLKGDSLRRQLERSREYAAENNLRLDETLHDIGISAYTGANVRSGALGQFLQLVQNGQIKRGSYLLVESLDRLSRLQVRNAIGPFIELINAGITIVTLADKQVYSDATVDENWTQLMMSLAIMSRAHEESQTKSDRLQRAAEGRRKRALAGETRFSHHMVRWLDQIEIAPDKYEYRLNKHADTVRQIYEWADAGIGQIVITRRLNEAKTPTLTGRGDWQQPTVGLILRNEAVIGTYQPVHRVNGKSQPYGEALRGYLPAVISEELFWRVQKNKRVRNSAGRKGERLTNLIGPLATCAHCQGRMLIKTGGAATNPQKYIRCDNNYRGGPCTGPSGQFRYDKVENAILDHVREFHSFSAFARENNSAGKQQLQEKIASHETTLAELEKQRKNLMSVAAMAEDDATRADVMRALTERRSREDNTKAELEILRADLMTLDSAERNANSLAERIASERKMWETGSDEKVYESRSKIAQALTQIIDFISFDMDTRRFRVIIGAGIVAYEFDKQGRLTNKFDLATSPMRNGPSPLTVKHFAQADGTEYQRDENGQQTLTSETRDRFAARTEKLTKLMQEKQSS

SEQ ID NO: 21903 - protein, 551 aa, synthetic construct
MATKARVYSYLRFSDPKQAAGSSADRQLEYAKRWAAEHGMMLDAALSMQDEGLSAYHQRHVTKGALGVFLAAIDDGRIPAGSVLIVEGLDRLSRAEPIQAQAQLAQIINAGITVVTASDGREYNRAGLKAQPMDLVYSLLVMIRAHEESDTKSKRVRAAIHRQCRGWQDGTWRGVIRNGKDPSWTRLEPETKTFQLVPERAEAVKLAIRMFRDGHGAVRIMRTLAEEGLQLTNGGNPAGQLYRILRNRALIGEKVLEIDGDEYRLAGYYPSLLSAEQFADLQQATEQRAKQKGTGEIPGLITGLRISYCGYCGSAMVAQNLMNRGRREDGGPQHGHRRLICVGNSQGMGCAVAGSCSVVPIEHAIMSYCADQMNLARLFEGGDRSEALGGRLAIARARVADTTAKIERITDAMLADDAGDAPAAFMRRAREMEAALAAQQAEVEALEHEMAAVGSSPTPAVAKAWADLQEGVKALDYDARTKARQLVADTFERISIYHRGTEPEQTRSWKGTIDLVLVAKRGSARVLHVDRQTGEWRGGEEVRDLPDDPIQ

SEQ ID NO: 21904 - protein, 583 aa, synthetic construct
MTTSTIDRKAVDDLVHPSMPSGGAVAVTYLRVSTKEQAEKGGTDEGYSIPAQRQANRRKAEQLGATVIEEFVDAGESARKADRPELMRMIKYVAEHQVNYCIVHKVDRLARNRADDVTIHLALRDAGVMLVSASENIDETPSGMLLHGIMSSIAEFYSRNLATETVKGLSQKAAQGGTPNRAPIGYTNVGIRDERGREIRTVVVDTERAELVTWAFQVYASGQWTTTQLHRELVARGLTSPPTPKRPSKPIALSTMHRILTNPYYKGDVRYGGATYKGTHTPIVAKEVWYQVQTVLDAHKSAADATQVHDHYLKGTVYCGQCGERLIITNARNRHGKVYPYFVCSGRHSGKNACTRQAMLIEDVEHLIERYYETIQVTGEMRQNLAGMLHAEFDQLMASESKELNRLAIERDRLEEERVKVLQAHYAGAVPLDLLKIEQDRISAGLENIENRIAAHHDEYASARANVDDSLGLLANVAGIYQRCDDANRRLCNQAFFTRIFIDEDRETRVEYERPFGSLCNAEEQANALNWASAAGAGKKKSGEVQTFARVETLVEGLNLTTSGWLTGLEPATTGTTSRCSTN

SEQ ID NO: 21905 - protein, 539 aa, synthetic construct
MTTLLLSPTTQMTPPPFRWTGPETPLPDTRPVFLYLRLSRAHGDGRDAIERQRLDLARKLAVEGGWTVMGEYVDRDSASAYARKERVGWRALNAAIASGRVRAVAFWKLDRTLRVASRCLEWVTSCQQQGVTLLSHQDSTEELNSVTAAAKLSTGVKALLAEAETDTMSERQRAAKRHAAQAGFINGGRRPFGWQPGPRVIDHAGRTGRRLEPHPVEHQALKDAVALVLSGAGLREVAVHWQSRHGITCPEGRLVSEQKVRAALISPRMVGYRQHQLPPHRRGVSVDPLDHIARTPDGEPVISQEPVCDLATWHRIQAALRSRSTGPRNGWGTRAWLLTGLLRCPCGRPLAGVAQPGKPDAEGHRATRYVYRCKANRRLGLGTCTGGASIIAPPAEQYVIDWLLEFFSSDRLDAHNKKAESANVEAVACIDTELAESNEELEALRGRAASLTVGRELHQIVAGMIARVQERIANLNEERVALTIEHPAPLTHEQLVAVWPTLNNESRRTALRQLIHHIDLAPGRGYPSKRLNIVLHEVE

SEQ ID NO: 21906 - protein, 646 aa, synthetic construct
MLRKPSISYNKTDMCMSSANRHHTPDPPEMAVENPEISAQNALDSSPERSVNGDMSMSTYTPGAATAAPPAMTDPFAALTQSFAPKRAVSYLRVSTREQAERGGREEGFSIPAQRDANKKKATSMGAMVVKEFVERGVSGTTINRPALQEMLKYLNEEGESIDYVIVHKVDRLARNRADDVELNARFDALGIRLVSTSENIDQTPGGLLLHGIMSSIAEFYSKNLSNEVKKGMTEKVRSGGSVGRAPIGYLNVRDITEGREIRTVETDPERAHLVTWAFNTYASGDWSVRSLTDELVKRGLMMAKTAKLAAKPVETRQVHQILTNPYYLGIVSYKGAQYPGNHEALIDQETFQKVQEILKSKINGERTNKHGHYLKSTLFCGQCGMRMIVQVAKSRSGDEYPYYTCLGRHSKRTNCTLRSINIFNAEDLIQQLYDRLALKPKRADQLRETLTEQLKLIKNDTAVQAEGLTSQKLEIERKQRKLLEAHYNDAIPIDMLATEQKRLDSELARVNRQLKDLTADLGDAARHIEMAVDLALQSASAYRRAPEHIRRLLNQILFERIEVVMDENDDHQLRAVLAPPFDELFSAQLQSIVEQLADQKVDKSKKPAISGGLSRIHADQFPISYTLVSNKSTMVGLTGFEPATP

SEQ ID NO: 21907 - protein, 540 aa, synthetic construct
MTVKAYSYLRFSSSAQARGDSLRRQLEAAEAWAAERPHIELNTTLRDLGVSAFKGDNRVKGALASFLERIKQGQIERGSYFLLESFDRLSRESESQAIHLLTGITLAGVKVVTLIDGNEYDETADAMELMRALIVMSRSHNENKARTDKVAKAWKEKKEEARRTGKVLSRRGPAWTIYSDLSGRFEPIKEKKLIVERIFDECCQGLGITAISQRLNAAGVKPFVSTSDGWHPGYVLTILRSPSVCGYYQPTLTTNRPGQRMKRLADGDAIADYYPRIISDETFHLAQAMIAKRNKRGGGKGRRGKAFPNILLGLGKCPTCSGTLIMTNHPNSMKVRAYRCYQNSRKHCCDNADRYLASEVEEHLTEFLMMAKMADMSAPEEAQTLLVKTSELDRAKNRIKNLVNQIEDADVPDPDLVERLAERRLERAALEKEVKALNSIVEGYRPATNQEAVDEACQWMNKVEGDAEPEELYLQRAKANALLNDTLDFVTVFPGGIYAGKDAKGWRVTDELFSELEIDQSKGVTLKALEDAKVVSVNMI

SEQ ID NO: 21908 - protein, 481 aa, synthetic construct
MSANLRAVPASRPRAVLYLRQSTARDESISLELQEIAGRDHCARSGYDVVRVEVDEGISGRTWAKRPAVQRVMDMIEARDADVIVLWKWSRLSRSRKDWAVAADRVDVAGGRIESATEPIDTATASGRFARGVMTEYAAFQSEQIGEQWGEAHDRRFKMGLPPKGPLPWGWESHGDRISISEEKAAIVREMYQLYFEGRGMTYIATWMINQGIPAKRGGIWRAQSVISCLESPIHAGRVTFRGETRDGAHAGIISEAEWERFLRLRKDRTQARPPRVTNHLLSTLVRCHCGLKSSGSKGTSRWANGRKVYHSYKCSSPAAHPRKSLITWKVDQAVVRWLKARAVDTDREASALPGADIEKLARDVLAVDRRLDALTEHLVSGLVPRESYVRTRDMLVTEGERLRAALHDAEQSTRLTPAHYLDGVRDGIERWDSLQLEDKQVVVRSLIREVMIREDGLIAIQPHWRQGDPDVVAPPETAVS

SEQ ID NO: 21909 - protein, 509 aa, synthetic construct
MTANKFVDLYLRLSIDKDGKDSLERQEDDLRAWAIREGLTVREVWKDPGKSGYQRGVKRPDFDAAVAAIKAGEVTTLAVWKLDRLSRRGAGQVGTVLDELEAASGRIVFLKDSLDSSVESNRTLIILISEQARAESKNTSLRVAAKKEVDRKAGRYLGGSHPFGYTVDSNSKLRQKPTEAALVREAFERLMAGETMLQVCRDWNDRGVPTRRNGAHWRSSSMSVFFRSPTLAGMVPDHREERASGYQGVDLHPWRNPDTGETVSLMAEGEEPIVTEGERMALLRILDGRLRRYGRGLRAGKQPSTLLGGGMVICASCSRACNSFGNAYRCRKREYVGDPCPRPLSVTIEVLEEAVKRAWASKLAALELDDPLLHAVAERWLARNDPAPIREREELTERLRTLEAKVAAADHDHYVRGSLSTERYARVAQALGGQIARVHADLAELPEPEANISALLDPELSLPAIMTAPVLEARALLRLAIDRVIVTPAPRPGAPFRPHERVRITWADE

SEQ ID NO: 21910 - protein, 513 aa, synthetic construct
MNRPIDAAIYVRISRDSEAQGLGVKRQEKDCRALAERLGWRVVEVFTDNDVSASKKKPRPAYERMMRAVETRRVHAVVVWDVDRLTRKPRELEDWIDHANKLGLSLASVGGEIDLATEQGRAMARMKGVFARLEAETIARRQRAKHKEMAEAGRYIGPRPFGYRFAADQDGSTIRGSGKQLVVDPAEASVIRECARRVLDGESLWAITKDLSARGIETAAGNAWQTQTLRRMLMRWTQAGYRKHQEYKDGQWVGQPQLFEAAWEPIIDRETHERVIAKLTDPSRITNKGDTALKYLLTWIVLCGACGRPMVGVKGYKYTVKGYTRADGSQSPSRERHYYAKYTCAHQGCHGITRRMDVVDEFVEQHVVRLLETEGVHMLGGDQAVVDEAQQRIDEIKARKALLSDLVMTPASEGGMDEEQFRRQNARLTIQLEAEQARLRSARPADGLDEFTGSSAAAAWEAATVEKKRLLLRALIEMTGLTITVDKIGPGAFSASGANPYRGIRVEWDGTGG

SEQ ID NO: 21911 - protein, 430 aa, synthetic construct
MLNDLKSGRITGLVFSKLARLARNTKELLDFGEIFRKEGADLVSLAEQIDTSTPAGRLFFTLVAAMAEWEREEISSRVAASVPIRARMGKPLGGQASFGYKWENKVLVIDKNEAPVRKLIYEIFLKCQRKKTTADSLNKMGYRTRSGACFSDTTIDRLLRDTTAKGVRIANYTKSLGEGKQWVIKPENEWIKIPCPSIVDENLWEKCNSILNEQATKRKRIGRKSEYLLAGFVKCECGTSMYVLSSAKKFTCKNCKNNILVDEMDKVYQQLLKGYLHDLQPEMYVGELESVLKEKEKLFSETKKKRVQLRKKMDELVPLRAELDKEHFGELYQPLVDQVKQLDKSTPELQAEIDLKRIQISSSDYVLKEAKVLYNQWSEMCFRQKRAIVETITEYITIGQDSINIGLSHLPLSSKQTSPHIFRDSWKQST

SEQ ID NO: 21912 - protein, 652 aa, synthetic construct
MDERPERGENYIADATPVDGGVGAGKAAKGLDFPAEKSVNPEDLTEGGPHMYQEGEEAAATLAKPNLTSVAGLEHLFKGDDTMHVPLRTGVAISYLRVSTTRQLNTAADLDEDGNSIATQREWAIRKAKELGVPILREFVEPGQSAQTIDKRPEFKKLLRFVDANPDVRYVVIYMRSRVFRNHLDAAITKRQLRDKGVELISAKENFGDGYMGDAMEAITDVVNELQVRMSGEDIRIKMAHKVERGGSVGRAKLGYLNVRKDFDGRLVNTIDVDPVRAPLIIWAFEQYATNQFSITQLQMMLEDQGLTTRQSSKRAAKPLSSSQLAMILRDPYYTGVIRYKGKLHPGRHTPLISKELFLAVQKILDGRNRKGDRDRIHFHFLRGLLYCAECKSEGRTSRLVYSQNKGHGGTYEYYVCTAKQRGHCSMPSARLDELEDEVARRVAAERFDADDIASVREEVRRALVELQAADQEEKDALRTQLKKLEAQEERLIELAADGTIAVEKLRQRLEYVTLQKGAITEKLTRTVERIRHGVDKAFAFVDLLEDPAALYKQLPDNVRRELLTAFFTRLDVQVTDREVSIGVERTELNAGLHDWRAQHRLSASAHTPAKEKRASRIPAEDSLSDPYPLTQSKGLNKPVLVGMTGFEPATP

SEQ ID NO: 21913 - protein, 494 aa, synthetic construct
MDLKKRVGIWIRVSTDMQVKDDSPEHHIQRAQYYIQSRDWEVVEIYRLDAVSGKSVMNHPEAQRMLKDLKEGRISGLVFSKLARLARSTKELLEFAEIFRKEGADLVSLAEQIDTSSPAGRLFFTIVAAMAEWEREEISSRVAASVPIRARMGKPLGGQASFGYKWHDKTLVVDEKEAPIRKLMYEIFLDCQRKKTTARLLNELGHRTRNGSLFSDTTIERLLRDTTAKGLRIANHTKSLGEGKQWISKSEEDWITIPCPAIIDERLWDKCNSILDKQAINRKRNGRKSQYLLAGFVNCECGTPMYVYSTAKKFTCRKCKNNFPVKDMDSFYQQVLKGYLNDLTPQMYVEELQKQLAEKQTLLTTSVKKRTQLRKRMDDLIPLRLNGDLDSEHFATIYQPLVSQVKQLDISIPELEQEIKNKSTEIKSSDNVVNEAKVLYKKWSVMEFSKKRAVVEAITDKIIVGEDVINVSVSNLSLSSPLTKQHEFRDSWQQ

SEQ ID NO: 21914 - protein, 501 aa, synthetic construct
MKPNIKDVAIYLRKSRDESDGKEDVLAKHESLLLEYAKNHNLKYKIYKEIGSSEYIDSRPKMVRLLSDVSQKLYDAVLVVDLDRLSRGDLEEMGRISRVFRDSKTIVITPTKTYDFNNEDQALINNFEMVFANHEFRMIRKRMIRGKQQGTKAGKWTNGRPPFPYVYNRLTKELDVDPDKVKVYELMKKMFLEDMKATYEIAWKLNELGFKTNRNSYWYENTVRRILKNEVHLGKVVYGKTSGSGSKKKLNANGVQIKDRSEWIIAEGSHQPLKTEEEHQRILAILESRRYTPKGTRTNVQVLSKLIYCGKCNRVMSFTGKASGKRYVKTCLTTDRFGYRCHNRSLSVEVIYAQLFLDLERYEQQLLSHEPKEKQGDSSTLQLALQNKHEDLERLEKGIERIKDLFIDEIIDKLEMQKRIEKQKQLMQTKKEEIRSIEQSLAVIENVRTDNDRLHAIRKFKTAWDTEGISKRELNILAKQLINRVEYIREGDNVQMKIQFI

SEQ ID NO: 21915 - protein, 466 aa, synthetic construct
MVEKGRRERAALYLRQSTFREESISLELQETAGREYAARHGYEVVDVQSDPGLSGRTFNRPGVAAVMDAVESSAADVVILWKWSRLSRNRLDWYLAADRAQQAGGRIESATEPIDTSTSIGRLARGMMIEIAAFESERAGDQWKETQARRVRNGLPHDGKPRFGYVYDPEQKMFFPDPVTGPVFAGLYRRFIAGETMYSLCVWLNAQGIPTATGSNVWTAGNLRQIMDRQFAVGRVFHQGVWHPGAHEPLITEAEYAAYRQARKTRAAAPRREASDYLLAGLVRCGVCGRALTGASARGRWFYYRCFASRFTGGHSHAQVPTKAVEDAVYDKLVETAADIETTAIPETRPVAVDTAALKRTIQQHKTSLGRLAVQLAEDVISADAYAAAAPAIEQKLAAARDALQAATAEHAIPPMHDAVVSLVKDWHILPTTHRRALLARAVESVSVDFNDERRVDVVMRGRPTP

SEQ ID NO: 21916 - protein, 541 aa, synthetic construct
MKSGTTRYTAGLYLRLSKDDDSLKESASIATQRKMLYSFAKEHGYNVYGEYVDDGYSGTNFDRPAFQRMIRDVEDGKINMVITKDLSRLGRDYITAGQYTELFFPSKNVRYIAINDGYDSASPYNDIAPFKHVINEMYARDTSKKIRSAILTKMQAGSFIGNFAPYGYLKDPEDKSHLIIDENTAPVVKHIFKMAQCGCRPIDIARDLNAKNIPTPAMYRCQTHPYLDVTNYSKRLEWTSATICKMLRNVVYLGHMAQGKSGKISFKSKAVIGKPRQDWIVIENTHEPLVSQETYNLVRQRTQSRTYRSTGDFQNMFSGIAKCMDCGRNMSATGSMNQGTPYRLACGGYKLYGKKECTNHFVDYQTLYDIVLQQLRKHICLDEGERLELVEKLTDEKSAPKEVQTDKKVIVALERRKKELDEIIRHLYEDNLSAKISDERFEKMLTNYEQEQQQADKKINELRACLLNNNEQEELTQKIHKYFSQRLYECENMSQLPPQLLYHLIDHIEIGQGYYEKTAAGRIKHQEIKIHYRFGMPSAHA

SEQ ID NO: 21917 - protein, 479 aa, synthetic construct
MKKVAIYCRVSTLNQAEDGYSIGEQQDKLNKYCDIMGWEVIETYTDAGFSGSNIERPAMKQLLKDAANHRFNTILVYKLDRLSRSTSDNLYLIKEIFKKNNIEFVSLNEKIDTSDAMGEFFFTLLAAVAEMERKTITERMVLGRLGRAKAGKTMSYQLPPFGYIRNKELDILEVVPHEAKIIKYIYSKYISGDSITKICHDLNDKGHIGKNVRWSHSSVKNALTNTVYIAKGKFKGEMYEQEHEKIIDENTFWIVQDEINKRQIRESQRTNNPRPFQAKYMLSGLMKCGYCGGHIRTVTGNKRIDGSNPVRYVCDRRSDYRKLMEPDEIKCKSGFYRRLDLEQYVIDYLADLPNDESKLKEALSIGQTSEFDPTMLLTEIESINKKIDKENYLFRNDYIDEVELQRNVKNLVDTKKLLENQLQENNGDKINEQKRKRILDMLNTGNIREMNYEQQKKIVKSCISKILLTSEEITIEFNF

SEQ ID NO: 21918 - protein, 571 aa, synthetic construct
MTTIADDPAASLIDPPKTMAAAVSYLRVSTREQAEKGGTDEGFSIPAQREATRRKAEQLGAGIVEEFVDAGASAKSSDRPELIRMIQYVKANKVAYCIVHKVDRLARNRADDVSIHLALQQCGVMLVSASENIDETPSGMLLHGIMSTIAEFYSRNLATEVAKGMTQKAIGGGTNGRAPIGYLNVRKRDELGREVRTIELDPERAPMIEWAFKAYASGNWSVSQLHDELTSRGLRSLPTPKRPAKPLAVSTIHRLLTNPYYKGDVIYRGTRYKGNHPALVPAEVWYQVQSVLTAHQCAVEATQVHGHYLKGTIHCGQCGSRLIVSNAKNRHGNVYCYFVCSGRHSKRTDCTRQAMLIEDVEKLIEDYYTRVQITPAQQDALAGMLHHEFDRLMAAETEELERLTTNRDRLESEQDRLMQAHYADAIPLSVLKREQDRIVAELDQVTRRIDAHFGDYAEARAHLDDALGLLANCADIYTRCDDTNRRLCNQAFFTKVFIDEDNELRVEHNRPFEMLLDPQVNANALTWSADADKARTSTNVSVGKGSSLVRGVEPRGIEPLTFSLRTKRSTN

SEQ ID NO: 21919 - protein, 550 aa, synthetic construct
MKIAIYARKSKYSPTGESVENQIQLCKEYLQSKYKSETLEVDEYKDEGYSGGNTNRPDFKKLIAKIEDYDMLICYRLDRISRNVADFSSTLTLLQNNKCDFVSIKEQFDTTSPMGRAMIYISSVFAQLERETIAERIRDNMMELAKMGRWLGGTIPMGFDSEPITFIDENMKERSMTKLIPNVEELKVIELIYEKYLQLGSMGKVVTYLLQNNIKTKKGKDFTLGSIKLILTNPIYVKANQEVVNHLKTQGITVCGDVDGKRALLTYNKTTGVSNDVGTKTIVKDKSEWIAAVANHKGIIPADKWLQAQNIKDKNKDSFPALGRSNTTIASRVLRCDKCESTMGVSHGHVNPSTGNKHYYYNCTLKKRSKGVRCDNKPAKAAEVDEAILITLENMFKTKSSIIDNLKAKNKARRIEMISSNRVDVINKIIEDKTKQIDNLVNKLSLDDDLTDILFKKIKGLKAEIKELEDELLTLTSDNIKLNEDEVVLDFTEKLLEKCSIIRTLDILEQQQIVDALIPLVTWNGDTEVLNIYPLGSPELELKEAESKKK

SEQ ID NO: 21920 - protein, 451 aa, synthetic construct
MQRVAIYMRVSTDQQAKHGDSLREQQETLDEYIKQNKNLKVVDKYIDGGISGQKLNRDEFQRLLDDVKNDQIDLILFTKLDRWFRNLRHYLNTQEILEKHNVSWNAVSQQYYDTTTAYGRTFIAQVMSFAELEAQMTSERIKSVFSNKIQQGEVVSGKVPLGYKIENKRLVPTPDKDIVIDLFDYYVRVGSLRKTTTYLEEKHGIVRDYQSVRKLLTNEKYIGKLRNNPNYCEPIIDKDVFETVQLRLSQNVKTSGSHDYIFRGLVRCADCNGSMSCSTLKSKYIKKTDGEVSYYIRSCYRCTRRRNNPTRCKNKKTYYERALERYLLDNIQTNIAMHVRTLKKEVTKKDSVKRKKDALFVKIERLKKAYLNEIIELDEYKRDREMLENEITNLKEPKINKNIAPLKKVLSDDFFEKYEKASINQKNELWRSIIESIEVSVDGNITINFLP

SEQ ID NO: 21921 - protein, 502 aa, synthetic construct
MKAVMYLRKSRMEELSNEEETLERHKKSLTEFAKTNKISITKIYEEVVSGDTLYSRPQMLQLLADVEANKYDAVLCMDIDRLGRSSMSDQGVILETLKQNDTKIITPRKFYDLNNDIDETYSEFESFMARQELKIIKRRLHTGIKRTIKDGGYIANAPYGYDKVYKDKIPTLAINEDEAVFVRMIFDMYVNQGIGSLTIAETLNSLGAKPRRSDKFGRTSIVAILKNQVYIGKIVWDKKKHIKKGTKNNTKHITIYNKPEQWTVVDGLHEPIINNELFESAQEILKNRYHPPYYKGTVENPLAGLVKCGNCGRTMQRQYMHRGERGEWETILCMNKGCIPSAKLAYVEESILHFLYDEMNNIAVELKTQQLPKKDITLLEAALDATEKEISTAKQQRSRLHDLLEQGVYDIPTFTERSKALEEKLATLQEQTTAQRDAIKKAQGTNKLKMYKKIKSVLQAYETADAQKRNMMLKSIIREIVYKKEQKSKPHDFALSISFKDL

SEQ ID NO: 21922 - protein, 502 aa, synthetic construct
MRTAIYTRYSTDNQTENSTQTQIARCKEYAASRGMTVTAIFSDEATSGMKTNRAGLHQLLDGVQVGQFDAVLIYDQSRLSRDIVDWFTLRKTLELYNVSLFSIGGEFGDIQDPTNFMMESVQAVFNQMHVLTTRKKVIDGMKNMATKALFTGGTPCLGFNIKEKQFVINDYEAHIVTLIFDMYADGKSYNNIIDHMNAKGYKTKTGKTFGLNSISDLLRNEKYIGTYTYGKTEKRNGKRNSHKESPNVMKIENAIPRIISEEVWKKVQERLASNKRAKNSAKVEYLLSGKIYCGECGCAMCGEHRRAGYYYYACSGAKRLRNCKKKGIRKEEVEGYVIAQVKKMLTSETIDNLSLCLYNSMQGVNNAIDPLQAALNKRLAEVRKGIDNINNAIADGVYSSTTVSKLKDLEKQQDNLLLQRSELAQTKKNTTKIYEEVKQALQFAKDNAGNEKLLIELCVERVVCYDNGEFDFYSNPCGLDTKSMDFKGVAPPAPNKKSCMSI

SEQ ID NO: 21923 - protein, 524 aa, synthetic construct
MPYCMYLRKSRSDVEAEQRGEGETLARHESALLELSKKLHLPIATIHREVESGETISARPVMQQLLREVEAGVWDGVLVMEVERLARGDTIDQGIVAQAFKYSDTKIVTPAKIYDPANEYDEEYFEFGLFMSRREYKTINRRLQRGRLASVNEGKYVGNIPPYGYDRIKLEKQKGYTLCPNKDESPNVRLIYELYTKGKPQPDGTMRRLGVSLIAQELIALKIPARISTWKPDTISGILSNPVYMGKVKWGWRPQVKKVVDGEIVCSRPCSTDYVLVDGLHEALVDEVTWQKAQQLRVSNRPTQIGRNHKMANPFAGLIVCGYCGHKMARRPYSNGYPTSLICRTLHCKNVSSQFTLVEKRALQALSDWLEEYKLTIKNNSMPHSNELMTAKYKALDKLNAEIATFDAQMDNIHNLLEQGVYTIDMFLERSKKLSDRCEDAKTERDELQKQLNAYKQKQQTLGQIVPKVEHILSVYDQTEDPKLKNDLLKEVVDHIVYTKKEGGRWNPEKITDFKLDLYMCVPS

SEQ ID NO: 21924 - protein, 545 aa, synthetic construct
MGKTLFGQTIGMDYDFEVYKQYPIIKEANTDFGYRREVGNQPKKLRVASYCRVSTDEELQLNSLENQIIHYTNYIRSNPEWQFAGIFSDRGKSGTKTQSRTGFNKMIRYARSGKIDIIICKSISRFARNVLDTLNTVKLLKEDGVRVIFEKENIDTGSMSSDFILTLLSATAEEESRSISDNINWSLTKRFESGEPIFARLMGYAKVDNKPWVIVEEEAKIVREAFEEYLKGNTPTQIAKMFIRKGYKKANGRRDWSAIAVRDILKNERYTGDALCQKTYTKDHLSHSVAINNGERNQYLLKNHHDPIVDRGTFEKVQKLLSKNSRKVIRDKRKTYPLSGRLVCAECGSNFQRFICRGKVTWRCGKHTKSKLLCSMTGIREENIRQALTKAFIKKYQAYDKEHEIQITKLIKELQRAESRRENEQNQLRVELEKALLAENAAIIKLKDTTELTQKRIEIEEKIAKKELLWELFDEDGIYRKESMEELERLKSMSVTKTEFEELNNDIKFIRAWVILIKAVSPYLFSITWINGEETEIMIEKGDDR

SEQ ID NO: 21925 - protein, 554 aa, synthetic construct
MSIYQALNTGPKVTVIPARLRTARNEENPDGQKKRIGVYVRVSTDSPTQATSYDLQIAYFKEYVQKNPNWELVDIFADEGITGTSTKDRLGFNRMIKRCKKKEIDYILTKSISRFARNTLDCLYYIRMLKELGIGIFFQKENLDTLDSKSEMILTIISSLAQEESRSISENTKWGVQKRFQQGKVHIPTTYFLGYDTDEDGNIVVDEEQAKVVRRIFSEYLSGKGSSTIAKDLMRDGVLTARGKPVWTSDSVRKILKNEKYMGHCLAQKTVTLDYLTHKRVKNRDHQPQFFVKNTHPAIISEEDWNAVQQEFKRRNHMLHDPDGKYRMGFSSVAPFSNKFFCGECGRPVVRRRLRTHSKDREKIYFSAWHCRVACKLDKEFKDCKSKYVWEEEIEKAFMKLLYDLKENKEKVIEDTNRAIDDCSLTEEEELRLEELSIQIERITNRISEMASREPSRNDSIYDATMRQLMYEQEILQIEYEGLDENKQEGIYLKNNLEEFLEYLDEINEPTDDFRTDIFLNTVEKGIIYDNHRVEFKFKCGTSYTTWAKRKRNK

SEQ ID NO: 21926 - protein, 509 aa, synthetic construct
MKIAIYSRKSKETDTGESIKNQINMCKDYFTRQFDDCIFETFEDEGFSGGNINRPSFQRMMQLAKHKQFDVITCYKIDRISRNTLDFLTVFEELKSYGVKLVSVTEGFDPSTPAGKMMMSMISSMAEMERMNIAQRVKDNMLELGKMGRWSGGTPPTGYRSVSVINESGKKETYLELIPEYVDKLNLIFSMIAEGYTPGQVSKKTGLPNRTISNILTNPVHLAATKESKSYLESIGYKVYGELNGKGFMPYNRRPRVNGKAMWNSKDMFVSTSKHEVAVEPTIWIKANQAFKSRGAEARPRISPNSFLSHMVKCKCGSSMFVFPGHPNKDGEVKYYFRCSDKKYKKTDCESKWLPVELVEEYLLKTLQDISLDKSILYSYLTSNEDVNYDKLIKETQKEIAKKNKDIETLTEKLILIEGPAVNIITNKINTISCEITNLNEELFILERKKIFQDQDKINIDTLHSLIVTAVSSFDVFTVERKRIEIKSFVQEIIYNGKNDIHIKFIGGV

SEQ ID NO: 21927 - protein, 534 aa, synthetic construct
MTVKRVYCLYRVSTLGQVEKDDIPMQKTSCHEFTAAKSGWQIIKEFSEKGISGFKVSAKDRDAIQEIQKDAVEGKFDILLVFMFDRIGRKEDETPFVVEWFVNNGIEVWSVNEGQQRFDTHVDKLTNYIRYWQASGESIKTSVRTSTRMGQIVQEGKFKGGVAAYGYKLEKLGRLNKKNREVYDIVINEEEAAVVRMIFDLYVNSGLGTHNIATHLTELNILTRKGNNFTSPSIRNILKNPMYRGILRSGDSWSKPFDHLRIIDDDTFQRAQDLAKQRSNEYEDKRTFPRTTRSKNCLLSGNIFCGHCGARLTATPVGADYSKKDGTVVKHRYWRYVCYNRTRHKHLCNGQTGYKSSKIDSVIEELLMDFFSDFKEVSMSDFMDAQYSDKKKECQAKLNLAQRSLKKHTSDLNSLKDEIVKAIRGKSKFTPELLNDAIEKVTQEQKQAELDVAKFAEEYSDSEKIVTELKAQHNRLLNWANIFEDSEIEVKKMIIAHLIERITVSTGYVIDVDFNISVEQFINYKNKKRFITKL

SEQ ID NO: 21928 - protein, 550 aa, synthetic construct
MNRQSTFSTIRKSTLAFEEAKITALYCRLSRDDELAGDSNSIVNQKAILKKYAEDNGFRNIEFYVDDGVSGTTFDRPDFNRMIADVESGRIGTIIIKDMSRFGRDYLKVGYYTEIMFPEADVRFIAINNGIDSANQADSDFTPFLNIINEWYAKDTSKKIRAVFKSKGQSGKPLCTNPPYGYIKDPEDKLHWIIDEKAAEVVRDIFRLCMAGFGPTQIAKQLEKRCIDTPTVHLRTMGINTPARPPENPYAWSARTVADILAKMEYLGHTVNFKTSKKSYKSKVKILNNPEDWLVFKNTHEAIIDEGTWETVQKIRDGKRRPSRLGEMGMLSGMMFCADCGAKLYQVRGKGWTHDKEYFVCATYRKKKGMCSSHQIRNVVVEQLLLEDLRRVTSFAKDHEQEFIRIVMNNSEKELAKELRQSQKEYEQAQTRFADIDKIIRKLYEDNVMGKIPEERFYKMSAEYEAEQKALEERITKLKHTFDTANEQSLNTDRFLALVKKYTEITELDAEIIREFIDKIIVFKAEKVDGRRTQRIQIFYNCIGAIDLPK

SEQ ID NO: 21929 - protein, 529 aa, synthetic construct
MAKKVRKIEPVKQRVILELQPKKRVCAYCRVSTDSREQQNSFSAQVEYYKTFIEKIDDWEYTGIYADEAKSGTQVKKRDEFLRMIRDCEDGKIDMIITKSVTRFARNTVDSIEAIRKLKALGIGIYFEKEHINTLSEKSEQMITILSSLAQGEAESISTNNKWAVKKRFQDGTFKLSDPAYGYTKDEDGNLIIKEGEEKIVRRIFKEYLNGKGSYLIARGLNDNNIPTIRSAEEWQDSVVKAILQNPIYEGDLLLQKTYTTEVLPFERKTNKGELPQYFIENNHEPIITREEGQMVRDIYEYRRNQMGVDDSGKYQNRYELSSKIICKECGSTFRRQKIYIGKPYEKIQWCCVQHIRDISKCSMKAVREDIIKETFLTMWNKLVSNHTNILYPLLESLKNLRTDHEQEEEIKKLNSRIMELTEQSHILSRVVSKGYIDSAIFIERQNALTVELEAIKKMRNQCLEDNGYEKEIIGTVRLLEIIRYNPEIIEVYDENLFLNTVENIIIGENYEITFKLINNMELTEHYEK

SEQ ID NO: 21930 - protein, 553 aa, synthetic construct
MAVAVAKKNVAFIPAQTIYDRNVRVELKTLRVAAYCRVSTTLEQQEGSYEAQISYYTEKIKSNPNWKCAGIYADDGKSATNTKKRDDFNAMIDDCMAGKIDMVITKSVSRFARNTVDSLQTIRKLKEKNIAIYFEKEGVNTLESTGELLITILSSQAQEESRNLSENTKWGIVRRYENGIITVNHKKFMGYTKDKKTGELVIVPEQADIVRRIFRLYLEGSSIGEIIKALEADKIKTVTGKETWHPGVIEKMLVNEKYMGDALMQKTYTVDFLTKKRVKNNGIVPQYYIEDNHEAIIPKELFYKVQEEKARRASLNKAAVTRKANKLKKEKSKFSSKYALTEILVCTECGHPYRRQTWSKYGQKGAVWRCENRLKNGTKATCKHSPTLKEEPLHNAIMTAINNVVENNGDFIGAFRENVIRVIGGYSTKDIPTEYDEQIESLQKEMLTLIEENAKQGAVAEDFDGEYKRISEKINELKQAKLKLVREKKQAENYKEKLTEMDSTLKTVRPQVREFDEDLVRRLIKSIKVNKGERLEIQFESGIVMEQMVDHYD

SEQ ID NO: 21931 - protein, 488 aa, synthetic construct
MNAVIYARYSSDNQREESIEGQLRECMAFAESKGLTVIESYIDRAFSAKTDNRPEFQRMVKDSIKRKFEVVIVWKLDRFSRNRYDSAHYKAQLKKNNVKVVSATESISDDASGILLESMLEGFAEYYSADLSEKVIGGLTENALKCKYNGGGMTLGYTVNNEQYFQIDPVLAPIIQDAFKRYVDGATIKNLVDHFKELGVKNYRGGDLSIDAVKLMLKNRKYIGEYSYRDIVTPGGIPAIVPEELFNKAQERMAKNKKAPARHKAKQDMYLLTTKLLCGKCGAYMVGESGTSRNGAFHQYYKCAHVKQHKGCDKKTVRKAWIEDIIVHYAMEKVMDDDYINEVSEKAFEAQSKENTVIPQIKKQLAETEKAINNMIKAIEQGIITSSTKDRLQELEQTKENLQINLAREQMTKPPLDKDQVKFFIMQFRNLDITKEHDREILIDNFVNCIFLFDDRIIFVFNHQADYETVNLQDLECSDINDITALSQ

SEQ ID NO: 21932 - protein, 568 aa, synthetic construct
MIKPRLYSYVRFSSERQAKGSSIERQKASIEKLVKKVAIEHNLEIFEEYNDFGVSAFKGKNATEGALSEFIKHVDSGKIPRGSYLLIESLDRFSRANATRAVNIFTSLLLKGIVVVTGSDEQVYRETNVTNDTLQQLMFSVMLFSRANEESERKSQLTIGSALRKIKRHQQRQPGDPVVAIKEMGQDKWWIDSSSGFVKPHPVYYPIAQKLIELKQKGYSNRLILAYLQENHPAPTEGRSRGKWNMQHASRIIEPAIHGQKVINVNGESFTLDDYYPAIVTKDEYERLKFQIGNKSFAPLKEANPEIPLLSGIGILYCKHCGCHMFKMKSTVKNQPFAYRYVCSSRDSHRKCSKWGFRARTLELALLQLLADRVFVESAPVQSGVENLIADINEQIANYMVAIGSAKSPAMINKLTEIIDQLESQKAEYLKQKQIHDDQMVKMNTAGWDKFKLLDINDTKNTDRLEIRASIKTVIKRIDCERIDTAHNYFFITYRDERTQKLVIKKDTAWTKGRIYVDSTTVTNSQLLESEELVMHSHIEIMIDRDKFLIEHQERFDHPPTIIDDLTE

SEQ ID NO: 21933 - protein, 551 aa, synthetic construct
MSNTEREIIVIPASESLSLQGRRNRQMRVASYSRVSTDFEEQLTSFHAQKSYYTDLIMRTPQWTQAGTYADEGISGASAEKRPDFMRMIRHCKKGKIDLIITKSISRFARNTLDSIGYVRKLKAMGVGVIFEKENINTLEENSEVVLTILASLAQEELNSLSLNVKMGKRMAMQEGKVFFQYEKCYAYKKGTDGQPEVIPEEAEIIKRIYTSYLAGESIGAISKALYADGIKSHAKSGEWTESTLRGILQNERYCGDVLLQKTYVTDPISKKIKKNNGELPKILIKNNHPAIVCREIYDRAQQERSRRGSKRKVSKASVTEQSKYSAKYALSELLICGECLTPYKRTTWTKRSGEKQIVWRCISRLDYGTKYCKDSVTIDESSLHEAIMQAINATRGSRHEMIPYLTAQLTQTFRDNAKGDVDVEQIENRIAELKAQTMELITQSIGNNTVVENEGRLRAMSDEIKALCDVLAEYRRSCNTENTIENRVAVITEILENEPEQSDIYNDTLVRQLIDTIKVMGEDRLEITFKCGFKYEQSILPKVKKLNTAS

SEQ ID NO: 21934 - protein, 526 aa, synthetic construct
MNTLKIQGSSALTPQREIIRIKATADVIPQKLRVAGYARVSSDSADQLNSFSAQVNYYQRLIEKNSGWELAEIYADEAVSGVSTDKRDDFGRMLADCQKGKIDRIITKSTSRFARNTLDAIRVIRELKDMGVTVYFEKENLDTATLTSENLLTLYSLFAQEESLSISKNCKKGNRMRMEKGVYVSSNPPYGYRLIENQLVVYEPEAEIVCRIFTEYLGGSSITRIAQALMEDAVPFKNGRMKWRHQAISNIIKNERYVGDMLLQKTYSEDALPYRKCKNKGALPKYYVRNTHQSIVERIQYELANILLKERGEHINSECGEYPLSRKIRCKECGTAYRRKITNQIPYWVCRQHDNNKDDCGGERLREDAVHEAFVRLYNKLKQNYAGILLPMLSGLEKLQELKTRNNPEISTLNKQIAELSEQNHVMNGLLSKGILDSALFISQTDELNRKIRSLKVTKARLLSEQESDGVLDKTEDLVEIMENGPDRISGMQITLFHEMVEKIIAHDTQTVNFILINGLVLTERL

SEQ ID NO: 21935 - protein, 527 aa, synthetic construct
MSYLMYLRKSRADKEAESRGEGETLARHEQLLTELSVKMGLEIGAIYKELVSGETISARPKMQQLLVEVMQGMWEGVLVMEVERLARGDTKDQGTVAEAFKFSNTRIITPMKTYDPSDEFDEEYFEFNLFMSRREYKTINRRIQRGRIAAFRDGWYIAGTAPYGYEKVKHKGDKGYTLQIVPEEAKIIKYIFELYTAGEPQEDGSYAQFGSYQIRDRLNELSIPSRSEKPWSASSIVDILNNPTYCGYQRWQWRKVQKQMVGGKIIESRPKDADCEKVRGRFDPIISEDTFNLAQKIKAGKPLPINTSTALQNPLSGLVYCAKCGNLMTRQPSNTRLRYAVLRCANSKCNNISSPLSLIEEQVIEGLKEWIPEYNVEWPEQPEKEGETTLTVLENSIGNIEEKLNQTIKQLNKTFDLLEQGVYDLETFQDRRVTLDSQKAELEEELARIEKERARITAMEQARKDFIPAIERLIEAYWEIDDVITRNSMLRNVIDRIDYLKTERNKKGAGNTANFTLNIFPRIPENR

SEQ ID NO: 21936 - protein, 566 aa, synthetic construct
MNDGLIGNKLEKLSCVIYIRVSLERQIDGWSLQGQENELRAFADYKKMEVKELFVDEGQSGKSIEGRNSFKNMLEYVQHNKVDYVLVYKLSRFARNAKDTLVALDFLKKYDCNLLALKDNIDSKEALGKLMVTVLSAVCEMERENINAQTMLGRITKAKSGKWNGGFAPYGYILENGELIIDEEKSEIVKSIFDKFLNSDLGYSGIAALLNRQGIKKTPPLNSKRTFTDWSSASVKHILDNPIYTGRMAYGRRKTEKISGTENKYRQVKQDEYIITNEIVFEPIVSIEDFEKTQLKRKATGVKGNPKIGRERVHMLSGILKCPQCGSSMFIDKNIWKNKDGEKKESFSYVCGHYKNSRNGECSRNGVKADLIEKEVVDFTSRLIKNKRFAEDINKRIGTKEDTSEIENELNNLFAEQRKLEKNKFRLESDIDNLDEEDRLVDRKRADMNKRLNKIYSDIYNIEEKIIECNARKEAVLKESLDKDTIYNMILVFDKVFPKLSDTDQRNFMQAIVKEIQLYNKEEIQKSKTSVKSIAYSFPIDPEVAETLRDNVDIVETVVLLNRKVQ

SEQ ID NO: 21937 - protein, 530 aa, synthetic construct
MLDPSGIYYMYLRKSREDREAEAHGEGETLARHEKRLNELAEQLKITISHIYREVVSGETIAARPEMMRMLSDIENEQPDGVLVVELERLARGDTRDQGLIMETFKYGNTKIITPMKTYDPNDEFDEEYAEFGLFMSRREYKIINRRLQNGRRASTKEGKWISNVAPYGYKREKLPHEKGFTLSPHPEEAKIVQFVFQLFTEGTPESEGLPLGPTQIAHLLDDMKVSPRKSDHWETGVIKGILKNYAYIGKLEVGKRKQLKVIENGTVKRSRPINNDSEIFDAIHPPIIDEHVFYAARKKLEANFRPTNFSTIKSTLAGLLYCSECQKAMYRRPAGARNPNDTVLCKTHGCPTVGSFYYLVEERLLQFLEKTLKEYKIRIQGENTGDWTEVLERKKAVLTEYKNETDILNKQLESVYDYFEQQVYSLDLFRKRSGDLNKKLEDNEKLTKSIEREIEEIKERIIRKEQFIPYFENVLKSYSKTDDPLRKNALLKQIVDHIYYTKIKKGTRLGQGVDSFTLDVYLKLPFRDL

SEQ ID NO: 21938 - protein, 426 aa, synthetic construct
MKIRILEPVFQGLLKKKRVCAYARVSSDSKRQEDSLENQTDTYERLITSNPEYEFAGVYADQGISGYCESRPQFQKMLRKARAGEIDLIITKSISRFARNTVTVLKVARELKELGVGIFFEEQNINTLSGDGEMMLAVLASFAQEESRSMSENNKWTIKKKFEQGEIMINTERFLGYDKDEYGGLTINQKEALIVGFLYDMTLFGLGNSRLKSLMNFLGVKTVTSGEWNESTVNGVLTNEKYKGDYHLQKYFTPENKRNQSRLNRGEVQSYYITDNHPAIVSEEKWNQVQAERERRKKNRNIAADGTEKYQNRYPLSGMLICPYCEKNLRRRMVYKGKIQWLCSTYIKEGKQACRGVRVDDTEVIKQNIKEPTVVEEVIVHGKKYYRYTRKADFISRREYEPECTEVTGGGILQGINRPRRTVIKL

SEQ ID NO: 21939 - protein, 444 aa, synthetic construct
MAAYCRVSTAQEEQLLSYENQVNYYTTFINENPLYEYAGTYADEGISATNTKKRDEFKRMIADCRAGKIDMIITKSISRFARNTLDCLNYVRELKELGIGIIFEKENINTLDAKGEVLLTILSSLAQDESRSISENSTWGIRRRFEKGQHKMSTKRFLGYDTNEDGKLVINRKQAPIVVRLFQEYLDGKTPDYIKRIFEKEEVPNWDSGTKWQPSTLMSMLENEKYKGDAVLQKSYTVDFLSKKRVQNQGEIQMFYVEDDHEAIIKPRIWECVQLEAQRRKEYLEEHGTNSYSHRPETNPFASRIVCGCCNKVFARKGWRSSTGVDRKVWQCSERYKVKGLLGCGNRHVEEVTLEKAYVMAWNAILENREQFIRRWERQEQSENMLEGYRAERFIEFVTGEERIQKFDTDFMLKTLDHIKVFADGTLRVMFLDGTEIDCKSEEE

SEQ ID NO: 21940 - protein, 630 aa, synthetic construct
MKKCFLYHRISSDQQLEGGGLARQAELLEAYLKRTNLCAEMDDPEPVVITEQGGVSAFKGHNMELNAGLGSWMQQVRDGMWDGSHLVTESIDRFSRQNPFTVMGYINDLVNHNVSIHDVKMNIVINLENSALLPMVLMNAERAHMESRYKSDRIRDGWKRKRTNAFNNGTIVTNRRPKWIDVIDNKYVLNDKARIVEEIFRLYLTGIGCPTIAKVLQSKGEEWQFDRPWRGGAVHKVLRNRRVTGVIFISEIIRDYKSKEKPVDQKRYEMEVYPPVIDKEQFDLVQILLAERKPVAGRTNGGIITKRIKNDDGEFLKDKNEKQIYVDVDSGKEISKSNIFSGLFRCTLCGEAMYHNVIVSTRKPKKSTSSVKDEYRYIRCVAERDKLCTNKALRYETVEQFVVEHVKQLDFSKVIKPNMVNPEVELIRLKIEEEKKHIREYEQGIDRLRNAGKKIPFDVLVELEESQTRLVELETRQSTFREIQVDTDVLKNIDTAMLFDVTNIEIRSRIEQELSKIIDRIKLHRDGRNYTITIQYRDTDLIKHVLMVEAKKEPVLLAGISIEKVGDMMVYSTPSFMIGHEEGTMPRFQVVEDQPLSQADYVILMSYVESIESNNIVANWMRDNHNFLFS

SEQ ID NO: 21941 - protein, 591 aa, synthetic construct
MPNAVRYHRFSTKRQDKGVSLDRQNELTAALCEKNGWTIIDTLEDKGRSAWKGDHLRVGELGKFKVRVDAGEFEHGTFLVIENLDRLSRQDVKLARRWIEDITDHGIKVAVCSPEIVLDSEALSGSNIVSMVQYLLEAQRSTGESSRKSQMSQKNVAESLRKARSGIVYSARAPMWLRGTKGTKFEVIEERAALVQQIYEWSASGLGYHAIATRLNGSVEPWTKASKKGDGWKVGYIRDILLLPAAEGEYHVEEGGKRTGEVILAYYPRIVDADLVQRARDAIRRRDGTGGAGRREARNLFAGRVKCGHCGDGMVRIVQRNRQKTQYEYLKCTRFNAAGAPKPDDDTAARKRRCTNATMFRYDLFEKAALKEILHLALDNSFFIKTDDISPLAGNVADLSKAIELKEAEQRRLLAFIMKVDDAPEAEDMLEQLRPELRKLKAELEAAQQDLDAAKGKVSPDEHLRRVLEVKEAIYSKDPEEQEQARRKVRDAIQSVVTSVVCYSRPPLPGVKRPEREIQMALAGGYLAYQFDGEGNLLKKISLQGIPDMMRGIAATDGGALVETIRQRRLQAADAEKGNNAPALPAPIGLH

SEQ ID NO: 21942 - protein, 600 aa, synthetic construct
MAQKLYSYQRWSSAVQADGTTKARQTKAAEEYAKKNGLEVEEIVDAGVSGFKSANSDESGALGQFLRAVDEGLIARNAVLFVESLDRITRDEIDTALELFLGILRRGITIVTGMDNKVYTREAIKGNPVDLLTSILMFSRAHEESKTKQNRTNGNALALIDRFLKQGLPVNIKSVGSHPWWIDDSGSMYEAVKPHPVLWACAQFAIENFMEGVSVFKVTQILNEKFPHYYKGKAWAMANIRKLRINKAVYGVREVTVGGKTYVLHNYYPALITEGQFLRLQQIRTTTKYIGKVGEGRVVTDGEGNSKVIAERNNINLLSGMKLFRCGHCGGTMMAMRHGDTIRYLCEKGRGYHHDCKTWSLPGILVEHTLMLVTTIAYIELQQKGQGDKADYTQQINAMESTINGYSTQINKATKLAIALDDVDVDELAETIKELKAKRDNAIIELEVLQRKQLLANDSTFETIMMDFFTYAQYGVLQDPVHEYRSKLRDVVYSAIGDVRAWKHDRRLFISFQIKGNDEYYNFSAGNTPYEWGCYVGALPFSQQELEVADGDVPEEVLERVRERYAQLQAANMMMLHQAKELLSHVGYPELNSRLFWPRK

SEQ ID NO: 21943 - protein, 546 aa, synthetic construct
MGNLEKGLVYSYLRFSDPKQSAGGSTDRQIAYAAKWAAEHGLLLDTRLSLRDEGLSAYHQQHVKSGALGVFLRAVEDGRVPNGSVLIVEGLDRLSRAEPLQAQAQLAQIVNAGITVVTASDGKTYSRQRLKDNPMDLVYSLLVMIRAHEESDTKSKRVKASIRRLCEKWQDGSYRGPVNQGHDPAWCKQTDTGWTFDEARAKAVRRAIELYKDGLSGKRIASALDAEGLRLYVSSKQNIGTQVYRILEMSQLCGHKPVSVDGEKYLLRDYYPALISEPEWHELQRIKSEAGRRRIKGDLPHIITGIGICFCGYCGKPMAGQNLASKPRAPDGRIRDGYRRLLCASAAAYGTGCPVPGSTSVAPIERALMSYCSDIINLQALYSGDRTQGPRTRLRAAQTQAQELERQLEVLAEALLAAASEGTPIVFARKARQLEAELATVQREIQHAERELANATRTNNEGADKAWRDLTAGVEAQDVTTRLKARQLIADTFERITVWHHGIRPNPDATERDYYIDVQLIAKGGISRLLRIDRAGTWVTSEDADL

SEQ ID NO: 21944 - protein, 567 aa, synthetic construct
MMNDGLIGNKLEKLSCVIYIRVSLERQIDGWSLQGQENELRAFADYKKMEVKELFVDEGQSGKSIEGRNSFKNMLEYVQHNKVDYVLVYKLSRFARNAKDTLVALDFLKKYDCNLLALKDNIDSKEALGKLMVTVLSAVCEMERENINAQTMLGRITKAKSGKWNGGFAPYGYILENGELIIDEEKSEIVKSIFDKFLNSDLGYSGIAALLNRQGIKKTPPLNSKRTFTDWSSASVKHILDNPIYTGRMAYGRRKTEKISGTENKYRQVKQDEYIITNEIVFEPIVSIEDFEKTQLKRKATGVKGNPKIGRERVHMLSGILKCPQCGSSMFIDKNIWKNKDGEKKESFSYVCGHYKNSRNGECSRNGVKADLIEKEVVDFTSRLIKNKRFAEDINKRIGTKEDTSEIENELNNLFAEQRKLEKNKFRLESDIDNLDEEDRLVDRKRADMNKRLNKIYSDIYNIEEKIIECNARKEAVLKESLDKDTIYNMILVFDKVFPKLSDTDQRNFMQAIVKEIQLYNKEEIQKSKTSVKSIAYSFPIDPEVAETLRDNVDIVETVVLLNRKVQ

SEQ ID NO: 21945 - protein, 511 aa, synthetic construct
MIAIYARQSVDKKDSISIDSQIEFCKREVPEDEKIKVYKDKGYSGKNIDRPSFQQLLEDIKKGNITKIVIYRLDRMSRSLLDFAGLVETFNEYGVEFVSSTEKFDTSTPIGRAMLSIIMVFAQLERETIAGRIKDNYYERGKKGMFLGGNVPFGYDLSPHAIDGIKTNKLVPNSNAETVRKMYELYANGNLSLGQISKLLTEEGTLTLYEKAWDSAKISRTMKNPVYVKADADIYLYLQNLGCIIHNDITEFDGKHGLFLFGDKVKTGLKNHQNISGYTVSIGPHKGIIDSKTWLKCANKLIANKQIKNSGKSNYSWLSGMVSCGKCNYSMTISKANLSKKHGTYALYFKCSGRAMRRICDADSPRVEEIQKEVQEKMIKRLEQLKADMSNNIVETDNSDNNNTINDLKIRISVIENDIEKLLDSLLAANNVAMDYINKKITKLDEELRTLRLQLNQELSKNKTNVTNILELEYVLNRFDELDLDHKKEVSKLMIERVYIYDKKPRIVWND

SEQ ID NO: 21946 - protein, 526 aa, synthetic construct
MYQPNSTSAEAPKITLIQARKPEIAKLRVAAYARVSSDSEDQQNSYIAQVDYYTRHIAAQESWELADIYADEGISGLVANKRDEFNRMIQDCRDGKIDRVLVKSISRFARNTKEYIQYVRELLRLGISIHFEKENIDTGKMTSEQIATIYGAFSQMESQNHSNNMRISVRIRMEKGDYLSPSEPYGYRLEGRTLMIIPEQAEVVRRIYAAYLSGQGKNDIADELNKAGIPRTKRRTVWHPGTVAYILANIAYTGDMIWQKSFATNEIPFRQVRNKGEKPKYFVENCHEAIISKEDFQRVQALMESRRRQTNGTVSSALLAKKIRCESCGTLFRRKIVNEKVYWTCRRHDRDKDLCPTSQIPEEQIVTAILRMYHKLKRHRTQILSPVLSQLTELREKELRSNRRINDIDKEIAQLTEQNLVLVRLKSKGYVDSALYLSQTGEIDFKLRELRRQRRRIMEANGEDSQIKATQAMLDYLEDSPEYLAELTEEIFETLVENITISSETAMSISLHNGLMLKETMERTVR

SEQ ID NO: 21947 - protein, 539 aa, synthetic construct
MPESAVRKVTVIPADPKHNQKDIRKQRLRVAPYCRVSTSSEEQLDSYQAQIEYYTEKIAAQQEWTMVDMFADEGKTATSTKKRKDFLRMIKACEKGKVDLIITKSVSRFCRNTLDGLDYVRRLKRMGVGVFFEKENVNTLYMDNEMILTFMMSQAQAESESMSGNIRWGHRKNFKDGKVYFHYAGFLGYRRGENNLPEIDPEEAEIVRRIFSRYLIGHSVAKIIADLEADGIKTARGHKKWNDGVIRGMLRNEKYMGDALLQKTYIADLFTRQTKKNTGELPQYYVENSHPAIIDRLTFQRVQEEMARRSSLKKVSTAAKTELAKYSGKYVLTELLSCGNCGSPYRRVTWTRPEGKKIVWRCINRLENGKKFCKDAPTLEESRIHTAVVSAMNEMFSQKSLKAILQDSIRTALLPENGETSLAAIDSRLPQLREQQYRLLQLAAAVGADSTQYDEELKKVSMEFSALVAKRSELEKNRQDTEQADERAEQLAAELEAVDTGITTFDEVTVRQLISAITVLSEEKLLIRFKDGTELEQII

SEQ ID NO: 21948 - protein, 521 aa, synthetic construct
MKKITKIEGNLANSFIKPKTRVVAYCRVSTDSNEQLVSLQAQKAHYETYIKANPEWEYAGLYYDEGISGTKKENRSDLLRMLSDCETGRIDLIITKSISRFARNTTDCLEMVRKLIDLGVHIYFEKENINTGSMESELMLSILSGLAESESISISENTKWAIQRRFQNGTFKISYPPYGYQNIDGQMIVNLKQAEVVKYIFAEVLSGKGTQKVANDLNQKGIPSKRGGRWTATTIRGILTNEKYTGDVILQKTYTDSHFNRHTNYGEKNMYLVENHHEAIISHEDFEAVDAILNQRAKEKGIEKRNSKYLNRYAFSSKIICSECGSTFKRRIHSSGPRKYIAWCCSKHISNITECSMQFIRDDDIKTAFVTMMNKLIFGQKFILRPLLNGLRNQNNAASFRRIEELETKIENNMEQSQMLTGLMAKGYLEPALFNKEKNALEAERERLLAEKDQLTRSVNGNFAKVDEVDRLLKFATKSKMLTAYEDELFEDYVERIIVFSREEVGFELKCGITLKERLVN

SEQ ID NO: 21949 - protein, 484 aa, synthetic construct
MNSAYLYVRVSTDEQKKKGYSLPEQEDRLLKYCNYNNIEVKGIYREDFSAKNFNRPEWKKLINVIKSSPKQQENNIVFIKWDRFSRNIEYAYEMIGILRKYRTTATAIDQPIDFLVPESTVMLAVYLSIPEAENRRRALNTANGIRRAKQMGRYPGKAPLGFLNITEIDGRKAIVPKQPEAGIIKWVFNQLAKNTCRIEDIRKIADDKGLKCSRSYFFKLIRNPAYCGLIPIRLTNHEEYMVKSNHIPLITEALFYEVQRIVTTKRKIETKNENLSAIFFLKGFLKCPICGRKLSASFSKGYSKKYPYYHCKGRCTTRINANLLNTKYEEALLKLRLSTNALPIFNYILKDWNTNTQKTSYERENRQLQRKLKDAELNLSQVRKLFISGILKLEDYTDLKEEYLINIHSLQRELQHTNTKLDNIEKRLLRNNWPLENIMKGFSEMDTTDKKHVVSLFPPAQINFKSGDILIKPDPALSKLLLHQ

SEQ ID NO: 21950 - protein, 498 aa, synthetic construct
MRVCIQLRKSREDIEKEKFGIDTLKAHESTLLELAKKRQYNVVKIKREKVSGGSLYARPEMLSTLDEIEQGYYDGVMCMDIDRLGRSGMKEQGIILDTFRENGVLIITPDKVYDLNNDSDMLHTDIKSFIARQELNLIKKRLANGRIRSVKDGQYIYTVAPYGYKKITINKLKTLEIIPEQANIVKLIFDMYVNQDKGAIVIARELKSLGALNASGNSNWSTRTIKAMIHNPAYYGMVYFKKRIYKLIGNKMVSTVNKNPIIKKGLHEGIISHELFQKAQEVAKSRYNVSVPVNEDKELKNPLAGILKCCCGYAMYIKKDKKAERLNCSNRCGSKGTNIIRVEKRVLDDMKEYFKNLTIDFEQLNEDNKHDNDFKKIEIIQINIDKKKNQLNKLYEFLEQGIYTTELFLERSKIINDELYELQDNLDALKLKVTDIDIIQENIKEIPKIQNILDIYETLSIGEKNIFLKSIINRITYYKNTDAAPDDFKLIYDMKISN

SEQ ID NO: 21951 - protein, 518 aa, synthetic construct
MRQVITYLRFSSKPQERGDSIRRQEELFDRWLKGNPDATIVDKFMDEGQSAYHGKHLKGDFGRMLQSIQDGKYPSGQTVLLVESENRLNRQSARKTENLVDLITGKGVDVICLESGKVYNSTNIDDLDTSIQLKIAAHIAHQQSKEKSIKVSAAWENRAKLALSGEQQLTKMVPGWIEPDTRKLNEHAQTVKTIFNLLLSGESLHNIARYLQANNIKSFSRRKDANGFSVHSVRTILRSEATVGTLAASKHNDRPAIPDYYEAAVDVARFNQAQEILSKNRKGRTPASDNPITINLFKGLMRCQCGASVQPTGIKNSYQGVYRCNNYADGRCDVPTIKRKAFDSWMITNLVGMLTKPDDGLSARRMAELTYQVDMLSKRIKKTVALISELDDVPELKEQLRDLNRQRSQMLSELEALQHTESLTDKSLPQLADIDLLSKAGRVEAQLILSKYIKTITIQPHTFSVSLNNGNMFEGLSIKPHDIYPEEAAMYTQNRMNQLVDDELGLLTGIKGVMRFKN

SEQ ID NO: 21952 - protein, 550 aa, synthetic construct
MKIAIYSRKSKYSTTGDSIENQIQMCKDFAESKYRNEELEFDEYEDEGYSGGNLNRPQFQNLINNIKKYDVLICYRLDRISRNVADFSGTLTLLQNNKCDFVSIKEQFDTSSPMGRAMIYIASVFAQLERETIAERIRDNMMELAKMGRWLGGTIPMGFDSEPITFIDENMKERSMTKLIPNVEELKVIELIYEKYLQLGSMGKVVTYLLQNNIKTKKGKDFTLGSIKLILTNPIYVKANREIVNHLKSQGITVCGDVDGKKALLTYNKTTGISDDVGTKTIVKDKSEWIAAVANHKGIIPADKWLQAQNIKDKNKDSFPALGRSNTTIASRVLRCDKCESTMGVSHGHVNPSTGNKHYYYNCTLKKRSKGVRCDNKPAKAAEVDEAILITLENMFKTKSSIIDNLKAKNKARRIEMLSSNRVDAINKIIEDKTKQIDNLVNKLSLDEDLTDILFKKIKGLKAEIKELEDELLTLTSENIKLNEDEVVLDFTEKLLEKCSIIRTLDILEQQQIVDALIPLVTWNGDTEVLNIYPLGSPELELKEAESKKK

SEQ ID NO: 21953 - protein, 494 aa, synthetic construct
MRFQDLGISGYSGANAKSGAFGEFLAAVESGYIEPGSVLLVESLDRVSRQDIDKAGEQLRKILRARVEVVTLVDGSWYKEESLRDSLSMIKAMLVMERAHEESLTKSKRLRSAWANKRKEAESGKIMSRRCVAWLKVSEDGKRFEQIPENVKAVQRVFQLRLDGLSHAKIAKTMNEEGFVTLNQFRSKAGVWSQSTVTELLSNRAVIGFKVPSKSMVVKGVQEIPGYYPAILTEEQFYAVQQLKTGAGRRPSSDRPLLTNLFKGVMRCAKCGFIMIVSGVTAKRSGNYRCSMKYEGRCDAMGISRLQTDKALVQGLLYNAHRLNLSSDNGKVIGSLQSELETLQKQRERLVKLAMLTEDTEVIAVELRALNKQIKEAEKAIAEAHQRDQSSKLDTISHLDLTVKKDRIEAQIIIKRMIRCISVDTARKVCKIEFHNGLVFHDYPLDRVIDGARDLELLPVMGYTEIRFGKGNHHTPNHVLMADAPDWVKEPDNT

SEQ ID NO: 21954 - protein, 693 aa, synthetic construct
MLAMPPPGSRVVFYSRYSSDRQKQSSIVGQERLCAAYAADRKWVEVNRFSDAERSGTTTMGRAGLFEMLAAAERGEFDVLLVEDIDRTSRDAADMHQIAKDLEELNIVICTVVSGVVGDFELAFKAVQNKEFIKQTVFKSKRGQELAISEGRMSGSIPYGYRKVHAVDAKGKPINGVREIHEDKALMVVRAHEEFDAGRTTFEICATFNAEGVPGPRGKHWRPGALLGNRHASTGILRNPIYVGEYHFRKTNRRRRKGRMKTRFTEHAERMITQHPELAIVDQDLWDRNQARLAENYDRPFHTKRKVEYVFTGKVHCGVCRSTCIVSDGKYVCTGRQQKGICSNSRRVPREAVETSIFSRIKDHLLNTTILGPALSAFRDEVERARADHSARVDTQGRRLKEINQRIANLMVQLGGAGETPFASQLLLSELERLGAEKRGLELQVKQSPPPPPVGGDVEAIITSISLTLDDLHTALQADDAEAARAKELLRGLITRIVLAPTPGSVTDGRGAGDMTVTVEGPLAALIDLASFNIDRVTKHGHRPIFGLGNAIDGWTFSYVLEWRDPRLATVRADLPIIARLLDEADVPVSMDRMGQVLGEAGPTTGPDKDRSPDQRARNAVSYLQEQGFIRCINMRSPNTGYVWNDRGLSDDDWKARIAQPAMTQTIPVIRLAVPEAVVVVVGRPKPDDDTSS

SEQ ID NO: 21955 - protein, 440 aa, synthetic construct
MAAYCRVSTAQEEQLLSYENQVNYYTTFINENPIYEYAGTYADEGISATNTKKRDEFKRMIADCRAGKIDMIITKSISRFARNTLDCLNYVRELKELGIGIIFEKENINTLDAKGEVLLTILSSLAQDESRSISENSTWGIRRRFEKGQHKMSTKRFLGYDTDEDGKLVINRKQAVIVKRLYCEFLSGKTVDYIKRIFEREGIVNWDGSTKWQVTTLQSMLENEKYKGDMILQKSYTVDFLTKKRVQNQGEIQKFYIEDDHESIIEPWIWECVQLEIKRRKRYLEEHGTNSYSNNTEKNPLASKIVCGECNKAFTRKGWRSSNGETRKVWQCSERYKVKGVVGCTNRHVEESTLEKAFAMAWNEVLENKEYFLRKWEGQEKSRDLLEVYRAKDFRKLSKAAVGEAEMDPNFMLRVLDCIKVFENGKLLVAFLDGTEIECK

SEQ ID NO: 21956 - protein, 426 aa, synthetic construct
MKIRILEPVFQGLQKKKRVCAYARVSSDSRRQEDSLENQTDTYERLITSNPEYEFAGVYADQGISGYCESRPQFQKMLGKARAGEIDLIITKSISRFARNTVTVLKVARELKELGVGIFFEEQNINTLSGDGEMMLAVLASFAQEESRSMSENNKWTIKKKFEQGEIIINTERFLGYDKDEYGGLILDQKEALVVDFLYDMTLFGLGNSRLKSLMNFLGVKTVTDVEWNESTVNGVLTNEKYKGDYHLQKYFTPENKRNQSRLNRGEVQSYYITDNHPAIVSEEKWNKVQAERERRKKERNIAGDGTEKYQNRYPLSGMLICPYCGKNLRRRMVYKGKIQWLCSTYIEAGKQACRGVRVDNTEVTKQNITEPMVVEEVNVHGKKHYRYTRKADFISGREYGPECAEVTGGGVLQGINRPRRTVIKL

SEQ ID NO: 21957 - protein, 444 aa, synthetic construct
MAAYCRVSTAQEEQLLSYENQVNYYTTFINENPLYEYAGTYADEGISATNTKKRDEFKRMIADCRAGKIDMIITKSISRFARNTLDCLNYVRELKELGIGIIFEKENINTLDAKGEVLLTILSSLAQDESRSISENSTWGIRRRFEKGQHKMSTKRFLGYDTDEEGKLVINRKQAIIVKRLYYEFLSGKTVDYIKRIFEREGVVNWDGSTKWQVTTLQSMLENEKYKGDTILQKSYTVDFLTKKRVLNQGEIQKFYIEDDHEAIIEPWIWECVQLEIERRKQYLEEHGTKSYSNNTEKNPFASKIVCGECNKVFARKGWRSSTGETRRIWQCSERYKVKGVMGCANRHVEESTLKKAFVMAWNGILENKEYFLRKWEEQKKSKNLLEVYRAKDFLELTKETVVEAKMETDLMLKVLDYIKIFDNGRLMVVFLDGTEIQCINKDR

SEQ ID NO: 21958 - protein, 426 aa, synthetic construct
MKIRILEPVFQVSQKKKRVCAYARVSSDSRRQEDSLENQTDTYERLITSNPEYEFAGVYADQGISGYCESRPQFQKMLGKARAGEIDLIITKSISRFARNTVTVLKVARELKELGVGIFFEEQNINTLSGDGEMMLAVLASFAQEESRSMSENNKWSIKKKFEQGEIMINTERFLGYDKDEYGGLTINQKEALIVDFLYDMTLFGLGNSRLKSLMNFLAVKTVTSGEWNESTVNRVLTNEKYKGDYHLQKYFTPENKRNQSRLNRGEVQSYYITDNHPAIVSEEKWNQVQAERERRKKNRNIAADGTEKYQNRYPLSGMLICPYCGKSLRRRMVYKKKIQWLCSTYIEEGKQACRGVRVDNTEVIKRNITEPTVVEEVNVHGKKHYRYTRKADFISGREYGPECAEVTGGGVLQGINRPRRTVIKL

SEQ ID NO: 21959 - protein, 527 aa, synthetic construct
MSYLMYLRKSRADKEAENRGEGETLARHEQLLTELSVKMGLEIGATYKELVSGETISARPKMQQLLLEVMQGTWEGVLVMEVERLARGDTKDQGTVAEAFKFSNTRIITPMKTYDPSDEYDEEYFEFNLFMSRREYKTINRRIQRGRIAAFRDGWYIAGTAPYGYEKVKHKGDKGYTLQIVPEEAKIIEYIYKLYTTGELQEDGSYAPFGSYQIRDRLNELGVPSRSDKQWSASSIIDILNNPTYSGYQRWQWRKVQKQMIGGKIVESRPKDADCEKVRGRFEPIISEDIFNLAQKIKAGKPLPINTSTALQNPLSGLVYCAKCGNLMTRQPSNTRLRYAVLRCANSKCSNISSPLSLIEEQVIEGLKEWIPEYNLDWPEQSEHEGKTTLAVLENSLSNIEEKLSQTIKQLNKTFDLLEQGIYDLETFQERRGTLDSQKAELEEESVRIEKEIERITAMEKARKDFIPSIKRLIEAYWEVDDIMTRNSMLRNVIDRIEYLKTERNKKGAGNTANFTLNIFPNIPETP

SEQ ID NO: 21960 - protein, 530 aa, synthetic construct
MLDPSGIYYMYLRKSREDREAESHGEGETLARHENRLKELATQLKITISQVYREVVSGETIAARPEMMRMLADIESEQPEGVLVVELERLARGDTRDQGLIMETFKYGNTKIITPMKTYDPNDEFDEEYAEFGLFMSRREYKVINRRLQTGRRTSSKEGKWIGNVAPYGYERVKLSHEKGFTLSPIPEESKVVQFIFQLFTEGTPESDNLPIGATQIAHLLDDMNIPPRKSDHWETTVIKGILKNYAYIGKLEVGKRKQVKTIENGTVKRSRPVNTNAEFFDALHPPIIEENIFYSAKRKIDANFRPTNFSTIKSPLAGLIYCTECKKTLYRRPAGAKNPSETILCKTHGCPTVGSFYYLVEERLLQFLNDTLKEYKVKIKGENSADWSDVLDRRKAIMANYINESNVLNKQLESIYDYFEQKLYSLELFRKRSADLNKKIADNQRSIETLEKEISDIEERIIRKDEFVPHFENVLKSYSETEDPLRKNTLLKQVVDHVYYTKTKKGTRLGQGVDSFTLDIYLKLPFRDF

SEQ ID NO: 21961 - protein, 542 aa, synthetic construct
MTRVALYARYSSDRQNERSISDQLNLLIQHAAAKGWAVVATYTDAAISGSAMANRPGLLSALAAAERGEFDLLLAEDEDRLARNLEHLAHVANRLADIGAGIATLSTDRVQDMHVAFKGLIAQDFIRNLSLKTKRGMASNAEKGLATGSRLYGYRSQPGGAIEIVPEQAEVIRRIFAMYVHDRLSSREIAERLNQDKIPSPAGREWNASSIQGSRQRANGILHSEIYAGVKVYNRVEMRKDRQTGRKITICKPPSEHKRIDVPHLAIIDRDLWNAARQRLDSRQTADPSQRASLRRRPGLLSGLTKCGCCGASYTSLSQGRLVCAAYREKGASACDNNRHVSRAEIEQRVLDGLRTRLLAPEAVAAYVRAYHAAWAEQAAQVEDRRRPLTRRLAEVERAIERGAEALLSGATAAAVIGKKLETLEIEQAELKAALEQLEADGAPPVQLHPRAAENYARKVEQLQTRLAEAADSTEVADRELIESVRGLIQRIDIEPINKSRGAPVRVTLHGDLARFIRPQQPPIGGCALVVGGGIEPPTCGL

SEQ ID NO: 21962 - protein, 542 aa, synthetic construct
MKRALVYCRVSTEAQEDNTSFDGQEMRCREFAAANGYEVVRVIREQHTGWELRQRPLMSDARAEIKRGCYDAVIVDKVDRLARNQDHQAVLWYEIEEEANIKFYSVSEKFDDTPFGKYLRRTVGFFAEFEKDRIRERNVEGKRRRALEGKLIGAANELYGYTLNRETHKREINELEAIVVRRIYNDVLAGKSANMIIKELNAAGIPSPAQGKRVWKDGRTRTYWAKHALKRILTKSEYHGESWGWTYKSSKTWAETFRPKEEHIPLPADATPPIVSREQFDAVQKILSRRREDHSYSDRTRNEKRPHLLRGLIYCGICGQKFKPEFGKAKTHIYYRCSSRSTPAGACGAKTVRASEAEDAVWRKISEIVQNPDMINELVSYKPSVSEQSQLDIEINSLEKTIKAETNKFEKMKKNALLMEDVGDFKPLLDVQRQLIARLEREHENLTSQLQKLREAEFNLAFLHEIYENLWIRLKCFDFSEQRKLLEMFEARVTVFENKELKLQINALPNEMPLGAQYSAGRTSRFWQNNARQTDSVDFAAA

SEQ ID NO: 21963 - protein, 578 aa, synthetic construct
MGYVTKKAAQRFEEKKAAIYVRVSTQYQVDRASLPVQREELINYAKYALGISDYVIFEDAGYSAKNTDRPDYQQMMARMRTGEFSHLLVWKIDRISRNLLDFSVMYAELKELGVVFVSKNEQFDTSSAMGEAMLKIILIFAELERKTTSERVSAVFVSRANDGIWNGGKVPYGYSYDKEGKTFSIAEDEAKIVRLIYSLYESEKSIVRVARIMNERGLKSRAGSDWSPTTVHTILSSPFYSGTYRYNYRNESNRKRFREKGKDEWVLVENHHPAIVSPERQAAVGVILESKRYNKNATYQRKNVHVFAGLLTCGCCGSTMAATTDKVRADGWRPSMYICSRRRKSEDCTNKYVSDVSLGPFVLNFFANLIKASNSFGRTTSIETLEKKLLRGEALSRVDHIERPGLEELYNHLRSGFDEKRFESPTIAATESSADLSERDLLLSEKRRLERALNRLKTIYLYGDDEMASKDFNIERERITKALSEVDSRINELDIANAFDLSLSDEAFMQKASQFILTQQLLDKRYVNYERFIRKIDPKIVKDFLNETVSNFCIKDGLTTSILLKNGIELRFSYKTAE

SEQ ID NO: 21964 - protein, 559 aa, synthetic construct
MRTIRKIERRIPNLKQRKKVAAYARVSMESERMHHSLSAQVSYYSSLIQKNPDWEYAGVYADYGISGTGMKKRQEFLRMLEDAEAGKIDSILTKSIQRFARNTVDLLRTVRHLKELGIEVWFEKENIHTMSGDGELMMTILASFAQEESRSISENIRWRIKKQFEQGNPNGRFRVYGYRWEGDNLVVVPEEAAVVRRIFQNFLDGKSRLETEREFAAEGITTRNGCRWMDSNIRVVLTNVTYTGNMLFQKEYVTDPILKKRKKNRGELPRYYVENTHEPIIDKETFDYVQQEMARRKELGALANKSLNTTCFTGKIKCGICGRSYMHNRRTDRGFEEFWDCGSHKLKGRNCGAKGSIPHAVLVKESTEVLGLDDFDEQAFLDRVEKIVVPEYHVMVFCMKNGQKLIRHWVSTAKKDCWTDEYKDRQRAWMKNYMANGKGTRFSVFTTRIRCALCGSSFRRCKTKHDRPVYWRCSKGGKCESVSIREDDLKRVAAETMGLEDFDEDRFRGKVESIEAGKPDCLTVHFKSGRTEEISYTPTPSKRRPKARRKESGEKWQRQ

SEQ ID NO: 21965 - protein, 522 aa, synthetic construct
MAKTVRAIPATISRYTAAPINSRKKRRVAGYARVSTDHDDQISSYEAQVDYYTNYIRERDDWEFVGIYTDEGISATNTRHRNGFKRMVRDAMDGKIDLIVTKSVSRFARNTVDSLTTVRKLKDKGIEIYFEKENIWTLDAKGELLITIMSSLAQEESRSISENVTWGHRKRFADGKVSVPYRHFLGYDKGPDGNLVVNREQAKTVKLIYRLFLDGYTFHSIARELTSRGLETPARKKRWYPGTVESILTNEKYKGDALLQKRFTVNFLTKETKANEGEVPQYYVENNHEAIISPQVFDWVQEEIKRRREGRGRYSGVSIFSSKIKCGQCGGWYGAKVWHSTDKYRRTIYRCNDKFKSHCKTPHLTEDDIKEAFVRAVNQLIENKADVLDSITLLKERLTDTEDLEEERDRISTDLNLLADKIQQLIAENARVAQNQDDYDRNYNELVSRYEAAKTQYDKTCEAIQYRKARSRQMDSFIKELRNQDLIKEFDARLWGSLVDFITVYSKDDIRVTFKDGTEIRA

SEQ ID NO: 21966 - protein, 521 aa, synthetic construct
MSNITIIPARPQRANSQQNETEKPKLRVAAYCRVSTDSDEQATSYEAQVSHYTEQITRNPEWAFAGIYADDGISGTNTKKREEFNRMIADCMDGKIDMIITKSISRFARNTLDCLKYIRQLKERNISVFFEKENINTLDAKGEVLLTIMASLAQQESQSLSQNVKLGLQFRYQRGEVQVNHSRFLGYTKDENGRLVIDPEQAEVVRRIYREYLDGYSTDKISAGLERDGILTGAGNPRWHTSTVAKILRNEKYMGDALLQKTYTVDYLSKKRIKNNGIMPQYYVENDHEAIIPKEIFMRVQDELVRRRLVKVSPNGRKHGFSSNHVFSQMIVCGECGELFRRVHWNNHGCRSIVWRCLSRLQPTGVICHARTVNEEVLKNVVVQAFNEMLSSRSTYQKRLRDNLARVLCGYEDEQALEIDKRLAELQQELINHASRKEDYNDIADEIFRLREMKQKNFTDTAVRDEQVKRINELNEFIEQQDSELTEFDESLARRWLKEIVVWDDRFSVELKSGIVVEIEI

SEQ ID NO: 21967 - protein, 530 aa, synthetic construct
MSAPKRGEKVKTVTKIEANQRTTGSEKKLCVAAYCRVSTDSDDQLESLAEQKKHYETYIQAHENWNFAGLYYDEGISGTKKEMRSELMRLLSDCEAGQIDFIITKSISRFARNTTDCLEMVRKLLAINVAIYFEKENINTTSMESELVLAVLSSLAENESVSISGNEKWSIRQRFQSGTYKMNPPPYGYRWNGEQLEVNNEQAEIVKRIFAEFLSGKGVMHIARGLDSDKIAPARGKHWCQSSILRILKNENYTGNAVFQKTFTDESFRRCVNYGQLDKYLVADHHEGIISKAYFDAAAALIDRHSVEKNVTKGSHKYQLRYCFSGKIVCGECGATLKHRTHRLGGETYEAWCCSTHIYNKESCSMKFIRDDDIKLAFVTMMNKLVFGHKLILKPYLLTLRSSSTDSSIQRIQQLRLLIEQNTGQQETLTRLMANGFIDRALFGRELNAIMAQTDEYRAEIDTLSSSVTGDGAKLKETERLIKLVERGRMFMEFDAELFSKLVDRICAFSRNEIGFVLKCGLTLRERIGE

SEQ ID NO: 21968 - protein, 516 aa, synthetic construct
MSYCIYLRKSRKDLEAEQHGEGETLARHERALLALAKKNNLIISNIYREVVSGETIAARPVMQQLLREVEQNLWDGVLVMEVERLARGDTIDQGVVQRAFQYSNTLIITPSKTYDPANEFDEEYFEFGLFMSRREYKTIKRRMQNGRYAAISEGKWPYNSAPYGFRRVKLEKEKGWTLAFDENEAPVVRLIFSMFTGPERVGIRSITRTLNSYGTKPRNSKLWSESTVRGILSNVVYDQCVKIGERKVVRTVENGVLTTTRPRTSDYTIVSGRHPRLIDHDVFAEAQSYLGCGSPKPAGSNIIKNPLAGIIVCSECKKKMIRRPPSGTASRVPYDLMLCSTYDCPTIGSPLDLVEREVYNALSDWVEGYRLSGQTPSKSLIPEKEVLLESAQQTLDQLLRQKGTMYDLLEQGVYSTEVFLERSASLQSRISEAQSNVAQLKLELDKERQREANIEQFLPACEDLLSCYWDLSIPERNRLLKLLIESIEYKKLTKNKRGHLNEPNFELTIKPRIPRK

SEQ ID NO: 21969 - protein, 517 aa, synthetic construct
MLRAVIYARFSSDMQREESIDAQVRACKNYCQSKGYLVIGQYVDEAKSGRELTKRDAYNQMLADALEDKFDIIIFHKIDRNSRNELNYYTTKDKLEKLGIRYEYAVQHIDASPEGQMMEGVLVSMAAYYSRNLSKETKKGLNENAYKAQFNGGTAPLGFRIVDKHYEIEPIEAEAVRLIFKLYLAGYSYIRICRELELAGYKKRNGKPFDKTCLYDILGNEKYMGRYTFNKTPRAKNGQARNSHAKTRPDDFIAIDNALPAIISKEDFAAVQAKREINQRRFSSYKAVEPYLLSGKVICGYCGSAMSGHRVAPRNGEPYGYYYCLKKERVAGERCPQKYIRAEKLERIAIRALEEEIFSEASMKKIAALMREGYAAMTNEADESRKALLQAKAAAEKKLDNLYSFIENGEVDEYSLARMKKIKDELAKIKARLCETSVKFSKILTEEEIFATLAAFKKDLESNADNSAKRFVVNLLINKITVRDNCATVEILPNMLTVYLVPRTGIEPVRVSLPEGF

SEQ ID NO: 21970 - protein, 463 aa, synthetic construct
MSEKIKRCAIYIRVSTSEQMMHGKSIEAQREYLACYAKDHGMIVTGVYADEGKTARKELKKRKAIHALLEDVKAGKIDVILFWRLDRWFRNMSDFYKVQDILDEYGVYWISASEPGINMETRDGRLQLNVVLSIGQNEVDTTSERIKFVNEASIRQGKVIFGENNMPRGYKVGIVDGKKCMVKDPEQEEMVNAFYDYFEKHQAKQQTLRFIQRNYDPAFSYGMLRTMLSSEFYKGTYRGIPYCPAYLSEERWAHIQNISKKSIRRTRSGRVYYFTGLIRCPQCGQILCGTGCKSVVNRKTGEKRDYCYYRCNRAMIDRICTNQHRVSQNLIESYLLDNLENEFKTYKIRVENVKQQKKKAPPVRTEKQIDKELDRLNLLFQKGRIEWDYYSREYDSLEKEKEDLNSVTVDPEPDYSFIETLLQQDIRGIYRSLTPENKRAFWKNTIRQIYLKPDYTIDYVDFI

SEQ ID NO: 21971 - protein, 512 aa, synthetic construct
MNKYIAIYVRRSVSDKEKGNNSLSIPAQIADCIRFVGEEAFYKVYEEDGKSGKDIKHRPAFMRMFEDCREGLVSKIVVKKYDRFSRNMREYLNITDELDKLGVSVVSLCEPFNTDTKEGRMMRNNLLNFAEFEREAIAARVKDSYDTKAQETGFYQGGVVYFGYQSSRQTINGKTGSVLVPYDSAVTVRAMYDVYANPEASLRDVILYINENNLPMDAPKGDGTVTRGFDACNIAAVLKNPLYVRADKNVYEYLLKNNYRIIDDVDAFDGKHGLFWHNYRSKTDRYVKVGYHEGLVDADIWLTVQDKFSHHQIPVRKGKVLRSWLAGMIRCGYCGHAVKVDYTHNPKSGNSWIYFTCSGYNSVRGCDSSRIKLKVKDVEQSVYTAMKAHIEEFEVAKKNESKPSTEEDRLKAEILKIDSETAKLMEKLSDADEVLFGYIQDRIKVLHSNKTEYEKSLMLMERKIKKVNTKPLIEPLNRWDELTVEEKNQLAMLMIDKIFLSNEKGVEIRFSF

SEQ ID NO: 21972 - protein, 456 aa, synthetic construct
MRNKEIAPALVRVALYIRVSGEEQKIKGLSLEAQQERLEAYARERGWVIVGIYIDAAKTARKNIHKRTEFQRMMDSVKRDEVDILLFARLDRWFRSVADYYKVMEILQAHNCDWKTTDEEYDTTTANGRLYINVKLSIAQNEADIDGERIDVVFDSKIAHGTVVSGSAPFGFRVNEEKRLEVVPEDAAIVQDAFNYFENTVSQRATVRYVRETYGVNWCDATFRRMLKEKLYTGVYDRGGRYNDQFCPAIIDRQQFDRVQALLTRNVRSAPSGKVYIFTSILTCAECGHKLVGYKSSDYFYYRCNQHFQRGRCSHNHSAREDVVEQWLFEHLGEELERCQLEWDVEAAKKKASVARTDKAALKRKLTKLKELYVNDLIDIEDYKKDYQIYVSALNQIPEPAQEAPPDFAAVRRLLDNSFRTIYDTLTREEKRTLWRSVIKEIKIDNDQNITGVVFG

SEQ ID NO: 21973 - protein, 700 aa, synthetic construct
MDSNAFLNDLMSKMKLPEAKGKKKAEQSESVAQILAAMQKVKTEKKKPPVTSYAPTKEMPVNELESMEEFSQLASDVMQECRPAMPTVSAASQEKAVRVAAYIRVSSTNPAQEDSYEMQERYFMSLLAGNAGWTSAGIYSDHGISATSREGRTGFNRLLRHCKQGKIDRVICKSISRFARNTQDFLVALRTLKENNVTILFEREAMDTADAYSEFILTTLAAIAQEESRSISANIAWSNQKRFPAGNVCNKDIYGYEFRKGEYTVNENGYRYRAVFIIPEEAEIVRMVFRLFTKEELSFTQIAQKLDALHIPPPNSGCRQRQKRKPTVLPAGALKEEDKRGWTATDVRYMIANVRYCGSVLCQKTYTDHRNGHKQKVNKGEKPKYLIRNHHPAIISEELWQEAQEVWKAYTAKYRGIEKGRNERNYSKLLLCGECGRYFQGHSTTRTTIWRCATKLAQQGQKRCRMEPIYEEQIQTLLCKAFAEKFKLGEKMDAEVHEVMQMISKAPIDNARNQALKNLTEKLREIHDFDHMEQEGDFLKRQLSAVNYSIRDVHQHIRDIQAEKEALKVRCEVLGEPRDKEAVAELENRLLNEEEQLEKLEHEAQQQAEQVRYMEDYWKKLEQTHEIREKTLQWLDSLVGGTQMFLDEAVGTYVKAFVLSVTIFSPKYFRIHWFDDTCTEVECDSVFEGYQQPGMIRRKY

SEQ ID NO: 21974 - protein, 449 aa, synthetic construct
MLKRAALYIRVSTDQQAKHGDSLDAQIATLKDYVSTQDNLTIIDTYIDDGISGQKLYRDEFQRLLEDIKKNRIDIILFTKLDRWFRNLRHYLNIQEILDNSGVTWLAVSQPFFNTDTAYGRSFVNQSMSFAELEAQMASERIKAVFENKIRKGEVVTGSVPFGYKICDKKLIPNENAPIAKDIFRHYSIHNSIRLTVEYLFNEYDITRSSRTIKHMLRNRKYIGEVSGNKNYCPPIVDKETFEKVQNLLDKNISSIAKRTYIFSGLVVCSCCGKKMTGRYRKRKYIKKDGTVMYYTKKVYRCNGNTYKRNKCPNKINIPEEILEEYLLNNIKADAENFEAKQKKIAVSAPEKNNNSKILKKIERLKKAYLNEVISLDEYKKDRKELEQMIVQVKPKETIVFKSNWFNKNIESTYRDFDEEEKRFVWRSVLKNLLVDPHGKITINFLTKN

SEQ ID NO: 21975 - protein, 521 aa, synthetic construct
MKKITKIDGVQNNSTVNKELRVAAYCRVSTESDAQLESLEAQKTHYERYINSREDWKFAGLYFDEGITGTKAEKRPELLRLIADCEARKIDFVITKSISRFSRNTTDCLALVRKLQSLNIPIFFEKENINTGSMESELFLAILSSMAEGESASISENSKWSIKRRFQNGTFKLSYTPYGYDWDGENMIINPAQAAVVKRIFADILSGKSTNAIADELNAEKIPSKKNTNWTSSTIRGILANEKYTGDVIFQKTYTDENFNRHTNYGEVDQYMAQDHHEAIISHADFDAANALVSQRALEKGVKKGSDKYQKRYAFSGKIICGECGDTFKRRIHTCTTYKYVAWACNTHLKDKSTCRMKYVRDNDIKAAFVTMLNKLIYGHRLVLVPYLKALENSSGDEALQRIQHLELLLDQNSEQRETLTKLMAQGYIDQILYNQETNALLLQAESYRSDIEAITICMTGDSAKVTETNLLLHFVSHADMLTTYSEELFESYADHIEITGRNEIKFVMKCGLTFTERIDD

SEQ ID NO: 21976 - protein, 500 aa, synthetic construct
MRVVLYMRYSSDRQTEQSIEGQNRVCTAFCEQQGYEIVDRYIDRATSAFKDTDKRTEFQRMIRDSEKQLWEGIVVYKLDRFARNRYDSATYKARLKKNGVRVISATENISDNPEGVILEAVLEGMAEFYSKELSQKIMRGMFESANKCHSIGGHIPLGYKIENKKLVIDEAGAAIVREAFDLYANGATVAEICETFNTKGYRTAKNAEFNKNSFRSMFKNERYIGIYKYKDLRIEGGVPAIVDKDIFTIVQKKLSKNAEAPSRGKAKIDYLLSQKLFCGHCGSLMTGESGTGKGGTTYFYYTCGKRKREHTCDKKPLKKDFIERAVVEDALTLLTPETINELADIAAKESVREMEENSIIPALKNQLHETERSINNLVKMVEKGVESDTIADRLKELEKEKRAIEKRLVVAQDDYVILEKDHIVWWLSEFCNGDIEDEEFRRHIIDLLVNSVTVWDEPDGWYKITSVYNLTSNKTKTFRCSDLSGQAPPQVKKSEHYHQW

SEQ ID NO: 21977 - protein, 529 aa, synthetic construct
MSRYCIYLRKSRADLEAEAHGEGETLSRHKTALLELARRMGITISATYEEIVSGETIAARPQMQRLLSEVGAGEWDGVLVMEIERLARGDTMDQGLVAQTFKYSGTKIITPLKTFDPQNEFDEEYFEFGLFMARREFTTTNRRLVRGREASAKEGKYVGSVPPYGYRKVKIPNDKGFTLEIIEEQAKVVRMIFEWYAEGAEVNGQKKRIGPYTIAVRLNELGIKSVAGKDYWTIYGVQHMLINPVYIGKIRWGYRKVKKTVTPEGMKKKSREFAQDGDYIVVDGLHEPILSEELFYKVQDLIAANPPTPIKYRNNNVNPFAGLIFCAKCGHCLSYRKGYGRHPGYLGCNIAGCDNKAAPFELIEQRVLSILNSWVKDYSVDKAQIKHEADLNVELSNAISLAEKEIETLQDQLDKVYSFFERGTYTEKIFKQRSSAIEQQITDIGEKIDRLKAEHQQVLERQNVQAEFVPSIKHLLEIYDTLEPVEKNKWLKQIIDHMVYEKNADGKYRNVDPGDFTLGILPRLPKKGS

SEQ ID NO: 21978 - protein, 516 aa, synthetic construct
MARKKKVSPGNRLVAYYRYSGGSQQTEQSIEGQRRDCEAYARQHGLTIVHEYIDRHISGRGVESRLAFQQMIADSSKHLFDLVICWKTDRFARNRYDSAVYKKKLRDNGVRILYAAESSVEGPEGIILEGLMESLAEYYSAELAQKMRRGMRESALKGKAINPNRPLGLTTDEHKRFIIDEKNAPTIRFIFEHYAAGESSASIVDQLNAAGLRTSKGNSFNKCSIPRIIQNEAYHGVYICKAYDVRIDGAIPAIIDDDLWKRAQKMLTLNKQHRAPHSSHADYLLSGKLFCGCCHSLMRGISGHNCRNDVYYYYACGNKADGGTCKKKNIPKDVAENLVVNAICENILRPDTLEDLADAIAAAQQAEVNQPDPERAMLEQNLADVHRKINNIIESIENGTASSRLSARLADLEQQESTLNYQLESLKEVHPPVLDRERILFLLEQFLISPNERTEDYNRRIIDTFVNRIEITDTEMLIYFNLSEASASEKQKNSQPNSCSTGNHLVRVARIELTAS

SEQ ID NO: 21979 - protein, 463 aa, synthetic construct
MRRKTTAPVEKILLRVAIYIRVSTDKQVKDGDSMRDQLATGQKYIDSHENMILVDTYIDDGISGQKLKRDDFQRLIDDVRAGRIDLIIFTRLDRWFRNLRHYLNTQDILDKHGVSWTAIEQPYFDTSTPHGRAFVNNSMIWAELEAQNDSDRILGVFDDKVDNGEVLSGSTPLGYTIVNKHLVPDDDAPTAVAIFQYYRKTGNLSMTLRYMESEFGLVRSAASLKNMLTNTKYIGEFRDNKNYCPAIIDRDLFFDVQRLLKINIKSGKKHDYIFSGLVVCDDCDHIMSGCQQRAGGRVRSDGTRIVYKYSVYRCRQGVNLHRCPNRKLVFETTLEKMLLERIRPELENYIAEYEVANLPALRTDAKRRSVEGKMQKLKDLYLNDLITMDEFKLDREKLLMQLEKINAEDSRPVKDLSYLKNFLKMDFESVYDSLSIPERRELWRSIVKEIRVDHDKNIHIIFL

SEQ ID NO: 21980 - protein, 514 aa, synthetic construct
MRRKKVEGGNRLVAYYRYSGGSGQTEQSIEGQRRDCENYARLHGLTILHEYIDRHISGKTDDRAAFQQMMNDGDKGAFDMVICWKTDRFARNRYDSAVYKKRLRDNGIEILYAAESNVEGAEGIIIEGLMEALAEYYSAELAEKMRRGMRESALKGQAINRCRSLGLTTDENKKYVIDEKTAPTVRFIFEHYAAGESSASIVEQLNAKGLRTSQGNPFNKCSIPRIIQNEMYRGVYTSKAYNVRIEGAIPAIIDDDLWKRAQAMMKTNRQLKAKYEPKAEYLLSGKLFCAKCGCTMKGVSGHSGGNDEVYRYYACSNPQCRKRNIPKDDLEGKVIRSICDHLLQPETMELLAETMVDVQKADMEKPNAERDVLEQELWDVRRRSKNIMDAIETGSANPQLVARLDDLTQQENTLTYQLSTMEAEKPLLFTKEQYLFLLQQFYAQPTEQDDAYKRRLINTFVTNIEVSDSELLIYFNISEETENKNKNAPQLNFDKSSSTEKRLVRVARIELTAS

SEQ ID NO: 21981 - protein, 667 aa, synthetic construct
MAYAKNKVVKLWTQKKAALYVRVSTRYQVDKDSLPFQRKKLKEYCKFLEIDKYVIFEDDGYSAKNTDRPHFQEMMSRIRTGEFSHVIVWKVDRVSRNLLDFAAMYQELKDHKVTFISMNEQFDTSTAIGEAMLKIILIFAELERNMTSERVTGIMLDRAEQGLWNGARMPVGYRWNEQTKFPEPDPEEVKIAQLIFDRYEEWRSSIKVARFLNNKNFKSKCGGEWTSRLIYDIIRNPFYVGTYRYNMRESGRGPLKPESEWIVRENNHPGIISKDQFDRCNKIMDENASRRDTSEMRARKFVHTFSGHLVCSNCGSNMIACKDHARTNGWRPSIYRCAKRSRMMTCDNSKTVNETYLGPFVFNYIANLARVQKNFTKITSTEKLESELLKGEAFETVSGIIPDSLNSTFQALLYSNLGNGTYVPDIALLSKFDEVQDHNQIDLLNTEIEKSKNAITRLTDVYLYDPASMTKEEFAAKKKELIKKIEEMEHQLAELLDNSEDNDLTDLSFIKKASAFLVTQRIVSKSFIDYVQMAQELDNEILKNFVDQIVDRIVIKDGRIQSITFVNGLTHEFFYSRPAELPVCKKCGGRIGSTCGCRTRTFSFNGKRYQRIKVGDPRDALYGQKNPVCPECYAKEGRWHHWLCGIELCPICGKPIQTCEHGANGKE

SEQ ID NO: 21982 - protein, 513 aa, synthetic construct
MRVVLYMRYSSDRQTEQSIEGQNRVCTAFCEQQGYEIVDRYIDRATSAFKDTDKRTEFQRMIRDSEKQLWEGIVVYKLDRFARNRYDSATYKARLKKNGVRVISATENISDNPEGVILEAVLEGMAEFYSKELSQKITRGMFESANKCHSIGGHIPLGYKIENKKLVIDEAGAAIVREAFDLYANGATVAEICETFNTKGYRTAKNAEFNKNSFRSMFKNERYIGIYKYKDLRIEGGVPAIVDKDIFTIVQKKLSKNAEAPSRGKAKIDYLLSQKLFCGHCGSLMTGESGTGKGGTTYFYYTCGKRKREHTCDKKPLKKDFIERAVVEDALTLLTPETINELADIAVKESVREMEENSIIPALKNQLHETERSINNLVKMVEKGVESDTIADRLKELEKEKRAIEKRLVVAQDDYVILEKDHIVWWLSEFCNGDIEDEEFRRHIIDLLVNSVTVWDEPDGWYKITSVYNLTSNKTKTFRCSDLSGQAPPLKDNPNTLFFIGTLFGQTTKHRVE

SEQ ID NO: 21983 - protein, 528 aa, synthetic construct
MNRTAARSVTVIPPTINPLTHLSRVTVQKRRVAGYARVSTDSDEQFTSYEAQVDYYTQYIKHNPEWEFVKVYTDEGISGTNTKHRIGFNEMIADAMSGKIDLIVTKSVSRFARNTVDSLVTIRKLKEKGVEVYFEKENIYTFDGKGELLLTIMSSLAQEESRSISENVTWGQRKRFADGKVNLPYKQFLGYRKGADGFPEVVPEEAIVVHRIYTRFMEGLTPGAIAKELTADGIPTPSRKQRWQTSTVESILQNEKYKGAALLQKCFTVDFLTKKRKVNEGEVPQYYVEHSHEPIITPEEFDKVQTELARRKQISRQYSGKSIFSSRIVCGDCGSYFGSKVWNSTSKYRRVIWQCNGKFKGEHKCETPHLDEETIKARFVTALNAIIESKDNILEDCRLMQATLTDCTGIDTEIESLLEEIDVVTELTKRCIAENSQTAQNQEEYAARYNGFVERYEKAKSRLEQLRTTKAAREAQAEAIGAFMFEMQELDTINEFDEKLWLTIIDTITVHADGRMTFKFQGGTEIEA

SEQ ID NO: 21984 - protein, 434 aa, synthetic construct
MERVVERVDDLIPAQPKALRVCAYARVSTGKDAMLHSLSAQVSYYSKMIQSHNGWMYCGVYSDEAVTGTKRERAGFQHMIEECRQGNIDLVITKSISRFARNTVTLLQTVRELKNLGVDVFFEEQHIHTMSADGELMMTILASYAQEESLSASENQKWRVRKAFENGEIINLRFLFGYDITPGGIQVNEKDAAIVREIFARFNGGESMSSICRDLDARGHKGVLGGTWCAERMRNTLSNEKYLGNALLQKRYRNNHIEKKLLPNRGELPMYYAKGTHEPIIDQATFDKAQERLRMLAQQAANRKKPTRSVFSGLIHCGLCGNTYKRVTYRKKHYWNCTTFQTKGKSECAAKRIPEETLEVLTCEVLGAVSFDPDMVRSKITAIRAEKSNMVVFCMDDGSEIVKRWTDRSRAESWTPEMKEKARQRALQARRKKE

SEQ ID NO: 21985 - protein, 561 aa, synthetic construct
MKNKKIKCDIYTRVSTTMQVDGYSLDAQKEKLKRYAEFQNMEIVNEYSDEGKSGKSVEGRPEFQRMLDNIENGTDEVQFVLVFKLSRFGRNAADVLNSLQRMQDFGVNLICVEDGIDSSKDSGKLMISVLSAVAEIERENILVQTMEGRKQKAREGKWNGGFAPYGYELVNGELQIAEDEAEIIRLIYDKFIHTNMGISAIAAWLNQHGYKKKKRQNNTLDAFAASFIKGVLDNPVYCGKLAYGRRKNEKVSGTRNEYRIVKQENYMLHDGIHEGIVSETDWELAHQKREKTGVKYEKTHSLDHEHILSGILRCPLCGSGMYGNVNRKKKKDGTLYKDYFYYACKHRRLVDGHKCGYRKQWSEEKINNAVEEVIRKLVKNPKFEEAILNKIGSRIDTEEIEKEIEGLEKQHRQLTGAKARLGQQMDSLDIMDKFYEKKYQDMETRLYRLYDEIEGVENSIEEVKNRLLNIQQQKISEENVYQFLLYFDKLYDKFTDLEKKEFLNSFVEQVDIYEQEQPDGRFLKHIKFRFPVYFGDRETQELCWDNESTVETCVLLSKLGQ

SEQ ID NO: 21986 - protein, 573 aa, synthetic construct
MAKVKLPDKPRVAIYTRVSTLHQIDKDSLPMQRQDLINYARLILNTEDYVVYEDAGYSGKNTDRPKFQEMMQQVRLGMFTHILVWKIDRISRNLLDFATMYSELKQLGVVFVSKNEQFDTSSAMGEAMLKIILIFAELERNMTSERVTAAMLSRAANGQWNGGRVPLGYDYDPETKTFTINESEAAVVKIIHDKYEQERSLVSLARYLNGHGYRTRTGCTYSPSTLLIILRNVFYCGDYRYNVLKDGDRQKRKKESEWITVKDHHPAIISREQKDEIERILKENRRLECERRGIYSKKKNVHVFGGLVICGNCGHAMTSTIRPADQDGIRWSVYVCPTKRRSEYLCKGRATSEVVLGEFVFNYILNMLNVQKNFDSINSVEDMEKMLLSGSTFRDVDGIERSGLDDLYNMLASGLTEKAPFDSSVEVRKKPVVSDIELENLNMEKSKIERAAERLQNLYLYSDDSISQKDYIVQREKLMSQLAEVNEQIGMVMSNADEKDVSDEEFVHAASKFILTQKLEGRTYIYYKRLATTVSREVLRSFVMSIIENITIYDGRVQTIVFKNGLSHTFILK

SEQ ID NO: 21987 - protein, 512 aa, synthetic construct
MNAVIYARYSSHNQTEQSIEGQLRDCYEYAKRNDLTIIGEYIDRAISGKTDERPDFQRMIKDASKRQFERILVWKLDRFARNRYDSATYKHKLKQYGVKVISAMENVGEGDESVLLEALLEASAEYYSLDLKKKIARGMRESALRGKFVGGTLPWWCRVDDEQKLTVIDERAAIVREAFMRYDSGEGSKSIVSDFAKRGLRSNRGVPVTLSWLLSILKNRKTIGEYTYNGIEIPGGLPAVVDKPLFDRVQDRIARNRRTGGGEARAKTEYLLQGKLFCGLCGSPITAECGQNHKGVVYNYYACSLKKKKHQCKKANERKDFLEWYVVEQTLDYVLTPARTEYIASAIVAEYEREFDKSGIRVLEQKIALTEGEIQKTMDLCIQATTDAMRDRFMKRCEELDAKKADMEIDLSKLRVAASIVYTKDEVCAWLRQFCTGDCFDPAFRRRIIDVFINTVYLYDEKLIIYYNLRDSRQVSYIEAIGASSEIENLLPVPDNKKSAAECSTADGDGGA

SEQ ID NO: 21988 - protein, 526 aa, synthetic construct
MPKVTMIPATINPLTHLPSVAARKRRVAGYARVSTDSDEQFTSYEAQVDYYTKFIQSKPEWEFVKVYTDEGISGTNTKRREGFKEMITDALDGKIDLIVTKSVSRFARNTVDSLVTIRKLKENGVECYFEKEGIYTFDGKGELLITIMSSLAQEESRSISENITWGQRKSFSDGKVHLPYKRFLGYEKGEDGRPAVVESEARVVKLIYGLFLEGKTQAGICKYLEKLGIPSPGGKRTWSKTTVTSILRNEKYKGDALLQKKFTVDFLEKKMKPNEGEVPQYYVTGSHPAIIEPDEWEQVQAEIARRKTLGKAYSGKSVLSAKLVCEDCGAFFGPKVWHSTDQYRRTIWQCNGKFENEERCHTPVVDTETIQRLFIKAYNLMMQDRVQIIKQCEAWRARLMDFGTLDADIERQLEETQVVAELVKAVVKENASTAQSQEAYLKKYETLVKRYETAAAELERLQSLRTARSQQDKKMALYIRTLKKQPEVMHDWNDTIWTVMVEKAIVHKDGQITFVFQNGTEIKVGA

SEQ ID NO: 21989 - protein, 433 aa, synthetic construct
MPRAITIVPKPPKLEQKKRVAAYARVSSGKDAMLHSLSAQVSYYSDLIQNHDDWLYVGVYADEAKTGTKESRADFQRLIADCRAGKIDMVITKSISRFARNTVTLLQTVRDFKAWEVDIFFEEQNIHTMSGDGELMMTILASYAQEESRSASENQKWRIKRNFEGGVPWNGAILGYRLKNGRYEIISEEADIVRRIYDEYLSGDGYLTIAKRLNEDGIPSRFGKQWGQSVISKILSNYTYTGNLILQKTFRENHITKKTVINNGELPKYHAEDAHDAIIDMETFQAVQAEKSRRAARFIKKPTPKKTYPFTSLLVCDSCGKNYRRKVTKTGPVWVCGTFNSMGKAACASKQIPEETLQAVTAEVLGQVDFPEELLRRLIKSILVCNENVLIFRFYDGSEVTRKWKDRSRSQSWTDEMKATARQKALERRNQNA

SEQ ID NO: 21990 - protein, 523 aa, synthetic construct
MRFFSYGRKSVFSDKSDSIDNQFRMNREYCESKFSGQVDSWQQFSDEDFTGANTSRPDLQRMLSFIKGGFCDVLVVYQLDRLSRDVRDFANIYALLEEHGVMFISIKENIDTTTPIGRAMMYVTVVFAQMERETIAARVTDNMLGLAKKGYWTGGNPPVGYVRKHIVVNGKKHCSIEVDPDGARYVTQIFDTFLAYNCSLQGMETRFKNQGIRTQNGKFFSTAQLHKMLTMPYCVEATPEVYDFYAAKGCIMDPGSPREMWDGSAGVIIYGRSTEKNKKHQLQPPEKWTVCLGKHKPFMPAEKWLAVQSRFTQNKCIKDAKWPVPLLKGVLRCKCGNLMQVSRKKKVDGTCSSWYYCRKRMRQGVDACDMGQIKCDLLDEKVLELFRGITADPALIQKFVKAEAPADVPDLKAAQARVSACERKIGRLAASLALAEDSAASKYIIAEMERLDVELGALKREASLAEMESHQAAASAKDAKATAAEIAKLIHGLDGFDDKEKNAIARAVIQECTWDGERLFIKL

SEQ ID NO: 21991 - protein, 549 aa, synthetic construct
MKQSNQNEITALYCRLSQDDGADGESNSIQNQRNILEQYVREHRFPNPRFYVDDGYSGGSFNRPGFQQMMTDMENGKIRTIITKDLSRLGRNQLHTGLYIEERFPMFGVRYIAINDNVDTDRSESTELMPFKNLFNEWFIRDTSRKIRAVQRAKVERGERLGTRAPYGYRKDKQDRKKLVVDEEAAAVVRRIFALCAAGQGPSQIARLLKREQVLCPTTYAYKTFGVAHSSLNLNDPYGWSDSTIANMLENEIYLGNTINLRYSTRSYKDKRKIEHPREECMVLENTHPALVSHEVWDIVQRVRQHKRRPTKMDEQNKYSGLVVCADCGSTMVLHRAHTMSRSYNHFTCRTYKKDGTLCTAHYIRECVLDDVVLEDLRRVTAMAREHTQEFAAYIGSRQSAEIRKEARGLERELTAMKKRSRELDSIFKRLYEDSVLGRITAEQFQTLSGSYTQEMEVLNRAIPEKETAIQRLREQVSGTDHFISLAKRYTDIQELTPEMLRLFIQKIVVHEKDVKWSKHAQQTVEIHYNDIGCVELPQPKGQSTAKGA

SEQ ID NO: 21992 - protein, 549 aa, synthetic construct
MKNKCILLVRVSTERQDYDEQERIIYNQALEDGYTDENIIAIKEKESGIKLSEEERQGLNRMKQAIEADDSINCVYAWEISRIARRKKILFSILEYLTKRKIQLKINEPSITLLNNDASINEASETIFTLFAQIAESEMRNKKARFQRGKAANAKQGRYNGGLVKFGYCIDSDGNYIINEDEASLIRTIFDMYVYQKLSHSQILKELKETGKIEQTKQKQFITKILNSIEYTGEANKYSFERKYPIIIDKYVFDKSREIAAQNKNEADKTKNLYLCKGLIFCKCGSRYTANSLSLQYICYNRFHKKCDFSNDININIADSIAWYCAKIQQMKLNSENVKQVVHKYKENIQLLNEKIDVLQQKITGLNGKRERNADMYFNGSINQEKFKSNERIINEEFNEHTSRINQLNAEIADYNRMIEASEESVNYRNIVKDVNQMNDNLKYQIIHNFIKKISVETIRSRVLKEVSITLKDDRIFTYLVDVRTKKLYKKCDDFELDMQKTLNPNVEVIYDDFVQEEGFKFIERIKLSEDKLNKKREMVRKIRKEKSK

SEQ ID NO: 21993 - protein, 577 aa, synthetic construct
MSINRNNTNETPKKAALYVRVSTNYQIDRDSLPMQRQELITYAQLMFGINDYVVFEDAGYSGKNTDRPEFQNMMRRIRAGEFTHLLCWKIDRISRNLLDFASMYQELKDLGVTFVSKNEQFDTSTAIGEAMLKIILVFAELERNMTSERVTATMLSRAQNGLWNGGRVPYGYDYDKDSKTFSINQEEAFLVHKMYDLYSEHRSLVMVSRALNEDGYASRAGNDWSPVSIFIILTNPFYTGKYRYNHYKIPGLKIEKDPSEWIEVPDHHPRIISDEQFGNVNRILQANSRSKRLPGQQHTSKGTHIFGGLLYCGTCGSQYVSTPSRLLASGYRPSKYACPNLRKKKTCNTKSISDPVIGEFVLNYVLNMMHARAAFSSIHDTSELQDALLNGGTFQNVDHIGKDGLDGCFHMFSSTPLDGKRFRKPKKATTIDPELKRLRAEKRKTERALDRLMNLYLYADNPISEKDFIIRKQALDDYLKEINENLGMIDRGRGIETISDENFIKRASYFIMSKELAGKDYIYFKKLAMDMDAEILRDFFQEIIDSIVMEGSNVKEIVFRNGLAHTFFYKDAEKPEA

SEQ ID NO: 21994 - protein, 480 aa, synthetic construct
MATHKVAIYVRVSTTSQVDEGYSIDEQKAKLTSYCDIKDWSIYDIYTDGGFSGSNTERPALERLIKDAKRKLFDTVLVYKLDRLSRSQKDTLYLIEDVFLENDIEFVSLLENFDTSTPFGKALIGLLSVFAQLEREQIKERMQLGKLGRAKSGKSMMWSKTSYGYDYIKETGTLSVNPYQALIVRKMFEWYLSGMSVTKLRDTLNEQYGQDKEWSYRTVRVILSNPVYCGYNQFKGQIFPGTHEPIISEEDFNKAQEEIKTRQRTAAQRFNPRPFQAKYMLSGIAQCGYCSAPLAIKLGTIRKDGTRLVKYECKQRHPRKTKGVTVYNNNEKCDSGFYFKDDIEHFVLTEISKLQTDSDYIDKLFSNTNQETIDRDSYQKQIDNLTAKISRLNDLYIDDRISLEELQKRSSDFMAKRAALEKELDADTSLKTVERKEDVKRVLDTKDIFTLDYEQQKAIARALISKVRVTSESIVILWKL

SEQ ID NO: 21995 - protein, 464 aa, synthetic construct
MPEKILRCAIYIRVSTFEQSVHGKSLQAQKECLEQYATDNNMSIVSVYADEGKTARKELKKRKAIHALVEDVKMDRIDVILFWRLDRWFRNLSDFYKVQDVLDEHGVRWISVSEPGINMETRDGRLQLNVVLSIGQNEVDTTSERIKFVNESSIRQKKLIFGDANMPLGYKTGIVDGKKCMVKDPETEHMVEDFFRYFKNHNTKKGAIRYMQETYGIDFSYSMLRTMLSSEFYKGTYRGYPYCPAYLSEKEWNEMQIISKRNIKNTPSGRIYLFTGLMRCPVCGQKLVGTGCSSIIDRKTREKRTYCYYRCNRALIDHICTYRHRVSQNLVEKYLLENLEREYEKYKVRSNQIGEELKKQKKAKDPEKLRKEMERLNLLFQKGRISFDYYDKEYQRLEKEYSVSADFPEEEETRNLHYVEELLKTDFRQMYDSLSPENKRSFWRSTIQEIYLNDDNTIKAVDFL

SEQ ID NO: 21996 - protein, 435 aa, synthetic construct
MAAYCRVSTDQEDQLHSFEAQVEYYTRYISDHPNYEMAGIYADEGISGTNIKKREQFRRMISDCETGKIDMVITKSISRFARNTQDCLQYSRMLKNLGIGILFEKEHINTLDSSGELLFTILSSLAQDESRNISENCKWGIRSKFKKGEMHVNTHKFLGYDKVDGKLVINEREAKIVRRIYREFLWGHSPQEIAKGLEDEEIEGCMGAKKWYPSTVINILKNEKHMGDALLQKSYTADFLTKKQVKNHGEVTQVYVKGSHIGIIDKETWNAVQLEFARREEFVKEHGLKGYGYGRECNPFTSRIFCGECGSPYTRHTWRSRGIMQWQCKNHMTDGKVTCVNGFVSQNDLESGFVKAYNMLLKHKEILIPRWKDTIETGNALERLRAKQFLDLSEQPELECYVPELAQMVIQMVIIKGIKKYEFTFMDGSRETVCV

SEQ ID NO: 21997 - protein, 520 aa, synthetic construct
MKNVTKINQVDFSVFKKTRVAAYCRVSTDSDEQELSLETQKNHYESYIKANSEWEYAGIYYDDGISGTKTAKRDGLLRLVEDCEKGLIDLVITKSISRFSRNTTDCLALVRKLLNYDIYIIFEKENIHTGSMESELMLAILASMAESESRSISENEKWSVKKRFQNGTYVISYPPYGYANVDGEMVIVPEQAEVVKEIFAGCLAGKSTHIIAKELNEKGVPTKKGGKWTGGTINGILTNEKYIGDALFQKTITDAAFKRKRNYGEEEQYYCEDHHEAIIDRDTFEKAKEAIRQRGLEKGNCSEDTSKYQNRYVMSGKIKCGECGRSFKRRYHYTSHGRSYNAWCCGGHLEDSKSCSMKYIRDDDMKRVFLTMLNKLRFGSDLVLKPLLIAITTGNSKKNIHSMEEIKKEIAANEEQRKQLNTLLTKGYLERPVFAEAHNKLVTEYEHLIAKRDMLYRMDDAGYTIEQKLKELVDFLNGAEPFTEWDDSLFERFVEKVKVLSRDEVEFELKFGLRLKERID

SEQ ID NO: 21998 - protein, 524 aa, synthetic construct
MAGAKNITVIPARKRVGNTATADNKPKLKVAAYCRVSTDSEEQATSYDAQVEHYTEFIRKNPEWEFAGIYADDGISGTNTKKREEFNRMIEDTMAGKIDMIITKSISRFARNTLDCLKYIRQLKERNVPVFFEKENINTMDSKGEVLLTIMASLAQQESESLSKNVKMGLQFRYQNGEVQVNHNWFLGYTKDENGHLIIDEDQAIIVRRIFREYLQGASLKTIADGLMADGIPTATGNKKWRGDGIRKILTNEKYMGDALLQKTYTVDVLTKKRVSNNGIVPQYYVENNHEAIIPRQLFIQVQEELLRRAHLKTENGKTKRVYSSKYALSSIVYCGKCGDLFRRVAWKARGASYNKWRCASRIEKGPKEGCDADAISEVELQNVVVRAINKTLGGREQFLVQLQHNIEDVLNGDSTATLEYIDQRMAELQEKLVMCVNKNAEYDVIANEIDALREKKAAVVTRDAEQEMLRKRIDEMRQFLQMQTNRVTEYDEQLVRRLIEKITVFDDKLIFQFKSGMTLEVKR

SEQ ID NO: 21999 - protein, 592 aa, synthetic construct
MPNLRKIEAAVPAIREKKKVAAYARVSMQSERMLHSLSAQVSYYSGLIQKNPDWEYAGVYADDFISGTNTVKRDEFKRMLADCEAGKIDIILTKSISRFARNTVDLLETVRHLKDLGVEVRFEKERIRSMDGDGELMLTILASFAQEESRSISDNVKWGIRKRMQNGIPNGHFRIYGYRWEGDELVIVPEEAEVVKRIFRNFLDGKSRLETERELADEGITTRDGCRWGDSNIKVVLTNMTYTGNLLLQKEFISDPISKQRKKNRGELPQYYVEDTHPAIIDKATFDFVQEEMARRRELGALANKSLNTSCFTGKIKCPYCGQSYMHNKRTDRGDMEFWNCGSKKKKKKGTGCPVGGTINHKNMVKVCTEVLGLDEFDEAIFLEKVDHIDVPERYTLEFHMADGRVVTKACPNTGHRDCWTPERRAEVSAKRRKNGTNPIGASCFTGQIKCVSCGCNFRKATRNCKDGSKVSHWRCAEHNGCDAPSLREDLLEQMASEVLGLDAFDAAAFREKIDRVEVLSSSELRFCFKDGRTVSRNWQPPERVGRPWTEEQRAKFKESIKGAYTPERRRQMSEHMKQLRKERGDKWRREK

SEQ ID NO: 22000 - protein, 525 aa, synthetic construct
MAQRKVTAIPATITKYTAVPIGSKRKRRVAGYARVSTDHEDQVTSYEAQVDYYTNYIKGRDDWEFVAIYTDEGISATNTKRREGFKAMVADALAGKIDLIVTKSVSRFARNTVDSLTTVRMLKEKGVEIYFEKENIWTLDAKGELLITIMSSLAQEESRSISENTTWGQRKRFADGKASVAYKRFLGYDRGPNGGFVVNQEQAKTVKLIYKLFLDGLTCHAIAKELTDRKLPTPGGKAVWSQSTVRSILTNEKYKGDALLQKEFTVDFLQKKTKKNEGEVPQYYVEGNHEAIIDPATFDYVQAEMARRTKDKHRYSGVSMFSSKIKCGECGCWYGSKVWHSTDKYRRVIYQCNHKYKGGKPCSTPHVTEDQVKDAFVRAVNILLSEKEELSANVQMVIAMLCDSTELEKRQTQLKEELEVVVGLVERCVTENARIALDQDEYTQRYNGLVSRYEAVKAQFDEVTQAVADKADRKKLLEQFLHTVEVQEPVTQFDERLWSSLVDFVTVYSEKDIRVTFKDGTEIQV

SEQ ID NO: 22001 - protein, 590 aa, synthetic construct
MKVIQKIEPTKPKIAKRKRVAAYARVSVDKGRTMHSLSAQVSYYSKLIQKNPDWEYVGVYSDGGISGRTTESRNEFKRLIKDCKDGKVDIILTKSISRFARNTVDLLETVRDLRAINVEVRFEKENIHSLSGDGELMLSILASFAQEESRSISNNIKWSIQKRFKEGKHNGRFNIYGYRWVGQELIVEPSEAENIKLMYANYMNGLSAEFTAKQLTKMGVTAMKGGPFKATSVRQILKNITYTGNLLLQKEYTPDPITGKSRYNNGEMPQYFVENHHEAIIPMEEWQAVQDERLKRRKLGAHANKSINTTCFTSKIKCGNCGKNFRRSGKRQGKNKELYHIWTCRNKSEKGVKVCNARNIPEPALKKYATEVLGLEVFDEQIFIDSIEEIVASEGNMLQFKFYGGREVEVKWTSTARKDYWTPEVRRAWSERNKRKESRTWNGRTTEFTGFVVCGRCGANYRRQAVTSKTDGTVRRKWHCSNSAVACNEGKSRNCIYEEDLKVMVAEILGIPTFNEPTMDEKLSRISIIDTEVTFHFKDGHDEVRTFEIPKKKARTFSEEERARRRLVMKKRWEEKKRDEESNNDTSDNH

SEQ ID NO: 22002 - protein, 513 aa, synthetic construct
MAKAKQKAATNDISKLAVIYARYSSHNQTEQSIEGQLAAGHRYADLKGYTVVHEYIDRAMTGRNDNRDDFQKMLSDTSKKQFGAIIVWKVDRFGRNREEITFNKYRCKKNGVRVEYVAENLPDSPEGVILESVLEGMAEYYSLQLSQNVQRGLLESAKKHQVIGGNVPLGLMMDAHKKYVPDPKTAPTVKLIFDMYAEGSTTSEIINHLNSIGMRTKAGKPFTKSSLTTVLKNEKYIGVYKYKDIIRDEGVIPPIVDKEIFYKVQELLKVNRRMPSHKWSYSDYILTDKLFCGKCGTAMVGESGFGKMGVKYSYYICAKRRKDKTCDKKPVRQEWIEEIVLQRVQSILQNEELLEFIAENTWQYYLAQDESMEKLKGLQTELDKVEKSAANLMKAIEAGIFNDMTKARMDELDDQRAVIKKAMAEIEIEKGFKLTKDHILYFLEQFKKLDYKDRDCQRRLIDVFVNSIFVYDDKLRIAFNFGGSDSTITLNEVDKADRGEGFVCCASCPVIKP

SEQ ID NO: 22003 - protein, 523 aa, synthetic construct
MRFFSYGRKSVFSDKSDSIDNQFRMNREYCESKFSGQVDSWQQFSDEDFTGANTSRPDLQRMLSFIKGGFCDVLVVYQLDRLSRDVRDFANIYALLEEHGVMFISIKENIDTTTPIGRAMMYVTVVFAQMERETIAARVTDNMLGLAKKGYWTGGNPPVGYVRKHIVVNGKKHCSIEVDPDGARYVTQIFDTFLAYNCSLQGMETRFKNQGIRTQSGKFFSTTQLHKMLTMPYCVEATPEVYDFYAAKGCIMDPGSPREMWDGSVGVIIYGRSTEKNKKHQAQPPEKWTVCLGKHKPFMPAEKWLAVQSRFTQNKCIKDAKWPVPLLKGVLRCKCGNLMQVSRKKKVDGTCSSWYYCRKRMRQGVDACDMGQIKCDLLDEEVLELFRGITADPALIQKFVKAEAPADVTDLKAAQARVSACERKIGRLAASLALAEDSAASKYIIAEMERLDVELGALKREASLAEMESHQAAASAKDAKATAAKIAKLIHGLDGFDDKEKNAIARAVIQECTWDGERLFITL

SEQ ID NO: 22004 - protein, 488 aa, synthetic construct
MPEALNAVIYARYSSDRQTEQSIEGQLRECYAFAKANDIAVIDTYIDRAISGKTDNRPAFQKMIEDSAKRQFQAVIVYRLDRFTRNRYDSAIYKARLKKNGVKVLSAMENLNGSPESIIMESLLEGMAEYYSVELSQKITRGMRENALKGKALGGQRVLGYKVNSDCYFEIDETTAPVVVDIFKLYSSGKTVKEICDILNARGVKTARGGAFNKNSLHTILTNKKYIGIYKTKYGEIVGGIPAIIDKELFEMVALRMEQNKKAPARAKAEINYLLSTKLFCGKCRSAMVGESGTSKTGKKYYYYACVKKKREKACDKSNVKKDWIEDLVIQRTVTDILKDDVIEKIADRLVELQKAEAAESGTMLYLQNSLAEIQVSIKNIMTAIEKGIITESTKTRLTELEDEKRNVEIEIAKESIARRIISREQIIYWISSFKDGDITSEKYRQQLIDTFVHAVFVYDDKIVITYNYSGENNTATISDLDLSSPPR

SEQ ID NO: 22005 - protein, 581 aa, synthetic construct
MARKRTNLIGNTPSVRETKVAIYIRVSTIHQVDKDSIPMQKKDLIAYCQLILGTDNYEIFEDAGYSGKNTDRPAFQNMMGRIRKGEFTHVLVWKIDRVSRNLLDFAEMYEELRSLRVTFVSKNEQFDTSTAIGEAMLKIILVFAELERNMTSERVTATMISRANSGQWNGGRIPFGYSYDPKEKVFSIREDEASICRELKDLYLLNRSLVYVSRALNEKGYKTRAGANWSPHSVWIIASSPFYAGIYRYNRYKGVENRTINPEKEWVMIQNHHPAIFTLEEHHTMQSLLKSNQRNMDNLPGRIHTSEKTHIFQGLMYCDKCGSKMVSTPGRLHVDGYRASNYSCPLRRNTKKCNNPTINDIIVGEFVINYILNMLNAKKTFSTINTPDELNTALLSGSVFSEVSSIEENGLNSFFNLLSRYGSDRSYVFSVKSPRRKKAAVNPELSRLRKEKEKQERALQRLQDLYLYSETSMPEKDFIIRQSEISSHLNNINRQLGLMTQDQASFLSDEEFIKKASHLLIQKELKNKKYIYFKKLVSTVDPDILKAYMETILDSIYTADGKITAITFKNGLTHRFIYKDK

SEQ ID NO: 22006 - protein, 571 aa, synthetic construct
MMQDRTAPASTNRVAIYIRVSTTHQIDKDSLPMQRQDLIAYAKLMLNTDDYVIFEDAGYSGKNTDRPKFQEMMSQIRQGAFSHLLVWKIDRISRNLLDFATMYKELKDLGVVFVSKNEQFDTSTAMGEAMLKIILVFAELERNMTSERVTATMISRASNGQWNGGRVPYGYNYDYETKDFSINPIEAEIVRLIHDKYEEMRSLVRESRYLNEKGLRTRAGNLWNPVSLHIILHNIFYCGDYRYNVLKEGDRQKVKDESEWITVEDHHEPIISREQKERVIAMLDANKRLDRKRNTYKSEKYVHVFAGLLYCGNCGKPMGATPAAAKKDWQYSKYTCPTRRKLASACNGKFTSDPIVGEFVFNYVLNMLNVQKNFADIHSPEELQAALLIGNTFSYIDHIDEDGLNDLFNMLSSGKIKGTVFGKSAKLKKKKVVSELSKLRNEKQKIERALDRLTKLYLYAEDAMPESEFIIQKSKLTETLDEVNEQIGFSNTDEWNQSVSDEEFVRRASEFIIAQKLTDRNYVSYKRLATSVDTAVIKTFVQGIIDSIIMDAGQVKQIIFKNGLSHTFIFK

SEQ ID NO: 22007 - protein, 581 aa, synthetic construct
MARKRTNLIGNTPSVRETKVAIYIRVSTIHQVDKDSIPMQKKDLIAYCQLILGTDNYEIFEDAGYSGKNTDRPAFQNMMGRIRKGEFTHVLVWKIDRVSRNLLDFAEMYEELRSLRVTFVSKNEQFDTSTAIGEAMLKIILVFAELERNMTSERVTATMISRANSGQWNGGRIPFGYSYDPKEKVFSIREDEASICRELKDLYLLNRSLAYVSRALNEKGYKTRAGVSWSPHSVWIIASSPFYAGIYRYNRYKGVESRTINPEEEWVMIQNHHPAIFTLEEHQTMRSIMKSNQRNMDNFPGRVHLSTKTHIFQGIMYCDKCGSKMVSTPGRLHVDGYRTSNYGCPLRRNTKKCNNPTVNDIVIGEFVINYILNMLNAKKTFSTINTPDELNAALLSGSVFSEVSSVEENGLNSFFNLLSRYGSDRSYIFSVKSPRKKKAAVDPELSKLRKEKEKQERALQRLQDLYLYSETSMSEKDFIIRKSEISSHLDNINRQLGLMTQDQASFLSDEEFIKQASHLLIQKELKNKKYIYFKKLVSTVDPDILKAYMETILDSIYTADGKITAITFKNGLTHRFIYKDK

SEQ ID NO: 22008 - protein, 502 aa, synthetic construct
MEIQIREGNSRQKRKLKVCAYCRVSTDADEQENSLENQIRHYKEVITSNPDYEYAGVYSDFAISGFKEKRPGLQKMLADARKGKIDLILTKSVSRFARNTSIVLEATRKLKELNVGVFFELQNINTLSGEGELMLTILAAFAQAESESGSVGAKMVYQRKYEAGIPVQYLERSFGFKKDERGVYIADEEEAAWVRKIYEMAADGYTPAAIKRYLNENGVKTVGGAEWIDSTVFRLIENEIYKGDYIMHKHFVNEERKLVRNRGEVDAWYIEDDHEAIVSPELWQKAQDALEAKRDYLAEGSVIEEFTEENYPYMNKIFCARCGHPLYKRIYSNGNRLNWGCSGTKRYGKSFCEGINIPDGVLRGAWHFDEKIYIGEKPTEKGKKEFTYLKEASWKRRHKKKEPEPIPENNETEYPYREKIFCGLCGSRLVRHVNTKSHKAIWVCNGRKRKGKDFCDGTRVPDTIIKGWGEIKKDIYIQRKDDKNGKKRYSYTSKKPKGTDRA

SEQ ID NO: 22009 - protein, 464 aa, synthetic construct
MARSVTVIPARNQKVRTGHKAVQEKKIRVAAYCRVSTDQEDQLHSFEAQVEYYTKYINEHENYEMAGIYADEGISGTNTKKREQFKKMIADCEGGKIDLVITKSISRFARNTQDCLAYSRKLKNLGIGIIFEKENINTLDSTGELLFTILSSLAQDESRNISENCKWGIRTKFKNGEMHLNTFKFLGYDKDENGKLVINKEQAKTVRRIYRDFLIGINPAQIAKELTEEKVPGCLGQTKWYPSTVTGILKQEKHMGDALLQKTYTADFLTKRQVRNNGEIAQVYVKDSHKGIIDKQTWNAVQEEFDRREKFMELHGTDRYSYGADCMPFCEKVFCGECKSLFTRHSWRSRGIVQWQCKNHRKDGKVACTNAYVDNADLEKGFVKAFNRLVTDRDKHMERWQQMKSDGTPLEKIRAGQMMEAVENEPLTRFVPEIAQLVLCEVTVLGAKKYEFFFLEGSRVKVSV

SEQ ID NO: 22010 - protein, 584 aa, synthetic construct
MAYRKITDIRDTIGMRAVFYARVSTAEEEQLNAIELQIEENRGCIKDHGWKLVGEYIDRSKSGTMVKGRDDYQRLYEDLYEDLFDIVVIKDQERLQRNTLDWYLFINRVVQTGKLLFMYMDGKFYSPDDALITGVRAIIAEEFSRNLSKKLHNYHDHRIEKARQGQEIALQGSGNVYGWDKKDGKYYINPEQAKVRRLMCEGIMARKGSTLIAKELNDAGYRNTVGKPWKPMDIPKFVYDCKNVGTMIINKERHDFESKQTIKLPKEEWVYVENALPPIVTQEEWDLICKIHEERVIATGSDRRGKKTSGYSFSGKLVCGICGAPYWRKQRVSKDEYWVCSTKQTKGRRTRKRDSTMGKAGEINPLGCDNENISYNSLMEIMEVVSERLQANTDTIKQDMINWLTKLRKQLLEANGGHTEADLQRELSRKSKLLDAYLDGILNKQEYQTKAEELDERIIQLKAETEKNKANSGDIAEIDKVLANIDEEVSRYVDGNEKLKVEYLLEHLEQVQIFPDKVIVIVPILSEGIVVEKTQYVSREKRCRQDYLYENDRWSGKADKRRDIHVWIRWKGFVKGTLKSGLPD

SEQ ID NO: 22011 - protein, 534 aa, synthetic construct
MNRAAFAIHHNKIKTAPAPTETVYISEDMRLKSTNIVSSSGQSRKRNICFALAVIFVPILNIFYKRRVMQMPEKILRCAIYIRVSTFEQSVHGKSLQAQKECLEQYATDNNMSIVGVYADEGKTARKELKKRKAIHALVEDVKRDKIDVIIFWRLDRWFRNLSDFYKVQDVLDEHGVRWISVSEPGINMETRDGRLQLNVVLSIGQNEVDTTSERIKFVNEASIRQKKLIFGDANMPFGYKTGVVDGKKCMVKDPETEHMVEDFFNYFRIHNSKKGAVRYMQEVYGIDFSYGMLRTMLSSEFYKGTYRGYPYCPAYLSEKEWNEMQTISKRNIKSTPSGRVYLFTGLIRCPVCGQKLVGTGCSSVINRKTWEKRTYCYYRCNRALKDHICTYRHRVSQNLVEKYLLENLEREYEKYKVRSNQISEELKKQKKTKDPEKLRKEMERLNLLFQKGRISYDYYDKEYQRLEEEHSASAAFPEEEETRSLHYVEEILETDFRQMYDTLSLENRRSFWRSTIQEIYLNEDNTIKGVDFI

SEQ ID NO: 22012 - protein, 490 aa, synthetic construct
MRVVLYMRYSSDRQTEQSIEGQNRVCTAFCEQQGYEIVDRYIDRATSAFKDTDKRTEFQRMIRDSEKQLWEGIVVYKLDRFARNRYDSATYKARLKKNGVRVISATENISDNPEGVILEAVLEGMAEFYSKELSQKITRGMFESANKCHSIGGHIPLGYKIENKKLVIDEAGAAIVREAFDLYANGATVAEICETFNTKGYRTAKNAEFNKNSFRSMFKNERYIGIYKYKDLRIEGGVPAIVDKDTFAIVQKKLSKNAEAPSRGKAKIDYLLSQKLFCGHCGSLMTGESGTGKGGTTYFYYTCGKRKREHTCDKKPLKKDFIERAVVEDALTLLTPETIDELADIAVNESIREMEENSIIPALKDQLHDTERSINNLVKMVEKGVESDTIADRLKELEKEKRAIEKRLVVAQDDYVLLEKDHIVWWLSEFCNGDIEDEEFRRHIIDLLVNSVTVWDEPDGWYKITSVYNLTSNKTKTFRCSDLSGQAPPK

SEQ ID NO: 22013 - protein, 510 aa, synthetic construct
MSYFIYARKSRKDAELEALGIDVLERHITTLLELAKALSLPIGAIYREVVSGDSIDARPVMTQVLSEVEACMWDGALVMDVDRLARGDTIDQGRVQRAFFYSNTRIVTPNKTYDPANEYDNEYFEFSLFMSRREYATIKRRMQRGRERSSSDGYYVGNVAPYGWERVIAPDGKHYSLAPHQTEAPVLDLMYDLCGNKQYGYQKACTYMSNMGILARSGKPFTPSTLKGIISNPANIGKVRWGHRKTVRAVKDGRVVKSRPKATDYILSDAAWAPRISPDLFKRANQPKGCFSAPVRNDRPIQNLFAGLVRCSQCDRLMVRKKAQTKTPYDMLICQYTECSTVGIRIDELEEALLGWLKDYIAKYEFADTHEEDTAAIAAKELIVTNFETEHQMLLKQRESLFDFLEQGIYTKEIFIERSNALEQRIRDCMNNITAAREDLHTTIARQANRKNFVPKCKNLLSEWDSLTVSEKNSALRQLIDRIVLTKTKRNKKNQKNSEFTIDVYPKVPK

SEQ ID NO: 22014 - protein, 514 aa, synthetic construct
MRRKKVEGGNRLVAYYRYSGGSGQTEQSIEGQRRDCENYARLHGLTIVHEYIDRHISGKTDDRAAFQQMMNDGDKGAFDMVICWKTDRFARNRYDSAVYKKRLRDNGIEILYAAESNVEGAEGIIIEGLMEALAEYYSAELAEKMRRGMRESALKGQAINRCRSLGLTTDENKKYVIDEKTAPTVRFIFEHYAAGESSASIVEQLNAKGLRTSQGNPFNKCSIPRIIQNEMYRGVYTSKAYNVRIEGAIPAIIDDDLWKRAQAMMKTNRQLKAKYEPKAEYLLSGKLFCAKCGCTMKGVSGHSGGNDEVYRYYACSNPQCRKRNIPKDDLEGKVIRSICDHLLQPETMELLAETMVDVQKADMEKPNAERDVLEQELWDVRRRSKNIMDAIETGSANPQLVARLDDLTQQENTLTYQLSTMEAEKPLLFTKEQYLFLLQQFYAQPTEQDDAYKRRLINTFVTNIEVSDSELLIYFNISEETENKNKNAPQLNFDKSSSTEKRLVRVARIELTAS

SEQ ID NO: 22015 - protein, 546 aa, synthetic construct
MEETIKAVGYARFSSSMQREESITAQKRYMMMYAKRNNMEVIDWYCDEAKSAKTVNRPAFQKMINDAKNNPEFKAVLVHKTDRFSRNLSDSIQYKKLLEEYGVQVIFVNERFENNPESHLLYHIMGSVNQFYNENLAREVMKGLKENAYQCKFTGGRPPLGYDVDKDLKLVINEKEAEAVRLIFEMSAEGYGYGETIDKLNILGYKTKKGLPFVKNSLYEILRNEKYKGTYIFNRSCSANSLNKRNNHRRKPEEEIIRIENGCPAIVSSGLWHRANAVKKATRSSYTNAKNTYLLTGLIHCGECGGKFHGNVRYNKNNTNLVYRCSSKKNKRKCESKEIRCEYLDSFVIDKFVEFFFNDDNIKVITKQLNEQYNKSCISDLEYNEAKSTLKILEKSRNNLVEAIAKTGINDIMSDKIKEYEEQIKKTAEFIQKYEKQKIDRVITEDEVREQINHLKDYFYNPKNLIRTKYVLSQYIDRIDISNENVQVQFKVSMSPSDNTDGDCFCVHTEMIKRKYLFDYVCEKVDFEQWNIEKLNESESEHRKGA

SEQ ID NO: 22016 - protein, 510 aa, synthetic construct
MSYFIYARKSRKDAELEALGIDVLERHITTLLELAKTHSLPIGAIYREVVSGDSIDTRPVMTQVLSEVEACMWDGALVMDVDRLARGDTIDQGRVQRAFFYSNTRIVTPSKTYDPANEYDNEYFEFSLFMSRREYATIKRRMQRGRERSSSDGYYVGNVAPYGWERVIAPDGKHYSLTPSQTEAPVLDLMYDLCGNKQYGYQKACTYMTNMGILARSGKPFSPSTLKGIISNPANIGKVRWGYRKTVRAVKDGRVVKSRPNATDYILADAAWAPRISTDLFKRANQPKGCFSSPVRNDRPIQNLFAGLVRCSQCGRLMVRKKAQTKTPYDVLICQYTECSTVGIRIDELEEALLEWLKDYIVKYEFTDTHEEDAAAIAAKEMIVTNFETEHQTLLKQRESLFDFLEQGIYTKEIFLERSNALEQRIRDCMNNITAAQEDLHTTIARQANRKNFVPKCKNLLSEWNSLTIPEKNSALRKLIDRIVLTKTKRNKKNQKNSEFMIDVYPKVPK

SEQ ID NO: 22017 - protein, 522 aa, synthetic construct
MMLLKPDGVYYAYLRKSREDQEAESHGGGETLARHEHILRELANRYHIQISRWYREVVSGETIAARPEMLHLLNDIESNHPDGILVIEIERLARGDTRDQGLIMETLKYCSTTVITPMKIYDPNNEMDEEYFEFGLFMSRREYKTIRRRLVAGRYEAAKEGKWTAGKPPYGYEAYKLKNQKGYSLRIVPDEAEVVRLIYKMYLKGTPETDGLPASATRIARALNHMQIPSRTGRQWTNGVVRDIVTNCAYIGKIRCGRRKIQKKVKNGIVTTSTPINKNFCEYPGLHEPIIDLETYEAVQRCFQQRSFRPAFMNTEIKNSLATILRCGNCDHALIRRPHSPKETHDWYLCKYCDMPGAAVSDVEEKVYLGLEEWLKEYSITVGDQTVAVITSNSIHTQLEKKQSKLQTMLRQQNKIYELFETEIYDSDTFRERITASKAETDLLKAEIADMEQRYQKQRQLEANKATMVPKVQHVLDTYWSSSPAERNVMLKEIVQKIIYTKEMKGTKKSIPDFKLKIYPRL

SEQ ID NO: 22018 - protein, 515 aa, synthetic construct
MKIGIYPRKSVYRDNSDSVAVQIKMCKDYAGIIFRGEELEFFIYDQDEGFSGKNTNRPSFQQLMQDVKANKLDVVMVYKLDRISRNVKEFSAMYDTMQDHDVSFVSVKESFDTSTPIGRTVMYILAAFAQLERENTSERVGDNMKQLGASGKWTGGHLPSGMTSIRKKVDGKEHSYLIVNQETIGRVKLLYQLILEGYPITRVERYCRDHSITSETGKFLNTSQIYGILTNPVYCQADLQAFYYLHGKGCTLPDKRLFDGTKGLIGYGRTQGTENKKKLDMDRWIIALGIHDYVIPANDWIAVQERLGQNKQVRTLKHEVGILRGILKCRCGRTMQNRVYIKNQRMFAYYFCPARDREGINYCDADFVKIDTIDNLFIDKLKAIRIDEEFVHPQHNQHSVTDINALKKDIRSTESALENLTRQLQENVTSTAAKYIVQQIENLDKKLNTLKNQLQLEELRDNKERSETEEREEIYKNICYLLDNFDDMEYKEKNELIRRTVKRCVLNDKNLEISF

SEQ ID NO: 22019 - protein, 521 aa, synthetic construct
MKKVQVIPATLQNYTEKPLHSLKKRKLAGYARVSTDRDEQLTSYEAQVDYYTNYIKGRSDWEFAGMYTDEGISATNTLHREGFKSMIHDAMEGKIDLIITKSVSRFARNTVDSLTTVRKLKDKGIEIYFEKENIWTLDAKGELLITIMSSLAQEESRSISENVTWGHRKRFADGKVSLAFSHFLGYDRGPDGNLVVNKEQAETVKLIYRLYLSGYTFHSIAKELTERKISTPAGCKIWRPNTVRSILMNEKYKGDALLQKKFTVDFLTKESKKNEGEVPQYYVQNNHEAIISPQVFDCVQEEIKRRRKGKKRYSGISIFSSKIQCGQCGGWYGAKVWHSTDKYKRIIYRCNDKFEKGCTTPHLTEEKIKDIFVKAVNQLIVNKAEIISNLELVKQGLANTAKWEKERDRLDTDLQVLVNRLRDLIGENAHVAQNQDEYNRKYNELVTQYEIVNDQYDRVCHSIQQYNIRAEQLDDFIKVLQEQELIKDFDERMWCSLVDFITVYGTEDIRVTFKDGTEIKG

SEQ ID NO: 22020 - protein, 538 aa, synthetic construct
MRAALYARYSSDNQRYESITAQLRCSKEYCAQKHYDVVKIYTDEAISGTSVAGRTGFQQMILESGDGIFDVVIFHKIDRNARNEIDYYTNIDRLKKNGVRYEYSAEGIDVSTANGKLTEGIKVAVAAWYSRNLAQEVKKGQKENALKAVFNGGRPPLGYKIINQQYYIEPKEAEAVRLIFEMYIAGNGYTKISEELNRRGYLTRNGQPFAKNSLYEIIGNERYTGTYIFNRILTDEFGKRNNHKVNPDAIKIENAIPAIIDKATFHAAAEMRAKNRHSNSRCRTTENYLLTGKIFCGICGRAMNGHRMRTRSGVYTYYCCNKTRLPADVKCQQKLVKKEYIERNVCEGVLEIVMSDVYREKTISEMIEYHKNLNSTVKGQRKTLQASLKNAETKLSNLYSLIENGTLDEFDAQRISSVKTEIRELRNSLQSLPNTASIEQLNPAKLNALFAKMYEKLKEQVREGNIEVMQMIINSFIEKVVICGDKVEATIKIAPGDFVSAGTVEPHLHHSYGYTLIKCRIPRIILCKTLHLNDVVIL

SEQ ID NO: 22021 - protein, 543 aa, synthetic construct
MGKKQKATGGDAVIYARYSSHNQRDVSIEQQVEACRKHAAELGLTVTATYEDRAISGKTDKRPSFQRMMRDAEQHKFAYVLAWKSNRIGRNMMQALVNESRLVDCGVKVFYAEEDFDDNAAGRFALRSMMNVNQFYIENMAEDVKRGLYDNAKKGLVNGSLPLGYKRGADGKPEIDEPKAAIVREIYTRVAAGELFASIAADLNARGIRTARGREWNKGSFHVLCHNDRYRGIYMYGDIRIPGGMPRIISDELFYDAQEAYGMKKDNRYGRARHGAENYLLTGKLYCGHCGSYMVGISGTSKTGEMHYYYACQKHRLEHACEKKAIRRDVIENAVARAIMMYCLDDETIDFIVDSTIAYFKQKDHELHIEAMENELAAVQQAISNLMKAIEAGIITPTTRTRLLDLEEQQAKLSAKINTAKAERVEIDRDDLIAGLQLFRTGDIKNKKFLAKLFNTFLLAVYLYDDNRLKIVFSFTGNHNNIEIPLELDNDCPDSESGPYETEVRMSHLECSSFWTNSFGRPRGLAMRYHTRKVRFFGSVSCR

SEQ ID NO: 22022 - protein, 556 aa, synthetic construct
MNQTNYLQSYIFDKQTGWRIDLPSYIAPGTRVLCLYRVSTGKQLYHNEQNQADIPMQRIRCRDFAEQQGWTVVCELQEEGVSGHKVRAEKRDKIQTIKSYALEHKFDILLVFMFDRIGRISDETPFVVEWFAQHDIRIWSAVEGEQKFESHVDKLTNYIRYWQADGESRKTAECVANSMAILTSEGCYTGGGLAYGYKYIRTGRTNKRKQEVNDLAIREDEAEVVRIMFTKARYEGYGSQRVANYLTKNGIKNREGKNWHPSTIKAILRNPLYIGIMRSGATRSPVQEHLRIIDDETFYVVQANLDARANMYANKPHTPVATCSNALLSGFIFCGHCGARLCVTTSGKGRPRKDGSDPTRTRYTCQTKSRTHGDCDGQTGYTVRKLDAMIDTILHGIFARIGSMRREDAIRACYSGNHDAQQTIFQKVKRDYEKAEQNLQTLKDEVVKSLTGESAFEPNILDMAIRGQEEKCAELRRAMAHAEEEAAKSQATAEHIAKQYDEILEWAQLYDNCNISMKKVIVANMIDRVDVFRDYQLTIRLNITIEQFLISLENVA

SEQ ID NO: 22023 - protein, 524 aa, synthetic construct
MNKLRAAAYCRVSTDRAEQSGSLASQRSFFDDYIRNSDSMTLVGVFYDEGTSGTTTLNRYGFNKMISLAVSGGIDIILTKEVSRFARNTVDTLNITRMLRAKGVGIIFINDNIDTRDSDGELRLSIMATIAQEESRKISERVKWGQQRKMEQGVVFGRSCLGYDVKDGKITVNADSAEIVKRIFTEYTVLLKGAESIADGLNAEQIRTVNGGRWSGAFIRKVLRNVKYVGDLEQKKTCTPDFLTHKKRLNRSEHIYIRNHHEPIISRELWEQTQAEISRRKPTDTSRHSDRYVFSGKVYCGVCGSVMVSRVKTLKNGKIYHALRCSGRIGGKSCNNETLNVTALKACVKRIFTDIPIDKTAVINAVIKGLSRTDKPDIPALRRKIETLNAKKRRAVDLMLDGLITQQELIEQKSYYDSIIEKLSQEISSDRSVFETDKIRKNAERFLDFTSDPLWLLVRRADYIHSTLTVYLKGVEKGFTTCFTATGRGDSYRVITGNTVRSQGIIPGTMQVQKNWFRHDVNDK

SEQ ID NO: 22024 - protein, 527 aa, synthetic construct
MSHTGKKGEWMKRITKIDMAEPLITKKLRVAAYCRVSTGSDEQLVSLEAQKSHYESFIKANPEWEFAGVYYDEGITGTKKEKRTQLLRLISDCEAHKVDFIVVKSISRFARNTTDCLELVRKLTDLGVFIYFEKENINTQSMESELMLSILSSLAESESVSISENSKWGVKRRFQNGTFKISYPPYGYDYVDGGMEINQEQAETVKYIFAQVLSGISTHQIADELNARKVPTKKGGKWTASTIRGMIYNEKYVGDVIFQKTYTDEHFNRHTNYGEKDQYLMQCHHEPIISREDFEAAGAVLNQRRLEKGITKGSGKYLNRYPFSGKIICSECGGKFKRRIHSKNGGKYVAWCCGKHIDDVTACFMKFIRNADVEKAFVTMMNKLVYGRRFVLRPLLESLREMDRSDSFGMIQELELKMEKNAEQRQILTGLMAKGYLEPALFNKENNELLQEAAELEMQKNGLSHSVNGEMVKTGEVEALLKFAEKGEMLTAFDGELFGRFVEQITVYSRNEIGFQMKCGLTLRERM

SEQ ID NO: 22025 - protein, 509 aa, synthetic construct
MGTKGRRNEEKQKIRVAAYCRVSTDSDEQATSYEAQIEHYTAFIKKNPDWEFAGIFADDGISGTDTRKREEFNRMIEECMEGKIQMVITKSISRFARNTLDCLKYIRQLKDRGIPVFFEKENINTMDAKGEVMLTIMASLAQQESESLSQNVKIGLQYRYQQGLVQVNHNRFLGYTKDAEGHLVIEPEEAEVVKRIYREYLEGANLLQIGKGLEADGILTGGGKKKWRPETIKKILQNEKYIGDALLAKTYTVDFLTKKRVKNNGIVPQYYVENSHEPIVPRDLYMQVQEEMVRRANLHSGENRKKRVYSSKYALSSIVYCPKCGEIYRRIAWNNRGKRSTVWRCCTRVEHGPEGCDAPTIHESELQEVVARAINDLLGGRDTFLPILQANILQVLENNSSGKIAEIDRRLVEQQQKLLKLANGKKDYNAVADEIHSLREQRQKVLAQDAERDGQKKHIEEMKAFLEEQKDIPIEYDEQLVRRLVEKVTVFDEKIAVKFKSGVEIEVDR

SEQ ID NO: 22026 - protein, 545 aa, synthetic construct
MRTIRKIEQKISGLKQRKKVAAYARVSMESERMHHSLSAQVSYYSKLIQKNPNWEYAGVYADYGISGTGIKKRQEFRRMLEDAEAGKIDIILTKSIQRFARNTVDLLQTVRHLKELGIEVWFEKENIHTMSGDGELMLTILASFAQEESRSISDNIKWRFRKKFEQGIPHAKFFVYGYCWEKDNLVIQPEEAAIVREIFDAYLQGRTRKDILRELKRREIRTMYGNYFKDASIRQILTNRIYTGVLEMQKTFVTDPITKRQAVNHGERNRYVVEWHHEAIISSDMFEWVQQELKNRKEMGMQRGGYARDFLNTSCFTGIIKCGICGKSYVHVVRKYKGRIREYWTCDSHKGKGTNCGAYGSIPQPALKKACAAVLGTDEFDEELFVQRVKKIVVPSYHTLVFHFKDGNVITQEWKSTALKDMWTDEQKKKQRQWMETYHQRDTSGRYTAFSECIVCPACQTKFIRCLEKRMNGKVAYWRCRGEHRCIHVRSIKEEWLQRMAAETMGKLEFDDTAFRAQVQRIEVQDNETLLFQFNDGHTKEVKLP

SEQ ID NO: 22027 - protein, 521 aa, synthetic construct
MKKVQVIPATLRSYTKKLMDSQKKRRVAGYARVSTDHDEQLTSYEAQVDYYTRYIQSRNDWEFVGMYTDEGISATNTKHRKGFKRMIDDAMDGKIDLIITKSVSRFARNTVDSLTTVRKLKDKGIEIYFEKENIWTLDAKGELLITIMSSLAQEESRSISENVTWGHRKRFADGKVSLAFSHFLGYDRGMDGNLIVNKKQAEIVKLIYRLYLSGYTFHSIAKELTERKIPTPAGCKIWRANTIRSILMNEKYKGDALLQKKITVDFLTKETKKNEGEVPQYYVEHNHEAIISPQVFDWVQEEIKRRRKGKKRYSGVSIFSSKIKCGQCGGWYGAKVWHSTDKYRRTIYRCNDKFKRHCQTPHLTEDDIKEAFVRAANRLIENKAEIIDNVTLLKERLTDTEALEEERDKLSTDLNLLADKIQQLIAENARVAQNQDDYDRNYNELVSRYEAAKTQYDKTCEAIQYRKARSRQMDSFIKELRNQDLIKEFDARLWGSLVDFITVYSKDDIRVTFKDGTEIRA

SEQ ID NO: 22028 - protein, 506 aa, synthetic construct
MYGMYLRKSRSDDPNEDINDTLAKHEKILFDLADSLNINRKEIMQFKEVVSGENIQNRPEMKKLLEYVMEGVLEGVLVVDSQRLARGDTVDQGTIIRAFSINNTKIITPMKTIDPQNEYDQEYFEFDLFMGRREYKMITRRMQRGRHIAAQEGYYVGSIAPYSFSRIKLDKGYSLEIYEEENIVFNIMKKKALEDEGSTNISNHLNELGYKPRKGEYWTKSAVEAILLNETNLGLIKWNSRKEVKVFKDGKIVKTRPRNPNYELYPGKHPAIMTQDEYDRIKFLMKKRSHPVKKDKTLQNPLAGLIVCGFCNHKMARRPYKNGRVETILCTTSRCKNVASDIHVVEQRIIDTLKDTLKNYTNYVNNYSVSVNKTYDDNKKLQLEECDKELERLNKQIIKACEMLELGAYTVELFKERKNTLENKINTVNKRKDILAKETEAMKIEQYKKAIPQLQNAIDLYWKSSTEEKNKILKSIIDKCIYKKEKGGRWDPDAIKQFKLEIYLKV

SEQ ID NO: 22029 - protein, 527 aa, synthetic construct
MPKTEEKQAVKAVIYARYSSDRQREESIEGQLRVCEDYARRNNITIVHTYADRAMTGRSDQRPEFQMMIRDAATMSFNIVLVYKLNRFARNRYDSARYKHKLKQYGIRVVSAMENIADDPSGILLESLIEGMAEYYSAELAENVTRGMTENALEGKWAGGIVPLGYKLDEKHHLVIDEPKAAIVRQIYQLALEGHNQKYIIDELNKHHYTNSAGRPFSYNTLRVILKNERYTGTFIWRDIRKENAIPVIIDKMTFEAVQKHMQFRKKNHIRSCSKDFHLTGKLFCGRCSSKMVGVSGTSKQGVLYYYYACTSHLKKKCPSKNIRQDALENLICKITTQILSKPEAIKAIAKQAMKMQKDKKESLEIQSLQNQIADINKKLKNCIQAVENGLISETMTNHIKNYENRLQGLKDEVSRQKLLEGSIHLTEQHIEFFFYSISQKLKTADKYKSILLSSLVRCVIVHENYIEIQFNYKNELPILQNPVKVESSYLNQMVTGMGFEPILSALRTQRLNRLTNRPCVPYYNRH

SEQ ID NO: 22030 - protein, 414 aa, synthetic construct
MERAVIYARYSSDQQREESIDAQVRACREYCQRKGYLVTKIYADEAKSGKSIAKREQYKKMLSDSQKNLFDVVVFHKIDRNSRNELDYYLTKNQLISSGIKYEYAAQNIDTSPAGQMVEGILVAVAANYSRNLAEETKKGLKENALKALFNGGRPPLGFEINQENKYIINDYEAGAIRIIFDLYLKGKGYHYIISQLNSLGYKTREGRKFGKNSLYDILRKPKYCGTYTFNKVNKDPSGKRNSHKISENTIIVEDAIPAIISKEDFRKVQEKMNQNRYRSAAYKSKETYLLTGKVFCGICGAAMNGHRASSNGKKYVYYTCSGRDRLGASACQNKVVPRDDLEELVLLTIEQELLSENSLKKLKDTIEMEYQAVANEYADEASSLSEQKAIAERKLNNLYTIIEQGTADEYDLE

SEQ ID NO: 22031 - protein, 525 aa, synthetic construct
MSKKKSKEKVVEFSKLTNKVAAVWTRVSTERQADTNGSLESQRRICTEYAESHAIRIKKYYGGTNESAKVEGKLYREMIAEVARDKEINIILVYSFDRFSRAGYEAMMTKAYLKAKGIYVVSATQATDPDSAAGGFMEDVIFLFNQFENNLRKDKCITGMVECLRNGNWYSKPPLGYDKLKVGREHVLTVNEKGKILRNAFVWKATEGIGDIEIVQRLKGLGLVIDRKHLNKILHNPFYCGFIQHSLLGDEVIKGNQEILIDEATFNKVNSISNAGYEHKEITEPFPLKRHIICSDCGGYLTGYTVKARGRDYYKCNKKGCKSNHSTEKLHQKYINLLNGYNIPDEFIPILTDVLRKVFEEYNQSKGETKKVLLKRKTECENRINAVKVRFGLGEINSEIYTATMSELNSRLAEIRRDLEDAGKNLSNMMNYINQTIEISCKLGSLWRDSDFSNRQKIQNLVYPGGIYFDKKNDDYRTENENEVFRIFRRFTAVCKGGKEKATSNFHCLSPSVGMRRAIDTFCFH

SEQ ID NO: 22032 - protein, 513 aa, synthetic construct
MVIGIYPRKSVYRDNSESIKVQIKLCKEYAKIMYKGEQLDFRVYGKDEGFSGKNTKRPSFQELMRDVKSNLLDVVMVYRLDRISRNVSEFSEMYDIMHAHNVTFLSVKESFDTSTPIGRTVMYILAAFSQFERESTSERVADNMHSLGASGKWTGGKLPAGMSSIRKTVDGKEHSFLVVEDERIGLVKMLYNMYLEGYTITALERYCRDHGLRTESGKFLSTSQIYCILSNPVYCSNSAAAYDYFKERGHTVPDKLFFDGTKGLVSYGKTKQSDKRVINDKYTISVGIHEPVIAAEDWIAVQNRFGVNKFYRSNKYEVGILKGVLKCSCGARMDIRTYVKNGNQFSYYYCARMAREGKNVCDTGYIRVDTIDDAFIKKLMQIKSNPDMIKVRTTELDFVDINKIEAELKSIEQAIENLTNTLSENSSSTAAAYIIKQIEKLDANKAKLESSLYSAMQNNKIVQSEKETKDIIYDYICCLLENFEFMSYQEKNELIKKAVKKCICSNDGIHIIF

SEQ ID NO: 22033 - protein, 501 aa, synthetic construct
MNIREDVIYARQSVDRKDSISIESQIDFCKYELKGGSCRIFKDKGYSGKNTDRPEFQKLLGEIRKGKVRRVVVYKLDRISRSILDFANMMELFQEYDVEFVSSTEKFDTSTPMGRAMLNICIVFAQLERETIQKRVTDAYYSRCLKGFHMSGQAPYGFDLEPTVVENIRTKMMVADPIAANHVRLMFEMYAEPETSFGDITRYFEEQGIKVYGKSLTRPFLSQLLRNPVYAQADLEMYEFFKSQGAVVVNDAADFAGTNGCYLYQGRDVKEDKDKSLKDQILVIAPHEGFISSDIWLRCRKKLMTNITFQNGRKARNTWLAGKIKCGKCGYALKTTHNPSGYEYLRCSKRADHKGCPGCGTLRKNEFEQFIFTAMGEKFREFKLLRGGEGKVNPKITAYQVELAQVEVEIEKLLDTLTGANATLLAYANKKIEDLDNRRKTLSKAIADLSVETLSSQQIELLSGYLDDWEHISFEDKRKAADSLISSISATSDYVKIEWKI

SEQ ID NO: 22034 - protein, 536 aa, synthetic construct
MQTGKITALYVRFSYDDGIDAESGSIEHQKSLLRSYAESNGFTNLSYYADDGYTGTNFNRPDFQRMLGDIHKGLVSTVIVKDMSRLGRNYLMVGQYVEIEFPKHNVRFIAISDNVDSAKGMNDLLPIHNLMNEWYSRDISKKVRAMIRQKGNSGQSIASKLPYGYYNTPEDKQTWLIDESAANVVRRIFDLYLNQSFGMYQIARILKAEGIPRPTYHRRMAKGIKVEADDLCVWSASVVRDILQHREYIGDTVNFRTEITSYKNKKVIHNSDDKLKIFPNTHPAIIDKETFQKVQDKISKEIRHTRNVHSYLFADYLYCMDCHSRMHGRQCYLKGGRTLSAYECSTYRKSKGCCFHGVPEMYLQAEVLAKIQNVLAFAKSNPAEFRQNISKALEEQSDGSKAVIQEELDKAQARTAEIDKYIQGLFEAKVRGEIDGSLFASLKKTYDEEKEQLNKLIIDLITKLSRENEADEKIQLLYAAIRKYDAVWELTPEVLTDFIEKIEVGQVSAENKKISFELRDNQISVFFWGVGIIDFM

SEQ ID NO: 22035 - protein, 523 aa, synthetic construct
MAQRKVTAIPATITKYTAIPIGSKQKRRVAGYARVSTDHEDQVTSYEAQVDYYTNYIKGRDDWEFVAIYTDEGISATNTKRREGFKAMVADALAGKIDLIVTKSVSRFARNTVDSLTTVRMLKEKGVEIYFEKENIWTLDAKGELLITIMSSLAQEESRSISENTTWGQRKRFADGKASVAYKRFLGYDRGPNGGFVVNQEQAKTVKLIYKLFLDGLTCHAIAKELTERKLPTPGGKAVWSQSTVRSILTNEKYKGDALLQKEFTVDFLQKKTKKNEGEVPQYYVEGNHEAIIDPATFDYVQAEMARRTRDKHRYSGVSMFSSKIKCGECGCWYGSKVWHSTDKYRRVIYQCNHKYKGGKPCSTPHVTEEQVKDAFVRAVNILLSEKAELGANVRAVIAMLCGSAELEKQQAELKEELEVVVGLVERCVAENARTALDQDEYSERYNGLVSRYEAVKAQFDEVTQAIADKNDRKKLLEQFLRMVETQEPVTEFDERLWSSLVDFVTVYREKDIRVTFKDGTEI

SEQ ID NO: 22036 - protein, 531 aa, synthetic construct
MEQYCLYLRKSRSDIEAENHGEEETLARHEKILLDLAKKREYNVTQIYREVVSGETIAARPVMQQLLSEVEHGIWSGVLVVEVERLARGDTIDQGIVAQTFKYSDTQIITPMKTYNPNNEYDEEYFEFGLFMSRREYKTINRRLQRGRLSSVKEGKCVCSIAPYGYDKVKLKGDKGFTLAPNPNEADVIKMIFELYTKGELQPDGTYKRIGVALIARKLNEMKIPARKSEYWVPASIKDMLRNPVYAGKIRWNWRSQSKRMQSGSISISRPRSEEDNCIIVNGLHPALITEETFDLVQEYLAKNPPRPTKRNAPTKNPLAGIVVCAFCGRKLVRRPYTSASCPPTLICSVPHCPNVSSFLHLVEERILKSLEEWLRNYKLQWNLSNNKPSELISESEILRQSLNDINSQITKLNKQMIKAHELLEQDIYTTEVFLERSRAITERLNQLSYDKAEIEKRLGVETIREKSMKEIIPKVEKLLDVYHELPSAKEKNDMLKDVLEKVVYKKTQNTRWSGSPDDFEITIYPKLPKS

SEQ ID NO: 22037 - protein, 516 aa, synthetic construct
MARKKKVSPGNRLVAYYRYSGGSQQTEQSIEGQRRDCEAYARQHGLTIVHEYIDRHISGRGVESRLAFQQMIADSSKHLFDLVICWKTDRFARNRYDSAVYKKKLRDNGVRILYAAESSVEGPEGIILEGLMESLAEYYSAELAQKMRRGMRESALKGRAINPSRPLGLTTDEHKRFIIDEKNAPTIRFIFEHYAAGESSASIVEQLNAAGLRTSKGNAFNKCSIPRIIQNEAYHGVYICKAYDVRIDGAIPAIIDDDLWKRAQKMLTLNKQHRAPHSFHADYLLSGKLFCGCCHSLMRGISGHNCRNDVYYYYACGNKADGGTCKKKNIPKDVAENLVVNAICENILRPDTLEDLADAIAAAQQADVNQPDPERAMLEQNLADVHQKINNIIESIENGTASSRLSARLADLEQQESTLNYQLESLKEIHPPVLDRERILFLLEQFLISPNERTEDYNRRIIDTFVNRIEITDTEMLIYFNLSEASASEKQKNSQSNSCSTGNHLVRVARIELTAS

SEQ ID NO: 22038 - protein, 523 aa, synthetic construct
MTAVIYARYSSDSQREASIEGQLRDCKDYAEKNGITVVGTYIDRAYSAKTDDRPDFQRMIKDSGKKIFDVVLVWKLDRFARNRFDAVNYKYQLEKNGVHLVSAMEPISQGPEGIMVESMLIGMAEYYSAELALKVARGERENALQCKYNGGVVPLGFTIGKEDRLYHIDPETAPIVQEIFTRYADGEPAEKIAASLNERGLRTRTGKPFVKNSFFQIFRNRRYIGEYRYKDIVTPGGIPAIVDQDLFDRVQQRFEQNRIAHGRPAKEDVRYLLTTKLFCGKCGTLMGGESGTSHMGNTYYYYKCGNAKRHGKAHCDLKAIRKEPLERFVVDTAIKVIFSDEIIERLIDLVMEAQQQENTRLPVLKEQLRDTEKRLANLLEAIEQGILTPTTKQRLDELEARKEALNTSILEEELKKPVLTREWIRFWLEKFRKGDVGSTEHQRQIIDTFVNSVYVFDDRVVLNFNFTDDAKTVTREEVLGSSAVDNAPPMKSKTNTRSPFKWSATCSFCFVRFQVFNQVLIKF

SEQ ID NO: 22039 - protein, 530 aa, synthetic construct
MEQYLIYLRKSRSDLEAEAHGEGETLSRHEHTLLELAKRQHLNVTDIYREVVSGDTIAARPMMQRVLSEVEQGVWSGVLVMEVERLARGDTIDQGIIAQTFKFSGTKIITPIKTYDPDNEFDEEYFEFGLFMSRREYKIINRRLQRGRLASAKEGKWPSGLAPFGYRRVKLKNEKGCSLEPIEEQAAIVRMIFDLYTVGLQDEDGSARPLSLGSIATRLNDMHIPSPSGSQWARITIRGIIKNPTYIGMVRWGSRETKKKVVDGKVVSVRGPADPEKECVFKGIHPPLVPKETFELANDKLARSENTSTHKEKVVRNPLAGLLVCSECGRQMMRMINPVHPDMPVVRCPRRGCPNCSSYLPIVEERVIQGLSEWMKGYELEWSSAAASSSVSSVGVREKALASAEAELRKLQQQLERTHDFLEQGIYDTDTFLSRSRMLSDKIAAAKDSVARCSRELTEEKLRETSRRDIIPKVKNLLDVYPLLETAEEKNALLKEVLEKVVYQKLNEKRKKSPDGFTIEIYPRIPKSEK

SEQ ID NO: 22040 - protein, 655 aa, synthetic construct
MGKAILFIRVSTEQQHLESQEDTLKRAAVADGYREEDFIIIGKKESAIKLDEDNRQGLQELKKQLSEGDIDCIYIFELSRLSRKPMVLYSIRDQLLDARVQLKCLNPAFTLLNSERTGFDNTASLIFSLFGAMAEQEMIEKKERFRRGKRRLAEEGRYNGGNIPFGYRIDKEHKNKIVINDEEARLVKEIFNLYESGISQPQLAKEYYRRGERRLTISLINNILNNERYTGRKRCYRGSSYERAYPILVTPEQFQHCREIARKNNTTADKTQNIYYANRLIVCKDCGCYWSASGSKVSYHCYDAFNTMRKYDHYKTPQCRNRKSISINIMDSLLWHVAKDAELDYIMNAASEDRQKYEERINVLEQKISFVKVRLEDLDKKRDRIVESYIEGDLTKEKRDDKFRILDEKRKEILLEQTSFRNEREHLKFLLEDIKLEYDIDDVLKITGHIERTISLEEKIAGISDDGERSRIIHRHIQEITVENRETEYEFGIGKRKTPTRFITIKFYSGEKQYYHYLPSTGRGGIVLLSTSDGLPMEKIRLEYLDRFCDGGKRRRYQEAKEKKQQERKAKYPDNEYILGYSGLARFLKVGVSTAYRWTETLDVLKPAVVDIYNKQIVVDKKKCIKLLAVAAEHNVWAKKIFNNVNDLYHEDEDY

SEQ ID NO: 22041 - protein, 610 aa, synthetic construct
MRAAFLIRCSTKKQDYERQVNDLTRLAKKFGYTSSDNMIFGEHITGKDDASKRDRQSIQRLKDAAINKEFDVVLVSEVSRMSRDPMSGRLYVRQLINMDIPVYFRDIDTWTIDPVTGKKVRDAETIIGAAFDAAWKYIKSMKTQIASGRRDELDNNQMSIGQPFFGYKRYGGRDKGKKNSWVINDDAAKVVVDVFEEYIKDGATLKSTALTISARYGKQFNKKFSIGTMEHILTFEPYYTGIKVVSLTDPDTEDVDKFEVKIPTIITQTVFHKAAIKRATNRVTKNPYPRQTTYVLSKLLKCPICGHSLTPQKRVGDKGEKYRLINGKIAISWTCMSGINNATDCNSRISINNEKIEMIIWGLVKQELIGFANLNDENRMAKIEELTNKIASLEANIANFIVQISNMDKLIERAYSAYIDAPENVMDIAKNKYYQTLTKCENEKVECKHKIEDLKVEKQKQGNILTFYSQPTLPKDAIEKAESDPIKKRNLVVELVDKIYTYKISTYVSPVTKKIIRNGIVLLEVCTINGIYNVLYDSNQRNNKVAYYISGNYATFQNGKSKFDAYPIGEYFVISNANMVTDTDEIDLTVTFNEMIDICEQNGWEINYSF

SEQ ID NO: 22042 - protein, 612 aa, synthetic construct
MRAAFLIRCSTKKQDYERQVNDLTRLAKKFGYTSSDNMIFGEHITGKDDASKRDRQSIQRLKDAAINKEFDVVLVSEVSRMSRDPMSGRLYVRQLINMDIPVYFRDIDTWTIDPVTGKKVRDAETIIGAAFDAAWKYIKSMKTQIASGRRDELDNNQMSIGQPFFGYKRYGGRDKGKKNSWVINDDAAKVVVDVFEEYVKDGATLKSTALAITAKYGEQFNKKFSIGTIEHILTFEPYCTGIKVVSLTDPDTEDVDEFEVEIPTIITRAMFDKATTKRATNRTARTPYPKQATYILSKLLKCPICEHSLTPQKRGGDKGDKYRLMNGKVAIRWSCMSGINNATDCSSRITISNEKLEAIIWGLVKQELIGFANLNDEDRVAKVEELTDKITNLEMNIANFTSHISNMDRLIERAYSAYMDAPDSVMDIAKDKYYKTLTKCENERAECKDKIEALSTEKLRLENMRTFFNQPTLPKDAIEKAESDPIKMRNLVMELIDKIYPYRITTYVSPATNRIMRNGIVLLEVYTINGIYNVLYDGNQRNNKVAYYISSVYATFQNGRNKFDAYDTGEYFVISHATLVTETEDVDMLVTFNELIKICMQNGWEIDYTYKM

SEQ ID NO: 22043 - protein, 544 aa, synthetic construct
MAETAKKISMIPAKVQYDRNVKLSEKKMKVAAYCRVSTELEEQDSSYEAQVEYYTSKISENENWKNAGIYADDGKSGTNTKKRADFNAMIQDALAGKIDMILTKSVSRFARNTVDSLVTIRKLKEKNVAVVFEKEGINTLEGTGEILITILSSLAQEESRNISENIRWGVVRKFEKGKVIVNCTKFMGYTKNEDGDLVIVPEEAEIVKLIFRLYLEGYSTGKIAKHLEEQGIKTATGQDKWHSTVIDKMLRNEKYMGDALLQKTYTVDFMTKKKVKNTGLVPQYYVEDDHEAIIPKELFYRVQEEMMRRASLCKAAVTRKKNQRSRYSSTYALTGMLICGKCGQEYRRVTWARNGKKKVVWRCSNRLTNGVKKCGESETLEENALNRAVMEAIHRITSDDMEFMENFRQNIIHVIGSYSTAKESGEYEEKIKEKQDEMVALIAENAKTGSYTPEFDERYRTIAEEINALKEAQKTARNEKQMSDSYEQRIKDIDHYLSTRTCQIQEFDNDLVRRMISTIKVESSEKLLIQFQSGIVMEQEIRYE

SEQ ID NO: 22044 - protein, 538 aa, synthetic construct
MAKKVTVIKAAKAQKHTQEERRLKVCGYARVSTGSQAQATSYTAQVEYYTEKIESNPLWEFAGVYADEGISGTNVKHRDEFQMMISDCEDGNIDLILTKSITRFARNTVECIQTIRKLKEIGVGIYFEKENINTLSEKSELFITILASVAQGESENISSNNRWAIQKRFQDGTYIISTPAYGYGKDEDGNLVIIESEAETVRWIYESYLNGMGVYVIAKALNQKGIPTIRGAEKWQDGVIQDILKNPIYEGDMLQQRTYTETRFPFVRRVNNGQRNQYLIKDSHPPIVTHEEAEAVRNLMAYRVDVLHMNKSDYTKRYPFSGRIICGECGRTFRRQKIYIGKPYEKIIWTCSGHVEDKESCCMKAIREDVLHRAFTDMWNKLYTNQGTILEPLLKELTELVAARQDSEEIRQLDKEIKDISEQSQILNQVMRKGYMDSALFMESSSKLGWQLTECRRKKTLLTRKLRRTKEIVRTEQLIQLIAEQDGLMEEFDEQLFKMTAEKIVVSKEHDITFCLYNGLKLTERGGGQDAVAHANRL

SEQ ID NO: 22045 - protein, 503 aa, synthetic construct
MNNRIDAIYARQSVDKKDSISIESQIEFCKYELKGGNCKEYTDKGYSGKNTDRPKFQELVRDIKRGLIAKVVVYKLDRISRSILDFANMMELFQQYNVEFVSSTEKFDTSTPMGRAMLNICIVFAQLERETIQKRVTDAYYSRSQRGFKMGGKAPYGFHTEPIKMDGINTKKLVVNPDEAANIRLMFEMYAQPTTSYGDITRYFAEQGILFHGKELIRPTLAQMLRNPVYVQADLDVYEFFKSQGTVIVNDAADFTGMNGCYLYQGRDVKPSKKNDLKDQMLVLAPHEGIVPSDIWLTCRKKLMNNMKIQSARKATHTWLAGKIKCGNCGYALMSIFNPSGKQYLRCTKRLDNKSCPGCGKIITSELEAVVYQQMVKKLASYKTLTGRKKAAKANPKIAALQVELAHVDSEIEKLVDSLTGANNVLLSYVNVKIAELDGRKQELVKQIAELTVEAISPEQVNQISGYLDTWDNVSFDDKRRVVDLMITTIAATSDSLNITWKI

SEQ ID NO: 22046 - protein, 510 aa, synthetic construct
MSYFIYARKSRKDAELEALGIDVLERHITTLLELAKTLSLPIGAIYREVVSGDSIDTRPVMTQVLSEVEACMWDGALVMDVDRLARGDTIDQGRVQRAFFYSNTRIVTPSKTYDPANEYDNEYFEFSLFMSRREYATIKRRMQRGRERSSSDGYYVGNVAPYGWERVIAPDGKHYSLTPSQTEAPVLDLMYDLCGNKQYGYQKACTYMTNMGILARSGKPFSPSTLKGIISNPANIGKVRWGYRKTVRAVKDGRVVKSRPNATDYILADAAWAPRISTDLFKRANQPKGCFSSPVRNDRPIQNLFAGLVRCSQCGRLMVRKKAQTKTPYDVLICQYTECSTVGIRIDELEEALLEWLKDYIVKYEFTDTHEEDAAAIAAKEMIVTNFETEHQTLLKQRESLFDFLEQGIYTKEIFLERSNALEQRIRDCMNNITAAQEDLHTTIARQANRKNFVPKCKNLLSEWNSLTIPEKNSALRKLIDRIVLTKTKRNKKNQKNSEFMIDVYPKVPK

SEQ ID NO: 22047 - protein, 502 aa, synthetic construct
MEIQIMEGSREQKRKLKVCAYCRVSTDADEQENSLENQVRHYETVIKANPDYEYAGVYSDFAISGFKEKRPGLQKMLADAEKGKIDLILTKSVSRFARNTSIVLEATRKLKELNVGVFFELQNINTLSGEGELMLTILAAFAQAESESGSVGAKMVYQRKYEAGIPVQYLERSFGFKKDERGVYIADEEEAAWVRKIYEMAADGYTPAAIKRYLNENGVKTVGGAEWIDSTVFRLIENEIYKGDYIMHKHFVNEERKLVRNRGEVDAWYIEDDHEAIVSPELWQKAQDALEAKRDYLAEGSVIEEFTEENYPYMNKIFCARCGHPLYKRIYSNGNRLNWGCSGTKRYGKSFCEGINIPDGVLRGAWHFDEKIYIGEKPTEKGKKEFTYLKEASWKRRHKKKEPEPIPENTETEYPYREKIFCGLCGSRLVRHVNTKSHKAIWVCNGRKRKGKDFCDGTRVPDTIIKGWGEIKKDIYIQRKDDKNGKKRYSYTSKKPKGTDRA

SEQ ID NO: 22048 - protein, 464 aa, synthetic construct
MARSVTVIPARNQKVRTGHKAVQEKKIRVAAYCRVSTDQEDQLHSFEAQVEYYTKYINEHENYEMAGIYADEGISGTNTKKREQFKKMIADCEGGKIDLVITKSISRFARNTQDCLAYSRKLKNLGIGIIFEKENINTLDSTGELLFTILSSLAQDESRNISENCKWGIRTKFKNGEMHLNTFKFLGYDKDENGKLVINKEQAKTVRRIYRDFLIGINPAQIAKELTEEKVPGCLGQTKWYPSTVTGILKQEKHMGDALLQKTYTADFLTKRQVRNNGEIAQVYVKDSHKGIIDKQTWNAVQEEFDRRERFMESHGTDRYSYGADCMPFCEKVFCGDCKSLFTRHSWRSRGIVQWQCKNHRKDGKVACTNAYVDNADLEKGFVKAFNRLVTDRDKHMERWQQMKSDGTPLEKIRAGQMMEAVENEPLTRFVPEIAQLVLCEVTVLGAKKYEFFFLEGSRVKVSV

SEQ ID NO: 22049 - protein, 516 aa, synthetic construct
MKTVSRIDPIPRKQKKLRVAAYCRVSTDMDAQLESLEAQKSYYENYIGSRADWVLVGIYYDEGITGTKKDKRPDLLRMMEDCEAGKIDFVLTKSVSRFSRNTADCLELVRRLMELHIPIYFEKENLNTSEMEGEFLLSTLSSLAESESVSISENSKWSIQNRFQDGTYKLCSAPYGYRWDGKNLVVDPVQAKVVKRIFAEVLAGKGAGTIAADLNDDGIPAQRCDHWTSTSILGMLTNERYVGDALLQKTFTDEQFNRHRNTGEMDMYCVQEHHEAIISREDFDAVAVLLEQRAAEKNIQKGVNKYQNRYTFSGIIRCAECGSTFKRRVNSGKCGKYAAWCCGTHIADKTKCSIQSVRDEDIKLAFTTMLNKLIYGNSLILKPYLKALKNTLQDESQLRIQYLQGLVAQNTEQRETLTRLMAQGYIDQVLYSRENNGLLAQCEEFRSEIETLKKSRTTRAVQTAETEKLLKFVEKAEMLEEWNEDFFQQFVDYITVYSRNEIGFVLKCGLTLRERI

SEQ ID NO: 22050 - protein, 481 aa, synthetic construct
MKNENIRSNVSIYMVDLYIRVSTTEQAMEGYSVGEQENRLRRFCEALGYQIHKIIIDPGYSGASLNRPGIKEVIRDVQEHLVSKVIVWKLDRLSRSQKDMLIMLEDVFLANNCDFVSMLESFDTSTAFGRAIVGILAAFAQLERENIKERTTMGRQARLAKGHYNSSRPPLGYSFLPGCNDLKVNPYEASIVREIFSLFLSGTAINAIATIMKQKYPTVRRWNNTTIRRTLRNSVYIGKVSDVDVTRDGIHESIISDSDFNMTNSILQHNAEIKKQSCRSKSLLTGLLYCGDCGARMQPRTISQGYPLRRYVCYSVSRTSKAMIKSDHCTNRLHPYTQEELDNIIINEIKKLAVDQKYLKSIIQEDAAPVLNESELCQDRLTELDKQTDKLLNLYQIGAVDLPQIQDRLTALKQERNSLLQTLDKVSAEMPLNVQQVQNYAAAFQEALENEDYDQINNIIRLLIDKIVVLNENIEIHWTFC

SEQ ID NO: 22051 - protein, 502 aa, synthetic construct
MKTAVEYLRYSSDSQTEQSIEGQMRVCHEYAQRNDIVIVGTYIDRAMTGTNDNRKDFQRMLKDSANQAWDYVIVYKLDRFSRNKYEMAIHKKTLRDNGIKLLSAMENIPDTPEGIILESMLEGYAEYYSAELSQKVKRGMRESRSKGYFTGGTLLFGYKVVNKKVVIDEDKAAVIRKIFTDYAAGVFVKDIIAELTEKGILHHGKPFARNTIYNMLKNEKYGGVFRHGDEVFTNIYPRIVPDNIYKIVRQDIEKNRYGKHTQENEYLLKNKVVCGYCGKIVTSDAGTSKDKSVKRYYKCSGRKCGSDCNKSTIRKNILEKLVIDTTLKVLDNPDSVNFIAEQIIAEREKILKDNSVINILEQERRELTKAIDNILSAIEKGIITNSTKQRLNELEDKLNTVKCKIAVEENETKFILTKQDIIKFLRKAVKNEPKQMLKLLIKKIILYDDKVEIYFNYVDNKEPDDFEHQALSLSTEDIEFYVNDLKYKEQNFMMYLTVKTFI

SEQ ID NO: 22052 - protein, 523 aa, synthetic construct
MNICCYGRKSIYSDHSDSIDNQFRMCRDYVEMKFSGQVDSFLEYQDEAFTGANIKRPDLQRLLVDIAAGNCDILIVYQLDRLSRDVRDFANIYAILEEHHVKFISIKENIDTSTPIGRAMMYVTVVFAQMERETIAARVADNMIGLAKKGYWTGGNPPEGYVRTRIEANGKKHCSIVPDPEGVKYVTWIFDTFLQNGYSLQSMETAFKKQGIRTRTGAFFSTTQLHKILTMPYCAQATPEVYDYYAAKGCQMDIESPREQWDGTCGVMIYGRTTQKNKKHQMQPPEKWLVCLGAHEPFMPADKWLAVQARFAQNKFDKTMKYDVPLLKGVLRCSCGSIMCVSRKKKKEGVSSWYYCLKRMRQGKEVCDSHHIKCELLDQKVLELLQSIKRDPGVIQKFAEQNTEVLSGPDPKVLASKINTCQTRIDRLVSSLSLAADSSAQKYILAELERLDLEIQALRREHNLALAVERKRSLQQQDTLSKVSEINRLVSDLDSFSAAEKNAIVKDVIKKCVWDGESLSIML

SEQ ID NO: 22053 - protein, 514 aa, synthetic construct
MAKRKFNKGGEVRLVAYYRYSGGSGQTEQSIEGQRRDCETYARLHNMTIQKEYVDRHISGKTDDRAAFQQMITDSDKGAFDMVICWKTDRFARNRYDSAVYKKRLRDNGVEIVYAAESNIAGAEGIIIEGVMEALAEYYSAELAEKMRRGMRESALKGQAISRCRALGLKTDEHKRFVIDEKTAPTVRFIFEHYAAGESATSIVDKLNAKGLRTSQGNPFNKSSIPRIIQHEAYRGVYVSKSYDVRIEGAIPAIIDDELWERAQTMLKLNRQLKAKNEPKADYILSGKLYCSCGSLMRGMSGHSATGEVYRYYTCPNKNCHLRNIPKDDLEGKVMQSISDHLLQPEAMEALAEAMVEVQKADAEKPNAERVAIEQSLADVRRRSKNILDAIENGTANAQLCARLDDLSEQERTLNFQLSALEKEKPVVFTKEQYLFLLEQFLVEPSERTPEYGRRLVNTFVTSMVVSDRELVINFNVSDETVNKNKKTSQTNLQKESSSGMRLVRVARIELTAS

SEQ ID NO: 22054 - protein, 594 aa, synthetic construct
MAYAAMRKAGLVPEAAPDLRTVALYVRVSTGYQVDKDSLPFQKKELKNYCEHVLHIDKNRIEVFEDAGKSGKNTNRPGFERMMKKVRAGQISHVIVYKIDRISRNLVDFSLMYDDFKYNRVTFISLNEQFDTSSAIGEAVLKIILVFAELERKLTSERVKDVMIGRALSGQWNGARVPFGWEWDEETKFPKHSETEAVFARLMYDLYEETRSTCKVRDYCNTHDVPTKRGGEWTSKTVADFIRNPMNRGDYRYNYRESARGRKKPEEEVVYIEGVFPPLVPVEQWDRCSAIMDHNAAVRCAPGVPHKKKHVHPFAGLLVCGACGAPYQVIKQDKPRENGFSPSLYRCGNRYRKRSCTAAGCSDVVLGPFVFNYVSSMVRAVNLRTKIKTPEELERLLLSGPEFQNVAGIASEGLNATFALLSGRPAASGPSYAPDLLTAPADSVNAGEVEEIKQQITRLERAAERLKKAYLFDENAMSEKEYLETKIALDTERVQAENRLKDLSEAAFSTDAGELSFIKSASSFLLAHRIQSGDHIVYSDFAPLVGNETMRDFLNLIIEKVVIRNGRPEEITFKNGLTHIFLYRDETAKNVAKS

SEQ ID NO: 22055 - protein, 488 aa, synthetic construct
MAKKRAVAYVRVSSGSDAQLHSFDFQAEYWTTTLAEEPDVELVGIYADKGISGRSAEKRPQFQMMMQDARAGRFDVIYTKSTSRFARNTVDLLNAVRELRDLGVEVVFQNENISTLQPTSEVYLTIAAALAENELQDDSARQRWSYQDRFKNGWISIGKRMYGYKMTADNQVEVIEEEAAVVRRIFGLYIAGNGAVKICKILNADGLKNSYGNPWQHNNILEIISNEKYTGNALMGKHVRINGVHMRNDQGQHSQRYYIENTHEAIISQETFDEAQQVRESRKNAKMVGRTQPQHEFTGMIECGCCGKHFNRKMNATGLKWSAPVWTCYTQTKFTVAACDNSRIKENVLHEKFIEAYNRFIKERPTGETVSNLIDRVSSLEAEEHELAALALQHMITEVAFHKEQLRIKAEVTKLNDEIADQRNRSIGEEDLIPITEYDPEKVKKFITKVIVYRNTITFVFYNGAEIKMDYSNGQPGNKPGWNGKEAK

SEQ ID NO: 22056 - protein, 540 aa, synthetic construct
MATVARRIVTAVPSVGASAARTDREYVKEPVAAYARVSTEKEEQEDSFERQVEHYTKMIQTNPKWSFVEVYADPGITGTKADKRPNFMRMIDDCRAGKIKKVLVKSVSRFARNTVDALTYIRELKDLGVSVYFESENIDTMTPGGDVLLTILAAMAEQESRTISANIKWAYQKKFEKGEVTINTGLMLGYEKAGKTEDGRTQYRIIEEEAAIVRRIYREYIGGKTITQISQGLREDGLVSKRGCSTWCSNTITNILKNEKYAGNAVLGKTYKPDVLSKKRFKNDGSKSPMYYAENTHPAIIDEETFELAKEEMERRQNDKQKAVGRSRYSSKYPFSGILVCGNCGSRLRRHLRKVGSGKRVPAWGCANRIINGRAVCDSHHVNEDVLQRTYLAALQTMVDGSEEIIEAIEKSTATEMRTDTDIDNIDQQIIAIQEEVLTLHRQKQRLAITEEDYQKRLAAFGEQMKELEEQRKQDRTAENRYAAMRLWLDEFKEHTESGDFMNDADGSIMKALVEKIIVKDASMEICFKCGVSIEQVYIE

SEQ ID NO: 22057 - protein, 459 aa, synthetic construct
MSTTHFYSHYPTIEYKTCALYVRCSKEEQAKFGDTIEAQIEDLKAFAKLHHLKIYAIYVDEGHTARKKYNKRKEFMRMLQDVELHKFEYIIFTKLDRWFRNIADFYKIQEILDNNGVTWLTALERYEMETTNGKLNVNIRLSVAQDEADRDSDRIKDVFRLKVKKGEAITGSLPIGLMVGENGKVDIDPDTVQIAYDMFDYFEVHNSKRGTLLHLIDKYNRYFCYETIARALRNPLYKGEYRGNPDYCPKIIDPARFDRIQVLGKRNVKVRKNNRYYVFSGLAQCKECGHALVANTTVQKRYNREYTQYRCNYYSNSHLCTHSHGTNEKVIEKYLLDNIKPELEKYVTAYEVKQNAPTKKADPSKIKTKMQRLKELYVNELIDLGDYRIEYEQYKQELDRLTSTAAPEVKDLSAIRSFLALDLQSIYDSLTPQEKRTLWSSIIDKIIISDSGDIEIVFL

SEQ ID NO: 22058 - protein, 446 aa, synthetic construct
MKIVTEIAAIAPIKKLKKVCAYARVSKDKDAMLQSLSSQVSHYNKLISSNPEWQFAGVYADEGISGTKEDRPELLRMVEDAKAGKIDMIITKSISRFGRNTETVIKTVRMLKAINVDVYFESQKMHTLSEEGEFMLTVLASYYQEEARSVSENMKWRIKKDFEQGIAWGGNDNFGYKLNGRTLEIIPEQAKIVKRIFDMYINGLGVMAIAKALNEEEIKSTMGGKWIKSNVLRVITNINYIGDRVLQTTFRPDFLSKKKKINRGELKQYYVEDDHEPIIDKETFMKAQLIKEERAKRFKLDVSKRNIAYPFTQKIKCSCCGCTYQHKITKYNQYWICSTFNMKGKKNCMESKQIPEEKLYEAINSYLGIEGFDEDLFNKKIDYIVAKPNNVLEIHLVDGTTDEIKWTDPTRKNSWTPEMKEKARIKSKEIEKNLKRGADGKWVKSE

SEQ ID NO: 22059 - protein, 526 aa, synthetic construct
MGKVRVIPSTINPLTHQSIVANVKRKVAAYARVSTDSDEQYTSYEAQVNYYTGYIQSRVDWEYINVYADEGISGTNTKKRVQFNKMIEDALEGKINLIITKSISRFARNTLDTISYIRKLKATGVEVFFEKENLWTFDSKSEMVLSMLAAIAQEESRSISENVKIGKRWGFKEGKVSMPYKNFLGYDKVDGKIVINEEQAEIVRLIYRLYARKGYSRAAIADYLNEMKVPKPSNPEGKWSINNITAILTNEKYKGDALLQKGYVDNYLDHTVKKNKGVLPQYYVENSHPAIIDKDEWNMVQEELKKRDKFRYAYSKNNPFSSKLICGCCGHFYGLKVWHSNTQYRKEIMQCNKKYSKKDDRCDTPSVLREDVNKRFIEAYNAIMINKEEVIKSAKELIDLLTDTTKIDKRIEELNGEIFDTKTLVENIIHDNAFKSQDQDAYIKKYNSLTAQYEILKQQLEETIGERDVREMKSKSMNLFITDINEAPVMINEFDLTLWNIMIDEAIVNKDGSITFKFKNGMEYKN

SEQ ID NO: 22060 - protein, 464 aa, synthetic construct
MARSVTVIPARSQKVRTGHKVVQEKKIRVAAYCRVSTDQEDQLHSFEAQVEYYTKYINEHENYEMAGIYADEGISGTNTKKREQFKKMIADCEGGKIDLVITKSISRFARNTQDCLAYSRKLKNLGIGIIFEKENINTLDSTGELLFTILSSLAQDESRNISENCKWGIRTKFKNGEMHLNTFKFLGYDKDENGKLVINKEQAKTVRRIYRDFLIGINPAQIAKELTEEKVPGCLGQTKWYPSTVIGILKQEKHMGDALLQKTYTADFLTKRQVKNNGEIAQVYVKDSHKGIIDKETWNAVQEEFERREKFMQKHGTDRYSYGSECYPFCEKIFCGECGSLFTRHSWKSRGIIQWQCKNHRKDGKVACTNAYVDNADLEKGFVKAFNRLVGEREKHIERWNSMKLDGTPLEKIRAGQMMEATESGQLQKYVPEAAQLVLEEITIFGAKKYEFAFLEGSRVKVSV

SEQ ID NO: 22061 - protein, 502 aa, synthetic construct
MEIQIREGSREQKRKLKVCAYCRVSTDADEQENSLENQVRHYEMVIKANPDYEYAGVYSDFAISGFKEKRPGLQKMLADAEKGKIDLILTKSVSRFARNTSIVLEATRKLKELNVGVFFELQNINTLSGEGELMLTILAAFAQAESESGSAGAKMVYQRKYEAGIPVQYLERSFGYTKDERGVFVADEAEAVWVRKIYKMAAEGYTPASIKRYLNENGIKTVGGVQWVDSTVFRLLENEIYKGDYIMHKHFVNEERKLVRNRGEVDAWYIEDDHEAIVSPELWQKAQDALAAKRDYLAEGSVIEEFTEENYPYMNKIYCAKCGYPLYKRIYSKGNRLNWGCSGTKRYGKTFCDGINIPDGVLRSAWHFKENTYIAEKASDKGVKEFTYLKEQSWKRRHKKKQPPAIPENTEVEYPYREKIFCALCGSRLVRYVNPQSHKVTWVCSRRKRKGKDACDGTRVPDTIIKGWGEIKKDIYIQRKDDKNGKKRYSYTSKKPEGADRA

SEQ ID NO: 22062 - protein, 526 aa, synthetic construct
MQYCLYLRKSRADSEAEALGEGETLARHEKALLDLAKKLNLNITAIYREIVSGETIAARPVMQQLLQEVEQGIWDGVLVMEVERLARGDTIDQGIVAQTFKFSDTKIITPIKTYNPNNEFDEEYFEFGLFMSRREYKTINRRLQRGRMASVKDGKYVANKAPYGYNRIRIENDKGWTLEINKEEADVVRLIFELYTVGEKQSDNTFNRLGTGFIAKRLNTMKVSPKRGKVWVVASIRDILINPVYIGMIRWNWRPQQKKMIDGQLHISRPRATDYMLCKGLHPPIISKETFDIAQDLMQHNPARPIGEKNTVKNSLSGIVVCGDCGRHMVRRPHTKYPDMLICSEPTCNNVGSQLRVVEERILQSLKEWLGEYKISWDITSPPVERISQVSIKKKALQKEQHELDTLNKQISKTHDLLEQGIYTTDVFLERSRALSLRIDEVKEHIAILDKELKTEITREDSAVNIIPKVEKLLEVYHDLPSPKAKNDMLKDVLEKVVYTKKERSKKGNLDNFNITIYPKIPKYIT

SEQ ID NO: 22063 - protein, 505 aa, synthetic construct
MNGVIYARYSSENQREESIDGQLRECTAFAQHNDIQIVGEYIDRAFSAKTDNRPSFQKMIKDSAKGEFDVIIVWKLDRFARNRYDSAHYKNILKKNGVKVVSATEAISSGAEGIILESVLEGMAEYYSAELAEKVSRGMKENALKCKYNGGSVPLGYYIDESKHFQIDSSVAPFVVECFEHYADGMTMKQLRDELNMKGVKNSRGGKLSIDVISRMLTNRKYLGEYTFQDITIKDGIPAIVSTSLFEKVQDRLTKTKKAPSSHKADDDYILTTKLFCGKCKSFMVGESGTNAQGKKYRYYKCVNHKKHQGCDMKSIRKDLIENMTIKYIREFLNDEDLINTLIDLAYDAQHKENEQLPLLRKQLAQTEKGIKNIVDAIEQGISTKSTRERLLDLEQRKNDIEMSISKESIENPMLTKKQFKFWFDQLKKLDISKSEQRQKLVDLFVNSIIIYDDHIKFFFNYKEHTETITFDELNNCSDLPDSPRPKKEIPDKRYLFLFISMYKT

SEQ ID NO: 22064 - protein, 523 aa, synthetic construct
MAKSVTTIPATLSRFTAAPINSTKKRRVAAYARVSTDNEEQLTSYEAQIDYYTNYINGRDDWEFVGVYPDEGITGTNTKKREQFRQMVADALDGKIDLIITKSVSRFARNTVDSLTTIRKLKEHNVEVYFEKENIWTFDSKGELLLTIMSSLAQEESRSISENCTWGQRKRFADGKVTVPFKRFLGYDMGPDHNLVVNPEQAKLVKRIYGMFLQGQSPFQIARTLTEDGIPSPGGKDHWNPSNIKSILTNEKYKGDALLQKSFTVDFLTKKKKANEGEIPQYYVKDNHEAIIDPETFEMVQTLMATRKKGRNRKSSVSIFSSKVKCGDCGSWYGPKVWHSNDAYRKVIWQCNHKFDGQKCATPTLTEDEIKELFLRAANQVIDQKEQFIAIYEQVLSRSLDTTALESELSDLEAEINIAAELIEECIKENAHVALDQAEYQKRYDGLVARFDKAKARHAEVTDLIAERTARRHQIETYLKELQSREPLTEFRETDWLAMVDYITVHSKNDIRMTLKDGTEIKA

SEQ ID NO: 22065 - protein, 590 aa, synthetic construct
MKTVEKIERKLPVLKARKRVAAYARVSMESERMQHSLSAQVSYYSALIQKNPEWEYAGVFADYGISGTGTKKRDEFNHMLAECEAGNIDIILTKSIQRFARNTVDLLNTVRHLKELGIEVRFEKEKINSLSGDGELMLSILASFAQEESRSISENVKWGTIKRFKQGIPNGKFSIFGYEWQDDKLVIIPEEAEIIRWMYAEYMKGASRIEIGRALMDRGIYTRQGKPWVDSNVKVILTNITYTGNMLFQKEYCEDPITKHRRKNYGEMPQYFVEDTHEAIIPMDEWQEVQAEFKRRRDLGPFGNKSLKLSAFSTKITCGCCGKHYRHSGKRNTAGEVYYIWTCQTKNQKGASACPSKNVPEKMLQNAAAEVLSLDKFDEDAFSHQIEEVIVIGDDTLTFRFYDGHEVTTKWQSTAKTDWWTDERRKLWGERHKRKDTNPNRNTFYEFTGFIKCGCCGANYRCQSGKRKDGTPTRSWYCTGLRSDCQNPAIRDETMKRLVTAVLGLDEFDEAAMDAQIESATILDHTVTFHFRDGHTESRDFLDKRHGTPWTEERREKARESMKAAWTDERREAMSERIKKIRSEKKWPNP

SEQ ID NO: 22066 - protein, 577 aa, synthetic construct
MALPKKTIPQIKQKRAAIYVRVSTQYQVDRASLPVQRSELVNYAKYALDIPDFVIFEDAGYSAKNTDRPDYQQMMARIRTGEFSHLLVWKIDRISRNLLDFAAMYSELKQLGVVFVSKNEQFDTSSAMGEAMLKIILVFAELERNMTAERVSAVFLSRANDGIWNGGKVPFGYAYDKQTKTFSILEDEAKTVRLIYALYESSKSLVTVSKALNERGIKTRSGSEWSPTTVHTMLSNPFYSGTYRYNYRNESDPHHHVPKKKEDWILVKNHHPAIVSPEHQAAVELILASKSYGKNQTYQRKNIHAFAGLLTCGYCGSTMAATIDRARADGWRPSVYICSRRRMSNDCQNKYVSDVTLGPFVLNFFANLIKASNSFGKSTSIETLEKKLLRGDALSIVDHIERPGLEELYNHLRSGFDEKPFDSLAVNAAEASSDVQERDLLLADKRRLERALKRLNAIYLYGDEEIPGKDFILDRKSITDSLQQIVDRLKELDAAAVFDVSLSDDEFMEKASQFILTQQLLDKRSVNYEKFIRKIDPRIVKDFFNETVSNFCIKDGLTTSILLKNGIELRFCYKAQQ

SEQ ID NO: 22067 - protein, 576 aa, synthetic construct
MKKNFKMPGSGSETPIRVAIYVRVSTVYQIDKDSLPMMKQDLTSYCKYILNTDDFVIFEDAGYSGKNTDRPAYQKMMSQIRQGLFTHLLVWKIDRISRNLLDFANMYAELKDLGVTFVSKNEQFDTSTAIGEAMLKIILVFAELERNMTSERVTATMINRASNGVWNGGRIPFGYSYDKPTQVFSIDPEENKVYNFLVETYEDTQSIVHTSRKLNEAGYRSRNGNMWSPVAVWTILRNPWYKGVYRYNYYKIPGRKAIKDESEWVIIENHHPASIDPDRFDRIQATLDKNARYRNTPGRKTAQKNVHVFSGLIWCAECGSAFTASPGKLHVSGYRPSKYGCPNVRKTKTCHAKYTSDVVLGEFLLNYILNILNAQKQFAYIHSTDDLQKRLLHGSTFSNVDHVDPDGLASLLNMLEKCSGSDPVLLKRPRSKPKMDPELKRMMADQKKQQRALDRLNDLYLYSDDSISEREYLVRKQQITDRLQEINEAIGMMSQEPWMRTMNDEEFIRQASSFILTQKLADKQYIYYENLAESLDPEILKNFFVSILDSIILRDGRPETVVFRNGLSHTFTYKDS

SEQ ID NO: 22068 - protein, 491 aa, synthetic construct
MRVVLYMRYSSDRQTEQSIEGQNRVCTAFCEQQGYEIVDRYIDRATSAFKDTDKRTEFQRMIRDSEKQLWEGIVVYKLDRFARNRYDSATYKARLKKNGVRVISATENISDNPEGVILEAVLEGMAEFYSKELSQKITRGMFESANKCHSIGGHIPLGYKIENKKLVIDEAGAAIVREAFDLYANGATVAEICETFNTKGYRTAKNAEFNKNSFRSMFKNERYIGIYKYKDLRIEGGVPAIVDKDIFTIVQKKLSKNAEAPSRGKAKIDYLLSQKLFCGHCGSLMTGESGTGKGGTTYFYYTCGKRKREHTCDKKPLKKDFIERAVVEDALTLLTPETINELADIAVKESVREMEENSIIPALKNQLHETERSINNLVKMVEKGVESDTIADRLKELEKEKRAIEKRLVVAQDDYVILEKDHIVWWLSEFCNGDIEDEEFRRHIIDLLVNSVTVWDEPDGWYKITSVYNLTSNKTKTFRCSDLSGQAPPKF

SEQ ID NO: 22069 - protein, 615 aa, synthetic construct
MGNVKVIAANPKKAHGIKGLIKKLLRVCAYCRVSTGTDEQKTSYESQIKYYKQKIKQNADWELVDIYADEAISGTQVYKRINFKRMIDDALAGKIDMILVKSISRFGRNTVDILKYIRLLKEHGVAVYFEEENINTMQMQGEILLTVLSAIAQQGSATISSSVALGARMKMKRGELVGHYAPYGYRYDKDKEELIIYEEEAQVVREVFRLYVEEGLGTARIARVLNNRKIPSPTNKMWSGTVITRMIRNEKYCGDLLTGKTYTSDPISKKKIINHGEKDKFYTKNHHAAIVDREIWEKANALLDRRTSEYKEKNKLNKESHMYPFSSKIDCGCCGQKFIRRSWAPHKPGQPKRVAWSCRTFMRRNDNYCQNIGNVKENIIEEAFVQAYNSVCENHTIIINQLLDTMEKILSGNNYDKEIAKVREQINTFKDRESNLVDMKLDGIIDSNIYVQKSDEIKNKILLLEEKLDEYKNIMKDENDIKRRIGEFKSIFKKKNILTEFDSVVFNSITDKIIIGEKDEFDVLNPNVIKFVFRNGKEVKQALPRKLNSKQTVIEKYAEEIRKQQSSASSSEENIIQVNTKEVDENESVEFDSIGANCNNEKYSTCFNKSINRIT

SEQ ID NO: 22070 - protein, 544 aa, synthetic construct
MRVSVNLNAQKPDTTTNAVIYARYSSHGQTEQSIEGQLAKGHEYAAAQGYTVVHEYIDRAMTGRNDNREAFQKMLSDTGKHQFQVVIVWKVDRFGRNREEIAFNKHTCKKNGVRVEYVAESLPNSPEAVILESVLEGMAEYYSIQLSQNIRRGQFESAKKCQCVGGSVPLGYTLDSDKHFVIDPQTAPVVKKIFDLYAEGATISEITGQLNEQGIRTARKQLFTKNSLTKLLKNEKYIGVYTYKDIVRVEGGVPAIVDESTFDRVQELLKINRRAPSHTWTKVEYLLTDKLFCGHCGSPMVGESGFSHTGAKYSYYGCIKRRREKACDKKPVRQDWIEALVLDETVKLLHDDELMEYIIDRTWEYYQVTDKVQEEKAVLEAQLAEVDKAINNLVRAIEAGIFNAATKSRMDELDAQKAALTASLADLELTSGIRITRDHIEYFLLRLRDLDVKDRECQKRLVQTFVNAVFIYDDGRVKITYNYSGQSSTITLNQIASAEKGKGFVCCLPCSTSSPRFPRGVAALFLFWGKNGCESTTNFSCIVL

SEQ ID NO: 22071 - protein, 548 aa, synthetic construct
MYKEYPKFYYYESLEYGRKSRMDDPLLSVEETLQRHSEIIDEYARKYLGGSIPEENRYMEVGSGESLKDRPEITRLLKAIENPAIKAIVVVDVQRLSRGDLEDAGKLIRLLRYTNTCVITPHKIYDLRDEYDRDAFERELKRGNEYLEYFKKIQARGRLASVKAGNYVGSVAPYGYDRVERYDEVLKKNYFTLVERKDQADVVRMIFNWYCNDDIGVTTICRRLEELGVKTKTGCSTWKPSIIFGILENVHYIGCVRWNWRKTIKVIENQEIKKLRPKAKVDEYLIFEGKHDGIISEEVFNKARIIKGTRHRTKRNLSLKNPFSGIMFCTKCGSKIGYNTYNRNGVEFAPPKLVCNNQVHCKTGSVDYNEVLDYMCKVLRDCIEDFKVRIENDQDDSLKLHKDLIERLTKQLKDAEQKEQDQWEAQYDPDPNKRLPQHIFEKLNKKVLAEKEEINKALDKAKGSAPKHIDYKDELIKTTEALKALEDADLDAKITNQYLKSIIDRIEYDRPQIVRINKKNAEIFETDVRKGLQYHVAPYTIRVKLKCE

SEQ ID NO: 22072 - protein, 585 aa, synthetic construct
MVKKLSLSAVNLDAAVNSIKVAIYIRVSTHWQIDKDSLPLQRSDLINYCKIILGTENYVVFEDAGYSAKNFERPDFQKMMSRVRTGEFSHILVWKIDRISRNLLDFATMYQELKNLGVTFVSKNEQFDTSTAIGEAMLKIILVFAELERNMTSERVTATMLSRASDGKWNGGKVPYGYSYDRETRTFSIVESEGKVVRLMYDLYAEMRSLLMVSKELNRRGYRARSGKEWSPVTVGNILRNPFYVGTFRYNYRIESGPSFTFRPESEWIMCEDHHPQLVTHDQWNETLDTLRSQRRGQPGHGKSFNRGNVHIFSGLITCGYCGSIMRASQDRPRKDGWRPSIYNCSRKRVSNDCPNKYISDITVGPFVLNFIANMIRARKSFGASTSIETLQKKLLRGETFRDVAGIGQQGLRELYQHFKGTQDQEQNFMASPGSTATTEQEEREVLLTEKRRKERALNRLKALYLYGEEGEAISETDYIVERKRLLDSLATIDARLAEIDTALAERATLSDEEFIQKASYFIMAQQLSDKRYIDYERFMRKVDPKIVKDFVNLVCSNFCIKNGRVVSIRFKNGIELQFFYNDEE

SEQ ID NO: 22073 - protein, 516 aa, synthetic construct
MSYCIYLRKSRKDLEAEQHGEGETLARHERALLSLAKKNNLIISSIYREVVSGETIAARPVMQQLLHEVEQNLWDGVLVMEVERLARGDTIDQGVVQRAFQYSNTLIITPSKTYDPANEFDEEYFEFGLFMSRREYKTIKRRMQNGRYAAISEGKWPYNSAPYGFRRTKLEKEKGWTLAFDENEAPVVRLIFSMFTGPERVGIRSITRTLNSYGTKPRNSKLWSESTVRGILSNVVYDQCVKIGERKVVRTIENGILTTTRPRTNDYTIVSGRHPRLIDHDVFAEAQSYLGCGSPKPAGSNIVKNPLAGIIICSECKKKMIRRPPSGTASRVPYDLMLCSTYDCPTIGSPLDLVEREVYNALSDWVEGYRLSGQMPSKSLIPEKEVLLGSAQQTLDQLLRQKGTMYDLLEQGVYSTEVFLERSSSLQNRISEAESNVAQLKLELDKERQREAHIEQFLPACEDLLSCYWDLSIPERNRLLKLLIESIEYKKLTKNKRGHLNEPNFELTIKPRIPRK

SEQ ID NO: 22074 - protein, 516 aa, synthetic construct
MPKTEEKQAAKAVIYARYSSDRQREESIEGQLRVCEDYARRNNITILHTYADRAMTGRSDQRPEFQMMIRDAATMAFNVILVYKLNRFARNRYDSAKYKHKLKKYGVKVVSAMENIADDPSGILLESVIEGMAEYYSAELSENVLRGMTQNALEGKWPGGVIPLGYKLDKGGRLIINEEKAPIVRMIYQMFLDGMSVARIERKLNDKKYTTDAGKVFSRSRVYYILHNERYIGTFQWKDIKKEGIIPPIISKEAFHAVQERINAMKSSSYRTNNNYLLAGKAFCASCGAKVSGTSGKSQNGTKYCYYGCSHHHRSARYEYCETKNIRADVLEKLVCDKTHEILSSKKAIKEIARQAVKLRPRDESELEIRAIKNHISSCQKKIDNCIKAIENGVMSNALVESLNENERTLDVLKEKLAKASLMQGSGLLTEEKIQFFFETIREKAKETEKYNDILLTSLVRAVYICNEYVEIQYNYAEQLPILTNPVRIESCSYKCTNGGTIWIRTKDLFDVNEAL

SEQ ID NO: 22075 - protein, 684 aa, synthetic construct
MSILQTIKTIIRVVLYLRLSDEDKNKLSKEELSQSIKNQEIMLRDYAEEQGWEVVGVYNDDDWSGSDATRPDFNRMIEECKNGNVDIVLCKTQARFARDMELVEKYVHNLFHEWNVRFITVVDRIDNARKETKKTSQILGLTDQWYLEDTSLNIRETLKSKRKDGQLTSSFATYGYMKDPENKNHLIIDPISAEVIKRIYDEYLSGTGLDKIARRLNEDKILSPYEYKLLNGSKLKIPVIKDYVNYGYIEKTGTYMLDVSFTNKEEYILKDLVSFNYITTDMKNFNNKCDIVLKKYTNNRTKIYYSENDNIDINNFNIDDCILLNENDVIPKTAKVIISYTKELDRTHTINYQFEITLKENREHEDYYINICGKATDEIKKSDFIHNIRKKFKWSSSTIRTLLTDEVYIGNMVQFKSTTVSYKNHTVVWNDDETRIRKDNTHEPIIAKDIWYTVQERLENTARSCKGGTVHPLCNKVYCSNCNQIFTKTGNRRSDGTGYLCCKDKKTNWSNCDNKASIREDQLHQFILEKMNEMLKKFYEEDDLKEMQNEVIEQDLYKDKLNSLEKELQSINKELQGKSTYFQKLYEDRTNGILPEKEFLILMNKYKDDNEKLEERQKIVKKEISSTLAKKETVKTKKNIFKKYRHIEELSIEIVEDFIDKILIGSYDETTNSRDIKIIWNFTI

SEQ ID NO: 22076 - protein, 456 aa, synthetic construct
MRNKEIAPALVRVALYIRVSGEEQKIKGLSLEAQQERLEAYARERGWVIVGIYIDAAKTARKNIHKRTEFQRMMDSVKRDEVDILLFARLDRWFRSVADYYKVMEVLQAHNCDWKTTDEEYDTTTANGRLYINVKLSIAQNEADIDGERIDVVFDSKIAHGTVVSGSAPFGFRVNEEKRLEVVPEDAAIVQDAFNYFENTVSQRATVRYVRETYGVNWCDATFRRMLKEKLYTGVYDRGGRYNDQFCPAIISRQQFDRVQALLTRNVRSAPSGKVYIFTSILTCAECGHKLVGYKSSDYFYYRCNQHFQRGRCSHNHSAREDVVEQWLFEHLGEELERCQLEWDVEAAKKKASVARTDKAALKRKLTKLKELYVNDLIDIEDYKKDYQIYVSALNQIPEPAQEAPPDFAAVRRLLDNSFRTIYDTLTREEKRTLWRSVIKEIRIDNDQNITGVVFG

SEQ ID NO: 22077 - protein, 438 aa, synthetic construct
MSTDQEEQLLSYENQVNYYTNYISENPLYEYAGTYADEGISGTNTKKRDEFNRMIADCRAGKIDMIITKSISRFARNTLDCLNYVRELKDLGIGIIFEKENINTLDAKGEVLLTILSSLAQDESRSISENCTWGIRRRFETGKHKMSTKRFLGYDTDETGKLVINRTQEPIVIRLYQEFLDGKTTDYIKRIFEREGVKNWDGGTKWQSTTLMSMLENEKYKGDALLQKSYTVDFLTKKRTQNKGEIQMFYVEDDHDAIISKRIWECVQLEIKRRKKYLEEHGTNSYSHRPESNPFASKIICGDCNKVFARKGWRSSTGVDRKVWQCSERYKVKGVMGCANRHVEEETLIKAYLMAWNALVENREDFMEQWTEQLQSENLLEGYRAEKFIEYTDGAEPLTDMDTDFMLKTLDHIKVFEDGTLLVVFLDGTEIECKNEEE

SEQ ID NO: 22078 - protein, 478 aa, synthetic construct
MTNQAEKTSYIENVAAYIRVSTQEQKLHGISIEAQEEKLNEYADSHGMKIVKFYKDEGVSGRKLIRKRPALQAMIQDAEKGNFRRIIFIKLDRFFRSVAEYHECMKRLAAGGVIWTATEEKYDLSTPSGEAFVNMKLTMAQFEADQVGERIRMINEYKVKSGQPLYGSQALPFCYQVKQSGDGDRRKYIAKRDEIIMEDLIDHFCKNRSVRAALHYINAKYSRAFSYSTIKNALTSELICGTYRGNPTYCESYMTPAAFETMQKYIQHNPRTSQREHSYIFGGLIRCPCCGNMLVGSPTVLNRIGKNGQKLSYKYYGYRCYRGNLEKKCDFRTMAFEHRLEAIMLSEVEAVMRGKQMYLLRLQNAPQRIAQHDLAELQQELARLNYAWQKGRIKTAADYDRQYDDLMARIDAANAERQELTANPDYRKISRILSDGWKQLYISLDNDHKRAFWRAFIEEIQLEWTKDVKRIRDITFFT

SEQ ID NO: 22079 - protein, 548 aa, synthetic construct
MSTGTELRAVFYARVSTEEEKQLNALEKQIQENKDVIRDHGWRLVGEYIDEGKTGTTTKRRNDYKRLLKDMTENKFDIVVCKDQDRLQRNTLDWYLFVDNLVTNNLKLFMYLDNKFFKPSEDALITGVKAIIAEEYSRNLSKKLNNSNKRRIERALNGEEVSAMGNGKSLAFKIVNGKWVKDEEEAKLGKKIFELYLEYDSIRKVRDWVNEHGYTNSVGKPFTSESISRILKNEKAKGVIVMGKYHHDFDKKKIVRRSEEELVRIPAPELAYVSEEVFDKVQERLRAKTGNGRGVNAYSDPLSGKIYCGSCGRKLWKHASNGYVNWMCASQVAKGDVECNGTRITTVAIRNIYKKITDNLEVNKGVVKQDIVKWLNELKATLSDTSVNEKIQKDLDKLERKRTKLLEAYLEDFISKDDYKAKYEAIEGQIEEKKKLLVPVEENEDIKVIESVLQNIDDEIDAYVKTLDMEESKVDFLIEHTKRITVLENRDIIIELDLVAGAIIAGKDFLLYVHDTMPQHHGSKHLHPSGPQTAPRCCFRDRFSCDQP

SEQ ID NO: 22080 - protein, 563 aa, synthetic construct
MDSSPFLMQERMGIELMAKNKKAGFEPDMQDAVIYTRYSSHNQRDCSIEQQVADCEIFARQNNLRVVKVYADRHLSGTTDNRPQFQQMLKDAAHGHWAYVICWKIDRFARNRYDSATYKFRLKKAGVRVLYAKESIPDGPEGILLESVLEGSAEYYSAALAQNIRRGMKYNAEQCKVNSGSIPFGYRKGPDGRFAIHEANAEVVREIFRKAAAGMPFVDIANDLNSRGLKTSRGGRWNKGSFRLLMNEAYIGVYHFSDTRIEGGMPALIDQGTFWAANERLKANSSVRGRHQDGGDYLLTGKLKCAHCGSYMIGFSGTGKSGELHYYYGCQKRRRERACKKANVPREWIERVVVKAALDYVLRPDVMEWIADAVMEYQEREAASAQLAALTAELEENQKATDNVMKAIEAGIITSTTKQRLLDLEAKAQDLKRAIELEKLSHVRLERDQVLFWLDRFRGGSLQSQEFRRKVIDAFVSVVYLSDDHLRIAFNYSGGSNAEADFDLVMDAEAAAGELSKKFAQGHVASTSKKHLDSLKSRCFFFVYTTLFNALCNDRASRADGEG

SEQ ID NO: 22081 - protein, 526 aa, synthetic construct
MQYCLYLRKSRADSEAEARGEGETLARHEKALLDLAKKLNLNITAIYREIVSGETIAARPVMQQLLQEVEQGIWDGVLVMEVERLARGDTIDQGIVAQTFKFSDTKIITPIKTYNPNNEFDEEYFEFGLFMSRREYKTINRRLQRGRMASVKDGKYVANKAPYGYNRIRIENDKGWTLEINKEEADVVRLIFELYTVGEKQSDNTFNRLGTGFIAKRLNAMKVPPKRGKVWVVASIRDILINPVYIGMIRWNWRPQQKKMIDGQLHISRPRATDYLLCKGLHPPIISKETFNIAQDLMRHNPARPIGEKNTVKNSLSGIIVCGNCGRHMVRRPHTKYPDMLICSEPTCNNVGSQLRVVEERILQSLKEWLGEYKISWDITSPPVERISQVSIKKKALQKEQHELDTLNKQISKTHDLLEQGIYTTDVFLERSRALSLRMDEVKEHIAILDKELKTEITREDSAVNIIPKVEKLLEVYHDLPSPKAKNDMLKDVLEKVVYTKKERSKKGNLDNFNIAIYPKIPKYIT

SEQ ID NO: 22082 - protein, 580 aa, synthetic construct
MPEKIINCAIYTRKSTEEGLEQDFNSLDNQYEFCTNYLKSLNDPALQLLPARYDDGGYSGGSPNRPALQRLLADIQCGLVNRVIIYKIDRLTREIRDFFKLLDVFEKYNVEFVSVKENQYYNTTTAIGRLMVNMFLVFAQFERENAGDRIRDKIATSKAKGMWMGGCPPYGYDIGDRCLVINETEAQNVRFIYQTFCNTHSLADTTDALNSGGIRTKRYTTRQGRTFGGRKYSVKTVQRILQNPLYKGMVAHRGKQYPGQHAAIIDAVQFDMVQAVFAAHKEKRETRRPKMPSSGGERETAALTGLIYCGCCGSAMTPSYCCKGEIRYHYYRCYRRASKLEDKCPINQIRTSEIDRVVMEQVLAILKSRDFFVQYISHHHEFDVSTAFALFNSLDDVWNSLFETEKRRILRELLAKVTIYKDKIVLDVKKAGLAGVFAELSQNNRLAEVEYKENETFQISVAYRATRLANGAKIIVPATAKEESRFNGSLRLARQIAKGFAWRKMMESGLSLQELTASAKTNERDIRFAMRLSMIDPAIVESVLSGKSPEFLTYAFMKKHPIPLLWSDQRKLYGFEERKQ

SEQ ID NO: 22083 - protein, 579 aa, synthetic construct
MPNLPYSNEFTKLIIAIYCRVSSEDQAERGTIEIQKEFAAKYVNLYNLEVFDYYCDDGVSGTLPLEQRPEGKRLLEDAAKKRFNMVIFYKLDRLGRKVRVILNAVNDLDALGVTVKSMTEPFENETPTGKFLLTTLAGIAELDRDTILSRMWSGAQYAAKQGRWLGGVIPYGYMVADKKLVISTDPIPNCRLSEEDVIKIIFRMAAKEKANCAEIADYLNSIKIPTRYMLNGISGKRYKKTAEIWRPSRISEIIRSTTYKGLHQYGKNATHKNSKIITRSVPAIVSDEIWQEANNTMKDNRVSCKRNTKNLYLLQGMIRCGLCGLAYSPTFYKARNTSYYCCTCKGQQKTKFYNRDTCIGKPVRVDWLDNLVWSKCLELLKEPEKIYDAKPSTNKEPPNIVPTPTEFELIKSRIQELSTEREKLLDLYRKGIIIESDLTTQINKLYLEETELNNKIIKIDNQPKQELKRSKASTVMVLKEFIEMIKNTDINQLPFELKREVVKMLIDKVFVYTKVDPDKFYPSINVIISWRFDAAPFNIDYIENYTLTTFLLQRKKSKTPLQPTLPITLTPVLNCNTRR

SEQ ID NO: 22084 - protein, 544 aa, synthetic construct
MRVSVNLNAQKPDTTTNAVIYARYSSHGQTEQSIEGQLAKGHEYAAAQGYTVVHEYIDRAMTGRNDNREAFQKMLSDTGKHQFQVVIVWKVDRFGRNREEIAFNKHTCKKNGVRVEYVAESLPNSPEAVILESVLEGMAEYYSIQLSQNIRRGQLESAKKCQCVGGSVPLGYTLDSDKHFVIDPQTAPVVKKIFDLYAEGATISEITGQLNEQGIRTARKQLFTKNSLTKLLKNEKYIGVYTYKDIVRVEGGVPAIVDKSTFDRVQELLKINRRAPSHTWTKVEYLLTDKLFCGHCGSPMVGESGFSHTGAKYSYYGCIKRRREKACDKKPVRQDWIEALVLDETVKLLHDDELMEYIIDRTWEYYQVTDKVQEEKAVLEAQLAEVDKAINNLVRAIEAGIFNAATKSRMDELDAQKAALTASLADLELTSGIRITRDHIEYFLLRLRDLDVKDRECQKRLVQTFVNAVFIYDDGRVKITYNYSGQSSTITLNQIASAEKGKGFVCCLPCSTSSPRFPRGVAALFLFWGKNGCESTTNFSCIVL

SEQ ID NO: 22085 - protein, 521 aa, synthetic construct
MSNITIIPARPQRANSQQNETEKPKLRVAAYCRVSTDSDEQATSYETQVSHYTEQITRNPEWAFAGIYADDGISGTNTKKREEFNRMIADCMDGRIDMIITKSISRFARNTLDCLKYIRQLKERNIPVFFEKENINTLDAKGEVLLTIMASLAQQESQSLSQNVKLGLQFRYQRGEVQVNHSRFLGYTKDENGRLVIDPEQAEVVRRIYREYLDGYSTDKIATGLERDGILTGAGNPRWHTSTIAKILRNEKYMGDALLQKTYTVDYLSKKRIKNNGIMPQYYVENDHEAIIPKDIFMRVQDELVRRRLVKVSPNGRKHGFSSNHVFSQMIVCGECGELFRRVHWNNHGCCSIVWRCLSRLQPTGVICHARTVNEEVLKNVVVQAFNEMLGSRSTYQKRLRDNLAMVLREYEDEQALEIDKCLAKLQQELINHASRKEDYNDIADEIFRLRELKQKNFTDTAVRDEQVKRINELNEFIEQQDSELTEFDESLVRRWFKEIVVWYDRVSVELKSGVTVEIMV

SEQ ID NO: 22086 - protein, 530 aa, synthetic construct
MKRMVNMILLKNLIMYLRKSRSDDISMSVEDVLAKHEGIIQEYCEREFGTQLPENRIFREVVSGETIADRPVMKEIMKLLETGTVKGVLVVEPQRLSRGDLEDCGRIINTFRYTGTLVITPQKTYDLTNEYDRKFFEMELTRGNDYLEYTKRILSRGREASVKQGNFIGSIAPYGYKKIVVGSGKDKYHSLEINPEEADAVRLMYALFINEGYGFAKIAHRLDELGFKPRSSENWQPAAIKDMLENPVYIGKIRWNWRKTQKRMANGEVVKVRPKTKDPSEWILVDGKHPAIISEELYNAALERRGKNPCVRKSLELTNPYAGLLFCGTCGRAMSQKRFINRRTHTQSVCDSMLCNNQANCHTKSVKYSAFEQRVIELLEDAIADFEIKLKDNNTNVIELHRGIIQKHMRELERLHEKDMRQKDAYEDGIYTKEEYIKRNALLQEQIAKTTSALEEAKTSAPKAIDYAEKIKRFNDCINALKDPDVSAPEKNTLLKNCVKRIDYYNEGESKPGVGRYVENVFELNMLLNM

SEQ ID NO: 22087 - protein, 490 aa, synthetic construct
MTDKNLLVITPHRKEPGKQRIAAYCRVSSRSDEQLNSLANQIDFYRSRFKNDNTALFVGIYTEEGLSGTQAENRPQFMKMIEDCRNGLIDCIWTKSVSRFGRNTVDTLIYIRELRTLGIDVFFEKENIHSTESSGELMLTLMAAFAESESETMSANIKWGKRRRYEQGITGSITLNGMYGFRQNKGVVTIVEDEADLVRRIYKDFIDGYSYGEIADRLIADEVPTRMPGASWAKTTVQHIIRNEKYCGDCLFQKAFIANPITHQQVRNNGELPKYLVEDCLPAIVDKETWKLAQAVAARHTPHRQAPNERYPFTGKLFCGICGKPYYYYYYMTTNKQQLAAYRCMSRKTQSAFEVPGQTYTPPHKATFNRNASAKLIAYRERYCKPPKERPMLCTDVRISTDLPQKAFCRAWNLIVAKKLRYQATLRSTVDNAEDILVRYRAEEMCLLIDEIGKINEFSYPLMLKTLDRVVVNANGKLTFIFQSGIKITV

SEQ ID NO: 22088 - protein, 444 aa, synthetic construct
MKRLIRDCKHKKIDRVLVKSVTRFARNSLECIETIRTMQSCGVSVLFENDHIDTETMNSEMMLYIKSAFAQSEATSASKRMSTSIRMKMEDGTYVATSAPFGYRLIDGEYAVVPEEAEVVRKIFALYLQGYGVNVIAKTIRDTDGDKRVWNRQGIKYILTNEKYIGDTMWQKSFTPAVLPLRNRPNRGELPKYYCEGTQEAIVSKEDFVAVKNLMREREEKHYKQYRNEKKLFYRKIMCRHCGWSYRVKQIQNGYVWACSRKGMIGGECSSRSYTDTELYRSFIKVYNILKQNKRVLLDETITQLQTLKVKANCGNNVIAEIDEKIAMLGRQNNLYGQMLANGVIDEVTYHEKADSLKGQITEFRSRRMKIINDDDEETCIEQLRQLRKIIEESPDYLDEMDTELFGKIVKLIYAEEDGALSFVIKGDLELKVYVGGENDEQND

SEQ ID NO: 22089 - protein, 513 aa, synthetic construct
MLRVAAYCRVSTDSEDQLESYKAQVAYYTDAIAKNPRWRFVDIYADEGITGVMAKKRTNFMRMMRDCEKGKIDLILTKSVARFARNTVDSLNYVRRLKAKGIGVYFEEQALDSLKTENEMALGLYSVLAQAESENISANVRWGIRQRMQSGTFKFRYNLLGYRKGEDGEPEIVEEEAKYIRAIFNMYLDGKSLDQIKSYLEGEGVLTKTGKNVWNKCIIQAILTNERYCGDLLMQKTFTENCIAKKVKKNRGEMPKYLIRDNHPAIITHATFKMAQMEMARRGSVRKKADSGITEQGKYSGKFALTDILVCGECGSPYRRKTYSRNGENKRVWRCLSRLEHGTEFCSDSITVDDETLKKTIVRGISKAISDKQDVLNLILSNLAYAVTGEDDTLEMYAIEKQLKTLSGIMDETMELAASSTGDGKRFQEEMKSLSSQMVVLREQLEMIKGRIDSNERVTAEIESIKQCLSADSLDFTEYNDVTIRRLVEYIRVMKDNSIIIVLKGGMQIQEII

SEQ ID NO: 22090 - protein, 501 aa, synthetic construct
MEIQIREGSREQKRKLKVCAYCRVSTDADEQENSLENQVRHYETVIKANPDYEYAGVYSDFAISGFKEKRPGLQKMLADAEKGKIDLILTKSVSRFARNTSIVLEATRKLKELNVGVFFELQNINTLSGEGELMLTILAAFAQAESESGSTGAKMVYQRKYEAGIPVQYLERSFGYTKDERSIFVADEEEAVWVRKIYEMAADGYTPAAIKRYLNENGVKTVGGAEWVDSTVFRLIENEIYKGDYIMHKHFVNEERKLVRNRGEVDAWYIEDDHEAIVSPELWQRAQDALEAKRDYLAEGSVIEEFTEENYPYMNKIYCAKCGYPLYKRIYSKGNRLNWGCSGMKRYGKSFCDGINIPDGVLRSAWHFEENTYIDEKASDKGVKEFSYLKERSWKRRHKKKQPPSIPENTEAEYPYREKIYCALCGSRLVRHVDTKSHKVTWVCNGRKRKGKDFCDGTRVPDTILKGWGEIKKDIYIQRKDDKNGKKRYSYTSKKPSGIGA

SEQ ID NO: 22091 - protein, 463 aa, synthetic construct
MARSVTVIPARNLQVSGHRAAPQKKIRVAAYCRVSTDQEDQLHSFEAQVDYYTKYINDHENYEMAGIYADEGISGTNTKKREQFKRMIADCEKGKIDLVITKSISRFARNTQDCLMYSRKLKNLGIGIIFEKENINTLDSTGELLFTILSSLAQDESRNISENCKWGIRTKFKNGEMHLNTFKFLGYDKDENGKLIINREQAKTVRRIYRDFLWGLNPAQIAKELEEEQVPGCLGQTKWYASTVVGILKQEKHMGDALLQKTYTADFLTKRQVKNNGEVAQVYVKDSHKGIIDKETWNAVQEEFDRREKFMQRHGTDRYSYGSECNPFCEKIFCGKCGSLFTRHSWKSRGIVQWQCKNHRKDGKVACTNAYVDNADLEKGFVKAFNRLASEREKNMERWNAMKADGTPLEKIRAVQMMEATESGQLKKYVPEAAQLVLEEITIFGSKKYEFAFLEGSRVKVSV

SEQ ID NO: 22092 - protein, 537 aa, synthetic construct
MAKRKFNKGGEVRLVAYYRYSGGSGQTEQSIEGQRRDCEAYARLHNMTIQKEYVDRHISGKTDDRAAFQQMIADSDKGAFDMVICWKTDRFARNRYDSAVYKKRLRDNGVEIVYAAESNISGAEGIIIEGVMEALAEYYSAELAEKMRRGMRESALKGQAISRCRALGLKTDEHKRFVIDEKTAPTVRFIFEHYAAGESAMSIVEQLNAKGLRTSQGNPFNKSSIPRIIQNEAYRGVYISKSYDVRIEGAIPAIIDDELWERAQTMLKLNRQLKAKNEPKADYILSGKLYCSCGSLMRGMSGHSATGEVYRYYTCPNKDCHLRNIPKDDLEGKVMQSIVDHLLQPESMEALAEAMVEVQKADVEKPNAERVAIEQSLSDVRRRSKNILDAIENGTANAQLCARLDDLTEQEQTLSFQLSSLEKEKPVVFTKEQYLFLLEQFLMEPSERTPEYGRRLVNTFVTSMVVSGRELVINFNVSDEAVNKNKKTSQTNLQKESSSGMRLVHLAHQQANYSLYAASGYFSLVEHQFSARLWRTA

SEQ ID NO: 22093 - protein, 496 aa, synthetic construct
MKGAVIYARYSSERQNEQSIEGQLTVCNKFAEENDLTILDTYIDRAMTGTNDNRAAFQKMLSDAEKTDAWEIVLVYALDRFGRDSIEISVNKYKLKKANKILLSATQRTSLNIDGTKNLDGILLENVYIGLAEYYSAELSQKVKRGLHENRIKGLCTSGTPPYGYKIIDKKAVIYEEEANVIKYIFTEYYNGKVVPDIIADLTKHGILYKGKPFQNTSVYYMLRQEKYIGIARYSDGIYDNIFPAIVDKRIFDDIQLMLENNKKGSRSTDGNFLLRGKLICGYCGRNLQGESGTSRCGKICYYYTCRGRKSIKDCEKKRVKKNDIEDLIAKVTINLFSDKETLNKIADKILSVHEKRLEDNYVIKQLKNEESETQKQINNVMKAIEAGIITPTTKNRLEELETLLAELKDKIMVQEYNNRNKLTKEKIIDYLTKSLYKEPQILFNTLIHKVEVYDDKLIIYYRYTDKKNPDENQDFSFNNPNSGSNCYSVVGVRIA

SEQ ID NO: 22094 - protein, 501 aa, synthetic construct
MEIQIREGSREQKRKLKVCAYCRVSTDADEQENSLENQVRHYETVIKANPDYEYAGVYSDFAISGFKEKRPGLQKMLADAEKGKIDLILTKSVSRFARNTSIVLEATRKLKELNVGVFFELQNINTLSGEGELMLTILAAFAQAESESGSAGAKMVYQRKYEAGIPVQYLERSFGYTKDERGVFVADEAEAVWVRKIYEMAADGYTPASIKRYLNENGVKTVGGVQWVDSTVFRLLENEIYKGDYIMHKHFVNEERKLVRNRGEVDAWYIEDDHEAIVSPELWQKAQDALAAKRDYLAEGSVIEEFTEENYPYMNKIYCAKCGYPLYKRIYSKGNRLNWGCSGTKRYGKSFCDGINIPDGVLRSAWHFEENTYIDEKASDKGVKEFTYLKERSWKRRHKKKQPSAIPENTETEYPYREKIFCALCGSRLVRYVNPQNYKVTWVCNRRKRKGKEACDGTRVPDTVIKGWGEIKKDIYIQRKDDKNGKKRYRYTSKKPSCIRV

SEQ ID NO: 22095 - protein, 463 aa, synthetic construct
MARSVTVIPARNRHVSGYRAAPQKKIRVAAYCRVSTDQEDQLHSFEAQVDYYTKYINDHENYEMAGIYADEGISGTNTKKREQFKRMIADCGKGKIDLVITKSISRFARNTQDCLMYSRKLKNLGIGIIFEKENINTLDSTGELLFTILSSLAQDESRNISENCKWGIRTKFKNGEMHLNTFKFLGYDKDENGKLIINREQAKTVRRIYRDFLWGLNPAQIAKELEDEQVPGCLGQTKWYASTVIGILKQEKHMGDALLQKTYTADFLTKRQVKNNGEVAQVYVKDSHKGIIDKETWNAVQEEFERREKFMQKHGTDRYSYGSECYPFCEKIFCGECGSLFTRHSWKSRGIIQWQCKNHRKDGKVACTNAYVDNADLEKGFVKAFNRLASEREKHMERWNAMKADGTPLEKIRAVQMMEATENGQLQQYVPEAAQLVLEEITIFGAKKYEFAFLEGSRVKVSV

SEQ ID NO: 22096 - protein, 502 aa, synthetic construct
MEIQIREGNSRQKQKLKVCAYCRVSTDADEQENSLENQIRHYKEVITSNPDYEYAGVYSDFAISGFKEKRPGLQKMLADARKGKIDLILTKSVSRFARNTSIVLEATRKLKELNVGVFFELQNINTLSGEGELMLTILAAFAQAESESGSVGAKMVYQRKYEAGIPVQYLERSFGFKKDERGVYIADEEEAVWVRKIYDMAAQGYTLAAIKRYLNENNVKTVGGAKWLDSTVLRILENEIYKGDYIMHKYFVNEERKLVRNRGEVDAWYIEDDHEAIVSPKLWQRAQDALEAKRDYLAEGSVIEEFTEENYPYMNRIYCARCGHPLYKRIYSNGNRLNWGCSGTKRYGKSFCDGINIPDGVLRGAWHFDENMYIGEKQTDKGKKEFTYLKEASWKRRHKKKEPEPIPENTETEYPYREKIFCGLCGSRLVRHVNTKNHKVIWVCNGRKRKGKDFCDGTRVPDTIIKGWGEIKKDIYIQRKDDKNGKKRYSYTSKKPKGADRA

SEQ ID NO: 22097 - protein, 507 aa, synthetic construct
MRKKVAYLRKSRADIELENTTGEDTLKRHREIIKKLAKQNSVILDAYFEEVVSGETIQARPKIQELLKEVENNEIEEVYVVDVDRLARGDTEDQGRISKTFKFGNTKIVTPGKTYDPNNEFDEDFFEFGLFMSRREYKIINKRLNRGRLSSINEGKFIGSVCPYGYSKEKLKGQKGYKLIINEEEAKIVKIIFNLALSGIGASNIANHLNRIGSKPRKAEIWVSASIRDIIHNPVYYGMIKWNYRKTIKTMKNGIIYKSRPKQKEYILVEGLHEAIIDEETWKIANKNSKIKEGKSVKKDLTLQNPLAGLVECGICHRTMQRRNYRSGHIDGLICPLPHCKNVGSHLHMVENAILDSLQRYLNQYEETLASYKKDEQVHELDTNNVELIEKEIEKTKNQLNKAFDLLEQEIYDNTTFIERSKSLKIRIDELKKEKEKYSIKTKQEKIEKIKDIIPKLRNAINTYSASLPATDRNELLKSVINKVYYIKSVRGKGHEEEFELQINIKL

SEQ ID NO: 22098 - protein, 524 aa, synthetic construct
MPKYNPEKLLPAVAYYRYSPGGGQTEQSIEGQRRDCMAYAKSHGYVIVKEYIDRHLTGRNDKRPAFQLMMQDAEMHRFDTLIAWKNDRISRNRRDALNYKDQLRKCGVQICYAEMDIPHGPEGILMESLMDGLAEYYSAELAQKIRRGMTESAHKCRALGSIPPFGLRINKEHHYEPDPTTAPYVRWIFQQYAQGVQITEICNALNEKGLRTSRGNEFNKNSLRTMLSNEKYVGVYEAKGIRTENAIPPILTQELFDAVQQRIPKNAHHGRKLAGVRQFPLSGIAYCAICGAPLIGDAGTGKSGRVHTYYACTAHKHRRNCTKKNIRQAKLEEMVYDATANMVLCPSITRAIAKQVEASAAADTSHAEEMQAVQAHLKDIEKRINNILAAMEEGSFSKAVSSRLTTLETEQSRLEKQLKTLRRVKPNITASRVEYMLSTMCRNPAEQQPDHLKRLLQVFVERIDLSEETMSITYALTKKSAVPTSTADNPTVKTLHYIDIKQCSTIACYGGADGSRTRVRKEIG

SEQ ID NO: 22099 - protein, 522 aa, synthetic construct
MPKKPTKHPAKPKRGKKLETEEPGVLYGRYSSHNQKDISVEQQFEKGYELAAEYGIKIIDTYADRAVSGRTDKRKDFQRMMSDAAKGKFRYVIAWKSNRMGRNMLEALINEARLQELGVRVLYVEEDFDDTAAGRFAARSMMNVNQFYSENMAEDIRRGLYDNASNCMVANGHLPYGYKRDDTLHYVIDEPKAAVIREIFTRVAAGEPFVDIMSSLNARGIKTSYNRPWGRSSFQKILSNERYRGIYIYGDVRKEDGIPRIISDELFFKVQEVITTKKNPQGRHRVNGDYLLTGKLFCGKCKSPMVGISGTGRSGKLHYYYVCQKHRTEKTCDKKNVRRDEIELQVAQAIKDYALKDDVIEWIADSTVAYNERKEAESKVGILEDQLAGTERGIKNIMSAIEQGIITETTKSRLVELESERATIKAKIAAARADIVTVSRDDIISGLEMFRDGDVHDKKYQARLFDTFLVAVYVYDDDLRLVFSFSGSKNTVQIPIESAVNAVENNEAKCSFKLCSAPPRTS

SEQ ID NO: 22100 - protein, 523 aa, synthetic construct
MRFFSYGRKSVFSDKSDSIDNQFRMNREYCESKFSGQVDSWQQFSDEDFTGANTSRPDLQRMLSFIKGGFCDVLVVYQLDRLSRDVRDFANIYALLEEHGVMFISIKENIDTTTPIGRAMMYVTVVFAQMERETIAARVTDNMLGLAKKGYWTGGNPPVGYVRKHIVVNGKKHCSIEVDPDGARYVTQIFDTFLAYNCSLQGMETRFKNQGIRTQSGKFFSTTQLHKMLTMPYCVEATPEVYDFYAAKGCIMDPGSPREMWDGSVGVIIYGRSTEKNKKHQAQPPEKWTVCLGKHKPFMPAEKWLAVQSRFTQNKCIKDAKWPVPLLKGVLRCKCGNLMQVSRKKKVDGTCSSWYYCRKRMRQGVDACDMGQIKCDLLDEEVLELFRGITADPALIQKFVKAEAPADVTDLKAAQARVSACERKIGRLAASLALAEDSAASKYIIAEMERLDVELGALKREASLAEMESHRAAASAKDAKATAAEIAKLIHGLDGFDDKEKNAIARAVIQECTWDGERLFITL

SEQ ID NO: 22101 - protein, 541 aa, synthetic construct
MEKVAIYSRKSIFTGKGDSIENQIEMCQDYYRKTHNNKDFEFIIYEDEGFSGGNINRPRFQDLLKDVKNKKFKALICYRLDRISRNVADFSSTLELLQDNDIDFISIKEQFDTSTPMGRAMIYIASVFAQLERETIAERVRDNMLQLAKTGRWLGGQEPFGFTSEKMVYLDENFTERSLMILSPLEEELDVIKKIYLKYLDLQSITQVVNWLQDNKYKGKNGGEWGTTQVQRILASPLYVKSSDKTHNYIKSLGINVFGEANGNGYLTYNKTRKMIFDRDINEWIYTTSKHSGIIDDDKWLMVQNILDKNKNKKIKRLGTGLNNTALLTGILKCSKCGSNMIVKQGHKSKTEEGKRYDYYVCSKKDNSRGKKCDNKNIRTDRLDKIVISQLSAYNKESLYLSLSKLLKESKDTNNINNKLISIKSEIQEKETQISNLIKQLSSAPNETVSTYIMQEVNKLSSDINKLKSDLKTIKEDKETYNYDLENLNLILNMLDEFDKNFEITENISQKRLMLQTLLNNITWDGENLEAKLTMFGDKKK

SEQ ID NO: 22102 - protein, 535 aa, synthetic construct
NTTIYNTALYMRLSRDDELQGESGSIQTQRMMLRQYAAEHSLNVIDEYIDDGWSGTNFDRPDFQRMIDDIEDGKINCVVTKDLSRLGRNYILTGQYTEIYFPSKGVRYIAVNDNVDTINGENELAPFLNILNEMHARQTSKKVKAAMRTRFANGAHYGAYAPLGYVKDPDKKGHLLIDPETRWIIEKIFDLAVHGRGAASITRILVEEKVPTPGWLNFQRYGTFANIYAGAPEEKAYAWTIAQVKSILKEETYIGHSVHNKQTNISSKNKKKVRKPKEEWYRVENTHEAIISEDVFRQVQEQICNRRRRQKNGTTQIFSGLVKCADCGWSLAYGMNSQNKNPYAHYHCSKYGQGLHQCSMHYIRYDVLYAYVLSRLQYWSVLAQQDGDKLLKRLLNASDKERNTARKRQTAELKKAEKRKAEVDTLFAKMYEDWSAGRITEYNFNMLSEKYQGEQRELDAKIERLHEAMEVAAQTAVDAEKWIGLMKQYVNPTELTAELLNTLIEKILVHEAVKSEDGSREQEVEIFYRFIGKIE

SEQ ID NO: 22103 - protein, 438 aa, synthetic construct
MSTDQEEQLLSYENQVNYYTNYISENPLYEYAGTYADEGISGTNTKKRDEFNRMIADCRAGKIDMIITKSISRFARNTLDCLNYVRELKDLGIGIIFEKENINTLDAKGEVLLTILSSLAQDESRSISENCTWGIRRRFETGKHKMSTKRFLGYDTDETGKLVINRTQEPIVIRLYQEFLDGKTTDYIKRIFEREGVKNWDGGTKWQSTTLMSMLENEKYKGDALLQKSYTVDFLTKKRTQNKGEIQMFYVEDDHDAIISKRIWECVQLEIKRRKKYLEEHGTNSYSHRPESNPFASKIICGDCSKVFARKGWRSSTGVDRKVWQCSERYKVKGVMGCVNRHVEEETLIKAYLMAWNALVENREDFMEQWTEQLQSENLLEGYRAEKFIEYTDGAEPLTEMDTDFMLKTLDHIKVFEDGTLLVVFLDGTEIECKNEEE

SEQ ID NO: 22104 - protein, 519 aa, synthetic construct
MADFEHVIIYLRKSRSDDPATTVEEVLSRHENILQEFAVREWGARIPEDRIYREVVSGETIKDRPVMQHVMKILETGLVSGVLVVEPQRLSRGDLQDCGHIINSLRYTNTAVITPPKTYDLSDEYDRKFFEMELTRGNDYLEYTKKILNRGRIASVKAGNFIGNSAPYGYRKICVGTGKEKYYTLEIVPEEAEAIRLMFDLYVNKDYGFRNIAHALDMAGYKPRRSAEWSPAAISCMIANETYIGRVVWNRRKTIKKWENDTIVRTRPRQSEYISVPGKHPAIISDELFYAAKAKRNRTPRIKRYVQLLNPLAGLLYCGTCGHAMSRKRTVDKKYGSVSVSFLCNNQSNCHTKSVMYDAVIDRVKETLRQSIEDFEVKVNNKDETDIAYHRAMIANLKSELRKLKEKDMRQKDAYEDGIYTKEEFVVRNAKLAEQISIAQLKLDEAESSTTQLVDYQERLVRFRECLEALDDDTISAADKNTLLKSCIDKIMYYNDSPSLPGIGRYVDNPFRLEIFLKL

SEQ ID NO: 22105 - protein, 578 aa, synthetic construct
MGYVVKKAAQRFEEKKAAIYVRVSTQYQVDRASLPVQREELINYAKYALGISDYVIFEDAGYSAKNTDRPDYQQMMARMRTGEFSHLLVWKIDRISRNLLDFSVMYAELKELGVVFVSKNEQFDTSSAMGEAMLKIILIFAELERKTTSERVSAVFVSRANDGIWNGGKVPYGYSYDKESKTFSIAEDEAKIVRLIYSLYESEKSIVRVARIMNERGLKSRAGSDWSPTTVHTILSSPFYSGTYRYNYRDESNTKRFREKGKDEWVLVENHHPAIVSPERQAAVGVILESKRYNKNATYQRKNVHVFAGLLTCGCCGSTMAATTDKVRADGWRPSMYICSRRRKSEDCTNKYVSDVTLGPFVLNFFANLIKASNSFGRTTSIETLEKKLLRGEALSRVDHIERPGLEELYNHLRSGFDEKRFESPTIAATESSADLSERDLLLSEKRRLERALNRLKTIYLYGDDEMASKDFNIERERITKALSEVDSRINELDIANAFDLSLSDEAFMQKASQFILTQQLLDKRYVNYERFIRKIDPKIVKDFLNETVSNFCIKDGLTTSILLKNGIELRFSYKTAE

SEQ ID NO: 22106 - protein, 565 aa, synthetic construct
MLRTPGDLFFLAEAVNSTNKFYSVSDKSARVYFLYSFLGGGTMRFFSYGRKSVFSDKSDSIDNQFRMNREYCESKFSGQVDSWQQFSDEDFTGANTSRPDLQRMLSFIKGGFCDVLVVYQLDRLSRDVRDFANIYALLEEHGVMFISIKENIDTTTPIGRAMMYVTVVFAQMERETIAARVTDNMLGLAKKGYWTGGNPPVGYVRKHIVVNGKKHCSIEVDPDGARYVTQIFDTFLAYNCSLQGMETRFKNQGIRTQSGKFFSTTQLHKMLTMPYCVEATPEVYDFYAAKGCIMDPGSPREMWDGSVGVIIYGRSTEKNKKHQAQPPEKWTVCLGKHKPFMPAEKWLAVQSRFTQNKCIKDAKWPVPLLKGVLRCKCGNLMQVSRKKKVDGTCSSWYYCRKRMRQGVDACDMGQIKCDLLDEKVLELFRGITADPALIQKFVKAEAPADVPDLKAAQARVSACERKIGRLAASLALAEDSAASKYIIAEMERLDVELGALKREASLAEMESHRAAASAKDAKATAAEIAKLIHGLDGFDDKEKNAIARAVIQECTWDGERLFITL

SEQ ID NO: 22107 - protein, 568 aa, synthetic construct
MKLSGNHNFGTAALYCRLSRDDNMDAESNSIQNQKKILQKAAKEKGYIDTLFFVDDGITGTTMKRPGFQKMITAIEAGYISAVFVKDLSRLGRNYIEVGRLTEEFFPQYDVRLVAVSDGVDSDEGDNEFTPFRNIMNEWYAKDISKKRKIVNKMKGTAGIPLSQPPYGYIKNPDDPQFWVIDPEAADVVRRIYDMALEGYGLAEIANALGADGIVNPTYYWRSKGVNRSGSKSTLEPTKWGHTTIKKILTLQEYCGDVINFKSYSKSYKMKRRIENPEENRTIFLNVHEPIIDRATWEKVQAMQKGTRRKKPTVTQEPSVFSGRLKCPECGGNLNFHFNQKNHDIKYFSCQNHNSGLRKCSATHYIRLDFLEQVVLYEVNRLAAFAYEYEHDFVKAMLGRSAKVAENDRTRKQRELNALLTRDKELDMLFERLYEDNVAGKIDDARFAKMSKRYEQEQGENAGKIKALRLELKKVEGQQMDMEDFLQMVRRYTHVTKITRRMVSELIDHIDVYHAEKQDGVTNQRIVIHYNCIGAFEVPDRKKIPEADIIMETRKGVAVSYAPSQVAV

SEQ ID NO: 22108 - protein, 541 aa, synthetic construct
MDNLITTEEKITALYCRLSQEDEKEGDSNSIENQKAMLTKYAIENGFRNIEVFVDDGYSGVFFDRPAFQKILNLIEENKVDTLITKDLSRLGRNYISVGNYIEMEFPHRDVRYIAVNDNYDSQDINSSSNELAPFKNLFNEWFARDTSKKIRAVIKSKAERGERIGSHIPYGYKKDPDRKGHLIINEETAKNVKLIFQLCATGMGPRNIAKILAEKKIPRPSVYRYENDGVIIQKTDITDRYSWATKTIVGMLENEVYLGHTVNCKTTTLSYKDRKKKVVPIENQFRFKNTHEAIIDKETWDIVQKVREGRKRITKSGNINKYSGLLYCADCGARLTYNSGNKPKPKSYYFMCSSYRRHKDGNCILPHRIREIVLDEIVREEINQAIYYAVNEKNKFVECISKRSLSESRKKLSQKITELDKLNNRKNELNVIFRKLYEDNALGKIPDDQYRLLSDSYIAELHELKAKIPELQNQINEIKTEESNVDRFIALANKYIYIEELTPEILRTFVSKITIHENDKDNPGAKYEIDIFLTHIGKFW

SEQ ID NO: 22109 - protein, 521 aa, synthetic construct
MAEFENVIIYLRKSRSDDPMQTVEDVLAKHESILQDYSIKQWGKPVPENRIFREVVSGETIQDRPVMQQIMKLLETGFISGVLIIEPQRLSRGDLQDCGRIINSFRYTNTVVITPPKTYNLSDEYDRKFFEMELTRGNDYLEYTKKILNRGRIASIKAGNYIGNIAPYGYRKVVIGTGKDKYHTLDIEPKEAEAVRIMFNLYVNKDYGFTNIAHFLDNAGYKPRNSDNWSPAAISSMLNNEIYIGRVVWNRRQTVKKMQDGMIVRTRPRHNDYISVPGKHPAIISEELFYAAKKKRGRTPKVKKFTELTNPLAGLLFCGRCGFAISMKKYTDKRSKTGHETITMLCNNQSNCHTKSVMYSLIIAKVKLSLQQAINDFEVHINNNDDSEQILQQNIINNLTEELEHLKEKDIRQKDAYEDGIYSKEEFLKRNAKLTEQISIAQEKLNNALLEEPRVCDYEEKIVRFRDCLNTLDDDNVSATVKNTLLKACIDKILYYNDSPSLPGIGRYVDNPFRLEIFLKL

SEQ ID NO: 22110 - protein, 514 aa, synthetic construct
MKNQIVQKKIRCAIYTRKSVAEGLEKEFNTLDAQREAGENYIRSQKHEGWIAVDKHYDDGGFSGGNMERPALRELFDDIENGKIDIVVVYKVDRLSRSLMDFAKIIELFEKHNVSFVSVTQHFNTKDSMGRLTLNILLSFAQFERELISERTRDKMSAARRKGKWVGGVPILGYDISPDGSGLVVNRAEAESVRTIFDTYLDTRSVLRTLEILEEKNIRMKSWRTVGGKMHVGKAFTKSTLYYLLKNTAYIGKIRYKGEIYPAEHEAIIDAEVFEKTAERMSSNFRERTSAKVRTKTEGLLSGILYCGHCNRPMTNKYTCKGGSKTYRYYVCQNAVQKGWKSCPYPSLPATAIEDFVVGEISGISTDEKLSAEVVGNFTKSVRAELADSAARENALEKALSEIRAELAGCTDSPKTEDLRKEEIRHSEALEICRKRTEMLGKKCSKSEAELKRIFGNFDGIWANLNFKEKYELLGLLVEKVVYFGEKGEISVFYRENGIDIETAKNGNQKQNIH

SEQ ID NO: 22111 - protein, 526 aa, synthetic construct
MQYCLYLRKSRADSEAEARGEGETLARHEKALLDLAKKLNLNITAIYREIVSGETIAARPVMQQLLQEVEQGIWDGVLVMEVERLARGDTIDQGIVAQTFKFSDTKIITPIKTYNPNNEFDEEYFEFGLFMSRREYKTINRRLQRGRMASVKDGKYVANKAPYGYNRIRIENDKGWTLEINKEEADVVRLIFELYTVGEKQSDSTFNRLGTGFIAKRLNAMKVPPKRGKVWVVASIRDILINPVYIGMIRWNWRPQQKKMIDGQLHISRPRATDYMLCKGLHPPIISKETFDIAQDLMRHNPARPIGEKNTVKNSLSGIVICGNCGRHMVRRPHTKYPDMLICSEPTCNNVGSQLRVVEERILQSLKEWLGEYKISWDITSPQIERISQVSIKKKALQKEQHELDTLNKQISKTHDLLEQGIYTTDVFLERSRALSLRMDEVKEHIAILDKELKTEITREDSAVNIIPKVEKLLEVYHDLPSPKAKNDMLKDVLEKVVYTKKERSKKGNLDNFNITIYPKIPKYIT

SEQ ID NO: 22112 - protein, 537 aa, synthetic construct
MQRAVIYARYSPGPNQTEQSIEGQVRECTKYAELHDLRIVGTYVDRKISGKTDNRREFQRMIDDSEKHIFDVIILYHTDRFARNRYDSAIYKHKLKENGVELRYATTDIPKGPEGIILESIMEGWAEYYSAELSRKIKRGMRESALKCHSTGAGRCLGYRTAEDKSLVIEPEGAKAVQTVFDMYIKGKSHADICRYLNDCGFRTAQGKLFNKNSVTHIIRNKRYIGVYTYDDITIEDGIPAIISKDTFHLAQLEAARRKTAKRPKEPKAEYLLSGKAFCGHCQKPLVGVSGTGKSGNKWYYYYCQESRAKRGCTKRPVKRDWLEREVVERTVAEILQPEVIQHIAKKCYDLQMEYRQDNSDVLFYELKLKDVRKAIKNTMHAIESGVKTKTLPARLQELENEEEALEAELAIAKASDFVITTDQIEFLLTQFAEPWECESEEEYHRRIIKCFVHKVFLFDDKLLIYYNVSRDGKTREQSEAELLEEALGEGFDKRSSGSTNKKTSQFQRLRGFSCICKGFLAYLFAHYLRYLQVIFR

SEQ ID NO: 22113 - protein, 580 aa, synthetic construct
MSEKIINCAIYTRKSTEEGLEQDFNSLDNQYEFCTNYLKSLNDPTLHLLPTRYDDGGYSGGSLNRPALQCLLADIRCGLVNRVIIYKIDRLTREIRDFFKLLDVFEKYNVEFVSVKENQYYNTTTAIGRLMVNMFLVFAQFERENAGDRIRDKIATSKAKGMWMGGCPPYGYDIGDRCLVINETEAQNIRFIYQTFCDTHSLADTTDALNSGGIRTKCYTTRQGRTFGGRKFSVKTVQRILQNPLYKGMVTHRDKQYPGQHAAIIDAAQFDLVQAIFAAHKDKREARRCPQKASGGERETAALTGLIFCGCCGSAMTPSYCCKGDIRYHYYRCYRRASKLEDKCPINQIRTSEIDRVVMEQVLAILKSREFFVQYISHHHEFDVSTAFALFNNLDDVWNSLFETEKRRILRELLAKVTIFKDKIVLDVKKVGLAGVFAELSQNNRLAEVEYKENETFQISIAYRATRLANGAKIIVPATAKEESRFNGSLRLARQIAKGFAWRKMMESGLSLQELTASAKTNERDIRFAMRLSMIDPAIVESVLSGKSPEFLTYAFMKKHPIPLLWSDQRKLYGFEERKQ

SEQ ID NO: 22114 - protein, 464 aa, synthetic construct
MQKENTLIKHVACYCRVSTDEQAKFGFSIQAQKDSLKKYCKENNYKYEFFIDEGISASSMKKRKALIEMLNKCNAFDMILFTKLDRLSRNVLDANNINKLLIDNHCTMKAIDEDDIDTSTADGTFIFNLKVSLAQREIGKTSERIKFVFQNKREKGEVTSGTRKYGYNIINKKFEINEKETENIINLYKYFIDCNGNIKKTYSYFVEHFPEKGYDAMKQYLRDTAYIGKYKMYRKDIYLDNYTPPIMDNELFNSVQNLLKKKQKNVIRNNNDSLFSGLVYCNTCRNRMVKKQDNRVKIPTIRYSCNNVFQYKVGSTERKCNNTTLIREDYIEQYLLKNLGKELNKYKIKYQIKEKKIQKVDYSYEKQKIESKLNKLKDLYLDDLIDKKTYTTDYKKYMSQLEKFNINIPTTIPKKDFSAIEKTLNSGYKEIYNKLSQENKRKFWLTFIDKIYVLNGKIEEITFL

SEQ ID NO: 22115 - protein, 444 aa, synthetic construct
MAAYCRVSTDQEEQLLSYENQVNYYTNYISENPLYEYAGTYADEGISGTNTKKRDEFNRMIADCRAGKIDMIITKSISRFARNTLDCLNYVRELKDLGIGIIFEKENINTLDEKGEVLLTILSSLAQDESRSISENCTWGIRRRFETGKHKMSTKRFLGYDTDENGKLVINRMQEPIVVRLYQEFLDGKTTDYIKRIFEKEGVRNWDGGTKWQATTLMSMLENEKYKGDALLQKSYTVDFLTKKRTQNKGEIQMFYVEDDHDAIISKRIWECVQLEIKRRKKYLEEHGTNSYSHRPESNPFASKIICGDCNKVFARKGWRSSTGVDRKVWQCSERYKVKGVMGCANRHVEEETLIKAYLMAWNALVENRADFMEQWTEQLQSENLLEGYRAEKFIEYTDGAEPLKEMDTDFMLKTLDHIKVFEDGTLLVVFLDGTEIECKNEEE

SEQ ID NO: 22116 - protein, 426 aa, synthetic construct
MRVKVINKRPASVLQKKRVCAYARVSTDSRRQEDSLENQMETYERLITGNPEYEFIGVYADQGISGYCENRPQFQRMMEKARAGEIDLIITKSISRFARNTVTVLKFARELKELGVGIFFEEQNINTLSGDGEMMLAVLASFAQEESRSMSENNKWSIRKKFERGEVMITTSRFLGYDKNEYGDLIVNRKEAEIVSLAFDLYLMNVGSSRIGELLDYLGVKTVTGTTWESGTINGMLCNEKYKGDFHLQKYYTPENKRNHTKKNNGEVQSYYISENHEPIVSPEVWERVQEVREQRKRDRNIGQDNTMKFQNRYPLSGMLICPYCGKTLRRRQVYKKKIQWLCSTYIEKGVKACKGIRIDDTELQGLNITEQTVVEEVIQNGKKHYCYTSKTDFDCGIRNSASSTETENGSVLPSVNRPRRTVIKL

SEQ ID NO: 22117 - protein, 463 aa, synthetic construct
MKRQTAKQNDKLLLRVAIYIRVSTDQQAQDGDSVRDQLATGQKYIEKHENMILADTYVDDGISGQKVKRDDFQRLMNDVRAGSIDLIIFTRLDRWFRNLRHYLNTQDVLDKNGVSWTATEQPYFDTSTPHGRAFVNNSMIWAELEAQNDSDRILSVFDDKVENSEVLSGSTPLGYRIENKHLVPDDDAPTAAAIFEYYRKTGNLSMTLRYMESEFGLVRSAASLKNMLTNTKYICEFRDNKNYCPAIIDRDLFFDVQRLLKINIKSGKKHDYIFSGLVVCDDCDHIMSGCQQRAKGRVCADGTRIVYKYSVYRCRQGVNLHRCPNRKLVFETTLEKMLLERIRPELENYIAEYEVTNLPVLHTDAKRRNLEHKMQKLKELYLNDLITMDEFKVDREKLMQQLDKIKSDDSQPMKDLSYLKNFLKTDFENIYVSLSIPEKRELWRSIIREIRVDHERNVRIIFL

SEQ ID NO: 22118 - protein, 519 aa, synthetic construct
MADFEHVIIYLRKSRSDDPATTVEEVLSRHENILQEYAVREWGARIPEDRIYREVVSGETIKDRPVMQHVMKILETGLVSGVLVVEPQRLSRGDLQDCGHIINSLRYTNTAVITPPKTYDLSDEYDRKFFEMELTRGNDYLEYTKKILNRGRIASVKAGNFIGNSAPYGYRKICVGTGKEKYYTLEIVPEEAEAIRLMFDLYVNKDYGFRNIAHALDMAGYKPRRSAEWSPAAISCMIANETYIGRVVWNRRKTIKKWENDTIVRTRPRQSEYISVPGKHPAIISDELFYAAKAKRNRTPRIKRYVQLLNPLAGLLYCGTCGHAMSRKRTVDKKYGSVSVSFLCNNQSNCHTKSVMYDAVIDRVKETLRQSIEDFEVKVNNKDETDIAYHRAMIANLKSELRKLKEKDMRQKDAYEDGIYTKEEFVVRNAKLAEQISIAQLKLDEAESSTTQLVDYQERLVRFRECLEALDDDTISAADKNTLLKSCIDKIMYYNDSPSLPGIGRYVDNPFRLEIFLKL

SEQ ID NO: 22119 - protein, 441 aa, synthetic construct
MKRAAIYVRVSTKEQKEKGLSVDSQLLALREYCSNNGYVIAGEYNDAGISARKKYINRPALLQLINDCKEGKIDIILFTKLDRWFRSVADYYQVQTLLDSYKVPWRAIWEDYETETSTGLFKVNIMLSVSQNEADKTSERTKEAVKYRRLRGDFVGGRCPCGYRRENKKLVFDEETYDAINAMFRTYLSCFSIAKATEAVAEYGLHIATSQICRMLKSPAYAGNASGSECPAYITWDEHLLILTNSTKRNRTPKRSDRVYLFSGLCRCGYCGGRMVARVNRWVKNGQQLYYPFYSCAAHNDKRNLDCPGVNLAETKIEAYLMEHLEAELKMCQSEFELEQENKATYENKIKALEQKLKRIGVRYEDGDIPFEEYKDKRFAIKKEIAGYKDKIDNARSVPSLPDNWKDLYNSLTPDNKRGFWLNILKEIDITKEAINIVFPV

SEQ ID NO: 22120 - protein, 521 aa, synthetic construct
MGNVMIIPAKRQVGNTSRRQEDKPKLRVAAYCRVSTDSDEQASSYETQVEHYTEYIKKNPEWEFAGIYADDGISGTNTKKREEFNRMIEACKAGEIDMIITKSISRFARNTLDCLKYIRMLKDKNIPVFFEKESINTMDAKGEVLLTIMASLAQQESQSLSQNVKMGLQFRYQNGQVQVNHNHFLGYTKDREGNLVIDPEQAEVVKRIYREYLEGSSMDKIAKGLEKDGILTGAGKKKWWTSTINKILRNEKYIGDALLQKTYTTDFLNKTRVKNNGIVPQYYVEGNHEAIIPKDIFLRVQEELVRRRVVKTSANGKKRSYSCNHCFAQIIICGECGEMFRRIHWNNRGCKSIVWRCLSRLEATGQECHARTVNEKVLENVVAQAINKLLGDKSTYQTQLQQNIAKVIRDAQKNTADGIDEQLLELQKELLKKANNKESYDEIAQQIFKLREQRQQCTVDTATRDAQIARITELQDFIKQQRTDLAEFDETLVKRWLKQIIVWEDHFTVELKSGLKIDIEG

SEQ ID NO: 22121 - protein, 517 aa, synthetic construct
MTTNKKVQIIRGSKSYAEDILRVAAYCRVSTDSEDQVNSFIAQMHYYYSFIKQAENMELVDVYADEGITGTSVAKRDDFNRMIKDCKAGKIDRIYVKSVSRFARNALECLEYLRILKECEVSVFFENDGIDTGALNSELILYIKAAFAEAESTSNSKRVQTANRMRAENGEYVFVSAPFGYRIENNELVPIPEEIKVVERIFKEYLAGLGAGKIAAQLNAEADMIGKPWGKERIRYILSNEKYIGDSLFQKTFTPNVLPLKNRPNRGEVEMYYISNTHAPAIDRELFDAVQEMLKRNMQKKAKCAKSGKYSLSGKLYCGDCGWRYKRKVQNGTAYWICSGDGIAGRHCKTKPLSEEVFFKTFVNFYNRLRAHENLILRNSVTRLSEIKKMITCMDSEISDLDKQLGLLTERHNLYVTLMQGNQMDEISFAEQCAKAEREINKLRSRRNKLLSEDEDEKSIDDIRMLRNKLSSAPKAILKFDFELFDAVVEKVIVEDDSKVSFVLCCGLKLREAIAWN

SEQ ID NO: 22122 - protein, 549 aa, synthetic construct
MNNTGVQVRTKTVTKIAANPALSKRNDPNRILRVAAYCRVSTDDEDQLNSYRTQKSYYTELIKKNPKWRFAGIYADEGITGTMVKKRDDFLRMIEDCEKGKIDLILIKSVSRYARNIVDCISYVRKLKALGIGIYFEEQNINSLTEDSEVYIGIYGVMAQSESENISANVKWGINKRMQNGTYACRFTLLGYRRNKDTKEIYIVPEEAETVKKIFQMYLQGRSLDQIKRYLEENNILTVRGNPVWDKGVIKSMLTNEKYVGDIMFQKTYREDCISKRTKINRGEMDRYLVTDNHPAIIDRETFRMAKKEMVKRSSKRRTSSNAVTELGKYSGKYALSELLFCDICGSPFRRKTWTRKGVKRVYWRCLNHVENGDKACPQSRGIEESVLHEAICRGMSKCIPETGDVKNLVRTMLAYATSEDQGLLECQTLENAIRELQEKANEAEEMCIRTEGNKEPYMEQIQKYYASIAELRARIIEIKKQLEKSDEFQTEMQQIDRWLENEDILFAEYDDDIVRYLIESIRVTDDLKLIINVKGGASVTEELYQRED

SEQ ID NO: 22123 - protein, 560 aa, synthetic construct
MKKQQKCYIYTRVSTSMQVEGYSLDAQKDKLRKYAEYQEMSIVGEYSDEGKSGKSVEGRPQFKQMLADIESGKDNVDYVLVFKLSRFGRNAADVLSSLQKMQDYGVNLICVEDGIDSSKDAGKLMISVLSAVAEIERENILVQTMEGRRQKAREGKWNGGFAPYGYQLVNGELIIAEDEAEIIRIIYDKFVNTTMGMAAIAAFLNNSGYKKKLRQNNTIEGFSTSFVKGVLDNPIYCGKLAFGRRKNEKIPGTRNEYHIVKQKEYMLNDGIHEAIISEEMWNQAHRKRQETGVLQVKTHSLEHEHILSGIIKCPVCGSGMYGNVNRKKHPDGGYYKDYFYYACKHRKLVDGHRCTYKRQWNEDRINAAVEEIIRKFVKNPKFEQEIRKQIGSSIDTSELDKEYDGLKDRLSQTTGAKNRLADQMDHLSVSDKNYDKKYNDMQERLDKLYDEITDIENAMEEVETRLYNIRQDKISEDNVYQFLLFFDKLYDKFTDLEKKTFLKSFLSDVFIYEEEQKDGRILKGLRFKFPIYMNGRNVLGVDWDNKSTDETVCLLSRKVQ

SEQ ID NO: 22124 - protein, 684 aa, synthetic construct
MSILQTIKTIIRVVLYLRLSDEDKNKLSKEELSQSIKNQEIMLRDYAEEQGWEVVGVYNDDDWSGSDATRPDFNRMIEECKNGNVDIVLCKTQARFARDMELVEKYVHNLFHEWNVRFITVVDRIDNARKETKKTSQILGLTDQWYLEDTSLNIRETLKSKRKDGQLTSSFATYGYMKDPENKNHLIIDPISAEVIKRIYDEYLSGTGLDKIARRLNEDKILSPYEYKLLNGSKLKIPVIKDYVNYGYIEKTGTYMLDVSFTNKEEYILKDLVSFNYITTDMKSFNNKCDIVLKKYTNNRTKIYYSENDNIDINNFNIDDCILLNENDVIPKTAKVIISYTKELDRTHTINYQFEITLKENREHEDYYINICGKATDEIKKSDFIHNIRKKFKWSSSTIRTLLTDEVYIGNMVQFKSTTVSYKNHTVVWNDDETRIRKDNTHEPIIAKDIWYTVQERLENTARSCKGGTVHPLCNKVYCSNCNQIFTKTGNRRSDGTGYLCCKDRKTNWSNCDNKASIREDQLHQFILEKMNEMLKKFYEEDDLKEMQNEVIEQDLYKDKLNSLEKELQSINKELQGKSTYFQKLYEDRTNGILPEKEFLILMNKYKDDNEKLEERKKIVKKEISSTLAKKETVKTKKNIFKKYRHIEELSIEIVEDFIDKILIGSYDETTNSRDIKIIWNFTI

SEQ ID NO: 22125 - protein, 438 aa, synthetic construct
MANVSIIPATKRSVQNGGQLKMQNNIRVAAYCRVSTGDESQQTSYTTQKAFYTSFITSKPGWRFAGIYADEALSGTSRAHRVEFNRMMDDAKAGRIDYIVSKSISRFARNTVDTLTCIRELRQLNPPVGVFFEKENIDTLDATGELILTILSALAQDESRSISDNIRWALQRKFQRGSPQINLKRMIGYDMGPDGEWIINSDQAATVRYIFERYLLGLSATKIAAELNEMGRPTVNGKKWAAGSVMIILRNEKYVGDIEMQKTITKDFLTHRSSKNSGEAPRYYIENHHVAIIDRLTWDKVQAMMYNKPNRGDIKTKEKKTIVKRPFVNLVCGTHLPDGEECGAGFFRLTYTNVASGYTDERSLQATGEDGGEYLEKYTFAFPVWRCKRKAGVREGEEPKTGTLDQKKYCRSKLGRMTDAEREAAEERCPSELYHTLP

SEQ ID NO: 22126 - protein, 591 aa, synthetic construct
MAKITRVEQAVPTIKTKKKVAAYARISMESERMNHSLSAQISYYSSLIQKNPDWQYAGVFADDGISGTGIAKRDEFKRMIEAADNGEIDIILTKSIQRFARNTVDLLETVRHLKDIGVEVRFEKEHINSMSGDGELMLTILASFAQEESRSLSENCKWGIRKRFEKGIPNGHFRVYGYRWEGDELVIVPEEAEVVRRIFQNFLDGKSRLETEREFATEGITTREGCRWVDSNIKVVLTNVTYTGNLLLQKEFISDPISKQRKKNKGQLPQYYVEDTHPAIIDKATFDYVQEEIARRKELGPRANKSLNLTCFSGMLKCPHCGQSYMHNKRTDRGFMEFWVCGSRKKKGGRCPVGGSINHENLKKACAAVLGLDEFDEDAFHDRVDFINVPERGMLEFHLKNGEVITKDCPNTGHKDCWTAEYRAKTSEKRRKRPNCKGSSVMTGKIKCVGCGCNFRRATQPSSTSESGKAYYWRCAERDGCETVGLREDVLKPFIAETLGIAEYDDGEFEKRIDHIDVLSATEMVFHFKDGRTVSRTWEQPKRVGRPWTDEQRAKFKESIKGRYTPEVRQQMSEHMKQLRKERGKAWRKEK

SEQ ID NO: 22127 - protein, 526 aa, synthetic construct
MAQRKVTAIPATISRYTATPINSTKKRRVAGYARVSTDHEDQTTSYEAQVDYYTNYIKSRDDWEFVAIYTDEGISATNTKKREGFKTMIADALAGKIDLIVTKSVSRFARNTVDSLTTVRKLKDEGIEIYFEKENIWTLDSKGELLITIMSSLAQEESRSISENVTWGQRKRMADGKVSFAYSRFLGLEKDKETGKIVVNPEQAETVRLIFHLFLEGMTPHSIAAELTSRGIKTPAGKDVWNQQTVRRMLSNEKYKGDALLQKEFTVDFLQKKMKKNEGEVPQYYVEGNHEAIISPAVFDLVQAELAKRTKGGSRYSGVSIFSNKIKCADCGGWFGSKVWHSTDCYRKVIYRCNRKYNGEKCQTPHVTEDEVKEAFVSAYNQLVTEKKEIIANAEIIRKTLCVTDSLQEEKGRLEEEMVVLVEMTQNIVAENARVAQDQDEYQKRYDGLVQRYDTAKARYDKVVAAISAKEAQSERLADFIKVLKVQDRTISEFDGSLWGGMVEFVTVGRNKEIKVTFRDGTEILA

SEQ ID NO: 22128 - protein, 545 aa, synthetic construct
MLQVAAYCRVSTDKEDQANSFEAQQRYFRDYIERQPDWVLQGIYADEGISGTSTRKRVEFNKMLHTVELGQIDLIVTKEVSRFTRNTVDALQITRELRRRGVGVLFLNDSLDTRTNDGELRLTIMSSVAQDESRKTSERSKWGQTRSMEKGVVFGGSLLGYDVIGGKMTVNPEGAEVVRLIFHKYLQERKGCSTIARELREAGILSSKGNCLWSSATVTKILKNEKYCGDLIQKKTYTPDYLTHEKKYNHGKEPLVELKDHHEAIIDRETWQAVQRELSRRNRATGCGGHGNRYPLSGKIRCGECGKSFSHRTKKRQDGSSYYRWCCFTATNEGLRRTDGAGNVIGCSVGRQIRDDIAMGLLRRSVNAVTLDKKSIISSLTRVVESVLASGEDSGEQELRRLELEFEKLQARNDTIHDRFFDESITKADYQRAKARCESEMNRVQEKIAAIKQRQTLNTDTQTLKPDIRAAITGIVSGRTADDDFYGHLLQQMTVYRDGRVEVALNLLPAKWVYVLDGPEKYRDKIGVHDASSVPMSVSRPLSSG

SEQ ID NO: 22129 - protein, 518 aa, synthetic construct
MKITEITQVKSEENKKIRLAPYCRVSSDSADQKHSFATQIKYFMDYCKRNPEYELVDIYADEGISGTSMLKRDEFNRMILDCENGKIDRIITKSVSRFARNTEDLLLILRKLKSLNVSVYFEEQDIDTNRINAEMIVTFPGMAAEQESRSISDNLRWSCRKRMEQGEFFGNYVAYGYKLENKSLVINEDEAVIVREIFDMYLNGIGKSTIAQALNRKGVPTRENRKAWYTSTISYILTNERYKGDSLLQKKFNSETLPHKHIKNKGQLNKYYIENSHPPIIERDVFDKVQKIINSRSIKKSENGIYPLSKKLICPDCGSVFKRQIVNGKTYWLCRKSSLGQTNCKSRRLLEKSVYNSFAIMLNKIIDNKQILINDLISNIQTMIKCESKNNRKLYEVDLKIADLGEQNYVISRLHSKGLLDDIEYNSQSTNINNQITELRLKRKLILKEDSCSEWLKEIEELNEIISLHNYGEKFSEELFSSIVKRIVVIDNATLQFELLGRLKFTEKILEKERCRSV

SEQ ID NO: 22130 - protein, 529 aa, synthetic construct
MSRYCIYLRKSRADLEAEAHGEGETLSRHKTALLELARRMGITISATYEEIVSGETIAARPQMQRLLSEVGAGEWDGVLVMEIERLARGDTMDQGLVAQTFKYSGTKIITPLKTFDPQNEFDEEYFEFGLFMARREFTTTNRRLVRGREASAKEGKYVGSVPPYGYRKVKIPNDKGFTLEIIEEQAKVVRMIFEWYAEGAEVNSQKKRIGPYTIAVRLNELGIKSVAGKDYWTIYGVQHMLINPVYIGKIRWGYRKVKKTVTPEGMKKKSREFAQDGDYIVVDGLHEPILSEELFYKVQDLIAANPPTPIKYRHKNINPFAGLIFCAKCGHCMNYRRGYGRQPDYIGCYTAGCKNKASRFDLVEQRVLSILNSWVKDYSVDKAQIKHEADLNAELSNAISLAEKEIETLQDQLDKVYSFFERGTYTEKIFKQRSSAIEQQIMEIGEKIDRLKAEHQQVLERQNVQAEFVPSIKHLLEIYDTLEPVEKNKWLKQIIDRIVYEKNADGKYHNVDPGDFTIGILPRLPKRGS

SEQ ID NO: 22131 - protein, 513 aa, synthetic construct
MLYAIYLRKSRADLEAEAMGQGETLARHRAALLDYAAHHGLEIGAVYEEIISGESIDARPKMKQLLREVEQGRWAGVLCMDIDRLARGNSADQARVSNTFRISGTLIITPSKVYDQSRESDEEYVDFELFMARREYKAISRRIMRGRIASVKEGHFIGSTPPYGYDKVKVEKGRGFTLLPNSESDTVKQIYSMCISGMGCNAIARRLDMMGVTPRKGSSWSSASIQDILKNPVYCGKIRWQYRKEEKSLTDGIVTTHRRENPDCIIAQGLHPALISEEEFEKAQQFLNSRRIPHKKESTELRNPLSGLVYCGMCGSMMTRLGTGSRNHSDTLRCPNRNCGNVSAKLELVESALVEGVARWLNDCRVNVSRKPAADTAKAERTAAEKVRAELAKLDSQREKIYSFLEQGVYSAGEFRERMESLEKRRTQLSENLRQAEQAVSEAEGNRQLYAQIIPSVERVMDIYAQSTPEEKNRLLKTIISRAEYIKTERNTRGNADRCNFTLNVTPLFPETD

SEQ ID NO: 22132 - protein, 555 aa, synthetic construct
MARKKKQASGDAVIYARYSSHNQRDVSIEQQIEACRKYAASLGLKITVTYEDRAISGRTDNRPAFQRMMNDAEDGKFCYVLAWKSNRMGRNMMQAMVNEARLVDCGVKVYYAEEDFDDSAAGRFALRSMMNVNQFYSDNLAEDVRRGLMDNASKCIANGKQPFGYKRGSDGKVVLDEPAAAVVREVFTRVASGETNTSIARDLNRRGIKTGSNGEWNKCSFHGLCTNERYRGIYIYGETRIEGGVPRIIDDRLWHKVQEAIRMRNRRKNGRHRPGEDDYLLTGKLRCGHCGGYMIGMSGTSKTGTIHHYYACQNRRVGRTCDKKNIRRDIIEPAVAQAIKQYCLTDDVIEWIADKTIEYWEDDDRKLQITSLENELADIKSSISNVMKAIEQGVITSTTRDRLIELETQQSDLSAKLNSAKEDLVHVDRKNLISSLLLFRNGDVYDRQYQEDLFNTFLVAAYVYDDGNRLKLVFNCFGDSNTVDLDLCSDENNDNSSISNEANCGNLFAQALKQSTRTKPSEETQVAFLFALFCAAQPFRMPSALLWAFSAEGLF

SEQ ID NO: 22133 - protein, 513 aa, synthetic construct
MLYAIYLRKSRADLEAEAMGQGETLARHRAALLDYAAHHGLEIGAVYEEIISGESIDARPKMKQLLREVEQGRWAGVLCMDIDRLARGNSADQARVSNTFRISGTLIITPSKVYDQSRESDEEYVDFELFMARREYKAISRRIMRGRIASVKEGHFIGSTPPYGYDKVKVEKGRGFTLLPNSESDTVKQIYSMCIRGMGCNAIARRLDMMGVTPRKGSSWSSASIQDILKNPVYCGKIRWQYRREEKSLTDGIVTTRRRENPDCIIAQGLHPALISEEEFEKAQQFLNSRRIPHKKENTELRNPLSGLVYCGMCGSMMTRLGTGSRNHRDTLRCPNRNCGNVSAKLELVESALVEGVARWLNDCRVNVSRKPAADTAKAERTAAEKVRAELAKLDSQRERIYLFLEQGVYSAGEFRERMESLEKRRTQLSENLRQAEQAVSEAEGNRQLYAQIIPSVERVMDIYAQSTPEEKNRLLKTIISRAEYIKMERNTRGNADRCNFTLNVTPLFPETD

SEQ ID NO: 22134 - protein, 537 aa, synthetic construct
MQIKVIHPLVERELERKKVCAYVRVSTDSDEQEDSYENQIHYYKDKIESNPDWKFVGIYSDFGISGYKEKRPGFINMIKDARNGRIDLILVKSVSRFARNTETVLKYSRELKRLGVGIYFELQKINTLSGEGELLLTILAAFAQAESESNSGNVSMSIRRKFEKGELNFPISKIYGYTEDADGNPIIDEEKAKIVRLIFDLAEKGIWVTKIAEYLNKKQIPGIAAEKWNFGQIGKMLRQEAYMGDRILQKTYRDSRRRTRKNKGQADQWYVKDTHPAIVTREQWYQVQDILLERNKELYDATPISEEKNLSTHSTYPLSGKLYCPYCGRVLMHRWEGKKRYENWVCGLHRKVSKDACPGICIPNRIASSWGELKEPMTVLKYTDEYGMERFTAIPKVEYEASEDCPYEVVKPEPKPERPKKPSYKKTPKPDKPRYTRTVYPLSGKLFCPNCGKVLTHKWNKGVEYWVCSTNRNKHRTENFEKCKGMYFPAEAAKDWGEINEPLTVIAYKNEYGHRLYTAMPKEEYERSADCPYRKED

SEQ ID NO: 22135 - protein, 465 aa, synthetic construct
MAREVVHIPARPQVVGTRTTPEKKIRLAAYCRVSSEQDEQLNSFENQVTYYKEYISSHPDYELAGIYADEGISGTSTKRREEFNRMIADCEAGLIDMVITKSISRFARNTQDCLMYSRRLKDLGIGIRFEKENINTMDSTGELLFTILSSLAQDESRSISENCQWGIRSLFKRGIHHLNTNRFYGYDSDENGKLIINPEQAKVVKWIYESFMEGINPDVIVKILNEKEIPTCMGKSKWTCNQIKSILRNEKHMGDAVLQKTYTPDYLTHKSVKNEGQLPQYYIKEDHPPIVSQQLWEAVQLELDRREAFMKKHFLKSMGQYTDENPLSHRIICGICGHTFSRRTITRLEGRIKVWQCGQHYAKKGEHLCDGRTIREEELYKAFQLAWDHLVDERDNKAKEWEKKMAEGNALEAYRAEQFLRLTANGGRLKEGKPLVGAVLDHIVFEKSGDLSICFLDGSHVCVEP

SEQ ID NO: 22136 - protein, 620 aa, synthetic construct
MSSEKIIVLYERLSREDENLGESYSISNQKKLLEDYCREKGWTRFRHFTDDGISGTTFDRPSFKAMIQLVEDGEVETIILKDMSRLGRDYLVVGQLREFFRKKGVRLIAINDNHDSYNGDDDFLVFRDVMNEMYAKDISKKIKSTFKSKGKSGKHVASVTPYGYLKDENDGNHWIVDEEAAEIVRLIFKWTIDGLGPYQIAKLLQEKKVEIPAVHMARFGQGNNRNKKVKDPYGWGSSTVVGILKKREYLGHTVNFKTQKHFKDKKSHYVSEDNWVIFEKTQEPIIDQQTFDTVQKLRENVRRYPDGWGEHHVLTGLMYCADCGAKMYVHRTSNGKRIAQYTCSAYTKVPCGTLCKTQHRINESVVLELIGDTLRAIFEYAKYDRSEFIDTITMAQSTQEDAEVKKVRARIAVAGNRCEELEKLICRIYEDNILGKLPDSRYEVLDKQYAREKAELDAEIKELEAKLTEYEKSRNSAGKFIALIDKYEKFEELTPAMVNEFVDKVLVHERDRKGSIQTTQEIEIYFNFVGRYVPPAMMTEPTAEEQAEIDRINRIKDRRHQQYLRRKESGWQRKYEERVKNEKRAKMQAMKEEIRRQDRENGVYATAGSLALEPTIGMPE

SEQ ID NO: 22137 - protein, 527 aa, synthetic construct
MTKRKVTTIPATINKFTAKPMDSRKKRRVAGYARVSTDHEDQQTSYEAQVDYYTTYIKGRDDWEFAGLYSDEGISATNTKHRDGFNKMIADALAGKIDLIITKSVSRFARNTVDSLSTIRKLKEHNIECYFEKENIWTFDSKGELLLTIMSSLAQEESRSISENVTWGHRKRFADGKVSFAYSRFLGYEKGPDGTIVVVPEQAKVVKLIYKLFLDGMTMHTIAGELTKRGIKTPGGKDKWNQSTVRSILTNEKYKGDALLQKSYTVDFLTKKTKTNEGEVPQYYVENNHEAIIDPQIFELVQAEIAKRNNGKERYSGVSIFSTKVQCAACGGWYGSKVWHSNDKYRRIIYQCNNKFRNKTGCTTPHLTEYEIKEYFIKAMNRLITEKDEIIANTEMIRTMLCDNSELETQRDVLQEEIAVTVELTQNAVAENARVAQDQDDYNKRYNALLERYDRLKVQYDEVSAAISDNEARYEQMGRFITVLKDQECVITEFDDALWSSLVEKIVVKSKENMTVVFKDGTEIKAE

SEQ ID NO: 22138 - protein, 575 aa, synthetic construct
MRKISKIESIMPAVAVKKKVAAYARISMESERMHHSLSAQISYYNALIQKKSEWEFAGVYADNGISGTGIAKRSEFLRMLADCEEGKIDIILTKSIQRFARNTVDLLKTVRHLKDIGVEVRFEKENINSMSVDGELMLSILASFAQEESRSISENVKWGTRKRFEQGIPNGHFQIYGYRWEGDHLVVEPEEAKIVKMIFDDFINGLSAESTEKKLEQMGVKSYKGGHFGNASIRQILSNVTYTGNLLFQKEYVSDPITGKIKINRGELPQYWVENTHEAIIPLEVYQAVQEERQRRRELGVFANWSINTSCFTSKIKCGNCGVSYRRSGKRQRKDKNEVYYVWVCQTYDRKGKAACPSKTIPEIKLKAVCAGILGLKEFDETVFSEKVEQITVIGDDTLEFHFTDGTMQQKKWSSTAKTDWWTAERRKEWGERHKNKSTNPNRSRYKAFTGFIKCGNCGENYRSQGITYADGTKERHWHCCKFCGNTGIKQSTMETLVSEVMGLDTFSEERMDAVMEKAIVKDGTVIFYFFDGHTESCNYEEKKKGVPHTEEHKKYMSKLMKERGKQLKRKRGNK

SEQ ID NO: 22139 - protein, 501 aa, synthetic construct
MEITVEKVDTGVQKLGFQALSTLKTVRVAVYARVSTDQEIQLHSLEEQMKAFRAKIAQHPGWMLVDVYADEGISGTSVKKRKEFLRMMEDCEAGKVDYIMAKSISRFARNTVECLSYVRHLQSIGVQLYFEKEGLDTATSVSELILTVMAAFAQEESRSISENLKWGIRKRFESGESRWTKTYGYRKTKDGEIVIEPDEAAIVRMIFKMYQYGIPMTDILDELTFIQAPSARGKQTWNKTALKYLLENEKYIGDMRLQKWVSVDHISHRSVRNDSTVIPVYNVRNHHVPIIDRHTYQQVQRIMELKSPHGEYSRYPYFDTNIVCPLCGKKMIPRVMKVNSHKRILGCFDVDGCRGYAVKGYLVDAALLEAYNTLEIKEKKRTVAMQRMLEIKAESPKLDTVQYYWLDDLVGHIEFKQDTMRVFWKCGLESEVALNASKVEEPTHVAELYRNSLDRAQRSENKPVSVVRVSEKKMSPREAQRNAAMQAAKNLRAKKGAAVNG

SEQ ID NO: 22140 - protein, 581 aa, synthetic construct
MAYRSTITTPSAASRKVKAALYIRVSTLYQIDKDSLPFQRQELINLAKYMLGTDDYEVFEDAGYSGKNTDRPSYQRMMTRIRQKEFSHLCVWKIDRISRNLLDFAAMYDELKKYNVTFVSKNEQFDTSSAMGEAMLKIILVFAELERKLTSERVMGVMLDRASKGLWNGARMPLGYKWDTNAKFPVIDADEAVTIRFIFDKYEEVKSTLQISRILNRNHIKTKRGGEWTSKTVNDIVRNPFYKGTYRYNYRESARGAIKNEEEWIIVPNALPAIITEEQWTRCNALMDSHHETKDTSSFRVCHTHIFAGILKCCDCGGGFSSNRDRPRLSGWRPSTYRCTRSAKMQDCPTFGISDVVLGPFIFNYIANFVRLQRKGTNYTVESIEKALLSGKPFENIVGIDSTSLEETLLALKQYNLSSNAANYSPDLLEELPNQSDNGSNIDIELLRQEENKYKTALQRLLDLYLFDPTAMPQKDYLLRKEELEGKLQKVQASIKRNSASTPEVAGATDISFIKKASAFIISQRILSKQDIDFEDLIQKCTPELLKDLVNSTIKEIGIRGRRVEYIEFQSGLRHTFIYKD

SEQ ID NO: 22141 - protein, 571 aa, synthetic construct
MMQDRTAPASANRVAIYIRVSTTHQIDKDSLPMQRQDLIAYTKLMLNTDDYVIFEDAGYSGKNTDRPKFQEMMSQIRQGAFSHLLVWKIDRISRNLLDFATMYKELKDLGVVFVSKNEQFDTSTAMGEAMLKIILVFAELERNMTSERVTATMISRASNGQWNGGRVPYGYNYDYETKDFSINPIEAEIVHLIHDKYEEMRSLVRESRYLNEKGLRTRAGNLWNPVSLHIILHNIFYCGDYRYNVLKEGDRQKVKDESEWITVEDHHEPIISREQKERVIAMLDANKRLDRKRNTYQSEKYVHVFAGLLYCGNCGKPMGATPAAAKKDWRYSKYTCPTRRKLASACNGKFTSDPIVGEFVFNYVLNMLNVQKNFADIHSPGELQTALLIGNTFSYIDRIDEDGLNDLFNMLSSGKIKGTVFGKSAKLKKKKVVSELSKLRNEKQKIERALDRLTKLYLYAEDAMPESEFIIQKSKLTEALDEVNEQIGFSNTDEWNQSVSDEEFVRRASEFIIAQKLTDRNYVSYKRLATSVDTAVIKTFVQSIIDSIIMDAGQVKQIIFKNGLSHTFIFK

SEQ ID NO: 22142 - protein, 468 aa, synthetic construct
MVKEINNNMNDFTKKVEEVALYIRVSTEEQAINGDSLRTQREALTKFALANHYHIYGIYEDDGFSATNLNRPALQRLLEDVRKNKINRILLTKLDRLSRGVRNYYKVLDVLDAHCVFWQTIFEKYDSSTASGRLHINIMLSVAENESAQTSERIRSVFNNKIHQKEIISGKIPIGYKKEEKKLVVDEDKKALVIDAFNFYLKSGSVYKTFEYLALFDPSINYPRTARLLANPLYIGTKVCKYGSIENYCEPIISKETFDEVQNLLKKNQRKRDNSDHEFLFSGLLRCNECGYKMSGKYCKNFPTNCTFYYLCSNARLKKKCNMLKQLNETKIEKKLLEQIVPEINKYIDKNNILELEKAQIRDISKERDKVNKQLEKLRDLYVNDLIQIDHYEKQYKELTSKLDSLKEEEKPVEEKKTVNYDEFKSFLSRDFVSLYNNLSRTEKRLIWASAIDTIYIDDNYNLRIVFI

SEQ ID NO: 22143 - protein, 588 aa, synthetic construct
MVENDMVMPTNVNLNRLRKRRVVFYGRVSTEHEAQISALENQMQWYDDEANRHGNWLVLKKYIDEGITGTQAKKRPAFLQMIQDAKQKKFDLIVTREVCRFARNTVDTLVVTRELKNYGVEVYFVVDNIWTMDGDGELRLTIMATLAQEESRRTSERVRAGQKISRDKGVLYGNGNILGYDRDKNTGTYVINPEQAETVRMIYDLYASGKGMTQIRDEMIRRKRKDSYGLVRWENTKISRILHNATYKGYQGYLKSRRDNFLDQKIIKNRDEDTYLYVKGNYEPIITEEQWDRCREIREQKKRHCTYFTQNGEVRKESGVYSSKDIWSRKLKCRCGYRMRRNKWHKNKSGEVIYGYKCYNQLNNGSKAIRDSVGVESEKACDLREICDWKFEMMARHIFSGLWGNKKDILNEVSSLYRVNSRENKMETDREKSEWDKEIAKIDAKMKRLTQMRLDDELPKNEYLEFKSDLESKRNALVLKRSKLNSKTETDPDGLTERIQEFLLAKMNFTEHCIDRDVISQFVTTIIPRTETCFEWYLNFDLIDKPNEEKKMVWEFPIEFQEAKSYRTEVNSLLRPTQWQDLLVRVYV

SEQ ID NO: 22144 - protein, 590 aa, synthetic construct
MYENGLDFSIGGSVDRKRQRRVVFYGRVSTEHEAQLAALENQMKWYDDQANYHDNWTVLKKYIDEGITGTQAKKRPAFLQMIQDAKQKKFDLIVTREVCRFARNTVDTLVVTRELKNYGVEVYFVEDNIWTMDGDGELRLTIMATLAQEESRKTSERVRAGQKISRDKGVLYGNGNILGYDRDKNTGTYVINSDQAETVRMIYDLYSSGKGMGQIRNEMIRRGRKDSSGLVRWDYSKISRVLHNSVYKGYMAYLKSRRNNFLDQKTIRNHDESTYMYVKGNFEPIISEEQWERCKQIREQRRRQSHYFTSDGEVKHTIGIREGNDVWVKKLVCRCGHKMRRNKWRKNKNGDIIYGYKCYNQLNNGSKSVREEAGVAPGNTCDLREICDWKLEMMARHIFSGLWGNKKNILNEVSSLYQIGYYEENKHNEEIKAKLDQDIAKIEEKLKRLTRMRLDDEISKADYLEYKSEIEKDKERIIQQRTVVESGVKSVDGYESADEKIQNFLLQKMNFTEHIIDRDVISQFISTVIPRTETCYEWYMDFDLIEKSNDKKKMVWEFTIDYNEARAYRSENDGMLRPTQWSDIIVKVYV

SEQ ID NO: 22145 - protein, 632 aa, synthetic construct
MRKTGGCNNMAYDSIDLNSSLRVVIYNRCSTEELAQVDALERQVEYSRDYCLKRNWIIVQQYVEAKSGTSAEHRYEYRKLYAGLSTMDYDLVVVKSQDRLMRSDLEWNLFIRELLKTGKRLFFYIDSKLYNHEQDHMVYSMISKFNEFQSVMLSEKIRDAHAKRQEFKTGINVCREMFGWDKIETNVYKINEEEAAAIREAFELVRGGMGFYRLAKYMYEKGYRSKGTSGTRSMEPGMISATWWRNGCIYNPRMHGTIVMNKDNMNFWTKKREQNPEEEWIYYEDALPAIVSKEYQEETIQMLKNRGYKTGLGDRILTGKHLYTNKIVCKSCGCYYYRYRVKAGTENELKNWKCSKKLQLGQEQCNNIIIEETVLNDLIDKKAKEKFNQLFQKDTGIIDKAMKYIEIALKDDSNDSILSNLEEELQRQEKKKDILFNKLMDGVINDSDFQEYNEKLQSEIKKLTDKVSVLKGMRYSYNDYRAKLEQIRKVLHNSSIEQDAITMQLKNIIEKIEVEPNSHVTVTFEKDKLSDLLGLYNVIEIIDKIDKDIFTLEFDYYREKKWEKQRRETNEKILKLFSENPSLQIPECAKILDMKYSYVYTSIAQLRKMGKLEHKQLDFTTGIWIVKQEEQA

SEQ ID NO: 22146 - protein, 559 aa, synthetic construct
MNNISAHERAALYVRVSTRYQVDKDSLPFQKKKLKEYCKLLNISDYEIFEDDGYSAKNTDRPKFQEMMHKVRSGHFTKLIVYKVDRVSRNLLDFASMYKELKDNHVAFISMNEQFDTSTAIGEAMLKIILIFAELERNMTSERVTSIMLNRAEEGLWNGARMPIGYKWDDNIKFPVPDENEAKLVQYIFDEYERTHSCSKVLRNIVSQGIKGKRGGKWTSKLINDVIRNPFYIGTYRYNMRESARGRLKPQSEWIIKENNHTPIISKEQFERCNRIMDSNGSHNTAKFRHTVHVHIFSNKLKCAYCGSGFNACKDRARANGYRPSVYRCNRRAALLDCPSKTISDTVLGEFVFNYIANLITAQKNFTRDIKAFKASLLSGNQFNGLHINRVDLEKTYNIMHSTGSHMIKNIMTDNIPADDNDNSFQLDIYIQQKNKYKKAIERLTDLYIYDPESMSKSQFTVKRKELQDNIKLIDNKIAELSNTYPVTSASDMSFVKKASAFLVSRQLIGGHIDFVNLAMNIDNNILKDFINQTIDYVLVKDGHVAAIRFINGLEHNFE

SEQ ID NO: 22147 - protein, 563 aa, synthetic construct
MEIAVAYCRVSTKNQNEALQDHQEQWGEIFEKEGYVFANCGVFYKKDGYREIKKGLYIDEGISAKEYKKHRKAFLQMIEDAKKGKFKQIYVEDTTRFARSVEDGMKVIKDFREYGVNVHFRKECLDSIEPANDMIFGVLFSVAENEIRTDSNRFKWKQERLAKAGKWSAPAPYGYTVKKGVLSINDKEIHKVDYIFYLYTEKLLGMRSIANYLNNEKKWKTRKGQLWKSTEIRYILNNPIYKGDIVNHRTESVDITRGTTRKIPEKDHIIIHNEELRIIDDKTWKKKDKILEQRNKNIKNREGCSSKHILSTLLYCQQCGSTYIRIKKKKTNDQNKNKVDRGYEWTCLGHNHYGDIKCKGRYGIAEKDLLKFIKEELTREKERDNSLYLDLYLKKKREELSKIDIEKLQEEKEEMQRQIFEVREDKNKKLISKDTYEEQLKAINKRLDEIRIINNNYDNLKMDIESAEEIFIQRRNLLNNLNFDKLSNADLKQIFNKIIIKGEYDNGYKNIYIHFSYNFIDDIKTELERNLDDIEHSALLYFRQFQRQKIRKSTKTRYFENKG

SEQ ID NO: 22148 - protein, 477 aa, synthetic construct
MRIALYPRVSTQEQALNGHSIDEQIERMNKYCEAMGWQVYKTYTDAGYSGANTDRPALKRMIKDIEAGKIDKVLVYKLDRLSRSQLDTLYLIEKVFLANNTDFVSMSENFDTSTPFGRAMIGILAVFAQLEREQIKERMMMGKEARAKKGLYHGSNCYPIGYDYIDGHLVPLEFEAIQIKMIFEMYAEGKAPLTIAEYLNNNGYKTRYGRWNDITVRKILRRKTYLGYIKYHDDWYKGEHEALISEDLFNTVQKIFDQRTEDYSYYKRREGRVNSYLGGMLFCDCCGGKYSKIISNSTKNGKKYRNTYYKCNSRTFKKRTLVRDPNCKNKTWKMDVLDNLVFDEIKKLALDPDYLKKIKTPQENDNRQSVIENQIESIKIQINKLMDLYTIGGMPVDLLQEKIHDLNNQQKKLEAEIEKIEDEKKEKITNADAMKMITSFSDVLERGDYSEIRASLTALIEKIVIKGEDIKIYWRFV

SEQ ID NO: 22149 - protein, 483 aa, synthetic construct
MQAAAYARYSTEHQTDSSIAYQMRKIEEYCDAHGITVSARYADEAMSGTNTQRPAFQSLCRDAAQRKFDAVVIYDISRGSRDVSDWFSFRKQMALLHIQVISVEDHIGDILNPADYLTELITVGLGQHHVLTSRQKSMDSIATKAKTGQFLGGTPNFGYTIDKNGRYVIQPAEAEIVRTIYQMYAAGKSYGEILDTIGEVRGRRGKVMGKNSLHYLLRNERYIGVYSWCKYHHKIMGKYAGNIPNENAVRIEDSIPAIIDKDTWEAVQMRMNDKKQRACNKAKRNYLLSGLIECTECGASYVGHTSTNKRGYSTRYYCCGNKYRNHTCHAKNINAEELEAFVVQNLKHYLANVDFSQMAQQIADEINGATADLKAERKELADIIFQLNNGTKAILKGIDYPELQEEMFRLRVRKSELEDMIQRGAEHNPVSVEKLVQLFQNAMERLDTDTKQVCKSMVKIYAHSNGDCDLEVGVHINGCGSQI

SEQ ID NO: 22150 - protein, 522 aa, synthetic construct
MLHKVVTIPASGRCFSEQPIDSRKKRRVAGYARVSTDNPEQLTSYESQVKYYTSYINGRSDWEFAGMYTDEGISATNTKHRSGFKKMVSDALAGKIDLIVTKSVSRFARNTVDSLTTVRKLKEKGIEIYFEKENIWTLDSKGELLITIMSSLAQEESRSISENVKWGKRKRFAEGKGSLAYSHFLGYKRGPNGAMVINRKEAEVVKMIYRLYLTGRSFCAIADELMKREIPAPAGGAKWHPSTIQSILKNEKYKGDSLLQKKFVVDFLSKRMKKNEGEIPQYYVENDHEAIISPEVFDLVQAEMRKRHSCRRGRYSGVNLFSSKIRCGDCGSWFGSKVWHSNDKYRKVIFQCNEKFKNGCHTPTISEDEIKDLFVLAAGKLLDNKEKIISNIKVLLDCVDDLSEKIRQAETVVEQKLEEIQRYVAYNSQVALDQAEYQKNYEALVGKYEEAKGEYDKLQEVAAKKSNRRQELIKFIATLEQADQVISFEPGLWTLLVDHVTVYRKDDVRFTFKDGTEIKVGE

SEQ ID NO: 22151 - protein, 437 aa, synthetic construct
MAENITKIAARPSLISKKRVCAYARVSSGKDAMLHSLSAQISYYSKYIQSHTDWIYSGVYADEALSGTKDERPNFQRMLADAKDGKIDIIIVKSVSRFARNTVTLLEATRELKEYGVDVYFEEQKIHTLSSEGELMLSLLAGFAQEEARSVSENMKWRIKKDLSEGIMWGGKSHLGYELIDKKLVLIPEEAKIVKRVFQLFIEGCGIQKIANSFNKEGIQPKYSDHWNKSSVRHILSNVNYTGDLLLQKTYRESYLTKKKRINKGEQDQFLVENDHEAIIDKDTFNLAQQLLAERGVLPKSNYIKGNKSIFTSRIKCGLCGASYRHKTTRYKKIWICHTYDSEGKENCSAKQIPEDNLIKAINQYLGIDSFSEDAFNKKIDYITVFPGNVLRIKRVDGNEDDITWNDPKRSEGWTPEMREKARQRAKAHYKKEGADE

SEQ ID NO: 22152 - protein, 524 aa, synthetic construct
MAKVTIIPSKINPITHQHLDVKVKRRVAAYARVSTDDEMQLTSYEAQVDYYTKLIKANDEWEFVKVYADEGITGTSLKNRKEFNAMIKDALDDKIDLIITKSVSRFARNTVDALTTIRKLKEKRKEIYFEKENIYTLDSKGEVLVTIMSSLAQDESRNISENVTWGQRKRFSDGKYNLARKNFLGYKKDQDGNIIIDEKEAVVVRKIYRYFLDGMTPGGIAQSLMDEGVPTPGGKTKWIYSTIISILQNEKYKGDALLQKRFTVNFLEHKMKKNEGEVNQYYVKKGHPAIIEPVIWDRVQLEIKRRENSKRIYSAKDAFSSKLVCADCGSYFGKKIWHSNDPYRKVIWRCNHKYDGDKKCDTPTLEEDTIKNAFLLAYTNLCVDKDIIIETTKELVDSLCDFEELDQKIIKESEDLDIIADKVHKMVMENANTAQDQEEYQKRYDYLSGKYNEGKVKLNALQEERARRATQKEILELKINELEDAYVLEEWNESIFKMSVDEILVSKYELTFKFYIGEEIKIKL

SEQ ID NO: 22153 - protein, 524 aa, synthetic construct
MAGAKNITVIPAKKRVGNTVTVEDKPKLKVAAYCRVSTDSEEQATSYDAQVEHYTEYIRKNPEWEFAGIYADDGISGTNTKKREEFNRMIEDTMAGKIDMIITKSISRFARNTLDCLKYIRQLKEKNVPVFFEKENINTLDAKGEVLLTIMASLAQQESESLSKNVKMGLQFRYQNGEVQINHNWFLGYTKDENGHLVIDEEQAVVVRRIFREYLQGASLKNIADGLMADGIPTATGNMKWRSDGIRKILTNEKYMGDALLQKTYTVDVLTKKRVANNGIVPQYYVENNHEAIIPRQLFMQVQEELQRRAHLRTENGKTKRVYSSKYALSSIIYCGKCGDLFRRVAWKARGASYNKWRCASRIEKGPKKGCDADAISETEIQNAVVRAINKTLGGREQFLVQLQHNIEDVLNGDYTATLEYIDQRMAELQEKLVMCVNKNAEYDAIAKEIDALREKKAAVVTKDAEQEMLRKRINEMRHFLQTQTSRITEYDEQLVRRLIEKITVYDDKLIFEFKSGMTVELKR

SEQ ID NO: 22154 - protein, 520 aa, synthetic construct
MKNVTKINQVDFSIFKKTRVAAYCRVSTDSDEQELSLDTQKDHYERYIKANSEWEYAGIYYDDGVSGTKTAKRDGLLRLMEDCEKGLIDLVITKSISRFSRNTTDCLTLVRKLLNYEVYVIFEKENINTGSMESELMLAVLASMAESESRSISENEKWSIKKRFQNGTYVISYPPYGYANVDGEMVIVPEQAEVVKEIFAGCLAGKSTHIIAKELNEKGVPTKRGAKWTGGTINGILTNEKYIGDALFQKTITDASFKRKRNYGEEEQYYCEDHHEPIIDKDTFEKAKEAIRQRGLEKGNCSENTAKYQNRYAMSGKIKCGECGRSFKRRYHYTSHGRSYNAWCCGGHIEDSSSCSMKFIRDDDLKRAFLTMMNKLVFGNDLVLKPLLISITTSNSKKNIHSMEDIEKDMQGNEEQRKQLNTLLTRGYLERPVFSEAHNKLVMEYEQLTAKRNLLYRMDNAGYTMEQALSDLVSFLNGAEPFTVWDDSLFERFVEKVKVLSREEVEFELKFGLKLKERID

SEQ ID NO: 22155 - protein, 562 aa, synthetic construct
MTDPRVAIYIRVSTTHQIDKDSLPMQRQDLIAYTKLMLHTTNYVIFEDAGYSGKNMDRPRFQSMMKQIRQGLFTHVLVWKIDRISRNLLDFASMYEELKSLGVTFVSKNEQFDTSTAMGEAMLKIILVFAELERNMTSERVTATMISRASNGQWNGGRVPFGYSYNSEKKEFYINEKEAPIVRLIHDTYEQNSSLLNLTRILNDSGYKTRAGNEWSPISVRIILKNFWYTGCYQYNRLKDGCRQKEKDQSEWVTIPNHHPALISLKQKERIVEMLRSNYKLIAANNIYYTSNNVHVFGGLVTCAYCGRRYIATTDTKKGWKMGRYGCPTRRYSKTKCTNNSVSDLTLGDFVFNYFVNLLKVQKHAKDITTTDELQRQLLSGYTFSSVKGLSPQSLLDTLRLIHTLNPSEKIYGKTKAIKKIAKPDKQLFTLRAKQSKLKRALDRLTTLYLYSESSMSEADFVAKKAEITDNITKTEAEISELVKTDIHSDITDSEFLRKASEFVISQQLASRNYISYERLARTVDVNITREFIVGTIEQITVRDGHIDSILFRNGLYHKFIY

SEQ ID NO: 22156 - protein, 438 aa, synthetic construct
MSTDQEEQLLSYENQVNYYTNYISENPLYEYAGTYADEGISGTNTKKRDEFNRMIADCRAGKIDMIITKSISRFARNTLDCLNYVRELKDLGIGIIFEKENINTLDAKGEVLLTILSSLAQDESRSISENCTWGIRRRFETGKHKMSTKRFLGYDTDETGKLVINRTQEPIVIRLYQEFLDGKTTDYIKRIFEREGVKNWDGGTKWQSTTLMSMLENEKYKGDALLQKSYTVDFLTKKRTQNKGEIQMFYVEDDHDAIISKRIWECVQLEIKRRKKYLEEHGTNSYSHRPESNPFASKIICGDCNKVFARKGWRSSTGVDRKVWQCSERYKVKGVMGCVNRHVEEETLIKAYLMAWNALVENREDFMEQWTEQLQSENLLEGYRAEKFIEYTDGAEPLTEMDTDFMLKTLDHIKVFEDGTLLVVFLDGTEIECKNEEE

SEQ ID NO: 22157 - protein, 426 aa, synthetic construct
MRVKVINKRPASVLQKKRVCAYARVSTDSRRQEDSLENQMETYERMITGNPEYEFIGVFADQGISGYCENRPQFQRMMEKARAGEIDLIITKSISRFARNTVTVLKFARELKELGVGIFFEEQNINTLSGDGEMMLAVLASFAQEESRSMSENNKWSIRKKFERGEVMITTSRFLGYDKNEYGDLIVNRKEAEIVSLTFDLYLLNVGSSRIGELLDYLGVKTVTGTTWESGTINGMLCNEKYKGDFHLQKYYTPENKRNHTRKNNGEVQSYYISENHEPIVSPEVWEKVQEVREQRKRDRNIGQDSTMKFQNRYPLSGMLICPYCGKTLRRRQVYKKKIQWLCSTYIEKGVKACKGIRIDDAELQGLNITEQTVIEEVVKNGKKHYCYTSKADFDCGIRNSTVSAEIEDGSVLPSVNRPRRTVIKL

SEQ ID NO: 22158 - protein, 430 aa, synthetic construct
MAEIKIISKEKQMPKLVRVAAYARVSSDKDAMLHSLSSQVSYFSKMIQSHDSWKYVGVYSDEGMTGTKIKRDGFQRMIRDAKAGKIDIIVTKSLSRFARNTVDCLKTIREMKAINVDIFFEEQNIHTLSANGEFLISLLAGYAQEESRQCSENTLWRVRKNFKEGKPYGGSSMLGYKLEKGRFTVVPEEAEIVRKIFDLYLAGNGFCKIARILTNEGIKSYTGKAWNKSTLGEIISNVTYTGNLHLQKTYRENHMTKKTMRNKGEKPLYIVEGNHEPIISQEIFDKAQEIRKAKAVGKSGKRNGPAYPFTGLIYCGECGHLFKHKVTKYYESWCCSQYDELGKAYCASKKIRDDVLRKACADALGIDSFDETTFKENIRRIDAFNGNRLVFHFINGISKEVIWDNPSRRDSWTDEMKLKAKERSSKNGKR

SEQ ID NO: 22159 - protein, 527 aa, synthetic construct
MANVRIIPSKINPLTKLPNNSLHKRRVAAYARVSTEQEEQANSYEAQVDYYKNFIKNRPEWTLVDIYTDKGISGTNLKHRDGFNKMIADARAGLIDLIVTKSVSRFARNTLDTISLTRELKAKGVEIFFEEQNVYTFDSNGELMLTILASMAQEESRNISENVKWGKKKKAVDGYSQVGYSTFLGYDKHENAKIGLKVNEEEATVVRFIYREFLKGKSVNTICRMLEEQGIKTPGHKDHWRTTTVASILKNEKYKGDCEMQKTYVKNFLDHVSVKNNGELEKIYVEDHHEPIVSKDHWLMVQLEFERRGTLVQGYNSCNEFSCKLICGDCGSYYGAKVLHSNDKYRSVKYRCNRKYNNEHVCQTPFVTEDEVKSKFILAYNEFIGNREQLIEDCKEMIQVLDNTEELEAKLAGLNQKAEDIIVLVKNLIDQNSTEVMDQDDFQKKYDSYDLEHKKVINEIEAVGLEIEKKNAQAKYLQAFIDDLNNRPNILEAYDEDVWSYLIDKAIVNRDKSITFQFRNGKEIKII

SEQ ID NO: 22160 - protein, 561 aa, synthetic construct
MDKKKKSALYVRVSTTHQIDKDSLPLQRSDLTNYTKYVLGIEDFEIFEDAGYSGGTTDRPAYQDMMNRIKKGEFTHLIVWKIDRISRNLRDFSEMYDELKKYNVTFISKNERFDTSTAMGEAMLKIILVFAELERKLTGERVFSVMISRAQKGLWNGATVPLGYEWDAETKFPRPCNSEAKVVQYIYDQYEIIKSTTKLAKKLNIEKIPTKRNGTWTPRTVGSILTNPFYIGTYRYNTKTRKTRRWKNKSEWVVVEDNHQAIINKEQFERVVNIIQGNYKGDKNYQRTNNKVHILSGIASCHKCGKKMHSGLDRARKEGFTPSRYTCYAFNVNYTCANYSSDLAILPGLINYIANYITLQERITPKHSLRDMESILLRGKYFEDIDHIEKQDLKNTYNLLINNTLVTYNSLEDEKKEAIVSQNAIYEAEKEKYIKALKRLDDLYLYDINSMSQKDFVIKRKEISDKIESVNKKIQEVKLNDTPFINNDDFGVLSKASFYLLTKNLSSVKNIDVISLLNNLDKQTVKDFINAIITDVSVERGKIYNITFKNGIVHHFNYKNQ

SEQ ID NO: 22161 - protein, 528 aa, synthetic construct
MRYVIYLRKSRADLEAEAHGEGETLSRHKTALLELARRMGITISATYEEIVSGETIAARPQMQRLLSEVGAGEWDGVLVMEIERLARGDTMDQGLVAQTFKYSGTKIITPLKTFDPQNEFDEEYFEFGLFMARREFTTTNRRLVRGREASAKEGKYVGSVPPYGYRKVKIPNDKGFTLEIVEEQAKVVRMIFEWYAEGAEVNDQKKRIGPYTIAVRLNELGIKSAGKKDYWTIYGVQNMLINPVYIGKIRWGYRKVKKTVTPEGMKKKSREFAQDGDYIVVDGLHEPILSEELFYKVQDLIAANPPTPIKYRHKNINPFAGLIFCAKCGHCMNYRRGYGRQPDYIGCYTAGCKNKASRFDLVEQRVLSILNSWVKDYSVDKAQIKHEADLNAELSNAISLAEKEIETLQDQLDKVYSFFERGTYTEKIFKQRSSAIEQQIMEIGEKIDRLKAEHQQVLERQNVQAEFVPSIKHLLEIYDTLEPVEKNKWLKQIIDRIVYEKNADGKYHNVDPGDFTIGILPRLPKRGS

SEQ ID NO: 22162 - protein, 503 aa, synthetic construct
MRMVGYGRVSTDHEEQRDSLEHQHAFFQDFARARGHTLVRVYADQGISGKWLKKRDGFLQMLRDAERGEFELVVVKDISRFARNTVDSLESIRRLKALGIECIFVNNSLKVLGESEFIVTIMAAIAQEESANLSKRVKFGKDITSRKGRVPPRIYGYDRLDNFTLRIVPAEAEVVREIFRLYLQGLGCRKIAQALEERGASTKLGASWNSRGVRRVLENPIYCGHYVNHKYTVSDFLSGQIQRLPPDMHYHHDRPEWAIVSPDTFQEAARLMEQRRRKSGSAPPTRYSGRYPLSTLIRCQSCGRAFTRRRVAYPSGRQYVYWHCPIHSEYAGSRCGNGTILPEEGLLDQLRAWLAAQISSPAALAEAVRLRLDARPSRPAEDPAAALRRRLDQLEGQRARYLELYAGDLLSMEELRRRLRLLAERGARLREDLDRLTRDPPRDLEAEITEQVRRVLSLEDITNGELRQLVDRITVSEKGDVSIYPARPAEEPPVAPGAFVGNG

SEQ ID NO: 22163 - protein, 501 aa, synthetic construct
MEIQIREGSREQKRKLKVCAYCRVSTDADEQENSLENQVRHYEMVIKANPDYEYAGVYSDFAISGFKEKRPGLQKMLADAEKGKIDLILTKSVSRFARNTSIVLEATRKLKELNVGVFFELQNINTLSGEGELMLTILAAFAQAESESGSAGAKMVYQRKYEAGIPVQYLERSFGYTKDERGVFVADEAEAVWVRKIYKMAAEGYTPASIKRYLNENGIKTVGGVQWVDSTVFRLLENEIYKGDYIMHKHFVNEERKLVRNRGEVDAWYIEDDHEAIVSPELWQKAQDALAAKRDYLAEGSVIEEFTEENYPYMNKIYCAKCGYPLYKRIYSKGNRLNWGCSGMKRYGKSFCDGINIPDGVLRSAWHFEENTYIDEKASDKGVKEFTYLKERSWKRRHKKKQPSAIPENTETEYPYREKIFCALCGSRLVRYVNPQNHKVTWVCNRRKRKGKEACDGTRVPDTVIKGWEEIKKDIYIQRKDDKNGKKRYSYTSKKPSGIRV

SEQ ID NO: 22164 - protein, 527 aa, synthetic construct
MSHTGKKGEWMKRITKIDMAEPLITKKLRVAAYCRVSTGSDEQLVSLEAQKSHYESFIKANPEWEFAGVYYDEGITGTKKEKRTQLLRLISDCEAHKVDFIVVKSISRFARNTTDCLELVRKLTDLGVFIYFEKENINTQSMESELMLSILSSLAESESVSISENSKWGVKRRFQNGTFKISYPPYGYDYVDGGMEINQEQAETVKYIFAQVLSGISTHQIADELNARKVPTKKGGKWTASTIRGMIYNEKYVGDVIFQKTYTDEHFNRHTNYGEKDQYLMQCHHEPIISREDFEAAGAVLNQRRLEKGITKGSGKYLNRYPFSGKIICSECGGKFKRRIHSKNGGKYVAWCCGKHIDDVTACFMKFIRNADVEKAFVTMMNKLVYGRRFVLRPLLESLREMDRSDSFGMIQELELKMEKNAEQRQILTGLMAKGYLEPALFNKENNELLQEAAELEMQKNGLSHSVNGEMVKTGEVEALLKFAEKVEMLTAFDGELFGRFVEQITVYSRNEIGFQMKCGLTLRERM

SEQ ID NO: 22165 - protein, 516 aa, synthetic construct
MKAIYVRQSLDKKDSLSIDAQIEDCINLCKRSGWNDYKVYKDKGWSAKNLDRPAFRQLNQDVQNGLIDGVICYKIDRISRSIRDFVNLIVDYQDLGVHFISFADNINTAAPGGMMMATLFVSLAQMEREAIITRVTDNYYYRCELGFWGGGPAPYGFRLAKTTENGQKHTILEPVPEEAEVIRTFFAWYLEPGATVRSIMNRAHLAGMQTRSGSDWTSRVLSDMLSKPLYAPNSMDIYNFYASQGVRVKISPEQCDGKQSLNIFGMRDRNSAHPKRSRPVSEMTLAIAKHKPIVDSDTYLKVQYKKKSRLAVTPRAGTSRTAVLSGLVRCGYCGRAMSPSGAKNGRYFTCSGRRNYAKGVCQGKSVKMDFLESYVLNDLADFISQPEIKSMFKDGKAQRIPSSEQAKINEYKQRIATIDIDIQKLLDACLTSSDVAVKYLNERIDLLDTEKQNLQAEILAIQNKSNRKLELEGLDINSAPTALAGGEFDTKKYLCNFFIEQIIFYDRDNVQIRYKM

SEQ ID NO: 22166 - protein, 447 aa, synthetic construct
MVKKHVALYVRVSTEEQKNHGLSVDSQIDALEKYCAEHDYAIFHIYNDAGHSAAKRYTTRPALLQLMEDCSHGMFDLILFTRLDRWFRSVPDYYQVQSVLDHNHIAWRAIWEDYETETSEGVFKVNIMLSIAQAEAQRTSEKIRSVLQYKRDSGGYVGQPPMGYIRINKRDLIFDDSIKDAIRELFKVYLTTNSIVKAVQSAHDNGLQISAQQAYRILKKEAYAGLAVGGYKCPAYISWEDHEKILSMMKQHTRKTTPARTYYFSGLLFCENCGYRLAAGASHKRSASGEDYYIKYYRCNGFRTMRSDCPGSYLNEKKLEKYLLDHLNAELDQYNVNLMTHSKDYDPDEIKKQIAALESRMRRIGDRYEDGDISREEYRNKRYEITYRINTLRSLIAKNPTPIHLADDWMAVYQGFDAEHKRQFWRSIIERMDVPVEDSYHVKIHFC

SEQ ID NO: 22167 - protein, 524 aa, synthetic construct
MNKLRAAAYCRVSTDRAEQSGSLASQRSFFDDYIRNSDSMTLVGVFYDEGTSGTTTLNRYGFNKMISLAVSGGIDIILTKEVSRFARNTVDTLNITRMLRAKGVGIIFINDNIDTRDSDGELRLSIMATIAQEESRKISERVKWGQQRKMEQGVVFGRSCLGYDVKDGKITVNADSAEIVKRIFTEYTVLLKGAESIADRLNAEQIRTVNGGRWSGAFIRKVLRNVKYVGDLEQKKTCTPDFLTHKKRLNSSEHIYIRNHHEPIISRELWEQTQAEISRRKPTDTSRHSDRYVFSGKVYCGVCGSVMVSRVKALKNGKIYHALRCSGRIGGKSCNNETLNVTALKACVKRIFTDMPIDKTAVINAVIKGLSRTDKPDIPALRKKIETLNAKKRRAVDLMLDGLITQQELIEQKSYYDSIIEKLSQEISSDKSVFETDKIRKNAERFLDFTSDPIWLLVIRADYIHGTLTVYLKGIEKGFTTCFTATGRGDSYRVITANTVRSQGIIPGTMQVQKNRCRHDVNDK

SEQ ID NO: 22168 - protein, 521 aa, synthetic construct
MKTVTKIDRIADTATKKKKLRVAAYCRVSTDSDAQLESLEAQKAHYENYILSRDDWEFAGLYYDEGITGTKKEKRPELQRLMADCTARQIDFVITKSISRFSRNTTDCLELVRTLQNLDIPIFFEKENINTGSMESELFLAILSSMAEGESVSISENSKWSVQRRFQNGTFKLSYPPFGYEWDGENMVIQPEQAEIVKRIFDETLSGKGSDAIAAGLMRDDIPARKGERWSSGTIRGILCNEKYTGDVIFQKTFTDGQFNRHRNVGQRDQYMATEHHEAIISREDFEAAAQIVAQRAAEKGVVKGSRKYQNRYAFSGIILCGECGSTFKRRIHSTIGGKYVAWCCNTHIEDKKKCSMLFVRDDDLKLAFVTLLNKLVYGHKFILKPYLKALQENSGDDSILRIQHLESLLAQNTEQRETLMKLMAQGYIDQILYNSESNALLAQANGFREEIEALSGDRNGDASKVAETEQLLHFAERGSMMTEFDELLFTKFVDHIRVDTRNQVSFILKCGLTLTERIGD

SEQ ID NO: 22169 - protein, 521 aa, synthetic construct
MGNVMVIPARRQVGTSGAGQDEKPKLRVAAYCRVSTDSDEQATSYEAQVEHYTEYIQKNSDWVLAGIYADDGISGTNTKKRTEFNRMIDACMDGEIDMVITKSISRFARNTLDCLKYIRQLKNRSIPVYFEKESINTMDAKGEVLITIMASLAQQESQSLSQNVKLGLQFRYQNGQVQVNHNRFLGYTKDAEGNLVIDPEQAEVVKRIYREYLDGYSMDKIAAGLEADGILTGAGKTKWHTSTINKILRNEKYIGDALLQKTYTTDFLNKTRVKNNGLVPQYYVEGNHEAIIPREIFLRVQEELVRRRVVNTSANGKKRAYSCNHCFSQIIICGDCGEMFRRIHWNNHGCKSIVWRCISRLEPTGLECHARTVNEQELEAAVVKALNELLAHREGYQNQLAKNIATVIRASATASTDAIDEKLLELQQDLLKKANNKEAYDEIADEIFRLRELKQQAAVDTVTRDEQIGRITELQDFIRSQPADLTEFDEELVKRWVQKITVWPDRYTIELKSGLSVDIEG

SEQ ID NO: 22170 - protein, 591 aa, synthetic construct
MAKITRVEQAVPTIKTKKKVAAYARISMESERMNHSLSAQISYYSSLIQKNPDWQYAGVFADDGISGTGIAKRDEFKRMIEAADNGEIDIILTKSIQRFARNTVDLLETVRHLKDIGVEVRFEKEHINSMSGDGELMLTILASFAQEESRSLSENCKWGIRKRFEKGIPNGHFRVYGYRWEGDELVIVPEEAEVVRRIFQNFLDGKSRLETEREFATEGITTREGCRWVDSNIKVVLTNVTYTGNLLLQKEFISDPISKQRKKNKGQLPQYYVEDTHPAIIDKATFDYVQEEIARRKELGPRANKSLNLTCFSGMLKCPHCGQSYMHNKRTDRGFMEFWVCGSRKKKGGRCPVGGSINHENLKKACAAVLGLDEFDEDAFHDRVNFINVPERGMLEFHLKNGEVITKDCPNTGHKDCWTAEYRAKTSEKRRKRPYCKGSSVMTGKIKCVGCGCNFRRATQPSSTSESGKAYYWRCAERDGCETVGLREDVLKPFIAETLGIAEYDDGEFEKRIDHIDVLSATEMVFHFKDGRTVSRTWEQPKRVGRPWTDEQRAKFKESIKGRYTPEVRQQMSEHMKQLRKERGKAWRKEK

SEQ ID NO: 22171 - protein, 404 aa, synthetic construct
MIIKKVMPKIPVAKKRVAAYCRVSTFRNEQDESFETQQKYYEELIQSHPDWELVKVYADRHSATRVKNRPGFQEMAAAAEAKKMDIIICKSISRFSRNMVDCQQYAKWFRTLGVTIIFEEQNIRTDDPTCDFVLSILAAVAQDESHSISENEKAAYASRFARGEYNLGNNRILGYDCVDGELVPNKDAWIVKEVFRRFIEGESYRQIAKELGELGAQSLHSKKRFGVETLRYMVSNETYVGDKRLQKKAPLDYLTKKPDPNQKVESNYLWDDHEAIIDRETWDKAQKILEKRKELAQVGIHKTNREHHFLYGKVFCGECGAPFLRRTLKAAGGSKTQSTYKAWNCRNRQKGKGKERCGNRFVKEKELIEAILQELEWPTMDQDRFEKEVSKVLVYPDHIEVEKN

SEQ ID NO: 22172 - protein, 528 aa, synthetic construct
MNRTAARSVTVIPPTINPLTHLSRVAVQKRRVAGYARVSTDSDEQFTSYEAQVDYYTQYIKRNPEWEFVKVYTDEGISGTNTKHRIGFNEMIADAMSGKIDLIVTKSVSRFARNTVDSLVTIRKLKEKGVEVYFEKENIYTFDGKGELLLTIMSSLAQEESRSISENVTWGQRKRFADGKVNLPYKQFLGYRKGADGFPEVVPDEAIVVHRIYTRFMEGLTPGAIAKELTADGIPTPSRKQRWQTSTVESILQNEKYKGAALLQKCFTVDFLTKKRKVNEGEVPQYYVEHSHEPIITPEEFDKVQTELARRKRISRQYSGKSIFSSRIVCGDCGSYFGSKVWNSTSKYRRVIWQCNGKFKGEHKCETPHLDEETIKARFVAALNAVIDSKDNILEDCRLMQATLTDCTGIDTEIESLLEEIEVVTELTKRCIAENSQTAQNQEEYAARYNGFVERYEKAKAQLEQLRTTKTAREAQAEAIGAFMFEMQELDTINEFDEKLWLTIIDTVTVHADGRMTFKFQGGTEIEA

SEQ ID NO: 22173 - protein, 434 aa, synthetic construct
MKRVVERVDDLIPAQPKALRVCAYARVSTGKDAMLHSLSAQVSYYSKMIQSHNGWMYCGVYSDEAVTGTKRERAGFQHMIEECRQGNIDLVITKSISRFARNTVTLLQTVRELKSMGVDVFFEEQHIHTMSTDGELMMTILASYAQEESLSASENQKWRVRKAFENGEIINLRFLFGYDITPGGIQVNEKDAAIVREIFARFNGGESMSSICRDLDARGHKGVLGGTWCAERMRNTLSNEKYLGNALLQKQYRNNHIEKKLLPNRGELPMYYAEGTHEPIIDQATFDKAQERLRMLAQQAANRKKPTHSVFSGLIRCGLCGNTYKRVTYRKKHYWNCTTFQTKGKSECAAKRIPEETLEVLTCEVLGEGSIDSDKVRSKITAIRAEKNNVVVYCMDDGSEIVKRWKDRSRAESWTPEMKEKARQRALQARRKKE

SEQ ID NO: 22174 - protein, 700 aa, synthetic construct
MDSNAFLNDLMSKMKLPEAKGKKKAEQSESVAHILAAMQKVKTEKKKPPVTSYAPTKEMPVNEPESMEEFSQLASDVMQECRPAISAVKTSISEQTVRVAAYIRVSSTNPAQEDSYEMQERYFMSLLAGNAGWTSAGIYSDHGISATSREGRTGFNRLLRHCKQGKIDRVICKSISRFARNTQDFLVALRTLKENNVTILFEREAMDTADAYSEFILTTLAAIAQEESRSISANIAWSNQKRFPAGNVCNKDIYGYEFRKGEYTVNENGYRYRAVFIIPEEAEIVRMVFRLFTKEELSFTQIAQKLDALHIPPPNSGCRQRQKRKPTVLPAGALKEEDKRGWTATDVRYMIANVRYCGSVLCQKTYTDHRNGHKQKVNKGEKPKYLIRNHHPAIISEEMWQEAQEVWKAYTAKYRGIEKGRNERNYSKLLLCGECGRYFQGHSTTRTTIWRCATKLAQQGQKRCRMEPVYEEQIQALLRKAFAEKFKLGEKMDAEVHEVMQMISKAPIDNVRNQALRKLSEKLREIHDFDQMEQEGDFLKRQLSAVNYSIRDAHQHIRDIQAEKEALKVRCEVLGEPRDKEAVTELENRLLNEEEQLEKLEHEAQQQAEQVRYMEDYWKKLEQTHEIREKTLQWLDSLAGGTQMFLDEAVGTYVKAFVLSVTIFSPKHFKIHWFDDTCTEVECDSVFEGYQQPGMIRRKY

SEQ ID NO: 22175 - protein, 565 aa, synthetic construct
MLRTPGDLFFLAEAVNSTNKFYSVSDKSARVYFLYSFLGGETMRFFSYGRKSVFSDKSDSIDNQFRMNREYCESKFSGQVDSWQQFSDEDFTGANTSRPDLQRMLSFIKGGFCDVLVVYQLDRLSRDVRDFANIYALLEEHGVMFISIKENIDTTTPIGRAMMYVTVVFAQMERETIAARVTDNMLGLAKKGYWTGGNPPVGYVRKHIVVNGKKHCSIEVDPEGARYVTQIFDTFLAYNCSLQGMETRFKNQGIRTQNGKFFSTAQLHKMLTMPYCVEATPEVYDFYAAKGCIMDLGSPREMWDGSVGVIIYGRSTEKNKKHQAQPPEKWTVCLGKHKPFMPAEKWLAVQSRFTQNKCIKDAKWPVPLLKGVLRCKCGNLMQVSRKKKVDGTCSSWYYCRKRMRQGVDACDMGQIKCDLLDEEVLELFRGITADPALIQKFVKAEAPADVPDLKAAQARVSACERKIGRLAASLALAEDSAASKYIIAEMERLDVELGALKREASLAEMESHRAAASAKDAKATAAEIAKLIHGLDGFDDKEKNAIARAVIQECTWDGERLFIKL

SEQ ID NO: 22176 - protein, 521 aa, synthetic construct
MKNGNYAMYLRKSRADREAEARGEMETLARHEKLLFETAKRMQITVSAVYKEIVSGETISARPVMQKLLAEIEQGIWDGVLVVEVERLARGDTIDQGIVSQAFKLSDTKIITPVKVYDPNNEFDEEYFEFGLFMSRREYNTIKRRLQRGRLASVREGKYVGNRPPYGYERVKIPNDKGFTLSPLPEQAKIVKYVYDLYAYGLDGEEMGTAKIVRKLNDLQIPTQSGGKWIPPTIRDMLYNPVYIGKLRWNRRAATKKVCDGKITYSRPTSKEYEICDGLHPAIIDLETFKICQKKLSKNQSRPVSLNKTIKNPLGGLVICSKCGHRMVRRPYSKTGQRSTLICPYTHCDNVSSPLEDVETMVLEAIADIVKNERIEPTTSVIPSDTIDILKDALKNQETSLETLQKQQNSLYDLLEQGIYTTDVFLERSNTLKDQINTASASIQDLKRKISAEQNRLKVQADFIPKCEYLLDVYDTLDAPEKNRILKELIDHIDYLKEEKNVPFTKKDAKVFIHVYPKTPE

SEQ ID NO: 22177 - protein, 561 aa, synthetic construct
MRDKGFIYCRQSSGDEEVSLSIEVQIEQCRKLAEDRNIEIADTFTDHNIGGRYYPSGYEELAKRDTVFQNWLNSQYRPKGFREGLGKLLKRISEVKYVICSEQTRLFRPLNNGYLESAIMGLLEDHHVKILQVQGDEIDLAKFDSQLIATLKNRILSEDVEKKRRNSILGLKKRRDSGRLPTGAQIYGVVYEGDKILFESTKGKLIQYAFKRFLEYAKYADIMYEISKKYPETEFKCFTTLWTIVRNPIYCGFMYNSEQKLIKNIQVSEPLVSFEQWNGAQKIIERRKQKNPHARPKKTNSVFSGLMFCPNCGYRMILNSSNSTASYYICKHRGQSEAYMNCTTSVRYTRVKRGNGIGLYDVGYPFVVLALINHCRRLLSQPETNEELEKLEIGLHDIKVKREQMTSLFQKNLVTFGEYEQFLQTTQGEMQKAEREIITHRNQAKRLSSPFDQNISLSRAFHDARSRTLPDHIYRKLIYEVVEKVIIHEDCLEFQTSYGNASIPKSGNQLYQWDLLLDTMSDAPDDPQMFADAKFRVVFFSNRYGKLTQTGKIDGLEIWES

SEQ ID NO: 22178 - protein, 441 aa, synthetic construct
METKITKISTLPQLDRKKRVAAYARVSTGKDAMLHSLSAQVSYYNNLIQNNNEWEFAGIYADEAISGTKDNREEFNRMVDDCKAGKIDLIITKAISRFARNTATLLSTIRELSSIGVDVFFEEQNLHSMSGDGEMILTLLASCAQEEARSASENVKWRVKKDFKQGILNGGNDCYGYKLIDKKFVLVPEEAEIVKRIFAWYIAGEGVVAISKKLDDMGIKPVRAKYWLPNTIMRMLKDRCYVGDLILQKTYVTDYVSKKKKRNHGEFDKYFVENDHEPIIDIETFEKANALMVERAKRFKAQDRTALRYPLSGKIVCGECGSRFGHKVYMHSNPGWICSAFDRKGKKACQSRKVPEYAMDEAIAAVIGGYDNIKVLDFIEVFNNNRLLFHLKNKEIKEFIWEERSRSKSWTDEMREEAKKRTIINNKNKKRGANGKWQKSE

SEQ ID NO: 22179 - protein, 490 aa, synthetic construct
MKAALYTRVSTDEQAEHGFSLEAQKKRLIEYCNKNNIEIYKLYSDEGISGHSIIKRKALQEMLQDAKEHKFNYVIAYKTDRISRNLLDLLTIKNQLDEADVELLLSDEAIDTKDDAGMTMFSIMGAFAELERKKITERMMAGKRQKLMNEHIKLKNGRVPYGYLYDDENKRYVIDESRRSVVELIYKLASQGWSYNKITRHIAEETAANSSDSKKKWYISDIRAILTNPIYKGYSGISYYYNFNDRAKKPKNSAILYKATNVEPYFTEEYWDTLYSQLEKKTQYFKRKHPIDSYIFSDVLFCATCGLKIGTRQHHANYLYYVCNSKHKMYDNDHICDYAININKFNNWFIEFIRGIDENNIKLSVSKPKDLDRELQAVRSQISIKEKNREVLLDKLMNGVIDDTEYRLASNMVIASLNSLKSQEKELSDKMDSLKEKEQTKRYNRLKIKALKVLVNDWDNLTDQAKKTLINSSINKIMITKDGIQEIEFN

SEQ ID NO: 22180 - protein, 559 aa, synthetic construct
MSKTVAIYVRVSTGKQADRDSIPFQIQECSNYVKHFLKTENFEVFKDAGRSGKNTHRPEYQRMIEKVKSGMISHVVVYKIDRISRNLVDFSIMYNDFKEHKVAFISLNEQFDTSSAIGEAVLKIILVFAELERKLTGERVRDIMMNRALEGKWNGARVPYGWDWDTKKQCPVHSDTEAEYARMMYRLYDECHSTCVVRDYCNAHDIPTKRGGEWTSKTVADFLRNPMNVGDYRYNYRKSARGKRNDPSEVIYVKDVFPPLIDRELYERVTHQMDLNTFGLGKDGRKVVSKKTHVFGGLIVCGLCGAFYHSDADVVRADGFRPSNYRCGAHNKKIHCKAKGTSDVKLGPFIFNYISNLVKASKSKKLLHFVSDLEQILLTGPEFEQVAGIADIGLDVTFDTIMHGFKPKRYTAAPYTVIRSGDSDALTAKRDKTIRALERLKKLFLFEDDAMSEKEYLMSKRELEGTLSDIENELSALEADTADTKYDDMSFISTASGFLIAHQIASGEHINYRELACAVDAKVLKDFVNSVIERIVLLDGRVASIEFKNGLVHEFLYRE

SEQ ID NO: 22181 - protein, 463 aa, synthetic construct
MRRKTTAPVEKILLRVAIYIRVSTDKQVKDGDSMRDQLATGQKYIDSHENMILVDTYIDDGISGQKLKRDDFQRLIDDVRAGRIDLIIFTRLDRWFRNLRHYLNTQDILDKHGVSWTAIEQPYFDTSTPHGRAFVNNSMIWAELEAQNDSDRILGVFDDKVDNGEVLSGSTPLGYKIVNKHLVPDDDAPTAVAIFQYYRKTGNLSMTLRYMESEFGLVRSAASLKNMLTNTKYIGEFRDNKNYCPAIIDRDLFFDVQRLLKINIKSGKKHDYIFSGLVVCDDCDHIMSGCQQRAGGRVRADGTRIVYKYSVYRCRQGVNLHRCPNRKLVFETTLEKMLLERIRPELENYIAEYEVANLPALRTDAKRRSIEGKMQKLKDLYLNDLITMDEFKLDREKLLMQLEKINAEDSRPVKDLSYLKNFLKMDFESVYDSLSIPERRELWRSIVKEIRVDHDKNIHIIFL

SEQ ID NO: 22182 - protein, 420 aa, synthetic construct
MNISYIASKESILPRRKRVAAYARVSSGKDASLHSLSSQISFYSGLIQRNHDWEYAGVYADEALTGTKDNRPEFQRMIRDCKDGKIDIVLTKSISRFARNTVTTVETVRLLKSYGVDVWFERENIHSISGDGEFMLTILSSFAQEESLSASENQKWKIRKNFEEGRPTAVRMMGYRQENDEFFIVPEEAEIVRMIFNMYLSGMGRNAIVKKLMELDIPCKNGGNWSESTVWKMLQNEKYAGDLLLQKTFVVDHISKKKQKNTGELPQYLIEGNHEAIIDRDTFQRVQEEIARRRKKHTPTPSTAPTYEFTKKIICEQCGKYYRRKILSGGKVVWICSTFNRLGKAHCSSQQIPEEILKGMIGNTAFSEIRIPCANTVKIVRPNGKVETHTWQNPSRSESWTAEMKETARKRRNEWQQKRP

SEQ ID NO: 22183 - protein, 501 aa, synthetic construct
MQEKDGNSLQNQLEILTEYCQKKGLTIIKDAELVESSTRGVRKKFLEVIKFCQQQKGGVALVCLKTDRLFRSFTNLPEVYNMCQTGQLEIHLTQENLIINKNSKAGDITLLGLNVVMAQNYVLSLRDNVIYGMDYSVAQGRCMSKAPAGYLNVRTPEGKAAVIIDKERAPIIQKLFNEYATGLYSVKDMMKKCKEWGLVSRFSGKPFDTSTIHRILNNKFYIGEMLYKDQWHKHNYETLIAPALFKTCQDIMHGRKPEEPKHFKTTEKPFIFRGLITCGECGCMISSDRKIKPSGKKYVYLKCSHFKGNCKNPQVNENIVLQQIEDELKNLSLPQEIMSYLRSDMEKIINQQNKALNLEIKDIRQKYDELQKQIQYTDTLLVTQKITPERSNEIVSRLKQEQYELNNKLELLTKADEKFSIAVATILSLGNNAYQIFQSSKVETKREILHLLLSNLKLQDRKISYTLRKPYDYIRSLNKKTPSKKEGVAIGDAVSSHRELV

SEQ ID NO: 22184 - protein, 571 aa, synthetic construct
MKTTDQPQVKQYVIYSRKSKFTGKGESIENQIELCRQYIAMHFGEDEAEHALVYEDEGFSGGNLERPQFKQMMKDSQKIEFAAIVVYRLDRISRNIGDFAKLIEDLGDRHIDFISIREQFDTSSPMGRAMMYIASVFSQLERETIAERIRDNMHELSKTGRWLGGTTPTGYASESLSSVTVDGKVKKACKLKPIPEEIQLVKTIFSVFTESGSLSKTDQYLLEHRCVTKRGKQFTRFAIRGILTNPVYMIADDTAYQYLKENNVDLFAEPSEFDGEHGIMAYNRTLQRPGKATQIRPMEDWIVAVGKHPGIISGANWVRVQSMLDVNKSKSYRRPRSNVALLSGLLRCGECGDYMRPKLTGRTNANGELIYTYMCSTKERSHGTVCSMKNCNGNTLDAKIVEEIRKVATDKKDFGQLLSKTKKVINDNKASYEAELTLLVKNHAETEARIKRLVESLSVASETSAKYVMEQIDELHRQSEQEQTRIAELEKLARQSNALSQNLFFYRDMIESFADTVDSTTIEERRRLLRTIVKKVVWDGKNVYVYLFAEDGELNLPPIGQLMCPSGEDSE

SEQ ID NO: 22185 - protein, 529 aa, synthetic construct
MIMETYCIYLRKSRADAEAEARGEGETLARHEHTLLELAKRQRLPISKIYREIVSGDTIAARPQMQQLLQDVESGTYAGVLVMEVERLARGDTIDQGIVAQAFKFSNTKIVTPIKTYDPSNEYDEEYFEFSLFMSRREYKTIKRRMQAGRAAAAREGKYVGNIPPYGYDRKKIENDSGYTLVPNEKAEIVKSIFEWYTIGAVMPDGTRQRIGTTNIANKLHQMGVQTAKGGRWSQHTIRSILTNPVYCGVIRWGYRKNKNIIKNGVVTTTRPNAEDGYITVQGLHEPIISQETYNTAQELSHATAQIPKVNIDRALKNPLAGIVVCRKCGRYMTRRPYSRTHRQETLICKTLGCPCVASDLCLVEQRLLDSLETWLTKYAIPWDSAHQSAPEPSQDADRAALDALQKEQEKVKQQLNKCYDLLETGVYDANTFAERSEMQKKRISEIQQKMGNLVDSIKKAESRDDDIRAIIPKVENILETYHSVTDAVAKNQMLKEVLEKAEYNKEHSTRWHGNADDFELIIFPKLPR

SEQ ID NO: 22186 - protein, 552 aa, synthetic construct
MDVVLYMRYSSDKQTEQSIEGQERICKEYCKQQGYKIVNKYIDRATSAFKDAEKRTAFNQMIKDSDKQDWQAVIVYKLDRFARNRYDSATYKAKLKKNGVKVLSATENISDNPEGIILEAVLEGMAEFYSRELSQKITRGMMESAYKCNSVGGSIPIGYKIENKKLVIDPPKAKIVKEAFDLYANGVTVTAICEQFNQKGYTTAKQTAFNKNSFRSMFKNEKYAGVYMYKDFRIENGVPAIVDRETFDTVQKRLKKNFKAPANSKAKVDYLLSQKLFCGHCGAPMTGECGKSKSGKMYYYYACSNRKRFKNCDKKSVKKDLIERAVAEITLSLITPENIQTLADMAIKQNIEDIENDKIISGLKVELKEIDKSISNLIKLVEKGIESEALSSRLIELETQRKAVSKQLKNAQGQYIILEREHIIWWLTQFCQGDIEDEEFRKNIIDLLVNSVTVWDDPGGLKITIIYNLIDKQEQTFTINECSTPVVNGPPAGSACTQFRMRCSAMPNFIPRWCDSDLSPNVSSGKNRIGAPMIKQVRRSDFINTLFIRKAD

SEQ ID NO: 22187 - protein, 428 aa, synthetic construct
MDKENKAVRCAIYTRKSHEEGLEQDFNSLDAQRESGENYIASQKTRGWICLPERYDDGGFSGGNTNRPALKKLLEDIASGKIDVVVVYKIDRLSRSICDFAELSKTFDKFGASFVAVTQDINTSTSSGRMMLNILVTFAQYEREVIAERIRDKMSASRKKGLWVGGVTPFGYRVLNKHLEIVPEQAEIVKRMFQRYSETASVKQVCDELTDGGIRTRTGKFFNPSMVYRILDNHSYIGKVQYKGEVFPGDHAAIIGQTLWNVVHEILKENTAAENGNSRRQQTSASLRGLLKCGHCDCAMGPTYTGKKGKNYLYYICEKDYKRTRPSCPVRRISGGDIEKLVIEQLQKLFNSQTFIDLTAENGNMSRDSVASAFANLSGFWKELFPAERNRLLKLLIERVTVNEGNIEITIKTEGMKNLMMEMEHEHN

SEQ ID NO: 22188 - protein, 446 aa, synthetic construct
MKIVTEIAAIAPIKKLKKVCAYARVSKDKDAMLQSLSSQVSHYNKLISSNPEWQFAGVYADEGISGTKEDRPEFLKMVEDAKAGKIDMIITKSISRFGRNTETVIKTVRMLKAINVDVYFETQKMHTLSEEGEFMLTVLASYYQEEARSVSENMKWRIKKDFEQGIAWGGNDNFGYKLNGRTLEIVPEQAKIVKRIFDMYINGLGIMAIAKVLNEEEIKSTMGGKWIKSNVLRVITNINYIGDRVLQTTFRPDFLSKKKKINKGELKQYYVEDDHEPIIDKETFMKAQLIKEERAKRFKLDVSKRNITYPFTQKIRCSCCGCTYQHKITKYNQYWICSTFNMKGKKNCMESKQIPEEKVYEVINSYLGIDEFDEDLFNKKIDYIIAKPNNVLEIHLFDGTTDEVIWTDPTRKNSWTPEMKEKARIKSKELEKNRKRGADGKWVKSE

SEQ ID NO: 22189 - protein, 526 aa, synthetic construct
MGKVRVIPSTINPLTHQSIVANVKRKVAAYARVSTDSDEQYTSYEAQVNYYTGYIQSRVDWEYINVYADEGISGTNTKKRVQFNKMIDDALEGKINLIITKSISRFARNTLDTISYIRKLKAAGVEVFFEKENLWTFDSKSEMVLSMLAAIAQEESRSISENVKIGKRWAFKEGKVSMPYKNFLGYDKVDGKIVINEEQAEIVRLIYRLYARKGYSRAAVADYLNEMKVPKPSNPEGKWSINNITAILTNEKYKGDALLQKGYVDNYLDHTVKKNKGVLPQYYVENSHPAIIDKDEWNMVQEELKKRDKFRYAYSKNNPFSSKLICGCCGHFYGLKVWHSNTQYRKEIMQCNKKYSKKGNRCDTPSVFREDVNKRFIEAYNAIMINKEEVIKSAKELIDLLTDTTKLDKRIEELNDEISDIKTLVENLIHDNAFKTQDQDAYIKKYNSLTAQYEILKQQLEKTISERDVREMKSKSMNLFITNINESPVMINEFDLTLWNIMIDEAIVNKDGSITFKFKNGMEYKN

SEQ ID NO: 22190 - protein, 477 aa, synthetic construct
MKKKIIAISPAEQQKKINTVAPIEKIKVAAYCRVSSETDEQLNSLSVQRKYFDELFAAHSDWTNAGIYYDEGISGLGMKRRAGFNKMVDDALAGKIDLIIVKSISRFARNTVDALKTIRDLKAKGIRIIFEKENIDTSDTKSEFILTIMSSLAQQESQSISENVKWGIRKSYVEGKVKIPGFFYGYKYCGKYSFQVDKEEAKIVCLIYKMFLERKARNQIGAYLDKNNVPTATGLENAKWSRNVVNSILTNEKYCGDAILQKRYVQDYITKKQVINDGKLTKYYVKNNHEAIIPRATWELTQEILKSKRYENRQNNLFSLMIKCSNCGGWYQYKTQTRNYFIRTFKFYQCENKLTKTKECKNSCDITQDQLEFLFHTATLQLYNVFPELVDDLCSITEKIIEGKRKQNRLKKLFKEKPNFKISEYEKLSWPILVDYAEITQNTLTFHFLNKGLITESFVRWKPIEHFEKKPKSPPKQ

SEQ ID NO: 22191 - protein, 526 aa, synthetic construct
MPYCIYLRKSRADAEAELAGEGETLAPHQKTLLALAKKLKLPITKIYKEILSGETIAGRPVMQQLLQDVEAGIWQGVLVMEVERLGRGNTLDQGIILNAFKYSSTKIITPMKSYDPNDEFDEEYFEFSQFMSRREYKTILRRMQRGREASVKEGKFAGSIAPFGYRRVKLPQEKGFTLEVEGAEAAAVKLAYELYAYGDPQPDGTFADIGRATIAKRLDQMGIRNRKGGTWATASVTRMLQNPVYIGKVHWNRRPEKKHTENGKIKKTRPLAENYLLVDGLHEPIISEELWNLAQAKMKQHYRPTGVNGITQNPLAGLVHCSYCGNAMQRRPYLKTGQPASLICTTHFCPQISSPLYMVEGKILEALSLWMKQHEPTWEEESSADVFSTKIMALEHAIADMEQELQGLQSQFEKIFEFLETGIYTPEVFTARNKTLSEKMAEIRSAIEETQAELSKLKAARKNQVSMIPKIKNILDTYETLTPAEKNKLLKEVLDHVEYHKKIKGKKNVPADNFEIILFPKISPEN

SEQ ID NO: 22192 - protein, 573 aa, synthetic construct
MAKVKLPDKPRVAIYTRVSTLHQIDKDSLPMQRQDLINYARLILNTEDYVVYEDAGYSGKNTDRPKFQEMMQQVRLGMFTHILVWKIDRISRNLLDFATMYSELKQLGVVFVSKNEQFDTSSAMGEAMLKIILIFAELERNMTSERVTAAMLSRAANGQWNGGRVPLGYDYDPETKTFTINESEAAVVKIIHDKYEQERSLVSLARYLNGHGYRTRTGCTYSPSTLLIILRNVFYCGDYRYNVLKDGDRQKRKKESEWITVKDHHPAIISREQKEEIARILKENRRLECERRGIYSKKKNVHVFGGLVICGNCGHAMTSTIRPADQDGIRWSVYVCPTKRRSEYLCKGRATSEVVLGEFVFNYILNMLNVQKNFDSINSVEDMEKMLLSGSTFRDVDGIERAGLDDLYNMLASGLTEKAPFDSSVEVRKKPVVSDIELENLNTEKTRIERAAERLQNLYLYSDDSISQKDYIVQREKLMSQLAEVNEQIGMVMSNADEKDVSDEEFVHAASKFILTQKLEGRTYIYYKRLATTVSREVLRSFVMSIIENITIYDGRVQTIVFKNGLSHTFILK

SEQ ID NO: 22193 - protein, 516 aa, synthetic construct
MKAIYVRQSLDKKDSLSIDAQIEDCINLCKRNGWNDYKVYKDKGWSAKNLDRPAFRQLNQDVQNGLIDGVICYKIDRISRSIRDFVNLIVDYQDLGVHFISFADNINTAAPGGMMMATLFVSLAQMEREAIITRVTDNYYYRCELGFWGGGPAPYGFRLVKTTENGQKHTILEPVPEEAEVIRTFFAWYLDPGATVRSIMNRAHLAGMQTRSGADWTSRVLSDMLSKPLYAPNSMDIYNFYASQGVRVKISPEQCDGKQSLNIFGMRDRNSAHPKRSRPVSEMTLAIAKHKPIVDSDTYLKVQYKKKSRLAVTPRAGTSRTAVLSGLVRCGYCGRAMSPSGAKNGRYFTCSGRRNYAKGVCQGKSVKMDFLDDYVLNDLADFISQPDIKSMFKDGKAQRIPSSEQAKINEYKQRIATIDIDIQKLLDACLTSGDVAVKYLNERIDLLDTEKQNLQAEILAIQNKSNRKLELEGLDINSAPTALAGGEFDTKKYLCNFFIEQIIFYDRDNVQIRYKM

SEQ ID NO: 22194 - protein, 522 aa, synthetic construct
MGNVMVIPAKRQVGNTVKQSEQKKLRVAAYCRVSTDSEEQETSYEAQVTHYTEYIQKNPDWELAGIFADDGISGTNTKKRDEFNRMIEECMAGNIDMIITKSISRFARNTLDCLQYIRQLKDKNIPVYFEKESINTLDAKGEVLLTIMASLAQQESQSMSENIKLGLQYRYQQGKVQVNHNRFLGYTKDENGNLVIDPEQAEIVKRIYREYLEGSSMDKIAAGLMADGILTGAGKEKWHTSTINKILRNEKYMGDALLQKTYTTDFLTKKRIKNNGTVPQYYVEGDHEAIIPKELFMQVQAELVRRRVVHVSPTGKKLSFSCNHCFAQMVFCGDCGELYRRVHWNNHGCKSIVWRCISRLEPTSAEKNCTNRTVNELLLQEITVKAFNQLLTERDVFLKTLQQNIAKAVVNADTLSPDGIQTRLEELQKELIKKANNKQDYDAIADEIFRLRDQREQSELDSHHREEAMNRIKELQNFIAGQETDITEFDEALVKKLIEKITVFAEHFTVEFKSGITINIDT

SEQ ID NO: 22195 - protein, 519 aa, synthetic construct
MKKVTKIAETASSKVKLKKIRVAAYCRVSTDSDAQLESLEAQKTHYENYITSRDDWEFAGLYYDEGITGTKKDKRPELLRLIDDCKAGKVDFVITKSISRFSRNTTDCLELVRKLLALHIPIYFEKENINTGSMESELFLAILSSMAEGESVSISENNKWSIQKRFENGTYKVSYPPYGYDWDGEQMVINPEQAAVVKEIFASLLSGKGTHAIADDLNRRGIPTKRNGRWAATTIRGMLSNEKYVGDCLFQKTYSDSRFVRHNNHGEQTQYMVKDHHEAIISREDFEAAHAFIHQRATEKGVVKGSDKYQNRYTFSGKIICGECGDTFKRRIHSCTGYKYTAWCCSTHIKDKDKCHMLFVKDDDLKQAFVTMMNKLVYAHRIILKPYVDALKNTSSDDSLRRIQEIQTLLAQNTEKRETLTKLMTQGIIDPILFNKETNELLSQADSFRDEINALKNAVSGDVTKVTAATALLHFTEKGGILQEFDDDLFNEYVNRIIVRSRNEVRFELKCGLTLRERK

SEQ ID NO: 22196 - protein, 528 aa, synthetic construct
MAYCIYLRKSRADRELELQGFGETLKRHRDTLIELAKKKNLPIGEIYEEVVSGDSIAARPQMQRLLNDVSDGKWEGVLVMEIERLARGDTSDQGIVTKTFTYSNTLIITPMKTFNPTDEFDQEYFEFGLYMSRREYKTIKRRLHAGMEASCKEGNYIHHTPPFGYSIVKNKKSKGYRLEPKPGEAEIVKLIFQWYTKGILKEDGSYELLGTARIADKLNSEYSIKPLGGVWTIPTISTMLRNEHYLGYIVFGKKKRKKVVENGIIVDKWTRNESYGLYKGKHPALVSQETFDLAQERLAKNPRRPSKTITNPLAGVIKCGMCGRSMYRRPYQKRGQSASLICSEKTCHNVSSAFYLVEDALLTAIKEWIDGYEIKEEANKYDTSVLESKTKLLEEQQKQLITYKNQLTKVFEAYENGIYDSDTFLSRQKTVSESISSTEDAIIKLNKEIANEREIISHQEEIIPKAKKILEIYKTSDDVQLKNDLMKSILDKVVYTKTANGHFKDQRQDDFKLELFPKLPKNKGDSSE

SEQ ID NO: 22197 - protein, 559 aa, synthetic construct
MTTMAKNVRKIEPTAPVMSVLDLRPLLKKKRVAAYARVSTEKDEQQNSYDAQIDYYTALIRNNPEWEFVDIYSDEGITGTSIKNRDGFNRMIDDALAGKIDLILTKSVSRFARNTVDSLTTVRKLKEKGIEVYFEKENIYTLDAKGELLITIMSSLAQEESRSISQNTTWGQRKRFADGKMSLAYSNFLGYRRGAELGDMEIVEEEAVIVRRIYSEFLAGKTPYDIAKHLTEDGIPTPMGKTKWHTTVIESILKNEKYKGDALLQKTVTTDFLTHTHKRNEGEAPQFYVEKNHPAIVRPEVFEMVQEEFRRRKAAGGRMQSVSIFSGRIVCEDCGGFYGRKVWHSTSEKYRAYHWHCNNKFQKRCSCQTPTLKEESIEQAFLSAINSLIKKKKEIRENYALCLDTITDDSAYVARLDEINAECCRLQQETKSLLTAAGRKNGGGLSEINRQYEDYLAKFEGLQKEKSELSTQISKCAAKRVQVSSFLEELQKYDGPLKEFDPLIWQATLNHAVVHKNCTITLVFRDGTEVTRKIKNGVRKYVKRKASDPDNPESAGEKA

SEQ ID NO: 22198 - protein, 535 aa, synthetic construct
MLTVFLSNGKGGSMIAIYTRQSIEKKDSLSIDAQVKACADYCKAQGWEYEIYTQDHGFSGKSLDRPGFQAMMSAVRSGQVNKIVCYKLDRISRSVSDFAQLLQELEQYKCDFISVTENFDTSSPIGRAMVYICMVFAQMERENIQERVKSNYYYRSGLGFWGGGPAPYGYQLKRQQIAGKVHTVLEPDPNEAPWVKKMYEWYLEPGGSAMKILRLLTENQVPTKRGYKWTSRVLMDVLSKPLYTQNSMDVYNYLTQSGAVISNPPEDFDGTLSVDLYGKKDSSQSKHKRCRKGSDMYCNISLHEAIIDSDTWLQVQYKILARPKIGGRTGTSKNSWFTGLMICGVCGRHVSFTHSARTAGYYICSSRKNCGWNSCSSKPASKKKFDPIIVKFIRDHYDSPKTKAAIQQAKLAAKTPQVSIERNNLQMELATINNQIDNLLTSLASGNAVMSKYINDKITELDAKRTPLQAKLLQFDATSSVNDELKRLERIEWAMEQLPLVYTEDTFDLSVQVSQALVNNIVFNSDGEVTISFAI

SEQ ID NO: 22199 - protein, 530 aa, synthetic construct
MEQYLIYLRKSRSDLEAEAHGEGETLSRHEHTLLELAKRQHLNVTDIYREVVSGDTIAARPMMQRVLSEVEQGVWSGVLVMEVERLARGDTIDQGIIAQTFKFSGTKIITPIKTYDPDNEFDEEYFEFGLFMSRREYKIINRRLQRGRLASAKEGKWPSGLAPFGYRRVKLKNEKGCSLEPIEEQAAIVRMIFDLYTVGLQDEDGSARPLSLGSIATRLNDMHIPSPSGSQWARITIRGIIKNPTYIGMVRWGSRETKKKVVDGKVVSVRGPADPEKECVFKGIHPPLVPKETFELANDKLTRSENTSTHKEKVVRNPLAGLLVCSECGRQMMRMINPVHPDMPVVRCPRRGCPNCSSYLPIVEERVIQGLSEWMKGYELEWSSAAASSSVSSVGVREKALVSAEAELRKLQQQLERTHDFLEQGIYDTDTFLSRSRMLSDKIAAAKDSVARCSRELTEEKLRETSRRDIIPKVKNLLDVYPLLETAEEKNALLKEVLEKVVYQKLNEKRKKSPDGFIIEIYPRIPKSEK

SEQ ID NO: 22200 - protein, 553 aa, synthetic construct
MAKPEVSELAVVYARYSSHSQGEQSIEGQLSNARDYAAAHGYTIVHEYVDRAKSGRTDNRAEFQQMLKDTAKRQFSVIILWKVDRFGRNREEIAINKMKCRKNGVRVEYVAETIPDSPEGVILESVLEGFAEYYSLQLSQNIRRGRAESAEKCQSLGGNRPLGYKTGPDKKFVIDENTAPTVKMIFTMYADGKTVTEIVDKLNEMGLRTLRGGPFTKNSLHSILKNKKYIGVYEYQGREIKDGVPRIIEDDVFNKVQEMLKINKRAPAKTWSRADYILTDKLFCGKCGALMFGESGTSKTGVKHNYYICSNKKRFRSCDKKAVRQADIEDTVLNATHELLQDDELLDYIVDRTWEYYLAQDNSQEKLRNLQRQLAQTDTAISNLIRAIEAGILTEETKKRMDELTQQKADLKASIADREIARGFHLQKSHIAFYLRSLRDADWSDKEAQKRLIQTFVNAVFVYDDHITLTYNFSGDKSTITLHDMQRFEDGEEFGCRASRSTIMWRQKRCLLRKARLYRAFLLPKRRFFSVPKHRCKIAVFPLWIDLNSHTTE

SEQ ID NO: 22201 - protein, 434 aa, synthetic construct
MERVVERVDALIPAQPKALRVCAYARVSAGKDAMLHSLSAQVSYYSKMIQSHNGWMYCGVYSDEAVTGTKRERAGFQHMIEECRQGNIDLVITKSISRFARNTVTLLQTVRELKNLGVDVFFEEQHIHTMSADGELMMTILASYAQEESLSASENQKWRVRKAFESGEIINLRFLFGYDITPDGIQVNEKDAAIVREIFARFNSGESMSSICRDLDARGHNGVLGGTWCAERMRNTLSNEKYLGNALLQKQYRNNHIEKKLLPNRGELPMYYAEGTHDPIIDQATFDKAQERLRMLAQQAANRKKPTRSVFSGLIHCGLCGNTYKRVTYRKKHYWNCTTFQTKGKSECAAKRIPEETLEVLTCEVLGAVSFDPDMVRSKITAIRAEKSNMVVFCMDDGSEIVKRWKDRSRAESWTPEMKEKARQRALQARRKKE

SEQ ID NO: 22202 - protein, 528 aa, synthetic construct
MNRTAARSVTVIPPTINPLTHLSRVAVQKRRVAGYARVSTDSDEQFTSYEAQVDYYTQYIKRNPEWEFVKVYTDEGISGTNTKHRIGFNEMIADAMSGKIDLIVTKSVSRFARNTVDSLVTIRKLKEKGVEVYFEKENIYTFDGKGELLLTIMSSLAQEESRSISENVTWGQRKRFADGKVNLPYKQFLGYRKGADGFPEVVPEEAIVVHRIYTQFMEGLTPGAIAKELTADGIPTPSRKQRWQTSTVESILQNEKYKGAALLQKCFTVDFLTKKRKVNEGEVPQYYVEHSHEPIITPEEFDKVQTELARRKQISRQYSGKSIFSSRIICGDCGSYFGSKVWNSTSKYRRVIWQCNGKFKGDHKCETPHLDEETIKARFVAALNAVIGSKDNILEDCRLMQATLTDCTGIDKEIQTLLEEIEVVTELTKRCIAENSQTAQNQEEYTARYNGFVERYEKAKVRLEQLRTTKAEREAQAEAIGAFMFEVQELDALTEFDEKLWLTIIDTITVHADGRMTFRFQGGTEIEA

SEQ ID NO: 22203 - protein, 516 aa, synthetic construct
MARKKKVSPGNRLVAYYRYSGGSQQTEQSIEGQRRDCEAYARQHGLTIVHEYIDRHISGRGVESRLAFQQMIADSSKHLFDLVICWKTDRFARNRYDSAVYKKKLRDNGVRILYAAESSVEGPEGIILEGLMESLAEYYSAELAQKMRRGMRESALKGRAINPSRPLGLTTDEHKRFIIDEKNAPTIRFIFEHYAAGESSASIVEQLNAAGLRTSKGNAFNKCSIPRIIQNEAYHGVYICKAYDVRIDGAIPAIIDDDLWKRAQKMLTLNKQHRAPHSFHADYLLSGKLFCGCCHSLMRGISGHNCRNDVYYYYACGNKADGGTCKKKNIPKDVAENLVVNAICENILRPDTLEDLADAIAAAQQADVNQPDLERAMLEQNLADVHRKINNIIESIENGTASSRLSARLADLEQQESTLNYQLESLKEVHPPVLDRERILFLLEQFLISPNERTEDYNRRIIDTFVNRIEITDTEMLIYFNLSEASASEKQKNSQPNSCSTGNHLVRVARIELTAS

SEQ ID NO: 22204 - protein, 522 aa, synthetic construct
MGNVMVIPARRQVGNTVKQSALKKLRVAAYCRVSTDSEEQETSYEAQVTHYTEYIQKNPEWELAGIFADDGISGTNTKKRDEFNRMIDECMAGNIDMVITKSISRFARNTLDCLQYIRQLKDKNIPVYFEKEAINTLDAKGEVLITIMASLAQQESQSMSQNIKLGLQYRYQQGKVQVNHNRFLGYTKDDNGHLIIDPEQAEIVKRIYREYLEGSSMDKIADGLMADGILTGAGKTKWHTSTINKILRNEKYMGDALLQKTYTTDFLTKKRIKNNGTVPQYYVEGDHEAIIPKELFMQVQAELVRRRVVHVSPTGKKRSFSCNHCFAQMVFCGDCGELYRRVHWNNHGCKSIVWRCISRLEPTSAEKNCTNRTVNELLLQEITVKAFNKILTERDFFLKILQQNIAKAVVSADTLSPGGIQARLEELQKELIKKANNKQDYDAIADEIFRLRDQKEQSELDSHRREEVMNRIKELQDFIAGQETDITEFDEALVKKLIEKITVFANHFTVEFKSGITIDIEA

SEQ ID NO: 22205 - protein, 519 aa, synthetic construct
MKKVTKIAETASSKVKLKKIRVAAYCRVSTDSDAQLESLEAQKTHYENYITSRDDWEFAGLYYDEGITGTKKDKRPELLRLIDDCKAGKVDFVITKSISRFSRNTTDCLELVRKLLALHIPIYFEKENINTGSMESELFLAILSSMAEGESVSISENNKWSIQKRFESGTYKVSYPPYGYDWDGEQMIINPEQAAVVKEIFAALLSGKGTHAIADDLNRRGIPTKRNGRWTATTIRGMLSNEKYVGDCLFQKTYSDSRFVRHNNHGEQTQYMVKDHHEAIISREDFEAAHAFIHQRATEKGVVKGSGKYQNRYTFSGNIICGECGDTFKRRIHSCTGYKYAAWCCNTHIKDKDKCHMLFVKDDDLKQAFITMMNKLIYAHRIILKPYVDALKNTSSDDSLRRIQEIQTLLAQNTEKRETLTKLMTQGIIDPILFNKETNELLSQADSFRDEINALKNAVSGDVTKVTAATALLHFTEKGGILQEFDDDLFKEYVNRIIVRSRNEVCFELKCGLTLRERM

SEQ ID NO: 22206 - protein, 523 aa, synthetic construct
MELNKSITVIPARKRVGNTVTAEAKPKLKVAAYCRVSTDSDEQASSYEVQVEHYTQFIQKNSGWELAGIFADDGISGCNTKKRSKFNRMIEECMAGKIDMIITKSISRFARNTLDCLKYIRELKEKNIPVFFEKENINTMDSKGEVLLTIMASLAQQESQSLSQNIKLGLQYRYQNGEVQVNHNRFLGYTKDEEGHLIIEPAEAEVVKRIYREYLEGGSLLQIARGLEADGILTAAGKAKWRPETLKKILQNEKYIGDALLQKTYTVDFLSKKRVKNNGIVPQYYVENSHEPIIPRDLYMQVQEEMIRRANLHSGAKWKKRVYSSKYALSSIVFCSKCGDIFRRIAWNNRGKHSTVWRCCTRVEHGPKKCDAPTIQESDLQDAVVKAINLTLGNRDSMMDVLQENIEAVIRQEEETSAEGINAKLEELQKELLRLANSKKDYNSVADEIDRLRELKQEALTESAEREGVKKRIAEMREFLDNQTTEILEYDEQLVRRLIEKVTVYDERFEVQFRSGMTVDVER

SEQ ID NO: 22207 - protein, 463 aa, synthetic construct
MSFFTPNPQLFGLRVVKYIRCSHDDQVLHGDTLEAQDLILEDFIKVNRMILVDTFIDEALTARKKFNKRKEFVRLLDGVKAHAFDLIIFTKLDRWFRNIGDYHKIQEILEANGVQWKAVTENYDTTTTNGRLHINIRLSVAQDECDRDSDRIKDVFAYKLKNKTYVSGSLPRGLKLDAEKHVIIDPEWNCFVLDMFDRFEATCSKRDTQLFLQEKYNIRVCYDTVARYLKNPLFKGQYRDDPDFCPATISPERFERIQKLAIRNVRIRHTQQFYIFSGLLICSSCNHYMCGTVTYRRMADGSEKMYKNYRCNFKAHSKLCDRGKTYREADLEEYMLAHIRPALSDYIAKYEVTAASAVQKNPVTEIAKIERKMKKLYDLFMDDLIDKEAYRSEYDKFKAQIEELQKCSTAAPMRSLDSVKKLLSEDWEAVYHTFSDQEKNTFWKSFVESVLVYEDGSMDIRFL

SEQ ID NO: 22208 - protein, 573 aa, synthetic construct
MAKVKLPDKPRVAIYTRVSTLHQIDKDSLPMQRQDLINYARLILNTEDYVVYEDAGYSGKNTDRPKFQEMMQQVRLGMFTHILVWKIDRISRNLLDFATMYSELKQLGVVFVSKNEQFDTSSAMGEAMLKIILIFAELERNMTSERVTAAMLSRAANGQWNGGRVPLGYDYDPETKTFAINESEAAVVKIIHDKYEQERSLVSLARYLNGHGYRTRTGCTYSPSTLLIILRNVFYCGDYRYNVLKDGDRQKRKKESEWITVKDHHQAIISREQKDEIARILKENRRLECERRGIYSKKKNVHVFGGLVICGNCGHAMTSTIRPADQDGIRWSVYVCPTKRRSEYLCKGRATSEVVLGEFVFNYILNMLNVQKNFDSINSVEDMEKMLLSGSTFRDVDGIERAGLDDLYNMLASGLTEKAPFDSSVEVRKKPVVSDIELENLNTEKTRIERAAERLQNLYLYSDDSISQKDYIIQREKLMSQLAEVNEQIGMVMSNADEKDVSDEEFVHAASKFILTQKLEGRTYIYYKRLATTVSREVLRSFVMSIIENITIYDGRVQTIVFKNGLSHTFILK

SEQ ID NO: 22209 - protein, 453 aa, synthetic construct
MECVAYMRVSTEKQAEEGNGLDSQKRDIELFCRKNELVVSDWYVDDGYTGANMDRPELQRLINDCIKKRVKCVVAFKLDRLSRSMIDGLYIIERVFQPNQVLFKCVHDSVSYDSPMEQAYTQMMAVFAQLDKNTMMLRMRGGMLERIKQGYWIGGANTPYCYNYSKEKGILIPIPERKEQANRALDMFIGGYSDLYIKESLGFHSEVLVRNVLTGVVNIGMIPYKGNVYQGLHEPIFDKERFELAQEIRKSRRKNKTACHTDANLLTGLCYCGVCGCKMRYQKWTHGKHKIYCCSRDKAMKYLPNFNPDCNNSLEWAADIEKQVESEILKISLNLSECKPIEKQSKLEIMQSQFEKEQVKLKRLYVLYSDGNDTVLEMIKNTEKIIFEMKVKITEEEKNERNSQKKEVVYESIKKLADVWAHIDKKEKNNILKSIISRIVIVNGDVEIQLKNF

SEQ ID NO: 22210 - protein, 522 aa, synthetic construct
MSTGTELRAVFYARVSTEEEKQLNALEKQIHENKDVIRDHGWRLVGEYIDEGKTGTTTKRRNDYKRLLKDMTENKFDIVVCKDQDRLQRNTLDWYLFVDNLVTNNLKLFMYLDNKFFKPSEDALITGVKAIIAEEYSRNLSKKLNNSNKRRIERALNGEEVSAMGNGKSLAFKIVNGKWVKDEEEAKLGKKIFELYLEYDSIRKVRDWVNEHGYTNSVGKPFTSESISRILKNEKAKGVIVMGKYHHDFDKKKIVRRSEEELVRIPAPELAYVSEEVFDKVQERLKAKTGNGRGVNAYSDPLSGKIYCGSCGRKLWKHASNGYVNWMCASQVAKGDVECNGTRITTVAIRNIYKKITDNLEVNKGVVKQDIVKWLNELKATLSDTSVNEKIQKDLDKLERKRTKLLEAYLEDFISKDDYKAKYEAIEGQIEEKKKLLVPVEENEDIKVIESVLQNIDDEIDAYVKTLDMEESKVDFLIEHTKRITVLENRDIIIELDLVAGAIIAGKDFLLYVHDTMPLTDV

SEQ ID NO: 22211 - protein, 536 aa, synthetic construct
MKRVYTLYRVSTTQQVDVIKDDIPMQRIACHEFAEKMGWTILKEKEEKGISGFKISANRRDAIQELKEAAERGEFDILLVFMFDRLGRIENETPFVLEWFANHGIEVWSVNEGQQKFEQHIDKLMNYLRFWQASGESEKTSIRVKTRMHQMTSEGIYTGGSIPYGFQLVYQGRKNKKGQDMRDLAICPEEAIVVNMIYDLVIDQGYGSHRLAALLNEKGYKTHKNAPFTSAYVLRILKNPLNRGVLTRGGVTSEPIPDLRIVTDVKFFRAAEILEQRSGKEEEKRQIAMTNRGQALLAGVIYCAHCGCRLATSRSKVQYTRVDGSEYFKSKGRYICYHKSRGLNDCNGKSVYDSDRIDNAVMEAMRQIFASITGCPEEAKIQQAQKRVVSDLQLQQKKLLEQIEKDTKQLETLRSEIAKAIAGESFYTQEDLATAIRTIRDRIAEAQSDVEKLKQEETHKKMVSATIIPAYKQFRSWSVEFEEAPLEIKKTIATQLFSRVTVNKDYELTYEMNFTYRQFCEDWLSQTPVFSQKAVT

SEQ ID NO: 22212 - protein, 427 aa, synthetic construct
MDKKQRIRCAIYTRKSVEDGLEQEFNSLDAQREAAENYIASQKSKGWVCLPDHYDDGGYSGGNTKRPGLQRMLEDIKAGKIDVVVVYKIDRLSRSICDFGDLSKTFDKYEVSFVSVTQDINTSTSAGRMVLNILVTFSAYEREVTAERIRDKMAASRKKGLWVGGSVAFGYTSENKKLIVVPEEAETVRWIFNRFLETRSPKLICTELNEAKKLRKDGGIWNRSHIYRLLGNHTYIGKVKYKNEVYPGEQEAIVDEEIWDEVQQHLRDADPLRNLPARNRQETVAPLKGLIRCGHCGGSMGPNYTRKGSRKYLYYICITDTKRAVRSCPVRRVASEDLESIILDQLEEMLRSPQVQEQLIGEDLDAETVKRYTEQFATIWKTIFPIEQYRILHLLIERINVYEDHLDIEFRTGGIKDLIKELTDENN

SEQ ID NO: 22213 - protein, 520 aa, synthetic construct
MVKCMKSVAERAIPAVIYARYSSSHQREESIEGQVRECREYAEREGYSVLQVYADRAITGRTDERPEFQRMLADASKGVFQAILIYKYDRFSRNRYSFAVWETKLKKHGVKVISARENVAEGAAGIVLKSVLQGMAEWYSVDLSEKVTRGMKENALKAKWTSGTVPFGYTRDAEQRLIIDPERGEYVRQIFEKVLAGEKYVDIASWLNMLGVRTARGAAWNKSSFTWMLKNVVYTGLFRWKDIEIKNAVPPIVSKELFEAVQRKLKTYGRRGINVQKSDKYLLTPNIICGECGGPMHGMSGKSRSGELYYYYACANKRAKRTSCSISPLNRDELEQAVYNCAREVLLHEENIKLIAEQAEAVAEAQVDNELAEMKAERSRVKKSIANYAAAIANGATSGTIIELINAAEAKAAALDEAIAERELVTSPPKVSKEAIEYFLRNIAAAPDDKMKEKVISTMVNSVVVERVPDEGTKKDSDEKYSITVRFNFTDTPQLSALQSFDVREKSKMVTSAGLEPATF

SEQ ID NO: 22214 - protein, 523 aa, synthetic construct
MAKVTTIPATISRFTATPINEKKKRRTAAYARVSTDSEEQLTSYSAQVDYYTNYIKSRDDWEFVSVYTDEGITGTNTKHREGFKRMVADALAGKIDLIVTKSVSRFARNTVDSLTTVRQLKEKGVEIYFEKENIWTLDSKGELLITIMSSLAQEESRSISENCTWGQRKRFADGKVTVPFKRFLGYDRGPDGNLVLNKDEAVIIRRIYSMFLQGMTPHGIAARLTADGIKSPGGKDKWNAGAVRSILTNEKYKGDALLQKSYTVDFLTKKKKVNEGEIPQYYVEGNHEAIIQPEVFELVQQELERRKSSRGRHSGVHLFSGKIRCGQCGEWYGSKVWHSNSKYRRVIWQCNHKYDGEEKCSTPHLTEDEIKAMFVSAANKLIGKKASIISPLRASLDVAFDISALEAETAELQDEIMVVSDLIEKCIYENAHVALDQTEYQKRYDSLTARFDTAKTRLEEIEAAIADKKSRRAAIEAFLDTLTKADLMEKFDPALWCGLVDFVTVYAKDDVRFTFKDGQEIKA

SEQ ID NO: 22215 - protein, 588 aa, synthetic construct
MRIVNKIEAKTPQMPRRKRVAAYARVSMESERLQHSLSAQVSFYSSLIQSNPAWEYVGVYADNGITGTKAEAREEFNRMIADCEAGKIDIVLTKSISRFARNTVDLLNTVRRLKELGVSVQFEKERIDSLTEDGELMLTLIASFAQEEIRSLSDNVKWGTRKRFEKGIPNGRFQIYGYRWDGDHLVIHEEEAKIVRLIYDNYMNGLSAETTEKQLAEMGVKSYKGQHFGNTSIRQILGNITYTGNLLFQKEYVVDPISKKSRINRGELPQYFVENTHEAIIPMEVYQAVQAEKARRRELGALANWSINTSCFTSKIKCGRCGKSYQRSNRKGRKDPNANYTIWVCGTRRKTGNAQCQNKDIPEQMLKEACAEVMGLDKFDEIIFSEQVDRIEIPAPNEMVFYFKDGRIVPRHWESTMRKDCWTDERRAAKGRYVQEHQLGPNSSCFTSRIRCDSCGENYRRQRSRHKDGSFDSVWRCASSGKCQSPSIKEEVLKKLCAEAMGLESFDEMAFREQIACIHIMAPFQLSIRFFDGHVFEAGWENKRKMPGHTEQRKQHMREVMIQRWREKRGESNDDTGNDKPIHGNADQ

SEQ ID NO: 22216 - protein, 495 aa, synthetic construct
MSNAVIYARYSSGHQREESIEGQIRECTNFAKRNGLTIVEHYIDRAISAKTDDRPSFQQMVADSSKKTFDTIIVYTLDRFARNRYDSAVYKAKLKRNGVRVLSAKENITSDPSGIILESVLEGMAEYYSVELAQKVKRGMTENALACRWASGRIPFGYTIDADKHLHPDPALVPIVQEAFEMYAAGAKIVDIARKINSYHVVTGMGNKFGRSSFDRMIRSETYIGVFKWNDIRKENAIPPIITPELFYKCQARYNARNRKNVARPSAIYLLSGKLRCGCCGGSMCGMSGKSRNGTMHYYYSCYSTRRRTSHCDIGNIRRDEIEHIIAAHAASILKKPINLDIIANQALKTNNSVKNYRLESLIQQEKDLTQKLENCMKAIDQGLVSITLMDRIKQYEADLQSVKNDISLEKIKSNPIQVTKEHIIFFLEKFALLEGEKFKDRIISTMVRDIVIKKEKDGNYLVTVQYNYANSKELPNEESYSVPESIGSQDVELV

SEQ ID NO: 22217 - protein, 516 aa, synthetic construct
MKTVSRIDPIPRQKKKLRVAAYCRVSTDMDAQLESLEAQKSYYENYIGSHADWVLVDIYYDEGITGTKKDKRPDLLRMMEDCETGKIDFILTKSISRLSRNTADCLELVRRLMELHIPIYFEKENLNTSDMEGEFLLSTLSSLAESESVSISENSKWSIKNRFQDGTYKLCSAPYGYRWDGKNLVVDPAQAKVVKRIFTEVLAGKGAGTIAADLNDDGIPAQRCDHWTSTSILGMLTNERYVGDALLQKTFTDEQFNRHRNTGEMDMYCVQEHHKAIISREDFDAVAVLLEQRAAEKNIQKGVNKYQNRYTFSGLIRCAECGGTFKRKVNSGKGGKYAAWCCGTHIDDKTKCSIQSVRDEDIKLAFTTMLNKLIYGSRLVLKPYLKALKSTSQDDSQLRIQYLQGLIAQNTEQRETLTRLMAQDYIDQVLYSRENNGLVAQCEEFRSEIETLKKSRTTDAVQTAETEKLLKFVEKAEMQEEWNSDLFRQFVESIMVYSRDEIGFVLKCGLTLRERI

SEQ ID NO: 22218 - protein, 519 aa, synthetic construct
MKNITVIPARKTAKGVPLASQQKLKVAAYCRVSTDSDEQSTSYDAQIKYYTELIENNPEWTLAGIFADEGISGTNTKKRDEFNRMIEECKAGNIDMVLTKSISRFARNTLDCLKYIRLLKEKGIAVYFQKENINTLDAKGEVMITIMASLAQQESESISKNVKLGIDFRNKQGKVQVNHNRFLGYTKDAEGHLIIDLEQAEVVKRIYREYLEGASMDMICHGLEADGILTGAGNKKWYTSTVKKILTNEKYIGDALLQKTCTIDILNKTRVANNGIAPQYYVEDDHEAIIPKELYMKVQEELVRRRNVQASPRGKKRMYSCTHCFSQMVVCGNCGEVFKRIHWNNHGCRSIVWRCASRLEQGGEVCNARTVNEKELEQVVLKALNEMLGAKTTYKEQLQKNLMLVLRNDTSAQKDRIAERLLVLQQELLNRANNREAYDDVAEEIFHLRELQQQTDSDETTKAIQMERIKELQDFIGQQSNELTEFDEKLVKRWLRQITVWDDHYTVELKSGLSIDVPA

SEQ ID NO: 22219 - protein, 471 aa, synthetic construct
MKGVIYARYSEGPGQTDKSIDGQVADCKAFAERNGISVVGLYADRHISGKSTAGRVEFLKMIEDAKKGRFDCVIVWKVDRFGRDRRDIAVYKHELKKAGVKLLYAEETVPEGPEGIILESVLEGLAEYYSADLKQKVSRGIRETAKKGEWTFCLPIGYTRDENRHIVIDEPKAEVVRAAFKLHIAGATTKELQKLFSDHGITGQRGAKVISAGSIYRMLRNDAYLGHFEVQGVKVPAEPIIDPVTFEEAAKHFKTSRNNAAAKSKVNYMLSCKCFCGYCGKMLVADAGTGKSGKVYNYYKCKHTKGCELKPVAKDRLEKAVLDATITHILNDEMIDRLTVKVLEVQEADEALDPAENYRRQLDGIKKKIKNTVTAIEDGAGRAMIARLTELEGQEEELELEIAALELKKPRLTEKTIKAWLNSFRIGDVEDPSFQSRLLDTFVARVEVKNDEARVFFNVSGEGSDTITKVD

SEQ ID NO: 22220 - protein, 520 aa, synthetic construct
MPRKKAPAADAPRLVAYYRYSGGSRQTEQSIEGQRRDCEAYARAHGMTILREYVDRHISGKTDDRPAFQQLVADSAAHTFDAVICWKTDRLARNRYDSAVYKKKLRDNGVEILYAAESNISGAEGIIIEGLMEALAEYYSAELAEKARHGMRESALKGKALGSSRPLGLTVDADKHYIIEPTGAEAVRYIFEQYAAGLSSSSIVERLNAMGLRTSHGGPFNKSSINRIIQNEMYRGVYVSKKFDVRIEGAIPAIIDNDLWERAQNMFERNRQSRTPHASRADYILSGKLYCGECGCLMKGVCGRSSGNGQMYHYYACPGRSIGRACTRKNIPQDELEAMVVNAVADLLLEPALLEQIADAIVELQQAEAARPDPEKQALEKSLSDVRSKIQNILTAIENGTSSAALSARLADLEQQESTLSYQLSSLTAKKPLTFTRDQILFLLQQFRVSPSERTKAYCRRLVDTFVDHIELTNTELILYFNISDETIDKNKKAPRSNPSKESSTEKRLVRVARIELTAS

SEQ ID NO: 22221 - protein, 537 aa, synthetic construct
MAKKKKPAGGIAVIYARYSSHNQRDVSIEQQIEACRKHAAELGLTIIATYEDRAISGRTDNRPAFQRLMHDAEQGKFSYVLAWKSNRMGRNMMQAMVNESRLMDCGIKVYYAEEDFDDSAAGRFALRSMMNVNQFYSDNLAEDVRRGLMDNANKCMVNGRQPLGYKRGKDGKVVVDEPAAAIVREVYARVASGELFTDIARDLNRRGIKTADKGEWNKNSFHRLCSNEKYRGIYIYGDVRIEGGIPTIIDDTLWYKVQEALRVKKLKRNGRHRPGDEDYLLTGKLRCGKCGGYMIGMSGRSKTGDIHYYYACQNRRVGRTCDKKNIRRDVIEPAVAQAIKEYCLTDDAIEWIADKTVEYWEKADRNLQLDSIEGDLAAVQSSISNVMKAIEMGVVTETTRDRLIELEKQRTDLKSKLALAKEEVVHVDRKKLISSLLLFRNGDIHDRQYQEDLFKTFLISVYVYDDDDNGHLKIVFNAFGDNNTVDLPIDFGETDNQSAFSDGAEKFDYSLHRSTRTKPSDEQSGGFSVLFSADFTQ

SEQ ID NO: 22222 - protein, 530 aa, synthetic construct
MSTGTELRAVFYARVSTEEEKQLNALEKQIHENKDVIRDHGWRLVGEYIDEGKTGTTTKRRNDYKRLLKDMTENKFDIVVCKDQDRLQRNTLDWYLFVDNLVTNNLKLFMYLDNKFFKPSEDALITGVKAIIAEEYSRNLSKKLNNSNKRRIERALNGEEVSAMGNGKSLAFKIVNGKWVKDEEEAKLGKKIFELYLEYDSIRKVRDWVNEHGYTNSVGKPFTSESISRILKNEKAKGVIVMGKYHHDFDKKKIVRRSEEELVRIPAPELAYVSEEVFDKVQERLKAKTGNGRGVNAYSDPLSGKIYCGSCGRKLWKHASNGYVNWMCASQVAKGDVECNGTRITTVAIRNIYKKITDNLEVNKGVVKQDIVKWLNELKATLSDTSVNEKIQKDLDKLERKRTKLLEAYLEDFISKDDYKAKYEAIEGQIEEKKKLLVPVEENEDIKVIESVLQNIDDEIDAYVKTLDMEESKVDFLIEHTKRITVLENRDIIIELDLVAGAIIAGKDFLLYVHDTMPKHYGRKCYDIFS

SEQ ID NO: 22223 - protein, 469 aa, synthetic construct
MVRNVTVIPAKSRSEIRREKTAAKKIRVAAYCRVSTDNEDQIHSFRAQVNYYTDYIGKHENYELAGIYADEGISGTNTKKREQFRQMVKDCEDGKIDLVITKSISRFARNTQDCLEYSRKLKNLGIGIIFEKENINTLDSTGELLFTILSSLAQDESRNISENCKWGIRTNFKNGKVNICPSSFLGYDKDTNGKIIINEREAEIVRRIYREFIWGMNPQQIAKGLEDEGVEGCKGKKKWYASTIVGILKNEKHMGDALLQKYYTADFLTKKLVKNKGEITQYYVKDSHEGIIDKETWEAVQEELDRREKFKEAHGLSHYSYGTDYNPFTNRIFCGKCGYSYNHHCWKKRGIFQWQCKERTVQGSRKCMNDTVDQRDLEKATVSAVNEIIREKAKYLDRWNRMAENGTPLEKLRARQMIEITDQTELNIFVPELAQLLLYEVTVLGAKTYEFVFMDGSRKRIQTGTASAA

SEQ ID NO: 22224 - protein, 496 aa, synthetic construct
MQVIVREARPEKARKLRVCAYCRVSTDADEQENSLENQIGHYEDAITSNPEYEFAGVYHDFAISGFKEQRPGFIRMMEDARAGKMDLILTKSVSRFARNTAVLLKATRELKGRGIGVFFELQNINTLSGEGELMLSILAAFAQAESESGSVGAKMVYHRKYEAGIPVQYLERSFGYRRDENGRFVPEPSEAKWVKKIFRMAADGYTPAAIKRYMNENNVKTVDGALWCDSTVFRILENEIYKGDYIMHKHYVNEDRKLVVNRGQEDAWYIENDHEPIVSRKLWQEASDRLNEKREYLAEGSFIADFTQENYPYMGHLFCGKCGYPLYHRIYSNGNRLSWDCSGVKRYGRGFCGGVNVPDGTVRERGVMENTYIMEKAGEKGRREYTFLKEASWKRRHRKKVFRHDVPELTLENYPYYKSIYCGKCGGRLVRYIDKGSKVLWICSKQKRKGSRYCEGMRVPDEEIRKMELLDEKNYITERKMKNGKKCYGHSCEEPK

SEQ ID NO: 22225 - protein, 561 aa, synthetic construct
MNREGKKCVLYSRVSTEMQVDGFSLEGQITRMKTFAEREEMDIVKRYEDAGKSGKSIAGRPAFQLMLADIQEGKQIDYILVYKLSRFGRNAADILNSLQKVQDYGVNLISVEEGIDSSQASGKLLISVLSAVAEIERENILEQTMNGRKEKARQGLWNGGPAPYGYSLKDDTLIINEQEAEVVRLIYDKFANTDMGYNGVAKYLNLQGIAKNKHKESDITAWSARSVQCVLDNPVYAGKIAYGRRIKEKIKGSRDDYRTVRTSDYLVYDGKHDALVDQKTWEKVREKRSITGFKSPSRVGRERIHLLTGLLKCPKCGSPMYCNRHSWQKKDGTYKDVYYYYCGHNGNPRGYVCNYKAKLRTTDIEPYVVEAIKELIRGESFAKEIESRIGQKANTEAIDTELRNYKKKLIETETNKANLEETIDNLPLDIKYRERKLKDMSARLDSLYDTINELEECIKDASLRRAAMEEEVLTLDNVYKLLLSFDKIYDIMTDKEKKDLISYLIKDIQIYSNEEQVEMPLKSITLNFPIYSDSGEVNKLLWENRDGVETLVVLSKKDEIN

SEQ ID NO: 22226 - protein, 468 aa, synthetic construct
MARQILHIPAQQRSVMVGGARMPQKKLRVAAYCRVSTAEEEQLNSFENQVAYYTAYINNNPEYELVDIYADEGISGTSTKRRDEFNRMIADCQAGKIDLVITKSISRFARNTQDCLNYSRKLKDMGIGIRFEKEGINTMDGSGELLFTILASLAQDESRSISENTTWGIRSLYKKGILHMNTNRFYGYDKDENGHLIINPEQAKIVKWVFESYMDGTSPDVLARTLNERQVPGCMGKPKWTVDTIMGILQNEKHMGDTILQKTFTADFMTKKMVKNEGQVAQYYISDDHEPIVSKELWQATQQEIRRRKEYMKVHGLRTMGRYTDAQPFTNRIFCGTCGELYWRRRMQRLGYVKYQWKCKQKCLGKESKGCINTDIWETDLHQTFVMAWNSLLEQRKTLLKNWNAQLASEDPLVRFRAKQFMELTKGNPLDEVDFTLVGKVLDHADILPTGLVRYTFLDGTTIDVTFP

SEQ ID NO: 22227 - protein, 485 aa, synthetic construct
MPTSDLKIAAAYIRVSTDDQEEYSPDSQVRLIREYARKNGYLLPEEYVFQDDGISAATARKRPAFNRMIALAKEKERPFDAILVLMFSRFARNREESVLYKGLLRKQGISVISVKEPAVDGPFGTLIESIIEWFDEYYLINLSAEVKRGMSEKFLRGEAMGTAPFGYCIDSANKTFTVDPERAEIVCDVFRSYADGAGLRDIAVQLGDAGITTRRGNRPDSRFVEYMLRNPVYIGKIRWTPGHKTRYSRVHIADGVEVVDGKHPPIVSMDLWEAVQRRMDQRKAAYGRYQRQAPAAWMMRGLVRCSACGATLIMAGRSSSCPFLQCHSYAKGSCHTSHSLSLRRANAAVLAGLRRSVGTLTFRMVPHLTSAPSRTADYGRLLEQERRRLDRCKDAYQAGVDTLEEYRDNKARLEERIRRIEEQAASAAAAPESFDKAAYGKKATDILRFLETSADEGAKNEVLRSVVDHITYEKASRHLAIYFYT

SEQ ID NO: 22228 - protein, 498 aa, synthetic construct
MKAVIYARFSSHNQREESIEGQVRACQRFAKEHDMTVIEIYADRGLSGLHADNRPEFQRMIADSDRHKFQALIMWNLDRFSRDKYDTAVYKSRLKKNGVTLYYSDQNIPDTPEGIILESLLEGFAQYYSANLSRNAKRGLQENARKCLWNGGGLPLGYTIDETKHFVIDPAGAACVRLIFQMYADNHSIKEIVSTLNEKGYRTVKGNKFRLGSIQGVLRNRKYIGEYHASGITVPNGVPAIVDVELFNAVQEKIGVVSAAKARNKAEIPYLLTTKVFCGHCGSPMIGESGTGKGGSTYRYYKCSCRKNRKGQCDKRTEQKEWLEETVVAQTVEKFLHPDVIEDVSNACAAVLEQDCQNNALLKALNAQLADVEKSSRNLIKAIEAGVFTASMRERLAELEQQKEDITVQIAREQLRKPQLSAEQIAFFLRSFLDGDAHDPNFQERIIESLVRRVDVYDEGPGNRKLTVFYNLKKNNHSSVSVKCSDSESVGLPKRSVA

SEQ ID NO: 22229 - protein, 498 aa, synthetic construct
MKYLIYARISERGSSSEGETSIDMQLEYCRRYIAERQGEIVREVQDVYISGKSLNRPGIRQVLTECRSGAADWDCLCVYSLSRLTRSPRDLYKVIDVLLDKNKRFVSATEPEFDFTSITGEMLMGIISHVNQYVRKVGGKTTRDKMISIARQGLCPYGRAPFGYRRGAHKDNRLYVDEPNAAIVRDVFDMYTNPNYTTGDIVKKYKGVLTKKRVLNILKNPTYTGVISYAGEVYPGKHEPIISKAQFAKAKLMRPENIFAPRPKAQRYQYLLAGLLKCECGYALTPTSAKQGRYFYYTCINPDCRHRIPAPKVEKEILDYLRTVRITPKVLEYAKKRIEEKRQKALQTAAPRLKTIAKELEKINAEQDKLVDTLLKSNLSRAITERINAASNKLMLQTAALEGEKQALLITTKDLSQEFSAAAEILNKFLNFPEAEELLKLPDRTALRNYIRLRISSIHLNADNSYQIFLSGQLLAKSSTKGDKWYARRDSNPKPSGP

SEQ ID NO: 22230 - protein, 541 aa, synthetic construct
MTDEKPHVIIIPPKPELQQTAAVTKQLRVAAYCRVSTKEEEQASSYEAQCEYYTDKIMSNKEWTMAGIFADEGITGTSTKKRTEFLRMIRQCKQKKIDLILTKSIQRFARNTLDCINYTRILRQLGIGVLFEKENINSLPADSEFMITMYGAMAQSESESISGNIRRGKQMHAKVGTLKIPCYRLYGYEKDADGKFRVIPEQAEIVRELYKRYESGASLRNLQDWLEENQIKTVLGESKWTTTSIKSILTNEKYCGDVLLQKTFRTDVISKKVIKNVGQMAQYYMPDHHEGIVSREQYNAVKAEMARRSALRSPSKSAVTGRSCYTSKYALSDRLVCGECGTLYRRCIWTSLGRKYPVWRCTSRLNYGTKYWRDSPTIKEEPLQNAILSAINSAMSSKPALLDRIRNAVSVELLPVQGQTLSLADIERRLTQLDEQFQSLLAEAIDAEDKEACNAQFAEILAEQTALKKQKEAILQSSNDADRVCTRMKQAEQAIESTASTITEWNENAVRQIVERVTVLSADEILVRIKGGAEIKQRLEG

SEQ ID NO: 22231 - protein, 530 aa, synthetic construct
MAKKQTDGNLALEQQRVIVIPAHDEIVARKLRVAAYARVSSSSEDQLNSYRVQNQYYSELISNNPDWEMVDIYADEGITGTSVEKREDFQRMMQDCRKGKIDRILVKSISRFARNTKDCLAAVRELKELGVSVQFEEQGIDTSKVSSEMVTAIMASLAQKGSESISGNVRWGVQNRMQDGTYMTASVPFGYELCDKKMKINQEEAQIVRQIFDLYLSGVSIEKIVLELNAGCHEISDKKIWCKTAVSYILGNERYIGDRLLQKFYMTDTLPTKQVRNNGEKAQYYVENTHPAIIDRERFHAAQALRVCRKKRNGCAITMRQSNLRGNCFCGMCGGKLRSKEENGIIYWACKTHSKDKKSCANSPVQEKIMEQAFCRLYYKLKHHGGPIFAQMLSNLQKIRYSRMLWSEDVISLNKKISDTLSQVQFLTQLQQAGGVDPDTFITSNNKLSEQLRRLKQEKARLLDTDSDDLADRTRDLMDALEDGPDFLDSFDAELFDALVDKIIVDSNERLRFCLKNGLELTEQIERTRR

SEQ ID NO: 22232 - protein, 536 aa, synthetic construct
MKVVGYCRFSSEGQKDGYSIEAQTEAIKTYCEINNHTLLRFYIDEAKTGTQDDREGFLDMIDDTKSGEFEAIVVHKLDRFARNRYDSAIYGRILEDRKVRLLSVLEPIIADDSPESLLFRGIVETMNEYYSRNLSRETLKGQRIAARNAQHLGGAVPFGYDLTKDKHYTPNPTEAPIVLEIYTRLDAGQSSIAVARWLNTRGLLTRHHKQFTGSSVLNLVKSPIYIGRYVWGATSKRKGVTPIVVENACEPLVPKDLFDRVNAVISARKTGPVGRNRDVDYLLTGVLYCEYCGRHLYGFKSHAHYTLKSTGEVRDYTVYKYRCSHDNRQSFNRKTDDGYVKEVCPLKMLPKDDIESFVGDAVRSVIFAPDSAAWISGVLQERMKTIMPGNPDAVKKVDANIRATSTKQQRLLDLYLDGGIDKAAYNQKSRELNEQMQYLSAERAKMQTPPPDVSIEAIKSAIAKYSESASVKSVESTKMLIDTFVDHIDVSNEHIVIFFNVEFPFLPECSTFDFVRSGKNALTQLFAQSESFIALT

SEQ ID NO: 22233 - protein, 527 aa, synthetic construct
MSRTAARSVTVIPPTINPLTHLSRVAVQKRRVAGYARVSTDSDEQFTSYEAQVDYYTQYIKRNPEWEFVKVYTDEGISGTNTKHRIGFNEMIADAMSGKIDLIVTKSVSRFARNTVDSLVTIRKLKEKGVEVYFEKENIYTFDGKGELLLTIMSSLAQEESRSISENVTWGQRKRFADGKVNLPYKQFLGYRKGADGFPEVVPEEAVIVRRIYSRFMEGLTPCAIANELTADGILTPAKKQTWQTSTVESILHNEKYKGAALLQKCFTVDFLTKKKKQNEGEVPQYYVEHSHEPIITPEEFDKVQTEFERRKRISRQYSGKNIFSSRIICGDCGSYFGSKVWNSTSKYRRVVWQCNGKFKGENKCETPHLDEGTIKARFVAALNAVIDSKDNILEDCRLMQTTLTDCTSIDTEIESLLEEIEVVTELTKRCIAENSQMAQNQEEYAARYNGFVERYENKAQLEQLRSTKAAREAQADAIGAFMFEMQELDTITEFDEKLWLTSIDTVTVHADGRMTFKFQGGTEIEG

SEQ ID NO: 22234 - protein, 434 aa, synthetic construct
MDRIVERVDSHIPAQPKALRVCAYARVSTSKDAMLHSLSAQVSYYSNMIQSHSGWLYCGVYSDEAVTGTKRERGGFLSMVEKCHRGNIDLIITKSISRFARNTVMLLQTIRELKALGVDVYFEEQHIHTQSTDGELMMTILASYAQEESLSASENQKWRVRKAFENGELINLRFMYGYNISPDGIEINEKEAAVVREIFTRFNNGDSMSSICRDLESRGIKGALGGTWCPERMRCTLSNEKYLGNALLQKRYRNNHIDKKLMPNRGELPMYYAEGTHEPIIDQVTFNKAQERLRIFAQQTAGRKKPTRSAFSGLIRCGLCGNSYKRVTYRNKHFWNCTTFQTKGKSECAAKRIPEETLESLAYEVLGTKTLDSNTAKRKITEIRAEKNNVVVFCLEDGSEIVKRWKDRSRAESWTPEMKEQARQRALQARRHKV

SEQ ID NO: 22235 - protein, 573 aa, synthetic construct
MAERLKRAALYVRVSTAYQIDKESLPVQREELQNYCQYALGINSFEIFEDAGYSAKNTSRPGYQQMMSRIRSGEFTHLVVWKIDRISRNLMDFTAMYSELKDLHVTFISKNEQFDTSSAIGEAMLKIILVFAELERKMTGERVSAVALSRANDGKWNGGRCPYGYTHEKGTSVFTANPEEAKIVAWIFQTYSESGTVLSITKELNRQGLKTHYGAWNTNSVWTILTNPFYYGAMRYNYRNESKGMSSWSFRPPEDVIIVPGHHEAIITKEMFDICQSKLDRNNLKKRGTFKTYKRKNVHVFAGLITCGLCGSQYSATVDRKRSDGWRPSVYLCSKRRKSDSCTNKFVSEITLGPFVLNYIANIVRAQASFGKSTSSAVLQKKLLRGPEFADIDHIEQPGLDAMREFFMSEKYGVSEFEPSEVQISTEATERDLLDKEKRRIERAITRLSQLYLYEDDPMPQTEYFIERKKLNDQLDQIDQRIQELDDQATADRNMSDADFIAKASYYALTQEILNSRHVDYIRMIKSTDPQITKEFVNSVCSNFCILDGKVTSIRFRNGIEHRFVYKQIEPAE

SEQ ID NO: 22236 - protein, 503 aa, synthetic construct
MKGAVIYARYSSERQNEQSIEGQLTVCNKFAEENDLTILDTYIDRAMTGTNDNRAAFQKMLSDAEKTDAWEIVLVYALDRFGRDSIEISVNKYKLKKANKILLSATQRTSLNIDGTKNLDGILLENVYIGLAEYYSAELSQKVKRGLHENRIKGLCTSGTPPYGYKIIDKKAVIYEEEANVIKYIFTEYYNGKVVPDIIADLTKHGILYKGKPFQNTSVYYMLRQEKYIGIARYSDGIYDNIFPAIVDKRIFDDIQLMLENNKKGSRSTDGNFLLRGKLICGYCGRNLQGESGTSRCGKICYYYTCRGRKSIKDCEKKRVKKNDIEDLIAKVTINLFSDKETLNKIADKILSVHEKRLEDNYVIKQLKNEESETQKQINNVMKAIEAGIITPTTKNRLEELETLLAELKDKIMVQEYNNRNKLTKEKIIDYLTKSLYKEPQILFNTLIHKVEVYDDKLIIYYRYTDKKNPDENQDFSFNNPNSGSNCYSVVEATGLEPVTSRM

SEQ ID NO: 22237 - protein, 505 aa, synthetic construct
MNTVIYARYSAGPRQTDQSIEGQLRVCTDFCKQRGLTVIDTYCDRHISGRTDERPEFQRLIADAKRKKFEAVVVYKTDRFARNKYDSAVYKRELKRNGIQIFYAAEAIPDGPEGIILESLMEGLAEYYSAELAQKIKRGMHESALKCQSTGSGRPLGYRVDEQKHFQIDPEAAQTVQTIFEQYIKGESNAAICELLNSRGLRTAQGKPFNKNSINRIIKNRKYIGEYRYHDIVVEGGMPAIISKDTFNLAQAEMERRRTRKAPKSPKAEYLLAGRLFCGHCKGPMQGVSGTGKSGNKWYYYYCGNTRGKNKTCDKKQVSRDRLERAVVDFTVRYILQEDVLEELARKVHAAQERQNDTTSEIVFYEKKLADNKKSIANVLRAIESGAATQTLPARLQELENEQAVILGELSFLKGKRLAFTEDQILFALMKHLEPYPGEPEQDYRRRIISDFVSEVYLYDDRLLIYFNISSEDGKLKSADLSNIEGGEFDEGLVGSTKTNTKPTV

SEQ ID NO: 22238 - protein, 543 aa, synthetic construct
MPVAVYCRVSSEEQAERGTIEIQKEFAAKYVDLYQLEVFDYYCDDGISGTIPVEARPEGSRLFRDAREKKFDTILFYKIDRLGRKVRVILNAVHDLEELGVSIRSMTEPLETETPTGRFMLTSLAGISELERDTILSRMWAGSQRAARLGNWLGGIVPFGYHVVDKQLQISDDIMPGCNLSEADVIQLIFDLSGNQKMSAIKISDYLNALNIPTRYDLNGINGKRKKNASSIWYPSRVLSIIKSTTYKGTHKYGKRATNKNSKIILRPVPAIVSDELWEKANEALKTNQITAMRNAVREYLLRGIIKCGNCGRTYMGTAYSGSGREKIPYYVCNAKNSYLAHNTEKCISKNVRADWLEHLVLEDCIKILKSPNKILNMDPEKEQQSLADEVKKEHDQIKASLKKLSEERASIIELYRKKIISETDLSCQLEKLSTEEATLQERLKMKIDSRKSAATKQNKEKAISLLKKFTDKCQNLDPEKLSFETKRAIIELIVEKITVTTESAPEKYYPEISVDIEYRFATTPNHIAYVEDCTVTGSALCT

SEQ ID NO: 22239 - protein, 520 aa, synthetic construct
MPRKKAPAAEAPRLVAYYRYSGGSRQTEQSIEGQRRDCEAYARAHGMTILREYVDRHISGKTDDRPAFQQLVADSAKHTFDAVICWKTDRLARNRYDSAVYKKKLRDNGVEILYAAESNISGAEGIIIEGLMEALAEYYSAELAEKARRGMRESALKGKALGSSRPLGLTVDADKHYIIEPTGAEAVRYIFEQYAAGLSSSSIVERLNAMGLRTSHGGPFNKSSINRIIQNEMYRGVYVSKKFDVRIEGAIPAIIDNDLWKRVQNMFERNRQSRTPHASRADYILSGKLYCGECGCLMKGVCGRSSGNGQMYHYYACPGRSIGRACTRKNIPQDELEAIVVNSVADLLLEPELLEQIADAIVELQQAEAARPDPEKQALEKSLSDVRNKIQNILSAIENGTSSAALSARLADLEQQESTLSYQLSSLTAKKPLTFTRDQILFLLQQFRVSPSERTKAYCRRLVDTFVDHIELTNTELILYFNISDETIDKNKKAPRSNPSKESSTEKRLVRVARIELTAS

SEQ ID NO: 22240 - protein, 514 aa, synthetic construct
MNITEITSVRQQTAERLRLAPYCRVSSDSTDQLHSFAAQIRYYSDYAKKHPEYTLVDIYADEGLTGTEMKKRDELNRLITDCRKGKVDRIIVKSVSRLARNTEELLVLLRMCKEIGVSVYFEEQGIDTEKLNMEMIVTFPGMAAQQESVNISGNLRWSYQKRMQSGDFNCTCPAYGFDLKDGQMTVNETEAAVIRRIFDLYLQGYGTLAIAKMLNEDGIPRKHGYEKWLPSSINYVLNNERYMGDALLQKSYTTETLPFRKMKNDGRLPQYYVENSNPAIVSRETFQAAQNLLRSRKTERCKRKSYPLTGKLRCPECGRAFRHQVINGKAHWIGSCRSSGATDCQHRHVREDIVYGIFIDMVIKLKTYRGELLGTLIHQMETMQDRTSRNQERIRQIDKEIADLGAKNHIIARLHTSGAMNAADYAMQTSEIGNRLTELRIERRQKLTEDEDDQLLATLKDLNGTLDEYEPTVEFDNGLFDEIVESITVDSSEQLTFKLIGGIALTEQIPKKGR

SEQ ID NO: 22241 - protein, 521 aa, synthetic construct
MKTHYRVLRVAAYCRVSTKQEEQLNSYENQVEHYTERINSENGWTLEGIYADKGISGTSVKNRDEFNRMIRRCKQGKIDMIITKSIARFARNTVDCLKYVRLLNDLGVDVYFEEQGIHSNQPGAEFYITIYGSIAQSESENISANIKWGKAQAAREGKVVFRYKNFLGYRKGEDGQPEIVPEEAETIRFIYDRFLAGDSLKGIAKLLEEKGIKSPTGKAEWQFSTIQSILSNERYKGDAIINKTYITDCISKKVRVNNGERPKYYVENSHPAIIDSATFGRVQEELARRSGKRKISRKAKTEQGKYSSKYALTELLVCGECKSAYRRCTWTASGKRKIVWRCINRIEYAKKYCHNSPSVEESILQRAVMAAIMEIANQNAEVLRTLKLHIGMGLAGEKSEDNSIDLQIRIAEIDAEFKKMLDRVSTDTIEAFDEETATRLMNKKSRLQQQLDSIADAAQRRENAKSRLDDIYTILDGIKNRPMEYDDQIVRQLLECVVVDSKEQITIIFKGGLKSVQPLTE

SEQ ID NO: 22242 - protein, 492 aa, synthetic construct
MSDIAVIYARVSSKEQETGGYSLPAQLDFLKEYAKSKGLEVVKVFTESMTAKEAGRIEFNNMLKFAKKQRYGCHVIVEKNDRLLRNEDDEALIINLTVRQGLIDLHLVKDHLILNRYSTPHEIFMFHMMCGMSSMYPRNLSGEIKKGLDKKADLGDYPAKAPIGYKNVRSSKKRSTIEIDTTNAGYVSKIFELYATGMYSYKTLAERISLDGFYPKNKPCSPKLVEKIIINPFYMGEFEFNGKRYHEANHTPIITKELFYTCKKIRERHDNPRKITHDFLYSGLITCSHCGCQLTAEIKKGKYIYYHCTGNKGGTCKRNKYLKEEYIDEHIRTLLEKIQPSKEDAKAIVEKFKEIVNVNFDYDKKSMEEIGKKISLLKNRLNKLYIDRLDGMITDEFYREKKNEFQGELDELELKHDNFLAETDTLVDMATQIIELCKNAYNHYLRSDNENKRLLLKILCSNFLYDGSNLVIKLKSTVEPMLLGANFNNGGG

SEQ ID NO: 22243 - protein, 525 aa, synthetic construct
MEPTKTVTMIPARRRVGNTAREEERPKLRVAAYCRVSTDSDEQATSYETQVEHYTSYIRKNPEWEFAGIFSDDGISGTYTKKRDGFNKMIDECMDGKIDMIITKSISRFARNTLDCLKFIRQLKEKNIPVFFEKENINTMDAKGEVLLTIMASLAQQESQSLSQNVKLGLQYRYQNGQMSINHNRFLGFTKDEDGHLIIEPDEAEVVKRIYREYLEGASLQQIGKGLETDGILTGAGKKKWRPETLHKILRNEKYIGDALLQKTYTVDFLNKKRVKNKGIVPQYYVENSHEAIIPRDIFMRVQEEMVRRANLHSGEKRKKRVYSSKYALSSIVCCSKCGDIYRRIAWNNRGKHSTVWRCCTRVDFGPDKCDAPTISEAELQDAAVKAINKALGGREDIIKGLQENIEKILSESTDNAVREIDSRLLELQKELLKKANARQNYDDFADEIEALREQKHGVMVESAEREGIKKRVAEMQQFLSEQKAEIMEYDESLVRQLIEKITVYEDRFEVMFKSQTIVEIKRIF

SEQ ID NO: 22244 - protein, 519 aa, synthetic construct
MKRITKIGTTATVETKKTRVAAYCRVSTSSDEQLISLDAQKLHYEDYIQSNDDWEYAGLYYDEGITGTKAEVRDGLQALLRDCEDGKIDLIITKSISRFSRNTTDCLKMVRRLVELGVFIFFEKENINTGSMESELMLSILSSLAESESVSISENEKWGIRKRFQNGTFIISYPPYGYANVNGEMVIDPKEAKVIKRIFAECLAGKGTYAIAKDLNADNIPTRKNGKWHGTTVNGILTNEKYTGDVLFQKSYTDEQFNRHTNYGEVDQFFCENHHEAIISHEDFERTQAVLAQRAAEKGNGTNTSRYLNRYTLSGKIKCGECETSFKRRSHYKPSGDYIAWTCGKHIEDKNACSMLYVEETVIHHAFVTMINKLIFGHQKILKPLMESLKGTDDKDRLLQIQRIEQEIEESTVKKQMLVGLAAQGILEPAIYNEECSALALKEERLLAEKKNLVSDIGGERTKLQELEKLMQFTVKGRMIEQFDDEIFSDYVEKIVIESRECAVFHLKCGLQLKERLVR

SEQ ID NO: 22245 - protein, 590 aa, synthetic construct
MKTVEKIERKLPVLKARKRVAAYARVSMESERMQHSLSAQVSYYSALIQKNPEWEYAGVFADYGISGTGTKKRDEFNRMLAECEAGNIDIILTKSIQRFARNTVDLLNTVRHLKELGIEVRFEKEKINSLSGDGELMLSILASFAQEESRSISENVKWGTIKRFKQGIPNGKFSIFGYEWQDDKLVIIPEEAEIIRWMYAEYMKGASRIEIGRALMDRGIYTRQGKPWVDSNVKVILTNITYTGNMLFQKEYCEDPITKHRRKNYGEMPQYFVEDTHEAIIPMDEWQAVQAEFKRRRDLGPFGNKSLKLSAFSTKITCGCCRKHYRHSGKRNTAGEVYYIWTCQTKSQKGASACPSKNIPEKMLQNTAAEVLGLYEFDEDVFSQQIEEVIVIGDDTLTFRFYDGHEVTTKWQSTAKTDWWTDERRKLWGERHKRKDTNPNRNTFYEFTGFIKCGCCGANYRCQSGKRKDGTPTQSWYCTGPRSECRNPAIRDETMKRLVTEILGLDEFDEAAMDAQIEKATILDHTVTFHFRDGHTESRDFLDKRHGTPWTEERREKARESMKAAWTDERREAMSERIKKIRSEKKWPNP

SEQ ID NO: 22246 - protein, 523 aa, synthetic construct
MAKSVTTIPATLSRFTAAPINSTKKRRVAAYARVSTDNEEQLTSYEAQIDYYTNYINGRDDWEFVGVYPDEGITGTNTKKREQFRQMVADALDGKIDLIITKSVSRFARNTVDSLTTIRKLKEHNVEVYFEKENIWTFDSKGELLLTIMSSLAQEESRSISENCTWGQRKRFADGKVTVPFKRFLGYDMGPDHNLVVNPEQAKLVKRIYGMFLQGQSPFQIARTLTEEGIPSPGGKDHWNPSNIKSILTNEKYKGDALLQKSFTVDFLTKKKKTNEGEIPQYYVKDNHEAIIDPETFEMVQTLMATRTKGRNRKSSVSIFSSKVKCGDCGSWYGPKVWHSNDAYRKVIWQCNHKFDGQKCATPTLTEDEIKELFLRAANQVIDQKEQFIAIYEQVLSRSLDTTALESELSDLEAEINIAAELIEECIKENAHVALDQAEYQKRYDGLVARFDKAKARHTEVTDLIAERMARKHQIETYLKNLRSREPLTEFRETDWLAMVDYITVHSKKDIRVTFKDGTEIKA

SEQ ID NO: 22247 - protein, 468 aa, synthetic construct
MPRQILHIPAQQRSVMVGGARVPQRKLRVAAYCRVSTAEEEQLNSFENQVAYYTAYINNNPEYEMVDIYADEGISGTSTKRRDEFNRMIADCKAGKIDLVITKSISRFARNTQDCLNYSRKLKDMGIGIRFEKEGINTLDGSGELLFTILASLAQDESRSISENTTWGIRSLYKKGILHLNTNRFYGYDKDENGHLIINEEQAEVVKWIFESYMDGTSPDVLARTLNEQQVPGCMGKPKWTVDTIMGILQNEKHMGDTILQKTFTADFMSKKMVKNEGQVAQYYITDDHEPIVSKELWQATQQEIRRRKEYMKVHGLRTMGRYTDTQPFTNRVFCGACGDLYWRRRMQRLGYVKHQWKCKQKCLGKESKGCINQDIWESDLHQTFVMAWNSLLEQREVLTGNWKAQLASDDPLVRFRAKQFMELTKGKPLDEVDFQLVNKVLDHAEVLPIGRVRYAFLDGTAIEVTFP

SEQ ID NO: 22248 - protein, 439 aa, synthetic construct
MDDCKASKIDFIVTKSISRFSRNTMDCLELVRDLQALHIPLYFEKENINTGSMKSELFLSLLSSLAENESVSISENSKWSIQKRFENGTFKICYPPYGYDWDGEQMVINPEQATVVQEIFAKLLSGKSTQAIADDLNQNGIPSKRSGHWTSTTIRDMISNEKYVGDCLFQKTYSDSSFIRHHNHGEMTQYLVRDHHEALISREDFNAVQKRIHQRATEKGITKGASKYQNRYAFSGKIVCGECGDTFKRRMHSCSGHKYIAWCCGTHLQDTNKCHMLFIRDDALKRAFVTMLNKLIFSHAIILKPYVKAITESPSDDSLKRIQELHTLLAQNTEKREILTKLLSQGIIDSIIYNKETNDLLFQSDNYRAEIESLKHTVSDSIQLVTETTMLLRFAEKATITTTFDEKLFQKFVDRIIVHSRNKVCFELKYGLTLTERMQ

SEQ ID NO: 22249 - protein, 465 aa, synthetic construct
MASYRKLRVATYTRVSTLEQAEEGYSIQEQQDKLEKYCELKDWTITHRYSDPGFSGSNIKRPGIRELITAAKQGDFDLVLVYKLDRLSRSQKDTLYLIEDVFQANQVDFVSLSENFDTSTPFGKAMIGILSVFAQLEREQIKERMTMGKIGRAKSGKAMGWSNVPFGYNLVGDVYEIDEFQATIVKRIFSEYLSGDSPVTIAKRLNDEGHLGKGTRWSWKTVRDILMNIVYTGYISFKGELYPGMHKPIIDMETYKNAQTQLEIRRVNADNPRPFRAKYMLSGLLKCHYCGSTLRIGVSINQRTKARSYRYNCPSSHPRKKSTYKQKAVCPSKLVRKGEIEKQIIEEIEKLPKNFKHKKAPTVDVDAVKKQIKAIKGKQSKLMDLYLIDGIDMEELNRRNGEFNKQIEALNKNLSAVPTEPDVTEALNQAKNISELSYDEQKKLVRLLISEIEVANDSIKIHWRF

SEQ ID NO: 22250 - protein, 571 aa, synthetic construct
MSIRDKLSALKVAIYIRVSTHWQVDKDSLKVQERELIAYCQMVLGINDYVVFTDPGYSAKNTDRPDYQAMMDRIRTGEFSHLLVWKIDRISRNIIDFATMSEELKHLGVAFVSKNEQFDTSTAMGEAMLQIIMVFAQFERKQTSERVTAVMLSRAGNGQWNGGRVPYGYLWDKEAASFQLCEAEAGYVRRMAQLYEEHQSLLHVVKWLNDAGVKTRRGFAWTPTSVHVILTNPWYIGQYVYNVHSDGKGVERRDESEWVCVEHHHEPILSEDQFYRIKFLLTRNRRGTPTPGKSYARKHTHIFSGLMRCGICGSNMSASADRRRANGFRPSQYACASRRRKGTTCTNKYISDLTVGSFVLNYAANIIRAARNSAADVQPDVLERKLLRGETFKDVEGINSEAIQQLLSSFAEAGEAVEYRPQYAFTSASGEGRDMDNLRARKRKLETALSRLNALFLYDDEAMPEKDFIVERTNIERQLAETDKRIAELAATGLSSSEDSSDFLKKASYFIMVNKLIEDASVDYEKLVRTLDPTAIRDFVLNIVQEVEATDGRITAITFRNGTAHRFKYKT

SEQ ID NO: 22251 - protein, 517 aa, synthetic construct
MTKNKKADTVNEKCKAVIYARFSSDKQREESIEGQIRECTQFAKSQNLEIIGTYIDRALSARSDNRPDFLRMIADSSKGLFQYVVVYQLDRFSRSRYDSAVYKHKLKKNGVRVLSAKERIGDDPSSIILESMLEGYAEYYSAELSQKVKRGMTENVLEHKWTGGYVPLGYSLAPDKTLQIDPSGAEAVKIIYEKWLSGYRIMDIIRYLNEHNYVTSRKSKFRYNSLNRILTNPIYTGLYRWGTIEVADYAPAIITQKQFALAQEKIHHIKAHPRAKRRSANYALTGMIYCGVCGAPMTGQSGHSKSGALYHYYRCSTKNNYHDRGKKLNVKCTNRNISREKLEDLVLQTTINILMNPEAVHMIAKQAVAVQQKDPASMELDRIRDDKKIIQKKLNNSIKAVEAGIISTTLAANIAQYEKEIAELDIKMEKIKLSSAPVKIDEIAVEFFLKSLLLNKKEHDKYRLDMFQTFIRRVIVYPDKVEIQYNYTATPHILENPVTKMMTGNSECSRCERLVTR

SEQ ID NO: 22252 - protein, 602 aa, synthetic construct
MYITVTLDPNGIYDAYLRKSRADMELEKLKKFDTLKQHEKFLKDRANQLGIKIRKIYREVVSGESIQERPEMQEVLKNVETGNIDGILVVEVERLTRGDAKDQGTVTQAFKYSNTKIITLNKIYDPNSDEDEEYFEFGLFMSRREYKTINRRMQRARIANVLDGKYCASEPPFGYKKVRVKYGKGYTLEPVSEEAEIVKEMYQKRADGMGYDIICNWLNTLDFKPKKSDVWTPATIKGMLSNPIYIGKIRWNSNKQKKILINGQIIKKRRKGNNEDLILVEGLHPAIINNDLFDIVQGIKPNKASTKHNTELQNPLATLVKCADCGRSMQRRPYYDNKKQEPKLRRKYDIDKEKLRLCLREHKGEYSLRDIATALKVRKHCVDHWFASNQSKFTMPYADKWEELKKLLNINTTEFDKAITTYESNLIEPHEDTLICPKAHCTNIGSNLALVEQETIKALQEYISSQKELLATYNPAEEDDNVMFVSLSKELDKYNKQLDKAYELVEQGIYTPQEFTKRTKTIKDKITNTEKELNKYQIKLNKDRIEKLLPKIEKVIDSYYKVTSAEKKNKLLKSVISYIEYKKEKGGRGYENNFSIVIHPKF

SEQ ID NO: 22253 - protein, 536 aa, synthetic construct
MEKIIRVAAYARVSTDKDDQANSLVSQKGYFSDYITNHEGWQLKQVYYDEGITGTNTKKRTGFNQMISDAMSGEIDLILTKEVSRFARNTVDTLSYTRRLKDDGVGVIFTIDNIDTRDPDGEIRLTIMASMAQEESRKTSERVKWGQKRQMEKGVVFGRDMLGYNVNRGVLSINEEEAPIVRTIFNKYTNEGKGTWTIARELLNEGMRPKRYSLWSNTVILRVLRNEKYVGDLCQKKTITPNYLTHSKKYNHGEEEMIYIKDHHEAIIDRDLWDRTQAELKRRAPSAEQKSKYSNRYWCSGKIRCAECGNRYVSRVKNKKTCRYVAWRCYSAANYGKEKLDADGKQVGCDNGAINEKALLYCMGYCINLISENKSELKKEILREIDKIKKTTDTAVDVTKIKNQIEKVQAKKSKILDMFIEELITKQEFTSQKEMYDGDLERLNKQLSEVTDLDKMKLHQIDEMQMYIQAIDDILDFKENDELLFKEILDHIDIHKDKVLDIWLNSIPFGIRLKIKTSGKLEHFKTEVIETSFIEK

SEQ ID NO: 22254 - protein, 576 aa, synthetic construct
MKKNFKMPESGSETPIRVAIYVRVSTVYQIDKDSLPMMKQDLTSYCKYILNTDDFVIFEDAGYSGKNTDRPAYQKMMSQIRQGLFTHLLVWKIDRISRNLLDFANMYAELKDLGVTFVSKNEQFDTSTAIGEAMLKIILVFAELERNMTSERVTATMINRASNGVWNGGRIPFGYSYDKPTQVFSIDPEENKIYNFMVETYEDTQSIVHTSRRLNEAGYRSRNGNMWSPVAVWTILRNPWYKGVYRYNYYKIPGRKAIKDESEWVIVENHHSASIDPDRFDRIQATLDKNARYRNTPGRKTAQKNVHVFSGLVWCAECGSAFTASPGKLHVSGYRPSKYGCPNVRKTKTCHAKYTSDVVLGEFLLNYILNILNAQKQFACIHSTDDLQKRLLHGSTFSNVDHVDPDGLASLLNMLEKCSGSDPVLLKRPRSKPKMDPELKRMMADQKKQQRALDRLNDLYLYSDDSISEREYLVRKQQITDRLQEINEAIGMMSQEPWMRTMNDEEFIRQASSFILTQKLADKQYIYYENLAESLDPEILKNFFVSILDSIILRDGRPETVVFRNGLSHTFTYKDS

SEQ ID NO: 22255 - protein, 529 aa, synthetic construct
MSRYCIYLRKSRADLEAEAHGEGETLSRHKTALLELARRMGITISATYEEIVSGETIAARPQMQRLLSEVGAGEWDGVLVMEIERLARGDTMDQGLVAQTFKYSDTKIITPLKTFDPQNEFDEEYFEFGLFMARREFTTTNRRLVRGREASAKEGKYVGSVPPYGYRKVKIPNDKGFTLEIIEEQAKVVRMIFEWYAEGAEVNGQKKRIGPYTIAVRLNELGIKSVAGKDYWTIYGVQHMLINPVYIGKIRWGYRKVKKTVTPEGMKKKSREFAQDGDYIVVDGLHEPILSEELFYKVQDLIAANPPTPIKYRNNNVNPFAGLIFCAKCGHCLSYRKGYGRHANYLGCNIAGCDNKAAPFGLIEQRVLSILNSWVKDYSVDKAEIEHEADLNAELSSAISLAEKEIETLQDQLDNVYSFFERGTYTEKIFKQRSSAIEQQITDIGEKIDRLKAEHQQVLERQNVQAEFVPSIKHLLEIYDTLEPVEKNKWLKQIIDRMVYEKNADGKYRNVDPGDFTLGILPRLPKKGS

SEQ ID NO: 22256 - protein, 541 aa, synthetic construct
METAIDTVQQPRVVRVVRNVSTAPLTAQMIREQMIDTRLPVAAYARVSTTNEEQEDSLERQKAHYTEYIGNRPEWRFVGVYDDPGVTGTRADQRKGFQKLLADCRAGKIKKILCKSISRFARNTVDALQYIRELKELGIGVYFETQNIDTMTAGGDILITILAAIAEQESRNMSENIKWAFQKKFKEGEVVLACSQFLGYDHDKDKKIVINEEQAKVVRRIYREFLSGYACSAIAKRLTEDGIPTPSGKKQWRTGVIKSILTNEKYYGSAYLGKTCKRDVLSKERVASEEVYYVENSHPAIIPKDTWDLVQLEMTRRQEYRTCSETGNGKYSSKYPFSKKLICGECGMIYRRHAQYKRGNYVRTWVCITHKRKGNDYCSQRYILEDDVANAFQTVLKELVGDMSSIKEILEKNVVDTLGEKEDNGGEQVLLLIQRLQTEMIDINRRKRSGEIAYEAYVARAREIADQVEVLEKQQMEIQAAEDNRISETKRIKDILEAINGMHPTDEFDGEIFRRLIDNVIIKDKRLTFNFKVGISKTITI

SEQ ID NO: 22257 - protein, 498 aa, synthetic construct
MDRKIRAAAYGRVSTNSKEQAHSFENQSDYWNKKLANEPKYEYVGLYADKGISGRHLRYRPQMLALLDACRRGEVEIIFTKSVQRFARNTIELLEMVRELREINVAVVFEKENINTLTAESELYLTIAAAVAEEDLNRYGENVAWTIKDRFEKGDISVVGIRMLGYRMENKEFRIIPHEAEEVRKLFELYATGKYSTRELAEVMNEAGYRTMNGCLWTQQRVLQTLTNEKYKGDSLLYKRTNVNGQQVMNRGVKDMLYVENSHAAIINPELWDKVSELINARGNMKLRGRINESYPFTSLIKCPICGQSYIHKINNSGTKYACPIWKCRTYLACGKKGCSNSGIKDSVLKEKFIEAYNEFIENRNFGNDEDAAERELKKLNAEENELISLHVRGLISKHDYEHDKNDIRARRKALEQKVRDYRQAHIRRGAAKPITEFDEELVGRVIKGVTIKDYVVTFEFYNGVTISRAYTNGPSGNRKGWKEKKQLKEAQMNGNSN

SEQ ID NO: 22258 - protein, 579 aa, synthetic construct
MRNKSLAGRANNRAERPRKVAIYIRVSTTHQIDKDSLPMQRKDLIAYCELILGIEDYEIFEDAGYSGKNTDRPAFQEMMQKIRSGSFSHLLVWKIDRISRNLLDFAEMYEELQSLRVTFVSKNEQFDTSNAMGEAMLKIILVFAELERNMTSERVTATMISRANQGLWNGGRVPYGYSYDAETSVFSIIQDEADVCQLMKTDYFEHKSIIHTAKLLNDRKVPTRSGALWSPTAVWKILSSPFYAGIYRYNHYKGTENRTINPEEEWVLVPDHHPAIFTLEEHEKICDIMDTNKRMSNLPGQKHRAKNVYAFSGILYCGKCGSKLVSTPGRLQADGFRTTTYSCPKKRKTHECDNPSINDLIVGEFVINYILNMLNAKSSFSSISSPAELEEHLLYGGSFKDVQHISEDGLNEFYNLLSRYGSDSSCVFAVKRPRKKKAAVNPEVEALRKDKEKQERALKRLQDLYLYSERAMTEKDFIIQKNEISSRIQDINTRLGMVTHDANSTLSDEDFVRQASHLLITKKLIGREYIYYKSLAQTVSPDVLKIYMETILDSVYVIDGRVSSIIFKNGLTHTFIYKK

SEQ ID NO: 22259 - protein, 567 aa, synthetic construct
MPRAQKAAIYCRVSTLHQVDKDSLPMQRQDMINYAKYVLGIEDYEVFEDAGYSGKNTDRPAFQEMMERIERGEFSHVLVWKIDRISRNLLDFATMYAKCKKLGVTFISKNEQFDTSTAMGEAMLKIILVFAELERNMTSERVSSTMNARAAEGKWNGGRVPFAYAYDRETDSFSIRDDEAKVALELKDTYLRTHSLTYTARLLNEAGRRTRRGYAWTPATVAIILRSPFYRGTYRYNYRDESDVTFSFKSQKEWILCAKHHPPLFSEADCRQVDYWLDKNRRHHGKATHVQRKHVHIFAGLIRCGVCGSNYAASVDRARPSGYQPSMYNCGGRRQKGTCKNRYVNDITIGGFIFNYISNVIRLRTAFRPQWSLARIQRFLLHGEDLHGVASLSDGTLRRVRSILLANTVGTAEYQADRELRARNNAASQARHANLKAELERKQRALSRLTHLFLYAEDEMHEADFLREKRDLQDAITRLQGELAKAEQASVFASSMTDEEFLQKAARLLFQNAMGHGSIDFPGLALHVGNLELKNFVNAVIGQIIVLDGRVTQITFRNGEVHTFLYA

SEQ ID NO: 22260 - protein, 573 aa, synthetic construct
MAKVKLPDKPRVAIYTRVSTLHQIDKDSLPMQRQDLINYARLILNMEDYVVYEDAGYSGKNTDRPKFQEMMQQVRLGMFTHILVWKIDRISRNLLDFATMYSELKQLGVVFVSKNEQFDTSSAMGEAMLKIILIFAELERNMTSERVTAAMLSRAANGQWNGGRVPLGYDYDPETKTFTINESEAAVVKIIHDKYEQERSLVSLARYLNGHGYRTRTGCTYSPSTLLIILRNIFYCGDYRYNVLKDGDRQKRKKESEWITVKDHHPAIISREQKEEIARILKENRRLECERRGIYSKKKNVHVFGGLVICGNCGHAMTSTIRPADQDGIRWSVYVCPTKRRSEYLCKGRATSEVVLGEFVFNYILNMLNVQKNFDSINSVEDMEKMLLSGSTFRDVDGIERAGLDDLYNMLASGLTEKAPFDSSVEVRKKPVVSDIELENLNTEKTRIERAAERLQNLYLYSDDSISQKDYIIQREKLMSQLAEVNEQIGMVMSNADEKDVSDEEFVHAASKFILTQKLEGRTYIYYKRLATTVSREVLRSFVMSIIENITIYDGRVQTIVFKNGLSHTFILK

SEQ ID NO: 22261 - protein, 513 aa, synthetic construct
MPKTEEKQAVIYARYSSDRQREESIEGQLRVCEDYARRNNITILHTYADRAMTGRSDQRPEFQMMIRDAATMAFNVILVYKLNRFARNRYDSAKYKHKLKKYGVKVVSAMENIADDPSGILLESVIEGMAEYYSAELSENVLRGMTQNALEGKWPGGVIPLGYKLDKGGRLIINEEKAPIVRMIYQMFLDGMSVARIERELNDKKYTTDAGKVFSRSRVYYILHNERYIGTFQWKDIKKEGIIPPIISQESFHAVQERINAMKSSSYRTNNNYLLAGKAFCASCGAKVSGTSGKSQNGNKYCYYGCSHHHRSARYEYCETKNIRADVLEKLVCDKTHEILSSKKAIKEIARQAVKLRPRDESELEIRAIKNHISSCQKKIDNCIKAIENGVMSNALVESLNENERTLDVLKEKLAKASLMQGSGLLTEEKIQFFFETIREKAKETEKYNDILLTSLVRAVYICNEYVEIQYNYAEQLPILTNPVRIESCSYKCTNGGTIWIRTKDLFDVNEAL

SEQ ID NO: 22262 - protein, 519 aa, synthetic construct
MIVALYARYSSDNQRVESIVAQLRACREYCQRYGYTIIKEYADEAMTGTNDHRPQFQQMLRDAEAGMFEMVIAHKVDRIGRNEFDYYTNRHKLESFGVQLAFAAQGFDVSTPEGGLMNNMLVGLAAYYSRNLSKEVKKGQRENVLQGKATGGKPLFGYRYTPNKHYEIVEHEAEAVRMLFRMYIDGYGYLQIAHELNSRGYRTRLGNPFGKNSLHDLLTNRRYIGTAILGKNCMTASGKRNNHRPDHDRMLVVEDVCPAIIEKEIFMEAQEKMKQRKNRKGANSAKHDYLLSGLIMCEHCGQAMTGSTSSKKGGPEYRYYRCPKKTRLGTHVCPNRSVPADQLEKLVIGQIQELFLDPDTLDELMDKVEVNYHQMLEKVETEIKDIKKELLEVDKQIDKFYDFVCDGGDVDERAKERYRKLKEKYENLSAKLEEKEASRPANISKETIRKYIERYRREMDTGKAPNLKGTIAAFVEKITVSNSNITVKYRFEPTLSRIDKFGLYGALGGSRTHAFSSGG

SEQ ID NO: 22263 - protein, 543 aa, synthetic construct
MTDKITALYCRLSQDDMLQGESNSITNQKAILKKYAEDSGFSNLVYYVDDGVSGTTFERDGFKAMMADVEAGKVGTVITKDLSRLGRDYLKTGEYIEIIFPDYDVRYIAINDNVDTLKSENELMAFKNIFNDWYARDTSKKIRAVFKAKGQSGKPLSLPIYGYKASEEDKHKWIIDDEPAAVVRKIYKLCISGYGPTQIARKLTDDGIPNPTAYAISQGRNPANKNSRLDRWCTETVIDILEHPEYIGHTVNFRTRRKSYKNKRKIENPKEDWLIFENTHEPIVTQQEFDLVQEMRKNKRRNQKQESVNPFSGICYCADCGKKLYLCRSKSLSEEQEHLKCSTHSADKNSCSAHYIRTVVLKELVLNALNKLLDNVNDNEAEFVQTAMVNSASKHSSDVFKAKKGLNQAEKRIAELDRLFARLYEDNISGKISDERFAVLSAGYEDEQKKLKAKASELTAFIETAEQKCADVNSFIKVVQKYEHITELTPEIMHELIEKIVVYAPEKSDGHRTQQIEIHFRFDVAVDTTVADSKEYDKKKKAA

SEQ ID NO: 22264 - protein, 434 aa, synthetic construct
MERVVEQVVFPEKFPRMQNVAAYARVSSGKDAMLHSLSAQVSYYSRMIQQHPGWKYCGVYADEAITGTKDSREQFQKLLEHCRNGEIDLILTKSVSRFARNTITLLETVRELKLLGVDVYFEEQNIHSLSSDGELMLTILASYAQEESFSNSESRKWQIRKDFSNGKIGSITILGYRRNAAGILEIEPKEAELVRMIFSDYISGMGQQRIANKINEMGIPTRQGNLWTHPRIREILTNEKYIGNLLLQKYYRNNHIEKIKTKNQGELARYYVEQAHEPIVDFDTFIKVQTILDLRHKQYAHDGATNRYPLSGLITCGLCGKNYQRKQLPQGIIWLCATFLRRGKKYCPGSKQIPESILYSLICDILKLTEFDEVVFRDNIHHIVIPKPFEVQFFFHDGTSEIRHWKYPSRSESWTEEMKQAARERSRKWNEKLP

SEQ ID NO: 22265 - protein, 530 aa, synthetic construct
MEQYLIYLRKSRSDLEAEAHGEGETLSRHEHTLLELAKRQHLNVTDIYREVVSGDTIAARPMMQRVLSEVEQGVWSGVLVMEVERLARGDTIDQGIIAQTFKFSGTKIITPIKTYDPDNEFDEEYFEFGLFMSRREYKIINRRLQRGRLASAKEGKWPSGLAPFGYRRVKLKNEKGCSLEPIEEQAAIVRMIFDLYTVGLQDEDGSARPLSLGSIATRLNDMRIPSPSGSQWARITIRGIIKNPTYIGMVRWGSRETKKKVVDGKVVSVRGPADPEKECVFKGIHPPLIPKETFELANDKLARSENTSTHKEKVVRNPLAGLLVCSECGRQMTRMINPVHPDMPVVRCPRRGCPNCSSYLPIVEERVIQGLSEWMKGYELEWSSAAASSSVSSVGVREKALASAEAELRKLQQQLERTHDFLEQGIYDTDTFLSRSRMLSDKIAAAKDSVTRCSRELTEEKLRETSRRDIIPKVKNLLDVYPLLETAEEKNALLKEVLEKVVYQKLNEKRKKSPDGFTIEIYPRIPKSEK

SEQ ID NO: 22266 - protein, 513 aa, synthetic construct
MNFLNVNEILAYLRKSRKDYEFANESIEKTLERHEKILQEYAIKTFGAPIPEENIFREVVSGDTIADRPEIQKVLSLIESDKYKAVLTLEIERLARGNTIDQGIIAQTFEFTNTLIITPQKVFNLHDELDRSFFEDGLYQSRKYLLYTKKILFRGREQSSKEGKFVGSSTPFGYDKVKLTHEKGYKLIINNEEAEIVKLIFKMYIDGTGTQNIANKLNELGAKARKKGYWNANMVRNILQNETRNGKITWNKRRTIQSMENGEIIKRKPVSDDYICVNGLHEAIIDDDTWNKAQELMKKRKREKPPKNVKNPFASLIYCKKCGEKMVRRPYNNGRIETIICRNNACNNISSDLNYIEIKVLAHLKQILSEIENNYIDNIDIKKTDYDIIKNNLNIEINKLNESLKKVYEFFETGIYDKIEFQKRKEELNCEIKEKEKALKNIEIEEKNDKSEKYISAIPKIKNILQIYDKLSPSEKNELLKAFISKIYYLKEENGRWNKEARNNFTIEIELKI

SEQ ID NO: 22267 - protein, 585 aa, synthetic construct
MKQSKNVSDKLSNQKCALYVRVSTHWQIDKDSLPVQREDLINYAKYALNIDKYEIFEDAGYSAKNTDRPAFQQMMARLRTGEFSHLVVWKIDRISRNLLDFAEMYAEIKKLGITFVSKNEQFDTSNAMGEAMLKIILVFAELERNMTSERVTAVMLSRASNGQWNGGRIPYGYNYDKETGLFSINEAEASVINMIYDTYERVHSLLVVARTLNEKGILPRSGTPWSPTTISTILKNPFYTGAYRYNYHDESKSGGNTSNKFLKPKADWISVQEHHPAIVSAERQERVCEILEDNRRSNKRSSKTYVRKNIHIFAGILYCGYCGNQMQSTIDRERADGYRPSIYACSRKRRFDDCENKYISDVVVAPFVLNYIANVIKAQNNFGKSTSIETFERKLLRGPTFSEVEHIEQVGLQEMYDMLRSGISDAVYTSRTLSDIAGAEELADERDLLLAEHRKKERALARLKSLYLYNDEAISESDYIIERKNLSDSIASIDKRLEEIEKHSSRQFTLSDDEFLAKASMFIMTHHLQDKRYVDFEKLIRKVEPIIIKEFINSVTQKIVIKQGKIISIRFKNGIEHKFLYKTQE

SEQ ID NO: 22268 - protein, 540 aa, synthetic construct
MATATRRVVRTMPQMFIDVADNQSERLQVAAYARVSTEKEEQEDSFERQVEHYKQLIYSKPEWQFVDVYADPGISGTRAEKRPDFLRMIEDCRAGKIKKVLVKSISRFARNTVDALQYIRELKDLGISVYFESENIDTLTPGGEVLLTILAAMAEQESRTISSNIKWAWQRKFQKGDIILNTGLMLGYRRVGKDDEGHDVYEIKEEEAEIVRRIYREFIAGYSITQIAKRLQADGVKTKLGRESWRHNVIESILTNEKYTGNALLGKTFKPDVLTKYRQKNDGKKAPIYYVEGSHPAIIEKGLFDLAQQEMQRRRDANDNKVGGGRYSSRYPFSGMLVCGICGSKLRRQVRTMGSGKRTASWGCCNRINNGRAVCDSHHVNEDVLEATYLTAMRRLVDSAEEVVEAVRDGAELALEPENKAAMDRIDEETIQLQEAALALHKAKQRMEIGSVEYASRVKEYSEQMKELEAERNELQGTAAKYAEVRLWLDTFIEQTMQSDTLTTVDGTTMKMLVDRIHVRNDGIVVEFKCGVAIEQEYVK

SEQ ID NO: 22269 - protein, 488 aa, synthetic construct
MEKARAVAYIRVSTERDAQLHSYEFQEHYWQSAFEDDPDTELIGIYADKGISGHSVQKRPKFLVMMQDAREHKFDKIYTKSVSRFARNTTQLLEAVRELRDLGIEVVFENENIHTFQPTSEIFLTIAATIAENDLEVDSARQRWSIQHRCENGWISVGSGLFGLKLTADNELEIVPEEAAVIRYIYESYVDGGIGSKKIADALNAAGVQSRNGYPWDAKHIIGLLRNEKYKGDVIMGKSVRHFGEYHKNPNAEYAPRYYMEGTHEAIVDRDTWEAAQRILEDRSRNHCRTRIAHSFTGMIECGCCGKNYLHKVNNSQCKWQTDIWACRTYLRDGKKACGNSRIKDTVLKEKFISAYNEFIERRPQGDSMVALQEVLEDLRQQERELAELMMQRLIPKAAYEEERKSVKMQITDISEKISERRAKRVPESEYAPITEFSEEKAKRFLSKVVVTVFTVTFVFYNGAKITRTYDNGQPGNKVGWNKKKEES

SEQ ID NO: 22270 - protein, 597 aa, synthetic construct
MRTIKKIESTIPTIKTRKRVAAYARISMESERMNHSLSAQISYYNDLIQKNPDWEFAGVYADNGISGTSTAKRDEFRRMVADAEDGKIDIILTKSIQRFARNTVDLLETVRHLKDLGIEVRFEKENINSMSGDGELMLSILASFAQEESRSISDNVKWGIRKRMQEGMPNANGHFNIYGYKWDGDELVIVPEEAAVVKRIFQNFLDGKSRLETERELEADGIRTRNGCLMRDSNIKKILSNVTYTGNMLFQKEFISDPINKKRKQNRGELPQYWVEDTHEAIIDLETFQYIQDEMERRKQLGALANKSLNISCFTGKIKCPYCGVSYMHNTRKPRTSNAKRLEFWVCGSRKKKGGHCEVGASINQDNMKKVLAEVLEIDEFDDDVFLEEVDFVNVPKQYTLEIHLKDGTVVTKPCKNTGHQDCWTKEYRDRVSKQRKKNGTNPKGASVFTSKLKCKHCGCNYRRCTQPSSTSEDGKFYYWRCAERTNCKAQGLREDFLKTQLADVLGMEDWDDTTFSDKVEYINIDGYQLDIVGTGGTTISMTFDPPKRGGRHCSEEQKEHMRKVMKEKWTPERKAEMSQRMKDMRKECGRNWRKEK

SEQ ID NO: 22271 - protein, 527 aa, synthetic construct
MAKRKVTQIPATINKFTAKPVDSKKKRRVAGYARVSTDHEDQTTSYAAQVDYYTNYIKSRDDWEFAGLYSDEGISATNTKKRDGFNKMIVDALAGKIDLIITKSVSRFARNTVDSLSTIRKLKEHNIECYFEKENIWTFDSKGELLLTIMSSLAQEESRSISENVTWGHRKRFADGKVSFAYSRFLGYDKAPDGSLVINEEQAKTVKLIYKLFLDGLTMHSVANELTKRGLITPGGKTNWSQSTVRSILTNEKYKGDALLQKSYTVDFLTKKVKTNEGEVPQYYVENNHPAIIEPELFDLVQSEIQRRGKGSSRYSGVTIFSSKVQCAECGGWYGSKVWHSNDKYRRVIYQCNNKFRHKTGCSTPHLTEFEIKDYFVKAVNQLITEKAEILDNLQLIRITLCDKTDLIKQKESLEEEINVTVEMTQNIVAENARVAQNQDEYNKRYSSLVERYNKLKEEYDSICSTISDKDAKYEQISRFIKVLKGQQELITEFDESLWSSLTEKMVVKSKEEVTVVFKDGTEITVE

SEQ ID NO: 22272 - protein, 561 aa, synthetic construct
MPRKKKLQEVGGLRLVAYYRYSNGGQQTEQSIEGQRRDCEAYAKAHGYKIVHEYIDRHISGKSDSRPAFQQMISDSDSHLFDAVICWKTDRLARSRYDSIIYKTRLRRNGVKILYAAETVVDGPEGIIIEGLMESLAEYYSAELAQKLRRGQRESALKCIALGGNRSFGYDIGPDKHYCINEKQAPAVRYIFEQYAAGATAADIVRELTARGYRTSRGNPFNKNSICRIITNEMYLGVYKYADIRIEGGVPAMIDRELFNRCQTQLAFNRAHGGGKGAPRADYVLVGKLDCGLCGHAMKGASATSHTGSKHYYYTCTQHVEKKCPKTSIEKNYLEQIIVDGVAKYVLTPEKISQIVDCMMELQAKEQEPKGNPEKDALEAELAECRRKQNNILEAIEEGGSARLAARLRTLEEQEAQLTFALGEINNAPAPPQFSREALTFMFEQFRREEDEVDEEYRRRILDTFVSSILLYEDRAEVKFNITDQKTGDFERVILPISANKKPPEDDDIPSNSEGSTALRLVDEPQRRTNPCVEISPYSVIFIIPLPGKTGTLIKSICRFA

SEQ ID NO: 22273 - protein, 455 aa, synthetic construct
MECVAYIRVSTERQAEEGYGLESQKRDIDEYCRKHQLIIKEYYVDAGLSGMEMSKRVELQRLISDMAKIDVIVVYKLDRLARDTVDALYMIEKIFTPKGICVESVHDFARYETPQDKFQTQVMAAVAEYDRNTMMLRMRGGMLERVKRGFWMGGGNLPFCYSYDKELGILIPIPERAETARNALELYINGYSDGRIARICHYSGEPVARKILTSVVNIGMIPYKGKVYQGKHEPIFDIERYELAQEIRKSRHDAKSWIAHPTNLLTGLCYCGVCGCAMRYQKWGQKEDSPRKIYCCSKNIDLDYLPNYNHDCDSKPQWASDIEKQVEKQMLEISVNLSKYKPKEKETKLQIMQSQLSREKNKLKRLYILYAEGNDTVIELIKQAEEEVKRITAAIEEESKAAKNTQKKEFVYDNIKKLADVWDKIDKQTKNKILKTIISKIVIVNDNIEIQLKNF

SEQ ID NO: 22274 - protein, 495 aa, synthetic construct
MESASFPLFFLFFRRCDFSQMDKQRRQQKSLKTQTNNSPVTALYVRVSTDSQFEEGYSVEAQQKKLKQWCVLRDITNYEFYIDGGWSGSNINRPEMKRLIADIINGKVKEVIVFKLDRLSRSQKDTIFLLEDVFEPNKVSFVSISENFDTNTPYGKAMVGILSVFAQLERENIRERTRMGMYERVKSGLWMGGGMKPFGYDYDPKLNTLVPNEHAEDVKKIYDLYLQGYSTTQLANMFPVSGDRQIMMILSRATYLGKINYKGEIIEGRHQAIIDDETWKRVQAEKEKRTDRKVTKSQHLLTGLVYCGKCGAKYRYQKWGNKTVLYCYSQQKSKPNLIKDPNCDNMRLNSEPLEQLVVNDLFNMSDAYLAIADKKLLKAKNISEKGYGIQVLEQKCSVIEQKIKRLYNLYAEDNNELLLETIKENQHELEKLYNILESEKATTSVTNRIEETEYLIKNLRSRWDGLSMDEKHRVLRATIKKIIVTNGKVTIDYII

SEQ ID NO: 22275 - protein, 499 aa, synthetic construct
MNVVLYMRYSSDRQTEQSIEGQKRVCMDFCERQGYNVVGEYIDRATSAYKETAKRTNFCRMIRDSSNGLWQGVVVYKLDRFARNRYDSATYKVRLKKNGVKVISATENISDSPEGVILESVLEGMAEFYSKELSQKVSRGLNESAHKCNSTGGAIPLGYKTVDKKLTVDEPSAQIVKEAFDLYAGGATISEICEKFNSQGYRTKKGTEFNKNSFKSMFRNEKYIGTYTYKDIRIEGGIPAIIDKETFETVQKRLSANAQAPARGKARVNYLLSQKLFCGHCGANMIGDSGRSKTGETYYYYSCSTRKRFHSCKKRTIRKDLIERIVAENAMRLITPEMINTIADMAIKCNREDIESDAIIPALTADLKEINTSIKNLLKMVERGVESETLDSRLKELEKRKKDTELRLDAAKSEYLTLDKTVIVGWLSQFLSGDIEDEDFRRHLIDTLINSVTVWDEPDGGYKITTVYNLKGNTQTYRVNADGSSDMKRNSPPKKRQFS

SEQ ID NO: 22276 - protein, 467 aa, synthetic construct
MAREIVHIPARRGMSNRATVTDRKIRVAAYCRVSTDHEEQINSFENQVTYYTEYINRNPNYELADIYADEGISGTNTRRRDDFNRMIADCEAGKIDLIITKSISRFARNTQDCLNYSRKLKDLGIGIQFEKEGINTMDSSGELLFTILSSLAQDESRSISENCQWGIRSLFKQGVLHLNTNRFLGYDKDEKGNLVINEEQAAIVRRIYTEFMNGINPDVISRRLRDEGVPGCMGEAKWQASTIFGILRNEKYMGDAILQKTFTSDYLTKKTVKNEGQLEKYHVKGDHEAIIDPEYWDAVQLELERRQNYMTAHSLRTMGRYTDEQPFSNRVLCGECGKVFWRRTWYRLNNTYKVWQCGNRYREKGVVTCHSENLKESDLHGAFVMAWNGILENRAEFTETWKAQAENGNALERFRAKQMLELTKMKPLKEIDLLLVGKVLDYVIVQHGGELEFHFLDGTQLAVEVTE

SEQ ID NO: 22277 - protein, 523 aa, synthetic construct
MAKSVTTIPATLSRFTAAPINSTKKRRVAAYARVSTDNEEQLTSYEAQIDYYTNYINGRDDWEFVGVYPDEGITGTNTKKREQFRQMVADALDGKIDLIITKSVSRFARNTVDSLTTIRKLKEHNVEVYFEKENIWTFDSKGELLLTIMSSLAQEESRSISENCTWGQRKRFADGKVTVPFKRFLGYDMGPDHNLVVNPEQAKLVKRIYGMFLQGQSPFQISRTLTEEGIPSPGGKDHWNPSNIKSILTNEKYKGDALLQKSFTVDFLTKKKKTNEGEIPQYYVKDNHEAIIDPETFEMVQTLMTTRTKGRNRKSSVSIFSSKVKCGDCGSWYGPKVWHSNDAYRKVIWQCNHKFDGQKCATPTLTEDEIKELFLRAANQVNDQKEQFIAIYDQVLSRSLNTTALESELSDLEAEINIAAELIEDCIKENAHVALDQDEYQKRYDALVARFDKAKARHTEVTDLITERMARKHQIEAYLKNLRSREPLTEFRETDWLAMVDYITVHSKKDIRVTFKDGTEIKA

SEQ ID NO: 22278 - protein, 582 aa, synthetic construct
MAKHAITIPQTPKAALYIRVSTDMQADKDSLPLQESDLRKLADLNGINDTEVFCDAGFSGKNLNRPAFRSMMDRIRAREFSHLYVWKLDRISRNLLDFLELYDELKCYGVAFASKNECFDTQSPGGEAMLKILLIFAELERKTIAERVTAVMLGRANENKWNGGRVPFGYMPGPVTTDANGKKCKSWPVPDPIEAPIVRAIFELYLREKALKKVAAALNTAGYRSRKGTLWSDTTVRCILKNHFYKGEYVYNRQNPNAGRREDFYRSENDWVVVTGQHEAIVPEETWRRCNEMLSKNRSWLAPIGSLVSAQDKYIFGGLLQCAECGYTMNSKDRTRIHDHTHSSYYYCTGRWKAPAVCTGEHSGYASDRVLLPQILKLIARMIEACANAIKFASAEQLVSYLLNDNLIPGATGIEEAQRIYMIVRAHVKHIYGVDQTNQYNPNALLVEQSQKEKEKQERALSRLKRAYLFDDGDMSEAEYFEQKAAIEGTIAKLDKQIKSLSGNDIGADEGYLAQLSKLIMIKKLQDTNSDFNYYKLAKAISRKPIHDFLAEIISRIIMGEQNRIIKIIFKNGVSITFQYAK

SEQ ID NO: 22279 - protein, 529 aa, synthetic construct
MAKVTIIPSTINPITKLPNNGLQKRKVAGYARVSTILDEQCSSYQAQVDYYTNLIKRNPEWEFVEVYADEGISGTNTKRRGGFNQMMQDALDGKIDLILTKSVSRFARNTVDSLTFIRKLKEKGVEVFFEKENIYTFDSKGELLITIMASLAQEESRSISENVTWGKRKAFSDGKVSMPYKHFLGYKKGEDGRPTIDEKESLIVKEIYSLFLKCGYSTTKIAKEFNERGICTPSGKGKWTLTTVESILSNEKYKGDALLQKKYVVDFLTHRSKPNEGEIPQYYVENSHPAIIDKVEWDLVQIELERRKKLCKTYSSKNIFASKLVCEDCDSFFGRKIWHSNDEYKAIVYQCNGKFKNKDKRCNTPTLREEEIKSMFLEAYNKFVLDKTALEGDCKLMIETIADVSLLDEQISKQIEKLEELAKKVKELVSSNASTPELQIDYINDYDKLCTMHSIEETRYKLLLKEKSGRLAKAKSMELFIESIKDKPDVIDSWYSDLWILLVDKAIVHHDKSITFVFKNMKEITIAAK

SEQ ID NO: 22280 - protein, 419 aa, synthetic construct
MCAYARVSSDKDAMLHSLSAQVQYYKDYITSNNDWLFVKVYYDEGISGTKQDRPAFQQMLQDAKDGKIDLIITKSISRFARNTVTLLEAVRKLKSYDVDVYFEEQRIHSISSDGELMLTILASYAQEEARSVSENMKWRVKRNFEEGKPWGRAPYGYTIENSKFVIVPKEAEAVKLIFKLYLDGIGSYRIKDIMNKSEYPTRNNCLWTETTIRGMLKNYIYTGNAVFQTTYVKNYITKKKAKNNGEKPMYHVEECHDAIISIEDYNKVQKIIKERNEKIHKSITPKDNPFKGKLICAHCGCTFRMKKNYKKYVWRCGTYIRLGSKGCLSKQIPNDALQSLSKEILGVDELTSEIIDERIEKIIVGDDRLLTFYLKNGSKIDAHWMQKSRSESWTEEMKENARRKAVEIHGKSNNNPIND

SEQ ID NO: 22281 - protein, 480 aa, synthetic construct
MFGGETLKKTITEISPKDTKSKKVTTKSKLNVAAYCRVSTESDEQMNSLANQKEYFEKLIKSHADWSFVDIYYDEGISGTSLKKRDGFNKMIADALAGKIDMIVVKSISRFSRNTVDALQTIRNLRNHDIRIFFEKESIDSNDIKSEFMLTIMSSLAQEESQSLSENVKWGKRKIAQKGFVQIPYSNVLGFQQKGKYGIEIDREQAKTVVLIYDMYLHGKTTGEIIKKLIEDGTPTPTGLEASHWCNTAILSILRNEKYCGDAILQKTYTKDFLNHKKCINYDAFPKYYVKNNHEEIIPRATWEYTQELLEKHSKRSVNVRYGELIFCSACGRKYRRFHRYHKYYKETILSYRCLGKYDKSVNCSNIKLFEKQLDEIYHATVLQLLAFYKEELIGYFNIMIPKVIDGKRKSNKILKLLNNMDTFAQSDYEYDSLHILIKKIVVFPERALEFSTLDDSIIKMTIPKYRLVEHYGRKKASGN

SEQ ID NO: 22282 - protein, 576 aa, synthetic construct
MKKNFKMPESGSETSIRVAIYVRVSTVYQIDKDSLPMMKQDLTSYCKYILNTDDFVIFEDAGYSGKNTDRPAYQKMMSQIRQGLFTHLLVWKIDRISRNLLDFANMYAELKDLGVTFVSKNEQFDTSTAIGEAMLKIILVFAELERNMTSERVTATMINRASNGVWNGGRIPFGYSYDKPTQVFSIDPGENKIYNFMVETYEDTQSIVHTSRRLNEAGYRSRNGNMWSPVAVWTILRNPWYKGVYRYNYYKIPGRKAIKDESEWVIVENHHPASIDPDRFDRIQATLDKNARYRNTPGRKTAQKNVHVFSGLVWCAECGSAFTASPGKLHVSGYRPSKYGCPNVRKTKTCHAKYTSDVVLGEFLLNYILNILNAQKQFAYIHSTDDLQKHLLHGSTFSNVDHVDPDGLASLLNMLEKCSGSDPVLLKRPRSKPKMDPELKRMMADQKKQQRALDRLNDLYLYSDDSISEREYLVRKQQITDRLQEINEAIGMMSQEPWMRTMNDEEFIRQASSFILTQKLADKQYIYYENLAESLDPEILKNFFVSILDSIILRDGRPETVVFRNGLSHTFTYKDS

SEQ ID NO: 22283 - protein, 546 aa, synthetic construct
MEETIKAVGYARFSSSMQREESITAQKRYMMMYAKRNNMEVIDWYCDEAKSAKTVNRPAFQKMINDAKNNPEFKAVLVHKTDRFSRNLSDSIQYKKLLEEYGVQVIFVNERFENNPESHLLYHIMGSVNQFYNENLAREVMKGLKENAYQCKFTGGRPPLGYDVDKDLKLVINEKEAEAVRLIFEMSAEGYGYGETIDKLNILGYKTKKGLPFVKNSLYEILRNEKYKGTYIFNRSCSANSLNKRNNHRRKPEEEIIRIENGCPAIVSSGLWHRANAVKKATRSSYTNAKNTYLLTGLIHCGECGGKFHGNVRYNKNNTNLVYRCSSKKNKRKCESKEIRCEYLDSFVIDKFVEFFFNDDNIKVITKQLNEQYNKSCISDLEYNEAKSTLKILEKSRNNLVEAIAKTGINDIMSDKIKEYEEQIKKTAEFIQKYEKQKIDRVITEDEIREQINHLKDYFYNPKNLIRTKYVLSQYIDRIDISNENVQVKFKVSMSPSDNTDGDCFCVHTEMIKRKYLFDYVCEKVDFEQWNIEKLNKSETEHRKGT

SEQ ID NO: 22284 - protein, 524 aa, synthetic construct
MKVVIYARFSSHSQTEQSIEGQLKVCYEYAEANHYTVVGEYIDRAISGTTDNRAEFQRMISDSDKHTFEGVLVYQLDRFARNRYDSAINKAKLKKNGVRVLSAKENIADDASGILVEGVLESMAEYYSVELSQKIHRGMAINAEKCLSNGSNPGLGFKVDAERRFYVDEEEAAIVREIYERYASGETKAEIIRDLKRHRVKTSLGKEFSPNSLSHLLSNKRYIGVYLYKGKETPGGMPRILDDDLFYRVQSMMNKNKNAPARTHGEGEYLLTTKLFCGHCKEMMVGYGGTSKTGRQYHYYMCKNARRKKCGKKIVSKSYIEDRVVNECLKMLTEEKIRFIAKKVAEECAKSPDNLTAKALKKAIREADTAIENLWKAIEQGQVVEMLTERLNKRMAEKAELEAQLAIEENKKITLTEAQILAFLDYVCEMPADDVNKRRAIINIFVHSIYLYDDHFTLIINASKKPLSIDNIPLDDIETAFEGETGASEGCSSLSTPAPPNKNRNFDTKRILIAVHFLSLKNGL

SEQ ID NO: 22285 - protein, 519 aa, synthetic construct
MKKITKIDKIQPSQTSKKKLRVAAYCRVSTDSDAQLESLDAQKEHYKNYITSRDDWTFAGLYFDEGITGTKADKRPMLLRLIEDCKAKKIDFVITKSISRLSRNTTDCLEIVRTLLSLDIPIYFEKENINTGSMESELFLSILSSMAEGESTSISENNKWSIKKRFLDGTYKLGYVPYGYRWKDGEILIDSAQAEIVKRIFRELLSGKGTEAIAKELNQEQVSTKKGGRWTSTSIRDIIRNEKYTGDCIFQKTYTDSNFNRHKNDGHLDQYYVPDHHEAIINHEDFEAAAALIEQRASEKGITKGNAKYQQRYAFSSKIICSECGNTFRRRIHSSTYGKYVAWVCNTHLEDTSRCAMLYIRDDDLKLAFTTMINKLVYCHKLVLKPYLKALQENTGDASLLNIQQLEILLEQNTEQRETLHKLMGQGYIDQILYTQENNALLSQAGEYRNQIELLNRSQSLDATKVYETERLIHFCEREEMQLEYSEELFELFVDHIEVYSRQKIGFALHCGLILKEMI

SEQ ID NO: 22286 - protein, 480 aa, synthetic construct
MFGGETLKKTITEISPKDTKSKKVTTKSKLNVAAYCRVSTESDEQMNSLANQKEYFEKLIKSHADWSFVDIYYDEGISGTSLKKKDGFNKMIADALAGKIDMIVVKSISRFSRNTVDALQTIRNLRNHDIRIFFEKESIDSNDIKSEFMLTIMSSLAQEESQSLSENVKWGKRKIAQKGFVQIPYSNVLGFQQKGKYGIEIDREQAKTVVLIYDMYLHGKTTGEIIKKLIEDGTPTPTGLEASHWCNTAILSILRNEKYCGDAILQKTYTKDFLNHKKCINYDAFPKYYVKNNHEEIIPRATWEYTQELLEKHSKRSINVRYGELIFCSACGRKYRRFHRYHKYYKETILSYRCLGKYDKSVNCSNIKLFEKQLDEIYHATVLQLLAFYKEELIGYFNIMIPKVIDGKRKSNKVIKLLNNMDTFAQSDYEYDSLHILIKKIVVFPERALEFSTLDDSIIKMTIPKYRLVEHYGRKKASGN

SEQ ID NO: 22287 - protein, 529 aa, synthetic construct
MAKVTVIPSTINPITKLPNNGLQKRKVAGYARVSTILDEQCSSYQAQVDYYTNLIKRNPEWEFVEVYADEGISGTNTKRRGGFNQMMQDALDGKIDLILTKSVSRFARNTVDSLTFIRKLKEKGVEVFFEKENIYTFDSKGELLITIMASLAQEESRSISENVTWGKRKAFSDGKVSMPYKHFLGYKKGEDGRPTIDEKESLVVKEIYSLFLRYGFSTTKIAKEFNERGICTPSGKGKWTLTTVESILSNEKYKGDALLQKKYVVDFLTHKSKPNEGEIPQYYVENSHPAIIDKVEWDLVQIELERRKKLCKTYSSKNIFASKLVCEDCDSFFGRKIWHSNDKHRTIVYQCNGKFKNKDKRCKTPILREEEIKSMFLKAYNHFVFDKTALVDDCKLMIETITDVSSLDEQISKQIEKMEELAQRVKELVSSNASTPNLQTDYINDYDRLCTMHSIEETRYKLLLKEKSGRLAKAKSMELFIESIKDKPDLIDSWNSDLWILLVDKAIVHHDKSITFVFKNMKEITIAAE

SEQ ID NO: 22288 - protein, 436 aa, synthetic construct
MQITKISATKKLEKKKLVCAYARVSSDKDAMLHSLSAQVQYYKDYITSNNDWLFVKVYYDEGISGTKQDRPAFQQMLQDAKDGKIDLIITKSISRFARNTVTLLEAVRKLKSYDVDVYFEEQRIHSISSDGELMLTILASYAQEEARSVSENMKWRVKRNFEEGKPWGRAPYGYTIENGKFVIIPKEAKAVKLIFKLYLDGIGSYRIKDIMNKSEYPTRNNCLWTETTIRGMLKNYIYTGNAVFQTTYVKNYITKKKAKNNGEKPMYHVEECHDAIISIEDYNKVQKIIKERNEKIHKGITPKDNLFKGKLICAHCGCTFRMKKNYRKYIWRCGTYIRLGSKGCFSKQIPNDALQILAKEILGVDELTSEIIDERIEKVIVGDDRLLTFYLKDGSQIDAHWMQKSRSESWTEEMKENARRKAVERNGKSNGDSINN

SEQ ID NO: 22289 - protein, 640 aa, synthetic construct
MRTALYLRLSDEDKLKVDNLSESIKNQEIMLKDYAKEKGYEVVSIYNDEDWSGSDDTRPGFNKMLEECRKGNIDIVLCKTQSRFARDMELIEKYIHNLFHQWNVRFVTVVDRIDNMQKESRKTSQILSLTDQWYLEDTSINIRETFRAKRKEGKLTASFASYGYIKEPSNKNHLIVDKIASSIVKRIFNEYISGVGVEKIAYKLNNDNILSPYEYKLLNGSKLKIPLVKNYLNYEYIKSIGTYIVDINFTNNEDGVLYNFSCLNTINFDGKGEITIKKCSQGNLYCVVDGKLKRLNIDDTINCIDYIIFKTDKIINNHNINYQFEISLKENKAHKKYYIKVTNENIKNSNFICNIRKKFKWSSASIKKILKDEVYIGNLVQFKTTTVSYKNHTLIYNDETERIRKNNTHEPIIDKNIWHQVQERLKNKTRSLKSGKIHTFSNKVYCMNCNQTFKKCGKNNEQGFSYLCCKDKINKWNYCDNKKYINEEVLYNFVLNKINELLTKYYDEDYINELYKKDILKEQNKELIEIENEIDFINNKLNKKDLYFKKLYDDYNNGIIEKREFSILISNYRDDYEKLKNRIKTLENSRDNNNSLKQFDSSLYKKIDNLSIDLVDTFISKILIGKYNNNSRNLKIIWNF

SEQ ID NO: 22290 - protein, 684 aa, synthetic construct
MSILQTIKTIIRVVLYLRLSDEDKNKLSKEELSQSIKNQEIMLRDYAEEQGWEVVGVYNDDDWSGSDATRPDFNRMIEECKNGNVDIVLCKTQARFARDMELVEKYVHNLFHEWNVRFITVVDRIDNARKETKKTSQILGLTDQWYLEDTSLNIRETLKSKRKDGQLTSSFATYGYMKDPENKNHLIIDPISAEVIKRIYDEYLSGTGLDKIARRLNEDKILSPYEYKLLNGSKLKIPVIKDYVNYGYIEKTGTYMLDVSFTNKEEYILKDLVSFNYITTDMKNFNNKCDIVLKKYTNNRTKIYYSENDNIDINNFNINDCILLNENDVIPKTAKVIISYTKELDRTHTINYQFEITLKENRKHEDYYINICGKATDEIKKSDFIHNIRKKFKWSSSTIRTLLTDEVYIGNMVQFKSTTVSYKNHTVVWNDDETRIRKDNTHEPIIAKDIWYTVQERLENTARSCKGGTVHPLCNKVYCSNCNQIFTKTGNRRSDGTGYLCCKDKKTNWSNCDNKASIREDQLHQFILEKMNEMLKKFYEEDDLKEMQNEVIEQDLYKDKLNSLEKELQSINKELQGKSTYFQKLYEDRTNGILPEKEFLILMNKYKDDNEKLEERQKIVKKEISSTLAKKETVKTKKNIFKKYRHIEELSIEIVEDFIDKILIGNYDETTNSRDIKIIWNFTI

SEQ ID NO: 22291 - protein, 464 aa, synthetic construct
MARSVTVIPARNRQRETGRRAVQEKKIRVAAYCRVSTDQEDQLHSFEAQVDYYTKYINDHENYEMAGIYADEGISGTNTKKREQFKKMIADCEGGKIDLVITKSISRFARNTQDCLAYSRKLKNLGIGIIFEKENINTLDSTGELLFTILSSLAQDESRNISENCKWGIRTKFKNGEMHLNTFKFLGYDKDENGKLVINKEQAKTVRRIYRDFLIGINPAQIAKELTEEKVPGCNGQTKWYPSTIVGILKQEKHMGDALLQKTYTADFLTKRQVKNNGEIAQVYVKDSHKGIIDKQTWNAVQEEFDRREKFMEEHGTERYSYGADCMPFCEKVFCGECGSLFTRHSWRSRGIVQWQCKNHRKDGKVACTNAYVDNADLEKGFVKAFNRLVMDRDKHMERWNQMKTDGSPLEKIRAEQMMEATENEPLGRFVPEIAQLVLAEVTVLGVKKYEFFFQEGSRVKVSV

SEQ ID NO: 22292 - protein, 492 aa, synthetic construct
MSDIAVIYARVSSKEQETGGYSLPAQLDFLKEYAKSKGLEVVKVFTESMTAKEAGRIEFNNMLKFAKKQRYGCHVIVEKNDRLLRNEDDEALIINLTVRQGLIDLHLVKDHLILNRYSTPHEIFMFHMMCGMSSMYPRNLSGEIKKGLDKKADLGDYPAKAPIGYKNVRSSKKRSTIEIDPTNAGYVSKIFELYATGMYSYKTLAERISLDGFYPKNKPCSPKLVEKIIINPFYMGEFEFNGKRYHEANHTPIITKELFYTCKKIRERHDNPRKITHDFLYSGLITCSHCGCQLTAEIKKGKYIYYHCTGNKGGTCKRNKYLKEEYIDEHIRTLLEKIQPSKEDAKAIVEKFKEIVNVNFDYDKKSMEEIGKKISLLKNRLNKLYIDRLDGMITDEFYREKKNEFQGELDELELKHDNFLAETDTLVDMATQIIELCKNAYNHYLRSDNENKRLLLKILCSNFLYDGSNLVIKLKSTVEPMLLGANFNNGGR

SEQ ID NO: 22293 - protein, 558 aa, synthetic construct
MAKKKKPAGGVAIIYARYSSHNQRDVSIEQQIEACRKHAAELGLTVVATYEDRAISGRTDNRPAFQRMMRDAEDGKFGYVLAWKSNRMGRNMMQAMVNESRLMDCGVKVFYAEEDFDDSAAGRFALRSMMNVNQFYSDNLAEDVRRGLMDNASKCMANGRQPLGYKRGEDGRVVVDEPAAAIVREVYARVASGEMFMDIARDLNRRGVKTQSGSEWNKSSFNVLCRNERYRGIYIYGETRIEGGIPPIVDDVLWYKVQEVIKVKKSKNRHHRPSDEDYLLTGKLRCGKCGGYMIGMSGRSKTGDVHHYYACQNRRVGHTCDKKNIRRDVIEPAVAQAIRQYCLTDDAIEWITDQTIAYWEDEDRKLQIDSIENDLAAVQSSISNVMKAIEVGVITETTRDRLIELEKQQTDIKSKLALAKDEIVHVDRKDLISSLLAFRHGNVHDRAYQEKLFNAFLIAVYVYDDDHLKLVFNSFGKDDTVSIALDLGENDDSSELSDASRSSPTLSNGQPKKNQSNMFGWFFFLCFPYEQKCSAFKIYSICTEAANQDSRALYFMVL

SEQ ID NO: 22294 - protein, 534 aa, synthetic construct
MVTLDTIENGITYRRVSSKEQEKGYSLEAQDVFLKEYAFKNNIKIIADFCEAESAKCSGRKQFNEMIKYLKEHPKTALLVEKTDRIYRNLKDYVVIDDLMNNGLELHLAKENVVMSEHSNSHEKLFHALKVVLAKNYIDNLREESSKGQIQKAKDNIYPTKAPLGYINEPDEITKKPIIKIDFERAKYVQKAFELYASGDFSALAINNILYNEGLRTPKGRKYAKSTIERMFKNIFYIGKFEYRGIVCEHAQHPPLIDERLFYKVQARINSASDKARSHNVDFAYSNIIKCGVCGGVLTGELKKGKYIYYHCNDYYQKGCKRDSYINETKIDEAIIEILKRLNFDNDFVKSVLNCVKDIHARKNEYNATSEQNIQKQIEKLNKRIETVYNDKIDGNITEDFWRTQNKIYHNEKNALIDKLKYLNNSDEKFYNNAEILLNWCKNSYETFKNGSNADKRFITKILVSNITYSAKKLDIELKPVFYGMLKNSKNNATIEPTQIRINTKKQPLNEAVLLNGGTDEARTRDLLRDRQTL

SEQ ID NO: 22295 - protein, 521 aa, synthetic construct
MKKVTKIEGAQNNITIKKKLRVAAYCRVSTDSDAQLESLEAQKTHYERYINSRENWQFAGLYFDEGITGTKAEKRPELLRLISDCEAKKIDFVITKSISRFSRNTTDCLALVRKLQSLDIPLFFEKENINTGSMESELFLAILSSMAEGESTSISENAKWSIKRRFQNGTFKLSYTPYGYDWDGENVVVNPEQAKIVKRIFADVLSGKGTQAIADELNADGITSKKNSKWTATTIRAILANEKYTGDVIFQKTYTDENFNRHINYGEVDQYMAPDHHEAIISHEDFDAANALVAQRASEKGIEKGNGKYQQRYAFSGKIICGECGDTFKRRIHPCTTYKYVAWTCNTHLKDTTACSMKYIRDDEIKAAFVTMLNKLIYGHRLILTPYLKALENSSGDEAIQRIQHLELLLAQNSEQRETLTKLMAQGYIDQILYNQETNSLLLQAETYRSDIEAINICMTGDSAKVTETNLLLHFVSHTDMLKAYSEELFESYADHIEVASRHEIRFVMKCGLTFTERIGD

SEQ ID NO: 22296 - protein, 522 aa, synthetic construct
MGNVMLIPARRQVGSNARKKEEEKPKLRVAAYCRVSTDSDEQATSYEAQVEHYTEYIQKNPDWEFTGIYADDGISGTNTKKREEFNRMIDDCKAGKIDMIITKSISRFARNTLDCLKYIRELKDMNIPVIFEKESINTMDAKGEILITIMASLAQQESQSLSQNVKMGIQFRYQQGKVQINHNRFLGYTKDADGNLVIDPEQAEIVKRIYREYLEGLSMDKIAAGLERDGVLTGAGGKKWHTSTINKILRNEKYIGDALLQKTYTTDFLNKTRVKNNGLMPQYYVEGNHEAIIPKEIYLQVQEELVRRRVVKTSANGKKRSYSCNHCFSQIVICGECGEMFRRLHWNNRGVKSIVWRCISRLESTGLECHARTINELVLQDAVVKTINQMLGDKSSYQAQLQLNIASVIRASQATSVENIDEKLMALQQELIQKAQSKEAYDEIADEIFRLRELRQQTTVDTAARDEQIKRINDLQDYIAQQTAHLTEFDESLVRRWVKQITIWDDRITVELKSGVSIDVDA

SEQ ID NO: 22297 - protein, 477 aa, synthetic construct
MRDSKSKTVIIYNRVSTIMQDKNESLTEQTDECIRYCKTNGYEIYKILKDVKSGTKDDRAGYLELKKHIRRRDFDILVVLETSRIARKMKELVLFFSLLNENNIEYISIREPNYNTTTPDGKFAMNIRLGLIQFERDNTAERVTDRLYFKASKGQWVNGKPPIGYKLVNKRLEIDEEKAEIVKNIYEDFLNGYSLNQINNKLQFSWGSKQVKRILTNPTYKGYIRYGTRSNRKKNNREAFIVKGWHEAIIPEDKWEKVQEMYKSLNRKASNTKPTLLGGLLKCKECGNNYIRKRGGSYDKNLYYGCNLNNLRYSDKFFYKDILECSSATIKGDLLEKAVIDTLKKQINNLNFNDIEIEKKRQVNIKQIDSSINRFKNRLNKIYELYIEDEIPKDKYLKDKKDIEARIISLEKQKKSFGEIEVEKSNNEMIQEYFSKIDLSNIEEANRILKIIVNKIVVYKKKKTPKDDFEVEIYLNI

SEQ ID NO: 22298 - protein, 687 aa, synthetic construct
MQSAFFFIPFFGSWRKGLFMAYVRNKKKILKFWSKKKAALYVRVSTRYQVDKDSLPFQRKKLKEYCKFLGIEDFVIFEDDGYSAKNTDRPHFQEMMSRVRDGEFSHLIVWKVDRVSRNLLDFAAMYQELKDHKVTFISMNEQFDTSTAIGEAMLKIILIFAELERNMTSERVTGIMLDRAEQGLWNGARMPVGYRWNPEIKFPEPDPEETKIVQFIFDEYERVRSTTKIARYLNHNQIASKRGGQWTSKLIRDIIRNPFYIGTYRYNLRESGRGPLKPESEWIVRENNHPAIITKEQFDRCNAIMDENGTSRDTSELRARKYVHTFSGRLVCGKCGANMIASKDRARANGWRPSMYRCAQRSRMMDCDNSKTVNESYIGPFIFNYVANLARIQKNFKNIKTLERLEKELLKGPEFENMKVSKESLRRTFDALAFQEVGKGAYLPDIDLSDGDDDYTAAEQLSILKRELDKCKTAIDRLTDLYLYDPDSMTKEEFTKKKRDLVNKIAGYEKQIEASQATGDKDDLADLEFIRKASAFLVAQRIVSKKHVDYIQMALDLDNEILKDFVDQVIDRIEILEGRVRSIRFVNGLVHEFTYSTPADLPVCQKCGGRIGSTCGCRTRTFDFAGKPYRRIKVGDPGDKFHGVAGAVCPECSAQAGRWHHWKCGIERCPICGEQLIACEHGPNGKD

SEQ ID NO: 22299 - protein, 525 aa, synthetic construct
MMNELRPDDLSNIIIYLRKSRSDDPYMSVEEVLAKHETQLQEYAASVFGMPVPEEQIFREVVSGETIADRPVMKEVMKLLELGNIKGVLVIEPQRLSRGDLEDCGRIINVFRYTNTLVITPPKTYDLSNEYDRKFFEMELTRGNDYLEYTKKILNRGRIAAVKQGHFLGSIAPYGYKKVTVGTGKTAYHTLEVIPEEAAYLRIMYDLYVNQGYGFTKIARHMDAIGAKPRISSHWSAAAIKDILENPVYIGKIRWNWRKTIRRIEDGEIVKKRPKTKDVSDWIYVDGKHEAIIDDTTYAAALDRKGKNPCLHTAKELCNPFAGLLFCGSCGRGMSYKAYVKKPDYVVMLCNNQALCHTKSVQYHLLVNKVVESLEKEIADFRVNLQSDADQAEKLRADRIKALEYELKKLRERDSRQKDAYEDGVYTKEEYTQRNAKLMEKIEIARAALRTARAESLTAVNYAERIQRFQNALDALLDLRSTATEKNMLLKSCIDKIVYHNDNVSRPGYGRWVENTFSIDVYFKL

SEQ ID NO: 22300 - protein, 581 aa, synthetic construct
MYGLNSDFQKRDVAIYARVSTEHEAQLSALENQIDWYKPILEARPDWTLTAQYIDEGITGTSAEKRPRFMQMIEDARQRKFDMIITREVSRFARNTVDTLQYTRLLKEYGVEVFFINDNIKTFDGDGELRLTIMATLAQDESRKTSIRVKAGQQTSMQNGVFYGNGNILGYDRVGKEMVINPEQAKTVRMIYDMYLSGMGVTAIQYELEKAGRLTAMGKERWFSSYIAKMLRNSFYCGIITYHKEYTPDFLKQKKIKNYGDLEYVQVQGTHEPIVTVEEYEQVQKLMDAKSVVMKNHNKGKRRVGRMQHTTAFGRLMICQCGNKFNLRFHSRDGRTDGVDYQCYTSVNRGSVAKRLNKGISIEHSCESPYIQGWKLEMMAEQVFDRYIENADKVMDLSYAMLEKHIADQEELPDNTDVIQRKQGEIEKLMNKRTNLIEMRAEGDIDKEMFRSKKQEIENRVAKLTEEIKGLQPKKEPTSNEDYSAKLLELRERLKEYTGFDYSVIPESIVEAFVERIWVSKDEFRWYLRTGSKEKGEFDPDNHIKIGSFTLTIDDAKKYIYSFSTRRRVYKWVDLNVSVWI

SEQ ID NO: 22301 - protein, 524 aa, synthetic construct
MRNDPILSLSHVIIYLRKSRADDPNMSVEDVLASHERQLQEYATKTFGSVIPESQIYREVVSGETISDRPVVQQVLRLIESEDIRAVLVIEPQRLSRGDLEDCGRIINLFRYSQTYVLTPMVSYDLCDEYDRKFFEMELTRGNDYLEYTKRILLRGRLAAVKQGDYIGNVAPYGYRKAVIADGKKRHHTLEIVPEEADAVKIMFTMYADGTGFPTIAHHLDALGIIPRNGDHWKVATLKDMLENPVYIGKIRWNWKKTRKVVEDGEIRKIRRRDENCLLFDGLHPAIIDKDLYDRANAIRKSRPHVRKNSQLSNPFAGLLFCECGTAMSMKRYVNHGRSGDRVLYSMICNDQTYCHTKSVSYSDFLDRVISVLRDAIKDFEVKLSDDCTGATIALEAHIRALESNLNQLRKKDERQKDAYENGVYSLSDYIARNAKIQDQIRKTTAALDTAKSTPLPSVDYSGKIVKFQACIDSLLDDSVSAVEKNRLLKECIERIDYHNDMPSLPGVGRHVDNIFDLKISLRL

SEQ ID NO: 22302 - protein, 570 aa, synthetic construct
MGLTSSNKTLRVAVYGRVSTEHEAQISALGNQIQYYQNIINEHPDWTLVEQYIDEGITGTSYRKRPSFLRMIKDAKSDKFDLIITREVCRFARNTVDTLVYTRELKKYGVEVYFIEDNIWTIHDDDGELRLTIMATLAQNESKKVSERVKAGQMISFQNGVFYGNGNILGYDRIGRDYVINEEQAETVRMIFDLYEQGHGIRHIQFALEQAGRKTATGLTRWHPKTVNNVINNKFYCGIIEYNKQYVPDFLEQHKINNHGAVERTIVQGTQPIIISKEQFDHCQEIKQSHLKVVNDRRQGIRPPISVWVTKLKCSCGGTWNRKAWHTTKDGVKQYAFQCYKQIRTGTVATRKRKGLSTEGICTAPMIPQWKLDICASELVKFLLKEKTHIVQSANEMLQNCLDLDETEKHLKALNQYENELLKIKARISNLIDLEINGDISREIFRQKQNELQRKVETISEKVNRETAILNSLSGDSDSLESRVKFLKSVIEDLADFDTDNVPDYVIDALIQEVLVDGNDIHITLNGDSGYVDMKLPTKKKDTTCIYNADCDIITNIPHLADCNTGRDQK

SEQ ID NO: 22303 - protein, 511 aa, synthetic construct
MNAAIYARYSSDNQRAESIAAQFRFTREYCRQKNYAIVKEYKDEAMTGTNDNRPAFQRMLKDAALGLFDVVVMHKVDRAARNEYDYYTNRHRLEVCGVRVEYAGTAFDTSTPEGRFMEAQLVGMAAYYSRNLSNEIKKGQRENLYEGKCTNGSLCFGYKTNAEKYIVIDENKAPAVRYIFDEYAKGTPYRVIKAWLRDHGFKTARGNDFTSVTLHDILVNPRYKGTAILGRNRKYPNGKRNSHRPLEDAEYTLDNAVPAIVSKSTWERVQIRIKQNRHNKHGNRSAHKPYLLTGLIFCGACGSSMTGTIVKKGHSDYRKRYYRCNRKLRYNSDVCPNKMIDADALEKIVIERLEKVMLSEKFLDRIVKEVQNAYAQIVGNAQDELAILEPKVKKLRKSMDMIYTLIEDGAADEYDIQRLRGVQSQLHIIEAKIKEVTAKRDVSAVTEKDVRKFIKERYVPFIQKYSAENNFRAIIEELIDRIEVDVNSVTIHYKLAYEWCDWRDSNARPAA

SEQ ID NO: 22304 - protein, 585 aa, synthetic construct
MKQSKNVSDKLSNQKCALYVRVSTHWQIDKDSLPVQREDLINYAKYALNIDKYEIFEDAGYSAKNTDRPAFQQMMARLRTGEFSHLVVWKIDRISRNLLDFAEMYAEIKKLGITFVSKNEQFDTSNAMGEAMLKIILVFAELERNMTSERVTAVMLSRASNGQWNGGRVPYGYNYDKETGLFSINEAEASVINMIYDTYERVHSLLVVARTLNEKGILPRSGTPWSPTTISTILKNPFYTGAYRYNYHDESKSGGNTSSKFLKPKADWISVQEHHPAIVSAERQERVCAILEDNRRSNKRSSKTYVRKNIHIFAGILYCGYCGNQMQSTIDRERADGYRPSIYACSRKRRFDDCENKYISDVVVAPFVLNYIANVIKAQNNFGKSTSIETFERKLLRGPTFFEVEHIEQVGLQEMYDMLRSGISDAVYTSRTLSDIAGAEELADERDLLLAEHRKKERALARLKSLYLYNDEAISESDYLIERKNLSDSIDTIDKRLEEIEKHSSRQFTLSDDEFLAKASMFIMTHHLQDKRYVDFEKLIRKVEPIIIKEFINSVTQKIVIKQGKIISIRFKNGIEHKFLYKTQE

SEQ ID NO: 22305 - protein, 566 aa, synthetic construct
MINRYERLNQELKMVETKRKVAAYCRVSTDNEDQANSFESQQRYFRQYIERNPDWELYEIFADEGISGTNTKKRKEFNRMIACAKNGDFDLIITKEISRFARNTLDSIYYTRELKKHGVGVIFMNDNINTLDGDAELRLAIMSSIAQEESRKTSERVKWGQKRQMEQGVVFGRSMLGYDVEGGKMTINEEGAKVVRLIFHKFVNEGKGTHVIARELREEGISPMRVKEWSNTVILRVIRNEKYCGDLVQKKTYTPDFLSHEKKYNRGQEEFVIIKDHHEPIISRELFDEANRILDAKSLSQEGKAKHSNRYPFSGKIKCGCCGSSYVARYKTRKDGSRYKAWRCNEAAKNGSPHIDKAGNQVGCTSLSIRNEDATHIMYLVTKSLKYNRDKIINNLTAVIQSIIAMDTTGTDVLKLQEQIKKIEGKLANLIDLYMSNLINKDEFTATRASCDTEIEELQSIIESVDKQREMIEQQQQLLKEIEDAIKEIVSGVEYEDEFYKHILDKMVVQDKDNIDVYLNLLPMKWSYTVAKASKKAVASEWNISEASLPISVNTALTCAYGAANL

SEQ ID NO: 22306 - protein, 546 aa, synthetic construct
MKFKYPAMGTTKNAVIYARYSSHSQREESIEGQLRICHEYAKAEGLAIVGEYIDRAISGTTDARPDFQRMIDDAKKKQFSYVIVYRLDRFARNRYDSVLYKHELKQCGVKVVSATEGIGTGDESILLEALIEASAEYYSMELSRKIKRGRQDSAMKGNFLGGAVPLGYKVVDSKFIIDDETAPIVRYIFERYAAGIGKKQIIDELTAKGYMRRTGKPFTYRAFDSVLRNRKYTGEFTQTGITVEGGCPAIVDTEMFEKVQARLEINRRAPAKAKAKTEYLLSGKMFCGYCGEPMIGISGTGRHGKTFYYYSCVGRRGKSGCKKQHEKKDFIEWYVCEQTVQYMQDPERLSHVAKRIIEINDAEFDGGKVKELERAVENCDNDIRKLVDALTTIPDAGRAALYDKIERIGAAKADMEIDLAKVRVLSEVRYKQEDVEAWIRSMCRGDLMDFEFRRQLIDVFINSVYLFDDRVVIVYNIKHGKQVSAIDVLNAVEELDGVELFPDSAEDSSAGGSGSFLVADAPPYMKNPNLFPIGNGFGFLIFIQRY

SEQ ID NO: 22307 - protein, 525 aa, synthetic construct
MARKTDKPLSNIAVIYARFSSHNQREESIEQQVAECKLFAAQQGLEVTEIYSDAAQSGRTENRSQFLRLQRDAKKGKFTNIVAYKSNRIARNMVNALTFENDMEKLGVKLYYAKEEFGNNAAGRFALRMMMNVNQFYSENMAEDIRRGMEDNAMKCKVNGPAPYGYKSGKSGTYEIDEPAAAVVREIFTRVACGDSFVDIYTDLNNRGLKTRKGNKWGRSSFQSILKCEKYTGVYIYDNIRVEGGMPEIISKEMFLKVQRILGTKGNPQGRHRINGDYLLTGKLFCGECGHHMMGLSGTGKNGLLHYYYGCSGKKEKPRCSKKNVRRDELEYEVARLVQTYILQDDVITWLADTLIKYQEEHSSDGDMTILNTQLSETEKSIKNLMAAIEQGIITPSTKERLMELESEKSKIENNITLLKADTITVSKEQIGGWLDSFRDGNIKDKRFQKRLFDSFLSAVYVYDDNRVRIVFNLCGLNKGDIDTKLMLGDTEAIEKVSDCSYKRCYGSPDLIKGEHSFSWVFVFF

SEQ ID NO: 22308 - protein, 499 aa, synthetic construct
MNVVLYMRYSSDRQTEQSIEGQKRVCMDFCERQGYNVVGEYIDRATSAYKETAKRTNFCRMIRDSSNGLWQGVVVYKLDRFARNRYDSATYKVRLKKNGVKVISATENISDSPEGVILESVLEGMAEFYSKELSQKVSRGLNESAHKCNSTGGAIPLGYKTVDKKLTVDEPNAQIVKEAFDLYAGGATISEICEKFNSQGYRTKKGTEFNKNSFKSMFRNEKYIGTYTYKDIRIEGGIPAIIDKETFETVQKKLSANAQAPARGKARVNYLLSQKLFCGHCGANMIGDSGRSKTGETYYYYSCSTRKRFHSCKKRTIRKDLIERIVAENAMRLITPEMINTIADMAIKCNREDIESDAIIPALTADLKEINTSIKNLLKMVERGVESETLDSRLKELEKRKKDTESRLEAAKSEYLTLDKTVIVGWLSQFLSGDIEDEDFRRHLIDTLINSVTVWDEPDGGCKITTVYNLKGNTQTYRVNADGSSDMKRNSPPKKRQFS

SEQ ID NO: 22309 - protein, 490 aa, synthetic construct
MAAYCRVSSSSEDQLNSFAAQNIHYTQYITEHEGWRLVDIYADEGITGTSVEKREDFKRMLADSERGLIDRILVKSISRFARNTAECLEAIRQFRANGTTIFFEKENIDTARVSSELMTALYAAFAQAESESISGNIRWSYQKRIEREEFSTYSAPLGYDLVDGSLVINTECAAVVRSIYEMYLRGINTTEITKMLNQSNVLNIHWQRGRIEYILRNERYIGDAQLQKKYTTDTLPRKRIRNSGEHDSYYVIGIHDAIIPQDWFERVQKLLKSREKTVSVEKTPFHGRVQCSCGAACRSKRSTSARYWLCIRHDSDEDACPITQIPETQIQQAFLRLYYNLKHQGSRILPDLIANLQSIRERKFLWSVDVIELNKQIAELTSQNQLLATLRENGCVDPDIFISKSNKLTEQLRATKQAKSRILNQDGDDTIPCTQELITILKREPETLRNFDGELFGQLIDKVIIESNTSLRFRLKNGLELREGIERTVR

SEQ ID NO: 22310 - protein, 539 aa, synthetic construct
MGENKPKVIVIPAAPKNTGTAEQRQLRVAAYCRVSTKEEDQLNSYEAQKNYYTDKIMENKAWTMADIFADEGITGTSAKKRADFMRMMKWCKQGKIDLILTKSVSRFARNTVDCLNYVRMLKAQGIAVYFEKENINSMDESTELMLTMMGAFAQAESESISGNIQAGKRYAMQRGEATINYHNLYAYEKGPDGNPQIIPEQAEIVREIYQKYLHGDSLNMIRKDLEERHIPNARGGATWTHTAVRGILSNEKYVGDVLMQKTFQQDCISHKTIRNTGQRTMYLAPDHHEAIIDRKTYNAVQTELARRNALKGNTQKSTPSGRSCYTPKYALSDRLICGECGTLYRRCTWVNRGKKHIVWRCISRFDYGKKYCHDSPSVDEQQLQQAILRAINSIMSEKPALVRQVTENLQVVIRPNRSGELTIADIDHRLETLAQEFDAAFITVASGNSTDYMERFKTILSQQAELKDKRAELERQQAEDAELTSHMGEAADIMEQAGTVITEWNERNIRDLVASVRILSKEEILVRLKSGIEVKEHLV

SEQ ID NO: 22311 - protein, 536 aa, synthetic construct
MLKNDKIAVYCRVSSDEQAERGTIDNQITFAEQYANLHRLDIYDVYKDDGVTGTIPLQDRPEGHRLLQDAAAERFALVIFYKMDRLGRSTRVILNAVEALSQHGVGVQSMSEPFDTSTPSGRFMLTMFAGVAELDRANILDRMYQGTLRHARLGKWCGGPAPFGYRLQDGYLVINEEPIPGQQLSEADVIRMLYSKTIEGWSALRLAQHLNALGVPNKYTLRGNVAAGSGKWHQSKILYILHNTLYYGERSFGKLSKNSNKNIIPQQVPAIVSRETWDAAQAAVEQHSIMPKFIKRRSYLLRGLIRCGICGHTYVGTQYKRKQGASIYYVCSAKNTRGVTSEPCKGQTLRGEWIESLVWEDCLKYIRQPDVIAVDADCRPQQSADNIKKEIDAATAQLKQLDQERQTVIALCRQGIITAADLDGQLSDITAKQNTLQQTLEGLNSQSLVTKEDAAKRVREIADILDGFRQQLQAGGELSFDAKQGIIRTLVKQITVYTELQAGAERDIPSVRVQIDYNFTLLPSKAGMLDPYRQGF

SEQ ID NO: 22312 - protein, 508 aa, synthetic construct
MLRDYILGYGYCRYSADIQNEKSIEQQKNEIEEYAKKNNIKIVKYFTDEAKSGRYDNRDSFQEMISTACKTKEVQAVLVWKTDRFARRAMDNLYYRTKLEKAGIKLVSITQPIDIETPEGKLMSTMLAGMDEYFSQNLASNVKRALKDNAHNCQFNGGIAPLGYDIINKKYVINEQESKIVKEIYDMYINGYSYIDIALNLNMKGYKTKKNKKFAKTSVMSILENEKYTGKYIFNKGTKNSHRGIREDAIVYEDAIPKIISKEVFDKAMKRRKTKKHAENTAKNVYLLSGLIKCQCGGSYTGYMSTKTKNGKTYKNGYYKCNNRNKLGNCTMPFLKQDLLEKKIVEILTKKLLDKNSVQKIIDGVIDQYKMLQNEATEDLSVLENRLKEIQSQMDNIVDMICKGIGTDALAIKLKELEETKYNLEDELEFKSTKFTYDIKADDIVEILKNDVDNLNDTSKTEVKKLIQKWVKKIEVTNDFIDVYFISEDFLPHQMVARNGFEPSTCRV

SEQ ID NO: 22313 - protein, 506 aa, synthetic construct
MNGVIYARYSSENQREESIDGQLRECTAFAQHNDIQIVGEYIDRAFSAKTDNRPSFQKMIKDSAKGEFDVIIVWKLDRFARNRYDSAHYKNILKKNGVKVVSATEAISSGAEGIILESVLEGMAEYYSAELAEKVSRGMKENALKCKYNGGSVPLGYYIDESKHFQIDSSVAPFVVECFEHYADGMTMKQLRDELNMKGVKNSRGGKLSIDVISRMLTNRKYLGEYTFQDITIKDGIPAIVSTSLFEKVQDRLTKTKKAPSSHKADDDYILTTKLFCGKCKSFMVGESGTNAQGKKYRYYKCVNHKKHQGCDMKSIRKDLIENMTIKYIREFLNDEDLINTLIDLAYDAQHKENEQLPLLRKQLAQTEKGIKNIVDAIEQGISTKSTRERLLDLEQRKNDIEMSISKESIENPMLTKKQFKFWFDQLKKLDISKSEQRQKLVDLFVNSIIIYDDHIKFFFNYKEHTETITFDELNNCSDLPDSPRPKGLPNGSPYFLPKIAKNRII

SEQ ID NO: 22314 - protein, 501 aa, synthetic construct
MEIQIREGNREQKRKLKVCAYCRVSTDADEQENSLENQIRHYETVIKANPSYEYAGVYSDFAISGFKEKRPGLQKMLADAQKGKIDLILTKSVSRFARNTSIVLEATRKLKELNVGVFFELQNINTLSGEGELMLTILAAFAQAESESGSAGAKMVYQRKYEAGIPVQYLERSFGYTKDERGVYIADESEAVWVRKIYEMAADGYTPAAIKRYLNENGVKTVGGAEWIDSTVFRLIENEIYKGDYIMHKHFVNEERKLVRNRGEVDAWYIEDDHEAIVSPELWQKAQDAIEAKRDYLAEGSVIEDFTEENYPYMNKIFCAKCGHPLYKRIYSNGNRLNWGCSGTKRHGKSFCEGINIPDGVLRKAWHFDGNMYIDEKPSVKGTKEFTYLKESSWKRRHKKKVPEAIPENTEEAYPYRKKIFCGLCGSRLVRHVNPKSHKVIWICNGAKRKGVAFCRGTRIPDSVIRGWGEIKKDIYIQRKDDKNGKKRYSYTSKKPSGIGA

SEQ ID NO: 22315 - protein, 463 aa, synthetic construct
MARSVTVIPARNRQASGHRAAPQKKIRVAAYCRVSTDQEDQLHSFEAQVDYYTKYINDHENYEMAGIYADEGISGTNTKKREQFKRMIADCEKGKIDLVITKSISRFARNTQDCLMYSRKLKNLGIGIIFEKENINTLDSTGELLFTILSSLAQDESRNISENCKWGIRTKFKNGEMHLNTFKFLGYDKDENGKLIINREQAKTVRRIYRDFLWGLNPAQIAKELEEEQVSGCLGQTKWYASTVVGILKQEKHMGDALLQKTYTADFLTKRQVKNNGEVAQVYVKDSHKGIIDKETWNAVQEEFDRREKFMQKHGTDRYSYGSECNPFCEKIFCGECGSLFTRHSWRSRGIVQWQCKNHRKDGKVACTNAYVDNADLEKGFVKAFNRLVTDRDKHMERWQQMKSDGTPLEKIRAGQMMEAVGNEPLTRFVPEIAQLVLCEVTVLGAKKYEIFFQEGSRVKVSV

SEQ ID NO: 22316 - protein, 544 aa, synthetic construct
MTGIIYARYSSDNQREESIDGQIRECKEFAEKNDIRIIDTYIDRALSAKTDNRPSFQQMIKDSSKGLFDVIIVWKLDRFARNRYDSAHYKNILKKNGVKVISATEAISSGAEGILLESMLEGYAEYYSAELAEKINRGLTENALKCKYNGGSVAFGYMIDDEQHFQINPTLAPVVLKIFNDYLSGKTQKEIRDELNNKGLKNANGREFTINNISKILTNRRYVGNYIYKDVVIENGIPAIIPNDVFDKVQEMIAVNKRAPSRHKAVDDYLLTTKLYCGKCKSFMVGESGNARGRRYSYYKCVNTKRNKTCDKKAVKKDWIEDIVIYQVMKFINDDSLIEMLVNKILYIQGKESPMLKSLKKQLAQTNTAIENMLNAIEQGIITKSTKKRLDELESTKENLETEIAKENISHPLLTKEFLYSWFDGFKNFDVNKLENRKMLIDTFVNSVVLYDDRIDFYFNFKDNAKSLTLSELNTVSDLSSSSPPKIKEYPCGALLFLLWNVIETAVKKTVRWTVFRRGVSVSAEASRAITAISTTSSRTAYRS

SEQ ID NO: 22317 - protein, 573 aa, synthetic construct
MAKVKLPDKPRVAIYTRVSTMHQIDKDSLPMQRQDLINYARLILNTEDYVVYEDAGYSGKNTDRPKFQEMMQQVRLGMFTHILVWKIDRISRNLLDFATMYSELKQLGVVFVSKNEQFDTSSAMGEAMLKIILIFAELERNMTSERVTAAMLSRAANGQWNGGRVPLGYDYDPETKTFTINESEAAVVKIIHDKYEQERSLVSLARYLNGHGYRTRTGCTYSPSTLLIILRNVFYCGDYRYNVLKDGDRQKRKKESEWITVKDHHPAIISREQKEEIARILKENRRLECERRGIYSKKKNVHVFGGLVICGNCGHAMTSTIRPADQDGIRWSVYVCPTKRRSEYLCKGRATSEVVLGEFVFNYILNMLNVQKNFDSINSVEDMEKMLLSGSTFRDVDGIERAGLDDLYNMLASGLTEKAPFDSSVEVRKKPVVSDIELENLNTEKTKIERAAERLQNLYLYSDDSISQKDYIIQREKLMSQLAEVNEQIGMVMSNADEKDVSDEEFVHAASKFILTQKLEGRTYIYYKRLATTVSREVLRSFVMSIIENITIYDGRVQTIVFKNGLSHTFILK

SEQ ID NO: 22318 - protein, 500 aa, synthetic construct
MNVAIYARVSTEWQAEHGYSIGTQIESCRKKAEEMGAFVVKEYIDDGYSGGFLERPALDNLRDAVQDGLYEAVIFHDADRMARKLIHQLILTEEFEKAGCRPVFVLERFDNTPEGNMSYQMKGVFAEYERAKIRERTMRGKRAKLRAGKAINDSHIYGYDFDRETCCYVVNPVEAEIVKRVYQWYVVYMVGGCEVIADMLNKQGIPSPTGVKWCASSVRNIIHRPHYTGHYFANTKYHKKTGPKSYKKIPRPPEEWIEMACPQIIPVELHEKALEIKSKNRTYETWKHSTDIGLLQGVSYCGHCGNRLWLCVSKRKGKRWYKCTNSAPRNGSKCPARYMEVPVADEIFWAALEQICTSEETLTAYIGKRTAGKTSAAPAQNKRQKIIKRIEKIHTERQAVMSWFSQSLLGQSEATEKLAALKAEESRLQIDLAEIENNNTSTAQAEQNTPADIVAVVRNCPPTLEARRRVVLEIIEKVSVIRRDYNYGHKYLLDFDIVFK

SEQ ID NO: 22319 - protein, 456 aa, synthetic construct
MRNKEIAPALVRVALYIRVSGEEQKIKGLSLEAQQERLEAYARERGWVIVGIYIDAAKTARKNIHKRTEFQRMMDSVKRDEVDILLFARLDRWFRSVADYYKVMEILQVHNCDWKTTDEEYDTTTANGRLYINVKLSIAQNEADIDGERIDVVFDSKIAHGTVVSGSAPFGFRVNEEKRLEVVPEDAAIVQDAFNYFENTVSQRATVRYVRETYGVNWCDATFRRMLKEKLYTGVYDRGGRYNDQFCPAIISRRQFDRVQALLTRNVRSAPSGKVYIFTSILTCAECGHKLVGYKSSDYYYYRCNQHFQRGRCCHNHSAREDVVEAWLFDHLGEELERCQLEWDVEAAKKKASVARTDKAALKRKLTKLKELYVNDLIDIEDYKKDYQIYVSALNQIPEPAQEAPPDFAAVRRLLDNSFRTIYDTLTREEKRTLWRSVIKEIRIDNDQNITGVVFG

SEQ ID NO: 22320 - protein, 427 aa, synthetic construct
MDRIIKRVDFPKIMQPQFLKVCAYTRVSSGKDAMLHSFSAQISHYSELIQSHTGWVYCGVYSDEALTGTKSDRDGFQQMLADCRAGKIDMVITKSISRFARNTVTLLETVRELKSLGVDVFFEEQNIHTMSADGELMLTILASYAQEESRSVSENQKWRVKRNFEAGIPWNGRMLGYRMQDGKYYIIPEEAELVRRIYREFLDGMGRNRIAARLNDEGIQPTRYGEAWHPQTIAKILRNYAYTGNLLLQRFFCESYITKKTVPNNGQKAMYHAEGTHEAIIPLDEWKAVQAEIERRAEQHKAKPPAQPSFFYTGRIQCAKCGKNFRRKTTAARVVWICATLNTKGKKHCASKQIPEATLDELVQQVTDDPSSIEKIIADDGNTLHFHFSDGTVVTRTWADRSRAESWTPEMKEKARQQSLARRRQKA

SEQ ID NO: 22321 - protein, 527 aa, synthetic construct
MNTAVRTVTVIPPSINPMPHLTDTPLYKLRVAAYARVSTDSDEQFTSYEAQIDYYTQYIQRNPEWTFVKVYTDEGISGTNTKHRIGFNEMIADAMSGKIDLIVTKSVSRFARNTVDSLVTIRKLKEKGVEVYFEKENIYTFDGKGELLLTIMSSLAQEESRSISENVTWGQRKRFADGKVNLPYKQFLGYRKGADGFPEVVPEEAAIVRRIYTRFMAGLTPGAIAKELTADGIPTPSRKQRWQTSTVESILQNEKYKGAALLQKCFTVDFLTKKRKVNEGEVPQYYVEHSHEPIITPEEFDKVQTELARRKQISRQYSGKRIFSSRIICGDCGSYFGSKVWNSTSKYRRVIWQCNSKFKGERKCETPHLDEETIKAGFVVALNAIIDSKDSILEDCRLMQTTLTDCTGIDAEIESLLEEIDVVTELTKRCIAENSQTAQNQEEYAARYNGFVERYEKAKAQLEQLRATKAAREAQAEAIGAFMFEVQELDALTNFDDKLWLTVIDTVTVHADGRMTFKFQGGTEIEG

SEQ ID NO: 22322 - protein, 464 aa, synthetic construct
MARSVTVIPARSQKVRTGHKAVQEKKIRVAAYCRVSTDQEDQLHSFEAQVGYYTKYINEHENYEMAGIYADEGISGTNTKKREQFKKMIADCEDGKIDLVITKSISRFARNTQDCLAYSRKLKNLGIGIIFEKENINTLDSTGELLFTILSSLAQDESRNISENCKWGIRTKFKNGEMHLNTFKFLGYDKDENGKLVINKEQAKTVRRIYRDFLIGINPAQIAKELTEEKVPGCLGQTKWYPSTVTGILKQEKHMGDALLQKTYTADFLTKRQVRNNGEIAQVYVKDSHKGIIDKQTWNAVQEEFDRREKFMESHGTDRYSYGADCMPFCEKVFCGECKSLFTRHSWSSRGIVQWQCKNHRKDGKVACTNAYVDNADLEKGFVKAFNRLVTDRDKHMERWQQMKSDGTPLEKIRAGQMMEAVGNEPLTRFVPEIAQLVLCEVTVLGAKKYEFFFLEGSRVKVSV

SEQ ID NO: 22323 - protein, 512 aa, synthetic construct
MQRAVIYARFSSDMQREESIDAQVRACKAYAKNKGYIVVDTYADEAKSGRDVTKRDAYNQMLADAMEDKFDVIIFHKIDRNSRNELNYFTFKDKLERLGISYEYAAQPIDTISPEGQVMETIMVGMSAYYSRNLAKETKKGLNENAYKALFNGGCPPLGYKIVDKKYVIDESEAAAVRLIFELYLAGKGYAEICRALDSKGFTTKSGKPFGKNSLYDILGNEKYIGTYTFNKIPKGKGKRNMHSQKRPDDYISIEDALPAIISKEDFFIVQAKRERNRCHAAKYTAKHDYLLSGKVFCGECGSAMVGHRVRQRYYYYGCTRKEQTPTSKCQQRMIRAEVLEHWVMQILERVVFTVSGMRRIADAIAKGYQEEESRHAAEQEALAKRKAAAEKKLNNIYKIFEEGEADEFDRQRLNQIKAELREINKSICEASVKSVESLDNKKIVAFLTTIKSEIFVKNNIDYARRAIDLLVTNVTVTGTVIKVTLSTQNVCAYLVPRTGIEPVRVSLPEGF

SEQ ID NO: 22324 - protein, 538 aa, synthetic construct
MSANKKSIAKQEYNRAVIYARYSPGPNQREESIEGQLRECRDVAKRHELTVVREYADRRMSGTNDERPDFQRMLRDADRGLFDVVITWKNDRFARNRYDSAVYKQRLKRNGVKILYAKEVIPDGPEGIILESLLEGMAEYYSANLSQNIRRGQRENALEGKFIGGTIPLGYKLDAEKRYVLDPEKAPVVLQIFERYIAGESVAAICDDLNSKGYTTARGNKFNRSSLHRMLANEKYTGVYRFEDMVTPGVIPRIISDDQFAAAAARAQKNKQSRRSPENVSVEFLLTGKLYCGCCGQPMGGMSGTGRHGGKFYYYQCNGRKKGSCKKKLVRKNVLEKLVTELVIKNILGDTEAINRIVDRCMEIQLKERKEEMLPAQALRRELKAAETALANVMKAIEAGIITASTKSRLLELEERCAALKQGIAAVEIVPPKLSREQLLFIFEKYRGRDADDLSFMRSVIDAFIDKIFLYDDKLIVTFNLSDEARNTITLSDLKKASAEPLEADAAELCGGSSNDALTPPELVQSWKLIGGNNENRG

SEQ ID NO: 22325 - protein, 453 aa, synthetic construct
MECVAYMRVSTEKQAEEGNGLDSQKRDIELFCRKNELVVSDWYVDDGYTGANMDRPELQRLINDCIKKRVKCVVAFKLDRLSRSMIDGLYIIERVFQPNQVLFKCVHDSVSYDSPMEQAYTQMMAVFAQLDKNTMMLRMRGGMLERIKQGYWIGGANTPYCYNYSKEKGILVPIPERKEQANRALDMFIGGYSDLYIKESLGFHSEVLVRNVLTGVVNIGMIPYKGNVYQGLHEPIFDKERFELAQEIRKSRRKNKTACHTDANLLTGLCYCGVCGCKMRYQKWTHGKHKIYCCSRDKAMKYLPNFNPDCNNSLEWAADIEKQVESEILKISLNLSECKPIEKQSKLEIMQSQFEKEQVKLKRLYVLYSDGNDTVLEMIKNTEKSISEMKVKITEEEKNERNSQKKEVVYENIKKLADVWAHIDKKEKNNILKSIISRIVIVNGNIEIQLKNF

SEQ ID NO: 22326 - protein, 492 aa, synthetic construct
MNIQEIPTTRKEKPRVCAYVRVSTDSEAQEDSFAFQSNYWQKRFASDESVEYVGLFSDEGIGGAFMKKRDGLKRMFQKVRNGEIDRIYTKSVSRFARNKVELMEVVREFRDVGVEIIFESENIHTLDPKCGLILTVMASLAEEELLSMSQNQKWAARKRFANGSVELARILGYDMVDGKLVINEKEAVIVRRIFELYLQGNSFRTICHILENEGYTPMHGGRWSKSTITGMLRNEKYCGDSIMQKSYSTMKVQKYNYGELPKYYVQDNHEPIVSREDYQKAQEMMVARSNKYRPMGSPTALYPLSGKLICGECGTSFKRKTSAHGTPYMCIKWTCRKKDVYGVKECTSHDIKDEVVTRLLIETYNESLDANNDVNGITEQEEVLRKLIANEQELRQLRAKGYISESKCREETDKILIKIKEQETLIKNLRTRDMVKGKYKKSDEMTEQMAEFLVKATVKDWTITFEFQNGYKATKEYTNGRAGNVNGKLCKH

SEQ ID NO: 22327 - protein, 475 aa, synthetic construct
MDKQRRQQKSLKTQTNNSPVTALYVRVSTDSQFEEGYSVEAQQKKLKQWCVLRDITNYEFYIDGGWSGSNINRPEMKRLIADIINGKVKEVIVFKLDRLSRSQKDTIFLLEDVFEPNKVSFVSISENFDTNTPYGKAMVGILSVFAQLERENIRERTRMGMYERVKSGLWMGGGMKPFGYDYDPKLNTLVPNEHAEDVKKIYDLYLQGYSTTQLANMFPVSGDRQIMMILSRATYLGKINYKGEIIEGRHQAIIDDETWKRVQAEKEKRTDRKVTKSQHLLTGLVYCGKCGAKYRYQKWGNKTVLYCYSQQKSKPNLIKDPNCDNMRLNSEPLEQLVVNDLFNMSDAYLAIADKKLLKAKNISEKGYGIQVLEQKCSVIEQKIKRLYNLYAEDNNELLLETIKENQHELEKLYNILESEKATTSVTNRIEETEYLIKNLRSRWDGLSMDEKHRVLRATIKKIIVTDGKVTIDYII

SEQ ID NO: 22328 - protein, 490 aa, synthetic construct
MLSKNACAYIRVSTDKQEELSPDAQKRLILEYCKKNNLTIMSEHIFVENGISGKKADKRPQFQRMIALAKQKEHPFDVILVWKFSRFARNQEESIVYKAMLQRVGVEVVSISEPIIDGPFGSLIERIIEWMDEYYSIRLSGEVMRGMTEKAMRGGYQSTLPLGYHMNPDTGVPEIYEPEAAIYRIILDRYLNAGMSPLAIARELNAAGYRTRRGAPFERRTIIYILENPFYTGMVRWNRQNHSDHTIKDRSEWILAKGAHASLIDKDTYDHIQAVTALRTRPYKARGTSSIKHWLSGIVKCSDCGKSLVGNALYKGVPSSWQCSDYNKGRCSHSHFIKNTALEQAVFNALEHAITSGDISYTLKSTDSSSDLASDLDRMLSKIDDKERRIKQAYRDGIDSIEEYRENKEILTKERQDILSRLAALSERSSEDDKKKLLAEVQSVYDIVTGNADKLTKANAIRSIVDHCVYDKANDSFDIFFFFSKGSEPL

SEQ ID NO: 22329 - protein, 538 aa, synthetic construct
MPKNKRTTEKQEYNRAVIYARYSPGPNQREESIEGQLRECRDVAKRHELTVVREYADRRMSGTNDERPDFQRMLRDADRGLFDVVITWKNDRFARNRYDSAVYKQRLKRNGVKIIYAKEVIPDGPEGIILESLLEGMAEYYSANLSQNIRRGQRENALEGKFIGGTIPLGYKLDAEKRYVLDPEKAPVVLQIFERYIAGESVAAICDDLNSKGYTTARGNKFNRSSLHRMLANEKYTGVYRFEDMVTPGVIPRIISDDQFAAAGARAQKNKQSRRSPENVSVEFLLTGKLYCGCCGQPMGGMSGTGRHGGKFYYYQCNGRKKGGCKKKLVRKNVLEKLVAELVVKNILGDTEAINRIVDRCMEIQLKERKEEMLPAQALRRELKAAETALANVMKAIEAGIITASTKSRLLELEERCAALKQGIAAAEIVPPKLSREQLLFIFEKYRGRDADDISFMRSVIDAFIDKIFLYDDKLIVTFNLSDEARNTITLSDLKKASAEPLEADGVELCGGSSNDALTPPELVQSWKLIGGNNENRG

SEQ ID NO: 22330 - protein, 514 aa, synthetic construct
MSVDIKWNVPQKGKEGDLAAVYARYSSHSQGEQSIEGQLAEAQKYAAAHGYTIVHEYVDRAKSGRTDNREEFQRMLKDTAKKQFNVIILWKVDRFGRNREEIAINKMKCRKNGVRVEYVAETIPNTPEGVILESVLEGFAEYYSLQLSQNIRRGIAESAEKCQVTGGNRPLGYKTGPDKKFEIDEDTAPTVRLIFKMYADGATVTEIVAKLNELGLRTLRGGKFTHNSLHTILKNEKYIGIYNNHGKHIEGGVPRLIDDELFYKVQEMLKVNKRAPAKTWARADYLLADKAFCGKCGAPMFGESGTSKTGARHNYYICSHKKRFKTCDKKAVRQADVEDLVIKATCDLLADTELLDFIIENTWQYYLAQDNSQEELRNLTRQLEQTDLAIKNLIRAIEAGILTDETKSRMDELTTQKAELKAAIADRELARGFHLQREHIAFYLYDLRNADRTDREVQKRLIQTFVNSVFVFDDCVKLTFNFSGNKSVVTLKMLQAAEAGEVFGRYASCSTNAR

SEQ ID NO: 22331 - protein, 541 aa, synthetic construct
METAIDTVQQPRVVRVVRNVSTAPLTAQMIREQMIDTRLPVAAYARVSTTNEEQEDSLERQKAHYTEYIGNRPEWRFVGVYDDPGVTGTRADQRKGFQKLLADCRAGKIKKILCKSISRFARNTVDALQYIRELKELGIGVYFETQNIDTMTAGGDILITILAAIAEQESRNMSENIKWAFQKKFKEGEVVLACSQFLGYDHDKDKKIVINEEQAKVVRRIYREFLSGYACSAIAKRLTEDGIPTPSGKKQWRTGVIKSILTNEKYYGSAYLGKTCKRDVLSKERVASEEVYYVENSHPAIIPKDTWDLVQLEMTRRQEYRTCSETGSGKYSSKYPFSKKLICGECGMIYRRHAQYKRGNYVRTWVCITHKRKGNDYCSQRYILEDDVANAFQTVLKELVGDMSSIKEILEKNVVDTLGEKEDNGGEQVLLLIQRLQTEMIDINRRKRSGEIAYEAYVARAREIADQVEVLEKQQMEIQAAEDNRISETKRIKDILEAINGMHPTDEFDGEIFRRLIDNVIIKDKRLTFNFKVGISKTITI

SEQ ID NO: 22332 - protein, 498 aa, synthetic construct
MDRKIRAAAYGRVSTNSKEQAHSFENQSDYWNKKLANEPKYEYVGLYADKGISGRHLHYRPQMLALLDACRRGEVEIIFTKSVQRFARNTVELLETVRELREINVAVVFEKENINTLTAESELYLTIAAAVAEEDLNRYGENVAWTIKDRFEKGDISVVGIRMLGYRMKNKEFRIIPHEAEVVRKLFELYSSGKYSTGELAEVMNEGGYRTMNGCLWTQQRVLQTLTNEKYRGDALLYKTATINGQQVVNRGVKDMLYVENSHAAIITPELWDKVTELINARGNMKLRGRVNESYPFTSLIKCPICGQSYIHKINNSGTKYACPIWKCRTHLACGKKGCSNSGIKDSVLKEKFIEAYNEFIENRNFGNDEDAAERELKKLNAEENELISLHVRGLISKHDYEHDKNDIRARRKALEQKVRDYRQAHIRRGAAKPITEFDEELVGRVIKGVTIKDYVVTFEFYNGVTISRAYTNGPSGNRKGWKEKKQLKEAQMNGNSN

SEQ ID NO: 22333 - protein, 562 aa, synthetic construct
MTDPRVAIYIRVSTTHQIDKDSLPMQRKDLISYAKLMLHTENYSIFEDAGYSGKNMERPKFKEMMSLIRSGFFTHVLVWKIDRISRNLLDFAGMYEELKSLGVTFVSKNEQFDTSTAMGEAMLKIILVFAELERNMTSERVTATMISRAASGQWNGGRIPYGYDYDEKSMTFSINEEEAAIVHLIHDTYEQTNSLVSTAKKLNSLGYKSRYENDWSPNSLRIILTNVWYCGSYRYNTRKEGDRQRPKAESEWITVENHHPQIISEEQKEKVIAQLKENRRLITAHNIYITKNNVHVFGGLIYCSECGRRYTSTVTSKKGWKFGRYLCPTRRTSDERCKNKSVTDLTLGDFIINYIVNLLHAQQQRTNIHSTAELSKILLRGFVFSYIKSINPVDLQRIYDAIKALTGIQKIYGDNIVARDGSTTKNKLAALKAKKRKQERALERLTKIYLYSEDAISDTEFVVQKKCITDALEEVNEEISSFKTASVSTSISDEDFIRRASEFIIAKKLEDRNFVSYERLAKTISPSVLHEFFVSIIDSIIVKDGRIKSLTLRNGLKQTFIW

SEQ ID NO: 22334 - protein, 555 aa, synthetic construct
MHSRRVCNDIVAVYKDEALSGYKNAHKRDGFAQLMADAEAGKFEAVMVYELSRFSRNGSDTIVNTEKLARLGIEFVSVREKLDQTPEGRMMMFVITGMNEYYSANLAIETMRGLKENAYQAKHTGGIPPLGYDLDSNGHYIINPEEAAAVRLIFDMYLEGNGYTAICDELNRRGYRTKRGTLFVRNSMYDLLRNEKYTGSFIYNHMAKAKNGKRNRHAYKSDSEVIRVENAFPAIISKEEYRKVLKLMEQNKRKGARNAAVHDYLLSGKVYCGHCGKSMYGETRYRKEYSYSYYSCNGHKSKICGKHSIRCDKLEAEVIRQLNELFFSDEILDRVSEKIYDDSQNHFMDERAAILRKRSADIKKKIDNGTKAILDGVDSDELRSAVKELSAQKKQIDQQIVQIEAAADNNGRTFEEVREMAKNFSDISKLPRDQQKRIVQKFIWRIYVYDSENPDDGDIVKIVLAPTEAARDELNSMAEDYVAITDMLTSTNGTSQGVPMQRPHLFFGTSGVFCFDILNSFDEQLSYYYYDINTAYYVIKTANPAEPKFNGVLNW

SEQ ID NO: 22335 - protein, 546 aa, synthetic construct
MKLKQQNKITALYCRLSRDDELGGDSMSIQNQKELLLKYANENGYYNTEFFVDDGYSGTNFDRPDFKRLIEAVEDGRVATVIVKDLSRFGREYLQTGFYTEMFLPDNDVRFIAVNDSVDSEMGDNDFAPFRNIINEWYAKDCSKKIRAVMKMKAQRGDCLTGMAPYGYMKDPNDKTKLIPSDRAEYVKMMYRMAIEGCSCGEIATKMRSLNLPIPKADNYIKNGLENCASYPKYPYYWLKATVKSILLNPVYTGKTVALKYTNKSYKNKKRITRPEEDWIVTENTHEALISQEDYDTVYKRLAVKTRDKVTNPDNIFRGLVMCPDCGKVHGFAKRNDNRNSKGMYRCQTSIRYGKNYCSSHYITFEQLYDVVLSDIQRHASLLEENADKYVDILSNTAETDKAKEKSSLTREIDKAQKRISELDTLLQKVYEDMVFGVITRERFKSMSENMESELSVLKAKVNEVTMSLQENESNKNNAEMFAKLIENYIGITELDYELVHTLIEKIYIHERENIDGKAVVKVDIYYRFIGSSADSDSPTEITRRR

SEQ ID NO: 22336 - protein, 571 aa, synthetic construct
MSIRDKLSALKVAIYIRVSTHWQVDKDSLKVQERELISYCQMVLGINDYVVFTDPGYSAKNTDRPDYQAMMDRIRTGEFSHLLVWKIDRISRNIIDFATMSEELKHLGVAFVSKNEQFDTSTAMGEAMLQIIMVFAQFERKQTSERVTAVMLSRAGNGQWNGGRVPYGYRWDKENTSFPLDETEAGYVRRMAQLYEERQSLLYVAKWFNSAGIKTRRGFAWTPTSIHVILTNPWYIGQYVYNVHSDGKGVERRDESEWVCVEHHHEPILSEDQFYRIKFLLTRNRRGTPTPGKSYARKHTHIFSGLMRCGICGSNMSASADRRRANGFRPSQYACASRRRKGTTCTNKYISDLMVGSFVLNYAANIIRAARNSAADIQPDVLERKLLRGETFKSVESVNPEAVQQLLSSFAEAGEAVEYRPQYAFTSTSGEGRDMDNLKARKRKLETALSRLNVLFLYDDEAMPEKDFIVERTNIEHQLAETDKRITELAATGLSSSEDSSDFLKKASYFIMVNKLIEDASVDYEKLVRTLDPAAIRDFVLSIVQEVEATDGKITAITFRNGTVHRFKYKA

SEQ ID NO: 22337 - protein, 464 aa, synthetic construct
MARSVTVIPARNRQRETGRRAVQEKKIRVAAYCRVSTDQEDQLHSFEAQVDYYTKYINDHENYEMAGIYADEGISGTNTKKREQFKRMIADCEGGKIDLVITKSISRFARNTQDCLAYSRKLKNLGIGIIFEKENINTLDSTGELLFTILSSLAQDESRNISENCKWGIRTKFKNGEMHLNTFKFLGYDKDENGKLVINKEQAKTVRRIYRDFLIGINPAQIAKELTEEKVPGCNGQTKWYPSTIVGILKQEKHMGDALLQKTYTADFLTKRQVKNNGEIAQVYVKDSHKGIIDKQTWNAVQEEFERRERFMEAHGTDRYSYGADCMPFCEKVFCGECGSLFTRHSWRSRGIVQWQCKNHRKDGKVACTNAYVDNADLEKGFVKAFNRLVTDRDKHMERWDQMKTDGSPLEKIRAEQMMEATENEPLTRFVPEIAQLVLCEVTVLGAKKYEFFFQEGSRVKVSV

SEQ ID NO: 22338 - protein, 467 aa, synthetic construct
MKKIVKNITETIIRVVLYIRVSSEEQVKHGYSLQSQRERLIEYCKQKGYQVVEIYVDEGKSARSKLKNRTELLRLIEDAKLKKFDRIVFWRLDRWFRNIADYYKVQEILDENKIDWECSDEEYSTTTSNGRLHLNIKLSIAQNESDQTSDRIKFNFDNMVKNGRAITGNQGVPLGYMVAGEEKNKKVVKNPETEPIAIDMLEYVKKSGSVRKTVIYINEKYNLKICYDSMRHYLMNEKYYGYYRGIENYCEPYITKQEFDEIQSLIKRNVKCNKKYDYIFSGLLKCPICGCKLAGYQQIHNKVKYNKIYKYPSYRCRHTHYDKLCNYHKYPHENVIENYLINNIQDEIKKIIQKNENAEDNKNIKVNKIDKEKIKAKLSRLTDLYIDGMILREKYDQEFEKLNLLLQESEKQIIEEKRDLSQYKEFLNSDALSLYSKLNNSSKRMFWAKYIEYIIYNEDGTYEIKFK

SEQ ID NO: 22339 - protein, 539 aa, synthetic construct
MYQSNNHSTYAALYTRFSRDEPDGESNSIANQKKLLLNYAHSRGIVNTKFFVDDGFTGTNFNRPDFKAMIAECESKKISTIIVKDMSRLGRNYLMVGYYTEIYFPENNIHFIAINDDVDSVKGDNEFTPFRNIMNEWYVKDTSKKVKSVIHNKGMSGERICNNVIYGYKHNPDNPKEWIVDEEAAQNVRTIFQLFLNGKGTSQIAKYLHSEKILVPSVYAREHGKISARATPADPCLWDSKTIREMLKRQEYVGDTVNFKTKKVSYKSKKKIYLDKSEYVIFPDTQEPIIDRDTYERVQKIMESRKKVPIVREPDPLGGYIFCADCGSRMYITRSTVFPKKNCYHCGRYKRSSELCSSHYIRECVINRLILNELQKVFSIVKNDRERFLNVAIQSYANRTSYDVKRLRKDKQLCEQRIQELDVLIKKIFEQSVLGTLSKERLATLAAGYESEQAEIKNKLSAISKEIEITDSKQLNADRFIAIVDKYTNIDSITPEIMSEFIDKVLVHKPIYDGNNKRHQTIEIYFNGIGAFDYDSCNS

SEQ ID NO: 22340 - protein, 447 aa, synthetic construct
MQKNAAIYVRVSTQEQSKHGLSVDNQIQALTEYCNNNNYNIVNIYNDAGISARKKYKNRPALMQLINDCKLGKIDIILFTKLDRWFRSVSNYYEVQDILDECKVPWRAIWEDYETETSSGVFKVNIMLSVAQAEADRTSERTKDAVAYRRKNGDFLGGRTPAGYKRENKKLIFDENRYDAVKALFDTYLTTFSPSKAHIAAAKLGFNIPVTQVCRMLKNKAYAGDAHGSKCPAYITEEQYNLIMHASTKRNRTPKRSDRVYLFSGLCTCGYCGGHMVARVYFWKAKKTNTQRWYHLYSCSAHNDRRICNCPGVNIAEKKLETYLLNNIGNIIKEQAKDYKFTDKDKNNYKKAINTLKQRLKRIGDRYELGDINFVEYKNKNIAIKKEIAEIEAKLSNVRTLPALPDDWKNIYAELEPDAKRTWWLSILSEIVVTKEDIKVIFNTSLS

SEQ ID NO: 22341 - protein, 468 aa, synthetic construct
MSKMLKRAALYVRVSTDEQARYGLSLGEQRRDLEEYARRKGYIVAGIYADEGTSARKSLHRRRELQRLLADIRANKIDVVVVKDLERWMRSVRDFYKVQDILDAHNVGWECSQDRYNTTTANGKMQLNMRLAIAQDESDRDSERIRYVFEGKRKRKEVLSGAVPRGMSIVDKHIVFNEEADMMRAIFNHVYNGGSVRSCIALAKEEYGVELTYRIIRRSLANRAYIGELHGEPGYIESMIPLDVFNSVQDRLKKYSSSFRNKTTGSRIYLFTGLISCPHCGATLTGYRGYKKADGTYRTYWYRCSRANSNAGVGCNYTRCLYEWKVESFLLDNIQSLLSDHIYQIEQRRLAKQKIRSELTEENILAKLARLKDLYVDGLIDKPTYLHDYDKFQQQLLEIASDEVIPLTTIPPEAQNFVSSADFREVYQSLTQENKRDFWSSIIKRITYEDTPATHGRGGVYDFRVEFY

SEQ ID NO: 22342 - protein, 590 aa, synthetic construct
MRTIRKIEQSIPKIKKRKKVAAYARVSMESERMQHSLSAQVSYYSSLIQKNPDWEYAGVYADYGISGTGIKKRQDFQRMLEDAEAGKIDIILTKSIQRFARNTVDLLQTVRQLKEQGVEVWFEKENIHTMSGDGELMMTILASFAQEESRSISENVRWRVKKRFEKGIPNGHFRIYGYRWKGDRLVVIPSEAAIVKRIFQNFLDGKSRLETEREFAAEGIKTRNGCQWLDSNIKQVLTNITYTGNLLLQKEYITDPITKHRKKNRGELMMYYVENTHEAIIDKVTFDHVQQEMARRRELGPLANKALNTSCFTGKIKCGICGKSFVHSIRHDRSRAEVWVCQSHKVRNCKCSMKGAIPAKVLNEECAAVLGLDKFDETVFLDKVDKIMVPEHHTMIFYLKDGRTVTRHWVSTAKKDCWTDEYKDRQRDWMRNYMASGKGTRFSPFTTRVRCAVCGHTFRRCKQRKKHGISVHWRCGQGGKCCSLSVREEDLMKIAADAMGLEAFDGDRFREEIEFMEAGAEDRITIHFKGGRIQTVPWTKPKKQGTCHTEAYKEYMSQLGKKRWTPEKKQRMSEQMKALRKERGANWQKQ

SEQ ID NO: 22343 - protein, 522 aa, synthetic construct
MAKTVRAIPATISRFTAAPINSRKKRKVAGYARVSTDHDDQISSYEAQVDYYTNYIRGRDDWEFVGIYTDEGISATNTRHRDGFKRMVRDAMDGKIDLIVTKSVSRFARNTVDSLTTVRKLKDQGIEIYFEKENIWTLDAKGELLITIMSSLAQEESRSISENVTWGHRKRFADGKVSVPYRHFLGYDKGPDGNLVVNKEQAKTVKLIYRLFLDGYTFHSIAGELTSRELKTPAGKTKWYPKTVESILTNEKYKGDALLQKRFTVNFLTKETKENEGEVPQYYVEHNHEAIISPQIFDWVQEEIKRRREGKRRYSGVSIFSSKIKCGDCGGWYGAKVWHSKDKYRRTIYRCNDKFKNHCKTTHLTENEIKDIFVQAVNQLIGNKEEILSNITLLKQRLTDTASLEKERDALELDLNMLADQVQQLIAENARVAQDQEEYGRKYNELVKRYEEKKKRYDHACAAMKRRIARSRQLESFIKDLQGQELIKTFDERLWCSLVDFITVYSKEDIRVTFKDGTEIKA

SEQ ID NO: 22344 - protein, 492 aa, synthetic construct
MNIQEIPTTRKEKPRVCAYVRVSTDSEAQEDSFAFQSNYWQKRFASDESVEYVGLFSDEGIGGAFMKKREGLKRMFQKVRNGEIDRIYTKSVSRFARNKVELMGIVREFRDIGVEIIFESENIHTLDPKCGLILTVMASLAEEELISMSQNQKWAARKRFANGSVELTQILGYDMIDGRLVINEKEAVIVQRIFELYLQGNSFRTICHILENEGYTPMHGGRWSKSTITGMLRNEKYCGDSIMQKSYSVMKVQKYNYGELPKYYIQDDHEPIVSREDYQKAQEIMMARGNKYRPRGSPTALYPLSGKLICGECGTSFKRKTSAHGTPYMCIKWTCRKKDVYGVKECTSHDIKDEVVTRLLIEAYNESLDANNDVNGITEQEEVLRKLIANEQELRQLRAKGYISESKCREETDKILIKIKEQETLIKNLRMRDMVKGKYKKSDELTEQMAEFLVKATVKDWTITFEFQNGYKATKEYTNGRAGNVNGKLCKH

SEQ ID NO: 22345 - protein, 544 aa, synthetic construct
MSMENCANTKPKITIIPAKTRVERLDPMSVAMGQKPKIRVAAYARVSTDHEEQESSYEAQVDHFTKLIASHDDWTMVDIYADPGLSGKNTKRVQFKRMIKDCEDGKIDLIITKSVSRFARNTLDCVQTARKLKADGIGIIFEKENLDTLQERSEFVLTIMASLAEEESRSISNNIRWSVKKKFQEGKVILNTKHFLGYTRDKKGTVLKIVPEEAITVRRIYAEFLDGKSLKEIAEGLERDGIASPSGRETWHPSTVKSILQNEKYKGDCHLQKTYLPDFLSPRRIKNEGFAQSWYVEDSHAAIISKETFDMVQQEFQNRQSLRSTGETGCGKFSGKYPFSGMIVCGECGETYRRHQQYNKYKKYYIWVCKRHENNGAEYCKSRPIKEEALEKAFVRALNELIGDKERILEKLQSATVSEITDSCATAINEVNAEIEKLQEQMMELLMKRNNGEITDKEYEQQSQQVGMKIDQLLMRKEEILSEQGKVQLASYRIEEVTKLLQTGKILEEFERVMFKSLVRKITVLSNKEIEIEFECGITVRETL

SEQ ID NO: 22346 - protein, 597 aa, synthetic construct
MRTIKKIESTIPTIKTRKRVAAYARISMESERMNHSLSAQISYYNDLIQKNPDWEFAGVYADNGISGTSTAKRDEFRRMVADAEDGKIDIILTKSIQRFARNTVDLLETVRHLKDLGIEVRFEKENINSMSGDGELMLSILASFAQEESRSISDNVKWGIRKRMQEGMPNANGHFNIYGYKWDGDELVIVPEEAAVVKRIFQNFLDGKSRLETERELEADGIRTRNGCLMRDSNIKKILSNVTYTGNMLFQKEFISDPINKKRKQNRGELPQYWVEDTHEAIIDLETFQYIQDEMERRKQLGALANKSLNISCFTGKIKCPYCGVSYMHNTRKPRTSNAKRLEFWVCGSRKKKGGHCEIGASINQDNMKKVLAEVLEIDEFDDDVFLEEVDFVNVPKQYTLEIHLKDGTVVTKPCKNTGHQDCWTKEYRDRVSKQRKKNGTNPKGASVFTSKLKCKHCGCNYRRCTQPSSTSEDGKFYYWRCAERTNCKAQGLREDFLKTQLADVLGMEDWDDTTFSDKVEYINIDGYQLDIVGTGGTTISMTFDPPKRGGRHCSEEQKEHMRKVMKEKWTPERKAEMSQRMKDMRKECGRNWRKEK

SEQ ID NO: 22347 - protein, 467 aa, synthetic construct
MKIGAAYIRVSTEDQIEFSPDSQLKKIKEYAKQNGIILPEKFVFIDEAISGKNAKTRPEFMKMIKISKSKPKPFDVILVWKFSRFARNRQDSIVYKSILRKECKIDVVSITEQLPSEPTSILIEALLEAMDEYYSVNLAEEVKRGMNEKFSRGGVVNIAPFGYEIAQSRFKPENFESKIVKMIFEDFKNGLSIKEIAIKLNDMKILTKRGNKFESRTVKYILLNPFYTGKMRRNLNQNNKKDRFKTSNDFLVINGKHEAIIDEKTFETVKKMLLNSKVDKRKCYDKSSFIFSGIVFCSNCGSALLEAVKGKSLQCSKYAKGKCRESHGVSFFKIKDALKKALELEFGKEILNISVDKSSGDILKTLLKKEKSKLEKISSAYENGADSLQEYKIKKTQILGRIKNFEEQMLAFEKIFNSEIKMKFESVIFAFFGDILSESEKNKMLKSFIEKIIFNRKAGTIQIYYKI

SEQ ID NO: 22348 - protein, 499 aa, synthetic construct
MYDAIYARQSVEKADSISVESQIEFCKFETRGGEYKSYIDRGFSGKNTNRPAFEEMLRDIKKGMIKRVIVYKLDRISRSILDFSNMMETFEKYNVQFVSSTEKFDTQTPIGRAMLSICIVFAQLERETIQKRVADSYYSRSKKGFYMGGRVPYGFSLEKTVINGIQTSKYAPKSEEIEQIKLMYLIYSQPGKSLKDVLKYFSEQGLKNLRGKTWCTARLSELLRNPIYVKADYQIYDFYKSQGVNVINSAEEFTGENACYLYKGKSASEKHSSLENKNLVLAPHEGVVDSNLWLKCRMKSQKSRHAPAGSRAKNSWLVGKMKCGKCGYALVVRKSGGKNKEAAKYFVCSNKASRGCCQGCKALKAKDIENLMFEMIKNKLAKWSSLSASPKFISNPKINERKMEISKIDGEIQELLKKVLNANDSLMSYINARVKKLDEKREKLSKELAFLQGGSSSEGITNYISKWNEMSLEDKIEVLDALVEAVHISDEKIEITWKI

SEQ ID NO: 22349 - protein, 558 aa, synthetic construct
MAKKKKPAGGNAIIYARYSSHNQRDVSIEQQIEACRKHAAELGLTITDTYEDRAISGRTDNRPAFQRMMRDAEDGKFQYVLAWKSNRMGRNMMQAMVNESRLMDCGVKVFYAEEDFDDSAAGRFALRSMMNVNQFYSDNLAEDVRRGLMDNASKCMANGRQPLGYKRGEGGKVVVDEPAAAIVREIYTRIASGEMFMDIARDLNRRGIKTQSGSEWNKSSFKVLCRNERYRGIYIYGDTRIEGGIPPIVDDVLWYKVQEVLKVKKSKNRHHCPSDEDYLLTGKLRCGKCGGYMIGMSGRSKTGDVHHYYACQNRRVGHTCDKKNIRRDVVEPAVAQAIKQYCLTDDAIEWITDQTIAYWEDEDRKLQIDSIENDLSAVQSSISNVMKAIEMGVITETTRDRLIELERQQTDLKSKLALAKEEIVHVDRKDLISSLLAFRHGNVHDRAYQEKLFNAFLIAVYVYDDDHLKLVFNSFGKDDTVNIALDLGENDDNSGLSDVSKSSPILSNGQPKKNQSNMFGWFFFLCFPYEQKCSAFKIYSICTEAANRDSGALYFMVL

SEQ ID NO: 22350 - protein, 573 aa, synthetic construct
MAYNAQNKTGARVAIYVRVSTLHQIDRDSLPMQKQDLLAYAKLMLNTDDCVIFEDAGYSGKNTDRPKFQEMMSQMRAGAFTHLLVWKIDRISRNLLDFATMYNELKALGVTFVSKNEQFDTSTAMGEAMLKIILVFAELERNMTSERVTATMISRANNGLWNGGRIPFGYDYDYETHEFSVNEEESKVVILMHDMYEQERSLVRVVRELNERGYRSRAGNLWSPVSLLIILRNVFYCGDYRYNMLKEGDRQKVKDESEWVTVENHHVAIIPKDQKERIMATLDSNSKLCKQRNIYKSSKHTHVFGGLIYCGSCGKPLGSTPGNLTRDGWHYSKYTCPTRRKSFTLCTGKSTSDPIIGEFVFNYILNMLNAQNDFEKISSPEELEKLLLIGDTFAYIDHIEPNGLNDLFNVLSSGAVKGAVFGKGASLPTKKATVEPEIARLRNEKQKTERALDRLRSLYLYADEAMSEAEYMIQKNKLEETLEDINDQIGMMNTDSWQQSVSDEEFIQRASEFIIAQKLSGRKYVNYKRLAMSVDSEVLKNFVVSIIDSITIQDGLVSNIVFKNGLCHTFIFR

SEQ ID NO: 22351 - protein, 576 aa, synthetic construct
MIRRNLLQKANNNSQRLKVAIYIRVSTTYQVDKDSLPMQRKDLIAYSSLILGIEDYEIFEDAGYSGKNTDRPAFQSMMQRIRTGEFSHVLVWKIDRISRNLLDFAEMYEELQSLRVTFVSKNEQFDTSSAMGEAMLKIILVFAELERNITSERVTATMISRANQGLWNGGRVPYGYNYDVNSASFSIQDNEANVCIILKNDYIENKSLVHTARLLNSLGYKTRSGSDWSPTTVWIIVQSPFYAGMYRYNKHKGTEYRTINPKDEWVIVKDHHPAIFTIEEHEKMLDILQTNSRNKNVTGQKHHSKNVYVFSGILYCGKCDNRLVSTPGRLQADGFRTAIYTCPKKRKTHDCDNPSINDLIVGEFVINYILNMLNAKNSFSFIETPAELEQRLLTGAAFLEVQHISQTGLNEFFNLLSRYGSDKSYSFSITAPRKKKATVDPEIASLRKDKEKQERAIRRLQDLYLYSSNAMSEKDFIIQKMEISKKIEDINTKLGMITHDVDSTLSDEEFIKQASHLLINKKLQSKEYIYYKNLAQTVSPEILKTYMETILDSVYITDGRISSITFKNGLTHKFEY

SEQ ID NO: 22352 - protein, 473 aa, synthetic construct
MEGYSIQAQTERLQAYCKAKGWGIFHIYTDAGFSGSNMQRPALSQLLEDVEAGRVDCVLVYKLDRLSRSQKDTLHMIEDIFLANGCDFVSMSENFDTSTPLGRAMIGILSVFAQLEREQIRERMAMGRTERAKSGLWQGGGWIPIGYDYVDGNLVPNPVRAAAVRDIYDLFLAGTPITSIKLIVNKKYALNLADTTVRSVLSHRLYVGDIVWMGNVYKGQHEPLIDMVTFSRAQKLLHSRARIAASKPDPFKPRTLLGGLLFCGGCGARYLAKGNYSGHGDHRTYRPYYTCYSRAKTNKRMVIDPTCRNPSYAVTMLDRRIIEEIRHIASDPQEFDAIVAAGRPDAEQKRRRNAEAEAAIMRRLDEIDTNTARLLDLYQRGLAIDKIADRLDALDKEKATLQISLQEFRMEKKAARDEEERLEPERAHELMGEFLDAVDGDADLDTRRKLLGSLIEKIIVKRTPGDFDIYWTF

SEQ ID NO: 22353 - protein, 520 aa, synthetic construct
MKRITKIEENNALSVKTKTRVAAYCRVSTASDEQLISLDTQKAHYEDYIKSNSEWEYAGVFFDEGITGTKKECRDGLNSLIDSCEKGLVDLVITKSISRFSRNTTDCLELVRKLMALNVTVIFEKENINTDTMESELMLSILSSLAESESVSISENNKWSIQKRFQNGTYIISYPPYGYENIGGEMIVVPEQAEIVKNIFEDTLGGKSTHVIAKELNDSGVTSKKGGKWTPGAINAVIRNEKFTGDVIFQKTYTDSQFSRHTNDGELNQYLCENHHEPIVSHEIFEKANEVLNQRGKEKGNGERTERYQNRYGFSGRIKCGQCGGVFKRRSHYKPSGSYIAWCCTHHIEDRYSCSMKYITDDGIKAAFLTMMNKLVFAHQRILKPLLHSLQGFDDKNRLLQIQEYETKLEKNMEQRQVLTSVMASGLLEPALFSKKITALILEEKQLQEGKKQMINTVSGDRTKIEALEKLMKFVLGSEMLTEYSDEIFLSHVEGIIVLSREEIVFELKCGLKLKERLVG

SEQ ID NO: 22354 - protein, 499 aa, synthetic construct
MNVVLYMRYSSDRQTEQSIEGQKRVCMDFCERQGYNVVGEYIDRATSAYKETAKRTNFCRMIRDSSNGLWQGVVVYKLDRFARNRYDSATYKVRLKKNGVKVISATENISDSPEGVILESVLEGMAEFYSKELSQKVSRGLNESAHKCNSTGGAIPLGYKTVDKKLTVDELNAQIVKEAFDLYAGGATISEICEKFNSQGYRTKKGTEFNKNSFKTMLRNEKYIGTYTYKDIRIEGGIPAIIDKETFETVQKRLSANAQAPARGKARVNYLLSQKLFCGHCGANMTGDSGRSKTGETYYYYSCSTRKRFHSCKKRTIRKDLIERIVAENAMRLITPEMINTIADMAIKCNREDIESDAIIPALTADLKEINTSIKNLLKMVERGVESETLDSRLKELEKRKKDTELRLDAAKSEYLTLDKTVIVGWLSQFLSGDIEDEDFRRHLIDTLINSVTVWDEPDGGYKITTVYNLKGNTQTYRVNADGSSDMKRNSPPKKRQFS

SEQ ID NO: 22355 - protein, 576 aa, synthetic construct
MKKNFKMPGSGSETPIRVAIYVRVSTVYQIDKDSLPMMKQDLTSYCKYILNTDDFVIFEDAGYSGKNTDRPAYQKMMSQIRQGLFTHLLVWKIDRISRNLLDFANMYAELKDLGVTFVSKNEQFDTSTAIGEAMLKIILVFAELERNMTSERVTATMINRASNGVWNGGRIPFGYSYDKPTQVFSIDPEENKIYNFMVETYEDTQSIVHTSRRLNEAGYRSRNGNMWSPVAVWTILRNPWYKGVYRYNYYKIPGRKAIKDESEWVIVENHHPASIDPDRFDRIQATLDKNARYRNTPGRKTAQKNVHVFSGLVWCAECGSAFTASPGKLHVSGYRPSKYGCPNVRKTKTCHAKYTSDVVLGEFLLNYILNILNAQKQFAYIHSTDDLQKRLLHGSTFSNVDHVDPDGLASLLNMLEKCSGSDPVLLKRPRSKPKMDPELKRMMADQKKQQRALDRLNDLYLYSDDSISEREYLVRKQQITDQLQEINEAIGMMSQEPWMRTMNDEEFIRQASSFILTQKLADKQYIYYENLAESLDPEILKNFFVSILDSIILRDGRPETVVFRNGLSHTFTYKDS

SEQ ID NO: 22356 - protein, 521 aa, synthetic construct
MGNVMIIPAKRQVGNTSRQQEDKPKLRVAAYCRVSTDSDEQASSYETQVEHYTEYIKKNPEWEFAGIYADDGISGTNTKKREEFNRMIEACKAGEIDMIITKSISRFARNTLDCLKYIRMLKDKNIPVFFEKESINTMDAKGEVLLTIMASLAQQESQSLSQNVKMGLQFRYQNGQVQVNHNHFLEYTKDREGNLVIDPEQAEVVKRIYREYLEGSSMDKIAKGLEKDGILTGAGKKKWWTSTINKILRNEKYIGDALLQKTYTTDFLNKTRVKNNGIVPQYYVENNHEAIIPKDIFLRVQEELVRRRVVKTSANGKKRSYSCNHCFAQIVICGECGEMFRRIHWNNRGCKSIVWRCLSRLEPTGQECHARTVNETVLENVVVLVINTLLGDKSTYQAQLQQNIAKVIREAQKNNTDGIDEQLMELQKELLEKANNKEAYDEIADQIFKLREKRRQNTVDTAARDAQIERINALQDFIKQQRTDLAEFDETLVKRWLKQITVWEYHFTVELKSGLSIDIEG

SEQ ID NO: 22357 - protein, 600 aa, synthetic construct
MIDNCVRAVFYARVSTQEEEQLKALPKQVEECKDIIASKGWRLIDGYVDEGKSGTKKDGRKAYIKLLEDMQEDKFDIIVVKSQDRLQRNTFDWYKFADLLNKNNKRLYLYMDNKFYEPSEDALITGIKAILAEQYSRDLSKKLNNYHEHRIEKARAGEEVPAMGNGQTYGYQLINGKWVVDESQRELVRKMYELYTDLHSVRKVRDALNEQGYRNQRGNLFTDENIGRIVKNVMHKGWVILNRHHREFDSKETIRRWEDEWVIVKKDHEPIVSEELWDAVNDEIQSHRNKGNSGTRGKRGGTDPLSGKMVCSCCGRVLWKHASQGSYKSKEGRKYTYKRYTQWYCSGKMGRGELACTNPATISGVKLQKYLVEMADMFLDYSTVEYSKNLLKRRTISWLEDLKDKLTTPNDNGKIEQDLKALEGKRGKLIDLYTDELISKEEFKSRSVDLDAEIEKKRALLVPVEENPDIKAIEDTIANIDAEIEVLFEDEAMVEEKKVQFIQEHIKKIYVSKNSDVFIVLDNVAGAFLFIDKEDTRIEVVPVAEYNPEELSEEGITENDFVPFDRESMPQHHGRKRPHPPGPPVAPRRPVRDRFRCDQP

SEQ ID NO: 22358 - protein, 490 aa, synthetic construct
MLSKNACAYIRVSTDKQEELSPDAQKRLILEYCKKNNLNIMSEHIFVENGISGKKADKRPQFQRMIALAKQKEHPFDVILVWKFSRFARNQEESIVYKAMLQRVGVEVVSISEPIIDGPFGSLIERIIEWMDEYYSIRLSGEVMRGMTEKAMRGGYQSTLPLGYHMNPDTGVPEIYEPEAAIYRIILDRYLNAGMSPLAIARELNAAGYRTRRGAPFERRTIIYILENPFYTGMVRWNRQNHSDHTIKDRSEWILAKGAHASLIDKDTYDHIQAVTALRTRPYKARGTSSIKHWLSGIVKCSDCGKSLVGNALYKGVPSSWQCSDYNKGRCSHSHFIKNTALEQAVFNALEHAITSGDISYTLKSTDSSSDLASDLDRMLSKIDDKERRIKQAYRDGIDSIEEYRENKEILTKERQDILSRLAALSERSSEDDKKKLLAEVQSVYDIVTGNADKLTKANAIRSIVDHCVYDKANDSFDIFFFFSKGSEPL

SEQ ID NO: 22359 - protein, 573 aa, synthetic construct
MAKVKLPDKPRVAIYTRVSTLHQIDKDSLPMQRQDLINYARLIMNTEDYVVYEDAGYSGKNTDRPKFQEMMQQVRLGMFTHILVWKIDRISRNLLDFATMYSELKQLGVVFVSKNEQFDTSSAMGEAMLKIILIFAELERNMTSERVTAAMLSRAANGQWNGGRVPLGYDYDPETKTFTVNESEAAVVKIIHDKYEQERSLVSLARYLNGHGYRTRTGCTYSPSTLLIILRNIFYCGDYRYNVLKDGDRQKRKKESEWITVKDHHPAIISREQKEEIARILKENRRLECERRGIYSKKKNVHVFGGLVICGNCGHAMTSTIRPADQDGIRWSVYVCPTKRRSEYLCKGRATSEVVLGEFVFNYILNMLNVQKNFDSINSVEDMEKMLLSGSTFRDVDGIERAGLDDLYNMLASGLTEKAPFDSSVEVRKKPVVSDIELENLNTEKTRIERAAERLQNLYLYSDDSISQKDYIIQREKLMSQLAEVNEQIGMVMSNADEKDVSDEEFVHAASKFILTQKLEGRTYIYYKRLATTVSREVLRSFVMSIIENITIYDGRVQTIVFKNGLSHTFILK

SEQ ID NO: 22360 - protein, 520 aa, synthetic construct
MKNVTKINQVDFSVFKKTRVAAYCRVSTDSDEQELSLDTQKDHYERYIKANSEWEYAGIYYDDGVSGTKTAKRDGLLRLMEDCEKGLIDLVITKSISRFSRDTTDCLALVRKLLNYEVYVIFEKENINTGSMESELMLAVLASMAESESRSISENEKWSIKKRFQNGTYVISYPPYGYANVDGEMVIIPEQAEVVKEIFAGCLAGKSTNIIAKELNEKGVPTKKGAKWTGGTINGILTNEKYIGDALFQKTITDASFKRKRNYGEEEQYYCEDHHEPIIERETFEKAKEAIRQRGLEKGNCTEDTSKYQNRYAMSGKIKCGECGRSFKRRYHYTSHGKSYNAWCCGAHLEDSKSCSMKFIRDDDLKRAFLTMMNKLVFGNDLVLKPLLISITTNNSKKNANSVEDIEKEMESNEEQRKQLNTLLTNGYLERPVFAEAHNKLTMEYEHLVAKRDLLFRMDDAGYTMEQALKELVDFLNEVKPFTEWEESLFERFIEKVKVLSREKVEFEFKCGLKLKERID

SEQ ID NO: 22361 - protein, 468 aa, synthetic construct
MDKKINNNMNDFTKKVEEVALYIRVSTEEQAINGDSLRTQREALTKFALANHYHIYGIYEDDGFSATNLNRPALQRLLEDVRKNKINRILLTKLDRLSRGVRNYYKVLDVLDAHCVFWQTIFEKYDSSTASGRLHINIMLSVAENESAQTSERIRSVFNNKIHQKEIISGKIPIGYKKEEKKLVVDEDKKALVIDAFNFYLKSGSVYKTFEYLALFDPSINYPRTARLLANPLYIGTKVCKYGSIENYCEPIISKETFDEVQNLLKKNQRKRDNSDHEFLFSGLLRCNECGYKMSGKYCKNFPTNCTFYYLCSNARLKKKCNMLKQLNETKIEKKLLEQIVPEINKYIDKNNILEQEKAQIRDISKERDKVNKQLEKLRDLYVNDLIQIDHYEKQYKELTSKLDSLKEEEKPVEERKTVNYDEFRSFLSRDFVTLYNSLSRTEKRLIWASAIDTIYIDDNYNLRIVFI

SEQ ID NO: 22362 - protein, 482 aa, synthetic construct
MKYGAIYVRVSTDEQAKEGYSIEAQIKAIKEYARKNNIYTDETYIFKDEGISGRKAEKRPAFMEMIKIAKTKPKKFDVILVHKFDRFSRNREDSIVYKSLLRKEYNINVISISEPLDPDDKMSVILEAFLEAMAEYYSLNLSEEVKKGQLEKHSQGGLQTRPSFGYDVSNNKLVINEKEAEIVKFIFESYTINNIPMLIIARKLHELGIRNKNGNFFENRSLCYILNNPTYIGKLRYTPGRRNTYDFDDPNTILTNGSHEPIIDMDTWNATQTKLSKNNVFKKPRQRVDYSLKFWLKGLIRCKECNCTMVTCNRSKLRCNGYNKGKCTNHNTILIKEAENIIINQIKKDFSTQIIKNIVDNTKKTITTNEYEIITGKIKDLSDKEKRIKESYIDGIDTLEEYKANKELLIKEKKRLEEQLNLIEKPKNNNSRKKEIIENGKKVYEILEDKNIEIHKKYVAINKLINHIEYDKISDCLEIYYN

SEQ ID NO: 22363 - protein, 425 aa, synthetic construct
MDRKVQKLDASFPAKPKLLNVAAYGRVSSGKDAMLHSLSAQVSYYSEMIQNHPGWNYCGVYADEGISGTNTKHRTGFNKMIQDALAGKIDLIVTKSISRFARNTVDTLTNVRTLKEHNVEVYFEKENIYTFDSKGEVLITIMSSLAQEESRSISENVTWGHRKRFSDGKVSLGYSSFLGYEKGPDKDHPLGIVEEQAAIVRRIYTMFIDGKTPFTIAKTLTEEGVPTPGGKSKWGSAVVESILTNEKYKGSALLQKKFTVDFLQHKMKENNGEVPQYYIEHSHDAIIPPEDWELVQLEMTRRKALGRRYSGNSVFGARLICEDCGGFFGAKTWNSTNKYKRTVWQCNEKFKDKEHRCTTPHLNEDDIRARFIAAYNSLIPDRENIIDDCRRMMDVLTDTTEIDGKIADLLQEAEVVTGLTRKLIE

SEQ ID NO: 22364 - protein, 501 aa, synthetic construct
MIIREDAIYGRQSVDRKDSISIESQIEFCKYELRGGNFRKYTDKGYSGKNTDRPKFQEMMADIRRGLIKRVVVYKLDRISRSILDFATMMETFQEYNVEFVSSTEKFDTSTPMGRAMLNICIVFAQLERETIQKRVTDAYYSRCQHGFHMSGAAPYGFQLEPTTIEGIRTKMMKPDPETADIAKLMFEMYSQPGTSFGDIARYFSDEGILIYGKEMKRGFISQLLRNPIYAQADLDMYEFFKSQGTVVVNEATDFAGTNGCYLYQGRDVQERKNKHLKDQILVLAPSEGLVSSDTWLRCRKKLMANKTFQGGRKAKNTWLAGKVKCGRCGYALMSVGNPTGVQYLRCSKRADSKSCDGCGTLRTREFERFLYGEMVKKLSEFQTLTAKRETVNPKLTALNMELARVEDEIEKLLNTLTGANAVLLSYANSKIEELDTRRQTLTKEIAALSAEAMSPEQIERLSVYLNQWEEIDFEDRRQVADGLISQIRATDEHVSIEWKI

SEQ ID NO: 22365 - protein, 457 aa, synthetic construct
MSEKNIISDGKVMRAALYPRVSTEEQAKFGLSIHDQQNDLERYAKEHGMKIVGVFADAGFSARKKIEKRPAMMALLDAVRRDEVDIVLVTKLDRWFRNIGEYYKVQDILEAHNVSWKTIYEDYETTTASGRLKINIMLAVAQDEADRTSERIKKINEGKRLRREALTGDKPLGYTIVNKKFVKDPQTALAVDAFFRKYMACGSVSATQDYIREEFGLTIPYQGANKMLRSTAYYGVYYGVDGMCPPYITKEQYDQIQTMRRKVIKRTDENRIYLFSGLIVCGDCGGRIGGKVNQDHKTFHYNCSNHFCRRKPCGNNRSISEKKLEKYLLDTVECKLESYKAEFSAVQENVVEKDYRSEINALRGKLSRLKDLYLNELLTLDEYKKDYASITEKIHELEIKQQPPRPSNLPQIQKLLSHNWRDMYGALSPMQKREFWRIIIKEIRWYPDRHIEFDINF

SEQ ID NO: 22366 - protein, 578 aa, synthetic construct
MDIHDIRQQLRTKSIYDIPLRVTYYARVSSESDEQLNSLGNQIQYYEDFIRRNAAWTFVPGYIDEGLSGISTKHRENFNRMVEDAAEDKFDLIITKEISRFARNTLDSIQFTRQLLSYGVGVFFQNDNINTFDEDSELRLSIMSSIAQDELRKLSSRVKFGHQQAIKNNVVLGNSRIFGYRKEDRRLVIDEEQAPMVRELFELYATDQYSMKQIETLFWEKGYRNLNGKKIAHTTMSNMISNPKYKGYYVGNKVKVVDMFTKKQKFLPPEEWVMFKDETGEIVPAIVSEELWEQANAVLRRRSDDVKNRQGICNHANLLTGKLYCTCCGTAYYRRESQDRQGNKNSKWVCSGKIKNGADSCDSFPVYEDEIKPLLLDVFRDTEASAEALIEEYVELYKSLNRGGKLDKQIASLQKQLETVEQKRMKLLTYNAQGKLDDADFLAMNKKCSAEAKELQTQLAEALTRQESTGSLKQQLDTIRTVLRNAQKDAAKGVITKEFVTRYIDKIFATPEEDGSLRLDIKIFTGESCEKHLQSLRRQAAAQSVVPQSVAAFSPVGDPEVSTGHTFKKMIESYEKNL

SEQ ID NO: 22367 - protein, 430 aa, synthetic construct
MQIEPVVFENKSIAKKKNVCAYARVSMNDDGMLHSLNNQILFYKEEILSHPDWNFVGVFHDKPTTGTKEDRPEFSKMLKLCEEGKIDMIITKTISRFARNTVTTLKWSRELRQRGIDIYFESENIHTISSNGELFLSLYAAIAQAESLSVSENCKWRIQKAFQEGILTPIKILGYDFESGSLKVNEKEALIVKEIFNLYLDGKGTNYIANELNQRGIKTKLGCEFTPKAIHVILINEKYCGNALLQKWYSKDHLTKEKVANNGEKDSYFVEESHQAIIDKETFEKVQIEMSKRAMKYAHECKCREYPFTKKLKCGICGKSYRRKIVHGKPVLICTTYDRKGKSMCPSKRIPEEILMKVSANILGIDEFDTDIFNDMVSFITVYNGNRLIFNFEDGTKQETYWKDKSRSESWTDEMREKARERQYAKCSNN

SEQ ID NO: 22368 - protein, 517 aa, synthetic construct
MPSVQIIKATKNHTAILENKTRKLKVAAYARVSTEKDEQENSYETQIRYFTDLIRSNPNYIFVDMYADEGLTGTMLKNRDSFNQMISDALEGKIDIIYVKSVSRFARNTVDSLCICRELKNKGVNVIFEKENLELLSASGELMLTIFASLAQEESRSISENVKWTIHKNYEKGIYHMPYSSFLGYKKGDNGKMVIDEEQAVIVRKIYKMFLYGYSINSIAKELTETGVLTPRGKNEWSQSTIRSILTNEKYCGDARLQKKFTANFLDHKAVKNEGQVASYYVTDDHEGIVSHEVYETVQEMIKNSTEKKNCGDMYSRKLYCECGKLYGRKVHHSNDKYRTTIYRCNDEYSRDHIKCARLKEKQIQETYIQAVNELIQTDNIVSDIFEIAQLFKPTETIDDEISVLIDKRNIIEHEIQNLVEESSKATDIDKYRSRYDNLVKEYENASLKVAKVIEEKDKRKAKYQNILRYANHLKELTEPIKQFDDELWFSLLDKATVKEKSIIYQFKDGREVEIEL

SEQ ID NO: 22369 - protein, 538 aa, synthetic construct
MTKKITVINATAGPQNVLAECKQRVCGYARVSTKSSSQATSYTAQVEYYTAKIGENPLWEFAGVYADWGITGTKTNHRDEFNMMIEDCEDGNIDMILTKSVTRFARNTVECIQAIRRLKEIGVAVYFEKEKINTLTEKGEMLLTVLASVAQGESESISSNVQWAVRKRFQDGSFIVSTPPYGYQKDKNRNFVIVESEAEIVRWIYESYLNGLGTYVIARELNMREIPTVRGAEEWKDTVILEILKNPVYEGNMIFQKKYTQSQFPFNRKRNYGQKAKYLVEDAHPAIITHEEAEAVRNLIAYRTRSRNVEGTDYNKRYLFSSKIICEECGQKFRRQIVHKDKNYEKVIWTCRRHMENKELCSTKAIREDVVQQAFLRMWNKLYTNRGALLEPLWKELTSLADSRQDSEEMIQLDNEIKNLKEQSRILNQVMRNGYMDSAVFMEKSNQINWKLTECRRKKLFLGRKQKRTKEIVRTEQLIHLLSGSDGLQQKFDEKLFRMTVQNIFISRDHDITFCLNNGLRLTERGGMSDAMSYAHRI

SEQ ID NO: 22370 - protein, 544 aa, synthetic construct
MGTTAKKVSVIPAKVQFDTSIKLSDKMLKVAAYCRVSTDEEEQDSSYEAQVEYYTNKIQDNPNWKFAGIYADDGKSGTNTKKRADFKTMVKDALNGKIDMILTKSVSRFARNTVDSLVTIRELKAKNIAIVFEKEGVNTLEGTGEILITILSSLAQEESRNISENVRWGIARKFEKGKVLVNCAKFMGYTKNENGDLIIVPKEAEIVRLIYRLYLEGYSSVKIKKYLEDREIKTATGQERWHTTVIDNMLCNEKYMGDALLQKTYTVDFMTKKRVVNNGIVPQYYVENDHEAIIPKEIYYRVQEERMRRANLCKAAVTRKKNQKSKYSSLYALTGIVICGKCGHEYRRVTWSRNGQKKIVWRCSNRLTNGVKKCPNSETIKEEALNRAVMEAIHKITCDDREFIETFRQNVISVINTKEALREEEDYDTLLKNKQEEMLALIMENAKAGEYTQEFDARYHAIAEEIQSIKKNQTETRKREETLRECNQRMYEIDDFLRTTTCRIPEFDNDLVRRLISTVKIISEEKLMIQFKSGIVVEQEIRYD

SEQ ID NO: 22371 - protein, 526 aa, synthetic construct
MLERMVYVIVALYARYSSDNQRAESIVAQLRACREYCKKYGYTIIKEYADEAMTGTNDRRPQFQQMLRDAEAGMFEMVIAHKVDRIGRNEFDYYSNRHRLEACGVQVAFAAQGFDASTPEGGLMNNMLVGLAAYYSRNLSKEVKKGLRENVLQGKSTGGKPLFGYRYTADKRYEIVAHEAAAVRLLFDMYIQGYGYLQIANKLNGMGFRTRLGNPFGKNSLHDLLINRRYIGTAILGKNTKTPSGRRNNHRPDPENMLIVENVCPPIVEREIFMEAQEKMQQRKNHRGANSAKHDYLLSGLIMCEHCGQAMTGTTSSKKNGLEHRYYRCPKKTRLGTHVCPNRSVSADQLEQLVIRQIQELFLDPDTLDELMDKVEVNYRQMLEKLEAEIAGLKKQMADTDKQIDKFYDFVCDGGDVDERAKEHYRQLKEKYKKLSTKLEEKEASRPANISKETIRKYIERYRREMDTGKAPNLKGTIAAFVDKITVSDASITVRYRFKPTLSRIDEFDLYGALGGSRTHAFSSGG

SEQ ID NO: 22372 - protein, 516 aa, synthetic construct
MPKTEEKQAAKAVIYARYSSDRQREESIEGQLRVCEDYARRNNITILHTYADRAMTGRSDQRPEFQMMIRDAATMAFNVILVYKLNRFARNRYDSAKYKHKLKKYGVKVVSAMENIADDPSGILLESVIEGMAEYYSAELSENVLRGMTQNALEGKWPGGVIPLGYKLDKGGRLIINEEKAPIVRMIYQMFLDGMSVARIERELNDKKYTTDAGKVFSRSRVYYILHNERYIGTFQWKDIKKEGIIPPIISKEAFHAVQERINAMKSSSYRTNNNYLLAGKAFCASCGAKVSGTSGKSQNGNKYCYYGCSHHHRSARYEYCETKNIRADVLEKLVCDKTHEILSSKKAIKEIARQAVKLRPRNESELEIRALKNHISSCQKKIDNCIKAIENGVMSNALVESLNENERTLDVLKEKLAKASLMQGSGLLTEEKIQFFFETIREKAKETEKYNDILLTSLVRAVYICNEYVEIQYNYAEQLPILTNPVRIESCSYKCTNGGTIWIRTKDLFDVNEAL

SEQ ID NO: 22373 - protein, 421 aa, synthetic construct
MKLRKIEPLKPKQKKLRVCAYARVSTDSLKQGESFENQVSTYERVIKSNPEYEFVSVYADQGMTGRSENRPEFQRMIADCKTGKIDLIITKSISRFARNTTTVLKYTRELKEIGVGVLFEENNINTLSSEGELMMTVLASFAQEESRSISENNKWTLKKKFERGEGMVNTARFMGYDKDETGDLVINKEEAKVVRQIFKMYLSGMGCHRIAKALNEEGVPTIAGSSWHASTIKGMLTNEKYKGDFHIQKTYIPEGTHQSVKNNGQVQSYYVTEDHPAIISAEEWQQVQELMEYHRKQRNIGKGEKYQKRYPMSGMLVCPYCGKSLRRRYVYNRKVEWLCATYIHKGKEACKGIRIRDTELAGLSFSEPMVVEEVMIDGEKHYGYTSKRAYDAGERAADRIEKESRSVLPRINRPRRTVIKL

SEQ ID NO: 22374 - protein, 438 aa, synthetic construct
MTTKGGIIVQIEPVVFENKSIAKKKNVCAYARVSMNDDGMLHSLNNQILFYKEEILSHPDWNFVGVFHDKPTTGTKEDRPEFSKMLKLCEEGKIDMIITKTISRFARNTVTTLKWSRELRQRGIDIYFESENIHTISSNGELFLSLYAAIAQAESLSVSENCKWRIQKAFQEGILTPIKILGYDFESGSLKVNEKEALIVKEIFNLYLDGKGTNYIANELNQRGIKTKLGCEFTPKAIHVILINEKYCGNALLQKWYSKDHLTKEKVANNGEKDSYFVEESHQAIIDKETFEKVQIEMSKRAMKYAHECKCREYPFTKKLKCGICGKSYRRKIVHGKPVLICTTYDRKGKSMCPSKRIPEEILMKVSANILGIDEFDTDIFNDMVSFITVYNGNRLIFNFEDGTKQETYWKDKSRSESWTDEMREKARERQYAKCSNN

SEQ ID NO: 22375 - protein, 590 aa, synthetic construct
MGLFLLYGKNIMRNKSLAGRANNRAERPRKVAIYIRVSTTHQIDKDSLPMQRKDLIAYCELILGIEDYEIFEDAGYSGKNTDRPAFQEMMQKIRSGSFSHLLVWKIDRISRNLLDFAEMYEELQSLRVTFVSKNEQFDTSNAMGEAMLKIILVFAELERNMTSERVTATMISRANQGLWNGGRVPYGYAYDAETSVFSIIQDEADICQLMKTDYFEHKSIIHTAKLLNDKKVPTRSGALWSPTAVWKILSSPFYAGIYRYNHYKGTENRTINPEDEWVLVPDHHPAIFTLEEHEKICDIMDTNKRMSNLPGQKHRSKNVYVFSGILYCGKCGNKLVSTPGRLQADGFRTTTYSCPKKRKTHECDNPSINDLIVGEFVVNYILNMLNAKSSFSSISSPAELEKRLLCGGSFKEVLHISEDGLNEFYNLLSRYGSDSSYVFAMKRPRKKKAAVNPEVEALRKDKEKQERALKRLQDLYLYSERAMTEKDFIIQKNEISSRIQDINTRLGMVTHDANSTLSDEDFVRQASHLLITKKLIGREYIYYKSLAQTVSPDVLKIYMETILDSVYVVDGRVSSIIFKNGLTHTFVYQN

SEQ ID NO: 22376 - protein, 527 aa, synthetic construct
MAKRKVTQIPATINKFTAKPVDSKKKRRVAGYARVSTDHEDQTTSYAAQVDYYTNYIKSRDDWEFAGLYSDEGISATNTKKRDGFNKMIVDALAGKIDLIITKSVSRFARNTVDSLSTIRKLKEHNIECYFEKENIWTFDSKGELLLTIMSSLAQEESRSISENVTWGHRKRFADGKVSFAYSRFLGYDKAPDGSLVINEEQAKTVKLIYKLFLDGLTMHSVANELTKRGLITPGGKTNWSQSTVRSILTNEKYKGDALLQKSYTVDFLTKKVKTNEGEVPQYYVENNHPAIIEPELFDLVQSEIQRRGKGSSRYSGVTMFSSKVQCAECGGWYGSKVWHSNDKYRRVIYQCNNKFRHKTGCSTPHLTEFEIKDYFVKAVNQLITEKAEILDNLQLIRITLCDKTDLIKQKESLEEEINVTVEMTQNIVAENARVAQNQDEYNKRYSSLVERYNKLKEEYDSICSTISDKDAKYEQISRFIKVLKGQQELITEFDESLWSSLTEKMVVKSKEEVTVVFKDGTEITVE

SEQ ID NO: 22377 - protein, 570 aa, synthetic construct
MEVFNLEKNLKCALYIRVSTFHQIDKDSLPLQREDLINYAKYILGIDDYVIFEDAGYSGKDTDRPSYQNMMTRIRMGEFSHLLVWKIDRISRNLRDFSDMYDELKKYNVTFISKNEQFDTSTAMGEAMLKIILVFAELERKLTAERVFAVMMSRAEKGLWNGATVPLGFIWDEEIKFPKIYEPEAKIVQYIFDLYEKKRSTTKVAEQLNQENVKTKRDGTWTPRTVGAILTNPFYIGTYRYNTKTQKTRRWKDKSEWIVIEDHHQAIISKEQFERVAKILKDNYRGDYNRQRASKNVHILSSIIKCFKCGSNMNAGNDRARKNGFTPSRYTCYQIHKTYTCNNYASDLTVLPFIINYIGNYMTLQDRITKNHSYRDMESILLRGKYFTDIEHINKDDIKCTYKLLVNNLPVINYKLQENQEDKKTTFKDRYDIYKNEKEKQENALKRLDDLFLYAEDSMPKKDFILKRQEITNKIEEINSKIQELRAEENNFVDNKEFSLNAKASFYLITQLIGNSKNIDVRYLLENVDKSIIKDFLSTILNEVSVDHQKVQYITFKNGLTHHFEYKENQ

SEQ ID NO: 22378 - protein, 536 aa, synthetic construct
MPKNKRTTEKQEYNRAVIYARYSPGPNQREESIEGQLRECRDVAKRHELTVVREYADRRMSGTNDERPDFQRMLRDADRGLFDVVITWKNDRFARNRYDSAVYKQRLKRNGVKIIYAKEVIPDGPEGIILESLLEGMAEYYSANLSQNIRRGQRENALEGKFIGGTIPLGYKLDAEKRYVLDPEKAPVVLQIFERYIAGESVAAICDDLNSKGYTTARGNKFNRSSLHRMLANEKYTGVYRFEDMVTPGVIPRIISDDQFAAAGARAQKNKQSRRSPENVSVEFLLTGKLYCGCCGQPMGGMSGTGRHGGKFYYYQCNGRKKGGCKKKLVRKNVLEKLVAELVVKNILGDTEAINRIVDRCMEIQLKERKEEMLPAQALRRELKAAETALANVMKAIEAGIITASTKSRLLELEERCAALKQGIAAAEIVPPKLSREQLLFIFEKYRGRDADDISFMRSVIDAFIDKIFLYDDKLIVTFNLSDEARNTITLSDLKKASAEPLEADAAELCGGSSNDALTPPAKNTHFLSLTRYGCA

SEQ ID NO: 22379 - protein, 498 aa, synthetic construct
MEIQIREGSREQKRKLRVCAYCRVSTDADEQENSLENQIRHYETVIKANPSYEYAGVYSDFAISGFKEKRPGLQKMLADAQKGKIDLILTKSVSRFARNTSIVLEATRKLKELNVGVFFELQNINTLSGEGELMLTILAAFAQAESESGSVGAKMVYQRKYEAGIPVQYLERSFGYMKDERGVYIADESEAVWVRKIYEMAADGYTPASIKRYLNENGVKTVGGAEWIDSTVFRLIENEIYKGDYIMHKHFVNEERKLVRNRGEVDAWYIEDDHEAIVSPELWQKAQDAIEAKRDYLAEGSVIEEFTEDNYPYMNRIFCAKCGHPLYRRIYSNGNRLNWGCSGTKRHGKSFCEGINIPDGVLRKAWHFDGNMYIDEKPFVKGTKEFTYLKESSWKRRHKKKVPEAIPENTEEAYPYRKKIFCGLCGSRLVRHVNPKSHKVIWICNGAKRKGVAFCRGTRIPDSVIRGWGEIKKDIYIQRKDDKNGKKRYSYTSKKPTA

SEQ ID NO: 22380 - protein, 520 aa, synthetic construct
MLNAVIYARFSSDMQREESIDAQVRACKAYAKSKGYTVVKEYVDEAKSGRSTLTRDAYNQMMADAMENKFDVIIFHKIDRNSRNELNYFIFKDKLEKLGIRYEYAAQPIDAATAEGQMMETVMVGMAAYYSRNLAKETKKGMNENAYKAIFNGGYAPLGYKIVDKHYVIDEKEAEAVRLIFNLYLDGKGYGEICLALAARGYTTRSGKNFPKNSLHDILRNERYMGTYTFNRVPKTKRRNSHSYARPNDFISIPDAIPAIVSKETFLAAQEKMLLNKKRKGGAYTAKRDYLLSGKFFCGYCGSAMQGYSCCTRGNMYYYYSCARKDRVPADRCKQKMIRAEVIEHWIMSTLEREIFSDAGIQRVADSMSTAFGNANKEAKNATTILLQRKAAAERKLNNLYQVIEDGDADEFDMQRLKKAKEELRNINNEICETAVKSALDIDTSKIVSLLKNMREEIFAKKNSHYAKQAIELLVKRVTIIDKTITLSLTTEGCLSLLVPRTRTQTSGYKFSISIDTKAA

SEQ ID NO: 22381 - protein, 584 aa, synthetic construct
MKRTAIYARYSSDNQRAESIDEQIRACRYYAQQTGLYDIVAVYKDEALSGYKNAHKRDGFAQLMADAEAGKFEAVMVYELSRFSRNGSDTIVNTEKLARLGIEFVSVREKLDQTPEGRMMMFVITGMNEYYSANLAIETMRGLKENAYQAKHTGGIPPLGYDLDSNGHYIINPEEAAAVRLIFDMYLEGNGYTAICDELNRRGYRTKRGTLFVRNSMYDLLRNEKYTGSFIYNHMAKAKNGKRNRHAYKSDSEVIRVENAFPAIISKEEYRKVLKLMEQNKRKGARNAAVHDYLLSGKVYCGHCGKSMYGETRYRKEYSYSYYSCNGHKSKICGKHSIRCDKLEAEVIRQLNELFFSDEILDRVSEKIYDDSQNHFMDERAAILRKRSADIKKKIDNGTKAILDGVDSDELRSAVKELSAQKKQIDQQIVQIEAAADNNGRTFEEVREMAKNFSDISKLPRDQQKRIVQKFIWRIYVYDSENPDDGDIVKIVLAPTEAARDELNSMAEDYVAITDMLTSTNGTSQGVPMQRPHLFFGTSGVFCFDILNSFDEQLSYYYYDINTAYYVIKTANPAEPKFNGVLNW

SEQ ID NO: 22382 - protein, 562 aa, synthetic construct
MTDPRVAIYIRVSTTHQIDKDSLPMQRKDLISYAKLMLHTENYSIFEDAGYSGKNMERPKFKEMMSLIRSGFFTHVLVWKIDRISRNLLDFAGMYEELKSLGVTFVSKNEQFDTSTAMGEAMLKIILVFAELERNMTSERVTATMISRAASGQWNGGRIPYGYDYDEKSMTFSINEEEAAIVHLIHDTYEQTNSLVSTAKKLNSLGYKSRYENDWSPNSLRIILTNVWYCGSYRYNTRKEGDRQRPKAESEWITVENHHPRIISEEQKEKVIAQLKENRRLITAHNIYITKNNVHVFGGLIYCSECGRRYTSTVTSKKGWKFGRYLCPTRRTSDERCKNKSVTDLTLGDFIINYIVNLLHAQQQRTNIHSTAELSKILLRGFVFSYIKSINPVDLQRIYDAIKALTGIQKIYGDNIVARDGSTTKNKLAALKAKKRKQERALERLTKIYLYSEDAISDTEFVVQKKCITDALEEVNEEISSFKTASVSTSISDEDFIRRASEFIIAKKLGDRNFVSYERLAKTISPSVLHEFFVSIIDSIIVKDGRIKSLTLRNGLKQTFIW

SEQ ID NO: 22383 - protein, 564 aa, synthetic construct
MPRAQKAAIYCRVSTLHQVDRDSLPMQRQDMINYAKYVLGIEEYEVFEDAGYSGKNTDRPAFQAMMERIESGEFSHVLVWKIDRISRNLLDFATMYARCKKLGVTFVSKNEQFDTSTAMGEAMLKIILVFAELERNMTSERVMATMIARATDKQWNGGRVPYGYHYDKASKTFSIREDEAVTVRHIYELYAKLKSLQYTADALNREGLKTRRGYAWSAATCHIILSSPFYLGTLRYNYRSEADKTFSFKDKSEWVLVPNHHVPLVTQAQYDYCQHWLSKNTKWTSKQHTQRAHTHIFAGLIRCGYCGALMSASQGKRRVNGYCPSVYICGSKRHHKGCRNKFTYDPEVGGFVFRYIANMMRLKEVFKPSMRDQRIARILTDGLPGVHIGDASSIAVLRRMLLTQSGARIYTRVHDGTQKQGKKLARERTDLIAEMRKQERALSRLDELFLFADSPMPQKDYLLKKQQISDKLASCRRQLQLLEQKSLFTSTLSDEQFVFRASSLLLQKALRERRIDIQQLTADVGRPALKDFLLSVIDSIVSKDGNVIELTFRNGMTHSFRYDA

SEQ ID NO: 22384 - protein, 491 aa, synthetic construct
MIYARYSSDKQTEQSIEGQLHVCKEYALQHDIVIVDTYVDRAMTGKNDRREDFQRMLRDSQKKLWDYVLVYKLDRFSRNKYETAIHKKTLRDNGVRLLSAMENIPETPEGIILESLLEGMAEYYSAELAQKVSRGMHESKVKGNFCGGVVLYGYRVENKKVFIHETEAPIVQQIFAQYVAGRTITDIANELNARGMCCHGRPFRFNSIWRILRNERYTGVFHAGDEIFTNTYPPIIETALYEQVIALMKSNHRGRISEDCDYLLRGKIRCGYCGSPINGESGTSKSGRVCHYYKCHARKKNGKCSKKTVRKEHLESLVLSVIEQLFSDRTLQAVYADKIVESYEEERRKSTVLIRLREELNGVDAAIDNLLRALEAGIITDSTQKRLQKLEARKADIEVKIENEKHIYSCFATSREILAFFSDILKKSGKQLVQLLIKNIILYDDRMEITFNYTRNRSTENESRGLVVHEGDYTLGEGSEYATDMQVRLKF

SEQ ID NO: 22385 - protein, 668 aa, synthetic construct
MAYVRNKKKILKFWSKKKVALYVRVSTRYQVDKDSLPFQRKKLKEYCKFLGIEDFVIFEDDGYSAKNTDRPHFQEMMSRVRDGEFSHLIVWKVDRVSRNLLDFAAMYQELKDHKVTFISMNEQFDTSTAIGEAMLKIILIFAELERNMTSERVTGIMLDRAEQGLWNGARMPVGYRWNPEIKFPEPDPEEAKIVQFIFDEYERVRSTTKIARYLNHNQIASKRGGQWTSKLIRDIIRSPFYIGTYRYNLRESGRGPLKPESEWIVRENNHPAIIAKEQFDRCNAIMDENGTSRDTSELRARKYVHTFSGRLVCGKCGANMIASKDRARANGWRPSMYRCAQRSRMMDCDNSKTVNESYIGPFIFNYVANLARIQKNFKNIKTLEQLEKELLKGPEFENMKVSKESLRRTFDALAFQEVGKGAYLPDINLSDGDDDYTAAEQLSILKRELDKCKTAIDRLTDLYLYDPDSMTKEEFAKKKRDLVNKIAGYEKQIEASQATGDKDDLADLEFIRKASAFLVAQRIVSKKHVDYIQMALDLDNEILKDFVDQVIDRIEILEGRVQSIRFVNGLVHEFTYSTPADLPVCQKCGGRIGSTCGCRTRTFDFAGKSYRRIKVGDPGDKFHGVAGAVCPECSAQVGRWHHWKCGIERCPICGEQLIACEHGPNGKD

SEQ ID NO: 22386 - protein, 488 aa, synthetic construct
MEKTRAVAYIRVSTERDAQLHSYEFQEHYWQSAFEDDPNTDLIGIYADKGISGHSVQKRPKFLVMMQEAREHKFDKIYTKSVSRFARNTTQLLEAVRELRDLGIEVVFENENIHTFQPTSEIFLTIAATIAENDLEVDSARQRWSIQHRCENGWISVGSGLFGLKLTADNELEIVPEEAAVIRYIYESYVDGGIGSKKIADALNAAGVQSRNGYPWDAKHIIGLLRNEKYKGDVIMGKSVRHFGEYHKNPNAEYAPRYYMEGTHEAIVDRDTWEAAQRILEERSRNHCRTRIAHSFTGMIECGCCGKNYLHKVNNSQCKWQTDIWACRTYLRDGKKACGNSRIKDTVLKEKFISAYNEFIERRPQGDSMVALQEVLEDLRQQEQELAELMMQRLIPKAAYEEERKSVKMQITDISEKISERRAKRVPESEYVPITEFSEEKAKRFLSKVVVTMFTVTFVFYNGAKITRSYDNGQPGNKVGWNKKKEES

SEQ ID NO: 22387 - protein, 540 aa, synthetic construct
MATATRRVVRTMPQMFIDVADNQSERLQVAAYARVSTEKEEQEDSFERQVEHYKQLIYSKPEWQFVDVYADPGISGTRAEKRPDFLRMIEDCRAGKIQKVLVKSISRFARNTVDALQYIRELKDLGISVYFESENIDTLTPGGEVLLTLLAAMAEQESRTISSNIKWAWQRKFQKGDVILNTGLMLGYRKVGKDDEGHDVYEINEEEAEIVRRIYREFIAGYSITQIAKRLQADGVKTKLGKENWRHNVIESILTNEKYTGNALLGKTFKPDVLTKYRQKNDGKKAPIYYVEGSHPAIIEKGLFDLAQQEMQRRRDANDNKVGGGRYSSRYPFSGMLVCGICGSKLRRQVRTMGSGKRTASWGCCNRINNGRAECDSHHVNEDVLEATYLTAMRRLVDSAEEVVEVVRDGTELALEPENKAAMERIDEETIQLQEAALALHKAKQRMEIGAVEYASRVKEYSERMKELEAERNELQGTAAKYAEVRMWLDTFIEQTMQSDTLTTVDGTTMKMLVDRIHVRNDGIVVEFKCGVAIEQEYVK

SEQ ID NO: 22388 - protein, 488 aa, synthetic construct
MPSYAIYLRKSRADMEAEARGEGETLARHQAQLMELARKRDCNIVKIYREIVSGENIASRPQMQQLLADISDNKYDGVLVMEVERLARGDTIDQGVVAQAFKSTGTKIITPAKVYDPENEFDEEYFEFSLFMSRREYKTIRRRMEAGRLASIKEGNYISPEAPYGYRKTHPEPKVYTLDIVPDEAEVVRLIFDMFLNGKGARAICTTLNNMGISPKKSPLWETPSIKKILRNPIYTGKVRWQNKASGDTLYNGRHQAIISEEIFWKAQQKRENNPEAKVPNNLEVKNYYHGMLYCKNCGHAMLRRIVSSNGCEYMLCRRNECKGKVVSAAVSEIDEQLILSMKYRLEQLEKSMSEMKNKISEKQPDMKTPILSEITRLKNQREKLYDLLERGIYDENVFLERSSVLSEKIKAAEKRFDEIVDNEEHKLSPQDSADRLKIVIRDFDGANIEEKGRLLHSVIKRIYYSKSIRMCKNKKGNTDLNLEIEYL

SEQ ID NO: 22389 - protein, 421 aa, synthetic construct
MKLRKIEPLKPKQKKLRVCAYARVSTDCLKQGESFENQVSTYERVIKSNPEYEFVSIYADQGMTGRSENRPEFQRMIADCKAGKIDLIITKSISRFARNTTTVLKYTRELKEIDVGVLFEENNINTLSSEGELMMTVLASFAQEESRSISENNKWTLKKKFERGEGMINTARFMGYDKDETGDLIINKEEAKNVRRIFEMYISGIGCHRIAKALNEEGVTTVTGSAWHASTIKGMLTNEKYKGDFHIQKTYIPEGTHQSVKNNGQVQSYYVTEDHPAIISVEEWQQAQEMLEYHRKERNIGKGTKYKNRYPMSGMLVCPYCGKSLRRRYVYNRKVEWLCATYIHKGKEACKGIRIKDTELAGLSFSEPMVVEEVMIDGEKHYGYTSKRAYDAGERSADRIKEESSSVLPRVNGPRRTVIKL

SEQ ID NO: 22390 - protein, 574 aa, synthetic construct
MRKAKENPQKEKPQRAAIYLRVSTSYQADRDSLPMQRKDLVGYCEYALNISDYTVFEDAGYSGKNTDRPAFQKMMMQIRNGMYSHLLVWKIDRISRNLLDFAQMYEELKTLGVTFISRNEQFDTSTAMGEAMLKMVLIFAELERKTTAERVTATMISRANDGTWNGGRVPFGYDYNKETQTFSINGDESYIVLQMYDLYEKTDSLVRTARELNKLGYVSRQHNPFSPVSIWIILRNPWYVGTYRYNYYKIPGRRAVKEESEWVVIENHHSPLVSKERFDHVQKMLDSNARYRNTPGRSSKQKNVNIFSGLIWCSCCGAAFTASPGKLHASGYRPTKYGCPNVRKTKTCNAKYTSDPVIGEFLLNFILNVINAQKSFDKISSPADLESRLLRGDAFRDVAKIDSASVAALYEMLSSFSPADSVLLKKPTIKKDLDPELRKLRADKRKTERALTRLDHIYLYSNKQMSDKEYLVKKNDLMTDLKELDKSIGLLTSESWAQSLSDDDFLEQASSFIISQRLQEREYIYFQGLAESTDPAVLRAFFVSIIDSVRMRNGLVETLTFKNGISHKFTYKAI

SEQ ID NO: 22391 - protein, 587 aa, synthetic construct
MEGLFLFDGGIMKKNFKMPGSGSETPIRVAIYVRVSTVYQIDKDSLPMMKQDLTSYCKYILNTDDFVIFEDAGYSGKNTDRPAYQKMMSQIRQGLFTHLLVWKIDRISRNLLDFANMYAELKDLGVTFVSKNEQFDTSTAIGEAMLKIILVFAELERNMTSERVTATMINRASNGVWNGGRIPFGYSYDKPTQVFSIDPEENKIYNFMVETYEDTQSIVHTSRRLNEAGYRSRNGNMWSPVAVWTILRNPWYKGVYRYNYYKIPGRKAIKDESEWVIVENHHPASIDPDRFDRIQATLDKNARYRNTPGRKTAQKNVHVFSGLVWCAECGSAFTASPGKLHVSGYRPSKYGCPNVRKTKTCHAKYTSDVVLGEFLLNYILNILNAQKQFAYIHSTDDLQKRLLHGSTFSNVDHVDPDGLASLLNMLEKCSGSDPVLLKRPRSKPKMDPELKRMMADQKKQQRALDRLNDLYLYSDDSISEREYLVRKQQITDQLQEINEAIGMMSQEPWMRTMNDEEFIRQASSFILTQKLADKQYIYYENLAESLDPEILKNFFVSILDSIILRDGRPETVVFRNGLSHTFTYKDS

SEQ ID NO: 22392 - protein, 424 aa, synthetic construct
MPEERIAKKRCAIYCRKSVEEGLEQEFNSLDAQREAGEAYILSQKANGWVCLPEHYDDGGYSGGNMKRPALQKLLKDCETGLVDIIVVYKIDRLSRSICDFADLSKKFDEWGMQFVSVTQEINTATPSGRMMLNILVTFSQYEREITAQRISDKMSASRKKGIWVGGTVPLGYVAKNKKLVIHEEDAKTVRHIFQRFIETQSPKLIAHELNLAGKRTKKGKVWNTSHIYRILNNHTYNGEVKYKENICKGEQERIVSAEVWERTRKILAANSPIKDRSRRMETVAPLKGILKCGHCGGAMMPAYGRKNGRHYHYYLCSKDSKRAESQCPVRQLPAGEIEVVVKTQLKRSWNIPPFSPLWRPPREFRARTFFNCWNPISGRKSRLGEYNRLVQSLVARIVVWRDHLEIEMKTAGIKSLTGEFCND

SEQ ID NO: 22393 - protein, 560 aa, synthetic construct
MKKQQKCYIYTRVSTSMQVDGYSLDAQKDKLRKYAEYQEMSIVGEYSDEGKSGKSVEGRPQFKQMLADVESGKDNVDYVLVFKLSRFGRNAADVLSSLQKMQDYGVNLICVEDGIDSSKDAGKLMISVLSAVAEIERENILVQTMEGRRQKAREGRWNGGFAPYGYQLVNGELIIAEDEAEIIRIIYDKFVNTTMGMAAIAAFLNNSGYKKKLRQNNTIEGFSTSFVKGVLDNSIYCGKLAFGRRKNEKIPGTRNGYHIVKQKDYLLSDGVHEAIISEEMWNQAHRKRQETGVLQVKTHSLEHEHILSGIIKCPVCGSGMYGNVNRKKHPDGGYYKDYFYYACKHRKLVDGHRCTYKRQWNEDRINAAVEEIIRKFVKNPKFEQEIRKQIGSSIDTSELDKEYDGLKDRLSQTTGAKNRLADQMDHLSVSDKNYDKKYNDMQERLDKLYDEITDIEDAMEEVETRLYNIRQDKISEDNVYQFLLFFDKLYDKFTDLEKKTFLRSFLSDVFIYEEEQKDGRILKGLRFKFPIYMNGRNVLGVDWDNESTDETVVALHRTDL

SEQ ID NO: 22394 - protein, 543 aa, synthetic construct
MTDKITALYCRLSQDDMLQGESNSITNQKAILKKYAEDNGFRNPVFYVDDGVSGTTFERDGFKSMMADVEAGKVGTVITKDLSRLGRDYLKTGEYIEIIFPDYDVRYIAINDGVDTLKSENELMAFKNIFNDWYARDTSKKIRAVFKAKGQSGKPLSLPIYGYKKSEADKNMWLVDDEAAEVVCRIFKLCIEGHGSAQIARILTQEGIPTPTAYALSQGRDNGHKDAKLHRWSGKTISHILDRPEYIGHTVNFRTHKKSYKNKKTVRNPQEEWLIFENTHEPIVTQQEFDLVQELRKNKRRPTKHEEVNPFSGMVYCADCRKKMYLCRATSLTADQEHLKCSTYSSDKDACSAHFIRTVVLNEIVLNELNKLLVRVKEHEDEFVQAAMDNSVQKQSSELTKAKKVLKQTEKRIIELDRLFTRLYEDNVSGKISDERFAVMSEGYEDEQKKLKASVTELTAYIETAEQKSADVTAFISVVQKYEHITELTPEIMHELIEKIVVHAPDKSSGHRTQQIDIYYRFDVAVSTAVADSMKYDKKRKVA

SEQ ID NO: 22395 - protein, 573 aa, synthetic construct
MAVLPSISRKMKALKVAIYVRVSTHWQIDKDSLQVQQRELIAYSQLVLGINDYVIFEDAGYSAKNTDRPDFQKMMSRIRSSEFSHVLVWKIDRVSRNLLDFASMYAELQNLGVVFISKNEQFDTSTAIGEAMLKIILVFAELERNMTSERVTAVMLSRANNGQWNGGRVPYGYRHPKGSTSFFIDETEGPVVERIFQLYEAHHSSLYVTNVLNNEGILTRSGNAWSTVAIHKILTSPFYYGAYRYNIRKGTNGPKRENSEWVTFEDHHPPIISKERFDAIQYRMKRNKRGGNQRGQSVERKNTHIFSGLLTCGHCGSVMTSSPGNRRADGWMPSNYACFNRRKSAASCKGKYVSDITVAPFVLSLISNILAAKSKVGQRTKSEVLEKQLLSGAAFCDVKHINEDGLNQLLTILKNGSTGLEYTPEFKNADSSSMSSEIASLNDQRRKKEIALRRLKSLYLYGDEEIPEKEFIIERKKLVDDMNQIDARLTELGIGDVAVPSIDDAFVEKASYFIMVEHIMNGDCNDPSSFIRNIDPSVVKSFLKSVLSNIVILDSNVSSVKFKNGITLEFQYE

SEQ ID NO: 22396 - protein, 508 aa, synthetic construct
MNVAAYCRVSTDKEDQLNSLEAQKKFFTEFTEKNGHNLVRLYADEGISGTKIKNRHEFLQLMKDAKSGLFEMVIVKDISRFARNTVDFLQSIRQLKALNIETVFLTANQTVLGNSEFVLTIFGALAQEESANTSKRIKFGKKINAEKGRVPNFVYGYDKTNGDYFNLTVNQNEAKIVNEIFTLYTTEDFGTTKIANILNERNIKTKRGNAWTQNSISRILANSIYIGKIINGKEEIQDFLTSKRVKKNEDEWFVTERPELRIISDELFNKAQQTLEKRKNAFTHDHERQSSKHLFSTLIKCKECGYSFRRTCYKGNYRWVCSVRNMRGTDACPNAVVLDEQVLTQNLQEYFSHSLKNRDTMVKNIVSRFNTLYHDSNENQNRFDELDNKRTSLEKQRQKYMDMYVDELISREELNIKLKNINADLERVKNELTITEYNLNRSEMLDTLLAQTFTNMENVTELSTVTNAQLKKIIDRIEVDRNGNIDIFLKTFDEIGLEKVFLITDDHT

SEQ ID NO: 22397 - protein, 587 aa, synthetic construct
MSRSKASLESKLSERKAALYIRVSTHWQIDKDSLPVQREDLINYAKYALGIDKYEIFEDAGYSAKNTDRPAFQQMMSRLRTGEFSHLLVWKIDRISRNLLDFAEMYSEIKKLGITFVSKNEQFDTSNAMGEAMLKIILVFAELERNMTSERVTAVMLSRASNGQWNGGRIPFGYDYDKETRTFSINEAEASVINLIYDTYEDTNSLLYVARTLNEKGIRPRSGLPWNPTTISTMLKNPFYTGAYRYNYHDETASGGNTSGKHLKDKSEWIFIKDHHPAIIPPERQALVLETLEQNRRSNKRSAKTYTRINTHIFAGLLFCGNCGNQMQSTIDRVRSDGYRPSIYICTRRRRFNDCQNKYVSDVTVAPFVLNYIANILKAQNNFGKSTPLDTFERKLLRGEMFADVDHIESIGLTEMYDMLKRGNLSDSVFSSARVQDDESDQMAADERDLLASERRKKERALDRLKSLYLYNDEAISERDYLVEKKSLTDSIGKIDKRLEEIERNSSHHFTLTDEEFMAKASVFIVTNQLQGKRFIDAEKLLRQIDTRVVKEFLNSVIQKIVIKDGRVLSIRFKNGLEHKFLYKGAE

SEQ ID NO: 22398 - protein, 582 aa, synthetic construct
MAKHAITIPQNPKAALYIRVSTDMQADKDSLPLQESDLRKLADLNGIKDIEVFSDAGFSGKNLNRPAFRSMMDRIRAREFSHLYVWKLDRISRNLLDFLELYDELKCYGVAFASKNECFDTQSPGGEAMLKILLIFAELERKTIAERVTAVMLGRANENKWNGGRVPFGYMPGPVTTDANGKKCKSWPVPDPIEAPIVRAIFELYLREKALKKVAKALNAAGYRSRKGTQWSDTTVRCILKNHFYKGEYVYNRQNPNANRREDFYRSENDWVVVTGQHEAIVPEETWRRCNEMLSKNRSWLAPIGSLVSAQDKYIFGGLLQCAECGYTMNSKDRTRIHDHTHSSYYYCTGRWKAPAVCTGEHSGYASDRVLLPQILKLIARMIEACANAIKFASAEQLVSYLLNDNLIPGATGIEEAQRIYMIVRAHVKHIYGVDRANQYNPNALLVEQSQKEKEKQERALSRLKRAYLFDDGDMSEAEYFEQKAAIEGTIAKLDKQIKSLSGNDIGADEAYLAQLSKLIMIKKLQDTNSDFDYYKLAKAIGRKPIHDFLTEIISRIIIGEQNRIIKIIFKNGVSITLQYEK

SEQ ID NO: 22399 - protein, 526 aa, synthetic construct
MLYELSPSDISHIIIYLRKSRSDDPYMSVEEVLSKHETQLQEHAVSVFGQRIPEEHIFREVVSGETIADRPVMKQVMKLLETGSIKGVLVIEPQRLSRGDLEDCGRIINAFRYTNTLVLTPPKNYNLADEYDRKFFEMELTRGNDYLEYTKKILNRGRIASVKQGNFIGSVPPYGYRKVQIGTGKSAYHSLEVIPEQADAVKLMFKLYLAGNGFTNIAKKLDELGIKPLKSIVWSPAAISDMLENPVYIGKIRWNWRKTEKKIVNGKIVKTRPKTSDVSEWVYVDGRHEPIIDLATFEAAQERRGKTPKVKKYSELKNPFAGLLFCGTCGKAMSLKIYTQKNGSKCEMMLCNKQSWCNTKSVKYDVFVDRIIETLENTIADFELKLENDDSSTTDLQASIISNLQNELKRLKEKDIRQKDAYEDGIYTKEEYASRNAKLQEEIAKASAALEQARTSIPAAVDYREKIARFTDCLAALKNPDMSATEKNILLKSCIDKIMYHNHMESKPGIGRYVENVFTIDVFLRL

SEQ ID NO: 22400 - protein, 489 aa, synthetic construct
MLKTVIYARYSSDKQNEQSIEGQIHECEQFAKTHDMVIIKHYIDRALSGKTDDRPSFLQMIKDSSSGLFDAILVYKTDRFARNRYDSAVYKAKLKKNGIKIFYAKENIPDGPEGIILESMLEGFAEYYSAELSQKVKRGIKENIRKGLSFGGACPFGYKIVNKKYVIDDEQAPYVKKIFEDYAKGRRAIDIFNELNTLPNYAGKGRKWNRSSLNRMLTNKKYIGIYELEDVCVKDAIPPIIDEALFNKVQSRILFNRRHTTRAKVNYLLSGKLFCGLCEHSMTGKTGTSKTKAKYHYYVCSHRHCKQKKYRKELLEDIIIQYTVKDILNPKHFKMIAKKCLEIQQADNKINDILLMLKKQLTATKTKINNLMNAIEAGIITTSTKDRLEQLEQEKYKLELEISTQQLNSNRLLSEKQIIYMLNVFYNKRVDVSFYNQIIDCFIYKIYIYSDKICIVYNLNNSDKDVTYSDINELYKSSHLNSCGSPYDL

SEQ ID NO: 22401 - protein, 581 aa, synthetic construct
MAYAMKVPAASADDRIVAIYVRVSTGYQVDKDSLPFQKKELKAYCKHILHVDMSRVEIFEDAGRSGKNTKRPAYERMMQKVRAGLVSHVLVYKIDRISRNLVDFSLMYDDFKYNRVTFISLNEQFDTSSAIGEAVLKIILVFAELERKLTSERVKDIMIGRANEGKWNGARVPYGWDWDSSAGWPVHSEKEAPFGRAMYEMYLEVKSTGKIRDYNNAHNIPTKRGGEWTSKTVGDFLRNPMNKGDYRYNFRESARGRKKPVDEVVYLEGVFDPLIDPEIWEKVNKIMDINRDKRNMGGSHPVEKNCNVFAGLIQCGSCGSGYLVGKKDKRRKNGFTPSMYYCSAKTRAIHCQNLNVSDVKIGPFVINYISAMVRVSNERRKIKTPEDLEEILLSDKAVFADIMGLSSDSLNNTFELLTGKSATGGALWRADLVDQEGAAADPVEIESLKDQIRKYERAKERLEDAYYFSDDGMSEKEYLEKKNRFDSGRVAAENKLKELTETHIASGVDESAFMKSASAFLLTHKIRAGSHIVYSDLAGMVEEESIKEFFNLVLDHITVKDRRVTEIVFANGLSHKFIYRD

SEQ ID NO: 22402 - protein, 498 aa, synthetic construct
MLRDYILGYGYCRYSADIQNEKSIEQQKNEIEEYAKKNNIKIVKYFTDEAKSGRYDNRDSFQEMISTACKTKEVQAVLVWKTDRFARRAMDNLYYRTKLEKAGIKLVSITQPIDIETPEGKLMSTMLAGMDEYFSQNLASNVKRALKDNAHNCQFNGGIAPLGYDIINKKYVINEQESKIVKEIYDMYINGYSYIDIALNLNMKGYKTKKNKKFAKTSVMSILENEKYTGKYIFNKGTKNSHRGIREDAIVYEDAIPKIISKEVFDKAMKRRKTKKHAENTAKNVYLLSGLIKCQCGGSYTGYMSTKTKNGKTYKNGYYKCNNRNKLGNCTMPFLKQDLLEKKIVEILTKKLLDKNSVQKIIDGVIDQYKMLQNEATEDLSVLENRLKEIQSQMDNIVDMICKGIGTDALAIKLKELEETKYNLEDELEFKSTKFTYDIKADDIVEILKNDVDNLNDTSKTEVKKLIQKWVKKIEVTNDFIDVYFISEDFLPHQMVAR

SEQ ID NO: 22403 - protein, 517 aa, synthetic construct
MLRDYILGYGYCRYSADIQNEKSIEQQKNEIEEYAKKNNIKIVKYFTDEAKSGRYDNRDSFQEMISTACKTKEVQAVLVWKTDRFARRAMDNLYYRTKLEKAGIKLVSITQPIDIETPEGKLMSTMLAGMDEYFSQNLASNVKRALKDNAHNCQFNGGIAPLGYDIINKKYVINEQESKIVKEIYDMYINGYSYIDIALNLNMKGYKTKKNKKFAKTSVMSILENEKYTGKYIFNKGTKNSHRGIREDAIVYEDAIPKIISKEVFDKAMKRRKTKKHAENTAKNVYLLSGLIKCQCGGSYTGYMSTKTKNGKTYKNGYYKCNNRNKLGNCTMPFLKQDLLEKKIVEILTKKLLDKNSVQKIIDGVIDQYKMLQNEATEDLSVLENRLKEIQSQMDNIVDMICKGIGTDALAIKLKELEETKYNLEDELEFKSTKFTYDIKADDIVEILKNDVDNLNDTSKTEVKKLIQKWVKKIEVTNDFIDVYFISEDFLPHQMVARTHYCLKLRLPTRDFITRRC

SEQ ID NO: 22404 - protein, 531 aa, synthetic construct
MEQYCLYLRKSRSDIEAENHGEEETLARHEKILLDLAKKREYNVTQIYREVVSGETIAARPVMQQLLSEVEHGIWSGVLVVEVERLARGDTIDQGIVAQTFKYSDTQIITPMKTYNPNNEYDEEYFEFGLFMSRREYKTINRRLQRGRLSSVKEGKCVCSIAPYGYDKVKLKGDKGFTLAPNPNEADVIKMIFELYTKGELQPDGTYKRLGVALIARKLNEMKIPARKSEYWVPASIKDMLRNPVYAGKIRWNWRSQNKRMQSGSISISRPRSEEDNCIIVNGLHPALITEETFDLVQEYLAKNPPRPTKRNAPTKNPLAGIVVCAFCGRKLVRRPYTSASCPPTLICSVPHCPNVSSFLHLVEERILKSLEEWLRNYKLQWNLSNNKPSELISESEILRQSLNDINSQIAKLNKQMIKAHELLEQDIYTTDVFLERSRTITERLNQLSYDKAEIEKRLWVETIREKSMKEIIPKVEKLLDVYHELPSAKEKNDMLKDVLEKVVYKKTQNTRWSGSPDDFEITIYPKLPKS

SEQ ID NO: 22405 - protein, 504 aa, synthetic construct
MQTAVIYARYSSDKQTEQSIEGQLYDCYNYAKQHGITVVHEYIDRAMTGKNDDRPAFQQMLHESAMHKWGSVIVWKLDRFARNTIDSAVNRQILAKNGVKLLSVMESFGDDASGQMMTHIIEAINEYYSADLREKTIRGMRQSAMKAQTTGHIPLGYKVVDKKLVIDDETRIIPETVFRMYAEGERLTDIAEHLNAQGYRNRRGRPFTTNSFYNMLANEKYIGIYKYDDIVIEGGIPQMIPNEVFEAVREKLITNRKRAAKNTAKADYYLSGKLYCGHCGEPMSGLSGTGRNGVKHYYYRCNGVQKRSGCHKKLENKYLIEDEVCRAARSAFEQMDKEETAETIYQMYLQTVRNEYAPAELEKELTECTKRAENVVNAIAQTGGNQLLFDKVRELEERKEQLGSALRLSQAMTDNVPSVEQITVFIDDILATDINTTEGKKAIADIMISKVYVYDDKLTVIFKDKDGKSVDIPLSAVSDTSSADCAPSALGSQAILSTNHREKV

SEQ ID NO: 22406 - protein, 577 aa, synthetic construct
MALPKKTISQIKQKCAAIYVRVSTQYQVDRASLPVQRSELVNYAKYALDIPDFVIFEDAGYSAKNTDRPDYQQMMARIRTGEFSHLLVWKIDRISRNLLDFAAMYSELKQLGVVFVSKNEQFDTSSAMGEAMLKIILVFAELERNMTAERVSAVFLSRANDGIWNGGKVPFGYAYDKQTKTFSILEDEAKTVRLIYALYESSKSLVTVSKALNERGIKTRSGSEWSPTTVHTMLSNPFYSGTYRYNYRNESDPHHHVPKKKEDWILVKNHHPAIVSPEHQAAVELILASKSYGKNQTYQRKNIHAFAGLLTCGYCGSTMAATIDRARADGWRPSVYICSRRRMSNDCQNKYVSDVTLGPFVLNFFANLIKASNSFGKSTSIETLEKKLLRGDTLSIVDHIERPGLEELYNHLRSGFDEKPFDSLAVNAAEASSDVQERDLLLADKRRLDRALKRLNAIYLYGDEEIPGKDFILDRKSITDSLQQIDDRLKELDAAAVFDVSLSDDEFMEKASQFILTQQLLDKRSVNYEKFIRKIDPRIVKDFLNETVSNFCIKDGLTTSILLKNGIELRFCYKSQQ

SEQ ID NO: 22407 - protein, 590 aa, synthetic construct
MLPINPRADIVKPQTSLIISYALFFRKGLFYMSKTVAIYVRVSTGKQADRDSIPFQIQECSNYVKHFLKTENFEVFKDAGRSGKNTHRPEYQRMIEKVKAGMISHVVVYKIDRISRNLVDFSIMYNDFKEHKVAFISLNEQFDTSSAIGEAVLKIILVFAELERKLTGERVRDIMMNRALEGKWNGARVPYGWDWDTKKQCPVHSDTEAEYARMMYRLYDESHSTCVVRDYCNAHDIPTKRGGEWTSKTVADFLRNPMNVGDYRYNYRKSARGKKNDPSEVVYVKDVFPPLIDRELYERVTHQMDANARGIGKDGRKIVSKRTHVFGGLIVCGLCGAFYHSDSDAPRADGFLPSQYRCGAHNKKIHCKAKGTSDVKLGPFIFNYISNLVKASKSRKLLHSVSDLEQMLLTGPEFEQVAGIADAGLDVTFDTIMHGFKPKRYTAAPYTVIRSGDSDALTAKRDKTIRALERLKKLFLFEDDAMSEKEYLMSKRELEGTLSDIENELSALEADTADGKYDDMSFISTASGFLIAHQISSGEHINYRELACAVDAKVLKDFANSVIERIVLLDGRVASIEFKNGLVHEFLYRE

SEQ ID NO: 22408 - protein, 498 aa, synthetic construct
MDRKIRAAAYGRVSTNSKEQAHSFENQSDYWNKKLANEPKYEYVGLYADKGISGRHLRYRPQMLALLDACRRGEVEIIFTKSVQRFARNTIELLEMVRELREINVAVVFEKENINTLTAESELYLTIAAAVAEEDLNRYGENVAWTIKDRFEKGDISVVGIRMLGYRMENKEFRIIPHEAEEVRKLFELYATGKYSTRELAEVMNEAGYRTMNGCLWTQQRVLQTLTNEKYKGDSLLYKRTNVNGQQVMNRGVKDMLYVENSHAAIINPELWDKVSELINARGNMKLRGRINESYPFTSLIKCPICGQSYIHKINNSGTKYACPIWKCRTHLACGKKGCSNSGIKDSVLKEKFIEAYNEFIENRNFGNDENAAEIELKKLNAEENELVSLHVRGLISKHDYEHDKNDIQAKRKALEQKVRDYRQAHIRRGAAKPITEFDEELVGRVIKGVTIKDYVVTFEFYNGVTISRAYTNGPSGNRKGWKEKKQLKEAQMNGNSN

SEQ ID NO: 22409 - protein, 541 aa, synthetic construct
METAIDTVQQPRVVRVVRNVSTAPLTAQMIREQMIDTRLPVAAYARVSTTNEEQEDSLERQKAHYTEYIGNRPEWRFVGVYDDPGVTGTRADQRKGFQKLLADCRAGKIKKILCKSISRFARNTVDALQYIRELKELGIGVYFETQNIDTMTAGGDILITILAAIAEQESRNMSENIKWAFQKKFKEGEVVLACSQFLGYDHDKDKKIVINEEQAKVVRRIYREFLSGYACSAIAKRLTEDGIPTPSGKKQWRTGVIKSILTNEKYYGSAYLGKTCKRDVLSKERVASEEVYYVENSHPAIIPKDTWDLVQLEMTRRQEYRTCSETGNGKYSSKYPFSKKLICGECGMIYRRHAQYKRGNYVRTWVCITHKRKGNDYCSQRYILEDDVANAFQTVLKELVGDMSSIKEILEKNVVDTLGEKDDNGGEQVLLLIQRLQTEMIDINRRKRSGEIAYEAYVARAREIADQVEVLEKQQREIQAAEDNRISETKRIKDILEAINGMHPTDEFDGEIFRRLIDNVIIKDKRLTFNFKVGISKTITI

SEQ ID NO: 22410 - protein, 588 aa, synthetic construct
MPSIKRKKKVAAYARISMETERMNHSLSAQISYYSSLIQRNPDWEYAGVFADDGIFGTGIAKRGEFLRMIEAAENGQIDIILTKSIQRFARNTVNLLETVRHLKDIGVEVRFEKENINSMSGDGELLLSILASFAQEESRSISENCKWGIKKKFEKGIPNGHFRIYGYRWEGEQLVIVPEEAAIVKRIFQNFLDGKSRLETEREFAAEGITTRDGCRWMDSNIKVVLTNVTYTGNLLLQKEFIEDPISKHRKKNLGELTQYWVENTHEAIIDKATFDYVQAEMERRKELGPLANKSLNITCFTGKIKCEKCGLSFVRSTRTNRAKMTQRGKMVTGWVCGSTKKKGSHCKANEIPEPILMRECAKALGLTEFDEMLFVERVKKITVPKNGVMVFYFKDGTSLRHEWVNTSKRDCWTDEYKARASEYRRNHAINRKDITCFTTKIKCVHCGCNFRKQISKSSGADGKKHHHWRCAEHSGCATVGLRDDRLRSMAADVLGISEFDEATFKEKIDRIGVLSASEIVFCFKNGKTVSRTWEQPKQVGKPWTEEQRAKFKKSIQKSYTPERRKQMSEHMKQLRKERGKAWRKEE

SEQ ID NO: 22411 - protein, 534 aa, synthetic construct
MAPKNKHVDAGPGEYNRAVIYARFSTGPNQREESIEGQIRECKEIAKKHGLMVIHEYADRRLTGTSDARPAFQRMLRDADRGAFDYVITWKNDRFARNRYDSAIYKHRLKRNGVKILYAKEHIPDGHEGIILESMLEGMAEYYSANLSQNIRRGQRENALEGKFIGGSIPLGYKLDHEKRFVLDPEKAPLVREIFERYVAGESVVTICDDLNARGYTTSMGKKFNRSSLHRMFANEKYIGVYRYHDIEAMDVIPRIISDEQFNAARTRAERNKLGKRAPVHAPVEFYLTGKLYCGHCGQPMGGTGGTGRHGGRFYYYQCNGRKYKKGSCKKKPIKKDLIEKYVANCVIENIINNDSVINSIIERCLEIQLKEVDQSPAEGLRRELQEAEKALANIMRAIEAGIITASTKARLVELEERCESLRQGIASASIEPPKLTKEQLRFLFEKYRGRDISDTEYMRDVIDTFINKIFVYDDKLVVTFNFSDDNEKEITLQDVDAATGAAPALGDTVLLMPRQLHQKLRLSNPAKQGDNLL

SEQ ID NO: 22412 - protein, 489 aa, synthetic construct
MLKNIPAVVYARYSSSNQREESIEDQLRECYKFADREGYNVIGQYCDHAISGRTDDRPEFLRMICDAEKQLFKAVIVYRLDRFARNRFDSVLYKSRLAQYKVNVVSATECIPEGSDGVLIEALHEALAQKYSDDLSQIIRRGLYGNAEHCKSNGPLPFGYKANPTTRLVEIDEETAPIVKQIFTMIAEGSNYNQALAYCTRMGYPKTKNALYHILRNERYKGIYIYANKRTEGGIPCIVSEELFAAANATRQKHINKPNAGSYKYLLTGKLYCKDCENLYSGGYGTSRWGKKSYYYVCSGKKRKHICAAANINAPKIESMVVDALYMFILNEDIISAIIDAALECQERNSPHKNNIMVINRRIAEIEKKLNNLLKAIEAGVLTETTMSRMQELEEKKKSLQRSLMKEKLKAPKISRSQLEFFFEKLRGEDPHARKFQKCLIDTFVNRIYPDGNTVKMVVNLGAPDDETLTYSKLSPCFAGFDKRNFWWS

SEQ ID NO: 22413 - protein, 517 aa, synthetic construct
MPSVQIIKATKNHTAILENKTRKLKVAAYARVSTEKDEQENSYETQIRYFTDLIRSNPNYIFVDMYADEGLTGTMLKNRDSFNQMINDALEGKIDIIYVKSVSRFARNTVDSLCICRELKNKGVNVIFEKENLELLSASGELMLTIFASLAQEESRSISENVKWTIHKNYEKGIYHMPYSSFLGYKKGDNGKMVIDEEQAVIVRKIYKMFLYGYSINSIAKELTETGVLTPRGKNEWSQSTIRSILTNEKYCGDARLQKKFTANFLDHKAVKNEGQVASYYVTDDHEGIVSHEVYETVQEMIKNSTEKKNCGDMYSRKLYCECGKLYGRKVHHSNDKYRTTIYRCNDEYSRDHIKCARLKEKQIQETYIQAVNELIQTDNIVSDIFEIAQLFKPTETIDDEISVLIDKRNIIEHEIQNLVEESSKATDIDKYRSRYDNLVKEYENASLKVAKVIEEKDKRKAKYQNILRYANHLKELTEPIKQFDDELWFSLLDKATVKEKSIIYQFKDGREVEIEL

SEQ ID NO: 22414 - protein, 430 aa, synthetic construct
MQIEPVIFENKSIAKKKNVCAYARVSMNDDGMLHSLNNQILIYKEEILSHPDWNFVGVFHDKPTTGTKEDRPEFSKMLKLCEEGKIDMIITKTISRFARNTVTTLKWSRELRQRGIDIYFESENIHTISSNGELFLSLYAAIAQAESLSVSENCKWRIQKAFQEGVLTPIKILGYDFENGSLKVNEKEALIVKEIFNLYLDGKGTNYIANELNQRGIKTKLGCEFTPKAIHVILINEKYCGNALLQKWYSKDHLTKEKVANNGEKDSYFVEESHQAIIDKETFEKVQIEMSKRAIKYAHECKCREYPFTKKLKCGICGKSYRRKIVHGKPVLICTTYDRKGKSMCPSKRIPEEILMKVSANILGIDEFDTDIFNDMVSFITVYNGNRLIFNFEDGTEQETYWKDKSRSESWTDEMREKARERQYAKCSNN

SEQ ID NO: 22415 - protein, 546 aa, synthetic construct
MNETIKVVGYARFSSSMQREESITAQKRYMMMYAKRNDMEVIDWYCDEAKSAKTVNRPEFQRMINDAKNNPEFKAVLVHKTDRFSRNLSDSIQYKKILEEYGVQVIFVNERFEDNPESHLLYHIMGSVNQFYNENLAREVMKGLKENAYQCKFTGGRPPLGYDVDKDLKLVINEKEAEAVRLIFEMSAEGYGYGETIDKLNILGYKTKKGLPFVKNSLYEILKNEKYKGTYIFNRSCSANALNKRNNHRRKPEEEIIRIENGCPAIVSSGLWHRANAVKKATRSSFTNAKNTYLLTGLIHCGECGGKFHGNIRYNKNNTNLVYRCSAKKNKRKCESKEIRCEYLDSFVIDKFVEFFFNDDNIKVITKQLNEQYSKSCISDLEYNEAKSTLKILEKIRNNLVEAIAKTGINDIMSDKIKEYEEQIKKTSEFIHKYEKQKIDRVIPEDEVREQINHLKDYFYNPKNIIRTKFVLSQYIDRIDISNENVQVHFKVSMSPSGNTDGDCFCVHTETIKRKYLFDYVCEKVDFEQWNIEKLNKSETEHRKGA

SEQ ID NO: 22416 - protein, 460 aa, synthetic construct
MKHVACYCRVSTDEQAKFGFSIQAQKDALRKYCKDNNYKYEFYIDEGISASSMKRPALKNMLSKVNVFDMVLFTKLDRLSRNVLDANTINKLLIDNNCTMKAIDEDDIDTSTADGTFIFNLKVSLAQREIGKTSERIKFVFQNKRNKGEITSGTKKYGYDIIDKHFVVNIEQQENIIKFYEYFINVGADTKLSFEYFKEHFPFKSFDAYKKMLTETSYIGKYKLYQKEEYIYNYIPRLMTDELFYTVQDLLGKKRKIVKNNKEAPVSLFDGILKCSECGGSMSRRISYTKYGDYISYRCWKSEKLSKEIGKEYRCSNKHSIFESKIEKYLLENIKKEAENYIANNKVVSLKEKDAFLDNSKDIKKKLEKLKDLYINDLIDKEMYENDYRKYNRQLQEIEIQKSKYRNNTQKDFSKLEKILNANFDDLYSSLSRIEKRRFWVSIIDKIYYNDKKIERIVFK

SEQ ID NO: 22417 - protein, 488 aa, synthetic construct
MEKARAVAYIRVSTERDAQLHSYEFQEHYWQSAFEDDPDTELIGIYADKGISGHSVQKRPKFLVMMQDAREHKFDKIYTKSVSRFARNTTQLLEAVRELRDLGIEVVFENENIHTFQPTSEIFLTIAATIAENDLEVDSARQRWSIQRRCENGWISVGSGLFGLKLTADNELEIVPEEAAVIRYIYESYVDGGIGSKRIADALNAAGVQSRNGYPWDAKHIIGLLRNEKYKGDVIMGKSVRHFGEYHKNPNAEYAPRYYMEGTHEAIVDKDMWEAAQRILEERSRNHCRTRIAHSFTGMIECGCCGKNYLHKVNNSQCKWQTDIWACRTYLRDGKKACGNSRIKDTVLKEKFISAYNEFIERRPQGDSMVALQEVLEDLRQQEQELAELMMQRLITKAAYEEERKSVKMQITDISEKISERRAKRVPESEYVPITEFSEEKTKRFLSKVVVTMFTVTFVFYNGAKITRTYDNGQPGNKVGWNKKKEES

SEQ ID NO: 22418 - protein, 540 aa, synthetic construct
MATATRRVVRTMPQMFIDVADNQSERLQVAAYARVSTEKEEQEDSFERQVEHYKQLIYSKPDWQFVDVYADPGISGTRAEKRPDFLRMIEDCRAGKIKKVLVKSISRFARNTVDALQYIRELKDLGISVYFESENIDTLTPGGEVLLTILAAMAEQESRTISSNIKWAWQRKFQKGDIILNTGLMLGYRKIGKDDEGHDVYEINEEEAEIVRRIYREFIAGYSITQIAKRLQADGVKTKLGKESWRHNVIESILTNEKYTGNALLGKTFKPDVLTKYRQKNDGKKAPIYYVEGSHPAIIEKGLFDLAQQEMQRRRDANDNKVGGGRYSSRYPFSGMLVCGICGSKLRRQVRTMGSGKRTASWGCCNRINNGRAECDSHHVNEDVLEATYLTAMRRLVDSAEEVVEAVRDGAELALEPENKAAMDRIDEETIQLQEAALALHKAKQRMEIGAVEYASRVKEYSERMKELEAERNELQGTAAKYAEVRMWLDTFIEQTMQSDTLTTVDGTTMKMLVDRIHIRNDGIVVEFKCGVAIEQEYVK

SEQ ID NO: 22419 - protein, 548 aa, synthetic construct
MSTGTELRAVFYARVSTEEEKQLNALEKQIQENKDVIRDHGWRLVGEYIDEGKTGTTTKRRNDYKRLLKDMTENKFDIVVCKDQDRLQRNTLDWYLFVDNLVTNNLKLFMYLDNKFFKPSEDALITGVKAIIAEEYSRNLSKKLNNSNKRRIERALNGEEVSAMGNGKSLAFKIVNGKWVKDEEEAKLGKKIFELYLEYDSIRKVRDWINEHGYTNSVGKPFTSESISRILKNEKAKGVIVMGKYHHDFDKKKIVRRSEEELVRIPAPELAYVSEEVFDKVQERLRAKTGNGRGVNAYSDPLSCKIYCGSCGRKLWKHASNGYVNWMCASQVAKGDVECNGTRITTVAIRNIYKKITDNLEVNKGVVKQDIVKWLNELKATLSDTSVNEKIQKDLDKLERKRTKLLEAYLEDFISKDDYKAKYEAIEGQIEEKKKLLVPVEENEDIKVIESVLQNIDDEIDAYVKTLDMEESKVDFLIEHTKRITVLENRDIIIELDLVAGAIIAGKDFLLYVHDTLPQHHGPKHLHPSGPRTAPRHRFRDRFSCDQP

SEQ ID NO: 22420 - protein, 434 aa, synthetic construct
MDRIVERVDSHIPAQLKALRVCAYARVSTGKDAMLHSLSAQVSYYSNMIQSHSGWLYCGVYSDEAATGTKRERGGFLRMVEECRRGNIDLIITKSISRFARNTVTLLQTVRELKALGVDVYFEEQHIHTQSTDGELMMTILASYAQEESLSASENQKWRVRKAFENGELINLRFMYGYNISPDGIEINEKEATVVREIFTRFNNGDSMSSICRDLESRGIKGALGGTWCPERIRCTLSNEKYLGNALLQKRYRNNHIDKKLMPNKGELPMYYAEGTHEPIIDQVAFNKAQERLRIFAQQTAGRKKPTRSAFSGLIRCGLCGNSYKRVTYRNKHFWNCTTFQTKGKSECAAKRIPEETLESLTYEVLGTKTLDPNTVKSKITEIRAEKNNVVVFCLEDGSEIVKRWQDRSRAESWTPEMKEKARLRAQQSRRNKK

SEQ ID NO: 22421 - protein, 528 aa, synthetic construct
MSRTAARSVTVIPPTVNPMTHLSKATMQKRRVAGYARVSTESDEQFTSYEAQVDYYTRHIKSNPEWEFVEVYTDEGITGTNTKKRDGFNRMIEDAVNGKIDLILTKSVSRFARNTVDSLVTIRQLKEKGVEVYFEKENIYTFDGKGELLLTIMSSLAQEESRSISENVTWGQRKRFADGKVNLPYKQFLGYRKGADGFPEVVPEEAVIVRRIYTRFMEGLTPGAIAKELTADAIPTPSGKQRWQTSTVESILQNEKYKGAALLQKCFTVDFLTKTRKVNEGEVPQYYVEHSHEPIISPEEFDKVQIEFQRRKRISRRYSGKSIFSSRIICGDCGSYFGSKVWNSTSKYRRVIWQCNSKFKGEHKCETPHLDEETIKARFVAALNAVIDSKDNILEDCRLMQTTLTDCTEVNSEIDSMLEEIDVVSELTKRCIAENSQTAQNQEDYIARYNSFVERYEKATARFEQLCIIKTEREMQAEAIGAFMFEISELDTLTDFDEKLWLTVIDTVTVHTDGRMTFKFQGGTEIDA

SEQ ID NO: 22422 - protein, 559 aa, synthetic construct
MKALIYARQSSGKDDFSESVEAQIANCKKLAAKEKLEIIGVYKDLNTSGETYPAGAEEIARLDKAYMKWALSQSSKKDFRLGLYQVLQKLPEVDFVLVNELTRLYRPINGSFLEGHINQLLKENEVKVLQVQGGTIDLSKFDQQLITLIKNQILYEDLQKKRQNSINAFRIKKDSGRLCSDAKMHGIRYLGNGKIEVIPEWVEIIRFVYDNICAYRPYRAIIRDCNERWGKEIFFYESSIYAIAKQPIYCGYQYNSQGELIKNVQIAGQEFISFEQWQEVQKIISHKRNAYHVRAKKHWLPLSGKLYCGECGSRLVCLLEHGKIYYACNKRTLDRNHVNCRNSRIRFESGLRGEPALYDAIYPLLSIALIERHRKAVELLNDKNELAKYDVELKNLAIKEEQLHEMFLDGLATEEQLRNLLTRNKARRCELLKKVTLLKSSNLNDETLQDLEKNVLAEQFNALANKNLPQGIYERLLNDAQITATSYADRVEFNTLYGNVTLPRIRSTNRLWMPKWEISLLNKGTKKCVIDKNTQITVTYFTGTKTELADFSSLRIVSQ

SEQ ID NO: 22423 - protein, 524 aa, synthetic construct
MAGAKNITVIPAKKRVGNTVTAEDKPKLKVAAYCRVSTDSEEQATSYDAQVEHYTEFIRKNPEWELAGIYADDGISGTNTKKREEFNRMIEDTMAGKIDMIITKSISRFARNTLDCLKYIRQLKEKNVPVFFEKENINTMDSKGEVLLTIMASLAQQESESLSKNVKMGIQFRYQNGEVQVNHNWFLGYTKDENGHLIIDEEQAVIVRRIFREYLQGASLKTIADGLMADGIPTATGNMKWRGDGIRKILTNEKYMGDALLQKTYTVDVLTKKRVSNNGIVPQYYVENNHEAIIPRQLFMQVQEELFRRAHLKTENGKTKRVYSSKYALSSIIYCGKCGDLFRRVAWKARGASYNKWRCASRIEKGPKEGCDADAISETEIQNAVIRAINKTLGGREQFLVQLQHNIEDVLNCDSTATLEYIDRRMSELQEKLVLCVNKNAEYDVIANEIDALREKKAEVVTKDAEQEMLKKRIEEMRQFLQTQSSRVTEYDEQMVRRLIEKITVFDDKLIFEFKSGMTLELKR

SEQ ID NO: 22424 - protein, 520 aa, synthetic construct
MKNVTKINQVDFSIFKKTRVAAYCRVSTDSDEQELSLDTQKNHYERYIKANGEWEYAGIYYDDGVSGTKTAKRDGLLRLMEDCEKGLIDLVITKSISRFSRNTTDCLALVRKLLNYEVYVIFEKENINTGSMESELMLAVLAGMAESESRSISENEKWSIKKRFQNGTYVIAYPPYGYANVGGEMVIIPEQAEVVKEIFAECLAGKSAHIIAKELNEKGVPTKKGAKWAGGTINGILTNEKYIGDALFQKTITDAEFKRKRNYGEEEQYYCENHHEPIIDKDTFEKAKEAIRQRGLEKGNCTEDTSKYQNRYAMSGKIKCGECGRSFKRRYHYTSHGRSYNAWCCGGHLEDSTSCSMKFIRDDDLKRAFLTMMNKLIFGNDLVLKPLLISITTNNSKKNANSVEDIEKEMKSNEEQRKQLNMLLTNGYLERPVFAEAHNKLIMEYEHLVAKRDLLFRMDDAGYTMEQSLKELVDFFNDAKPFTEWEESLFERFIEKVKVLSRVEVEFEFKCGLKLKERID

SEQ ID NO: 22425 - protein, 426 aa, synthetic construct
MDKSQIKRCAIYTRKSTDENLQDSFNSLDAQREAAEAYIQSQKMNGWRLLPDRYDDGGYSGGNMNRPGLKKLLEDVKAGKIDIVIVYKLDRLSRSICDFAELSKIFDKHGTSFVSVTQEINTTTSSGRMMLNILVTFAQYEREVIAERIRDKMSASRKKGKWVGGSVPFGYKVVDKHLQIHEEEADIVKRIFARFLEIGSPRQIAFELEESGAARRDGRPWNVSHIYRILQNHTYIGKVNYKGEIYEGEHEAIIDQRSWDEAQEHLKENDPMKYLRNKKQETVAILKGVIRCGHCGCAMGPTYARRRGRKYLYYLCIDESKRGKHVCPVKRAAAPTIEEIVLKQIQKIMQTETVQKHLVQDDLPIEKVKEYADNFAEIWDEIFPIERQRILGLFLEQVVVYEDHVDIEIKTGGLAAFIEEMTNGND

SEQ ID NO: 22426 - protein, 526 aa, synthetic construct
MIQTGKITALYARFSHDEGNSGHDSNSIANQKELLAEYANTHGFINHQFYTDDGYSGTNFERPAFQKMMTDVENGLIGTIIVKDMSRLGRNYLMVGQYTEIIFPEYNVRFVAISDNVDSAEGLSDLIPFSNLINEWYAKDISKKMRAMITQKGNSGRRLCSRAIYGYMKSPEDKEKWIIDEYAASVVRRIYELYISGNGVSRIANILRDEKIQRPFVYLYQKESDTPYEWTGATITVIITNREYCGDTVNFKTHKPSYKSKKIIKNPPELQRVFLDTHPAIIDRVIFEKAQNRYAKRCRKKKSKTKDTLFTGYVYCKDCKSRFHVFRHKARGNMIVSYECSGYRKQQKKCTYHRIDEDALKQCVLQKIKLMWYEAKSDIRSFKAKVRKRLNADETASRSKIQSEIDAAQTRIAEIDKYVQGLFEAKVRNEIDSDIFGSLSKTYTEEKAELNAKIADLILQENSAKDAYQKINRLYEAIEKYDSITELTPEVLSDFVDRIEVGEHLKGTKEQKIDVFFVGVGLMDTL

SEQ ID NO: 22427 - protein, 517 aa, synthetic construct
MQRAVIYARFSSDMQREESIDAQVRACKSYCQSKGYLVVGQYVDEAKSGRELTKRDAYNQMLADALEDKFDIIIFHKIDRNSRNELNYYTTKDKLEKLGIRYEYAVQHIDASPEGQMMEGVLVSMAAYYSRNLSKETKKGLNENAYKAQFNGGTAPLGFRIVDKHYEIEPIEAEAVRLIFKLYLAGYSYIRICRELELAGYKKRNGKPFDKTCLYDILGNEKYMGRYTFNKTPRAKNGQARNSHAKTRPDDFIAIDNALPAIISKEDFAAVQAKRETNQRRFSSYKAVEPYLLSGKVICGYCGSAMSGHRVAPRNGEPYGYYYCLKKERVAGERCPQKYIRAEKLERIAIRALEEEIFSDASMKKIAALMREGYAAMTNEADESRKALIQAKAAAEKKLDNLYAFIENGEIDEYSLARMKKIKDELAKIKARLCETSVKFSKTLTEEEVFATLAAFKKDLESNADNSAKRFVVNLLINKITVRDNCATVEILPNMLTVYLVPRTGIEPVRVSLPEGF

SEQ ID NO: 22428 - protein, 590 aa, synthetic construct
MRTIRKIERSIPSLKQRKKVAAYARVSMESERMHHSLSAQVSYYSSLIQKNPDWEYAGVYADYGISGTGMKKRQEFRRMLEDAEAGKIDIILTKSIQRFARNTVDLLRTVRHLKELGIEVWFEKENIHTMSGDGELMMTILASFAQEESRSISENVRWRIKKQFEQGNPNGRFRVYGYRWEGDDLVVVPEEAAVVRRIFQNFLDGKSRLETEREFAAEGITTRNGCRWMDSNIKVVLTNVTYTGNMLFQKEYVTDPILKKRKKNRGELPKYYVENTHEPIIDKKTFDYVQQEMARRKELGALANKSLNTTCFTGKIKCGICGRSYMHNLRTDRGFEEFWDCGSHKLKGRNCGAKGSIPQAVLVKECAEVLGLDAFDEQAFLDQVEKIVVPEYHVMVFCMKNGQKITRHWVSTAKKDCWTDEYKERQRDWMRNYMASGKGTRFSPFTTRVRCAVCGHAFRRCMQRKKQGISVHWRCGQGGKCSSLSVREEDLMKIAADAMGLEAFDGDRFREEIDFMEAGAEDRITIHFKDGRIQTVPWTKPKKQGTRHTETYKEYMSQLGKKGWTPERKQRMSEQMKALRKERGENWQRQ

SEQ ID NO: 22429 - protein, 522 aa, synthetic construct
MAKTVRAIPATISRYTATPINSRKKRRVAGYARVSTDHDDQVTSYAAQVDYYTNYIKGRDDWEFVGIYTDEGISATNTRHRDGFKRMVRDAMDGKIDLIVTKSVSRFARNTVDSLTTVRKLKDKGIEIYFEKENIWTLDAKGELLITIMSSLAQEESRSISENVTWGHRKRFADGKVCVPFGHFLGYDRGPDGNLVVNQEQAKTVKLIYRLFLDGYTFHSIAKELTARGLETPAKKKRWYPGTVESILTNEKYKGDALLQKRFTVNFLTKETKANEGEVPQYYVENNHEAIISPQVFDWVQEEIKQRREGRSRYSGVSIFSSKIKCGQCGGWYGAKVWHSTDKYRRTIYRCNDKFKSHCKTPHLTEDDIKEVFIRAANQLIENKADVLNCITLLKERLTDTENLEEERDKLSTDLNLLAEKVQQLIAENARVAQNQDDYDRNYSELVSRYEAAKKQYDKTCEAIQYRKARSRQMDSFIKELREQELIKAFDARLWGSLVDFITVYSKDDIRVTFKDGTEIRV

SEQ ID NO: 22430 - protein, 589 aa, synthetic construct
MRTIRKIERSIPNLKQRKKVAAYARVSMESERMHHSLSAQVSYYSSLIQKNPDWEYAGVYADYGISGTGMKKRQEFLRMLEDAEAGKIDIILTKSIQRFARNTVDLLRTVRHLKELGIEVWFEKENIHTMSGDGELMMTILASFAQEESRSISENVRWRVKKRFEKGIPNGRFRIYGYRWKGKQLVVKPEEAAVVKFIYANFLKGVSAETTEKQLEEQGVKSFNGKHFGNSSIRMILQNITYTGNMLFQKEYVVDPITGKSKINRGELPQYFVENTHEAIIPMEIYKKVQDERERRKKLGALANWSINTCCFTSKIKCGICGKSFVHTFRKKLNSEEDYWSCCSHKKKGRTCCSKGGIPHQVLVRECTKVLGLAEFDEKIFLSRVDKIVIPEQHVMVFHMESGEQITRRWVSTARKDCWTRERRKAWGERHKLKSTNPNRNMFHEFTGFIKCGKCGENYRSEQTTYADGEKERYWRCAGKCGNESIKGSTMKKLTASVLGMDFFDEGEMDELLEKAVIQNGTVTFYFKDGHTEIRTYQERKRGYHHSKAYRAYMRELMQFAKNGDPESKAKAMELKKEWKRDDNRWQRQ

SEQ ID NO: 22431 - protein, 522 aa, synthetic construct
MAKTVRAIPATISRYTAAPINSRKKRRVAGYARVSTDHDDQVTSYAAQVDYYTNYIKERNDWEFVGIYTDEGISATNTRHRNGFKRMVRDAMDGKIDLIVTKSVSRFARNTVDSLTTVRKLKDKGIEIYFEKENIWTLDAKGELLITIMSSLAQEESRSISENVTWGHRKRFADGKVSVPYRHFLGYDKGPDGNLAVNREQARTVKLIYRLFLDGYTFHSIARELTARGLETPAKKKRWYPRTVESILTNEKYKGDALLQKRFTVNFLTKETKANEGEVPQYYVENNHEAIISPQVFDWVQEEINRRRKGRGRYSGVSIFSSKIKCGQCGGWYGAKVWHSTDKYRRTIYRCNDKFKSHCKTPHLTEDDIKEAFVRAANRLIENKADVLDSITLLKERLTDTEALEEERDRLSTDLNLLADKVQQLIAENARVAQNQDDYDQNYNELVSRYEAAKTQYDKTCEAIQYRKARSRQMDSFIKELRDQDLIKEFDARLWGSLVDFITVYSKDDIRVTFKDGTEIRA

SEQ ID NO: 22432 - protein, 439 aa, synthetic construct
MKRAALYVRVSTAEQRDHGLSVDSQISALQKYCEDNGYKIAGIYNDAGISARKSYKNRPALLQMLKDCQQKRVDICLFTKLDRFFRSVADYYACVEQMAGVPWRAIWEDYETETSAGVFKVNIMLSVAQSEADRTSERIKSVMDYKRARGEYVGTVPVGYKREGKTLAIDPETEDGVRALLEGYLDYLPLDECVKNAKEKGVTFHRRTANDVLKRPTYYGDAYGCKVPAYITKEQHDAIMQRMSENIRKPIRTGVTFAFQGMCRCGYCGRRMSSTSRRRHSGKRGDYIQIIYQCPKHVNDFIHPICKGCGINEEFLEDALLKELESAVSEYNYNLSKSSITTALADYNKEKKKIEDKKKRLAELYEDDMITKEEYQQRRDALRDKERDLKAPEAARKVILPAGWKETYFLLNKENRRLFWRRTVKEILVYQDHKVKIIL

SEQ ID NO: 22433 - protein, 516 aa, synthetic construct
MAQAQKQVRIIEPLERFVNRINLVGCYARVSSDSEDQLNSYNNQVDFYESNVNSLENSKLVKIYTDEGITGTRMDKRDGFLQMIEDCRKGLINRIITKSISRFARNITETLSVVRELKSIGVSVYFMTEKIDTAKMGSEMMLAVYAACAEIESKAISNAQKWAFRTRAKEGRYNQPKLPYGYQRIDGEVKVIEDEAKIVEDIFNKYVNKDFSVTKLVDYLNKHYFKKKKWSQSTVSSMLKNERYCGDMLLQKKYSPDVFPYKLVTNKGELAQYYVYDVFPKIIDRELFEKANEKLVNNKLKFNKNQTDGNREYLLTSKIKCEHCGGTFKRRVLRNKEYWSCSNHVTSAKKCEVKMIGTDEIEDAFLKIFYKLKENIHVLEAYKKYIVNFTTNDDDRCELDLVNRELKKVTSSINTLVRYYQKDLISLEDYKKKHNELLVDKSVFEMQKCKLNEKIYQRFEVIQTQIIIECLESVKEITALDEEIFNTLVDSIEVGTLDIQFTLKNDLKLKVERKQF

SEQ ID NO: 22434 - protein, 555 aa, synthetic construct
MNYIIRDDKEHETTAPKVKVIAPRKKFQPSYNDRQNREIRVGAYCRVSTDSDEQELSYETQCEYYENYIGSHENWELIAIYSDEGITGTSTNKRSDFMRMIDDARAGKLDMIITKSITRFARNTVDSLMYLRILKEYNVDVYFEVENVHSLEANEMLLTILSSVAQQSSEDKSESIKWGYQRQFEKGKVYAANMYGYKSNRGTLDIIEEEAEVVREIFSKYLSGMSESKIARYLTENKVPKKNGSTKWDSGTIGRMLQNEKYSGDALLKKTFSIDFLHKKRYKNEGQKKMYFVENSHPAIVTKEVFKAAQVERTKRNMKSNDEKEVVESHHQNRYSSKNPLSNKIICSECGALYRRTVWTKRNKEKEPVWRCSNRLKNGKAICPNSVTLKEKPLLDALTSLINGKTKSKEKTRLELAKELSEYLNPKDIIEKKQKLNCELENVNSQINELLDKGMLLVARGVQDESQIEEHLAQCYQTKQMLKKELQKLDGKYNALKQGRQEKLLKTLEKNSNEHTVMTQEDLAVFIDRIVVKKDKIEIETIDDQKCELLLNQIS

SEQ ID NO: 22435 - protein, 519 aa, synthetic construct
MADFEHVIIYLRKSRSDDPATTVEEVLSRHENILQEYAVREWGARIPEDRIYREVVSGETIKDRPVMQHVMKILETGLVSGVLVVEPQRLSRGDLQDCGHIINSLRYTNTAVITPPKTYDLSDEYDRKFFEMELTRGNDYLEYTKKILNRGRIASVKAGNFIGNSAPYGYRKICVGTGKEKYYTLEIVPEEAEAIRLMFDLYVNKDYGFRNIAHALDMAGYKPRRSAEWSPAAISCMIANETYIGRVVWNRRKTIKKWENDTIVRTRPRQSEYISVPGKHPAIISDELFYAAKAKRNRTPRIKRYVQLLNPLAGLLYCGTCGHAMSRKRTVDKKYGSVSVSFLCNNQSNCHTKSVMYDAVIDRVKETLRQSIEDFEVKVNSKDETDIAYHRAMITNLKGELKKLKEKDMRQKDAYEDGIYTKEEFVVRNAKLAEQISIAQLKLDEAESSTTQLVDYQERLVRFRECLEVLDDDTISAADKNTLLKSCIDKIMYYNDSPSLPGIGRYVDNPFRLEIFLKL

SEQ ID NO: 22436 - protein, 526 aa, synthetic construct
MIAALYARYSSDSQRAESIVAQIRAGREYCRRKGYHIIKEYADEAYTGTNDNRPAYREMLRDAAAGLFEVVIFHKVDRNGRNEFDYYKNKQELARHNVRVEYSGQAFDSTSPEGALMENQLVGLAAYYSRNLSREVKKGLKENVLAGKITGGRPLFGYSVDKNKKYVINEEEAVAVRYIFKRYAAGASYIDILREVNARGYRTRRGAEFGKATLHDMLNNRRYIGTCILGKNQPYLDGRRNSHRPDHDGMIIVPNGCPAIISPELFQAVHERMQENRRRGGRRTAKYPYLLSGLVYCGECGASMSGTRTRTRKKEIREYYRCCQKSNHGDAKCPNRYIYAPALENFIIERLATVIDNESLLFRLAQKVQEKYDTLVGNARVQIAALQEQETKASKSLERLYEVIADGDTFDDFDRAQMKHLKQKILDIRAQREKLEQQPGKTISSAEIVRYIRDRFLPAIRQRTASGLTELLQYFVHTVTVFRDKIRVEYWFAACRYSSERTSKTRISIVHEILRCLIVSIIEGTR

SEQ ID NO: 22437 - protein, 500 aa, synthetic construct
MYLRKSRADDPHESIEDTLRKHEKILFDLANKLNIKKDEIVQFKEVVSGENLKNRPQAQKMLKLVMENAFEGVLVVDSQRLARGDTLDQGTIIRAFSLNNTKIITPGKTINPGDEIDQDYFEFDLFMGRREYKMINKRMQRGRNISVQEGNYVGSIAPYGYKKTKIGKCHTLKINEDEIDCFNKMKELALNGLGCTSISNELNRLGFKPRKSKLWTTNAVRDILLNKTNLGLIKWNTRKSVKLYKNDEIIKSRPRNEEAEYYPGKHPAIITQVEYDAIVENIKNRARPVKKDKKLQNPLAGVVYCGKCGKAMIRRSYNTGYRDGLICTNTHCNNVSSVLEVVEKRVLESLEDTLKEYRQFIDNYHNDKTKTNNDSLIIKTEKEINKIDSQINKACEMLEVGAYSVELFKERKTLLDNQKKALIDKIEALKKEDTDFKLQNYINAVPILENAIKLYWNSSVEEKNKLLKQIVKRCDYLKSERGKRNGKGMYNFKLNIYLKI

SEQ ID NO: 22438 - protein, 503 aa, synthetic construct
MRSAVKYGRVSSDRQEKEGFSLPAQDKLLNDYAAKHDIKIVASFFEAETAKRAGRKQFNEMLKYLKKNKSVRTILVEKTDRLYRNLKDYVLLDEFEDLEIHFVKEGTTLSKNSRSQDKFMHGIRVLMAKNYIDNLSEEIRKGLKEKAEQGYCPTKAPFGYKNITLKSGRRIIVPDEETAPYIVKAYELYSTGVFTYKGIAKILTEEGFKPNDKPCTKRAVELILHNYFYIGQFEYNGKRYEHGQHQPIVEPDLFFAVQKRLAEQFISRPRTHKFAFLGLIKCAHCGCSITAEIQKGKYVYYHCTGKRGGTCKKKFIREEKIEAAFVEFLKQIVLSEEEISEIKNAAKEMLKQKSEYTDLTSENLNKEISKLRRRLDNLYTDRADGLIDEEFYCQKRQQWQAELDAAVIKLETSLRFDRTFMDDISRLLELSKNAYSAYLRESDEEKVKLLKILGSNFFFDGKNIIIEAFEPFDIIIKRQNLRKLEDRRFELLTPCVQSRCSTS

SEQ ID NO: 22439 - protein, 489 aa, synthetic construct
MEQYCIYLRKSRADAEAEARGEGETLARHEHALLGLAKSQKLAIVKIYREIVSGDSIAARPQMQQMLQDVTDKKYTGVLVMEIERLARGDTIDQGVVAQAFRESNTKIVTPIKTYDPSNEFDEEYFEFSLFMSRREYKTIKRRMQAGRIASIKEGNYIGTNPPYGYKKIQPEPKVKTLEIVPDEADAVRMMFDMYLSGMGAKAIATRLNQLQIPPRKSPAWEPVSIRKILQSPIYAGKIEWHTKKDGTILADGLHPEIISWEEFQQVQERRKRKASPVPTGYTTQNYYHNILFCANCGHQMKRRPAPNGSSHMLCVRQQCRGKVVSAPTSRVDEAVLEAIRYRIQELELSKEKIEKEDHHTKENEEKQRTRLKKALEKLQKQKEKLHTLLETDVYSVETFLERSKVLEQQKLDLETELAELNDAQKEVHLSPKQALLWLQHTLDHFETANPEQKNKMLQRVIKRIEYSKTERMCYRKQTSDLALHVEFL

SEQ ID NO: 22440 - protein, 467 aa, synthetic construct
MIRMARSVTVIPARNRQRETGRRAVQEKKIRVAAYCRVSTDQEDQLHSFEAQVDYYTKYINDHENYEMAGIYADEGISGTNTKKREQFKRMIADCEGGKIDLVITKSISRFARNTQDCLAYSRKLKNLGIGIIFEKENINTLDSTGELLFTILSSLAQDESRNISENCKWGIRTKFKNGEMHLNTFKFLGYDKDENGKLVINKEQAKTVRRIYRDFLIGINPAQIAKELTEEKVPGCNGQTKWYPSTIVGILKQEKHMGDALLQKTYTADFLTKRQVKNNGEIAQVYVKDSHKGIIDKQTWNAVQEEFERRERFMEAHGTDRYSYGADCMPFCEKVFCGECGSLFTRHSWRSRGIVQWQCKNHRKDGKVACTNAYVDNADLEKGFVKAFNRLVTDRDKHMERWDQMKTDGSPLEKIRAEQMMEATENEPLTRFVPEIAQLVLCEVTVLGAKKYEFFFQEGSRVKVSV

SEQ ID NO: 22441 - protein, 424 aa, synthetic construct
MPEERIAKKRCAIYCRKSVEEGLEQEFNSLDAQREAGEAYILSQKANGWVCLPEHYDDGGYSGGNMKRPALQKLLKDSETGLVDIIVVYKIDRLSRSICDFADLSKKFDEWGIQFVSVTQEINTATPSGRMMLNILVTFSQYEREITAQRISDKMSASRKKGIWVGGTVPLGYVAENKKLVIHEEDAKTVRHIFQRFIETQSPKLIAHELNLAGKRTKKGKLWNTSHIYRILNNHTYNGEVKYKENVCKGEQERIVSAEVWERTRKILAANSPIKDCSRRMETVAPLKGILKCGHCGGAMMPAYGRKNGRHYHYYLCSKDSKRAESQCPVRQLPAGEIEEVVKTQLKKIMEHPAVLSALADTAGIPCTDILQLLESDFWSEISAGEYNRLVQSLVARVVVWRNHLEIEMKTAGIKSLTGEFCND

SEQ ID NO: 22442 - protein, 514 aa, synthetic construct
MAKRKFNKGGEVRLVAYYRYSGGSGQTEQSIEGQRRDCETYARLHNMTIQKEYVDRHISGKTDDRAAFQQMITDSDKGAFDMVICWKTDRFARNRYDSAVYKKRLRDNGVEIVYAAESNIAGAEGIIIEGVMEALAEYYSAELAEKMRRGMRESALKGQAISRCRALGLKTDEHKRFVIDEKTAPTVRFIFEHYAAGESAMSIVEQLNAKGLRTSQGNPFNKSSIPRIIQNEAYRGVYVSKSYDVRIEGAIPAIIDDELWERAQTMLKLNRQLKAKNEPKADYILSGKLYCSCGSLMRGMSGHSATGEVYRYYTCPNKNCHLRNIPKDDLEGKVMQSISDHLLQPEAMEALAEAMVEVQKADAEKPNAERVAIEQSLADVRRRSKNILDAIENGTANAQLCARLDDLSEQERTLNFQLSALEKEKPVVFTKEQYLFLLEQFLVEPSERTPEYGRRLVNTFVTSMVVSDRELVINFNVSEETVNKNKKTSQTNLQKESSSGMRLVRVARIELTAS

SEQ ID NO: 22443 - protein, 540 aa, synthetic construct
MATATRRVVRTMPQMFIDVADNQSERLHVAAYARVSTEKEEQEDSFERQVEHYKQLIYSKPDWQFVDVYADPGISGTRAEKRPDFLRMIEDCRAGKIKKVLVKSISRFARNTVDALQYIRELKDLGISVYFESENIDTLTPGGEVLLTILAAMAEQESRTISSNIKWAWQRKFQKGDIILNTGLMLGYRKIGKDDEGHDIYEINEEEAEIVRRIYREFIAGYSITQIAKRLQAEGVKTKLGRESWRHNVIESILTNEKYTGNALLGKTFKPDVLTKYRQKNDGKKAPIYYVEGSHPAIIEKGLFDLAQQEMQRRRDANDNKVGGGRYSSRYPFSGMLVCGICGSKLRRQVRTMGSGKRTASWGCCNRINNGRAVCDSHHVNEDVLEAAYLTAMRRLVDSAEEVVEAVRDGAELALEPKNKAAMDRIDEETIQLQEAALALHKAKQRMEIGSVEYASRVKEYSERMKELEAERNELQGTAAKYAEVRLWLDTFIEQTMQSDTLTTVDGTTMKMLVDRIHIRNDGIVVEFKCGVAIEQEYVK

SEQ ID NO: 22444 - protein, 488 aa, synthetic construct
MEKTRAVAYIRVSTERDAQLHSYEFQEHYWQSAFEDDPNTDLIGIYADKGISGHSVQKRPKFLVMMQEAREHKFDKIYTKSVSRFARNTTQLLEAVRELRDLGIEVVFENENIHTFQPTSEIFLTIAATIAENDLEVDSARQRWSIQRRCENGWISVGSGLFGLKLTADNELEIVPEEAAVIRYIYESYVDGGIGSKRIADALNAAGVQSRNGYPWDAKHIIGLLRNEKYKGDVIMGKSVRHFGEYHKNPNAEYAPRYYMEGTHEAIVDKDMWEATQRILEERSRNHCRTRIAHSFTGMIECGCCGKNYLHKVNNSQCKWQTDIWACRTYLRDGKKACGNSRIKDTVLKEKFISAYNEFIERRPQGDSMVALQEVLEDLRQQEQELAELMMQRLITKAAYEEERKSVKMQITDISEKISERRAKRVPESEYVPITEFSEEKTKRFLSKVVVTMFTVTFVFYNGAKITRTYDNGQPGNKVGWNKEKEES

SEQ ID NO: 22445 - protein, 529 aa, synthetic construct
MSRYCIYLRKSRADLEAEAHGEGETLSRHKTALLELARRMGITISATYEEIVSGETIAARPQMQRLLSEVGAGEWDGVLVMEIERLARGDTMDQGLVAQTFKYSGTKIITPLKTFDPQNEFDEEYFEFGLFMARREFTTTNRRLVRGREASAKEGKYVGSVPPYGYRKVKIPNDKGFTLEIIEEQAKVVRMIFEWYAEGAEVNSQKKRIGPYTIAVRLNELGIKSAGKKDYWTIYGVQNMLINPVYIGKIRWGYRKVKKTVTPEGMKKKSREFAQDGDYIVVDGLHEPILSEELFYKVQSLIADNPPTPIKYRNNNVNPFAGLIFCAKCGHCLSYRKGYGRHPGYLGCNVAGCDNKAAPFELIEQRVLSILNSWVKDYSVDKAQIKHEADLNAELSNAISLAEKEIENLQGQLDNVYSFFERGTYTEKIFKQRSSAIEQQITDIGEKIDRLKAEHQQVLERQNVQAEFVPSIKHLLEIYDTLEPVEKNKWLKQIIDRMVYEKNADGKYRNVDPGDFTLGILPRLPKKGS

SEQ ID NO: 22446 - protein, 433 aa, synthetic construct
MPRTITIVPKPPKLEQKKRVAAYARVSSGKDAMLHSLSAQVSYYSDLIQNHDDWLYVGVYADEAKTGTKESRADFQRLIADCRAGKIDMVITKSISRFARNTVTLLQTVRDFKAWEVDIFFEEQNIHTMSGDGELMMTILASYAQEESRSASENQKWRIKRNFEEGMPWNGAMLGYRLKNGRYEIIPEEADLVRRIYDEYLSGDGYLTIAKRLNEDGIPSRFRKQWGQSVISKILSNYTYTGNLILQKTFRENHITKKTVINNGELPKYHAEDAHDAIIDMESFQAVQAEKARRAARFIKKPIPKKTYPFTSLLVCDGCGKNYRRKVTKTGPVWVCGTFNSMGKAACASKQIPEETLQAVTAEVLGQVDFPEELLRRLIKSILVCNENVLIFRFYDGSEVTRKWQDRSRSQSWTDEMKATARQKALERRNQNA

SEQ ID NO: 22447 - protein, 526 aa, synthetic construct
MPKVTMIPATINPLTHLPSVAARKRRVAGYARVSTDSDEQFTSYEAQVDYYTKFIQSKPEWEFVKVYTDEGISGTNTKRREGFKEMITDALDGKIDLIVTKSVSRFARNTVDSLVTIRKLKENGVECYFEKEGIYTFDGKGELLITIMSSLAQEESRSISENITWGQRKSFSDGKVHLPYKRFLGYEKGEDGRPAVVESEARVVKLIYGLFLEGKTQAGICKYLEELGIPSPGGKQTWSKTTITSILQNEKYKGDALLQKKFTVDFLEKKMKPNEGEVPQYYVTGSHPAIIEPDEWEQVQAEFARRKTLGKAYSGKSVLSAKLVCEDCGAFFGPKVWHSTDQYRRTIWQCNGKFANEERCHTPVVDTETIQRLFIKAYNLMMQDRVQIIKQCEAWRARLMDFGTLDADIERQLEETQVVAELVKAAVKENASTAQSQEAYLKKYEALTERYEKAAAELERLQSLRTARSQQDKKMALYIRTLKKQPEVMHDWNDTIWTVMIEKAIVHKDGQITFVFQNGTEIKVGA

SEQ ID NO: 22448 - protein, 500 aa, synthetic construct
MSQAVIYARVSTKEQEREGFSIPAQLELLKNYADKNGIFVVKVFRESETAKKAGRKAFNEMLNFVKEKNIKIILVEKTDRLYRNFKDYVTIDEIKDIEIHFVKEGVVLSEKASSSAKLAHGFKVLMAKNYIDNLREEVIKGRNKKIEYGEYPQRAPIGYKNVYDKATRHRVIVPDIETAPFVKRAFTMYAKGLSLDDVREKLAEEGFLVNGKTVAKTTLARTLHSPIYIGKMELKGVIYQASHTPIISVDLWNKVQTLIDKGNKTRSHNVVFPYTGLITCGICGCQFTAELKKGRYIYYHCTGKRGGECKTKKEYVRQEELDDVFVSLVKRIANKLPDDVLNRIKSGLKDMQRAKNEYEEFEKKKIDKQIATIKRRLDSLYIDKLDGKISEEFFEEKNIEWHAEQNKLLTKLQSMNNVSREFYEGSNLLLDFCKSADRLYIQASPEKKRQILKLIGSNFIYKSGNVAITLNPAFDFLLNCDLCRMVGDAGLEPTTPTMSM

SEQ ID NO: 22449 - protein, 485 aa, synthetic construct
MIKRGACYIRVSTNDQLEFSPDAQLKAIKKYAKDNDIIIDDDYVFIDEGISGRKASKRPAFQQMIKIAKSKPKKFDVILVHKFDRFARSREDSVVYKSLLRKECDIKVISITESIEDDKFSVILEAMLEAMAEYYSLNLADEVKKGMTEKAIRGQYQSSPPFGYKMENKKLVIIEDEAQVVRMIFDKFLNYDPSFLRLAKMVNALGYKTHRGGLFENRTIEYILNNPVYCGMARWTPTGKIRRNYSSSDSIVTKSEHTPIISEEVFNQCKEKLAKMKEINRRYYKGTNPQNLHWLNGLVRCKECGKTLVRSQKDYYQCSGYVKGACSTSQLIRIDKIESTILEQIQKDFDSKLKLNVKINSKSFSDNEVQIIYNQLEKLKEKESRIKEAYINGIDSIEEYKANKKDLQEQKEYLNNKLIESKNGLSIKSSDAIMKEQLRSYYEILSNPNVEVQRKYEISHLLIDRIEFSKTASTLDLQYKLYQME

SEQ ID NO: 22450 - protein, 514 aa, synthetic construct
MLMPKTEEKQTITAVIYARYSSDRQREESIEGQIRECKAFAAANGYRIIGTYIDRAMSARTDQRPDFQRMIHDSDRHLFQFVIVYALDRFSRSRYDSAIYKNRLKKNGVRVLSAKENIRDDPTGVILESLLEGYAEYYSLELAQKVRRGMADNLLEKKWVGTVIPFGYKKGTDSRLYVDESKRQAVIDIFQMYSDRYRLVDIIAYLNAHHFTTAQGRPFSRNSLNNILVNSIYTGTFRWAGTVYPGYAPRIISDELFNKVQKIKEGRKRNMIKSTSPDYELTGKIFCGRCGRPMVGVSGTGKSGNTYFYYKCSGKTHGRKDCDAKAIRRDAVESAVYNATVAMLKQPHAIKIITAQAILAQEREQGNSEVDRLKHEKAALDAKICNISKAVAAGLTADEIIAQANEYSNRSKELESLIQVEELKEKAFTLTPEAVTFFLEKLLEKAETGSTTLSTFWDFIRCIKINGCIAEIHFNYTAVPATLDNPIRVKIETNEECSNDDVLVDHQGFEPRTP

SEQ ID NO: 22451 - protein, 567 aa, synthetic construct
MSTGTELRAVFYARVSTEEEKQLNALEKQIQENKDVIRDHGWRLVGEYIDEGKTGTTTKRRNDYKRLLKDMTENKFDIVVCKDQDRLQRNTLDWYLFVDNLVTNNLKLFMYLDNKFFKPSEDALITGVKAIIAEEYSRNLSKKLNNSNKRRIERALNGEEVSAMGNGKSLAFKIVNGKWVKDEEEAKLGKKIFELYLEYDSIRKVRDWVNEHGYTNSVGKPFTSESISRILKNEKAKGVIVMGKYHHDFDKKKIVRRSEEELVRIPAPELAYVSEEVFDKVQERLRAKTGNGRGVNAYSDPLSGKIYCGSCGRKLWKHASNGYVNWMCASQVAKGDVECNGTRITTVAIRNIYKKITDNLEVNKGVVKQDIVKWLNELKATLSDTSVNEKIQKDLDKLERKRTKLLEAYLEDFISKDDYKAKYEAIEGQIEEKKKLLVPVEENEDIKVIESVLQNIDDEIDAYVKTLDMEESKVDFLIEHTKRITVLENRDIIIELDLVAGAIIAGKDFLLYVHDTMPFPHGRIHPKGPRRQTRPHRPIRDSLGCHQHGRNLEWHWESDLSAGADGA

SEQ ID NO: 22452 - protein, 582 aa, synthetic construct
MTKSTITIPKTPKAALYIRVSTDMQADKDSLPLQESDLRKLADLNGIKDIEVFSDVGFSGKNLNRPAFRSMMERIRAREFSHLYVWKLDRISRNLLDFLELYDELKDYGVAFASKNESFDTQSPGGEAMLKILLIFAELERKTIAERVTAVMLGRANENKWNGGRVPFGYMPGPVTTDVNGKKCKSWPVPDPIEAPVVRAIFELYLREKALKKVAAALNAAGYRSRKGTQWSDTTVRCILKNHFYKGEYVYNRQNSNAGRREDFYRSENDWVVVTGQHEAIVPEETWRRCNEMLSKNRSWLAPIGSLVSAQDKYIFGGLLECAACGYTLNSKDRARGHDHTRSTYYYCNGRWKVPAVCAAEHPGYASDCVLLPRLLKLIARIIEACANAIKFVSAEHLVSYLLNDNLIPGATGIEEAQRIYMIVRAHVKHIYGVDQADHYNPNALLVEQSKKEKEKQERALSRLKRAYLFDDGDMSEAEYFEQKAAIEGTIAKLDKQIKSLSGNDIGADEAYLAQLSKLIMIKKLQDTNSDFDYYKLAKAIGRKPIHDFLAEIISRIIMGDQNKILKIIFKNGVSITFQYAK

SEQ ID NO: 22453 - protein, 519 aa, synthetic construct
MKKAIIYARYSSDSQTEQSIEGQLRVCREYAQNNDILIVDTYIDRAMTGTNDNRVAFQKMLKDSSRKEWQYLIVYKLDRFSRNKFESVIHKKTLRDNGVTILSAMENLTDSPEGRMMETVLEGFNQYFSEELTQKVNRGLKESWRKGKATGGQDIFGYDVVDKKYVVNEYESKIVEDAFLMYSQGYKAVAIADKFKECGCRRKNGKLVDHKYLYFILHNKRYTGVVEHQGELYDNIFPRIISDELWDKVNAINEENKLAPSRKKEIFDYILSGKLICGDCKHRMGGESGTSHTGAIHYYYICLSKRRKRAKCNMSRVQKQFIEDTVINATTQMLSSVNNIKKIAQSIYNVHKKETADNTALKLIEKKRAEAVKAQNNIVKAIEQGIITETTKSRLTELENLISQYDVEIFKEKARSYTYLTADDIEMFLSKFVFDNTDDIKVRKLLVNAFIREVILYDDEIVITYNFTDSPEHLKLTKEHITKTENEIETANKTAISSNTGSYKLCHTAPTKKQPCKQP

SEQ ID NO: 22454 - protein, 499 aa, synthetic construct
MNVVLYMRYSSDRQTEQSIEGQKRVCMDFCERQGYNVVGEYIDRATSAYKETAKRTNFCRMIRDSSNGLWQGVVVYKLDRFARNRYDSATYKVRLKKNGVKVISATENISDSPEGVILESVLEGMAEFYSKELSQKVSRGLNESAHKCNSTGGAIPLGYKTVNKKLTVDEPNAQIVKEAFDLYAGGATISEICEKFNSQGYRTKKGTEFNKNSFKTMFRNEKYIGTYTYKDIRIEGGIPAIIDKETFKAVQKRLSANAQAPARGKARVNYLLSQKLFCGHCGANMIGESGRSKTGETYNYYSCSTRKRFHSCKKRTIRKDLIERIVAENAMRLISPEMINTIADMAIKCNREDIESDAIIPALTADLKEINTSIKNLLKMVERGVESETLDLRLKELEKRKKDTESRLDAAKSEYLTLDKTVIVGWLSQFLSGDIEDEDFRRHLIDTLINSVTVWDEPDGGYKITTVYNLKGNTQTYRVNADGSSDLERNSPPKKRQFS

SEQ ID NO: 22455 - protein, 453 aa, synthetic construct
MVYQLDRFARNRYDSAIYKSKLKKNGVRVLSARENITDDASGILVEGVLESMAEYFSAELSQKIHRGMEINAQKCLSNGSNPGLGFKVDKDRHFYVDEEEAEIVREIFERYASGETKAEIVKDLKRRKIKTSLGNDFTYNSLSRMLSNKRYIGVYMYKGQETPGGMPRILDDDIFYKVQDILDKNKKASARTHGEGEYLLTTKLFCGHCKNMMVGYGGTSKTGKRYHYYICKEARKKRCDKTIVGKKKIEDRVIAECLKLLTDDNIKFIAQKVAEECNKSPDNLTVKQLKKAIREADTAIENLWRGIEQGQSVPMLTERLNKRQAEKDALEEQLAIEENKRICLSEAQILAFLNFVCEMPLDDVNKRRAIINILVHSVYLYDDHFTLIINASKKPMSVDNIPLEEIEEAFNSDKTCTEQCSTMTSPAPPNKNRNFDTKRILIAVHFLSLKNGL

SEQ ID NO: 22456 - protein, 485 aa, synthetic construct
MRGVIYARYSPGPHQTEQSIEGQVADCQQYAEEHGIDIIEIYADRHVSGKSVVGRDEFQRMLRDAEKGRFDCVLVWKIDRFGRDRQDIAMGKMTLKRAGVKLMYARESVPEGPEGIILESVLEGLAEYYSADLRQKVIRGMKETAKKGQYCGQPLPIGYKVDSQRHVVIDEREAAVVREAFKMHIAGAQLRDIVQLFADRGIMGRRGKPVSNAVVYRMLRNEKYLGEFYIQDVKLNVEPIIDQATFLEAAQHFKTSRNNAAGRAKVNYLLSCKMFCGYCGSMISAEAGTGKLGKVYRYYKCGDKKRGKKCELKPFPKDHLEDAIILATVNDMLTDEMIEKLTVRILEVQEQENADDPVVGLRRRLDSNKKRQRNLLDAIEEGGARGLVSRLAALEEEEEQLVLEIQRAEIKRPRLTHEVVEAWLRSFRVGDVTDDDFRARLVDTFIARVELRNDEALIFYNIREKGPHSRVRVRPEWWSRRESNP

SEQ ID NO: 22457 - protein, 506 aa, synthetic construct
MENQTAVIYARYSSDRQREESIEGQIRECKAFAAANGYRIIGTYIDRAMSARTDQRPDFQRMIHDSDRHLFQFVIVYALDRFSRSRYDSAIYKNRLKKNGVRVLSAKENIRDDPTGVILESLLEGYAEYYSLELAQKVRRGMADNLLEKKWVGTVIPFGYKKGTDSRLYVDESKRQAVIDIFQMYSDRYRLVDIIAYLNAHHFANAQGRPFSRNSLNNILVNSIYTGTFRWAGTVYPGYAPRIISDELFNKVQKIKEGRKRNMVKSASPDYELTGKIFCGRCGRPMVGVSGTGKSGNTYFYYKCSGKTHGRKNCDAKAIRRDAVESAVYNATVAMLKQPHAIKIITAQAILAQEREQGNSEVDRLKHEKAALDAKIRNISKAVAAGLTADEIISQANEYSNRSKDLETLIRIEELKEKAFTLTPEAVTFFLEKLLEKAETGNATLATFWDFIRCIKINGCIAEIHFNYTAVPATLDNPIRVKIETNEECSNDDVLVDHQGFEPRTP

SEQ ID NO: 22458 - protein, 424 aa, synthetic construct
MPEERIAKKRCAIYCRKSVEEGLEQEFNSLDAQREAGEAYILSQKANGWVCLPEHYDDGGYSGGNMKRPALQKLLKDCETGLVDIIVVYKIDRLSRSICDFADLSKKFDEWGMQFVSVTQEINTATPSGRMMLNILVPFSQYEREITAQRISDKMSASRKKGIWVGGTVPLGYVAKNKKLVIHEEDAKTVRHIFQRFIETQSPKLIAHELNLAGKRTKKGKVWNTSHIYRILNNHTYNGEVKYKENICKGEQERIVSAEVWERTRKILAANSPIKDRSRKMETVAPLKGILKCGHCGGAMMPAYGRKNGRHYHYYLCSKNSKRAESQCPVRQLPAGEIEEVVKTQLKKIMEHPAVLSALAAAAGIPCTDILQLLESDFWSEISAGEYNRLVQSLVARIVVWRDHLEIEMKTAGIKSLTGEFCND

SEQ ID NO: 22459 - protein, 597 aa, synthetic construct
MSRVVLSDLSENKVVLPTNVSTFDRNRQRSVVFYGRVSTEHEAQLAALENQMQWYEDQAKYHPNWTVLKSYIDRGITGTQAKKRPAFMEMLNDAKYHKFDLIVTREVCRFARNTVDTLVITRQLKEIGIEVYFVEDNIWTMDNDGELRLTIMATLAQEESRKTSERVRAGQKISRDNGVLYGNGNILGYDRLGDTYIINEDQAETVRIIYDLYLKGNGFNKIVNELVRLKRKDSSGLVRWDATKVSRILHNATYKGYQGYYKSHKNNHLDQKTIVNRDEDTYLYVKGRFTPIISEEVWDKCKALRESKLTLRKTQEGKLERSGTRTSEDIWAKRLICRCGHRMRKDKWHVNKTGLTYGYKCYNVLNNGSKQTRIDAGLDADKYCDMGTIADWKFDLMLRELLKALNLNNDDLIKKAYNQFENSYTKETKEARELRDAEAKLRKMRIKLENLTEMRVNGEIDKQEYSSLKAKINGEMLIAEKEIDDIKCVVLEEERKTTPLVSIDVFRSMAVEDLDFTKPIRHSALVNTMIKKIVPNTSLDFKWYLNLYPKRDDAGDEDYKEVVEFTIDYDVAKGFRNNRGEMLRQNQWKDLTVRVMI

SEQ ID NO: 22460 - protein, 516 aa, synthetic construct
MTKNKKSDNVNEKCKAVIYARFSSDKQREESIEGQIRECTQFAKSQNLEIIGTYIDRALSARSDNRPDFLRMIADSTKGLFQYVIVYQLDRFSRSRYDSAVYKHKLKKNGVRVLSAKERIGDDPSSIILESMLEGYAEYYSAELSQKVKRGMTENVLEHKWTGGYVPLGYSLAPDKTLQIDPVGAEAVKIIYDKWLAGCRIMDIIRYLNDHNYVTSRKAKFRYSSLNRILTNPIYTGLYQWGSIEVADYAPAIITQKQFALAQEKIHHIKAHPRAKRRSANYALTGMIYCGVCGSPMTGQSGHSKSGALYHYYRCSTKNNYHDRGKKLNIKCTNRNINREKVEDLVLQTTINILMNPEAVHMIAKQAVAVQQKDPAATELDRIKEDKKIIQKKLNNSIKAVEAGIISTTLAVNISQYEKEIADLDIKMEKIKLSSTPVKIDEIAVEFFLKSLLLNKKEHDKYRLDMFQTFIRRVIVYPDKVEIQYNYTATPILENPVTKMMTGNSGCSRCERLVTR

SEQ ID NO: 22461 - protein, 499 aa, synthetic construct
MNVVLYMRYSSDRQTEQSIEGQKRVCMDFCERQGYNVVGEYIDRATSAYKETAKRTNFCRMIRDSSNGLWQGVVVYKLDRFARNRYDSATYKVRLKKNGVKVISATENISDSPEGVILESVLEGMAEFYSKELSQKVSRGLNESAHKCNSTGGAIPLGYKTVNKKLTVDEPNAQIVKDAFDLYAGGATISEICEKFNSQGYRTKKGTEFNKNSFKSMFRNEKYIGTYTYKDIRIEGGIPAIIDKETFETVQKRLSANAQAPARGKARVNYLLSQKLFCGHCGANMTGDSGRSKTGETYYYYSCSTRKRFHSCKKRTIRKDLIERIVAENAMRLITPEMINTIADMAIKCNREDIESDAIIPALTADLKEINTSIKNLLKMVERGVESETLDSRLKELEKRKKDTELRLDAAKSEYLTLDKTVIVGWLSQFLSGDIEDEDFRRHLIDTLINSVTVWDEPDGGYKITTVYNLKGNTQTYRVNADGSSDMKRNSPPKKRQFS

SEQ ID NO: 22462 - protein, 524 aa, synthetic construct
MAGAKNITVIPAKKRVGNTVTAEDKPKLKVAAYCRVSTDSEEQATSYDAQVTHYTEFIRKNPEWEFAGIYADDGISGTNTKKREEFNQMIEDTMAGKIDMIITKSISRFARNTLDCLKYIRQLKEKNVPVFFEKENINTMDSKGEVLLTIMASLAQQESESLSKNVKMGIQFRYQNGEVQVNHNWFLGYTKDENGHLIIDEDQAIIVRRIFREYLQGASLKTIADGLMADGIPTATGNKKWRGDGIRKILTNEKYMGDALLQKTYTVDVLTKKRVSNNGIVPQYYVENNHEAIIPRQLFMQVQEELFRRAHLKTEGGKTKRVYSSKYALSSIVYCGKCGDLFRRVAWKARGASYNKWRCASRIEKGPKKGCDADAISEVELQNAVVRAINKTLGGREQFLVQLQHNIEDVLNGDSTATLEYIDQRMAELQEKLVMCVNKNAEYDVIANEIDALREKKAAVVTKDAEQEMLKKRIEEMRQFLQTQSSRVTEYDEQMVRRLIEKITVFDNKLIFEFKSGMTLELKR

SEQ ID NO: 22463 - protein, 520 aa, synthetic construct
MKNVTKINQVDFSVFKKTRVAAYCRVSTDSDEQELSLDTQKDHYERYIKANSEWEYAGIYYDDGVSGTKTAKRDGLLRLMEDCEKGLIDLVITKSISRFSRNTTDCLALVRKLLNYEVYVIFEKENINTGSMESELMLAVLASMAESESRSISENEKWSIKKRFQNGTYVISYPPYGYANVDGEMVIIPEQAEVVKEIFAGCLAGKSTNIIAKELNEKGVPTKKGAKWTGGTINGILTNEKYIGDALFQKTITDASFKRKRNYGEEEQYYCEDHHEPIIERETFEKAKEAIRQRGLEKGNCTEDTSKYQNRYAMSGKIKCGECGRSFKRRYHYTSHGKSYNAWCCGAHLEDSKSCSMKFIRDDDLKRAFLTMMNKLVFGNDLVLKPLLISITTNNSKKNANSVEDIEKEMESNEEQRKQLNTLLTNGYLERPVFAEAHNKLTMEYEHLVAKRDLLFRMDDAGYTMEQALKELVDFLNEVKPFTEWEESLFERFIEKVKVLSREKVEFEFKCGLKLKERID

SEQ ID NO: 22464 - protein, 505 aa, synthetic construct
MSQKCVIYARYSSDRQREESIEGQIRVCEEFALRNDLEVIQTYTDRALTARTDRRPAFQQMIADCKKRQFSYVLVYKLNRFSRNRYDSAVYKHKLAQEGVKVLSAMERITDDPSGILLESLIEGIAEYYSAELAENVHRGMTENALEGKANGRTPMGYKKGPDGKIVIDEREAKAVRFIFQSVLEGRTLKKIASALNKMGYRNSFGKPFASSNFGNLLKNTKYIGIYHWGDKDVEGVVPPIIKRDVFEKVQKIMESRKHKSTRKRVDAYLLTGRLICGLCGASYIGKSGTSHTGEPYAYYCCANRIHGKGCKGKNYRQDKLEEWLSIETLKALNHPDTIHQLAEQIIQIQKAAAAEPDPLIDNLDAELKDYKKRMNNSIKAIEAGVISETISQNITNYENKIKALEQELSRAKLKRQPFTLTQDHIEFFLSSLLAGDPADAKYRSQLIDTLIVGAVIYPDKIEVYYKYQKELPSLPNPLTIREEGSSNEKKLVGPLGFEPRTNRL

SEQ ID NO: 22465 - protein, 468 aa, synthetic construct
MDKKINNNMNDFTKKVEEVALYIRVSTEEQAINGDSLRTQREALTKFALANHYHIYGIYEDDGFSATNLNRPALQRLLEDVRKNKINRILLTKLDRLSRGVRNYYKVLDVLDAHCVFWQTIFEKYDSSTASGRLHINIMLSVAENESAQTSERIRSVFNNKIHQKEIISGKIPIGYKKEEKKLVVDEDKKALVIDAFNFYLKSGSVYKTFEYLALFDPSMNYPRTARLLANPLYIGTKVCKYGSIENYCEPIISNKTFNEVQNLLKKNQRKRDNSDHEFLFSGLLRCNECGYKMSGKYCKNFPTNCTFYYLCSNARLKKKCNMLKQLNETKIEKKLLEQIVPEINKYIDKNNILEQEKVQIRDISKERDKVNKQLEKLRDLYVNDLIQIDHYEKQYKELTSKLDSLKEEEKPVEEKKTVNYDEFKSFLSRDFVALYNNLSRTEKRLIWASAIDTIYIDDNYNLRIVFI

SEQ ID NO: 22466 - protein, 573 aa, synthetic construct
MAYNAQNKTGARVAIYVRVSTLHQIDRDSLPMQKQDLLAYAKLMLNTDDCVIFEDAGYSGKNTDRPKFQEMMSQMRAGAFTHLLVWKIDRISRNLLDFATMYNELKALGVTFVSKNEQFDTSTAMGEAMLKIILVFAELERNMTSERVTATMISRANNGLWNGGRIPYGYDYDYETHEFSVNEEESKVVILMHDMYEQERSLVRVVRELNERGYRSRAGNLWSPVSLLIILRNVFYCGDYRYNMLKEGDRQKVKDESEWVTVENHHVAIIPKGQKERIMATLDSNSKLCKQRNIYKSSKHTHVFGGLIYCGSCGKPLGSTPGNLTRDGWHYSKYTCPTRRKSVTLCTGKSTSDPIIGEFVFNYILNMLNAQNDFDKISSPEELEKLLLIGDTFAYIDHIEPNGLNDLFNVLSSGTVKGAVFGKGASLPTKKATVEPEVARLRNEKQKTERALDRLRNLYLYADEAMSEAEYMIQKNKLEETLEDINDQIGMMNTDSWQQSVSDEEFIQRASEFIIAQKLSGRKYVNYKRLAMSVDSEVLKNFVVSIIDSITIQDGLVSNIVFKNGLCHTFIFR

SEQ ID NO: 22467 - protein, 539 aa, synthetic construct
MAKAKQKAATNDISKLAVIYARYSSHNQTEQSIEGQLAAGHRYADLKGYTVVHEYIDRAMTGRNDNRDDFQKMLSDTSKKQFGAIIVWKVDRFGRNREEITFNKYRCKKNGVRVEYVAENLPDSPEGVILESVLEGMAEYYSLQLSQNVQRGLLESAKKHQVIGGNVPLGLMMDAHKKYVPDPKTAPTVKLIFDMYAEGSTTSEIINHLNSIGMRTKAGKPFTKSSLTTVLKNEKYIGVYKYKDIIRDEGVIPPIVDKEIFYRVQELLKVNRRMPSHKWNYSDYILTDKLFCGKCGTAMVGESGFGKMGVKYSYYICAKRRKDKTCDKKPVRQEWIEEIVLQRVQGILQNEELLEFIAENTWQYYLAQDESMEKLKGLQTELDKVEKSAANLMKAIEAGIFNDMTKARMDELDDQRAVIKKAMAEIEIEKGFKLTKDHILYFLEQFKKLDYKDRDCQRRLIDVFVNSIFVYDDKLRIAFNFGGSDSTITLNEVDKADRGEGFVCCASCPAKTKSPQYTVLRAFYFCKLLITIKPLRTKS

SEQ ID NO: 22468 - protein, 503 aa, synthetic construct
MRSAVKYGRVSSDRQEKEGFSLPAQDKLLNDYAAKHDIKIVASFFEAETAKRAGRKQFNEMLKFLKKNKSVRTILVEKTDRLYRNLKDYVLLDEFEDLEIHFVKEGTTLSKNSRSQDKFMHGIRVLMAKNYIDNLSEEIRKGLKEKAEQGYCPTKAPFGYKNITLKSGRRIIVPDEETAPYIVKAYELYSTGVFTYKGIAKILTEEGFRPNKKPCTKRAVELILHNYFYIGQFEYKGKRYEHGQHQPIVEPDLFFAVQKRLAEQFISRPRTHKFAFLGLIKCAHCGCSVTAEIQKGKYIYYHCTGKRGGTCKKKFIREEKIEAAFVEFLKQIVLSEEEISEIKNAAKEMLKQKSEYTDLTSENLNKEISKLRRRLDNLYTDRADGLIDEEFYCQKRQQWQAELDAAVIKLETSLRFDRTFMDDISRLLELSKNAYSAYLRESDEEKVKLLKILGSNFFFDGKNIIIEAFEPFDIIIKRQNLKNLETVGVEPTSKMDKNKPLRV

SEQ ID NO: 22469 - protein, 606 aa, synthetic construct
MKKVFVYHRVSSDQQWKDGGSGMSRQAELLEGYLERTGICAEMDDPAPVVLSDQGVSAFKGLNISEGELGAWMEQVRNGMWDSSILVVESIDRFSRQNPFDVMGYINALMAHNVAIHDVMANIVISRSNSKDLPFVMMNAQRAYDESKYKSDRIRKGWAKKREQAFNKGTIVTNKRPQWIEVEKDKYVLNEKAAVVKEIFALYQTGMGCPTIAKQLQRKEGEQYKFNRPWTGELVHKILTNRRVTGKIFISEIIRNHDDIENPVTQKKYDMDVYPVVINEEEFELVQELLKSRRPNAGRVTVKKDGQEEVLIKSNLFSGIARCTECGGPMYHNVVRAKRTPKKGDPKIEEYRYIRCLNERDGLCENKAMAYETVERFVVEHMLGMDLSTVIKEQEFNPEIEVLRIQIDQVKDQITNYENGIERRKSAGKPISFDMREELDDAKSELERLLARQASLATVQVDVPVLQDVNVTELYDVNNVDIRTRYENELNKIVSNIRLKRNGTSYIIDINYKQNELKRHVLFVENKKKEQTLISEVIIEDVDGSKFYYTPSFMIMLKDGEIRFQQTNEDLSIIDYSLLLNYIDAIDRNDAVGVWMRNQFNFLTSN

SEQ ID NO: 22470 - protein, 499 aa, synthetic construct
MNVVLYMRYSSDRQTEQSIEGQKRVCMDFCERQGYNVVGEYIDRATSAYKETAKRTNFCRMIRDSSNGLWQGVVVYKLDRFARNRYDSATYKVRLKKNGVKVISATENISDSPEGVILESVLEGMAEFYSKELSQKVSRGLNESAHKCNSTGGAIPLGYKTVDKKLTVDEPNAQIVKEAFDLYAGGATISEICEKFNSQGYRTKKGTEFNKNSFKAMFRNEKYIGTYTYKDIRIEGGIPAIIDEETFKAVQKRLSANAQAPARGKAKVNYLLSQKLFCGHCGANMTGDSGRSKTGETYYYYSCSTRKRFHSCKKRTIRKDLIERIVAENAMRLITPEMINTIADMAIKCNREDIESDAIIPALTADLKEINTSIKNLLKMVERGVESETLDSRLKELEKRKKDTESRLDAAKSEYLTLDKTVIVGWLSQFLSGDIEDEDFRRHLIDTLINSVTVWDEPDGGYKITTVYNLKGNTQTYRVNADGSSDMKRNSPPKKRQFS

SEQ ID NO: 22471 - protein, 585 aa, synthetic construct
MKQSKNVSDKLSNQKCALYVRVSTHWQIDKDSLPVQREDLINYAKYALNIDKYEIFEDAGYSAKNTDRPAFQQMMARLRTGEFSHLVVWKIDRISRNLLDFAEMYAEIKKLGITFVSKNEQFDTSNAMGEAMLKIILVFAELERNMTSERVTAVMLSRASNGQWNGGRVPYGYNYDKETGLFSINEAEASVINMIYDTYERVHSLLVVARTLNKKGILPRSGTPWSPTTISTILKNPFYTGAYRYNYHDESKSGGNTSSKFLKPKADWISVQEHHPAIVSAERQERVCAILEDNRRSNKRSSKTYVRKNIHIFAGILYCGYCGNQMQSTIDRERADGYRPSIYACSRKRRFDDCENKYISDVVVAPFVLNYIANVIKAQNNFGKSTSIETFERKLLRGPTFSEVEHIEKIGLQEMYDMLRSGISDAVYTSRTLSDIAGAEELADERDLLLAEHRKKERALARLKSLYLYNDEAISESDYIIERKNLSDSIASIDKRLEEIEKHSSRQFTLSDDEFLAKASMFIMTHHLQDKRYVDFEKLIRKVEPIIIKEFINSVTQKIVIKQGKIISIRFKNGIEHKFLYKTQE

SEQ ID NO: 22472 - protein, 526 aa, synthetic construct
MSDIAVIYARVSSKEQETGGYSLPAQLDFLKEYAKSKGLEVVKVFTESMTAKEAGRIEFNNMLKFAKKQRYGCHVIVEKNDRLLRNEDDEALIINLTVRQGLIDLHLVKDHLILNRYSTPHEIFMFHMMCGMSSMYPRNLSGEIKKGLDKKADLGDYPAKAPIGYKNVRSSKKRSTIEIDPTNAGYVSKIFELYATGMYSYKTLAERISLDGFYPKNKPCSPKLVEKIIINPFYMGEFEFNGKRYHEANHTPIITKELFYTCKKIRERHDNPRKITHDFLYSGLITCSHCGCQLTAEIKKGKYIYYHCTGNKGGTCKRNKYLKEEYIDEHIRTLLEKIQPSKEDAKAIVEKFKEIVNVNFDYDKKSMEEIGKKISLLKNRLNKLYIDRLDGMITDEFYREKKNEFQGELDELELKHDNFLAETDTLVDMATQIIELCKNAYNHYLRSDNENKRLLLKILCSNFLYDGSNLVIKLKSTVEPMLLGANFNNGGLKEETLELLARKLYDSVRDKNNVIFFERLKFLKIA

SEQ ID NO: 22473 - protein, 490 aa, synthetic construct
MSDIAVIYARVSSKEQETGGYSLPAQLDFLKEYAKSKGLEVVKVFTESMTAKEAGRIEFNNMLKFAKKQRYGCHVIVEKNDRLLRNEDDEALIINLTVRQGLIDLHLVKDHLILNRYSTPHEIFMFHMMCGMSSMYPRNLSGEIKKGLDKKADLGDYPAKAPIGYKNVRSSKKRSTIEIDPTNAGYVSKIFELYATGMYSYKTLAERISLDGFYPKNKPCSPKLVEKIIINPFYMGEFEFNGKRYHEANHTPIITKELFYTCKKIRERHDNPRKITHDFLYSGLITCSHCGCQLTAEIKKGKYIYYHCTGNKGGTCKRNKYLKEEYIDEHIRTLLEKIQPSKEDAKAIVEKFKEIVNVNFDYDKKSMEEIGKKISLLKNRLNKLYIDRLDGMITDEFYREKKNEFQGELDELELKHDNFLAETDTLVDMATQIIELCKNAYNHYLRSDNENKRLLLKILCSNFLYDGSNLVIKLKSTVEPMLLGANFNNG

SEQ ID NO: 22474 - protein, 514 aa, synthetic construct
MNITEITSTKKQTAERLRLAPYCRVSSDSTDQLHSFAAQIRYYSDYAKKHPEYQLVDIYADEGITGTEMKKRDELNRLIADCRKGKVDRIIVKSVSRLARNTEELLVLLRMCKEIGVSVYFEEQGIDTEKLNMEMIVTFPGMAAQQESVNISGNLRWSYQKRMQSGNFNCTCPSYGFDLKDGELVINETEAAVIRRIYDLYLQGYGTLAIAKMLNEDGIPRKHGYEKWLPSSINYVLNNERYMGDALLQKSYTTETLPFRKMKNDGRLPQYYVENSNPAIVSRETFQAAQNLLRSRKTERCKRKSYPLTGKLRCPECGRVFRHQVVNGKAHWICSCRSSGATDCQHRHVREDIVYDIFTDMVIKLKTYRTVLLGTLIHQMETMQDRTSRNQERIRQIDKEIADLGAKNHIIARLHTSGAMNAADYAMQTSEIGNRLTELRIERRQKLTEDEDDQLLATLKDLNGILDEYEPTVEFDNGLFDEIVESITVDNSEQLTFKLIGGIALTEQIPKKGR

SEQ ID NO: 22475 - protein, 522 aa, synthetic construct
MKTHYRVLRVAAYCRVSTKQEEQLNSYENQVEHYTERINSENGWTLEGIYADKGISGTSVKNRDEFNRMIRRCKQGKIDMIITKSIARFARNTVDCLKYVRLLNDLGVDVYFEEQGIHSNQPGAEFYITIYGSIAQSESENISANIKWGKAQAAREGKVVFRYKNFLGYRKGEDGQPEIVPEEAETIRLIYDRFLAGDSLKGIAKLLEEKGIKSPTGKAEWQFSTIQSILSNERYKGDAIINKTYITDCISKKVRVNNGERPKYYVENSHPAIIDSATFGRVQEELARRSGKRKVKQKGTTTEQGKYSSKYALTELLVCGECKTPYRRCTWTAGGKKKIVWRCINRLDYGKKYCHNSPTIEESILQKAVMTAIMETANQNTEVLRTLKLHIGMGLEGERSEDNSIDLQVRIAEIDAEFRKMLDRVSTETVEAFDEETATRLMNEKSRLQQQLDNIADAEQRRENAKSRLDDIYTILDGIKNRPMEYDDQIVRQLLEFIVVDSKEQVTVIFKGGLKSVQPLTE

SEQ ID NO: 22476 - protein, 601 aa, synthetic construct
MTIFPPFDMSALTAAEQKQLTDSPDVFSVDCDTVCCLYMRYSSDRQTEQSIEGQLRELIAYCKHHHYRIAAVYVDRAISAHASMNKRPAFQQMLADSLRAQWKTVLVYKLDRFARNREDAAIARMRLRKAGCNVESAKEGISKNPEGVILEALLEGMAEYYSLELSQKVRRGMNETARKGNNTGGPTPLGYRIENKRLQIDPLTAPLVEEAFRRYADGETVADICESFNARGYRTAKGAKFNKSSFKNIFRNEKYIGVYTFDGIRTEDAIPRIVSSELWNAVQSRLKVNGQAPARGKAKVPYLLSGKIFCGHCGAPMIGECGRGKGGKTYNYYACSTRKRKGSCDKKPVPKDWIEDVVAQDALSVLTDDIIEYVATVAAQQSEEDIQKNTNIPAIRQQIKDIEKKVSNLTRAIESASAAPDVLVSRIAELEEQRKGLSAQLLEEERGVIPLTKEMVVVFLTAVREQVVPLENMKPAIISLLVNSVTVYDDTPGYLTFKTAYNLSNIPSKTYKVPTSDENKCSDINPIGSPCKIPDAHASGIFRFERRIPAVYQMCKKASNVLTLYQQSGIIIRKGVDFDGTDNRFFSHGRRPKAKYGAALQ

SEQ ID NO: 22477 - protein, 535 aa, synthetic construct
MPRKKAATGTPVRLVAYYRYSGGSRQNEQSIEGQRHDCEAYARSHGLTITKEYIDRHISGKTDDRPAFQQMISDSDRHAFDAVICWKTDRLARNRYDSAIYKNRLRKNGVKILYAAETVVDGPEGIILEGLMESLAEYYSAELSQKLRRGQRESAMKCIALGGNRSFGYDIGPDKHYCINPQQAPAVRYIFEQYAAGFTAADIVAHLNANGIRTSRGNAFNKNSILRIITNEMYLGVYKYADIRIEGGVPAMIDRDLFDRCQRQLAFNRAHSGGTGPRADYILSGKLFCAACSRPMKGVSGISHSGEKYCYYACPGHTEKKGCTKSNVEKSALECAIVRATAQYILAPDKLQQILDQVLALQAHQTAPKPDPEKQALEAELSEVLHKQNNLLTALENGSSARLVQRLQDLEQQESTIRVRLAAIPDPPVPPRFTRDELEFMLSQFQRDESEQTLSYQRRLLDTFVSSVTLSDEQAVVCFNLTAPGTHSPERLTVPFSTNKNPAEPSDLTPDSAGSTALRLVEAMGVEPMSEKSSV

SEQ ID NO: 22478 - protein, 498 aa, synthetic construct
MTNAVIYARYSSEKQTEQSIEGQLHKCYEYAKANDLVITDTYIDRAMTGTNDKRTAFQQMLSDSEKKTSWEVVLVYAIDRFGRNSIEIAVNKQRLKKNGKILISATQRTSENIDGTKNLDGILLENVYIGLAEYYSAELSQKVTRGQLENLSKGNHIGGPVPFGYRSENKKIYIDESQAEIVREIFDEYINGKTVPEIVDDLTARGIYYNGKPFSCNTMYKMMKAKRYAGIYYYKDKLYENIFPAIISKDTFSRIQTLMAANQLGKRSTEVEYILREKLVCGYCGKSMQGDYGKSHTGKLFYYYICMGKKKLRNCNKKRIRKDLLEKIVIDTTVKLLSNDDTLTLIATEIIKLHSKKAESESLIKILSGQKDEAVKSLNNIMKALEAGIINDTTKNRMAELERTIKEFDNKILYEKAKIENCVTVDDIKKFVLTALKKTSYALIRNLIKQIVVYDDKIEIFYYYTSKNPDDKGRDFTLIEGSDNYPLVHLRGLEPRTH

SEQ ID NO: 22479 - protein, 468 aa, synthetic construct
MARQILHIPAQQRSVMVGGARMPQKKLRVAAYCRVSTAEEEQLNSFENQVAYYTAYINNNPEYELVDIYADEGISGTSTKRRDEFNRMIADCQAGKIDLVITKSISRFARNTQDCLNYSRKLKDMGIGIRFEKEGINTMDGSGELLFTILASLAQDESRSISENTTWGIRSLYKKGILHMNTNRFYGYDKDENGHLIINPEQAKIVKWVFESYMDGTSPDVLARTLNERQVPGCMGKPKWTVDTIMGILQNEKHMGDTILQKTFTADFMTKKMVKNEGQVAQYYISDDHEPIVSKELWQATQQEIRRRKEYMKAHGLRTMGRYTDAQPFTNRVFCGACGDLYWRRRMQRLGYVKYQWKCKQKCLGKESKGCINVDIWETDLHQTFVMAWNSLLEQRKTLLENWNAQLASDDPLVRFRAKQFMELTKGKPLDEVDFTLVGKVLDHADILPAGLVRYTFLDGTTIEVTFP

SEQ ID NO: 22480 - protein, 517 aa, synthetic construct
MKNCVIYARYSSERQTEQSIEGQLRICNDFAKQNGLQVLDTYIDRAMTGTNDNRPAFQQMLKDAEKPVMWDIVLVYAIDRFGRNSIEIAVNKQKLKKNKKMLISATQRMSENIDGTKNLDGIILENMYIGLAEYYSAELSQKIRRGLHESRQKGFCSGGRPPYGYYYKDKRVFINEEQANVVRYIFKEYFSGKIVREIINDLTEQGILYRGKAFAENTIYNFLRLEKYVGIARYDDGVYDNIYPQIVDKEVFDGVQAILAANKIGSRSPESLFLLRNKITCGCCGTHYQGDSGTSKNGTKFYYYKCMGRKKKHICHASVLKKDEFENLILEIIIKVFGTESRINYLADCVMAVYNDKLKEHSAVDLLKRDRDEVQKALDNIMRAIEQGIITETTQRRMKELEERKQTLNDKIVIAQYGESQRLTKQEIVEYLTHSLRQEPRFLLHILIKSIIVYDDKIEIYFNFTERKNPDDSDDTDSRDNNYVNCSDILPMCPPKGTAVAPVVPFHLRKRRCRDNR

SEQ ID NO: 22481 - protein, 555 aa, synthetic construct
MSKRVRTLLRVSSRQQLHDDDIPIQRAEAEQFIAKQKDWVFDKEYLEKGISAYHNGVDDREVLQEIMQDAKQGEFEILLAYMSDRIGRQEEYSFYVAELNRMGIEVWTIKDGQLKTEEHIDKLLNYIRFWQNEGESKKTGMRVHDTMVEMVKDGRFVGGKAPYGYKLVLSGEISNHGRALHKLVVVPEQAEVVRQIFGYAVNQGMGFQKIAKTLNENGVPAPILEQWKNGTVRSILTNPIYMGYIAYNRRKNGHANSTRLDRKEWTYAREQNPEIAIVSQELWERAQEIREARKNKINAARQATNELYMEQYNVPFSTRGRLALTGMVYCGYCGKRLKNTGYANHWTCKKTGEKKVSYVGRYGCPNGCKPRSTYSQEYLESIVFATVETYLENLKKIDISKELEDMQAQQTKDIKREIKDLEKEIKNLLADIETLEEKLPEAIRGEFAFSVDKLSAIISDKESLKKEKEIQKKSLQKQLEEISLQSNELMTFVEAMPKWNEIFSQADVQTKQMILSTLIDKIIVKDDDITIKFKIRLDNFLDEKLLENDGLDVPE

SEQ ID NO: 22482 - protein, 467 aa, synthetic construct
MIRMARSVTVIPARNRQRETGRRAVQEKKIRVAAYCRVSTDQEDQLHSFEAQVDYYTKYINDHENYEMAGIYADEGISGTNTKKREQFKKMIADCEGGKIDLVITKSISRFARNTQDCLAYSRKLKNLGIGIIFEKENINTLDSTGELLFTILSSLAQDESRNISENCKWGIRTKFKNGEMHLNTFKFLGYDKDENGKLVINKEQAKTVRRIYRDFLIGINPAQIAKELTEEKVPGCNGQTKWYPSTIVGILKQEKHMGDALLQKTYTADFLTKRQVKNNGEIAQVYVKDSHKGIIDKQTWNAVQEEFDRREKFMEEHGTERYSYGADCMPFCEKVFCGECGSLFTRHSWRSRGIVQWQCKNHRKDGKVACTNAYVDNADLEKGFVKAFNRLVTDRDKHMERWNQMKTDGSPLEKIRAEQMMEATENEPLGRFVPEIAQLVLAEVTVLGVKKYEFFFQEGSRVKVSV

SEQ ID NO: 22483 - protein, 498 aa, synthetic construct
MEIQIREGNRKQKRKLRVCAYCRVSTDADEQENSLENQIRHYETVIKANPSYEYAGVYSDFAISGFKEKRPGLQKMLADAQKGKIDLILTKSVSRFARNTSIVLEATRKLKELNVGVFFELQNINTLSGEGELMLTILAAFAQAESESGSVGAKMVYKRKYEAGIPVQYLERSFGYTKDERGVYIADESEAVWVRKIYEMAADGYTPAAIKRYLNKNGVKTVGGTKWIDSTVFRLIENEIYKGDYIMHKHFVNEERKLVRNRGEVDAWYIEDDHEAIVSPELWQKAQDAIEAKREYLAEGSVIEDFTEENYPYMNRIFCAKCGHPLYKRIYSNGNRLNWGCSGTKRHGKSFCEGINIPDGVLRKAWHFDGNMYIDEKPSVKGTKEFTYLKESSWKRRHKKKVPEAIPENTEEAYPYRKKIFCGLCGSRLVRHVNPKSHKVIWICNGAKRKGVAFCRGTRIPDSVIRGWGEIKKDIYIQRKDDKNGKKRYSYTSKKPTA

SEQ ID NO: 22484 - protein, 574 aa, synthetic construct
MIDNCVRAVFYARVSTQEEEQLKALPKQVEECKDIIASKGWRLIDGYVDEGKSGTKKDGRKAYIKLLEDMQEDKFDIIVVKSQDRLQRNTFDWYKFADLLNKNNKRLYLYMDNKFYEPSEDALITGIKAILAEQYSRDLSKKLNNYHEHRIEKARAGEEVPAMGNGQTYGYQLINGKWVVDESQRELVRKMYELYTDLHSVRKVRDALNEQGYRNQRGNLFTDENIGRIVKNVMHKGWVILNRHHREFDSKETIRRWEDEWVIVKKDHEPIVSEELWDAVNDEIQSHRNKGNSGTRGKRGGTDPLSGKMVCSCCGRVLWKHASQGSYKSKEGRKYTYKRYTQWYCSGKMGRGELACTNPATISGVKLQKYLVEMADMFLDYSTVEYSKNLLKRRTISWLEDLKDKLTTPNDNGKIEQDLKALEGKRGKLIDLYTDELISKEEFKSRSVDLDAEIEKKRALLVPVEENPDIKAIEDTIANIDAEIEVLFEDEAMVEEKKVQFIQEHIKKIYVSKNSDVFIVLDNVAGAFLFIDKEDTRIEVVPVAEYNPEELSEEGITENDFVPFDRESMPLTDV

SEQ ID NO: 22485 - protein, 503 aa, synthetic construct
MEITVEKVDTGVQKLGFQALSTLKTVRVAVYARVSTDQEIQLHSLEEQMKAFRAKIAQHPGWMLVDVYADEGISGTSVKKRKEFLRMMEDCEAGKVDYIMAKSISRFARNTVECLSYVRHLQSIGVQLYFEKEGLDTATSVSELILTVMAAFAQEESRSISENLKWGIRKRFESGESRWTKTYGYRKTKDGEIVIEPDEAAIVRMIFKMYQYGIPMTDILDELTFIQAPSARGKQTWNKTALKYLLENEKYIGDMRLQKWVSVDHISHRSVRNDSTVIPVYNVRNHHVPIIDRHTYQQVQRIMELKSPHGEYSRYPYFDTNIVCPLCGKKMIPRVMKVNSHKRILGCFDVDGCRGYAVKGYLVDAALLEAYNTLEIKEKKRTVAMQRMLEIKAESPKLDTVQYYWLDDLVGHIEFKQDTMRVFWKCGLESEVALNASKVEEPTHVAELYRNSLDRAQRSENKPVRVVRADKKSVNTREAQRNAAMQTAKNLRAKENGVAANDY

SEQ ID NO: 22486 - protein, 519 aa, synthetic construct
MLNAVIYARFSSDMQREESIDAQVRACKAYAKSKGYTVIKEYVDEAKSGRSTLTRDAYNQMMADAMENKFDVIIFHKIDRNSRNELNYFIFKDKLEKLGIRYEYAAQPIDADTAEGQMMETVMVGMAAYYSRNLAKETKKGMNENAYKAIFNGGYAPLGYKIVDKHYVIDEKEAEAVRLIFNLYLDGKGYGEICLALAARGYTTRSRKNFPKNSLHDILRNERYMGTYTFNRVPKTKRRNSHSYALPNDFISIPDAIPAIVPKETFLAAQEKMLLNKKRKGGAYTAKRDYLLSGKFFCGYCGSAMQGYSCCTRGNMYYYYSCARKDRVPADRCKQKMIRAEVIEHWIMSTLEREIFSDAGIQRVADSMSTAFGNANKEAKNATTVLLQRKAAAERKLNNLYRVIEDGDADEFDMQRLKKTKEELRNINNEICETAVKSAPDIDTSKIISLLKNMREEIFAKKNSHYAKQAIELLVKRVTIIDKTITLSLTTEGCLSLLVPRTRIAVSSDTWKITANLAA

SEQ ID NO: 22487 - protein, 515 aa, synthetic construct
MLNAVIYARFSSDMQREESIDAQVRACKAYAKSKGYTVVKEYVDEAKSGRSTLTRDAYNQMMADAMENKFDVIIFHKIDRNSRNELNYFIFKDKLEKLGIRYEYAAQPIDADTAEGQMMETVMVGMAAYYSRNLAKETKKGMNENAYKAIFNGGYAPLGYKIVDKHYVIDDKEAEAVRLIFNLYLDGKGYGEICLALAARGYTTRSGKNFPKNSLHDILRNERYMGTYTFNRVPKTKRRNSHSYARPNDFISIPDAIPAIVSKETFLAAQEKMLLNKKRKGGAYTAKRDYLLSGKFFCGYCGSAMQGYSCCTRGNMYYYYSCAKKDRVPADRCTQKMIRAEVIEHWIMSTLEREVFSDAGIQRVADSMSTAFGNANKEVKNATTILLQRKAAAERKLNNLYQVIEDGNADEFDMQRLRKAKEELRNINSEICETAVKSAPDIDTSKIVSLLKNMREEIFAKKNSHYAKQAIELLVKRVTIINKTITLSLTTEGCLSLLVPRTGIEPVRVSLPEGF

SEQ ID NO: 22488 - protein, 517 aa, synthetic construct
MPSVQIIKATKNHTAILENKTRKLKVAAYARVSTEKDEQENSYETQIRYFTDLIRSNPNYIFVDMYADEGLTGTMLKNRDSFNQMISDALEGKIDIIYVKSVSRFARNTVDSLCICRKLKNKGVNVIFEKENLELLSASGELMLTIFASLAQEESRSISENVKWTIHKNYEKGIYHMPYSSFLGYKKGDNGKMVIDEEQAVIVRKIYKMFLYGYSINSIAKELTKTGVLTPRGKSEWSQSTVRSILTNEKYCGDARLQKKFTANFLDHKAIRNEGQVASYYVTDDHEGIVSHEVYEMVQEMIKNSTEKKNCGDMYSRKLYCECGKLYGRKVHHSNDKYRTTIYRCNDEYSSNHIKCARLKEKQIQETYIQAVNELIQTDNIVSDIFEIARLFKPSETIDDEISVLIDKRNIIEHEIQNLVEESSKATDIDKYRSRYDNLVKEYENASLKVAKVIVEKDKRKAKYQNILRYANHLKELTEPIKQFDDELWFSLLDKATVKEKTIIYQFKDGREIETEL

SEQ ID NO: 22489 - protein, 453 aa, synthetic construct
MECVAYMRVSTEKQAVEGNGLDSQKRDIENYCRKNELVITDWYIDDGYTGTNMDRPELQRLVNDCSRKRVRCVVAFKLDRLSRNMIDGIYLIEKVFQKCNVVFKCVHDSVNYDSPMEQAYTQMMAVFAQLDKNTMMLRMRGGMLERIKQGYWMGGGNLPYCYSYSKEQGILIPIPERAEQARKGLELFISGYSDAKIKEICGFKSELVTRSILTGVVNIGMIPYKGKIYQGKHEPIFDKDRFNLGLELRKSRCSAKTYCITEPNLLTGLCYCGICGCKMRYQKWGSEKHKIYCCSRNKSLSYLPNYNASCNNSLEWADEIEKQVEEEILKISLDLSSYKPKEKATKLEIMQSQLEKEQIKLKRLYNLYADGNDTVLEMIKELEAQIKEMKLNIAAESKNAINTQKKEFVYENIKKLADIWDKVDKKQKNLILKTIIDKIVIVNGNIEIQLKNF

SEQ ID NO: 22490 - protein, 573 aa, synthetic construct
MAYNAQNKTGARVAIYVRVSTLHQIDRDSLPMQKQDLLAYAKLMLNTDDCVIFEDAGYSGKNTDRPKFQEMMSQMRAGAFTHLLVWKIDRISRNLLDFATMYNELKALGVTFVSKNEQFDTSTAMGEAMLKIILVFAELERNMTSERVTATMISRANNGLWNGGRIPFGYDYDYETHEFSVNEEESKVVILMHDMYEQERSLVRVVRELNERGYRSRAGNLWSPVSLLIILRNVFYCGDYRYNMLKEGDRQKVKDESEWVTVENHHVAIIPKDQKERIMATLDSNSKLCKQRNIYKSSKHTHVFGGLIYCGSCGKPLGSTPGNLTRDGWHYSKYTCPTRRKSVTLCTGKSTSDPIIGEFVFNYILNMLNAQNDFEKISSPEELEKLLLIGDTFAYIDHIEPNGLNDLFNVLSSGAVKGAVFGKGASLPTKKATVEPEVARLRNEKQKTERALDRLRSLYLYADEAMSEAEYMIQKNKLEETLEDINDQIGMMNTDSWQQSVSDEEFIQRASEFIIAQKLSGRKYVNYKRLAMSVDSEVLKNFVVSIIDSITIQDGLVSNIVFKNGLCHTFIFR

SEQ ID NO: 22491 - protein, 573 aa, synthetic construct
MQRAVIYARYSPGPNQTEQSIEGQVRECTKYAELHDLRIVGTYVDRKISGKTDNRREFQRMIDDSEKHIFDVIILYHTDRFARNRYDSAIYKHKLKENGVELRYATTDIPNGPEGIILESIMEGWAEYYSAELSRKIKRGMRESALKCHSTGAGRCLGYRTAEDKSLVIEPEGAKAVQTVFDMYIKGKSHADICRYLNDCGFRTAQGKLFNKNSVTHIIRNKRYIGVYTYDDITIEDGIPAIISKDTFHLAQLEAARRKTAKRPKEPKAEYLLSGKAFCGHCQKPLVGVSGTGKSGNKWYYYYCQESRAKRGCTKKPVKRDWLEREVVKRTVAEVLQPKVIQHIAKKCYDLQMEYRQDNSDVLFYELKLKDVRKAIKNTMHAIESGVKTKTLPARLQELENEEEALEAELAIAKASDFVITADQIEFLLTQFAEPWECESEEEYHRRIIKCFVHKVFLFDDKLLIYYNVSRDGKTREQSEAELLEEALGEGFDKRSSGSTKAEPDEPSRFAWLLLCPHGLYDRRDICPGVSTCLCQEIKKEATTQGISCVVASLCSLIAITDFVIIYQNPARF

SEQ ID NO: 22492 - protein, 433 aa, synthetic construct
MSKKITIVSKPPKLERKKRVAAYARVSSGKDAMLHSLSAQVSYYSDLIQSHGEWLYAGVYADEAKTGTKDSRAGFQNLVAECRASKIDMVITKSISRFARNTVTLLQTVREFKALGVDIYFEEQNIHTMSGDGELMMTILASYAQEESRSASENQKWRVKRNFEAGIPWDRTLLGYRMENDHYVIVPKEAEIVRHIYNEYLSGSGYNSIAKMLNDEGILSRFGGKWNQSAVSRVLSNYTYTGNLLLQKTFSENHITKRKMFNTGELPKYHAEDAHEAIINMETFQAVQKEKERRAAQFIKKPAPKKIYPFTGLLVCGNCGKNYRRKVTKAGAVWVCGTFNSLGKAACASKQIPEFTLQQVTANVLGQNDFTHEWLCDRIQHIRVCNDNTLIFCFNDGSEITRIWKDRSRSQSWTDEMKKAARQKTLERSKHNA

SEQ ID NO: 22493 - protein, 526 aa, synthetic construct
MPKVTMIPATVNPLTHLPKAAVQKRRVAGYARVSTDSDEQFTSYEAQVDYYTRYIQSKPEWDFVRVYTDEGISGTNTKRREGFKEMIADALAGKIDLIVTKSVSRFARNTVDSLVTIRKLKEKGVECYFEKEGIYTFDSKGELLITIMSSLAQEESRSISENITWGQRKSFADGKIHLAYKHFLGYKKGEDGRPAIIEEEAAVVRLIYRLFLDGKTQAGICRYLEDLSIPSPSGKEKWSKTTVTSILTNEKYKGDALLQKSFTVDFLQKKTKPNAGEVPQYYVEGSHPAIVEPYEWDHVQAEFARRKALGNAYSGKSIFSAKLVCEDCGGFFGSKVWHSTDRYRRTVWQCNNKFKGGERCLTPTVDTETVQQLFIKAYNQMMGNRKQIIEDCELMRKKLTDFKSLDTDIEHQFEETQIVAELVKAAVKDNAVTAQSQEAYLKKYEALTKRYETAAAELERLQNLRTLRSQKDKAMALYIRTLKKQPTVLSEWNDTLWTVMVEKAIVHRNSEITFAFYNGTKVKVRQ

SEQ ID NO: 22494 - protein, 516 aa, synthetic construct
MPKTEEKQAAKAVIYARYSSDRQREESIEGQLRVCEDYARRNNITILHTYADRAMTGRSDQRPEFQMMIRDAATMAFNVILVYKLNRFARNRYDSAKYKHKLKKYGVKVVSAMENIADDPSGILLESVIEGMAEYYSAELSENVLRGMTQNALEGKWPGGVIPLGYKLDKGGRLIINEEKAPIVRMIYQMFLDGMSVARIERELNDKKYTTDAGKVFSRSRVYYILHNERYIGTFQWKDIKKEGIIPPIISQESFHAVQERINAMKSSSYRTNNNYLLAGKAFCASCGAKVSGTSGKSQNGNKYCYYGCSHHHRSARYEYCETKNIRADVLEKLVCDKTHEILSSKKAIKEIARQAVKLRPRDESELEIRAIKNHISSCQKKIDNCIKAIENGVMSNALFESLNENERTLDVLKEKLAKASLMQGRGLLTEEKIQFFFETIREKAKETEKYNDILLTSLVRAVYICNEYVEIQYNYAEQLPILTNPVRIESCSYKCTNGGTIWIRTKDLFDVNEAL

SEQ ID NO: 22495 - protein, 467 aa, synthetic construct
MIRMARSVTVIPARNRQRETGRRAVQEKKIRVAAYCRVSTDQEDQLHSFEAQVDYYTKYINDHENYEMAGIYADEGISGTNTKKREQFKRMIADCEGGKIDLVITKSISRFARNTQDCLAYSRKLKNLGIGIIFEKENINTLDSTGELLFTILSSLAQDESRNISENCKWGIRTKFKNGEMHLNTFKFLGYDKDENGKLVINKEQAKTVRRIYRDFLIGINPAQIAKELTEEKVPGCNGQTKWYPSTIVGILKQEKHMGDALLQKTYTADFLTKRQVKNNGEIAQVYVKDSHKGIIDKETWNAVQEEFERRERFMKDHGTDRYSYGADCMPFCEKVFCGECKSLFTRHSWKSRGIVQWQCKNHRTDGRVTCSNAYVDNSNLEKGFVKAFNKLVADREKFMERWNQMKTDGSPLEKIRAEQMMEATENEPLGRFVPEIAQLVLAEVTVLGAKKYEFFFLEGSRIKVSV

SEQ ID NO: 22496 - protein, 518 aa, synthetic construct
MLLLAFRVIYRLPKRKEAWLVEIQIREGNREQKRKLRVCAYCRVSTDADEQENSLENQIRHYETVIKANPAYEYAGVYSDFAISGFKEKRPGLQKMLADAQKGKIDLILTKSVSRFARNTSIVLEATRKLKELNVGVFFELQNINTLSGEGELMLTILAAFAQAESESGSAGAKMVYQRKYEAGIPVQYLERSFGYTKDERGVYIADESEAVWVRKIYEMAADGYTPAAIKRYLNENGVKTVGGTKWIDSTVFRLIENEIYKGDYIMHKHFVNEERKLVRNRGEVDAWYIEDDHEAIVSPELWQKAQDAIEAKRDYLAEGSVIEEFTEDNYPYMNRIFCAKCGHPLYKRIYSNGNRLNWGCSGTKRYGKSFCEGINIPDGVLRKAWHFDGNMYIDEKPSVKGTKEFTYLKESSWKRRHKKKVPEAIPENTEEAYPYRKKIFCGLCGSRLVRHVNPKSHKVIWICNGAKRKGVAFCGGTRIPDSVIRGWGEIKKDIYIQRKDDKNGKKRYSYTSKKPTA

SEQ ID NO: 22497 - protein, 521 aa, synthetic construct
MKTVTKIEANQRTTGSEKKLRVAAYCRVSTDSDDQLESLAEQKKHYETCIQAHENWNFAGLYYDEGISGTKKEKRSELMRLLSDCEAGQIDFIITKSISRFARNTTDCLEMVRKLLAINVAIYFEKENINTTSMESELVLAVLSSLAENESVSISGNEKWSIRQRFQSGTYKMNPPPYGYRWNSEQLEVNNDQAEIVKRIFAEFLSGKGVMHIARGLDSDKIAPARGKHWCQSSILRILKNENYTGNAVFQKTFTDESFHRCVNYGQLDKYLVADHHEGIISKEDFDVVATLIERHAVEKNVTKGSHKYQLRYCFSGKIVCGECGATLKHRTHRLGGETYEAWCCSTHIYNKEGCSMKFIRDDDIKLAFVTMMNKLVFGHKLILKPYLLTLRSSSTDSSIQRIQQLRLLIEQNTGQQETLTRLMANGFIDRALFGRELNAIMAQTDEYRTEIDTLSSSVTGDGAKMKETERLIKLVERGRMFTEFDADLFSKLVDRICAFSRNEIGFVLKCGLTLRERIGE

SEQ ID NO: 22498 - protein, 526 aa, synthetic construct
MAEEKWTNGNLALQKKAPHVITIEAKECPQDIQLRVAAYARVSTSSEDQLNSFAAQSKYYTTLISSNENWKMVDLYADEGISGTSAEKRGDFQRLMADCRRGLVDRVLVKSISRFARNTKECLEAIRELKSLGISVCFEKEHIDTATLSGEMITTIFASIAQGESESTSRNMRLGIKMRMMNGEFNTCFAPYGYRLENHKLTIIPEEASVVQRIFSEYLNGKTSRTIARELNAECPRNRPWRRELIEYILKNERYAGNALLQKRYSTDTFPPQQKRNKGEREMYFVQNSNDAIVDLEIFERVQRLRARREVQRVANPRYFSNKMRCGVCGSTFRTKIQNGKIYWSCRTHEENASDCIITQIPEVEIQNAFLRLYYKLKHHGNGILSEMMKSLQIIRNRRMLWSVDIIELNKKISTLSSQNQVLATLKQQGLIDPDIFISQSNELTKQLRDAKLSKERLLAADSDNTIDLTKELMEILDAGPDILNNFDEELFGDLIDMVIVDSNEQLRFRLKNGLELVETIERTIR

SEQ ID NO: 22499 - protein, 541 aa, synthetic construct
MNQTAPRVIMIPPKPELAQGKAVQRQLRVAAYCRVSTDNEEQLTSYEAQQTYYTDKIMTNKDWTMAGIFADEGITGTSAQKRPEFLKMIRQCRQKKIDVILTKSISRFARNTVDCLKYVRALKELGIAIIFEKEGINTLETDSEILLTMLSAFAQAESESISESVKWGIRQAMREGKVRIQYKRLYGFKRGEDGGLEIVPEQAVVVRSIYDQYLAGASYSMIKERLEAEHILNASGKQEWSLSVIRSILTNEKYYGDVLQQKTFTQDCISKKKVRNTGQLPMYLVTNNHQGIIDRQTFDAVQVEMARRGACKSPSRKNAPTGLSTYKSRYALSERLICGECGTLYRRCTWSKRGKKKVVWRCVSRLDYGTKYCHKSPTLEEGSLQRTILTAISSVMSQKETIISRITGAMEQTLAPIPGETMSLSEIEQRLAEIDEEVRRVVAQTAEQGLSICADYMKALADECAELKKQRSRIQEQRTNNSALMKRVDDVASTLRQTSPTITEWDESLIRQLVDTVKVVSAEKIIVYLQGGTQVEQNMVE

SEQ ID NO: 22500 - protein, 545 aa, synthetic construct
MTNAVIYARYSPGPNQTDQSIEGQIHECTRFCEDNNLRIVGTYIDRKQTGRNDNRADFQKMLRDSSRHGFSTVVVWKIDRFGRNREEIAKNKAVLRMNGVRVLSAKEHIPDGPEGIILESVLEGLAEYYSANLSQNIKRGMRESALKCQFNGSGLSTGYTVDADHKYRIDPDGAAVVRTIFEMYDGGKKIADILRYLQQSNIKTMRGKEYTHYGISRILRNRVYIGEYHWHDIVVPGGVPQIIDNDLFDRVQKRLEANKHAPAARRGDVDFLLTSKLICGNCKSTMIGDCGTGKNGARWYYYTCRAKKTKSSKCRKKSVPKEALEREVTALTAAYVLRDDVIDYIADKVVEIQKSEHDDKSMLRYFESQLKDTNKAIANIMRAIEAGIITETTRSRLEELEDTKRDLETEIIKEKVARPTIEREQVIFFLEKFRGGNVDDKEYQRKIIDTFVHKVILYDDKITITYNYSTDSTKNAENTVESIESAASAAECKCSDKYSSSPPRKNLVHKNEVFSVIFACGELYCFAVIFGIRRVIFALQASGRI

SEQ ID NO: 22501 - protein, 489 aa, synthetic construct
MLKTVIYARYSSDKQNEQSIEGQIHECEQFAKTHDMVIIKHYIDRALSGKTDDRPSFLQMIKDSSSGLFDAVLVYKTDRFARNRYDSAVYKAKLKKNGIKIFYAKENIPDGPEGIILESMLEGFAEYYSAELSQKVKRGIKENIRKGLSFGGACPFGYKIVNKKYVIDDEQAPYVKKIFEDYAKGRRAIDIFNELNTLPNYAGKGRKWNRSSLNRMLTNKKYIGIYELEDVCVKDAIPPIIDEALFNKVQSRILFNRRHTTRAKVNYLLSGKLFCGLCEHSMTGKTGTSKTKAKYHYYVCSHRHCKQKKYRKELLEDIVIQYTVKDILNPKHFKMIAKKCLEIQQADNKINDILLMLKKQLTATKTKINNLMNAIEAGIITTSTKDRLEQLEQEKYKLELEISTQQLNSNRLLSEKQIIYMLNVFYNKRVDVSFYNQIIDCFIYKIYIYSDKICIVYNLNNSDKDVTYSDINELYKSSHLNSCGSPYDL

SEQ ID NO: 22502 - protein, 468 aa, synthetic construct
MRKKKIDAPKEKPQRAAIYLRVSTAYQVDRDSLPMQRKDLVGYCEYALNISDYTIFEDAGYSGKNTDRPAFQKMMMQIRNGMYSHLLVWKIDRISRNLLDFAQMYEELKMLGVTFISRNEQFDTSTAMGEAMLKMVLIFAELERKTTAERVTATMISRANDGTWNGGRVPFGYDYNKETQTFSVNGDESFIVLEMYDLYEKTDSLVHTARELNDRGYVSRQHNPFSPVSVWTILRNPWYIGTYRYNYYKIPGRKAIKDESEWVVIQDHHTPLVSKERFDRVQKMLDSNARYRNTPGRSATQKNVNIFSGLIWCACCGAAFTASPGKLHASGYRSAKYGCPNVRKTKTCNAKYTSDTVLGEFLLNFILNVINAQKSFDQIKSPADLEARLLRGDTFKNVAGIDSASVAALYEMLAEYSPADSVLLKKPTVKKNLDPELRKLRADKRKTERALTRLDHIYRTSSSRVPAR

SEQ ID NO: 22503 - protein, 574 aa, synthetic construct
MRKKKIDAPKEKPQRAAIYLRVSTAYQVDRDSLPMQRKDLVGYCEYALNISDYTIFEDAGYSGKNTDRPAFQKMMMQIRNGMYSHLLVWKIDRISRNLLDFAQMYEELKTLGVTFISRNEQFDTSTAMGEAMLKMVLIFAELERKTTAERVTATMISRANDGTWNGGRVPFGYDYNKETQTFSVNGDESFIVLEMYDLYEKTDSLVHTARELNDRGYVSRQHNPFSPVSVWTILRNPWYIGTYRYNYYKIPGRKAIKDESEWVVIPDHHTPLVSKERFDRVQKMLDSNARYRNTPGRSATQKNVNIFSGLIWCACCGAAFTASPGKLHASGYRSAKYGCPNVRKTKTCNAKYTSDTVLGEFLLNFILNVINAQKRFDQIKSPADLEAQLLRGDTFKNVAGIDSASVDALYEMLAEYSPADSVLLKKPTVKKNLDPELRKLRADKRKTERALARLDHIYLYSNKQMSDKEYLIKKNDLMNDLKEQDKSIGLLTSESWAQSLSDDDFLEQASSFIMSQRLQEREYIYFQGLAECTEPSVLRSFFLSIVDSVRMRNGHVEMLTFKNGISHKFTYKAI

SEQ ID NO: 22504 - protein, 493 aa, synthetic construct
MRVICYVRVSTREQAEKGYSVGEQQERLRAYCIAKDWIVEDVITDPGFSGAKLERPGIQRVIQLVQEKKCEAVLVWKLDRLSRSQKDTLYLIEDVFLKNGCAFVSMNENFDTSTAFGRAMIGILSVFAQLEREQIRERMAVGRVGRAKAGLFHGGGFAPIGYDYKTIAEGGEGLVVNEYEAMQVREVFSLYLQGWPVNRIRKYMTARYTTKSGDWGNDTTIRDVLKNPLYIGKINWAKKIYDGKHEPIIDEETFNAAAARLASSQWKRDCSDGLERNSPFHSTHLLGGILWCGRCGARYFASGNYSGKGENRKYWPYYVCYSRAKSAKRMIRDPNCKNDRWPVAKLDKIILDQVRQLIFDPEALERAAGGNQEAPPSERRALLNARRAEAKGQIDRLLDLCQMGTLPAAAVADRLKSLQDEVEGIDTALRELAEDDPAERLEAARGTLVGAAEILDNGSLDEKRELVHSLIHRIDLDGENIDIHWSFAPGESE

SEQ ID NO: 22505 - protein, 463 aa, synthetic construct
MKRQTAKLNDKLLLRVAIYIRVSTDQQAQDGDSVRDQLATGQKYIENHENMILADTYVDDGISGQKVKRDDFQRLMNDVRAGSIDLIIFTRLDRWFRNLRHYLNTQDVLDKNGVSWTATEQPYFDTSTPHGRAFVNNSMIWAELEAQNDSDRILSVFDDKVDNSEVLSGSTPLGYRIENKHLVPDNDAPTAAAIFEYYRKTGNLSMTLRYMESEFGLVRSAASLKNMLTNTKYIGEFRDNKNYCPAIIDRDLFFDVQRLLKINIKSGKKHDYIFSGLVVCDDCDHIMSGCQQRAKGRVCADGTRIVYKYSVYRCRQGVNLHRCPNRKLVFETTLEKMLLERIRPELENYIAEYEVTNLPVLHTDAKRRNLEHKMQKLKELYLNDLITMDEFKVDREKLMQQLDKIKSDDSQPMKDLSYLKNFLKTDFENIYVSLSIPEKRELWRSIIREIRVDHERNVRIIFL

SEQ ID NO: 22506 - protein, 498 aa, synthetic construct
MEIQIREGSREQKRKLRVCAYCRVSTDADEQENSLENQIRHYETVIKANPSYEYAGVYSDFAISGFKEKRPGLQKMLDDAQKGKIDLILTKSVSRFARNTSIVLEATRKLKELNVGVFFELQNINTLSGEGELMLTILAAFAQAESESGSVGAKMVYQRKYEAGIPVQYLERSFGYMKDERGVYIADESEAVWVRKIYEMAADGYTPASIKRYLNENRVKTVGGAEWIDSTVFRLIENEIYKGDYIMHKHFVNEERKLVRNRGEVDAWYIEDDHEAIVSPELWQKAQDAIEAKRDYLAEGSVIEEFTEDNYPYMNRIFCAKCGHPLYKRIYSNGNRLNWGCSGTKRYGKSFCEGINIPDGVLRKAWHFDGNMYIDEKPSVKGTKEFSYLKESSWKRRHKKKAPEAIPENTEEAYPYRKKIFCGLCGSRLVRHVNPKSHKVIWICNGAKRKGVAFCRGTRIPDSVIRGWGEIKKDIYIQRKDDKNGKKRYSYTSKKPTA

SEQ ID NO: 22507 - protein, 467 aa, synthetic construct
MIRMARSVTVIPARNRQRETGRRAVQEKKIRVAAYCRVSTDQEDQLHSFEAQVDYYAKYINDHENYEMAGIYADEGISGTNTKKREQFKRMIADCEGGKIDLVITKSISRFARNTQDCLAYSRKLKNLGIGIIFEKENINTLDSTGELLFTILSSLAQDESRNISENCKWGIRTKFKNGEMHLNTFKFLGYDKDENGKLVINKEQAKTVRRIYRDFLIGINPAQIAKELTEEKVPGCNGQTKWYPSTIVGILKQEKHMGDALLQKTYTADFLTKRQVKNNGEIAQVYVKDSHKGIIDKETWNAVQEEFERRERFMKDHGTDRYSYGADCMPFCEKVFCGECKSLFTRHSWKSRGIVQWQCKNHRTDGRVTCSNAYVDNSDIEKGFVKAFNKLVADREKFMERWNQMKTDGSPLEKIRAEQMMEATGNEPLGRFVSEIAQLVLAEVTVLGAKKYEFFFLEGSRIKVSV

SEQ ID NO: 22508 - protein, 565 aa, synthetic construct
MLRTPGDLFFLAEAVNSTNKFYSVSDKSARVYFLYSFLEVGTMRFFSYGRKSVFSDKSDSIDNQFRMSREYCDTKFSGQVDSWQQFSDEDFTGANTQRPDLQRMLSFIKNGFCDVLVVYQLDRLSRDVRDFANIYSLLEEHGVMFVSIKENIDTTTPIGRAMMYVTVVFAQMERETIAARVTDNMLGLAKKGYWTGGNPPRGYVRKHIVVDGKKHCSIEPDPDGVRYVTRIFDTFLAMNCSLQGMETRFKNQGIRTESGKFFSTTQLHKILTMPYCVEATPDVYDFYAAKGCIMDPGSPREKWDGSVGVMIYGRSTEKNKKHQAQPPEKWTVCLGMHKPFMPAEKWLAVQARFGQNKCIKDAKWPVPLLKGVLRCKCGNLMQVSRKKKVDGTCSSWYYCRKRMRQGVNACDMGQIKCDLLDEEVLELFRGITADPALIQKFVKAEAPADVPDLKAAQARVSACERKIGRLAASLALAEDSAASKYIIAEMERLDVELGALKREASLAEMESHRAAASAKDAKATAVEIAKLIHGLEGFDDKEKNAIARAVIQECTWDGERLFITL

SEQ ID NO: 22509 - protein, 523 aa, synthetic construct
MKTAVIYARYSSDRQTEQSIEGQVHVCNDYAERNGILIVNQYIDRATTGTNDNRDAFQQMLKDSDKKQFDFVLVYKLDRFSRNKFEMAMHRKRLKDNGIKILSAMENIPDTPEGILLESLLEGMNQYYSEELSQKTRRGQRETRIKGLHCAGKLNYGYYTEKKKVFTHSEEGPVVKEIFERYAAGERGNEIAISFAERGILYRGKPFSAANIYVILHSEKYTGRYEIHGEVYDNIYPKIIDKELFERCKAKIDANRYGNHIPDYSYLLRKKVYCGECGTRMTSYSGTSKSGKVSKYYKCWNAIGKKNCKAKFMKKDLLESIVLKALQETLTGKNLTVIVDEIYKQHNAKLLGDNPVKTLEKELLRINKSINNIMNAIEQGIITDTTKDRLQELESTRKDLQEKLIFERMQEKTILDKKTIETYLKKAVEQEPEMIIELLVEKVYVYSDDRIEIMLHYVDTPITPKPIEYDKDESPEGESLRGSLIYTTKIFVDNDIFKGMNKKILEPTFKETQKMPVLIEIRG

SEQ ID NO: 22510 - protein, 674 aa, synthetic construct
MAYAKNKVVKLWTQKKAALYVRVSTRYQVDKDSLPFQRKKLKEYCKFLEIDKYVIFEDDGYSAKNTDRPHFQEMMSRIRTGEFSHVIVWKVDRVSRNLLDFAAMYQELKDHKVTFISMNEQFDTSTAIGEAMLKIILIFAELERNMTSERVTGIMLDRAEQGLWNGARMPVGYRWNEQTKFPEPDPEEVKIVQLIFDRYEEWRSSIKIARFLNNKNFKSKRGGEWTSRLIYDIIRNPFYIGTYRYNMRESGRGPLKPESEWIVRENNHPGIISKDQFDRCNKIMDENASRRDTSEMRARKFVHTFSGHLVCSNCGSNMIACKDHARANGWRPSIYRCAKRSRMMTCDNSKTVNETYLGTFVFNYIANLARVQKNFTKITSTEKLESELLKGEAFEAVSGIIPDSLNSTFQALLYSNLGNGTYVPDIALLSKFDEVQDHNQIDLLNTEIEKSKNAITRLTDVYLYDPASMTKEEFAAKKKELIKKIEEMEHQLAELLDNSEDNDLTDLSFIKKASAFLVTQRIVSKSFIDYVQMAQELDNEILKNFVDQIVDRIVIKDGRIQSITFVNGLTHEFFYSRPAELPVCKKCGGRIGSTCGCRTRTFSFNGKRYQRIKVGDPRDALYGQKNPVCPECYAKEGRWHHWLCGIELCPICGKPLQTCEHGPNGKSNFTFNQL

SEQ ID NO: 22511 - protein, 457 aa, synthetic construct
MKKKELCPAVIRVALYIRVSGEEQKIKGLSLEAQQERLETYAKEHGWIITGTYIDAAKTARKNLHKRTEFQRMMESVKRNEVDILLFARLDRWFRSVADYYKVMEILQAHNCNWKTTDEEYDTTTANGRLYINVKLSIAQNEADIDGERIDVVFDSKIAHGTVVSGSCPYGFRVNNEKRLEIIPDDAAIVQDAFCYFESSVSQRATTKYIREKYGINWCYATFHRMLTEELYTGVYNRGGRYNANFCPSIINRDQFDRVQALLKKNVHTAPSGRIYLFTSILVCDECSHKLNGYLSQGIVYYRCAQHMQRGRCIHNHSIREDYVEQWLFDHLSEEFNRVKLDWEIQAAKRKRSSSSKGKAVLKRKLNKLKELYVNDLIDIEEYRKDYEIYTSALKQMPNDKEMEQPPNFKAVERLLQSDFKNLYNTLTREEKRTLWRSAIKEIRIDNDYNITGIIFE

SEQ ID NO: 22512 - protein, 526 aa, synthetic construct
MPKVTMIPATINPLTHLPKETTQKRRVAGYARVSTDSDEQFTSYEAQVDYYTKFIQSKLEWDFVKVYTDEGISGCNTKHRDGFKEMISDALAGKIDLIVTKSVSRFARNTVDSLVTIRKLKENGVECYFEKEGIYTFDGKGELLITIMSSLAQEESRSISENITWGQRKSFADGKIHLAYKHFLGYKKGEDGRPAIVEEEAVVVRLIYRLFLDGKTQAGICRYLEDLEIPSPSGKAKWSKTTVTSILTNEKYKGDALLQKSFTVDFLQKKTKQNEGEVPQYYVEGSHPAIIEPYEWDHVQAEFARRKELGNAYSGKSVLSAKLVCEDCGGFFGSKVWHSTDRYRRTVWQCNNKFKGGERCLTPTVDTETVQRLFIKAYNQMMGNKKQIIEDCELMRKKLTDFKSLDADIERQFEETQIVAELVKAAVKDNAVTAQSQEAYLKKYEALTKRYETAAAELERLQNLRTLRSQKDKAMALYIRTLKKQPTVLSEWNDTLWTVMVEKAIVHRNSEITFAFYNGTKVKVRQ

SEQ ID NO: 22513 - protein, 433 aa, synthetic construct
MSKKITIVSKPPKLERKKRVAAYARVSSGKDAMLHSLSAQVSYYSDLIQSHGEWLYAGVYADEAKTGTKDSRAGFQNLVAECRASKIDMVITKSISRFARNTVTLLQTVREFKALGVDIYFEEQNIHTMSGDGELMMTILASYAQEESRSASENQKWRIKRSFESGIPWDRTLMGYRMENNHYVIVPKEAEIVRRIYNEYLSGSGYQLIAKRLNEEGVPSRFGGKWNQSAVSRILSNHTYTGNLLLQKTFRENHITKRKIFNNGELPKYLAEESHEAIVDEETFQAVQEEKSRRSARFNKKSVSKKTYPFSSFMVCDNCGKNYRRKVTKSGPVWVCNTFNSLGKSACASKQIPEPILQQVTAEVLGKADFTGEQLRSRIQKIVVCNENVLIFRFRDGSEVTRKWKDRSRSESWTDEMKAAANQKALERNKHNA

SEQ ID NO: 22514 - protein, 534 aa, synthetic construct
MPRKPAKHPAKPKRGKKLEIEEPGVLYGRYSSHNQKDISVEQQFEKGYELAAEYGIRIIDTYADRAVSGRTDKRRDFQRMMTDAAKGKFRYVIAWKSNRMGRNMLEALINEARLQDLGVRVLYVEEDFDDTAAGRFAARSMMNVNQFYSENMAEDIKRGLYDNAANCMVANGHLPYGYKADETLHYAIDEPKAAVIREIFTRVSCGEAFVDIMASLNARGIKTSYGRPWGRSSFQKILSNERYRGIYIYGDVRKEGGIPRIISDELYFKVQEVITTKKNPQGRHRVNGDYLLTGKLFCGHCKSPMTGVSGTGRSGNLHYYYVCQKRRTEKTCDKKNVRRDEIELQVAQAIKDYALKDDVIEWIADSTVAYNERKEAESKVGILEDQLAGTEHGIKNIMSAIEQGIITETTKSRLVELESERATIKANIAAARADIVTVSRDDIISGLEMFRDGDVHDKKYQARLFDTFLVAVYAYDDDLRLVFSFSGNKNTIQIPIESAVNAVENNEAECSFKLCSAPPKEMDMTFRHVHFFWW

SEQ ID NO: 22515 - protein, 528 aa, synthetic construct
MAKAVRSVTMIPPTINPLTRQSFVAAVKRRAAGYARVSTDSDEQFSSYEAQIDYYTQYIKAHDDWEFVKVYTDEGISGLNTKKRDGFNEMIADALAGKLDLIVTKSVSRFARNTVDSLTTIRQLKEHGVEVYFEKENIWTFDGKGELLLTIMSSLAQEESRSISENVTWGQRKRFADGKVSMPYKQFLGYEKGPDGLPKVVPEQAETVRYIYDLFMSGKTITAITKQLTAEGVLTPGRKEKWVGRTVESILTNEKYKGDARLQKRFTVDFLQKKMKVNEGEVPQYYVENSHEAIIDPLLFDRVQEELARRKTLGRSYSGKSIFSCRLICGDCGHYLGSKVWNSTSKYRRVIWQCNYKFKGECKCGTPHLTEEVIKAKFLEAYSQLLPERDRLIEDCRIMQAALTDVTDIDRETKEQLQELEVVSELIKRCVDENSSTALDQDEYLVRYNGLVDRYEKAESRVRELEKQRTERMAKADAIGAFMFRLRELDQPLEHFDERLWLEVIDSVTVHRDSGLTFKFQNGKEVRL

SEQ ID NO: 22516 - protein, 433 aa, synthetic construct
MERTIKKVDFLARRRIDVLRVAAYARVSTGKDAMLHSLSAQVSYYSGLIQRHPGWLYCGVYADEALTGTKDSRDNFQRLLDSCRRGELDMVITKSISRFARNTVTLLESVRELKELGVDVFFEEQNIHTMSSDGELMLTILASYAQEESRSASENQKWRVRKGFEKGELLNWRFMLGYNITRDGITVNPEEAEIVREVFRRFIDGESMNAIAADMNGRGVTGVFDGRWSPQQLRQLLSNEKYTGNALLWKHFRNNHIEKKKTVNRGELPMFYAEETHPAIIDAATFAAAKARLDEIAAMTAQRSRPTRCAFSGIITCGQCGGTYKRIKNHKYHAWNCGAYAQLGKAGCAGLQIREDVLQQAAADALGLAAYDEEVFRDRIASVIAGADHILTFRFRDGRTAEVKWETPSRAGSWTPEMKAAAAERTRRQRRKS

SEQ ID NO: 22517 - protein, 530 aa, synthetic construct
MSGKEKTNGSLAMAPRVITIPAANQETARKLRVAAYARVSSNSEDQKHSFTAQNAYFSKLITDNPDWELADIYADQGITGTSIDKRDDFLRMMEDCRKGRIDRILVKSSSRFARNTKESLEAVRELAALGVSVYFEEQNIDTAQVSGEVLIAMFAALAQRESEAISERMRWSYQFRIRQGRFSTCKAPYGYRLIKDHLEVREDEATVIRYIFERYLAGISADDIAKEITAMGHSTRDKTPYWQSSTVLYVLRNEKYVGDSLSRKKYTTQYIPWQQKLNHGKYDQVLVKDSHPPIISREVFSKTQKLLKRKNAGIQSDAQIEKAFTRKVTCGNCGSLCKLKNCKSISYWVCRKHDKSAAACPNTQVPEEQLKSAFLRLYYKLKHYGADILTQFISDLYAARTGSLLWSENIVEINKQISDIASQERLLTQLKQQGSVNPDIFISRSNLLAERRRELKLQKERILRSEEDHTIQQTQDLLDVLESGPDWLDAFDEQLFSDLVEKIEVVDNEKLCFRLLNGLEVTEKIERTQR

SEQ ID NO: 22518 - protein, 550 aa, synthetic construct
MTQTRPEPKVIIIPAKEETLQDQKKKKNLRVAAYCRVSTKKDEQLNSYENQRDYYTEKIMANPNWTMADIFADEGITGTSACKRKDFLRMIRQCRKGKIDMILAKSVSRFARNTVDTLSYTRELRSMGIPVIFEEQNINSIYPESEFLITIHGAFAQSESEGISSRVKWGKHQAMRTGKANIQYKTLLGYEKGPDGEMVVNAEQAETVRKIYELYLSGQTLRNIKEILEAGGFKNTAGTTEWTTSNLRTILSDEKYCGDVLLQKTFIRDCISKQVIRNTGQLPMYLIQNHHEAIISREQFDAVQMELARRRAQTGGTKKSAPTGMSRYSGKYALSGLLFCGECGTAYRRVVWTQHGEKRAVWRCSSRLDYGKKYCKESPTLDEAPLQQAVLAAINASMSGRKVLADQLVDAMEQELAPVPGENMSLGDIDRAVTELGKQFDMLLAEAANGDVDEYAERFRAISTTMEELKRRKAAILSIRQEQEQIGRRIHAAASAMTAVTMGITDWDDGVVYQMLEKVTVLADSRIKVTFRNGVEIEQTVDQPKRRKFA

SEQ ID NO: 22519 - protein, 516 aa, synthetic construct
MARRKKVSPGNRLVAYYRYSGGSQQTEQSIEGQRRDCEAYARQHGLTIVHEYIDRHISGRGVESRLAFQQMIADSSKHLFDLVICWKTDRFARNRYDSAVYKKKLRDNGVRILYAAESSVEGPEGIILEGLMESLAEYYSAELAQKMRRGMRESALKGKAINPNRPLGLTTDEHKRFIIDEKNAPTIRFIFEHYAAGESSASIVDQLNAAGLRTSKGNSFNKCSIPRIIQNEAYHGVYICKAYDVRIDGAIPAIIDDDLWKRAQKMLTLNKQHRAPHSSHADYLLSGKLFCGCCHSLMRGISGHNCRNDVYYYYACGNKADGGTCKKKNIPKDVAENLVVNAICENILRPDTLEDLADAIAAAQQADVNKPDPERAMLEQNLADVRRKINNIIESIENGTASSRLSARLADLEQQESTLNYQLESLKEVHPPVLDRERILFLLEQFLISPNERTEDYNRRIIDTFVNGIEITDTEMLIYFNLSEASASEKQKNSQSNNCSTGNHLVRVARIELTAS

SEQ ID NO: 22520 - protein, 516 aa, synthetic construct
MSYCIYLRKSRKDLEAEQHGEGETLARHERALLSLAKKNNLIISNIYREVVSGETIAARPVMQQLLHEVEQNLWDGVLVMEVERLARGDTIDQGVVQRAFQYSNTLIITPSKTYDPANEFDEEYFEFGLFMSRREYKTIKRRMQNGRYAAISEGKWPYNSAPYGFRRVKLEKEKGWTLAFDENEAPVVRLIFSMFTGPERVGIRSITRTLNSYGTKPRNSKLWSESTVRGILSNVVYDQCVKIGERKVVRTVENGVLTTARPRTSDYTIVSGRHPRLIDHDVFAEAQSYLGCGSPKPAGSNIIKNPLAGIIVCSECKKKMIRRPPSGTASRVPYDLMLCSTYDCPTIGSPLDLVEREVYNALSDWVEGYRLSGQMPSKSLIPEKEVLLESAQQTLDQLLRQKGTMYDLLEQGVYSTEVFLERSDSLQNRISEAESNVAQLKLELDKERQREANIEQFLPACEDLLSCYWDLSIPERNRLLKLLIESIEYKKLTKNKRGHLNEPNFELTIKPRIPRK

SEQ ID NO: 22521 - protein, 517 aa, synthetic construct
MTAVIYARYSSDNQREESIEGQIRECTAYAEKNGITVIKHYIDRAFSAKTDNRPEFQQMIKDSGKKLFDVVLVWKFDRFARNRFDSANYKMILKKNGVHLISVMEPIAEGSQGILVETLLEGMAEYYSAELSEKVIRGQTENALKGKCTGGTGTIGYKIDEEKFYHLDPLTSPLVLEAFQRYDNGEKMVEIVNFLNDKGVRNMQGGKMTHSSVNTMLKNRRYIGELSFRDIVVPDAIPAIVPKDLFDRVQKRLDKNKRAPACGKADEEYLLTTKLFCGKCGALMFGESGTSATGRTYYYYKCANVKRRKGCNKKTVQKEWLEELVVRETMKLIQDDAVIDKIVQLVMDVQNQENTTIPLLEKQLREVNKKLDNLMKAIEDGLYTRTTKERLEALEIQKDELTAKIADEKLKKPSFNENFIRFWLMKFRKFDISQKKQRKALIEIFVNAIFLYDDRMLITFNYKDGTQTVRFEDTLTADSAEEKSSDLSSSAGPDDSQSNNCSAGNFFVFRKQTLRKD

SEQ ID NO: 22522 - protein, 538 aa, synthetic construct
MARKKNIAAGLDAVIYARYSSHNQREVSIEQQIAECTKHAAALGLRIVGTYEDRAISGKTDNRPRFQQMMRDAEKGRFQAVVAWKSNRIGRNMLQAMVNEAKLDDYGVKVFYAEEDFDDTAAGRFALRNMMNVNQFYSENMAEDITRGLYDNANKCMANGRQPLGYKRGADGKVMLDEPAAAVVREIFTRVAAGDLFVDIARDLNAKGIKTSKGAAWNKGSFQSICQNERYKGIYIYGNVRIVDGIPRIVSDELWYKVQEAMRMKKNPVGTRHRVGAEDYLLTGKLRCGHCGSYMTGISGTSRNGELHYYYTCQKRRTEHACNKKNVRRDVIEPAIAQAIKMYCLTDDVIEWMADQTVQYWEKHDNDLQIEALEQQLAENKKATSNMLKAIEMGIITEATRSRMVELETENSKLTAQLSAARRDVVKINREDLIDELHILRSKDIHDREVQAELFKDFLVAAYIYDDNRLKLVFSFMGKDNSVEIPLETGEDPPDGEDSPDAKMFVLTPDCSTRNEKHYTEMCGAFLFYLPFTLRSLS

SEQ ID NO: 22523 - protein, 592 aa, synthetic construct
MTAVIYARYSSDSQREASIEGQLRDCKDYAEKNGITVVGTYIDRAYSAKTDDRPDFQRMIKDSAKKIFDVVLVWKLDRFARNRFDAVNYKYQLEKNGVHLVSAMEPISQGPEGIMVESMLIGMAEYYSAELALKVARGERENALQCKYNGGVVPLGFTIGKEDRLYHIDPETAPIVQEIFTRYADGEPAEKIAASLNERGLRTRTGKPFVKNSFFQIFRNRRYIGEYRYKDIVTPGGIPAIVDQDLFDRVQQRFEQNRIAHGRPAKEDVSYLLTTKLFCGKCGTLMGGESGTSHMGNTYYYYKCGNAKRHGKAHCDLKAIRKEPLERFVVDTAIKVIFSDEIIERLIDLVMEAQQQENTRLPVLKEQLRDTEKRLANLLEAIEQGILTPTTKQRLDELEARKEALNTSILEEELKKPVLTREWIRFWLEKFRKGDVGSTEHQRQIIDTFVNSVYVFDDRVVLNFNFTDDAKMVTREEVLGSSAVENAPPQKSLDFRLRIFCLVAVQDSNRAALTTPVGRVSNQPSGLLLSPRVPTRRNVYQGCTHFVPVSFCAREQTSNNTIYYIKESAMNSENSSRFFSYAGSGGRTTKND

SEQ ID NO: 22524 - protein, 497 aa, synthetic construct
MNAIYARQSVDRADSISIESQIEFCQYEMRGEQYKVYTDRGYSGKNTDRPAFAEMMNDIESGVIGKVVVYKLDRISRSILDFSNMMEKFGKHRVEFVSTTEKFDTSSPMGRAMLNICIVFAQLERETIQKRVADAYYSRSQKSFYMGGRVPYGFRLIPTTIEGIKTSMYEINAEEAEQVRLIYELYSKPECSYGDIIRYFQAHGILKNGKPWGRTRLADVLRNPIYVRADLSVYEFYRDQGAIMANDPSDFIGTNGCYYYKGQDSVGRKQMNLEGNHLVLAPHEGIIPSDLWLKCRAKCLEAQQIKPYQKAKNTWLAGKIKCGICGYALVDKHYSTTRSRYLLCSNKMNSKACEGPGTIYTDEFEQIIYNEMRKKMAQFKTLRRCKGNYINPELTALNVQLTQVETEIGSLMDRLSAADDTLFRYISGRVKELDGKKKELMKRISELKLHKEADYTEIYNHLTMWDELSFDDKRQTVDQLIRVIYATNDSIKIEWRI

SEQ ID NO: 22525 - protein, 578 aa, synthetic construct
MGYVTKKAAQRFEEKKAAIYVRVSTQYQVDRASLPVQREELINYAKYALGISDYVIFEDAGYSAKNTDRPDYQQMMARMRTGEFSHLLVWKIDRISRNLLDFSVMYAELKELGVVFVSKNEQFDTSSAMGEAMLKIILIFAELERKTTSERVSAVFVSRANDGIWNGGKVPYGYSYDKESKTFSIAEDEAKIVRLIYSLYESEKSIVRVARIMNERGLKSRAGNDWSPTTVHTILSSPFYSGTYRYNYRDESNTKRFREKGKDEWVLVENHHPAIVSPERQAAVGVILESKRYNKNATYQRKNVHVFAGLLTCGCCGATMAATTDKVRADGWRPSMYICSRRRKSEDCTNKYVSDVTLGPFVLNFFANLIKASNSFGRTTSIETLEKKLLRGEALSRVDHIERPGLEELYNHLRSGFDEKCFESPTIAATESSADLSERDLLLSEKRRLERALNRLKTIYLYGDDEMASKDFNIERERITKALSEVDSRINELDIANAFDLSLSDEAFMQKASQFILTQQLLDKRYVNYERFIRKIDPKIVKDFLNETVSNFCIKDGLTTSILLKNGIELRFSYKTAE

SEQ ID NO: 22526 - protein, 473 aa, synthetic construct
MKNTNKVAVYVRVSTTSQVEEGYSIDEQKDKLEAYCKIKDWKIYDVYVDGGFSGSNTKRPELERMINDAKRKRFDVVLVYKLDRLSRSQKDTLFLIEDVFLKNDVAFISLQENFDTSTPFGKASIGMLSVFAQLEREQIKERMILGKEGRAKKGKTMAWTTIPFGYDYSKETGILSVNPTQALIVKRIYEEYLNGKSVTKIIRDLNKEGHIGRKRPWGETITKYLLKNETYLGIVKYRGQKYDGQHEPIISQELFDLVQLELKKRQIDTMKRNNNPRPFQAKYMLSGLMKCGYCGASLRIHVTPKDKNGRSYYKYQCANRFKKDTKCKSGWYSREELENNVLKQLSRIKLEPQYRKETLAKNDETMKVEEIKEQLKKLNNRLDKLTELYLDEFITRNELNAKNEKLKTEKAFLEEQLKSKKKNTINLRQRKLARLLKDFNPEKLSYEDASKIVKSVINKIVVTKEEMNITLDF

SEQ ID NO: 22527 - protein, 481 aa, synthetic construct
MNEINKVALYVRVSTTSQMEEGYSIEEQKAKLESYCDIKDWHVYKVYTDGGFSGSTTERPALEQLIKDAQSKLFDTVLVYKLDRLSRSQKDTLYLIEDIFLKNNIEFVSLLENFDTSTPFGRAVIGLLSVFAQLEREQIKERMQLGKLGRAKAGKSMMWAKTSYGYNYDKETGSMTVNEYEALAVKEIYSSYLAGMSITKLRDKINEEYPKQPAWSYRTIRGILANPVYCGLNQYKGQTFQGTHKPIISLVDFEQTQKELAKRQQTAKELSNPRPFQAKYMLSGLAQCGYCHAPLKVILGQKRKDGTRFKRYECYQRHPRKTRGVTVYNDNQKCDSGYYDMDLLEHYVLTRISQLQNDPDKIQELFSDDTSPAVDKQAIQKQIDSLTLKLSKLNDLYLDDRITLDELRTKSADFIKQRNALEEEIKKASNDKQAGQRKKIEKLLDASSVLDMSYDNQKVIVRELIDKVQVTSDKVVIRWKI

SEQ ID NO: 22528 - protein, 484 aa, synthetic construct
MCTKNVGIYIRVSTQEQANEGYSIDAQRDRLTAYCRSRAWNIYNIYIDGGFSGSNMSRPALSQLLDDIKGKRVNCVLVYKLDRLSRSQKDTLYIIEDVFLKNGIDFVSLNENFDTSSPFGRAMIGILSVFAQLEREQIKERSMMGRVERAKNGLWHGGGHEPFGYNYIDGQLIINDYESAIVKDIFELFNNKIPIYQIQQIISKKYGKDFHESVIRSTLSMILYTGKISYGGETYDGQHDAIISTDTFKLAQDLLELRKKKYHNRPFKSKTLLGGLLYCAHCGARYLAKGNYSGRGINRSYRPYYTCYSRAKSNKKYIIDPNCKNPSYAVPVLDDIILNEIRKLFTCHDYFESILQSSTPPLAPNNDLEIELLSKQIISIQGQISRLLDLYQLDGISIDDIHDRINSLQEEKVKLQETITKLSTPHLPETEKKLSPSDVLSLKDSFEAIVSSDDMSAKQNLVHTLIQKILVNEEENSFEIIWNF

SEQ ID NO: 22529 - protein, 481 aa, synthetic construct
MITTNKVAIYVRVSTTNQVEEGYSIEEQKDKLSSYCDIKDWSVYKVYTDGGFSGSNTDRPALEQLIKDAKKRKFDTVLVYKLDRLSRSQKDTLYLIEDIFIKNNIAFLSLQENFDTSTPFGKAMIGLLSVFAQLEREQIKERMQLGKLGRAKAGKSMMWTKTSYGYDYHRETGTMTINPVQSLAIKFMFETYLSGRSITKLRDDLNEKFPKEKPWNYRGVRMILGNPVYCGYNQFMGEIYKGTHEPIISKETYDKVQEELKIRQRTALENNNPRPFQAKYILSGISQCGYCGAPLKLLMGMVRKDGTRFIRYECHQRHPRKIKGVTVYNNNEKCDSGFYCKDALENYVLTEISKLQDDTSYLDKIFSGDNAETIDRENYKKQIEELSKKLSRLNDLYIDDRITLEELQSKSAEFISMRGTLETELENDPALGKDKRKANMRELLNAEKVFSMDYERQKILVRGIINKVQVTADKIVIKWKV

SEQ ID NO: 22530 - protein, 517 aa, synthetic construct
MNVVLYMRYSSDRQTEQSIEGQKRVCMDFCERQGYNVVGEYIDRATSAYKETAKRTNFCRMIRDSSNGLWQGVVVYKLDRFARNRYDSATYKVRLKKNGVKVISATENISDSPEGVILESVLEGMAEFYSKELSQKVSRGLNESAHKCNSTGGAIPLGYKTVNKKLTVDELNAQIVKEAFDLYAGGATISEICEKFNSQGYRTKKGTEFNKNSFKTMLRNEKYIGTYTYKDIRIEGGIPAIIDKETFETVQKRLSANAQAPARGKARVNYLLSQKLFCGHCGANMIGDSGRSKTGETYNYYSCSTRKRFHSCKKRTIRKDLIERIVAENAMRLITPEMINTIADMAIKCNREDIESDAIIPALTADLKEINTSINNLLKMVERGVESETLDSRLQELEKRKKDTESRLDAAKSEYLTLDKTVIVGWLSQFLAGDIEDEDFRRHLIDTLINSVTVWDEPDGGYKITTVYNLKGNTQTYRVNADGSSDMKRNSPPKEYNPNSLFFFKSLFGYTTKYRVE

SEQ ID NO: 22531 - protein, 553 aa, synthetic construct
MKEFPIDLSCLTEEEISQFQEDPYTLYNGDQNVAIYLRYSSTGQSDQSIEGQLRDCRTFCKANHYRIVAIYVDRATTARKDVEKRVHLMEMISDSAKQNWEYVIVWKLDRFARNRNDSAIMKMRLRKNGVKVLSATEHLTDSPESIILESVLEGMAEFFSAELSQKVTRGMRESALKCHSVGGHIPLGYKVENHKLVVDPDTAHIVQEAFSLYANGESVADICRKFNSAGYKTAKNTEFNRSSFKAMFRNTRYIGTYTYKDIVIENGIPAIIDKELFETVQRRLSKTATAPARGKAKVDYLLSGKLFCGHCGASMNGESGAGRHGKVYHYYSCYTKKRKLGCDKRPLKKDYIEGIVARDALNLLTDQLIDEIADMAIRQSEQDLINDTHIPQLAAQLSEVEKSIANITAAIEKGIASETLMNRLVQLEHEKKTLNKEIKAEEKFVYRIDRDQIVFWLSQFKYGNIEDEDFRRRLIDLLVNSVTVWDEPDGYKITTAYNLTSCKTKTFRVEKNPAAEEATGFDFGESECTIERISEPYIVWGTVFVQTKRHSLP

SEQ ID NO: 22532 - protein, 489 aa, synthetic construct
MKYLIYARVSPRGSDFEGETSIPMQINYCREYVKFHGGQVVGELSDEFFSGKDTRRPAFQRIMKELESGGGDWDTLIVYKLSRMTRSLRDGADIFEKLFQQGRGFVSATENLDFSSPAGRAMLGMMQVFNQFEREQSAENTRNKMLSIAARGEWPSGNPPFGYKRGARKDNRLYIDERNSAIVKDIFEMYASSSDRTREIISKYRGKVSKTQLFLILRNRTYLGKIVYAGKEFEGKHEPIISQELFDRVQKRLPEIHCYNRPKAQQYPYLLTGLIYCHCGNHMTPQSAKSGDYNYYCCRNESCRTRISAPDVEQKAVEYLKNLDISRETIEEALNIIRSRQQEERSRRQPEIDQVEAAIRQCEKEKSVLLDTLIASRNNLNLELLEALNGKIESVSMELERLSARRDILNKKLPPEEDFYNSAIEILRQLHRVSDNLIEANDPFALRQVLLAGIERIQLTLDGDFQIYGSSPNCKGWQPGRESNPRPTA

SEQ ID NO: 22533 - protein, 504 aa, synthetic construct
MEDLIYARQSVDKEDSISIESQIELCLREVGNNPHRVFRDKGYSGKNTERPDFQDMMAAVRAGGVRRIIVYRLDRISRSVLDFANVISELQKYGVEFVSITERFDTSTPIGKAMLMIVMVFAQLERETIQQRVIDAYRSRSRKGFYMGGRVPYGFELENTVMEGIKTCMYKPIPEQIQVVQLIFSLYAMPQVSFADVVRYLSQNGIKNPDGKNFSRMRIRDIITNPVYAKADASIFEFFHGQGTEIINDISQFIGTNGAYLYTGNKAAKRKSISLDGHVLVLAPHAGCIDADTWIRCRRKCLNVRQIAKPVKAKNTWLAGKIKCIDCGHALSLKSYPRKRSADARYYICNSKYVSASCDGVGAIQASGIEDIVFDEMSRKLEEFNKLSYKEKHGDPIELTKLKIRAEEIEKEIATLIDKIVSASTATMEYINERIDALDEEKKTVKEKIAQMSAEMYDRQNIGVISDYMNKWNDISIDDKLTVVDTLIESIHVGHGKVKIAWKI

SEQ ID NO: 22534 - protein, 484 aa, synthetic construct
MNAVIYARYSCDRQTEQSIEGQLRECKAFAASEGINIIGEYIDRAISGTTANRPEFQRMIADSRYKTFQAVIVYKLDRFARNRYDSAMYKSKLKANGVRVLSAKEHITDSPEGIILEGLLEAMNEYYSAELSQKIKRGMRENAIKGKTTGGNVALGYRIGADKQMEIDPAGAALVRRIFASYDSGMTFTEICDDLNHAGYTTSRGKQFRIDTISRILANQRYTGTFQCAGEDAHCPPIIEPELFRSVQERLTESRHKHRHTQSPHEYVLTGKAICGTCGRRLTGRAGTSKTDKRYYYYCCPNKCCGWLPAAELEHAVLDAIAQYTTPEACEQIANATYALYQQSTHENADLTAAQRRLQETEKKLENAVNAVLNGITSAALQTTMQQLEQQKAALETEVRLLQTDAPELKLEHFQYFAHRLLEVQAEGTEKILQLLVNQVIVYKDRITVLVNLTDKTKTPPLEQVTAALRESSCSVACGGGDEN

SEQ ID NO: 22535 - protein, 444 aa, synthetic construct
MRKKLRVAGYARVSTDEQKKYGYSIQAQTEEITQWCNDNGHDLQHIYIDEGYSASTMKRPQLQSMLSNLKNLDAIAFTRLDRLSRNVLEANKMLELLQQNDVAMISICEDDINTSTANGLFMFNLKVNLAEHELKKGSERIKAVFEYKIAQGQPITGNVPFGYMIVTENGNKRIAIDESKAPIVKDIFDSFLLHQSVHHTVEYVNNKYGLSRPYMSYMHILKNEFYAGSYRGNSNYTEPYITRETYNAVQTALQANIRTGIQRHVYLFTGLLRCPECRSKLVGVSHPKGGKRYYYYRCNNAHSVHTCTHKKHYAELSTEKYLLSNLDDLLKNHIAKISSVTSETKNTTEKELKELRKELDNLNYIFIKKRMPVNTYERLYAETEDKIKRLESFKPQSTDHLKQFLNSGWRSIYDNLTRENKRTLWRNILDSVHVSPDGIEVFFK

SEQ ID NO: 22536 - protein, 459 aa, synthetic construct
MSTTHFYSHYPTIEYKTCALYVRCSKEEQAKFGDTIEAQIEDLKAFAKLHHLKIYAIYVDEGHTARKKYNKRKEFMRMLQDVELHKFEYIIFTKLDRWFRNIADFYKIQEILDNNGVTWLTALERYEMETTNGKLNVNIRLSVAQDEADRDSDRIKDVFRLKVKKGEAITGSLPIGLMVGENGKVDIDPDTVQIAYDMFDYFEAHNSKRGTLLYLIDKYNRYFCYETIARALRNPLYKGEYRGNPDYCPKIIDPARFDRIQVLGKRNVKVRKNNRYYVFSGLAQCKECGHALVANTTVQKRYNREYTQYRCNYYSNSHLCTHSHGTNEKVIEKYLLDNIKPELEKYVTAYEVKQNAPTKKADPSKIKTKMQRLKELYVNELIDLDDYRIEYEQYKQELDRLTSTAAPEIKDLSAIRSFLALDLQSIYDSLTPQEKRTLWSSIIDKIIISDGGDIEIVFL

SEQ ID NO: 22537 - protein, 462 aa, synthetic construct
MGKNITVIPAKKMQLTVTHQQVTKIRVAAYCRVSTDQDEQLSSYENQVNYYRDYISKREDYELVDIYADEGISATNTKKRDAFNQLIQDCREGKVDRILVKSISRFARNTLDCIKYVRELKEFGIGVTFEKENIDSLDSKGEVLLTILSSLAQDESRSISENATWGIRKRFERGEVRVNTTKFMGYDKDENGRLVINSEQAEVVKHIYSQLLKGYSPENIAKELNTKGIKGWSGKANWYPSSILKMLQNEKYKGDALLQKTYTVDFLTKKRTENDGQVNQYYVANNHEAIIDVELWETVQLEITRRKEFRVKHKLKSYIVQNKGNPFATKVFCAECGSAYGRKKWTTSRGKRKVWQCNNRYKVKGKIGCHNNHIDEETLELAVVKTIEMLSDNVDLLHGKWEKILSEGRLLDKHYSKALAELLKRERWVFDAEEMCQVLDHISISENGQLTVTFLEGTEVEL

SEQ ID NO: 22538 - protein, 444 aa, synthetic construct
MKKNLRIGGYARVSTDEQKKYGYSIQAQIDEIKNWCSEHNHQLQNIYIDEGYSASNMKRPQLQAMLSNLRNLDAIAFTRLDRLSRNVLEANKMLELLQQNNVAMISICEDDINTSTANGLFMFNLKVNLAEHELKKGSERIKAVFEYKIAQGQPITGNVPFGYMIATENGNKRIVIDESKAPIVKDIFASFLLHQSVHHTVEYVNNKYGLSRPYMSYMHILKNEFYAGSYRGNSNYAEPYITKETYNDVQTALQANIRTGVQRHVYLFTGLLRCPECRSKLVGVSHPKGGKRYYYYRCNNAHSVHTCTHKKHYAELATEKYLLSNLDTLLKDHIATISSVTSETKNTTEKELKELRKELDNLNYIFIKKRMPVSTYERLYAETEDKIKRLESFKPKSTDHLNQFLNSGWRSIYDNLTRENKRTLWRNVLDSVHVSPDGIEVFFK

SEQ ID NO: 22539 - protein, 521 aa, synthetic construct
MGNVMVIPAKRKIGNTNRKKDTKPKLRVAAYCRVSTDSDEQATSYEAQVEHYTEYIKRNPDWEFAGIYADDGISGTNTKNREEFNRLIKDCETGSIDMVITKSISRFARNTLDCLKYIRRLKEKNIPVFFEKESINTMDAKGEVLITIMASLAQQESQSLSQNVKLGLQFRYQNGQVQINHNRFLGYTKDENGNLVIDPEQAEVVKRIYREYLNGYSMDKIASGLEADGILTGAGKKKWWTSTINKILRNEKYMGDALLQKTYTTDFLNKTRVKNNGIVPQYYVEDDHEAIIPKEIFMMVQEELARRKVVKTSANGKKRSYSSNHCLSQKIICGECDEMYRRIHWYSHGRKTVVWRCISRLEPTGVECHARTIHETDLQEIVVIALNELLGNKSKYQKLLQQNIATVIRASSEETTKEIDKKLIELQKELVKKANDKDSYDEIAEQIFELRDKRQQFTMDTAQRDEQLKRITELQDFIKDKTTDLKEFDETLVVRWLKQITIYPDHCTVELKSGLKVDVEK

SEQ ID NO: 22540 - protein, 522 aa, synthetic construct
MYVLKKVTKIDKVQNAPSQKEKIRVAAYCRVSTSNEAQLESLETQKSHYENYINSRSDWELAGIYFDEGITGTKKDKRPELLRLLKDCEANRIDFIITKSISRFSRSTTDCLELVRKLLNLNIPIYFEKENINTGSMESELFLTILSSMAEDESASISENKKWSNRKQFRDGTFKTMCPPYGYCYNDGTMCIFPEQAKVVKRIFSDALSGKGTTTIAKELNNDGIPSKQGKKWNQTTVKKILSNEAYIGDAIFQKTYTDEYFNRHINNGEKEMYYIQNHHEAIISKEDFNLASAIISQHATEKNISSNDNKYRNRYAFSGKIICSECGNTFKRRLHTNTYSKYCAWCCNTHLVDKSQCSMLYLRDDDLKIAFATVLNKLIYGHNLILKPYVEALKNISGNKDFARIQHLEHLIKQNKEQQEVLTKLLCQGYIDQVLFTNETNSLLAKSSKYKKDIDAINSTINGDNSRHYEAEKLLYFTEHNTMIKEYSENLFERFVDHIIVYSRHLVGFVMKCGLTFKEVI

SEQ ID NO: 22541 - protein, 572 aa, synthetic construct
MANRKWRPACYCRVSTIHQIDKESIPTQVHLLSNYCAGVLGCKKEDIKFYIDAGYSGKNTKRPEYEKMIEDVKAGRRNVVVAYKLDRISRNLIDFAKFLESLKEHGAEFISLSESFDTSSVMGRGMLKLIALFAEMERGITRERVMAVSKDIISRGGHLGAPTPLGYDYDKATKKYSINEKEAETVRWIFKTAGDGESTTYISNYLNDHNITGKRSGYWTSTTVFHILHNPAYTGKYVWNRRSSGRYKLKDKSEWLTQEKVYPVIIPAAEWQSVQDKLAARRKGKNVKRAVQSHLFLGLLSCALCGHDFRARKDKARADGYRPSVYSCPAYTGHAGCTNGHYYSDMQIAPLVTQYIENVDKLANMQDLVNSRADLARVLLFNMPDVVQISNIDTLYGLYGRTNQEPVPENIAMVRAFADAEKLKADKELEKYYKALDRLKDLYLFGDANMSKEDYVTTRGKIESKIAAVISARDETTREVSPRLDVDAKKYGPILKLLRGNVGYKMIGDKVGFDLLAEFFHDVLSGIVVDKSGIVKIIFKNGVAHCLCNKETGAGVVMEYPRAGRRKSLTTR

SEQ ID NO: 22542 - protein, 553 aa, synthetic construct
MQTIPIDLSSLTAQEQRQFAENPAVLDANCDTVCCLYMRYSSEKQTEQSIEGQLRELLTFCQQHRYRVAAVYVDRAISAHASMDKRPAFQKMLSDSRGASWKTVLVYKLDRFARNREDAAVARMRLRKAGCNVESAKEGISKNPEGVILEALLEGMAEYYSLELSQKITRGMRESALKGQAVGGSIPLGYQIEKKQWVLDPLTAPLVSEAFNRYADGETVAGICSDFNARGYRTAKGAQFNKSSFKNIFRNEKYIGVYKYKDIRVEDAIPRIVPDDLWEKVQARLKVSEQAPARGKAKVPYLLSGKIFCGHCGSPMIGESGRGKGGKTYNYYSCATRKRTGNCDKKPVPKDWIEDVVAQDALSVLTDDVIDYVATIAAQQSEEDIQKNTNIPAIREQIADIERKVRNLTKAIEASGAAPDVLVSRIVDLEEQRKGLSAQLSEEERGVIPLTKEMVMVFLTAVREQVVPLENMKPVIISLLVNSVTVYDDEPGFMKFTTAYNLTKTPQKTYKVPTFRDCKCSDIGANGVPLGTNSNTITVVGMVFVQTRKHALP

SEQ ID NO: 22543 - protein, 574 aa, synthetic construct
MRKAKENLQKEKPQRAAIYLRVSTSYQADRDSLPMQRKDLVGYCEYALNISDYTVFEDAGYSGKNTDRPAFQKMMMQIRNGMYSHLLVWKIDRISRNLLDFAQMYEELKTLGVTFISRNEQFDTSTAMGEAMLKMVLIFAELERKTTAERVTATMISRANDGTWNGGRVPFGYDYNKETQTFSINGDESYIVLQMYDLYEKTDSLVRTARELNKLGYVSRQHNPFSPVSIWIILRNPWYVGTYRYNYYKIPGRRAVKEESEWVVIENHHSPLVSKERFDHVQKMLDSNARYRNTPGRSSKQKNVNIFSGLIWCSCCGAAFTASPGKLHASGYRPTKYGCPNVRKTKTCNAKYTSDPVIGEFLLNFILNVINAQKGFEKINSPADLESRLLRGDAFRDVAKIDSASVAALYEMLSSFSPADSVLLKKPTVKKDLDPELRKLRADKRKTERALARLDHIYLYSNKQMSDKEYLVKKNDLMTDLKELDKSIGLLTSESWAQSLSDDDFLEQASSFIISQRLQEREYIYFQGLAESTDPAVLRAFFVSIIDSVRMRNGVVETLTFKNGISHTFTYKAI

SEQ ID NO: 22544 - protein, 474 aa, synthetic construct
MKVAIYTRVSTIEQAEEGYSISEQQDKLKKYCDIKDWKVARVYTDPGFSGSNTNRPSLQQLISDCKNSMFDAVLVYKLDRLSRSQKDTLYLIEDVFNKNGVDFISLSENFDTSTAFGKAMIGILSVFAQLEREQITERMTLGRVGRAKAGKAMGWSNCPFGYTIYKEVYEIDPFRAEIVKRIFKDYLAGVSIIKLTQNLNKEGHIGKENNWSYRTVRQVLDNIVYAGYIKYKNEIYPGLHKPIISISDYKKAQAELKRRKITQAKLHNPRPFRTKYMLSGLMRCGYCNSVLQIATSNLKDGTHLHRYNCPSSRPRKRSTNKRHDFDCGFKFIKKNEIESVVISEIKKLPLNMDKIINNQENKDVSKEIKAIKAELQQIEKKQDKMVDLYLLDNINVDELNKKNDELSKQKENLQKRLNSLIDNKNKEKIEDFIKNAKEAKNIDKLDYEKQKVIVRKLISGIKVFNDKVEINWNI

SEQ ID NO: 22545 - protein, 573 aa, synthetic construct
MQKNQTKKAALYIRVSTHYQIDKDSLPFQRNELINYAKYALGIDDYAIFEDAGYSGKNTDRPAYQDMMRRIRAKEFSHLCVWKIDRISRNLLDFAAMYEELKKFNCTFVSKNEQFDTSSAIGEAMLRIILVFAELERKLTAERVTSIMYSRANKGLWNGAPIPLGYKWDAKGKYPVIDEDTAVVVRYIYDQYERIHSTMKLSDKLNRENIKSARGGEWTGTTVKGILRNPFYKGTYRYNYKTQTGRIKPVEEQIVHEDNHPGIIDKEQWDRVNKILDENSTRSVAQLRSNVKYTHIFSKLLRCGQCGHTMGGGLDRARSDGYRPSRYYCTSHTRKAGCTNGVYSDVYLGPFVFNYIANLVRAQRALTDSQKPRDLERMLLRGKFFDSVAGIEQQGLLDTYNTILYGSGEDVMLQPSPEIAAQSASELELLDRDQKKYERALERIEQLYLYSEESMPEKDYVLKRNELKDMLDNIAERRAEVNSRLGLAPASSDFLEKATYFYLTNSLNQKHSLDFRKMVDTFEPKMLQDFLCSVIDHITVVDGHVASISFKNGLTNKFIYKATKPPKNASTKP

SEQ ID NO: 22546 - protein, 457 aa, synthetic construct
MAKKVTVIPAKQVQARSSRHAVVPKKTRVAAYCRVSTDQDEQLNSFENQVEYYTRYINSNQNYEMVDIYADEGISGTNVKKRKDFQRMIADCEAKKIDLVIVKSISRFARNTQDCLSYSRKLKNLGIGIIFEKENINTLDATGELLFTILSSLAQDESRNISENCKWGIRSKFQEGKPHINTYKFMGFDKGEDGRLIINEKEAKLVKRIFREFLEGYNPADIARRLNEEGVPGVSGEPKWIKPTIVGMLQQEKYMGDSILQKWVTTDFLNHTLRRNEGQAEQYYVENSHPAIIDKETWTAVQEELERRDIYCQNHHLSMYAYRADKNPLNGKIVCARCGHTFARKSWASRGIAYWTCKSDKCDGNIKEKLLQKAFITAWNYIVQNRDKFLEYWQQDIESGGPLEKVRAKQMIELTAEGKIETFVPELMLMVLEKIEVHDQEHFTVCFLDGTEKEILV

SEQ ID NO: 22547 - protein, 499 aa, synthetic construct
MKIHIIKPDAISVKKLRVCAYCRVSTEAEDQENSLENQKVHYEELIKNNPEYEFVKIYYDFGVSGYKESRPAFQEMLQDARNGKIDLIITKSVSRFARNTVTFLKAVRELKEIGVGIFFELQNSNTLTETGEMMLTIISAFAQAESETYSQLSKMGIQRKYEKGEPIQRLERCFGYMKNEEGEYVLDPEEAKWVKLIYEFIADGYTTADVKRYLNSNGVKTVKGARFTESTIFRIVENEIYKGDFIMHKHFVNSERKEVRNTGQVDSWYIEDDHPAIVSKRLWQKAQDAIVAKRDYLATGSIVGENSEEVYPHKNKVFCDKCGYPLYLRVYSNGNRANWGCSGQKRYNKRFCKGINVPDSVIRSWGELNEPVYVRKVTDKFGKSTFKYSKETAWSRKHKKKEVPIIPELNEKNYPYFKKIYCKECGSRLVRLTQANEAVKWICNGNKRKGAAFCRGIRVPDEVIRAWNIDEEILVERKGAKHGKESYSYTSKTGTGKKQ

SEQ ID NO: 22548 - protein, 526 aa, synthetic construct
MGKKQKTNGGDAVIYARYSSHNQRDVSIEQQVEACRKHAAELGLTVTATYEDRAISGKTDKRPSFQRMMRDAEQHKFAYVLAWKSNRIGRNMMQALVNESRLVDCGVKVFYAEEDFDDNAAGRFALRSMMNVNQFYIENMAEDVKRGLYDNAKKGLVNGSLPLGYKRGADGKPEIDEPKAAIVREIYTRVAAGELFASIAADLNARGIRTARGREWNKGSFHVLCHNDRYRGIYMYGDIRIPGGMPRIISDELFYDAQEAYGMKKDNRYGRARHGAENYLLTGKLYCGHCGSYMVGISGTSKTGEMHYYYACQKHRLEHTCEKKAIRRDVIENAVARVIMMYCLDDETIDFIVDSTIAYFKQKDHELHIEAMENELAAVHQAISNLMKAIEAGIITPTTRTRLLDLEEQQAKLSAKINTAKAERVEIDRDDLIAGLQLFRTGDIKNKKFLAKLFNTFLLAVYLYDDNRLKIVFSFTGNHNNIEIPLELDNDCPDSESGPYETEVRMSHLECRRRGSNPYSVSRKGF

SEQ ID NO: 22549 - protein, 525 aa, synthetic construct
MPRKKKLQEVGGLRLVAYYRYSNGGQQTEQSIEGQRRDCEAYAKAHGYKIVHEYIDRHISGKSDSRPAFQQMISDSDSHLFDAVICWKTDRLARSRYDSIIYKIRLRRNGVKILYAAETVVDGPEGIIIEGLMESLAEYYSAELAQKLRRGQRESALKCIALGGNRSFGYDIGPDKHYCINEKQAPAVRYIFEQYAAGATAADIVRELTARGYRTSRGNPFNKNSICRIITNEMYLGVYKYADIRIEGGVPAMIDRELFNRCQTQLAFNRAHGGGKGAPRADYVLVGKLDCGLCGHAMKGASATGHTGSKHYYYTCTQHVEKKCPKTSIEKNYLEQVIVDGVAKYVLTPEKISQIVDCMMELQAKEQEPKGNPERDALEAELAECRRKQNNILEAIEEGGSARLAARLRALEEQEAQLTFALGEINNAPAPPQFSREALTFMFEQFRREEDEVDEEYRRRILDTFVSSILLYEDRAEVKFNITDQKTGDFERVILPISANKKPPEDDDTTSNSEGSTALRLVEAT

SEQ ID NO: 22550 - protein, 500 aa, synthetic construct
MSKKLANETAAVVYARYSAGPKQTDQSIEGQVYDCQEYAKKHGLTIVEYYIDRHISGKEDSNRSEFQRMLNDCCKGQFRYVITWKVDRFGRNREELAVNKAKLKRCGVQLVYAKESIPDGPEGIILESLLEGLAEYYSADLSQKVKRGMAESAKKGKVLGSACIYGFQKSADRRYEINEPAAAIIREVFQRYADGDNVPNIVKDLTSRGIATYKNKPFDTSTIYRALRNRKYIGEYTFDNVVYESGIPQIVDKEIFDRVQQRLAANRNNGFKCATPVPFLFTGKIVCGECGFPYSGESGTGKSGIVHRYYKCHGRKSRKSVCNSPILRKDWFEQYILNKTVSDVLNDDVIDYLVKEILKVQEEDLVSSELSALRKEKRDVEKSLSNIMRAIEAGIFNDTTAERMEQLEHRSKELSVAISKVELKRMRLTPDHLYYWFYEFKNGDIHDEAFQKHLVDAFINKIFIYEDRVVIAYNCANNNPCSIDLAELSSCVRPRSHKVD

SEQ ID NO: 22551 - protein, 520 aa, synthetic construct
MPRKKAPAADAPRLVAYYRYSGGSRQTEQSIEGQRRDCEAYARAHGMTILREYVDRHISGKTDDRPAFQQLVADSAAHTFDAVICWKTDRLARNRYDSAVYKKKLRDNGVEILYAAESNISGAEGIIIEGLMEALAEYYSAELAEKARRGMRESALKGKALGSSRPLGLTVDADKHYVIEPKGAEAVRYIFEQYAAGLSSSSIVERLNAMGLRTSHGGPFNKSSINRIIQNEMYRGVYVSKKFDVRIEGAIPAIIDNDLWERAQKMFERNRQSRTPHASRADYILSGKLYCGECGCLMKGVCGRSSGNGQMYHYYACPGRSIGRACTRKNIPQDELEAMVVNAVADLLLEPELLEQIADAIVELQQAEAARPDPEKQALEKSLSDVRNKIQNILSAIENGTSSAALSARLADLEQQESTLSYQLSSLTAKKPLTFTRDQILFLLQQFRVSPSERTKAYCRRLVDTFVDHIELTNTELILYFNISDETIDKNKKAPRSNHSEESSTEKRLVRVARIELTAS

SEQ ID NO: 22552 - protein, 546 aa, synthetic construct
MYSSKRAVIYCRVSTEEESQKNALEGQIKEAIKSVEEKKWILVDQYVDEGKSGTTTKNRPQYNRLIKDLSQDRFDIIVIKSQDRLMRNTLEWYMFIDLVNKNQKQLFFYLENKFYNTEDSLIVGIKAILAEEYSRELSKKINNAHKNGQKECSRIMLNNKTWGYDKINKQVVINEKEAEIVRLIFDLYIKGYGARTISKTLTEMGVKSRSGGDFAYVTIRKIVRNPLYKGDVVMNRLHNDFDSKKVVHIPKEEWIVHKNAVPAIVSEETWQAANSILDTRYQDTFSAQGLPIRIGKNKGDYPLSSKIYCGECGSTYWRRYRRNTKDDVTVYWSCSEYVTQGRKNDQTKRGKNMVKKQFDLQRGCNSPHLKEEDIISGLKMIAENIFSPSDRDSLISESIQLFESSALDNDKKVNGLNENLEKLKKQQEKLLDGYLNDCISEDLYKKKNAILVEEIRTLEAKKAEIGDTEAEVRQKKEYIESVKTEISKIGQNEGCVHKLINIIERITVFQTYMLVSLGAIGEIKLNVERLSYKRTRVTIADEQHNN

SEQ ID NO: 22553 - protein, 514 aa, synthetic construct
MRNEYNPIIIKYVAEYLRKSRGETTEDLIKHKTILEELCKSRGWVYVVYEEVETGESLFARPVMQQLLRDVEDNIYDAVVCVDLDRLGRGDLVDWGQIKRVFQKTNTYMVTPSSLYNLNDDNEEFAVDLQTLFARREYKKITHRLSMGKKVGAKLGAWTNGTPPMPYEYQEWIDPATNKRYYNEKGLVVNLQKLSIYRFMVDSFIKDKKSTNEIAWELNRRNIPSPRGGRWCNMTVRRLLVDETHLGKIISNKTKGDGHKNKSPNKQPFQKIPKEQWTVVENRHEAIKTQDEHEKILIGIQRNLKSPFRRSDHCYPLKGLIKCGLCGYGLPLEYKRGKDLIVKKCWHKDYLGNKCPNSSGKAQYIIDAIDEQLKEYEEQIRKEIESCEDQSTDLIQFQIKTIMDKLNKKDIALKRARIAYDEGVDTLDEYRSAKERILKEVDELENQLSVENLKLQKAQSITNHEKLHYIEEFRRSRWENELDDKELNDLYKTIISSIIWTKQGDNIDIKVNFL

SEQ ID NO: 22554 - protein, 458 aa, synthetic construct
MKRILRAALYIRVSTEEQAKEGESLPAQESALVEYANEHGYRIVDIYKDAGVSGTRKVEKRPEMMRLLDDVKQDKIDIVLFIKINRWFRSVSEYWRVQRILDDYGVMWNAITEDFKNETAMDKAMINFALTFSEYFAGVQGEHIRFTLERMAKNGEPISGNQPYGYMIIQGPKHKMIAKDLSTGDYIPDMYQKYIECHNIAETTRYLNAKYPDQKFAETYTTRRRICTRAYTGYHWARPDYYPPYVTQETFDEANAILKARAERQAHSKHTPPKLFSGLIICPCCGRRLATTYKKPTKGYPNGFRKYRCSMAWNRTGKCSYRHELYQWVIEKYCVEHAMSELKSFTLKAKTIDTEALKTEQEREKLEAQLERLNDMYLYGKMDFEYYKRHMDEVTDKLDRIKRGVKPADRSVDELEALHIDNFESAYAALNEENRAMFWHKLLKGITVEKTHVTGLIF

SEQ ID NO: 22555 - protein, 456 aa, synthetic construct
MDKNKKITVPGLLRTAIYIRVSTDQQAKNGDSIGEQTETLTTYVNGRDDLILSGMYIDDGISGQKINRDGFTRLIGDVCAGRIDLIVFTKLDRWFRSLRHYLNVQATLEEHGVNWISVSQPFFDTSTPQGRAFIANSMAFAELEAQNDSERIRAVFDHKYKHGEVLSGKVPLGFSIVDKHLSPNDDAAKVLAIFQRFSRSGSLNDTVRFIESEYGIVMSISNLKKAILANAKYIGIFRDNTNYCPAIIPQELFDDVQRKLTFNVKISQKHTYIFSGLVRCACCGSAASGFQHRSSHSGVVYRYSAYRCRQAFAVKRCHNKKIFIEKSLETYVLQHIKPELQKAIISYEVAAAPAADQKQKRALITRKIEKLKELYVNDLISLEEYKVDKAAYTAQLDELPAEASPEKDLTALRRFLALDLDAVYTSMTPEEKRYLWRSVIKEIRVDEQRNVTIIFL

SEQ ID NO: 22556 - protein, 530 aa, synthetic construct
MEQYLIYLRKSRSDLEAEAHGEGETLSRHEHTLLELAKRQHLNVTDIYREVVSGDTIAARPMMQRVLSEVEQGVWSGVLVMEVERLARGDTIDQGIIAQTFKFSGTKIITPIKTYDPDNEFDEEYFEFGLFMSRREYKIINRRLQRGRLASAKEGKWPSGLAPFGYRRVKLKNEKGCSLEPIEEQAAIVRMIFDLYTVGLQDEDGSARPLSLGSIAARLNDMRVPSPSGSQWTRITIRGIIKNPTYIGMVRWGSRETKKKVVDGKVVSVRGPADPEKECVFKGIHPPLIPKETFELANDKLTRSENTSTHKEKVVRNPLAGLLVCSECGRQMMRMINPVHPDMPVVRCPRRGCPNCSSYLPIVEERVIQGLSEWMKGYELEWSSAAASSSVSSVGVREKALASAEAELRKLQQQLERTHDFLEQGIYDTDTFLSRSRMLSDKIAAAKDSVARCSRELTEEKLRETSRRDIIPKVKNLLDVYPLLETAEEKNALLKEVLEKVVYQKLNEKRKKSPDGFTIEIYPRIPKSEK

SEQ ID NO: 22557 - protein, 523 aa, synthetic construct
MDGLNLANVVIYARYSSVGQNDQSIDGQLTKCREYAQQHGFRVVSEYCDRALSGRYAETRPEFQRMIADSAKHAFEYVLVWKLDRFSRDRYDSAIYKKKLRANGVRVLSVTEGISENSESLLLEAILEAMAEEYSRQLAQNVRRGMRQSAEKGLSLGGIAPLGYDVINKRYEINEGEAQIVRYIHERYAAGTGQAQIVAECRERGYCCKRGNEFTVNAVNRILKNEKYAGTYICGDLILEDAVPAIVPKELKKKVRNRLAANAKAPGHAKAKVEYLLHGKLFCGECGAPMIGECGRGKNGTTHHYYTCATRKKSHSCKKRNEQKDALERFIVNYICMYVLTDEWINTAAERVVAEYRKSYDASGIKPLEKQIRDLDKELDKLVDTLINTASSAAIKRINERIDAAELKKSTLEADLASLRIASRVEIKKEDIAAWLHQFQNGNVDDIDYCKKVIESFVNAIYVYDDKIKMFFNSCESAQITYPQVLAFDMPESSDLEASGVPSIDLSELFYFINGVIGIVVRR

SEQ ID NO: 22558 - protein, 594 aa, synthetic construct
MKPRLFSYVRFSSGKQSTGQSVERQLETAQRIANQYDLELDTLSFKDLGVSAFKGKNAAQGNLREFIDQIGKRVPVGSWLVVENLDRLSRDDVLSALDILKEILRRGITVVTGMDSKVYTHESLSTSMMDLILSIMLFSRAHEESLTKKNRVESQARSLIHKNLNREPGTPAFAIESVGGNVWWSSQQNGLIIPHPDYYSVAQKIIEMKWDGCSPGEIQKYLNEHYTPPTKDKKGTKTKWGMNLVRGFLNPTTHGRKEFILDKRDQNGQLVKKKCIDSEGKEYFENQKETFIIEDYYPALLTETDYLTLANLDKARSATRNSSKNDSLNEIGLLSGIGVLRCGKCGLPMTKNSALKSRFRNVCTSKNTNGKSCGNAGFTGQPLEHVILQLIADHIWTTAKEDKTEWFVAEIAKLDQQIKKLVRLASLTDDSDIDELAIEINSYRKQKRELEFKFNEYKVERSEQVSTGWDEFRKFDTEDVTNPERKRIRLRIKQAIRSIDCTTFNKRFGLFMIKYIDNSEQRVVLKYNRRSSPGKAFVDIHTVNNKVLVELAGITLHTHIEKLIEPEQYEQTRKKWIQDNQVDDTPKTIIDELT

SEQ ID NO: 22559 - protein, 532 aa, synthetic construct
MATERKKKATEEKVRENITKKASNTTRNTTPKKNSKKKSNNLPLSLPDFQTFLEDDKSLEEFTKFTACYVRVSTDAQAEQGYSIPDQTAKLQAYCTVKGWENVKFYTDPGFSGSNLNRPAIQELISDAMAGRLNAVVVFKLDRLSRSQKDTLYLIEDVFLPNEVDFVSISEALDTSTPFGRAMIGILSVFAQLERENIYLRTRIGMKGRVSAGYWRGGGNVPFGYDYDREKKILVPNADSPKIQQIFDLYIKGYSCQKIADMFGLNNELRVRNILKRHTYCGFINYKGEEYPALHEPLISEETFLVAAAEMDRRSRGSLVASGKNSYHLLTGLVYCGDCGARMRYMKWGKPFKLVCYSHVSKEHMIKDPDCPNMGFVAADIEELVINKLLGIGSSVPLEEFDAKWRSQNTREILEKRIADATLRLKRLYGLYSESADNVIHERIFEVRDQIRLLQEELDNEDKISLKDNHINYVRERIKNIGGIWPSLTPMERQTLIRDCVDKIILFHDGSVEIYFSFSTEAEEQQCRKKAN

SEQ ID NO: 22560 - protein, 524 aa, synthetic construct
MPKYNPEELLPAVAYYRYSPGGGQTEQSIEGQRRDCMAYAKSHGYVIVKEYIDRHLTGRNDKRPAFQLMMQDAEMHCFDTLIAWKNDRISRNRRDALNYKDQLRKCGVQICYAEMDIPHGPEGILMESLMDGLAEYYSAELAQKIRRGMTESAHKCRALGSIPPFGLRVNKEHRYEPDPTTAPYVRWIFQQYAQGVQITEICYALNAKGVRTSRGNEFNKNSLRTVLSNEKYIGVYEAKGIRTENAITPIVSQELFDMVQQRIPQNAHYGRKLNGPRQFPLSGIAYCAICGAPLIGDSGTGKNGKLHTYYACTAHKHKHGCTKKNIRQAKLEEMVYDATANMVLCPSITRAIAKQVEASAAADTSHAEEMQAVQAHLKDIEKRINNILAAMEEGSFSKAVSSRLTTLETEQSRLEKQLKNLRRVKPNITASRVEYMLSTMCRNPAEQQPDHLKRLLQVFVERIDLSEETMSITYAITKKSAVPTSTADNPTVKTLHYIDIKQCSTIACYGGADGSRTRVRKEIG

SEQ ID NO: 22561 - protein, 553 aa, synthetic construct
MAKKRYDLRPVRTVCIYARYSPGSRQTDQSIEGQLRVCQEYAEQHDYRIIQTYADKHKTGTNDDREAFRQMIKDSEKGLFDAVLVWKSDRFGRNMEDMVLNEMRIKRNGVSLISCTEPVADGPLGGMQKAMLMGMAEFYSATNAENVRRGLLESARKCQITSGAIPFGYKAGEDKRFYTDPINAAAVLEIFQRYDGGELLTHIMDDLNKKGIRSHKGKPLTRSSMYSILRNERYTGVYIYADIRVEGGMPQIVPKDLYERVQIKLGKNKHAPARAKAAEPFILTTKCFCGQCGGPMAGESGTSKTGAKHYYYGCVHHKNSRDKSKACQKKPVRKDFLERLVIDTTLDVALHKENIQSIAADLCAWQQRQKDTAILDGLKSRRRECEKAIGNLVAALEAGAASPTIAARVRDREEELENIKFAIAEQELVQEKFDEKKIMYFLSKVPEGDRTDINYMQRIVDTFINSVFVYDDRVVICYNFDGDGSKITVNDVDKAMQEAEDRENRQITQEAPGQGAPVLNLTIPSVRLMAVWCGVMNQKRTPYFFSSALLESL

SEQ ID NO: 22562 - protein, 521 aa, synthetic construct
MAEFDNVIIYLRKSRSDDPMQTVEDVLAKHESILQDYSIKQWGKPVPENRIFREVVSGETIQDRPVMQQIMKLLETGFISGVLIIEPQRLSRGDLQDCGRIINSFRYTNTVVITPPKTYNLSDEYDRKFFEMELTRGNDYLEYTKKILNRGRIASIKAGNYIGNIAPYGYRKVVIGTGKDKYHTLDIEPKEAEAVRIMFNLYVNKDYGFTNIAHFLDNAGYKTRNSANWSPAAISSMLNNEIYIGRVVWNRRQTVKKMQDGMIVRTRPRHNDYISVPGRHPAIISEELFYAAKRKRGMTPKVKKFKELTNPLAGLLFCGRCGFAISMKKYTDKRSNTGHETITMLCNNQSNCHTKSVMYSLIIAKVKLSLQQAINDFEVHINSNDDSEQILQQNIINNLTEELEHLKEKDIRQKDAYEDGIYSKEEFLKRNAKLTEQISITQEKLNNALLEEPHICDYEEKIVRFRDCLNALDDDNVSAAVKNTLLKACIDKILYYNDSPSLPGIGRYVDNPFRLEIFLKL

SEQ ID NO: 22563 - protein, 482 aa, synthetic construct
MSKMKGVIYARYSPGPDQTERSIEGQVADCQAYADRNDIEIIKVYADRHVSGRSLKGRMEFQKMIKDAEKGLFDCVVTWKIDRFGRDRYDIANNKMKLKRTGVKLLYSKEAIPEGPEGIILESVLEGLAEYYSADLAQKVSRGHRENAKKGVWTFPLPLGYTRDDQKHIVPDPVVAPVVRRCFEMYAAGAKEKELIEYMRSQGITGQRGKPISTGVIYRMLRNRRYLGEFELQGVTYEGVEPIVPTDLFEKVQTMFPTSRNNAAGRAKMNYLLSCKCYCGKCGTMMSGECGTGKSGTVYAYYKCGNRKRGGACDLKPVKRELLEEAVLRHTMDDMLTDEVIDRLVAKIMEIQDRDDGQAVVTSLRSRLDGTKKKIENVLDAIENGGGASLVERLSALEEERDALDAELSKAQIKTPRLTADAVRAWLCSFRNGDISDEGFCRRLIDTFVDRVEVREGEALIIYNATKEGAASRCSSTAQLVE

SEQ ID NO: 22564 - protein, 539 aa, synthetic construct
MSIPQRIVQERPVIYRPTNTASGIHKENVTYYARVSTQNDEQEDSYERQKAHFEEKIHSNPNWNYVEGYADWGISGTKAESRKEFMRMIEDCRAGKINRVLVKSISRFGRNTVDTLTYIRELRELGISVFFETQNIDTMTAGGDVLITILAAMAEQESRTMSTNIKWAFKKRFKDGRVLINFKQSLGYDKVVNVDENGHKEEEYVIVESEAEIVRMIYREYLSGKTIRQIADQLNELGIRTKRGYEWKPNSIEGVLTNYKYTGNAILGMTYKPDVLSKSRLKNEGQSPSFHVENSHPAIITKEMYDMVQAEIQRRKNIRSTVNTGKGKYSSKYVLSGLLVCGDCGAKFRRFGRSLKSGEFIPTWVCVTHQKNPNECKMKPIKEQDILDAFKRAVQRLVGDFSEIVQVVRETAEEELKSQQASNLTAIEDELVEQRKAVLELFKKKRAGEISPTEYDRKYAEYSARIIELESAADTAKSEELQKQLTQSRLERVYELLDNIGTDYTDEGVMRALIDCIKVEGKHDIEFQFKCGVDIHETI

SEQ ID NO: 22565 - protein, 496 aa, synthetic construct
MDDRKRAVAYIRVSTKSDAQLHSFGYQESYWRDAISASNQYDFAGIYSDFGISGRSLNRRPQLQRLIADAEQKKFDVVFTKSVARFGRNVEEIVATVRKLREFGIRIFFEKEQIDTFDPNMELYMTLAASIAENDLKIYSENMTWSIRERYKKGWISIGSQIFGYRMNKENNTLIVEPTEAETVKRIYDLYEEGLGQVAISHVLEEEQRANIYGEVKWDVGAIRYILTNEKYKGCALTQKGIYVHGIKQKNDNLAPQWYMENTHEAIITPEQFERVQELIKERARKSKGAKPGDYVFARKIECGCCGGGYSHKFNNTNKPWRNEIWICSKQNTYGAGHCTNTRIKDEVLKKLFVECYNEFVRENGNTDELMELRDSQRKLLEQERELNALRVNRMIEISDYNVEIAKVREQITECNKQIALHEMRGARKEDLVEIKEFDDSKVEIFLEKAVVLNHKITFTFINGMSISREYTNGHGGNTAGWLDRRLDRLSKEGKQ

SEQ ID NO: 22566 - protein, 458 aa, synthetic construct
MKRILRAALYIRVSTEEQAKEGESLPAQESALVEYANEHGYRIVDIYKDAGVSGTRRVEKRPEMMRLLEDVKQDKIDIVLFIKINRWFRSVSEYWRVQRILDDHNVMWNAITEDFKNETAMDKAMINFALTFSEYFAGVQGEHIRFTLERMAKNGEPISGNQPYGYMIIQGPKHKMIAKDLATGDYIPDMYQKYIECHNIAETTRYLNAKYPDQKFAETYTTRRRICTRAYTGYHWARPDYYPPYVTQETFDEANAILKARAERQAHNRHTPPKLFSGLIICPDCGRKLATTYKKPTKGYPNGFRKYRCSMAWNRTGKCSYRHELYQWVIEKYCVEHAMSELKSFTLKAKTIDTEALKAEQEQEKLEAQLERLNDMYLYGKMDFEYYKRHMDEVTDKLDRIKRGVKPADRSVEELEALHIDNFESAYAALNEENRAMFWHKLLKGITVEKTHVTGLIF

SEQ ID NO: 22567 - protein, 552 aa, synthetic construct
MPRKKKLQEVGGLRLVAYYRYSNGGQQTEQSIEGQRRDCEAYAKAHGYKIVHEYIDRHISGKSDSRPAFQQMISDSDSHLFDAVICWKTDRLARSRYDSIIYKTRLRKNGVKILYAAETVVDGPEGIIIEGLMESLAEYYSAELAQKLRRGQRESALKCIALGGNRSFGYDIGPDKHYCINEKQAPAVRYIFEQYAAGATAADIVRELTARGYRTSRGNPFNKNSICRIITNEMYLGVYKYADIRIEGGVPAMIDRELFNRCQTQLAFNRAHGGGKGAPRADYVLVGKLDCGLCGHAMKGASATGHTGSKHYYYTCTQHVEKKCPKTSIEKNFLEQIIVDGVAKYVLTPEKISQIVDCMMELQAKEQEPKGNPEKDALEAELAECRRKQNNILEAIEEGGSARLAARLRALEEQESQLTFALGEISNAPTPPQFSREALTFMFEQFRREEDEVDEEYRRRILDTFVSSILLYEDRAEIKFNITDQKTGDFERVILPISANKKPPEDDDISSNSGGSTALRLVDKPQRQTNPRVEISPYSVVFIIPLPGKFVH

SEQ ID NO: 22568 - protein, 562 aa, synthetic construct
MATNKNIQGQEEKITALYCRLSQDDNLEGESNSISNQKEILMTYAKKNGYLHPQFFVDDGISGTTFNRPGFQEMESLIEAGKVTTVIVKDLSRFGREHLLCGHYTEIVYPTLGVNFIAIQENVDTTKGMGTEMMPFHNIFNEWYAAQTSKKIRAVNEMKASKGMRISSTVPYGYKKIEDNKEQWYIDEPAAEIVRKIFNLCISGKGPSQIARQLEAEKVLTPTAYFNSVGKKTSNPMPANIYGWRSNSIVHILENRQYTGCTVNGKSTTVSYKVHKKIEKSQENYQIISNTQDAIISENTWLRAQELRKNKRRNTATGRRSLFSGLVYCADCGSKLHFCASKSLKKNQEFWRCSSYKDGRGTCTIHFIRDVVLEAIVKEAISELADFVRCYNSAFLYLISEKKGTEYVNREKSLRIKTESAKQRISDLDKLFSRIYEDNILGKLSDERYSRMADEYEAEQKRLISEVEENEKALIELQKQTVDMKMLYQGLMEFTEMKQLTPIVVNKLIERIEIHNNEKKHSHNNVKVGIYFTAVGLFDIPTEQQLIDTMERAKQKKAEKSA

SEQ ID NO: 22569 - protein, 472 aa, synthetic construct
MNSKRKVAIYSRVSTLHQAEEGYSIGQQIEALTKYCQAMGWVIYDNYSDGGFSGGKLERPAMQKMIQDAKSGKFDTVVVYKLDRLSRNVRDTLYLVKDVFNANNVDFVSLQENIDTKSAMGNLFITLLSAIAEFEREQIKERMQLGVKGRAKSGKTTAWTTPPFGYKYDTNTQSMTVDHYQAEIVRDMFNKIISGWSIMGITTYMRENYDGKWTHVKVKRILENITYIGKVKYRNEIFEGEHTPILPEELFSKAQKALEERTNKKDNTRPFQGLYMLSHIAKCGYCGTPLKIDTYKPRKDGTRKRTYTCINKNPKRIKTATYNDGKQCKESGRYDVKDVERYVLNEISKLQLNPKSIESLYRDKPEENITAHQERLKKLETKLSKLNDLYINELISMEALKQKSAELLKEKSSLETFINNNKRKINNKPAFEKVAKMDDVFKMSYDDQKKIVKTLIKRVEVKRDEINIIFKL

SEQ ID NO: 22570 - protein, 483 aa, synthetic construct
MKKITKIDGVQNNSTVNKELRVAAYCRVSTGSDAQLESLEAQKTHYERYINSREDWKFAGLYFDEGITGTKAEKRPELLRLIADCEARKIDFVITKSISRFSRNTTDCLALVRKLQSLNIPIFFEKENINTGSMESELFLAILSSMAEGESASISENSKWSIKRRFQNGTFKLSYTPYGYDWDGENMIINPAQAAVVKRIFADILSGKSTNAIADELNAEKIPSKKNTSWTSSTIRGILSNEKYTGDVIFQKTYTDENFNRHTNYGEVDQYMAQDHHEAIISHADFEAANALVSQRALEKGVKKGSDKYQKRYAFSGKIICGECGDTFKRRIHTCTTYKYVAWACNTHLKDKSTCRMKYVRDNDMKAAFVTMLNKLIYGHRLVLVPYLKALENSSGDEALQRIQHLELLLDQNSEQRETLTKLMAQGYIDQILYNQETNALLLQAETYRSDIEAITICMTGDSAKVTETNLLLHFVSHADMLT

SEQ ID NO: 22571 - protein, 404 aa, synthetic construct
MIIKKVMPKIPPAKKRVAAYCRVSTLRNEQDESFETQQKYYEELIQSHPDWELVKVYADRHSATRVKNRPGFQEMAAAAEAKKLDIIICKSISRFSRNMVDCQQYTKWFLTLGVVVIFEEQNIRTDDPTCDFVLSILAAVAQDESHSISENEKAAYASRFARGEYNLGNNRILGYDCVDGELVPNKDAWIVKEVFRRFIEGESYRQIAKGLEELGAQSLHSKKGFGVETLRYMVSNETYVGDKRLQKKAPLDYLTKKPDPNQKVESNYLWNDHEAIIDRETWDKAQEILERRKELAKVGIHKTNREHHFLYGKVFCGECDAPFLRRTLKAAGGSKTQSTYKAWNCRNRQKGKGKERCGNRFIKEEELIDAILRELEWPTMDQERFEKEVSKVLVYPDHIEVEKN

SEQ ID NO: 22572 - protein, 503 aa, synthetic construct
MEITVEKVDVGVQKLGFQALSTLKTVRVAVYARVSTDQEIQLHSLEEQMKAFRSKIAQHPGWVLVDVYADEGISGTSVKKRKEFLRMMEDCEAGKVDYIMAKSISRFARNTVECLSYVRHLQSIGVQLYFEKEGLDTATSVSELILTVMAAFAQEESRSISENLKWGIRKRFENGESRWTKTYGYRKTKDGEIVIEPDEAAIVRMIFKMYQYGIPMPDILDELTFMQAPSARGRQTWNKTALKYLLENEKYIGDMRLQKWVSVDHISHKSVKNDSTVIPVYNVKNHHVPIIDRHTYQQVQRIMELKAPHGEYSRYPYFDTNFVCPLCGRKMIPRVMKVNNHKRILGCFDVDGCRGYAVKGYLVDAALLEAYNTLEIKEKKRTVAMQRMLEIKAESPKLDTVQYYWLDDLVGRIEFKQDTMRVFWKCGLESEVALNASKVEEPTHVAELYRNSLDRAQQNENKSVSVIQASEKRVSTREAQRSVAVQAAKNLRTKKNGAVANDY

SEQ ID NO: 22573 - protein, 680 aa, synthetic construct
MDLYDIPKGLRVGIYNRCSTDEEAQLNALSKQAEESRELAISFDWVIVAQYIESESGTTSKKRTEYQKMLEDIESHLYDVIMIKSMDRLARNVLDTYYFLSRLQANNIRLYIYIDRKFYDPGDSLKTGIDALVAEQYSRDLSKKIKNAHRRRQLKKGGTNINSRVFGWDKIGKDQFIINEKEANFYRIAFDKAYNGKGYRTIANELYALGARTTNGTRISDSHWKKLLTSPRAHGTVVLHTNEYNFETKKRVDLPPDQWIYMENALPPIVTKEYQEMVLDVIEKRSRAYRYDRDLSMIGHYILSGKLYCGECGAPYYRYMLTTHGEKVTHWRCSIASKLGKKDITPAGCDNIVVNEEVIFNTIQAACKEQFSIIFDIQQNIIDEALKNIKNVLSDKDYETEITRLEKEKSTHLRKKEVLFDKLMSEVISDEDFKKFNSEIENKIVGLEKKIEIIKNHSSDNESLEGRIDKIKEKLNNEAVNRAKVKEIIGRIDKIIVNHDSTLNIKFNKNKMISMLKIYGCELDNDDFTDDMFDLCVPYVHPTSMRAIEKEQNIQKIIKCIKDDPCIELVNIQKRVGLGYTTVYKTLKHLREEGKLVRKFGESTKWEFIGENQTSGSSKINARKDKILEFVKKNPGISAKDIAEQLDIPKPTTSRYIGQLEAEGKVHADRSHKVMKVYTN

SEQ ID NO: 22574 - protein, 530 aa, synthetic construct
MEQYCIYLRKSRADAEAEARGEGETLARHEKMLLAVAKRDRYHISKIYREIVSGETIAARPQMQQLLQDVEQGLYAGVLVMEVERLARGDTIDQGIMAQTFRYSDTKIITPMKVYDPNNEFDEEYFEFGLFMSRREYKTINRRLQRGRAASAKEGKYAGNITPYGYTRVKLEHDKGFRLVPDPEEAKIVQLVYDWYLNGEPQEDGSRKRLGSTYIARKLNAAHVPTRHGGKWGVNSVRGILINPVYTGKIRWNYRPAKKSMENGAVVKTRSEAEEGDYILADGLHEALISEEAYHAVQEDMHHKAVSGTHDGKKLCNPLAGLAYCTCCKHVMVRRPHNKRFHTDTLMCNTLDCPNVSADLEAVERRVISGIRDWLKQYEVEWSKNHQEPSAMDAQIATKKAAIQAAEKEQDVLKKQLDKAYDFLEQGIYDTDVFLSRSQALNDRIQDTQNSIKSLQEELHREQMRKEGIEEIIPKAKHVLEVYGSLTDAKSKNELLKSVLERVEYYKGKSTRWSGNPDNFEVVLFPKLPK

SEQ ID NO: 22575 - protein, 524 aa, synthetic construct
MPKYNPEELLPAVAYYRYSPGGGQTEQSIEGQRRDCMAYAKSHGYVIVKEYIDRHLTGRNDKRPAFQLMMKDAELHRFDTLIAWKNDRISRNRRDALNYKDQLRKCGVQICYAEMDIPHGPEGILMESLMDGLAEYYSAELAQKIRRGMTESAHKCRALGSIPPFGLRVNKEHRYEPDPTTAPYVRWIFQQYAQGVQITEICYALNAKGVRTSRGNEFNKNSLRTVLSNEKYIGVYEAKGIRTENAITPIVSQELFDMVQQRIPQNAHYGRKLNGPRQFPLSGIAYCAICGAPLIGDSGTGKNGKLHTYYACTAHKHKHGCTKKNIRQAKLEEMVYDATANMVLCPSITRAIAKQVEASAAADTSHAEEMQAVQAHLKDIEKRINNILAAMEEGSFSKAVSSRLTTLETEQSRLEKQLKNLRRVKPNITVSRVEYMLSTMCRNPAEQQPDHLKRLLQVFVERIDLSEETMSITYALTKKSAVLSSTADNPTVKTLHYIDIKQCSTIACYGGADGSRTRVRKEIG

SEQ ID NO: 22576 - protein, 551 aa, synthetic construct
MDTSKYMPACYCRVSTVHQIDKESIPAQVHMLTNYCVGMLQCKKSDIEFYIDAGYSGKNTKRPQFEKMMDDVESGKRNIVLAFKIDRISRNLLDFARFLEVLKSHNADFVSLSESFDTSSVMGQGMLKLVCLFGEMERGITRERVMAVSKDIISRGGHLGAPTPLGYNYDKGTKKYSINESEAKTIKLMFKMVQDGYSTNYIANHLNDHNITSKRGGLWTSTTVNHILHNPAFKGLYIWNRKTSGRQKVKDKKEWMYQKDVYPVIIPEKDWQAVQDLLKNRKTGRAFMQSTAPHFFSNLIICGECGRLLRYRSDRPRRSGFTPTIYTCPGHTFHWGCPNSAYLSDIVLAPFVLRYISNMYKLSWITDSVQSSQQLNSILLDGMPSNCRLANLSTIYGLFTRANTEPVPGDVAIIKAAANNAKVEREKKLAKYYKALDRLKDLYLYGDSDLSKEMYVAERKKIELKIASIMGKTQKEEKQVSPKLSIDASKYETILSMLHDTADYMQILEKCGHKLLADFFHDCIKSIVTSNRQVVRITFSNGVSHNFIYEN

SEQ ID NO: 22577 - protein, 540 aa, synthetic construct
MSVDIKWNVPQKGKEGDLAAVYARYSSHSQGEQSIEGQLAEAQKYAAAHGYTIVHEYVDRAKSGRTDNREEFQRMLKDTAKKQFNVIILWKVDRFGRNREEIAINKMKCRKNGVRVEYVAETIPNTPEGVILESVLEGFAEYYSLQLSQNIRRGIAESAEKCQVTGGNRPLGYKTGPDKKFEIDEDTAPTVRLIFKMYADGATVTEIVAKLNELGLRTLRGGKFTHNSLHTILKNEKYIGIYNNHGKHIEGGVPRLIDDELFYKVQEMLKVNKRAPAKTWARADYLLADKAFCGKCGAPMFGESGTSKTGARHNYYICSHKKRFKTCDKKAVRQADVEDLVIKATCDLLADTELLDFIIENTWQYYLAQDNSQEELRNLTRQLEQTDLAIKNLIRAIEAGILTDETKSRMDELTTQKAELKAAIADRELARGFHLQREHIAFYLYDLRNADRTDREVQKRLIQTFVNSVFVFDDCVKLTFNFSGNKSVVTLKMLQAAEAGEVFGRYASCSTKSDRVLDTIPVKNPIVLSCLCFSLCLLAF

SEQ ID NO: 22578 - protein, 537 aa, synthetic construct
MPNAVIYARYSSHAQRDASIDQQLSVCRAFAQRGGIDVVDVYTDRALTGTNDNRPGFRRMLADAAKGGWNYVIVYALDRFSRDRYDAATSKHKLKQAGVKLLSATEPIAETPAGILMESMLEGYAEYYSRELAAKVRRGQMDNAKKCMVNGSLPLGYCKGPDGRYAVEPTEAAVVQEIFRRVGAGEPLANIIDDLNDRGLRSKKGQPWNKSSFNRMLANERYTGIYIYQDIRIPGGIPAIVTQAEFDAVQRAAISKKNPRRAVMPDAPMSRRRQDGVYLLTGKLFCGDCGSPLIGVSGTARNQSLHHYYACKGRISKTSPGCGLKNIRREDIEYEIAAAIKQTMLTPETIQAIAQATYDYQCEAYANPDLTLLEDQLQETNRALKNLMSAIEQGLFTPTTRDRLLELELQKDNLTARLAVAKSRAADLPTREEIIAALDYYANGDLTDPLYQEALIDTFLVRAYVHSDHYDIYFSPDAKTKTEFPIGFTDATKPVFALLNGSHRLPEGPPTNVIRTSPTEVVCIAGLYRFTVSRPSR

SEQ ID NO: 22579 - protein, 524 aa, synthetic construct
MRSVTVIPASVNKFSAQPLSAKEKRKVAAYARVSTDEEEQQTSYAAQCDYYEKYIKSRADWAFVKVYADEGISGCNTQKREAFKAMVQDALDGKIQLILTKSVSRFARNTVDSLTTIRKLKEHGVEVWFEKENLKTFDPKVEMILTILASLSQEESRSISENVNWGIRKKMADGKFTLSYSHFLGYDKGEDGTLVINESEAKVIRRIYALYIKGMSPYGIAKVLTEEGIKTPGGKTRWSDSTVKSILRNEKYCGRALLQKTFTPDFLTKKTVKNTGQVPSYYVEHSHAPIIDPDVYDMVQRMMEGRKRGKNRMSSVGIFSSKLKCGDCGSWYGSKTWHSTDKYKKVIWQCNHKFHGKKCSTLHFSEGEIKEIFVKAANMLIAEKSEIIAAYERMKEKLFATAVLEEKRKELENELRVTAKLVDDCIKENARIAQDQTEYEERYQSLVERYEKEKNRHDATIEQINDRTARGEQVSIFLRKLSGLDLIAEFDDDLWLSMVDFITVHDKAKVTVTFKDGSEIKLDK

SEQ ID NO: 22580 - protein, 555 aa, synthetic construct
MAEVRKIEPAVIALKSRKRVAAYARISMESDRLNHSLSAQVSYFSECIQSNPEWIYVGVYADSGISGGDIRRRAEFKRLLDDCDAGKIDIVLCKSISRFARNTVDLLETVRHLKSISVEVRFEKENISSFSSDGELLLSILAGFSEEESHSQSENAKWAIQKRFAKGKQWHVAAYGYRWNGETFVICEEEAKAIRVIFDNFLKGVALRRTAKWLKENGHACSMPFIRYVLENPVYVGDVILQRYFTENPRTHKIIKNTGQLPRYLVTDNHAPIIRRETFEKVQKKIKESYEFNPAAHRIVKPSCFSAKVICGKCGRNFVKGLAKSNRHDGLQEHWYCFGKLRKKNCDAKNISGHRLRLACCEALGLDDFDENVFARTVEKIHTADTDVLVFHFYDGTIKTARIHYFSQEEKKYTDPHRKPFGYTWSKNGYVIVPEEAEAVKLMYQYYAEGWKIADISRKLEAMGYKSVRGKISRRVVTSSLDSDFYIGHRTVKGQFTASGADEWIENDHAPIVSKELFDTVQKRRAVELKKQERRIATRRRMDDEKRNGHPRQCQ

SEQ ID NO: 22581 - protein, 511 aa, synthetic construct
MKIRRVQPSPILQKKLRVVAYARVSVDTLHHSLAAQVSYYSSLIQKNPAWEYAGVYADEGITGTSTVYRTEFKRLIADCNAGKIDLVLVKSISRFARDTVDCLHTVRKLKEKGIAVRFERENIDSTSEDGELLITIMSSLAQEESRSISENTIWGKRKQFAEGKTSVGYSAFLGYDKDFKVNPEQAQVVKLIYKLFLGGRSFYAITKELEKRGIKSPSGKDKWYISTVRSILTNEKYRGDALIQKEYTADFLDKTRRKNTGEIPQYYVEEHHEAIIPPDLFDFVQSEIKRREQNGKHSGVSIFSNKIKCGSCGGWYGAKVWHSTDKYRRVIYRCNKKYAHKGKPCSTRHLTEEEIKQTFVKALNCLVEVKENVIAELRSLIDGICQTGKLIEEHDRIEQELTVLAERLELLIRENARVAQNQTAYLKQENEIRALYVEKQGHLARLDEQIAEREGKRKTLESMIQVVCGINGEQVAFDEELWGGLLDHIVVKEDGTVVVVFKGGIEIGVGG

SEQ ID NO: 22582 - protein, 490 aa, synthetic construct
MLGSILNAGVARMIRKVAIYARVSTTNQAEEGYSIDGQIDSLEKYCEAMGWDVYNKYIDAGFSGGSLKRPEMANLINDVKKGLFDTVLVYKLDRLSRNVRDTLYLIKDVFNINKIDFVSIQENIDTSSAMGTLFLTLLSAIAEFEREQIKERMQLGKLGRAKSGKSMMWGRTSYGYDYKKETGSLIINPAQSLVVKYIFERYLAGRSITKLRDDLNERYPKEISWNYRAVRGILSNPVYCGYNQYKGQLFPGEHESIISEYVYKRTQEELKIRQRTAAEKTNPRPFQAKYMLSGMAQCGYCHAPLKLIMGGIRKDGTRFIRYECYQRHPRKTTGVTVYNNNQKCHSGAYDKDELEKYVITEISKLQHDQSYIEQLFSTQSSAIDRDSYQKQIDELTKKLSRLNDLYIDDRITLDELQKRSSEFMTMRTALEEELKNDPEKQSQERRNNIKQVLDCEDIASIDYDGQKAIARALIDKVQVTSERIVINWRI

SEQ ID NO: 22583 - protein, 435 aa, synthetic construct
MAAYCRVSTDQDEQLSSYENQVRYYQDYIRQNPLYELVDIYADEGISGTNTKKRTEFNRLVGDCRKGKVDRIIVKSISRFSRNTLDCLKYVRELKELGIGVTFEKENIDSLDAKGEVLLTILSSLAQDESRSISENATWGIRKKFERGEVRVNTTKFVGYDKGENGNLIINEEQAKIVRRIFRDFLQGETPESIARTLKEERVPGWNGKVNWYPTTIQRMLKNEKYMGDALLQKTYTVDFLTKKRSENQGQVNQYYIEGNHEAIINKEEWELVQLEVERRNQFRQDNHINFYIIQCEQNPFTCKVFCKECGGLFGRKNWTTSRGKRPVWQCNNRYKVKGIQGCTNRHIDEETLQQAFLRALEILRENKEKLQEKWDNFRQEQKLERYHATQLEELLGGDQEEFNGRKMCQVLEKISLGEDGNITVKFLEGTEVNL

SEQ ID NO: 22584 - protein, 407 aa, synthetic construct
MKPEKKRVCAYARVSTMTEKQQDSLTNQQAYFIHFYQNQKDVDFIGVYYDQGISGKLAKRPGFQQMLEDCRAGKIDIIHTKSISRFARNTELLLAVSRELKTIQVDIFFEEQNLHTLSNEGEVMLTVLASYTEEELRNMSENQRWAFQKKFQRGELVINTKRFLGYDKDENGELIINPKESKIVKRIYNLYLSGMGVHAIAKLFNEEKVSTVDGGKWYSSSITNILKNEKYKGDAILQKYYFAEIKAKQRLNQGQVQQYLITDNHEAIVSREDWEVVQKRLRQNSKRDPRIDYNRRYPLSGLLKCEHCGSTLKRQKYYKGKVVWVCSKYIREGKVACIGMRVPDGAVQDWNIHEPTVVKEENIGGKKYYSYSCQENYTSRAESTHSENPDGGLLPSVHRPRRTAIKL

SEQ ID NO: 22585 - protein, 522 aa, synthetic construct
MKTAIIYARVSTTRQSDEGISIESQIELGMKKASDLGANVLNVFHDDGKSGRSDRRRAFQRAIQYCTFEQVDYFITWNTARFARNRIDAASYKRLLEGVGTRVIYVSMDIDNRTDEGWFSESLHEIMDEHYSRQVSRDTKRSMMKNARDGYWNGGFIPLGFKTEEVGKRKKLTVDEQSAPIVREIFRRYLAGEGTKSIAIELNRRGLSLRNKPFSKDNIRLILGNFVYIGMSIFNRTTGRRPNPESEWVMYETHNGIIDKEVFMAARARLEEGKETVGKGSPLSQHVFTGLLKCGKCGLAMRIETATGRSRTYSYYNCSGYQKGHGCGSRRINAEKFDRYLLEVVLDKVLQADIVADFITEAQQMFLDKRSEKQPRIDLIQSELRDIRHRRQALYDILEKMGTAAPNMDEMLLRAKSYTDREKLLTNELESINNEPEYEPISDTDLKDAVNVLKGVIMKSKSPEKIRAMLQHFIERIDVNDDEIMIHYRPELIIKEKCPEPNVVQSMDSWLPDLGSNQGPAD

SEQ ID NO: 22586 - protein, 688 aa, synthetic construct
MEAGTTLGGAVAAGADPFTAMAAQLTPKRAVSYIRVSTREQAQRGGSEDGFSLPAQREANKRKAQSMGALVVKEFADRGESARSANRPELQKMLAYLKQDGGIDYVIVHKLDRLARNRADDVEINRAFEEAGVRLVSTSENIDQTPGGMLLHGIMSSIAEFYSRNLANEVIKGMGEKARNGGTLGKAPLGYMNVRARDENGREVRTVALDQQRAPLLRLAFTEYATGNWTVRGLAEHLAELGLTTAPSPARPAKPITATRLQNILHLPYYKGVISFQGVDYVGAHEPLVDSQTWQTVQQVFASRRTGERQRTHNHFLKSTAMCGVCGARLLVQRAKNSKGVVYPYFVCARRHRVHDCTFKAVLIEEVEELVAALYQRIQLTTEDRAKVECYLQGELAQIKGEKDRTARSLTTRRTNIEDKRRRLLHAHYEGAVPLDLLKEEQAQLTAELERIERQLDAYRADVTATRRVMEAVLDLMQDCSRLYSAAPAHLKKLLNQVFFERILVNPCVDDDGTIIMPGTSPSQSDSSNAADDVGQVSDRAERQHTDVVSPCMSDELAAWSVPEDGGDGDMTTERAAMVCPRPLPRMTSGNNGITLTACLRFPFTYLASPALRRAAERDTIGLNKQKTGAQPHQQNTPIPANKHSPRHNLPHEAVPLGCCSYTRVLVPPVGLEPTTFGLKVRSSDQLS

SEQ ID NO: 22587 - protein, 481 aa, synthetic construct
MKTTNKVAIYVRVSTTSQVEEGYSIDEQKAKLSSYCDIKDWNVYKIYTDGGFSGANTDRPALEGLIKDAKKRKFDTVLVYKLDRLSRSQKDTLYLIEDIFIKNNIAFLSLQENFDTSTPFGKAMIGLLSVFAQLEREQIKERMQLGKIGRAKAGKSMMWAKTSYGYDYHRETGTITINPAQALAIKFIFESYLRGRSITKLRDDLNEQYPKHVPWSYRSVRAILDNPVYCGFNQFKGEVYPGNHEPIITEEVYNKTKEELKIRQRTAAENVNPRPFQAKYILSGIGQCGYCGAPLKILMGVVRKDGTRFIRYECHQRHPRKTKGVTVYNNNEKCDSGFYEKDDIENYVLTEISKLQDDTGYLDKIFSEDSVETIDRESYKRQIEELSKKLSRLNDLYIDDRITLEELQNKSAEFISMRATLETELENDPALGKDKRKADMRELLNAEKVFSMDYEGQKVLVRGLINKVRVTAEDIVIKWKI

SEQ ID NO: 22588 - protein, 433 aa, synthetic construct
MPRAITIVPKPPKLEQKKRVAAYARVSSGKDAMLHSLSAQVSYYSDFIQNHDDWLYVGVYADEAKTGTKESRADFQRLIADCRAGKIDMVITKSISRFARNTVTLLQTVRDFKALGVDIFFEEQNIHTMSGDGELMMTILASYAQEESRSASENQKWRIKRNFEEGVPWNGAMLGYRLKNGRYEIIPEEADLVRRIYDEYLSGDGYLTIAKRLNVDGIPSRFGKQWGQSAISKILSNYTYTGNLILQKTFRENHITKKTIINNGELPKYHAEDAHDAIIDIETFQAVQAEKTRRAARFLKKPAPKKAYPFTSLLVCDGCGKNYRRKVTKTGPVWVCGTFNSMGKAACASKQIPEETLQAVTAEVLGQMDFPEELLRRLIKSILVCNGNVLIFRFFDGSEITRTWQDRSRRQSWTDEMKATARQKALERRNQNA

SEQ ID NO: 22589 - protein, 526 aa, synthetic construct
MPKVTMIPATINPLTHLPSVAARKRRVAGYARVSTDSDEQFTSYEAQVDYYTKFIQSKPEWEFVKVYTDEGISGTNTKRREGFKEMITDALDGKIDLIVTKSVSRFARNTVDSLVTIRKLKENGVECYFEKEGIYTFDGKGELLITIMSSLAQEESRSISENITWGQRKSFSDGKVHLPYKRFLGYEKGEDGRPAVVESEARVVKLIYRLFLAGKTQAGICKYLEELGIPSPGGKQTWSKTTITSILQNEKYKGDALLQKKFTVDFLEKKMKPNEGEVPQYYVTGSHPAIIEPDEWEQVQAEFARRKALGKAYSGKSVLSAKLVCEDCGAFFGPKVWHSTDQYRRTIWQCNCKFASEEHCHTPVVDTETIQRLFIKAYNLMMQDRVQIIKEIEAWRQKLMVFGTLDADIERQLEETQVVAELVKAAVKENASTAQSQEAYLKKYKALTERYEKAAAELERLQSLRTARSQQDKKMALYIRTLKKQPEVMHDWNDTIWTVMIEKTIVHKDGQITFVFQNGTEIKVGA

SEQ ID NO: 22590 - protein, 597 aa, synthetic construct
MANKVVKVIPARPQGIIIDQAGVIKRKRVAAYARVSTEKDEQTNSYEAQVNYYTNYIQANPEWVFVGIYSDAGITGTSTKKREGFKRMIDDAMNGKIDLILTKSVSRFARNTVDSLVNVRKLREKGVEVYFEKENIYTLDTKGELLLTILSSLAESESVSISQNTTWGQRKRFADGKVSFAYSNFLGYDMGQDGKLHINEEQAKVVRRIYEEYLLGYTPSYIAKRLTADNIPTPQRKKVWYQGVIDSILTNEKYIGDSILQKTFSTDVLTKKRKKNEGELPQYYIENNHPAIITDEIFEMVKEEMARRKSAGLMTNVSCFSGRILCGDCGGYFGRKVWHSNQPNRTIVWQCNKKFSNPDACGTTSIKEKAIEEAFVRAFNEMFSRKDEIIENYKLCIDVICDDSKFQEGKNELDKALEEKTIVIKDFLLKCSKTEENIEESNARYDVLIKEFEALNAKRQKCLDMISSLAAKRVKINSFLNILNSTEGVINSFNEVLFQKSVNHMVINHDLTIDVIWRDESKTTTYIERGVKEVKKSAPRIKPEKVLSDHTCLCCGKQLYITPGKVQRIFCNKKCGETYRRAKAKEARLENNTISHA

SEQ ID NO: 22591 - protein, 430 aa, synthetic construct
MEKIVKDIMPDLRANDTIKRVAVYARVSCEKDTMVHSLKAQIDYYRKFIMKNPGWKFAGIYADEGKTGTKEAREQFQALLTECRNGNVDMIITKSISRFARNTVTLLSITRELKELGINVYFEDQKMDSMTSDGQLMLTLMAGIAQAESKDCSDAVKWRIRHGYEQGRASSFKILGYRWDDGNVVMVPEEAPLVKRIFDLYLSGKGANAISKILNSEGTTGAGITKWSSTTIRNILRNEKYYGDLLLQKSFVEDHINKRKVINNGELPQYFIEDDHEAIIDRQAMSDVKNEIAIRRARFYHGQGKESCLTSKIKCPYCHANYHRKKINGISKWSCATSNRKGKSMCPKSKDIREDVLLAILAHQLGYKDFDEKLFAEQVDYIECFDDHIITHFYDGSIKNSKWSNPSRKDSWTDDMKEKARQRGLNQYGK

SEQ ID NO: 22592 - protein, 421 aa, synthetic construct
MKLRKIEPLKPKQKKLRVCAYARVSTDSLKQGESFENQVSTYERVIKSNTEYEFVSVYADQGMTGRSENRPEFQRMIADCKAGKIDLIITKSISRFARNTTTVLKYTRELKEIGVGVLFEENNINTLSSEGELMMTVLASFAQEESRSISENNKWTLKKKFERGEGMVNTARFMGYDKDETGDLVINKEEAKVVRLIFKMYLSGIGCHRIAKALNEEGVPTIAESSWHASTIKGMLTNEKYKGDFHIQKTYIPEGTHQSVKNNGQVQSYYVTEDHPAIISAEEWQQVQELMEYHRKQRNIGKGEKYQKRYPMSGMLVCPYCGKSLRRRYVYNRKVEWLCATYIHKGKEACKGIRIRDTELTGLSFSEPMVVEEVMINGEKHYGYTSKRAYDAGERAADRIEKESSSVLPRVNGPRRTVIKL

SEQ ID NO: 22593 - protein, 426 aa, synthetic construct
MRVKVINKRPASVLQKKRVCAYARVSTDSRRQEDSLENQMETYERMITGNPEYEFIGVFADQGISGYCENRPQFQRMMEKARAGEIDLIITKSISRFARNTVTVLKFARELKELGVGIFFEEQNINTLSGDGEMMLAVLASFAQEESRSMSENNKWSIRKKFERGEVMITTSRFLGYDKNEYGDLIVNRKEAEIVSLTFDLYLLNVGSSRIGELLDYLGVKTVTGTTWESGTINGMLCNEKYKGDFHLQKYYTPENKRNHTRKNNGEVQSYYISENHEPIVSPEVWEKVQEVREQRKRDRNIGQDSTMKFQNRYPLSGMLICPYCGKTLRRRQVYKKKIQWLCSTYIEKGVKACKGIRIDDAELQGLNITEQTVIEEVVKNGKKHYCYTSKADFDCGIRNSTVSAEIEDGSVLPSVNRPRRTAIKL

SEQ ID NO: 22594 - protein, 526 aa, synthetic construct
MPKVTMIPATVNSLTHLPKASVQKRRVAGYARVSTDSDEQFTSYEAQVDYYTRYIQSKPEWDFVRVYTDEGISGTNTKRREGFKEMIADALAGKIDLIVTKSVSRFARNTVDSLVTIRKLKENGVECYFEKEGIYTFDGKGELLITIMSSLAQEESRSISENITWGQRKSFADGKIHLAYKHFLGYKKGEDGRPAIVEEEAVVVRLIYRLFLDGKTQAEICRYLEDLEIPSPSGKAKWSKTTVTSILTNEKYKGDALLQKSFTVDFLQKKTKLNEGEVPQYYVEGSHPAIIEPDEWNHVQAEFARRKALGNAYSGKSVLSAKLVCEDCGGFFGSKVWHSTDRYRRTVWQCNNKFKGGERCLTPTVDTETVQQLFIKAYNQMMGNRKQIIEDCELMRKKLTDFKSLDADIERHLEETQIVAELVKAAVKDNAVTAQSQEAYLKKYESLTKRYETAAAELARLQNLRTLRSQKDKAVALYIRTLKKQPTVLSEWNDTLWTVMVEKAIVHRNSEITFVFYNGTKVKVRQ

SEQ ID NO: 22595 - protein, 534 aa, synthetic construct
MPRKPAKHPAKPKRGKKLEIEEPGVLYGRYSSHNQKDISVEQQFEKGYELAAEYGIRIIDTYADRAVSGRTDKRRDFQRMMTDAAKGKFRYVIAWKSNRMGRNMLEALINEARLQDMGVRVLYVEEDFDDTAAGRFAARSMMNVNQFYSENMAEDIKRGLYDNAANCMVANGHLPYGYKADETLHYAIDEPKAAVIREIFTRVSCGEAFVDIMASLNARGIKTSYGRPWGRSSFQKILSNERYRGIYIYGDVRKEGGIPRIISDELYFKVQEVITTKKNPQGRHRVNGDYLLTGKLFCGHCKSPMTGVSGTGRSGNLHYYYVCQKRRTEKTCDKKNVRRDEIELQVAQAIKDYALKDDVIEWIADSTVAYNERKEAESKVGILEDQLAGTEHGIKNIMSAIEQGIITETTKSRLVELESERAAIKANIAAARADIVTVSRDDIISGLEMFRDGDVHDKKYQARLFDTFLVAVYAYDDDLRLVFSFSGNKNTIQIPIESAVNAVENNEAECSFKLCSAPPKEMDMTFRHVHFFWR

SEQ ID NO: 22596 - protein, 525 aa, synthetic construct
MYLEISNPMDYHAALYIRLSKEDESEGPSQSVTNQKSLLDEFVQKHRLQVYDTYIDDGWSGTNFDRPDFQRMIGDIEAKKVNMVITKDLSRLGRDYIMTGHYMERYFPEKRVRYISLLDGIDTGVESTANDITPFRAIMNDMYAKDISKKIKSVKRDKQRKGQFIGGKPVYGYKMHPTEKNKIIIDEEVAPIVRRIFAMALDGVSCRQIAAMLNEEGVPTPATYCGWNMGRKGPYAGLWSSERISDMLQNETYIGNMVQGRQVKISYKSKKCLHQDRNNWVVVEDTHEPLIDAESFRKVRMLVNSRKRTRSRTYDFLLKGLIFCHECGYPLGVLNRPNAKGEETLYFVCRTYQRFTKNSACTTHYIKEKTVTDAVIAKVREVCEDYLTAEALLPVAEKAVKEASQENKTAAEISALQNKSANLTEHLDRMYTDRLSGLLPEEDFQRIFTRIKDERAQLEERIKELQQQQKNPVSQTERAKDLVQRYLDSAYANRELLVSLIERIELTADREIIVKFRFAELQQAG

SEQ ID NO: 22597 - protein, 537 aa, synthetic construct
MARKKKVSPGNRLVAYYRYSGGSQQTEQSIEGQRRDCEAYARQHGLTIVHEYIDRHISGRGVESRLAFQQMIADSSKHLFDLVICWKTDRFARNRYDSAVYKKKLRDNGVRILYAAESSVEGPEGIILEGLMESLAEYYSAELAQKMRRGMRESALKGRAINPSRPLGLTTDEHKRFIIDEKNAPTIRFIFEHYAAGESSASIVEQLNAAGLRTSKGNAFNKCSIPRIIQNEAYHGVYICKAYDVRIDGAIPAIIDDDLWKRAQKMLTLNKQHRAPHSSHADYLLSGKLFCGCCHSLMRGISGHNCRNDVYYYYACGNKADGGTCKKKNIPKDVAENLVVNAICENILRPDTLEDLADAIAAAQQADVNQPDPERAMLEQNLADVRRKINNIIESIENGTASSRLSARLADLEQQESTLNYQLESLKEVHPPVLDRERILFLLEQFLISPNERTEDYNRRIIDTFVNRIEITDTEMLIYFNLSEASASEKQKNSQSNSCSTGNHLVQQNWTNPNFFLLPHQPSKRPQIGRFGCHPCS

SEQ ID NO: 22598 - protein, 517 aa, synthetic construct
MTAVIYARYSSDNQREESIEGQIRECTAYAEKNGITVIKHYIDRAFSAKTDNRPEFQQMIKDSGKKLFDVVLVWKFDRFARNRFDSANYKMILKKNGVHLISVMEPIAEGSQGILVETLLEGMAEYYSAELSEKVIRGQTENALKGKCTGGTGTIGYKIDEDKFYHLDPLTAPLVLEAFQRYDNGDKMVEIVNFLNDKGVRNMLGGKMTHSSVNTMLKNRRYIGELSFRDIVVPDAIPTIVPKDLFDRVQKRLDKNKRAPACGKADEEYLLTTKLFCGKCGTLMFGESGTSATGRTYYYYKCANVKRRKGCNKKTVQKEWLEDLVVQETMKLIQDDAVIDKIVQLVMDVQNQENTTIPLLEKQLREVNKKLDNLMKAIEDGLYTRTTKERLEALEIQKDELTAKIADEKLKKPSFNEDFIRFWLMKFRKFDISQKKQRKALIEIFVNAIFLYDDRMLITFNYKDGTQTVRFEDALTADGVEGKSSDLSSSAGPDDSQSNNCSTGNFFVFQKQTLRKD

SEQ ID NO: 22599 - protein, 463 aa, synthetic construct
MTTKVERCAIYIRVSTTEQMMHGKSLEAQKEYLTNYAREHNMAIVGVYADEGKTARKELKKRKAIHSLLQDVEAGKIDVIIFWRIDRWFRNLSDFYKVQDILDSHNVRWISTSEPGINMETRDGRLQLNVVLSIGQNEVDTTSERIKFVNESSIRSGKLIFGDANMGYGYKSGIVDGQKRMVKDPDREHVVDAFYKYFFKHQNKCATLRYIQETYDPDFSFGIMRTLLSSEFYKGTYRGFPYCPAYLTEDEWNKLQKIQKRNVKATPSGRIYLFAGMIRCPVCGQLLCGTGCSSIINRKTGAKRTYCYYRCNRAMIDHICSYRHRLSQNLVENYLLDNLENEYKNYKVKCEKIEKEKEKQKKKQSPEKLRKELDRLNFLFQKGRIEWDYYNEEYSRVESELNDLQNSLPEPAPNYSYLEELLDTDFRTMYDQLSQENRRAFWRSIVQEIHVNEDHAITSVDFL

SEQ ID NO: 22600 - protein, 499 aa, synthetic construct
MNVVLYMRYSSDRQTEQSIEGQKRVCMDFCERQGYNVVGEYIDRATSAYKETAKRTNFCRMIRDSSNGLWQGVVVYKLDRFARNRYDSATYKVRLKKNGVKVISATENISDSPEGVILESVLEGMAEFYSKELSQKVSRGLNESAHKCNSTGGAIPLGYKTVNKKLTVDEPNAQIVKEAFDLYAGGATISEICEKFNSQGYRTKKGTEFNKNSFKSMFRNEKYIGTYTYKDIRIEGGIPAIIDKETFETVQKRLSANAQAPARGKARVNYLLSQKLFCGHCGANMTGDSGRSKTGETYYYYSCSTRKRFHSCKKRTIRKDLIERIVAENAMRLITPEMINTIADMAIKCNRDDIESDAIIPALTADLKEINTSIKNLLKMVERGVESETLDSRLKELEKRKKDTELRLDAAKSEYLTLDKTVIVGWLSQFLSGDIEDEDFRRHLIDTLINSVTVWDEPDGGYKITTVYNLKGNTQTYRVNADGSSDLERNSPPKKRQFS

SEQ ID NO: 22601 - protein, 502 aa, synthetic construct
MEIQIREGNREQKRKLRVCAYCRVSTDADEQENSLENQIRHYETVIKANPSYEYAGVYSDFAISGFKEKRPGLQKMLADAQKGKIDLILTKSVSRFARNTSIVLEATRKLKELNVGVFFELQNINTLSGEGELMLTILAAFAQAESESGSVGAKMVYQRKYEAGIPVQYLERSFGFKKDERGVYIADEEEAVWVRKIYDMAAQGYTLAAIKRYLNENNVKTVGGAKWLDSTVLRILENEIYKGDYIMHKHFVNEERKLVRNRGEVDAWYIEDDHEAIVSPELWQKAQDALEAKRDYLAEGSVIEEFTEENYPYMNKIFCARCGHPLYKRIYSNGNRLNWGCSGTKRYGKSFCEGINIPDGVLRGAWHFDENMYIGEKQTDKGKKEFTYLKEASWKRRHKKKEPEPIPENTETEYPYREKIFCGLCGSRLVRHVNTKNHKVIWVCNGRKRKGKDFCDGTRVPDTIIKGWGEIKKDIYIQRKDDKNGKKRYSYTSKKPKGADRA

SEQ ID NO: 22602 - protein, 406 aa, synthetic construct
MRIKVIKPMKAVQQQKKKVCAYVRVSTDSLQQEDSLENQTTYFKGFITANPEWEFVGIYSDQGISGYKENRPGFQKMIEDARAGNIDLIVVKSVSRFARNTETVLKFSRELKSIGVGIFFQLQNINTLSGAGELMLTVLAAFAQAESEGASDNAKMTYKRKFESGILAHGLECTFGYKANAQGDIVVDEEKAAVVRQIFDLAEQGIWPSKIKQYLNKNGVPGCTGGDWDDTAVFRVLHNVSYKGDAILQKTYTDSRRKRHKNEGQVDQWYIAENHQPIVPSDQWDKVQEILQKRSEHLQTPALPKTDKPRSSRNTYPLSNMMYCPHCGAKLIHNWSNKGRQEYWVCRTNNKVSKDACKGVWLPAEVANSWGEITEPIVVVQYEDEYGMRRFTAYPKDEYDAFKRED

SEQ ID NO: 22603 - protein, 467 aa, synthetic construct
MAREIVHIPARRGMSNRATVTDRKIRVAAYCRVSTDHEEQINSFENQVTYYTEYINRNPNYELADIYADEGISGTNTRRRDDFNRMIADCEAGKIDLIITKSISRFARNTQDCLNYSRKLKELGIGIQFEKEGINTMDSSGELLFTILSSLAQDESRSISENCQWGIRSLFKQGVLHLNTNRFLGYDKDEKGNLVINEEQAAIVRRIYTEFMNGINPDVISRRLRDEGVPGCMGEAKWQASTIFGILRNEKYMGDAILQKTFTSDYLTKKTVKNEGQLEQYHVKGDHEAIIDPEYWDAVQLELERRQNYMTAHSLRTMGRYTDEQPFSNRVLCGECGKVFWRRTWYRLNNTYKVWQCGNRYREKGVVTCHSENLKESDLHGAFVMAWNGILENRAEFTETWKAQAESGNALERFRAKQMLELTRMKPLKEIDLLLVGKVLDYVIVQHGGELEFHFLDGTQLAVEVAE

SEQ ID NO: 22604 - protein, 505 aa, synthetic construct
MNHSILSAMYLRKSRADDPHEDIMETLHRHESILRAIAKRGKYLIPDDCIYREVVSGENIFSRPQMVRLLEDITNGKFQSVLVVDIDRLGRGDMRDQGLILETFKNSDTLIITPEKIYDLNNEMDEELTEFKGFMARREYKMITKRLKRGREQTVKAGGFVAEPPYGWKRAKINNLPSLEPHEVEGPIMQMIVEMYGNQEPITVIQERLSAMGVCNRKGVPFCRSSIRHIATNPVNAGLIQWNRYKNIRKGENASPTGYEIENPPDQVIVVKGVHEPQVSMEAYQKCVSVCKNRSNPSVKKGMHGVVRNPLAGIVICSNCGSRMQMQHSSTKGSSTLLCTTSGCMSGVDIHKAELALLDILRAKLEEIRTGQGKKQQDNTLAELQKAIHSAEKNIQSLKKQQDKLYTLLEQEVYSVDVFKERNQVLEHKLTEAKDQLKLLQNQMDEVSNRKAERLAQNIENVLVHYEGSSPKEKNRLLKTVVEKALYFRESRTSPFSFDVTFINM

SEQ ID NO: 22605 - protein, 548 aa, synthetic construct
MSRQSDNKITALYCRLSRDDELQGDSNSIVNQKAILSKYAKENGFKNTLFFVDDGYSGTNFNRPSWNELLERIENGEVSALIVKDMSRLGRDYLKVGFYTEVLFVEKGVRFIAINNGIDSANQTDSDFTPFLNIINEWYAKDTSKKIRAVMKSKGEAGEHLCTNPPYGYMKDPDNRKRWLVDETAAEVVKRIFTLCLEGFGPSQIARILKEDKVITPTIHFQQTGRATRNTPPDNPYHWTGDTVADILERPEYQGHTVNFKTYKESYKSKKTCYNPKEKQLVFENTHEAIIDADTWERVQELRKNKRRPTRTGKTNLFSGIVRCADCGEKLYYCTSKNFEARQDHFVCSTSRLKGKEVCPTHFIRAVVLEQGVLAHMRLVIACVSTYEERFRKAMGAKQKAEAKKELAAKRRQLTQAERRIEELDRLFKRIYEDNANGKLSDSRFQMLSDDYEREQEELREKLLQLNEEILQQEEQAENIDRFICKVRKYLDLDELTTAVLNDMVKAVYVHTPDKSNGHREQQIDISYDLVGILPASLLGNLSNGETA

SEQ ID NO: 22606 - protein, 492 aa, synthetic construct
MNVAIYLRKSRADENNPLETLERHKEILLSYAKDNNLTVIDIFEEVISGGMLYNRTEMLKLLDAIPSHIYDAVLCIDLDRLGRGSAADSEKIFDVLKENDVKIITLKKIYDLNNEYDEDYSEFEMFMARKELKFITRRMNRGRIKSINDGCFVSGAPFGYRNAVINKKHTLEVYEPEAKYVRMIFDMYVNQSMGITSISRQLANLGVLSKKNTPLHPTTIARMLRNHTYIGKIVWNKSKSVKGKNTQEKTSKDDWLYVPGLHEPIIDEDTFNKAQDIINLKYKPPMRTGTLQNPFAGLLKCANCGRAIVINTSNETVEKYRLCCRTLGCNKASALSIVEDKVFEVLTKEFKDIELSLKNIRQSHNKDKLSCLDTIATLETELKKLDKQQLRLYDLLEQEVYTKELFLERNNAISDRRKKINATIAQEREKFKLVDTSSIEERLPLLRELLTNYHSLSAAEKNSILKNFVKKIEYKREKSAPEGDIFLKIYYK

SEQ ID NO: 22607 - protein, 487 aa, synthetic construct
MPDRDLKIAAAYIRVSTDDQEEYSPDSQLRLIREYAKKNGYLLPEDFIFQDDGISAATARKRPAFNRMIALAKEKERPFDVILVLMFSRFARNREESVLYKGLLRKQGISVISIKEPAVDGPFGTLIESIIEWFDEYYLINLSTEVKRGMTEKFLRGEAMGTAPFGYRIDSANKTFVADPERAEIVRSVFRAYAGGAGFRDIAVELGAMGVTTNRGNPPDNRFVEYMLRNPVYIGKIRWTPDHKTRYSRVHVADGVEVVDGKHPPIVSMELWDAVQRRIDQRKAAYGKYQRQAAADWMLRGMIRCSACGATLILSGKNSPCPSLQCHNYAKGKCSTSHALSLRKANAAVLAGLQDAVDRLDFDMVPRRSAPVKSAATVDYGRLLEQERRKLSRCRDAYQSGVDTLDEYRENKARLESNIRRLEEQAAAIVSAPKDFDKAAYAKKVASVIRYLQTDADEAAKSEALRSVVDHITFHKASQHLAIYFYV

SEQ ID NO: 22608 - protein, 572 aa, synthetic construct
MASRIAEKLAAKKAAIYIRVSTHWQVDKDSLKVQRRELIAYVTLVLGITDYVVFEDPGYSAKNTDRPEYQAMMDRIRTGEFTHLVVWKIDRISRNLIDFAAMHDELQSLGVTFVSKNEQFDTSSAIGEAMMRIILIFAELERKTTAERVTAVMLSRASDGQWNGGRVPFGYSWSKETKTFSIVPEEAKAIRRMAELYEQYQSLLYVAKYLNDAGIVTKTGGQWTPTTVRTILTNPWYIGQYVYNVHSDGKGIEKRDSDEWITVENHHEPILNDDVFYRMKFLLTRNKRGGVPSHKTYVRKNIHVFAGLLRCGQCGSNMTANLDRRRANGFRPSQYACGSRRRKGTSCTNKYISDTTLGPFVLNYVANIIRASKNSSETTTSEVLERKLLRGEAFEDVASVSTDALGQLLNAFRFAGDAVEYRPQIAFSGDDNSIREIDTLRARRRKLDNALARLNALYLYDDEAMPEKDFVMQRGQITKQLEEVNTRIEELQSQESSEELGDDFIGKASYYIMANKLIEDRYIDYEKYIRAIDPSIPRSFLQQIIDHIVVNDGRVISITFKNGSTHTFTYKT

SEQ ID NO: 22609 - protein, 699 aa, synthetic construct
MDSNAFLNDLMSKMKLPEAKGKKKAEQSESVAQILAAMQKVRAEKKKPPVTSYAPVKEMPVNEPESMENFSQLASDVMQECRPAMPTVPAASQEKAVRVAAYIRVSSTNPAQEDSYEMQERYFMSLLAGNAGWTSAGIYSDHGISATSREGRTGFNRLLRHCKQGKIDRVICKSISRFARNTQDFLVALRTLKENNVTILFEREAMDTADAYSEFILTTLAAIAQEESRSISANIAWSNQKRFPAGNVCNKDIYGYEFRKGEYTVNENGYRYRAVFIIPEEAEIVRMVFRLFTKEELSFTQIAQKLDALHIPPPNSGCRQRQKRKPTVLPAGALKEEDKRGWTATDVRYMIANVRYCGSVLCQKTYTDHRNGHKQKVNKGEKPKYLIRNHHPAIISEELWQEAQEVWKAYTAKYRGIEKGRNERNYSKLLLCGECGRYFQGHSTTRTTIWRCATKLAQQGQKRCRMEPIYEEQIQTLLCKAFAEKFKLGEKIDAEVHEVMQMISKAPIDNARNQALKNLTEKLREIHDFDHMEQEGDFLKRQLSAVNYSIRDVHQHIRDIQAEKEALKVRCEVLGEPRDKEAVTELENRLLNEEEQLEKLEHEAQQQAEQVRYMEDYWKKLEQTHEIREKTLQWLDSLAGGTQMFLDEAVGTYVKAFVLSVTIFSPKHFRIHWFDDTCTEVECDSVFEGYQQPGMIRRK

SEQ ID NO: 22610 - protein, 521 aa, synthetic construct
MPYCMYLRKSRKDFEAESAGQGETLARHKAALLETAQRLHLAVSEIYQEIVSGDSIAARPEMQRLLADVETGKWDGVLVMEVERLARGDTMDQGQVQRTFVYTGTKIITPTRTYDPSDPADAEYFEFGLFMSRREYQTINRRLLAGRERAVREGKWPQGHAPYGYRAVKVPKGKGYMLEIVPEEAEIVKSIFNWYVNGAEYNGAFLRVGARRISTMLNSMGLTTQAGNLWSAPAVRVILKNHAYIGKVTWYKQTLRKSMSNGAVVKKLERTPERTLICDGLHEAIISEELFEAAQARLSADSTGPATKGPLQSPLAGLLYCGLCGCVMARQHEKGKPAYYVCRNPLCRCRGSKLEVVEQRVVATLAHWLTGYEITAKAQAQTVDIGALQSALDGAQRELLAYQQQQTRLYDLLERGIYTEQLFLQRQAAITGEVQRLQAAVADTEAAIAKAVRINASAREIVPAVHAVLDAYPTYTTAQEKNDALRMVLSRVEYTRIVGGFGSDPQDFEVKIFPRLPEPVE

SEQ ID NO: 22611 - protein, 551 aa, synthetic construct
MKKRINTNSAARAVIYARYSSANQRDCSIEQQVEKCRELAAREGVTVIEIYADRAISGKTDRRPNFQRMMKDASLRQFDVVLAWKSNRMGRNMLQAMMNEEQLRSNGIRTIYAEEDFDDTAAGRFALRNMMNVNQFYSENMAEDISRGLMDNASKCMSNGSLPLGYKTGKDQKVVLDEAEAAIVQEIFTRVSCYEPFIDIARDLNRRGIKTKKGAEWGRSSFHTICRNERYRGIYIYRDIRVEGGMPRIVSDELFYKVQEVLKVKKNPQGRRKRSGYEEYLLTGKLYCGHCGSPMTGIAGTSKTGAMHYYYTCQKRRTDHSCDKKAVRRDQIEKAVAIAIQQQLLTDENIQMMADETMAYNARTEIKYRLQSLQQQLYSNETSTANIMKAIEMGIITDTTKARLLALEQEHGQLLAKIDTAKAEMVPINREDFVSLLDIYRTGDVNNKKYLAALFDTFLVRVDLYDDHFKITFDPTGGKMPVDIPIGAEDSPESPGDSPESSDFEASPQDAEKFVLALHNRTKREQNEHKTTVKMVGNVFVLFCSIPSLTH

SEQ ID NO: 22612 - protein, 473 aa, synthetic construct
MEGYSIQAQTERLQAYCKAKGWGIFHVYTDAGFSGSNMQRPALSQLLEDVEAGRVDCVLVYKLDRLSRSQKDTLHMIEDIFLMNGCDFVSMSENFDTSTPLGRAMIGILSVFAQLEREQIRERMAMGRTERAKSGLWQGGGWIPIGYDYVGGNLVPNPVRAAAVRDIYDLFLAGTPITSIKLIVNKKYALDLADTTVRSVLSHRLYVGDIVWMGNVYKGKHEPLVDMVTFSRAQKLLHSRARIAASKPDPFKPRTLLGGLLFCGGCGARYLAKGNYSGHGDRRTYRPYYTCYSRAKTNKRMVIDPACRNPSYAVTMLDQKIIDEIRHIASDPQEFDAIVAAGRPDAEQKRRRNAEAEAVIMRRLDEIDTNTARLLDLYQRGLAIDKIADRLDALDKEKATLQDSLQELRMEKKAARDEEERLEPERAHALLNEFLDAVDGDADLDTRRKLLGSLIEKIIVKRTPGDFDIYWTF

SEQ ID NO: 22613 - protein, 502 aa, synthetic construct
MEIQIREGNSRQKQKLKVCAYCRVSTDADEQENSLENQIRHYKEVITSNPDYEYAGVYSDFAISGFKEKRPGLQKMLADARKGKIDLILTKSVSRFARNTSIVLEATRKLKELNVGVFFELQNINTLSGEGELMLTILAAFAQAESESGSVGAKMVYQRKYEAGIPVQYLERSFGFKKDERGVYIADEEEATWVRKIYEMAADGYTPAVIKRYLNENGVKTVGGAEWIDSTVFRLIENEIYKGDYIMHKHFVNEERKLVRNRGEVDAWYIEDDHEAIVSPELWQRAQDALETKRDYLAEGSVIEEFTEENYPYMNRIYCARCGHPLYRRIYSNGNRLNWGCSGTKRYGRSFCEGINIPDGVLRGAWHFDENMYIGEKQTDKGKKEFTYLKEASWKRRHKKKEPEPIPENTETEYPYREKIFCGSCGSRLVRHVNTKNHKVIWVCNGRKRKGKDFCDGTRVPDTIIKGWGEIKKDIYIQRKDDKNGKKRYSYTSKKPKGADRA

SEQ ID NO: 22614 - protein, 464 aa, synthetic construct
MARSVTVIPARSQKVRTGHKAVQEKKIRVAAYCRVSTDQEDQLHSFEAQVEYYTKYINEHENYEMSGIYADEGISGTNTKKREQFKKMIADCEDGKIDLVITKSISRFARNTQDCLAYSRKLKNLGIGIIFEKENINTLDSTGELLFTILSSLAQDESRNISENCKWGIRTKFKNGEMHLNTFKFLGYDKDENGKLVINKEQAKTVRRIYRDFLIGINPAQIAKELTEEKVPGCLGQTKWYPSTVTGILKQEKHMGDALLQKTYTADFLTKRQVRNNGEIAQVYVKDSHKGIIDKQTWNAVQEEFDRRERFMESHGTDRYSYGADCMPFCEKVFCGDCKSLFTRHSWRSRGIVQWQCKNHRKDGKVACTNAYVDNADLEKGFVKAFNRLVTDRDKHMERWQQMKSDGTPLEKIRAGQMMEAVENEPLTRFVPEIAQLVLCEVTVLGAKKYEFFFLEGSRVKVSV

SEQ ID NO: 22615 - protein, 667 aa, synthetic construct
MAYAKNKVVKLWTQKKAALYVRVSTRYQVDKDSLPFQRKKLKEYCKFLEIDKYVIFEDDGYSAKNTDRPHFQEMMSRIRTGEFSHVIVWKVDRVSRNLLDFAAMYQELKDHKVTFISMNEQFDTSTAIGEAMLKIILIFAELERNMTSERVTGIMLDRAEQGLWNGARMPVGYRWNEQTKFPEPDPEEVKIVQLIFDRYEEWRSSIKVARFLNNKNFKSKRGGEWTSRLIYDIIRNPFYVGTYRYNMRESGRGPLKPESEWIVRENNHPGIISKDQFDRCNKIMDENASRRDTSEMRARKFVHTFSGRLVCSNCGSNMIACKDHARANGWRPSIYRCAKRSRMMTCDNSKTVNETYLGTFVFNYIANLARVQKNFTKITSTEKLESELLKGEAFEAVSGIIPDSLNSTFQALLYSNLGNGTYVPDIALLSKFDEVQDHNQIDLLNTEIEKSKNAITRLTDVYLYDPASMTKEEFAAKKKELIKKIEEMEHQLAELLDNSEDNDLTDLSFIKKASAFLVTQRIVSKSFIDYVQMAQELDNEILKNFVDQIVDRIVIKDGRIQSITFVNGLTHEFFYSRPAELPVCKKCGGRIGSTCGCRTRTFSFNGKRYQRIKVGDPRDALYGQKNPVCPECYAKEGRWHHWLCGIELCPICGKPIQTCEHGANGKE

SEQ ID NO: 22616 - protein, 517 aa, synthetic construct
MPRKKKLQEVGGLRLVAYYRYSGGSGQTEQSIEGQRRDCEAYAKLHGMTIQHEYIDRHISGKTDDRVSFQQMIRDSDKGAFDMVICWKTDRFARNRYDSAVYKKRLRDNGVEIIYAAESNISGAEGIIIEGLMESLAEYYSAELAEKMRRGMRESALKCQAINRCRPLGFTTDAGKKFIIDERTAPAVRFIFEHYAAGESAAYIVEQLNEKGYRTSQGNEFNKSSINRIIQNEMYRGVYISKAYDVRIEGGVPAIVDDDLWRRAQAMAKLNKQKRAKYSSKADYFLSGKLYCGECGCLMKGISGHSSTNGEVYRYYACSNPKCKKHNIPKEELEGTVIQAIIDNLLQPEAMEALAEAMVAVQEADADKPNAEREAIQQELADVRRRSKNILDAIENGTANPHLTARLDELTERENTLRFQLSTLTDEKPLRFTKEEYLFLLEQFLIDPAERNEDYGRRVVHTFVTSMEVSDSKLLIYFNISEENADKNKNASPSELQKESSTVKRLVRVARIELTAS

SEQ ID NO: 22617 - protein, 445 aa, synthetic construct
MEGKKRAAIYVRVSTAEQKEHGLSVDNQLDALKTYCQERGFSIAGIYNDAGISARKKYKSRPALLKLLEDCQKHKIDIILFTKLDRWFRSVADYYAVQQVLDGAKVPWRAIWEDYETETSAGVFKVNIMLSVAQAESDRTSERIKAVLEYKREHGHIIAGRMPLGYIRTSSSTIDYDPATKDAMQAFFDTYLNTYSPVAAMDAARKLGLRMSRKTAHFILDKEPYYGTYYGVDVPAYITPEQHKIIENARVHYPRTPKDDRVYIFTGLIFCASCGARMGSKLSKHIRANGEIIERGCYQCCTKVRRKDVCEKPAFVMEHKLEDYLIEHMSELITDYEASIAQSQEKAKDAEKELSRIKGKLQRLKDVYLDGDMGRAEYVEKTSQLKADMAELESQRVPLSPIKRLPDNWEEMYWQLSKGGKRDFWHRTIRRIEIDGKKVSKVFFI

SEQ ID NO: 22618 - protein, 485 aa, synthetic construct
MPTSDLKIAAAYIRVSTDDQEEYSPDSQVRLIREYARKNGYLLPEEYVFQDDGISAATARKRPAFNRMIALAKEKERPFDAILVLMFSRFARNREESVLYKGLLRKQGISVISVKEPAVDGPFGTLIESIIEWFDEYYLINLSAEVKRGMSEKFLRGEAMGTAPFGYCIDSANKTFTVDPERAEIVCDVFRSYADGAGLRDIAVQLGDAGITTRRGNRPDSRFVEYMLRNPVYIGKIRWTPGHKTRYSRVHIADGVEVVDGKHPPIVSMDLWEAVQRRMDQRKAAYGRYQRQAPAAWMMRGLVRCSACGATLIMAGRSSSCPFLQCHSYAKGACHTSHSLSLRRANTAVLAGLRRCVGTLTFHMVPHLTSAPSRTADYGRLLEQERRRLARCKDAYQAGVDTLEEYRDNKARLEERIRRIEEQAASAAAAPGSLDKAAYGKKSADILRFLETSADEGAKNEVLRSVVDHITYEKASRHLAIYFYT

SEQ ID NO: 22619 - protein, 527 aa, synthetic construct
MNTAVRTVTVIPPSINPMTHLTDTPLYKLRVAAYARVSTDSDEQFTSYEAQIDYYTQYIQRNPEWTFVKVYTDEGISGTNTKHRAGFNEMIEDALAGKIDLIVTKSVSRFARNTVDSLVTIRKLKEKGVQVYFEKENIYTFDGKGELLLTIMSSLAQEESRSISENVTWGQRKRFADGKVNLPYKQFLGYRKGADGFPEVVPEEAVIVRRIYTRFMEGLTPGAIAKELTADGIPTPSGKQRWQTSTVESILQNEKYKGAALLQKCFTVDFLTKKRKVNEGEVPQYYVEHSHEPIITPEEFDKVQTELARRKRISRQYSGKSIFSSRIVCGDCGSYFGSKVWNSTSKYRRVIWQCNGKFKGEHKCETPHLDEETIKARFVAAINAIIDSKYNILEDCRLMQTTLTDCTGIDAEIESLLEEIDVVAELTKRCIAENSQTAQNQNEYAARYNGFVERYEKAKAQLEQLRATKVAREAQAEAIGAFMFEVQELDALTNFDDKLWLTVIDTVTVHADGRMTFKFQGGTEIEA

SEQ ID NO: 22620 - protein, 465 aa, synthetic construct
MARSITVIPASQPYRVGGRTQQKTRNLRVAAYCRVSTDQEEQLNSFENQVEYYTKYIQDNPLYQMAGIYADEGISGTNTKKREEFKRMIRDCEEGKIDLVITKSISRFARNTQDCLEYSRRLKNLGIGIFFEKEHINTLDASGELLFTILSSLAQDESRNISENCKWGIRSKFKKGIPQVDCTKFLGYDKDDDGKLIVNQKQAKIVKRIYQEFLNGYNPAAIAKMLMEDHIKTGTGREEWRSASVRAILKNEKYMGDALLQKTYTADFLTKKVKKNHGEVEQFYVKESHEAIIPKEQWEAAQLELERRDSYMQELGLTFYGYGSEVNPFSCRVVCGKCGAVCGKKSWKSRGVEFWQCNNRSKNHGVKGCASENLPHENLLKGFVTAWNQIVAEREQYLPKWEKKKKEGNPLEKLRAEQMIELTLQPPLTKMLPELGQMVLESVIVQGKEILFIRFLDGTEIKVRI

SEQ ID NO: 22621 - protein, 517 aa, synthetic construct
MPKTEEKQTIKAVIYARYSSDRQREESIEGQLRVCEDYASRNNMTILHTYADRAMTGRSDQRPEFQMMIRDAATMAFDVVLVYKLNRFARNRYDSAKYKHKLKKYGIKVVSAMENIADDPSGILPESVIEGMAEYYSAELAENVMRGMTENALEGKWPGGVVPLGYKLDEQHHLVIDGPKAEVVRLIYQMVLEGHNQKYIIDELNRRHYTNSAGGQFSYNTLRTILRNEKYIGVFTWGTVRRENACPAILDKATFEAVQEHLNFRTKHHIRSCNEDFLLTGKLFCGCCRSKMIGVSGTSKTGAIYYYYACAAHLKKKCKTRNIRKDAIEDLVCEVTTRILSSKEAVEAIARQAIEMQKNKKDSLELQAIKNQIADINKKLQNCVKAVENGLISETITNHINEYEKELTRLKDDAARVKLLDGDIELTQQHIEFFFWSIAQKIKAADKYKSILLSSIVRSVIVSKDYIEIQYNYKNELPILQNPVKVESSYLNQMVTQEGFEPTTHRLEGGCSIQLSY

SEQ ID NO: 22622 - protein, 502 aa, synthetic construct
MEIQIREGNSRQKQKLKVCAYCRVSTDADEQENSLENQIRHYKEVITSNPDYEYAGVYSDFAISGFKEKRPGLQKMLADACKGKIDLILTKSVSRFARNTSIVLEATRKLKELNVGVFFELQNINTLSGEGELMLTILAAFAQAESESGSVGAKMVYQRKYEAGIPVQYLERSFGFKKDERGVYIADEEEAAWVRKIYEMAADGYTPAVIKRYLNENGVKTVGGAEWIDSTVFRLIENEIYKGDYIMHKHFVNEERKLVRNRGEVDAWYIEDDHEAIVSPELWQRAQDALETKRDYLAEGSVIEEFTEENYPYMNRIYCARCGHPLYRRIYSNGNRLNWGCSGTKRYGRSFCEGINIPDGVLRGAWHFDENMYIGEKQTDKGKKEFTYLKEASWKRRHKKKEPEPIPENTETEYPYREKIFCGSCGSRLVRHVNTKNHKVIWVCNGRKRKGKDFCDGTRVPDTIIKGWGEIKKDIYIQRKDDKNGKKRYSYTSKKPKGADRA

SEQ ID NO: 22623 - protein, 591 aa, synthetic construct
MAKITRVEQAVPTIKTKKKVAAYARISMESERMNHSLSAQISYYSSLIQKNPDWQYAGVFADDGISGTGIAKRDEFKRMIEAADNGEIDIILTKSIQRFARNTVDLLQTVRHLKDIGVEVRFEKEHINSMSGDGELMLTILASFAQEESRSLSENCKWGIRKRFEKGIPNGHFPVYGYRWEGDDLVIVPEEAEIVKRIFQNFLDGKSRLETEREFAAEGITTREGCRWVDSNIKVVLTNVTYTGNLLLQKEFISDPISKQRKKNKGQLPQYYVEDTHPAIIDKATFDYVQEEIARRKELGPRANKSLNLTCFSGMLKCPHCGQSYMHNKRTDRGFMEFWVCGSRKKKGGRCPVGGSINHENLKKACAAVLGLDEFDEDAFHDRVDFINVPERGMLEFHLKNGEVITKDCPNTGHKDCWTAEYRAKTSEKRRKRPNCKGSSVMTGKIKCVGCGCNFRRATQPSSTSESGKAYYWRCAERDGCETVGLREDVLKPFIAETLGIAEYDDGEFEKRIDHIDVLSATEMVFHFKDGRTVSRAWEQPKRVGRPWTDEQRAKFKESIKGRYTPEVRQQMSEHMKQLRKERGKAWRKEK

SEQ ID NO: 22624 - protein, 459 aa, synthetic construct
MSTTHFYSHYPTIEYKTCALYVRCSKEEQAKFGDTIEAQIEDLKAFAKLHHLKIYAIYVDEGHTARKKYNKRKEFMRMLQDVELHKFEYIIFTKLDRWFRNIADFYKIQEILDNNGVTWLTALERYEMETTNGKLNVNIRLSVAQDEADRDSDRIKDVFRLKVKKGEAITGSLPIGLMVGENGKVDINPDTVQIAYDMFDYFEAHNSKRGTLLYLIDKYNRYFCYETIARALRNPLYKGEYRGNPDYCPKIIDPARFDRIQVLGKRNVKVRKNNRYYVFSGLAQCKECGHALVANTTIQKRYNREYTQYRCNYYSNSHLCTHSHGTNEKVIEKYLLDNIKPELEKYVTAYEVKQNAPTKKADPSKIKTKMQRLKELYVNELIDLDDYRIEYEQYKQELDRLTSTAAPEVKDLSAIRSFLALDLKSIYDSLTPQEKRTLWSSIIDKIIISDGGDIEIVFL

SEQ ID NO: 22625 - protein, 522 aa, synthetic construct
MALLPRKPAKHPAKPKRGKKLEIEEPGVLYGRYSSHNQKDISVEQQFEKGYELAAEYGIRIIDTYADRAVSGRTDKRRDFQRMMTDAAKGKFRYVIAWKSNRMGRNMLEALINEARLQDLGVRVLYVEEDFDDTAAGRFAARSMMNVNQFYSENMAEDIKRGLYDNAANCMVANGHLPYGYKADETLHYAIDEPKAAVIREIFTRVSCGEAFVDIMASLNVRGIKTSYGRPWGRSSFQKILSNERYRGIYIYGDVRKEGGIPRIISDELYFKVQEVITTKKNPQGRHRVNGDYLLTGKLFCGHCKSPMTGVSGTGRSGNLHYYYVCQKRRTEKTCDKKNVRRDEIELQVAQAIKDYALKDDVIEWIADSTVAYNERKEAESKVGILEDQLAGTEHGIKNIMSAIEQGIITETTKSRLVELESERATIKANIAAARADIVTVSRDDIISGLEMFRDGDVHDKKYQARLFDTFLVAVYAYDDDLRLVFSFSGNKNTIQIPIESAVNAVENNEAECSFKLCSAPP

SEQ ID NO: 22626 - protein, 526 aa, synthetic construct
MKRVLCLYRVSTIGQVDHDDIPMQRVACREFIDRQKDWTLVDEVLEKGVSGYKTKTADRDALTEIKAKATAKKFDILLVFMFDRLGRREDETPFVVQWFVENGIEVWSVKEGQQRFDTHVDKLLNYIRFWQASGESEKTSLRIRTKHLQMIQEGLYRGGLVPFGYRLEHLGRTNKKNQSVRDLVIDETESAIVKEIYYKIISEGWGTNRIANWLNERGIQTKRGKPGAFWRATSIRAIVRNPIYIGKIRFGDELSESFEHLRIIDDFSFNLCEQILEERIPAASRDRTRSLRSTSPALLTGILFCGSCGGRMCFNHNSTVKYLADGTKRAYERDVYRCYRKVSHHGGCSGRSTYPLEKIEEAVLKIVHQYFENIRSVPTVQMLAAARQRSDSVDEIALANAEEALQKAQAEMSALEDEAVKALTGESKLDISFINGLIPKRRATLEKATEELARLRGVIAETEKKNASINQELKIILSWADAFDSASTDVKRSIISALIDRITVYDDCSLDIHFRISAEQFLGKAA

SEQ ID NO: 22627 - protein, 412 aa, synthetic construct
MKRVYCLYRVSTVGQVDHDDIPLQRISCRQYAQQKGWTILRELYECGVSGYKVSSEARDAIQELKDEALLQRFDILLVFMFDRLGRRDDETPFVVEWFVKHGIAVWSVNEGEQRFDTHVDKLMNYIRYWQASGESEKTSIRVRLRQEQMIQDGHFRGGMIPYGYRLEYTGRANKKNQPVHDLVIDPFTSENVKLIFSLVSSQGYGANRIAMYLNERNILPRTANAHWHASSIRAILRNPIYIGIMRMGACCSERSFAQYRIISDEQYEAVQKIMLERSLSHTLTRSIPYRTDNAYLLTGLLRCGSCGSRLCGATMSSKGASTQCHRRYYRCYTSSVHRGVCNGQRCYAANRIERMVEQRVVDVLNEILSTPVGVLAEQMDALAYCDDQSALQAAQFEIVFRSVIKELCQMKV

SEQ ID NO: 22628 - protein, 543 aa, synthetic construct
MNAVIYARYSSHNQTEQSIEGQLRDCYEYARRYDITVVGEYIDRAISGTTDDRPDFQRMIVDAQKKQFERVLVWKLDRFARNRYDSALYKHKLKQYGVRVISAMENVGEGDESILLEALLEASAEYYSLDLRKKILRGRRETIAKGKFCGGCIPYGYKVVEGKLVIDEKKAPVIRYLFEQYAHGVPMKDIVDELKARGVRGTHGGALTYNTFSRVLTNTAYIGQYKYNNVAVPGLAEPMIDQALFEQAQIYVKANARAPAANKAEVEYLLQGKAFCGNCGSHMVGESGRSSGNGNRYYYYACAARKKTHTCHKKNEKKDFIEWYVVEQTLEYVLTPPRISEIAKAVVAEYQKEFSGSKIDELEKAVRQLDHELNKLVDALVEAPKVAHKRIYEKMESLEAQKSAAETDLAKLRVAHDICLTEDEVRAWLKSFCTGDLFDPDFRRNIIDTFINSVYIYDDRVIIFYNIKGGKQVSYTDLSTTLATHSPSAPTSKSSDSIAIAPWSPDTGWYSDFFYKTRKPKLPAVSPIRCFPRLPCGSPPRPR

SEQ ID NO: 22629 - protein, 525 aa, synthetic construct
MSAIENAVVYCRYSSHRQGEQSIEGQLAAAYKYAKEKGYQIIHEYIDRAMTGRNDNRDQFQEMLKDTAKKQFSVIIVWKIDRFGRNREEIAFNKHKCKKNGVKVVYVAENVPDSPEGVILESVLEGMAEYYSLQLSQNIRRGNLASAEKCQSTGGNRPLGFLTDPATKKFVIDSETAPTVRKIFDMYAKGSTCAEIITELNAQGLRTLRGGKFTKNSLHTVLNNEKYIGVYTYKDQIRIEGGVPRIIDDETFYKVQEMLKKNRRAPAHTWSRATYLLTDKLFCGHCGSNMVGESGTSKTGAKHNYYICTKRKRERACDKKAVRQEWIEQLVIDAVLNVLNDEKMFNFIIDNVYAVYLEDQAETDYVSGLKKQLAEVEKAQANIMKAIEAGLFSPVTQKRMEELDEQHGELEASIAGAELKADLGLTRDHIEFFLTELKNKAAKDPDSEKALIDAFVNAVFVYDDKVTITFNYSGDNRTITLAEIDAAESSDGVRMLCVNDHQKEKHPKWVLFFLRLNRGESKERE

SEQ ID NO: 22630 - protein, 490 aa, synthetic construct
MTDKNLLVITPHRKEPGKQRIAAYCRVSSRSNEQLNSLTNQINFYRSLFENDDTVVFVGIYAEEGLSGTQAESRPQFMKMIEDCRSGLIDCIRTKSVSRFGRNTVDTLIYTRELRSLGIDVFFKKENIHSTESSGELMLTLMAAFAESESETMSENIKWGKRRRYEQGITGSITLNGMYGFRQNKGIVTIVENEAELVRRIYKDFIDGYSYGEIADRLIADEVPTRMPGASWAKTTVQHIIRNEKYCGDCLFQKAFIANPITHQQVRNNGELPKYLVEDCLPAIVDKETWKLAQAVAARHTPHRQAPNERYPFTGKLFCGICGKPYYYYHYTTTNKQLLAAYRCMSRKTQSAVEVPGQTYTPPHKATFKLNASPELIAYRERYCKPPKERPMLCTDVRISIDLPQKAFCRAWNLIVAKKLRYQATLRSTVDNAEDILVQYRAEEMCLLIDEIGKINEFSYPLMLKTLDRVVVNANGKLTFIFQSGIKITV

SEQ ID NO: 22631 - protein, 548 aa, synthetic construct
MANKTVKKIEATKPTLSAQYSTFTRKRKVAAYARVSTAKEEQENSFDAQVSYYTQKIQANPEWVFVEVYSDEGITGTNTKKRDGFNRMIEDALAGKIDLILTKSVSRFARNTVDSLVTIRQLKEKGVEVFFEKENIYTLDAKGELLLTIMSSLAQEEARSISENTSWGRRKSFADGKVSLGYSNFLGYDKGPDGELVINEEQAKIVRRIYAEFLAGKTPGGIAKGLTADSIETPSHKKVWQASTVLNILKNEKYYGAAILQKEITVSYLTKEKRPNTGELPMYYIEKDHEPIVSPETFQTVQEEMRRRREAGSNMQCVSIFSSRIICGDCGGYYGRKIWHSSTKYTAWHWHCNAKFQKRKYCETPTLKEESLEETFVEVFNGLIANRKEIEENYRLCIDTITDDSEYRRQLENLNNGCGEVQTLIRSLLMTYSRQDTADDIHEKLKEYEDRLDTMARLKQELDLKIAACAAKRVQITGFLNELMKHDAPLAKFDPLVWQAVINYATVNRDCTITFTFRDGTEKTVPIKNGVRPYTKRNKPQEVDGNDG

SEQ ID NO: 22632 - protein, 434 aa, synthetic construct
MKKTIVNIAPAVAETPRTKRVAAYARVSCGKDTMLHSLAAQIDYYRNYIIRNPEWRFAGVYADEAKTGTKDNREQFQLLLTECRNGNVDMIITKSISRLARNTVTLLETVRELKSLGVDVFFEEQNIYTLSAEGEVMLTLLASFAQAESLSCSDNCKWRIRKGFEKGRASTCTMLGYRLVNGEITLIEDEAKIAKRIFDLYLAGYGLQKIANTLNEEGLYSIFGNEWHPTTLRKVLTNEKYCGDLLLQKVYCENHLTKKMVPNNGELPQYFVEDDHPAVVSRETFAAVQKELKCRAEEKTPTVGSTSIFTGKIRCSCCGKNYRRKTTPYNIIWCCSTYNSKGKNHCPDSKVIPEETLKRAAAEILKTDGFSDEAFETQICTIEAHPGNLLRFIFIDGSTTDYVWKDRSRSESWTDEMKAAAGRKTKERNANHGK

SEQ ID NO: 22633 - protein, 540 aa, synthetic construct
MATVARRIVTAVPSVGASAARTDREYVKEPVAAYARVSTEKEEQEDSFERQVEHYTKMIQTNPKWSFVEVYADPGITGTKADKRPNFMRMIDDCRAGKIKKVLVKSVSRFARNTVDALTYIRELKDLGVSVYFESENIDTMTPGGDVLLTILAAMAEQESRTISANIKWAYQKKFEKGEVTINTGLMLGYEKAGKTEDGRTQYRIIEEEAAIVRRIYREYIGGKTITQISQGLREDGLVSKRGCSTWCSNTITNILKNEKYAGNAVLGKTYKPDVLSKKRFKNDGSKSPMYYAENTHPAIIDEETFELAKEEMERRQNDKQKAVGRSRYSSKYPFSGILVCGNCGSRLRRHLRKVGSGKRVPAWGCANRIINGRAVCDSHHVNEDVLQRTYLAALQTMVDGSEEIIEAIEKSAATEMRTDADIDNIDQQIIAIQEEVLTLHRQKQRLAITEEDYQKRLAAFGEQMKELEEQRKQDWTAENRYAAMRLWLDEFKEHTESGDFMNDADGSIMKALVEKIIVKDASMEICFKCGVSIEQEYVE

SEQ ID NO: 22634 - protein, 490 aa, synthetic construct
MRMAKKRAVAYVRVSSGSDAQLHSFDFQAEYWTTTLGEEPGVELVGIYADKGISGRSAGKRPQFQLMMQDARAGLFDVIYTKSTSRFARNTVDLLNAVRELRDLGVEVVFQNENISTLQPTSEVYLTIAAALAENELQDDSDRQRWSYQDRFKNGWISIGKRMYGYKMTADNQVEVIEEEAAVVRRIFDLYIAGNGAVKICKILNADGLKNSYGNPWQHNNILEIISNEKYTGNALMGKHVRINGVHMRNDQGQHSQRYYIENTHEAIISQEAFDEAQQVRDSRKNAKMVGRTQPRHEFTGMIECGCCGKHFNRKMNATGLKWSAPVWTCYTQTKFTVAACDNSRIKENVLHEKFIEAYNRFIKERPTGETVSNLVNRVRTLEAEEHELAALALQHMITEAAFHKEQLRIKAEVTKLNDEIADQRNRSIGEEDLTPITEYDPEKVKKFITKVIVYRNTITFVFYNGAEIKMDYSNGQPGNKPGWNGKEAK

SEQ ID NO: 22635 - protein, 572 aa, synthetic construct
MASRIAEKLAAKKAAIYIRVSTHWQVDKDSLKVQRRELIAYVTLVLGITDYVVFEDPGYSAKNTDRPEYQAMMDRIRTGEFTHLVVWKIDRISRNLIDFAAMHAELQSLGVTFVSKNEQFDTSSAIGEAMMRIILIFAELERKTTAERVTAVMLSRASDGQWNGGRVPFGYSWSKETKTFSIVPEEAKAIRRMAELYEQYQSLLYVAKYLNDAGIVTKTGGQWTPTTVRTILTNPWYIGQYVYNVHSDGKGIEKRDSDEWITVENHHEPILNEDVFCRMKFLLTRNKRGGVPSHKTYVRKNIHVFAGLLRCGQCGSNMTANLDRRRANGFRPSQYACGSRRRKGTSCTNKYISDTTLGPFVLNYVANIIRASKNSSEATTPEVLERKLLRGEAFEDVASVSTDALGQLLDAFRSAGDAVEYRPQIAFSGDDNSIREIDTLRARRRKLDNALARLNALYLYDDEAMPEKDFVMQRGQIAKQLEEVNARIEELQNQESSEELGDDFIGKASYYIMANKLIEDRYIDYEKYIRAIDPSIPHSFLQQIIDHIVVNDGRVTSITFKNGATHTFTYKT

SEQ ID NO: 22636 - protein, 537 aa, synthetic construct
MMKPAYTAGLYLRLSRDDEQQGDSSSIVTQRQMLRKYATDNNITVYDEYVDDGWSGTNFDRPDFQRMIQDVEDGKLNCVIVKDLSRLGRNYILTGQYTELYFPSHNVRFIAITDNVDSENGDNEFAPFKNIINEWYAKDISKKVHSALQTKFSMGERYCAYAPLGYQKNPENHGKLIIDEETRWIVEKIFNLAVEGLGAARITKTLIEEKVPTPSWINFQRDGTFAHIYEGQAEDKRYMWTIAQVKKILKDETYIGNSIHNRQTTKSFKCKQKVRKPESEWLRIEDTHEPIISKEQFEQVQEMIKSRKREQKNTNVQIFAGLVKCADCGWSMRFGTNSQNKNPYSYFSCSRYGQMGKIFCSSHYIRYDVLYEYVLSRIKYWANLAQDDEAQLLEYLMKSGDKEFAATRQRNISEIKKSEKRLKELDILFGKLYEDRMNGSINERNFNMLTTKYQAEQDELQTTIDVLSKKLKAEKEDVSGKERWVSLVKQYTNPQELTATLLNTLIEKILVHESTVADDGVKEQEIEIYYRFIGKID

SEQ ID NO: 22637 - protein, 561 aa, synthetic construct
MKNKKIKCDIYTRVSTTMQVDGYSLDAQKEKLKRYAEFQNMEIVNEYSDEGKSGKSVEGRPEFQRMLDNIENGTDEVQFVLVFKLSRFGRNAADVLNSLQRMQDFGVNLICVEDGIDSSKDSGKLIISVLSAVAEIERENILVQTMEGRKQKAREGKWNGGFAPYGYELVNGELQIAEDEAEIIRLIYDKFIHTNMGISAIAAWLNQHGYKKKKRQNNTLDAFASSFIKGVLDNPVYCGKLAYGRRKNEKVSGTRNEYRIVKQENYMLHDGIHEGIISETDWELAHQKREKTGVKYEKTYSLDHEHILSGILRCPLCGSGMYGNVNRKKKKDGTLYKDYFYYACKHRRLVDGHKCGYRKQWSEEKINNAVEEVIRKLVKNPKFEEAILNKIGSRIDTEEIEKEIEGLEKQHRQLTGAKARLGQQMDSLDIMDKFYEKKYQDMETRLYRLYDEIEGVENSIEEVKNRLLNIRQQKISEENVYQFLLYFDKLYDKFTDLEKKEFLNSFVEQVDIYEQEQPDGRFLKHIKFRFPVYFGDRETQELCWDNESTVETVCLLSRKAQ

SEQ ID NO: 22638 - protein, 532 aa, synthetic construct
MPYCLYVRKSRADAEAEARGEGETLSRHINTLLDLAKRRHLDITQIYKEIVSGETIAARPVMQHLLSEVEQGLWEGVLVMEVERLARGDTIDQGIVSQTFKFSNTKIITPIKDYDPNNEFDEEYFEFGLFMSRREYKTINRRLQRGRLASVNEGKYVGSHSPYGYERVKIKGDKGYTLEILPAEADVVRMIFDLYTRGEEQDDGSFRRLGVSLIVRRLNSLKIPPRKSEHWAPATVRDILINPVYIGRIRWNWRPTVKKIVDGHVQKERPRAPIEKCMVIDGCHPPIVSVEIFNKAQEFMSSNPPHPVGERGTVKNPLSGIVVCAKCGHRMVRRPYDKRTNYPDTLICNDTACDNISSTLQSVERHILKSLQEWLDEYKLQWKNEKKKSCDISSISIKEKTLNRLNSERATLTKQLDTTHDLLEQGVYTTDEFLERSRKLSARIKKNEEECAALGADIKTEKLREAGRKQIIPKVEHLLEVYDDLTSAKAKNDMLKEVLEKVTYLKTQNGRWHNSPEDFEITLFPKIPKSDD

SEQ ID NO: 22639 - protein, 523 aa, synthetic construct
MAKVTTIPATITRFTATPINEKKKRRVAAYARVSTDSDEQLTSYEAQVDYYTNYIKGRDDWEFVSVYTDEGITGCNTKHREGFKRMVADALAGRIDLIVTKSVSRFARNTVDSLTTVRQLKEKGVEIYFEKENIWTLDSKGELLITIMSSLAQEESRSISENCTWGQRKRFADGKVTVPFKRFLGYDRGLDGNLVLNPAEAATVRHIYSMFLQGMSPYGIAVKLTADGIKSPGGKDKWNAGAVRSILTNEKYKGDALLQKSYTVDFLTKKKKVNKGEIPQYYVEGNHEAIISPEVYDLVQRELEHRRNANGRHSGVHLFSGKIKCGQCGEWYGSKVWHSNSKYRRTIWQCNHKFDGDEKCTTPHLTEDEIKKMFVSAVNKLITKKDALITALTASLNTAFDVTDLKAEQTELESEMTVVSDLIEKCIYENAHIALDQVEYQKRYDGLTARFDTAKARYEALDETIRSKQSRRATIEAFLEALGKAELVDKFETALWCGLVDFVTVHSKDDVRFTFKNGQEIRA

SEQ ID NO: 22640 - protein, 587 aa, synthetic construct
MRIVNKIEPRVPQMPTRKKVAAYARVSMESERLQHSLSAQVSYYSGLIQKNPAWEYVGVYADNGVTGTKAEAREEFNRMIADCEAGKIDIVLTKSISRFARNTVDLLNTVRHLKELGVSVQFEKERIDSLTEDGELMLTLLASFAQEEVRSLSENVKWGTRKRFEKGIPNGKFQIYGYRWDGDHLVVQPEEAKIVRLIYDNFLSGLSAETTEKQLAEMGVKSYKGQHFGNTSIRQILGNITYTGNLLFQKEYVVDPISGKSRINRGELPQYWCEDTHEAIIPLEVYQAVQAEKARRRELGVFANWSINTSCFTGRIQCGRCGKNYQRSNRKGRKDPNANYPIWICGTRRKTGNAQCQNKDIPEPMLKDACAAVLGLSEFDEAVFSEQVERIVIPAPNEMDFYFKDGRIVPRHWESTMRKDCWTDERRAAKGRYVQAHQLGFNTSCFTSRIRCDSCGENYRRQRSRHKDGSYDSVWRCASSAKCDSPSIKEEALKAICADALGLSEFDEKVFRGQIACIHITAPFRLALHFFDGRTVEAEWQNKRNMPKHTEERKQHMREVMIQKWRERHGESNNDTGNDNPVHSDTN

SEQ ID NO: 22641 - protein, 499 aa, synthetic construct
MNVVLYMRYSSDRQTEQSIEGQKRVCMDFCERQGYNVVGEYIDRATSAYKETAKRTNFCRMIRDSSNGLWQGVVVYKLDRFARNRYDSATYKVRLKKNGVKVISATENISDSPEGVILESVLEGMAEFYSKELSQKVSRGLNESAHKCNSTGGAIPLGYKTVDKKLTIDEPNAQIVKEAFDLYAGGTTISEICEKFNSQGYRTKKGTEFNKNSFKSMFRNEKYIGTYTYKDIRIEGGIPAIIDKETFETVQKRLSANAQAPARGKARVNYLLSQKLFCGHCGANMTGDSGRSKTGETYYYYSCSTRKRFHSCKKRTIRKDLIERIVAENAMRLITPEMINTIADMAIKCNREDIESDAIIPALTADLKEINTSIKNLLKMVERGVESETLDSRLKELEKRKKDTELRLDAAKSEYLTLDKTVIVGWLSQFLSGDIEDEDFRRHMIDTLINSVTVWDEPDGGYKITTVYNLKGNTQTYRVNADGSSDMKRNSPPKKRQFS

SEQ ID NO: 22642 - protein, 529 aa, synthetic construct
MSKYCIYLRKSRADLEAEAHGEGETLSRHKTALLELARRMGITISATYEEIVSGETIAARPQMQRLLSEVGAGEWDGVLVMEIERLARGDTMDQGLVAQTFKYSGTKIITPLKTFDPQNEFDEEYFEFGLFMARREFTTTNRRLVRGREASAKEGKYVGSVPPYGYRKVKIPNDKGFTLEIIEEQAKVVRMIFEWYAEGAEVNGQKKRIGPYSIAVRLNELGIKSVAGKDYWTIYGVQHMLINPVYIGKIRWGYRKVKKTVTPEGTKKKSREFAQDGDYIVVDGLHEPILSEELFYKVQDLIAANPPTPIKYRHKNINPFAGLIFCAKCGHCMNYRRGYGRQPDYIGCYTAGCDNKASRFDLIEQRVLSILNSWVKDYSVDKAQIKHEVDLNAELSNAISLAEKEIEALQGQLDNVYSFFERGTYTEKIFKQRSSAIEQQIMEIGEKIDRLKAEHQQVLERQNVQAEFVPSIKHLLEIYDTLEPVEKNKWLKQIIDRIVYEKNADGKYHNVDPGDFTIGILPRLPKRGS

SEQ ID NO: 22643 - protein, 565 aa, synthetic construct
MPRAHQKAAIYCRVSTLHQVDKDSLPMQRQDMINYARYALAIEDYEVFEDAGYSGKNTDRPAFQNMMERIEAGEFSHVLVWKIDRISRNLLDFATMYARCKKLGVTFVSKNEQFDTSTAMGEAMLKIILVFAELERNMTSERVSSTMSARAAEGKWNGGRVPFAYRYDRETDSFSIRDDEAKVALELKDIYLRTRSLTYTARTLNEAGRRTRRGYAWTPATVAIILRSPFYRGTYRYNYRDESETTFSFKGRNEWIMCAKHHPPLFSEADCQQIDFWLTKNRRHHGKATHVQRKRVHVFAGLIRCGVCGSNYIASLDRIRASGYQPSMYNCSGRRQKGMCKNRYVNDIRIGDFIFNYISNVIRLRDAFRLQWSKARIQRFLLQGDVFRSALLSDDTLRHVRAALLGSHAGTAEYHPADEQRDGSAEQTRKSTLQAELEKNRRALSRLMHLFLYAEDEMPQADFLREKRHLQDNISRLQGELEKEQQPSVFASSLTDEDFLRKAAHLLFQSAMTRGGIDFPELAMHVGNLELKNFVNTIIKQIVVLDGHVTQITFANDEIHTFLYH

SEQ ID NO: 22644 - protein, 517 aa, synthetic construct
MTTNKKVQIIRGSKSYAEDILRVAAYCRVSTDSEDQVNSFIAQMHYYYSFIKQAENMELVDVYADEGITGTSVAKRDDFNRMINDCKAGKIDRIYVKSVSRFARNALECLEYLRILKECEVSVFFENDGIDTGALNSELILYIKAAFAEAESTSNSKRVQTANRMRAENGEYVFVSAPFGYRIENNELVPIPEEIKVVERIFKEYLAGLGAGKIAAQLNAEADMIGKPWGKERIRYILSNEKYIGDSLFQKTFTPNVLPLKNRPNRGEVEMYYISNTHAPAIDRELFDAVQEMLKRNMQKKAKCAKSGKYSLSGKLYCGDCGWRYKRKVQNGTAYWICSGDGIAGRHCKTKPLSEEVFFKTFVNFYNRLRAHENLILRNSVTRLSEIKKMITCMDSEISDLDKQLGLLTERHNLYVTLMQGCQMDEISFAEQCAKAEREINKLRSRRNKLLSEDEDEKSIDDIRMLRNKLSSAPKAILKFDFELFDAVVEKVIVEDDSKVSFVLCCGLKLREAIAWN

SEQ ID NO: 22645 - protein, 549 aa, synthetic construct
MNNTGVQVRTKTVTKIAANPALSKRNDPNRILRVAAYCRVSTDDEDQLNSYRTQKSYYTELIKKNPKWRFAGIYADEGITGTMVKKRDDFLRMIEDCEKGKIDLILIKSVSRYARNIVDCISYVRKLKALGIGIYFEEQNINSLTEDSEVYIGIYGVMAQSESENISANVKWGINKRMQNGTYACRFTLLGYRRNKDTKEIYIVPEEAENVKKIFQMYLQGRSLDQIKRYLEENNILTVRGNPVWDKGVIKSMLTNEKYVGDIMFQKTYREDCISKRTKINRGEMDRYLVTDNHPAIIDRETFRMAKKEMVKRSSKRRTSSNAVTELGKYSGKYALSELLFCNICGSPFRRKTWTRKGVKRVYWRCLNHVENGDKACPQSRGIEESVLHEAICRGMSKCIPETGDVKNLVRTMLAYATSEDQGLLECQTLENAIRELQEKANEAEEMCIRTEGNKEPYMEQIKKYYSSIAELRARITEITKQLEESDEFQTEMQQIDSWLENEEILFAEYDDDIVRYLIDSIRVTDDLKLIINVKGGVSVTEELYQKED

SEQ ID NO: 22646 - protein, 555 aa, synthetic construct
MAKKKKPAGGNAIIYARYSSHNQRDVSIEQQIEACRKHAAELGLTITDTYEDRAISGRTDNRPAFQRMMHDAENGKFSYVLAWKSNRMGRNMMQAMVNESRLMDCGIKVYYAEEDFDDSAAGRFALRSMMNVNQFYSDNLAEDVRRGLMDNASKCMANGKQPLGYKRGEDGKVVVDEPAAAIVREVYTRVASGELFTDIARDLNRRGIKTADKGEWNKNSFHRLCSNEKYRGIYIYGDVRIEGGIPTIIDDTLWYKVQEALRVKKLKRNGRHRPGDEDYLLTGKLRCGKCGGYMIGMSGRSKTGEIHYYYTCQNRRVGRTCDKKNIRRDVIEPAVAQAIKDYCLTDDAIEWIADKTVEYWEKADRNLQLDSIEGDLAAVQSSISNVMKAIEMGVVTETTRDRLIELEKQRTDLKSKLALAKEEVVHVDRKKLISSLLLFRNGNIHDRQYQEDLFKTFLISVYVYDDDDNGHLKIVFNAFGDNNTVDLPIDFGETDNQSGFSDGAEKFDYALHRSTKSHLMKIRWLFCFPQPPHFTPFSSADTGHTRRTSPAGRRW

SEQ ID NO: 22647 - protein, 514 aa, synthetic construct
MAKRKFNKGGEVRLVAYYRYSGGSGQTEQSIEGQRRDCETYARLHNMTIQKEYVDRHISGKTDDRAAFQQMITDSDKGAFDMVICWKTDRFARNRYDSAVYKKRLRDNGVEIVYAAESNIAGAEGIIIEGVMEALAEYYSAELAEKMRRGMRESALKGQAISRCRALGLKTDEHKRFVIDEKTAPTVRFIFEHYAAGESATSIVDKLNAKGLRTSQGNPFNKSSIPRIIQNEAYRGVYVSKSYDVRIEGAIPAIIDDELWERAQTMLKLNRQLKAKNEPKADYILSGKLYCSCGSLMRGMSGHSATGEVYRYYTCPNKNCHLRNIPKDDLEGKVMQSISDHLLQPEAMEALAEAMVEVQKADAEKPNAERVAIEQSLADVRRRSKNILDAIENGTANAQLCARLDDLSEQERTLNFQLSALEKEKPVVFTKEQYLFLLEQFLVEPSERTPEYGRRLVNTFVTSMVVSGRELVINFNVSDETVNKNKKTSQTNLQKESSSGMRLVRVARIELTAS

SEQ ID NO: 22648 - protein, 516 aa, synthetic construct
MKTVSRIDPIPRKQKKLRVAAYCRVSTDMDAQLESLEAQKSYYENYIGSRADWVLVGIYYDEGITGTKKDKRPDLLRMMEDCEAGKIDFVLTKSVSRFSRNTADCLELVRRLMELHIPIYFEKENLNTSEMEGEFLLSTLSSLAESESVSISENSKWSIQNRFQDGTYKLCSAPYGYRWDGKNLVVDPVQAKVVKRIFAEVLAGKGAGTIAADLNDDGIPAQRCDHWTSTSILGMLTNERYVGDALLQKTFTDEQFNRHRNTGEMDMYCVQEHHEAIISREDFDAVAVLLEQRAAEKNIQKGVNKYQNRYTFSGIIRCAECGSTFKRRVNSGKCGKYAAWCCGTHIADKTKCSIQSVRDEDIKLAFTTMLNKLIYGNSLILKPYLKALKNTLQDESQLRIQYLQGLVAQNTEQRETLTRLMAQGYIDQVLYSRENNGLLAQCEEFRSEIETLKKSRTTHAVQTAETEKLLKFVEKAEMLEEWNEDFFQQFVDYITVYSRNEIGFVLKCGLTLRERI

SEQ ID NO: 22649 - protein, 526 aa, synthetic construct
MKKAVIYARYSCERQTEQSIEGQLRVCQEFAEKNDILIIDTYIDRATTGTNDNRAAFQTMLKDAEKPVPWDIVLVYALDRFGRNSIEVAVNKQKLRKSNKLLISATQRTSENIDGSKNLDGILLENVYIGLAEYYSAELSQKIRRGMNESRQKRLYTGGFVLFGYDVKDKKYVINETEAEIVRQVYADYANGRIVKDICKELAELGIKNKFGRPFVPNTIYRMLRLEKYIGIVRYGDEVFENTLPPIVDMETYAKVQSIIAANKRAPSRRKSYGKFFLSGKLYCGECGSLMTGDSGTSHRGVVYFYYTCFDKKRRKGCTMPSVQKDDIENTVFKVCCDVLESGFIPAIVDTAYAIQMEELASNITVINLQAQLKEKEKALRNILRAIEDGIYTSTTKQRLEELEKDVETIKSKIEVETIKQQQVASKEDYAEFLKQFIGRQVKNEDFKESLFELLIRKVVLFRDKIRITFNFSPDKGKSGDNIDVDAAEIQEAQKEYNGCVIADKKQKNNPSQKACSGSDYSLLAE

SEQ ID NO: 22650 - protein, 457 aa, synthetic construct
MSEKNIISDGKVMRAALYPRVSTEEQAKYGLSIHDQQNDLERYAKEHGMKIVGVFADAGFSARKKIEKRPAMMALLDAIRRDEVDIVLVTKLDRWFRNIGEYYKVQDILDAHNVSWKAIYEDYETATASGRLKINIMLAVAQDEADRTSERIKKINEGKRLRREALTGDKPLGYTIVNKKFVKDPQTALAVDAFFRKYMACGSVSATQDHIREEFGLTIPYQGANKMLRSTAYYGVYYGVDGMCPPYITKEQYDQIQTMRRKVIKRTDENRIYLFSGLIVCGDCGGRIGGKVNQDHKTFHYNCSNHFCRRKPCGNNRSISEKKLEKYLLDTVECKLESYKAEFSAVQENVVEKDYRSEINALRGKLSRLKDLYLNELLTLDEYKKDYASITEKIHELEIKQQPPRPSNLPQIQKLLSHNWRDMYGALSPMQKREFWRIIIKEIRWYPDRHIEFDINF

SEQ ID NO: 22651 - protein, 433 aa, synthetic construct
MDRIVERVIFDAPPKPTLVRVAAYGRVSSGKDAMLHSLSAQVSYYSKCIQSHQGWLYVGAYMDEALTGTKANRPEFQRMLADCRAGKIDLILTKSISRFSRNTVAFLETVRELKALGVDIFFEEQNIHSSDRSGELMTTILSSFAQEESRSASENQKWRIRKNFKEGMPWNGRMLGYRYNCGTYTVIPEEAATVKRIFHEYLSGKGGVAIANRLNKDGIPSPSGGKWGKSEIMLILRQYAYTGNLLLQRFYKNNYLEKKTLVNRGELPMYHAENCHEAIVSAEEFTEVQKQIAIRAKRYYRSGSSASRYPLSGRIVCGGCGKHYRRKTTPTGPVWICSTFNFEGKAACPSKQIPEATLLQVCKEVLNSVELTAELLDSRLTDIQAEKNNTLIFSFKDGTKTVRQWHDRSRAEAWTAEKRKAASDRRKERDRNG

SEQ ID NO: 22652 - protein, 525 aa, synthetic construct
MAKTVTVIPATVNPFTGMPVTGLHKRRVAGYARVSTDKDEQFTSYEAQVDYYTKYIKANPEWEFVTVYTDEGISGTSTKRRDGFNTMIDAALNGRIDLIVTKSVSRFARNTVDSLSTIRKLKEKGVEVYFEKENIWTLDSKGELLLTIMSSLAQEESRSISENITWGKRKSASDGKVSLAYRNFLGYEKGPNGTPVINQEQAKTVRRVYRNFMAGQTAWAIAKELTADGIPTPAGKSQWHTTTVESILTNEKYKGAALLQKTFTVDYLSKKIKTNEGEVPQYFVEDSHPAIIPPEEWDQVQKEFVRRHSLGRKYSGNSIFSTHIVCGDCGAFFGAKVWNSTDKYRHTVWQCNDKFKGGKKCATPHLSEDKIKSGFVQAFNRLFDGKEEIIANCKEVARLFSDTAELDRKKDALQQELCVLSELIRKLIEENATTVQDQNSYLEKYNGYADRYKTVTEAIGALEKEILLKHARADAFRNFIRTFEAVESKLLAFDAKLWALTVDKVKVMADGSLHYIFKNGADITA

SEQ ID NO: 22653 - protein, 505 aa, synthetic construct
MRGVIYARYSSDNQREESIEGQIRENTAFARKNGIDIVATYIDRAYSAKTDNRPEFQRMIKDSGKKSFDVVIVWKLDRFSRNRYDSAKYKAMLKKNDVRVLSATEAISEGAEGIILESVLEGMAEYYSADLAEKVTRGMTENALKCRFNGGTVPFGYMIDEEQHYQINPAQAPLVIEMFRRYAGGESITEIIEDLNARGIRTSRGNRFNKNSLARIFSNRRYIGEYAYKDIAVPDAIPAIVSKDIFDRVAIRMGQNKHATGKAKAPEKYLLTTKLFCGTCHSMFVGDSANKPNGAIYRYYKCASAKRHECDRKALRKDWTENIIIEKITSWLSDDKTIDRMADDVMALLSEENEMIPALEAQLKQVRSSIDNIMKAIEQGIVTRTTRSRLEELEHEEESLAANIRAEEDKKPKISKEFILFTLDKFRKLDLRIEKNKERLIDGLVKAIIVYDDHFEVFLTFDDTPITIPTSEEIESMKNSSDIASVTSPSRKHFERSAFFFFPRC

SEQ ID NO: 22654 - protein, 433 aa, synthetic construct
MDRIVERVIFDAPPKPTLVRVAAYGRVSSGKDAMLHSLSAQVSYYSKYIQSHQGWLYVGAYMDEALTGTKADRPEFQRMLADCRAGKIDLILTKSISRFSRNTVAFLETVRELKALGVDIFFEEQNIHSSDGSGELMTTILSSFAQEESRSASENQKWRIRKNFKEGMPWNGRMLGYRYNCGTYTVIPEEAATVRRIFHEYLSGKGGVAIANRLNKDGIPSPSGGKWGKSEIMLILRQYAYTGNLLLQRFYKNNYLEKKTLVNRGELPMYHAENCHEAIVSAEEFTEVQKQIAIRAKRYYRSGSSANRYPLSGRIVCGGCGKHYRRKTTRTGPVWICSTFNFEGKIACPSKQIPEATLLQVCKEVLNSAELTTELLDSRLTDIRAEKNNTLIFSFKDGTETVRQWHDRSRAEAWTAEKRKAASDRRKERDRNG

SEQ ID NO: 22655 - protein, 525 aa, synthetic construct
MAKTVTVIPATVNPFTGMPVTGLHKRRVAGYARVSTDKDEQFTSYEAQVDYYTKYIKANPEWEFVTVYTDEGISGTSTKRRDGFNTMIDAALNGRIDLIVTKSVSRFARNTVDSLSTIRKLKEKGVEVYFEKENIWTLDSKGELLLTIMSSLAQEESRSISENITWGKRKSASDGKVSLAYRNFLGYEKGPNGTPVINQEQAKTVRRIYRNFMAGQTAWAIAKELTADGIPTPAGKSQWHTTTVESILTNEKYKGAALLQKTFTVDYLSKKIKTNEGEVPQYFVEDSHPAIIPPEEWDQVQKEFVRRHSLGRKYSGNSIFSTYIICGDCGAFFGAKVWNSTDKYRHTVWQCNDKFKGGKKCATPHLSEDKIKSGFVQAFNRLFDGKEEIIANCKEVARLFSDTAELDRKKDALQQELCVLSELIRKLIEENATTVQDQNSYLEKYNGYADRYKTVTEAIGALEKEILLKHARADAFRNFIRTFEAVESKLLAFDAKLWALTVDKVKVMADGSLHYIFKNGADITA

SEQ ID NO: 22656 - protein, 504 aa, synthetic construct
MEDFIYARQSVDKEDSISIESQIELCLREVGNNPHRVFRDKGYSGKNTERPDFQDMMAAVRAGGASRIIVYRLDRISRSVLDFANVISELQKYGVEFVSITERFDTSTPIGKAMLMIVMVFAQLERETIQQRVMDAYRSRSRKGFYMGGRVPYGFELENTVMEGIKTCMYKPIPEQIQVVQLIFSLYAMPQVSFADVVRYLSQNGIKNPNGKNFSRMRIRDIITNPVYAKADASIFEFFHGQGTEIINDISQFIGTNGAYLYTGNKAAKRKSISLDGHVLVLAPHAGCIDADTWIRCRRKCLNVRQIAKPVKAKNTWLAGKIKCIDCGHALSLKSYPRKRSADARYYICNSKYVSASCDGVGAIQASGIEDIVFDEMSRKLKEFNKLSYKEKHGDPIELTKLKIRAEEIEKEIATLIDKIVSASTATMEYINERIDALDEEKKTVKEKIAQMSAEMYDRQNIGVISDYMSKWNDISIDDKLTVVDTLIESIHVGHGKVKIAWKI

SEQ ID NO: 22657 - protein, 505 aa, synthetic construct
MPKTEEKQTIKAVIYARYSSDRQREESIEGQLRVCEDYASRNNMTILHTYADRAMTGRSDQRPEFQMMIRDAATMAFDVVLVYKLNRFARNRYDSAEYKRKLKKYGIKVVSAMENIADDPSGILLESVIEGMAEYYSAELAENVMRGMTENALEGKWPGGVVPLGYKLDEQHHLVIDGPKAEVVRLIYQMALEGHNQKYIIDELNRRHYTNSAGGPFSYNTLRTILRNEKYIGVFTWGTVRRENACPAILDKATFEAVQEHLKFRAKHHIRSCNEDFLLTGKLFCGCCRSKMIGVSGTSKTGTIYYYYACAAHLKKKCKTRNVRKDALEGLVCEVTTRILSSREAVEAIARQAIEMQKNKKDSLELQAIKNQIADINKKLQNCVRAVESGLISETITNHINDYEKELARLKDDAARVKLLGGDIELTQQHIEFFFWSIAQKIKTADKYKSILLSSIVRSVIVYKDYIEIQYNYKNELPILQNPVKVESSYLNQMVTQERFELPTP

SEQ ID NO: 22658 - protein, 573 aa, synthetic construct
MAKVKLPDKPRVAIYTRVSTLHQIDKDSLPMQRQDLINYARLILNTEDYVVYEDAGYSGKNTDRPKFQEMMQQVRLGMFTHILVWKIDRISRNLLDFATMYSELKQLGVVFVSKNEQFDTSSAMGEAMLKIILIFAELERNMTSERVTAAMLSRAANGQWNGGRVPLGYDYDPETKTFTINESEAAVVKIIHDKYEQERSLVSLARYLNGHGYRTRTGCTYSPSTLLIILRNVFYCGDYRYNVLKDGDRQKRKKESEWITVKDHHPAIISREQKEEIARILKENRRLECERRGIYSKKKNVHVFGGLVICGNCGHAMTSTIRPADQDGIRWSVYVCPTKRRSEYLCKGRATSEVVLGEFVFNYILNMLNVQKNFDSINSVEDMEKMLLSGSTFRDVDGIERAGLDDLYNMLASGLTEKAPFDSSVEVRKKPVVSDIELENLNTEKTKIERAAERLQSLYLYSDDSISQKDYIIQREKLMSQLAEVNEQIGMVMSNADEKDVSDEEFVHAASKFILTQKLEGRTYIYYKRLATTVSREVLRSFVMSIIENITIYDGRVQTIVFKNGLSHTFILK

SEQ ID NO: 22659 - protein, 485 aa, synthetic construct
MPTSDLKIAAAYIRVSTDDQEEYSPDSQVRLIREYARKNGYLLPEEYVFQDDGISAATARKRPAFNRMIALAKEKERPFDAILVLMFSRFARNREESVLYKGLLRKQGISVISVKEPAVDGPFGTLIESIIEWFDEYYLINLSAEVKRGMSEKFLRGEAMGTAPFGYRIDSANKTFTVDPERAEIVCDVFRSYADGAGLRDIAVQLGDAGITTRRGNRPDNRFVEYMLRNPVYIGKIRWTPGHKTRYSRVHIADGVEVVDGKHPPIVSMDLWEAVQRRMDQRKAAYGRYQCQAPAAWMMRGLVRCSACGATLIMAGRSSSCPFLQCHSYAKGSCHMSHSLSLRRANAAVLAGLRRSVGTLTFHMVPHLTSAPSRTADYGRLLEQERRRLARCKDAYQAGVDTLEEYRDNKARLEERIRRIEEQAASAAAAPESFDKAAYGKKAADILRFLETSADEGAKNEVLRSVVDHITYEKASRHLAIYFYT

SEQ ID NO: 22660 - protein, 666 aa, synthetic construct
MAYAKAKKHLKIWTKKKAALYVRVSTRYQVDKDSLPFQRKKLKEYCKFLGLEDHVIFEDDGYSAKNTERPHFQEMMSRVRSGEFSHLIVWKVDRVSRNLLDFAAMYQELKDHKVTFISMNEQFDTSTAIGEAMLKIILIFAELERNMTSERVTGIMLDRAEQGLWNGARMPVGYRWNDETKFPEPDPEEVKIVQLIFDKYEEWKSSIKIARYLNNNNFKSKRGGQWTSKLIHDIIRNPFYIGTYRYNLRESGRGPLKPESEWIVRENNHPAIIDKAQFDRCNKIMDQNGSSRDTSDLRARKYVHTFSGHLVCGKCGANMIASKDRARANGWRPSMYRCAQRSRMLDCDNSRTINESYIGPFIFNYIANLARVQKNFKNIATPEKLERELLKGETFDGVAGILPEGLNLTFQALSFRQVGNGTYIPDIDFLGDSDGASDRDQIELLKSEIGKSKNAVTRLTDVYLFDPDSMTKEEFATKKKELAKKIEGMERQLADLLDDSRNDDLADMSFIKKASAFLVAQRIVSKSFVDYVGMAQELDNEILKDFIDQIVDQIVVLDGRVQSITFINGLKHEFRYTAPAELPVCKKCGGRIGSTCGCRTRTFDFSDKRYQRIKVSDPRDMLHGKKNPVCPECFAQEGRWHHWNCKIETCPICGGRLAECEHGPNG

SEQ ID NO: 22661 - protein, 544 aa, synthetic construct
MAKKKKPAGGVAIIYARYSSHNQRDVSIEQQIEACRKHAAELGLTIIATYEDRAISGRTDNRPAFQRMMHDAENGKFSYVLAWKSNRMGRNMMQAMVNESRLMDCGIKVYYAEEDFDDSAAGRFALRSMMNVNQFYSDNLAEDVRRGLMDNASKCMANGKQPLGYKRGEDGKVVVDEPAAAIVREVYARVASGELFTDIARDLNRRGIKTADKGEWNKNSFHRLCSNEKYRGIYIYGDVRIEGGIPTIIDDTLWYKVQEALRVKKLKRNGRHRPGDEDYLLTGKLRCGKCGGYMIGMSGRSKTGDIHYYYACQNRRVGRTCDKKNIRRDVIEPAVAQAIKEYCLTDDAIEWIADKTVEYWEKADRNLQLDSIEGDLAAVQSSISNVMKAIEMGVVTETTRDRLIELEKQRTDLKSKLALAKEEVVHVDRKKLISSLLLFRNGDIHDRQYQEDLFKTFLISAYVYDDDDNGHLKIVFNAFGDNNTVDLPIDFGETDNQSAFFDGAEKFDYALHRSTKSHLMKIRWFFCFPQPLSPAPVQKGTVFR

SEQ ID NO: 22662 - protein, 626 aa, synthetic construct
MEVEIIKANPVIPGDDSGIDRSSRMRVAAYCRVSTDDEDQIKSYNSMVRYYTDLIKSNKEWVMAGVYADKAITGTKVDKRENFQKLIDDCLDGKIDMVIAKSIPRFARNTLDTLKYVRMLKERNIDVYFEVEKIHSLKDGEFLLTILSSVAQQEVENTSAYVRKGLKMKMERGEMVGFQGCLGYDYDPVTKTLSINEDGAEDVRYIFNRYVAGAGGCMIARELNEMGKRTIKGNKWTVSSVIGIVKNEKYKGDLLMGKTYTVDAISKRRLQNMGQEDKYYIKNHHPAIVSEDIFDKAQEIRNRRNGNRCKPAVESGSRIKYSRQYAFSSMIECGYCGKIASRRSWHSNTNHTKTIWQCSNSTKNGKQNCPESKGVPEEVLEKAFLESYRMLCDNNNDVIDEFIKRVDKALSEDSVESKLAKAKTTDTNLRSKRSILLEKYLDGSVAQDIYESKDLELVRKLAANDAAIENLKNSVNIEKVHRIRLKEFRKVLEENRYLERFDRDVFESLIEKVILGGYDEEGNSDPYKVTFIYRTGYKDDLYGCKNRYSNTSTNKKCSNSSDEVKAVCSNCSDDTCRVRDIAPKEKYLKLLEFRHFERHVLFSQSDRKEKKKAISNGVNVQVVVKV

SEQ ID NO: 22663 - protein, 529 aa, synthetic construct
MSRYCIYLRKSRADLEAEAHGEGETLSRHKTALLELARRMGITISATYEEIVSGETIAARPQMQRLLSEVGAGEWDGVLVMEIERLARGDTMDQGLVAQTFKYSGTKIITPLKTFDPQNEFDEEYFEFGLFMARREFTTTNRRLVRGREASAKEGKYVGSVPPYGYRKVKIPNDKGFTLEIVEEQAKVVRMIFEWYAEGAEVNGQKKRIGPYTIAVRLNELGIKSAGKKDYWTIYGVQNMLINPVYIGKIRWGYRKVKKTVTPEGMKKKSREFAQDGDYIVVDGLHEPILSEELFYKVQDLIAANPPTPIKYRHKNINPFAGLIFCAKCGHCMNYRRGYGRQPDYIGCYTAGCKNKASRFDLVEQRVLSILNSWVKDYSVDKAQIKHEADLNAELSNAISLAEKEIETLQDQLDKVYSFFERGTYTEKIFKQRSSAIEQQIMEIGEKIDRLKAEHQQVLERQNVQAEFVPSIKHLLEIYDTLEPVEKNKWLKQIIDRIVYEKNADGKYHNVDPGDFTIGILPRLPKRGS

SEQ ID NO: 22664 - protein, 613 aa, synthetic construct
MKDVEVIKARNTLSPRARTNFEKRLRVAAYCRVSTDTEDQLNSYKSQVEYYTELIKSKPEWSLAGIYADEAITGTQVKKREDFQRLINDCMNGDVDMVITKSISRFARNTLDTLKYVRMLKDKGVAVFFEEENINTLTMDGELLLVILSSVAQQEVENISANVKKGLKMKMQRGELVGFQGCLGYDYNPEDKTLTVNEEEAAVVRYIFQRYTEGAGGSVIAKELENLGYKTKRGSPKWADSTVIGIIKNEKYKGDILLGKTFTVDPISKRRLYNFGEEDQFYIREHHEPIISEEVFEAAQEILRRRAKPRSLNVDGKREKFSRKYAFSCMIECGFCGGTLTRRSWHSSSQYNKAIWQCVVSTKKGKKFCPESKGVDERTIERAFVESYRLLCQNNKDVLDEFMKRTEEALSESNAGKRLAKAERDIHALEVKKNKLVDMRLEDTIDKETYDRKYLDLSSQIEQLQKECESLQDAAETETTMRKRVAMFRQTLEQNEVLDTFDRHIFESIVEKVIVGGYDSDGNKDPYMIVFVYKTGFKNSVDGKNFKPLRKNSKENHSPAVLCSHASNEAESMCSDSSDDTLRGCELLYQNDVTNATLKPCGVRTLDVKSPVI

SEQ ID NO: 22665 - protein, 530 aa, synthetic construct
MEQYLIYLRKSRSDLEAEAHGEGETLSRHEHTLLELAKRQHLNVTDIYREVVSGDTIAARPMMQRVLSEVEQGVWSGVLVMEVERLARGDTIDQGIIAQTFKFSGTKIITPIKTYDPDNEFDEEYFEFGLFMSRREYKIINRRLQRGRLASAKEGKWPSGLAPFGYRRVKLKNEKGCSLEPIEEQAAIVRMIFDLYTVGLQDEDGSARPLSLGSIATRLNDMRIPSPSGSQWARITIRGIIKNPTYIGMVRWGSRETKKKVVDGKVVSVRGPADPEKECVFKGIHPPLIPKETFELANDKLTRSENTSTHKEKVVRNPLAGLLVCSECGRQMMRMINPVNPDMPVVRCPRRGCPNCSSYLPIVEERVIQGLSEWMKGYELEWSSTAASSSVSSVGVREKALASAEAELRKLQQQLERTHDFLEQGIYDTDTFLSRSRMLSDKIAAAKDSVTRCSRELTEEKLRETSRRDIIPKVKNLLDVYPLLETAEEKNALLKEVLEKVVYQKLNEKRKKSPDGFIIEIYPRIPKSEK

SEQ ID NO: 22666 - protein, 441 aa, synthetic construct
MAHVYKKQLRDNGVELMYAAESNVEGAEGIIIEGLMEALAEYYSAELSEKMRRGMRESALKGQAISRCRALGLTTDENKRFVIDEKTAPTVRFIFEHYAAGESSASIVAQLNAAGKRTSQGNPFNKSSIPRIIQNEMYRGVYSSRAYNVRIEDAIPAIIDADLWERAQTMLKINRQLKAKHEPKADYILSGKLFCGQCGRLMKGVSGHSGGNGEVYRYYACSNPQCHKHNVPKSMLENKVFCSIRDNLLHPAAMEALADAMMEVQKTDSQKPDLERDALERELHDVQRRSKNIMDAIETGSANPQLIARLDDLTQQESTLTFQLSTMEREQPLTFTRDQFLYLLKNFCAQPTEPQDDYMHRLLNTFVTRMEITDSELLIYFNISENTENKNKNAPQQNFTKESSTEMRLVQQSRTNPNFFLLPHRRSKCPQNGRFGCHPCS

SEQ ID NO: 22667 - protein, 433 aa, synthetic construct
VVVYKLDRISRSILDFANMMELFQQYNVEFVSSTEKFDTSTPMGRAMLNICIVFAQLERETIQKRVTDAYYSRSQRGFKMGGKAPYGFHTEPIKMDGINTKKLVVNPDEAANIRLMFEMYAQPTTSYGDITRYFAEQGILFNGKELIRPTLAQMLRNPVYVQADLDVYEFFKSQGTIIVNDAADFTGMNGCYLYQGRDVKPSKKNDLKDQMLVLAPHEGIVPSDIWLTCRKKLMNNMKIQSARKATHTWLAGKIKCGNCGYALMSINNPVGKQYLRCTKRLDNKSCAGCGKIITSELEAVVYQQMIKKLASYKTLTGRKKAAKANPKIAALQVELAHVDSEIEKLVDSLTGANNVLLSYVNVKIAELDGRKQELLARIAELTVEAISPEQVSQISGYLDTWDNVSFDDKRRVVDLMITTIAATSDSLNITWKI

SEQ ID NO: 22668 - protein, 515 aa, synthetic construct
MKRRKNIDGDCRLVAYYRYSGGSGQTEQSIEGQRRDCETFAKLHGMTILHEYIDRHISGKTDDRAAFQQMIKDSSKGAFDAVICWKTDRFARNRYDSAVYKKQLRDNGVEIMYAAESNVEGAEGIIIEGLMEALAEYYSAELSEKMRRGMRESALKGQAISRCRALGLTTDENKRFVIDEKTAPTVRFIFEHYAAGESSASIVAQLNAAGKRTSQGNPFNKSSIPRIIQNEMYRGVYSSRAYNVRIEDAIPAIIDADLWERAQTMLKINRQLKAKHEPKADYILSGKLFCGQCGRLMKGVSGHSGGNGEVYRYYACSNPQCHKHNVPKSMLENKVFCSIRDNLLHPAAMEALADAMMEVQKTDSQKPDLERDALERELHDVQRRSKNIMDAIETGSANPQLIARLDDLTQQESTLTFQLSTMEREQPLTFTRDQFLYLLKNFCAQPTEPQDDYMHRLLNTFVTRMEITDSELLIYFNISENTENKNKNAPQQNFTKKSSTEMRLVRVARVELTAS

SEQ ID NO: 22669 - protein, 525 aa, synthetic construct
MAKVTIIPSKKNPITLTPINEIIKKKVAAYARVSTDSDEQFTSFDSQCKVYEDYIKSKPDWEFVKVYADDGISGTNTKNRVQFNQMIEDALAGKIDLIVTKSISRFARNTLDTISYTRKLKANGIEVYFEKENLWTFDDKAEFLLAIMSSIAQEESRSISQNVTMGKRWKMQEGKVQFAYKNFLGYKKEDGQIKIDDDQAVIVKLIYKMFLVDGKTCSYIANYLNSNNVLTPARRHNWSKQNVLSILKNEKYKGDAILQKSYIKDFLEHKAVKNNGELPKYYVENNHPAIIEKDMWEMVQAELKRRESIGASYSSSNVFSSKLICGDCGAFYGKKVWHSNDAWRKEIFQCNKKFVKGKTRCKTPSFSEQVIKDKFIKAYNLMMVDKNAVINDAKDVINKLTDTTTLDVQISKYENEMEIVSELVKKLVKDNRIHLQDQNDYEVKYQELVDRHNKAKELYEKLNEEKKYKQAKAITLKSFLSTLEKADAEILEWDDALWMTVLDKAIVNRDETITFKFINGKEITL

SEQ ID NO: 22670 - protein, 432 aa, synthetic construct
METKITKIDALPKLEKELRVAAYARVSSEKDAMLQSLSNQVSYYNNLIRLTEGWSFVGVYADEALSGTKDTREEFQRLINDAVEGKIDLILVKSISRFARNTVTMLETVRKLKAIGVDVYFEEQNLHSLSGEGEMVLTFLASFAQEEARSVSENQKWKVRKTFESGVQWSATKSYGYRVINKKYVVVPEEAKIVKYIFDLYINGLGFQAISNKLQSENIKPFYAKAWNKTSVKNIISNINYTGDLLLQKGYSENFLTKKYVANKGAKDQFLVEDDHEAIISKEIFNKAMDLKRGRAKYFKTSRETQIRYELSGKIKCGICGKSFNHRTTKYSQKWICITYNEKGKSVCPSKCVPDAELKRITDNVGLDNIDWVEVFPNNELKIYLRDGTNVTEKWNDYSRKNSWTDEMKAKAREQAIKKSLVNYLKGGNING

SEQ ID NO: 22671 - protein, 503 aa, synthetic construct
MIAALYARYSSDSQRAESIVAQIRAGREYCRRKGYHIIKEYADEAYTGTNDNRPAYREMLRDAAAGLFEVVIFHKVDRNGRNEFDYYKNKQELARHNVRVEYSGQAFDSTSPEGALMENQLVGLAAYYSRNLSREVKKGLKENVLAGKITGGRPLFGYSVDKNKKYVINEEEAVAVRYIFERYAAGASYIDILREVNARGYRTRRGAEFGKATLHDMLNNRRYIGTCILGKNQPYLDGRRNSHRPDHDGMIIVPNGCPAIISPELFQAVHERMQENRRRGGRRTAKYPYLLSGLVYCGECGASMSGTRTRTRKKEIREYYRCCQKSNHGDAKCPNRYIYAPALENFIIERLAAVIDNESLLFRLAQKVQEKYDALVGNARVQIAALQEQEAKASKSLERLYEVIADGDTFDDFDRAQMKHLKQKILDIRAQREKLEQQPGKTISSAEIVRYIRDRFLPAIRQRTASGLTELLQYFVHTVTVFRDKIRVEYWFASCRYSSERTT

SEQ ID NO: 22672 - protein, 464 aa, synthetic construct
MARSVTVIPARNRQRETGRRAVQEKKIRVAAYCRVSTDQEDQIHSFEAQVDYYTKYINDHENYEMAGIYADEGISGTNTKKREQFKRMIADCEGGKIDLVITKSISRFARNTQDCLEYSRKLKNLGIGIIFEKENINTLDSTGELLFTILSSLAQDESRNISENCKWGIRTKFKNGEMHLNTFKFLGYDKDENGKLVINKEQAKTVRRIYRDFLIGINPAQIAKELTEEKVPGCLGQTKWYPSTVTGILKQEKHMGDALLQKTYTADFLTKRQVRNNGEIAQVYVKDSHKGIIDKQTWNAVQEEFDRREKFMESHGTDRYSYGADCMPFCEKVFCGECKSLFTRHSWRSRGIVQWQCKNHRKDGKVACTNAYVDNADLEKGFVKAFNRLVTDRDKHMERWQQMKSDGTPLEKIRAGQMMEAVGNEPLTRFVPEIAQLVLCEVTVLGAKKYEFFFLEGSRIKVSV

SEQ ID NO: 22673 - protein, 548 aa, synthetic construct
MKFKYPAMGTTKNAVIYARYSSHSQREESIEGQLRICHEYAKAEGLAIVGEYIDRAISGTTDARPDFQRMIDDAKKKQFSYVIVYRLDRFARNRYDSVLYKHELKQCGVKVVSATEGIGTGDESILLEALIEASAEYYSMELSRKIKRGRQDSAMKGNFLGGAVPLGYKVVDSKFIIDDETAPIVRYIFERYAAGIGKKQIIDELTAKGYMRRTGKPFTYRAFDSVLRNRKYTGEFTQTGITVEGGCPAIVDTEMFEKVQARLEINRRAPAKAKAKTEYLLSGKMFCGYCGEPMIGISGTGRHEKTFYYYSCVGRRGKSGCKKQHEKKDFIEWYVCEQTVQYMQDPERLSHVAKRIIEINDAEFDGGKVKELERAVENCDSDIRKLVDALTTIPDAGRAALYDKIERIGAAKADMEIDLAKLRVLSEVRYKQEDVEAWIRSMCRGDLMDFEFRRQLIDVFINSVYLFDDRVVIVYNIKNGKQVSAIDVLNAVEELDGVELFPDSAEDSSAGGNGSFLVADAPPYMKNPHLFPIGNGFGFLIFIKDIID

SEQ ID NO: 22674 - protein, 512 aa, synthetic construct
MQRAVIYARFSSDMQREESIDAQVRACKTYAKNRGYIVVDTYADEAKSGRDVTKRDAYNQMLADAMEDKFDIIIFHKIDRNSRNELNYFTFKDKLEKLGIRYEYAAQPIDALSPEGQMMETMMVGMAAYYSRNLAKETKKGLNENAYKALFNGGCPPLGYKIVDKKYVIDEQEAAAVRLIFELYLNGQGYAAICRELSAKGYTTKAGKAFAKNSLHDILCNEKYIGTYTFNKIPRKKGGRNNHAAERPEDFISIENAFPAIISKDDWALVRAKMDRNRHRAASYTAKEKYLLSGKVFCGHCGSAMVGHRIRKRYCYYGCTRKEQTPTSKCPQKMIRAEILEHWVLQILERVVFTVGGMRRIADAIVDAYEAEQKEQAGCQATLLQRKAVAEKKLNNLYKIFEEGNADEFDRQRLNQIKAELREINKSICETSVKPAKLLSKQKIAAILPAMKDEIFVKKNSYYVQQAVDLLVDHVTITDKVLKITLSTQNVCAYLVPRTGIEPVRVSLPEGF

SEQ ID NO: 22675 - protein, 536 aa, synthetic construct
MLKDTKIAVYCRVSSDEQAERGTIDNQITFAQQYADLHRLNIYDVYKDDGVTGTIPLQDRPEGHRLLQDAADERFGLVIFYKMDRLGRSTRVILNAVEALSQHGVGVQSMSEPFDTATPSGRFMLTMFAGVAELDRANILDRMYQGTLRHARLGKWCGGPAPFGYRLQDGYLVISEEPMPGQQLSEADVIRMLYSKTIEGWSALRLAQHLNALNIPNKYTLRGNVAAGSGKWHQSKILYILHNTLYYGERSFGKMSKNSNKNIILQQVPAIVSKETWDAAQAAVEQHSIMPKFIKRRSYLLRGLIRCGICGHTYVGTCYKRKAGYSIYYVCNAKNTRGVTPEPCKGQTLRGEWIESLVWEDCLRYIKQPDVIAVDEDCRYLQSADDIKKEIDAATAQLKQLDQERQTVIGLCRQGIITAADLDGQLSDITAKQNTLQQTLEGLNSQSLVTKEDAEKRVKEIADILDGFRQQLQAGGELSFDAKQGIIRTLVKQITVHTELQPGAERDIPTVRVCIDYNFTLLSAKTGMLDPYRHGF

SEQ ID NO: 22676 - protein, 401 aa, synthetic construct
MLRSLSAQVSYYSDLIQNHEDWLYVGVYADEAKTGTKESRADFQRLIADCRAGKIDMVITKSISRFARNTVTLLQTVRDFKAWGVDIFFEEQNIHTMSGDGELMMTILASYAQEESRSASENQKWRIKRNFEEGMPWNGAMLGYRLKNGRYEIIPEEADLVRRIYDEYLSGDGYLTIAKRLNKDGIPSRFGKQWGQSVISKILSNYTYTGNLILQKTFRENHITKKTIINNGELPKYHAENAHDAIIDMETFQAVQAEKARRAARFLKKPAPKKAYPFTSLLVCDGCGKNYRRKVTKTGPVWVCGTFNSMGKAACASKQIPEETLQAVTAEVLGQMDFPEELLRRLIKSILVCNGNVLIFRFFDGSEITRTWQDRSRRQSWTDEMKATARQKALERRNQNA

SEQ ID NO: 22677 - protein, 526 aa, synthetic construct
MPKVTMIPATINPLTHLPSVAARKRHVAGYARVSTDSDEQFTSYEAQVDYYTKFIQSKPEWEFVKVYTDEGISGTNTKRREGFKEMITDALDGKIDLIVTKSVSRFARNTVDSLVTIRKLKENGVECYFEKEGIYTFDGKDELLITIMSSLAQEESRSISENITWGQRKSFSDGKVHLPYKRFLGYEKGEDGRPAVVESEARVVKLIYRLFLEGKTQAGICKYLEELGIPSPGGKAKWSKTTVTSILQNEKYKGDALLQKTFTVDFLEKKMKPNEGEVPQYYVTGSHPAIIEPDEWDQVQAEFARRKTLGKAYSGKSILSAKLVCEDCGAFFGPKVWHSTDQYRRTIWQCNGKFSSEEYCHTPALDTESIQQLFIKAYNLMMQDRVQIIKEIEAWRQKLMDFGTLDANIERQLEETQVIAELVKVAVKENASTAQSQEAYLKKYEALTERYEKAAAELERLQSLRTVRSQQDKKMALYTRTLKKQPEVMHDWNDTIWTVMIEKTIVHRNGEITFVFANGTEIKVGA

SEQ ID NO: 22678 - protein, 505 aa, synthetic construct
MNKSILSAMYLRKSRADDPGEDVMDTLYRHESILRAVAKRGKYLVHEDCIYREVVSGENIFSRPQMIRLLEDVTKGKYQSVLVVDIDRLGRGDMRDQGLILETFKAADTLIVTPEKVYDLNNEMDEELTEFKGFMARREYKMITKRLKRGREQTVRAGGFVADPPYGWKRAKINNLPSLEPHETEGPIMQMIVEMYGNQEPISTIQERLAAMGVYNRKGQPFCRSSIRHIATNPVNAGLIRWNRYKNIRKGQNGSPTGYEIENPPEDVILVKGVHQPQVSVEAYQKCVNVCKSRAAPSVKKGLHGVVRNPLSGIVICSNCGSRMQMQHSSTKDTRTLLCTHPGCMPGVDIVRAEAAMLDILRDKLEEIRTGQGKKQQDKALAALQKSVHAAEKNIQTLKKQQDKLYTLLEQEIYSLEVFKERNQVLSQKLTDAQEQLKILQDQVDDLSSRKEERLAQNIENVLANYEYSSIKEKNRLLKTVVEKAIYFRKTRTSPFALDVTFLNM

SEQ ID NO: 22679 - protein, 511 aa, synthetic construct
MKRITKIDAAAKETKKLRVAAYARVSTDSADQLVSLDAQKEHYEQVIKNCPNWEFAGLYYDEGVSGTKMAKRDGLLRMLADCERGLIDYILVKSISRFSRNTVESVETVRRLSAMEIYIFFEKENIDTGKMEGELMLSIMSSLAEDESRSLSENNKWSIQKRFQNGTYVIGTPAYGYKNVDGKMVIDEEKAAIVRRMFASVMEGKSGAKIANELQAEGIPTARGGKWQSSVIIGIIRNETYIGVAVFQKTYKDDQFNSRVNYGEKGMYRIEGHHEPIVSEEVFRAANFAVDNNAREKGITKSRKYTKRYALSGKVFCGECGGKCKRKKIYGEVWYGCDTHVKDKKKCRQLPVRADMVEAAFVNMMNKLIYGRDAVLLPMSGRLLGGGDKEVLGRLESLNTELAMVAERRQAADKFFAKGLLDTAVYREELDALAQKEKEINVARAGIEGDPDLDFDRQLALNELLKYTAKAEQLTAFSDEVFTKHVDRVIIFSRKEVGFVMKCGPVFRERI

SEQ ID NO: 22680 - protein, 519 aa, synthetic construct
MAMAQNITFIPAVKTVGTQKPAEKKQKVRVAAYCRVSTEFEEQESSYETQVAHYTSYINGNPEWEMVEVYADNGISGTRTAKREAFNRMIKDCEAGRIDMIITKSISRFSRNTVDCLKYTRKLKEMNIAVFFEKENINTLDAKGEVLMTIMAALAQQESESLSANVRLGIQFRNQQGKVQVNHNWFLGYTKDESGKLVIVPEEAEVVRRIYREYLEGASFVKIRRGLEADGILNGAKHARWHETNIKQILTNEKYIGDALLQKTYTVSVLDKKRSRNDGVMPKYYVEGCHEAIIDRETFLLVQEEIARRSSLYKGGKKRVYSSKYALTGNVICAHCDNIYRRVVWSVGNEKPVVWRCVSRLTTGQECSARTVPEKDLHAAIASAVNMAYSNRDDIIPVLKENIENVVGCDVDDENEVIDGMIRKSQMDLLDAGRDEARVQEIGERIVSLRERRQNVLTQAALRKDEIDRIKAMIGFIEEQTGEAEYSEALVRSMIEKVTIHDDRITVEFKSGLAIDVDA

SEQ ID NO: 22681 - protein, 518 aa, synthetic construct
MGYRYCAYLRKSRSDAENRSASDAEILARHERLLVETARRRGVAISAVYREVVSGDSISARPEMQRLLSDVMAGKWDGVFAVEVTRLARGDTIDQGVVAQVFKYSGTKIITPDRVYNPSSDSDEEYFEFGLFMSRREYKMINQRQQRGRLASVQEGKWVSNKAPYGYIRVKLDRQKGWTLRPNEHAPVVQDIFRWFTGTDAPPIGVSRIVRRLNESGIPSPAGGVWTNSVVRGLLSNPTYAGFVRWGNRAMKKTYRDGHLTISRPRARPGEAMLFPSLHPAIVEKGVFDLAQAQLSKNSSRPGPKQVAMKNPLSGLIICADCGRAMVRRPYQSGRQDTLICPYTDCHNVGSNLSDVERTLLDSMRLWLAEFERCSDAAPNGREELESIRRTISEHEKALETLSSQLNRAYDLVEQGVYTSDVFLARSRSIADKQEYHNEKIRSLEQELSDRELVASSRDEIAPKMRHVLDAYPLASSPEEKNVLLKSVLEKVLYKKTQRDRWGGNGMQLELFPLLPHF

SEQ ID NO: 22682 - protein, 529 aa, synthetic construct
MSRTAARSVTVIPPTINPLTHLSKVAVQRRRVAGYARVSTDSDEQFTSYEAQVDYYTQYIKRNPEWEFVKVYTDEGISGTNTKHRIGFNEMIADAMSGKIDLIVTKSVSRFARNTVDSLVTIRKLKEKGVEVYFEKENIYTFDGKGELLLTIMSSLAQEESRSISENVTWGQRKRFADGKVNLPYKQFLGYRKGADGFPEVVPEEAIVVHRIYTRFMEGLTPGAIAKELTADGIPTPSRKQCWQTSTVESILQNEKYKGAALLQKCFTVDFLTKKRKVNEGEVPQYYVEHSHEPIITPEEFDKVQTELARRKQISRQYSGKSIFSSRIVCGDCGSYFGSKVWNSTSKYRRVIWQCNGKFKGEHKCETPHLDEETIKARFVTALNAIIESKDNILEDCRLMQATLTDCTGIDAEIESLLEEIEVVTELTKRCIAENSQTAQNQEEYAARYNGLVERYEKAKARLEQLRTTKAAREAQTEAIGAFMFEVQELDALTEFDEKLWLTVIDTVTVHADGRMTFKFQGGKTLTSY

SEQ ID NO: 22683 - protein, 401 aa, synthetic construct
MLHSLSAQVSYYSKMIQSHNGWMYCGVYSDEAVTGTKRERAGFQHMIEECRQGNIDLVITKSISRFARNTVTLLQTVRELKSQGVDVFFEEQHIHTMSADGELMMTILASYAQEESLSASENQKWRVRKAFENGEIINLRFLFGYDITPDGIQVNEKDAAIVREIFARFNGGESMSSICRDLDARGHKGVLGGTWCAERMRNTLSNEKYLGNALLQKQYRNNHIEKKLLPNRGELPMYYAEGTHEPIIDQATFDKAQERLRMLAQQAANRKKPTRSVFSGLICCGLCGNTYKRVTYRKKHYWNCTTFQTKGKSECAAKRIPEETLEVLTCEVLGAVSFDPDMVRSKITAIRAEKNNMVVFCMDDGSEIVKRWTDRSRAESWTPEMKEKARQRALQARRKKK

SEQ ID NO: 22684 - protein, 526 aa, synthetic construct
MLYELSPSDISHIIIYLRKSRSDDPYMSVEEVLSKHETQLQEHAVSVFGQRIPEEHIFREVVSGETIADRPVMKQVMKLLETGSIKGVLVIEPQRLSRGDLEDCGRIINAFRYTNTLVLTPPKNYNLADEYDRKFFEMELTRGNDYLEYTKKILNRGRIASVKQGNFIGSVPPYGYRKVQIGTGKSAYHSLEIIPEQADAVRLMFQLYLAGNGFTNIAKKLDELGIKPSKSSVWSPAAISDMLENPVYIGKIRWNWRKTEKKIVNGQIVKTRPKTSDASEWVYVDGRHEPIIDLATFEAAQERRGKTPKVKKYSELKNPFAGLLFCGTCGKAMSLKIYTQKNGSKCEMMLCNKQSWCNTKSVKYDVFVDRIIETLENTIADFELKLENDDSSTTDLQASIISNLQNELKRLKEKDIRQKDAYEDGIYTKEEYASRNAKLQEEIAKASAALEQARTSIPTAVDYREKIARFTDCLAALKNTDMSATEKNILLKSCIDKIMYHNHMESKPGIGRYVENVFTIDVFLRL

SEQ ID NO: 22685 - protein, 700 aa, synthetic construct
MDSNAFLNDLMSKMKLPEAKGKKKAEQSESVAQILAVMQKVKTEKKKPPVTSYAPVKEMPMNEPESMEEFSQLASDVMQECRPAMPTVSAASQEKAVRVAAYIRVSSTNPAQEDSYEMQERYFMSLLAGNAGWTSAGIYSDHGISATSREGRTGFNRLLRHCKQGKIDRVICKSISRFARNTQDFLVALRTLKENNVTILFEREAMDTADAYSEFILTTLAAIAQEESRSISANIAWSNQKRFPAGNVCNKDIYGYEFRKGEYTVNENGYRYRAVFIIPEEAEIVRMVFRLFTKEELSFTQIAQKLDALHIPPPNSGCRQRQKRKPTVLPAGALKEEDKRGWTATDVRYMIANVRYCGSVLCQKTYTDHRNGHKQKVNKGEKPKYLIRNHHPAIISEELWQEAQEVWKAYTAKYRGIEKGRNERNYSKLLLCGECGRYFQGHSTTRTTIWRCATKLAQQGQKRCRMEPIYEEQIQTLLCKAFAEKFKLGEKMDAEVHEVMQMISKAPIDNARNQALKNLTEKLREIHDFDQMEQEGDFLKRQLSAVNYSIRDVHQHIRDIQAEKEALKVRCEVLGEPRDKEAVTELENRLLNEEEQLEKLEHEAQQQAEQVRYMEDYWKKLEQTHEIREKTLQWLDSLAGGTQMFLDEAVGTYVKAFVLSVTIFSPKHFRIHWFDDTCTEVECDSVFEGYQQPGMIRRKY

SEQ ID NO: 22686 - protein, 546 aa, synthetic construct
MPRKPAKHPAKPKRGKKLEIEEPGVLYGRYSSHNQKDISIEQQFEKCYELAAEYGIRIIDTYADRAVSGRTDKRVDFQRMMADAAKGKFRYVLAWKSNRIGRNMLEALVNEARFQELGVRVLYVEEDFDDTAAGRFAARSMMNVNQFYSENMAEDIKRGLYDNAANCMVTNGHLPYGYKADETLHYAIDEPRAAVIREIFTRVSCGEAFVDIMSSLNARGITTSYGRPWGRSSFQKILSNERYRGIYIYGDVRIEGGIPRIVSDELYFKVQEAITTKKNPQGRHRVNGDYLLTGKLFCGHCKSPMTGISGTGRAGKLHFYYVCQKRRTEKTCHKKNVRRDVIELKIAKAIRDYALKDDIIEWIADSCVEDHDRRVSESHLSVFEDQLAEVNRSIKNVMSAIEKGIITETTKGRLMELEAERTAIEGKICAAKAAIVPTNRERLVEWLRSLREGDMHDKKYQAGLFDTFLVAAYLYDDNRVKIVFSFAGDKNTIEIPLEDVIDSIDDEASCVRLSSTLSHHENPVIFEITGFFRFKFFVGAMQQGVK

SEQ ID NO: 22687 - protein, 520 aa, synthetic construct
MPRKKAPAAEAPRLVAYYRYSGGSRQTEQSIEGQRRDCEAYARAHGMTILREYVDRHISGKTDDRPAFQQLVADSAAHTFDAVICWKTDRLARNRYDSAVYKKKLRDNGVEILYAAESNISGAEGIIIEGLMEALAEYYSAELAEKARRGMRESALKGKALGSSRPLGLTVDADKHYVIEPKGAEAVRYIFEQYAAGLSSSSIVERLNAMGLRTSHGGPFNKSSINRIIQNEMYRGVYVSKKFDVRIEGAIPAIIDNDLWERAQNMFERNRQSRTPHASRADYILSGKLYCGECGCLMKGVCGRSSGNGQMYHYYACPGRSIGRACTRKNIPQDELEAMVVNAVADLLLEPALLEQIADAIVELQQAEAARPDPEKQALEKSLSDVRSKIQNILTAIENGTSSVALSARLADLEQQESTLSYQLSSLTAKKPLTFTRDQILFLLQQFRVSPSERTKAYCRRLVDTFVDHIELTNTELILYFNISDETIDKNKKAPRSNPSKESSTEKRLVRVARIELTAS

SEQ ID NO: 22688 - protein, 528 aa, synthetic construct
MAYCIYLRKSRADRELELQGFGETLKRHRDTLIELAKKKNLPIGEIYEEVVSGDSIAARPQMQRLLNDVSDGKWEGVLVMEIERLARGDTSDQGIVTKTFTYSNTLIITPMKTFNPTDEFDQEYFEFGLYMSRREYKTIKRRLHAGMEASCKEGNYIHHTPPFGYSIVKNKKSKGYRLEPKPGEAEIVKLIFQWYTKGILKEDGSYELLGTARIADKLNSEYSIKPLGGVWTIPTISTMLRNEHYLGYIVFGKKKRKKVVENGIIVDKWTRNESYGLYKGKHPALVSQDTFNLAQERLSRNPRRPSKTITNPLAGVIKCGMCGRSMYRRPYQKRGQSASLICSEKTCHNVSSAFYLVEDALLTAIKEWIDGYEIKEEANKYDTSILESKTKLLEEQQKQLITYKNQLTKVFEAYENGIYDSDTFLNRQKTVSESISSTEEAIVKLNKEIANEREIISHQEEIIPKAKKILEIYKTSDDVQLKNDLMKSILDKVVYTKTANGHFKDQRQDDFKLELFPKLPKNKGDSSE

SEQ ID NO: 22689 - protein, 484 aa, synthetic construct
MINAVGYTRFSTDRQTENSTKFQMEAISRYAKANDINLLRYYSDEGFSGTNTERPAFQDMCAAADMKLFDAVLIYDITRASRDVVDWMEFRKIMRSLDIQVISVTQHLGDALDPESYLVELINAGIGQHHVLQTRQKSIAGTTAKAREGVFLGGFAPLGYHIEDGKYIIEETEAKYIRMIFDMYASGKSYNEIIDALGGLKGRRGAVIGKTQLKSILQNERYIGTYTWNKKQYKVMNKWAGGKPNPNIVKIEGVIPPLVDMDTWERVRVRMADKKRNATNKAKREYLLSGLITCDCCGGQFVGHTSTNTRGYQTVYYTCGTKYRNHTCNSKNINAFRLEEFVINQLKNYIRQMDFEREADAIMEQLSKASPSVSAEKKELKEIIKKINNGVAAILNGLVMPELQDEIDRLRIRKSELEDIISNAEAHTGKVDRNGLIAYMKKAAEELESNPAAAIKELVKIYAHADGSCTVNIGVHLSHCGDRI

SEQ ID NO: 22690 - protein, 521 aa, synthetic construct
MNKSITVIPARRRVGNTVNKEAKPKLRVAAYCRVSTDSDEQATSYDAQVEHYSNFIQKNVEWEFAGIFADDGISGTNTKKREEFNRMISECMEGHIDMIITKSISRFARNTLDCLRYIRQLKEKNIPVFFEKENINTMDSKGEVLLTIMASLAQQESESLSQNVKMGMQFRFQKGEVQVNHNRFMGYTKDEDGHLIIEPTEAEIVKRIYREYLQGASLKQIGDGLMKDGILTGAGKPKWRPESVKKILKNEKYIGDALLQKTYTVDVLTKKRVKNNGIVPQYYVENSHKPIIPRDLYMQVQEEMLRRSNLHSGVNRKKRVYSSKYALSSIVYCSKCGEIYRRVAWNNHGKRSTVWRCVNRVERGPGCCDAPTVKEEELQNAVVRAINMALGVKEDMLAALEKNIAMVLALEDETSMESLDAKLEELQQELLKRANAGQDYDDLADEIDSLREKKQEVMADNAEREGQKQRIVEMQQFLAGQTEQIEEYDENMIRRMVEKITVYEDKFTVEFKSGTSVDVER

SEQ ID NO: 22691 - protein, 537 aa, synthetic construct
MTENKNRVCCLYRVSTDKQVDFNSNHEADLPMQRKACHKFAEAKGWVIVHEEQEEGVSGHKVRAEARDKLQIIKEYARKGKFDILLVFMFDRIGRIADETPFVVEWFVRNGIRVWSTQEGEQRFDNHTDKLLNYIRFWQADGESEKTSVRTRTSLRQLVEEGHFKGGSAPYGYDLVKSGRINKRKHELYELHINEQEAEIVRLIFDKYVYEGYGAQRIATYLNNAGYRARSGKCWHPGSLRGMVGNLTYMGVLRCGDARSELMPELQIIPQEEFEAAQRIREDRSAHAAEEAEHHVPLRTRGQALLSNNVYCGHCGARLALTTSRKWRKLSDGTLDDTLRIRYTCYGKLRKQTDCTGQTGYTMHILDEIIDKMVRQIFSRLRGIPKEQLITSRYAKETAERKNHLQALQAERDKAEKDLLALKAEILAVIKGESAFPKDTLAEMIAAQEKKHTELETLCEEASAELERNAELMANVSQLYEELISFADLYDSASFEAKKMIVSQLIRRVEVYRGYQIHVDFNFDLAQYLENSDELAC

SEQ ID NO: 22692 - protein, 550 aa, synthetic construct
MYYQPKINFSPNEVIAYLRKSRSDDPLLTVEEVLSKHETMLDEWAEKNLGAAVPEENKFREVVSGETIAERPEINRVLRLIESPKYKAVAVVEPQRLTRGDLEDIGRIMKLLKHTSTLVITPQRIYDLRDEYDWDTFERELKRGNDYLEYTKKILNRGRLLSVSQGNYIGNVPPYGYSKTFVTEGKRRYPILVPNKEEADVVRMMFDLYVNKDMGCQNICNRFDEMGIKPPKGKHWSPSAMAKMLENIHYIGKVKWNYRKTLTIVEEGEFKKTRPIAKAGEYLIYDGKHEAIVSEELFNAAQAKKGKHTRQKPNTKIRNPFAGLLWCKCGRAMSLRAYKSNISAPRLLCDGQTHCKTGSCLYSEMNERVCSILTNCIHDFEIRLQNNEGDSVKQHMRLIKNLEVRQKELEEKELAQWEAQADPDPAKRMPQHVFQQLNERLLKEKEEVRQTLCKAYESMPEPVNYEEKIAQFTEALNALKNPKVDAATKNRLLKACIDRIEYHRDAPQRIRSQKVIYYDPEQKRTRCKSPLNVGGNWTSPEIILDVKLKV

SEQ ID NO: 22693 - protein, 514 aa, synthetic construct
MPKKNPSGGKRLVAYYRYSGGSHQTEQSIEGQRRDCETYARIHGMVILHEYIDRHISGKTDDRPEFQQMIADAGKGMFDYVICWKTDRIARSRYDSIIYKKKLRDNGVELLYAAEANVEGSGGIIVEGLMEALAEYYSAELAEKVRRGMRESALKGKAIGSSRPLGLTVDKDKKYIIDPAGAAAVRYIFEQYAAGAASSAIVAHLNEQGLCTSRGNPFNKSSVVRIIQNEVYRGVYVSPKFDVRIEGAVPAIIDDDLWERAQKMFVRNRQSRSPRNDRADYILSGKLFCGECGTAMKGVSGHSSNGEVYFYYSCPCKDCHRRSIPKDELEGLVIRTVCNDVLQPDVMDRIADSVIEAQTAELNQPNPEKDALQHELADVQRKAKNLLAALENGTAGAMLTNRLAELEQQADTLSYQLSSLESEPKFPVFSKEEVLYLLEQFLIAPSEKTKAYRRRLIDTFVSKIEVSNTELTIYFNIAEEDCGKMKKAPQSNQPEGCSTEKQMVRVARIELTAS

SEQ ID NO: 22694 - protein, 485 aa, synthetic construct
MPTSDLKIAAAYIRVSTDDQEEYSPDSQVRLIREYARKNGYLLPEEYVFQDDGISAATARKRPAFNRMIALAKEKERPFDAILVLMFSRFARNREESVLYKGLLRKQGISVISVKEPAVDGPFGTLIESIIEWFDEYYLINLSAEVKRGMSEKFLRGEAMGTAPFGYRIDSANKTFTVDPERAEIVCDVFRSYADGAGLRDIAVQLGDAGITTRRGNRPDSRFVEYMLRNPVYIGKIRWTPGHKTRYSRVHIADGVEVVDGKHPPIVSMDLWEAVQRRMDQRKAAYGRYQRQAPAAWMMRGLVRCSACGATLIMAGRGSSCPFLQCHSYAKGSCHTSHSLSLRRANAAVLAGLRRSVGTLTFHMVPHLTSAPSRTADYGRLLEQERRRLARCKDAYQAGVDTLEEYRDNKARLEERIRRIEEQAASAAAAPESFDKAAYGKKAADILRFLETSADEGAKNEVLRSVVDHITYEKASRHLAIYFYT

SEQ ID NO: 22695 - protein, 523 aa, synthetic construct
MTTAKNVMVIPARRRLGNTVQAEERPKLRVAAYCRVSTDSDEQATSYEAQVEHYTAFIKQNSEWEFAGIFADDGISGTNTKKREEFNRMIGECMAGNIDLIVTKSISRFARNTLDCLKYIRELKEKNIPVFFEKENINTMDSKGEVLLTIMASLAQQESQSLSQNVKLGLQYRYQNGEVQVNHNRFLGYTKDEDGHLIIEPVEAEVVKRIYREYLEGASLLQICRSLKADSILTAANKPHWRPETVKKILQNEKYIGDALLQKTYTVDFLTKKRVKNNGIVPQYYVENSHEAIIPRDLYMQVQEEMVRRANLRGGKDGKKRVYSSKYALSSIVYCGQCGDIYRRVHWNNRGYKSIVWRCVSRLEEKGSECTAPTINEETLQTAVVKTINELLANKEPFLQALQKNVATILNEENDNATNDIDSKLEELQQQLLIQAKSKNDYEDVADEIYRLRELKQNALVENAEREGKRQRIAEINDFLNEQSCQLEEYDEQLVRRLIEKVTVFHDKFAVEFKSGVEIDVEG

SEQ ID NO: 22696 - protein, 521 aa, synthetic construct
MPYCMYLRKSRKDFEAESAGQGETLARHKAALLETAQRLHLAVSEIYQEIVSGDSIAARPEMQRLLADVETGKWDGVLVMEVERLARGDTMDQGQVQRTFVYTGTKIITPTRTYDPSDPADAEYFEFGLFMSRREYQTINRRLLAGRERAVREGKWPQGHAPYGYRAVKVPKGKGYMLEIVPEEAEIVKSIFNWYVNGAEYNGAFLRVGARRISTMLNSMGLTTQAGNLWSAPAVRVILKNHAYIGKVTWYKQTLRKSMSNGVVVKKLERTPERTLICDGLHEAIISDELFEAAQARLSADSTGPATKGPLQSPLAGLLYCGLCGCVMARQHEKGKPAYYVCRNPLCRCRGSKLEVVEQRVVATLAHWLTGYEITAKAQAQTVDIGALQSALDGAQRELLAYQQQQTRLYDLLERGIYTEQVFLQRQAAITGEVQRLQAAVADTEAAIAKAVRINASAREIVPAVHAVLDAYPAYTTAQEKNDALRMVLSRVEYTRTVGGFGSDPQDFEVKIFPRLPEPVE

SEQ ID NO: 22697 - protein, 550 aa, synthetic construct
MADGQQWLSAVFFSLYAKKRKVKGNLRKHLLLLAFRVIYRLPKRKEVRLVEIQIREGSREQKRKLKVCAYCRVSTDADEQENSLENQIRHYETVIKANPDYEYAGVYSDFAISGFKEKRPGLQKMLADAEKGKIDLILTKSVSRFARNTSIVLEATRKLKELNVGVFFELQNINTLSGEGELMLTILAAFAQAESESGSVGAKMVYQRKYEAGIPVQYLERSFGYTKDERGVFVADEAEAVWVRKIYEMAADGYTPASIKRYLNENGVKTVGGVQWVDSTVFRLLENEIYKGDYIMHKHFVNEERKLVRNRGEVDAWYIEDDHEAIVSPELWQKAQDALAVKRDYLAEGSVIEEFTEENYPYMNKIYCAKCGYPLYKRIYSKGNRLNWGCSGTKRYGKSFCDGINIPDGVLRSAWHFEENTYIDEKASDKGVKEFTYLKERSWKRRHKKKQPSAIPENTETEYPYREKIFCALCGSRLVRYVNPQNHKVTWVCNRRKRKGKEACDGTRVPDTVIKGWGEIKNDIYIQRKDDKNGKKRYSYTSKKPSGIRV

SEQ ID NO: 22698 - protein, 490 aa, synthetic construct
MTDKNLLVITLHRKEPGKQRIAAYCRVSSRSDEQLNSLANQIDFYRSRFENDDTVVFVGIYAEEGLSGTQAKSRPQFMKMIEDCRSGMIDCIWTKSVSRFGRNTVDTLIYTRELRSLGIDVFFEKENIHSTESSGELMLTLMAAFAESESETMSENIKWGKRRRYEQGITGSITLNGMYGFRQNKGIVTIVENEAELVRRIYKDFIDGYSYGEIADRLIAEGVPTRMPGASWAKTTVQHIIRNEKYCGDCLFQKAFIANPITHQQVRNNGELPKYLVEDCLPAIVDKETWKLAQAVAARHTPHKQASNERYPFTGKLFCGVCGKPYCYYHYTTTNKQPLAAYRCMSRKTQSAVEVPGQTYTPPHKATFNLNASPELIAYRERYCKPPKERPMLCTDVRISIDLPQKAFCRAWNLIVAKKLRYQATLRSTVDNAEDILVQYRAEEMCLLIDEIGKINEFSYPLMLKTLDRVVVNTNGKLSFIFQSGIKITV

SEQ ID NO: 22699 - protein, 548 aa, synthetic construct
MTNKKVKKIEATKPTLSAQYSTFTRKRKVAAYARVSTAKEEQENSFDAQVSYYTQKIQANPEWVFVEVYSDEGITGTNTKKREGFNRMIEDALAGKIDLILTKSVSRFARNTVDSLVTIRQLKEKGVEVFFEKENIYTLDAKGELLLTIMSSLAQEEARSISENTSWGRRKSFADGKVSLGYSNFLGYDKGPDGELVINEEQAKIVRRIYAEFLAGKTPGGIAKGLTADGIETPGHKKVWQASTVLNILKNEKYYGAAILQKQITVSYLTKEKRPNTGELPMYYIEKDHEPIVSPETFQMVQEEMRRRREAGSNMQCVSIFSSRIICGDCGGYYGRKIWHSSTKYTAWHWHCNAKFQKRKYCETPTLKEESLEETFVEVFNGLIADKDEIMENYRLCIDAVTDDSEYRRQLEDLNNGCGEVQTLIRSLLMTYSRQDTAEDIHEKLQEYEERLDTMARLKQELDLKIAACAAKRVQITGFLNELMKHDAPLAKFDPLVWQAVINYATVNRDCTITFTFRDGTEKTVPIKNGVRPYTKRNKPQEVGGNDG

SEQ ID NO: 22700 - protein, 434 aa, synthetic construct
MEKTIVNIAPAAAETPRTKRVAAYARVSCGKDTMLHSLAAQIDYYRNYIIRNPEWRFAGVYADEAKTGTKDNREQFQLLLTECRSGNIDMIITKSISRLARNTVTLLETVRELKSLGVDVFFEEQNIYTLSAEGEVMLTLLASFAQAESLSCSDNCKWRIRKGFEEGRASTCTMLGYRLINGEITLIEDEAKIAKRIFDLYLAGYGLQKIANILNEEGLYSIFGNEWHPTTLRKVLTNEKYCGDLLLQKVYCENHLTKKIVPNNGELPQYFVEDDHPAVVSRETFAAVQKELKRRAEEKTPTVGSTSVFTGKIRCSCCGKNYRRKTTPYNTVWCCSTYNSKGKNHCPESKVIPEETLKRAVAGILKTDSFSGEEFERQICTIEAHPGNLLRFIFIDGSTTDYVWKDRSRSESWTDEMKAAAAKKAKERYASHDK

SEQ ID NO: 22701 - protein, 549 aa, synthetic construct
MMGEWQNAQAEKWAALYVRLSRDDENEGDSNSIAHQIEILSKYARDRGITNFKIYKDDGYSGTNFNRPGFQEMLTDIEAGRVSTVIVKDMSRFGRNYLEVGMYTEIRFPELDVRFIAINDGVDTDSAADNDFTPFRNIINEWYAKDTSKKIRSYMKSKGESGKRLTTIPIYGFTQTSDTDKNWIIDPDAAEVVYRIGIDILNGYGPTQVATRLERAGILTPTAYFESKGMSYRVGSMKQPCQWSESMVSNIMDHYLEYLGHTVNFRTHRKSYKTKKTVENPPEQWRVFENTHPAIWTEEIAEAVKRAVTNRRRVTKMGDMGMFSGLVYCADCGKRLYFCRTVKWEHTQECYTCSTYRNRNGCSAHYIRAVVLEQLVLENLQKVISFAHFNEEAFAEMLMDGRKKALDAKQASVRRALNRQERRIAELDTIIRKLYEDNVCGKLTDERFAKLSAGYEQEQTELAASVQNLRSELAAAQEQTGNAEKFLKLVRKYTEPKELTAVMVQEFIEKIIVHAPDKSSGHRVQQIDIRYNFIGEMEFSAEYARKTTA

SEQ ID NO: 22702 - protein, 523 aa, synthetic construct
MAKSVTTIPATLSRFTAAPINNTKKRRVAAYARVSTDNEEQLTSYEAQIDYYTNYINGRDDWEFVGVYPDEGITGTNTKKREQFRQMVADALDGKIDLIITKSVSRFARNTVDSLTTIRKLKEHNVEVYFEKENIWTFDSKGELLLTIMSSLAQEESRSISENCTWGQRKRFADGKVTVPFKRFLGYDMGPDHNLVVNPEQAKLVKRIYGMFLQGQSPFQIARTLTEEGIPSPGGKDHWNPSNIKSILTNEKYKGDALLQKSFTVDFLTKKKKTNEGEIPQYYVKDNHEAIIDPETFEMVQTLMTTRTKGRNRKSSVSIFSSKVKCGDCGSWYGPKVWHSNDAYRKVIWQCNHKFDGQKCATPTLTEDEIKELFLRAANQVIDQKEQFIAIYKQVLSRSLDTTALESELSDLEAEINIAAELIDECIKENAHVAIDQAEYQKRYDGLVARFDKAKARHTEVTDLIAECTARRHQIETYLRELRNREPLTEFRETDWLAMVDYITVHSKNDIRVTFKDGTEIKA

SEQ ID NO: 22703 - protein, 590 aa, synthetic construct
MKTVEKIERKLPVLKTRKRVAAYARVSMESERMQHSLSAQVSYYSALIQKNPEWEYAGVFADYGISGTGTKKREEFNRMLAECEAGNIDIILTKSIQRFARNTVDLLNTVRHLKELGIEVRFEKEKINSLSGDGELMLSILASFAQEESRSISENVKWGTIKRFKQGIPNGKFSIFGYEWQDDKLVIVPEEAEIIRWMYAEYMKGASRIEIGRALMDRGIYTRQGKPWVDSNVKVILTNITYTGNMLFQKEYCEDPITKHRRKNYGEMPQYFVEDTHEAIIPMDEWQAVQAEFKRRRDLGPFGNKSLKLSAFSTKIICGCCRKHYRHSGKRNTAGEVYYIWICQTKSQKGVSACPSKNIPEKMLQNTAAEVLGLDKFDEDVFSQQIEEVIVIGDDTLTFRFYDGHEVTTKWQSTAKTDWWTDERRKLWGERHKRKDTNPNRNTFYEFTGFIKCGCCGANYRCQSGKRKDGTPTRSWYCTGPRSECRNPAIRDETMKRLVTEILGLDEFDEATMDAQIESATILDHMVTFHFRDGHIESRDFLDKRHGTPWTEERREKAKKSMKAAWTDERREAMSERIKKIRSEKKWPNP

SEQ ID NO: 22704 - protein, 554 aa, synthetic construct
MAKRSAKKNEYQSAEQIGVIYARYSSHNQKEESIEQQIAECSDFAAKNGIRIVGIYADKAVSGRSDRRPNFQRMMRDAEKRQFQIVIAYKSNRIARNMLNALQYEARLDLLGIKTLYAKEEFGNTAAGRFALRTMMNVNQFYSENMGEDIKRGMVDNANECKVNGMLPLGYVKSKEGKYAIAPDEAAVVREIFDSVLKDVPVAEIARSLNQRGIHTKLGREWNKNSFHIMLKNDNYIGVYRHSGVVVEDGIPPILEKEVFTAVQEKLANKKKTAGRRSANGEYLLTGKLFCGYCGSYMIGVSGTGENGTVHNYYQCQKRHAEGRCEKKNVRRDFIEKLIARLTQDYILQDDTIEWIADSTMSFQAMARRESGVAQLERDLADNRKVAKNIMAAIEQGIITETTKARLLEVEGTIHDLERSLSIAKAASQPIERERVVFSLEQMREGNVGSKEHQKKLIDTFVKSVTLWDYRIQIDYYHTPGKHKFSYSLEELTSKAENESNASDVRTDSLELHHCRRELHRFTTAFLLAAAPLRLYGTIKKTQEFKFLRLFCMY

SEQ ID NO: 22705 - protein, 581 aa, synthetic construct
MAYAMKVPAASADDRIIAIYVRVSTGYQVDKDSLPFQKKELKAYCKHILHVDMSRVEIFEDAGRSGKNTKRPAYERMMQKVRAGLVSHVLVYKIDRISRNLVDFSLMYDDFKYNRVTFVSLNEQFDTSSAIGEAVLKIILVFAELERKLTSERVKDIMIGRANEGKWNGARVPYGWDWDSSAMWPVHSEKEAPFGRAMYEMYLEVKSTGKIRDYNNAHGIPTKRGGEWTSKTVGDFLRNPMNKGDYRYNYRESARGRKKPIDEVVYLEGVFEPLVDPEIWEKVNKIMDINRDKRNMGGSHPVEKNCNVFAGLIQCGSCGSGYLVGKKDKRRKNGFTPSMYYCGAKTRAIHCQNPNVSDVKIGPFVINYISAMVRVSNERRKIKTPEDLEEMLLSDRAVFADIMGLSSDSLNNTFELLTGKSATGGALWRADLVDQEGAAADPAEIESLKDQIRKYERAKERLEDAYYFSDDGMSEKEYLEKKNRFDSGRVAAENKLKELTETHIASGVDESAFMKSASAFLLTHKIRAGSHIVYSDLAGMVEEESIKEFFNLVLDHITVKDRRVTEIVFANGLSHKFIYRD

SEQ ID NO: 22706 - protein, 529 aa, synthetic construct
MSRYCIYLRKSRADLEAEAHGEGETLSRHKTALLELARRMGITISATYEEIVSGETIAARPQMQRLLSEVGAGEWDGVLVMEIERLARGDTMDQGLVAQTFKYSGTKIITPLKTFDPQNEFDEEYFEFGLFMARREFTTTNRRLVRGREASAKEGKYVGSVPPYGYRKVKIPNDKGFTLEIVEEQAKVVRMIFEWYAEGAEVNSQKKRIGPYTIAVRLNELGIKSAGKKDYWTIYGVQNMLINPVYIGKIRWGYRKVKKTVTPEGMKKKSREFAQDGDYIVVDGLHEPILSEELFYKVQDLIAANPPTPIKYRHKNINPFAGLIFCAKCGHCMNYRRGYGRQPDYIGCYTAGCKNKASRFDLVEQRVLSILNSWVKDYSVDKAQIKHEADLNAELSNAISLAEKEIETLQDQLDKVYSFFERGTYTEKIFKQRSSAIEQQIMEIGEKIDRLKAEHQQVLERQNVQAEFVPSIKHLLEIYDTLEPVEKNKWLKQIIDRIVYEKNADGKYHNVDPGDFTIGILPRLPKRGS

SEQ ID NO: 22707 - protein, 518 aa, synthetic construct
MLVSNTKVYNCALYCRLSRDDELQGESNSITNQKEILKQYAKENNLNIYDIYVDDGISGTTFDRPDFNRMIKDIEDKKVNMVIVKDTSRLGRDYISFGEYIEKYFPEHQVRFVSIIDNYDSEIDNGIADTLPFRAVLNDLYARDTSKKVKATKHRNAINGLFNGKFAPYGYMKSPENCHKLIINEEYAPNVRRIFDLYLEGKSSIQIAYIFNEEHIPTPSQTMGQEYRLSSLWKTDTIRRILKNEMYIGNMVQGKQTQINYKLKKPIRNKKEDWIIVPNTHEPIVDKEKFYAVQELLKSRTRTRTKTLNLKLKGLLYCKECGKKLGAGTSHYKNGKWNQIYLHCRTYQSLPNLKLCTPHCMNYTKLENAVISELQNICRKYLDEKKCKQIIDDNNNNVKNEIQLNKEKSNLAKAIEVLDFQIEKLYEDKLKCLINDNDFSRMYEKKVNERDSKNKKLEELSTVKFERNVIDYEKIIQDFLKKENVTAYMLNSLIEKIEIDQDKQVTIYYKFADLNTLS

SEQ ID NO: 22708 - protein, 588 aa, synthetic construct
MRIVNKIEAKTPQIPRRKRVAAYARVSMESERLQHSLSAQVSFYSSLIQSNPAWEYVGVYADNGITGTKAEAREEFNRMIADCEAGKIDIVLTKSISRFARNTVDLLNTVRRLKELGVSVQFEKERIDSLTEDGELMLTLLASFAQEEIRSLSDNVKWGTRKRFEKGIPNGRFQIYGYRWEGDHLVIHEEEAKIVRLIYDNYMNGLSAETTEKQLAEMGVKSYKGQHFGNTSIRQILGNITYTGNLLFQKEYVADPISKKSRINRGELPQYFVENTHEAIIPMEVYQAVQAEKARRRELGALANWSINTSCFTSKIKCGRCGKSYQRSNRKGRKDPNANYTIWVCGTRRKTGNAHCQNKDIPEQMLKDACAEVMGLDTFDEIIFSEQIDHIEIPAPNEMIFYFKDGRIVPHHWESTMRKDCWTDERRAAKGRYVQEHQLGPNTSCFTSRVRCDSCGENYRRQRSRHKDGSFDSVWRCASGGKCQSPSIKEDALKNLCADAMGLEEFSETVFREQIVCIHITAPYQLSIRFFDGHTFETAWENKRKMPRHTEERKQHMREVMIQRWREKRGESNDNTGDDKPIHGNADQ

SEQ ID NO: 22709 - protein, 508 aa, synthetic construct
MNVVIYARFSSHSQTEQSIEGQLKVCYEYAESNHYTVVGEYIDRAISGTTDNRAEFQRMISDSDRHTFEGVLVYQLDRFARNRYDSAINKAKLKKNGVRVLSAKENIADDASGILVEGVLESMAEYYSVELSQKIHRGMAINAEKCLSNGSNPGLGFKVDGERRFYVDEEEAAIVREIYERYASGETKAEIIRDLKRRRVKTSLGKEFSPNSLSHLLSNKRYIGVYLYKGKETPGGMPRILDDDLFYRVQSMMNKNKNAPARTHGEGEYLLTTKLFCGHCKEMMVGYGGTSKTGRQYHYYMCKNARRKKCEKKIVSKSYIEDRVVNECLKMLTEETIRFIAKKVAEECAKSPDNLTAKALKKAIREADTAIENLWKAIEQGQAVEMLTDRLNKRMAEKAELEAQLAIEENKKITLTEAQILAFLDYVCEMPSDDINKRRAIINIFVHSIYLYDDHFTLIINASKKPLSIDNIPLDDIETAFEGETGASEGCSSLSTPAPPNAAFKLDA

SEQ ID NO: 22710 - protein, 528 aa, synthetic construct
MNRTAARSVTVIPPTINPLTHLSRVAVQKRRVAGYARVSTDSDEQFTSYEAQVDYYTQYIKRNPEWEFVKVYTDEGISGTNTKHRIGFNEMIADAMSGKIDLIVTKSVSRFARNTVDSLVTIRKLKEKGVEVYFEKENIYTFDGKGELLLTIMSSLAQEESRSISENVTWGQRKRFADGKVNLPYKQFLGYRKGADGFPEVVPEEAIVVHRIYTRFMKGLTPGAIAKELTADGIPTPSRKQRWQTSTVESILQNEKYKGAALLQKCFTVDFLTKKRKVNEGEVPQYYVEHSHEPIITPEEFDKVQTELARRKQISRQYSGKSIFSSRIVCGDCGSYFGSKVWNSTSKYRRVIWQCNGKFKGEHKCETPHLDEETIKARFVAALNAIIESKDNILEDCRLMQATLTDCTGIDTEIKSLLEEIDVVTELTKRCIAENSQTAQNQEEYTARYNGFVERYEKAKAQLEQLRTTKAEREAQAEAIGAFMFEVQELDTITEFDEKLWLIIIDTVTIHADGRMTFKFQGGTEIEA

SEQ ID NO: 22711 - protein, 434 aa, synthetic construct
MERVVERVDALIPAQPKALRVCAYARVSTGKDAMLHSLSAQVSYYSKMIQSHNGWMYCGVYSDEAVTGTKRERAGFQHMIEECRQGNIDLVITKSISRFARNTVTLLQTVRELKSQGVDVFFEEQHIHTMSADGELMMTILASYAQEESLSASENQKWRVRKAFESGEIINLRFLFGYDITPDGIQVNEKDAAIVREIFARFNSGESMSSICRDLDARGHKGVLGGTWCAERMRNTLSNEKYLGNALLQKQYRNNHIEKKLLPNRGELPMYYAKGTHEPIIDQATFDKAQERLRILAQQTSTRKKPTHSVFSGLIRCGLCGNTYKRVTYRKKHYWNCTTFQTKGKSECAAKRIPEETLEVLTCEVLGEGSIDSNMVRSKITAIRAEKNNVVVYCMDDGSEIVKRWKDRSRAESWTPEMKEKARQRALQARRKKE

SEQ ID NO: 22712 - protein, 547 aa, synthetic construct
MKIAIYSRKSKFTGKGESIENQVVLCREYIQRNIPDAKDSDILVYEDEGFSAKNLDRPQFRMMMQSARKQPFDYIVVYRLDRISRNVGDFATLIEELNGMNTAFICIKEQFDTSTPMGRAMMNIAAVFAQLERETIAERVRDNLVLLARTGRWLGGVTPLGFVGEKTAVTDAEGKNRSAYKLTVVDGEMSRVRTIYAKFLEFQSLTKVATWCIQNNIKTREGSEFRMRTVRDILTNPVYCTADEAAFDYFTKLGSDVCFEREKADGKHGLMPFHRTEQNGKKQLRLPPEEWIISLGKHKPIIPSEEWIKAQEIISGNAGKSFYRPVRNQVSVFSGLVRCANCGSIMRPRINSNARREADGSQTFYYMCELKERSRLKNCQMCNVNGNVLDKLLCDEIMNFNKPSSNVGKQLDSILQQIEKKTSGNREQTEELTKQLSEKKRMIANLMKTLAMNEPTSTLFEYTKNEVERLDSEIKNTENELAKLSYISEQDDKRSEHVDMLVRSLGEFQERFAELSVVDKRDFMRKIIDRIEWDGENAHIFLRRTAG

SEQ ID NO: 22713 - protein, 612 aa, synthetic construct
MRAAFLIRCSTKKQDYERQVNDLTRLAKKFGYTSNDNLIFGEHITGKDDASKRDRQSIQHLKDAAINKEFDVVLVSEVSRMSRDPMSGRLYVRQLINMDIPVYFRDIDTWTIDPVTGKKVRDAETIIGAAFDAAWKYIKSMKTQIASGRRDELDNNQMSIGQPFFGYKRYGGRDKGKKNSWVINDDAAKVVVDVFEEYVKDGATLKSTALAITAKYGEQFNKKFSIGTIEHILTFEPYCTGIKVVSLTDPDTEDVDEFRVEIPIIITRAMFDKAATKRATNRVTKIPYSKQATYVLSKLLKCHICGHTLTPRKRSGDKGEKYRLMNGKVALTWLCMSGINNATDCSSRITISNEKLEAIIWGLIKQELIGFANLNDEDRVARVVELTDKITNLEMNIANFTSHISNMDRLIERAYSAYMDAPDSVMDIAKDKYYKTLTKCENERAECKDKIEALNVEKLRLENMRTFFNQPTLPKDAIEKAESDPIKMRNLVMELVDKIYPYRITTYVSPATNRIMKNGIVLLEVYTINGIYNVLYDGNQRNNKVAYYISGNYATFQNGKNKLDAYDAGEYFVISNATLVTETEDVDLTVTFNELIKICMQNGWEIDYTYKM

SEQ ID NO: 22714 - protein, 497 aa, synthetic construct
MQFLNVAAYARYSTENQDENSIETQFDNIAQYCQAHQYNIVAHYFDKAKSGTNIERADFQEMISAARAGKFSAIVIYDITRGSRDVADWFTFRKQMMQAGVQIISTHDNIGDLLNPNDFLTELIGVGIGQHHVLTSRLKSIDGTTMKAHEAIFLGGCPPLGYDVKDGKYIINESEANIVRKIFSMYASGESYSDIIDSLGGAIGKKGRPIGKNSLSSILRNDRYIGIYTWNRRKIKIMGKWAGGVPNERIVQIKDAIPRIIDQPTWDRVQIRLKSKTNSSSKAARSYLLTGKIVCTECGSRYCGRTSVNQRGYQNPYYVCGNKTRTRQCHSKNIKCEDLDNFCRNAVREYILNYDLSETAQRIVTAYNATVSQYTNEKKELAEISRKIKNGTDAILNGFSSEELFQQMGKLQVRQKELEKIIANDAADELDPELVTKLLKNMLEDVSTNIDEVVKQFVTKIYAHPNGDCTVHLGVAHFTSSGREIRTRYQFSQTRIN

SEQ ID NO: 22715 - protein, 535 aa, synthetic construct
MNSYDISFRPEEVIQYLRKSRSDDPNMTIEEVLEKHEHMLRDFAVNHFGAPVPDCNVYREVASSETIDGRPEMLRLLRAIESPDIRAVLVVDVQRLSRGDLEDAGRLMKLLRYTNTQVITPMKTYDLRDEWDRDIFERELKRGNEYLEYFKKIQARGRLQSVQEGNYLGSKPPYGYDRAVIRIGKKNCPTLAVNKEQADVVRLIYELYVNKDWGAQRIANHLDSLGIHPLHNAHWNPAVIKDILRNYHYIGKVVWNRRKTITVVDNQEVYKTRPWNENMLIFDGRHEAIISEDLFHAALARQGRSHRCRPDTRVSNVFASILHCSCGYSMSLRHDGRGSLRLSCDDQRHCKSGSIGYEELIDYICKVLTAYIDDFKIKVKHDNANEVDIHRALVTDLEARLTALEAKEVKQWEVYSMEGMPRAIFDKLNKQVKEDKAEVERALKQARKDSPDPVDYRERIAKFGDALNALQNPAASAEIKNQYLKAIINDMIYTRPGAVRLTADNCSDYGINYKDMAKRGGWYSPPFRLEIKFRF

SEQ ID NO: 22716 - protein, 463 aa, synthetic construct
MKRQTAKQNDKLLLRVAIYIRVSTDQQAQDGDSVRDQLATGQKYIEKHENMILADTYVDDGISGQKVKRDDFQRLMNDVRAGSIDLIIFTRLDRWFRNLRHYLNTQDVLDKNGVSWTATEQPYFDTSTPHGRAFVNNSMIWAELEAQNDSDRILSVFDDKVENSEVLSGSTPLGYRIENKHLVPDDDAPTAAAIFEYYRKTGNLSMTLRYMESEFGLVRSAASLKNMLTNTKYIGEFRDNKNYCPAIIDRDLFFDVQRLLKINIKSGKKHDYIFSGLVVCDDCDHIMSGCQQRAKGRVCADGTRIVYKYSVYRCRQGVNLHRCPNRKLVFETTLEKMLLERIRPELENYIAEYEVTNLPVLHTDAKRRNLEHKMQKLKELYLNDLITMDEFKVDREKLMQQLDKIKSDDSQPMKDLSYLKNFLKTDFENIYVSLSIPEKRELWRSIIREIRVDHERNVRIIFL

SEQ ID NO: 22717 - protein, 551 aa, synthetic construct
MADGQQWLSAVFFSLYAKKRKVKGNLRKHLLLLAFRVIYRLPKRKEVRLVEIQIREGSREQKRKLKVCAYCRVSTDADEQENSLENQIRHYETVIKANPDYEYAGVYSDFAISGFKEKRPGLQKMLADAEKGKIDLILTKSVSRFARNTSIVLEATRKLKELNVGVFFELQNINTLSGEGELMLTILAAFAQAESESGSAGAKMVYQRKYEAGIPVQYLERSFGYTKDERGVFVADEAEAVWVRKIYEMAADGYTPASIKRYLNENGVKTVGGVQWVDSTVFRLLENEIYKGDYIMHKHFVNEERKLVRNRGEVDAWYIEDDHEAIVSPELWQKAQDALAVKRDYLAEGSVIEEFTEENYPYMNKIYCAKCGYPLYKRIYSKGNRLNWGCSGTKRYGKTFCDGINIPDGVLRSAWHFKENTYIAEKALDKGVKEFTYLKEQSWKRRHKKKQPPAIPENTEAEYPYREKIFCALCGSRLVRYVNPQSHKVTWVCSRRKRKGKDACDGTRVPDTIIKGWGEIKKDIYIQRKDDKNGKKRYSYTSKKPEGADRA

SEQ ID NO: 22718 - protein, 464 aa, synthetic construct
MARSVTVIPARSQKVRTGHKAVQEKKIRVAAYCRVSTDQEDQLHSFETQVEYYTKYINEHENYEMAGIYADEGISGTNTKKREQFKKMIADCEGGKIDLVITKSISRFARNTQDCLAYSRKLKNLGIGIIFEKENINTLDSTGELLFTILSSLAQDESRNISENCKWGIRTKFKNGEMHLNTFKFLGYDKDENGKLVINKEQAKTVRRIYRDFLIGINPAQIAKELSEEKVPGCLGQTKWYPSTVTGILKQEKHMGDALLQKTYTADFLTKRQVRNNGEIAQVYVKDSHKGIIDKQTWNAVQEEFDRREKFMESHGTDRYSYGADCMPFCEKVFCGECKSLFTRHSWRSRGIVQWQCKNHRKDGKVACTNAYVDNADLEKGFVKAFNRLVTDRDKHMERWQQMKSDGTPLEKIRAGQMMEVVGNEPLTRFVPEIAQLVLCEVTVLGAKKYEFFFLEGSRVKVSV

SEQ ID NO: 22719 - protein, 463 aa, synthetic construct
MARNVTVIPARNRQASGHRAAPQKKIRVAAYCRVSTDQEDQLHSFEAQVDYYTKYINDHENYEMAGIYADEGISGTNTKKREQFKRMIADCEKGKIDLVITKSISRFARNTQDCLMYSRKLKNLGIGIIFEKENINTLDSTGELLFTILSSLAQDESRNISENCKWGIRTKFKNGEMHLNTFKFLGYDKDKNGKLIINREQAKTVRRIYRDFLWGLNPAQIAKELEEEQVPGCLGQTRWYASTVVGILKQEKHMGDALLQKTYTADFLTKRQVRNNGEVAQVYVKDSHKGIIDKETWNAVQEEFDRREKFMQKHGTDRYSYGSDCYPFCEKIFCGECGSLFTRHSWKSRGIVQWQCKNHRKDGKVACINSYVDNVNLEKGFVKALNILIEEREKYMKRWNAMKSDGTPLEKIRAEQMMETVENDPLKRFVPEVAQLILCEVIVLEAKKYEFTFLEGSRIKVSV

SEQ ID NO: 22720 - protein, 501 aa, synthetic construct
MEIQIREGSREQKRKLKVCAYCRVSTDADEQESSLENQVRHYETVIKANPDYEYAGVYSDFAISGFKEKRPGLQKMLADAEKGKIDLILTKSVSRFARNTSIVLEATRKLKELNVGVFFELQNINTLSGEGELMLTILAAFAQAESESGSAGAKMVYQRKYEAGIPVQYLERSFGYTKDERSIFVADEEEAVWVRKIYEMAADGYTPAAIKRYLNENGVKTVGGAQWIDSTVFRLIENEIYKGDYIMHKHFVNEERKLVRNRGEVDAWYIEDDHEAIVSPELWQRAQDALEAKRDYLAEGSVIEEFTEENYPYMNKIYCAKCGYPLYKRIYSKGNRLNWGCSGMKRYGKSFCDGINILDGVLRSAWHFEENTYIDEKASDNGVKEFSYLKERSWKRRHKKKQPLSITENTEAEYPYREKIYCALCGSRLVRHVDTKSHKVTWVCNGRKRKGKDFCDGTRVPDTILKGWGEIKKDIYIHRKDDTNGKKRYSYTSKKPSGIGA

SEQ ID NO: 22721 - protein, 452 aa, synthetic construct
MSKTVAIYVRVSTGKQADRDSIPFQIQECSNYVKHFLKTENFEVFKDAGRSGKNTHRPEYQRMIEKVKSGMISHVVVYKIDRISRNLVDFSIMYNDFKEHKVAFISLNEQFDTSSAIGEAVLKIILVFAELERKLTGERVRDIMMNRALEGKWNGARVPYGWDWDTKKQCPVHSDTEAEYARMMYRLYDESHSTCVVRDYCNAHDIPTKRGGEWTSKTVADFLRNPMNVGDYRYNYRKSARGKRNDPSEVIYVKDVFPPLIDRELYERVTHQMDLNTFGLGKDGRKVVSKKTHVFGGLIVCGLCGAFYHSDSDTPRADGFLPSQYRCGAHNRKIHCKAKGTSDVKLGPFIFNYISNLVKASKSKKLLHSVSDLEQILLTGPEFEQVAGIADIGLDVTFDTIMHGFKPKRYTAAPYTVIRSGDSDALTAKRDKTIRALERLKKLFLFEDDAIE

SEQ ID NO: 22722 - protein, 518 aa, synthetic construct
MGYRYCAYLRKSRADSENRSASDAEILARHERLLVETARRRGVAISAVYREVVSGDSISARPEMQRLLSDVMAGKWDGVFAVEVTRLARGDTIDQGVVAQVFKYSGTKIITPDRVYNPSSDSDEEYFEFGLFMSRREYKMINQRQQRGRLASVQEGKWVSNKAPYGYIRVKLDRQKGWTLRPNEHAPVVQDIFRWFTGTDAPPIGVSRIVRRLNESGIPSPAGGVWTNSVVRGLLSNPTYAGFVRWGNRAMKKTYRDGHLTISRPRARPGEAMLFPSLHPAIVEKGVFDLAQAQLSKNSSRPGPKQVAMKNPLSGLIICADCGRAMVRRPYQSGRQDTLICPYTDCHNVGSNLSDVERTLLDSMRLWLAEFERCSDAAPNGREELESIRRTISEHEKALETLSSQLNRAYDLVEQGVYTSDVFLARSRSIADKQEYHNEKIRSLEQELSDRELVASSRDEIAPKMRHVLDAYPLASSPEEKNALLKSVLEKVLYKKTQRDRWGGNGMQLELFPLLPHF

SEQ ID NO: 22723 - protein, 464 aa, synthetic construct
MARSVTVIPARSQKVRTGHKAVQEKKIRVAAYCRVSTDQEDQLHSFETQVEYYTKYINEHENYEMAGIYADEGISGTNTKKREQFKKMIADCEGGKIDLVITKSISRFARNTQDCLAYSRKLKNLGIGIIFEKENINTLDSTGELLFTILSSLAQDESRNISENCKWGIRTKFKNGEMHLNTFKFLGYDKDENGKLVINKEQAKTVRRIYRDFLIGINPAQIAKELTEEKVPGCLGQTKWYPSTVIGILKQEKHMGDALLQKTYTADFLTKRQVRNNGEIAQVYVKDSHKGIIDKQTWNAVQEEFDRREKFMESHGTDRYSYGADCMPFCEKVFCGECKSLFTRHSWSSRGIVQWQCKNHRKDGKVACTNAYVDNADLEKGFVKAFNRLVTDRDKHMERWQQMKSDGTPLEKIRAGQMMEAVGNEPLTRFVPEIAQLVLCEVTVLGAKKYEFFFLEGSRVKVSV

SEQ ID NO: 22724 - protein, 502 aa, synthetic construct
MEIQIREGSREQKRKLKVCAYCRVSTDADEQENSLENQVRHYEAVIKANPDYEYAGVYSDFAISGFKEKRPGLQKMLADAEKGKIDLILTKSVSRFARNTSIVLEATRKLKELNVGVFFELQNINTLSGEGELMLTILAAFAQAESESGSTGAKMVYQRKYEAGIPVQYLERSFGYTKDERGVFVADEAEAVWVRKIYEMAAEGYTPAAIKRYLNENGVKTVGGVQWVDSTVFRLLENEIYKGDYIMHKHFVNEERKLVRNRGEVDAWYIEDDHEAIVSPELWQKAQEALAAKRDYLAEGSVIEEFTEENYPYMNKICCAKCGYPLYKRIYSKGNRLNWGCSGTKRYGKTFCDGINIPDGVLRSAWHFKENTYIAEKALDKGVKEFTYLKEQSWKRRHKKKQPPAIPENTEAEYPYREKIFCALCGSRLVRYVNPQSHKVTWVCSRRKRKGKDACDGTRVPDTIIKGWGEIKKDIYIQRKDDKNGKKRYSYTSKKPEGADRA

SEQ ID NO: 22725 - protein, 503 aa, synthetic construct
MANIRRIEPVLPRLKARKRVAAYARVSMETEQLHHSLSAQVCHYSALIQSNPEWEYVGVYVDEGITGTATKHRDDFKRLIADCEAGKIDLVLVKSVSRFARDTVDTLNATRHLKDLGIDVYFERENIHSISKEGELLLTLLAAFAQAESQSISENIKWSIRKKFKLGIPNGIKAPYGYEWNGDSFSIIPEQGEVVREIYDRYLAGEPAYSIAKGLAEKGVKGQSGVPMDDSTVKNILSSLSYTGTMLLQKNFFTEGHKRRKNKGELPMYAVEEMFEPLVSETDFDKAQQIMEDRAASMPNRNPKLTAFSGIVRCANCGCSISRRTSKYGKKWICNTKERKGKAVCDFRDIYESELEDAATKVLKLDGFNANAVKSRIALITIDNAYITFRMKNGITRQIIRKYQKGYSGFSMRLFCGSCGGMLEADTWKMGPAGKKTKCKVWVCRNCSAPREFDSMFRKAAQELFHEEQCDGLFAQNIEKAINYDERIQFYYKKGEVVTWQKE

SEQ ID NO: 22726 - protein, 526 aa, synthetic construct
MAKRVTTIPATLNRFDSRPLQSVRKRRVAGYARVSTDSEEQATSYEAQVDYYTRYIKSNPDWEFVGIYTDDGITATNTSHRDGFKQMVEDALVGKIDLIITKSISRFARNTVDSLVTVRELKEKGIEIYFEKENIWTLDAKGELLITIMSSLAQEESRSISENTTWGKRKSFADGKASVSFSRFLGYDRGPNGEFIINERQAVTVRYIYKRFLEGLSTYQIAKELTEMGVKTAAGKDKWYTSSVLSILKNEKYKGDALLQKSFTKDFLTHKRVDNNGEVPQYYVEGHHEGIVTADQFEQVQAELYRRQNMDRYSGVGCFSSIIKCGECGSWYGAKVWHSNDKYRRVIYRCNKKYDKGCKCKTPHITEDEIKELFIKAANELFSEKDEIIGNTKTMMDMVCNTDDLDKELGDKVAELNIIAEQMQTAIAENSRTALDQNEYERRYADLTERYNVLKSEYDKISEQIDSKKTQRELFKGFIRALEKQGTLVDEFDEGLWSSLVQEVVVKAKDDIRFVFKNGFEIKEDK

SEQ ID NO: 22727 - protein, 584 aa, synthetic construct
MAYRKITDIKDTIGMRAVFYARVSTAEEEQLNAIELQIEENRGCIKDHGWKLVGEYIDRSKSGTMVKGRDDYQRLYEDLYEDLFDIVVIKDQERLQRNTLDWYLFINRVVQTGKLLFMYMDGKFYSPDDALITGVRAIIAEEFSRNLSKKLHNYHDHRIEKARQGQEIALQGSGNVYGWDKKDGKYYINPEQAKVRRLMCEGIMARKGSTLIAKELNDAGYRNTVGKPWKPMDIPKFVYDCKNVGTMIINKERHDFESKQTIKLPKEEWVYVENALPPIVTQEEWDLICKIHEERVIATGSDRRGKKTSGYSFSGKLVCGICGAPYWRKQRVSKDEYWVCSTKQTKGRRTRKRDSTMGKAGELNPLGCDNENISYNSLMEIMGVVSERLQANTDTIKHDMINWLTKLRKQLLEANGGHTEADLQRELSRKSKLLDAYLDGILNKQEYQKKAEELDERIIQLKAETEKNKANSGDIAEIDKVLANIDEEVSRYVDGNEKLKVEYLLEHLEQVQIFPDKVIVIVPILSEGIVVEKTQYVSREKRCRQDYLYENDRWSGKADKRRDIHVWIRWKGFVKGTLKSGLPD

SEQ ID NO: 22728 - protein, 521 aa, synthetic construct
MGNVMIIPAKRQVGNTSRRQEDKPKLRVASYCRVSTDSDEQASSYETQVEHYTEYIKKNPEWEFAGIYTDDGISGTNTKKREEFNRMIEACKTGEIDMIITKSISRFARNTLDCLKYIRMLKDKNIPVFFEKESINTMDAKGEVLLTIMASLAQQESQSLSQNVKMGLQFRYQNGQVQVNHNHFLGYTKDRKGNLVIDPEQAEVVKRIYREYLEGSSMDKIAKGLEKDGILTGAGKKKWWTSTINKILRNEKYIGDALLQKTYTTDFLNKTRVKNNGIVPQYYVENNHEAIIPKDIFLRVQEELVRRRVVKTSANGKKRSYSCNHCFAQLVICGECGEMFRRIHWNNRGCKSIVWRCLSRLEATGLECHARTVNEKVLESVVLEAINRLLGDKAAYQAQLQQNIAQVIRDANKNTSEKIDEQLMALQKELLQKANNKEAYDEIAEQIFKLREQRRQNTVDTTARDAQIERITALQDFINQQNAMLTEFDETLVKRWLKQIIVWDDHFTVELKSGLKIDIEG

SEQ ID NO: 22729 - protein, 441 aa, synthetic construct
MRLLVDCKAKKIDFVITKSISRFSRNTMDCLEIVRTLLNLNIPVYFEKENINTGSMESELFLSVLSTMAECESASISSNNKWSIKKRFENGTYRLSSAPYGYKLESGGLQVVSEQADIVKRIFRELLSGKGMYSIAKELNAEQVPTQKGGRWTSTSVHNILTNEKYTGDCIFQKTYADSNFNRHINNGELNRYLIQNHHEAIISHEDFNATAALIEQRAAEKGIESGSDKYQQRYAFSEKLICGECGNTFRRRIHKGKYNSYVAWVCNTHLSNTNRCSMLFVRDDALKLAFATMLNKLIFSYRLLLKPYLAAMQSNTADEALLRIQYLEKQLDQNAEQRSTLHKLMAQGYIDQILYTQESNELLLQARDFRSEIEVLNNTVAGDTTKVYETERLINYCKRGEMLTDFNESLFELFVDHILIYSRQRIGFVLRCGITFEEMI

SEQ ID NO: 22730 - protein, 513 aa, synthetic construct
MTTVTIIQPTISEEQNHKLRCAAYCRVSSNSEDQLNSFMAQTRYYEKAFEKSDREQLVDIYADEGITGTREDKRDEFQRMISDCRKGRIDRIYTKSISRFARNTKDCLKNIRELKSLGITVLFEKENIDTADMTDEMMITIMGGLAQEESTSISQNLRWSIKKRMENGTIKMCKAAFGYKLVNGELVLKEDEAEIVRKIFEWYLSGAGTTQIANKLNSMAVEKYGKEYHWTSGTVCTMLKNEKYIGDQLFQKRYTTSVLPYKRVYNRGEHAKYYYSQRHKPIITREVFYKVQKILNEQKKAHKGFQHKHIFSKKIYCGECGTIYKLKKSKTEACWVCRNHDYDSASCSMKRVSERNIKSAFVKLHNKLLYNYRQILTPLAVNLERVNLKSLSNNTDLLEIHKQIAKLKEQTHVLARLKTKGFLDEAKYLEQTTELNSKTAKLQTEIKKLNVSDEEDETLEQLDMLIGYFEKRQKLMVEFEESAFESIVDKIVVKNQNELEFHLIGGLELAEEI

SEQ ID NO: 22731 - protein, 511 aa, synthetic construct
MPTVTVIQPTIAEEQNTKIRCAAYCRVSSDSEDQLNSFMAQTRYYEKAFENSETEQLVDIYADEGITGTREDKRDEFQRMIKDCRRGKIDRIYTKSISRFARNTKDCLKNIRELKSLGITVFFEKENIDTAKLSDEMMITIMGGLAQEESTSISQNMRWSVQKRMQNGTYKNATPPFGFKKVNGDLEIEENQALIVRQIFEWYISGYGLKTIADKLNGMNLPGSKQAVLWKADNIRYILKNDRYIGNAMFQKSYVTETLPHIKKRNYGEKQKYCVTGVNQQIVDKETFYAAQKLLKSRHRDFETNVYPLSKKVFCGKCGATYKRRNRRSGAFWLCRTHDINAADCENGIIVESDIYSAFIRLHNKLLNNYKQILLPLKIALQDLKLRKFSGKTQVMDIHKEVAKLREQTHVLARLKTKGFLDEAKYIEQTNELNVKISKLQSELKKLTRSDDEDEALDQIEMLTDFFEKREKPMTEFEELEFESIVDKIVVKNQHELEFHLIGGLKFKEKV

SEQ ID NO: 22732 - protein, 500 aa, synthetic construct
MTEITIIPAKERSAEVVRTAAYARVSSSSEDQLNSFAAQIRYYTELLQNSTDAVFVDMYADEGISGTSTAKRTEFQRLMSDCRKGKIDRILTKSISRFARNTKDSLEAVRELKTLGVSVYFEKENIDTDEISSEMMLAIYSQFAQEESMSISRNVRMGFQKRMADGSYVPSAVPFGYIRENGKFVIDKEKAEIVRGIFSDYLNGVSAERLAKKYRVKLATVKYVLTNEKYTGDSIFHKWYTTDTLPFDCRENRGERDKYYVSETHPAIISREVFQSVQQLIERKGASHIGKFTVSYPLRKKIYCGECGTLYKRKSRSNRVYWVCRKHDESADKCSAKQIAEEIVYMAFVRMFNIIQAHHKALLAPMLRQLEALYEREKSGNAQLAELRKEISEIKRQAYLLTMLNSQGTLDAAYFMERTKELDRKLMTAQKQLHANLDDKDGERLDNLRKLIGIFERAETLTEFDEIKFGQIVEKITVLSESEIRFELIGGIGFVEQIMR

SEQ ID NO: 22733 - protein, 544 aa, synthetic construct
MMQTLAQGEMRVVVIPAKSCEENKQAAKCLRVAAYCRVSTDDEEQKTSYEAQIGYYTEKINSNPEWQMAGIFADEGISGTQAQKRPEFLKMIRLCRQRKIDIILTKSLSRFARNTVDSLGYIRELRALGIAVISEKENINTLTAESEMLITIMSCFAQAESESISKNVSWGIRQSFKNGNVPMQYARLLGYRKGHDGNAEIIPEEAEVVKEIYRCYLDGMSMNLIADRLNEKGLTTKGGSSPYRKTVVQRILTNEKYTGDALLQKTYVTDCITKKTRKNNGELPMYLVKNHHEPIISRSDFNRVQEEMARRSAKRTIADKLTKTGQGKYSAKYALSELLICGECGEHYRRVTWTAKGFKEIKWRCVSRIQYGKKKCHSSPTVDEQALHRAIVSAINEFCEVKDDVAKALRESITEVLDPNQNGSIQAAQRRIDELARNMDELIMLATVPETAENAMSDIAKFSEEMKMLREFIETEKAKQNTAQRGSAELDAILERLENDDFTMTEYDDIAVRQLIEKITVESKDTITVTFKGGFEVRKELNGD

SEQ ID NO: 22734 - protein, 521 aa, synthetic construct
MKKITKIEGNTANSFIKPKTRVVAYCRVSTGSDEQLVSLQAQKAHYESYIKANPEWEYAGLYYDEGISGTKKENRSDLLRMLSDCETGRIDLIITKSISRFARNTTDCLEMVRKLIDLGVHIYFEKENINTSSMESELMLSILSGLAESESISISENTKWAIQRRFQNGTFKISYPPYGYQNIDGQMIINPKQAEIVKYIFAEVLSGKGTQKVANDLNQKGIPSKRGGRWTATTIRGILTNEKYTGDVILQKTYTDSHFNRHTNYGEKNMYLVENHHEAIISHEDFEAVDAILNQRAKEKGIEKRNSKYLNRYSFSSKIICSECGSTFKRRIHSSGRREYIAWCCSKHISHITECSMQFIRDEDIKTAFVTMMNKLIFGHKFILRPLLNGLRSQNNAESFRRIEELETKIENNMEQSQMLTGLMAKGYLEPAMFNKEKNSLEAERESLFAEKEQLTHSVNGIFTKVEEVDRLLKFTTKSKMLTAYEDELFKNYVEKIIVFSREVVGFVLKCGITLKERLVN

SEQ ID NO: 22735 - protein, 520 aa, synthetic construct
MKVELNRPEVAVIYARYSSHSQGEQSIEGQLAAAHAYAAAHGYTVAHEYIDRAKTGRNDNRDEFQQMLHDTAKQQFQVVICWKVDRFGRNREEITFNKHLCRKNGVRVEYVAENLPDSPESVILESVLEGMAEYYSLQLSQNIRRGMMESAKKGQAVGGKCPLGYTIRKDTHMFEVDPKTAPVVKTIFSMYAQGSTIREIIRYLNDQGIRTSKGGPFTQNSLNVLLKNEKYIGIYKYKDVRHEDKIPPIVDRETFDKVQEMLKINRRAPASKWSVSEYILTGKLFCGHCGGMMVGKSGNSRGVKYCYYICRGKDCHKKPVKQEVLERAVIEHTLSILDDQLLDEIAEAAWQYYQAQDETANKREAIERQLADVDKALANVMRAIEMGIINATTKARMDELDQQKADLTAALADLEITSSLRLTKDHILYFLHQFRDANMDEPECCKRLIQTFVNCIYVYDDKLRIGFNIHGGAEPLTHEIMLSLDSEGGSGFARCAFISTSQEKSEPDSGWKRVRISLFL

SEQ ID NO: 22736 - protein, 518 aa, synthetic construct
MASIRKIEATKIGLPKKLKVAAYARVSTDSDEQLLSLKTQKEHYTSYIKNNPDWEFAGLYFDEGITGTKVDKRDELLRLLKDCEDGKIDRVITKSISRFARNTMECLEMVRKLMRLNISIYFEKENIDTEHMSSELMLSILSSIAESESRSISENSKWSIKHRFQEGTFIISYPPYGYKNENGQMVIVPEEADVVQDIFKMALNGKGCHLIAAELNERGILTKRSGKWHASTVQGVLKNEKYTGDVIFQKTYSDENFNRHRNYGEENMYLCKNHHAAIISHEDFEKAADAMTRRGIEKGLNAESDKYQNRYSFSGKIICGECGATFKRRTHYNPDYIAWVCNTHLTSVKDCSMKFIEDESIKAAFVRMIGKLHTGGTQVLKPFIHSLRGYDNKEKLHQILALEERIEKNLEQQRVLVELMATGYLEPDVYFSEKRDLELEATSLDKERTAISTEINGDLKHLEEAQKLLKTVTKVKPSAEFDDELFCELVDTVTVLSRDTVTFDLKCGLRLKERLVKA

SEQ ID NO: 22737 - protein, 542 aa, synthetic construct
MALLPRKPAKHPAKPKRGKKLEIEEPGVLYGRYSSHNQKDISVEQQFEKGYELAAEYGIRIIDTYADRAVSGRTDKRRDFQRMMTDAAKGKFRYVIAWKSNRMGRNMLEALINEARLQDLGVRVLYVEEDFDDTAAGRFAARSMMNVNQFYSENMAEDIKRGLYDNAANCMVANGHLPYGYKADETLHYAIDEPKAAVIREIFTRVSCGEAFVDIMASLNVRGIKTSYGRPWGRSSFQKILSNERYRGIYIYGDVRKEGGIPRIISDELYFKVQEVITTKKNPQGRHRVNGDYLLTGKLFCGHCKSPMTGVSGTGRSGNLHYYYVCQKRRTEKTCDKKNVRRDEIELQVAQAIKDYALKDDVIEWIADSTVAYNERKEAESKVGILEDQLAGTEHGIKNIMSAIEQGIITETTKSRLVELESERATIKANIAAARADIVTVSRDDIISGLEMFRDGDVHDKKYQARLFDTFLVAVYAYDDDLRLVFSFSGNKNTIQIPIESAVNAVENNEAECSFKLCSAPPNRYWTNTYFFSGGFAVKVSL

SEQ ID NO: 22738 - protein, 526 aa, synthetic construct
MNRTAARSVTVIPPTINPLTHLSKVTIQKRRVAGYARVSTDSDEQFTSYEAQVDYYTQYIKRNPEWEFVKVYTDEGISGTNTKHRIGFNEMIADAMSGKIDLIVTKSVSRFARNTVDSLVTIRKLKEKGVEVYFEKENIYTFDGKGELLLTIMSSLAQEESRSISENVTWGQRKRFADGKVNLPYKQFLGYRKGADGFPEVVPEEAIVVHRIYTRFMEGLTPGAIAKELTADGIPTPSRKQRWQTSTVESILQNEKYKGAALLQKCFTVDFLTKKRKVNEGEVPQYYVEHSHEPIITPEEFDKVQTELARRKRISRQYSGKSIFSSRIVCGDCGSYFGSKVWNSTSKYRRVIWQCNSKFKGEHKCETPHLNEETIKARFVTALNAIIDSKDGILEDCRLMQTTLTDCTGIDAEIESLLEEIDVVTKLTKRCIAENSQTAQNQEEYAVRYNGFVERYEKAKAQLEQLRTTKAEWETQAEAIGAFMFEVQELDALTEFDEKLWLTIIDTITVNADGRMTFKFQGGTEI

SEQ ID NO: 22739 - protein, 434 aa, synthetic construct
MERVVERVDVLIPAQPKALRVCAYARVSTGKDAMLHSLSAQVSYYSKMIQSHNGWMYCGVYSDEAVTGTKRERAGFQHMIEECRQGNIDLVITKSISRFARNTVTLLQTVRELKSLGIDVFFEEQHIHTMSADGELMMTILASYAQEESLSASENQKWRVRKAFENGELINLRFLFGYSITADGVQINEKEAAIVREIFSRFNGGESMSSISRDLNARGYRGALGGKWCAERMRNTLSNEKYLGNALLQKRYRNNHIEKKLVANKGELPMYYAEGTHEPIIDQATFDKAQERLRMLAQQTANRKKPTRSAFSGLIHCGLCGNTYKRVTYRKKHYWNCTTFQTKGKSECAAKRIPEETLEVLTCEVLGEGSIDSDMVRSKITAIRADKNNVVVYCMDDGSEIAKRWKDRSRAESWTPEMKEKARQRALQARRKKE

SEQ ID NO: 22740 - protein, 533 aa, synthetic construct
MIMIRRYGIMRFFNYGRKSVYSDKSDSIDNQFRMSREYCEQKFPGKIESWQEFSDEDFTGANTSRPDLQRMLSYIEEGFCDVLVVYQLDRLSRNVRDFSNIYAMLEEHNVMFISIKENIDTTTPIGRAMMYVTVVFAQMERETTATRVADNMRGLAKKGYWMGGQAPLGYSIKHIVIGDKKHSALELDPDGVRYVTQIFDDFLSSHGSLNAMVTRFRHQGIRTLTGKFFSKAHLHNILTMPYCVEATPEVYDYYAAKGCIMDSASPREKWDGSTGVLIYGRFSDKSQKHLVQPPENWTICLGLQKPFIPAEKWLAVQERFKQNTFCKDAKWPVPLLRGILRCNKCGSLMPVSRRKKVDGTCSSWYYCRKRKDEGSEACDMNQIKCDLIDEKVLEIFRKIALDPDSIHQFVKTESPSEIPNLSFISSRISSVESKIGKLAASLALAENSTASKYIIEEIERLDAELAALKREASHAEMKIHQAAAKERNSQATAIEIAKFINNLDGFSAKEKNEIARSVIRDCRWDGEKLFLTL

SEQ ID NO: 22741 - protein, 519 aa, synthetic construct
MKKVTKIDKIQPAKNAEDKLRVAAYCRVSTATDAQLESLEAQKSHYENYINSRDDWCFAGVYYDGGITGTKASKRPELMRLLADCKAKKIDFVITKSISRFSRNTMDCLEIVRTLLNLNIPVYFEKENINTGSMESELFLSVLSTMAEGESASISSNNRWSIKKRFENGTYRLSSAPYGYKLESGGLQVVSEQADIVKRIFRELLSGKGMYSIAKELNAEQVPTQKGGRWTSTSVHNILTNEKYTGDCIFQKTYADSNFNRHINNGELNRYLIQNHHEAIISHEDFNATAALIEQRAAEKGIESGSDKYQQRYAFSEKLICGECGNTFRRRIHKGKYNSYVAWVCNTHLSDTNRCSMLFVRDDALKLAFATMLNKLIFSYRLLLKPYLAAMQSNTADEALLRIQYLEKQLDQNAEQRSTLHKLMAQGYIDQILYTQESNELLLQARDFRSEIEVLNNTVAGDTTKVYETERLINYCKRGEMLTDFNESLFELFVDHILIYSRQKIGFVLRCGLTFEEMI

SEQ ID NO: 22742 - protein, 521 aa, synthetic construct
MGNVMIIPAKRQVGNTSRRQENKPKLRVAAYCRVSTDSDEQASSYETQVEHYTEYIKKNPEWEFAGIYADDGISGTNTKKREEFNRMIEACKAGEIDMIITKSISRFARNTLDCLKYIRMLKDKNIPVFFEKESINTMDAKGEVLLTIMASLAQQESQSLSQNVKMGLQFRYQNGQVQVNHNHFLGYTKDREGNLVIDPEQAEVVKRIYREYLEGSSMDKIAKGLEKDGILTGAGKKKWWTSTINKILRNEKYIGDALLQKTYTTDFLNKTRVKNNGIVPQYYVENNHEAIIPKDIFLRVQEELVRRRVVKTSANGKKRSYSCNHCFAQLVICGECGEMFRRIHWNNRGCKSIVWRCLSRLEATGMECHARTVNETVLENVVVQAINTLLGDKSTYQAQLQQNIAKVIREAQKNTTDGIDEQLMELQKELLKKANNKEAYDEIADQIFKLREQRENCTVDIAARDAQIQRINELQDFIKQQSATFEVFDETLVKRWLGKITVWGDHFTVELKSGLNIDIEG

SEQ ID NO: 22743 - protein, 449 aa, synthetic construct
MKKAGLYCRVSTDIQMEGYSIDAQKDFLKSYCKMHEIDNYEFYIDGGYSGSNINRPDMQRLIEDVEDHKIDIVVVFKLDRLSRSQKDTLYLIEEVFNPNDCGFVSIKENFDTNTPFGKAMVGILSVFAQLERETILERTRIGRKKRAEEGLWYGTGNLPFAYDYDEKKGILVPNKEKVEIVNKMVELYLQGMPMTQVGALFGLQDQTVRSIFTSPVGLGKIPYKDEIFEGQHEPIMTQETYDKLQQKMKERAVTYKHANYLLAGKIVCGKCGAKYRYQKAGTSSIRLYCYSQQTSKKNLIKDANCDNRRYYDYEIEDYVIKDLISMSLDESKFRHNMNMNDINVSQAKIDRIAQIDKQVVNLLDYISEGIAVEETKEKIRKLQEEKEKIQKELSDEKAKERKSENLKVVISDLNTAWKTMTFEEQRNIVLEVIDKVVVNDNEIQIYYNI

SEQ ID NO: 22744 - protein, 684 aa, synthetic construct
MSILQTIKTIIRVVLYLRLSDEDKNKLSKEELSQSIKNQEIMLRDYAEEQGWEVVGVYNDDDWSGSDATRPDFNRMIEECKNGNVDIVLCKTQARFARDMELVEKYVHNLFHEWNVRFITVVDRIDNARKETKKTSQILGLTDQWYLEDTSLNIRETLKSKRKDGQLTSSFATYGYMKDPENKNHLIIDPISAEVIKRIYDEYLSGTGLDKIARRLNEDKILSPYEYKLLNGSKLKIPVIKDYVNYGYIEKTGTYMLDVSFTNKEEYILKDLVSFNYITTDMKSFNNKCDIVLKKYTNNRTKIYYSENDNIDINNFNIDDCILLNENDVIPKTAKVIISYTKELDRTHTINYQFEITLKENREHEDYYINICGKATDEIKKSDFIHNIRKKFKWSSSTIRTLLTDEVYIGNMVQFKSTTVSYKNHTVVWNDDETRIRKDNTHEPIIAKDIWYTVQERLENTARSCIGGTVHPLCNKVYCSNCNQIFTKTGNRRSDGTGYLCCKDKKTNWSNCDNKASIREDLLHQFILEKMNEMLKKFYEEDDLKEMQNEVIEQDLYKDKLNSLEKELQSINKELQGKSTYFQKLYEDRTNGILPEKEFLILMNKYKDDNEKLEERQKIVKKEISSTLAKKETVKTKKNIFKKYRHIEELSIEIVEDFIDKILIGSYDETTNSRDIKIIWNFTI

SEQ ID NO: 22745 - protein, 523 aa, synthetic construct
MRFFSYGRKSVFSDKSDSIDNQFRMNREYCESKFSGQVDSWQQFSDEDFTGANTSRPDLQRMLSFIKGGFCDVLVVYQLDRLSRDVRDFANIYALLEEHGVMFISIKENIDTTTPIGRAMMYVTVVFAQMERETIAARVTDNMLGLAKKGYWTGGNPPVGYVRKHIVVNGKKHCSIEVDPDGARYVTQIFDTFLAYNCSLQGMETRFKNQGIRTQNGKFFSTAQLHKMLTMPYCVEATPEVYDFYAAKGCIMDPGSPREMWDGSVGVIIYGRSTEKNKKHQLQPPEKWTVCLGKHKPFMPAEKWLAVQSRFTQNKCIKDAKWPVPLLKGVLRCKCGNLMQVSRKKKVDGTCSSWYYCRKRMRQGVDACDMGQIKCDLLDEEVLELFRGITADPALIQKFVKAEAPADVLDLKAAQARVSACERKIGRLAASLALAEDSAASKYIIAEMERLDVELGALKREASLAEMESHRAAASAKDAKATAAEIAKLIHGLDGFDDKEKNAIARAVIQECTWDGERLFIKL

SEQ ID NO: 22746 - protein, 516 aa, synthetic construct
MARKKKVSPGNRLVAYYRYSGGSQQTEQSIEGQRRDCEAYARQHGLTIVHEYIDRHISGRGVESRLAFQQMIADSSKHLFDLVICWKTDRFARNRYDSAVYKKKLRDNGVRILYAAESSVEGPEGIILEGLMESLAEYYSAELAQKMRRGMRESALKGRAINPSRPLGLTTDEHKRFIIDEKNAPTIRFIFEHYAAGESSASIVEQLNAAGLRTSKGNAFNKCSIPRIIQNEAYHGVYICKAYDVRIDGAIPAIIDDDLWKRAQKMLTLNKQHRAPHSSHADYLLSGKLFCGCCHSLMRGISGHNCRNDVYYYYACGNKADGGTCKKKNIQKDVAENLVVNAICENILRPDTLEDLADAIAAAQQADVNQPDPERAMLEQNLADVHRKINNIIESIENGTASSRLSARLADLEQQESTLNYQLESLKEVHPPVLDRERILFLLEQFLISPNERTEDYNRRIIDTFVNRIEITDTEMLIYFNLSEASASEKQKNSQPNSCSTGNHLVRVARIELTAS

SEQ ID NO: 22747 - protein, 532 aa, synthetic construct
MTTERKKKTTEEKVKRNTTKKASNTTRNTQPKKNSKKKTNNLPLALPDFQTFLESDNPLDEFLKITACYVRVSTDAQAEQGYSIPDQTAKLQAFCTVKGWENVKFYTDPGFSGSNLNRPAMQELIADAMAGRLKAVIVFKLDRLSRSQKDTLYLIEDVFLPNEVDFVSISESLDTSTPFGRAMIGILSVFAQLERENIYLRTRIGMKGRISSGFWRGGGNIPFGYDYDKDKKTLVPNADAPKVQQIFDLYIKGYSCQKIADMLGLCNDMMVRNILKRRTYCGYVNYKEEEYPGVHEPLISEETFDIAAAEYGRRSRAGLNACGTNTYYLLAGLVYCGDCEARMRYMKWGKYFKIICYSHTSKASMVKNPDCPNMGFLASDIEELVINKLFGIGSGVPLEEFEVKWHSPNTREIIEKRISDATTKLKRLYGLYSESGDSVIHERIFAVRNQIRTLQQELDNEDKHSIRDSHVSYVRDRIKNVGDIWPHLTPMERQTLIRDCVDKIIIHHDGSVEIFFSFSTFDEDKQCIEDEN

SEQ ID NO: 22748 - protein, 547 aa, synthetic construct
MVKKKLRAVFYARVSTEEEKQLNALEKQIQENRDVIRDHGWELVDEYIDEGKSGTTTKRRSDYKRMLEDMAEDKFDIVVCKDQDRLQRNTLDWYLFVDRLITNEIQLYFYLENKYFRSNEDALITGIKAIIAEEYSRNLSKKLNNSNKRRIEKALQTGEVSAMGNGKSLGYKIVDKKWVQVPEEIELCKIIWDKYEEFDSIRKVRDFVNDAGYRNSVGKPFTSESIARIIKNEKAKGVLVMGRFHHDFDKKKIVKRSDDEVFRIEIPELAYVSAERFDRVNAHLKSKTNGKRGKRSGSDPLSGKIFCSKCGSVYWKHQSNGYYNWFCSQKYAKGDVACKGSGTVTTVRIRKIYAELTNNLEVNREAVKGSLLKWLQSLKNSLTDEKANNSTLKEIERQEKRKNKLTEAFMDEIISKEDYKAKYAELERSLEELKLKIQPVEENEDVKDIEKVIANIDEEIDAYIQSTGFEDSKIDFLIEHTQRITVNDKHLIIELDLLAGAIITGKDFLLFVHSNMPQHHGPKHLHPSGPQTAPRCCFRDRFSCDQP

SEQ ID NO: 22749 - protein, 581 aa, synthetic construct
MKRTAIYARYSSDNQRAESIDEQIRACRYYAQQTGLYDIVAVYKDEALSGYKNAHKRDGFAQLMADAEAGKFEAVMVYELSRFSRNGSDTIVNTEKLARLGIEFVSVREKLDQTPEGRMMMFVITGMNEYYSANLAIETMRGLKENAYQAKHTGGIPPLGYDLDSNGHYIINPEEAAAVRLIFDMYLEGNGYTAICDELNRRGYRTKRGTLFVRNSMYDLLRNEKYTGSFIYNHMAKAKNGKRNRHAYKSDSEVIRVENAFPAIISKEEYRKVLKLMEQNKRKGARNAAVHDYLLSGKVYCGHCGKSMYGETRYRKEYSYPYYSCNGHKSKICGKHSIRCDKLEAEVIRQLNELFFSDEILDRVSEKIYDDSQNHFMDERAAILRKRSADIKKKIDNGTKAILDGVDSDELRSAVKELSTQKKQIDQQIVQIEAAADNNGRTFEEVREMAKNFSDISKLPRDQQKRIVQKFIWRIYVYDSENPDDGDIVKIVLAPTEAARDELNSMAEDYVAITDMLTSTNGTSQGVPMKNPTCFSEQVGFSVLIKNCRTTDFMCICTDDLHKQQTPSNNVPTRFDGVLNW

SEQ ID NO: 22750 - protein, 581 aa, synthetic construct
MPEKIINCAIYTRKSTEEGLEQGFNSLDNQYEFCTNYLKSLNDPALQLLPARYDDGGYSGGSLNRPALQRLLADIQCGLVNRVIIYKIDRLTREIRDFFKLLDIFEKYNVEFVSVKENQYYNTTTAIGRLMVNMFLVFAQFERENAGDRIRDKIATSKAKGMWMGGCPPYGYDIGDRCLVINETEAQNVRFIYQTFCNTHSLADTTDALNSGGIRTKRYTTRQGRTFGGRKFSVKTVQRILQNPLYKGMVAHRGKQYPGQHAAIIDAVQFDMVQAVFAAHKEKRETRRPKMPSSGGERETAALTGLIFCGCCGSAMTPSYCCKGDIRYHYYRCYRRASKLEDKCPINQIRTSEIDRVVMEQVLAILKSRDFFVQYISHHHEFDVSTAFALFNSLDDVWNSLFETEKRRILRELLAKVTIYKDKIVLDVKKAGLAGVFAELSQNNRLAEVEYKENETFQISVAYRATRLANGAKIIVPATAKEESRFNGSLRLARQIAKGFAWRKMIESGLSLQELTASAKTNERDIRFAMRLSMIDPAIVESVLSGKSPEFLTYAFMKKHPIPLLWSDQRKLYGFEERKQQ

SEQ ID NO: 22751 - protein, 573 aa, synthetic construct
MAYNAQNKTGARVAIYVRVSTLHQIDRDSLPMQKQDLLAYAKLMLNTDDCVVFEDAGYSGKNTDRPKFQEMMSQMRAGAFTHLLVWKIDRISRNLLDFATMYNELKALGVTFVSKNEQFDTSTAMGEAMLKIILVFAELERNMTSERVTATMISRANNGLWNGGRIPYGYDYDYETHEFSVNEEESKVVILMHDMYEQERSLVRVVRELNERGYRSRAGNLWSPVSLLIILRNVFYCGDYRYNMLKEGDRQKVKDESEWVTVENHHVAIIPKDQKERIMATLDSNSKLCKQRNIYKSSKHTHVFGGLIYCGSCGKPLGSTPGNLTRDGWHYSKYTCPTRRKSVTLCTGKSTSDPIIGEFVFNYILNMLNAQNGFDKISSPEELEKLLLIGDTFTYIDHIEPNGLNDLFNVLSSGAVKGAVFGKGASLPTKKATVEPEVARLRNEKQKTERALDRLRSLYLYADEAMSEAEYMIQKNKLEETLEDINDQIGMMNTDSWQQSVSDEEFIQRASEFIIAQKLSGRKYVNYKRLAMSVDSEVLKNFVVSIIDSITIQDGLVSNIVFKNGLCHTFIFR

SEQ ID NO: 22752 - protein, 579 aa, synthetic construct
MRNKSLAGRANNRAERPRKVAIYIRVSTTHQIDKDSLPMQRKDLIAYCELILGIEDYEIFEDAGYSGKNTDRPAFQEMMQKIRAGSFSHLLVWKIDRISRNLLDFAEMYEELQSLRVTFVSKNEQFDTSNAMGEAMLKIILVFAELERNMTSERVTATMISRANQGLWNGGRIPYGYSYDAETSVFSIIQDEADVCQLMKTDYFEHKSIIHTARLLNDKKIPTRSGALWSPTAAWKILSSPFYAGIYRYNHYKGTENRTINPEEEWVLIPDHHPAIFTLEEHEKLCNILDTNKRTANLPGQKHRAKNVYVFSGILYCGKCGSRLVSTPGRLQADNFRTATYSCPKKRKTHECDNPSINDLIVGEFIINYILNMLNAKSSFSSINSPAELEERLLYGGSFKDVQHISEDGLNEFYNLLSRYGSDSSYIFSVKRPRKKKAAVNPEVEALRKDKEKQERALKRLQDLYLYSERAMTEKDFIIQKNEISSRIQEINTRLGMVTHDANSTLSDEDFVRQASHLLITKKLIGRDYIYYKTLAQTVSPDVLKIYMETILDSVYVIDGRISSIVFRNGLTHTFIYQK

SEQ ID NO: 22753 - protein, 524 aa, synthetic construct
MRFFNYGRKSVYSDKSDSIDNQFRMSREYCEQKFSGKIESWQEFSDEDFTGANTSRPDLQRMLSYIEEGFCDVLVVYQLDRLSRNVRDFSNIYAMLEEHNVMFISIKENIDTTTPIGRAMMYVTVVFAQMERETTATRVADNMRGLAKKGYWMGGQAPLGYSIKHIVIGDKKHSALELDPDGVSYVTQIFDDFLSSHGSLNAMVTRFRHQGIRTLTGKFFSKAHLHNILTMPYCVEATPEVYDYYAAKGCIMDSASPREKWDGSTGVLIYGRFSDKSQKHLVQPPENWTICLGLQKPFIPAEKWLAVQERFKQNTFCKDAKWPVPLLRGILRCNKCGSLMPVSRRKKVDGTCSSWYYCRKRKDEGSEACDMNQIKCDLIDEKVLEIFRKIALDPDSIHQFVKTESPSEIPNLSFISSRISSVESKIGKLAASLALAENSTASKYIIEEIERLDAELAALKREASHAEMKIHQAAAKERNSQATAIEIAKFINNLDGFSAKEKNEIARSVIRDCRWDGEKLFLTL

SEQ ID NO: 22754 - protein, 567 aa, synthetic construct
MARKKKPASGDAVIYARYSSHNQRDVSIEQQIEACRKHAAELGLKVTMTYEDRAISGRTDNRPAFQRMMRDAEDGKFCYVLAWKSNRMGRNMMQAMVNEARLVDCGVKVYYAEEDFDDSAAGRFALRSMMNVNQFYSDNLAEDVRRGLMDNASKCMANGKQPFGYKRGSDGKVVLDEPAAAVVREVFTRVASGETNASIARDLNHRGIKTGGNGKWNKCSFHALCSNERYRGIYIYGDIRVEGGIPRIVDDALWYKAQEANKMRNQRKTGHHRPGEEDYLLTGKLRCGHCGGYMIGMSGTSGSGIVHHYYACQNRRVGRTCDKKNIRRDIIEPAVAKAIKQYCLTDDVIEWIADKTIEYWEDEDRKLQIASLENELADVNSSISNVMKAIEQGVVTSSTRDRLIELEAQQSDLSAKLTMAKDDLVQVDRKDLIAGLLLFRNGDIYDRKYQEDLFNTFLVAAYVYDDGSRLKLVFNCFGDSNTVDLTLGSDENNDNSNISSKADYGNLFAKTLRPSTRMCKADAVPARWLVSCPSYFLSQQASRKIPEPLHGVRRFRDLSIFSNTRFL

SEQ ID NO: 22755 - protein, 520 aa, synthetic construct
MKRITKIAENASLGKKKIRVAAYCRVSTASEEQLVSLAAQKAHYENYIKSNDNWEFAGLYYDEGISGTKKEKRDGLLAMVAACERGMIDFVITKSISRFARNTTDCLELVRKLLDLNIYIYFEKENINTGSMESELMLSILSGLAESESVSISENEKWGIRRRFQNGTFIISYPPYGYANVDGEMMIVPEQAEIVKQIFADTLAGKSTHEIAKRLNEQGVVTKKGGRWTPGTINGIIRNEKYTGDVLFQKTYTDNSFNRHQNRGEVDQYLMQNHHEAIISREEFERANAVLKQRGREKGNGHDTGRYQNRYGFSGRIYCGECGGKYKRRLHYKPSGQYAAWICVTHLEDKKSCSQKYITDAALQLAFVTMMNKLVFGQQTVLRPLLQSLRGLNDQSRLLKIEELETAIEKNRDQKQVLTNLMASGYLEPALFNKESNELAAEEDTLRQEKDGLMRSVNGDMVKIEELQRLLRFVSKGTMLTEFDDKTFLSFAERITILSRKEVVFELKCGLSLRERLVEP

SEQ ID NO: 22756 - protein, 564 aa, synthetic construct
MPRAQKAAIYCRVSTLHQVDKDSLPMQRQDMINYAKYVLSIEDYEVFEDAGYSGKNTDRPAFQDMMERIERGEFSHVLVWKIDRISRNLLDFATMYARCKKLGVTFVSKNEQFDTSTAMGEAMLKIILVFAELERNMTSERVSSTMNARAAEGKWNGGRVPFAYTYDRETDSFSIRDDEAKIALELKDAYLRTRSLTYTARMLNEAGRRTRRGYAWTPATVAIILRSPFYRGTYRYNYRDESDTTFSFKGQQDWILCAKHHPPLFSDEDCTKIDFWLEKNRRRHGKAAHVQRKCIHIFAGLIRCGSCGSNYTASVDRARASGYQPSMYNCGGRRQKGMCKNRYVNDIRIGSFAFNYISNVIRLRDAFRPQWSKARIQRFLLQGDVFRGALLSDDTLRHVRAALLGSHAGTAEYHPADEQRDDSAEQARKSNLQAELEKNRRALSRLMHLFLYAEDELPQADFLREKRHLQDNISRLQGELEKEQQPSVFASSLTDEDFLRKAAHLLFQSAMTRGGIDFPELAMHVGNLELKNFVNTIIKQIVVLDGHVTQITFANDEIHTFLYH

SEQ ID NO: 22757 - protein, 582 aa, synthetic construct
MAKHAITIPQNPKAALYIRVSTDMQADKDSLPLQESDLRKLADLNGIKDIEVFSDAGFSGKNLNRPAFRSMMDRIRAREFSHLYVWKLDRISRNLLDFLELYDELKCYGVAFASKNESFDTQSPGGEAMLKILLIFAELERKTIAERVTAVMLGRANENKWNGGRVPFGYMPGPVATDANGKKCKSWPVPDPIEAPIVRAIFELYLRAKALKKVATALNTAGYRSRKGTLWSDTTVRCILKNHFYKGEYVYNRQNPNAGRREDFYRSENDWVVVTGQHEAIVPEETWRRCNEMLSKNRSWLAPIGSLVSAQDKYIFGGLLQCAECGYTMNSKDRTRIHDHTHSSYYYCTGRWKAPAVCTGEHSGYASDRVLLPQILKLIARMIEACANAIKFASAEQLVSYLLNDNLIPGAIGIEESQRIFMIVRSHVKHVYGVDQADQFNPNALLVEQSQKEKEKQERALSRLKRAYLFDDGDMSEAEYFEQKSAIEDTITKLDKQIKSLSGNDIGADEAYLAQLSKLIMIKKLQDTNSDFDYYKLAKAIGRKPIHDFLTEIISRIIIGKKNRIIKIIFKNGVPITFQYAK

SEQ ID NO: 22758 - protein, 499 aa, synthetic construct
MIAIYARQSLDKKDSISIETQIELCKKEIEDEPYKEYVDRGYSGKNTNRPQFKAMMQDVENGVISKIIVYKLDRLSRSTLDFGELMDALSKHSVEFSSTREKFDTSTPIGKAMLNIIMVFAQLERETIQVRVQDNFRMRSARGAYDAKAPYGYAKTKVMMHGKAVSTLKPDKAYSLMVKKIFEQYAYTSTSLGYLARTLNQQGIKSANGVAWDSCKLSKLLCNPIYVKADAEVYKYYRAKGMEITNDIDDFRGQYGCVTYGQWDRAKNKFAQLSGLTLSIGLHEGIIDAKTFLACQYKLADNTQINNTGRGKHSWLTGLLKCGCCGKAMKVMTYKETATFRCSGAMNTGLCSDSPSVGVREIEEAVEREIFAHVARHQELVVQKRKEEDNKAHNYKIAIAKLDDQIANLITALADGTELTMKYINGRISELQKQRDILTAELQQHKNATKQQDDIKQFHDIINLWPGMTIPQKHEIAMMLIKRVEIQEDTTRIYWKYDL

SEQ ID NO: 22759 - protein, 521 aa, synthetic construct
MSTNAVIYARFSSDKQREESIDGQIRECTKFAENQGLEVIGTYIDRAMSARSDNRPDFLRMIADSARGQFQYVIVYQLDRFSRSRYDSAVYKNKLKKNGVRVLSAKERIGDDPTSIILESMLEGYAEYYSAELSQKVKRGMTENILEGKWTGGRVPLGYALTPDKKLKVVTTAAKAVNIIYEMYNAGNRVIDIINHLNAHSYTTASGRPFCRSSINSILTNKIYIGTYEWDGHVIKNFTTPIVPYDLWRAVQNRIDYHKNNPRAKSHSTAYALTGYIYCGKCGLPMTGQSGRSNNGNLYYYYRCSSKNNYHERGKKMKYRCQSRNISRDKIESLVLKTTVDILRSPEAIKMIAQQVANLQEIDPTADEQARIKKERNSIQNKLDNSIKAIENGLCSTTITANIEKYEARIAELNQKIDELKFKYAPIHIDAVAVEFFLRSLLLNKKEHDAYRLDMFRTFIRRVIVHQDSIEIQYNYTACPPTLKSPVSIPLTGETECSDKNQNGAPKNQEAVAYAIASFCV

SEQ ID NO: 22760 - protein, 565 aa, synthetic construct
MPRAQKAAIYCRVSTLHQVDKDSLPMQRQDMINYAKYVLSIEDYEVFEDAGYSGKNTDRPAFQEMMERIERGEFSHVLVWKIDRISRNLLDFATMYARCKKLGVTFVSKNEQFDTSTAMGEAMLKIILVFAELERNMTSERVSSTMNARAAEGKWNGGRVPFAYSYDRETDSFSIRDDEARVALELKDIYLRTRSLTYTARTLNEAGRRTRRGYAWTPATVAIILRSPFYRGTYRYNYRDESDTTFSFRGKQDWILCAKHHPPLFSEADCQQIDFWLTKNRRHHGKATHVQRKRVHVFAGLIRCGLCGSNYIASLDRIRASGYQPSMYNCSGRRQKGMCKNRYVNDIRIGGFIFNYISNVIRLRDAFRLQWSKARIQRFLLHGDAFHGALLSDDTLRHVRAALLGSHAGTAEYHPADEQRDGSAEQARKSNLQAELEKNRRALSRLMHLFLYAEDEMSQADFLREKRHLQDNISRLQGELEKEQQPSVFASSLTDEDFLRKAAHLLFQSAMTRGGIDFPELAMHVGNLELKNFVNTIIKQIVVLDGHVMQIEFTNGQVHTFRYKS

SEQ ID NO: 22761 - protein, 540 aa, synthetic construct
MSVCSCLPRQDFHCVILLVLIMYTLQALYTNKKGSRDQRLPLQNVKQNISRKTAHDDIMSFYILSYQAFFRYQKEGFYMSFFTPNPQLFGLRVVKYIRCSHDDQVLHGDTLEAQDLILEDFIKANRMILVDTFIDEALTARKKFNKRKEFVRLLDGVKAHSFDLIIFTKLDRWFRNIGDYHKIQEILEANGVQWKAVTENYDTTTTNGRLHINIRLSVAQDECDRDSDRIKDVFAYKLKNKTYVSGSLPRGLKLDAEKHVIIDPEWNCFALDMFDRFEATCSKRDTQLFLQDKYNIRVCYDTVARYLKNPLFKGQYRDDPDFCPATISPERFERIQKLAIRNVRIRHTQQFYIFSGLLICSSCNHIMTGTVTYRKMADGTEKAYKSYRCNFRAQSKLCDRGRSYREEYIEEYMLNHIRPALSDSVAKYEVTAASAVQKNPVEEMSKIERKIKKLYDLFMDDLIDKDTYRSEYDKFKKQIEELQKCPAAPVRNLDSVRKLLNDDWEAVYNTFSNQEKNVFWKSFVESVLVHEDGSMDIHFL

SEQ ID NO: 22762 - protein, 487 aa, synthetic construct
MPEALNAVIYARYSSDRQTEQSIEGQLRECYAFAKANDIAVIDTYIDRAISGKTDNRPAFQKMIEDSAKRQFQAVIVYRLDRFTRNRYDSAIYKARLKKNGVKVLSAMENLNGSPESIIMESLLEGMAEYYSVELSQKITRGMRENALKGKALGGQRVLGYKVNSDCYFEIDETTAPVVVDIFKLYSSGKTVKEICDILNARGVKTARGGAFNKNSLHTILTNKKYIGIYKTKYGEIVGGIPAIIDKELFEMVALRMEQNKKAPARAKAEINYLLSTKLFCGKCRSAMVGESGTSKTGKKYYYYACVKKKREKACDKSNVKKDWIEDLVIQRTVTDILKDDVIDKIADRLVELQKAEAAESGTMLYLENSLAEIQVSIKNIMTAIEKGIITESTKTRLTELEDEKRNVEIEIAKESIARRIISREQIIYWISSFKDGDITSEKYRQQLIDTFVHAVFVYDDKIVITYNYSGENNTATISDLDLSSPP

SEQ ID NO: 22763 - protein, 490 aa, synthetic construct
MRMAKKRAVAYVRVSSGSDAQLHSFDFQAEYWTTTLAEEPDVELVGIYADKGISGRSAEKRPQFQMMMQDARAGRFDVIYTKSTSRFARNTVDLLNAVRELRDLGVEVVFQNENISTLQPTSEVYLTIAAALAENELQDDSARQRWSYQDRFKNGWISIGKRMYGYKMTADNQVEVIEEEAAVVRRIFGLYIAGNGAVKICKILNADGLKNSYGNPWQHNNILEIISNEKYTGNALMGKHVRINGVHMRNDQGQHSQRYYIENTHEAIISQETFDEAQQVRESRKNAKLVGRTQPQHEFTGMIECGCCGKHFNRKMNATGLKWSAPVWTCYTQTKFTVAACDNSRIKENVLHEKFIEAYNRFIKERPTGETVSNLIDRVSSLEAEEHELAALALQHMITEVAFHKEQLRIKAEVTKLNDEIADQRNRSIGEEDLIPITEYDPEKVKKFITKVIVYRNTITFVLYNGAEIKLDYSNGQPGNKPGWNGKEAK

SEQ ID NO: 22764 - protein, 540 aa, synthetic construct
MATVARRIVTAVPSIGASAAKADREYLKEPVAAYARVSTEKEEQEDSFERQVEHYTKMIQTNPKWSFVEVYADPGITGTKADKRPNFMRMIDDCRAGKIKKVLVKSVSRFARNTVDALTYIRELKDLGVSVYFESENIDTMTPGGDVLLTILAAMAEQESRTISANIKWAYQKKFEKGEVTINTGLMLGYEKAGKTEDGRTQYRIIEEEAEIVRRIYREYIGGKTITQISQGLREDGLMSKRGCSTWCSNTITNILKNEKYAGNAVLGKTYKPDVLSKKRFKNDGSKSPMYYAENTHPAIIDEETFELAKEEMERRQNDKQKAVGRSRYSSKYPFSGILVCGNCGSRLRRHLRKVGSGKRVPAWGCANRIINGRAVCDSHHVNEDVLQRTYLAALQTMVDGSEEIIEAIEKSAATEMRTDTDIDNIDQQIIAIQEEVLTLHRQKQRLAITEEDYQKRLAAFGEQMKELEEQRKQDRTAENRYAAMRLWLDEFKEHTESGDFMNDADGSIMKALVEKIIVKDASMEICFKCGVSIEQVYIE

SEQ ID NO: 22765 - protein, 524 aa, synthetic construct
MTKKEALFMPKTEEKQAAKAVIYARYSSDRQREESIEGQLRVCEDYARRNNITILHTYADRAMTGRSDQRPEFQMMIRDAATMAFNVILVYKLNRFARNRYDSAKYKHKLKKYGVKVVSAMENIADDPSGILLESVIEGMAEYYSAELSENVLRGMTQNALEGKWPGGVIPLGYKLDKGGRLIINEEKAPIVRMIYQMFLDGMSVARIERELNDKKYTTDAGKVFSRSRVYYILHNERYIGTFQWKDIKKEGIIPPIISKESFHAVQERINAMKSSSYRTNNNYLLAGKAFCASCGAKVSGTSGKSQNGNKYCYYGCSHHHRSARYEYCETKNIRADVLEKLVCDKTHEILSSKKAIKEIARQAVKLRPRNESELEIRALKNHISSCQKKIDNCIKAIENGVMSNALVESLNENERTLDVLKEKLAKASLMQGSGLLTEEKIQFFFETIREKAKETEKYNDILLTSLVRAVYICNEYVEIQYNYAEQLPILTNPVRIESCSYRCTNGGTIWIRTKDLFDVNEAL

SEQ ID NO: 22766 - protein, 520 aa, synthetic construct
MKKVTKIEKVFFPTEIVKKKRVAAYCRVSTKFDAQLKSLEAQKHHYERYINSHDDWQCAGIYYDEGITGTKKDNRPGLLQLITDCRTGKIDFIITKSISRFSRNTLDCLELIRELLAMRIPIYFEKEQINTMSMTSELLLSVLSSLAENESFSISENNKWSIQKRFETDTYKIGYPPYGYEWNGQELVINDAEAAVVREIFSAFLAGKGTPSIAAMLNRKRIPTKRTGHWASTTILNMLSNEKYVGDCLYQKYYSDSRFIRRHNNGEKPQYLVQDHHEAIIAREDFETVQALIQQHAKEKRLTKGDRKYQHRYAFSGKIICGECGNTFKRRLHSCEGTKYIAWCCSTHIQNKDKCHMRYIRDDSLKRAFMTMVNKLIFSRCRLLAPYIEALKNTPTNESLKQIQELQTLLMQNMEKRDMLTKLMAQGVIDQVLYTQETNPLLAQADLYCHEIDILKRAASSDMAQINEAERLLCFTEKVGMLTDFDEELFKNFVSHVRIRVRNEATFELKCGLQLTERMN

SEQ ID NO: 22767 - protein, 522 aa, synthetic construct
MALLPRKPAKHPAKPKRGKKLEVEEPGVLYGRYSSHNQKDISVEQQFEKGYELAAEYGIRIIDTYADRAVSGRTDKRRDFQRMMTDAAKGKFRYVIAWKSNRMGRNMLEALINEARLQDLGVRVLYVEEDFDDTAAGRFAARSMMNVNQFYSENMAEDIKRGLYDNAANCMVANGHLPYGYKADETLHYAIDEPKAAVIREIFTRVSCGEAFVDIMASLNARGIKTSYGRPWGRSSFQKILSNERYRGIYIYGDVRKEGGIPRIISDELYFKVQEVITTKKNPQGRHRINGDYLLTGKLFCGHCKSPMTGVSGTGRSGNLHYYYVCQKRRTEKTCDKKNVRRDEIELQVAQAIKDYALKDDVIEWIADSTVAYNERKEAESKVGILEDQLAGTEHGIKNIMSAIEQGIITETTKSRLVELESERAAIKANIAAARADIVTVSRDDIISGLEMFRDGDVHDKKYQARLFDTFLVAVYAYDDDLRLVFSFSGNKNTIQIPIESAVNAVENNEAECSFKLCSAPP

SEQ ID NO: 22768 - protein, 519 aa, synthetic construct
MAMARNITFIPAVKTVGTQKPAEKKQKVRVAAYCRVSTEFEEQESSYETQVAHYTSYINGNPEWEMVEVYADNGISGTRTAKREAFNRMIKDCEAGRIDMIITKSISRFSRNTVDCLKYTRKLKEMNIAVFFEKENINTLDAKGEVLMTIMAALAQQESESLSANVRLGIQFRNQQGKVQVNHNWFLGYTKDESGKLVIVPEEAEVVRRIYREYLEGASFVKIRRGLEADGILNGAKHARWHETNIKQILTNEKYIGDALLQKTYTVSVLDKKRSRNDGVMPKYYVEGCHEPIIDRETFLLVQEEIARRSSLYKGGKKRVYSSKYALSGNVVCGHCGNIYRRVVWYTGGEKPVVWRCVSRLTPGQECPARTVSEEDLHSAIASAVNMAYANRNEIIPVLKENIESVVGCNIDEEIEVIDNMIRKSQMDLLDAGKDEERIQEIGERIVSLRERRQNVLTQAALRKDEIDRIKAMISFIAEQTGEAEYSEALVRSMVEKVTIHDDKITVEFKSGLAIDVEA

SEQ ID NO: 22769 - protein, 511 aa, synthetic construct
MKRITKIDAAAKETKKLRVAAYARVSTDSADQLVSLDAQKEHYEQVIKNCPNWEFAGLYYDEGVSGTKMAKRDGLLRMLADCERGLIDYILVKSISRFSRNTVESVETVRRLSAMGIYIFFEKENIDTGKMEGEMMLSIMSSLAEDESRSLSENNKWSIQKRFQNGTYVIGTPAYGYKNVDGKMVIDEEKAAIVRRMFASVMEGKSGAKIASELQAEGIPTARGGKWQSSVIIGMIRNETYIGVAVFQKTYKDDQFNSRVNYGERGMYRIEGHHEPIVSEEVFRAANFAVDNNAREKGITKSRKYTKRYALSGKVFCGECGGKCKRKKIYGEVWYGCDTHVKDKKRCRQLPVRADMVEAAFVNMMNKLIYGRDTVLLPMSGRLLGGGNTEVLGRLESLNTELAMVAERRQAADKFFAKGLLDAAVYREELDALAQKEKEINAARNGIEGDPDLDFDRQLALNELLKYTAKAEQLTAFSDEVFTKHVDRVIIVSRKEVGFVMKCDPVFRERI

SEQ ID NO: 22770 - protein, 551 aa, synthetic construct
MAEPRPERKIIIIPAKKESPQEQAKKRNLRVAAYCRVSTGDEEQLTSYENQKAFYTEKIMKNPDWTMVDIFADEGITGTSTCRRKQFLRMIRQCRQGKIDMILAKSVSRFARNTLDTISYTRELRSLGIAVIFEEQNINSIYPESEFLIALHAAFAQSESESISANVRWGKRQSIKDGKVTFQYKTMLGYKKGVDGNPEIIPEEAETVRRIFERYLAGKSIQNIRQALEASSVRNAAGTTEWTASNLRAILTNEKYCGDALLQKTFIKDCISKKAILNTGQLPKVLIQDNHEAIVSREMFDAVQLEIARRRAQDGRTRKSAPTGRGKFSGKYALSGLLFCAECGTVYRRVVWTQHGEKRAVWRCTSRLDYGKRYCLHSPTLDEGPLQQAILSAVNSAMSDHGTLTAQLIDTMEQELAPIPSESMSLGDIDRAMEGLGQQFNDLLREAADANNADSYTAQFQSISTAMAEFKRRKANILQIRQEQEQTNRRVQAVASVLKTASSELTEWDDNVIYQLLEKVTVLSREHIRVTLRDGLEIEQAVEQPKRTKFA

SEQ ID NO: 22771 - protein, 531 aa, synthetic construct
MNDSEKTTGSLALKPKPQIITIPATGQDLTRPLRVAAYARVSSDSNDQLHSYAAQTAYFARLINSNPNWIFADIYADQGITGTSVEKRDDFLRMMEDCRSGRIDRILVKSTSRFARNTKESLEAVRELKSLGVSVYFEEQNIDTAQATGETLTAVFSALAQKESEAISERMRHSYQMRMQRGVFSTRCAPYGYRLVDNQLEVIEDEAVVIRQIFDRYLSGVSMEDIAKEITARGIPTKQNTPFWQVRSIQYILRNEKYIGNSLVQKTYATATLPHRKKENKGEEDQYLIEETHPPIVSQEVFDKVQQLLSRKSAFIPPRASAPHPFSCKIVCGHCGAICKRKVCRGTAYWVCQTHEKSAESCLTMQTPEAEITEAFLRVYFRLKRYGEEILTQLIQALQTAKTGRLLWSEDIISLNKRIADIASQERLLAQLKQQAIVDPDIFISRSNQLAEQRREAKLKKSHILRAEDDQTIQRTQELLDILEEGPDLLMAFDGALFSELVEKITIQNNSTAIFRLINGLELPEHFERRK

SEQ ID NO: 22772 - protein, 494 aa, synthetic construct
MKKAAAYARVSTTGRAQEHSFEFQSKYWNQTLGNSEEYEYVGLFADKGISGKLMNRRPRFLALMELCDRNGVDIIFTKSVQRFARNTEELLKIVRKLREKGIAVYFEKENINTLDADSELYLTIAAALAEEDLTRYSNNVAWSVKDRFQRGEMILGAKVFGYRKTKENSLVIYPQEAQIVKEIFETYVRGDISTVQIAKELNAKKIPSPSGGEWRNSQILYILRNEKYYGDMILQKTYMDGATKKVNRGEKERYYVEGSHEPIVSREVWDRAQEVIARRANPKLVGAAQKNYPFTGIIKCECCGSVYTHKVNNSGTISQANFWKCRQALHKGVAYCGNPGIKEQVLNDLFVECYNEFITMGYYKTNMDTGEDEQRLKALIETEKELTHLMMNGLLSRIQYAAEQQSVRTEIQKISGKLQELRSREVRGSDFNTIGEFDEQKVYAFIKGVRIKNWMVTFEYYNGIEISRTYTNGQPGNIRDWKLKQKLRREQENG

SEQ ID NO: 22773 - protein, 535 aa, synthetic construct
MAETQRIVRTIPATFAKTTSMFTKMVNVGAYARVSTKTEEQEDSYERQVNHYSNYIKHHEGWNFVDIYADEGITGTRADGRKDFQRMMNDCRLGKLDKILVKSIARFARNTVDALNAIRELKELGISVYFENENIDTLSPGGEVLITILAAMAEQESRTISTNVKWAYQKKFQNGDISLNYKRFLGYTRDENHNLVIVPEEAEVVKRIYREYLHGYSVSYIAKGLTRDKIPTPSKKQVWYNSVIISILRNEKYYGGLICGKTYKPDVLSKKRYKNEGQVERYYIENSHPGIVSRKEFDMVQAEMLKRKTESGCSDTNQGRYSSLYPFSKKVICGECGAFYRRHAQYCRGEYVRTWVCNTHKTKGVAWCSQTYIREEELEWAFVAILKRLIQNYKEITDTLEENIKSTLRQDVDDELRTILDKIEERQKEMLVLLREKRNGNLTLEQYNQRGSEIEQAIQELTKKRVALEEKSSLNKLAILRVEQISAALSTPEDIEKFDDELCRSLVDVIVVRNNYTLDFHFKCGITETITIKRA

SEQ ID NO: 22774 - protein, 522 aa, synthetic construct
MNENVTLIPARRRTGNRIIKDEKPKLRVAAYCRVSTDSDEQAGSYETQVNHYTEYIGRNKEWELAGIYTDDGISGTNTKKREGFNGMIEDCMSGKIDMVITKSISRFARNTIDCLKYVRQLKEKNIAIIFEKENINTLEASGELLLTIMASLAQQESASLSQNVKLGLQFRYQEGKVQVNHEHFLGYTKNEDGNLIVVEEEVKIVRRIFREYLEGASFRNIAEGLERDKIKTGGKKYKWHLSTVQGILRNEKYIGDALLQKTITTDFIEKTRIKNDGSVPQYYVKDSQEAIIPRDIFTQVQEEMVRRANLFSGEDGKKKRVYSSKYALSSICTCSKCGDIYRRIAWNNRGKHSIVWRCCTRVENGPAACDAPTVQETELQQATVKAINLLVRSSSSTLDILMHNIETALADDNAGELEKINAVLSEKQKQLVKLAHAKKDYASLTDEIDLLRDKKQELLVAKAETEGFKKRIKELEDFLKEANQELTEYDESMVRRYIEKIQVYEDKFTVCFKAGVDLDIER

SEQ ID NO: 22775 - protein, 521 aa, synthetic construct
MARITKIEATPVLAAKKKTRVAAYARVSTSSDEQLLSLETQKEHYDNFINANPDWEYAGLYYDEGISGTKVEKRDGLLALLKDCEDGKIDRVITKSISRFSRNTTDCLEMVRSLARLNIYLFFEKENIDTEHMSSELMLSILSSIAESESRSISENEKWSIAKRYQNGTFIIGYPPFGYDNVDGKMVIVPEEAEIVKEIFAMAINGMGSYVIAKELNKRGIRTKKNGKWGSSTVKGLLHNEKYTGDVIFQKTYTDDNFNRHNNYGEKNMYLCKNHHEAIVSHEIFEQAAASMEQRAKEKSIEAGHEKYQNRYAFSGKIICGDCGSTFKRRQHYKPSGNYVAWTCNLHLENKEACSMLYIHDEAIKNAFVRMMRKLQAADNRMLKPFVAGLKGTNNKDRLHQVMDLEAAIERNTEQQMVLVNLMSAGYLEPEVFHLEKNQLSIEADELAKEKELISKSINGDLTHLEEAKKLLRFAIKKTSVEAFDDDMFLEYVDTITVLSREEVVFNMKCGLKLKERLVEE

SEQ ID NO: 22776 - protein, 503 aa, synthetic construct
MNTVIYARYSAGPRQTDQSIEGQLRVCTDFCKQRGLTVIDTYCDRHISGRTDERPEFQRLIADAKRKKFEAVVVYKTDRFARNKYDSAVYKRELKRNGIQIFYAAEAIPDGPEGIILESLMEGLAEYYSAELAQKIKRGMHESALKCQSTGSGRPLGYRVDEQKHFQIDPESAQTVQTIFEQYIKGESNAAICELLNSRGLRTAQGKPFNKNSINRIIKNRKYIGEYRYHDIVVEGGMPAIISKDTFNLAQAEMERRRTRKAPKSPKAEYLLAGRLFCGHCKGPMQGVSGTGKSGNKWYYYYCGNTRGKNKTCDKKQVSRDRLERAVVDFTVRYILQEEVLEELARKVHAAQERQNDTASEIAFYEKKLADNKKSIANVLRAIESGAATQTLPARLQELENEQAVILGELSFLKGKRLALTEDQILFALMKHLEPYPGESEQDYRRRIISDFVSEVYLYDDRLLIYFNISSEDGKLKSADLSNIEGGEFDEGLVSSTIKGLLF

SEQ ID NO: 22777 - protein, 568 aa, synthetic construct
MQSKKKQDKAGITALYCRLSRDGGVEGDSNSVANQKKLLKRFAKENGLSNTRYYVDDGYTGTNFERPGFQKMIEDIDLGYISTVIVKDLSRLGSRYDMVGYYMDTYFPDRDVRFIAVNDNIDSDEGESEIAPFKNVLNEFYARDISKKCRSSYRIRGSTGEPLAPPPYGYIKSPDNPKKWVIDPEAAQVVRDIFKMALEGKSNETIARILQERKVLIPIAYWQEKGIRKGGKVTQPNKYKWCKTTVTKILTQQEYCGDIINFKTYSKSYKNKKSYDNPKENWVIFKDVHEPIISRDDFELVQMLVVKTKRRAPKQENGEKNMFCDFLYCADCGSKLWYHTNTTNKEIHYFSCSNYKKDTRGNCETRHYIRADAIEQIVMLELKRLAKYLESHEEEFAKLLAEKTNADMLAEQKTLETELNRVTARTEMLTSLFAKTYEDNVSGKLSDEMYMELSHKYEVERLELKTKIFEYKERLAKISEMEQNKDDFLKAVRKFMEMESLTAPMLRELIDHIDVYEKEGGKKNYTQHIVIYYRFVGYLELPSSDDENYKANTRKGVDVEYIPTVKSA

SEQ ID NO: 22778 - protein, 506 aa, synthetic construct
MENQTAVIYARYSSDRQREESIEGQIRECEAFAAANGYKIIGTYIDRAMSARTDQRPDFQRMIQDSDRHLFQFVIVYALDRFSRSRYDSAIYKNRLKKNGVRVLSAKENIRDDPTGVILESLLEGYAEYYSLELAQKVRRGMTDNLLEKKWVGTVIPFGYKKGSDSRLYVDETKRNAVIDIFQMYADRSRLVDIIAYLNAHHFTTAHGRPFGRNSLNNILVNSIYTGTFKWAGKSYPGYAPRIISDELFNKVQKIKEGRKRNMVKSASPDYELTGKIFCGRCGRPMVGISGTGKSGNTYYYYKCSGKTHGKKDCDSKAVRRDAVESAVYNATVAMLKQPHAIKIITEQAILAQEREQGNPEVDRLKQEKAALDAKIRNISKAVAAGLTADEIIAQANEYSNRSKELETLIRIEELKEKAFTLTPEAVTFFLEKLLEKAETGHATLSTFWDFIRCIKINGDIAEIHFNYTAVPSTLENPIRVHIDLDEECSNGDVLVDHQGFEPRTP

SEQ ID NO: 22779 - protein, 499 aa, synthetic construct
MIAIYARQSLDKKDSISIETQIELCKKEIGDEPYKEYVDRGYSGKNTNRPQFKAMMQDVENGVISKIIVYKLDRLSRSTLDFGELMDALSKHNVEFSSTREKFDTSTPIGKAMLNIIMVFAQLERETIQVRVQDNFRMRSSRGAYDAKAPYGYAKTKVMVQGKAVSTLKPDKAYSLMVKKIFEQYAYTSTSLGYLARTLNQQGIKSANGAAWDSCKLSKLLCNPIYVKADAEVYKYYRAKGMEITNDIDDFRGQYGCITYGQWDRAKNKFAQLSGLTLSIGLHEGIIDAKTFLSCQYKLADNTQINNTGRGKHSWLTGLLKCGCCGKAMKVMMYKDTATFRCSGAMNTGLCSDSPSVGVHEIEEAVEQEIFAHVARHQELVVQKRKEEDNKAHNYKIAIAKLDDQIANLITALADGTELTMKYINGRISELQRQRDILTAELQQHKNATKQQDDIKQFHDIINLWPGMTIPQKHEIAMMLIKRVEIQEDTTRIYWKYDL

SEQ ID NO: 22780 - protein, 521 aa, synthetic construct
MSTNAVIYARFSSDKQREESIDGQIRECTKFAENQGLEVIGTYIDRAMSARSDNRPDFLRMIADSARGQFQYVIVYQLDRFSRSRYDSAVYKNKLKKNGVRVLSAKERIGDDPTSIILESMLEGYAEYYSAELSQKVKRGMTENILEGKWTGGRVPLGYALTPDKKLKVVTTAAKAVNIIYEMYNAGNRVIDIINHLNAHSYTTASGRPFCRSSINSILTNKIYIGTYEWDGHVIKNFTTPIVPYDLWRAVQNRIDYHKNNPRAKSHSTAYALTGYIYCGKCGLPMTGQSGRSNNGNLYYYYRCSSKNNYHERGKKMKYRCQSRNISRDKIESLVLKTTVDILHSPEAIKMIAQQVANLQEIDPTADEQARIKKERNSIQNKLDNSIKAIENGLCSTTITANIEKYEARIAELNQKIDELKFKYAPIHIDAVAVEFFLRSLLLNKKEHDAYRLDMFRTFIRRVIVHQDSIEIQYNYTACPPTLKSPVSIPLTGETECSDKNQNGAPKNQEAVAYAIASFCV

SEQ ID NO: 22781 - protein, 523 aa, synthetic construct
MSVRNIIIYLRKSRSDDPGMSVEDVLAKHERQLQEYAISEYGEQIPEDHIFREVVSGETIADRPVMKQVMQLLEAGNITAVLVIEPQRLSRGDLEDCGRIINTFRYTHTLVATPPKTYDLTNEYDRKFFEMELMRGNDYLEYTKKILNRGRVASVKQGNFIGSVAPYGYKRVRLGSGKDISYTLEIIPEEAEFLKLMYHLYLDEGYGFTRIAKHLDSIGAKPRKAEHWSPAAIKDMLENPVYIGKIRWNWRKTEKVMTNGQIIKTRPKTKDESQWIYVDGKHKAIIDESLFQAVIDRRGKNPCVRKNKELINPFAGLLFCGTCGKAMSYKHFKQYRGKSENICTSMVCNNQSHCKTKSVLYDAFLDRVISTLEDTITDFKIKLQNDDCDSAKLHANVVKNLELELQKLQQKDFRQKDAYEDGIYTKEEYAARNAKLQEQIAATMDSLSNAKESVLPSVDYNEKIMRFTDCLNALKSPDVSATEKNMLLKSCINKIVYYNSMPSKAGAGRWIDNVFSLDIFLNL

SEQ ID NO: 22782 - protein, 521 aa, synthetic construct
MKKVQVIPATLQNYTEKPVHSQKKRRVAGYARVSTDRDEQLTSYEAQVDYYTNYIKGRSDWEFAGMYTDEGISATNTLHREGFKSMIRDAMDGRIDLIITKSVSRFARNTVDSLTIVRKLRDNGVEIYFEKENIWTLDAKGELLITIMSSLAQEESRSISENVTWGHRKRFADGKVSLAFSHFLGYDRGADGNLVVNKEQAETVKLIYRLYLSGYTFHSIAKKLTEQKIPTPARCKIWRPNTVRSILMNEKYKGDALLQKKFTVDFLTKKSKRNEGEVPQYYVQNNHEAIISPQVFDLVQEEMRKRKNSKIRHSGISIFSSKIKCGQCGSWYGAKVWHSTDKYRQTVYRCNDKFKRHCKTPHLTENEIENIFVRAVNQLIKNKDEILSNIILLKIRLVDTTDLEKKRNALEFNMNLLAERVQQLISENACLTQDQVQYNQEYSELVNRYEKIKIKYDQICDTMKQRTSRGQQLERFIENLQKQEFISIFDKRLWCSLVDFITVNEKDDIWVTFKDGTEIKA

SEQ ID NO: 22783 - protein, 527 aa, synthetic construct
MNIAAYCRVSTDKSDQLNSLETQKEFFLEYTKRTGDNLIKLYADEGISGTKIKNRKEFQRMLADAEKGLFAMVVVKDISRFARNTVDLLQSVRKLKSLGIETQFLTANMTSMGNSEFVLTIFGALAQEESANTSKRIKFGKKMNAEKGRVPNIVFGYDKTIGDYFNLSINENEAKAIRQIFQWYTEEGYGGSKIANMLNERGIKTKRGNNWSQNAVCRILTNEIYTGKIINGKEEIADFLTGQRKEKDESEWLVTIRPELRIIEDEVFDKAQDILKGRHDSFKITHERQSNKYLFSTLIKCKECGWSFRRTVRQYKNTYVRWVCSGHNGKGADSCPNAVTVDEEELIQALQEYFQEILSKKKKVINYVIKEFQRVYKAKDENIEYEKQLNAELNKLRKSREKYMDMYTDDLISREELNEKIGGMRKEIERLENELKMVSYHLTKGEQLEAILNSTFKQLEDITDVHEMTNAQLKRLINKIEVDKDGNVDIYLRLIGDLGLDETVLIEGDKNTEEKGTKKVPNSYNHT

SEQ ID NO: 22784 - protein, 434 aa, synthetic construct
MERVVERVDALIPAQPKALRVCAYARVSTGKDAMLHSLSAQVSYYSKMIQSHSGWMYCGVYSDEAVTGTKRERAGFQHMIEECREGNIDLVITKSISRFARNTVTLLQTVRELKSLGVDVFFEEQHIHTMSADGELMMTILASYAQEESLSASENQKWRVRKAFENGEIINLRFLFGYDITPDGIRVNEKDAAIIREIFARFNGGESMSSICRDLDARGHKGVLGGTWCAERMRNTLSNEKYLGNALLQKRYRNNHIEKKLLLNRGELPMYYAEGTHEPIIDQATFDKAQERLRMLAQQAANRKKPTRSVFSGLIHCGLCGNTYKHVTYRQKHYWNCTTFQTKGKSECAAKRIPEETLEVLTCEVLGAVSFDPDMVRSKITAIRAEKSNMVVFCMDDGSEIVKRWTDRSRAESWTPEMKEKARQRALQARRHKV

SEQ ID NO: 22785 - protein, 555 aa, synthetic construct
MPEALNAVIYARYSSDRQTEQSIEGQLRECYAFAKANDIAVIDTYIDRAISGKTDNRPAFQKMIEDSAKRQFQAVIVYRLDRFTRNRYDSAIYKARLKKNGVKVLSAMENLNGSPESIIMESLLEGMAEYYSVELSQKITRGMRENALKGKALGGQRVLGYKVNSDCYFEIDETTAPVVVDIFKLYSSGKTVKEICDILNARGVKTARGGAFNKNSLHTILTNKKYIGIYKTKYGEIVGGIPAIIDKELFEMVALRMEQNKKAPARAKAEINYLLSTKLFCGKCRSAMVGESGTSKTGKKYYYYACVKKKREKACDKSNVKKDWIEDLVIQRTVTDILKDDVIDKIADRLVELQKAEAAESGTMLYLENSLAEIQVSIKNIMTAIEKGIITESTKTRLTELEDEKRNVEIEIAKESIARRIISREQIIYWISSFKDGDITSEKYRQQLIDTFVHAVFVYDDKIVITYNYSGENNTATISDLDLSSPPKINHPQGWIYFCRGPAGVEVYPPLRGKSLQVHQNKPPAGVALFLLRPANALPHCASCCALPRAVVYCT

SEQ ID NO: 22786 - protein, 426 aa, synthetic construct
MERIIRQVSFPGAEMPRLKRVAAYARVSSGKDAMLHSLSAQVSSYSNLIQNHEGWQYCGVYADEALTGTKEGRGSFQSLLADCRAGKLDMVITKSISRFARNTVTLLQTVRELKGLGVDVYFEEQNIHTMSADGELMMTILASYAQEESLSASENQKWRVRRNFEEGIPWRFFMLGYRAGDGKLAVVPEEAEIVRSIFSDYMAGDGVTIIANRLNKSGYATQSGCVFHKSAVERILRNYAYTGNLLLQTKFRENHLTKVTRRNHGELPQYHAQETHEAIISFEMFQAVQEEIQRRKAKYGPTKERQFSPFTGLITCECCGKHYRRKTTATGFIWICSTYNSKGKAYCASKAIPEQKLLATAAQVGDPDTFKGILAKNGNELVFTLQDGSTVVKHWQDRSRAESWTPEMRRAVGQKTRERNQAAWQR

SEQ ID NO: 22787 - protein, 529 aa, synthetic construct
MPKAKNVTVIPATLNIHTKTPTAERVRRRVAAYARVSTDSEEQLTSYEAQVDYYTKFIQENPDWDFVEVYTDEGISAVNTKHRDGFNRMIRDALAGKIDLIVTKSVSRFARNTVDSLTTIRRLKEAGCECFFQKENIMTFDSKGELLITIMSSLAQEESRSISENVTWGQRKRFSDGKVSIPYGQFLGYRKGADGLPEIVPEEAEVVRRIYRELLQGKSTNAIAAMLTEEGIPTPGKKTVWQRATVESILRNEKYKGSALLQKSFTVDFLTKKTKINEGEVPQYYVEDSHPAIIEPWEWEKVQSELERRKNSRTRHRQTSPFSGKIFCADCGEIFGSKTWHSTDRYRRIVWQCNGKFKREHKCETPHLTEERLKELFLAALGEYLSDRNAAIDQLRCAQRTLTDTDFIDADIQALEEALTGVTGMLRLCIEENAANTTTEETYRTTHADLCRRFEETEAKLAALHKQRDKMKADAIAIGGMMFELGELDTLPVDFDEKLWHGTIDHVTVHADERVVFRFKDGKEIATRL

SEQ ID NO: 22788 - protein, 425 aa, synthetic construct
MPRTVEQIQFTPHMPKTLRVAAYARVSCGKDAMLHSLAAQVDHYSTYIRHHPGWEYVGVYADEAKTGTRDSRENFQRMLADCRKGKIDHIITKSISRFSRNTVTLLETVRELKELGISVYFEEQSIDTATADGELMLSILASYAQEESLSASENQKWRVKRNFEEGIPWRFFMLGYRRENGKLAIVPEEAEIVRSIFDDYLAGKGVTAIAKRLNESGYATQSGCVFHKSAVERILRNYAYTGNLLLQTKFRENHLTKVTRKNQGELPRYHAADTHEAIISQETFDAVQAEILRRKRKYAPTKPQQPSPFTGLITCAICNKHYRRKTTATGPVWICATYNSYGKSYCSSKAIPEEKLMQTVALVGHTGEITAITAHNDNLLEFTLKDGTGVVKRWQDRSRAESWTPEMRIAAGEKTRERSQRHAES

SEQ ID NO: 22789 - protein, 488 aa, synthetic construct
MKTDAVYARQSVEKKDSLSIAGQIDLCRRTAGGGALRVYKDAGYSGKNTERPAFQQLMKDIRADRIGTLYVYRLDRFSRSVADFGQLWEVLQEHHVEFVSVNENFDTKTPMGRAMLHIIMVFAQLERETTAERVRDNYYRRAALGAWPGGPAPYGFDNGRARGRDGREVPSLIPNDKAAVVQRIFQEYAAEGMSLGLLARKLTAEGIPAPKRATWDNVTLSRLLHNPAYVMADEQVRLHYLGQGVEVTSLPESFDGVHGVLLVGKREANARKYTKSENHRASVLNSVGVVPSPLFLAVQAKLAHNRQVGNSGKGKHTWLSGLLKCAKCGYSLSVVADKSYRYLACSGRYNKNRCDAAIHVKLAELEAVVQTEIEKLLAQCPREPVVPKPEEDGYTQRLLELDRRAERLMDAFAESEDLPASYLQKALGKIEKEREALRQARRREAGRIPLPEKLVFGELSFEEKKAVAAQFLRRIEVAEDSAEIIWTV

SEQ ID NO: 22790 - protein, 563 aa, synthetic construct
MAEVEVIKAVDGPILRKRDYEGNPVVITRQRVAAYVRVSTDGDEQLESFQSQKQYYQDKISENRDWVMVGIYADEAITGTKVDKREQFQRMIQDCMDGKIDVIMTKSVSRFSRNTVDILQYVRLLKGKGIAVIFEKENINTLTEQGEMMLTLMGTLAQNEVESTSKNVKLGIKMKMKRGELMGFNGCLGYDYHPEDKTITVNEAEAETVRLIFELYLQGYGTYTIAKRLEALGKVNKKGVVKWTDSGVRGIIKNEKYKGDLLLQKTITTDPISKRRIENFGEEEQYYVHDHHEPIVSREVWEQAKEIRLSRNHPSDTKADGKREKYTKKYAFSSMCECGFCGTKLTRRTLHSGSKYETPVWYCRNAANKGKHNCTNSKSMRESILENSFLEAYKLLAGSFDDVIDSVIDTIEGISTNNEDIGRLKKEQKALDNLEQRRKRLTDLYLDEGISKEAYDEKYEELTMKIQKTKESIRILQDNVSNQKDVSKRMASLKKALSDGDILDEFDRVVFESIVEKVIVGETNDDGTVDPFKLTFVMKGNGNSVVPNAKAWFKSEKSTTKTA

SEQ ID NO: 22791 - protein, 551 aa, synthetic construct
MNVKLTENNKRKFNGGEEITALYARLSCDDDLQGDSNSIVNQKAILEKYAKEHGYDRFRFYADDGYSGTNFNRPDFQRMIKDVESGEVKRIIVKDMSRFGRDYLKVGYYTEVYFVEKNVHFIAINDGVDNHSETDSDFTPFRNIINEWYAKDTSKKVRAVLKAKGNSGKHLTNCPPYGYYKEGDDKQKWYVDEQAAKVVKEIYSLCIKGFGPTQIARMLTERGTDSPIVWKKKHGVKYQLEKFDKPTEWSTHSVTQILSNPTYLGHTVNFRTRKKSYKTKTVIYTDESEWVTFENTHEAIIDRETYDTVQRLREAKRRPTRMGEMSVFSGMLFCSDCGKRLYLNRCNVHRSYTKDVFVCATYRKGTAGRRGCTSHSITLEATEKIVLTDLQRVLSMAKANEKEFAELLRASKSKETKRDLSSKTKEYEEAEKRIATLDRIIQSLYEDKVCGNLTEERFKKMTEAYEAEQATLTERVKVLRRELVTAKEETEGVDKFLRIVRKYTEIAELTPETVREFIDRIIIHEAEKTDGKKRQIVEIYYNCVGVIPNPA

SEQ ID NO: 22792 - protein, 509 aa, synthetic construct
MKNCVIYARYSSERQTEQSIEGQLRICNDFAKQNALQVLDTYIDRAMTGTNDNRPAFQQMLKDAEKPVMWDIVLVYAIDRFGRNSIEIAVNKQKLKKNKKMLISATQRMSENIDGTKNLDGIILENMYIGLAEYYSAELSQKIRRGLHESRQKGFCSGGRPPYGYYYKDKRVFINEEQANVVRYIFKEYFSGKIVREIINDLTEQGILYRGKAFAENTIYNFLRLEKYVGIARYDDGVYDNIYPQIVDKEVFDGVQAILAANKIGSRSPESLFLLRNKITCGCCGTHYQGDSGTSKNGTKFYYYKCMGRKKKHICHASVLKKDEFENLILEIIIKVFGTESRINYLADCVMAVYNDKLKEHSAVDLLKRDRDEVQKALDNIMRAIEQGIITETTQRRMKELEERKQTLNDKIVIAQYGESQRLTKQEIVEYLTHSLRQEPRFLLHILVKSIIVYDDKIEIYFNFTERKNPDDSDDTDSRDNNYANCSDILPMCPPRKKDSKLLSFFRGE

SEQ ID NO: 22793 - protein, 523 aa, synthetic construct
MKTAVIYARYSSDRQTEQSIEGQVRVCNDYAERNGILIVNQYIDRATTGTNDNRDAFQQMLKDSDKKQFDFVLVYKLDRFSRNKFEMAMHRKHLKDNGIKILSAMENIPDSPEGILLESLLEGMNQYYSEELSQKTRRGQKETRLKGLHCAGKLNYGYYTEKKKVFIHEEEGPIVKEIFERYAAGERGNEIAISFAERGILYRGKPFSAANIYVILHGEKYTGKYTLHGEVYDNIYPKIIEPELFERCKAKIDANRYGNHIPDYSYLLRKRVYCGECGTRMTSYSGTSKSGKVSKYYKCWNARDRKKCNAKFIKKDLLESIVLKALQETLTGKNLSVIVDEIYKQHNAKLLGDNPVKMLEKELLQINKSINNIMKAIEQGIITDTTKERLQELENTRKDLQEKLIFERMQEKVVLDKKVIENYLKKAVEKEPEIMIELLVEKVYVYSDDHIEIMLHYVDTPIKPKPIEYDKDTSPEGESLRGSLIYTTKIFVDNDIFKGMNKKILEPAFKETQKMPVLIEMRG

SEQ ID NO: 22794 - protein, 465 aa, synthetic construct
MMSEKRTTITRMEAPAQLPVRKRVAAYARVSMEKDAMLHSLAAQVSYYSELIQRNPKWEYAGVFADFGLTGTKETRPEFQRMLKECREGKIDLILVKSISRFARNTLTLLNTVRELKGLGIGVYFEEQKLDSLSGDGEFMLTILASFAQEESRSVSENCKWRIRKKFEQGIPTGFGMYGYEVRNGSFVIKPAEAAVVRRIFQMYLDGMGSVKIMKLLTAEGVPAPLGGLWNASVVREMLKNEKYAGDLLLQKFYTNNHVEKKQFHNRGELPQYFVGEDHEAIIDRETFDAVQREIAWRTAQRKAAKEKKIAKTAELSISAVASPIPPAENNSRESIPLTDRIYCGICGKKYRYKLTRMGTPYAAPVWLCSTFNYRGKAYCASKQIPEDILKELINSVLSTVYTEDSVHHIEMHPGNRVLFVFQDGHTEERFWKDHSRKDSWDAEKRQKAAEKTRIQHQKRKEQEQ

SEQ ID NO: 22795 - protein, 545 aa, synthetic construct
MPTSKNTARKYAAGGSSDNSCGVEPLRAVIYARYSSSGQREESIEGQLRDCYEFAKKHGIIVIGEYIDKAMTGRVDRRPDFQRMMKDSEKGRFNCVLLWKMDRFARNRYDSAMYKYKLKKNGIRIFYAKETIPDGPEGIILESVMEGYAEYYSENLAQNVKRGNYDSALELKTLGKTCLGLKTGPDGRYMIDQAEAAIVRRIFEEYAEGERAKDIYERLNSEGYRTSRGGKFNKNSLRRILSNKKYIGVYEYEDIYVENGIPAIITDRDLFERVQKMLKINHDAPARGKAQNFLLTTKLFCGLCGSPMIGDGGTSHTGKAYAYYSCTKRKRGRSCKKESVPKDWIEDLVVGELVKIVHNDELIEQIADRVMEYQKREKDQAGLHALEIRQKENEKAISNMLAAIEAGIITPSTKTRLMELEADRADIEKGIAHELLAEPEFERDQIIYFLERFRSGDINDEAYRIMLVDTFLNSVYLYDDDHLVLVMNYSGENCKVDLKLVEGAVSGDGCKGSAFAPSSALNGAKPNPVYFFKKVFAVVVNFTRK

SEQ ID NO: 22796 - protein, 500 aa, synthetic construct
MNTVIYARYSAGPRQTDQSIEGQLRVCTDFCKQRGLTVIDTYCDRHISGRTDERPEFQRLIADAKRKKFEAVVVYKTDRFARNKYDSAVYKRELKRNGIQIFYAAEAIPDGPEGIILESLMEGLAEYYSAELAQKIKRGMHESALKCQSTGSGRPLGYRVDEQKRFQIDPESAQTVQTIFEQYIKGESNAAICELLNSRGLRTAQGKPFNKNSINRIIKNRKYIGEYRYHDIVVEGGMPAIIPKDTFNLAQAEMERRRTRKAPKSPKAEYLLAGRLFCGHCKGPMQGVSGTGKSGNKWYYYYCGNTRGKNKTCDKKQVSRDRLERAVVDFTVRYILQEEVLEELARKVHAAQERQNDTASEIAFYEKKLADNKKSIANVLRAIESGAATQTLPARLQELENEQAVILGEISFLKGKRLAFTEDQILFALMKHLEPYPGESEQDYRRRIISDFVSEVYLYDDRLLIYFNISSEDGKLKSADLSNIEGGEFDEGLVSSTNTI

SEQ ID NO: 22797 - protein, 512 aa, synthetic construct
MRVAAYCRVSTDSEDQLESYKAQVAYYTDAIAKNPRWRFVDIYADEGITGVMAKKRTNFMRMMRDCEKGKIDLILTKSVARFARNTVDSLNYVRRLKSKGIGVYFEEQALDSLKTENEMALGLYSVLAQAESENISANVRWGIRQRMQSGTFKFRYNLLGYRKGEDGEPEIVEEEAKYIRAIFIMYLDGKSLDQIKSYLEGEGVLTKTGKTVWNKCIIQAILTNERYCGDLLMQKTFTENCITKKVKKNRGEMPKYLIRDNHPAIITHATFKMAQMEMARRGSVRKKTDSGITEQGKYSGKFALTDILVCGECGSPYRRKTYSRNGENKRVWRCLSRLEHGTEFCSDSITVDDEMLKKAIVRGISKAISDKQDVLNLILSNLAYAVTGEDDTLEMYAIEKQLKTLSGIMDETMELAASSTGDGKRFQEEMKLLSSQMVVLREQLEMIKGRIDSNERATVEIESIKQCLSADSLDFTEYNDVTIRRLVEYIRVMKDNSIIIVLKGGMQIQEII

SEQ ID NO: 22798 - protein, 524 aa, synthetic construct
MNTAVKEVQVIKATITGEKTEKIRVAAYCRVSTDKDDQLNSFFAQMRYYRDYVRGNDKMVLVDIYADEGITGTELTKRDEMKRLIRDCKHKKIDRVLVKSVTRFARNSLECIETIRTMQSCGVSVLFENDHIDTETMNSEMMLYIKSAFAQSEATSASKRMSTSIRMKMEDGTYVATSAPFGYRLVDGEYTVVPEEAEVVRKIFALYLQGYGVNVIAKTIRDTDGDKRVWNRQGIKYILTNEKYIGDTMWQKSFTPAVLPLRNRPNRGELPKYYCEGTQEAIVSKEDFIAVKNLMREREEKHYKQYRNEKKLFYRKIMCRHCGWSYRVKQIQNGYVWACSRKGMIGGECSSRSYTDTELCRSFIKVYNILKQNKRVLLDETISQLQTLKVKANCGNNVIAEIDEKIAMLGRQNNLYGQMLANGVIDEVTYHEKADNLKGQITELRSRRMKIINDDDEETCIEQLRQLRKIIEESPDFLDEMDTVLFREIVKLIYAEEDGALSFVIKGDLELKVYVGGENDEQND

SEQ ID NO: 22799 - protein, 571 aa, synthetic construct
MYNTKEGKSCVIYIRVSSERQVKGYSLDGQKHYLAECAERRGMTVLDTYVEEGKSGKSIEGRTEFQRMLDDIQSGKVHTDYVLVFKLSRFGRNARDVLNSLEFIMKYGVHLMCVEDGLDSSTSMGKMMITILGAVAELERENIIAQSLLGREEKAKSGGWNGGFAPYGYRLVKGDDKSKGKLETVPEEKAVVQLVFDMFLNRNMGYTAISGYLNRNGYTRPPAKNAIRPSYGEWSSDHIKRMLSNPIYTGRVAWGKRRTEKVPGKDNEYRLVKQDEYILSEVVSHEAFVSKEDFDKVQEIKAIRGKKGNHNIGQYNAHLLSGIVKCPQCGAPMYIGMTKWTNQDGTERRTESYVCSYATKHRGTSVCRRNGVVASQVEDEVMEYTRKIVRNPQFIKDLQEKVMTAVDMTEVENDITAYKNQLSALQRSRDSLERDIDRIAPDDKYAERRRADMTRRLNDLYDQIYKAEDLLQESLMKKTTLESEQMSVQSMIGILSSFDAIYDRMNAAERRDLVKYLISEVELFPREEQKTQKRFVKAIAYKFPIEQKVLTQFDECGASVETVALLTRTQP

SEQ ID NO: 22800 - protein, 520 aa, synthetic construct
MVKCMKSVAERAVPAVIYARYSSSHQREESIEGQVRECREYAEREGYSVLQVYADRAITGRTDERPEFQRMLADASKGVFQAILIYKYDRFSRNRYSFAVWETKLKKHSVKVISARENVAEGAAGIVLKSVLQGMAEWYSVDLSEKVTRGMKENALKAKWTSGTVPFGYTRDAEQRLIIDPERGEYVRQIFEKVLAGEKYVDIASWLNMLGVRTARGAAWNKSSFTWMLKNVVYTGLFRWKDIEIKNAVPPIVSKELFEAVQRKLKTYGRRGINVQKSDKYLLTPNIICGECGGPMHGMSGKSRSGELYYYYACANKRAKRTSCSISPLNRDELEQAVYNCAREVLLHEENIKLIAEQAEAVAEAQVDNELAEMKAERSRVKKSIANYAAAIANGATSGTIIELINAAEAKAAALDEAIAERELVAAPPKVSKEAIEYFLRNIAAAPDDKMKEKVISTMVNSVVVEHVPDEGTKKDSDEKYSITVRFNFTDTPQLSALQSFDVCEKSKMVTSAGLEPATF

SEQ ID NO: 22801 - protein, 529 aa, synthetic construct
MLHKLERMIIMIVALYARYSSDNQRVESIVAQLRACREYCQRYGYTIIKEYADEAMTGTNDRRPQFQQMLRDAEAGMFEMVIAHKVDRIGRNEFDYYTNRHKLESFGVQLAFAAQGFDVSTPEGGLMNNMLVGLAAYYSRNLSKEVKKGQRENVLQGKATGGKPLFGYRYTADKHYEIVEHEAEAVRMLFRMYIDGYGYLQIAHELNSRGFRTRLGNSFGKNSLHDLLTNRRYIGTAILGKNCMTASGKRNNHRPDHDRMLVVEDVCPAIIRKEIFMEAQKKMKQRKNRKGANSAKHDYLLSGLIMCEHCGQAMTGSTSSKKGGPEYRYYRCPKKTRLGTHVCPNRSVPADQLEKLVIGQIQELFLDPDTLDELMDKVEVNYRQMLEKVETEIKDTKKELLEVDKQIDKFYDFVCDGGDVDERAKERYRKLKEKYENLSAKLEEKEASRPANISKGTIRKYIERYRREMETGKAPNLKGVIAAFVEKITVSNSNITVKYRFEPTLNRIDKFGLYGAPGGSRTHAFSSGG

SEQ ID NO: 22802 - protein, 524 aa, synthetic construct
MTRVTVIPATRDFHTGIDKSVFHKRRVAPYARVSTGSEEQLTSYEAQVDYYTKYVQSRPDWELVKVYTDRAISGTNTKHREGFNEMISDALDGKIDLIVTKSVSRFARNTVDALVTIRKLKEKGIEVYFEKENIFTLDSKGELLLTIMSSLAQDESRSISDNITWGQRKRFADGKVSMPYKHFLGYKKGEDELPEIVPEEAEIVRMIFRMYLEGKTSYAIAAFLTEQGIPTPSQKKSVWQASTIDSMLQNEKYRGSALLQKTFTVDFLQKKMKVNEGEVPQYYIEESHPAIISPAEFEIVQSEIAHRKKLGKNYSGNTIFATKVICGDCGGFYGPKVWHSTDKYRKVIYRCNNKYDSKKCTTPTITEEEIKDGFLQAFNSLLVNKAELLEDLREMQSLLSDTSAIDDEIKEQNAELEIVTGLLKKCVDENKQQEQDQDKFWEKYNSLDERYKKSFARITELMEIKKERCHKAEIIGAFMFELYERDEPLTEFDTKLWVVAIENVTVYHDGKKIYKFKNGLEITI

SEQ ID NO: 22803 - protein, 434 aa, synthetic construct
MARIVELVKPKNRPELQTKRVCAYARVSSGKDSMLHSLSAQVSYFQRYIHSHVGWKFAGVYADEALTGTKGSREQFQEMIKECKKGNIDLIVTKSISRFARNTLTLLETVRELKSIGVEVFFEEQNISTFSTDGEVMLTILASYAQEESLSVSENMRWRILKNYEQGKPWSGFLFGYKLKDGQYTIVPEEAEIVRLIYQYYLEGTGYEVIARRLNADGYKTAYGLPWNHSTVMSILKNYNYTGNLLLQKTYTTDHLTKKTMWNRGELPQYRAEETHEAIIPIEVFDRVQEEIARRAEKYKKDQPKVKQVYTFSSKLVCPYCGWTYRRKVTPYNIIWQCNSFSMKGKSACPDSKSIPNETLEKVSCEVLGTEEFDATLFREAVDYISPEKGNVLIFHMADGREIQKVWKDRSRSESWSEEKRKQFGEKLKELHRQ

SEQ ID NO: 22804 - protein, 565 aa, synthetic construct
MAKKKKPAGGNAIIYARYSSHNQRDVSIEQQIEACRKHAAELGLTIIATYEDRAISGRTDNRPAFQRMMHDAENGKFSYVLAWKSNRMGRNMMQAMVNESRLMDCGIKVYYAEEDFDDSAAGRFALRSMMNVNQFYSDNLAEDVRRGLMDNASKCMANGKQPLGYKRGEDGKVAVDEPAAAIVREVYTRVASGELFTDIARDLNRRGIKTADKGEWNKNSFHRLCSNEKYRGIYIYGDVRIEGGIPTIIDDTLWYKVQEALRVKKLKRNGRHRPGDEDYLLTGKLRCGKCGGYMIGMSGRSKTGEIHYYYTCQNRRVGRTCDKKNIRRDVIEPAVAQAIKDYCLTDDAIEWIADKTVEYWEKADRNLQLDSIEGDLAAVQSSISNVMKAIEMGVVTETTRDRLIELEKQRTDLKSKLALAKEEVVHVDRKKLISSLLLFRNGNIHDRQYQEDLFKTFLISVYVYDDDDNGHLKIVFNAFGDNNTVDLPIDFGETDNQSGFSDGVEKFDYALHRSTKKTSEHSGCLFLSYPGYGVHSALAHERSIGHGKHQEKLRFWLYAPALEGW

SEQ ID NO: 22805 - protein, 547 aa, synthetic construct
MVQATTVSPPKVVRIIEPTIPIHETVKTTYRALRVAAYCRVSTKQEEQLHSYETQVKHYTERIQAENGWILEGIYADKGITGTSYKKRDEFNRMIRRCKQGKIDMIIVKSIARFARNTVDCLKFVRMLNDLNVVVYFEEQGIYSNQPGAEFYITIYGSIAQSESENISANVKWGKARSAKEGNVPFHYKNFLGYRKGADGKPEIDPDEAETIRFIYERFLAGDSLSGIAQKLNDLQVPTPSGKGLWQNSTIQSILSNEKYKGDAIINKTYIKDCLSKKVMVNNGERPKYYVENNHPAIIDAVTFGRVQEELARRSGKPKTKQVGTKTEQGKYSSKYAMTELLVCGECKTPYRRCTWTVKGQKKIVWRCINRLDFGKKYCHNSPTVEESILQRAVMRAIMETAQQNLGVLQTLKVHIGMGLQSEQTEDNSMELQIRIAEIDAEFKAMLAKISTDTVDAFDEEKAKRLMDEKARLQQQLGNIRDGQLKREQTQSRLDDIYTILDGLKNRPMEYDEQIVRQLLECITVDSKEQITVIFVGGLKVVQPLID

SEQ ID NO: 22806 - protein, 516 aa, synthetic construct
MNVVIYARYSSHNQQETSIEGQLKVCHEFCERNNYTVIHEYIDRAISGRTDNRPDFLQMIQDSANRNFEFVIVYQLDRFSRNRYDSAHYKNKLKKNGVRVLSARENINEDASGILMESVLEGMAEYYSAELSQKVKRGMEINASKCLCTGGNRTLGFYIDKDKKFQIDPNTSPIIKLIFEMYADGKSIVEITDYLNAQGYKTIQNKPFGKNSIRNILGNKRYIGTYTYKDTEIEGGIPRIISDELFNKVQEVLKKNKKAPARARAKEEYLLTTKLFCGYCKEMMTGFSGTGKLGKVYRYYECKGTKKHTCKKKRVKKEYIENVVIEVCRGLLTKENINRISKEISKLFENNQDTFNLKRLKKQLSENERKHRNLINAVSECDIESLRKTFYSEILELESQKEKIEEEIREEEKLHIVLTEPEIKFFLTSLKNGSADNIKYRKVLITTFINAIYLYDDKITLIFNSGDKPVTINNILLSEIEANESNNTDTEGLFIDNVALPSIFGFGKRFPKPFFF

SEQ ID NO: 22807 - protein, 430 aa, synthetic construct
MKKVAIYVRVSTQEQAVEGYSISEQIDRLTKFCEAHSWKIYKVYTDPGFSGGNMNRPSLQKLFADCTQKRFDTVLVYKLDRLSRSQKDTLYIIEDLFLTNHVDFISMSENFDTSTPFGRAMIGILSVFAQLEREQIKERMAMGREGRAKQGKWHGGGNVPIGYDFINDYLIPNEYEAAQVKQIFDLAIRGYSYSDIARSMSGYTTKYGPYKVGYNTISLILQNPIYIGKIKTNTGYMNGIHEPLIDETTFNEVQKKVTQIAEYYKKEHTGHYGQYLLSGLCRCASCGATYSAHYVGTKKHRYKYYKCRNRAYNWRDGSPKCMSPNIRVEVLDNAVLNEIRHLQLDPDYFDEVSNSPAADSSSLVETLNKRLENIQKQIARTIRLYSLGSVEEKDIENQLQILYSERDTLSLEIENATADQKDTADFKWRF

SEQ ID NO: 22808 - protein, 463 aa, synthetic construct
MRRKTTAPVEKILLRVAIYIRVSTDKQVKDGDSMRDQLATGQKYIDSHENMILVDTYIDDGISGQKLKRDDFQRLIDDVRAGRIDLIIFTRLDRWFRNLRHYLNTQDILDKHGVSWTAIEQPYFDTSTPHGRAFVNNSMIWAELEAQNDSDRILGVFDDKVDNGEVLSGSTPLGYTIVNKHLVPDDDAPTAVAIFQYYRKTGNLSMTLRYMESEFGLVRSAASLKNMLTNTKYIGEFRDNKNYCPAIIDRDLFFDVQRLLKINIKSGKKHDYIFSGLVVCDDCDHIMSGCQQRARGRVRADGTRIVYKYSVYRCRQGVNLHRCPNRKLVFETTLEKMLLERIRPELENYIAEYEVANLPALRTDAKRRSVEGKMQKLKDLYLNDLITMDEFKLDREKLLMQLEKINAEDSRPVKDLSYLKNFLKMDFESVYDSLSIPERRELWRSIVKEIRVDHDKNIHIIFL

SEQ ID NO: 22809 - protein, 513 aa, synthetic construct
MPEVRLITPITRQSTKKMQVAAYCRVSSNSADQLNSYAAQIRAYKKYIGARDDWELVDIFADEGLTGMKSETRDEFQRMIRMCEFKHIDLIITKSISRFARNTKDALAYVRKLKLLGVGVQFEKEGISTLSMGDEMLLNTFSALAQEESQSISMNQRLSIVKRMELGEYVDSNAPYGYRLVDKMLTVYEPEAGIVRNIFALYLQGFSTSEIARELNKLNIPTKAGKEIWRPSRVAYILKNERYIGDSFYQKTYRETTVPFNQHPNRGQEDRFYAKGTHPGIVEKDVFDAAQTLIEKRKDVFAKATTQNIYPLTSRIQCSECGSFYRRRIVSGTVKWVCSLHKDDSTACDSNYYSEERIYDGFISMVNKLRFSEDNILGQVISRLEMTLAAMKRNNLAARDLSKSIAELNAKLLMLEHLRSKGYLAPEVYQAQANEIGAELAKLKDVRQEKFNSKAAIMLEEVKKLKMLIFELEEPLEAFDEKLFLEIVKSIQINKEDEMSVELLGGLRFRERI

SEQ ID NO: 22810 - protein, 524 aa, synthetic construct
MRFFNYGRKSVYSDKSDSIDNQFRMSREYCEQKFSGKIESWQEFSDEDFTGANTSRPDLQRMLSYIEEGFCDVLVVYQLDRLSRNVRDFSNIYAMLEEHNVMFISIKENIDTTTPIGRAMMYVTVVFAQMERETTATRVADNMRGLAKKGYWMGGQAPLGYSIKHIVIGDKKHSALELDPDGVRYVTQIFDDFLSSHGSLNAMVTRFRHQGIRTLTGKFFSKAHLHNILTMPYCVEATPEVYDYYAAKGCIMDSASPREKWDGSTGVLIYGRFSDKSQKHLVQPPENWTICLGLQKPFIPAEKWLAVQERFKQNTFCKDAKWPVPLLRGILRCNKCGSLMPVSRRKKVDGTCSSWYYCRKRKDEGSEACDMNQIKCDLIDEKVLGIFRKIALDPDSIHQFVKTESPSEIPNLSFISSRISSVESKIGKLAASLALAENSTASKYIIEEIERLDAELAALKREASHAEMKIHQAAAKERNSQATAIEIAKFINNLDGFSAKEKNEIARSVIRDCRWDGEKLFLTL

SEQ ID NO: 22811 - protein, 525 aa, synthetic construct
MAQRKVTAIPATITKYTAVPIGSKRKRRVAGYARVSTDHEDQVTSYEAQVDYYTNYIKGRDDWEFVAIYTDEGISATNTKRREGFKAMVADALAGKIDLIVTKSVSRFARNTVDSLTTVRTLKEKGVEIYFEKENIWTLDAKGELLITIMSSLAQEESRSISENTTWGQRKRFADGKASVAYKRFLGYDRGPNGGFVVNQEQAKTVKLIYKLFLDGLTCHAIAKELTERKLPTPGGKAVWSQSTVRSILTNEKYKGDALLQKEFTVDFLQKKTKKNEGEVPQYYVEGNHEAIIDPATFDYVQAEMARRMKDKHRYSGVSMFSSKIKCGECGCWYGSKVWHSTDKYRRVIYQCNHKYKGGKSCSTPHVTEDQVKDAFVRAVNILLSEKEELSVNVQMVIAMLCDSAEVEKRQTELKEELEVVVGLVERCVTENARVALDQDEYTQRYNGLVSRYEAVKAQFDEVTQAVADKADRKKLLEQFLHTVEGQAPVTEFDERLWSSLVDFVTVYSEKGIRVTFKDGTEIQV

SEQ ID NO: 22812 - protein, 592 aa, synthetic construct
MPNLRKIEAAVPAIREKKKVAAYARVSMQSERMLHSLSAQVSYYSGLIQKNPDWEYAGVYADDFISGTNTVKRDEFKRMLADCEAGKIDIILTKSISRFARNTVDLLETVRHLKDLGVEVRFEKERIRSMDGDGELMLTILASFAQEESRSISDNVKWGIRKRMQNGIPNGHFRIYGYRWEGDELVIVPEEAEVVKRIFRNFLDGKSRLETERELADEGITTRDGCRWGDSNIKVVLTNVTYTGNLLLQKEFISDPISKQRKKNRGELPRYYVEDTHPAIIDKATFDFVQEEMARRRELGALANKSLNTSCFTGKIKCPYCGQSYMHNKRTDRGDMEFWNCGSKKKKKKGTGCPVGGTINHKNMVKVCTEVLGLDEFDEAIFLEKVDHIDVPERYTLEFHMADGNVVTKDCLNTGHRDCWTPERRAEVSMKRRKNGTNPIGASCFTGKIKCVSCGCNFRKATRNCKDGSKVSHWRCAEHNGCDSPSLREDLLEQMATEVLGLDAFDAAAFREKIDRVEVLSSSELRFCFKDGRTVSRNWQPPERVGRPWTEEQRAKFKESIKGAYTPERRRQMSEHMKQLRKERGDKWRREK

SEQ ID NO: 22813 - protein, 513 aa, synthetic construct
MPEALNAVIYARYSSDRQTEQSIEGQLRECYAFAKANDIAVIDTYIDRAISGKTDNRPAFQKMIEDSAKRQFQAVIVYRLDRFTRNRYDSAIYKARLKKNGVKVLSAMENLNGSPESIIMESLLEGMAEYYSVELSQKITRGMRENALKGKALGGQRVLGYKVNSDCYFEIDETTAPVVVDIFKLYSSGKTVKEICDILNARGVKTARGGAFNKNSLHTILTNKKYIGIYKTKYEEIVGGIPAIIDKELFEMVALRMEQNKKAPARAKAEINYLLSTKLFCGKCRSAMVGESGTSKTGKKYYYYACVKKKREKACDKSNVKKDWIEDLVIQRTVTDILKDDVIDKIADRLVELQKAEAAESGTMLYLQNSLAEIQVSIKNIMTAIEKGIITESTKTRLTELEDEKRNVEIEIAKESIARRIISREQIIYWISSFKDGDITSEKYRQQLIDTFVHAVFVYDDKIVITYNYSGENNTATISDLDLSSPPKQYNPNLLPIGHGFGFVVSAEEIEDW

SEQ ID NO: 22814 - protein, 582 aa, synthetic construct
MAKHAITIPQNPKAALYIRVSTDMQADKDSLPLQESDLRKLADLNGIKEIEVFCDAGFSGKNLNRPAFRSMMDRIRAREFSHLYVWKLDRISRNLLDFLELYDELKCYGVAFASKNECFDTQSPGGEAMLKILLIFAELERKTIAERVTAVMLGRANENKWNGGRVPFGYMPGPVTTDANGKKCKSWPVPDPIEAPIVRAIFELYLREKALKKVAAALNTAGYRSRKGTLWSDTTVRCILKNHFYKGEYVYNRQNPNAGRREDFYRSENDWVVVTGQHEAIVPEETWRRCNETLSKNRSWLAPIGSLVSAQDKYIFGGLLQCAECGYTMNSKDRTRIHDHTHSSYYYCTGRWKAPAVCTGEHSGYASDRVLLPQILKLIARIIEACANAIKFASAEQLVSYLLNDNLIPGATGIEEAQRIYMIVRAHVKHIYGIDQANQYNPNALLVEQSQKEKEKQERALSRLKRAYLFDDGDMSEAEYFEQKAAIEGTIAKLDKQIKSLSGNDIGADEAYLAQLSKLIMIKKLQDTNSDFDYYKLAKAIGRKPIHDFLTEIISRIIIGEQNRIIKIIFKNGVSITLQYEK

SEQ ID NO: 22815 - protein, 536 aa, synthetic construct
MLKDTKIAVYCRVSSDEQAERGTIDNQITFARQYADLHRLNIYDVYKDDGVTGTIPLQDRPEGHRLLQDAADERFTLVIFYKMDRLGRSTRVILNAVEALSQYGVEVQSMSEPFDTSTPSGRFMLTMFAGVAELDRANILDRMYQGTLRHARLGKWCGGPAPFGYCLQDGYLVVSEEPMPGQQLSEADVIRMLYSKTIEGWSALRLAQHLNALGVPNKYTLRGNVAAGSGKWHQSKILYILHNTLYYGERSFGKMSKNNNKNIIPQQVPAIVSKETWDAAQAAVEQHSIMPKFIKRRSYLLRGLIRCGLCGHTYVGTYYKRKAGNSIYYVCNAKNTRGVTPEPCKGQTLRGEWIESLVWEDCLRYIKQPDVIAVDEDCRYLQSADDIKKEIDAATAQLKQLDQERQTVIGLCRQGIITTADLDGQLADITAKQNTLQQTLEGLNSKNIVTKEDAEKRVKEIADILDGFRQQLQSGGELSFDAKHGIIRTLVKQITVHTELQPGAERDIPTVRVCIDYNFTLLSAKTAMLDPYRHGF

SEQ ID NO: 22816 - protein, 502 aa, synthetic construct
MEIQIREGNSRQKQKLKVCAYCRVSTDADEQENSLENQIRHYKEVITSNPDYEYAGVYSDFAISGFKEKRPGLQKMLADARRGKIDLILTKSVSRFARNTSIVLEATRKLKELNVGVFFELQNINTLSGEGELMLTILAAFAQAESESGSVGAKMVYQRKYEAGIPVQYLERSFGFKKDERGVYIADEEEAVWVRKIYDMAAQGYTLAAIKRYLNENNVKTVGGAKWLDSTVLRILENEIYKGDYIMHKYFVNEERKLVRNRGEVDAWYIEDDHEAIVSPKLWQKAQDALEAKRDYLAEGSVIEEFTEENYPYMNRIYCARCGHPLYKRIYSNGNRLNWGCSGTKRYGRSFCEGINIPDGVLREAWHFDENMYIGEKQTDKGKKEFTYLKEASWKRRHKKKEPEPIPENTETEYPYREKIFCGLCGSRLVRHVNTKNHKVIWVCNGRKRKGKDFCDGTRVPDTIIKGWGEIKKDIYIQRKDDKNGKKRYSYTSKKPKGADRA

SEQ ID NO: 22817 - protein, 464 aa, synthetic construct
MARSVTVIPARSQKVRTGHKAVQEKKIRVAAYCRVSTDQEDQLHSFEAQVEYYTKYINEHENYEMAGIYADEGISGTNTKKREQFKKMIADCEGGKIDLVITKSISRFARNTQDCLAYSRKLKNLGIGIIFEKENINTLDSTGELLFTILSSLAQDESRNISENCKWGIRTKFKNGEMHLNTFKFLGYDKDENGKLVINKEQAKTVRRIYRDFLIGINPAQIAKELTEEKVPGCLGQTKWYPSTVIGILKQEKHMGDALLQKTYTADFLTKRQVRNNGEIAQVYVKDSHKGIIDKQTWNAVQEEFDRREKFMEAHGTDRYSYGADCMPFCEKVFCGECKSLFTRHSWRSRGIVQWQCKNHRKDGKVACTNAYVDNADLENGFVKAFNRLVTDRDKHMERWQQMKSDGTPLEKIRAGQMMEAVGNEPLTRFVPEIAQLVLCEVTVLGAKKYEFFFLEGSRVKVSV

SEQ ID NO: 22818 - protein, 574 aa, synthetic construct
MRKKKIDAPKEKPQRAAIYLRVSTAYQVDRDSLPMQRKDLVGYCEYALNISDYTIFEDAGYSGKNTDRPAFQKMMMQIRNGMYSHLLVWKIDRISRNLLDFAQMYEELKTLGVTFISRNEQFDTSTAMGEAMLKMVLIFAELERKTTAERVTATMISRANDGTWNGGRIPFGYDYNKETQTFSVNGDESFIVLEMYDLYEKTDSLVHTARELNDRGYVSRQHNPFSPVSVWTILRNPWYIGTYRYNYYKIPGRKAIKDESEWVVIPDHHTPLVSKERFDRVQKMLDSNARYRNTPGRSATQKNVNIFSGLIWCACCGAAFTASPGKLHASGYRSAKYGCPNVRKTKTCNAKYTSDTVLGEFLLNFILNVINAQKRFDQIKSPADLEARLLRGDTFKNVAGIDSASVAALYEMLAEYSPADSVLLKKPTVKKNLDPELRKLRADKRKTERALARLDHIYLYSNKQMSDKEYLIKKNDLMNDLKEQDKSIGLLTSESWAQSLSDDDFLEQASSFIMSQRLQEHEYIYFQGLAECTEPSVLRSFFLSIVDSVRMRNGHVETLTFKNGISHKFTYLAI

SEQ ID NO: 22819 - protein, 524 aa, synthetic construct
MRFFCYGRKSVFSDKSDSIDNQFRMNREYCDQKFPGQIDTWDQFSDEDFTGANTSRPDLQRMLEFIKDGLCDVLIVYQLDRLSRDVRDFANIYAMLEERGVMFISLKENIDTTTPIGRAMMYVTVVFAQMERETIAARVTDNMLGLAKKGYWTGGNPPVGYVRQHFTVDGKKHCTIVPDPEGVRYVTQIFDYFLDHQCSLQGMETQFRDQGIRTRNGKFFSTTQLHKILTMPFCVEATPEIYDFYAAKGCIMDPGSPREKWDGSVGVIIYGRTTERNKKHQNQPPEKWTVCLGVHKPFMPADKWLAVQERFTNNKCIKDAKWPVPLLKGVVRCGKCGTLMQVARKKLVNGSCSSSYYCRKRMREGVQACDMGYVKCDLLDDEVMSLFKKIAIDPDLIQKFVQKESPDSTPDPKAARARVSACEAKIGRLAASLAMAHDSSASKYIIAEMERLDMELGALRREASMREVESRKATKKAQDARDTAKEIAKMIRGLDGFDDKERNAIVREVVRECSWDGERLSVTL

SEQ ID NO: 22820 - protein, 541 aa, synthetic construct
MGTTKNAVIYARYSSHSQREESIEGQLRICHEYAKAEGLAIVGEYIDRAISGTTDARPDFQRMIDDAKKKQFSYVIVYRLDRFARNRYDSVLYKHELKQCGVKVVSATEGIGTGDESILLEALIEASAEYYSMELSRKIKRGRQDSAMKGNFLGGAVPLGYKVVDSKFIIDDETAPIVRYIFERYAAGIGKKQIIDELTAKGYMRRTGKPFTYRAFDSVLRNRKYTGEFTQTGITVEGGCPAIIDTEMFEKVQARLEINRRAPAKAKAKTEYLLSGKMFCGYCGEPMIGISGTGRHGKTFYYYSCVGRRGKSGCKKQHEKKDFIEWYVCEQTVQYMQDPERLSHVAKRIIEINDAEFDGGKVKDLERAVENCDSDIRKLVDALTTIPDAARPALYDKIERIGAAKADMEIDLAKLRVLSEVRYKQEDVEAWIRSMCRGDLMDFEFRRQLIDVFINSVYLFDDRVVIVYNIKNGKQVSAIDVLNAVEELDGVELFPDSAEDSSAWGNGSFLVADAPPYMKNPNLFPIGNGFGFFIFIKDIID

SEQ ID NO: 22821 - protein, 541 aa, synthetic construct
MTDEKPRVIIIPPKPELQQTAAVTKQLRVAAYCRVSTKEEEQASSYEAQCEYYTDKIMSNKEWTMAGIFADEGITGTSTKKRTEFLRMIRQCKQKKIDLILTKSIQRFARNTLDCINYTRILRQLGIGVLFEKENINSLPPDSEFMITMYGAMAQSESESISGNIRRGRQMHAKVGTLKVPCYRLYGYEKDTAGKFRVIPERAEIVRELYKRYESGASLRNLQDWLEENQIKTVLGESKWTTTSIKSILTNEKYCGDVLLQKTFRTDVISKKVIKNVGQMTQYYMPDHHEGIVSREQYNAVKAEMARRSALRSPSKTAVTGRSCYTSKYALSDRLVCGECGTLYRRCTWTSLGRKYPVWRCTSRLNYGTKYCRDSPTIKEEQLQAAILAAINSAMSNKPALLDLIKNAVSLELLPVQGQTMSLADIERRLTQLDEQFQRLLAEAIDVEDKESCNAQFAEMLAEQTSLKKQKETILQSSMDTDRVCTRMKQAEQAIESTASTITEWNENAVRQIVERVTVLSANEILVRIKGGAEIKQRLER

SEQ ID NO: 22822 - protein, 530 aa, synthetic construct
MAKKQTNGNLALEQQRVIVIPAHDEIVARKLRVAAYARVSSSSEDQLNSYRVQNQYYSELISSNPDWEMVDIYADEGITGTSVEKREDFQRMMQDCRKGKIDRILVKSISRFARNTKDCLAAVRELKELGVSVLFEEQGIDTARVSSEMVTAIMASLAQKGSESISGNVRWGVQNRMQDGTYMTASVPFGYELCDKKMKINQEEAQIVRQIFDLYLSGVSIEKIVLELNAGCHEISDKKIWCKTAVSYILGNERYIGDRLLQKFYMTDTLPTKQVRNNGEKAQYYVENTHPAIIDRAQFQAVQALRECRKKRNGCAITMRQSNLRGYCFCGMCGGKLRSKEENGIIYWVCKTHSKDKKSCANSPVQEKIMEQAFCRLYYKLKHYGDPIFTQMLSNLQKIRYSRMLWSEDVISLNKKISDILSQVQFLTQLQQAGGVDPDTFITSNNKLSEQLRRLKQEKARLLDTDSDDLADRTRDLMDALEDGPDFLDSFDAELFDALVAKIIVDSNECLRFRLKNGLELLEQIERTRR

SEQ ID NO: 22823 - protein, 521 aa, synthetic construct
MKKVTKIDGVQKNTAINSKLRVAAYCRVSTGSDAQLESLEAQKSHYEQYINSREDWQFAGLYFDEGITGTKAEKRPELLRLITDCEAKKIDFVITKSISRFSRNTTDCLALVRKLQNLDIPLYFEKENINTGSMESELFLAILSSMAEGESASISENAKWSVKRRFQNGTYKLGYTPYGYDWDGKNMIINPEQAAVVKRIFADILSEKSTNAIADELNAEKVPSKKNNHWTASTIRGILANEKYTGDVIFQKTYTDENFNRHTNYGEVDQYMAPDHHEAIISHSDFDAANALVNQRAAEKGIEKGSDKYQQRYAFSGKIICGECGDTFKRRIHTCNTYKYVAWACNTHLKDKKSCHMKYVRDDEIKVAFMTMLNKLIYGYRLVLIPYLKVLENSSGDEAIQRIQHLELLISQNSEQREALTKLMAQGYIDQILYNQETNALLLQAETYRSDIEAITIGMTGDAAKVTETNLLLHFVSHTDMLTAYSEELFENYADHIEVISRNEIKFAMKCGLTFTERIGD

SEQ ID NO: 22824 - protein, 522 aa, synthetic construct
MGNVMLIPARRQVGSNARKQEEEKPKLRVAAYCRVSTDSDEQATSYEAQVEHYTEYIQKNPDWEFAGIYADDGISGTNTKKREEFNRMIDDCKAGNIDMIITKSISRFARNTLDCLKYIRQLKDMNIPVLFEKESINTMDAKGEVLITIMASLAQQESQSLSQNVKMGLQYRYQQGKVQINHNRFLGYTKDADGNLVIDPEQAETVKRIYREYLEGLSMDKIAAGLERDGILTGAGGKKWHTSTINKILRNEKYIGDALLQKTYTTDFLNKTRVKNNGLVPQYYVEGDHEAIIPKDIYLQVQEELVRRRVGKTSANGKKRNYSCNHCFSQIVICGECGEMFRRLHWNNRGVKSIVWRCISRLESTGLECHARTINELVLQDAVVKAINQMLGDKSNYQAQLQLNIAAVIRASQATAIDSIDEKLMALQQELIQKANSKEDYDEIADEIFRLRELRQKTTVDTAARDEQIKRINDLQDYISQQTSYLTEFDEALVRRWIKQITIWDDRITVELKSGVSIDVDA

SEQ ID NO: 22825 - protein, 512 aa, synthetic construct
MNAVIYARYSSHNQTEQSIEGQLRDCYEYAKRNDLAIIGEYIDRAISGKTDERPDFQRMIKDASKRQFERILVWKLDRFARNRYDSATYKHKLKQYGVKVISAMENVGEGDESVLLEALLEASAEYYSLDLKKKIARGMRESALRGKFVGGTLPWWCRVDGDQKLTIIDERAVIVREAFMRYDSGEGAKSIVSDLAKRGLRSNRGVPVTLSWLLSILKNRKTIGEYTYNGIEIPGGLPAVVDKPLFDRVQDRIARNRRTGGGEARAKTEYLLQGKLFCGLCGSPITAECGQNHKGVVYNYYACSLKKKKHQCKKANERKDFLEWYVVEQTLDYVLTPARTEYIASAIVAEYEREFDKSGIRVLEQKIALTEGEIQKTMDLCIQATTDAMRDRFMKRCEELDAKKADMEIDLSKLRVAASIVYTKDEVCAWLRQFCTGDCFDPAFRRRIIDVFINTVYLYDEKLIIYYNLRDSRQVSYIEAIGASSEIENLLPVPDNKKSAAECSTADGDGGA

SEQ ID NO: 22826 - protein, 521 aa, synthetic construct
MKVAIYCRLSREDDDKIHENDESESIQNQKSMLLNYAIERSWDVYKIYCDEDYSGIDSERPEFNKLLEDAKSHKFDIVLCKTQSRFTRDMEIVEKYLHNKFIEWNIRFVSLVDHVDTLDKGNKKSRQINGLVNEWYLEDLSENIRKTFDSKRKQGLHIGSFVCYGYKRSPENKNKLVIDTEVADVIKLIFNLYEQGNGVTKIAQILNDKGILTPTKYKQSQGINFKKQGKNIDYWCESTVSKILKNEVYIGNLVQGYNKKVSYKSKKMVNQPKSEWIIVENTHEPIITKEQFYKVQEIFKSKTRRCKNGEVHLFANKLVCLDCGTKLYKCQNDRGYIYFSCKGSKKLYGTCTTHSIGYENLKVLVTEKIREKILAFYNFDNISDDLFVSNDNLNKAKLLQNKVELFSKEMEDINKAIKELYLNKVSGKIPEDVFEDLNSSFLSDKSAKQKELTKTQNDLSNLKEKELNSNFIKEQKEKIINHFKDFKELNYDIVNSFIDYIEIGEKNKKANSQDVVIHWNF

SEQ ID NO: 22827 - protein, 535 aa, synthetic construct
MEGLIYNSYSNENEINVYGEYAIYLRKSRADMEAELKGEGETLARHEHILLDLANSKNLKIGKIYREIVSGETIEARPEMKKLLADVKMGKWKGVLVVEVERLARGETMDQGIVAQAFKISETKIITPMKIYDPNNEFDEEYFEFGLFMSRREYKVINRRLQRGRLMSVNEGKYVGSVAPFGYDRVKIKGDKGYTLKKNQEANTVKIMYDLYAYDDLSLNEITAKLNEMGLKPRKSEEWSVSTVKDILANPVYIGKIKWNARKEVKVYKHEKLVKTRPRNSDYILVDGLHKAIIDEKTWKIVSAKRSLNSAPVVHNNVVQNPLCGLVICAKCGKKMKRRSYSKFSKEPTLYCSNPNCDNIGSKFHFVEEKVLDGLKKWLEQYKFDYQEHLQKINHNKIESIEETILSLEAEAKKENDKLLSIFNFLEDGTYTKEMFKARSDAASQNVARINNSIEEYKVKLAQEKIVDKEKEVLVPKIENLLDVYDLLQTPEEKNDLLKTVLTQVTYLKTEKSIRKDSDPTNFTINLYPKINKVV

SEQ ID NO: 22828 - protein, 526 aa, synthetic construct
MPKVTMIPATINPLTHLPSVAARKRRVAGYARVSTDSDEQFTSYEAQVDYYTKFIQSKPEWEFVKVYTDEGISGTNTKRREGFKEMITDALDGKIDLIVTKSVSRFARNTVDSLVTIRKLKENGVECYFEKEGIYTFDGKGELLITIMSSLAQEESRSISENITWGQRKSFSDGKVHLPYKRFLGYEKGEDGRPAVVESEARVVTLIYGLFLEGKTQAGICKYLEELGIPSPGGKAKWSKTTVTSILQNEKYKGDALLQKKFTVDFLEKKMKPNEGEVPQYYVTGSHPAIIEPDEWEQVQAEFARRKALGKAYSGKSVLSAKLVCEDCGAFFGPKVWHSTDQYRRTIWQCNGKFASEEHCHTPALDTETIQRLFIKAYNLMMQDRVQIIKEIEAWRQKLMDFGTLDADIERQLEETQVVAELVKTAVKENASTAQSQEAYLKKYEALTERYEKAAAELERLQSLRTSRSQQDKKMALYIRTLKKQPEVMHDWNDTIWTVMIERAIVHRNGEVTFAFANGTEIKVGA

SEQ ID NO: 22829 - protein, 433 aa, synthetic construct
MPRAITIVPKPPKLEQKKRVAAYARVSSGKDAMLHSLSAQVSYYSDLIQNHDDWLYVGVYADEAKTGTKESRADFQRLIADCRAGKIDMVITKSISRFARNTVTLLQTVRDFKAWGVDIFFEEQNIHTMSGDGELMMTILASYAQEESRSASENQKWRIKRNFEEGMPWNGAMLGYRLKNGRYEIIPEEADLIRRIYDEYLSGDGYLTIAKRLNEDGIPSRFGKQWGQSVISKILSNYTYTGNLILQKTFRENHITKKTIINNGELPKYHAEDAHDAIIDMETFQAVQAEKARRAARFLKKPAPKKAYPFTSLLVCDGCGKNYRRKITKTGPVWVCGTFNSMGKAACASKQIPEETLQAVTAEVLGQVDFSEELLRRLIKSILVCNGNVLIFRFFDGSEATRIWKDRSRRQSWTDEMKATARQKALERRNQNA

SEQ ID NO: 22830 - protein, 523 aa, synthetic construct
MPNTESFTVNEILVYLRKSRSDSPDMSVEEVLRKHEEMIQQYASTHFCSPIPEKNIFREVVSGETIDSRPQIKNLLKMIESEQFKAVLVVEPQRLSRGDLEDCGRLINILRYTNTTVLTLTHSFDLQEEYERKFFEMEITRGNDYLEYTKRILKRGREASVAKGNYIGSVDPYGYKKTVIKKDGVTCHTLEIIPEEADTVKLIHELYAYTPEGIGFTNIAHKLDAMHIKPKKAAHWTPAIISSILCNPLYLGMVRWNNRKVVKYINEGQLAKARPQNSEAKYYKGLHEPIITHELYDACMARRGTNPSLRRNKELCNPFAGLLYCGTCGHAMSLKIYKNHNSVSQMMLCNHQAYCHTKSVLYSAFLRRFISSMENTLNDFELAQKSDDGRTQAISKTIVINLENKLKKLNEKDARQKDAYEDGIYSKEEFLKRNVRTQQDIASTIIALEDARAKKADIVDYEEKIRRFKDCLHALNDPELSAAEKNRFLKSCVDKILYYNNMESKAGIGRYIENVFSLEIQYK

SEQ ID NO: 22831 - protein, 437 aa, synthetic construct
MERLIQKIEPSVDISHKLRNVAAYARVSSGKDAMLHSLSAQVGYYSELIQSNPEWRFCGVFADEAITGTKESRPEFQKMLAECRKGKIDLIITKSISRFARNTITVLETVRELKMLGIDVYFQEQNIHSISADGELMLSILSSYAQEESFSASENQKWRIRKDFEQGKICNIRMLGYRRTTNGSLEIVESEAEIVRFIFLNYLSGNGKLLISNKLNEMGIATINGCEWTTADIHRILQNEKYAGNMLLQKRFRENHLTKRMIRNDGQLPKYFVEESHPAIIEKSIFDAVQKKLEEQRQRFPSSKSVVSYPFTGKIQCTCCGKNYRHKITATGNVWICATYNTRGKKYCPTAKQIPESTLISVCCEILSITEFDANIFENQVEKILVPAPNKLIVQLKNGKCINTTWKDRSRSESWTEEKRAAAAESSKTRRWRKCQK

SEQ ID NO: 22832 - protein, 524 aa, synthetic construct
MPKVTKIPPRLNPATFAPLESVEKRKVAGYARVSTDSEEQKTSYTAQVDYYTKFIKERIDWEFVGVYTDEGISATNTRHREGFNRMIADALNGKIDLIVTKSVSRFARNTVDSLTTIRKLKEKGVEVFFQKENIYTLDSKGELLLTIMSSLSQEESRSISENVTWGQRKRMADGKVSLPYSHFLGYRKGKDGIPEIVPEEAEIVRYIYRSFMEGKTPNHIAECLTFKHIPTPAGKEIWSPSTIESILTNEKYRGSALLQKSFTVDFLSKKKKINEGELMQYYILESHEAIIPPDEFELVQAEYTRRKRIGRAYNSKSIFSAKLVCECCGGYFGSKIWHSTSKYRRTVWQCNEKFKNGKKCMTPHLYESHIKEKFLTAMNQVLANKTEIIENCLLFKETFSNTAMIEEKIENIQKQMEQLTKQIRMLIQKQSITPIKSEDYYRQYDGLVISFEKLKSKQDTLIQKQDEMETKLKFIMDYIEFLKSQENLITEFSETLWFRAVDQVTVCTDGKMIFAFKDGSEIKV

SEQ ID NO: 22833 - protein, 538 aa, synthetic construct
MSTAPNVMIIPAKVQTAESRRKYHQLRVAAYCRVSTAQEEQQNSYQVQIAYYTDLINRKKEWTLAGIFADEGISGTQTKKRTEFNHMIRMCRNKKIDLVITKSISRFARNTVDCLEYVRQLKDLGIGVIFEKENINTLTMTSEFMIALYGSFAQAESESISKNVSWGKEKAYCEGKVQFQYKYLLGYKKGEDGKPEIVPEEAETVRLIYTLFLDGYSMSRIKKLLENKGILTSQGKKVWNESLIRSILKNEKYVGDALLQKTFTSDCITHKVVKNHGERPMYLVTDHHDPIIDRDTYNRVQQELARRSSKRKVSDKTITEQGKYSSKYALTELLICGKCGTPYRRTTWVSRGKKLIVWRCISRLEHGRRYCPDSPTIKEENLHRGIIRAINNYYSCRDDIKRILKANISSVLECQGQKEILATEKRLKEIDQARTDLVGLIASGGCDEDTLDGDFAKLYAEEQDLNERLKMLKLQNQTSDETQQKLDKVTKMIEHEKFELETFDNVLVRKLIECIKILSKNEILVIFKGGYEVRSEIE

SEQ ID NO: 22834 - protein, 514 aa, synthetic construct
MPTVTVIQPTIAEEKAVKIRCAAYCRVSSDSEDQLNSFMAQTRYYSQVFEDSETEELIDIYADEGITGTREDKRDEFQRMLKDCRKGKIDRIYTKSISRFARNTRDCLKNVRELKSLGITIYFEKENIDTANMTDEMMITIMGGLAQEESTSISQNMQWSIRKRMANGTYIVSHVPYGYTKSGGKMIVNPREAEIVKRIYEDFLNGKGLLRISNDLNAGSIPKNSKGEPWNKNVVRYVLTNEKYIGDCLWQKKFTENVFPFRKSKNQGQVDSYYITDAHEPIISREDFTKVQTLLKQRGEYYGNTEFKQYPLTMKIFCDNCGKIYRRKNINGKIYWVCRTHDNRAKDCPNKAIAQKLIYISFIRLCNKLWYNYKQILVPLQTSLQDLKLKRFSGNTNVMDIHKEIAKLKEQTHVLARLKTKGFLDEAKYIEQTTELTAKINKLQVELKKLSRSDDEDETLEQIEMLFDFFEKRDKPITEFEESTFESIVEKIVVIDQHELEFHLIGGLKFKENI

SEQ ID NO: 22835 - protein, 538 aa, synthetic construct
MSTASNVTIIPAKVQTEINRDKYHQLRVAAYCRVSTEQEEQQNSYQVQIAYYTDLINRKKEWTLAGIFADEGISGTQTKKRTEFNRMIRMCRNKKIDLVITKSISRFARNTVDCLEYVRQLKDLGIGVIFEKENINTMTMTSEFMIALYGSFAQAESESISKNVSWGKEKAYREGKVQFQYKYLLGYKKGADGKPEIVPEEAETVKLIFNMYLDGYTLLNIADTLMAQGRRTATGKNIWSKGEVQRILKNEKYVGDALLQKSFTVDCITHKVVKNNGERPMYLVTDHHTPIVDRDTFNRVQQELARRTSKRKISDKTKTEQGKYSGKYALSELLICGHCGTPYRRRVWSRNGKKQVVWRCISRLEHGKKYCPDSPTIKEEQLHKAIIRAINNYYSCRNDIARILKANIGSVLECQGQEEILAAGKRLREIDQARNDLVNLIASGGCDEDKLDSEFEKLYAEEQQLSERLENLKLQNKTSEGTQAKLDEIMDMIEHEKFELETFDNVLIRKLIECIKVLSKTEILVIFKGGYEVRTEIE

SEQ ID NO: 22836 - protein, 512 aa, synthetic construct
MERAVIYARYSSDHQREESIDAQVRACREYCQRKGYLVTKIYADEAKSGKSIAKRDQYKKMLADAQKNLFDVVIFHKIDRNSRNELDYYLTKNQLISSGIKYEYAAQNIDTSPAGQMVEGILVAVAANYSRNLAEETKKGLKENALKALFNGGRPPLGFEINQENKYVINDYEAGAIKIIFDLYLKGKGYHYIISQLNSLGYKTREGRKFGKNSLYDILRNPKYCGTYTFNKVNKDPSGKRNSHKISENTIIVEDAIPAIISKEDFRKVQEKMNQNRYRSAAYKSKETYLLTGKVFCGICGAAMNGHRASSNGKKYVYYTCSGRDRLGASACQNKVVPRDDLEELVLLTIEQELLSENSLKKLKDTIEMEYQAVANEYADEASSLSEQKAIAERKLNNLYTIIEQGTADEYDLERLAAVKQELSQIKEKLAKCAGANSIATINPAHIEKVLKVCRKMLFKNITNESLRMLFDDLVNKITIDAKKITLQLKLECSGTYGAEGRTRTGTWGNHA

SEQ ID NO: 22837 - protein, 523 aa, synthetic construct
MAKSVTTIPATLSRFTAAPINSTKKRRVAAYARVSTDNEEQLTSYEAQIDYYTNYINGRDDWEFVGVYPDEGITGTNTKKREQFRQMVADALDGKIDLIITKSVSRFARNTVDSLTTIRKLKEHNVEVYFEKENIWTFDSKGELLLTIMSSLAQEESRSISENCTWGQRKRFADGKVTVPFKRFLGYDMGPDHNLVVNPEQAKLVKRIYGMFLQGQSPFQIARTLTEEGIPSPGGKDHWNPSNIKSILTNEKYKGDALLQKSFTVDFLTKKKKANEGEIPQYYVKDNHEAIIDPETFEMVQTLMTTRTKGRNRKSSVSIFSSKVKCGDCGSWYGPKVWHSNDAYRKVIWQCNHKFDGQKCATPTLTEDEIKELFLRAANQVIDQKEQFIAIYEQVLSRSLDTTALESEISELEAEINIAAELIEECIKENAHVALDQAEYQKRYDALVVRFDKAKARHTEVTDLIAERMARKHQIEAYLKNLRSREPLTEFRETDWLAMVDYITVHSKNDIRVTLKDGTEIKA

SEQ ID NO: 22838 - protein, 591 aa, synthetic construct
MKTVEKIERKLPVLKARKRVAAYARVSMESERMQHSLSAQVSYYSALIQKNPEWEYAGVFADYGISGTGTKKRDEFNHMLAECEAGNIDIILTKSIQRFARNTVDLLNTVRHLKELGIEVRFEKEKINSLSGDGELMLSILASFAQEESRSISENVKWGTIKRFKQGIPNGKFSIFGYEWQDDKLVIIPEEAEIIRWMYAEYMKGASRIEIGRALMDRGIYTRQGKPWVDSNVKVILTNITYTGNMLFQKEYCEDPITKHRRKNYGEMPQYFVEDTHEAIIPMDEWQAVQDEFKRRRDLGPFGNKSLKLSAFSTKITCGCCGKHYRHSGKRNTAAGEVYYIWTCQTKSQKGASACPSKNIPEKMLQNTAAEVLGLDEFDEDVFSQQIEEVIVIGDDTLTFRFYDGHEVTTKWQSTAKTDWWTDERRKLWGERHKRKDTNPNRNTFYEFTGFIKCGCCGANYRCQSGKRKDGTPTRSWYCTGPRSECRNPAIRDETMKRLVTEILGLDEFDEAAMDAQIESATILDHMVTFHFRDGHIESRDFLDKRHGTPWTEERREKAKKSMKAAWTDERREAMSERIKKIRSEKKWPNP

SEQ ID NO: 22839 - protein, 578 aa, synthetic construct
MASQITANIIKNGEPVDILYGRLSQEDDHAGDSNSIVNQRSYLEKYAADNGFQNPVFMADDGYSGTNFDRPAWQDVVTLIEAGLVRTLIVKDMSRLGREYLKVGELTELYFPSKGVRFIAVNDGVDSLVESSSDFNPIRNWANELHAKDTSRKVRSVKRMQAENGERLGGKPPYGYRKRDDDSKRLVPDEEAKGVVQHIFQLCAEGKGPNQIARILRDDHVLNPTNQYYQQTGVACTRLDTTRPYNWCGATVANILSNPVYLGHTLNMQSSTLSYKNKQIFHRPPEEQVLVKNTHEAIIDQELWDTVQRVREHKRRPPKHMDAPGLFAGLVYCADCGGYMVLCRTGKMKPEQYYFRCSTYGKRGKDACTPHHITEASLNAIVLDDLRRVTHFARTKKHQFAAYINRKNTAQLRKEMNATQRELDKMVKRNAELSTLFKRLYEDNVLGKISNEQFRMLSADYNAEQKQLAAAIPEKQVKLEKLKASAANVDAFIEKASRYTDITELTPELLWLFIERIDIGERPGRYNRNGMQEVRIIYRDIGVIDSALSAKDAESTEVRFIPSLEMVVQQMAAQTQVS

SEQ ID NO: 22840 - protein, 467 aa, synthetic construct
MDKAVFIYTRVSTREQADEGYSLGEQEERLKKYSEAMGWKVTGIYTDPGYSGSNMERPALQQMLSDISKKHPDIVLVDKLDRLSRSQYDTLYLIKKVFAAAGISFVSRAEAFDTSTAFGRAMLGILSTFAELERERIKERMMEGRQGRAKDGLYMGSQAPLGYNYSPENGLTINENEAEIIRFIFEQAAQRRPFACIAGDCANMYDIDFFWSLASITRILNSKLYIGQVLFCGKWTQGKHAPIISEETFEKAQEVLGERKENFSKFTGKKTKNLLSGLIYCEYCKKRFHKIQTGTYIYYVCYSRSRVKGSMVVNRDCSAKRLNLRKTDALVLDQIKRIRTDVAFYDSVKQAKGSADQTVESLGKKIASINTRINRLISLYSLEQIDIEQVKAQIDPLTAQKKELQKKLDAAESKKNDYVKREDAVTLSQAIEEAYNSGNINEARALISQLIKYISVNADSISIHWRF

SEQ ID NO: 22841 - protein, 530 aa, synthetic construct
MEQYLIYLRKSRSDLEAEAHGEGETLSRHEHTLLELAKRQHLNVTDIYREVVSGDTIAARPMMQRVLSEVEQGVWSGVLVMEVERLARGDTIDQGIIAQTFKFSGTKIITPIKTYDPDNEFDEEYFEFGLFMSRREYKIINRRLQRGRLASAKEGKWPSGLAPFGYRRVKLKNEKGCSLEPIEEQAAIVRMIFDLYTVGLQDEDGSARPLSLGSIATRLNDMHIPSPSGSQWARITIRGIIKNPTYIGMVRWGSRETKKKVVDGKVVSVRGPADPEKECVFKGIHPPLIPKETFELANDKLTRSENTSTHTEKVVRNPLAGLLVCSECGRQMMRMINPVHPDMPVVRCPRRGCPNCSSYLPIVEERVIQGLSEWMKGYELEWSSAAASSSVSSVGVREKALASAEAELRKLQQQLERTHDFLEQGIYDTDTFLSRSRMLSDKIAAAKDSVARCSRELTEEKLRETSRRDIIPKVKNLLDVYPLLETAEEKNALLKEVLEKVVYQKLNEKRKKSPDGFTIEIYPRIPKSEK

SEQ ID NO: 22842 - protein, 528 aa, synthetic construct
MAYCIYLRKSRADRELELQGFGETLKRHRDTLIELAKKKNLPIGEIYEEVVSGDSIAARPQMQRLLNDVSDGKWEGVLVMEIERLARGDTSDQGIVTKTFTYSNTLIITPMKTFNPTDEFDQEYFEFGLYMSRREYKTIKRRLHAGMEASCKEGNYIHHTPPFGYSIVKNKKSKGYRLEPKPGEAEIVKLIFQWYTKGILKEDGSYELLGTARIADKLNSEYSIKPLGGVWTIPTISTMLRNEHYLGYIVFGKKKRKKVVENGIIVDKWTRNESYGLYKGKHPALVSQDTFNLARERLSRNPRRPSKTITNPLAGVIKCGMCGRSMYRRPYQKRGQSASLICSEKTCHNVSSAFYLVEDALLTAIKEWIDGYEIKEEANKYDTSILESKTKLLEEQQKQLITYKNQLTKVFEAYENGIYDSDTFLNRQKTVSESISSTEEAIVKLNKEIANEREIISHQEEIIPKAKKILEIYKTSDDVQLKNDLMKSILDKVVYTKTANGHFKDQRQDDFKLELFPKLPKNKGDSSE

SEQ ID NO: 22843 - protein, 531 aa, synthetic construct
MNVVIYARYSCERQTEQSIEGQLRECEEFAEKHDMTIVDTYIDRAISGTSTNHREAFLKMIADSEKHAFEGVLMYKMDRFARNRYDSAVYKAKLKKNGVRVYYAKEQIPEGPEGIILESLLEGMAEYYSAELSQKIKRGMRENALKGKATGGSTAIGYKITPDKTFAIDEDYADVVRHIFRSYARGERVEDICKDLNEKGIRTPKGYLFNQSTMRKMLQNEKYIGVYICKDVRLEDAIPPIIDKSLFHEVQQILARNRKAPARAKAKVDYLLSGKAYCGKCGNGLVGESSNPNSDSGSHYYYKCANRKKGLGCDKKTIRKEELENLVAQKVAEVVLRPEKIKEIAQRCEEMQRDMVRTIRNPEADMLKKQLEKTKKSIANIMMAMEQGIFTKSTKEHLEALEQRKETLEIEIQRTSMVEKVDIITADQIEFMLLQFLPEANTDVTAYADDIISCFVHSVYLWDDSCAIWLNLSNQQPKPHKNRCAKVTPESIQRLQLSVDLLSGNVKKNLVQKNAGENSHLETSPPPIIIT

SEQ ID NO: 22844 - protein, 495 aa, synthetic construct
MLAYGYCRYSSNLQDEKSIEQQKNELEEYAKKNNISIIKYYIDEAKSGTKDTRDSFQNMISDACKSKEIQAVLVWKTDRFARKAIDSLYYRNKLEKVGIKLISITQPIDTETPEGKLMSTMLAGVDEYYSQNLASNVKRALKLNAQSAQFNGGIAPLGYDIVNKKYVINEREASSVRFIYDMYIEGYSLIEIALKLNSMGFKTKKNKPFSKTSIYDIIGNEKYIGKYIFNKGTKSNHDGIRADAIILEDAIPQIISKEVFEKAMNKRTKRKNAENTAKNFYLLSGLIKCECGGSYVGTTIKKQKNGNTYVSGYYRCSNHNKLGKCQMPSLKQELIENKVIKMLTEELLNAETRENIVKAVNAQYIEAQKDCKNDVEILKENLSSINQEINNIVNAVAKGYATDSLLKRLEEIENTKKNIEDEINFKDNIATHNYITSEKIEEVLKKDLSELKDKSKEKLKILVQKYIKKIEVKTTEVLIYLDFGESSPKKLVAKM

SEQ ID NO: 22845 - protein, 501 aa, synthetic construct
MEIQIREGSREQKRKLKVCAYCRVSTDADEQENSLENQVRHYETVIKANPDYEYAGVYSDFAISGFKEKRPGLQKMLADAEKGKIDLILTKSVSRFARNTSIVLEATRKLKELNVGVFFELQNINTLSGEGELMLTILAAFAQAESESGSAGAKMVYQRKYEAGIPVQYLERSFGYTKDERGVFVADEAESVWVRKIYEMAADGYTPASIKRYLNENGVKTVGGVQWVDSTVFRLLENEIYKGDYIMHKHFVNEERKLVRNRGEVDAWYIEDDHEAIVSPELWQKAQDALAVKRDYLAEGSVIEEFTEENYPYMNKIYCAKCGYPLYKRIYSKGNRLNWGCSGTKRYGKSFCDGINIPDGVLRSAWHFEENTYIDEKASDKGVKEFTYLKERSWKRRHKKKQPSAIPENTETEYPYREKIFCALCGSRLVRYVNPQNHKVTWVCNRRKRKGKEACDGTRVPDTVIKGWGEIKNDIYIQRKDDKNGKKRYSYTSKKPSGIRV

SEQ ID NO: 22846 - protein, 520 aa, synthetic construct
MVKCMKSVAERAVPAVIYARYSSSHQREESIEGQVRECREYAEREGYSVLQVYADRAITGRTDERPEFQRMLADASKGVFQAILIYKYDRFSRNRYSFAVWETKLKKHGVKVISARENVAEGAAGIVLKSVLQGMAEWYSVDLSEKVTRGMKENALKAKWTSGTVPFGYTRDAEQRLIIDPERGEFVRQIFEKVLAGEKYVDIASWLNMLGVRTARGAAWNKSSFTWMLKNVVYTGLFRWKDIEIKNAVPPIISKELFEAVQRKLKTYGRRGINVQKSDKYLLTPNIICGECGGPMHGMSGKSRSGELYYYYACANKRAKRTSCSISPLNRDELEQAVYNCAREVLLHEENIKLIAEQAEAVAEAQVDNELAEMKAERSRVKKSIANYAAAIANGATSGTIIELINAAEAKAAALDEAIAERELVAAPPKVSKEAIEYFLRNIAAAPDDKMKEKVISTMVNSVVVERVPDEGTKKDSDEKYSITVRFNFTDTPQLSALQSFDVREKSKMVTSAGLEPATF

SEQ ID NO: 22847 - protein, 523 aa, synthetic construct
MRFFSYGRKSVFSDKSDSIDNQFRMNREYCESKFSGQVDSWQQFSDEDFTGANTSRPDLQRMLSFIKGGFCDVLVVYQLDRLSRDVRDFANIYALLEEHGVMFISIKENIDTTTPIGRAMMYVTVVFAQMERETIAARVTDNMLGLAKKGYWTGGNPPVGYVRKHIVVNGKKHCSIEVDPDGARYVTQIFDTFLAYNCSLQGMETRFKNQGIRTQSGKFFSTTQLHKMLTMPYCVEATPEVYDFYAAKGCIMDPGSPREMWDGSVGVIIYGRSTEKNKKHQAQPPEKWTVCLGKHKPFMPAEKWLAVQSRFTQNKCIKDAKWPVPLLKGVLRCKCGNLMQVSRKKKVDGTCSSWYYCRKRMRQGVDACDMGQIKCDLLDEEVLELFRGITADPALIQKFVKAEAPADVTDLKAAQARVSACERKIGRLAASLALAEDSAASKYIIAEMERLDVELGALKREASLAEMESHRAAASAKDAKATAVEIAKLIHGLEGFDDKEKNAIARAVIQECTWDGERLFITL

SEQ ID NO: 22848 - protein, 433 aa, synthetic construct
MPRAITIVPKPPKLEQKKRVAAYARVSSGKDAMLHSLSAQVSYYSDLIQNHDDWLYVGVYADEAKTGTKESRADFQRLIADCRAGKIDMVITKSISRFARNTVTLLQTVRDFKAWGVDIFFEEQNIYTMSGDGELMMTILASYAQEESRSASENQKWRIKRNFEEGMPWNGAMLGYRLKSGRYEIIPEEADIVHRIYDEYLSGDGYLTIAKRLNEDGIPSRFGKQWGQSVISKILSNYTYTGNLILQKTFRENHITKKTIINNGELPKYHAENAHDAIIDMETFQAVQAEKTRRAARFLKKPASKKAYPFTSLLVCDGCGKNYRRKVTKTGSVLVCGTFNSIGKAACASKQIPEETLQAVTAEVLGQVDFSEELLRRLIKSILVCNGNVLIFHFFDGSEVTRKWKDRSRSQSWTVEMKAVARQKALERRNQNA

SEQ ID NO: 22849 - protein, 581 aa, synthetic construct
MSRTTNKRPGKAKSGLSRKQKVAIYIRVSTLYQVDRDSLPMQRKDLIAYASLILGIEEYEIFEDAGYSGKNTDRPAFQEMMQRIRKGEFTHVLVWKIDRISRNLLDFAEMYEELQDLRVTFVSKNEQFDTSTAIGEAMLKIILVFAELERNMTSDRVTATMISRANSGLWNGGRIPFGYDYDPDKTAFSIREDEEKVCQMIKNDYMEHKSLVHTSRMLNASGYKTRSGVEWSPTAVWIIVSSPFYAGIYRYNRYKGTERRVENPEDEWIMIQNHHPAIFSLEEHEKMLAILDENSRNRRSVGQRHQTERVHIFGGIAYCGKCGSKMVSTPGRLHVNGYRPTNYSCPKHRKTKECDNPTVSDTQVGEFVINYILNMLGAKKKFSTIENPEDLERCLLYGNTFSEVEHIDSNGLNEYFNLLSRYSSDDSYTFSVKKSRKKKAEVDPEVAALRKEKEKQERAMKRLQDLYLYSDTSMSEKDFIIRKTEISKRLEEINAMLGMVAKNSEPSLSDEEFVRQASHLLISRELQNRQYIYFKNLAQSVSPEILKVYMETVLDSVLLVDGRVSSIVFRNGLTHKFKYKS

SEQ ID NO: 22850 - protein, 539 aa, synthetic construct
MYQSNSNSTYAALYTRFSRDEPDGESNSIANQKKLLLNYAHSRGIVNTKFFVDDGFTGTNFNRPDFKAMIAECEAKKISTIIVKDMSRLGRNYLMVGYYTEIYFPENNIHFIAINDDVDSVKGDNEFTPFRNIMNEWYVKDTSKKVKSVIHNKGMSGERICNNVIYGYKHNPDNPKEWIVDEEAAQNVRTIFQMFLNGKGTSQIAKYLHSEKILVPSVYAREHGKISARATPADPCLWDSKTIREMLKRQEYVGDTVNFKTKKVSYKSKKKIYLDKSEYVIFPDTQEPIIDRDTYERVQKIMESRKKVPIVREPDPLGGYIFCADCGSRMYITRSTVFPKKNCYHCGRYKRSSELCSSHYIRECVINQLILNELQKVFSIVKNDRERFLNVAIQSYANRTSYDVKKLRKDKQLCEQRIQELDILIKKIFEQSVLGTLSKERLATLAAGYESEQAEIKNKLSAISREIEITDSKQLNADRFIAIVDKYTNIDSLTPEIMSEFIDKVLVHKPIYDGNNKRHQTIEIYFNGIGAFDYDSCNS

SEQ ID NO: 22851 - protein, 513 aa, synthetic construct
MKKQPSGGKRLVAYYRYSGGSHQTEQSIEGQRRDCETYARIHGMVILHEYIDRHISGKTDDRPEFQQMIADAGKGMFDYVICWKTDRIARSRYDSIIYKKKLRDNGVELLYAAEANVEGSGGIIVEGLMEALAEYYSAELAEKVRRGMRESALKGKAIGSSRPLGLTVDKDKKYIIDPAGAAAVRYIFEQYAAGAASSAIVAHLNEQGLCTSRGNPFNKSSVVRIIQNEVYRGVYVSPKFDVRIEGAVPAIIDDDLWERAQKMFIRNRQSRSPRNDRADYILSGKLFCGECGTAMKGVSGHSSNGEVYFYYNCPCKDCHRRNIPKDELEGLVIRTVCNDVLQPDVMDRIADSVIEAQTAELNQPNPEKEALQHELADVQRKAKNLLSALENGTAGAMLTNRLAELEQQADTLSYQLSSLESEPKFPVFSKEEILYLLEQFLIAPSEKTKAYRRRLIDTFVSKIEVSNTELTIYFNIAEEDCGKMKKAPQSNQPEGCSTEKQMVRVARIELTAS

SEQ ID NO: 22852 - protein, 514 aa, synthetic construct
MAKPMLISPISRQGIKLLRVAAYCRVSSSSADQLNSYATQIDYYTRLAKKKKNEWNMVEIFADEGISGMKAKNRPEFQRMIRMCELHQLDLIITKSVSRFARNVKEALEYVRKLKFLGVGIIFEKEGINTQSLGDEMLLNTFTAIAQEESKAISQNQRLSIVKRMELGIYVDSNAPYGFRLENKQLVEYPPEADIVRWIFRSYLNGMSTTEIAKVLTERGIPTKNGKEKWKSTKISYMLSNERYIGDCHYQKTYRDTTVPFKQSKNRGEEDMYYATGTHASIIEKGTFDKAQVLLQKRKEQFTKSITFNTYILTSRIRCTECGSFYRRKVRSGGVKWVCAKHEENTKSCNSNYYSEERIYDGFLSVVNKLRFGQENILGQVIAKLESATQKYKRNNKTAMQISQKIAEINATILKLNELRSKGYLAPEIHQSQVREMQKQLCTLKEDRQDQFESRILTMLQDVRKLKSLIDEIEEPLDEFDEKLFEEVIVEMTLNNTDELTVTLLGGLKFTELI

SEQ ID NO: 22853 - protein, 545 aa, synthetic construct
MAVTKIPKKTITLIEPKKSFIVDKAQHRQKRVAAYCRVSTDSEEQLTSYTNQMKVYTEMIASKKEWEFAGLYADEGISGTRADKRPQFQKMIDDCHKGKIDMIITKSVSRFARNTVDCLDYVRSLKEIGVGIYFEEQNIDTLKSDSELYLVIYAGFAQSESESISKNITWTHRKNFEEGRPIFMYNRMLGYKKGEDGNPEIVPSEAAIVQRVFDMYLSGKSTDEISEILQGENIEIPGKKLNFSKSMIIRMLKNEKYCGDAILQKTVTLDPISKKRKANEGEAPMWLVENSHPAIVSREIFNKAQEESARRKAKTPQSEKMALTASGKYSKYALTEVMMCGECGSRYKRVTWNIRGKHRIVWRCMSRLDYGKKYCADSITVDEQALQRAVVRALNRFNIEDESTYLMLMKSTIGEAIGINGGSDEIDLLERRIDALNKRMLDLVTLSVQEDNDAENYEDEFKNISMQIEQLSGRITAIRESESEDGELQARIKEIQDTIDKRKDNKDTYDDSIVRQMVECIKVYHDGRLQIILGGGYELEEYLEK

SEQ ID NO: 22854 - protein, 606 aa, synthetic construct
MARKKKFAPNDNNLAIAYYRFSSHSQNDASIDQQRELAHEWADAHGFKIVQEYEDAAISGTTDARPGFQQMLSEVAKIRPHTLIMWKTDRLGRDKYVLAMAKKKIRDAGCEIHLLAEHIPTEGPEGVLIEGLMEAMAEYYSRQLSQNIQRGMDYNAQHALYNGHKLFGYDVDRSTKKYIPDPNTAPFVQWAFREYASGKPLKTIAEEMNAQGLRTPRNAEFSVNMLNKMLKNRAYIGEYHHGDIVVAGGMPVLVDEATFDRAQRRFAENKRKGSQRAHGMGDAEAPRYWLTGKLYCGECGSTMQGVSGTSKTGRTYYYYYCSAQRRKECHLHKARKRDLEDMVLFALHNIVDDEENVTALALDAAEYYERSHDDTAYLEALEAKRREVEKSLANLVKVIERGVVSDTVTQRLAQLEEQKSALNDAIGTENVRVSLCEDRHSIQAYFDKFLHADVNDPEIRDQVFEYFVDKVYLYDDKLVVSMWFSEDDKQEITWRDWFSLDEYWTDESPFVKGGGVEFDCFPLGSTKKRTCFSAGPFSMKFISAQRAKYLRPEIFAPQMRKAPDASLSAPNALFSARRCIFRAGHTNTLQYPALYGSANAPRIKTN

SEQ ID NO: 22855 - protein, 494 aa, synthetic construct
MRVVGYARVSTREQADHGYSIGEQNSRLRAYCQAKDWTLLRVIEDPGFSGAKMQRPGLQQVLEMVRRRECDAVLVWKLDRLSRSQKDTLYLLEDVFLANGCGFVSMLENFDTSTAFGRAMVGILSVFAQLEREQFKERSAIGRVGRAKAGLFHGGGYAPIGYDYYTKEDGGQGLVVNEYEAMQVREVYRLYLAGWAVHKIQVYMHERYTTKNGCWASDTTVRSVLSSPIYLGRITWAGKTYEGQHEALISQNDFDQVAARRESLKWQPAEPRAACDLIKNSPFRSTHILGGITWCARCGARYFASGNYSGRGENRKYWPYYTCYSVAKSSKKMIKDPNCKNKRWAVGKLDAIILAEISRLEFDPAALAKAAGPVDVSGVEEKRRVLEARVAEVRPQMERLLDLCQTGGLPVASVSGRLAALQKELDALNGELSGLAVPETVDRLAVAQEMLAGASAVIENGTPEQKRALVHSLIGRIDIDGEDITIHWLFAPGN

SEQ ID NO: 22856 - protein, 514 aa, synthetic construct
MTMDRSAHSRLAVTYRRISSLNQVDNNSMCAQEQAIKDYAKKNHLKIVEAFHDLAKSGTSVQNRTGYQQMMEYLEKHPEVTCVLLHHLDRLHRNVRNQLNDIYTLKCKGIAVITTDGLNSMDEDCMSEILDEAASAEKYSRRLSKETMKGLRVNAEQMLHNGGLPPYGYTVGSDKKLYIDEAKAPAVRKMFEMYAAGMSYKQIAQWLDDNGFTTVKGGNFKSTSIKTILENEKYCGTYFWNKRASKDFRGMRNSHQQKEDYYQVHGAIEPIVSEELFDKVQERLHDNKNRIRNYNGKNYYPFNGKVFCGKCGKKLSGHVQYSRTSKNNAPVKQYRFSCSCPAVKTVNEKYLDDMVINGLRACIFSPENYEELVDKLNAYGKIQERVIDLQIEVLRSDKENAEKRCSNLMDIAENGDGTKSIIDKIKRLDKRIAKIDRRISDYEAAKKVFTAEDIDRIRDRFTEYVMENRNENVLGFLEDTVDRIEVDDTVRVHLKKNICVDRETKKGFRQERSI

SEQ ID NO: 22857 - protein, 518 aa, synthetic construct
MAFRVIYRLPKRKEVWLVEIQIREGSREQKRKLKVCAYCRVSTDADEQENSLENQVRHYEMVIKANPDYEYAGVYSDFAISGFKEKRPGLQKMLADAEKGKIDLILTKSVSRFARNTSIVLEATRKLKELNVGVFFELQNINTLSGEGELMLTILAAFAQAESESGSAGAKMVYQRKYEAGIPVQYLERSFGYTKDERGVFVADEAEAVWVRKIYKMAAEGYTPASIKRYLNENGIKTVGGVQWVDSTVFRLLENEIYKGDYIMHKHFVNEEKKLVRNRGEVDAWYIEDDHEAIVSPELWQKAQDALAAKRDYLAEGSVIEEFTEENYPYMNKIYCAKCGYPLYKRIYSKGNRLNWGCSGMKRYGKSFCDGINIPDGVLRSAWHFEENTYIDEKASDKGVKEFTYLKERSWKRRHKKKQPSAIPENTETEYPYREKIFCALCGSRLVRYVNPQNHKVTWVCNRRKRKGKEACDGTRVPDTVIKGWEEIKKDIYIQRKDDKNGKKRYSYTSKKPSGIRV

SEQ ID NO: 22858 - protein, 503 aa, synthetic construct
MAGRITQVTFGSPQLPRDKNVAAYCRVSSGKDAMRHSLAAQVSYYSELIQNHAGWEYAGVYADEAVTGTKDSRKNFKRMLSECRAGKIDMVITKSISRFARNTVTLLETVRELKTLGVDVYFEEQNIHSLSADGELMLTILASYAQEESRSASENQKWRIKKNFEEGKPWSSTLLGYRNVNGRYEIVPEEAETVRMIFTWYLEGAGATTIRNRLNAMGIKTRLGYSWSRSPILKLLRNYAYTGNLILQTTYREDHITKRTIKNNGEKPMYHAQGTHEAIIDMDTFNRVQEEIQRRAEHFASPDGNKSTTTHPFTSMVKCSRCGKSYVRSGSAKYRTWTCRTRREEGAKHCGAEIIPEEELFRLTAEVVGGEVTVDAVRDKITVIRAEKERTLVFCLKDGKEIVKQWREHEIKYICTEEQKRKISLKNSGRKLSEEQRREHSRWMKEYWKTHEFTEERRKKQSESMKAYWNDPEASGEHRKTVSQLTKARRAKETSGKEEDNNA

SEQ ID NO: 22859 - protein, 525 aa, synthetic construct
MPNVTVIPATRNIHTGIRKDAVTKRKTAGYARVSTDSEEQLTSYEAQVDYYTHYIQSRSEWEFVKVYTDEGISATDTRHRDGFNEMIKDALDGKIDLIVTKSVSRFARNTVDSLSTVRKLKEKGVEVYFQKENIFTFDSKGELLITIMSSLAQEESRSISENVTWGQRKRFADGKVSIAYSTFLGYKKGEDGQMEIVPEEAETVRLIYRMFMQGKTPYAIAKYLTEQEIPTPTGKREWRHRTVENILTNEKYKGDARLQKGYTVDFLSKKRKTNEGEVPQYYVEGSHDAIISPSEWQLVQLEMERRRAAGRSNCCSPFSAKLKCGDCGAYFGSKVWHSNSKYKRTVWQCNAKFKGEHKCTTPHLYEQRIQELFLEALSSLMENRDSLIDDCRAVMHVLGDCKAIDREMDEVRSEMEVTTGLIQKLIDENATRKMDQNDYRKRYDGYVSRYAALESRMDSLEQERKEREFKYDIFSGFLFELGEIHELPLAFDDRLFYQLVDYATVYSDGRVVFTFRNGTEINTTI

SEQ ID NO: 22860 - protein, 502 aa, synthetic construct
MEFIREDCIYARQSVDRKDSISIESQIDFCKYELKGGSCRVFKDKGYSGKNTDRPEFQKLLGEIRKGKVRRVIVYKLDRISRSILDFATMMELFQEYDVEFVSSTEKFDTSTPMGRAMLNICIVFAQLERETIQKRVTDAYYSRCLKGFHMSGQAPYGYQLEPTVVEGIRTKKMVADPVAADHVRLMFEMYAEPETSFGDITRYFEEHDIKIYGKSMFRTFLSQLLRNPVYAQADLELYEFFKSQGAAIVNDASDFAGTNGCYLYQGRDVKEDKDRCLKDQILVIAPHEALISSDTWLKCRKKLMANTTFQQGRKPKNTWLAGKIKCGHCGYALKATHVPNSTGYFRCTKRTENKGCPGCGKIHKEAFEQFIFSAMQEKFKDFQILHGREEKVNPKLTAYQVELAQVEAEIEKLLDTLTGANATLLAYANKKIEELDTRRQTISKAIAELSVETISPQQIKKLSYYLDNWDSIDFDDKRKAADGLISTIKATSDRVQIEWKI

SEQ ID NO: 22861 - protein, 515 aa, synthetic construct
MLNAVIYARFSSDMQREESIDAQVRACKAYAKSKGYTVVKEYVDEAKSGRSTLTRDAYNQMMADAMENKFDVIIFHKIDRNSRNELNYFIFKDKLEKLGIRYEYAAQPIDTDSPEGQVMETVMVGMAAYYSRNLAKETKKGMNENAYKAIFNGGYAPLGYKIVDKHYVIDEKEAEAVRLIFNLYLDGKGYGEICLALAARGYTTRSGKNFPKNSLHDILRNERYMGTYTFNRVPKTKRRNSHSYARPNDFISIPDAIPAIVSKETFLAAQEKMLRNKKRKGGAYTAKRDYLLSGKFFCGYCGSAMQGYSCCTRGNMYYYYSCARKDRVPADRCKQKMIRAEVIEHWIMSTLEREIFSDAGIQRVADSMSTAFGNANKEAKNATTVLLQRKAAAERKLNNLYQVIEDGDADEFDMQRLKKAKEELRNINNEICETTVKSAPDIDTSKIISLLKHMREEIFAKKNSHYAKQAIELLVKRVTIVDKTITLSLTTEGCLSLLVPRTGIEPVRVSLPEGF

SEQ ID NO: 22862 - protein, 491 aa, synthetic construct
MYLRKSRAEEGQSTEEVLSKHRAALEELADRLGLPVDGVYEEVASGEKLYARPEMLKLLERIRAGEVEAVLCMDIDRLGRGGMADQGTILDAFRESGTLIITPEKTYDLTNDVDIEMTEFKAFFARAEWRAIRKRMRRGLMQTIEAGGYTANAPYGYRRCRIGKLPSLEVIPEEARFVRYIYERYLAGIGAQTIAQELNAMGSCPRRGAEWNRNTVRHVLRNPTFAGKVAWNRVKHYRPGAHGKDKHHVVYTPEGEWLMVDGVHEAIIPWDTWLEAQERRKQRYIPPSNTGQRANPYAGIIRCSKCGNNMQRMGSSSGEPYLLCTTKGCTAGAKFEYVEERMVELLYDELARLRLLIDSGAAPNVGALEAALAAAQREQERVQARIPRLYEFLEDGTYDRSTFRSRLEAAEKELAELANKRADLERHIDERRRSDPRKAAAALENLVQLYPTMSPADKNSALKALGVEVTYTKEKKTKPRDFTLELQLRDF

SEQ ID NO: 22863 - protein, 554 aa, synthetic construct
MKRTAIYARYSSDNQRAESIDEQIRACRYYAQQTGLYDIVAVYKDEALSGYKNAHKRDGFAQLMADAEAGKFEAVMVYELSRFSRNGSDTIVNTEKLARLGIEFVSVREKLDQTPEGRMMMFVITGMNEYYSANLAIETMRGLKENAYQAKHTGGIPPLGYDLDSNGHYIINPEEAAAVRLIFDMYLEGNGYTAICDELNRRGYRTKRGTLFVRNSMYDLLRNEKYTGSFIYNHMAKAKNGKRNRHAYKSDSEVIRVENAFPAIISKEEYRKVLKLMEQNKRKGARNAAVHDYLLSGKVYCGHCGKSMYGETRYRKEYSYSYYSCNGHKSKICGKHSIRCDKLEAEVIRQLNELFFSDEILDRVSEKIYDDSQNHFMDERAAILRKRSADIKKKIDNGTKAILDGVDSDELRSAVKELSAQKKQIDQQIVQIEAAADNNGRTFEEVREMAKNFSDISKLPRDQQKRIVQKFIWRIYVYDSENPDDGDIVKIVLAPTEAARDELNSMAEDYVAITDMLTSTNGTSQGVPMKNPTCFSEQVGFSVLIKNCRTTDFM

SEQ ID NO: 22864 - protein, 501 aa, synthetic construct
MRDMDSARLRVACYVRVSTREQAEKGYSVSEQQERLKAYCLAKDWVVAQVITDPGFSGAKLERPGMQQLISLVQTKKCGAVLVWKLDRLSRSQKDTLYLIEDVFLKNGCAFVSMNENFDTSTAFGRAMIGILSVFAQLEREQIRERMAVGRVGRAKAGLFHGGGYAPIGYDYKTIAEGGDGLVVNEYEAMQVREVFSLYLQGWPVNRIRKYMAAHYTTKDGDWGSDTTVRDVLKNPLYTGKINWAKKVYDGQHEPLISQETFDAAAARLATSSWKRTCSDGMERNSPFKSTHLLGGIIWCARCGARYFASGNYSGRGENKRYWPYYVCYSRAKSAKHMIRDPNCRNDRWAVAKLDAIIEGEIRKLAFDPAALELAVSGPQQDEDVAQRRAALQQRLNDLRAQMGRVLDLYQMGGSLPASMVGDRVAKLQAEIDGVEAALAEAVEEPPTQRLDAARAALVGAEDVLDNGTLDERRELVHSLIRRIDLDGENIDIHWSFSPEA

SEQ ID NO: 22865 - protein, 439 aa, synthetic construct
MRFFSYGRKSVFSDKSDSIDNQFRMNREYCESKFSGQLDSWQQFSDEDFTGANTSRPDLQRMLSFIKGGFCDVLVVYQLDRLSRDVRDFANIYALLEEHGVMFISIKENIDTTTPIGRAMMYVTVVFAQMERETIAARVTDNMLGLAKKGYWTGGNPPVGYVRKHIVVNGKKHCSIEVDPDGARYVTQIFDTFLAYNCSLQGMETRFKNQGIRTQSGKFFSTTQLHKMLTMPYCVEATPEVYDFYAAKGCIMDPGSPREMWDGSVGVIIYGRSTEKNKKHQAQPPEKWTVCLGKHKPFMPAEKWLAVQSRFTQNKCIKDAKWPVPLLKGVLRCKCGNLMQVSRKKKVDGTCSSWYYCRKRMRQGVDACDMGQIKCDLLDEEVLELFRGITADPALIQKFVKAEAPADVPDLKAAQARVSACERSISSRKWNAWTLSWVL

SEQ ID NO: 22866 - protein, 465 aa, synthetic construct
MKGNAGDTIVKKIDLSPELVRVALYIRVSGEEQKIKGLSLEAQQERLEAYARERGWVIVGIYIDAAKTARKNIHKRTDFQRMMDSVKRDEVDILLFCRLDRWFRSVADYYKIMEVLEAHNCDWKTTDEEYDTTTANGRLYINVKLSIAQNEADIDGERIDVVFDSKIAHGTVVSGSAPFGFRVNEGKRLEVVPEDAAIVQDAFNYFETSISQRATVRYIRETYGVNWCDATFRRMLKEKLYTGVYDRGGRFNDHFCPAIISKQQFDRVQALLERNARSVPSGKVYIFTSILTCAECGHKLVGYKSSDYYYYRCNQHFQRGRCSHNHSAREDVVEKWLFEHLAEELERCQLEWEVAAAKKKASVARTDKAALKRKLTKLKELYVNDLIDIEDYKRDYQIYTAALKHIPEPSIEPPPDFATVRRLLDNDFKTIYENLTREEKRTLWRSVIKEIRIDNDQNITGVVFG

SEQ ID NO: 22867 - protein, 562 aa, synthetic construct
MRKKFNIDLSMLTPEEQQQFHDDPTTLTKGEVDVALYLRFSSERQTEQSIEGQLRDCIAYCKRKSFRIVAIYVDRATTARKDVEKRVHFQEMISDSAHHLWNFVVVWKLDRFARNREDSAVFKMRLRKNGVRVKSATETISENPEGIILESVLEGIAEYYSADLSQKITRGLRESAMKGHSVGGHVPLGYKIEDHRLVINPATAHIVQEAFQLYANGESMAEICRIFNSKGYRTAKNSEFNRSSFKSMFKNVRYIGTYIYKDIKKENAIPAIIDKGLFETVQRRLSLAADAPARGKAKVDYLLSGKLFCGHCGATMNGESGTSKTGAIHNYYTCYSRKRRKGCNKKPLKKDFIERVVAQDAMALLTDDVIEELADMAMSQADRDLKENTRIPELSARLTEIEQGINNITKAVEKGIASDALLNRLTELEKEKKDLTSQLREEEKYIYRIDRDQVVFWLTKFQGGDIEDEDCRRRIIDLLVNSVTVWDEPDGYKITTAYNLTSCKTKTFRVSTAGSPSSEGFGFGELSSTKKRTCFSAGPFSMKFISAQRTKYLRPEIFAPQM

SEQ ID NO: 22868 - protein, 515 aa, synthetic construct
MKRRKNIDGDCRLVAYYRYSGGSGQTEQSIEGQRRDCETFAKLHGMTILHEYIDRHISGKTDDRAAFQQMIKDSSKGAFDAVICWKTDRFARNRYDSAVYKKQLRDNGVEIMYAAESNVEGAEGIIIEGLMEALAEYYSAELSEKMRRGMRESALKGQAISRCRALGLTTDENKRFVIDEKTAPTVRFIFEHYAAGESSASIVAQLNAAGKRTSQGTPFNKSSIPRIIQNEMYRGVYSSRAYNVRIEDAIPAIIDADLWERAQTMLKINRQLKAKHEPKADYILSGKLFCGQCGRLMKGVSGHSGGNGEVYRYYACSNPQCHKHNVPKSMLENKVFCSIRDNLLHPAAMEALADAMMEVQKTDSQKPDLEREALERELRDVQRRSKNIMDAIETGSANPQLIARLDDLTQQESTLTFQLSTMERGQPLTFTRDQFLYLLKNFCAQPTEPQDDYMHRLLNTFVTRMEITDSELLIYFNISENTENKNKNAPQQNFTKKSSTEMRLVRVARVELTAS

SEQ ID NO: 22869 - protein, 441 aa, synthetic construct
MAHVYKKQLRDNGVELMYAAESNVEGAEGIIIEGLMEALAEYYSAELSEKMRRGMRESALKGQAISRCRALGLTTDENKRFVIDEKTAPTVRFIFEHYAAGESSASIVAQLNAAGKRTSQGTPFNKSSIPRIIQNEMYRGVYSSRAYNVRIEDAIPAIIDADLWERAQTMLKINRQLKAKHEPKADYILSGKLFCGQCGRLMKGVSGHSGGNGEVYRYYACSNPQCHKHNVPKSMLENKVFCSIRDNLLHPAAMEALADAMMEVQKTDSQKPDLEREALERELRDVQRRSKNIMDAIETGSANPQLIARLDDLTQQESTLTFQLSTMERGQPLTFTRDQFLYLLKNFCAQPTEPQDDYMHRLLNTFVTRMEITDSELLIYFNISENTENKNKNAPQQNFTKESSTEMRLVQQSRTNPNFFLLPHRRSKCPQNGRFGCHPCS

SEQ ID NO: 22870 - protein, 609 aa, synthetic construct
MRKNDDIIAIYSRKSKFTGKGESIGNQVELCKEYVRVHYGDTAVDKVAVYEDEGFSGGNLNRPDFKIMMDAAKKRKFKAIIVYRLDRISRNISDFASLIEELARLDISFVSIKEQFDTSTPMGRAMMYIASVFSQLERETIAERIRDNMHELAKTGRWLGGTTPTGYASEAVKSITIDGKSKKACKLKLIPEEADIVRMIYDLYIETDSLTLTEAALIKQGIKTKNNNYFTRFSIKAILQNPVYMIADEDAYNFFIQNDTDLFSEKDAFDNKHGIMAYNRTDQEKGRATKYLPASEWIVSVGKHPGLVLGKVWVQIQESLERNKSKSFRKPRSNEALLTGLLFCSCGERMYPKMSKRKTADGKVIYTYVCKMKERSQRSVCNSKNANGNTLDMAVIEQIKMLAEDRDTFIAQLEQSRRFYTGNRMDYEQRLDDMRKETADTEKKINSLVDSLVDMGDSPAKAHVTKRIEQLNEEYQSLEKRIQELEGLTTQHALSDIEFDLMRQLLTVFKDGIDEMTIEQKRAAIRTIVRKVIWDGVNAHVVLFGVQDDEIEYPEIASVASDNTDDEDENEELVAFSDVDYEDDDTEDDRLGKTNPLSASKTHWGENSK

SEQ ID NO: 22871 - protein, 526 aa, synthetic construct
MAKNVRTIPATISRFTATPLTAKEKRKVAAYARVSTDHEEQQSSYEAQVDYYTNYIKGRDAWEFAGLYSDEGISATNTKHRDGFNSMVQDALAGKIDLIITKSVSRFARNTVDSLSTIRKLKENGCECYFEKENIWTFDAKGELLITIMSSLAQEESRSISENTTWGQRKRFADGKVTVPFGRFLGYDRGPDGNLVVNKEQAKTVQLIYKLFLDGYSCGKVAKKLTGLGIPTPGGKKNWSSSTVKSILTNEKYKGDALLQKVYTADFLTKEKKKNNGEVPQYYVEKNHEAIIDPRIFEQVQAEMERRISSEGRYSGTGIFASKIKCGDCGGWFGSKVWHSNDKYRRVIYQCNHKFKNGCKCQTPHLTEDEIKAVFVKAVNQYLSERDALMENAETILHLLSDTAELEKQLDENAVKMNALVEQTENIVAENARVVLDQTAYNERYDSLISQYEMEKTTYDKLESEIADKKARHQQLQNFIIAVKKTAQFQTEFDKGLWCALVDFFTVKSKDKVAVTFRDGTEITVK

SEQ ID NO: 22872 - protein, 633 aa, synthetic construct
MRKISKIEPKTVIIKPKKKVAAYARVSRDTERLLHSASAQVSYYSSMIQKNPDWQYAGVYADYGVSGTKVAKRDEFCRMLQDCEDGKIDIILTKSISRFARNTVDLLDTVRHLRSIGVEVRFEKEHINSMNGDGELMLSILASFAQEESRSISDNCKWGIRKRFQSGEIGMANKHLSGYQYDEEQKCYMVIPEEAKMVQWMFQMYLDGTTLRKIAENMNAAGYRTINDKLFNESTVRQLLHNDIYAGIIRRQKSYIPDPISGKKVINDGVLPQYVIEDAHEAIIDKETYEMVLAEHKRRESMQNPTYSFTRKIKCGICGRSYARVAAAKETRCARWLCRSKKEKGMNCGSQSFTEPKLQEICAELMETDGFDEQKFKEIVNGITVLDGGDVQMQFKGGKTKTWKMPPKQVKVKKEKALKRSRNLFDGKIFCGMCGKRYGRAISTTKDGGHLYWSCRAKNQCGITCDSVNYADTEIREIFCKVMKKKSFDDEFFTATVEKLIIQKTGSIDFYMKDGTVKHFETLKLRVNVHQSTSTDEFIGKIRCGICGNVFHRYCCYGKYHYWHCSGKSKVRAECNAQDLADCNLRTISAYIMGTDEFDAHEFEKQVKEIIVRKDGSLKYYFYDGSEKTWQKM

SEQ ID NO: 22873 - protein, 573 aa, synthetic construct
MAYNAQNKTGARVAIYVRVSTLHQIDRDSLPMQKQDLLAYAKLMLNTDDCVIFEDAGYSGKNTDRPKFQEMMSQMRAGAFTHLLVWKIDRISRNLLDFATMYNELKALGVTFVSKNEQFDTSTAMGEAMLKIILVFAELERNMTSERVTATMISRANNGLWNGGRIPYGYDYDYETHEFSVNEEESKVVILMHDMYEQERSLVRVVRELNERGYRSRAGNLWSPVSLLIILRNVFYCGDYRYNMLKEGDRQKVKDESEWVTVENHHVAIISKDQKERIMATLDSNSKLCKQRNIYKSSKHTHVFGGLIYCGSCGKPLGSTPGNLTRDGWYYSKYTCPTRRKSVTLCTGKSTSDPIIGEFVFNYILNMLNAQNDFDKISSPEELEKLLLIGDTFAYIDHIESNGLNDLFNVLSSGTVKGAVFGKGASLPTKKATVEPEVARLRNEKQKTERALDRLRSLYLYADEAMSEAEYMIQKNKLEETLEDINDQIGMMNTDSWQQSVSDEEFIQRASEFIIAQKLSGRKYVNYKRLAMSVDSEVLKNFVVSIIDSITIQDGLVSNIVFKNGLCHTFIFR

SEQ ID NO: 22874 - protein, 503 aa, synthetic construct
MEITVEKVDTGVQKLGFQALSTLKTVRVAVYARVSTDQEIQLHSLEEQMKAFRAKIAQHPGWMLVDVYADEGISGTSVKKRKEFLRMMEDCEAGKVDYIMAKSISRFARNTVECLSYVRHLQSIGVQLYFEKEGLDTATSVSELILTVMAAFAQEESRSISENLKWGIRKRFESGESRWTKTYGYRKTKDGEIVIEPDEAAIVRMIFKMYQYGIPMTDILDELTFIQAPSARGKQTWNKTALKYLLENEKYIGDMRLQKWVSVDHISHRSVRNDSTVIPVYNVRNHHVPIIDRHTYQQVQRIMKLKSPHGEYSRYPYFDTNIVCPLCGKKMIPRVMKVNSHKRILGCFDVDGCRGYAVKGYLVDAALLEAYNTLEIKEKKRTVAMQRMLEIKAESPKLDTVQYYWLDDLVGHIEFKQDTMRVFWKCGLESEVALNASKVEEPTHVAELYRNSLDRAQRSENKPVSVVRADKKSVNTREAQRNAAMQTAKNLRAKENGVAANDY

SEQ ID NO: 22875 - protein, 404 aa, synthetic construct
MIIKKVMPKIPVAKKRVAAYCRVSTFRNEQDESFETQQKYYEELIQSHPDWELVKVYADRHSATRVKNRPGFQEMVAAAEAKKMDIIICKSISRFSRNMVDCQQYAKWFRTLGVTIIFEEQNIRTDDPTCDFVLSILAAVAQDESHSISENEKAAYASRFARGEYNLGNNRILGYDCVDGELVPNKDAWIVKEVFRRFIEGESYRQIAKELGELGAQSLHSKKGFGVETLRYMVSNETYVGDKRLQKKAPLDYLTKKPDPNQKVESNYLWDDHEAIIDRETWDKAQKILEKRKELAQVGIHKTNREHHFLYGKVFCGECGAPFLRRTLKAAGGSKTQSTYKAWNCRNRQKGKGKERCGNRFVKEKELIEAILQELEWPTMDQDRFEKEVSKVLVYPDHIEVEKN

SEQ ID NO: 22876 - protein, 505 aa, synthetic construct
MNHSILSAMYLRKSRADDPHEDIMETLHRHESILRAIAKRGKYLIPDDCIYREVVSGENIFSRPQMVRLLEDITNGKFQSVLVVDIDRLGRGDMRDQGLILETFKNSDTLIITPEKIYDLNNEMDEELTEFKGFMARREYKMITKRLKRGREQTVKAGGFVAEPPYGWKRAKINNLPSLEPHEVEGPIMQMIVEMYGNQEPITVIQERLSAMGVCNRKGVPFCRSSIRHIATNPVNAGLIQWNRYKNIRKGENASPTGYEIENPPDQVIVVKGVHEPQVSMEAYQKCVSVCKNRSNPSVKKGMHGVVRNPLAGIVICSNCGSRMQMQHSSTKGSSTLLCTTSGCMSGVDIHKAELALLDILRAKLEEIRTGQGKKQQDNTLAELQKAIHSAEKNIQSLKKQQDKLYTLLEQEVYSVEVFKERNQVLEHKLTEAKDQLKLLQDQMDEVSNRKAERLAQNIENVLVHYEGSSPKEKNRLLKTVVEKALYFRESRTSPFSFDVTFINM

SEQ ID NO: 22877 - protein, 491 aa, synthetic construct
MKTGVIYARYSSDKQTEQSIEGQVHVCEAYAKQNGILILDTYIDQAVTGTNDNRAAFQQMLKDSDKKQWDYVLVYKLDRFSRNKYEITIHRKHLKDNGVKILSAMEQIPENPEGTLLESLLEGMNQYYSEELSQKTKRGMNESRLKGLYVGGPVPLGYFLQPIYEDRNGKQVRVAYRIAVNEDEAYLVREIFDRYVHGEDVKDIVADYRKRNILCKGKDFKPATIYNILSHDFYTGVYKLNNIEYTNYYPQILSPEVFAAAAEKLKINNLGKNSVKAPYLLRGKVFCGICGQKMSAHSQLTWRYYACRNHCGVKHIRKEILEDAVIQALRKLTKSPRQINLLVQKYTERQKLLSVENKALTAFQNELTNIRKSIANIIKAIEMGIITASTKERLDELEKRQVELLMQINAKRDAPRQILSEEKIQEYISRAIDALPQQLIDLLVDKVIVYNDKIDIILKYGSKPADTPKYKIKCNTKQPDTYDTRAVELLV

SEQ ID NO: 22878 - protein, 532 aa, synthetic construct
MKNAVIYARYSRDTQTEQSIEGQMRVCKDYAKRNEILIVDTYVDRAMTGTNDNRAAFQQMLKDSDKKQWDYVLVYKLDRFSRNKYEMAIHRKHLSDNGVKILSAMENIPDTPEGVLMESLLEGMNEYYSKELSQKVRRGLHESRSKGYFIGGNVNYGYKLEPVMREENGKQVRIADRVVINEDEAPIVNEVFTSYANGVSIAQITRNLNERGLQARGRHFNQNQVRNLLHHEKYTGLYRVNDMVYDKIFPRIVQPEIYEIVRKKLSTNRTGNRYPDKSYYLTGYVYCKKCGKRLNSVAGTSKSGRVFRYYRCSHCFTCTNKENLELLVHHALCQVICTEEKRKFLAHKCYEIYTANNKQHDKKLVLTKELAQTEKAIANLIKALEAGIFSDTTKARLDEPEYKKTLLELQLQNADLQDKNALTEKKILQYINQAQNLNPNLLVPLLVKNIFVTRERVDIELKYTQVDKEADAKNRKPYTQNKCDPDGIDNPDRGFCYLEIPATALISYNILHSMHKNPRNRLMAITVRIYIK

SEQ ID NO: 22879 - protein, 536 aa, synthetic construct
MKRVYTLYRVSTTQQVDVIKDDIPMQRIACHEFAEKMGWTILKEKEEKGISGFKISANRRDAIQELKEAAERGEFDILLVFMFDRLGRIENETPFVLEWFANHGIEVWSVNEGQQKFEQHIDKLMNYLRFWQASGESEKTSIRVKTRMHQMTSEGIYTGGSIPYGFQLVYQGRKNKKGQDMRDLAICPEEAIVVNMIYDLVIDQGYGSHRLAALLNKKGYKTHKNAPFTSAYVLRILKNPLNRGVLTRGGVTSEPIPDLRIVTDVKFFRAAEILEQRSGKEEEKRQIAMTNRGQALLAGVIYCAHCGCRLATSRSKVQYTRVDGSEYFKSKGRYICYHKSRGLNDCNGKSVYDSDRIDNAVMEAMRQIFASITGCPEEAKIQQAQKRVVSDLQLQQKKLLEQIEKDTKQLETLRSEIAKAIAGESFYTQEDLATAIRTIRDRIAEAQSDVEKLKQEETHKKMVSATIIPAYKQFRSWSVEFEEAPLEIKKTIATQLFSRVTVNKDYELTYEMNFTYRQFCEDWLSQTPVFSQKAVT

SEQ ID NO: 22880 - protein, 569 aa, synthetic construct
MKQSNNKKSRDVTAFLYERLSRDDNLEGESYSIGNQKKLLAKVAKEKGYTNLVHFLDDGISGVTMNRPGFVEMICQLEQGKAAAVFVKDLSRLGRNYIEVGRLTEEFFPNYDIRLVAVSDNIDTAEGENELAPIRNLFNEWYARDISKKRRISNKIKGNAGEPMGQPPYGYIKDPNDPKHWIVDDEAAQVVRRVYSMTLEGFGTEQIAAQLEKDDVLTPRAYWLTKGIKRPGKGKQQPPTKWNSSTITKILSLQEYCGDILNFKTYSKSYKNKKRIDNDRENWVVFQDVHEAIIERAVYEQVQQKRGKIRKRRTNNGEHNMFSGLLVCADCGSNLHFHFNQGNPEIKYFNCSNYKGNRGTCTSTHYVRVDFLEEVVLGEIRRLTKFASLYEDEFVKAVIGHSQQAEQTDRKLKEKELKTLLARDDELDGLFERIYEDNVSGKLSNDRFAKMSRRYEDEQKELAEKIKKLRSEIEKQSSRSMTTDMFIGLVRKYTRARKLTPRMLNELVEKIEVFNAEKIDGVWEQRLRIHYNCVGTIEIPTVLPLPIPEVSVNTRKGVVVNYDPCELAV

SEQ ID NO: 22881 - protein, 531 aa, synthetic construct
MEQYCLYLRKSRSDIEAENHGEEETLARHEKILLDLAKKREYNVTQIYREVVSGETIAARPVMQQLLSEVEHGIWSGVLVVEVERLARGDTIDQGIVAQTFKYSDTQIITPMKTYNPNNEYDEEYFEFGLFMSRREYKTINRRLQRGRLSSVKEGKCVCSIAPYGYDKVKLKGDKGFTLAPNPNEADVIKLIFELYTKGELQPDGTYKRIGVALIARKLNEMKIPARKSEYWVPASIKDMLRNPVYAGKIRWNWRSQNKRMQSGSISISRPRSEEDNCIIVNGLHPALITEETFDLAQEYLAKNPPRPTKRNAPTKNPLAGIVVCAFCGRKLVRRPYTSASCPPTLICSVPHCPNVSSFLHLVEERILKSLEEWLRNYKLQWNLSNNKPSELISESEILRQSLNDINSQITKLNKQMIKAHELLEQDIYTTEVFLERSRTITERLNQLSYDKAEIEKRLGVETIREKSMKEIIPKVEKLLDVYHELPSAKEKNDMLKNVLEKVVYKKTQNTRWSGSPDDFEITIYPKLPKS

SEQ ID NO: 22882 - protein, 524 aa, synthetic construct
MNKLRAAAYCRVSTDRAEQSGSLASQRSFFDDYIRNSDSMTLVGVFYDEGTSGTTTLNRYGFNKMISLAVSGGIDIILTKEVSRFARNTVDTLNITRMLRAKGVGIIFINDNIDTRDSDGELRLSIMATIAQEESRKISERVKWGQQRKMEQGVVFGRSCLGYDVKDGKITVNADSAEIVKRIFTEYTVLLKGAESIADRLNAEQIRTVNGGRWSGAFIRKVLRNVKYVGDLEQKKTCTPDFLTHKKRLNSSEHIYIRNHHEPIISRELWEQTQAEISRRKPTDTSRHSDRYVFSGKVYCGVCGSVMVSRIKTLKNGKIYHALRCSGRIGGKSCNNETLNVTALKACIKRIFTDMPIDKTAVINAVIKGLSRTDKPDIPALRRKIETLNAKKRRAVDLMLDGLITQQELIEQKSYYDSIIEKLSQEISSDRSVFETDKIRKNAERFLDFTSDPLWLLVIRADYIHGTLTVYLKGIEKGFTTCFTATGRGDSYRVITANTVRSQGIIPGTMQVQKNRCRHDVNDK

SEQ ID NO: 22883 - protein, 548 aa, synthetic construct
MTIAWAYCRFSSDHQREESIDAQIRAIRDYCGRNRITLEKIYRDEARSATTDDRPSFQQMFSDIKEYPCDLVIVHKLDRFSRDRYDSAFYKRKLKERGIRLVSVLENIDGSPESIILESVLEGMSEYYSRNLAREVQKGKKETAYKCLHNGGVPPIGYQVDESGKYHVDPIESKWIIKAYEMKASGRSYMEIAAYLNGIGARTRRRQGFTKNSFHDLFKNEKYKGVYVYNRAAPKTAGKRNNHLSKSDEDIIRIEGGIPRIVSDELWNEVNMQMKDRTMNARHKAKRTYLLSGIIYCGECGSPMSGNARRAGRNKTEYITYDCNRRHRERTCRAKGINKKYIENLVISHLKNEFFTQENVLQLSQRIFDLQAQRKMEVTPELAALKAELAAKQKEMNNIIDSIKKGGYKDWMGDLGDEIDARIKYLEGKIQYSESIQERQILSQEQIYDYIMKDANLMEKSLEDLKQIVQTYVEKVVVFAEKIEIHLIINNHNPGGKSHLDCGYDGGSDGNRTHVRKHFHRSFSERSFCFKVSPQTSPKSRLYHQLSR

SEQ ID NO: 22884 - protein, 575 aa, synthetic construct
MNKIIDTLNTQKAAIYIRVSTHHQIDKDSLPLQREDLINYAKYALNIDNYEIFEDAGYSAKNTERPSYQYMMSKLRTGEFSHLLVWKIDRISRNLLDFATMYEELKTLGVTFVSKNEQFDTSSAIGEAMLKIILVFAELERNMTSERVSAVMLSRATNGQWNGGRVPYGYNYDKSTKQFSIHPIEGNYIKKLYDLYFETQSMLAVAKYFNEHGIKTKTGNNWSPTTIGKILASRFYLGEYQYNLHKDGIGGAGVASLKPEDEWITVKDHHPAIIEIEQWDKCAEIRAYNHRRSNAPKRYKRKNTHIFAGLIICGKCGSTYQATIDRARTGGYRPSIYLCSRRKQYSDCQNKYMSDITLGPFILNYISNIIKANANMGKTTTPDMFKKKLLRGDVFKDVKDIAPSGLNEMYNMIVSKKFNSDPFTSTVHRDESQPDFASERELLISEKRKYLRALDRLKTLYLYNDNAMAEKDYIIENKNILDNLKRVDERLEEIEKNSSQNFTITDSEFIEKASYFIISQELSNQRYINFNSLIQHIDTNVLKNFIQSVIKKIVVLDGRITSIQFKNGIEHDFLY

SEQ ID NO: 22885 - protein, 516 aa, synthetic construct
MARKKKVSPGNRLVAYYRYSGGSQQTEQSIEGQRRDCEAYARQHGLTIVHEYIDRHISGRGVESRLAFQQMIADSSKHLFDLVICWKTDRFARNRYDSAVYKKKLRDNGVRILYAAESSVEGPEGIILEGLMESLAEYYSAELAQKMRRGMRESALKGRAINPSRPLGLTTDEHKRFIIDEKNAPTIRFIFEHYAAGESSASIVEQLNAAGLRTSKGNAFNKCSIPRIIQNEAYHGVYICKAYDVRIDGAIPAIIDDDLWKRAQKMLTLNKQHRAPHSSHADYLLSGKLFCGCCHSLMRGISGHNCRNDVYYYYACGNKADGGTCKKKNIPKDVAENLVVNAICENVLRPDTLEDLADAIAAAQQADVNQPDPERAMLEQGLADVRRKINNIIESIENGTASSRLSARLADLEQQESTLNYQLESLKEIHPPVLDRERILFLLEQFLISPNERTEDYNRRIIDTFVNRIDITDTEMLIYFNLSEASASEKQKNSQPNSCSTGNHLVRVARIELTAS

SEQ ID NO: 22886 - protein, 562 aa, synthetic construct
MNRERVKVYTYKRVSTTMQIDGYSLDAQKSRIKAFADYNDYEIVREYEDAGKSGKSIEGRIQFNQMMDDIKSGKDGVSFVLVFKLSRFGRNAADVLSTLQVMQDFGVNLICVEDGIDSSKDAGKLMISVLSAVAEIERENIRVQTMEGRIQKAREGKWNGGFAPYGYQLIDGELQINEEEAAAIRVIYDQYVNTDIGSNGIAKYLENHGIRKIQRQNGKNPLFDAHLIRLILKNPVYCGKIAYGRRRTEKVHGTRNDYHLVEQDDYLLVDGLHEAIISEETWQAAQIKLLAQAKKYEHVNKGKDTRTHLLSGIVKCPICGAGMYGNKCIKHKKDGTKYKDFYYYGCKHRTMTRGHKCAYKKQIREELLDDAVAEVIVALVSKPKFASMMQEKINMKVDTSVLDQEIANHEKQLRQFYSIKSKLMEEIDSLDPDDRHYLKRKADLDDRLYRMYDKIEDEESQMIEARAKRQAIEAEKLTGDNIYKVLMYFDKLYSAMNDVERRRVMETLISEIQIYEDRQPNGQWLKSIKFKLPIIEEDMEISLDNDTHVETVVLMSKVNPNK

SEQ ID NO: 22887 - protein, 526 aa, synthetic construct
MPYCIYLRKSRADAEAELAGEGETLARHEKTLLALAKKLKLPITKIYKEILSGETIAGRPVMQQLLQDVEAGIWQGVLVMEVERLGRGNTLDQGIILNAFKYSSTKIITPMKSYDPNDEFDEEYFEFSQFMSRREYKTILRRMQRGREASVKEGKFAGSIAPFGYRRVKLPQEKGFTLEVEGAEAAAVKLAYELYAYGDPQPDGTFADIGRATIAKRLDQMGIRNRKGGTWATASVTRMLQNPVYIGKVHWNRRPEKKHTENGKIKKTRPLAENYLLVDGLHEPIISEELWNLAQAKMKQHYRPTGVNGIMQNPLAGLVHCSYCGNAMQRRPYLKTGQPASLICHTHFCPQISSPLYMVEGKILEALSLWMKQHEPTWEEESSADVFSTKIMALEHAIADMEQELQGLQSQFEKIFEFLETGIYTPEVFTARNKTLSEKMAEIRSAIEETQAELSKLKAARKNQVSMIPKIKNILDTYETLTPAEKNKLLKEVLDHVEYHKKIKGKKNVPADNFEIILFPKISPEN

SEQ ID NO: 22888 - protein, 514 aa, synthetic construct
MPKKNPSGGKRLVAYYRYSGGSHQTEQSIEGQRRDCETYARIHGMVILHEYIDRHISGKTDDRPEFQQMIADAGKGMFDYVICWKTDRIARSRYDSIIYKKKLRDNGVELLYAAEANVEGSGGIIVEGLMEALAEYYSAELAEKVRRGMRESALKGKAIGSSRPLGLTVDKDKKYIIDPAGAAAVRYIFEQYAAGAASSAIVAHLNEQGLCTSRGNPFNKSSVVRIIQNEVYRGVYVSPKFDVRIEGAVPAIIDDDLWERAQKMFIRNRQSRSPRNDRADYILSGKLFCGECGTAMKGVSGHSSNGEVYFYYNCPCKDCHRRNIPKDELEGLVIRTVCNDVLQPDVMDRIADSVIEAQTAELNQPNPEKEALQHELADVQRKAKNLLSALENGTAGAMLTNRLAELEQQANTLSYQLSSLESEPKFPVFSKEEVLYLLEQFLIAPSEKTKAYRRRLIDTFVSKIEVSNTELTIYFNIAEEDCGKMKKAPQSNQPEGCSTEKQMVRVARIELTAS

SEQ ID NO: 22889 - protein, 577 aa, synthetic construct
MRNKSLAGRASNRAERPRKVAIYIRVSTTHQIDKDSLPMQRKDLIAYCELILGIEDYEIFEDAGYSGKNTDRPAFQEMIQKIRAGSFSHLLVWKIDRISRNLLDFAEMYEELQSLRVTFVSKNEQFDTSNAMGEAMLKIILVFAELERNMTSERVTATMISRANQGLWNGGRIPYGYAYDAETSVFSIIQDEADICQLMKTDYFENKSIVHTARLLNDKKIPTRSGALWSPTAVWKILSSPFYAGIYRYNHYKGTENRTVNPEDEWVLVPDHHPAIFTLEEHEKLCNILDTNKRTANLPGQKHRAKNVYVFSGILYCGKCGSKLVSTPGRLQADNFRTATYSCPKKRKTHECDNPSINDLIVGEFIINYILNMLNAKSSFSSINSPAELEERLLYGGSFKDVQHISEDGLNEFYNLLSRYGSDSSYIFSVKRPRKKKAAVNPEVEVLRKDKEKQERALKRLQDLYLYSERAMAEKDFIIQKNEISSRIQEINTRLGMVTHDANSTLSDEDFVRQASHLLITKKLIGRDYIYYKTLAQTVSPDVLKIYMETILDSVYVIDGRISSIVFRNGLTHTFLY

SEQ ID NO: 22890 - protein, 522 aa, synthetic construct
MLHKVVTIPASVRCFSEQPIDSQKKRRVAGYARVSTDNPEQLTSYESQVKYYTSYINGRGDWEFVGMYTDEGISATNTKHRSGFKRMVSDALAGKIDLIVTKSVSRFARNTVDSLTTVRKLKEKGIEIYFEKENIWTLDSKGELLITIMSSLAQEESRSISENVKWGKRKRFAEGKGSLAYSHFLGYERGPNGAMVINRKEAEVVKMIYRLYLTGRSFCAIADELMKREIPAPAGGVKWHPSTIQSILKNEKYKGDSLLQKKFVVDFLSKRMKKNEGEIPQYYVENDHEAIISPEVFDLVQAEMKKRHSCRRGRYSGVNLFSSKIRCGDCGSWFGSKVWHSNDKYRKVIFQCNEKFKNSCHTPTISEDEIKDLFVLAAGKILDNKEEVISNIKALLDFVDDLPGKLQQAEKKVEQRLEEIQRYVAYNSRVALDQVKYQKNYEALVRKYEVAKGEYDRLQGESTKKSNRRQKLIKFIATLEQADQVISFEPGLWTLLVDHVTVYGKDDIRFTFKDGTEIKVGE

SEQ ID NO: 22891 - protein, 490 aa, synthetic construct
MPSRTAIYIRVSTQEQAMEGYSIQAQTERLQAYCKAKGWGVFHTYTDAGFSGSNMQRPALSQLLEDVEAGRVDCVLVYKLDRLSRSQKDTLHMIEDVFLANGCDFVSMSENFDTSTPLGRAMIGILSVFAQLEREQIRERMAMGRTERAKSGLWQGGGWIPIGYDYVGGNLVPNPVRAAAVRDIYDLFLAGTPITSIKLIVNKKYALDLADTTVRSVLSHRLYVGDIVWMGNVYKGQHEPLVDMVTFSRAQKLLHSRARIAASKPDPFKPRTLLGGLLFCGGCGARYLAKGNYSGRGNHRAYRPYYTCYSRAKTNKRMVIDPACRNPSYAVTMLDQRIIDEIRRIASDPQEFDAIVASGRPDAEQKRRRNAEAEAAIMRRLDEIDTNTARLLDLYQRGLAIDKIADRLDALDKEKATLQDSLQELRMEKKAARDEEERLEPERAHALLNEFLDAVDGDADLDTRRKLLGSLIEKIIVKRTPGDFDIYWTF

SEQ ID NO: 22892 - protein, 504 aa, synthetic construct
MEDFIYARQSVDKEDSISIESQIELCLREVGNNPHRVFRDKGYSGKNTERPDFQDMMAAVRAGGARRIIVYRLDRISRSVLDFANVISELQKYGVEFVSITERFDTSTPIGKAMLMIVMVFAQLERETIQQRVMDAYRSRSRKGFYMGGRVPYGFELENTVMEGIKTCMYKPIPEQIQVVQLIFSLYAMPQVSFADVVRYLSQNGIKNPNGKNFSRMRVRDIITNPVYAKADASIYEFFHGQGTEIINDISQFIGTNGAYLYTGNKAAKRKSISLDGHVLVLAPHAGCIDADTWIRCRRKCLNVRQIAKPVKAKNTWLAGKIKCIDCGHALSLKSYPRKRSADARYYICNSKYVSASCDGVGAIQASGIEDIVFDEMSRKLKEFNKLSYKEKHGDPIELTKLKIRAEEIEKEIATLIDKIVSASTATMEYINERIDALDEEKKTVKEKIAQMSAEMYDRQNIGVISDYMSKWNDISIDDKLTVVDTLIESIHVGHSKVKIAWKI

SEQ ID NO: 22893 - protein, 590 aa, synthetic construct
MKTVEKIERKLPVLKARKRVAAYARVSMESERMQHSLSAQVSYYSALIQKNPEWEYAGVFADYGISGTGTKKRDEFNHMLAECEAGNIDIILTKSIQRFARNTVDLLNTVRHLKELGIEVRFEKEKINSLSGDGELMLSILASFAQEESRSISENVKWGTIKRFKQGIPNGKFSIFGYEWQDDKLVIIPEEAEIIRWMYAEYMKGASRIEIGRALMDRGIYTRQGKPWVDSNVKVILTNITYTGNMLFQKEYCEDPITKHRRKNYGEMPQYFVEDTHEAIIPMDEWQAVQDEFKRRRDLGPFGNKSLKLSAFSTKITCGCCGKHYRHSGKRNTAGEVYYIWTCQTKSQKGASACPSKNIPEKMLQNTAAEVLGLDEFDEDVFSQQIEEVIVIGDDTLTFRFYDGHEVTTKWQSTAKTDWWTDERRKLWGERHKRKDTNPNRNTFYEFTGFIKCGCCGANYRCQSGKRKDGTPTRSWYCTGPRSECRNPAIRDETMKRLVTEILGLDEFDEAAMDAQIESATILDHMVTFHFRDGHIESRDFLDKRHGTPWTEERREKAKKSMKAAWTDERREAMSERIKKIRSEKKWPNP

SEQ ID NO: 22894 - protein, 524 aa, synthetic construct
MSRVTIIPAKLDRATFMPLDKPKKRRVAGYARVSTDSEEQLTSYEAQVSYYTEYIQKRDDWEFVNVYTDEGISATNTKHRDGFNAMIADAWAGRIDLIVTKSVSRFARNTVDSLTTVRKLKEKGVEIYFEKENIYTLDSKGELMITIMSSLAQEESRSISENVTWGQRKRMADGKVTMPYGRFLGYRKGEDGLPEIVPEEAEVVRMIYRSFMDGLSYYKIAQLLMKRNIPAPSGGEKWHRRTVESILTNEKYKGSALLQKKFTVDFLTKKQKVNEGEVPQYFIEDSHPLIIEPEEFELVQAEIARRKKIGKVYSSSNIFSTKLVCSCCGGFFGSKVWHSTSKYRRVIWQCNHKFQNGEKCKTPHLYEDEIKKRFIEVCNRIAADKENFVASCRQIVDMLSDCSAFDKQIGTLQIRADELTAVMQAFIKENAENAQDQKLYSQRFAEYEKQMNEVESNLQSLQHKKAERLSWKELLLGMIAELEKTDMMIHEFDEKLWRLMVEKVVVGIEGELTFTLRNGMEIEV

SEQ ID NO: 22895 - protein, 444 aa, synthetic construct
MGDQTSGRNRIVTRVQFPNAQKVKLLRTAAYARVSSGKDAMLHSLSTQVSYYNSLIQSNPAWLFCGVYADEALTGTKDNRENFQRLLTECRAGRIDLIITKSISRFARNTVTLLETIRELKELSVDVYFEEQNIHSISPDGEFMLTLLGSYAQEESYSASENQKWRIRKDFEFGKVSTVIMLGYKRNSEGVLEIIPEEAETVRMIFADFLNGIGRQSIANKLNELNILTKNGCQWTSEAIRRILNNEKYCGDLMLQKFYSENHITKRKMVNNGVLRMIQVEDAHPAIIDKETFLRVQELLKAKQDYFTPDKPTNVTYPFTGMIHCGCCGKYYRRKVQKYRTLWICWTYNARGKKFCPESKQIPEDILYDKVCEVLQLDEFDNEVFQSEIENILVSKPNVLTFLFKDGHEQTVRWLDHSRTEAWTPEMRKKAAEHSKKRGKKCQE

SEQ ID NO: 22896 - protein, 531 aa, synthetic construct
MLAYGYCRYSSNLQDEKSIEQQKNELEEYAKKNNISIIKYYIDEAKSGTKDTRDSFQNMISDACKSKEIQAVLVWKTDRFARKAIDSLYYRNKLEKVGIKLISITQPIDTETPEGKLMSTMLAGVDEYYSQNLASNVKRALKLNAQNAQFNGGIAPLGYDIVNKKYVINEREASSVRFIYDMYIEGYSLIEIALKLNSMGFKTKKNKPFSKTSIYDIIGNEKYIGKYIFNKGTKSNHDGIRADAIILEDAIPQIISKEVFEKAMNKRTKRKNAENTAKNFYLLSGLIKCECGGSYVGTTIKKQKNGNTYVSGYYRCSNHNKLGKCQMPSLKQELIENKVIKMLTEELLNAETRENIVKAVNAQYIEAQKDCKNDVEILKENLSSINQEINNIVNAVAKGYATDSLLKRLEEIENTKKNIEDEINFKDNIATHNYITSEKIEEVLKKDLSELKDKSKEKLKILVQKYIKKIEVKTTEVLIYLDFGESSPKKLVAKMWFEHMTLRVWTECSSQLSYFAIWNLYYYNKFKRVCQ

SEQ ID NO: 22897 - protein, 523 aa, synthetic construct
MVSFDNIIIYLRKSRSDDPVQTVEEVLAKHERILQDYCMKEYGKAIPEKRIYREVVSGETIQDRPIMQKLLKELETDNISGVLIVEPQRLSRGDLQDCGQIINSFRYTNTAVITPTKTYNLSDEYDRKFFEMELTRGNDYLEYTKKILNRGRVASVKQGNYICSVRPYGYKKIVIGTGKDKCHTLEIIPEEAEAIKLMYHLYLDENMGFTNIARTLDSLHIKPLKSNNWSAATIRDMIDNPIYIGKVVWNSRKVVKKWENEQITKIRPRNKGDDVICVDGKHEAIIDEETFNAARQKRGLTPKVRKFKELRNPLAGILFCSTCGHSMSMKKYVDKRSHTGKVTTIMLCNKQAVCHTKSAQYEQIVAKIKESLADAIANFEIKMKEQENNNIDIHKQRITSLKDELNRLYNKDVRQKDAFEDGIYTKEEYIERNSKLQSQILNIKAEIENEKNNTPVIIDYKNKITTFTECLTSLDDDSISAADKNSLLKNCIDKIIYHNDMPSLPGIGRYIENSFRLEIFLKM

SEQ ID NO: 22898 - protein, 526 aa, synthetic construct
MPKVTMIPATINPLTHLPSVAARKRRVAGYARVSTDSDEQFTSYEAQVDYYTKFIQSKPEWEFVKVYTDEGISGTNTKRREGFKEMITDALDGKIDLIVTKSVSRFARNTVDSLVTIRKLKENGVECYFEKEGIYTFDGKGELLITIMSSLAQEESRSISENITWGQRKSFSDGKVHLPYKRFLGYEKGEDGRPAVVESEARVVKLIYRLFLEGKTQAGICKYLEELGIPSPGGKSKWSKTTVTSILQNEKYKGDALLQKKFTVDFLEKKMKPNEGEVPQYYVTGSHPSIIEPDEWEQVQAEFARRKTLGKAYSGKSVLSAKLVCEDCGAFFGPKVWHSTDQYRRTIWRCNGKFASEEHCHTPALDTETIQRLFIKAYNLMMQDRVQIIKEIEAWQQKLMDFGALDADIERQLEETQVVAELVKAAVKENASTAQSQEAYLKKYEALTERYEKAAAELERLQSLRTARSQQDKKMALYIRTLKKQPEVMHDWNDTIWTVMIEKAIVHKDGQITFVFQNGTEIKVGA

SEQ ID NO: 22899 - protein, 433 aa, synthetic construct
MPRAITIVPKPPKLEQKKRVAAYARVSSGKDAMLHSLSAQVSYYSDLIQNHDDWLYVGVYADEAKTGTKESRADFQRLIADCRAGKIDMVITKSISRFARNTVTLLQTVRDFKAWGVDIFFEEQNIHTMSGDGELMMTILASYAQEESRSASENQKWRIKCNFEEGIPWNGVMLGYRLKNGRYEIIPEEADLVRRIYNEYLFGDGYLTIAKRLNEDGIPSRFGKQWGQSVISKILSNYTYTGNLILQKTFRENHITKKTIINNGELPKYHAEDAHDAIIDMETFQAVQAEKTRRAARFLKKPAPKKAYPFTSLLVCDGCGKNYRRKVTKTGPVWVCGTFNSMGKAACASKQIPEETLQAVTAEVLGQMDFPEELLRRLIKSILVCNGNVLIFRFFDGSEITRTWQDRSRRQSWTDEMKATARQKALERRNQNA

SEQ ID NO: 22900 - protein, 498 aa, synthetic construct
MPEALNAVIYARYSSDRQTEQSIEGQLRECYAFAKANDIAVIDTYIDRAISGKTDNRPAFQKMIEDSAKRQFQAVIVYRLDRFTRNRYDSAIYKARLKKNGVKVLSAMENLNGSPESIIMESLLEGMAEYYSVELSQKITRGMRENALKGKALGGQRVLGYKVNSDCYFEIDETTAPVVVDIFKLYSSGKTVKEICDILNARGVKTARGGAFNKNSLHTILTNKKYIGIYKTKYGEIVGGIPAIIDKELFEMVALRMEQNKKAPARAKAEINYLLSTKLFCGKCRSAMVGESGTSKTGKKYYYYACVKKKREKACDKSNVKKDWIEDLVIQRTVTDILKDDVIDKIADRLVELQKAEAAESGTMLYLENSLAEIQVSIKNIMTAIEKGIITESTKTRLTELEDEKRNVEIEIAKESIARRIISREQIIYWISSFKDGDITSEKYRQQLIDTFVHAVFVYDDKIVITYNYSGENNTATISDLDLSSPPKVKKSEHYHQW

SEQ ID NO: 22901 - protein, 538 aa, synthetic construct
MKKENEIRAVVYARYSSHSQTEQSIEGQISAAQVYAKAKGYTIVKEYVDRAKTGKNDNREAFQQMLSDTAKHEFSVIIVWKVDRFGRNREEITFNKYHCKKNDVRVEYIAEAVPDSPEGVILESVLEGMAEYYSLQLAQNIRRGIRASAEKCQAIGGHCSLGYAIDPKTKKYVIDPDTAPTVQLIFEKYAEGYTGMDIVRLLNEKGLRTVRGKPFTKNSLWTILKNERYAGVYLFKDEVRVEGGIPALVSRETFDRVQEMLEINHRSPVNTWNRATYLLTDKLFCGHCGSKMVGECGTSRTGATYNYYICAGKKRERNCSKKAVRQDWIEKVVLQQIRRVLFDQEFLEFIAHKAYTYYLEEKKKLDQSAAIKAQLSSVESSIDNLIRAMEAGIFSASTKSRLDDLENQKAALTRTLAEIKLSEESFDLTEDRILFFLESMRGLDMDDVDSRKRLVKTFVNAVYLYDDKITLAFNFTDSCEKPEIIELTDIADGVVEKFVHRASCSTIQFVPEPDSLRKRVRVLFCFTRCSLCREYAER

SEQ ID NO: 22902 - protein, 559 aa, synthetic construct
MASNEKYTVLYGRLSQEDTQKTNKTDDSNSIQNQKLLLEKYAAEKGFTNTHFLYDDGYSGTNFNRPGWQHVMELMENGQVETLIVKDMSRLGREYLQVGQYTELIFPSYGVRFIAVNDGVDSLYESTNDFTPFRNLMNEFYAKDCSKKGRSVVRLKAETGARVSSRPRYGYMKDPADPKRHMVPDPEAAPVVRYIFDLCVSGKGPAQIAKQLKKDKIPTPGYSYYQKHGVELTGVDITQPYNWSTNTVAGILEDETYLGHTINLKSTTLSFKNKKRIERPESEQLRFENTHEALVTQQTWEIVQDIRKHKRRRANMAEQNIFSGLVYCLDCGGTMVLHRAHTMDAVKNNFMCSTYKKKGKDVCSGHYIREQELSAILLDDIRRVTHFARQNELRFAEHIRKKQGKEAQQEIAMLQKKIDTMQKRQAELTKLFKRLYEDSVLGRIPDEQYRILSQEYTTEQKEIQEQLPAMEVRLQELKDSSSNIARFIENAKRYSEIPELTAEILRIFIKRVEVGERTEKYSRTAPQEVRIYYRDIGLVDELPENVADALKEEIPNEVA

SEQ ID NO: 22903 - protein, 496 aa, synthetic construct
MNAAIYARVSTDWQAEHGYSIETQLESCRAKAKEIGAAVIKEYIDDGYSGGFLERPGLDALRDAVSDGLYDVVIFHDPDRMARKLIHQLIITEEIEKAGAAPVFVLERFDASPEGQMNYQMKGVFAEYERAKIRERTMRGKRAKLRAGKAVCDSHIYGYDFDRTSSSYVVNPAEAAVVRRVYKLYVEDRVGGCEVIAEILNADNVPGPTGGKWQASSVRNMLSRSHYTGRYYANTTYHKKTGPRSEKRLPRPREEWIEMSCPQIIPPALHEKALAIKSGNRTYKVWKRNEKVALLQGIGFCGACGQRLRVSGGGKRGRRFYECRSVRDKNIERCSARLMEIPVVDEIFWNALEKICRNPSALEKYIEDRVDGTRASNVEKPARLAKRLEKIRAEKKAVMTWFSESLLDQSEATERLSVLKSEESRLQSELAALEESPAREPEHLSAGDIAAAVSACPLDLAARRRVILAVVERVDVLRRDYNYGHKYIVDFNIVFK

SEQ ID NO: 22904 - protein, 525 aa, synthetic construct
MPTERKKKTTKEENAKNNSTKNTIKKPRNSTSNTKSKKESKSLLGLKDLMEDTSPEKVVGCYVRVSTDAQAEQGYSIPDQTAKLQAFCTVKGWENAKFYTDPGFSGSNLNRPAMQEMISDAMEGKLKAVVVFKLDRLSRSQKDTLYLIEDVFLPNEVDFVSISEALDTTTPYGRAMIGILSVFAQLERENIYMRTRIGMMGRVSAGYWRGGGNVPFGYDYDKTSKSLIPNADAPKVPQAYDLYIKGYSCQKIADMLGLSSEQLVRNILTKRTYCGYINYKGKDYKGFHEPLIDEERFMLVAAEMERRGKENLAVCGNNKYYLLTGLVFCGDCGARMRYMKWGKYIRIVCYSHTCKKNMVKDPDCPNKGVRADELEKVVISKLFDIGTDISLDDFDDTHVPASAAEILTNRIDELKESLRRLYGLYADIGDPMVYERIEDVRGQLHVLQRQLASEETQKLKEEHINYVREKIQTIGDLWPHLTPMERQTLVRDCVEKVILHHNGRVEVYYTFHTEKDSKILKRKGA

SEQ ID NO: 22905 - protein, 441 aa, synthetic construct
MAKIKIIPKEKEMPKLKKVAAYARVSIDTDQMLHSLSSQVSYFSEFIQSHPDWQYVGVYYDRGETGTKASRGDFQRLLGDAKKGLIDIIITKSLSRFARNTVDCLKAIRELKAIGVDIYFQEQNIHTLSANGEFLITLLAGYAQEESRQCSENVLWRVKKNFNEGRLASKYDCLGYKVENKEFTIIEEEAKIVRKIYDLYLKGYGYYKIAKILNEEGLRGKQGGLWSKSSINQILNNEVYTGKLVLQKTYSENHLTKRRMVNKGERQKYVVDGNHEPIISLEDFNKVQELRALKRKDPSSYVPKGPKRDFIFTGLIKCGICGSTYRHKQGAHKIFWKCNTFLDKGKDYCASTSLRDDCLRKACAKALDITVFDESKFKQNINFLETYPGNKLVFHFTDGNAKEVEYEPPKKRCEWSIEAINKARERSKLQYAKRKNNTEQN

SEQ ID NO: 22906 - protein, 529 aa, synthetic construct
MNRTAARSVTVIPPTINPLTHLSRVTVQKRRVAGYARVSTDSDEQFTSYEAQVDYYTQYIKHNPEWEFVKVYTDEGISGTNTKHRIGFNEMIADAMSGKIDLIVTKSVSRFARNTVDSLVTIRKLKEKGVEVYFEKENIYTFDGKGELLLTIMSSLAQEESRSISENVTWGQRKRFADGKVNLPYKQFLGYRKGADGFPEVVPEEAIVVHRIYTRFMEGLTPGAIAKELTADGIPTPSRKQRWQTSTVESILQNEKYKGAALLQKCFTVDFLTKKRKVNEGEVPQYYVEHSHEPIITPEEFDKVQTELARRKQISRQHSGKSIFSSRIICGDCGSYFGSKVWNSTSKYRRVIWQCNGKFKGEHKCETPHLDEETIKARFVAALNAIIESKDNILEDCRLMQATLTDCTGIDTEIESLLEEIDVVTELTKRCIAENSQTAQNQEEYAARYNGFVERYEKAKARLEQLRTTKAAREAQAEAIGAFMFEVQELDALTEFDEKLWLTIIDTITVHADGRMTFKFQGGKTLTSY

SEQ ID NO: 22907 - protein, 434 aa, synthetic construct
MERVVERVDALIPAQPRALRVCAYARVSMGKDAMLHSLSAQVSYYSKMIQNHSGWMYCGVYSDEAVTGTKRERAGFQYMIEECRQGNIDLVITKSISRFARNTVTLLQTVRELKSLGVDVFFEEQHIHTMSADGELMMTILASYAQEESLSASENQKWRVRKAFENGEIINLRFLFGYDITPGGIQVNEKDAAIVREIFARFNGGESMSSICRDLDARGHKGVLGGTWCAERMRNTLSNEKYLGNALLQKRYRNNHIEKKLLPNRGELPMYYAEGTHEPIIDQATFDKAQERLRMLAQQAANRKKPTRSAFSGLIRCGLCGNTYKRITYHKKHYWNCTTFQTKGKSECAAKRIPEETLEVLTCEVLGAVSFDPDMVRSKITAIRAEKSNMVVFCMDDGSEIVKRWTDRSRAESWTPEMKEKARQRALQARRKKE

SEQ ID NO: 22908 - protein, 684 aa, synthetic construct
MSILQTIKTIIRVVLYLRLSDEDKNKLSKEELSQSIKNQEIMLRDYAEEQGWEVVGVYNDDDWSGSDATRPDFNRMIEECKNGNVDIVLCKTQARFARDMELVEKYVHNLFHEWNVRFITVVDRIDNARKETKKTSQILGLTDQWYLEDTSLNIRETLKSKRKDGQLTSSFATYGYMKDPENKNHLIIDPISAEVIKRIYDEYLSGTGLDKIARRLNEDKILSPYEYKLLNGSKLKIPVIKDYVNYGYIEKTGTYMLDVSFTNKEEYILKDLVSFNYITTDMKSFNNKCDIVLKKYTNNRTKIYYSENDNIDINNFNIDDCILLNENDVIPKTAKAIISYTKELDRTHTINYQFEITLKENREHEDYYINICGKATDEIKKSDFIHNIRKKFKWSSSTIRTLLTDEVYIGNMVQFKSTTVSYKNHTVVWNDDETRIRKDNTHEPIIAKDIWYTVQERLENTARSCKGGTVHPLCNKVYCSNCNQIFTKTGNRRSDGTGYLCCKDKKTNWSNCDNKASIREDQLHQFILEKMNEMLKKFYEEDDLKEMQNEVIEQDLYKDKLNSLEKELKSINKELQGKSTYFQKLYEDRTNGILPEKEFLILMNKYKDDNEKLEERQKIVKKEISSTLAKKETIKAKKNIFKKYRHIEELSIEIVEDFIDKILIGSYDETTNSRDIKIIWNFTI

SEQ ID NO: 22909 - protein, 467 aa, synthetic construct
MLKAALYARVSSEEQAKRENSIPAQLRALREYCRKNNIEIFKEYKDEGITGQISKRPAFQQMLSAAFSGKINVILVHKFDRFARKVELSRSVKNSLQAAKVNVVSITEPIEDSPMGFFMEGLYELMAEYYVRNLSAEVFKGMNERALKGKHMGQMPYGYYCKDGNVYVNETQAEVIHKIYRFYDEGWGHMKIAKWLNESKIPTYKGIIGGWQTFQVKQILKNSKYIGENLWNGTVYPADFPAILELALFHRVQEKSNLMTRTHTYRGNNYTKHHLLGLLYCGECGSIMRVKPNQDWQRRKFDTYTCRDASQYRGDCRFTKIFDATKLESEVDAYLRSVLAGAPISLIVSKDAEKVKPADASKSQIEKINAELKRAKDAYLSGVFDLDEYREIRQGLENNKKIIEAETKNVPAPLRANEKEDILRKKIKSAWDLYKNVQTAEEKRTILKTFIHKILIYRDRWEVVFYI

SEQ ID NO: 22910 - protein, 528 aa, synthetic construct
MSTATVRSVTIIPPTINPLTHISMAATRKRRVAGYARVSTDSDEQFTSYEAQIDYYTQYIQRNSEWAFVKVYTDEGISGTSTKNRTGFNEMIDDAMSGKIDLIVTKSVSRFARNTVDSLVTIRKLKEKGVEVYFEKENIYTFDSKGELLLTIMSSLAQEESRSISENVTWGQRKRFADGKVNLPYKQFLGYRKGADGLPEIVPEEAAIVRRIYARFMEGLTPHTIAKELTADGIPTPSGKQCWQTSTVESILQNEKYKGAALLQKCFTVDFLTKKQKVNEGEVPQYYVEHSHEPIIVPEEFDKVQAEFVRRKQFGLQYSGKSIFASRIVCGDCGSFYGAKVWNSNNKYRRVVWQCNNKFKGGHRCETPHLDEKNIKARFVDAFNAVLGGKDGILADCRLMQTTLTDCTGIDAEIERLLTEVDVVTELTHRCISENAQSAQNQQEYTARYNSLVERYEKAKTQLEQLRATKTAREAQAKAIGAFMFEVQELDAFTEFDEKLWLAVIDKVTVHTNGRMTFHFRSGTEIDA

SEQ ID NO: 22911 - protein, 443 aa, synthetic construct
MSHTKEVNDMERVIERVDFQIPMQPKALRVCAYARVSSGKDAMLHSLSAQVSYYNSLIQTHAGWLYCGVYSDEAITGTKSQRDGFQRMLANCRAGEIDLIITKSISRFARNTVTLLETVRELKSLGVDVFFEEQNIHTMSADGELMLTILASYAQEESLSASENQKWRIRKAFENGELVNLRFLFGYNITASGIQVNEREAAIVREIFTRFNGGESLSAISRDLNDRGCERPLGGTWCAERIRNLLSNEKYTGNALLQKKYRNNHIDKKLVPNRGRLPMYYVAGSHEPIIDQTAFDKAQVRLNEMARQAEKREKPTRSTFSGLIRCGLCGSTYKRVTCRGKHFWNCTTFQTKGKAECPAKKIPAETLEALACEVLGTEVLAPDMVRSKITMIRAEKNNVVVFCMDDGSEIVKRWKDRSRAESWSPEMKEQARQRALQTRRVQK

SEQ ID NO: 22912 - protein, 545 aa, synthetic construct
MQAAAQVTPPKVVHTIPAKIDLQEEVKNARKQLRVAAYCRVSTKQEDQLNSYDVQRRAYTDKINGEHGWTMVGIYADKGITGTSVKKRDEFNRLMRHCKQGKVDMIITKSVARFARNTLDCLKHTRLLKEHNVDVYFEEQGIHSIQPGAEFYITIYGSIAQSESENISANVRWGKAQSAKEGNVPFQYKRFLGYRRGSDGKPEIDPEQAVVVKRIYERFLAGDSLATIANDLNADEIPTPSGIGQWQRGTIASILTNEKYKGDAILNKTYIRDCLSKKVVINNGERPKYYVENNHPAIIDSATFGRVQEEMARRNGKRKVKQVGTKTEQGRYSSKYALTELLICGECGTPYRRCTWAANGKKKIVWRCISRLDYGKKYCHNSPSIEENVLQEAVMKAVLQTAQQNVEVLKTLKLHIGMGLSADVTEDNSLDLQIKIAEIEAEFQKMLKAIAADNVEAFDEEKAKALMDEKAKLQIQLDRIADTKQKRENAKSRLDEIFVILEALVNHPISYDDQIVRQILESVVVESKEKIKVVFIGGLEVTQLL

SEQ ID NO: 22913 - protein, 511 aa, synthetic construct
MNVIEITAEKETAQETIRLAAYCRVSSDSEDQLHSFAAQIRYYKNYERRNPQYKLVDIYADEGITGTCMAKRDDLHRLIRDCKKGLIDRIIVKSVSRFARNTSELLTTIRFLKDIGVSVYFEEQGIDTDKLNSEMIVTFPGMAAQQESEAISGNMRWSYKKRMESGEFNCCAPAYGFNLVDGSLVINETEAAVVRRIFSMYLQGYGKQTIANKLNEEGVPRRHGVKTWYAFGIDYMLNNERYMGDALLQKKYTTDTLPFRRKENRGECPQYYVENANPTIVSRETYAAVQELQKSRQKNAGGKKAAYPLTGVLRCPDCGRTYRRQLVRGKAYWICSGKASGATTCSSRRMAEPDVYEAFSRMLFKLKEHHPMLLGTLIRDIETMQSKTSENHEKIAEIDKEIADLAARNLVIARLHTSGILNGSDYSAQSSEINNRISALRSERRKKLAEDEGDEQLDKLKELQGILDEYEPIAAFNEDLFNQIVETATVMSRSEIIFQLIGGLKLTESIA

SEQ ID NO: 22914 - protein, 548 aa, synthetic construct
MSTGIELRAVFYARVSTEEEKQLNALEKQIHENKDVIRDHGWRLVGEYIDEGKTGTTTKRRNDYKRLLKDMTENKFDIVVCKDQDRLQRNTLDWYLFVDNLVTNNLKLFMYLDNKFFKPSEDALITGVKAIIAEEYSRNLSKKLNNSNKRRIERALNGEEVSAMGNGKSLAFKIVNGKWVKDEEEAKLGKKIFELYLEYDSIRKVRDWVNEHGYTNSVGKPFTSESISRILKNEKAKGVIVMGKYHHDFDKKKIVRRSEEELVRIPAPELAYVSEEVFDKVQERLKAKTGNGRGVNAYSDPLSGKIYCGSCGRKLWKHASNGYVNWMCASQVAKGAVECNGTRITTVAIRNIYKKITDNLEVNKEVVKQDIVKWLNELKATLSDTSVNEKIQKDLDKLEGKRAKLLEAYLEDLISKDDYKVKYETIEGQIEEKKKLLVPVEENEDIKAIESVLQNIDDEIDAYVKTLDMEESKVDFLIEHTKRITVLENRDIIIELDLVAGAIIAGKDFLLYVHDTMPQHHGPKHLHPSGPQTAPRCCFRDRFSCDQP

SEQ ID NO: 22915 - protein, 550 aa, synthetic construct
MNNNTSNYLVYAIYSRKSKFTGKGESIENQIELCKNQLINKYNIKEENIKIYQDEGFTGYNTNRPQFQEMIKDIRNKKIKCVIVYRLDRISRNVTDFCNLKNEFIKYNTDFISVTENFDTSTPMGRAMLMISSVFAQLERDTIAERIRDNMYELAKTGRWLGGNTPLGYKSEKVETLSVDGKRKNLYKLDIVFEEAEIIKLIWNKMCELKSLSKLEVYLLQKGIKTRNGNNFTRFSLITILKNPVYVVADNKIKDFFEKMNVTIYETDIEKCNGINGLLAYNKREELMGKTKSYKDITEWIIAVGKHQGIIPSQQFIKVWNLIVNNKDKRCRVPRQNTSILSGIIRCKHCGNYMRPRLRNTVTIDNKRNFSYLCVLKEKSRKRLCKCKNINGIETDMIVIEKISELKLPTNMLINKIKLLINNKEKKSDKRINELQTLNTILSRNKRKVEALIDKMAIIDGELIADITAQIKSIKSKNLEIEKRIIELSKEMEKEIDKDEVTVLALNIINKYMSSFDSLNIVDKRLMIKSLVNTIESDGENIYINYMGCP

SEQ ID NO: 22916 - protein, 535 aa, synthetic construct
MKRVANLYRVSTKKQVDLVKDDIPMQRIACREFAERQGWTVVIEKEEKGISGFKVSASKRDAIQELKDSALKGEFDVLLVFMFDRLGRIENETPFILEWFTEHGIEVWSVNEGQQKIETHSDKLMNYIRFWQASGESEKTAAIRVRTRLQQMTAEGIYTGGPVPFGYQLVDNGRRNKKGKCALDLAIDPVTAPIVLKLFTMVADEGYGSHQLAEWLNRQGFKTSTGSRFHSSNVLRILRNEIYRGFMVRGNARSERIEELQIVPDQLFFRVQKILEERACKEEHKRTVCRTNKSQSLLGGNLFCGHCGCRLVASRRTERTVHKDGSVKERNYGIYVCYHRSRGLNDCDGATTYIADRVDKCVLQTVHEIFANIAGCPEEEKIQLAFKRSVEASRLEQLKLTEQIAKDEKQLDTLRAEIANALTGNSVYTSEDLSTAITAVRTRIDESRERLKTLQDEEEQKKVMSDGIIPAYRRFRTWALEFDETSLEGKKMIINELFSRIELSKDYKVRCYVNFTYKQFCTEWATLEQKINATA

SEQ ID NO: 22917 - protein, 590 aa, synthetic construct
MGLFLLYGKIIMRNKSLAGRANNRAERPRKVAIYIRVSTTHQIDKDSLPMQRKDLIAYCELILGIEDYEIFEDAGYSGKNTDRPAFQEMMQKIRAGSFSHLLVWKIDRISRNLLDFAEMYEELQSLRVTFVSKNEQFDTSNAMGEAMLKIILVFAELERNMTSERVTATMISRANQGLWNGGRIPYGYSYDAETSVFSIIQDEADVCQLMKTDYFEHKSIIHTARLLNDKKIPTRSGALWSPTAAWKILSSPFYAGIYRYNHYKGTENRTINPEEEWVLIPDHHPAIFTLEEHEKLCNILDTNKRTANLPGQKHRAKNVYVFSGILYCGKCGSRLVSTPGRLQADNFRTATYSCPKKRKTHECDNPSINDLIVGEFIINYILNMLNAKSSFSSINSPAELEERLLYGGSFKDVQHISEDGLNEFYNLLSRYGSDSSYIFSVKRPRKKKAAVNPEVEALRKDKEKQERALKRLQDLYLYSERAMTEKDFIIQKNEISSRIQEINTRLGMVTHDANSTLSDEDFVRQASHLLITKKLIGRDYIYYKTLAQTVSPDVLKIYMETILDSVYVIDGRISSIVFRNGLTHTFIYQK

SEQ ID NO: 22918 - protein, 503 aa, synthetic construct
MNNRIDAIYARQSVDKKDSISIESQIEFCKYELKGGNCKEYTDKGYSGKNTDRPKFQELVRDIKRGLIAKVIVYKLDRISRSILDFANMMELFQQYDVEFVSSTEKFDTSTPMGRAMLNICIVFAQLERETIQKRVTDAYYSRSQRGFKMGGKAPYGFHTEPIKMDGINTKKLVVNPDEAANIRLIFEMYAQPTTSYGDITRYFAEQGILFYGKELIRPTLAQMLRNPVYVQADLDVYEFFKSQGTVIVNDAADFTGTNGCYLYQGRDVKPSKKNDLKDQMLVLAPHEGIVPADIWLACRKKLMNNMKIQSARKATHTWLAGKIKCGNCGYALMSIFNPSGKQYLRCTKRLDNKSCPGCGKIITSELEAVVYQQMVKKLEKHKTLTGRKKAAKANPKIAALQVELLHVDSEIEKLVDSLTGANNVLLSYVNVKIAELDGRKQELVKQIAELTVETISPEQVNQISGYLDTWDDVSFDDKRRVVDLMITTVAATSDSLNIAWKI

SEQ ID NO: 22919 - protein, 464 aa, synthetic construct
MNSTYFRPQPELFGLRVVKYIRCSHDGQVLHGDTLEAQDALLDEFIKVNRMVLIDTFIDEALTARKKFTRRKEFVRLLDGVRSRSFDMILFTKLDRWFRNIGDYHKIQEILEENGVQWKAITESYDTTTTNGRLHINIRLSVAQDECDRDSDRIKDVFAYKLKNKTYLSGSLPRGLKLDDEKHVIIDPEWKQFALDMFDHFEQTNSKRGTLLYLKEKYGIYLCYDTISRNLRNSLYKGMYRDDPDFCEPLIEPERFDRIQVLGKRNVRQRYSNRTYIFTGLLICSSCNHYLVGQTTHRTLSDGTEKHYPSYRCNQRYQSHSCDRNRSYREDYVEEYLLQHIRPALSEYVAEYEVTGTTPARKNPAAEAAKIRTKMQKLYELYMDDLIDRDTYKRDYSAFQEKLKELDSIVVAPSRDLADLKKLLEQDYEEIYRTFSPQEKNAFWKSFVQSITVHEDGEMDIVFL

SEQ ID NO: 22920 - protein, 524 aa, synthetic construct
MNKLRAAAYCRVSTDRAEQSGSLASQRSFFDDYIRNSDSMTLVGVFYDEGTSGTTTLNRYGFNKMISLAVSGGIDIILTKEVSRFARNTVDTLNITRMLRAKGVGIIFINDNIDTRDSDGELRLSIMATIAQEESRKISERVKWGQQRKMEQGVVFGRSCLGYDVKDGKITVNADSAEIVKRIFTEYTVLLKGAESIADGLNAEQIRTVNGGRWSGAFIRKVLRNVKYVGDLEQKKTCTPDFLTHKKRLNRSEHIYIRNHHEPIISRELWEQTQAEISRRKPTDTSRHSDRYVFSGKVYCGVCGSVMVSRVKTLKNGKIYHALRCSGRIGGKSCNNETLNVTALKACVKRIFTDMPIDKTAVINAVIKGLSRTDKPDIPALRRKIETLNAKKRRAVDLMLDGLITQQELIEQKSYYDSIIEKLSQEISSDRSVFETDKIRKNAERFLDFTSDPLWLLVIRADYIHGTLTVYLKGIENGFTTCFTATGRGDSYRVITGNTVRSQGIIPGTMQVQKNRCRHDVNDK

SEQ ID NO: 22921 - protein, 524 aa, synthetic construct
MGDKMKRVYCLYRVSTKGQVDKDDIPMQKTSCREFAERNGWTILKEFQEKGVSGFKVSASDRDAIQDLKAAAEKKEFDVLLVFMFDRIGRIDDETPFVVEWFIKHGIEVWSVNEGEQRMDNHVDKLMNYIRFWQANGESQKTSARVKTRLNQMTMDGKFTGGVAPFGYKLIKSGEINKKGKELMDIVIDDDEAPIVKKIFEMTVKEGYGSYRMADYLNSHGIRTHNNSKFQCNTVNRILKNRLYCGYLVSGGIESPYIKRLHIIDENIFDRAQFILRQRSSKNEEKQQIARTTKGSTLLSGNIYCAHCGQKMVSTSYIDRYDRADGSQYRVRRQRYICTNKAMKRGACDGQSAYVAHRIDGVVLATLRDYLAKIKSTPKDIALEKRYKSEISEYRRKQTKLEKEIEKLKRQVVELSAEIGRSLLGESRFTPDILSTSIDNTNDLLHKKEIELNDIKFKLANQQNAMDKLDFYYSQFRTWADEFDNSTMEQKKMIACQLIREVKVSRGYELEIVFDLNYEQFLSL

SEQ ID NO: 22922 - protein, 572 aa, synthetic construct
MASRIAEKLAAKKAAIYIRVSTHWQVDKDSLKVQRRELIAYVTLVLGITDYVVFEDPGYSAKNTDRPEYQAMMDRIRTGEFTHLVVWKIDRISRNLIDFAAMHDELQSLGVTFVSKNEQFDTSSAIGEAMMRIILIFAELERKTTAERVTAVMLSRASDGQWNGGRVPFGYSWSKEAKTFSIVPEEAKAIRRMAELYEQYQSLLYVAKYLNDAGIVTKTGGQWTPTTVRTILTNPWYIGQYVYNVHSDGKGIEKRDSDEWITVENHHEPILNEDVFCRMKFLLTRNKRGGVPSHKTYVRKNIHIFAGLLRCGQCGSNMTANLDRRRANGFRPSQYACGSRRRKGTSCTNKYISDTTLGPFVLNYVANIIRASKNSSEATTPEVLERKLLRGEAFEDVASVSTDALGQLLDAFRSAGDAVEYRPQIAFSGDDNSIREIDTLRARRRKLDNALARLNALYLYDDEAMPEKDFVMQRGQITKQLEEVNARIEELQNQESSEELGDDFIGKASYYIMANKLIEDRYIDYEKYIRAIDPSIPRSFLQQIIDHIVVNDGRVISITFKNGSTHTFTYKT

SEQ ID NO: 22923 - protein, 535 aa, synthetic construct
MKKKQPNTRHGRAAIYARYSSHNQREASIEQQVKACRELAVRLGLDVVETYEDKAISGKSDRRPSFQRLLRDAEKGYFDCVLAWKSNRMGRNMLQAMTNEARLKDWDVRTFYAEEDFDDTAAGRFALRNMMNVNQFYSENMAEDITRGMMDNASKCLSNGALPLGYKAGENGRIVLDKAQAAVVQEIYTRVACREPFVDIAADLNRRGIKTKRGGPWTKSSFYTICRNERYRGIYIYDDVRVEGGVPRIVSDGLFYRVQEVLKVKKTPQSARHHTGAEDYLLTGKLFCGKCGRPMTGVSGTSRSGEMHYYYTCQKRRREHACDKKNVIREQIEKSVAQAIKQYMLTDEMIQHMADATMAYNARQEKDLHLQDLQGQLAAVKTSAANLLKAIEMGVITETTKARMVELEQEQGRLNAQIENARAELVPITRDNFVSLLHIYRDGDINDSKYLASLFETFLVRVDLYDDHFLIWFNPLGQKTPADIPITSIENGDADGIFDECRSKNVFDWGGKWSTKIKAPAVPRRVLLFWCSVSC

SEQ ID NO: 22924 - protein, 512 aa, synthetic construct
MKAVIYARFSSHNQREESIEGQVRACQRFAKEHDMTVIEIYADRGLSGLHADNRPEFQRMIADSDRHKFQALIMWNLDRFSRDKYDTAVYKSRLKKNGVTLYYSDQNIPDTPEGIILESLLEGFAQYYSANLSRNAKRGLQENARKCLWNGGGLPLGYTIDETKHFVIDPAGAACVRLIFQMYADNHSIKEIVSTLNEKGYRTVKGNKFRLGSIQGVLRNRKYIGEYHASGITVPNGVPAIVDVELFNAVQEKIGVVSAAKARNKAEIPYLLTTKVFCGHCGSPMIGESGTGKGGSTYRYYKCSCRKNRKGQCDKRTEQKEWLEETVVAQTVEKFLHPDVIEDVSNACAAVLEQDCQNNALLKALNAQLADVEKSSRNIIKAIEAGVFTASMRERLAELEQQKEDITVQIAREQLRKPQLSAEQIAFFLRSFLDGDAHDPNFQERIIESLVRRVDVYDEGPGNRKLTVFYNLKKNNHSSVSVKCSDSESVGLPKGRLRKQPIFSLLLAEGRE

SEQ ID NO: 22925 - protein, 555 aa, synthetic construct
MPEALNAVIYARYSSDRQTEQSIEGQLRECYAFAKANDIAVIDTYIDRAISGKTDNRPAFQKMIEDSAKRQFQAVIVYRLDRFTRNRYDSAIYKARLKKNDVKVLSAMENLNGSPESIIMESLLEGMAEYYSVELSQKITRGMRENALKGKALGGQRVLGYKVNSDCYFEIDETTAPVVVDIFKLYSSGKTVKEICDILNARGVKTARGGAFNKNSLHTILTNKKYIGIYKTKYGEIVGGIPAIIDKELFEMVALRMEQNKKAPARAKAEINYLLSTKLFCGKCRSAMVGESGTSKTGKKYYYYACVKKKREKACDKSNVKKDWIEDLVIQRTVTDILKDDVIEKIADRLVELQKAEAAESGTMLYLENSLAEIQVSIKNIMTAIEKGIITESTKTRLTELEDEKRNVEIEIAKESIARRIISREQIIYWISSFKDGDITSEKYRQQLIDTFVHAVFVYDDKIVITYNYSGENNTATISDLDLSSPPKINHPQGWIYFCRGPAGVEVYPPLRGKSLQVHQNKPPAGVALFLLRPANALPHCASCCALPRAVVYCT

SEQ ID NO: 22926 - protein, 426 aa, synthetic construct
MKKERTITVVPALKSKIQKAEEAVGQRLRVAAYARVSTEQDEQESSYEAQVDFYTRHIQSNPNWEFVGVFADRGITGTNTKNRESFNRMISLALEGGIDLILTKSISRFARNTVDTLQTVRELKGVGVEVVFEKENLHTLDPKCEVMLAIMSSLAQEESRSISENVRWGQQKSMRDGKVFLPYKHFLGYKKGADGYPEIVEEEAAIVRQIYDMFLSGKSIRHIADYLTEQGVPTPTGKSRWPVSTVENILRNEKYKGEALLQKSYTVDYLSKKTRKNDGELPQYHIENSHEPIISPEIFDLVQKKLEHRRGYKARFRDNSPLSNKLICADCGGFYGHKVWHNRENTKRYDIWYCNRRYAGAEKCKTPILREIEIEMAFERICQELGIRGGQSHENLWNEMVEVVMVYPDRRLIFHMIDGREAEVII

SEQ ID NO: 22927 - protein, 505 aa, synthetic construct
MKAVIYARYSSDNQREESIEGQIRECTAFAEKNGITILRHYIDRAFSAKTDNRPEFQNMIKDSGKRLFDMIIVWKLDRFARNRYDSARYKATLKKNGVKVVSATEVISDGAEGIILESVLEGYAEYYSADLSEKVVRGMTENALKSKYNGGTLPIGYQIDSDQCFQLDPLTAPFVREAFQRYDEGATMTQIRDWLNGQGVKNTRGQKMTYNSIQHLLNNRRYIGEYTYRDIVVPDGIPAIVPQDLFDRVQEKLAKNKKAPARHKAEDDYLLTTKLFCGYCGAYLCGESGTSHTGNVHHYYKCVSVKKKRTECHKKSVRKEWIEDLVVSETMKMVMDDTASEAIVSMLMDLQDRENVNLPLYEQQLREADTAIQNLLNAIQQGILTKSTKGRLEELEATKEELETKIACEKLAKPKVSAEFMTFWLHRFRKLDVRQKSHRKMLIDTFVNAIFLYDDKMVITFNYKDGTDTITFDDLKAALDKEKTGSDLDCLTAPYFVVTLENKVV

SEQ ID NO: 22928 - protein, 520 aa, synthetic construct
MRKVTKINKSEKAVTKNTKIRVAAYCRVSTGSDEQLESLETQKEHYSSFIRANPEWEYAGLYYDEGITGTKKKCRKGLLSLISDCKKGLIDLVYTKSISRLSRNTTDCLEIVRQLHDVSVFVYFEKENINTGSMKSELMLSVLSSIAENESFSISKNEQWSIQKRFQKGTYVIACPPYGYENNDKGELVVVPEQAEIVKRIFKETLAGKGTTVIARAFNQEQVPTKKGGKWTQSTIADILHNEKYTGDAIFQKTYTDSNFNRHINRGEKDMYLCKNHHEPIVSHEDFEMAQQVLKQRGIEKGNDGNSDKYSKRYAFSSKIICGECGSVLKRRKHYLLNGEYIAWCCSQHIENKDACSMKYITDEAIKNAFLTMMNKLVFGYDFILKPLHTAIIQVNIEKSGQRLKELDALMKDNVEQRKTTAGLLSKGYIDRAIYLETNNKLLTEKDNLKSEKEFLLKMNESGYQVESDIKEFIVFLSKSKYFSDFDEKLFSRFVYKAVVISRKEIEFEFKFGLKLRERL

SEQ ID NO: 22929 - protein, 532 aa, synthetic construct
MAQGKSVTVIPARIRAGNNVSKEVKPKLRVVAYCRVSTDSDEQATSYEAQVEHYTNFIKKNDDWEFAGIFADDGISGTNTKKREEFNRMIGECMAGKIDMIITKSISRFARNTLDCLKYIRQLKEKNIPVFFEKENINTLDSKGEVLLTIMASLAQQESESLSNNVKLGWQFRYQNGEVQVNHNRFLGYTKDKNGHLIIDKKEAVIVKRIFREYLEGASLRQIGEGLMADGILTAAKKPIWRPEAIKKILQNEKYIGDALLQKTYTVDVLTKKRVKNNGIMPQYYVENDHEAIIPRSVYTQVQEELIRRANLHSGKNMKKRVYSSKYALSSIVFCSKCGEIYRRVVWYNRDKSNVVWRCVTRIENGPSACDSQAIKETELQDAVVKAINYAIGDKEEIFEILQSNIESVLKEEQESSEEIINNKLQILQKELLQRVNSKKDYNDLTDEIDLLQKENQQAQVDKAEREGMKNRIAEMRIFLDRQEKEIDEYDEKLVRKMIEKVTVYDDKFTVEFKSGASVDIERDFRENYIAP

SEQ ID NO: 22930 - protein, 523 aa, synthetic construct
MAEKHLTDGTTALAAQPRVIKIEAAEKPKNAQLRVAAYTRVSSDSDDQLNSFAAQNRYYAELISGKAEWRMVDIYADEGITGTSAAKREDFQRMMADCRRGLIDQILVKSISRFARNTKDCLEAVRELKELGVNVRFGREGIDTANVSSELITAIYAAFAQKESESISGNMRWSYQRRMESGEFNTCRAPWGFRLDGKSLAVHEEEAEIVRRIFLEYLSGRNPREIAEILNAEDTSRRMWKYKAVDYILQNERYAGNALLQKRYTTATLPKQQKINRGEREMYYVADSNDAIIPQELFDRAKELRQRRSVGQAVTHGRLCVRMRCSCGSRIRAKQVNGRWYWCCCRHDEKGDCTIKPVPEAQTDEAFCRLFYKLKHQSLPILERMLETLRTIRDRRLLWSEDIVSLNKKISELSSQNQTLAFLKQNGLVDPDIFISKSNELTRQLRQAKLDKEKLMDAEGDATAQRTRELIALLEDGPDFLDYPDTKLCGALVAEIIVESNDTLRFRLHNGLELRESIERTVR

SEQ ID NO: 22931 - protein, 539 aa, synthetic construct
MNETAPRVIKIPAKPESVRQAELQRQLRVAAYCRVSTKEEDQANSYETQKEYYTDKIMSNPAWTMAGIFADKGITGTSVKKREDFQRMIRHCRQKKIDVVLTKSVSRFARNTVDCLYYTRALKELGIAVIFEKENINSLEEDSELRITLSGAFAQSESESISANVTWGKRRAMESGKATIQYKYLYGYRRGADDKPEIIPEEAEVVRWIYERYLAGASTRMLRDELHEQGVIYAENSPQWTLPHIKSILRNEKYCGDVLMQKTFQQDVINRRVIKNTGQLPMYLIENHHEGIVSREKYNAVQAEMARRKAAKSPSKRASTGLAAYTSRYALSDRLVCGECGTLYRRCTWTRPDGKRVVWRCVSRLDYGKKYCHSSPTLDEVPLQQAIIAALNTVLPDLDGRIRQITEALEAEVIPFPGSGMSLGDIDRRLTELEAQFQRLLEKAADDPIAYGDQFKEILDEQTALKELRATILAENKKHAEADRRIRDAAGMLENAVPHIAEWDESAIRQLVAQVKVLSKNEISVTLKSGIEIRQSISN

SEQ ID NO: 22932 - protein, 465 aa, synthetic construct
MAREVVHIPARPQVVGTRTTPEKKIRLAAYCRVSSEQDEQLNSFENQVTYYKEYISSHPDYELAGIYADEGISGTSTKRREEFNRMIADCEAGLIDMVITKSISRFARNTQDCLMYSRRLKDLGIGIRFEKENINTMDSTGELLFTILSSLAQDESRSISENCQWGIRSLFKRGIHHLNTNRFYGYDSDENGKLIINPEQAKVVKWIYESFMEGINPDVIVKILNEKEIPTCMGKSKWTCNQIKSILRNEKHMGDAVLQKTYTPDYLTHKSVKNEGQLPQYYIKEDHPPIVSQQIWEAVQLELDRRESFMKKHFLKSMGQYTDENPLSHRIICGICGHTFSRRTITRMEGRIKVWQCGQHYAKKGEHLCDGRMIRETELYKAFQLAWDHLVEERDNKAKDWEKKMAEGNALEAYRAEQFLRLTANGGRIKEGKPLVSAVLDHIVFEKNGDLSICFLDGSHVCVEP

SEQ ID NO: 22933 - protein, 537 aa, synthetic construct
MQIKVIHPSVERELERKKVCAYVRVSTDSDEQEDSYENQIRYYKDKIESNPDWKFVGIYSDLGISGYKEKRPGFMNMIKDARNGRIDLILVKSVSRFARNTETVLKYSRELKRLGVGIYFELQKINTLSGEGELLLTILAAFAQAESESNSGNVSMSIRRKFEKGELNFPISKIYGYTEDADGNPIIDEEKAKIVRLIFDLAEKGIWVTKIAGYLNKKQIPGIAAEKWNFGQIGKMLRQEAYMGDRILQKTYRDSRRRTRKNKGQADQWYVKDTHPAIVTREQWYRVQDILLERNKELYDATPISEEKNLSTHSAYPLSGKLYCPYCGRVLMHRWEGKKRYENWVCGLHRKVSKDACPGICIPNRIASSWGELKEPMTVLKYTDEYGMERFTAIPKVEYEASEDCPYEVVKPEPKPERPKKPSYKKTPKPDKPRYTRTVYPLSGKLFCPNCGKVLTHKWNKGVEYWVCSTNRNKHRTENFEKCKGMYFPAEAAKDWGEINEPLTVIAYKNEYGHRLYTAMPKEEYERSADCPYRKED

SEQ ID NO: 22934 - protein, 554 aa, synthetic construct
MAERVCCSYQNVLSIQNRVCCLYRVSTTKQVDHDDQNQADIPVQRKACREFAERMGWTIVYEEQENGVSGFKVSANDRDKIQLIKEYAEQGKFDILLVFMFDRIGRRAEETPFVVEWLINHGIQVWSVNEGEQRIDTHVDRLTNYIRFWQADGESQKTSMRTKAALGQMVQEGRFRGGSAPYGYDLVPSGTYNKRKHEVFKLEINPDEAKVVRMMFDLCVGSGYGRFKIANFLSEMGIKTRDGKNWHEATVGHILHNIMYTGVLRSGSTQSKAFPDLQIISPENFELAQKLMAERANECNALRTMPRNTRGQSLLSGNVFCGHCGGRLTLTTNGTTRINAAGEKVGRKRIRYVCYNKTRKRSNCDGQTGYTMHILDKMVTDILHQVFDRMRSVEENEIISRTHRSAMVSLKKRLADAKAESAKAAKEYESLKLEIIKAVQGESAFPMEVLSELVNNARTRMLDANAQLTELNEEVEKSNQRIEAIKADYRRIMEWSEMFDGSDMDVKKMIAGYIIKRVDVYSDYRLHIEFNMSFAQFELGLETEVEYAAQDIVS

SEQ ID NO: 22935 - protein, 510 aa, synthetic construct
MIEDARQRKFDMIITREVSRFARNTVDTLQYTRLLKEYGVEVFFINDNIKTFDGDGELRLTIMATLAQDESRKTSIRVKAGQQTSMQNGVFYGNGNILGYDRVGKEMVINPEQAKTVRMIYDMYLSGMGVTAIQYELEKAGRLTAMGKERWFSSYIAKMLRNSFYCGIITYHKEYTPDFLKQKKIKNYGDLEYVQVQGTHEPIVTVEEYEQVQKLMDAKSVVMKNHNKGKRRVGRMQHTTAFGRLMICQCGNKFNLRFHSRDGRTDGVDYQCYTSVNRGSVAKRLNKGISIEHSCESPYIQGWKLEMMAEQVFDRYIENADKVMDLSYAMLEKHIADQEELPDNTDVIQRKQGEIEKLMNKRTNLIEMRAEGDIDKEMFRSKKQEIEDRVAKLTEEIKGLQPKKEPTSNEDYSAKLLELRERLKEYTGFDYSVIPESIVEAFVERIWVSKDEFRWYLRTGSKEKGEFDPDNHIKIGSFTLTIDDAKKYIYSFSTRRRVYKWVDLNVSVWI

SEQ ID NO: 22936 - protein, 640 aa, synthetic construct
MYCIYLRKSRADMEAEARGEGETLARHKRILTELAQRRGLEIGEIYQEVVSGESLAARAEAQRMLSDVQSGMWEGILVIEIERLARGDTIDQGIVMNTIKYSGTKIITPTKTYDPNNEFDEEYVEFSLFMSRREYKTIARRMNAGRIASVKEGNYIGSRPPYGYDKVKDDKSFTLAPNPAEADIVRSIFSWYVHGCINENGELERLGISKIARKLNDMHVPTRKGGAWVTATIRDMIKNPVYIGKIRWNWRKGVTQFKDGKKTVARPHSPEDSWLLVDGRHVPLVDEDTWNAAQSIIANNRPATVPGNREMQNPLAGLMVCGKCGRKMVRRPYNNREQPPSLICSCNACDNVSAALHLVEERIIEALAYWLKNNAIKYENAQPAATDEEQAAIGTLNAEITELEKQRKNLFGFLERGIYSEAEFRERRADIDAQITALREDVKTLGDKIILKETYNEAIRNEVPKIRTVVETYSSLSSARAKNDMLKEVLSKVVYARNKGGRWSGLCDNFVLDLYHKIPTPSPELLQRWDNHIQVVGTEEIAHWEMIGTMIHQCLRDATLKDIEAAGLMGYYTMHSKGVYPADPNGVPFTAAYLQCTGDPIADITEDMAADAAMSKRQHFAQKKKNCPAWQCFFLRCINK

SEQ ID NO: 22937 - protein, 541 aa, synthetic construct
MTDEKPRVIIIPPKPELQQTTTVTKQLRVAAYCRVSTKEEEQASSYEAQCEYYTDKIMSNKEWTMAGIFADEGITGTSTKKRTEFLRMIRQCKQKKIDLILTKSIQRFARNTLDCINYTRILRQLGIGVLFEKENINSLPPDSEFMITMYGAMAQSESESISGNIRRGRQMHAKVGTLKVPCYRLYGYEKDADGKFRVIPEQAEIVRELYKRYESGASLRNLQDWLEEKQIKTVFGESKWTTTAIKGILTNEKYCGDVLLQKTFRTDVISKKVIKNVGQMPQYYMPDHHEGIVSREQYNAVKAEMARRSALRSPSKAAVTGRSCYTSKYALSDRLVCGECGTLYRRCTWTSLGRKYPVWRCTSRLNYGTKYCHDSPTIKEEQLQAAILAAINSAMSNKPALLDRIKNAVSLELLPVQGQTMSLADIESRLVQLDEQFQSLLAEAIDAEDKDACNAQFAEILAEQTALKKQKEGILQSSTDADRVCTRMKQAEETIENAAPTITEWNENAVRQIVERVTILSADEILVRIKGGAEIKQTINR

SEQ ID NO: 22938 - protein, 522 aa, synthetic construct
MAKKQTDGNLALEQQRVIVIPAHDELVARKLRVAAYARVSSSSEDQLNSYRVQNQYYSELISSNPDWEMVDIYADEGITGTSVEKREDFQRMMQDCRKGKIDRILVKSISRFARNTKDCLAAVRELKELGVSVLFEEQGIDTARVSSEMVTAIMASLAQKQSESISGNVQWSIQHQMEAGKYKLRTAPFGYTVRNGELTVNEAEAPIVQDIFNAYLSGANTKEICDRLNAQQGSSRKWLRREIDYILMNERYAGNAIFQKKYTRAELPRTVKRNHGERAMYYVSDSNAPIIPQNVFDRAQELRKRRTVSRSDEPKVYSGKIQCSCGSRCRAKTSNQIWYWSCVVHEEQRNACHIKQVPEETINAAFCRLYYKLKHHGESIFTQMLSNLQKIRYSRMLWSEDVISLNKKISDILSQVQFLAQLQQAGGVDPDTFISSNNKLNEQLRRLKQEKARLLDTDSDDLADRTRDLMDALEDGPDFLDSFDAELFDALVEKIIVDSNERLRFRLKNGLELLEQIERTRR

SEQ ID NO: 22939 - protein, 554 aa, synthetic construct
MEKSKRVVGYARVSTEAQDITRQVELITAYCTERNYHLIKIIQEKISGARKDRKSINELLEVDDTVADMIIVSELSRLSREDDILSVLSTINELLKQGVDILFLDKQDRIYKAGTVLSLYDIITLSVEAKASADERYKIAGRMQTGLRSKLSEFTNMFTGGTVPFGYKVIHNPDYKLNLTPKNLLVVDAQEAEAVKYLFQQLIDGNTIRQTVRGYNKLYPYKLSYSGICRIIRNPKYKGEIYRRGKLYGTIPELQIITPEVFDKANKQMRENNLFQSNAPKYYNPLKGLIFCPCGCSLYMKPNHNSYLIYRCSSAYNDKQKCENYGVKCAYILSSVWTCVKETLHTEEYKRFNTERANELQGINKQIREIVTRKVNNVDELKTQSASLIAKIKKLNNDDLINELETDYNVLCKQIKQIEQEISELNGQIAENDAEIKRSVEQKDFSEMEQSALYKEKLQKVVYHSLSAMRGILEIVFKNGMIRYVLIKKHRNGGVFLLPEFWTVDISRAVIIVPTHPSVDPEHPYTLLPTIPREYTFDTIITERDMDEYRITVS

SEQ ID NO: 22940 - protein, 503 aa, synthetic construct
MLRAALYARFSSENQREESILAQFRDSTEYCKKHNYAIVAKYADEAKSGTTTIGREQYKLMLKDAQKGKFDVVVFHKIDRNARNELDYYITKHKLEEAGVKYAYSRQDIDSTSPEGQMMESMLVGMAAYYSRNLSNEIKKGLRENAIQGKCTGRRPPYGFSVDADKKLIINEDEAPAVRMIFDLYAAGVHYGVIRKRLFNAGYRNRAGKEFTLASIYEILRNRKYVGDLYLGKTLFRKGKRNTHQVSDNVQYFENVIPAIVSREIFEEVQVKLDQNKRRSGAGNAKAIYALSGLIHCGQCGSAMVAHSTKNSRGIKNYYYRCPKGRLIGEEKCPQKFINRDDIENTVYQLIRKLFTAPDAHSQIKRIIAKNNMSVKVPDYIDQVKRLKKQESDASKRLDKLYDLYMTDRGDEFTSAKMAQIKEEILRLRTQIKEAENRQAIAQSTTFDIDKIIDTFQKQLKQKQSPEFIKTLFELAVKNVIVYPDKIKVVLLVTQERFELPTP

SEQ ID NO: 22941 - protein, 482 aa, synthetic construct
MQKAAIYARFSSDKQTEDSIEAQVRACREYAAGHDMLIVDVYEDDAISGKGSKTARRVQYQKLIRDAEKGAFSVILIHKYDRIARNLGEHVNLEKRLQSVGVQLVAVAQDFGTTNEAKIMRALMWSLSEYYIDNLAAETKKGLRETALKGLHTGGYAPFGYDVINQKYVVNELEAAFVRKMFDAAMNRAGFTEIIQEMQERGITGKRGKPIKYPQIYEILRNEKYTGVYAYSPEEEKSRADRRKKPNAIKIENALPVIIDKAQFMEVQKIMDERKQTGKKSGYLCSGLVYCTCGAKMHGMKSTRKGHTYYYFVCSKKCGEPVVHMEEADNAAVKYLRDLLDEKNQETISTALRNYQAGAGSRMEEFKAVLRKKISEKQHRYDALMKNLSSGILPDEVLADIGAQMRDLKREIAALEATEPPKDFTVEQIKAWLEALKAVPDDKAVHLLIERMDLDRTKEKTEFNIKSTLNSVLSKSGCGGRI

SEQ ID NO: 22942 - protein, 523 aa, synthetic construct
MRFFSYGRKSVFSDKSDSIDNQFRMSREYCDTKFSGQVDSWQQFSDEDFTGANTQRPDLQRMLSFIKNGFCDVLVVYQLDRLSRDVRDFANIYSLLEEHGVMFVSIKENIDTTTPIGRAMMYVTVVFAQMERETIAARVTDNMLGLAKKGYWTGGNPPRGYVRKHIVVDGKKHCSIEPDPDGVRYVTQIFDSFLAMNCSLQGMETRFKNRGIRTESGKFFSTTQLHKILTMPYCVEATPEVYDFYAAKGCIMDPGSPREKWDGSVGVMIYGRSTEKNKKHQAQPPEKWTVCLGMHKPFMPAEKWLAVQARFGQNKCIKDAKWPVPLLKGVLRCKCGNLMQVSRKKKVDGTCSSWYYCRKRMRQGVDACDMGQIKCDLLDDEVLELFRGIAADPGLIQKFVRAEAPDEAPDLKAAQARVSACENKIGRLAASLALAEESSASKYIIAEMERLDVELGALKREAALAEMESHRAAASAKDAKATAVEIAKLIHGLEGFDDKEKNAIARAVIQECTWDGERLFITL

SEQ ID NO: 22943 - protein, 506 aa, synthetic construct
MAIALYARKSIERENSISCETQIEYCKSVIKPDERSEKTIEFIDNGYSGGNVDRDGFQKMMRQIERGKISKVIVYRLDRISRSLSDFVGILETLKKHNVQFVSSQESFDTSSPYGEMIVKILMVFAEFERKSIIERVKHAYAYRSEMGLYMGGRRPYGFNLKDTVVNNVKTKMFEPVTNEIEQIKYIFENYSVPNVTLRRLMDTLIDNNISATTGSWSTAKLSNIIKNPIYVKADNAIYEYYSKRNANIMSDINQFDGLHGIQTYGKSKHTADDMSDIKIVVMPHDGIINSDLWLKCQKKIEKNKKLGNSVNNSTSWLGGKIACKQCGRTMTVTKGGKKKDGTQTRYFSCTGKSHNRICNGPKVTLYADSLEDMVYNLIAEKLQSLKGSRKKISTDNSNKINLLKNQLSEIKQSQEKIVNMLLDDSFKSDMKSLLNEKAKKLSEESKAITEKIEDLESEENEIISVINLSQKWKSANTDERKAVCNVLIHKIFICEDGTCEVVWNI

SEQ ID NO: 22944 - protein, 529 aa, synthetic construct
MVLKVAAYARVSTDKEDQINSLTNQREYFESYIKSNGDWEFVEVYFDEGITGTQTKKRKGFNRMINDCKNGKIDLILTKEVSRFARNTVDTLNYTRMLKEYDVGVFFINDNIDTRQNDGEFRLAIMASVAQEESRKISERVKWGQRRAMENGVVFGNNSIVGFDINDGVLSVNDSEAEVVKLIFHKYVNEGKGTHIVARELYEDGIKPPKSSKDFWSSTMILNILRNEKYVGDLLQKKYVTKDYLTHHKVINESEDKIYIENHHEGIISRKMWNMAQAELQRRSVDKSTKKKYSNRYWCSGKIICSECGSRFVIRKSKKKSGIYITWACHERTAHGNKKLDKNNNQVGCNMRTVNNKSLLTCMKFITEQLDIDINNIADDILNEINNSADTSEDNTQNLTLQIQDIQNKKMRMLDSYYSGDINKDEMTALKDKYDKEIEKINAILQKQQNNQTAIQERQNNTDELRNIIINAVCSENVYGEIVDKIIVYDDYMLVKLKYIDFAFKIKYSTHGYMEKYTTVIESCEIVSF

SEQ ID NO: 22945 - protein, 492 aa, synthetic construct
MNVAMYLRKSRADENNPLETLERHKEILLSYAKDNNLTVIDIFEEVISGGMLYNRTEMLKLLDAIPSHIYDAVLCIDLDRLGRGSAADSEKIFDVLKENDVKIITLKKIYDLNNEYDEDYSEFEMFMARKELKFITRRMNRGRIKSINDGCFVSGAPFGYRNAVINKKHTLEVYEPEAKYVRMIFDMYVNQSMGITSISRQLANLGVLSKKNTPLHPTTIARMLRNHTYIGKIVWNKSKSVKGKNTQEKTSKDDWLYVPGLHEPIIDEDTFNKAQDIINLKYKPPMRTGTLQNPFAGLLKCANCGRAIVINTSNETVEKYRLCCRTLGCNKASALSIVEDKVFEVLTKEFKDIELSLKNIRQSHNKDKLSCLDTIAALETELKKLDKQQLRLYDLLEQEVYTKELFLERNNAISDRRKKINATIAQEREKFKLVDTSSVEERLPLLRELLTNYHSLSAAEKNSILKNFVKKIEYKREKSAPEGDIFLKIYYK

SEQ ID NO: 22946 - protein, 502 aa, synthetic construct
MEIQIREENSRQKQKLKVCAYCRVSTDADEQENSLENQIRHYKEVITSNPDYEYAGVYSDFAISGFKEKRPGLQKMLADARKGKIDLILTKSVSRFARNTSIVLEATRKLKELNVGVFFELQNINTLSGEGELMLTILAAFAQAESESGSVGAKMVYQRKYEAGIPVQYLERSFGFKKDERGVYIADEEEAVWVRKIYDMAAQGYTLAAIKRYLNENNVKTVGGAKWLDSTVLRILENEIYKGDYIMHKYFVNEERKLVRNRGEVDAWYIEDDHEAIVSPKLWQRAQDALEAKRDYLAEGSVIEEFTEENYPYMNRIYCARCGHPLYKRIYSNGNRLNWGCSGTKRYGKSFCEGINIPDGVLRGAWHFDENMYIGEKQTDKGKKEFTYLKEASWKRRHKKKEPEPIPENTETEYPYREKIFCGLCGSRLVRHVNTKNHKVIWVCNGRKRKGKDFCDGTRVPDTIIKGWGEIKKDIYIQRKDDKNGKKRYSYTSKKPKGADRA

SEQ ID NO: 22947 - protein, 462 aa, synthetic construct
MSNTPKTITRAALYIRVSTEEQALHGYSLEAQEAALKQYAIDHDYKVVHIYHDEGFSARKPVMRRKVMQELLADVQAGKIDLILFTKLDRWFRNVHDYHQVQAVLDKYGVAWKTILEDYQTTTADGRLKVNIMLSVAENEADRTSERIKFVFDNKVRNGEYCFGGPMAPYGYKAEVINGVRKLVKDPETESATAAFWDKMIKYHNTRRAARETNLEYGISRDHQSWRKVVRNKIYTGELRGIKDFCPAYISAADWQDIQCPEHRIKSTQGDRHYLFVGLLRCPVCGRTLKATFKTYPNDRSKEYYGYRCTAKPLGCCTYSRQLSERKLEKYLVAHLRESLESYIAKLQLSASAPKKKRKKTDTTKLRDQLRRLNVIYLAGNISDDDYNAQANILRDAIIKAEQEEKQLAQVIDFTALRQLLDSNFELSYKAMSREEKQRFWHSIIAEIQLDDNQVKEIIFKS

SEQ ID NO: 22948 - protein, 430 aa, synthetic construct
MERTIQKVNLTAIQKAPKQKRVAAYARVSCGREAMLHSLSAQVSYYSRLIQKTPGWEYAGVYADEALSGTKDTRGEFQKLLADCRAGKIDLIITKSISRFARNTVTTLQTVRELRQIGVDVYFEEQNIHTLGEEGEFVLTLLAAYAEEEARSVSENQMWRIEKQFQQGKPTSIDMFGYAFVKGRLEIIPEEAALIREAAKQYLDGATQEQLETIFNEAGVVGRHGKKFTGTGIITLLCNEKVVGDLLLQKTRCIDPITKVQKVNHGEWPQYFVSGSHEPILDRETQEKIFAERARRVEARGMNNRDCTRKHRPFSSIMVCGKCGKHFIQRTWDTQKHGLRAKWGCRTHLRSSASCATENIPEPLIEKLAAEAMGRRNFDAELFKQKIKEIHVPENGRLVFVFKDGHTVEKSHSFEWPEERRAGVCRQQQM

SEQ ID NO: 22949 - protein, 535 aa, synthetic construct
MQAAANVTVIPAKKDRLPLDIVNNEVRKLRVAAYARVSTNNEEQLTSYEAQVDYYTRYIQAKEEWEFVEVYTDEGISATNTKKRDGFNRMVADALAGKIDLIITKSISRFARNTVDTLTTVRKLKEKGIEVFFEKENIRTLDGKGELLITIMSSLAQEESRSISENVTWGQRKRFADGKVSLPYGRFLGYKKGENDLPEIVEEEAAIVRLIYRLFLYGKSPSAIASYLTDEGIPTPGGKKIWRPKVVENILTNEKYKGDALLQKRFTVDFLTKKQKINEGEVPQYYVANSHPAIIPPEVFDLVQYEVKQRKKNGRWTSSAYPFSGKIICGECGGIYGSKVWHSNTPNRTLVWQCNEKNRGQHCKTPHLTDVEIQTAFLAAFNQVLGSRAEIIEAYHEVMEALTDTADLDTEREQLQNENEVIMGLIRKAIEDNAQKAMDQQEYEKKYTALCERYETARQRLAEIDELCLERRAKRTKISMFLDTLNNQSELVTEFDEELWYSTVDSVTVYKDMRMVFTFRDGNEIEIKKSAWKAA

SEQ ID NO: 22950 - protein, 517 aa, synthetic construct
MYLVAYARYSSDNQREESITAQLRAIHNWADANGHIIVKEYIDEALSARTDKRPNFLKMIEDSKVENWNGVVVHKLDRFSRNRYNSAVYKKELKDNGKKLFSVLEKLDDSPESIIMESMLEGLSEYYSANLAREVKKGLNENALDCKHNGGTPPLGYSVLNSHYVINEQEAVIIKLIFDMYRTNHSYVEICSELNLRGYKTKRNKNFSKNSIHDILVNEKYIGNYTFGYGNRAKKRGQPNPDMIKIEGGMPAIIDKNVFFEVQEKMKGRKHMGGTYKAKQVYILSGILKCGICGEKYVGAKKNKFWSAYECSGHKKGVCDNKAIKKEEIEKIVVDELKTKLKKLFNNTELLEKVNSTYKDLYDNAENNLKVEEEKLINVKAQINNINKAVMDGFYSPEMKDQMNSLQTKKELIEHSIYLIKNISKKDEITSNDLNKIINTDLLKLESDNLEDIKEIVQKYVKEVLITPENINIKIVLDDTNINTKHKGDTDVCDSPPPKFEKRTAIILNLAVLFFFI

SEQ ID NO: 22951 - protein, 524 aa, synthetic construct
MGKRVTTIPATLNLYDSVSLKNPQKRKVAGYARVSKDIEEQATSYAAQVDYYTAYIKKNPEWEFAGIYTDEGITATTTKKRNGFKQMIADALAGKIDLIITKSVSRFARNTVDSLTTVRELKENGIEIYFEKENIWTFDSKGELLITIMSSLAQEESRSISENVKWGKRRAFANGKGSLSFNTFLGYDRGPNGEFVINEEQAATVRYIYEKFLEGFSAYRIAKDLTEMGIKTPGGKEKWANSSVLKILKNEKYKGDLLFQKTYIKDFLSHKSVRNNGEIPQYYIEDHHEGIITAEQFDQVQLELYRRKKIKKYSGVSIFSSILKCGNCGGWYGSKVWNSNTKYKKTIYQCNKKYKNRCKTPNLSEYEIKQLFVQVVNQLISEKEEIIKNTEEMKKTICDMNSLTMELKDKTAEINTVVEQINNIVIQNSKVSLNQDEYNKEYFRLKRKYDTIASEIDRLSKQIKEKDLQGKLFDNFISTFKKQNETISEFDEFLWSGLVYEIVVYTKQDVRFFLKNGLEIDTGL

SEQ ID NO: 22952 - protein, 503 aa, synthetic construct
MSKIHKIEAMIPKQIEKKKVAAYARVSALTEMTQYSFSAQVNYYSALIQKNPNWKYVGVYADKGITGRSIKKRKEFNRLIDDCNNGKIDLILTKSVSRFARDTVDTLNTIRHLKNIGVDVYFEKENIHSISQEGELLLTFLAAYAQAESENTSENIKWGIRKGFKVGKPNGYKAPYGYKWNGNSYSIVPEQGAIVKEIYKRYLDGEPAYSIAKALKKRGIKGQTGIPMDDSTIRYIVSNISYTGTLLLQKWFFTQNHVRKENKGELPMYAVENMFEPLISKEDFQKALQIKKERAEAMPNKNPRLTAFSGIVKCGNCGCSVCRRTTRYGKKWVCNAKDRKGMAACDFRDIYEIELEAAATKALAVNEFKEDLVRREVKLITIDNAYIVFDLKDGKKKQILRTYTKGYSGFSCRLFCGNCCKMFEADSRTLSINGQKKRYKIWCCRKCPGQREFDDVIRKATQSLFNEPQCEGLFAQNIEKAIIYNDRIDFYFKEGKVITWEKE

SEQ ID NO: 22953 - protein, 516 aa, synthetic construct
MQKNNNIGNRCVIYARYSCSNQTEQSIEGQMHDCEQFAARNNLQIVNSYIDRATTATTDKRPQFLKMIADSKQCVFDVVLVWKLDRFSRNRYDSAMYKKKLKDNGVRVMSAMENITDSPEGVLMESVLEGFAEYFSKDLSQKVQRGMRETAAKHKITNRIPFGYCKSEAGTYIPEPHTANAVRKVFDMYVTGFRKSDIADWLNNNGYKTSYGNQFTLTAITPLIKNTRYIGKYYYADNEYIDETQRIVTDAIFYKAQQKAIANQHGGSCKAIERYLLSNKLYCGYCHNKMIGECGKNQNGLTYHYYTCVGRKRKHICNRKNIKKKDIEQYVINAISRLLNDEYAINKIIETAINYQQNDVEHINEIKDIESTIKEIERKISNILSAIEAGIFTDSTKNRLQELENQKTRLTQELNYKNQSSTKIPRTTLKQILKNLDLSKDATNPEKQNIIDLLIHRIYLWQDKILIVFNQSNLCDNEISVDDTDVNTIIKTLSEPNASSSDSVEYGTPDQSRTGD

SEQ ID NO: 22954 - protein, 580 aa, synthetic construct
MVRRKTALRGVSASTRITKVAIYIRVSTIHQVDKDSIPMQKKDLIAYCQLILGTDNYEIFEDAGYSGKNTDRPAFQDMMGRIRKGEFTHVLVWKIDRISRNLLDFAEMYEELQSLRVTFVSKNEQFDTSTAIGEAMLKIVLVFAELERNMTSERVTATMISRANNGQWNGGRIPFGYSYDSGTSTFSIREDEAAVCRRLKDLYLDNKSLVYTARALNADGYKTRAGADWTPTAVWIIASSPFYAGIYRYNRYKGTENRTLNPEEEWVMIPDHHPAIFTLEEHEAMKSSLKTNARYVDNPVGKPHATANIHIFQGIAYCGKCGNKMVSTPGKKHADGYRPSNYSCPLHRRSKKCDNATVNDMIVGEFAINYILNMLNAKKTFSNIDTPEELQRHLLTGSTFSDISSIEEDGLNDFFNLLSRYGSDNSYVFAIKTPRRKKASVNPELAALRKEKEKQERALQRLQDLYLYSDKSMSEKDFILRKSEISDRLKNINAQLGLITQNLDSLLSDEEFIKQASHLLIQKELKGRKYIYYKNLATSVDPEILRTYMETILDSMYIIDGRISSIVFKNGLTHKFIYKN

SEQ ID NO: 22955 - protein, 510 aa, synthetic construct
MSSVDKIAVVYARYSSHGQTEQSIEGQIAAAQKYAEQHGYTIIHIYADRAMTGRNDDREEFQRMLSDTATHQFGVILLWKIDRFGRNREEIAFNRYRCKKNGVRVERVAEDVPDGPEGVILDSVLEGMAEYYSLQLAQNVRRGQRESAKKSQTVGGCKIIGYNVNPDTKRYEVDPKTAPFVTEVFKRYANGETISEIVAWLNAQGVRTTRGGEFTVNSLHRLLKNEKYTGVYIFHDIRNEGGMPALIDHATFDKVQEMLKVNRRAPARVWSKTEYLLTDKLFCGHCGAMMVGESGHGRNGTKHNYYTCWNRKKKKSCDKKPVRQDVIESLVLRSIGKLLENPATLENIADQVWAAYERSDTSGDTIKALDKQIADVDRALSNVMKAIEMGIINEMTKARMDELTDQKQALSAARAEAGLAGGFKLTRDMILFFLQEIAALDMADRDSQKRLIKTFVNAIYLYDDHFDIAFNYTDNGKVVVRMQEINDAACGEVFGRCAQSPAKSRLSRLR

SEQ ID NO: 22956 - protein, 526 aa, synthetic construct
MPYCIYLRKSRADAEAELAGEGETLARHEKTLLALAKKLKLPITKIYKEILSGETIAGRPVMQQLLQDVEAGIWQGVLVMEVERLGRGNTLDQGIILNAFKYSSTKIITPMKSYDPNDEFDEEYFEFSQFMSRREYKTILRRMQRGREASVKEGKFAGSIAPFGYRRVKLPQEKGFTLEVEGAEAAAVKLAYELYAYGDPQPDGTFADIGRATIAKRLDQMGIRNRKGGTWATASVTRMLQNPVYIGKVHWNRRPEKKHTENGKIKKTRPLAENYLLVDGLHEPIISEELWNLAQAKMKQHYRPTGVNGIMQNPLAGLVHCSYCGNAMQRRPYLKTGQPASLICTTHFCPQISSPLYMVEGKILEALSLWMKQHEPTWEEESSADVFSTKIMALEHAIADMEQELQGLQSQFEKIFEFLETGIYTPEVFTARNKTLSEKMAEIRSAIEETQAELSKLKAARKNQVSMIPKIKNILDTYETLTPAEKNKLLKEVLDHVEYHKKIKGKKNVPADNFEIILFPKISPEN

SEQ ID NO: 22957 - protein, 534 aa, synthetic construct
MIRAAAYARYSSDNQCDESIDAQLRAIHKFADENGYKIVSEYIDRAKTGTNDRREEFQRMIRDSDDGDFEVVIVHKLDRFARKRYDSAIYRKTLEENGVKLVSVLEQFTDSPEGIIFVGMSEAMSEYYSANLSREVKKGQYENAIACKHTGGFAPLGFRVNAELKYEINEEEAVHVRFIFQSILSGMNYSQIIEELNRRGVRTRRGREFGRNSLHEILRNEKYTGVYIYRRSALPDKFGKRNNHADRSRNDIIRIEGGVPQIISREVFDAVQAIMDKRKMEPYIRSDAKEVYLLSGKVFCGLCGNSYCGNRMHGGRNKSLYITYRCNSHSGKGTGNCRNKDVNRDYLENYIRKLLAEVLFDERRLEGVISEYNKMVNSNGSEYDSELRSVRSMIKKTKGEIDNLIGILAATGSASLAEAVSEREERLAMLKEKRREIESRRVTIETNREDIAEAFERGREMLLSGTIPHLRQLIQLYVSRIDVYPDHISATLNYLPALRAVGSDEAVGNYGAAAQNALEVREDIGREELNLECK

SEQ ID NO: 22958 - protein, 526 aa, synthetic construct
MPKTDKLPVKAVIYARYSSDRQREESIEGQLRVCEDYARRNNITIVHTYADRAMTGRSDQRPEFQMMIRDAATMSFDIVLVYKLNRFARNRYDSARYKHKLKQYGVRVVSAMENIADDPSGILLESLIEGMAEYYSAELAENVTRGMTENALEGKWAGGIVPLGYKLDEKHHLVIDEPKAAIVRQIYQLALEGHNQKYIIDELNKHHYTNSAGRPFSYNTLRVILKNERYTGTFIWRDIRKENAIPVIIDKMTFEAVQKHMQFRKKNHIRSCSKDFHLTGKLFCGRCSSKMVGVSGTSKQGVLYYYYACTSHLKKKCPSKNIRQDALENLICKITTQILSKSEAIKAIAKQAMKMQKDKKESLEIQSLQNQIADINKKLKNCIQAVENGLISETMTNHIKNYENRLQGLKDEVSRQKLLEGSIHLTEQHIEFFFYSISQKLKTADKYKSILLSSLVRCVIVHENYIEIQFNYKNELPILQNPVKVESSYLNQMVTGMGFEPILSALRTQRLNRLTNRPCVPYYNRH

SEQ ID NO: 22959 - protein, 523 aa, synthetic construct
METVKNITVIPARRRVGNTAKESEIPKLRVAAYCRVSTDSDEQATSYEAQVEHYTDYIRKNPEWEFAGIFADDGISGTNTKKREEFNRMIDEAMASKIDMIVTKSISRFARNTLDCLKYIRQLKEKNIPVYFEKENINTMDAKGEVLLTIMASLAQQESQSLSQNVKLGFQYRYQQGQITVNHNRFLGYTKDEKGQLIIEPDEAEVVKRIFREYLEGASLQQIGRGLEADGILTGAGKKKWRAETLQKILKNEKYIGDALLQKTYTVDFLEKKRVPNNGLVPQYYVENSHEAIIPRDLYIQVQEEMVRRANLRSGQNRKKRVYSSKYALSSIVYCSKCGDIYRRVVWNNRGKRSIVWRCCTRVEHGPGACNADAIHESELQNLVVRAINMALGQKDTMYDVLQRNVEAVLTGTDGISLDEIDARLEELQKELLNVANAKGNYDSIVDEIYMLREEKQNAQVEGAAREGMKQRISEMQQFLAEQTQDITEYDEQLVRRLIEKITVYDEKVIVEFKSGTNVDIHR

SEQ ID NO: 22960 - protein, 520 aa, synthetic construct
MKKITKIEGNKTLVQKKKLKVAAYCRVSTASDEQLISLEVQKAHYESYIRANDEWEYVGLYYDEGITGTKKDVRAGLLSMIADCEASKIEFIITKSISRFARNTTDCLEMVRKLTDLGISIFFEKENINTGSMESELMLSILSSLAESESVSISENSKWSVQKRFQNGTFIISYPPYGYENDNGTMVIVPEQAEIVKEIFAACLAGKGTHAIARELNARGIKTKRSGKWSAGTVNAILNNEKYTGDVIFQKTYSDSSFNRHINYGERDRFLCENHHEPIISHEDFEKVRAVLDQRAMEKGNGTDTYRYQNRYCFSGKIKCGECGTTFKRRQHYKPSGNYVAWTCGKHLENKKECSMLYISDESIKLAFLTMMNKLTYSHQVILKPLLRTLRGMDDKDRLLRIQELDICIEGNTDRKRILTSLMATGVLEPTVFNKENAALVIEEQRLRAEKEKLVNFVGGDKTRIKELQKLMAFTSKDMMLTAFEDETFLAFVESITVESRTKIVFHLKCGLNLTEGLVN

SEQ ID NO: 22961 - protein, 557 aa, synthetic construct
MQQALNAVIYARYSSHSQQEQSIEGQLRDCYAYAQREGLHVVGEYIDRAISGKTDERPDFQRMIVDASKKQFQRVIVWKLDRFARNRYDSAHYKAKLKKYGVKVVSATENISDEPEGIILEGLLESMAEYYSANLSKHVRRGQRESIINGTYLGGVPPIGYKVENKRLVIDERTAPTIRYMFEQYAKGVPKREIIAELNARGIRNKKGKPLTLSSMQAALRNEKYIGIYRYSGQEVTGGCEALIDEATFRKVQERLDKVKHAPAAAKAKIDYLLQGKAFCGYCGSRMVGESGRGKMGNTYHYYACGKRKKEHTCAKKNEKKDFIEWYVVEQTVEYVLTPDRMDYIAAALVAQYEKDFGDNRIKDYEKQLERINGEIRSLVDTLAVCPPSARQPIFDKMELLDVQKTDLEIDIAKLRVAARVQLTEEQIKVWLKQFCKGDLDDMEFRERIIDVFINSVYLYDDKTVIYYNIEGGKQVSYMEMLDSTEEPPFADDPQGSSGVRISNDTPRHIVYKRPRIAWSFVFLHCRSFPEKSPVRQFASARSRRFCRHFFADADGD

SEQ ID NO: 22962 - protein, 521 aa, synthetic construct
MIAIYARQSIEKKDSVSIEAQIEKCKYYCENQDYKIYKDAGYSGKNINRPQFSKLLEDIKSGLITKVIAYRLDRISRSIADFSQLLILFDEHNVDFVSATENFDTNTPMGRAMINIVMTFAQLERETIVERVTDNYYFRANNGYWAGGYAPYGYEIKHIIGNDGKRHSVLVENKDESKIVKEIYDMYINQNISMRKIAQQLNYQNIPTKKQSGNWGINAVNAILSRPIYTEATTKIYDYFNKRGTCITNNIEHFDGTKTANLYGNSKKNNNVKALRNYDEMFLSLINCVPLISNEDWFKVQNIKGTKKNLPPRTNSSKISFLCGLVKCGKCSSNMVTQGCKNRYGIQYYYLICSTKRNLGITKCDNKMIDVSKLEEIVINDIKKHFNSKEITKKIEKYAKNTQKENISLLKEKEDLENKIIKIDIQIQNLIDSIAEGNVIVSKYINKKIEDLEIEKQNILSELNLLNEKNNFTDNNFLIEYIKDINEKLNTKDFEQLKLLCHTIIDKIVITDKNIDIHYKI

SEQ ID NO: 22963 - protein, 524 aa, synthetic construct
MPKKAPKHPAKPKRGKKLEIEEPGILYGRYSSHNQKDISVEQQFEKGYELASELGIRIVDTYADRAVSGRTDKRRDFQRMMSDAAKGLFRYVIAWKSNRIGRNMLEALINEAKLQEMGVRVLYVEEDFDDTAAGRFAARSLMNVNQFYSENMAEDIKRGLYNNAENCMTNGHLPFGYKSDATLHYVIDEPRAAVIREIFTRVAAGEPLVDIMSSLNARGIKTAYGRPWGRSSFQRILSNERYRGVYIYGDIRKEGGMPRIVSDELYYKVQEVITTKKNPQGRHRANGDYLLTGKLFCGKCKSPMVGISGTGRSGKLHYYYICQKHRTEKTCNKKNVRRDEIELQVAQAIKGYALKDDIIEWIADSTIAYNERKEAESKIGILENQLAETEHGIKNIMSAIEQGIITETTKSRLVELESERTTIKANIAAARADIVTISRDDIISGLEMFRDGDVHDKKYQARLFDTFLVAVYVYDNDLRLVFSFSGSKNTVQIPIESAVNAVENNTAECSYKLCSAPPRKSCNL

SEQ ID NO: 22964 - protein, 523 aa, synthetic construct
MAGAKNITLIPARKRVGNTVTAEDKPKLKVAAYCRVSTDSEEQATSYEAQVEHYTEYIRKNSEWEFAGIYADDGISGTNTKKREEFNRMIEDTMAGKIDMIITKSISRFARNTLDCLKYIRQLKEKNVPVFFEKENINTMDSKGEVLLTIMASLAQQESESLSKNVKMGLQFRYQNGEVQVNHNWFLGYTKDENGHLIIDEEQAVIVRRIFREYLQGASLNNIAKGLMADGIPTATGNVTWRGDGIRKILTNEKYMGDALLQKTYTVDVLTKKRVANNGIVPQYYVENNHEAIIPRQLFMQVQEELQRRAHLRMEGGKTKRVYSSKYALSSIVYCGKCGDLFRRVSWKARGATSIKWRCASRIEKGPKKCNAESVNERELQNAVVRAINKTLGGREEFLIQLQHNIEDVLNGDFTATLEYIDQRIAELQEKIVMCVNKNNEYEVIANEIDALREKKAKVINKDAEQEMLRKRINEMRHFLQTQSSRVTEYDEQMVRRLIEKITVYDDKFVFEFKSGMTIDLKR

SEQ ID NO: 22965 - protein, 520 aa, synthetic construct
MKNVTKIDRVDLSIFKKTRVAAYCRVSTDSDEQELSLDAQKKHYESYIKSNSEWEYAGIYYDDGISGTKTAKREGLLRLMDDCEKGLIDLVITKSISRFSRNTTDCLAFVRKLLNYDVYVIFEKENIHTGSMESEMMLAILASMAESESRSISENEKWSIKKKFQNGTYIFSYPPYGYANINGEMVVVPKEAEIVKEIFAACLAGKSTYIIAKELNKKGIPSRRGGKWTGGTINGMLTNEKYIGAALYQKTYTDENFKRKRNYGEEEQYYCEYHHEPIIDKDTFERAKEVIRQRGLEKGICCEDKQKYQNRYALSGRIKCGECGKTFKRRFHYISHGKSYIAWCCGGHLEDAKSCSMKFVRDADLKRAFLTMMNKLRFGNDLVLKPLLISITTSNSKKNIHSIEDIEESMRNNEEQRKHLNDLLAQGYLERPIFTEAHNKLTMEYEHLIAKQELLRRMDDAGYTMEQALNELVIFLNRAETFTEWDESLFERFVERVKVISREKVEFELKFGLKLKERID

SEQ ID NO: 22966 - protein, 470 aa, synthetic construct
MKGESELDKKAAIYIRVSTQEQATEGYSIQAQTDRLTKYVEAKDFILYKKYIDAGYSASKLERPAMQELIQDVQSKKVDVVIVYKLDRLSRSQKDTMYLIEDIFRPNDVELISMQESFDTSTAFGSATVGMLSVFAQLERKSISERMITGRVERAKKGFYHTGGQDRPPAGYQFNSDNQLIINEYEAAAIKDLFRLYNDGLGKSSISEYLKKNYPGKNKWLPSSIDRMLKNSLYIGKVKFSGAEYDGIHEPIIDEVTFYKTQKEIARRKQTNTKRYNYVALLGGLCECGICGAKMANRRAVGRKGKVYRYYRCYSKKGSPKHMMKTDGCSSKAQQQFIIDEAVINNLKNIDVEAELKRRSAPQTNTSLISSQIESIDKQINKLIDLFQVDSMPLDVISEKIDKLNKEKQSMEKLLERKNKLDKTELQHRFDVLKSFDWDNSSIESKRVVIEMLVQKVIIHDNSIEIILVE

SEQ ID NO: 22967 - protein, 453 aa, synthetic construct
MKTATKVKKLRVAAYCRVSTDADEQLNSFENQVSYYTEYINSKEEYEMAGIYADEGISGTSTRRRNEFNRMIEDCEDGKIDLVITKSISRFARNTQDCLSYARKLKNMGIGVFFEKEGINSLDGTGELLFTILSSLAQEESRSISENCKWGIRKGFSDGKLHLNTNRFLGYDKDTNGELVINKDQAATVRRIYEEFMNGINPDIISMRLNEEQIPGVTGEAKWTCGTIWGILKNEKYMGDACLQKTYTEDFLTKKTTKNNGQITQYYIENDHDAIIDKKFWNAVQLEIARRRAFMEKYNLRTLGRYTDEQPFSNRVICGTCGHVSWRRTLTRSNGKFKVWMCGQRYRQKGVLGCKSKSVYEKSIHEAFVKAWNQIVENRDEYIQEWKENMKGENALLAFRSKQMMELTNSKPMKRISLPLVGKVLDHCILYDDRICFILLDGTEITVEIKNKR

SEQ ID NO: 22968 - protein, 505 aa, synthetic construct
MKITAIAPKDNSRKKLKVAAYCRVSTEADEQENSLNNQKDFYEKYIRSNKSYEFAGIYYDLGISGFKEKRPGFQQMIADAMNGKIDLILTKSISRFARNTVTTLKVVRKLKSAGVGIFFELQNLHTLSNEGELMLSIYAAFAQAESEDSSMNMYMAHQRRFKKGIPAIRVYECYGYRLNSDGEIVLDEIQSQVVKTMFDLALQGIWVSKIRAYLDKNGIPSPQGKRWNDTAVNRILRNEIYKGDVMMQKTYIDADRVRHRNTGQKDRFYIEDHHPAIVDRFVWNEVQEVLDIRSMQLKQKLPKRSMGGNSHNKYSLTRMLYCPHCGSPLHHRVNSGGKYTYWCCGKKIKKGKDACIGITVPEDLTREWKITEEVTVFEEKDEFGRQHFSFMPKKEYEKSRKCPYEPTEKKGRDSHSIYPLSGKMYCGLCGSLMHHQIAWNGKEFWWCSKRIKKNACEGIKVPAEIADSWEFEGTITVMEGVDENGEKSYSYQSRAQTHHENGNKG

SEQ ID NO: 22969 - protein, 520 aa, synthetic construct
MPRKKAPAAEAPRLVAYYRYSGGSRQTEQSIEGQRRDCEAYARAHGMTILREYVDRHISGKTDDRPAFQQLVADSAAHTFDAVICWKTDRLARNRYDSAVYKKKLRDNGVEILYAAESNISGAEGIIIEGLMEALAEYYSAELAEKARRGMRESALKGKALGSSRPLGLTVDADKHYVIEPKGAEAVRYIFEQYAAGLSSSSIVERLNAMGLRTSHGGPFNKSSINRIIQNEMYRGVYVSKKFDVRIEGAIPAIIDNDLWERAQNMFERNRQSRTPHASRADYILSGKLYCGECGCLMKGVCGRSSGNGQMYHYYACPGRSIGRACTRKNIPQDELEAMVVNAVADLLLEPALLEQIADAIVELQQAEAARPDPEKQALEKSLSDVRSKIQNILTAIENGTSSAALSARLADLEQQESTLSYQLSSLTAKKPLTFTRDQILFLLQQFRVSPSERTKAYCRRLVDTFVDHIELTNTELILYFNISDETIDKNKKAPRSNPSKESSTEKRLVRVARIELTAS

SEQ ID NO: 22970 - protein, 521 aa, synthetic construct
MIAIYARQSIEKKDSVSIETQIEKCKYYCENQDYKIYKDAGYSGKNINRPQFSKLLEDIKSGIITRVIAYRLDRISRSIADFSQLLIMFDKYNVDFISATENFDTNTPMGRAMINIVMTFAQLERETIVERVTDNYYFRANNGYWAGGYAPYGYSIEHVIGSDGKRHSILIENKNESEIVKKIYDMYTKQNISMRKIAQQLNLKNIPTKKGDSNWGINAVNSILSRPIYTEATTKIYDYFNKCGTCITNNIDAFDGKKTANLYGNAKKNTNVKALRNYDEMFLSLINCVPVISNEDWFRAQNIKGTKKNLAPRSNSSKISFLCGLVKCGKCSSNMVTQGCKNKHGIQYYYLICSTKKNLGRIKCDNKMIDISKLEDIVINDIKKHFNSNEIETKIEKHMKNNKKENINLLKQKEEFENQIIKIDIQIQNLINSIAEGNITISKYINQKIENLEKEKQNISSQLSTIIEKNNITDDNYLIEYVKNINEKINTTDFEQLKLLCHTIIDKIVITDKNIDIHYKI

SEQ ID NO: 22971 - protein, 505 aa, synthetic construct
MKITAIAPKDNSRKKLKVAAYCRVSTEADEQENSLNNQKDFYEKHIRSNKSYEFAGIYYDLGISGFKEKRPGFQQMIADAMNGKIDLILTKSISRFARNTVTTLNVVRKLKSAGVGIFFELQNLHTLSNEGELMLSIYAAFAQAESEDSSMNMYMAHQRRFKKGIPAIRVYECYGYRLNSDGEIVLDEIQSQVVKTMFDLALQGIWVSKIRAYLDKNGIPSSQGKRWNDTAVNRILRNEIYKGDVMMQKTYIDADRVRHRNTGQKDRFYIEDHHPAIVDRFVWNEVQEVLDIRSMQLKQKLPKRSMGGNSHNKYSLTRMLYCPHCGSPLHHRVNSGGKYTYWCCGKKIKKGKDACIGITVPEDLTREWKITEEVTVFEEKDEFGRQHFSFMPKKEYEKSRKCPYEPTEKKGRDSHSIYPLSGKMYCGLCGSLMHHQIAWNGKEFWWCSKRIKKNACEGIKVPAEIADSWEFEGTITVMEGVDENGEKSYSYQSRAQTHHENGNKG

SEQ ID NO: 22972 - protein, 453 aa, synthetic construct
MKTATKVKKLRVAAYCRVSTDADEQLNSFENQVSYYTEYINSKEEYEMAGIYADEGISGTSTRRRNEFNRMIEDCEDGKIDLVITKSISRFARNTQDCLSYARKLKNMGIGVFFEKEGINSLDGTGELLFTILSSLAQEESRSISENCKWGIRKGFSDGKLHLNTNRFLGYDKDTNGELVINKDQAATVRRIYEEFMNGINPDIISMRLNEEQIPGVTGEAKWTCGTIWGILKNEKYMGDACLQKTYTEDFLTKKTTKNNGQITQYYIENDHDAIIDKKFWNAVQLEIARRRAFMEKYNLRTLGRYTDEQPFSNRVICGTCGHVSWRRTLTRSNGKFKVWMCGQRYRQKGVLGCNSKSVYEKSIHEAFVKAWNQIVENRDEYIQEWKENMKGENALLAFRSKQMMELTNSKPMKRISLPLVGKVLDHCILYDNRICFILLDGTEITVEIKNKR

SEQ ID NO: 22973 - protein, 521 aa, synthetic construct
MPKITKIPASISRYTSAPIDAPVKRKVAAYARVSTDSEEQLTSYAAQISYYTEYIKGREDWEFVGVYTDEGISGCSTKRREGFQRMISDAMAGKIDLIITKSVSRFARNTVDSLTTIRLLKENNVECYFEKENIWTFDGKGELLLTIMSSISQEEARSISENVTWGHRKRFADGKVSVAYSRFLGYDKGSDGKMVVNPEQAEIVKLIYRLFLEGMTPHTIAIHLTEKGIKTPGGKDKWNATTIRRILTNEKYKGDALLQKEFTVDFLTKKTKKNCGEIPMYYIEDDHEAIIDPAVFDMVQQEMERRKTGASRYSGVSIFSSKIKCGECGGWYGAKVWHSTDQYRKVIYRCNNKYNDERCTTPHIMEEEVKTVFLKSLNKLLANRDELIENVKLICDKLTDTSELEAEKEKYAEEMSLVADMVQAAMLENARIALDQEEYRQKNDVLSARFEAAKKKHDELAMQIEEIETRGQNLRHFQETLESLNGQVTEFDSTLWGSLVDYITVYENGEKTVTFRDGSVI

SEQ ID NO: 22974 - protein, 500 aa, synthetic construct
MIEIKRVALYARFSSDHQRTESIDAQIRAMKEFCDHNKWKIVETYIDEAYSATNDRRPSFQRMIADSGKGLFDIVLVHKLDRFSRNRYDSAVYKNKLKHNGVRLCSVLERLDDSPESIILEAMLESIGEYYSSNIAREVMKGLKENAFHCKHTGGSPPLGYDVGPDKKLVINEREAEAVRIIYDMYINGYGNRDIAERLNAAGYVTKKGNPFTPNRAAFYEILNNPKYTGTYVYNRSSAKDYNHRRNSHRHKPEEEIIRIANGCLAIISQETFQKAAERRKSASAVGKLGAKHFYLCSGMVRCGECGKKMSGGKRYGKYHFHTYCCTAHRSDCCNFKEIDSEKLDHYVTALLGRELFCEASMKKQIRHLNQCISRHNRKLPAWRKALDEQLDKLNLEYIRLQSSKEKTIEICEQINTLESQRIAFESSRDNLQELEAVEYADFCGLIDSFFALQEESFRFRTFIRDYIKSITVYRESVVFSLDCGFGLLDGVDRKKQKPY

SEQ ID NO: 22975 - protein, 488 aa, synthetic construct
MNAVIYARYSSERQTEQSIDGQLRECREFAESEGITIIGEYIDRAISGTTDHRPEFQRMISDSKSKTFGAVIVYKLDRFARNRYDSAIYKSKLKSNGVKVLSAKERITDSPEGIILEGLLEAMNEYYSAELAQKIRRGMRENIIHGKTTGGNIAMGYKIGSDKRFEIDENAAAIVRRIFSEYAAGKTFAEICGGLNSAGYKTTRGKQFRNGTISRILGNRKYIGEYTLNGVTESSECPQIIDRELFDNVQELLGKHKSKHRHTNPIHDYLLTGFLTCSTCGKPLRGTAGTSKTGKRYYYYACQKKCNGRLNAEKLEQIVMNSITEYLTSENCKQIAATAYQMYQQERTENAELKTAKNELNNVSKKLERAINAILAGIQSETLQGTITELERQKKALEMEIQRLSTAMPELKLEHFEYFIQQIGAIKKTDADNRLMIDSIVNRVIVYPDKLAILINVLDKTNTPPLQQINAALAGCLYNDSIGGGDGN

SEQ ID NO: 22976 - protein, 532 aa, synthetic construct
MNVVIYARFSSSGQREESIEGQVKVCTEYAENNDYTVIGTYVDRALTGRNDKRPDLQRLLSDSNNNNFQAVIVYSIDRFGRNLQQCLTNENKLKQNGVALFSATEHFTNDPAGIFYRNLMMAHSQYYCDELSQKIRRGMDINAEKCLSTGGNIALGFKVDDKKNFQIDPDTAPIVQYIFESYASGKTVTEIINQLNSQGLKTSRGVPFNKNSLHSMLKNKRYIGIYTYKGTEKIGGMPRIISDELFNKVAEIMNKNRKAPARARAKVEYLLTTKIFCGYCKEMMTGFSGTGKSGKVYRYYVCNGTKKKACKKKKVNKEYIEDLVVNECRKLLTNENIKKIANSISKISESEKDTAHLKFLKKALSENERKHKNALNAIIECDLESVRKSLYEQIPILEKEHSELQKQIALEEKNFPVLTVPMVHFFLRKLKDGNVDDIKYRKTLINVFINKIYLYDDKLTIIFNSGDNPVTINDFLLSEIEDNSKKAEGLFLDGVAPPIESLYEHLSSPSREENELLCSYCAIFFPPSRYHN

SEQ ID NO: 22977 - protein, 516 aa, synthetic construct
MTMDRSAHSRLAVTYRRISSLNQVDNNSMCAQEQAIKDYAKKNHLKIVEAFHDLAKSGTSVQNRTGYQQMMEYLEKHPEVTCVLLHHLDRLHRNVRNQLNDIYTLKCKGIAVVTTDGLNSMDEDCMSEILDEAASAEKYSRRLSKETMKGLRVNAEQMLHNGGLPPYGYTVGSDKKLYIDEAKAPAVRKMFEMYAAGMSYKQIAQWLDDNGFTTVKGGNFKSTSIKTILENEKYCGTYFWNKRASKDFRGMRNSHQQKEDYYQVHGAIEPIVSEELFDKVQERLHDNKNRICNYNGKNYYPFNGKVFCGKCGKKLSGHVQYSRTNKNNDLVKQYRFSCSCPAVKTVNEKYLDDMVINGLRACIFSPENYEELVDKLNAYGKIQERVIDLQIEVLRSDKENAEKRCSNLMDIAENGDGTKSIVDKIKKLDKRMAKIDRRISEYEAAKKVFKAEDIDRIRDRFTEYVMENRNEDVLGFLEDTVDRIEVDDTVRVHLKKNICVDRETKKGFRQERSIKK

SEQ ID NO: 22978 - protein, 470 aa, synthetic construct
MSDKIVKKVENLPQLTAVKRTDKLIQRVAAYARVSTGKEEQQTSIVAQKEYYTDYIKSHAGWQFVGVYADEGISGCSTKRREQFKQLMSDCMAGKIDMVLTKSISRFGRNTVDTLTTIRELKSKGIGVYFEKEQVWTMDSKGEFIITLMSSLAQEESRSMSENILWAVRKRYAQGKGSFAYSRVLGLDKGKEKFEIVVNREEAVIVCKIFRMFIQGLTPHTIAIALTAAGIPSPGGCEVWSAATVRRMLSNEKYKGDMLLQKEFTVDFLTKKVKKNEGELPQYYVSNNHEPIIDPWLFDFVQENFKNRKRENKRRYSGIGFFSSKIICAKCGATFGPRPWHSTSYNNSVWQCRNRYSAVKCKTTNIYDKLLFYVLHDVARKKIVAKDIRTAIVEFAADAVSADRLAAIERYIENFESMSAWKMLSDADDLSFVIDRVLVKPDRGIEVLWLDGSVDGYEIPRYTPKGGIEE

SEQ ID NO: 22979 - protein, 519 aa, synthetic construct
MAMAQNITFIPAVKTVGTQKPAEKKQKVRVAAYCRVSTEFEEQESSYETQVAHYTSYINGNPEWEMVEVYADNGISGTRTAKREAFNRMIADCEAGRIDMIITKSISRFSRNTVDCLKYTRKLKEMNIAVFFEKENINTLDAKGEVLMTIMAALAQQESESLSANVRLGIQFRNQQGKVQVNHNWFLGYTKDESGKLVIVPEEAEVVRRIYREYLEGASFVKIRRGLEADGILNGAKHTRWHETNIRQILTNEKYIGDALLQKTYTVSVLDKKRSMNDGAMPKYYVEGCHEAIIDKETFLLVQEELARRSALYKGGKKRVYSSKYALSGNVACGHCGNIYRRVTWYVGDTKPVVWRCVSRLTPGEECVGRSVPEEELHAAIASAVNMTYANRDDIIPVLKENIESVVGCDVDEEIEVIDNMIRKSQMDLLDAGKDEARIQEIGERIVSLRERRQDVLTQAALKKDKIDRIKAMIRFIEEQTGEAEYSEILVRRMVEKVTIHDDRITVEFKSGLAIDVDA

SEQ ID NO: 22980 - protein, 519 aa, synthetic construct
MKKVTKIAETASSKVKLKKIRVAAYCRVSTDSDAQLESLEAQKTHYENYITSRDDWEFAGLYYDEGITGTKKDKRPELLRLIDDCKAGKVDFVITKSISRFSRNTTDCLELVRKLLALYIPIYFEKENINTGSMESELFLAILSSMAEGESVSISENSKWSIQKRFESGTYKVSYPPYGYDWDGEQMVINPEQAAVVKEIFAALLSGKGTHAIADDLNQRGIPTKRNGRWTATTIRGMLSNEKYVGDCLFQKTYSDSRFVRHNNHGEQTQYMVKDHHEAIISREDFEAAHAFIHQRATEKGVVKGSDKYQNRYTFSGKIICGECGDTFKRRIHSCTGYKYTAWCCSTHIKDKDKCHMLFVKDDDLKQAFITMMNKLVYAHRIILKPYVDALKNTSSDDSLRRIQEIQSLLAQNTEKRETLTKLMTQGIIDPILFNQETNELLSQADSFRDEINALKNAVSGDVTKVTAATALLHFTEKGGILQEFDDDLFNEYVNRIIVRSRNEVRFELKCGLTLRERM

SEQ ID NO: 22981 - protein, 524 aa, synthetic construct
MPKVTKIPPRLNPATFAPLESVEKRKVAGYARVSTDSEEQKTSYTAQVDYYTKFIKERIDWEFVGVYTDEGISATNTRHREGFNRMIADALNGKIDLIVTKSVSRFARNTVDSLTTIRKLKEKGVEVFFQKENIYTLDSKGELLLTIMSSLSQEESRSISENVTWGQRKRMADGKVSLPYSHFLGYRKGKDGIPEIVPEEAEIVRYIYRSFMEGKTPNHIAECLTFKHVPTPAGKEIWSPSTIESILTNEKYRGSALLQKSFTVDFLSKKKKINEGELMQYYIPESHEAIIPPDEFELVQAEYTRRKRIGRAYNSKSIFSAKLVCECCGGYFGSKIWHSTSKYRRTVWQCNGKFKNGKKCMTPHLYESHIKEKFLTAMNQVLANKTEIIENCLLFKETFSNTAMIEEKIENIQKQMEQLTKQIRMLIQKQSITPIKSEDYYRQYDGLVISFGKLKFKQDTLIQKQDEMENKLKFIMDYIEFLKSQENLIIEFSETLWFRAVDQVTVCTDGKMIFAFKDGSKIKV

SEQ ID NO: 22982 - protein, 437 aa, synthetic construct
MERLIQKIEPSVDISHKLRNVAAYARVSSGKDAMLHSLSAQVGYYSELIQSNPEWRFCGVFADEAITGTKESRPEFQKMLAECRKGKIDLIITKSISRFARNTITVLETVRELKMLGIDVYFQEQNIHSISADGELMLSILSSYAQEESFSASENQKWRIRKDFEQGKICNIRMLGYRRTTNGSLEIVESEAEIVRFIFLNYLSGNGKLLISNKLNEMGIATINGCEWTTADIHRILQNEKYAGNMLLQKRFRENHLTKRMIRNDGQLPKYFVEESHPAIIEKSIFDAVQKKLEEQRQQFSTSKSVVSYPFTGKIQCTCCGKNYRHKITATGNVWICATYNTRGKKYCPTAKQIPESTLISVCCEILSITEFDANIFENQVKKILVPAPNKLIVQLTNGKCINTTWKDRSRSESWTEEKRAAATESSKTRRWKKCQK

SEQ ID NO: 22983 - protein, 526 aa, synthetic construct
MPKVTMIPATINPLTHLPKVAAQKRRVAGYARVSTDSDEQFTSYEAQVDYYTKFIQSKPEWDFVKVYTDEGISGCNTKKRDGFNSMVSDALAGKIDLIVTKSVSRFARNTVDSLVTIRKLKENGVECYFEKEGIFTFDSKGELLITIMSSLAQEESRSISENITWGQRKSFADGKVHLAYKRFLGYEKGEDGRPTIVESEAKVVQLIYRLFLDGKSQAAICRCLEDLGIPSPGGKDKWSKTTVISILQNEKYKGDALLQKSFTVDFLEKRMKPNEGEVPQYYVEGSHPAIVDPDEWDHVQTEFARRKALGRAYSGKSVLSAKLVCEDCGGFFGSKVWHSTDRYRRTIWQCNSKFKVEERCHTPTVNTETVQRLFTQAYNRMMENREQIIKDCETMRRALTDFAELDAEIERQLEETQVVAELVKAAVKENASTAQSQEAYLRKYEALTERYEKAAAELERLQNLRTTQSQQDKAMALYIRTLKKQPVVLREWSDTIWTVMVEKAIVHRNGAITFVFKNGTEVKVGE

SEQ ID NO: 22984 - protein, 433 aa, synthetic construct
MSGKITTVSKPPKLERKKRVAAYARVSSGKDAMLHSLSAQVSHYSDLIQRNSDWLYAGVYADEAKTGTKDSRADFRRLIADCHAGKIDMVITKSISRFARNTVTLLQTVRDFKAWEVDIFFEEQNIHTMSADGELMLTILASYAQEESRSASENQKWRIKRNFEEGMPWNGAMLGYRLKDGRYEIVPKEAALVRRIYNEYLAGDGYQAVAKRLTEEGVPSRFGGKWNQSVVSKILSNYTYTGNLLLQKTFRENHITKKTVINHGELPKYHAEDAHDAIISIETFHAVQTEKARRAAQFNKKPAPRTTYPFTSLLVCDICGKNYRRKTTKTGIVWVCGTFNTLGKSVCASKQIPEATLQQVTAEVLGVKAFTREQLHSQVQSIRVCNGNILVFCFKDGSEVTRTWKDRSRAESWTDEMKEAARRKTLERSKHNA

SEQ ID NO: 22985 - protein, 566 aa, synthetic construct
MPTARGYVRVSTEEQAVNGVSIDAQKEILQAYAVVKGYTDFKIYTDEGFSGKNLNRPDVQRLLEECRSGKVEAVIVWRLDRLSRSLRDTLETIEDIFMPAGVSLISVTENIDTSTPAGRLMLNILASFAQNEREAIAERVRMAKNSMAKDCKHLGGYVPFGYKVNQQGYYEIDEKTAPIVREIFRMYNARMGYTAILRYLHDQGVKSPQGNDFKKNSLNYILRNEKYTGTYIHNRLAPQSVSGKRSSKANPIENQIRIPGGMPAIIDQATWEKTCAIREENKKCGGAHKPRVEFLLTGLCYCAVCGARMVVDVGGKDRNGTTQRYYVCKKKCVPPARKEELENAVFAILHEILTHEQILAQACDLANQFAAAEIEDATEQLRILEHQRIAAHKRLHAITDYIAASGAQAPATLLKEIQSLESSIRSLDMAILKARRPRLVYDFAALRGVLLGVQLAQQKPPEQVKPLLQAALRGVYVSAGSYDLALHGIDNVEMRRVELLSEGSFTGISPSAVRDLTFPPPYARGQAEGISSFMNTSTLQSLGVLVPRVNDVRNRPRGQAGLASRR

SEQ ID NO: 22986 - protein, 550 aa, synthetic construct
MADGQQWLSAVFFLLYAKKRKVKGNLRKHLLLLAFRVIYRLQKRKEVRLVEIQIREGSREQKRKLKVCAYCRVSTDADEQENSLENQIRHYETVIKANPDYEYAGVYSDFAISGFKEKRPGLQKMLADAEKGKIDLILTKSVSRFARNTSIVLEATRKLKELNVGVFFELQNINTLSGEGELMLTILAAFAQAESESGSAGAKMVYQRKYEAGIPVQYLERSFGYTKDERGVFVADEAEAVWVRKIYEMAAEGYTPASIKRYLNENGIKTVGGVQWVDSTVFRLLENEIYKGDYIMHKHFVNEERKLVRNRGEVDAWYIEDDHEAIVSPELWQKAQDALAAKRDYLAEGSVIEEFTEENYPYMNKIYCAKCGYPLYKRIYSKGNRLNWGCSGTKRYGKSFCDGINIPDGVLRSAWHFEENTYIDEKASDKGVKEFTYLKERSWKRRHKKKQPSAIPENTETEYPYREKIFCALCGSRLVRYVNPQNHKVTWVCNRRKRKGKEACDGTRVPDTVIKGWGEIKNDIYIQRKDDKNGKKRYSYTSKKPSGIRV

SEQ ID NO: 22987 - protein, 463 aa, synthetic construct
MARSVTVIPARNRQVSGYRAAPQKKIRVAAYCRVSTDQEDQLHSFEAQVDYYTKYINDHENYEMAGIYADEGISGTNTKKREQFKRMIADCEKGKINLVITKSISRFARNTQDCLMYSRKLKNLGIGIIFEKENINTLDSTGELLFTILSSLAQDESRNISENCKWGIRTKFKNGEMHLNTFKFLGYDKDENGKLIINREQAKTVRRIYRDFLWGLNPAQIAKELEDEQVPGCLGQTKWYASTVIGILKQEKHMGDALLQKTYTADFLTKRQVKNNGEVAQVYVKDSHKGIIDKETWNAVQEEFERREKFMQKHGTDRYSYGSECYPFCEKIFCGECGSLFTRHSWKSRGIIQWQCKNHRKDGKVACTNAYVDNADLEKGFIKAFNRLVGEREKHIERWNSMKLDGTPLEKIRAGQMMEATESGQLQQYVPEAAQLVLEEITIFGAKKYEFAFLEGSRVKVSV

SEQ ID NO: 22988 - protein, 529 aa, synthetic construct
MTETNISTARVPQVTVIDPRIPEKAKLRVAAYARVSSDSEDQVNSYIAQVDFYSKYIAGKEEWEMVDIYADEGISGLEARNRDDFNRMMTDCREGKIDRVLCKSISRFARNTQEYIQFVRELLRLGISIHFEKENIDTGKMTSEQVAQIYGAFAQMESTNHSSNMRFSVRMRMEKGLFVPSSVPYGYRLAGRDLEIIPEEAEVVRRIFSAYLSGQGKDDIARELNQLGVDRGRNREKWHPSTVAYILTNISYTGDMIWQKSCATDTIPFRQVRNLGQKPRYFVEHSHPAIVSCADFQRVQELMSSRKGQFHGTHRISKGSLYDKHIYCGGCGSLCRKKITVGKTYWVCRRHDGNKADCPTPQIPEPEITAAVLRLYHKLKLGQETVLRPVLSQLQELRERELRSNRKISDIDNEIARISEQNLVLVRLKSKGYVDSALYLSQMDEIDRKLRELRKLRRRLLEAAGEDRQIHDTERMMEYLEDGPEWLDEVPAELFGELIERIIIISPERLKFRLLNGMELAENIERTVR

SEQ ID NO: 22989 - protein, 549 aa, synthetic construct
MNIQKTAPTPKLVTMIPADPQMTERDLRKKHLRVAPYCRVSTDKEEQLSSYEAQIEYYTEKIDANPDWTMVRLYADEGITGTSAKKRKDFLQMIRDCERGKIDLVITKSVSRFCRNTLDGLNYVRRLKRHGVGVYFEKENVNTLFMDNEMILTFMMSQAQAESESLSGNVRWGHRKNFKDGKVYYHCKTFLGYRWGADGQPEIDPEQAAIVRRIFSRFLLGHSVRQITTDLMADGIKTATGKTVWHDSVVQKMLCNEKYIGDALLQKTYIADLFTREKRVNNGELPKYYVHDCHPAIIDRETFQKVQEEIARRSSLKKTSSKAKTQLGKYCGKYVLSELLVCGECGSPYRRVIWTQKGVKRVVWRCQNRLEHGRKICKQSPTLDEGNIHDAVISAMNELFRMQAAKDAVKAGIAAVLAGEEQTMSLPAVEFQIRNLQERQLELFQLIVSAGADCTDYDEELQQVNMAKTRLMAQKAELEKEQRGAAAFESRLAELDMALEQASGTLTDFDELTVRQLVSNIKMLDKDSLLICFKDGTEITQAMQRRQTA

SEQ ID NO: 22990 - protein, 513 aa, synthetic construct
MLYAIYLRKSRADLEAEAMGQGETLARHRAALLDYAAHHGLEIGAVYEEIISGESIDARPKMKQLLREVEQGRWAGVLCMDIDRLARGNSADQARVSNTFRISGTLIITPSKVYDQSRESDEEYVDFELFMARREYKAISRRIMRGRIASVKEGHFIGSTPPYGYDKVKVEKGRGFTLLPNSESDTVKQIYSMCISGMGCNAIARRLDMMGVTPRKGSSWSSASIQDILKNPVYCGKIRWQYRKEEKSLTDGIVTTRRRENPDCIIAQGLHPALISEEEFEKAQQFLNSRRIPHKKESTELRNPLSGLVYCGMCGSMMTRLGTGSRNHSDTLRCPNRNCGNVSAKLELVESALVEGVARWLNDCRVNVSRKPAADTAKAERTAAEKVRAELAKLDSQREKIYSFLEQGVYSAGEFRERMESLEKRRTQLSENLRQAEQAVSEAEGNRQLYAQIIPSVERVMDIYAQSTPEEKNRLLKTIISRAEYIKTERNTRGNADRCNFTLNVTPLFPETD

SEQ ID NO: 22991 - protein, 588 aa, synthetic construct
MRIVNKIEAKTPQMPRRKRVAAYARVSMESKRLQHSLSAQVSFYSSLIQSNPAWEYVGVYADNGITGTKAEAREEFNRMIADCEAGKIDIVLTKSISRFARNTVDLLNTVRRLKELGVSVQFEKERIDSLTEDGELMLTLLASFAQEEIRSLSDNVKWGTRKRFEKGIPNGRFQIYGYRWEGDHLVVHEEEAKIVRLIYDNYMNGLSAETTEKQLAEMGVKSYKGQHFGNTSIRQILGNITYTGNLLFQKEYVQDPISKKSKINRGELPQYFVENTHEAIIPMEVYQAVQTEKARRRELGALANWSINTSCFTSKIKCGRCGKSYQRSNRKGRKDPNANYTIWICGTRRKTGNAHCRNKDIPEPMLKEACAAVLGLDMFDEIIFSEQIDRIEIPAPNEMIFYFKDGHIVPHHWESTMRKDCWTDERRAAKGRYVQEHQLGPNSSCFTSRIRCDSCGENYRRQRSRHKDGSFDSVWRCASGGKCNSPSIKEEVLKNLCADAMGLESFDETAFREQIACIHIVAPFQLSIRFFDGHTFEAAWENKRKMPKHTEQRKQHMREVMIQKWREKCGESNDYTGDDKPVHGNADQ

SEQ ID NO: 22992 - protein, 528 aa, synthetic construct
MQETNISINEIIMYLRKSRSDDPYMTVEEVLARHERQLQEYALSSFGSSIPEERIFREVVSGETIADRPVMQSVMKYLESGQIKGVLVIEPQRLSRGDLEDCGRIINAFRYTNTLVLTPPKTYDLSDEYDRKFFEMELTRGNDYLEYTKKILNRGRLASVKQGNYIGSIAPYGYRKIKTGSGKDTSHTLEIVPEQADAVRMMAQLYLAGNGFTRIAAHLDSLGIKPLKSDHWSPAAISDILSNPVYIGMIRWNHFKTIKTMQNGQIVKSRPANHDTDYILVPGKHPAILDQGTFDAIAQRRGKSPKIKRGHELRNPFAGLVYCGTAGCGRSMTFKQFTNYRSKVPRRSESMICPNQRICHTKSVQYSAFVERVKEILSKTVDDFEIKLQNDDGNIVRIHENIIRNLEQDLVKLKDKDLRQKDAYEDGIYTKEEYASRNAKLQEQICEVQLSIQRAKDTMPPEVDYQERVSRFSDCLSKFEDTDISASEMNLLLKSCIEKIIYHNSSESKPGIGRFVANPFELDIYLRL

SEQ ID NO: 22993 - protein, 505 aa, synthetic construct
MEITVEKARANIQKPGTQALGTLKTVRVAVYARVSTDMEIQLHSLEEQMRSFRTKIAQHPGWTLVDVYADKGISGTSVKKRTEFLRMMKDCEDGKVDYVMTKSISRFARNTVECLSYVRHLQSMGVQLYFEKEGLDTATAVSELILTVMAAFAQEESRSISENLKWGIRKRFEAGEARWCATYGYRKGPDGEIVIEPDEAAIVRMIFKMYQYGITMPDILEELNFMRTPSARGKEAWNKTALKYLLQNEKYIGDVRLQKWISVDHISHKSVPNDSTVVPIYNVKNHHVPIIDRHTFLQVQRIMELKTPHGEYSRYPYFDTTFVCPYCGKKMIPKTMKTNSFGRIIGCFGVDGCRKYTMITNLVDTALLEAYNTLKIKEKSRSAEMMRMLEIKKESPKMETVQYYWLDDLIDRVEFKDDTMKVFWKCGLTNKVDMNIPKNRKPEVIAKRYCAMQDRILESANKPVNSEEPVKESKIKRPADAQRTAARQAAMNLRSRQKGKVANDN

SEQ ID NO: 22994 - protein, 559 aa, synthetic construct
MSKTVAIYVRVSTGKQADRDSIPFQIQECSNYVKHFLKTENFEVFKDAGRSGKNTHRPEYQRMIEKVKSGMISHVVVYKIDRISRNLVDFSIMYNDFKEHKVAFISLNEQFDTSSAIGEAVLKIILVFAELERKLTGERVRDIMMNRALEGKWNGARVPYGWDWDTKKQCPVHSDTEAEYARMMYRLYDESHSTCVVRDYCNAHDIPTKRGGEWTSKTVADFLRNPMNVGDYRYNYRKSARGKRNDPSEVIYVKDVFPPLIDRELYERVTHQMDLNTFGLGKDGRKVVSKKTHVFGGLVVCGLCGAFYHSDADVVRADGFRPSNYRCGAHNKKIHCKAKGTSDVKLGPFIFNYISNLVKASKSKKLLHSVSDLEQILLTGPEFEQVAGIADIGLDVTFDTIMHGFKPKRYTAAPYTVIRSGDSDALTAKRDKTIRALERLKKLFLFEDDAMSEKEYLMSKRELEGTLSDIENELSALETDATDTKYDDMSFISTASGFLIAHQIASGEHINYRELACAVDAKVLKDFANSVIERIVLLDGRVASIEFKNGLVHEFLYRE

SEQ ID NO: 22995 - protein, 551 aa, synthetic construct
MNAVIYARFSSHNQQEQSIEGQIRYCTEYAKKNDMTIINSYIDRAISGTSDNRPEFLQMIKDSNNHQFNVVLVWKLDRFARNRYDSAIYKNALKKNNVKVVSVTEYLGEGSESVLLEAMLEAMAETYSRQLSENVRRGMRESALKCQVVGGSVPLGFDTVDKKYVINEKEAEIVRFIFDEYVSGTSKKEIVNKLNAKGWRTKNGSTFVFNSLNKILSNRKYIGEYKYEDIVIEHGIPAIIDERTFNLAQKQLAKNKQNRGTKSAKHEYLLATKIFCGYCGGSMIGETATGKGGGKFGYYVCRNRKKHINDCKKRREKQKELETFIVERTLYMYKNKDFVNEVAQKVVDLYNKECGQNHLKTLELNKKELEKKLEELSDGLLKTTNARVLKKFNEQINKLDNQLAELEIEIAREKAIANATMKRSDVIDFISDIMDGDINDKQFQKKIIYTFINAIYVFDDKFIVYYNGSSTSDKVTFDDLIHDLGNKGVEGSTFNTLTPPNKYWMNTYFFSGGFAVRCVLWYKNRTPFQCKSWSGVFLSLKDFLSTYSIFG

SEQ ID NO: 22996 - protein, 524 aa, synthetic construct
MDEKRLVDGATALAEKQPRVIKIEPTERPQNVRLRVAAYTRVSSDSEDQLNSFAAQNRYYTELISSKAEWRMVDIYADEGITGTSVAKRDDFQRMMADCRRGLIDQILVKSISRFARNTKDCLQNIRELKELGVNVRFEREGIDTVNVSSELITAIYAAFAQKESESISGNMQWSYQRRMESGEFNTCKAPWGFRLDGRKLKICEPEADIVQRIFREYLSGKNPQEIADDLNASCLTERVWNYKAVDYILQNERYAGNALLQKRYTPDMLSRQQKTNHGEREMYFVPGSNDAIISPELFERAQVLRQKRSLGKAPVHSEIISQIRCICGARMRFKNVNSKWYLCCTSHDTKGDCLITPVRETQIHASFCRLYYKLKHQSIPILEQMLTSLQLIRNRRMLWSPDIVAQNKRISDLSSQNQTLAFLKQQGLVDPDIFIAKTNELTKQLRQAKLEKEKLMDAESDMTALQTQDLIDLLEGGPEFLDSFDAELFGELVEKIIIESNDSVRFCLKNGLELRESIERTVR

SEQ ID NO: 22997 - protein, 539 aa, synthetic construct
MKEDAPRVIKIPAKPEATRQAEARRQLRVAAYCRVSTKEEDQANSYEVQKEYYTDKIMSNTAWTMAGIFADKGITGTSAKKREDFMRMIRHCRQKKIDVILTKSVSRFSRNTVDCLYYIRALKQLGIAVIFEKENINSLEEDSELRITLSGAFAQSESESISANVTWGKRRAMEAGKVSIQYKKLYGYRKGEDGQPEIIPEQAEIVRWIYERYLTGASLRMIKEELEQQGVKCSEDSPEWTISRIRSILQNEKYCGDVLMQKTFRQDFINRKAIKNTGQLPMYLIENHHEGIVSREKYDAVQAEMARRNAAKSPSKNAVTGMASYASKYALSERLVCGECGTLYRRCTWTRNGEKRVVWRCVSRLDYGKKYCHNSPTLDEAPLQQAILAALNTAMADKNSLIRQITAAMETELIPFPGGTMSLGDIECRLRVLEQQFQTLLEKATDDPAAYGGQFKEILDEQTFLKEKRSVILANNNEQAKANQRIMDAAQTLENASPHITEWDESAIRQLVETVKVLSKDEIAVTLKGGIEIRQKIMC

SEQ ID NO: 22998 - protein, 569 aa, synthetic construct
MAEQNEKIVALYVRVSTGYQVDKDSLPFQKKELKAYCEHVLHIDKNRIEIFEDAGKSGKNTKRPAFERMMGKVKSGQVSHVIVYKIDRISRNLVDFSLMYDDFKYNNVTFISLNEQFDTSSAIGEAILKIILVFAELERKLTSERVTDVMIGRAQNGQWNGARVPYGWDWDEEKQCPVHSEKEAQYAIAMYEMYLNGGSTVSIRDYNNAHNIPTKRGGEWTSKTVADFLRNPINKGAYRYNYRESARGRKKPNEEVVFIENAFPPLVEPRIWELVNKRMDENILKLNTSSMHTIRKNCNVFAGLIVCGKCGVNYQVTAKDRRKGSGFRPSSYACTGKYQKNHCDNLNVSDVKIGPFMINYIAAMVDASKSRKFIKDTKSLEQVLLSHINFSNIAGIANDSLQETLELISGYSASKSALWSAKTLSKEQQTDVDSKQSELNERLQKVTRAMERLKKVYLFSDDGMDEKEFLEMKSSLEADRVKIENEIKGLSAPIATNVDQVAFIKSASEFLLMHKINSGEFVDYKELATLDEESLKQFMNSVIDHIVVRERKIVEIVFINGLSHTLLYK

SEQ ID NO: 22999 - protein, 463 aa, synthetic construct
MRRKTTAPVEKILLRVAIYIRVSTDKQVKDGDSMRDQLATGQKYIDSHENMILVDTYIDDGISGQKLKRDDFQRLIDDVRAGRIDLIIFTRLDRWFRNLRHYLNTQDILDKHGVSWTAIEQPYFDTSTPHGRAFVNNSMIWAELEAQNDSDRILGVFDDKVDNGEVLSGSTPLGYTIVNKHLVPDDDAPTAVAIFQYYRKTGNLSMTLRYMESEFGLVRSAASLKNMLTNTKYIGEFRDNKNYCPAIIDRDLFFDVQRLLKINIKSGKKHDYIFSGLVVCDDCDHIMSGCQQRAKGRVRADGTQIVYKYSVYRCRQGVNLHRCPNRKLVFETTLEKMLLERIRPELENYIAEYEVANLPALRTDAKRRSVEGKMQKLKDLYLNDLITMDEFKLDREKLLMQLEKINAEDSRPVKDLSYLKNFLKMDFESVYDSLSIPERRELWRSIVKEIRVDHDKNIHIIFL

SEQ ID NO: 23000 - protein, 517 aa, synthetic construct
MPRKKKLQEVGGLRLVAYYRYSGGSGQTEQSIEGQRRDCEAYAKLHGMTIQHEYIDRHISGKTDDRVSFQQMIRDSDKGAFDMVICWKTDRFARNRYDSAVYKKRLRDNGVEIIYAAESNISGAEGIIIEGLMESLAEYYSAELAEKMRRGMRESALKCQAINRCRPLGFTTDAGKKFIIDERTAPAVRFIFEHYAAGESAAYIVEQLNEKGYRTSQGNEFNKSSINRIIQNEMYRGVYISKAYDVRIEGGVPAIVDDELWRRAQAMAKLNKQKRAKYSSKADYFLSGKLYCGECGCLMKGISGHSSTNGEVYRYYACSNPKCKKHNVPKEELEGKVIQAIIDNLLQPEAMEALAEAMVAVQETDADKPNAEREAIQQELADVRRRSKNILDAIENGTANPHLTARLDELTERENTLRFQLSTLTDEKPLRFTKEEYLFLLEQFLIDPAERNEDYGRRVVHTFVTSMEVSDSKLLIYFNISEENADKNKNASPSELQKESSTVKRLVRVARIELTAS

SEQ ID NO: 23001 - protein, 516 aa, synthetic construct
MARKKKVSPGNRLVAYYRYSGGSQQTEQSIEGQRRDCEAYARQHGLTIVHEYVDRHISGRGVESRLAFQQMIADSSKHLFDLVICWKTDRFARNRYDSAVYKKKLRDNGVRILYAAESSVEGPEGIILEGLMESLAEYYSAELAQKMRRGMRESALKGRAINPSRPLGLTTDEHKRFIIDEKNAPTIRFIFEHYAAGESSASIVEQLNAAGLRTSKGNAFNKCSIPRIIQNEAYHGVYICKAYDVRIDGAIPAIIDDDLWKRAQKMLTLNKQHRAPHSSHADYLLSGKLFCGCCHSLMRGISGHNCRNDVYYYYACGNKADGGTCKKKNISKDVAENLVVNAICENILRPDTLEDLADAIAAAQQADVNQPDPERAMLEQNLADVHRKINNIIESIENGTASSRLSARLADLEQQESTLNYQLESLKEIHPPVLDRERILFLLEQFLISPNERTEDYNRRIIDTFVNRIEITDTEMLIYFNLSEASASEKQKNSQPNSCSTGNHLVRVARIELTAS

SEQ ID NO: 23002 - protein, 516 aa, synthetic construct
MARKKKVSPGNRLVAYYRYSGGSQQTEQSIEGQRRDCEAYARQHGLTIVHEYVDRHISGRGVESRLAFQQMIADSSKHLFDLVICWKTDRFARNRYDSAVYKKKLRDNGVRILYAAESSVEGPEGIILEGLMESLAEYYSAELAQKMRRGMRESALKGRAINPSRPLGLTTDEHKRFIIDEKNAPTIRFIFEHYAAGESSASIVEQLNAAGLRTSKGNAFNKCSIPRIIQNEAYHGVYICKAYDVRIDGAIPAIIDDDLWKRAQKMLTLNKQHRAPHSSHADYLLSGKLFCGCCHSLMRGISGHNCRNDVYYYYACGNKADGGTCKKKSIPKDVAENLVVNAICENILRPDTLEDLADAIAAAQQADVNQPDPERAMLEQNLADVHRKINNIIESIENGTASSRLSSRLADLEQQESTLNYQLESLKEVHPLVLDRERILFLLEQFLISPNERTEDYNRRIIDTFVNRIEITDTEMLIYFNLSEASASEKQKNSQPNSCSTGNHLVRVARIELTAS

SEQ ID NO: 23003 - protein, 536 aa, synthetic construct
MKKTKNPVQRAVIYARYSCSNQTEQSIEGQLADCEKFAEKYNYYIVDTYIDRAMSATTDRRPQFQQMIADSATGGFDVIIVWKLDRFARNRYDSAVNKQKLNSNGVKVVSVMEHIEDTPEGALMESVLEGFAEYFSKDLSQKVSRGMRETALKFKATGLIPYGYKKTSDNICVPDEHTAPVVKKIFEMYADGVINKDICDWLNSHGYRTSNGNLFRNQYLRKILNRRRYTGSYTYGDLELHDENQRIISDELFDRVQIQLQAKKRTGRIAREQYILVGKLFCGYCRNPIRGESGRNHQNRIYTYYKCSVNKTGGKCPKTTVQRDIIENNTIKFILNNFLNDEIINSVVDTIQASETAENNSAELITLRTQIEDTDRKINNLLTAIENGVFTPSTKQRLNDLENVKEKLKYELIVKQSEKNNFNATAFKRFLKNIDVDDFKTTEQRQKLINLVLYREYLWNDKVLYIFNLTPSKPNDSVDIDSYVDALLASTGSTSPTDGVPQVAISELLFGYFFVMGFFPFHKHFALSFFALYIYR

SEQ ID NO: 23004 - protein, 400 aa, synthetic construct
MSGNHNKNHFAAAYIRVSTENQTELSPSSQLKIIRKFADEKGYLIDEKFIFRDNGISGRYADKRPEFNRMISLAKQKPPLFSAVLVWKFSRFARNQEESIFYKSLLRKNGIEVISVSEPVDDGPFGKLIERIIEWSDEYYSIRLSGEVRRGMTEKAERGGIVSIAPFGYKVTDGRLVVDAEKARIVSKIFADFLNNKDINMICDNLNSSEIRTTKGNLWDCRAVEYILQNPVYIGKIRWNPICKTGRDFHNENLIISNGTHEPIVDEVIFEQTRQILFLQKIIGKEHSHKQTEIRHLIQNLVKCSNCNSTLVPIKNNFLQCSAYIHGNCHSSHSVRIEKIEKVVIKAINILIKNNLINDAFTIKETYPLKTQNGLLSIITKRIIFDRKASHLNIFLSQNK

SEQ ID NO: 23005 - protein, 495 aa, synthetic construct
MLRIAIYTRKSVFKENSESIDTQIELSKKYFQGSHHFEVFIDEGFSGGNTNRPAFKKMMNMIKLRKFDIVATYKIDRISRNIVDFVGIYEDLKYNNVKLVSITEGFDTTTVMGEMMMFILSAFANMERENIKERVKDNMIALAKKGCFTGGFVPFGCEIEKKEGKSYLTITDEKTIQLIFNKYLELKSLYALKKYLLDNGINSLSTRSSLGRLLRNPIYCKSNPKVSNYFESKGYEVVGSPNKKGYMTYGKTSNYPTLIVGKHKACIESDIFLKVNILLDENKEVATKKESKTYWLTEVLYCPYCNSKYVLVNSGRNAYYVCQNRLNRCSNELGIDKEKEKCINSRYLNANLIEEKISYLIRELEDDNYYNSCQKDNVNTSKEEIEVLENVLSKNKAAIGNLVEKLMILSNEASIPVTRKIEELTTKNLELENKIYELKTIELAEIKSKEENEIKSAIKRFKDLKSNKEKRENVRIIFKKLKYDPYKDSISIEFQ

SEQ ID NO: 23006 - protein, 498 aa, synthetic construct
MKAVIYARYSSDSQREESIEGQLRECTAFAEKNGITVLRHYIDRAYSAKTDNRPEFQNMIKDSGKRLFDIVIVWKLDRFARNRYDSARYKATLKKNGVKVVSATEIISEGAEGIILESVLEGYAEYYSADLSEKVVRGMTDNALKCKFNGGTMPIGYVIDAEQHFQIDPLTAPFVLEAFKRYDGGETISSIMNWLNEQGLTNTRGQKMTFNSVGHILHNRRYIGEFRYRDVVVPDGIPAIVPQDLFDRVQEKLVKNKKAPARHKAEDDYLLTTKLFCGYCGAYLCGESGTSRTGKVHHYYKCVSVKKKRTECHKKPVRKEWIEDLVVGETMKMVMDDKAIEAIVSMLMDLQDRDNVNVPLYEQQLREADTAISNLLNAIQQGILTRSTKERLEELENRRDELENRLACEKLAKPKVSAEFMTFWLHRFRKLDVRQQSHRKMLIDAFINAIFLYDDKMVITFNYKEGTKTITFAELQEAISNKNGSDLDCLAAPFHNPL

SEQ ID NO: 23007 - protein, 590 aa, synthetic construct
MKTVEKIERKLPVLKTRKRVAAYARVSMESERMQHSLSAQVSYYSALIQKNPEWEYAGVFADYGISGTGTKKREEFNRMLAECEAGNIDIILTKSIQRFARNTVDLLNTVRHLKDLGIEVRFEKENINSLSGDGELMLSILASFAQEESRSISENVKWGTIKRFKQGIPNGKFSIFGYEWQDDKLVIVPEEAEIIRWMYAEYMKGASRIEIGRVLMDRGIYTRQGKPWVDSNVKVILTNITYTGNMLFQKEYCEDPITKHRRKNYGEMPQYFVEDTHEAIIPMDEWQVVQAEFKRRRDLGPFGNKSLKLSAFSTKITCGCCRKHYRHSGKRNTAGEVYYIWICQTKSQKGVSACPSKNIPEKMLQNTAAEVLDLDKFDEDVFSQQIEEVIVIGDDTLTFRFYDGHEVTTKWQSTAKTDWWTDERRKLWGERHKRKDTNPNRNTFYEFTGFIKCGCCGANYRCQSGKRKDGTPTRSWYCTGPRSECRNPAIRDETMKRLVTEILGLDEFDEAAMDAQIESATILDHMVTFHFRDGHIESRDFLDKRHGTPWTEERREKEKKSMKAAWTDERREAMSERITKIRSEKKWPNP

SEQ ID NO: 23008 - protein, 523 aa, synthetic construct
MAKSVTTIPATLSRFTAAPINSTKKRRVAAYARVSTDNEEQLTSYEAQVDYYTNYIQGRDDWEFAGVYTDEGITGTNTKKREGFKSMVADALAGKIDLIITKSVSRFARNTVDSLTTIRSLKEHNVECYFEKENIWTFDGKGELLLTIMSSLAQEESRSISENCTWGQRKRFADGKVTVPFKRFLGYDMGPDHNLVVNPEQAKLVKRIYGMFLQGQSPFQIARTLTEEGIPSPGGKDHWNPSNIKSILTNEKYKGDALLQKSFTVDFLTKKKKANEGEIPQYYVKDNHEAIIDPETFEMVQTLMATRTKGRNRKSSVSLFSSKVKCGDCGSWYGPKVWHSNDAYRKVIWQCNHKFDGQKCATPTLTEDEIKGLFLRAANQVIDQKEQFIAIYEQVLSRSLDTTALEGELSELEAEINIAAELIEECIKENAHVAIDQAEYQKRYDALVARFDKAKARHTEVTDLIAERMARKHQIETYLKNLRSREPLTEFRETDWLAMVDYITVHSKDDIRVAFKDGTEIKA

SEQ ID NO: 23009 - protein, 511 aa, synthetic construct
MIENYLEKIKQRLKVVVLHAVIYTRYSSDNQRSESIDAQIRLIRKWAQEHNIIIDKVYADEAQSAKRDDRQQFQQMIADSKKQKDWQLVLVHKLDRFARNRMDSAAYRVELRKNKKYLISTTEQFDDTPESCMLEGIIESMAEFYSKNLARETMKGLTENALKAKHCGGTPPLGYDLDENKNYKINEFEAQAVKLIFSLFLDGNSYKTIIYALNEQGFRTKKNALFTQNSLYEILRNEKYTGTFVFNKTQSRDEVTGKRSRHQHKSAEEIIKVENAIPQIVTHEEFKRVQEKLNSRRNAYINNTKELYLLSGKIQCGICGGKFVGSRRFNNRGVKYVRYICNINHRSKEQRCNNHSIKRDWIETFVLNKVDEYIGQLTYKKKQSIYQFCWNSIANSNQPKINALNKEVRKIDKELLRISGVITLINSSTLIEKLTLLEQQKEEIQLRIKKLSKEERKNLSEEEIDLLLLKLRKMLKEKSIPQLKELMYLIVNKILVNEKDVVVYLNIPNLK

SEQ ID NO: 23010 - protein, 501 aa, synthetic construct
MEIQIREGSREQKRKLKVCAYCRVSTDADEQENSLENQVRHYEMVIKANPDYEYAGVYSDFAISGFKEKRPGLQKMLADAEKGKIDLILTKSVSRFARNTSIVLEATRKLKELNVGVFFELQNINTLSGEGELMLTILAAFAQAESENGSAGAKMVYQRKYEAGIPVQYLERSFGYTKDERGVFVADEAESVWVRKIYEMAADGYTPASIKRYLNENGVKTVGGVQWVDSTVFRLLENEIYKGDYIMHKHFVNEERKLVRNRGEVDAWYIEDDHEAIVSPELWQKAQDALAVKRDYLAEGSVIEEFTEENYPYMNKIYCAKCGYPLYKRIYSKGNRLNWGCSGTKRYGKSFCDGINIPDGVLRSAWHFEENTYIDEKASDKGVKEFTYLKERSWKRRHKKKQPSAIPENTETEYPYRENIFCALCGSRLVRYVNPQNYKVTWVCNRRKRKGKEACEGTRVPDTVIKGWGEIKKDIYIQRKDDKNGKKRYSYTSKKPSGIRV

SEQ ID NO: 23011 - protein, 435 aa, synthetic construct
MAAYCRVSTDQEDQLHSFETQVEYYTRYISDHPNYEMAGIYADEGITGTNTKKREQFRRMISDCETGKIDMVITKSISRFARNTQDCLQYSRMLKNLGIGILFEKEHINTLDSSGELLFTILSSLAQDESRNISENCKWGIRSKFKKGEMHVNTHKFLGYDKVDGKLVINEREAKIVRRIYREFLWGHSPQEIAKGLEDEGIEGCMGSKKWYPSTVINILKNEKHMGDALLQKSYTADFLTKKQVKNHGEVTQVYVKGSHIGIIDKETWNAVQLEFARREEFVKEHGLKGYGYGRECNPFTSRIFCGECGSPYTRHTWRSRGIMQWQCKNHMTDGKVTCVNGFVSQSDLELGFVKAYNMLLKHKEILIPWWKDTIETGNALERLRAKQFLDLSEQPELECYVPELAQLVIQMVIIKGIKKYEFTFMDGSRVTVCV

SEQ ID NO: 23012 - protein, 516 aa, synthetic construct
MARKKIKKGDGQRLVAYYRYSGGSGQTEQSIEGQRRDCEAYARLHGMTIQHEYIDRHISGKTDDRGAFQQMIADSDKGAFDYVICWKTDRFARNRYDSAVYKKRLRDNGVEILYAAESNISGSEGIIIEGLMEALAEYYSAELSEKMRRGMRESALKGRAISRCRALGLTTDSDKHFIIDPKTAPIVHFIFERYAAGDSSMSIVEQLNAKGLRTSQGNQFNKCSIPRIIQNEAYRGVYVSKAYNVRIEGAIPAIIDDELWERAQIMLKLNQQKRTKNAAKADYFLSGKLFCKECGSPMKGVSGHSSTNGEVYRYYACSNPKCHKHNIPKDDLEGKVVQSICDHLLQPESMDALADAMIEVQKQDAVKPNAERLAVEENLADVRRRSKNILDAIENGTANPQLYARLDELTERENTLSYQLATLQNEKAIVFTKEQFLFLLEQFCIEPSERSEEYGRRLINTFVTNMEVSDSELFIYFNVSEETVNKTKNAPQKNFQKESSSEMRLVRVARIELTAS

SEQ ID NO: 23013 - protein, 504 aa, synthetic construct
MKTAVIYARYSSDKQTEQSIEGQLYDCYNYAKANNITVIGEYIDRAMTGRNDDRPDFQRMISDSAKHTFELVLVWKLDRFARSTEDAAYNRGKLKRNGVRLLSVKEDFGDSSAGDLMMHVMESFNEFYSADLREKTVRGMHQSALKCQSTGGQIPIGYKVEGKKYAIDEATRFIPETVFRMYAEGKRLAEIARYLNEKGYRTRMGRKFTTGSFYTMLSNEKYIGVYKYGDVRIEGGYEAMIDPVLFDAVQKKLVENKKRAPKISERENFYLTGKLFCGHCGEPMNGMSGNSTKGKHLYYRCNGVRKHTGCDKRTERKEELENEIIGAIQRAFANADPEELTRKVIENYEKNSRPADQVKVMKAELQKITNKVDNVVNAIAEMGGNETLYTQLRQLTEQKEQKETEIRIAEHKADDMPTVELVKKILDIIQNADTMTDEGRQLLIDGAVSRIYVYDDSLDIYFKGGKNTEIPLNPANKDDVSDNSFACCKEWGAKQFLTLTIEKV

SEQ ID NO: 23014 - protein, 491 aa, synthetic construct
MNKKINAVGYARYSTEFQTDNSIAYQTTAIQEYCEKHDINLLKVYADEAMTGTNTNRPAFQQMLAAAEQHLFDAVIIYDISRGSRNVVDWFSFRQEMARIDIQVISCNQHLGDILDPNTYLTELITAGIGQHMVLDTRKKSIDGKNERAKKGIFCGGNPPLGYDINDGNYIINPKEAKIVQTIFTMYADGHSYNEILKELDGAVGKAGRPLGKNSLYSILKNERYIGVYTWNKRKIKIMGKWAGGRPNPDIVRIENAIPPIIDETIWRKVEERMKDNSRRATSKSCRHNYLLSGLIQCDKCGATFVGHTSTNQKKISTPYYICGNKYRTHTCCTKNINADRLETFVVMQIKHYLKTADFETLADEICKQVNSAAPDVSAEKKELSEIETKITNGINAILGGVNIPELKDEVDKLRIRKSELEDVITYKEKNKTRTLNRDKLVEMLKESAENIDSTDSNTLIRNFVTKIYAHADGTVTVNLGVHINGCGDWT

SEQ ID NO: 23015 - protein, 546 aa, synthetic construct
MKFKYPAMGTTKNAVIYARYSSHSQREESIEGQLRICHEYAKAEGLAIVGEYIDRAISGTTDARPDFQRMIDDAKKKQFSYVIVYRLDRFARNRYDSVLYKHELKQCGVKVVSATEGIGTGDESILLEALIEASAEYYSMELSRKIKRGRQDSAMKGNFLGGSVPLGYKVVDSKFIIDDETAPIVRYIFERYAAGTGKKQIIDELTAKGYMRRNGKPFTYRSFDSVLRNRKYTGEFTQTGITVEGGCPAIVDTEMFEKVQARLEINRRAPAKAKAKTEYLLSGKMFCGYCGEPMIGISGTGRHGKTFYYYSCVGRRGKSGCKKQHEKKDFIEWYVCEQTVQYMQDPERLSHVAKRIIEINDAEFDGGKVKELERAVENCDNDIRKLVDALTTIPDAGRAALYDKIERIGAAKADMEIDLAKLRVLSEVRYKQEDVEAWIRSMCRGDLMDFEFRRQLIDVFINSVYLFDDRVVIVYNIKNGKQVSAIDVLNAVEELDGVELSSDSTEDGNAGGSGSFLVADAPPYMKNPNLFPIGNGFGFLIFIQRY

SEQ ID NO: 23016 - protein, 541 aa, synthetic construct
MTDEKPRVIIIPPKPELQQTAAVTKQLRVAAYCRVSTKEEEQASSYEAQCEYYTDKIMSNKEWTMAGIFADEGITGTSTKKRTEFLRMIRQCKQKKIDLILTKSIQRFARNTLDCINYTRILRQLGIGVLFEKENINSLPPDSEFMITMYGAMAQSESESISGNIRRGRQMHAKVGTLKVPCYRLYGYEKDADGKFRVIPEQAEIVRELYKRYESGASLRNLQDWLEENQIKTVLGESKWTTTSIKSILTNEKYCGDVLLQKTFRTDVISKKVIRNVGQMTQYYMPDHHEGIVSREQYNAVKAEMARRSALRSPSKQAVTGRSCYTSKYALSDRLVCGECGTLYRRCTWTSRGRKYPVWRCTSRLNYGTKYCHDSPTIKEEPLQNAILAAINSAMSNKPALLDLIKNAVSLELLPVQGQTMSLANIEQRLTQLDEQFQNLLAEAIDADDKEACNVQFAEILAEQTTLKKQKEGILQSSTDADRVCTRMKQAEQAIESTASTITEWNENAVRQIVERVTVLSADEVLVRIKSGAEIKQRLER

SEQ ID NO: 23017 - protein, 533 aa, synthetic construct
MAKKQTDGSLALEQQRVIVIPAHDEIVARKLRVAAYARVSSSSEDQLNSYRVQNQYYSELISSNPDWEMVDIYADEGITGTSVEKREDFQRMIKDCRKGKIDRILVKSISRFARNTKDCLAAVRELKELGVSVQFEEQGIDTSKVSSEMVTAIMASLAQKQSESISGNVKWGVQKRIQDKTFVTCKEPYGYRLVDRRLCIVESEAIIVRMIYEKYLAGISMEFIRDQLNVANIPFRENEKQHRWTRKAISYILANEKYIGDSLWQKTYSGDTFPYKQRKNKGEKEQYYVENTHQAIVEKSVWHAVAELRMQRAGEKHPEDYYAPSAFRKKVLCGCCSSMFRLRQNRGCTYWSCRQHDIDRNSCPNSQIPETVMQEAFCRLYYKLKHHGSPIFTQMLSNLQKIRYSRMLWSEDVISLNKKISDTLSQVQFLAQLQQAGGVDPDTFISSNNKLSEQLRRLKQEKARLLDTDSDDLADRTRDLMDVLEDGPDFLDSFDAELFDALVDKIIVDSNERLRFRLKNSLELAEQIERTKR

SEQ ID NO: 23018 - protein, 434 aa, synthetic construct
MERVVKRVGTLIPAQPKALLVCAYARVSTGKDAMLHSLSAQVSYYSKMIQDHCGWVYCGVYTDEAVTGTKEERAGFQRMIQECRQGHIDLVITKSISRFARNTVMLLETVRELKSLGVDVFFEEQNIHTMSADGELMLTILASYAQEESLSASENQKWRIRKAFENGELANLRFLFGYNITADGVQVNEKDAAIVREIFARFNEGESMRSIGRDLDARGYRGVLGGTWCAERMRNTLSNEKYLGNALLQKQYRNNHIEKKLLPNRGELPMYYAEGTHEPIIDQATFDKAQKRLKMLAQQTANRKKPTHSAFTGLIHCGLCGNTYKRVTYRKKHYWNCTTFQTKGKSECAAKRIPEETLDALTCEVLRVAHLDPDTVRSKITAIRAENNNVVVFCMDDGSEIVERWADRSRAESWTPEMKEQARQRALQARRSKK

SEQ ID NO: 23019 - protein, 590 aa, synthetic construct
MKTVEKIERKLPVLKKRKRVAAYARVSIESERMQHSLSAQVSYYSALIQKNSEWEYAGVFADYGISGTDTKKREEFNRMLAECEAGNIDIILTKSIQRFARNTVDLLNTVRHLKDLGIEVRFEKENINSLSGDGELMLSILASFAQEESRSISENVKWGMIKRFKQGIPNGKFSIFGYEWQDDKLVIIPEEAEIVHWMYAEYMKGASRIEIGRALMQRGIYTRQGKPWVDSNVKVILTNITYTGNMLFQKEYCEDPITKHRRKNYGELPQYFVEDTHEAIIPMDEWQAVQAEFKRRRDLGPFGNKSLNLSAFSTKITCGCCGKHYRHSGKRNTAGEVYYIWTCQTKSQKGASACPSKNIPEKMLQNTAAKVLGLDEFDEDAFSKQIEEIIVIGDDTLTFRFYDGHEVTTKWQSTAKTDWWTDERRKLWGERHKRKDTNPNKHLFYEFTGFIKCGCCGANYRCQSGKRKDGTPTRSWYCIGPKDQCHNPGIRDETMKRLVIDVLGLDEFDEAAMDAQIESAAILDHTVTFHFRDGHTESRDFLDKRHGTPWTEERREKARESMKAAWTDKRRKAMSERIKKIRSEKKWPKP

SEQ ID NO: 23020 - protein, 523 aa, synthetic construct
MAKTVTTIPATLSRFTSAPINSKKKRRVAAYARVSTDNEEQLTSYEAQVDYYTNYIQGRDDWEFVSVYTDEGITGTNTKKREGFKSMVADALSGKIDLIITKSVSRFARNTVDSLTTIRSLKEHNVECYFEKENIWTFDGKGELLLTIMSSLAQEESRSISENCTWGQRKRFSDGKVTVPFKRFLGYDMGPDHNLVVNPEQAKLVKRIYGMFLQGQSPFQIARILTEEGIPSPGGKDHWNPSNIKSILTNEKYKGDALLQKSFTVDFLTKKKKANEGEIPQYYVKDNHEAIIDPETFEIVQTLMATRQKGRNRKSSVSIFSSKIKCGDCGSWYGPKVWHSNDAYRKVIWQCNHKFDGLKCTTPTLTEEEIKELFLRAANQVIDQKEQFIAIYEQVLSKSLDTTAFEGELTELEAEINIAAELIEECIKENAHVALDQADYQKRYDGLVARFDKAKARHTEVTELIAERTARRHQIETYLQELWSRKPLTEFRDSDWLAMVDYITVHSKKDIRVTFKDGTEIKA

SEQ ID NO: 23021 - protein, 576 aa, synthetic construct
MKKNFKIPGSGSETPIRVAIYVRVSTVYQIDKDSLPMMKQDLTSYCKYILNTDDFVIFEDAGYSGKNTDRPAYQKMMSQIRQGLFTHLLVWKIDRISRNLLDFANMYAELKDLGVTFVSKNEQFDTSTAIGEAMLKIILVFAELERNMTSERVTATMINRASNGVWNGGRIPFGYSYDKPTQVFSIDPEENKIYNFMVETYEDTQSIVHTSRRLNEAGYRSRNGNMWSPVAVWTILRNPWYKGVYRYNYYKIPGRKAIKDESEWVIVENHHPASIDPDRFDRIQATLDKNARYRNTPGRKTAQKNVHVFSGLVWCAECGSAFTASPGKLHVSGYRPSKYGCPNVRKTKTCHAKYTSDVVLGEFLLNYILNILNAQKQFAYIHSTDDLQKRLLHGSTFSNVDHVDPDGLASLLNMLEKCSGSDPVLLKRPRSKPKMDPELKRMMADQKKQQRALDRLNDLYLYSDDSISEREYLVRKQQITDQLQEINEAIGMMSQEPWMRTMNDEEFIRQASSFILTQKLADKQYIYYENLAESLDPEILKNFFVSILDSIILRDGRPETVVFRNGLSHTFTYKDS

SEQ ID NO: 23022 - protein, 550 aa, synthetic construct
MSRKKQVNQKITALYCRISLEDGGDNESMSISNQKLMLRDFAEKNGMFQYEYYVDDGYTGRNFNRPSFQRMIADIQAGKIGCVITKDLSRLGRNYIEAGSYIEIFFPKHNVRYIAITDGVDSLTRQEMDITPFKNILNDMYSRDISKKVLAGRMTRSRQGKFCGGQPPLGLMRDPEDKGHLIRDPETAPVIRKIYDMALDGWGCMRIAKQLMDDKVPITRVKSNTECDVNYYSWGSARISHILRNPFYKGAHLVCRTHQKGIRSNTYDIIPREDWEIIEDCHEAIISPEEWEQVQEIIDRRPTIMKGNSCPFYNLFHGIIYCATCGKSMQVRYEKVGRTGKNRFTGEQREPIDKAYYICQTYNRLGKNACTSHKIEARDLYNLVLKDIQELAKTALKDADAFYQRLSSRMERRYLLDASQTQKECQRLESRNREIDEMFLSLYTDKAKGILTEQRFMKLTATLEQEQEANQKRLQDLLLMMRHSDEQENEVRTFIKEIRRYAAIEELDEAVLNRLISKILVGEVKKIDGQKVQEVRIVYNFVGEIPEITA

SEQ ID NO: 23023 - protein, 497 aa, synthetic construct
MTAVIYARYSSDNQREESIEGQIRECTAYAEKNGITVIKHYIDRALSAKTDNRPEFQQMIKDSEKRLFDIVLVWKLDRFARNRYDSAHYEYQLERNHVKLVSATEPISEGPAGIMVKSMLTGMAEYYSAELSEKVVRGMTENVLKGKYNGGTIPIGFKVDEEKFFQVDPLKAPFVVEAFQRYNDGATMKELMNWLNDSGVTTNRNQKFTYNSVQTLLTNKRYIGENHFKDIVMPDSIPAIVDKDLFEEVQLKIKKNSRAPARHKAEDDYLLTTKLFCGMCGAMMFGECGTGRNKVVHHYYKCATAKRFKTCKKKTVRKEWLEDLVVAETMKLIQDDAVIDAIVAEVMELQDQENTTLPLLEKQMREVENGIENMLNAIQAGVLTNSTKSRLEKLEAQQKELEIRIAEEKIARPRLSENQVRFWLTRFRKFDPNVKSHRKTLINTFVNAVYLYDEKVLITFNYKDGTKTITFDEIAAKDAPEGNGSDLGCFAPPRNST

SEQ ID NO: 23024 - protein, 464 aa, synthetic construct
MPEKILRCAIYIRVSTFEQSVHGKSLQAQKECLEQYATDNNMSIVGVYADEGKTARKELKKRKAIHALVEDVKKDRIDVILFWRLDRWFRNLSDFYKVQDVLDEHGVRWISVSEPGINMETRDGRLQLNVVLSIGQNEVDTTSERIKFVNEASIRQKKLIFGDANMPFGYKTGVVDGKKCMVKDPETEHMVEDFFNYFRIHNSKKGAVRYMQETYGVDFSYGMLRTMLSSEFYKGTYRGYPYCPAYLSEKEWNEMQIISKRNIKNTPSGRIYLFTGLMRCPVCGQKLVGTGCSSIINRKTGEKRTYCYYRCNRALIDHICTYRHRVSQNLVEKYLLENLEREYEKYKVRSNQISEELKKQKKTKDPEKLRKEMERLNLLFQKGRISFDYYDKEYQRLEEEYSASAAFPEEEETRSLHYVEELLETDFRQMYDSLSLENRRSFWRSTIREIYLNEDNTIKCVDFI

SEQ ID NO: 23025 - protein, 530 aa, synthetic construct
MEQYCIYLRKSRADAEAEARGEGETLARHEKMLLAVAKRDRYHISKIYREIVSGETIAARPQMQQLLQDVEQGLYAGVLVMEVERLARGDTIDQGIMAQTFRYSDTKIITPMKVYDPNNEFDEEYFEFGLFMSRREYKTINRRLQRGRAASAKEGKYAGNITPYGYTRVKLEHDKGFRLVPDPEEAKIVQLVYDWYLNGEPQEDGSRKRLGSTYIARKLNAAHVPTRHGGKWGVNSVRGILINPVYTGKIRWNYRPAKKSMENGSVVKTRSEAEEGDYILADGLHEALISEEAYHAVQEDMHHKSVSGTHDGKKLCNPLAGLAYCACCKHVMVRRPHNKRFHTDTLMCNTLDCPNVSADLEAVERRVLSGIRDWLKQYEVEWSKNHQEPSAMDAQIATKKAAIQAAEKEQDVLKKQLDKAYDFLEQGIYDTDVFLSRSQALNDRIQDAQNSIKALQEELHREQMRKEGIEEIIPKAKHVLEVYGSLTDAKSKNELLKSVLERVEYYKGKSARWSGNPDNFEVVLFPKLPK

SEQ ID NO: 23026 - protein, 518 aa, synthetic construct
MKTYTPTDYALYLRKSRADLEAEAHGEGDTLARHEHILMELAKSRALPIGAIYREIVSGERIANRPVMQQLLSEVEDGRWKGVLVTETSRLARGDTIDQGIVAQAFKFSGTLIVTPSKTYDPTQEADEEWMEFGLFMSRQEYRMIRRRMTAGMQAAKREGRYISNVPPYGYERYKLDGRGWSLRPIESQAKVVRMIFDLYLSGLGYCEIEKRLNALHIPAPKSDKWSARTIPGILRNAHYIGCIPAAFRPGKKVVKDGQITVTRPRNHNCELYKGLHEPIIDRAVWDQVQARLGKNAAVRTPGNRQQSNPLAGLIICDCCGKRMQRRPQTGTGSQTQIQCTTRGCATVAHNADELEQLVLDSLRTFLARLEVGTPAAPDLSAERRALSEIEKQLTDLDSRLRRTFELVEDGTYTREIFLSRQAELTAERERLTADRTAIQHKIEQAQHEYDARTGLAPAVRHVLDTYNTDLPAADRNKLLKQVIDRIDYHKRTRTRWTKESDLSLTLHPVVFSSTTNR

SEQ ID NO: 23027 - protein, 565 aa, synthetic construct
MLRTPGDLFFLAEAVNSTNKFYSVSDKSARVYFLYSFLGGETMRFFSYGRKSVFSDKSDSIDNQFRMNREYCESKFSGQVDSWQQFSDEDFTGANTSRPDLQRMLSFIKGGFCDVLVVYQLDRLSRDVRDFANIYALLEEHGVMFISIKENIDTTTPIGRAMMYVTVVFAQMERETIAARVTDNMLGLAKKGYWTGGNPPVGYVRKHIVVNGKKHCSIEVDPDGARYVTQIFDTFLAYNCSLQGMETRFKNQGIRTQSGKFFSTTQLHKMLTMPYCVEATPEVYDFYAAKGCIMDPGSPREMWDGSVGVIIYGRSTEKNKKHQAQPPEKWTVCLGKHKPFMPAEKWLAVQSRFTQNKCIKDAKWPVPLLKGVLRCKCGNLMQVSRKKKVDGTCSSWYYCRKRMRQGVDACDMGQIKCDLLDEKVLELFRGITADPALIQKFVKAEAPADVPDLKAAQARVSACERKIGRLAASLALAEDSAASKYIIAEMERLDVELGALKREASLAEMESHRAAASAKNAKATAAEIAKLIHGLDGFDDKEKNAIARAVIQECTWDGERLFIKL

SEQ ID NO: 23028 - protein, 491 aa, synthetic construct
MPEALNAVIYARYSSDRQTEQSIEGQLRECYAFAKANDIAVIDTYIDRAISGKTDNRPAFQKMIEDSAKRQFQAVIVYRLDRFTRNRYDSAIYKARLKKNGVKVLSAMENLNGSPESIIMESLLEGMAEYYSVELSQKITRGMRENALKGKALGGQRVLGYKVNSDCYFEIDETTAPVVVDIFKLYSSGKTVKEICDILNARGVKTARGGAFNKNSLHTILTNKKYIGIYKTKYVEIVGGIPAIIDKELFEMVALRMEQNKKAPARAKAEINYLLSTKLFCGKCRSAMVGESGTSKTGKKYYYYACVKKKREKACDKSNVKKDWIEDLVIQRTVTDILKDDVIDKIADRLVELQKAEAAESGTMLYLENSLAEIQVSIKNIMTAIEKGIITESTKTRLTELEDEKRNVEIEIAKESIARRIISREQIIYWISSFKDGDITSEKYRQQLIDTFVHAVFVYDDKIVITYNYSGENNTATISDLDLSSPPKIAR

SEQ ID NO: 23029 - protein, 514 aa, synthetic construct
MNTVIYARYSAGPRQTDQSIEGQLRVCTDFCKQRGLTVIDTYCDRHISGRTDERPEFQRLIADAKRKKFEAVVVYKTDRFARNKYDSAVYKRELKRNGIQIFYAAEAIPDGPEGIILESLMEGLAEYYSAELAQKIKRGMHESALKCQSTGSGRPLGYRVDEQKRFQIDPESAQTVQTIFEQYIKGESNAAICELLNSRGLRTAQGKPFNKNSINRIIKNRKYIGEYRYHDIVVEGGMPAIISKDTFNLAQAEMERRRTRKAPKSPKAEYLLAGRLFCGHCKGPMQGVSGTGKSGNKWYYYYCGNTRGKNKTCDKKQVSRDRLERAVVDFTVRYILQEDILEELARKVHAAQEHQNDTASEIAFYEKKLAGNKKSIANVLRAIESGAATQTLPARLQELENEQAVILGELSFLKGKRLAFTEDQILFALMKHLEPYPGESEQDYRRRIISDFVSEVYLYDDRLLIYFNISSEDGKLKSADLSNIEGGEFDEGLISSTTSQKIRTLSSMVIRSDF

SEQ ID NO: 23030 - protein, 534 aa, synthetic construct
MNVVIYARYSSHNQTEQSIEGQLSVCHDFANKNNYTIINEYIDRATTGTNDNREQFQKMIEDSSKKQFQGVLVYQLDRFARNRYDSSHYKHKLKQNGVRVFSAKENISEDASGILMESVLEGMAEYYSVELSQKVKRGMQINATKCYYNGGSVPLGLKLVTVEEVNGPMGKKICKKQFAIDEATAPIVQKIFEMYSTGSTMADIIRYLNERQLKTSRGNEFNKNSLRKMLLNKKYIGIYSYDNKEVKGGIPSIIEEDLFYKVREKMLKNKEAPQRARAKTNYLLTTKLFCGNCKSMMVGYSGTSKTGKLHCYYGCKGTWQHKCNKKGVQKEYIEDFVVTHAKKILTDEKINEIANIIIEVAKKEKNSIRLKELQKQLRANEKQKVNLFDSLKVCDMNDVRKSIFEEISKMEQQKKLLEEQIAVEKASSYNVTLSQIKFFLRNLANGNSDDIKNRQMLINVLVYKVVIYEKSITIVFTTQDKYYEERIPTISEMESSFVGNLFPPINKKPLNYERFFIFFIKCRFKIDMSQQIEK

SEQ ID NO: 23031 - protein, 504 aa, synthetic construct
MYEEVKNACIYARYSSSNQTEQSIEGQLRVCREFCNRHNIRVVEVYTDRATSASKDIEKRVYFLKMIKDSERGNFDAVIVYKLDRFARSRYDSATYKYRLRKNGVQLISATENISNDPEGIILESVLEGMAEFYSAELSQKIHRGLRESAYKHNSIGGQIPLGYKTEGKKLVIDEETAPIVREAFEMYAEGHSVADICRTFNAKGYKTSKGTRFGKSSFSKIFRNEKYIGVYQFHDYRAEDAIPALIDRKTFNLVQARLKTVGKAPGQFKAKHIYLLSGKLYCGHCGSKMNGNCNTNEYSYYECYGKKNLHKDCHKRNLRKDFIEDIVVRDALSLLTPERIEEIATVAIQTNTYEVETTTDIPAIRGRLHETKLSLENITKAIEGGLAPETLVKRMVELEKEKKVLEGELKKEEKGVAYLDREQVIYWLNQFKDGDIEDEDFRRQLIDLFVNSVTVWDEPDDFFKITIAYNLTSLQEKTYRLPKGGTLSDLALNPPARCVVQVS

SEQ ID NO: 23032 - protein, 485 aa, synthetic construct
MPTSDLKIAAAYIRVSTDDQEEYSPDSQVRLIREYARKNGYLLPEEYVFQDDGISAATARKRPAFNRMIALAKEKERPFDAILVLMFSRFARNREESVLYKGLLRKQGISVISVKEPAVDGPFGTLIESIIEWFDEYYLINLSAEVKRGMSEKFLRGEAMGTAPFGYRIDSANKTFTVDPERAEIVCDVFRSYSDGAGLRDIAVQLGDAGITTRRGNRPDSRFVEYMLRNPVYIGKIRWTPGHKTRYSRVHIADGVEVVDGKHPPIVSMDLWEAVQRRMDQRKAAYGRYQRQAPAAWMMRGLVRCSACGATLIMAGRSSSCPFLQCHSYAKGSCHTSHSLSLRRANAAVLAGLQRSVGTLTFHMVPHLTSTPSRAADYGRLLEQERRRLARCKDAYQAGVDTLEEYRDNKARLEERIRRIEEQAASAAATPESFDKAAYGKKAADILRFLETSADEGAKNEVLRSVVDHITYEKASRHLAIYFYT

SEQ ID NO: 23033 - protein, 526 aa, synthetic construct
MPKVTMIPATINPLTHLPSVAARKRRVAGYARVSTDSDEQFTSYEAQVDYYTKFIQSKPEWEFVKVYTDEGISGTNTKRREGFKEMITDALDGKIDLIVTKSVSRFARNTVDSLVTIRKLKENGVECYFEKEGIYTFDGKDELLITIMSSLAQEESRSISENITWGQRKSFSDGKVHLPYKRFLGYEKGEDGRPAVVESEARVVKLIYRLFLEGKTQAGICKYLEELGIPSPGGKAKWSKTTVTSILQNEKYKGDALLQKTFTVDFLEKKMKPNEGEVPQYYVTGSHPAIIEPDEWDQVQAEFARRKTLGKAYSGKSILSAKLVCEDCGAFFGPKVWHSTDQYRRTIWQCNGKFSSEEYCHTPALDTESIQQLFIKAYNLMMQDRVQIIKEIEAWRQKLMDFGTLDANIERQLEETQVIAELVKVAVKENASTAQSQEAYLKKYEALTERYEKAAAELERLQSLRTVRSQQDKKMALYTRTLKKQPEVMHDWNDTIWTVMIEKTIVHRNGEITFVFANGTEIKVGA

SEQ ID NO: 23034 - protein, 667 aa, synthetic construct
MCADRNEGTRYIIGTGSRVTTGIRKGGENLKQKKCYIYTRVSTAAQTEGYSLDAQQKRLKDFAEYKGLEIAGEYCDAGKSGHSIKGRPAFMEMMDDITSGKDDISFVLVFKFSRFGRNAADVLKSMQTLMDYDIDLICVEDSIDSSTQGGRLTLAILSAVAEIERENIRIQFMSGKMQKVLQGGWAGGPIPYGYRSREGELVIEPSEAEVIRLIYEKYLEPPMKLNGVVRWLNSHGYQRISQETIRPFNSDFVSRILNNPFYCGKIVYYRRANKGSSDPKQEIVVQGKHEAIVTEKIWEQAQEKRGQLVRVKGKRDEEDRISLLSGLVKCPVCGGGLISKKNKSLNHNYGGYYKTVYSYGCRNYRTSEGRVCSFCHTYNQERLDAAVMEVIQKVTGTEEFRTAFARTVGNQMSEEAVETQLKMLRKEMHHQEHVKYKLGMELDHLDVLAESYDQQYEKLQAEVDAAYDRIGRIEDKIEKLKHKLLRMKQGIHSSDNICLILNHFDRLYEKMNYEERRTLCRQFIQRIEVFPEKGDDKRILKSITFRFPVYFDLGGNQEEDDEDTPDEMVVFTLDCSRLPVTAAESKATYAEIKAHVLRIHGLKVSSLYIAQVKRKYGIEMGTAYNKPEKNKNHIPRCPKEKELAILDALKTYRMIPESTEYFEEAAE

SEQ ID NO: 23035 - protein, 585 aa, synthetic construct
MRKQKCYIYMRVSTAMQVEGYSLEAQKDRLTKFAQFQDMEIVREYCDAGKSGKNITGRPEFSRMLQDVAEEKDGVSYILVFKLSRFGRNAADVLNSLQYIQDYGVNLICVEDGIDSSKDSGKLTITVLSAVAEIERENILVQTMEGRKQKAREGKWNGGQAPFGYELDSKNSTLIVNPEEAEIVRIIFDQFTRTEAGADSICKYLNQHGYTKKRLRDQEVSYFSRSTILKILDNPVYVGKIAYGKNKTEKVKGTRDQYCRVKQDEYLLADGLHDAIIDEETWEAAKEKRKRTGVRWVKTHSLDHEHILSGLIKCPLCGGGMSGTVQRRKNKKTGEYKDTFYYRCHHRKRVDGHICDYKPMLNQKVFNAEIEEFIRYMAGGEKFKEFLMEKLEEKVDVSSLEEEKKQLAGQLQQAQGSRKKLVQMLERLDPGDKHYDRKYQDMQERMDNLYDRIAELEEAITDVETKIGASYGKQVTGKKIYQFLLDFDILYGKMTDLEKKEFMRTFIESIELDPDEKDMGRIIKHIDLTFPVYYDGQEGDRIRMPKENTVETVVLLSKGTEQSGTENGRQQKSEGGLLPGGYGFI

SEQ ID NO: 23036 - protein, 435 aa, synthetic construct
MAAYCRVSTDQEDQLHSFEAQVEYYTRYISDHPNYEMAGIYADEGITGTNTKKREQFRRMISDCETGKIDMVITKSISRFARNTQDCLQYSRMLKNLGIGILFEKEHINTLDSSGELLFTILSSLAQDESRNISENCKWGIRSKFKKGEMHVNTHKFLGYDKVDGKLVINEREAKIVRRIYRKFLWGHSPQEIAKGLEDEGIEGCMGSKKWYPSTVINILKNEKHMGDALLQKSYTADFLTKKQVKNHGEVTQVYVKGSHIGIIDKETWNAVQLEFARREEFVKEHGLKGYGYGRECNPFTSRIFCGECGSPYTRHTWRSRGIMQWQCKNHMTDGKVTCVNGFVSQSDLELGFVKAYNMLLKHKEILIPWWKDTIETGNALERLRAKQFLDLSEQPELECYVPELAQLVIQMVIIKGIKKYEFTFMDGSRVTVCV

SEQ ID NO: 23037 - protein, 478 aa, synthetic construct
MYANLCDVAHILKEGDHMKLERCAIYIRVSTAEQMMHGKSLEAQREYLEAYAREHNMVVAGVYADEGKTARKELKKRKAIHALLEDVKAGKIDVIIFWRLDRWFRNLSDFYKVQDILDEYHVRWISTSEPGINMETRDGRLQLNVVLSIGQNEVDTTSERIKFVNEASIRQGKLIFGDANMGYGYKSGTVNGVKCMIKDPEREEAVNAFYQYFFKHQSKTGALKYIQENYDPDFSYSSMRTLLSSEFYKGTYRGAPYCPAYLSTEDWDRLQKISDKNIKVNRSNRVYLFSGLIYCPNCDNLLSGCGCSSIINRKTGAKRTYCYYRCNKAYMDNHCNYRHRLSQNLVESYRLEHLEDEYQRYHVRSGQIREKQKKEKKIKTPEKLRSELERLNLLFQKGRVEWEYYNKEYSRIEYELKEALAIQQEIERDVSYVNEIIQSDFRSMYAKLSLENRRAFWRSIVSDIHVAKDSTVKEVNFL

SEQ ID NO: 23038 - protein, 521 aa, synthetic construct
MKNGNYAMYLRKSRADRENEARGEMETLARHEKLLFETAKRMQITVSAVYKEIVSGETISARPVMQKLLAEIEQGVWDGVLVVEVERLARGDTIDQGIVSQAFKSSDTKIITPVKVYDPNNEFDEEYFEFGLFMSRREYNTIKRRLQRGRLASVREGKYVGNRPPYGYERVKIPNDKGFTLSPIPEQAKIVKYVYDLYAYGLDGEEMGTAKIVRKLNDLQIPTQTGGKWIPPTIRDMLYNPVYIGKLRWNRRAATKKVCDGKITYSRPTSKEYEICDGLHPAIIDPETFKICQKKLSKNQSRPVGLDKTIKNPLGGLVICSKCGRRMVRRPYNKTGQRSTLICPYTHCDNVSSPLEDVETMVLEAIADIVKNERIEPTTSVIPSDTLDILKDAMKNQEASLVTLQKQQNSLYDLLEQGIYTTDVFLERSNTLKEQITAADSSIQNLKKKVSAEQNRLKIQADFIPKCEHLLDIYDTLDTPEKNRIMKELLDHIDYLKEEKNVPFTKKDAKVFIHVYPKTPE

SEQ ID NO: 23039 - protein, 570 aa, synthetic construct
MEVFNLEKNLKCALYIRVSTFHQIDKDSLPLQREDLINYAKYILGIDDYVIFEDAGYSGKDTDRPSYQNMMTRIRMGEFSHLLVWKIDRISRNLRDFSDMYDELKKYNVTFISKNEQFDTSTAMGEAMLKIILVFAELERKLTAERVFAVMMSRAEKGLWNGATVPLGFIWDEEIKFPKIYEPEAKIVQYIFDLYEKKRSTTKVAEQLNQENVKTKRDGTWTPRTVGAILTNPFYIGTYRYNTKTQKTRRWKDKSEWIVIEDHHPAIISKEQFEKVAKILKDNYRGDYNRQRASKNVHILSSIIKCFKCGSNMNAGNDRARKNGFTPSRYTCYQIHKTYTCNNYASDLTVLPFIINYIGNYMTLQDRITKNHSYRDMESILLRGKYFTDIEHINKDDIKCTYKLLVNNLPVINYKLQENQEDKKTTFKDRYDIYKNEKEKQENALKRLDDLFLYAEDSMPKKDFILKRQEITNKIEEINSKIQELRAEENNFVDNKEFSLNAKASFYLITQLIGNSKNIDVRYLLENVDKSIIKDFLSTILNEVSVDHQKVQYITFKNGLTHHFEYKENQ

SEQ ID NO: 23040 - protein, 530 aa, synthetic construct
MSSVDKTAVIYARYSSHGQTEQSIDGQIAAAQKYAEGKGYTIIHIYADRAMTGRNDDREQFQKMLSDTATHQFGVILLWKIDRFGRNREEIAFNRYRCKKNGVRVERVAEDVPDGPEGVILDSVLEGMAEYYSLQLAQNVRRGQRESAKKSQSNGGTRMIGYKVNPDTKRYEVDPDTAPFITEVFRRYAGGQTMAEIAAWLNAQGLRATRGGMFTVNSLHRLLKNEKYTGVYIFRDIRNEGGMPALIDRATFDKVQEMLKVNRRAPSRVWSRAEYLLTDKLFCGHCGAPMAGVSGHGHTGVKHNYYTCLNRKRKKSCTKKSVRQDVLEPLVLKSIRNLLQDDATLKYIADRVWAEYERSDTSGDTIRALDRQIADVDRALSNVMKAIEMGIINEMTKARMDELTEQKQALSAARADAGLARGFKLTRNMVLYFLRKMAAMDISDRDSQKRLIKTFVNAIYLYDDHFDIAFNYTENGKVIVKMQEIDDASTGGAFGCCAQCPTINHQDEHTTFITMIGNVFVLFCPFPGLK

SEQ ID NO: 23041 - protein, 524 aa, synthetic construct
MNKLRAAAYCRVSTDRAEQSGSLASQRSFFDDYIRNSDSMTLVGVFYDEGTSGTTTLNRYGFNKMISLAVSGGIDIILTKEVSRFARNTVDTLNITRMLRSKGVGIIFINDNIDTRDSDGELRLSIMATIAQEESRKISERVKWGQQRKMEQGVVFGRSCLGYDVKDGKITVNADSAKIVKRIFTEYTVLLKGAESIADGLNAEQIRTVNGGRWSGAFIRKVLRNVKYVGDLEQKKTCTPDFLTHKKRLNRSEHIYIRNHHEPIISRELWEQTQAEISRRKPTDTSRHSDRYVFSGKVYCGVCGSVMVSRVKTLKNGKIYHALRCSGRIGGKSCNNETLNVTALKACVKRIFTDIPIDKTAVINAVIKGLSRTDKPDIPALRRKIETLNAKKRRAVDLMLDGLITQQELIEQKSYYDSIIEKLSQEISSDRSVFETDKIRTNAERFLDFTSDPIWLLVIRAYYIHGTLTVYLKGIEKGFTTCFTATGRGDSYRVITGNTVRSQGIIPGTMQVQKNWFRHDVNDK

SEQ ID NO: 23042 - protein, 562 aa, synthetic construct
MKNKIAVYIRVSTTHQIDKESLPFQRRELENYAKYVLNIDDMEFFEDAGYSGKNIMRPAFQSMMSRIRLGEFSHILVWKIDRISRNIIDFANMFEELKKLNVTFVSKNEQFDTSSAIGEAILKIILVFAELERNLTAERVSDVMISRASTGQWNGGRVPLGYNYDKENHTFTVNQQEAEIVKFIFDYYIDNGSMVSIVNALKDKEIKTRTNGAFSLSAVATVLNNIFYTGKYRYNYRKQGDRQQVKPESEWIVIDNHHPAIISEEVFKRAEEIKQTNLRLKNEKGKIVKKNNIHLFANLLECDVCHNNFSSSLDRPRVNQGGYRHSMYNCYGRRIGSCKSKYVSDVYLGKFVFNYIANLYKAYCSFGKSTTFETFKKKMLRGNIFSDIKEVTNLEGIYNIFCSKYNDKATANIINYKNTQQDLGNELRIALSEKGKYERALARLKDAYLFSDDAMTQNEYISQKHSIEVKLSATNKKLDKLQSKDDTPFDDVEFLNILSYFILNQNLQDKREIDFVDFITSVDKKIISDFVHKMFVKFIISKGKIKSMTFRNGITNTFVYDD

SEQ ID NO: 23043 - protein, 501 aa, synthetic construct
MEIQIREGSREQKRKLKVCAYCRVSTDADEQENSLENQVRHYETVIKANPDYEYAGVYSDLAISGFKEKRPGLQKMLADAEKGKIDLILTKSVSRFARNTSIVLEATRKLKELNVGVFFELQNINTLSGEGELMLTILAAFAQAESESGSAGAKMVYQRKYEAGIPVQYLERSFGYTKDERGVFVADEAEAVWVRKIYKMAAEGYTPASIKRYLNENGIKTVGGVQWVDSTVFRLLENEIYKGDYIMHKHFVNEERKLVRNRGEVDAWYIEDDHEAIVSPELWQKAQDALAAKRDYLAEGSVIEEFTEENYPYMNKIYCAKCGYPLYKRIYSKGNRLNWGCSGTKRYGKSFCDGINIPDGVLRSAWHFEENTYIDEKASDKGVKEFIYLKEHSWKRRHKKKQPSAIPENTETEYPYREKIFCALCGSRLVRYVNPQNHKVTWVCNRRKRKGKEACDGTRVPDTVIKGWGEIKNDIYIQRKDDKNGKKRYSYTSKKPSGIRV

SEQ ID NO: 23044 - protein, 522 aa, synthetic construct
MIAIYTRQSIEKKDSLSIDAQVKACADYCKAQGWEYEIYTQDHGFSGKSLDRPGFQAMMSAVRSGQVNKIVCYKLDRISRSVSDFAQLLQELEQYKCDFISVTENFDTSSPIGRAMVYICMVFAQMERENIQERVKSNYYYRSGLGFWGGGPAPYGYQLKRQQIAGKVHTVLEPDPNEAPWVKKMYEWYLEPGGSAMKILRLLTENQVPTKRGYKWTSRVLMDVLSKPLYTQNSMDVYNYLTQSGAVISNPPEDFDGTLSVDLYGKKDSSQSKHKRCRKGSDMYCNISLHEAIIDSDTWLQVQYKILARPKIGGRTGTSKNSWFTGLMICGVCGRHVSFTHSARTAGYYICSSRKNCGWNSCSSKPASKKKFDPIIVKFIRDHYDSPKTKAAIQQAKLAAKTPQVSIERNNLQMELATINNQIDNLLTSLASGNAVMSKYINDKITELDAKRTPLQAKLLQFDATSSVNDELKRLERIEWAMEQLPLVYTEDTFDLSVQVSQALVNNIVFNADGEVTISFAI

SEQ ID NO: 23045 - protein, 488 aa, synthetic construct
MSKKRAVAYIRVSTEKDAQLHSYDFQEQYWRGVFDDDPETELVGIYADKGISGHSVQKRPQFLVMMQDARDHKFDRIYTKSVSRFARNTTQLLEAVRELRDIGIEVVFEKENIHTFEPTSEVFLTIAATIAENDLDVDSERMRWSVRHRFENGWISIGSGLYGLRLTAENELEIVPEEAAVIRYIFDAYVNGGLGSKRIADALNETGVKTRSNGEWNAKHIVSLLRNEKYKGDVIMGKSVSHFGVHRDNTNGEFAPRYYMEDTHEAIVDKQTWEAAQQILAERGRNIPRQVPTHTFTSMIQCGCCGTNFVHKVNNSSFKWRTDIWACGRSLAKGIKACDNSRIKDAVLKEKFVDAYNEFIKQRPQGDSLIALQEVLEDLRQQERDLAELMMQHLISKAAYDTERSAINARIADINDKIADRRIRRVPESEHQPITEFSSEKATRFLSKVIVTKFTVTFVFYNGAKISRRYDNGQPGNKPGWNKKKEDA

SEQ ID NO: 23046 - protein, 435 aa, synthetic construct
MEKVIHPLAAPAPRPRLLRVAAYARVSSGKDAMLHSLSRQISYYSQMIQKHPGWTYAGCYADADYTGTRGERPEFQRLLADCRAGKIDRILTKSVSRFARNTVTLLETARELKERGIAVFFEKERLDTLSGDGELMLSFLASFAQEESRSVSENCKWRVRKDFSEGRPMNLMLLYGYRSQGGRIVIDPEEASVVRRVFHDYTHGLGSNLIAEALQREQIPCRLGGRWSSGLIRTMLANEKYMGDALLQKTFCSDHLTKKKVVNRGQLPQYYVQDSHPAIIDRETYTLARQTLQANREKTNVQKPTTARYPFSGRIVCGCCGQHYRRRTNVSRITWQCWTYLQRGKAFCPAKQIPEETLYRITEEALGGKEITEEALTVLKEIRVPKDNHLVFVFQDGREAERVWKDRSRAESWTEEMREQARLHNLKRKKGGNQG

SEQ ID NO: 23047 - protein, 541 aa, synthetic construct
MTQFMTAAPPEAVRVMPDGRKVTAIPARVQAHAANSLQFVKKPRVAAYARVSTDQEEQETSFEAQCDYYGSLIRNNPEWEYAGLYTDDGISATSTARREGFNRLIADALAGKIDRIITKSVSRFARNTVDSLTTIRKLKEKGIGVTFEKENIDTLDSKGELMITIMSSLAQEESRSISENVTWGWRRRIADGKVSMAYSRFLGYDRGEDGTPVVNEKEAETVRQIYGLFLDGQTPSGIAELLTKQRIPTPGGKERWAGSTVKSILTNEKYKGDALLQKTFTVDFLTKTAKVNEGEVPQFFVENSHPGIISRELFDLVQLEMKRRKGKSRHTSAKSLFSDRLACGCCGGTFGSKVWHSNDPYRKVIWRCNRKYARKGNACPNRHLEEKELREAFVEAVNRLISRRVEILSAADEFSAALAETSGLEQQLCRLAAEKEVLLRKLTAMVRENAVKEQDQEEYRRQYQEVEGELSRLDAEMEKMKTKKADRLLRRNKLRAFMGRLRAAEQPAAFDEGLFLGLTETVRVCPDKLAFVFKDGTEVAV

SEQ ID NO: 23048 - protein, 506 aa, synthetic construct
MRTVITYLRFSSAIQGAEGADSTRRQNDLFKQWLKKNSDAQVVASFNDEGLSGYKGKHLSGQFGDMLSRIESGEFPEGTILLVEAIDRIGRLEHLETEALMNRIIAHGIEIHTLQDGLIYTRDALSDDLGISIIQRVKSYIAHQESKQKSFRVSQKWEQRAKLALAGEQRLTKMVPGWIDPDTFKLNEHAETVRLIFKLLLSGESLHNIARHLQSNGIKSFSRRKDANGFSVHSVRTVLRSESVIGTLPASQRNDRPAIPNYYEAAIDAATFNKAQEILDKNRKGRTPASDNPLTINIFKGLFRCQCGASVHPTGTKNKYAGVYRCNNHLDGRCDVPPLKRKPFDKWMLENFLGMIDVGNDGEAEGKIASLQHEVEIVTTRIKKATALLLEMDDIDELKIQLKELNQKRTELQTTIDNMRRKASLTDKELPQLKDIDLMTKAGRVECQLILSKHLKGLTLGKDSVTVTLQNDTEITIPTNPLPLNDGSPIFEIADKELLDIDAYQL

SEQ ID NO: 23049 - protein, 503 aa, synthetic construct
MSKIHKIEAMIPKQIEKKKVAAYARVSALTEMTQYSFSAQVNYYSALIQKNPNWKYVGVYADKGITGRSIKKRKEFNRLIDDCNNGKIDLILTKSVSRFARDTVDTLNTIRHLKNIGVDVYFEKENIHSISQEGELLLTFLAAYAQAESENTSENIKWGIRKGFKVGKPNGYKAPYGYKWNGNSYSIVPEQGAIVKEIYKRYLDGEPAYSIAKALKKRGIKGQTGIPMDDSTIRYIVSNISYTGTLLLQKWFFTQNHVRKENKGELPMYAVENMFEPLISKEDFQKALQIKKERAEAMPNKNPRLTAFSGIVKCGNCGCSVCRRTTRYGKKWVCNAKDRKGMAACDFRDIYEIELEAAATKALAVNEFKEDLVRREVKLITIDNAYIVFNLKDGKKKQILRTYTKGYSGFSCRLFCGNCRKMLEADSRTLSINGQKKRYKIWCCRKCPGQREFDDVIRKATQSLFNEPQCEGLFAQNIEKAIIYNDRIDFYFKEGKVITWEKE

SEQ ID NO: 23050 - protein, 576 aa, synthetic construct
MEKKILCIIRASTEQQETESQKKELVAYCITKGFAVEEMAFIEVAGASARKLNKKYIQMLEDIKATLLSSPTIKAVAIWHLNRLGRVESKLHEMKEFFVSHKIQVYCKNPDFTLLDDEGNESAAGGLAFSIFSATVKMETDEMFAKMNRGRERNRANGIFAGGKIKFGYTLDATKHFIINENEAKTIRLIFELYATGKYSFYTLVEELRARGITKNGQKITYEMIQNALADEAYYKGINGKIPLIDKKLFDKCAAIKANTVAVKRTKESRNINFAVGLLKCSCGNNFIASGDFYRCYSKMNNNRKKKVVECDAPTIRRDVLDDLLWLVTRPLQQKFLMEKDTVSIEEQKDKINVLTVKVSTAQKELSDIKGRKEKLEDAYYVDGSMTEAQFKKRLASLHSKELQTESQIRNYKLEIADTQKIIEQIELPTNDRYFQSLILSDLDDNEPEHRKKIKEMMFANIDKVTVKKLMKGNHKCVEITITSKAKLSFVFLYDSWLNSHRKGECNVFYANKPVYYIDGHIIRQNPTVRNMLYQKIGLPELTNKEIGEAAIRYAKLPEPPFVITFKAPNIPHNHK

SEQ ID NO: 23051 - protein, 502 aa, synthetic construct
MEIQIREGNSRQKQKLKVCAYCRVSTDADEQENSLENQIRHYKEVITSDPDYEYAGVYSDFAISGFKEKRPGLQKMLADARKGKIDLILTKSVSRFARNTTIVLEATRKLKELNVGVFFELQNINTLSGEGELMLTILAAFAQAESESGSVGAKMVYQRKYEAGIPVQYLERSFGFKKDERGVYIADEEEAVWVRKIYDMAAQGYTLAAIKRYLNENNVKTVGGAEWLDSTVLRILENEIYKGDYIMHKHFVNEERKLVRNRGEVDAWYIEDDHEAIVSPELWQKAQDALEAKRDYLAEGSVIEEFTEENYPYMNRIYCARCGHPLYRRIYSNGNRLNWGCSGTKRYGSSFCEGINIPDGVLRGAWHFDENMYIGEKQTDKGKKEFTYLKEASWKRRHKKKEPEPIPENTETEYPYREKIFCGSCGSRLVRHVNTKNHKVIWVCNGRKRKGKDFCDGTRVPDTIIKGWGEIKKDIYIQRKDDKNGKKRYSYTSKKPKGADRA

SEQ ID NO: 23052 - protein, 567 aa, synthetic construct
MQSKNKNQIGITALYCRLSRDDGTESESNSIGNQKKLLSQKAKEMGLTDTKYYVDDGYTGTNFNRPGFQQLIDDIEIGLVSAVMVKDLSRLGRDYVSVGNYTDSYFPEHNVRFIAVNDAIDSDEGESEIAPFKNILNEMYARDISKKIRSSHRLRGSMGEPLSQPPYGYMKSSENKKKWIIDPEAATVVKSIFKMCLDGKGNETIARELQENEVLIPMAYWRSKGLNRGGKKTQTNPYKWCKTTIQKILSQQEYCGDIINFKTYSKSFKNKRRIENSKENWAVFKDVNEPIIDRETFETVQKFISKTKRRAPKKENGERSIFNGLIYCGDCHSKMRYHTSTSNKEIHYFTCSDNKVDYRGNCPGRHYVRADALEEVVKLELRRLVEMLEIDESYFAQLLLRKNDEEREKDKKFLESELQKAITRSNTVSQLYEKLYEDNVIGKVSDEWFVELSHKYEKERMDLKAKIADTRHKIEELKNTNSEYGKFISAIRRFMQMDNLTSPLLRELIDHIDIFETEGTGKSRTQRIVIYYRFIGYIELPNVTKQTHIADTRKGVAVEYITEQFTA

SEQ ID NO: 23053 - protein, 456 aa, synthetic construct
MRNKEIAPALVRVALYIRVSGEEQKIKGLSLEAQQERLEAYARERGWVIVGIYIDAAKTARKNIHKRTEFQRMMDSVKRDEVDILLFARLDRWFRSVADYYKVMEILQAHNCDWKTTDEEYDTTTANGRLYINVKLSIAQNEADIDGERIDVVFDSKIAHGTVVSGSAPFGFRVNEEKRLEVVPEDAAIVQDAFNYFENTVSQRATVRYVRETYGVNWCDATFRRMLKEKLYTGVYDRGGRYNDQFCPAIIDRQQFDRVQALLTRNVRSAPSGKVYIFTSILTCAECGHKLVGYKSSDYYYYRCNQHFQRGRCSHNHSAREDVVEQWLFEHLGEELERCQLEWDVEAAKKKASVARTDKAALKRKLTKLKELYVNDLIDIEDYKKDYQIYVSALNQIPEPAQEAPPDFAAVRRLLDNSFRTIYDTLTREEKRTLWRSVIKEIKIDNDQNITGVVFG

SEQ ID NO: 23054 - protein, 527 aa, synthetic construct
MGVQKKVKTIPATLTRFTASPITEQEKRKVAGYARVSTDHDDQFSSYEAQIDYYTNYIKGRDDWAFVEVYTDEGITGTSTKHREGFKQMIADALDGKIDLIVTKSVSRFARNTVDSLTTIRQLKEAGVEVYFEKENIWTFDGKGELLLTIMSSLAQEESRSISENCTWGQRKRFADGKVSVPFQRFLGYDRGPDGNLVVNREQAVIVKRIYSLFLQGMTYHGIADTLTKDGIPTPGGKKKWSISTVKSILSNEKYKGDALLQKSYTVDFLTKKTKVNEGEIPQYYVEDNHEAIVDPEVFEMVQREMAKRGKGKKYHSGVHAFSTKIKCGECGSWYGSKVWHSNTKYRKTIWQCNHKFDGDCRCQTPHLTDEEIQLHFLSAANKLLATKAAVIANGREMQALLFDTTELEAEQTQLLEETQVVSDMVQQAIQENARTALNQTEYQKRYDSLVKRFDRAKTRLEEVTAEIQEKQTASANMGTFLNAFEQMPDALAEFSLEGWYSMVDFATVYSINNIRFTFKNGQEIQA

SEQ ID NO: 23055 - protein, 596 aa, synthetic construct
MRKINKIEPRLPLLPTRKKVAAYARVSVETERLHHSLSTQVSYYSELIQANPEWEYVGVYADDGITGTKASKREEFQRMLDDCEAGKIDIILTKSISRFARNTVDLLETVRHLKELGIEVRFEKENINSLSGDGEVMMTLLASFAQEEITSLSNNVKWGVRKRMEQGIPNGHFRIYGYRWEGDQLVIEPEEAAIVRRIFQNFLDGKSRLETEREFEAEGITTANGCRWVDSNIKVVLTNITYTGNLLLQKEFIEDPITKRRKKNRGELPQYYVEDTHEAIIDMETFQEEIARRKELGAFANKSLNITCFTSKLKCSKCGSSYVRNQRSNRTKYTSTYGDTIVVWVCGTTKKKGGRCSRKDIPERVLREACAEALGLTEFDEDVFLEKVDYIMVNPNCQLEFHFYDGTTKVQTWKSTAKKDCWTDEQKDRQREWMRRNMATSSRFSPFTTRVVCGCCGSSCRRQTQPSKLSETGKIAYWRCSGGAKTNCGIKGIREPELMEITAQVMGTPEFDGEVFRERVDHITMVESGKLEYTFLDGHTQEAEYSTEKPIHPWSEEQRAKFKESVKGSYTPERRKAMSEHMKKVRSEKHWASKRK

SEQ ID NO: 23056 - protein, 569 aa, synthetic construct
MKQSNNKKSRDVTAFLYERLSRDDNLEGESYSIGNQKKLLAKVAKEKGYTNLVHFLDDGISGVTMNRPGFVEMICQLEQGKAAAVFVKDLSRLGRNYIEVGRLTEEFFPNYDIRLVAVSDNIDTAEGENELAPIRNLFNEWYARDISKKRRISNKIKGNAGEPMGQPPYGYIKDPNDPKHWIVDDEAAKVVRRVYSMTLEGFGTEQIAAQLEKDDVLTPRAYWLTKGIKRPGKGRQQSPTKWNSSTITKILSLQEYCGDILNFKTYSKSYKNKKRIDNDRENWVVFQDVHEAIIERAVYEQVQQKRGKIRKRRTNNGEHNMFSGLLVCADCGSNLHFHFNQGNPEIKYFNCSNYKGNRGTCTSTHYVRVDFLEEVVLGEIRRLTKFASLYEDEFVKAVIGHSQQAEQTDRKLKEKELKTLLARDDELDGLFERIYEDNVSGKLSNDRFAKMSRRYEDEQKELAEKIKKLRSEIEKQSSRSMTTDMFIGLVRKYTRARKLTPRMLNELVEKIEVFNAEKIDGVWEQRLRIHYNCVGTIEIPTVLPLPIPEVSVNTRKGVVVNYAPCELAV

SEQ ID NO: 23057 - protein, 555 aa, synthetic construct
MNQTNYLQSYIFDKQTGWRIDLPSYIAPGTRVLCLYRVSTGKQLYHNEQNQADIPMQRIRCRDFAQQGWTVVCELQEEGVSGHKVRAEKRDKIQTIKSYALEHKFDILLVFMFDRIGRISDETPFVVEWFAQHDIRIWSAVEGEQKFESHVDKLTNYIRYWQADGESRKTAECVANSMAILTSEGCYTGGGLAYGYKYIRTGRTNKRKQEVNDLAIREDEAEVVRIMFTKARYEGYGSQRVANYLTKNGIKNREGKNWHPSTIKAILRNPLYIGIMRSGATRSPVQEHLRIIDDETFYVVQANLDARANMYANKPHTPVATCSNALLSGFIFCGHCGARLCVTTSGKGRPRKDGSDPTRTRYTCQTKSRTHGDCDGQTGYTVRKLDAMIDTILHGIFARIGSMRREDAIRACYSGNHDAQQTIFQKVKRDYEKAEQNLQTLKDEVVKSLTGESAFEPNILDMAIRGQEEKCAELRRAMAHAEEEAAKSQATAEHIAKQYDEILEWAQLYDNCNISMKKVIVANMIDRVDVFRDYQLTIRLNITIEQFLISLENVA

SEQ ID NO: 23058 - protein, 581 aa, synthetic construct
MYGLNSDFQKRDVAIYARVSTEHEAQLSALENQIDWYKPILEARPDWTLTAQYIDEGITGTSAEKRPRFMQMIEDARQRKFDMIITREVSRFARNTVDTLQYTRLLKEYGVEVFFINDNIKTFDGDGELRLTIMATLAQDESRKTSIRVKAGQQTSMQNGVFYGNGNILGYDRVGKEMVINPEQAKTVRMIYDMYLSGMGVTAIQYELEKAGRLTAMGKERWFSSYIAKMLRNSFYCGIITYHKEYTPDFLKQKKIKNYGDLEYVQVQGTHEPIVTVEEYEQVQKLMDAKSVVMKNHNKGKRRVGRMQHTTAFGRLMICQCGNKFNLRFHSRDGRTDGVDYQCYTSVNRGSVAKRLNKGISIEHSCESPYIQGWKLEMMAEQVFDRYIENADKVIDLSYAMLEKHIADQEELPDNTDVIQRKQGEIEKLMNKRTNLIEMRAEGDIDKEMFRSKKQEIEDRVAKLTEEIKGLQPEKEPTSNENYSAKLLELRERLKEYTGFDYSVIPESIVEAFVERIWVSKDEFRWYLRTGSKEEGEFDPDDHIKIGSFTLTIDDAKKYIYSFSTRRRVYKWVDLNVSVWI

SEQ ID NO: 23059 - protein, 529 aa, synthetic construct
MTERIVTVIPATKAPIHRIAGSSAKKRRVAGYARVSTEKDEQYTSYEAQVDYYTQFIQSHARWEFVKVYTDEGISGLGTRKRDGFNEMIDDAMSGSIDLIITKSVSRFARNTVDSLVTIRKLKEKGVEVYFEKENIYSLDGKGELLLTIMSSLAQEESRSISENVTWGQRKRFSDGKVSLPYKQFLGYERGENKNDPPVVNPEQAVIVRRIYRSFMEGKTAGAIAKELTAEGIPTPAGKTNWRASTINSILQNEKYRGSALLQKCYTTDFLTKKQQVNEGEVPQYYIEHSHEAIIDPLEWDAVQDEIRRRKEIGRAYSGTSVFSAKLVCGDCGGWYGHKTWHSTDKYRSTVWRCNQKYSDGKCKCGTPAVTEDEIKDRFISAFNRIISSKKPYIKACRTAKQVLTDTTAIDAEMADLLWEIEVVSELTRKCIEKNSAVAQDQKEFNDRYNGYVEKYEALKERYDSLASERERKTEKAKAIDRFIHTVESRDGLLKEFDPHLWMTTVETVTITDEGKMVFRFFDGTVLPG

SEQ ID NO: 23060 - protein, 424 aa, synthetic construct
MDRIIEKVRFNMPAQPKAKRVAAYARVSSGKDAMLHSLSAQISCYSKMIQGHPSWLYAGVYSDEALTGTKENRGGFQSLLADCRSGKIDMVIVKSISRLARNTVMLLETVRELKSLGVDVYFEEQNIHTLSSEGELMLTILASYAQEESLSVSENQKWRIQKNFKEGKPWNGTMLGYRNVNGTLTIVPEEAEIVKRIFDMYLSGMGIQSIANTLNREGIPTRLGAKFKRSAISKMLRNEAYAGNLLLQKTFKDNHITKRTIINRGELPMYYVEKAHEAIIPSETFQKVQEMITQRAEKYAPPSLEKPAVYPFTSLITCAKCGKHFRRKTVRGKPIWICPVFNNEGKDACAAKQIPEGILEEITADMDMENIAGITADDGNRLLFHFTDGTVTERTWRDRSRSESWTDEMRQKARERTKARNQKK

SEQ ID NO: 23061 - protein, 564 aa, synthetic construct
MATANYIKGQNETKITALYCRLSQDDGREGESNSISNQKEILLAYAQRNNFPNPQFFTDDGFSGTTFDRPSFVQMENLVEQGVVDTIIVKDLSRFGRNYLDVGNYLEIKYPTLGVRFIAIQENVDTLKETGTEMMPFNNIFNEWYAAQTSKKIRAVWKNKAANGKRVSSSVPFGYVRNQQDKEDWLVDEPAAEVVRKIYALCLDGRGPSQIARQLEQEKVLIPTAYYASLGRKTRKQYTDPYAWDQKTVAGILVNQQYTGCTVNFMTTTVSYKVHKTVYKPKDEWQIIPNTQPAIIDEDTWKRVQELREHRIRPTATGRTSLFSGKVFCADCGSKLHFCAAKSLNANQEHYRCANYKSGRGSCQIHFIRNVVLEKIVLEAINSLADFVRCYEPVFLYLMAQKDIVSKRTETSKLKTAIESGKRRIQDLDKLIERIYEDQVLGNISAERYARMSVNYENEQRSLINKVAEDEKKLACIEQTSLDLKTLLKVLRSSTSFEELTPTLVNSLIRRIEVHNNDKSSGHCYVKVDIYFTAIGFIDIPTEDEITSLMAKIKANPQEYRLTA

SEQ ID NO: 23062 - protein, 581 aa, synthetic construct
MARKRTNLIGNTPSVRETKVAIYIRVSTIHQVDKDSIPMQKKDLIAYCQLILGTDNYEIFEDAGYSGKNTDRPAFQNMMGRIRKGEFTHVLVWKIDRVSRNLLDFAEMYEELRSLRVTFVSKNEQFDTSTAIGEAMLKIILVFAELERNMTSERVTATMISRANSGQWNGGRIPFGYSYDPKEKVFFIREDEASICRELKDLYLLNRSLAYVSRALNEKGYKTRAGVSWSPHSVWIIASSPFYAGIYRYNRYKGVESRTINPEEEWVMIQNHHPAIFTLEEHQAMRSIMKSNKRNMDNFPGRVHLSTKTHIFQGIMYCDKCGSKMVSTPGRLHVDGYRTSNYGCPLRRNTKKCNNPTVNDIVIGEFVINYILNMLNAKKTFSTINTPDELNAALLSGSVFSEVSSVEENGLNSFFNLLSRYGSDRSYIFSVKSPRKKKAAVDPELSKLRKEKEKQERALQRLQDLYLYSETSMSEKDFIIRKSEISSHLDNINRQLGLMTQDQASFLSDEEFIKQASHLLIQKELKNKKYIYFKKLVSTVDPDILKAYMETILDSIYTADGKITAITFKNGLTHRFIYKDK

SEQ ID NO: 23063 - protein, 532 aa, synthetic construct
MLVRRNAAFVPDVLQLGIPMQKQVCRDFAKKQGWVVIKEFSEKGISGYKVSAKDRDAIQEIQHDAALGKFDILLVFMFDRLGRRDDETPFIVEWFVKNGVEVWSAMEGQQRFDNHVDKLMNYIRYWQASGESLKTSIRTKTRLGQLTEEGHYTGGTVPYGYRAVDKGRVNKRNRTVLDLQIDEDEAEVIRLIFHKYVDEGYGAQRLSHYLHEQGIKSRDGKGFPNTTVNRIIKNIAYTGIIKNGESQSGYIDELRIIDVSTFSKAQEIMRQRTLPHGNVPLNCKGKSLLVGNIFCAHCGNRLTLTTSGRRVYRADGTVKYEPRMRYQCHYNVRHPGECDGQSGYGVTKLDGIVEKVIRMKFAEIAAAPESEILNHQHKKEIELARIKLDQANAHLAEKQKDLSDYKAETLKVIRGQSNLSVELLNALVKETETMIALAQTRIDAAQAEYESLLASAENLRQEYDRLLTWADLFDTCSFEAKKMIVAQFVKAVRVSRDYNIEIDFNVSFEEFQNFSVKNGEPVILQPLRSHTA

SEQ ID NO: 23064 - protein, 528 aa, synthetic construct
MSTATVRSVTIIPPTINPLTHISMAATRKRRVAGYARVSTDSDEQFTSYEAQIDYYTQYIQRNSEWAFVKVYTDEGISGTSTKNRTGFNEMIDDAMSGKIDLIVTKSVSRFARNTVDSLVTIRKLKEKGVEVYFEKENIYTFDSKGELLLTIMSSLAQEESRSISENVTWGQRKRFADGKVNLPYKQFLGYRKGADGLPEIVPEEAAIVRRIYARFMEGLTPHTIAKELTADGIPTPSGKQCWQTSTVESILQNEKYKGAALLQKCFTVDFLTKKQKVNEGEVPQYYVEHSHEPIIVPEEFDKVRAEFVRRKQFGLQYSGKSIFASRIVCGDCGSFYGAKVWNSNNKYRRVVWQCNNKFKGGHRCETPHLDEKNIKARFVDAFNAVLGGKDGILADCRLMQTTLTDCTGIDAEIERLLTEVDVVTELTHRCISENAQSAQNQQEYTARYNSLVERYEKAKTQLEQLRATKTAREAQAKAIGAFMFEVQELDAFTEFDEKLWLAVIDKVTVHTNGRMTFRFRSGTEIDA

SEQ ID NO: 23065 - protein, 434 aa, synthetic construct
MERVIERVDFQIPMQPKALRVCAYARVSSGKDAMLHSLSAQVSYYNSLIQTHAGWLYCGVYSDEAITGTKSQRDGFQRMLANCRAGEIDLIITKSISRFARNTVTLLETVRELKSLGVDVFFEEQNIHTMSADGELMLTILASYAQEESLSASENQKWRIRKAFENGELVNLRFLFGYNITASGIQVNEREAAIVREIFTRFNGGESLSAISRDLNDRGCERPLGGTWCAERIRNLLSNEKYTGNALLQKKYRNNHIDKKLVPNRGRLPMYYVAGSHEPIIDQTAFDKAQVRLNEMARQAEKREKPTRSTFSGLIRCGLCGSTYKRVTCRGKHFWNCTTFQTKGKAECPAKKIPAETLEALACEVLGTEVLAPDMVRSKITMIRAEKNNVVVFCMDDGSEIVKRWKDRSRAESWSPEMKEQARQRALQTRRVQK

SEQ ID NO: 23066 - protein, 543 aa, synthetic construct
MEVQRIPKRTVSIIEPQKSILVDKEKYHQKRVAAYCRVSTDSEEQLTSYQNQMRVYTEMIAANREWEFAGLYADEGISGTRADKRPEFQRMIRDCQNGKIDYIITKSVSRFARNTVECLEYVRSLKAQGIGIFFEEQNIDTLKNESELYLVIYAGFAQSESESISKHITWTYRKKFEEGKVSFQYKNFLGYRKGTDNQPEIVPEEAAIVERIYEMFLAGQPVKVIAQTLQAEKIEIPGKNLSFSKNMIMNILRNEKYCGDCILQKTVTVDCISKTRKVNQGEAPMYIVENNHPAIISREVFNRVQEELIRRQALRAKSDKTSITATGKYSKYALTEVLQCAECGSRYRRVTWTAHGRKKIVWRCISRLDYGTKHCKDSITVEEEALHGAVVRALNRFRAEDESTYLTLMKATIGEAIGINGGSEEIDLLTRRIDTLNKRMLDLVNETVAAGKDVESNEDEFKGISDQIEQLNRRIAAIQESIHKNGSRQARLEEIQSIIAERNANETQYDDSIVRQMIECIKVHNDGKLTIIFGGGYEIEETL

SEQ ID NO: 23067 - protein, 564 aa, synthetic construct
MKKRMIPMAVSSADFDPSMNMVDPMEASAFGVIYARYSSHSQRDVSIEQQVKDCMAYAARNNIYIVACYADRHMTGRTDRRPEFHRMLRDAEAGSWSFVLTWKNDRFARNRYDAAIYKAKLKKCGVRCLFSQEYIPAGPEGILLEAMLEGDAEFRSAQMAVDIKRGLAYNAEHCMVTGAIPFGYRRTKDYTLELDPDRAPLVKEIYDRFLAGWKIIDIANDLNRRGITTASGKPWGRNSFHSMLSNERYTGVYIYGDIRTPGGLPAIIDRDTWLAVQRRLHTKKNPVGRSRSYGDYLLTGKLFCGHCQRPMVGVSGKTRPGKPLYYYYVCQGRRLSHDCQKQNVRRDWLEEKVCAMVAGLVMQDNVVEWMADCVVDYQRRHKEDGTLQALASQLKQTRAAIGNVMAAIEAGIITATTKDRLLELEAQEQKLAQALETEKALRPTYTRERVIFWLEQFRAGDLTDLAFRLRLVTTFVNAIYLYDDHLKVVLNYTGRNSSVDFPLVEDALDSGAVDGGPYSVETGPPKEMDMTFRRVHFFWRWSFFSIPHPHKTAVPGVIPGTAVV

SEQ ID NO: 23068 - protein, 576 aa, synthetic construct
MKKNFKMPGSGSETPIRVAIYVRVSTVYQIDKDSLPMMKQDLTSYCKYILNTDDFVIFEDAGYSGKNTDRPAYQKMMSQIRQGLFTHLLVWKIDRISRNLLDFANMYAELKDLGVTFVSKNEQFDTSTAIGEAMLKIILVFAELERNMTSERVTATMINRASNGVWNGGRIPFGYSYDKPAQVFSIDPEENKIYNFMVETYEDTQSIVHTSRRLNEAGYRSRNGNMWSPVAVWTILRNPWYKGVYRYNYYKIPGRKAIKDESEWVIVENHHPASIDPDRFDRIQATLDKNARYRNTPGRKTAQKNVHVFSGLVWCAECGSAFTASPGKLHVSGYRPSKYGCPNVRKTKTCHAKYTSDVVLGEFLLNYILNILNAQKQFAYIHSTDDLQKRLLHGSTFSNVDHVDPDGLASLLNMLEKCSGSDPVLLKRPRSKPKMDPELKRMMADQKKQQRALDRLNDLYLYSDDSISEREYLVRKQQITDRLQEINEAIGMMSQEPWMRTMNDEEFIRQASSFILTQKLADKQYIYYENLAESLDPEILKNFFVSILDSIILRDGRPETVVFRNGLSHTFTYKDS

SEQ ID NO: 23069 - protein, 492 aa, synthetic construct
MAAIDFNNVVDLYIRVSTSEQAEEGYSVAEQEERLRSYCAAYNYTINAVHVDPGFSGASLDRPAIKKVMSDVEHGRCKKVIVWKLDRLSRSQKDTLILLEDVFLANDCNFISLMESFDTSTPFGRCIVGILAAFAQMERENIKIRTMMGRQARIREGHFHGSRCPLGYKFQYASDGTLLSNDLVVDPYTSKLVQEVYRLSLGGSSFSSIAAHMASTYGCSLYDWSRNTAIRRILSNPIYMGKVKVGNELYPGIHEPLVSETDWYMVAAMLKHNKEQQKRTYAYQISCGVYADNLLTGLLFCGDCGARMYARRVSQNKKKYICHSVAKTSPAMIKSDHCTNRLHPFTVHQLDEMVIDEILKLSLDRPGFDMLCDQPDDSSKSEDKEIYEERLAEVNRQLDRLVKLYQTGLIDLDNISARLGDLNQEKNFLEGNLATINEVTPAEIRETAWKSIQSLQSVLNNGDMDEVHRIIHTLIDKVVVLNTDVTIYWSFC

SEQ ID NO: 23070 - protein, 519 aa, synthetic construct
MQYDKADQQNCPRRVVFYGRVSTELEAQISALKNQMNWYLELAEHHPNWTVVGQYADEGISGTGMKTRPSFMKMLRDARKMKFDLIVTREVSRFARNTVDTLVTTRELKQYGVEVYFVNDDIWTMRGDGEVRLTIMASLAQDESRKMSERTKAGIQTSQKKGTYVAGPTPFGYKRDKKAHTLVVQESQAETVRKIFAWYADGINGTEIAQTLTQEGAPNKSGMPQWSARQVLSITKNTIYKGYLTYNKSHIDDFLSHKSIKNSEQDYILVKGSFEPIISEELWDKCQRRRHAWQSYKDGNITQAYLYGKSEHADKWACRLFCGCGARMRAFRAEKGIVRYICYQRSLRNVAPKCSAPNVQAWKLELMAREIYKNVWQDHRQDILEEYQQEQENGAADSEKVEEALSWQESFPNDEISREFLDRFVPRIFSIDGQKFIWELNLFQESCTVQCNVRGTYNYHSISAEKIMPGKTKAKKGDGAVNRILEDANSTRFWVHTYDDDPISRLLSRAPASNLAYPA

SEQ ID NO: 23071 - protein, 523 aa, synthetic construct
MRFFSYGRKSVFSDKSDSIDNQFRMNREYCESKFSGQVDSWQQFSDEDFTGANTSRPDLQRMLSFIKGGFCDVLVVYQLDRLSRDVRDFANIYALLEEHGVMFISIKENIDTTTPIGRAMMYVTVVFAQMERETIAARVTDNMLGLAKKGYWTGGNPPVGYVRKHIVVNGKKHCSIEVDPDGARYVTQIFDTFLAYNCSLQGMETRFKNQGIRTQSGKFFSTTQLHKMLTMPYCVEATPEVYDFYAAKGCIMDPGSPREMWDGSVGVIIYGRSTEKNKKHQAQPPEKWTVCLGKHKPFMPAEKWLAVQSRFTQNKCIKDAKWPVPLLKGVLRCKCGNLMQVSRKKKVDGTCSSWYYCRKRMRQGVDACDMGQIKCDLLDEEVLELFRGITADPALIQKFVKAEAPADVPDLKAAQARVSACERKIGRLAASLALAEDSAASKYIIAEMERLDVELGALKREASLAEMEGHRAAASAKDAKATAAEIAKLIHGLDGFDDKEKNAIARAVIQECTWDGERLFITL

SEQ ID NO: 23072 - protein, 571 aa, synthetic construct
MTDVKEDTKKIVRILLRVSSDQQLEANGDLSIQRKLVVEEVKKHEEWILDSKEYFEGSNSGYKNSVADRDVLQEALRDAENREYDILLAYKDDRLGRRMLEIPMYIMSLKQFGVDVYTVKDGLLTPDLGDVMGMLKLAMQYGMAEKSSSDTGMRVKDTAKKLVQQGKFMGGKAPYGYKLEYSGEYSKHQRALKHLVIVPEHAEVVKYIYKLSLYKEYGSGKIATTLNLDNRYKNLAPNDVWKSGTITSILTNPIYAGYTAYGRRQHTAGRYRSLSQEDWIIAEKPNDEITIIDRDVWEKVQISRQKRGTKYQKQPWNEKATVISRNDGQLALIDVAYCGYCGRKLTNGTKYDYWTIKGTGERRSSQKSIYKCQNVWQGVPHEKMKQIRADKIEPIVFKKLSEYVGRLQEDENIFEQILENQSFEKSQQEQILVREKRNLQEIEKNIDILNDAIPNAITGTYPLSLEDLAKSIERQKDKASKQKTVVEELETNIKNLSVSQEDWENLYHNLPTWQDIFMNADVATKRVLVNKLIERIDITDDTVVIHFKVDLDHFCPQPRMTNYDGVSQSGL

SEQ ID NO: 23073 - protein, 500 aa, synthetic construct
MRMCGYARVSTDEERQLDSLEHQMEFFSDFAKQNGHHLVNVYTDEGITGRQLKKRDAFNKMLSDSKLGLFDLLVVKDVSRFARNTVDLLTSIRQLKSRGIDVIFVNNSQKVLGESEFIITLLGAVAQEESSNLSKRVKFGKNITSKKGRVPPRIFGYDRIDNFTMEINEREAEVVREIYHLYIDEGLGCRLIAITLAEKQMKTKFGNDWNQRNIRRILENPIYSGHYINHRYTVVDFLEGTTKALPKEQYYHHDRPEWAIITPERFQQAQEILEQRRKQYATEYTHFTGRYSNRHLFSTLIRCKECGRAFSRRVTHYPNSDYIYWRCPTNNQYTAKRCSNNTIVREDDLIETLSTYLREVASNKESIAQEIARKFKEANAVEGSKPDAQTLEAKKVKLKAKLEKYMEMYANDVITMEALKSKTAEINESINVIDDQLILLEGQRTQERTIESITNEAMTEIERFLSLQSATNMDLRRIIDSIIVDDKKQVKINLKITGNL

SEQ ID NO: 23074 - protein, 606 aa, synthetic construct
MAKNKDCIAVYSRKSKFTGKGESIGNQVELSREYIRTHYGDAYAESMVVYEDEGFSGGNLNRPDFKRMMKAAHEHKFKAIVVYRLDRISRNVSDFSTLIEELSRLDIAFVSIREQFDTGTPMGRAMMYIASVFSQLERETIAERIRDNMHELAKTGRWLGGTTPTGYASESVKHITVDGKSKKACKLKLVPEEADTIRLIYKIFQESDSLTYTEAELMKRGIKTKNGKYHTRFSIKSILQNPVYVIADDEVYNYLVNKDADIFSDKAAFDGVHGLMVYNRTDQEKGRATRYLSPEEWIVSVGEHPGIIPGREWIRIQESLYRNKSKAYRKPRGNEALLTGLLFCRCGSRMYPKLSKRKTADGKRIYTYVCKIKDRSKHKLCDERNANGNTLDLAIIEQIKMMEDNQGTFIAQLEQSRKFYTGNRTDYEDRLAAARRDKAEAEKKVEALVDSLAAVDDSTAKGLVIKRIEKLSQECRNIDSRIQELEGLTEQYHLSDIEFDVFRQLLTMFKSNIDTMTVEEKRAAIRTLVRKVVWDGTNAHVVLFGVPDEEIEYPDLPTVSGGSDDEDDTDDLEPFADVDYEDEEDDSLGKTQPLSAAKARWGENSK

SEQ ID NO: 23075 - protein, 464 aa, synthetic construct
MARSVTVIPARSQKVRTGHKAVQEKKIRVAAYCRVSTDQEDQLHSFEAQVEYYTKYINEHENYEMAGIYADEGISGTNTKKREQFKKMIADCEDGKIDLVITKSISRFARNTQDCLAYSRKLKNLGIGIIFEKENINTLDSTGELLFTILSSLAQDESRNISENCKWGIRTKFKNGEMHLNTFKFLGYDKDENGKLVINKEQAKTVRRIYRDFLIGINPAQIAKELTEEKVPGCLGQTKWYPSTVTGILKQEKHMGDALLQKTYTADFLTKRQVRNNGEIAQVYVKDSHKGIIDKQTWNAVQEEFDRREKFMESHGTDRYSYGAACMPFCEKVFCGECKSLFTRHSWSSRGIVQWQCKNHRKDGKVACTNAYVDNADLEKGFVKAFNRLVTDRDKHMERWQQMKSDGTPLEKIRAGQMMEAVGNEPLTRFVPEIAQLVLCEVTVLGAKKYEFFFLEGSRVKVSV

SEQ ID NO: 23076 - protein, 502 aa, synthetic construct
MEIQIREGNSRQKRKLKVCAYCRVSTDADEQENSLENQIRHYKEVITSNPDYEYAGVYSDFAISGFKEKRPGLQKMLADARKGKIDLILTKSVSRFARNTSIVLEATRKLKELNVGVFFELQNINTLSGEGELMLTILAAFAQAESESGSVGAKMVYQRKYEAGIPVQYLERSFGFKKDERGVYIADEEEAAWVRKIYEMAADGYTPAAIKRYLNENGVKTVGGAEWIDSTVFRLIENEIYKGDYIMHKHFVNEERKLVRNRGEVDAWYIEDDHEAIVSPELWQKAQDALEAKRDYLAEGSVIEEFTEENYPYMNKIFCARCGHPLYKRIYSNGNRLNWGCSGTKRYGKSFCEGINIPDGVLRGAWHFDENMYIGEKQTDKGKKEFTYLKEASWKRRHKKKEPEPIPENTETEYPYREKIFCGLCGSRLVRHVNTKNHKVIWVCNGRKRKGKDFCDGTRVPDTIIKGWGEIKKDIYIQRKDDKNGKKRYSYTSKKPKGADRA

SEQ ID NO: 23077 - protein, 579 aa, synthetic construct
MENSAINTLPFYNTPLDRNSPRNMVFYGRVSTEHEAQLSALQNQIQWYDDQLKSHPNWNLVERYIDEGITGTQAKKRPGFLNMIDDAKKGKFDLIVTREVCRFARNTVDTLIYTRELKNKYNIEVYFVDDNIWTMDGDGELRLTLMATLAQEESRKTSDRVKAGQKVSRENGALYGNGNILGYDRVGDTYIINEEQAETVRMIYDMYLNKGLGSMKIAKELSIQKRKNASGNIKWSAERVMRVLKKSTYAGIIAYGQSHSNNYLEQKRINNLNRDTYMYQKIDIPVIIPKEEWDKVQEIIASRTQKMGDDLRGKKEVKEFWSKKLLCKCGSSFRRNKWRTNKTGEEVFGYQCQRQINYGSKQFREKNGLDTEGYCDIRMVADWKLDMMAKIIIEQIWKNKGESIILALKMIADNYEEDVSPVKKNNKEIELKIEKLQNRMKNLIEMRADGEITKEDFTEFKNSINDQISILNSELVIEEIESDKPESIEKKIDTIRQIIDESIDFSQPKLPRYIIDRFISKVVVLDNNKFRWYLTLGDNPDDDMYIDAQVEGRKNNSSVQILSSEDSLLTFHSSTGSNR

SEQ ID NO: 23078 - protein, 527 aa, synthetic construct
MGVQKKVKTIPATLTRFTASPITEQKKRKVAGYARVSTDHDDQFSSYEAQIDYYTNYIKGRDDWEFVEVYTDEGITGTSTKHREGFKQMIADALDGKIDLIVTKSVSRFARNTVDSLTTIRQLKEAGVEVYFEKENIWTFDGKGELLLTIMSSLAQEESRSISENCTWGQRKRFADGKVSVPFQRFLGYDRGPDGNLVVNREQAVIVKRIYSLFLQGMTYHGIADTLTKDGIPTPGGKKKWSISTVKSILSNEKYKGDALLQKSYTVDFLTKKTKVNEGEIPQYYVEDNHEAIIDPEVFEMVQREMAKRGKGKKYHSGVHAFSAKIKCGECGSWYGSKVWHSNTKYRKTIWQCNHKFDGDCRCQTPHLTDEEIQLHFLSAANKLLATKAAVIANGREMQALLFGTTELEAEQAQLLEETQVVSDMVQQAIQENARTALNQTEYQKRYDSLVQRFDRAKTRLEEVTAGIQEKQTASANMGTFLNAFEQMPDALAEFSLESWHSMVDFTTVYSIDDIRFTFKNGQEIQA

SEQ ID NO: 23079 - protein, 599 aa, synthetic construct
MRKINKIEPTLPVLPTRKKVAAYARVSVETERLHHSLSAQVSYYSELIQANPEWEYVGVYADDGITGTKASKREEFQRMLDDCEAGKIDIILTKSISRFARNTVDLLETVRHLNELGIEVRFEKENINSLSGDGEVMMTLLASFAQEEITSLSNNVKWGVRKRMEQGIPNGHFRIYGYRWEGDQLVIEPEEAAIVRHIFQNFLDGKSRLETEREFEAEGITTANGCRWVDSNIKVVLTNITYTGNLLLQKEFIEDPITKRRKKNRGELPQYYVEDTHEAIIDMETFQYVQEEMARRKELGAFANKSLNITCFTSKLKCSKCGSSYVRNQRSNRTKYTSTYGDTIVVWVCGTTKKKGGRCSRKDIPERVLREACAETLGLTEFDEDVFLEKVDYIIVNPNCQLEFHFYDGTTKVQTWKSTAKKDCWTDEQKDRQREWMRRNMATSSRFSPFTTRVVCGCCGSSCRRQTQPSKLSKTGKIAYWRCSGGAKTNCGIKGIREPELMEITAQVMGTPEFDGEAFRERVDHITMVESGKLEYTFLDGHTQEAEYSTEKPSHPWSEEQRAKFKESVKGSYTPERRKAMSEHMKKIRSEKHWASKRK

SEQ ID NO: 23080 - protein, 529 aa, synthetic construct
MNRTAARSVTVIPPTINPLTHLSRVAVQKRRVAGYARVSTDSDEQFTSYEAQVDYYTQYIKRNPEWEFVKVYTDEGISGTNTKHRIGFNEMIADAMSGKIDLIVTKSVSRFARNTVDSLVTIRKLKEKGVEVYFEKENIYTFDGKGELLLTIMSSLAQEESRSISENVTWGQRKRFADGKVNLPYKQFLGYRKGADGFPEVVPEEAIVVRRIYTRFMDGLTPGAIAKELTADGIPTPSRKQRWQTSTVESILQNEKYKGAALLQKCFTVDFLTKKKKANEGEVPQYYVEHSHEPIITPDEFDKVQVEFERRKRISRQYSGKSIFSSRIVCGDCGSYFGSKVWNSTSKYRRVIWQCNSKFKGEHKCETPHLDEETIKARFVAALNAIIESKDNILEDCRLMQATLTDCTGIDTEIKSLLEEIDVVTELTKRCIAENSQTAQNQEEYTARYNGFVERYEKAKAQLEQLRTTKAEREAQAEAIGAFMFEVQELDTITEFDEKLWLTTIDTVTVHADGRMTFKFHGGKTLTSY

SEQ ID NO: 23081 - protein, 434 aa, synthetic construct
MERVVERVDALIPAQPRALRVCAYARVSTGKDAMLHSLSAQVSYYSKMIQSHNGWMYCGVYSDEAVTGTKRERAGFQHMIEECRQGNIDLVITKSISRFARNTVTLLQTVRELKSLGVDVFFEEQHIHTMSADGELMMTILASYAQEESLSASENQKWRVRKAFENGEIINLRFLFGYDITPDGIRVNEVDAAIVREIFARFNGGESMSSICRDLDARGHKGVLGGTWCAERMRNTLSNEKYLGNALLQKRYRNNHIEKKLLPNRGELPMYYAEGTHEPIIDQATFDKAQERLRMLAQQAANRKKPTRSVFSGLIHCGLCGNTYKRVTYRKKHYWNCTTFQTKGKSECAAKRIPEETLEVLTCEVLGAVSFDPDMVRSKITAIRAEKSNMVVFCMDDGSEIVKRWTDRSRAESWTPEMKEKARQRALQARRKKE

SEQ ID NO: 23082 - protein, 522 aa, synthetic construct
MGNVMLIPARRQVGNNARKQEEEKPKLRVAAYCRVSTDSDEQATSYEAQVEHYTEYIQKNPDWEFAGIYADDGISGTNTKKREEFNHMIDDCKAGKIDMIITKSISRFARNTLDWLKYIRQLKEKNIPVFFEKESINTMDAKGEVLLTIMASLAQQESQSLSQNVKLGLQFRYQNGQLQINHNRFLGYTKDADGNLVIDPEQAEVVKRIYREYLKGSSMNKIAAGLEADGILTGAGGKRWHTSTINKILRNEKYIGEVLLQKTYTTDFLNKTKVKNNGLVPQYYVEGNHEAIIPKDIYLQVQEELVRRRVVKTSANGKKRSYSCNHCFSQIVICVDCGEMFRRIHWNNHGCKSIVWRYISRLESTGLECHARTINELVLQDAVVKAINQMLGDKSSYQAQLQLNIASVIRASQATSVENIDEKLMALQQELIQKAQSKEAYDEIADEIFRLRELRQKTTVDTAARDEQIKRINDLQDYIAQQTTYLTEFDESLVRRWIKQITIWDDHITVELKSGVNIDVDA

SEQ ID NO: 23083 - protein, 616 aa, synthetic construct
MQENISTSISAYATPKPIRQTDIEQDYNFFQAQKIAKNMLELGLISLSEFNKLTEINRETFSPFWVEIMTKIPWYIRDSELICDTNEGRWTTMKKITKIDGVQNNKNNSTVNKELRVAAYCRVSIGSDAQLESLEAQKTHYERYINSRKDWKFAGLYFDEGITGTKAEKRPELLRLIADCEARKIDFVITKSISRFSRNTTDCLALVRKLQSLSIPIFFEKENINTGSMESELFLAILSSMAEGESASISENSKWSIKRRFQNGTFKLSYTPYGYDWDGENMIINPAQAAVVKRIFADILSGKSTNAIADELNAEKIPSKKNTNWTSSTIRGILANEKYTGDVIFQKTYTDENFNRHTNYGEVDQHMAPDHHEAIISHADFEAANALVSQRALEKGVKKGSDKYQKRYAFSGKIICGECGDTFKRRIHTCTTYKYVAWACNTHLKDKSTCRMKYVRDDDIKAAFVTMLNKLIYGHRLVLVPYLKALENSSGDEALQRIQHFELLLDQNSEQRETLTKLMAQGYIDQILYNQETNVLLLQAEAYRSDIETITICMTGDSAKVTETNLLLHFVSHVDMLTNYSEELFESYADHIEISDRNEIRFVMKCGLTFTERIGD

SEQ ID NO: 23084 - protein, 527 aa, synthetic construct
MAQRKVTAIPATINKFTATPVNSRKKRRVAGYARVSTDHEDQVTSYAAQVDYYTNYIKGREDWEFAGIYTDEGISATNTKKRDGFKRMVADALAGKIDLIITKSVSRFARNTVDSLTTIRKLKEHNVECYFEKENIWTFDSKGELLLTIMSSLAQEESRSISENVTWGHRKRFADGKVSFAYSRVLGLEKGPDGNIVVNQEQAKIVKLIFRRFLEGMTPHSIAVELTEMGIKSPGGKDKWNGATVRRMLSNEKYKGDALLQKEFTVDYLQKKTKKNEGEVPQYYVEGNHEAIIEPSVYDLVQVELAKRSKKNEARYSGVSIFSNKIKCAECGSWYGSKVWHSNDKYRRVIYRCNHKFDGNRKCETPHVTEEEIIAAFIKAMNTLITERDEIIENIQLIRQTVCDVTALEQEQDKFRSEMEIVVELTQSCVAENARTAQNQEDYQKRYDGLVERYEKVKSRYDAIVEAIEEKQAHYEKLGIFIDTLEKHGEPITEFDAGMWGSMVEYITVDKDKKMTVTFKDGSEVQA

SEQ ID NO: 23085 - protein, 594 aa, synthetic construct
MPKISKIEPTVPAIKQLKKVAAYARVSMQSERMMHSISAQVSYYSKLIQKNPDWEYAGVYADDFISGTNTVKRDEFKRMLADCEKGKIDIILTKSISRFARNTVDLLKTVRDLKAKGIEVRFEKENINSMSGDGELMLSILASFAQEESRSISENVRWATKKRFEQGIPNGKFRVFGYRWDEDQLVIEPSEAAIVKRIFQNFLDGKSRLETEKEFAAEGITTSNGCRWVDSNIKVVLTNITYTGNLLLQKEFIEDPITKHRKKNRGELPQYFVENTHEPIIDMETFQYVQDEIARRKELGALANKSLNTTCFTGKIKCPHCGVSYMHNKRTDRGNYLEFWCCGSRKKKGGRCEVGGSINHKNMVKACTEVLGLEEFNEEIFLREVDHIDVPKRYVLEFHMTDGRVITKDCPNTGHKDCWTAEYRAKTSAKRRKNGTNCKGSSCFTGKIKCKNCGCNFRRATQPSATAESGKVNYWRCSEHSNGCQTAGLREDVLIPLLADTLGMAEFDEAVFRKTVDYISVLTDKDLEIHKKDGTVTAVIYTPPAPKRLPRTEEQKAHMRSLMKEKWTPERKTEMSERMKQMRKERGENWRKEK

SEQ ID NO: 23086 - protein, 486 aa, synthetic construct
MNGVIYARYSSENQREESIDGQLRECTAFAQHNDIQIVGEYIDRAFSAKTDNRPSFQKMIKDSAKGEFDVIIVWKLDRFARNRYDSAHYKNILKKNGVKVVSATEAISSGAEGIILESVLEGMAEYYSAELAEKVSRGMKENALKCKYNGGSVPLGYYIDESKHFQIDSSVAPFVVECFEHYADGMTMKQLRDELNMKGVKNSRGGKLSIDVISRMLTNRKYLGEYTFQDITIKDGIPAIVSTSLFEKVQDRLTKTKKAPSSHKADDDYILTTKLFCGKCKSFMVGESGTNAQGKKYRYYKCVNHKKHQGCDMKSIRKDLIENMTIKYIREFLNDEDLINTLIDLAYDAQHKENEQLPLLRKQLAQTEKGIKNIVDAIEQGISTKSTRERLLDLEQRKNDIEMSISKESIENPMLTKKQFKFWFDQLKKLDISKSEQRQKLVDLFVNSIIIYDDHIKFFFNYKEHTETITFDELNNCSDLPDSPRP

SEQ ID NO: 23087 - protein, 523 aa, synthetic construct
MRFFSYGRKSVFSDKSDSIDNQFRMNREYCESKFSGQVDSWQQFSDEDFTGANTSRPDLQRMLSFIKGGFCDVLVVYQLDRLSRDVRDFANIYALLEEHGVMFISIKENIDTTTPIGRAMMYVTVVFAQMERETIAARVTDNMLGLAKKGYWTGGNPPVGYVRKHIVVNGKKHCSIEVDPDGARYVTQIFDTFLAYNCSLQGMETRFKNQGIRTQSGKFFSTTQLHKMLTMPYCVEATPEVYDFYAAKGCIMDPGSPREMWDGSVGVIIYGRSTEKNKKHQAQPPEKWTVCLGKHKPFMPAEKWLAVQSRFTQNKCIKDAKWPVPLLKGVLRCKCGNLMQVSRKKKVDGTCSSWYYCRKRMRQGVDACDMGQIKCDLLDEEVLELFRGITADPALIQKFVKAEAPADVTDLKAAQARVSACERKIGRLAASLALAEDSAASKYIIAEMERLDVELGALKREASLAEMEGHRAAASAKDAKATAAEIAKLIHGLDGFDDKEKNAIARAVIQECTWDGERLFITL

SEQ ID NO: 23088 - protein, 535 aa, synthetic construct
MKKKQPNTRHGRAAIYARYSSHNQREASIEQQVKACRELAVRLGLDVVETYEDKAISGKSDRRPSFQRLLRDAEKGYFDCVLAWKSNRMGRNMLQAMTNEARLKDWGVRTFYAEEDFDDTAAGRFALRNMMNVNQFYSENMAEDITRGMMDNASKCLSNGALPLGYKAGENGRIVLDKAQAAVVQEIYTRVACREPFVDIAADLNQRGIKTKRGGPWTKSSFYTICRNERYRGIYIYDDVRVEGGVPRIVSDGLFYRVQEVLKVKKTPQSARHHTGAEDYLLTGKLFCGKCGRPMTGVSGTSRSGEMHYYYTCQKRRREHACDKKNVIREQIEKSVAQAIKQYMLTDEMIQHMADATMAYNARQEKDLHLQDLQGQLAAVKTSAANLLKAIEMGVITETTKARMVELEQEQGRLNAQIENARAELVPITRDNFVSLLHIYRDGDINDSKYLASLFETFLVRVDLYDDHFLIWFNPLGQKTPADIPITSIENGDADELFDECRSKNVFDWGGKWSTKIKTPAVPRRVFLFCCSVSC

SEQ ID NO: 23089 - protein, 485 aa, synthetic construct
MPTSDLKIAAAYIRVSTDDQEEYSPDSQVRLIREYARKNGYLLPEEYVFQDDGISAATARKRPAFNRMIALAKEKERPFDAILVLMFSRFARNREESVLYKGLLRKQGISVISVKEPVVDGPFGTLIESIIEWFDEYYLINLSAEVKRGMSEKFLRGEAMGTAPFGYRIDSANKTFTVDPERAEIVCDVFRSYADGAGLRDIAVQLGDAGITTRRGNRPDSRFVEYMLRNPVYIGKIRWTPGHKTRYSRVHIADGVEVVDGKHPPIVSMDLWEAVQRRMDQRKAAYGRYQRQAPAAWMMRGLVRCSACGATLIMAGRSSSCPFLQCHSYAKGACHTSHSLSLRRANAAVLTGLRRSVGTLIFHMVPHLTSAPSRAADYGRLLEQERRRLARCKDAYQAGVDTLEEYRDNKTRLEERIRRIEEQAASAAAAPESFDKAAYGKKAADILRFLETSADEGAKNEVLRSVVDHITYEKASRHLAIYFYT

SEQ ID NO: 23090 - protein, 528 aa, synthetic construct
MQETNISINEIIMYLRKSRSDDPYMTVEEVLARHERQLQEYALSSFGSIIPEERIFREVVSGETIADRPVMQSVMKYLESGQIKGVLVIEPQRLSRGDLEDCGRIINAFRYTNTLVLTPPKTYNLSDEYDRKFFEMELTRGNDYLEYTKKILNRGRLASVKQGNYIGSIAPYGYRKIKTGSGKDTAHTLEIVPEQADAVRMMAQLYLAGNGFTRIAAHLDSLGIKPLKSDHWSSAAISDILSNPVYIGMIRWNHFKTIKTMQNGQIVKSRPTNRGTDYILVPGKHPAILDQGTFDAIAQRRGKSPKIKRGHELRNPFAGLVFCGTAGCGRSMTFKQFTNYRSKVPRRSESMICPNQRICHTKSVQYSAFVERVKEILSKTVDDFEIKLQNDDGNIVRIHENIIRNLEQDLVKLKDKDLRQKDAYEDGIYTKEEYASRNAKLQEQICEVQLSIQRAKDTMPPEVDYQERVSRFSDCLSKFEDTDISASEMNLLLKSCIEKIIYHNSSESKPGIGRFVANPFELDIYLRL

SEQ ID NO: 23091 - protein, 464 aa, synthetic construct
MARSVTVIPARSQKVRTGHKAVQEKKIRVAAYCRVSTDQEDQLHSFEAQVEYYTKYINEHENYEMAGIYADEGISGTNTKKREQFKKMIADCEKGKIDLVITKSISRFARNTQDCLAYSRKLKNLGIGIIFEKENINTLDSTGELLFTILSSLAQDESRNISENCKWGIRTKFKNGEMHLNTFKFLGYDKDENGKLVINKEQAKTVRRIYRDFLIGINPAQIAKELTEEKVPGCLGQTKWYPSTVIGILKQEKHMGDALLQKTYTADFLTKRQVKNNGEIAQVYVKDSHKGIIDKQTWNAVQEEFDRREKFMQRHGTNRYSYGADCMPFCEKVFCGECKSLFTRHSWKSRGIIQWQCKNHRKDGKVVCTNAYVDNADLEKGFVKAFNKLVTDREKYMEIWQQMKSDGTPLEKIRAGQMMEAVGNEPLTRFVPEIAQLVLCEVTVLGAKKYEFFFLEGSRVKVSV

SEQ ID NO: 23092 - protein, 506 aa, synthetic construct
MAIALYARKSIERENSISCETQIEYCKSVIKPDERNEKTVEFIDNGYSGGNVDRDGFQKMMRQIERGKISKVIVYRLDRISRSLSDFVGILETLKKHNVQFVSSQESFDTSSPYGEMIVKILMVFAEFERKSIIERVKHAYAYRSEMGLYMGGRRPYGFNLKDTVINNVKTKMFEPVTNEIEQIKYIFENYSVPNVTLRRLMDNLIDNNISATTGSWSTAKLSNIIKNPIYVKADNAIYEYYSKRNANIMSDINQFDGSHGIQTYGKSKHTADDMSDIKIVVMPHDGIINSDLWLKCQKKIEKNKKLGNSVNNSTSWLGGKIACKQCGRTMTVTKGGKKKDGTQTRYFSCTGKSHNRICNGPKVTLYADSLEDMVYNLIAEKLQSLKGSRKKISTDNSNKINLLKNQLSEIKQSQEKIVNMLLDDSFKSDMKSLLNEKAKKLSEESKAITEKIEDLESEENEIISVINLSQKWKSANTDERKAVCNVLIHKIFICEDGTCEVVWNI

SEQ ID NO: 23093 - protein, 516 aa, synthetic construct
MKAIYVRQSLDKKDSLSIDAQIEDCINLCKRSGWNDYKVYKDKGWSAKNLDRPAFRQLNQDVQNGLIDGVICYKIDRISRSIRDFVNLIVDYQDLGVHFISFADNINTAAPGGMMMATLFVSLAQMEREAIITRVTDNYYYRCELGFWGGGPAPYGFRLVKTTENGQKHTILDPVPEEAEVIRTFFAWYLEPGATVRSIMNRAHLAGMQTRSGSDWTSRVLSDMLSKPLYAPNSMDIYNFYASQGVRVKISPEQCDGKQSLNIFGLRDRNSAHPKRSRPVSEMTLAIAKHKPIVDSDTYLKVQYKKKSRLAVTPRAGTSRTAVLSGLVRCGYCGRAMSPSGAKNGRYFTCSGRRNYAKGVCQGKSVKMDFLDDYVLNDLADFISQPEIKSMFKDGKAQRIPSSEQAKINEYKQRIATIDIDIQKLLDACLTSGDVAVKYLNERIDLLDTEKQNLQAEILAIQNKSNRKLELEGLDINSAPTALAGGEFDTKKYLCNFFIEQIIFYDRDNVQIRYKM

SEQ ID NO: 23094 - protein, 572 aa, synthetic construct
MASRIAEKLAAKKAAIYIRVSTHWQVDKDSLKVQRRELIAYVTLVLGITDYVVFEDPGYSAKNTDRPEYQAMMDRIRTGEFTHLVVWKIDRISRNLIDFAAMHDELQSLGVTFVSKNEQFDTSSAIGEAMMRIILIFAELERKTTAERVTAVMLSRASDGQWNGGRVPFGYSWSKETKTFSIVPEEAKAIRRMAELYEQYQSLLYVAKYLNDAGIVTKTGGQWTPTTVRTILTNPWYIGQYVYNVHSDGKGIEKRDSDEWITVENHHEPILNEDVFCRMKFLLTRNKRGGVPSHKTYVRKNIHIFAGLLRCGQCGSNMTANLDRRRANGFRPSQYACGSRRRKGTSCTNKYISDTTLGPFVLNYVANIIRASKNSSEATTPEVLERKLLRGEAFEDVASVSTDALGQLLDAFRSAGDAVEYRPQIAFSGDDNSIREIDTLRARRRKLDNALARLNALYLYDDEAMPEKDFVMQRGQITKQLEEVNARIEELQNQESSEELGDDFIGKASYYIMANKLIEDRYIDYEKYIRAIDPSIPHSFLQQIIDHIVVNDGRVTSITFKNGATHTFTYKT

SEQ ID NO: 23095 - protein, 581 aa, synthetic construct
MSRTTNKRPGKAKSGLSRKQKVAIYIRVSTLYQVDRDSLPMQRKDLIAYASLILGIEEYEIFEDAGYSGKNTDRPAFQEMMQRIRKGEFTHVLVWKIDRISRNLLDFAEMYEELQDLRVTFVSKNEQFDTSTAIGEAMLKIILVFAELERNMTSERVTATMISRANSGLWNGGRIPFGYDYDPDKTAFSIREDEEKVCQMIKNDYMEHKSLVHTSRMLNASGYKTRSGVEWSPTAVWIIVSSPFYAGIYRYNRYKGTERRVENPEDEWIMIQNHHPAIFSLEEHEKMLAILDENSRNRRSVGQRHQTERVHIFGGIAYCGKCGSKMVSTPGRLHVNGYRPTNYSCPKHRKTKECDNPTVSDTQVGEFVINYILNMLGAKKKFSTIENPEDLERCLLYGNTFSEVEHIDSNGLNEYFNLLSRYSSDDSYTFSVKKSRKKKAEVDPEVEALRKEKEKQERAMKRLQDLYLYSDTSMSEKDFIIRKTEISKRLEEINAMLGMVAKNSEPSLSDEEFVRQASHLLISRELQNRQYIYFKNLAQNVSPEILKAYMETVLDSVLLVDGRVSSIVFRNGLTHKFKYKS

SEQ ID NO: 23096 - protein, 465 aa, synthetic construct
MARSITVIPASQPYRVGGRTQQKTRNLRVAAYCRVSTDQEEQLNSFENQVEYYTKYIQDNPLYQMAGIYADEGISGTNTKKREEFKRMIRDCEEGKIDLVITKSISRFARNTQDCLEYSRRLKNLGIGIFFEKEHINTLDASGELLFTILSSLAQDESRNISENCKWGIRSKFKKGIPQVDCTKFLGYDKGEDGKLIVNQEQAKIVKRIYREFLDGYNPAAIAKMLMEDHIKTGTGREEWRSASVRAILKNEKYMGDALLQKTYTADFLTKKVKKNHGEVEQFYVKESHEAIIPKEQWEAAQLELERRDSYMQELGLTFYGYGSEVNPFSCRVVCGKCGAVCGKKSWKSRGVEFWQCNNRSKNHGVKGCASENLPHENLLKGFITAWNQIVAEREQYLPKWEKKKKEGNPLEKLRAEQMIELTLQPPLTKMLPELGQMVLERVIVQGKEIMVIRFLDGTEIKVRI

SEQ ID NO: 23097 - protein, 498 aa, synthetic construct
MQIEVRKADMRKEKKRLKVCAYARVSTEASEQENSLENQVSHYTEMIQSNPAYEFAGVYADFGISGFKESRPQFQKMMQDAKNGKIDLIITKSVSRFARNTAIVLKASRELKERNVGIFFELQNINTLTEAGELLLTILAAFAQAESESASESSKMAYLHRIENGEVVAYLERSYGYEKDENGEYRAKEPEASVIREIYDLVIQGVNCTNIARVLNARNIQTVQGAEWTASTVFRIVENEIYKGDVLMQKTFIDEKRHQVQNRGEKAMYYAKDNHPPIVSEKTWEKAQRKLEDMRAERAEHSVIQEFTEENYPYMNHIFCAKCGWPLKPRVYSHGHRLSWDCSGQKRGTKKFCTGIHVLDNDLRKMKIEGNRYFSETVDKYGEVHLKHVGERTWKNKHKKKKFNHKDLYPELNEENYPYYKRLYCARCGSRLGRYISHGTVRWICSSYKRKGQAKCPGVRIPDEIIKEWNLPDGKIYIMGKEDKNGEKHYSYTSESAL

SEQ ID NO: 23098 - protein, 502 aa, synthetic construct
MEFIREDCIYARQSVDRKDSISIESQIDFCKYELKGGSCRVFKDKGYSGKNTDRPEFQKLLGEIRKGKVRRVIVYKLDRISRSILDFATMMELFQEYDVEFVSSTEKFDTSTPMGRAMLNICIVFAQLERETIQKRVTDAYYSRCLKGFHMSGQAPYGYQLEPTVVEGIRTKKMVADPVAADHVRLMFEMYAEPETSFGDITRYFEEHDIKIYGKSMFRTFLSKLLRNPVYAQADLELYEFFKSQGAAIVNDASDFAGTNGCYLYQGRDVKEDKDRCLKDQILVIAPHEALISSDTWLKCRKKLMANTTFQQGRKPKNTWLAGKIKCGHCGYALKATHVPNSTGYFRCTKRTENKGCPGCGKIRKEEFEQFIFSAMQEKFKDFQILHGREEKVNPKLTAYQVELAQVEAEIEKLLDTLTGANATLLAYANKKIEELDTRRQTISKAIAELSVETISPQQIKKLSYYLDNWDSIDFDDKRKAADGLISTIKATSDRVQIEWKI

SEQ ID NO: 23099 - protein, 523 aa, synthetic construct
MELSRNITVIPARKRVGNTAAAEQRPKLKVAAYCRVSTDSEEQASSYEVQVAHYTQFIQKNPEWELAGIYADDGITGTNTKKREGFNRMIQDCMDGNIDMIITKSISRFARNTLDCLKYIRELKEKNIPVFFEKENINTMDSKGEVLLTIMASLAQQESQSLSQNIKLGLQYRFQNGEVRVNHSRFLGYTKDEEGNLIIEPAEAEVVKRIYREYLEGASLLQIGRGLEADRILTGAGKTKWRPETLKKILQNEKYIGDALLQKTYTVDFLNKKRVQNKGIVPQYYVENSHEPIIPRDLYMQVQEEMIRRANLHSGANRKKRVYSSKYALSSIVYCSKCGEIYRRIAWNNRGKHSTVWRCCTRVEHGPTACDAPTIQEPDLQAAVVKAINLALGKRESMMATLQENVETVIRQEDETSVEGIEAKLLDLQKELLKLANSKKDYNSVADEIDRLRELKQNALVESAEREGLKQRLREMREFLEQQSTEVTEYDELLVRRLIEKVTVYDEKFEVEFKSGAKVDVEK

SEQ ID NO: 23100 - protein, 520 aa, synthetic construct
MKRITKIEENMLLEKRKLRVAAYCRVSTARGEQLVSLAAQKAHYESYIKSNDEWEFAGLYYDEGISGTKKEKRDGLLAMVAACERGTIDFVITKSISRFARNTTDCLELVRKLLDLKIYIYFEKENLNTGSMESELMLSILSSLAESESVSISENEKWGIKRRFQNGTFIISYPPYGYDNVDGEMVIVPEQAEIVKQIFADTLAGKSTHEIAEELNERGVATKKGGHWTPGTVNAIIGNEKYTGDVLFQKTYTDSSFNRHQNRGELDQYLMQDHHEAIISREEFELANAVLKQRGREKGNGYDTGRYQNRYGFSGRICCGECGGKYKRRMHYKPSGQYVAWACANHLKDKESCSQKYITDDALKLAFVTMMNKLVFGHQMVLRPLLQSLRGLNDQSRLLKIEELETAIEKNREQKQVLTNLMASGYLEPALFNKESNELAAEAEALRQEKDGLMRSVNGDMVKIEELQRLLRFVSKGTMLTEFDDETFLSFAERITVLSRKEVVFELKCGLSLRERLVEP

SEQ ID NO: 23101 - protein, 445 aa, synthetic construct
MAAYCRVSTDQEEQLLSYENQVNYYTKFIKDNPLYTFAGVYADEGISATNTKKREEFNRMIADCREGKIDMIITKSISRFARNTLDCLNYVRELKELGIGILFEKENINTLDAKGEVLLTILSSLAQDESRSISENSTWGIRRRFETGKHKMSTKRFLGYDADESSGKLIINRKQAPIVVRLYQEFMDGKTADYIKRIFEREGIRNWDGGTKWQATTLMSMLENEKYKGDALLQKSYTVDFLTKKRTQNKGEIQMYYVEDDHEAIISKRIWECVQLEAERRKKYLEEHGTNSYSRRPENNPFASKIVCGNCNKVFARKGWRSSTGIDRKIWQCSERYKVKGIMGCSNRHVEEETLVKAYLMAWNALVENRKAFMERWKEQMQSENLLEGYRAEKFIEYTDRAQPLTEMDTDFMLKTLDHIKVFEDGTLLVVFLDGTEIGCKSEEE

SEQ ID NO: 23102 - protein, 425 aa, synthetic construct
MRIRIITAVPTAEKKKRVCAYARVSTDSRRQEESLENQTATYERLIRSNPEYAFAGVYADQGISGYCENRPQFQKMLERARAGEIDLIITKSISRFARNTVTVLKVARELKERGVGIFFEEQNINTLSGDGEMMLAVLASFAQEESRSMSENNKWSIKKKFERGEVMITTSRFCGYDKNEYGDLVVNGKEAEIVRLSFDLYLMAVGSTRIASLLDYLGVPTVTGGSWEGGTIGGMIANEKYKGDFLLQKYYTPPDKRNFTRKNRGEVQSYYISENHEPIVTPEVWQQAQEMRDYRKKIRNIGQDGTRKFQNRYPLSGMLICPYCGRTLRRRQVYKKKIQWLCSTYIERGKQACKGIRIDDAELAGLHVTEQTVVEEVLKDGKKHYRYTSKAEFSFTGEPQPERPEDTDGSVLPGVNRPRRTVIKL

SEQ ID NO: 23103 - protein, 477 aa, synthetic construct
MKLRLSTIPSISRKILKWEFAGIYADDGISGTNTKKREEFNRMIEACKTGEIDMIITKSISRFARNTLDCLKYIRMLKDKNIPVFFEKESINTMDAKGEVLLTIMASLAQQESQSLSQNVKMGLQFRYQNGQVQVNHNHFLGYTKDREGNLVIDPEQAEVVKRIYREYLEGSSMDKIAKGLEKDGILTGAGKKKWWTSTINKILRNEKYIGDALLQKTYTTDFLNKTRVKNNGIVPQYYVENNHEAIIPKDIFLRVQEELVRRRVVKTSANGKKRSYSCNHCFAQIVICGECGEMFRRLHWNNRGVKSIVWRCISRLESTGLECHARTINELVLQDAVVKAINQMLGDKSNYQAQLQLNIAAVIRASQATSVENIDEKLMALQQELIQKAQSKEAYDEIADEIFRLRELRQQTTIDTAARDEQIKRINDLQDYIAQQTTHLTEFDESLVRRWIKQITIWDDHITVELKSGVSIDVDV

SEQ ID NO: 23104 - protein, 518 aa, synthetic construct
MQYEEYLIYLRKSRSDASLEAMGVDVLERHEQILLDLAKRMNLSIGGIYREVVSGESISARPEMQRLLSEVEAGRWKGVIVMEVERLARGDTIDQGIVQRAFQYSGTQIVTPAKTYNPNNEFDEEYFEFGLFMSRREYKTIRRRMRAGVTAAVKEGKWPFNKAPYGWQRVKLEHARGWVLAPDPEEAPVVKLIFQLYTGPDRIGITNICRYLDNRGVKPRNGDTWTECSIMGILRNIVNDQRVGIGRRKIVKQVQNGSVSKVRPHSDYDFTAPGLQPRLIDHDVFLEAQTHLGKNSHKLPESYGIKNPLAGIVVCSCCGKKMMRRPASKTPGGAPYDVLKCDTRNCPTIGSALDLVEREVIQALSDWVAGYQLDPTLEVENKVPEKEQLLSSAISNHDVLLKQNGNLYDLLEQGVYTTEIFLERSHELQKRIKESEAHIEVLKKDLEYEKEKIANVENFIPSCKELLSCYWELSAQDRNKALKMLLESVEYTKTKRNKYGDKDNPTFTLNLKPRIPRI

SEQ ID NO: 23105 - protein, 535 aa, synthetic construct
MKKKQPNTRHGRAAIYARYSSHNQREASIEQQVKACRELAVRLGLDVVETYEDKAISGKSDRRPSFQRLLRDAEKGYFDCVLAWKSNRMGRNMLQAMTNEARLKDWGVRTFYAEEDFDDTAAGRFALRNMMNVNQFYSENMAEDITRGMMDNASKCLSNGALPLGYKAGENGRIVLDKAQAAVVQEIYTRVACREPFVDIAADLNRRGIKTKRGGPWTKSSFYTICRNERYRGIYIYDDVRVEGGVPRIVSDGLFYRVQEVLKVKKTPQSARHHTGAEDYLLTGKLFCGKCGRPMTGVSGTSRSGEMHYYYTCQKRRREHACDKKNVIREQIEKSVAQAIKQYMLTDEMIQHMADATMAYNARQEKDLHLQDLQGQLAAVKTSAANLLKAIEMGVITETTKARMVELEQEQGRLNAQIENARAELVPITRDNFVSLLHIYRDGDINDSKYLASLFETFLVRVDLYDDHFLIWFNPLGQKTPADIPITSIENGDTDEFFDECRSKNVFDWGGKWSTKIKAPAVPRRVFLFWCSVSC

SEQ ID NO: 23106 - protein, 497 aa, synthetic construct
MRYAIYLRKSRADDTSEPLEVTLQRHRQMLEKYMQQHDIAVQDEDVFEEVVSGDSLYARPQMLRLLEAVESGTYTGVLCVDIQRLGRGSMQDQGIILDAFKWSDTKIITPTRTYDLSNDMDETYTEFESFMGRQEYKMIKKRLRRGLNATIENGGYIANAPYGYDKTKIGKTPSLKINEAEAKFIHMIFDLYQSGMGTATIATTIDRLGARPRRGEHFARSTVLKILKNDVYRGKIVWNRKTCVRPGQRGNEHHLTIYNAPEKWTVVDGLHPAIIDDEQFEAVQRILAGHYHPPANTGKRINPLAGLVLCGNCGRPLQRIAIQSAGGPLLGCQVPGCIVSSKLEYVEQAVLLEIQKEFDKLCANAEQKQQESQIDYAAMAKSIDAEISTAHQQLGRLYDLVEQGVYTIEVFNERRGALLSRISALEDERKNLVPPQQLDLERMRANIEAVFDAYPTADFNTKNQLLKSIIDKIVYNKQKGVQPKGFTLEVFLHCLYL

SEQ ID NO: 23107 - protein, 416 aa, synthetic construct
MKIRHIPSIHQRRKKRVAAYCRVSTDMKSQEESFETQVSYYRSYIERNDEWVLAGIYADGGVSATGAAKRPEFIRMIADAMEGKIDLILVKSISRFSRNVVDCQVYVQQLRSKGVEVRFEKERLSTLDASSEMIFSMMAAIAQDESRSISQNIRWGYEKRFAQGIHHMGNRRVLGYDEVNGVLTPNEDAWIVRMAFELFNQGMGYQKIAEAITAAGGKRMRGSTAFSASSIQSIVDNEIYVGDRMLQKRPPQHYLTKKPDPNAQYQTYYWRDTHEEIIDRKTWEKAQAVLDARKRDRISGVYKKTPATHFLYGKVFCARCGAPYKRRTLSGGTADGAPVYHKVWNCRERQKGKAGNGCRNTSVAEEELLRGISDALGWEWKGAEVFDTERFLREVQAVHLENGAASVQKWTQRVSA

SEQ ID NO: 23108 - protein, 514 aa, synthetic construct
MERYNESSDVRQLFRGAVQATKDEAMRIADMSGETTKRVAAYCRVSTDSESQETSIETQRAYFEHEIRNHPGWKLVQIYADQGVTGTISMKRPAFRQMIEDALAGKIDYILIKSISRFSRNTVDCLQYVRMLREKGVYLHFEKENIDTSSAYSEMLMTVLAAFAQEESVSISENIAWSFRKKYEAGIPRRFVLFGYRLDEDGEYRIVGEEAAVVREAFTLYEHGYSHKQIANAFNQKGYKSPTGLRWQETTIHRMLDNEKYVGDVMMQKRVTLDPLTHREVKNDQTVYPSYYVQDHHAAIIDRAQYNRVRKIRAMCNSRLGPLQYPYDDKLVCPICGQRLIQRRSDVLENKSAWHCERNERSCERYVLNSAIVNEAVLNACKALNRDEIQAVIEKLQGEKPQRSKSREKLTATEHLLELWKKRLFLKKVDYYWLDDTVDRITFSKENTLTVHWRCGLKTTVPLPVRHHRENPVYAAEVYRKRKVEGTLKPRRRIQKRLEDPNPIPIIPVKGERK

SEQ ID NO: 23109 - protein, 525 aa, synthetic construct
MYLEISNPMDYHVALYIRLSKEDETEGPSQSVTNQKSLLKEFVQQHHLSVYDIYVDDGWSGTNFERPDFQRMIKDIEAKKVNMVITKDLSRLGRDYIMTGHYMERYFPEHRVRYISLLDGIDTGVDSTANDITPFRAIMNDMYAKDISKKIKSVKRDKQRKGQFIGGKPMYGYKMHPTEKNKIVVDEKVAPIVRRIFMMALSGMSCRKIAATLNDEKIPTPATYCGWKVGNPGPYTGLWSSERISEMLKNETYIGNMVQGRMVKISYKSKKCIKRAPEDWVIVKGTHEPLVDQETFQKIQMLVNSRKYTRSRTYDFLLKGLIFCHECGHPMAVINRKNAEGEDCLYFVCRTYQRFTKAGVCTCHSIKEETVNEAVISKIRNVCQTYLNVEYLQPIAERVLKESCKEEQCETEIRALQSQIVNLTAHLDRMYMDRINGLLSENDFQRIYSKTKTDRGMLEHRLESLRVQREQPTSTADRAKELVQRFMDSAFTSREVLVSLVERIELTENKEIIIKFKFHELETIS

SEQ ID NO: 23110 - protein, 524 aa, synthetic construct
MGDKMKRVYCLYRVSTKGQVDKDDIPMQKTSCREFAERNGWTILKEFQEKGVSGFKVSASDRDAIQDLKAAAEKKEFDVLLVFMFDRIGRIDDETPFVVEWFIKHGIEVWSVNEGEQRMDNHVDKLMNYIRFWQANGESQKTSARVKTRLNQMTLDGKFTGGVAPFGYKLIKSGEINKKGKELMDIVIDDDEAPIVKKIFEMTVKEGYGSYRMADYLNSHGIRIHNNSKFQCNTVNRILKNRLYCGYLVSGGVESPYIERLHIIDENIFEQAQFILKQRSSKNEEKQQIARTTKGSTLLSGNIYCAHCGQKMVSTSYIDRYDRADGSQYRVRRQRYICTNKAMKRGACDGQSAYVAHRIDGAVLATLRDYLAKIKSTPKDIALEKRYKSEISEHRRKQTKLEKEIEKLKRQVVELSAEIGRSLLGESRFTPDILSTSIDNTNDLLQKKEIELSDIKYKLANQQNAMGKLDFYYSQFRTWADEFDNSTMEQKKMIACQLIKEVKVSRGYELEIVFDLNYEQFLSL

SEQ ID NO: 23111 - protein, 588 aa, synthetic construct
MRIVNKIEAKTPQIPRRKRVAAYARVSMESERLQHSLSAQVSFYSSLIQSNPAWEYVGVYADNGITGTKTEAREEFNRMIADCEAGKIDIVLTKSISRFARNTVDLLNTVRRLKELGVSVQFEKERIDSLTEDGELMLTLLASFAQEEIRSLSDNVKWGTRKRFEKGIPNGRFQIYGYRWEGDHLVIHEEEAKIVRLIYDNYMNGLSAETTEKQLAEMGVKSYKGQHFGNTSIRQILGNITYTGNLLFQKEYVADPISKKSRINRGELPQYFVENTHEAIIPMEVYQAVQAEKARRRELGALANWSINTSCFTSKIKCGRCGKSYQRSNRKGRKDPNANYTIWVCGTRRKTGNAHCQNKDIPEQMLKDACAEVMGLDTFDEIIFSEQIDHIEIPAPNEMIFYFKDGRIVPHHWESTMRKDCWTDERRAAKGRYVQEHQLGPNTSCFTSRVRCDSCGENYRRQRSRHKDGSFDSVWRCASGGKCQSPSIKEDALKNLCADAMGLEEFSETVFREQIVCIHITAPYQLSIRFFDGHTFETAWENKRKMPRHTEERKQHMREVMIQRWREKRGESNDNTGDDKPIHGNADQ

SEQ ID NO: 23112 - protein, 523 aa, synthetic construct
MAKVTTIPATISRFTATPINEKKKRRTAAYARVSTDSEEQLTSYSAQVDYYTNYIKSRDDWEFVSVYTDEGITGTNTKHREGFKRMVADALAGKIDLIVTKSVSRFARNTVDSLTTVRQLKEKGVEIYFEKENIWTLDSKGELLITIMSSLAQEESRSISENCTWGQRKRFADGKVTVPFKRFLGYDRGPDGNLVLNKDEAVIIRRIYSMFLQGMTPHGIAARLTADGIKSPGGKDKWNAGAVRSILTNEKYKGDALLQKSYTVDFLTKKKKVNEGEIPQYYVEGNHEAIIQPEVFELVQQELERRKSSRGRHSGVHLFSGKIRCGQCGEWYGSKVWHSNSKYRRVIWQCNHKYDGEEKCSTPHLTEDEIKAMFVSAANKLIGKKAAIISPLRNSLDVAFDTSALETEVAELQDEIMVVSDLIEKCIYENAHVALDQTEYQKRYDGLTTRFDTAKARLEEIEAALADKKSRRAAIDAFLDTLAQADPMEKFDPALWCGLIDYVTVYARDDVRFAFKDGQEIKA

SEQ ID NO: 23113 - protein, 567 aa, synthetic construct
MQSKNKNQIGITALYCRLSRDDGTESESNSIGNQKKLLSQKAKEMGLTDTKYYVDDGYTGTNFNRPGFQQLIDDIEIGLVSAVMVKDLSRLGRDYVSVGNYTDSYFPEHNVRFIAVNDAIDSDEGESEIAPFKNILNEMYARDISKKIRSSHRLRGSMGEPLSQPPYGYMKSAENKKKWIIDPEAATVVKSIFKMCLDGKGNETIARELQENKVLIPMAYWQSKGLNRGGKKTQTNPYKWCKTTVQKILSQQEYCGDIINFKTYSKSFKNKTRYENSKENWAVFKNVNEPIINRETFETVQKFISKTKRRAPKKENGERSIFNGLIYCGDCHSKMRYHTSTSNKEIHYFTCSDNKVDYRGKCPGRHYVRADALEEVVKLELRRLVEMLEIDESYFAQLLLRKNDEEREKDKKFLESELQKAIARNNTVSQIYEKLYEDNVIGKVSDEWFVELSHKYEKERMNLKAKIADTRHKIEELKNNNSEYEKFISAIRRFMQMDNLTSPLLRELIDHIDIFETEGTGKSRTQRIVIYYRFIGYIELPNATKQTHIADTRKGVAVEYITEQFTA

SEQ ID NO: 23114 - protein, 668 aa, synthetic construct
MAYAKVKKHLKIWTKKKAALYVRVSTRYQVDKDSLPFQRKKLKEYCKFLGLEDYVIFEDDGYSAKNTERPHFQEMMSRVRSGEFSHLIVWKVDRVSRNLLDFAAMYQELKDHKVTFISMNEQFDTSTAIGEAMLKIILIFAELERNMTSERVTGIMLDRAEQGLWNGARMPVGYRWNNETKFPEPDPEEVKIVQLIFDKYEEWKSSIKIARYLNNNNFKSKRGGQWTSKLIHDIIRNPFYIGTYRYNLRESGRGPLKPESEWIVRENNHPAIIDKAQFDRCNKIMDQNGSSRDTSDLRARKYVHTFSGHLVCGKCDANMIASKDRARANGWRPSMYRCAQRSRMLDCDNSRTINESYIGPFIFNYIANLARVQKNFKNITTVEKLERELLKGETFDGVAGILPEGLNLTFQALSFRQVGNGTYIPDIDFLGDSDGASDHNQIELLKSEIEKSKNAVTRLTDVYLFDPDSMTKEEFATKKKELAKKIEGMERQLADLLDDSGNDDLADMSFIKKASAFLVAQRIVSKSFVDYVGMAQELDNEILKDFIDQIVDQIVVLDGRVQSITFINGLKHEFRYATPAELPVCQKCGGHIGSTCGCRTRTFDFSGKRYQRIKVGDPRDMLHGKKNPVCPECFAQEGRWHHWNCKVETCPICGGRLAECEHGPNGKN

SEQ ID NO: 23115 - protein, 522 aa, synthetic construct
MPTNKNTARKYAAGGSSDNSCGVEPLRAVIYARYSSSGQREESIEGQLRDCYEFAKKHGIIVIGEYIDKAMTGRVDRRPDFQRMMKDSEKGRFNCVLLWKMDRFARNRYDSAMYKYKLKKNGIRIFYAKETIPDGPEGIILESVMEGYAEYYSENLAQNVKRGNYDSALELKTLGKTCLGLKTGPDGRYMIDQAEAAIVRRIFEEYAEGERAKDIYERLNSEGYRTSRGGKFNKNSLRRILSNKKYIGVYEYEDIYVENGIPAIITDRDLFERVQKMLKINHDAPARGKAQNFLLTTKLFCGLCGSPMIGDGGTSHTGKAYAYYSCTKRKRGRSCKKESVPKDWIEDLVVGELVKIVHNDELIEQIADRVMEYQKREKDQSGLHALEIRQKENEKAISNMLAAIEAGIITPSTKTRLMELEADRADIEKGIAHELLAEPEFERDQIIYFLERFRSGDINDEAYRIMLVDTFLNSVYLYDDDHLVLVMNYSGENCKVDLKLVEGAVSGDGCKGSAFAPSSALI

SEQ ID NO: 23116 - protein, 520 aa, synthetic construct
MQYEEYLIYLRKSRSDASLEAMGVDVLERHEQILLDLAKRMNLSIGGIYREVVSGESISARPEMQKLLSEVESGRWEGILVMEVERLARGDTVDQGIVQRAFQYSGTKIITPTKTYNPNNEFDEEYFEFGLFMSRREYKTIRRRMRAGVTAAVKEGKWPFNQAPYGWQRVKLEHGRGWVLAPDPDEAPVVKLIFRLYTGPDRIGITHICRYLDNRGIKPRNGDTWLECSVMGILRNIVNDQRVGIGRRKVVKQVQNGSVSKVRPHSDYDFTAPGLQPRLIDHDVFLEAQEYLAKNSHKLPESYGIKNPLAGILVCSCCGKKMQRRPASRDGSSGRCPYDVLMCNTRGCPTIGSTLELVERELIQALSDWVAGYQLDPTLEVENKVPEKEQLLSSAVSNHDLLLKQNGNLYDLLEQGVYTTEIFLERSHELQKRIKESEEHIEILKKDLEYEKEKIANIENFIPSCKELLSCYWDLSAQDRNKALKMLLESVEYTKTKRNRKGDKDNPTFTLNLKPRIPRI

SEQ ID NO: 23117 - protein, 513 aa, synthetic construct
MVVQKKVTTIPASLTRFTATPITELKKRRVAGYARVSTDHDDQFTSYAAQIDYYTNYIKSRDDWEFVDVYTDEGITGTSVKHREGFKRMVADALTGKIDLIVTKSVSRFARNTVDSLTTIRQLKEKGIEVYFEKENIWTFDGKGELLLTIMSSLAQEESRSISENCTWGQRKRFADGKVTVPFNRFLGYDRGPDGNLVVNPEQAVIVQQIYAMFLQGMSYHGIAKKLTADRIPTPGGKDKWSISTVRSILSNEKYKGDALLQKSYTVNFLTKKTKINEGEIPQYYVEDNHEAIISPDVFAMVQREMTKRGRGKNYHSSVHAFSSKIRCGHCGSWYGSKVWHSNSQYRKTIWQCNHKFDGDERCDTPHLSDEDIQRLFLSAANKLLVDKTEVIANCREMMDLLFNTTELEAEQATLLEETQLISDMVQQTIYENAHIALDQTEYQKRYEGLTQRFETAKQRLETVMAELDRMQTQRADIEAFLESFEALPDTLTEFKLENWHSLVDYATVYSTD

SEQ ID NO: 23118 - protein, 412 aa, synthetic construct
MRTVRLIQPRMTPQKPKLRVAAYARVSDSRLHHSLSTQVSYYSRLIQSHPDWELVGVYYDEGISGKEQSNRQGLQDLLKACDDGKIDRILTKSIARFGRNTVDLLSTVRVLRQKNIGITFEKEGIDSLSSEGELMLTLLASVAQEESHNISENLRWQIKKKFEQGQPHTPQDIYGYRWNGENYVIEPDEAKVVRQVFQWFLDGDNVPMITKKLNEQGVLTRLGNPFTVSSVREFFKQEAYFGRLVLQKTYREPFSRNPKRNNGQKNKYIVEDAHEAIVSKSYFDVVLQEKERRYKVMHQESHMHKGTFRELIECSHCGKIMITRVDSKKVHRTIRYCCRTRDRFGTSSCPSKTLSEKRILATFEDKIGFKPDKNWVTENIKKVIYDSSVGLITVFPIKGRKYELKVRKEHFL

SEQ ID NO: 23119 - protein, 521 aa, synthetic construct
MKNVITIGANAPRNSELASISLPKKRRVAGYARVSTDHEDQTTSYESQMKYYTEYISSRSDWEFVKMYSDEGISGTNTKLRVGFKSMIEDALAGKIDLIITKSVSRFARNTVDSLTTVRKLKEVGVEIYFEKENIWTLDSKGELLITIMSSLAQEESRSISENVTWGLRKQFAEGKVHFPYTNVMGFEKGENGEIVVNQEDAKTVRYIFQQALLGKTPYSIAKDLTQQGILSPSGKNHWSSVTIKRMLRNEKYKGDALLQKTYTIDFLSKKKNINKGELPQYYVENNHEAIVDKETFDAVQATLDRKEKGKGSTTLFSSKLVCGDCGHYFGSKVWHSTSKYRRVIYQCNEKYKGEKKCTTPHVTEDEIKDWFVSAINKVISNKDEIISNLETLLEISGTADLEQRMKELETEVEVVSQMISKLVTDNAVMPQNQDVYQEKYRNLVDRYDALIVELESVEKEHLDKAKRNKELQAFLKTLKSQECLVTEFDDLLWETAVERIIIKENRNIEFIFKNGEVTVH

SEQ ID NO: 23120 - protein, 517 aa, synthetic construct
MARAVTVIPPTIQPITHLARNAVVRRRVAAYARVSTSSEEQLTSYEAQVDYYTRFIQSKPEWEFVRVYTDEGISAVNTKKREGFNQMVRDALDGKIDLIVTKSVSRFARNTVDSLVTVRKLKEKGVEVYFEKENIYTLDSKGELLITIMSSLAQEESRSISENVTWGQRKRFADGKVSLPYSHFLGYRKGDNGLPEIVPEEAETVRWIYSLFLSGKTTGSIASLLTREGIPTPAGKKKWAASTVESILKNEKYKGDALLQKAFTVDFLTKKQKKNGENSHPAIIDPAEWKLVQRELERRKAIGRSYSGNSIFSSRLVCGDCGGYFGSKVWHSTDKYRRTIWRCNSKFTGEEKCQTPHLTEEEIKARFLDAFNALVADKERLLDECRTMQAALTDTGSLDSEIAALLSEMEVVAELTKRCIEENSTTAQDQAAYLERYNGLAERYETAKAKLEKLQATKAQREAKSEDIGGFMFELAEYGDSITEFDDRLWLTVIDTVTVHRDGRLTFKFQTGHEITV

SEQ ID NO: 23121 - protein, 532 aa, synthetic construct
MEKNKRVYCLYRVSTKGQVEKDDIPMQKQYCREFAESQGWTIIKEFAEKGVSGFKVAAADRDAIQEIRQDAEERKFDILLVFMFDRLGRRDDETPFVVEWFIRNGIEVWSAMEGQQKMDDHIDKLLNYIRYWQASGESLKTSARTKTRLSQIVQEGRFRGGIVPYGYRLEKQGRFNKKNHEVNEILIDPDEAAVVRIIFEKYVHEGFGAQRLSRWLYHNGYLNRKGTNFANTTIIKMLKNIMYVGILRSGETRSEIFPELQIVPLDLYERAQELMEARTMHHNEVPFNSKGKALLSGMVYCAHCGSKLMLTTSSGRRAKGEPKRETRIRYACHYKIRHPQDCDGQTGYSGEKLDGIVDKIVIRLFERMKTAPRSQLIQKQREKELQLANSSVANLEKLHASAERELESYKKEIIKTINGTGSFGADILGEMIEETRNKLLDLAQELEQAKAKAADLESSAVAIQKEYDKIMTWADLYAGSSIEGKKMILRQLIDRVNIGKNFEIEVELNISVIQFFDFLHPEGDRSVYYRAS

SEQ ID NO: 23122 - protein, 538 aa, synthetic construct
MKENILRVAAYARVSTDKEDQTNSLLSQRSYFADYITHHEGWQLSEVYYDEGISGTQIKKRSGFKKMIQDALNGDVDLIITKEVARFARNTVDTLSYTRKLKSAGVGVIFTIDNIDTRDADGELRLTIMASIAQEESRKTSERVKWGQKRQMEKGVVFGRDLLGYTVQNGQLHINEEEVPIVQAIFHKYTNEGKGTWTIANELLAEGMRPKRIALWSNVVILRVLRNEKYVGDLCQKKTYTPDYLTHSKKYNRGEEEMVYLKEHHEPIIDRDLWNRTQEELKRRSPSEEQKSKHSNRYWCSGKIHCAECGCRYVSRTKKLMSGDVYKAWRCYAAANHGTKKQDADGNEIGCNNSSINDRSLKTCMNYCITLVQGERDSLKKEILKEISQLQKTTAKKLDSKKIKKKIDNLEMKKRKAIDLMLDGLISKEDLQSQTEWYNEELEKLNIQLSDALQKDKSDSRQVNHMEKYIKALDEIMELDSDSEDVYKEVLDHMEIHKGNIVDVWLKSIPIGIRLKVKATGKGEYFKTEILETSFIEK

SEQ ID NO: 23123 - protein, 463 aa, synthetic construct
MATKIERCAIYIRVSTTEQMMHGKSLEAQKEYLTNYASEHNMAVVGVYADEGKTARKELKKRKAIHSLLEDVKAGKIDVIIFWRLDRWFRNLSDFYRVQDILDSHNVRWISTSEPGINMETRDGRLQLNVVLSIGQNEVDTTSERIKFVNEASIRNGKLIFGDVNMGYGYKSGVVDGQKRMIKDPDREHVVDAFYKYFFKHQNKCATLRYIQETYDPDFSFGIMRTLLSSEFYKGTYRGFPYCPAYLTEDEWNKLQKIQKRNVKATPSGRIYLFAGMIRCPVCGQLLCGTGCSSIINRKTGAKRTYCYYRCNRAMIDHICSYRHRLSQNLVENYLLDNLENEYKNYKVKCEKIEKEKEKQKKKQSPEKLRKELERLNFLFQKGRIDWDYYNEEYGRVESELNNLQNALPEPVTNYGYLEELLDTDFRTMYDQLSQENRRAFWRSIIQEIHVNEDHAITSVDFL

SEQ ID NO: 23124 - protein, 538 aa, synthetic construct
MAKKVTVIKAAKAQKHTQEERRLKVCGYARVSTGSQAQATSYTAQVEYYTEKIESNPLWEFAGVYADEGISGTNVKHRDEFQMMISDCEDGNIDLILTKSITRFARNTVECIQTIRKLKEIGVGIYFEKENINTLSEKSELFITILASVAQGESENISSNNRWAIQKRFQDGTYIISTPAYGYGKDEDGNLVIIESEAETVRWIYESYLNGMGVYVIAKALNQKGIPTIRGAEKWQDGVIQDILKNPIYEGDMLQQRTYTETRFPFVRRVNNGQRNQYLIKDSHPPIVTHEEAEAVRNLMAYRVDVLHMNKSDYTKRYLFSGRIICGECGRTFRRQKIYIGKPYEKIIWTCSGHVEDKESCCLKAIREDVLHRAFTDMWNKLYTNQGTILEPLLKELTELVAARQDSEEIRQLDKEIKDISEQSQILNQVMRKGYMDSALFMESSSKLGWQLTECRRKKTLLTRKLRRTKEIVRTEQLIQLIAEQDGLMEEFDEQLFKMTAEKIVVSKEHDITFCLYNGLKLTERGGGQDAVAHANRL

SEQ ID NO: 23125 - protein, 544 aa, synthetic construct
MAETAKKISMIPAKVQYDRNVKLSEKKMKVAAYCRVSTELEEQDSSYEAQLEYYTSKISENENWKNAGIYADDGKSGTNTKKRADFNAMIQDALAGKIDMILTKSVSRFARNTVDSLVTIRKLKEKNVAVVFEKEGINTLEGTGEILITILSSLAQEESRNISENIRWGVVRKFEKGKVIVNCTKFMGYTKNEDGDLVIVPEEAEIVKRIFRLYLEGYSTGKIAKHLEEQGIKTATGQDKWHSTVIDKMLRNEKYMGDALLQKTYTVDFMTKKKVKNTGIVPQYYVEDDHEAIIPKELFYRVQEEMMRRASLCKAAVTRKKNQKSRYSSTYALTGMLICGKCGQEYRRVTWARNGKKKVVWRCSNRLTNGVKKCGESETLEENALNRAVMEAIHRITSDDMEFMEHFRQNIIHVIGSYGTAKESGEYEEKIKEKQEEMVALIAENAKTGSYTPEFDERYRIIAEEINALKEAQKTARNEKRMADSYEQRIQDIDHYLSTSTCQIPEFDNDLVRRLISTIKVESSEKLLIQFQSGIVMEQEIRYE

SEQ ID NO: 23126 - protein, 522 aa, synthetic construct
MGNVMLIPARRQVGSNARKQEEEKPKLRVAAYCRVSTDSDEQATSYEAQVEHYTEYIQKNPDWEFAGIYADDGISGTNTKKREEFNRMIDDCKAGNIDMIITKSISRFARNTLDCLKYIRQLKDMNIPVLFEKESINTMDAKGEVLITIMASLAQQESQSLSQNVKMGLQYRYQQGKVQINHNRFLGYTKDADGNLVIDPEQAETVKRIYREYLEGLSMDKIAAGLERDGILTGAGGKKWHTSTINKILRNEKYIGDALLQKTYTTDFLNKTRVKNNGLVPQYYVEGDHEAIIPKDIYLQVQEELVRRRVGKTSANGKKRNYSCNHCFSQIVICGECGEMFRRLHWNNRGVKSIVWRCISRLESTGLECHARTINELVLQDAVVKAINQMLGDKSNYQAQLQLNIAAVIRASQATAIDSIDEKLMALQQELIQKANSKEDYDEIADEIFRLRELRQKTTVDTAARDEQIKRINDLQDYISQQTSYLTEFDETLVRRWIKQITIWDDRITVELKSGVSIDVDA

SEQ ID NO: 23127 - protein, 521 aa, synthetic construct
MKKVTKIDGVQKNTAINSKLRVAAYCRVSTGSDAQLESLEAQKSHYEQYINSREDWQFAGLYFDEGITGTKAEKRPELLRLITDCEAKKIDFVITKSISRFSRNTTDCLALVRKLQNLDIPLYFEKENINTGSMESELFLAILSSMAEGESASISENAKWSVKRRFQNGTYKLGYTPYGYDWDGKNMIINPEQAAVVKRIFADILSGKSTNAIADELNAEKVPSKKNNHWTASTIRGILANEKYTGDVIFQKTYTDENFNRHTNYGEVDQYMAPDHHEAIISHSDFDAANALVNQRAAEKGIEKGSDKYQQRYAFSGKIICGECGDTFKRRIHTCNTYKYVAWACNTHLKDKKSCHMKYVRDDEIKVAFMTMLNKLIYGYRLVLIPYLKVLENSSGDEAIQRIQHLELLISQNSEQREALTKLMAQGYIDQILYNQETNALLLQAETYRSDIEAITIGMTGDAAKVTETNLLLHFVSHTDMLTAYSEELFENYADHIEVISRNEIKFAMKCGLTFTERIGD

SEQ ID NO: 23128 - protein, 501 aa, synthetic construct
MEIQIREGSREQKRKLKVCAYCRVSTDADEQENSLENQVRHYETVIKANPNYEYAGVYSDFAISGFKEKRPGLQKMLADAEKGKIDLILTKSVSRFARNTSIVLEATRKLKELNVGVFFELQNINTLSGEGELMLTILAAFAQAESESGSAGAKMVYQRKYEAGIPVQYLERSFGYTKDERGVFVADEAEAVWVRKIYEMAADGYTPASIKRYLNENEVKTVGGVQWVDSTVFRLLENEIYKGDYIMHKHFVNEERKLVRNRGEVDAWYIEDDHEAIVSPELWQKAQDALAAKRDYLAEGSVIEEFTEENYPYMNKIYCAKCGYPLYKRIYSKGNRLNWGCSGTKRYGKTFCDGINIPDGVLRSAWHFKENTYIAEKASDKGVKEFTYLKEQSWKRRHKKKQPPAIPENTEAEYPYREKIFCALCGSRLVRYVNPQSHKVTWVCNRRKRKGKEACDGTRVPDTVIKGWGEIKNDIYIQRKDDKNGKKRYSYTSKKPSGIRV

SEQ ID NO: 23129 - protein, 463 aa, synthetic construct
MARSVTVIPARNRQVSGYRAAPQKKIRVAAYCRVSTDQEDQLHSFEAQVDYYTKYINDHENYEMAGIYADEGISGTNTKKREQFKRMIADCEKGKINLVITKSISRFARNTQDCLMYSRKLKNLGIGIIFEKENINTLDSTGELLFTILSSLAQDESRNISENCKWGIRTKFKNGEMHLNTFKFLGYDKDENGKLIINREQAKTVRRIYRDFLWGLNPAQIAKELEDEQVPGCLGQTKWYASTVIGILKQEKHMGDAILQKTYTADFLTKRQVKNNGEVAQVYVKGSHKGIIDKETWNAVQEEFERREKFTQKHGTDRYSYGSECYPFCEKIFCGECGSLFTRHSWKSRGIIQWQCKNHRKDGKVACTNAYVDNADLEKGFVKAFNRLVGEREKHIERWNSMKLDGTPLEKIRAGQMMEATESGQLQQYVPEAAQLVLEEITIFGAKKYEFAFLEGSRVKVSV

SEQ ID NO: 23130 - protein, 492 aa, synthetic construct
MNVAMYLRKSRADENNPLETLERHKEILLSYAKDNNLTVIDIFEEVISGGMLYNRTEMLKLLDAIPSHIYDAVLCIDLDRLGRGSAADSEKIFDVLKENDVKIITLKKIYDLNNEYDEDYSEFEMFMARKELKFITRRMNRGRIKSINDGCFVSGAPFGYRNAVINKKHTLEVYEPEAKYVRMIFDMYVNQSMGITSISRQLANLGVLSKKNTPLHPTTIARMLRNHTYIGKIVWNKSKSVKGKNTQEKTSKNDWLYVPGLHEPIIDEDTFNKAQDIINLKYKPPMRTGTLQNPFAGLLKCANCGRAIVINTSNETVEKYRLCCRTLGCNKASALSIVEDKVFEVLTKEFKDIELSLKNIRQSHNKDKLSCLDTIATLETELKKLDKQQLRLYDLLEQEVYTKELFLERNNAISDRRKKINATIAQEREKFKLVDTSSIEERLPLLRELLTNYHSLSAAEKNSILKNFVKKIEYKREKSAPEGDIFLKIYYK

SEQ ID NO: 23131 - protein, 524 aa, synthetic construct
MAGAKNITVIPAKKRVGNTVTAEDKPKLKVAAYCRVSTDSEEQATSYDAQVEHYTEYIRKNPEWEFAGIYADDGISGTNTKKREEFNRMIEDTMAGKIDMIITKSISRFARNTLDCLKYIRQLKEKNVPVFFEKENINTLDAKGEVLLTIMASLAQQESESLSKNVKMGLQFRYQNGEVQINHNWFLGYTKDENGHLIIDEEQAVVVRRIFREYLQGASLKNIADGLMADGIPTATGNMKWRSDGIRKILTNEKYMGDALLQKTYTVDVLTKKRVANNGIVPQYYVENNHEAIIPRQLFMQVQEELQRRAHLRTENGKTKRVYSSKYALSSIIYCGKCGDLFRRVAWKARGASYNKWRCASRIEKGPKNGCDAEAISESEIQKAVMRAINKTLGGREEFLVQLQHNIEDVLNGDSTATLEYIDQRMAELQEKLVMCVNKNAEYDAIAKEIDALREKKAAVVTKDAEQEMLRKRINEMRHFLQTQTSRITEYDEQLVRRLIEKITVYDDKLIFEFKSGMTIELKR

SEQ ID NO: 23132 - protein, 520 aa, synthetic construct
MKNVTKINQVDFSVFKKTRVAAYCRVSTDSDEQELSLETQKNHYESYIKANSEWEYAGIYYDDGVSGTKTAKRDGLLRLMEDCEKGLIDLVITKSISRFSRNTTDCLTLVRKLLNYEVYVIFEKENINTGSMESELMLAILASMAESESRSISENEKWSIKKRFQNGTYVISYPPYGYANVDGEMVIVPEQAEVVKEIFAGCLAGKSTHIIAKELNEKGVPTKRGAKWTGATINGILTNEKYIGDALFQKTITDASFKRKRNYGEEEQYYCENHHEPIIDKDTFEKAKEAIRQRGLEKGNCSEDTSKYQNRYAMSGKIKCGECGRSFKRRYHYTSHGRSYNAWCCGGHIEDSSSCSMKFIRDDDLKRAFLTMMNKLVFGNDLVLKPLLISITTSNSKKNIHSMEDIEKDMQGNEEQRKQLNTLLTRGYLESPVFAEAHNKLVMEYEQLTAKRDLLYRMDNAGYTMEQALSDLVSFLNGAEPFTEWDDSLFERFVEKVKVLSREEVEFELKFGLKLKERID

SEQ ID NO: 23133 - protein, 520 aa, synthetic construct
MDEYCLYLRKSRIDLEAEANGQGDTLARHRADLLKLARKRGLNITGCYEEVRSGESIAERPEMQRLLNDVEAGRWTGVLVMEVERLARGNTTDQGVVADTFKYSDTKIVTPNKVYDPGDEFDEEYFEFGLFMSRREYKTINRRLQRGRRASLSEGKYIAGKATYGYERYKLSGEKGYSLRIIPEQAEVVRQIYDWYVNGEFLPLGSYTIAKRLDARGIPSPTGGKWPPCTVKDILTNPTYIGKLRWSYRPTVKRMVDGELVKTRPVDRSVHLSDGRHEPILDEVLWHRAQLMLKNRSHAPVPKSTNIRNPLAGLLICSKCGRSMERRKFKHGRDTVACPNKDCNCKSSVLEEVEAGMLDSLRIWLSDYKIKLAQSQETISHTGPTAEQEITSLQRTLGTLQAQMDNLYNLVEQGVYSTDLFLQRSQALTARMAEVNQQIETTQAALTASRRIARNRFEIIPRIERVLALYPTLTDPREKNTILKEVLEKILYTKTTGSRWEASDMNLYVFPRVETDGEQL

SEQ ID NO: 23134 - protein, 466 aa, synthetic construct
MKKRAGLYIRVSTEEQVDNFSIPEQKRRLEAYCQSHDWAVAEEYIDGGFSGAKLDRPAMQKLITDTKAGNLDVVVSLKLDRLSRSQKDTLHLIEDIFLPCHVDYVSVNESFDTGTSFGRAMVGILSVFAQLEREQILERMHTGMEARVRSGLIHGGLPFGYDRKEKGLVINESKAAIVREIFDHWLKGCSYSEISRIMAKKYPGVLAWHATTAVIQILKNPVYIGKVNFNGEVLDGQHSPILSDTVFEQAQVLIQTKTRWQGKQTRYLLTGILWCAKCGERYGVRSTKCNGVQYSYYCCHPNRKKPGSEFKKKCKSKSWPTQKLDDIIINTIKRLAFDRQYFEELSNPVADSNIDNLTRLDKEISDCDQQIEKLMDLYTLDKLPLDKLNNKINALYEKKKKLEDELSKLRKPVVQSYEDYKEIFDSVETIFDSGDVKQKKALIRSIIKRVEINDDDITIIFNFQNG

SEQ ID NO: 23135 - protein, 604 aa, synthetic construct
MKKVFVYHRVSSDQQLDGSGIARQAELLEGYLERTGICAEMDDPAPVVLSDQGVSAFKGLNISEGELGAWMEQVRNGMWDSSILVVESIDRFSRQNPFDVMGYINALMAHNVAIHDVMANIVISRSNSKDLPFVMMNAQRAYDESKYKSDRIRKGWAKKREHAFNKGTIVTNKRPQWIEVENDKYVLNHKAAVVKEIFALYQTGMGCPTIAKQLQTKEGEQYKFNRPWTGELVHKILTNRRVTGKIFISEIIRNHDDIDNPVTQKKYDMDVYPVVINEEEFGLVQELLKSRRPNAGRVTVKKDGQEEVLIKSNLFSGIARCTECGGPMYHNVVRAKRTPKKGDPKIEEYRYIRCLNERDGLCENKAMTYETVERFVVEHLLGMDLSTVMKEQEFNPEIEVLRIQIDQVKDQITNYENGIERRKSTGKPISFEMREELDDAKSELERLLARQASLATVQVDVPVLQDVNVTELYDVNNVDIRTRYENELNKIVSNIRLKRNGTSYTIDINYKQNELKRHVLFVENKKKEQTLISEVIIEDVDGGKFYYTPSFMIRLKDGEIRFQQTNEDLSIVDYSLLLNYVDAIDRNDAVGVWMRNQFNFLTSN

SEQ ID NO: 23136 - protein, 535 aa, synthetic construct
MRVSVNLNAQKPDTTTNAVIYARYSSHGQTEQSIEGQLAKGHEYAAAQGYTVVHEYIDRAMTGRNDNREAFQKMLSDTGKHQFQVVIVWKVDRFGRNREEIAFNKHTCKKNGVRVEYVAESLPNSPEAVILESVLEGMAEYYSIQLSQNIRRGQLESAKKCQCVGGSVPLGYTLDSDKHFVIDPQTAPVVKKIFDLYAEGATISEITGQLNEQGIRTARKQLFTKNSLTKLLKNEKYIGVYTYKDIVRVEGGVPAIVDESTFDRVQELLKINRRAPSHTWTKVEYLLTDKLFCGHCGSPMVGESGFSHTGAKYSYYGCIKRRREKACDKKPVRQDWIEALVLDETVKLLHDDELMEYIIDRTWEYYQVTDKVQEEKAVLEAQLAEVDKAINNLVRAIEAGIFNAATKSRMDELDAQKAALTASLADLELTSGIRITRDHIEYFLLRLRDLDVKDRECQKRLVQTFVNAVFIYDDGRVKITYNYSGQSSTIALNQIASAEKGKGFVCCLPCSTSSPRFPRGVAALFLFWCFGENRV

SEQ ID NO: 23137 - protein, 516 aa, synthetic construct
MKAVIYARFSSHNQREESIEGQVRACQRFAKEHDMTVIEIYADRGLSGLHADNRPEFQRMIADSDRHKFQALIMWNLDRFSRDKYDTAVYKSRLKKNGVTLYYSDQNIPDTPEGIILESLLEGFAQYYSANLSRNAKRGLQENARKCLWNGGGLPLGYTIDETKHFVIDPAGAACVRLIFQMYADNHSIKEIVSALNEKGYRTVKGNKFRLGSIQGVLRNRKYIGEYHASGITVPNGVPAIVDVELFNAVQEKIGVVSAAKARNKAEIPYLLTTKVFCGHCGSPMIGESGTGKGGSTYRYYKCSCRKNRKGQCDKRTEQKEWLEETVVAQTVEKFLHPDVIEDVSNACAAVLEQDCQNNALLKALNAQLADVEKSSRNLIKAIEAGVFTASMRERLAELEQQKEDITVQIAREQLRKPQLSAEQIAFFLRSFLDGDAHDPNFQERIIESLVRRVDVYDEGPGNRKLTVFYNLKKNNHSSVSVKCSDSESVGLPKGRLQKQPIFLFASCRRTRIGRQ

SEQ ID NO: 23138 - protein, 524 aa, synthetic construct
MAKVKTIPATISQFTAAPINSTKKRRVAGYARVSTDHEDQATSYEAQVNYYTSYIKSRDDWEFVAIYTDEGISATNTKKREGFKTMIADALAGKIDLIITKSVSRFARNTVDSLTTVRELKDKGIEIYFEKENIWTLDSKGELLITIMSSLAQEESRSISENVTWGQRKRMADGKVSFAYSRFLGLDKDKETGKIVVNPEQAETVKLIFRLFLEGKTPHAIASHLTAQGIKTPGGKDVWNQQTIRRMLSNEKYKGDALLQKEFTVDFLQKKLKKNEGEVPQYYVEGNHEAIISPAVFDLVQEELAKRSKGKTRYSGTTIFSNKIRCADCGSWYGSKVWHSTDSYRKTIYRCNNKYEGTKCETPYVTEEDVKAAFVSAYNRLVTEKKEIIANAELVRKTLCATDALQIEKQRLEDELSMIVSMTQSIVTENARIAQDQDEYKKRYDSLVDRYDETKAQYDSVAESIAAKEAKSVWLAEFISLMKAQKGVISEFDIGLWSSTVEYVTVDRSKGITVTFRDGTEIKA

SEQ ID NO: 23139 - protein, 587 aa, synthetic construct
MAKIIKVEQTVPTIKTKKKVAAYARVSMESERMNHSLSAQISYYSTLIQKNPDWQYAGVFADDGISGTSIEKRDEFKRMIAAAEKGDIDIILTKSIQRFARNTVDLLETVRRLKDIGVEVRFEKEHINSMDGDGELMLTILASFAQEESRSISENVKWGTRKRFEQGIPNGKFQIYGYRWDGDQLVVEPEEAKIVKLIYDNFLNGLSAETTEKQLAAMGVKSYKGQHFGNTSIRQILGNITYTGNLLFQKEYVADPISKKSKINRGELPQYWVENTHEAIIPMEVYQAVQAEKARRRELGALANWSINTSCFTSKIKCGCCGKSYQRSNRKGRKDPNANYTIWVCGTRRKSGNAHCRNKDIPETTLKQACATVLCLDEFDESVFSEQIERIEVPAPNEMLFYFKDGHTVPHHWESTLRKDCWTDERRAAKGRYVQAHQLGPNSSCFTSRIRCDCCGENYRKQRSRHKDGSFDSVWRCASNGDCDSPSIKEETLTALCAKAMGMTAFDETAFRVQIACIHITAPFQLSVHFFDGHTFDAQWENKRKMPKHSEERKQHMREVMIEKWRERHGESKDHSGNNQSIHGSAD

SEQ ID NO: 23140 - protein, 430 aa, synthetic construct
MSTDQEEQLSSYENQVNYYRDYISKHEDYELVDIYADEGISATNTKKRDAFNRLIQDCRAGKVDRILVKSISRFARNTLDCIKYVRELKELGVGVTFEKENIDSLDSKGEVLLTILSSLAQDESRSISENATWGIRKKFERGEVRVNTTKFMGYDKDENGRLIINPGQAETVKFIYEKFLEGYSPESIAKYLNDNEIPGWTGKANWYPSAIQKMLQNEKYKGDALLQKTFTVDFLTKKRVQNDGQVNQYYVENSHEAIIDKDTWELVQLELARRKDFREEHQLKAYIIQNDDNPFTTKVFCKACGSAFGRKNWTTSRGKRKVWQCNNRYRVKGQIGCQNNHIDEETLEKAVVMAVELLSENVDLLHGKWNKFLEENRPLEKHYCTKLAEMINKPLWEFDSYEMCQVLDSITISEDGQISAKFLEGTEVDL

SEQ ID NO: 23141 - protein, 525 aa, synthetic construct
MSKVTVIPATVNPATKMPALTSKKRKVCGYARVSTDKDEQFSSYTAQVDYYTKYIANNPDWEFVKVYTDEGISGTNTKKRDGFNQMIKDALDGKIDLILTKSVSRFARNTVDSLVTIRQLKEKGIEVFFEKENIWTLDSKGELLLTIMSSLAQEESRSISENITWGKRKSAADGKISLGYSQFLGYDKGPNGTLTVNPEQALIVKRIYREFMQGKAAWAIADGLTADGIPTPSQKTKQWSLTTVRSILRNEKYKGAALLQKNFTVDFLTKKVKANEGELPQYYVENSHEAIIPPAEWERVQVEYARRHSLSTKYSGKSIFSTKIVCEQCDAFFGPKIWSSNTHLRRKVWQCNAKFDRKTYCNTPYLTEDAIKAAFVEVVARLFCTREEVITNCETELQALTDCTAIEREQSMLQEELEVVINLTQKYVDKNATSEEDQNTYLRQYNEYVERYQTIKERLLQLNTERSARIARSVAFEDFLNSLRSMENAPVEFDESMWRLLVEKVVVKKDGFLKFVFTNGMEVVI

SEQ ID NO: 23142 - protein, 426 aa, synthetic construct
MDRTVECIKVDAPAKTNIKRVAAYCRVSSGKDAMLHSLSTQVSYYSGLIQNHADWSYCGVYSDEAITGTKSDRPGFQRMLKDCEAGKIDLILTKSISRFSRNTVTFLQTIRKLKSIGIDVFFEEQNIHSIDGSGELMTTILSSFAQEESHSVSQNMKWRIKKNFEEGIPWNNALLGYRLKDDRYELIPEEADTVRRIFREYLSGFGKTKIANGLTADGIPTRFGGPWHPNTVGKILRNETYTGNLLLQKTFIEDHITKKKRINNGERPKYLVESSHEAIIPPETFEAVQEELQKRSEMYCHASKKSASYPFTGLLICAGCGKTYTRKITPSGAVWICRTFNTRGKVYCPSKQIPEATLYEVTGQITASIKEIRQITVCNGNSLQYDMADGRIISQVWKDRSRSESWTDEKKAAASQQLKKRRKADE

SEQ ID NO: 23143 - protein, 599 aa, synthetic construct
MSERIITKIPALAEWKNKPGTVSVKKRVAAYARVSTEKEEQENSLEAQKAYFRYLIQSRPDWEDAGLYSDEGISGVSFHNREAFKQMIEDALAGKIDLILTKSLSRFARNTVDALQTIRSLKNAGVAVYFEKEDINTLDSKGELLITLMSSFAQEESRSISENIKWGIRKRFADGKYSVAYSSFLGYYSVHKDEMLVDEREARIVRFIYLLYLENRSFQNIADVLMAAGILTVTGKKKWFSSVVSSILHNEKYKGEALLQKGYTVDYLTKKTESNNGILTQYLVTGGHEAIVSAEVWQEVQDRRLRYEQRYPTVSVLSNLIYCGECNSAYGRKMFRAPQVDAGYYPAWRCNGRVLHKTGCHTPSVYEQELMNQIAFALRHLLQVFYRNIFALCKDILNNAKATEVLQEWETNGLPDLYYELDCLPIIISRIVVETDDCVRIVFRDGNELEGAIGLFTPGGNARKQKERKELDMIAWRERAARRYTSTPFDYSEVCNAPFGGGKEQFYKQVSTLRAEGLGCRVISYYLGISCKSRVQRLFKEKGLTVEKARSEYYCWWCGAVIQRTPGARARLFCSVPCKGKYYYEKEKGKKLLAEEDYD

SEQ ID NO: 23144 - protein, 556 aa, synthetic construct
MNREGKKCVLYPRVSTEMQVDGYSLEGQKNSLKRFADREEMEIVGIYEDAGKSGKSIEGRPAFKKMLSDIKYGLEIDYILVYKLSRFGRNAADILNSLEFVQSYGINLICIEEGIDSSQTSGKLLISVLSAVAEIERENIIEQTMNGRREKARQGGWNGGFAPYGYYLKDNKLLIQETEAEAIRIIYDKFGNSDIGLGGIAKYLNLQGIKKIPRQNGKLETWSSHFIRLILDNPVYCGKIAYGRRTREKVKGTKNEYKQVHTDDYILEDGQHEAIISEELWQKVHAKRLATGVKQPSKIGKDRAHLLTGLLKCPICGSSMYTNKHAWTNKDGTYKEVYYYICGRNKQERGHHCDYKASLRKTEIEPLVIEAVKELVSDKYFAQEIEKRIGAQTDTSMIDKELANYERKLKEVDLNKARLEREIDNLPIDARYRERKLHDMILRLDGLYDTIVELEERIEDAKLRRNSIEMEAITLDNIYKIMLNFGKLYDIISDEEKKSIITYLIKEVQIYPHGESEMPLKSIEFNFPIYRDGKEVRKILWESGNTVETVCLLSRK

SEQ ID NO: 23145 - protein, 525 aa, synthetic construct
MSRTVTAIPATKKLRSAAASSGALAHRRVAAYARVSTEMEEQTSSYEAQIDYYTTYIHSRNDWQFAGMYCDEGISGTSMKRREGFQTMIDDALAGKIDLILTKSVSRFARNTVDSLTTVRKLKDAGVEVYFQKENIYTFDAKGELLITIMSSLAQEESRSISENVTWGHRKRFQDGKVMVPYKSLLGYKKGADGSLVIDETQAPTVRLIYQLFLDGMAISEIKTELAARKILTPRGKEVWSTSTVRSILSNEKYKGDALLQKTFTTDFLTKKMKVNEGEVPQYYVTGNHEPIIAPRIWDQVQYELTTRHGNISSAKVGLFSTRLKCARCGVWYGRKTWASNTKYKYTVWQCNHKYTDEHPCSSATVKDEQIKDSFVQALNQLIARRPQQSQLPQVLGDMFGTSRLEEQAAACQTKIVELTEQIEALIAENQRCALNQDAYQARYTELDTIYRKTLARKTSLEADIAANTAKHAAITTALGDLTGEPVSEFHPAQWSALIDHAIVDEDTIRFVFRTGEQVSMTLKE

SEQ ID NO: 23146 - protein, 416 aa, synthetic construct
MAQVSVVTPVRPPAPKLVNVAAYARVSTNGTEQLASLSAQVSYYSRLIQSTPGWAYVGVFTDEGITGRSTKSRQGLADLMDAARGGGVDIVLCKSISRLARNTVDLLATVRELKDLGVAVRFERERIDTLSADGELLLTLLASFAQEESRSLSHNVKWAIRNRYKNGGTNSFVVYGYHWANGQFTIIDEEAKIVRLLFANYLDGISPEKTATMLNAEGKRSRGGGRFYGSVFRRMLENERYKGCQMLQKMYRPTIQAPTRSFNDGELPRYWVEQALPAIIDEAMFDAVQAEIAHRREVGPAATPSKNTGVFTGRICCGACGKNYQRKTRTYKSGTSYKFWRCWSACTGNGNPCRGHNLRETLLEHACADMLGTQGFDPVHVAEQVVMIEAFPHQLTFHLADGTMTPVGLTSEGRLA

SEQ ID NO: 23147 - protein, 510 aa, synthetic construct
MDTDIFAIYLRKSRKDLENKDYDVLKRHRKILLDFAKSKNIVIHEEDIYEEVVSGETIQDRPVIQNLLKKIEVGYYKAVLVMEIERLARGNTIDQGIIAQAFQLTNTLIITPQKTYDTRNEFDNEFLEFGLFMSRREYKAISRRIQTGRIQSCKEGNYVGSVTPYGYGKEKLKGEKGYKLTPNDEAENVKLIFDLFLDGLGTSTLAFKLNDLNIKSRTGKPWTPAMVRNILTNKIYIGILTWGKRANVKKLDNNLISKTRPVNHNCIESKGKHDPIIDELTFYKAQTLLKSNSSKKVPKDKALKNPLAGIIVCKKCGTNMIRRPLKNIPDTILCKNHYCDNISSYLYLIEKRLLDSLHTTLLEYYYYLDNYEKEDLKSKKNYDIQIKKIDKDINTLKKQHVRTCELLELGVYSLELFKERSTSINEQVDALIKQKDELIRLNKDNKTEKIIQAIPKIENCLNTYHTLSIEDKNKLLKSIIKKAYYLKNATGGRWNKEAQDNFSIELELNL

SEQ ID NO: 23148 - protein, 449 aa, synthetic construct
MLKRAALYIRVSTDQQAKHGDSLDAQIATLKDYVSTQDNLTIIDTYIDDGISGQKLYRDEFQRLLEDIKKNRIDIILFTKLDRWFRNLRHYLNIQEILDNSGVTWLAVSQPFFNTDTAYGRSFVNQSMSFAELEAQMASERIKAVFENKIRKGEVVTGSVPFGYKICDKKLIPNENAPIAKDIFKHYSIHNSIRLTVEYLFNEYDITRSSRTIKHMLRNRKYIGEVSGNKNYCPPIVDKETFEKVQNLLDKNISSIAKRTYIFSGLVVCSCCGKKMTGRYRKRKYIKKDGTVMYYTKKVYRCNGNTYKRNKCPNKINIAEEILEEYLLNNIKADAENFEAKQKKIAVSAPEKNNNSKILKKIERLKKAYLNEVISLDEYKKDRKELEQMMIQVKPKETIVFKSNWFNKNIESTYRDFDEEEKRFVWRSVLKNLIVDPHSKITINFLTKN

SEQ ID NO: 23149 - protein, 569 aa, synthetic construct
MDVIGYIRVSTNNQDLQRQRYLINKYCTENGYTLVHIYEDFAISGANLDRKEYQNLLNIKKGDADLIVISELSRFSRNENYLKTANDIYELLDKANIVLLDKPENILTKEDFLDIDKFIPFIFEAKGSAYERKKIITRAITGKDAKVAMNPLAITESYYSIPFGFKAVSNPNYVSGKTPKSLLAVDDEAMEIVKDVFKYISEGMTFQATTDKINMMYGDTISKQTAQNIIHNTIYKGLRKRKGEYFRLPIEQPISDDLWEKANYSCANNRLFKGNSTKHFNPIKGIGKCICGKNLTVGNTPSKLGSSLSYECAERAVLYSKSRCKNPNINFHLLNRIVWDIVKQNVLSKNYTIKSNEAIKALENENKKLQTAIASLEKEKEKLDSEKNTIITNGLLSTDSSVMKIVNEKVAEYNDKLKDIETKITNIKKEVTKNKKKITDEKKSQTSKELNEMSLEGKSKIFYQMLESIVTYSVKAKSGMVIVTFNNGLQVIALWKNYIKPSVWYLPVGFQFDMEKRMIYVKTMPKTEGFDFTISDYETKFYEYRDLFKHFDLAQYQVEIPKEELERKN

SEQ ID NO: 23150 - protein, 523 aa, synthetic construct
MPVSCFDQQQVDHDEKNEADIPMQRKACHRFAKKMGWTIIHEEQEEGVSGHKVRAENRDKLQIIKEAAKQKKFDILLVFMFDRIGRIADETPFVVEWFVKNGIRVWSTKEGEQRFDSHTDKLTNYIRFWQADGESEKTSIRTSTRMGQIVEDGFYTGGSCPYGYKLVRQGRVNKRGHELYDLVINEDEAPLVRMIFEKYVEEGRGAQSIANLLNSLNVKNRSGHNWHPSSIRGMIKNITYIGILRSGESRSQVLPHLRIIDEQTFGAAQEITRQRSKHHEDTRHVPMNIKGQSLLAGNVFCGHCGARLSLTTNGKGRPRSDGTDAVRVRYVCQTKTRKHEPCGGQTGYTLHILDSMIEDIVHKIFRRVKCLSRSEILGAGYAAKMSEQKAIARRAQREYQKAENDLKGLRSEVVKAVNGESAFPLDLLSSLVKETEQKCVQLQETYQKAQAEVDKSDILMDELRATYNQFIGWSNIYDTANIQTKKMIVCQLIERVDVFRGYELKIKFSISVEQFILGLDISA

SEQ ID NO: 23151 - protein, 548 aa, synthetic construct
MKFKYPAMGTTKNAVIYARYSSHSQREESIEGQLRICHEYAKAEGLAIVGEYIDRAISGTTDARPDFQRMIDDAKKKQFSYVIVYRLDRFARNRYDSVLYKHELKQCGVKVVSATEGIGTGDESILLEALIEASAEYYSMELSRKIKRGRQDSAMKGNFLGGAVPLGYKVVDSKFIIDDETAPIVRYIFERYAAGIGKKQIIDELTAKGYMRRTGKPFTYRAFDSVLRNRKYTGEFTQTGITVEGGCPAIVDTEMFEKVQARLEINRRAPAKAKAKTEYLLSGKMFCGYCGEPMIGISGTGRHEKTFYYYSCVGRRGKSGCKKQHEKKDFIEWYVCEQTVQYMQDPERLSHVAKRIIEINDAEFDGGKVKELERAVENCDSDIRKLVDALTTIPDAGRAALYDKIERIGAAKADMEIDLAKLRVLSEVRYKQEDVEAWIRSMCRGDLMDFEFRRQLIDVFINSVYLFDDRVVIVYNIKNGKQVSAIDVLNAVEELDGVELFPDSAEDSSAGGNGSFLVADAPPYMKNPNLFPIGNGFGFLIFIKDIID

SEQ ID NO: 23152 - protein, 519 aa, synthetic construct
MKKVQVIPATLRSYTKKLMDSQKKRRVAGYARVSTDHDEQLTSYEAQVDYYTRYIQSRNDWEFVGMYTDEGISATNTKHRKGFKRMIDDAMDGKIDLIITKSVSRFARNTVDSLTTVRKLKDKGIEIYFEKENIWTLDAKGELLITIMSSLAQEESRSISENVTWGHRKRFADGKVSLAFSHFLGYDRGMDGNLIVNKKQAEIVKLIYRLYLSGYTFHSIAKELTERKIPTPAGCKIWRANTIRSILMNEKYKGDALLQKKITVDFLTKETKKNEGEVPQYYVEHNHEAIISPQVFDWVQEEIKRRRKGKKRYSGVSIFSSKIKCGQCGGWYGAKVWHSTDKYRRTIYRCNDKFKRHCQTPHLTEDDIKEAFVRAANRLIENKAEIIDNVTLLKERLTDTEALEEERDKLSTDLNLLADKVQQLIAENARVAQNQDDYDRNYSELVSRYEAAKTQYDKACDTIQYRKARSLQMDSFIKELRNQELIKEFDARLWSSLVDFITVYSKDDIRVTFKNGIEY

SEQ ID NO: 23153 - protein, 545 aa, synthetic construct
MRTIRKIEQKISGLKQRKKVAAYARVSMESERMHHSLSAQVSYYSKLIQKNPNWEYAGVYADYGISGTGIKKRQEFRRMLEDAEAGKIDIILTKSIQRFARNTVDLLQTVRHLKELGIEVWFEKENIHTMSGDGELMLTILASFAQEESRSISDNIKWRFRKKFEQGIPHAKFFVYGYCWEKDNLVIQPEEAAIVREIFDAYLQGRTRKDILRELKRREIRTMYGNYFKDASIRQILTNRIYTGVLEIQKTFVTDPITKRQAVNHGERNRYVVEWHHEAIISSDMFERVQQELKNRKEMGMQRGGYARDFLNTSCFTGIIKCGICGKSYVHVVRKYKGRIREYWTCDSHKGKGTNCGAYGSIPQPALKKACAAVLGTDEFDEELFVQRVKKIVVPSYHTLVFHFKDGNVITQEWKSTALKDMWTDEQKKKQRQWMETYHQRDTSGRYTAFSECIVCPACQTKFIRCLEKRMNGKVAYWRCRGEHRCIHVRSIKEEWLQRMAAETMGKLEFDDTAFRAQVQRIEVQDNETLLFQFNDGHTKEVKLP

SEQ ID NO: 23154 - protein, 543 aa, synthetic construct
MILIGKQHTLTVKSRRCKMSANVIIIPPRKIAGNTVDKHEDKPRLRVVAYCRVSTDSEEQATSYDTQVQHYTDYISRNPLWEFAGIYADDGISGTSTKKRVGFNDMIHDCMSGKVDMVITKSISRFARNTIDCLKFVRQLKDKNIPIIFEKENINTMEASGELLLTIMASLAQQESASLSQNVKLGLKFRYQEGKVQINHNWFLGYTKDDEGNLVILEQEAKVVRRIYREYLEGASLRDIAEGLEKDGIKNGAGHLKWNLSNIKGILQNEKYIGDALLQKTITTDFINHVRIKNDGTEPQYYVKDSHTPIIPRDIFFKVQEEMLRRANMFSGEENKKRRVYSSKYALSSLCVCSKCGDVYRRIAWNNRGVHSVVWRCCTRVENGPSACDAPTVQENELQSAIVKAINKVFSISDEVLDTLNNSIREIIAGNNLNEIETVDKKIADKQAILLTLLKAKKDYTKIADEIDELKGKKQQLLIEKAGQEDAKRRIREMEDFLKSERHDISEYDEKLVRKYIKKIKVYEDRFSITFKSEISVDIERAS

SEQ ID NO: 23155 - protein, 447 aa, synthetic construct
MREIVKEIIKIDSTIRKTGLEKKTRVAAYARVSSDSDEQFLSLEVQKEHYENYIKSNPCWEYAGLYFDEGISGTKIGKRESLKQLLKDCQSGQIDRIVTKSISRLARNTVDCLEIVRKLTGLGIYLYFEKENIDTEHMSSELMLSILSSIAQSESRSISENNTWAIQKRFENGSFVISCPAYGYKNENKKMIIVPEQARVVKEIFNMALSGMGGEAIARVLTDKKIPTKKGGNWTSSTVNAILTNKTYTGDVIFQKTYTDDSFNRHKNCGEKQQYVIENHHEAIISHETFNLVKEIIAWRRSENNIVCGSGKYNKLYAFSAKIRCGECGSKCKRRIIYQHNKAYGIWVCITHLEDIHACSQKSVMESYLKISFLQMLNKLKAGYVQMLTPLVESLRGVNNKDGLNKVIELEEKIAKLQEQEQVLSKLLAGGYIEMDSYYLESNQLKT

SEQ ID NO: 23156 - protein, 531 aa, synthetic construct
MKEIIKIDSTMRKTGFEKKTRVAAYARVSSDSDEQLLSLEVQKEHYENYIKSNPCWEYAGLYFDEGISGTKIGKRESLKQLLKDCESGQIDRIVTKSISRLARNTVDCLAIVRKLTGLGIYLYFEKENIDTEHMSSELMLSILSSIAQSESRSISENNTWAIQKRFENGSFVISCPAYGYKNENKKMIIVPEQARVVKEIFNMALSGMGGEAIARVLTDKKIPTKKGGSWTSSTVNAVLTNKTYTGDVIFQKTYTDDSFNRHKNCGEKKQYVIENHHEAIISHETFNLVKEIIAWRRSENNIVCGSGKYNKLYAFSAKIRCGECGSKCKRRIIYQHNKAYGIWVCITHLEDIHACSQKSVMESYLKISFLQMLNKLKAGYVQMLTPFIKSLRNVNNKDGLNKVIELEEKIAKLQEQEQVLSKLLAGGYIEMDSYYLESNQLKTEIDTCLKEKLQLSNSLNGNLTHLNEVQKLQRFVSVTEVFSEFKDEDFLDFVDDVVVKSRTRFLFILKCGLELEEEVKETWHASHMVTE

SEQ ID NO: 23157 - protein, 402 aa, synthetic construct
MKQIKTIQAQKVTAIKRLKVAAYTRVSHTSLLQSLSNQVSHYSQLIQANPEWDYVGVYSDSAISGRSQAYRRDFQQLLEDCRKGKIDLILTKSISRFGRNTVELLETVRELKRLGISVRFEKEKIDTLTAEGELLLTLLASMAQEESQSISQNIRWRVKKRFEEGKPYIPQDIFGYRWNGDEYVIEPHEASIVRQVFEWYMEGLSASKIAKRLDDRGERTRLGNRFTKRVIYNMFDQEAYCGRLILQKTFRDQFGSRSILNDGQMAKYIVENAHEAIVTPEYFQLVNQEKKRRARRRVSKHDALAKLQGKVYCEHCGLDMVLTLETKFNQEKRVRYYCRTRDAKGVETCLGRTVTEEQLFQAFGESINTEDIHHISFNSVTNEAKAIYRNGEEKHVIIQKGR

SEQ ID NO: 23158 - protein, 413 aa, synthetic construct
MNIRKIEAKNNNRKKRICAYVRVSTTNGSQLDSLENQKVYFEKLYAERDDVEFLGVFCDKGISGSKYDRPDFQTMLDACRKGQIDVIHTKSISRFARDLINVLEISRELKTLGIDIFFEEQNIHTLSNEGEVVLTVLASLAEEELQSMSGNQRWSFRRKFQKGELLINAKRFLGYDLNEKGELVINKAEAQIVRTIFYSYLEGMGTHRIAKKLNEGKVPTVTGKKWYDSTIRNILKNEKYKGTLLLQKYFHDGVNGPKKLNQGQLEQYYIEDNHEGIVPKETWEKVQVKMKSRSRIQGTNKTYKFSRMLKCQYCGSTLKRQVSYKKKIVWCCSKYIKEGKNSCKGMRVPERDIEDWKLSSPVIVLERIEDGEKHYSYTGQKTSANSQISNSEKGQGSRLLSSIYRPRRTAIKL

SEQ ID NO: 23159 - protein, 546 aa, synthetic construct
MYRYQEKFCPEEIIVYLRKSRSDDPLLSIEEVLSKHEEILDEWSVKNLGATVPEKNKYREVVSGETLKDRPEIQTVLHEIESPKIKGVLVVEPQRLTRGDLEDIGRLMKLLKHTNTMVLTPQRIYDLHDDYDMDAFERELKRGNEYLEYTKKILNRGRLLSVSQGNFIGSIPPYGYDKTFIMEGRRKCPTLKINEDQAEVVRMIFDMYVNQDMGRTNICHQLDKMAITPPKGKHWSPAALKDLLENVSYIGKVKWNWRKTIPVVENGEIISTRPKSKVGEYLIYDGKHEAIISEELFQAAREKQGKHHRAKLSTKISNPFASLLYCHTCGRAMTLRKYRNPDGTFKSSARLICDDQVHCNTGSCLYSDMVDYVCNALQKSIHDFEILLKEQNNDTEQVHNNMIHKLEKRMKDLEAKELAQWEAQADPDPANRMPQHIFRQLNQKLQEEKEDVRRALQDAYESMPVNINYEEKIVKFQDAITALKSDNISPEQQNKLLKEIIERMEYSRNAIPRATRRSSDKSERLPGVNSNGWQTQPFHVSIRLKM

SEQ ID NO: 23160 - protein, 513 aa, synthetic construct
MAQAKLISPVSRQAYERTKVAAYCRVSSNSADQLNSYATQIRAYTKLIKSNDSWELVEIFADEGLSGMKAENRVEFQRMIEMCEHKQIDLIITKSVSRFARNVKEALEYVRKLKLLGIGVQFEKEGIYTLALGDEMLLNTFSAIAQEESKAISQNQRLSIVKRMERGEYVDSNAPYGFRLRDKKLEAFDQEADVVRYIFQQYLSGWSTSEIARDLTEKGIQTKLGKEQWRSTKISYILSNERYVGDCRYQKTYRDTTVPFKQSKNRGQEDMFYASETHDPIIDRESFEKVQALLQDRKERFSKSEQLNIYPLTSRIRCSECGSVFRRKVRNGAIKWVCARHSADTHACPSGYYSEERIYDGFITMVNKLRFGEERILDQVIAKLETAAALYKRNNISAGKMSQSIAELNAKLVMLEQLRSKGYLAIEVYQSQTRDIQKQISSLKSERRSAFESTIQTMLDEVLKMRSLLNEIEEPLEEFNDKLFHELVKGIEINKQDEMTVTFPGGLKFTELI

SEQ ID NO: 23161 - protein, 535 aa, synthetic construct
MPKAISYIRFSTKSQTIGDSTKRQSKLISKWLEDNPHYHLDENMRFQDLGISGYSGANVKSGAFGEFLAAVESGYIEPGSVLLVESLDRVSRQDIDKAGEQLRKILRAGVEVVTLVDGSWYKEESLRDSLSMIKAMLVMERAHEESLTKSKRLRSAWANKRKEAESGKIMSRRCVAWLKVSEDGKRFEQIPENVKAVQRVFQLRLDGLSHVKIARQMNEEKFATLNQFRSKTGVWSQSTVTELLSNRAVIGFKVPSKSMVVKGVQEIPGYYPAILTEEQFYAVQQLKTGAGRRPSSDRPLLTNLFKGVMRCAKCGFIMIVSGVTAKRSGNYRCSMKYEGRCDAMGISRLQTDKALVQGLLYNAHRLNLSSDNSKVIGSLQSELETLQKQRERLVKLAMLTDDTESVAGELRALNKQIKEAEKAIAEAHQRDQSSKLDTINHLDLTVKKDRIEAQIIIKRMIRTITVDTARKVCKIEFHNGLVFHDYPLDRVIDGARDLELLPIMGYSEIRFGKGNHHTPNHVLMANAPQWVKDEE

SEQ ID NO: 23162 - protein, 606 aa, synthetic construct
MKKVFVYHRVSSDQQLDGSGIARQAELLEAYLKRTNILAEMDDPEPVIITESGGVSAFKGHNMLITSGLGAWMQEIRASMWDGSHLVYENGDRFSRQNPFTVIGYINDLINHNITIHDATMNIIISRENSAMLPMVLMNAQRAYDESKYKSDRIRKGWAKKREQAFNKGTIVTNKRPQWIEVENDKYVLNEKAAVVKEIFALYQTGMGCPTIAKQLQRKEGEQYKFNRPWTGELVHKILTNRRVTGKIFISEIIRNHADIDNPVTQKKYDMDVYPVVISEDEFELVQELLKSRRPNAGRITVKKEGQEEVLIKSNLFSGIARCTECGGSMYHNVVRAKRTPKKSDPKIEEYRYIRCLNERDGLCENKAMTYETVERFVVEHLLGMDLSTVLKEQEFNPEIEVLRIQIDQVKDQITNYENGIERRKSAGKPISFEMREELDDAKSELERLLARQASLATVQVDVPVLQDVNVTELYNVNNVDIRTRYENELNKIVSNICLKRNGKSYTIDINYKQNELKRHVLFVENKKKEQTLISEVIIEDVDGGKFYYTPSFMIRLKDGEIRFQQTNEDLSIVDYSLLLNYVDAIDRNDAVGVWMRNQFNFLTSN

SEQ ID NO: 23163 - protein, 413 aa, synthetic construct
MNIRKIEAKNNKRKKRICAYVRVSTTNGSQLDSLENQKVYFEKLYAERDDVEFLGVFCDKGISGSKYDRPDFQTMLDACRKGQIDVIHTKSISRFARDLINVLEISRELKTLGIDIFFEEQNIHTLSNEGEVVLTVLASLAEEELQSMSGNQRWSFRRKFQKGELLINAKRFLGYDLNKKGELVINKAEAQIVRTIFYSYLEGMGTHRIAKKLNEGKVSTVTGKKWYDSTIRNILKNEKYKGSLLLQKYFHDGVNGPKKLNQGQVEQYYIEDNHEGIVSKEIWEKVQVKMKSRSRIQGTNKTYKFSRMLKCQYCGSTLKRQVSYRKKIVWCCSKYIKEGKNSCKGMRVPERDIEDWKLSLPVIVLERIEDGEKHYGYTGQKTSANSQISNSEKGQGSRLLSSVYRPRRTAIKL

SEQ ID NO: 23164 - protein, 428 aa, synthetic construct
MSTDQEEQLSSYENQVNYYREYILKHEDYELVDIYADEGISATNTKKRDAFNRLIQDCRDGKVDRILVKSISRFARNTLDCIKYVRELKELGIGVTFEKENIDSLDSKGEVLLTILSSLAQDESRSISENSTWGIRKKFERGVVQVNTTNFMGYDKDEKGNLIINHEQANVVRYIFDRFLEGYSPEFISKELRELEIPGCTGKAKWCPSAIWKMLQNEKYKGDALLQKTYTVDFLTKKRIDNDGQVNQYYIENNHEPILDREKWEIVQLEIARRKKFREQHKLQFYIIQKENNPFTTKVFCAECGSAFGRKNWTTSRGKRKVWQCNNRYRIKGQIGCLNNHIDEEMLEKAFMKAVGLLQEHRSEVVAKWQKLEQGASLLHKHYAKQMYQILDLDKFDGVIMNQVLDHISISETGQIVVTFLEETEVDL

SEQ ID NO: 23165 - protein, 502 aa, synthetic construct
MSDTTQIGVIYARYSSDKQRDESIDGQIRECMAYAEREGITITNTYIDRALSAKTDDRPEFRQMILDSNKQAFNYVLVYQLDRFSRNRYDSAIYKAKLRKNGIRVISVKENIKDDPSGIILESVLEGMAEYYSAELSQKVMRGMTDNVLQGKWVGTVVPYGYKLSNNRQLEINEHEANVVRKLFDMYLQRHTLSEMASYMNANGHLTHKGKPFNTNSIKAIISNEKYIGVYSWGSERIENAIPPIIDKSIFEKAQHKRNLRAKKKGNRSDLYQLCGKLECGRCGGNYVGSTGTSKTGALHHYYVCSNRRRKNACQAQNIRRDALDDIVISQTLAILNKPNVVNKIAKYAASSGKNLQSETVAQIDIIDAHIRDLKKSLDNYMTAIANGFISDVLKHRIEATEQELKDQIEIKTNLENTIIPVELTEDHIRFFLLKMAKENPSTLRGRARIIEAFVHHVTIYEDHIEIVFNYKNELSEFHDKTLESSLLNDLVTQKGFEPLAF

SEQ ID NO: 23166 - protein, 480 aa, synthetic construct
MATHKVAIYVRVSTTSQVDEGYSIDEQKAKLTSYCDIKDWSIYEIYTDGGFSGSNTERPALEQLIRDAKRKLFDTVLVYKLDRLSRSQKDTLYLIEDVFLENNIEFVSLLENFDTSTPFGKAMIGLLSVFAQLEREQIKERMQLGKLGRAKSGKSMQWAKTSYGYDYIKETGTLSVNPYQALIVRKMFEWYLSGMSITKLRDALNEQYGQDKEWSYRTVRVILSNPVYCGYNQFKGQIFPGTHEPIISEEDFNKAQEEIKTRQRTAAQRFNPRPFQAKYMLSGIAQCGYCSAPLAIKLGTIRKDGTRLVKYECKQRHPRKTKGVTVYNNNEKCDSGFYFKDDIEHFVLTEISKLQTDSDYIDKLFSNTNQETIDRDGYQKQIDNLTAKISRLNDLYIDDRISLEELQKRSSDFMAERTALEKELDADTSLKAVERKEDVRRVLDTKDIFTLDYEQQKAIARALISKVRVTSESIVILWKL

SEQ ID NO: 23167 - protein, 558 aa, synthetic construct
MNIDKVNKIEQVAIYCRVSTIEQAEEGYSIDEQERLLRDWCNRMNYSVYKVYSDRGISGKDIKNRPALKELLKDAEERKFQMVISWKINRISRKLSDVLKIVDILEQNSISFNSYSEQFDNSTPAGKMQFQMMALIGEFERGTIAQNVKMGMCAKAKAGEWCGGRVLGYDLVPVENQEGTKRRKTKLTINEIEARSVRLIFNEYSNGKGYKAITNQLNKLGYKTKKGNDFSVGSIREILTNPVYIGKVRYNVRQNWSEKRRRNINANPIITDGIHEPIIDEGLWDKVQAIMESKKGKPSRIYDGEYPLTGILRCPKCGAGMVISRTTNKLADGTKKRIAYYCCGAWKNKGTSVCNSNTIRVDKANEYVFTKISELLSNEKMVETIVNNINKERHKKINPAKKELERIDKELEKIDRKKTKLFEAYEEDLISKEEFKERKDELNKRAKSLQEEKEPLLVTLSDDVSEEIPYGFIKSILENFSKVLTESATREQQKKLLHMIISEITINETREIDSIKLKINDSLVDYISKEEGVSIKDTPSSFMLRNIGMSVLNLDIAI

SEQ ID NO: 23168 - protein, 544 aa, synthetic construct
MTDKITALYCRLSQEDMLHGESNSFTNQKAILSKFAADNGFRNTKFYVDDGISGTTFERDGFKAMMADIEDGKVGIVITKDLSRLGRDYLKTGELIEMVFPDYDVRYIAINDGVDTLKSENELMAFKNIFNDWYARDTSKKIRAVQKAKAQAGKPLATHPPYGYKKSETDKNQWVIDEEAAAVVRRIFQLCIEGNGPTVIANILTADGIPTPTAYYRSKGMNVCNQNAKTKHWGMATVVHILERMEYLGHTVNYKTYRKSYKNKKLYENPKENWLITENTHEPIISQHDFDLVQEIRSHKKRRQKSGTVSPFAGIVYCADCGNTLYVGRAQTLSPNQEHMMCSTYAHDSDECTAHYIRTCVLTEIILGELNKLSQFVRNNEDEFVRRAMENSATTQDSEMQTARKALRVAEKRINELDDLFERLYEDNVSGKISDERFATMSARYETEQSKLKADAAKLSETISRKEQKKNDVMNFVGIVKKYEEFTELTPEIMHELIDRIVVHAPEGGRANRTQQVDIHFRFNVVTATATADFKQYYVRRKAV

SEQ ID NO: 23169 - protein, 496 aa, synthetic construct
MYGYNLKPCLTRRNTLKRMEQITPPPISASPLVKVAAYARISMETERTPLSLSTQVSYYQQLIHDTPGWTFAGVFADSGISGTTTHRPQFQEMLALAREGAIDLILTKSISRFARNTVDLLETVRELKDLGVEVRFEKENISSTSADGELMLTLLASFAQAESEQISQNVKWRIWKGFEEGKANGFHLYGYTDSADGTDVQIIEEEAAVVRWIFAQYMKKTSCEKMAAQLIADGRVPHLADNKMPGEWVRHILKNPHYTGDLLLGRWSTPEGRPGRAVRNTGQLPQYLVENAIPAIIDRDTFTAVQTEIARRRELGARANWSIETVALTSKIKCVSCNCSFVRNVRNPKTQNSISTEHWICTERKKGRKTGCGTCEISDTALKGFIAQVLGIEAFDEDVFNERIDHIDVQGKDHYTFQYTDGTSSSHTWRPNLKKSSWTPARKAAWGELVRARWAEAKRLGLDNPRQAPTPPEALAKYRAVAKAEAERLRAERGER

SEQ ID NO: 23170 - protein, 532 aa, synthetic construct
MARTVTAIPATRALHTGAPLGQTTLRRVAGYARVSTDHDDQVTSYEAQVDYYTRYISDHAGWQFVKVYTDEGITGTSTKHRAGFQQMVTDALDGKIDLIITKSVSRFARNTVDSLTTVRALKDKGVEVFFEKEGIWTFDAKGELLITIMSSLAQEEARSISENVTWGHRKRFADGKVTVPYSRFLGYDKGEDGSLVINPEQAKTVRRIYNMYLGGMSIGTIARTLTDEPETFTAAGNKTWYYRSIRAILTNEKYKGDALLQKSYVADYLTKRQVINQGEVPQYYVTASHEAIISPAVWDFVQAEIAKGARDQRTQHRTRPFSSTFECSQCGHFFGSKTWHAGSKYEKVIWRCGHKYAGQDKCATGHISDQRLKDMFLEAIRLRFGSPTDTGVSQAVLDALDTSDLEVEAAGLLAQINEVAKKLQSMIAHNARVAQDQQAYEKAFNASHEQHQALLAEHAAVVAEIQNKNNRLAAYHYYREETANLELEQLVFSPYLCVALLEKGTVDVDGNITFQFRDGSTQVVAIKPSDGA

SEQ ID NO: 23171 - protein, 502 aa, synthetic construct
MEIQIREGNREQKRKLRVCAYCRVSTDADEQENSLENQIRHYETVIKANPSYEYAGVYSDFAISGFKEKRPGLQKMLADAQKGKIDLILTKSVSRFARNTSIVLEATRKLKELNVGVFFELQNINTLSGEGELMLTILAAFAQAESESGSVGAKMVYQRKYEAGIPVQYLERSFGFKKDERGVYIADEEEAVWVRKIYDMAAQGYTLAAIKRYLNENNVKTVGGAKWLDSTVLRILENEIYKGDYIMHKYFVNEERKLVRNRGEVDAWYIEDDHEAIVSPELWQKAQDALEAKRDYLAEGSVIEEFTEENYPYMNKIFCARCGHPLYKRIYSNGNRLNWGCSGTKRYGKSFCEGINIPDGVLRGAWHFDENMYIGEKQTDKGKKEFTYLKEASWKRRHKKKEPEPIPENTETEYPYREKIFCGLCGSRLVRHVNTKNHKVIWVCNGKKRKGKDFCDGTRVPDTIIKGWGEIKKDIYIQRKDDKNGKKRYSYTSKKPKGADRA

SEQ ID NO: 23172 - protein, 500 aa, synthetic construct
MRGGDITNCMYLRKSRAEEGQSTEEVLAKHRAALEELADRLGLPVDGVYEEVASGEKLYARPEMLKLLERIRAGEVEAVLCMDIDRLGRGGMADQGTILDAFRESGTLIITPEKTYDLTNDVDIEMTEFKAFFARAEWRAIRKRMRRGLMQTIEAGGYTANAPYGYRRCRIGKLPSLEVIPEEARFVRYIYERYLAGIGAQTIAQELNAMGSCPRRGAEWNRNTVRHVLRNPTFAGKIAWNRVKHYRPGAHGKDKHHVVYTPEGEWLMVDGVHEAIIPWDTWLEAQERRKQRYIPPSNTGQRANPFAGIIRCSKCGNNMQRMGTNKGEPYLLCTTKGCTAGAKFEYVEERMVELLYDELARLRLLIDSGAAPNVDALEAALAAAQREQERVQARIPRLYEFLEDGTYDRSTFRSRLEAAEKELAELASKRADLERQIDERRRSDPRKVAAAFEHLVQLYPTMSPADKNSALKALGVEVTYTKEKKTKPRDFTLELQLRDF

SEQ ID NO: 23173 - protein, 508 aa, synthetic construct
MKKAIAYMRFSSPGQMSGDSLNRQRRLIAEWLKVNSDYYLDTITYEDLGLSAFKGKHAQSGAFSEFLDAIEHGYILPGTTLLVESLDRLSREKVGEAIERLKLILNHGIDVITLCDNTVYNIDSLNEPYSLIKAILIAQRANEESEIKSSRVKLSWKKKRQDALESGTIMTASCPRWLSLDDKRTAFVPDPDRVKTIELIFKLRMERRSLNAIAKYLNDHAVKNFSGKESAWGPSVIEKLLANKALIGICVPSYRARGKGISEIAGYYPRVISDDLFYAVQEIRLAPFGISNSSKNPMLINLLRTVMKCEACGNTMIVHAVSGSLHGYYVCPMRRLHRCDRPSIKRDLVDYNIINELLFNCSKIQPVENKKDANETLELKIIELQMKINNLIVALSVAPEVTAIAEKIRLLDKELRRASVSLKTLKSKGVNSFSDFYTIDLTSKNGRELCRTLAYKTFEKIIINTDNKTCDIYFMNGIVFKHYPLMKVISAQQAISALKYMVDGEIYF

SEQ ID NO: 23174 - protein, 519 aa, synthetic construct
MTKDLQTGVIYARYSSDKQRDESIEGQIRECTEYAQREGILITKIYTDRALSARTDNRPEFLQMIRDSAHQSFNYVIVYQLDRFSRSREDSAKYKGILRRNGVRVLSAKEHITAEPAGIILESMLEGMAEYYSVELSQKVKRGMTENALKGKMNGSAVPLGYDLTESHHLAVNAHEAKAVRLIYDLYLKQHSIAKISDILHSKGYLTKRGRKISPSVIKTILSNEKYIGVYSWGDIRIEGSIPPIISKSVFDEVQVIMSTRIKNKGRRSEMYNLCGKLICGECGGHYMGSTATSRNKEKHYYYVCTNRRKYHTCTAPNIRRDELEDLVINRTLEILNQPPNIAHIVDLVMSGYNNTTQEAKVAIQGINNKIKAIDTELNNCMDAIKQGFITERLKGEIENLESERNNLLEQKANHESALIPIKFTADHIEYFLERMAKENPTTKAGRSRILDTFIKSVTIYSDRVEIVFNYKNELPAFNTQCATGSHFKVLVGNLYNKANHFYINSTAYPITLIVPFGF

SEQ ID NO: 23175 - protein, 521 aa, synthetic construct
MKTVTKIEANQRTTGSEKKLRVAAYCRVSTDSDDQLESLAEQKKHYETYIQAHENWNFAGLYYDEGISGTKKEKRSELMRLLSDCEAGQIDFIITKSISRFARNTTDCLEMVRKLLAINVAIYFEKENINTTSMESELVLAVLSSLAENESVSISGNEKWSIRQRFQSGTYKMNPPPYGYRWNGEQLEVNNDQAEIVKRIFAEFISGKGVMHIARGLDSDNIVPARGKHWCQSSILRILKNENYTGNAVFQKTFTDESFRRCVNYGQLDKYLVADHHEGIISKADFESASALIDRHSVEKNVTKGSHKYQLRYCFSGKIVCGECGATLKHRTHRLGGETYEAWCCSTHIYNKESCSMKFIRDDDIKLAFVTMMNKLVFGHKLILKPYLLTLRSSSTDSSIQRIQQLRLLIEQNTGQQETLTRLMANGFIDRALFGRELNAIMAQTDEYRAEIDTLSSSVTGDGAKLKETERLIKLVERGRMFMEFDADLFSKLVDRICAFSRNEIGFVLKCGLTLRERIGE

SEQ ID NO: 23176 - protein, 521 aa, synthetic construct
MSNITIIPARPQRANSQQNETEKPKLRVAAYCRVSTDSDEQATSYEAQVSHYTEQITRNPEWAFAGIYADDGISGTNTKKREEFNRMIADCMDGKIDMIITKSISRFARNTLDCLKYIRQLKDRNIPVFFEKENINTLDAKGEVLLTIMASLAQQESQSLSQNVKLGLQFRYQRGEVQVNHSRFLGYTKDENGRLVIDPEQAEVVRRIYREYLDGYSTDKIAAGLERDGILTGAGNPRCHTSTVAKILRNEKYMGDALLQKTYTVDYLSKKRIKNNGIMPQYYVENDHEAIIPKDIFMRVQDELVRRRLVKVSPNGRKHGFSSNHVFSQMIVCGECGELFRRVHWNNHGCRSIVWRCLSRLQPTGVICHARTVSEEVLKNVVVQAFNELLGSRSTYQKRLRDNLAVVLRGYEDEQALEIDKRLAELQQELINYASRKEDYNDIADEIFRLREMKQKNFTDTAVRDEQVKRINELNEFIEQQDSEMTEFDESLARRWLKEIVVWDDRFSVELKSGIVVEIEL

SEQ ID NO: 23177 - protein, 535 aa, synthetic construct
MARKTDKPLSNIAVIYARFSSHNQREESIEQQVAECKVFAAQQGLEVTEIYSDAAQSGRTENRSQFLRLQRDAKKGKFTNIVAYKSNRIARNMVNALTFENDMEKLGVKLYYAKEEFGNNAAGRFALRMMMNVNQFYSENMAEDIRRGMEDNAMKCKVNGPAPYGYKSGKSGTYEIDEPAAAVVREIFTRVACGDSFVDIYTDLNNRGLKTRKGNKWGRSSFQSILKCEKYTGVYIYDNIRVEGGMPEIISKEMFLKVQRILGTKGNPQGRHRINGDYLLTGKLFCGECGHHMMGLSGTGKNGLLHYYYGCSGKKEKPRCSKKNVRRDELEYEVARLVQTYILQDDVITWLADTLIKYQEEHSSDGDMTILNTQLSETEKSIKNLMAAIEQGIITPSTKERLMELESEKSKIENNITLLKADTITVSKEQIGGWLDSFRDGNIKDKRFQKRLFDSFLSAVYVYDDNRVRIVFNLCGLNKGDIDTKLMLGDTEAIEKVSDCSYKRCYGSPDLNPPNGFTKPFGGFSISGKVHLIIV

SEQ ID NO: 23178 - protein, 513 aa, synthetic construct
MLYAIYLRKSRADLEAEAMGQGETLARHRAALLDYAAHHGLEIGAVYEEIISGESIDARPKMKQLLREVEQGRWAGVLCMDIDRLARGNSADQARVSNTFRISGTLIITPSKVYDQSRESDEEYVDFELFMARREYKAISRRIMRGRIASVKEGHFIGSTPPYGYDKVKVEKGRGFTLLPNSESDTVKQIYSMCISGMGCNAIARRLDMMGVTPRKGSSWSSASIQDILKNPVYCGKIRWQYRKEEKSLTDGIVTTRRRENPDCIIAQGLHPALISEEEFEKAQQFLNSRRIPHKKESTELRNPLSGLVYCGMCGSMMTRLGTGSRNHSDTLRCPNRNCGNVSAKLELVESALVEGVARWLNDCRVNVSRKPAADTAKAERTAAEKVRAELAKLDSQREKIYSFLEQGVYSAGEFRERMEALEKRRTQLSENLRQAEQAVSEAEGDRQLYARIIPRVERVMDIYAQSTPEEKNRLLKTIISRAEYIKTERNTRGNADRCNFTLNVTPLFPETD

SEQ ID NO: 23179 - protein, 529 aa, synthetic construct
MSKYCIYLRKSRADLEAEAHGEGETLSRHKTALLELARRMGITISATYKEIVSGETIAARPQMQRLLSEVGAGEWDGVLVMEIERLARGDTMDQGLVAQTFKYSGTKIITPLKTFDPQNEFDEEYFEFGLFMARREFTTTNRRLVRGREASAKEGKYVGSVPPYGYRKVKIPNDKGFTLEIIEEQAKVVRMIFEWYAEGAEVNGQKKRIGPYSIAVRLNELGIKSVAGKDYWTIYGVQHMLINPVYIGKIRWGYRKVKKTVTPEGTKKKSREFAQDGDYIVVDGLHEPILSEELFYKVQDLIAANPPTPIKYRHKNINPFAGLIFCAKCGHCMNYRRGYGRQPDYIGCYTAGCDNKASRFDLIEQRVLSILNSWVKDYSVDKAQIKHEADLNAELSNAISLAEKEIEALQGQLDNVYSFFERGTYTEKIFKQRSSAIEQQIMEIGEKIDRLKAEHQQVLERQNVQAEFVPSIKHLLEIYDTLEPVEKNKWLKQIIDRIVYEKNADGKYHNVDPGDFTSGILPRLPKKGS

SEQ ID NO: 23180 - protein, 543 aa, synthetic construct
MKKLKVAAYARVSTDKDDQANSLENQKQYFQSYILNHEDWDFVDVYFDEGISGTQTKKRLGFNKMIDDAENGSIDLIITKEVSRFARNTVDTLSYTRRLKDSGIGVIFTLDNIDTRQSDGEFRLTIMASIAQEESRKTSERVKWGQKRQMEKGVVFGRDLLGYTVKNGVLYINEEEVPVVRAIFHKYTNEGKGSHTIARELLEEGMKPKRISLWSNTIILKVLRNEKYVGDLLQKKTYTPNYLTHSKKYNHGQEEMIYLKDHHEAIIDRDLWNRTQEELRRRSPSAQQKAKHSNRYWCSGKIYCAECGSLFVGRTKRWKDGKQYKSWKCNASVNYMRAKQDEYGNPIKCHNNSINQKTLNFCMNYCISLMQTEQDSLKKEIITEISKVKEQSSYESKTKHIEEKIKQVEIKKRRLIDLALDNVISGQDLKTQTAWYNEEIESLQLQLNESLTEDKKHQAQIRDMESYVNELDKIMSINSADSELVYKEIVKHIDVHNDKILDVWLKPLPFGIQLKVKTTGRRENYMTEILEYSYIKPEIKGTI

SEQ ID NO: 23181 - protein, 497 aa, synthetic construct
MKAAIYARFSSHNQREESIEGQVRACKRFAKEHGMTVIEIYADRGLSGLHADNRPEFQRMIQDSDHHRFEALIMWNLDRFSRDKYDTAVYKTRLKKNGVSLYYSDQSIPDTPEGIILESLLEGFAQYYSANLARNAKRGLQENARKCLWNGGCVPLGYLIDEHQRFVLEPIGAACVRMIFELYASGQSIKSIVCTLNEKGYKTVKGNRFRLGSIQGILRNRKYIGEYHASGITVPNGIPAIVDVQLFNDVQARLGVVASAKAHNKADIPYLLTTKVFCGHCGSPMIGESGTGKGGATYRYYKCSCRKNRKGTCDKKTEPKDWLEENVVRQTVKNVLRPEVIKEISENCAAALKADASDESLVQALKAQLAETDKGLRNLLKAIEAGIISSTTRERMAELESQKSELEAQIAREQLRKPEITAEQISFWLESFLAGDIHDPKYQERIINALVRRVDVYDDGPEKQKLTIFYNITKNNHSSSKISISKCSDIECIALPE

SEQ ID NO: 23182 - protein, 445 aa, synthetic construct
MKNKRVALYIRVSTEEQARQGLSLDAQLTDLRTYADKHNYKIVGVYTDDGASARKKPFSRRAFKQLIEDIKQNKIDRVLFIKLDRWFRSVKDYYKAQEILDTHNVDWETTQEDYNTTTTNGRLMLNIKLSIAQNESDMTSDRINFVFAQKRARHEICSGKIPFGYESQNKRLVPNENAKYVQPLFEHFVKTQNLTEAARWMCSHGFYYTYASISHVLKNERYIGRSRGDDEFCKPIVTEEIFYKAQKIIRSKKLIKRTPTGRAFLFTSLIRCPVCGHPYNGVGCVGKCNGKTYYYYRCPHGSSPFKACTNHKRLKEYVIEEALLNSFDEAYKNFRHSVNQKQKTAIVTSDVDKMKRKLNRLKELFLNELIDLDEYKRTHEELTTAIAEAETPKTQASAQFNYYLPDGIRPYYEKMTREQRRQFWHQTVDRIDIDEDDMPRITFIS

SEQ ID NO: 23183 - protein, 510 aa, synthetic construct
MPTDYALYLRKSRADLEAEAHGEGDTLARHEHILMELAKSRALPIGAIYREIVSGERIANRPVMQQLLSEVEDGRWKGVLVTETSRLARGDTIDQGIVAQAFKFSGTLIVTPAKTYDPTQEADEEWMEFGLFMSRQEYRMIRRRMNAGTKSAKKEGRYVGSRAPYGYERCKLHGRGWSIRPIEPESVVVKMIYELFLSGKGAGEIATYLNQINIPSPTQRTWVRQTVGLILQNPHYAGLIPDAVHPYKKVIKDGQLTVKRPLNKQCELYEGVHEAIIPRETWEETQRLLTKNHKPRVPSALQQHNPLAGLLYCDKCGQKMQRHPQTDRNFEKYYCPTVGCPTVSAPLSQVEALVLQGLKEFLYNLEMQQPEQPDFTTEQNALKNIDSRLVEQRKRLTKTFELVEDGIYTREAFLQRQSEINAEISRLQTASEELQRKLDAHAAELSARENAAPQIQHVLDVYDRKSAPAERSALLKQVIDCIDYHKTTKQRWSAENDLSVTIHPKISARK

SEQ ID NO: 23184 - protein, 573 aa, synthetic construct
MAKVKLPDKPRVAIYTRVSTLHQIDKDSLPMQRQDLINYARLILNTEDYVVYEDAGYSGKNTDRPKFQEMMQQVRLGMFTHILVWKIDRISRNLLDFATMYSELKQLGVVFVSKNEQFDTSSAMGEAMLKIILIFAELERNMTSERVTAAMLSRAANGQWNGGRVPLGYDYDPETKTFTVNESEAAVVKIIHDKYEQERSLVSLARYLNGHGYRTRTGCTYSPSTLLIILRNVFYCGDYRYNVLKDGDRQKRKKESEWITVKDHHPAIISREQKEEIARILKENRRLECERRGIYSKKKNVHVFGGLVICGNCGHAMTSTIRPADQDGIRWSVYVCPTKRRSEYLCKGRATSEVVLGEFVFNYILNMLNVQKNFDSINSVEDMEKMLLSGSTFRDVDGIERAGLDDLYNMLASGLTEKAPFDSSVEVRKKPVVSDIELENLNTEKTRIERAAERLQNLYLYSDDSISQKDYIIQREKLMSQLAEVNEQIGMVMSNADEKDVSDEEFVHAASKFILTQKLEGRTYIYYKRLATTVSREVLRSFVMSIIENITIYDGRVQTIVFKNGLSHTFILK

SEQ ID NO: 23185 - protein, 502 aa, synthetic construct
MEIQIREGNREQKRKLRVCAYCRVSTDADEQENSLENQIRHYETVIKANPSYEYAGVYSDFAISGFKEKRPGLQKMLADAQKGKIDLILTKSVSRFARNTSIVLEATRKLKELNVGVFFELQNINTLSGEGELMLTILAAFAQAESESGSVGAKMVYQRKYEAGIPVQYLERSFGFKKDERGVYIADEEEAVWVRKIYDMAAQGYTLAAIKRYLNENNVKTVGGAKWLDSTVLRILENEIYKGDYIMHKYFVNEERKLVRNRGEVDAWYIEDDHEAIVSPELWQKAQDALEAKRDYLAEGSVIEEFTEENYPYMNKIFCARCGHPLYKRIYSNGNRLNWGCSGTKRYGKSFCEGINIPDGVLRGAWHFDENMYIGEKQTDKGKKEFNYLKEASWKRRHKKKEPEPIPENTETEYPYREKIFCGLCGSRLVRHVNTKNHKVIWVCNGRKRKGKDFCDGTRVPDTIIKGWGEIKKDIYIQRKDDKNGKKRYSYTSKKPKGADRA

SEQ ID NO: 23186 - protein, 509 aa, synthetic construct
MRGVIYARYSPGPRQTEQSIEGQVADCQQYAEEHGIDIIEIYADRKVSGKSVVGRDEFQRMLRDAEKGRFDCVLVWKIDRFGRDRQDIAMGKMTLKRAGVKLMYARESVPEGPEGIILESVLEGLAEYYSADLRQKVIRGMRETAKKGQYCGQSLPIGYKVDAERHIVVDEREAAVVREAFKLHIAGGQIRDIVQLFADRGVMGRRGKPVSNAVVYRMLRNEKYLGEFYIQDVKLNVEPIIDQATFLEAARHFKTSRNNAAGRAKVNYLLSCKMFCGYCGSMISAEAGTGKLGKVYRYYKCGDKKRGKACELKPFPKDHLEDAIILATVNDMLTDEMIEKLTVRILEVQEQENADDPVVGLRRRLDSNKKRQRNLLDAIEEGGARGLVSRLAALEEEEEQLVLEIQRAEIKRPRLTHEVVEAWLRSFRVGDVTDDDFRARLVDTFIARVELRNDEALIFYNIREKGPHSRVRVRPEWWSRRESNPCPKAYSLSFYECSLFFDIPSAPRE

SEQ ID NO: 23187 - protein, 547 aa, synthetic construct
MAKKKKPAGGNAIIYARYSSHNQRDVSIEQQIEACRKHAAELGLTVVATYEDRAISGRTDNRPAFQRMMRDAEDGKFSYVLAWKSNRMGRNMMQAMVNESRLMDCGVKVFYAEEDFDDSAAGRFALRSMMNVNQFYSDNLAEDVRRGLMDNASKCMANGKQPLGYKRGEDGKIVVDEPAAAIVREIYARVASGEMFMDIARDLNRRGVKTQSGSEWNKSSFNVLCRNERYRGIYIYGETRIEGGIPPIVDDVLWYKVQEVIKVKKSKNRHRRPSDEDYLLTGKLRCGKCGGYMIGMSGRSKTGDVHHYYACQNRRVGRTCDKKNIRRDVIEPAVAQAIKQYCLTDDAIEWITDQTIAYWEDEDRKLQIDSIENDLAAVQSSISNVMKAIEMGVVTETTRDRLIELEKQQTDLKSKLALAKEEIVHVDRKDLISSLLAFRHGNVHDRAYQEKLFNAFLIAVYVYDDDHLKLVFNSFGKDDTVNIAIGLEESNDSSGLLDVSKSSPILSNGQPEQSHLRKLRWLFCLYYSEPQPQGRDSSKPLWVIGNF

SEQ ID NO: 23188 - protein, 453 aa, synthetic construct
MECVAYIRVSTERQVEEGYGLESQKRDIEEYCKKNEMLITDWYIDAGLSGMDMSKRVELQRLISDVSKINNIVVYKLDRLARDSVDALYMIEKLFTPKGVRVNSVHDFARYETPQDKFQTHIMAAVAEYDRNTMLLRMRGGMLERVKNGYWMGGGNTPYCYQYDKNLGYLVPIPERAEQANRAMDLFIEGMSDVKIQRLLGYKSEFVVRNILTGVVNIGYIPYKGGTYKGLHESIFEHDKFYLAQELRKSRHKQHIYSFTEPHLLTGLCYCKTCGCKMRYQKITGMGVHKIYCCSHDKYLDYLPNYNADCDNPGAWASDIEKAFEHEILDISINLSQYKPKAKETKLQILTNQLEKQKSKLKRLYTLYAEGNDMVLDMIKTLETEIRETTEKISTERNNGQHEQKKEFVYENIKKLADIWDGISKSQKNSILKTIIDKVIVGKDDIEIQLKNF

SEQ ID NO: 23189 - protein, 532 aa, synthetic construct
MEKNKRVYCLYRVSTKGQVEKDDIPMQKQYCREFAESQGWTIIKEFAEKGVSGFKVAAADRDAIQEIRQDAEERKFDILLVFMFDRLGRRDDETPFVVEWFIRNGIEVWSAMEGQQKMDDHIDKLLNYIRYWQASGESLKTSARTKTRLSQIVQEGRFRGGIVPYGYRLEKQGRFNKKNHEVNEILIDPDEAAVVRIIFEKYVHEGFGAQRLSRWLYHNGYLNRKGTNFANTTIIKMLKNIMYVGILRSGETRSEIFPELQIVPLDLYERAQELMEARTMHHNEVPFNSKGKALLSGMVYCAHCGSKLMLTTSSGRRAKGEPKRETRIRYACHYKIRHPQDCDGQTGYSGEKLDGIVDKIVIRLFERMKTAPRSQLIQKQREKELQLANSSVANLEKLHAATERELESYKKEIIKTINGTGSFGADILGEMIEETRNKLLDLAQELEQAKAKAADLESSAVAIQKEYDKIMTWADLYAGSSIEGKKMILRQLIDRVNIGKNFEIEVELNISVIQFFDFLHPEGDRSVYYRAS

SEQ ID NO: 23190 - protein, 520 aa, synthetic construct
MKKITKIGTNEPLAEKKKLKVAAYCRVSTASDEQLISLEAQKAHYDSYIRSNDEWEYVGLYYDEGITGTKKDIRAGLLSMIADCEDGKIEFIITKSISRFARNTTDCLEMVRKLTDLGISIFFEKENINTGSMESELMLSILSSLAESESVSISENSKWSVQKRFQNGTFIIAYPPYGYENDNGTMVIVPEQAEVVKEIFAACLAGKGTHAIAKELNARGLKTKKNGKWGAGAVKAILNNEKYTGDVIFQKTYNDSSFNRHINYGERDRFLCENHHEPIISHEDFEKVRAVLDQRAMEKGNGTDTYRYQNRYCFSGKIKCGECGTTFKRRQHYKPSGNYVAWTCGKHLENKKECSMLYISDESIKLAFLTMMNKLTYSHQVILKPLLRTLRGMYDKDRLLRIQELDICIEGNTDRKQILTGLMATGVLEPAIFNKENAALVMEEQKLRAEKEKLVNFVGGDKTRIKELQKLMTFTYKGMMLTEFEDESFLAFVESITVESRTKIVFHLKCGLNLTERLVN

SEQ ID NO: 23191 - protein, 474 aa, synthetic construct
MKVGIYSRVSTQEQAREGYSIGEQVERLKNYCAAKGWILYKTYTDAGFSGANTDRPGMQQLISDVADGKIDMVLVYKLDRLSRSQKDTLFLIEDVFIKNNVNFASITENFDTSTPFGRAMIGILSVFAQLEREQFRERSIMGKDARAKEGLHHGGGAPTGYDYIDGQLIINKEEAELIKEAYRLFLEDDMTMMGIAAKLSVFSEKFKYDHRIRKMLTNPLYAGWTHCRDELYKGQHEAIISQEVFDNVQTKLKIRAENNPHYRNAFNRTSLLAGILWCKKCGARYFKRVRRYEKGSKVYYYNKYQCYSRSSYKNMVRDKSCKNKIWTMDVLDKAVIDEIKALVANPAEVDNIIKLNQSNNNITEKKEFYKKRIKEIEKQMNKITDLYSIDGIDIDFVAKKITALNTDKKRIETEMNAINEHKPLISAEDAKKRLSGISNILDNGEFTEKVKVITSLINRIEVDDDDIYIYWNFV

SEQ ID NO: 23192 - protein, 574 aa, synthetic construct
MVAISQSVWHFMKEVNMLQPNQKITALYCRLSRDDNLEGDSNSIQNQKLILQKYADENGFQNTRFYVDDGYSGANFNRPAFEQMMDDMSNGDIAVIITKDLSRLGRNQLHTGLYIEEIFPSNDVRYIAVNDNVDTKYENSNELMPFKNLFNEWHVRDCSRKVRNVVNAKAQRGVRVGTRAPYGYRKGETKDSPLLVDEEAATVVKRIFAMCASGMGPSQIAKQLKKEHIYSPSMYAYTKFGISHSGLNTERPYNWTSDMVADMLQNMVYLGHTVNLRYSTKSYKDKKKRERPRSEWLIFEHTHEALVDQETWDIVQEVRSHKRRRTNMEEQNMFSGLVYCADCGMPMVLHRAHTMKPEQNNFTCRTYKKDGSDVCSAHYVREVALKEIVLETIRRATEFARSDPERFAAYIQQKQSTEVAKEIRGLERELSTMRKRDGELDVVFKRMYEDSALGRVSNEQFRLLSGAYSKEKAQLAETIPATEERLEKLRSSMANAKNFIAKARKFTDMTELTPELLRTFVAKIIVYEKEVKYSKHAPQKIQICFRDFNLNETDDVILCGETTEKADSATALPA

SEQ ID NO: 23193 - protein, 493 aa, synthetic construct
MDNRIDAIYGRQSIDKKDSISIESQFEFCRYELKGGEGREYKDKGYSGKNIERPDFQRLLQDIKLGLIKRVIVYKLDRISRSIVDFAKLMELFKQYNVEFVSCTEKFDTSTPMGRAMLNICIVFAQLERESIQMRVQDAFYSRCTKGYYMRGRTPYGFDTEPIVMDGIKTKKLVENAEMDFAELMFQMYAEPGNSYGDITRYFVKHSIKVYDKALQRAFISKLLRNPVYVQADMDIYEYFKAQGVKIESTPEMFTGDNSCYLYQGREGEEQILVIAPHQGRITSQLWLTVQRKLSQNTSFQNGRKCHNTWLAGKIKCGRCGYALTALRAQNGVTYLRCKQRADNGSCEGAGTLTAQSMESFVYGEMVEKMRKYHTLKGGKEQGYNPKLTAARVALAKTESEIEKLLDTLSGANPLLLQYANNRIEELDTERQKQLKLVADLTANSVSDTQIDCITNYLNDWESVSFDDKRKVVDILISHIDATSESVTIHWKI

SEQ ID NO: 23194 - protein, 515 aa, synthetic construct
MQYLIYLRKSRADREAELRGEGETLARHEKALLELAKRQHLPIADIYREVVSGETIASRPMMQQLLSEVEQGIWNGVLVMEVERLARGDTIDQGIVAQAFKLSDTKIITPIKTYDPNNEFDEEYFEFGLFMSRREYKTIKRRLNNGRQASVKEGKYVGNRPPYGYERIKIENDKGFTLKPLEKEAQVVRMMFRWYAYGTHGISTIADQLNEMAIPSKTGKQWVYPTVRDILQNPVYVGKIRWGWRGQRKRVKNGSVSVSRPRSDDYLLADGIHPPIVVQQLFDQVQKKFSTHKPLPTSAREMKNPLAGLVICAKCGAKMQRRPYQRENIRTGLICPNNKCRNVSAPFDDVEQKLIEVLVEYIKEEKLRISNGHTQIDDSVLQILQNQLTDLQEETVDLNKQNDNIHDFLEKGIYDVDTFLQRSQKISSRITEIEEKQKTLQQDIIEENKRIESATSIIPMTEQLLLQYENMSALEKNSMLKEALRCVKYERECSIRDGGTADNFTLYLYPKISHK

SEQ ID NO: 23195 - protein, 573 aa, synthetic construct
MAKVKLPDKPRVAIYTRVSTLHQIDKDSLPMQRQDLINYARLILNTEDYVVYEDAGYSGKNTDRPKFQEMMQQVRLGMFTHILVWKIDRISRNLLDFATMYNELKQLGVVFVSKNEQFDTSSAMGEAMLKIILIFAELERNMTSERVTAAMLSRAANGQWNGGRVPLGYDYDPETKTFTINESEAAVVKIIHDKYEQERSLVSLARYLNGHGYRTRTGCTYSPSTLLIILRNVFYCGDYRYNVLKDGDRQKRKKESEWITVKDHHPAIISREQKDEIARILKENRRLECERRGIYSKKKNVHVFGGLVICGNCGHAMTSTIRPADQDGIRWSVYVCPTKRRSEYLCKGRATSEVVLGEFVFNYVLNMLNVQKNFDSINSVEDMEKMLLSGSTFRDVDGIERAGLDDLYNMLASGLTEKAPFDSTVEVRKKPVVSDIELENLNTEKTKIERAAERLQSLYLYSDDSISQKDYIIQREKLMSQLAEVNEQIGMVMSNADEKDVSDEEFVHAASKFILTQKLEGRTYIYYKRLATTVSREVLRSFVMSIIENITIYDGRVQTIVFKNGLSHTFILK

SEQ ID NO: 23196 - protein, 524 aa, synthetic construct
MKIGIYGRKSVFSDKSESIENQFKMGAEYAYANYDNPEIIYYKDEGESGSYLERPDFQNLLNDVIANNIDVLICYKLDRISRDVADFGAVYKLFMAHGIEIIPLRDNIIVNENMTPIEKAMMYMNAIFSQVERENTVIRVTDNMVELAKNGYWPGGRPPIGFSLQQVVVEGKKHTILSKQPEGMEFYNMLADTFLNGHTLSSLETYFRKIDVKTLNGSYLSSIQIYNILKSPFYAPADTNTYDYFASLGCKMIHSREEYNGEYGLIVYGRTSGGRKRKHVLNPPEKWIVSIGKHTPVISSDKWLAIQNRFGQNTINKTRKYNVGILNGILRCSCGALMKTKHKYDKQYDVHYFHYTCQNRQRRGPDYCTMPMISVDTIDSKVIEILKSIQLDRTLIDKYVVAPGAPLTYRSPESLTKEISIEEKKINNLTASLADAAGSTAAKYIIAEMENHDSRLNELKKELREVRLERQKERSRIIDKEEKYQAVCRIVNCLETASYEEINTLLQETLKECMYDGEVLHIKL

SEQ ID NO: 23197 - protein, 612 aa, synthetic construct
MRAAFLIRCSTKKQDYERQVNDLTRLAKKFGYTSSDNMIFGEHITGKDDASKRDRQSIQRLKDAAINKEFDVVLVSEVSRMSRDPMSGRLYVRQLINMDIPVYFRDIDTWTIDPVTGKKVRDAETIIGTAFDAAWKYIKSMKTQIASGRRDELDNNQMSIGQPFFGYKRYGGRDKGKKNSWVINDDAAKVVVDVFEEYVKDGATLKSTALAITAKYGEQFNKKFSIGTIEHILTFEPYCTGIKVVSLTDPDTEDVDEFEVEIPTIITRAMFDKATTKRATNRTARTPYPKQATYILSKLLKCPICEHSLTPQKRGGDKGDKYRLMNGKVAIRWSCMSGINNATDCSSRITISNEKLEAIIWGLVKQELIGFANLNDEDRVAKVEELTDKITNLEMNIANFTSHISNMDRLIERAYSAYMDAPDSVMDIAKDKYYKTLTKCENERAECKDKIEALSAEKLRLENMRTFFNQPTLPKDAIEKAESDPIKMRNLVMELIDKIYPYRITTYVSSATNRIMRNGIVLLEVYTINGIYNVLYDGNQRNNKVAYYISGVYATFQNGRNKFDAYDTGEYFVISHATLVTETEDVDMLVTFNELIKICMQNGWEIDYTYKM

SEQ ID NO: 23198 - protein, 558 aa, synthetic construct
MTLCLLTHPVYHTSCASASKSARSFYGQKKESTQPRLVAYYRYSGGSRQTEQSIEGQRRDCEAYARAHGMTILREYVDRHISGKTDDRAQFRQMIDDSAKHTFDLVICWKTDRFARNRHDSAVYKKQLRDNGVSVIYAAESNIEGAEGIIIEGLMEALAEYYSAELAEKARRGMRESALKGQTLGRTPPLGLTVDSTKHYVIDPAGADTVRLIFELYASGLSIASIIRRLNGMGLRTVRGNPFDKSSISRISRDERYRGVYVSKKFDVRIEGAIPPIIDDDLWERTQKVINLNRQSRAPHSAKADYILSGKLYCGECGCLMKGICGHNPSGRVYHYYSCPGRSLGRPCTRKNMPKDVLEKLVVESTSNLLLRPENIQQLADAIVSLQQAEASRPDPERAALEQALAEIRRKIGNILSAIENGTASAALTSRLSDLEQQESALDHQLASLSTPEPFTLSRDEVIFLLEQFRVSPSERTNAYCRRLVDTFVDKVELTNRELIIHFNISKSTENKNSQSNNGCSTGKRLVGDERIELPQVESESTALPLCKSPISCCVSRR

SEQ ID NO: 23199 - protein, 523 aa, synthetic construct
MNENVCIYLRKSRADQEAELRGEGETLARHERILLDLAKSRNYSVGAIYREIVSGETISARPVMQQLLREVEAGSWDGVLVVEVERLARGDTIDQGVVSRAFQFSDTKIITPTKTYDPDNEFDEEYFEFGLFMSRREYKTIKRRLNAGRIASVKEGKYCGSKPPYGYERVKLHGEKGFTLQPVPDQAEVIKMIYSLYSGAFGDRIGVSKIVRKLNDMGIKSPSGKDWVPISVQDVLANPVYAGMIRWNGRKTVRAIQDGVVTQSRPRSKEDDILLFPGRHPAIVSKEMYDSVQQIRKKNPPRPISIKNTIKNPLAGIVYCSKCGRAMVRRPYQKRGQDDTLMCSYTSCPTVSSKLSLVERAVLNGIQDLVDEYRLNDTVPGPDINNAVKSKEKLIAEKEHELEKLNVQKMKQYDLLEQGIYTTEVFLERSNSIASSINSCQDSIECLKEEIRHDKELIDQRSSFIPRCENLLEIYWSLDTAAKNKMLKELIERVNYTKDVKNAFRMGNEATFVLDIFPRIQSN

SEQ ID NO: 23200 - protein, 580 aa, synthetic construct
MAKCILLVRVSTDSKKQELSLREQESELFELALSKGYVEEDIIAICKQESALKRRYAKTSEEKDAIEIKQQGLQEMEDMIKNDSSINCVFAWEISRISRREKVLFDELEFLTDRKIQLIIAKPFIELLNSDGSLNPSSKMQFSMFAALADAEMRNKLDRFQRTKESRRKEGKYVGGWLPFGYMVEPSTKKIIINEEEAAIVKYMFNEYLKGKTSIYKLADELQERGIIDYDNRHSAFTFAYTILKNYAYAGLQSTVRQKGRKASTNLYPAIVTKEMIDKAIEMSEQAKTKPKTNVKNIYYCKSLLKCADCGRIYVARLNKAVYQCTNDNGKCNNAEISINLADTILWNFAMTLKISQMLHQSEEDKTAYQTQIEVLKQKIEKINIDIENNNKAYTLLNKRIIMQKITEEDGELIEKELDSTKKGLEKKLNEYNNKVAEIEQILFNMNTSIAFNHINIDDIADIEDDNLRYEIIHEMIDYCLIKKVADSIIKLELYAKHIDTAYNYYVTTRNRKIYNKDFRIEEAYTSDNTHLVDFKILQRYKRQAKANKEYQKQYYEKNREKLIKQNVEAKRRRKSKPEN

SEQ ID NO: 23201 - protein, 521 aa, synthetic construct
MKKITKIDGVQNNSTIKKELRVAAYCRVSTGSDAQLESLEAQKTHYERYINSRKDWKFAGLYFDEGITGTKAEKRPELLRLIADCEAKKIDFVITKSISRFSRNTTDCLALVRKLQSLNIPIFFEKENINTGSMESELFLAILSSMAEGESASISENSKWSIKRRFQNGTFKLSYTPYGYDWDGENMIISPAQAAVVKRIFTDILSGKSTNAIADELNAEKIPSKKNTNWTSSTIRGILANEKYTGDVIFQKTYTDENFNRHTNYGEVDQYMASDHHEAIISHADFDAANALVSQHALEKGVKKGSDKYQKRYAFSGKIICGECGDTFKRRIHTCTTYKYVAWACNTHLKDKSTCRMKYVRDNDIKAAFVTMLNKLIYGQRLVLVPYLKALENSSGDEALQRIQHLELLLDQNNEQRETLTKLMAQGYIDQILYNQETNALLLQAETYRSDIEAITICMTGDSAKVTETNLLLHFVSHADMLTNYSEELFESYADHIEISDRNEIKFVMKCGLTFTERIGD

SEQ ID NO: 23202 - protein, 567 aa, synthetic construct
MSEDKRIVALYVRVSTGYQVDKDSLPFQKKELKAYCEHVLHIDKKRIEIFEDAGKSGKNTKRPAFERMMEKVKHGQVSHVIVYKIDRISRNLVDFSLMYDDFKYNKVTFISLNEQFDTSSAIGEAILKIILVFAELERKLTSERVTDVMIGRAQSGLWNGARVPYGWDWDDENKCPVHSKTEAKYVKQMYEDYLNGGSSVSIAKSYNANKIPTKRGGEWTSKTIADVIRNPMNKGDYRYNYRESARGRKKPQEEVIYIKGIFEPLVSINDWEKANKLMDGRGLKMNSSGQTIMNKRCNVFTGLIFCGKCGERYNVRSKDSRQGSGFRPSSYACGKRSRKGTCDNQNVSDVAIAPIIINYIAAMADIAKHKRHIKTTKELEQMILKRISFSDIVGISEDSLKDTLDLLYGKNGTQLWSANTVSQEDKSENKQKLTELQAKLEKTERAIERLKKAFLFDDDGLDEKEFLEMKSALEIDRVKIENEIKGMETESISVNVNQVEFIKTASQYLLMHELNKDEIINYKELAIADEDSIKNLFNSVLDHITVIDKHITEIVFKNGLTHKLLYK

SEQ ID NO: 23203 - protein, 550 aa, synthetic construct
MPRKPAKHPAKPKRGKKLEIEEPGVLYGRYSSHNQKDISVEQQFEKGYELAAEYGIRIIDTYADRAVSGRTDKRRDFQRMMTDAAKGKFRYVIAWKSNRMGRNMLEALINEARLQDMGVRVLYVEEDFDDTAAGRFAARSMMNVNQFYSENMAEDIKRGLYDNAANCMVANGHLPYGYKADETLHYAIDEPKAAVIREIFTRVSCGEAFVDIMASLNARGIKTSYGRPWGRSSFQKILSNERYRGIYIYGDVRKEGGIPRIISDELYFKVQEVITTKKNPQGRHRVNGDYLLTGKLFCGHCKSPMTGVSGTGRSGNLHYYYVCQKRRTEKTCDKKNVRRDEIELQVAQAIKDYALKDDVIEWIADSTVAYNERKEAESKVGILEDQLAGTEHGIKNIMSAIEQGIITETTKSRLVELESERAAIKANIAAARADIVTVSRDDIISGLEMFRDGDVHDKKYQARLFDTFLVAVYAYDDDLRLVFSFSGNKNTIQIPIESAVNAVENNEAECSFKLCSAPPIERRLCLRSIFFCPQYSPHGFSGWARESGTG

SEQ ID NO: 23204 - protein, 529 aa, synthetic construct
MSKYCIYLRKSRADLEAEAHGEGETLSRHKTALLELARRMGIKISATYEEIVSGETIAARPQMQRLLSEVGAGEWDGVLVMEIERLARGDTMDQGLVAQTFKYSGTKIITPLKTFDPQNEFDEEYFEFGLFMARREFTTTNRRLVRGREASAKEGKYVGSVPPYGYRKVKIPNDKGFTLEIVEEQAKVVRMIFEWYAEGAEVNSQKKRIGPYTIAVRLNELGIKSAGKKDYWTIYGVQNMLINPVYIGKIRWGYRKVKKTVTPEGMKKKSREFAQDGDYIVVDGLHEPILSEELFYKVQDLIAANPPTPIKYRHKNINPFAGLIFCAKCGHCMNYRRGYGRQPDYIGCYTAGCKNKASRFDLVEQRVLSILNSWVKDYSVDKAQIKHEADLNAELSNAISLAEKEIETLQDQLDKVYSFFERGTYTEKIFKQRSSAIEQQIMEIGEKIDRLKAEHQQVLERQNVQAEFVPSIKHLLEIYDTLEPVEKNKWLKQIIDRIVYEKNADGKYHNVDPGDFTIGILPRLPKKGN

SEQ ID NO: 23205 - protein, 554 aa, synthetic construct
MEKSKRVVGYARVSTEAQDITRQVELITAYCTERNYHLIKIIQEKISGARKDRKSINELLEVDDTVADMIIVSELSRLSREDDILSVLSTINELLKQGVDILFLDKQDRIYKAGTVLSLYDIITLSVEAKASADERYKIAGRMQTGLRSKLSEFTNMFTGGTVPFGYKVIHNPDYKLNLTPKNLLVVDAQEAEAVKYLFQQLIDGNTIRQTVRVYNKLYPYKLSYSGICRIIRNPKYKGEIYRRGKLYGTIPELQIITPEVFDKANKQMRENNLFQSNAPKYYNPLKGLIFCPCGCSLYMKPNHNSYLIYRCSSSYNDKQRCENFGIKCSYVLSAVWTCVKETLHTEEYKRFNTERANELQGINKQIRETITRKVNNVDELKTQSASLIAKIKKLNNDDLINELETDYNVLCKQIKQIEQEISELNGQIAENDAEIKRSVEQKDFSEMEQSALYKEKLQKVVYHSLSAMRGILEIVFKNGMIRYVLIKKHRNGGVFLLPEFWTVDISRAVIIVPTHPSVDPEHPYTLLPTIPREYTFDTIITERDMDEYRITVS

SEQ ID NO: 23206 - protein, 580 aa, synthetic construct
MVRRKTALRGVSASTRITKVAIYIRVSTIHQVDKDSIPMQKKDLIAYCQLILGTDNYEIFEDAGYSGKNTDRPAFQDMMGRIRKGEFTHVLVWKIDRISRNLLDFAEMYEELQSLRVTFVSKNEQFDTSTAIGEAMLKIVLVFAELERNMTSERVTATMISRANNGQWNGGRIPFGYSYDSGTSTFSIREDEAVVCRRLKDLYLDNKSLVYTARALNADGYKTRAGADWTPTAVWIIASSPFYAGIYRYNRYKGTENRTLNPEEEWVMIPEHHPAIFTLEEHEAMKSSLKTNARYVDNPVGKPHATANIHIFQGIAYCGKCGNKMVSTPGKKHADGYRPSNYSCPLHRRSKKCDNATVNDMIVGEFAINYILNMLNAKKTFSNIDTPEELQRHLLIGSTFSDISSIEEDGLNDFFNLLSRYGSDNSYVFAIKTPRRKKASVNPELAALRKEKEKQERALQRLQDLYLYSDKSMSEKDFILRKSEISDRLKNINAQLGLITQNPDSLLSDEEFIKQASHLLIQKELKGRKYIYYKNLATSVDPEILRTYMETILDSVYITDGHVSSIVFKNGLTHKFIYKN

SEQ ID NO: 23207 - protein, 510 aa, synthetic construct
MSYFIYARKSRKDADLEALGINVLERHITTLLELAKTLSLPIGAIYREVVSGDSIDSRPVMSQVMAEVESCMWDGCLVMDVDRLARGDTIDQGRVQRAFFYSNTKIVTPNKTYDPANEYDNEYFEFSLFMSRREYATIKRRMQRGRERSSSDGYYVGNIPPYGWRRVIAPDGKHFSLAPDPTESPVLDLMYDLCGNKQYGYQKACTHMAEMGILSRSGRPFTPSTLKGIISNPANIGKVRWGHRKTVRTVKDGKISRSRPHSSDYILADAVWPPRISADLFQRANQPKGSCSAPVRDDRPIQNIFAGLVRCSQCGRLMVRKKAHTKTPYDILICQYTECPTVGIRIDELELALLEWLRNYIDKYELTDALPEDVENVAAKEAIVKNFEKEHETLLKQRESLFDFLEQGIYTKEIFIERSNALERRVKECMEHIISAQNDLHATLALQANRKNFVPRCKNLLGEWGRLTIPEKNSALKVLIEKIMFTKTKRNKKGQDRSDFEIDVFPKVPK

SEQ ID NO: 23208 - protein, 514 aa, synthetic construct
MRRKKVKGGNRLVAYYRYSGGSGQTEQSIEGQRRDCENYAKLHGLTIVHEYIDRHISGKTDDRAAFQQMMNDGDKGAFDMVICWKTDRFARNRYDSAVYKKRLRDNGIEILYAAESNVEGAEGIIIEGLMEALAEYYSAELAEKMRRGMRESALKGHAINRCRSLGLTTDENKKYVIDEKTAPTVRFIFEHYAAGESSTSIVDQLNAKALRTSQGNLFNKCSIPRIIQNEMYRGVYTSKAYNVRIEGAIPAIIDDDLWKRAQAMMKTNRQLKAKYEPKAEYLLSGKLFCAKCGCTMKGVSGHSGGNDEVYRYYACSNPQCRKRNIPKDDLEGKVIRSICDHLLQPETMELLAETMVDVQKADMEKPNAERDVLEQELWDVRRRSKNIMDAIETGSANPQLVARLDDLTQQENTLTYQLSTMEAEKPLLFTKEQYLFLLQQFYAQPTEQDDAYKRRLINTFVTNIEVSDSELLIYFNISEETENKNKNAPQLNFDKSSSTEKRLVRVARIELTAS

SEQ ID NO: 23209 - protein, 537 aa, synthetic construct
MQEKLRVAAYARVSTDKDDQTNSLENQKTYFKNYILDHEDWQLAEVYYDEGISGTQTKKRQGFRHMIEDAENKEIDLIVTKEVSRFARNTVDTLSYTRKLKDFGVGVIFTLDNIDTRDSDGEFRLTIMASIAQEESRKISERVKWGQKRQMEKGVVFGRDLLGYTVHHGVLAINQEEAPIIKAIFHMYTNEGKGTHVIARELSENGMRPKRVHQWSNTVILKILRNEKYVGDLCQKKTFTPNYLTHTKKYNHGEEDTVYLKDHHEAIIDRDLWERTQNELERRSPSADQKSKHSNRYWCSGKLFCAECGNRFVSRTKRLKNGEQYKAWRCHATAAHGTLKEDADGNSIGCNNNSINDKALQACMSYCISLIQSEKDSLREEILSEIALVQKNTVKKTDTKRIKKKIEQLEIKKRKAIDLMLDELISKEDLQAQTDWYNTEIKKLNIQLSDSLHEAKEESRQKNKLEKYIAALDNIMSADSNNELLYKEVLDHIDIHKDNILTIWLKCIPFGIQLKIKTSGRQSCFKTDILETTFIQI

SEQ ID NO: 23210 - protein, 572 aa, synthetic construct
MASRIAEKLAAKKAAIYIRVSTHWQVDKDSLKVQRRELIAYVTLVLGITDYVVFEDPGYSAKNTDRPEYQAMMDRIRTGEFTHLVVWKIDRISRNLIDFAAMHDELQSLGVTFVSKNEQFDTSSAIGEAMMRIILIFAELERKTTAERVTAVMLSRASDGQWNGGRVPFGYSWSKETKTFSIVPEEAKAIRRMAELYEQYQSLLYVAKYLNDAGIVTKTGGQWTPTTVRTILTNPWYIGQYVYNVHSDGKGIEKRDSDEWITVENHHEPILNDDVFYRMKFLLTRNKRGGVPSHKTYVRKNIHVFAGLLRCGQCGSNMTANLDRRRANGFRPSQYACGSRRRKGTSCTNKYISDTTLGPFVLNYVANIIRASKNFSETTTPEVLERKLLRGEAFEDVASVSTDALGQLLDAFRSAGDAVEYRPQIAFSGDDNSIREIDTLRARRRKLDNALARLNALYLYDDEAMPEKDFVMQRGQITKQLEEVNARIEELQSQESSEELGDDFIGKASYYIMANKLIEDRYIDYEKYIRAIDPSIPRSFLQQIIDHIVVNDGRVISITFKNGSTHTFTYKT

SEQ ID NO: 23211 - protein, 464 aa, synthetic construct
MQEKILRCAIYIRVSTFEQSVHGKSLQAQKECLKQYAADHNMAVVGIYADEGKTARKELKKRKAIHALVEDVKKDRIDVILFWRLDRWFRNLSDFYKVQDVLDAHGVRWISVSEPGINMETRDGRLQLNVVLSIGQNEVDTTSERIKFVNESSIRQKKLIFGDANMPFGYKTGVVDGKKCMVKDPETEHMVEDFFKYFKSHNSKKGAVRYMQEAYGIDFSYGMLRTMLSSEFYKGTYRGYPYCPAYLSEKEWNEMQIISKRNIKNTPSGRIYLFTGLMRCPVCGQKLVGTGCSSIIDRKTREKRTYCYYRCNRALKDHICTYRHRVSQNLIEKYLLENLEREYEKYKVRSNKISEELKKQKKAKDPKKLRKEMERLNILFQKGRISYDYYDKEYQRLEREYSASAAFCEEEETRNLHYVEELLKTDFRQMYDSLSPENRRSFWRSTIQEIYLNDDNTIKAVDFL

SEQ ID NO: 23212 - protein, 520 aa, synthetic construct
MKRITKIEENNALSVKTKTRVAAYCRVSTASDEQLISLDTQKAHYEDYIKSNSEWEYAGVFFDEGITGTKKECRDGLNSLIDSCEKGLVDLVITKSISRFSRNTTDCLELVRKLMALNVTVIFEKENINTDTMESELMLSILSSLAESESVSISENNKWSIQKRFQNGTYIISYPPYGYENIGGEMIVVPEQAEIVKNIFEDTLGGKSTHVIAKELNDSGVTSKKGGKWTPGAINAVIRNEKFTGDVIFQKTYTDSQFSRHTNDGELNQYLCENHHEPIVSHEIFEKANEVLNQRGKEKGNGERTERYQNRYGFSGRIKCGQCGGVFKRRSHYKPSGSYIAWCCTHHIEDRYSCSMKYITDDGIKAAFLTMMNKLVFAHQRILKPLLHSLQGFDDKNRLLQIQEYETKLEKNMEQRQVLTSVMASGLLEPALFSKKITALILEEKQLQEGNKQMINTVSGDRTKIEALEKLMKFVLGSEMLTEYSDEIFLSHVEGIIVLSREEIVFELKCGLKLKERLVG

SEQ ID NO: 23213 - protein, 464 aa, synthetic construct
MARSVTVIPARSQKVQTGHKAVQEKKIRVAAYCRVSTDQEDQLHSFEAQVEYYTKYINEHENYEMAGIYADEGISGTNTKKREQFKKMIADCEGGKIDLVITKSISRFARNTQDCLAYSRKLKNLGIGIIFEKENINTLDSTGELLFTILSSLAQDESRNISENCKWGIRTKFKNGEMHLNTFKFLGYDKDENGKLVINKEQAKTVRRIYRDFLIGINPAQIAKELTEEKVPGCLGQTKWYPSTVTGILKQEKHMGDALLQKTYTADFLTKRQVRNNGEIAQVYVKDSHKGIIDKQTWNAVQEEFDRRERFMESHGTDRYSYGADCMPFCEKVFCGECKSLFTRHSWRSRGIVQWQCKNHRKDGKVACTNAYVDNADLEKGFVKAFNRLVADREKFMERWNQMKTDGSSLEKIRAEQMMEATGNDPLGRFVPEIAQLVLAEVTVLGAKKYEFFFLEGSRIKVSV

SEQ ID NO: 23214 - protein, 502 aa, synthetic construct
MEIQITEGNSRQKRKLKVCAYCRVSTDADEQENSLENQIRHYKEVITSNPDYEYAGVYSDFAISGFKEKRPGLQKMLADARKGKIDLILTKSVSRFARNTSIVLEATRKLKELNVGVFFELQNINTLSGEGELMLTILAAFAQAESESGSVGAKMVYQRKYEAGIPVQYLERSFGFKKDERGVYIADEEEAVWVRKIYEMAADGYTPASIKRYLNENGVKTIGGAEWIDSTVLRLIENEIYKGDYIMHKHFVNEERKLVRNRGEVDAWYIEDDHEAIVSPELWQKAQDALEAKRDYLAESSVIEEFTEENYPYMNKIFCARCGHPLYKRIYSNGNRLNWGCSGTKRYGKSFCEGINIPDGVLRGAWNFDENMYIGEKPTDKGKKEFTYLKEASWKRRHKKKEPEPIPENTETEYPYREKIFCGLCGSRLVRHVNTKSHKVIWVCNGRKRKGKDFCDGTRVPDTIIKGWGEIKKDIYIQRKDDKNGKKRYSYTSKKPKGADRA

SEQ ID NO: 23215 - protein, 549 aa, synthetic construct
MCAKKKPAMLEPDMQDAVIYTRYSSHNQRDCSIEQQVADCEIFARQNNLRVVKVYADRHLSGTTDNRPQFQQMLKDASHGHWAYVICWKIDRFARNRYDSATYKFRLKKAGVRVLYAKESIPDGPEGILLESVLEGSAEYYSAALAQNIRRGMKFNAEQCKVNSGSIPFGYCKGPDGRFAVHEANAEVVREIFRKAAAGMPFVDIANDLNSRGLKTSRGGRWNKGSFRLLMNEAYIGVYHFSDTRIEGGMPALIDQGTFWAANERLKANSSVRGRHQDGGDYLLTGKLKCAHCGSYMIGFSGTGKSGELHYYYGCQKRRRERACKKANVPREWIERVVVKAALDYVLRPEVMEWIADAVMEYQEREAASAQLAALTAELEENRKATDNVMKAIEAGIITSTTKQRLLDLEAKAQDLKRAIELEKLSHVRLERDQILFWLDRFRGGSLQSQEFRRKVIDAFVSVVYLFDDHLRIAFNYSGGSNAEADFDLVMDAEAAAGELSKKFAQGHVASTKQEPDEPCIFVLCSANREEPRCFAVRLFFFLYYIIIP

SEQ ID NO: 23216 - protein, 494 aa, synthetic construct
MVAIYARQSIDKKDSISIESQIAFAKREIFSEECKIYEDSGYSGKNTNRPAFTEMMHDIQTGQIEKVVVYRLDRISRSIVDFADFIDVLENNGISFVSATEKFDTSTPMGRAMLYIIVVFAQLERETIAERVRDNYYARVKKGAWGGGPAAYGFDLVRTTLDGKKATIYEPNADLEIVSQIFDTYAQPYTSLADVQKVLIRSGTLSAGGVNFDSVKLSGILKNPAYVQADIAIYNYYKSKGAIMANEPEDFDGAHGCILVGKRDASERKYKDVSNHLLAIGHHNGIVDSSTFLYCQEKLSKNRQIKNSGKGKHSWLTGLVKCGHCGYAFSVRFASTKDGRIPYFVCSGKYLHKCCDAKQTHRVREIEAQVQARLIQEAEAYHLAREKRENNVIKQHQQKIADIDSKIENLISTLENVSQISTEYINRRIETLHREKQLLIHQYSEALTEFNAVEIIPFTAEDWENMSFEDRRDIAKSMIDRVVLSEDGVDVRFK

SEQ ID NO: 23217 - protein, 529 aa, synthetic construct
MSRTAARSVTVIPPTINPLTHLSRVAVQKRRVAGYARVSTDSDEQFTSYEAQLDYYTQYIKRNPEWEFVKVYTDEGISGTNTKHRIGFNEMIADAMSGKIDLIVTKSVSRFARNTVDSLVTIRKLKEKGVEVYFEKENIYTFDGKGELLLTIMSSLAQEESRSISENVTWGQRKRFADGKVNLPYKQFLGYRKGADGFPEVVPDEAIVVRRIYTRFMEGLTPGAIAKELTADGIPTPSRKQRWQTSTVESILQNEKYKGAALLQKCFTVDFLTKKRKVNEGEVPQYYVEHSHEPIITPEEFDKVQTELARRKRISRQYSGKSIFSSRIVCGDCGSYFGSKVWNSTSKYRRVIWQCNGKFKGEHKCETPHLDEETIKARFVTALNTIIESKDNILEDCRLMQATLTDCTSIDTEIESLLEEIEVVTELTKRCIAENSQMAQNQEEYAARYNGFVERYEKAKARLEQLRSTKAAREAQAEAIGAFMFEVQELDALTEFDEKLWLTVIDTVTVHADGRMTFKFQGGKTLTSY

SEQ ID NO: 23218 - protein, 503 aa, synthetic construct
MTAVIYARYSSDSQREASIEGQLRDCKDYAEKNGITVVGTYIDRAYSAKTDDRPDFQRMIKDSAKKIFDVVLVWKLDRFARNRFDAVNYKYQLEKNGVHLVSAMEPISQGPEGIMVESMLIGMAEYYSAELALKVARGERENALQCKYNGGIVPLGFTIGKEDRLYHIDPETAPIVQEIFTRYANGEPAEKIAASLNERGLRTRTGKPFVKNSFFQIFRNRRYIGEYRYKDIVTPGGIPAIVDEDLFDRVQQRFEQNRIAHGRPAKEDVSYLLTTKLFCGKCGTLMGGESGTSHMGNTYYYYKCGNAKRHGKAHCDLKAIRKEPLERFVVETAIKVIFSDEIIEQLIDLVMEAQQQENTRLPVLKEQLRDTEKRLANLLEAIEQGILTPTTKQRLDELEARKEALNTSILEEELKKPVLTREWMRFWFEKFRKGDMRDMEHQRQIIDTFVNSVYVFDDRVVLNFNFTDDSKTVTREEVLGSSAVENAPPQILKPNGLGIFCLL

SEQ ID NO: 23219 - protein, 530 aa, synthetic construct
MEQYLIYLRKSRSDLEAEAHGEGETLSRHEHTLLELAKRQHLNVTDIYREVVSGDTIAARPMMQRVLSEVEQGVWSGVLVMEVERLARGDTIDQGIIAQTFKFSGTKIITPIKTYDPDNEFDEEYFEFGLFMSRREYKIINRRLQRGRLASAKEGKWPSGLAPFGYRRVKLKNEKGCSLEPIEEQAAIVRMIFDLYTVGLQDEDGSARPLSLGSIATRLNDMHIPSPSGSQWARITIRGIIKNPTYIGMVRWGSRETKKKVVDGKVVSVRGPADPEKECVFKGIHPPLVPKETFELANDKLTRSENTSTHKEKVVRNPLAGLLVCSECGRQMMRMINPVHPDMPVVRCPRRGCPNCSSYLPIVEERVIQGLSEWMKGYELEWSSAAASSSVSSVGVREKALASAETELRKLQQQLERTHDFLEQGIYDTDTFLSRSRMLSDKIAAAKDSVTRCSRELTEEKLRETSRRDIIPKVKNLLDVYPLLETAEEKNALLKEVLEKVVYQKLNEKRKKSPDGFTIEIYPRIPKSEK

SEQ ID NO: 23220 - protein, 547 aa, synthetic construct
MALLPKKTAKHPAKPKRGKKLEIEEPGVLYGRYSSHNQKDISIEQQFEKCYELAAEYGIRIIDTYADRAVSGRTDKRVDFQRMMADAAKGKFCYVLAWKSNRIGRNMLEALVNEARFQELGVRVLYVEEDFDDTAAGRFAARSMMNVNQFYSENMAEDIKRGLYDNAANCMVTNGHLPYGYKADETLHYAIDEPKAEVIREIFTRVSCGEAFVDIMASLNDRGITTSYGRPWGRSSFQKILSNERYRGIYIYGDVRIEGGIPRIVSDELYFKVQEAITTKKNPQGRHRVNGDYLLTGKLFCGHCKSPMTGISGTGRAGKLHFYYVCQKRRTEKTCHKKNVRRDVIELKIAKAIRDYALKDDIIEWIADSCVEDHDRRVSESHLSVFEDQLAEVNRSIKNVMSAIEKGIITETTKGRLMELEAERTAIEGKICAAKAAIVPTNRERLVEWLRSLREGDVHDKKYQAGLFDTFLVAAYLYDDNRVKIVFSFAGDKNTIEIPLEDVIDSIDDEASCVRLSSTLSHQIKNPNLCPKGQRFGFFYFPKDSAF

SEQ ID NO: 23221 - protein, 628 aa, synthetic construct
MKAAFLIRCSTKNQDLNRQTRDLTRLAKSMGYEYDLENLVYGEKITGKDDVTKKNRDSIDRLLRAAKEQRFDVVLVSEVSRMSRDPASGRIYVRLLINMNIPVYFKDIDLWTINPETGKKVRDAELVIGAAFDAAWKYLKSMKTQIASARRNELDNNRISIGQPYFGYKRYEGIDKSKKNQIVVNEEEAEVVQAVYNEYLKEGATLKSTALAITDKYGEKLNRKFSLGTIEHILTYESYATGIKKVNLKDPDTDEVEVFDVSTPIIIDKELYEAAANKRKNNRVKDEPYPNQQVYLLSKLIKCPDCGYTLTPRRKAGEFGQTYRLVNGKPAVSWLCMSGINNITDCTNRTSIANEKLEPIIWELVKKELIGYANMNDEKRGEQIRECEEKIEYQNYSIQNFTKEIEKLKKRLSTAYQFSINAAEMAGDDEDMRTMAMEEFNRTAKGVRQEMKNFEKSIEQAKGELEKLRDLKTFYSQPTLPKDYLEQIEGNFTEKRNLVKQLITKIVPYRIITFKKKERESGVKTCNKMITVKNGAVLLEVYTIGGVYNVFYNANSKFQVKTAYYVHGEYATFQNGIRKYPAYDEGEYFVISNANMVMETDDIDEVVTVNEFVDIAIANNWVIEYQYI

SEQ ID NO: 23222 - protein, 612 aa, synthetic construct
MRAAFLIRCSTKKQDYERQVNDLTRLAKKFGYTSNDNLIFGEHITGKDDASKRDRQSIQHLKDAAINKEFDVVLVSEVSRMSRDPMSGRLYVRQLINMDIPVYFRDIDTWTIDPVTGKKVRDAETIIGAAFDAAWKYIKSMKTQIASGRRDELDNNQMSIGQPFFGYKRYGGRDKGKKNSWVINDDAAKVVVDVFEEYVKDGATLKSTALAITAKYGEQFNKKFSIGTIEHILTFEPYCTGIKVVSLTDPDTEDVDEFRVEIPIIITRAMFDKAATKRATNRVTKIPYSKQATYVLSKLLKCHICGHTLTPRKRSGDKGEKYRLMNGKVALTWLCMSGINNATDCSSRITISNEKLEAIIWGLIKQELIGFANLNDEDRVAKVEELTDKITNLEMNIANFTSHISNMDRLIERAYSAYMDAPDSVMDIAKDKYYKTLTKCENERAECKDKIEALNVEKLRLENMRTFFNQPTLPKDAIEKAESDPIKMRNLVMELIDKIYPYRITTYVSPATNRIMKNGIVLLEVYTINGIYNVLYDGNQRNNKVAYYISGVYATFQNGRNKFDAYDTGEYFVISHATLVTETEDVDMLVTFNELIKICMQNGWEIDYTYKM

SEQ ID NO: 23223 - protein, 548 aa, synthetic construct
MALLPRKPAKHPAKPKRGKKLEIEEPGVLYGRYSSHNQKDISVEQQFEKGYELAVEYGIRIIDTYADRAVSGRTDKRRDFQRMMTDAAKGKFRYVIAWKSNRMGRNMLEALINEARLQDLGVRVLYVEEDFDDTAAGRFAARSMMNVNQFYSENMAEDIKRGLYDNAANCMVANGHLPYGYKADETLHYAIDEPKAAVIREIFTRVSCGEAFVDIMASLNARGIKTSYGRPWGRSSFQKILSNERYRGIYIYGDVRKEGGIPRIISDELYFKVQEVITTKKNPQGRHRVNGDYLLTGKLFCGHCKSPMTGVSGTGRSGNLHYYYVCQKRRTEKTCDKKNVRRDEIELQVAQAIKDYALKDDVIEWIADSTVAYNERKEAESKVGILEDQLAGTEHGIKNIMSAIEQGIITETTKSRLVELESERATIKANIAAARADIVTVSRDDIISGLEMFRDGDVHDKKYQARLFDTFLVAVYAYDDDLRLVFSFSGNKNTIQIPIESAVNAVENNEAECSFKLCSAPPKQYNPNLLPIGHGFGFVVSVEEIEDW

SEQ ID NO: 23224 - protein, 573 aa, synthetic construct
MAKVKLPDKPRVAIYTRVSTLHQIDKDSLPMQRQDLINYARLILNTEDYVVYEDAGYSGKNTDRPKFQEMMQQVRLGMFTHILVWKIDRISRNLLDFATMYSELKQLGVVFVSKNEQFDTSSAMGEAMLKIILIFAELERNMTSERVTAAMLSRAANGQWNGGRVPLGYDYDPETKTFTVNESEAAVVKIIHDKYEQERSLVSLARYLNGHGYRTRTGCTYSPSTLLIILRNVFYCGDYRYNVLKDGDRQKRKKESEWITVKDHHPAIISREQKDEIARILKENRRLECERRGIYSKKKNVHVFGGLVICGNCGHAMTSTIRPADQDGIRWSVYVCPTKRRSEYLCKGRATSEVVLGEFVFNYILNMLNVQKNFDSINSVEDMEKMLLSGSTFRDVDGIERAGLDDLYNMLASGLTEKAPFDSGVEVRKKPVVSDIELENLNTEKTRIERAAERLQNLYLYSDDSISQKDYIIQREKLMSQLAEVNEQIGMVMSNADEKDVSDEEFVHAASKFILTQKLEGRTYIYYKRLATTVSREVLRSFVMSIIENITIYDGRVQTIVFKNGLSHTFILK

SEQ ID NO: 23225 - protein, 519 aa, synthetic construct
MKKVTKIAETASSKVKLKKIRVAAYCRVSTDSDAQLESLEAQKTHYENYITSRDDWEFAGLYYDEGITGTKKDKRPELLRLIDDCKAGKVDFVITKSISRFSRNTTDCLELVRKLLALHIPIYFEKENINTGSMESELFLAILSSMAEGESVSISENNKWSIQKRFESGTYKVSYPPYGYDWDGEQMIINPEQAAVVKEIFAALLSGKGTHAIADDLNRCGIPTKRNGRWTATTIRGMLSNEKYVGDCLFQKTYSDSRFVRHNNHGEQTQYLVKDHHEAIISREDFEAAHAFIHQRATEKGVVKGSDKYQNRYTFSGKIICGECGDTFKRRIHSCTGYKYTAWCCSTHIKDKDKCHMLFVKDDDLKQAFVTMMNKLVYAHRIILKPYVDALKNTSSDDSLRRIQEIQTLLAQNTEKRETLTKLMTQGIIDPILFNKETNELLSQADSFRDEINALKNAVSGDVTKVTAATALLHFTEKGGILQEFDDDLFNEYVNRIIVRSRNEVRFELKCGLTLRERM

SEQ ID NO: 23226 - protein, 526 aa, synthetic construct
MILLSAQEAIMARKKKVSPGNRLVAYYRYSGGSQQTEQSIEGQRRDCEAYARQHGLTIVHEYIDRHISGRGVESRLAFQQMIADSSKHLFDLVICWKTDRFARNRYDSAVYKKRLRDNGVRILYAAESSVEGPEGIILEGLMESLAEYYSAELAQKMRRGMRESALKGKAINPNRPLGLTTDEHKRFIIDEKNAPTIRFIFEHYAAGESSASIVDQLNAAGLRTSKGNSFNKCSIPRIIQNEAYHGVYICKAYDVRIDGAIPAIIDDDLWKRAQKMLTLNKQHRAPHSSHADYLLSGKLFCGCCHSLMRGISGHNCRNDVYYYYACGNKADGGTCKKKNIPKDVAENLVVNAICENILRPDTLEDLADAIAAAQQAEVNQPDPERAMLEQNLADVHRKINNIIESIENGTASSRLSARLADLEQQESTLNYQLESLKEVHPPVLDRERILFLLEQFLISPNERTEDYNRRIIDTFVNRIEITDTEMLIYFNLSEASASEKQKNSQPNSCSTGNHLVRVARIELTAS

SEQ ID NO: 23227 - protein, 560 aa, synthetic construct
MKKEKIKVYLYTRVSTTMQIDGYSLDAQKTKMKAFCDYNEYEIAGEYEDAGKSGKSIEGRVSFNQMMEDIKSGKDGVSYVLVFKLSRFGRNAADVLATLQVMQDFGVNLICVEDGIDSSKDAGKLMISVLSAVAEIERENIRVQTMEGRMQKAREGKWNGGFAPYGYSLIDGKLEVNEEEAVAIRMIFDQYVNTDLGANGIAKYLENHGIHKIARQNGKNPLFDAALIRRIIQNPVYSGKISYGRRRTEKVHGTRNEYRQVKKDDYLLVDGLHEALVSEEVWEQAQVKVAAQAKKYEKVNRDRREKIHLLSGILKCPVCGAGMYGNKSIKKRKDGSNYKDFYYYGCKHRNMTRGHKCDYKKQVHEEMLDASVAEVISKLVSNPKFSDLIRNKINMEVDTGALDQEIENYKIQLRKLYHNKDTILSDMDSLDYEDKHYQRRKTDLENHLYKTYDKIDEAEELLVSAKAKKRSLLTDKITGDNIYKALIFFDKLYAQMNEAEKREFLSQLVDNVQIYEERKENGQWLKSIEFKLPIIEKEFTLSLDNDTQNETVVGLHRKDL

SEQ ID NO: 23228 - protein, 463 aa, synthetic construct
MPSKIERCAIYIRVSTAEQMMHGKSLEAQKQYLTNYAKEHNMTVAGVYADEGKTARKELKKRKAIHSLLEDVKAGKIDVIIFWRIDRWFRNLSDFYKVQEVLDDNNVHWISTSEPGINMETRDGRLQLNVVLSIGQNEVDTTSERIKFVNEASIRQGKLIFGDVNMGYGYKSGIIDGVKRMVKDPDREDTVNAFYRFFFKHHAKGLSMRYIQENYDPDFTWANMRTLLSSEFYKGTYRGIPYCPAYLTESEWNNLQEIQNANVKRAPSGRIYLFSGMINCPICGRRLSARGGSSIINRKTGAKKVYCYYRCNKAFIDHKCSYRHMVSQNLIERYLIDHLEYEYNKFKIKCEKIEKEQEKKKKVQTPEKLQKELERLNLLFQKGRIEWDYYSKEYDRIENELNELLNAAPELEPDYAYLEELLNTDFRTMYYNLTQENRRAFWHSIIREIHLNTDHTVDSVDFL

SEQ ID NO: 23229 - protein, 468 aa, synthetic construct
MDEQLKCIIYCRVSTEKQEERDSLANQIERCKGYAIGRGFKILDIITDVESGSNNNRPGYLRLKEMINNKLFDVLLVLEFSRISRNADEFLSINKTLRDKKIGLISIQQNFDTSTIMGKALAQLTAVIAELEKDTISERVGDRMLQLIKSGRYVASAPFGYKFNKDKLLEIVEDEAIIIRDVFNSFLNGETRNSIAKRYQFDYSKVHRWLSSVIYIGKIGYVGGGDNRNRKGYTAIYDGLHQPIVDKATFDAVQALLNKNKRIRNRDIDDYIFTGLTHCECGSKMYPSFVKLKKGDKIYLKIRYSCNSKKNKSRYQGKIECYQRGINQEEISKVVKKSLFKKLQNENIEYKRTDDTKDKISILNTQLETVNIQLSKAKELFYANKISLEEYGADSDVFNKRKLELLSQIEKLKANIHEEIDSSKIKELVLKKIDTIDTDNSKFKKIVRLAINKIIIKFDKTIEIEYNF

SEQ ID NO: 23230 - protein, 559 aa, synthetic construct
MRTIRKIERRIPNLKQRKKVAAYARVSMESERMHHSLSAQVSYYSSLIQKNPDWEYAGVYADYGISGTGMKKRQEFLRMLEDAEAGKIDIILTKSIQRFARNTVDLLRTVRHLKELGVEVWFEKENIHTMSGDGELMMTILASFAQEESRSISENVRWRVKKRFEQGNPNGRFRVYGYRWEGDTLVIVPKEAAVVRRFFQNFLDGKSRLETEREFAAEGITTRNGRRWMDSNIRVVLTNVTYTGNMLFQKEYVTDPILKKRKKNRGELPRYYVENTHEPIIDKETFDYVQQEMARRKELGALANKSLNTTCFTGKIKCGICGRSYMHNRRTDRGFEEFWDCGSHKLKGRNCGAKGSIPHAVLVKESTEVLGLDDFDEQAFLDQVEKIVVPEYHVMVFCMKNGQKLIRHWGSTAKKDCWTDEYKDRQRAWMKNYMANGKGTRFSAFTTRVRCALCGSSFRRCKTKHDRPVYWRCSKGGKCESVSIREDDLKRVAAEAMGLEDFDEDRFRGKVESIEAGKPDCLTVHFKSGRTEEISYTPTPSKRRPKARRKESGEKWQRQ

SEQ ID NO: 23231 - protein, 574 aa, synthetic construct
MRKKKIDAPKEKPQRAAIYLRVSTAYQVDRDSLPMQRKDLVGYCEYALNISDYTIFEDAGYSGKNTDRPAFQKMMMQIRNGMYSHLLVWKIDRISRNLLDFAQMYEELKMLGVTFISRNEQFDTSTAMGEAMLKMVLIFAELERKTTAERVTATMISRANDGTWNGGRVPFGYDYNKETQTFSVNGDESFIVLEMYDLYEKTDSLVHTARELNDRGYVSRQHNPFSPVSVWTILRNPWYIGTYRYNYYKIPGRKAIKDESEWVVIQDHHTPLVSKERFGRVQKMLDSNARYRNTPGRSATQKNVNIFSGLIWCACCGAAFTASPGKLHASGYRSAKYGCPNVRKTKTCNAKYTSDTVLGEFLLNFILNVINAQKSFDQIKSPADLEARLLRGDTFKNVAGIDSASVAALYEMLAEYSPADSVLLKKPTVKKNLDPELRKLRADKRKTERALTRLDHIYLYSNKQMSDKEYLIKKNDLMNDLKEQDKSIGLLTSESWAQSLSDDDFLEQASSFIMSQRLQEREYIYFQGLAECTEPSVLRSFFLSIVDSVRMRNGHVEMLTFKNGISHKFTYKAI

SEQ ID NO: 23232 - protein, 513 aa, synthetic construct
MLKTDITNEKSTAVIYARFSSDKQREESIEGQIRECTQFAKDQNLEIIATYIDRALSARSDNRPDFLRMIADSAKGLFQYVIVYQLDRFSRSRYDSAVYKHKLKKNGVRVLSAKERIGDDPSSIILESMLEGYAEYYSAELSQKVKRGMTENVLEHKWTGGYVPLGYSLAPDKTLQIDPVGAEAVKIIYEKWLSGYRITDIIRYLNEHNYVTSHKTKFRHNSLNRILTNPIYTGLYRWGSIEVADYAPAIITQKQFALAQEKIHRIKAHPRAKRRSANYALTGMIYCGVCGSPMTGQSGHSKSGALYHYYRCSTKNNYHNRGKKLNIKCTNRNISRDKLEDLVLQTTINIIMNPEAVRMIAKQAVAAQKKDPAATEIDRIKEDKKLIQKKLNNSIKAVEAGIISTTLAANIPQYEQEIADLDIKMEKIKLSTTPVKIDEIAVEFFLKNLLLQKKEHDKYRLDMFQTFIRRVIVYPDKVEIQYNYTATPILENPVTKMMTGNSGCSHCERLVTR

SEQ ID NO: 23233 - protein, 593 aa, synthetic construct
MKQKLVAAIYARKSVILKKGDTLNIQEDKCRENLKLRYKYDYDLTIKCFTDEKTGKDMDREEMQSMIEQIKEGKVQVVCAYKLDRFGRNAIELVNFIELLKKYNVKLHCVDDQINYDPTDDNDVMTKLMIVLLSVLAEMERNNIRQRVIVTVYSLARKGFWLGGTAPYGFVSVRVPNEGIIDDVGAKSICILNPYAEEIQVVKYMYATYKDEDVSYSELANRCNDLGYEPRFASMFDQHTIQGMLMNLVYVKAAPQIYDWLISKGYSVENIPARDKFDGKHALLTYGKTLRGEEADNNIEAENKNRKDVKDWIVAIAPHEGVIEANDWLVVQNKIERNKGSKSKKNTKHNNVLITSDMFRCGCCGGVISSFNRKSRTDDNVLYPHYRCENKRKRRGKLCDVDNLPATDVDEKIIDLIFEKRDEIASSVEYIKRNLMPARKEYVKKNIIPKLEKEIKVQLKKIDGFLENMSSGKLNDNVLEMVNNKIEECNVKIKELEERIAEEDNKMLSMDKNHQNLDLLIDKFFSLDKTDFMKLPMKDKRNLVRLLIKEVVWDGENVHVYFKTPDSVCGGDTTDSLSINTALTNVDMVKQPF

SEQ ID NO: 23234 - protein, 497 aa, synthetic construct
MENIFHTAAIYARVSTKKQAREGFSLESQIKACRKKANELGITNIVEYTDETSGTTLNRPGLLKLRKEIKNGTIDIVICYDQDRLSRKLGQQLFITEEFEKFCKKLVFVYGDYKHSVDGRLSYLIKGAIAEYEREKILERCMRGKKEKFLKGEITNSHLFGYKYNKNKKTYEINDDEAKVVRRIFDLYINGMSSRQILMLFQMENIPKFFRGKSVGWNDPSVILRILKNDSYTGVFHAFKHNSPKEKNRYKDKSEWINIPIPAIIDKEQFELANKKIKENTDNSSRNEKRTHLLSRIARCTCGRSIYSRTANNKDYYICASKNYKKKDESKYNNCLTSRFMLADKVDEIFWKALSKICISKENIEKYVNQQENNIKVDSILLQIKKIEESINKKKKEQNKIIEWFTDSLIDDNLAKEKLEKISKLLINLKKQKEELTKSVNRKNKPEFIYNIFKNEKKVTLEEKRNLIRKIVDKVYVERIDDNKNSKMDIRIYIIFK

SEQ ID NO: 23235 - protein, 523 aa, synthetic construct
MVSFDSIIIYLRKSRSDDPAQTVEEVLAKHERILQDYCMKEYGKAIPEKRIYREVVSGETIQDRPVMQQLLKELETGNISGVLIVEPQRLSRGDLQDCGQIINSFRYTNTAVITPGKTYNLSDEYDRKFFEMELTRGNDYLEYTKKILSRGRVASVRQGNYICSVRPYGYRKITLGSGKDKCHTLEIIPEEADAIRLMYHLYLDENMGFTNIARTLDSLHIKPLKSDNWSAATIRDMIDNPIYIGKVVWNSRKVVKKWENEQITKVRPRNKGDDVICVNGRHEAIIDEHTFEAARNKRGLTPKVKRFKELRNPLAGLLFCGTCGHGMSMKKYVDKRSHTGKVTTIMLCNQQAVCHTKSAQYEDILAKIKVSLANAISDFKIKLKEQENNNIDMHELRIASLEEELNRLYNKDVRQKDAYEDGIYTKEEYIERNSKLQERILNVKEEIADEKNNVPVKIDYEDKIMTFKDCLSSLDDSDISAADKNILLKSCIDKIIYYNDMPSKPGIGRYIENSFRLEIFLKL

SEQ ID NO: 23236 - protein, 544 aa, synthetic construct
MAETAKKISMIPAKVQYDRNVKLSEKKMKVAAYCRVSTELEEQDSSYEAQVEYYTSKISENENWKNAGIYADDGKSGTNTKKRADFNAMIQDALAGKIDMILTKSVSRFARNTVDSLVTIRKLKEKNVAVVFEKEGINTLEGTGEILITILSSLAQEESRNISENIRWGVVRKFEKGKVIVNCTKFMGYTKNEDGDLVIVPEEAEIVKLIFRLYLEGYSTGKIAKHLEEQGIKTATGQDKWHSTVIDKMLRNEKYMGDALLQKTYTVDFMTKKKVKNTGIVPQYYVEDDHEAIIPKELFYRVQEEMMRRASLCKAAVTRKKNQRSRYSSTYALTGMLICGKCGQEYRRVTWARNGKKKVVWRCSNRLTNGVKKCGESETLEENTLNRAVMEAIHRITSDDMEFMENFRQNIIHVIGNYSTAKESEEYEEKIKEKQEEMVALIAENAKTGSYTPEFDERYRTIAEEINALKEAQKTARNEKWMADSYEQRIQDIDHYLSTSTCQIQEFDNDLVRRLISTIKVESSEKLLIQFQSGIVMEQEIRYE

SEQ ID NO: 23237 - protein, 538 aa, synthetic construct
MVKKVTVIKAAKAQKHTQEERRLKVCGYARVSTGSQAQATSYTAQVEYYTEKIESNPLWEFAGVYADEGISGTNVKHRDEFQMMISDCEDGNIDLILTKSITRFARNTVECIQTIRKLKEIGVGIYFEKENINTLSEKSELFITILASVAQGESENISSNNRWAIQKRFQDGTYIISTPAYGYGKDEDGNLVIIESEAETVRWIYESYLNGMGVYVIAKALNQKGIPTIRGAEKWQDGVIQDILKNPIYEGDMLQQRTYTETRFPFVRRVNNGQRNQYLIKDSHPPIVTHEEAEAVRNLMAYRVDVLHMNKSDYTKRYLFSGRIICGECGRTFRRQKIYIGKPYEKIIWTCSGHVEDKESCCMKAIREDVLHRAFTDMWNKLYTNQGTILEPLLKELTELVAARQDSEEIRQLDKEIKDISEQSQILNQVMRKGYMDSALFMESSSKLGWQLTECRRKKTLLTRKLRRTKEIVRTEQLIQLIAEQDGLREEFDEQLFKMTAEKIVVSKEHDITFCLHNGLKLTERGGGQDAVAHANWL

SEQ ID NO: 23238 - protein, 437 aa, synthetic construct
MSYLIYLRKSRKDLENPFMTTEEILNRHECILLDLAKKMNLSVGDIYREIVSGDSISARPVMQKLLREVESGMWEGVLVVEVERLARGDTVDQGIVQRTFQYSETLIITPQKTYNPSSESDQTFFEFGLFMSRQEYKTIKRRLKSGVMSAVREGKWPYNSAPYGYRRYKLANQKGWSLEFDDQERPIAELIYHLFCDEKRGFGYISDYLEARNIKSRTGGRFTESFLREFLRNPVNDGKVFYGRRKVVTKIVNGSSVRTRPRADEYIEVAGLHDPLIPHDLFLKAQERFRVSTPRNPSSYTVKNPLSGLLVCSECGRKLQRRPASTSKRGAPYDVLMCKTRGCPTVGSAVEVIEREVLHALEGIVRGYEADVPSVPSLVPQKEELLHNAVLHRADLNKQQERIYTLLEKVFTAPMFSWTVRRLWKSRCRKWIIALMS

SEQ ID NO: 23239 - protein, 510 aa, synthetic construct
MPTEYALYLRKSRADLEAEAHGEGDTLARHEHILMELAKSRALPIGAIYREIVSGERIANRPVMQQLLSEVEDGRWKGVLVTETSRLARGDTIDQGIVAQAFKFSGTLIVTPSKTYDPTQEADEEWMEFGLFMSRQEYRMIRRRMNAGTKSAKKEGRYVGSRAPYGYERCKLHGRGWSIRPIEPESGVVKMIYELFLSGKGAGEIATYLNQINIPSPTQRTWVRQTVGLILQNPHYAGLIPDAVHPYKKVIKDGQLTVKRPLNKQCELYEGVHEAIIPRETWEETQRLLTKNHKPRVPSALQQHNPLAGLLYCDKCGQKMQRHPQTDRNFEKYYCPTVSCPTVSAPLSQVEDLVLQGLKEFLYDLEMQQPEQPDFTTEQNALKNIDSRLAEQRKRLTKTFELVEDGIYTREAFLQRQSEINAEISRLQTAREELQRKLDAHAAELSARENAAPQIRHVLDVYDRKSAPAERSALLKQVIDRIDYHKTTKQRWSAENDLSVTIHPKISARK

SEQ ID NO: 23240 - protein, 520 aa, synthetic construct
MARKKNIAAGQNAVIYARYSSHNQREVSIEQQVRECMKHAAELGLHVVGTYEDRAISGKTDKRPNFQRMMRDAEKGKFQAVVAWKSNRIGRNMLQAMVNEAKLEDCGVKVFYAEEDFGDTAAGRFALRNMMNVNQFYSENMAEDITRGLYDNASKCMANGRQPLGYKRGEDGRVVLDEANAAVVREIFTRVAAGDLFVDIARDLNAQGIKTSKGANWNKGSFQSICQNERYRGIYIYGDVRVVDGIPRIVSDDLWYRVQEAMRMKKNPVGTRHRVGAEDYLLTGKLRCGHCGSYMTGVSGTSRNGELHYYYTCQKRRTEHACDKKNIRRDVIEPAVAQAIKMYCLTDDVIEWMADRTVEYWEKHDNDLQIEALEQQLEENKKATSNMLKAIEMGIITEATRTRMVELETEQSRLSVQLNAAKEDVVKIDREQIISYLELLQQGDIHDRDFQMELFKNFLVAVYVYDDNRMKLVFSCMGDQNSVEIPLETGEDPPDGGLSPDAKMFVLTPDSSTKKALYFV

SEQ ID NO: 23241 - protein, 532 aa, synthetic construct
MTENNNRVCCLYRVSTDKQVDFNSNHEADLPMQRKACHKFAESKGWVIVHEEQEEGVSGHKVRAAARDKLQIIKDYARKGKFDILLVFMFDRIGRIADETPFVVEWFVRNGIRVWSTQEGEQRFDNHTDKLLNYIRFWQADGESEKTSVRTRTSLRQLVEEGRFKGGNAPYGYDLTRNGRTNKRKHELYELHINEQEAAVVRIVFDKYVYEGYGPQHIATYLNNSGYRARSGKCWHPSSIRGMVQNLTYTGVLRCGDARSELMPDLQIISQQQFETAQRIRDNRSVRAAADAENRTPLNIHGKSLLSGNAYCGHCGAKLELTSSRKWRKLADGSLDDTLRVRYTCYGKLRKQTECTGQTGYTVHILDEIIDKAVRQIFSKMRGIPKEQIVTKRYEKENAERKNHLQALQAEKDKAEKDLLALKAEILACIKGESVLPRETLAEIITEQEEKLTELEALCESASDELVRKAELMDNVSKLYDELISYADLYDSANFEAKKMIVNQLIRRVDVCRGYQINISFNFDLTPYIEGE

SEQ ID NO: 23242 - protein, 569 aa, synthetic construct
MKQSSNKKSREATAFLYERLSRDDNLEGESYSIGNQKKLLTKVAKEKGYTNLVHFLDDGISGVTMNRPGFVEMMQQLEQGKAAAVFVKDLSRLGRNYIEVGRLTEEFFPDHDIRLVAVSDNIDTAEGENELAPIRNLFNEWYARDISKKRRISNKIKGNSGEPMGLPPYGYIKDPNNPKHWVIDEEAAQVVRRIFDMTLEGFGTEQIATQFEKEGILTPQAYWIQKGIGRPGKSKTRPATKWNGSTITHLLYQQEYCGDVLNFKTYSKSYKNKKRIHNDPENWVVFQDVHEPIIERVVFEQVQQKRGKMRKRRTSNGEHNMFSGLLVCADCGCNLHFHFNQGNPEIKYFNCSNYKGNRGTCQSTHYIRVDFLEEVVLGEIRRLTKFASLYEDDFLKAVIGHSQQADEADRKLKEKELKALLARDEELDGLFERVYEDNVSGKISDERFSRMSRRYEDEQKELTEKIKQLRFEIEKQSSRTMTTDMFISLVRKYTRAKKLTPRMLNELVEKIEVFNAEKVNGVWEQRLRIHYNCVGTIEIPSALPLPTPDVSVNTRKGVVVNYAPCDVAI

SEQ ID NO: 23243 - protein, 477 aa, synthetic construct
MSNSSSFPAKISAIYCRESTEKQNIQSLIDMCKKAAKKINLQNIKVYYDVASGYNKDREQYSKLKEDIQNNLVDTLVLYESSRLTRDELEHHIFYGLLRVHNVKVYTVTHGWLDLQDADDTFLTNLLNLLDAREGRKTAKRSKDRMTELAEQGRWTGGPAPLGYKLVNKELVIVPEDAEKVKTIFKLFLDGKTRQSIANFFGYEVKKVRRLLENPVYIGKLKFHSVEIINKKKILHKDYKVLNGIHEPIIDESTFSLVQGKLKNIKVERNTDVYIFKDLIKCTCGRKMYRVVNKYNYLKKSTNEISRKTENLYYCRTSDKYKSLGCGAIGIHEEELFEEVMASLKKIIFSLEVENIDTKFDDYQSQLVLYKKELASLSGKEELLARQLLNSLISEEVFEKLMKELKEKKAFLEEKIKNLTTLITNKKNTNKNSEILKKYFFKLEKEKAPEKINNFLKLIIDEIEMVNDYRFYIHLKF

SEQ ID NO: 23244 - protein, 465 aa, synthetic construct
MELVTKNRVIIYNRVSTIMQDKNESLTEQTDECIRYCNEKGYNIIKILKDVKSGTKDDREGYLELKKHIKRRDFDILVVLETSRIARKMKELVLFFSLLNENNIDYVSIREPNYNTTTPDGKFAMNIRLGLIQFERDNTAERVTDRLYFKASKGQWVNGKPPIGYKLVNKRLEIDEEKAEIVRNIYEDFLNGYSLNQINNKLQFSWGSKQVKRILTNPTYKGYIRYGTRNNRKKNNREAFIVKGWHEAIITEDKWEKVQEMYKSLNRKASNTKPTLLGGLLKCKECGNNYIRKRGGSYDKNLYYGCNLNNLRYSDKFFYKDIPECSSATIKGDLLEKAVIDTLKKQINDLNFNDIEIEKKRQVNIKQIDSSINKFKNRLNKIYELYIEDEISKDKYLKDKKDIEARIISLEKQKKSFGEIEVEKSNNEMIQEYFSKIEENKNIHIKTHVDTCAPINLFIFLFSIK

SEQ ID NO: 23245 - protein, 529 aa, synthetic construct
MVDVVAYCRFSSDNQRVESIEAQERAIKEYCLKNNFNLIAIYKDEAISGTSIKDRESFIKMINDSKKKIFKYVIVHKFDRFARNRYDHAIYEKKLEDNGVKLLSVLEQLNDNPESVILKSVLTGMNEYYSLNLSREVKKGQKENALKCIHNGGAMPLGYDLGEDRRYVLNEKEAEIVKKIYKLYLNGVGYTKIAEILNEEGYKNKAGREFRKTSIRDFLLNEKYTGVFVYGKKDANGRLTGKEIKIENGCPQIISKEEFQKVQNMMGKRKTGARMTAITPYYLSGYCYCGECGGSYTGGYRTRRRNGTIDYGYLCINRKTKVNQCKNKPIIKEKLEGMVFDTIKKEIFTGKRIDGIANGIYKKIMESQSGVEKELMTLEKEIEKVTNKAVNLLNKNLEGNISDEVFNVMNEKINLELTTLKNKKNSLKSPVKIEKEKIFNYLKNLKDNFKNPQIKKSIVEAFIDSVIIYPNHVEIRVRDIPADMDRSGGDDGNRTRVRNYQRHRLLQCLVYYFISQQSLPQTGLTEAIL

SEQ ID NO: 23246 - protein, 604 aa, synthetic construct
MKKVFVYHRVSSDQQLDGSGIARQAELLEGYLERTGICAEMDDPAPVVLSDQGVSAFKGLNISEGELGAWMEQVRNGMWDSSILVVESIDRFSRQNPFDVMGYINALMAHNVAIHDVMANIVISRSNSKDLPFVMMNAQRAYDESKYKSDRIRKGWAKKREQAFNKGTIVTNKRPQWIEVENDKYVLNEKAAVVKEIFALYQTGMGCPTIAKQLQRKEGEQYKFNRPWTGELVHKILTNRRVTGKIFISEIIRNHDDIENPVTQKKYDMDVYPVVINEEEFELVQELLKSRRPNAGRITVKKEGQEEVLIKSNLFSGIARCTECGGSMYHNVVRAKRTPKKGDPKIEEYRYIRCLNERDGLCENKAMTYETVERFVVEHLLGMDLSTVLKEQEFNPEIEVLRIQIDQVKDQITNYENGIERRKSAGKPISFEMREELDDAKSELERLLARQASLATVQVDVPVLQDVNVTELYNVNNVDIRTRYENELNKIVSNICLKRNGKSYTIDINYKQNELKRHVLFVENKKKEQTLISEVIIEDVDGGKFYYTPSFMIRLKDGEIRFQQINEDLSIVDYSLLLNYVDAVDRNDAVSVWMRNNMSFLFTN

SEQ ID NO: 23247 - protein, 548 aa, synthetic construct
MDVKVIKASDEPVIRDRKFEGNALEFNRKRVAAYVRVSTDDEEQLNSFTSQKQYYQEKISQSKEWILVGIYADEGITGTKTKKRDDFLRMINDCMNGKIDIILTKSISRFSRNLVDTIQYVRMLKSKGVTVIFEKENINTSTMESEMQLALLSTLAQNEVESLSANVKMGVKMKMRRGELMGFNGCLGYDYHKEDKSITVNEEEAETVRLIFDLYLSGMGGISIAKELKRQGRLNKKGVCKWTDSGVIGIIKNEKYKGDLLLGKTYTVDPISKRRLENRGEEDKFYIENHHEPIVSREVWDRAQEIRKGRYRCAVNNDPVIRIRNNKMYALSSMCECGFCGEIYTRRIHHQSRSTLKPVWKCSNQIRNGIAACEHSRAIDESIIENSFLEMMSLMADNFDDVLDNLLATIEESLNSDDCVNKLKRIDKSLAKQEDKRNKLTDMMLDDKISEEAYNKKYEELSYNISKLKNEKRMLTDNNLNQKTIKNRMCEIRNNIKDANVFDEFDRVVFESIVKKVIVGTVLDDGTIEPYKLTFVLKGMSDVEVTCK

SEQ ID NO: 23248 - protein, 539 aa, synthetic construct
MKEDAPRVIKIPAKPEATRQAEARRQLRVAAYCRVSTKEEDQANSYEVQKEYYTDKIMSNTAWTMAGIFADKGITGTSAKKREDFMRMIRHCRQKKIDVILTKSVSRFSRNTVDCLYYIRALKQLGIAVIFEKENINSLEEDSELRITLSGAFAQSESESISANVTWGKRRAMEAGKVSIQYKKLYGYRKGEDGQPEIIPEQAEIVRWLYERYLTGASLRMIKDELEQQGVKCFEDSPEWTISRIRSILQNEKYCGDVLMQKTFRQDFINRKAIKNTGQLPMYLIENHHEGIVSREKYDAVQAEMARRNAAKSPSKNAVTGMASYASKYALSERLVCGECGTLYRRCTWTRNGEKRIVWRCVSRLDYGKKYCHNSPTLDEAPLQQAILAALNTAMADKNSLIRQITDAMETEIIPFPGGMMSLGDIERRLRELEQQFQTLLEKAADDPAAYGGQFKEILEEQTLLKERRSGILADNNEQAKANQRIMDAAQTLENASPYITEWDESAVRQLVETVKILSKDEVAVTLKGGIELCQKIMY

SEQ ID NO: 23249 - protein, 493 aa, synthetic construct
MTGIIYARYSSDNQREESIDGQIRECKEFAEKNDIRIIDTYIDRALSAKTDNRPSFQQMIKDSSKGLFDVIIVWKLDRFARNRYDSAHYKNILKKNGVKVISATEAISSGAEGILLESMLEGYAEYYSAELAEKINRGLTENALKCKYNGGSVAFGYMIDDEQHFQINPTLAPVVLNIFNDYLSGKTQKEIRDELNNKGLKNANGREFTINNISKILTNRRYVGNYIYKDVVIENGIPAIVPNDVFDKVQEMIAVNKRAPSRHKAVDDYLLTTKLYCGKCKSFMVGESGNARGRRYSYYKCVNTKRNKTCDKKAVKKDWIEDIVIYQVMKFIDDDLLIEMLVNKILSIQGKESPMLKSLKKQLVQTDRAIENMLNAIEQGIITKSTKKRLDELEMTKENLETEIVKENISHPLLTKEFLYLWFDGFKNFDVNKLENRKMLIDTFVNSVVLYDDRIDFYFNFKDNAKSLTLLELNTVSDLSSSSPPNIKTLHST

SEQ ID NO: 23250 - protein, 607 aa, synthetic construct
MKVKIIQGNKSVLGAFHRKVKKLRVAAYCRVSTDDEDQIKSYNSMIQYYTDLIQKNDEWEFVGIYADRAITGTSVKPREDFQRLIEDCMNGKIDMIVTKSIPRFARNTLDTLRYVRLLREKNVAIYFEVEKINTLIDGEFLITILSSVAQQEVENTSEYVKKGLKMKMKRGELVGFNRCLGYDLDKETGELKIVEAEAETVRHIFNRYLQGAGGTVIARELNEEGILTYNNCKWTCSTILNIIKNEKYMGDMLQGKTYTVDPISKRRLQNNGEEDKFYVEGHHEAIVPREVFEKAQELRISRNLKRAKVSTESNRVIIRRQYAFSCMLQCYFCGSNLSRRTWHSSSKYSKVIWQCVKSAKKGKRFCPESKAIPEVVIEKAFVESYKILCENNQDILEDLLDKIEVILKDEKIEKEVKQIEGRIKRTKTKRNKLADGYLDGIIPKDVYEKKEEILKSALLKDCNELQYLKKELDGKDTLSDRINNFRNTLKNNQILEEFDRHVFESIIEKVIIGGIDKDGNKDPYMITFIYKTGLEHEIKDAKKNCDQGVRNEKEKNADVHSFDENETDSVHSLSGNDTYRDGSIDVKGEPRQVRIMWQIKGFLESYR

SEQ ID NO: 23251 - protein, 555 aa, synthetic construct
MNYIIRDDKEHETTAPKVKVIAPRKKFQPSYNDRQNRKIKVGAYCRVSTDSDEQELSYETQCEYYENYIGNHESWELVAIYSDEGITGTSTNKRSDFMRMIDDARAGKLDMIITKSIIRFARNTVDSLMYLRILKEYNVDVYFEVENVHSLEANEMLLTILSSVAQQSSEDKSESIKWGYQRQFEKGKVYAANMYGYKSNRGTLDIIEEEAEVVREIFSKYLSGMSESKIARYLTENKVPKKNGSTKWDSGTIGRMLQNEKYSGDALLKKTFSIDFLHKKRYKNEGQKKMYFVENSHPAIVTKEVFKAAQVERTKRNMKSNDEKEVVESHHQNRYSSKNPLSNKIICSECGALYRRAVWTKRNKEKEPVWRCSNRLKNGNAICPNSVTLKEKPLLDALTSLINGKTKSKEKTRLELAKELSEYLNPKDIIEKKQKLNCELENVNSQINELLDKGMLLVARGVQDESQIEEHLAQCYQTKQMLKKELKKLDDKYNALKQGRQEKLLKTLEKNSNEHTVMTQEDLAVFIDRIIVKKDKIEIETIDDQKCELLLNQIS

SEQ ID NO: 23252 - protein, 503 aa, synthetic construct
MNNRIDAIYARQSVDKKDSISIESQIEFCKYELKGGNCKEYTDKGYSGKNTDRPKFQELVRDIKRGLIAKVIVYKLDRISRSILDFANMMELFQQYDVEFVSSTEKFDTSTPMGRAMLNICIVFAQLERETIQKRVTDAYYSRSQRGFKMGGKAPYGFHTEPIKMDGINTKKLVVNPDEAANIRLIFEMYAQPTTSYGDITRYFAEQGILFYGKELIRPTLAQMLRNPVYVQADLDVYEFFKSQGTVIVNDAADFTGTNGCYLYQGRDVKPSKKNDLKDQMLVLAPHEGIVPADIWLACRKKLMNNMKIQSARKATHTWLAGKIKCGNCGYALMSIFNPSGRQYLRCTKRLDNKSCPGCGKIITSELEAVVYQQMVKKLEKHKTLTGRKKAAKANPKIAALQVELLHVDSEIEKLVDSLTGANNVLLSYVNVKIAELDGRKQELVKQIAELTVETISPGQVNQISGYLDTWDDVSFDDKRRVVDLMITTVAATSDSLNITWKI

SEQ ID NO: 23253 - protein, 462 aa, synthetic construct
MTTAKNVMVIPARRRLGNTVQAEERPKLRVAAYCRVSTDSDEQATSYEAQVEHYTAFIKQNSEWEFAGIFADDGISGTNTKKREEFNRMIGECMAGNIDLIVTKSISRFARNTLDCLKYIRQLKDKNIAVFFEKENINTMDSKGEIMLTIMASLAQQESQSLSQNVKLGIQYRYQQGEVQVNHKRFLGYTKDENKQLVIDPEGAEVVKRIFREYLEGASLLQIARGLEADGILTAAGKSKWRPETLKKILQNEKYIGDALLQKTYTIDFLSKKRVKNNGIVPQYYVENSHEPIIPRELFMQVQEEMVRRANLRGGKGGKKRVYSSKYALSSIVYCGQCGDIYRRVHWNNRGYKSIVWRCVSRLEEKGSECTAPTINEETLQAAVVKAINELLTKKEPFLSTLQKNIATVLNEENDNTTDDIDRKLEELQQQLLIQAKSKNDYEDVADEIYRLRELKQNECRA

SEQ ID NO: 23254 - protein, 506 aa, synthetic construct
MYGMYLRKSRSDDPNEDINDTLAKHEKILFDLADSLNINRKEIMQFKEVVSGENIQNRPEMKKLLEYVMEGVLEGVLVVDSQRLARGDTVDQGTIIRAFSINNTKIITPMKTIDPQNEYDQEYFEFDLFMGRREYKMITRRMQRGRHIAAQEGYYVGSIAPYSFSRIKLDKGYSLEIYEEENIVFNIMKKKALEDEGSTNISNHLNELGYKPRKGEYWTKSAVEAILLNETNLGLIKWNSRKEVKVFKDGKIVKTRPRNPNYELYPGKHPAIMTQDEYDRIKFLMKKRSHPVKKDKTLQNPLAGLIVCGFCNHKMARRPYKNGRVETILCTTSRCKNVASDIHVVEQRIIDTLKDTLKNYTNYVNNYSVSVNKTYDDNKKLQLEECDKELEKLNKQIIKACEMLELGAYTVELFKERKNTLENKINTVNKRKDILAKETEAMKIEQYKKAIPQLQNAIDLYWKSSTEEKNKILKSIIDKCIYKKEKGGRWDPDAIKQFKLEIYLKV

SEQ ID NO: 23255 - protein, 558 aa, synthetic construct
MNREGKKCVLYPRVSTEMQVDGYSLEGQKNSLKRFADREEMEIVGIYEDAGKSGKSIEGRPAFKKMLSDIKNGLEIDYILVYKLSRFGRNAADILNSLEFVQSYGINLICIEEGIDSSQTSGKLLISVLSAVAEIERENIIEQTMNGRREKARQGGWNGGFAPYGYYLKDNQLLIEETEAEAIRIIFDKFANSDIGLGGVAKYLNLQGIKKIPRQNGTLETWSSHFIRLILDNPVYCGKIAYGRRTREKVKGTKNEYKQVHAEDYILEDGQHEGIISEELWQKVHAKRMATGIKQPSKIGKDRSHLLTGILKCPLCGSSMYTNKHAWTNKDGTYKEVYYYICGRNKQERGHHCDYKASLRKTDIEPLVIEAVKELVSDKYFAKEIEKRIGVQTDTTAIDKELANYESKLKEVDLNKARLEREIDNLPIDARFRERKIHDMTLRLDALYDTIVELEERIEDAKLRRSSIEMETITLDNIYKLMLNFGKLYDIISDEEKKSLITYLIKEIQIYPNGESEQPLKSIEFNFPIYRDGQEVRRLLWEKGNTVETVCLLSRKAQ

SEQ ID NO: 23256 - protein, 521 aa, synthetic construct
MNKSITVIPARKRVGNTVNKEVKPKLRVAAYCRVSTDSDEQATSYDAQVEHYSNFIQKNEEWEFAGIFADDGISGTNTKNREEFNRMIEECMTGSIDMIITKSISRFARNTLDCLRYIRQLKEKNIPVFFEKENINTMDSKGEVLLTIMASLAQQESESLSKNVKMGMQFRFQKGEVQVNHNRFMGYTKDEDGHLIIEPAEAEIVKRIYREYLQGASLKQIGDGLMADGILTGAGKPKWRPESVKKILKNEKYIGDALLQKTYTVDVLTKKRVKNNGIVPQYYVENSHEAIIPRDLYMQVQEEMLRRSNLHSGANRKKRVYSSKYALSSILYCSKCGDIYRRIAWNNHGKRSMVWRCVNRVEHGPDCCDAPTVKEEELQNDVVKAINMALGGKDDMIAALEENIAMVLALEDETSMESIDAKLEELQQELLKRANAGQDYDDLADEIDSLREKKQEVMADNAEREGQKQRIVEMQQFLAGQTEQIEEYDESMIRRMVEKITVYEDKFTVEFKSGTSVDVER

SEQ ID NO: 23257 - protein, 520 aa, synthetic construct
MKRITKIEENNALSVKTKTRVAAYCRVSTASDEQLISLDTQKAHYEDYIKSNSEWEYAGVFFDEGITGTKKECRDGLNSLIDSCEKGLVDLVITKSISRFSRNTTDCLELVRKLMALNVTVIFEKENINTDTMESELMLFILSSLAESESVSISENNKWSIQKRFQNGTYIISYPPYGYENAGGEMIVVPEQAEVVKKIFEDTLAGKSTHAVAKELNDSGVRSKKGGKWTPGAINAIIRNEKFTGDVIFQKTYTDSQFSRHTNDGELNQYLCENHHEPIVSHEIFDKANEVLNQRGKEKGNGERTERYQNRYGFSGRIKCGECGGVFKRRIHYKPSGSYIAWCCTHHIEDRHSCSMKYITDDGIKTAFLTMMNKLIFAHQSILKPLLYSLQGFDDKNRLLQIQEYETKLEKNMEERQVLTSVMASGLLEPALFSKKITALTLEEKRLQEEKKHMINTVSGDRTKIEALEKLMKFALGSGMLTEYSDEIFLSHAEGAIVFSRKEIVFELKCGLKLKERLVG

SEQ ID NO: 23258 - protein, 522 aa, synthetic construct
MKAVIYARYSSDNQREESIEGQLRECTAYCVKNDITILRTYIDRALSAKTDNRPDFQRMVKDSAKGLFDVVIVWKLDRFARNRYDSAHYKAQLRKYGVKVLSATENISEGPEGIILESMLEGMAEYYSAELSEKVIRGHTENALKCKYNGGTPTFGYVIDKDMQYQLDPRTAPVVLEIFTRYDQGATMKEIMEEMRQKGVTTVRGKKIDLNFMARLLKNRKYIGEYSYREIVTPGGIPAIVPQDLFDRVQKRLAANRKAPARHKAEDDYLLTTKLFCGTCGAMMVGESGTSASKGRKYHYYRCVNTKKQKSCNAKHKSIRKTPIENAVVNAVMAKVMDDNFVEYIADTVMDIQTRESSVLPALRHQLEETERGITNMLNAIQMGIINASTKQRLDELEDRKADIELQIIQEEMKHPMLTREDVTYWICRFRTLDVSKLEERRRLIDSFVNSVTVFDDYILITFNYKEGEERLDFTDIESSDLQSVRGPWVSPIRAHPLFNNLQISFESGTEMYYFFLFAAYM

SEQ ID NO: 23259 - protein, 637 aa, synthetic construct
MRKKCYIYTRVSTAAQTEGYSLEAQTERLRKYADYKEMEVVREYCDAGRSGMSIKGRPAFMEMMDDISCEKDEISCVLVFKLSRFGRNAADILKSVQLLMDFDVDLVCVEDAIDSSTQGGRLTLAILSAVAEMEHENITVQFMAARMQKLMSGGWPGGGVPYGYVSVNKELVVVPEAADLVRLIYQKYLELDMKLNTVVGWLNKNGYKRVVKGEDKVITSDFVSSVLGNPVYYGMIVYNRRTNSEEIKRNPKEVISVRGKHEAIIPEDIWMQVQEKRKRLRKQQKKVDDPGRISLLSGLVKCPECGTGMVTKKNKRKNNNHGGYYKIVYSYGCRNTRKSEGHVCSCRRTYNQDKLDRAVMEIVGKVTETKEFRQAVMNTVGDRSSLDACEADLKRTRKELHSQEHLKYKLGTELDNLDVLAEGYDDEYEAVQSKIDEVYDRIEILEERIRKLKKRMEALKKGVRSSDNIQKILDNFDLLFERMNCEERRELCRQFIERIDVFQDEREDGRILKRIVFRFPVYYEDEGKRAENDEPDEVVTFEVDCTEHRVTVSEAKATYAEIMAYVKEKYGMNISSLYIAQVKRKYGLDVGKAYNKPAKNKNHVPVCPVEKELAIMDALKHFRMLNADVEYRKENVE

SEQ ID NO: 23260 - protein, 564 aa, synthetic construct
MRKKCYIYIRVSTAMQVDGYSLEAQKERLMKFAEFQDMEVVREYCDAGKSGKSITGRPEFQRMLQDVSEERDGVAFILVFKLSRFGRNAADVLNSLQFIQDYGVNLICVEDGIDSSKDSGKLTITVLSAVAEIERENILVQTMEGRKQKAREGKWNGGQAPFGYDLDSGNSTLMVNEEEAEIVRIIYDKFVHTDMGADAICNYLNQRGYTKKKVRGHELNYFARGLIMKILDNPVYTGKIAYGKNVTEKVKGTRDEYRRVKTDDYLLADGLHEAIVDEETWEAAREKRKRTGVRFVKTHSLEHEHILTGLIRCPLCGGGMSGTVQRRQNKKTGEYKDTFYYRCHHRKKVDGKICDYKPMLNQKVFNAEVEEFIRYMVAGDEFRSFVQEKLEEKVDVSALETEREQLQKQLKQVQGSKLKLIQMLDRLDTGDKHYTRKYQDMQDRLDNMYDKVAEFEEAMKDIDAKIGASYGKEITGKKLYEFLLDFDILYDKMTDMEKKEFMNTFIEKIELKNETVNNGTSQGSRIEHIDLAFPVYYGDCKGTRIRMPEENTVESIVRLKKSVK

SEQ ID NO: 23261 - protein, 494 aa, synthetic construct
MKAVIYARYSSDSQREESIEGQLRECTAFAEKNGITVLRHYIDRAYSAKTDNRPEFQSMIKDSGKRLFDIVIVWKLDRFARNRYDSARYKATLKKNGVKVVSATEIISEGAEGIILESVLEGYAEYYSADLSEKVVRGMTDNALKCKFNGGMMPIGYVIDAEQHFRIDPLTAPFVLEAFKRYDGGETISSIMNWLNEQGLTNTRGQKMTFNSVGHILHNRRYIGEFRYRDVIVPDGIPAIVPQDLFDRVQEKLAKNKKAPARHKAEDDYLLTTKLFCGYCGAYLCGESGTSRTGKVHHYYKCVSVKKKRTECHKKPVRKEWIEDLVVGETMKMVMDDKAIEAIVSMLMDLQDRDNVNVPLYEQQLREAETAISNLLNAIQQGILTRSTKERLEELENRRDELENRLACEKLAKPKVSAEFMTFWLHRFRKLDVRQQSHRKMLIDTFINAIFLYDDKMVITFNYKEGTKTITFAELQEAISNNNGSDLDCIAAPY

SEQ ID NO: 23262 - protein, 525 aa, synthetic construct
MYLEISNPMDYHVALYIRLSKEDETEGPSQSVTNQKSLLNEFVQQHRLSVYDTYVDDGWSGTSFDRPDFQRMIEDIEAKKVNMVITKDLSRLGRDYIMTGHYMERYFPEKRVRYISLLDGIDTGVESTANDITPFRAIMNDMYAKDISKKIKSVKRDKQRKGQFIGGKPMYGYKMHPTEKNEIVIDEEVAPVVRRIFAMALDGMSCRKIAATLNEEGVPTPATYCGWNMGRKGPYAGLWSSERISEMLQNETYLGNMVQGRTVKISYKSKKCLKQDRENWVVVENTHEPLIDKETFQKVRMLVNSRRHTRSRTYDFLLKGLIFCHECGYPMAVLNRPPVSGEDRLFFVCRTYQRFTKAGVCSCHSIKEQVVTEAVLAKVREVCEAYLDPNKLQPIAADAVEKARKAENHEAEIQSIQNKIDSLTANLDKMYMDRLTGLLAEADFERIYQRVKMDRTSLEEKLKELESQKESPVSTEDRARELVQQFLDSAYTSRELLVSLIERVELTENKQIIIKFRFRELEAIS

SEQ ID NO: 23263 - protein, 464 aa, synthetic construct
MMTNKIIRCALYIRVSTAEQCMHGKSLEAQESYLQQYASDHNMIVVGVYADEGKTARKELKKRKAIHSLLEDVKAGKIDIILFWRLDRWFRNLSDFYKVQDILDEYGVRWMSASEPGINMETRDGRLQLNVVLSIGQNEVDTTSERIKFVNEASIRQGKLIFGDANMGYGYKSGIVDGRKCMVKDPEREETVNAFYKYFFKHQNKCATLRYIQDNYDPNFSWAIMRTLLSSEFYKGTYRGFPYCPPYLTEEQWNELQKVAHKNIKRAKSGRIYLFTSLIRCPVCGQLLCGTGCKSIINRKTREKRDYCYYRCSRAHNDRICTYRHRLSQNLIEQYLLDNLDTEYRKYQIRVKKIEEEKKKIAQTKTPEKLNAELERLNLLFQKGRVEWDYYSSEYDRIEQELKGLSKIKPEVKRNLSFLEDLLQSDFKTLYASLSPENRRAFWRSTIKQIHLNEDSTIKFVDFL

SEQ ID NO: 23264 - protein, 534 aa, synthetic construct
MKKRINTNSAARAVIYARYSSANQRDCSIEQQVAKCRELAAREGVTVIEIYADRAVSGKTDRRPNFQRMMKDASLRQFDVVLAWKSNRMGRNMLQAMMNEEQLRSNGIRTIYAEEDFDDTAAGRFALRNMMNVNQFYSENMAEDISRGLMDNASKCMSNGSLPLGYKTGKDQKVVLDEAEAAIVQEIFTRVSCYEPFIDIARDLNRRGIKTKKGAEWGRSSFHTICRNERYRGIYIYRDIRVEGGMPRIVSDELFYKVQEVLKVKKNPQGRRKRSGYEEYLLTGKLYCGHCGSTMTGIAGTSKTGAMHYYYTCQKRRTDHSCDKKAVRRDQIEKAVAIAIQQQLLTDENIQMMADETMAYNARTEIKYRLQSLQQQLYSNETSTANIMKAIEMGIITDTTKARLLALEQEHGQLLAKIDTAKAEMVPINREDFVSLLDIYRTGDVNNKKYLAALFDTFLVRVDLYDDHFKITFDPTGGKMPVDIPIGAEDSPESPGDSPESSDFEASPQDAEKFVLALHNRTKILERLFGDFLF

SEQ ID NO: 23265 - protein, 502 aa, synthetic construct
MIAIYARQSVEKKDSISIESQIEYAKREVFTEDFKIYQDSGYSGKNTNRPAFHEMMADVQSGRIEKVVVYRLDRISRSILDFADFINILESNRISFVSATEKFDTSTPMGRAMLYIIVVFAQLERETIAERVRDNYYARVKKGAWGGGPAAFGFDLVKTTIDGKKATICQPNEQISVVQRIFELYALPYSSLADVQRQLIQDGSVSSGGVNFDNAKLSSILKNPAYVRADTAVYNFYKAKGAILANPPEDFDGVHGCILVGKRDANERKYKDVSNHLLAMGHHEGIVDSTAFLFCQQKLSRNRQIKNTYKGKHSWLTGLVKCAHCGYAFSIRFSKTKDGQVPYFCCSGKYLHKACTAKQTHRVREIEAEVQASLIQHAASYNLIHRQNTDAAAKELQSRISEIDAKIENLILSLESVSHVSAQYINQRIEALHHEKQLLLHRYNETISEYNINEVTPFSATDWEQMDIEQKRQLARSLIRTVYLSEDGLSVSFNIKKGGHKP

SEQ ID NO: 23266 - protein, 566 aa, synthetic construct
MKQSSKKISTGTAALYCRLSRDDNMDSESNSIQNQKKILQKAAKDKGYTDTIFFVDDGITGTTMKRPGFQKMIAAIEAGYISAVFVKDLSRLGRNYIEVGKLTEEFFPLHDVRLVAVSDGVDSDEGEDDFTPFKNIMNEYYAKDISKKRRIVNKMKGNAGIPLSPPPYGYIKNPDDPRFWVIDPEAAGVVRRIYRMALDGYGLAETAAALGADGIVNPTYYWRSRGTSRGGSKSTVEPTKWGHTTIKKILTTQEYCGDVINFKSYSKSYKMKRRIENPEENRAIFLNVHEPIIDRPTWEKVQALKAGTRRKRPTVTQEPSVFSGYLKCPECGGNLNFHFNQGNHDIKFFSCQNHNSGLRKCSSTHYIRLDFLEQVVLYEVHRLACFANEYENDFIKAMVGRSAKVAENDRVRKKRELDGLLARDGELDMLFERLYEDNVSGKIDDTRFAKMSKRYEQEQGENAKKIKALRLELKKLEDKRMDVDTFLETVRRYTDATTITKRMVAELIEYIEVYPAVKEDGVTNQRVTIHYNCIGAFEVPDRRKIPERDILLETRKGVALSYAPAV

SEQ ID NO: 23267 - protein, 476 aa, synthetic construct
MTLSDEGISGTSLKKRTQFNKMITACKRGHIDLIITKSLSRFARNTVDCLDTVRLLKANGIGVYFEKENINTLTESSEFLITLFSGFAQAESESLSKNVAWGKQKSAEAGKVTFQYKKMLGYRKGADGQPEIVPEEAEIIRRIYHRYLNGCTLGKIKRELEEDGVPTAQGVERWSPSIIHNILTNEKYIGDALLQKTYVTDCINKKVKKNRGERTMYYVENSHPAIVSRDLFNQVQQEMTRRSSKRKVLQKSGKTELGKYSGKYALTELLVCGECGSPYKRVTWARNGEKRIVWRCVSRLEFGTKYCQHSPTLDEGRLHSAILAAMNEYAAIRQEVCPDVLAMAEEAKQALSQAGARLLQLKKRMDAVSREQSDVLDRLLVNMADTELNARMKALTDEKESLKAQIADAQQAEVNLEEQAARRRQMWDSIMECAAGYTEFDNELVRQVIQKITVEDAETIHIHFRDSDVVLEQEVE

SEQ ID NO: 23268 - protein, 478 aa, synthetic construct
MNAVIYARYSCDRQTEQSIEGQLRECKAFAASEGIHIIGEYIDRAISGTTANRPEFQRMIADSRYKTFQAVIVYKLDRFARNRYDSAMYKSKLKANGVRVLSAKEHIIILEGLLEAMNEYYSAELSQKIKRGMRENAIKGKTTGGNVALGYRIGADKQMEIDPAGASLVRRIFTGYDSGMTFTEICDDLNHAGYTTSRGKQFRIDTISRILANQRYTGTFQCAGEDAHCPPIIEPELFRSVQERLTESRHKHRHTQSPHEYVLTGKAICGTCGRRLNGRAGTSKTDKRYYYYCCPNKCCGWLPAAELEHAVLDAIAQYTTPEACEQIANATYALYQQSTHENADLTAAQQRLQETEKKLENAVNAVLNGITSAALQATMQQLEQQKAALETEVRLLQTDAPELKLEHFQYFAHRLLEVQAEGTEKILQLLVNQVIVYKEQITVLVNLTDKTKTPPLEQVTAALRESSCSVACGGGDEN

SEQ ID NO: 23269 - protein, 526 aa, synthetic construct
MPYCIYLRKSRADAEAELLGEGETLARHEKTLLALAKKLKLPITKIYKEILSGETIAGRPVMQQLLQDVEAGIWQGVLVMEVERLGRGNTLDQGIILNAFKYSSTKIITPMKSYDPNDEFDEEYFEFSQFMSRREYKTILRRMQRGREASVKEGKFAGSIAPFGYRRVKLPQEKGFTLEIEDAEAAAVRLAYELYAYGDPQPDGTFADIGRATIAKRLDQMGIRNRKGGTWATASVTRMLQNPVYIGKVHWNRRPEKKHTENGKIKKTRPLAENYLLVDGLHEPIISEELWNLAQAKMRQHYRPTGVNGVMQNPLAGLVHCSYCGNAMQRRPYLKTGQPASLICHTHFCPQISSPLYMVEGKILEALSLWMKQHEPTWEDESSINVFSTKIMALEHTIADMEQELQGLQFQFEKIFEFLETGIYTPEVFTARNKTLSEKMAEIRSAIEETQAELSNLKAARKNQVSMIPKIKNILDTYETLTPAEKNKLLKEVLDHVEYHKKIKGKKNVSADNFEIILFPKISPEN

SEQ ID NO: 23270 - protein, 477 aa, synthetic construct
MRDSKSKTVIIYNRVSTIMQDKNESLTEQTDECIRYCKTNGYEIYKILKDVKSGTKDDRAGYLELKKHIRRRDFDILVVLETSRIARKMKELVLFFSLLNENNIEYISIREPNYNTTTPDGKFAMNIRLGLIQFERDNTAERVTDRLYFKASKGQWVNGKPPIGYKLVNKRLEIDEEKAEIVRNIYEDFLNGYSLNQINNKLQFSWGSKQVKRILTNPTYKGYIRYGTRSNRKKNNREAFIVKGWHEAIIPEEKWEKVQEMYKNLNRKASNTKPTLLSGLLKCKECGNNYIRKRGGSYDKNLYYGCNLNNLRYSDKFFYKDIPECSSATIKGDLLEKAVIDTLKKQINDLNFNDIEIDKKRQVNIKQIDSSINKFKNRLNKIYELYIEDEIPKDKYLKDKKDIEARIISLEKQKKSFGEIEVEKSNNEMIQEYFSKIDLSNIEEANRILKIIVNKIVVYKKKKTPKDDFEVEIYLNI

SEQ ID NO: 23271 - protein, 465 aa, synthetic construct
MARSITVIPASQPYRVGGRTQQKTRNLRVAAYCRVSTDQEEQLNSFENQVEYYTKYIQDNPLYQMAGIYADEGISGTNTKKREEFKRMIRDCEEGKIDLVITKSISRFARNTQDCLEYSRRLKNLGIGIFFEKEHINTLDASGELLFTILSSLAQDESRNISENCKWGIRSKLKKGIPQVDCTKFLGYDKDDDGKLIVNQKQAKIVKRIYQEFLNGYNPAAIAKMLMEDHIKTGTGREEWRSASVRAILKNEKYMGDALLQKTYTADFLTKKVKKNHGEVEQFYVKESHEAIIPKEQWEAAQLELERRDSYMQELGLTFYGYGSEVNPFSCRVVCGKCGAVCGKKSWKSRGVEFWQCNNRSKNHGVKGCASENLPHENLLKGFVTAWNQIVAEREQYLPKWEKKKKEGNPLEKLRAEQMIELTLQPPLTKMLPELGQMVLERVIVQGKEILFIRFLDGTEIKVRI

SEQ ID NO: 23272 - protein, 502 aa, synthetic construct
MIAIYARQSVEKKDSISIESQIEYAKREVFSEDFKIYQDSGYSGKNTNRPAFHEMMTDVQSGRIEKVVVYRLDRISRSILDFADFINILESNHISFVSATEKFDTSTPMGRAMLYIIVVFAQLERETIAERVRDNYYARVKKGAWGGGPAAFGFDLVKTTIDGKKATICQPNEQISVVQRIFELYALPYSSLADVQRQLIQDGSVSSGGVNFDNAKLSSILKNPAYVRADTAVYNFYKAKGAILANPPEDFDGVHGCILVGKRDANERKYKDVSNHLLAIGHHEGIVDSTAFLFCQQKLSRNRQIKNTYKGKHSWLTGLVKCAHCGYGFSIRFSKTKDGQVPYFCCSGKYLHKACTAKQTHRVREIEAEVQASLIQHAASYNLIHRQNTDAAAKEFQSRISEIDAKIENLILSLESVSHVSAQYINQRIEALHHEKQLLLHRYNETISEYNINEVTPFSATDWEQMDIEQKRQLARSLIRTVYLSEDGLSVSFNIKNSGHKP

SEQ ID NO: 23273 - protein, 501 aa, synthetic construct
MKIEIREGRQTQERKLRVCAYCRVSTDADEQENSLENQMQHYEKVIKANPAYEYVGVYSDFAISGFKDKRPGFQSMLADARAGKIDLIMTKSVSRFARNTAIVLEATRELKERNVGVFFELQNINTLSGEGELMLTILAAFAQAESESGSEGAKMVYRRKYEQGIPVQYLERSFGYTKDDDGNYVPDEKEMVWVKKMFQMAADGYTPAAIKRFLNDKGVLTVGGAKWIDSAVIRILENEIYKGDYIMHKHYVNEERKLVRNRGEVDAWYIENDHKAIVSESLWQKAQEAIGKKREYLATASVIKDFTEENYPYMNKIFCAKCGHPLQKRIYSKGNRLNWGCTGTRRFGKEFCEGVNIPDGVLREAWRFEENMYIGEKPTNKGIKEFTYLKESSWKRRYKKKILGKLVPDNTEENYPYKNQLFCRLCGSRLVRHYNPKNKKVFWICNRNKRQGKESCTGVRVPDSVIRAWGSIKGDIYIEGKVDRNGKKRYSYSGTKPTKSE

SEQ ID NO: 23274 - protein, 463 aa, synthetic construct
MARSVTVIPARSRQKANKDIPQEKKLRVAAYCRVSTDQEDQLHSFEAQVEYYTKYINEHANYEMAGIYADEGISGTNTKKRQQFRKMIADCETGKIDLVITKSISRFARNTQDCLMYSRKLKNLNIGIIFEKEHINTLDSTGELLFTILSSLAQDESRNISENCKWGIRTKFKNGELHLNTYKFLGYDKDENGKLIINEEQAATVRRIYNEFLWGMNPAQIAKGLEDEGVPGCLGQTKWYPSTVVGILKQEKHMGDALLQKTYTADFLTKRQVKNNGEITQVYVKDSHEGIIDKETWNAVQEELERREKFMALHGLDHYSYGTEYMPFSMRAFCGECGHLYTRHSWKSRDVVQWQCKNHRKDGKVICKNAYVNNADLEKGFIKAFNKLCGNREKYITRWKEQEENGTPLEKIRAGQMMEITEKEPLKQFVPEMAQLVIQEITILGAKKYEFIFMEGSKVKVSV

SEQ ID NO: 23275 - protein, 521 aa, synthetic construct
MKKVTKIDGVQKNTAINSKLRVAAYCRVSTGSDAQLESLEAQKSHYEQYINSREDWQFAGLYFDEGITGTKAEKRPELLRLITDCEAKKIDFVITKSISRFSRNTTDCLALVRKLQNLDIPLYFEKENINTGSMESELFLAILSSMAEGESASISENAKWSVKRRFQNGTYKLGYTPYGYDWDGKNMIINPEQAAVVKRIFADILSGKSTNAIADELNAEKVPSKKNNHWTASTIRGILANEKYTGDVIFQKTYTDENFNRHTNYGEVDQYMAPDHHEAIISHSDFDVANALVNQRAAEKGIEKGSDKYQQRYAFSGKIICGECGDTFKRRIHTCNTYKYVAWACNTHLKDKKSCHMKYVRDDEIKVAFMTMLNKLIYGYRLVLIPYLKVLENSSGDEAIQRIQHLELLISQNSEQREALTKLMAQGYIDQILYNQETNALLLQAETYRSDIEAITIGMTGDAAKVTETNLLLHFVSHTDMLTAYSEELFENYADHIEVISRNEIKFAMKCGLTFTERIGD

SEQ ID NO: 23276 - protein, 687 aa, synthetic construct
MQSAFFFIPFFGSWRKGLFMAYVRNKKKILKFWSKKKAALYVRVSTRYQVDKDSLPFQRKKLKEYCKFLGIEDFVIFEDDGYSAKNTDRPHFQEMMSRVRDGEFSHLIVWKVDRVSRNLLDFAAMYQELKDHKVTFISMNEQFDTSTAIGEAMLKIILIFAELERNMTSERVTGIMLDRAEQGLWNGARMPVGYRWNPEIKFPEPDPEETKIVQFIFDEYERVRSTTKIARYLNHNQIASKRGGQWTSKLIRDIIRSPFYIGTYRYNLRESGRGPLKPESEWIVRENNHPAIITKEQFDRCNAIMDENGTSRDTSELRARKYVHTFSGRLVCGKCGANMIASKDRARANGWRPSMYRCAQRSRMMDCDNSKTVNESYIGPFIFNYAANLARIQKNFKNIKTLEQLEKELLKGPEFENMKVSKESLRRTFDALAFQEVGKGAYLPDINLSDGDDDYTAAEQLSILKRELDKCKTAIDRLTDLYLYDPDSMTKEEFAKKKRDLVNKIAGYEKQIEASQATGDKDDLADLEFIRKASAFLVAQRIVSKKHVDYIQMALDLDNEILKDFVDQVIDRIEILEGRVQSIRFVNGLVHEFTYSTPADLPVCQKCGGRIGSTCGCRTRTFDFSGKPYRRIKVGDPGDKFHGVAGAVCPECSAQAGRWHHWKCGIERCPICGEQLIACEHGLNGKD

SEQ ID NO: 23277 - protein, 459 aa, synthetic construct
MNNTHFYSHYPSIEYKTCALYVRCSKEEQAKFGDTIEAQKADLKEFAKQHHLKIFDIYVDEGYTARKKYNKRKEFMRMLEDVELHKFEYIIFTKLDRWFRSIADFYKIQEILDNNGVTWLTALERYEMETTNGKLNVNIRLSVAQDEADRDSDRIKDVFRLKVKKGEAITGSLPIGLMIGENGKVDINPDTVQIAYDMFDYFETHNSKRGTLLYLIDKYDRYFCYETVARALRNPLYKGEYRGNSNYCPAIIEPDRFNRIQKLGVRNVKKRKNNRYYIFSGLAECKECGHSLVANTIIQRRYNREYTNYRCNYYSNSHLCNHSHGINEKKIETYLLNNIKPELEKYVADYELKQKITSKKTDPSKIKNKLQRLQELYINELIDLDDYRASYNQYKKELDEITSDTIPVKKDLSSIRSFLNLDIQNIYDSLTPQERRALWGSIIDKLIISNDEDIEIIFL

SEQ ID NO: 23278 - protein, 483 aa, synthetic construct
MKQKIAAPPADPVADLVDLYIRVSTTEQALEGYSVAEQESRLRRYSEAMGFRIHKVHIDAGFSGASLDRPAIKEVIRDIQSHLVSKVIVWKLDRLSRSQKDMLVMLEDVFLANDCDFISMMESFDTSTAFGRAIVGILAAFAQLERENIKERTTMGRRARLAKGHYNGSRPPLGYRFLEGSNDLKVEPYEANMVHEIFSSFLAGQSINAIAATMQRKYPTTRTWNNTMIRRTLKNPVYMGKVKDVDVIRDGIHEPLISESEFVMASAVLSHNREIKKQSCRSNSLLTGLLYCGDCGARMQPRQIARGYPLRRYVCYSVSRTNKSMIRSDHCTNRLHPYTLEELDDIIIGEIRKLAADEDYLRAIIREDAGPILDESELLKDRLSEIDKQTDKLLNLFQIGVVDLSQIEQRLADLKQEREALKERLERTAPVVQMDIQKIQSYADAFQAALDSGDAEYQSSIIRLLIDKIVVLNEDIEIHWTFC

SEQ ID NO: 23279 - protein, 512 aa, synthetic construct
MQTEYAIYLRKSRADIEAEATGAGDTLARHEQILMSLAKSRALPIGAIYREIVSGERIANRPVMQRLLTEVEEGRWKGVLVTETSRLARGDTIDQGIVAQAFKFSGTLIVTPSKTYDPTQEADEEWMEFGLFMSRQEYRMIRRRMNAGMQAAKREGRYISNVPPYGYERYKLEGRGWSLQPIEPQAKVVRMIFDLYLSGLGYCEIEKRLNALHIPAPKSDKWSARTIPGILRNAHYIGCIPAAFRPGKKVVKDGQIKITRPRVKSCELYKGLHEPIISREVWDQVQARLGKNAAVRTPGNRQQSNPLAGLIVCDCCGKRMQRRPQPEGIQTQIICTTRGCPTVAHSDVELEQLVLASLRTYLAKLEAGKPEVLDLSAERKALADIEKQIASLDSRMRRTYELVEDGTYTREIFLARQAEISKEREKLTAERAEIEQQISGRESEYAAQSSLAPKIHSVLDVYTTDLTPKERNRLLKQVIDHIDYHKRKRMRWNPESDLTLTLHPVVVSSTHH

SEQ ID NO: 23280 - protein, 453 aa, synthetic construct
MECVAYIRVSTEKQAEEGYGIDSQKRDIIAYCRKNELIITDWYIDDGYTGANMDRPELNRLINDCSKKRVHFIVAFKLDRLSRSMVDGIYIIERIFQPNGIVFKCVHDSISYDSPMEQAYTQMMAVFAQLDKNTMLLRMRGGMIERVKKGYWMGGGNTPYCYNYDKESGILVPIPDRKRKANIAMDLFIEGHSDIYIKDTLGFSSELVVRSILTGVVNIGMIPYKGVIYQGLHEPIFEKDKFEEAQELRKLRRNHKQSCQADANILTGLCVCGICGCKMRYQKWTHGKHKIYCCSRNKHLSYLPNYNHSCNNSIEWADEIEEQVESKILKISLSLSEYKPKSKESKLEIMQLQLEREKTKLKRLYVLYSEGNDTVLEMIKSSENVVSETERKIEDEKRSIQESPKKETVFNNIKMLADVWPHINKQKKNNILKNIIEKVVIVNGDIEIQLKTF

SEQ ID NO: 23281 - protein, 577 aa, synthetic construct
MARKKNIAAGLDAVIYARYSSHNQREVSIEQQIAECTKHAAALGLRIVGTYEDRAISGKTDNRPRFQQMMRDAEKGKFQAVVAWKSNRIGRNMLQAMVNEAKLDDYGVKVFYAEEDFDDTAAGRFALRNMMNVNQFYSENMAEDITRGLYDNANKCMANGRQPLGYKRGADGKVILDEPAAAVVREIFTRVAAGDLFVDIARDLNAKGIKTSKGAAWNKGSFQSICQNERYKGIYIYGNVRIVDGIPRIVSDELWYKVQEAMRMKKNPVGTRHRVGAEDYLLTGKLRCGHCGSYMTGISGTSRNGELHYYYTCQKRRTEHACNKKNVRRDVIEPAIAQAIKMYCLTDDVIEWMADQTVQYWEKHDNDLQIEALEQQLAENKKATSNMLKAIEMGIITEATRSRMVELETENSKLTAQLSAAKRDVVKINREDLIDELHVLRSKDIHDREVQAELFKDFLVAAYIYDDNRLKLVFSFMGKDNSVEIPLETGEDPPDGEDSPDAKMFVLTPDCSTKKALYFVGSMVLFFLLKPIFWGCIASLAPFSGFCRRSSYAPAIPRDGAICSSMERRLVKNHDLW

SEQ ID NO: 23282 - protein, 515 aa, synthetic construct
MKRVGCLYRVSTKKQTYNNDIPVQKEACRKFIKTKNDWTLEKEYMELGVSGYKVREKERDVLQTIKKDVSNKKIDILLVFMFDRIGRREDETPFVVKWLIDQGIEVWSVNEGQREIKNSYDRLINYITYWQAQGESEKISIRAKEERIRLTKLGIYMGYYAPFGYKMVESDLYSKIGKQRKVLEIYEEEAKTIRLIYNLIAINEYGTDKVSIYLNNKKIKRRKKGILWDSNAILEIVKNPIYKGYVSFGKRNKMKGNDKRRQKEDWIIAEKRNDSIVIISEEIWEKANNLIISRKRKSGERVLRLLSGYTRCGYCGNYIVPKGKTKYTYMLCKGKQKTGKCEYSKNYRVDILEEIVSNEIKTYLDTYKKIDLKNVVKKRIRNIKERKEKVVLLNQKISNSQNRIVELKNEIILALMENNQDKKKKINDEYNSELENLAHLNKNLEELQDEINKNNKDINNLKRCIPVWSKEFENAPLEIKRQILDKLIDKVYLYNDKVEIRVKYPISTILIGERN

SEQ ID NO: 23283 - protein, 562 aa, synthetic construct
MDIKRVGCLYRVSTLKQVEKNDIPMQRIACGEFIKSQNNWKLTKEYIELGVSGYKLSESKRDALQDIKKAVLNKEIDILLVFMFDRIGRREEETPFVVEWLINKGVEVWSVKEGQRKIENRADKLINYLTYWQAGGESEKTSIRVKEAQTQMAENGILTYGGKRNAPYGYEFIKSGTYTKKGVERQKLIIKNDEAELIKDIFGMYVKKGFGIGRIAKELNDRKKKPRRAMVWATSTVGAILGNPIYMGYPAYKKKTTTNATGLKKQPFENWVLPKMKVESLAIIDEEMWYEAKKIREDRAKNLEFAKPRQTKSPLLLSGIVKCGECGYTFTTSESKKKKPDGGTWEYYYYKCSSTINTNTCCLEKKSIKKEVLEEIVLKCVYNFLDSLEQVDLSEAIKQGVFNNCDNDVKELKKCETQINEIDANIKALKDEVIKTLTGESSFTAELLNELISEKEKQKIEIIETKNCIENKIRQKKVEDNELLQIKERIPIWKEEFENADIVIKKMLLSEIIKEIRIYNDRYEIDFRVQLNKYLKAISEIDNVKMKSIESKLLETTAKIER

SEQ ID NO: 23284 - protein, 518 aa, synthetic construct
MEEITKIEGNIAIPHADKKLRVAAYCRVSTKSSEQLLSLETQKAHYESHIKKNPGWKCVGIYYDEGITGTKKEKRPGLLKMLRDCELGKIDYIVTKSISRFSRNTIDCLELTRKLLNLGITIYFEKENLNTGSMESELMLSILSGLAESESTSISENNKWSIQRRFKNGTFVVAYPPYGYENSGGKMVINEEQAKIVRRIFDEVLAGKSTHSIAKTLQEEGIPTKKGGTWTSTNVRAILANEKYTGDILFQKTYTDIYFNRHYNKGELDQYYMKNHHEPIISHEVFEKAEALIEQRGKEKGVEKGSDKYKKRYPFTSKVICGECGTVFKRRIHDSGKKYVAWCCTLHIEDKEQCTMQFIRQADLELAFVTMINKLIYGKKFILKPLLESLRGRSKTDGFLQIQEIEDKLEQNAERIQTLTNLMTKGYLEPAIFTGENNRLRQEAEELQKMKINLSYEINGEMSKTEEVSRLLKFIEKAEMLTVFKTEVFQEYVDHITVLSREELAFNLKCGLSLKERV

SEQ ID NO: 23285 - protein, 521 aa, synthetic construct
MNSEVTIIPARKRIGTRRMEEEKPKIRVAAYCRVSTDSIEQASSYEAQIEHYSNFIKKNNEWDFAGIYADDGISGTNTKKREEFNRMVEDCMSGKIDMIITKSISRFARNTVDCLNYIRQLKDKNISVFFEKEGINSLDAKGEVLLTIMASLAQQESESLSQNVKLGIQYRYQQGQVQVNHNRFLGYTKDENKKLIIDPTEAEIVKRIYYEYLEGKSLIQIARSLEADGILTAAGKAKWRPETLKKILQNEKYIGDALLQKTYTVDFLTKKRVKNNGIMPQYYVKNCHPAIIPRDLYMQVQEEMVRRANLRSGETNKKRVYSSKYALSSLVCCSKCGDIYRRVQWNNRGKHSTVWRCCTRVQQGPSTCDARTIAEEDLQDAVRQAINKALGYKDTFLPTLQANIEKVINGGSDSETATIDIRLEELQKELLKRANTKIDYEDIVEEIYDLREQKQSVLEKAAEREGEKQRMEDMIAFLNEQPLVVEEHDENLVRRLIQKVKIYEDKYAVEFKAGMEIDMLM

SEQ ID NO: 23286 - protein, 520 aa, synthetic construct
MKNVTKIDQVDLSIFKKLRVAAYCRVSTDSNEQELSLDTQKNHYESYIKANSEWEYAGIYYDDGISGTKTTKRDGLLRLVEDCEKGLIDLVITKSISRFSRNTTDCLALVRKLLNYDVYIIFEKENIHTGSMESELMLAILASMAESESRSISENEKWSIKKRFQNGTYVISYPPYGYANVDGEMVIVPEQAEVVKKIFAGCLAGKSTHIIAKELNEKCVPTKKGGKWTGGTINGILTNEKYIGDALFQKTITDAAFKRKRNYGEEEQYYCEDHHEAIIDRDTFEKAKEAIRQRGLEKGNCCEDTSKYQNRYVMSGKIKCGECGRSFKRRYHYTSHGRSYNAWCCGGHLEDSKSCSMKYIRDDDMKRVFLTMLNKLRFGSDLVLKPLLIAITTGNSKKNIHSMEEIKKEIAANEEQRKQLNTLLTKGYLERPVFAEAHNKLVTEYEHLIAKRDMLYRMDDAGYTIEQKLKELVDFLNGAEPFTEWDDSLFERFVEKVKVLSRDEVEFELKFGLRLKERID

SEQ ID NO: 23287 - protein, 524 aa, synthetic construct
MAGAKNITVIPARKRVGNTATADNKPKLKVAAYCRVSTDSEEQATSYDAQVEHYTEFIRKNPEWEFAGIYADDGISGTNTKKREEFNRMIEDTMAGKIDMIITKSISRFARNTLDCLKYIRQLKEKNVPVFFEKENINTMDSKGEVLLTIMASLAQQESESLSKNVKMGLQFRYQNGEVQVNHNWFLGYTKDENGHLIIDEDQAIIVRRIFREYLQGASLKTIADGLMADGIPTATGNKKWRGDGIRKILTNEKYMGDALLQKTYTVDVLTKKRVSNNGIVPQYYVENNHEAIIPRQLFMQVQEELFRRAHLKTEGGKTKRVYSSKYALSSIVYCGKCGDLFRRVAWKARGASYNKWRCASRIEKGPKKGCEADAISEVELQNAVVRAINKTLGGREQFLIQLQHNIEEVLNGDSTATLEYIDQRMAELQEKLVMCVNKNAEYDVIANEIDALREKKAAVVTRDAEQEMLRKRIDEMRQFLQTQTNRITEYDEQMVRRLIEKITVFDDKLIFEFKSGMSIELKR

SEQ ID NO: 23288 - protein, 558 aa, synthetic construct
MNRSGKKCVLYPRVSTEMQVDGFSLDGQKNSLKRFADREEMEIVNIYEDAGKSGKSIDGRPAFKQMLFDIENGLEIEYILVYKLSRFGRNAADILNSLEHVQSFGVNLICIEEGIDSSQTSGKLLISVLSAVAEIERENIIEQTMNGRKEKARQGGWNGGFAPYGYYLKDKQLYIQENEAEAIRIIFDKYVNDNMGFNKIAKYLNLQGVEKVKRDNGTLSQWSTHFVRMILDNPVYCGKIAFGRRTREKVKGTKNEYRQVRQDDYIIADGQHDAIIDEELWNQAHEKREITGVKSPSKIGRDRAHLLSGILKCPKCGGPMYTNKHAWTNKDGTYKEVYYYVCSKARTARGKTCEYKSMLKKTDIEPLVIEAIRELIKNQDFATEIKSKIGKEIDTSTLNRELKNYEAKLREVDLNKSRLENEIDSLPEDTRFRERKINDMTFRLDGLYDIIIELEEKIEDVKLRRKAVEQDAITLENIYTLLANFDKVYDKINDEEKKSLISSLIKEIEIFPCDEADLPLKSILFNFPVYKDGGDVCGFLWDKSTIVSQWLELMALMS

SEQ ID NO: 23289 - protein, 520 aa, synthetic construct
MKRITKIEENEALSVKAKTRVAAYCRVSTASDEQLISLDTQKAHYEDYIKSNDEWEYAGIFYDQGITGTKKECRDGLNALIDSCEKGLVDLVITKSISRFSRNTTDCLELVRKLMALNVTVIFEKENINTDTMESELMLSILSSLAESESVSISENNKWSIQKRFQNGTYIISYPPYGYENAGGEMIVVPEQAEVVKKIFEDTLAGKSTHAVAKELNDSGVKSKKGGKWTPGAINAIIRNEKFTGDVIFQKTYTDSQFGRHTNDGELNQYLCENHHEPIISHEIFDKANEVLNQRGREKGNGERTERYQNRYGFSGGIKCGECGGVFKRRIHYKPSGSYIAWCCTHHIEDRNSCSMKYITDDGVKTAFLTMMNKLIFAHQMILKPLLHSLQGFDDKDRLLQIQEYETKLEKNMEKRQVLTSLMAGGLLEPALFSKENNALILEEKHLQEEKKQMINSVSGDRTKIEALETFIKFASGSEMLTEYSDEIFLSYVEGITVLSRKEIVFELKCGLKLKERLVG

SEQ ID NO: 23290 - protein, 521 aa, synthetic construct
MNKSITVIPARKRVGNTVNKEVKPKLRVAAYCRVSTDSDEQATSYDAQVEHYTNFIQKNEEWEFAGIFADDGISGTNTKKREEFNRMISECMEGHIDMIITKSISRFARNTLDCLRYIRQLKEKNIPVFFEKENINTMDSKGEVLLTIMASLAQQESESLSKNVKMGMQFRFQNGEVQVNHNRFMGYTKDEDGHLIIEPAEAEIVKRIYREYLQGASLKQIGDGLMDDGILTAAGKAKWRPESVKKILKNEKYIGDALLQKTYTVDVLTKKRVKNNGIVPQYYVENSHEPIIPRDLYMQVQEEMLRRANLHSGANRKKRVYSSKYALSSIVYCSKCGDIYRRIAWNNRGKHSTVWRCVNRVEHGPDCCDAPTVQEEELQNAVVKAINTALGGKDEMLTALEKNIAMVLALEDETSMESLDAKLEELQQELLKRANARQDYEDLADEIDLLREQKQNAMAENAEREGLKQRIAEMQQFLAEQRGTIQVYDEQVVRKLIEKITVHDEKVTVAFKSGMEIDVKM

SEQ ID NO: 23291 - protein, 528 aa, synthetic construct
MLDNSNVAPGKNKTLRCAIYTRKSHEEGLEQEFNSLDAQRESAEHYIEAQRMRGWTALPDRYDDGGFSGGNMERPGLRRLLADIDAGKIDVIVVYKVDRLSRSLLDFMKMIDLFNEKGVSFVSVTQHFSTTDPTGRMFLGILITFAQYEREVIAERIRDKVAAAKRRGKYCGGVPIIGYDVDRENKKLLVNPDEARTVQYIFRRFIQIGSAKKLGQELNEQGYRTKAWTTKKGRVREGSEWNTAHIYRLLNNRIYIGEIAHKDRSYPGEHEGIIDRATWDKVQAILEDNKPVKVSMARTKMVAPLKGVIRCGHCGCAMGPTYARKNGRHYTYYICQKDSKRTVSRCPLKRIPAGDIEQAVIEQLSAVFRTPTLVAKTYFAARDIEQAERERLSKQKAQLEMELSQAREQALELMKPGNDQPGKTEMLTTVNRQAVELSKQLTHVSERCKAYQGNSITEQDVSEAFQNVEGFWEDLFPVERNRLIRLLVDKVEIRETGIDMELRTNGLTTLIAELAGLACEVTERRASR

SEQ ID NO: 23292 - protein, 515 aa, synthetic construct
MQYLIYLRKSRADQEAELRGEGETLARHEKALLELARRQHLPIADIYREVVSGETIASRPMMQQLLSEVEQGIWNGVLVMEVERLARGDTIDQGIVAQAFKLSDTKIITPIKTYDPNNEFDEEYFEFGLFMSRREYKTIKRRLNNGRQASVKEGKYVGNRPPYGYERIKIENDKGFTLKPLEKEAQVVRMMFRWYAYGAHGISTIADQLNEMAIPSKTGKQWVYPTVRDILQNPVYVGKIRWGWRGQRKRVKNGSVSVSRPRSDDYLLADGIHPPIVDQQLFDQVQKKFSMHKPLPTSAREMKNPLAGLVICAKCGAKMQRRPYQRENIRTGLICPNNKCRNVSAPFDDVEQKLIEVLAEYIKEEKLRISNGHTQIDDSILQILQNQLADLREETVDLNKQNDNIHDFLEKGIYDVDTFLQRSQKISSRITEIEEKQKTLQQEIIEENKRIESATSIIPMTEQLLLQYESMSALEKNSMLKEVLRCVKYERECSIRDGGTADNFTLYLYPKISHK

SEQ ID NO: 23293 - protein, 484 aa, synthetic construct
MNQKKTVPISAKLLESAADIYIRVSTTEQAQEGYSVEEQEKRLQQYCKAMDIKVHKIYVDAAYSGSTLERPGIQEVIRDVRAHKVKKVIVWKLDRLSRSQKDTLIMLEDVFLENNCDFVSMLESFDTSTPFGRAIVGILAAFAQLERENIKERTSMGRIARIAKGHYSASHPPLGYHFIPGSNDLAIEEYESNIVQEIYTRFLSGESLNGIAESMKNKYGESLRTWNNTFIRRILENPVYMGKVRQNDKLYDGIHEPIISETEYYMVAALLEHNRQINKQSRRSESLLTGLLYCGDCGARMQPRRVASGYKLHRYICYSVSRTNKAMIRSNNCTNRLHPFTLEQLDNMIIEEVLRLAVDKEYLQSILEKDTAPKVDETELFRERLVEVKKQMDKLLNLYQIGAVDISDIADRLESLKEEKEALQHNIDRSAAETPLPIEKIQSYVQLFKEALESGDNDTARQIIRMLIDKIVVLNEDIEIHWSF

SEQ ID NO: 23294 - protein, 467 aa, synthetic construct
MIRKRDDFQAMIDDCMAGKIDMVITKSISRFARNTVDSLIYIRKLKERNISVFFEKENIDTLGSGGEMLITILSSQAQEESRNLSENVHWGYVRKFENGVVYVNCKKFLGYTKDADGNLVIVPEEAELVRRIFRMFLEGNSSMKIAKILTEEGVKTVTGKNLWHATVIDKMLSNEKYMGDALLQKTYTVDFLSKKKVINKGIVPQYYIEGNHEAIIPKELFYKVQEEKARRANIYRPAKKKGATVKSKYSSKYVLSDIMYCKECGQPYRRQVWVRNGNKKPVWRCDSRLKQGAKQCRHSPTLEERTLHGAIIQAINSVIEDDGEFVEAFRENVIRIFGSYAKDVEPTEYDEEIERLQKEMLLLIERSAREECVDDEFDRAYQEITNQIKVLKKKRLKALKEKQLAEAYEEREAGLDGYVNKVSYLKREFDDELVRSLLERIAVVSEDKIEIQFRSGIVMTQRIDYYD

SEQ ID NO: 23295 - protein, 536 aa, synthetic construct
MGKKVVKIVTRIESVSQKLKPHEVPSVRVCAYCRVSTDGADQKNSFESQVDYYTRLIAEKEGWVCVGIYADEARSGTKTTKRDDFNQMLQDCRPGKIDMIVTKSVTRFARNTVDSIQAIRELKSMGIAVYFEKERVNTLSEDSEQLITILSSIAQGESESISSNNKWSTVRRFKNGTFILSCPPYGYQKAENGDLIIHPEEAAVVRRIFDEYLGGKGSYTIAKELERDGIPTVRNGKVWMDSTVKGILQNCAYEGDLLLQKTISAEVIPFNRKRNHGELPQYLITDDHEPIITREEAEAVRQIYEYRRQKQCVEDVSVYQSRYAFSGRIVCGECKTNFRRQKIYIGKPYEKVQWCCYQHIQDRRKCSQKAVRQDVIEGYFVRLWNRLATNYEEILYPMLAALKTIRSNPQMEQEMKELENRIQELKKQSHMLRKVLTEGGMGSAVFIERRNQLDQEMEAAWRRQRNLREQRTYEWEIRQTEFLISIFKNRPPIIEQFDEELFCLIIEQITVYPEKRLEFQLKNGLKLEETNRKAVG

SEQ ID NO: 23296 - protein, 546 aa, synthetic construct
MQAEQKFAGCYFCTYFYILYREVIQMDALERNCIYLRKSRADREAEARGEEETLARHERILLDLAKRRGCHIGAIYREVVSGETISARPVMQHLLQEVESGLWDGVLVVEVERLARGDSIDQGVVARAFQYSDTKIITPAKTYDPNNEFDEEYFEFGLFMSRREYKTIKRRLNAGRLSSVQEGKYCGNKPPYGYERVKLQGKGFSLRPVPAQAQIVRLMYNWYAYGVSGERLGMQKIARKLNEMGIPTLSGKPWSPATVVNILDNPVYTGKIRWNRRKAVNKIEDGAVVKTRPRSNDYIISDGLHEPIISQELYDLAQCYRQQNPPRPIGVMNAVKNPLSGLVHCGKCGHSMVRRPYANRKQEDTLLCPYTSCDNVSSRLSLVEKAVIAGLAELVQSYKVNDTLNDNNGVDIIAAKEKILVEKRAELDNLTAQKARQYDLLEQGVYTTEIFLERSGATAKQIRDCSAAIERISSELDHDRELLAQKFNFIPKCEHLLSNYWDWDIPTRNSVLKELIERIDYTKDSKNGFKHGDEITFTLDIYPKIQ

SEQ ID NO: 23297 - protein, 528 aa, synthetic construct
MQTTGEFKITALYARLSSDDELQGESNSITHQKQILEEYAATNNLNNYQFYVDDGFSGTNFERPGFQRMVSDIKNGVIGTVVVKDLSRFGRNYLQVGYYTEMMFPEYDIRFISVTDNVDSNFGYNEFVPLHNLMNDWYAKDISRKQKAVIQSKGNSGKRLTTKAIFGYKKDDDGQWVIDSEAAEVVKKIFKLCLDGYGTQMIANYLFAEKIKNPSAYMGYVCRTKGDKNPYLWTAQTISSILSRQEYCGDTVNFKTQRKSCMSKQIIYNNPEDYKIFYNTHTAIISREDFKKVQEIRSKRKRISPIQKPVLFDEIYCADCGHRMYIMRLRDKSKPDAYSCSKYRKNSLVCSSHYIREGYLIEYILNELNVLLNSAQDEDFRKKIKDEFSKKNSLTQVEIKKNLANAQKRIDEINVIIKELYEDKVNGNITLEIFQKLSSEFINEQKELSNAIIDYSKERADLDNSKDALKGFLDIVEKYRTQGSITQLTNEIVDDFIDKIEVFESKKVDGKRQQKVNIYFKGIGILSV

SEQ ID NO: 23298 - protein, 519 aa, synthetic construct
MKKITKIGVNETLIQKKKLKVAAYCRVSTASDEQLISLEAQKTHYENYIRSNDEWEYVGLYYDEGITGTKKDVRAGLLSMIADCEDGKIEFIITKSISRFARNTTDCLEMVRKLIDLGVHIYFEKENINTGSMESELMLSILSGLAESESISISENTKWAIQRRFQNGTFKISYPPYGYQNMDGQMIVIPKQAEIVKYIFAEVLSGKGTQKVANDLNQKGIPSKRGGRWTATTIRGILTNEKYTGDVLLQKTYTDSHFNRHTNYGEKNMYLVENHHEAIISHEDFEAVDVVLNQRAKEKGIEKRNSKYQNRYSFSGKIICSECGSTFKRRIHSSGRKYVAWCCSKHIGNITECSMQFIRDEDIKTAFVTMMNKLIYGQKFILRPLLNGLRNQNNVASFRRIEELETKIENNMEQSQVLTGLMAKGYLEPALYNKEKNSLVQERERLLAEKDQLTRFVNGNLAKVEEVNHLLRFATKSKMLTAYEDELFENYVEKIVVFSREEVGFELKCGITLKERLVN

SEQ ID NO: 23299 - protein, 573 aa, synthetic construct
MAKVKLPDKPRVAIYTRVSTLHQIDKDSLPMQRQDLINYARLILNTEDYVVYEDAGYSGKNTDRPKFQEMMQQVRLGMFTHILVWKIDRISRNLLDFATMYSELKQLGVVFVSKNEQFDTSSAMGEAMLKIILIFAELERNMTSERVTAAMLSRAANGQWNGGRVPLGYDYDPETKTFTINESEAAVVKIIHDKYEQERSLVSLARYLNGHGYRTRTGCTYSPSTLLIILRNIFYCGDYRYNVLKDGDRQKRKKESEWITVKDHHPAIISREQKEEIARILKENRRLECERRGIYSKKKNVHVFGGLVICGNCGHAMTSTIRPADQDGIRWSVYVCPTKRRSEYLCKGRATSEVVLGEFVFNYILNMLNVQKNFDSINSVEDMEKMLLSGSTFRDVDGIERAGLDDLYNMLASGLTEKAPFDSSVEVRKKPIVSDIELENLNTEKTRIERAAERLQNLYLYSDDSISQKDYIIQREKLMSQLAEVNEQIGMVMSNADEKDVSDEEFVHAASKFILTQKLEGRTYIYYKRLATTVSREVLRSFVMSIIENITIYDGRVQTIVFKNGLSHTFILK

SEQ ID NO: 23300 - protein, 527 aa, synthetic construct
MAYCLYLRKSRADIEAEAHGEGETLARHEKLLLEVAKRGHYNITQIYREIVSGETIAARPVVQKLLQEVEDGKWEGVLVVEVERLARGDTIDQGVMAQAFKYSGTKIITPLKVYDPANEFDEEYFEFGLFMSRREYKTIKRRLVRGRNASAKEGKWVSGLAPYGYERVRIKGDKGWTLRPVEEQADIVRFIFKLYTSGEEDDNGEVRRLGTYTISKRLDSLGVAPPSSAQYWNDRTVQCILQNPAYIGKVRWGVNKSKKRIVNNSIEVERYKAPADEVIYVDGLHSAIVDEAIFQKAQDLLQRSGPPPVPKRNSVVNPLAGILVCGKCGRSIVLRRGRIDILICHNRICDNVGSKYEYVEERLLQALSSWLDGYRLEWSDKLPADEQAILDLKQKALRKTVTELETLHKQLERTHDLLEQGVYDTDTFLVRSRSLTERIAAAEEDISTLTAEVQADKERAASRLNVIPKVEKLLEVYPVLPSAQAKNEMLKEVLEKVEYTKNERSGRNGPFDNFELVLYPKLPPKIE

SEQ ID NO: 23301 - protein, 648 aa, synthetic construct
MKKTKTKCYLYTRVSTSMQVDGYSLDAQRDKLRKYAEYEDMVVAGEYSDEGFSGKNIQGRHEFQRMLQDIQDCKDGVEYVLVFKLSRFGRNAADVLNSLQLMQDFGVNLICVEDGIDNSKDSGKLMISVLSAVAEIERENIRTQTMAGREQKAREGKWNGGFAPYGYRLEKGELLIAEDEVDVIRTIFDRYIHTNDGVSGVAKYLNRQGFVKKLRQNGTIPGFSASFVKSIIDNPVYMGKIAYGRRRTEKKIGTRNEMHVVEQSEFPVYEGKHEAIISEEDWNLAQEKRKINAYRREKVNDPTHAHILSGILKCPCCGKSLYGNIAKAHSKDKKTRYYYYCKNTVTPTGHECTFRLNIEQMEMNRMVASIISAMVSDPRFADAIKAKIGSAVDTNDLEKQLEALQAQLRQTLGTKARLERQMDGLDVNDPYYDRKISDLQRRYDEQYGAIDEIEVQIDDVQSQIRSIRQEKISGDNIYRLLLAFDQVYEAASEVERKEFMRAFIERIELFPEKQPDGNWIRKIIFNFPVPVNGTEVKELPLENETIVETVVKLSLKKDTPKIEVIMKPDEESNYTPEEKATYPKIKEYVKNKYGVNVHTSYIAQVKRMCGLDMGENYNKSKKENPEVNQCPQEKVEYIKDALRHFGVI

SEQ ID NO: 23302 - protein, 523 aa, synthetic construct
MTTAKNVMVIPARRRLGNTVQAEERPKLRVAAYCRVSTDSDEQATSYEAQVEHYTAFIKQNSEWEFAGIFADDGISGTNTKKREEFNRMIGECMAGNIDLIVTKSISRFARNTLDCLKYIRELKEKNIPVFFEKENINTMDSKGEVLLTIMASLAQQESQSLSQNVKLGLQYRYQNGEVQVNHNRFLGYTKDEDGHLIIEPVEAEVVKRIYREYLEGASLLQICRSLKADSILTAANKPHWRPETVKKILQNEKYIGDALLQKTYTVDFLTKKRVKNNGIVPQYYVENSHEAIIPRDLYMQVQEEMVRRANLRGGKGGKKRVYSSKYALSSIVYCGQCGDIYRRVHWNNRGYKSIVWRCVSRLEEKGSECTAPTINEETLQTAVVKAINELLANKEPFLQALQKNIATILNEENDNATNDIDSKLEELQQQLLIQAKSKNDYEDVADEIYHLRELKQNALVENAEREGKRQRIAEMTDFFNEQSCELEEYDEQLVRRLIEKVTVFHDKFAVEFKSGVEIDVEG

SEQ ID NO: 23303 - protein, 520 aa, synthetic construct
MGKITKIPASISRYTSAPIDAVVKRKVAAYARVSTDSEEQLTSYAAQVSYYEEYIKGHKDWEFINVYTDEGISGTSMRGREGFQRMISDALAGKIQLIITKSVSRFARNTVDSLTTIRKLKDHNVECYFEKEGLWTFDSKSETILAIMSSLAQEESRSISENVTWGHRKRMADGKFSIAYSTFLGYDKGEDGKLVVNPEQAKIVKLIYRLFLDGMTPYSIAKELTNRQIKTPTGKDKWNQTTVIRILTNEKYKGDALLQKYYTVDFLSKKTKRNNGEIPQYYITDDHEAIIEPAVFDLVQKEIATRPRGNSRYSGISIFSSKIKCGCCGGWFGSKVWHSNDKYRKVIYQCNQKFKQKCSVSHISEKEIKSVFVSAVNQLIKNKKELIANIEMIYRVICDVTTLEFEQERLGNEMTQLAEQVEAAMYENSRVALNQDEYRTKNNKLIEQFETTKAKYNEISEQIADKQNRSQQLRQFCDALQKTNEPITEFDEGLWGALVDCITVNPDGTKVVTFNDGSIV

SEQ ID NO: 23304 - protein, 581 aa, synthetic construct
MYGLNSDFQKRDVAIYARVSTEHEAQLSALENQIDWYKPILEARPDWTLTAQYIDEGITGTSAEKRPRFMQMIEDARQRKFNMIITREVSRFARNTVDTLQYTRLLKEYGVEVFFINDNIKTFDGDGELRLTIMATLAQDESRKTSIRVKAGQQTSMQNGVFYGNGNILGYDRVGKEMVINPEQAKTVRMIYDMYLSGMGVTAIQYELEKAGRLTAMGKERWFSSYIAKMLRNSFYCGIITYHKEYTPDFLKQKKIKNYGDLEYVQVQGTHEPIVTVEEYEQVQKLMDAKSVVMKNHNKGKRRVGRMQHTTAFGRLMICQCGNKFNLRFHSRDGRTDGVDYQCYTSVNRGSVAKRLNKGISIEHSCESPYIQGWKLEMMAEQVFDRYIENADKVIDLSYAMLEKHIADQEELPDNTDVIQRKQGEIEKLMNKRTNLIEMRAEGDIDKEMFRSKKQEIENRVAKLTEEIKGLQPEKEPTSNEDYSAKLLELRERLKEYTGFDYSVIPESIVEAFVERIWVSKDEFRWYLRTESKEEGEFDPDDHIKIGSFTQTIDDAKKYIYSFSTRRRVYKWVDLNVSVWI

SEQ ID NO: 23305 - protein, 600 aa, synthetic construct
MYQTNTVFQIPNTFVLDRNRERKAVFYGRVSTEHEAQLAALENQMQWYEDQAKYHPNWTVLDKYIDEGITGTQAKKRPAFMQMIEDAKQGDFDLIVTREVCRFARNTVDTLVMTRELKNYGVEVYFVEDNIWTMDGDGELRLTIMATLAQEESRKISERVRAGQKISRDNGVLYGSGNIIGYDRVNGTYVINEDQAETVRMIFDLYLEGLGETKICKELCRRQRKDGHGNVSWSVSKISRILRNATYMGYKCYLKSYSNNYLEQKRIKNLDESTYLYVKGDFEPIIPEEVFKRCEEIRKTRTTKMIVNKGERTYGKRASQDVWLRKLRCSCGSTFRKNKWRTNQRGDTVYGYQCYNQVNNGSKGFREKNGLDTDGYCDIRMVGDWKLDLMAKKIFETIWTDRKEDAKLAYKLLRECYQADASRNKATIAAVQGKISRATGRMENLIAMRADGEISKEQFQTLRQKAETELAALNEELGRLNSAFDDETDALDMAAIEAALDSMLDFSGPTIDSNIIEKFVCRITPVDNGHYRWDLNFAPNKKQAIIGAVEGRKGKASVEIKEYGEDDEHPHRTYDRSIQFSTDGTIAYFCLIAACAASDT

SEQ ID NO: 23306 - protein, 506 aa, synthetic construct
MAIALYARKSIERENSISCETQIEYCKSVIKPDERSEKTIEFIDNGYSGGNVDRDGFQKMMRQIERGKISKVIVYRLDRISRSLSDFVGILETLKKHNVQFVSSQESFDTSSPYGEMIVKILMVFAEFERKSIIERVKHAYAYRSEMGLYMGGRRPYGFNLKDTVINNVKTKMFEPVANEIEQIKYIFENYSIPNVTLRRLMDNLIDNNISATTGSWSTAKLSNIIKNPIYVKADNAIYEYYSKRNANIMSNINQFDGLHGIQTYGKSKHTADDMSDIKIVVMPHDGIINSDLWLKCQKKIEKNKKLGNSVNNSTSWLGGKIACKQCGRTMTVTKGGKKKDGTQTRYFSCTGKSHNRICNGPKVTLYADSLEDMVYNLIAEKLQSLKGSRKKISTDNSNKINLLKNQLSEIKQSQEKIVNMLLDDSFKSDMKSLLNEKAKKLSEESKAITEKIEDLESEENEIISVINLSQKWKSANTDERKAVCNVLIHKIFICEDGTCEVVWNI

SEQ ID NO: 23307 - protein, 538 aa, synthetic construct
MKENILRVAAYARVSTDKEDQTNSLLSQRSYFADYITHHEGWKLSEVYYDEGISGTQIKKRSGFKKMIQDALNGEVDLIITKEVARFARNTVDTLSYTRKLKSAGVGVIFTIDNIDTRDADGELRLTIMASIAQEESRKTSERVKWGQKRQMEKGVVFGRDLLGYTVQNGQLHINEEEVPIVQAIFHKYTNEGKGTWTIANELLVEGMRPKRIALWSNVVILRVLRNEKYVGDLCQKKTYTPDYLTHSKKYNRGEEEMVYLKEHHEPIIDRDLWNRTQEELKRRSPSEEQKSKHSNRYWCSGKIHCAECGCRYVSRTKKLMSGDVYKAWRCYAAANHGTKKQDADGNEIGCNNSSINDRSLKTCMNYCITLVQGERDSLKKEILKEISQLQKTTAKKLDSKKIKKKIDNLEMKKRKAIDLMLDGLISKEDLQSQTEWYNEELEKLNIQLSDALQKDKSDSRQVNHMEKYIKALDEIMELDGDSEDVYKEVLDHMEIHKGNIVDVWLKSIPIGIRLKVKATGKGEYFKTEILETSFIEK

SEQ ID NO: 23308 - protein, 526 aa, synthetic construct
MPYCIYLRKSRADAEAELAGEGETLARHEKTLLALAKKLKLPITKIYKEILSGETIAGRPVMQQLLQDVEAGIWQGVLVMEVERLGRGNTLDQGIILNAFKYSSTKIITPMKSYDPNDEFDEEYFEFSQFMSRREYKTILRRMQRGREASVKEGKFAGSIAPFGYRRVKLPQEKGFTLEIEDAEAAAVRLAYELYAYGDPQPDGTFADIGRATIAKRLDQMGIRNRKGGTWATASVTRMLQNPVYIGKVHWNRRPEKKHTENGKIKKARPLAENYLLVDGLHEPIIPEELWNLAQAKMKQHYRPTGVNGIMQNPLAGLVHCSYCGNAMQRRPYLKTGQPASLICTTHFCPQISSPLYMVEGKILEALSLWMKQHEPTWEEESSADVFSTKIMALEHAIADMEQELQGLQSQFEKIFEFLETGIYTPEVFTARNKTLSEKMAEIRSAIEETQAELSKLKAARKNQVSMIPKIKNILDTYETLTPAEKNKLLKEVLDHVEYHKKIKGKKNVPADNFEIILFPKISPEN

SEQ ID NO: 23309 - protein, 520 aa, synthetic construct
MKNVTKINQVDFSVFKKTRVAAYCRVSTDSDEQELSLDTQKNHYESYIKANTEWEYAGIYYDDGVSGTKTAKRDGLLRLMEDCEKGLIDLVITKSISRFSRNTTDCLALVRKLLNYEVYVIFEKENINTGSMESELMLAVLASMAESESRSISENEKWSIKKRFQNGTYIIAYPPYGYANVNGEMVIIPKQAEVIKEIFAGCLAGKSTHIIAKELNEKGVPTKKGAKWTGGTINGILVNEKYIGDALFQKTITDAAFKRKRNYGEEEQYYCENHHEPIIDKDTFEKAKEAIRQRGLEKGNCTEDTSKYQNRYAMSGKIKCGECGRSFKRRYHYTSHGKSYNAWCCGGHLEDSKSCSMKFIRDDDLKRTFLTMMNKLVFGNDLVLKPLLISITTNNSKKNANSVEDIEKEMKSNEEQRKQLNMLLTNGYLERPVFAEAHNKLIMEYEHLVAKRDLLFRMDVAGYTMEQALKELVDFLNDAKPFTEWEESLFERFIEKVKVLSREKVEFEFKCGLKLKERID

SEQ ID NO: 23310 - protein, 524 aa, synthetic construct
MAGAKNITVIPAKKRVGNTATAESKPKLKVAAYCRVSTDSEEQATSYDAQVTHYTEFIRKNPEWEFAGIYADDGISGTNTKKREEFNHMIEDTMAGKIDMIITKSISRFARNTLDCLKYIRQLKEKNVPVFFEKENINTMDSKGEVLLTIMASLAQQESESLSKNVKMGIQFRYQNGEVQVNHNWFLGYTKDENGHLIIDEDQAVVVRRIFREYLQGASLKTIADGLMADGIPTATGNMKWRGDGIRKILTNEKYMGDALLQKTYTVDVLTKKRVSNNGIVPQYYVENNHEAIIPRQLFMQVQEELFRRAHLKTEGGKTKRVYSSKYALSSIVYCGKCGDLFRRVAWKARGASYNKWRCASRIEKGPKKGCDADAISEVELQNAVVRAINKTLGGREQFLIQLQYNIEEVLNGDSTATLDYIDQRMAELQEKLVLCVNKNAEYDVIANEIDALREKKAAVVTKDAEQEMLKKRIEEMRQFLQTQSSRVTEYDEQMVRRLIEKITVFDDKLIFQFKSGMTLELKR

SEQ ID NO: 23311 - protein, 474 aa, synthetic construct
MKVGIYSRVSTQEQAREGYSIGEQVERLKNYCAAKGWILYKTYTDAGFSGANTDRPGMQQLISDVADGKIDMVLVYKLDRLSRSQKDTLYLIEDVFIKNNVNFASITENFDTSTPFGRAMIGILSVFAQLEREQFRERSIMGKDARAKEGLHHGGGAPTGYDYIDGQLIINKEEAELIKEAYRLFLEDDMTMMGIAAKLSVFSEKFKYDHRIRKMLTNPLYAGWTHCRDELYKGQHEAIISQEVFDKVQTKLKIRAENNPHYRNAFNRTSLLAGILWCKKCGARYFKRVRRYEKGSKVYYYNKYQCYSRSSYKNMVRDKSCKNKIWTMDVLDKAVIDEIKALVANPAEVDNIIKLNQSNNNITEKKEFYKKRIKEIEKQMNKLTDLYSIDGIDIDFVAKKITALNTDKKRIETEMNAINEHKPLISAEDAKKRLSGISNILDNGEFTEKVKVITSLINRIEVDDDDIYIYWNFV

SEQ ID NO: 23312 - protein, 569 aa, synthetic construct
MKTIAIYTRKSKATNKGESIENQINLCKNYISKIFFEDEVKIEIYNEGEGFSGGDSTRKKFNELIQDAKKGKYDVLICYRLDRVARSVADFSDLIEELNRNNISFISVKEQFDTTTPMGRAMMYIASVFAQLEREIGAERIRDNMRELAKTGRWLGGTTPTGYESVGFELMNVKEYNENNEVVTKVKKAFMLKKIDEEIYTVKTLFQKFLNLKSLTALETYALNNNIKTKNNIYFSRFALKTILTNPVYAKNDFDMYNYFKENNVDVFSNKEDFDGLHGIMAYNKTLQVKHKAIRKKDIHQWIVACGKHKGIIDGRDWIYVQNILNINKQKSYRKPKKNTAILTGMIFCKECGSPMRPRIQTGRLYKDGTEKYVYSCTLKEKSRRKKCTGKNINGNEIDALLLEKIKKIIVPNQKICDELKKIANTKADIVDENDEFISLKSKYDKNQKDLENLIQKIRYVDIDLIDDINKEVKKIKKKNEEISIKLNKYNEEKQINKLEVDVAQIVLEIIENHFNKFNKLDTMEQKALLRLIINKVSGNGDTVEVNLLTDNSSAFFNSILLPSGENSK

SEQ ID NO: 23313 - protein, 464 aa, synthetic construct
MARSVTVIPARSQKVRTGHKAVQEKKIRVAAYCRVSTDQEDQLHSFEAQVEYYTKYINEHENYEMAGIYADEGISGTNTKKREQFKKMIADCEGGKIDLVITKSISRFARNTQDCLAYSRKLKNLGIGIIFEKENINTLDSTGELLFTILSSLAQDESRNISENCKWGIRTKFKNGEMHLNTFKFLGYDKDENGKLVINKEQAKTVRRIYRDFLIGINPAQIAKELMEEKVLGCLGQTKWYPSTVTGILKQEKHMGDALLQKTYTADFLTKRQVINNGEIAQVYVKDSHKGIIDKQTWNAVQEEFDRREKFMESHGTDRYSYGADCMPFCEKVFCGECKSLFTRHSWSSRGIVQWQCKNHRKDGKVACTNAYVDNADLENGFVKAFNRLVTDRDKHMERWQQMKSDGTPLEKIRAGQMMEAVGNEPLTRFVPEIAQLVLCEVTVLGAKKYEFFFLEGSRVKVSV

SEQ ID NO: 23314 - protein, 502 aa, synthetic construct
MEIQIREGNSRQKQKLKVCAYCRVSTDADEQENSLENQIRHYKEVITSNPDYEYAGVYSDFAISGFKEKRPGMQKMLADARKGKIDLILTKSVSRFARNTSIVLEATRKLKELNVGVFFELQNINTLSGEGELMLTILAAFAQAESESGSVGAKMVYQRKYEAGIPVQYLERSFGFKKDERGVYIADEEEAAWVRKIYEMAADGYTPASIKRYLNENGIKTAGGAEWIDSTVFRLIENEIYKGDYIMHKHFVNEERKLVRNRGEVDAWYIEDDHEAIVSPKLWQRAQDALEAKRDYLAEGSVIEEFTEENYPYMNRIYCARCGHPLYKRIYSNGNRLNWGCSGTKRYGKSFCEGINIPDGVLRGAWYFDENMYIGEKQTDKGKKEFTYLKEASWKRRHKKKEPKPIPENTETEYPYREKIFCGSCGSRLVRHVNTKNHKVIWVCNGRKRKGKDFCDGTRVPDTIIKGWGEIKKDIYIQRKDDKNGKKRYSYTSKKPKGADRA

SEQ ID NO: 23315 - protein, 575 aa, synthetic construct
MKKKFSSVPDPDIQDAVIYARYSSHSQRDCSIEQQVADCELFAQQNGLRVVKIYADRHLSGTTDNRPEFQQMLKDAAHGHWPFVICWKIDRFARNRYDSATYKCKLKKAGVRVLYAKESIPDGPEGILLESVLEGSAEYYSASLAQNIRRGMRFNAENCKVNSGSIPFGYCKGPDGRFAIHETNAEIVREIFRKAAAGVPFVDIATELNNKGLKTSRGGRWNKNSFVLLKNESYIGVYHFSDIRIEGGMPAIIDLGTFLAANERMNANRRVRGRHHDGGDYLLTGKLKCAHCGSYMVGFSGTAKNGESHYYYGCQKRRRERACKKANVPREWIEKVVVKAALDYVLQPDVMEWITDAVMEYQEREAASSQLAALTAELEENQKATDNMMKAIEAGIITATTKQRLLDLETKAKDLKRAIELEKLSHVRLEREQILYWLEQFQGGSLQSQEFRRKVIDTFVSVVYLSDDHLRIAFNYSGQNRSEADFNLIMDAETASADYPINSLSLPLCPPHKKNPNLFPSGKGSDFFVCRISYRVIFISSLSSAAFLSMPPAYPVRLPFAPTTRWQGMMIEITL

SEQ ID NO: 23316 - protein, 559 aa, synthetic construct
MSKTVAIYVRVSTGKQADRDSIPFQIQECSNYVKHFLKTENFEIFKDAGRSGKNTHRPEYQRMIEKVKAGMISHVVVYKIDRISRNLVDFSIMYNDFKEHKVAFISLNEQFDTSSAIGEAVLKIILVFAELERKLTGERVRDIMMNRALEGKWNGARVPYGWDWDTKKQCPVHSDTEAEYARMMYRLYDESHSTCVVRDYCNAHDIPTKRGGEWTSKTVADFLRNPMNVGDYRYNYRKSARGKKNDPSEVVYVKDVFPPLIDRELYERVTHQMDANARGIGKDGRKVVSKKTHVFGGLIVCGLCGAFYHSDSDTPRADGFLPSQYRCGAHNRKIHCKAKGTSDVKLGPFIFNYISNLVKASKSRKLLHSVSDLEQMLLTGPEFEQVAGITDAGLDVTFDTIMHGFKPKRYTAAPYTVIRSGDSDALTAKRDKTIRALERLKKLFLFEDDAMSEKEYLMSKRELEGTLSDIENELSALEADTADTKYDDMSFISTASGFLIAHQIASGEHINYRELACAVDAKVLKDFANSVIERIVLLDGRVASIEFKNGLVHEFLYRE

SEQ ID NO: 23317 - protein, 467 aa, synthetic construct
MAREIVHIPARRGMSNRATVTDRKIRVAAYCRVSTDHEEQINSFENQVTYYTEYINRNPNYELADIYADEGISGTNTRRRDDFNRMIADCEAGKIDLIITKSISRFARNTQDCLNYSRKLKDLGIGIQFEKEGINTMDSSGELLFTILSSLAQDESRSISENCQWGIRSLFKQGVLHLNTNRFLGYDKDEKGNLVINEEQAVIVRRIYTEFMNGINPDVISRRLRDEGVPGCMGEAKWQASTIFGILRNEKYMGDAILQKTFTSDYLMKKTVKNEGQLEQYHVKGDHEAIIDPEYWDAVQLELERRQNYMTAHSLRTMGRYTDEQPFSNRVLCGECGKVFWRRTWYRLNNTYKVWQCGNRYREKGVVTCHSENLKESDLHGAFVMAWNGILESRAEFTETWKAQAENGNALERFRAKQMLELTKMKPMKEIDLLLVGKVLDYVIVQHGGELEFHFLDGTQLAVEVTE

SEQ ID NO: 23318 - protein, 505 aa, synthetic construct
MPKTEEKQTIKAVIYARYSSDRQREESIEGQLRVCEDYASRNNMTILHTYADRAMTGRSDQRPEFQMMIRDAATMTFDVVLVYKLNRFARNRYDSAKYKHKLKKYGIKVVSAMENIADDPSGILLESVIEGMAEYYSAELAENVMRGMTENALEGKWPGGVVPLGYKLDEQHHLVIDGPKAEVVRLIYQLALEGHNQKYIIDELNRRHYTNSAGGPFSYNTLRTILRNEKYIGVFTWGTVRRENACPAILDKATFEAVQEHLKFRTKHHIRSCNEDFLLTGKLFCGCCRSKMIGVSGTSKTGAIYYYYACSAHLKKKCKARNIRKDAIEDLVCEVTTRILSSKEAVEAIARQAIEMQKNKKDSLELQAIKNQIADINKKLQNCVKAVESGLISDTITNHINEYEEELTRLKDDAARVKLLDGDIELTQQHIEFFFWSIAQKIKAADKYKSILLSSIVRSVIVYKDYIEIQYNYKNELPILQNPVKVESSYLNQMVTQERFELPTP

SEQ ID NO: 23319 - protein, 438 aa, synthetic construct
MARTLQQISFPAPMRPRLKRVAAYARVSSGKDAMLHSLSAQVSYYSALIQKHTGWLYCGVYADEAFTGTKDSREGFQDLLAECRAGSIDMVITKSISRFARNTVTLLETVRELKALGVDVYFEEQNIHTMSADGELMMTILASYAQEESRSASENQKWRIRHGFERGELVNLRFLFGYKIEKGQVEVDPEKAEVVREVFRRALEGESLSSLATDLNRRGFTGVLGGRWNAMRIREMLSNEKYLGNALLQKQYRNNHLEKKEIPNRGELPQYYAEGTHEGIIDQATFDAAQRLLVKLRESTPVRSPWKKSAFTSMITCTVCGRNYKRCTGGKRHFWNCPTAVRTDLPSCGTSQIPEKLLYDLAAQVLGLIQFDEPVFREKIQSIDALPDKTLVFHFYDGSTVARHWEYTSRTKSWTPEMKEKARQRALTQRRGEKWQER

SEQ ID NO: 23320 - protein, 525 aa, synthetic construct
MARAVTVIPPTIQPITHLARNAVVRRRVAAYARVSTSSEEQLTSYEAQVDYYTRFIQSKPEWEFVKVYTDEGISAVNTKKREGFNQMVRDALDGKIDLIVTKSVSRFARNTVDSLVTVRKLKEKGVEVYFEKENIYTMDSKGELLITIMSSLAQEESRSISENVTWGQRKRFADGKVSLPYGHFLGYRKGADGLPEIVPEEAETVRWIYSLFLSGKTTSSIASFLTREGIPTPAGKKRWAASTVESILKNEKYKGDALLQKAFTVDFLTKKQKKNEGEVPQYYVENSHPAIIDPAEWKLVQRELERRKSIGRSYSGNSIFSSRLVCGDCGGYFGSKVWHSTDKYRRTIWRCNSKFTGEEKCQTPHLTEEEIKARFLDAFNTLVSDKERLLDECRTMQAALTDTRSLDSEIATLLSEMEVVAELTKRCIEENSTTAQDQAAYLERYNGLAEQYETAKAKLEKLRAVKAKREAKAEDIGGFMFELAEYGDPVTEFDDRLWLTVINIVTVHRDGRLTFKFQTGHEISI

SEQ ID NO: 23321 - protein, 503 aa, synthetic construct
MEITVEKVDTGVQKLGFQALSTLKTVRVAVYARVSTDQEIQLHSLEEQMKAFRAKIAQHPGWMLVDVYADEGISGTSVKKRKEFLRMMEDCEAGKVDYIMAKSISRFARNTVECLSYVRHLQSIGVQLYFEKEELDTATSVSELILTVMAAFAQEESRSISENLKWGIRKRFESGESRWTKTYGYRKTKDGEIVIEPDEAAIVRMIFKMYQYGIPMTDILDELTFIQAPSARGKQTWNKTALKYLLENEKYIGDMRLQKWVSVDHISHRSVRNDSTVIPVYNVRNHHVPIIDRHTYQQVQRIMELKSPHGEYSRYPYFDTNIVCPLCGKKMIPRVMKVNSHKRILGCFDVDGCRGYAVKGYLVDAALLEAYNTLEIKEKKRTVAMQRMLEIKAESPKLDTVQYYWLDDLVGHIEFKQETMRVFWKCGLESEVALNASKVEEPTHVAELYRNSLDRAQRSENKPVSVVRADKKSVNTREAQRNAAMQTAKNLRAKENGVAANDY

SEQ ID NO: 23322 - protein, 404 aa, synthetic construct
MIIKKVMPKIPVAKKRVAAYCRVSTFRNEQDESFETQQKYYEELIQSHPDWELVKVYADRHSATRVKNRPGFQEMAAAAEAKKMDIIICKSISRFSRNMVDCQQYAKWFRTLGVTIIFEEQNIRTDDPTCDFVLSILAAVAQDESHSISENEKAAYASRFARGEYKLGNNRILGYDCVDGELVPNKDAWIVKEVFRRFIEGESYRQIAKELGELGAQSLHSKKGFGVETLRYMVSNETYVGDKRLQKKAPLDYLTKKPDPNQKVESNYLWDDHEAIIDRETWDKAQKILEKRKELAQVGIHKTNREHHFLYGKVFCGECGAPFLRRTLKAAGGSKTQSTYKAWNCRNRQKGKGKERCGNRFVKEKELIEAILQELEWPTMDQDRFEKEVSKVLVYPDHIEVEKN

SEQ ID NO: 23323 - protein, 519 aa, synthetic construct
MTAVIYARYSSDNQREESIEGQIRECTAYAEKNDITIVKHYIDRAISAKTDNRPQFQQMIKDSDKKLFDIVLVWKLDRFARNRYDSARYKTQLKKNGVKLMSATEIISEGPEGIILESVLEGYAEYYSADLAEKVVRGQTENILKGRCNGGRGTFGYTLDSERKFHIDPLASPFVLESFTKYRDGLTMKEIRDWLNENGIKNPVGGEFTYNSVEHMLKNRRYIGELKFRDVVVPDAIPPIVPLELFDDVQEKIAKNKKAPARRKAEDDYLLTTKLHCGCCGALMFGESGTSRTGEVHRYYKCATAKKKKGCKKKTVRKQWLEDLVVNQTMQLVRDDAAMESIIAKVMELQDRENTNLPLYEKQLRDAESGIQNMLNAIQAGILTSSTKERLEQLEETKRELEARIAEEKLAKPKIKEEFIRFWLMRFRKLDMSLKDQRQALVDTFINSIYLYDDKVLITFNYKEGTQTITFEEAAQAASKENGSDLDCFTAPQGRQLLVAVFFALYDIFPLAITADKRT

SEQ ID NO: 23324 - protein, 541 aa, synthetic construct
MEKDKKVTALYCRLSKDDGSNSESLSIRTQKAMLMEYATRNGFGNCQYYVDDGYSGTNSDRPAFQELLDDIREGKVATVITKDQSRLGRNHIETGTYMEIFFPEHGVRYIAINDGYDSNEQSQMDIAPFRNIINEMYAKDTSRKIKSALRTRKKSGKYISSGAPFGYQKDPADHNHLVIDPNTAPVVEYIYSMAEEGLGLHRIAKRLHDEKVLKPCYYKKEMFGRFIDDEKMYDWDSAYISQVLHSPVYAGHIIYEAKPTVSMKSKKRRYIPFEERAIVPNTHEAIIPQDRWENVQRILYSRSGCFMCDKTDYDNIFKGIVRCADCGRTMLVKVEHRRKRNSVLDQTFYCCSTYRKYGAKACDSHNLEARVLHEAVFADIQAHAKAAVSNREALVKKIADQMHLRVSSDRAQHKRDLKQCKARIAEIEDLYAKLYEDVSKGLLPEKRFQMLADRYDKEQAELTEKIEQYELEGRAEHDQLDKIQDFIDEVSKYAGITELNYKILHQLIDKILVSKAEKVDGEYVQKIQIFYRFIGPLDAIE

SEQ ID NO: 23325 - protein, 497 aa, synthetic construct
MNAIYARQSVDRADSISIESQIEFCQYEMRGEQYKVYTDRGYSGKNTDRPAFAEMMNDIENGVIGKVVVYKLDRISRSILDFSNMMEQFGTHKVEFVSTTEKFDTSSPMGRAMLNICIVFAQLERETIQKRVADAYYSRSQKSFYMGGRVPYGFRLIPTTIDGVKTSMYEINTEEAEQVRLIYELYSKPECSYGDIIRYFQSHGILKNGKPWGRTRLADVLRNPIYVRSDLSVYEFYQNQGAIMANDPADFIGTNGCYYYKGKDSTGRKQMNLEGNHLVLAPHEGIIPADLWLKCRAKCLEAQQIKPYQKAKNTWLAGKIKCGICGYALVDKHYSTTRSRYLLCSNKMNAKACAGPGTIYTDEFEQLIYDEMRKKLTQFRKLRRCKGNRINPELTALSIQLTQAESEIAALMERLSAADDTMFRYISGRIKELDGKKQELMKRISELKLHKEADYTEISNHLTMWDELSFDDKRQTVDQLIRVIYATSDSIKIEWRI

SEQ ID NO: 23326 - protein, 627 aa, synthetic construct
MTEKQGFMTALYERLSRDDELNGESNSISNQKKLLEQYAKEHGFTNLVHFTDDGISGTRFDRPGFLAMMKEVESGKVGTILIKDMSRMGRDYLKVGQYMELLRQKNVRLIAVNENVDSFREDDDFTPFRNIMNEWYARDTSKKIKSTFKAKGKSGKHVASTTPYGYLKDKDDPNVWIVDEEAAVVVRRIFHMTMDGYGPYQIARALKEDKVEIPAVHMAKKDAGLWKGRVEEIKDPYGWGSSTVAGILKKREYLGHTVNFKTRKHFKDKKSHYVSEDNWTVFENTQEAIIDQETFDNVQRIRSNVRRYPDGWGEAHPLTGLMYCADCGSKMYVHRVNNGKRVPQYTCSAYSKVPVGTLCQTQHRINADVVMELIKELLKAVAEYSQLNREEFLETVKKAQTSQQSSEIIRLKSRLAEAKKRVQELEKLICRIYEDNILGKLPDERYAILDGQYSKEQKDLSAEIADMEAELSGYEEGRRSAEKFIALVDKYQNFDELTTYMLNEFVEKIVVHERDRKGSIETTQEVEIYFNFIGKYLPPHFGEVEMTSEEIEEMKKREARKDRLHQNYLKRKASGKQQEYYERTKAKKKAEMDAKKEEIRQEDIAKGVFVPVSLLPPAEPKKGVASA

SEQ ID NO: 23327 - protein, 510 aa, synthetic construct
MSSVDKIAVVYARYSSHGQTEQSIEGQIAAAQKYAEQHGYTIIHVYADRAMTGRNDDREEFQRMLSDTATHQFGVILLWKIDRFGRNREEIAFNRYRCKKNGVRVERVAEDVPDGPEGVILDSVLEGMAEYYSLQLAQNVRRGQRESAKKSQTVGGCKIIGYNVDPDTKRYEVDPKTAPFVTEVFKRYANGETISEIVAWLNAQGVRTTRGGEFTVNSLHRLLKNEKYTGVYIFHDIRNEGGMPALIDRATFDKAQEMLKVNRRTPARVWSKTEYLLTDKLFCGHCGAMMVGESGHGRNGTKHNYYTCWNRKKKKLCDKKPVRQDVIEPLVLRSIGKLLENPATLENIADQVWAAYERSDTSGDTIKALDKQIADVDRALSNVMKAIEMGIINEMTKARMDELTDQKQALSAARAEAGLAGGFKLTRDMILFFLQEIAALDMADRDSQKRLIKTFVNAIYLYDDHFDIAFNYTDKGKVVVQMQEINDAACGEVFGRCAQSPAKSRLSRLR

SEQ ID NO: 23328 - protein, 597 aa, synthetic construct
MGKKQKTNGGDAVIYARYSSHNQRDVSIEQQVEACRKHAAELGLTVTATYEDRAISGKTDKRPSFQRMMRDAEQHKFAYVLAWKSNRIGRNMMQALVNESRLVDCGVKVFYAEEDFDDNAAGRFALRSMMNVNQFYIENMAEDVKRGLYDNAKKGLVNGSLPLGYKRGADGKPEIDEPKAAIVREIYTRVAAGELFASIADDLNARGIKTARGREWNKGSFHVLCHNDRYRGIYMYGDIRIPGGMPRIISDELFYDAQEAYSMKKDNRYGRARHGAENYLLTGKLYCGHCGGYMVGISGTSKTGEMHYYYACQKHRLEHTCEKKAIRRDVIENAVARAIMMYCLDDETIDFIVDSTIAYFKQKDHELHIEAMENELAAVQQAISNLMKAIEAGIITPTTRTRLLDLEEQQAKLSAKINTAKAERVEIDRDDLIAGLQLFRTGDIKNKKFLAKLFNTFLIAVYLYDDNRLKIVFSFTGNHNSVEIPLELDNDCPDSQIVSDETEVRMSHLECRKNLGSPPSSGEAEKGDDCSDGRFVRTAPLPPHQLTSGPFRPEVLFYPDAVQRRSSWSTPSVKWQRCWAFRHPPCATMTRKVCCPL

SEQ ID NO: 23329 - protein, 518 aa, synthetic construct
MVAIYVRQSLDKRDSLSIDSQINDCITLCKRNGWNDYKIYKDKGWSAKNLDRPEFQKMNNDVEAGQIHAVVCYKIDRISRSIRDLVNLIEDYNELGVHFVSFADNINTAAPGGLMMATLFGSLAQMEREAIITRVTDNYYYRCERGYWGGGPAPYGFNLKKITENGQKHTVLEINKHEAAVVKQFFKWYLEPDGTIYEILKKADKAGIKTRKGGAWTSRVVSELLSKPMYAPNSMDIYNFYAAQGVRVRVTPEECDGKLSLNVFGKRDRNSKHPKRSRPVNEMTLAICKNPPIIDSDTFLKTQFKKKAKLQVSPRNGTSKTTMLSGLVKCAYCGRAMSPCGSSRGSKYFTCSGKRNYATGTCISKSIKIEKLEHIVTDDILRYVTNPKVIDMFHAMQSSKLSAEQNHKINLLQQEAAKLDIEIENLLDACSAGNATAIEYLNKRIEKIDARKHELLNQINDIKKDTENVISLFAGIEIENVPNILANGSIEEKKNVCQFFVQEIMFTNTEDVKVYYKM

SEQ ID NO: 23330 - protein, 503 aa, synthetic construct
MANIRRIEPVLPRLKARKRVAAYARVSMETEQLHHSLSAQVSHYSALIQSNPEWEYAGVYADEGITGTATKHRDEFKRLMADCDAGKIDLVLVKSVSRFARDTVDTLKATRHLKDLGIDVYFERENIHSISKEGELLLTLLAAFAQAESRSISENIKWSIRKKFKLGIPNGIKAPYGYEWNGDSFSIIPEQGEVVREIYDRYLAGEPAYSIAKGLAEKGVKGQSGVPMDDSTIKNILSSLSYTGTMLLQKNFFTEGHKRRKNKGELPMYAVEEMFEPLVSEADFEKAQQIMKDRAESMPNRNPKLTAFSGIVRCANCGCSISRRTSKYGKKWICNTKERKGKVVCDFRDIYESELEDAATKALSLDGFNADGVKSRISLITIDNAYITFRMKNGTSRQVLRKYKKGYSGFSTRLFCGCCGGMLEADTWNMGPAGKKTKYKVWVCRNCSAPREFDSTFRKATQELFHEEHCDGLFAQNIEKAINYDEKIEFYYKKGEVVTWQKE

SEQ ID NO: 23331 - protein, 525 aa, synthetic construct
MAKRVTTIPATLNRFDSRPLQSVRKRRVAGYARVSTDSEEQATSYEAQVDYYTRYIKSNPDWEFVGIYTDDGITATNTSHRDGFKQMVEDALAGKIDLIITKSISRFARNTVDSLVTVRELKEKGIEIYFEKENIWTLDAKGELLITIMSSLAQEESRSISENTTWGKRKSFADGKASVSFSRFLGYDRGPNGEFIINEEQAVTVRYIYKRFLEGLSTYQIAKELTQMGVKTAAGKDKWYTSSVLSILRNEKYKGDALLQKSFTKDFLTHKRVDNKGEVPQYYVEGHHEGIVTADQFERVQAELYRRQNMGRYSGVGCFSSIIKCGECDSWYGAKVWHSNDKYRRVIYRCNKKYGKGCKCKTPHITEDEIKEMFIKAANELFSEKDEIIENTKTMMDMVCNTDDLDKELGDKVTELNIIAEQMQTAIAENSRTALDQNEYERMYADLTERYNTIKSEYDKISEQIESKKAQRELFKGFIRALEKQGTLVEEFDEGLWSSLVQEVVVNTKDDIRFIFKNGFEIKTR

SEQ ID NO: 23332 - protein, 514 aa, synthetic construct
MSTEYAIYLRKSRADLEAEAHGEGDTLARHEHILMELAKSRALPIGAIYREIVSGERIANRPVMQQLLSEVEDGRWKGVLVTETSRLARGDTIDQGIVAQAFKFSGTLIVTPSKTYDPTQEADEEWMEFGLFMSRQEYRMIRRRQLAGTRASKKEGHYVPGRPPYGYERYKLDGRGWSLRPVEPQAGVIRTIYDMYLSGKGFSEIANELNAMKIRTPLDKKWVPATTRAILQNPHYAGFIPSAMKVNTKIVQKGKLITKRPVNKNCELYEGIHEAIIPRDVWNSVQQRMKDTVTPRVPRKYQQMNPLAGLVYCDQCGKLMSRHPYRREDKVRFGCENPSCSTVSSLFEDVESLVLQSLREFLHKIELSSPARLDTKSEENALQNIEKQLTDINRRLQRTYELLEDGFYSKETFLQRQSAISQDQTALLNTKHEIERKLHNKQKDIEAQKNSAPLIRHVLDVYPTLEDPKEQNLLLKQVIRRIDYHKTVRVYGKAKSDLHLTIHPKIAIPQTSNI

SEQ ID NO: 23333 - protein, 503 aa, synthetic construct
MSKLAVIYARFSSDKQREESIEGQIRECTAFADANDIKIVGTYIDRAMSARTDKRPDFLRMIADSAKGVFEYVLVYQLDRFSRNRYDSAVYKNKLKKNGVRVLSAKENIRDDPSGIILESVIEGYAEYYSAELSQKVTRGMTDNLLEKKWTGGLVPLGYRTKKDGTLAIDPAGAAAVTSSYKQFIAGRTVPQIIDYLNEHNYRTTMGTRFNRNSLSRVLRNKIYTGTFSWGGTEYPDFAPRIISDTTYQAAQAIFNARKKNSGKEVVQRRRPDAYALTGKIYCGICGMAMTGMAGRSRSGEMYHYYRCSSKNNSKEKARREKIVCSSRSVNRDKLESLILDTTVQILSSPEALHCIAEQAVKAQENAPQAAEVKRLELLIGDIEKRLQNSIRAVESGIISDTIVRNIRQYEDELAELKTQLETAKLDTGFKITAEAVEYFLKEMVKKNDRYKLDTFQAFIRRIVITGDKVEIYYNYHSVPNILKNPVNKMLTGCSSSIAMVTR

SEQ ID NO: 23334 - protein, 461 aa, synthetic construct
MRKDVKRVAIYIRVSTYEQAQEGYSIDEQKERLVQYCKAMGWVVSELYIDPGFSGSNLERPGLQKLISEIKAYDSVLVYKLDRISRSQKDTMYLIEDVFLKNDVDFVSMSESFDTSTPFGRAAVGLLATFAQLERENIKERMTMGMKGRARKGYWKGTSRPPIGYDYKEGNLEVNDYEAMQIRELFTIAANGIPNMPYNVKNMARYLSQKYSNKYGNWSDSTGITYTIQNKVYIGMVKYKDEYFPGNHMPLIDNELFEKANNRLNTYLSTFGEHTTYTKYMLSGLTVCGTCGLPYYRRNSQTKIAGIKKEYGYYSCQGRKIDMPNKCQSKIYRQEALEDKVITQIESLKYKDFSTGNGKNDTASLLQELKQIDSRQERLIDLYSLGSVSREQIDDKIRELNQQREKVKVLLSAQNTLKSEEIIKMSTCIRNVDYATQCDIAGMLIEKVVVEGENIRVYWNF

SEQ ID NO: 23335 - protein, 465 aa, synthetic construct
MARSITVIPASQPYRVGGRTQQKTRNLRVAAYCRVSTDQEEQLNSFENQVEYYTKYIQDNPLYQMAGIYADEGISGTNTKKREEFKRMIRDCEEGKIDLVITKSISRFARNTQDCLEYSRRLKNLGIGIFFEKEHINTLDASGELLFTILSSLAQDESRNISENCKWGIRSKFKKGIPQVDCTKFLGYDKGEDGKLIVNQEQAKIVKRIYREFLDGYNPAAIAKMFMEDHIKTGTGREEWRSASVRAILKNEKYMGDALLQKTYTADFLTKKVKKNHGEVEQFYVKESHEAIIPKEQWEAAQLELERRDSYMQELGLTFYGYGSEVNPFSCRVVCGKCGAVCGKKSWKSRGVEFWQCNNRSKNHGVKGCASENLPHENLLKGFITAWNQIVAEREQYLPKWEKKKKEGNPLEKLRAEQMIELTLQPPLTKMLPELGQMVLERVIVQGKEIMVIRFLDGTEIKVRI

SEQ ID NO: 23336 - protein, 498 aa, synthetic construct
MQIEVRKAEMGKEKKRLKVCAYARVSTEASEQENSLENQVSHYTEMIQSNPAYEFAGVYADFGISGFKESRPQFQKMMQDAKNGKIDLIITKSVSRFARNTAIVLKASRELKERNVGIFFELQNINTLTEAGELLLTILAAFAQAESESASESSKMAYLHRIENGEVVAYLERSYGYEKDENGEYRAKEPEASVIREIYDLVIQGVNCTNIARVLNARNIQTVQGAEWTASTVFRIVENEIYKGDVLMQKTFIDGKRHQVQNRGEKAMYYAKDNHPPIVSEKIWEKAQRKLEDMRAERAEHSVIQEFTEENYPYMNHIFCAKCGWPLKPRVYSHGHRLSWDCSGQKRGTKKFCTGIHVLDNDLRKMEIEGNRYFSETVDKYGEVHLKHIGERTWKNKHKKKKFNHKELYPELNEENYPYYRRLYCARCGSRLGRYISHGTVRWICSGYKRKGQAKCPGVRIPDEIIKGWNLPDGKIYIMGKEDKNGEKHYSYTSESAL

SEQ ID NO: 23337 - protein, 502 aa, synthetic construct
MEFIREDCIYARQSVDRKDSISIESQIDFCKYELKGGSCRVFKDKGYSGKNTDRPEFQKLLGEIRKGKVRRVIVYKLDRISRSILDFANMMELFQEYDVEFVSSTEKFDTSTPMGRAMLNICIVFAQLERETIQKRVTDAYYSRCLKGFHMSGQAPYGYQLEPTVVEGIRTKKMVADPVAADHVRLMFEMYAEPETSFGDITRYFEEQGIKIYEKSMVRSFLSQLLRNPVYAQADLELYEFFKSQGAAIVNDASDFAGTNGCYLYQGRDVKEDKDRCLKDQILVIAPHEALIPSDTWLKCRKKLMANTTFQQGRKPKNTWLAGKIKCGHCGYALKATHVPNSTGYFRCTKRTENKGCPGCGKIRKEEFEQFIFSAMQEKFKDFQILHGKEEKVNPKLTAYQVELAQVEAEIEKLLDTLTGANATLLAYANKKIEELDTRRQTISKAIADLSVETISPQQIKKLSYYLDNWESIDFDDKRKAADGLISTIKATSDRVQIEWKI

SEQ ID NO: 23338 - protein, 580 aa, synthetic construct
MYNMSPYSLSRSFRDKPCRAVIYGRASTEHEAQVKALQNQMQWYDDVARFHPQWNVINRYIDQGITGTQVYKRDAFMRMMEDAKQQKFDLIVTREVCRFARNTVDALVCVRQLAAIGIEVYFVNDNIWTLDGDGELRLTIMATMAQEESRKISERSLAGQRVSREKGVLYGNGNIFGYTRNKLTKQFEIDPDQAETVKMIFDLYDSGMGETLVAKELTRLGRKNGVGKVKWDAGKVSKIIKRKNYLGYTVYCQSYSNNYLEQKRIKRDESEFVYVKGGFPQIISEEQYERCNAIRRSRTKRLTDEKGHTRSFGIQQAQNVWGRKMRCRCGSPMLRHRWRTNNAGKPIYGYECKRHHDTPRIRLQNEQGNPTPICEIKPVGQSKLELMASKIFERVWGDQREIVLQTCKMLDACYKPDADRRADLMKAKDDSVQLLQQQLDDLVVVRARGEIEQDKFLQRTIEIQQQMEALRQSKAQIASEDYNPGRLDMEAIEAALCEAVEMHDGLVSEDFIDLFVSQVTPLSDFRFAWCLDFSPQPTVAFLNLAGQRKYTTCSMDSKLHFGPFADEEGHTIPFPGSLRR

SEQ ID NO: 23339 - protein, 503 aa, synthetic construct
MLRAALYARFSSENQREESILAQFRDSTEYCKKHGYAIVAKYADEAKSGTTTIGRDQYKLMLKDAQKGKFDVVVFHKIDRNARNELDYYITKHKLEEAGVKYAYSRQDIDSTSPEGQMMESMLVGMAAYYSRNLSNEIKKGLRENAIQGKCTGGRLPYGFSVDADKKLIINEKEAAAVRMIFDWYSAGVHYGVIRKRLFNAGYRNRAGKEFTIASIYEILRNRKYVGDLYLGKTLFRKGKRNTHQVSDNVQYFENVIPAIVSRDIFEEVQVKLNQNKRRSGAGNAKAIYALSGLIHCGLCGSAMVAHSTKSSRGIKNYYYRCPKGRLIGEEKCPQKFINRDDIESAVYQLIRKLFTAPDAHNQIKRIIAKNNMTVKVPDYTEQIKRLKKQESDASKRLDKLYNLYMTDNEDEFTLQKMTQLKEEILKLRVRIKEAEDRQIIAQSATFDIDKIINTFQKQLKQKQSPEFIKTLFELAVKNVTVYPDKIKVVLLVTQERFELPTP

SEQ ID NO: 23340 - protein, 535 aa, synthetic construct
MKKKQPNTRHGRAAIYARYSSHNQREASIEQQVKACRELAVRLGLDVVETYEDKAISGKSDRRPSFQRLLRDAEKGYFDCVLAWKSNRMGRNMLQAMTNEARLKDWGVRTFYAEEDFDDTAAGRFALRNMMNVNQFYSENMAEDITRGMMDNASKCLSNGALPLGYKAGENGRIVLDKAQAAVVQEIYTRVACREPFVDIAADLNRRGIKTKRGGPWTKSSFYTICRNERYRGIYIYDDVRVEGGVPRILSDGLFYRVQEVLKVKKTPQSARHHTGAEDYLLTGKLFCGKCGRPMTGVSGTSRSGEMHYYYTCQKRRREHACDKKNVIREQIEKSVAQAIKQYMLTDEMIQHMADATMAYNARQEKDLHLQDLQGQLAAVKTSAANLLKAIEMGVITETTKARMVELEQEQGRLNAQIENARAELVPITRDNFVSLLHIYRDGDINDSKYLASLFETFLVRVDLYDDHFLIWFNPLGQKTPADIPITSIENGDVDEFFDECRSKNVFDWGGKWSTKIKAPAVPRRVFLLWCSVSC

SEQ ID NO: 23341 - protein, 503 aa, synthetic construct
MEITVEKVDTGVQKLGFQALSTLKTVRVAVYARVSTDQEIQLHSLEEQMKAFRAKIAQHPGWMLVDVYADEGISGTSVKKRKEFLRMMEDCEAGKVDYIMAKSISRFARNTVECLFYVRHLQSIGVQLYFEKEGLDTATSVSELILTVMAAFAQEESRSISENLKWGIRKRFESGESRWTKTYGYRKTKDGEIVIEPDEAAIVRMIFKMYQYGIPMTDILDELTFIQAPSARGKQTWNKTALKYLLENEKYIGDMRLQKWVSVDHISHRSVRNDSTVIPVYNVRNHHVPIIDRHTYQQVQRIMELKSPHGEYSRYPYFDTNIVCPLCGKKMIPRVMKVNSHKRILGCFDVDGCRGYAVKGYLVDAALLEAYNTLEIKEKKRTVAMQRMLEIKAESPKLDTVQYYWLDDLVGHIEFKQDTMRVFWKCGLESEVALNASKVEEPTHVAELYRNSLDRAQRSENKPVSVVRADKKSVNTREAQRNAAMQTAKNLRAKENGVAANDY

SEQ ID NO: 23342 - protein, 563 aa, synthetic construct
MADTEVQVIKATEGPIVRDRRLVGTPLTLQRKRVAAYVRVSTDGEEQLQSFQSQKQYYQDKISKNKEWAMVGIYADEGITGTKTDKRDEFLRMIEDCMNGQIDVVITKSISRFSRNLVDTLTYTRMLKQKGVTVIFEKENIDTSTMESEMQLSLLSALAQNEVESLSQNVKMGVQYKMARGELMGFNGCLGYDYNPEDKSISVNPAEAETVRLIFDLYIQGYGANTIAKRLTELGKVNKKGIVKWTDSGVRGIIKNEKYKGDLLMGKTYTVDPISKRRLENRGEENQYYTKNHHEAIVSEEIWNAAQEICRNRYHSNSNVESGTRTKYARKFAFSSMCECGFCGTNLTRRSHHQDTQHKKPVWKCRVATNKGIENCPNSKAIDESIIENAFLEMFGLLADNFDDVLESVLSSVEETISKDESSGRLKQVEKDIASLEKKRNKLTDMMLDDKISKEAYNEKYEELNRKLKKANDEKDVLSQNVLSQKNIQNRMRELRAKLTGADVLDKFDRVVFESIVQKVIVGEVAEDGTVDPYKLTFVLKGMDNEFIPDAKNRYKNLHKQAV

SEQ ID NO: 23343 - protein, 520 aa, synthetic construct
MKTNLSEEYAVYLRKSRGDSTLESLGVDVLERHEHMLLDLAKKMNITIGHIYREVVSGDSISARPEMQALLHDVEDFRWKGVLVVEVERLARGDTIDQGIVQRTFQYSDTLIVTPLKIYNPADESDQEYFEFGLFMSRREYKTIKRRLQNGKYAAASEGRWPFNASPYGFNQVRLAKGFTLDIDPAEAPAVKLAFSLFTGPDRIGVTMIRKYFSDHGILTRSGKQWTDGMIRDMLSNPVYDQKVAIGRRRTVTKLVDGRPVKTRPRSNDYKVYDGLHPRMIDHKIFLEAQSYLGLGAPKPPESYGVKNPLAGLIVCAECGHKLVRRPATRATTKNGAKYDTMLCRTPQCPTVGCSLEILEKELLNSLSDWVKDYELKTILPESHVKEKEDLVTAAASELSTLESQRERLYDLLEQGVYTKDIFLERSHSLQERINDARVRLSALELELANERQIDAHILNFIPSCKELLSTYWSLSAADRNQALRMLIESVEYRKYEKNKKGKKDDASFELIIKPRIPRG

SEQ ID NO: 23344 - protein, 571 aa, synthetic construct
MMQDRTAPASTNRVAIYIRVSTTHQIDKDSLPMQRQDLIAYAKLMLNTDDYVIFEDAGYSGKNTDRPKFQEMMSQIRQGAFSHLLVWKIDRISRNLLDFATMYKELKDLGVVFVSKNEQFDTSTAMGEAMLKIILVFAELERNMTSERVTATMISRASNGQWNGGRVPYGYSYDYETKDFSINPIEAEIVRLIHDKYEEMRSLVRESRYLNEKGLRTRAGNLWNPVSLHIILHNIFYCGDYRYNVLKEGDRQKVKDESEWITVEDHHEPIISREQKERVIAMLDANKRLDRKRNTYQSEKYVHVFAGLLYCGNCGKPMGATPAAAKKDWQYSKYTCPTRRKLASACNGKFTSDPIVGEFVFNYVLNMLNVQKNFADIHSPEELQAALLIGNTFSYIDHIDEDGLNDLFNMLSSGKIKGTVFGKSAKLKKKKVVSELSKLRNEKQKIERALDRLTKLYLYAEDAMPESEFIIQKSKLTEALDEVNEQIGFSNTDEWNQSVSDEEFVRRASEFIIAQKLTDRNYVSYKRLATSVDTAVIKTFVQGIIDSIIMDAGQVKQIIFKNGLSHTFIFK

SEQ ID NO: 23345 - protein, 545 aa, synthetic construct
MKNLNRQPYDAAPEKITALYCRLSRDDELQRDSNSIKNQKSILKKYADDNGFINTEFLVDDGWSGTFFERPDFQRMIIEMDAGRIATIIVKDMSRLGRDYLKVVYYTEIAFPDAEVRFIAINNGVDSANQQDSDFTPFLNIINEWYAKDTSKKIRAVFKAKGESGKPLCTTPPYGYKKDPEDKLHWIVDEPAGEVVKQIFQLCIEGYGPSQIAKKLENDKVLTPSAYFKESGLYPTAPTTEEPYAWVPRTVADILDRQEYLGHTVNFKTRKKSYKLKKTIRNAPSEWQVFKDTHEAIISEDTFQTVKRIRDGRRRPTPLGEMPVLSGMVFCADCGSKLYQVRGKGWSPDKEYMVCANYRKRGKDTCTSHQIRNVDIENVLLYMIQQVTAFARDHEDEFIELVTKSNAKSVEREIRESKKEFEQAQARISKLDTIIQRLYEDNIEGKISDERFMKMSATYEAEQNQLTERVAELEHIIDAAREKSSNADSFLRLVKSYTDIKELNAEIIRTFIEKVYVYGNEKPWDRNTKKIKVIFNFIGGSTYSK

SEQ ID NO: 23346 - protein, 477 aa, synthetic construct
MSNSSSFPAKISAIYCRESTEKQNIQSLIDMCKKAAKKINLQNIKVYYDVASGYNKDREQYSKLKEDIQNNLVDTLVLYESSRLTRDELEHHIFYGLLRVHNVKVYTVTHGWLDLQDADDTFLTNLLNLLDAREGRKTAKRSKDRMTELAEQGRWTGGPAPLGYKLVNKELVIVPEDAEKVKTIFKLFLDGKTRQSIANFFGYEVKKVRRLLENPVYIGKLKFHSVEIINKKKILHKDYKVLNGIHEPIIDESTFSLVQGKLKNIKVERNTDVYIFKDLIKCTCGRKMYRVVNKYNYLKKSTNEISRKTENLYYCRTSDKYKSLGCGAIGIHEEELFEEVMASLKKIIFSLEVENIDTKFDDYQSQLVLYKKELASLSRKEELLARQLLNSLISEEVFEKLMKELKEKKAFLEEKIKNLTTLITNKKNTNKNSEILKKYFFKLEKEKAPEKINNFLKLIIDEIEMVNDYRFYIHLKF

SEQ ID NO: 23347 - protein, 585 aa, synthetic construct
MKDIVAYLRVSTEAQDFERQRVDIDNWCRINEWKLNNTFTDKLSGFVEEREGLSELKEYLITNNIKNVIVWELSRLGRDKFNLMTLFKWFVDNQINIFFYTQNFWLLDVNGNLSSNVSLQIMILSNYAETEALMIKERMKSGKERAKKEGRWVHGAVAIGYKLSDDKRVYIDEENAKYVRQAFQLYANGDTSIKQLAVYCIKNNFPSSFGNYQSLRFILKNMIYTGQLNYVNIPAIIDIELYMKVQSIMEEKHTNKNKEYNNNKFLLEKLVTCPKCGAKYGGGGGHRYSCVNRVSSSAKVKCKSSSFDVRVLDAIVWYITKQIAAAQELYVQSNEEQIKDFEQQKELLNNKLETLEKKKKKQNTKFDLDAISIDEYKVIIKNLNSQINLIKNEIESLNIKINQSNFEMQNNNRATRVANNMDALNKLRDLETMRNLMKIIFKSIHVYKYHNNFNIIELETRMNYIYCFYNSHSSRNKTFTTNIALKQCWDDENKLLNDKNIDAEFYRDGIPIEIISDYKYKVKSQETIDKKRAQARERERRYRENRREEYNKHARELRHKRNELKKEAEERRNNISISKPKSKPD

SEQ ID NO: 23348 - protein, 510 aa, synthetic construct
MSYFIYARKSRKDADLEALGIDVLERHITTLLELAKTLSLPIGAIYREVVSGDSIDSRPVMSQVMAEVESCMWDGCLVMDVDRLARGDTIDQGRVQRAFFYSNTKIVTPNKTYDPANEYDNEYFEFSLFMSRREYATIKRRMQRGRERSSSDGYYVGNIPPYGWRRVIAPDGKHFSLAPDPTESPVLDLMYDLCGNKQYGYQKACTHMAEMGILSRSGRPFTPSTLKGIISNPANIGKVRWGHRKTVRTVKDGKISRSRPHSSDYILADAVWPPRISADLFRRANQPKGSCSAPVRDDRPIQNIFAGLVRCSQCGRLMVRKKAHTKTPYDILICQYTECPTVGIRIDELELALLEWLQNYIDKYELTDALPEDAENVATKEAIVKNFEKEHEMLLKQRESLFDFLEQGIYTKEIFIERSNALEQRVKECMEHIVSAQNDLHATLALQANRKNFVPRCKNLLGEWGELTIPEKNSALKVLIEKIMFTKTKRNKKGQNRSDFEIDVFPKVPK

SEQ ID NO: 23349 - protein, 526 aa, synthetic construct
MSYLMYLRKSRADKEAEARGEGETLARHEQILSELAAKMDLPIGATYKEIVSGETISSRPKMQQLLIEVMQGQWDGVLVMEIERLARGDTKDQGTVAEAFKFSNTKIITPIKTYDPLNEYDEEYFEFNLFMSRREYKTINRRIQRGRVAAFQDGWYIAGTAPYGYEKIKRKGDKGYTLDIVDNEAQVVRMIYDLYTHGELQDDGSYLRFGSYQIKDRLNDLHIQSRSGSTWSAATIIDILRNPAYAGYQRWSWRKVQKKLVGGNIVESRPKNDDCPKVKGRFEAIITDEQFELAQKIREGKPTPIRSTNALQNPLSGLVYCEKCGTLMTRQPSNTKDHYPVLRCPNSKCTNISAPLYLIEQKLIEGLAEWADEYELNWPKKDWEDTEISTATYQHSVDSMQGKLDTITKQLSAAYDLLEQGIYTLQIFQERRSTLENQKEETETELQRLNRELEISQARARAKREFLPTIRHIVDTYWTIDDVFVKNTMLKEVLEKVDYLKTERNKKGGRGNANFSIYFYPRVPKF

SEQ ID NO: 23350 - protein, 489 aa, synthetic construct
MLKTVIYARYSSDKQNEQSIEGQIHECEQFAKTHDMVIIKHYIDRALSGKTDDRPSFLQMIKDSSSGLFDAVLVYKTDRFARNRYDSAVYKAKLKKNGIKIFYAKENIPDGPEGIILESMLEGFAEYYSAELSQKVKRGIKENIRKGLSFGGACPFGYKIVNKKYVIDDEQAPYVKKIFEDYAKGRRAIDIFNELNTLPNYAGKGRKWNRSSLNRMLTNKKYIGIYELEDVCVKDAIPPIIDEALFNKVQSRILFNRRHTTRAKVNYLLSGKLFCGLCEHSMTGKTGTSKTKAKYHYYVCSHRHCKQKKYRKELLEDIIIQYTVKDILNPKHFKMIAKKCLEIQQADNKTNDMLLMLKKQLTAIKTKINNLMNAIEAGIITTSTKDRLEQLEQEKYKLELEISTQQLNSNRLLSEKQIIYMLNVFYNKRVDVSFYNQIIDCFIYKIYIYSDKICIVYNLNNSDKDVTYSDINELYKSSHLNSCGSPYVN

SEQ ID NO: 23351 - protein, 453 aa, synthetic construct
MKCVAYMRVSTEKQAEEGNGLESQKRDIENYCRKNELIIADWYVDEGYTGSNMNRPELQRLITDCSRKKVNCVVAFKLDRISRSMVDGIYIIEKVFQSNNVAFKCVHDSISYDSPMEQAYTQMMAVFAQLDKNTMMLRMRGGMLERIKQGYWWGGGNTPYCYRYDKEQGILIPIQERAEQARKALELFISGYSDAKIKEICGFKSELVTRKVLTGVVNIGMIPYKGNIYQGKHKPIFDKDRFELAQELRKSRCSAKISCFTEPNLLTGLCYCGVCGCKMRYQKWSNGNHKIYCCSRNKGLKYLPNYNPNCNNSLEWADDIEKQVTDEILKISLNLSSYKPKAKETKLEIMQSQLEREQTKLKRLYSLYADGNDTVLEMIKDLESQISKAKEDISVESKNAINTQKKEFTYQNIKKLADVWDNIDKKQKNFILKTIIDKVIIVNGNVEIQLKNF

SEQ ID NO: 23352 - protein, 541 aa, synthetic construct
MKAKKEKKITRIEPVRTTQSLEKTQIKRVCAYCRVSTDSEDQRHSFDSQVAYYNRMIGERNNWIFSGIYADEDRSGTKMNGRDEFQKMMQNCRRRQHDYIITKSVTRFARNTVDSIQAIRELKALGIGVYFEKERVDTLSEKSEQLLTILSSIAQGESENTSTNVRWSVVRRFQNGTFIISEPAYGYCKDPDGNLIIEPKEAAVVRRIFEAYLGGMGSYAIARSLQEERIPTSRKSNGWQEGSVKEILKNPVYEGDLLLQKTCTTEGVPFRKKRNHGELPQYLIRDNHEPIISREEAEAVRKLCAYRKEQQCVENTEVYQNRYAFSSRIRCGVCGSTFRRQKIYIGKPYEKVQWCCHKHIQDRKVCGQKAIREDDIQCLFTRMWNRLAGNYEEILIPLLAGLKAVPRDPKQEKEIGELSHQIEELRKQSHMLRQVLVDGNIGSAVFIERRNQLDSELETAIHRRQLLEEDQFFEQEIMQTEYLLTVFRSRPARMEDYDEEAFLMIIDHVTVYPEKRVQFCLKNGLELEESLEEGDMADGRN

SEQ ID NO: 23353 - protein, 548 aa, synthetic construct
MQASVKKNISVIPAKPAYDRSIRPQMRTLRVAAYCRVSTLMEQQESSYEAQVQYYTEKIKSNPNWKLAGIYADDGKSATSTRKRSDFQSMIDDCMAGKIDMVITKSISRFARNTVDSLTNIRKLKEKNIAVFFEKEGINTLEGSGELLITILSSQAQEESRNISENCHWGIVRRFEAGQVIVNHSKFLGYTKDRDGNLVIVPEEAELVRRIYRLFLEGNSSYRIKRILESEGIKTVTGNTVWQATVIDKMLTNEKYMGDALLQKTYTVDFLTKKKVANKGIVPQYYIEDDHEAIIPKELFYRVQEEKARRGNIYRAAIKKKRGEEKSKYSGKYALSDLMVCAECGQPYRRQVWSKYGKKSAVWRCDNRLKHGSERCRNSPTLKEEILHEAIMTAISKVVEDQGEFVQAFRENVIRIIGNYGSKAEPTEYDTEIQKQEKRLMTLIEESAKGNCQEADFDREYRGVTEQLKELRKKKEQFMKEQRLAEAYDQRVEEMDSYMKKTGVLRREFDNDLVWRLIQTVKVINQNKIEIQFRSGIVMVQRLDAWED

SEQ ID NO: 23354 - protein, 479 aa, synthetic construct
MPKVAIYARVSTLNQAEEGYSIEGQLASLRKYCNALDWQIYQEYVDPGFSGGSLKRPAIQKLIEDAKSCRFDIVLIYKLDRLSRSVQDTLYLVKDIFDKNKISFVSLNEKIDTSSPMGNLFLTLLASIAEFEREQIKERMMMGKVGRAKSGKAMGWSKVPFGYTYDKQTGIYQINTLQAQIVKRIYRDYLDGVSITKLVDLLNAEGHITKDRPWTYRTVRQALDNVVYTGRQFYQGNVYPGQHEAIISIEDYDKTQAELKRRQLTNAQKFNPRPFRAKYMLSGLLHCSVCGSSMMVQTRYLKYADDYHYYRCVSSIRKRIRFSYRQDTELCQNRSNYLKDDLESAIIKTIRHLQLHPDQMPVDTVKFDDKPLKDELNRINDKLNKLVDLYLNSNGISIGIINQKREELLQQKEALENKLQERKPKQPELDPKKALLLLSKKNILELPYEEQVKLVKSLISKIEVSPSKMKIHWRFNVEK

SEQ ID NO: 23355 - protein, 502 aa, synthetic construct
MKKVAIYSRKSVLVEGSVSIETQINMCKDYINNKFPNAKFKVFEDEGFSGGNTNRPAFQKMLRMAQLNEIDIVVCYKVDRIARNTLDFLKILELFKENNVELISISEGFDPNTQMGKVMLTLLASFAEMERTNIQQRVKDNLLSIAKKGKWTGGSPPTGFKNGLNGGLEWNKQDMILDVFNMKYEKEKNTNIIKYIKEKYNHNFLGGTLATTLRKPIYVKSSPSVSLYLKTKEYIVQGNEDNIHSYLTYTDKETKYAIVSDIVGLIEPSVWISINKDMDKNISREGNRFSEKFWLTKTVRCKYCGQTFCGQTKTTKTKHYNKHGEEKIYISTYSYYSCRDAVRGKLKTCTNTKRVKQEILESKVSELIHLLKDKKTFNSSYFSNKIDNSSKIDTIKKQIKNIDKTINNLTDKIALLSNEASLIFISKLEELVKEKSMLKDNLLQLELQELNSNTKKDSSLVYNNILAFNDDLSVDDKRKIAMSLFKEIIYDPETDSLDVTFM

SEQ ID NO: 23356 - protein, 558 aa, synthetic construct
MTNAVIYARYSPGPNQTDQSIEGQIHECTRFCEDNDLRIVGTYIDRKQTGRNDNRADFQKMLRDSSRHGFSTVVVWKIDRFGRNREEIAKNKAVLRMNGVRVLSAKEHIPDGPEGIILESVLEGLAEYYSANLSQNIKRGMRESALKCQFNGSGLSTGYTVDADHKYRIDPDGAAVVRTIFEMYDGGKKIADILRYLQQSNIKTMRGKEYTHYGISRILRNRVYIGEYHWHDIVVPGGVPQIIDNDLFDRVQKRLEANKHAPAARRGDVDFLLTSKLICGNCKSTMIGDCGTGKNGARWYYYTCRAKKTKSSKCRKKSVPKEALEREVTALTAAYVLRDDVIDYIADKVVEIQKSEHDDKSMLRYFESQLKDTNKAIANIMRAIEAGIITETTRSRLEELEDTKRDLETEIIKEKVARPTIEREQVIFFLEKFRGGNVDDKEYQRKIIDTFVHKVILYDDKITITYNYSTDSTKNAENTVESIESAASAAECKCSNKPSSSPPMTRILLLQCSCYFFRRGSNRTVLRSRIPSVRWTVGKSACVSAHGSAPSDPLRLHQ

SEQ ID NO: 23357 - protein, 500 aa, synthetic construct
MRMCGYARVSTDEERQLDSLEHQMEFFSDFAKQNGHHLVNVYTDEGITGRQLKKRDAFNKMLSDSKLGLFDLLVVKDVSRFARNTVDLLTSIRQLKSRGIDVIFVNNSQKVLGESEFVITLLGAVAQEESSNLSKRVKFGKDITSKKGRVPPRIFGYDRIDNFTMEINEREAEVVREIYHLYIDEGLGCRLIAITLAEKQMKTKFGNDWNQRNIRRILENPIYSGHYINHRYTVVDFLEGTTKALPKEQYYHHDRPEWAIITPERFQQAQEILELRRKQYATEYTHFTGRYSNRHLFSTLIRCKECGRAFSRRVTHYPNSDYIYWRCPTNNQYTAKRCSNNTIVREDDLIETLSTYLREVVSNKESIAQEIARKFKEANAVEGSKPDAQTLEAKKVKLKAKLEKYMEMYANDIITMEALKSKTAEINESINVIDDQLILLEGRRTQERTIESITNEAMTEIERFLSLQSATNMDLRRIIDSIIVDDKKKVKINLKITGNL

SEQ ID NO: 23358 - protein, 527 aa, synthetic construct
MEERAKAVIYARFSSDKQREESIDGQIRECTAYAESQNLEVIGAYIDRALSARSDNRPDFLRMIADSARKTFQYVIVYQLDRFSRSRYDSAIYKNKLKKNGVRVLSAKEHIGDDPSSIILESMLEGYAEYYSAELSQKVKRGMTENILEGKWVGCRVPLGYKLTADKKLQIVPRDADAVRLIYKMYNSNERIIDIVRYLNAHRYKTAAGRTFNRSSLTKILGNKIYIGTYTWDGHVIEHFAPPILADGVWEAAQKRTKQHKQHPRPKRRSADYALTGLIYCGECGNPMTGQSGHSKNGSAYHYYRCSTKNNYHSRGKKQHINCKSRNISREKVEDLVLDATVRILSNPKAIKLIAKQAAVVQRIDPTAQEQARIAQERKTIQAKLENSIAAVEKGLCSKTIAENIERYESQISELDQKIDELKFAYAPIRIDAIAVEFFLKSLLDKKKDHDKYRLDMFRTFIRHVIVYADKIEIRYNYTACPQILKNPVSIALTGAPECSGNDSMVRLEGFEPSHPVPETGALSPEL

SEQ ID NO: 23359 - protein, 567 aa, synthetic construct
MQSKNKNQIGITALYCRLSRDDGTESESNSIGNQKKLLSQKAKEMGLTDTKYYVDDGYTGTNFNRPGFQQLIDDIEIGLVSAVMVKDLSRLGRDYVSVGNYTDSYFPEHNVRFIAVNDAIDSDEGESEIAPFKNILNEMYARDISKKIRSSHRLRGSMGEPLSQPPYGYMKSPENKKKWIIDPEAATVVKSIFKMCLDGKGNETIARELQENKVLIPMAYWRSKGLNRGGKKTQTNPYKWCKTTVQKILSQQEYCGDIINFKTYSKSFKNKRRIENSKENWAVFKDVNEPIIDRETFEAVQKFISKTKRRAPKKENGERSIFNGLIYCGDCHSKMRYHTSTSNKEIHYFTCSDNKVDYRGKCPGRHYVRADALEEVVKLELRRLVEMLEIDESYFAQLLLRKNDEEREKDKKFLELELQKAIARSGTVSQLYEKLYEDNVIGKVSDEWFVELSHKYEKERMDLKAKIADTRYRIEELKNNNSEYEKFISAIRRFMQMDNLTSPLLRELIDHIDIFETEGTGKSRTQRIVIYYRFIGYIELPDTQVQNYTADTRKGVAVEYITERFTA

SEQ ID NO: 23360 - protein, 536 aa, synthetic construct
MQTGKITALYVRFSYDDGIDAESGSIEHQKSLLRSYAESNGFTDLSYYADDGYTGTNFNRPDFQRMLGDIHKGLVSTVIVKDMSRLGRNYLMVGQYVEIEFPKHNVRFIAISDNVDSAKGMNDLLPIHNLMNEWYSRDISKKVRAMIRQKGNSGQSIASKLPYGYYNTPEDKQTWLIDESAANVVRRIFDLYLNQSFGMYQIARILKAEGIPRPTYHRRMAKGIKVEADDLCVWNASVVRNILQHREYIGDTVNFRTEITSYKNKKVIHNSDDKLKIFPNTHPAIIDKETFQKVQDKISKEIRHTRNVHSYLFADYLYCMDCHSRMHGRQCYLKGGRTLSAYECSTYRKSKGCCFHGVPEMYLQAEVLAKIQNVLAFAKSNPAEFRQNISKALEEQSDGSKAVIQEELDKAQARTTEIDKYIQGLFEAKVRGEIDGSLFASLKKTYDEEKEQLNKLIIDLITKLSRENEANEKIQLLYAAIRKYDAVWELTPEVLTDFIEKIEVGQVSAENKKISFELRDNQISVFFWGVGIIDFM

SEQ ID NO: 23361 - protein, 684 aa, synthetic construct
MSILQTIKTIIRVVLYLRLSDEDKNKLSKEELSQSIKNQEIMLRDYAEEQGWEVVGVYNDDDWSGSDATRPDFNRMIEECKNGNVDIVLCKTQARFARDMELVEKYVHNLFHEWNVRFITVVDRIDNARKETKKTSQILGLTDQWYLEDTSLNIRETLKSKRKDGQLTSSFATYGYMKDPENKNHLIIDPISAEVIKRIYDEYLSGTGLDKIARRLNEDKILSPYEYKLLNGSKLKIPVIKDYVNYGYIEKTGTYMLDVSFTNKEEYILKDLVSFNYITTDMKSFNNKCDIVLKKYTNNRTKIYYSENDNIDINNFNIDDCILLNENDVIPKTAKVIISYTKELDRTHTINYQFEITLKENREHEDYYINICGKATDEIKKSDFIHNIRKKFKWSSSTIRTLLTDEVYIGNMVQFKSTTVSYKNHTVVWNDDETRIRKDNTHEPIIAKDIWYTVQERLENTARSCIGGTVHPLCNKVYCSNCNQIFTKTGNRRSDGTGYLCCKDKKTNWSNCDNKASIREDQLHQFILEKMNEILKKFYEEDDLKEMQNEVIEQDLYKDKLNSLEKELQSINKELQGKSTYFQKLYEDRTNGILPEKEFLILMNKYKDDNEKLEERQKIVKKEISSTLAKKETVKTKKNIFKKYRHIEELSIEIVEDFIDKILIGSYDETTNSRDIKIIWNFTI

SEQ ID NO: 23362 - protein, 571 aa, synthetic construct
MKDVKEDTKKIVRILLRVSSDQQLEADGDLSIQRKIVVEEVKKHEEWILDSKEYFEGSNSGYKNSVADRDVLQEALRDAENKEYDILLAYKDDRLGRRMLEIPMYIMSLKQFGVDVYTVKDGLLTPDLGDITGMLMLSMRYAMAEKSSSDTGMRVKDTAQKLVQQGKFMGGKAPYGYKLEYSGEYSKHQRALKHLVIAPEQAEVVKYIYELSFYKEFGSGKIASSLNNDSRYKNLAPNDVWKSGTITSILTNPIYAGYTAYKRRETQNGMSHSLDRKDWIIAEKQNKEITIINPELWEKVQISRQKRRTKYQKQPWNEKATIISRNDGNLALIDVAYCGYCGRKLTNGTKYDYWTIKGTGERRSSQKSIYKCQNVWQGVPHEKMKQIRADKIEPIVFKKLSEYVGRLQEDENIFEQILENQSFEKKRQEQILVREKRNLQEIEKNIDILNDAIPNAITGTYPLSLEDLAKSIEKQKDKASKQKTVVEELETNIKNLSVSQEDWENLYHNLPTWQDIFMNADVATKRVLVNKLIERIDITDDTVVIRFKVDLDHFCPQPRMTVNERVSQSGL

SEQ ID NO: 23363 - protein, 509 aa, synthetic construct
MPKNKETQSINAVIYARYSSDRQREESIEGQIRVCEDSAKRNNMTIVHVYADRALSGRSDQRPEFQMMIRDAATTAFEVVLVYKLNRFARNRYDSAKYKHRLKKHGVKLVSAMENIADDPSGILLESVIEGMAEYYSAELSENVMRGMTENALEMKWPGGIVPLGYKLDKDHHLIIDEEKAAIVRKIFKMNLAGHTDAAIVKYLNEHHYVTAIGHPFNRSSLRSIYKNERYIGTWMWNTIRKPHAIPPIIDEQTFWAVHEKRKYRQKNKIRVCGGENYLLSGKLYCGQCGKNMVGTAGTSQNGTRYHYYTCRPHKESNSCPAKRIRTDKLEDLVVKTTTQILSRPDVIRAIAHQAAATQSNQADSLEMQSLQNEIADIRKKLDNCLKAIDNGIFSDALTNHMHEYEKRLTELNDDLSRQKILASAPNLTEKHIEFFFHSITEQIKKADKYKSILLSSLIRCVIVYPDYIEVQYNYKKELPILQNPVKLSSSYLYTMVGDNGLEPLTSCL

SEQ ID NO: 23364 - protein, 541 aa, synthetic construct
MRIAIYSRKSKFTGKGESIGNQVEMCRDYIATNYNGEEHSIQVFEDEGFSGKNLDRPQFKKMIEIENAIPFDLIVVYRLDRISRNVGDFASLIEKLNKKNTSFVCVKEHFDTGNSMGRAMMNIAAVFAQLERETIAERIKDNMYLLAKEGHWLGGTTPLGYKSIEVTNGKRTHFELIIDESQIDLVNIIFSKYKQLGSINGVETYLFVNGYKTQKNNYWHKSNVKRILTNPIYCIADIDSLNYFTELGCNVCFTLDDCNGKKGIYPYNRFSGQKREMQSYDRWIITISEHQGILAGKEWVAIQQQLKANSKDGFGGKANERRSTSNTSLLSGVLFCSCGAYMRPKKYPSGNTFYICENKMDKKITECNNSNINADELDKIILNELFSFDIKDGVVDSQIQNLKEQVANIDNDLQKQIGRLKKQIETNKNTVNKFMNIVALSIENDTPEQVVEVYNQKINELLNQNKITQKRIDELQDTNIVQAKMNDRLNSLTDAMAYLKENFDKLTIVEKRGFVKEIVDRIVWDGNNINIFIKGISELSE

SEQ ID NO: 23365 - protein, 516 aa, synthetic construct
MARRKKVSPGNRLVAYYRYSGGSQQTEQSIEGQRRDCEAYARQHGLTIVHEYIDRHISGRGVESRLAFQQMIADSSKHLFDLVICWKTDRFARNRYDSAVYKKKLRDNGVRILYAAESSVEGPEGIILEGLMESLAEYYSAELAQKMRRGMRESALKGKAINPNRPLGLTTDEHKRFIIDEKNAPTIRFIFEHYAAGESSASIVDQLNAAGLRTSKGNSFNKCSIPRIIQNEAYHGVYICKAYDVRIDGAIPAIIDDDLWKRAQKMLTLNKQHRAPHSSHADYLLSGKLFCGCCHSLMRGISGHNCRNDVYYYYACGNKADGGTCKKKNIPKDVSENLVVNAICENILRPDTLEDLADAIAAAQQEDVNQPDPERAMLEQNLADVHRKINNIIESIENGTASSRLSARLADLEQQESTLNYQLESLKEVHPPVLDRERILFLLEQFLISPNERTEDYNRRIIDTFVNRIEITDTEMLIYFNLSEASASEKQKNSQPNSCSTGNHLVRVARIELTAS

SEQ ID NO: 23366 - protein, 521 aa, synthetic construct
MKKVTKIDSVQKNTAINNKLRVAAYCRVSTGSDAQLESLEAQKSHYEQYINSREDWQFAGLYFDEGITGTKAEKRPELLRLITDCEARRIDFVITKSISRFSRNTTDCLALVRKLQSLEIPIYFEKENINTGSMESELFLAILSSMAEGESASISENAKWSVKRRFQNGTYKLGYTPYGYDWDGKNMIINPEQADVVKRIFADILSGKSTNAIADQLNAEKVPSKKNANWTSSTIRGILANEKYTGDVIFQKTYTDENFNRHTNYGEVDQYMAPDHHEAIISHSDFDAANALVNQRAAEKGIEKGSDKYQQRYAFSGKIICGECGDTFKRRIHTCNTYKYVAWACNTHLKNKESCHMKYVRDNEIKTAFITMLNKLIYGYRLILTPYLKVLENSSGDEAIQRIQHLEQLIAQNSEQREALTKLMAEGYIDQILYNQETNALLLQAETYRSDIEAITIGMTGDAAKVTETNLLLHFVSHTDMLTAYSEELFENHADHIEVMSRNEIRFVMKCGLTFTERIGD

SEQ ID NO: 23367 - protein, 522 aa, synthetic construct
MGNVMLIPARRQVGNNARKQDEEKPKLRVAAYCRVSTDSDEQATSYEAQVEHYTEYIQKNPDWEFAGIYANDGISGTNTKKREEFNRMIDDCRAGNIDMIITKSISRFARNTLDCLKYIRQLKDMNIPVLFEKESINTMDAKGEVLITIMASLAQQESQSLSQNVKLGLQYRYQQGKVQINHNRFLGYTKDADGNLVIDPEQAETVKRIYREYLEGLSMDKIAAGLERDGILTGAGGKRWHTSTVNKILRNEKYIGDALLQKTYTTDFLNKTRVKNNGLVPQYYVEGDHEAIIPKDIYLQVQEELVRRRVGKTSANGKKRNYSCNHCFSQIVICGECGEMFRRLHWNNRGVKSIVWRCISRLESTGLECHARTINELVLQDAVVKAINQILGDKSNYQAQLQLNIAAVIRASQATAIDSIDEKLMALQQELIQKANSKEDYDEIADEIFRLRELRQKTTVDTAARDEQIKRINDLQDYISQQTALLTEFDEALVRRWVKQITIWDDRITVELKSGVSIDVDA

SEQ ID NO: 23368 - protein, 552 aa, synthetic construct
MGKKQKTNGGDAVIYARYSSHNQRDVSIEQQVEACRKHAAELGLTVTATYEDRAISGKTDKRPSFQRMMRDAEQHKFAYVLAWKSNRIGRNMMQALVNESRLVDCGVKVFYAEEDFDDNAAGRFALRSMMNVNQFYIENMAEDVKRGLYDNAKKGLVNGSLPLGYKRGADGKPEIDEPKAAIVREIYTRVAAGELFASIADDLNARGIKTARGREWNKGSFHVLCHNDRYRGIYMYGDIRIPGGMPRIISDELFYDAQEAYSMKKDNRYGRARHGAENYLLTGKLYCGHCGGYMVGISGTSKTGEMHYYYACQKHRLEHTCEKKAIRRDVIENAVARAIMMYCLDDETIDFIVDSTIAYFKQKDHELHIEAMENELAAVQQAISNLMKAIEAGIITPTTRTRLLDLEEQQAKLSAKINTAKAERVEIDRDDLIAGLQLFRTGDIKNKKFLAKLFNTFLIAVYLYDDNRLKIVFSFTGNHNSVEIPLELDNDCPDSEIVSDETEVRMSHLECRKNLGSPPSSGEAEKGDDCSDGRFVRTAPLPPHKKTPQAYA

SEQ ID NO: 23369 - protein, 539 aa, synthetic construct
MFNNNTNTKIAIYCRVSSDEQAERGTIDNQVTFGQHYADLHRLDIYDVYKDDGVTGTIPLQDRPEGHRLLQDAADERFTLVIFYKMDRLGRSTRVILNAVEALSQYGVGVQSMSEPFDTSTPSGRFMLTMFAGVAELDRANILDRMYQGTLRHARLGKWCGGPAPFGYKLQDGYLVVNEAPMPGHTMSEADVIRLLYDKTIEGWSTFRLAEYLNGLNIPNKYTLRGNVAAGSGKWHQSKILYILHNTLYYGERSFGKLSKHANKTIIHQQLPAIVSRETWDAAQVAIDGHNVMPKFVKRRQYLLRSLIKCGICGHTYVGTHYKRKAGDSIYYVCNSKNTRGTGNERCKAQTLRGEWIEGLVWDDCLNYIMQPDVIAVDDDCRYQQSSADIKKEIDAIAAQLRQLDQERQTVIGLCRQGIITATDLDTQLSDIAEKQNTLQQALEGMNSKNIVTKEEAEKRFKEIADILDGFRQLIQSNAELTFADKQTIIRTLVKQITVYTELPAGDTRDIPSVRVQIDYNFTLIPSKTGMLDPYRQGF

SEQ ID NO: 23370 - protein, 532 aa, synthetic construct
MKKKQPNTRHGRAAIYARYSSHNQREASIEQQVKACRELAVRLGLDVVETYEDKAISGKSDRRPSFQRLLRDAEKGYFDCVLAWKSNRMGRNMLQAMTNEARLKDWGVRTFYAEEDFDDTAAGRFALRNMMNVNQFYSENMAEDITRGMMDNASKCLSNGALPLGYKAGENGCIVLDKAQAAVVQEIYTRVACREPFVDIAADLNRRGIKTKRGGPWTKSSFYTICRNERYRGIYIYDDVRVEGGVPRIVSDGLFYRVQEVLKVKKTPQSARHHTGAEDYLLTGKLFCGKCGRPMTGVSGTSRSGEMHYYYTCQKRRREHACDKKNVIREQIEKSVAQAIKQYMLTDEMIQHMADATMAYNARQEKDLHLQDLQGQLAAVKTSAANLLKAIEMGVITETTKARMVELEQEQGRLNAQIENARAELVPITRDNFVSLLHIYRDGDINDSKYLASLFETFLVRVDLYDDHFLIWFNPLGQKTPADIPITSIENGDADEFFDECRSKNVFDWGGKWSTKIKHPPYPGGCFCFGAL

SEQ ID NO: 23371 - protein, 545 aa, synthetic construct
MTNAVIYARYSPGPNQTDQSIEGQIHECTRFCEDNDLRIVGTYIDRKQTGRNDNRADFQKMLRDSSRHGFSTVVVWKIDRFGRNREEIAKNKAVLRMNGVRVLSAKEHIPDGPEGIILESVLEGLAEYYSANLSQNIKRGMRESALKCQFNGSGLSTGYTVDADHKYRIDPDGAAVVRTIFEMYDSGKKIADIQRYLQQSNIKTMRGKEYTHYGISRILRNRVYIGEYHWHDIVVPGGVPQIIDNDLFDRVQKRLEANKHAPAARRGDVDFLLTSKLICGNCKSTMIGDCGTGKNGARWYYYTCRAKKTKSSKCRKKSVPKEALEREVTALTAAYVLRDDVIDYIADKVVEIQKSEHDDKSMLRYFESQLKDTNKAIANIMRAIEAGIITETTRSRLEELEDTKRDLETEIIKEKVARPTIEREQVIFFLEKFRGGNVDDKEYQRKIIDTFVHKVILYDDKITITYNYSTDSTKNAENTVESIESAASAAECKCSNKPSSSPPRKNLVHKNEVFSVIFACGEFYCFAVIFGIRRVIFALQASGRI

SEQ ID NO: 23372 - protein, 543 aa, synthetic construct
MNAVIYARYSSDSQREESIEGQLRECREYAERNDMTVVGTYIDRALSAKTADRPEFQRMIKDSAKELFEIVLVWKLDRFSRDRYDSAHYKHILKKNGVKVISAKEHISEGPEGIILEAMLEGYAEFYSAELSEKIHRGQKENALKGKNNGGGVPLGYLLDKKAQKLVIDPVTAPLVVEIFEKYADGKSVRSIVEDFNTCGLKTKKGQPFNINSFSSLLKNRKYIGEYRYQDVVIEGGVPAIVPEDLFNRVQERMEKNRHAPTMAKAREDYLLTTKLFCGKCERMMVGESGKSHTGAMHYYYKCSGAKRLKDCDKKAVRKDWIERVVVRLTMQRVMDEEKISRLIDAILVMQEQEDTTTPALRSQLAETESSIGNILKAIEQGIFTPSTKQRLDELEARKEEILVNIQTAELQKPKLTREQMTAWFEQFRHGDPANRDFQKRLIDTFVNAVYVFDDKLVLTYNYQHETQTIPLEEIESALSSDFDGATPPTTDRKANALRSCSIYGSDTPPRFPQQLNQVHNWRPFSIRRWALFYFINEGGKQI

SEQ ID NO: 23373 - protein, 458 aa, synthetic construct
MKKDAPVGESLPLRAALYPRVSTEEQAKYGLSIHDQQGDLEEYARAHGMRIVGVFADAGYSARKNVEYRPAMLALLEAVKRDEVDIVLVTKLDRWFRNIGEYYKVQEILEAHNVSWRTIYEDYDTSTAAGRLKINIMLAVAQDEADRTSERIKKVFDGKRARLEPLTGDKPFGYTIEGKRYVKDPETEAAVDAFFRKYMACGSVSATQDYIRSEYGIFIPYQGADKLLRSTAYYGRYFGTDGMCPAYITKAQYDAIQLMRKRVMRRPAQNRVYLFSGLIFCPVCGGRMGGRKNQNVVSSHYNCSNHFCRRIPCTNNRSISEAKLERYLLSALDAKFAEYKRQTSRLSGARRKDYSSEIAALKGKLSRLKELYLNELIFLDEYKRDRAGFMAKLDELEAKQAALAVPAPSGEKIDGLLQGDWKGMYADLPKDKQQEFWRIVIKEIRLYPDRHIEFDLNL

SEQ ID NO: 23374 - protein, 457 aa, synthetic construct
MERVECLYRVSTKGQVDHDDIPMQRIECRKFAESQGWIIIKELCEKGVSGFKVAANDRDAIQELRDDAVNQRFDILLVFMFDRLGRRDDETPFVVEWFAKQGIRIFSVKEGEQKFESHTDSLINYIRYWQSEGESRKTSMRIKTRLDQMRAEGLYTGGPVRYGYRAVEKGRLNKKNKPVKDLEIDPEEAAIVREIFERTVYEGAGSFVMANELNERGIRTHHGAKFNALTVNRILAERQYTGYLITKDVTSPFLPELQIITQELFNEAQVIVEQRKRKNADWRNIPRQNSTGALLGGNLYCATCGSRMTSSNPGKGAKREYAEYLCYMGANHRIECSGQRAYVAKRVERLVIQVTGLLLDSIRDTPKDASIEKRMKEEIKALSDRVKDAKKKADNAAQEQKNLEQEVAKSLMGKSRFNPEMLSRLIEEASQKKERATKNGNRTGTATCESEENCRRA

SEQ ID NO: 23375 - protein, 535 aa, synthetic construct
MKKAVAYCRFSSDNQRTESIDAQVRAIEEYCKKEGYTLIKIYKDEAISGTSIDDREEFLEMIEDSKNKEFNYVIVHKFDRFARNRYDHAINEKKLNENGVKLISVLEQLNDSPEAVILKSVLTGMNEYYSLNLAREVRKGQKENALKCVHNGGIPPLGYDLTEGKTYIINEEEAKAVRLIFKMYLEGRGYAYIADELNSLGFKNKLGKPFKKISIRDTLYNEKYIGNFIFGKKDKKGKLTGKEIKIENGIPAIISKEDFEKVQIMLQKKVRSNSGRSTALTTYLLTGLCECGECGGSYSGGYRSVNRNKTVSYGYQCRNRKDKVNDCKNTPIRREVLEDLVITTLKENIFSTSQIEVITDKVYDYVQDTFKRSNKELIKIDKSLEKLKAKAEKLLDLTLDGTISDYEYRNKKGEIDMEILNLKEERFKYTDAPKFMNKQKIKNHLIELGKNLDSKDENLLKILIQTFVKKIVVHRDSIALELRIFPGLTPAKVGGDDGNRTRVRNYQRHRLLQCLVYYFISQQSLPQTGLTEAIL

SEQ ID NO: 23376 - protein, 536 aa, synthetic construct
MPRKKKLQEVGGLRLVAYYRYSNGGQQTEQSIEGQRRDCEAYAKAHGYKIVHEYIDRHISGKSDSRPAFQQMISDSDSHLFDAVICWKTDRLARSRYDSIIYKTRLRRNGVKILYAAETVVDGPEGIIIEGLMESLAEYYSAELAQKLRRGQRESALKCIALGGNRSFGYDIGPDKHYCINEKQAPAVRYIFEQYAAGATAADIVRELTARGYRTSRGNPFNKNSICRIITNEMYLGVYKYADIRIEGGVPAMIDRELFNRCQTQLAFNRAHGGGKGAPRADYVLVGKLDCGLCGHAMKGASATGHTGSKHYYYTCTQHVEKKCPKTSIEKNYLEQVIVDGVAKYVLTPEKISQIVDCMMELQAKEQEPKGNPEKDALEAELAECRRKQNNILEAIEEGGSARLAARLRALEEQEAQLTFALGEINNAPAPPQFSREALTFMFEQFRREEDEVDEEYRRRILDTFVSSILLYEDRAEVKFNITDQKTGDFERVILPISANKKPPEDDDIPSNSEGSTALRLVEAMGVEPMSEKSSA

SEQ ID NO: 23377 - protein, 564 aa, synthetic construct
MEKKQKSALYVRVSTTHQIDKDSLPLQRSDLINYTKYVLGINDFEIFEDAGYSGGTTDRPAYQDMMNRIKMGEFTHLIVWKIDRISRNLRDFSDMYDELKKYNVTFISRNEQFDTSTAMGEAMLKIILVFAELERKLTGERVFSVMISRAQKGLWNGATVPLGYEWDPETKFPRPCDKEAKIVQYIFDQYEEIKSTTKVAKKLNIENIPTKRNGTWTPRTVGSILTNPFYIGTYRYNTKTKKTRRWKDKSEWVVLENNHQAIVNTEQFERVSQIIQNNYKGDKNYQRSSTNVHILSGLASCHKCGKKMHSGLDRARKDGFTPSRYTCYAFNVNYTCANYSSDLAILPSLINYIANYMTLQERITARHSLRDMESILLRGKYFEDIDHIEKQDLKNTYDLLINNKMVTYNSFEEKNKEAIISQNVIYEAEKEKYEKALKRLDDLYLYDVNSMSQKDFVIKRKEISDKIETINKKIQEVKFNDTPFINNKDFNLLSKASFYLLTKNLSSVKNIDVISLLNNLDRQTIKDFINTIITDVSVEKGKIYNITFKNGIVHHFIYKNEHKI

SEQ ID NO: 23378 - protein, 591 aa, synthetic construct
MIDNCVRAVFYARVSTQEEEQLKALPKQVEECKDIIASKGWRLIDGYVDEGKSGTKKDGRKAYIKLLEDMQEDKFDIVVVKSQDRLQRNTFDWYKFTDLLNKNNKRLYLYMDNKFYEPSEDALITGIKAILAEEYSRDLSKKLNNSNKRRIEKAKAGEEVSAMGNGQTYGYSIVNGKWVVDESQREVVRRMYELYTELHSVRKVRDALNEQGYRNQRGNLFTDENIGRIVKNVMHKGWVILNRHHRDFASKEIIEKSEEEWVIVKNDHEAIVSEELWDAVNDEIQSHRNKGNSGTRGKRGGTDTLSGKMVCSCCGRVLWKHASQGSYKSKEGRKYTYKRYTQWYCSGKMGRGELACTDPATISGVKLQKYLVEMADMFLDYSTVEYSKNLLKKRTISWLEDLRDKLTTPTDNGKIEQDLKALEGKRGKLIDLYTDELISKEEFKSRSVDLDAEIEKKRALLVPVEENPDIKAIEDTIANIDAEIEALFEDEAMVEEKKVQFIQEHIKKIYVSKNSDVFIVLDNVAGAFLFIDKEDTRIEVVPVAEYNPEELSEEGITENDFVPFDRESMPFPNVRIRIKRHGGTAWLDRTI

SEQ ID NO: 23379 - protein, 463 aa, synthetic construct
MRRKTTAPVEKILLRVAIYIRVSTDKQVKDGDSMRDQLATGQKYIDSHENMILVDTYIDDGISGQKLKRDDFQRLIDDVRACRIDLIIFTRLDRWFRNLRHYLNTQDILDKHGVSWTAIEQPYFDTSTPHGRAFVNNSMIWAELEAQNDSDRILGVFDDKVDNGEVLSGSTPLGYTIVNKHLVPDDDAPIAVAIFQYYRKTGNLSMTLRYMESEFGLVRSAASLKNMLTNTKYIGEFRDNKNYCPAIIDRNLFFDVQRLLKINIKSGKKHDYIFSGLIVCDDCDHIMSGCQQRARGRVRADGTRIIYKYSVYRCRQGVNLHRCPNRKLVFETTLEKMLLERIRPELENYIAEYEVANLPALRTDAKRRSVEGKMQKLKDLYLNDLITMDEFKLDREKLLMQLEKINAEDSRPVKDLSYLKNFLKMDFESVYDSLSIPERRELWRSIVKEIRVDHDKNIHIIFL

SEQ ID NO: 23380 - protein, 558 aa, synthetic construct
MIPFSVSSSALPDGCSGFLRAVIYARFSPGKNQKEISIEGQLRECREFADRNNYEVVGEYIDRRISGRSDNRADFQRLMRDCEKRCFDVVIVWKFDRFFRNRQESAIYKKHLADFGVKLVSAKEFIPDGSGGIIMAGMIETVAEWYSANLSENVTRGMYETASKAQSTGHLPLGYVTGPDKRLKIQPVEAEAVQIAFQMYSDGANLKEIADALNESGHTTKTGRPFCVNSFGAILTNPKYIGVYKWHDDIEIRDGCPRIVSDELFFSVQRRLERTRRTSGRGRATTEYFLSTKIFCGHCGKPMCGESALKRGMRYYYYACSEKKRFHNCKKKNVPKDKIENLVFEKTLAMLTDDNIAYIAREVERIAADENINLAALRQLEGQLAEVNKRLSNIGNAIAQGIITETTKELLVSAEAERAAINKKIAQERLLMKGTVKAENVACWLHSFKTKKRSDLEFKRQLFASLVHSVYVYDDHLKVIFNVEKYGAVEISFDELSSATSSDVVGLAQPAKRPQRTLILCGLLALAAHTPAAPPSCFFIRQGGPAFPRRALARGASL

SEQ ID NO: 23381 - protein, 472 aa, synthetic construct
MNSKRKVAIYSRVSTLHQAEEGYSIGQQIEALTKYCQAMDWVIYDNYSDGGFSGGKLERPAMQKMIQDAESGKFDTVIVYKLDRLSRNVRDTLYLVKDVFNANNVDFVSLQENIDTKSAMGNLFITLLSAIAEFEREQIKERMQLGVKGRAKSGKTTSWATPPFGYKYDTNTQSMTVDHYQAEIVRDMFNKIISGWSIMGITTYMRENYDGKWTHVKVKRILENITYIGKVKYRNEIFEGEHTPILPEELFYKAQKALEERTNKKDNTRPFQGLYMLSHIAKCGYCGTPLKIDTYKPRKDGTRKRTYTCINKNPRRTKTTIYNNGEECKESGRYDVKDVESYVLNEINKFQLNPESIESLYKDKPEENLKAYEEQLKQLEKKLSKLNDLYINELISMDALKQKSAELLKEKSSLESFINRNKTQTNNKQSFEKLVKMDDILKMSYDDQKKVVKTLIKRVEVKRDEIDVIFKL

SEQ ID NO: 23382 - protein, 679 aa, synthetic construct
MKQNPSIPSKVRAEHLNRAALVYVRQSTMAQVRFNQESTQRQYALQERALSLGWPEEHIRVIDGDLGISGSGRSKRPGFAQLVTSVSLGEVGAVFGLEISRLARSSADLMKLLELCGLFGTLVIDEDGVYDISDFNDRLLIGLKGTMGEAELHFLHARMIGGKENAASRGELRFPLPVGYIYDADGKTIMDPDEEVQHAISTLFRAFRSSGSAYGTVRYFAENGLSFPKRAYGGAWNGKISWGTLTHSRVLSVIHNPAYTGAYVYGRYRDNKTIDADGHFEHHPVRLPNREDWKVFLPEHHLAYISWDDFEENQKLLDSNRTNSERCGPAREGAALLPGVLLCGKCGRRMTVRYTGTGGIRPLYECIGRWEHGNKATCSSVPADVLDQAVSEKILSVMKPSELEISLKVMHSIGDTNKISDKQWLLAIERAQYEADRTERQFMLADPENRLVVRSLETNWNQKLKELEKAKQDYAVYSSKRPWIPSEAEEQSILNLARRIPEIWNAPSSTPKEKKRIIRILIEDITVLSEKRCSDFSIGIRFRSGKCEQLSLKKPLPCADRKRHTDDTIALIKELASSLDDYEIADHLNQDGITTPEGKDFTYAGVRWIRYKHDISGPYQRNCQGVSVAEAANLLGISTGKVYYGISSGKIPARKQHSGWPWEILIDKANLETIKSFYT

SEQ ID NO: 23383 - protein, 529 aa, synthetic construct
MTKRKWGELMKTITKIEEIESVGPAKKIRVAAYCRVSSSSDDQLISLETQKAHYETYIRANPEWEFAGLYYDEGISGTKTSKREGLLSMLKDCGRGKIDYIVTKSISRFARNTADCLTMVRKLLELDIPVFFEKENINTASMESELMLSILSSMAESESVSISQNAKWSIQRRFKNGTFIIACPPYGYDNVDGELVVVPEQAVVVKRIFADALAGKGTHMIARELNSEGLPPIQGKKWHPGTIKFILKNEKYTGDVIFQKTYTDSSFNRHRNNGEYDQYFCENHHEPIISHEDFDKVNELLRQRGKEKGNGEDTAKYNNRYGFSGRIKCGECGSTFKRRMHYKPSGAYVAWCCGRHIDSVDACSMKYITDDALKAAFLTMMNKLVFSHKVVLKPLLNDLITTSDSERLQQISELENQIEKNVEQKQVLTDLMTSVKLSPALFHKVSNELNTEAEMLSKKKEGLLYSMSGEYSKVEELKLLMQFTAKNNMVTEFTEELFLAYVDRVTVVSRAEVMFELKCGLNLKERLVK

SEQ ID NO: 23384 - protein, 523 aa, synthetic construct
MTTAKNVMVIPARRRLGNTVQAEERPKLRVAAYCRVSTDSDEQATSYEAQVEHYTAFIKQNSEWEFAGIFADDGISGTNTKKREEFNRMIGECMAGNIDLIVTKSISRFARNTLDCLKYIRELKEKNIPVFFEKENINTMDSKGEVLLTIMASLAQQESQSLSQNVKLGLQYRYQNGEVQVNHNRFLGYTKDEDGHLIIEPVEAEVVKRIYREYLEGASLLQICRSLKADSILTAANKPHWRPETVKKILQNEKYIGDALLQKTYTVDFLTKKRVKNNGIVPQYYVENSHEPIIPRELFMQVQEEMVRRANLRGGKDGKKRVYSSKYALSSIVYCGQCGDIYRRVHWNNRGYKSIVWRCVSRLEEKGSECTAPTINEETLQTAVVKAINELLANKEPFLQALQKNIATILNEENDNATNDIDSKLEELQQQLLIQAKSKNDYEDVADEIYHLRELKQNALVENAEREGKRQRIAEMTDFFNEQSCELEEYDEQLVRRLIEKVTVFHDKFAVEFKSGVEIDVEG

SEQ ID NO: 23385 - protein, 477 aa, synthetic construct
MRDSKSKTVIIYNRVSTIMQDKNESLTEQTDECIRYCKTNGYEIYKILKDVKSGTKDDRAGYLELKKHIKRKDFGILVVLETSRIARKMKELVLFFSLLNENNIEYISIREPNYNTTTPDGKFAMNIRLGLIQFERDNTAERVTDRLYFKASKGQWVNGKPPIGYKLVNKRLEIDEEKAEIVRNIYEDFLNGYSLNQINNKLQFSWGSKQVKRILTNPTYKGYIRYGTRSNRKKNNREAFIVKGWHEAIIPEEKWEKVQEMYKNLNRKASNTKPTLLSGLLKCKECGNNYIRKRGGSYDKNLYYGCNLNNLRYSDKFFYKDIPECSSATIKGDLLEKAVIDTLKKQINDLNFNDIEIDKKRQVNIKQIDSSINKFKNRLNKIYELYIEDEIPKDKYLKDKKDIEARIISLEKQKKSFGEIEVEKSNNEMIQEYFSKIDLSNIEEANRILKIIVNKIVVYKKKKTPKDDFEVEIYLNI

SEQ ID NO: 23386 - protein, 667 aa, synthetic construct
MAYAKNKVVKLWTQKKAALYVRVSTRYQVDKDSLPFQRKKLKEYCKFLEIDKYVIFEDDGYSAKNTDRPHFQEMMSRIRTGEFSHVIVWKVDRVSRNLLDFAAMYQELKDHKVTFISMNEQFDTSTAIGEAMLKIILIFAELERNMTSERVTGIMLDRAEQGLWNGARMPVGYRWNEQTKFPEPDPEEVKIVQLIFDRYEEWRSSIKVARFLNNKNFKSKRGGEWTSRLIYDIIRNPFYVGTYRYNMRESGRGPLKPESEWIVRENNHPGIISKDQFDRCNKIMDENASRRDTSEMRARKFVHTFSGHLVCSNCGSNMIACKDHARTNGWRPSIYRCAKRSRMMTCDNSKTVNETYLGTFVFNYIANLARVQKNFTKITSTEKLESELLKGEAFEAVSGIIPDSLNSTFQALLYSNLGNGTYVPDIALLSKFDEVQDHNQIDLLNTEIEKSKNAITRLTDVYLYDPASMTKEEFAAKKKELIKKIEEMEHQLAELLDNSEDNDLTDLSFIKKASAFLVTQRIVSKSFIDYVQMAQELDNEILKNFVDQIVDRIVIKDGRIQSITFVNGLTHEFFYSRPAELPVCKKCGGRIGSTCGCRTRTFSFNGKRYQRIKVGDPRDALYGQKNPVCPECYAKEGRWHHWLCGIELCPICGKPLQTCEHGPNGKE

SEQ ID NO: 23387 - protein, 550 aa, synthetic construct
MKKKPNITSLPAAIASADFDPSMNRVDPLQASGIGVIYARYSSHSQRDVSIEQQVQDCLDYAARNNIYIVACYADRHLTGRSDRRPDFHRMLRDAEAGGWNFVVTWKNDRFARNRYDAAIYKAKLKKHGVRCLFSQEYIPAGPEGILLEAMLEGDAEFRSAQMAVDIKRGLNYNAEHCMVTGSIPYGYRRGADYRLELDPEKAPIVKEIYDRFLSGWKIIDMASDLNARGIRTATGKEWGRNSFHNLLTNERYTGVYIYGDIRTPGGMPAIIDRDTWLATQRRLQTKKNPVGRSRSYGDYLLTGKLFCGSCGSPMVGISGTSKTGAKHYYYTCQGRRLAHNCKKENVRREWVESMVCRYVVGLVLQDPVIEWMADCVVDYQRRHRDDGTIQALNSQLKQTQGALKNIMAAIEAGIFTSSTKDRLLELEAQEAKLKHSIETEKALRPTFSRERVIFWLDQFRGGDLQDPDYQLRLVSTFVNAVYLYDDHVKIALNYSGRSSTADLPLVENACVDGAFVGSYNVEDGPPQHLTYEPPKFVFVSGLFGIVCKR

SEQ ID NO: 23388 - protein, 542 aa, synthetic construct
MAERVYCLYRVSTNKQVDHDENNQADIPMQRKACHDFAAKMGWVIVGEEQETGVSGYKVSADDRDKLQLIKKYAEQGKFDILLVFMFDRLGRKSDETPFVVEWFTKKGVRVWSVQEGEQRFESHTDRLTNYIRFWQADGESQKTSMRTKTALGQMVEEGRFRGGNAPYGYRLEKSGILNKRKHEVYMLVIDEDEARVVRMMFDLCISSGYGRWRLANFLNDHGIKNRKGQNWHDASVGGILHNPLYKGILRSGETYAGPFEALQIIAPDQFDLAQKLMLERTNERKERRTVPLNTTGQSLLSGNIFCGHCGGRLVLTTNGTTTRLADGTPVHKKRIRYVCYNKTRRRQECTGQTGYTMHILDGIVTEVLHQVFDKMQGASNDMIVGSAVQKQMAMIRSELQRARAENTKANKEYESLKAEVLKAIQGKSALPQDVLTEMLEDTRQKVLSTSERITTLTAELNDGNSKIEEMKAEFNRIVSWSKIFDESPMEVKKMICGYIIKNVSVFRDYRIKIEFNINVEQFLNGIDRIDECATYELPMAQ

SEQ ID NO: 23389 - protein, 498 aa, synthetic construct
MQIEVRKAEMGKEKKRLKVCAYARVSTEASEQENSLENQVSHYTEMIQANPAYEFAGVYADFGISGFKESRPQFLKMMQDAKNGKIDLIITKSVSRFARNTAIVLKASRELKERNVGIFFELQNINTLTEAGELLLTILAAFAQAESESASESSKMAYLHRIENGEVVAYLERSYGYEKDENGEYRAKEPEASVIREIYDLVIQGVNCTNIARVLNARNIQTVQGAEWTASTVFRIVENEIYKGDVLMQKTFIDEKRHQVQNRGEKAMYYAKDNHPPIVSEKTWEKAQRKLEDMRAERAEHSVIQEFTEENYPYMNHIFCAKCGWPLKPRVYSHGHRLSWDCSGQKRGTKKFCTGIHVLDNDLRKMKIEGNRYFSGTVDKYGEVHLKHVGERTWKNKHKKKKFNHKDLYPELNEENYPYYRRLYCARCGSRLGRYISHGTVRWICSSYKRKGQAKCPGVRIPDEIIKGWNLPDGKIYIMGKEDKNGEKHYSYTSESAL

SEQ ID NO: 23390 - protein, 477 aa, synthetic construct
MKDSKSKTVIIYNRVSTIMQDKNESLTEQTDECIRYCKTNGYEIYKILKDVKSGTKDDRAGYLELKKHIRRRDFDILVVLETSRIARKMKELVLFFSLLNENNIEYISIREPNYNTTTPDGKFAMNIRLGLIQFERDNTAERVTDRLYFKASKGQWVNGKPPIGYKLVNKRLEIDEEKAEILRSIYEDFLNGYSLNQINNKLQFSWGSKQVKRILTNPTYKGYIRYGTRSNRKKNNREAFIVKGWHEAIIPEDKWEKVQEMYKSLNRKASNTKPTLLSGLLKCKECGNNYIRKRGGSYDKNLYYGCNLNNLRYSDKFFYKDVPECSSATIKGDLLEKAVIDTLKKQINDLNFNDIEIDKKRQVNLKQIDSSINKFKNRLNKIYELYIEDEIPKDKYLKDKKDIEARIISLEKQKKSFGEIEIEKSNNEMIQEYFSKIDLSNIEEANRILKIIVNKIVVYKKKKTPKDDFEVEIYLNI

SEQ ID NO: 23391 - protein, 463 aa, synthetic construct
MARSVTVIPARNRQVSGYRAAPQKKIRVAAYCRVSTDQEDQLHSFEAQVDYYTKYINDHENYEMAGIYADEGISGTNTKKREQFKRMIADCGKGKIDLVITKSISRFARNTQDCLMYSRKLKNLGIGIIFEKENINTLDSTGELLFTILSSLAQDESRNISENCKWGIRTKFKNGEMHLNTFKFLGYDKDENGKLIINREQAKTVRRIYRDFLWGLNPAQIAKELEEEQVPGCLGQTKWYASTVIGILKQEKHMGDALLQKTYTADFLTKRQVKNNGEVAQVYVRDSHKGIVDKETWNAVQEEFERREKFMQKHGTDRYSYGSECYPFCEKIFCGECGSLFTRHSWKSRGIIQWQCKNHRKDGKVACTNAYVDNADLEKGFIKAFNRLVGEREKHIERWNSMKLDGTPLEKIRVGQMMEATESGQLQQYVPEAAQLVLEEITIFGAKKYEFAFLEGSRVKVSV

SEQ ID NO: 23392 - protein, 521 aa, synthetic construct
MPKITKIPASISRYTSAPIDAPVKRKVAAYARVSTDSEEQLTSYAAQISYYTEYIKGREDWEFVGVYTDEGISGCSTKRREGFQRMISDAMAGKIDLIITKSVSRFARNTVDSLTTIRLLKENNVECYFEKENIWTFDGKGELLLTIMSSISQEEARSISENVTWGHRKRFADGKVSVAYSRFLGYDKGSDGKMVVNPEQAEIVKLIYRLFLEGMTPHTIAIHLTEKGIKTPGGKDKWNATTIRRILTNEKYKGDALLQKEFTVDFLTKKTKKNCGEIPMYYIEDDHEAIIDPAVFDMVQQEMERRKTGASRYSGVSIFSSKIKCGECGGWYGAKVWHSTDQYRKVIYRCNNKYNDERCTTPHIMEEEVKTVFLKSLNKLLANRDELIENVKLICDKLTDTSELEAEKEKYAEEMSLVADMVQAAMLENARIALDQEEYRQKNDVLSARFEAAKKKHDELAMQIEEIETRGQNLRHFQETLESLNGQVTEFDSDLWGSLVDYITVYENGEKTVTFRDGSVI

SEQ ID NO: 23393 - protein, 464 aa, synthetic construct
MKSKTLRCAIYIRVSTTEQMMHGKSLEAQKDYLIHYAKEHDMNIVGIYADEGKTARKELKRRKAIQELVKAVERDEIDVILFWRLDRWFRNLSDFYKVQDILDQHNVRWISASEPGINMETRDGRLQLNVVLSIGQNEVDTTSERIKFVNEASIRQGKVIFGDSNMPIGYMVGTVDGVKRMVKDPEKEDLVNAFYRYFRTHQSKMKTLKFIQENYDPTFSYSQLRNMLESDFYHGAYRDNSHYCPAYLTEKEWAEIQEISNRNVKHPASGRVYLFSGMMRCPVCGQLLAGRGGSSIINRKTRETRTYCYYRCNKACIDHMCTYRHNVSQNLIEEYLISNLEEEYNRYKIQSQNIHSKADLPKKKRTPAQVKKEMQRLNLLFQKERIEWDYYNEEYEKLTTELSSLEESDQQPKTNFDNIEKILHNDFRKTYDNLSPENRRAFWRSIIKEIHINTSHEVTGIDFY

SEQ ID NO: 23394 - protein, 512 aa, synthetic construct
MERAVIYARYSSDHQREESIDAQVRACREYCQRKGYLVTKIYADEAKSGKSIAKREQYKKMLSDSQKKLFDVVVFHKIDRNSRNELDYYLTKNQLISSGIKYEYAAQNIDTSPAGQMVEGILVAVAANYSRNLAEETKKGLKENALKALFNGGRPPLGFEINQENKYIINDYEAGAIRIIFDLYLKGKGYHYIISQLNSLGYKTREGRKFGKNSLYDILRNPKYCGTYTFNKVNKDPSGKRNSHKISENTIIVEDAIPAIISKEDFRKVQEKMSRNKHRTAAYRSKETYLLTGKAFCGICGAAMTGHRASARGKKYVYYTCAARDRLGTSACENKVVPRDELEQVVLDTLKEELLSNNFQKNLNHYILEEFHTLASEVSNEADSLAEQKAIAERKLNNLYSIIEQGTADEYDLQRLADVKRELTSIKEKLSKCAAAHSLSDINPRAIERTIKLCRNMLLNNASAETLTLIFDDMVEKIVIGTKKITLQFKLECFDTYGAEGRTRTGTWGNHA

SEQ ID NO: 23395 - protein, 668 aa, synthetic construct
MAYAKAKKHLKIWTKKKAALYVRVSTRYQVDKDSLPFQRKKLKEYCKFLGLEDHVIFEDDGYSAKNTERPHFQEMMSRVRSGEFSHLIVWKVDRVSRNLLDFAAMYQELKDHKVTFISMNEQFDTSTAIGEAMLKIILIFAELERNMTSERVTGIMLDRAEQGLWNGARMPVGYRWNSETKFPEPDPEEVKIVQLIFDKYEEWKSSIKIARYLNNNNFKSKRGGQWTSKLIHDIIRNPFYIGTYRYNLRESGRGPLKPESEWIVRENNHPAIIDKAQFERCNKIMDQNRSSRDTSDLRARKYVHTFSGHLVCGKCGANMIASKDRARANGWRPSMYRCAQRSRMLDCDNSRTINESYIGPFIFNYIANLARIQKNFKNITTVEKLEKELLKGETFDGVAGILPEGLNLTFQALSFRQVGNGTYIPDIDFLGDSDDASDRDQIELLKSEIEKSKNAVTRLTDVYLFDPDSMTKEEFATKKKELAKKIEGMERQLADLLDDSGNDDLADMSFIKKASAFLVAQRIVSKSFVDYVGMAQELDNEILKDFIDQIVDQIVVQDGRVQSITFINGLKHEFRYTTPAELPVCQKCGGRIGSTCGCRTRTFDFSGKRYQRIKVGDPRDMLHGKKNPVCPECFAQEGRWHHWNCKIETCPICGGRLAECEHGPNGKK

SEQ ID NO: 23396 - protein, 519 aa, synthetic construct
MKKVTKIAEAANTKVKLKKIRVAAYCRVSTDSDAQLESLEAQKTHYETYITSRDDWEFAGLYYDEGITGTKKDKRPELLRLIDDCKAGKVDFVITKSISRFSRNTTDCLELVRKLLALHIPIYFEKENINTGSMESELFLAILSSMAEGESVSISENNKWSIQKRFESGTYKVSYPPYGYDWDGEQMIINPEQAAVVKEIFAALLSGKGTHAIADDLNRRGIPTKRNGRWTATTIRGMLSNEKYVGDCLFQKTYSDSRFVRHNNHGEQTQYLVKDHHEAIISREDFEAAHAFIHQRATEKGVVKGSDKYQNRYTFSGKIICGECSDTFKRRIHSCTGYKYAAWCCNTHIKDKNKCHMLFVKDDDLKRAFITMMNKLVYAHRIILKPYVDALKNTSSDDSLRRIQEIQTLLAQNTEKRETLTKLMTQGIIDPILFNKETNELLSQADSFRDEINALKNAVSGDVTKVTAATALLHFTEKGGILQEFDDGLFQEYVNRIIVRSRNEVCFELKCGLKLRERM

SEQ ID NO: 23397 - protein, 522 aa, synthetic construct
MGNVMVIPARRQVGNTVKQSAQKKLRVAAYCRVSTDSEEQETSYEAQVTHYTEYLQNNPEWELAGIFADDGISGTNTKKRDEFNRMIDECMAGNIDMVITKSISRFARNTLDCLQYIRQLKDKNIPVYFEKEAINTLDAKGEVLITIMASLAQQESQSMSQNIKLGLQYRYQQGKVQVNHNRFLGYTKDDDGHLIIDPEQAEIVKRIYREYLEGSSMDKIADGLMADGILTGAGKTKWHTSTINKILRNEKYMGDALLQKTYTTDFLTKKRIKNNGTVPQYYVEGDHEAIIPKELFMQVQAELVRRRVVHVSPTGKKRSFSCNHCFAQMVFCGDCGELYRRVHWNNHGCKSIVWRCISRLEPTSAEKNCTNRTVNELLLQEITVKAINQILTERDVFLKTLQQNIAKAVVSADTLSPDGIQARLEELQKELIKKANNKQDYDAIADEIFRLREQKEQSEVDSHHREETMNRIKELQNFIAKQKTDITEFDEALVKKLIEKITVFADHFNVEFKSGLAIEIEA

SEQ ID NO: 23398 - protein, 528 aa, synthetic construct
MKIAIYSRKSKFTGKGESIQNQIEMCKEYCNKHFGQCEFIIYEDEGFSGGNTDRPQYKRMMEDVGKKKFQAVACYRLDRISRNVSDFSQTLEELNNKNIAFISINEQFDTSTPMGRAMTYIASVFAQLERETIAERVRDNMLQLARSGRWLGGIAPTGYKSEPITYLDSNMKEKKMYKLSPVKQELEVVKLIYKKYLEFQSLSQLETYCLQNNIRTVNNRDFQKYTLRTILTNPVYSKADQSVYNYFYSREAQICNNKNEFTGKYGIMAYNKNLVKKGQSVKTKNMDEWIIAIGKHKGIIEGSEWVMVQNTLNKNKSLAPRQGTSAAAMLSGLLYCKNCGNFMRVKYGQKKKNSDERHYYYVCSMKDNSRGSRCNMKNLKGEDTDQYVIEKLKEMIESGILKDIDNAKKNIEDKKKINKNVYDKITANEKAIENLLKQLSQNENETVAKYIFSEIEKLDKENKELKSKLDKYDSETNITNLELFKEAVVRFYESIDGVPYEQKRNLIQGIVKRIEWDGKDLHIDIFDI

SEQ ID NO: 23399 - protein, 612 aa, synthetic construct
MRAAFLIRCSTKKQDYERQVNDLTRLAKKFGYTSNDNLIFGEHITGKDDASKRDRQSIQHLKDAAINKEFDVVLVSEVSRMSRDPMSGRLYVRQLINMDIPVYFRDIDTWTIDPVTGKKVRDAETIIGAAFDAAWKYIKSMKTQIASGRRDELDNNQMSIGQPFFGYKRYGGRDKGKKNSWVINDDAAKVVVDVFEEYVKDGATLKSTALAITAKYGEQFNKKFSIGTIEHILTFEPYCTGIKVVSLTDPDTEDVDEFRVEIPIIITRAMFDKAATKRATNRVTKIPYSKQATYVLSKLLKCHICGHTLTPRKRSGDKGEKYRLMNGKVALTWLCMSGINNATDCSSRITISNEKLEAIIWGLIKQELIGFANLNDEDRVAKVEELTDKITNLEMNIANFTSHISNMDRLIERAYSAYMDAPDSVMDIAKDKYYKTLTKCENERAECKDKIEALNVEKLRLENMRTFFNQPTLPKDAIEKAESDPIKMRNLVMELIDKIYPYRITTYVSPATNRIMKNGIVLLEVYTINGIYNVLYDGNQRNNKVAYYISGVYATFQNGRNKFDAYDTGEYFVISHATLVTKTEDVDLLVTFNELIKICMQNGWEIDYTYKT

SEQ ID NO: 23400 - protein, 502 aa, synthetic construct
MDIIREDCIYARQSVDRKDSISIESQIDFCKYELKGGSCKVFKDKGYSGKNTDRPEFQKLLGEIRKGRVRRGIVYKLDRISRSILDFANMMELFQEYDVEFVSSTEKFDTSTPMGRAMLNICIVFAQLERETIQKRVTDAYYSRCLKGFHMSGQAPYGYQLEPTVVEGIRTKKMVADPETSQYVKLMFEMYSEPETSFGDITRYFEEQNIKVYGKSLFRTFISQLLRNPVYAQADLELYEFFKSQGAAIVNDASDFAGTNGCYLYQGRDVKEDKDRSLKDQILVIAPHEALIPSDVWLKCRKKLMTNKSFQQGRKPKNTWLAGKVKCGCCGYALKATHVPNSEGYFRCSKRTENKGCPGCGKIRKSEFEEFIFSAMRARFKNFQVRHSREEKVNPKLTAHQIELAQVEAEIEKLLDTLTGANATLLAYANKKIEELDTRRQTISKEIAEMSIETMSPQKEQELSYYLDHWDSIEFDDKRKAVDGLIISISATSDHVQVEWKI

SEQ ID NO: 23401 - protein, 465 aa, synthetic construct
MPEKILRCAIYIRVSTFEQSVHGKSLQAQKEYLEHYAKEHNLSVVGVYADEGKTARKELKKRKAIHALIEDVKQEKIDVILFWRLDRWFRSLADFYKVQDVLDEYGVRWISASEPGINMETRDGRLQLNVVLSFGQNEVDTTSERIKFVNEASIKNGRLIFGEANMPFGYKSGVVDGKKCMIKDPETERMVIDFFRHYKKHQGKQDALKYMQRTYGIYFSYGMLKTMLSSEFYKGTYRGYPYCPAYLTEKEWNEIQEISVRNVKRAPSGRVYLFTSLMRCPSCGQKLVGTGCSSISNRKTGKKRTYCYYRCNKALADHLCPNRHRVSQNLIEQYLLENLSSEYEKYKIRSNKINEEKKKVRKAKNPAQLSKEMERLNLLFQKGRISFDYYDEEYQRLEEELAFAASDPSLEEPKRNYSELEKLLRTDFKEMYDSLSLENRRAFWRSIIKQIHLNDDCTIKEVDFL

SEQ ID NO: 23402 - protein, 562 aa, synthetic construct
MARKKNIAAGQNAVIYARYSSHNQREVSIEQQVRECMKHAAELGLHVVGTYEDRAISGKTDKRPNFQRMMRDAEKGKFQAVVAWKSNRIGRNMLQAMVNEAKLEDCGVKVFYAEEDFDDTAAGRFALRNMMNVNQFYSENMAEDITRGLYDNASKCMANGRQPLGYKRGEDGRVVLDEANAAVVREIFTRVAAGDLFVDIARDLNAQGIKTSKGANWNKGSFQSICQNERYRGIYIYGDVRVADGIPRIVSDDLWYRVQEAMRMKKNPVGTRHRVGAEDYLLTGKLRCGHCGSYMTGVSGTSRNGELHYYYTCQKRRTEHACDKKNIRRDVIEPAVAQAIKMYCLTDDVIEWMADRTVEYWEKHDNDLQIEALEQQLEENKKATSNMLKAIEMGIITEATRTRMVELETEQSRLSVQLNAAKEDVVKIDREQIISYLELLQQGDIHDRDFQMELFKNFLVAVYVYDDNRMKLVFSCMGDQNSVEIPLETGEDPPDGGLSPDAKMFVLTPDSSTIQFVLEPDSLRKRVRVRFLFIGSSAEGLHRALNEQRQGITMTVVSCLLL

SEQ ID NO: 23403 - protein, 502 aa, synthetic construct
MTAVIYARYSSDSQREASIEGQLRDCKDYAEKNGITVVGTYIDRAYSAKTDDRPDFQRMIKDSGKKIFDVVLVWKLDRFARNRFDAVNYKYQLEKNGVHLVSAMEPISQGPEGIMVESMLIGMAEYYSAELALKVARGERENALQCKYNGGVVPLGFTIGKEDRLYHIDPETAPIVQEIFTRYADGEPAEKIAASLNERGLRTRTGKPFVKNSFFQIFRNRRYIGEYRYKDIVTPGGIPAIVDQDLFDRVQQRFEQNRIAHGRPAKEDVSYLLTTKLFCGKCGTLMGGESGTSHMGNTYYYYKCGNAKRHGKAHCDLKAIRKEPLERFVVDTAIKVIFSDEIIERLIDLVMEAQQQENTRLPVLKEQLRDTEKRLANLLEAIEQGILTSTTKQRLDELEARKEALNTSILEEELKKPVLTREWIRFWLEKFRKGDVGSTEHQRQIIDTFVNSVYVFDDRVVLNFNFTDDAKTISREEVLGSSAVDNAPPTKGISSGWCLFCG

SEQ ID NO: 23404 - protein, 518 aa, synthetic construct
MKRVTKIAAAPTAVSKLRVAAYCRVSTDSDAQLESLDTQKDHYERYISARDDWEFAGIYYDEGISGTKKENRMELLRMIADCKAKKIDHVITKSISRFSRNTADCLEIIRKLLRLNVTVFFEKENIDTGSMESEVLLSVLSSMAQSESASISDNVKWSIKRRFQNGTFKLIYPPYGYLWDGNNLVIEPKQAETIKHIFSDVLSGKGVETIAKELNAQNIPSKKGGRWTPTTIRGILSNEKYVGDVIFQKTYTDERLARHRNTGQQDMYMITEHHPAIISREDFEAVQCLTAQRSKEKGIEKGASKYQKRYAFSGKIICGECGDTFKRRIHSGPYENYAAWCCNTHLSDKASCPMKYIRDDALQMAFVTMLNKLIYSHRLVLKPYQRAIANNSKDKALGQIQRLERLLEQNLEQRETLTKLMTQGYIDQVLYNRENNALLAQADEYRANIEAINTNMTGDVSKLSETAKLLRFAEQSNMLQFFDETLFASFVDHIQVFNRSEIGFVLKCGLTLKERIGE

SEQ ID NO: 23405 - protein, 523 aa, synthetic construct
MFFGIYGRKSVYSDKSDSVDNQHRMCNDYIKAHFKADDITLVTSYSDEDYTGANTKRPDLQRLLEDVKSGAINVLVVYQLDRISRDVRDFSNIYAMLEEYHVMFISIKENIDTTTPIGRAMMYVTVVFAQMERETIATRVRDNMIGLAKKGFWTGGNPPYGYVRKNILINGKKHVTIEPDPDGVAYNIWIYDSFLKNHCSLQSMETYFRKEGIKTRNGAFFSTTQLYKILTMPYCVEATPEIYDYFAAKGCQMDPDSPREKWDGSVGVMIYGRSTGVNKKHQLQPPEKWLVCLGLHKPFMPAAKWLAVQNQFSENKFDKTQKYDIPLLKGILRCSCGSIMAVSRKKKINGEVSSWYYCLRRMKNGVEACDRKQIKVDIIDQKLLNTLHSIEIDPSMIYRFVQKSELPLPDIKTINNKISSIELRIGRLASSLALADGSAASKYIVAEIERLDSDLQFLKRERAVINVEIKKRDELNESAEGKAQHIQNVMKGLNGFTAEEKNRIMRDILKECVWDGSELSIVL

SEQ ID NO: 23406 - protein, 474 aa, synthetic construct
MKVGIYSRVSTQEQAREGYSIGEQVERLKNYCAAKGWILYKTYTDAGFSGANTDRPGMQQLISDVADGKIDMVLVYKLDRLSRSQKDTLFLIEDVFIKNNVNFASITENFDTSTPFGRAMIGILSVFAQLEREQFRERSIMGKDARAKEGLHHGGGAPTGYDYIDGQLIINKEEAELIKEAYRLFLEDDMTMMGIAAKLSVFSEKFKYDHRIRKMLTNPLYAGWTHCRDELYKGQHEAIISQEVFDKVQTKLKIRAENNPHYRNAFNRTSLLAGILWCKKCGARYFKRVRRYEKGSKVYYYNKYQCYSRSSYKNMVRDKSCKNKIWTMDVLDKAVIDEIKALVANPAEVDNIIKLNQSNNNITEKKEFYKKRIKEIEKQMNKLTDLYSIDGIDIDFVAKKITALNTDKKRIETEMNAINEHKPLISAEDAKKRLSGISNILDNGEFAEKVKVITSLINRIEVDDDDIYIYWNFV

SEQ ID NO: 23407 - protein, 515 aa, synthetic construct
MSYLIYLRKSRKDLENPFMTTEEILNRHECILLDLAKKMNLSIGCIYREIVSGDSISARPVMQKLLREVESGMWEGVLVVEVERLARGDTVDQGIVQRTFQYSETLIITPQKTYNPSSESDQTFFEFGLFMSRQEYKTIKRRLKSGVMSAVREGKWPYNSAPYGYRRYKLANQKGWSLEFDDQERPIAELIYHLFCDEKRGLGYISDYLEARNIKSRTGGRFTESFLREFLRNPVNDGKVFYGRRKVVTKIVNGSSVRTRPRADEYIEVSGLHDPLIPHDLFLKAQERFRVSTPRNPSSYAVKNPLSGLLVCSECGRKLQRRPASTSKRGAPYDVLMCKTRGCPTVGSAVEVIEREVLHALEGIVRGYEADVPSVPSLVPQKEELLHNAVLHRADLNKQQERIYTLLEQGIYSTDVFLDRSKALEKQMQEVDHSIDVLKNELEEEKIKYNNWKSFVPTCKQLLEIYWTLTPDARNAALKEVIDRIEYKKLTRNPKGMCDVATFELTLYPKVPMKS

SEQ ID NO: 23408 - protein, 611 aa, synthetic construct
MRTVKAYIYSRVSSLQQVDAFGLDRQISTVLDFLENAKLPTELGYQLDPSNYEVLESDKGLSGYKGHNFTKGSLGQFKRRVEAGEITEGCLLIESVDRFSRKQGYDAIDEFTFLIKRNIDIVEVETGQIYSYKLDHKLSALSTSIERAHQESKRKARISKKSWNRRKEESLSTGVALNNNTPDWLSLSHDKKSYEIDPQKLQTITKIFEWYSDGYGVTEIVNRLNGEGDRYNGRGWNTVTVYNKLRDRRLNGYLIGKYSTIPKKENESTSDAEKRILGNIKIKKEANDNAIRIYPVVIDDELFSKIQSMMDRNVSSKKQRSTTTKQRNLFNGLTKCHECGSPMIVQSMSNGGQYLRCYRQRTKDEKCNSKMLRYFESEKVLLGHIKNLNIDEIYNDQKQSQSLEVLKRKLSDINEKIVLLNDKVRSASDEDELFAIMEFKRKRIIEKDELTEKISALENESEIFRLDYNYDVEKLTDQDNTVLRRKANEHIAKVISSIKCRRIDSSYIGAYYLYDITYHREVLKHILITDNSGKLISEIAISEKDNERTYQVREGGKTVFKVESNGNAWVLYASRTKTIDDLLYYITTMMVGREPDEFVYQLNEDQIEWID

SEQ ID NO: 23409 - protein, 521 aa, synthetic construct
MKKVTKIEGAQNNITIKKKLRVAAYCRVSTGSDAQLESLEAQKTHYERYINSREDWQFAGLYFDEGITGTKAEKRPELLRLISDCEAKKIDFVITKSISRFSRNTTDCLALVRKLQSLDIPLFFEKENINTGSMESELFLAILSSMAEGESTSISENAKWSIKRRFQNGTFKLSYTPYGYDWNGENIVVNPEQAKIVKRIFADVLSGKGTQAIADELNADGIASKKNSKWTATTIRAILANEKYTGDVIFQKTYTDENFNRHINYGEVDQYMAPDHHEAIISHEDFDAANALVAQRAAEKGIEKGNGKYQQRYAFSGKIICGECGDTFKRRIHPCTTYKYVAWTCNTHLKDTTACSMKYIRDDEIKAAFVTMLNKLIYGHRLILAPYLKALENSSGDEAIQRIQHLELLLAQNSEQRETLTKLMAQGYIDQILYNRETNALLLQAETYRSDIEAITICMTGDSAKVTETNLLLHFVSHADMLTAYSEELFESYADHIEVASRHEIRFVMKCGLTFTERIGD

SEQ ID NO: 23410 - protein, 522 aa, synthetic construct
MGNVMLIPARRQVGSNARKKEEEKPKLRVAAYCRVSTDSDEQATSYEAQVEHYTEYIQKNPDWEFTGIYADDGISGTNTKKREEFNRMIDDCKAGKIDMIITKSISRFARNTLDCLKYIRELKYMNIPVIFEKESINTMDAKGEILITIMASLAQQESQSLSQNVKMGIQFRYQQGKVQINHNRFLGYTKDADGNLVIDPEQAEIVKRIYREYLEGLSMDKIAAGLERDSILTGAGKAKWHTSTINKILRNEKYIGDALLQKTYTTDFLNKTRVKNNGLMPQYYVEGNHEAIIPKEIYLQVQEELVRRRVVKTSANGKKRSYSCNHCFSQIVICGECGEMFRRLHWNNRGVKSIVWRCISRLESTGLECHARTINELVLQDAVVKAINQMLGDKSSYQAQLQLNIASVIRASQVTSVENIDEKLMALQQELIQKAQSKEAYDEIADEIFRLRELRQQTTVDTAARDEQIKRINDLQDYIFQQTAHLTEFDESLVRRWVKQITIWDDRITVELKSGVSIDVDA

SEQ ID NO: 23411 - protein, 523 aa, synthetic construct
MKKNKVKITEFSKLERKVAALWTRVSTEKQERNNCSLENQQRICREYAERNGITIKKEFGGTHESAKTEGRRYREMIAEVAKDKEINIILVYSFDRFSRAGTEAIMTKAYLKAKGIYVISATQATDPDSAAGTFMENILFLFNQFENDLRRDKCVMGMTECLRKGYWFGNVPLGYDRKKVGREHIITVNEDGKRLRNAFLWKANEGLGDIAIVDRLRSLGLTIDRKHLNKILHNPFYCGYIKHSLLGDEIIKGKHEALIDEATFNKVNGLSSAGYEHREITDEFPLKRHVICSDCGGYLTGYTVKARGRNYYKCNKKGCKSNHSTDKMHSKYVGLLNSYQIPQELIPVLTGVFEKVFKENNDMKTETRRMLLKSQTECNAKLKKLQIRYGLGEISDEVYQTTYKHLNVEMAEIKKGLEEASQNLSNMAKFVDEAIVMSCKLGDLWSNGSFDGRQSLQKLMFPTGVLFDKEVDDYRTDNENEVFKIFRRISASYKEDKTKATNNFHCLSPSVGMRRAIDTFCFH

SEQ ID NO: 23412 - protein, 521 aa, synthetic construct
MGNVMVIPAKRQIGNTGRKQDAKPKLRVAAYCRVSTDSDEQATSYEAQVEHYTEYIKKNPEWEFAGIYADDGISGTNTKNREEFNRMIEDCEAGTIDMIITKSISRFARNTLDCLKYIRQLKEKNIPVFFEKEAINTMDAKGEVLLTIMASLAQQESQSLSQNVKLGLQFRYQNGQVQVNHNRFLGYTKDEDGNLVIDPEQAEVVKRIYREYLEGYSMDKIAAGLEADGILTGAGKPRWHTSTINKILRNEKYIGDALLQKTYTTDFLNKTRVKNTGIVPQYYVEGNHEAIIPREIYMRVQEELVRRRVVKTSANGKKRSYSCNHCFSQIIICGDCGEMFRRIHWNNRGCKSIVWRCISKLEPTGLECHARTINELDLQEIVLTALNELLGDKSKYQKQLQQNIASVIRASAAITTDGIDEKLMELQQELVKKANNKEAYDEIADQIFALREKRQQASMDTVQRDEQLQRITELQDFIKEQPSDLTTFDEALVKRWLKQITIWDDHCTVELKSGLMVDVER

SEQ ID NO: 23413 - protein, 519 aa, synthetic construct
MKKVTKIDKIQNVTSKKQKLRVAAYCRVSTSNDAQLESLETQKAHYESYIASRDDWQFAGLYFDEGITGTKKDKRPELMRLMQDCAAKKIDFIITKSISRFSRNTTDCLELVRKLQELDVPIYFEKENINTGSMESELFLTILSSMAEGESTSISENSKWSIKKRFQNGTFKLSYAPYGYRWDGRTLRIIPEQAEVVKRIFADVLSGKGTDAIAKALDDEGVPTKRGGKWTSTSVRGILSNEKYTGDVIFQKTYTDDSFNRHTNKGELDMYYVADHHEAIISKEDFEAAGLLITQRAAEKGIKRESQKYQQRYAFSGKIICNECGDTFRRRMHSSTYGKYVAWCCNTHLADKDKCSMLYLRDDDLKVAFITVLNKLIYSHKLVLKPYAAALQNNSGDESLVRIQHLERLLEQNTEQRETLTRLVAQGYIDQVLYNSETNALLTQANTYREDIEVINATMSGDSSRFFEAERLLHFAERGSMLEEYGEDLFERFVDHIQVYSRHEVGFVMKCGLTFKEMI

SEQ ID NO: 23414 - protein, 523 aa, synthetic construct
MAVSRNVTVIPAIKRVGNNKTSESKPKIRVAAYCRVSTDSEEQASSYEIQIEHYTNYIKKNKEWELAGIFADDGITGTNTKKREEFNRMIEECMAENIDMIITKSISRFARNTLDCLKYIRQLKDKNIAVFFEKENINTMDSKGEVLLTIMASLAQQESQSLSQNVKLGIQYRYQQGEVQVNHKRFLGYTKDENKQLVIDPEGAEVVKRIYREYLEGASLLQISRGLEADGILTAAGKAKWRPETLKKILQNEKYIGDALLQKTYTVDFLSKKRVKNNGIVPQYYVENSHEPIIPRELFMQVQEEMVRRANLRGRKGGKKRVYSSKYALSSIVYCGHCGDIYRRVHWNNRGYKSIVWRCVSRLEEKGSECMAPTINEETLQTAVVKAINELLANKEPFLSTLQKNIATVFNEENDNATNDIDSKLEELQQQLLIQAKSKNDYEDVADEIYRLRELKQNALVENAEREGKRQRIAEMTDFLNEQSCELEEYNEQLVRRLIEKVTIYEDKLTVEFKSGIEIDIEI

SEQ ID NO: 23415 - protein, 640 aa, synthetic construct
MRRKKDRSNGITALYERLSRDDDNAGESNSIVHQKQMLEDYAMKHGFTNFVHFTDDGWSGATFDRPSWNRLVEGVKNGEITACICKDMSRIGRDHLQVGFFTDILFREKEVRFIAINNGIDSDRQETSEFSPFLNIMNEWFVRDTSKKIKAVLKSRGSSGNAHTSNIPPYGYLKDPENPDHWIIDEEAAEVVRRIYRMTIEGKGPYQIARELSEEKIERPSYYLGKKGLGNHASNYDKENPYMWRGNQVTTLIARPEYIGKTVNFRTFKNSYKDKKTKRADKEDWVVFDDTQEPIVDEETWLLAQKLRQNVRKADPMGEPNVLTGKIYCADCGAPMYNHRQRKGRERIYYTAKGEKRTSYSNPADCYECSTYNLAYQKYDRHCTCHHISTKALKSIILKTIQETCHYVSLNEQEFVYSLQEESAMKDIAVSETVKKRIERNQKRVHELDMLIRKIYEDNVIGRLPDRLFQSMLTDYENEQNELNKIIETDTADMQRIIGGQNNVERFLKLVKKYENITELTPAMINEFIDKILVHEPQGKGADRTTEVEIYLNYVGQFQVPVEQHEPTEEERIAAEKEAERLRRKRESNRKYMKKIREKSKEFAEHERIAEEKSSDSNVCVEQNVTSKSNRQKVKGEKIA

SEQ ID NO: 23416 - protein, 587 aa, synthetic construct
MEVEIIKAKGAGEDTSTGRKIDRLRVAAYCRVSTDDEDQIKSYNSMVRYYTDLIKSNKQWVFAGVFADKAITGTKTDKREEFQLLIQECLSGNIDLVIAKSIPRFARNTLDTLKYVRMLRERNIAVYFEVEKINTLKDGEFLLTILSSVAQQEVENTSAYVKKGLKMKMKRGELVGFQGCLGYDYDVVTKSLSINEEGAETVRYIFDRYVAGAGSTMIARELNEQGIPTIKGNPWTSSSVMGIINNEKYKGDILLGKTFTVDPISKRRLENLGEEDRFYIKNHHEPIISEEKFARAQEIRERRNGGRKKGVAPGKREKFSRQYAFSCMLECGFCGANLSRRRWHSSSKYTKTIWQCVESTKHGKRFCPDSKGIPEQVIEDAFIESYRMLCTDHKDVLEEFIKRVEKTLSEDSIEDKIEKLNRSVYNIQYKRKKLLENYLEGVVAKDIYEETDVGYEKKLSEAKTQLSMLEQQYDNEGSLQRRLADFRKALSKNQILEEFDRGIFESIIEKVIVGGYDENGEKDPYKIIFVYKTGFKNEIGNAKERFGKKSKAVEKAKEMCSHIVDEVKDVCSYVSDNTCGDGMLTLA

SEQ ID NO: 23417 - protein, 550 aa, synthetic construct
MNNNTSNYLVYAIYSRKSKFTGKGESIENQIELCKNQLINKYNIKEENIKIYQDEGFTGYNTNRPQFQEMIKDIRNKKIKCVIVYRLDRISRNVTDFCNLKNEFIKYNTDFISVTENFDTSTPMGRAMLMISSVFAQLERDTIAERIRDNMYELAKTGRWLGGNTPLGYKSEKVETLSVDGKRKNLYKLDIVFEEAEIIKLIWNKMCELKSLSKLEAYLLQKGIKTRNGNNFTRFSLITILKNPVYVVADNRIKNFFENMNVTIYETDIEKCNGINGLLAYNKREELMGKTKSYKDITEWIIAVGKHQGIVPSQQFIKVWNLIENNKDKRCRVPRQNTSILSGIIRCKHCGNYMRPRLRNTVTIDNKRNFSYLCVLKEKSRKRLCKCKNINGIETDMIVIEKISELKLPTNMLINKIKLLINNKEKKSDKRINELQTLNTILSRNKRKVEALIDKMAIIDGELIADITAQIKSIKSKNLEIEKRIIELSKETEKEIDKDEITVLALNIINKYMSSFDSLNIVDKRLMIKSLVNTIESDGENIYINYMGCP

SEQ ID NO: 23418 - protein, 525 aa, synthetic construct
MPTERKKKTTREENAKNNSTKNTIKKPRNSTSNAKSKKESKSLLGLKDLMEDTSPEKVVGCYVRVSTDAQAEQGYSIPDQTAKLQAFCTVKGWENAKFYTDPGFSGSNLNRPAMQEMISDAMEGKLKAVVVFKLDRLSRSQKDTLYLIEDVFLPNEVDFVSISEALDTTTPYGRAMIGILSVFAQLERENIYMRTRIGMMGRVSAGYWRGGGKVPFGYDYDKESKSLIPNADAQKVPQAYDLYIKGYSCQKIADMLGLSCEQLVRNILTKRTYCGYINYKGKDYKGFHEPLIDEERFMLVAAEMERRGKENLAVCGNNKYYLLTGLVFCGDCGARMRYMKWGKYLRIVCYSHTCKKNMVKDPDCPNKGVRAEELEKVVISKLFDIGTDISLDDFDDTHVPASAAEILTNRIDELKESLRRLYGLYADIGDPMVYERIEDVRGQLHVLQRQLASEETQKLKEEHINYVREKIQTIGDLWPHLTPMERQTLVRDCVEKVILHHNGRVEVYYTFHTEKDSKILKRKGA

SEQ ID NO: 23419 - protein, 580 aa, synthetic construct
MSVDIKWAIPQTGSQVTTEGDLAAVYTRYSSHNQGEQSIEGQLAAARRYAAEHGYTIVREYTDRAKSGRTDDREAFQQMLRDTAKKQFSVIILWKVDRFGRNREEIAINKMKCRKNGVRVEYVAEQIPDSPEGVILESVLEGFAEYYSLQLSQNIRRGLAKSAEKCKVTGGNRPLGYKTGPDKEFLIDEDNAPTVKLIFDMYAKGSTVKEIVDHLNQKGLRTLTGKAFTKNSLHTVLKNEKYRGVYTYKDIRVEGGVPRIVDDDTWYKVQEMLKINKRAPAKTWTRADYILTDKLFCGKCGGVMFGECGTSRTGVRHNYYTCSNRKKHHACDKKAVRQEDIEDLVIKATCNIFRDKELLDAIIENTWQYYLAQSDNQAELKGLTKQLNQTELAIKNLLRAIEAGILTEDTKARMDELTAQKAELKAAIADLQLARGFHLQKSHIAYYLTKLCDANYKDRDVQKRLIQTFVNAIFVFDDHLKITFNFSGDKNAVTLSTVQDAESGNVFGHRALCSTKIGKHRKMLADFILLFSVQRKFYVNSFSTLDKNPRSNSAVIVRNFCFFSTNYAFGACIQPLREVK

SEQ ID NO: 23420 - protein, 512 aa, synthetic construct
MQRAVIYARFSSDMQREESIDAQLRACKAYAKNKGYIVVDTYVDEAKSGREITKRDAYNKMMADAMEDKFDVIIFHKIDRNSRNELNYFTFKDKLERLGISYEYAAQPIDTISPEGQVMETIMVGMSAYYSRNLAKETKKGLNENAYKALFNGGCPPLGYKIVDKKYVIDESEAAAVRLIFELYLAGKGYAEICRALDSKGFTTKSGKPFGKNSLYDILGNEKYIGTYTFNKIPKGKGKRNMHSQKRPDDYISIEDALPAIISKEDFFIVQAKRERNRCHAAKYTAKHDYLLSGKVFCGECGSAMVGHRVRQRYYYYGCTRKEQTPTSKCQQRMIRAEVLEHWVMQILERVVFTVSGMRRIADAIAKGYQEEESRHAAEQEALAKRKAAAEKKLNNIYKIFEEGEADEFDRQRLNQIKVELREINKSICEISAKSAESLDNKKIVAFLTTIKSEIFVKNNIDYARRAIDLLVTNVTVTGTVIKVTLSTQNVCAYLVPRTGIEPVRVSLPEGF

SEQ ID NO: 23421 - protein, 551 aa, synthetic construct
MSRKKQENQKITTLYCRISLDDGGDNESMSISNQKIMLRDFAEKNGMFQDEYYVDDGYTGRNFNRPAFQRMIVDIEAGKIGCVITKDLSSLGRNYIEAGSYIEIFFPKHNVRYIAITDGVDSLTRREMDITPFKNILNNMYSRDISKKVLSGITIRSRQGKFCGGTPPLGLMRDPEDKGHLIIDPKTAPIIRKIYDYALDGLGCMRISKKLMEEKIPVTHVKSNTECQENYYYWAGSRISHILRNPFYKGAHLVFRTHQKGIRSNTYDIVPREEWEIIENCHEAIVSPEEWDKVQELIDRRPTIMNGNACPFYNLFHGIIYCATCGKSMQVRYEKVGRTGKNRFTGEQREPIDKSYYICQTYNRLGKNACTSHKIEARDLYNLVLKDIQEMAKTALKDADAFYQRLSSRMEHRYMADASQMQKERERLEARNREIDEMFLNLYTDKAKGILSEQRFVKLTATMEQEQEENQRHLQELMRMLQQSDAQESEVRTFIREIRQYATIQKLDETVLNRLISQILVGEVKKVDGQKVQEVRIVYNFVWQISMMERD

SEQ ID NO: 23422 - protein, 467 aa, synthetic construct
MIRMARSVTVIPARNRQRETGRRAVQEKKIRVAAYCRVSTDQEDQLHSFEAQVDYYTKYINDHENYEMAGIYADEGISGTNTKKREQFKRMIADCEGGKIDLVITKSISRFARNTQDCLAYSRKLKNLGIGIIFEKENINTLDSTGELLFTILSSLAQDESRNISENCKWGIRTKFKNGEMHLNTFKFLGYDKDENGKLVINKEQAKTVRRIYRDFLIGINPAQIAKELTEEKVPGCNGQTKWYPSTIVGILKQEKHMGDALLQKTYTADFLTKRQVKNNGEIAQVYVKDSHKGIIDKETWNAVQEEFERRERFMKDHGTDRYSYGADCMPFCEKVFCGECKSLFTRHSWKSRGIVQWQCKNHRTDGRVTCSNAYVDNSNLEKGFVKAFNKLVADREKFMERWNQMKTDGSPLEKIRAEQMMEATENEPLGRFVPEIAQLVLAEVTVLGAKKYEFFFLEGSRIKVPV

SEQ ID NO: 23423 - protein, 576 aa, synthetic construct
MLRENTENGSNQRIRVAIYVRVSTVYQIDKDSLPMMKQDLTAYCKYILNTEDYVIFEDAGYSGKNMDRPAYQKMMSQVRQGLFTHILVWKIDRISRNLLDFANMYAELKELGVTFVSKNEQFDTSTAIGEAMLKIILVFAELERNMTSERVTATMINRANNGIWNGGRVPFGYAYDKESQTFSFDEAEQKIVRLIFDTYEKTGSIVHTSRKLNDSGFLTRSGNVWSATAVWIILRNPWYKGVYRYNYYKIPGRKAVKDKKEWVIVENHHKPSIDPERFDKIQLTLTNNARYRRSPGRSNVQKNVHIFAGLLWCGECGAAFTSSPGKLHASGYRPSKYGCPNVRKTKTCHAKYTSDVVVGEFVINYILNIINAHKDIKLVRSPEDLQQHLLRGSTFSDICSIDSGGLSDMYDMLTSCSKSGMLFKRVKPKFKVDPELKQLQSEQKKQQRALDRLNELYLYSDESMSEREYIVRKQQITDKLDEINDAIGMMSQEPWMHTMGDSEFIQQASSFILNQKLHDRQYVYFTSLAESVDAEILKAFFGSIIDSIVITSGKIQRVTFRNGISHTFTYKNKPED

SEQ ID NO: 23424 - protein, 497 aa, synthetic construct
MQFVNVAAYARYSTENQDENSIETQFDNIAQYCQAHQYNIVAHYFDKAKSGTNIERADFQEMISAARAGKFSAIVIYDITRGSRDVADWFTFRKQMMQAGVQIISTHDNIGDLLNPNDFLTELIGVGIGQHHVLTSRLKSIDGTTMKAHEAIFLGGCPPLGYDVKDGKYIINESEAKIVRKIFSMYASGESYSNIIDSLNGAIGKKGRPIGKNSLSSILRNDRYIGIYTWNRRKIKIMGKWAGGVPNERIVQIKDAIPRIIDQPTWERVQIRLKSKTNSSSKAAHSYLLTGKIICTECGARYCGRTSVNQRGYQNPYYVCGNKTRTRQCHSKNIKCEDLDNFCRNAVREYILNYDLSETAQRVVTTYNATVSQYTNEKKELAEISRKIKNGTDAILNGFSSEELFQQMGKLQMRQKELEKIIADDAADELDLDLVTKLLKNMLEDVSTNIDEVVKQFVTKIYAHPNGDCTVHLGVAHFTSSGREIRTLDTTGMNRML

SEQ ID NO: 23425 - protein, 461 aa, synthetic construct
MRKDVKRVAIYIRVSTYEQAQEGYSIDEQKERLVQYCKAMGWVVSEIYIDPGFSGSNLERPGLQKLIAEIKAYDSVLVYKLDRISRSQKDTMYLIEDVFLKNDVDFVSMSESFDTSTPFGRAAVGLLATFAQLERENIKERMTMGMKGRARKGYWKGTSRPPIGYDYKDGNLEVNDYEAMQIRELFTIAANGIPNMPYNVKNMARYLSQKYSNKYGNWTDSTGITYTIQNKVYIGMVKYKDEYFPGNHMPLIDNELFDKANNRLNAYLSSFGEHSTYTKYMLSGLTVCGICGRPYYRRNSQTKIGGIKKEYGYYSCQGRKADIPVKCQSKIYRQEELEQEVINQIESLKYRDFSTGNGKNDTASLLQEMKQIDSRQERLIDLYSLGSVSREQIDDKIRELNQQREKVKVLLSAQNTLKSEEIIKMSTCIRNVDYATQCDIAGMLIEKVVVEGENIRVYWNF

SEQ ID NO: 23426 - protein, 498 aa, synthetic construct
MQIEVRKADMGKEKKRLKVCAYARVSTEASEQENSLENQVPHYTEMIQSNPAYEFAGVYADFGISGFKESRPQFQKMMRDAKNGKIDLIITKSVSRFARNTAIVLKASRELKERNVGIFFELQNINTLTEAGELLLTILAAFAQAESESASESSKMAYLHRIENGEVVAYLERSYGYEKDENGEYRAKEPEASVIREIYDLVIQGVNCTNIARVLNARNIQTVQGAEWTASTVFRIVENEIYKGDVLMQKTFIDGKRHQVQNRGEKAMYYAKDNHPPIVSEKTWEKAQRKLEDMRAERAEHSVIQEFTEENYPYMNHIFCAKCGWPLKPRVYSHGHRLSWDCSGQKRGTKKFCTGIHVLDNDLRKMKIEGNRYFSETVDKYGEVHLKHVAERTWKNKHKKKKFNHKDLYPELNEENYPYYRRLYCARCGSRLGRYISHGTVRWICSSYKRKGQAKCPGVRIPDEIIKGWNLPDGKIYIMGKEDKNGEKHYSYTSESAL

SEQ ID NO: 23427 - protein, 445 aa, synthetic construct
MNCKVAIYARESTEKQDIDTLVSMCEAEAKKLGFTHYRIYKDIGTGYSNEREEYLKLLENIKLGKIKTIIIYEQSRMTRDELEHQILYRLFREHNVKLYVMNRGWIDPNDENDSFISGLLNLLEAKEGRTIAKRVRDRMMHLKDEGNWTGGPAPLGYKLIDKKLVIVPEEAEKVKEVFRLFINGENRTTIANLFGYEPKKVFRLLKNPVYIGRLKKNQIVIKNKKAIENKKFEIVNGKHEAIIDIGTFELAQDIINGIKREVGGIAALQDLLYCRCGSKIYKHGENYYSCKNLSCKSVAIKRSEVLETVLTSLESVINDLGEVEESEEDNILSKIYLYKKELKKLEVKKEKIFNKYLEDQIGEDLFNKNNKEVSNQIEIVKSQIENLKEFQNNKLRAQETRENIKVYYDKIKNTKDDKKINRLLKIIISKIEFVNDYRFYIHLKF

SEQ ID NO: 23428 - protein, 480 aa, synthetic construct
MATHKVAIYVRVSTTSQADEGYSIDEQKAKLTSYCDIKDWNIYEIYTDGGFSGSNTERPALEQLIRDAKRKLFDTVLVYKLDRLSRSQKDTLYLIEDVFLENDIEFVSLLENFDTSTPFGKAMIGLLSVFAQLEREQIKERMQLGKLGRAKSGKSMQWAKTSYGYDYVKETGTLSINPYQALIVRKMFKWYLSGMSITKLRDALNEQYGQDKEWSYRTVRAILSNPVYCGYNQFKGQIFPGAHEPIISEEDFNKTQEEIKIRQRTAAQRFNPRPFQAKYMLSGIAQCGYCSAPLAIKLGMKRKDGTRLVKYECKQRHPRKTKGVTVYNNNEKCDSGFYFKDDIEHFVLTEISKLQTDSDYIDKLFSNSNQETIDRDSYQKQIDNLTAKISRLNDLYIDDRISLEELQKRSSDFMAERTALEKELDADSSIKTVERKKDIRRVLDTKDIFSLDYEHQKAIARALISKVRVTSETIVILWKL

SEQ ID NO: 23429 - protein, 494 aa, synthetic construct
MTAVIYARYSSDNQREESIEGQIRECTAYAEKNGITVVKHYIDRALSAKTDNRPDFQQMIKDSEKRLFDIVLVWKLDRFARNRYDSAHYEYQLERNHVKLVSATEPISDSPAGIMVKSMLTGMAEYYSAELSEKVVRGMTENVLKGKYNGGTIPIGFKVDEEKFFQIDPLKAPFVVEAFQRYNDGATMKELMNWLNDSGVTTNRNQKFTYNSVQKLLTNKRYIGENHFKDIVMPDSIPAIVDKDLFEEVQQKIKKNSRAPARHKAEDDYLLTTKLFCGMCGAMMFGECGTGRNKVVHHYYKCATAKRFKTCKKKTVRKEWLEDLVIAETMKLIQDDAVIDAIVAEVMELQDQENTTLPLLEKQMREVENGIENMLNAIQAGVLTNSTKSRLEKLEAQQKELEVRIAEEKIARPRLSENQVRFWLTRFRKLDPNVKSHRETLINTFVNAVYLYDEKVLITFNYKDGTKTITFDEIAAKDAPEGNGSDLGCFAPPR

SEQ ID NO: 23430 - protein, 407 aa, synthetic construct
MKPEKKRVCAYARVSTMTEKQQDSLTNQQAYYSHLYQNKKDVDFIGVYYDQGISGKLAKRPGFQQMLEDCMAGKIDVIHTKSISRFARNTELLLEVSRELKAIQVDIFFEEQNLHTLSNEGEVMLTVLASYAEEELRNMSENQRWAFQKKFQRGELVINTKRFLGYDKDENGELIINPEEAKIVKRIYNLYLSGMGVHVIAKLFNEEKVSTVDGGKWYSSTITNILKNEKYKGDAILQKYYFAEIKAKQRLNQGQVQQYLITDNHEAIVSREDWEAVQKLLRQNSKRDARIDYNRRYPLSGLLKCEHCGSTLKRQKYYKGKVVWVCSKYIREGKVACIGMRVPDSVVQDWSIHEPTVVKEENIGGKKYYSYSSKENDTSRAEATHSENPNGGLLPSIHRPRRTAIKL

SEQ ID NO: 23431 - protein, 402 aa, synthetic construct
MTPQKPKLRVAAYARVSDSRLHHSLSTQVSYYSRLIQSHPDWELVGVYYDEGISGKEQSNRQGLQDLLKACDDGKIDRILTKSIARFGRNTVDLLSTVRVLRQKNIGITFEKEGIDSLSSEGELMLTLLASVAQEESHNISENLRWQIKKKFEQGQPHTPQDIYGYRWNGENYVIEPDEAKVVRQVFQWFLDGDNVPMITKKLNEQGVLTRLGNPFTVSSVREFFKQEAYFGRLVLQKTYREPFSRNPKRNNGQKNKYIVEDAHEAIVSKSYFDVVLQEKERRYKVMHQESHMHKGTFRELIECSHCGKIMITRVDSKKVHRTIRYCCRTRDRFGTSSCPSKTLSEKRILATFEDKIGFKPDKNWVTENIKKVIYDSSVGLITVFPIKGRKYELKVRKEHFL

SEQ ID NO: 23432 - protein, 572 aa, synthetic construct
MASRIAEKLAAKKAAIYIRVSTHWQVDKDSLKVQRRELIAYVTLVLGITDYVVFEDPGYSAKNTDRPEYQAMMDRIRTGEFTHLVVWKIDRISRNLIDFATMHDELQSLGVTFVSKNEQFDTSSAIGEAMMRIILIFAELERKTTAERVTAVMLSRASDGQWNGGRVPFGYSWSKETKTFSIVPEEAKAIRRMAELYEQYQSLLYVAKYLNDAGIVTKTGGQWTPTTVRTILTNPWYIGQYVYNVHSDGKGIEKRDSDEWITVENHHEPILNDDVFYRMKFLLTRNKRGGVPSHKTYVRKNIHVFAGLLRCGQCGSNMTANLDRRRANGFRPSQYACGSRRRKGTSCTNKYISDTTLGPFVLNYVANIIRASKNSSETTTSEVLERKLLRGEAFEDVASVSTDALGQLLNAFRSAGDAVEYRPQIAFSGDDNSIREIDTLRARRRKLDNALARLNALYLYDDEAMPEKDFVMQRGQITKQLEEVNTRIEELQSQESSEELGDDFIGKASYYIMANKLIEDRYIDYEKYIRAIDPSIPRSFLQQIIDYIVVNDGRVISITFKNGSTHTFTYKT

SEQ ID NO: 23433 - protein, 496 aa, synthetic construct
MSSTNLYAVYLRKSRADLEAEARGEGETLARHKKTLYDIAKRMQISIAAEYKEIVSGESIAARPQMQKLLNDVTEGMYDGVLVMEIERLARGNTIDQGIVAQAFKDSNTKIITPIKVYDPNNEYDEEYFEFSLFMSRREYKTIRRRMEAGRLAAIKEGNFIISSPPYGYKKTNPAPKIHTLEVVPEEAEVIKLIYDMYVNQHFGKRKIATALNSMGIKPPRSDWWEGISIRKILCNPVYMGYNQWHSKSNGDTLYKGLHEPIISKELYEQAQERRINRKTSSTTSENTLKNYYSGLLYCGSCGKCMQRRTIERPSGIKIEHMVCRTTKCNTVSSRTDKIDEAVLTALKIHLAQLKNKFSGINNSNTQNENTIDVISMIKSEICDLKKQKNKLHDLLEREIYDENTYLERQSIVAQKLKEAEKALSNAEKITTQKISDEQAIINIELLLENFSSADPLQKKELLSNVVRRIEYSKTSDLRGIHNKKESNMTIKCFFI

SEQ ID NO: 23434 - protein, 412 aa, synthetic construct
MKTVTQIKTINPSLTTKLKVAAYARISHSSLKNSLSNQVSYYNQLIQSNPCWSFAGIYIDDGISGKSQETRSDFQALIKACHEGKVDLILTKSISRFGRNTVELLTTVRELKELGVNIRFEKEGIETLTSDGELLLTLLASVAQEESRSISENVKWYVKKSFEQGLPYIPQDIYGYRWQGDTYVIEPHEAKIVKQVFRWYMEGLGVPTIAQKLNDLGERTRLGNPFTKSILYEFFKQEAYYGSLVLQKTFRTEFSRNPKRNKGQKDKYIVDNAHEPIITKDYFEAVIAEKRRRSKGRYYRDESIPTLFRDKVYCAHCGVDMLLTVDKPHTDKATVRFNCRTRQHKGLNACPSKTLAEKRLIMTLALYFKSSIDKEWVTKVKSVTFNSIDYSITVSFKDGENHTLPIKKGQFI

SEQ ID NO: 23435 - protein, 519 aa, synthetic construct
MKKIITIEAATVYSNKAEQPKFTKRRVAGYARVSTDHEEQATSYEAQMRYYTDYISSRLDWEFVKMYSDEGITGTNTKQRIGFNSMVNDALAGKIDLIITKSVSRFARNTVDSLSTVRKLKDAGVEIYFEKENIWTFDAKGELLITIMSSLAQEESRSISENVTWGKRKQYERGKVSIPFKNVLGFERGPNGELVVNEEEAKIVRYIFHEFLLGKNANSIAKELTEQGIPSPTGKKKWYYGTIRRMLQNEKYKGDALLQKSFTTNFLTKQTKVNEGELPQYYVENNHEAIIDKDTFDLVQYELKIRERRGSASQFSGMLVCATCGAVYGSKVWHSNSKYRRVIYRCNQKYEGEVKCNTPHVTDEEVKEWFVIATNKLIENKDEVIENMKVLLVMCSDTEDIQQEISALETRMVELTDLVDSLIYENSRVVQDQKTYQEKYDRYSQEYKELEQKLETLTNSLQKKKSQAKSIKEFIQHLSNRDLVSEFDEKLWYTMVEKVIIASKEEVNFHFKNGAVVSI

SEQ ID NO: 23436 - protein, 435 aa, synthetic construct
MAAYCRVSTDQDEQLSSYENQVRYYREYINQNSLYELVGIYADEGISGTNTKKRTEFNRLISDCRQGKIDRIIVKSISRFSRNTLDCLKYVRELKELGIGVTFEKENIDSLDAKGEVLLTILSSLAQDESRSISENATWGIRKKFERGEIRVNTTKFVGYDKGENGNLLINEEQAKIVRRIFRDFLQGETPESIARTLKEEGVPGWNGKVNWYPTTIQRMLQNEKYMGDALLQKTYTVDFLTKKRSENLGQVNQYYIEGNHEAIINKEEWELVQLEIERRNQFRQDNHINFYIIQCEQNPFTCKVFCKECGGLFGRKNWTTSRGKRPVWQCNNRYKVKGVQGCTNRHIDEETLQQAFLRALEILRENKEKLQEKWDNFREEQKLERYHATQLEELLGGDQEEFNGRKMCQVLEKVTLGEDGSISIKFLEGTEVNL

SEQ ID NO: 23437 - protein, 407 aa, synthetic construct
MKPGKIRVCAYARVSTMTEKQQDSLTNQQAYYNHFFKNKKDVEFVGVYYDQGISGKLAKRPGFQQMLEDCRARKIDVIHTKSISRFARNTELLLAVSRELKTIQVDIFFEEQNLHTLSNEGEVMLTVLASYAEEELRNMSENQRWAFQKKFQRGELVINTKRFLGYDKDENGELIINPEEAKIVKRIYNLYLSGMGVHVIAKLFNEEKVPTVDGGRWYSSTITNILKNEKYKGDAILQKYYFAEIKAKQRLNQGQVQQYLITDNHEAIVSREDWEAVQKRLRQNSKKDPRIDYNRRYPLSGLLKCEHCGSTLKRQKYYKGKVVWVCSKYIREGKVACIGMRVPDSAVQDWSIHEPTVVKEENIGGKKYYSYSSKENDTSRAEAIHSENPNGGLLPSIHRPRRTAIKL

SEQ ID NO: 23438 - protein, 433 aa, synthetic construct
MSGKITIVSKPPKLERKKRVAAYARVSSGKDAMLHSLSAQVSYYSDLIQNHGDWLYTGVYSDEAKTGTKDSRAGFQNLVADCRAGKIDMVITKSISRFARNTVTLLQTVREFKALGVDIYFEEQNIHTISGDGELMMTILASYAQEESRSASENQKWRIKRSFESGIPWDRTLMGYRMENEHYVIVPREAEIVRRIYNEYLSGSGYQLIAKRLNEEGVPSRFGGKWNQSAVSRILSNHTYTGNLLLQKTFRENHITKRKIFNNGELPKYLAEESHEAIVDEKTFQAVQEEKSRRAARFNKKSVPKKTYPFSSLMVCDNCGKNYRRKITKTGAVWVCGTYNSLGKAACASKQIPEFTLQQVTANVLGQNDFTHEWLCDRIQHIRVCNDNTLIFCFNDGSEITRIWKDRSRSQSWTDEMKKAARQKTLERSKHNA

SEQ ID NO: 23439 - protein, 526 aa, synthetic construct
MPKVTMIPATVNPLTHLPKAAVQKRRVAGYARVSTDSDEQFTSYEAQVDYYTRYIQSKPEWDFVRVYTDEGISGTNTKRREGFKEMIADALAGKIDLIVTKSVSRFARNTVDSLVTIRKLKEKGVECYFEKEGIYTFDSKGELLITIMSSLAQEESRSISENITWGQRKSFADGKIHLAYKHFLGYKKGEDGRPAIIEEEAAVVRLIYRLFLDGKTQAGICRYLEDLSIPSPSGKEKWSKTTVTSILTNEKYKGDALLQKSFTVDFLQKKTKPNAGEVPQYYVEGSHPAIVEPYEWDHVQAEFARRKALGNAYSGKSIFSAKLVCEDCGGFFGSKVWHSTDRYRRTVWQCNNKFKGGERCLTPTVDTETVQQLFIKAYNQMMGNRKQIIEDCELMRKKLTDFKSLDADIERHLEETQIVAELVKAAVKDNAVTAQSQEAYLKKYEALTKRYETAAAELERLQNLRTLRSQKDKAMALYIRTLKKQPTVLSEWNDTLWTVMVEKAIVHRNSEITFAFYNGTKVKVRQ

SEQ ID NO: 23440 - protein, 569 aa, synthetic construct
MKTKDTPKQYVIYSRKSKFTGKGESIENQIELCRQYIAMHFGEEAAENVLVYEDEGFSGGNLERPQFKKMMKDSQKIAFAAIVVYRLDRISRNIGDFAKLIEDLGDRHIDFISIREQFDTSSPMGRAMMYIASVFSQLERETIAERIRDNMHELSKTGRWLGGTTPTGYASESLSSVTVDGKVKKACKLKPILEEIQLVKTIFSVFMETGSLSKTDQYLLEHRCVTKRGKQFTRFAIRGILTNPVYMIADETAYQYLKENNVDLFAERAEFDGEHGVMAYNRTLQRPGKANQIRPMEEWIVAVGKHPGIIAGSDWVRVQAMLDVNKSKSYRRPRSNVALLSGLLRCGECGDYMRPKLTNRKNADGELIYTYMCSTKERSHGTVCAMKNCNGNTLDAKIIEEIRKLSADKETLAKLLAQTKKVISGSKEGYDAELALLKEKHTETEDRIKRLVESLSVASDTSAKYVMEQIDELHQESETQQLRLAELEALTEQSRMLHQEFAFHQEMIESFASAVDSATLEEKRRLLRTIVKKVVWDGKNAYVYLFAEDGEADLPPVEQPMYPLGEDSE

SEQ ID NO: 23441 - protein, 471 aa, synthetic construct
MIPAIVYARASTDHQEYSVNDQLKYIKDWAKHHGYKIIKVYIDDGISGAFVAKRPGFLSMIEDVTTNLSGAKALLIWDSYRFARNMVEFLTYKQMIRQHGVSVIAVTEPIVEDEDAQLYIDAINGASGELYLRKLSKDSKRGIRAKVVERREHLGFAPYGYRMNRNTRQLEIQPEEAKWVKYIFQCVIDGLPYLAICQKLREAGVKTRKGCAWTNTQVKYTLTNKTYCGLLEVTLDGKHGIYDGKHEPIIDRETFDNVQTIIEERQAKHKKYQRSSYQYKHWLSGLMRCPYCGGALSYVQGSGGRADRYRCNSKTDGKGCVNLSVKVKVAADFVLDQLQQIYDGPEMLCTLKTVTPQPANQIDYDGEIKKLRGQLTRAKKAYMEEIDTLEEYRENKTRLTAAIEEMEAQKNAAAAGVIQFDPVAFQEKCLSALSVLQSDVDVEKKVAVSHNLIEKIDCDNINKVLTIYFYS

SEQ ID NO: 23442 - protein, 499 aa, synthetic construct
MQKNTTVETTTKAVIYARYSSDRQREESIEGQLRVCEDFAKRNGMTILHVYADRALSGRSDQRPEFQMMIQAAATQTFDTVLVYKLNRFARNRYDSAKYKHKLKKYGVKVVSAMENIADDPSGILLESVIEGMAEYYSAELAENVMRGMTENALEGKWPGGIVPLGYKLDTEHRLIIDEPAAKTVRWIYQQYLDGKQPTRIIRELNAAGCLTALGKPFRKNSLRTILKNERYIGTFIWNGIKKPNVIPAIIDSADWHKVQEIMKVKKKCVSKAKDNDYYLTGRLFCGHCGENMVGTSGTSKLQRIYRYYICSGHQKKKGCTAKAVRMDKLEDIVCNATTRLLSNRDAIRAIAKQAISAQETQGPSLVLQSLQNQKADISRKLQNCVKAVEEGLISQTVTNHIHDYEKQLQTLTDAIQKEELMNQIPHLTEKHIEFFFWSISQQIKKADKYKSILLSSIVRSVIVYEDFIEIQYNYKKRTPHPTESCQNRGFGYACYGGA

SEQ ID NO: 23443 - protein, 479 aa, synthetic construct
MNRKVTTIQANKQLSHQSKLPSIKKKKVAGYARVSTDNEDQTSSYETQMKYYEEYISSRKDWEFVKMYSDEGISGTNTKKRLGFQEMVNDALAGKIDLILTKSVSRFARNTVDSLSTVRKLKDVGVEIYFEKENIWTFDSKGELLITIMSSLAQEESRSISENITWSKRKQAAEGKVTFPYNNVLGFKPKEDGGFEVDKEQAKIVRYIFGQFLSGKNPNQIAKHLTENKIPTPRGKTRWSYSSVRSILTNEKYKGDALLQKYYIADFLNKTQKRNNGELPQYYVENSHEAIIDKEVFDAVQVQLSENKKWYTEKNYFGKIRCGCCGSSYVRHLWHSNDKYKETIYRCKDKYKNEEKCDTPHIRDDEIQRWIVSALNKVIDNRKEIIGNIKLLMKMIKEDRGSDDEIIQLEEKLEDIRTDVEKLIITNSRIAQDQEEYTRKYNKLIEEYKLLEKQLEQRNLDLLSKNKRVRELKIFIDSL

SEQ ID NO: 23444 - protein, 503 aa, synthetic construct
MKKAFAYARFSTDMQREESIDAQFRAIKEYCSRNKIFLVNTFSDEGISGTTDNRSEFQKMIKQAEEVDFIIVHKLDRFSRNKYDSAIYKRELNQKNVRVISVLENLDDSPESVILESVLEGMSEYFSKNLSREVKKGLYENAYKGKFNGGIPLFGYSIDQDKNYVINEYQAIAVRLIFDRFAKGSSYTEIINELDSLGYKTVKGNSFKSTTLYEMLSNERYIGTYIFSKEDYNLRNKKRNSHRYKNREEMIIIENGNPAIIDKKTWNLVKERQKLNSKTSNKSKWNYVLSPFLYCDECGERLNGTTRKNNQGRYYHYYRCVNKNCSQQSIRTDFLEEEFYAAFNEAIFSEENKKTLAKRMKEFLDNKKINIDKEKIENEIKEVEKQINNCVDFILTGSNSISVKNKIEELELKKFNLQNELLKSKVSENKIDINSIIEFINKYDKLEKFSIQEQQIILKFFIEKLKYKKGKLTIRLKLTEQCPASERGLVNGTEFPAPCYYGQ

SEQ ID NO: 23445 - protein, 536 aa, synthetic construct
MPRKKKLQEVGGLRLVAYYRYSNGGQQTEQSIEGQRRDCEAYAKAHGYKIVHEYIDRHISGKSDSRPAFQQMISDSDSHLFDAVICWKTDRLARSRYDSIIYKTRLRKNGVKILYAAETVVDGPEGIIIEGLMESLAEYYSAELAQKLRRGQRESALKCIALGGNRSFGYDIGPDKHYCINEKQAPAVRYIFEQYAAGATAADIVRELTARGYRTSRGNPFNKNSICRIITNEMYLGVYKYADIRIEGGVPAMIDRELFNRCQTQLAFNRAHGGGKGAPRADYVLVGKLDCGLCGHAMKGASATGHTGSKHYYYTCTQHVEKKCPKTSIEKNYLEQVIVDGVAKYVLTPEKISQIVDCMMELQAKEQEPKGNPEKDALEAELAECRRKQNNILEAIEEGGSARLAARLRALEEQEAQLTFALGEINNAPAPPQFSREALTFMFEQFRREEDEVDEEYRRRILDTFVSSILLYEDRAEVKFNITDQKTGDFERVILPISANKKPPEDDDTTSNSESSTALRLVEAMGVEPMSEKSSV

SEQ ID NO: 23446 - protein, 572 aa, synthetic construct
MAFQKLTPGSKARVAIYVRVSTLHQVDRDSLPMQKQDLIAYAKLMLNTDDYVIFEDAGYSGKNTDRPKYQEMLSQLRAGAFTHLLVWKIDRISRNLLDFATMYAELKDLGVVFVSKNEQFDTSTAMGEAMLKIILVFAELERNMTSERVTATMISRASNGQWNGGRVPYGYKWDAEDQTFSFNSDEYNVARMIHDKYEEFHSLVRLSRWLNEHGYKTRSGNDWNPVSCLIILRSVFYCGDYQYNRLKEGNRQKKKDESEWITVENHHPAIVSREQKQRIISVLEANSRLCKQRGMYRATKRVHIFQGLIICGNCGALMGSSPASKKADGWSYSKYGCPTKRRHENVCTGKYTSDPIVGEFVFNYILNMLNAQNDFSNIGSPEDLQRRLLIGNTFNYIDHIDQEGLNDLYNVLLSGVRSNVYAPDVSLKNKAPAESEISRLRSEKQKTERALDRLRSLYLYSDDAMSETEYMIQKSKLQDVLDDLNEQLGVVSSDEWQQSVSDDVFIQRASNFILSQKLTGRKYVNYKVLAQSVDPEVLKSFVTSVIDSITMYDGMVHQITFKNGLSHTFIFK

SEQ ID NO: 23447 - protein, 553 aa, synthetic construct
MSTITKIQGYQRDVKQLRVAAYCRVSTDNIEQLESLENQRSHYQKYINNHPNWELAKIYYDEGISGTKLTKRNALKELLTDCRSHRIDLVVTKSISRLSRNTTDCLEIVRELQQLNIPIIFEKEHINTGEMASELFLSIFSSLAQDESHSTAGNLRWAIRQRFASGKFHVSSAPYGYSIKDGNLVINHTEAKTVRQVFQRFLSGISASQIAKKLNQKQVPTKRGGQWRSNTVINILRNINYTGDMLCQKTYRDDQYHRHFNQGEITQYLIEDHHPSLINHRSYHRAQVLIKEAAQKHHIEVGSHKYQQHYLFSGKITCSYCGTVFKRQTRPHKICWACQQHLKSAQQCPVKAVSEKSLEAAFCNMINKLVYSEKFLLRPLLEGLKEEANANSDGQLISLTKQIKTNDHKAETLTELMHASLLDKAIYVNQTAKLEQDTYQCREKIKQLNGQNTDSANNFEDVRALLRWCQQGQMLTEFDGTLFQEFVRQVVVNSSNEATFNLKCGLSLPEKLNKAATIEKHFYRDIIKQRYNDPIKQAEYLYSIIESEGDLIG

SEQ ID NO: 23448 - protein, 509 aa, synthetic construct
MPEALNAVIYARYSSDRQTEQSIEGQLRECYAFAKANDIAVIDTYIDRAISGKTDNRPAFQKMIEDSAKRQFQAVIVYRLDRFTRNRYDSAIYKARLKKNGVKVLSAMENLNGSPESIIMESLLEGMAEYYSVELSQKITRGMRENALKGKALGGQRVLGYKVNSDCYFEIDETTAPVVVDIFKLYSSGKTVKEICDILNASGVKTARGGAFNKNSLHTILTNKKYIGIYKTKYGEIVGGIPAIIDKELFEMVALRMEQNKKAPARAKAEINYLLSTKLFCGKCRSAMVGESGTSKTGKKYYYYACVKKKREKACDKSNVKKDWIEDLVIQRTVTDILKDDVIEKIADRLVELQKAEAAESGTMLYLENSLAEIQVSIKNIMTAIEKGIITESTKTRLTELEDEKRNVEIEIAKESIARRIISREQIIYWISSFKDGDITSEKYRRQLIDTFVHAVFVYDDKIVITYNYSGENNTATISDLDLSSPPLQSNPNIFVTLDVFGLVVQIER

SEQ ID NO: 23449 - protein, 487 aa, synthetic construct
MPEALNAVIYARYSSDRQTEQSIEGQLRECYAFAKANDIAVIDTYIDRAISGKTDNRPAFQKMIEDSAKRQFQAVIVYRLDRFTRNRYDSAIYKARLKKNGVKVLSAMENLNGSPESIIMESLLEGMAEYYSVELSQKITRGMRENALKGKALGGQRVLGYKVNSDCYFEIDETTAPVVVDIFKLYSSGKTVKEICDILNASGVKTARGGAFNKNSLHTILTNKKYIGIYKTKYGEIVGGIPAIIDKELFEMVALRMEQNKKAPARAKAEINYLLSTKLFCGKCRSAMVGESGTSKTGKKYYYYACVKKKREKACDKSNVKKDWIEDLVIQRTVTDILKDDVIEKIADRLVELQKAEAAESGTMLYLENSLAEIQVSIKNIMTAIEKGIITESTKTRLTELEDEKRNVEIEIAKESIARRIISREQIIYWISSFKDGDITSEKYRRQLIDTFVHAVFVYDDKIVITYNYSGENNTATISDLDLSSPP

SEQ ID NO: 23450 - protein, 435 aa, synthetic construct
MAAYCRVSTDQDEQLSSYENQVRYYKEFIRQNPLYELVDIYADEGISGTNTKKRTEFNRLIADCRKGKVDRIIVKSISRFSRNTLDCLKYVRELKELGIGITFEKENIDSLDAKGEVLLTILSSLAQDESRSISENATWGIRKKFERGEVRVNTKKFVGYDKGEDGNLVINPQQAKIVRRIFHDFLEGDSPESIAKTLREERVPGWNGKPNWYPSSIQKMLQNEKYMGDALLQKTYTVDFLTKKRSENQGQVNQYYIEGNHEAIIAPKEWELVQLEMERRKNYREKYGVKNYIIQCAQNPFTSKVYCKECGGQFGRKNWTTSRGKRPVWQCNNRYKIKGIQGCVNRHIDEETLQQAFIRALEILRENKDPLLKKWANFSEEQKLEKYHSEQLKKLVESDQTVFDGRKMCQVLEKIALGEDGTISIRFLEGTEVDL

SEQ ID NO: 23451 - protein, 407 aa, synthetic construct
MKSGKIRVCAYARVSTMTEKQQDSLTNQQAYYSHLYQNKKDVDFIGVYYDQGISGKLAKRPGFQQMLEDCMAGKIDVIHTKSISRFARNTELLLEVSRELKAIQVDIFFEEQNLHTLSNEGEVMLTVLASYAEEELRNMSENQRWAFQKKFQRGELVINTKRFLGYDKDENGELIINPEEAKIVKRIYNLYLSGMGVHVIAKLFNEEKVSTVDGGKWYSSTITNILKNEKYKGDAILQKYYFAEIKAKQRLNQGQVQQYLITDNHEAIVSREDWEAVQKLLRQNSKRDARIDYNRRYPLSGLLKCEHCGSTLKRQKYYKGKVVWVCSKYIREGKVACIGMRVPDSAVQDWSIHEPTVVKEENIGGKKYYSYSSKENDTSRAEATHSENPNGGLLPSIHRPRRTAIKL

SEQ ID NO: 23452 - protein, 519 aa, synthetic construct
MENCVIYARFSSHGQNEQSIEAQVRICKEYAESRGLDVVNLYTDKARTGTNDARPAFQKMIADAKTGTFQYIIVYMFDRFARNRRDSIIYKEMLKEKYGVKVISALEPIAEDEGGEFYEMFLEWNAEKYSKRLSKRVRDGLDTSVANGTFCGGFIIYGYQLELEPIPGKQGKFIKRVIINEEEAKVMRYVFEQYDKGVSKKQIAEVLNSQGIRVKGKPVTHKTFDHYMTNPKYTGEFYFGDRLCTNMYPAIIDKDTFDRVQQRLAENRYCLGGKETAREPYLLTGKLFCGHCGTEMVAGGGQSKTGKKYYYYECKKKKKKLCTKRIEHKDKLEKYVVQNVMTFLSDEANLAIIVQDVLKYFDSRTDESELKSIRKRIADIQDEADAAANAFIEAKSPLLKQRIEKRMQECEVLLADLEKLKAQLILERGQKLTEKDIVAFINMILQGDVNDLEFRRRLIDNLVYKVYVSDENTYIYFNIKGGKEIEEITFEDTITALETVMGVQTRSDPSRQTNPKSNT

SEQ ID NO: 23453 - protein, 468 aa, synthetic construct
MVKEINNNMNDFTKKVEEVALYIRVSTEEQAINGDSLRTQREALTKFALANHYHIYGIYEDDGFSATNLNRPALQRLLEDVRKNKINRILLTKLDRLSRGVRNYYKVLDVLDAHCVFWQTIFEKYDSSTASGRLHINIMLSVAENESAQTSERIRSVFNNKIHQKEIISGKIPIGYKKEEKKLVVDEDKKALVIDAFNFYLKSGSVYKTFEYLALFDPSINYPRTARLLANPLYIGTKVCKYGSIENYCEPIISKETFDEVQNLLKKNQRKRDNSDHEFLFSGLLRCNECGYKMSGKYCKNFPTNCTFYYLCSNARLKKKCNMLKQLNETKIEKKLLEQIVPEINKYIDKNNILELEKAQIRDISKERDKVNKQLEKLRDLYVNDLIQIDHYEKQYKELTSKLDSLKEEEKPVEEKKTVNYDEFKSFLSRDFVSLYNNLSRTEKRLIWASAINTIYIDDNYNLRIVFI

SEQ ID NO: 23454 - protein, 464 aa, synthetic construct
MARSVTVIPARNRQRETGRRAVQEKKIRVAAYCRVSTDQEDQLHSFEAQVDYYTKYINDHENYEMAGIYADEGISGTNTKKREQFKRMIADCEKEKIDLVITKSISRFARNTQDCLMYSRKLKNLGIGIIFEKENINTLDSTGELLFTILSSLAQDESRNISENCKWGIRTKFKNGEMHLNTFKFLGYDKDENGKLIINKEQAKTVRRIYRDFLIGINPAQIAKKLTEEKVPGCLGQTKWYPSTIVGILKQEKHMGDALLQKTYTADFLTKRQVKNNGEIAQVYVKDSHKGIIDKETWNAVQEEFERRERFMKDHGTDRYSYGADCMPFCEKVFCGECKSLFTRHSWKSRGIVQWQCKNHRTDGKVTCSNAYVDNSDLEKGFVKAFNKLVADREKFMERWNQMKTDGSPLEKIRAEQMMEATENEPLGRFVPEIAQLVLTEVTVLGAKKYEFFFLEGSRIKVSV

SEQ ID NO: 23455 - protein, 498 aa, synthetic construct
MEIQIRKGNSIQKRKLKVCAYCRVSTDADEQENSLENQIRHYKEVITSNPDYEYAGVYSDFAISGFKEKRPGLQKMLADARKGKIDLILTKSVSRFARNTSIVLEATRKLKELNVGVFFELQNINTLSGEGELMLTILAAFAQAESESGSVGAKMVYQRKYEAGIPVQYLERSFGFKKDERGVYIADEEEAAWVRKIYEMAADGYTPASIKRYLNENGVKTAGGAEWIDSTVFRLIENEIYKGDYIMHKHFVNEERKLVRNRGEVDAWYIEDDHEAIVSPELWQKAQDAIEAKRDYLAEGSVIEEFTEDNYPYMNRIFCAKCGHPLYKRIYSNGNRLNWGCSGTKRHGKSFCEGINIPDGVLRKAWHFDGNMYIDEKPSVKGTKEFTYLKESSWKRRHKKKVPKAIPKNTEEAYPYRKNIFCGLCGSRLVRHVNPKSHKVIWICNGAKRKGVAFCRGTRIPDSVIRGWGEIKKDIYIQRKDDKNGKKRYSYTSKKPTA

SEQ ID NO: 23456 - protein, 567 aa, synthetic construct
MQSKNKNQIGITALYCRLSRDDGTESESNSIGNQKKLLSQKAKEMGLTDTKYYVDDGYTGTNFNRPGFQQLIDDIEIGLVSAVMVKDLSRLGRDYVSVGNYTDSYFPEHNIRFIAVNDAIDSDEGESEIAPFKNILNEMYARDISKKIRSSHRLRGSMGEPLSQPPYGYMKSPENKKKWIIDPEAATVVKSIFKMCLDGKGNETIARELQENEVLIPMAYWRSKGLNRGGKKTQTNPYKWCKTTIQKILSQQEYCGDIINFKTYSKSFKNKRRIENSKENWAVFKDVNEPIIDRETFETVQKFISKTKRRAPKKENGERSIFNGLIYCGDCHSKMRYHTSTSNKEIHYFTCSDNKVDYRGKCQGRHYVRADALEEVVKLELRRLVEMLEIDESYFAQLLLRKNDEEREKDKKFLESELQKAIARNNTVSQIYEKLYEDNVIGKVSDEWFVELSHKYEKERMNLKAKIADTRHKIEELKNNNSEYEKFISAIRRFMQMDNLTSPLLRELIDHIDIFETEGTGKSRTQRIVIYYRFIGYIELPNATKQTHIADTRKGVAVEYITEQFTA

SEQ ID NO: 23457 - protein, 526 aa, synthetic construct
MPKVTMIPATINPLTHLPKVAAQKRRVAGYARVSTDSDEQFTSYEAQVDYYTKFIQSKPEWDFVKVYTDEGISGCNTKKRDGFNSMVSDALAGKIDLIVTKSVSRFARNTVDSLVTIRKLKENGVECYFEKEGIFTFDGKGELLITIMSSLAQEESRSISENITWGQRKSFADGKVHLAYKRFLGYEKGEDGRPTIVESEAKVVQLIYRLFLDGKSQAAICGCLEDLGIPSPGGKDKWSKTTVTSILQNEKYKGDALLQKSFTVDFLEKRMKPNEGEVPQYYVEGSHPAIVDPDEWDHVQTEFARRKALGRAYSGKSVLSAKLVCEDCGGFFGSKVWHSTDRYRRTIWQCNSKFKVEERCHTPTVNTETVQRLFTQAYNRMMENREQIIKDCETMRRALTDFAELDAEIERQLEETQVVAELVKAAVKENASTAQSQEAYLRKYEALTERYEKAAAELERLQNLRTTQSQQDKAMALYIRTLKKQPVVLREWSDTIWTVMVEKAIVHRNGAITFVFKNGTEVKVGE

SEQ ID NO: 23458 - protein, 433 aa, synthetic construct
MSGKITTVSKPPKLERKKRVAAYARVSSGKDAMLHSLSAQVSHYSDLIQRNSDWLYAGVYADEAKTGTKDSRADFQRLIADCHAGKIDMVITKSISRFARNTVTLLQTVRDFKAWEVDIFFEEQNIHTMSADGELMLTILASYAQEESRSASENQKWRIKRNFEEGMPWNGAMLGYRLKDGRYEIVPKEAALVRRIYNEYLAGDGYQAVAKRLTEEGVPSRFGGKWNQSVVSKILSNYTYTGNLLLQKTFRENHITKKTVINHGELPKYHAEDAHDAIISIETFHAVQTEKARRAAQFNKKPAPRTTYPFTSLLVCDICGKNYRRKTTKTGIVWVCGTFNTLGKSVCASKQIPEATLQQVTAEVLGVKAFTREQLHSQVQSIRVCNGNILVFCFKDGSEVTRTWKDRSRAESWTDEMKEAARRKTLERSKHNA

SEQ ID NO: 23459 - protein, 428 aa, synthetic construct
MSTDQDEQLSSYENQVNYYREYILKHKDYELVDIYADEGISATNTKKRDAFNRLIQDCRGGKVDRILVKSISRFARNTLDCIKYVRELKELGIGVTFEKENIDSLDSKGEVLLTILSSLAQDESRSISENSTWGIRKKFERGVVQVNTTNFMGYDKDEKGNLIINHEQANVVRYIFDRFLEGYSPEFISKELREQEIPGCTGKAKWCPSAIWKMLQNEKYKGDALLQKTYTVDFLTKKRIDNDGQVNQYYIENNHEPILDREKWEIVQLEIARRKKFREHHKLQFYIIQKENNPFTTKVFCAECGSAFGRKNWTTSRGKRKVWQCNNRYRIKGQIGCLNNHIDEEMLEKAFMKTVGLLQEHRSDVVAKWQKLEQGASLLHKHYAKQMYQILDLDKFDGVIMNQVLDHISISESGQIVVTFLEGTEVDF

SEQ ID NO: 23460 - protein, 413 aa, synthetic construct
MNIRKIEAKNNNRKKRICAYVRVSTTNGSQLDSLENQKVYFEKLYAERDDVEFLGVFCDKGISGSKYDRPDFQTMLDACRKGQIDVIHTKSISRFARDLINVLEISRELKTLGIDIFFEEQNIHTLSNEGEVVLTVLASLAEEELQSMSGNQRWSFCRKFQKGELLINAKRFLGYDLNEKGELVINKAEAQIVRTIFYSYLEGMGTHRIAKKLNEGKVPTVAGKKWYDSTIRNILKNEKYKGSLLLQKYFHDGVNGPKKLNQGQVEQYYIEDNHEGIVSKEIWEKVQVKMKSRSRIQGTNKTYKFSRMLKCQYCGSTLKRQVSYKKKIVWCCSKYIKEGKNSCKGMRVPERDIEDWKLSSPVIVLERIEDGEKHYSYTGQKTSANGHISNSEKNQSSRLLSSVYRPRRTAIKL

SEQ ID NO: 23461 - protein, 577 aa, synthetic construct
MALPKKTIPQIEQKRAAIYVRVSTQYQVDRASLPVQRSELVNYAKYALDIPDFVIFEDAGYSAKNTDRPDYQQMMARIRTGEFSHLLVWKIDRISRNLLDFAAMYSELKQLGVVFVSKNEQFDTSSAMGEAMLKIILVFAELERNMTAERVSAVFLSRANDGIWNGGKVPFGYAYDKQAKTFSILEDEAKTVRLIYALYESSKSLVTVSKALNERGIKTRNGSEWSPTTVHTMLSNPFYSGTYRYNYRNESDPHHHVPKKKEDWILVKNHHPAIVSPEHQAAVELILASKSYGKNQTYQRKNIHAFAGLLTCGYCGSTMAATIDRARADGWRPSVYICSRRRMSNDCQNKYVSDVTLGPFVLNFFANLIKASNSFGKSTSIETLEKKLLRGDALSIVDHIERPGLEELYNHLRSGFDEKPFDSLAVNAAEASSDVQERDLLLADKRRLERALKRLNAIYLYGDEEIPGKDFILDRKSITDSLQQIDDRLKELDAAAVFDVSLSDDEFMEKASQFILTQQLLDKRSVNYEKFIRKIDPRIVKDFLNETVSNFCIKDGLTTSVLFKNGIELRFCYKAQQ

SEQ ID NO: 23462 - protein, 428 aa, synthetic construct
MSTDQDEQLSSYENQVNYYREYILKHEDYELVDIYADEGISATNTKKRDAFNRLIQDCRDGKVDRILVKSISRFARNTLDCIKYVRELKDLGIGVTFEKENIDSLDSKGEVLLTILSSLAQDESRSISENSTWGIRKKFERGVVQVNTTNFMGYDKDEKGNLIINHEQANVVRYIFDRFLEGYSPEFISKELREQEIPGCTGKAKWCPSAIWKMLQNEKYKGDALLQKTYTVDFLTKKRIDNDGQVNQYYIENNHEPILDKEKWEIVQLEIARRKRFREQYKLQFYIMQKENNPFTTKVFCAECGSAFGRKNWTTSRGKRKVWQCNNRYKVKGHIGCQNNHIDEEMLEKAFMKAVGLLQKHRSDVVDKWQKLEQGANLLHKHYAKQMYQILDLDKFDEVIMNQVLDHISISETGQIVVTFLEGTEVDL

SEQ ID NO: 23463 - protein, 656 aa, synthetic construct
MNAVIYARFSSHNQTEQSIEGQLKTCYEFAQKNGYTIVGEYIDRAISGTTDNRPDFLRMIEDSAKKGFQYVLVYQLDRFARNRYDSATYKAKLKKNGVRVLSARENITDDASGILVEGLLESMAEYYSAELAQKIRRGMAINAEKCLANGSNPGLGFKVAPDKHYIIDEETAPIVVRIFEEYAAGKTVTEICESLNNQGVRTSRGAMFNKNSLRKMLQNKRYIGYYLYKDIETPGGMPRIISDELFYKVQEIMSKNKKAPAHTKAKQEYLLTTKLFCGKCRDMMTGIKGTSHTGAAYYYYKCNNAKKKQCDKKAVQKDYIEDLVIAECRKQLTPANIDKIAHEVVALCEREKDNSNLKRIEKLMRENERKQRNLMNAVAECEIESVRKSLYAEISRLNTELDTLKNEYAIEQAGAVSLTITEVKFFLSQLRKGKADDLSYRKTLINVFVNAIYLYDDKLVIFFNSGDKPVTIDDELLSQMEQSDGFVFGALGSTISPAVILVKLRRAFCVDTLMFELDREVYCMKKVLSVSIKTIIFFVGWAICVSVIPIPDTASAVIWRFWAELIPLLSVIAITFIFWLADQKKIRLHLTGKSVYNVILGGVTGAIWLGASVGILSIIGVVQIEGKNQIDMLWLWLISALLNTVMQEMLVRGYLY

SEQ ID NO: 23464 - protein, 570 aa, synthetic construct
MKAAIYSRVSTDQQDYSKQTDELKDYAKRNGIEVVYVFEEKESGFNNDRPEFEKLRKLTKQDIDIILVWEISRLSRRSVYLQQQIEDFTNKGICIYALSNSLRTINADGTINEMARVVLAVTATIAEQEAATLKARTLSGKRHKVLKEGHSYTQIAPYGYDYDKETKLLSINEKEATVVRRIFQLSIDGYSLIRIATALNVEGIKNKKGNKWYFATIRDMLINPVYMGKARYALKKAPAKEGKKYRKPLEFVEVDSPAIVSEETYQLSLERMQGRKSISKSSYSVEYPLLRGLIVCPVCGRRYVYKRASKLYTCNNRDNDCKAKGASAHKLESIVWDIIKVYFKENMTNNKVEEQIEPLQAEIDSYKQKILLLDGQLSELTEEASRIYDAAIEAQKRFPNMPKLYEDKMKELDSIDKEASRYKKEKELTDKKIRSISKKINHIKEARDINLDDITDELEKYNIFHQFIDNLVICGTKHTSFIVLTLTTGQILYIGHYSKRCSNYYILFYPSSDIYFDIQTNKGYINHLKEKATINSDGSIYLGDLTGEVKEYSIIDFVNYLDIEENRRYY

SEQ ID NO: 23465 - protein, 632 aa, synthetic construct
MNTAVNTNQFNYRFKLTDYSLFDRNRARRVAIYGRVSTEHEAQLSALDNQLQWYDDQVRYHPNWDVVAKYIDEGITGTQAKKRPDFLRMIEDAKQGKFDLIVTREVCRFARNVVDTLVVTRELKSIGVEVFFIEDNIWTMDGDGELRLSLMATLAQEESRKTSERVKAGQKISRDNGVLYGNGNILGYDRVGDTYVINEEQAETVRMIYDLYLQGYGSMKIAGILTERKRKTASGLVKWSVSNIMRAIRNATYTGTKCYNKSRSNNFLEQKRINNLDMSTYEYVEGDFPAIISQEIWDKAQEIRESRVKPSLVSATKTTHSKRDSADVWVNKLRCSCGSSFRKNKWHTKLDGKTSYGYQCYNQLNNGNKKKREELGLDTDGYCDTRMITDWKLDFMAKALLEHLWTERRKSVLIAIDLIKCYYKEEKEIGKQSDVVVVQARLDKANTRLTNLIAMRADGEITKDEYQVMRTPIDTEIQELQKVLENIPTDNDNLKGFDLDSIISTLNSLVDFSGSTISHDVINQFVYLVTPTSDTTFEWYVNLNGKPNVKATFTAEGRKKNCLIRLEEIERISSLHRKENESNAQLIKNPCLLTYLHRLLLLKCNSVIFVLILYSVIFWAVPFWDSPFALLK

SEQ ID NO: 23466 - protein, 413 aa, synthetic construct
MNIRKIEAKNNNRKKRICAYVRVSTTNGSQLDSLENQKVYFEKLYAERDDVEFWGVFCDKGISGLKYDRPDFQTMLDACRKGQIDVIHTKSISRFARDLINVLEISRELKTLGIDIFFEEQNIHTLSNEGEVVLTVLASLAEEELQSMSGNQRWSFRRKFQKGELLINAKRFLGYDLNEKGELVINKAEAQIVRTIFYSYLEGMGTHRIAKKLNEGKVPTVTGKKWYDSTIRNILKNEKYKGSLLLQKYFHDGVNGPKKLNQGQVEQYYIEDNHEGIVSKEIWEKVQVKIKSRSRIQGTNKTYKFSRMLKCQYCGSTLKRQVSYKKKIVWCCSKYIKEGKNSCKGMRVPERDIEDWKLSSPVIVLERIEDGEKHYGYTGQKATANGQISNSEKGQGSRLLSSVYRPRRTAIKL

SEQ ID NO: 23467 - protein, 430 aa, synthetic construct
MSTDQDEQLSSYENQVNYYREFILKHEDYELVDIYADEGISATNTKKREAFNRLIQDCRDGKVDRILVKSISRFARNTLDCIKYVRELKELGIGVTFEKENIDSLDSKGEVLLTILSSLAQDESRSISENSTWGIRKKFERGVVQVNTTNFMGYDKDEKGNLIINHEQANVVRYIFDRFLEGYSPEFISKELRKQEIPGCTGKARWCPSAIWKMLQNEKYKGDALLQKTYTVDFLTKKRIDNDGQVNQYYIENNHEPILDREKWEIVQLEIARRKKFREQHKLQFYIMQKANNPFTTKVFCAECGSAFGRKNWTTSRGKRKVWQCNNRYRIKGQIGCLNNHIDEEMLEKAVMMAVSILKENRELLQSKWNKLIETDSRLKQYYSNRLRDIVSRKKWDFNGVEMCRILDSINISEKGEISVKFLEGTEVNL

SEQ ID NO: 23468 - protein, 500 aa, synthetic construct
MELSKGVIYARYSSDKQRDESIEGQIRECKAYAEREGIIITHIYTDKALSARTDHRPEFRQMIDDAKKHNFEYVIVYQLDRFSRSREDSAVYKSILKRNGVKVISAKENISSDPAGIILESVLEGMAEYYSAELAQKVRRGMTDNALKGKMNGTPTPLGYDKTNDNSLIINKHEAKIVERIFEMYLKGHSIPSICSFLNSKGYLSKKGGKFSYAVVRRILSNEKYIGIMKWNDIIVEDAIPSIISKEIFDKVQTANSRRIKLKASRSEFYNLCGKLYCGKCNAHYVGSTATSRSGEKHYYYVCNNRRKHHTCDAPNIKREIVEDIVINKTLEILNQPNTIEELAKMAIKANKEMMSTSELELQSINDRIKQLQSELDNYMKAIAKGFISDTLQNQIEKTEAELQDHMTRRTNHEIASNQIQLTAEHIEFFLHKMAKENPTTKQGRASIIDTFIKQATIFDDRVEIVFNYSNDLPQFKEQAIECSHSCDMVDHQGFEPWTP

SEQ ID NO: 23469 - protein, 504 aa, synthetic construct
MDAVIYARYSSNNQREESIEGQIRECREFAEKNNLQIVDEYIDRAISGKTDNRPAFQRLIKDSSKGKFDVVIMYTLDRFARNRYDSAIYKAKLKKNGVRLLYAKQPMPDTPEGIILESVLEGYAEYYVENLRRGVKRGMRENALKGYVNGKTPLGYRRGKDKKYEIDPYEAKAVREIFERYARNEPIIDIARWLNDNGYKTTTGGQFNKNSLRRILTNDKYIGVYRYDDIVIEDIVPPIIDRELFERVQNTFEYNKHFRAKQKAIDPYLLTGKLFCGHCGAMMIGESGTSRHGTTYRYYKCATRKREHTCDKKIERKEWIERIVVEYTKNYVLTDENIEKIAEKVVELITQEYSDKSMLAELTARLDDVTTRFSNLLKALEQGVISESVANRVSELEKEKKSLEKKIASEKMSKPTITKDMVVYWLLSFKNGNIDDESYQRRIIDTLVSSVFIYDNDDGTARLVLNFNTSSNNNVTIKVSDTTSLAIPVKKSPEFQRSGLFILF

SEQ ID NO: 23470 - protein, 454 aa, synthetic construct
MGRDKNRIEDDGIKRAALYIRVSTEEQAMHGLSLTAQRETLERYVGDNGLKLAGIYVDEGITARKKYKNRAAFMRMLDDVRADRIDLILFIKLDRWFRNIADYYEVQKILDAHNVRWIATEEDYDTTTANGRLHLNIKLSIAQDESDRTSERIKFVFDSKVKRGEVISGKTPLGYRIEGKRLVPDEETAPIARDIFDRYLFIRSLAALRLYIMETYGRVYSYSGVKALLQNERYIGRAHGQDDFCDPIIDKKVFGQVQLIVDERAQRNSTLRTDRVYLFTGLVHCAECGNRLSAHLVSGGYIYYRCTRYEKLHLCTHKKRTSERMLEDWLLHNLLTQFEQYNFDLEARAAKPKVKRIDEAKVKRKIEKLKDLYLNDLIDMATYEADYIALRDELREAAAFEEHLPAPVDLRAIADSLSAYPTLSRQGKKEFWSKIVGRIVITNENDFFVYPISP

SEQ ID NO: 23471 - protein, 530 aa, synthetic construct
MKMITKLEAKQPDNSLRKIRVAAYARVSTDSDEQLLSLEVQKEHYENYIKSNPCWEYAGLYFDEGISGTKIDKRESLKQLLKDCESGQIDRIITKSISRLARNTVDCLEIVRKLTGLGIYLYFEKENIDTERMSSELMLSILSSIAQSESRSISENSMWSIQKRFENGSYVISSPSYGYKNENGKMIIVPKEAEVIKDIFSMALLGKGGHVIANELTAKKIPAKRGAKWSSTTVNAILNNKTYTGDVIFQKTYTDDSFKRHKNRGEKKQYVIENHHEAIISHETFNNVHELRQKRKLKLNITGGSNKYLARYVFSAKLYCGNCHSRLKKHDRHKKDGAYVVWCCTKHIREIKCCPMKAVKEEYVKLAFLQMLNKLKATSAQILAPFIKSLRNVNSKDGLNKVIELEEKKLKLQEQEQVLNKLLAGGYIEMDSYYLESNQLKTEIETCLKEKLQLSNSLNGNLTHLNEAQKLQRFVSVTEVFSEFKDEDFLDFVDDVVVKSRTEFIFHLKCGLELEEEVKETWHTSHMVTE

SEQ ID NO: 23472 - protein, 525 aa, synthetic construct
MSANVTIIPPRKIAGNTVDKHKDKPKLRVVAYCRVSTDSEEQATSYDTQVQHYTDYISRNPLWEFAGIYADDGISGTSTKKRVGFNDMIHDCMSGKVDMVITKSISRFARNTIDCLKFVRQLKDKNIPIIFEKENINTMEASGELLLTIMASLAQQESASLSQNVKLGLKFRYQEGKVQINHNWFLGYTKDDEGNLVILEQEAKVVRRIYREYLEGLSLRDIAEGLEKDGIKNGAGHLKWNLSNIKGILQNEKYIGDALLQKTITTDFINHVRIKNDGTEPQYYVKDSHASIIPRDIFFKVQEEMVRRANMFSGEENKKRRVYSSKYALSSLCVCSKCGDVYRRIAWNNRGVRSVVWRCCTRWENGPSACDAPTVKEEELQSATVKAINKVFSIPDEVLDTLNNNIREIIAGNNLSEIETVDKKIADKQAILLTLLKAKKDYTKIADEIDELKVKKQQLLIEKAGQEDAKRRIREMEDFLKSECHDIGEYDEKLVRKYIKKIKVYEDRFSVIFKSEISVDIERAS

SEQ ID NO: 23473 - protein, 499 aa, synthetic construct
MKIRRVQPSPILQKKLRVAAYARVSVDTLHHSLAAQVSYYSSLIQKNPAWEYAGVYADEGITGTSTTHRTEFKRLIADCNAGKIDLVLVKSISRFARDTVDCLHTVRRLKEQGIAVRFERENIDSTSEDGELLLTLLASFAQEESRSIGDNIRWGVRRRFAEGIPNGHKAPYGYTWDGEMFRIVPSEGEIVKEIYRRYLAGESAYAIAKILAGRGITGRQGRPIEQTTVKDILSNISYTGTMALQKNYISEGHIRKRNKGELPLYLVEGMFEPLVSKADFDKAQEIRKLRAERAVNRNPVLLPFSGMVKCGCCGGGFSRRTAGKYRRWGCNTRERKGSTACDSRPIKEEELVAAVRDVMEKDDFDTAELKRKVSKIVIHGDRIDFHLVNGRIKKTARIYNGQRGSNPFTNKVYCASCGSKCERDTWTKGTKVWACSQPRTKCRLKRLPESELKEAAESLFGDCYEGKIVQNVKRIVISDDEVIFQLKEGGAYRWQRQCG

SEQ ID NO: 23474 - protein, 531 aa, synthetic construct
MKEIIKIDSTMRKTGFEKKTRVAAYARVSSDSDEQLLSLEVQKEHYENYIKSNPCWEYAGLYFDEGISGTKIDKRESLKQLLKDCQSGQIDRIITKSISRLARNTVDCLEIVRKLTGLGIYLYFEKENIDTEHMSSELMLSILSSIAQSESRSISENNTWSIQKRFENGSFVIPCPAYGYKNENKKMIIVPEQARVVKEIFNMALSGMGGEAIARVLTDKKIPTKKGGSWTSSTVNAVLTNKTYTGDVIFQKTFTDDNFNRHKNCGEKKQYVIENHHEAIISHETFNLVKEIIAWRRNENNIVCGSGKYNKLYAFSGKIRCGECGSKCKRRIIYQHNKAYGIWVCITHLEDIHACSQKSVMESYLKISFLQMLNKLKAGYVQMLTPLVESLRGVNNKDGLNKVIELEEKKLKLQEQEQVLSKLLAGGYIEMDSYYLESNQLKTEIDTCLKEKLQLSNSLNGNLTHLNEAQKLQRFVSVTEVFSEFKDEDFLDFVDDVVVKSRTEFIFHLKCGLELEEEVKETWHASHMVTE

SEQ ID NO: 23475 - protein, 525 aa, synthetic construct
MSANVTIIPPRKIAGNTVDKHKDKPKLRVVAYCRVSTDSEEQATSYDTQVQHYTDYISRNPLWEFAGIYADDGISGTSTKKRVGFNDMIHDCMSGKVDMVITKSISRFARNTIDCLKFVRQLKDKNIPIIFEKENINTMEASGELLLTIMASLAQQESASLSQNVKLGLKFRYQEGKVQINHNWFLGYTKDDEGNLVILEQEAKVVRRIYREYLEGASLRDIAEGLEKDGIKNGAGHLKWNLSNIKGILQNEKYIGDALLQKTITTDFINHVRIKNDGTEPQYYVKDSHASIIPRDIFFKVQEEMVRRANMFSGEENKKRRVYSSKYALSSLCVCSKCGDVYRRIAWNNRGVHSVVWRCCTRVKNGPSACDAPTVQENELQSATVKAINKVFSIPDEVLDTLNNNIREIIAGNNLSEIETVDKKIADKQAILLTLLKAKKDYTKIADEIDELKGKKQQLLIEKAGQEDAKRRIREMEDFLKSECHDISEYDEKLVRKYIKKIKVYEDRFSVTFKSEISVDVERAS

SEQ ID NO: 23476 - protein, 430 aa, synthetic construct
MSTDQDEQLSSYENQVNYYREYILKHEDYELVDIYADEGISATNTKKRDAFNRLIQDCRDGKVDRILVKSISRFARNTLDCIKYVRELKELGIGVTFEKENIDSLDSKGEVLLTILSSLAQDESRSISENSTWGIRKKFERGVVQVNTTNFMGYDKDEKGNLIINHEQANIVRYIFDRFLEGYSPEFISKELREQEIPGCTGKAKWCPSAIWKMLQNEKYKGDALLQKTYTVDFLTKKRIDNDGQVNQYYIENNHEPILDREKWEIVQLEIARRKKFREQHKLQFYIMQKENNPFTTKVFCAECGSAFGRKNWTTSRGKRKVWQCNNRYRIKGQIGCLNNHIDEEMLEKAVMMAVSILKENRQLLQNKWNKLIETDSRLKQYYSNRLRDIVSRKKWDFNGIEMCQILDSITISEKGEISVKFLEGTEIEL

SEQ ID NO: 23477 - protein, 413 aa, synthetic construct
MNIRKIEAKNNKRKKRICAYVRVSTTNGSQLDSLENQKVYFEKLYAEHDDVEFLGVFCDKGISGSKYDRPDFQTMLDACRKGQIDVIHTKSISRFARDLINVLEISRELKTLGIDIFFEEQNIHTLSNEGEVILTVLASLAEEELQSMSGNQRWSFCRKFQKGELLINAKRFLGYDLNEKGELVINKAEAQIVRTIFYSYLEGMGTHRIAKKLNEGKVPTVAGKKWYDSTIRNILKNEKYKGSLLLQKYFHDGVNGPKKLNQGQVEQYYIEDNHEGIVSKEIWERVQVKMKSRSRIQGTNKTYKFSRMLKCQYCGSTLKRQVSYKKRIVWCCSKYIKEGKNSCKGMRVPERDIEDWKLSSPVIVLERIEDGEKHYGYTGQKATANGHISNSEKDQSSRLLSSVYRPRRTAIKL

SEQ ID NO: 23478 - protein, 524 aa, synthetic construct
MAGAKNITVIPAKKRVGNTVTAEDKPKLKVAAYCRVSTDSEEQATSYDAQVEHYTEFIRKNPEWEFAGIYADDGISGTNTKKREEFNRMIEDTMAGKIDMIITKSISRFARNTLDCLKYIRQLKEKNVPVFFEKENINTMDSKGEVLLTIMASLAQQESESLSKNVKMGIQFRYQNGEVQVNHNWFLGYTKDENGHLIIDEDQAVVVRRIFREYLQGASLKNIADGLMADGIPTATGNMKWRGDGIRKILTNEKYMGDALLQKTYTVDVLTKKRVANNGIVPQYYVENNHEAIIPRQLFMQVQEELFRRAHLKTENGKTKRVYSSKYALSSIIYCGKCGDLFRRVAWKARGASYNKWRCASRIEKGPKNGCDAEAISESEIQKAVMRAINKTLGGREEFLVQLQHNIEDVLNGDSTATLEYIDQRMAELQEKLVMCVNKNAEYDVIAKEIDALREKKAAVVTKDAEQEMLRKRINEMRHFLQTQTSRITEYDEQLVRRLIEKITVYDDKLIFEFKSGMTVELKR

SEQ ID NO: 23479 - protein, 445 aa, synthetic construct
MKSKRVALYIRVSTEEQARQGLSLDAQLADLRSYADKHKYNIVGVYTDDGASARKKPFSRRAFKQLIEDIKQNKIDRVLFIKLDRWFRSVKDYYKAQEILDSHKVDWETTQEDYNTTTTNGRLMLNIKLSIAQNESDMTSDRIHFVFAQKRARHEICSGKIPFGYSVQDKKLVPNENAKYVQPLFEHFIKTQNLTEAARWMCGHGFYYTYASISHVLKNERYIGRSHGDDNFCQPLVTEELFYKAQKIIKSKKLIKRTPTGRIFLFTGLIRCPMCGHPYTGIGCVGKNNGKTYYYYQCPQSVSPFKPCTHRGRVAEKKIEESLLDSFDEAYKDFQYSVKKKQKPQPVTTDVEKLNRKLERLKELFLNELIDLDEYKKTHAELSAAIAEVETPKIQPSTPLNYYLPGGIRPYYEKMTREQRRRFWQQTIDRIDLDEDDTPRITFLS

SEQ ID NO: 23480 - protein, 413 aa, synthetic construct
MNIRKIEAKNNKRKKRICAYVRVSTTNGSQLDSLENQKVYFEKLYAERDDVEFLGVFCDKGISGSKYDRPDFQTMLGACRKGQIDVIHTKSISRFARDLINVLEISRELKTLGIDIFFEEQNIHTLSNEGEVVLTVLASLAEEELQSMSGNQRWSFRRKFQKGELLINAKRFLGYDLNEKGELVINKAEAQIVRTIFYSYLEGMGTHRIAKKLNEGKVPTVAGKKWYDSTIRNILKNEKYKGSLLLQKYFHDGVNGPKKLNQGQVEQYYIEDNHEGIVSKETWEKVQVKMKSRSRIQGTNKTYKFSRMLKCQYCGSTLKRQVSYKKKIVWCCSKYIKEGKNSCKGMRVPERDIEDWKLSSPVIVLERIEDGEKHYSYTGQKTSANGQISNSEKGQGSRLLSSVYRPRRTAIKL

SEQ ID NO: 23481 - protein, 428 aa, synthetic construct
MSTDQDEQLSSYENQVNYYREYILKHEDYELVDIYADEGISATNTKKRDAFNRLIQDCRDGKVDRILVKSISRFARNTLDCIKYVRELKELGIGVTFEKENIDSLDSKGEVLLTILSSLAQDESRSISENSTWGIRKKFERGVVQVNTTNFMGYDKDEKGNLIINHEQANVVRYIFDRFLEGYSPEFISKEIREQEIPGCTGKSKWCPSAIWKMLQNEKYKGDALLQKTYTVDFLTKKRIDNDGQVNQYYIENNHEPILDREKWEIVQLEIARRKKFREQHKLQFYIIQKENNPFTTKVFCAECGSAFGRKNWTTSRGKRKVWQCNNRYRLKGQIGCLNNHIDEEMLEKAFMKAVGLLKEHRSDVVAKWQKLVQGANLLHKHYAKQMYQILDLDKFDGVIMNQVLDHISISEAGQIVVTFLEGTEVDL

SEQ ID NO: 23482 - protein, 530 aa, synthetic construct
MPYCLYVRKSRADAEAEARGEGETLTRHINALLDLAKRRHLDITQIYREIVSGETIAARPVMQQLLSEVEQGLWDGVLVMEVERLARGDTVDQGIVAQTFKFSDTKIITPIKDYDPNNEFDEEYFEFGLFMSRREYKTINRRLQRGRIASVKEGKYVGSQSPYGYQREKLVGDKGYTLAPLPAEADIVRLIFQLYTKGEEQEDGSYKRLGVSRIVRRLNDMRIPPRKSNHWSPATIRDILINPVYIGKIRWNWRKDSKKMVDGRVVIARPRSSIDDCVLADGKHPPLIDDATFALAQEYMAQNPPHPIGERNKVKNPLSGLVVCAKCGKKMVRRPYNDRNQADTLLCADTACDNISSALFYVEERVLQALSDWLAEYRLQWETADDTADNASAVNLKEKALRRLATEYETLNKQLDNAHDLLEQGVYTTEQFLDRSRKLSERIKKNEADRSTLGADIAADKKREQGRKQIIPKVEKLLDVYDSLPSAKAKNDMLKEVLEKVVYLKTKNGRWNNAPDDFEITLYPKIPKSD

SEQ ID NO: 23483 - protein, 516 aa, synthetic construct
MENCVIYARFSSHGQNEQSIEAQVRICKEYAESKGLDVVNLYTDKARTGTNDARPAFQKMIADAKTGAFQYIIVYMFDRFARNRRDSIIYKEMLKEKYGVKVISALEPIAEDEGGEFYEMFLEWNAEKYSKRLSKRVRDGLDTSVANGTFCGGFMIYGYQIELEPVPGKQGKFIKRVVINEEEAKVMRYVFEQYDKGVSKKQIAADLNAQGVRIKGKPVTHKTFDHYMTNPKYTGEFYFGDRFCTNMYPAIIDKATFERVQKRLAENRYFLGGTETAKVPYLLTGKLFCGHCGTEMVAGGGKSKTGKKYYYYECKKKKKKLCSKRIEHKDQLEKYVVQNVIDFLSDDANLKVLVKDVLKYFDSRTDESELKSIRKRIADIQEEADAAATAFIEAKSQLLKQRIEKRMQECEILLADLEKLKAQLVLERGQKLTEKDIVSFVKMILQGDIDDIDFRRRLIDNLVYKVYISDDNTYIYFNIKGGKGIEEITFEDTKSALDKENRVQTQSDPPRHIRPC

SEQ ID NO: 23484 - protein, 413 aa, synthetic construct
MNIRTIEAKNNKRKKRICAYVRVSTTNGSQLDSLENQKVYFEKLYAEREDVDFLGVFCDKGISGSKYDRPDFQTMLDACRKGQIDVIHTKSISRFARDLINVLEISRELKTLGIDIFFEEQNIHTLSNEGEVVLTVLASLAEEELQSMSGNQRWSFRRKFQKGELLINAKRFLGYDLNEKGELVINKAEAQIVRTIFYSYLEGMGTHRIAKKLNEGKVPTVAGKKWYDSTIRNILKNEKYKGSLLLQKYFHDGLNGPKKLNQGQVEQYYIEDNHEGIVSKEIWEKVQVKMKSRSRIQGTNKTYKFSRMLKCQYCGSTLKRQVSYKKKIVWCCSKYIKEGKNSCKGMRVPERDIEDWKLSSPVIVLERIEDGEKHYSYTGQKGTSNSHISNSEKNQSSRLLSSVYRPRRTAIKL

SEQ ID NO: 23485 - protein, 428 aa, synthetic construct
MSTDQDEQLSSYENQVNYYREYILKHEDYVLVDIYADEGISATNTKKRDAFNRLIQDCRGGKVDRILVKSISRFARNTLDCIKYVRELKELGIGVTFEKENIDSLDSKGEVLLTILSSLAQDESRSISENSTWGIRKKFERGVVQVNTTNFMGYDKDEKGNLIINHEQANIVRYIFDRFLEGYSPEFISKELREQEIPGCTGKAKWCPSAIWKMLQNEKYKGDALLQKTYTVDFLTKKRIDNDGQVNQYYIENNHEPILDREKWEIVQLEIARRKKFREQHKLQFYIMQKENNPFTTKVFCAECGSAFGRKNWTTSRGKRKVWQCNNRYRIKGQIGCLNNHIDEEMLEKAFMKAVGQLQKHRSDVVAKWQKLEQGTNLLYKHYSKQMYQILDLDKFDGVIMNQVLDRISISEAGHIVVTFLEGTEVDL

SEQ ID NO: 23486 - protein, 428 aa, synthetic construct
MSTDQDEQLSSYENQVNYYREFILKHEDYELVDIYADEGISATNTKKRDAFNRLIQDCRDGKVDRILVKSISRFARNTLDCIKYVRELKELGIGVTFEKENIDSLDSKGEVLLTILSSLAQDESRSISENSTWGIRKKFERGVVQVNTTNFMGYDKDEKGNLIINHEQANVVRYIFDRFLEGYSPEFISKELRKQEIPGCTGKARWCPSAIWKMLQNEKYKGDALLQKTYTVDFLTKKRIDNDGQVNQYYIENNHEPILDKEKWEIVQLEIARRKRFREQHELQFYIMQKENNPFTTKVFCTECGSAFGRKNWTTSRGKRKVWQCNNRYRLKGQIGCLNNHIDEEMLEKAFMKAVGLLKEHRSDVVAKWQKLVQGANLLHKHYAKQMYQILDLDKFDGVIMNQVLDHISISETGQIVVTFLEGTEVDL

SEQ ID NO: 23487 - protein, 413 aa, synthetic construct
MNIRKIEAKNNNRKKRICAYVRVSTTNGSQLDSLENQKVYFEKLYAERDDVEFLGVFCDKGISGSKYDRPDFQTMLDACRKGQIDVIHTKSISRFARDLINVLEISRELKTLGIDIFFEEQNIHTLSNEGEVVLTVLASLAEEELQSMSGNQRWSFRRKFQKGELLINAKRFLGYDLNEKGELVINKAEAQIVRTIFYSYLEGMGTHRIAKKLNEGKVPTVTGKKWYDSTIRNILKNEKYKGSLLLQKYFHDGVNGPKKLNQGQVEQYYIEDNHEGIVSKEIWEKVQVKMKSRSRIQGTNKTYKFSRMLKCQYCGSTLKRQVSYKKKIVWCCSKYIKEGKNSCKGMRVPERDIEDWKLSSPVIVLERIEDGEKHYGYTGQETSANGQISNSEKGQGSRLLSSVYRPRRTAIKL

SEQ ID NO: 23488 - protein, 500 aa, synthetic construct
MRMCGYARVSTDEERQLDSLEHQMEFFSDFAKQNGHHLVNVYTDEGITGRQLKKRDAFNKMLSDSKLGLFDLLVVKDVSRFARNTVDLLTSIRQLKSRGIDVIFVNNSQKVLGESEFIITLLGAVAQEESSNLSKRVKFGKNITSKKGRVPPRIFGYDRIDNFTMEINEREAEVVREIYHLYIDEGLGCRLIAITLAEKQMKTKFGNDWNQRNIRRILENPIYSGHYINHRYTVVDFLEGTTKALPKEQYYHHDRPEWAIITPERFQQAQEILEQRRKQYATEYTHFTGRYSNRHLFSTLIRCKECGRAFSRRVTHYPNSDYIYWRCPTNNQYTAKRCSNNTIVREDDLIETLSTYLREVVSNKESIAQEIARKFKEANAVDGSKPDAQTLEAKKVKLKAKLEKYMEMYANDVITMEALKSKTAEINESINVIDDQLILLEGQRTQERTIESITNEAMTEIERFLSLQSATNMDLRRIIDSIIVDDKKQVKINLKITGNL

SEQ ID NO: 23489 - protein, 525 aa, synthetic construct
MGKVRIIPAHQQKGNSVHHPRSPQSFGKLRVAAYCRVSTDYDEQASSYETQVDHYKELIQKEPPWEFAGIYADDGISGTNTKKREQFNKMIAACKVGKIDLIVTKSISRFARNTIDCLKYIRDLKAINVAIFFEKENINTMDAKGEVLITIMASLAQQESESLSQNVKMGIQYRYQQGKVFVNHNHFLGYTKDAQGNLVIEPEEAKVIKRIFYSYLNGMTMKQIADSLKADGILTGGKTKNWRSSSVAKILKNEKYMGDALLQKTYTVDFLNKKRVKNEGIMPQYYVENDHPAIIPKSVFMQVQQIIKQRRNGITTKNGKHRRINGKYCFSQKVFCGKCGDILQRNMWYRQEKVAVWRCASRVRRNKTGRRCMIRNVKEPLLKEATVEAFNQLIEGHELASKQIKANIMKVIKNSKGPTLDQIDQQLEEVQMKLIQAANQHQDCDALTQQIMDLRRQKEKVQSRETDQQAKLHSIDEINELVNLHKYGLVDFDEQLVRRLVEKITIFQRYMEFTFKDGEVIRVNM

SEQ ID NO: 23490 - protein, 413 aa, synthetic construct
MNIRKIEAKNNKRKKRICAYVRVSTTNGSQLDSLENQKVYFEKLYAERDDVEFLGVFCDKGISGSKYDRPDFQTMLDACRKGQIDVIHTKSISRFARDLINVLEISRELKTLGIDIFFEEQNIHTLSNEGEVILTVLASLAEEELQSMSGNQRWSFRRKFQKGELLINAKRFLGYDLNEKGELVINKAEAQIVRTIFYSYLEGMGTHRIAKKLNEGKVSTVTGKKWYDSTIRNILKNEKYKGSLLLQKYFHDGVNGPKKLNQGQVEQYYIEDNHEGIVSKEIWEKVQVKMKSRSRIQGTNKTYKFSRMLKCQYCGSTLKRQVSYKKKIVWCCSKYIKEGKNSCKGMRVPERDIEDWKLSSPVIVLERIEDGEKHYSYTGQKGTSNSHISNSEKNQSSRLLSSVYRPRRAAIKL

SEQ ID NO: 23491 - protein, 430 aa, synthetic construct
MSTDQDEQLSSYENQVNYYREYILKHEDYELVDIYADEGISATNTKKRDAFNRLIQDCRDGKVDRILVKSISRFARNTLDCIKYVRELKELGIGVTFEKENIDSLDSKGEVLLTILSSLAQDESRSISENSTWGIRKKFERGVVQVNTTNFMGYDKDEKGNLIINHDQAKVVRYIFDRFLEGYSPEFISKELREQEIPGCTGKAKWCPSAIWKMLQNEKYKGDALLQKTYTVDFLTKKRIDNDGQVNQYYIENNHEPILDREKWEIVQLEIARRKKFREQHKLQFYIMQKENNPFTTKVFCAECGSAFGRKNWTTSRGKRKVWQCNNRYKVKGQIGCQNNHIDEEMLEKAVVMAVEQLSKNVDLLHGKWNKVLEENRPLEKHYSLKLAEMINKPLWEFDSHEMCQVLDNIIIAEDGQITVRFLEGTEVDL

SEQ ID NO: 23492 - protein, 413 aa, synthetic construct
MNIRKIEAKNNKRKKRICAYVRVSTTNGSQLDSLENQKLYFEKLYAERDDVEFLGVFCDKGISGSKYDRSDFQTMLDACRKGQIDVIHTKSISRFARDLINVLEISRELKTLGIDIFFEEQNIHTLSNEGEVVLTVLASLAEEELQSMSGNQRWSFRRKFQKGELLINAKRFLGYDLNEKGELVINKAEAQIVRTIFYSYLEGMGTHRIAKKLNEGKVPTVAGKKWYDSTIRNILKNEKYKGSLLLQKYFHDGVNGPKKLNQGQVEQYYIEDNHEGIVSKEIWERVQVKMKSRSRIQGTNKTYKFSRMLKCQYCGSTLKRQVSYKKKIVWCCSKYIKEGKNSCKGMRVPERDIEDWKLSSPVIVLERIEDGEKHYSYTGQKGTSNSHISNSEKNQSSRLLSSVYRPRRAAIKL

SEQ ID NO: 23493 - protein, 520 aa, synthetic construct
MKTAVIYARYSSDKQTEQSIEGQLYDCYNYAKSNNITVIGEYIDRAMTGRNDDRPDFQRMIADSAKHTFELVLVWKLDRFARSTEDAAYNRGKLKRNGVRLLSIKEDFGDSSAGDLMMHVMESFGDDASGQMMTHIIEAINEYYSADLREKTIRGMRQSAMKAQTTGHIPLGYKVVDKKLVIDDETRIIPETVFRMYAEGERLTDIADHLNAQGYRNRRGRPFTTNSFYNMLSNEKYIGIYKYDDIVIEGGIPQMIPNEVFEAVREKLITNRKRAAKNTAKADYYLSGKLYCGHCGEPMSGLSGTGRNGVKHYYYRCNGVQKKSGCHKKLENKYLIEDEVCRAARSAFEQMDKAETAETIYQMYLQTVKNEYAPAELEKELTECTKQAENVVNAIAQTGGNQLLYDKVRELEERKEQLSSALRLSQAMTDNVPSVEQITVFIDDILATDINTTEGKKAIADIMISKVYVYDDKLTVIFKDKDGKSVDIPLSAVSDSSSADCAPSALGSQAILNTNHREKV

SEQ ID NO: 23494 - protein, 525 aa, synthetic construct
MAQTRTVTMIPARRRVGNTVREEERPKLRVAAYCRVSTDSDEQATSYETQVEHYTSYIKKNPEWEFAGIFSDDGISGTYTKKRDGFNKMIDECMDGKIDMIITKSISRFARNTLDCLKFIRQLKEKNIPVFFEKENINTMDAKGEVLLTIMASLAQQESQSLSQNVRLGLQYRYQNGQMSINHNRFLGFTKDEDGHLIVKPDEAEVVKRIYREYLDGASLQQIAKGLEADGILTGAGKKKWRPETLHKILRNEKYIGDALLQKTYTVDFLNKKRVQNKGIVPQYYVENSHEAIIPRDIFMRVQEEMVRRANLHSGEKRKKRVYSSKYALSSIVCCSKCGDIYRRIAWNNRGKHSTVWRCCTRVDFGPGKCDAPTISEAELQDTAVKAINKALGGREDMIKGLQENVEKIITESTDQEVQEIDSRLLELQKELLKKANARQNYDDLADEIENLREQKHAVMVESAEREGIKKRVAEMQQFLAEQQTEITEYDESLVRQLIEKITVYEDRFEVMFKSQTMVEIKRIK

SEQ ID NO: 23495 - protein, 519 aa, synthetic construct
MKRITKIDAAITAEVKKTRVAAYCRVSTASDEQLISLDAQKAHYESYIRSNDDWEYAGLYYDEGITGTKAEVRDGLQALLKDCEDGKIDLIITKSISRFSRNTTDCLEMVRKLVEMGVFIFFEKENINTGSMESELMLSILSSLAESESVSISENSKWSIRRRYQNGTFIISYPPYGYANIDGEMRIVPEEAEVVKRIFAECLAGTGTYTIARNLNADHIPTKKNGKWHGGTVNGILTNEKYTGDVLFQKTYTDDSFNRHTNYGEVDQFFCENHHEAIISHEDFERVQDVLAQRAAEKGNGINTSRYQNRYTFSGKIICGECGTTFKRRTHYKPSGNYIAWTCGLHIENKHACTMLYVEESAIKSAFTTMMNKLVFGHQRMLKPMLSSLKGTDDRERLIQIQRIEQAIEDSALRKQTLVSLASQGILEPAVYTEECTELALQEERLLAEKKNLISDIGGDREKLQELEKLMQFTGKGQMMEQFDDEAFNSFAKKIVIADRETAVIHLKCGLKLKERLVR

SEQ ID NO: 23496 - protein, 506 aa, synthetic construct
MSDIAVIYARVSSKEQETGGYSLPAQLDFLKEYAKSKGLEVVKVFTESMTAKEAGRIEFNNMLKFAKKQRYGCHVIVEKNDRLLRNEDDEALIINLTVRQGLIDLHLVKDHLILNRYSTPHEIFMFHMMCGMSSMYPRNLSGEIKKGLDKKADLGDYPAKAPIGYKNVRSSKKRSTIEIDPTNAGYVSKIFELYATGMYSYKTLAERISLDGFYPKNKPCSPKLVEKIIINPFYMGEFEFNGKRYHEANHTPIITKELFYTCKKIRERHDNPRKITHDFLYSGLITCSHCGCQLTAEIKKGKYIYYHCTGNKGGTCKRNKYLKEEYIDEHIRTLLEKIQPSKEDAKAIVEKFKEIVNANFDYDKKSIEEIGKKISLLKNRLNKLYIDRLDGMITDEFYREKKNEFQGELDELELKHDNFLAETDTLVDMATQIIELCKNAYNHYLRSDNENKRLLLKILCSNFLYDGSNLVIKLKSTVEPMLLGANFNNGGLFASLFELSGKRKIY

SEQ ID NO: 23497 - protein, 427 aa, synthetic construct
MRIALYARVSTEEQAIHGLSIEAQSEALEEWAKQEHANVVGTYIDAGISARKPASKRPSMQRLLADIERGKIDMVVFTKLDRWFRNIAEYYKVQEILERHGVNWRTIHEDYDTSTASGRFKVNIMLAVAQDEADRTSERIKAVFDSKRKRGEVVSGSVPPGVKIENKKHVADPDMAPMVQDIFQFFISNHSLYAAQRYAANTHGLRRDITTFRRLLLNKVYRGLVVDEKTFDLAQELLAVRSQRNSGVARGRIYLFKGLVRCGTCGSMMSGMVCKGHYYYRCNNHVYIGGCPYEKNIREDYIERWLSEHIVSECDRYNTQAIRARAERPRIDEAGIRRKMTKLKDLYLSDLIDRDEYERDYNELRQSLEKAKEEVPPAEPVDTDYVRSALNMYERLERPEKKEFWMRTIREIIIHPDGSVSFALRNT

SEQ ID NO: 23498 - protein, 521 aa, synthetic construct
MKNVITIEANAPRNSELASISLPKKRRVAGYARVSTDHEDQTTSYESQMKYYTEYISSRSDWEFIKMYSDEGISGTNTKLRVGFKSMIEDALAGKIDLIITKSVSRFARNTVDSLTTVRKLKEVGVEIYFEKENIWTLDSKGELLITIMSSLAQEESRSISENVTWSLRKQFAEGKVHFPYTNVMGFEKGENGEIVVNQEEAKTVRYIFQQALLGKTPYSIAKDLTQQGILSPSGKNHWSSVTIKRMLRNEKYKGDALLQKTYTIDFLSKKKNINKGELPQYYVENNHEAIVDKETFDAVQASLDRKEKGKGSTTLFSSKLVCGDCGHYFGSKVWHSTSKYRRVIYQCNEKYKGEKKCTTPHVTEDEIKDWFVSAINKVISNKDEIIQNLEMLLDVGESSDLERKLVELETEVEVVTQMVSNLVKENAIMPQDQDTYQKKYSNLVERHDALVSEFESIEKQLLEAARHQKDLKEFLETLNQQSGLISEFDDLLWETMVDKVNVSHNRKVTFKLKNGSEVVA

SEQ ID NO: 23499 - protein, 403 aa, synthetic construct
MMTPQKPKLRVAAYARVSDSRLHHSLSTQVSYYSRLIQSHPDWELVGVYYDEGISGKEQSNRQGLQDLLKACDEGKVDRILTKSIARFGRNTVDLLSTVRVLRQKNIGITFEKEGIDSLSSEGELMLTLLASVAQEESHNISENLRWQIKKKFEQGQPHTPQDIYGYRWNGENYVIEPDEAKVVQQVFQWFLDGDNVPMITKKLNEQGVLTRLGNPFTVSSIREFFKQEAYFGRLVLQKTYREPFSRNPKRNNGQKNKYIVEDAHEAIVSKSYFDVVLQEKERRYKVMHQESHMHKGTFRELIECSHCGKIMITRVDSKKVHRTIRYCCRTRDRFGTSSCPSKTLSEKRILATFEDKIGFKPDKNWVTENIKKVIYDSSVGLITVFPIKGRKYELKVRKEHFL

SEQ ID NO: 23500 - protein, 498 aa, synthetic construct
MPEALNAVIYARYSSDRQTEQSIEGQLRECYAFAKANDIAVIDTYIDRAISGKTDNRPAFQKMIEDSAKRQFQAVIVYRLDRFTRNRYDSAIYKARLKKNGVKVLSAMENLNGSPESIIMESLLEGMAEYYSVELSQKITRGMRENALKGKALGGQRVLGYKVNSDCYFEIDETTAPVVVDIFKLYSSGKTVKEICDILNARGVKTARGGAFNKNSLHTILTNKKYIGIYKTKYGEIVGGIPAIIDKELFEMVALRMEQNKKAPARAKAEINYLLSTKLFCGKCRSAMVGESGTSKTGKKYYYYACVKKKREKACDKSNVKKDWIEDLVIQRTVTDILKDDVIEKIADRLVELQKAEAAESGTMLYLQNSLAEIQVSIKNIMTAIEKGIITESTKTRLTELEDEKRNVEIEIAKESIARRIISREQIIYWISSFKDGNITSEKYRQQLIDTFVHAVFVYDDKIVITYNYSGENNTATISDLDLSSPPQVKKSEHYHQW

SEQ ID NO: 23501 - protein, 588 aa, synthetic construct
MKRAALLLRCSTDAQDYERQKLDLLDTIKGMGYTTSDDLVFGQYITGKDDVRKKDRESVAECKQAVREGKVDAIFINEVSRLSRDSIAGRLFIREFNDEYKIPVYFRDLGMWTINPTTRIVDRSFETMLGFHFDMAQNELKSMKTRFASGKRKNAREGKTIGGAVPFGFYKDEDGKLQVDEEQAQVVRLVYNKYLEDGGSIPSVCRYLLSCGYDKKFNKKFGTGSVRNLLRERRYIGEQRYNLVNPDEPDEAKKQEVYIYKVDSIIDTTIYNKVQIKLDKNRTTETKKVNKDKKVHLLAKLITCPICGDSYTSKTASANKSGERYRIWNYCCVSKYNFSECTSDITLNADNIESIIWQLTKKEILALQELSLEERQSKIEEAEQKLASYKDELDVVAKSIDKLNAKKKKLVALFLDIEDDDTAIFNEQREAINKEIDSYNNRIQFLNTEITICEGNIARFKEADFTDEVLDKIEQDLLKKKELIKEYIKVIRPYRLTKARLILEVESKQTNYCILFEPRNSKRRCWYIQSSLAQWQNGLLKTSTAPLGNFFYIPMASLLLDEPDDLDAIASFEDMKEICSINNYVIEY

SEQ ID NO: 23502 - protein, 449 aa, synthetic construct
MRKLNVAYLRVSTEAQTEKYGLDVQKQKILDHCEKKGVVIDKWYIDGGYSGSKLDRPKIQELLDDAEKGLIGTVFIYKLDRMSRDVIDTLNLFYKVLPKYGVKVVSMTEDLRTEKPMDRVMLTMNAAMNQYEREVIRMRMSAGMLERVKKGLWMGGGRIPWGYYYDRNDGILHVDEEQAKMVRNAYKLYLEGYSCDKIATMLGFRGERIVTQILKRKSNIGLIEYKGNVYQGKHEPIVDEKLFWDVQDAINKRKTNSHISNNHLLTGLCYCGYCGSKMRYQKWGRSGHRLVCYSHYKSGKPYMRKVDSCISKPERADFLENEIEDAFKKFAIHVDETENECLDQSIILERTIKSEHERLKKMYTLYISCMSDDLLELIKEKEESIKKLQKQLEENEREKGCDVEKIEEIKQMADVWDSLTVKEKNRILKECVEKIIIKGSDIEVSFVTF

SEQ ID NO: 23503 - protein, 521 aa, synthetic construct
MANVTMIPARVNRRAKREEKETEEPKTRVAAYCRVSTDSDEQATSYEMQVEHYTEYISKNPGWELAGIYADDGISGTNTKKREDFNRMIEDCMAGKIDFVISKSISRFARNTLDCLQYIRQLKDKGIAVFFEKENINTMDTKGELLLTIMASLAQQESESLSQNVKLGLQFRYQAGKVQVNHNRFLGYTKDDEGNLIIEPTEAAVIKRIYREYLEGASYRDICNGLMADGILTGAGKKKWIPSTIHKILSNEKYIGDALLQKTITTNLLEKKREINNGLAPQYYVEDSHEAIIPRDLFMRVQEEMVRRANLRSGEDGKKKRIYSSKYALSSLCTCEKCGDIYRRIAWNNRGKHSTVWRCCTRVEHGPGECDAPTIQETDLQAAVMKAINKVVGQKSTVIANLETILEQTVICADEELAELDEKIKAVQLELVDRATSSEGYEDLARESDRLNEEKQKILVTLAEDKGRQEKKAELIDFLHEQTTEFEEFDDGLVRRLIEQITVHENGAFTVEFKSGTVVEV

SEQ ID NO: 23504 - protein, 514 aa, synthetic construct
MAIITKIEENKAVIGKKKVAAYCRVSTDQDDQLLSLETQKAHYESWIQGHSDWEYAGLYYDEGLSGTKMDTRPSLLRMMEDCKHGLIDYVVTKSVSRLARNTADFLTIVRTLLDLGIPIYFEKENIDTGSMENELMLSIMSSIAESESVSISENNKWSIQRKFKNGTYKCSYPPYGYDWDKKNGEMVVNPEQAEIVKYIFAQTLAGVGTHDIAKDLMAKGVPTKKGGKWTGHTVNGIIRNEKYTGDCLFQKTYTDSSFVRRRNLGELDQYYVEDHHEAIISREDYEAANDVIDRRRQEKGIELDNGKYQNRYPLSGKVICGECGGTFKRKTYTHKVVLACTQHIDDKEKCSMKYVDLEAVEVAFATMMNRLVYGRNKVLRPFYEALQQSNQTEALLKIHDIQEQLDALVEKKQTIKGLFAKGVIEPAVYTQSLNGVTAEVERLTTEKDALSYIASSEISHIEEIRKLLSFADRGEFLDGFDGEIFETYVDRIVVKSQMELEFQMKCGLNLIERI

SEQ ID NO: 23505 - protein, 512 aa, synthetic construct
MERAVIYARYSSDHQREESIDAQVRACREYCQRKGYLVTKIYADEAKSGKSIAKREQYKKMLSDSLKNLFDVVVFHKIDRNSRNELDYYLTKNQLISSGIKYEYAAQNIDTSPAGQMVEGILVAVAANYSRNLAEETKKGLKENALKALFNGGRPPLGFEINQENKYVINDYEAGAIRIIFDLYLKGKGYHYIISQLNSLGYKTREGRKFGKNSLYDILRNPKYCGTYTFNKVNKDPSGKRNSHKISENTIIVEDAIPAIISKENFRKVQEKMSRNKHRTAAYRSKETYLLTGKAFCGICGAAMTGHRASARGKKYVYYTCAARDRLGTSACENKVVPRDELEQVVLDTLKEELLSNNFQKNLNHYILEEFHTLASEVSNEADSLAEQKAIAERKLNNLYSIIEQGTADEYDLQRLADVKRELTSIKEKLSKCAAAHSLSDINPRAIERTIKLCRNMLLKNASAETLTLIFDDMVEKIVIGAKKITLQFKLECFDTYGAEGRTRTGTWGNHA

SEQ ID NO: 23506 - protein, 428 aa, synthetic construct
MSTDQDEQLSSYENQVNYYREYILKHEDYELVDIYADEGISATNTKKRDAFNRLIQDCRDGKVDRILVKSISRFARNTLDCIKYVRELKELGIGVTFEKENIDSLDSKGEVLLTILSSLAQDESRSISENSTWGIRKKFERGVVQVNTTNFMGYDKDEKGNLIINHEQAKVVRYIFDRFLEGYSPEFISKELREQEIPGCTGKAKWCPSAIWKMLQNEKYKGDALLQKTYTVDFLTKKRIDNDGQVNQYYIENNHEAILDRDKWEIVQLEIERRKRFREQHKLQFYIMQKENNPFTTKVFCAECGSAFGRKNWTTSRGKRKVWQCNNRYRIKGQIGCLNNHIDEEMLEKAFMKAVGLLQEHKSDMVAKWQKLEQGTNLLHKHYARQMYQILDLDKFDGVIMNQLLDHISISEAGQIVVTFLEGTEVDL

SEQ ID NO: 23507 - protein, 413 aa, synthetic construct
MNIRKIEAKNNKRKKRICAYVRVSTTNGSQLDSLENQKVYFEKLYAERDDVEFLGVFCDKGISGSKYDRPDFQTMLGACRKGQIDVIHTKSISRFARDLINVLEISRELKTLGIDIFFEEQNIHTLSNEGEVVLTVLASLAEEELQSMSGNQRWSFRRKFQKGELLINAKRFLGYDLNEKGELVINKAEAQIVRTIFYSYLEGMGTHRIAKKLNEGKVSTVTGKKWYDSTIRNILKNEKYKGSLLLQKYFHDGVNGPKKLNQGQVEQYYIEDNHEGIVSKEIWEKVQVKMKSRSRIQGTNKTYKFSRMLKCQYCGSTLKRQVSYKKKIVWCCSKYIKEGKNSCKGMRVPERDIEDWKLSSPVIVLERIEDGEKHYSYTGQKGTSNSHISNSEKNQSSRLLSSVYRSRRAAIKL

SEQ ID NO: 23508 - protein, 428 aa, synthetic construct
MSTDQDEQLSSYENQVNYYREFILKHEDYDLVDIYADEGISATNTKKREAFNRLIQDCREGKIDRILVKSISRFARNTLDCIKYVRELKDLGIGVTFEKENIDSLDSKGEVLLTILSSLAQDESRSISENSTWGIRKKFERGVVQVNTTNFMGYDKDEKGNLIINSEQAKVVRYIFDRFLEGYSPEFISKELREQEIPGCTGKAKWCPSAIWKMLQNEKYKGDALLQKTYTVDFLTKKRIDNDGQVNQYYIENNHEPILDKEKWEIVQLEIARRKRFREQHKLQFYIMQKENNPFTTKVFCAECGSAFGRKNWTTSRGKRKVWQCNNRYRIKGQIGCLNNHIDEEMLEKAFMKAVGILQDHRSDVVAKWQKLEQGANLLHKHYAKQMYQILDLDKFDGVTMNRVLDHISISEAGQIVVTFLEGTEVDL

SEQ ID NO: 23509 - protein, 413 aa, synthetic construct
MNIRKIEAKNNKRKKRICAYVRVSTTNGSQLDSLENQKVYFEKLYAEREDVEFLGVFCDKGISGSKYERPDFHTMLDACRKGQIDVIHTKSISRFARNLINVLEISRELKTLGIDIFFEEQNMHTLSNEGEVVLTVLASLAEEELHSMSGNQRWSFRRKFQKGELLINAKRFLGYDLNEKGELVINQEEAQIVRTIFYSYLEGMGTHRIAKKLNEDRVPTVTGKKWYDSTIRNILKNEKYKGSLLLQKYFHDGVNGPKKLNKGQLEQYYIEDNHEGIISKEIWEKVQVKMKSCSRIQGTNKSYKFSRMLKCQYCGSTLKRQVSYKKKIIWCCSKYIKEGKNSCKGMRVPERDIEDWKLSSPVTVLERIEDGEKHYSYTGQKATAYSHISNSEKNQSSRLLSSVYRPRRTAIKL

SEQ ID NO: 23510 - protein, 416 aa, synthetic construct
MAKIKQITRLPVSRPKLVKVAAYARVSTSTCRQLSSISAQVSYYSRLIQSTPGWDYAGVFIDEGTTGTKMRGRQGLADLMALAHDGGVDIVLCKSISRLARNTVDLLQIVRKLKNLNVSIRFERENIDTSTNDGELLLTLLASFAQEESASLSANVKWAIRNRYKDGGTNSFFIYGYVWTQGKFVINHDEAQIVQRLFSNYLEGISPEKTANQLNSEGLRSRGGGLFHGSVLRRMLENERYKGCQLLQKTFNKTIRSTSRTPNDGVLTKYWVEQALPVIIEPALFDKVQQEIARRRQIGPAATPSLNTGVFTGRIRCGTCGRNYQRKTRRYASGNYYHYWRCWSACKGQGNPCGGHNLRETMLQSICATTLNLEEFDEHAVENHIVIIEAFPDHLMIHLRDARSIKIALDKQGRLT

SEQ ID NO: 23511 - protein, 525 aa, synthetic construct
MNTLARSVTAIPATKKPGHNVTACNPLFKRKVAAYARVSTDLEEQATSYQTQINYYTTHIQSRSDWEFAGIYTDEGISATSTKHRQGFQNMITDALNGKIDLILTKSVSRFARNTVDSLTTVRQLKDAGVEVYFEKENIWTLDSKGELLITIMSSLAQEESRSISENVTWGHRKRFQNGRVMVPYSSLLGYKKGADGNLVIDETQAPTVRLIYRLFLSGLSITEIRKELQHRGILTPRGKTKWSTSTVRSILSNEKYKGDALLQKTFTADFLTKRIEENQGQLPQYYVTSNHEPIIDPKVWDQVQYELATRHATNTAKIGLFASRLKCADCGSWYGRKTWASNSKYKHTIWRCNHKYDHPRPCQTATLRDQQIQTAFLSALDHLVENYRGKDHLPQAITEMFNTDRLEAESSHLDGKIRALANQIEELIAENQRRAQDQEQYLAKYTQLDAKYQKTLAEKQAIDAQITAKNAKATAIKTAYSQLADKPIEHFQSCQWNALIDHAIIGANQIRFIFRTGKEITVNL

SEQ ID NO: 23512 - protein, 525 aa, synthetic construct
MAQRKVTAIPATITKYTAVPIGSKRKRRVAGYARVSTDHEDQVTSYEAQVDYYTNYIKGRDDWEFVAIYTDEGISATNTKRREGFKAMVADALAGKIDLIVTKSVSRFARNTVDSLTTVRTLKEKGVEIYFEKENIWTLDAKGELLITIMSSLAQEESRSISENTTWGQRKRFADGKASVAYKRFLGYDRGPNGGFVVNQEQAKTVKLIYKLFLDGLTCHAIAKELTERKLPTPGGKAVWSQSTVRSILTNEKYKGDALLQKEFTVDFLQKKTKKNEGEVPQYYVEGNHEAIIDPATFDYVQAEMARRMKDKHRYSGVSMFSSKIKCGECGCWYGSKVWHSTDKYRRVIYQCNHKYKGGKTCGTPHVTEKQVKGAFVRATNILLSERDELTANTRMVIVMLCDSTELEKRQAELKEELEVVVGLVERCVAENARTALDQDEYTERYNGLVSRYETVKTRFDEVTQAIADKADRKKLLEQFLHTVETQEPVTQFDERLWSSLVDFVTVYSEKDIRVTFKDGTEIQV

SEQ ID NO: 23513 - protein, 592 aa, synthetic construct
MPNLRKIEAAVPAIREKKKVAAYARVSMQSERMLHSLSAQVSYYSGLIQKNPDWEYAGVYADDFISGTNTVKRDEFKRMLADCEAGKIDIILTKSISRFARNTVDLLETVRHLKDLGVEVQFEKERIRSMDGDGELMLTILASFAQEESRSISDNVKWGIRKRMQNGIPNGHFRIYGYRWEGDELVIVPEEAEVVKRIFRNFLDGKSRLETERELAAEGITTRDGCRWVDSNIKVVLTNVTYTGNLLLQKEFISDPISKQRKKNRGELPQYYVEDTHPAIIDKATFDFVQEEMARRRELGALANKSLNTSCFTGKIKCPYCGQSYMHNKRTDRGDMEFWNCGSKKKKKKGTGCPVGGTINHKNMVKVCTEVLGLDEFDEAIFLEKVDHIDVPERYTLEFHMADGNVVTKDCLNTGHRDCWTPERRAEVSMKRRKNGTNPIGASCFTGKIKCVSCGCNFRKATRNCKDGSKVSHWRCAEHNGCDSPSLREDLLEQMAAEVLGLDAFDAAAFREKIDRVEVLSSSELRFCFKDGRTVSRNWQPPERVGRPWTEEQRAKFKESIKGAYTPERRRQMSEHMKQLRKERGDKWRREK

SEQ ID NO: 23514 - protein, 521 aa, synthetic construct
MNRKITTIQANKKLSHQSKLPSINKKKVAGYARVSTDNEDQTSSYETQMKYYEEYISSRKDWEFVKMYSDEGISGTNTKKRLGFQEMVNDALAGKIDLILTKSVSRFARNTVDSLSTVRKLKDVGVEIYFEKENIWTFDSKGELLITIMSSLAQEESRSISENITWSKRKQAAEGKVTFPYNNVLGFKPKEDGGFEVDKEQARIVRYIFGQFLSGKNPNQIAKHLTENKILTPRGKEKWSYSSVRSILTNEKYKGDALLQKYYIADFLNKTQKRNNGELPQYYVENSHEAIIDKEVFDAVQVQLSENKKWYTEKNYFGKIRCGCCGSSYVRHLWHSNDKYRETIYRCKDKYKNEEKCDTPHIRDDEIQRWIVSALNKVIDNRKEIIGNIKLLMKMIKEDRGLDDEIIQLEEKLENIRTDVEKLIITNSKIAQDQEEYTRKYNKLIEEYKLLEKQLEQRNLDLLSKNKRVRELKIFIDSLEKQDELLTEYDTKLFNYLVEKLIIHKEKRIEIHFKNGEVISI

SEQ ID NO: 23515 - protein, 521 aa, synthetic construct
MNRKITTIQANKQLSHQSKLPSIKKKKVAGYARVSTDNEDQTSSYETQMKYYEEYISSRKDWEFVKMYSDEGISGTNTKKRLGFQEMVNDALAGKIDLILTKSVSRFARNTVDSLSTVRKLKDVGVEIYFEKENIWTFDSKGELLITIMSSLAQEESRSISENITWSKRKQAAEGRVTFAYNNVLGFKPKEDGGFEVDKEQAQIVRCIFGQFLSGKNPNQIAKHLTENKIPTPRGKEKWSYSSVRSILTNEKYKGDALLQKYYVADFLNKTQKRNNGELPQYYVENSHEAIIDKEVFDAVQVQLSENKKWYTEKNYFGKIRCGCCGSSYVRHLWHSTDKYKETIYRCKDKYKNEEKCDTPHIRDDEIQRWIVLALNKVIDNRKEIIGNIKLLMKMIKEDRVLDDEIIKLEEKLEDIRADVEKLIIMNSKIAQDQEEYTRKYNRLIEEYKLVEKELEQKNLDLLNKNKRVRELEIFIDSLEKQDELIIEYDTKLFNYLVKKIIIHKEKRVEIYLKNGEVISI

SEQ ID NO: 23516 - protein, 435 aa, synthetic construct
MAAYCRVSTDQDEQLSSYENQVRYYKEFIRQNPLYELVDIYADEGISGTNTKKRTEFNRLIADCRKGKVDRIIVKSISRFSRNTLDCLKYVRELKELGIGVIFEKENIDSLDAKGEVLLTILSSLAQDESRSISENATWGIRKKFERGEIRVNTTKFVGYDKGENGNLVINEEQAKIVRRIFRDFLQGETPESIARSLKEEGVPGWNGKANWYPTTVQRMLQNEKYMGDALLQKTYTVDFLTKKRSENQGQVNQYYIEGNHEAIIDKEEWELVQLEIERRNQFRHDNYINFYIIQCEQNPFTCKVFCKECGGLFGRKNWTTSRGKRPVWQCNNRYKVKGIQGCTNRHIDEETLQQAFLRAVEVLREKKEKLRDKWDNFREEQKLERYHAAKLKETLNSNQEEFNGRKMCQVLEKISLGEDGNITVKFLEGTEVNL

SEQ ID NO: 23517 - protein, 407 aa, synthetic construct
MKPEKKRVCAYARVSTMTEKQQDSLTNQQSYYNHFYQNKKDVEFIGVYYDQGISGKLAKRPGFQQMLEDCRAGKIDVIHTKSISRFARNTELLLAVSRELKTIQVDIFFEEQNLHTLSNEGEVMLTVLASYAEEELRNMSENQRWAFQKKFQRGELVINTKRFLGYDKDENGELIINPEEAKIVKRIYNLYLSGMGVHVIAKLFNEEEVPTVDGGRWYSSTITNILKNEKYKGDAILQKYYFAEIKAKQRLNKGQVQQYLITDNHEAIVSREDWEAVQKRLKQNRKANLSIDYNRRYPLSGLLKCEHCGSTLKRQKYYKGKVVWVCSKYIREGKVACIGMRVPDSAVQDWSIHEPTVVKEENIGGKKYYSYSSKENDTSRAEATHSENPNGGLLPSIHRPRRTAIKL

SEQ ID NO: 23518 - protein, 434 aa, synthetic construct
MERVVERVDALIPAQPRALRVCAYARVSTGKDAMLHSLSAQVSYYSKMIQSHNGWLYCGVYSDEAVTGTKRERAGFQHMIEECRQGNIDLVITKSISRFARNTVTLLQAVRELKSLGVDVFFEEQHIHTMSADGELMMTILASYAQEESLSASENQKWRVRKAFENGEIINLRFLFGYDITPDGIQVNEKDAAIVREIFARFNGGESMSSICRDLDARGHKGVLGGTWCAERMRNTLSNEKYLGNALLQKRYRNNHIEKKLLPNRGELPMYYAEGTHEPIIDQATFDKAQERLRMLAQQTANRKKPTRSVFSGLIHCGLCGNTYKRVTYRKKHYWNCTTFQTKGKSECAAKRIPEETLEVLTCEVLGEGGIDSDMVRSKITAIRAEINNVVVYCMDDGSEIVKRWKDRSRAESWTPEMKEKARQRALQARRKKE

SEQ ID NO: 23519 - protein, 529 aa, synthetic construct
MNRTAARSVTVIPPTINPLTHLSKVAVQKRRVAGYARVSTDSDEQFTSYEAQVDYYTQYIKRNPEWEFVKVYTDEGISGTNTKHRIGFNEMIADAMSGKIDLIVTKSVSRFARNTVDSLVTIRKLKEKGVEVYFEKENIYTFDGKGELLLTIMSSLAQEESRSISENVTWGQRKRFADGKVNLPYKQFLGYRKGADGFPEVVPEEAIVVHRIYTRFMEGLTPGAIAKELTADGIPTPSRKQRWQTSTVESILQNEKYKGAALLQKCFTVDFLTKKRKVNEGEVPQYYVEHSHEPIITPEEFDKVQTELARRKRISRQYSGKSIFSSRIVCGDCGSYFGSKVWNSTSKYRRVIWQCNGKFKGEHKCETPHLDEETIKARFVAALNAIIESKDNILEDCRLMQATLTDCTGIDTEIETLLEEVEVVTELTKRCIAENSQTAQNQEEYAARYNGFVERYEKAKAQLEQLRATKAAREAQAEAIGAFMFEVQELDALTEFDEKLWLTVIDTVTVHADGRMTFKFQGGKTLTSY

SEQ ID NO: 23520 - protein, 521 aa, synthetic construct
MNRKITTIQANKHLSHQSKLPSIKKKKVAGYARVSTDNEDQTSSYETQMKYYEEYISSRKDWEFVKMYSDEGISGTNTKKRLGFQEMVNDALAGKIDLILTKSVSRFARNTVDSLSTVRKLKDVGVEIYFEKENIWTFDSKGELLITIMSSLAQEESRSISENITWSKRKQAAEGRVTFAYNNVLGFKPKEDGGFEVDKEQAKIVRYIFGQFLSGKNPNQIAKHLTENKIPTPRGKEKWSYSSVRSILTNEKYKGDALLQKYYVVDFLNKTQKRNNGELPQYYVENSHEAIIDKEVFDAVQVQLSENKKWYTEKNYFGKIRCGCCGSSYVRHLWHSTDKYKEIIYRCKDKYKNEEKCNTPHIRDDEIQRWIVSALNKVIDNRKEIIGNIKLLMKMIKEDRVLDDEIIQLEEKLEDIRTDVEKLIITNSKIAQDQEEYTRKYNKLIEEYKLLEKELEQKNLDLLNKNKRVRELKIFIDSLEKQDELLTEYDAKLFNYLVDKIIIHKGKRIEIHLKNGEVISI

SEQ ID NO: 23521 - protein, 535 aa, synthetic construct
MNSYDISFRPEEVIQYLRKSRSDDPNMTIEEVLEKHEHMLRDFAVNHFGAPVPDCNVYREVASSETIDGRPEMLRLLRAIESPDIRAVLVVDVQRLSRGDLEDAGRLMKLLRYTNTQVITPMKTYDLRDEWDRDIFERELKRGNEYLEYFKKIQARGRLQSVQEGNYLGSKPPYGYDRAVIRIGKKNCPTLAVNKEQADVVRLIYELYVNKDWGAQRIANHLDSLGIHPLHNAHWNPAVIKDILRNYHYIGKVVWNRRKTITVVDNQEVYKTRPWNENMLIFDGRHEAIISEELFHAALARQGRSHRCRPDTKVSNVFASILHCSCGYSMSLRHDGRGSLRLSCDDQRHCKSGSIGYEELIDYICKVLTAYIDDFKIKVKHDNANEVYIHRALVSDLEARLAALEAKEVKQWEVYSMEGMPRAIFDKLNKQVKEDKAEVERALKQARKDSPDPVDYRERIAKFGDALNALQNPAASAEIKNQYLKAIINDMIYTRPGAVRLTADNCSDYGINYKDMAKRGGWYSPPFRLEIKFRF

SEQ ID NO: 23522 - protein, 525 aa, synthetic construct
MKKAFAYARFSTDMQREESIDAQFRAIKEYCSRNKISLINFFKDEGISGTTDNRPAFQEMIKKAEEVDYIIVHKLDRFSRNKYDSAIYKRALHQKGVRVLSVLENLDNSPESIILESVLEGMSEYYSKNLSREVKKGLYENAYKAKFNGGVPLFGYSIDENKNYIINEYQAIAVRLIFEMFSKGHSYSEIITELNKRGYKTNKGNNFKKTTLHDLLANERYIGTYVFSREDYDMENRKRNSHKFKNRNDMIIVENGNPAIIDKKTWDLVKERQSLNKKISNKAKWTYVLSPFLYCNQCGKKMSGFTRKNKIGKYYQHYRCINTSCEQKSVRTDILESEFYDAFNKLIFNDSNKKLLVEKINNFIKMKNSNNDNSKIENELKDIEQQLNNAVTFILNGSSSQTIKNKIEELEQKKYNLQNELIQKSQKHNNINSKEIINFLNRYDKLEKFSIPEQQTILKFFIDQLRYEKGKLIIKLKLAEKPPPTLKNNENGTELPAPFQKLTFLLVFFIVKQQGSREPTRCEAS

SEQ ID NO: 23523 - protein, 556 aa, synthetic construct
MKGAVIYARYSCERQTEQSIEGQLHECYKYAEKNGLSILDEYIDRATTGTNDNRPAFQKMLADSERTTAWDIVLVYAIDRFGRNSIEIAINKQKLIKNGKNLISATQRTSTNIDGSKNLDGILLENVYIGLAEYYSAELSQKIRRGLTESRNKGLFCGGKVVYGYYVKDKTIYINEAETETVRYIFQEYNNGKTIPDIIEVLDARGIKYKGETFKKNFLYRMLRNEKYIGITKYDGVEYKNIYPPIIKEDLFNAVQSRMVTYSVGAHSKDADLLLKGKVVCGLCGHMMNGDCSTSRSGKLMHYYKCSGRKRGTGCESRILRQDKLDEFIVDVTKQVFCSKENIQLLVDKVIAVHKQRQKDESILNSLKSRHSDLVKSINNMLFALQEGIITPSTKERLNMLESDKAEIEEQIAKEELALSKQISRDDVEYYLRRAIKSSPKILLNNLVDKVIVYNDKIEIYYKYCHKIPDDPDDQRGYFFEELRIPINCGKRNRQFLPIMIDHQKMIASVKYILNRKKKMLAPINYKKRPILASQNVTGADGYLLVEPRGFEPLTF

SEQ ID NO: 23524 - protein, 447 aa, synthetic construct
MREIQLVTPNNRPILVRKRVCAYARVSTAKDAMLHSLSSQVSYYQKYIQEHKDWEFCGVYADEGLTGTKESRAQFQEMLKECRYGNIDIILTKSISRFARNTVDLLNTVRELKSLGIAVYFEEQNINTLSSDGELMLTILASYAQEESLSASENMKWSIRKGFENGELCCFRFMYGYRIERGSVTVCEEEAAIVQEVFDRFAKGESMLAIAKDLNARGISTHSKRQMRWSGKRIGKMLTNEKYAGNALLQKTYINNHLEKKRMVNRGELPKYYAEQTHPAIIDAQTYRLVQERIERNRGRHTVKIACLKSAFTGKMFCGYCGEPVWRGKNNGRTIWGCRNARGKGVLTCHAASIRNDILEETCCSLFGLSTFDPTFIDQNVREIILYDNRLVFSMTDGREEKISWKNKSRSQSWTPEMKERARQRTMERLQNRRINDADSKGNTSDS

SEQ ID NO: 23525 - protein, 525 aa, synthetic construct
MPTVKVIPATRDFHTGIEKTTTRKKRVGAYARVSTDSDDQLSSYEAQCDYYTRYIKSRPDWEFVGLYADEGISGTNTKHRDRFNAMIADALNGKIDLIITKSVSRFARNTVDSLTTVRKLKEKGVEVYFEKENIYTLDGKGELLITIMSSLAQEESRSISENVTWGKRKLFADGKVTLPYSSFVGYRKGADGLPEIEPEGAKIVRRIYTEFLNGRTARQIADGLSADGVPTPRRAKKWRCSTIISILTNEKYKGAALLQKSFTVDFLTKKMKPNEGEVPQYYIENSHPAIIEPVEFDLVQAEMQRRRKLGKTYSCSSIFASKIICGDCGEFYGEKVWHSNDPYRKIIFRCNHKYNNEKEKCRTPVISEQQIKETFVVAYNALMTDKTGVIADCRALQHSLTDTTAMEQEISDLSKQLDDSTAELRQHVEENMRLAKNQEQFWKRYNTLEERCNSLSDRLAKLQTCVKERKQRADVISGFMFEIRERDGILDEFDEELWKTLLESVTITREGKWLFKFKNERVIEV

SEQ ID NO: 23526 - protein, 413 aa, synthetic construct
MNIRKIEAKNNKRKKRICAYVRVSTTNGSQLDSLENQKVSFEKLYAERDDVEFLGVFCDKGISGSKYDRPDFQTMLDACRKGQIDVIHTKSISRFARDLINVLEISRELKTLGIDIFFEEQNIHTLSNEGEVVLTVLASLAEEELQSMSGNQRWSFRRKFQKGELLINAKRFLGYDLNEKGELVINKAEAQIVRTIFYSYLEGMGTHRIAKKLNEGKVPTVAGKKWYDSTIRNILKNEKYKGSLLLQKYFHDGVNGPKKLNQGQVEQYYIEDNHEGIVSKETWEKVQVKMKSRSRIQGTNKTYKFSRMLKCQYCGSTLKRQVSYKKKIVWCCSKYIKEGKNSCKGMRVPERDIEDWKLSSPVIVLERIEDGEKHYSYTGQKTSANGQISNSEKGQGSRLLSSVYRPRRTAIKL

SEQ ID NO: 23527 - protein, 428 aa, synthetic construct
MSTDQDEQLSSYENQVNYYREYILKHEDYELVDIYADEGISATNTKKRDAFNRLIQDCRDGKVDRILVKSISRFARNTLDCIKYVRELKELGIGVTFEKENIDSLDSKGEVLLTILSSLAQDESRSISENSTWGIRKKFERGVVQVNTTNFMGYDKDEKGNLIINHEQANVVRYIFDRFLEGYSPEFISKELREQEIPGCTGKSKWCPSAIWKMLQNEKYKGDALLQKTYTVDFLTKKRIDNDGQVNQYYIENNHEPILDREKWEIVQLEIARRKKFREQHKLQFYIIQKENNPFTTKVFCAECGSAFGRKNWTTSRGKRKVWQCNNRYRLKGQIGCLNNHIDEEMLEKAFMKAVGLLKEHRSDVVAKWQKLVQGANLLHKHYAKQMYQILDLDKFDGVIMNQVLDHISISEAGQIVVTFLEGTEVDL

SEQ ID NO: 23528 - protein, 573 aa, synthetic construct
MAKVKLPDKPRVAIYTRVSTLHQIDKDSLPMQRQDLINYARLILNTEDYVVYEDAGYSGKNTDRPKFQEMMQQVRLGMFTHILVWKIDRISRNLLDFATMYSELKQLGVVFVSKNEQFDTSSAMGEAMLKIILIFAELERNMTSERVTAAMLSRAANGQWNGGRVPLGYDYDPETKTFTINESEAAVVKIIHDKYEQERSLVSLARYLNGHGYRTRTGCTYSPSTLLIILRNVFYCGDYRYNVLKDGDRQKRKKESEWITVKDHHPAIISREQKDEIARILKENRRLECERRGIYSKKKNVHVFGGLVICGNCGHAMTSTIRPADQDGIRWSVYVCPTKRRSEYLCKGRATSEVVLGEFVFNYILNMLNVQKNFDSINSVEDMEKMLLSGSTFRDVDGIERAGLDDLYNMLASGLTEKAPFDSSVEVRKKPVVSDIELENLNTEKTKIERAAERLQSLYLYSDDSISQKDYIIQREKLMSQLAEVNEQIGMVMSNADEKDVSDEEFVHAASKFILTQKLEGRTYIYYKRLATTVSREVLRSFVMSIIENITIYDGRVQTIVFKNGLSHTFILK

SEQ ID NO: 23529 - protein, 465 aa, synthetic construct
MARSITVIPASQPYRVGGRTQQKTRNLRVAAYCRVSTDQEEQLNSFENQVEYYTKYIQDNPLYQMAGIYADEGISGTNTKKREEFKRMIRDCEEGKIDLVITKSISRFARNTQDCLEYSRRLKNLGIGIFFEKEHINTLDASGELLFTILSSLAQDESRNISENCKWGIRSKFKKGIPQVDCTKFLGYDKGDDGKLIVNQEQAKIVKRIYREFLNGYNPAAIAKMLMEDHIKTGTGREEWRSASVRAILKNEKYMGDALLQKTYTADFLTKKVKKNHGEVEQFYVKESHEAIIPKEQWEAAQLELERRDSYMQELGLTFYGYGSEVNPFSCRVVCGKCGAVCGKKSWKSREVEFWQCNNRSKNHGVKGCASENLPHENLLKGFITAWNQIVAEREQYLPKWEKNKKDGNPLERLRAEQMIGLTLQPPLTKMLPELGQMVLERVIVQGKEIMVIRFLDGTEIKVKI

SEQ ID NO: 23530 - protein, 503 aa, synthetic construct
MKKAFAYARFSTDMQREESIDAQFRAIKEYCSRNKIFLVNTFSDEGISGTTDNRPEFQKMIKQAEEVDFIIVHKLDRFSRNKYDSAIYKRELSQKNVRVISVLENLDDSPESVILESVLEGMSEYFSKNLSREVKKGLYENAYKGKFNGGIPLFGYSIDQDKNYVINEYQAIAVRLIFDRFAKGSSYTEIINELDSLGYKTVKGNSFKSTTLYEMLSNERYIGTYIFSKEDYNLRNKKRNSHRYKNREDMIIIENGNPAIIDKKTWNLVKERQKLNSKTSNKSKWNYVLSPFLYCDECGERLNGTTRKNNQGRYYHYYRCVNKNCSQQSIRTDFLEEEFYAAFNEAIFSEENKKTLAKRMKEFLDNKKINIDKEKIENEIKEVEKQINNCVDFILTGSNSISVKNKIEELELKKFNLQNELLKSKVSENKIDINSIIEFINKYDKLEKFSIQEQQIILKFFIEKLKYKKGKLTIRLKLTEQCPASERGLVNGTEFPAPCYYGQ

SEQ ID NO: 23531 - protein, 570 aa, synthetic construct
MIENKNLRIAIYIRVSTLYQVDKDSLPMQREDLTNYCKYIFNTEDYEIFEDAGYSGKNTGRPAFQEMMIKIRKKEFTHILVWKIDRISRNLLDFSNMYEELKKYGVTFVSKNEQFDTSSAMGEAMLKIILVFAELERKLTSERVSATMISRATKGLWNGANVPIGYKWDPDTKFPIPDPNEAKTVQLIYDMYIKAKSCLALAKHLNTENIPTKRGGKWTSKTVNDILRNPFYKGTYRYNYRESARGRKKNENEWIIIDDNHEGIIDKTVWQLANDILDSNAGLLKTKYRKYKHIHIFSKKLTCTKCSNGYIATKDKARNDGYMPSKYRCAGKMHKHICDAKLVSDVVLGPFILTLIKNIINAGNMYIDTIQELEDILLTGDPFKDVLSINKEDLEILYIALFHVPATTKNITYKSTLESLPKDNEEMERDFLKKKLEKFKKDKMKYSKALERLEDLYLFSEESMSKVDYLLKKKQYESKLDEIEQNLKQFYRMNDKTRNIKDMTFVLNYEEFLFNQMLGKKELNFKHLMTNTNNNVIKDLIDTIIKTIYMHDKTVVSVEFNNGIHLHFNY

SEQ ID NO: 23532 - protein, 502 aa, synthetic construct
MSETTQIGVIYARYSSDKQRDESIDGQIRECMAYAEREGITITNTYIDRALSAKTDDRPEFRQMILDSNKQAFNYVLVYQLDRFSRNRYDSAIYKAKLRKNGIRVISVKENIKDDPSGIILESVLEGMAEYYSAELSQKVMRGMTDNVLQGKWVGTVVPYGYKLSNNRQLEINEHEANVVRKLFDMYLQRHTLSEMASYMNANGHLTHKGKPFNTNSIKAIISNEKYIGVYSWGSERIENAIPPIIDKSIFEKAQHKRNLRAKKKGNRSELYQLCGKLECGRCGGNYVGSTGTSKTGALHHYYVCSNRRRKNACQAQNIRRDDLDDIVISQTLAILNKANVVNKIAKYAASSGKNLQSETVAQIDIINAHIRDLKKSLDNYMTAIANGFISDVLKHRIEATEQELKDQIEIKTNLENTIIPVELTEDHIRFFLLKMAKENPSTLRGRARIIEAFVHHVTIYEDHIEIVFNYKNELSEFHDKTLESSLLNDLVTQKGFEPLAF

SEQ ID NO: 23533 - protein, 430 aa, synthetic construct
MSTDQDEQLSSYENQVNYYREYILKHEDYELVDIYADEGISATNTKKRDAFNRLIQDCRDGKVDRILVKSISRFARNTLDCIKYVRELKELGIGVTFEKENIDSLDSKGEVLLTILSSLAQDESRSISENSTWGIRKKFERGVVQVNTTNFMGYDKDEKGNLIINHEQANVVRYIFDRFLEGYSPEFISKELREQEIPGCTGKAKWCPSAIWKMLQNEKYKGDALLQKTYTVDFLTKKRIDNDGQVNQYYIENNHEPILDREKWEIVQLEIARRKKFREQHKLQFYIMQKENNPFTTKVFCAECGSAFGRKNWTTSRGKRKVWQCNNRYRIKGKIGCLNNHIDEEMLEKAVVMAVEQLSKNVDLLHGKWNKVLEENRPLEKHYSLKLAEMINKPLWEFDSHEMCQVLDNIIIAEDGQITVRFLEGTEVDL

SEQ ID NO: 23534 - protein, 413 aa, synthetic construct
MNIRKIEAKNNNRKKRICAYVRVSTTNGSQLDSLENQKVYFEKLYAERDDVEFLGVFCDKGISGSKYDRPDFQTMLGACRKGQIDVIHTKSISRFARDLINVLEISRELKTLGIDIFFEEQNIHTLSNEGEVVLTVLASLAEEELQSMSGNQRWSFRRKFQKGELLINAKRFLGYDLNEKGELVINKAEAQIVRTIFYSYLEGMGTHRIAKKLNEGKVSTVTGKKWYDSTIRNILKNEKYKGSLLLQKYFHDGVNGPKKLNQGQVEQYYIEDNHEGIVSKEIWEKVQVKMKSRSRIQGTNKTYKFSRMLKCQYCGSTLKRQVSYKKKIVWCCSKYIKEGKNSCKGMRVPERDIEDWKLSSPVIVLERIEDGEKHYSYTGQKGTSNSHISNSEKNQSSRLLSSVYRPRRAAIKL

SEQ ID NO: 23535 - protein, 463 aa, synthetic construct
MSEKIKRCAIYIRVSTSEQMMHGKSLEAQREYLERYAKEHNMIVVGIYADEGKTARKELKKRKAIHALLEDVKAGKIDMILFWRLDRWFRNLSDFYKVQDILDEYDVHWLSASEPGINMETRDGRLQLNVVLSIGQNEVDTTSERIKFVNEASIRQGKLIFGEANMGFGYKSGIVDGVKRMIKDPETEEATEAFFKYLLSHQNKSETVRYMQKHYYPDFSYSMLRTMVSSEFYKGTYRGIPYCPAYITEQEWLQLQELSRKNIKQTPSGRIYLFSGLIRCPVCGQKLAGTGCSSIINRKTKEKRTYCYYRCNRAILDRLCTSRHRVSQNLIEKYLLENLSEEYKKYQIRYTKICEQKKKIKDTRTPEKLNKELDRLNLLFQKDRITWEYYSTEYDRIEKELKELSAIQPEAEKDFTYLEELLRSDFKKIYEQLTPENRRTFWRSTIEEIHLNEDYTVESVDFL

SEQ ID NO: 23536 - protein, 497 aa, synthetic construct
MEITVEKVNNAGQNQKRALNTLNGVRVAVYARVSTDQEIQLHSLDEQMKGFKMKIAQNPGWVLVDVYADEGITGTSVRKRKAFLRMMDDCEAGKIDYIMTKSISRFARNTVECLSYVRHLQSIGVQLYFEKEGIDTATAVSELILTVMAAFAQEESRSISENLKWGIRKRFEEGKTRWTPTYGYRKTKTGEIVIDPDEASIVRFIFEMYQHGMSIPDILEELSHMEVPTARGNKKWTKTTVKYLLQNEKYIGDARLQKWVSIDHISHKSVLNESTTMPSIYVKDHHIPIIDRHAYQQVQRIMDLKTPHGEYSRYPYYDTNFVCPLCGKKMIPKALKSNGYTRIIGCFDDDGCRGYALKVELVDAALLDAFNSLVIKGKYSVAMKRMMEIKEESPKMESVQYYWLNDLVERVEFAGDTMKVFWKCGLYSEKELHAVNAAEPTHVAEIYRNYVIRKQQKKNKPIVKKGRKSTEKKVSRKTAAMQAAQNLRTRKRKGATA

SEQ ID NO: 23537 - protein, 465 aa, synthetic construct
MAREVVHIPARPQVVGTRTMPEKKIRLAAYCRVSSEQDEQLNSFENQVSYYKEYISSHPDYELAGIYADEGISGTSTKRRDEFNRMIADCEAGLIDMVITKSISRFARNTQDCLMYSRRLKDLGIGIRFEKENINTMDSTGELLFTILSSLAQDESRSISENCQWGIRSLFKRGIHHLNTNRFYGYDSDENGKLVINPEQAKVVKWIYESFMEGINPDVMVKILNEKEVPTCMGKSKWTCNQIKSILRNEKHMGDAVLQKTYTPDYLTHKSVKNEGQLPQYYIKEDHPPIVSQQLWEAVQLELDRREAFMKKHFLTSMGQYTDENPLSHRIICGICGHTFSRRTITRLEGRIKVWQCGQHYAKKGEHLCDGRTIREEDLYKAFQLAWNHLVEERDNKGKDWKKKMAEGNALEAYRAEQFLRLTADGGRIKEGKPLVSTVLDHIVFEKNGDLTIYFLDGSQVCVEP

SEQ ID NO: 23538 - protein, 500 aa, synthetic construct
MIAIYARQSVEKEDSISIESQIEMCAYEARGEAFLIYKDKGFSGKNVNRPEFQQMMQDIKSGRKGITKVIVYKLDRISRSILDFSNMMDIFGKLGVEFSSATEKFDTSTPMGRAMLNICITFAQLERETTQQRVRDSYISRSRKGFYMGGPVPIGFKKVDLIMDGIKTSMYEQVPEEALLVKKVFEMYSDVNFSNEDIAKAVRDMPPACRRNRTVTRARIQDFIKNPIYVKADLDIYNFFKSKGVNIINPPEDFIGTNGCYLYTGEKKTRKQTDLSNAVLVIAPHEGFIDSDLWIRCRERAIDQQQIKRNPKAKNTWLAGLLKCGNCGYALVRKNYKNRDANYFLCSHKMNDNLCRGCGTIHADEFEALILAKIKEKLADFREFEVKNTNDANNPKIEELKARQAAIENEINETVKNVSGASETVMRYINENVERLHSERMQIQDEIQRLESSRYSLNEKVICDFDKFDELPFERKRELANAVIKKIYATSDEINIIWNI

SEQ ID NO: 23539 - protein, 426 aa, synthetic construct
MRIRMLESVQNRIPRKKRVCAYARVSTDSRKQGESLENQISSYERFLKANPEYEFVGVFADQGISGFSRNRPEFQRMVQMAKDGQIDLIITKSISRFARNTAVLLETVRELRLIGVAVYFEEQNINTLSGDGEVMLTVLASFAEEESRNVSENRKWSIRKKFERGEYMINTERFMGYDKDEFGELVINSKEAMAVRFFADMYLLGVGSSRLGQLADFLGIPSVTGGKWTGGSFMGMFKNEKYKGDFHLQKYYTPEDKRNQTVRNNGEVQSYYMEDSHPAILSTEVWDALQEKIEANKRDRNIAQSDTQKYQNRYPLTGILYCPYCGKTLRRRIGYKKKVEWLCSTYIEEGKQACPGVRIPDESASRQDIIEPTVAEEVYRNGKKHYRYTSKAEFGSRERESCTEEETAGGGVLQGEYRPRRTAIKL

SEQ ID NO: 23540 - protein, 440 aa, synthetic construct
MAAYCRVSTDQEEQLLSYENQVRFYTESINSNPEYECAGIYADEGITGTNTKKRDEFNRMIVDCRTGKIDRIITKSISRFARNTLDCLNYVRELKGLGIGVTFEKEAIDTLDAKGEVLLTILSSLAQDESRNISENSTWGIRKRFEIGQHKMSTKRFLGYDADENGKLVVNKQQAKIVKRIFMEFLWGKTTDYIKRIFEREGVINWDGGTKWQSTTIGSMLENEKYKGDTLLQKSYTVDFLTKKRVQNEGEIQQYYIEDDHEAIIEPWIWECVQLEIKRREQYLEEHNVTRFSQNTEVNPFSSKIICGECNRAFARKGWRTPGGDRKVWQCSERYKVKGVLGCGNRHIYEDTLIEIYLMAWNRLLECREMLMPEWNEKMQGEDLLAKFRAMDFMEITKDAQSVKELNIDLMLRTVENIKVYESGMVVTVFLDGTEIEYQS

SEQ ID NO: 23541 - protein, 523 aa, synthetic construct
MRFFSYGRKSVFSDKSDSIDNQFRMNREYCESKFSGQVDSWQQFSDEDFTGANTSRPDLQRMLSFIKGGFCDVLVVYQLDRLSRDVRDFANIYALLEEHGVMFISIKENIDTTTPIGRAMMYVTVVFAQMERETIAARVTDNMLGLAKKGYWTGGNPPVGYVRKHIVVNGKKHCSIEVDPDGARYVTQIFDTFLAYNCSLQGMETRFKNQGIRTQSGKFFSTTQLHKMLTMPYCVEATPEVYDFYAAKGCIMDPGSPREMWDGSVGVIIYGRSTEKNKKHQAQPPEKWTVCLGKHKPFMPAEKWLAVQSRFTQNKCIKDAKWPVPLLKGVLRCKCGNLMQVSRKKKVDGTCSSWYYCRKRMRQGVDACDMGQIKCDLLDEEVLELFRGITADPALIQKFVKAEAPADVPDLKAAQARVSACERKIGRLAASLALAEDSAASKYIIAEMERLDVELGALKREASLAEMESHRAAASAKDAKATAAEISKLIHGLDGFDDKEKNAIARAVIQECTWDGERLFITL

SEQ ID NO: 23542 - protein, 502 aa, synthetic construct
MEIQIREGNSIQKRKLKVCAYCRVSTDADEQENSLENQIRHYEEVITSNPDYEYAGVYSDFAISGFKEKRPGLQKMLADARKGKIDLILTKSVSRFARNTSIVLEATRKLKELNVGVFFELQNINTLSGEGELMLTILAAFAQAESESGSVGAKMVYQRKYEAGIPVQYLERSFGFKKDERGVYIADEEEAVWVRKIYEMAADGYTPASIKRHLNENGVKTVGGAEWIDSTVFRLIENEIYKGDYIMHKHFVNKERKLVRNRGEVDAWYIEDDHEAIVSPELWQKAQDALEAKRDYLAESSVIEEFTEENYPYMNKIFCARCGHPLYKRIYSNGNRLNWGCSGTKRYGKSFCEGINIPDGVLRGAWNFDENMYIGEKPTDKGKKEFTYLKEASWKRRHKKKEPEPIPENTETEYPYREKIFCGLCGSRLVRHVNTKSHKVIWVCNGRKRKGKDFCDGTRVPDTIIKGWGEIKKDIYIQRKDDKNGKKRYSYTSKKSKGADRA

SEQ ID NO: 23543 - protein, 521 aa, synthetic construct
MGNVMVIPAKRQVGNTARQQDAKPKLRVAAYCRVSTDSDEQATSYDAQVEHYTEFIQKNPEWEFAGIYADDGISGTNTKKREDFNRMIDDCEAGNIDMIITKSISRFARNTLDCLKYIRQLKDKNIPVFFEKEAINTMDAKGEVLITIMASLAQQESQSLSQNVKLGLQFRYQNGQVQVNHNHFLGYTKNVDGNLIIDPEQAEVVKRIYREYLEGYSMDRIAKGLEADGILTGAGKTKWWTSTINKILRNEKYIGDALLQKTYTTDFLNKTRVKNNGIVPQYYVEGNHEAIIPKDIFLRVQEELVRRRVVKTSTNGKKRSYSCNHCFAQIVICGKCGEMFRRIHWNNRGCKSVVWRCISRLEPTGQECRARTVNETVLENVVVQAINMLLGDKSTYQAQLQQNIAKVIRSAQQNTADGIDEKLQSLQKELLKKANNKEAYDEIADEIFKLREQREKCTVDTAARDAQITRINELQDFIKQQPAHLEAFDEALVKRWLERIIVWEDHFTVELKSGLKIEIEG

SEQ ID NO: 23544 - protein, 640 aa, synthetic construct
MRRKKDKSNGITALYERLSRDDDNAGESNSIVHQKQMLEDYAMKHGFTNLVHFTDDGWSGATFDRPSWNRLVEGVKNGEITACICKDMSRIGRDHLQVGFFTDILFREKEVRFIAINNGIDSDRQETSEFAPFLNIMNEWFVRDTSKKIKAVLKSRGSSGNAHTSNIPPYGYLKDPENPDHWIIDEEAAEVVRRIYRMTIEGKGPYQIARELSEEKIERPSYYLGKKGLGNHASNYDKENPYMWRGNQVTTLIARPEYIGKTVNFRTFKNSYKDKKTKRADKEDWVVFDDTQEPIVDEETWLLAQKLRQNVRKADPMGEPNVLTGKIYCADCGAPMYNHRQRKGRERIYYTAKGEKRTSYSNPADCYECSTYNLAYQKYDRHCTCHHISTKALKSIILKTIQETCHYVSLNEREFVYSLQEESAMKDIAVSETVKNRIERNQKRVHELDMLIRKIYEDNVIGRLPDRLFQSMLTDYENEQNELNKIIETDTADMQRIIGGQNNVERFLKLVKKYENITELTPAMINEFIDKILVHEPQGKGADRTTEVEIYLNYVGQFQVPVEQHEPTEEERIAAEKEAERLRRKRESNRKYMKKIREKSKEFAEHERIAEEKSSDSNVCVEQNVTSKSNRQKVKGEKIA

SEQ ID NO: 23545 - protein, 524 aa, synthetic construct
MAGAKNITVIPAKKRVGNTATAESKPKLKVAAYCRVSTDSDEQATSYDAQVTHYTEFIRKNPEWEFAGIYADDGISGTNTKKREEFNRMIEDTMAGKIDMIITKSISRFARNTLDCLKYIRQLKEKNVPVFFEKENINTMDSKGEVLLTIMASLAQQESESLSKNVKMGIQFRYQNGEVQVNHNWFLGYTKDENGHLIIDEDQAVVVRRIFREYLQGASLRTIADGLMADGIPTATGNKKWRGDGIRKILTNEKYMGDALLQKTYTVDVLTKKRVSNNGIVPQYYVENNHEAIIPRQLFMQVQEELFRRAHLKTEGGKTKRVYSSKYALSSIVYCGKCGDLFRRVAWKARGASYNKWRCASRIEKGPKKGCDADAISETEIQNAVVRAINKTLGGREQFLVQLQHNIEDVLNGDSTATLEYIDQRMAELQEKLVMCVNKNAEYDVIANEIDALREKKAAVVTKDAEQEMLKKRIEEMRQFLQTQSSRVTEYDEQMVRRLIEKITVFDNKLIFGFKSGMTLELKR

SEQ ID NO: 23546 - protein, 569 aa, synthetic construct
MTNQKEKIVALYVRVSTGYQVDKDSLPFQKKELKAYCEHVLHVDKKRIEVFEDAGKSGKNTKRPAFERMMEKVKAGKVSHVVVYKIDRITRNLVDFSLMYDDFKYNNVTFISLNEQFDTSSAIGEAILKIILVFAELERKLTSERVTDVMIGRAQSGQWNGARVPYGWDWDAENKCPVHSKKEAPYAKAMYQMYLDGGSSVTIRDYNNSHNIPTKRGGEWTSKTVADFLRNPINKGAYRYNYRESARGKRKADEEVIYMEGVFPPLIDPEIWNEVNRRMDANHTRKNTSAMHPIRKNCNVFAGLIVCGKCGSKYQVTAKDRRRGNGFRPSSYACTGKYQKKHCDNLNVSDVKIGPFMINYIAAIIDASKSRRFIKDTESLERVILSHINFTDVAGISESSLQDTIDLLYGRSGTETLSGKPVSKDGKNTDTTEKKKELQEKLQKTDRALERLKKAYLFDDDAMDEKEFLEMKTKLEVDKVKLGNSIKSLDSSSISENVDQAAFIKSASQFLISHKINSGGNIEYSELAMMDEEAMKTLMNSIIDHITVMDRHITEIVFKNGLTHTLLYR

SEQ ID NO: 23547 - protein, 540 aa, synthetic construct
MLAVIYARYSDKSQTEESIEGQLKECYRYAAANGYNVIEEYIDRALTGTSDNRLRFQQMIDDSYKKQFQYILVYQLDRFARNRYDSAHYKNILKKNGVRVLSARENISDDASGILMESVLEGMAEYYSVELGQKITRGLDLNGEKGFSTGGNIALGYKTVRINPEDENSKKIYVVDEETAPLVRRIFQMYADGMSVTEITTQMNAEGHRTSRGAPFNKNSLRKMLQNKRYIGIYTYKGKESPDKIPRIISDELFEKVAEILDNNRKAPARAKAKVEYLLTTKLFCGHCKEMMTGFSGTAKSQKVYRYYICNGAKKKRCQKKMVGKDYIEDLVVNECRKLLTDKNISKIAREVVAVCEAEKDTTNLRRLRNALSENERKHKNLMNAIMECDIDSVRKSLYLEAPELEKEHAMLEREIALEEKSYPMLTIPKVKFFLTDLKKGNINDIKYRKTLISVFVNAIYLYDDKITLIFNSGDKPVTINDLLLSEIEKEHKQNEFCLCSGLVEMRGIEPLSENHLPWLSTSVAAVLSFPLHSALQQAL

SEQ ID NO: 23548 - protein, 522 aa, synthetic construct
MANVTFIPAKHKIGNNVSGDEVTKLRVAAYCRVSTDSDEQETSYDAQVSHYTEYIQQNPQWTLAGIFADDGISGTNTKKRDEFNRMIDECMAGNIDMIITKSISRFARNTLDCLQYIRQLKDKNIPVYFEKESINTMDAKGEVLITIMASLAQQESQSLSQNVKLGLQYRYQQGKVTVNCNRFLGYTKGNDGKLVIDPEQAEVVKRIYREYLEGSSMDKISAGLEADGILTGAGKEKWHTSTINKILRNEKYMGDALLQKTYTTDFLTKKRIRNNGTVPQYYVEDDHEAIIPKELFMQVQEELVRRRVVHKSPSGRKRTYSCNHCFAQIIVCGECRELYRRVHWNNHGCKSIVWRCISRLEPTAADMNCTNRTVNELLLQEIMVKAFNQILTERDIFLKTLQQNIAKAVVSADTLSPGGIQARLEELQKELIKKANNKQDYDAIADEIFRLRDQKEQSELDSHHREEAMNRIKELQDFIAGQETDITEFDEALVKKLIEKITVFADHFTVEFKSGITIDIEA

SEQ ID NO: 23549 - protein, 502 aa, synthetic construct
MLNRINAVYGRQSVDRKDSISIESQIEFCEYELKGESYKAYTDKGYSGKNTDRPKFQQLMADIQKGLIKKVVVYKLDRISRSILDFATMMEEFQKYNVEFVSSTEKFDTSTPMGRAMLNICIVFAQLERETIQKRVTDAYYSRCLKGFHMSGPAPYGFDLAPTRLHDVRTKMLVEDPETRKYALLMFTMYAEPMTSFGDITRYFSEAGIKIYGKDLTRGFLSQLLRNPAYVIADLDVYEFFKSQGTYIVNEAADFEGGNGCYLYQGRDVAGNKNSQLRDQILVLAPHKGFVPSSIWLKCRKKLMNNTTFQSGRKARNTWMAGKVKCGRCGYALMSVGNSTGTQYLRCSKRADNKSCEGCGKLKTHDFESFIFGEMAKKMGQFESLIGGNEDRIDPRITALQIELAQVDEEIEKLLDTLSGANPILLSYANSKIETLDTKRQNLVKEIADLSAEVMSPRQIRELSSHIHNWENISFEDRRKVIDGLITQIKATSEYVQIEWKI

SEQ ID NO: 23550 - protein, 486 aa, synthetic construct
MSRKLIRVAIYARFSCDKQRDASIEDQLYECNKYAERHGYTVVMQYCDYAMSGRSDDRPNFLRMIEDAKTGMFEIILVWKMDRFARNIEEQYYYEHVLRKNGGVTFESVKENIAGTSIEATSTKALNALFAEVRSRQSAEDTMRGMLGKARKCQYLGYPLYGYSHDGDKITLDPEKAPIAKRIHVDFLSGVAPKQILDWLLSIGVKTARGKDPGYGFVVSMLKNVRYAGVYMWGVKKDEAGNDVLDDLGRPVPLVYIEDGMPAIVSMSQKLSCIEKLGFRRRLKTNADYLLSGKLICSKCKEPMHGETAIGGSGIEYWRYSCRGKRKACLGSFNKETVEQGVVSGVREMLRDAALVDYLIDRHIQFRDERQSKATIEAVRKDIRAVKKQRDNLLSAVAEGLDFNHVKPKIAALDAQERALEKRIEELKREQNSVSREELRAFFSDMSKGALSDEQITLTFVSKVWLYESTAVAVDYCGPIATAFHA

SEQ ID NO: 23551 - protein, 484 aa, synthetic construct
MLAVIFVLIFSATSHIYTKEGDHMKLERCAIYIRVSTAEQMMHGKSLEAQREYLETYAREHNMVVAGVYADEGKTARKELKKRKAIHALLEDVKAGKIDVIIFWRLDRWFRNLSDFYKVQDVLDSHNVRWISTSEPGINMETRDGRLQLNVVLSIGQNEVDTTSERIKFVNESSIRSGKLIFGDANMGYGYKSGIVDGQKRMVKDPDREHVVDAFYKYFFKHQNKCATLRYIQETYDPDFSFGIMRTLLSSEFYKGTYRGFPYCPAYLTEDEWNKLQKIQKRNVKATPSGRIYLFAGMIRCPACGQLLCGTGCSSIINRKTGAKRTYCYYRCNRAMIDHICSYRHRLSQNIVENYLLDNLENEYKNYKVKCEKIEKEKKKQKKKQSPEKLRKELDRLNFLFQKGRIDWDYYNEEYGRVESELNDLQSALTEPVTNYGYLEELLDTDFRTMYDQLSQENRRAFWRSIIQEIHVNEDHAITSVDFL

SEQ ID NO: 23552 - protein, 534 aa, synthetic construct
MLKADGKYCIYLRKSRADRDTQLYNGSKQDVLKRHREILLSTSRNLGIHISKIFEEVVSGDTIAARPEVQKLLSEVENNIWDGVLVVEVERLARGDTKDQGTIADTFKYSDTLIITPQKIYDPSSEFDEEYFEFGLFMSRREYKTINRRLNRGRIKSVKEGKWIASEAPYGYRKVKIKGDKGYTLSFLEGEIDVVRMIFNWFRVGELQENGTYKTLSPDNIGVRLDSMGIKPRKAEKWSRATIRDILTNPAYAGMVRWGYKKEEKRMVGGILSVERIRSKDFHLYDGIHPAIITKEDHYSILRKLTANAKSSSVNNNNKLKNPLSGLVYCENCGHLTTRLGQNSKNKYETIKCPNRNCDNVSAPLFLVEEKILASLSDWLSKYKLECDNKDFAAEELHLKQALISNLYKEKEKVKRQLDKTYTLLEQEVYTTEIFVQRNKALTDQLQAINTNIIDLETDYNAELNTKYEYEELIPKMENIIDIYFKIEDIQTRNELLKSVLEKVTYKKTVRNTKGNALNANFEITIYPKLPKKK

SEQ ID NO: 23553 - protein, 519 aa, synthetic construct
MKKVTKIAETASSKVKLKKIRVAAYCRVSTDSDAQLESLEAQKTHYENYITSRDDWEFAGLYFDEGITGTKKDKRLELLRLIDDCKAGKVDFVITKSISRFSRNTTDCLELVRKLLALHIPIYFEKENINTGSMESELFLAILSSMAEGESVSISENSKWSIQKRFESGTYKVSYPPYGYDWDGEQMVINPEQAAVVKEIFAALLSGKGTHAIADDLNRRGIPTKRNGRWTATTIRGMLSNEKYVGDCLFQKTYSDSRFVRHNNHGEQTQYMVKDHHEAIISREDFEAAHAFIHQRATEKGVVKGSGKYQNRYTFSGKIICGECGDTFKRRIHSCTGYKYTAWCCSTHIKDKDKCHMLFVKDDDLKQAFVTMMNKLVYAHRIILKPYVDALKNTSSDDSLRRIQEIQTLLAQNTEKRETLTKLMTQGIIDPILFNKETNELLSQADSFRDEINALKNAVSGDVTKVTAATALLHFTEKGGILQDFDDDLFKEYVNRIIVRSRNEVCFELKCGLTLRERM

SEQ ID NO: 23554 - protein, 576 aa, synthetic construct
MLRENTENGSNQRIRVAIYVRVSTVYQIDKDSLPMMKQDLTAYCKYILNTEDYVIFEDAGYSGKNMDRPAYQKMMSQVRQGLFTHILVWKIDRISRNLLDFANMYAELKELGVTFVSKNEQFDTSTAIGEAMLKIILVFAELERNMTSERVTATMINRANNGIWNGGRVPFGYTYDKESQTFSFNEAEQKIVRLIFDTYEKTGSIVHTSRKLNDSGFLTRGGNIWSATAVWIILRNPWYKGVYRYNYYKIPGRKAVKDKKEWVIVENHHKPSIDPERFDKIQLTLTNNARYRRSPGRSNVQKNVHIFAGLLWCGECGAAFTSSPGKLHASGYRPSKYGCPNVRKTKTCHAKYTSDVVVGEFIINYILNIINAHKDIKLVRSPEDLQQHLLRGSTFSDICSIDSDGLSDMYDMLTSCSKSGMLFKRVKPKFKVDPELKQLQSEQKKQQRALDRLNELYLYSDESMSEREYIVRKQQITDKLDEINDAIGMMSQEPWMHTMGDSEFIQQASSFILNQKLHDRQYVYFTSLAESVDAEILKAFFGSIIDSIVITSGKIQRVTFRNGISHTFTYKNKPED

SEQ ID NO: 23555 - protein, 517 aa, synthetic construct
MPKTEEKQAVKAVIYARYSSDRQREESIEGQLRVCEDYARRNNITIVHTYADRAMTGRSDQRPEFQMMIRDAATMSFNIVLVYKLNRFARNRYDSARYKHKLKQYGIRVVSAMENIADDPSGILLESLIEGMAEYYSAELAENVTRGMTENALEGKWAGGIVPLGYKLDEKHHLVIDEPKAAIVRQIYQLALEGHNQKYIIDELNKHHYTNSAGRPFSYNTLRVILKNERYTGTFIWRDIRKENAIPVIIDKMTFEAVQKHMQFRKKNHIRSCSKDFHLTGKLFCGRCSSKMVGVSGTSKQGVLYYYYACTSHLKKKCPSKNIRQDALENLICKITTQILSKPEAIKAIAKQAMKMQKDKKESLEIQSLQNQIADINKKLKNCIQAVENGLISETMTNHIKNYENRLQGLKDEVSRQKLLEGSIHLTEQHIEFFFYSISQKLKTADKYKSILLSSLVRCVIVHENYIEIQFNYKNELPILQNPVKVESSYLNQMVTQGGFEPTTYRLEGGCSIQLSY

SEQ ID NO: 23556 - protein, 446 aa, synthetic construct
MCQKIVVTLPNNLRIRVALYIRVSTEEQAKHGLSLADQRDALIAYAAAHGMEVVGIYEDAGISARKPYKKRPALMRLLDDCRAGKIDTILFVKLDRWFRNVAGYYAVQEVLDKNHVDWQAIREDYETRTASGRLKVNIMLSVAQDEADRTSERIKAINEGKRAKGQPTNGKTPIGICVKNRRYAIDEETAAAARDMFPAFIRLQSILALRRYMATEWGIKRSYNKYKDALRSRLYLGEAFGVENALPALVDRETFDLAGKILERRSQRNASADRIYLFTGILRCRECGRNMQPETVKQVYKYYRCRTHTLDPADCPHILRIREDVLEDYLLREFEGIAKKYYSKSKTAEKKPPKTAEQIKRKMQKLKDLYLSDLIEIEEYKKDYTELKQQLAAINPEPIKEFDLETLRRELKEYPDLDRQAKKEFWVRTIQRIDADNDGAFFVTPS

SEQ ID NO: 23557 - protein, 613 aa, synthetic construct
MKDVEVIKAHNTLSPRARTNFEKRLRVAAYCRVSTDTEDQLNSYKSQVKYYTELIKSKPEWSLAGIYADEAITGTQVKKREDFQRLINDCMNGDVDMVITKSISRFARNTLDTLKYVRMLKDKGVAVFFEEENINTLTMDGELLLVILSSVAQQEVENISANVKKGLKMKMQRGELVGFQGCLGYDYNPADKTITINEEEAAVVRYIFQRYTEGAGGSVIAKELENLGYKTKRGSPKWADSTVIGIIKNEKYKGDILLGKTFTVDPISKRRLYNFGEEDQFYIREHHEPIISEEVFEAAQEILRRRAKPRSLNVDGKREKFSRKYAFSCMIECGFCGGTLTRRSWHSSSQYNKAIWQCVVSTKKGKKFCPESKGVDERTIERAFVESYRLLCQNNKDVLDEFMKRTEEALSESNAGKRLAKAERDIHALEVKKNKLVDMRLEDTIDKETYDRKYLDLSSQIEQLQKECESLQDAAETETTMRKRVAMFRQTLEQNEVLDTFDRHIFESIVEKVIVGGYDSDGNKDPYMIVFVYKTGFKNSVDGKNFKPLRKNSKENHSPAVLCSHASNEAESMCSDSSDDTLRGCELLYQNDVTNATLKPCGVRTLDVKSPVI

SEQ ID NO: 23558 - protein, 492 aa, synthetic construct
MNVAIYLRKSRADENNPLETLERHKEILLSYAKDNNLTVIDIFEEVISGGMLYNRTEMLKLLDAIPSHIYDAVLCIDLDRLGRGSAADSEKIFDVLKENDVKIITLKKIYDLNNEYDEDYSEFEMFMARKELKFITRRMNRGRIKSINDGCFVSGAPFGYRNAVINKKHTLEVYEPEAKYVRMIFDMYVNQSMGITSISRQLANLGVLSKKNTPLHPTTIARMLRNHTYIGKIVWNKSKSVKGKNTQEKTSKDDWLYVPGLHEPIIDEDTFNKAQDIINLKYKPPMRTGTLQNPFAGLLKCANCGRAIVINTSNETVEKYRLCCRTLGCNKASALSIVEDKVFEVLTKEFKDIELSLKNIRQSHNKDKLSCLDTIATLETELKKLDKQQLRLYDLLEQEVYTKELFLERNNAISDRRKKINATIAQEREKFKLVDTSSIEERLPLLRELLTNYHSLSAAEKNSILKNFVKKIEYKREKSAPKGDIFLKIYYK

SEQ ID NO: 23559 - protein, 515 aa, synthetic construct
MQYLIYLRKSRADKEAELRGEGETLARHENALLELAKRKHLPIGDIYREVVSGETIASRPMMKKLLSEVEQDIWDGVLVMEVERLARGDTIDQGIVAQAFKLSNTKIITPMKTYDPNNEFDEEYFEFGLFMSRREYKTIKRRLNNGRQASVKEGKYVGNKAPYGYQRVKIENDKGFTLEPLKEEAQVVSMMYRWYAYGEYGIPTIAEKLNEMSIPTRTKKRWTYATIRDILQNPVYIGKIRWGWRGQRKHVKNGAITISRPRSDSCMLADGLHAPIIDVLLFERVQQKFSEHKPLPVSAKEIKNPLAGLIICAKCGTKMQRRPYQRTTIKTGLICPNSICDNVSAPIETIESKVLENLSIWIQMEKIKLENGDPVLDDSKLKMMKEQLLALDQEMIELQKQNDNIHDLLEKGIYDIDTFLERSQKIAARITEIETIKQKLQQDIIEEKNRIEHATSIIPKAEHLLKIYNSLTIAEKNAMLKEILFNITYERKKSIRNGGTFDNFTLVLNPKLHYK

SEQ ID NO: 23560 - protein, 519 aa, synthetic construct
MKKVTKIDKVPNVTSKKQKLRVAAYCRVSTSNDAQLESLETQKAHYESYITSRDDWQFAGLYFDEGITGTKKDKRPELMRLMQDCAAKKIDFIITKSISRFSRNTTDCLELVRKLQELDVPIYFEKENINTGSMESELFLTILSSMAEGESTSISENSKWSIKKRFQNGTFKLSYAPYGYRWDGRTLRIIPEQAEVVKRIFADVLSGKGTDAIAKALDDEGVPTKRGGKWTSTSVRGILANEKYTGDVIFQKTYTDDSFNRHTNKGELDMYYVADHHEAIISKEDFEAAGLLITQRAAEKGIKRESQIYQQRYAFSGKIICNECGDTFRRRMHSSTYGKYVAWCCNTHLADKDKCSMMFLRDDDLKVAFITVLNKLIYSHKLVLKPYAAALQNNSGDESLVRIQHLERLLEQNTEQRETLTRLMAQGYIDQVLYNSETNALLTQANTYREDIEVINATMSGDSSRFFEAERLLHFAERGSMLEEYSEDLFERFVDHIQVYSRQEVGFVMKCGLTFKEMI

SEQ ID NO: 23561 - protein, 522 aa, synthetic construct
MNTLERDCIYLRKSRADREAEARGEEETLARHERILLDLAKRRSCHIGAIYREVVSGETISARPVMQRLLQEVESGMWDGVLVVEVERLARGDSIDQGVVARAFQYSDTKIITPTKTYDPNNEFDEEYFEFGLFMSRREYKTIKRRLNAGRVSSVQEGKYCGNKPPYGYRRVKLEHTKGYSLEPIPEQAEIVKLIYNWYTYGIDGERIGMCKITRKLIDMGVPSLSGKSWSTATVANILENPVYTGKIRWNRRKGMNKIENGNVVKSRPRCNDYILTDGLHEAIISQEIYDLAQNYRSMNPPRPIGASNTVKNPLSGIIKCGKCGHNMVRRPYNSRKQEDTLLCSYTGCNNVSSRLSLVEKALIAGLADLVQSYKINDSLNDTNGVDIIATKEKVLLDKRAELENLNTQKNRQYELLEQGIYTTEVFLERSGATAKQIDDCAAAIERIAADLAHDRELLEQKFNFIPKCEHLLSNYWDWDAPTRNSVLKELLERVDYFKDNKNDFKRGDEITFTLDIYPKIQ

SEQ ID NO: 23562 - protein, 456 aa, synthetic construct
MRKQNNSEAPVRAALYVRVSGEEQKIKGLSIEAQKERLVAYAKERGWIIAGLFVDAAKTARKNMHKRSEFQKMLDLVRADGVDMLLFCRLDRWFRSVRDYYKVMEVLETHNCQWKTTDEEYDTTTANGRLYINVKLSIAQNEADICGERIHVVFDSKIQHGTVLSGKCPFWLRINDERRYELIPENAAIIQDAFNHFENTTSQRATIRYIRETYDVNWCEATFRRMLKDKLAIGVYNKNGRYNEDFCPPVISKEQFEHVQELLKRNSRHNPAGRIYIFTGILVCEECRHHLVGRKQKDFFYYRCNQHFQRGRCTHNHSAREDVIETWLFEHLGEEIKKYEVAWNVQAAERKRTAASIDRSVLRRKLTKLKDLYMNDLIDIDEYKKDYETYTAALSALEEPEEEKHIDLSGVHRIISHDFREIYDSLTREEKRTLWKNTLKEIRVNNANEITGISFF

SEQ ID NO: 23563 - protein, 528 aa, synthetic construct
MNNRAVLYLRLSKEDVDKLSEGDDSASIKNQRLLLVEYANKHNMTITNIYSDDDESGLYDDRPAFNRMMEDAKHGEFDVILAKTQARFSRNMEHIEKYLHHDLPILGIRFIGVSDGVDTSDDNNKKTRQINGLVNEWYCEDLSKNVRSAFHAKKRAGQYVSSSCPYGYIKDPLNHNHLIIDEYAANVVKDIYSLYLQGIGKARIGRILGERGILIPTLYKREVQGMRFNNPNILETTKVWSFQTIHQILNNEVYIGNLIQNRRSTLSYKDKKTKALPPEKWIKVENAHEPIISKDIFERVKALQKIKTKSVNAKNPKYESIFSGLIFCADCKHSMVRKYKRRGNREFVGYVCSTYKTHGNHICTSHSVNYEELTDAVLLSIQREARKILSNEDVEELKKTSCRNRRIENIEKEIEFAEERKEKINKFKQKTYQSYIEELISKEDYVRYSADYDKELKELDGEIAELEKHREDDKELELEYQEWVNKFSEYVNIDKLTRGIVLELIERIDVSEDGCICIHYRFKNPYEE

SEQ ID NO: 23564 - protein, 504 aa, synthetic construct
MYKASNGSGELMENNVIRVGGYIRVSTQEQAKEGYSIPAQTKCLKSYCSARNWILHELYIDPGYSGAKMERPALQKMLSDIKKGLVDLVLVYKLDRLSRSQKDTLYLIEDVFLKNEVAFVSINENFDTSSAFGRAMIGILSVFAQLEREQIKERTQMGLAERAKNGMWHGSGITPIGYDYDPASNQLIVNEYEAMQIREAFDLFVNQNYAFTKIVKTFRNKGYSHKHGVWAHSSKLRYILSNKTYIGRINWNGEDYPGKHDPIIPSSLFEAAQKKLAEKDWKLTDKPAKSPFDATQLLSGVLFCGNCGGRYYGAGCYRGSHDPNSPKRRYEHIYSCYSRTKTKLEMIKDPSCKNKNWKTETLDNYVITRIKNLRLEGEIENLIAKERPKNPGIDQRKALEKQIDDIDRQISRLLTLYQLEDVPTAEIGLRLSDLTRKKKTVEEAIENIPLYEPELSVAKAKSLLADAEEIFNCGTTEEKRSLIHALIRKIILTGNDVVIEWAFI

SEQ ID NO: 23565 - protein, 583 aa, synthetic construct
MQKTDKLPVKAVIYARYSSDRQREESIEGQLRVCEDYARRNNITIVHTYADRAMTGRSDQRPEFQMMIRDAATMSFDIVLVYKLNRFARNRYDSARYKHKLKQYGVRVVSAMENIADDPSGILLESLIEGMAEYYSAELAENVTRGMTENALEGKWAGGIVPLGYKLDEKHHLVIDEPKAAIVRQIYQLALEGHNQKYIIDELNKHHYTNSAGRPFSYNTLRVILKNERYTGTFIWRDIRKENAIPVIIDKMTFEAVQKHMQFRKKNHIRSCSKDFHLTGKLFCGRCSSKMVGVSGTSKQGVLYYYYACTSHLKKKCPSKNIRQDALENLICKITTQILSKPEAIKAIAKQAMKMQKDKKESLEIQSLQNQIADINKKLKNCIQAVENGLISETMTNHIKNYENRLQGLKDEVSRQKLLEGSIHLTEQHIEFFFYSISQKLKTADKYKSILLSSLVRCVIVHENYIEIQFNYKNELPILQNPVKVESSYLNQMVNHWAYEYIATLAGNGILEGYPDGNFGGDRMMTRYEFGAIVYRAMQRGFEVPARMLKEFEPELERFRVDTIAQNKAGQPTIERVRVIHNR

SEQ ID NO: 23566 - protein, 519 aa, synthetic construct
MKKVTKIEENKNPQAAGKKLRVAAYCRVSTGSDAQAESLEAQISHYENYINSRSDWEYAGVYYDEGITGTKKEKRPELKHMLADCKAGKIDFIVSKSISRFSRNTADCLELVRKLLTLNIPVYFEKENINTGSMESELFLSILSSMAADESLSISENSKWSIQNRFEIGTFKISYPPYGYDWNGDQMVINPEQAKTIKQIFTYALSGQGTSAIARRLNEDQVPTKKGGHWNATTVKGILRNEKYTGDCLFQKTYTDSFFNRHHNHGEKNMYLARNHHEAIISHEDFEAAEQMLQQHAREKNISSDSEKYQKRYTFSGKIICGECGGTFKRRTHYTAGTSYVAWCCNTHLADKEACPMMFIRDDDLKLAFTIMMNKLIFSGKVILKPYVEGIRSGSTDDSFHRIQELTTQLAKNTEQRENLQKLAAQGFIDKILFNTETNKLLSNADDFRKEIEALNNTVSSDVSKVTAATDLLHFAEKGEMLHGFDEELFEKHVRQITVKNRTEFIFELKCGLCLTERI

SEQ ID NO: 23567 - protein, 464 aa, synthetic construct
MKSKTLRCAIYIRVSTTEQMMHGKSLEAQKDYLIHYAKEHDMNIVGIYADEGKTARKELKRRKAIQELVKAVERDEIDVILFWRLDRWFRNLSDFYKVQDILDQHNVRWISASEPGINMETRDGRLQLNVVLSIGQNEVDTTSERIKFVNEASIRQGKVIFGDSNMPIGYMVGTVDGVKRMVKDPEKEDLVNAFYRYFRTHQSKMKTLKFIQKNYDPTFSYSQLRNMLESDFYHGAYRDNSHYCPAYLTEKEWAEIQEISNRNVKHPSSGRVYLFSGMIRCPVCGQLLAGRGGSSIINRKTRETRTYCYYRCNKACIDHMCTYRHNVSQNLIEEYLISNLEEEYNRYKIQSQNIHSKADLPKKKRTPEQVKKEMQRLNLLFQKERIEWDYYNEEYEKLTTELSSLEESDQQPKTNFDNIEKILHNDFRKTYDNLSPENRRAFWRSIIKEIHINTSHEVTGIDFY

SEQ ID NO: 23568 - protein, 558 aa, synthetic construct
MSRTVAIYARVSTEHEAQLSALDNQVQYYDGILSSHPDWKLYKRYIDEGITGTSIKKRKNFLKMMEDANNGCFDLIITREVSRFARNTVDTLQETRKLKKIGVEVYFTEDNIWTFNDEDGELKLTIMATLAQNESKKTSQRVKAGQKISFENGVIYGTGNILGYDKIGKEMIVNDEQSKTVKFIFESYLKGMGLTEIKDKLESMGHKTATGLSRWNVSCINRVLKNPFYCGTIVYRKSYVPDYLEQKPKKNNGEVEQVIKEGKHQPLVSKEDFNKVQELIKSHSTCKEKKYDKIGSGIPKSVWSKKLLCECGSSFNRRTYHKKDDGSITFAYHCYKQKNMGSLRSRLKKGLSIDGACDTPMVQEWKLYLIANVIFNLIWDDKEQIISIANKLIDETIIEEDYSNELDEKITENNKKIEFYKNKHSKLLELYLNEMINKDIYIKKKEELDISISRINKENSELISKRGIPKNILKDKIANLKQCIIDNLNYHENNVSDDIIDNFVEKVIVHKDKFEWKLAYLNDIIDMNINGRQKSSKLDLYVNNILLRSEQGCGTSCY

SEQ ID NO: 23569 - protein, 588 aa, synthetic construct
MRIVNKIEAKTPQIPRRKRVAAYARVSMESERLQHSLSAQVSFYSSLIQSNPAWEYVGVYADNGITGTKTEAREEFNRMIADCEAGKIDIVLTKSISRFARNTVDLLNTVRRLKELGVSVQFEKERIDSLTEDGELMLTLLASFAQEEIRSLSDNVKWGTRKRFEKGIPNGRFQIYGYRWDGDHLVIHEEEAKIVRLIYDNYMNGLSAETTEKQLAEMGVKSYKGQHFGNTSIRQILGNITYTGNLLFQKEYVVDPISKKSRINRGELPLYFVENTHEAIIPMEVYQAVQAEKARRRELGALANWSINTSCFTSKIKCGRCGKSYQRSNRKGRKDPNANYTIWVCSTRRKTGNAHCQNKDIPEQMLKDACAEVMGLDTFDEIIFSEQIDHIEIPAPNEMIFYFKDGRIVPHHWESTMRKDCWTDERRAAKGRYVQEHQLGPNTSCFTSRVRCDSCGENYRRQRSRHKDGSFDSVWRCASGGKCQSPSIKEDALKNLCADAMGLEEFSETVFREQIVCIHITAPYQLSIRFFDGHTFETAWENKRKMPRHTEERKQHMREVMIQRWREKRGESNDNTGDDKPIHGNADQ

SEQ ID NO: 23570 - protein, 523 aa, synthetic construct
MAKVTTIPATISRFTATPINEKKKRRTAAYARVSTDSEEQLTSYSAQVDYYTNYIKSRDDWEFVSVYTDEGITGTNTKHREGFKRMVADALAGKIDLIVTKSVSRFARNTVDSLTTVRQLKEKGVEIYFEKENIWTLDSKGELLITIMSSLAQEESRSISENCTWGQRKRFADGKVTVPFKRFLGYDRGPDGNLVLNKDEAVIIRRIYSMFLQGMTPHGIAARLTADGIKSPGGKDKWNAGAVRSILTNEKYKGDALLQKSYTVDFLTKKKKVNEGEIPQYYVEGNHEAIIQPEVFELVQQELERRKSSRGRHSGVHLFSGKICCGQCGEWYGSKVWHSNSKYRRVIWQCNHKYDGEEKCSTPHLTEDEIKAMFVSAANKLIGKKAAIISPLRNSLDVAFDTSALETEVAELQDEIMVVSDLIEKCIYENAHVALDQTEYQKRYDGLTTRFDTAKARLEEIEAALADKKSRRAAIDAFLDTLAQADPMEKFDPALWCGLIDYVTVYARDDVRFAFKDGQEIKA

SEQ ID NO: 23571 - protein, 525 aa, synthetic construct
MKNRAVLYLRLSKEDLDKLREGDESASIKNQRLLLIEYALTNNFEVVKIYCDDDESGLYDDRPGFEEMLEDAKLGLFDIVIAKTQARFSRNMEHIEKYLHHDFLNLGIRFIGVVDGVDTAVASNKKSRQINGLVNEWYCEDLSDNIRSSFKIKMKKGQFLGSSCPYGYKRDPSNHNHLIVDEYAANIIRRIFSMYLSGCGKAKIGSVLSADGVLIPTLYKQQILGENYKNCRVMETTKNWSYQTIHTILNNQVYVGDMVQNRANKLSYKDKKKKKLPKERWIIVPNTHEAIISRDTFARAQEIQQIKTRSVNGNQVNGLFSGLIFCADCKHAMGRQYARRGDRGFIGYICKTYKQQGKRFCDSHRIKNDELEEAVLCSIREEAKKILTEKDIDDLKKFKAVEAYQTNYELQMEQIQQEIQKIESYKRKTYDNFMEELISKTDYVSYISDYDKKILKLKRQKESISEKVDMQEELNHQYDEWTEAFKNYINVSKLTREMVLELINRIEVHDDGAIDIYYRFSNPYL

SEQ ID NO: 23572 - protein, 531 aa, synthetic construct
MPPVTAKVTVIPAKKQRLPLNPETSEVRKLRVAAYARVSTNNEEQLSSYEAQVDHYTRYIQSKDEWEFVEVYTDEGISATNTKKRDGFNRMVADALAGKIDLIITKSISRFARNTVDTLTTVRKLKEKGIEVFFEKENIRTLDSKGELLITIMSSLAQEESRSISENVTWGQRKRFADGKVSLPYKRFLGYRRGADGLPEIDEKEAEIIRLIYRLFLYGKSPSAIAAYLTGEGIPTPGGKTIWRAKVVESILTNEKYKGDALLQKKFTVDFLTKKQKVNEGEVPQYYVANSHPAIIDPEIFDLVQYELKKRKEDGLFTSCLHPFSGRIVCGQCGGIYGSKIWHSNTPNRCMVWQCNEKYRGKYCKTPHLTNEQIEQTFLKAINSLLQNRDSLMRAYEDVLTVLTDCSKLDAEIAQLEDESNIVVELINKCVAENARKAMNQEEYQRQYSSYNARYEGIRKKLDKLKNKRLERLAKKTSIRCFMDKLSQQENIITTFDEELWYTTVDVVKVSLDGKMTFVFRDGSTVEVPME

SEQ ID NO: 23573 - protein, 447 aa, synthetic construct
MERKIKRIQPARRTAPKNKRVAAYARVSSGREAPLHSLSAQISHYSELIQKTPDWEYAGVYADEALSGTKDSRGEFQRLLADCKAGKIDLVLTKSVSRFARNTVTTLKTIRELRLMGVDVFFEEQNIHTMGEDGEFLLTLLAAYAEEEARSVSENQKWRIKSNYEQGLPWSITMYGYRQVNGRLEIVPEEAEIIRLAADLYLEGYGRCKLEDAFAAVNIKGRHGANMGGNSIVDLICNEKIVGDMLLQKTFVVDPITKEVRKNNGEKPQYFVEGSHEGILDRETYEKVLAERARRAAAYKPRSGSYERNRFPFSSKVRCGKCGKSFTRKTVAPKTPYEKQVWICRTFNQRGKAHCDAKQIPENILKRLSAEAMGLPEFDEAAFAAKVEEIQVPENGVLVFVFYDGHTVKKKWDNPSRRHSWNPENRQRARELALRQAAERRLAQCRQ

SEQ ID NO: 23574 - protein, 580 aa, synthetic construct
MEFSKLTRVAIYIRVSTTMQAENGESLNVQRTQLTTYAQMMLNALPENIVIFEDAGYSGKNMDRPKFQDMMSQIRAGKFSHLLVWKIDRISRNLLDFSMMYKELKELGVTFVSKNEQFDTSTAMGEAMLKIILVFAELERNMTSERVTHTMIAMAQSGRWNGGRVPFGYTYRTEGEKKEKQIFEIDKGEAALVQEIFDLYEQERSIVREAKILNDRNAISRYGHEWSPVTVHLVLRNIFYVGDYRYNALREGDRSKPKPESEWIIVKDHHPAIISREQFARVQAILKANKRYRKDMAPASSRERVHIFGGLLFCGNCGKPLNNSVSNKKADGWQYSNYPCPTRRRSSNKCTGKSTSDPVVGEFVFNYILNMLNAQKGFKDIQTPVQLQDRLLFGDAFHNVISIDSDGLNSFFNLLSSGNISGAIYGKDVAVSKPKTAKVDPELVRLRKEKKRLERALDRLLNTYIMSDRPISENEYVRKRTDLETLLSDVNDKLGIAQSEEVQMALTDSEFLTKASQFIIGQKLSNRLYVNYKNLAQSVDPSVLKTFVVSVIDNIVIYNGKVKSIVFRNGLAATFEYSSI

SEQ ID NO: 23575 - protein, 567 aa, synthetic construct
MQSKNKNQIGITALYCRLSRDDGTESESNSIGNQKKLLSQKAKEMGLTDTKYYVDDGYTGTNFNRPGFQQLIDDIEIGLVSAVMVKDLSRLGRDYVSVGNYTDSYFPEHNVCFIAVNDAIDSDEGESEIAPFKNILNEMYARDISKKIRSSHRLRGSMGEPLSQPPYGYMKSPENKKKWIIDPEAATVVKSIFKMCLDGKGNETIARKLQENKVLIPMAYWRSKGLNRGGKKTQTNPYKWCKTTVQKILSQQEYCGDIINFKTYSKSFKNKTRYENSKENWAVFKDVNEPIIDRETFETVQKFISKTKRRAPKKENGERSIFNGLIYCGDCHSKMRYHTSTSNKEIHYFTCSDNKVDYRGKCLGRHYVRADALEEVVKLELRRLVEMLEIDESYFAQLLLRKNDEEREKDKKFLESELQKAIARSNTVSQLYEKLYEDNVIGKVSDEWFVELSHKYEKERMDLKAKIADTRHQIEELKNTNSEYGKFISAIRRFMQMDNLTSPLLRELIDHIDIFETEGTGKSRTQRIVIYYRFIGYIELPNTTKQTHIADTRKGVAVEYITEQFTA

SEQ ID NO: 23576 - protein, 523 aa, synthetic construct
MNRTVTAIPATKKLRSAAASSGAPARRRVAAYARVSTEMEEQTSSYEAQIDYYTTYIHSRNDWQFAGMYCDEGISGTSMKRREGFQTMIDDALAGKIDLILTKSVSRFARNTVDSLTTVRKLKDAGVEVYFEKENIYTFDAKGELLITIMSSLAQEESRSISENVTWGHRKRFADGKIMVPYKSLLGYKKGEGGSLVIDETQAPTVRLIYQLFLDGMAISEIKTELAQRKILTPRGKEVWSTSTVRSILSNEKYKGDALLQKTFTTDFLTKKMKVNEGEVPQYYVSGNHEPIIAPRIWDQVQYELATRHANISSAKVGLFSTRLKCSQCGAWYGRKTWASNTKYKYTVWQCNHKYTDEHPCSSATVKDEQIKDSFVQALNQLIARHRYESQLPQVLGDMFDTSRLEEQAAACQAKLVELTEQIETLIAENQRCALDQDAYQNKYTKLDTTYRKTLARKTSLEADIVANTAKHAAITTTLNDLAGEPVSEFRPAQWSALIDHAIVGEDTIRFVFRVGEVVRVQL

SEQ ID NO: 23577 - protein, 416 aa, synthetic construct
MAHISVVTPVRPPTPKLVNVAAYARVSTNGTEQLASLSAQVSYYSRLIQSTPGWAYAGVFIDEGITGTSTKSRQGLADLMDAARGGGVDIVLCKSISRLARNTVDLLATVRELKDLGVAVRFERERIDTLSADGELLLTLLASFAQEESRSLSQNVKWAIRNRYKNGGTNSFVVYGYHWANGQFTIIDEEAKIVRLLFANYLDGISPEKTAGMLNAEGKRSRGGGRFYGSVFRRMLENERYKGCQMLQKMYRPTIQAPTRSFNDGELPRYWVEQALPAIIDQAMFDTVQAEIAHRREVGPAATPSKNTGVFTGRICCAACGKNYQRKTRTYKSGTSYKFWRCWSACTGNGNPCRGHNLRETLLEQACADMLGTQGFDPVQVGEQIVMIEAFEHQLTFHLADGTMTPVGLTSEGRLA

SEQ ID NO: 23578 - protein, 578 aa, synthetic construct
MGYVTKKAAQRFEEKKAAIYVRVSTQYQVDRASLPVQREELINYAKYALGISDYVIFEDAGYSAKNTDRPDYQQMMARMRTGEFSHLLVWKIDRISRNLLDFSVMYAELKELGVVFVSKNEQFDTSSAMGEAMLKIILIFAELERKTTSERVSAVFVSRANDGIWNGGKVPYGYSYDKEGKTFSIAEDEAKIVRLIYSLYESEKSIVRVARIMNERGLKSRAGSDWSPTTVHTILSSPFYSGTYRYNYRNESNRKRFREKGKDEWVLVENHYPAIVSPERQAAVGVILESKRYNKNATYQRKNVHVFAGLLTCGCCGSTMAATTDKVRADGWRPSMYICSRRRKSEDCTNKYVSDVSLGPFVLNFFANLIKASNSFGRTTSIETLEKKLLRGEALSRVDHIERPGLEELYNHLRSGFDEKRFESPTIAATESSADLSERDLLLSEKRRLERALNRLKTIYLYGDDEMASKDFNIERERITKALSEVDSRINELDIANAFDLSLSDEAFMQKASQFILTQQLLDKRYVNYERFIRKIDPKIVKDFLNETVSNFCIKDGLTTSILLKNGIELRFSYKTAE

SEQ ID NO: 23579 - protein, 543 aa, synthetic construct
MNLTKAKETKTRVCCLYRVSTKGQVDKAENDIPMQKKACHEFAESKGWTIIKEHAELGVSGFKVAAADRDELQEIKREAEKQEFDILLVFMFDRLGRKDNETPFVLKWFVEQGISVWSTVEGEQRFDSNVDDLLNYIRFWQASSESQKTSVRIKTRMKQIVEDGHYMGGTVPFGYRAVYKGRMNKKGRPVKDLEIDPREGEIVREIFFKVAREGYSAHGIARMLNERNIVTHGGARFQTNHVLRMLRHRGYTGYMIAKENTSGFIPELQIVEESIYEDAMAIVEQRKKENEQRRSVAQSSYNKTLLAGNLYCAHCGTRLSGFWHKDRYRLADGTVKEVMAPKYNCYAKGLKVRPCDGQQLYKAEIVDEIVEGIAKDIFAMISRMPKDPTIEAQLKKNIQNKENLLRELDAKLQSAKKELELYEAQIIKCIEGKSKLSEVTLARMISRAEEAVAVYEKEIEKARLDKQNQKDTAAQIEDFYKEFKGWADEYESAALERRRVILSQLFSRIEIGRGYEVKVEIAMSYKQFLNLSENSQTGNRTVA

SEQ ID NO: 23580 - protein, 528 aa, synthetic construct
MNNKAVLYLRLSKEDRNKVNKGDDSESIINQRIMLSDYAMQHDFQVVKIYSDDDESGLYEDRPGFSQMMQDAQTGLFDTIIAKSQSRFTRNMEHSEKYLHHKLPLWGIRFIGVIDGVDTLDENNKMVRQIKGLTNEWYCEMLSKSVRSVFHSKMNQGKFVGSSCPYGYMRDPEDHNHLIIDEYAASIVRKIFRLYLEGNGKAHIGSILSSENILIPSLYKTRVLQQNYHNSKLKDTTKTWCYQTIHTILNNQTYLGKMIQHKDIKISYKDKKKRRLPKDQWIIIDNTHEPIIDQETFDRVQALQKIKRKSVNTEYSDNIFAGILFCADCKHAMNRAYAKGNKKGSIGYICKIYKTMGKKHCPSHMIKNEELEEAVLSSIKNEARKILTEDDISDLDKVQKIDSREQFYKKQMQIVDAELEKYQKFKKRAFTGYMEEMITPKEYRSYVAEYEEEMSKLERQKEEILTKLADENSLQNQHDEWVEAFKDYINIEKLTREVVIELIEKIEVHEDGGLDIYYRFRNPFQVAN

SEQ ID NO: 23581 - protein, 522 aa, synthetic construct
MGNVMLIPARRQVGSNARKQEEEKPKLRVAAYCRVSTDSDEQATSYEAQVEHYTEYIQKNPDWEFAGIYADDGISGTNTKKREEFNRMIDDCKAGNIDMIITKSISRFARNTLDCLKYIRQLKDMNIPVLFEKESINTMDAKGEVLITIMASLAQQESQSLSQNVKMGLQYRYQQGKVQINHNRFLGYTKDADGNLVIDPEQAETVKRIYREYLEGLSMDKIAAGLERDGILTGAGGKKWHTSTINKILRNEKYIGDALLQKTYTTDFLNKTRVKNNGLVPQYYVEGDHEAIIPKDIYLQVQEELVRRRLVKTSANGKKRSYSCNHCFSQIVICGECGEMFRRLHWNNRGVKSIVWRCISRLESTRLECHARTINELVLQDVVVKAINQLLGDKSNYQAQLQLNIAAVIRASQATAIDSIDEKLMALQQELIQKANSKEDYDEIADEIFKLRELRQKTTVDTAARDEQIKRINDLQDYISQQTTYLTEFDESLVRRWIKQITIWDDRITVELKSDVSIDVDA

SEQ ID NO: 23582 - protein, 526 aa, synthetic construct
MVFASYTRKSIYSDKSDSTKNQAKMCRDYVDFHYAGSVDSFLVYEDEGLTGSNTKRPDLQRLMKDIKSGLIDFLIVYQLDRLSRDIKDFSNIYAFLEEHHVQFISVAENIDTNTPIGKAMMYVSVIFAQMERETIANRVNDNMIGLADDGWWVGGNPPYGWRRTRITSSDGKNHVTIVAEEEEAEFVISVGRIFLQNNFSLQQLERYFKNHNILTKNGKFFSTNQLHKLLTMPYCAPATQAIYDYYSNLGCIMSSRCPRELWDGTHGVMIYGRTTERNKKHALQPPNKWRVCIGRHKPFMDESTWLSIQNQFTHNVFDKKMKHPIPLLKGVLRCKCGRLMMLARKAKVDGSVSTWYYCPKRMRQGADYCDMSQIKTDIIDDKVIDIFNKISKDPDTINEYLLVSVPVKDFNTEIKDANKSIIKIKNKIQNLTNALAETPDTSAAKYILNTIDGLDKNLKLTERHIADLQSQERKSSQTELEVYEKQRKITDFIRNFENFTPEERNAIARTCIKECVWDGHTLSVVL

SEQ ID NO: 23583 - protein, 503 aa, synthetic construct
MSKIHKIEAMIPKQIEKKKVAAYARVSALTEMTQYSFSAQVNYYSALIQKNPNWKYVGVYADKGITGRSIKKRKEFNRLIDDCNNGKIDLILTKSVSRFARDTVDTLNTIRHLKNIGVDVYFEKENIHSISQEGELLLTFLAAYAQAESENTSENIKWGIRKGFKVGKPNGYKAPYGYKWNGNSYSIVPEQGAIVKEIYKRYLDGEPAYSIAKALKKRGIKGQTGIPMDDSTIRYIVSNISYTETLLLQKWFFTQNHVRKENKGELPMYAVENMFEPLISKEDFQKALQIKKERAEAMPNKNPRLTAFSGIVKCGNCGCSVCRRTTRYGKKWVCNAKDRKGMAACDFRDIYEIELEAAATKALAVNEFKEDLVRREVKLITIDNAYIVFNLKDGKKKQILRTYTKGYSGFSCRLFCGNCRKMLEADSRTLSINGQKKRYKIWCCRKCPGQREFDDVIRKATQSLFNEPQCEGLFAQNIEKAIIYNDRIDFYFKEGKVITWEKE

SEQ ID NO: 23584 - protein, 525 aa, synthetic construct
MAQRKVTAIPATITKYTAVPIGSKRKRRVAGYARVSTDHEDQVTSYEAQVDYYTNYIKGRDDWEFVAIYTDEGISATNTKRREGFKAMVADALAGKIDLIVTKSVSRFARNTVDSLTTVRTLKEKGVEIYFEKENIWTLDAKGELLITIMSSLAQEESRSISENTTWGQRKRFADGKASVAYKRFLGYDRGPNGGFVVNQEQAKTVKLIYKLFLEGLTCHAIAKELTERKLPTPGGKAVWSQSTVRSILTNEKYKGDALLQKEFTVDFLQKKTKKNEGEVPQYYVEGNHEAIIDPATFDYVQAEMARRMKDKHRYSGVSMFSSKIKCGECGCWYGSKVWHSTDKYRRVIYQCNHKYKGGKPCSTPHVTEDQVKDAFVRAVNILLSEKEELSVNVQMVIAMLCDSAELEKRQTELKEELEVVVGLVERCVAENARVALDQDEYTQRYNGLVSRYEAVKAQFDEVTQAVADKADRKKLLEQFLHTVEGQAPVTEFDERLWSSLVDFVTVYSEKGIRVTFKDGTEIQV

SEQ ID NO: 23585 - protein, 400 aa, synthetic construct
MSDYYNQNHYAAAYIRVSTENQTELSPSSQLKIIRKFADEKGYIIDENFIFRDNGISGRYADKRPEFNRMISLAKQKPPMFSAVLVWKFSRFARNQEESIFYKSLLRKNGIEVISVSEPVDDGPFGKLIERIIEWSDEYYSIRLSGEVRRGMTEKAERGGIVSIAPFGYKVTGGRLVVNAEKARIVSKIFADFLNNKDINMICDNLNSSEIRTAKGNRWDYRAVEYILQNPVYIGKIRWNPICKTGRNFHNENLIISNGIHEPIVDEVIFEQTRQILFLQRIIGKEHSHKQTEIRHLIQNLVKCSNCNSTLVPIKNNFLQCSAYIHGNCHSSHSVRIEKIEKIVVKAINILKKNNLINDTFTIKDTYPLKMQNDLLSIIIKRIIFDRKASHLNIFLSQNK

SEQ ID NO: 23586 - protein, 521 aa, synthetic construct
MKKITKIDGVQNNNTAQNELRVAAYCRVSTGSDAQLESLEAQKTHYERYINSRKDWKFAGLYFDEGITGTKAEKRPELLRLIADCEAKKIDFVITKSISRFSRNTTDCLALVRKLQSLNIPIFFEKENINTGSMESELFLAILSSMAEGESASISENSKWSIKRRFQNGTFKLSYTPYGYDWDGENMIINPAQAAVVKRIFADILSGKSTNAIADELNAEKIPSKKNTNWTSSTIRGILANEKYTGDVIFQKTYTDENFNRHTNYGEVDQYIAPDHHEAIISHTDFEAANALVSQRALEKGVKKGSDKYQKRYAFSGKIICGECGDTFKRRIHTCTTYKYVAWACNTHLKDKSTCHMKYIRDDDIKAAFVTMLNKLIYGHRLILAPYLKALENSSGDEAIQRIQHLELLLDQNSEQRGTLTKLMAQGYIDQILYNQETNALLLQAETYRSDIEAITICMTGDSAKVTETNLLLHFVSHADMLTNYSEELFESYADHIEISSRNEIRFVMKCGLTFTERIGD

SEQ ID NO: 23587 - protein, 558 aa, synthetic construct
MLQTDKITALYCRLSQEDMQAGESESIQNQKLILQRYADEHHFFNTRFFVDDGFSGVSFERQGLQAMLREVEAGKVATVITKDLSRLGRNYLKTGELIEIVFPEYEVRYIAINDGVDTAREDNEFTPLRNWFNEFYARDTSKKIRAVKQAKAQKGERVNGEVPYGYIADPNDRNHLLPDPETANVVKQIFAMYVRGDRMCEIQNWLREHEILTVSELRYRRTGSCRHPRPHPTCIYNWPDKTLYDILTRKEYLGHTITGKSYKVSYKSKKTKKNPEEKQYFFPNTHEALIDEETFDLAQKRIATRHRPTKVETIDIFSGLLFCGECGYKMYLQQGAGTLERKHAYTCGKYRNRIRTGEVCTTHYIRKSVLQELVLADLQRVLSYVRNNEQDFIETANEYNAKATQKALTQQRKELEKAQARMGELNLLFRKLYEDNALGKLSDEQFAFLTSGYDDEKKMLTHKIAELSTVIDTATERSTDVKRFVALVRKYTEINELTYENVHELIDRILIHELDKETNTRKIEILYSFVGRVESGDEPTESISYFRQIGADVKSFAI

SEQ ID NO: 23588 - protein, 504 aa, synthetic construct
MKAVIYARYSSDNQREESIEGQLRECKEYAEKNGITILRSYIDRALSAKTDNRPEFQKMVQDSAKGLFDTVLVWKLDRFARNRYDSAHYKAQLRKNGVKVVSATENISDGPEGIILESMLEGMAEYYSAELAQKINRGLRENALKGKNNGGRIPLGYQLGEERHLKIDPLTAPIVREIYQRYAQGEPARSIIDSLNERHILTRMNKPFRQSSLHALLRNRKYIGEYRYRDIVLPDAIPAIIPHELFERVQMRVEKNRQAPAMAKAEEEYLLTTKLFCGHCGRMMAGESGTGRNGVIHRYYKCGGAKRKLGCHKKAVKKDWIERIAVQYTVQRVLQDELIAQIADKLVELQNTEDDPLPLLRKQLADTNHGIENMLNAIQQGILTSSTKGRLEELEKLRKDLKASILQAELERPKYSREDIIEWISRFKYGDPDSKEYQRQIIDIFLNSIYVFDDKLVFTYNYKNGTQTVTLADVSAAFGSDLQSQSPPNKSSSLVRVGRSFLCA

SEQ ID NO: 23589 - protein, 608 aa, synthetic construct
MNTAVNEYNYRFKLTDYAQFDRNRARNVAIYGRVSTEHEAQLSALENQLQWYDDQVKYHPNWTVCERYIDEGITGTQAKKRPAFLKMIEDAKQGKFDLIVTREVCRFARNVVDTLVVTRELKGIGVEVFFIDDNIWTMDGDGELRLSLMATLAQEESRKTSERVKAGQKISRDNGVLYGNGNILGYDRVGDTYVINEEQAETVRMIYDLYLQGYGSMKIAKILTERKRKTASGLIKWSVSNIMRAIKNATYTGTKCYNKSRSNNFLEQKRINNLDMSTYEYVEGDFPAIISQEIWDKAQAIRESRVKPVCVSAGKNTHSKRDSRDIWVNKLRCSCGSSYRKNKWHTKLDGKTSYGYQCYNQLNNGIKRKRAEIGLDTEGYCDSRMITDWKLDFMAKALLEHLWTERKESVLIALDLIKCYYKEEKSNETQSDTVTIQAKLDKANSRLTNLIAMRADGEISKDEYQAMRSPVDEEIKKLQKALDEIPQEKSNPKGLDIEGIRSTLNSLVDFSGSTISHDVVNRFVYLITPTSDTTFDWYVNLNGTADVKATFTAEGRKKNCIIKLEEIEKISSVHRGENEDNAHFIKNPHIFTYLHRLLSQTSNPHRMY

SEQ ID NO: 23590 - protein, 478 aa, synthetic construct
MTNQAEKTSYIENVAAYIRVSTQEQKLHGISIEAQEEKLNEYADSHGMKIVKFYKDEGVSGRKLIRKRPALQAMIQDAEKGNFRRIIFIKLDRFFRSVAEYHECMKRLAAGGVIWTATEEKYDLSTPSGEAFVNMKLTMAQFEADQVGERIRMINEYKVKSGQPLYGSQALPFCYQVKQSGDGDRRKYIAKRDEIIMEDLIDHFCKNRSVRAALHYINAKYSRAFSYSTIKNALTSELICGTYRGNPAYCEGYMTPAAFETMQKYIQHNPRTSQREHTYIFGGLIRCPCCGNMLVGSPTVLNRIGKSGQKLSYKYYGYRCYRGNLEKKCDFRTMAFEHRLEAIMLSEVEAVMREKHMYLLRLQSAPQRVAQHDLAELQQELARLNYAWQKGRIKTAADYDRQYDDLMARIDAANAERQELNAKPDYRKISRILSEGWKQLYISLDNDHKRAFWRAFIEEIQLEWTKDVKRIRDITFFT

SEQ ID NO: 23591 - protein, 581 aa, synthetic construct
MIDNCVRAVFYARVSTQEEQQLKALPKQIQENRDKIREKGWVLVDGYVDEGKSGTVIKRRDEYQRLLEDMELNKFDVVVVKDQERLQRNTRDWYNFIDRLVQNKLKLYFYLDNTFYSPDNALITGIKAIMAEEYSRNLSKKMNNSNKRRIEKARAGEEVSAMGNGQTYGYSIVNGKWVVDESQRELVKKMYEFYTELHSIRKVRDALNEQGYRNQRGNLFTDENIGRIVKNVMHKGWVILNRHHREFDSKETIEKLEDEWVIVKNDHEAIVSEELWDAVNDEIQSHRNKGNSGTRGKRGGTDTLSGKMVCNCCGRVLWKHASQGSYKSKEGRKYTYKRYTQWYCSGKMGRGELACTDPATISGVKLQKYLVEMADMFLDYSTVEYSKNLLKRRTISWLEDLRDKLTTPTDNGKIEQDLKALEGKRGKLIDLYTDELISKEEFKSRSVDLDAEIEKKKTLLVPVEENPDIKAIEDTIANIDAEIEALFEDEAMVEEKKVQFIQEHIKKIYVSKNSDVFIVLDNVAGAFLFIDKEDTRIEVVPVAEYNPKELSEEGITENDFVPFDRESMPKHYGRKRYDIFS

SEQ ID NO: 23592 - protein, 656 aa, synthetic construct
MSLRSKYTEHQICKLEKKEFMKEASFDDIFIDYGHDLNTLILCRESTAHEDQQKALNDQVERMKAIVDKHRQLHLVDDGIIIEDAKSGLAMDVRPKFQATIKRAVAEDIDVILVQEASRFSRNTGDFFYNMNILQNSGVGILIMEGEFWTYFMAPADYPRLANEVAKGQAESLTTARRVNRGIETYRSRGQLVSGNMFGYDLVKAVERKDNTYKINPVDGATVQLIFYMYVNKGIGTELIATHLNANNYPTAKRKGEWSASKVRRVIKNEKYANLIMYGKYKVVDTSTKKKIATHIKPVRTTTYDKDGNIIQERNVQYGTWEPLVDEETWWKAQEIMASRSNSYNLKDDTGKSKRCANGLRTSNDAYANKAYCCCGHTLSPQYTHAATDTKYAQFRYNCRWQINSHTDEYRKKHGLSPSDCTCKLPAVTDVAMRLMSIKVFEYLFTDIRDTIDDTVRIIEMANKQAVDSLNNSGVSVEDLEATYAKLNNRLSRFADMYADGDLTREQYRDKKSSVEEELKHTKELIDSKKLAISEQKKKSLDIETIKARLNTYVDLKGYGVSNEMIEFFVERIIRRPDNEYVWELNLTGQPSKPNKYKIKKYNKEYSDSLQDDSNFNIIKTFVISLDECKKFCETLAHRQFRASYWNQITVKIAVK

SEQ ID NO: 23593 - protein, 555 aa, synthetic construct
MRSAEIYGNQRGENVIGTTAQNDMRIVVIPAKSRDEIQRTTRLNVAAYCRVSTDQEEQENSYEAQISYYTEKIGKNNDWQMAGIFADEGITGTQAKKRPEFLKMIRLCRQRKIDMVLTKSLSRFARNTVDSLNYIRELKALGIAVIFEKENINTLETDTEMMLTIMSCFAQAESESISKNVSWGIRQSFKNGNVPMQYARLLGYKKGDGGNAEIIPDEAEVVREIYRCYLDGMSMNLIADRLNEKGLTTKGGSSPYRKMVVQRILTNEKYTGDALLQKTYVTDCITKKMRKNNGELPMYLVKNHHEPIISRSDFNRVQEEMARRSAKRTIADKLTKTGQGKYSAKYALSELLICGECGEHYRRVTWTANGFKEVKWRCVSRIQYGKKKCHSSPTVDEQALHRAIVSAINDLCTVKDDVAKALRESITEVLDPNQNGSIQAAQQRIDELARNMDELIMLATVPETAENAMSDIAKFSEEMKMLREFIETEKAKQTEVQHGSNELSNVLQSLEKEDFALTEYDDIVTRQLIEQITVDTKNTITVRFKGGFEMRANLN

SEQ ID NO: 23594 - protein, 500 aa, synthetic construct
MAEITIIPAKNHADEIVRTAAYVRVSSDSEDQLNSFAAQIRYYTELLQNSTDAVFVDMYADEGISGTSTAKRTEFQRLMSDCRKGKIDRILTKSISRFARNTKDSLEAVRELKTLGVLVYFEKENIDTDEISSEMMLAIYSQFALEESMSISRNVRMGFQKRMADGSYVPSAVPFGYIRENGKFVIDKEKAEIVRGIFSDYLNGVSAERLAEKYGVKLATVKYVLTNEKYTGDSIFHKWYTTDTLPFDCCENRGERDKYYVSETHPAIISREVFQSVQQLIERKGASRIGKFTVSYPLRKKIYCGECGTLYKRKSRSNRVYWVCRKHDESADKCSAKQIAEEIVYMAFVRMFNKIQAHHKALLAPMLRQLEALYEREKSGNAQLAELRKEISEIKRQAYLLTMLNSQGTLDAGYFMERTKELDRKLMTAQKQLHANLDDKDGERLDNLRKLIGIFDKAEQIDEFDEIKFGQIVEKITVLSETEIRFDLIGGIGFTERIER

SEQ ID NO: 23595 - protein, 427 aa, synthetic construct
MRIALYARVSTEEQAIHGLSIEAQSEALEEWAKQEHANVVGTYIDAGISARKPASKRPSMQRLLADIERGKIDMVVFTKLDRWFRNIAEYYKVQEVLERHGVSWKTIHEDYDTATASGRFKVNIMLAVAQDEADRTSERIKAVFDSKRKRGEAVSGSVPPGIKICNKKFTVDEDKAPIMRDIFNFFIANHSVYATQRYAANTHGFLRDTSTLKRLLANPLYRGRVVDEATFDLAKELLSVRSQRNSGSPRGRIYLFKGMLHCDVCGGMMSGIVCKDFYYYRCNKHTFTGNCPNSKYIRESHVEQWLLERVVSECDAYNSRITRERTERPRIDDAGIRRKMSKLKDLYLSDLIDRDEYERDYTELRQTLEKVQEAEPPAKPIDVEYVRSAIAMYDDLERPEKKEFWMRIVKEIIAYPDGTFSFVLRNI

SEQ ID NO: 23596 - protein, 525 aa, synthetic construct
MARAVTVIPPTIQPITHLARNAVVRRRVAAYARVSTSSEEQLTSYEAQVDYYTRFIQSKPEWEFVRVYTDEGISAVNTKKREGFNQMVRDALDGKIDLIVTKSVSRFARNTVDSLVTVRKLKEKGVEVYFEKENIYTLDSKGELLITIMSSLAQEESRSISENVTWGQRKRFADGKVSLPYSHFLGYRKGADGLPEIVPEEAETVRWIYSLFLSGKTTSSIASFLTREGIPTPAGKKRWAASTVESILKNEKYKGDALLQKAFTVDFLTKKQKKNEGEVPQYYVENSHPAIIDPAEWKLVQRELERRKAIGRSYSGNSILSSRLVCGDCGGYFGSKVWHSTDKYRRTIWRCNSKFTGEEKCQTPHLTEEEIKARFLDAFNTLVSDKERLLDECHTMQAALTDTGSLDSEISALLSEMEVVAELTKRCIEENSTTAQDQATYLERYNGLAERYETAKAKLGKLQAAKAQREAKAEDIGGFMFELAEYGDLITEFDDRLWLTVIDTVTVHRDGRLTFKFQTGHEIMA

SEQ ID NO: 23597 - protein, 438 aa, synthetic construct
MARTIQQISFPAPMRPSLKRVAAYARVSSGKDAMLHSLSAQVSYYSALIQKHTGWLYCGVYADEAFTGTKDSRDGFQSLLAECRAGNIDMVITKSISRFARNTVTLLETVRELKALGVDVYFEEQNIHTMSADGELMMTILASYAQEESRSASENQKWRIRRGFERGELVNLRFLFGYKIEKGQVEVDPEKAEVVREVFRRALEGESLSSLAADLNRRGVTGVLGGKWNAMRIREMLSNEKYLGNALLQKQYRNNHLEKKEIPNRGELPQYYAEGTHEAIIDQSTFDAAQRLLVKLREGTPVRSPWKKSAFTSMISCTVCDRNYKRCTSGKRHFWNCPTAVRTDLASCGTSQIPEKLLYDLSAQVLGLTQFDEPVFREKVKSIDALPDKTLVFHFYDGSTVARHWEYTSRAKSWTPEMKEKARQRALAQRRGEKWQER

SEQ ID NO: 23598 - protein, 569 aa, synthetic construct
MTNSNLVLADCPLMMEESTMKQSDKITALYCRLSRDDESQGDSNSIVNQKAYLSRYAKEHSFRNTEFFVDDGYTGANFQRPDWQRMMALVEEGKIGTIITKDMSRIGRNYLEVGMYTEITFPQNNVRFIAVNSGVDSANQQANEFVPFVNIINEYYVRDGSKKVRTSLRIKGESGEHLTTIPPYGYVKDPDNSEHWLVDPEAAQVVKRIFSLCMDGNGPTQIARMLKEDHVLTPTVYQDRQKRKVRCALPENPYNWNGSTVAAILERMEYCGHTVNFKTHRQSYKIKKTIENPPEQWKIFRNTHEAIVDEDTFQRVQELRRNKRRPARTGKSNLFSGVAYCADCGEKMYYCTSRNFEERQDHFVCSTSRKKGKDVCGTHFIRAVVLEKGVLKFLQILLWYISDCEDLFRDKLGAKRKEDFKKELAAKRRQLTQAQRRMEELDRLFKRLYEDNISGKINDSRFEKLSADYENEQTELTEKMQLLEQEITQQEEEADSIEQFILRAKKYPNLQELTPAVLHDLVNRVYVSAPDKSSGQRVQDVHISLACIGFLPESIIAEMLTHAAKSRTA

SEQ ID NO: 23599 - protein, 516 aa, synthetic construct
MARKKKVSPGNRLVAYYRYSGGSQQTEQSIEGQRRDCEAYARQHGLTIVHEYIDRHISGRGVESRLAFQQMIADSSKHLFDLVICWKTDRFARNRYDSAVYKKKLRDNGVRILYAAESSVEGPEGIILEGLMESLAEYYSAELAQKMRRGMRESALKGRAINPSRPLGLTTDEHKRFIIDEKNAPTIRFIFEHYAAGESSASIVEQLNAAGLRTSKGNAFNKCSIPRIIQNEAYHGVYICKAYDVRIDGAIPAIIDDDLWKRAQKMLTLNKQHRAPHSFHADYLLSGKLFCGCCHSLMRGISGHNCRNDVYYYYACGNKADGGTCKKKNIPKDVAENLVVNAICENILRPDTLEDLADAIAAAQQADVNQPDPERAMLEQNLADVHRKINNIIESIENGTASSRLSARLADLEQQESTLNYQLESMKEIHPPVLDRERILFLLEQFLISPNERTEDYNRRIIDTFVNRIEITDTEMLIYFNLSEASASEKQKNSQPNSCSTGNHLVRVARIELTAS

SEQ ID NO: 23600 - protein, 502 aa, synthetic construct
MEIQIREGNSRQKQKLKVCAYCRVSTDADEQENSLENQIRHYKEVITSNPDYEYAGVYSDFAISGFKEKRPGLQKMLADARKGKIDLILTKSVSRFARNTSIVLEATRKLKELNVGVFFELQNINTLSGEGELMLTILAAFAQAESESGSVGAKMVYQRKYEAGIPVQYLERSFGFKKDERGVYIADEEEAVWVRKIYDMAAQGYTLAAIKRYLNENNVKTVGGAKWLDSTVLRILENEIYKGDYIMHKYFVNEERKLVRNRGEVDAWYIEDDHEAIVSPKLWQRAQDALEAKRDYLAEGSVIEEFTEENYPYMNRIYCARCGHPLYKRIYSNGNRLNWGCSGTKRYGKSFCEGINIPDGVLRGAWHFDENMYIGEKQTDKGKKEFTYLKEASWKRRHKKKEPEPIPENTETEYPYREKIFCGLCGSRLVRHVNTKNHKVIWVCNGRKRKGKDFCDGTRVPDTIIKGWGEIKKDIYIQRKDDKNGKKRYSYTGKKPKGADRA

SEQ ID NO: 23601 - protein, 546 aa, synthetic construct
MRVSVNLNAQKPDTTTNAVIYARYSSHGQTEQSIEGQLAKGHEYAAAQGYTVVHEYIDRAMTGRNDNREAFQKMLSDTGKHQFQVVIVWKVDRFGRNREEIAFNKHTCKKNGVRVEYVAESLPNSPEAVILESVLEGMAEYYSIQLSQNIRRGQLESAKKCQCVGGSVPLGYTLDSDKHFVIDPQTAPVVKKIFDLYAEGATISEITGQLNEQGIRTARKQLFTKNSLTKLLKNEKYIGVYTYKDIVRVEGGVPAIVDKSTFDRVQELLKINRRAPSHTWTKVEYLLTDKLFCGHCGSPMVGESGFSHTGAKYSYYGCIKRRREKACDKKPVRQDWIEALVLDETVKLLHDDELMEYIIDRTWEYYQVTDKVQEEKAVLEAQLAEVDKAINNLVRAIEAGIFNAATKSRMDELDAQKAALTASLADLELTSGIRITRDHIEYFLLRLRDLDVKDRECQKRLVQTFVNAVFIYDDGRVKITYNYSGQSSTITLNQIASAEKGKGFVCCLPCSTSSPRFPRGVAAFFCFGVLGKIGCKYTTNFSCIVL

SEQ ID NO: 23602 - protein, 568 aa, synthetic construct
MQSKKKQDKAGITALYCRLSRDDGVEGDSNSVANQKKLLKRFAKENGLTNTRYYVDDGYTGTNFERPGFQKMIEDIDLGYISTVIVKDLSRLGRRYDMVGYYMDTYFPDRDVRFIAVNDNIDSDEGESEIAPFKNVLNEFYARDISKKCRSSYRIRGSTGEPLAPPPYGYIKSPDNPKKWVIDPEAAQVVRDIFKMALEGKSNETIARILQERKVLIPMAYWQEKGIRKGGKVTQPNKYKWCKTTVTKILTQQEYCGDIINFKTYSKSYKNKKRYDNPKENWVIFKDVHEPIISRDDFELVQMLVVKTKRRAPKQENGEKNMFCDFLYCADCGSKLWYHTNTTNKEIHYFSCSNYKKDTRGNCETRHYIRADAIEQIVMLELKRLAKYLESHEEEFAKLLAEKTNADMLAEQKTLETELNRATARNEMLTSLFAKTYEDNVSGKLSDEMYMELSNKYEVERLELKTKIFEYKERLAKISEMEQNKDDFLKAVRKFMEMESLTAPMLRELIDHIDVYEKEGGKKNYTQRIVIYYRFVGYLELPSSDDENYKANTRKGVDVEYIPTVKSA

SEQ ID NO: 23603 - protein, 463 aa, synthetic construct
MSEKIKRCAIYIRVSTSEQMMHGKSLEAQREYLTTYAKDHGMIPVGVYADEGKTARKELKKRKAIHALLEDVKAGKIDVILFWRLDRWFRNMSDFYKVQDILDEYGVHWISASEPGINMETRDGRLQLNVVLSIGQNEVDTTSERIKFVNEASIRQGKVIFGDCNMPRGYKVGIVDGKKCMVKDPDQEEIVNAFYDYFEKHQSKQGTLRYMQQNYDPTFSYGVLRTMLSSEFYKGTYRGIPYCPAYVSEERWARLQQISKKNIKHAPSGRIYYFSGLIRCPSCGQILCGTGCRSIINRKTGEKRDYCYYRCNRAMIDRICTNRHRLSQNLIESYLLDNLEHEFEAYKIRVEDIKQRKKKAPPVRTEDQIEKEMERLNILFQKGRVSWEYYSQEYDSLEKEKSNLKNVIVEPEPDYSFIESLLLKDFRGIYASLAPENKRSFWKNTIREIHLKNDYTVDYVDFF

SEQ ID NO: 23604 - protein, 643 aa, synthetic construct
MKRNPNALRFTALYCRLSRDDGMDSESNSISVQKMILSKYAKEHGYDITKFYVDDGYSGANFERPGFKEMLADADAGKIGTIIVKDMSRFGRNYLEVGLYTEKRFPSLGIRFIAINDGVDSNDQASNEFTPFRNIINEWYCRDCSRKMKASYKARAANGSHLSGFASYGYQIDPDDKKHLIVDPVAAEVVRRIFQLFIGGLNINQIATRLNQEGIAAPREHKGNQGIPLSRGRPSLVEVPNGWRQQSVRRILDNYVYCGHSVSLKTTTTSYVTHEKVRNDRENWIIVQNTHEPIIDEETFEIVQKIRQRGKRITKNQHNKGPLNLMVYCADCGGKMYFHQNSRNPDASGGFFCGTHNLYKTCSPHCIPKDILEAGVLANLQKITTLARDSEDEFRELIGAKLEAGETEMARKAKTELIASQQRADEIDAIINRLFEQNVAGVLSDRRFQTMLQTYEAEQKSLQEKIENLQNLIGDAIAETESEEEQRNACFLNLVHQYTDIKELTFEIVTAFIRRVIVNEAEGKTRWDRHYSVVVEYNFIGVVPLPEEPVPDPVDEITAAVGYPEIRDFLLENETITNANVRELTKMTSSQATVFLRKLCDVGVLAIGARKTCGRFYQRVISTEHLEALTWPEPFEMPGSMDK

SEQ ID NO: 23605 - protein, 456 aa, synthetic construct
MRNKEIAPALVRVALYIRVSGEEQKIKGLSLEAQQERLEAYARERGWVIVGIYIDAAKTARKNIHKRTEFQRMMDSVKRDEVDILLFARLDRWFRSVADYYKVMEVLQAHNCDWKTTDEEYDTTTANGRLYINVKLSIAQNEADIDGERIDVVFDSKIAHGTVVSGSAPFGFRVNEEKRLEVVPEDAAIVQDAFNYFENTVSQRATVRYVRETYGVNWCDATFRRMLKEKLYTGVYDRGGRYNDQFCPAIISRQQFDRVQALLTRNVRSAPSGKVYIFTSILTCAECGHKLVGYKSSDYFYYRCNQHFQRGRCSHNHSAREDVVEQWLFEHLGEELDRCQLEWDVEAAKKKASVARTDKAALKRKLTKLKELYVNDLIDIEDYKKDYQIYVSALNQIPEPAQEAPPDFAAVRRLLDNSFRTIYDTLTREEKRTLWRSVIKEIRIDNDQNITGVVFG

SEQ ID NO: 23606 - protein, 502 aa, synthetic construct
MEIQIREGSREQKRKLKVCAYCRVSTDADEQENSLENQVRHYEMVIKANPDYEYAGVYSDFAISGFKEKRPGLQKMLADAEKGKIDLILTKSVSRFARNTSIVLEATRKLKELNVGVFFELQNINTLSGEGELMLTILAAFAQAESESGSAGAKMVYQRKYEAGIPVQYLERSFGYTKDERGVFVADEAEAVWVRKIYKMAAEGYTPASIKRYLNENGIKTVGGVQWVDSTVFRLLENEIYKGDYIMHKHFVNEERKLVRNRGEVDAWYIEDDHEAIVSPELWQKAQDALAAKRDYLAEGSVIEEFTEENYPYMNKIYCAKCGYPLYKRIYSKGNRLNWGCSGTKRYGKSFCDGINIPDGVLRSAWHFEENTYIDEKASDKGVKEFTYLKERSWKRRHKKKQPSAIPENTETEYPYREKIFCALCGSRLVRYVNPQSHKVTWVCSRRKRKGKDACDGTRVPDTIIKGWGEIKKDIYIQRKDDKNGKKRYSYTSKKPEGADRA

SEQ ID NO: 23607 - protein, 563 aa, synthetic construct
MESERMQHSLSAQVSYYSALIQKNPEWEYAGVFADYGISGTGTKKRDEFNHMLAECEAGNIDIILTKSIQRFARNTVDLLNTVRHLKELGIEVRFEKEKINSLSGDGELMLSILASFAQEESRSISENVKWGTIKRFKQGIPNGKFSIFGYEWQDDKLVIVPEEAEIIRWMYAEYMKGASRIEIGRALMDRGIYTRQGKPWVDSNVKVILTNITYTGNMLFQKEYCEDPITKHRRKNYGEMPQYFVEDTHEAIIPMDEWQAVQAEFKRRRDLGPFGNKSLKLSAFSTKITCGCCRKHYRHSGKRNTAGEVYYIWICQTKSQKGVSACPSKNIPEKMLQNTAAKVLGLDKFDEDVFSQQIEEVIVIGDDTLTFRFYDGHEVTTKWQSTAKTDWWTDERRKLWGERHKRKDTNPNRNTFYEFTGFIKCGCCGANYRCQSGKRKDGTPTRSWYCTGPRSECRNPAIRDETMKRLVTEILGLDEFDEAAMDAQIESATILDHMVTFHFRDGHIESRDFLDKRHGTPWTEERREKAKKSMKAAWTDERREAMSERIKKIRSEKKWPNP

SEQ ID NO: 23608 - protein, 523 aa, synthetic construct
MAKSVTTIPATLSRFTAAPINSTKKRRVAAYARVSTDNEEQLTSYEAQIDYYTNYINGRDDWEFVGVYPDEGITGTNTKKREQFRQMVADALDGKIDLIITKSVSRFARNTVDSLTTIRKLKEHNVEVYFEKENIWTFDSKGELLLTIMSSLAQEESRSISENCTWGQRKRFADGKVTVPFKRFLGYDMGPDHNLVVNPEQAKLVKRIYGMFLQGQSPFQIARTLTEEGIPSPGGKDHWNPSNIKSILTNEKYKGDALLQKSFTVDFLTKKKKANEGEIPQYYVKDNHEAIIDPETFEMVQTLMTTRTKGRNRKSSVSIFSSKVKCGDCGSWYGPKVWHSNDAYRKVIWQCNHKFDGQKCATPTLTEDEIKELFLRAANQVIDQKEQFIAIYEQVLSRSLDTTALESEISELEAEINIAAELIEECIKENANVALDQAEYQKRYDALVVRFDKAKARHTEVTDLIAERMARKHQIEAYLKNLWSREPLTEFRETDWLAMVDYITVHSKKDIRVTFKDGTEIKA

SEQ ID NO: 23609 - protein, 700 aa, synthetic construct
MESNAFLNDLMSKMKLPEAKGKKKAEQSESVAQILAAMQKVKTEKKKPPVTSYAPTKEMPVNELESMEEFSQLASDVMQECRPAIPAVKTSISEKTVRVAAYIRVSSTNPAQEDSYEMQERYFMSLLAGNAGWTSAGIYSDHGISATSREGRTGFNRLLRHCKQGKIDRVICKSISRFARNTQDFLVALRTLKENNVTILFEREAMDTADAYSEFILTTLAAIAQEESRSISANIAWSNQKRFPAGNVCNKDIYGYEFRKGEYTVNENGYRYRAVFIIPEEAEIVRMVFRFFTKEELSFTQIAQKLDALHIPPPNSGCRQRQKRKPTVLPAGALKEEDKRGWTATDVRYMIANVRYCGSVLCQKTYTDHRNGHKQKVNKGEKPKYLIRNHHPAIISEELWQEAQEVWKAYTAKYRGIEKGRNERNYSKLLLCGECGRYFQGHSTTRTTIWRCATKLAQQGQKRCRMEPIYEEQIQTLLCKAFAEKFKLGEKMDAEVHEVMQMISKAPIDNARNQALKNLTEKLREIHDFDHMEQEGDFLKRQLSAVNYSIRDVHQHIRDIQAEKEALKVRCEVLGEPRDKEAVTELENRLLNEEEQLEKLEHEAQQQAEQVRYMEDYWKKLEQTHEIREKTLQWLDSLAGGTQMFLDEAVGTYVKAFVLSVTIFSPKHFRIHWFDDTCTEVECDSVFEGYQQPGMIRRKY

SEQ ID NO: 23610 - protein, 587 aa, synthetic construct
MGKIADKLKQIRVAIYVRVSTHYQIDKDSLPVQKEELIAYAKYVLNADSYEIFEDAGFSAKNTDRPGFQQMMSRIREGEFSHVLVWKLDRISRNLLDFAAMYDELKRLGVTFVSKNEQFDTSSAMGEAMLKIILVFAELERKMTAERVIAVMISRAGNGQWNGGRIPFGYNYDKNAETFSVNETEAAVVLKMFDLYEETHSLLQVAKALNASGSRHRSGKEWTPTTVSIILKSPFYTGAYRYNYYDMSKRNSRQDVKPEGEWVIVEDHHPAIIDPVRWKNVVELLERNRRGWQSAGKTYTRKNIHVFAGLLTCGVCGSIMSATSNARAHKDGYRPSNYACMSHRKNNGCTNKYITDTKIGPFVLNYISNLIRAKESFGKTTSPETLQKKLLRGDMFKDIVRIKEPGLMELYNLYRSQLPGVKYASKVAERSGSSDTASEKDILLSERRRLERALSRLKSLYLYSEEDMSERDYVIEKNRLTESLDKVNERLDKLNDGLSSQFSISDEELLAKASYFIMSQKLLDRRFVDYRRLLKETDPRILKEFINSVSSNFCIKNGRIESITFKNGIIHEFVYADEEPVAEASEG

SEQ ID NO: 23611 - protein, 523 aa, synthetic construct
MRFFSYGRKSVFSDKSDSIDNQFRMNREYCESKFSGQVDSWQQFSDEDFTGANTSRPDLQRMLSFIKGGFCDVLVVYQLDRLSRDVRDFANIYALLEEHGVMFISIKENIDTTTPIGRAMMYVTVVFAQMERETIAARVTDNMLGLAKKGYWTGGNPPVGYVRKHIVVNGKKHCSIEVDPDGARYVTQIFDTFLAYNCSLQGMETRFKNQGIRTQNGKFFSTAQLHKMLTMPYCVEATPEVYDFYAAKGCIMDPGSPREMWDGSAGVIIYGRSTEKNKKHQLQPPEKWTVCLGKHKPFMPAEKWLAVQSRFTQNKCIKDAKWPVPLLKGVLRCKCGNLMQVSRKKKVDGTCSSWYYCRKRMRQGVDACDMGQIKCDLLDEEVLELFRGITADPALIQKFVKAEAPADVPDLKAAQARVSACERKIGRLAASLALAEDSAASKYIIAEMERLDVELGALKREASLAEMESHRAAASAKDAKATAAEIAKLIHGLDGFDDKEKNAIARAVIQECTWDGERLFITL

SEQ ID NO: 23612 - protein, 513 aa, synthetic construct
MPVAKLIAPTTKQEIPKLRVAAYCRVSSNSADQRNSFATQEHVYTKYIAKKQEWELVDIFADEGLSGMKADNRPEFQRMIRMCELHQIDLILTKSVSRFARNVKEALSYTRKLKLLGVGVQFEEDGVNTLAMADEMLLNTFAAIAQEESKSISQNQRLSIVKRMESGEYIASNAPYGYRLIDKKLVIYEPEAEVVRWIFAAYLNGMSTVEIAHELSAKSVLTKGKKEQWKANRIAYILSNEKYDGDTLFQKYYGEETVPFKKHRNYGEMDQFFAYNTHDAILPQGMFQAAQTLLQSRGRKFGRKMSQSEYPLTSRIRCSECGAFYHRKVRNGTVKWVCSRHAADTTACNSGYYSEERIYDGIITMINKLRFCEEDILGQTIQKLEFAAAAYKRNNRAASQLSQSIAELNAKLLALERLRTKGYLAADIYHTQAREIRQQLDKLKTERYSSFESKILTMLEDVRKLKSLIDELEQPLEVFDEKLFHEIVTDICINHHDEMTVTLLGGLRFTEQI

SEQ ID NO: 23613 - protein, 543 aa, synthetic construct
MEVQRIPKRTVSVIEPQKSILVDKEKYHQKRVAAYCRVSTDSEEQLTSYQNQMRVYTEMIAARKEWEFAGLYADEGISGTRADKRPEFQRMIRDCQNGKIDYIITKSVSRFARNTVECLEYVRSLKAQGIGIFFEEQNIDTLKNESELYLVIYAGFAQSESESISKHITWTYRKNFEDGKVSFQYKRLLGYQKGEDGKPEIVPEEAAIVERIFEMFLAGQPVGLIAQTLQSENIEIPGKDLSFSKNMIMNILRNEKYCGDSILQKTVTVDCISKTRKANHGEAPMYLVENSHPAIISRDIFHRTQEELARRKAFRPKSDKTSITQSGKYSKYALSEVLHCAECGSRYKRVTWNIRGKKKIVWRCVSRLDYGKKYCKDSVTVEEAALHGAVVRALNRFHAEDESTYLTLMKATIGEAIGINGGSEEIDLLTRRIDALNKRMLELVNETVAAGKDVESSEDEFKSISDQIEQLNRRIAAIQESVRGDATRQARLEEIQSIIAKRNANETQYDDSIVRQMIECIKVYGDGRLTIIFGGGYEIEETL

SEQ ID NO: 23614 - protein, 550 aa, synthetic construct
MKKENEIRAVVYARYSSHSQTEQSIEGQISAAQVYAKAKGYTIVKEYVDRAKTGKNDNREAFQQMLSDTAKHEFSVIIVWKVDRFGRNREEITFNKYRCKKNDVRVEYIAEAVPDSPEGVILESVLEGMAEYYSLQLAQNIRRGIRASAEKCQAIGGHCSLGYAIDPKTKKYVIDPDTAPTVQLIFEKYAEGYTGMDIVRLLNEKGLRTVRGKPFTKNSLWTILKNERYAGVYLFKDEVRVEGGIPALVSRETFDKVQEMLEINHRSPVNTWNRATYLLTDKLFCGHCGSKMVGECGTSRTGATYKYYICAGKKRERNCSKKAVRQDWIEKVVLQQIRRVLFDQEFLEFIAHKAYTYYLEEKKKLDQSAAIKAQLSSVESSIDNLIRAMEAGIFSASTKSRLDDLENQKAALTRTLAEIKLSEESFDLTEDRILFFLESMRGLDMDDVDSRKRLVKTFVNAVYLYDDKITLAFNFTDSCEKPEIIELTDITDGVVEKFVHRASCSTKKAPYFVGSMVLFFFIPAKRSGVHRSPCRRASDTPDLNRNRYLI

SEQ ID NO: 23615 - protein, 485 aa, synthetic construct
MPTSDLKIAAAYIRVSTDDQEEYSPDSQVRLIREYARKNGYLLPEEYVFQDDGISAATARKRPAFNRMIALAKEKVRPFDAILVLMFSRFARNREESVLYKGLLRKQGISVISVKEPAVDGPFGTLIESIIEWFDEYYLINLSAEVKRGMSEKFLRGEAMGTAPFGYRIDSANKTFTVDPERAEIVCDVFRSYADGAGLRDIAVQLGDAGITTRRGNRPDSRFVEYMLRNPVYIGKIRWTPGHKTRYSRVHIADGVEVVDGKHPPIVSMDLWEAVQRRMDQRKAAYGRYQRQAPAAWMMRGLVRCSACGATLIMAGRSSSCPFLQCHSYAKGACHTSHSLSLRRANAAVLTGLRCSVGTLTFHMVPHLTSAPSRTADYGRLLEQERRRLARCKDAYQAGVDTLEEYRDNKARLEERIRRIEEQAASAAAAPESLDKAAYGKKAADILRFLETSADEGAKNEVLRSVVDHITYEKASWHLAIYFYT

SEQ ID NO: 23616 - protein, 523 aa, synthetic construct
MNFCCYGRKSVFSDKSDSIDNQFRMNREYCESKFSGQVDSWQQFSDEDFTGANTSRPDLQRMLSFIKGGFCDVLVVYQLDRLSRDVRDFANIYALLEEHGVMFISIKENIDTTTPIGRAMMYVTVVFAQMERETIAARVTDNMLGLAKKGYWTGGNPPVGYVRKHIVVNGKKHCSIEVDPDGARYVTQIFDTFLAYNCSLQGMETRFKNQGVRTQSGKFFSTTQLHKILTMPYCVEATPEVYDFYAAKGCIMDPGSPREMWDGSVGVIIYGRSTEKNKKHQAQPPEKWTVCLGKHKPFMPAEKWLAVQSRFTQNKCIKDAKWPVPLLKGILRCKCGNLMQVSRKKKVDGTCSSWYYCRKRMRQGVDACDMGQIKCDLLDEEVLELFRGITADPALIQKFVKAEAPADVPDLKAAQARVSACERKIGRLAASLALAEDSAASKYIIAEMERLDVELGALKREASLAEMESHQAAASAKDAKATAAEIAKLIHGLDGFDDKEKNAIARAVIQECTWDGERLFITL

SEQ ID NO: 23617 - protein, 491 aa, synthetic construct
MNVIIYARYSSDRQTEQSIEGQLKECYEYARRNGYTVVGEYIDRAISGTTDHRPEFLRMITDGDKKLFQAVLVYQLDRFARNRYDSATYKARLKKNGIRVLSARENISDDASGVLMEAVLEGMAEYYSVELSQKIRRGMDINAEKYLSTGGNVALGFYVDDKKRFQIDPNTAPVVKRIFEMYASGHSMADIIRYLNANHVRTSYGNAFNKNSINRILRNKRYIGIYTYRGTEIPDGLPRIICDDLFYEVQDMIDKKKKAPARAKASEGYILSTKLFCGHCKAAMTGVSATSHTGKKYHYYQCVSNRRDKSCHKKSVRKAYIEDFVFTETLKLLTKENIDRIAKEVVLLCERETDTGNLKRLQKLLKENERATENLLKALESGQIIDVIAERISQKKREHSELEHQILVETTAHPTPTVDEVRFFLNQSRKGDVNDHKYRQALVDTFINKIYLYDDKMTVLYNTQDSHSDVTIDELSSSRVALVDLISLNPK

SEQ ID NO: 23618 - protein, 490 aa, synthetic construct
MPEALNAVIYARYSSDRQTEQSIEGQLRECYAFAKANDIAVIDTYIDRAISGKTDNRPAFQKMIEDSAKRQFQAVIVYRLDRFTRNRYDSAIYKARLKKNGVKVLSAMENLNGSPESIIMESLLEGMAEYYSVELSQKITRGMRENALKGKALGGQRVLGYKVNSDCYFEIDETTAPVVVDIFKLYSSGKTVKEICDILNARGVKTARGGAFNKNSLHTILTNKKYIGIYKTKYGEIVGGIPAIIDKELFEMVALRMEQNKKAPARAKAEINYLLSTKLFCGKCRSAMVGESGTSKTGKKYYYYACVKKKREKACDKSNVKKDWIEDLVIQRTVTDILKDDVIEKIADRLVELQKAEAAESGTMLYLENSLAEIQVSIKNIMTAIEKGIITESTKTRLTELEDEKRNVEIEIAKESIARRIISREQIIYWISSFKDGDITSEKYRQQLIDTFVHAVFVYDDKIVITYNYSGENNTATISDLDLSSPPKLP

SEQ ID NO: 23619 - protein, 516 aa, synthetic construct
MRGVIYARYSPGPRQTEQSIEGQVADCQQYAEEHGIDIIEIYADRKVSGKSVVGRDEFQRMLRDAEKGRFDCVLVWKIDRFGRDRQDIAMGKMTLKRAGVKLMYARESVPEGPEGIILESVLEGLAEYYSADLRQKVIRGMRETAKKGQYCGQSLPIGYKVDAERHIVVDEREAAVVREAFKLHIAGGQIRDIVQLFADRGIIGRRGKPVSNAVVYRMLRNEKYLGEFYIQDVKLNVEPIIDQATFLEAARHFKTSRNNAAGRAKVNYLLSCKMFCGYCGSMISAEAGTGKLGKVYRYYKCGDKKRGKACELKPFPKDHLEDAIILATVNDMLTDEMIEKLTVRILEVQEQENADDPVVGLRRRLDSNKKRQRNLLDAIEEGGARGLVSRLAALEEEEEQLVLEIQRAEIKRPRLTHEVVEAWLRSFRVGDVTDDDFRARLVDTFIARVELRNDEALIFYNIREKGPHSRVRVRPEWWRRRELNPCPKMYPWRLLRAQSILSIPFPVRESTHSQDQ

SEQ ID NO: 23620 - protein, 521 aa, synthetic construct
MSNITIIPARPQRANSQQNETEKPKLRVAAYCRVSTDSDEQATSYETQVSHYTEQITRNPEWAFAGIYADDGISGTNTKKREEFNRMIADCMGGKIDMIITKSISRFARNTLDCLKYIRQLKERNIPVFFEKENINTLDAKGEVLLTIMASLAQQESQSLSQNVKLGLQFRYQRGEVQVNHSRFLGYTKDENGRLVIDPEQAEVVRRIYREYLDGYSTDKIAAGLERDGILTGAGNPRWHTSTVAKILRNEKYMGDALLQKTYTVDYLSKKRIKNNGIMPQYYVENDHEAIIPKEIFMRVQDELVRRRLVKVSPNGRKHGFSSNHVFSQMIVCGECGELFRRVHWNNHGCRSIVWRCLSRLQPTGVICHARTVSEEVLKNVVVQAFNELLGSRSTYQKRLRDNLAVVLRGYEDEQALEIDKRLAELQQDLINHASRKEDYNDIADEIFRLREMKQKNFTDTAVLDEQVKRINELNEFIEQQDSELTEFDENLARRWLKEIVVWDDRFSVELKSGVNIEIEI

SEQ ID NO: 23621 - protein, 521 aa, synthetic construct
MKTVTKIEANQRTTGSEKKLRVAAYCRVSTDSDDQLESLAEQKKHYETYIQAHENWNFAGLYYDEGISGTKKEKRSELMRLLSDCEAGQIDFIITKSISRFARNTTDCLEMVRKLLAINVAIYFEKENINTTSMESELVLAVLSSLAENESVSISGNEKWSIRQRFQSGTYKMNPPPYGYRWNGEQLEVNNDQAEIVKRIFAEFISGKGVMHIARGLDSDNIVPARGKHWCQSSILRILKNENYTGNAVFQKTFTDESFRRCVNYGQLDKYLVADHHEGIISKADFESASALIDRHSVEKNVTKGSHKYQLRYCFSGKIVCGECGATLKHRTHRLGGETYEAWCCSTHIYNKESCSMKFIRDDDIKLAFVTMMNKLVFGHKLILKPYLLTLRSSSTDSSIQRIQQLRLLIEQNTGQQETLTRLMANGFIDRALFGRELNAIMAQTDEYRAEIDTLSSSVTGDGAKLKETERLIKLVERGRMFMEFDAELFSKLVDRICAFSRNEIGFVLKCGLTLRERIGE

SEQ ID NO: 23622 - protein, 524 aa, synthetic construct
MATVTKIPATVSRFTAAPIAVKQKRTVAAYARVSTDHEDQLNSYEAQCDYYERFIREHDEWEYAGLYSDEGISGTSTKRRNGFNQMVEDALAGKIGLILTKSVSRFARNTVDSLTTIRKLKEHGTEVYFEKENIWTFDSKGELLISIMSSLAQEESRSISLNVTWGQRKRFADGKATAPFSVFMGYDRGENGEFVLNLEQAKVVKLIYAEFIKGFSFVAIARKLTEMGIKSPKGLKSWNPSTIKSILTNEKYKGCALLQKRYTADYLTKKVVVNNGAVPQYYVEDHHPAIIEAETFDRVQDLIAHRSREKHFSGSTIFSTKIRCGECGGWFGSKVWHSKDQYRRVIWRCNAKYADRKSKCGTPRVTEDEVKAAFIRAVNKMSGDRKALMADLREVQQAFSGSEKLESRLRELDERLNAEADEVQEMIATNARVAQNQDEYSTAYDAAVGRYESTKAERDSVAAEIRQKGIRRREFERFITELEKLPDAVTEFDESLWGSMVEYVTVRKDKTMVFTMIGGTEIEA

SEQ ID NO: 23623 - protein, 550 aa, synthetic construct
MQPKKNNKIGITALYCRLSRDDGMDGESNSIVNQKTLLSQKAKEKGLTDTKFYVDDGYTGTNFNRPGFQQMLSDIEMGYIYAVMVKDLSRRVRDYVSVGNYTDVYFPDHDIRFIAVNDGIDSEEGESEIAPFKNILNEMYVRDISKKIRSSHRLRGSMGEPLSQPPYGYMKSAENKKKWVIDSEAAEVIKSIFKMCLEGKGNETIARILQEKQILVPMAYWQSKGLPRGGKKTQPNPYKWCKITIQKILSQQEYCGDVINFKTCSKSFKNKTRLPNDPENWAIFKDVHEPIIARGDFEKVQTLIAKAKRRAPKPKNGEKSIFCDLLFCGDCHGKLRHHTNTINKDIHYFVCANNKVDYRGSCPGRHYVRADAIEQVVMLELRIMAEFLAADEEAFAELFAQKTDKELLKEKKHDEAELQKAIARNDTVSPLYEKLYEDNAVGKVSDEWFMQLSHKYETERLELKAKIKTLRQKLSECGQREQERENFTSAIRRFMRMDRLTAPLLCELIDHIDVFETDGKGKNRTQRIVIYYRFVGYVEIPEVSRKTNVL

SEQ ID NO: 23624 - protein, 522 aa, synthetic construct
MARSVTVIPATITHLPAMASIKRRVAAYARVSTDSEEQLTSYEAQVDYYTRYIQSKPEWEFAGIYTDEGISATNTKRRDGFNQMVEDALAGKIDLIVTKSVSRFARNTVDSLVTVRQLKEKGVEVYFEKENIYTLDSKGELLITIMSSLAQEESRSISENVTWGQRKRFADGKVSLPYKQFLGYEKGEDGFPKIVPEEAEIIRLIYSLFMEGKTPTTIAKVLTQAGIPTPAGKSKWLSGVIQSILTNEKYKGSAKLQKRFTVDFLQKKMKVNEGEVPQYYVENSHEAIIAPDEWEAVQAEMQRRKALGTKYSGNSVLATRLVCADCGSFFGSKVWHSTSKYRRVIWQCNHKFAGGEKCKTPHLDEADIKTRFMTAFNILWAEKAELIDNCRLIQKTLTDCTTLDAQIAELIEEIEVITELTKRCIAENSSSAQNQEEYTKKYNGYVERYEKAKAKVEKLQEQKEARILKADSIGAFMFRLSELDEPPTEFDDHLWMQTIDKVIVHDDGRLVFIFKNGTEIEG

SEQ ID NO: 23625 - protein, 436 aa, synthetic construct
MERIVETVEWAVPKQPKAMRVAAYARVSSGKDAMLHSLSAQISHYSSMIQSHPGWLYRGVYADEALTGTKDNRAEFVRLMDDCKAGKIDLVITKSISRFARNTVTLLQNVRELKSLGVDVYFEEQNIHTMSADGELMMTILSSYAQEESLSASENQKWRIKRNFEAGLPWNSTMLGYRHQNGTLVVVQEEAEIVKEIFADYLSGMGYNAIAKKLNDKGIRTRRDKSWGQSSIQKMLHNVTYTGTLLLQKTYSENHLTKRKMKNEGQFPMYRVENSHEAIIPQSVFEAVQAESTKRALRHHKAGKGLTRYPFTGMLECACCGKNYRRKVTNGGPVWICGTYNSLGKAYCKSKQIPEPTLISVTCTILNIEEYTEEALHRILDSILVQNGNRLVFKLKNGTEKTAVWQDRSRSESWTLEMRKKAGEKTKRRNEKWQDQ

SEQ ID NO: 23626 - protein, 519 aa, synthetic construct
MKKVTKIDKIQPAKNAEDKLRVAAYCRVSTATDAQLESLEAQKSHYENYINSRDDWCFAGVYYDEGITGTKASKRLKLMRLLADCKAKKIDFVITKSISRFSRNTMDCLEIVRTLLNLNIPVYFEKENINTGSMESELFLSVLSTMAEGESASISSNNKWSIKKRFENGTYRLSSAPYGYKLESGGLQVVPEQADIVKRIFRELLSGKGMYSIAKKLNAEQVPTQKGGRWTSTSVHNILTNEKYTGDCIFQKTYADSNFNRHINNGELNRYLIQNHHEAIISHEDFNATAALIEQRAAEKGIESGSDKYQQRYAFSEKLICGECGNTFRRRIHKGKYNSYVAWVCNTHLSDTNRCSMLFVRDDALKLAFATMLNKLIFSYRLLLKPYLAAMQSNTADEALLRIQYLENQLDQNAEQRSTLHKLMAQGYIDQILYTQECNELLLQARDFRSEIEALNNTVAGDTTKVYETERLINYCKRGEMLTDFNKSLFELFVDHILIYSRQKIGFVLRCGLTFEEMI

SEQ ID NO: 23627 - protein, 569 aa, synthetic construct
MKQSSKKHELGTAALYCRLSRDDNMDSESNSIQNQRKILQKAAKDKGYTDTIFFVDDGITGTTMKRPGFQKMLTAIEAGYISAVFVKDLSRLGRNYIEVGKLTEEFFPLHDIRLVAVSDGVDSDEGEDDFTPFKNIMNEYYAKDISKKRRIVNKMKGNAGVPLSPPPYGYIKKPDDPRFWVVEPEAAEVVRRIYRMALEGYGLAETAAQLAADGVVNPTYYWRSRGTSRGGSKSTVEPTKWGHTTVKKILTLQEYCGDVINFKSYSKSYKMKKRIENPEENRAIFLNVHEAIIDRQTWEKVQALQKGTRRKKPTVTQEPSVFSGLLKCPECGGNLNFHFNQNNHDIKFFSCQNHNSGYRKCSKTHYIRLDFLEQVVLYEVKRLACFASEYENDFIKAMIGRSAKVAENTALRKQRELDALTARDRELDMLFERLYEDNVAGKIDDARFAKMSKRYEQEQGENAKKIKALRLELKKDESKRMDIDDFLETVRRYTDAATITKRMVAELIDHIEVYHAEKQDGITNQRVVIHYNCIGAFDVPDRRKIPEADIIMETRKGVALSYAPEQVAV

SEQ ID NO: 23628 - protein, 495 aa, synthetic construct
MKQYCMYLRKSRADAEAEARGEGETLARHEHALQELAKRQHLPIVKVYKEIVSGDSIAARPQMQQLLQDLEQNQYEGVLVMEVERLARGNTIDQGIVAQAFKDSETKIITPVKTYDPNNEFDEEYFEFSLFMSRREYKTIKRRMQAGRIASIKEGNYIGTNPPYGYRKIHPAPKVRTLEIVEEEANVIRMIFDDYLHHGKGAKAIATKLNLLQILPQKADRWECVSVRKILKNPIYAGKILWHTKKDGDILAEGHHEGIISYESFCEVQKRMKKKAVPQTQVGTELKNYYHDVMFCGNCGHQMRRRPAKIRDGYMLCLRNECRGKVCCSPIEIVDEAVLAAVRARLNDLELSASDSHTQSQQTQREEQQNKAAEEIQAALQKLKKQKDKLYTLLETDVYTTEVFVERLNIVEKQEKELKIELEHLRVEQEQTENRLDANTSVAFLRQLLDEFSDAQPKRRNELLKQVIGKIVYHKTERMCRNRMQSDLRLDITFL

SEQ ID NO: 23629 - protein, 464 aa, synthetic construct
MARSVTVIPARSQRVRTGHKAVQEKKIRVAAYCRVSTDQEDQLHSFEAQVEYYTKYINEHENYEMAGIYADEGISGTNTKKREQFKKMIADCEDGKIELVITKSISRFARNTQDCLAYSRKLKNLGIGIIFEKENINTLDSTGELLFTILSSLAQDESRNISENCKWGIRTKFKNGEMHLNTFKFLGYDKDENGKLVINKEQAKTVRRIYRDFLIGINPAQIAKELTEEKVPGCLGQTKWYPSTIVGILKQEKHMGDALLQKTYTADFLTKRQVKNNGEIAQVYVKDSHKGIIDKQTWNAVQEEFERREKFIESHGTDRYSYGADCMPFCEKVFCGECKSLFTRHSWRSRGIVQWQCKNHRKDGKVACTNAYVDNTDLEKGFVKAFNRLVTDRDKHMERWQQMKSDGTPLEKIRAGQMMEAVGNEPLTRFVPEIAQFVLCEVTVLGAKKYEFFFLEGSRVKVSV

SEQ ID NO: 23630 - protein, 502 aa, synthetic construct
MEIQIREGNSRQKQKLKVCAYCRVSTDADEQENSLENQIRHYKEVITSNPDYEYAGVYSDFAISGFKEKRPGLQKMLADACKGKIDLILTKSVSRFARNTSIVLEATRKLKELNVGVFFELQNINTLSGEGELMLTILAAFAQAESESGSVGAKMVYQRKYEAGIPVQYLERSFGFKKDERGVYIADEEEAVWVRKIYDMAAQGYPLAAIKRYLNENNVKTVGGAEWLDSTVLRILENEIYKGDYIMHKYFVNEERKLVRNRGEVDAWYIEDDHEAIVSPKLWQKAQDALEAKRDYLAEGSVIEEFTEENYPYMNRIYCARCGHPLYRRIYSNGNRLNWGCSGTKRYGRSFCEGINIPDGILRGAWHFDENMYIGEKQTDKGKKEFTYLKEASWKRRHKKKEPEPIPENTETEYPYRKKIFCGLCGSRLVRHVNTKNHKAIWVCNGRKRKGKDFCDGTRVPDTIIKGWGEIKKDIYIQRKDDKNGKKRYSYTSKKPKGADRA

SEQ ID NO: 23631 - protein, 634 aa, synthetic construct
MKKFPIDLSCLTEEEISQFQEDPYTLYNGDQDVALYLRYSSTGQSDQSIEGQLRDCRTFCKANHYRIVAIYVDRATTARKDVEKRVHLMEMISDSAKQNWEYVIVWKLDRFARNRNDSAIMKMRLRKNGVKVLSATEHLTDSPESIILESVLEGMAEFFSAELSQKVTRGMRESALKCHSVGGHIPLGYKVENHKLVVDPDTAHIVQEAFSLYANGESVAAICRKFNSAGYKTAKNTEFNRSSFKAMFRNTRYIGTYTYKDIVIENGIPAIIDKELFETVQRRLSKTATAPARGKAKVDYLLSGKLFCGHCGASMNGESGAGRHGKVYHYYSCYTKKRKLGCDKRPLKKDYIEGIVARDALNLLTNQLIDEIADMAIRQSKQDLINDTHIPQLTAQLSEVEKSITNITAAIEKGIASETLMNRLVQLEHEKKTINKEIKAEEKFVYRIDRDQIVFWLSQFKYGNIEDENFRRRLIDLLVNSVTVWDEPDGYKITTAYNLTSCKTKTFRVEKNPAAEEATGFDFGESECAKKLVKSKDFTSFFYFLPRLCSPRKWSSRTAIRSGSILPQNTVTAAFACRDGKHDFYAWVDQKNHRIFRCQRNYPLKIQIILLSAGELVLHRSEKSYKLLWNHVSK

SEQ ID NO: 23632 - protein, 455 aa, synthetic construct
MKTVACYCRVSTEEQVKYGFSIQAQKDSLTKYCKENDYKYDVYIDEGISASSMKKRKALQEMLEKSVAYDMILFTKLDRLSRNVLDANNINKILQDNHCTMKAIDEDDVDTSTADGMFMFNLKVSLAQREIGKTSERIRFVFKNKREKGEVTSGTPKYGYKIKDKKFVIDSEEAENIRNLYKYFISVNGDHKKTYSYFVKHFPGKGKDALFNYLRETAYIGKYKLYRKNVYLDNYIPPIMDKELFNEVQNLLPRVEKVLKKENIPSIFAGMLYCYYCKSRLVRKVDYRSKNKIINYFCDKQYKYKVGINEKQCQNSKVISDKSVEEYLINNLKYLCKQYISKSIIKTKPKPQKNNIKINSLKNKLSKLKDLYLDDLISKEDYKQDYIKINKEILKLEEEQKEKPQKDFTYLNELINKDIPDIYNTFNIDEKRKFWLKIIDKIYIKEGKIKEVTFL

SEQ ID NO: 23633 - protein, 532 aa, synthetic construct
MIATKPTQEKIMKTVYCLYRVSTKGQVDENDIPMQKQSCREFAEHQPGWVIKKEFQEKGVSGFKVSANDRDAVQELKTAAENKEFDILLVFMFDRIGRIDNETPFVVEWFIQHGIEVWSVNEGEQRMDSHVDKLMNYIRFWQANGESQKTSMRVKTRLHQLVEDGIYTGGCAPFGYRLVKSGVVNKRGKELLTLEIDPIEKEMVITIFEKTVKDGYGSYVMAQYVNDRKVLTHNGAKFQSNTIKRILQNPIYCGYYNRGGVTSKIVKELQIIDDAVFDEAQKILEQRKYTNEKKTQLARTAKSSTMLGGNIYCAHCGKKLCANSFVDRYTTKDGTTHDGGRRFRYLCSGKAMKRNECDGQSVYSAAKVDGIVLDALHKCFDKIKATPKDAAIEKKYRTQISQIKSEIKRLNKETETLKRKLGELTEEIANSLLGDSKFTPDVLSMAIETTKGKIADNVHRIAEKQNQLNDKETDMNKLDYYYEEFVSWADEFDNASAERQRMIICKLFKEILVGKGYSVQILMDSSYEQFLM

SEQ ID NO: 23634 - protein, 548 aa, synthetic construct
MPKKTAKHPAKPKRGKKLEIEEPGVLYGRYSSHNQKDISVEQQFEKGYELAAEYGIRIIDTYADRAVSGRTDKRKDFQRMMSEAAKGKFRYVIAWKSNRMGRNMLEALINEARLQELGVRVLYVEEDFDDTAAGRFAARSMMNVNQFYSENMAEDIKRGLYDNASNCMVANGHLPYGYKRDETLHYVIDEPKAAVIREIFTRVAAGEPFVDIMNSLNVRGIKTSYNRPWGRSSFQKILSNERYRGIYIYGDVRKEDGIPRIISDELFFKVQEVITTKKNPQGRHRVNGDYLLTGKLFCGKCKSPMVGISGTGRSGKLHYYYVCQKHRTEKTCDKKNVRRDEIELQVAQAIKDYALKDDVIEWIADSTVAYNERKEAESKVGILEDQLAGTERGIKNIMSAIEQGIITETTKSRLVELESERATIKAKIAAARADIVTVSRDDIISGLEMFRDGDVYDKKYQARLFDTFLVAVYVYDDDLRLVFSFSGNKNTIQIPIESAVNAVENNAAECSFKLCSAPPKNLRTKVRRFFTYYLLLFHCYLVRAAVFW

SEQ ID NO: 23635 - protein, 570 aa, synthetic construct
MDIKRVGCLYRVSTLKQVEKNDIPMQRISCGNFIKSHNNWKLTKEYIELGVSGYKLSESKRDVLQDIKRDVLNKEFDILLVFMFDRIGRREEETPFVVEWLINEGIEVWSVKGGQRKIENRADKLINYLTYWQAGGESEKTSIRVREVQVQMAEKGILTYGGKRNAPFGYDFIKSGTFTKKGVERQKLIINKTEAKIVKEIFSLYVKKGYGIGRIAKYLNDKKIKPRRSELWSTSTVGSMLGNPLYMGYPAYRKKTTVNVATSKKQPFDTWILPEKRVNDLAIVDEKIWYDAKKIRNGRNDKSNFNNEKKDIKPRQTKSELLFIGLMKCGECGYSFMTSGSKKKNKDGDIVKHSYYRCSSARFTNTCGLEKKSIKKEVIEEIVLKCVYDFLDSLGQIDLSKAIKKGVLNSCENEEKDLKKCERELEEIEANINVLKDEVVKTLTGESNFTAELLNELITEKEERKLELITLKGEIESKINQKKLEDEELLQIKDRIPVWRKEFERADLDVKKMLLSEIIKEIRIFNDRYEIDFRLQLNDYMKEKIINNDNELKYNESKLVENTILIKLEE

SEQ ID NO: 23636 - protein, 514 aa, synthetic construct
MKRVGCLYRVSTKKQTYNNDIPVQKKACRKFIKQQDDWVLSKEYMELGVSGYKLGEKERDVLQTIKKDVCDKEIDILLVFLFDRIGRREDETPFVVKWLIDQGIEVWSVNEGQREIKDNYDKLINYITYWQAEGESEKISIRSKEERIRLTKEGIYFGNYAPYGYEMVSSELYSKIGKQRRIPVIYEEEAKTIRIIYELIAIEQYGTDKVAIYLNKKGIKRRKEGCLWDSHEILEIVKNPIYKGYVSFGKRRRNRDGNIRKNKETWIIADKQNPDITIISEELWQKANDLIESRSRKGSRLLRLLSGYTRCGYCNNHIVPKGRTKYCYMLCKGKQKTGSCEYHRNYRVDILEAIVSNEVKKYLDTYKKIDFRNAIVKRVKRIKRREEKIRLLNQKIGFSKNRLVELKTNIVSALMSGDEDQNKAISQEFNEEMNNLKQLNEQLTKIKDEINLNNQEINSLKEYIPTWSKEFDKAPLEIKRQILDKLIEKIYLYNDKVEIKVKYPISTMLVKENV

SEQ ID NO: 23637 - protein, 497 aa, synthetic construct
MAKKQTNGNLALEQQRVIVIPAHDEIVARKLRVAAYARVSSSSEDQLNSYRVQNQYYSELISSNPDWEMVDIYADEGITGTSVEKREDFQRMMQDCRKGKIDRILVKSISRFARNTKDCLAAVRELKELGVSVQFEEQGIDTSKMSSEMVTAIIASLAQKGSESISGNVQWGYQKRMESGKFNTCKAPYGFTLHEGKLSIIEDEAAVVRFIFQLYLNGLNGYEIANTLSQQEIPPGREMGTWKDSSIYYILKNERYAGNAVVGKSYSTTTFPHKKVRNHGEREMYLLPDSNPPIISSEVFDRVQTLLQSRKNAHIGSTNQPFSRKLYCANCGRSLKRKFTNDKMYWVCNTHFQNAASCPTPPYHTPDIEQAFCRMYYKLKHHGDPIFTQMLSNLQKIRYSRMLWSEDVISLNKKISDVLSQVQFLAQLQQAGGVDPDTFISSNNKLNEQLRRLKQEKARLLDTDSDDLADRTRDLMDVLEDGPDFLDSFDAELFDAL

SEQ ID NO: 23638 - protein, 549 aa, synthetic construct
MKFKYPAMGTTKNAVIYARYSSHSQREESIEGQLRICHEYAKAEGLAIVGEYIDRAISGTTDARPDFQRMIDDAKKSQFSYVIVYRLDRFARNRYDSVLYKHELKQCGVKVVSATEGIGTGDESILLEALIEASAEYYSMELSRKIKRGRQDSAMKGNFLGGAVPLGYKVVDSKFIIDDETAPIVRYIFERYAAGIGKKQIIDELTAKGYMRRTGKPFTYRAFDSVLRNRKYTGEFTQTGITVEGGCPAIVDTEMFEKVQARLEINRRAPAKAKAKTEYLLSGKMFCGYCGEPMIGISGTGRQGKTFYYYSCVGRRGKSGCKKQHEKKDFIEWYVCEQTVQYMQDPERLSHVAKRIIEINDAEFDGGKVKDLERAVENCDSDIRKLVDALTTIPDAARPALYDKIERIGAAKADMEIDLAKLRVLSEVRYKQEDVEAWIRSMCRGDLMDFEFRRQLIDVFINSVYLFDDRVVIVYNIKNGKQVSAIDVLNAVEELDGVELFPDSAEDSSAGGNGSFLVADAPPKQDNPNLRPIGQGFGFLVLMEKIEDW

SEQ ID NO: 23639 - protein, 564 aa, synthetic construct
MEKKQKSALYVRVSTTHQIDKDSLPLQRSDLINYTKYVLGINDFEIFEDAGYSGGTTDRPAYQDMMNRIKMGEFTHLIVWKIDRISRNLRDFSDMYDELKKYNVTFISRNEQFDTSTAMGEAMLKIILVFAELERKLTGERVFSVMISRAQKGLWNGATVPLGYEWDSETKFPRPCDKEAKIVQYIFDQYEEIKSTTKVAKKLNIENIPTKRNGTWTPRTVGSILTNPFYIGTYRYNTKTKKTRRWKNKSEWVVLENNHQAIVNTEQFERVSQIIQNNYKGDKNYQRSSTNVHILSGLASCHKCGKKMHSGLDRARKDGFTPSRYTCYAFNVNYTCANYSSDLAILPGLINYIANYMTLQERITARHSLRDMESILLRGKYFEDIDHIEKQDLKNTYDLLINNKIVTYNSFEEKNKEAIISQNVIYEAEKEKYEKALKRLDDLYLYDVNSMSQKDFVIKRKEISDKIENINKKIQEEKFNDTPFINNKDFNLLSKASFYLLTKNLSSVKNIDVISLLNNLDRQTIKDFINTIITDVSVEKGKIYNITFKNGIVHHFIYKNEQKI

SEQ ID NO: 23640 - protein, 526 aa, synthetic construct
MPKVTMIPATINPLTHLPSVAARKRRVAGYARVSTDSDEQFTSYEAQVDYYTKFIQSKPEWEFVKVYTDESISGTNTKRREGFKEMITDALDGKIDLIVTKSVSRFARNTVDSLVTIRKLKENGVECYFEKEGIYTFDGKGELLITIMSSLAQEESRSISENITWGQRKSFSDGKVHLPYKRFLGYEKGEDGRPAVVESEARVVKLIYGLFLEGKTQAGICKYMEELGIPSPGGKAKWSKTTVTSILQNEKYKGDALLQKKFTVDFLEKKMKPNEGEVPQYYVTGSHPAIIESDEWEQVQAEFARRKTLGKAYSGKSVLSAKLVCEDCGAFFGPKVWHSTDQYRRIIWQCNGKFASEEHCHTPALDTETIQRLFIKAYNLMMQDRVQIIKEIEAWRQKLMDFGALDADIERQFEETQVVAELVRTAVKENASTAQSQEAYRKKYEALTERYEKAAAELERLQSLRTARSQQDKKMALYIRTLKKQPEVMDDWNDTIWTVMIEKAIVHRNGEITFVFENGTEIRVGE

SEQ ID NO: 23641 - protein, 497 aa, synthetic construct
MRYAIYLRKSRADDTSEPLEVTLQRHRQMLEKYMQQHDIAVQDEDVFEEVVSGDSLYARPQMLRLLEAVEAGTYTGVLCVDIQRLGRGSMQDQGMILDAFKWSDTKIITPTRTYDLSNDMDETYTEFESFMGRQEYKMIKKRLRRGLNATIENGGYIANAPYGYDKTKIGKTPSLKINEAEAKFIHMIFDLYQGGMGTATIATTIDRLGARPRRGEHFARSTVLKILKNDVYRGKIVWNRKTCVRPGQRGNEHHLTIYNAPEKWTVVDGLHPAIIDNEQFEAVQRILAGHYHPPANTGKRINPLAGLVLCGNCGRPLQRIAIQSAGGPLLGCQVPGCIVSSKLEYVEQAVLLEIQKEFDKLCANAEQKQQESQIDYAAMAKSIDAEISTAHQQLGRLYDLVEQGVYTIEVFNERRGALLSRISALEDERKNLVPPQQLDLEKMRANIEAVFDAYPTADFNTKNQLLKSIIDKIVYNKQKGVQPKGFTLEVFLHCLYL

SEQ ID NO: 23642 - protein, 590 aa, synthetic construct
MKTVEKIERKLPVLKTRKRVAAYARVSMESERMQHSLSAQVSYYSALIQKNPEWEYAGVFADYGISGTGTKKRDEFNHMLAECEAGNIDIILTKSIQRFARNTVDLLNTVRHLKELGIEVRFEKEKINSLSGDGGLMLSILASFAQEESRSISENVKWGTIKRFKQGIPNGKFSIFGYEWQDDKLVIVPEEAEIIRWMYAEYMKGASRIEIGRALMDRGIYTRQGKPWVDSNVKVILTNITYTGNMLFQKEYCEDPITKHRRKNYGEMPQYFVEDTHEAIIPMDEWQAVQAEFKRRRDLGPFGNKSLKLSAFSTKITCGCCRKHYRHSGKRNTAGEVYYIWICQTKSQKGVSACPSKNIPEKMLQNTAAKVLGLDKFDEDVFSQQIEEVIVIGDDTLTFRFYDGHEVTTKWQSTAKTDWWTDERRKLWGERHKRKDTNPNRNTFYEFTGFIKCGCCGANYRCQSGKRKDGTPTRSWYCTGPRSECRNPAIRDETMKRLVTEILGLDEFDEAAMDAQIESATILDHMVTFHFRDGHIESRDFLDKRHGTPWTEERREKAKKSMKAAWTDERREAMSERIKKIRSEKKWPNP

SEQ ID NO: 23643 - protein, 630 aa, synthetic construct
MNTAVNEYNYRFKLTDYSLFDRNRARKVAIYGRVSTEHEAQLSALENQLQWYDDQVKYHPNWTVCERYIDEGITGTQAKKRPAFLKMIEDAKQGKFDLIVTREVCRFARNVVDTLVVTRELKGIGVEVFFIDDNIWTMDGDGELRLSLMATLAQEESRKTSERVKAGQKISRDNGVLYGNGNILGYDRVGDTYVINEEQAETVRMIYDLYLQGYGSMKIAKILTERKRKTASGLIKWSVSNIMRAIKNATYTGTKCYNKSRSNNFLEQKRINNLDMSTYEYVEGDFPSIISQEIWNKAQAIRESRVKPVCVSAGKNTHSKRDSRDIWVNKLRCSCGSSYRKNKWHTKLDGKTSYGYQCYNQLNNGIKRKRAEIGLDTEGYCDSRMITDWKLDFMAKALLEHLWTERKESVLIALDLIKYYYKEEKSNETQSDTVTIQAKLDKANSRLTNLIAMRADGEISKDEYQAMRSPVDEEIKKLQKALDEIPQEKSNPKGLDIEGIRSTLNSFIDFSGSTISHDVVNQFVYLITPTSDTTFDWYVNLNGTADVKATFTAEGRKKNCIIKLEEIEKISSVHREKNEDNAHFIKNPHIFTYLHRLLLLRCNSVIFVLILYSVIFWAVPFWDSPFALLK

SEQ ID NO: 23644 - protein, 526 aa, synthetic construct
MPKVTMIPATVNSLTHLPKASVQKRRVAGYARVSTDSDEQFTSYEAQVDYYTRYIQSKPEWDFVRVYTDEGISGTNTKRREGFKEMIADALAGKIDLIVTKSVSRFARNTVDSLVTIRKLKENGVECYFEKEGIYTFDGKGELLITIMSSLAQEESRSISENITWGQRKSFADGKIHLAYKHFLGYKKGEDGRPAIVEEEAVVVRLIYRLFLDGKTQAGICRYLEDLEIPSPSGKAKWSKTTVTSILTNEKYKGDALLQKSFTVDFLQKKTKLNEGEVPQYYVEGSHPAIIEPDEWNHVQAEFARRKALGNAYSGKSVLSAKLVCEDCGGFFGSKVWHSTDRYRRTVWQCNNKFKGGERCLTPTVDTETVQQLFIKAYNQMMGNRKQIIEDCELMRKKLTDFKSLDADIERHLEETQIVAELVKAAVKDNAVTAQSQEAYLKKYESLTKRYETAVAELARLQNLRTLRSQKDKAVALYIRTLKKQPTVLSEWNDTLWTVMVEKAIVHRNSEITFVFYNGTKVKVRQ

SEQ ID NO: 23645 - protein, 519 aa, synthetic construct
MADFEHVIIYLRKSRSDDPATTVEEVLSRHENILQEYAVREWGARIPEDRIYREVVSGETIKDRPVMQHVMKILETGLVSGVLVVEPQRLSRGDLQDCGHIINSLRYTNTAVITPPKTYDLSDEYDRKFFEMELTRGNDYLEYTKKILNRGRIASVKAGNFIGNSAPYGYRKICVGTGKEKYYTLEIVPEEAEAIRLMFDLYVNKDYGFRSIAHALDMAGYKPRRSAEWSPAAISCMIANETYIGRVVWNRRKTIKKWENDTIVRTRPRQSEYISVPGKHPAIISDELFYAAKAKRNRTPRIKRYVQLLNPLAGLLYCGTCGHAMSRKRTVDKKYGSVSVSFLCNNQSNCHTKSVMYDAVIDRVKETLRQSIEDFEVKVNNKDETDIAYHRAMIANLKSELRKLKEKDMRQKDAYEDGIYTKEEFVVRNAKLAEQISIAQLKLDEAESSTTQLVDYQERLVRFRECLEALDDDTISAADKNTLLKSCIDKIMYYNDSPSLPGIGRYVDNPFRLEIFLKL

SEQ ID NO: 23646 - protein, 447 aa, synthetic construct
MSITNVAIYVRVSTDRQAKKGDSIDEQLSTCKAYIASKENMVLAGTYIDDGISGRKIKRGDFEQLLDDVRLGRVNLIIFTKLDRWFRSLRHYLNTQAILEANHCDWLAVDQPYFDTTTPHGRAFVAQSMTFAELEAENDSVRIRDVFDYKYRQGEVLAGKAPLGFSIENKHLVPNQDAEKVLHIFQFYAACNSLNQTITHLESDMGIVMTQSNLKTAILKNKKYIGVFRDNDHYCPAIIPLDLFERVQELLAINVKISQKYNYIFSGLLRCAHCGHSFSGATRKIKKKAGGFYKYPFYKCHGAYPSKRCSNRKVMFESCIERYLIANIKPLLQEHIAEYEITSAKVIDYDSRRTALLKKIDKLKDLYINDIITMDELKRDKEKYIKELENLPRNQEQKDLTPIRKLLKMDLDSIYQTLEPAERRQLWRSVIKEIQIDDHKNLKVIFL

SEQ ID NO: 23647 - protein, 526 aa, synthetic construct
MAQRKVTAIPATISRYTATPINSTKKRRVAGYARVSTDHEDQTTSYEAQVDYYTNYIKSRDDWEFVAIYTDEGISATNTKKREGFKTMIADALAGKIDLIVTKSVSRFARNTVDSLTTVRKLKDEGIEIYFEKENIWTLDSKGELLITIMSSLAQEESRSISENVTWGQRKRMADGKVSFAYSRFLGLDKDKETGKIVVNPEQAETVRLIFHLFLEGMTPHSIATELTSRGIKTPAGKDVWNQQTVRRMLSNEKYKGDALLQKEFTVDFLQKKMKKNEGEVPQYYVEGNHEAIISPAVFDMVQAELAKRTKGGSRYSGVSIFSNKIKCADCGGWYGSKVWHSTDRYRKVIYRCNRKYNGEKCQTPHVTEDEIKAAFVSAYNQLVTEKKEIIANAEVIRKTLCVTDALQEEKGKLEEEMAVLVELTKNIVAENARVAQDQDEYQKRYDGLVQRYDTAKARYDEVVSAISAKEAQGERLSDFIKVLKAQDGTISEFDGSLWGSMVEFVTVGRDKEITVTFRDGTEIQV

SEQ ID NO: 23648 - protein, 591 aa, synthetic construct
MAKITRVEQAVPTIKTKKKVAAYARISMESERMNHSLSAQISYYSSLIQKNPDWQYAGVFADDGISGTGIAKRDEFKRMIEAADNGEIDIILTKSIQRFARNTVDLLQTVRHLKDIGVEVRFEKEHINSMSGDGELMLTILASFAQEESRSLSENCKWGIRKRFEKGIPNGHFRVYGYRWEGDDLVIVPEEAEIVRRIFQNFLDGKSRLETEREFAAEGITTREGCRWVDSNIKVVLTNVTYTGNLLLQKEFISDPISKQRKKNKGQLPQYYVEDTHPAIIDKATFDYVQSEIARRKELGPRANKSLNLTCFSGMLKCPYCGQSYMHNKRTDRGFMEFWVCGSRKKKGGRCPVGGSINHENLKKTCAAVLGLDEFDEDEFHDRVDFINVPEREMLEFHLKNGEVITKTCPNTGHKDCWTAEYRAKTSEKRRKKPNCKGSSAMTGKIKCVGCGCNFRRATQPSSTSDSGKAHYWRCAERDGCGTVGLREDVLKPFIAETLGIAKYDDDEFDRQIDHIDVVSATEMVFHFKDGRTVSRTWEQPKRVGRPWTDEQRAKFKESIKGRYTPEVRQQMSEHMKQLRKERGKAWRKEK

SEQ ID NO: 23649 - protein, 453 aa, synthetic construct
MRKITKLETKNIELPKLKRVAAYARVSVERGRTLHSYSAQVSYYNELIQKNPEWEFAGVYSDLGISGTGIEKRNDFKRLLQDCEEGKIDIILTKSISRFARNTVDLLNVVRHLKELGIEVRFEKEGISSLTGDGELMLSILASFAQEEVISTSNNIKWAIKKKFESGKPQCRYKIYGYRWDGDNLVIEPEEAKIVKLIFQMYLNKVSAERMEIELKEMGVIATNGGYFNIGTIRDMLLNITYTGNLLLQKSYTPNPLVRRKVKNNGELPKYYVENNHEAIIPMEMFIQVQEERKRRKAEGQRANFGKNITCFSCRVKCPICGKNYMRNSRSKNSDGIKAHIWACGTRLTGGSKACPGKTINEIALKRVSAKVLGLDEFDSNAFDEQIKKVIVIGDDLLEFHFNNGKIISEKWEYNARKEYWTEEKRRERGEKLKKSWRMKNDKKSNNDTSITK

SEQ ID NO: 23650 - protein, 523 aa, synthetic construct
MAKSVTTIPATLSRFTAAPINSTKKRRVAAYARVSTDNEEQLTSYEAQIDYYTNYINGRDDWEFVGVYPDEGITGTNTKKREQFRQMVADALDGKIDLIITKSVSRFARNTVDSLTTIRKLKEHNVEVYFEKENIWTFDSKGELLLTIMSSLAQEESRSISENCTWGQRKRFADGKVTVPFKRFLGYDMGPDHNLVVNPEQAKLVKRIYGMFLQGQSPFQIARTLTEEGIPSPGGKDHWNPSNIKSILTNEKYKGDALLQKSFTVDFLTKKKKANEGEIPQYYVKDNHEAIIDPETFEMVQTLMATRTKGRNRKSSVSIFSSKVKCGDCGSWYGPKVWHSNDAYRKVIWQCNHKFDGQKCATPTLTEDEIKELFLRAANQVIGQKEQFIAIYEQVLSRSLDTTALEGELSELEAEINIAAELIEECIKENAHVALDQAEYQKRYDALVARFDKAKARHTEVTDLIAERMARKHQIETYLKNLRSREPLTEFRETDWLAMVDYITVHSKDDIRVAFKGGTEIKA

SEQ ID NO: 23651 - protein, 590 aa, synthetic construct
MKTVEKIERKLPVLKTRKRVAAYARVSMESERMQHSLSAQVSYYSALIQKNPEWEYAGVFADYGISGTGTKMRDEFNHMLAECEAGNIDIILTKSIQRFAKNTVDLLNTVRHLKDLGIEVRFEKENINSLSGDGELMLSILASFAQEESRSISENVKWGTIKRFKQGIPNGKFSIFGYEWQDDKLVIVPEEAEIIRWMYAEYMKGASRIEIGRDLMDRGIYTRQGKPWVDSNVKVILTNITYTGNMLFQKEYCEDPITKHRRKNYGEMPQYFVEDTHEAIISMDEWQAVQAEFKRRRDLGPFGNKSLKLSAFSTKITCGCCRKHYRHSGKRNTAGEVYYIWICQTKSQKGVSACPSKNIPEKMLQNTAAEVLGLDEFDEDVFSQQIEEVIVIGDDTLTFRFYDGHEVTTKWQSTAKTDWWTDERRKLWGERHKRKDTNPNRNAFYEFTGFIKCGGCGANYRCQSGKRKDGTPTRSWYCTGPRSECRNPAIRDETMKRLVTEILGLDEFDEAAMDAQIESATILDHMVTFHFRDGHIESRDFLDKRHGTPWTEERREKAKKSMKAAWTDERREAMSERIKKIRSEKKWPNP

SEQ ID NO: 23652 - protein, 504 aa, synthetic construct
MQKYLMYLRKSRADGEHETIEEILARHEKILQEYAEKNIGKAVPEEDIFREIVSGETIKDRPLMNKLLKCIQNEQITGVLVIEPQRLSRGDLHDCGTIIRAFQYTNTLVYTPTKTYDLSEKYDRKFFEMELMRGNDYLEYVKEILMRGRLASVSDGNYIGSIPPFGYSKEKIDKNYVLVENDESNVVRLIFDLFVNQNMGTSKIANHLNSIGIKPRKNNYWSDSTIRDILRNPVYIGKIRWNWRKTVKTYKDGEIVCSRPKSTPDSWIIIDGKHNGLISEEVFNAAQKRFGQNPRVKKEYEIVNPFAGLVKCECGKSMVYKKFNKSSPRIICPNQPRCENRSVLYSEFESEVIIALKKYINDFKIKISNGDNQSESIQNGILESLIKELKTIENQQDKLYELLEQGIYTNAIFIKRNTALAEKRKKITSEIENLKTSIPNSINYEEKIVQLSNALNTLQNPDIHPKIKNEFLKVIINNIYYTRKNDNRTRNDDSPFTIKIILNL

SEQ ID NO: 23653 - protein, 458 aa, synthetic construct
MKKDTPVGESLPLRAALYPRVSTEEQAKYGLSIHDQQGDLEEYARAHGMRIVGVFADAGYSARKKVEKRPAMLALLEAVKRDEVDIVLVTKLDRWFRNIGEYYKVQEILEAHNVSWRTIYEDYDTSTAAGRLKINIMLAVAQDEADRTSERIKKVFDGKRARLEPLTGDKPFGYTIEGKRYVKDPETEAAVDAFFRKYMACGSVSATQDYIRSEYGIFIPYQGADKLLRSTAYYGRYFGADGMCPAYITKAQYDAIQLMRKRVMRRPAQNRVYLFSGLIFCPVCGGRMGGRKNQNVVSSHYNCSNHFCRRIPCTNNRSISEAKLERYLLSALDAKFAEYKRQTSRLSGARRKDYSSEIAALKGKLSRLKELYLNELIFLDEYKRDRAGFMAKLDELEAKQAALAVPAPSGEKIDSLLQGDWKGMYADLPKDKQQEFWRIVIKEIRLYPDRHIEFDLNL

SEQ ID NO: 23654 - protein, 530 aa, synthetic construct
MQVNERKSIIIPRTKYGTVNFLKDKIKVAAYARVSTDREEQEDSFERQVDYYTRYINNKNEWDFVGIYADPGITGTQAEKRPQFLKMINDAVSGKINKIIVKSIARFARNTEEALKYIRILKEAGVGVYFETNNQDTSEPGGEIMITILAAMAEEESRTISKNVTWAMDKKFEKGDMMLNYSRFLGYTKNENGELVIVPEEAEIVKRIYREYIGGKSINAIANGLDVDNISTPSNGKKWYKTVIVSILTNEKYIGTALMNKTYKRDVLSKKREKNTGQKKMYLVENHHPAIISKETFELVQALISERKITEGYSNSNKGRYSSKYPFSKKIKCGECGNYYRRHAQTVKGEYVQTWVCAEHKLNKDKCGQMYITEKAIENAFIEVMKELMQNSDAVKEILLENINTVLNDNNINELEKTVEKIKKLQTAMINLYKKKIKGELSKEDYEKEALIVQKQIDALNNKKAKLEENKSVMILAKSRLEEIKKIINSDIKGFDEDTFTNLVEEVIIRKRYELEFKFKCGISKKWQAE

SEQ ID NO: 23655 - protein, 486 aa, synthetic construct
MKKVAAYARVSTNKRNQETSFQYQSDYWNEILTKNDDYEYVGLFADKGISGKYATRRPQFMALIEEAERGNIDIIFTKSVQRFARNTEELLSIVKRLREKEIAIIFEKENINSLNTNSELYLTIAAALAEEDLANYSTNIKWTIQDKFKNGENVMGYIIYGYNVLNNKELIINEEQAKVVKEIYTLYATGNYSSTKIAKTLNEKNIPSAKCVKWTDGTIRNILRNEKYKGDLMLQKFYSEKGKRLKNRGERDMYYVQGNHEAIISEELWNKVQKIFERRSAKKLVNREPVLYPFTSLIRCGKCGETYQHKIANSGTSSRCEYYSCSTNKKYGIKACGNHAIKAEVINALFVEAYNDFLNNKYLGAEAIKQELEGKFSLVKELNQLLVKGFISKENYEIEQTALKKEIALLESSLTIASKFNSTNNNNEKITKFDESIVHKYIKEVTILDWMVIFVFYNGAVITKHYTNGHAGNKEIWKLAGGKKCK

SEQ ID NO: 23656 - protein, 601 aa, synthetic construct
MSQVEIIKANTMLSERGNRAHIERLRVAPYCRVSTDSEDQLNSYKSQVQHYTDFINNRKDWVLVDIYADEAITGTQTKKRNDFQRLINDCMNGEIDMVITKSISRFARNTLDTLNYVRMLKEKNVAVFFEEENINTLTMDGELLLTILSSVAQQEVENISANVKKGLKMKMQRGELVGFQGCLGYDYDKATKAISINEEEAKIVKYIFKRYNEGIGCYVIAQELEHLGYKTKRGSSNWAESTVMGILKNEKYKGDIRQGKTFTVDPISKRRLDNFGEEDQFYIHNHHEGIISNELFESVQKIINRRRKSRNTFDGKRETFTRKYSFSCMLECGFCGSHLTRRSWHSGTEYYKVIWQCVTNTKKGKKYCPDAKGIPESIIEEAFLESYKLLCYNNTDVVDEMLNRIEISLCSNNPEKEISNIERLISKNAAKKQKLLDMRLDDTLDKDSFDIKFNELNEQLDELSDRLTSCQNTENREKNIKKRLDDFRKVLEKNEVLVEFDRQVFESIIDKVIVGGYDDDGNKDPSMLTFVYKTGFTNSVDANNHKPPRKKRKKNKEKNENKLSSYSPNEDEKMCSLNSDNTCGNGLFNEKEILNQRRKNK

SEQ ID NO: 23657 - protein, 621 aa, synthetic construct
MQEIRLLSNHNQYWGDGGVCICMKMYMQAPFVCSFIFSFFSMLGMKDKPSTGLRRRIFMAEVEVIKAVEGPILRKRDYEGKPLVITRQRVAAYVRVSTDGDEQLESFQSQKQYYQDKISENRDWVMVGIYADEAITGTKVDKREQFQRMIQDCMDGKIDVIMTKSVSRFSRNTVDILQYVRLLKERGIAVIFEKENINTLTEQGEMMLTLMGTLAQNEVESTSKNVKLGIKMKMKRGELMGFNGCLGYDYHPEDKTITVNEAEAETVRLIFELYLQGYGTYTIAKRLEALGKLNKKGVAKWTDSGVRGIIKNEKYKGDLLLQKTITTDPISKRRIENFGEEEQYYVRDHHEPIVSREVWEQAKEIRLSRNHQSDKKADGKREKYTKKYAFSSMCECGFCGTKLTRRTLHSSSKYETPVWYCRNAANRGKHNCPNSKSVHESILENAFLEAYKLLAGSFDDVIDSVIGTIESIGANNDDIARLKKEQKTLDNLEQRRKKLTDIYLDDGLTKEAYDEKYEELTVKIQKSKDSIELLQNNVSNQKDVGKRMASLKKALADGDILDEFDRVVFESIVEKVIVGETNEDGTVDPYKLTFVMKGNGNSVVPNAKEWFKAEKSAIQPA

SEQ ID NO: 23658 - protein, 463 aa, synthetic construct
MARSVTVIPARNRQASGHRAAPQKKIRVAAYCRVSTDQEDQLHSFEAQVDYYTKYINDHENYEMAGIYADEGISGTNTKKREQFKRMIADCEKGKIDLVITKSISRFARNTQDCLMYSRKLKNLGIGIIFEKENINTLDSTGELLFTILSSLAQDESRNISENCKWGIRTKFKNGEMHLNTFKFLGYDKDENGKLIINREQAKTVRRIYRDFLWGVNPAQIAKELEEEQVSGCLGQTKWYASTVVGILKQEKHMGDALLQKTYTADFLTKRQVKNNGEVAQVYVKDSHKGIIDKETWNAVQEEFDRREKFMQKHGTDRYSYSSECNPFCEKIFCGECGSLFTRHSWKSRGIIQWQCKNHRKDGKVACTNAYVDNANLEKGFVKAFNRLVNEREKNMERWNAMKAEGTPLEKIRAVQMMEATESGQLQKYVPEAAQLVLEEITIFGVKKYEFAFLEGSRVKVSV

SEQ ID NO: 23659 - protein, 431 aa, synthetic construct
MKNVFDITPQQAHPQKKKRVAAYARVSSGKDTMLHSLKAQIDYYREYIVRNPEWEFAGIYADEAKTGTKDGREQFQLLLQDCRAGKIDMVVTKAISRFARNTVTLLETVRELQCLGIDVYFEEQNIYTLSADGELMLTLLASFAQEESLSASENQKWRIRKGFEQGKASTCNMLGYRLVDGEITIVPEEAAVVRRIFDLYHNGYGMQKIANILNEEGYRTVKDTEWRVSKVRSVLENEKYTGDLLLQKCYVRDHVTKVCVPNRGELPQYLVENNHEAIVDKTVFEAVQALMAQRRAEYARPQGGESTFSRKIRCAICGKNYRRKITAHNVLWCCSTFNTKGKKYCASKAIPESTLQSAAAEVLGLQGYDDAIFINQIDHVEACPGNLLRFVFVSGTVKEYQWKDRSRRDSWTTEMRETARQKSLERNRTNG

SEQ ID NO: 23660 - protein, 556 aa, synthetic construct
MAKNVKIIQATSPILSAQSQISVKKRRVAAYARVSTEKDEQQNSYEAQIEYYTRYIQSNPEWIFAGIFSDEGITGTSIKRRDGFNKMIETALAGEIDLIITKSVSRFARNTVDSLTTVRKLKEKGVEVYFEKENIFTLDSKGELLITIMSSLAQEESRSISENTTWGQRKRFADGIMSLGYSNFLGYKKGANPGDMEIVEEEAVIVRRIYDEYLAGKSPGQIAKDLTADDIPTPAKKIKWHPSTIISILHNEKYRGDAKLQKSFTTSFLDHKTQKNTGQLPIFYVSQNHPAIIRPEVFEMVQEEFRRREAAGGRAQCVSIFSGRIVCGDCGCFYGRKKWHSNTKYMSWRWHCNNKFQKREQCQTPTLKEEGLEECFVTAFNHVLARKEEIAANYTECLETITDDSALQARMEAIQMETSDLTTLINNLLISGSKQRGSNEDINKRYEEYMSRHEALQQEKLELSKQISLLAAKRLLVNAFLSELAKFDGPLTLFDPLVFQATVNYVTVRKDCTVTFLFRDGTEVTETIQKGVKPYVRRKTKPDGNISEETDGDQST

SEQ ID NO: 23661 - protein, 581 aa, synthetic construct
MYGLNSDFQKRDVAIYARVSTEHEAQLSALENQIDWYKPILEARPDWTLTAQYIDEGITGTSAEKRPRFMQMIEDARQRKFNMIITREVSRFARNTVDTLQYTRLLKEYGVEVFFINDNIKTFDGDGELRLTIMATLAQDESRKTSIRVKAGQQTSMQNGVFYGNGNILGYDRVGKEMVINPEQAQTVRMIYDMYLSGMGVTAIQYELEKAGRLTAMGKERWFSSYIAKMLRNSFYCGIITYHKEYTPDFLKQKKIKNYGDLEYVQVQGTHEPIVTVEEYEQVQKLMDAKSVVMKNHNKGKRRVGRMQHTTAFGRLMICQCGNKFNLRFHSRDGRTDGVDYQCYTSVNRGSVAKRLNKGISIEHSCESPYIQGWKLEMMAEQVFDRYIENADKVMDLSYAMLEKHIADQEELPDNTDVIQRKQGEIEKLMNKRTNLIEMRAEGDIDKEMFRSKKQEIENRVAKLTEEIKGLQPKKEPTSNEDYSAKLLELRERLKEYTGFDYSVIPESIVEAFVERIWVSKDEFRWYLRTGSKEKGEFDPDNHIKIGSFTLTIDDAKKYIYSFSTRRRVYKWVDLNVSVWI

SEQ ID NO: 23662 - protein, 497 aa, synthetic construct
MRYAIYLRKSRADDTSEPLEVTLQRHRQMLEKYMQQHDIAVQDEDVFEEVVSGDSLYARPQMLRLLEAVEAGTYTGVLCVDIQRLGRGSMQDQGMILDAFKWSDTKIITPTRTYDLSNDMDETYTEFESFMGRQEYKMIKKRLRRGLNATIENGGYIANAPYGYDKTKIGKTPSLKINEAEAKFIHMIFDLYQSGMGTATIATTIDRLGAKPRRGEHFARSTVLKILKNDVYRGKIVWNRKTCVRPGQRGNEHHLTIYNAPEKWTVVDGLHPAIIDNEQFEAVQRILAGHYHPPANTGKRINPLAGLVLCGNCGRPLQRIAIQSAGGPLLGCQVPGCIVSSKLEYVEQAVLREIQKEFDKLCANAEQKQQESQIDYAAMAKSIDAEISTAHQQLGRLYDLVEQGVYTIEVFNERRGALLSRISALEDERKNLVPPQQLDLEKMRANIEAVFDAYPTADFNTKNQLLKSIIDKIVYNKQKGVQPKGFTLEVFLHCLYL

SEQ ID NO: 23663 - protein, 426 aa, synthetic construct
MRVKVINKRPASVLQKKRVCAYARVSTDSRRQEDSLENQMETYERLITGNPEYEFIGVFADQGISGYCENRPQFQRMMEKARAGEIDLIITKSISRFARNTVTVLKFARELKELGVGIFFEEQNINTLSGDGEMMLAVLASFAQEESRSMSENNKWSIRKKFERGEVMITTSRFLGYDKNEYGDLIVNRKEAEIVSLTFDLYLMNVGSSRIGELLDYLGVKTVTGTTWESGTINGMLCNEKYKGDFHLQKYYTPENKRNHTRKNNGEVQSYYISENHEPIVSPEVWEKVQKVREQRKRDRNIGQDSTKKFQNRYPLSGMLICPYCGKTLRRRQVYKKKIQWLCSTYIEKGVGECKGIRIDDAELQGLNITEQTVIEEVVKNGKKHYCYTSKADFDCGIRNSKDSAEIEDGSVLPSVNRPRRTVIKL

SEQ ID NO: 23664 - protein, 581 aa, synthetic construct
MSRTTNKRPGKAKSGLSRKQKVAIYIRVSTLYQVDRDSLPMQRKDLIAYASLILGIEEYEIFEDAGYSGKNTDRPAFQEMMQRIRKGEFTHVLVWKIDRISRNLLDFAEMYEELQDLRVTFVSKNEQFDTSTAIGEAMLKIILVFAELERNMTSERVTATMISRANNGLWNGGRIPYGYDYDPDKTAFSIREDEEKVCQMIKNDYMEHKSLVHTSRMLNASGYKTRSGVEWSPTAVWIIVSSPFYAGIYRYNRYKGTERRVENPEDEWIMIQNHHPAIFSLEEHEKMLAILDENSRNRRSVGQRHQTERVHIFGGIAYCGKCGSKMVSTPGRLHVNGYRPTNYSCPKHRKTKECDNPTVSDTQVGEFVINYILNMLGAKKKFSTIENPEDLERCLLYGNTFSEVEHIDSNGLNEYFNLLSRYSSDDSYTFSVKKSRKKKAEVDPEVAALRKEKEKQERAMKRLQDLYLYSDTSMSEKDFIIRKTEISKRLEEINAMLGMVARNSEPSLSDEEFVRQASHLLISRELQNRQYIYFKNLAQNVSPEILKAYIETVLDSVLLVDGRVSSIVFRNGLTHKFKYKS

SEQ ID NO: 23665 - protein, 460 aa, synthetic construct
MIERCAIYIRVSTAEQSMKGHSLQAQREYLESYAASHGMRVVGIYADEGQTARKELKKRKAIHALLKDVEADKIDVILFWRMDRWFRNVADFYKVQDILDAHGVRWVSASESNINMETRDGRLCLNLILTIGQNEVDTTSERIKFTVNNMIQNGRMVWGATNLPFGYMIVEENGCKRMAKDPETACMVEEFYRFFRQTHKKRATVMHMQDTFGINFSYTMLRTMLSSEFYIGKYRSNDNYCPAYLTLDEWKEIQAISENNIKRPRTGRVYFFSGLVHCPVCGTKMAACAGRSIINRKTKEKREYYYYRCNKAVLNKLCSYTSRISQNLIEEYLLNNLDTEYRKYQVRCNKVKETQTHKKKKRSADSVRSEIERLNILFQKGRIEFDYYEEQYRKLEDELKSFDEVIIREKDHSNVVEMLDSDFKEMYSSLSLENRQAFWQQIIKAIYVTKDRNVDYVDFL

SEQ ID NO: 23666 - protein, 509 aa, synthetic construct
MYVIYLRKSRKDSDLEALGIDVLKRHEETLLELARARNLPIGAIYREVVSGDSIDARPEMVRLLSEVESGIWEGVLVMEVERLARGDTIDQGRVQRAFFYSNTLIVTPGKTYNPAIENDNEYFEFSLFMSRREYATIKRRMQAGRIRSVKDGYYVGNIAPYGWRRVKADDCKHFTLVPDEKENPVLKLMYDFMGNKKYGFQKTCSALTGMGIVSRSGKPFNPATVKTIISNPVNIGMLRWNYRKSQKAIVNGKIATSRPKADDYILVKGKHPGCISEDLYYRANSVSSSMTAPVKRSCRIQNPFAGIVRCSCCGRVMVRKKMSAKQPRDYLICQYAGCATVAIELEELENAVLEWIRNYIADYKVNNFESTDDSEQESLRSILVNLEKEKETTLKQRGSLFDLLEQGIYTKEIFFERSTALEDKIKDFDKKIESVNADIVRLDLSKKNRSTFVPKCQELLNAWDTFDAADKNTALKNVIERIDFTKTEKNSRGQRHSSFSIDVFPRISR

SEQ ID NO: 23667 - protein, 501 aa, synthetic construct
MEIQIREGSREQKRKLKVCAYCRVSTDADEQENSLENQIRHYETVIKANPDYEYAGVYSDFAISGFKEKRPGLQKMLADAEKGKIDLILTKSVSRFARNTSIVLEATRKLKELNVGVFFELQNINTLSGEGELMLTILAAFAQAESESGSAGAKMVYQRKYEAGIPVQYLERSFGYTKDERGVFVADEAEAVWVRKIYEMAADGYTPASIKRYLNENGVKTVGGVQWVDSTVFRLLENEIYKGDYIMHKHFVNEERKLVRNRGEVDAWYIEDDHEAIVSPELWQKAQDALAAKRDYLAEGSVIEEFTEENYPYMNKIYCAKCGYPLYKRIYSKGNRLNWGCSGTKRYGKSFCDGINIPDGVLRSAWHFEENTYIDEKASDKGVKEFTYLKERSWKRRHKKKQPLAIPENTETEYPYRENIFCALCGSRLVRYVNPQNYKVTWVCNRRKRKGKEACDGTRVPDTVIKGWGEIKKDIYIQRKDDKNGKKRYSYTSKKPSGIRV

SEQ ID NO: 23668 - protein, 463 aa, synthetic construct
MARSVTVIPARNRQVSGYRSAPQKKIRVAAYCRVSTDQEDQLHSFEAQVDYYTKYINDHENYEMAGIYADEGISGTNTKKREQFKRMIADCGKGKIDLVITKSISRFARNTQDCLMYSRKLKNLGIGIIFEKENINTLDSTGELLFTILSSLAQDESRNISENCKWGIRTKFKNGEMHLNTFKFLGYDKDENGKLIINREQAKTVRRIYRDFLWGLNPAQIAKELEDEQVPGCLGQTKWYASTVIGILKQEKHMGDALLQKTYTADFLTKRQVKNNGEVAQVYVKDSHKGIIDKETWNAVQEEFERREKFMQKHGTDRYSYGSECYPFCEKIFCGECGSLFTRHSWKSRGIIQWQCKNHRKDGKVACTNAYVDNADLEKGFVKAFNRLVGEREKHIERWNSMKLDGTPLEKIRAGQMMEATESGQLQQYVPEAAQLVLEEITIFGAKKYEFAFLEGSRVKVSV

SEQ ID NO: 23669 - protein, 668 aa, synthetic construct
MAYVRNKKKILKFWSKKKAALYVRVSTRYQVDKDSLPFQRKKLKEYCKFLGIEDFVIFEDDGYSAKNTDRPHFQEMMSRVRDGEFSHLIVWKVDRVSRNLLDFAAMYQELKDHKVTFISMNEQFDTSTAIGEAMLKIILIFAELERNMTSERVTGIMLDRAEQGLWNGARMPVGYRWNPEIKFPEPDPEETKIVQFIFDEYERVRSTTKIARYLNHNQIASKRGGQWTSKLIRDIIRSPFYIGTYRYNLRESGRGPLKPESEWIVRENNHPAIITKEQFDRCNAIMDENGTSRDTSELRARKYVHTFSGRLVCGKCGANMIASKDRARANGWRPSMYRCAQRSRMMDCDNSKTVNESYIGPFIFNYVANLARIQKNFKNIKTLEQLEKELLKGPEFENMKVSKESLRRTFDALAFQEVGKGAYLPDIDLSDGDDDYTAAEQLSILKRELDKCKTAIDRLTDLYLYDPDSMTKEEFAKKKRDLVNKIAGYEKQIEASQATGGKDDLADLEFIRKASAFLVAQRIVSKKHVDYIQMALDLDNEILKDFVDQVIDRIEILEGRVQSIRFVNGLVHEFTYSTPADLPVCQKCGGRIGSTCGCRTRTFDFAGKPYRRIKVGDPGDKFHGVAGAVCPECSAQASRWHHWKCGIERCPICGEQLIACEHGPNGKD

SEQ ID NO: 23670 - protein, 550 aa, synthetic construct
MAEKKKKNQSADLDGRRAVIYARYSPGPNQRDESIEGQIRECKDVAKRHGLMVIHEYADKRMTGTNDERPDFQRMLRDADRGLFDVVITWKNDRFARNRYDSAIYKQRLKRNGIKIIYAKEHIPEGPEGIILESMLEGMAEYYSANLSQNIRRGQRENAIEGKFIGGTIPLGYKLDADKRFIIDNELAPVVREIFQRYNAGESVVTICDDLNERGFLTVRKNKFNRSSLHRILANEKYIGVYRFEDIEHKDAVPRIVTDEEFSAAQKRVERNRKSMRNTPTAKTEFMLTGKIYCGICGEPMGGTWGTSKTGARHDYYNCNGRKTKKTACTKKSERKDTIEKLVVNNVINNIINNDNVINYIVDRCMEIQMREIDKSPADGLRRELAEAEKGLKNVMAAIEAGIITASTKDRLLELEERCATLKQGIAAAEITPPKLSRDQLLFIFEKYKNRDANNPDFIRDVIDTFVDKIYIYDKHMLITFNYNDGVSEEIPLTEVEEAANSAAPLGFDCCGVNSTNCTNLKLIIKYDPGDKPKVVFFYAVTVVKTTVNI

SEQ ID NO: 23671 - protein, 482 aa, synthetic construct
MRQGAVYIRVSTDDQTEYSPDAQLKRIKEYAQNHDILISQEYIYIENGVSGRTVAKREQFKKMIQKAKEKPKPFDVVLIHAYDRFARNVKESRIYKELLRDDLGIELISITEDFGSGKNSFLMEGIKDILNEYYSLNLRDEVLKGMYEKVSRGEVCGKAVLGYNLINKKLIINEEEAKTIKLIFDRYAYDNLGLLDIAKLVNQMGLRTKTGNKFENRTIKYILRNPIYIGKLRYSKKGRVDYHTYSVIKEEDLYDGIHERIIDEETWNTVQKRLDKNILFSVPHKIDTVNADYWLKGIVRCPYCNNTMIRHQKINLRCNGYGKGKCHNKTTINLKFLEKLVLNQMKQDFDGKKISLNTIKIKSNESNERDIIIRQINNTEAKFARIKEAYVDGIDTLEEYKKNKEIISREINILKEILDKIEKPKEVPKDNLKLKIKDIYDLLTNEKVEMSVKKNAAHMLINKIVVDEKNMKILLTYNESPF

SEQ ID NO: 23672 - protein, 487 aa, synthetic construct
MPEALNAVIYARYSSDRQTEQSIEGQLRECYAFAKANDIAVIDTYIDRAISGKTDNRPAFQKMIEDSAKRQFQAVIVYRLDRFTRNRYDSAIYKARLKKNGVKVLSAMENLNGSPESIIMESLLEGMAEYYSVELSQKITRGMRENALKGKALGGQRVLGYKVNSDCYFEIDETTAPVVVDIFKLYSSGKTVKEICDILNARGVKTARGGAFNKNSLHTILTNKKYIGIYKTKYGEIVGGIPAIIDKELFEMVALRMEQNKKAPARAKAEINYLLSTKLFCGKCRSAMVGESGTSKTGKKYYYYACVKKKREKACDKSNVKKDWIEDLVIQRTVTDILKDDVIEKIADRLVELQKAEAAQSGTMLYLENSLAEIQVSIKNIMTAIEKGIITESTKTRLTELEDEKRNVEIEIAKESIARRIISREQIIYWISSFKDGDITSEKYRQQLIDTFVHAVFVYDDKIVITYNYSGENNTATISDLDLSSPP

SEQ ID NO: 23673 - protein, 497 aa, synthetic construct
MIPTNFMYLRKSRAEEGQSTEEVLAKHRAALEELADRLGLPVDGVYEEVASGEKLYARPEMLKLLERIRAGEVEAVLCMDIDRLGRGGMADQGTILDAFRESGTLIITPEKTYDLTNDVDIEMTEFKAFFARAEWRAIRKRMRRGLMQTIEAGGYTANAPYGYRRCRIGKLPSLEVIPEEARFVRYIYERYLAGIGAQTIAQELNSMGSTPRRGAEWNRNTVRHVLRNPTFAGKVAWNRVKHYRPGAHGKETHHVVYTPEGEWLMVDGVHEAIIPWDTWLEAQERRKQRYIPPSNTGQRANPFAGIIRCSKCGNNMQRMGTNKGEPYLLCTTKGCAAGAKFEYVEERMAELLYDELARLRLLIDSGASPNVDALEAALAAAQREQERVQARIPRLYEFLEDGTYDRSTFRSRLEAAEKELAELASKRAGLERQIDERRRIDPRKAAAALENLVQLYPTMSPADKNSALKALGVEVTYTKEKKTKPRDFTLELQLRDF

SEQ ID NO: 23674 - protein, 573 aa, synthetic construct
MVLNNIKPAMKIRVAIYIRVSTLHQIDKDSLPMQRKDLIAYSKLILNTDDYVIFEDAGYSGKNTIRPRYQDMMDQIRTGAFTHLLVWKIDRISRNLLDFAQMYQELKELNVTFVSKSEQFDTSTAMGEAMLKIILVFAELERNMTSERVTATMISRANTGKWNGGRVPYGYKYDQEEEDFLIIASESNVVKLIHDKYEELQSLVYLARYMNEHGYRTRSGNEWSPPSLAIILKSWWYCGCYEYNKRKAGNRQKLKDESEWIMIEDHHIAIISYEQKERVLAILKGNKRFATEHNLYVKGIHVHVFGGLCWCKNCGKKMTSTSSNKNRSWQYSKYLCSTRRRSLTKCRGRSTSDPVLGEFIFNYILNMLNAQKGFDSIHSPADLQDALLTGDAFSDIKSIDQEELNDLYNILSSSVVGNIYGRSFNVNKAKKNDEVQSSLTILKAEKKKLDRALDRLTNLYLYDDMAISEKDYMTKKTEIETKIAEIDEKIGIVNKNSVDNSITDEEFVDKASTFIITQKLTNRNYISYKRLATSVDPKILYMFTHDVIDYIDIYNGKVQRIVFRNGLSQTFIR

SEQ ID NO: 23675 - protein, 521 aa, synthetic construct
MKKITKIDGVQKNTAINSKLRVAAYCRVSTGSDAQLESLEAQKSHYEQYINSREDWQFAGLYFDEGITGTKAEKRPELLRLVTDCEARRIDFVITKSISRFSRNTTDCLALVRKLQSLEIPIYFEKENINTGSMESELFLAILSSMAEGESASISENAKWSVKRRFQNGTYKLGYTPYGYDWDGKNMIINPDQTAVVKRIFADILSGKSTNAIADELNAEKVPSKKNANWTSSTIRGIIANEKYTGDVIFQKTYTDENFNRHTNYGEVDQYMAPDHHEAIISHSDFDAANALVNQRAAEKGIEKGSDKYQQRYAFSGKIICGECGDTFKRRIHSCTTYKYVAWACNTHLKNKESCHMKYVRDDEIKVAFITLLNKLIYGYRLILTPYLKVLENSSGDEAIHRIQHLEQLIAQNSEQREALTKLMAQGYIDQILYNQETNALLLQAETYRSDIEAITIGMTGDAAKVTETNLLLHFVSHTDMLTAYSEEFFENYADHIEVMSRNEIRFVMKCGLTFTERIDD

SEQ ID NO: 23676 - protein, 559 aa, synthetic construct
MNRYERMNQERKIVDVRKRVAAYCRVSTDHEDQANSFESQQRYFRQYIERNPDWKLYEIFADEGISGTNTKKRSEFKRMIACAKEGDFDLIITKEISRFARNTLDSIYYTRDLKKHGVGVIFMNDNINTLDGDAELRLAIMSSIAQEESRKTSERVKWGQKRQMEQGVVFGRSMLGYDVKDGKMTINEDGAKIVRLIFHKFANENKGTHVIARELREAGITPMRVKEWSNTVILRVIRNEKYCGDLVQKKTFTPDFLSHEKKYNRGEEEFVIIKDHHEPIVSRELFEKANRILDEKSLTQEGKAKHSNRYPFSGKIKCGCCGSSYVARYKNRNNGTRYKAWRCYKSATQGSPHTDKAGNPLGCSNPSIRNEDAVHIMYLVTRSLQLEEKKITANLLSVIQSVLSVNINYSHIEKLKEQIQSVEDKRTQLIDLCISGAITKQEFITKREVCDKEISELQDTISGIDQQHLLADQQESVMKEITAAIHEIVSGVEYEDAFYSQILDKMVVQSKDTVDVYLNLLPIKWSYAVAKASKGVLDPKSGISETEIPISVNIARSSG

SEQ ID NO: 23677 - protein, 514 aa, synthetic construct
MRNEYNPIIIKYVAEYLRKSRGETTEDLIKHKTILEELCKSRGWVYVVYEEVETGESLFARPVMQQLLRDVEDNIYDAVVCVDLDRLGRGDLVDWGQIKRVFQKTNTYMVTPSSLYNLNDDNEEFAVDLQTLFARREYKKITHRLSMDKKVGTKLGAWTNGTPPMPYEYQEWIDPATNKRYYNEKGLVVNLQKLSIYRFMVDSFIKDKKSTNEIAWELNRRNIPSPRGGRWCNMTVRRLLVDETHLGKIISNKTKGDGHKNKSPNKQPFQKIPKEQWTVVENRHETIKTQDEHEKILIGIQKNLKSPYRRSDHYYPLKGLIKCGLCGYGLPLEYKRGKDLIVKKCWHKDYLGNKCPNSSGKAQYIIDAIDEQLKEYEEQIRKEIESCEDQSTDLIQLQIKTIMDKLNKKDIALKRARIAYDEGVDTLDEYRSAKERILKEVDELESQLSIENLKLQKAQSITNHEKLHYIEEFRRSRWEDELDDKELNDLYKTIISSIIWTKQGDNIDIKVNFL

SEQ ID NO: 23678 - protein, 522 aa, synthetic construct
MSTGTELRAVFYARVSTEEEKQLNALEKQIQENKDVIRDHGWRLVGEYIDEGKTGTTTKRRNDYKRLLKDMTENKFDIVVCKDQDRLQRNTLDWYLFVDNLVTNNLKLFMYLDNKFFKPSEDALITGVKAIIAEEYSRNLSKKLNNSNKRRIERALNGEEVSAMGNGKSLAFKIVNGKWVKDEEEAKLGKKIFELYLEYDSIRKVRDWVNEHGYTNSVGKPFTSESISRILKNEKAKGVIVMGKYHHDFDKKKIVRRSEEELVRIPAPELAYVSEEVFDKVQERLRAKTGNGRGVNAYSDPLSGKIYCGSCGRKLWKHASNGYVNWMCASQVAKGDVECNGTRITTVAIRNIYKKITDNLEVNKGVVKQDIVKWLNELKATLSDTSVNEKIQKDLDKLERKRTKLLEAYLEDFISKDDYKVKYEAIEGQIEEKKKLLVPVEENEDIKVIESVLQNIDDEIDAYVKTLDMEESKVDFLIEHTKRITVLENRDIIIELDLVAGAIIAGKDFLLYVHDTMPQHHG

SEQ ID NO: 23679 - protein, 572 aa, synthetic construct
MASRIAEKLAAKKAAIYIRVSTHWQVDKDSLKVQRRELIAYVTLVLGITDYVVFEDPGYSAKNTDRPEYQAMMDRIRTGEFTHLVVWKIDRISRNLIDFAAMHDELQSLGVTFVSKNEQFDTSSAIGEAMMRIILIFAELERKTTAERVTAVMLSRASDGQWNGGRVPFGYSWSKEAKTFSIVPEEAKAIRRMAELYEQYQSLLYVAKYLNDAGIVTKTGGQWTPTTVRTILTNPWYIGQYVYNVHSDGKGIEKRDSDEWITVENHHEPILNEDVFCRMKFLLTRNKRGGVPSHKTYVRKNIHVFAGLLRCGQCGSNMTANLDRRRANGFRPSQYACGSRRRKGTSCTNKYISDTTLGPFVLNYVANIIRASKNSSEATTPEVLERKLLRGEAFEDVASVSTDALGQLLDAFRSAGDAVEYRPQIAFSGDDNSIREIDTLRARRRKLDNALARLNALYLYDDEAMPEKDFVMQRGQITKQLEEVNARIEELQNQESSEELGDGFIGKASYYIMANKLIEDRYIDYEKYIRAIDPSIPHSFLQQIIDHIVVNDGRVTSITFKNGATHTFTYKT

SEQ ID NO: 23680 - protein, 590 aa, synthetic construct
MRTIRKIERSVPSLKQRKKVAAYARVSMESERMHHSLSAQVSYYSSLIQKNPDWEYAGVYADYGISGTGMKKRQEFLRMLEDAEAGKIDIILTKSIQRFARNTVDLLRTVRHLKELGIEVWFEKENIHTMSGDGELMMTILASFAQEESRSISENVRWRIKKQFEQGNPNGRFRVYGYRWEGDNLVVVPEEVAVVRRIFQNFLDGKSRLETEREFAAEGITTRNGCRWMDSNIKVVLNNITYTGNMLFQKEYVTDPILKKRKKNRGELPKYYVENTHEPIIDKETFDYVQQEMARRKELGALANKSLNTTCFTGKIKCGICGRSYMHNLRTDRGFEEFWACGSHKLKGRNCGAKGSIPQAVLVKECTEVLGVDDFDEQAFLDQVEKIVVPAYHVMVFCMKNGRKITRHWVSTAKKDCWTDEYKDRQRDWMRNYMASGKGTRFSPFTTRVRCAVCGHAFRRCKQKKKQGISVHWRCSQGGKCSSLSVREEDLMKIAADAMGLEAFDGDRFREEIDFMEAGAEDRITIHFKDGRIQNVPWTKPKKQGTRHTEIYKEYMSQLGKKRWTPERKQRMSEQMKALRKERGENWQKQ

SEQ ID NO: 23681 - protein, 522 aa, synthetic construct
MAKTVRAIPATISRYTAAPINSRKKRRVAGYARVSTDHDDQVTSYAAQVDYYTNYIKGRDDWEFVGIYTDEGISATNTRHRDGFKRMVRDAMDGKIDLIVTKSVSRFARNTVDSLTTVRKLKDKGIEIYFEKENIWTLDAKGELLITIMSSLAQEESRSISENVTWGHRKRFADGKVSVPFEHFLGYDRGPDGNLVVNREQAKAVKLIYRLFLDGYTFHSIAKELTARGLETPAKKKRWYPRTVESILTNEKYKGDALLQKRFTVNFLTKETKANEGEVPQYYVENNHEAIISPQVFDWVQEEIKRRREGRSRYSGVSIFSSKIKCGQCGGWYGAKVWHSTDKYRRTIYRCNDKFKSHCQTPHLTEDDIKEAFIRAANQLIENKADVLNCITLLKERLTNTENLEEERDKLSTDLNLLAEKVQQLIAENARVAQNQDDYDRNYSELVSRYEAAKKQYDKTCEAIQYRKARSRQMDSFIKEVREQELIKEFDARLWGSLVDFITVYSKEDIRVTFKDGTEIRA

SEQ ID NO: 23682 - protein, 533 aa, synthetic construct
MELNRTGRYVMYLRKSRKDDEYGAASNEDVLARHEQLLRDTAKRNKIIVSEIYREVRSGDSISARPMMQQLLSELADGRWDGVLVVEIERLARGDTIDQGIVARAFQDSGAMIITPIKIYDPNDEYDEEYFEFGLFMSRREYKTIKRRMQRGRMAASKEGKFCGNKTPYGYKREKLSGESGFQLVPDPEEAEVIRKIYDWYVNGIPQPSGSRTMAGMAAIANQLTAEGYAPRFTSVWSHNTVSDLLKNPVYIGKITWGKNKAIDCLQEDGTLRFRDHRQSSANVFDGRHEPLITEDLYFAAQRRRHSSPHSHTHYVADCSNALTGLIRCKYCGRNLFYRKASARSPKDIMLCGNHECLNIGCFYDVLEARIIDAIRMYADQNSKPVKKPKHDGSLQTSINRIQKELDASATQLDRIYTAYERGVYADDVFLERSSSVKKKISDLQRTLKDLQDQEAKQKQADQEQVDMIPKMRHLVETYWTLSTPSDRNAALKEVIDHIEYEKHKKSPKGGPFDNFSLVIYPRLFSSPFYFNN

SEQ ID NO: 23683 - protein, 434 aa, synthetic construct
MERIVERIDSHIPAQPRALRVCAYARVSTGKDAMLHSLSAQVSYYSGMIQSHGGWLYCGVYSDEAVTGTKCERTGFQSMIEECRQGNIDLIITKSISRFARNTVTLLQTVRELKSLGIDVFFEEQHIHTLSSNGELMITILASYAQEESLSASENQKWRIRKGFENGELVNLRFLFGYDITPDGVKINETEAAVVREIFARFNSGDSMSAICRDLDSRGVKGALGGTWCAERLRGTLSNEKYLGNALLQKRYRNNHIDKKLVSNNGELPMYYAEGTHDPIIDLATFEIAQKRLDILAQQTANRKKPTRSAFSGLVRCGLCGSTYKRITCRKKHFWNCTTFQEKGKVECTAKKIPEDVLVALTREVLGTERLDLNVVRSRITEIRAEKNNVVVFCMDDGSEIVKRWKDRSRAESWTPEMKEQARQRALQARRGKK

SEQ ID NO: 23684 - protein, 528 aa, synthetic construct
MSTTAARSVTVIPPTINPLTHLSKATMQKRRVAGYARVSTDSDEQFTSYEAQVDYYTQYIQRNPEWEFVKVYTDEGISGTNTKHRVGFNEMIADAMSGKIDLIVTKSVSRFARNTVDSLVTIRKLKEKGVEVYFEKENIYTFDGKGELLLTIMSSLAQEESRSISENVTWGQRKRFADGKVNLPYKQFLGYRKGADGFPEVVPEEAIVVHRIYTRFMEGLTPGAIAKELTADTIPTPSGKQRWQTSTVESILQNEKYKGAALLQKCFTVDFLTKKKKANEGEVPQYYVEHSHEPIITPDEFDKVQVEFERRKRISRQYSGKSIFSSRIICGDCGSFFGSKVWNSTSKYRRVIWQCNNKFKGEHKCETPHLDEKTIKARFVAAFNAILDSKDNILEDCRLMQATLTDCTGIDEEIQALLEEIDVVTELTKRCIAENSQTAQNQEEYTARYNGFVERYEKTTAQLEQLRTTKGAREAQAEAIGAFMFEVQELDALTDFDDKLWLTVIDTVTVHADGRMTFKFQGGTEIGV

SEQ ID NO: 23685 - protein, 526 aa, synthetic construct
MPKVTMIPATVNSLTHLPKASVQKRRVAGYARVSTDSDEQFTSYEAQVDYYTRYIQSKPEWDFVRVYTDEGISGTNTKRREGFKEMIADALAGKIDLIVTKSVSRFARNTVDSLVTIRKLKEKGVECYFEKEGIYTFDSKGELLITIMSSLAQEESRSISENITWGQRKSFADGKIHLAYKHFLGYKKGEDGRPAIIEEEAAVVRLIYRLFLDGKTQAGICRYLEDLSIPSPSGKEKWSKTTVTSILTNEKYKGDALLQKSFTVDFLQKKTKPNAGEVPQYYVEGSHPAIVEPYEWDHVQAEFARRKALGNAYSGKSIFSAKLVCEDCGGFFGSKVWHSTDRYRRTVWQCNNKFKGGERCLTPTVDTETVQQLFIKAYNQMMGNRKQIIEDCELMRKKLTDFKSLDTDIEHQFEETQIVAELVKAAVKDNAVTAQSQEAYLKKYEALTKRYETAAAELERLQNLRTLRSQKDKAMALYIRTLKKQPTVLSEWNDTLWTVMVEKAIVHRNSEITFAFYNGTKVKVRQ

SEQ ID NO: 23686 - protein, 502 aa, synthetic construct
MEIQIREGKSRQKQKLKVCAYCRVSTDADEQENSLENQIRHYKEVITSNPDYEYAGVYSDFAISGFKEKRPGLQKMLADARKGKIDLILTKSVSRFARNTSIVLEATRKLKELNVGVFFELQNINTMSGEGELMLTILAAFAQAESESGSVGAKMVYQRKYKAGIPVQYLERSFGFKKDERGVYIADEEEAVWVRKIYDMAAQGYTLAAIKRYLNENNVKTVGGAKWLDSTVLRILENEIYKGDYIMHKYFVNEERKLVRNRGEVDAWYIEDDHEAIVSPKLWQRAQDALEAKRDYLAEGSVIEEFTEENYPYMNRIYCARCGHPLYKRIYSNGNRLNWGCSGTKRYGKSFCEGINIPDGVLRGAWHFDENMYIGEKQTDKGKKEFTYLKEASWKRRHKKKEPEPIPENTETEYPYREKIFCGLCGSRLVRHVNTKSHKVIWVCNGRKRKGKDFCDGTRVPDTIIKGWGEIKKDIYIQRKDDKNGKKRYSYTSKKPKGADRA

SEQ ID NO: 23687 - protein, 501 aa, synthetic construct
MEIQIREGSREQKRKLKVCAYCRVSTDADEQENSLENQIRHYETVIKANPDYEYAGVYSDFAISGFKEKRPGLQKMLADAEKGKIDLILTKSVSRFARNTSIVLEATRKLKELNVGVFFELQNINTLSGEGELMLTILAAFAQAESESGSAGAKMVYQRKYEAGIPVQYLERSFGYTKDERGVFVADEAEAVWVRKIYEMAADGYTPASIKRYLNENGVKTVGGVQWVDSTVFRLLENEIYKGDYIMHKHFVNEERKLVRNRGEVDAWYIEDDHEAIVSPELWQKAQDALAAKRDYLAEGSVIEEFTEENYPYMNKIYCAKCGYPLYKRIYSKGNRLNWGCSGTKRYGKSFCDGINIPDGVLRSAWHFEENTYIDEKASDKGVKEFTYLKERSWKRRHKKKQPSAIPENTETEYPYRENIFCALCGSRLVRYVNPQNYKVTWVCNRRKRKGKEACEGTRVPDTVIKGWGEIKKDIYIQRKDDKNGKKRYSYTSKKPSGIRV

SEQ ID NO: 23688 - protein, 515 aa, synthetic construct
MQRAVIYARYSPGPNQTEQSIEGQVRECTKYAELHDLRIVGTYIDRKISGKTDNRREFQRMIDDSEKHIFDVIILYHTDRFARNRYDSAIYKHKLKENGVELRYATTDIPKGPEGIILESIMEGWAEYYSAELSRKIKRGMRESALKCHSTGAGRCLGYRTAEDKSLVIEPEGAKAVQTVFDMYIKGKSHADICRYLNDCGFRTAQGKLFNKNSVTHIIRNKRYIGVYTYDDITIEDGIPAIISKDTFHLAQLEAARRKTAKRPKEPKAEYLLSGKAFCGHCQKPLVGVSGTGKSGNKWYYYYCQESRAKRGCTKKPVKRDWLEREIVKRTVAEVLQPEVIQHITKKCYDLQMEYRQDNSDVLFYELKLKDVRKAIKNTMHAIESGVKTKTLPARLQELENEEEALEAELAIAKASDFVITADQIEFLLTQFTEPWECESEEEYHRRIIKCFVHKVFLFDDKLLIYYNVSRDGKTREQSEAELLEDALGEGFDKRSSGSTNKKGRSVWNVLFYWS

SEQ ID NO: 23689 - protein, 526 aa, synthetic construct
MAQRKVTAIPATISRYTATPINSTKKRRVAGYARVSTDHEDQTTSYEAQVDYYTNYIKSRDDWEFVAIYTDEGISATNTKKREGFKTMIADALAGKIDLIVTKSVSRFARNTVDSLTTVRKLKDEGIEIYFEKENIWTLDSKGELLITIMSSLAQEESRSISENVTWGQRKRMADGKVSFAYSRFLGLDKDKETGKIVVNPEQAETVRLIFHLFLEGMTPHSIAAELTSRGIKTPAGKDVWNQQTVRRMLSNEKYKGDALLQKEFTVDFLQKKMKKNEGEVPQYYVEGNHEAIISPAVFDMVQAELAKRTKGGSRYSGVSIFSNKIKCADCGGWYGSKVWHSTDRYRRVIYRCNRKYNGEKCQTPHVTEDEVKAAFVSAYNQLVTEKKEIIANAEIIRKTLCVTDALQEEKGKLEEEMAVLVEMTQNIVAENARVAQDQDEYQKRYDGLVQRYDTAKARYDEVVAAISAKEAQSERLADFIKVLKAQDGTISEFDGNLWGGMVEFVTVGRNKEITVTFRDGTEIPA

SEQ ID NO: 23690 - protein, 591 aa, synthetic construct
MAKITRVDQAVPTIKTKKKVAAYARISMESERMNHSLSAQISYYSSLIQKNPDWQYAGVFADDGISGTGIAKRDEFKRMIEAADNGEIDIILTKSIQRFARNTVDLLETVRHLKDIGVEVRFEKEHINSMSGDGELMLTILASFAQEESRSLSENCKWGIRKRFEKGIPNGHFRVYGYRWEGDDLVIVPEEAEIVKRIFQNFLDGKSRLETEREFATEGITTREGCRWVDSNIKVVLTNVTYTGNLLLQKEFISDPISKQRKKNKGQLPQYYVEDTHPAIIDKATFDYVQEEIARRKELGPRANKSLNLTCFSGMLKCPHCGQSYMHNKRTDRGFMEFWVCGSRKKKGGRCPVGGSINHENLKKACAAVLDLDEFDEDAFHDRVDFINVPERGMLEFHLKNGEVITKDCPNTGHKDCWTAEYRAKTSEKRRKRPNCKGSSVMTGKIKCVGCGCNFRRATQPSSTSESGKAYYWRCAERDGCETVGLREDVLKPFIAETLGIAEYDDGEFEKRIDHIDVLSATEMVFHFKDGRTVSRTWEQPKRVGRPWTDEQRAKFKESIKGRYTPEVRQQMSEHMKQLRKERGKAWRKEK

SEQ ID NO: 23691 - protein, 468 aa, synthetic construct
MLYGKPQNYAWYRARVILYIRVSTDEQARHGYSLGAQREALREFCDTFQCQIVAEYSDDGVSARKEIQRRPGLLRVLEAVKAGGVDYVLFIKLDRWFRSVREYYRVQDVLDAAGTNWKAILEDYDTSTTNGRLNLNIRLSVAQDESDRTADRIKFVFSERVKNGGAIFGSKSLPYGLEVRDHRVQIVEDQAVIVRAFFEHYEAAHSTRSTQVWLRDQYGVDLPRATIGRMLRNGLYCGQYRDNKNYCPAIISPDQFQRVQEILARQASGHTRQSKYSYVFTGLLRCPVCGCTLKAFPQFDYKWNRLYLRYRCTQHWIERRCSWKTTPWEPRLEGWLLDHIQPQLDAYVAQFDVQEAQRRQAVVDVSAIQRKLSRLQDLYVDDVIDRAAYDEKYRALIQQQDAAEAARAAQSAGRDLEPLRQLLAGDFRSIYATLSPQERHTLWASVIDHIVVKDGRYGHYDLDVIFLP

SEQ ID NO: 23692 - protein, 464 aa, synthetic construct
MMTNKIIRCALYIRVSTAEQCMHGKSLEAQESYLQQYASDHNMIVVGVYADEGKTARKELKKRKAIHSLLEDVKAGKIDIILFWRLDRWFRNLSDFYKVQDILDEYGVRWMSASEPGINMETRDGRLQLNVVLSIGQNEVDTTSERIKFVNEASIRQGKLIFGDANMGYGYKSGIADGRKCMIKDPEREETVNAFYKYFFKHQNKCATLRYIQDNYDPNFSWAIMRTLLSSEFYKGTYRGFPYCPPYLTEEQWNELQKIAHKNIKRAKSGRIYLFTSLIRCPVCGQLLCGTGCKSIINRKTREKRDYCYYRCSRAHNDRICTYRHRLSQNLIEQYLLDNLDTEYRKYQIRVKKIEEEKKKIAQTKTPEKLNAELERLNLLFQKGRVEWDYYSSEYDRIEQELKGLSKIKPEVKRDLSFLEDLLQSDFKTLYASLSPENRRAFWRSTIKQIHLNEDSTIKFVDFL

SEQ ID NO: 23693 - protein, 527 aa, synthetic construct
MGVNRKVKTIPATLTKFTATPITEQKKRRTAGYARVSTDHDDQFTSYAAQIDYYTNYIKGRDDWEFVDVYTDEGITGTSTKRREGFKNMIADALDGKIDLIVTKSVSRFARNTVDSLTTIRKLKEKGVEVYFEKENIWTFDSKGELLLTIMSSLAQEESRSISENCTWGQRKRFADGKVTVPFKRFLGYDRGPDGNLVVNPEQAVTIKRIYSMFLQGMTYHGIAKQLTDDGILTPGGKTNWNQSAVKSILTNEKYKGDALLQKSYTTDFLTKKTKVNEGEIPQYYVENNHEAIIEPEVFEMVQREILKRGRGKKYHSGVHIFSTKIKCGCCGSWYGSKVWHSNSKYRKVIWQCNHKFDNDERCDTPHLYEDDIKAAFLSAANQLLSCKDSVIADAEEMMSAILDTTVLEKEQDELLEETQLISEMVQAAIRENATVALDQTEYQKRYDSLSTKFDKSKARLEQVMADLQQMQLQRAEYESFLKTFKQLPDSLEEFSIDSWNSLVEYATVYSTDDIRFTFKNGQEIKA

SEQ ID NO: 23694 - protein, 593 aa, synthetic construct
MRKINKIEPKIPTLPTRKKVAAYARVSMETERLHHSLSAQVSYYSELIQRNPEWEYVGVYADDGITGTQTNREEFQRLMADCEAGKIDIILTKSISRFARNTVDLLQTVRHLKELGIEVRFEKEHINSLSGDGEVMLTLLASFAQEESISISNNVKWGTRKRFEQGIPNGRFMIYGYRWEGDHLVIEPEEAKIVKLIFNNFLKGLSAEATEKQLEEMGVKSYKGQHFGNTSIRQILGNITYTGNLLFQKEYVVDPLTKKTRKNKGELPQYYVENTHEAIIDKETFDTVQEEIKRRRSLGVFANWSINTTCFTSKVKCSKCGMSYRRSGKRQRKNPDEVYYVWICRSKSDKGAKACSAKTIPEKTLKQCCTTVLGLSEFDEDVFLDKVEKIVVVGDDQLDFYFYDGHIVNHKWKSTARTDCWSDERRKAWGELHKGKNFRKKDQNPFTGYFRCPNCGGNFRRQSRTYVDGTKFTYWHCVNGTSCGNKSKLPEETAKQFIADAAGTPEFDADAFHDKIEAIYMTDTYEATIHMKDGSKIVRTWEPLKRRGHKHTEEYKEHMRRLMKERWTDERKQEMSDKMKKIRSEKYWASTGK

SEQ ID NO: 23695 - protein, 474 aa, synthetic construct
MKIAIYTRVSTMEQAEEGYSISEQQDKLKKYCDIKDWKVARVYTDPGFSGSNTNRPSLQQLISDCKNNMFDAVLVYKLDRLSRSQKDTLYLIEDVFNKNGVGFISLSENFDTSTAFGKAMIGILSVFAQLEREQITERMTLGRVGRAKAGKAMGWSNCPFGYTIYKEVYEIDPFRAEIVKRIFKDYLAGVSIIKLTQNLNKEGHIGKENNWSYRTVRQVLDNIVYAGYIKYKGEIYPGLHKPIISISDYKKTQAELKKRKITQAELHNPRPFRTKYMLSGLMRCGYCNSVLQIATSNLKDGTHLHRYTCPSSRPRKRSTNKRHDFDCGFKFIKKNEIESVIISEIKKLPLNMDKVINNQENKDVSKEIKAIKAELQQVEKKQDKMVDLYLLDNINVDELNKKNDELSKQKENLQKRLNSLIDNKNKEKIEDFIKNAKEAKNIDKLDYEKQKVIVRKLISGIKVFNDKVEINWNI

SEQ ID NO: 23696 - protein, 535 aa, synthetic construct
MKNYMQNDNRTAITYYRYSSHRQGEQSIEGQRAEAERWAKANGYTIVKEYADRAMTGTNDDREQFQLMLRELERLRPAVLILWKVDRMGRNKEEIAFNKYRCKKNGVKVIYTAESIPDTPEGVILESVLEGMAEYYSLQLSQNVRRGLRVSATKCQSTGGNRPLGYRTGPDKKFEIDPEGAAIVRQVFERYVRGETQAEIVHALNAQGLRTLHGRPFTHNSLRTVLQNEKYIGVYQYKDVRIEGGVPAIIDVETFQKAQRVRKRNRRINWKRWSVAEYLLTGKLFCGSCGDMMVGVSGTSKTGAKHHYYGCSSRYGDKRFRSTCRRKAVRKAWIEGIVLREISQLLQDDALLDFIAENTYRYYVEANTDTAYTDALQANLQEVEKSLANIMRAVEAGIFNDTTKARMEELEMQKQQIQSSLNMAKLDNGLHLTKDHIFYFLRRFRELDIENVDCQRQLINTFVNAVFIYDDHITLTFNYSGDDRTISLAETDAAVEGDKFICDVSRSAKQKTVEFQGFPLTLNGFLHDEGARFIT

SEQ ID NO: 23697 - protein, 500 aa, synthetic construct
MYLRKSRADDPHESIEDTLRKHEKILFDLANKLNIKKDEIVQFKEVVSGENLKNRPQAQKMLKLVMENAFEGVLVVDSQRLARGDTLDQGTIIRAFSLNNTKIITPGKTINPGDEIDQDYFEFDLFMGRREYKMINKRMQRGRNISVQEGNYVGSIAPYGYKKTKIGKCHTLKINEDEIDCFNKMKELALNGLGCTSIANELNRLGFKPRKSKLWTTTAVRDILLNKTNLGLIKWNTRKSVKLYKNDEIIKSRPRNEEAEYYPGKHPAIITQVEYDAIVENIKNRARPVKKDKKLQNPLAGIVYCGKCGKAMIRRSYNNGYRDGLICTNTHCNNVSSVLEVVEKRVLESLEDTLKEYRQFIDNYHNDKTKTNNDSLIIKTEKEINKIDSQINKACEMLEVGAYSVELFKERKTLLDNQKKALIDKIEALKKEDTDFKLQNYINAVPILENAIKLYWNSSVEEKNKLLKQIVKRCDYLKSERGKRNGKGMYNFKLNIYLKI

SEQ ID NO: 23698 - protein, 675 aa, synthetic construct
MRRLFFCNRRILPADAMEKVRYIVDPRMDDEHSLGNRKGGDRLKKKKCYIYTRVSTMAQTEGYSLDAQQEKLRKYAEYKNLEIVGEYCDAGKSGKSIKGRPAFQQMMEDVASQKDDVSYVLVFKLSRFGRNAADVLKSLQLLMDYEVDLVSVDDAIDSSTQGGRLTLAILSAVAEIERENITVQFLSGKMQKLKEGGWPGGPIPYGYRKENDGLVQYPQEAEIVKLIFDMYLQDDVLATTIVRYLNDNGYTRVIKGKVSPFKYDFVTTILDNPVYCGKIFYGRRTNSKESTKQKREILEIQGNHEAIISVEQWEQVQQKRKANSMRCKKIDEPDRVSLLSGIAKCPACGSGMLASKNKRINKNHGGHYKILHYYSCGNARKQNGMTCKIRHTYNQEKVDSAVLEMIGKLFTVPSFQKETAKWFQDKDSIEELTGQLKMVRKQLYHQEQQKRRLGEILDNLDILADDYDETYDKTQAEIDGVYDEMERLETLLSQTKKKLDSAEQGTKALKQVENLIQNIPAFFKEMTCEEKRNFYHLLIEKIEMYPEETPDGRIVKSISFKIPVFYEDWEPTTELIADEVITYTLDTSEVGITSAEAKATYVELKKYILDRYSTKVSSLYIAQIKRKYGIDMGENYNKPDDPNKRVPKCPKAKEEMIIEALKHFKMLEPDVKMIA

SEQ ID NO: 23699 - protein, 563 aa, synthetic construct
MKKRTKCYIYIRVSTAMQVDGYSLEAQKDRLTKFAEFQDMEVVREYCDAGKSGKSITGRPEFTQMLQDVADDKDGVEYILVFKLSRFGRNAADVLNSLQYIQDFGVNLICVEDGIDSSKDSGKLTITVLSAVAEIERENILVQTMEGRKQKAREGKWNGGQAPFGYTLDSKKGMLLVNPEEAEVVKIIYNKFVNGGVGADTISNYLNQHGYVKKKNRSHELNYFTRGLIRKILDNPVYIGKIAYGKSSTEKIKGTRDQYHRVRNDDFLLAEGLHEAIIDLDLWEGARAKREETGVKWVKTHSLEHEHILTGLLKCPVCGVGMSGTVRRRKNKSTGEYKDDFYYRCKHRKKINESDFCNCSLVLNQNELNGEVEKHIMDLVNHDDCRAFIIRRMETKVDISSLELEREQLRGQLRQLSGAKKKLTDMLDRLDVSDKHYDRKYQDMHDRLDNLYDKIGDIDDQLQDVNEKIRMAYENQITSKQVYQILTCFDKIYFEMTDLEKKEFFRNFIDEIELYSERQSDGRIVKQINFNFPVYYNGNEGNAIRLPDENTVETMVLLQRRDI

SEQ ID NO: 23700 - protein, 519 aa, synthetic construct
MKNVTKINQIDFSIFKKTRVAAYCRVSTDSDEQELSLDTQKNHYESYIKANSEWEYAGIYYDGVSGTKTAKRDGLLRLMEDCEKGLIDLVITKSISRFSRNTTDCLALVRKLLNYEVYVIFEKENINTGSMESELMLAVLTSMAESESRSISENEKWGIKKRFQNGTYVISYPPYGYANVDGEMVIIPEQAEVVKEIFAGCLAGKSTHIIAKELNEKGVPTKKGAKWTGGTINGILTNEKYIGDALFQKTITDANFKRKRNYGEEEQYYCENHHEPIIDKDTFEKAKESIRQRGLEKGNCSEDTAKYQNRYAMSGKIKCGECGRSFKRRYHYTSHGRSYNAWCCGGHLEDSKSCSMKFIRDDDLKRAFLTMMNKLVFGNDLVLKPLLISITTNNSKKNANSVEDIEKEMESNEEQRKQLNTLLTNGYLERPVFAETHNKLIMEYEHLEAERDLLFRMDDAGYTMEQALKELVDFLNDAKPFTEWEESLFERFIEKVKVLSRDKVEFEFKCGLKLKERID

SEQ ID NO: 23701 - protein, 526 aa, synthetic construct
MPYCIYLRKSRADAEAELAGEGETLARHEKTLLALAKKLKLPITKIYKEILSGETIAGRPVMQQLLQDVEAGIWQGVLVMEVERLGRGNTLDQGIILNAFKYSSTKIITPMKSYDPNDEFDEEYFEFSQFMSRREYKTILRRMQRGREASVKEGKFAGSIAPFGYRRVKLPQEKGFTLEVDDIEAAAVKLAYELYAYGDPQPDGTFADIGRATIAKRLDQMGIRNRKGGTWATASVTRMLQNPVYIGKVHWNRRPEKKHTENGKIKKARPLAENYLLVDGLHEPIISEELWNLAQAKMKQHYRPTGVNGIMQNPLAGLVHCSYCGNAMQRRPYLKTGQPASLICTTHFCPQISSPLYMVEGKILEALSLWMKQHEPTWEEESSADVFSTKIMALEHAIADMEQELQGLQSQFEKIFEFLETGIYTPEVFTARNKTLSEKIAEIRSAIEETQAELSKLKAARKNQVSMIPKIKNILDTYETLTPAEKNKLLKEVLDHVEYHKKIKGKKNVPADNFEIILFPKISPEN

SEQ ID NO: 23702 - protein, 629 aa, synthetic construct
MALLPRKPAKHPAKPKRGKKLEVEEPGVLYGRYSSHNQKDISVEQQFEKGYELAAEYGIRIIDTYADRAVSGRTDKRRDFQRMMTDAAKGKFRYVIAWKSNRMGRNMLEALINEARLQDLGVRVLYVEEDFDDTAAGRFAARSMMNVNQFYSENMAEDIKRGLYDNAANCMVANGHLPYGYKADETLHYAIDEPKAAVIREIFTRVSCGEAFVDIMASLNARGIKTSYGRPWGRSSFQKILSNERYRGIYIYGDVRKEGGIPRIISDELYFKVQEVITTKKNPQGRHRVNGDYLLTGKLFCGHCKSPMTGVSGTGRSGNLHYYYVCQKRRTEKTCEKKNLRRDDIELQVAKAIKRRTLDDDTINWIADSVVEYSQHQESASGIGLLEDQLKDTQRSIKNLMAAIEQGIITPTTKARLMELEKEQSDIDRKITMAKADVIPVNRDQLVGWLKKLQAGDVHDKKYQAELFDTFLIAVYVYDNPDGQDYMKVVFNYAGSKNTVEIPLDPSVIDNVENIETGAVRLSSAQVHQWGITRTFLLCRRLCRHNMVQVIPTEKNGYSHLLRVSVLSLCPADCPRTVRGQSADSLRTVCGQSQNAAIFTYRSVRFSQFLIADTDCPSVIGFLFLAVSS

SEQ ID NO: 23703 - protein, 460 aa, synthetic construct
MKRKLNNDKTILRVAIYVRVSTEQQAEDGDSIRDQLNSCEAYIKAHENMILAGEYIDGGISGQKTKREDFQKLLSDVRANLIDLIIFTRLDRWFRSLRHYLNTQEVLDKHNVSWTAIRQPFFDTSTAQGRTFVNTSMAFAELEAQNASERIKGVFKDKVSHSEAISGRTPIGYSIVDKHLVPDKDAPIVVAIFEHYQAHSSMGETLRYMQDAFGIVRSRSSLKRMLQNKKYIGIFRDNESYCEPIITKELFYDVQRLLKLNIKTCKNRHDYIFSGLIRCVDCGYVMSAASNHNHYVRKSGEEVDHFYSVYRCHANRLHRCVNNKVFFESSIEKELLKRVRPELEQYICDYKLETAPVVQNKARIHKLQTKLSKLKELYLNELITLEEFRTDKADFEHQIEELQKEEQKPVKDLSSLEEFLKLDFENIYSSFTAPEKRRVWRSIIKEIQVDHHKNINIVFL

SEQ ID NO: 23704 - protein, 573 aa, synthetic construct
MAKVKLPDKPRVAIYTRVSTLHQIDKDSLPMQRQDLINYARLILNTEDYVVYEDAGYSGKNTDRPKFQEMMQQVRLGMFTHILVWKIDRISRNLLDFATMYSELKQLGVVFVSKNEQFDTSSAMGEAMLKIILIFAELERNMTSERVTAAMLSRAANGQWNGGRVPLGYDYDPETKTFTINESEAAVVKIIHDKYEQERSLVSLARYLNGHGYRTRTGCTYSPSTLLIILRNVFYCGDYRYNVLKDGDRQKRKKESEWITVKDHHPAIISREQKDEIERILKENRRLECERRGIYSKKKNVHVFGGLVICGNCGHAMTSTIRPADQDGIRWSVYVCPTKRRSEYLCKGRATSEVVLGEFVFNYILNMLNVQKNFDSINSVEDMEKMLLSGSTFRDVDGIERSGLDDLYNMLASGLTEKAPFDSSVEVRKKPVVSDIELENLNTEKTRIERAAERLQNLYLYSDDSISQKDYIIQREKLMSQLAEVNEQIGMVMSNADEKDVSDEEFVHAASKFILTQKLEGRTYIYYKRLATTVSREVLRSFVMSIIENITIYDGRVQTIVFKNGLSHTFILK

SEQ ID NO: 23705 - protein, 519 aa, synthetic construct
MKKVTKIAETASSKVKLKKVRVAAYCRVSTDSDAQLESLEAQKTHYENYITSRDDWEFAGLYYDEGITGTKKDKRPELLRLIDDCKAGKIDFIVTKSISRFSRNTTDCLSLVRELLAQNIPIYFEKENINTGSMESELFLAILSSMAEGESVSISENNKWSIQKRFENGTFKCSYPPYGYDWDGEQMVINPEQAAVVKEIFADLLSGKGTHAIADDLNRRSVPSKRGGRWTATTIRGMLSNEKYVGDCLFQKTYSDSQFVRHTNHGEQAQYMVKDHHEPIISREDFEAVHALISQRANEKGIAKGSDKYQNRYAFSGKIICGECGDTFKRRIHSCTGYKYTAWCCNTHIEDKSKCHMLFVKDDALKQAFTTMVNKLIFSHRQILKPYLEAIKKTSADDSLHRIQKIQTLLAQNTEKRETLTKLLTQGIIDPVLYNQETNQLLSQADSFRDEIEALKNEVSGDVTKVTETTALIHFCEKSAMLQEFDEDLFERFVKRIIVHSRSDIRFELKCGLTLKERM

SEQ ID NO: 23706 - protein, 520 aa, synthetic construct
MNKLRAAAYCRVSTDRAEQSGSLASQRSFFDDYIRNSDSMTLVGVFYDEGTSGTTTLNRYGFNKMISLAVSGGIDIILTKEVSRFARNTVDTLNITRMLRAKGVGIIFINDNIDTRDSDGELRLSIMATIAQEESRKISERVKWGQQRKMEQGVVFGRSCLGYDVKDGKITINADSAEIVKRIFTEYTVLLKGAESIADGLNAEQIRTVNGGRWSGAFIRKVLRNVKYVGDLEQKKTCTPDFLTHKKRLNRSEHIYIRNHHEPIISRELWEQTQAEISRRKPTDTSRHSDRYVFSGKVYCGVCGSVMVSRVKTLKNGKIYHALRCSGRIGGKSCNNETLNVTALKACVKRIFTDMPIDKTAVINAVIKGLSRTDKPDIPALRRKIETLNAKKRRAVDLMLDGLITQQELIEQKSYYDSIIEKLSQEISSDRSVFETDKIRKNAERFLDFTSDPLWLLVIRADYIHGTLTVYLKGIENGFTTCFTATGRGDSYRVITGNTVRSQGIIPGTMQVQKNYPTSK

SEQ ID NO: 23707 - protein, 521 aa, synthetic construct
MKKVTKIEGVQNNSTQKKKLRVAAYCRVSTGSDAQLESLEAQKTHYERYINSREDWQFAGLYFDEGITGTKAEKRPELLRLISDCESKKIDFVITKSISRFSRNTTDCLALVRKLQSLDIPLFFEKENINTGSMESELFLAILSSMAEGESTSISENAKWSIKRRFQNGTFKLSYTPYGYDWNGENMVVNPAQAEIVKKIFADVLSGKGTQAIADELNADGIASKKNSKWTATTIRAILANEKYTGDVIFQKTYTDENFNRHINYGEVDQYMAPDHHEAIISHEDFDAANALVAQRASEKGIEKGNGKYQQRYAFSGKIICGECGDTFKRRIHTCTTYKYVAWACNTHLKDKATCGMKYARDDEIKAAFITMLNKLIYGHRLVLAPYLKALENSSGDEAVQRIQHLELLLAQNSEQRETLTKLMAQGYIDQILYNQETNALLLQAETYRSDIEAITICMTGDSVKVTETNLLLHFVSHTEMLTAYSEELFESYADHIEIIGRNEIKFVMKCGLTFTERIGD

SEQ ID NO: 23708 - protein, 522 aa, synthetic construct
MGNVMLIPARRQVGSNARKKEEEKPKLRVAAYCRVSTDSDEQATSYEAQVEHYTEYIQKNPDWEFTGIYADDGISGTNTKKREEFNRMIDDCKAGKIDMIITKSISRFARNTLDCLKYIRELKGMNIPVIFEKESINTMDAKGEILITIMASLAQQESQSLSQNVKMGIQFRYQQGKVQINHNRFLGYTKDAKGNLVIDPEQAEIVKRIYREYLEGLSMDKIAAGLERDGILTGAGKAKWHTSTINKILRNEKYIGDALLQKTYTTDFLNKTRVKNNGLMPQYYVEGNHEAIIPKEIYLQVQEELVRRRVVKTSANGKKRSYSCNHCFSQIVICGECGEMFRRLHWNNRGVKSIVWRCISRLESTGLECHARTINELFLQDAVVKAINQMLGDKSSYQAQLQLNIASVIRASQATSVENIDEKLMALQQELIQKAQSKEVYDEIADEIFRLRELRQQTTVDTAARDEQIKRINDLQDYISQQSTHLTEFDESLVRRWVKQITIWDDRITVELKSGVSIDVDA

SEQ ID NO: 23709 - protein, 514 aa, synthetic construct
MNTVIYARYSAGPRQTDQSIEGQLRVCTDFCKQRGLTVIDTYCDRHISGRTDERPEFQRLITDAKRKKFETVVVYKTDRFARNKYDSAVYKRELKRNGIQIFYAAEAIPDGPEGIILESLMEGLAEYYSAELAQKIKRGMHESALKCQSTGSGRPLGYRVDEQKHFQIDPESAQTVQTIFEQYIKGESNAAICELLNSRGLRTAQGKPFNKNSINRIIKNRKYIGEYRYHDIVVEGGMPAIISKDTFNLAQAEMERRRTRKAPKSPKAEYLLAGRLFCGHCKGPMQGVSGTGKSGNKWYYYYCGNTRGKNKTCDKKQVSRDRLERAVVDFTVRYILQEEVLEELARKVHAAQERQNDTASEIAFYEKKLADNKKSIANVLRAIESGAATQTLPARLQELENEQAVILGELSFLKGKHLAFTEDQILFALMKHLEPYPGESEQDYRRRIISDFVSEVYLYDDRLLIYFNISSEDGKLKSADLSNIEGGEFDEGLVSSTTSQKIRTLSSMVIRSDF

SEQ ID NO: 23710 - protein, 565 aa, synthetic construct
MAKKKKPAGGIAVIYARYSSHNQRDVSIEQQIEACRKHAAELGLTIIATYEDRAISGRTDNRPAFQRLMHDAEKGKFSYVLAWKSNRMGRNMMQAMVNESRLMDCGIKVYYAEEDFDDSAAGRFALRSMMNVNQFYSDNLAEDVRRGLMDNANKCMVNGRQPLGYKRGKDGKVVVDEPAAAIVREVYARVASGELFTDIARDLNRRGIKTADKGEWNKNSFHRLCSNEKYRGIYIYGDVRIEGGIPTIIDDTLWYKVQEALRVKKLKRNGRHRPGDEDYLLTGKLRCGKCGGYMIGMSGRSKTGDIHYYYACQNRRVGRTCDKKNIRRDVIEPAVAQAIKEYCLTDDAIEWIADKTVEYWEKADRNLQLDSIEGDLAAVQSSISNVMKAIEMGVVTETTRDRLIELEKQRTDLKSKLALAKEEVVHVDRKKLISSLLLFRNGDIHDRQYQEDLFKTFLISVYVYDDDDNGHLKIVFNAFGDNNTVDLPIDFGETDNQSAFSDGAEKFDYSLHRSTKKTSEYFGCLFLSYPGYGVHSALAHERSIGHGKHQEKLRFWLYAPALEGW

SEQ ID NO: 23711 - protein, 544 aa, synthetic construct
MRVSVNLNAQKPDTTTNAVIYARYSSHGQTEQSIEGQLAKGHEYAAAQGYTVVHEYIDRAMTGRNDNREAFQKMLSDTGKHQFQVVIVWKVDRFGRNREEIAFNKHTCKKNGVRVEYVAESLPNSPEAVILESVLEGMAEYYSIQLSQNIRRGQLESAKKCQCVGGSVPLGYTLDSDKHFVIDPQTAPVVKKIFDLYAKGATISEITGQLNEQGIRTARKQLFTKNSLTKLLKNEKYIGVYTYKDIVRVEGGVPAIVDESTFDRVQELLKINRRAPSHTWTKVEYLLTDKLFCGHCGSPMVGESGFSHTGAKYSYYGCIKRRREKACDKKPVRQDWIEALVLDETVKLLHDDELMEYIIDRTWEYYQVTDKVQEEKAVLEAQLAEVDKAINNLVRAIEAGIFNAATKSRMDELDAQKAALTASLADLELTSGIRITRDHIEYFLLRLRDLDVKDRECQKRLVQTFVNAVFIYDDGRVKITYNYSGQSSTITLNQIASAEKGKGFVCCLPCSTSSPRFPRGVAALFLFLGKNGCESTTNFSCIVQ

SEQ ID NO: 23712 - protein, 572 aa, synthetic construct
MASRIAEKLAAKKAAIYIRVSTHWQVDKDSLKVQRRELIAYVTLVLGITDYVVFEDPGYSAKNTDRPEYQAMMDRIRTGEFTHLVVWKIDRISRNLIDFAAMHDELQSLGVTFVSKNEQFDTSSAIGEAMMRIILIFAELERKTTAERVTAVMLSRASDGQWNGGRVPFGYSWSKEAKTFSIVPEEAKAIRRMAELYEQYQSLLYVAKYLNDAGIVTKTGGQWTPTTVRTILTNPWYIGQYVYNVHSDGKGIEKRDSDEWITVENHHEPILNEDVFCRMKFLLTRNKRGGVPSHKTYVRKNIHIFAGLLRCGQCGSNMTANLDRRRANGFRPSQYACGSRRRKGTSCTNKYISDTTLGPFVLNYVANIIRASKNSSEATTPEVLERKLLRGEAFEDVASVSTDALGQLLDAFRSAGDAVEYRPQIAFSGDDNSIREIDTLRARRRKLDNALARLNALYLYDDEAMPEKDFVMQRGQITKQLEEVNARIEELQNQESSEELGDGFIGKASYYIMANKLIEDRYIDYEKYIRAIDPSIPHSFLQQIIDHIVVNDGRVTSITFKNGATHTFTYKT

SEQ ID NO: 23713 - protein, 502 aa, synthetic construct
MEIQIREGSREQKRKLKVCAYCRVSTDADEQENSLENQVRHYETVIKANPNYEYAGVYSDFAISGFKEKRPGLQKMLADAEKAKIDLILTKSVSRFARNTSIVLEATRKLKELNVGVFFELQNINTLSGEGELMLTILAAFAQAESESGSAGAKMVYQRKYEAGIPVQYLERSFGYTKDERGVFVADEAEAVWVRKIYEMAADGYTPASIKRYLNENEVKTVGGVQWVDSTVFRLLENEIYKGDYIMHKHFVNEERKLVRNRGEVDAWYIEDDHEAIVSPELWQKAQDALAAKRDYLAEGSVIEEFTEENYPYMNKIYCAKCGYPLYKRIYSKGNRLNWGCSGTKRYGKTFCDGINIPDGVLRSAWHFKENTYIAEKASDKGVKEFTYLKEQSWKRRHKKKQPPAIPENTEAEYPYREKIFCALCGSRLVRYVNPQSHKVTWVCSRRKRKGKDACDGTRVPDTIIKGWGEIKKDIYIQRKDDKNGKKRYSYTSKKPEGADRA

SEQ ID NO: 23714 - protein, 537 aa, synthetic construct
MNVVLYMRYSSDRQTEQSIEGQKRVCMDFCERQGYNVVGEYIDRATSAYKETAKRTNFCRMIRDSSNGLWQGVVVYKLDRFARNRYDSATYKVRLKKNGVKVISATENISDSPEGVILESVLEGMAEFYSKELSQKVSRGLNESAHKCNSTGGAIPLGYKTVDKKLTVDEPSAQIVKEAFDLYAGGATISEICEKFNSQGYRTKKGTEFNKNSFKSMFRNEKYIGTYTYKDIRIEGGIPAIIDKETFETVQKRLSANAQAPARGKARVNYLLSQKLFCGHCGANMIGDSGRSKTGETYYYYSCSTRKRFHSCKKRTIRKDLIERIVAENAMRLITPEMINTIADMAIKCNREDIESDAIIPALTADLKEINTSIKNLLKMVERGVESETLDLRLKELEKRKKDTESRLDAAKSEYLTLDKTVIVGWLSQFLSGDIEDEDFRRHLVDTLINSVTVWDEPDGGYKITTVYNLKGNTQTYRVNADGSSDMKRNSPPKKRQFSCEDCRFFLFCMFIFSFFFFDLKDNGQEKNYAETGFCHR

SEQ ID NO: 23715 - protein, 503 aa, synthetic construct
MAKPEVSELAVVYARYSSHSQGEQSIEGQLSNARDYAAAHGYTIVHEYVDRAKSGRTDNRAEFQQMLKDTAKRQFSVIILWKVDRFGRNREEIAINKMKCRKNGVRVEYVAETIPDSPEGVILESVLEGFAEYYSLQLSQNIRRGRAESAEKCQSLGGNRPLGYKTGPDKKFVIDENTAPTVKMIFTMYADGKTVTEIVDKLNEMGLRTLRGGPFTKNSLHSILKNKKYIGVYEYQGREIKDGVPRIIEDDVFNKVQEMLKINKRAPAKTWSRADYILTDKLFCGKCGALMFGESGTSKTGVKHNYYICSNKKRFRSCDKKAVRQADIEDTVLNATHELLQDDELLDYIVDRTWEYYLAQDNSQEELRNLQRQLAQTDTAISNLIRAIEAGILTEETKKRMDELTQQKADLKASIADREIARGFHLQKSHIAFYLRSLRDADWSDKEAQKRLIQTFVNAVFVYDDHITLTYNFSGDKSTITLRDMQRFEDGEEFGCRASRSTR

SEQ ID NO: 23716 - protein, 524 aa, synthetic construct
MPEALNAVIYARYSSDRQTEQSIEGQLRECYAFAKANDIAVIDTYIDRAISGKTDNRPAFQKMIEDSAKRQFQAVIVYRLDRFTRNRYDSAIYKARLKKNGVKVLSAMENLNGSPESIIMESLLEGMAEYYSVELSQKITRGMRENALKGKALGGQRVLGYKVNSDCYFEIDETTAPVVVDIFKLYSSGKTVKEICDILNARGVKTARGGAFNKNSLHTILTNKKYIGIYKTKYGEIVGGIPAIIDKELFEMVALRMEQNKKAPARAKAEINYLLSTKLFCGKCRSAMVGESGTSKTGKKYYYYACVKKKREKACDKSNVKKDWIEDLVIQRTVTDILKDDVIEKIADRLVELQKAEAAESGTMLYLQNSLAEIQVSIKNIMTAIEKGIITESMKTRLTELEDEKRNVEIEIAKESIARRIISREQIIYWISSFKDGDITSEKYRQQLIDTFVHAVFVYDDKIVITYNYSGENNTATISDLDLSSPPKEKRTATAVRFSFYRFHLRYVNELNTVPQSHKTQIFH

SEQ ID NO: 23717 - protein, 581 aa, synthetic construct
MSRTTNKRPGKAKSGLSRKQKVAIYIRVSTLYQVDRDSLPMQRKDLIAYASLILGIEEYEIFEDAGYSGKNTDRPAFQEMMQRIRKGEFTHVLVWKIDRISRNLLDFAEMYEELQELRVTFVSKNEQFDTSTAIGEAMLKIILVFAELERNMTSERVTATMISRANSGLWNGGRIPFGYDYDPDKTAFSIREDEEKVCQMIKNDYMEHKSLVHTSRMLNASGYKTRAGAEWSPTAVWIIISSPFYAGIYRYNRYKGTERRVENPEDEWIMIQNHHPAIFSLEEHEKMLAILDENSRNHRSVGQKHQTERVHIFGGIAYCGKCGSKMVSTPGRLHANGYRPTNYSCPKHRKTKECDNPTVSDTQVGEFVINYILNMLRAKKRFSTIENPEDLERCLLYGNTFSEVEHIDGNGLNEYFNLLSRYGSDDSYTFSIKKSRKKKAEVDPEVEALRKEKEKQERAMKRLQDLYLYSDTSMSEKDFIIRKTEISKRLEEINAMLGMVAKNSEPSLSDEEFVRQASHLLISRELQNRQYIYFKNLAQSVSPEILKAYMETVLDSVLLVDGRVSSIVFRNGLTHKFKYKS

SEQ ID NO: 23718 - protein, 581 aa, synthetic construct
MAYAMKVPAASADDRIVAIYVRVSTGYQVDKDSLPFQKKELKAYCKHILHVDMSRVEIFEDAGRSGKNTKRPAYERMMQKVRAGLVSHVLVYKIDRISRNLVDFSLMYDDFKYNRVTFVSLNEQFDTASAIGEAVLKIILVFAELERKLTSERVKDIMIGRANEGKWNGARVPYGWDWDSSAGWPVHSEKEAPFGRAMYEMYLEVKSTGKIRDYNNAHNIPTKRGGEWTSKTVGDFLRNPMNKGDYRYNYRESARGRKKPVDEVVYLEGVFDPLIDPEIWEKVNKIMDINRDKRNMGGSHPVEKNCNVFAGLIQCGSCSSGYLVGKKDKRRKNGFTPSMYYCSAKTRAIHCQNLNVSDVKIGPFVINYISAMVRVSNERRKVKTPEDLEEMLLSDKTIFADIMGLSSDSLNNTFELLTGKSATGGALWRADLVDQEGAVADPAEIESLKDQMRKYERAKERLEDAYYFSDDGMSEKEYLEKKNRFDSGRVAAENKLKELTETHIASGVDESAFMKSASAFLLTHKIRAGSHIVYSDLAGMVEEESIKEFFNLVLDHITVKDRRVTEIVFANGLSHKFIYRD

SEQ ID NO: 23719 - protein, 499 aa, synthetic construct
MSKAVIYARYSSTNQREESIEGQIRECTNFAKHQDITIVGSYIDRALTGKTDARPQFQKMIADSSKQLFDIVIVYTLDRFARNRYDSATYKAKLKKNGVKVISAKENITDDPSGIILESVLEGMAEYYSVELAQKVLRGMTENALECKWLSGIIPLGYKLDDDKHLIIDDTAAPIVRRIFEMYAAGERIVDISKYANSTHLKTAKGNEFSRCSFTHMLKNETYIGTYKWRDIVKTKVIPRFIPDDLFYAVQKRIKSRKETNIRGKSENFLLSSKLKCGKCGQFMTGVSGTSKQKRRYYYYQCYASKSKKCDMPLFPREKLEDIILTETIRLLSEPQTIDFIANTVANLPIDGNTQIIILETEITEIKNKLKNCVKAVESGLISDTISKNISEYEKKLSVLEKDLSIEKVLNEPFKITPDHIKFFLCNILQIKNTDERRDMIISTFVRDIVLTKDDIGYTVKITYNYNENPSNSLDNSVQKGSQKSSLVAPTRIELVISP

SEQ ID NO: 23720 - protein, 501 aa, synthetic construct
MPRIRQITPSVTQLKRKKRVAAYARVSEECEVLLHSLSAQVSYYSTLIQKNPEWEYAGVYVDQGITGTSTAHRDGFNRLVADCDAGKIDMVLVKSISRFARDTVDCLNTTRHLKDLGIAVYFEREKINSLSEDGELMLTLLASFAQEESRSISENIKWATRKRFEQGIPNGHKAPYGYEWDGEMFRIIPEQGEVVKEIYRRYLAGESAYGIAKTLAERGVTGQMGMPIEQTTIKEILSSQSYTGTMVLQKNFFTEGHIRRRNKGELPMYLVDEMFEPLVSEEDYQKALEIRQQRAEQFPNNQDNLTAFSGKVKCGYCGCGVSRRTSGGRKRWVCNTRERKGMKQCECRPIWETELTEAAKTVLGGSFDESAFSKEIKQVTLYSDRIEFSLLNGNRKSIIRQFSGRRGQNAFTNKVWCGSCGCKCERDNYGKKKIKIWCCSKPRTQCQMKRLSESELLEAAENLLGENFQARVSADIDRVIISDTQVDFEYKDGTVKTWQRK

SEQ ID NO: 23721 - protein, 520 aa, synthetic construct
MAKKVRKIPATLNQFTSEPVAVRRKKKVAGYARVSTDREEQATSYEAQMTYYKTYIEGHEDWEFVGMYSDEGITATNTKKRDGFNQMVEDALDGKIDLIITKSVSRFARNTVDSLTTIRKLKEKGIEVYFEKENIWTLDAKGELMITIMSSLAQEESRSISENTTWGKRKQFADGKGSVAYSWFLGYDKDFKINEEQAATVRLIYRLFISGLSLYAITKELESRGIKSPSGKDRWHISTVKSILTNEKYRGDALLQKQYTTDFLQKKRKTNNGEIPQYYVEEHHEAIIPPAQFDFVQAELARREQNGRYSGVSIFSNKIKCGCCGGWYGSKVWHSTDKYRKVIYRCNRKYGKDTPPCNTPHLTEEEIKQLFLKALNALVDAKEETIENLQGLIETVCQTESLDAEQERLEQELRIIAENLANLIQKNASVALNQTEQAEQEEKLRNLYGEKHSRFQELEALIQEKNDTKEILTNFITKLEDLTGEQTEFREELWGGLVDHIRIDEKSSTVVFRGGIEIII

SEQ ID NO: 23722 - protein, 490 aa, synthetic construct
MTDKNLLVITPHRKEPGKQRIAAYCRVSSRSDEQLNSLTNQINFYRSLFENDDTVVFVGIYAEEGLSGTQAESRPQFMKMIEDCRSGLIDCIRTKSVSRFGRNTVDTLIYTRELRSLGIDVFFEKENIHSTESSGELMLTLMAAFAESESETMSENIKWGKRRRYEQGITGSITLTGMYGFRQNKGIVTIVENEAELVRRIYKDFIDGYSYGEIADRLIAEGVPTRMPGASWAKTTVQHIIRNEKYCGDCLFQKAFIANPITHQQVRNNGELPKYLVEDCLPAIVDKETWKLAQAVAARHTPHKQASNERYPFTGKLFCGVCGKPYCYYHYTTTNKQPLAAYRCMSRKTQSAVEVPGQTYTPPHKATFKLNASPELIAYRERYCKPPKERPMLCTDVRISIDLPQKAFCRAWNLIVAKKLRYQATLRSTVDNAEDILVQYRAEEMCLLIDEIGKINEFSYPLMLKTLDRVVVNANGKLTFIFQSGIKITV

SEQ ID NO: 23723 - protein, 548 aa, synthetic construct
MANKTVKKIEATKPTLSAQYSTFTRKRKVAAYARVSTAKEEQENSFDAQVSYYTQKIQANPEWVFVEVYSDEGITGTNTKKRDGFNRMIEDALAGKIDLILTKSVSRFARNTVDSLVTIRQLKEKGVEVFFEKENIYTLDAKGELLLTIMSSLAQEEARSISENTSWGRRKSFADGKVSLGYSNFLGYDKGPDGELVINEEQAKIVRRIYAEFLAGKTPGGIAKGLTADSIETPGHKKVWQASTVLNILKNEKYYGAAILQKQITVSYLTKEKRPNTGELPMYYIEKDHEPIVSPETFQMVQEEMRRRREAGSNMQCVSIFSSRIICGDCGGYYGRKIWHSSTKYTAWHWHCNAKFQKRKYCETPTLKEESLEETFVEVFNSLIADKDEIVENYRLCIDAVTDDSEYRRQLEDLNNGCGEVQTLIRSLLMTYSRQDTADDIHEKLQEYEDRLDTMARLKQELDLKIAACAAKRVQITGFLNELMKHDAPLAKFDPLVWQAVINYATVNRDCTITFTFRDGTEKTVPIKNGVRPYTKRNKPQEVDGNDG

SEQ ID NO: 23724 - protein, 434 aa, synthetic construct
MKKTIVNIAPAVAETPRAKRVAAYARVSCGKDTMLHSLAAQIDYYRDYIMMNPEWRFAGVYADESKTGTKDNREQFQLLLTECRSGNIDMVITKSISRFARNTVTLLETVRELKNLGIDVFFEEQNIYTMSAEGEVMLTLLASFAQAESLSCSDNCKWRIRKGFEEGRASTCTMLGYRLVNGEITLIEEEAETAKRIFDLYLAGYGLQKIANTLNEEGLFSIFGNEWHPTTVRKVLTNEKYCGDLLLQKVYRENHLTKRKCYNTGELPQYFVEDDHPAVVTRQIFMAVQDELKRRAKEKTQPVGSKSSFTGKIRCSCCGKNYRRKTTPYNIVWCCSTYNSKGKKYCPDSKVIPEETLKRAAAEILKTDGFSDGAFETQICTIEAHPGNLLRFIFTDDSTTDYVWKDRSRSESWTDEMKAAAGRKTKERDANHGK

SEQ ID NO: 23725 - protein, 560 aa, synthetic construct
MKKEKTKVYIYTRVSTAMQIDGYSLDAQKSRMKAFAEYNDYEIVGEYEDAGKSGKSIEGRIEFNRMMEDIKAGKDGVSYVLVFKLSRFGRNAADVLSTLQVMQDFGVNLICVEDGINSSKDAGKLMISVLSAVAEIERENIRVQTMEGRIQKAREGKWNGGFAPYGYMLEKGKLIINEEEAEAIRIIFDQYVHTDMGANGLAKYLANHGIGKIQRQNGKNPLFDAALIRRILKNPVYCGKIAYGRRRTEKVHGTRNDYRLVEQEDYLLADGLHEGIVSEELWYEAQVKLLAQAEKYEHVNRGKDTKVHLLSGIVKCPICGAGMYGNKSIKHKPDGTKYKDFFYYGCKHRTMTRGHKCDYKKQINEELLDDAVAEVIVKLVSNPKFAALMQQKISMKVDTTAIEQEIAVYEKQLRQSYSTKARLIEEIDSLDPDDKHYIKRKSDLDERLYKMYDKIENTENLLIAARAKKMAIEAEKLTGDNIYKVLIYFDKLYDAMNEQEKRQIMEALISEIQIYEERQPNGQWLKSIKFRLPIIEEDMNLSLDNNEHVETVVLMSRVEK

SEQ ID NO: 23726 - protein, 524 aa, synthetic construct
MPKYNPEELLPAVAYYRYSPGGGQTEQSIEGQRRDCMAYAKSHGYVIVKEYIDRHLTGRNDKRPAFQLMMKDAELHRFDTLIAWKNDRISRNRRDALNYKDQLRKCGVQICYAEMDIPHGPEGILMESLMDGLAEYYSAELAQKIRRGMTESAHKCRALGSIPPFGLRVNKEHRYEPDPTTAPYVRWIFQQYAQGVQITEICNALNEKGLRTSRGNEFNKNSLRTMLSNEKYVGVYEAKGIRTENAIPPILTQELFDAVQQRIPKNAHHGRKLAGVRQFPLSGIAYCAICGAPLIGDAGTGKSGRVHTYYACTAHKHRRNCTKKNIRQAKLEEMVYDATANMVLCPSITRAIAKQVEASAAADTSYAEEMQAVQARLKDIEKRINNILAAMEEGSFSKAVSSRLTTLETEQSRLEKQLKTLRRVKPNITASRVEYMLSTMCRNPAEQQLDHLKRLLQVFVERIDLSDETMSITYTLTKKSAVPSSTADSTTAKTLRYSDLKQCSTVARYGGADGSRTRVRKEIG

SEQ ID NO: 23727 - protein, 461 aa, synthetic construct
MKLERCAIYIRVSTAEQMMHGKSLEAQREYLETYAREHNMVVAGVYADEGKTARKELKKRKAIHALLEDVKAGKIDVIIFWRLDRWFRNLSDFYKVQDVLDSHNVRWISTSEPGINMETRDGRLQLNVVLSIGQNEVDTTSERIKFVNESSIRSGKLIFGDANMGYGYKSGIVDGQKRMIKDPDREHVVDAFYKYFFKHQNKCATLRYIQETYDPDFSFGIMRTLLSSEFYKGTYRGFPYCPAYLTEDEWNKLQKIQKRNVKATPSGRIYLFAGMIRCPVCGQLLCGTGCSSIINRKTGAKRTYCYYRCNRAMIDHICSYRHRLSQNLVENYLLDNLENEYKNYKVKCKKIEKEKEKQKKKQSPEKLRKELDRLNFLFQKGRIDWDYYNEEYGRVESELNDLQSAPLEPVANYGYLEELLDTDFRTMYDQLSQENRRAFWRSIIQEIHINEDSTITSVDFL

SEQ ID NO: 23728 - protein, 511 aa, synthetic construct
MKRITKIDAAAKETKKLRVAAYARVSTDSADQLVSLEAQKEHYEQVIKNCPNWEFAGLYYDEGVSGTKMAKRDGLLRMLADCERGLINYILVKSISRFSRNTVESVETVRRLSAMGIYIFFEKENIDTGKMEGELMLSIMSSLAEDESRSLSENNKWSIQKRFQNGTYVIGTPAYGYKNVDGKMVIDEEKAAIVRRMFASVMEGKSGAKIASELQAEGIPTARGGKWQSSVIIGMIRNETYIGVAVFQKTYKDDQFNSRVNYGEKGMYRIEGHHEPIVSEEVFRAANSAVDNNAREKGITKSRKYTKRYALSGKVFCGECGGKCKRKKIYGEVWYGCDTHVKDKKKCRQLPVRADMVEAAFVNMMNKLIYGRDAVLLPMSGRLLGGGDKEVLGRLESLNTELAMVAERRQAADKFFAKGLLDAAVYREELDALAQKEKEINAARAGIEGDPDLDFDRQLALNDLLKYTAKADQLTAFSDEVFTKHVDRVIIFSRKEVGFVMKCGPVFRERI

SEQ ID NO: 23729 - protein, 519 aa, synthetic construct
MAMAQNITFIPAVKTVGTQKPAEKKQKVRVAAYCRVSTEFEEQESSYETQVAHYTSYINGNPEWEMVEVYADNGISGTRTAKREAFNRMIKDCEAGRIDMIITKSISRFSRNTVDCLKYTRKLKEMNIAVFFEKENINTLDAKGEVLMTIMAALAQQESESLSANVRLGIQFRNQQGKVQVNHNWFLGYTKDESGKLVIVPEEAEVVRRIYREYMEGASFVKIRRGLEADGILNGAKHARWHETNIKQILTNEKYIGDALLQKTYTVSVLDKKRSRNDGVMPKYYVEGCHEPIIDRETFLLVQEEIARRSSLYKGGKKRVYSSKYALSGNVVCCHCGNIYRRVVWYTGGEKPVVWRCVSRLTPGQECPARTVSEEDLHSAIASAVNMAYANRNEIIPVLKENIESVVGCNIDEEIEVIDNMIRKSQMDLLDAGKDEERIQEIGERIVSLRERRQNVLTQAALRKDEIDRIKAMINFIAEQTGEAEYSEALVRSMVEKVAIHDDKITVEFKSGLAIDVEA

SEQ ID NO: 23730 - protein, 523 aa, synthetic construct
MESVKNITVIPARRRVGNTAKESEIPKLRVAAYCRVSTDSDEQATSYEAQVEHYTDYIRKNPEWEFAGIFADDGISGTNTKKREEFNRMIDEAMAGKIDMIVTKSISRFARNTLDCLKYIRQLKEKNIPVYFEKENINTMDAKGEVLLTIMASLAQQESQSLSQNVKLGFQYRYQQGQITVNHNRFLGYTKDEKGQLIIEPDEAEVVKRIYREYLEGASLQQIGRGLEADGILTGAGKKKWRPETLQKILKNEKYIGDALLQKTYTVDFLEKKRVPNNGLVPQYYVENSHEAIIPRDLYMQVQEEMVRRANLHSGQNRKKRVYSSKYALSSIVYCSKCGDIYRRVVWNNHGKQSVVWRCCTRVEHGPGACDADAIHESELQNLVIRAINMALGKKDTMNETLQRNVEAVLTGTDGVPLAEIDVRLEELQKELLKVANAKGNYDSLVDEIYSLREAKQNAQVEGAEREGMKQRISEMQQFLAEQTQDVTEYDEQLVRRLIEKITIYDEKVIVEFKSGTSVDIHR

SEQ ID NO: 23731 - protein, 520 aa, synthetic construct
MKKITKIGTNEPLAEKKKLKVAAYCRVSTASDEQLISLEAQKAHYESHIRANDEWEYVGLYYDEGITGTKKDVRAGLLSMIADCEVGKIEFIITKSISRFARNTTDCLEMVRKLTDLGISIFFEKENINTGSMESELMLSILSSLAESESVSISENSKWSVQKRFQNGTFIISYPPYGYENDNGTMVIVPEQAEIVKEIFAACLAGKGTHAIARELNARGIKTKKNGKWSAGTVNAILNNEKYTGDVIFQKTYSDSSFNRHINYGERDRFLCENHHEPIISHEDFEKVRAVLDQRAMEKGNGTDTFRYQNRYCFSGKIKCGECGTTFKRRQHYKPSGNYVAWTCGKHLENKKECSMLYISDESIKLAFLTMMNKLTYGHQVILKPLLRTLRGMDDKDRLLRIQELDICIEGNTDRKQILTSLMATGVLEPTVFNKENAALVMEEQKLRAEKEKLVNFVGCDKTRIKELQKLMAFTSKGMMLTAFEDETFLAFVESITVESRTKIVFHLKCGLNLTERLVN

SEQ ID NO: 23732 - protein, 490 aa, synthetic construct
MLSKNACAYIRVSTDKQEELSPDAQKRLILEYCKKNNLTIMSEHIFVENGISGKKADKRPQFQRMIALAKQKEHPFDVILVWKFSRFARNQEESIVYKAMLQRAGVEVVSISEPIIDGPFGSLIERIIEWMDEYYSIRLSGEVMRGMTEKAMRGGYQSTLPLGYHMNPDTGVPEIYEPEAAIYRIILDRYLNAGMSPLAIARELNAAGYRTRRGAPFERRTIIYILENPFYTGMIRWNRQNHSDHTIKDRSEWIFAKGAHAPLIDKDTYDHIQAVTALRTRPYKARGTSSIKHWLSGIVKCSDCGKSLVGNALYNGVPSSWQCSDYNKGRCCHSHFIKNTALEQAVFNALEHAITSGDISYTLKSTDSSSDLASDLDRMLSKIDDKERRIKQAYRDGIDSIEEYRENKEILTKERQDILSRLAALSERSSEDDKKKLLAEVQSVYDIVTGNADKLTKANAIRSIVDHCVYDKANDSFDIFFFFSKGSEPL

SEQ ID NO: 23733 - protein, 502 aa, synthetic construct
MEIQIREGNSRQKRKLKVCAYCRVSTDADEQENSLENQIRHYEEAITSNPDYEYAGVYSDFAISGFKEKRPGLQKMLADARKGKIDLILTKSVSRFARNTSIVLEATRKLKELNVGVFFELQNINTLSGEGELMLTILAAFAQAESESGSVGAKMVYQRKYEAGIPVQYLERSFGFKKDERGVYIADEEEAVWVRKIYEMAADGYTPASIKRHLNENGVKTAGGAEWIDSTVFRLIENEIYKGDYIMHKHFVNEERKLVRNRGEVDAWYIEDDHEAIVSPELWQKAQDALEAKRDYLAESSVIEEFTEENYPYMNKIFCARCGHPLYKRIYSNGNRLNWGCSGTKRYGKSFCEGINIPDGVLRGAWNFDENMYIGEKPTDKGKKEFTYLKEASWKRRHKKKEPEPIPENTETEYPYREKIFCGLCGSRLVRHVNTKSHKVIWVCNGRKRKGKDFCDGTRVPDTIIKGWGEIKKDIYIQRKDDKNGKKRYSYTSKKPKGADRA

SEQ ID NO: 23734 - protein, 464 aa, synthetic construct
MARSVTVIPARSQKVQTGHKAVQEKKIRVAAYCRVSTDQEDQLHSFEAQVEYYTKYINEHENYEMAGIYADEGISGTNTKKREQFKKMIADCEGGKIDLVITKSISRFARNTQDCLAYSRKLKNLGIGIIFEKENINTLDSTGELLFTILSSLAQDESRNISENCKWGIRTKFKNGEMHLNTFKFLGYDKDENGKLVINKEQAKTVRRIYRDFLIGINPAQIAKELTEEKVPGCLGQTKWYPSTVTGILKQEKHMGDALLQKTYTADFLTKRQVRNNGEIAQVYVKDSHKGIIDKQTWNAVQEEFDRRERFMESHGTDRYSYGADCMPFCEKVFCGECKSLFTRHSWRSRGIVQWQCKNHRKDGKVACTNAYVDNADLEKGFVKAFNRLVTDRDKHMERWQQMKSDGTPLEKIRAGQMMEAVENEPLTRFVPEIAQLVLCEVTALGAKKYEFFFLEGSRVKVSV

SEQ ID NO: 23735 - protein, 513 aa, synthetic construct
MPEVRLITPITRQSTKKMQVAAYCRVSSNSADQLNSYAAQIRAYKKCIGARDDWELVDIFADEGLTGMKSETRDEFQRMIRMCELKQIDLIITKSISRFARNTKDALAYVRKLKLLGVGVQFEKEGISTLSMGDEMLLNTFSALAQEESQSISMNQRLSIVKRMELGEYVDSNAPYGYRLVDKALAVYEPEAAVVRDIFDLYLRGFSISEIGRELKSRNIPTKAGKESWHPYRIAYMLKNERYIGDSFYQKTYRETTVPFNQHINRGQEDRFYAKETHPGIIDKDVFNAVQQLIQKRKETFSRTTTQNIYPLTSRIQCSECGSFYRRRSVSGTVKWVCALHKDDSTACDSHYYSEERIYDGFITMVNKLRFSEDNILGQVISRLEMTLAAMKRNNLVARDLSNSIAELNAKLLMLEQLRSKGYLAPEVYQAQANEIGAELARLKDVRQEKFNSKAASMLEEVKKLKMLIFELEEPLEAFDEKLFLEIVKSIQINKEDEMSVEFLGGLRFRERI

SEQ ID NO: 23736 - protein, 543 aa, synthetic construct
MEVTKVPKKIVTVIEPKRSMTVDKEKYRQKKVAAYCRVSTDSEEQLVSYANQKKVYTEMIASRKDWCFAGLFADEGKSGTRADKRPEFNKMINDCLAGKIDYIITKSVSRFARNTVDCLDYVRMLKSKGIGVYFEEQQIDTLKTDSELYLVIYAGFAQSESESISKNITWSVRKKFEEGTPVFIYKRFLGYKKGADGEPEIVPSEAAIVERIFNLYLAGETVDNISKMMQAENYDIPGKTISFSKGMIMNMLSNERYCGDAILQKSVTVDCIEKKRKKNTGEAPMYYVQNNHPAIIDRVTFNKVQEELARRKTKTPGSAKSSITSTGKYSRYALTDVLICGNCGTRYRRVTWSRNGTKRIVWRCISRLDYGKKYCSDSPTIMEDKLQEAIVRAVNKFNKQDNATYKALMRATISEALGLNGDPEEVDMLERKVEALNNKMLALVNESVSSGDGIEAHESEFMTLSQETELLKQRIAAIQESTAKDNGEQSRLEQIQAIISERESKCMEYDDSIVRQMVECIKVYPGGKLEIIFGGGYLVEESV

SEQ ID NO: 23737 - protein, 559 aa, synthetic construct
MSKTVAIYVRVSTGKQADRDSIPFQIQECSNYVKHFLKTENFEVFKDAGRSGKNTHRPEYQRMIEKVKAGMISHVVVYKIDRISRNLVDFSIMYNDFKEHKVAFISLNEQFDTSSAIGEAVLKIILVFAELERKLTGERVRDIMMNRALEGKWNGARVPYGWDWDAKKQCPVHSDTEAEYARMMYRLYDESHSTCVVRDYCNAHDIPTKRGGEWTSKTVADFLRNPMNVGDYRYNYRKSARGKRNDPSEVIYVKDVFPPLIDRELYERVTHQMDLNTFGLGKDGRKVVSKKTHVFGGLIVCGLCGAFYHSGSDTPRADGFLPSQYRCGAHNRKIHCKAKGTSDVKLGPFIFNYISNLVKASKSKKLLHSVSDLEQILLTGPEFEQVAGIADAGLDVTFDTIMHGFKPKRYTAAPYTVIRSGDSDALTAKRDKTIRALERLKKLFLFEDDAMSEKEYLMSKRELEGTLSDIENELSALEADTADTKYDDMSFISTASGFLIAHQIASGEHINYRELACAVDAKVLKDFANSVIERIVLLDGRVASIEFKNGLVHEFLYRE

SEQ ID NO: 23738 - protein, 424 aa, synthetic construct
MVLTKSISRFARNTLDCLKYIRMLKEKGIAVYFQKENINTLDAKGEVMITIMASLAQQESESISKNVKLGIDFRNKQGKVQVNHNRFLGYTKDAEGHLIIDPEQAEVVKRIYRKYLEGASMDMICHGLEADGILTGAGNKKWYTSTVKKILTNEKYIGDALLQKTCTIDILNKIRVANNGIAPQYYVEDDHEAIIPKEIYMKVQEELVRRRNVQASPSGKKRMYSCTHCFSQMVVCGSCGEVFRRIHWNNHGCRSIVWRCASRLEQNGTVCNARTVNEKELEQVVLKALNEMLGSKSTYKEQLQKNLMQVLRNDTSAQKDRIAERLLVLQQELLNRANNREAYDDVAEEIFHLRELQQQTDSDETTKAIQMERIKELQDFIGQQSNELTEFDEKLVKRWLRQITIWDDYYIVELKLGLSIDVPA

SEQ ID NO: 23739 - protein, 540 aa, synthetic construct
MATATRRVVRTMPQMFIDVADNQSERLQVAAYARVSTEKEEQEDSFERQVEHYKQLIYSKPDWQFVDVYADPGISGTQAEKRPDFLRMIEDCRAGKIKKVLVKSISRFARNTVDALQYIRELKDLGISVYFESENIDTLTPGGEVLLTILAAMAEQESRTISSNIKWAWQRKFQKGDIILNTGLMLGYRKIGKDDEGHDVYEINEEEAEIVRRIYREFIAGYSITQIAKRLQADGVKTKLGRESWRHNVIESILTNEKYTGNALLGKTFKPDVLTKYRQKNDGKKAPIYYVEGSHPAIIEKGLFDLAQQEMQRRRDANDNKVGGGRYSSRYPFSGMLVCGICGSKLRRQVRTMGSGKRTASWGCCNRISNGRAVCDSHHVNEDVLEATYLTAMRRLVDSAEEVVEAVRDGAELALEPENKAAMDRIDEETIQLQEAALALHKAKQRMEIGSVEYASRVKEYSERMKELEAERNELQGTAAKYAEVRLWLDTFIEQTMQSDTLTTVDGTTMKMLVDRIHVRNDGIVVEFKCGVAIEQEYVK

SEQ ID NO: 23740 - protein, 536 aa, synthetic construct
MAQAARRVVRAMPQIAVVRLDDTPQQKKKKVAAYARVSTDKEEQEDSFERQVEHYTHLIESNPEWTMVEVYKDPGITGTKAEKRPDFLRMIDDCRAGKINKILVKSVSRFARNTVDALNYIRELRDMNISVQFESENIDTLTPGGEILLTILAAMAEQESRTMSNNIKWAYQKKFEKGEVTINTGTVLGYRKAVSGGYEIVEEEAEIVRRIFREYVSGMSVPQIARRLEADGFKTKRGSEAWRPNAVLGILKNEKYSGNAILGKTYKPDVLSKRRIRNDGTIAPMYYAENTHPAIISKKLYDLAQDEIQRRKDEKDIAVGGSRYTSKYPFSGLLVCGCCGHKLRRHVRTMGSGKKVAAWCCANRITNGREVCDSRHVSEDVLKETYCAAINDAVGNMDAIIETVKDSCQMVLVSDNHEALAEVERQIIKLQEEVLDFHRARQGYAVTEAEYNAQIEAYTNQMQQLESRRSELQSTSNKYSAFQNWMDTFKETAATGDIYDPDNAAVMKSMVEYIVVHRDRMEIHLKCGVTIDKEYV

SEQ ID NO: 23741 - protein, 519 aa, synthetic construct
MKKVTKIAETANSKVKLKKIRVAAYCRVSTDSDAQLESLEAQKTHYENYITSRDDWEFAGLYFDEGITGTKKDKRPELLRLIDDCKAGKVDFVITKSISRFSRNTTDCLELVRKLLALHIPIYFEKENINTGSMESELFLAILSSMAEGESVSISENSKWSIQKRFESGTYKVSYPPYGYDWDGEQMVINPEQAAVVKEIFAALLSGKGTHAIADDLNRRGIPTKRNGRWTATTIRGMLSNEKYVGDCLFQKTYSDSRFVRHNNHGEQTQYMVKDHHEAIISREDFEAAHAFIHQRATEKGVVKGSDKYQNRYTFSGKIICGECGDTFKRRIHSCTGYKYTAWCCSTHIKDKDKCHMLFVKDDDLKQAFVTMMNKLVYAHRIILKPYVDALKNTSSDDSLRRIQEIQTLLAQNTEKRETLTKLMTQGIIDPILFNKETNELLSQADSFRDEINALKNAVSGDVTKVTAATALLHFTEKGGILHEFDDDLFNEYVNCIIVRSRNEVRFELKCGLTLRERM

SEQ ID NO: 23742 - protein, 504 aa, synthetic construct
MEDFIYARQSVDKEDSISIESQIELCLREVGNNPHRVFRDKGYSGKNTERPDFQDMMAAVRAGGARRIIVYRLDRISRSVLDFANVISELQKYGVEFVSITERFDTSTPIGKAMLMIVMVFAQLERETIQQRVMDAYRSRSRKGFYMGGRVPYGFELENTVMEGIKTCMYKPIPEQIQVVQLIFSLYAMPQVSFADVVRYLSQNGIKNPNGKNFSRMRIRDIIINPVYAKADASIFEFFHGQGTEIINDISQFIGTNGAYLYTGNKAAKRKSISLDGHVLVLAPHAGCIDADTWIRCRRKCLNVRQIAKPVKAKNTWLAGKIKCIDCGHALSLKSYPRKRSADARYYICNSKYISASCDGVGAIQAAGIEDIVFDEMSRKLKEFNKLSYKEKHGDPIELTKLKIRAEEIEKEIATLIDKIVSASTATMEYINERIDALDEEKKTVKEKIAQMSAEMYDRQNIGVISDYMSKWNDISIDDKLTVVDTLIESIHVGHGKVKIAWKI

SEQ ID NO: 23743 - protein, 433 aa, synthetic construct
MPRAITIVPKPPKLEQKKRVAAYARVSSGKDAMLHSLSAQVSYYSDLIQNHDDWLYVGVYADEAKTGTKESRADFQRLIADCRAGKIDMVITKSISRFARNTVTLLQTVRDFKAWGVDIFFEEQNIYTMSGDGELMMTILASYAQEESRSASENQKWRIKRNFEEGMPWNGAMLGYRLKSGRYETIPEEADIVHRIYDEYLSGDGYLTIAKRLNEDGIPSRFGKQWGQSVISKILSNYTYTGNLILQKTFRENHITKKTIINNGELPKYHAENAHDAIIDMETFQAVQAEKTRRAARFLKKPASKKAYPFTSLLVCDGCGKNYRRKVTKTGSVWVCGTFNSIGKAACASKQIPEETLQAVTAEVLGQVDFSEELLRRLIKSILVCNGNVLIFHFFDGSEVTRKWKDRSRSQSWTVEMKAVARQKALERRNQNA

SEQ ID NO: 23744 - protein, 526 aa, synthetic construct
MPKVTMIPATINPLTHLPSVAARKRRVAGYARVSTDSDEQFTSYEAQVDYYTKFIQSKPEWEFVKVYTDEGISGTNTKRREGFKEMITDALDGKIDLIVTKSVSRFARNTVDSLVTIRKLKENGVECYFEKEGIYTFDGKGELLITIMSSLAQEESRSISENITWGQRKSFSDGKVHLPYKRFLGYEKGEDGRPAVVESEARVVKLIYGLFLEGKTQAGICKYMEELGIPSPGGKAKWSKTTVTSILQNEKYKGDALLQKKFTVDFLEKKMKPNEGEVPQYYVTGSHPAIIESDEWEQVQAEFARRKTLGKAYSGKSVLSAKLVCEDCGAFFGPKVWHSTDQYRRIIWQCNGKFASEEHCHTPALDTETIQRLFIKAYNLMMQDRVQIIKEIEAWRQKLMDFGALDADIERQFEETQVVAELVRTAVKENASTAQSQEAYRKKYEALTERYEKAAAELERLQSLRTARSQQDKKMALYIRTLKKQPEVMDDWNDTIWTVMIEKAIVHRNGEITFVFENGTEIRVGE

SEQ ID NO: 23745 - protein, 441 aa, synthetic construct
MYYQPKINFSPNEVIAYLRKSRSDDPLLTVEEVLSKHETMLDEWAEKNLGAAVPEENKFREVVSGETIAERPEINRVLRLIESPKYKAVAVVEPQRLTRGDLEDIGRIMKLLKHTSTLVITPQRIYDLRDEYDWDTFERELKRGNDYLEYTKKILNRGRLLSVSQGNYIGNVPPYGYSKTFVTEGKRRYPILVPNKEEADVVRMMFDLYANKDMGCQNICNRFDEMGIKPPKGEHWSPSAMAKMLENIHYIGKVKWNYRKTLTIVEEGEFKKTRPIAKAGEYLIYDGKHEAIVSEDLFNAAQAKKGKHTRQKPNTKIRNPFAGLLWCKCGRAMSLRAYKSNISAPRLLCDGQTHCKTGSCLYSEMNERVCSILTNCIHDFEIRLQNNEGDSVKQHMRLIKNLEVRQKELEEKELAQWEAQADPDPAKRMRSMFSNSSTSVY

SEQ ID NO: 23746 - protein, 526 aa, synthetic construct
MPKVTMIPATVNSLTHLPKASVQKRRVAGYARVSTDSDEQFTSYEAQVDYYTRYIQSKPEWDFVRVYTDEGISGTNTKRREGFKEMIADALAGKIDLIVTKSVSRFARNTVDSLVTIRKLKENGVECCFEKEGIYTFDGKGELLITIMSSLAQEESRSISENITWGQRKSFADGKIHLAYKHFLGYKKGEDGRPAIVEEEAVVVRLIYRLFLDGKTQAGICRYLEDLEIPSPSGKAKWSKTTVTSILTNEKYKGDALLQKSFTVDFLQKKTKLNEGEVPQYYVEGSHPAIIEPDEWNHVQAEFARRKALGNAYSGKSVLSAKLVCEDCGGFFGSKVWHSTDRYRRTVWQCNNKFKGGERCLTPTVDTETVQQLFIKAYNQMMGNRKQIIEDCELMRKKLTDFKSLDADIERHLEETQIVAELVKAAVKDNAVTAQSQEAYLKKYESLTKRYETAAAELARLQNLRTLRSQKDKAVALYIRTLKKQPTVLSEWNDTLWTVMVEKAIVHRNSEITFVFYNGTKVKVRQ

SEQ ID NO: 23747 - protein, 422 aa, synthetic construct
MIKIAKSKPKKFDVILVHKFDRFARSREDSVVYKSLLRKECDIKVISITESIEDDKFSVILEAMLEAMAEYYSLNLADEVKKGMTEKAIRGQYQSSPPFGYKMENKKLVIIEDEAQVVRMIFDKFLNYDPSFLRLAKMVNALGYKTHRGGLFENRTIEYILNNPVYCGMARWTPTGKIRRNYSSSDSIVTKSEHTPIISEEVFNQCKEKLAKMKEINRRYYKGTNPQNLHWLNGLVRCKECGKTLVRSQKDYYQCSGYVKGACSTSQLIRIDKIESTILEQIQKDFDSKLKLNVKINSKSFSDNEVQIIYNQLEKLKEKESRIKEAYINGIDSIEEYKANKKDLQEQKEYLNNKLIESKNGLSIKSSDAIMKEQLRSYYEILSNPNVEVQRKYEISHLLIDRIEFSKTASTLDLQYKLYQME

SEQ ID NO: 23748 - protein, 463 aa, synthetic construct
MTTKVERCAIYIRVSTTEQMMHGKSLEAQKEYLTNYAREHNMAVVGVYADEGKTARKELKKRKAIHSLLQDVEAGKIDVIIFWRIDRWFRNLSDFYKVQDILDSHNVRWISTSEPGINMETRDGRLQLNVVLSIGQNEVDTTSERIKFVNESSIRSGKLIFGDANMGYGYKSGIVDGQKRMVKDPDREHVVDAFYKYFFKHQNKCATLRYIQETYDPDFSFGIMRTLLSSEFYKGTYRGFPYCPAYLTEDEWNKLQKIQKRNVKATPSGRIYLFAGMIRCPVCGQLLCGTGCSSIINRKTGAKRTYCYYRCNRAMIDHICSYRHRLSQNLVENYLLDNLEDEYKNYKVKCEKIEKEKEKQKKKQSPEKLRKELDRLNFLFQKGRIEWDYYNEEYSRVESELNDLQNSLPEPAPNYSYLEELLDTDFRTMYDQLSQENRRAFWRSIIQEIHINEDSTITSVDFL

SEQ ID NO: 23749 - protein, 590 aa, synthetic construct
MKTVEKIERKLPVLKARKRVAAYARVSMESERMQHSLSAQVSYYSALIQKNPEWEYAGVFADYGISGTGTKKRDEFNHMLAECEAGNINIILTKSIQRFARNTVDLLNTVRHLKELGIEVRFEKEKINSLSGDGELMLSILASFAQEESRSISENVKWGTIKRFKQGIPNGKFSIFGYEWQDDKLVIVPEEAEIIRWMYAEYMKGASRIEIGRALMDRGIYTRQGKPWVDSNVKVILTNITYTGNMLFQKEYCEDPITKHRRKNYGEMPQYFVEDTHEAIIPMDEWQAVQAEFKRRRDLGPFGNKSLKLSAFSTKITCGCCRKHYRHSGKRNTAGEVYYIWICQTKSQKGVSACPSKNIPEKMLQNTAAEVLGLDEFDEDVFSQQIEEVIVIGDDTLTFRFYDGHEVTTKWQSTAKTDWWTDERRKLWGERHKRKDTNPNRNTFYEFTGFIKCGCCGANYRCQSGKRKDGTPTRSWYCTGPRSECRNPAIRDETMKRLVTEILGLDEFDEAAMDAQIESATILDHMVTFHFRDGHIESRDFLDKRHGTPWTEERREKAKKSMKAAWTDERRAAMSERIKKIRSEKKWPNP

SEQ ID NO: 23750 - protein, 523 aa, synthetic construct
MAKSVTTIPATLSRFTAAPINSTKKRRVAAYARVSTDNEEQLTSYEAQIDYYTNYINGRDDWEFVGVYPDEGITGTNTKKREQFRQMVADALDGKIDLIITKSVSRFARNTVDSLTTIRKLKEHNVEVYFEKENIWTFDSKGELLLTIMSSLAQEESRSISENCTWGQRKRFADGKVTVPFKRFLGYDMGPDHNLVVNPEQAKLVMRIYGMFLQGQSPFQIARTLTDEGIPSPGGKDHWNPSNIKSILTNEKYKGDALLQKSFTVDFLTKKKKTNEGEIPQYYVKDNHEAIIDPETFEMVQTLMTTRTKGRNRKSSVSIFSSKVKCGDCGSWYGPKVWHSNDAYRKVIWQCNHKFDGQKCATPTLTEDEIKELFLRAANQVIDQKEQFIAIYDQVLSRSLDTTALESELSDLEAEINIAAELIEDCIKENAHVALDQDEYQKRYDALVARFDKAKARHTEVTDLIAERMARKHQIEAYLKNLRSREPLTEFRETDWLAMVDYIAVHSKNDIRVTFKDGTEIKA

SEQ ID NO: 23751 - protein, 572 aa, synthetic construct
MNNYIASLDRNRPRNIAFYGRVSTEHEAQLSALQNQMQWYDDQLKFHPNWNLVEKYIDEGITGTQAKKRPGFLRMIEDSKKGKFDLIVTREVCRFARNTVDTLVYTRELKSKYNIEVYFVDDNIWTMDGDGELRLTLMATLAQEESRKTSDRVKAGQKISRENGSLYGNGNILGYDRVGNTYVINEEQAETVRMIYDMYLDGLGSMKIAKSLSVQQRKNASGDIKWSAERVMRILKKSTYTGVLAYGQSHSNNYLEQKRINNLDRDSYMYQKVNIPVIIPQNKWDDVQKIIARRTKSVGDKLSGKKDVKEFWSKKLLCNCGSSFRRNKWRTNKTGEAVYGYQCQRQLNYGSKQFREKNGLDTDGYCGIRMVADWKLDMMAKMVIEHIWKNKGESVILALKMISENYEEDVKPNKKNIKETELKIEKLQKRLQNLIEMRADGEISKEEFAESKNTITEQISMLNSELTIDEVESDEPESIEKKIEVIKQAMNEVIDFSQPKLPKYIIDKFISKVLVLDNNKFRWYINLGNDYDKNSDIYLDTQVEGRKNNYSAQILSNDDSLSSVHSSTGSYR

SEQ ID NO: 23752 - protein, 537 aa, synthetic construct
MPAVTAARVTVIPAKKDRLPINVLSNEARKLRVAAYARVSTNNEEQLTSYEAQVDYYTRYIQSKDEWQFVEVYTDEGISATNTKKRDGFNRMVADALAGKIDLIITKSISRFARNTVDTLTTVRKLKEKGIEVFFEKENIRTLDGKGELLITIMSSLAQEESRSISENVTWGQRKRFADGKVSLPYRRFLGYEKGPDGLPVIVESEAVIIRLIYRLFLYGKSPSAIATYLTDEGIPTPGGKKVWRAKVVESILTNEKYKGDALLQKKFTVDFLTKKQKVNEGEVPQYYVTNSHPAIIEPELFDLVQYELKTRKTDGRFTSCLHPFSGRIICGECGGIYGSKVWHSNTENRSLVWQCNEKYRGQHCSTPHLTEGEIKAAFLAAFNIVLGNRDEIIEAYEEVIAALTDTADLDAEQETLENESEVVLGLIQKIISENAQTAMDQEEYNRRYDAYSERFEAARKRLAEIAELRQERNAKKTRIRLFMENMNSHQELVQSFDEELWYSTVDYVTVYEDKRLVFTFRDGRQVEITAELWRAA

SEQ ID NO: 23753 - protein, 448 aa, synthetic construct
MERIIQKVTPPARKKAPKLKRVAAYARVSSSREAPLHSLSAQISQYSGMIQKTPGWQYAGVYADEALTGTKDSRGEFQRLLADCRAGKIDMIITKSVSRFARNTVTTLRTIRELRLMGVDVFFEEQNIHTMGEDGELLLTLLAAYAEEEARSVSENQKWRIKSNYEQGLPWSITMYGYRQVNGRLEVVPEEAEIIRLAADLYLEGYGRYKLEDAFAAVNIKGRHGANMGGNSIVDLICNEKIVGDMLLQKTFVVDPITKEVRKNNGEKPQYFVEGSHDGILDRETYEKVLAERARRAAAYKPRSGSYERNRFPFSGKIHCGKCGKSFTRKVLNGNTPYEKRGWLCRTFNQKGKARCDAKQIPEEILKRVSAEAMGLPEFDEAAFAAKVEEIQVPENGVLVFVFYDGHTVTKTWDNPSRRHSWNPENRQRARELALRQAAERRLAKCQQ

SEQ ID NO: 23754 - protein, 510 aa, synthetic construct
MSYFIYARKSRKDAELEALGIDVLERHITTLLELAKTLSLPIGAIYREVVSGDSIDARPVMTQVLSEVEACMWDGALVMDVDRLARGDTIDQGRVQRAFFYSGTRIVTPNKTYDPANEYDNEYFEFSLFMSRREYATIKRRMQRGRERSSSDGYYVGNVAPYGWERIIAPDGKHYSLTPSQTEAPVLDLMYDLCGNKQYGYQKACTYMSNMGILARSGKPFSPSTLKGIISNPANIGKVRWGYRKTVRAVKDGRVVKSRPNATDYILADAAWEPRISADLFKRANQPKGCFSSPVRNDRPIQNLFAGLVRCSQCGRLMVRKKAQTKTPYDVLICQYTECSTVGIRIDELEEALLGWLKDYIAKYEFSDTHEEDTAAIAAKELIVTNFETEHQTLLKQRESLFDFLEQGIYTKEIFIERSNALEQRIRDCMNNITAAQEDLHTTIARQANRKNFVPKCKNLLSEWNSLTIPEKNSALRKLIDRIVLTKTKRNKKNQKNSEFMIDVYPKVPK

SEQ ID NO: 23755 - protein, 565 aa, synthetic construct
MSVTARIIANQQAKKVAIYCRVSTTEQAEEGYSINEQKKLLTYECEKNGNTVYKIYSDEGISGKNITARPALKELLNDANEGKFDSVMVWKINRIGRNLKDVLDMVDLFDRNNITFKSATEPFDTTTPGGRMHFQMVALIGEFERGTIAQNVKMGMMARAREGRWNGNVVIGYDLKLKEHTTNKKRKDTELVVNEKEAEIVRTIFTMYSQGNGYKAIANYLNKFGYKTKKGNPFSLTAIKDILNNPVYIGKIRYNLRPNWSEKRRKGINSNPLIVDGKHEAIIEQELWDKVQSMLQTSKGKPSRIYDGEFPLTGILKCPQCGAGMVIMRTSRTRKDGTKRRLEYYCCGNWKNKGTAICHSNAIRVDKANDYVFGKLSELLSNDKLVKDIVKNINTDRKNKVDPSKDELQKLTKELDKISAKKDKLFEAFEEDIITKEEFKERVAELQSRERLLQEDVNNLKMNVLDDNVQQVSYEVVKETLSKVGEMLGNCKSMEQKKKLLHMLISKITINELREVDSIQININDNLISYLNNGGEPNPDGGGSPFSFVSRRKLMINSVNIRICI

SEQ ID NO: 23756 - protein, 500 aa, synthetic construct
MYLRKSRADDPHESIEDTLRKHEKILFDLANKLNIKKDEIVQFKEVVSGENLKNRPQAQKMLKLVMENAFEGVLVVDSQRLARGDTLDQGTIIRAFSLNNTKIITPGKTINPGDEIDQDYFEFDLFMGRREYKMINKRMQRGRNISVQEGNYVGSIAPYGYKKTKIGKCHTLKINEDEIDCFNKMKELALNGLGCTSIANELNRLGFKPRKSKLWTTNAVRDILLNKTNLGLIKWNTRKSVKLYKNDEIIKSRPRNEEAEYYPGKHHAIITQVEYDAIVENIKNRARPVKKDKKLQNPLAGVVYCGKCGKAMIRRSYNNGYRDGLICTNTHCNNVSSVLEVVEKRVLESLEDTLKEYRQFIDNYHNDKTKTNNDSLIIKTEKEINKIDSQINKACEMLEVGAYSVELFKERKTLLDNQKKALIDKIEALKKEDTDFKLQNYINAVPILENAIKLYWNSSVEEKNKLLKQIVKRCDYLKSERGKRNGKGMYNFKLNIYLKI

SEQ ID NO: 23757 - protein, 541 aa, synthetic construct
MNQTAPKVITIPPKPELAQGKAVQRQLRVAAYCRVSTDNEEQLTSYEAQQIYYTDKIMTNKNWTMAGIFADEGITGTSAKKRPEFLKMIRQCRQKKIDIILTKSISRFARNTVDSLKYIRALKELGVAVIFEKEGINTLETDSEILLTMLSAFAQAESENISANVIWGIRQAMREGKVRIQYKKLYGFKRGEDGRPEIVPEQAVVVRSIYDQYLAGASYNMIKKRLEAEHILNVSGKPEWSLSVIRSILTNEKYYGDVLLQKTFTKDCISKRIVRNTGQLPMYLVTNNHQGIIDRQTFDAVQVEMARRGACKSPSRKNAPTGLSTYKSRYALSERLVCGECGTLYRRCTWSKRGKKKVVWRCVSRLDYGTKYCHKSPTLEEGSLQRTILAAISSVMSQKETIISRITGAMEQTLAPIPGETMSLSEIEQRLAEIDEEVRRIVVQTAEQGLNICSDHMKALTDECAELKKQRSRIQEQRTNNSALMKRVDDVASTLRQTSPTITEWDESIIRQLVDTVKVVSSEKIIVYLQGGTQVEQNMVE

SEQ ID NO: 23758 - protein, 526 aa, synthetic construct
MAEEKWTNGNLALQKKAPHVITIEAKECPQDIQLRVAAYARVSTSSEDQLNSFAAQSKYYTTLISSNENWKMVDLYADEGISGTSAEKRGDFQRLMADCRRGLVDRVLVKSISRFARNTKECLEAIRELKSLGISVCFEKEHIDTATLSGEMITTIFASIAQGESESTSRNMRLGIKMRMMNGEFNTCFAPYGYRLENHKLTIIPEEASVVQRIFSEYLNGKTSRTIARELNAECPRNRPWRRELIEYILKNERYAGNALLQKRYSTDTFPPQQKRNKGEREMYFVQNSNDAIVDLEIFERVQRLRARREVQRVANPRYFSNKMRCGVCGSTFRTKIQNGKIYWSCRTHEENASDCIITQIPEVEIQNAFLRLYYKLKHHGNGILSEMMKSLQIIRNRRMLWSVDIIELNKKISTLSSQNQVLATLKQQGLIDPDIFISQSNELTKQLRDAKLSKERLLAADSDNTIDLTKELMEILDAGPDILNNFDEELFGDLIDMVIVDSNERLRFRLKNGLELVETIERTIR

SEQ ID NO: 23759 - protein, 504 aa, synthetic construct
MQKTDKLPVKAVIYARYSSDRQREESIEGQLRVCEDYARRNNITIVHTYADRAMTGRSDQRPEFQMMIRDAATMSFDIVLVYKLNRFARNRYDSARYKHKLKQYGVRVVSAMENIADDPSGILLESLIEGMAEYYSAELAENVTRGMTENALEGKWAGGIAPLGYKLDEKHHLVIDEPKAAIVRQIYQLALEGHNQKYIIDELNKHHYTNSAGRPFSYNTLRVILKNERYTGTFIWRDIRKENAIPVIIDKMTFEAVQKHMQFRKKNHIRSCSKDFHLTGKLFCGRCSSKMVGVSGTSKQGVLYYYYACTSHLKKKCPSKNIRQDALENLICKITTQILSKPEAIKAIAKQAMKMQKDKKESLEIQSLQNQIADINKKLKNCIQAVENGLISETMTNHIKNYENRLQGLKDEVSRQKLLEGSIHLTEQHIEFFFYSISQKLKTADKYKSILLSSLVRCVIVHENYIEIQFNYKNELPILQNPVTVESSYLNQMVTQERFELPTP

SEQ ID NO: 23760 - protein, 581 aa, synthetic construct
MARKRTNLIGNTPSVRETKVAIYIRVSTIHQVDKDSIPMQKKDLIAYCQLILGTDNYEIFEDAGYSGKNTDRPAFQNMMGRIRKGEFTHVLVWKIDRVSRNLLDFAEMYEELRSLRVTFVSKNEQFDTSTAIGEAMLKIILVFAELERNMTSERVTATMISRANSGQWNGGRIPFGYSYDPKEKVFSIREDEASICRELKDLYLLNRSLAYVSRALNEKGYKTRAGVSWSPHSVWIIASSPFYAGIYRYNRYNGVESRTINPEEEWVMIQNHHPAIFTLEEHQAMRSIMKSNKRNMDNLPGRVHLSTKTHIFQGIMYCDKCGSKMVSTPGRLHVDGYRTSNYGCPLRRNTKKCNNPTVNDIVIGEFVINYILNMLNAKKTFSTINTPDELNAALLSGSVFSEVSSVEENGLNSFFNLLSRYGSDRSYIFSVKSPRKKKAAVNPELSKLRKEKEKQERALQRLQDLYLYSETSMSEKDFIIRKSEISSHLDNINRQLGLMTQDQASFLSDEEFIKQASHLLIQKELKNKKYIYFKKLVSTVDPDILKAYMETILDSIYTADGKITAITFKNGLTHRFIYKDK

SEQ ID NO: 23761 - protein, 514 aa, synthetic construct
MRRKKVKGGNRLVAYYRYSGGSGQTEQSIEGQRRDCENYAKLHGLTILHEYIDRHISGKTDDRAAFQQMMNDGDKGAFDMVICWKTDRFARNRYDSAVYKKRLRDNGIEILYAAESNVEGAEGIIIEGLMEALAEYYSAELAEKMRRGMRESALKGHAINRCRSLGLTTDENKKYVIDEKTAPTVRFIFEHYAAGESSTSIVDQLNAKGLRTSQGNLFNKCSIPRIIQNEMYRGVYTSKAYNVRIEGAIPAIIDDDLWKRAQAMMKTNRQLKAKYEPKAEYLLSGKLFCAKCGCTMKGVSGHSGGNCEVYRYYACSNPQCRKRNIPKDDLEGKVIRSICDHLLQPETMELLAETMVEVQKADMEKPNAERDVLEQELRDVRRRSKNIMDAIETGSANHQLVARLDDLTQQENTLTYQLSTMEAEKPLLFTKEQYLFLLQQFYAQPTEQDDAYKRRLINTFVTNIEVSDSELLIYFNISEETENKNKNAPQLNFDKSSSTEKRLVRVARIELTAS

SEQ ID NO: 23762 - protein, 463 aa, synthetic construct
MRRKTTAPVEKILLRVAIYIRVSTDKQVKDGDSMRDQLATGQKYIDSHENMILVDTYIDDGISGQKLKRDDFQRLIDDVRAGRIDLIIFTRLDRWFRNLRHYLNTQDILDKHGVSWTAIEQPYFDTSTPHGRAFVNNSMIWAELEAQNDSDRILGVFDDKVDNGEVLSGSTPLGYKIVNKHLVPDDDAPTAVAIFQYYRKTGNLSMTLRYMESEFGLVRSAASLKNMLTNTKYIGEFRDNKNYCPAIIDRDLFFDVQRLLKINIKSGKKHDYIFSGLVVCDDCDHIMSGCQQRAGGRVRADGTRIVYKYSVYRCRQGVNLHRCPNRKLVFETTLEKMLLERIRPELENYIAEYEVANLPALRTDAKRRSVEGKMQKLKDLYLNDLITMDEFKLDREKLLMQLEKINAEDSRPVKDLSYLKNFLKMDFESVYDSLSIPERRELWRSIVKEIRVDHDKNIHIIFL

SEQ ID NO: 23763 - protein, 540 aa, synthetic construct
MKQPYNTTIYNTALYMRLSRDDENYGDSVSIETQRTILQQYAKEQGLHVVGEYVDDGWSGTNFERPDFQRMMDDVEAGKVNCIVTKDLSRFGREHVMMDYYLEFLFPEKRVRYIAVAENEDTEKGLSDFVPFKNLFNEWFAKDTSRKVKAAFKAKFATGQRIGAYAPIGYRKHPEIKNKLIIDEETRWIVEKIFDLAIHGRGAASITRILIAEKVPTPGFINFQRDGTFANIYAGAPEEKSYAWTIAQVKSILKEETYIGHSVHNKQTNISFKNKKKVRKPKEEWYRVENTHEAIISEDVFRQVQEQICNRRRRQKNGTTQIFSGLVKCADCGWSLAYGVNSQNKNPYAHYHCSKYGQGLHQCSMHYIRYDVLYAYVLSRLQYWSVLAQQDGDKLLKRLLNASDKERNTARKRQTAELKKAEKRKAEVDTLFAKMYEDWSAGRITEYNFNMLSGKYQSEQAELDTKIEQLQSAIATESQNAADAEKWIALMKECVNPTELTAELLNTLIEKIVVHEAVKGEDGSREQEVEIFYRFIGKIE

SEQ ID NO: 23764 - protein, 579 aa, synthetic construct
MRNKSLAGRANNRAERPRKVAIYIRVSTTHQIDKDSLPMQRKDLIAYCELILGIEDYEIFEDAGYSGKNTDRPAFQEMMQKIRAGSFSHLLVWKIDRISRNLLDFAEMYEELQSLRVTFVSKNEQFDTLNAMGEAMLKIILVFAELERNMTSERVTATMISRANQGLWNGGRIPYGYSYDAETSAFSIIQDEADVCQLMKTDYFEHKSIIHTARLLNDKKIPTRSGALWSPTAVWKILSSPFYAGVYRYNHYKGTENRTLNPEEEWVLVPDHHPAIFTLEEHEKLCDILDANKRTANLPGRKHRAKNVYVFSGILYCGKCGNKLVSTPGRLQADNFRTTTYSCPKKRKTHECDNPSVNDLIVGEFVINYILNMLNAKSSFSSINSPAELEERLLYGGSFKDVQHISEDGLNEFYNLLSRYGSDSSYVFAVKHPRKKKAAVNPEVEALRKDKEKQERALKRLQDLYLYSERAMTEKDFIIQKNEISSRIQDINTRLGMVTHDANSTLSDEDFVRQASHLLITKKLIGRDYIYYKALAQTVSPDVLKIYMETILDSVYVIDGRVSSIVFRNGLTHTFIYQK

SEQ ID NO: 23765 - protein, 514 aa, synthetic construct
MRRKKVEGGNRLVAYYRYSGGSGQTEQSIEGQRRDCENYARLHGLTIVHEYIDRHISGKTDDRAAFQQMMNDGDKGAFDMVICWKTDRFARNRYDSAVYKKRLRDNGIEILYAAESNVEGAEGIIIEGLMEALAEYYSAELAEKMRRGMRESALKGQAINRCRSLGLTTDENKKYVIDEKTAPTVRFIFEHYAAGESSASIVEQLNAKGLRTSQGNPFNKCSIPRIIQNEMYRGVYTSKAYNVRIEGAIPAIIDDDLWKRAQAMMKTNRQLKAKYEPKAEYLLSGKLFCAKCGCTMKGVSGHSGGNCEVYRYYACSNPQCRKRNIPKDDLEGKVIRSICDHLLQPETMELLAETMVEVQKADMEKPNAERDVLEQELRDVRRRSKNIMDAIETGSANHQLVARLDDLTQQENTLTYQLSTMEAEKPLLFTKEQYLFLLQQFYAQPTEQDDAYKRRLINTFVTNIEVSDSELLIYFNISEETENKNKNAPQLNFDKSSSTEKRLVRVARIELTAS

SEQ ID NO: 23766 - protein, 512 aa, synthetic construct
MKVVAIYSRKSKESDTGESIKNQIEMCKDYFFNQGKEFTFEIFQDEGFSGGNTKRPEFQRMMLLAKHGKFDIVACYKVDRIARNIIDFMNTFDILKKNKVSLVSVTEGFDPNTPIGMMLMTMIAGFAEMERMNIAQRVKDNMNALAKMGRWLGGTPPTGYRAIKENTHNGKYAMYLELIPEMKEKLTFIFESAAAGYTSRYIGKLVELHPKTIINIVYNPTYCPSDELSKSYLENLGYKVYGELNGRGYLPWNRRPIDVNGKKMYRSEDRFVTASKHEIPTDSATWIKANEEIRKRGDEGRPRISQYSFLAHMLTCKCGCGMSVDSGYKRKDGSRSYYFKCSSKKGGYNRNCDAKLIRVDYIENDILSLLQKICLNKELLNDEISKTETIVIDKNEIKNISQKIKSNDIEMENLVSQLGKLKGSAADAVTTKMNKLSEENDNLKQKLFLLEHDNILNSINHYDIDYLYNKIVNLMSSWENLSLEDKQFGIQSIIDKIKWDGEKFKISFIKKS

SEQ ID NO: 23767 - protein, 558 aa, synthetic construct
MAKKKKPAGGIAVIYARYSSHNQRDVSIEQQIEACRKHAAELGLTIIATYEDRAISGRTDNRPAFQRLMHDAEKGKFSYVLAWKSNRMGRNMMQAMVNESRLMDCGIKVYYAEEDFDDSAAGRFALRSMMNVNQFYSDNLAEDVRRGLMDNANKCMVNGRQPLGYKRGKDGKVVVDEPAAAIVREVYTRVASGELFTDIARDLNRRGIKTADKGEWNKNSFHRLCSNEKYRGIYIYGDVRIEGGIPTIIDDPLWYKVQEALRVKKLKRNGRHRPGDEDYLLTGKLRCGKCGGYMIGMSGRSKTGDIHYYYACQNRRVGRTCDKKNIRRDVIEPAVAQAIKEYCLTDDAIEWIADKTVEYWEKADRNLQLDSIEGDLVAVQSSISNVMKAIEMGVVTETTRDRLIELEKQRTDLKSKLALAKEEVVHVDRKKLISSLLLFRNGDIHDRQYQEDLFKTFLISVYVYDDDNNGHLKIVFNAFGDNNTVDLPIDFGETDNQSAFSDGAEKFDYSLHRSTKSHPVYAGWLFSFYIVIQKQRTVFATVRPFLCSYYRMLMRPAP

SEQ ID NO: 23768 - protein, 523 aa, synthetic construct
MRFFSYGRKSVFSDKSDSIDNQFRMNREYCESKFSGQVDSWQQFSDEDFTGANTSRPDLQRMLSFIKGGFCDVLVVYQLDRLSRDVRDFANIYALLEEHGVMFISIKENIDTTTPIGRAMMYVTVVFAQMERETIAARVTDNMLGLAKKGYWTGGNPPVGYVRKHIVVNGKKHCSIEVDPDGARYVTQIFDTFLAYNCSLQGMETRFKNQGIRTQNGKFFSTAQLHKMLTMPYCVEATPEVYDFYAAKGCIMDPGSPREMWDGSVGVIIYGRSTEKNKKHQAQPPEKWTVCLGKHKPFMPAEKWLAVQSRFTQNKCIKDAKWPVPLLKGVLRCKCGNLMQVSRKKKVDGTCSSWYYCRKRMRQGVDACDMGQIKCDLLDEEVLELFRGITADPALIQKFVKAEAPADVPDLKAAQARVSACERKIGRLAASLALAEDSAASKYIIAEMERLDVELGALKREASLAEMESHRAAASAKDAKATAAEIAKLIHGLDGFDDKEKNAIARAVIQECTWDGERLFITL

SEQ ID NO: 23769 - protein, 512 aa, synthetic construct
MRRKKVKGGNRLVAYYRYSGGSGQTEQSIEGQRRDCENYAKLHGLTILHEYIDRHISGKTDDRAAFQQMMNDGDKGAFDMVICWKTDRFARNRYDSAVYKKRLRDNGIEIFYAAESNVEGAEGIIIEGLMEALAEYYSAELAEKMRRGMRESALKGQAINRCRSLGLTTDENKKYVIDEKTAPTVRFIFEHYAAGESSTSIVEQLNAKGLRTSQGNPFNKCSIPRIIQNEMYRGVYTSKAYNVRIEGAIPAIIDDDLWKRAQAMMKTNRQLKAKYEPKAEYLLSGKLFCAKCGCTMKGVSGHSGGNDEVYRYYACSNPQCRKRNIPKDDLEGKVIRSICDHLLQPETMELLAETMVDVQKADMEKPNAERDVLEQELWDVRRRSKNIMDAIETGSANPQLVARLDDLTQQENTLTYQLSTMEAEKPLLFTKEQYLFLLQQFYAQPTEQDDAYKRRLINTFVTNIEVSDSELLIYFNISEETENKNAPQLNFDKSSSTEKRLVRVARIELTAS

SEQ ID NO: 23770 - protein, 612 aa, synthetic construct
MRAAFLIRCSTKKQDYERQVNDLTRLAKKFGYTSSDNMIFGEHITGKDDASKRDRQSIQRLKDAAINKEFDVVLVSEVSRMSRDPMSGRLYVRQLINMDIPVYFRDIDTWTIDPVTGKKVRDAETIIGAAFDAAWKYIKSMKTQIASGRRDELDNNQMSIGQPFFGYKRYGGRDKGKKNSWVINDDAAKVVVDVFEEYVKDGATLKSTALAITAKYGEQFNKKFSIGTIEHILTFEPYCTGIKVVSLTDPDTEDVDEFEVEIPTIITRAMFDKATTKRATNRTARTPYPKQATYILSKLLKCPICEHSLTPQKRGGDKGDKYRLMNGKVAIRWSCMSGINNATDCSSRITISNEKLEAIIWGLIKQELIGFANLNDEDRVARVVELTDKITNLEMNIANFTSHISNMDRLIERAYSAYMDAPDSVMDIAKDKYYKTLTKCENERAECKDKIEALNVEKLRLENMRTFFNQPTLPKDAIEKAESDPIKMRNLVMELIDKIYPYRITTYVSPATNRIMRNGIVLLEVYTINGIYNVLYDGNQRNNKVAYYISGVYATFQNGRNKFDAYDTGEYFVISHATLVTETEDVDMLVTFNELIKICMQNGWEIDYTYKM

SEQ ID NO: 23771 - protein, 568 aa, synthetic construct
MQSKKKQDKAGITALYCRLSRDDGVEGDSNSVANQKKLLKRFAKENGLTNTRYYVDDGYTGTNFERPGFQKMIEDIDLGYISTVIVKDLSRLGRRYDMVGYYMDTYFPDRDVRFIAVNDNIDSDEGESEIAPFKNVLNEFYARDISKKCRSSYRIRGSTGEPLAPPPYGYIKSPDNSKKWVIDPEAAQVVRDIFKMALEGKSNETIARILQERKVLIPMAYWQEKGIRKGGKVTQPNKYKWCKTTVTKILTQQEYCGDIINFKTYSKSYKNKKRYDNPKENWVIFKNVHEPIISRDDFELVQMLVVKTKRRAPKQENGEKNMFCDFLYCADCGSKLWYHTNTTNKEIHYFSCSNYKKDTRGNCETRHYIRADAIEQIVMLELKRLAKYLESHEEEFAKLLAEKTNADMLAEQKTLETELNRATARNEMLTSLFAKTYEDNVSGKLSDEMYMELSNKYEVERLELKTKIFEYKERLAKISEMEQNKDDFLKAVRKFMEMESLTAPMLRELIDHIDVYEKEGGKKNYTQRIVIYYRFVGYLELPSSDDENYKANTRKGVDVEYIPTVKSA

SEQ ID NO: 23772 - protein, 502 aa, synthetic construct
MEFIREDCIYARQSVDRKDSISIESQIDFCKYELKGGSCRVFKDKGYSGKNTDRPEFQKLLGEIRKGKVRRVIVYKLDRISRSILDFATMMELFQEYDVEFVSSTEKFDTSTPMGRAMLNICIVFAQLERETIQKRVTDAYYSRCLKGFHMSGQAPYGYQLEPTVVEGIRTKKMVADPVAADHVRLMFEMYAEPETSFGDITRYFEEHDIKIYGKSMFRTFLSQLLRNPVYAQADLELYEFFKSQGAAIVNDASDFAGTNGCYLYQGRDVKEDKDRCLKDQILVIAPHEALISSDTWLKCRKKLMANTTFQQGRKPKNTWLAGKIKCGHCGYALKATHVPNSTGYFRCTKRTENKGCPGCGKIRKEEFEQFIFSAMQEKFKDFQILHGREEKVNPKLTAYQVELAQVESEIEKLLDTLTGANATLLAYANKKIEELDTRRQTISKAIAELSVETISPQQIKKLSYYLDNWDSIDFDDKRKAADGLISTIKATSDRVQIEWKI

SEQ ID NO: 23773 - protein, 529 aa, synthetic construct
MARVAFYGRFSSNNQREESIDAQYRACKQFVEARGDTIVAEYMDKAKSGTSDKRPEFLRMMKDAEAGKFDCIVVHKLDRFSRNKYDSAMYKRKLKQCGVRLISVTEQLDDSPEAVILESVIEGMAEYYSKNLARETMKGLAENRYKCLHNGGKPPLGYDVNDEKKYIINEKEAECVKLIYQMTIDGHSRSEIINELNERGYKTKINTMFKVNSLHSILTNEKYTGVYIYNKTASKNAFGKRNGHAYKDESEVIKIEGGMPAIIAKEDFQKVQEILKMRKAKPGSNTAKENYLLSGIIRCGCCGKAFCGNRRKAKDKPIYVSYRCAHRAKTSSKVCDNKEIRKEYVEEYVLSELERKIFNDEAIKILTEGINKNLKNQIKVDDDKKSILLKEINDIDSQITNIVNAITQGFVQEEFKEKMDQLKKRKVDIQDKLSEIEAREINKVVTEADVRALLSDFSGYVMSRNIPECKKFIRDFVKEVVVFKDHIEVTFNVAFSLRKNRKEGVEVTSSIKRCELFERYSDSFYIKVG

SEQ ID NO: 23774 - protein, 608 aa, synthetic construct
MNTAVNEYNYRFKLTDYAQFDRNRARNVAIYGRVSTEHEAQLSALENQLQWYDDQVKYHPNWTVCERYIDEGITGTQAKKRPAFLKMIEDAKQGKFDLIVTREVCRFARNVVDTLVVTRELKGIGVEVFFIDDNIWTMDGDGELRLSLMATLAQEESRKTSERVKAGQKISRDNGVLYGNGNILGYDRVGDTYVINEEQAETVRMIYDLYLQGYGSMKIAKILTERKRKTASGLIKWSVSNIMRAIKNATYTGTKCYNKSRSNNFLEQKRINNLDMSTYEYVEGDFPAIISQEIWDKAQAIRESRVKPVCVSAGKNTHSKRDSRDIWVNKLRCSCGSSYRKNKWHTKLDGKTSYGYQCYNQLNNGIKRKRAEIGLDTEGYCDSRMITDWKLDFMAKALLEHLWTERKESVLIALDLIKCYYKEEKSNETQSDTVTIQAKLDKANSRLTNLIAMRADGEISKDEYQAMRSPVDEEIKKLQKALDEIPQEKSNPKGLDIEGIRSTLNSLVDFSGSTISHDVVNRFVYLITPTSDTTFDWYVNLNGTADVKATFTAEGRKKNCIIKLEEIEKVSSVHRGENEDNAHFIKNPHIFTYLHRLLSQTSNPHRMY

SEQ ID NO: 23775 - protein, 463 aa, synthetic construct
MTNKLLRCAIYIRVSTFEQSVHGKSLQAQKEFLERYAAEHNMIVVGVYADEGKTARKELKKRKAIHALVNDVKQDKIDVILFWRLDRWFRNLSDFYKVQDILDEHSVRWISASEPGINMETRDGRLQLNVVLSIGQNEVDTTSERIKFVNEASIRQKKLIFGDANMPFGYKSGIVDGKKCMIKDPDTEHMVEDFFRYFKKHQSKQGTVRYMQSTYGINFSYSMLRTMLSSDFYKGTYRGFPYCPAYLTESEWNEIQTISVRNVKRTPSGRVYLFSSLMHCPVCGQKLVGTGCSSIINRKTGEKRTYCYYRCNRAITDCICTNRHRVSQNLIEKYLLENLTDEYHRYKIRNNKINEENRKKKVDRSPEQIRKELERLNLLFQKGRISFDYYDEEYTRLEQELSTINTTPIEPDRDLSYLDELLQTDFREMYNSLTLENRRAFWRSTIKEIHLNDDYTVKEVDFL

SEQ ID NO: 23776 - protein, 505 aa, synthetic construct
MNTTDLQTGVIYARYSSDKQRDESIEGQIRECTEYAQREGILITKIYTDRALSARTDNRPEFLQMIRDSANQTFNYVIVYQLDRFSRSREDSAKYKGILRRNGVRVLSAKEHITNEPAGIILESMLEGMAEYYSVELSQKVKRGMTENALKGKMNGSAVPLGYDLTESHHLAVNVHEAKAVRLIYDLYLKQYSLTKIANILHSKGYTTKRGGKISYSVIRNILSNEKYIGVYQWGDIRIEDSIPPIIAKEIFDEVQQVLPTRIKNKGRRSEMYNLCGRLICGQCGGHYMGSTATSRNGEKHHYYVCTNRRKHHTCSAPNIRRDELEDLVINRTLEILKQPQIITRIVDLVMNGYNHTTQEAKTAIQGIQGKIKAIDIELNNCMTAIKQGFINDRLKAEIESLEKERQNLLEQKANHESVISPIKFTAEHIEYFLERMANENPTTKAGRSRILDTFIKNVTIHSDRVEIVFNYKSELPEFSEQSASGSHFSVLVGPPGIEPGTDRL

SEQ ID NO: 23777 - protein, 514 aa, synthetic construct
MRRKKVKGGNRLVAYYRYSGGSGQTEQSIEGQRRDCENYAKLHGLTILHEYIDRHISGKTDDRAAFQQMMNDGDKGAFDMVICWKTDRFARNRYDSAVYKKRLRDNGIEILYAAESNVEGAEGIIIEGLMEALAEYYSAELAEKMRRGMRESALKGQAINRCRSLGLTTDENKKYVIDEKTAPTVRFIFEHYAAGESSTSIVDQLNAKGLRTSQGNLFNKCSIPRIIQNEMYRGVYTSKAYNVRIEGAIPAIIDDDLWKRAQAMMKTNRQLKAKYEPKAEYLLSGKLFCAKCGCTMKGVSGHSGGNDEVYRYYACSNPQCRKRNIPKDDLEGKVIRSICDHLLQPETMELLAETMVDVQKADMEKPNAERDVLEQELWDVRRRSKNIMDAIETGSANPQLVARLDDLTQQENTLTYQLSTMEAEKPLLFTKEQYLFLLQQFYAQPTEQDDAYKRRLINTFVTNIEVSDSELLIYFNISEETENKNKNASQLNFDKSSSTEKRLVRVARIELTAS

SEQ ID NO: 23778 - protein, 503 aa, synthetic construct
MLRAALYARFSSENQREESILAQFRDSTEYCKKHNYAIVAKYADEAKSGTTTIGREQYKFMLKDAQKGKFDVVVFHKIDRNARNELDYYITKHKLEEAGVKYAYSRQDIDSTSPEGQMMESMLVGMAAYYSRNLSNEIKKGLRENAIQGKCTGGRPPYGFSVDADKKLIINEDEAPAVRMIFDLYAAGVHYGVIRKRLFNAGYRNRAGKEFTLASIYEILRNRKYVGDLYLGKTLFRKGKRNTHQVSDNVQYFENVIPAIVSREIFEEVQVKLDQNKRRSGAGNAKAIYALSGLIHCGQCGSAMVAHSTKNSRGIKNYYYRCPKGRLVGDEKCPQKFINRDDIESTVYQLIRKLFTAPDAHNQIKRIIAKNNMTVKVPDYTEQIKRLKKQESDASKRLDKLYDLYMTDNEDEFTLRKMTQLKEEILKLRVRIKEAEDRQAIAQSTTFDIDKIIDTFQKQLKQKQSPEFIKTLFELAVKNVTVYPDKIKVALLVTQERFELPTP

SEQ ID NO: 23779 - protein, 524 aa, synthetic construct
MKAVIYARYSAGPRQTDQSIEGQLRVCTDFCNQRGLTIIDSYCDRHISGRTDERPEFQRLIADAKKKKFEAVVVYKTDRFARNKYDSAIYKRELKRNGIQIFYAAEAIPEGPEGIILESLMEGLAEYYSAELAQKIKRGMHESALKCQSTGSGRPLGYYVDSEKHFQIDPESSQTVQTIFDMYIKGESNVAICELLNSRGLRTAQGNPFNKNSINRIIKNRKYIGEYKYHDIVIEGGMPAIITPEVFCLAQAEMERRRTRKKPKAPKAEYLLAGRLFCGHCKTPMQGVSGTGKSGNKWYYYYCANTRGKTKTCDKKQVSRDRLEKAVVELTVNYILQEEVLTDLAKKVYAAQERQNDTAAEIAFYEKKLADNKKSIANVLKAIESGAATKTLPERLQELENEQTVIQGELVYLQGRHLDLGEDQILFMLMQYLEPFENETEQEYHRRIITCFVAEVYAYDDKLLLFFNISGEDGKLKSTDLEKIEAGEFDERLTSSTNQQQSLYIVIAVCFIRTYRRLWKYSFT

SEQ ID NO: 23780 - protein, 555 aa, synthetic construct
MDKRILCIIRASTEKQETESQKKELISYCEAKGFTVDEMAFIEVAGASARKLNKKYIQMLEDIKATLLSSPTIKAVALWDLNRLGRVESKLHEMKEFFVAHKIQVYCKSPEFVLLNEDGTASDAGGIVFSVFASIVKHDTDEMFAKMNRGRMRNKENGIYYGGQIKFGYTLDETKHFIIKEEEAKTIRLIFELYATGKYSFYSLIDELKARGITKNGKKITFEMIQNALSDEAYYNGKLPIISKDLFDKCTAIKANSVAVKRTKETCNVNFAVGLLKCECGNNFIASGDYYTCFSKVNRKRKKVVVECDAPVIKSDLLDDLLWIVTRPLQQKFLMQTDSQSVAENNDKINVLTVKVSTAQKELSSFKDRIEKLEDAYYVEGEMDEAQFKKRLGILKSKKVQTESLITNYRNEINDIKKVIEQLEQPINDRYLQSLLLSNLDTEDIEDRKKIKEMMFMHIEKVTAKKVMLGNHKGVEITIIAKSGLSFVFFYDIWLSSFRKGECNTFYEDKPLYEVNGFIKSMNTKVQNMIYEKIGLPLLSYKELGEAAAEYAKTH

SEQ ID NO: 23781 - protein, 502 aa, synthetic construct
MEFIREDCIYARQSVDRKDSISIESQIDFCKYELKGGSCRVFKDKGYSGKNTDRPEFQKLLGEIRKGKVRRVIVYKLDRISRSILDFATMMELFQEYDVEFVSSTEKFDTSTPMGRAMLNICIVFAQLERETIQKRVTDAYYSRCLKGFHMSGQAPYGYQLEPTVVEGIRTKKMVADPVAADHVRLMFEMYAEPETSFGDITRYFEEHDIKIYGKSMFRTFLSQLLRNPVYAQADLELYEFFKSQGAAIVNDASDFAGTNGCYLYQGRDVKEDKDRCLKDQILVIAPHEALISSDTWLKCRKKLMENTTFQQGRKPKNTWLAGKIKCGHCGYALKATHVPNSTGYFRCTKRTENKGCPGCGKIRKEEFEQFIFSAMQEKFKDFQILHGREEKVNPKLTAYQVELAQVEAEIEKLLDTLTGANATLLAYANKKIEELDTRRQTISKAIAELSVETISPQQIKKLSYYLDNWDSIDFDDKRKAADGLISTIKATSDRVQIEWKI

SEQ ID NO: 23782 - protein, 521 aa, synthetic construct
MENIIIYLRKSRSDDPALSVTDVLARHEQQLQEYAINTYNRQISEDHIYREIVSGETIADRPVMKQVIKLLETGTVDGVLVIEPQRLSRGDLEDCGKIVNTFRYTGTLVITPPKTYNLNDEYDRKFFEMELMRGNDYLEYTKKILNRGRIASVKQGNYIGSVAPYGYKKIKSGSGKDSYHTLEIVPEEADAVRLMYQLFVKEHYGFTKIARYLDDIGVKPRKTDHWSPAAIKDMLENPVYIGKIRWNYSKVQKTIINGQISKTRPRQKDTSQWIYVNGRHEAIIDEVIYNKALEMRGKNPCVRKNKELSNPFAGLLYCGTCGRAMSYKHFKQYRGKSENVCTSMLCNNQAICKTKSIKYDTFYKRVVESLEENVADFEIKLKQEESNGKQFQKDLICSLEAKLNKLKEKDFRQKDAYEDGLYTKEEYATRNAKLQEQISATMESLSKARSNTPPVIDYRERISRFTDCLTALKDNTLSASEKNVLLKTCIDKIVYYNNMESKPGIGRYVDNVFQLDIFLLL

SEQ ID NO: 23783 - protein, 525 aa, synthetic construct
MAKRVTTIMPTLVRFTEAPIAEHRKRKVAAYARVSTDSDEQFTSYEAQIDYYTQYIKARDDWEFVQVYTDEGITGTSTKHREGFKQMVADALEGKIDLIVTKSVSRFARNTVDSLTTIRQLKDKGVECFFEKENIWTFDGKGELLITIMSSLAQEESRSISENCTWGQRKRMADGRVSVPFDHFLGYERGENGELVINEEQAKTVRLIYDLFLQGLTPHTIANRLTAMGILTPRRKAKWNQGTVRSILTNEKYKGDALMQKCYTADFLTKKQVPNNGVLPQYYVEGDHEAIIPPETFELVQQEMLRRNNRDNRYSGVDIFASRIVCGECGSYYGAKVWHSNSKYRRIIYRCNHKYHDGKTCSTPNLTEDEIKSSFVAAVNKLIANKGEVIANLEAMSQTLFGTEVLECAREKLSAEMDLLQNMIQAAIAENAHIALDQAAYQKRFDKMREKYEDAKRQHDDIKQQIADKTSARVAASRFIGTLKKMDGLITEFDPSLWGSLLDHVAVYSKEDMRYTFKDGTEIKL

SEQ ID NO: 23784 - protein, 589 aa, synthetic construct
MTKTIRRIEAQIPITTKKKRVAAYARVSLDTERLENSLSAQISYYSAFIQRNPSWEYAGVFADNGISGTSTDRTEFQRLMAECEAGHIDIILTKSISRFARNTLDTLTAVRRLRELGIEVQFEKEHIHTLSDKGELLLTLLASFAQEESRSISENVKWGVRKRMKKGIPNGRFRILGYRWQGDKLVIVPEEAAVVRRIYQDFLDGKSRLETERALNAEGIRTINGCRFQDSSLKVILTNVTYTGNLLLQKEYITDPINGKRRKNHGELPQYYVENTHEAIIDQATFDYVQQEMTRRKALGAQANKSLNLTCFSGKIKCPYCHVSYMHNPHRRKSNIDYWICGSRKKKKVGDGCPVKGAMSEVALKKCCAEVLGIEEFDEIVFAEKIEHLEVPEKGHLTFFMRDGSVFTRECRNTGHQDCWTKEHRAVASEYRLKHSSERSGSTCFTGKIKCGFCSMNYQRATQSNAGKKTRYWRCPSKGEPDKKGLREDHLRELCAEVLHIDTFDEAAFTQAIDHITVSPDAVLEFQFNDGHAEIHNWSYERHGHKWTAAQRARFSETMKRHYTPERRQTMSEKMKQIRKERGAQWRKE

SEQ ID NO: 23785 - protein, 530 aa, synthetic construct
MIYARFSSHSQTEQSIEGQLRECYEYAKRQDLLVVAEYIDRALTGTTDKRPEFLRMIDDSKKKTFDYVLVYQLDRFARNRYDSANYKAKLKKNGVRVLSAKENITEDASGILIEGVLESMAEYYSAELSQKVKRGIRESYEKGYFIGGYGLFGYDIVDKKWTINSYEADIVRDIFTRYKNGEKAKEIIARLNGQGIKTKAGSSFNMNSLARIIRNEKYIGKVTSHGTVYTNVIPPIVDEELFYECNVIMDKHKHKPRDSKSEQPYILSGKLFCGFCGSLMTAETGTSHTGKLHHYYKCFGRKRNKHSCKKANYRQQDLEDLVFGTTVKYVLQPDVIQTVAEQVVSKFNSEITKSATLKNLENELKAKEKAINALLAAIEQGIVTKSTKERLISLETQKEELENKILLETDRQIKPLEVDKVKAFLTYFARKKYENGQEKTEFFNSFINRVILYDDKILIFYNTDDNHPTVIKRKDTEELISHLNDIASNGKTATNDCPNTTGNNSPIVQKENSLEPQGFKRVSLGGETGN

SEQ ID NO: 23786 - protein, 520 aa, synthetic construct
MNVAIYARKSKATKKGESISNQIELCKKYFLNTTNEDVNFLIYEDEGWSGGNINRPHFTKLMNDAKLKRFTTLICYRLDRIARNVADFSSTYKILEENNIAFISITEQFDTSTIMGRAMINISATFAQIERETIAERIKDNMLELSRTGRWLGGTPPLGFKSVKITENNKKMYKLEIVEEEMEIVRLIYKLYPEYKSTVPIARHLVSNYIKGKNGGDFSRNTVLQILKNPVYCFSDEDAIKYFESKGSTLNCSKSNEYGLMVYNKRKGGKKENPIEEWIIATGKHPGIIPGAEWVECQNILSEISSKASPRKATGNKFLLSGMLKCARCGSSMCSWSRTSKGIYYRSYRCELKNRSANRCDSKMVNANELEEFVIDLCKNINLEDVINIKRTKNNNTALKRELTSLNKNLNENDKLLQGLIKKLALIDDIDVLSMIQTEIKKIKTENDNINKRINEINISMFDVEDEENKKQLLLESHKLFKNTIDLIEDVEAKRNLIMNFIEYFTYDSETNEVGYKLRL

SEQ ID NO: 23787 - protein, 573 aa, synthetic construct
MAYNAQNKTGARVAIYVRVSTLHQIDRDSLPMQKQDLLAYAKLMLNTDDCVIFEDAGYSGKNTDRPKFQEMMSQMRAGAFTHLLVWKIDRISRNLLDFATMYNELKALGVTFVSKNEQFDTSTAMGEAMLKIILVFAELERNMTSERVTATMISRANNGLWNGGRIPFGYDYDYETHEFSVNEEESKVVILMHDMYEQERSLVRVVRELNERGYRSRAGNLWSPVSLLIILRNVFYCGDYRYNMLKEGDRQKVKDESEWVTVENHHVAIIPKDQKERIMATLDSNSKLCKQRNIYKSSKHTHVFGGLIYCGSCGKPLGSTPGNLTRDGWHYSKYTCPTRRKSVTLCTGKSTSDPIIGEFVFNYILNMLNAQNGFDKISSPEELEKLLLIGDTFTYIDHIEPNGLNDLFNVLSSGAVKGAVFGKGASLPTKKATVEPEVARLRNEKQKTERALDRLRSLYLYADEAMSEAEYMIQKNKLEETLEDINDQIGMMNTDSWQQSVSDEEFIQRASEFIIAQKLSGRKYVNYKRLAMSVDSEVLKNFVVSIIDSVTIQDGLVSNIVFKNGLCHTFIFR

SEQ ID NO: 23788 - protein, 530 aa, synthetic construct
MEQYLIYLRKSRSDLEAEAHGEGETLSRHEHTLLELAKRQHLNVTDIYREVVSGDTIAARPMMQRVLSEVEQGVWSGVLVMEVERLARGDTIDQGIIAQTFKFSGTKIITPIKTYDPDNEFDEEYFEFGLFMSRREYKIINRRLQRGRLASAKEGKWPSGLAPFGYRRVKLKNEKGCSLEPIEEQAAIVRMIFDLYTVGLQDEDGSARPLSLGSIATRLNDMRVPSPSGSQWTRITIRGIIKNPTYIGMVRWGSRETKKKVVDGKVVSVRGPADPEKECVFKGIHPPLIPKETFELANDKLTRSENTSTHKEKVVRNPLAGLLVCSECGRQMMRMINPVHPDMPVVRCPRRGCPNCSSYLPIVEERVIQGLSEWMKGYELEWSSAAASSSVSSVGVREKALASAEAELRKLQQQLERTHDFLEQGIYDTDTFLSRSRMLSDKIAAAKDSVTRCSRELTEEKLRETSRRDIIPKVKNLLDVYPLLETAEEKNALLKEVLEKVVYQKLNEKRKKSPDGFTIEIYPRIPKSEK

SEQ ID NO: 23789 - protein, 524 aa, synthetic construct
MVRIASYLRKSVYSDKSDSIQAQYTLISDYCKSHYTDFELYRYEDEGFTGANTNRPAFQRLTNDISERRIDVLVCYKIDRVSRDVKDFSNFFSFLQENKVEFVSIKEQIDTSTPLGRAMMYICSVFAQMERETIAQRVKDSMIELSKSGKWAGGRAPLGYRRDRVEINGKNHTVLVPDPDGIQLLNLISDKFLENNMSLVKLDGYCRKNNIKTATGSYFSSSQLWNVLKNPTYCTADSAAYDYFESLGCTMAVDRDRFDGSHAIMPYNRTRGGKTKKHAINPINEWIISVGLHEPLFTSEKYISIQRKFGQNVIDKTRKHKVGILHGIVKCSCGWNMRAKHKVDKVTGKIYDDYFCNQRQNRGRESCSMPAVHIDTLDSAIIDFLKQIKLDKKMIDNYCFDEAAVTVHRRKRADVQRDIGRIESKILNLTNTLSNTSGSSAAKYIVSEIEKLDRELSGYKYELMEIGADEKKHAHFQHTKEAKYKMVCDIVDNLDRLEYDEIRTLLKELFKECVWDGEVLHVKL

SEQ ID NO: 23790 - protein, 514 aa, synthetic construct
MRRKKVEGGNRLVAYYRYSGGSGQTEQSIEGQRRDCENYAKLHGLTIVHEYIDRHISGKTDDRAAFQQMMNDGDKGAFDMVICWKTDRFARNRYDSAVYKKRLRDNGIEILYAAESNVEGAEGIIIEGLMEALAEYYSAELAEKMRRGMRESALKGQAINRCRSLGLTTDENKKYVIDEKTAPTVRFIFEHYAAGESSTSIVEQLNAKGLRTSQGNPFNKCSIPRIIQNEMYRGVYTSKAYNVRIEGAIPAIIDDNLWKRAQAMMKTNRQLKAKYEPKAEYLLSGKLFCAKCGCTMKGVSGHSGGNGEVYRYYACSNPQCRKRNIPKDDLEGKVIRSICDHLLQPETMELLAETMVEVQKADMEKPNAERDVLEQELRDVRRRSKNIMDAIETGSANPQLISRLDDLTQQENTLTYQLSTMEAEKPLLFTKEQYLFLLQQFYAQPTEQDDAYKRRLINTFVTNIEVSDSELLIYFNISEETENKNKNAPQLNFDKSSSTEKRLVRVARIELTAS

SEQ ID NO: 23791 - protein, 657 aa, synthetic construct
MTEKKKKKQQKCYIYIRVSTSMQVEGYSLEAQRERLNKFADYQGMEVVREYCDAGRSGKNITGRPEFTQMLRDIADDRDGVSYILVFKLSRFGRNAADVLNSLQYIQDYGVNLICVEDGIDSSKDSGKLTITVLSAVAEIERENILVQTMEGRKQKAREGKWNGGLAPFGYRLDKEKGELVVDPKEAEIVKVIFDKFINSDMGADSISNYLNDHGYTKNTSRDFEVSYFTRSHIMKILDNPVYVGKIVYGKSATEKVKGTRDQYRRVKQDDYLVADGRHDAIIDEDTWNKAREKRKETGVKWNKIHDLDHEHLLAGILKCPICGASLAGTVRRKKYPSGKVNSTFYYRCLHRKRIESTGKKCDFKPSLNQIDTDAEIIGVIHDMVNDEQFEAFIRGKLDEKVDVSSFEAEREGLRTQLIQATGAKDKLNQQLDRLDVTDRHYNRKYQDMQDRLDTLYDRIADLEEKIDDVTDKISGAYDENLTSKQLCKVLLQFDEMFEEMTDLERKEFLYTLIERIDLFPERQENGSILKRIRFKFRVDYDAEAGGKVLLNENDVETVVLLSQQKPDDTIEIDLDLDELDATSAELKATYQEIKDYVLKEFGLKVSSLYISQVKRKCGIEVGENYNLPKSENARVPQCPKEKEDAIKAALKYYAMI

SEQ ID NO: 23792 - protein, 658 aa, synthetic construct
MKKCYIYTRVSTAAQIEGYSLDAQEESLKAYAEYRELEIVGNYCDAGKSGKNIKGRPAFRQMMTDIKSQKDDIAFVLVFKLSRFGRNAADILKSLQLLEDFGIDLVSVEEAIDSSTQGGRLTLAILSAVAEMERENITVQFMAGKMQKVLEGGWTGGAVPYGYKNVNHELVLVPSEAEVIRKTYELYQQENMSASAVAYELNKSNMVRITGKREQKPFTYEFVSRVLDNPFYCGRVYYNRRTNKKDRDGKTIKLDEDNIIMAEGKHEIIVSPEVWDSVHAKRTEIAGRYKKVDDGGHVHLLSGIVKCPICGKGLTGMISRTKNLKGDGYYKPIYYYKCRYNTRQNGKTCTFDQSLNQEIIDGLVMKILQKLQTYREFQDALQAALGAQGNIEKTEKRLQDLRKELREAELTKDRLGEKLDGLNPLGKDYDRKYEETSDKLDSIYDRIGDLEMDVISTKKKLEALKQKADSTVQIMTFMENLPLMYEEMSEEERKEMFQAFVDDIELFSEDRTDGKIIKSISFKFPMVFDGKPLAKNTKPEDMISFRLDCTDIDIELPCKGNIIMKKQADGSQKVIVRKGTYAAIKAYILEKHDVKVPTLYIAQIKRKYGLEIGKAYNKPEKNKNHVPKCTKEKELLIMEALKFYDLMEQDVEYREDAV

SEQ ID NO: 23793 - protein, 544 aa, synthetic construct
MRVSVNLNAQKPDTTTNAVIYARYSSHGQTEQSIEGQLAKGHEYAAAQGYTVVHEYIDRAMTGRNDNREAFQKMLSDTGKHQFQVVIVWKVDRFGRNREEIAFNKHTCKKNGVRVEYVAESLPNSPEAVILESVLEGMAEYYSIQLSQNIRRGQLESAKKCQCVGGSVPLGYTLDSDKHFVIDPQTAPVVKKIFDLYAEGATISEITGQLNEQGIRTARKQLFTKNSLTKLLKNEKYIGVYTYKDIVRVEGGVPAIVDESTFDRVQELLKINRRAPSHTWTKVEYLLTDKLFCGHCGSPMVGESGFSHTGAKYSYYGCIKRRREKACDKKPVRQDWIEALVLDETVKLLHDDKLMEYIIDRTWEYYQVTDKVQEEKAVLEAQLAEVDKAINNLVRAIEAGIFNAATKSRMDELDAQKAALTASLADLELTSGIRITRDHIEYFLLRLRDLDVKDRECQKRLVQTFVNAVFIYDDGRVKITYNYSGQSSTITLNQIASAEKGKGFVCCLPCSTSSPRFPRGVAALFLFLGKNGCESTTNFSCIVQ

SEQ ID NO: 23794 - protein, 502 aa, synthetic construct
MEIQIREGNSIQKRKLKVCAYCRVSTDADEQENSLENQIRHYEEVITSNPDYEYAGVYSDFAISGFKEKRPGLQKMLADARKGKIDLILTKSVSRFARNTSIVLEATRKLKELNVGVFFELQNINTLSGEGELMLTILAAFAQAESESGSVGAKMVYQRKYEAGIPVQYLERSFGFKKDERGVYIADEKEAAWVRKIYEMAADGYTPASIKRYLNENGVKTVGGAEWIDSTVFRLIENEIYKGDYIMHKHFVNEERKLVRNRGEVDAWYIEDDHEAIVSPELWQKAQDALEAKRDYLAEGSVIEEFTEENYPYMNRIYCAGCGYPLYRRIYSNGNRLNWGCSGTKRYGKSFCEGINIPDGVLRGAWHFDENMYIGEKQTDKGKKEFTYLKESSWKRRHKKKEPEPIPENTETEYPYREKIFCGLCGSRLVRHVNTKNHKVIWVCNGRKRKGKDFCDGTRIPDTIIKGWGEIKKDICIQRKDDKNGKKRYSYTSKKPKGADRA

SEQ ID NO: 23795 - protein, 464 aa, synthetic construct
MARSVTVIPARSQKVRTGHKAVQEKKIRVAAYCRVSTDQEDQLHSFEAQVEYYTKYINEHENYEMAGIYADEGISGTNTKKREQFKKMIADCEDGKIDLIITKSISRFARNTQDCLAYSRKLKNLGIGIIFEKENINTLDSTGELLFTILSSLAQDESRNISENCKWGIRTKFKNGEMHLNTFKFLGYDKDENGKLVINKEQAKTVRRIYRDFLIGINPAQIAKELTEEKVPGCLGQTKWYPSTVIGILKQEKHMGDALLQKTYTADFLTKRQVRNNGEIAQVYVKDSHKGIIDKQTWNAVQEEFDRREKFMEAHGTDRYSYGADCMPFCEKVFCGECKSLFTRHSWRSRGIVQWQCKNHRKDGKVACTNAYVDNADLENGFVKAFNRLVTDRDKHMEKWQQMKSDGTPLEKIRAGQMMEAVGNEPLTRFVPEIAQLVLCEVTVLGAKKYEFFFLEGSRVKVSV

SEQ ID NO: 23796 - protein, 541 aa, synthetic construct
MRIAIYSRKSKFTGKGESIGNQVEMCRDYIATNYNGEEHSIQVFEDEGFSGKNLDRPQFKKMMEIENVIPFDLIVVYRLDRISRNVGDFASLIEKLNKKNTSFVCVKEHFDTGNSMGRAMMNIAAVFAQLERETIAERIKDNMYLLAKEGHWLGGTTPLGYKSIEVTNGKRTHFELIIDESQIDLVNIIFSKYKQLGSINGVETYLFVNGYKTQKNNYWHKSNVKRILTNPIYCIADIDSLNYFTELGCNVCFTLDDCNGKKGIYPYNRFSGQKREMQSYDRWIITISEHQGILTGKEWVAIQQQLKANSKDGFGGKANERRSTSNTSLLSGVLFCSCGAYMRPKKYPSGNTFYICENKMDKKITECNNSNINADELDKIILNELFSFDIKDGVVDSQIQNLKEQIANIDNDLQKQIGRLKKQIETNKNTVNKFMNIVALSIENDTPEQVVEVYNQKINELLNQNKITQKRIDELQDTNIVQAKMNDKLNSLTDAMVYLKENFDKLTIVEKRGFVKKIVDRIVWDGNNINIFIKGISELSE

SEQ ID NO: 23797 - protein, 579 aa, synthetic construct
MRNKSLAGRANNRAERPRKVAIYIRVSTTHQIDKDSLPMQRKDLIAYCELILGIEDYEIFEDAGYSGKNTDRPAFQEMMQKIRAGSFSHLLVWKIDRISRNLLDFAEMYEELQSLRVTFVSKNEQFDTSNAMGEAMLKIILVFAELERNMTSERVTATMISRANQGLWNGGRIPYGYSYDAETSAFSIIQDEADVCQLMKTDYFEHKSIIHTARLLNDKKIPTRSGALWSPTAVWKILSSPFYAGVYRYNHYKGTENRTLNPEEEWVLVPDHHPAIFTLEEHEKLCDILAANKRTANLPGRKHRAKNVYVFSGILYCGKCGNKLVSTPGRLQADNFRTTTYSCPKKRKTHECDNPSVNDLIVGEFVINYILNMLNAKSSFSSINSPAELEERLLYGGSFKDVQHISEDGLNEFYNLLSRYGSDSSYVFAVKHPRKKKAAVNPEVEALRKDKEKQERALKRLQDLYLYSERAMTEKDFIIQKNEISSRIQDINTRLGMVTHDANSTLSDEDFVRQASHLLITKKLIGRDYIYYKALAQTVSPDVLKIYMETILDSVYVIDGRVSSIVFRNGLTHTFIYQK

SEQ ID NO: 23798 - protein, 513 aa, synthetic construct
MPEALNAVIYARYSSDRQTEQSIEGQLRECYAFAKANDIAVIDTYIDRAISGKTDNRPAFQKMIEDSAKRQFQAVIVYRLDRFTRNRYDSAIYKARLKKNGVKVLSAMENLNGSPESIIMESLLEGMAEYYSVELSQKITRGMRENALKGKALGGQRVLGYKVNSDCYFEIDETTAPVVVDIFKLYSSGKTVKEICDILNARGVKTARGGAFNKNSLHTILTNKKYIGIYKTKYGEIVGGIPAIIDKELFEMVALRMEQNKKAPARAKAEINYLLSTKLFCGKCRSAMVGESGTSKTGKKYYYYACVKKKREKACDKSNVKKDWIEDLVIQRTVTDILKDDVIEKIADRLVELQKAEAAESGTMLYLQNSLAEIQVSIKNIMTAIEKGIITESTKTRLTELEDEKRNVEIEIAKESIARRIISREQIIYWISSFKDGDITSEKYRQQLIDTFVHAVFVYDDKIVITYNYSGENNTATISDLDLSSPPKQYNPNLLPIGHGFGFVVSVEEIEDW

SEQ ID NO: 23799 - protein, 526 aa, synthetic construct
MPKVTMIPATINPLTHLPSVAARKRRVAGYARVSTDSDEQFTSYEAQVDYYTKFIQSKPEWEFVKVYTDEGISGTNTKRREGFKEMITDALDGKIDLIVTKSVSRFARNTVDSLVTIRKLKENGVECYFEKEGIYTFDGKGELLITIMSSLAQEESRSISENITWGQRKSFSDGKVHLPYKRFLGYEKGEDGRPAVVESEARVVKLIYGLFLEGKTQAGICKYLEELGIPSPGGKAKWSKTTVTSILQNEKYKGDALLQKKFTVDFLEKKMKPNEGEVPQYYVTGSHPAIIEPDEWEQVQAEFARRKTLGKAYSGKSVLSAKLVCEDCGAFFGPKVWHSTDQYRRTIWQCNGKFASEEHCHTPALDTETIQRLFIKAYNLMMQDRVQIIKEIEAWRQKLMDFGTLDADIERQLEETQVVAELVKAAVKENASTAQSQEAYLKKYEALTERYEKAAAELERLQSLRTSRSQQDKKMALYIRTLKKQPEVMHDWNDTIWTVMIEKAIVHRNGEVTFAFANGTEIKVGA

SEQ ID NO: 23800 - protein, 433 aa, synthetic construct
MPRAITIVPKPPKLEQKKRVAAYARVSSGKDAMLHSLSAQVSYYSDLIQNHDDWLYVGVYADEAKTGTKESRADFQRLIADCRAGKIDMVITKSISRFARNTVTLLQTVRDFKAWGVDIFFEEQNIHTMSGDGELMMTILASYAQEESRSASENQKWRIKRNFEEGMPWNGAMLGYRLKNGRYEIIPEEADLVRRIYDEYLSGDGYLTIAKRLNEDGIPSRFGKQWGQSVISKILSNYTYTGNLILQKTFRENHITKKTIINNGELPKYHAEDAHDAIIDMETFQAVQAEKTQRAARFLKKPAPKKAYPFTSLLVCDGCGKNYRRKVTKTGPVWVCGTFNSMGKAACASKQIPEETLQAVTAEVLGQVDFSEELLRRLIKSILVCNGNVLIFRFFDGSEVTRIWKDRSRRQSWTDEMKATARQKALERRNQNA

SEQ ID NO: 23801 - protein, 570 aa, synthetic construct
MAYRKITDIRDTIGMRAVFYARVSTAEEEQLNAIELQIEENRGCIKDHGWKLVGEYIDRSKSGTMVKGRDDYQRLYEDLYEDLFDIVVIKDQERLQRNTLDWYLFINRVVQTGKLLFMYMDGKFYSPDDALITGVRAIIAEEFSRNLSKKLHNYHDHRIEKARQGQEIALQGSGNVYGWDKKDGKYYINPEQAKVRRLMCEGIMARKGSTLIAKELNEAGYRNTVGKLWKPMDIPKFVYDCKNVGTMIINKERHDFESKQTIKLPKEEWVYVENALPPIVTQEEWDLICKIHEERVIATGSDRRGKKTSGYSFSGKLVCGICGAPYWRKQRVSKDEYWVCSTKQTKGRRTRKRDSTMGKAGEINPLGCDNENISYNSLMEIMGVVSERLQANTDTIKHDMINWLTKLRKQLLEANGGHTEADLQRELSRKSKLLDAYLDGILNKQEYQKKAEELDERIIQLKAETEKNKANSGDIAEIDKVLANIDEEVSRYVDGNEKLKVEYLLEHLEQVQIFPDKVIVIVPILSEGIVVEKTQYVSREKRRRKVHNHFNYVWADKKGQRKNSNLRQRY

SEQ ID NO: 23802 - protein, 479 aa, synthetic construct
MRGVIYARYSPGPHQTEQSIEGQVADCQQYAEEHGIDIIEIYADRKVSGKSVVGRDEFQRMLRDAEKGRFDCVLVWKIDRFGRDRQDIAMGKMTLKRAGVKLMYARESVPDGPEGIILESVLEGLAEYYSADLRQKVIRGMRETAKKGQYCGQSLPIGYKVDAERHIVVDEREAAVVREAFKLHIAGGQIRDIVQLFADRGVMGRRGKPVSNAVVYRMLRNEKYLGEFYIQDVKLNVEPIIDQATFLEAARHFKTSRNNAAGRAKVNYLLSCKMFCGYCGSMISAEAGTGKLGKVYRYYKCGDKKRGKACELKPFPKDHLEDAIILATVNDMLTDEMIEKLTVRILEVQEQENADDPVVGLRRRLDSNKKRQRNLLDAIEEGGARGLVSRLAALEEEEEQLVLEIQRAEIKRPRLTHEVVEAWLRSFRVGDVTDDDFRARLVDTFIARVELRNDEALIFYNIREKGPHSRVRVRPEWWS

SEQ ID NO: 23803 - protein, 427 aa, synthetic construct
MDRIIKRVDFPKIMQPQFLKVCAYTRVSSGKDAMLHSLSAQVSHYSEMIQSHTGWVYCGVYSDEALTGTKSDRDGFQQMLTDCRVGKIDMVITKSISRFARNTVTLLETVRELKSLGVDVFFEEQNIHTMSADGELMLTILASYAQEESRSVSENQKWRVKRNFEAGIPWNGRMLGYRMQDGKYYIIPEEAELVRRIYREFLDGMGRNRIAVKLNDEGIQPTRYGEEWHPQTIAKILRNYAYTGNLLLQRFYCESYITKKTVPNNGQKTMYHAERTHEAIIPLEEWKAVQTEIERRAEQHKSKPPAQPSFFYTGRIQCAKCGKNFRRKTTAARVVWICATLNTKGKKHCASKQIPEATLDELVRQVTDDPFSVKKIIADDGNTLHFHFSDGSVVTRTWTDRSRAESWTPEMKEKARQQSLARRRQKS

SEQ ID NO: 23804 - protein, 527 aa, synthetic construct
MNTAVRTVTVIPPSINPMTHLTDTPLYKLRVAAYARVSTDSDEQFTSYEAQIDYYTQYIQRNPEWTFVKVYTDEGISGTNTKHRAGFNEMIEDALAGKIDLIVTKSVSRFARNTVDSLVTIRKLKEKGVQVYFEKENIYTFDGKGELLLTIMSSLAQEESRSISENVTWGQRKRFADGKVNLPYKQFLGYRKGADGFPEVVPEEAVIVRRIYTRFMEGLTPGAIAKELTADGIPTPSGKQRWQASTVESILQNEKYKGAALLQKCFTVDFLTKKRKVNEGEVPQYYVEHSHEPIITPEEFDKVQTELARRKRISRQYSGKSIFSSRIVCGGCGSYFGSKVWNSTSKYRRVIWQCNGKFKGEHKCETPHLDEETIKARFVAAINAIIDSKDNILEDCRLMQTTLTDCTGIDAEIKSLLEEIDVVAELTKRCIAENSQTAQNQNEYAARYNGFVERYEKAKAQLEQLRATKVAREAQAEAIGAFMFEVQELDALTNFDDKLWLTVIDTVTVHADGRMTFKFQGGTEIEA

SEQ ID NO: 23805 - protein, 465 aa, synthetic construct
MAREVVHIPARPQVVGTRTMSEKKIRLAAYCRVSSEQDEQLNSFENQVSYYKEYISSHPDYELAGIYADEGISGTSTKRRDEFNRMIADCEAGLIDMVITKSISRFARNTQDCLMYSRRLKDLGIGIRFEKENINTMDSTGELLFTILSSLAQDESRSISENCQWGIRSLFKRGIHHLNTNRFYGYDSDENGKLIINPEQAKVVKWIYESFMEGINPDVIVKILNEKEVPTCMGKSKWTCNQIKSILRNEKHMGDAVLQKTYTPDYLTHKSVKNEGQLPQYYIKEDHPPIVSQQLWEAVQLELDRREAFMKKHSLTSMGQYTDENPLSHRIICGICGHTFSRRTITRLEGRIKVWQCGQHYAKKGEHLCDGRTIREEYLYKAFQLAWDHLVEERDNKAKDWKKKMAEGNALEAYRAEQFLRLTAESGRIKEGKPLVSAVLDHIVFEKGGDLTIYFLDGSQVCVEP

SEQ ID NO: 23806 - protein, 537 aa, synthetic construct
MQIKVIQPSAERELERKKVCAYVRVSTDSDEQEDSYDNQMRYYKDKIESNPDWNFVGIYSDLGISGYKEKRPGFLNMIQEARNGGIDLILVKSVSRFARNTETVLKYSRELKRLGVGIYFEVQKINTLSGEGELLLTILAAFAQAESESNSGNVSMSIRRKFEKGELNFPISKIYGYTEDADGNPIIDEEKAKIVRLIFDLAEKGIWVTKISDYLNKKQIPGIAAEKWNYGQVAKMLRQEAYMGDRILQKTYRDSRRRTRRNKGQVDQWYVKDTHPAIVTREQWYRVQDVLLERNKELYDVTPISEEKNLSTHSTYPLSGMLYCPYCGRVLMHRWEGKKRYENWVCGLHRKVSKDACPGICIPNRIASSWGELKEPMTVLKYTDEYGMERFTAIPKVEYEASEDCPYEVTKPEPKPERPKKPSYKKAPKPETPRYTRNVYPLSGKLFCPNCGKVLTHRWNKGMEYWVCSTNRNKHRAENFVRCKGMYFPAEAAKDWGEITEPVTVIAYKNEYGHRLYTAMPKEEYEQSQDCPYRKED

SEQ ID NO: 23807 - protein, 513 aa, synthetic construct
MKKCVIYARYSSERQTEQSIEGQLRVCYEFAKNNELIIVHEYIDRAMTGTNDLRKEFQQMLSDSEKTNEWDICLVYALDRFGRNSIEQAINKFKLQKTGKIVISATQRTSRNIDGSQNLDGIILENMYVGMAEYYSAELSQKVKRGLNESRIKGQFTGGVPIFGYEAYGTKAEGRRVRIKEDEAVIVRRMFEEYASGRLIKDILDDLNNEGVLCHGKPFTRTTFYNLLKNEKYIGIVRFGDQVFDNIYPPIVNEQVFDICRAKAQANKIGKHTDATYLLKNKVHCGYCGRPVSSDTGTSKNGNVMRYYKCIGRKVDKKCDNVPIRKDLLEQLVIDSTYQVLATPDLIEKLAELILGAHKKRMADASILNILESQWQDTSTSIANLISCMEKGIVSNSTAKRLEELENQKTELETKIALEKVKESTLIQKRDIVNYLNQAIKKTPRLMIELIIKDVVLYKDRIEIHFNYTDLIRPDAEPRQALLFYKFTKEVVIDYHRMNCQPIKKNIEIKLYI

SEQ ID NO: 23808 - protein, 507 aa, synthetic construct
MKNCVIYARYSSERQTEQSIEGQLRICNDFAKQNGLQVLDTYIDRAMTGTNDNRPAFQQMLKDAEKPVMWDIVLVYAIDRFGRNSIEIAVNKQKLKKNKKMLISATQRMSENIDGTKNLDGIILENMYIGLAEYYSAELSQKIRRGLHESRQKGFCSGGRPPYGYYYKDKRVFINEEQANVVRYIFKEYFSGKIVREIINDLTEQGILYRGKAFAENTIYNFLRLEKYVGIARYDDGVYDNIYPQIVDKEVFDGVQAILAANKIGSRSPESLFLLRNKITCGCCGTHYQGDSGTSKNGTKFYYYKCMGRKKKHICHASVLKKDEFENLILEIIIKVFGTESRINYLADCVMAVYNDKLKEHSAVDLLKRDRDEVQKALDNIMRAIEQGIITETTQRRMKELEERKQTLNDKIVIAQYGESQRLTKQEIVEYLTHSLRQEPRFLLHILVKSIIVYDDKIEIYFNFTERKNPDDSDDTDSRDNNYVNCSDILPMCPPASARLGVVQEKV

SEQ ID NO: 23809 - protein, 528 aa, synthetic construct
MNRTVARSVTVIPPTINPLTHLSKVAVQKRRVAGYARVSTDSDEQFTSYEAQVDYYTQYIKRNPEWEFVKVYTDEGISGTNTKHRIGFNEMIADAMSGKIDLIVTKSVSRFARNTVDSLVTIRKLKEKGVEVYFEKENIYTFDGKGELLLTIMSSLAQEESRSISENVTWGQRKRFADGKVNLPYKQFLGYRKGADGFPEIVPEEAIVVHRIYTRFMEGLTPGAIAKELTADGIPTPSRKQRWQTSTVESILQNEKYKGAALLQKCFTVDFLTKKRKVNEGEVPQYYVEHSHEPIITPEEFDKVQTELARRKQISRQYSGKSIFSSRIVCGDCGSYFGSKVWNSTSKYRRVIWQCNSKFKGEHKCETPHLDEETIKARFVTALNAIIASKDNILEDCRLMQATLTDCTGIDKEIQTLLEEIDVVTELTKRCIAENSQTAQNQEEYAVRYNGFVERYEKAKAQLEQLRTTKAAREAQAEAIGAFMFEVQELDTITEFDEKLWLTTIDTVTVHADGRMTFKFQGGTEIEA

SEQ ID NO: 23810 - protein, 532 aa, synthetic construct
MITTKPTQIAMMKTVYCLYRVSTKGQVDKNDIPMQKQSCREFAEHQPGWVIKKEFQEQGVSGFKVSAKDRDAVQELKTAAENKEFDVLLVFMFDRIGRIDNETPFVVEWFIQHGIEVWSVNEGEQRMDSHVDKLMNYIRFWQANGESRKTSMRVKTRLHQLVEDGIYTGGCAPFGYKLVKSGVVNKRGKELLTLEIDPIEKEMVKTIFEKTVKDGYGSYVMAQYVNDRKMLTHNGAKFQSNTIKRILQNPIYCGFYKRGGVTSKRVAELQIIDDSVFDEAQKILAQRKYTNDEKTQISRTAKSSTMLGGNIYCAHCGKKLCANSFVDKYKTKDGTVHNGGRRYRYMCSGKAMKRNECDGQSVYSASKIDEIVLEALHKCFDKIKATPKDAAIEKKYKTQISQIKAEIKRMNREIETLKRKLGELTEEIANSLLGDSKFTPDILSMAIETTKSKIADNVQLIAEKQNQLNNKENDMSKIDYYYEEFVSWADEFDNAPNERQRMILCKLFKEILVGKGYSVQILMDSSYEQFLR

SEQ ID NO: 23811 - protein, 455 aa, synthetic construct
MKYVACYCRVSTDEQARFGFSIQAQKDALEKYCKENGYKYEFYIDEGISASSMKKRKALNEMLSKSSAFDMVLFTKLDRLSRNVLDANNINKLLIDNNCTMKAIDEDDIDTSTADGTFIFNLKVSLAQREIGKTSERINFVFKNKREKGEITSGTKKYGYDIVDKHFVVNEKEAENIKNLYKEFINNNGNLKETYKYFIQHFEGKGYDAMSNYLKETAYIGKYKLYRKNIYIDNYIPAILDIEIWEKVQNLRKKKTVGRKITYPDLFSGLIYCHNCGNRLAKKTDYRVKNIVVRYVCDNSYRYKVGIDEKHCTNNKVIKEKDIENYLLNNLDKELSNFIAKVSVIPNTKKINNTPKIKSLEKKINKLKDLYLDDLINKETYAKDYKKYTSELLSLKNTTTQEPLKKDYSHLKQILNSDYKKIYNELNKTNKKKFWFSFINKIYVENGEIKEITFL

SEQ ID NO: 23812 - protein, 463 aa, synthetic construct
MRRKTTAPVEKILLRVAIYIRVSTDKQVKDGDSMRDQLATGQKYIDSHENMILVDTYIDDGISGQKLKRDDFQRLIDDVRAGRIDLIIFTRLDRWFRNLRHYLNTQDILYKHGVSWTAIEQPYFDTSTPHGRAFVNNSMIWAELEAQNDSDRILGVFDDKVDNGEVLSGSTPLGYKIVNKHLVPDDDAPTAVAIFQYYRKTGNLSMTLRYMESEFGLVRSAASLKNMLTNTKYIGEFRDNKNYCPAIIDRDLFFDVQRLLKINIKSGKKHDYIFSGLVVCDDCDHIMSGCQQRARGRVRADGTRIIYKYSVYRCRQGVNLHRCPNRKLVFETTLEKMLLERIRPELENYIAEYEVANLPALRTDAKRRSVEGKMQKLKDLYLNDLITMDEFKLDREKLLMQLEKINAEDSRPVKDLSYLKNFLKMDFESVYDSLSIPERRELWRSIVKEIRVDHDKNIHIIFL

SEQ ID NO: 23813 - protein, 482 aa, synthetic construct
MRQGAVYIRVSTDDQTEYSPDAQLKRIKEYAQNHDILISQEYIYIENGVSGRTVAKREQFKKMIQKAKEKPKPFDIVLIHAYDRFARNVKESRIYKELLRDDLGIELISITEDFGSGKNSFLMEGIKDILNEYYSLNLRDEVLKGMYEKVSRGEVCGKAVLGYNLINKKLIINEEEAKTIKLIFNKYAYDNLGLLDIAKLVNQMGLKTKTGNKFENRTIKYILRNPVYIGKLRYSKKGKVDYHTYAVIKEEELYDGIHERIIDEETWNTVQKRLDKNILFSIPHKIDTINADYWLKGIVRCPYCNCTMIRHQKVNLRCNGYGKGKCHNKNTINLKFLEKLVLNQMKQDFDGKKISLNTIKIKSNECNERDIIIRQINNTEAKFARIKEAYVDGIDTLEEYKKNKEIISREISILKERLDKIEKPKEVPKDNLKLKIKDIYDLLTNEKVEMSVKKNAVHMLINKIVIDEKNMKILLTYNESPF

SEQ ID NO: 23814 - protein, 525 aa, synthetic construct
MWMLPQMSVDDIIMYLRKSRTDDPALTVQEVLSKHEQMLDDWVARNIPDDGRRIPESNRYREVVSGETIESRPCVQEVLRRVESPRVKAVLVVEPQRLSRGDLEDIGRLVKLLRYSNTIVITLQYTYDLRDERDRDMFERELKRGNEFLEYQKRIMGNGRLLSVQNGNFIGQKPPYGYNKVVIKEGKRKCHTLEPDPERAPIVKMVFEMYAGGTSASQIAKTLRTMGVTTADGGKWVTSSVKQMLTNDHYIGMVHWNKRKTVKVVEDGEVVATRPRNSDFLVYPGKHQPIIEKELWDAVQAIKGNIPPIKNRAKYANPFAGLVVCQCGGKMVRQQYVRDGVERCAPRLVCPNQAECHTASCSLPEFTEAVIEALEKGIKNFELMMADAPEDDATQQERLIAQLEKRLAELDRLELAQWDKYTQEAMPKHVFDALNKKVVQEKEETLQALKTAMETVPIRVDYEKKRETFAAAVRTLQDPNASVKEKNLLLKQCIERINYNRKPKESDNRRFGNPEPLELEFQFKV

SEQ ID NO: 23815 - protein, 505 aa, synthetic construct
MLKYDAIYARQSVDRMDSISIESQIDFCKYEARGGEYRVFQDKGYSGKNTDRPNFQIMLEAIRRGEVKRVIVYKLDRISRSILDFATMMAEFQDNGVEFVSCTEKFDTSTPMGRAMFNICIVFAQLERETIQQRVTDAYISRSRKGFYMGGRVPYGYQLETYTIDGKKTSRYTIVPEEAKIVKVIFSMYAVPQTSFGDIVHYLVDNGIPNARGKGQVWDRARISDMIKNPIYVKADLDIYQFYKDQGSIVHDDPCLFIGTNGCYLYSEKGAGRKTIHLEGQHVVLAPHEGIVPSDIWLKARRKCLNNMQVAKPLKAKNTWLAGKIKCGKCGYTLTIRKSNTQIGRYFICSRRMQTNFCEGVGGIDATAFENLILSEMKKKVEQFDVLNAPPQMQNNPRIVELGTQIEQIETEIEKLLDRVSEADSVLMGYINKKVSELHNQSSELKREMNELEQAIIQPKLNVKQIRNCMQHWEKLEFDDKRAVVDQLIAVIKATENTCEITWKV

SEQ ID NO: 23816 - protein, 534 aa, synthetic construct
MAEGQRVVRTIPASFTKSVSSFARVINVGAYARVSTKKEEQEDSYERQVNHYTNYIKHHEGWNYVDIYADEGITGTRAEGRKDFQRMMADCRLGKLDKILVKSIARFARNTVDALNAIRELKELGVSVYFENENIDTLSPGGEVLITILAAMAEQESRTISSNIKWAYQKKFQNGDILLNYTRFLGYTRDEDHNLVIVPEEAQVVQRIFREYLYGYSMAQIAKGLTEDKIPTPSKKKKWYPSVIQSILQNEKYYGGLICGKTYKPDVLSKKRYKNEGQVERYYIENSHPAIVTREEFEMAQAELRRRKTISGSSATEQGKYSSKYAFSKKLMCGVCGAYYRRHAQYCKGEYIYTWVCPTHKLKGSDVCKQTYLKETEIEQAFVDLLESMVGDYDTISAQLKENILSSMDEDVSEELTRTMEDIERLQIEMLELLRRKRKGEIDTKEYNERGAILERQIQSLTEKRAALEEKSTASKLAIMRVDQVMQALQSAGNIEKNNGELFRAMVDVVVVRNTYTLEFHLKAGITESVTIQR

SEQ ID NO: 23817 - protein, 495 aa, synthetic construct
MKKAAAYARVSTTGRAQEHSFEFQSRYWNQVLGNSEEYEYVGLFADKGISGKFINRRPRFLALMELCDRKGVDIIFTKSVQRFARNTEELLEIVRRLREKGIAVYFEKENINTLNSDSELYLTIAAAIAEEDLTRYSNNVAWSIKDRFERGEMILGPRLYGYRKTKDNRLKVHPEEASVVRYIYETYIQGDVSTVKIADELTKRQIPSPNGGEWRNSQVLYILRNEKYYGDMILQKTFKEGGTKYVNKGERVRYYVENSHEPIVSKDVWEKAQEVIAKRANAKLIGAQQKTYPFTGLIVCGCCGSIYTHKVNNSGTISQANFWKCRTALKKGVAYCNNTGIKEKVLNDLFVECYNEFITKGYHRVVKDSGDDEQRLKELHDAEKELTKLMMGGMITRAQYSEEQQGIRIEMQEIKSRMQESRYREVQGSNFSTIREFDEQKVYSFIRGVRIKNWTVTFEFYNGVEISRTYTNGKPGNIRDWKIKQMQRRREQENG

SEQ ID NO: 23818 - protein, 488 aa, synthetic construct
MKKTRAVAYIRVSTERYAQLHSYEFQEHYWQSAFEDDPNTDLIGIYADKGISGHSVQKRPKFLVMMQDAREHKFDKIYTKSVSRFARNTTQLLEAVRELRDLGIEVVFENENIHTFQPTSEIFLTIAATIAENDLEVDSARQRWSIQHRCENGWISVGSGLFGLKLTADNELEIVPEEAAVIRYIYESYVDGGIGSKKIADTLNAAGVQSRNGYPWDAKHIIGLLRNEKYKGDVIMGKSVRHFGEYHKNPNAEYAPRYYMEGTHEAIVDRDTWEAAQRILEERSRNHCRTRIAHSFTGMIECGCCGKNYLHKVNNSQCKWQTDIWACRTYLRDGKKACGNSRIKDTVLKEKFISAYNEFIERRPQGDSMVALQEVLEDLRQQEQELAELMMQRLIPKAAYEEERKSVKMQITDISEKISERRAKRVPESEYVPITEFSEEKAKRFLSKVVVTMFTVTFVFYNGAKITRSYDNGQPGNKVGWNKKKEES

SEQ ID NO: 23819 - protein, 540 aa, synthetic construct
MATATRRVVRTMPQMFIDVADNQSERLQVAAYARVSTEKEEQEDSFERQVEHYKQLIYSKPEWQFVDVYADPGISGTRAEKRPDFLRMIEDCRAGKIQKVLVKSISRFARNTVDALQYIRELKDLGISVYFESENIDTLTPGGEVLLTILAAMAEQESRTISSNIKWAWQRKFQKGDVILNTGLMLGYRKIGKDDEGHDVYEINEEEAEIVRRIYREFIAGYSITQIAKRLQADGVKTKLGKENWRHNVIESILTNEKYTGNALLGKTFKPDVLTKYRQKNDGKKAPIYYVEGSHPAIIEKGLFDLAQQEMQRRRDANDNKVGGGRYSSRYPFSGMLVCGICGSKLRRQVRTMGSGKRTASWGCCNRINNGRAACDSHHVNEDVLEATYLTAMRRLVDSAEEVVEVVRDGTELALEPENKAAMERIDEETIQLQEAALALHKAKQRMEIGAVEYASRVKEYSERMKELEAERIELQGTAAKYAEVRMWLDTFIEQTMQSDTLTTVDGTTMKMLVDRIHVRNDGIVVEFKCGVAIEQEYVK

SEQ ID NO: 23820 - protein, 692 aa, synthetic construct
MSRKQESITTNERASSCFLYVRVSTKMQVENGESIEAQLYDLRDYAKRNNLRILHEYIDDGYSGKNITGRPHFQEMMEEIKSGVRVDYVLVFKLSRFGRNAADALSSLQLMQDYGTNLVCVKDGINSEAQMGKMMIAFMSAFAEMERENILVQTMAGREQKAREGKWNGGQAPYGYKLVKDEKGKGHLEIDEDEAEIVRIIFREYTKNGKGVMALASWLNAQGYRKNVRGNGKYEHFVPTFLKNVLRNPVYVGKIAYGRRRTTPVNGKRNEYRIIKQSDYDVYDGEHEAIIDEATWHAAQERMAEESHPFPEAKTGEHVHLLTGMLICPVCGRKMIANVSHGKRKKDGTVGKSTYAYACKYSKKQFGPSCTFTRQFKQEYIDREVIEVIARAAYSDVFEERVRDELDAAVDIEKLEADVERIGKALDNNKAARRMLSRKLDSLDVSDRSYERKYEDMQARLDKLYDECADIEAAFDDAESKLESAKEKQVTTARIYEMLDEFREHFDEYDPVRKKEILRQVVDSVEINPDANPKKGDTIVTRVRFKCPVSFYPTLPEEAYAALGIKEFNRLETTEYVSEKNSRVDEDTVETVALLTREKSVKSYAYVNISPSELGMGGKVKKPTYKQIKEYVLKTHGLKVSSLYIANLKDELGLDKQFSYEEAEMSAEKRPKCPPEKREAILDAFRHFGMID

SEQ ID NO: 23821 - protein, 584 aa, synthetic construct
MEKKVIALIRTSTIQQEIDSQREEVLSLILADGYSMDEIEVVGEKGASAIKMDEAYLKNINRVYELIEKEPIKAVYAWAIDRIGRDVELLQSFRKKLVNSGVDLVIRTPSLRLLNPDGSANGAVGLAFSLFAEMAQQEMEQKKARFMRAKKRNSEAGKANGGAKNIPFGYSKDANGYFIINEEEASVVRLIFELHNSGKYSLNKLALELNERGYSHRGKKFTNYFLRMFIKSTVVIGYSDVYKPKTGWKVKRIYPQIISKEIWEKAQTVLLANQTSTYKGTKHYYLGAKLLKCTSCNSNFSTDGNQYRCKKNHHKIPLQQQGLDWCDNNSTILTAVFDGMLWSLTKEKHLNFLLKEKDVTEGRNKKQIEVNLQKIAAHRVALEKADERRAKVIDDYYSDRITEAERERYLAKFTKDKADAENAIANLENENITLQRQLDSLAELSYNSILKLTASISSMTDEKEMYELVHQYIKMVTLNRTTIDGKGCSILTFYFFDGTIETLYYFSKNRKQAIYKRGKMDKRLRYAFTDSEGNSYIPYDADRLERDKEGNIIELEISSIKITDEVANKTMTEELLRQREERNK

SEQ ID NO: 23822 - protein, 526 aa, synthetic construct
MPKVTMIPATINPLTHLPSVAARKRRVAGYARVSTDSDEQFTSYEAQVDYYTKFIQSKPEWEFVKVYTDEGISGTNTKRREGFKEMIADALDGKIDLIVTKSVSRFARNTVDSLVTIRKLKENGVECYFEKEGIYTFDGKGELLITIMSSLAQEESRSISENITWGQRKSFSDGKVHLPYKRFLGYEKGEDGRPAVVESEARVVKLIYGLFLEGKTQAGICKYLEELGIPSPGGKQTWSKTTITSILQNEKYKGDALLQKKFTVDFLEKKMKPNEGEVPQYYVTGSHPAIIEPDEWEQVQAEFARRKTLGKAYSGKSVLSAKLVCEDCGAFFGPKVWHSTDQYRRTIWQCNGKFANEERCHTPVVDTETIQRLFIKAYNLMMQDRVQIIKQCEAWRARLMDFGTLDADIERQLEETQVVAELVKAAVKENASTAQSQEAYLKKYEALTERYEKAAAELKRLQSLRTARSQQDKKMALYIRTLKKQPEVMYDWNDTIWTVMIEKAIVHKDGQITFVFQNGTEIKVGA

SEQ ID NO: 23823 - protein, 433 aa, synthetic construct
MPRTITIVPKPPKLEQKKRVAAYARVSSGKDAMLHSLSAQVSYYSDLIQNHDDWLYVGVYADEAKTGTKESRADFQRLIADCRAGKIDMVITKSISRFARNTVTLLQTVRDFKAWEVDIFFEEQNIHTMSGDGELMMTILASYAQEESRSASENQKWRIKRNFEEGMPWNGAMLGYRLKNGRYEIIPEEADLVRRIYDEYLSGDGYLTIAKRLNEDGIPSRFRKQWGQSVISKILSNYTYTGNLILQKTFRENHITKKTVINNGELPKYHAEDAHDAIIDMESFQAVQAEKARRAARFIKKPIPKKTYPFTSLLVCDGCGKNYRRKVTKTGPVWVCGTFNSMGKAACASKQIPEETLQAVTAEVLGQVDFPEELLRRLIKSILVCNENVLIFRFYDGSEVTRKWQDRSRSQSWTDEMKATARQKALERRTQNA

SEQ ID NO: 23824 - protein, 464 aa, synthetic construct
MARSVTVIPARSQKVQTGHKAVQEKKIRVAAYCRVSTDQEDQLHSFEAQVEYYTKYINEHENYEMAGIYADEGISGTNTKKREQFKKMIADCEGGKIDLVITKSISRFARNTQDCLAYSRKLKNLGIGIIFEKENINTLDSTGELLFTILSSLAQDESRNISENCKWGIRTKFKNGEMHLNTFKFLGYDKDENGKLVINKEQAKTVRRIYRDFLIGINPAQIAKELTEEKVPGCLGQTKWYPSTVTGILKQEKHMGDALLQKTYTADFLTKRQVRNNGEIAQVYVKDSHKGIIDKQTWNAVQEEFDRRERFMESHGTDRYSYGADCMPFCEKVFCGECKSLFTRHSWRSRGIVQWQCKNHRKDGKVACTNAYVDNADLEKGFVKAFNRLVTDRDKHMERWQQMKSDGTPLEKIRAGQMMEAVGNEPLTRFVPEIAQLVLCEVTVLGAKKYEFFFLEGSRVKVSV

SEQ ID NO: 23825 - protein, 502 aa, synthetic construct
MEIQIREGNSRQKRKLKVCAYCRVSTDADEQENSLENQIRHYEEAITSNPDYEYAGVYSDFAISGFKEKRPGLQKMLADARKGKIDLILTKSVSRFARNTSIVLEATRKLKELNVGVFFELQNINTLSGEGELMLTILAAFAQAESESGSVGAKMVYQRKYEAGIPVQYLERSFGFKKDERGVYIADEEEAVWVRKIYEMAADGYTPASIKRHLNENGVKTVGGAEWIDSTVFRLIENEIYKGDYIMHKHFVNEERKLVRNRGEVDAWYIEDDHEAIVSPELWQKAQDALEAKRDYLAEGSVIEEFTEENYPYMNKIFCARCGHPLYKRIYSNGNRLNWGCSGTKRYGKSFCEGINIPDGVLRGAWNFDENMYIGEKPTDKGKKEFTYLKEASWKRRHKKKEPEPIPENTETEYPYREKIFCGLCGSRLVRHVNTKSHKVIWVCNGRKRKGKDFCDGTRVPDTIIKGWGEIKKDIYIQRKDDKNGKKRYSYTSKKPKGADRA

SEQ ID NO: 23826 - protein, 521 aa, synthetic construct
MGNVMIIPAKRQVGNTSRRQEDKPKLRVAAYCRVSTDSDEQASSYETQVEHYTEYIKKNPEWEFAGIYADDGISGTNTKKREEFNRMIEACKTGEIDMIITKSISRFARNTLDCLKYIRMLKDKNIPVFFEKESINTMDAKGEVLLTIMASLAQQESQSLSQNVKMGLQFRYQNGQVQVNHNHFLGYTKDREGNLVIDPEQAEVVKRIYREYLEGSSMDKIAKGLEKDGILTGAGKKKWWTSTINKILRNEKYIGDALLQKTYTTDFLNKTRVKNNGIVPQYYVENNHEAIIPKDIFLRVQEELVRRRVVKTSANGKKRSYSCNHCFAQIVICGECGEMFRRLHWNNRGVKSIVWRCISRLESTGLECHARTINELVLQDAVVKAINQMLGDKSNYQAQLQLNIAAVIRASQATSVEKIDEKLMALQQELIQKAQSKEAYDEIADEIFRLRELRQQTTIDTAARDEQIKRINDLQDYIAQQTTHLTEFDESLVRRWIKQITIWDDHITVELKSGVSIDVDV

SEQ ID NO: 23827 - protein, 528 aa, synthetic construct
MNRTAARSVTVIPPTINPLTHLSRVTVQKRRVAGYARVSTDSDEQFTSYEAQVDYYTQYIKHNPEWEFVKVYTDEGISGTNTKHRIGFNEMIADAMSGKIDLIVTKSVSRFARNTVDSLVTIRKLKEKGVEVYFEKENIYTFDGKGELLLTIMSSLAQEESRSISENVTWGQRKRFADGKVNLPYKQFLGYRKGADGFPEVVPEEAIVVRRIYTRFMEGLTPGAIAKELTADGIPTPSRKQRWQTSTVESILQNEKYKGAALLQKCFTVDFLTKKRKVNEGEVPQYYVEHSHEPIITPEEFDKVQTELARRKQISRQYSGKSIFSSRIVCGDCGSYFGSKVWNSTSKYRRVIWQCNGKFKGEHKCETPHLDEETIKARFVTALNAIIESKDNILEDCRLMQATLTDCTGIDTEIESLLEEIDVVTELTKRCIAENSQMAQNQEEYAARYNGFVERYEKAKAQLEQLRTTKAEREAQAEAIGAFMFEVQELDALTEFDEKLWLTIIDTITVHADGRMTFKFQGGTEIEA

SEQ ID NO: 23828 - protein, 434 aa, synthetic construct
MERVVERVDALIPAQPRALRVCAYARVSTGKDAMLHSLSAQVSYYSKMIQSHNGWMYCGVYSDEAVTGTKRERAGFQHMIEECRQGNIDLVITKSISRFARNTVTLLQTVRELKNLGVDVFFEEQHIHTMSADGELMMTILASYAQEESLSASENQKWRVRKAFESGEIINLRFLFGYDITPDGIQVNEKDAAIVREIFARFNSGESMSSICRDLDARGHKGVLGGTWCAERMRNTLSNEKYLGNALLQKQYRNNHIEKKLLPNRGELPMYYAEGTHDPIIDQATFDKAQERLRMLAQQAANRKKPTRSVFSGLIHCGLCGNTYKRVTYRKKHYWNCTTFQTKGKSECAAKRIPEETLEVLTCEVLGAVSFDTDMVRSKITAIRAEKSNMVVFCMDDGSEIVKRWTDRSRAESWTPEMKEKARQWALQARRKKE

SEQ ID NO: 23829 - protein, 525 aa, synthetic construct
MPTERKKKTTKEENAKNNSTKNTIKKPRNSTSNTKSKKESKSLLGLKDLMEDTSPEKVVGCYVRVSTDAQAEQGYSIPDQTAKLQAFCTVKGWENAKFYTDPGFSGSNLNRPAMQEMISDAMEGKLKAVVVFKLDRLSRSQKDTLYLIEDVFLPNEVDFVSISEALDTTTPYGRAMIGILSVFAQLERENIYMRTRIGMMGRVSAGYWRGGGKVPFGYDYDKESKSLIPNADAPKVPQAYDLYIKGYSCQKIADMLGLSCEQLVRNILTKRTYCGYINYKGKDYKGFHEPLIDEERFMLVAAEMERRGKENLAVCGNNKYYLLTGLVFCGDCGARMRYMKWGKYIRIVCYSHTCKKNMVKDPDCPNKGVRAEELEKVVVSKLFDIGTDISLDDFDDTHVPASAAEILTNRIDELKESLRRLYGLYADIGDPMVYERIEDVRGQLHVLQRQLASEETQKLKEEHINYVREKIQTIGDLWPHLTPMERQTLVRDCVEKVILHHNGRVEVYYTFHTEKDSKILKRKGA

SEQ ID NO: 23830 - protein, 502 aa, synthetic construct
MEIQIREGNSIQKRKLKVCAYCRVSTDADEQENSLENQIRHYEEVITSNPDYEYAGVYSDFAISGFKEKRPGLQKMLADARKGKIDLILTKSVSRFARNTSIVLEATRKLKELNVGVFFELQNINTLSGEGELMLTILAAFAQAESESGSVGAKMVYQRKYEAGIPVQYLERSFGFKKDERGVYIADEEEAVWVRKIYEMAADGYTPASIKRHLNENGVKTVGGAEWIDSTVFRLIENEIYKGDYIMHKHFVNEERKLVRNRGEVDAWYIEDDHEAIVSPELWQKAQDALEAKRDYLAESSVIEEFTEENYPYMNKIFCARCGHPLYKRIYSNGNRLNWGCSGTKRYGKSFCEGINIPDGVLRGAWHFDENMYIGEKPTDKGKKEFTYLKEASWKRRHKKKEPEPIPENTETEYPYREKIFCGLCGSRLVRHVNTKSHKVIWVCNGRKRKGKDFCDGTRVPDTIIKGWGEIKKDIYIQRKDDKNGKKRYSYTSKKPKGADRA

SEQ ID NO: 23831 - protein, 463 aa, synthetic construct
MARSVTVIPARNRQVSGYRAAPQKKIRVAAYCRVSTDQEDQLHSFEAQVDYYTKYINDHENYEMAGIYADEGISGTNTKKREQFKRMIADCGKGKIDLVITKSISRFARNTQDCLMYSRKLKNLGIGIIFEKENINTLDSTGELLFTILSSLAQDESRNISENCKWGIRTKFKNGEMHLNTFKFLGYDKDENGKLIINREQAKTVRRIYRDFLWGLNPAQIAKELEEEQVPGCLGQTKWYASTVIGILKQEKHMGDALLQKTYTADFLTKRQVKNNGEVAQVYVRDSHKGIVDKETWNAVQEEFERREKFMQKHGTDRYSYGSECYPFCEKIFCGECGSLFTRHSWKSRGIIQWQCKNHRKDGKVACTNAYVDNADLEKGFIKAFNRLVGEREKHIERWNSMKLDGTPLEKIRAGQMMEATESGQLQQYVPEAAQLVLEEITIFGAKKYEFAFLEGSRVKVPV

SEQ ID NO: 23832 - protein, 521 aa, synthetic construct
MGNVMIIPAKRQVGNTSRRQEDKPKLRVAAYCRVSTDSDEQASSYETQVEHYTEYIKKNPEWEFAGIYADDGISGTNTKKREEFNRMIEACKAGEIDMIITKSISRFARNTLDCLKYIRMLKDKNIPVFFEKESINTMDAKGEVLLTIMASLAQQESQSLSQNVKMGLQFRYQNGQVQVNHNHFLGYTKDREGNLVIDPEQAEVVKRIYREYLEGSSMDKIAKGLEKDGILTGAGKKKWWTSTINKILRNEKYIGDALLQKTYTTDFLNKTRVKNNGIVPQYYVENNHEAIIPKDIFLRVQEELVRRRVVKTSANGKKRSYSCNHCFAQLVICGECGEMFRRIHWNNRGCKSIVWRCLSRLEATGLECHARTVNEKVLESVVLEAINRLLGDKAAYQAQLQQNIAQVIRDANKNTSEKIDEQLMALQKELLQKANNKEAYDEIAEQIFKLREQRRQNTVDTTARDAQIERITALQDFINQQNAMLTEFDETLVKRWLKQIIVWDDHFTVELKSGLKIDIEG

SEQ ID NO: 23833 - protein, 519 aa, synthetic construct
MKKVTKIDKIQPAKNAENKLRVAAYCRVSTATDAQLESLEAQKSHYENYINSRDDWCFAGVYYDEGITGTKASKRPELMRLLADCKAKKIDFVITKSISRFSRNTMDCLEIVRTLLNLNIPVYFEKENINTGSMESELFLSVLSTMAEGESASISSNNKWSIKKRFENGTYRLSSAPYGYKLESGGLQVVPEQADIVKRIFRELLSGKGMYSIAKKLNAEQVPTQKGGRWTSTSVHNILTNEKYTGDCIFQKTYADSNFNRHINNGELNRYLIQNHHEAIISHEDFKAAAALIEQRAAEKGIESGSDKYQKRYAFSEKLICGECGNTFRRRIHKGKYNSYVAWVCNTHLSDTNRCSMLFVRDDALKLAFVTMLNKLIFSYRLLLKPYLAAMQSNTADEALLRIQYLENQLDQNAEQRSTLHKLMAQGYIDQILYTQECNELLLQARDFRSEIEALNNTVAGDTTKVYETERLINYCKRGEMLTDFNESLFELFVDHILIYSRQKIGFILRCGLTFEEMI

SEQ ID NO: 23834 - protein, 453 aa, synthetic construct
MECVAYMRVSTEKQAVEGNGLDSQKRDIENYCRKNELVITDWYIDDGYTGANMDRPGLQRLVNDCSRKRVSCVVAFKLDRLSRNMIDGIYLIEKVFQKCNVVFKCVHDSVNYDSPMEQAYTQMMAVFAQLDKNTMMLRMRGGMLERIKQGYWMGGGNLPYCYSYSKEQGILMPIPERAEQARKALELFISGYSDVKIKEICGFKSELVTRNILTGIVNIGMIPYKGKIYQGKHEPIFDKGRFNLAQELRKTRAKSRATCQTEPNLLTGLCYCGVCGCAMRYQKWTNGEHKIYCMSRNKSMSYLPNYNANCNNSLEWADDIEKQVEKEILKISLNLSSYKPKEKATKLEIMQSQLDKEQTKLKRLYNLYADGNDTVLEMIKESESLVKTMKANVLSESKSTANTQKKEFVYENIKKLADVWNNIDKKKKNMILKTIIDKIVIVNGNIEIQLKNF

SEQ ID NO: 23835 - protein, 481 aa, synthetic construct
MKNENIRSNVSIYMVDLYIRVSTTEQAMEGYSVGEQENRLRRFCEALGYQIHKIIIDPGYSGASLNRPGIKEVIRDVQEHLVSKVIVWKLDRLSRSQKDMLIMLEDVFLANNCDFVSMLESFDTSTAFGRAIVGILAAFAQLERENIKERTTMGRQARLAKGHYNSSRPPLGYSFLPGCNDLKVNPYEASIVREIFSLFISGTAINAIATIMKQKYPTVRRWNNTTIRRTLRNSVYIGKVSDVDVTRDGIHESIISDSDFNMANSILQHNAEIKKQSCRSKSLLTGLLYCGDCGARMQPRTISQGYPLRRYVCYSVSRTSKAMIKSDHCTNRLHPYTQEELDNIIINEIKKLAVDQKYLKSIIQEDAAPVLNESELCQDRLTELDKQTDKLLNLYQIGAVDLPQIQDRLTALKQERNSLLQTLDKVSAEMPLNVQQVQNYAAAFQEALENEDYDQINNIIRLLIDKIVVLNENIEIHWTFC

SEQ ID NO: 23836 - protein, 521 aa, synthetic construct
MKTVTKIEANQRTTGSEKKLRVAAYCRVSTGSDDQLESLAEQKKHYETYIQAHENWNFAGLYYDEGISGTKKEKRSELMRLLSDCEAGQIDFIITKSISRFARNTTDCLEMVRKLLAINVAIYFEKENINTTSMESELVLAVLSSLAEGESVSISGNEKWSIRQRFQSGTYKMNPPPYGYIWNGEQLEVNNEQAEIVKRIFAEFLSGKGVMNIARNLDSDNIVPARGKHWCQSSILRILKNENYTGNAVFQKTFTDESFRRCVNYGQLDKYLVADHHEGIISKADFEAAAALIDRHSVEKNVTKGSHKYQLRYCFSGKIVCGECGATLKHRTHRLGGETYEAWCCSTHIYNKESCSMKFIRDDDIKLAFVTMMNKLVFGHKLILKPYLLTLRSSSTDSSIQRIQQLRLLIEQNTGQQETLTRLMANGFIDRALFGRELNAIMAQTDEYRTEIDTLSSSVTGDGAKLKETERLIKLVERGRMFTEFDADLFSKLVDRICAFSRNEIGFALKCGLTLRERIGE

SEQ ID NO: 23837 - protein, 521 aa, synthetic construct
MSNITIIPARPQRTNQQQSEAEKPKLRVAAYCRVSTDSDEQATSYETQVTHYTEYITGNPEWSFAGVYADDGISGTNTKKREEFNRMITDCMDGKIDMVITKSISRFARNTLDCLKYIRQLKDRNIPVFFEKENINTLDAKGEVLLTIMVSLAQQESMSLSQNVKLGLQFRYQRGEVQVNHSRFLGYTKDENGRLVIDPEQAEVVRRIYREYLDGYSGDKIAAGLERDGILTGAGNPHWHTSTIAKILRNEKYMGDALLQKTYTVDYLSKKRIKNNGIMPQYYVENDHEAIIPKEIFMRVQDELVRRRLVKVSPNGRKHGFSSNHVFSQMIVCGECGELFRRVHWNNHGCRSIVWRCLSRLQSTGVVCHARTVNEEVLKKVVMQAFNELLRNKSAYQKRLRDNLAVVLCGYSDDEALEIDKRLAELQQELINHASRKEDYNDIADEIFRLREMKQKNFTDTAVRDEQVKRINELNDFISQQDTELTEFDESLARRWLKEITIWSDRITVELKSWMSIEIKI

SEQ ID NO: 23838 - protein, 641 aa, synthetic construct
MNNNNVEIIKPTLKTICIKQNREIKLIRACAYCRVSTDNEDQKTSYESQRIHYKNMIEENPNYEFVGIYADEGITGTQTKKREQFNQMMNDAINGKIDLIIAKSISRFARNTVDTLNCVRLLREHKVDVFFEKENIHTLCLSNELFLTLYSAFAQAESESISENVKAGVRMKMKRGGMVGKYAPFGYLYDKEKDIIHPDESKKDIIIYIFEEYSKGIGFRTITLNLNELGIPSPTGRKWCHASVRRIITNEKYVGDLRSGKYYSDNVISHKRKVNYGEKEQYFTSNHHEGIVSRELWNKCQELLEKRSKIVKPDGNRDKFSRKYPFSSKIYCGMCGERFIRRSYKIRSNNKEIAYWVCRSHRNQIECSNLLHYKQEELEDIFIKVYNKLFENKDKYINTFIKKIDEVINENNNFNSDKIKENILNLQNRLSNLIDLKLDNKISQEILNNKEIEITNKIKELENKLADNKDLELSRRKKLEQINNITKTLKQYKGLTKFNEDIFNNLVDRIIIGEKLDNGIEDLYKIKFILKTGEMIKDNLPNNKFKIGSDMGHYGFSINKQLLEIKEDNVSAYVLCKNSYINTTSHSFPPFIKFREILKYLSYVSSQISKMYSLKLKFFQKLCNFFKIILLIMFLNIKWLI

SEQ ID NO: 23839 - protein, 510 aa, synthetic construct
MRNAGIYIRVSTERQAQEGYSVAAQKQNLISFAKTSNFKVYDVYADEGISGKDVEGRPSVRRLIKDIQDGKIDVVLIQKFDRLTRNLTDTEDFIQLFQKYDVDVWSISDGKVDISNSNGKFMTLLKGLFAQHERELTSERIKVAFNQKAKQGYTLCCACTPYGYNRKKGNKVIIINQEEAKVVRRIFKMYIEGTSFTTIAKRLTAEGIPTKRAGDTVNIGRNGEIVGTKTFVGVWSPKLIRLMLSNPVYIGKVQYGIGRKDYYIGDGKHKPIISEKIWNKVQDNLSKIETKVHTNRPKDDVYFCGTLVCGVCGKRLTTARTIGRLRKDGTRNLFNAYRCVNQEKQICTARYVSHLKAEEAFIEYLKNNIAEFDAIDDLVIEEEDIDLEEIENIKKLLVNKRAKQKEVMDLFMAQKIDYNQFKYMSEELDSIIQVNETRLSRLEQVYTKKPDINKAEISRYIVDHWKLLTDKEKLNFLNEFVESITIVNRDTDRHNGKAEVLDIKFYGYQQ

SEQ ID NO: 23840 - protein, 518 aa, synthetic construct
MVIAIYPRKSVYRDNSDSVQVQVQMCKEYAGIIYKDKETQFRIYDKDEGFSGKNMNRPSFKDLMQDVKNNEIDVVMVYKLDRISRNVQEFSAMYEVFQQHNVSFVSVKESFDTTTPMGRTVMYILAAFAQLERENTSERVADNMQALGVSGKWTGGKLPTGFTSVRRQIGAKEHSFLMVDKNTIGLVKTLYGLILGGFSITKTERYCRDNGIRSQSGKFLNTSQIHGILTNPVYCQNSMEAYYYLQEKGCTLPDPALFDGTKGLIGYGRTKTGKTSQKIQSMDNWIIAVGIHDPVMPASDWIAVQKRLGTNKAVRTAKHECGILKGVLRCRCGARMEVRTYIKNGITFSYYFCADMARQGKQKCNTGYIRVEEVEKCFLRQLRSIRFNPDGFKLRRQSDGLVDTKTLRKDIRTAEESIRNLTAALAQAMDTAASGYIIGRIAELDKQKNALEISLRKAETRALAEKSIADTEREIYGGICYLLDNFNEISYTGKNELIRKIIKNCILDTESKSLRIIF

SEQ ID NO: 23841 - protein, 561 aa, synthetic construct
MNDRKIIVIPRSVKPPIDIATGERRKKRVTAYARVSTDMEDQKNSLETQKNEYTKRIKENPNWEFVELYFDEGITGTNTKKRDGFNRMIKDALNGKIDLILVKSISRFARNTVDCIATKRALQDKGVEIFFEKENISSLDSSSETMLTIYASFAQEESRQISTNVTWGIRSKMKQGSYNGYSKKILGYKKGENGNLEIDEEGKKTVLLVFEMFTDGYSYREIIDTLIRENKKNAKGEVKWDVGSIHRILTNEKYCGDLIYQKTYCNNYLTHERRKNDGEVDQYLIPEHHEPIIEKDLFMFVQLLLKERKKNYNPRKSNRNTTPLTGLIYCAACNRPMRRILYYKGKPYERHVLTCKVEGRKNINYSECPQKETLDYSLVEKTASIILKEKLEKLNKDVLMNGIAKGKLISDFITLSESLNEKLKTLKTESRNLIQNQASAPLPLALYQEKFMEIENKKKELKDKQKHLIKEALDNSEKEKNNKDLAGFLGKKSTFTADIASTFIKRIYRLIDNSVLFIISQNEVTEDQFKELLNNKEITQNLTRKTIEENGRILIYMTLEL

SEQ ID NO: 23842 - protein, 514 aa, synthetic construct
MSMNAVIYARYSSHNQTEQSIEGQLRDCYDYAKRNDLTVIGEYIDRAISGKTDERPDFQRMIKDASKHQFERVIVWKLDRFARNRYDSATYKHKLKQFGVKVISAMENVGEGDESVLLEALLEASAEYYSLDLKKKIERGMRESALNGKFVGGAVPWWCSVGTDRKLVVNEERAAIVKEAFARYDSGEGSKSIVDDFAKRGLRSNRGMPVTLSWLLSILKNRKTIGEYTYNGIEIPGGLPAVVDKPLFDRVQERIARKRRTGGGEATSKTEYLLQGKLFCGLCGSPITAECGQNRKGVVYNYYACSLKKKKRQCKKANERKDFLEWYVVEQTLDYVLTPDRTDYIAEAIVAEYERQFDKSGIKALEQKIALTEGEIQKTMDLCIQATTDAMRKRFMKRCEELDAKKADMEIDLSKLRVAASITYTKEEVRAWLRQFCAGDSFNPAFRRRVIDVFINTVYLYDDKLIIYYNLRDSRQVSYIEAIGASSEIENLRPVPDNKKTAVECSTADKNGGA

SEQ ID NO: 23843 - protein, 433 aa, synthetic construct
MSGKIIIVSKPPKLERKKRVAAYARVSSGKDAMLHSLSAQVSYYNDLIQNHGDWLYAGVYSDEAKTGTKDSRSGFQNLVADCRDGKIDMVITKSISRFARNTVTLLQTVREFKALGVDIYFEEQNIHTMSGDGELMMTILASYAQEESRSASENQKWRVKRNFEAGIPWDRTLLGYRMENDHYVIVPKEAEIVRHIYNEYLSGSGYNSIAKMLNDEGILSRFGGKWNQSAISRVLSNYTYTGNLLLQKTFSENHITKRKMFNTGELPKYHAEDAHEAIIDMETFQAVQKEKERRAAQFIKKPAPKKIYPFTGLLMCNNCGKNYRRKVTKAGAVWVCGTFNSLGKAACASKQIPEFTLQQVTADVLGQNDFTHEWLCDRIQHIRVCNDNALIFCFNDGSEITRIWKDRSRSQSWTDEMKEAARQKTLERSKHNA

SEQ ID NO: 23844 - protein, 526 aa, synthetic construct
MPKVTMIPATVNSLTHLPKASVQKRRVAGYARVSTDSDEQFTSYEAQVDYYTRYIQSKPEWDFVRVYTDEGISGTNTKRREGFKEMIADALAGKIDLIVTKSVSRFARNTVDSLVTIRKLKENGVECYFEKEGIYTFDGKGELLITIMSSLAQEESRSISENITWGQRKSFADGKIHLAYKHFLGYKKGEDGRPAIVEEEAVVVRLIYRLFLDGKTQAGICRYLEDLEIPSPSGKAKWSKTTVTSILTNEKYKGDALLQKSFTVDFLQKKTKQNEGEVPQYYVESSHPAIIEPDEWNHVQAEFARRKALGNAYSGKSIFSAKLVCEDCGGFFGSKVWHSTDCYRRTVWQCNNKFKGGERCLTPTVDTETVQQLFIKAYNQMMGNRKQIIEDCEIMRKKLTDFKSLDADIERQFEETQIVAELVKAAVKDNAVTAQSQEAYLKKYEALTKRYETAAAELERLQNLRTLRSQKDKAMALYIRTLKKQPTVLSEWNDTLWTVMVEKAIVHRNSEITFEFYNGTKVKVRQ

SEQ ID NO: 23845 - protein, 558 aa, synthetic construct
MNKLRAAAYCRVSTDRAEQSGSLASQRSFFDDYIRNSDSMTLVGVFYDEGTSGTTTLNRYGFNKMISLAVSGGIDIILTKEVSRFARNTVDTLNITRMLRAKGVGIIFINDNIDTRDSDGELRLSIMATIAQEESRKISERVKWGQQRKMEQGVVFGRSCLGYDVKDGKITINADSAEIVKRIFTEYTVLLKGAESIADGLNAEQIRTVNGGRWSGAFIRKVLRNVKYVGDLEQKKTCTPDFLTHKKRLNRSEHIYIRNHHEPIISRELWEQTQAEISRRKPTDTSRHSDRYVFSGKVYCGVCGSVMVSRVKTLKNGKIYHALRCSGRIGGKSCNNETLNVTALKTCVKRIFTDMPIDKTAVINAVIKGLSRTDKPDIPALRRKIETLNAKKRRAVDLMLDGLITQQELIEQKSYYDSIIEKLSQEISSDRSVFETDKIRKNAERFLDFTSDPLWLLVIRADYIHGTLTVYLKGIENGFTTCFTATGRGDSYRVITGNTVRSQGIIPGTMQVQKNWFHHDVNDKLIKKSAPDIFQVHFVLICRLFCSLCVAGHSAPTL

SEQ ID NO: 23846 - protein, 531 aa, synthetic construct
MEQYCLYLRKSRSDVEAENHGEEETLARHEKILLELAKRREYNVTQIYREVVSGETIAARPVMQQLLSEVEHGIWSGVLVVEVERLARGDTIDQGIVAQTFKYSDTQIITPMKTYNPNNEYDEEYFEFGLFMSRREYKTINRRLQRGRLSSVKEGKCVCSIAPYGYDKVKLKGDKGFTLAPNPNEADVIKMIFELYTKGELQPDGTYKRIGVALIARKLNEMKIPARKSEYWVPGSIKDMLRNPVYAGKIRWNWRSQNKRMQSGSISISRPRSEEDNCIIVNGLHPALITEETFDLAQEYLAKNPPRPTKRNAPTKNPLAGIAVCAFCGRKLVRRPYTSASCPPTLICSVPHCPNVSSFLHLVEERILKSLEEWLRNYKLQWNLSNNKPSELISESEILRQSLNDINSQIAKLNKQMIKAHELLEQDIYTTDVFLERSRTITERLNQLSYDKAEIEKRLGVETIREKSMKEIIPKVEKLLDVYHELPSAKEKNDMLKDVLEKVVYKKTQNTRWSGSPDDFEITIYPKLPKS

SEQ ID NO: 23847 - protein, 529 aa, synthetic construct
MAKVRVIPSTLNPLTQSPISETKKKKVAAYARVSTDSDEQYTSYEMQVKYYKKFIQEHDGWIYVNVYADEGITGTNTKKRDSFNQMINDALDGKIDLIITKSISRFARNTLDTISITRKLKVSGVEVFFEKEGLWTFDSKSELILTIMASIAQEESRSISANVTMGKRWGMQEGKVSFAYKNFLGYKKENGKIVIDEEQAVIVRRIYSMFLKEGKTCSGIAVQLKKEGILTPSGNSSNWQKNTVLSILTNEKYKGDALLQKTFTANFLEHNVKRNNGQLPQYYVENSHPAIINRYEWEQVQTELARRQEIGRNYSGAGAFASKLVCEDCGGFYGMKVWHSNSKFKKMILQCNNKFKKGKSRCQTPHLTEDEVKEMFIRTYNETMKDKTKVIDDTEAVIAMLTNTDEIDKRIASLTSEIEIVSELVKKLIRENSSAAQSQDDYQTKYNELSSRYDKTKKALEKAMQDKAHKQGQRIKLQSFLESLKQKECIIDQWDEELWMIMVEKAIVHRDKSITFKFYNGKEITLTSA

SEQ ID NO: 23848 - protein, 572 aa, synthetic construct
MASRIAEKLAAKKAAIYIRVSTHWQVDKDSLKVQRRELIAYVTLVLGITDYVVFEDPGYSAKNTDRPEYQAMMDRIRTGEFTHLVVWKIDRISRNLIDFAAMHDELQSLGVTFVSKNEQFDTSSAIGEAMMRIILIFAELERKTTAERVTAVMLSRASDGQWNGGRVPFGYSWSKETKTFSIVPEEAKAIRRMAELYEQYQSLLYVAKYLNDAGIVTKTGGQWTPTTVRTILTNPWYIGQYVYNVHSDGKGIEKRDSDEWITVENHHEPILNEDVFCRMKFLLTRNKRGGVPSHKTYVRKNIHVFAGLLRCGQCGSNMTANLDRRRANGFRPSQYACGSRRRKGTSCTNKYISDTTLGPFVLNYVANIIRASKNSSEATTPEVLERKLLRGEAFEDVASVSTDALGQLLDAFRSAGDAVEYRPQIAFSGDDNSIREIDTLRARRRKLDNALARLNALYLYDDEAMPEKDFVMQRGQITKQLEEVNARIEELQNQESSEELGDGFIGKASYYIMANKLIEDRYIDYEKYIRAIDPSIPHSFLQQIIDHIVVNDGRVTSITFKNGATHTFTYKT

SEQ ID NO: 23849 - protein, 509 aa, synthetic construct
MPEALNAVIYARYSSDRQTEQSIEGQLRECYAFAKANDIAVIDTYIDRAISGKTDNRPAFQKMIEDSAKRQFQAVIVYRLDRFTRNRYDSAIYKARLKKNGVKVLSAMENLNGSPESIIMESLLEGMAEYYSVELSQKITRGMRENALKGKALGGQRVLGYKVNSDCYFEIDETTAPVVVDIFKLYSSGKTVKEICDILNARGVKTARGGAFNKNSLHTILTNKKYIGIYKTKYGEIVGGIPAIIDKELFEMVALRMEQNKKAPARAKAEINYLLSTKLFCGKCRSAMVGESGTSKTGKKYYYYACVKKKREKACDKSNVKKDWIEDLVIQRTVTDILKDDVIEKIADRLVELQKAEAAESGTMLYLQNSLAEIQVSIKNIMTAIEKGIITESTKTRLTELEDEKRNVEIEIAKESIARRIISREQIIYWISSFKDGDITSEKYRQQLIDTFVHAVFVYDDKIVITYNYSGENNTATISDLDLSSPPLQSNPNIFVTLDVFGLVVQIER

SEQ ID NO: 23850 - protein, 465 aa, synthetic construct
MENKVQRCAIYIRVSSAEQVMHGKSLEAQLAFLTDYAIKRGWKVVGHFADEGKTARKELKRRKAIKALLDEVRHDNVDIILFWKMDRWFRNVADFYKVQDILDAHGCKWVAAAEPSMNLETREGRLNVNIMLSINQNETDTTSERIKFVNEASVRQGKAIFGNSSVPLGYKVELVNGVKSIVKDPENEHLVSEIFSYYLLHQSKSGTVKYINEKYGPTITMNVIHTICRNTWYYGSYRGNDHYCPAYITREQYTQIQEINQRNIKVYQSQSKRDTFLFSGLMKCPLCGRRLSSARRIRANGTIYSYYRCVNHYSNKTCSYGRVINERVAEEYLLQNISKLLEEKEINQEKVNDKTYKTVLVDLNKYRKELDRLNNMYQKGRIDDERYDTEYMRLSDIINKNENQVTLQPAIQKSYERIHSVLSGDWLSVYENLNSENKRAFWRGIIRSMDCSPERGVITDVHFFV

SEQ ID NO: 23851 - protein, 524 aa, synthetic construct
MATVTKIPATVSRFTAAPIAVKQKRKVAAYARVSTDHEDQLNSYEAQCDYYERFIREHDEWEYAGLYSDEGISGTSTKRRNGFNQMVEDALAGKIGLILTKSVSRFARNTVDSLTTIRKLKEHGTEVYFEKENIWTFDSKGELLISIMSSLAQEESRSISLNVTWGQRKRFADGKATAPFSVFMGYDRGENGEFVLNLEQAKVVKLIYAEFIKGFSFVAIARKLTEMGIKSPKGLKFWNPSTIKSILTNEKYKGCALLQKRYTADYLTKKVVVNNGAVPQYYVEDHHPAIIEAETFDRVQDLIAQRSREKHFSGSTIFSTKIRCGECGGWFGSKVWHSKDQYRRVIWRCNAKYADRKSKCGTPHVTEDEVKAAFIRAVNKMSGDRKALMADLREVQQAFSGSEELESRLRELDERLNAEADEVQEMIATNARVAQNQDEYSTAYDAAVGRYESTKAERDSVAAEIRQKGIRRREFERFITELEKLPDAVTEFDESLWGSMVEYVTVRKDKTMGFTLIGGTEIEA

SEQ ID NO: 23852 - protein, 544 aa, synthetic construct
MSMENCANTKPKITIIPAKTRVERLDPMSVAMGQTPKIRVAAYARVSTDHEEQESSYEAQVDHFTKLIASHDDWTMVDIYADPGLSGKNTKRVQFKRMIKDCEDGKIDLIITKSVSRFARNTLDCVQTARKLKADGIGIIFEKENLDTLQERSEFVLTIMASLAEEESRSISNNIRWSVKKKFQEGKVILNTKHFLGYTRDKKGTVLKIVPEEAITVRRIYAEFLDGKSLKEIAEGLERDGIASPSGRETWHPSTVKSILQNEKYKGDCHLQKTYLPDFLSPRRIKNEGFAQSWYVEDSHAAIISKETFDMVQQEFQNRQSLRSTGETGCGKFSGKYPFSGMIVCGECGETYRRHQQYNKYKKYYIWVCKRHENNGAEYCKSRPIKEEALEKAFVRALNELIGDKERILEKLQSATVSEITDSCATAINEVNAEIEKLQEQMMELLMKRNNGEITDKEYEQQSQQVGMKIDQLLMRKEEILSEQGKVQLASYRIEEVTKLLQTGKILEEFDRVMFKSLVRKITVLSNKEIEIEFECGITVRETL

SEQ ID NO: 23853 - protein, 492 aa, synthetic construct
MNIQEIPTKKVEKPRVCAYVRVSTDSDAQEDSFAFQSNYWQRRFESDESVEYIGLFSDEGIGGAFMKKRDGLKRMFQKVRNGEIDRIYTKSVSRFARNKVELMEVVREFRDLGVEIIFESENIHTLDPKCGLILTVMASLAEEELLSMSQNQKWAARKRFANGSVELARILGYDMVDGKLVINEKEAVIVRRIFELYLQGNSFRTICHILENEGYTPMHGGRWSKSTITGMLRNEKYCGDSIMQKSYSVMKVQKYNYGELPKYYIQDDHEPIVSREDYQKAQDIMMARGNKYRPRGSPTALYPLSGKLICGECGTSFKRKTSAHGTPYMCIKWTCRKKDVYGVKECTSHDIKDEVVTRLLIEAYNESIDANNEVNGVTEQEDVLRKLIANEQELRQLRAKGYISESKFREETDKILIKIKEQETLIKNLQTRDMVKGKYKKSDELTEQMAEFLVKATVKDWTITFEFQNGYKATKEYTNGRAGNVNGKLCKH

SEQ ID NO: 23854 - protein, 435 aa, synthetic construct
MAAYCRVSTDQEDQLHSFEAQVEYYTRYISDHPNYEMAGIYADEGITGTNTKKREQFRRMISDCETGKIDMVITKSISRFARNTQDCLQYSRMLKNLGIGILFEKEHINTLDSSGELLFTILSSLAQDESRNISENCKWGIRSKFKKGEMHVNTHKFLGYDKVDGKLVINEREAKIVRRIYREFLWGHSPQEIAKGLEDEGIEGCMGAKKWYPSTVINILKNEKHMGDALLQKSYTADFLTKKQVKNHGEVTQVYVKGSHIGIIDKETWNAVQLEFARREEFVKEHGLKGYGYGRECNPFTSRIFCGECGSPYTRHTWRSRGIMQWQCKNHMTDGKVTCVNGFVSQSDLELGFVKAYNMLLKHKEILIPRWKDTIENGNALERLRAKQFLDLSEQPELECYVPELAQMVIQMVIIKGIKKYEFTFMDGSRETVCV

SEQ ID NO: 23855 - protein, 504 aa, synthetic construct
MEIQVLEARSSKGYRKKVCAYCRVSTDALEQENSLENQIAYYENLIQSNPEYEYAGVYYDFAISGYKEKRPGLQKMLTDARNGKIDLIYTKSVSRFARNTAIVLKASRELKELNVGIFFELQNINTLSSQGELMLTILAAFAQAESESGSIGAKMVYQRKYEQGIPVQYLERCFGYTKNEKGEFVPDTEQAKWIVKIYEMAAEGYSLSTIADEMNAAGVKTDKGAGWVESTVKRILENEIYKGDYIMHKNYVNEERKLVRNRGEVDAWYIEDDHPPIVSRQLWDKAQEARKKKRDYLDMDCQIREVTEENYPYKGHLFCAKCGSPLTHRIYSNGNRMSWDCSGRRRHGKDFCTGIHVPDTAVRQWKFDGNIYINVKDSRKSIKEFSYTKESSWSRRHKKKEFVRDVPELTEENYPYYRSIFCAECGSRLVRHIKKHGDIVWECNGRKRKGAAYCEGVRIPDRVVQAFMPIRKAIYIKERKGRNGTKHYSYSCKKPERATREEQD

SEQ ID NO: 23856 - protein, 592 aa, synthetic construct
MPNLRKIEAAVPTIREKKKVAAYARVSMQSERMLHSLSAQVSYYSGLIQKNPDWEYAGVYADDFISGTNTVKRDEFKRMLADCEAGKIDIILTKSISRFARNTVDLLETVRHLKDLGVEVRFEKERIRSMDGDGELMLTILASFAQEESRSISDNVKWGIRKRMQNGIPNGHFRIYGYRWEGDELVIVPEEAEVVKRIFRNFLDGKSRLETERELAAEGITTRDGCRWGDSNIKVVLTNVTYTGNLLLQKEFISDPISKQRKKNRGELPQYYVEDTHPAIIDKATFDFVQEEMARRRELGALANKSLNTSCFTGKIKCPYCGQSYMHNKRTDRGDMEFWNCGSKKKKKKGTGCPVGGTINHKNMVKVCTEVLGLDEFDEAIFLEKVDHIDVPERYTLEFHMADGNVVTKDCLNTGHRDCWTPERRAEVSMKRRKNGTNPIGASCFTGKIKCVSCGCNFRKATRNCKDGSKVSHWRCAEHNGCDSPSLREDLLEQMAAEVLGLDAFDAAAFREKIDRVEVLSSSELRFCFKDGRTVSRNWQPPERVGRPWTEEQRAKFKESIKGAYTPERRRQMSEHMKQLRKERGDKWRREK

SEQ ID NO: 23857 - protein, 558 aa, synthetic construct
MKKTKVYIYTRVSTSMQIDGYSLDAQKERLTKYAEGNDMVIAGEYSDEGKSGKNIAGRVDFQRMLNDIACKKDGVEYVLVFKLSRFGRNAADTLTSLQFMQDYGVNLISVEDGIDSSKEAGKLMVHVLSAVAEIERENILVQTMEGRKQKAREGKWNGGFAPYGYKLVDGELIIEEDEAEAIRIIFDKFVHTNLGYNGVVNYLNNNGIKKKARQNGYLTQFTVATVKAILDNPVYYGKIAYGRRKTTKIEGTRNEYHVVPQKEFDVYDGRHKAIVDEQLWKDAQAKRRATASKLEKKHDLDHEHVLSGLVKCPVCGAGLYGNVKRAKRKDGTYYKTYFSYACKHRLNKDGHKCDYHKQWSEEKVDNAVSEIIRKLVNNPRFSEVMKTKINTSVDTSEAEKELANAKKVLKQLIGTKDKIILQIDTLDILDKNYDRKYDDLQKRLDTIYDKIGDAEDLVSETEDKLSNIQKDKITGDNIYNYLLMFDSVYDVLSDMEKKQFYNALLTDIQIYEEEQDKQIIKSIGFKFPVFYDGEFTKRIIRDKEKTVETIVALHRMDS

SEQ ID NO: 23858 - protein, 539 aa, synthetic construct
MSTGTELRAVFYARVSTEEEKQLNALEKQIQENKDVIRDHGWRLVGEYIDEGKTGTTTKRRNDYKRLLKDMTENKFDIVVCKDQDRLQRNTLDWYLFVDNLVTNNLKLFMYLDNKFFKPSEDALITGVKAIIAEEYSRNLSKKLNNSNKRRIERALNGEEVSAMGNGKSLAFKIVNGKWVKDEEEAKLGKKIFELYLEYDSIRKVRDWVNEHGYTNSVGKPFTSESISRILKNEKAKGVIVMGKYHHDFDKKKIVRRSEEELVRIPAPELAYVSEEVFDKVQERLRAKTGNGRGVNAYSDPLSGKIYCGSCGRKLWKHASNGYVNWMCASQVAKGDVECNGTRITTVAIRNIYKKITDNLEVNKGVVKQDIVKWLNELKATLSDTSVNEKIQKDLDKLERKRTKLLEAYLEDFISKDDYKAKYEAIEGQIEEKKKLLVPVEENEDIKVIESVLQNIDDEIDAYVKTLDMEESKVDFLIEHTKRITVLENRDIIIELDLVAGAIIAGKDFLLYVHDTMPQHYGAECIRLSGGGSKHGRLF

SEQ ID NO: 23859 - protein, 527 aa, synthetic construct
MYELTQSMESLSVDEIIVYLRKSRSDSPEMSVEDVLKKHEEMIQDYANTNFGSPIPEKNIYREVVSGETIDSRPQVKIVLQKIESPQIKAVLIVEPQRLSRGDLEDCGRLINILRYTNTMVLTLTHSFNLQEEYERKFFEMEITRGNDYLEYTKRILRRGRESSAAKGHYIGSVDPYGYRKIVIKKDGVNCHTLEIVPEEANVVKLIHELYAYTPGGIGFTNIAHKLDSMNLKPKKATHWTPAIISSILCNPLYLGLIRWDTRKVVKYINDGRLEKSRPRSSDAKYYKGLHEPIISQELYDACMARRGTNPSLRRNKELCNPFAGLLYCGTCDHAMSLKIYKNHNSVSQIMLCNHQSYCHTKSVLYSAFLERFISSMENTIHDFELALLADDGNAQAVNQSIVANLETRLKKLQEKDMRQKDAYEDGIYSKEEFLERNIKTQQEIASTITALTAAKETKENYVDYGEKIRRFRDCINALNDPELSATEKNQFLKSCVSKIIYYNNMESKAGVGRYVENVFSLEIQYI

SEQ ID NO: 23860 - protein, 502 aa, synthetic construct
MEIQIREGNSRQKRKLKVCAYCRVSTDADEQENSLENQIRHYKEVITSNPDYEYAGVYSDFAISGFKEKRPGLQKMLADARKGKIDLILTKSVSRFARNTSIVLEATRKLKELNVGVFFELQNINTLSGEGELMLTILAAFAQAESESGSVGAKMVYQRKYEAGIPVQYLERSFGFKKDERGVYIADEEEAAWVRKIYEMAADGYTPAAIKRYLNENGVKTVGGAEWIDSTVFRLIENEIYKGDYIMHKHFVNEERKLVRNRGEVDAWYIEDDHEAIVSPELWQKAQDALEAKRDYLAEGSVIEEFTEENYPYMNRIYCARCGHPLYKRIYSNGNRLNWGCSGTKRYGKSFCEGINIPDGVLRGAWHFDENMYIGEKQTDKGKKEFTYLKEASWKRRHKKKEPEPIPENTETEYPYREKIFCGLCGSRLVRHVNTKNHKVIWVCNGRKRKGKDFCDGTRVPDTIIKGWGEIKKDIYIQRKDDKNGKKRYSYTSKKPKGADRA

SEQ ID NO: 23861 - protein, 456 aa, synthetic construct
MRNKEIAPALVRVALYIRVSGEEQKIKGLSLEAQQERLEAYARERGWVIVGIYIDAAKTARKNIHKRTEFQRMMDSVKRDEVDILLFARLDRWFRSVADYYKVMEILQAHNCDWKTTDEEYDTTTANGRLYINVKLSIAQNEADIDGERIDVVFDSKIAHGTVVSGSAPFGFRVNEEKRLEVVPEDAAIVQDAFNYFENTVSQRATVRYVRETYGVNWCDATFRRMLKEKLYTGVYDRGGRYNDQFCPVIINRQQFDRVQALLTRNVRSAPSGKVYIFTSILTCAECGHKLVGYKSSDYFYYRCNQHFQRGRCSHNHSAREDVVEQWLFEHLGEKLERCQLEWDVEAAKKKASVARTDKAALKRKLTKLKELYVNDLIDIEDYKKDYQIYVSALNQIPEPAQEAPPDFAAVRRLLDNSFRTIYDTLTREEKRTLWRSVIKEIRIDNDQNITGVVFG

SEQ ID NO: 23862 - protein, 529 aa, synthetic construct
MAKVTVIPSTINPITKLPNNGLQKRKVAGYARVSTILDEQCSSYQAQVDYYTNLIKRNPEWEFVEVYADEGISGTNTKRRGGFNQMMQDALDGKIDLILTKSVSRFARNTVDSLTFIRKLKEKGVEVFFEKENIYTFDSKGELLITIMASLAQEESRSISENVTWGKRKAFSDGKVSMPYKHFLGYKKGEDGRPTIDEKESLVVKEIYSLFLKYGYSTTKIAKEFNERGICTPSGKGKWTLTTVESILSNEKYKGDALLQKKYVVDFLTHKSKPNDGEIPQYYVENSHPAIIDKIEWDLVQAELELRKKLYKTYSSKNIFASKLVCEDCDSFFGRKIWHSNDEHRAIVYQCNGKFKNKEKRCNTPTLREEEIKSMFLEAYNHFVLDKTALVDDCKLMIETIANVSLIDEQISKQIEKMEELAQKVKELVSSNASTLDSQTDYINNYDRLCTMHSIEETRYKFLLKEKNGRLAKAKSMELFIESIKDKPDVIDSWNSDLWILLVDKAIVHHDKSITFVFKNMKEITIAAK

SEQ ID NO: 23863 - protein, 436 aa, synthetic construct
MQITKILATKKLEKKKLVCAYARVSSDKDAMLHSLSAQVQYYKDYITSNNDWLFVKVYYDEGISGTKQDRPAFQQMLQDAKDGKIDLIITKSISRFARNTVTLLEAVRKLKKYDVDVYFEEQRIHSISSDGELMLTILASYAQEEARSVSENMKWRVKRNFEEGKPWGRAPYGYIIVNSKFVIVPKEAEAVKLIFKLYLDGIGSYRIKDIMNKSEYPTRNNCLWTETTIRGMLKNYIYTGNAVFQTTYVKNYITKKKAKNNGEKPMYHVEECHDAIISIEDYNKVQKIIKERTEKIHKGITPKDNPFKGKLICAHCGCTFRMKKNYKKYVWRCGTYIRLGSKKCLSKQIPNDALKNIAKEILGVDELTSEIIDERIEKVIVGDDKLLTFYLKDGNKIDAHWMQKSRSESWTEEMKENARRKAVERNGKSNSNPIND

SEQ ID NO: 23864 - protein, 474 aa, synthetic construct
MKKTITEISSKDTKSKKVTTKSKLNVAAYCRVSTESDEQMNSLANQKEYFEKLIKSHEDWNFVDIYYDEGISGTSLKKRDGFNKMIADALAGKIDMIVVKSISRFSRNTVDALQTIRNLRNHDIRIFFEKESIDSNDIKSEFMLTIMSSLAQEESQSLSENVKWGKRKIAQKGFVQIPYSNVLGFQQKGKYGIEIDREQAKTVVLIYDMYLHGKTTGEIIKKLIEDGTPTPTGLEASHWCNTAVLSILRNEKYCGDAILQKTYTKDFLNHKKCINYDAFPKYYVKNNHEEIIPRATWEYTQELLEKYSKRSVNVRYGDLIFCLACGSKYRRFHWYHKYYEETILSYRCLGKYDKSVNCSNIKLFEKQLDELYHETVLQLLSYYKKELVEYFKFTIPKVIKGKRKSNRIIKLLDNMISFIQSDYEYYSLHILIKKISVHPDRTLEFTILNGNIIKTSIPKYRLVDHYGRKKTSGN

SEQ ID NO: 23865 - protein, 558 aa, synthetic construct
MLQTSKITALYCRLSQEDMQAGESESIQNQKLILQKYADEHHFFNTRFFVDDGFSGVSFERDGLQAMLREVEAGNVATVITKDLSRLGRNYLKTGELIEIVFPEYEVRYIAINDGVDTAREDNEFTPLRNWFNEFYARDTSKKIRAVKQAKAQKGERVNGEVPYGYIADPNDRNHLLPDPETAHVVKQIFAMYVRGDRICEIQNWLREHEILTVSELRYRRSGSCRHPRPHPNCIYNWPDKTLYDILGRKEYLGHTITGKSYKVSYKSKKTKKNPEEKQYFFPNTHEPLIDEETFELAQKRIATKHRPTKCEEIDLFSGLLFCGDCGYKMYLQQGAGTPERKHAYTCGKYRNRIRTGELCTTHYIRKSVLKELVLADLQRVLSYVQSHEQEFIQTANEYNAKAVQRTLAQQRKELDKAQGRMSELNVLFRKLYEDNALGKLSDEQFAFLTSGYDEEKKTLTRRIAELSQELDTATERSADVKKFVALVHKHTKVTELTYENVHEFIDRILIHELDKETNTRKIEIFYSFVGRVDTGDKPTESISYFRQIGADVKSYAI

SEQ ID NO: 23866 - protein, 590 aa, synthetic construct
MKTVEKIERKLPVLKTRKRVAAYARVSMESERMQHSLSAQVSYYSALIQKNPEWEYAGVFADYGISGTGTKKREEFNRMLAECEAGNIDIILTKSIQRFARNTVDLLNTVRHLKDLGIEVRFEKENINSLSGDGELMLSILASFAQEESRSISENVKWGTIKRFKQGIPNGKFSIFGYEWQDDKLVIVPEEAEIIRCMYAEYMKGASRIEIGRALMDRGIYTRQGKPWVDSNVKVILTNITYTGNMLFQKEYCEDPITKHRRKNYGELPQYFVEDTHEAIIPMDEWQAVQAEFKRRRDLGPFGNKSLKLSAFSTKITCGCCGKHYRHSGKRNTAGEVYYIWTCQTKSQKGASACPSKNIPEKMLQNTTAEVLGLAEFDEDAFSQQIEEVIVIGDDTLTFRFYDGHEVTTKWQSTAKTDWWTDERRKLWGERHKRKDTNPNRHLFYEFTGFIKCGCCGANYRCQSGKRKDGTPTRSWYCTGPKDQCHNPGIRDETMKRLVADVLGLDEFDEATMDAQIENATILDHTVTFHFRDGHTESRDFLDKRHGTPWTEERREKARESMKAAWTDERREAMSERIKKIRSEKKWPNP

SEQ ID NO: 23867 - protein, 520 aa, synthetic construct
MKRVYCLYRVSTKGQVDKDDIPMQKTSCREFAERNGWTILKEFQEKGVSGFKVSASNRDAIQDLKAAAEKKEFDVLLVFMFDRIGRIDDETPFVVEWFIKHGIEVWSVNEGEQRMDNHVDKLMNYIRFWQANGESQKTSARVKTRLNQMTLDGKFTGGVAPFGYKLIKSGEVNKKGKELMDIVVDDDEATIVKMIFNMTVKEGYGSYRMADFLNSHGIRTHNNSKFQCNTVNRILKNRLYCGYLVSGGVESPYIERLHIIDENIFDQAQFILKQRSSKNEEKQQIARTTKGSTLLSGNIYCAHCGQKMVSTSYIDRYDRADGSQYRVRRQRYICTNKAMKRGACDGQSAYVAHRIDGAVIATLRDYLAKIKSTPKDIALEKRYKSEISEYRRKQTKLEKEIEKLKRQVVELSAEIGRSLLGESRFTPDILSASIDNTNDLLHKKEFELSDIKYKLTNQQNAMGKLDFYYSQFRTWADEFDNSTMEQKKMIACQLIKEVRVARGYEIEIVFDLNYEQFLSI

SEQ ID NO: 23868 - protein, 565 aa, synthetic construct
MTCNPIRFDSTEPERLGKDEKIMKSNQQKITALYCRLSQEDELEGESNSIKNQKSMLEKYAADNGFGNCRFYIDDGYSGVSFERPDFKRMIADMEKGEIGTVITKDLSRLGRDYLKTGTYIEIIFPQNDVRYIAVNDGVDSEKGCNEFIGIRNYFNDFFAADTSKKIRAVQRAKAERGERIGSKLPYGYMKSEDNRLVPDPDTAPVVKRIFDMYVNGVGTRTIAMTLERDKIMSPSAYAYYKYGRKENGLKLNNPYLWSDVTLRGMLVNEVYIGTTANYKTTTKSNKLKKQIHNDRKDWLIFENTHEAIVDKSTFEMVQKWFAGRRKPNKSGKTDVFAGLVYCADCKSRMYLRRVLKYPKENNYLCKTYQRYGNNHCTAHRISEQDLHAVILQKLREVTAYVRENPEEFYEIASRNARAEAEREMKTYLREKEAAEQRIAELESIIRCLYEDRVLGRISVERYESLSSGYETEQSELKTKLNEMNAFLDENEKREQLIQDFIENAKKYIDIQELTPEILRAFISRIEVHEKAKWHSTECGNDIVIYFTVERKEQLNVWHKEIKTA

SEQ ID NO: 23869 - protein, 577 aa, synthetic construct
MSINRNNTSETPKKAALYVRVSTNYQIDRDSLPMQRQELITYAQLMFGINDYVVFEDAGYSGKNTDRPEFQNMMRRIRAGEFTHLLCWKIDRISRNLLDFASMYQELKDLGVTFVSKNEQFDTSTAIGEAMLKIILVFAELERNMTSERVTATMLSRAQNGLWNGGRVPYGYDYDKDSKTFSINQEEAFLVHKMYDLYSEHHSLVLVSRDLNEDGYASRAGNDWSPVSIFIILTNPFYTGVYRYNHYKIPGLKIEKDPSEWIEVPDHHPRIISDEQFDNVNRILQANSRSKRLPGQQHTSKGIHIFGGLLYCGTCGSQYVSTPSRLLASGYRPSKYACPNLRKKKTCNTKSISDPVIGEFVLNYVLNMMHARAAFSSIHDTSDLQDALLNGGTFQNVDHIGNDGLDSCFHMFSSTPLDGKRFRKPKKAATIDPELKRLRAEKRKTERALDRLMNLYLYADNPISEKDFVIRKQALDDYLKEINENLGMIDRGRGIETISDENFIKRASYFIMSKELAGKDYIYFKKLAMDMDAEILRDFFQEIIDSIVMEGSNVKEIVFRNGLAHTFFYKGEEKPEA

SEQ ID NO: 23870 - protein, 587 aa, synthetic construct
MGKIADKLKQIRVAIYVRVSTHYQIDKDSLPVQKEELIAYAKYVLNADSYEIFEDAGFSAKNTDRPGFQQMMSRIREGEFSHVLVWKLDRISRNLLDFAAMYDELKRLGVTFVSKNEQFDTSSAMGEAMLKIILVFAELERKMTAERVIAVMISRAGNGQWNGGRIPFGYNYDKNTETFSVNETEAAVVLKMFDLYEETHSLLQVAKALNASGSRHRSGKEWTPTTVSIILKSPFYTGAYRYNYYDMSKRNSRQDVKPEGEWVIVEDHHPAIIDPVRWKNVVELLERNRRGWQSAGKTYTRKNIHVFAGLLTCGVCGSIMSATSNARAHKDGYRPSNYACMSHRKNNGCTNKYITDTKIGPFVLNYISNLIRAKESFGKTTSPETLQKKLLRGDMFKDIVRIKEPGLMELYNLYRSQLPGVKYASKVAERSGSSDTASEKDILLSERRRLERALSRLKSLYLYSEEDMSERDYVIEKNRLTESLDKVNERLDKLNDGLSSQFSISDEELLAKASYFIMSQKLLDRRFVDYRRLSKETDPRILKEFINSVSSNFCIKNGRIESITFKNGIIHEFVYADEEPVAEASEG

SEQ ID NO: 23871 - protein, 522 aa, synthetic construct
MGNVMVIPARRQVGNTVKQSAQKKLRVAAYCRVSTDSEEQETSYEAQVTHYTEYIQKNPEWELAGIFADDGISGTNTKKRDEFNRMIDECMAGNIDMVITKSISRFARNTLDCLQYIRQLKDKNIPVYFEKEAINTLDAKGEVLITIMASLAQQESQSMSQNIKLGLQYRYQQGKVQVNHNRFLGYTKDENGHLIIDPEQAEIVKRIYREYLEGSSMDKIADGLMADGILTGAGKTKWHTSTINKILRNEKYMGDALLQKTYTTDFLTKKRIKNNGTVPQYYVEGDHEAIIPKELFMQVQAELVRRRVVHVSPTGKKRSFSCNHCFAQMVFCGDCGELYRRVHWNNHGCKSIVWRCISRLEPISAEKNCTNRTVNELLLQEVTVKAFHQILTERDFFLKTLQQNIAKAVVNADTLSPDGIQARLEELQKELIKKANNKQDYDAIADEIFRLRDQKEQSELDSHHREEAMNRIKELQDFISGQETDITEFDEALVKKLIEKITVFNDHFTVEFKSGITIDIEA

SEQ ID NO: 23872 - protein, 502 aa, synthetic construct
MEIQIREGNSRQKRKLNVCAYCRVSTDADEQENSLENQIRHYKEVITSNPDYEYAGVYSDFAISGFKEKRPGLQKMLADARKGKIDLILTKSVSRFARNTSIVLEATRKLKELNVGVFFELQNINTLSGEGELMLTILAAFAQAESESGSVGAKMVYQRKYEAGIPVQYLERSFGFKKDERGVYIADEEEAAWVRKIYEMAADGYTPAAIKRYLNENGVKTVGGAEWIDSTVFRLIENEIYKGDYIMHKHFVNEERKLVRNRGEVDAWYIEDDHEAIVSPELWQKAQDALEAKRDYLAEGSVIEEFTEENYPYMNKIFCARCGHPLYKRIYSNGNRLNWGCSGTKRYGKSFCEGINIPDGVLRGAWHFDENMYIGEKQTDKGKKEFTYLKEASWKRRHKKKEPEPIPENTETEYPYREKIFCGLCGSRLVRHVNTKNHKVIWVCNGRKRKGKDFCDGTRVPDTIIKGWGEIKKDIYIQRKDDKNGKKRYSYTSKKPKGADRA

SEQ ID NO: 23873 - protein, 527 aa, synthetic construct
MANITVIPATKALHTQMPINTRSRRRVAGYARVSTDSEEQLTSYEAQVDYYTRFIRSNPDWEFVDVYTDEGISALNTKHRDGFNRMIEDALAGKINLIVTKSVSRFARNTVDSLSTIRLLKEHGVEVFFEKEAIWTFDGRGELLLTIMSSLAQEESRSISENVTWGQRKRFADGKVTMPYSSFLGYRKGADGLPEIVPEEAAIVRQIYTLFIQGKTLNWIAKHLTEQGIPTPRGKVKWQSSTVESILTNEKYKGCAILQKKFTVDFLSKKMKVNEGEVPQYIVEQSHPAIIDPDQWEKVQTEMEVRKSRGRHHNCLSPFSAKIVCGDCGEYYGPKVWHSTDKYRRVIWQCNGKFKGEHRCGTPHLYEEDIKRLFLQAVANLTEAREVLMETCQMLLDEYLNTEKIDAECAALETGLEIVSELTRKLIAENATTVIQQEEYNRRYDALVQRYRDAEDRAQQLQNQKVTRRFQADVIESFMNEIRAFDNSLPVQYSDRLWLNLIDRVAVYEDGRLVFRFKNGTEITETL

SEQ ID NO: 23874 - protein, 425 aa, synthetic construct
MDRVVKRVPLTKTALPKLTRVAAYARVSSAKDAMHHSLSAQVSYYSSLIQRHPGWQYAGVFADEAKTGTKDSREGFQKMIAACRAGSVDAIITKSISRFARNTVTLLETVRELKGYGVDVFFEEQNIHTLSADGELMLSILASYAQEESLSASENQKWRIRKNFEEGKPWNGTMLGYRYHNGTLVIEPQEAEIVRRIFREYLSGKGVVTIANRLNADGIVTRYGNQWHKRSVTCVLLNYAYTGNLLLQTTFRENHLTKRSLPNDGQLPKYHAKGTHEPIISIEDFSAAQAEMEKRSAKHAPKGKNYTARYPFSGLIVCGNCGKHYRRKVTASGPVWICSTFNQQGKVACASKQIPEPALLALTADMDLSDLTEICVEDGNRLVFRFKDGSESVKRWQDRSRAESWTPEMREAARQKALERSRKNG

SEQ ID NO: 23875 - protein, 447 aa, synthetic construct
MREIQLVTPNNRPILVRKRVCAYARVSTAKDAMLHSLSSQVSYYQKYIQAHKDWEFCGVYADEGLTGTKESRAQFQEMLKECRYGNIDIILTKSISRFARNTVDLLNTVRELKSLGIAVYFEEQNINTLSSDGELMLTILASYAQEESLSASENMKWSIRKGFEHGELCCFRFMYGYRIERGSVTVCEEEAAIVQEVFDRFAKGESMLAIAKNLNARGISTHSKRQMRWSGKRIGKMLINEKYTGNALLQKTYINNHLEKKRMVNRGELPKYYAEQTHPAIIDAQTYRLVQERIERNRGRHTVKIGYLKSAFTGKMFCGYCGEPVWRGKNNGRTIWGCRNARGKGVLTCHAASIRNDILEETSCSLFGLSTFDPTFIEQNVRKIILYDNRLVFSMADGREEKISWKNKSRSQSWTPEMKEHARQRTMERLQNRRINDADSKGNTSDS

SEQ ID NO: 23876 - protein, 525 aa, synthetic construct
MPTVKVIPATRDFHTGIEKTTTRKKRVGAYARVSTDSDDQLSSYEAQCDYYTRYIKSRPDWEFVGLYADEGISGTNTKHRDRFNAMIADALNGKIDLIITKSVSRFARNTVDSLTTVRKLKEKGVEVYFEKENIYTLDSKGELLITIMSSLAQEESRSISENVTWGKRKLFADGKVTLPYSSFVGYRKGANGLPEIEPEGAKIVRRIYTEFLNGRTARQIADGLSADGVPTPRRAKMWRCTTIISILTNEKYKGAALLQKSFTVDFLTKKMKPNEGEVPQYYIENSHPAIIDPVEFDLVQAEMQRRRKLGKIYSGNSIFASKIICGDCGEFYGEKVWHSNDRFRKTIFRCNHKYNNEKGKCQTPVISEQQIKETFVVAYNALMADKAGVIADCRALQHMLTDTTAMEQEIADLSKQLGDSTAELRQHVEGNMRSAMNQEQFWKRYNTLEEQCNCLSDRLAKLQSSVKERKQRADVIGGFMFEIKERDGIIDEFDEELWTALLESVTITRDGKWQFKFKNERVIEV

SEQ ID NO: 23877 - protein, 464 aa, synthetic construct
MARSVTVIPARSQKVRTGHKVVQEKKIRVAAYCRVSTDQEDQLHSFEAQVEYYTKYINEHENYEMAGIYADEGISGTNTKRREQFKKMIADCEGGKIDLVITKSISRFARNTQDCLAYSRKLKNLGIGIIFEKENINTLDSTGELLFTILSSLAQDESRNISENCKWGIRTKFKNGEMHLNTFKFLGYDKDENGKLVINKEQAKTVRRIYRDFLIGINPAQIAKELTEEKVPGCLGQTKWYPSTVTGILKQEKHMGDALLQKTYTADFLTKRQVRNNGEIAQVYVKDSHKGIIDKQTWNAVQEEFDRREKFMEAHGTDRYSYGADCMPFCEKVFCGECKSLFTRHSWRSRGIVQWQCKNHRKDGKVACTNAYVDNADLEKGFVKAFNRLVTDRDKHMERWQQMKSEGTPLEKIRAGQMMEAVGNEPLTRFVPEIAQLVLCEVTVLGAKKYEFFFLEGSRVKVSV

SEQ ID NO: 23878 - protein, 502 aa, synthetic construct
MEIQIREGNSRQKRKLKVCAYCRVSTDADEQENSLENQIRHYEEAITSNPDYEYAGVYSDFAISGFKEKRPGLQKMLADARKGKIDLILTKSVSRFARNTSIVLEATRKLKELNVGVFFELQNINTLSGEGELMLTILAAFAQAESESGSVGAKMVYQRKYEAGIPVQYLERSFGFKKDERGVYIADEEEAAWVRKIYEMAADGYTPASIKRYLNENGVKTVGGAEWIDSTVFRLIENEIYKGDYIMHKHFVNEERKLVRNRGEVDAWYIEDDHEAIVSPKLWQKAQDALEAKRDYLAEGSVIEEFTEENYPYMNRIYCARCGHPLYKRIYSNGNRLNWGCSGTKRYGKSFCEGINIPDGVLRGAWHFDENMYIGEKQTDKGKKEFTYLKEASWKRRHKKKEPEPIPENTETEYPYREKIFCGLCGSRLVRHVNTKNHKVIWVCNGRKRKGKDFCDGTRVPDIIIKGWGEIKKDIYIQRKDEKNGKKRYSYTSKKPKGADRA

SEQ ID NO: 23879 - protein, 524 aa, synthetic construct
MNKLRAAAYCRVSTDRAEQSGSLASQRSFFDDYIRNSDSMTLVGVFYDEGTSGTTTLNRYGFNKMISLAVSGGIDIILTKEVSRFARNTVDTLNITRMLRAKGVGIIFINDNIDTRDSDGELRLSIMATIAQEESRKISERVKWGQQRKMEQGVVFGRSCLGYDVKDGKITINADSAEIVKRIFTEYTVLLKGAESIADGLNAEQIRTVNGGRWSGAFIRKVLRNVKYVGDLEQKKTCTPDFLTHKKRLNRSEHIYIRNHHEPIISRELWEQTQAEISRRKPTDTSRHSDRYVFSGKVYCGVCGSVMVSRVKTLKNGKIYHALRCSGRIGGKSCNNETLNVTALKTCVKRIFTDMPIDKTAVINAVIKGLSRTDKPDIPALRRKIETLNAKKRRAVDLMLDGLITQQELIEQKSYYDSIIEKLSQEISSDRSVFETDKIRKNAERFLDFTSDPLWLLVIRADYIHGTLTVYLKGIENGFTTCFTATGRGDSYRVITGNTVRSQGIIPGTMQVQKNWFRHDVNDK

SEQ ID NO: 23880 - protein, 584 aa, synthetic construct
MAYRKITDIRDTIGMRAVFYARVSTAEEEQLNAIELQIEENRGCIKDHGWKLVGEYIDRSKSGTMVKGRDDYQRLYEDLYEDLFDIVVIKDQERLQRNTLDWYLFINRVVQTGKLLFMYMDGKFYSPDDALITGVRAIIAEEFSRNLSKKLHNYHDHRIEKARQGQEIALQGSGNVYGWDKKDGKYYINPEQAKVRRLMCEGIMARKGSTLIAKELNDAGYRNTVGKPWKPMDIPKFVYDCKNVGTMIINKERHDFESKQTIKLPKEEWVYVENALPPIVTQEEWDLICKIHEERVIATGSDRRGKKTSGYSFSGKLVCGICGAPYWRKQRVSKDEYWVCSTKQTKGRRTRKRDSTMGKAGEINPLGCDNENISYNSLMEIMGVVSERLQANTDTIKQDMINWLTKLRKQLLEANGGHTEADLQRELSRKSKLLDAYLDGILNKQEYQKKAEELDERIIQLKAETEKNKVNSGDIAEIDKVLANIDEEVSRYVDGNEKLKVEYLLEHLEQVQIFPDKVIVIVPILSEGIVVEKTQYVSREKRCRQDYLYENDRWSGKADKRRDIHVWIRWKGFVKGTLKSGLPD

SEQ ID NO: 23881 - protein, 592 aa, synthetic construct
MANTGLRAVFYARVSTQEEQQLKALPKQIEECKDSIKRNGWVLVDQYVDEGKSGTVIKRRDEYQRLLEDMEKDKFDIIVVKDQDRLQRNTRDWYNFIDCLVQNKLKLYFYLENTYYSPDNALITGIKAIMAEEYSRNLSKKILNANHRRIEKARTGEPVSAMGNGQTYGYKIVGGKWVVDEEQREVVSKMYELYRELHSIRKVRDALNEQGYRNQKGSYFTEEVVGRVIKNVMHKGWVILNRHHRDFETKQIIEKPEEEWVIVKNDHEPIVSEELWDAVNNEIQSHKNKGNSKGKGRGKRMGTGILSGKMFCAHCGRVLWKHPSNGYVGWYCSGKLGKGEIACEHPAIITGVNINKYLVILADRLLDYSTIEYSKALLKKRSIKWLEDLKDSLTTLNNNETIKAEIEKLEGKKAKLLDAYTDELISKEEFKNKREEIVNLISAKEALLVPQEEHPDIKAIEDTIKNIDNEIDILFENEAMLEENKIKFLMEHIKKIIVCENKDVCVILDKVAGAILLIDGGKAEVSIEWVLKSEENYVFDRESMPFSNGRIYYEGAAPQAGAGRGVLCGFCRDKLGGNLGWSRQSGVSAGAG

SEQ ID NO: 23882 - protein, 547 aa, synthetic construct
MEPQAPIRQKIIREIKPSPVLQARTRNHKLRVAAYCRVSTEQEEQQTSIENQITYYDDLIRSNPEWEYAGVFSDDGISGTRDENRPGFMEMIKQCKKGKIDMILAKSLSRFSRNTLQCISYIRMLKDRGIIIRFEKEGLDTSRVTSEIFFTWTSAFAQGESESLSNNVKWGKRKGYSQGNFAFPYKNMLGYKKGEDGEPEIVPEEAEHIKMIFNLFLLGRSLRQIKEALERRNILTPRGNTEWGLSSIEHILRNEKYMGDVLLQKTYTVDFLTKKKKKNNGELTQYYITDNHPAIISREDFLNVQLELTRRNSKKKVSQKKTKSALGKYCSKYALSERLVCGECGSMYRRTTWVKKGKKKVVWRCISRLEFGTKYCQHSPTISEEALHQAILQCIQKVVEDKEDILKNLRDVQENIILFSGNQITPQSLEKQIDKLQQEMSALVKIIAQGGDSEFYAAKLRQLSEQKMGLTSQLQEIQKKKMADQAQEYQYQQALLYINNEENLNLTEFNDDFIRRIIEQITVLSATQIRIRFVGGYEQDANLPLKK

SEQ ID NO: 23883 - protein, 514 aa, synthetic construct
MPQVQIIEPTIRPQKQKIRVCAYARVSSNSDDQLNSFSAQVEYFTQLIQAHSDWEFIDIYADEGITGTRADKRDDFQRMMRDCRAGRIDRILVKSISRFGRNSADCIEAVRELKMLGIAVAFEKEGIDTGRMTNEMYFSMYSAFSQEESTSIAKNMRKGAVMRMKNGTYRLSQAPYGYRLDEKGGFLICPEEAKVVRKIFGDFLSGKSIREIANELAQAQVPKLKGNPVWSATGVSYILTNERYMGDELFQKRFTTDAFPFKKVKNRGEKSQFYAENTHEAIVSPNVFRLAQELLKKKNQLHGRKKEIQTYTFSKMLECSECGSTFCRRVTKAGTVVWACYRHFRDKKLCAIENVQESEVESAFVTLYNKLGKNRSEILTPFITQVEKLRDKNFMSHPGAMQLNKEIADLLEQNHALATLRAKECIDSAFYMSETNTNNTKLENLRKELQRYRDLNDYHEILNGSYLLLKIFEEQESISEFEPVAFRNMVIKVRIFSDTICFRLINGMELAERR

SEQ ID NO: 23884 - protein, 507 aa, synthetic construct
MGKKLSNETTIRAFIYARRSSDRQNEESCPQQITVCKEMAERLGYTVIRVFADEAISGKTDKRPEFQKMVRAIEAGKCDAVIAYKSNRISRNMLQALTYENRFEQHGVKLVYAKEEFGDNAAGRFALRNMMNLNQFYSENMSEDIKRCLYAYAEECKVLGGKLPLGYVKGDDGRYALAHDGTVEIVQEIFSLYCSGVKSSAIVQALNARGVKTSKGKRFTIGTIESILKNEKYKGVYNYGSVRIPNGVPRIVDDNTFKKAQDMLKRAHRAPAKSWAQTDYLLTGKLFCGHCGTTMIGDSGRGMNGTIYNYYCCHNKKKNGADACTKKRIRQEVIEDIVIDYTVKHVLKDELIDKIAEQAVKLQNDDKQMQIHQQHIKQLAETRQKIQNIVDAITDGFRTPAMKVQLEELTEEEEALAKMVAEESYEKPTLTKEQIVKWLNGFKGGDTKDPEFRRQVIDIFVNSIYLFDDHLVIAFHTGKRKETLPFDAALEADALSDSSTLATYAPP

SEQ ID NO: 23885 - protein, 493 aa, synthetic construct
MPEALNAVIYARYSSDRQTEQSIEGQLRECYAFAKANDIAVIDTYIDRAISGKTDNRPAFQKMIEDSAKRQFQAVIVYRLDRFTRNRYDSAIYKARLKKNGVKVLSAMENLNGSPESIIMESLLEGMAEYYSVELSQKITRGMRENALKGKALGGQRVLGYKVNSDCYFEIDETTAPVVVDIFKLYSSGKTVKEICDILNARGVKTARGGAFNKNSLHTILTNKKYIGIYKTKYGEIIGGIPAIIDKELFEMVALRMEQNKKAPARAKAEINYLLSTKLFCGKCRSAMVGESGTSKTGKKYYYYACVKKKREKACDKSNVKKDWIEDLVIQRTVTDILKDDVIEKIADRLVELQKAEAAESGTMLYLENSLAEIQVSIKNIMTAIEKGIITESTKTRLTELEDEKRNVEIEIAKESIARRIISREQIIYWISSFKDGDITSEKYRQQLIDTFVHAVFVYDDKIVITYNYSGENNTATISDLDLSSPPYDTNPP

SEQ ID NO: 23886 - protein, 521 aa, synthetic construct
MNKSITVIPARRRVGNTVNKEVKPKLRVAAYCRVSTDSDEQATSYDTQVEHYSNFIQKNEEWEFAGIFADDGISGTNTKKREEFNRMISECMEGHIDMIITKSISRFARNTLDCLRYIRQLKEKNIPVFFEKENINTMDSKGEVLLTIMASLAQQESESLSKNVKMGMQFRFQKGEVQVNHNRFMGYTKDEYGHLIIEPAEAEIVNRIYREYLQGASLKQIGDGLMADGILTGAGKPKWRPESVKKILKNEKYIGDALLQKTYTVDVLTKKRVKNEGIVPQYYVENNHEPIIPRDLYMQVQEEMLRRSNLHSGANRKKRVYSSKYALSSIVYCSKCGEIYRRVAWNNHGKRSTVWRCVNRVENGPDCCDAPTVKEEELQNTVVQAINMALGGKDDMFSALEENISMVLALEDETSMESIDAKLEELQQELLKRADAGQDYEDLADEIDRMREKKQEVMADNAEREGQKQRIVEIQQFLAGQTEQIEEYDENLVRRMVEKITVYEDKYAVEFKSGASVDVER

SEQ ID NO: 23887 - protein, 548 aa, synthetic construct
MYKEYPKFYYYESLEYGRKSRMDDPLLSVEETLQRHSEIIDEYARKYLGGSIPEENRYMEVGSGESLKDRPEITRLLKAIENPAIKAIIVVDVQRLSRGDLEDAGKLIRLLRYTNTCVITPHKIYDLRDEYDRDAFERELKRGNEYLEYFKKIQARGRLASVKAGNYVGSVAPYGYDRVERYDEVLKKNYFTLVERKDQADVVRMIFNWYCNDDIGVTTICRRLEELGVKTKTGCSTWKPSIIFGILENVHYIGCVRWNWRKTIKVIENQEIKKLRPKAKVDEYLVFEGKHDGIISEELFYKARMIKGKRHRTKQNLSLKNPFSGIMFCTKCGSKIGYNTYNRNGVEFAPPKLVCNNQVHCKTGSVDYNEVLDYICKVLRDCIEDFKVRIENDQDDSLKLHKDLIERLTKQLKDAEQKEQDQWEAQYDPDPNKRLPQHIFEKLNKKVLAEKEEINKALDKAKGSAPKHIDYKDELIKTTEALKALEDADLDAKITNQYLKSIIDRIEYDRPQIVRINKKNAEIFETDVRKGLQYHVAPYTIRVKLKCE

SEQ ID NO: 23888 - protein, 467 aa, synthetic construct
MIRMARSVTVIPARNRQRETGRRAVQEKKIRVAAYCRVSTDQEDQIHSFEAQVDYYTKYINDHENYEMAGIYADEGISGTNTKKREQFKRMIADCEGGKIDLVITKSISRFARNTQDCLEYSRKLKNLGIGIIFEKENINTLDSTGELLFTILSSLAQDESRNISENCKWGIRTKFKNGEMHLNTFKFLGYDKDENGKLVINKEQAKTVRRIYRDFLIGINPAQIAKELTEEKVPGCLGQTKWYPSTVTGILKQEKHMGDALLQKTYTADFLTKRQVRNNGEIAQVYVKDSHKGIIDKQTWNAVQEEFDRREKFMESHGTDRYSYGADCMPFCEKVFCGECKSLFTRHSWRSRGIVQWQCKNHRKDGKVACTNAYVDNADLEKGFVKAFNRLVTDRDKHMERWQQMKSDGTPLEKIRAGQMMEAVGNEPLTRFVPEIAQLVLCEVTVLGAKKYEFFFLEGSRVKVSV

SEQ ID NO: 23889 - protein, 498 aa, synthetic construct
MEIQIRKGNSIQKRKLKVCAYCRVSTDADEQENSLENQIRHYKEVITSNPDYEYAGVYSDFAISGFKEKRPGLQKMLADARKGKIDLILTKSVSRFARNTSIVLEATRKLKELNVGVFFELQNINTLSGEGELMLTILAAFAQAESESGSVGAKMVYQRKYEAGIPVQYLERSFGFKKDERGVYIADEEEAAWVRKIYEMAADGYTPASIKRYLNENGVKTAGGAEWIDSTVFRLIENEIYKGDYIMHKHFVNEERKLVRNRGEVDAWYIEDDHEAIVSPKLWQRAQDALEAKRDYLAEGSVIEEFTEENYPYMNRIYCARCGHPLYKRIYSNGNRLNWGCSGTKRYGKSFCEGINIPDGVLRGAWHFDENMYIGEKQTDKGKKEFTYLKEASWKRRHKKKVPEAIPKNTEEAYPYRKNIFCGLCGSRLVRHVNPKSHKVIWICNGAKRKGVAFCRGTRIPDSVIRGWGEIKKDIYIRRKDDKNGKKRYSYTSKKPTA

SEQ ID NO: 23890 - protein, 514 aa, synthetic construct
MNKRTGIYGRYSDTKQDDGFSIEYQLTECQAYLDKNDMPLTKTYIDQAITGTKVAGREAFHELIRDVKNGMIDVVVVYKFSRIFRNAYESHKYRQLFKKHGVKLISVTQMVDDETSSGKLMIGVMANIDEYQSAVISDHVKSAMREMVSEGFFAGGTVPYGYKLEVVQHGKKTRKKYVPDEFESKIVNKIFELYADNYSLRYLQTYLKDNGAFTRRGKYFSIQTIARMLRNDFYIGVLRYSAQGHEPIIVHDIIPPIIDKELWDRVQYRHSTQKGVRPRKRKELYALTGKIRCANCGSHYFGIRSGSMQNGKKYDYKYYVCSQSKDYHTCSCKRIRKDYLEEITMKEIKRHILNEKSIYSIANEMLKILGENPTEQKDKLKQLKSRSSALKSEMKELIDLRAKRIVSDSFLAEHISEKENELQEVEQQIYNIERQTKLTLTHSMIVDYLNKMLSISDDTDDEVLKTIFDKFVESIIISDESIDITLIVSPNGDMEYNNSFRQPNVFFYAKINRQ

SEQ ID NO: 23891 - protein, 525 aa, synthetic construct
MAKTVTVIPATVNPFTGMPVTGLHKRRVAGYARVSTDKDEQFTSYEAQVDYYTKYIKANPEWEFVTVYTDEGISGTSTKRRDGFNTMIDAALNGRIDLIVTKSVSRFARNTVDSLSTIRKLKEKGVEVYFEKENIWTLDSKGELLLTIMSSLAQEESRSISENITWGKRKSASDGKVSLAYRNFLGYEKGPNGTPVINQEQAKTVRRIYRNFMAGQTAWAIAKELTADGIPTPAGKSQWHTTTVESILTNEKYKGAALLQKTFTVDYLSKKIKTNEGEVPQYFVEDSHPAIIPPEEWDQVQKEFVRRHSLGRKYSGNSIFSTHIVCGDCGAFFGAKVWNSTDKYRHTVWQCNDKFKGGKKCATPHLSEDKIKSGFVQAFNRLFDGKEEIIANCKKVARLFSDTAELDRKKDTLQQELCVLSELIRKLIEENATTVQDQNSYLEKYNGYADRYKTVTEAIGALEKEILLKHARADAFRNFIRTFEAVGSKLLTFDAKLWALTVDKVKVMADGSLHYIFKNGADITV

SEQ ID NO: 23892 - protein, 433 aa, synthetic construct
MDRIVERVIFDAPQKPTLVRVAAYGRVSSGKDTMLHSLSAQVSYYSKYIQSHQGWLYVGAYMDEALTGTKANRPEFQRMLADCRVGKIDLILTKSISRFSRNTVAFLETVRELKALGVDIFFEEQNIHSSDGSGELMTTILSSFAQEESRSASENQKWRIRKNFKEGMPWNGRMLGYRYNCGTYTVIPEEAATVKRIFHEYLSGKGGVAIANRLNKDGIPSPSDGKWGKSEIMLILRQYAYTGNLLLQRFYKNNYLEKKTLVNRGELPMYHAENCHEAIVSAEEFTEVQKQIAIRAKRYYRSGSSANRYPLSGRIVCGGCGKHYRRKTTPTGPVWICSTFNFEGKAACPSKQIPEATLLQVCKEVLNSAELTAELLDSRLTDIRAEKNNTLIFSFKDGTKTVRQWHDRSRAEAWTAEKRKAASDRRKERDRNG

SEQ ID NO: 23893 - protein, 491 aa, synthetic construct
MRAVLYARYSSDNQRYESISGQFHCSEEYCRRRGYDIVHYYYDEAKSGTTVAGREQFNQMIEDASRGIFDVIVFYQIDRTARNEMDYYASVNKLLKLGVRYEYSAEGIDVSTPNGKLTEGVKVAVAAFYSRDLSIKIKRGKKENLLQKKHNGGISPLGYDIAPDGTYVINEYEAIAVKKIFSMKIEGAGYGKIVDWLKANGYKTKRGGDYSKGAIHDILRNRKYIGVLELGKSTKHNSRKKADNYMEFEDALPAIIEKKDFLTVEKIMARRRNGATNAKEIYALSGRIFCECGAAMSGTRIGARGNKYIYYACSNQKNKHGNCDVSMVRKDKIEYVVYLAIVDYIKAHKQSIIAEFLNQSENREEKVRADELRQKIGVQKNKAKNLLALYDGTDDMVLNAYKEAKKTLDMMEAELIELNKNDYSAINQDILEAFIDSFITEVGVSDAFLKKFFDSLDVKVIVNNKNAEIQLNLSVLPFVVALKGIEPLISP

SEQ ID NO: 23894 - protein, 517 aa, synthetic construct
MQRAVIYARFSSDMQREESIDAQVRACKSYCQSKGYLVVGQYVDEAKSGRELTKRDAYNQMLADALEDKFDIIIFHKIDRNSRNELNYYTTKDKLEKLGIRYEYAVQHIDASPEGQMMEGVLVSMAAYYSRNLSKETKKGLNENAYKAQFNGGTAPLGFRIVDKHYEIEPIEAEAVRLIFKLYLAGYSYIRICRELELAGYKKRNGKPFDKTCLYNILGNEKYMGRYTFNKTPRAKNGQARNSHAKTRPDDFIAIDNALPAIISKEDFAAVQAKRETNQRRFSSYKAVEPYLLSGKVICGYCGSAMSGHRVAPRNGEPYGYYYCLKKERVAGERCPQKYIRAEKLERIAIRALEEEIFSDASMKKIAALMREGYAAMTNEADESRKALIQAKAAAEKKLDNLYAFIENGEIDEYSLARMKKIKDELAKIKARLCETSVKFSKTLTEEEVFATLAAFKKDLESNADNSAKRFVVNLLINKITVRDNCATVEILPNMLTVYLVPRTGIEPVRVSLPEGF

SEQ ID NO: 23895 - protein, 544 aa, synthetic construct
MRVSVNLNAQKPDTTTNAVIYARYSSHGQTEQSIEGQLAKGHEYAAAQGYTVVHEYIDRAMTGRNDNREAFQKMLSDTGKHQFQVVIVWKVDRFGRNREEIAFNKHTCKKNGVRVEYVAESLPNSPEAVILESVLEGMAEYYSIQLSQNIRRGQLESAKKCQCVGGSVPLGYTLDSDKHFVIDPQTAPVVKKIFDLYAEGATISEITGQLNEQGIRTARKQLFTKNSLTKLLKNEKYIGVYTYKDIVRVEGGVPAIVDESTFDRVQELLKINRRAPSHTWTKVEYLLTDKLFCGHCGSPMVGESGFSHTGAKYSYYGCIKRRREKACDKKPVRQDWIEALVLDETVKLLHDDELMEYIIDRTWEYYQVTDKVQEEKAVFEAQLAEVDKAINNLVRAIEAGIFNAATKSRMDELDAQKAALTASLADLELTSGIRITRDHIEYFLLRLRDLDVKDRECQKRLVQTFVNAVFVYDDGRVKITYNYSGKSSTITLNQIDGAEKGKGFVCCLPCSTSSPRFPRGVAALFLFWGKIGCESTTNFSCFVL

SEQ ID NO: 23896 - protein, 456 aa, synthetic construct
MRNKEIAPALVRVALYIRVSGEEQKIKGLSLEAQQERLEAYARERGWVIVGIYIDAAKTARKNIHKRTEFQRMMDSVKRDEVDILLFARLDRWFRSVADYYKVMEVLQAHNCDWKTTDEEYDTTTANGRLYINVKLSIAQNEADIDGERIDVVFDSKIAHGTVVSGSAPFGFRVNEEKRLEVVPEDAAIVQDAFNYFENTVSQRATVRYVRETYGVNWCDATFRRMLKEKLYTGVYDRGGRYNDQFCPAIIDRQQFDRVQALLTRNVRSAPSGKVYIFTSILTCAECGHKLVGYKSSDYFYYRCNQHFQRGRCSHNHSAREDVVEQWLFEHLGEELERCQLEWDVEAAKKKASVARTDKAALKRKLTKLKELYVNDLIDIEDYKKDYQIYVSALNQIPEPAQEAPPDFAAVRRLLDNSFRTIYDTLTREEKRTLWRSVIKEIRIDNDQNITGVVFG

SEQ ID NO: 23897 - protein, 422 aa, synthetic construct
MKAALYIRVSTEEQAIHGLSIAAQTEALDEWAKANGATVVDHYVDAGISARKSAAKRPELQRLLKDVQAGRVDIIVFTKLDRWFRNIAEYYKVQEVLDKHKVKWRAIHEDYETETSGGQFKVNIMLSVAQNEADKTGERIKAVFDGKKARGEVCSGSVPPGIRIENKHCVADEPMASAVRDLFSHYIATQSLYKTRIYSGSKYNLYRDSKTFRRMLSNARYKGLVVDNAAFDLAQSMLSARAQRHSCSTLGNTYLFRGLMRCPECGSAMNACVCKNIYYYRCSLCFGNRKCSYNLYTREDKVEAFLLANIMAKCTEYNAEIAGREKEEIDYAGIRRRMAKLKDLYLSDLIERDEYEHDYRELRKILETPQTAPKPIDIAQVRSSLTDYDELTRDGRKEFWTRTISEISPSGKDFFNITVRKP

SEQ ID NO: 23898 - protein, 520 aa, synthetic construct
MVKCMKSVAERAVPAVIYARYSSSHQREESIEGQVRECREYAEREGYSVLQVYADRAITGRTDERPEFQRMLADASKGVFQAILIYKYDRFSRNRYSFAVWETKLKKHGVKVISARENVAEGAAGIVLKSVLQGMAEWYSVDLSEKVTRGMKENALKAKWTSGTVPFGYTRDAEQRLIIDPERGEFVRQIFEKVLAGEKYVDIASWLNMLGVRTARGAAWNKSSFTWMLKNVVYTGLFRWKDIEIKNAVPPIVSKELFEAVQRKLKTYGRRGINVQKSDKYLLTPNIICGECGGPMHGMSGKSRSGELYYYYACANKRAKRTSCSISPLNRDELEQAVYNCAREVLLHEENIKLIAEQAEAVAEAQVDNELAEMKAERSRVKKSIANYAAAIANGATSGTIIELINAAEAKAAALDEAIAERELVAAPPKISKEAIEYFLRNIAAAPDDKMKEKVISTMVNSVVVERVPDEGTKKDSDEKYSITVRFNFTDTPQLSALQSFDVREKSKMVTSAGLEPATF

SEQ ID NO: 23899 - protein, 523 aa, synthetic construct
MRFFSYGRKSVFSDKSDSIDNQFRMNREYCESKFSGQVDSWQQFSDEDFTGANTSRPDLQRMLSFIKGGFCDVLVVYQLDRLSRDVRDFANIYALLEEHGVMFISIKENIDTTTPIGRAMMYVTVVFAQMERETIAARVTDNMLGLAKKGYWTGGNPPVGYVRKHIVVNGKKHCSIEVDPDGARYVTQIFDTFLAYNCSLQGMETRFKNQGIRTQNGKFFSTAQLHKMLTMPYCVEATPEVYDFYAAKGCIMDPGSPREMWDGSAGVIIYGRSTEKNKKHQLQPPEKWTVCLGKHKPFMPAEKWLAVQSRFTQNKCIKDAKWPVPLLKGVLRCKCGNLMQVSRKKKVDGTCSSWYYCRKRMRQGVDACDMGQIKCDLLDEKVLELFRGITADPALIQKFVKAEAPADVPDLKAAQARVSACERKIGRLAASLALAEDSAASKYIIAEMERLDVELGALKREASLAEMESHQAAASAKDAKTTAAEIAKLIHGLDGFDDKEKNAIARAVIQECTWDGERLFIKL

SEQ ID NO: 23900 - protein, 508 aa, synthetic construct
MPTVTVIQPTIAEEKAVKIRCAAYCRVSSDSEDQLNSFMAQTRYYSQVFEDSETEELIDIYADEGITGTREDKRDEFQRMLKDCRKGKIDRIYTKSISRFARNTRDCLKNVRELKSLGITIYFEKENIDTANMTDEMMITIMGGLAQEESVSISRNLKWSYQKRFEEGTINVFSAPFGYKLSNGSLIINETQAQIVKEIFEMFLNGIGYQRISEICQNKYSSYKDNFSYYGIRYILSNEKYIGDSKYQKTFTTDTLPYRKLPNKGELIQYYIQATHKAIISKETFEKAQALIECRKHKNIVSESPFSGKIICANCGTKYKRKCSGDKIYWVCRRHDNLAQLCTNKRIEEKFIRQSFIILHNKLLFNYKQILIPLQTALQDLKLKKFSGKTQVMDIHKEIAKLREQAHVLARLKTKGFLDEAKYIEQTTELTAKINKLQSELKKLTRSDYEDETLDQIEILIDFFEKRDKPITEFEESAFESIVEKIVVIDQYELEFHLICGLKFKENI

SEQ ID NO: 23901 - protein, 520 aa, synthetic construct
MNAVIYARFSSHNQQEQSIEGQIRYCTEYAKKNDMTIINSYIDRAISGTSDNRPEFLQMIKDSNNHQFNVVLVWKLDRFARNRYDSAIYKNALKKNNVKVVSVTEYLGEGSESVLLEAMLEAMAETYSRQLSENVRRGMRESALKCQVVGGSVPLGFDTVDKKYVINEKEAEIVRFIFDEYVSGTSKKEIVNKLNAKGWRTKNGSTFVFNSLNKILSNRKYIGEYKYEDIVIEHGIPAIINERTFILAQKQLSKNKQNRGTKSAKHEYLLATKIFCGYCGGSMIGETATGKGGGKFGYYVCRNRKKHINDCKKRREKQKELETFIVERTLYMYKNKDFVNEVAQKVVDLYNKECGQNHLKTLELNKKELEKKLEELSDGLLKTTNARVLKKFNEQINDLDNQLAELEIEIAREKAIANATMRCSDVIDFISDIMDGDINDKQFQKKIIDTFINAIYVFDDKLIVYYNGSSTSDKVTFDDLLNDLENKGVKGSTFNTLTPPNKYWMNTYFFSGGFAVRCVL

SEQ ID NO: 23902 - protein, 560 aa, synthetic construct
MYLENQIANKDIHTFSQNGVYVMEQKKRVNCLYRVSTIGQVEKDDIPMQRQYCREFIASHPDWVLQNEFYEKGVSGFKKSAKERDAMQELQQEAVAGSFDILLVYMFDRLGRRDDETPFVVEWFVRNGVEVWSAVEGQQRFDNHVDKLLNYIRYWQASGESIKTSVRVKTRMEQLTKDGCFTGGIVPFGYKLQKQGRINKKNQEVNDFVIDEDAAEIVRFIFYKYVNEGYGAQRISHYLLENGIRRADGSMIPNTTIVRMIKNKLYMGVISNGNAESEIIPELQIVDEATFRRAQELMEKRTTHHADTPLNLRGSSLLVGNIFCGHCKNRLTLTTSGKKYIRKDGTVRNQVKSRYQCHFKARHPDLCDGQSGYGVIKLDEIVDALVRYQLSRIRVSAKDSLIAEQHEKAAALARSRYKMSAMRLEEKQKELSDYEAETINVIRGKSRLNVDLLNSLVAKCKEEIAELSQEVDAQKADMEHQLESAAQEQAEFEKLESWADLYDNCTFEAKKMIVSQLIKAVYVYRDYRLEVEFRVSFDDFRRLCVGCEPNGGRIATVESV

SEQ ID NO: 23903 - protein, 485 aa, synthetic construct
MKGVIYARYSSDNQREESIEGQLRECKDYAERNGITILGTYIDRALSAKTDNRPEFQKMIKDSAKGLFDVVLVWKLDRFARNRYDSARYKNLLKKNGVKVISARENISEGSEGIILEAMLEGYAEYYSAELSEKVIRGLTDNALKCKYNGGTVPMGYYIDEQQFYQIDPKTAPVVLEMFTKYSEGATMQELVNLLNSRGMRSIRGGKITLNIMNHLLKNRRYMGEYSYRDVVKEDGIPAIVPKELFERVQERLAKNKKAPARHKAEDDYLLTTKLYCGKCGSFMVGESGTSHTMKVHRYYRCVNTKKKKLCDKKAVKKDWIEDLVVNYTMKAIMNDEVMERLIDTLMELQKKESTDLPLLKKQLAETEKGINNMLNAIQAGIFTPSTKQRLDELEETKSQLEVSILQEEMHKPLLTREQIAFFIYRFRKFDVTKREQRQRLIDSFVNAVYLYEDKIILTFNYKDGSKTITLADVEGSDLSSFGAP

SEQ ID NO: 23904 - protein, 523 aa, synthetic construct
MRFFSYGRKSVFSDKSDSIDNQFRMNREYCESKFSGQVDSWQQFSDEDFTGANTSRPDLQRMLSFIKGGFCDVLVVYQLDRLSRDVRDFANIYALLEEHGVMFISIKENIDTTTPIGRAMMYVTVVFAQMERETIAARVTDNMLGLAKKGYWTGGNPPVGYVRKHIVVNGKKHCSIEVDPDGARYVTQIFDTFLAYNCSLQGMETRFKNQGIRTQSGKFFSTTQLHKMLTMPYCVEATPEVYDFYAAKGCIMDPGSPREMWDGSVGVIIYGRSTEKNKKHQAQPPEKWTVCLGKHKPFMPAEKWLAVQSRFTQNKCIKDAKWPVPLLKGVLRCKCGNLMQVSRKKKVDGTCSSWYYCRKRMRQGVDACDMGQIKCDLLDEEVLELFRGITADPALIQKFVKAEAPADVPDLKAAQARVSACERKIGRLAASLALAEDSAASKYIIAEMERLDVELGALKREASLAEMESHRAAASAKDAKATAAEIAKLIHGLDGFDDKEKNAIARAVIQECTWDGERLFITL

SEQ ID NO: 23905 - protein, 579 aa, synthetic construct
MLLRKIFEKMEVFNLEKNLKCALYIRVSTFHQIDKDSLPLQREDLINYAKYILGIDDYVIFEDAGYSGKDTDRPSYQNMMTRIRMGEFSHLLVWKIDRISRNLRDFSDMYDELKKYNVTFISKNEQFDTSTAMGEAMLKIILVFAELERKLTAERVFAVMMSRAEKGLWNGATVPLGFIWDEEIKFPKIYEPEAKIVQYIFDLYEKKRSTTKVAEQLNQENVKTKRDGTWTPRTVGAILTNPFYIGTYRYNTKTQKTRRWKDKSEWIVIEDHHPAIISKEQFERVSKILKDNYRGDYNRQRASKNVHILSSIIKCFKCGSNMNAGNDRARKNGFTPSRYTCYQIHKTYTCNNYASDLTVLPFIINYIGNYMTLQDRITKNHSYRDMESILLRGKYFTDIEHINKDDIKCTYKLLVNNLPVINYKLQENQEDKKTTFKDRYDIYKNEKEKQENALKRLDDLFLYAEDSMPKKDFILKRQEITNKIEEINSKIQELRAEENNFVDNKEFSLNAKASFYLITQLIGNSKNIDVRYLLENVDKSIIKDFLSTILNEVSVDHQKVQYITFKNGLTHHFEYKENQ

SEQ ID NO: 23906 - protein, 490 aa, synthetic construct
MNVLDNVVDLYVRVSTTEQAEEGFSVGAQEEKLRAYCKAYNYQINAVHVDPGFSGATMDRPALKQVIRDVENNHCKKVIVWKLDRLSRSQKDTLILLEDVFAAHDCHFVSLMESFDTSTPIGRCMVGILAAFAQMERENIKARTMMGRQAKVKQGHYSGNKPPIGYAFNTASDGSVISNDLIVDPYNAKIVQDIFRWYLEGYSLNGIAKRLADAGTGSYAWQHSTSIRRILSNPVYIGKVKLNNELYEGMHEPLISESDFNEVSCMLARQKELHKRPAASYRTKNGCRSANLLSGLLYCGDCGARMYARKVCKDSPIRRYMCYSVTKTVKSMIRSDCCTNREHPYTVEQLDEIVLNEIKKLALDKAQFSRIASKSDTVHEDAKIYNERLEELNKQIKRLMNLYQTGIIDLADISDRLQALNDEKLGVQSRLDELKEADNSDAKLKAWEQLESFPAILDAGDVQQIHRIVNALIDKIVVLNRDVTIYWSFS

SEQ ID NO: 23907 - protein, 520 aa, synthetic construct
MLEKNIIIYLRKSRSDDPGMSVEDVLAKHELQLQEYAVSEYGEQIPEDHIFREVVSGETIADRPVMKQVMRLLEAGNITAVLVIEPQRLSRGDLEDCGRIINIFRYTHTLVATPPKTYDLTNEYDRKFFEMELMRGNDYLEYTKKILNRGRIASVKKGNFIGSVAAYGYKKVKIGTGKDACHTLEIIPEQADAVKLMFKLYLEGKGFTNIAKTLDELKIKPLRSETWSPAAISDMLENPVYVGKIRWNYFKTVKKIEDGQIVKSRPINQDPSDWFLVQGKHPAIIDQATFDAAQERRGRTPKIKRFNELKNPFAGLLYCQCGKAMSLKIYNQKKGKCEPTKLMLCNKQSWCKTKSVKYDTFLERIVETLESTIADFEIKLKKDNGDAAQLHKNIVYNLETNLKKLKDKDIRQKDAYEDGIYTKEEYASRNAKLQEQISETTKALCQAKDSVPPTINYKEKIARFTDCLNALNDVSVPAAEKNMLLKACFEKIIYHNDMPSISGHGRWIENKFKLEIFLRL

SEQ ID NO: 23908 - protein, 500 aa, synthetic construct
MNTVIYARYSAGPRQTDQSIEGQLRVCTDFCKQRGLTVIDTYCDHHISGRTDERPEFQRLIADAKRKKFEAVVVYKTDRFARNKYDSAVYKRELKRNGIQIFYAAEAIPDGPEGIILESLMEGLAEYYSAELAQKIKRGMHESALKCQSTGSGRPLGYRVDEQKRFQIDPESAQTVQTIFEQYIKGESNAAICELLNSRGLRTAQGKSFNKNSINRIIKNRKYIGEYRYHDIVVEGGMPAIISKDTFNLAQAEMERRRTRKAPKSPRAEYLLAGRLFCGHCKGPMQGVSGTGKSGNKWYYYYCGNTRGKNKTCDKKQVSRDRLERAVVDFTVRYILQENVLEELARKVHAAQERQNDTASEIAFYEKKLAGNKKSIANVLRAIESGTATQTLPARLQELENEQAVILGELSFLKGKRLAFTEDQIFFALMKHLEPYPGETEQDYRRRIISDFVSEVYLYDDRLLIYFNISSEDGKLKSADLSNIEDGEFDEGLISSIQKP

SEQ ID NO: 23909 - protein, 520 aa, synthetic construct
MKNVTKINQIDFSIFKKTRVAAYCRVSTDSDEQELSLDTQKNHYESYIKANSEWEYAGIYYDDGVSGTKTAKRDGLLRLMEDCEKGLIDLVITKSISRFSRNTTDCLALVRKLLNYEVYVIFEKENINTGSMESELMLAVLTSMAESESRSISENEKWGIKKRFQNGTYVISYPPYGYANVDGEMVIIPEQAEVVKEIFAGCLAGKSTHIIAKELNEKGVPTKKGAKWTGGTINGILTNEKYIGDALFQKTITDANFKRKRNYGEEEQYYCENHHEPIIDKDTFEKAKESIRQRGLEKGNCSEDTAKYQNRYAMSGKIKCGECGRSFKRRYHYTSHGRSYNAWCCGGHLEDSKSCSMKFIRDDDLKRAFLTMMNKLVFGNDLVLKPLLISITTNNSKKNANIVEDIEKEMESNEEQRKQLNTLLTNGYLERPVFAETHNKLIMEYEHLEAERDLLFRMDDAGYTMEQALKELVDFLNDAKPFTEWEESLFERFIEKVKVLSRDKVEFEFKCGLKLKERID

SEQ ID NO: 23910 - protein, 531 aa, synthetic construct
MKAAIYARFSSHNQREESIEGQVRACKRFAKEHGMTIVEIYADRGLSGLHADNRPEFQRMIQDSDHHRFEALIMWNLDRFSRDKYDTAVYKTRLKKNGVSLYYSDQSIPDTPEGIILESLLEGFAQYYSANLARNAKRGLQENARKCLWNGGCVPLGYLIDEHQRFVLEPIGAACVRMIFELYASGQSIKSIVCTLNEKGYKTVKGNRFRLGSIQGILRNRKYIGEYHASGITVPNGIPAIVDVQLFNDVQARLGVVASAKAHNKADIPYLLTTKVFCGHCGSPMIGESGTGKGGATYRYYKCSCRKNRKGTCDKKTEPKDWLEENVVRQTVKNVLRPEVIKEISENCAAALKADASDESLVQALKAQLAETDKALRNLLKAIEAGIISSTTRERMAELESQKSELEAQIAREQLRKPEITAEQISFWLESFLAGDIHDPKYQERIINALVRRVDVYDDGPEKQKLTIFYNITKNNRSFSKISISKCSDIECIALPKRSVAKAADFFIRFLQKDENRTAVNTVPFGTVEPS

SEQ ID NO: 23911 - protein, 611 aa, synthetic construct
MSTSNTGCDNRKYAIYARKSKFTAKGESINQQIDRCKLHLSSMNVDEEDIIIFEDEGYSGGNTDRPQFKEMMDMCEDNKIQCVICYKLDRISRSVSDFTNTFNNLEKHNIRFISVSDGLNGTNSPMDKAMIQLVAVFAELERNIIAERIIDNMTELAQKGRWLGGTTPTGYKSVETFGSTNKEGKVHYARKLEIVPEEMELIKRIYKLYLKTESLTAVQATLLNDNIKTKMGNEYTRFAIKVILSNPVYAKADNAVLKFFENKGSTIYAEDTEFDGTKGMMVYNKTKQEKNTSHKVKPYNEWIVAIGEHEGVIDGADWVSVQNILDKNKDKNYNRPRSHCALLSGLLRCKCGSIMYPRVAKTYNERGERNFAYACKMMLNSNRQRCNVKRINGNFLDDLVWEQIKVLTSDKSELAKQLKEVQGNFESDEQPVLKELEQMKKRLSDNKQKQKNLINFIANNGSKMSPEMSDHANEQYRKLENSNKEISSKIIKLEEVVAQSEQAFANFKDLATRLSEFSAALDTQTTFEDKRYAVRQVIEYAEWDGKNVKLFFTGNRTVELQDIKDELANYKKAHRKRAKTSSDENTTLGEDSERDTNALPLPEKICQRYPL

SEQ ID NO: 23912 - protein, 529 aa, synthetic construct
MNRTAARSVTVIPPTINPLTHLSRVAVQKRRVAGYARVSTDSDEQFTSYEAQVDYYTQYIKRNPEWEFVKVYTDEGISGTNTKHRIGFNEMIADAMSGKIDLIVTKSVSRFARNTVDSLVTIRKLKEKGVEVYFEKENIYTFDGKGELLLTIMSSLAQEESRSISENVTWGQRKRFADGKVNLPYKQFLGYRKGADGFPEVVPEEAIVVHRIYTRFMEGLTPGAIAKELTADGIPTPSRKQRWQTSTVESILQNEKYKGAALLQKCFTVDFLTKKRKVNEGEVPQYYVEHSHEPIITPEEFDKVQTELARRKQISRQYSGKSIFSSRIVCGDCGSYFGSKVWNSTSKYRRVIWQCNGKFKGEHKCETPHLDEETIKARFVTALNAIIESKDNILEDCRLMQATLTDCTGIDTEIESLLEEIDVVTELTKRCIAENSQTAQNQEEYAARYNGFVERYEKAKARLEQLRTTKAAREAQAEAIGAFMFEMQELDTLTEFDEKLWLTVIDTVTVHADGRMTFKFQGGKTLTSY

SEQ ID NO: 23913 - protein, 434 aa, synthetic construct
MERVVERVDALIPAQPKALRVCAYARVSTGKDAMLHSLSAQVSYYSKMIQSHNGWMYCGVFSDEAVTGTKRERAGFQHMIEECRQGNIDLVITKSISRFARNTVTLLQTVRELKSLGVDVFFEEQHIHTMSADGELMMTILASYAQEESLSASENQKWRVRKAFENGEIINLRFLFGYDITPDGIRANEVDAAIVREIFARFNGGESMSSICRDLDARGHKGVFGGTWCAERMRNTLSNEKYLGNALLQKRYRNNHIEKKLLPNRGELPMYYAEGTHEPIIDQATFDKAQERLRILAQQTSNRKKPTHSAFSGLIRCGLCGNTYKRVTYRKKHYWNCTTFQTKGKSECAAKRIPEETLEVLTCEVLGEGSIDSDMVRSKITAIRAEKNNVVVYCMDDGSEIVKRWKDRSRAESWTPEMKEKARQRALQARRKKE

SEQ ID NO: 23914 - protein, 532 aa, synthetic construct
MAKRLHGALICARYSTDNQNPDSIEVQVAKCTEWCHTHNIPVLGVYADEATSGMKDTRPRYAAMMRDLRDGVGDMVVIYDQSRMFRKMTSWFSFRDQLTQMGVDVVSVTQPMIGKDLRDPTNFLTEGSMALFNQIWALQSRQKVMEKMRFMAKNGQHTGGKPALGYEVVDGRLAICEAEAKIVRRIFEEYGSGKSYREIVAGLNADGIKTKRGSAFGANSLHDLLKNEKYIGTLVYGQRPYREDGTRNTHAAAADSIRIENAIPAIIDKELFAKVQDKMAANKQQQGGRPPTKRDYPLKGKVFCAECKSAMTISTSQKIYDYYKCSGKKRRHDCDGVNISVDVLERTVANAVRQVLGSPKNVERLITILRDQSGEIQAQAVDALRQLIAREREISRKLDNATDAILGGLSSPTLLARVKDLEQEKTEIDRQMRELKATVDASAIPETRLREIIDEISGDNPAGNAALLAIVCRVEVAKDTITIWTMLDTHPDGTFDWSEEGVLITPGTTSGVPEKNDPNLFLVRDRFGLFLF

SEQ ID NO: 23915 - protein, 502 aa, synthetic construct
MEIQIREGNREQKRKLRVCAYCRVSTNADEQENSLENQIRHYETVIKANPSYEYAGVYSDFAISGFKEKRPGLQKMLADAQKGKIDLILTKSVSRFARNTSIVLEATRKLKELNVGVFFELQNINTLSGEGELMLTILAAFAQAESESGSVGAKMVYQRKYEAGIPVQYLERSFGFKKDERGVYIADEEEAVWVRKIYDMAAQGYTLAAIKRYLNENNVKTVGGAKWLDSTVLRILENEIYKGDYIMHKYFVNEERKLVRNRGEVDAWYIEDDHEAIVSPELWQKAQDALEAKRDYLAEGSVIEEFTEENYPYMNKIFCARCGHPLYKRIYSNGNRLNWGCSGTKRYGKSFCEGINIPDGVLRGAWHFDENMYIGEKQTDKGKKEFTYLKEASWKRRHKKKEPEPIPENTETEYPYREKIFCGLCGSRLVRHVNTKNHKVIWVCNGRKRKGKDFCDGTRVPDTIIKGWGEIKKDIYIQRKDDKNGKKRYSYTSKKPKGADRA

SEQ ID NO: 23916 - protein, 513 aa, synthetic construct
MPQALNAVIYARYSSHSQQEQSIEGQLRDCYAYAQREGLQVVGEYIDRAISGKTDERPDFQRMIADASKKQFQRVIVWKLDRFARNRYDSAHYKAKLKKYGVKVVSATENISDEPEGIILEGLLESMAEYYSANLSKHVRRGQRESVINGTYLGGVPPIGYKVENKRLVIDERTAPTIRYMFEQYAKGVPKREIIAELNARGIRNKKGKPLTLSSMQAALRNEKYIGIYRYSGQEVTGGCEALIDEATFRKVQERLDKVKHAPAAAKAKIDYLLQGKAFCGYCGSRMVGESGRGKMGNTYHYYACGKRKKEHTCAKKNEKKDFIEWYVVEQTVEYVLTPDRMDYIAAALVAQYEKDFGDNRIKDYEKQLERINGEIRSLVDTLAVCPPSARQPIFDKMELLDVQKTDLEIDIAKLRVAARVQLTEEQIKVWLKQFCKGDLDDMEFRERIIDVFINSVYLYDDKTVIYYNIEGGKQVSYMEMLDSTEEPPFADDPQGSSGVRISNDTPRQKPRQ

SEQ ID NO: 23917 - protein, 516 aa, synthetic construct
MQKTDKLPVKAVIYARYSSDRQREESIEGQLRVCEDYARRNNITIVHTYADRAMTGRSDQRPEFQMMIRDAATMSFDIVLVYKLNRFARNRYDSARYKHKLKQYGVRVVSAMENIADDPSGILLESLIEGMAEYYSAELAENVTRGMTENALEGKWAGGIVPLGYKLDEKHHLVIDEPKAAIVRQIYQLALEGHNQKYIIDELNKHHYTNSAGRPFSYNTLRVILKNERYTGTFIWRDIRKENAIPVIIDKMTFEAVQKHMQFRKKNHIRSCSKDFHLTGKLFCGRCSSKMVGVSGTSKQGVLYYYYACTSHLKKKCPSKNIRQDALENLICKITTQILSKPEAIKAIAKQAMKMQKDKKESLEIQSLQNQIADINKKLKNCIQAVENGLISETMTNHIKNYENRLQGLKDEVSRQKLLEGSIHLTEQHIEFFFYSISQKLKTADKYKSILLSSLVRCVIVHENYIEIQFNYKNELPILQNPVKVESSYLNQMVTQGGFEPTTYRLEGGCSIQLSY

SEQ ID NO: 23918 - protein, 667 aa, synthetic construct
MAYAKNKVVKLWTQKKAALYVRVSTRYQVDKDSLPFQRKKLKEYCKFLEIDKYVIFEDDGYSAKNTDRPHFQEMMSRIRTGEFSHVIVWKVDRVSRNLLDFAAMYQELKDHKVTFISMNEQFDTSTAIGEAMLKIILIFAELERNMTSERVTGIMLDRAEQGLWNGARMPVGYRWNEQTKFPEPDPEEVKIVQLIFDRYEEWRSSIKIARFLNNKNFKSKRGGEWTSRLIYDIIRNPFYVGTYRYNMRESGRGPLKPESEWIVRENNHPGIISKDQFDRCNKIMDENASRRDTSEMRARKFVHTFSGHLVCSNCGSNMIACKDHARTNGWRPSIYRCAKRSRMMTCDNSKTVNETYLGTFVFNYIANLARVQKNFTKITSTEKLESELLKGEAFEAVSGIIPDSLNSTFQALLYSNLGNGTYVPDIALLSKFDEVQDHNQIDLLNTEIEKSKNAITRLTDVYLYDPASMTKEEFAAKKKELIKKIEEMEHQLAELLDNSEDNDLTDLSFIKKASAFLVTQRIVSKSFIDYVQMAQELDNEILKNFVDQIVDRIVIKDGRIQSITFVNGLTHEFFYSRPAELPVCKKCGGRIGSTCGCRTRTFSFNGKRYQRIKVGDPRDALYGQKNPVCPECYAKEGRWHHWLCGIELCPICGKPLQTCEHGPNGKE

SEQ ID NO: 23919 - protein, 464 aa, synthetic construct
MARSVTVIPARSQKVQTGHKAVQEKKIRVAAYCRVSTDQEDQLHSFEAQVEYYTKYINEHENYEMAGIYADEGISGTNTKKREQFKKMIADCEGGKIDLVITKSISRFARNTQDCLAYSRKLKNLGIGIIFEKENINTLDSTGELLFTILSSLAQDESRNISENCKWGIRTKFKNGEMHLNTFKFLGYDKDENGKLVINKEQAKTVRRIYRDFLIGINPAQIAKELTEEKVPGCLGQTKWYPSTVIGILKQEKHMGDALLQKTYTADFLTKRQVRNNGEIAQVYVKDSHKGIIDKQTWNAVQEEFDRREKFMESHGTDRYSYGADCMPFCEKVFCGECKSLFTRHSWRSRGIVQWQCKNHRKDGKVACTKAYVDNADLEKGFVKAFNRLVMDRDKHMERWQQMKSDGTPLEKIRAGQMMEAVENEPLTRFVPEITQLVLCEVTVLGAKKYEFFFLEGSRVKVSV

SEQ ID NO: 23920 - protein, 502 aa, synthetic construct
MEIQIREGNSRQKQKLKVCAYCRVSTDADEQENSLENQIRHYKEVITSNPDYEYAGVYSDFAISGFKEKRPGLQKMLADARKGKIDLILTKSVSRFARNTSIVLEATRKLKELNVGVFFELQNINTLSGEGELMLTILAAFAQAESESGSVGAKMVYQRKYEAGIPVQYLERSFGFKKDERGVYIADEEEAVWVRKIYDMAAQGYTLAAIKRYLNENNVKTVGGAKWLDSTVLRILENEIYKGDYIMHKYFVNEERKLVRNRGEVDAWYIEDDHEAIVSPKLWQRAQDALEAKRDYLAEGSVIEEFTEENYPYMNRIYCARCGHPLYKRIYSNGNRLNWGCSGTKRYGKSFCEGINIPDGVLRGAWHFDENMYIGEKQTDKGKKEFTYLKEASWKRRHKKKEPEPIPENTETEYPYREKIFCGLCGSRLVRHVNTKSHKVIWVCNGRKRKGKDFCDGTRVPDTIIKGWGEIKKDIYIQRKDDKNGKKRYSYTSKKPKGADRA

SEQ ID NO: 23921 - protein, 684 aa, synthetic construct
MSILQTIKTIIRVVLYLRLSDEDKNKLSKEELSQSIKNQEIMLRDYAEEQGWEVVGVYNDDDWSGSDATRPDFNRMIEECKNGNVDIVLCKTQARFARDMELVEKYVHNLFHEWNVRFITVVDRIDNARKETKKTSQILGLTDQWYLEDTSLNIRETLKSKRKDGQLTSSFATYGYMKDPENKNHLIIDPISAEVIKRIYDEYLSGTGLDKIARRLNEDKILSPYEYKLLNGSKLKIPVIKDYVNYGYIEKTGTYMLDVSFTNKEEYILKDLVSFNYITTDMKSFNNKCDIVLKKYTNNRTKIYYSENDNIDINNFNIDDCILLNENDVIPKTAKVIISYTKELDRTHTINYQFEITLKENREHEDYYINICGKATDEIKKSDFIHNIRKKFKWSSSTIRTLLTDEVYIGNMVQFKSTTVSYKNHTVVWNDDETRIRKDNTHEPIIAKDIWYTVQERLENTARSCKGGTVHPLCNKVYCSNCNQIFTKTGNRRSDGTGYLCCKDKKTNWSNCDNKASIREDQLHQFILEKMNEMLKKFYEEEDLKEMQNEVIEQDLYKDKLNSLEKELQSINKELQGKSTYFQKLYEDRTNGILPEKEFLILMNKYKDDNEKLEERQKIVKKEISSTLAKKETVKTKKNIFKKYRHIEELSIEIVEDFIDKILIGSYDETTNSRDIKIIWNFTI

SEQ ID NO: 23922 - protein, 521 aa, synthetic construct
MKKVQVIPATLQNYTEKPIHSQKKRRVAGYARVSTDRDEQLTSYEAQVDYYSNYIKGRSDWEFAGMYTDEGISATNTLHREGFKSMIRDAMDGRIDLIITKSVSRFARNTVDSLTIVRKLRDNGVEIYFEKENIWTLDAKGELLITIMSSLAQEESRSISENVTWGHRKRFADGKVSLAFSHFLGYDRGADGNLVVNKEQAETVKLIYRLYLSGYTFHSIAKKLTEQKIPTPARCKIWRPNTVRSILMNEKYKGDALLQKKFTVDFLTKKSKRNEGEVPQYYVQNNHEAIISPQVFDLVQEEMRKRKNSKIRHSGISIFSSKIKCGQCGSWYGAKVWHSTDKYRQTVYRCNDKFKRHCKTPHLTENEIENIFVRAVNQLIKNKDEILSNIILLKIRLVDTTDLEKKRNALEFNMNLLAERVQQLISENACLTQDQVQYNQEYSELVNRYEKIKIKYDQICDTMKQRTSRGQQLERFIENLQKQEFISIFDKRLWCSLVDFITVNEKDDIWVTFKDGTEIKA

SEQ ID NO: 23923 - protein, 547 aa, synthetic construct
MEKKMWKIEQKVTEISKRKRVAAYARVSVESERMQHSLSAQISYYSSLIQKNPAWEYAGVYADYGITGTKIIKRKEFQRMLADAEARKIDIILTKSIQRFARNTVDLLKTVRHLKEIGVEVWFEKENICSLSGDGELMLTILASFAQEESRSISDNIKWRFQKKYEKGIPHAKFFIYGYRWKDGELVIQNEEAAIVRRVFKGYLAGKTRRDIQRELANIGAHTMYGNLFQDSTIKQMLQNPVYKGNLVIQKTFVIDPITKHQVINHGEKDKYVVENHHEAIIDAATFNQVQEEMAWRKEAGKQRGGYARNFLNTSCFTGIIKCGICGKSYIHNIRKYKGKPSEYWSCLSNKGKAEERCGAYGAIPQPALERACMSALEMAIFDKTEFLQRVEKIVVPAYHSLLFYLKDGKVIKQPWKSTALKDMWTEKRKEQVQQRMVQYRKSGLSSRYSAFSERIFCPTCDVKFVRCLETRKNRRVAYWRSRNKYKCVHTSGIQEDWLKKTAAALLGESTFDEQKFREQVEWIEVQKNRTLLFRFYSGENKEVQLP

SEQ ID NO: 23924 - protein, 502 aa, synthetic construct
MEIQIREGNSRQKQKLKVCAYCRVSTDADEQENSLENQIRHYKEVITSNPDYEYAGVYSDFAISGFKEKRPGLQKMLADARKGKIDLILTKSVSRFARNTSIVLEATRKLKELNVGVFFELQNINTLSGEGELMLTILAAFAQAESESGSVGAKMVYQRKYEAGIPVQYLERSFGFKKDERGVYIADEEEAVWVRKIYEMAADGYTPASIKRHLNENGVKTVGGAEWIDSTVFRLIENEIYKGDYIMHKHFVNEERKLVRNRGEVDAWYIEDDHEAIVSPELWQKAQDALEAKRDYLAESSVIEEFTEENYPYMNKIFCARCGHPLYKRIYSNGNRLNWGCSGTKRYGKSFCEGINIPDGVLRGAWNFDENMYIGEKPTDKGKKEFTYLKEASWKRRHKKKEPEPIPENTETEYPYREKIFCGLCGSRLVRHVNTKSHKVIWVCNGRKRKGKDFCDGTRVPDTIIKGWGEIKKDIYIQRKDDKNGKKRYSYTSKKPKGADRA

SEQ ID NO: 23925 - protein, 464 aa, synthetic construct
MARSVTVIPARSQKVQTGHKAVQEKKIRVAAYCRVSTDQEDQLHSFEAQVEYYTKYINEHENYEMAGIYADEGISGTNTKKREQFKKMIADCEGGKIDLVITKSISRFARNTQDCLAYSRKLKNLGIGIIFEKENINTLDSTGELLFTILSSLAQDESRNISENCKWGIRTKFKNGEMHLNTFKFLGYDKDENGKLVINKEQAKTVRRIYRDFLIGINPAQIAKELTEEKVPGCLGQTKWYPSTVTGILKQEKHMGDALLQKTYTADFLTKRQVRNNGEIAQVYVKDSHKGIIDKQTWNAVQEEFDRRERFMESHGTDRYSYGADCMPFCEKVFCGDCKSLFTRHSWRSRGIVQWQCKNHRKDGKVACTNAYVDNADLEKGFVKAFNRLVTDRDKHMERWQQMKSDGTPLEKIRAGQMMEAVENEPLTRFVPEIAQLVLCEVTVLGAKKYEFFFLEGSRVKVSV

SEQ ID NO: 23926 - protein, 463 aa, synthetic construct
MRRKTTAPVEKILLRVAIYIRVSTDKQVKDGDSMRDQLATGQKYIDSHENMILVDTYIDDGISGQKLKRDDFQRLIDDVRAGRIDLIIFTRLDRWFRNLRHYLNTQDILDKHGVSWTAIEQPYFDTSTPHGRAFVNNSMIWAELEAQNDSDRILGVFDDKVDNGEVLSGSTPLGYTIVNKHLVPDDDAPTAVAIFQYYRKTGNLSMTLRYMESEFGLVRSAASLKNMLTNTKYIGEFRDNKNYCPAIIDRDLFFDVQRLLKINIKSGKKHDYIFSGLVVCDDCDHIMSGCQQRARGRVRADGTRIIYKYSVYRCRQGVNLHRCPNRKLVFETTLEKMLLERIRPELENYIAEYEVANLPALRTDAKRRSVEGKMQKLKDLYLNDLITMDEFKLDREKLLMQLEKINAEDSRPVKDLSYLKNFLKMDFESVYDSLSIPEKRELWRSIVKEIRVDHDKNIHIIFL

SEQ ID NO: 23927 - protein, 528 aa, synthetic construct
MTNTARAVTVIPPSKERFSQRSILQPQKRRVAAYARVSTDSEEQRTSYEAQVDYYTQYIQNNNAWQFVKVYTDEGITATNTRHRDGFKEMIADALAGRIDLIVTKSVSRFARNTVDSLVTVRKLKEKGVEVYFEKENIYTLDSKGELLITIMSSLAQEESRSISENVTWGKRKQFADGKVSFAYSRFLGYDRGADGIPCINEAEAKTVVRIYRLFMQGKTACGIARMLTSEGVPTPAGKEKWQTGTVESILTNEKYKGAALLQKKFTTDFLQKKMKVNEGEVPQYYVENSHDPIIPPDEWQSVQDEIQRRKALGKKYTGNSIFACKIVCGDCGEFYGSKVWHSTDKYRSVVWQCNAKFKNEKRCRTPHLTEEVIKSRFVAAFNTLLTRREMLLDQCRLMQTALSDNSVTDGKIAELQQELDIVGELIPKCIEENSRTVQNQQEYTSQYDGLVERYERIQKRLADLTDTRARNNATADAVGAFMFELSEREMPIDEFNDRLWTSVIDHVTVYSDDRMQFAFKGGILIEG

SEQ ID NO: 23928 - protein, 438 aa, synthetic construct
MEKVIERVQFYTHPWEKQQRVAAYARVSSGKDAMLHSLSAQVSYYSDLIQRQRGWLYCGVYADEAITGTKDSRENFQRLLDDCRAGEIDLVITKSISRFARNTVTLLQTVRELKDIGVDVFFEEQNIHTQSSEGELMLTILASYAQEESLSVSENCKWYWRQRMKNGHIVGLRRMFGYDIKRGVISVDPVEAEIVRWIFAEYISGGSTLGIVRSLEGAGVPTVAGGRWNDSRVRDILKNEKYIGNALLQKKYVADHLTKRLVRNHGELAQYYVEGTHEAIIDPDTFEQAQQRMAENTKRCNVQKPTTARYPFSGMIVCGNCGKHFGRKTTHGRISWQCMTFQFEGKSACPAKQIPEPMLFAVCCQVLGINEFDERVFAAQIREIRVTAPNELEFTFSDGHTETRVWKDRSRSESWTDEMKQAASERSKHLHENRRNGQ

SEQ ID NO: 23929 - protein, 446 aa, synthetic construct
MPEKKIRLAAYCRVSSEQDEQLNSFENQVSYYKEYISSHPDYELAGIYADEGISGTSTKRRDEFNRMIADCEAGLIDMVITKSISRFARNTQDCLMYSRRLKDLGIGIRFEKENINTMDSTGELLFTILSSLAQDESRSISENCQWGIRSLFKRGIHHLNTNRFYGYDSDENGKLVINPEQAKVVKWIYESFMEGINPDVMVKILNEKEVPTCMGKSKWTCNQIKSILRNEKHMGDAVLQKTYTPDYLTHKSVKNEGQLPQYYIKEDHPPIVSQQLWEAVQLELDRREAFMKKHFLTSMGQYTDENPLSHRIICGICGHTFSRRTITRLEGRIKVWQCGQHYAKKGEHLCDGRTIREEDLYKAFQLAWNHLVEERDNKGKDWKKKMAEGNALEAYRAEQFLRLTADGGRIKEGKPLVSTVLDHIVFEKNGDLTIYFLDGSQVCVEP

SEQ ID NO: 23930 - protein, 537 aa, synthetic construct
MQIKIIQPSAERELERKKVCAYVRVSTDSDEQEDSYDNQMRYYKDKIESNPDWNFVGIYSDLGISGYKEKRPGFLNMIQEARNGGIDLILVKSVSRFARNTETVLKYSRELKRLGVGIYFELQKINTLSGEGELLLTILAAFAQAESESNSGNVSMSIRRKFEKGELNFPISKIYGYTEDADGNPIIDEEKAKIVRLIFDLAEKGIWVTKISDYLNKKQIPGIAAEKWNYGQVAKMLRQEAYMGDRILQKTYRDSHRRTRKNKGQVDQWYVKDTHPAIVTREQWYRVQDILLERNKELYDATPISEEKNLSTHSTYPLSGMLYCPYCGRVLMHRWEGKKRYENWVCGLHRKVSKDACPGICIPNRIASSWGELKEPMTVLKYTDEYGMERFTAIPKVEYEASEDCPYEVIKPEPKPERPKKPSYKKAPKPETPRYTRTVYPLSGKLFCPNCGKVLTHKWNKGVEYWVCSTNRNKHRAENFVRCKGMYFPAEAAKDWGEITEPVTVIAYKNEYGHRLYTAMPKEEYERSQDCPYRKED

SEQ ID NO: 23931 - protein, 529 aa, synthetic construct
MQRTYPNERSIMATERKKKIIQEDNKKKKVKESTKSTNKKNKRKPLPKLQELMEGNNVVEKCVACYVRVSTDAQAEQGYSIPDQIAKLQAFCTVKGWENVKFYTDPGFSGSNLNRPAMQEMIADAKEEKLRAVIVFKLDRLSRSQKDTLYLIEDVFLPNDVDFVSISEALDTTTPYGRAMIGILSVFAQLERENIFMRTRIGMLGRVSAGYWRGGGNVPFGYDYDKPSKSLVPNADSPKIPQIFDLYLKGYSCQKIADMFGLCNEFHVRNILKRHTYCGFISYKGKEYPGFHPPLIDEETFLRVAVEMERRGKNNISISGDNKHHLLTGLVYCGDCGARMRYMKWGKYDKIICYSRTGKENMIRDPNCLNMGIRASELEKLVVSKLFGIGSSFSAEELEKRKKPISALELLERRRKDAMTSLGHLYDLYANAPDSVLINRIREMREQISTLERQIADEEQYHLTEGRIQQTCEKVQRIGDIWPSLTPMERQTLIRDCVDKIIVYHDGKVEVFYSFYAENESKTSQEEGA

SEQ ID NO: 23932 - protein, 433 aa, synthetic construct
MDRIVERVIFDAPQKPTLVRVAAYGRVSSGKDAMLHSLSAQVSYYSKYIQSHQGWLYVGAYMDEALTGTKANRPEFQRMLADCRAGKIDLILTKSISRFSRNTVAFLETVRELKALGVDIFFEEQNIHSSDGSGELMTTILSSFAQEESRSASENQKWRIRKNFKEGMPWNGRMLGYRYNCGTYTVIPEEAATVKRIFHEYLSGKGGVAIANRLNKDGIPSPSDGKWGKSEIMLILRQYAYTGNLLLQRFYKNNYLEKKTLVNRGELPMYHAENCHEAIVSAEEFTEVQKQIAIRAKRYYRSGSSANRYPLSGRIVCGGCGKHYRRKTTPTGPVWICSTFNFEGKAACPSKQIPEATLLQVCKEVLNSVELTAELLDSRLTDIRAEKNNTLIFSFKDGTETVRQWHDRSRAEAWTAEKRKAASDRRKERDRNG

SEQ ID NO: 23933 - protein, 525 aa, synthetic construct
MAKTVTVIPATVNPFTGMPVTGLHKRRVAGYARVSTDKDEQFTSYEAQVDYYTKYIKANPEWEFVTVYTDEGISGTSTKRRDGFNTMIDAALNGRIDLIVTKSVSRFARNTVDSLSTIRKLKEKGVEVYFEKENIWTLDSKGELLLTIMSSLAQEESRSISENITWGKRKSASDGKVSLAYRNFLGYEKGPNGTPVINQKQAKTVRRIYRNFMAGQTAWAIAKELTADGIPTPAGKSQWHTTTVESILTNEKYKGAALLQKTFTVDYLSKKIKTNEGEVPQYFVEDSHPAIIPPEEWDQVQKEFVRRHSLGRKYSGNSIFSTHIICGDCGAFFGAKVWNSTDKYRHTVWQCNDKFKGGKKCATPHLSEDKIKSGFVQAFNRLFDGKEEIIANCKEVARLFSDTAELDRKKDALQQELCVLSELIRKLIEENATTVQDQNSYLEKYNGYADRYKTVTEAIGALEKEILLKHARADAFRNFIRTFEAVESKLLTFDAKLWALTVDKVKVMADGSLHYIFKNGADITV

SEQ ID NO: 23934 - protein, 535 aa, synthetic construct
MTNIVIYARYSSEKQTEQSIEGQLRVCHEFAERNNYNIVNEYIDRAMTGTNDHRPAFQQMIEDSTKKEFEFVLVYKLDRFSRSKYDNAIYKHKLQQNGVKVISATESISNTPEGALMEGLLEMFAEMYIKDLSEKVKRGMRESILKGNFIGGRTLFGYSVINKKVVVNEEQAKVVKKVFSDYANGKSKQEIKKELNKLNIKTNSNSQFSLQSLQNMLSNEKYVGIYKSKLADNDNYYPPIISLDVFKKVQERLRFNKRHSRNKENYLLRGKVYCGICGNIMVGTSGTSKTQAKHCYYACSQKNKFHNCTKKNEKKQDLESKVIDFILKRILEPKTIDYLADQILKAYEQSLSSDTIKQYEKKIAEIEKEFDKITNQIVKSTNENIIIRLNKQADDLTNEQKVYKNELAKLKLANSIKHTKKDIIDYLNIFIKNSSDSTDAHYKKLIDLFVNAIYVFDDHIHIYFNLFQKQDKIGFAEVKDNEFSCLTEKVTKLSKHEHSGKFFIDCLLQSPRFSDFFYFKYMLLFCENNMLYYEK

SEQ ID NO: 23935 - protein, 498 aa, synthetic construct
MNNIVIYARFSSHSQTEQSIEGQLRVCKEYAKNKGYSILHEYIDRAMTGTNDNRPEFQQMIKDSEKKTFQYVLVYKLDRFSRNKYDNALYKHKLQQNGVKVISATEAISDTPEGALMEGLLEMFAELYSKDLSQKVTRGLKESILKGNFVGGNILYGYKVKDKKIIINEEQAPAIKFIFEEYAKGTRKTEIIEQLNKMGYRTNKGKKFTKQSIQNSLSNKKYIGLYKNKFVENNNYYPAIINKATFDKVQERLKQNKRFATIPKEKFLLSGKVFCGHCGSNMIGTSGTSHTGKTHAYYTCLERNKRHNCDKANENKQKLEDFVFNKIYTKILQPNKIEEIADKLLQEYENDINNTTLKQYERKIEEIEKQFDKITQQIIKSTNDNIVDRLNKQANDLTEQQNIYKEQVKKLKLAMSIKHSKEDIVSYLKFFLNDNPKEESFKEKLFDLFVNSIYVFDDYINIYVDMFDMNDKISFEEAKEHTKQAEQEFAHLTQCSTI

SEQ ID NO: 23936 - protein, 498 aa, synthetic construct
MNTVIYARYSAGPRQTDQSIEGQLRVCTDFCKQRGLTVIDTYCDRHISGRTDERPEFQRLIADAKRKKFEAVVVYKTDRFARNKYDSAVYKRELKRNGIQIFYAAEAIPDGPEGIILESLMEGLAEYYSAELAQKIKRGMHESALKCQSTGSGRPLGYRVDEQKHFQIDPESAQTVQTIFEQYIKGESNAAICELLNSRGLRTAQGKPFNKNSINRIIKNRKYIGEYRYHDIVVEGGMPAIISKDTFNLAQAEMERRRTRKAPKSPKAEYLLAGKLFCGHCKGPMQGVSGTGKSGNKWYYYYCGNTRGKNKTCDKKQVSRDRLERAVVDFTVRYILQEEVLEELARKVHAAQERQNDTASEIAFYEKKLADNKKSIANVLRAIESGAATQTLPARLQELENEQAVILGEISFLKGKRLAFTEDQILFALMKHLEPYPGESEQDYRRRIISDFVSEVYLYDDRLLIYFNISSENGKLKSADLSNIEGGEFDEGLVRSTK

SEQ ID NO: 23937 - protein, 552 aa, synthetic construct
MPTSKNTARKYAAGGSSDNSCGVEPLRAVIYARYSSSGQREESIEGQLRDCYEFAKKHGIIVIGEYIDKAMTGRVDRRPDFQRMMKDSEKGRFNCVLLWKMDRFARNRYDSAMYKYKLKKNGIRIFYAKETIPDGPEGIILESVMEGYAEYYSENLAQNVKRGNYDSALELKTLGKTCLGLKTGPDGRYMIDQAEATIVRRIFEEYAEGERAKDIYERLNSEGYRTSRGGKFNKNSLRRILSNKKYIGVYEYEDIYVENGIPAIITDRDLFERVQKMLKINHDAPARGKAQNFLLTTKLFCGLCGSPMIGDGGTSHTGKAYAYYSCTKRKRGRSCKKESVPKDWIEDLVVGELVKIVHNDELIEQIADRVMEYQKREKDQSGLHALEIRQKENEKAISNMLAAIEAGIITPSTKTRLMELEDDRADIEKGIAHELLAEPEFERDQIIYFLERFRSGDINDEAYRIMLVDTFLNSIYLYDDDHLVLVMNYSGENCKVDLKLVEGAVSGDGCKGSAFAPSSALKKDSVFTGSFFLFMIIECSRSAHSIICSWMR

SEQ ID NO: 23938 - protein, 453 aa, synthetic construct
MECVAYMRVSTEKQAVEGNGLDSQKRDIENYCRKNELVITDWYIDDGYTGANMDRPGLQRLVNDCSRKRISCVVAFKLDRLSRNMIDGIYLIEKVFQKCNVTFKCVHDSVNYDSPMEQAYTQMMAVFAQLDKNTMMLRMRGGMLERIKQGYWMGGGNLPYCYSYSKEQGILIPIPERAEQARKALELFISGYSDVKIKEICGFKSELVTRNILTGIVNIGMIPYKGKIYQGKHEPIFDKGRFNLAQELRKTRAKSRATCQTEPNLLTGLCYCGVCGCAMRYQKWTNGEHKIYCMSRNKSMSYLPNYNANCDNSLEWADDIEKQVEKEILKISLNLSSYKPKEKATKLEIMQSQLDKEQTKLKRLYNLYADGNDTVLEMIKESESLIKTMKANVLSESKSTANTQKKEFVYENIKKLADVWDNIDKKKKNMILKTIIDKIVIVNGNIEIQLKNF

SEQ ID NO: 23939 - protein, 433 aa, synthetic construct
MSGKITIVSKPPKLERKKRVAAYARVSSGKDAMLHSLSAQVSYYSDLIQNHGDWLYTGVYSDEAKTGTKDSRAGFQNLVADCRDGKIDMVITKSISRFARNTVTLLQTVREFKALGVDIYFEEQNIHTISGDGELMMTILASYAQEESRSASENQKWRIKRSFESGIPWDRTLMGYRMENEHYVIVPREAEIVRRIYNEYLSGSGYQLIAKRLNEEGVPSRFGGKWNQSAVSRILSNHTYTGNLLLQKTFRENHITKRKIFNNGELPKYLAEESHEAIVDEKTFQAVQEEKSRRAARFNKKSVPKKTYPFSSLMVCDNCGKNYRRKITKTGAVWVCGTYNSLGKAACASKQIPEFTLQQVTADVLGQNDFTHEWLCDRIQHIRVCNDNALIFCFNDGSEITRIWKDRSRSQSWTDEMKEAARQKTLERSKHNA

SEQ ID NO: 23940 - protein, 438 aa, synthetic construct
MARTIQQITFPEPMRPGLKRVAAYARVSSGKDAMLHSLSAQVSYYSALIQKHAGWLYCGVYADEAFTGTKDSRDGFQDLLAECRARNIDMVITKSISRFARNTVTLLETVRELKALGVDVYFEEQNIHTMSADGELMMTILASYAQEESRSASENQKWRIRHGFERGELVNLRFLFGYKIEKGQVAVDPEKAEIVREVFRRALEGESLTSLAADLNRRGFTGVLGGRWNAMRIREMLSNEKYLGNALLQKQYRNNHLEKKEIPNRGELPQYYAEGTHEAIIDRATFDAAQRLLAKLRESTPVRSPWKKSAFTSMITCAVCGRKYKRCTCGKRHFWNCPTAVQTDLPSCGTSQIPEKLLYDLAAQVLGLTQFDESVFRAKVKGIDALPDKTLVFHLYDGSTAARHWEHTSRAKSWTPEMKEKARQRALAQRRGEKWQER

SEQ ID NO: 23941 - protein, 525 aa, synthetic construct
MARAVTVIPPTIQPITHLARNAVVRRRVAAYARVSTSSEEQLTSYEAQVDYYTRFIQSKPEWEFVKVYTDEGISAVNTKKREGFNQMVRDALDGKIDLIVTKSVSRFARNTVDSLVTVRKLKEKGVEVYFEKENIYTLDSKGELLITIMSSLAQEESRSISENVTWGQRKRFADGKVSLPYSHFLGYRKGADGFPEIVPEEAETVRWIYSLFLSGKTTSSIASLLTKEGIPTPAGKKRWAASTVESILKNEKYKGDALLQKAFTVDFLTKKQKKNEGEVPQYYVENSHPAIIDPAEWKLVQRELERRKAIGRSYSGNSIFSSRLVCRDCGGYFGSKVWHSTDKYRRTIWRCNSKFTGEEKCQTPHLTEEAIKARFLDAFNTLVADKERLLNECRTMQAALTETSSLDSEIAALLSEMEVVAELTKRCIEENSTTAQDQAAYLERYNGLAERYETAKAKLGKLRAVKAKREAKAEDIGGFMFELAEYGDPITEFDDRLWLTVIDTVTVHRDGRLTFTFQTGHEISI

SEQ ID NO: 23942 - protein, 573 aa, synthetic construct
MAYNAQNKTGARVAIYVRVSTLHQIDRDSLPMQKQDLLAYAKLMLNTDDCVIFEDAGYSGKNTDRPKFQEMMSQMRAGAFTHLLVWKIDRISRNLLDFATMYNELKALGVTFVSKNEQFDTSTAMGEAMLKIILVFAELERNMTSERVTATMISRANNGLWNGGRIPYGYDYDYETHEFSVNEEESKVVILMHDMYEQERSLVRVVRELNERGYRSRAGNLWSPVSLLIILRNVFYCGDYRYNMLKEGDRQKVKDESEWVTVENHHVAIIPKDQKERIMATLDSNSKLCKQRNIYKSSKHTHVFGGLIYCGSCGKPLGSTPGNLTRDGWHYSKYTCPTRRKSVTLCTGKSTSDPIIGEFVFNYILNMLNAQNDFDKISSPEELEKLLLIGDTFAYIDHIESNGLNDLFNVLSSGTVKGAVFGKGASLPTKKATVEPEVARLRNEKQKTERALDRLRSLYLYADEAMSEAEYMIQKNKLEETLEDINDQIGMMNTDSWQQSVSDEEFIQRASEFIIAQKLSGRKYVNYKRLAMSVDSEVLKNFVVSIIDSITIQDGLVSNIVFKNGLCHTFIFR

SEQ ID NO: 23943 - protein, 602 aa, synthetic construct
MYITVTLDPNGIYDAYLRKSRADMELEKLKKFDTLKQHEKFLKDRANQLGIKIRKIYREVVSGESIQERPEMQEVLKNVEAGTIDGILVVEVERLTRGDAKDQGTVTQAFKYSNTKIITLNKIYDPNSDEDEEYFEFGLFMSRREYKTINRRMQRARIANVLDGKYCASEPPFGYKKVRVKYGKGYTLEPVSEEADIVKEMYQKRADGMGYDIICNWLNTLDFKPKKSDVWTPATIKGMLSNPIYIGKIRWNSNKQKKILINGQIIKKRKKGNNEDLILVEGLHPAIISNELFDIVQGIKPNKASTKHNTELQNPLATLVKCADCGRSMQRRPYYDNKKQEPKLRRKYDIDKEKLRLCLREHKGEYSLRDIATALKVRKHCVDHWFASNQSKFTMPYADKWEELKKLLNINTTEFDKAITTYESNLIEPHEDTLICPKAHCTNIGSNLALVEQETIKALQEYISSQKELLATYNPAEEDDNVMFVSLSKELDKYNKQLDKAYELVEQGIYTPQEFTKRTKTIKDKITNTEKELNKYQIKLNKDRIEKLLPKIEKVIDSYYKVTSAEKKNKLLKSVISYIEYKKEKGGRGYESNFSIVIHPKF

SEQ ID NO: 23944 - protein, 499 aa, synthetic construct
MNAVIYARYSPGPRQTDQSIEGQVRDCMAYAKENGITVLDVYADRHISGSDFENRGEFNRMLRDAERKQFDSIIVWKIDRFGRDREEIALNKIKLKRHGIRLLYAKEIIPEGPEGIILESLMEGLAEYYVADLRQKVKRGHRESALKGHSVGGQAPYGYKIVDKMYQVEEKEAWVVRYVFENYAAGCTAVEILENLEKMGIKNRKGGLITKNGIYTMLRNEKYIGRCFYDGIPIPIPAIISQELWDTVHATFHKRVGRASSYKAEEKYLLSLKAYCGECGSLLVGECGYGKKGIRYSYYKCAARKRKHGSDKCTLKTYRKDDLEDFVVYHTINDVLQDDVIEYLADRVMEIQARDTVNLRLEQHLSALKDTEKAIGNIMKAIEQGIITASTKQRLMELEAQAEDLKMHIAKEEIKKPALTRDHIVYWLNLFKKGDVSDPDFKQRLMDVFVHSVYVYNKKVVIAYNYADNNHSVDFDPEVFRCSDEHRIVSVRGFEPRTT

SEQ ID NO: 23945 - protein, 505 aa, synthetic construct
MPKTEEKQAVKAVIYARYSSDRQREESIEGQLRVCEDYARRNNITIVHTYADRAMTGRSDQRPEFQMMIRDAATMSFNIVLVYKLNRFARNRYDSARYKHKLKQYGIRVVSAMENIADDPSGILLESLIEGMAEYYSAELAENVTRGMTENALEGKWAGGIVPLGYKLDEKHHLVIDEPKAAIVRQIYQLALEGHNQKYIIDELNKHHYTNSAGRPFSYNTLRVILKNERYTGTFIWRDIRKENAIPVIIDKMTFEAVQKHMQFRKKNHIRSCSKDFHLTGKLFCGRCSSKMVGVSGTSKQGVLYYYYACTSHLKKKCPSKNIRQDALENLICKITTQILSKPEAIKAIAKQAMKMQKDKKESLEIQSLQNQIADINKKLKNCIQAVENGLISETMTNHIKNYENRLQGLKDEVSRQKLLEGSIHLTEQHIEFFFYSISQKLKTADKYKSILLSSLVRCVIVHENYIEIQFNYKNELPILQNPVKVESSYLNQMVTQERFELPTP

SEQ ID NO: 23946 - protein, 572 aa, synthetic construct
MASRIAEKLAAKKAAIYIRVSTHWQVDKDSLKVQRRELIAYVTLVLGITDYVVFEDPGYSAKNTDRPEYQAMMDRIRTGEFTHLVVWKIDRISRNLIDFAAMHDELQSLGVTFVSKNEQFDTSSAIGEAMMRIILIFAELERKTTAERVTAVMLSRASDGQWNGGRVPFGYSWSKETKTFSIVPEEAKAIRRMAELYEQYQSLLYVAKYLNDAGIVTKTGGQWTPTTVRTILTNPWYIGQYVYNVHSDGKGIEKRDSDEWITVENHHEPILNEDVFCRMKFLLTRNKRGGVPSHKTYVRKNIHVFAGLLRCGQCGSNMTANLDRRRANGFRPSQYACGSRRRKGTSCTNKYISDTTLGPFVLNYVANIIRASKNSSEATTPEVLERKLLRGEAFEDVASVSTDALGQLLDAFRSAGDAVEYRPQIAFSGDDNSIREIDTLRARRRKLDNALARLNALYLYDDEAMPEKDFVMQRGQITKQLEEVNARIEELQNQESSEELGDDFIGKASYYIMANKLIEDRYIDYEKYIRAIDPSIPRSFLQQIIDHIVVNDGRVISITFKNGSTHTFTYKT

SEQ ID NO: 23947 - protein, 437 aa, synthetic construct
MGYVTKKVAQRFEEKKAAIYVRVSTQYQVDRASLPVQREELINYAKYALGISDYVIFEDAGYSAKNTDRPDYQQMMARMRTGEFSHLLVWKIDRISRNLLDFSVMYAELKELGVVFVSKNEQFDTSSAMGEAMLKIILIFAELERKTTSERVSAVFVSRANDGIWNGGKVPYGYSYDKESKTFSIAEDEAKIVRLIYSLYESEKSIVRVARIMNERGLKSRAGNDWSPTTVHMILSSPFYSGTYRYNYRDESNTKRFREKGKDEWVLVENHHPAIVSPERQAAVGVILESKRYNKNATYQRKNVHVFAGLLTCGCCGSTMAATTDKVRADGWRPSMYICSRRRKSDDCTNKYVSDVSLGPFVLNFFANLIKASNSFGRTTSIETLEKKLLRGEALSRVDRIERPGLEELYNHLRSGFEEKRFESPTIAATESSVDLS

SEQ ID NO: 23948 - protein, 507 aa, synthetic construct
MQKNITIENTTKAVIYARYSSDRQREESIEGQLRVCEDYAKRNSMTILHVYADRALSGRSDQRPEFQMMIQAAATQAFDTVLVYKLNRFARNRYDSAKYKHKLKKYGVRVVSAMENIADDPSGILLESVIEGMAEYYSAELAENVMRGMTENALECKWPGGTVPLGYKLDAAHHLVIDEPAAKTVRWIYQMALDGRQPSSIIRELNAAGCRTSFGRPFGRTSLNTILKNERYIGTFVWNDIKKPNAIPVIIDPEDWQKVQLITKAKKKCIAKSRGENYLLTGRLFCGQCGENMVGTAGTSKMQRVYHYYDCGNHLKKKGCTTKAIRADKLEDLICNTTTRLLNNHDAIKAIAKQAISAQKAQGPSLILQSLQNQRSDLSRKLQNCIKAVEEGLISQTVTNHIQDYEKQLQTINDDIRKEELMNKVPQLTEKHIEFFFWSMAQQIKKADKYKSILLSSLVRSVIICKDYIEIQYNYKKELPILQNPVKIKSSYLNNMVIHPGFEPGTP

SEQ ID NO: 23949 - protein, 499 aa, synthetic construct
MIAIYARQSLDKKDSISIETQIELCKKEIGDEPYKEYVDRGYSGKNTNRPQFKAMMQDVENGVISKIIVYKLDRLSRSTLDFGELMDALSKHSVEFSSTREKFDTSTPIGKAMLNIIMVFAQLERETIQVRVQDNFRMRSARGAYDAKAPYGYAKTKVMVQGKAVSTLKLDKAYSLMVKKIFEQYAYTSTSLGYLARTLNQQGIKSANGAAWDSCKLSKLLCNPIYVKADAEVYKYYRAKGMEITNDIDDFRGQYGCVTYGQWDRAKNKFAQLSGLTLSIGLHEGIIDAKTFLACQYKLAENTQINNTGRGKHSWLTGLLKCGCCGKAMKVMTYKETATFRCSGAMNTGLCSDSPSVGVREIEEAVEREIFAHVARHQELVVQKRKEEDNKAHNYKIAIAKLDDQIANLITALADGTELTMKYINGRISELQKQRDILAAELQQHKNATKQQDDIKQFHDIINLWPGMTIPQKHEIAMMLIKRVEIQEDTTRIYWKYDL

SEQ ID NO: 23950 - protein, 520 aa, synthetic construct
MKNVTKINQVDFSIFKKTRVAAYCRVSTDSDEQELSLDTQKNHYESYIKANSEWEYAGIYYDDGVSGTKTAKRDGLLRLMEDCEKGLIDLVITKSISRFSRNTTDCLALVRKLLNYEVYVIFEKENINTGSMESELMLAVLASMAESESRSISENEKWGIKKRFQNGTYVISYPPYGYANVDGEMVIVPEQAEVVKEIFAGCLAGKSTHIIAKELNEKGVPTKKGAKWTGGTINGILTNEKYIGDALFQKTITDASFKRKRNYGEEEQYYCEDHHEPIIDKDTFEKAKEAIRQRGLEKGNCSENTAKYQNRYAMSGKIKCGECGRSFKRRYHYTSHGRSYNAWCCGGHIEDSSSCSMKFIRDDDLKRAFLTMMNKLVFGNDLVLKPLLISITTNNSKKNANSVEDIEKEMKSNEEQRKQLNTLLTNGYLERPVFAEAHNKLITEYEHLEAERDLLFRMDDAGYTMEQALKELVDFLNDAKPFTEWKESLFERFIEKVKVLSRDKVEFEFKCGLKLKERID

SEQ ID NO: 23951 - protein, 524 aa, synthetic construct
MAGAKNITVIPAKKRVGNTVTTEDKPKLKVAAYCRVSTDSEEQATSYDAQVEHYTEFIRKNPEWEFAGIYADDGISGTNTKKREEFNRMIEDTMAGKIDMIITKSISRFARNTLDCLKYIRQLKEKNVPVFFEKENINTLDAKGEVLLTIMASLAQQESESLSKNVKMGLQFRYQNGEVQINHNWFLGYTKDENGHLIIDEDQAVVVRRIFREYLQGASLKNIADGLMADGIPTATGNMKWRSDGIRKILTNEKYMGDALLQKTYTVDVLTKKRVANNGIVPQYYVENNHEAIIPRQLFMQVQEELQRRAHLRTENGKRKRVYSSKYALSSIIYCGKCGDLFRRVAWKARGASYNKWRCASRIEKGPKNGCDAEAISESEIQKAVMRAINKTLGGREEFLAQLQHNIEDVLNGDSTATLEYIDQRMAELQEKLVMCVNKNAEYDVIAKEIDALREKKAAVVTKDAEQEMLRKRINEMRHFLQTQTSRITEYDEQLVRRLIEKITVYDDKLIFEFKSGMTVELKR

SEQ ID NO: 23952 - protein, 494 aa, synthetic construct
MIAIYARQSVEKKDSISIESQIEYAKHEVFSDDFKIYQDSGFSGKNTNRPAFMEMMHDIEAGRIEKVVVYRLDRISRSIVDFADFIDVLENNGISFVSATEKFDTSTPMGRAMLYIIIVFAQLERETIAERVRDNYYARVKKGAWGGGPAAYGFDLVRTTLDGKKATIYQPNADLETVARIFEVYSRPNTSLSDVQKELIRTGSLSSGGVNFDNVKLSSILKNPAYVRADIAVYNYYKARGAILANEPEDFDGVHGCILVGKRDASERKYKDVSNHLLAMGHHKGIVDSTMFLYCQEKLSKNRQIKNTGKGKHSWLTGLVKCGHCGYAFSVRFGQTKEGPTPYFVCSGKYLHKCCDVKQTHRVRDVEAHVQARLIQEVESYHLTREKRENAVIKQNQQKIADIDSKIENLISTLENVSSISAEYINRRIETLHREKQLLIHQYSEALAEFNTAEVIPFTADDWENMSFEDRRDIAHNMINRVVLTEDGIDIWFK

SEQ ID NO: 23953 - protein, 534 aa, synthetic construct
MNRAAFAIHHNKIKTAPAPTETVYISEDMRLKSTNIVSSSGQSHKRNICFALAVIFVPILNIFYKRRVMQMPEKILRCAIYIRVSTFEQSVHGKSLQAQKECLEQYATDNNMSIVGVYADEGKTARKELKKRKAIHALVEDVKRDKIDVIIFWRLDRWFRNLSDFYKVQDVLDEHGVRWISVSEPGINMETRDGRLQLNVVLSIGQNEVDTTSERIKFVNEASIRQRKLIFGDANMPFGYKTGVVDGKKCMVKDPETEHMVEDFFNYFRIHNSKKGAVRYMQEAYGIDFSYGMLRTMLSSEFYKGTYRGYPYCPAYLSEKEWNEMQTISKRNIKSTPSGRVYLFTGLIRCPVCGQKLVGTGCSSVINRKTWEKRTYCYYRCNRALKDHICTYRHRVSQNLVEKYLLENLEREYEKYKVRSNQISEELKKQKKTKDPEKLRKEMERLNLLFQKGRISYDYYDKEYQRLEEEHSASAAFPEEEETRSLHYVEEILETDFRQMYDTLSLENRRSFWRSTIQEIYLNEDNTIKGVDFI

SEQ ID NO: 23954 - protein, 545 aa, synthetic construct
MIMVASYCRVSTDKDDQANSFASQQRYFKEFIARQPDWELFRVYADEGITGTNTKKRVDFNRMINDAKMGKFKLILTKEVSRFSRNILDTIGYTRELKALGIGVLFLNDGINTLEPDAELRLSIMGSIAQEESRKTSTRVKWGQARQMERGVVFGRSMLGYDVKDGKLTINPDGAKLIQLIFYKYGVEKKGTSIIAREMREAGYLTYHGNTKWNNTHIVKILKNEKYVGDLVQKKTYTPDYLTHQKKYNNGAEEKICLTNHHEAIIDRDLWNIVQAELARRNRHGKLGVGHGNRYVFSGKIKCGLCGSSFVSRKKHYKSGKFTKKWCCFTATQEGTCHLDPMGNSVGCDIGLLVRDDFAYEVLNVAISTVLDSSRWIVELITECGLTVIKHSGRVSSDSAEKLEYEIEQLRAKKECILDAFFSKDITKDEMRWMNERYDNQLVDLQARMQVVREEEHLNYETSSFQDDVTAHIEGLMNREVDELFQKEILDSIIVYPNRRLEIRLNLLPAKWRFVLESITSLHRKRGCHYDPSVPMSVSSPFASA

SEQ ID NO: 23955 - protein, 507 aa, synthetic construct
MIQVAAYCRVSTDKEDQANSFESQQRYFKEYISKKPEWVLYKIYADEGLSGTSTKKRKQFNRMIQDAHEGRFQLILTKEVSRFSRNIVDTLSYTRDLKRIGVAVEFVTDNINTMDGDGELRLSIMASLAQEESRKTSNRVVWGQTRQMERGVVFGRSMLGYEVTDGNLIVEPEGAEIVRFIFQKYAIEQVGTSEIARLLTKNGYRTYWGSKWKASAVVKILKNEKYVGDLVQKKTYTPDYLTHEKKTNRGEVPLICLQNHHEPIISREIWNLAQERMQMNNKHRGGENGHSNRYVFSGKIKCAVCGASFVGRMKVLKDGTKIRRWSCATATSEGKAGCTIGKLIRDDDALNMLEIALKSLSMDTREITRNVTSLALEAIRSTECATEDKPEQLRFELERIQQKKMAVLDSYFSGEISKEDMLAMKSKYEGQSESLNMRIEKAEKQMLHGYGIESLRKTIQSEVASMLCFRIRSEVLCKTLLDHLTVFPDRHMELRLNDLPQVFRFVG

SEQ ID NO: 23956 - protein, 580 aa, synthetic construct
MVEEKKRKPRKAKSGPERHRKVAIYVRVSTYHQIDRDSLPMQRKDLVAYAEMILGISEYEIFEDAGYSGKNTVRPAYQDMMRRVRAGEFSHILVWKIDRISRNLLDFAKMYEELKRLGVTFVSKNEQFDTSTAIGEAMLKIILVFAELERNMTSERVTAAMISRANNGQWNGGRIPYGYDYDFENGIFSFREGEYDVCQILKNDYLKNKSLTHTSRYLNSLGYKTRAGVDWTPTAVWIIVSSPFYAGIYRYNRYKGTENRTENPSDEWILVPDHHPAIFTLEEHEAMLRILEENSRNKNSVGKQCLRENVHIFSGIAFCGKCGSKMVSTPGRLHADGYRSSNYSCPKRRKTHECDNPTISDTVLGEFIINYVLNMLNAKKEFSKIKTPEELEKKLLQGSTFSSVSRIEQNGLNEFYNLLSRYGSDSSFKITSARKKKRAAVDPEIESLRREKEKQERALQRLQDLYLYSDNAMSEKGFILRKTEITSRLEQINAQLGMSSRGINSSITDEEFIKRKSHILISRQLEDREYIYFVNLAKAVSPDILQQYMGAILDSVQISDGKITCIVFKNGLVHKFIYGS

SEQ ID NO: 23957 - protein, 521 aa, synthetic construct
MKTVTKIEANQRTTGSEKKLRVAAYCRVSTDSDDQLESLAEQKKHYETYIQAHENWNFAGLYYDEGISGTKKEKRSELMRLLSDCEAGQIDFIITKSISRFARNTTDCLEMVRQLLAVNVAIYFEKENINTTSMESELVLAVLSSLAENESVSISGNEKWSIRQRFQSGTYKMNPPPYGYRWNGEQLEVNNDQAEIVKRIFAEFLSGKGVMHIARGLDSDKIAPAHGKQWCQSSILRILKNENYTGNAVFQKTFTDESFRRCVNYGQLDKYLVADHHEGIISKEDFDVVAALIDRHSVEKNITKGSHKYQLRYCFSGKIVCGECGATLKHRTHRLGGETYEAWCCSTHIYNKESCSMKFIRDDDIKLAFVTMMNKLVFGHKLILKPYLLTLRSSPTDSSIQRIQQLRLLIEQNTGQQETLTRLMANGFIDRALFGRELNAIMAQTDEYRAEIDTLSSSVTGDGAKLKETERLIKLVERGRMFMEFDADLFSKLVDRICAFSRNEIGFVLKCGLTLRERIGE

SEQ ID NO: 23958 - protein, 521 aa, synthetic construct
MSNITIIPARPQRANSQQNETEKPKLRVAAYCRVSTDSDEQATSYEAQVSHYTEQITRNPEWAFAGIYADDGISGTNTKKREEFNRMIADCMDGKIDMIITKSISRFARNTLDCLKYIRQLKDRNIPVFFEKENINTLDAKGEVLLTIMASLAQQESQSLSQNVKLGLQFRYQRGEVQVNHSRFLGYTKDENGRLVIDPEQAEVVRRIYREYLDGYSTDKIAAGLERDGILTGAGNPRWHTSTVAKILRNEKYMGDALLQKTYTVDYLSKKRIKNNGIMPQYYVENDHEAIIPKDIFMRVQDELVRRRLVKVSPNGRKHGFSSNHVFSQMIVCGECGELFRRVHWNNHGCRSIVWRCLSRLQPTGVICHARTVSEEVLKNVVVQAFNELLGSRSTYQKRLRDNLAVVLRGYEDEQALEIDKRLAELQQELINYASRKEDYNDIADEIFRLREMKQKNFTDTAVRDEQVKRINELNEFIEQQDSEMTEFDESLARRWLKEIVVWDDRFSVELKSGIVVEIEL

SEQ ID NO: 23959 - protein, 590 aa, synthetic construct
MSDVQVIKANRNENRIRGRKVEILRVAAYCRVSTDSEDQLNSYKSQVMYYTDLIKKKPEWSLADIYADEAITGTQVTKREDFQRMINDCMNGEIDMVITKSISRFARNTLDTLKYVRMLKEKGIAVFFEDENINTLTMDGELLLVVLSSVAQQEVENISSNVKKGLKMKMQRGELVGFQGCLGYDYNKETKSIAVNEKEAEIVRYIFNRYIEGAGCTVIANELENLGYKTKYGSSRWVQSTVIGIIKNEKYKGDLLLGKTFTVDPISKRRLENFGEEDKFYIRDHHQPIISEKIFEEAQKILAKRNVNRGVHQDGQKRNKFSRKYAFSCMIKCGFCGGTLTRRNWHSSSAYTKTIWQCVTATKNGKKHCPYCKGIPEEVIENAFVKSYQLLCSDQHEVVNEFLQKVEEVLEDDTCKKRAPKIEKEMADLHRRKEKLLDLRLDNNIDREIYEKKNQELSEQLKKLQDEQSQLIELNKNRESTKTRLREFRKKLSSGEILESFDRVVFESVIEKIIIGGYNEEGVEEPLKITFVYKTGIHSNFNAKDFKPKRKNAAAVHSGTELYSYTSDEGNKLYLHSSSDTCGVRGCDVT

SEQ ID NO: 23960 - protein, 479 aa, synthetic construct
MSVLPIAHTERKSRMAREIVHIPARTQLAGKQAEPERKIRLAAYCRVSSEQDEQLNSFENQVTYYKSYIMSHPEYELAGIYADEGISGTSTKKRDEFNKMIADCEAGAIDMVITKSISRFARNTQDCLNYSRKLKDLGIGIKFEKEQINTLDSTGELLFTILSSLAQDESRSISENCQWGIRSLFKRGVQKINTNRFYGYDSDENGKLIINEEQAKVVKWIFESYMEGVNPDVIVKILNEKGVQTCMGGNKWTCSQIKNILKNEKHMGDSILQKTYTPDYLTHKSVQNDGQLPKYHIKEDHEAIVSSELWQAVQMEMDRRKKYMEKYSLKTMGQHTDENPFSHRVICGRCNHTMSRRTYARLNGKIKVWQCSQYYAKKGEHLCSSRVLKENIIYEAFELAWNQILADRKNKEKEWERMIREGNSLEAYRGKQFLRLTLPNEKTKIGKQLVSMVLECCIYEENGDLTICFLDGSKIQIEL

SEQ ID NO: 23961 - protein, 537 aa, synthetic construct
MRIKVIQPTTLDTMKKQRVCAYVRVSTDSSEQEDSFDNQTLHYKETIENNPEWEFAGIYSDLGISGYKENRPGFLKMIEDAKAGMFDKIIVKSVSRFARNTETVLKFSRELKSIGVSIFFELQNIDTLSSEGEVMLTILAAFAQAESESNSGNVSMSIRRKFEKGEPNFPVHKIYGFSLDENNDIVINEEEAAVVRMIFDLAEKGIWVSKIADYLNDKKVPPIQAELWGQGQIGRMLRQEAYMGDRILQKTYRDNRRRTRKNKGQVDQWYVKNTHPAIVTREQWYRVQDILLERNKELYDDTPIKEEMHISTHSTYPYSGKLYCPYCGKVLLHRWEAKKRYENWTCSLHRKVSKDACPGMCIPNKIVETWGEIKEPLTVIKYTDEYGMVRFTGIPKAEYENSEDCPYVVETPKLEPEKPKKPTYKKVEKPETPRYTRNVYPLSGKLFCPNCGKVLTHKWNKGMEYWVCSTNRNKHRTENFVRCKGMYFPAEAAKDWGEVTEPLTVIAYKNEYGHRLYTAIPKEEYERSSDCPYRKEE

SEQ ID NO: 23962 - protein, 527 aa, synthetic construct
MIYNAALYCRLSKDDNNVGDSSSIVTQKDMLTRYAHEQNFCIYDVYIDDGYSGTNFDRPAFQKMKQDIENGKVNLVITKDLSRLGRDYIISGQLIEEYFPKHNVRYIAITDGFDSINKYNDIAPFKNVVNELYARDISKKIRSAFETKMKEGKFIGNFAPYGYKKDSEDKNKLIINEEIAPIVQYIFKLAEEGYRPIDIARALNEKHILPPALYRCSKNPKLNVDNYSKRKEWTSPNIQKMLKNITYIGHTAQHKTTKISFKSKVTLANQKKDWIIVENTHEPIIDKQTFEIVQKMIVSRKNPPKSDFKNIFSGIAICADCGSNMSTTGTRKKDSKYNLVCGKYKLYGSKECTNHFIDYDVLYKLVLTNINKHLKITPELRKKILSQLEQTKNNSTGADKRFIELNKRKTEIQTIIQKLYEDNYLGRINEDHFNMVLNSLTKEETQIDAEMSILTHKSNESEYDNYNRFFKLLDNFSDLTELNQDVIRRLIDVIYIYQGSYRTINGIKSKEQKIVIKYKYIGKSIIA

SEQ ID NO: 23963 - protein, 578 aa, synthetic construct
MASQITANIIKNGEPVDILYGRLSQEDDHAGDSNSIVNQRSYLEKYAADNGFPNPVFMADDGYSGTNFDRPAWQDIVTLIEAGLVRTLIVKDMSRLGREYLKVGELTELYFPSKGVRFIAVNDGVDSLVESSSDFNPIRNWANELHAKDTSRKVRSVKRMQAENGERLGGKPPYGYRKRDGDSKHIVPDEETKGIVQRIFQLCSEGKGPCQIARMLKAQQVLNPTNQYYQQTGVACTRLDTTRPYHWCGATVADILSNPVYLGHTLNMQSSTLSYKNKKVIHRPPEEQVLVKNTHEALVDQELWDTVQRIREHKRRPPKHMDEPGLFAGLVYCADCGGYMVLCRTGKMKPEQYYFRCSTYGKRGKDACTPHHITEANLKAIVLDDLRRVTHFARTKKHQFAAYINRKNTAQLRKEMTATQRELDKMVKRNADLSALFKRLYEDNVLGKISNEQFRMLSADYNAEQKQLAASIPEKQAKLEKLKASAANVDVFIEKASRYTEIAELAPELLWTFIERIDIGERPGRYNRNGMQEVRIIYRDIGVVDSTLSAEDAENAEVHFIPSLEMVVQQMASQTQVS

SEQ ID NO: 23964 - protein, 592 aa, synthetic construct
MPNLRKIEAAVPAIREKKKVAAYARVSMQSERMLHSLSAQVSYYSGLIQKNPDWEYAGVYADDFISGTNTVKRDEFKRMLADCEAGKIDIILTKSISRFARNTVDLLETVRHLKDLGVEVQFEKERIRSMDGDGELMLTILASFAQEESRSISDNVKWGIRKRMQNGIPNGHFRIYGYRWEGDELVIVPEEAEIVKRIFQNFLDGKSRLETERELAAEGITTRDGCRWVDSNIKVVLTNVTYTGNLLLQKEFISDPISKQRKKNRGELPQYYVEDTHPAIIDKATFDFVQEEMARRRELGALANKSLNTSCFTGKIKCPYCGQSYMHNKRTDRGYMEFWNCGSKKKKKKGTGCPVGGTINHKNMVKVCTEVLGLDEFDEAIFLEKVDHIDVPERYTLEFHMADGCVVTKACPNTGHRDCWTPERRAEVSAKRRKNGTNPIGASCFTGQIKCVSCGCNFRKATRNCKDGSKVSHWRCAEHNGCDAPSLREDLLEQMATEVLGLDAFDAAAFREQIDRVEVLSSSELRFCFKDGRTASCEWQPSERVGRPWTEEQRTKFKESIKRAYTPERRRQMSEHMKQLRKERGDKWRREK

SEQ ID NO: 23965 - protein, 525 aa, synthetic construct
MAQRKVTAIPATITKYTAVPIGSTKKRRVAGYARVSTDHEDQVTSYEAQVDYYTNYIKGRDDWEFVAIYTDEGISATNTKRREGFKAMVADALAGKIDLIVTKSVSRFARNTVDSLTTVRMLKEKGVEIYFEKENIWTLDAKGELLITIMSSLAQEESRSISENTTWGQRKRFADGKASVAYKRFLGYDRGPNGGFVVNQEQAKTVKLIYKLFLDGLTCHAIANELTDRKLPTPGGKAVWSQSTVRSILTNEKYKGDALLQKEFTVDFLQKKTKKNEGEVPQYYVEGNHEAIIDPATFDYVQAEMARRTKDKHRYSGVSMFSSKIKCGECGCWYGSKVWHSTDKYRRVIYQCNHKYKGGKPCGTPHVTEEQVKDAFVRAVNVLLSEKEELSANVQMVIAVLCDSTELEKRQSELKEELEVVVGLVERCVTENAHVALDQDEYTERYNGLVSRYEAVKAQFDEVTQAVADKADRKKLLEQFLHTVEAQEPIVEFDERLWSSLVDFMTVNSEKDIRVTFKDGTEIQV

SEQ ID NO: 23966 - protein, 587 aa, synthetic construct
MAKSITRIDAKKPDLLQRKRVAAYARVSMDTERLMHSLSVQVSYYSELIQNTPGWEYAGVYADEGITGTKMDSRPEFIRMLADCEAGKIDIILTKSLSRFARNTVDTLNVVRRLKELGIEVRFEKENIWTFDSKGELLITIMASFAQEEVRSLSENVKWGLRKRFEQGMPNGHFHVYGYRWEGDHLVIQPDEAAIVRRIFQNFLQGKSRLETEREFAAEGITTAKGCRWVDSNIKVVLTNVTYTGNLLLQKEYITDPITKKRKKNRGELTQYYVEGTHEAIIDKETFDYVQQEMARRKALGPRANKSLNLTCFSGKIRCPHCGINYGHLRSRRGSSISYWVCGSKRKKKVGDGCPVKGAMSEVAIRKCCAEALGLDAFDEAVFTERVDHLEVPEKDRLTFFMKDGTIFTCDCRNTGHQDCWTPEYRAAVSAYRREHGTNPRGKSCFTSKIKCACGSNYQTSYQKLKDGSIRYWRCPEKCCEKGMREDRLRAVCAEVLGTDGFDEAAFTAQVEYISVLADGVLEFHLADGRAVQHSIDLRRSGTKWSEEQRRHFNESIKGLYTPERRQAMSEHMKQLRKERGANWRKE

SEQ ID NO: 23967 - protein, 525 aa, synthetic construct
MAKRVTTIQPTLTRFTAVPITEQRRRKVAAYARVSTDHEEQQSSYEAQLDYYTNFIRNHDGWEFVNVYADEGITGTSTKHREGFKQMVADALAGKIDLIVTKSVSRFARNTVDSLTTIRQLKEHGTECYFEKENIWTFDSKGELLITIMSSLAQEESRSISENCTWGQRKRMADGKVSVPFSRFLGYDRGENGELVVNPEQAEIVKRIYTEFLQGATPHTIAAGLTADGIRSPGGKDRWNPKTVQSILQNEKYKGDALLQKCFTEDFLTKKQVKNQGQVPQYYVTGDHEAIIPEDVFDMVQREISMRKPGPNRHSGVRVFSSTIYCGECGGIYGSKVWHSNDKYRRVVWRCNRKYDGDQPCGTPHFDEETLKQLFLSALNKLVGKRNEIRDSFDAIRSTVFSTDALEAELAQVEAEMSIAAEQVARSIRENAMVALDQSAYRARHDALCDRYESLKARCAELKETISDKQTRLAAIDDFLRTLMKQEALPTAFDPMTYHILVERMTVYGKDKVMVRFKNGMEIQA

SEQ ID NO: 23968 - protein, 464 aa, synthetic construct
MARSVTVIPARSQKVRTGHKAVQEKKIRVAAYCRVSTDQEDQLHSFEAQVEYYTKYINEHENYEMAGIYADEGISGTNTKKREQFKKMIADCEGDKIDLVITKSISRFARNTQDCLAYSRKLKNLGIGIIFEKENINTLDSTGELLFTILSSLAQDESRNISENCKWGIRTKFKNGEMHLNTFKFLGYDKDENGKLVINKEQAKTVRRIYRDFLIGINPAQIAKELTEEKVPGCLGQTKWYPSTVIGILKQEKHMGDALLQKTYTADFLTKRQVKNNGEIAQVYVKDSHKGIIDKQTWNAVQEEFDRREKFMESHGTDRYSYGADCMPFCEKVFCGECRSLFTRHSWRSRGIVQWQCKNHRKDGKVACTNAYVDNADLEKGFVKAFNRLVTDRDKHMERWQQMKSDGTPLEKIRAGQMMEAVGNEPLTRFVPEIAQLVLCEVTVFGAKKYEFFFLEGSRVKVSV

SEQ ID NO: 23969 - protein, 502 aa, synthetic construct
MEIQIREGNSIQKRKLKVCAYCRVSTDADEQENSLENQIRHYEEVITSNPDYEYAGVYSDFAISGFKEKRPGLQKMLADARKGKIDLILTKSVSRFARNTSIVLEATRKLKELNVGVFFELQNINTLSGEGELMLTILAAFAQAESESGSVGAKMVYQRKYEAGIPVQYLERSFGFKKDERGVYIADEEEAVWVRKIYEMAADGYTPASIKRHLNENGVKTVGGAEWIDSTVFRLIENEIYKGDYIMHKHFVNEERKLVRNRGEVDAWYIEDDHEAIVSPELWQKAQDALEAKRDYLAESSVIEEFTEENYPYMNRIYCARCGHPLYRRIYSNGNRLNWGCSGTKRYGRSFCEGINIPDGVLRGAWHFDENMYIGEKQTDKGKKEFTYLKEVSWKRRHKKKEPEPIPENTETEYPYREKIFCGSCGSRLVRHVNTKNHKVIWVCNGRKRKGKDFCDGTRVPDTIIKGWGEIKKDIYIQRKDDKNGKKRYSYTSKKPKGADRA

SEQ ID NO: 23970 - protein, 513 aa, synthetic construct
MLYAIYLRKSRADLEAEAMGQGETLARHRAALLDYAAHHGLEIGAVYEEIISGESIDARPKMKQLLREVEQGRWAGVLCMDIDRLARGNSADQARVSNTFRISGTLIITPSKVYDQSRESDEEYVDFELFMARREYKAISRRIMRGRIASVKEGHFIGSTPPYGYDKVKVEKGRGFTLLPNSESDTVKQIYSMCISGMGCNAIARRLDMMGVTPRKGSSWSSASIQDILKNPVYCGKIRWQYRKEEKSLTDGIVTTRRRENPDCIIAQGLHPALISEEEFEKAQQFLNSRRIPHKKESTELRNPLSGLVYCGMCGSMMTRLGTGSRNHSDTLRCPNRNCGNVSAKLELVESALVEGVARWLNDCRVNVSRKPAADTAKAERTAADKVRAELAKLDSQRERIYSFLEQGVYSAREFRERMEALEKRRTQLSENLRQAEQAVSEAEGDRQLYARIIPRVERVMDIYAQSTPEEKNRLLKTIISRAEYIKTERNTRGNADRCNFTLNVTPLFPETD

SEQ ID NO: 23971 - protein, 581 aa, synthetic construct
MAYAMKVPAASADDRIVAIYVRVSTGYQVDKDSLPFQKKELKAYCKHILHVDMSRVEIFEDAGRSGKNTKRPAYERMMQKVRAGLVSHVLVYKIDRISRNLVDFSLMYDDFKYNRVTFVSLNEQFDTSSAIGEAVLKIILVFAELERKLTSERVKDIMIGRANEGKWNGARVPYGWDWDSSAGWPVHSEKEAPFGRAMYEMYLEVKSTGKIRDYNNAHKIPTKRGGEWTSKTVGDFLRNPMNKGDYRYNYRESARGRKKPIDEVVYLEGVFDPLIDPEIWEKVNKIMDINRDKRNMVGSHPVEKNCNVFAGLIQCGSCGSGYLVGKKDKRRKNGFTPSMYYCGAKTRAIHCQNLNVSDVKIGPFVINYISAMVRVSNERRKIKTPEDLEEMLLSDKVVFADIMGLSSDSLNNTFELLTGKSATGGALWRADLVDQEGAAADPAEIESLKDQIRKYERAKERLEDAYYFSDDGMSEKEYLEKKNRFDSGRVAAENKLKELTETHIASGVDESAFMKSASAFLLTHKIRAGSHIVYSDLAGMVEEESIKEFFNLVLDHITVKDRCVTEIVFANGLSHKFIYRD

SEQ ID NO: 23972 - protein, 492 aa, synthetic construct
MNIQEIPTKKVEKPRVCAYVRVSTDSDAQEDSFAFQSNYWQNRFENDESVEYIGLFSDEGIGGAFMKKRDGLKRMFQKVRNGEIDRIYTKSVSRFARNKVELMEVVREFRDLGVEIIFESENIHTLDPKCGLILTVMASLAEEELLSMSQNQKWAARKRFANGSVELARILGYDMVDGKLVINEKEAVIVRRIFELYLQGNSFRTICHILENEGYTPMHGGRWSKSTITGMLRNEKYCGDSIMQKSYSTMKVQKYNYGELPKYYIQGDHEAIVSREDYQKAQEIMMARGNKYRPRGSPTALYPLSGKLICGECGTSFKRKTSAHGTPYMCIKWTCRKKDVYGVKECASHDIKDEVVTRLLIEAYNESLDANNDVNGITEQEEVLRKLIANEQELRQLRAKGYISESKCREETDKILIKIKEQETLIKNLQTRDMVKGKYKKSDKLTEQMAEFLVKAIVKEWTITFEFQNGYKATKEYTNGRAGNVNGKLCKH

SEQ ID NO: 23973 - protein, 536 aa, synthetic construct
MKGAVIYARYSCERQTEQSIEGQLHECYKYAEKNGLSILDEYIDRATTGTNDNRPAFQKMLADSERTTAWDIVLVYAIDRFGRNSIEIAINKQKLIKNGKNLISATQRTSTNIDGSKNLDGILLENMYIGLAEYYSAELSQKIRRGLMESREKGLFCGGGLTYGYNVVNKHIVINDEQAEIIRYIFQEYNNGKIIPDIINELNAKGYTYKGGDFVKNSLYRILRNEKYIGITKYMGVEYKNIYPPIISENLFYSIQKRLALYKTGRICKDTELWLKAKVFCGNCGRPMHCDSSTSQSGKRFHYYKCSGRKEHICDMKVIRQDKLDKFIFETTLKVFATDENIKLLVDKIIDVHSKRQKDESLLTGLKARLCDTKKSIDNLLIALQEGIITTSTKDRLKQLESEKEKLEKEIANEENKLALSLSRDDVEKYLRKSLKASPKILLNNLIDKIIVYDDKIEIYFKYSHHVPDDPNDQQGLFYSKCEIPVNRGSRTKQVLDITIDNHNIHFFIRYSTKRNKDLCLPINYKCQKMKNHPLM

SEQ ID NO: 23974 - protein, 472 aa, synthetic construct
MKAALYTRVSTLEQANKGFSLDAQREKLSAYAKSQGYEIFDVYEDDGYSGKDLARPAVTRLLEHIKAHLVDVVIVYRLDRLTRRVRDIIELLDDVLEPNGVKLYSLHEQIDVSSPFGRAALKINATFSELERETITERMVMGKEQAIKSGKWLAPGKKLPFGYRKNPTTNFYEVIPEEADMVKKIYDLYLQGYSIRKLYEYASANFNHTYFSNPMCCKALLHRSMYAGYISYKGSLYKGKNFDPIIDYESYLRVQEQMKKNTTVKKHDCSPYLLTGLVVCVECGNRYVGKLYKNYQTLANGTVKDYSHRVYGCAARLKRDKTYHPAKCTNKIYDAEDLEKAVEEHVRALQFGSFVPGTVISGIVDRLKMELASLKNKREKVLDLYVEGLIDKDTYAERVSDIDKEIDKQNRIIDNEEQKIKSSPTLTIDYVKELHSKYDSLSHNEKRNFLSLIIDHITLSKDNGIIIKFKVK

SEQ ID NO: 23975 - protein, 506 aa, synthetic construct
MKTAAIYARYSSNSQTEQSIEGQLDVCNKYAKDNDLQVVATYIDRAMTGTNDNRPDFQRMLKDSEKANWDAVLVYALDRFGRNAVEVAVNKQKLKKTGKILVSATQRTSDNLDGTKNLDGIILENVYIGIAEYYSAELSQKVLRGLNENRKKGLFCGGGVPYGYRVENKRVYVDEDAAEIVRYIYERYSIGVTVPQILKELNARNVLFKGRAFNSGHVYKILSNERYSGKYTVHGETYTNTFPKIVSDEIFDRVAQTAKKNLRCKRSVEVVYLLKNKVKCGYCGMPVTAETGTSRHGKTIHYYKCSGRKRNITDCDLMIVRKETLEKIVMDAIINALSEPNAISKIVDHIYQVQEQMLNEQKELKLLQSEKQKIDLAIDNIMSAIERGVMSNNAIRRLNELEEQQLEYEKKIAIEKSKTVGLIPKAEIANYYKSALKLEPLLLINYLVDQIILYNDRIEIRFTSPITNSPDDCQGFLLYSNSTTISCYDKITGIFVNEPFYYIVKL

SEQ ID NO: 23976 - protein, 464 aa, synthetic construct
MARSVTVIPARSQKVRTGHKAVQEKKIRVAAYCRVSTDQEDQLHSFEAQVEYYTKYINEHENYEMAGIYADEGISGTNTKKREQFKKMIADCEGGKIDLVITKSISRFARNTQDCLAYSRKLKNLEIGIIFEKENINTLDSTGELLFTILSSLAQDESRNISENCKWGIRTKFKNGEMHLNTFKFLGYDKDENGKLVINKEQAKTVRRIYRDFLIGINPAQIAKELTEEKVPGCLGQTKWYPSTVIGILKQEKHMGDALLQKTYTADFLTKRQVKNNGEIAQVYVKDSHKGIIDKQTWNAVQEEFDRREKFMQRHGTDRYSYGADCMPFCEKVFCGECKSLFTRHSWKSRGIIQWQCKNHRKDGKVACTNAYVDNADLEKGFVKAFNKLVTDREKYMEIWQQMKSDGTPLEKIRAGQMMEAVGNEPLTRFIPEIAQLVLCEVTVLGAKKYEFFFLEGSRVKVSV

SEQ ID NO: 23977 - protein, 502 aa, synthetic construct
MEIQIREGSREQKRKLKVCAYCRVSTDADEQENSLENQVRHYETVIKANPDYEYAGVYSDFAISGFKENRPGLQKMLADAEKGKIDLILTKSVSRFARNTSIVLEATRKLKELNVGVFFELQNINTLSGEGELMLTILAAFAQAESESGSAGAKMVYQRKYEAGIPVQYLERSFGYTKDERGVFVADEAEAVWVRKIYEMAADGYTPASIKRYLNENGVKTVGGVQWVDSTVFRLLENEIYKGDYIMHKHFVNEERKLVRNRGEVDAWYIEDDHEAIVSPELWQKAQDALAAKRDYLAEGSVIEEFTEENYPYMNKIYCAKCGYPLYKRIYSKGNRLNWGCSGTKRYGKTFCDGINIPDGVLRSAWHFKENTYIAEKASDKGVKEFTYLKEQSWKRRHKKKQPPAIPENTEAEYPYREKIFCALCGSRLVRYINPQSHKVTWVCSRRKRKGKDACDGTRVPDTIIKGWGKIKKDIYIQRKDDKNGKKRYSYTSKKPEGADRA

SEQ ID NO: 23978 - protein, 526 aa, synthetic construct
MQYCLYLRKSRADSEAEALGEGETLARHEKALLDLAKKLNLNITAIYREIVSGETIAARPVMQQLLQEVEQGIWDGVLVMEVERLARGDTIDQGIVAQTFKFSDTKIITPIKTYNPNNEFDEEYFEFGLFMSRREYKTINRRLQRGRMASVKDGKYVANKAPYGYNRIRIENDKGWTLEINKEEADVVRLIFELYTVGEKQSDNTFNRLGTGFIAKRLNTMKVSPKRGKVWVVASIRDILINPVYIGMIRWNWRPQQKKMIDGQLHISRPRATDYVLCNGLHPPIISKETFDMAQELMRHNPARPIGEKNTVKNSLSGIVICGNCGRHMVRRPHTKYPDMLICSEPTCNNVGSQLRVVEERILQSLKEWLGEYKISWDITSPPVERISQVSIKKKALQKEQHELDTLNKQISKTHDLLEQGIYTTDVFLERSRALSLRMDEVKEHIAILDKELKTEITREDSAVNIIPKVEKLLEVYHDLPSPKAKNDMLKDVLEKVVYTKKERSKKGNLDNFNITIYPKIPKYIT

SEQ ID NO: 23979 - protein, 506 aa, synthetic construct
MTSDFPCETLKQNISRKTAHDDIMSFYILSYQAFFRYQKEGFYMSFFTPNPQLFGLRVVKYIRCSHDDQVLHGDTLEAQDLILEDFIKVNRMILVDTFIDEALTARKRFNKRKEFVRLLNGVKAHDFDLIIFTKLDRWFRNIGDYHKIQEILEANGVQWKAVTENYDTTTTNGRLHINIRLSVAQDECDRDSDRIKDVFAYKLKNKTYVSGSLPRGLKLDAEKHVIIDPEWNCFALDMFDRFEATCSKRDTQLFLQEKYNIRVCYDTVARYLKNPLFKGQYRDDPDFCPATISPERFERIQKLAIRNVRIRHTQQFYIFSGLLICSSCNHYMCGTVTYRRMADGSEKMYKNYRCNFKAQSKLCDRGKTYREADLEEYMLAHIRPALSDYIAKYEVTAASTVQKNPVTEIAKIERKMKKLYDLFMDDLIDKEAYRSEYDKFKAQIEELQKCSTAAPMRSLDSVKKLLSEDWEAVYHTFSDLEKNTFWKSFVESVLVYEDGSMDIRFL

SEQ ID NO: 23980 - protein, 492 aa, synthetic construct
MNVAMYLRKSRADENNPLETLERHKEILLSYAKDNNLTVIDIFEEVISGGMLYNRTEMLKLLDAIPSHIYDAVLCIDLDRLGRGSAADSEKIFDVLKENDVKIITLKKIYDLNNEYDEDYSEFEMFMARKELKFITRRMNRGRIKSINDGCFVSGAPFGYRNAVINKKHTLEVYEPEAKYVRMIFDMYVNQSMGITSISRQLANLGVLSKKNTPLHPTTIARMLRNHTYIGKIVWNKSKSVKGKNTQEKTSKDDWLYVPGLHEPIIDEDTFNKAQDIINLKYKPPMRTGTLQNPFAGLLKCANCGRAIVINTSNETVEKYRLCCRTLGCNKASALSIVEDKVFEVLTKEFKDIELSLKNIRQSHNKDKLSCLDTIATLETELKKLDKQQLRLYDLLEQEVYTKELFLERNNAISDRRKKINATISQEREKFKLVDTSSVEERLPLLRELLTNYHSLSAAEKNSILKNFVKKIEYKREKSAPEGDIFLKIYYK

SEQ ID NO: 23981 - protein, 523 aa, synthetic construct
MPNTESFTVNEILVYLRKSRSDSQDMSVEEVLRKHEEMIQQYASTHFHSPIPEKNIFREVVSGETIDSRPQMKNLLKMIESEQFKAVLVVEPQRLSRGDLEDCGRLINILRYTNTTVLTLTHSFDLQEEYERKFFEMEITRGNDYLEYTKRILKRGREASVAKGNYIGSVDPYGYKKTVIKKDGVTCHTLEIIPEEADTVKLIHELYAYTPEGIGFTNIAHKLDAMHIKPKKAAHWTPAIISSILCNPLYLGMVRWNNRKVVKYINEGQLAKARPQNTEAKYYKGLHEPIITQELYDACMARRGTNPSLRRNKELCNPFAGLLYCGTCGHAMSLKIYKNHNSVSQMMLCNHQAYCHTKSVLYSAFLRRFISSMEDTLNDFELAQKSDDGRTQAISKTIVINLENKLKKLNEKDARQKDAYEDGIYSKEEFLKRNVRTQQDIASTIIALEDARAKKADIIDYEEKIRRFKDCLHALNDPELSAAEKNRFLKSCVDKILYYNNMESKAGIGRYIENVFSLEIQYK

SEQ ID NO: 23982 - protein, 517 aa, synthetic construct
MPKTEEKQAVKAVIYARYSSDRQREESIEGQLRVCEDYARRNNITIVHTYVDRAMTGRSDQRPEFQMMIRDAATMSFDIVLVYKLNRFARNRYDSARYKHKLKQYGVRVVSAMENIADDPSGILLESLIEGMAEYYSAELAENVTRGMTENALEGKWAGGIVPLGYKLDEKHHLVIDEPKAAIVRQIYQLALEGHNQKYIIDELNKHHYTNSAGRPFSYNTLRVILKNERYTGTFIWRDIRKENAIPVIIDKMTFEAVQKHMQFRKKNHIRSCSKDFHLTGKLFCGRCSSKMVGVSGTSKQGVLYYYYACTSHLKKKCPSKNIRQDALENLICKITTQILSKPEAIKAIAKQAMKMQKDKKESLEIQSLQNQIADINKKLKNCIQAVENGLISETMTNHIKNYENRLQGLKDEVSRQKLLEGSIHLTEQHIEFFFYSISQKLKTADKYKSILLSSLVRCVIVHENYIEIQFNYKNELPILQNPVKVESSYLNQMVTQGGFEPTTYRLEGGCSIQLSY

SEQ ID NO: 23983 - protein, 527 aa, synthetic construct
MKKFKFPIDLSMLTEEEINQFQEDPSTLLQGDTDVCLYLRFSSERQKEQSIEGQLRDCIAYCKRKNYRIVAIYVDRATTARKDVEKRVHFQEMITASVHQTWKLVIVWKLDRFARNREDSAVFKMRLRKNGVKVESATEGISKNPEGIILEAVLEGIAEYYSADLSQKITRGMRESALKCHSIGGHVPLGYKIEDHKLVINPDTAHIVQEAFELYANGETVADICRMFNAKGYRTAKGAEFNRNSFKSMFRNRRYIGVYRYKDFEKEGGVPPIIDKDLFETVQKRLSANAEAPARGKAKVDYLLAGKLFCGHCGGSMNGESGTSKTGAVHNYYACYTRKRQHSCDKKPLRKEWIEQIVAQDAMELLTDDAIQEMADMAISQTEKDLRENTRIPELSERMKETESGIANITKAVEKGIASDALMNRLVELEKEKKNLLRLIAEEEKYVCKIDRDQIVYWLTKFKDGNIEDENFKRIIIDLMVNSVTVWDEPDGFRITTAYNLTSCKNKTFRISSSSDQGFGFEGLEST

SEQ ID NO: 23984 - protein, 564 aa, synthetic construct
MATANYIKGQNETKITALYCRLSQDDGREGESNSISNQKEILLAYAQRNNFPNPQFFTDDGFSGTTFDRPSFVQMENLVEQGVVDTIIVKDLSRFGRNYLDVGNYLEIKYPTLGVRFIAIQENVDTLKETGTEMMPFNNIFNEWYAAQTSKKIRAVWKNKAANGKRVSSSVPFGYVRNQQDKEDWLVDEPAAEVVRKIYALCLDGRGPSQIARQLEQEKVLIPTAYYASLGRKTRKQYTDPYAWDQKTVAGILVNQQYTGCTVNFMTTTVSYKVHKTVYKPKDEWQIIPNTQPAIIDEDTWKRVQELREHRIRPTATGRTSLFSGKVFCADCGSKLHFCAAKSLNANQEHYRCANYKSGRGSCQIHFIRNVVFEKIVLEAINSLADFVRCYEPVFLYLMAQKDIVSKRTETSKLKTAIESGKRRIQDLDKLIERIYEDQVLGNISAERYARMSVNYENEQRSLINKVAEDEKKLACIEQTSLDLKTLLKVLRSSTSFEELTPTLVNSLIRRIEVHNNDKSSGHCYVKVDIYFTAIGFIDIPTEDEITSLMAKIKANPQEYRLTA

SEQ ID NO: 23985 - protein, 456 aa, synthetic construct
MKYVACYCRVSTDEQAKFGFSIQAQKDALEKYCKENGYKYEFYIDEGISASSMKKRKALNEMLSKCNVFDIILFTKLDRLSRNVLDANNINKLLIDNKCTMKAIDEDDIDTSTADGTFIFNLKVSLAQREIGKTSERIKFVFQNKREKGEVTSGTKKYGYDIVDKKFVINKKEAENILNLYNEFINNNGNLKETYKYFIQHFENKGYDAMIHYLHDTSYIGKYKLYRKNIYIDNYIPHIMNNALFYSVQNLFKKREKTSIKTSNISLFSGLIFCGICNTRMCKKQDNRSTKKLIRYCCDNASRRKVGSMEYKCDNHKLIREEYIEKYLLDNIKSIAKNYINANVVISNQTTKNDNSNEIKRIENKILKLKDLYLDDLIDKKTYRSDYESLNKKMNELKNEAISTPQRDSSKLKEIMNLDIYKIYCLFSDEEKRTFWLKIIDKIYIENGKIKEITFS

SEQ ID NO: 23986 - protein, 538 aa, synthetic construct
MAKKVTVIKAAKAQKHTQEERRLKVCGYARVSTGSQAQATSYTAQVEYYTEKIESNPLWEFAGVYADEGISGTNVKHRDEFQMMIADCEDGNIDLILTKSITRFARNTVECIQTIRKLKEIGVGIYFEKENINTLSEKSELFITILASVAQGESENISSNNRWAIQKRFQDGTYIISTPAYGYGKDEDGNLVIIESEAETVRWIYESYLNGMGVYVIAKALNQKGIPTIRGAEKWQDGVIQDILKNPIYEGDMLQQRTYTETRFPFVRRVNNGQRNQYLIKDSHPPIVTHEEAEAVRNLMAYRVDILHMNKSDYTKRYLFSGRIICGECGRTFRRQKIYIGKPYEKIIWTCSGHVEDKESCCMKAIREDVLHRAFTDMWNKLYTNQGTILEPLLKELTELVAARQDSEEIRQLDKEIKDISGQSQILNQVMRKGYMDSALFMESSSKLGWQLTECRRKKTLLTRKLRRTKEIVRTEQLIQLIAEQDGLMEEFDEQLFKMTAEKIVVSKEHDITFCLYNGLKLTERGGGQDAVAHANRL

SEQ ID NO: 23987 - protein, 529 aa, synthetic construct
MAKVTVIPSTINPITKLPNNGLQKRKVAGYARVSTILDEQSSSYQAQVDYYTNLIKRNPEWEFVEVYADEGISGTNTKRRGGFNQMMQDALDGKIDLILTKSVSRFARNTVDSLTFIRKLKEKGVEVFFEKENIYTFDSKGELLITIMASLAQEESRSISENVTWGKRKAFSDGKVSMPYKHFLGYKKGEDGRPTIDEKESLVVKEIYSLFLKYGYSTTKIAKEFNERGICTPSGKGKWTLTTVESILSNEKYKGDALLQKKYVVDFLTHKSKPNDGEIPQYYVENSHPAIIDKIEWDLVQAELERRKKLYKTYSSKNIFASKLVCEDCDSFFGRKIWHSNDEHRAIVYQCNGKFKNKEKRCNTPTLREEEIKSMFLEAYNHFVLDKTALVDDCKLMIETIANVSLIDEQISKQIEKMEELAQKVKELVSSNASTLDSQTDYINNYDRLCTMHSIEETRYKFLLKEKSGRLAKAKSMELFIESIKDKPDVIDSWNSDLWILLVDKAIVHHDKSITFVFKNMKEITIAAK

SEQ ID NO: 23988 - protein, 436 aa, synthetic construct
MQITKILATKKLEKKKLVCAYARVSSDKDAMLHSLSAQVQYYKDYITSNNDWLFVKVYYDEGISGTKQDRPAFQQMLQDAKDGKIDLIITKSISRFARNTVTLLEAVRKLKKYDVDVYFEEQKIHSISSDGELMLTILASYAQEEARSVSENMKWRVKRNFEEGKPWGRAPYGYTIENSKFVIVPKEAEAVKLIFKLYLDGIGSYRIKDIMNKSEYPTRNNCLWTETTIRGMLKNYIYTGNAVFQTTFVKNYITKKKAKNNGEKPMYHVEECHDAIISIEDYNKVQKIIKERTEKIHKGITPKDNPFKGKLICAHCGCTFRMKKNYKKYVWRCGTYIRLGSKKCLSKQIPNDALKNIAKEILGVDELTSEIIDERIEKVIVGDDRLLTFYLKDGNKIDAHWMQKSRSESWTEEMKENARRKAVERNGKSNSNPIND

SEQ ID NO: 23989 - protein, 631 aa, synthetic construct
MSVDIKWQVPKAQPEASELAVVYARYSSHSQGEQSIEGQLSNARDYAAAHGYTIVHEYVDRAKSGRTDNRAEFQQMLKDTAKRQFSVIILWKVDRFGRNREEIAINKMKCRKNGVRVEYVAETIPDSPEGVILESVLEGFAEYYSLQLSQNIRRGRAESAEKCQSLGGNRPLGYKTGPDKKFVIDENTAPTVKMIFTMYADGKTVTEIVDKLNEMGLRTLRGGPFTKNSLHSILKNKKYIGIYEYQGREIKNGVPRIIEDDVFNKVQEMLKINKRAPAKTWSRADYILTDKLFCGKCGALMFGESGTSKTGAKHNYYICSNKKRFRSCDKKAVRQADIEDTVLNATHELLQDDELLDYIVDRTWEYYLAQDNSQEELRNLQRQLAQTDTAISNLIRAIEAGILTEETKKRMDELTQQKADLKASIADREIARGFHLQKSHIAFYLRSLRDADWSDKEAQKRLIQTFVNAVFVYDDHITLTYNFSGDKSTVTLRDMQRFEDGEEFGCRASRSTNNKRTALAVLLLLKKHRIIRTPSSPKGLKRFAPEETTESVQTDAQTGVQNPLCSTNNKRTALAVLLLLKKYRIIRTPSSPKGLKRFAPEETTESVQTDAQTGVQNPRRSLSYAREEIYP

SEQ ID NO: 23990 - protein, 502 aa, synthetic construct
MIAIYARQSVEKKDSISIESQIEYAKREVFSEDFKIYQDSGYSGKNTNRPAFHEMMADVQSGRIEKVVVYRLDRISRSILDFADFINILESNRISFVSATEKFDTSTPMGRAMLYIIVVFAQLERETIAERVRDNYYARVKKGAWGGGPAAFGFDLVKTTIDGKKATICQPNEQISVVQRIFDLYALPYSSLADVQRQLIQDGSISSGGVNFDNAKLSSILKNPAYVRADTAVYNFYKAKGAILANPPEDFDGVHGCILVGKRDANERKYKDVSNHLLAIGHHEGIVDSTAFLFCQQKLSRNRQIKNTYKGKHSWLTGLVKCAHCGYAFSIRFSKTKDGQVPYFCCSGKYLHKACTAKQTHRVREIEAEVQASLIQHAASYNLIHRQNTDAAAKEFQSRISEIDAKIENLILSLESVSHVSAQYINQRIEALHHEKQLLLHRYNETISEYNINEVTPFSATDWEQMDIEQKRQLARSLIRTVYLSEDGLSVSFNIKNGGHKP

SEQ ID NO: 23991 - protein, 558 aa, synthetic construct
MAKKKKPAGGIAVIYARYSSHNQRDVSIEQQIEACRKHAAELGLTIIATYEDRAISGRTDNRPAFQRLMHDAEKGKFSYVLAWKSNRMGRNMMQAMVNESRLMDCGIKVYYAEEDFDDSAAGRFALRSMMNVNQFYSDNLAEDVRRGLMDNANKCMVNGRQPLGYKRGKDGKVVVDEPAAAIVREVYTRVASGELFTDIARDLNRRGIKTADKGEWNKNSFHRLCSNEKYRGIYIYGDVRIEGGIPTIIDDPLWYKVQEALRVKKLKRNGRHRPGDEDYLLTGKLRCGKCGGYMIGMSGRSKTGDIHYYYACQNRRVGRTCDKKNIRRDVIEPAVAQAIKEYCLTDDAIEWIADKTVEYWEKADRNLQLDSIEGDLVAVQSSISNVMKAIEMGVVTETTRDRLIELEKQRTDLKSKLALAKEEVVHVDRKKLISSLLLFRNGDIHDRQYQEDLFKTFLISVYVYDDDNNGHLKIVFNAFGDNNTVDLPIDFGETDNQSAFSDGAEKFDYSLHRSTKKPSDLCRMVFSFYIVIQKQRTAFATVRPFLCSYYRMLMRPAP

SEQ ID NO: 23992 - protein, 525 aa, synthetic construct
MARAVTVIPPTIQPITHLARNAVVRRRVAAYARVSTSSEEQLTSYEAQVDYYTRFIQSKPEWEFVKVYTDEGISAVNTKKREGFNQMVRDALDGKIDLIVTKSVSRFARNTVDSLVTVRKLKEKGVEVYFEKENIYTLDSKGELLITIMSSLAQEESRSISENVTWGQRKRFADGKVSLPYSHFLGYRKGADGLPEIVPEEAETVRWIYSLFLSGKTTSSIASLLTREGIPTPAGKKRWAASTVESILKNEKYKGDALLQKAFTVDFLTKKQKKNEGEVPQYYVENSHPAIIDPAEWKLVQRELERRKSIGRSYSGNSIFSSRLVCGDCGGYFGSKVWHSTDKYRRTIWRCNSKFTGEEKCQTPHLTEEDIKARFLDAFNTLVTDKARLLDECRAMQAALTDTSSLDSEIATLLSEMEVVAELTKRCIEENSTTAQDQAAYLERYNGLAERYETAKAKLEKLRAVKAQREAKAEDIGGFMFELAEYGDPITEFDDRLWLTVIDTVTVHRDGRLTFKFQTGHEISV

SEQ ID NO: 23993 - protein, 438 aa, synthetic construct
MARTIQQITFPEPMRPGLKRVAAYARVSSGKDAMLHSLSAQVSYYSALIQKHAGWLYCGVYADEAFTGTKDSRDGFQDLLAECRAGNIDMVITKSISRFARNTVTLLETVRELKALGVDVYFEEQNIHTMSADGELMMTILASYAQEESRSASENQKWRIRHGFERGELVNLRFLFGYKIEKGQVAVDPEKAEIVREVFRRALEGESLTSLAADLNRRGFTGVLGGRWNAMRIREMLSNEKYLGNALLQKQYRNNHLEKKEIPNRGELPQYYAEGTHEAIIDRATFDAAQRLLAKLRESTPVRSPWKKSAFTSMITCAVCGRKYKRCTCGKRHFWNCPTAVQTDLPSCGTSQIPEKLLYDLAAQVLGLTQFDEPVFREKVKSIDALQDKTLVFHFYDGSTVARHWEHTSRAKSWTPEMKEKARQRALAQRRGEKWQER

SEQ ID NO: 23994 - protein, 434 aa, synthetic construct
MERVVERVDALIPAQPKALRVCAYARVSTGKDAMLHSLSAQVSYYSKMIQSHNGWMYCGVYSDEAVTGTKRERAGFQHMIEECRQGNIDLVITKSISRFARNTVTLLQTVRELKSLGVDVFFEEQHIHTMSADGELMMTILASYAQEESLSASENQKWRVRKAFENGEIINLRFLFGYDITPGGIQVNEKDAAIVREIFARFNGGESMSSICRDLDARGHKGVLGGTWCAERMRNTLSNEKYLGNALLQKQYRNNHIEKKLLPNRGELPMYYAEGTHEPIIDQATFDKAQERLRMLAQQAANRKKPTRSVFSGLIHCGLCGNTYKRVTYRKKHYWNCTTFQTKGKSECAAKRIPEETLEVLTCEVLGAVSFDPDMVRSKITAIRAEKSNMVVFCMDDGSEIVKRWTDRSRAESWTPEMKEKARQRALQARRKKE

SEQ ID NO: 23995 - protein, 528 aa, synthetic construct
MNRTAARSVTVIPPTINPLTHLSRVTVQKRRVAGYARVSTDSDEQFTSYEAQVDYYTQYIKHNPEWEFVKVYTDEGISGTNTKHRIGFNEMIADAMSGKIDLIVTKSVSRFARNTVDSLVTIRKLKEKGVEVYFEKENIYTFDGKGELLLTIMSSLAQEESRSISENVTWGQRKRFADGKVNLPYKQFLGYRKGADGFPEVVPEEAIVVHRIYTRFMEGLTPGAIAKELTADGIPTPSRKQRWQTSTVESILQNEKYKGAALLQKCFTVDFLTKKRKVNEGEVPQYYVEHSHEPIITPEEFDKVQTELARRKQISRQYSGKSIFSSRIVCGDCGSYFGSKVWNSTSKYRRVIWQCNSKFKGEHKCETPHLDEEAIKARFVTALNAIIDSKDGILEDCRLMQATLTDCTGIDTEIESLLEEIDVVTELTKRCIAENSQMAQNQEEYAARYNGFVERYEKAKARLEQLRTTKAAREAQAEAIGAFLFEVQELDALTEFDEKLWLTIIDTITVHADGRMTFKFQGGTEIEA

SEQ ID NO: 23996 - protein, 523 aa, synthetic construct
MRFFSYGRKSVFSDKSDSIDNQFRMNREYCESKFSGQVDSWQQFSDEDFTGANTSRPDLQRMLSFIKGGFCDVLVVYQLDRLSRDVRDFANIYALLEEHGVMFISIKENIDTTTPIGRAMMYVTVVFAQMERETIAARVTDNMLGLAKKGYWTGGNPPVGYVRKHIVVNGKKHCSIEVDPDGARYVTQIFDTFLAYNCSLQGMETRFKNQGIRTQSGKFFSTTQLHKMLTMPYCVEATPEVYDFYAAKGCIMDPGSPREMWDGSVGVIIYGRSTEKNKKHQAQPPEKWTVCLGKHKPFMPAEKWLAVQSRFTQNKCIKDAKWPVPLLKGVLRCKCGNLMQVSRKKKVDGTCSSWYYCRKRMRQGVDACDMGQIKCDLLDEEVLELFRGITADPALIQKFVKAVAPADVPDLKAAQARVSACERKIGRLAASLALAEDSAASKYIIAEMERLDVELGALKREASLAEMESHRAAASAKDAKATAAEIAKLIHGLDGFDDKEKNAIARAVIQECTWDGERLFITL

SEQ ID NO: 23997 - protein, 464 aa, synthetic construct
MARSVTVIPARSQKVRTGHKAVQEKKIRVAAYCRVSTDQEDQLHSFEAQVEYYTKYINEHENYEMAGIYAEEGISGTNTKKREQFKKMIADCEGGKIDLVITKSISRFARNTQDCLAYSRKLKNLGIGIIFEKENINTLDSTGELLFTILSSLAQDESRNISENCKWGIRTKFKNGEMHLNTFKFLGYDKDENGKLVINKEQAKTVRRIYRDFLIGINPAQIAKELTEEKVPGCLGQTKWYPSTVIGILKQEKHMGDALLQKTYTADFLTKRQVKNNGEIAQVYVKDSHKGIIDKETWNAVQEEFERREKFMQKHGTDRYSYGSECYPFCEKIFCGECGSLFTRHSWKSRGIIQWQCKNHRKDGKVACTNAYVDNADLEKGFVKAFNRLVGEREKHIERWNSMKLDGTPLEKIRAGQMMEATESGQLQKYVPEAAQLVLEEITIFGAKKYEFAFLEGSRVKVSV

SEQ ID NO: 23998 - protein, 502 aa, synthetic construct
MEIQIREGSREQKRKLKVCAYCRVSTDADEQENSLENQVRHYETVIKANPDYEYAGVYSDFAISGFKEKRPGLQKMLADAEKGKIDLILTKSVSRFARNTSIVLEATRKLKELNVGVFFELQNINTLSGEGELMLTILAAFAQAESESGSAGAKMVYQRKYEAGIPVQYLERSFGYTKDERGVFVADEAEAVWVRKIYKMAAEGYTPASIKRYLNENGIKTVGGVQWVDSTVFRLLENEIYKGDYIMHKHFVNEERKLVRNRGEVDAWYIEDDHEAIVSPELWQKAQDALAAKRDYLAEGSVIEEFTEENYPYMNKIYCAKCGYPLYKRIYSKGNRLNWGCSGTKRYGKTFCDGINIPDGVLRSAWHFKENTYIAEKASDKGVKEFTYLKEQSWKRRHKKKQPPAIPENTEAEYPYREKIFCALCGSRLVRYVNPQSHKVTWVCSRRKRKGKDACDGTRVPDTIIKGWGEIKKDIYIQRKDDKNGKKRYSYTSKKPEGADRA

SEQ ID NO: 23999 - protein, 492 aa, synthetic construct
MNVAMYLRKSRADENNPLETLERHKEILLSYAKDNNLTVIDIFEEVISGGMLYNRTEMLKLLDAIPSHIYDAVLCIDLDRLGRGSAADSEKIFDVLKENDVKIITLKKIYDLNNEYDEDYSEFEMFMARKELKFITRRMNRGRIKSINDGCFVSGAPFGYRNAVINKKHTLEVYEPEAKYVRMIFDMYVNQSMGITSISRQLANLGVLSKKNTPLHPTTIARMLRNHTYIGKIVWNKSKSVKGKNTQEKTSKDDWLYVPGLHEPIIDEDTFNKAQDIINLKYKPPMRTGTLQNPFAGLLKCANCGRAIVINTSNETVEKYRLCCRTLGCNKASALSIVEDKVFEVLTKEFKDIELSLKNIRQSHNKDKLSCLDTIATLETELKKLDKQQLRLYDLLEQEVYTKELFLERNNAISDRRKKINATIAQEREKFKLVDTSSIEERLPLLRELLTNYHSLSAAEKNSILKNFVKKIEYKREKSAPEGDIFLKIYYK

SEQ ID NO: 24000 - protein, 502 aa, synthetic construct
MEIQIREGSREQKRKLKVCAYCRVSTDADEQENSLENQVRHYEMVIKANPDYEYAGVYSDFAISGFKEKRPGLQKMLADAEKGKIDLILTKSVSRFARNTSIVLEATRKLKELNVGVFFELQNINTLSGEGELMLTILAAFAQAESESGSAGAKMVYQRKYEAGIPVQYLERSFGYTKDERGVFVADEAEAVWVRKIYKMAAEGYTPASIKRYLNENGIKTVGGVQWVDSTVFRLLENEIYKGDYIMHKHFVNEERKLVRNRGEVDAWYIEDDHEAIVSPELWQKAQDALAAKRDYLAEGSVIEEFTEENYPYMNKIYCAKCGYPLYKRIYSKGNRLNWGCSGTKRYGKSFCDGINIPDGVLRSAWHFEENTYIDEKASDKGVKEFTYLKERSWKRRHKKKQPSAIPENTETEYPYRENIFCALCGSRLVRYVNPQNYKVTWVCNRRKRKGKEACDGTRVPDTVIKGWGEIKKDIYIQRKDDKNGKKRYSYTSKKPEGADRA

SEQ ID NO: 24001 - protein, 523 aa, synthetic construct
MEQTKNITVIPARRRVGNTAKKSEIPKLRVAAYCRVSTDSDEQATSYEAQVEHYTDYIRKNPEWELAGIFADDGISGTNTKKREEFNRMIDEAMAGKIDMIVTKSISRFARNTLDCLKYIRQLKEKNIPVYFEKENINTMDAKGEVLLTIMASLAQQESQSLSQNVKLGFQYRYQQGQMTVNHNRFLGYTKDEKGQLVVEPKEAEVVKRIFREYLEGASLQQIARGLEADGILTGAGKTKWRAETLQKILKNEKYIGDALLQKTYTVDFLEKKRVPNNGLVPQYYVENSHEAIIPRDLYMQVQEEMVRRANLHSGKNQKKRVYSSKYALSSMVYCSKCGEIYRRVVWNNKGKKSVVWRCCTRMENGPGACNADAIHESELQNLTVRAINMALAKKDTMNETLQKNVEAVLTGADGVPLSEIDSRLEELQKELLKVANSKGNYDTIADEIYRLREVRQNALVENAEREGMKKRISEMQQFLSEQTQEVTEYDEQLVRRLIEKITVYDEWVTVEFKSGTSVKVRR

SEQ ID NO: 24002 - protein, 520 aa, synthetic construct
MKRITKIGANETPVQKKKLKVAAYCRVSTASDEQLISLDAQKTHYENYIRSNDEWEYVGLYYDEGITGTKKDIRAGLLSMIADCEDGKIEFIITKSISRFARNTTDCLEMVRKLTDLGISIFFEKENINTGSMESELMLSILSSLAESESVSISENSKWSVQKRFQNGTFIISYPPYGYENDNGTMVIVPEQAEVVKEIFAACLAGKSTHAIAKELNARGVKTKKNGKWGAGAVNAILTNEKYTGDVIFQKTYSDSSFNRHANHGERDRFLCQNHHEPIISHEDFEKVRAVLDQRAMEKGNGTDTYRYQNRYCFSGKIKCGECGATFKRRQHYKPSGDYVAWTCKTHLEDKTECSMLYISDDGIKLAFLTMMNKLVYGHGTILKPLLRTLRGTDDKDRLLRIQELELRIEGNTDRKQILTNLMATGVLEPAVFNKENNALLAEEQQLHAEKDKLVSFVGGDKVRMKELQKLMAFTSKGEMLIAFSDETFLAFVDSITVETRERIVFHLKSGLNLTERLVM

SEQ ID NO: 24003 - protein, 684 aa, synthetic construct
MSILQTIKTIIRVVLYLRLSDEDKNKLSKEELSQSIKNQETMLRDYAEEQGWEVVGVYNDDDWSGSDATRPDFNRMIEECKNGNVDIVLCKTQARFARDMELVEKYVHNLFHEWNVRFITVVDRIDNARKETKKTSQILGLTDQWYLEDTSLNIRETLKSKRKDGQLTSSFATYGYMKDPENKNHLIIDPISAEVIKRIYDEYLSGTGLDKIARRLNEDKILSPYEYKLLNGSKLKIPVIKDYVNYGYIEKTGTYMLDVSFTNKEEYILKDLVSFNYITTDMKSFNNKCDIVLKKYTNNRTKIYYSENDNIDINNFNIDDCILLNENDVIPKTAKVIISYTKELDRTHTINYQFEITLKENREHEDYYINICGKATDEIKKSDFIHNIRKKFKWSSSTIRTLLTDEVYIGNMVQFKSTTVSYKNHTVVWNDDETRIRKDNTHEPIIAKDIWYTVQERLENTARSCKGGTVHPLCNKVYCSNCNQIFTKTGNRRSDGTGYLCCKDKKTNWSNCDNKASIREDQLHQFILEKMNEMLKKFYEEDDLKEMQNEVIEQDLYKDKLNSLEKELQSINKELQGKSTYFQKLYEDRTNGILPEKEFLILMNKYKDDNEKLEERQKIVKKEISSTLAKKETVKTKKNIFKKYRHIEELSIEIVEDFIDKILIGSYDETTNSRDIKIIWNFTI

SEQ ID NO: 24004 - protein, 502 aa, synthetic construct
MEIQIREGNSRQKQKLKVCAYCRVSTDADEQENSLENQIRHYKEVITSNPDYEYAGVYSDFAISGFKEKRPGLQKMLADARKGKIDLILTKSVSRFARNTSIVLEATRKLKELNVGVFFELQNINTLSGEGELMLTILAAFAQAESESGSVGAKMVYQRKYEAGIPVQYLERSFGFKKDERGVYIADEEEAVWVRKIYDMAAQGYTLAAIKRYLNENNVKTVGGAKWLDSTVLRILENEIYKGDYIMHKYFVNEERKLVRNRGEVDAWYIEDDHEAIVSPKLWQRAQDALEAKRDYLAEGSVIEEFTEENYPYMNRIYCARCGHPLYKRIYSNGNRLNWGCSGTKRYGKSFCEGINIPDGVLRGAWHFDENMYIGEKQTDKGKKEFTYLKEASWKRRHKKKEPEPIPENTETEYPYREKIFCGLCGSRLVRHVNTKNHKVIWVCNGRKRKGKDFCDGTRVPDTIIKGWGEIKKDIYIQRKDDKNGKKRYSYTSKKPKGADRA

SEQ ID NO: 24005 - protein, 464 aa, synthetic construct
MARSVTVIPARSQKVRTGHKAVQEKKIRVAAYCRVSTDQEDQLHSFEAQVEYYTKYINEHENYEMAGIYADEGISGTNTKKREQFKKMIADCEDGKIDLVITKSISRFARNTQDCLAYSRKLKNLRIGIIFEKENINTLDSTGELLFTILSSLAQDESRNISENCKWGIRTKFKNGEMHLNTFKFLGYDKDENGKLVINKEQAKTVRRIYRDFLIGINPAQIAKELTEEKVPGCLGQTKWYPSTVTGILKQEKHMGDALLQKTYTADFLTKRQVRNNGEIAQVYVKDSHKGIIDKQTWNAVQEEFNRREKFMESHGTDRYSYGADCMPFCEKVFCGECKSLFTRHSWSSRGIVQWQCKNHRKDGKVACTNAYVDNADLEKGFVKAFNRLVTDRDKHMERWQQMKSDGTPLEKIRAGQMMEAVGNEPLTRFVPEIAQLVLCEVTVLGAKKYEFFFLEGSRVKVSV

SEQ ID NO: 24006 - protein, 502 aa, synthetic construct
MYIHSREVIPTNFMYLRKSRAEEGQSTEEVLAKHRAALEELADRLGLPVDGVYEEVASGEKLYARPEMLKLLERIRAGEVDAVLCMDIDRLGRGGMADQGTILDAFRESGTLIITPEKTYDLTNDVDIEMTEFKAFFARAEWRAIRKRMRRGLMQTIEAGGYTANAPYGRCRIGKLPSLEIIPEEARFVRYIYERYLAGIGAQTIAQELNAMGSTPRRGAEWNRNTVRHVLRNPTFAGKVAWNRVKHYRPGAHGKDKHHVVYTPEGEWLMVDGVHEAIIPWDTWLEAQERRKQRYIPPSNTGQRANPFAGIIRCSKCGNNMQRMGSSSGEPYLLCTTKGCTAGAKFEYVEERMVELLYDELARLRLLIDSGAAPNIDALEAALAAAQREQERVQARIPRLYEFLEDGTYDRSTFRSRLDAAEKELAELASKRAGLERQIDERRRIDPRKAAAALENLVQLYPTMSPADKNSALKALGVEVTYTKEKKTKPRDFTLELQLRDF

SEQ ID NO: 24007 - protein, 435 aa, synthetic construct
MAAYCRVSTDQEDQLHSFEAQVEYYTRYISDHPNYEMAGIYADEGISGTNIKKREQFRRMISDCETGKIDMVITKSISRFARNTQDCLQYSRMLKNLGIGILFEKEHINTLDSSGELLFTILSSLAQDESRNISENCKWGIRSKFKKGEMHVNTHKFLGYDKVDGKLVINEREAKIVRRIYREFLWGHSPQEIAKGLEDEGIEGCMGSKKWYPSTVINILKNEKHMGDALLQKSYTADFLTKKQVKNHGEVTQVYVKGSHIGIIDKETWNAVQLEFARREEFVKEHGLKGYGYGRECNPFTSRIFCGECGSPYTRHTWRSRGIMQWQCKNHMTDGKVTCVNGFVSQSDLELGFVKAYNMLLKHKEILIPRWKEAIETGNALERLRAKQFLDLSEQPELECYVPELAQLVIQMVIIKGIKKYEFTFMDGSRETVCV

SEQ ID NO: 24008 - protein, 504 aa, synthetic construct
MEIQVLEARSSKGYREKVCAYCRVSTDALEQENSLENQIAYYENLIQSNPEYEYAGVYYDFAISGYKEKRPGLQKMLTDARNGKIDLIYTKSVSRFARNTAIVLKASRELKELNVGIFFELQNINTLSSQGELMLTILAAFAQAESESGSIGAKMVYQRKYEQGIPVQYLERCFGYTKNEKGEFVPDTEQAKWIVKIYEMAAEGYSLSTIADEMNAAGVKTDKGAGWVESTVKRILENEIYKGDYIMHKNYVNEERKLVRNRGEVDAWYIEDDHPPIVSRQLWDKAQEARKKKRDYLDMDCQIREVTEENYPYKGHLFCAKCGSPLTHRIYSNGNRMSWDCSGRRRHGKEFCDGIHVPDTAVQQWKFEGNIYISVKDSRKSIKEFSYTKESSWSRRHKKKEFVRDVPELTEENYPYYRSIFCAECGSRLVRHIKKHGDIVWECNGRKRKGAAYCEGVRIPDRVVQAFMPIWKAIYIKERKGRNGTKHYSYSCKKPERVTREEQG

SEQ ID NO: 24009 - protein, 574 aa, synthetic construct
MRKAKENPQKEKPQRAAIYLRVSTSYQADRDSLPMQRKDLVGYCEYALNISDYTVFEDAGYSGKNTDRPAFQKMMMQIRNGMYSHLLVWKIDRISRNLLDFAQMYEELKTLGVTFISRNEQFDTSTAMGEAMLKMVLIFAELERKTTAERVTATMISRANDGTWNGGRVPFGYDYNKETQTFSINGNESYIVLQMYDLYEKTDSLVRTARELNDLGYVSRQHNPFSPVSVWIILRNPWYVGTYRYNYYKIPGRRAIKDESEWVVIENHHSPLVSKERFDRVQKMLDSNARYRNTPGRKAMQKNVNIFSGLLWCASCGSAFTASPGKLHASGYRSSKYGCPNVRKIKTCNAKYTSDTVIGEFLLNFILNVLNAQKAFDKIETPADLEKRLLRGAAFENVAGIDSASVAALYEMLSNFSPADSIFLKKPEVKKNLDPELRKLRADKRKAERAVARLDHIYLYSNKQMSDKEYLIKKNDLMTDLKELDKSIGLLTSESWAQSLSDDDFLEQASSFIMSQRLQERDYIFFQGLAESTEPSVLRAFFVSVIDSVRLKNGHVETLTFRNGISHTFTYKAI

SEQ ID NO: 24010 - protein, 584 aa, synthetic construct
MRRLPLQHSTLFGYGQAKAPALVRCSAGDNMECSTKPDKENFMLAGVSIPRSLHMGNRPEGSVIMPRKKSTAADAPRLVAYYRYSGGSRQTEQSIEGQRRDCEAYARAHGMTILREYVDRHISGKTDDRPAFQQLVADSAAHTFDAVICWKTDRLARNRYDSAVYKKRLRDNGVEILYAAESNISGAEGIIIEGLMEALAEYYSAELAEKARRGMRESALKGKALGSSRPLGLTVDADKHYIIEPTGAEAVRYIFEQYAAGLSSSSIVERLNAMGLRTGKGNPFNKSSINRIIQNEMYRGVYVSKKFDVRIEGAIPAIIDNDLWERAQNMFERNRQSRTPHASRADYILSGKLYCGECGCLMKGVCGRSSGNGQMYHYYACPGRSIGRACTRKNIPQDELEAMVVNAVADLLLEPALLEQIADAIVELQQAEAARPDPEKQALEKSLSDVRSKIQNILTAIENGTSSAALSARLADLEQQERTLSYQLSSLTAKKPLTFTRDQILFLLQQFRVSPSERTKAYCRRLVDTFVDHIELTNTELILYFNLSDETIDKNKKAPRSNHSEESSTEKRLVRVARIELTAS

SEQ ID NO: 24011 - protein, 463 aa, synthetic construct
MPSKIERCAIYIRVSTAEQMMHGKSLEAQKQYLTNYAKEHNMTVAGVYADEGKTARKELKKRKAIHSLLEDVKAGKIDVIIFWRIDRWFRNLSDFYKVQEVLDDNNVRWISTSEPGINMETRDGRLQLNVVLSIGQNEVDTTSERIKFVNEASIRQGKLIFGDVNMGYGYKSGIIDGVKRMVKDPDREDTVNAFYRFFFKHHAKGLSMRYIQENYDPDFTWANMRTLLSSEFYKGTYRGIPYCPAYLTESEWNNLQEIQNANVKRAPSGRIYLFSSMINCPICGRRLSARGGSSIINRKTGAKKVYCYYRCNKAFIDHKCTYKHMVSQNLIEQYLIDHLEYEYNKFKIKCEKIEKEQEKKKKVQTPEKLQKELERLNLLFQKGRIEWDYYSKEYDRIENELNELLNTAPELESDYAYLEELLNTDFRTMYYNLTQENRRAFWHSIIREIHLNTDHTVDSVDFL

SEQ ID NO: 24012 - protein, 520 aa, synthetic construct
MPRKKAPAAEAPRLVAYYRYSGGSRQTEQSIEGQRRDCEAYARAHGMTILREYVDRHISGKTDDRPAFQQLVADSAAHTFDAVICWKTDRLARNRYDSAVYKKKLRDNGVEILYAAESNISGAEGIIIEGLMEALAEYYSAELAEKARRGMRESALKGKALGSSRPLGLTVDADKHYIIEPTGAEAVRYIFEQYAAGLSSSSIVERLNAMGLRTSHGGPFNKSSINRIIQNEMYRGVYVSKKFDVRIEGAIPAIIDNDLWKRAQNMFERNRQSRTPHASRADYILSGKLYCGECGCLMKGVCGRSSGNGQMYHYYACPGRSIGRACTRKNIPQDELEAMVVNAVADLLLEPALLEQIADAIVELQQAEAARPDPEKQALEKSLSDVRSKIQNILTAIENGTSSAALSARLADLEQQESTLSYQLSSLTAKKPLTFTRDQILFLLQQFRVSPSERTKAYCRRLVDTFVDHIELTNTELILYFNISDETIDKNKKAPRSNPSKESSTEKRLVRVARIELTAS

SEQ ID NO: 24013 - protein, 525 aa, synthetic construct
MPTERKKKTTKEENAKNNSTKNIIKKPRNSTSNAKSKKESKSLLGLKDLMEDTSPEKVVGCYVRVSTDAQAEQGYSIPDQTAKLQAFCTVKGWENAKFYTDPGFSGSNLNRPAMQEMISDAMEGKLKAVVVFKLDRLSRSQKDTLYLIEDVFLPNEVDFVSISEALDTTTPYGRAMIGILSVFAQLERENIYMRTRIGMMGRVSAGYWRGGGKVPFGYDYDKESKSLIPNADAQKVPQAYDLYIKGYSCQKIADMLGLSCEQLVRNILTKRTYCGYINYKGKDYKGFHEPLIDEERFMLVAAEMERRGKENLAVCGNNKYYLLTGLVFCGDCGARMRYMKWGKYLRIVCYSHTCKKNMVKDPDCPNKGVRAEELEKVVISKLFDIGTDISLDDFDDTHVPASAAEILTNRIDELKESLRRLYGLYADIGDPMVYERIEDVRGQLHVLQRQLASEETQKLKEEHINYVREKIQTIGDLWPHLTPMERQTLVRDCVEKVILHHNGRVEVYYTFHTEKDSKILKRKGA

SEQ ID NO: 24014 - protein, 444 aa, synthetic construct
MKRIIRKLEPAIPKLPRLLRVAAYARVSSGKDAMLHSLSAQVSYYSKLIQNTPSWQYAGVYADEALSGTKDRRREFQRMLADCRAGKVDRIITKSISRFARNTVTTLETVRELSQLGVDVYFEEQNIHTLGAEGEIVLTLLAAYAEEEARSVSANQKWRIEDNFKQGRIWSTTMFGYTIQNGVLTPVPEEAAVIRKVADLYLQGVGRAQLERALAKLGFLSRQGKPLRGAPMIDLICNEKVAGDMLLQKTYVADPITKVEKGNRGERTMYHIEGSHEAILDRETYEKVLAERKRRAALCPPHSGRPTVYPFTGKVLCQNCGKHFRRRIAGYGPYKKPVWICSTFFHKGKAACPAKQIPECILEELAAKAMGLPHFDAAAFAEAVAEIQVPENGVLNFLFRDGHTVHLTWDNPSRRESWTPEMRQQAREASLRRLAEGGDAVCRQ

SEQ ID NO: 24015 - protein, 544 aa, synthetic construct
MQAVRTPKVTVIPAKKDIPLCALSTEAQAKLLRVAAYARVSTDSAEQLTSYRAQVDYYTRYIAGHDGWALVEVYTDEGISGTTIRKREGFQRMIADALAGKIDLIVTKSLSRFARNTVDTLTTVRALKEKGVGVFFEKENIHTLDSKGELLITIMSSLAQEESRSISENVTWGHRKRFADGKIMLAYKNFLGYRKGPDGLPEIVEEEAKIVRQIYRMFLYGKAPNAIARCLTEAGISTPGGKTTWRAKVVESILTNEKYKGDALLQKSVTVDYLQKKIKLNEGEAQQYYVEGSHPAIIQPELFDLVQYEMKRRKADTIQSFSTHPFTSKLFCGECGGRYGSMVEHTADKYRRAVWVCGNKRYHGLKCRTERLLDSEIQTAFLEAFNRILGRRTQIMEAYHEVLGVLTDTTALDADLARLSEESEVVAAMIQKTVDENASTAQDQQEYEQKYTALCERYMDTKRQLDELSDQRAERLAKRTKITMFLEELNAQKDFVTEFDEELWYMTVDRVDVYEHMRLNFTFKDGSTVEVQAKKAAPRSLTAV

SEQ ID NO: 24016 - protein, 469 aa, synthetic construct
MRAGLQIRVSTLEQAIDGYSLAAQEKKLKEYAQFKGYEIVGIYRDDGYSGASLNRPGLRRMMSDIEADKLDIVLIYKQDRLTRSVKDLLNLLDIFDRHNVALYSITENIDLSSPFGRAALKMSATFSELERETIIERSKMGKDQKARQGELMGNGKSPFGYKYDKSIKRFEIVPEEAEIVRNIYSLYIKGMSIRQLNAHCRETYNHPYFGNPMSCKAILHRPMYAGYFQWKGELIKGVNFEPIISYEDYLKVQNILKQNTFRRNRLTSPYLLTGLLLCGECGNRYVGKYKKSCQTNSEGQRIQYGNKYYGCTARIKRDKNYHPAKCTNKLWRVDILDEIIVNAVKNIDFEDIKTVKSPEGLFDSLRAEIADAKNKIDKLLDLYMSDLITREAYEQRLYEYEKKIRQAETVIEQEQIKLGDSPDIPTNYLKEQQLRLDDMTLDEKRLYLKMLIKHIILKQDEIYIEWRIK
